United States Patent Application Publication US 2014/0004565 A1 - sequence listing, part 66

SEQ ID NO: 1595316 - RNA, 19 nt, Artificial Sequence
  Description of Artificial Sequence: Synthetic oligonucleotide
gcgaguguauccagagcca

SEQ ID NO: 1595317 - RNA, 19 nt, Artificial Sequence
  Description of Artificial Sequence: Synthetic oligonucleotide
gcuaggguuuagucugucu

SEQ ID NO: 1595318 - RNA, 19 nt, Artificial Sequence
  Description of Artificial Sequence: Synthetic oligonucleotide
uggcagcuaggagcagaaa

SEQ ID NO: 1595319 - RNA, 19 nt, Artificial Sequence
  Description of Artificial Sequence: Synthetic oligonucleotide
ccacacgcgucagggagag

SEQ ID NO: 1595320 - RNA, 19 nt, Artificial Sequence
  Description of Artificial Sequence: Synthetic oligonucleotide
aagccggacugcaguccau

SEQ ID NO: 1595321 - RNA, 19 nt, Artificial Sequence
  Description of Artificial Sequence: Synthetic oligonucleotide
gccaguagagccccaccua

SEQ ID NO: 1595322 - RNA, 19 nt, Artificial Sequence
  Description of Artificial Sequence: Synthetic oligonucleotide
gcggaaagcuaggguuuag

SEQ ID NO: 1595323 - RNA, 19 nt, Artificial Sequence
  Description of Artificial Sequence: Synthetic oligonucleotide
agccggacugcaguccaua

SEQ ID NO: 1595324 - RNA, 19 nt, Artificial Sequence
  Description of Artificial Sequence: Synthetic oligonucleotide
ggguuuagucugucuacau

SEQ ID NO: 1595325 - RNA, 19 nt, Artificial Sequence
  Description of Artificial Sequence: Synthetic oligonucleotide
cagcgccaucaugauggug

SEQ ID NO: 1595326 - RNA, 19 nt, Artificial Sequence
  Description of Artificial Sequence: Synthetic oligonucleotide
acgguguucccggguccca

SEQ ID NO: 1595327 - RNA, 19 nt, Artificial Sequence
  Description of Artificial Sequence: Synthetic oligonucleotide
acgccaccaccuguacggu

SEQ ID NO: 1595328 - RNA, 19 nt, Artificial Sequence
  Description of Artificial Sequence: Synthetic oligonucleotide
ggauccagacuggccccug

SEQ ID NO: 1595329 - RNA, 19 nt, Artificial Sequence
  Description of Artificial Sequence: Synthetic oligonucleotide
ccauggucccgcaguaaaa

SEQ ID NO: 1595330 - RNA, 19 nt, Artificial Sequence
  Description of Artificial Sequence: Synthetic oligonucleotide
cagccaguagguggcagcu

SEQ ID NO: 1595331 - RNA, 19 nt, Artificial Sequence
  Description of Artificial Sequence: Synthetic oligonucleotide
cagcgcggaaagcuagggu

SEQ ID NO: 1595332 - RNA, 19 nt, Artificial Sequence
  Description of Artificial Sequence: Synthetic oligonucleotide
ccgaggggagccccgccug

SEQ ID NO: 1595333 - RNA, 19 nt, Artificial Sequence
  Description of Artificial Sequence: Synthetic oligonucleotide
ccagacuggccccuggggu

SEQ ID NO: 1595334 - RNA, 19 nt, Artificial Sequence
  Description of Artificial Sequence: Synthetic oligonucleotide
cgcccaugccaguuuuaac

SEQ ID NO: 1595335 - RNA, 19 nt, Artificial Sequence
  Description of Artificial Sequence: Synthetic oligonucleotide
gcgcccaugccaguuuuaa

SEQ ID NO: 1595336 - RNA, 19 nt, Artificial Sequence
  Description of Artificial Sequence: Synthetic oligonucleotide
gggugccaacuggcuacag

SEQ ID NO: 1595337 - RNA, 19 nt, Artificial Sequence
  Description of Artificial Sequence: Synthetic oligonucleotide
ccccaaggcgaagcugcag

SEQ ID NO: 1595338 - RNA, 19 nt, Artificial Sequence
  Description of Artificial Sequence: Synthetic oligonucleotide
gcgcccaagccacuccaua

SEQ ID NO: 1595339 - RNA, 19 nt, Artificial Sequence
  Description of Artificial Sequence: Synthetic oligonucleotide
ccaacuggcuacagugcau

SEQ ID NO: 1595340 - RNA, 19 nt, Artificial Sequence
  Description of Artificial Sequence: Synthetic oligonucleotide
guggcgcccaugccaguuu

SEQ ID NO: 1595341 - RNA, 19 nt, Artificial Sequence
  Description of Artificial Sequence: Synthetic oligonucleotide
cugccagugucuggccagu

SEQ ID NO: 1595342 - RNA, 19 nt, Artificial Sequence
  Description of Artificial Sequence: Synthetic oligonucleotide
ccacuccauagacccaagu

SEQ ID NO: 1595343 - RNA, 19 nt, Artificial Sequence
  Description of Artificial Sequence: Synthetic oligonucleotide
gcgcggaaagcuaggguuu

SEQ ID NO: 1595344 - RNA, 19 nt, Artificial Sequence
  Description of Artificial Sequence: Synthetic oligonucleotide
gcgcagccagcaguccaca

SEQ ID NO: 1595345 - RNA, 19 nt, Artificial Sequence
  Description of Artificial Sequence: Synthetic oligonucleotide
cggaaagcuaggguuuagu

SEQ ID NO: 1595346 - RNA, 19 nt, Artificial Sequence
  Description of Artificial Sequence: Synthetic oligonucleotide
cacacgcgucagggagaga

SEQ ID NO: 1595347 - RNA, 19 nt, Artificial Sequence
  Description of Artificial Sequence: Synthetic oligonucleotide
ggcgcccaugccaguuuua

SEQ ID NO: 1595348 - RNA, 19 nt, Artificial Sequence
  Description of Artificial Sequence: Synthetic oligonucleotide
caguggcgcccaugccagu

SEQ ID NO: 1595349 - RNA, 19 nt, Artificial Sequence
  Description of Artificial Sequence: Synthetic oligonucleotide
gccagcaauggagcagguu

SEQ ID NO: 1595350 - RNA, 19 nt, Artificial Sequence
  Description of Artificial Sequence: Synthetic oligonucleotide
cccgaggggagccccgccu

SEQ ID NO: 1595351 - RNA, 19 nt, Artificial Sequence
  Description of Artificial Sequence: Synthetic oligonucleotide
ggguaccugguagcagcuu

SEQ ID NO: 1595352 - RNA, 19 nt, Artificial Sequence
  Description of Artificial Sequence: Synthetic oligonucleotide
cgcgucagggagagaccau

SEQ ID NO: 1595353 - RNA, 19 nt, Artificial Sequence
  Description of Artificial Sequence: Synthetic oligonucleotide
uuauugaagaccuugaggc

SEQ ID NO: 1595354 - RNA, 19 nt, Artificial Sequence
  Description of Artificial Sequence: Synthetic oligonucleotide
aagaaaugggguuaugugg

SEQ ID NO: 1595355 - RNA, 19 nt, Artificial Sequence
  Description of Artificial Sequence: Synthetic oligonucleotide
aaagagucaggguaggugg

SEQ ID NO: 1595356 - RNA, 19 nt, Artificial Sequence
  Description of Artificial Sequence: Synthetic oligonucleotide
ugaguuagaaccuugucca

SEQ ID NO: 1595357 - RNA, 19 nt, Artificial Sequence
  Description of Artificial Sequence: Synthetic oligonucleotide
ucuaugaggacacuccuag

SEQ ID NO: 1595358 - RNA, 19 nt, Artificial Sequence
  Description of Artificial Sequence: Synthetic oligonucleotide
guuauugaagaccuugagg

SEQ ID NO: 1595359 - RNA, 19 nt, Artificial Sequence
  Description of Artificial Sequence: Synthetic oligonucleotide
aaccuauuccuauuauugg

SEQ ID NO: 1595360 - RNA, 19 nt, Artificial Sequence
  Description of Artificial Sequence: Synthetic oligonucleotide
uacauuugaaagaagccca

SEQ ID NO: 1595361 - RNA, 19 nt, Artificial Sequence
  Description of Artificial Sequence: Synthetic oligonucleotide
uuacauuugaaagaagccc

SEQ ID NO: 1595362 - RNA, 19 nt, Artificial Sequence
  Description of Artificial Sequence: Synthetic oligonucleotide
uucgugaugggauugcagg

SEQ ID NO: 1595363 - RNA, 19 nt, Artificial Sequence
  Description of Artificial Sequence: Synthetic oligonucleotide
uaaugguacggguugaugc

SEQ ID NO: 1595364 - RNA, 19 nt, Artificial Sequence
  Description of Artificial Sequence: Synthetic oligonucleotide
aaagccguggugcacugac

SEQ ID NO: 1595365 - RNA, 19 nt, Artificial Sequence
  Description of Artificial Sequence: Synthetic oligonucleotide
uuuucuauuguugaguuuc

SEQ ID NO: 1595366 - RNA, 19 nt, Artificial Sequence
  Description of Artificial Sequence: Synthetic oligonucleotide
auaguugcaauuccggcuc

SEQ ID NO: 1595367 - RNA, 19 nt, Artificial Sequence
  Description of Artificial Sequence: Synthetic oligonucleotide
ucguacacaacuucaaagc

SEQ ID NO: 1595368 - RNA, 19 nt, Artificial Sequence
  Description of Artificial Sequence: Synthetic oligonucleotide
gaaccuauuccuauuauug

SEQ ID NO: 1595369 - RNA, 19 nt, Artificial Sequence
  Description of Artificial Sequence: Synthetic oligonucleotide
auuccuauuauuggaaggg

SEQ ID NO: 1595370 - RNA, 19 nt, Artificial Sequence
  Description of Artificial Sequence: Synthetic oligonucleotide
gaugacauggggcagcccc

SEQ ID NO: 1595371 - RNA, 19 nt, Artificial Sequence
  Description of Artificial Sequence: Synthetic oligonucleotide
ugugcagggaggcacuucg

SEQ ID NO: 1595372 - RNA, 19 nt, Artificial Sequence
  Description of Artificial Sequence: Synthetic oligonucleotide
aggaugaggccuuucaagg

SEQ ID NO: 1595373 - RNA, 19 nt, Artificial Sequence
  Description of Artificial Sequence: Synthetic oligonucleotide
aaugguacggguugaugca

SEQ ID NO: 1595374 - RNA, 19 nt, Artificial Sequence
  Description of Artificial Sequence: Synthetic oligonucleotide
uguugauaguugcaauucc

SEQ ID NO: 1595375 - RNA, 19 nt, Artificial Sequence
  Description of Artificial Sequence: Synthetic oligonucleotide
gaaauggacugucugacuc

SEQ ID NO: 1595376 - RNA, 19 nt, Artificial Sequence
  Description of Artificial Sequence: Synthetic oligonucleotide
aauggagcaccagugcugg

SEQ ID NO: 1595377 - RNA, 19 nt, Artificial Sequence
  Description of Artificial Sequence: Synthetic oligonucleotide
cucguacacaacuucaaag

SEQ ID NO: 1595378 - RNA, 19 nt, Artificial Sequence
  Description of Artificial Sequence: Synthetic oligonucleotide
aagcucauccgaaucgugc

SEQ ID NO: 1595379 - RNA, 19 nt, Artificial Sequence
  Description of Artificial Sequence: Synthetic oligonucleotide
guuagaaccuuguccaacc

SEQ ID NO: 1595380 - RNA, 19 nt, Artificial Sequence
  Description of Artificial Sequence: Synthetic oligonucleotide
ugauaguugcaauuccggc

SEQ ID NO: 1595381 - RNA, 19 nt, Artificial Sequence
  Description of Artificial Sequence: Synthetic oligonucleotide
uguugaguuucuauuuaca

SEQ ID NO: 1595382 - RNA, 19 nt, Artificial Sequence
  Description of Artificial Sequence: Synthetic oligonucleotide
aaggggaacucacagcacu

SEQ ID NO: 1595383 - RNA, 19 nt, Artificial Sequence
  Description of Artificial Sequence: Synthetic oligonucleotide
auccgaaucgugcacaucu

SEQ ID NO: 1595384 - RNA, 19 nt, Artificial Sequence
  Description of Artificial Sequence: Synthetic oligonucleotide
acgaagcucauccgaaucg

SEQ ID NO: 1595385 - RNA, 19 nt, Artificial Sequence
  Description of Artificial Sequence: Synthetic oligonucleotide
ucuauuguugaguuucuau

SEQ ID NO: 1595386 - RNA, 19 nt, Artificial Sequence
  Description of Artificial Sequence: Synthetic oligonucleotide
gacgaugauacucggcucc

SEQ ID NO: 1595387 - RNA, 19 nt, Artificial Sequence
  Description of Artificial Sequence: Synthetic oligonucleotide
acucgcugugucuugguac

SEQ ID NO: 1595388 - RNA, 19 nt, Artificial Sequence
  Description of Artificial Sequence: Synthetic oligonucleotide
auguugauaguugcaauuc

SEQ ID NO: 1595389 - RNA, 19 nt, Artificial Sequence
  Description of Artificial Sequence: Synthetic oligonucleotide
ugaagaaaugggguuaugu

SEQ ID NO: 1595390 - RNA, 19 nt, Artificial Sequence
  Description of Artificial Sequence: Synthetic oligonucleotide
cugcuuugagccaaagggg

SEQ ID NO: 1595391 - RNA, 19 nt, Artificial Sequence
  Description of Artificial Sequence: Synthetic oligonucleotide
aguguugaaauggacuguc

SEQ ID NO: 1595392 - RNA, 19 nt, Artificial Sequence
  Description of Artificial Sequence: Synthetic oligonucleotide
aguguggauagcugguggg

SEQ ID NO: 1595393 - RNA, 19 nt, Artificial Sequence
  Description of Artificial Sequence: Synthetic oligonucleotide
cuauuccuauuauuggaag

SEQ ID NO: 1595394 - RNA, 19 nt, Artificial Sequence
  Description of Artificial Sequence: Synthetic oligonucleotide
gaugcagaccuccuucugc

SEQ ID NO: 1595395 - RNA, 19 nt, Artificial Sequence
  Description of Artificial Sequence: Synthetic oligonucleotide
gaaagagucaggguaggug

SEQ ID NO: 1595396 - RNA, 19 nt, Artificial Sequence
  Description of Artificial Sequence: Synthetic oligonucleotide
gaagccaucuaugaggaca

SEQ ID NO: 1595397 - RNA, 19 nt, Artificial Sequence
  Description of Artificial Sequence: Synthetic oligonucleotide
accuauuccuauuauugga

SEQ ID NO: 1595398 - RNA, 19 nt, Artificial Sequence
  Description of Artificial Sequence: Synthetic oligonucleotide
cuggccgaaagucugagug

SEQ ID NO: 1595399 - RNA, 19 nt, Artificial Sequence
  Description of Artificial Sequence: Synthetic oligonucleotide
aguuagaaccuuguccaac

SEQ ID NO: 1595400 - RNA, 19 nt, Artificial Sequence
  Description of Artificial Sequence: Synthetic oligonucleotide
ugguuauugaagaccuuga

SEQ ID NO: 1595401 - RNA, 19 nt, Artificial Sequence
  Description of Artificial Sequence: Synthetic oligonucleotide
uuauguggagagcccaucu

SEQ ID NO: 1595402 - RNA, 19 nt, Artificial Sequence
  Description of Artificial Sequence: Synthetic oligonucleotide
acugcgggaacacguggcc

SEQ ID NO: 1595403 - RNA, 19 nt, Artificial Sequence
  Description of Artificial Sequence: Synthetic oligonucleotide
ucuucgucagcucguacac

SEQ ID NO: 1595404 - RNA, 19 nt, Artificial Sequence
  Description of Artificial Sequence: Synthetic oligonucleotide
aauggacugucugacucag

SEQ ID NO: 1595405 - RNA, 19 nt, Artificial Sequence
  Description of Artificial Sequence: Synthetic oligonucleotide
gauaguugcaauuccggcu

SEQ ID NO: 1595406 - RNA, 19 nt, Artificial Sequence
  Description of Artificial Sequence: Synthetic oligonucleotide
cauaguaggcaauggagca

SEQ ID NO: 1595407 - RNA, 19 nt, Artificial Sequence
  Description of Artificial Sequence: Synthetic oligonucleotide
uugaagaccuugaggcugc

SEQ ID NO: 1595408 - RNA, 19 nt, Artificial Sequence
  Description of Artificial Sequence: Synthetic oligonucleotide
uccuauuauuggaaggguc

SEQ ID NO: 1595409 - RNA, 19 nt, Artificial Sequence
  Description of Artificial Sequence: Synthetic oligonucleotide
uauugaagaccuugaggcu

SEQ ID NO: 1595410 - RNA, 19 nt, Artificial Sequence
  Description of Artificial Sequence: Synthetic oligonucleotide
ugggguuauguggagagcc

SEQ ID NO: 1595411 - RNA, 19 nt, Artificial Sequence
  Description of Artificial Sequence: Synthetic oligonucleotide
ugucugacucagaaggacu

SEQ ID NO: 1595412 - RNA, 19 nt, Artificial Sequence
  Description of Artificial Sequence: Synthetic oligonucleotide
gaacacguggccuggugag

SEQ ID NO: 1595413 - RNA, 19 nt, Artificial Sequence
  Description of Artificial Sequence: Synthetic oligonucleotide
ugcaauuccggcucugaac

SEQ ID NO: 1595414 - RNA, 19 nt, Artificial Sequence
  Description of Artificial Sequence: Synthetic oligonucleotide
agaaaugggguuaugugga

SEQ ID NO: 1595415 - RNA, 19 nt, Artificial Sequence
  Description of Artificial Sequence: Synthetic oligonucleotide
cauugugcggcaugagggg

SEQ ID NO: 1595416 - RNA, 19 nt, Artificial Sequence
  Description of Artificial Sequence: Synthetic oligonucleotide
ugggcaagcaacugggcga

SEQ ID NO: 1595417 - RNA, 19 nt, Artificial Sequence
  Description of Artificial Sequence: Synthetic oligonucleotide
uucgucagcucguacacaa

SEQ ID NO: 1595418 - RNA, 19 nt, Artificial Sequence
  Description of Artificial Sequence: Synthetic oligonucleotide
aucuucgucagcucguaca

SEQ ID NO: 1595419 - RNA, 19 nt, Artificial Sequence
  Description of Artificial Sequence: Synthetic oligonucleotide
acggacagaggaugaggcc

SEQ ID NO: 1595420 - RNA, 19 nt, Artificial Sequence
  Description of Artificial Sequence: Synthetic oligonucleotide
cacggacagaggaugaggc

SEQ ID NO: 1595421 - RNA, 19 nt, Artificial Sequence
  Description of Artificial Sequence: Synthetic oligonucleotide
auaguaggcaauggagcac

SEQ ID NO: 1595422 - RNA, 19 nt, Artificial Sequence
  Description of Artificial Sequence: Synthetic oligonucleotide
cucuagcucauccaucggc

SEQ ID NO: 1595423 - RNA, 19 nt, Artificial Sequence
  Description of Artificial Sequence: Synthetic oligonucleotide
ugcggugggacaccuguag

SEQ ID NO: 1595424 - RNA, 19 nt, Artificial Sequence
  Description of Artificial Sequence: Synthetic oligonucleotide
ucagcucguacacaacuuc

SEQ ID NO: 1595425 - RNA, 19 nt, Artificial Sequence
  Description of Artificial Sequence: Synthetic oligonucleotide
gaaaugggguuauguggag

SEQ ID NO: 1595426 - RNA, 19 nt, Artificial Sequence
  Description of Artificial Sequence: Synthetic oligonucleotide
gauacucggcuccccaacc

SEQ ID NO: 1595427 - RNA, 19 nt, Artificial Sequence
  Description of Artificial Sequence: Synthetic oligonucleotide
cugguuauugaagaccuug

SEQ ID NO: 1595428 - RNA, 19 nt, Artificial Sequence
  Description of Artificial Sequence: Synthetic oligonucleotide
cauccagggaccuagggga

SEQ ID NO: 1595429 - RNA, 19 nt, Artificial Sequence
  Description of Artificial Sequence: Synthetic oligonucleotide
gcuugugacauccugacga

SEQ ID NO: 1595430 - RNA, 19 nt, Artificial Sequence
  Description of Artificial Sequence: Synthetic oligonucleotide
uuagaaccuuguccaacca

SEQ ID NO: 1595431 - RNA, 19 nt, Artificial Sequence
  Description of Artificial Sequence: Synthetic oligonucleotide
uucuggggaguguggauag

SEQ ID NO: 1595432 - RNA, 19 nt, Artificial Sequence
  Description of Artificial Sequence: Synthetic oligonucleotide
cucagacuccugcacacgg

SEQ ID NO: 1595433 - RNA, 19 nt, Artificial Sequence
  Description of Artificial Sequence: Synthetic oligonucleotide
acgcacuccgcauacaccu

SEQ ID NO: 1595434 - RNA, 19 nt, Artificial Sequence
  Description of Artificial Sequence: Synthetic oligonucleotide
ugggauugcaggucuggcc

SEQ ID NO: 1595435 - RNA, 19 nt, Artificial Sequence
  Description of Artificial Sequence: Synthetic oligonucleotide
cucgcugugucuugguacc

SEQ ID NO: 1595436 - RNA, 19 nt, Artificial Sequence
  Description of Artificial Sequence: Synthetic oligonucleotide
uguacucgcugugucuugg

SEQ ID NO: 1595437 - RNA, 19 nt, Artificial Sequence
  Description of Artificial Sequence: Synthetic oligonucleotide
ugcuugugacauccugacg

SEQ ID NO: 1595438 - RNA, 19 nt, Artificial Sequence
  Description of Artificial Sequence: Synthetic oligonucleotide
auugugcggcaugaggggc

SEQ ID NO: 1595439 - RNA, 19 nt, Artificial Sequence
  Description of Artificial Sequence: Synthetic oligonucleotide
cuauuauuggaagggucag

SEQ ID NO: 1595440 - RNA, 19 nt, Artificial Sequence
  Description of Artificial Sequence: Synthetic oligonucleotide
acgccuggaaagucucucc

SEQ ID NO: 1595441 - RNA, 19 nt, Artificial Sequence
  Description of Artificial Sequence: Synthetic oligonucleotide
cuugcagaguccuggucag

SEQ ID NO: 1595442 - RNA, 19 nt, Artificial Sequence
  Description of Artificial Sequence: Synthetic oligonucleotide
cacacccuuuccaaugugc

SEQ ID NO: 1595443 - RNA, 19 nt, Artificial Sequence
  Description of Artificial Sequence: Synthetic oligonucleotide
agaaccuauuccuauuauu

SEQ ID NO: 1595444 - RNA, 19 nt, Artificial Sequence
  Description of Artificial Sequence: Synthetic oligonucleotide
acuccuagaggacgccugg

SEQ ID NO: 1595445 - RNA, 19 nt, Artificial Sequence
  Description of Artificial Sequence: Synthetic oligonucleotide
auguggagagcccaucuga

SEQ ID NO: 1595446 - RNA, 19 nt, Artificial Sequence
  Description of Artificial Sequence: Synthetic oligonucleotide
ugcacacggacagaggaug

SEQ ID NO: 1595447 - RNA, 19 nt, Artificial Sequence
  Description of Artificial Sequence: Synthetic oligonucleotide
aggacacuccuagaggacg

SEQ ID NO: 1595448 - RNA, 19 nt, Artificial Sequence
  Description of Artificial Sequence: Synthetic oligonucleotide
auccugacgaugauacucg

SEQ ID NO: 1595449 - RNA, 19 nt, Artificial Sequence
  Description of Artificial Sequence: Synthetic oligonucleotide
ugauacucggcuccccaac

SEQ ID NO: 1595450 - RNA, 19 nt, Artificial Sequence
  Description of Artificial Sequence: Synthetic oligonucleotide
ccucguagcaaacuggccg

SEQ ID NO: 1595451 - RNA, 19 nt, Artificial Sequence
  Description of Artificial Sequence: Synthetic oligonucleotide
uccggcucugaacaaagau

SEQ ID NO: 1595452 - RNA, 19 nt, Artificial Sequence
  Description of Artificial Sequence: Synthetic oligonucleotide
cacucggcgguaaugguac

SEQ ID NO: 1595453 - RNA, 19 nt, Artificial Sequence
  Description of Artificial Sequence: Synthetic oligonucleotide
gaugauacucggcucccca

SEQ ID NO: 1595454 - RNA, 19 nt, Artificial Sequence
  Description of Artificial Sequence: Synthetic oligonucleotide
uggugucuccacucggcgg

SEQ ID NO: 1595455 - RNA, 19 nt, Artificial Sequence
  Description of Artificial Sequence: Synthetic oligonucleotide
guuccucguagcaaacugg

SEQ ID NO: 1595456 - RNA, 19 nt, Artificial Sequence
  Description of Artificial Sequence: Synthetic oligonucleotide
agcucauccgaaucgugca

SEQ ID NO: 1595457 - RNA, 19 nt, Artificial Sequence
  Description of Artificial Sequence: Synthetic oligonucleotide
uguggauagcugguggggc

SEQ ID NO: 1595458 - RNA, 19 nt, Artificial Sequence
  Description of Artificial Sequence: Synthetic oligonucleotide
uucaaagccguggugcacu

SEQ ID NO: 1595459 - RNA, 19 nt, Artificial Sequence
  Description of Artificial Sequence: Synthetic oligonucleotide
agacugcgggaacacgugg

SEQ ID NO: 1595460 - RNA, 19 nt, Artificial Sequence
  Description of Artificial Sequence: Synthetic oligonucleotide
ccaucuaugaggacacucc

SEQ ID NO: 1595461 - RNA, 19 nt, Artificial Sequence
  Description of Artificial Sequence: Synthetic oligonucleotide
aggguagguggcauugugc

SEQ ID NO: 1595462 - RNA, 19 nt, Artificial Sequence
  Description of Artificial Sequence: Synthetic oligonucleotide
ggcacuucggaacuuggcc

SEQ ID NO: 1595463 - RNA, 19 nt, Artificial Sequence
  Description of Artificial Sequence: Synthetic oligonucleotide
ggcauugugcggcaugagg

SEQ ID NO: 1595464 - RNA, 19 nt, Artificial Sequence
  Description of Artificial Sequence: Synthetic oligonucleotide
ucgugaugggauugcaggu

SEQ ID NO: 1595465 - RNA, 19 nt, Artificial Sequence
  Description of Artificial Sequence: Synthetic oligonucleotide
cuagcucauccaucggccc

SEQ ID NO: 1595466 - RNA, 19 nt, Artificial Sequence
  Description of Artificial Sequence: Synthetic oligonucleotide
ugggcgaagagcugguuau

SEQ ID NO: 1595467 - RNA, 19 nt, Artificial Sequence
  Description of Artificial Sequence: Synthetic oligonucleotide
gugcauaggaggcagaccu

SEQ ID NO: 1595468 - RNA, 19 nt, Artificial Sequence
  Description of Artificial Sequence: Synthetic oligonucleotide
ugcgggaacacguggccug

SEQ ID NO: 1595469 - RNA, 19 nt, Artificial Sequence
  Description of Artificial Sequence: Synthetic oligonucleotide
uuugagccaaaggggaacu

SEQ ID NO: 1595470 - RNA, 19 nt, Artificial Sequence
  Description of Artificial Sequence: Synthetic oligonucleotide
uccugacgaugauacucgg

SEQ ID NO: 1595471 - RNA, 19 nt, Artificial Sequence
  Description of Artificial Sequence: Synthetic oligonucleotide
augggauugcaggucuggc

SEQ ID NO: 1595472 - RNA, 19 nt, Artificial Sequence
  Description of Artificial Sequence: Synthetic oligonucleotide
gacacugaagaaauggggu

SEQ ID NO: 1595473 - RNA, 19 nt, Artificial Sequence
  Description of Artificial Sequence: Synthetic oligonucleotide
acgaugauacucggcuccc

SEQ ID NO: 1595474 - RNA, 19 nt, Artificial Sequence
  Description of Artificial Sequence: Synthetic oligonucleotide
ugguaccaguacuggaggc

SEQ ID NO: 1595475 - RNA, 19 nt, Artificial Sequence
  Description of Artificial Sequence: Synthetic oligonucleotide
uccucguagcaaacuggcc

SEQ ID NO: 1595476 - RNA, 19 nt, Artificial Sequence
  Description of Artificial Sequence: Synthetic oligonucleotide
acacggacagaggaugagg

SEQ ID NO: 1595477 - RNA, 19 nt, Artificial Sequence
  Description of Artificial Sequence: Synthetic oligonucleotide
aacacguggccuggugagg

SEQ ID NO: 1595478 - RNA, 19 nt, Artificial Sequence
  Description of Artificial Sequence: Synthetic oligonucleotide
uucggaacuuggccaggag

SEQ ID NO: 1595479 - RNA, 19 nt, Artificial Sequence
  Description of Artificial Sequence: Synthetic oligonucleotide
ucaaggcuugcagaguccu

SEQ ID NO: 1595480 - RNA, 19 nt, Artificial Sequence
  Description of Artificial Sequence: Synthetic oligonucleotide
gguuccucguagcaaacug

SEQ ID NO: 1595481 - RNA, 19 nt, Artificial Sequence
  Description of Artificial Sequence: Synthetic oligonucleotide
cuccacucggcgguaaugg

SEQ ID NO: 1595482 - RNA, 19 nt, Artificial Sequence
  Description of Artificial Sequence: Synthetic oligonucleotide
cuaggggauggugacacac

SEQ ID NO: 1595483 - RNA, 19 nt, Artificial Sequence
  Description of Artificial Sequence: Synthetic oligonucleotide
uccugcacacggacagagg

SEQ ID NO: 1595484 - RNA, 19 nt, Artificial Sequence
  Description of Artificial Sequence: Synthetic oligonucleotide
uuccuauuauuggaagggu

SEQ ID NO: 1595485 - RNA, 19 nt, Artificial Sequence
  Description of Artificial Sequence: Synthetic oligonucleotide
aacuggccgaaagucugag

SEQ ID NO: 1595486 - RNA, 19 nt, Artificial Sequence
  Description of Artificial Sequence: Synthetic oligonucleotide
ccuauuauuggaaggguca

SEQ ID NO: 1595487 - RNA, 19 nt, Artificial Sequence
  Description of Artificial Sequence: Synthetic oligonucleotide
uccuagaggacgccuggaa

SEQ ID NO: 1595488 - RNA, 19 nt, Artificial Sequence
  Description of Artificial Sequence: Synthetic oligonucleotide
guggauagcugguggggcc

SEQ ID NO: 1595489 - RNA, 19 nt, Artificial Sequence
  Description of Artificial Sequence: Synthetic oligonucleotide
agaggaugaggccuuucaa

SEQ ID NO: 1595490 - RNA, 19 nt, Artificial Sequence
  Description of Artificial Sequence: Synthetic oligonucleotide
uucaguucgugaugggauu

SEQ ID NO: 1595491 - RNA, 19 nt, Artificial Sequence
  Description of Artificial Sequence: Synthetic oligonucleotide
cugaguguugaaauggacu

SEQ ID NO: 1595492 - RNA, 19 nt, Artificial Sequence
  Description of Artificial Sequence: Synthetic oligonucleotide
gaaccuuguccaaccacug

SEQ ID NO: 1595493 - RNA, 19 nt, Artificial Sequence
  Description of Artificial Sequence: Synthetic oligonucleotide
uaggggauggugacacacu

SEQ ID NO: 1595494 - RNA, 19 nt, Artificial Sequence
  Description of Artificial Sequence: Synthetic oligonucleotide
gaccuugaggcugcagccg

SEQ ID NO: 1595495 - RNA, 19 nt, Artificial Sequence
  Description of Artificial Sequence: Synthetic oligonucleotide
ccaagacagaaccuauucc

SEQ ID NO: 1595496 - RNA, 19 nt, Artificial Sequence
  Description of Artificial Sequence: Synthetic oligonucleotide
uugcaauuccggcucugaa

SEQ ID NO: 1595497 - RNA, 19 nt, Artificial Sequence
  Description of Artificial Sequence: Synthetic oligonucleotide
ugacgaugauacucggcuc

SEQ ID NO: 1595498 - RNA, 19 nt, Artificial Sequence
  Description of Artificial Sequence: Synthetic oligonucleotide
ugaugggauugcaggucug

SEQ ID NO: 1595499 - RNA, 19 nt, Artificial Sequence
  Description of Artificial Sequence: Synthetic oligonucleotide
gacuuucuggggagugugg

SEQ ID NO: 1595500 - RNA, 19 nt, Artificial Sequence
  Description of Artificial Sequence: Synthetic oligonucleotide
cagaaggacuuucugggga

SEQ ID NO: 1595501 - RNA, 19 nt, Artificial Sequence
  Description of Artificial Sequence: Synthetic oligonucleotide
cugucugacucagaaggac

SEQ ID NO: 1595502 - RNA, 19 nt, Artificial Sequence
  Description of Artificial Sequence: Synthetic oligonucleotide
ugguacggguugaugcaga

SEQ ID NO: 1595503 - RNA, 19 nt, Artificial Sequence
  Description of Artificial Sequence: Synthetic oligonucleotide
cagacuccugcacacggac

SEQ ID NO: 1595504 - RNA, 19 nt, Artificial Sequence
  Description of Artificial Sequence: Synthetic oligonucleotide
cacgaagcucauccgaauc

SEQ ID NO: 1595505 - RNA, 19 nt, Artificial Sequence
  Description of Artificial Sequence: Synthetic oligonucleotide
ugaggccuuucaaggcuug

SEQ ID NO: 1595506 - RNA, 19 nt, Artificial Sequence
  Description of Artificial Sequence: Synthetic oligonucleotide
uugugcggcaugaggggcu

SEQ ID NO: 1595507 - RNA, 19 nt, Artificial Sequence
  Description of Artificial Sequence: Synthetic oligonucleotide
ggaugaggccuuucaaggc

SEQ ID NO: 1595508 - RNA, 19 nt, Artificial Sequence
  Description of Artificial Sequence: Synthetic oligonucleotide
ucaaagccguggugcacug

SEQ ID NO: 1595509 - RNA, 19 nt, Artificial Sequence
  Description of Artificial Sequence: Synthetic oligonucleotide
uggccgaaagucugagugu

SEQ ID NO: 1595510 - RNA, 19 nt, Artificial Sequence
  Description of Artificial Sequence: Synthetic oligonucleotide
guaaugguacggguugaug

SEQ ID NO: 1595511 - RNA, 19 nt, Artificial Sequence
  Description of Artificial Sequence: Synthetic oligonucleotide
ggugggacaccuguaggcg

SEQ ID NO: 1595512 - RNA, 19 nt, Artificial Sequence
  Description of Artificial Sequence: Synthetic oligonucleotide
aggcacuucggaacuuggc

SEQ ID NO: 1595513 - RNA, 19 nt, Artificial Sequence
  Description of Artificial Sequence: Synthetic oligonucleotide
auugcaggucuggccagcg

SEQ ID NO: 1595514 - RNA, 19 nt, Artificial Sequence
  Description of Artificial Sequence: Synthetic oligonucleotide
cucguagcaaacuggccga

SEQ ID NO: 1595515 - RNA, 19 nt, Artificial Sequence
  Description of Artificial Sequence: Synthetic oligonucleotide
aucggccccuuucuucuuc

SEQ ID NO: 1595516 - RNA, 19 nt, Artificial Sequence
  Description of Artificial Sequence: Synthetic oligonucleotide
ggcaauggagcaccagugc

SEQ ID NO: 1595517 - RNA, 19 nt, Artificial Sequence
  Description of Artificial Sequence: Synthetic oligonucleotide
ugggacaccuguaggcguc

SEQ ID NO: 1595518 - RNA, 19 nt, Artificial Sequence
  Description of Artificial Sequence: Synthetic oligonucleotide
uuguacucgcugugucuug

SEQ ID NO: 1595519 - RNA, 19 nt, Artificial Sequence
  Description of Artificial Sequence: Synthetic oligonucleotide
gacugcgggaacacguggc

SEQ ID NO: 1595520 - RNA, 19 nt, Artificial Sequence
  Description of Artificial Sequence: Synthetic oligonucleotide
acugaagaaaugggguuau

SEQ ID NO: 1595521 - RNA, 19 nt, Artificial Sequence
  Description of Artificial Sequence: Synthetic oligonucleotide
guucgugaugggauugcag

SEQ ID NO: 1595522 - RNA, 19 nt, Artificial Sequence
  Description of Artificial Sequence: Synthetic oligonucleotide
gcgguaaugguacggguug

SEQ ID NO: 1595523 - RNA, 19 nt, Artificial Sequence
  Description of Artificial Sequence: Synthetic oligonucleotide
gagacugcgggaacacgug

SEQ ID NO: 1595524 - RNA, 19 nt, Artificial Sequence
  Description of Artificial Sequence: Synthetic oligonucleotide
aggcaauggagcaccagug

SEQ ID NO: 1595525 - RNA, 19 nt, Artificial Sequence
  Description of Artificial Sequence: Synthetic oligonucleotide
acacacggcaguagaugac

SEQ ID NO: 1595526 - RNA, 19 nt, Artificial Sequence
  Description of Artificial Sequence: Synthetic oligonucleotide
aaacuggccgaaagucuga

SEQ ID NO: 1595527 - RNA, 19 nt, Artificial Sequence
  Description of Artificial Sequence: Synthetic oligonucleotide
cuugcuaggcuggccuggg

SEQ ID NO: 1595528 - RNA, 19 nt, Artificial Sequence
  Description of Artificial Sequence: Synthetic oligonucleotide
aggggaacucacagcacuc

SEQ ID NO: 1595529 - RNA, 19 nt, Artificial Sequence
  Description of Artificial Sequence: Synthetic oligonucleotide
gauugcaggucuggccagc

SEQ ID NO: 1595530 - RNA, 19 nt, Artificial Sequence
  Description of Artificial Sequence: Synthetic oligonucleotide
augauacucggcuccccaa

SEQ ID NO: 1595531 - RNA, 19 nt, Artificial Sequence
  Description of Artificial Sequence: Synthetic oligonucleotide
ccggcucugaacaaagaug

SEQ ID NO: 1595532 - RNA, 19 nt, Artificial Sequence
  Description of Artificial Sequence: Synthetic oligonucleotide
cucggcgguaaugguacgg

SEQ ID NO: 1595533 - RNA, 19 nt, Artificial Sequence
  Description of Artificial Sequence: Synthetic oligonucleotide
ugaggggcucgcugugcag

SEQ ID NO: 1595534 - RNA, 19 nt, Artificial Sequence
  Description of Artificial Sequence: Synthetic oligonucleotide
gagcccaucugaguuagaa

SEQ ID NO: 1595535 - RNA, 19 nt, Artificial Sequence
  Description of Artificial Sequence: Synthetic oligonucleotide
cccaagacagaaccuauuc

SEQ ID NO: 1595536 - RNA, 19 nt, Artificial Sequence
  Description of Artificial Sequence: Synthetic oligonucleotide
cagcucguacacaacuuca

SEQ ID NO: 1595537 - RNA, 19 nt, Artificial Sequence
  Description of Artificial Sequence: Synthetic oligonucleotide
uccacucggcgguaauggu

SEQ ID NO: 1595538 - RNA, 19 nt, Artificial Sequence
  Description of Artificial Sequence: Synthetic oligonucleotide
gacgccuggaaagucucuc

SEQ ID NO: 1595539 - RNA, 19 nt, Artificial Sequence
  Description of Artificial Sequence: Synthetic oligonucleotide
uugcaggucuggccagcgc

SEQ ID NO: 1595540 - RNA, 19 nt, Artificial Sequence
  Description of Artificial Sequence: Synthetic oligonucleotide
ucgcugugcagggaggcac

SEQ ID NO: 1595541 - RNA, 19 nt, Artificial Sequence
  Description of Artificial Sequence: Synthetic oligonucleotide
guuauguggagagcccauc

SEQ ID NO: 1595542 - RNA, 19 nt, Artificial Sequence
  Description of Artificial Sequence: Synthetic oligonucleotide
gaggacacuccuagaggac

SEQ ID NO: 1595543 - RNA, 19 nt, Artificial Sequence
  Description of Artificial Sequence: Synthetic oligonucleotide
ugacauccugacgaugaua

SEQ ID NO: 1595544 - RNA, 19 nt, Artificial Sequence
  Description of Artificial Sequence: Synthetic oligonucleotide
gugcugggguuccucguag

SEQ ID NO: 1595545 - RNA, 19 nt, Artificial Sequence
  Description of Artificial Sequence: Synthetic oligonucleotide
gacacuccuagaggacgcc

SEQ ID NO: 1595546 - RNA, 19 nt, Artificial Sequence
  Description of Artificial Sequence: Synthetic oligonucleotide
gaagaccuugaggcugcag

SEQ ID NO: 1595547 - RNA, 19 nt, Artificial Sequence
  Description of Artificial Sequence: Synthetic oligonucleotide
uccgaaucgugcacaucuu

SEQ ID NO: 1595548 - RNA, 19 nt, Artificial Sequence
  Description of Artificial Sequence: Synthetic oligonucleotide
aguucgugaugggauugca

SEQ ID NO: 1595549 - RNA, 19 nt, Artificial Sequence
  Description of Artificial Sequence: Synthetic oligonucleotide
ggaccuaggggauggugac

SEQ ID NO: 1595550 - RNA, 19 nt, Artificial Sequence
  Description of Artificial Sequence: Synthetic oligonucleotide
acucggcgguaaugguacg

SEQ ID NO: 1595551 - RNA, 19 nt, Artificial Sequence
  Description of Artificial Sequence: Synthetic oligonucleotide
acuggccgaaagucugagu

SEQ ID NO: 1595552 - RNA, 19 nt, Artificial Sequence
  Description of Artificial Sequence: Synthetic oligonucleotide
ggaacacguggccugguga

SEQ ID NO: 1595553 - RNA, 19 nt, Artificial Sequence
  Description of Artificial Sequence: Synthetic oligonucleotide
acacguggccuggugagga

SEQ ID NO: 1595554 - RNA, 19 nt, Artificial Sequence
  Description of Artificial Sequence: Synthetic oligonucleotide
ccuauuccuauuauuggaa

SEQ ID NO: 1595555 - RNA, 19 nt, Artificial Sequence
  Description of Artificial Sequence: Synthetic oligonucleotide
cacacggacagaggaugag

SEQ ID NO: 1595556 - RNA, 19 nt, Artificial Sequence
  Description of Artificial Sequence: Synthetic oligonucleotide
gucugaguguugaaaugga

SEQ ID NO: 1595557 - RNA, 19 nt, Artificial Sequence
  Description of Artificial Sequence: Synthetic oligonucleotide
gacagaaccuauuccuauu

SEQ ID NO: 1595558 - RNA, 19 nt, Artificial Sequence
  Description of Artificial Sequence: Synthetic oligonucleotide
cuugcggugggacaccugu

SEQ ID NO: 1595559 - RNA, 19 nt, Artificial Sequence
  Description of Artificial Sequence: Synthetic oligonucleotide
ucugacucagaaggacuuu

SEQ ID NO: 1595560 - RNA, 19 nt, Artificial Sequence
  Description of Artificial Sequence: Synthetic oligonucleotide
gccgcuggggaucuugcag

SEQ ID NO: 1595561 - RNA, 19 nt, Artificial Sequence
  Description of Artificial Sequence: Synthetic oligonucleotide
cacacggcaguagaugaca

SEQ ID NO: 1595562 - RNA, 19 nt, Artificial Sequence
  Description of Artificial Sequence: Synthetic oligonucleotide
ggggcuucaguucgugaug

SEQ ID NO: 1595563 - RNA, 19 nt, Artificial Sequence
  Description of Artificial Sequence: Synthetic oligonucleotide
ugcggcaugaggggcucgc

SEQ ID NO: 1595564 - RNA, 19 nt, Artificial Sequence
  Description of Artificial Sequence: Synthetic oligonucleotide
gucgcucacgcacuccgca

SEQ ID NO: 1595565 - RNA, 19 nt, Artificial Sequence
  Description of Artificial Sequence: Synthetic oligonucleotide
guugcaauuccggcucuga

SEQ ID NO: 1595566 - RNA, 19 nt, Artificial Sequence
  Description of Artificial Sequence: Synthetic oligonucleotide
gacauggggcagccccuug

SEQ ID NO: 1595567 - RNA, 19 nt, Artificial Sequence
  Description of Artificial Sequence: Synthetic oligonucleotide
ucggcuccccaacccuuca

SEQ ID NO: 1595568 - RNA, 19 nt, Artificial Sequence
  Description of Artificial Sequence: Synthetic oligonucleotide
guacggguugaugcagacc

SEQ ID NO: 1595569 - RNA, 19 nt, Artificial Sequence
  Description of Artificial Sequence: Synthetic oligonucleotide
ggauugcaggucuggccag

SEQ ID NO: 1595570 - RNA, 19 nt, Artificial Sequence
  Description of Artificial Sequence: Synthetic oligonucleotide
gguacggguugaugcagac

SEQ ID NO: 1595571 - RNA, 19 nt, Artificial Sequence
  Description of Artificial Sequence: Synthetic oligonucleotide
aacugggcgaagagcuggu

SEQ ID NO: 1595572 - RNA, 19 nt, Artificial Sequence
  Description of Artificial Sequence: Synthetic oligonucleotide
caucuucgucagcucguac

SEQ ID NO: 1595573 - RNA, 19 nt, Artificial Sequence
  Description of Artificial Sequence: Synthetic oligonucleotide
uggccuggugaggaaggug

SEQ ID NO: 1595574 - RNA, 19 nt, Artificial Sequence
  Description of Artificial Sequence: Synthetic oligonucleotide
caucuaugaggacacuccu

SEQ ID NO: 1595575 - RNA, 19 nt, Artificial Sequence
  Description of Artificial Sequence: Synthetic oligonucleotide
gguaccaguacuggaggca

SEQ ID NO: 1595576 - RNA, 19 nt, Artificial Sequence
  Description of Artificial Sequence: Synthetic oligonucleotide
agccauguugauaguugca

SEQ ID NO: 1595577 - RNA, 19 nt, Artificial Sequence
  Description of Artificial Sequence: Synthetic oligonucleotide
ucuggggaguguggauagc

SEQ ID NO: 1595578 - RNA, 19 nt, Artificial Sequence
  Description of Artificial Sequence: Synthetic oligonucleotide
agcucguacacaacuucaa

SEQ ID NO: 1595579 - RNA, 19 nt, Artificial Sequence
  Description of Artificial Sequence: Synthetic oligonucleotide
ccagugcugggguuccucg

SEQ ID NO: 1595580 - RNA, 19 nt, Artificial Sequence
  Description of Artificial Sequence: Synthetic oligonucleotide
ugcugucgcucacgcacuc

SEQ ID NO: 1595581 - RNA, 19 nt, Artificial Sequence
  Description of Artificial Sequence: Synthetic oligonucleotide
acguggccuggugaggaag

SEQ ID NO: 1595582 - RNA, 19 nt, Artificial Sequence
  Description of Artificial Sequence: Synthetic oligonucleotide
ggugcauaggaggcagacc

SEQ ID NO: 1595583 - RNA, 19 nt, Artificial Sequence
  Description of Artificial Sequence: Synthetic oligonucleotide
cugaagaaaugggguuaug

SEQ ID NO: 1595584 - RNA, 19 nt, Artificial Sequence
  Description of Artificial Sequence: Synthetic oligonucleotide
agggaccuaggggauggug

SEQ ID NO: 1595585 - RNA, 19 nt, Artificial Sequence
  Description of Artificial Sequence: Synthetic oligonucleotide
guggugcacugacugggca

SEQ ID NO: 1595586 - RNA, 19 nt, Artificial Sequence
  Description of Artificial Sequence: Synthetic oligonucleotide
uugagccaaaggggaacuc

SEQ ID NO: 1595587 - RNA, 19 nt, Artificial Sequence
  Description of Artificial Sequence: Synthetic oligonucleotide
aucuaugaggacacuccua

SEQ ID NO: 1595588 - RNA, 19 nt, Artificial Sequence
  Description of Artificial Sequence: Synthetic oligonucleotide
ggacacuccuagaggacgc

SEQ ID NO: 1595589 - RNA, 19 nt, Artificial Sequence
  Description of Artificial Sequence: Synthetic oligonucleotide
cucggcuccccaacccuuc

SEQ ID NO: 1595590 - RNA, 19 nt, Artificial Sequence
  Description of Artificial Sequence: Synthetic oligonucleotide
ucgcucacgcacuccgcau

SEQ ID NO: 1595591 - RNA, 19 nt, Artificial Sequence
  Description of Artificial Sequence: Synthetic oligonucleotide
agccccuugcggugggaca

SEQ ID NO: 1595592 - RNA, 19 nt, Artificial Sequence
  Description of Artificial Sequence: Synthetic oligonucleotide
gcaauggagcaccagugcu

SEQ ID NO: 1595593 - RNA, 19 nt, Artificial Sequence
  Description of Artificial Sequence: Synthetic oligonucleotide
gccauguugauaguugcaa

SEQ ID NO: 1595594 - RNA, 19 nt, Artificial Sequence
  Description of Artificial Sequence: Synthetic oligonucleotide
gccguggugcacugacugg

SEQ ID NO: 1595595 - RNA, 19 nt, Artificial Sequence
  Description of Artificial Sequence: Synthetic oligonucleotide
ggaggcacuucggaacuug

SEQ ID NO: 1595596 - RNA, 19 nt, Artificial Sequence
  Description of Artificial Sequence: Synthetic oligonucleotide
gggaccuaggggaugguga

SEQ ID NO: 1595597 - RNA, 19 nt, Artificial Sequence
  Description of Artificial Sequence: Synthetic oligonucleotide
agccaaaggggaacucaca

SEQ ID NO: 1595598 - RNA, 19 nt, Artificial Sequence
  Description of Artificial Sequence: Synthetic oligonucleotide
ccguggugcacugacuggg

SEQ ID NO: 1595599 - RNA, 19 nt, Artificial Sequence
  Description of Artificial Sequence: Synthetic oligonucleotide
ggugucuccacucggcggu

SEQ ID NO: 1595600 - RNA, 19 nt, Artificial Sequence
  Description of Artificial Sequence: Synthetic oligonucleotide
ugugcggcaugaggggcuc

SEQ ID NO: 1595601 - RNA, 19 nt, Artificial Sequence
  Description of Artificial Sequence: Synthetic oligonucleotide
gggguuauguggagagccc

SEQ ID NO: 1595602 - RNA, 19 nt, Artificial Sequence
  Description of Artificial Sequence: Synthetic oligonucleotide
gcucauccgaaucgugcac

SEQ ID NO: 1595603 - RNA, 19 nt, Artificial Sequence
  Description of Artificial Sequence: Synthetic oligonucleotide
gggaacacguggccuggug

SEQ ID NO: 1595604 - RNA, 19 nt, Artificial Sequence
  Description of Artificial Sequence: Synthetic oligonucleotide
gccaucuaugaggacacuc

SEQ ID NO: 1595605 - RNA, 19 nt, Artificial Sequence
  Description of Artificial Sequence: Synthetic oligonucleotide
uugcggugggacaccugua

SEQ ID NO: 1595606 - RNA, 19 nt, Artificial Sequence
  Description of Artificial Sequence: Synthetic oligonucleotide
aagccguggugcacugacu

SEQ ID NO: 1595607 - RNA, 19 nt, Artificial Sequence
  Description of Artificial Sequence: Synthetic oligonucleotide
acaucuucgucagcucgua

SEQ ID NO: 1595608 - RNA, 19 nt, Artificial Sequence
  Description of Artificial Sequence: Synthetic oligonucleotide
gcucguacacaacuucaaa

SEQ ID NO: 1595609 - RNA, 19 nt, Artificial Sequence
  Description of Artificial Sequence: Synthetic oligonucleotide
gaggacgccuggaaagucu

SEQ ID NO: 1595610 - RNA, 19 nt, Artificial Sequence
  Description of Artificial Sequence: Synthetic oligonucleotide
cuugugacauccugacgau

SEQ ID NO: 1595611 - RNA, 19 nt, Artificial Sequence
  Description of Artificial Sequence: Synthetic oligonucleotide
aaugugccuccugguguuu

SEQ ID NO: 1595612 - RNA, 19 nt, Artificial Sequence
  Description of Artificial Sequence: Synthetic oligonucleotide
ugcagaccuccuucugcuu

SEQ ID NO: 1595613 - RNA, 19 nt, Artificial Sequence
  Description of Artificial Sequence: Synthetic oligonucleotide
gguuguacucgcugugucu

SEQ ID NO: 1595614 - RNA, 19 nt, Artificial Sequence
  Description of Artificial Sequence: Synthetic oligonucleotide
ugaagaccuugaggcugca

SEQ ID NO: 1595615 - RNA, 19 nt, Artificial Sequence
  Description of Artificial Sequence: Synthetic oligonucleotide
ucguagcaaacuggccgaa

SEQ ID NO: 1595616 - RNA, 19 nt, Artificial Sequence
  Description of Artificial Sequence: Synthetic oligonucleotide
guuguacucgcugugucuu

SEQ ID NO: 1595617 - RNA, 19 nt, Artificial Sequence
  Description of Artificial Sequence: Synthetic oligonucleotide
cauccaucggccccuuucu

SEQ ID NO: 1595618 - RNA, 19 nt, Artificial Sequence
  Description of Artificial Sequence: Synthetic oligonucleotide
gggugcauaggaggcagac

SEQ ID NO: 1595619 - RNA, 19 nt, Artificial Sequence
  Description of Artificial Sequence: Synthetic oligonucleotide
gcucacgcacuccgcauac

SEQ ID NO: 1595620 - RNA, 19 nt, Artificial Sequence
  Description of Artificial Sequence: Synthetic oligonucleotide
cuucggaacuuggccagga

SEQ ID NO: 1595621 - RNA, 19 nt, Artificial Sequence
  Description of Artificial Sequence: Synthetic oligonucleotide
agacuccugcacacggaca

SEQ ID NO: 1595622 - RNA, 19 nt, Artificial Sequence
  Description of Artificial Sequence: Synthetic oligonucleotide
ggguuauguggagagccca

SEQ ID NO: 1595623 - RNA, 19 nt, Artificial Sequence
  Description of Artificial Sequence: Synthetic oligonucleotide
gaccuaggggauggugaca

SEQ ID NO: 1595624 - RNA, 19 nt, Artificial Sequence
  Description of Artificial Sequence: Synthetic oligonucleotide
auccaucggccccuuucuu

SEQ ID NO: 1595625 - RNA, 19 nt, Artificial Sequence
  Description of Artificial Sequence: Synthetic oligonucleotide
ucuucacugcagggcuggu

SEQ ID NO: 1595626 - RNA, 19 nt, Artificial Sequence
  Description of Artificial Sequence: Synthetic oligonucleotide
gcaugaggggcucgcugug

SEQ ID NO: 1595627 - RNA, 19 nt, Artificial Sequence
  Description of Artificial Sequence: Synthetic oligonucleotide
caauuccggcucugaacaa

SEQ ID NO: 1595628 - RNA, 19 nt, Artificial Sequence
  Description of Artificial Sequence: Synthetic oligonucleotide
ggagacugcgggaacacgu

SEQ ID NO: 1595629 - RNA, 19 nt, Artificial Sequence
  Description of Artificial Sequence: Synthetic oligonucleotide
ggcaugaggggcucgcugu

SEQ ID NO: 1595630 - RNA, 19 nt, Artificial Sequence
  Description of Artificial Sequence: Synthetic oligonucleotide
cuuucaaggcuugcagagu

SEQ ID NO: 1595631 - RNA, 19 nt, Artificial Sequence
  Description of Artificial Sequence: Synthetic oligonucleotide
gugggacaccuguaggcgu

SEQ ID NO: 1595632 - RNA, 19 nt, Artificial Sequence
  Description of Artificial Sequence: Synthetic oligonucleotide
acacaacuucaaagccgug

SEQ ID NO: 1595633 - RNA, 19 nt, Artificial Sequence
  Description of Artificial Sequence: Synthetic oligonucleotide
acggccuuuucugcccacu

SEQ ID NO: 1595634 - RNA, 19 nt, Artificial Sequence
  Description of Artificial Sequence: Synthetic oligonucleotide
cacccuuuccaaugugccu

SEQ ID NO: 1595635 - RNA, 19 nt, Artificial Sequence
  Description of Artificial Sequence: Synthetic oligonucleotide
agcgccacacacggcagua

SEQ ID NO: 1595636 - RNA, 19 nt, Artificial Sequence
  Description of Artificial Sequence: Synthetic oligonucleotide
cagaaccuauuccuauuau

SEQ ID NO: 1595637 - RNA, 19 nt, Artificial Sequence
  Description of Artificial Sequence: Synthetic oligonucleotide
caaugugccuccugguguu

SEQ ID NO: 1595638 - RNA, 19 nt, Artificial Sequence
  Description of Artificial Sequence: Synthetic oligonucleotide
ccuagaggacgccuggaaa

SEQ ID NO: 1595639 - RNA, 19 nt, Artificial Sequence
  Description of Artificial Sequence: Synthetic oligonucleotide
cuucgucagcucguacaca

SEQ ID NO: 1595640 - RNA, 19 nt, Artificial Sequence
  Description of Artificial Sequence: Synthetic oligonucleotide
gcagaguccuggucagguc

SEQ ID NO: 1595641 - RNA, 19 nt, Artificial Sequence
  Description of Artificial Sequence: Synthetic oligonucleotide
cuggggaguguggauagcu

SEQ ID NO: 1595642 - RNA, 19 nt, Artificial Sequence
  Description of Artificial Sequence: Synthetic oligonucleotide
gcaacugggcgaagagcug

SEQ ID NO: 1595643 - RNA, 19 nt, Artificial Sequence
  Description of Artificial Sequence: Synthetic oligonucleotide
cagcucagcgcccucucua

SEQ ID NO: 1595644 - RNA, 19 nt, Artificial Sequence
  Description of Artificial Sequence: Synthetic oligonucleotide
gugacauccugacgaugau

SEQ ID NO: 1595645 - RNA, 19 nt, Artificial Sequence
  Description of Artificial Sequence: Synthetic oligonucleotide
cgugaugggauugcagguc

SEQ ID NO: 1595646 - RNA, 19 nt, Artificial Sequence
  Description of Artificial Sequence: Synthetic oligonucleotide
auccagggaccuaggggau

SEQ ID NO: 1595647 - RNA, 19 nt, Artificial Sequence
  Description of Artificial Sequence: Synthetic oligonucleotide
cagccccuugcggugggac

SEQ ID NO: 1595648 - RNA, 19 nt, Artificial Sequence
  Description of Artificial Sequence: Synthetic oligonucleotide
gcgggaacacguggccugg

SEQ ID NO: 1595649 - RNA, 19 nt, Artificial Sequence
  Description of Artificial Sequence: Synthetic oligonucleotide
gcagccgcuggggaucuug

SEQ ID NO: 1595650 - RNA, 19 nt, Artificial Sequence
  Description of Artificial Sequence: Synthetic oligonucleotide
agccaucuaugaggacacu

SEQ ID NO: 1595651 - RNA, 19 nt, Artificial Sequence
  Description of Artificial Sequence: Synthetic oligonucleotide
gccgaaagucugaguguug

SEQ ID NO: 1595652 - RNA, 19 nt, Artificial Sequence
  Description of Artificial Sequence: Synthetic oligonucleotide
cugcacacggacagaggau

SEQ ID NO: 1595653 - RNA, 19 nt, Artificial Sequence
  Description of Artificial Sequence: Synthetic oligonucleotide
cuccuagaggacgccugga

SEQ ID NO: 1595654 - RNA, 19 nt, Artificial Sequence
  Description of Artificial Sequence: Synthetic oligonucleotide
gucagcucguacacaacuu

SEQ ID NO: 1595655 - RNA, 19 nt, Artificial Sequence
  Description of Artificial Sequence: Synthetic oligonucleotide
gccccuugcggugggacac

SEQ ID NO: 1595656 - RNA, 19 nt, Artificial Sequence
  Description of Artificial Sequence: Synthetic oligonucleotide
acucggcuccccaacccuu

SEQ ID NO: 1595657 - RNA, 19 nt, Artificial Sequence
  Description of Artificial Sequence: Synthetic oligonucleotide
gcugucgcucacgcacucc

SEQ ID NO: 1595658 - RNA, 19 nt, Artificial Sequence
  Description of Artificial Sequence: Synthetic oligonucleotide
gggccuggagacugcggga

SEQ ID NO: 1595659 - RNA, 19 nt, Artificial Sequence
  Description of Artificial Sequence: Synthetic oligonucleotide
cugcugucgcucacgcacu

SEQ ID NO: 1595660 - RNA, 19 nt, Artificial Sequence
  Description of Artificial Sequence: Synthetic oligonucleotide
gcacacggacagaggauga

SEQ ID NO: 1595661 - RNA, 19 nt, Artificial Sequence
  Description of Artificial Sequence: Synthetic oligonucleotide
ggaaagagucaggguaggu

SEQ ID NO: 1595662 - RNA, 19 nt, Artificial Sequence
  Description of Artificial Sequence: Synthetic oligonucleotide
gggaguguggauagcuggu

SEQ ID NO: 1595663 - RNA, 19 nt, Artificial Sequence
  Description of Artificial Sequence: Synthetic oligonucleotide
ccauguugauaguugcaau

SEQ ID NO: 1595664 - RNA, 19 nt, Artificial Sequence
  Description of Artificial Sequence: Synthetic oligonucleotide
gggguuccucguagcaaac

SEQ ID NO: 1595665 - RNA, 19 nt, Artificial Sequence
  Description of Artificial Sequence: Synthetic oligonucleotide
gugcggcaugaggggcucg

SEQ ID NO: 1595666 - RNA, 19 nt, Artificial Sequence
  Description of Artificial Sequence: Synthetic oligonucleotide
ccacucggcgguaauggua

SEQ ID NO: 1595667 - RNA, 19 nt, Artificial Sequence
  Description of Artificial Sequence: Synthetic oligonucleotide
caaagccguggugcacuga

SEQ ID NO: 1595668 - RNA, 19 nt, Artificial Sequence
  Description of Artificial Sequence: Synthetic oligonucleotide
cucacgcacuccgcauaca

SEQ ID NO: 1595669 - RNA, 19 nt, Artificial Sequence
  Description of Artificial Sequence: Synthetic oligonucleotide
cacguggccuggugaggaa

SEQ ID NO: 1595670 - RNA, 19 nt, Artificial Sequence
  Description of Artificial Sequence: Synthetic oligonucleotide
gguaaugguacggguugau

SEQ ID NO: 1595671 - RNA, 19 nt, Artificial Sequence
  Description of Artificial Sequence: Synthetic oligonucleotide
gguuauguggagagcccau

SEQ ID NO: 1595672 - RNA, 19 nt, Artificial Sequence
  Description of Artificial Sequence: Synthetic oligonucleotide
ggcgguaaugguacggguu

SEQ ID NO: 1595673 - RNA, 19 nt, Artificial Sequence
  Description of Artificial Sequence: Synthetic oligonucleotide
ggccgaaagucugaguguu

SEQ ID NO: 1595674 - RNA, 19 nt, Artificial Sequence
  Description of Artificial Sequence: Synthetic oligonucleotide
gugguccaugaagaugaau

SEQ ID NO: 1595675 - RNA, 19 nt, Artificial Sequence
  Description of Artificial Sequence: Synthetic oligonucleotide
cgaugauacucggcucccc

SEQ ID NO: 1595676 - RNA, 19 nt, Artificial Sequence
  Description of Artificial Sequence: Synthetic oligonucleotide
agcgcccucucuagcucau

SEQ ID NO: 1595677 - RNA, 19 nt, Artificial Sequence
  Description of Artificial Sequence: Synthetic oligonucleotide
gggguuguacucgcugugu

SEQ ID NO: 1595678 - RNA, 19 nt, Artificial Sequence
  Description of Artificial Sequence: Synthetic oligonucleotide
gucuccacucggcgguaau

SEQ ID NO: 1595679 - RNA, 19 nt, Artificial Sequence
  Description of Artificial Sequence: Synthetic oligonucleotide
cgcacuccgcauacaccug

SEQ ID NO: 1595680 - RNA, 19 nt, Artificial Sequence
  Description of Artificial Sequence: Synthetic oligonucleotide
cugcgggaacacguggccu

SEQ ID NO: 1595681 - RNA, 19 nt, Artificial Sequence
  Description of Artificial Sequence: Synthetic oligonucleotide
ggcucugaacaaagaugcu

SEQ ID NO: 1595682 - RNA, 19 nt, Artificial Sequence
  Description of Artificial Sequence: Synthetic oligonucleotide
ggguuccucguagcaaacu

SEQ ID NO: 1595683 - RNA, 19 nt, Artificial Sequence
  Description of Artificial Sequence: Synthetic oligonucleotide
ggacagaggaugaggccuu

SEQ ID NO: 1595684 - RNA, 19 nt, Artificial Sequence
  Description of Artificial Sequence: Synthetic oligonucleotide
ggggugcauaggaggcaga

SEQ ID NO: 1595685 - RNA, 19 nt, Artificial Sequence
  Description of Artificial Sequence: Synthetic oligonucleotide
ccaacccgguuguuuaguu

SEQ ID NO: 1595686 - RNA, 19 nt, Artificial Sequence
  Description of Artificial Sequence: Synthetic oligonucleotide
cgguaaugguacggguuga

SEQ ID NO: 1595687 - RNA, 19 nt, Artificial Sequence
  Description of Artificial Sequence: Synthetic oligonucleotide
ccaaagaguccacggccuu

SEQ ID NO: 1595688 - RNA, 19 nt, Artificial Sequence
  Description of Artificial Sequence: Synthetic oligonucleotide
caucggccccuuucuucuu

SEQ ID NO: 1595689 - RNA, 19 nt, Artificial Sequence
  Description of Artificial Sequence: Synthetic oligonucleotide
gcccaagacagaaccuauu

SEQ ID NO: 1595690 - RNA, 19 nt, Artificial Sequence
  Description of Artificial Sequence: Synthetic oligonucleotide
cguagcaaacuggccgaaa

SEQ ID NO: 1595691 - RNA, 19 nt, Artificial Sequence
  Description of Artificial Sequence: Synthetic oligonucleotide
cggcuccccaacccuucac

SEQ ID NO: 1595692 - RNA, 19 nt, Artificial Sequence
  Description of Artificial Sequence: Synthetic oligonucleotide
gggcgaagagcugguuauu

SEQ ID NO: 1595693 - RNA, 19 nt, Artificial Sequence
  Description of Artificial Sequence: Synthetic oligonucleotide
cagggaccuaggggauggu

SEQ ID NO: 1595694 - RNA, 19 nt, Artificial Sequence
  Description of Artificial Sequence: Synthetic oligonucleotide
cggcgguaaugguacgggu

SEQ ID NO: 1595695 - RNA, 19 nt, Artificial Sequence
  Description of Artificial Sequence: Synthetic oligonucleotide
gcugugcagggaggcacuu

SEQ ID NO: 1595696 - RNA, 19 nt, Artificial Sequence
  Description of Artificial Sequence: Synthetic oligonucleotide
gcggcaugaggggcucgcu

SEQ ID NO: 1595697 - RNA, 19 nt, Artificial Sequence
  Description of Artificial Sequence: Synthetic oligonucleotide
cgggaacacguggccuggu

SEQ ID NO: 1595698 - RNA, 19 nt, Artificial Sequence
  Description of Artificial Sequence: Synthetic oligonucleotide
aaugaauucagggugaucc

SEQ ID NO: 1595699 - RNA, 19 nt, Artificial Sequence
  Description of Artificial Sequence: Synthetic oligonucleotide
acuauaagcauccagcagg

SEQ ID NO: 1595700 - RNA, 19 nt, Artificial Sequence
  Description of Artificial Sequence: Synthetic oligonucleotide
auuaguuugacucucuguc

SEQ ID NO: 1595701 - RNA, 19 nt, Artificial Sequence
  Description of Artificial Sequence: Synthetic oligonucleotide
aaauaaauggagaaagcac

SEQ ID NO: 1595702 - RNA, 19 nt, Artificial Sequence
  Description of Artificial Sequence: Synthetic oligonucleotide
uaguuuuaaauaaauggag

SEQ ID NO: 1595703 - RNA, 19 nt, Artificial Sequence
  Description of Artificial Sequence: Synthetic oligonucleotide
ucuuuagacacuaauuagc

SEQ ID NO: 1595704 - RNA, 19 nt, Artificial Sequence
  Description of Artificial Sequence: Synthetic oligonucleotide
gaucucuaagacuagaggc

SEQ ID NO: 1595705 - RNA, 19 nt, Artificial Sequence
  Description of Artificial Sequence: Synthetic oligonucleotide
aaagcugauuuucuaacag

SEQ ID NO: 1595706 - RNA, 19 nt, Artificial Sequence
  Description of Artificial Sequence: Synthetic oligonucleotide
ucuauaauuuuacaaagau

SEQ ID NO: 1595707 - RNA, 19 nt, Artificial Sequence
  Description of Artificial Sequence: Synthetic oligonucleotide
aaaaggauaucagacucgg

SEQ ID NO: 1595708 - RNA, 19 nt, Artificial Sequence
  Description of Artificial Sequence: Synthetic oligonucleotide
ugauccuucacuugaacug

SEQ ID NO: 1595709 - RNA, 19 nt, Artificial Sequence
  Description of Artificial Sequence: Synthetic oligonucleotide
auaagcauccagcaggcag

SEQ ID NO: 1595710 - RNA, 19 nt, Artificial Sequence
  Description of Artificial Sequence: Synthetic oligonucleotide
uaccacauuaguuugacuc

SEQ ID NO: 1595711 - RNA, 19 nt, Artificial Sequence
  Description of Artificial Sequence: Synthetic oligonucleotide
ugaacuguacacaaggaua

SEQ ID NO: 1595712 - RNA, 19 nt, Artificial Sequence
  Description of Artificial Sequence: Synthetic oligonucleotide
uuucuuucgaucucgggca

SEQ ID NO: 1595713 - RNA, 19 nt, Artificial Sequence
  Description of Artificial Sequence: Synthetic oligonucleotide
aagaauggucuauaccaag

SEQ ID NO: 1595714 - RNA, 19 nt, Artificial Sequence
  Description of Artificial Sequence: Synthetic oligonucleotide
auagaagcaguacuuucgg

SEQ ID NO: 1595715 - RNA, 19 nt, Artificial Sequence
  Description of Artificial Sequence: Synthetic oligonucleotide
aaagcgaaugaguucauua

SEQ ID NO: 1595716 - RNA, 19 nt, Artificial Sequence
  Description of Artificial Sequence: Synthetic oligonucleotide
uuacauaguaaauuucuau

SEQ ID NO: 1595717 - RNA, 19 nt, Artificial Sequence
  Description of Artificial Sequence: Synthetic oligonucleotide
uaagacuagaggcuuggug

SEQ ID NO: 1595718 - RNA, 19 nt, Artificial Sequence
  Description of Artificial Sequence: Synthetic oligonucleotide
acagucacuauaagcaucc

SEQ ID NO: 1595719 - RNA, 19 nt, Artificial Sequence
  Description of Artificial Sequence: Synthetic oligonucleotide
ugguucucaauuacaaggc

SEQ ID NO: 1595720 - RNA, 19 nt, Artificial Sequence
  Description of Artificial Sequence: Synthetic oligonucleotide
cagaaguuacacuagcaag

SEQ ID NO: 1595721 - RNA, 19 nt, Artificial Sequence
  Description of Artificial Sequence: Synthetic oligonucleotide
ucaaggauuuacauaguaa

SEQ ID NO: 1595722 - RNA, 19 nt, Artificial Sequence
  Description of Artificial Sequence: Synthetic oligonucleotide
gucacuauaagcauccagc

SEQ ID NO: 1595723 - RNA, 19 nt, Artificial Sequence
  Description of Artificial Sequence: Synthetic oligonucleotide
uaaggaacuagguccuggg

SEQ ID NO: 1595724 - RNA, 19 nt, Artificial Sequence
  Description of Artificial Sequence: Synthetic oligonucleotide
uacauggucaaagcgaaug

SEQ ID NO: 1595725 - RNA, 19 nt, Artificial Sequence
  Description of Artificial Sequence: Synthetic oligonucleotide
ucacuauaagcauccagca

SEQ ID NO: 1595726 - RNA, 19 nt, Artificial Sequence
  Description of Artificial Sequence: Synthetic oligonucleotide
aagaugguuucagacagug

SEQ ID NO: 1595727 - RNA, 19 nt, Artificial Sequence
  Description of Artificial Sequence: Synthetic oligonucleotide
gaauggucuauaccaagug

SEQ ID NO: 1595728 - RNA, 19 nt, Artificial Sequence
  Description of Artificial Sequence: Synthetic oligonucleotide
uugaacuguacacaaggau

SEQ ID NO: 1595729 - RNA, 19 nt, Artificial Sequence
  Description of Artificial Sequence: Synthetic oligonucleotide
augagguccccacugacag

SEQ ID NO: 1595730 - RNA, 19 nt, Artificial Sequence
  Description of Artificial Sequence: Synthetic oligonucleotide
uccucaauuuucacuacca

SEQ ID NO: 1595731 - RNA, 19 nt, Artificial Sequence
  Description of Artificial Sequence: Synthetic oligonucleotide
caagcgaguucuuaacucc

SEQ ID NO: 1595732 - RNA, 19 nt, Artificial Sequence
  Description of Artificial Sequence: Synthetic oligonucleotide
uguuggguagcucuuuaga

SEQ ID NO: 1595733 - RNA, 19 nt, Artificial Sequence
  Description of Artificial Sequence: Synthetic oligonucleotide
guagucagcacauccauuc

SEQ ID NO: 1595734 - RNA, 19 nt, Artificial Sequence
  Description of Artificial Sequence: Synthetic oligonucleotide
uggucuauaccaaguggag

SEQ ID NO: 1595735 - RNA, 19 nt, Artificial Sequence
  Description of Artificial Sequence: Synthetic oligonucleotide
uauaccaaguggagaagac

SEQ ID NO: 1595736 - RNA, 19 nt, Artificial Sequence
  Description of Artificial Sequence: Synthetic oligonucleotide
uucucaauuacaaggccau

SEQ ID NO: 1595737 - RNA, 19 nt, Artificial Sequence
  Description of Artificial Sequence: Synthetic oligonucleotide
agaaguuacacuagcaaga

SEQ ID NO: 1595738 - RNA, 19 nt, Artificial Sequence
  Description of Artificial Sequence: Synthetic oligonucleotide
agucacuauaagcauccag

SEQ ID NO: 1595739 - RNA, 19 nt, Artificial Sequence
  Description of Artificial Sequence: Synthetic oligonucleotide
uuaguuugacucucugucu

SEQ ID NO: 1595740 - RNA, 19 nt, Artificial Sequence
  Description of Artificial Sequence: Synthetic oligonucleotide
uuccucaauuuucacuacc

SEQ ID NO: 1595741 - RNA, 19 nt, Artificial Sequence
  Description of Artificial Sequence: Synthetic oligonucleotide
uucuucacugagacaauga

SEQ ID NO: 1595742 - RNA, 19 nt, Artificial Sequence
  Description of Artificial Sequence: Synthetic oligonucleotide
acuaccacauuaguuugac

SEQ ID NO: 1595743 - RNA, 19 nt, Artificial Sequence
  Description of Artificial Sequence: Synthetic oligonucleotide
uggucaaagcgaaugaguu

SEQ ID NO: 1595744 - RNA, 19 nt, Artificial Sequence
  Description of Artificial Sequence: Synthetic oligonucleotide
agauuggcagacucugggg

SEQ ID NO: 1595745 - RNA, 19 nt, Artificial Sequence
  Description of Artificial Sequence: Synthetic oligonucleotide
agaggcuugguguauacau

SEQ ID NO: 1595746 - RNA, 19 nt, Artificial Sequence
  Description of Artificial Sequence: Synthetic oligonucleotide
caugacaggguccaacuug

SEQ ID NO: 1595747 - RNA, 19 nt, Artificial Sequence
  Description of Artificial Sequence: Synthetic oligonucleotide
ggaucucuaagacuagagg

SEQ ID NO: 1595748 - RNA, 19 nt, Artificial Sequence
  Description of Artificial Sequence: Synthetic oligonucleotide
gacacuaauuagcugggga

SEQ ID NO: 1595749 - RNA, 19 nt, Artificial Sequence
  Description of Artificial Sequence: Synthetic oligonucleotide
ugacaacugggccugcacc

SEQ ID NO: 1595750 - RNA, 19 nt, Artificial Sequence
  Description of Artificial Sequence: Synthetic oligonucleotide
gucaaagcgaaugaguuca

SEQ ID NO: 1595751 - RNA, 19 nt, Artificial Sequence
  Description of Artificial Sequence: Synthetic oligonucleotide
cacugacagagaaagggag

SEQ ID NO: 1595752 - RNA, 19 nt, Artificial Sequence
  Description of Artificial Sequence: Synthetic oligonucleotide
uaguuugacucucugucuc

SEQ ID NO: 1595753 - RNA, 19 nt, Artificial Sequence
  Description of Artificial Sequence: Synthetic oligonucleotide
gucuauaccaaguggagaa

SEQ ID NO: 1595754 - RNA, 19 nt, Artificial Sequence
  Description of Artificial Sequence: Synthetic oligonucleotide
ugcccaaaaggauaucaga

SEQ ID NO: 1595755 - RNA, 19 nt, Artificial Sequence
  Description of Artificial Sequence: Synthetic oligonucleotide
ggaaccaugaguggcagcg

SEQ ID NO: 1595756 - RNA, 19 nt, Artificial Sequence
  Description of Artificial Sequence: Synthetic oligonucleotide
agcaccuuccagaaguuac

SEQ ID NO: 1595757 - RNA, 19 nt, Artificial Sequence
  Description of Artificial Sequence: Synthetic oligonucleotide
acuaauuagcuggggaaag

SEQ ID NO: 1595758 - RNA, 19 nt, Artificial Sequence
  Description of Artificial Sequence: Synthetic oligonucleotide
acacuaauuagcuggggaa

SEQ ID NO: 1595759 - RNA, 19 nt, Artificial Sequence
  Description of Artificial Sequence: Synthetic oligonucleotide
acacuagcaagaagguucc

SEQ ID NO: 1595760 - RNA, 19 nt, Artificial Sequence
  Description of Artificial Sequence: Synthetic oligonucleotide
ccaagaauggucuauacca

SEQ ID NO: 1595761 - RNA, 19 nt, Artificial Sequence
  Description of Artificial Sequence: Synthetic oligonucleotide
acauccauucccaagcgag

SEQ ID NO: 1595762 - RNA, 19 nt, Artificial Sequence
  Description of Artificial Sequence: Synthetic oligonucleotide
guguauacauggucaaagc

SEQ ID NO: 1595763 - RNA, 19 nt, Artificial Sequence
  Description of Artificial Sequence: Synthetic oligonucleotide
accacauuaguuugacucu

SEQ ID NO: 1595764 - RNA, 19 nt, Artificial Sequence
  Description of Artificial Sequence: Synthetic oligonucleotide
agugcugcggacucagcag

SEQ ID NO: 1595765 - RNA, 19 nt, Artificial Sequence
  Description of Artificial Sequence: Synthetic oligonucleotide
uggacuccgucucuggagc

SEQ ID NO: 1595766 - RNA, 19 nt, Artificial Sequence
  Description of Artificial Sequence: Synthetic oligonucleotide
agaagggaucucuaagacu

SEQ ID NO: 1595767 - RNA, 19 nt, Artificial Sequence
  Description of Artificial Sequence: Synthetic oligonucleotide
cauggguaguuuuaaauaa

SEQ ID NO: 1595768 - RNA, 19 nt, Artificial Sequence
  Description of Artificial Sequence: Synthetic oligonucleotide
ucuggggauggacauuuga

SEQ ID NO: 1595769 - RNA, 19 nt, Artificial Sequence
  Description of Artificial Sequence: Synthetic oligonucleotide
agaaggggagcccucauau

SEQ ID NO: 1595770 - RNA, 19 nt, Artificial Sequence
  Description of Artificial Sequence: Synthetic oligonucleotide
ugcgcugcuacucuguuuu

SEQ ID NO: 1595771 - RNA, 19 nt, Artificial Sequence
  Description of Artificial Sequence: Synthetic oligonucleotide
cuggguagaccucugggag

SEQ ID NO: 1595772 - RNA, 19 nt, Artificial Sequence
  Description of Artificial Sequence: Synthetic oligonucleotide
ugauccuccucugaagagc

SEQ ID NO: 1595773 - RNA, 19 nt, Artificial Sequence
  Description of Artificial Sequence: Synthetic oligonucleotide
cagaggugcacguagucug

SEQ ID NO: 1595774 - RNA, 19 nt, Artificial Sequence
  Description of Artificial Sequence: Synthetic oligonucleotide
ucagacucggagucugaag

SEQ ID NO: 1595775 - RNA, 19 nt, Artificial Sequence
  Description of Artificial Sequence: Synthetic oligonucleotide
ggcaguguaauggucaagg

SEQ ID NO: 1595776 - RNA, 19 nt, Artificial Sequence
  Description of Artificial Sequence: Synthetic oligonucleotide
uuggcaaaaguguccuccc

SEQ ID NO: 1595777 - RNA, 19 nt, Artificial Sequence
  Description of Artificial Sequence: Synthetic oligonucleotide
uggggauggacauuugaaa

SEQ ID NO: 1595778 - RNA, 19 nt, Artificial Sequence
  Description of Artificial Sequence: Synthetic oligonucleotide
aguacuuucggggccgccg

SEQ ID NO: 1595779 - RNA, 19 nt, Artificial Sequence
  Description of Artificial Sequence: Synthetic oligonucleotide
aaaaggcccaguguugggu

SEQ ID NO: 1595780 - RNA, 19 nt, Artificial Sequence
  Description of Artificial Sequence: Synthetic oligonucleotide
acauggucaaagcgaauga

SEQ ID NO: 1595781 - RNA, 19 nt, Artificial Sequence
  Description of Artificial Sequence: Synthetic oligonucleotide
auuagcuggggaaagaguu

SEQ ID NO: 1595782 - RNA, 19 nt, Artificial Sequence
  Description of Artificial Sequence: Synthetic oligonucleotide
guaaggaacuagguccugg

SEQ ID NO: 1595783 - RNA, 19 nt, Artificial Sequence
  Description of Artificial Sequence: Synthetic oligonucleotide
cagaagggaucucuaagac

SEQ ID NO: 1595784 - RNA, 19 nt, Artificial Sequence
  Description of Artificial Sequence: Synthetic oligonucleotide
uguccucccaagaaugguc

SEQ ID NO: 1595785 - RNA, 19 nt, Artificial Sequence
  Description of Artificial Sequence: Synthetic oligonucleotide
cacuauaagcauccagcag

SEQ ID NO: 1595786 - RNA, 19 nt, Artificial Sequence
  Description of Artificial Sequence: Synthetic oligonucleotide
aauuagcuggggaaagagu

SEQ ID NO: 1595787 - RNA, 19 nt, Artificial Sequence
  Description of Artificial Sequence: Synthetic oligonucleotide
uuagcuggggaaagaguuc

SEQ ID NO: 1595788 - RNA, 19 nt, Artificial Sequence
  Description of Artificial Sequence: Synthetic oligonucleotide
auuacaaggccaugaguuu

SEQ ID NO: 1595789 - RNA, 19 nt, Artificial Sequence
  Description of Artificial Sequence: Synthetic oligonucleotide
auggucuauaccaagugga

SEQ ID NO: 1595790 - RNA, 19 nt, Artificial Sequence
  Description of Artificial Sequence: Synthetic oligonucleotide
uagcucuuuagacacuaau

SEQ ID NO: 1595791 - RNA, 19 nt, Artificial Sequence
  Description of Artificial Sequence: Synthetic oligonucleotide
ugguuucagacaguggcug

SEQ ID NO: 1595792 - RNA, 19 nt, Artificial Sequence
  Description of Artificial Sequence: Synthetic oligonucleotide
agcgaaugaguucauuaau

SEQ ID NO: 1595793 - RNA, 19 nt, Artificial Sequence
  Description of Artificial Sequence: Synthetic oligonucleotide
aggaacuagguccugggua

SEQ ID NO: 1595794 - RNA, 19 nt, Artificial Sequence
  Description of Artificial Sequence: Synthetic oligonucleotide
cacagucacuauaagcauc

SEQ ID NO: 1595795 - RNA, 19 nt, Artificial Sequence
  Description of Artificial Sequence: Synthetic oligonucleotide
cauggucaaagcgaaugag

SEQ ID NO: 1595796 - RNA, 19 nt, Artificial Sequence
  Description of Artificial Sequence: Synthetic oligonucleotide
uucccuuggacuccgucuc

SEQ ID NO: 1595797 - RNA, 19 nt, Artificial Sequence
  Description of Artificial Sequence: Synthetic oligonucleotide
uucuuucgaucucgggcag

SEQ ID NO: 1595798 - RNA, 19 nt, Artificial Sequence
  Description of Artificial Sequence: Synthetic oligonucleotide
ggugcacguagucugagug

SEQ ID NO: 1595799 - RNA, 19 nt, Artificial Sequence
  Description of Artificial Sequence: Synthetic oligonucleotide
ucuugauccuucacuugaa

SEQ ID NO: 1595800 - RNA, 19 nt, Artificial Sequence
  Description of Artificial Sequence: Synthetic oligonucleotide
agaauggucuauaccaagu

SEQ ID NO: 1595801 - RNA, 19 nt, Artificial Sequence
  Description of Artificial Sequence: Synthetic oligonucleotide
ggaaaaggcccaguguugg

SEQ ID NO: 1595802 - RNA, 19 nt, Artificial Sequence
  Description of Artificial Sequence: Synthetic oligonucleotide
augaauucagggugauccu

SEQ ID NO: 1595803 - RNA, 19 nt, Artificial Sequence
  Description of Artificial Sequence: Synthetic oligonucleotide
gaggcugguaaggaacuag

SEQ ID NO: 1595804 - RNA, 19 nt, Artificial Sequence
  Description of Artificial Sequence: Synthetic oligonucleotide
cuugauccuucacuugaac

SEQ ID NO: 1595805 - RNA, 19 nt, Artificial Sequence
  Description of Artificial Sequence: Synthetic oligonucleotide
ucgccucggacccugcugc

SEQ ID NO: 1595806 - RNA, 19 nt, Artificial Sequence
  Description of Artificial Sequence: Synthetic oligonucleotide
aauugcauggguaguuuua

SEQ ID NO: 1595807 - RNA, 19 nt, Artificial Sequence
  Description of Artificial Sequence: Synthetic oligonucleotide
ucgaucucgggcagucugc

SEQ ID NO: 1595808 - RNA, 19 nt, Artificial Sequence
  Description of Artificial Sequence: Synthetic oligonucleotide
agaaagcaccuuccagaag

SEQ ID NO: 1595809 - RNA, 19 nt, Artificial Sequence
  Description of Artificial Sequence: Synthetic oligonucleotide
aguuugacucucugucuca

SEQ ID NO: 1595810 - RNA, 19 nt, Artificial Sequence
  Description of Artificial Sequence: Synthetic oligonucleotide
uucccaagcgaguucuuaa

SEQ ID NO: 1595811 - RNA, 19 nt, Artificial Sequence
  Description of Artificial Sequence: Synthetic oligonucleotide
aaaggcccaguguugggua

SEQ ID NO: 1595812 - RNA, 19 nt, Artificial Sequence
  Description of Artificial Sequence: Synthetic oligonucleotide
uauccucuaggcaguguaa

SEQ ID NO: 1595813 - RNA, 19 nt, Artificial Sequence
  Description of Artificial Sequence: Synthetic oligonucleotide
gcucuuuagacacuaauua

SEQ ID NO: 1595814 - RNA, 19 nt, Artificial Sequence
  Description of Artificial Sequence: Synthetic oligonucleotide
agcugagaggugcuuccuc

SEQ ID NO: 1595815 - RNA, 19 nt, Artificial Sequence
  Description of Artificial Sequence: Synthetic oligonucleotide
uccuucacuugaacuguac

SEQ ID NO: 1595816 - RNA, 19 nt, Artificial Sequence
  Description of Artificial Sequence: Synthetic oligonucleotide
gagugcugcggacucagca

SEQ ID NO: 1595817 - RNA, 19 nt, Artificial Sequence
  Description of Artificial Sequence: Synthetic oligonucleotide
cagaaugcccaaaaggaua

SEQ ID NO: 1595818 - RNA, 19 nt, Artificial Sequence
  Description of Artificial Sequence: Synthetic oligonucleotide
uucgccucggacccugcug

SEQ ID NO: 1595819 - RNA, 19 nt, Artificial Sequence
  Description of Artificial Sequence: Synthetic oligonucleotide
agaaugcccaaaaggauau

SEQ ID NO: 1595820 - RNA, 19 nt, Artificial Sequence
  Description of Artificial Sequence: Synthetic oligonucleotide
auggucaaagcgaaugagu

SEQ ID NO: 1595821 - RNA, 19 nt, Artificial Sequence
  Description of Artificial Sequence: Synthetic oligonucleotide
ucccucaaggauuuacaua

SEQ ID NO: 1595822 - RNA, 19 nt, Artificial Sequence
  Description of Artificial Sequence: Synthetic oligonucleotide
gaugcccggcucuggaaug

SEQ ID NO: 1595823 - RNA, 19 nt, Artificial Sequence
  Description of Artificial Sequence: Synthetic oligonucleotide
ucccaagaauggucuauac

SEQ ID NO: 1595824 - RNA, 19 nt, Artificial Sequence
  Description of Artificial Sequence: Synthetic oligonucleotide
agcaagaagguucccucaa

SEQ ID NO: 1595825 - RNA, 19 nt, Artificial Sequence
  Description of Artificial Sequence: Synthetic oligonucleotide
cuagaggcuugguguauac

SEQ ID NO: 1595826 - RNA, 19 nt, Artificial Sequence
  Description of Artificial Sequence: Synthetic oligonucleotide
agguuugagaugcccggcu

SEQ ID NO: 1595827 - RNA, 19 nt, Artificial Sequence
  Description of Artificial Sequence: Synthetic oligonucleotide
auugcauggguaguuuuaa

SEQ ID NO: 1595828 - RNA, 19 nt, Artificial Sequence
  Description of Artificial Sequence: Synthetic oligonucleotide
cucuaagacuagaggcuug

SEQ ID NO: 1595829 - RNA, 19 nt, Artificial Sequence
  Description of Artificial Sequence: Synthetic oligonucleotide
uaggcaguguaauggucaa

SEQ ID NO: 1595830 - RNA, 19 nt, Artificial Sequence
  Description of Artificial Sequence: Synthetic oligonucleotide
aagcgaguucuuaacuccu

SEQ ID NO: 1595831 - RNA, 19 nt, Artificial Sequence
  Description of Artificial Sequence: Synthetic oligonucleotide
gcugaugagguccccacug

SEQ ID NO: 1595832 - RNA, 19 nt, Artificial Sequence
  Description of Artificial Sequence: Synthetic oligonucleotide
caaguggagaagacauguc

SEQ ID NO: 1595833 - RNA, 19 nt, Artificial Sequence
  Description of Artificial Sequence: Synthetic oligonucleotide
gcgaaugaguucauuaaug

SEQ ID NO: 1595834 - RNA, 19 nt, Artificial Sequence
  Description of Artificial Sequence: Synthetic oligonucleotide
caguguaauggucaaggaa

SEQ ID NO: 1595835 - RNA, 19 nt, Artificial Sequence
  Description of Artificial Sequence: Synthetic oligonucleotide
guagucugagugcugcgga

SEQ ID NO: 1595836 - RNA, 19 nt, Artificial Sequence
  Description of Artificial Sequence: Synthetic oligonucleotide
acguagucugagugcugcg

SEQ ID NO: 1595837 - RNA, 19 nt, Artificial Sequence
  Description of Artificial Sequence: Synthetic oligonucleotide
agccuggaaccaugagugg

SEQ ID NO: 1595838 - RNA, 19 nt, Artificial Sequence
  Description of Artificial Sequence: Synthetic oligonucleotide
ggguaguuuuaaauaaaug

SEQ ID NO: 1595839 - RNA, 19 nt, Artificial Sequence
  Description of Artificial Sequence: Synthetic oligonucleotide
ucagggugauccuccucug

SEQ ID NO: 1595840 - RNA, 19 nt, Artificial Sequence
  Description of Artificial Sequence: Synthetic oligonucleotide
uaucagacucggagucuga

SEQ ID NO: 1595841 - RNA, 19 nt, Artificial Sequence
  Description of Artificial Sequence: Synthetic oligonucleotide
agcucuuuagacacuaauu

SEQ ID NO: 1595842 - RNA, 19 nt, Artificial Sequence
  Description of Artificial Sequence: Synthetic oligonucleotide
caaaaguguccucccaaga

SEQ ID NO: 1595843 - RNA, 19 nt, Artificial Sequence
  Description of Artificial Sequence: Synthetic oligonucleotide
cucaaggauuuacauagua

SEQ ID NO: 1595844 - RNA, 19 nt, Artificial Sequence
  Description of Artificial Sequence: Synthetic oligonucleotide
aagggaucucuaagacuag

SEQ ID NO: 1595845 - RNA, 19 nt, Artificial Sequence
  Description of Artificial Sequence: Synthetic oligonucleotide
ggggauggacauuugaaaa

SEQ ID NO: 1595846 - RNA, 19 nt, Artificial Sequence
  Description of Artificial Sequence: Synthetic oligonucleotide
ucggagucugaagagucaa

SEQ ID NO: 1595847 - RNA, 19 nt, Artificial Sequence
  Description of Artificial Sequence: Synthetic oligonucleotide
cccaagaauggucuauacc

SEQ ID NO: 1595848 - RNA, 19 nt, Artificial Sequence
  Description of Artificial Sequence: Synthetic oligonucleotide
uguggcgccccguucgccu

SEQ ID NO: 1595849 - RNA, 19 nt, Artificial Sequence
  Description of Artificial Sequence: Synthetic oligonucleotide
cuuucgaucucgggcaguc

SEQ ID NO: 1595850 - RNA, 19 nt, Artificial Sequence
  Description of Artificial Sequence: Synthetic oligonucleotide
cuggggauggacauuugaa

SEQ ID NO: 1595851 - RNA, 19 nt, Artificial Sequence
  Description of Artificial Sequence: Synthetic oligonucleotide
cugcccgcgagccuggaac

SEQ ID NO: 1595852 - RNA, 19 nt, Artificial Sequence
  Description of Artificial Sequence: Synthetic oligonucleotide
aaaggauaucagacucgga

SEQ ID NO: 1595853 - RNA, 19 nt, Artificial Sequence
  Description of Artificial Sequence: Synthetic oligonucleotide
acuuucggggccgccgugg

SEQ ID NO: 1595854 - RNA, 19 nt, Artificial Sequence
  Description of Artificial Sequence: Synthetic oligonucleotide
cuauccucuaggcagugua

SEQ ID NO: 1595855 - RNA, 19 nt, Artificial Sequence
  Description of Artificial Sequence: Synthetic oligonucleotide
gggaucucuaagacuagag

SEQ ID NO: 1595856 - RNA, 19 nt, Artificial Sequence
  Description of Artificial Sequence: Synthetic oligonucleotide
ucaaagcgaaugaguucau

SEQ ID NO: 1595857 - RNA, 19 nt, Artificial Sequence
  Description of Artificial Sequence: Synthetic oligonucleotide
uggagccucuucaguaguc

SEQ ID NO: 1595858 - RNA, 19 nt, Artificial Sequence
  Description of Artificial Sequence: Synthetic oligonucleotide
gcugauuuucuaacagaag

SEQ ID NO: 1595859 - RNA, 19 nt, Artificial Sequence
  Description of Artificial Sequence: Synthetic oligonucleotide
gcauggguaguuuuaaaua

SEQ ID NO: 1595860 - RNA, 19 nt, Artificial Sequence
  Description of Artificial Sequence: Synthetic oligonucleotide
gaagguucccucaaggauu

SEQ ID NO: 1595861 - RNA, 19 nt, Artificial Sequence
  Description of Artificial Sequence: Synthetic oligonucleotide
augguuucagacaguggcu

SEQ ID NO: 1595862 - RNA, 19 nt, Artificial Sequence
  Description of Artificial Sequence: Synthetic oligonucleotide
gaaggggagcccucauauc

SEQ ID NO: 1595863 - RNA, 19 nt, Artificial Sequence
  Description of Artificial Sequence: Synthetic oligonucleotide
cauuaguuugacucucugu

SEQ ID NO: 1595864 - RNA, 19 nt, Artificial Sequence
  Description of Artificial Sequence: Synthetic oligonucleotide
cugagugcugcggacucag

SEQ ID NO: 1595865 - RNA, 19 nt, Artificial Sequence
  Description of Artificial Sequence: Synthetic oligonucleotide
auggguaguuuuaaauaaa

SEQ ID NO: 1595866 - RNA, 19 nt, Artificial Sequence
  Description of Artificial Sequence: Synthetic oligonucleotide
acucucugucucagaaggg

SEQ ID NO: 1595867 - RNA, 19 nt, Artificial Sequence
  Description of Artificial Sequence: Synthetic oligonucleotide
guccuggguagaccucugg

SEQ ID NO: 1595868 - RNA, 19 nt, Artificial Sequence
  Description of Artificial Sequence: Synthetic oligonucleotide
ugguguauacauggucaaa

SEQ ID NO: 1595869 - RNA, 19 nt, Artificial Sequence
  Description of Artificial Sequence: Synthetic oligonucleotide
acaaugaauucagggugau

SEQ ID NO: 1595870 - RNA, 19 nt, Artificial Sequence
  Description of Artificial Sequence: Synthetic oligonucleotide
acaugacaggguccaacuu

SEQ ID NO: 1595871 - RNA, 19 nt, Artificial Sequence
  Description of Artificial Sequence: Synthetic oligonucleotide
gaaccaugaguggcagcgc

SEQ ID NO: 1595872 - RNA, 19 nt, Artificial Sequence
  Description of Artificial Sequence: Synthetic oligonucleotide
agggaucucuaagacuaga

SEQ ID NO: 1595873 - RNA, 19 nt, Artificial Sequence
  Description of Artificial Sequence: Synthetic oligonucleotide
gacccugcugcccgcgagc

SEQ ID NO: 1595874 - RNA, 19 nt, Artificial Sequence
  Description of Artificial Sequence: Synthetic oligonucleotide
uggcccgauagaagcagua

SEQ ID NO: 1595875 - RNA, 19 nt, Artificial Sequence
  Description of Artificial Sequence: Synthetic oligonucleotide
gaggugcacguagucugag

SEQ ID NO: 1595876 - RNA, 19 nt, Artificial Sequence
  Description of Artificial Sequence: Synthetic oligonucleotide
accaaguggagaagacaug

SEQ ID NO: 1595877 - RNA, 19 nt, Artificial Sequence
  Description of Artificial Sequence: Synthetic oligonucleotide
gcugagaggugcuuccuca

SEQ ID NO: 1595878 - RNA, 19 nt, Artificial Sequence
  Description of Artificial Sequence: Synthetic oligonucleotide
cacuaauuagcuggggaaa

SEQ ID NO: 1595879 - RNA, 19 nt, Artificial Sequence
  Description of Artificial Sequence: Synthetic oligonucleotide
uucuuaacuccugguucuc

SEQ ID NO: 1595880 - RNA, 19 nt, Artificial Sequence
  Description of Artificial Sequence: Synthetic oligonucleotide
aggugcacguagucugagu

SEQ ID NO: 1595881 - RNA, 19 nt, Artificial Sequence
  Description of Artificial Sequence: Synthetic oligonucleotide
ccaacuuguccagaaugcc

SEQ ID NO: 1595882 - RNA, 19 nt, Artificial Sequence
  Description of Artificial Sequence: Synthetic oligonucleotide
uacuuucggggccgccgug

SEQ ID NO: 1595883 - RNA, 19 nt, Artificial Sequence
  Description of Artificial Sequence: Synthetic oligonucleotide
cuuucggggccgccguggc

SEQ ID NO: 1595884 - RNA, 19 nt, Artificial Sequence
  Description of Artificial Sequence: Synthetic oligonucleotide
ccucaauuuucacuaccac

SEQ ID NO: 1595885 - RNA, 19 nt, Artificial Sequence
  Description of Artificial Sequence: Synthetic oligonucleotide
ccggccuuacuccauuucc

SEQ ID NO: 1595886 - RNA, 19 nt, Artificial Sequence
  Description of Artificial Sequence: Synthetic oligonucleotide
guuugagaugcccggcucu

SEQ ID NO: 1595887 - RNA, 19 nt, Artificial Sequence
  Description of Artificial Sequence: Synthetic oligonucleotide
auccucuaggcaguguaau

SEQ ID NO: 1595888 - RNA, 19 nt, Artificial Sequence
  Description of Artificial Sequence: Synthetic oligonucleotide
gguucccucaaggauuuac

SEQ ID NO: 1595889 - RNA, 19 nt, Artificial Sequence
  Description of Artificial Sequence: Synthetic oligonucleotide
gagucaacagugucagaau

SEQ ID NO: 1595890 - RNA, 19 nt, Artificial Sequence
  Description of Artificial Sequence: Synthetic oligonucleotide
caauuacaaggccaugagu

SEQ ID NO: 1595891 - RNA, 19 nt, Artificial Sequence
  Description of Artificial Sequence: Synthetic oligonucleotide
ccagaaguuacacuagcaa

SEQ ID NO: 1595892 - RNA, 19 nt, Artificial Sequence
  Description of Artificial Sequence: Synthetic oligonucleotide
agcgaguucuuaacuccug

SEQ ID NO: 1595893 - RNA, 19 nt, Artificial Sequence
  Description of Artificial Sequence: Synthetic oligonucleotide
uccgggcucaggugcguga

SEQ ID NO: 1595894 - RNA, 19 nt, Artificial Sequence
  Description of Artificial Sequence: Synthetic oligonucleotide
gguuugagaugcccggcuc

SEQ ID NO: 1595895 - RNA, 19 nt, Artificial Sequence
  Description of Artificial Sequence: Synthetic oligonucleotide
ucuuucgaucucgggcagu

SEQ ID NO: 1595896 - RNA, 19 nt, Artificial Sequence
  Description of Artificial Sequence: Synthetic oligonucleotide
ugcuauccucuaggcagug

SEQ ID NO: 1595897 - RNA, 19 nt, Artificial Sequence
  Description of Artificial Sequence: Synthetic oligonucleotide
ggcgcugccgcuugcgagc

SEQ ID NO: 1595898 - RNA, 19 nt, Artificial Sequence
  Description of Artificial Sequence: Synthetic oligonucleotide
auucccaagcgaguucuua

SEQ ID NO: 1595899 - RNA, 19 nt, Artificial Sequence
  Description of Artificial Sequence: Synthetic oligonucleotide
cccucauauccacagucac

SEQ ID NO: 1595900 - RNA, 19 nt, Artificial Sequence
  Description of Artificial Sequence: Synthetic oligonucleotide
ccgcuugcgagccuguggc

SEQ ID NO: 1595901 - RNA, 19 nt, Artificial Sequence
  Description of Artificial Sequence: Synthetic oligonucleotide
acuagaggcuugguguaua

SEQ ID NO: 1595902 - RNA, 19 nt, Artificial Sequence
  Description of Artificial Sequence: Synthetic oligonucleotide
uuucgaucucgggcagucu

SEQ ID NO: 1595903 - RNA, 19 nt, Artificial Sequence
  Description of Artificial Sequence: Synthetic oligonucleotide
gccccguucgccucggacc

SEQ ID NO: 1595904 - RNA, 19 nt, Artificial Sequence
  Description of Artificial Sequence: Synthetic oligonucleotide
gcggacucagcagacccgg

SEQ ID NO: 1595905 - RNA, 19 nt, Artificial Sequence
  Description of Artificial Sequence: Synthetic oligonucleotide
gaaugcccaaaaggauauc

SEQ ID NO: 1595906 - RNA, 19 nt, Artificial Sequence
  Description of Artificial Sequence: Synthetic oligonucleotide
ccuuggacuccgucucugg

SEQ ID NO: 1595907 - RNA, 19 nt, Artificial Sequence
  Description of Artificial Sequence: Synthetic oligonucleotide
ccaugaguggcagcgcccg

SEQ ID NO: 1595908 - RNA, 19 nt, Artificial Sequence
  Description of Artificial Sequence: Synthetic oligonucleotide
agggagaaggggagcccuc

SEQ ID NO: 1595909 - RNA, 19 nt, Artificial Sequence
  Description of Artificial Sequence: Synthetic oligonucleotide
gguagcucuuuagacacua

SEQ ID NO: 1595910 - RNA, 19 nt, Artificial Sequence
  Description of Artificial Sequence: Synthetic oligonucleotide
gcuggcccgauagaagcag

SEQ ID NO: 1595911 - RNA, 19 nt, Artificial Sequence
  Description of Artificial Sequence: Synthetic oligonucleotide
gcuugcgagccuguggcgc

SEQ ID NO: 1595912 - RNA, 19 nt, Artificial Sequence
  Description of Artificial Sequence: Synthetic oligonucleotide
cugagaggugcuuccucaa

SEQ ID NO: 1595913 - RNA, 19 nt, Artificial Sequence
  Description of Artificial Sequence: Synthetic oligonucleotide
ucggacccugcugcccgcg

SEQ ID NO: 1595914 - RNA, 19 nt, Artificial Sequence
  Description of Artificial Sequence: Synthetic oligonucleotide
cauccauucccaagcgagu

SEQ ID NO: 1595915 - RNA, 19 nt, Artificial Sequence
  Description of Artificial Sequence: Synthetic oligonucleotide
gaacuagguccuggguaga

SEQ ID NO: 1595916 - RNA, 19 nt, Artificial Sequence
  Description of Artificial Sequence: Synthetic oligonucleotide
ccuucacuugaacuguaca

SEQ ID NO: 1595917 - RNA, 19 nt, Artificial Sequence
  Description of Artificial Sequence: Synthetic oligonucleotide
ccacauuaguuugacucuc

SEQ ID NO: 1595918 - RNA, 19 nt, Artificial Sequence
  Description of Artificial Sequence: Synthetic oligonucleotide
caguagucagcacauccau

SEQ ID NO: 1595919 - RNA, 19 nt, Artificial Sequence
  Description of Artificial Sequence: Synthetic oligonucleotide
ggacuccgucucuggagcc

SEQ ID NO: 1595920 - RNA, 19 nt, Artificial Sequence
  Description of Artificial Sequence: Synthetic oligonucleotide
cggccuuacuccauuuccc

SEQ ID NO: 1595921 - RNA, 19 nt, Artificial Sequence
  Description of Artificial Sequence: Synthetic oligonucleotide
ucgcucauccgggcuuucu

SEQ ID NO: 1595922 - RNA, 19 nt, Artificial Sequence
  Description of Artificial Sequence: Synthetic oligonucleotide
cucggacccugcugcccgc

SEQ ID NO: 1595923 - RNA, 19 nt, Artificial Sequence
  Description of Artificial Sequence: Synthetic oligonucleotide
guacuuucggggccgccgu

SEQ ID NO: 1595924 - RNA, 19 nt, Artificial Sequence
  Description of Artificial Sequence: Synthetic oligonucleotide
ccccguucgccucggaccc

SEQ ID NO: 1595925 - RNA, 19 nt, Artificial Sequence
  Description of Artificial Sequence: Synthetic oligonucleotide
ggacccugcugcccgcgag

SEQ ID NO: 1595926 - RNA, 19 nt, Artificial Sequence
  Description of Artificial Sequence: Synthetic oligonucleotide
ccaaguggagaagacaugu

SEQ ID NO: 1595927 - RNA, 19 nt, Artificial Sequence
  Description of Artificial Sequence: Synthetic oligonucleotide
ggcccgauagaagcaguac

SEQ ID NO: 1595928 - RNA, 19 nt, Artificial Sequence
  Description of Artificial Sequence: Synthetic oligonucleotide
gcccgauagaagcaguacu

SEQ ID NO: 1595929 - RNA, 19 nt, Artificial Sequence
  Description of Artificial Sequence: Synthetic oligonucleotide
ucgggcagucugcgcugcu

SEQ ID NO: 1595930 - RNA, 19 nt, Artificial Sequence
  Description of Artificial Sequence: Synthetic oligonucleotide
ggccuuacuccauuucccu

SEQ ID NO: 1595931 - RNA, 19 nt, Artificial Sequence
  Description of Artificial Sequence: Synthetic oligonucleotide
cugcuauccucuaggcagu

SEQ ID NO: 1595932 - RNA, 19 nt, Artificial Sequence
  Description of Artificial Sequence: Synthetic oligonucleotide
cuaccacauuaguuugacu

SEQ ID NO: 1595933 - RNA, 19 nt, Artificial Sequence
  Description of Artificial Sequence: Synthetic oligonucleotide
caguacuuucggggccgcc

SEQ ID NO: 1595934 - RNA, 19 nt, Artificial Sequence
  Description of Artificial Sequence: Synthetic oligonucleotide
ccccacugacagagaaagg

SEQ ID NO: 1595935 - RNA, 19 nt, Artificial Sequence
  Description of Artificial Sequence: Synthetic oligonucleotide
cauuaauggcuuccagcuu

SEQ ID NO: 1595936 - RNA, 19 nt, Artificial Sequence
  Description of Artificial Sequence: Synthetic oligonucleotide
ugccgcuugcgagccugug

SEQ ID NO: 1595937 - RNA, 19 nt, Artificial Sequence
  Description of Artificial Sequence: Synthetic oligonucleotide
gcccucauauccacaguca

SEQ ID NO: 1595938 - RNA, 19 nt, Artificial Sequence
  Description of Artificial Sequence: Synthetic oligonucleotide
ugcgagccuguggcgcccc

SEQ ID NO: 1595939 - RNA, 19 nt, Artificial Sequence
  Description of Artificial Sequence: Synthetic oligonucleotide
ccagaaugcccaaaaggau

SEQ ID NO: 1595940 - RNA, 19 nt, Artificial Sequence
  Description of Artificial Sequence: Synthetic oligonucleotide
gacuagaggcuugguguau

SEQ ID NO: 1595941 - RNA, 19 nt, Artificial Sequence
  Description of Artificial Sequence: Synthetic oligonucleotide
gacuccgucucuggagccu

SEQ ID NO: 1595942 - RNA, 19 nt, Artificial Sequence
  Description of Artificial Sequence: Synthetic oligonucleotide
ggcgacgcugccaccacca

SEQ ID NO: 1595943 - RNA, 19 nt, Artificial Sequence
  Description of Artificial Sequence: Synthetic oligonucleotide
cuguggcgccccguucgcc

SEQ ID NO: 1595944 - RNA, 19 nt, Artificial Sequence
  Description of Artificial Sequence: Synthetic oligonucleotide
gaagagcugagaggugcuu

SEQ ID NO: 1595945 - RNA, 19 nt, Artificial Sequence
  Description of Artificial Sequence: Synthetic oligonucleotide
agacccggccaccggccuu

SEQ ID NO: 1595946 - RNA, 19 nt, Artificial Sequence
  Description of Artificial Sequence: Synthetic oligonucleotide
ugcccggcucuggaaugaa

SEQ ID NO: 1595947 - RNA, 19 nt, Artificial Sequence
  Description of Artificial Sequence: Synthetic oligonucleotide
ggcucuggaaugaagucuu

SEQ ID NO: 1595948 - RNA, 19 nt, Artificial Sequence
  Description of Artificial Sequence: Synthetic oligonucleotide
uccgucucuggagccucuu

SEQ ID NO: 1595949 - RNA, 19 nt, Artificial Sequence
  Description of Artificial Sequence: Synthetic oligonucleotide
cagucacuauaagcaucca

SEQ ID NO: 1595950 - RNA, 19 nt, Artificial Sequence
  Description of Artificial Sequence: Synthetic oligonucleotide
cccgauagaagcaguacuu

SEQ ID NO: 1595951 - RNA, 19 nt, Artificial Sequence
  Description of Artificial Sequence: Synthetic oligonucleotide
cuaagacuagaggcuuggu

SEQ ID NO: 1595952 - RNA, 19 nt, Artificial Sequence
  Description of Artificial Sequence: Synthetic oligonucleotide
cggagucugaagagucaac

SEQ ID NO: 1595953 - RNA, 19 nt, Artificial Sequence
  Description of Artificial Sequence: Synthetic oligonucleotide
ccuguggcgccccguucgc

SEQ ID NO: 1595954 - RNA, 19 nt, Artificial Sequence
  Description of Artificial Sequence: Synthetic oligonucleotide
cccggcucuggaaugaagu

SEQ ID NO: 1595955 - RNA, 19 nt, Artificial Sequence
  Description of Artificial Sequence: Synthetic oligonucleotide
gguccuggguagaccucug

SEQ ID NO: 1595956 - RNA, 19 nt, Artificial Sequence
  Description of Artificial Sequence: Synthetic oligonucleotide
ggccaccggccuuacucca

SEQ ID NO: 1595957 - RNA, 19 nt, Artificial Sequence
  Description of Artificial Sequence: Synthetic oligonucleotide
cuggcccgauagaagcagu

SEQ ID NO: 1595958 - RNA, 19 nt, Artificial Sequence
  Description of Artificial Sequence: Synthetic oligonucleotide
gacccggccaccggccuua

SEQ ID NO: 1595959 - RNA, 19 nt, Artificial Sequence
  Description of Artificial Sequence: Synthetic oligonucleotide
cgagccuggaaccaugagu

SEQ ID NO: 1595960 - RNA, 19 nt, Artificial Sequence
  Description of Artificial Sequence: Synthetic oligonucleotide
guucgccucggacccugcu

SEQ ID NO: 1595961 - RNA, 19 nt, Artificial Sequence
  Description of Artificial Sequence: Synthetic oligonucleotide
caaagcgaaugaguucauu

SEQ ID NO: 1595962 - RNA, 19 nt, Artificial Sequence
  Description of Artificial Sequence: Synthetic oligonucleotide
gcaguacuuucggggccgc

SEQ ID NO: 1595963 - RNA, 19 nt, Artificial Sequence
  Description of Artificial Sequence: Synthetic oligonucleotide
gccgcgcucggcgacgcug

SEQ ID NO: 1595964 - RNA, 19 nt, Artificial Sequence
  Description of Artificial Sequence: Synthetic oligonucleotide
ccgcgagccuggaaccaug

SEQ ID NO: 1595965 - RNA, 19 nt, Artificial Sequence
  Description of Artificial Sequence: Synthetic oligonucleotide
cgcuugcgagccuguggcg

SEQ ID NO: 1595966 - RNA, 19 nt, Artificial Sequence
  Description of Artificial Sequence: Synthetic oligonucleotide
cugcugcagaggugcacgu

SEQ ID NO: 1595967 - RNA, 19 nt, Artificial Sequence
  Description of Artificial Sequence: Synthetic oligonucleotide
cgugaggcgcugccgcuug

SEQ ID NO: 1595968 - RNA, 19 nt, Artificial Sequence
  Description of Artificial Sequence: Synthetic oligonucleotide
guggcagcgcccggccguc

SEQ ID NO: 1595969 - RNA, 19 nt, Artificial Sequence
  Description of Artificial Sequence: Synthetic oligonucleotide
ccgucucuggagccucuuc

SEQ ID NO: 1595970 - RNA, 19 nt, Artificial Sequence
  Description of Artificial Sequence: Synthetic oligonucleotide
ggcuugguguauacauggu

SEQ ID NO: 1595971 - RNA, 19 nt, Artificial Sequence
  Description of Artificial Sequence: Synthetic oligonucleotide
ggcagucugcgcugcuacu

SEQ ID NO: 1595972 - RNA, 19 nt, Artificial Sequence
  Description of Artificial Sequence: Synthetic oligonucleotide
cagguuccucugcuauccu

SEQ ID NO: 1595973 - RNA, 19 nt, Artificial Sequence
  Description of Artificial Sequence: Synthetic oligonucleotide
gcgagccuguggcgccccg

SEQ ID NO: 1595974 - RNA, 19 nt, Artificial Sequence
  Description of Artificial Sequence: Synthetic oligonucleotide
ggcgggcuggcccgauaga

SEQ ID NO: 1595975 - RNA, 19 nt, Artificial Sequence
  Description of Artificial Sequence: Synthetic oligonucleotide
cugcgcugcuacucuguuu

SEQ ID NO: 1595976 - RNA, 19 nt, Artificial Sequence
  Description of Artificial Sequence: Synthetic oligonucleotide
ccguucgccucggacccug

SEQ ID NO: 1595977 - RNA, 19 nt, Artificial Sequence
  Description of Artificial Sequence: Synthetic oligonucleotide
cagacccggccaccggccu

SEQ ID NO: 1595978 - RNA, 19 nt, Artificial Sequence
  Description of Artificial Sequence: Synthetic oligonucleotide
ggcgccccguucgccucgg

SEQ ID NO: 1595979 - RNA, 19 nt, Artificial Sequence
  Description of Artificial Sequence: Synthetic oligonucleotide
caguguuggguagcucuuu

SEQ ID NO: 1595980 - RNA, 19 nt, Artificial Sequence
  Description of Artificial Sequence: Synthetic oligonucleotide
gcuauccucuaggcagugu

SEQ ID NO: 1595981 - RNA, 19 nt, Artificial Sequence
  Description of Artificial Sequence: Synthetic oligonucleotide
cgccccguucgccucggac

SEQ ID NO: 1595982 - RNA, 19 nt, Artificial Sequence
  Description of Artificial Sequence: Synthetic oligonucleotide
ccgauagaagcaguacuuu

SEQ ID NO: 1595983 - RNA, 19 nt, Artificial Sequence
  Description of Artificial Sequence: Synthetic oligonucleotide
cgcgagccuggaaccauga

SEQ ID NO: 1595984 - RNA, 19 nt, Artificial Sequence
  Description of Artificial Sequence: Synthetic oligonucleotide
cguucgccucggacccugc

SEQ ID NO: 1595985 - RNA, 19 nt, Artificial Sequence
  Description of Artificial Sequence: Synthetic oligonucleotide
gcugcccgcgagccuggaa

SEQ ID NO: 1595986 - RNA, 19 nt, Artificial Sequence
  Description of Artificial Sequence: Synthetic oligonucleotide
cgccucggacccugcugcc

SEQ ID NO: 1595987 - RNA, 19 nt, Artificial Sequence
  Description of Artificial Sequence: Synthetic oligonucleotide
ggguagcucuuuagacacu

SEQ ID NO: 1595988 - RNA, 19 nt, Artificial Sequence
  Description of Artificial Sequence: Synthetic oligonucleotide
caccggccuuacuccauuu

SEQ ID NO: 1595989 - RNA, 19 nt, Artificial Sequence
  Description of Artificial Sequence: Synthetic oligonucleotide
cugccgcuugcgagccugu

SEQ ID NO: 1595990 - RNA, 19 nt, Artificial Sequence
  Description of Artificial Sequence: Synthetic oligonucleotide
gcccgcgagccuggaacca

SEQ ID NO: 1595991 - RNA, 19 nt, Artificial Sequence
  Description of Artificial Sequence: Synthetic oligonucleotide
ccguggccgcgcucggcga

SEQ ID NO: 1595992 - RNA, 19 nt, Artificial Sequence
  Description of Artificial Sequence: Synthetic oligonucleotide
gcucgcucauccgggcuuu

SEQ ID NO: 1595993 - RNA, 19 nt, Artificial Sequence
  Description of Artificial Sequence: Synthetic oligonucleotide
cccggccguccgcggcggg

SEQ ID NO: 1595994 - RNA, 19 nt, Artificial Sequence
  Description of Artificial Sequence: Synthetic oligonucleotide
ccaccggccuuacuccauu

SEQ ID NO: 1595995 - RNA, 19 nt, Artificial Sequence
  Description of Artificial Sequence: Synthetic oligonucleotide
gcggcgggcuggcccgaua

SEQ ID NO: 1595996 - RNA, 19 nt, Artificial Sequence
  Description of Artificial Sequence: Synthetic oligonucleotide
gcgugaggcgcugccgcuu

SEQ ID NO: 1595997 - RNA, 19 nt, Artificial Sequence
  Description of Artificial Sequence: Synthetic oligonucleotide
cccgcgagccuggaaccau

SEQ ID NO: 1595998 - RNA, 19 nt, Artificial Sequence
  Description of Artificial Sequence: Synthetic oligonucleotide
gcgccccguucgccucgga

SEQ ID NO: 1595999 - RNA, 19 nt, Artificial Sequence
  Description of Artificial Sequence: Synthetic oligonucleotide
cccguucgccucggacccu

SEQ ID NO: 1596000 - RNA, 19 nt, Artificial Sequence
  Description of Artificial Sequence: Synthetic oligonucleotide
cgcggcgggcuggcccgau

SEQ ID NO: 1596001 - RNA, 19 nt, Artificial Sequence
  Description of Artificial Sequence: Synthetic oligonucleotide
aaagccaccacuuaaaccc

SEQ ID NO: 1596002 - RNA, 19 nt, Artificial Sequence
  Description of Artificial Sequence: Synthetic oligonucleotide
uuagucuuuacuaagaggg

SEQ ID NO: 1596003 - RNA, 19 nt, Artificial Sequence
  Description of Artificial Sequence: Synthetic oligonucleotide
aauuucauggcaucaaccg

SEQ ID NO: 1596004 - RNA, 19 nt, Artificial Sequence
  Description of Artificial Sequence: Synthetic oligonucleotide
uuuacucccaauuucaugg

SEQ ID NO: 1596005 - RNA, 19 nt, Artificial Sequence
  Description of Artificial Sequence: Synthetic oligonucleotide
aaucgguucaucuuggccg

SEQ ID NO: 1596006 - RNA, 19 nt, Artificial Sequence
  Description of Artificial Sequence: Synthetic oligonucleotide
cuacauaaaauuuagaguc

SEQ ID NO: 1596007 - RNA, 19 nt, Artificial Sequence
  Description of Artificial Sequence: Synthetic oligonucleotide
auugaauauaaauaaaugu

SEQ ID NO: 1596008 - RNA, 19 nt, Artificial Sequence
  Description of Artificial Sequence: Synthetic oligonucleotide
uugaauauaaauaaauguc

SEQ ID NO: 1596009 - RNA, 19 nt, Artificial Sequence
  Description of Artificial Sequence: Synthetic oligonucleotide
aauaucaagaaauauccau

SEQ ID NO: 1596010 - RNA, 19 nt, Artificial Sequence
  Description of Artificial Sequence: Synthetic oligonucleotide
caggcuauaauacugaggg

SEQ ID NO: 1596011 - RNA, 19 nt, Artificial Sequence
  Description of Artificial Sequence: Synthetic oligonucleotide
uuguaaauccucaaucugg

SEQ ID NO: 1596012 - RNA, 19 nt, Artificial Sequence
  Description of Artificial Sequence: Synthetic oligonucleotide
aagcguacuauccacaguc

SEQ ID NO: 1596013 - RNA, 19 nt, Artificial Sequence
  Description of Artificial Sequence: Synthetic oligonucleotide
aaugagugaaaacaaguca

SEQ ID NO: 1596014 - RNA, 19 nt, Artificial Sequence
  Description of Artificial Sequence: Synthetic oligonucleotide
ugcaaguuuaggaagcugg

SEQ ID NO: 1596015 - RNA, 19 nt, Artificial Sequence
  Description of Artificial Sequence: Synthetic oligonucleotide
aaauuauuguuaaugagug

SEQ ID NO: 1596016 - RNA, 19 nt, Artificial Sequence
  Description of Artificial Sequence: Synthetic oligonucleotide
aaaucuguuuggcaaauug

SEQ ID NO: 1596017 - RNA, 19 nt, Artificial Sequence
  Description of Artificial Sequence: Synthetic oligonucleotide
uaaauccucaaucugguca

SEQ ID NO: 1596018 - RNA, 19 nt, Artificial Sequence
  Description of Artificial Sequence: Synthetic oligonucleotide
uuaaugagugaaaacaagu

SEQ ID NO: 1596019 - RNA, 19 nt, Artificial Sequence
  Description of Artificial Sequence: Synthetic oligonucleotide
aagguugucucgcugcugc

SEQ ID NO: 1596020 - RNA, 19 nt, Artificial Sequence
  Description of Artificial Sequence: Synthetic oligonucleotide
ucaaauuauuguuaaugag

SEQ ID NO: 1596021 - RNA, 19 nt, Artificial Sequence
  Description of Artificial Sequence: Synthetic oligonucleotide
agcaaugaauuucuuaacg

SEQ ID NO: 1596022 - RNA, 19 nt, Artificial Sequence
  Description of Artificial Sequence: Synthetic oligonucleotide
uuugcuuucccgaagaauc

SEQ ID NO: 1596023 - RNA, 19 nt, Artificial Sequence
  Description of Artificial Sequence: Synthetic oligonucleotide
uccauuauucauuacaagu

SEQ ID NO: 1596024 - RNA, 19 nt, Artificial Sequence
  Description of Artificial Sequence: Synthetic oligonucleotide
uccaacauuagacagagua

SEQ ID NO: 1596025 - RNA, 19 nt, Artificial Sequence
  Description of Artificial Sequence: Synthetic oligonucleotide
uucaaauuauuguuaauga

SEQ ID NO: 1596026 - RNA, 19 nt, Artificial Sequence
  Description of Artificial Sequence: Synthetic oligonucleotide
guaagaacuaucuucauca

SEQ ID NO: 1596027 - RNA, 19 nt, Artificial Sequence
  Description of Artificial Sequence: Synthetic oligonucleotide
agaguaaugauuugcucac

SEQ ID NO: 1596028 - RNA, 19 nt, Artificial Sequence
  Description of Artificial Sequence: Synthetic oligonucleotide
aauacugagggaaccaugg

SEQ ID NO: 1596029 - RNA, 19 nt, Artificial Sequence
  Description of Artificial Sequence: Synthetic oligonucleotide
aauaucucuacuuuaucaa

SEQ ID NO: 1596030 - RNA, 19 nt, Artificial Sequence
  Description of Artificial Sequence: Synthetic oligonucleotide
uguccuauacauuaaauau

SEQ ID NO: 1596031 - RNA, 19 nt, Artificial Sequence
  Description of Artificial Sequence: Synthetic oligonucleotide
uucuguuugaccauauucu

SEQ ID NO: 1596032 - RNA, 19 nt, Artificial Sequence
  Description of Artificial Sequence: Synthetic oligonucleotide
aucucauuaauaucucuac

SEQ ID NO: 1596033 - RNA, 19 nt, Artificial Sequence
  Description of Artificial Sequence: Synthetic oligonucleotide
aaauagcaacucaugauac

SEQ ID NO: 1596034 - RNA, 19 nt, Artificial Sequence
  Description of Artificial Sequence: Synthetic oligonucleotide
uuuucuguuagucuuuacu

SEQ ID NO: 1596035 - RNA, 19 nt, Artificial Sequence
  Description of Artificial Sequence: Synthetic oligonucleotide
agaaauauccauuauucau

SEQ ID NO: 1596036 - RNA, 19 nt, Artificial Sequence
  Description of Artificial Sequence: Synthetic oligonucleotide
auauccauuauucauuaca

SEQ ID NO: 1596037 - RNA, 19 nt, Artificial Sequence
  Description of Artificial Sequence: Synthetic oligonucleotide
aguaagaacuaucuucauc

SEQ ID NO: 1596038 - RNA, 19 nt, Artificial Sequence
  Description of Artificial Sequence: Synthetic oligonucleotide
aguguaauuagcuuuuccu

SEQ ID NO: 1596039 - RNA, 19 nt, Artificial Sequence
  Description of Artificial Sequence: Synthetic oligonucleotide
uuaguaaaagaaagcuucc

SEQ ID NO: 1596040 - RNA, 19 nt, Artificial Sequence
  Description of Artificial Sequence: Synthetic oligonucleotide
auagacaaugguuuugaag

SEQ ID NO: 1596041 - RNA, 19 nt, Artificial Sequence
  Description of Artificial Sequence: Synthetic oligonucleotide
uguuagucuuuacuaagag

SEQ ID NO: 1596042 - RNA, 19 nt, Artificial Sequence
  Description of Artificial Sequence: Synthetic oligonucleotide
acuuaaacccaccuauaac

SEQ ID NO: 1596043 - RNA, 19 nt, Artificial Sequence
  Description of Artificial Sequence: Synthetic oligonucleotide
gacugaaugguguaauuag

SEQ ID NO: 1596044 - RNA, 19 nt, Artificial Sequence
  Description of Artificial Sequence: Synthetic oligonucleotide
ucuuguaaauccucaaucu

SEQ ID NO: 1596045 - RNA, 19 nt, Artificial Sequence
  Description of Artificial Sequence: Synthetic oligonucleotide
cuuaaacccaccuauaaca

SEQ ID NO: 1596046 - RNA, 19 nt, Artificial Sequence
  Description of Artificial Sequence: Synthetic oligonucleotide
ucuguuagucuuuacuaag

SEQ ID NO: 1596047 - RNA, 19 nt, Artificial Sequence
  Description of Artificial Sequence: Synthetic oligonucleotide
uuuaucaauguaucaaguc

SEQ ID NO: 1596048 - RNA, 19 nt, Artificial Sequence
  Description of Artificial Sequence: Synthetic oligonucleotide
acauuaaauaucaagaaau

SEQ ID NO: 1596049 - RNA, 19 nt, Artificial Sequence
  Description of Artificial Sequence: Synthetic oligonucleotide
aauauccauuauucauuac

SEQ ID NO: 1596050 - RNA, 19 nt, Artificial Sequence
  Description of Artificial Sequence: Synthetic oligonucleotide
uauucauuacaagucaggc

SEQ ID NO: 1596051 - RNA, 19 nt, Artificial Sequence
  Description of Artificial Sequence: Synthetic oligonucleotide
aaguuuaggaagcuggaau

SEQ ID NO: 1596052 - RNA, 19 nt, Artificial Sequence
  Description of Artificial Sequence: Synthetic oligonucleotide
aacuaucuucaucagccag

SEQ ID NO: 1596053 - RNA, 19 nt, Artificial Sequence
  Description of Artificial Sequence: Synthetic oligonucleotide
uguaauuagcuuuuccuuc

SEQ ID NO: 1596054 - RNA, 19 nt, Artificial Sequence
  Description of Artificial Sequence: Synthetic oligonucleotide
auugggaaauauuuccuag

SEQ ID NO: 1596055 - RNA, 19 nt, Artificial Sequence
  Description of Artificial Sequence: Synthetic oligonucleotide
guuagucuuuacuaagagg

SEQ ID NO: 1596056 - RNA, 19 nt, Artificial Sequence
  Description of Artificial Sequence: Synthetic oligonucleotide
ucaaccguggucuuggugu

SEQ ID NO: 1596057 - RNA, 19 nt, Artificial Sequence
  Description of Artificial Sequence: Synthetic oligonucleotide
uguaaauccucaaucuggu

SEQ ID NO: 1596058 - RNA, 19 nt, Artificial Sequence
  Description of Artificial Sequence: Synthetic oligonucleotide
acugagacuguacuucuac

SEQ ID NO: 1596059 - RNA, 19 nt, Artificial Sequence
  Description of Artificial Sequence: Synthetic oligonucleotide
uuuugaagcguacuaucca

SEQ ID NO: 1596060 - RNA, 19 nt, Artificial Sequence
  Description of Artificial Sequence: Synthetic oligonucleotide
ucaggcuauaauacugagg

SEQ ID NO: 1596061 - RNA, 19 nt, Artificial Sequence
  Description of Artificial Sequence: Synthetic oligonucleotide
gguguaauuagccugcucc

SEQ ID NO: 1596062 - RNA, 19 nt, Artificial Sequence
  Description of Artificial Sequence: Synthetic oligonucleotide
agacagaguaaugauuugc

SEQ ID NO: 1596063 - RNA, 19 nt, Artificial Sequence
  Description of Artificial Sequence: Synthetic oligonucleotide
accuauaacaccacaauag

SEQ ID NO: 1596064 - RNA, 19 nt, Artificial Sequence
  Description of Artificial Sequence: Synthetic oligonucleotide
guucauuccaacauuagac

SEQ ID NO: 1596065 - RNA, 19 nt, Artificial Sequence
  Description of Artificial Sequence: Synthetic oligonucleotide
aagaaaucuaaaucuguuu

SEQ ID NO: 1596066 - RNA, 19 nt, Artificial Sequence
  Description of Artificial Sequence: Synthetic oligonucleotide
uuaaacccaccuauaacac

SEQ ID NO: 1596067 - RNA, 19 nt, Artificial Sequence
  Description of Artificial Sequence: Synthetic oligonucleotide
uuuacuuguuuguaugccu

SEQ ID NO: 1596068 - RNA, 19 nt, Artificial Sequence
  Description of Artificial Sequence: Synthetic oligonucleotide
uacauaaaauuuagagucu

SEQ ID NO: 1596069 - RNA, 19 nt, Artificial Sequence
  Description of Artificial Sequence: Synthetic oligonucleotide
ugguccuuauauuuuacca

SEQ ID NO: 1596070 - RNA, 19 nt, Artificial Sequence
  Description of Artificial Sequence: Synthetic oligonucleotide
ugaauuucuuaacggaaaa

SEQ ID NO: 1596071 - RNA, 19 nt, Artificial Sequence
  Description of Artificial Sequence: Synthetic oligonucleotide
uguuuguaugccuucuuca

SEQ ID NO: 1596072 - RNA, 19 nt, Artificial Sequence
  Description of Artificial Sequence: Synthetic oligonucleotide
uuugaagcguacuauccac

SEQ ID NO: 1596073 - RNA, 19 nt, Artificial Sequence
  Description of Artificial Sequence: Synthetic oligonucleotide
aaucaagcuuuaguaaaag

SEQ ID NO: 1596074 - RNA, 19 nt, Artificial Sequence
  Description of Artificial Sequence: Synthetic oligonucleotide
gcaaugaauuucuuaacgg

SEQ ID NO: 1596075 - RNA, 19 nt, Artificial Sequence
  Description of Artificial Sequence: Synthetic oligonucleotide
aauugggaaauauuuccua

SEQ ID NO: 1596076 - RNA, 19 nt, Artificial Sequence
  Description of Artificial Sequence: Synthetic oligonucleotide
aacuuuuacuuguuuguau

SEQ ID NO: 1596077 - RNA, 19 nt, Artificial Sequence
  Description of Artificial Sequence: Synthetic oligonucleotide
aagcucaucgcccaacgca

SEQ ID NO: 1596078 - RNA, 19 nt, Artificial Sequence
  Description of Artificial Sequence: Synthetic oligonucleotide
acauaaaauuuagagucuc

SEQ ID NO: 1596079 - RNA, 19 nt, Artificial Sequence
  Description of Artificial Sequence: Synthetic oligonucleotide
cucaugauacaguagugac

SEQ ID NO: 1596080 - RNA, 19 nt, Artificial Sequence
  Description of Artificial Sequence: Synthetic oligonucleotide
ucugugggaguccaaauuc

SEQ ID NO: 1596081 - RNA, 19 nt, Artificial Sequence
  Description of Artificial Sequence: Synthetic oligonucleotide
uacuucuacauaaaauuua

SEQ ID NO: 1596082 - RNA, 19 nt, Artificial Sequence
  Description of Artificial Sequence: Synthetic oligonucleotide
ucauacauccgcuuuugcu

SEQ ID NO: 1596083 - RNA, 19 nt, Artificial Sequence
  Description of Artificial Sequence: Synthetic oligonucleotide
ugaagcguacuauccacag

SEQ ID NO: 1596084 - RNA, 19 nt, Artificial Sequence
  Description of Artificial Sequence: Synthetic oligonucleotide
guccuuauauuuuaccagc

SEQ ID NO: 1596085 - RNA, 19 nt, Artificial Sequence
  Description of Artificial Sequence: Synthetic oligonucleotide
gaaugcugcaaguuuagga

SEQ ID NO: 1596086 - RNA, 19 nt, Artificial Sequence
  Description of Artificial Sequence: Synthetic oligonucleotide
uugcuuucccgaagaaucg

SEQ ID NO: 1596087 - RNA, 19 nt, Artificial Sequence
  Description of Artificial Sequence: Synthetic oligonucleotide
uauuguuaaugagugaaaa

SEQ ID NO: 1596088 - RNA, 19 nt, Artificial Sequence
  Description of Artificial Sequence: Synthetic oligonucleotide
ugugucagugggaacaccu

SEQ ID NO: 1596089 - RNA, 19 nt, Artificial Sequence
  Description of Artificial Sequence: Synthetic oligonucleotide
agagacuuuucuguuaguc

SEQ ID NO: 1596090 - RNA, 19 nt, Artificial Sequence
  Description of Artificial Sequence: Synthetic oligonucleotide
aguucauuccaacauuaga

SEQ ID NO: 1596091 - RNA, 19 nt, Artificial Sequence
  Description of Artificial Sequence: Synthetic oligonucleotide
guuaaugagugaaaacaag

SEQ ID NO: 1596092 - RNA, 19 nt, Artificial Sequence
  Description of Artificial Sequence: Synthetic oligonucleotide
auguuaaaggacugcuggg

SEQ ID NO: 1596093 - RNA, 19 nt, Artificial Sequence
  Description of Artificial Sequence: Synthetic oligonucleotide
ugggaaauauuuccuaguc

SEQ ID NO: 1596094 - RNA, 19 nt, Artificial Sequence
  Description of Artificial Sequence: Synthetic oligonucleotide
uauaauacugagggaacca

SEQ ID NO: 1596095 - RNA, 19 nt, Artificial Sequence
  Description of Artificial Sequence: Synthetic oligonucleotide
agucccagaauacacauua

SEQ ID NO: 1596096 - RNA, 19 nt, Artificial Sequence
  Description of Artificial Sequence: Synthetic oligonucleotide
augauuugcucacaugaca

SEQ ID NO: 1596097 - RNA, 19 nt, Artificial Sequence
  Description of Artificial Sequence: Synthetic oligonucleotide
uuauuguuaaugagugaaa

SEQ ID NO: 1596098 - RNA, 19 nt, Artificial Sequence
  Description of Artificial Sequence: Synthetic oligonucleotide
uaauuagccugcuccaugu

SEQ ID NO: 1596099 - RNA, 19 nt, Artificial Sequence
  Description of Artificial Sequence: Synthetic oligonucleotide
aagucaggcuauaauacug

SEQ ID NO: 1596100 - RNA, 19 nt, Artificial Sequence
  Description of Artificial Sequence: Synthetic oligonucleotide
uuuccuagucccagaauac

SEQ ID NO: 1596101 - RNA, 19 nt, Artificial Sequence
  Description of Artificial Sequence: Synthetic oligonucleotide
uuaggaagcuggaaucugu

SEQ ID NO: 1596102 - RNA, 19 nt, Artificial Sequence
  Description of Artificial Sequence: Synthetic oligonucleotide
gaaucgguucaucuuggcc

SEQ ID NO: 1596103 - RNA, 19 nt, Artificial Sequence
  Description of Artificial Sequence: Synthetic oligonucleotide
cagaguaaugauuugcuca

SEQ ID NO: 1596104 - RNA, 19 nt, Artificial Sequence
  Description of Artificial Sequence: Synthetic oligonucleotide
cauuauucauuacaaguca

SEQ ID NO: 1596105 - RNA, 19 nt, Artificial Sequence
  Description of Artificial Sequence: Synthetic oligonucleotide
aauacaggagcaguguaau

SEQ ID NO: 1596106 - RNA, 19 nt, Artificial Sequence
  Description of Artificial Sequence: Synthetic oligonucleotide
ucaucuaacucuggggugc

SEQ ID NO: 1596107 - RNA, 19 nt, Artificial Sequence
  Description of Artificial Sequence: Synthetic oligonucleotide
auuaauaucucuacuuuau

SEQ ID NO: 1596108 - RNA, 19 nt, Artificial Sequence
  Description of Artificial Sequence: Synthetic oligonucleotide
aaugguuuugaagcguacu

SEQ ID NO: 1596109 - RNA, 19 nt, Artificial Sequence
  Description of Artificial Sequence: Synthetic oligonucleotide
auuugcucacaugacacag

SEQ ID NO: 1596110 - RNA, 19 nt, Artificial Sequence
  Description of Artificial Sequence: Synthetic oligonucleotide
agacuguacuucuacauaa

SEQ ID NO: 1596111 - RNA, 19 nt, Artificial Sequence
  Description of Artificial Sequence: Synthetic oligonucleotide
uuagccugcuccauguuaa

SEQ ID NO: 1596112 - RNA, 19 nt, Artificial Sequence
  Description of Artificial Sequence: Synthetic oligonucleotide
uaaacccaccuauaacacc

SEQ ID NO: 1596113 - RNA, 19 nt, Artificial Sequence
  Description of Artificial Sequence: Synthetic oligonucleotide
auuauucauuacaagucag

SEQ ID NO: 1596114 - RNA, 19 nt, Artificial Sequence
  Description of Artificial Sequence: Synthetic oligonucleotide
caaugaauuucuuaacgga

SEQ ID NO: 1596115 - RNA, 19 nt, Artificial Sequence
  Description of Artificial Sequence: Synthetic oligonucleotide
uggaaugcugcaaguuuag

SEQ ID NO: 1596116 - RNA, 19 nt, Artificial Sequence
  Description of Artificial Sequence: Synthetic oligonucleotide
ugcugcuucgucuaaguaa

SEQ ID NO: 1596117 - RNA, 19 nt, Artificial Sequence
  Description of Artificial Sequence: Synthetic oligonucleotide
uucuguuagucuuuacuaa

SEQ ID NO: 1596118 - RNA, 19 nt, Artificial Sequence
  Description of Artificial Sequence: Synthetic oligonucleotide
ugauacaguagugacaguu

SEQ ID NO: 1596119 - RNA, 19 nt, Artificial Sequence
  Description of Artificial Sequence: Synthetic oligonucleotide
auguccuauacauuaaaua

SEQ ID NO: 1596120 - RNA, 19 nt, Artificial Sequence
  Description of Artificial Sequence: Synthetic oligonucleotide
guuuugaagcguacuaucc

SEQ ID NO: 1596121 - RNA, 19 nt, Artificial Sequence
  Description of Artificial Sequence: Synthetic oligonucleotide
uugguccuuauauuuuacc

SEQ ID NO: 1596122 - RNA, 19 nt, Artificial Sequence
  Description of Artificial Sequence: Synthetic oligonucleotide
uccuuauauuuuaccagcu

SEQ ID NO: 1596123 - RNA, 19 nt, Artificial Sequence
  Description of Artificial Sequence: Synthetic oligonucleotide
gguccuuauauuuuaccag

SEQ ID NO: 1596124 - RNA, 19 nt, Artificial Sequence
  Description of Artificial Sequence: Synthetic oligonucleotide
cuuuacucccaauuucaug

SEQ ID NO: 1596125 - RNA, 19 nt, Artificial Sequence
  Description of Artificial Sequence: Synthetic oligonucleotide
uuguuuguaugccuucuuc

SEQ ID NO: 1596126 - RNA, 19 nt, Artificial Sequence
  Description of Artificial Sequence: Synthetic oligonucleotide
guagugacaguucauucca

SEQ ID NO: 1596127 - RNA, 19 nt, Artificial Sequence
  Description of Artificial Sequence: Synthetic oligonucleotide
ggaggaaaaccagaaacgg

SEQ ID NO: 1596128 - RNA, 19 nt, Artificial Sequence
  Description of Artificial Sequence: Synthetic oligonucleotide
ucgugugcuggaaugcugc

SEQ ID NO: 1596129 - RNA, 19 nt, Artificial Sequence
  Description of Artificial Sequence: Synthetic oligonucleotide
cuuuaaaacccucagggcu

SEQ ID NO: 1596130 - RNA, 19 nt, Artificial Sequence
  Description of Artificial Sequence: Synthetic oligonucleotide
uacaggagcaguguaauua

SEQ ID NO: 1596131 - RNA, 19 nt, Artificial Sequence
  Description of Artificial Sequence: Synthetic oligonucleotide
aguccaaauucauccacca

SEQ ID NO: 1596132 - RNA, 19 nt, Artificial Sequence
  Description of Artificial Sequence: Synthetic oligonucleotide
uuugguccuuauauuuuac

SEQ ID NO: 1596133 - RNA, 19 nt, Artificial Sequence
  Description of Artificial Sequence: Synthetic oligonucleotide
guaauuagccugcuccaug

SEQ ID NO: 1596134 - RNA, 19 nt, Artificial Sequence
  Description of Artificial Sequence: Synthetic oligonucleotide
guaaugauuugcucacaug

SEQ ID NO: 1596135 - RNA, 19 nt, Artificial Sequence
  Description of Artificial Sequence: Synthetic oligonucleotide
gaccauauucuuggcaggg

SEQ ID NO: 1596136 - RNA, 19 nt, Artificial Sequence
  Description of Artificial Sequence: Synthetic oligonucleotide
aggaaaaccagaaacggaa

SEQ ID NO: 1596137 - RNA, 19 nt, Artificial Sequence
  Description of Artificial Sequence: Synthetic oligonucleotide
ucugcccugcuauccaccg

SEQ ID NO: 1596138 - RNA, 19 nt, Artificial Sequence
  Description of Artificial Sequence: Synthetic oligonucleotide
cuucgucuaaguaagaacu

SEQ ID NO: 1596139 - RNA, 19 nt, Artificial Sequence
  Description of Artificial Sequence: Synthetic oligonucleotide
ucaaagagacuuuucuguu

SEQ ID NO: 1596140 - RNA, 19 nt, Artificial Sequence
  Description of Artificial Sequence: Synthetic oligonucleotide
agcaacucaugauacagua

SEQ ID NO: 1596141 - RNA, 19 nt, Artificial Sequence
  Description of Artificial Sequence: Synthetic oligonucleotide
cuucuggaauugcaggugc

SEQ ID NO: 1596142 - RNA, 19 nt, Artificial Sequence
  Description of Artificial Sequence: Synthetic oligonucleotide
uugaagcguacuauccaca

SEQ ID NO: 1596143 - RNA, 19 nt, Artificial Sequence
  Description of Artificial Sequence: Synthetic oligonucleotide
aauagacaaugguuuugaa

SEQ ID NO: 1596144 - RNA, 19 nt, Artificial Sequence
  Description of Artificial Sequence: Synthetic oligonucleotide
augagugaaaacaagucau

SEQ ID NO: 1596145 - RNA, 19 nt, Artificial Sequence
  Description of Artificial Sequence: Synthetic oligonucleotide
aaauacaggagcaguguaa

SEQ ID NO: 1596146 - RNA, 19 nt, Artificial Sequence
  Description of Artificial Sequence: Synthetic oligonucleotide
uagucuuuacuaagaggga

SEQ ID NO: 1596147 - RNA, 19 nt, Artificial Sequence
  Description of Artificial Sequence: Synthetic oligonucleotide
auggauucugcccugcuau

SEQ ID NO: 1596148 - RNA, 19 nt, Artificial Sequence
  Description of Artificial Sequence: Synthetic oligonucleotide
uuuaggaagcuggaaucug

SEQ ID NO: 1596149 - RNA, 19 nt, Artificial Sequence
  Description of Artificial Sequence: Synthetic oligonucleotide
aauguccuauacauuaaau

SEQ ID NO: 1596150 - RNA, 19 nt, Artificial Sequence
  Description of Artificial Sequence: Synthetic oligonucleotide
uacgucgugugcuggaaug

SEQ ID NO: 1596151 - RNA, 19 nt, Artificial Sequence
  Description of Artificial Sequence: Synthetic oligonucleotide
gucaaagagacuuuucugu

SEQ ID NO: 1596152 - RNA, 19 nt, Artificial Sequence
  Description of Artificial Sequence: Synthetic oligonucleotide
auacugagggaaccauggg

SEQ ID NO: 1596153 - RNA, 19 nt, Artificial Sequence
  Description of Artificial Sequence: Synthetic oligonucleotide
aauuagcuuuuccuucaaa

SEQ ID NO: 1596154 - RNA, 19 nt, Artificial Sequence
  Description of Artificial Sequence: Synthetic oligonucleotide
uggaauugcaggugcagau

SEQ ID NO: 1596155 - RNA, 19 nt, Artificial Sequence
  Description of Artificial Sequence: Synthetic oligonucleotide
ggaaagaaaucuaaaucug

SEQ ID NO: 1596156 - RNA, 19 nt, Artificial Sequence
  Description of Artificial Sequence: Synthetic oligonucleotide
ucagucaagcuacggcggc

SEQ ID NO: 1596157 - RNA, 19 nt, Artificial Sequence
  Description of Artificial Sequence: Synthetic oligonucleotide
acaauagacaaugguuuug

SEQ ID NO: 1596158 - RNA, 19 nt, Artificial Sequence
  Description of Artificial Sequence: Synthetic oligonucleotide
aauggauucugcccugcua

SEQ ID NO: 1596159 - RNA, 19 nt, Artificial Sequence
  Description of Artificial Sequence: Synthetic oligonucleotide
ucccagaauacacauuaua

SEQ ID NO: 1596160 - RNA, 19 nt, Artificial Sequence
  Description of Artificial Sequence: Synthetic oligonucleotide
ucuuuacuaagagggaaaa

SEQ ID NO: 1596161 - RNA, 19 nt, Artificial Sequence
  Description of Artificial Sequence: Synthetic oligonucleotide
uuuuacgucgugugcugga

SEQ ID NO: 1596162 - RNA, 19 nt, Artificial Sequence
  Description of Artificial Sequence: Synthetic oligonucleotide
acuguacuucuacauaaaa

SEQ ID NO: 1596163 - RNA, 19 nt, Artificial Sequence
  Description of Artificial Sequence: Synthetic oligonucleotide
uuucccgaagaaucgguuc

SEQ ID NO: 1596164 - RNA, 19 nt, Artificial Sequence
  Description of Artificial Sequence: Synthetic oligonucleotide
gaaccauggggucaaaaua

SEQ ID NO: 1596165 - RNA, 19 nt, Artificial Sequence
  Description of Artificial Sequence: Synthetic oligonucleotide
uugauuugguccuuauauu

SEQ ID NO: 1596166 - RNA, 19 nt, Artificial Sequence
  Description of Artificial Sequence: Synthetic oligonucleotide
acucaugauacaguaguga

SEQ ID NO: 1596167 - RNA, 19 nt, Artificial Sequence
  Description of Artificial Sequence: Synthetic oligonucleotide
auucugcccugcuauccac

SEQ ID NO: 1596168 - RNA, 19 nt, Artificial Sequence
  Description of Artificial Sequence: Synthetic oligonucleotide
caguguaauuagcuuuucc

SEQ ID NO: 1596169 - RNA, 19 nt, Artificial Sequence
  Description of Artificial Sequence: Synthetic oligonucleotide
uuacucccaauuucauggc

SEQ ID NO: 1596170 - RNA, 19 nt, Artificial Sequence
  Description of Artificial Sequence: Synthetic oligonucleotide
accacaauagacaaugguu

SEQ ID NO: 1596171 - RNA, 19 nt, Artificial Sequence
  Description of Artificial Sequence: Synthetic oligonucleotide
augguuuugaagcguacua

SEQ ID NO: 1596172 - RNA, 19 nt, Artificial Sequence
  Description of Artificial Sequence: Synthetic oligonucleotide
accauauucuuggcagggc

SEQ ID NO: 1596173 - RNA, 19 nt, Artificial Sequence
  Description of Artificial Sequence: Synthetic oligonucleotide
uacucccaauuucauggca

SEQ ID NO: 1596174 - RNA, 19 nt, Artificial Sequence
  Description of Artificial Sequence: Synthetic oligonucleotide
cauuccaacauuagacaga

SEQ ID NO: 1596175 - RNA, 19 nt, Artificial Sequence
  Description of Artificial Sequence: Synthetic oligonucleotide
uucgucuaaguaagaacua

SEQ ID NO: 1596176 - RNA, 19 nt, Artificial Sequence
  Description of Artificial Sequence: Synthetic oligonucleotide
ccgcuuuugcuuuaaaacc

SEQ ID NO: 1596177 - RNA, 19 nt, Artificial Sequence
  Description of Artificial Sequence: Synthetic oligonucleotide
cacacugagacuguacuuc

SEQ ID NO: 1596178 - RNA, 19 nt, Artificial Sequence
  Description of Artificial Sequence: Synthetic oligonucleotide
uauccaccgucccaaugca

SEQ ID NO: 1596179 - RNA, 19 nt, Artificial Sequence
  Description of Artificial Sequence: Synthetic oligonucleotide
gucaggcuauaauacugag

SEQ ID NO: 1596180 - RNA, 19 nt, Artificial Sequence
  Description of Artificial Sequence: Synthetic oligonucleotide
ugacugaaugguguaauua

SEQ ID NO: 1596181 - RNA, 19 nt, Artificial Sequence
  Description of Artificial Sequence: Synthetic oligonucleotide
cucaucuaacucuggggug

SEQ ID NO: 1596182 - RNA, 19 nt, Artificial Sequence
  Description of Artificial Sequence: Synthetic oligonucleotide
gaaauauccauuauucauu

SEQ ID NO: 1596183 - RNA, 19 nt, Artificial Sequence
  Description of Artificial Sequence: Synthetic oligonucleotide
aagcuacggcggcggagcc

SEQ ID NO: 1596184 - RNA, 19 nt, Artificial Sequence
  Description of Artificial Sequence: Synthetic oligonucleotide
cuacuuuaucaauguauca

SEQ ID NO: 1596185 - RNA, 19 nt, Artificial Sequence
  Description of Artificial Sequence: Synthetic oligonucleotide
agucuuuacuaagagggaa

SEQ ID NO: 1596186 - RNA, 19 nt, Artificial Sequence
  Description of Artificial Sequence: Synthetic oligonucleotide
cauggggucaaaauagcaa

SEQ ID NO: 1596187 - RNA, 19 nt, Artificial Sequence
  Description of Artificial Sequence: Synthetic oligonucleotide
ugcagucagucaagcuacg

SEQ ID NO: 1596188 - RNA, 19 nt, Artificial Sequence
  Description of Artificial Sequence: Synthetic oligonucleotide
gagacuuuucuguuagucu

SEQ ID NO: 1596189 - RNA, 19 nt, Artificial Sequence
  Description of Artificial Sequence: Synthetic oligonucleotide
caacucaugauacaguagu

SEQ ID NO: 1596190 - RNA, 19 nt, Artificial Sequence
  Description of Artificial Sequence: Synthetic oligonucleotide
cuucagugacugaauggug

SEQ ID NO: 1596191 - RNA, 19 nt, Artificial Sequence
  Description of Artificial Sequence: Synthetic oligonucleotide
gcugcuucgucuaaguaag

SEQ ID NO: 1596192 - RNA, 19 nt, Artificial Sequence
  Description of Artificial Sequence: Synthetic oligonucleotide
auuagacagaguaaugauu

SEQ ID NO: 1596193 - RNA, 19 nt, Artificial Sequence
  Description of Artificial Sequence: Synthetic oligonucleotide
caugacacagcaaaaccua

SEQ ID NO: 1596194 - RNA, 19 nt, Artificial Sequence
  Description of Artificial Sequence: Synthetic oligonucleotide
ucgcccaacgcauccaacu

SEQ ID NO: 1596195 - RNA, 19 nt, Artificial Sequence
  Description of Artificial Sequence: Synthetic oligonucleotide
augaauuucuuaacggaaa

SEQ ID NO: 1596196 - RNA, 19 nt, Artificial Sequence
  Description of Artificial Sequence: Synthetic oligonucleotide
gcuuuaaaacccucagggc

SEQ ID NO: 1596197 - RNA, 19 nt, Artificial Sequence
  Description of Artificial Sequence: Synthetic oligonucleotide
aauccucaaucuggucaac

SEQ ID NO: 1596198 - RNA, 19 nt, Artificial Sequence
  Description of Artificial Sequence: Synthetic oligonucleotide
agaauacacauuauauuuu

SEQ ID NO: 1596199 - RNA, 19 nt, Artificial Sequence
  Description of Artificial Sequence: Synthetic oligonucleotide
caguagugacaguucauuc

SEQ ID NO: 1596200 - RNA, 19 nt, Artificial Sequence
  Description of Artificial Sequence: Synthetic oligonucleotide
uggcaaauugggaaauauu

SEQ ID NO: 1596201 - RNA, 19 nt, Artificial Sequence
  Description of Artificial Sequence: Synthetic oligonucleotide
caaucuggucaacuuuuac

SEQ ID NO: 1596202 - RNA, 19 nt, Artificial Sequence
  Description of Artificial Sequence: Synthetic oligonucleotide
gguuuugaagcguacuauc

SEQ ID NO: 1596203 - RNA, 19 nt, Artificial Sequence
  Description of Artificial Sequence: Synthetic oligonucleotide
gauucugcccugcuaucca

SEQ ID NO: 1596204 - RNA, 19 nt, Artificial Sequence
  Description of Artificial Sequence: Synthetic oligonucleotide
aacccaaacacuggaggaa

SEQ ID NO: 1596205 - RNA, 19 nt, Artificial Sequence
  Description of Artificial Sequence: Synthetic oligonucleotide
uacaguagugacaguucau

SEQ ID NO: 1596206 - RNA, 19 nt, Artificial Sequence
  Description of Artificial Sequence: Synthetic oligonucleotide
gucagucaagcuacggcgg

SEQ ID NO: 1596207 - RNA, 19 nt, Artificial Sequence
  Description of Artificial Sequence: Synthetic oligonucleotide
uauuuccuagucccagaau

SEQ ID NO: 1596208 - RNA, 19 nt, Artificial Sequence
  Description of Artificial Sequence: Synthetic oligonucleotide
gaagcucaucgcccaacgc

SEQ ID NO: 1596209 - RNA, 19 nt, Artificial Sequence
  Description of Artificial Sequence: Synthetic oligonucleotide
ucuugguguccuucaguga

SEQ ID NO: 1596210 - RNA, 19 nt, Artificial Sequence
  Description of Artificial Sequence: Synthetic oligonucleotide
ucagugacugaauggugua

SEQ ID NO: 1596211 - RNA, 19 nt, Artificial Sequence
  Description of Artificial Sequence: Synthetic oligonucleotide
ggcuauaauacugagggaa

SEQ ID NO: 1596212 - RNA, 19 nt, Artificial Sequence
  Description of Artificial Sequence: Synthetic oligonucleotide
aagagacuuuucuguuagu

SEQ ID NO: 1596213 - RNA, 19 nt, Artificial Sequence
  Description of Artificial Sequence: Synthetic oligonucleotide
gagacuguacuucuacaua

SEQ ID NO: 1596214 - RNA, 19 nt, Artificial Sequence
  Description of Artificial Sequence: Synthetic oligonucleotide
gaacuaucuucaucagcca

SEQ ID NO: 1596215 - RNA, 19 nt, Artificial Sequence
  Description of Artificial Sequence: Synthetic oligonucleotide
ugguuuugaagcguacuau

SEQ ID NO: 1596216 - RNA, 19 nt, Artificial Sequence
  Description of Artificial Sequence: Synthetic oligonucleotide
caauagacaaugguuuuga

SEQ ID NO: 1596217 - RNA, 19 nt, Artificial Sequence
  Description of Artificial Sequence: Synthetic oligonucleotide
agucaagcuacggcggcgg

SEQ ID NO: 1596218 - RNA, 19 nt, Artificial Sequence
  Description of Artificial Sequence: Synthetic oligonucleotide
uguaauuagccugcuccau

SEQ ID NO: 1596219 - RNA, 19 nt, Artificial Sequence
  Description of Artificial Sequence: Synthetic oligonucleotide
agucacacugagacuguac

SEQ ID NO: 1596220 - RNA, 19 nt, Artificial Sequence
  Description of Artificial Sequence: Synthetic oligonucleotide
aggagcaguguaauuagcu

SEQ ID NO: 1596221 - RNA, 19 nt, Artificial Sequence
  Description of Artificial Sequence: Synthetic oligonucleotide
guguaauuagccugcucca

SEQ ID NO: 1596222 - RNA, 19 nt, Artificial Sequence
  Description of Artificial Sequence: Synthetic oligonucleotide
ucucuacuuuaucaaugua

SEQ ID NO: 1596223 - RNA, 19 nt, Artificial Sequence
  Description of Artificial Sequence: Synthetic oligonucleotide
caagcuacggcggcggagc

SEQ ID NO: 1596224 - RNA, 19 nt, Artificial Sequence
  Description of Artificial Sequence: Synthetic oligonucleotide
auaauacugagggaaccau

SEQ ID NO: 1596225 - RNA, 19 nt, Artificial Sequence
  Description of Artificial Sequence: Synthetic oligonucleotide
ugcuucgucuaaguaagaa

SEQ ID NO: 1596226 - RNA, 19 nt, Artificial Sequence
  Description of Artificial Sequence: Synthetic oligonucleotide
uuugugucagugggaacac

SEQ ID NO: 1596227 - RNA, 19 nt, Artificial Sequence
  Description of Artificial Sequence: Synthetic oligonucleotide
acgucgugugcuggaaugc

SEQ ID NO: 1596228 - RNA, 19 nt, Artificial Sequence
  Description of Artificial Sequence: Synthetic oligonucleotide
aucugugggaguccaaauu

SEQ ID NO: 1596229 - RNA, 19 nt, Artificial Sequence
  Description of Artificial Sequence: Synthetic oligonucleotide
gucuaaguaagaacuaucu

SEQ ID NO: 1596230 - RNA, 19 nt, Artificial Sequence
  Description of Artificial Sequence: Synthetic oligonucleotide
ugcuugguuuuauuucaaa

SEQ ID NO: 1596231 - RNA, 19 nt, Artificial Sequence
  Description of Artificial Sequence: Synthetic oligonucleotide
caaugguuuugaagcguac

SEQ ID NO: 1596232 - RNA, 19 nt, Artificial Sequence
  Description of Artificial Sequence: Synthetic oligonucleotide
acaguagugacaguucauu

SEQ ID NO: 1596233 - RNA, 19 nt, Artificial Sequence
  Description of Artificial Sequence: Synthetic oligonucleotide
aucaaccguggucuuggug

SEQ ID NO: 1596234 - RNA, 19 nt, Artificial Sequence
  Description of Artificial Sequence: Synthetic oligonucleotide
cauaucuuccagcuggucu

SEQ ID NO: 1596235 - RNA, 19 nt, Artificial Sequence
  Description of Artificial Sequence: Synthetic oligonucleotide
auauucuuggcagggcccu

SEQ ID NO: 1596236 - RNA, 19 nt, Artificial Sequence
  Description of Artificial Sequence: Synthetic oligonucleotide
ucaagcuacggcggcggag

SEQ ID NO: 1596237 - RNA, 19 nt, Artificial Sequence
  Description of Artificial Sequence: Synthetic oligonucleotide
cuggucuuguaaauccuca

SEQ ID NO: 1596238 - RNA, 19 nt, Artificial Sequence
  Description of Artificial Sequence: Synthetic oligonucleotide
ggcaagguugucucgcugc

SEQ ID NO: 1596239 - RNA, 19 nt, Artificial Sequence
  Description of Artificial Sequence: Synthetic oligonucleotide
aucaauguaucaagucaca

SEQ ID NO: 1596240 - RNA, 19 nt, Artificial Sequence
  Description of Artificial Sequence: Synthetic oligonucleotide
agucaggcuauaauacuga

SEQ ID NO: 1596241 - RNA, 19 nt, Artificial Sequence
  Description of Artificial Sequence: Synthetic oligonucleotide
aauuagccugcuccauguu

SEQ ID NO: 1596242 - RNA, 19 nt, Artificial Sequence
  Description of Artificial Sequence: Synthetic oligonucleotide
caggagcaguguaauuagc

SEQ ID NO: 1596243 - RNA, 19 nt, Artificial Sequence
  Description of Artificial Sequence: Synthetic oligonucleotide
cacuuaaacccaccuauaa

SEQ ID NO: 1596244 - RNA, 19 nt, Artificial Sequence
  Description of Artificial Sequence: Synthetic oligonucleotide
aacccaccuauaacaccac

SEQ ID NO: 1596245 - RNA, 19 nt, Artificial Sequence
  Description of Artificial Sequence: Synthetic oligonucleotide
cucauacauccgcuuuugc

SEQ ID NO: 1596246 - RNA, 19 nt, Artificial Sequence
  Description of Artificial Sequence: Synthetic oligonucleotide
guaaauccucaaucugguc

SEQ ID NO: 1596247 - RNA, 19 nt, Artificial Sequence
  Description of Artificial Sequence: Synthetic oligonucleotide
gcaaauugggaaauauuuc

SEQ ID NO: 1596248 - RNA, 19 nt, Artificial Sequence
  Description of Artificial Sequence: Synthetic oligonucleotide
uuuacgucgugugcuggaa

SEQ ID NO: 1596249 - RNA, 19 nt, Artificial Sequence
  Description of Artificial Sequence: Synthetic oligonucleotide
gcaucaaccguggucuugg

SEQ ID NO: 1596250 - RNA, 19 nt, Artificial Sequence
  Description of Artificial Sequence: Synthetic oligonucleotide
ggugccguagcugcgaccc

SEQ ID NO: 1596251 - RNA, 19 nt, Artificial Sequence
  Description of Artificial Sequence: Synthetic oligonucleotide
cauuagacagaguaaugau

SEQ ID NO: 1596252 - RNA, 19 nt, Artificial Sequence
  Description of Artificial Sequence: Synthetic oligonucleotide
cugggcaagguugucucgc

SEQ ID NO: 1596253 - RNA, 19 nt, Artificial Sequence
  Description of Artificial Sequence: Synthetic oligonucleotide
caaagagacuuuucuguua

SEQ ID NO: 1596254 - RNA, 19 nt, Artificial Sequence
  Description of Artificial Sequence: Synthetic oligonucleotide
guucaucuuggccggcggc

SEQ ID NO: 1596255 - RNA, 19 nt, Artificial Sequence
  Description of Artificial Sequence: Synthetic oligonucleotide
guguaauuagcuuuuccuu

SEQ ID NO: 1596256 - RNA, 19 nt, Artificial Sequence
  Description of Artificial Sequence: Synthetic oligonucleotide
agaugcugcuucgucuaag

SEQ ID NO: 1596257 - RNA, 19 nt, Artificial Sequence
  Description of Artificial Sequence: Synthetic oligonucleotide
agccuugggcuuugcuuuc

SEQ ID NO: 1596258 - RNA, 19 nt, Artificial Sequence
  Description of Artificial Sequence: Synthetic oligonucleotide
aggcuauaauacugaggga

SEQ ID NO: 1596259 - RNA, 19 nt, Artificial Sequence
  Description of Artificial Sequence: Synthetic oligonucleotide
ugguguaauuagccugcuc

SEQ ID NO: 1596260 - RNA, 19 nt, Artificial Sequence
  Description of Artificial Sequence: Synthetic oligonucleotide
uagugacaguucauuccaa

SEQ ID NO: 1596261 - RNA, 19 nt, Artificial Sequence
  Description of Artificial Sequence: Synthetic oligonucleotide
uuacgucgugugcuggaau

SEQ ID NO: 1596262 - RNA, 19 nt, Artificial Sequence
  Description of Artificial Sequence: Synthetic oligonucleotide
gguucaucuuggccggcgg

SEQ ID NO: 1596263 - RNA, 19 nt, Artificial Sequence
  Description of Artificial Sequence: Synthetic oligonucleotide
uuuggcaaauugggaaaua

SEQ ID NO: 1596264 - RNA, 19 nt, Artificial Sequence
  Description of Artificial Sequence: Synthetic oligonucleotide
agcaguguaauuagcuuuu

SEQ ID NO: 1596265 - RNA, 19 nt, Artificial Sequence
  Description of Artificial Sequence: Synthetic oligonucleotide
ugccguagcugcgacccag

SEQ ID NO: 1596266 - RNA, 19 nt, Artificial Sequence
  Description of Artificial Sequence: Synthetic oligonucleotide
acaccacaauagacaaugg

SEQ ID NO: 1596267 - RNA, 19 nt, Artificial Sequence
  Description of Artificial Sequence: Synthetic oligonucleotide
guacuauccacagucucaa

SEQ ID NO: 1596268 - RNA, 19 nt, Artificial Sequence
  Description of Artificial Sequence: Synthetic oligonucleotide
gggucaaaauagcaacuca

SEQ ID NO: 1596269 - RNA, 19 nt, Artificial Sequence
  Description of Artificial Sequence: Synthetic oligonucleotide
acaaugguuuugaagcgua

SEQ ID NO: 1596270 - RNA, 19 nt, Artificial Sequence
  Description of Artificial Sequence: Synthetic oligonucleotide
caccuauaacaccacaaua

SEQ ID NO: 1596271 - RNA, 19 nt, Artificial Sequence
  Description of Artificial Sequence: Synthetic oligonucleotide
gaacaccuucuggaauugc

SEQ ID NO: 1596272 - RNA, 19 nt, Artificial Sequence
  Description of Artificial Sequence: Synthetic oligonucleotide
ugcgacccagugcuuccug

SEQ ID NO: 1596273 - RNA, 19 nt, Artificial Sequence
  Description of Artificial Sequence: Synthetic oligonucleotide
ugggcaagguugucucgcu

SEQ ID NO: 1596274 - RNA, 19 nt, Artificial Sequence
  Description of Artificial Sequence: Synthetic oligonucleotide
ggaauugcaggugcagaug

SEQ ID NO: 1596275 - RNA, 19 nt, Artificial Sequence
  Description of Artificial Sequence: Synthetic oligonucleotide
ucaucuuggccggcggcga

SEQ ID NO: 1596276 - RNA, 19 nt, Artificial Sequence
  Description of Artificial Sequence: Synthetic oligonucleotide
uuaaaacccucagggcuuu

SEQ ID NO: 1596277 - RNA, 19 nt, Artificial Sequence
  Description of Artificial Sequence: Synthetic oligonucleotide
ggauucugcccugcuaucc

SEQ ID NO: 1596278 - RNA, 19 nt, Artificial Sequence
  Description of Artificial Sequence: Synthetic oligonucleotide
gacaaugguuuugaagcgu

SEQ ID NO: 1596279 - RNA, 19 nt, Artificial Sequence
  Description of Artificial Sequence: Synthetic oligonucleotide
aagccaccacuuaaaccca

SEQ ID NO: 1596280 - RNA, 19 nt, Artificial Sequence
  Description of Artificial Sequence: Synthetic oligonucleotide
cagucaagcuacggcggcg

SEQ ID NO: 1596281 - RNA, 19 nt, Artificial Sequence
  Description of Artificial Sequence: Synthetic oligonucleotide
auccucaaucuggucaacu

SEQ ID NO: 1596282 - RNA, 19 nt, Artificial Sequence
  Description of Artificial Sequence: Synthetic oligonucleotide
ucuuccagcuggucuugua

SEQ ID NO: 1596283 - RNA, 19 nt, Artificial Sequence
  Description of Artificial Sequence: Synthetic oligonucleotide
cuagucccagaauacacau

SEQ ID NO: 1596284 - RNA, 19 nt, Artificial Sequence
  Description of Artificial Sequence: Synthetic oligonucleotide
uagucccagaauacacauu

SEQ ID NO: 1596285 - RNA, 19 nt, Artificial Sequence
  Description of Artificial Sequence: Synthetic oligonucleotide
auacaggagcaguguaauu

SEQ ID NO: 1596286 - RNA, 19 nt, Artificial Sequence
  Description of Artificial Sequence: Synthetic oligonucleotide
gcaacucaugauacaguag

SEQ ID NO: 1596287 - RNA, 19 nt, Artificial Sequence
  Description of Artificial Sequence: Synthetic oligonucleotide
caucuaacucuggggugcc

SEQ ID NO: 1596288 - RNA, 19 nt, Artificial Sequence
  Description of Artificial Sequence: Synthetic oligonucleotide
uugugucagugggaacacc

SEQ ID NO: 1596289 - RNA, 19 nt, Artificial Sequence
  Description of Artificial Sequence: Synthetic oligonucleotide
gacuguacuucuacauaaa

SEQ ID NO: 1596290 - RNA, 19 nt, Artificial Sequence
  Description of Artificial Sequence: Synthetic oligonucleotide
caaccguggucuugguguc

SEQ ID NO: 1596291 - RNA, 19 nt, Artificial Sequence
  Description of Artificial Sequence: Synthetic oligonucleotide
ucaucgcccaacgcaucca

SEQ ID NO: 1596292 - RNA, 19 nt, Artificial Sequence
  Description of Artificial Sequence: Synthetic oligonucleotide
agcucaucgcccaacgcau

SEQ ID NO: 1596293 - RNA, 19 nt, Artificial Sequence
  Description of Artificial Sequence: Synthetic oligonucleotide
gaagcguacuauccacagu

SEQ ID NO: 1596294 - RNA, 19 nt, Artificial Sequence
  Description of Artificial Sequence: Synthetic oligonucleotide
guacuucuacauaaaauuu

SEQ ID NO: 1596295 - RNA, 19 nt, Artificial Sequence
  Description of Artificial Sequence: Synthetic oligonucleotide
cugcaaguuuaggaagcug

SEQ ID NO: 1596296 - RNA, 19 nt, Artificial Sequence
  Description of Artificial Sequence: Synthetic oligonucleotide
agagucucaucugcuuggu

SEQ ID NO: 1596297 - RNA, 19 nt, Artificial Sequence
  Description of Artificial Sequence: Synthetic oligonucleotide
ccaacauuagacagaguaa

SEQ ID NO: 1596298 - RNA, 19 nt, Artificial Sequence
  Description of Artificial Sequence: Synthetic oligonucleotide
augacacagcaaaaccuau

SEQ ID NO: 1596299 - RNA, 19 nt, Artificial Sequence
  Description of Artificial Sequence: Synthetic oligonucleotide
ggggucaaaauagcaacuc

SEQ ID NO: 1596300 - RNA, 19 nt, Artificial Sequence
  Description of Artificial Sequence: Synthetic oligonucleotide
cccaaugcagucagucaag

SEQ ID NO: 1596301 - RNA, 19 nt, Artificial Sequence
  Description of Artificial Sequence: Synthetic oligonucleotide
agccaccacuuaaacccac

SEQ ID NO: 1596302 - RNA, 19 nt, Artificial Sequence
  Description of Artificial Sequence: Synthetic oligonucleotide
ggaaccauggggucaaaau

SEQ ID NO: 1596303 - RNA, 19 nt, Artificial Sequence
  Description of Artificial Sequence: Synthetic oligonucleotide
caccacaauagacaauggu

SEQ ID NO: 1596304 - RNA, 19 nt, Artificial Sequence
  Description of Artificial Sequence: Synthetic oligonucleotide
gucgugugcuggaaugcug

SEQ ID NO: 1596305 - RNA, 19 nt, Artificial Sequence
  Description of Artificial Sequence: Synthetic oligonucleotide
uuccaacauuagacagagu

SEQ ID NO: 1596306 - RNA, 19 nt, Artificial Sequence
  Description of Artificial Sequence: Synthetic oligonucleotide
aagucacacugagacugua

SEQ ID NO: 1596307 - RNA, 19 nt, Artificial Sequence
  Description of Artificial Sequence: Synthetic oligonucleotide
aucuaacucuggggugccg

SEQ ID NO: 1596308 - RNA, 19 nt, Artificial Sequence
  Description of Artificial Sequence: Synthetic oligonucleotide
cagaagcucaucgcccaac

SEQ ID NO: 1596309 - RNA, 19 nt, Artificial Sequence
  Description of Artificial Sequence: Synthetic oligonucleotide
uacggcggcggagccuugg

SEQ ID NO: 1596310 - RNA, 19 nt, Artificial Sequence
  Description of Artificial Sequence: Synthetic oligonucleotide
cgucuaaguaagaacuauc

SEQ ID NO: 1596311 - RNA, 19 nt, Artificial Sequence
  Description of Artificial Sequence: Synthetic oligonucleotide
caacuuuuacuuguuugua

SEQ ID NO: 1596312 - RNA, 19 nt, Artificial Sequence
  Description of Artificial Sequence: Synthetic oligonucleotide
aucgcccaacgcauccaac

SEQ ID NO: 1596313 - RNA, 19 nt, Artificial Sequence
  Description of Artificial Sequence: Synthetic oligonucleotide
ccuagucccagaauacaca

SEQ ID NO: 1596314 - RNA, 19 nt, Artificial Sequence
  Description of Artificial Sequence: Synthetic oligonucleotide
cacaauagacaaugguuuu

SEQ ID NO: 1596315 - RNA, 19 nt, Artificial Sequence
  Description of Artificial Sequence: Synthetic oligonucleotide
gcuauccaccgucccaaug

SEQ ID NO: 1596316 - RNA, 19 nt, Artificial Sequence
  Description of Artificial Sequence: Synthetic oligonucleotide
gagggaaccauggggucaa

SEQ ID NO: 1596317 - RNA, 19 nt, Artificial Sequence
  Description of Artificial Sequence: Synthetic oligonucleotide
cauccaaccgggaaauuuu

SEQ ID NO: 1596318 - RNA, 19 nt, Artificial Sequence
  Description of Artificial Sequence: Synthetic oligonucleotide
cguacuauccacagucuca

SEQ ID NO: 1596319 - RNA, 19 nt, Artificial Sequence
  Description of Artificial Sequence: Synthetic oligonucleotide
gcugggcaagguugucucg

SEQ ID NO: 1596320 - RNA, 19 nt, Artificial Sequence
  Description of Artificial Sequence: Synthetic oligonucleotide
uacauccgcuuuugcuuua

SEQ ID NO: 1596321 - RNA, 19 nt, Artificial Sequence
  Description of Artificial Sequence: Synthetic oligonucleotide
ccaaugcagucagucaagc

SEQ ID NO: 1596322 - RNA, 19 nt, Artificial Sequence
  Description of Artificial Sequence: Synthetic oligonucleotide
accguggucuugguguccu

SEQ ID NO: 1596323 - RNA, 19 nt, Artificial Sequence
  Description of Artificial Sequence: Synthetic oligonucleotide
ucuuggccggcggcgaaaa

SEQ ID NO: 1596324 - RNA, 19 nt, Artificial Sequence
  Description of Artificial Sequence: Synthetic oligonucleotide
uagccugcuccauguuaaa

SEQ ID NO: 1596325 - RNA, 19 nt, Artificial Sequence
  Description of Artificial Sequence: Synthetic oligonucleotide
augguguaauuagccugcu

SEQ ID NO: 1596326 - RNA, 19 nt, Artificial Sequence
  Description of Artificial Sequence: Synthetic oligonucleotide
ccacaauagacaaugguuu

SEQ ID NO: 1596327 - RNA, 19 nt, Artificial Sequence
  Description of Artificial Sequence: Synthetic oligonucleotide
ucccgaagaaucgguucau

SEQ ID NO: 1596328 - RNA, 19 nt, Artificial Sequence
  Description of Artificial Sequence: Synthetic oligonucleotide
ggucuuguaaauccucaau

SEQ ID NO: 1596329 - RNA, 19 nt, Artificial Sequence
  Description of Artificial Sequence: Synthetic oligonucleotide
caacgcauccaacucugcu

SEQ ID NO: 1596330 - RNA, 19 nt, Artificial Sequence
  Description of Artificial Sequence: Synthetic oligonucleotide
cugcuugguuuuauuucaa

SEQ ID NO: 1596331 - RNA, 19 nt, Artificial Sequence
  Description of Artificial Sequence: Synthetic oligonucleotide
ccaucauaucuuccagcug

SEQ ID NO: 1596332 - RNA, 19 nt, Artificial Sequence
  Description of Artificial Sequence: Synthetic oligonucleotide
cugcuauccaccgucccaa

SEQ ID NO: 1596333 - RNA, 19 nt, Artificial Sequence
  Description of Artificial Sequence: Synthetic oligonucleotide
caccacuuaaacccaccua

SEQ ID NO: 1596334 - RNA, 19 nt, Artificial Sequence
  Description of Artificial Sequence: Synthetic oligonucleotide
ugcuauccaccgucccaau

SEQ ID NO: 1596335 - RNA, 19 nt, Artificial Sequence
  Description of Artificial Sequence: Synthetic oligonucleotide
ccucaucuaacucuggggu

SEQ ID NO: 1596336 - RNA, 19 nt, Artificial Sequence
  Description of Artificial Sequence: Synthetic oligonucleotide
guuuggcaaauugggaaau

SEQ ID NO: 1596337 - RNA, 19 nt, Artificial Sequence
  Description of Artificial Sequence: Synthetic oligonucleotide
auccaccgucccaaugcag

SEQ ID NO: 1596338 - RNA, 19 nt, Artificial Sequence
  Description of Artificial Sequence: Synthetic oligonucleotide
cuaacucuggggugccgua

SEQ ID NO: 1596339 - RNA, 19 nt, Artificial Sequence
  Description of Artificial Sequence: Synthetic oligonucleotide
ggagcaguguaauuagcuu

SEQ ID NO: 1596340 - RNA, 19 nt, Artificial Sequence
  Description of Artificial Sequence: Synthetic oligonucleotide
gugacugaaugguguaauu

SEQ ID NO: 1596341 - RNA, 19 nt, Artificial Sequence
  Description of Artificial Sequence: Synthetic oligonucleotide
cuuucccgaagaaucgguu

SEQ ID NO: 1596342 - RNA, 19 nt, Artificial Sequence
  Description of Artificial Sequence: Synthetic oligonucleotide
gggcaagguugucucgcug

SEQ ID NO: 1596343 - RNA, 19 nt, Artificial Sequence
  Description of Artificial Sequence: Synthetic oligonucleotide
cagcacuccauccuuguuu

SEQ ID NO: 1596344 - RNA, 19 nt, Artificial Sequence
  Description of Artificial Sequence: Synthetic oligonucleotide
caucgcccaacgcauccaa

SEQ ID NO: 1596345 - RNA, 19 nt, Artificial Sequence
  Description of Artificial Sequence: Synthetic oligonucleotide
ccaacgcauccaacucugc

SEQ ID NO: 1596346 - RNA, 19 nt, Artificial Sequence
  Description of Artificial Sequence: Synthetic oligonucleotide
ucgguucaucuuggccggc

SEQ ID NO: 1596347 - RNA, 19 nt, Artificial Sequence
  Description of Artificial Sequence: Synthetic oligonucleotide
gucaagcuacggcggcgga

SEQ ID NO: 1596348 - RNA, 19 nt, Artificial Sequence
  Description of Artificial Sequence: Synthetic oligonucleotide
ccuauacauuaaauaucaa

SEQ ID NO: 1596349 - RNA, 19 nt, Artificial Sequence
  Description of Artificial Sequence: Synthetic oligonucleotide
cagugacugaaugguguaa

SEQ ID NO: 1596350 - RNA, 19 nt, Artificial Sequence
  Description of Artificial Sequence: Synthetic oligonucleotide
ccgaagaaucgguucaucu

SEQ ID NO: 1596351 - RNA, 19 nt, Artificial Sequence
  Description of Artificial Sequence: Synthetic oligonucleotide
cacugagacuguacuucua

SEQ ID NO: 1596352 - RNA, 19 nt, Artificial Sequence
  Description of Artificial Sequence: Synthetic oligonucleotide
cugcuucgucuaaguaaga

SEQ ID NO: 1596353 - RNA, 19 nt, Artificial Sequence
  Description of Artificial Sequence: Synthetic oligonucleotide
ccaccgucccaaugcaguc

SEQ ID NO: 1596354 - RNA, 19 nt, Artificial Sequence
  Description of Artificial Sequence: Synthetic oligonucleotide
caccgucccaaugcaguca

SEQ ID NO: 1596355 - RNA, 19 nt, Artificial Sequence
  Description of Artificial Sequence: Synthetic oligonucleotide
agcuacggcggcggagccu

SEQ ID NO: 1596356 - RNA, 19 nt, Artificial Sequence
  Description of Artificial Sequence: Synthetic oligonucleotide
aucuuggccggcggcgaaa

SEQ ID NO: 1596357 - RNA, 19 nt, Artificial Sequence
  Description of Artificial Sequence: Synthetic oligonucleotide
cagaugcugcuucgucuaa

SEQ ID NO: 1596358 - RNA, 19 nt, Artificial Sequence
  Description of Artificial Sequence: Synthetic oligonucleotide
ccaccuauaacaccacaau

SEQ ID NO: 1596359 - RNA, 19 nt, Artificial Sequence
  Description of Artificial Sequence: Synthetic oligonucleotide
gggugccguagcugcgacc

SEQ ID NO: 1596360 - RNA, 19 nt, Artificial Sequence
  Description of Artificial Sequence: Synthetic oligonucleotide
ccacuuaaacccaccuaua

SEQ ID NO: 1596361 - RNA, 19 nt, Artificial Sequence
  Description of Artificial Sequence: Synthetic oligonucleotide
gcccaacgcauccaacucu

SEQ ID NO: 1596362 - RNA, 19 nt, Artificial Sequence
  Description of Artificial Sequence: Synthetic oligonucleotide
gcauccaaccgggaaauuu

SEQ ID NO: 1596363 - RNA, 19 nt, Artificial Sequence
  Description of Artificial Sequence: Synthetic oligonucleotide
caucuuggccggcggcgaa

SEQ ID NO: 1596364 - RNA, 19 nt, Artificial Sequence
  Description of Artificial Sequence: Synthetic oligonucleotide
gccuugggcuuugcuuucc

SEQ ID NO: 1596365 - RNA, 19 nt, Artificial Sequence
  Description of Artificial Sequence: Synthetic oligonucleotide
cgcccaacgcauccaacuc

SEQ ID NO: 1596366 - RNA, 19 nt, Artificial Sequence
  Description of Artificial Sequence: Synthetic oligonucleotide
gcuuucccgaagaaucggu

SEQ ID NO: 1596367 - RNA, 19 nt, Artificial Sequence
  Description of Artificial Sequence: Synthetic oligonucleotide
cccgaagaaucgguucauc

SEQ ID NO: 1596368 - RNA, 19 nt, Artificial Sequence
  Description of Artificial Sequence: Synthetic oligonucleotide
ccuuuacucccaauuucau

SEQ ID NO: 1596369 - RNA, 19 nt, Artificial Sequence
  Description of Artificial Sequence: Synthetic oligonucleotide
cuacggcggcggagccuug

SEQ ID NO: 1596370 - RNA, 19 nt, Artificial Sequence
  Description of Artificial Sequence: Synthetic oligonucleotide
gugucagugggaacaccuu

SEQ ID NO: 1596371 - RNA, 19 nt, Artificial Sequence
  Description of Artificial Sequence: Synthetic oligonucleotide
caucaaccguggucuuggu

SEQ ID NO: 1596372 - RNA, 19 nt, Artificial Sequence
  Description of Artificial Sequence: Synthetic oligonucleotide
gcuuucuguuugaccauau

SEQ ID NO: 1596373 - RNA, 19 nt, Artificial Sequence
  Description of Artificial Sequence: Synthetic oligonucleotide
cgacccagugcuuccugga

SEQ ID NO: 1596374 - RNA, 19 nt, Artificial Sequence
  Description of Artificial Sequence: Synthetic oligonucleotide
ggcggagccuugggcuuug

SEQ ID NO: 1596375 - RNA, 19 nt, Artificial Sequence
  Description of Artificial Sequence: Synthetic oligonucleotide
gcuacggcggcggagccuu

SEQ ID NO: 1596376 - RNA, 19 nt, Artificial Sequence
  Description of Artificial Sequence: Synthetic oligonucleotide
ccagaagcucaucgcccaa

SEQ ID NO: 1596377 - RNA, 19 nt, Artificial Sequence
  Description of Artificial Sequence: Synthetic oligonucleotide
gcggcggagccuugggcuu

SEQ ID NO: 1596378 - RNA, 19 nt, Artificial Sequence
  Description of Artificial Sequence: Synthetic oligonucleotide
gcggagccuugggcuuugc

SEQ ID NO: 1596379 - RNA, 19 nt, Artificial Sequence
  Description of Artificial Sequence: Synthetic oligonucleotide
cgucgugugcuggaaugcu

SEQ ID NO: 1596380 - RNA, 19 nt, Artificial Sequence
  Description of Artificial Sequence: Synthetic oligonucleotide
cggcggagccuugggcuuu

SEQ ID NO: 1596381 - RNA, 19 nt, Artificial Sequence
  Description of Artificial Sequence: Synthetic oligonucleotide
aaauauacgaaucuguuua

SEQ ID NO: 1596382 - RNA, 19 nt, Artificial Sequence
  Description of Artificial Sequence: Synthetic oligonucleotide
aaucucacugaauucguac

SEQ ID NO: 1596383 - RNA, 19 nt, Artificial Sequence
  Description of Artificial Sequence: Synthetic oligonucleotide
auuccugacagucuggccc

SEQ ID NO: 1596384 - RNA, 19 nt, Artificial Sequence
  Description of Artificial Sequence: Synthetic oligonucleotide
ucaauaacuuaaaagggug

SEQ ID NO: 1596385 - RNA, 19 nt, Artificial Sequence
  Description of Artificial Sequence: Synthetic oligonucleotide
acuuaaaagggugagaguc

SEQ ID NO: 1596386 - RNA, 19 nt, Artificial Sequence
  Description of Artificial Sequence: Synthetic oligonucleotide
ucacaaauccucaugggag

SEQ ID NO: 1596387 - RNA, 19 nt, Artificial Sequence
  Description of Artificial Sequence: Synthetic oligonucleotide
guugcugucacacaggccc

SEQ ID NO: 1596388 - RNA, 19 nt, Artificial Sequence
  Description of Artificial Sequence: Synthetic oligonucleotide
uguugguuggaccugagca

SEQ ID NO: 1596389 - RNA, 19 nt, Artificial Sequence
  Description of Artificial Sequence: Synthetic oligonucleotide
ucaacauccacacaggcau

SEQ ID NO: 1596390 - RNA, 19 nt, Artificial Sequence
  Description of Artificial Sequence: Synthetic oligonucleotide
aguaucaaaauauacgaau

SEQ ID NO: 1596391 - RNA, 19 nt, Artificial Sequence
  Description of Artificial Sequence: Synthetic oligonucleotide
agaaaugggguugaugucc

SEQ ID NO: 1596392 - RNA, 19 nt, Artificial Sequence
  Description of Artificial Sequence: Synthetic oligonucleotide
aaagucguugcugucacac

SEQ ID NO: 1596393 - RNA, 19 nt, Artificial Sequence
  Description of Artificial Sequence: Synthetic oligonucleotide
uguacauugcugcagggug

SEQ ID NO: 1596394 - RNA, 19 nt, Artificial Sequence
  Description of Artificial Sequence: Synthetic oligonucleotide
acucuuuacaauuggcugg

SEQ ID NO: 1596395 - RNA, 19 nt, Artificial Sequence
  Description of Artificial Sequence: Synthetic oligonucleotide
uuuaagaaccaccaagaaa

SEQ ID NO: 1596396 - RNA, 19 nt, Artificial Sequence
  Description of Artificial Sequence: Synthetic oligonucleotide
aauucguacuuggacagac

SEQ ID NO: 1596397 - RNA, 19 nt, Artificial Sequence
  Description of Artificial Sequence: Synthetic oligonucleotide
uuucuaaugagcauucauc

SEQ ID NO: 1596398 - RNA, 19 nt, Artificial Sequence
  Description of Artificial Sequence: Synthetic oligonucleotide
uucuaaugagcauucaucu

SEQ ID NO: 1596399 - RNA, 19 nt, Artificial Sequence
  Description of Artificial Sequence: Synthetic oligonucleotide
augcagucgauacacagcg

SEQ ID NO: 1596400 - RNA, 19 nt, Artificial Sequence
  Description of Artificial Sequence: Synthetic oligonucleotide
ugaauucguacuuggacag

SEQ ID NO: 1596401 - RNA, 19 nt, Artificial Sequence
  Description of Artificial Sequence: Synthetic oligonucleotide
aagaaccaccaagaaaugc

SEQ ID NO: 1596402 - RNA, 19 nt, Artificial Sequence
  Description of Artificial Sequence: Synthetic oligonucleotide
uuuacaauuggcugggccu

SEQ ID NO: 1596403 - RNA, 19 nt, Artificial Sequence
  Description of Artificial Sequence: Synthetic oligonucleotide
guugguugcauucaaaguc

SEQ ID NO: 1596404 - RNA, 19 nt, Artificial Sequence
  Description of Artificial Sequence: Synthetic oligonucleotide
uacuguacauugcugcagg

SEQ ID NO: 1596405 - RNA, 19 nt, Artificial Sequence
  Description of Artificial Sequence: Synthetic oligonucleotide
acucaaauagguuagggua

SEQ ID NO: 1596406 - RNA, 19 nt, Artificial Sequence
  Description of Artificial Sequence: Synthetic oligonucleotide
gaguugguugcauucaaag

SEQ ID NO: 1596407 - RNA, 19 nt, Artificial Sequence
  Description of Artificial Sequence: Synthetic oligonucleotide
ucuuacacaccuuuguuuc

SEQ ID NO: 1596408 - RNA, 19 nt, Artificial Sequence
  Description of Artificial Sequence: Synthetic oligonucleotide
uagaaucacacucuucaca

SEQ ID NO: 1596409 - RNA, 19 nt, Artificial Sequence
  Description of Artificial Sequence: Synthetic oligonucleotide
cuuaaaagggugagagucc

SEQ ID NO: 1596410 - RNA, 19 nt, Artificial Sequence
  Description of Artificial Sequence: Synthetic oligonucleotide
uucugaaccuggaugcccg

SEQ ID NO: 1596411 - RNA, 19 nt, Artificial Sequence
  Description of Artificial Sequence: Synthetic oligonucleotide
ucuauaucugcacacucuc

SEQ ID NO: 1596412 - RNA, 19 nt, Artificial Sequence
  Description of Artificial Sequence: Synthetic oligonucleotide
uauccuacgugacacuggc

SEQ ID NO: 1596413 - RNA, 19 nt, Artificial Sequence
  Description of Artificial Sequence: Synthetic oligonucleotide
agcaguagcagcccgacug

SEQ ID NO: 1596414 - RNA, 19 nt, Artificial Sequence
  Description of Artificial Sequence: Synthetic oligonucleotide
cacauugucggcuuccggg

SEQ ID NO: 1596415 - RNA, 19 nt, Artificial Sequence
  Description of Artificial Sequence: Synthetic oligonucleotide
agaaucacacucuucacau

SEQ ID NO: 1596416 - RNA, 19 nt, Artificial Sequence
  Description of Artificial Sequence: Synthetic oligonucleotide
uguccucucaauaacuuaa

SEQ ID NO: 1596417 - RNA, 19 nt, Artificial Sequence
  Description of Artificial Sequence: Synthetic oligonucleotide
aggauguccucucaauaac

SEQ ID NO: 1596418 - RNA, 19 nt, Artificial Sequence
  Description of Artificial Sequence: Synthetic oligonucleotide
cucaaauagguuaggguac

SEQ ID NO: 1596419 - RNA, 19 nt, Artificial Sequence
  Description of Artificial Sequence: Synthetic oligonucleotide
acagcggccccuuguaucc

SEQ ID NO: 1596420 - RNA, 19 nt, Artificial Sequence
  Description of Artificial Sequence: Synthetic oligonucleotide
aauauacgaaucuguuuaa

SEQ ID NO: 1596421 - RNA, 19 nt, Artificial Sequence
  Description of Artificial Sequence: Synthetic oligonucleotide
uguacacagaaccacucaa

SEQ ID NO: 1596422 - RNA, 19 nt, Artificial Sequence
  Description of Artificial Sequence: Synthetic oligonucleotide
uugcauucaaagucguugc

SEQ ID NO: 1596423 - RNA, 19 nt, Artificial Sequence
  Description of Artificial Sequence: Synthetic oligonucleotide
uuuguuucuaaugagcauu

SEQ ID NO: 1596424 - RNA, 19 nt, Artificial Sequence
  Description of Artificial Sequence: Synthetic oligonucleotide
agucguugcugucacacag

SEQ ID NO: 1596425 - RNA, 19 nt, Artificial Sequence
  Description of Artificial Sequence: Synthetic oligonucleotide
uuuucuauaggauguccuc

SEQ ID NO: 1596426 - RNA, 19 nt, Artificial Sequence
  Description of Artificial Sequence: Synthetic oligonucleotide
ugggccacauuuucuauag

SEQ ID NO: 1596427 - RNA, 19 nt, Artificial Sequence
  Description of Artificial Sequence: Synthetic oligonucleotide
cuuuacaauuggcugggcc

SEQ ID NO: 1596428 - RNA, 19 nt, Artificial Sequence
  Description of Artificial Sequence: Synthetic oligonucleotide
agucgauacacagcggccc

SEQ ID NO: 1596429 - RNA, 19 nt, Artificial Sequence
  Description of Artificial Sequence: Synthetic oligonucleotide
uucguacuuggacagacuc

SEQ ID NO: 1596430 - RNA, 19 nt, Artificial Sequence
  Description of Artificial Sequence: Synthetic oligonucleotide
cuuguauccuacgugacac

SEQ ID NO: 1596431 - RNA, 19 nt, Artificial Sequence
  Description of Artificial Sequence: Synthetic oligonucleotide
ucuccucgaaaccuuccgg

SEQ ID NO: 1596432 - RNA, 19 nt, Artificial Sequence
  Description of Artificial Sequence: Synthetic oligonucleotide
aacuuaaaagggugagagu

SEQ ID NO: 1596433 - RNA, 19 nt, Artificial Sequence
  Description of Artificial Sequence: Synthetic oligonucleotide
gaaccacucaaauagguua

SEQ ID NO: 1596434 - RNA, 19 nt, Artificial Sequence
  Description of Artificial Sequence: Synthetic oligonucleotide
aaagggugagaguccagcu

SEQ ID NO: 1596435 - RNA, 19 nt, Artificial Sequence
  Description of Artificial Sequence: Synthetic oligonucleotide
gaacaguaucaaaauauac

SEQ ID NO: 1596436 - RNA, 19 nt, Artificial Sequence
  Description of Artificial Sequence: Synthetic oligonucleotide
uuaaaagggugagagucca

SEQ ID NO: 1596437 - RNA, 19 nt, Artificial Sequence
  Description of Artificial Sequence: Synthetic oligonucleotide
acacaggcccuccauaauc

SEQ ID NO: 1596438 - RNA, 19 nt, Artificial Sequence
  Description of Artificial Sequence: Synthetic oligonucleotide
acuuccuggagaaaugggg

SEQ ID NO: 1596439 - RNA, 19 nt, Artificial Sequence
  Description of Artificial Sequence: Synthetic oligonucleotide
uaggauguccucucaauaa

SEQ ID NO: 1596440 - RNA, 19 nt, Artificial Sequence
  Description of Artificial Sequence: Synthetic oligonucleotide
gccguugacauuuucacag

SEQ ID NO: 1596441 - RNA, 19 nt, Artificial Sequence
  Description of Artificial Sequence: Synthetic oligonucleotide
cugaauucguacuuggaca

SEQ ID NO: 1596442 - RNA, 19 nt, Artificial Sequence
  Description of Artificial Sequence: Synthetic oligonucleotide
cagucuggcccauaggugc

SEQ ID NO: 1596443 - RNA, 19 nt, Artificial Sequence
  Description of Artificial Sequence: Synthetic oligonucleotide
auguguaggagccguugac

SEQ ID NO: 1596444 - RNA, 19 nt, Artificial Sequence
  Description of Artificial Sequence: Synthetic oligonucleotide
aaccacucaaauagguuag

SEQ ID NO: 1596445 - RNA, 19 nt, Artificial Sequence
  Description of Artificial Sequence: Synthetic oligonucleotide
cuucgcacuccacacagcc

SEQ ID NO: 1596446 - RNA, 19 nt, Artificial Sequence
  Description of Artificial Sequence: Synthetic oligonucleotide
aguugguugcauucaaagu

SEQ ID NO: 1596447 - RNA, 19 nt, Artificial Sequence
  Description of Artificial Sequence: Synthetic oligonucleotide
uucaaagucguugcuguca

SEQ ID NO: 1596448 - RNA, 19 nt, Artificial Sequence
  Description of Artificial Sequence: Synthetic oligonucleotide
agagaacugcuguggaguc

SEQ ID NO: 1596449 - RNA, 19 nt, Artificial Sequence
  Description of Artificial Sequence: Synthetic oligonucleotide
ugugggacuuuccucugcc

SEQ ID NO: 1596450 - RNA, 19 nt, Artificial Sequence
  Description of Artificial Sequence: Synthetic oligonucleotide
agaaccaccaagaaaugca

SEQ ID NO: 1596451 - RNA, 19 nt, Artificial Sequence
  Description of Artificial Sequence: Synthetic oligonucleotide
uguauccuacgugacacug

SEQ ID NO: 1596452 - RNA, 19 nt, Artificial Sequence
  Description of Artificial Sequence: Synthetic oligonucleotide
uuuaaagggccaagugagu

SEQ ID NO: 1596453 - RNA, 19 nt, Artificial Sequence
  Description of Artificial Sequence: Synthetic oligonucleotide
ugcacacucuccuuucugc

SEQ ID NO: 1596454 - RNA, 19 nt, Artificial Sequence
  Description of Artificial Sequence: Synthetic oligonucleotide
uguguacacagaaccacuc

SEQ ID NO: 1596455 - RNA, 19 nt, Artificial Sequence
  Description of Artificial Sequence: Synthetic oligonucleotide
ugaaccuggaugcccguca

SEQ ID NO: 1596456 - RNA, 19 nt, Artificial Sequence
  Description of Artificial Sequence: Synthetic oligonucleotide
gagccguugacauuuucac

SEQ ID NO: 1596457 - RNA, 19 nt, Artificial Sequence
  Description of Artificial Sequence: Synthetic oligonucleotide
uccggacacacgcagacaa

SEQ ID NO: 1596458 - RNA, 19 nt, Artificial Sequence
  Description of Artificial Sequence: Synthetic oligonucleotide
cuauaucugcacacucucc

SEQ ID NO: 1596459 - RNA, 19 nt, Artificial Sequence
  Description of Artificial Sequence: Synthetic oligonucleotide
gaaccaccaagaaaugcag

SEQ ID NO: 1596460 - RNA, 19 nt, Artificial Sequence
  Description of Artificial Sequence: Synthetic oligonucleotide
uguacacaagcaucuucug

SEQ ID NO: 1596461 - RNA, 19 nt, Artificial Sequence
  Description of Artificial Sequence: Synthetic oligonucleotide
aucuguuuaagaaccacca

SEQ ID NO: 1596462 - RNA, 19 nt, Artificial Sequence
  Description of Artificial Sequence: Synthetic oligonucleotide
cucgaaaccuuccggacac

SEQ ID NO: 1596463 - RNA, 19 nt, Artificial Sequence
  Description of Artificial Sequence: Synthetic oligonucleotide
uuaaagggccaagugagua

SEQ ID NO: 1596464 - RNA, 19 nt, Artificial Sequence
  Description of Artificial Sequence: Synthetic oligonucleotide
aagaguugguugcauucaa

SEQ ID NO: 1596465 - RNA, 19 nt, Artificial Sequence
  Description of Artificial Sequence: Synthetic oligonucleotide
gaaucuguuuaagaaccac

SEQ ID NO: 1596466 - RNA, 19 nt, Artificial Sequence
  Description of Artificial Sequence: Synthetic oligonucleotide
agccgaaucucacugaauu

SEQ ID NO: 1596467 - RNA, 19 nt, Artificial Sequence
  Description of Artificial Sequence: Synthetic oligonucleotide
ucuaaugagcauucaucua

SEQ ID NO: 1596468 - RNA, 19 nt, Artificial Sequence
  Description of Artificial Sequence: Synthetic oligonucleotide
ucuucagugucugccacca

SEQ ID NO: 1596469 - RNA, 19 nt, Artificial Sequence
  Description of Artificial Sequence: Synthetic oligonucleotide
cagagauacacucuuuaca

SEQ ID NO: 1596470 - RNA, 19 nt, Artificial Sequence
  Description of Artificial Sequence: Synthetic oligonucleotide
ugggacuuuccucugccac

SEQ ID NO: 1596471 - RNA, 19 nt, Artificial Sequence
  Description of Artificial Sequence: Synthetic oligonucleotide
cucccuggaguauuguagc

SEQ ID NO: 1596472 - RNA, 19 nt, Artificial Sequence
  Description of Artificial Sequence: Synthetic oligonucleotide
uacauugcugcaggguggg

SEQ ID NO: 1596473 - RNA, 19 nt, Artificial Sequence
  Description of Artificial Sequence: Synthetic oligonucleotide
acuguacauugcugcaggg

SEQ ID NO: 1596474 - RNA, 19 nt, Artificial Sequence
  Description of Artificial Sequence: Synthetic oligonucleotide
uucaaugaucaauuuuauu

SEQ ID NO: 1596475 - RNA, 19 nt, Artificial Sequence
  Description of Artificial Sequence: Synthetic oligonucleotide
uccuucuuacacaccuuug

SEQ ID NO: 1596476 - RNA, 19 nt, Artificial Sequence
  Description of Artificial Sequence: Synthetic oligonucleotide
acgugacacuggcaggacc

SEQ ID NO: 1596477 - RNA, 19 nt, Artificial Sequence
  Description of Artificial Sequence: Synthetic oligonucleotide
agcaagcugaaguagccau

SEQ ID NO: 1596478 - RNA, 19 nt, Artificial Sequence
  Description of Artificial Sequence: Synthetic oligonucleotide
uguguaggagccguugaca

SEQ ID NO: 1596479 - RNA, 19 nt, Artificial Sequence
  Description of Artificial Sequence: Synthetic oligonucleotide
gaaaccuuccggacacacg

SEQ ID NO: 1596480 - RNA, 19 nt, Artificial Sequence
  Description of Artificial Sequence: Synthetic oligonucleotide
ccgaaauucuuccuggccg

SEQ ID NO: 1596481 - RNA, 19 nt, Artificial Sequence
  Description of Artificial Sequence: Synthetic oligonucleotide
uaaaagggugagaguccag

SEQ ID NO: 1596482 - RNA, 19 nt, Artificial Sequence
  Description of Artificial Sequence: Synthetic oligonucleotide
gugaguaucuacuguuuca

SEQ ID NO: 1596483 - RNA, 19 nt, Artificial Sequence
  Description of Artificial Sequence: Synthetic oligonucleotide
ugcauucaaagucguugcu

SEQ ID NO: 1596484 - RNA, 19 nt, Artificial Sequence
  Description of Artificial Sequence: Synthetic oligonucleotide
ucguacuuggacagacucu

SEQ ID NO: 1596485 - RNA, 19 nt, Artificial Sequence
  Description of Artificial Sequence: Synthetic oligonucleotide
uaaagggccaagugaguau

SEQ ID NO: 1596486 - RNA, 19 nt, Artificial Sequence
  Description of Artificial Sequence: Synthetic oligonucleotide
cuguuucaaagcaggcagc

SEQ ID NO: 1596487 - RNA, 19 nt, Artificial Sequence
  Description of Artificial Sequence: Synthetic oligonucleotide
cuaaugagcauucaucuau

SEQ ID NO: 1596488 - RNA, 19 nt, Artificial Sequence
  Description of Artificial Sequence: Synthetic oligonucleotide
acauugucggcuuccggga

SEQ ID NO: 1596489 - RNA, 19 nt, Artificial Sequence
  Description of Artificial Sequence: Synthetic oligonucleotide
uccacacguguccagccca

SEQ ID NO: 1596490 - RNA, 19 nt, Artificial Sequence
  Description of Artificial Sequence: Synthetic oligonucleotide
augcccgucacaaauccuc

SEQ ID NO: 1596491 - RNA, 19 nt, Artificial Sequence
  Description of Artificial Sequence: Synthetic oligonucleotide
guagcagcccgacugcggc

SEQ ID NO: 1596492 - RNA, 19 nt, Artificial Sequence
  Description of Artificial Sequence: Synthetic oligonucleotide
ccacauuuucuauaggaug

SEQ ID NO: 1596493 - RNA, 19 nt, Artificial Sequence
  Description of Artificial Sequence: Synthetic oligonucleotide
acagaaccacucaaauagg

SEQ ID NO: 1596494 - RNA, 19 nt, Artificial Sequence
  Description of Artificial Sequence: Synthetic oligonucleotide
gcagucgauacacagcggc

SEQ ID NO: 1596495 - RNA, 19 nt, Artificial Sequence
  Description of Artificial Sequence: Synthetic oligonucleotide
gagaaaugggguugauguc

SEQ ID NO: 1596496 - RNA, 19 nt, Artificial Sequence
  Description of Artificial Sequence: Synthetic oligonucleotide
accugagcaugucuugcag

SEQ ID NO: 1596497 - RNA, 19 nt, Artificial Sequence
  Description of Artificial Sequence: Synthetic oligonucleotide
guugccgccgccgaaauuc

SEQ ID NO: 1596498 - RNA, 19 nt, Artificial Sequence
  Description of Artificial Sequence: Synthetic oligonucleotide
auggcgggugcacugccgg

SEQ ID NO: 1596499 - RNA, 19 nt, Artificial Sequence
  Description of Artificial Sequence: Synthetic oligonucleotide
aagucguugcugucacaca

SEQ ID NO: 1596500 - RNA, 19 nt, Artificial Sequence
  Description of Artificial Sequence: Synthetic oligonucleotide
aauccucaugggagggugg

SEQ ID NO: 1596501 - RNA, 19 nt, Artificial Sequence
  Description of Artificial Sequence: Synthetic oligonucleotide
accggcagagaacugcugu

SEQ ID NO: 1596502 - RNA, 19 nt, Artificial Sequence
  Description of Artificial Sequence: Synthetic oligonucleotide
cagucgauacacagcggcc

SEQ ID NO: 1596503 - RNA, 19 nt, Artificial Sequence
  Description of Artificial Sequence: Synthetic oligonucleotide
caggagccgaaucucacug

SEQ ID NO: 1596504 - RNA, 19 nt, Artificial Sequence
  Description of Artificial Sequence: Synthetic oligonucleotide
ccgaaucucacugaauucg

SEQ ID NO: 1596505 - RNA, 19 nt, Artificial Sequence
  Description of Artificial Sequence: Synthetic oligonucleotide
uccucgaaaccuuccggac

SEQ ID NO: 1596506 - RNA, 19 nt, Artificial Sequence
  Description of Artificial Sequence: Synthetic oligonucleotide
guauccuacgugacacugg

SEQ ID NO: 1596507 - RNA, 19 nt, Artificial Sequence
  Description of Artificial Sequence: Synthetic oligonucleotide
accuuccggacacacgcag

SEQ ID NO: 1596508 - RNA, 19 nt, Artificial Sequence
  Description of Artificial Sequence: Synthetic oligonucleotide
cauucaaagucguugcugu

SEQ ID NO: 1596509 - RNA, 19 nt, Artificial Sequence
  Description of Artificial Sequence: Synthetic oligonucleotide
acacagguagaaucacacu

SEQ ID NO: 1596510 - RNA, 19 nt, Artificial Sequence
  Description of Artificial Sequence: Synthetic oligonucleotide
cuacaaggccucugagacc

SEQ ID NO: 1596511 - RNA, 19 nt, Artificial Sequence
  Description of Artificial Sequence: Synthetic oligonucleotide
aaagcucccuggaguauug

SEQ ID NO: 1596512 - RNA, 19 nt, Artificial Sequence
  Description of Artificial Sequence: Synthetic oligonucleotide
ggucucguuccucagcaag

SEQ ID NO: 1596513 - RNA, 19 nt, Artificial Sequence
  Description of Artificial Sequence: Synthetic oligonucleotide
cuguacacaagcaucuucu

SEQ ID NO: 1596514 - RNA, 19 nt, Artificial Sequence
  Description of Artificial Sequence: Synthetic oligonucleotide
ugugggucucguuccucag

SEQ ID NO: 1596515 - RNA, 19 nt, Artificial Sequence
  Description of Artificial Sequence: Synthetic oligonucleotide
ugguugcauucaaagucgu

SEQ ID NO: 1596516 - RNA, 19 nt, Artificial Sequence
  Description of Artificial Sequence: Synthetic oligonucleotide
ugcccgucacaaauccuca

SEQ ID NO: 1596517 - RNA, 19 nt, Artificial Sequence
  Description of Artificial Sequence: Synthetic oligonucleotide
caguaucaaaauauacgaa

SEQ ID NO: 1596518 - RNA, 19 nt, Artificial Sequence
  Description of Artificial Sequence: Synthetic oligonucleotide
agcguuuuaaagggccaag

SEQ ID NO: 1596519 - RNA, 19 nt, Artificial Sequence
  Description of Artificial Sequence: Synthetic oligonucleotide
acauguguaggagccguug

SEQ ID NO: 1596520 - RNA, 19 nt, Artificial Sequence
  Description of Artificial Sequence: Synthetic oligonucleotide
ccauccaugcagucgauac

SEQ ID NO: 1596521 - RNA, 19 nt, Artificial Sequence
  Description of Artificial Sequence: Synthetic oligonucleotide
ggaugcccgucacaaaucc

SEQ ID NO: 1596522 - RNA, 19 nt, Artificial Sequence
  Description of Artificial Sequence: Synthetic oligonucleotide
gaaaugggguugaugucca

SEQ ID NO: 1596523 - RNA, 19 nt, Artificial Sequence
  Description of Artificial Sequence: Synthetic oligonucleotide
gucgauacacagcggcccc

SEQ ID NO: 1596524 - RNA, 19 nt, Artificial Sequence
  Description of Artificial Sequence: Synthetic oligonucleotide
uggaugcccgucacaaauc

SEQ ID NO: 1596525 - RNA, 19 nt, Artificial Sequence
  Description of Artificial Sequence: Synthetic oligonucleotide
ucccuggaguauuguagca

SEQ ID NO: 1596526 - RNA, 19 nt, Artificial Sequence
  Description of Artificial Sequence: Synthetic oligonucleotide
agccguugacauuuucaca

SEQ ID NO: 1596527 - RNA, 19 nt, Artificial Sequence
  Description of Artificial Sequence: Synthetic oligonucleotide
guuucuaaugagcauucau

SEQ ID NO: 1596528 - RNA, 19 nt, Artificial Sequence
  Description of Artificial Sequence: Synthetic oligonucleotide
uacacagcggccccuugua

SEQ ID NO: 1596529 - RNA, 19 nt, Artificial Sequence
  Description of Artificial Sequence: Synthetic oligonucleotide
uuguauccuacgugacacu

SEQ ID NO: 1596530 - RNA, 19 nt, Artificial Sequence
  Description of Artificial Sequence: Synthetic oligonucleotide
ccaugcagucgauacacag

SEQ ID NO: 1596531 - RNA, 19 nt, Artificial Sequence
  Description of Artificial Sequence: Synthetic oligonucleotide
auguccucucaauaacuua

SEQ ID NO: 1596532 - RNA, 19 nt, Artificial Sequence
  Description of Artificial Sequence: Synthetic oligonucleotide
ugcuguagccagagauaca

SEQ ID NO: 1596533 - RNA, 19 nt, Artificial Sequence
  Description of Artificial Sequence: Synthetic oligonucleotide
gccaagugaguaucuacug

SEQ ID NO: 1596534 - RNA, 19 nt, Artificial Sequence
  Description of Artificial Sequence: Synthetic oligonucleotide
ccaagaguugguugcauuc

SEQ ID NO: 1596535 - RNA, 19 nt, Artificial Sequence
  Description of Artificial Sequence: Synthetic oligonucleotide
gauacacagcggccccuug

SEQ ID NO: 1596536 - RNA, 19 nt, Artificial Sequence
  Description of Artificial Sequence: Synthetic oligonucleotide
cuccucgaaaccuuccgga

SEQ ID NO: 1596537 - RNA, 19 nt, Artificial Sequence
  Description of Artificial Sequence: Synthetic oligonucleotide
ggaguauuguagcaguucu

SEQ ID NO: 1596538 - RNA, 19 nt, Artificial Sequence
  Description of Artificial Sequence: Synthetic oligonucleotide
cauggcgggugcacugccg

SEQ ID NO: 1596539 - RNA, 19 nt, Artificial Sequence
  Description of Artificial Sequence: Synthetic oligonucleotide
ccagagauacacucuuuac

SEQ ID NO: 1596540 - RNA, 19 nt, Artificial Sequence
  Description of Artificial Sequence: Synthetic oligonucleotide
agacccacccuggcauucc

SEQ ID NO: 1596541 - RNA, 19 nt, Artificial Sequence
  Description of Artificial Sequence: Synthetic oligonucleotide
aggagccguugacauuuuc

SEQ ID NO: 1596542 - RNA, 19 nt, Artificial Sequence
  Description of Artificial Sequence: Synthetic oligonucleotide
cacaguacuguacauugcu

SEQ ID NO: 1596543 - RNA, 19 nt, Artificial Sequence
  Description of Artificial Sequence: Synthetic oligonucleotide
uugauguccaugggccaca

SEQ ID NO: 1596544 - RNA, 19 nt, Artificial Sequence
  Description of Artificial Sequence: Synthetic oligonucleotide
agguuaggguacuccuucu

SEQ ID NO: 1596545 - RNA, 19 nt, Artificial Sequence
  Description of Artificial Sequence: Synthetic oligonucleotide
caaaacuuccuggagaaau

SEQ ID NO: 1596546 - RNA, 19 nt, Artificial Sequence
  Description of Artificial Sequence: Synthetic oligonucleotide
aaccuggaugcccgucaca

SEQ ID NO: 1596547 - RNA, 19 nt, Artificial Sequence
  Description of Artificial Sequence: Synthetic oligonucleotide
uccucccacgccguguugc

SEQ ID NO: 1596548 - RNA, 19 nt, Artificial Sequence
  Description of Artificial Sequence: Synthetic oligonucleotide
augcagcguuuuaaagggc

SEQ ID NO: 1596549 - RNA, 19 nt, Artificial Sequence
  Description of Artificial Sequence: Synthetic oligonucleotide
ucggcuuccgggaggccac

SEQ ID NO: 1596550 - RNA, 19 nt, Artificial Sequence
  Description of Artificial Sequence: Synthetic oligonucleotide
ggacccgucgcccugucug

SEQ ID NO: 1596551 - RNA, 19 nt, Artificial Sequence
  Description of Artificial Sequence: Synthetic oligonucleotide
cauguguaggagccguuga

SEQ ID NO: 1596552 - RNA, 19 nt, Artificial Sequence
  Description of Artificial Sequence: Synthetic oligonucleotide
ggagucucggccuccgccc

SEQ ID NO: 1596553 - RNA, 19 nt, Artificial Sequence
  Description of Artificial Sequence: Synthetic oligonucleotide
cuacgugacacuggcagga

SEQ ID NO: 1596554 - RNA, 19 nt, Artificial Sequence
  Description of Artificial Sequence: Synthetic oligonucleotide
gccgaaauucuuccuggcc

SEQ ID NO: 1596555 - RNA, 19 nt, Artificial Sequence
  Description of Artificial Sequence: Synthetic oligonucleotide
uggcacauugucggcuucc

SEQ ID NO: 1596556 - RNA, 19 nt, Artificial Sequence
  Description of Artificial Sequence: Synthetic oligonucleotide
caagaguugguugcauuca

SEQ ID NO: 1596557 - RNA, 19 nt, Artificial Sequence
  Description of Artificial Sequence: Synthetic oligonucleotide
aaaugggguugauguccau

SEQ ID NO: 1596558 - RNA, 19 nt, Artificial Sequence
  Description of Artificial Sequence: Synthetic oligonucleotide
cacguguccagcccacuuc

SEQ ID NO: 1596559 - RNA, 19 nt, Artificial Sequence
  Description of Artificial Sequence: Synthetic oligonucleotide
ucuuuacaauuggcugggc

SEQ ID NO: 1596560 - RNA, 19 nt, Artificial Sequence
  Description of Artificial Sequence: Synthetic oligonucleotide
cugcacacucuccuuucug

SEQ ID NO: 1596561 - RNA, 19 nt, Artificial Sequence
  Description of Artificial Sequence: Synthetic oligonucleotide
cugcacacucgucaacauc

SEQ ID NO: 1596562 - RNA, 19 nt, Artificial Sequence
  Description of Artificial Sequence: Synthetic oligonucleotide
cacugaauucguacuugga

SEQ ID NO: 1596563 - RNA, 19 nt, Artificial Sequence
  Description of Artificial Sequence: Synthetic oligonucleotide
ucugaaccuggaugcccgu

SEQ ID NO: 1596564 - RNA, 19 nt, Artificial Sequence
  Description of Artificial Sequence: Synthetic oligonucleotide
ugagcaugucuugcaggac

SEQ ID NO: 1596565 - RNA, 19 nt, Artificial Sequence
  Description of Artificial Sequence: Synthetic oligonucleotide
cagaaccacucaaauaggu

SEQ ID NO: 1596566 - RNA, 19 nt, Artificial Sequence
  Description of Artificial Sequence: Synthetic oligonucleotide
aggugcauggcgggugcac

SEQ ID NO: 1596567 - RNA, 19 nt, Artificial Sequence
  Description of Artificial Sequence: Synthetic oligonucleotide
cauccaugcagucgauaca

SEQ ID NO: 1596568 - RNA, 19 nt, Artificial Sequence
  Description of Artificial Sequence: Synthetic oligonucleotide
acacgcagacaaagcuccc

SEQ ID NO: 1596569 - RNA, 19 nt, Artificial Sequence
  Description of Artificial Sequence: Synthetic oligonucleotide
guugguuggaccugagcau

SEQ ID NO: 1596570 - RNA, 19 nt, Artificial Sequence
  Description of Artificial Sequence: Synthetic oligonucleotide
gacccgucgcccugucugc

SEQ ID NO: 1596571 - RNA, 19 nt, Artificial Sequence
  Description of Artificial Sequence: Synthetic oligonucleotide
cuuuguugguuggaccuga

SEQ ID NO: 1596572 - RNA, 19 nt, Artificial Sequence
  Description of Artificial Sequence: Synthetic oligonucleotide
gaauucguacuuggacaga

SEQ ID NO: 1596573 - RNA, 19 nt, Artificial Sequence
  Description of Artificial Sequence: Synthetic oligonucleotide
gccgccgaaauucuuccug

SEQ ID NO: 1596574 - RNA, 19 nt, Artificial Sequence
  Description of Artificial Sequence: Synthetic oligonucleotide
aagggccaagugaguaucu

SEQ ID NO: 1596575 - RNA, 19 nt, Artificial Sequence
  Description of Artificial Sequence: Synthetic oligonucleotide
cccacuucgcacuccacac

SEQ ID NO: 1596576 - RNA, 19 nt, Artificial Sequence
  Description of Artificial Sequence: Synthetic oligonucleotide
cuggccguguuggccaucc

SEQ ID NO: 1596577 - RNA, 19 nt, Artificial Sequence
  Description of Artificial Sequence: Synthetic oligonucleotide
ccuggcauuccugacaguc

SEQ ID NO: 1596578 - RNA, 19 nt, Artificial Sequence
  Description of Artificial Sequence: Synthetic oligonucleotide
gcagacaaagcucccugga

SEQ ID NO: 1596579 - RNA, 19 nt, Artificial Sequence
  Description of Artificial Sequence: Synthetic oligonucleotide
caaauagguuaggguacuc

SEQ ID NO: 1596580 - RNA, 19 nt, Artificial Sequence
  Description of Artificial Sequence: Synthetic oligonucleotide
ggagccguugacauuuuca

SEQ ID NO: 1596581 - RNA, 19 nt, Artificial Sequence
  Description of Artificial Sequence: Synthetic oligonucleotide
agcucccuggaguauugua

SEQ ID NO: 1596582 - RNA, 19 nt, Artificial Sequence
  Description of Artificial Sequence: Synthetic oligonucleotide
auucguacuuggacagacu

SEQ ID NO: 1596583 - RNA, 19 nt, Artificial Sequence
  Description of Artificial Sequence: Synthetic oligonucleotide
gauguccucucaauaacuu

SEQ ID NO: 1596584 - RNA, 19 nt, Artificial Sequence
  Description of Artificial Sequence: Synthetic oligonucleotide
uugccgccgccgaaauucu

SEQ ID NO: 1596585 - RNA, 19 nt, Artificial Sequence
  Description of Artificial Sequence: Synthetic oligonucleotide
gcugugugggacuuuccuc

SEQ ID NO: 1596586 - RNA, 19 nt, Artificial Sequence
  Description of Artificial Sequence: Synthetic oligonucleotide
uggcccauaggugccugga

SEQ ID NO: 1596587 - RNA, 19 nt, Artificial Sequence
  Description of Artificial Sequence: Synthetic oligonucleotide
cuggaugcccgucacaaau

SEQ ID NO: 1596588 - RNA, 19 nt, Artificial Sequence
  Description of Artificial Sequence: Synthetic oligonucleotide
gccauucccgcuacaaggc

SEQ ID NO: 1596589 - RNA, 19 nt, Artificial Sequence
  Description of Artificial Sequence: Synthetic oligonucleotide
aguucucauuuuccuucuu

SEQ ID NO: 1596590 - RNA, 19 nt, Artificial Sequence
  Description of Artificial Sequence: Synthetic oligonucleotide
gccccuuguauccuacgug

SEQ ID NO: 1596591 - RNA, 19 nt, Artificial Sequence
  Description of Artificial Sequence: Synthetic oligonucleotide
aaccuuccggacacacgca

SEQ ID NO: 1596592 - RNA, 19 nt, Artificial Sequence
  Description of Artificial Sequence: Synthetic oligonucleotide
ggcacauugucggcuuccg

SEQ ID NO: 1596593 - RNA, 19 nt, Artificial Sequence
  Description of Artificial Sequence: Synthetic oligonucleotide
uacgugacacuggcaggac

SEQ ID NO: 1596594 - RNA, 19 nt, Artificial Sequence
  Description of Artificial Sequence: Synthetic oligonucleotide
gccgaaucucacugaauuc

SEQ ID NO: 1596595 - RNA, 19 nt, Artificial Sequence
  Description of Artificial Sequence: Synthetic oligonucleotide
cuuacacaccuuuguuucu

SEQ ID NO: 1596596 - RNA, 19 nt, Artificial Sequence
  Description of Artificial Sequence: Synthetic oligonucleotide
ggagccgaaucucacugaa

SEQ ID NO: 1596597 - RNA, 19 nt, Artificial Sequence
  Description of Artificial Sequence: Synthetic oligonucleotide
ucgauacacagcggccccu

SEQ ID NO: 1596598 - RNA, 19 nt, Artificial Sequence
  Description of Artificial Sequence: Synthetic oligonucleotide
caauuggcugggccuuuuc

SEQ ID NO: 1596599 - RNA, 19 nt, Artificial Sequence
  Description of Artificial Sequence: Synthetic oligonucleotide
gacugcggcagcgggcggc

SEQ ID NO: 1596600 - RNA, 19 nt, Artificial Sequence
  Description of Artificial Sequence: Synthetic oligonucleotide
ucgccuucugcugucugua

SEQ ID NO: 1596601 - RNA, 19 nt, Artificial Sequence
  Description of Artificial Sequence: Synthetic oligonucleotide
cacgccguguugccgccgc

SEQ ID NO: 1596602 - RNA, 19 nt, Artificial Sequence
  Description of Artificial Sequence: Synthetic oligonucleotide
cauucccgcuacaaggccu

SEQ ID NO: 1596603 - RNA, 19 nt, Artificial Sequence
  Description of Artificial Sequence: Synthetic oligonucleotide
uccgucgcaguggccauuc

SEQ ID NO: 1596604 - RNA, 19 nt, Artificial Sequence
  Description of Artificial Sequence: Synthetic oligonucleotide
cacaggcccuccauaaucu

SEQ ID NO: 1596605 - RNA, 19 nt, Artificial Sequence
  Description of Artificial Sequence: Synthetic oligonucleotide
accaagaaaugcagcguuu

SEQ ID NO: 1596606 - RNA, 19 nt, Artificial Sequence
  Description of Artificial Sequence: Synthetic oligonucleotide
cccgucacaaauccucaug

SEQ ID NO: 1596607 - RNA, 19 nt, Artificial Sequence
  Description of Artificial Sequence: Synthetic oligonucleotide
aagcucccuggaguauugu

SEQ ID NO: 1596608 - RNA, 19 nt, Artificial Sequence
  Description of Artificial Sequence: Synthetic oligonucleotide
cacuucgccuucugcuguc

SEQ ID NO: 1596609 - RNA, 19 nt, Artificial Sequence
  Description of Artificial Sequence: Synthetic oligonucleotide
acacagcggccccuuguau

SEQ ID NO: 1596610 - RNA, 19 nt, Artificial Sequence
  Description of Artificial Sequence: Synthetic oligonucleotide
ucuccgucgcaguggccau

SEQ ID NO: 1596611 - RNA, 19 nt, Artificial Sequence
  Description of Artificial Sequence: Synthetic oligonucleotide
gagacccacccuggcauuc

SEQ ID NO: 1596612 - RNA, 19 nt, Artificial Sequence
  Description of Artificial Sequence: Synthetic oligonucleotide
gcgaccggcagagaacugc

SEQ ID NO: 1596613 - RNA, 19 nt, Artificial Sequence
  Description of Artificial Sequence: Synthetic oligonucleotide
acgccguguugccgccgcc

SEQ ID NO: 1596614 - RNA, 19 nt, Artificial Sequence
  Description of Artificial Sequence: Synthetic oligonucleotide
acauugcugcagggugggg

SEQ ID NO: 1596615 - RNA, 19 nt, Artificial Sequence
  Description of Artificial Sequence: Synthetic oligonucleotide
guguguacacagaaccacu

SEQ ID NO: 1596616 - RNA, 19 nt, Artificial Sequence
  Description of Artificial Sequence: Synthetic oligonucleotide
ccauucccgcuacaaggcc

SEQ ID NO: 1596617 - RNA, 19 nt, Artificial Sequence
  Description of Artificial Sequence: Synthetic oligonucleotide
ccuuguauccuacgugaca

SEQ ID NO: 1596618 - RNA, 19 nt, Artificial Sequence
  Description of Artificial Sequence: Synthetic oligonucleotide
ucccgcuacaaggccucug

SEQ ID NO: 1596619 - RNA, 19 nt, Artificial Sequence
  Description of Artificial Sequence: Synthetic oligonucleotide
uguugccgccgccgaaauu

SEQ ID NO: 1596620 - RNA, 19 nt, Artificial Sequence
  Description of Artificial Sequence: Synthetic oligonucleotide
cccauaggugccuggaaga

SEQ ID NO: 1596621 - RNA, 19 nt, Artificial Sequence
  Description of Artificial Sequence: Synthetic oligonucleotide
cuggcauuccugacagucu

SEQ ID NO: 1596622 - RNA, 19 nt, Artificial Sequence
  Description of Artificial Sequence: Synthetic oligonucleotide
ucgaaaccuuccggacaca

SEQ ID NO: 1596623 - RNA, 19 nt, Artificial Sequence
  Description of Artificial Sequence: Synthetic oligonucleotide
caaagucguugcugucaca

SEQ ID NO: 1596624 - RNA, 19 nt, Artificial Sequence
  Description of Artificial Sequence: Synthetic oligonucleotide
gaccggcagagaacugcug

SEQ ID NO: 1596625 - RNA, 19 nt, Artificial Sequence
  Description of Artificial Sequence: Synthetic oligonucleotide
guggccauucccgcuacaa

SEQ ID NO: 1596626 - RNA, 19 nt, Artificial Sequence
  Description of Artificial Sequence: Synthetic oligonucleotide
cugaaccuggaugcccguc

SEQ ID NO: 1596627 - RNA, 19 nt, Artificial Sequence
  Description of Artificial Sequence: Synthetic oligonucleotide
gcccacuucgcacuccaca

SEQ ID NO: 1596628 - RNA, 19 nt, Artificial Sequence
  Description of Artificial Sequence: Synthetic oligonucleotide
agcccgacugcggcagcgg

SEQ ID NO: 1596629 - RNA, 19 nt, Artificial Sequence
  Description of Artificial Sequence: Synthetic oligonucleotide
cauugcugcaggguggggu

SEQ ID NO: 1596630 - RNA, 19 nt, Artificial Sequence
  Description of Artificial Sequence: Synthetic oligonucleotide
caucuccgucgcaguggcc

SEQ ID NO: 1596631 - RNA, 19 nt, Artificial Sequence
  Description of Artificial Sequence: Synthetic oligonucleotide
ccuucuuacacaccuuugu

SEQ ID NO: 1596632 - RNA, 19 nt, Artificial Sequence
  Description of Artificial Sequence: Synthetic oligonucleotide
gugcagaagcugugggucu

SEQ ID NO: 1596633 - RNA, 19 nt, Artificial Sequence
  Description of Artificial Sequence: Synthetic oligonucleotide
gcgggugcacugccgggcg

SEQ ID NO: 1596634 - RNA, 19 nt, Artificial Sequence
  Description of Artificial Sequence: Synthetic oligonucleotide
ggccaagugaguaucuacu

SEQ ID NO: 1596635 - RNA, 19 nt, Artificial Sequence
  Description of Artificial Sequence: Synthetic oligonucleotide
cuguggagucucggccucc

SEQ ID NO: 1596636 - RNA, 19 nt, Artificial Sequence
  Description of Artificial Sequence: Synthetic oligonucleotide
cuguacauugcugcagggu

SEQ ID NO: 1596637 - RNA, 19 nt, Artificial Sequence
  Description of Artificial Sequence: Synthetic oligonucleotide
ggauguccucucaauaacu

SEQ ID NO: 1596638 - RNA, 19 nt, Artificial Sequence
  Description of Artificial Sequence: Synthetic oligonucleotide
guccagcccacuucgcacu

SEQ ID NO: 1596639 - RNA, 19 nt, Artificial Sequence
  Description of Artificial Sequence: Synthetic oligonucleotide
ccucgaaaccuuccggaca

SEQ ID NO: 1596640 - RNA, 19 nt, Artificial Sequence
  Description of Artificial Sequence: Synthetic oligonucleotide
uggccguguuggccauccc

SEQ ID NO: 1596641 - RNA, 19 nt, Artificial Sequence
  Description of Artificial Sequence: Synthetic oligonucleotide
cagcccacuucgcacucca

SEQ ID NO: 1596642 - RNA, 19 nt, Artificial Sequence
  Description of Artificial Sequence: Synthetic oligonucleotide
uaggagccguugacauuuu

SEQ ID NO: 1596643 - RNA, 19 nt, Artificial Sequence
  Description of Artificial Sequence: Synthetic oligonucleotide
gggacuuuccucugccacu

SEQ ID NO: 1596644 - RNA, 19 nt, Artificial Sequence
  Description of Artificial Sequence: Synthetic oligonucleotide
cagcguuuuaaagggccaa

SEQ ID NO: 1596645 - RNA, 19 nt, Artificial Sequence
  Description of Artificial Sequence: Synthetic oligonucleotide
gaugcccgucacaaauccu

SEQ ID NO: 1596646 - RNA, 19 nt, Artificial Sequence
  Description of Artificial Sequence: Synthetic oligonucleotide
cgucgcaguggccauuccc

SEQ ID NO: 1596647 - RNA, 19 nt, Artificial Sequence
  Description of Artificial Sequence: Synthetic oligonucleotide
aggacccgucgcccugucu

SEQ ID NO: 1596648 - RNA, 19 nt, Artificial Sequence
  Description of Artificial Sequence: Synthetic oligonucleotide
gcagcguuuuaaagggcca

SEQ ID NO: 1596649 - RNA, 19 nt, Artificial Sequence
  Description of Artificial Sequence: Synthetic oligonucleotide
ccaagugaguaucuacugu

SEQ ID NO: 1596650 - RNA, 19 nt, Artificial Sequence
  Description of Artificial Sequence: Synthetic oligonucleotide
agcccacuucgcacuccac

SEQ ID NO: 1596651 - RNA, 19 nt, Artificial Sequence
  Description of Artificial Sequence: Synthetic oligonucleotide
gcccgacugcggcagcggg

SEQ ID NO: 1596652 - RNA, 19 nt, Artificial Sequence
  Description of Artificial Sequence: Synthetic oligonucleotide
uccuggccguguuggccau

SEQ ID NO: 1596653 - RNA, 19 nt, Artificial Sequence
  Description of Artificial Sequence: Synthetic oligonucleotide
cgaaucuguuuaagaacca

SEQ ID NO: 1596654 - RNA, 19 nt, Artificial Sequence
  Description of Artificial Sequence: Synthetic oligonucleotide
agcggccccuuguauccua

SEQ ID NO: 1596655 - RNA, 19 nt, Artificial Sequence
  Description of Artificial Sequence: Synthetic oligonucleotide
ccucccacgccguguugcc

SEQ ID NO: 1596656 - RNA, 19 nt, Artificial Sequence
  Description of Artificial Sequence: Synthetic oligonucleotide
auccuacgugacacuggca

SEQ ID NO: 1596657 - RNA, 19 nt, Artificial Sequence
  Description of Artificial Sequence: Synthetic oligonucleotide
ugucugccaccaggccucu

SEQ ID NO: 1596658 - RNA, 19 nt, Artificial Sequence
  Description of Artificial Sequence: Synthetic oligonucleotide
cgaaaccuuccggacacac

SEQ ID NO: 1596659 - RNA, 19 nt, Artificial Sequence
  Description of Artificial Sequence: Synthetic oligonucleotide
cgccgaaauucuuccuggc

SEQ ID NO: 1596660 - RNA, 19 nt, Artificial Sequence
  Description of Artificial Sequence: Synthetic oligonucleotide
cacacucuccuuucugcuu

SEQ ID NO: 1596661 - RNA, 19 nt, Artificial Sequence
  Description of Artificial Sequence: Synthetic oligonucleotide
ccgucgcccugucugcugc

SEQ ID NO: 1596662 - RNA, 19 nt, Artificial Sequence
  Description of Artificial Sequence: Synthetic oligonucleotide
cucuggcacauugucggcu

SEQ ID NO: 1596663 - RNA, 19 nt, Artificial Sequence
  Description of Artificial Sequence: Synthetic oligonucleotide
gcguuuuaaagggccaagu

SEQ ID NO: 1596664 - RNA, 19 nt, Artificial Sequence
  Description of Artificial Sequence: Synthetic oligonucleotide
caaagcucccuggaguauu

SEQ ID NO: 1596665 - RNA, 19 nt, Artificial Sequence
  Description of Artificial Sequence: Synthetic oligonucleotide
gacccacccuggcauuccu

SEQ ID NO: 1596666 - RNA, 19 nt, Artificial Sequence
  Description of Artificial Sequence: Synthetic oligonucleotide
cacggccgcgggaggcggc

SEQ ID NO: 1596667 - RNA, 19 nt, Artificial Sequence
  Description of Artificial Sequence: Synthetic oligonucleotide
ggugaccuucaaugaucaa

SEQ ID NO: 1596668 - RNA, 19 nt, Artificial Sequence
  Description of Artificial Sequence: Synthetic oligonucleotide
cacgcagacaaagcucccu

SEQ ID NO: 1596669 - RNA, 19 nt, Artificial Sequence
  Description of Artificial Sequence: Synthetic oligonucleotide
ccgcuacaaggccucugag

SEQ ID NO: 1596670 - RNA, 19 nt, Artificial Sequence
  Description of Artificial Sequence: Synthetic oligonucleotide
ccguguuggccauccccug

SEQ ID NO: 1596671 - RNA, 19 nt, Artificial Sequence
  Description of Artificial Sequence: Synthetic oligonucleotide
acccgucgcccugucugcu

SEQ ID NO: 1596672 - RNA, 19 nt, Artificial Sequence
  Description of Artificial Sequence: Synthetic oligonucleotide
gucgcccugucugcugcca

SEQ ID NO: 1596673 - RNA, 19 nt, Artificial Sequence
  Description of Artificial Sequence: Synthetic oligonucleotide
ggcuuccgggaggccacgg

SEQ ID NO: 1596674 - RNA, 19 nt, Artificial Sequence
  Description of Artificial Sequence: Synthetic oligonucleotide
ggugcacugccgggcgacc

SEQ ID NO: 1596675 - RNA, 19 nt, Artificial Sequence
  Description of Artificial Sequence: Synthetic oligonucleotide
gggugcacugccgggcgac

SEQ ID NO: 1596676 - RNA, 19 nt, Artificial Sequence
  Description of Artificial Sequence: Synthetic oligonucleotide
gccacggccgcgggaggcg

SEQ ID NO: 1596677 - RNA, 19 nt, Artificial Sequence
  Description of Artificial Sequence: Synthetic oligonucleotide
gagccgaaucucacugaau

SEQ ID NO: 1596678 - RNA, 19 nt, Artificial Sequence
  Description of Artificial Sequence: Synthetic oligonucleotide
cacacaggcccuccauaau

SEQ ID NO: 1596679 - RNA, 19 nt, Artificial Sequence
  Description of Artificial Sequence: Synthetic oligonucleotide
ccacuucgcacuccacaca

SEQ ID NO: 1596680 - RNA, 19 nt, Artificial Sequence
  Description of Artificial Sequence: Synthetic oligonucleotide
cguguccagcccacuucgc

SEQ ID NO: 1596681 - RNA, 19 nt, Artificial Sequence
  Description of Artificial Sequence: Synthetic oligonucleotide
acggccgcgggaggcggca

SEQ ID NO: 1596682 - RNA, 19 nt, Artificial Sequence
  Description of Artificial Sequence: Synthetic oligonucleotide
cgggcgaccggcagagaac

SEQ ID NO: 1596683 - RNA, 19 nt, Artificial Sequence
  Description of Artificial Sequence: Synthetic oligonucleotide
gccguguugccgccgccga

SEQ ID NO: 1596684 - RNA, 19 nt, Artificial Sequence
  Description of Artificial Sequence: Synthetic oligonucleotide
caggacccgucgcccuguc

SEQ ID NO: 1596685 - RNA, 19 nt, Artificial Sequence
  Description of Artificial Sequence: Synthetic oligonucleotide
gggcgaccggcagagaacu

SEQ ID NO: 1596686 - RNA, 19 nt, Artificial Sequence
  Description of Artificial Sequence: Synthetic oligonucleotide
guguugccgccgccgaaau

SEQ ID NO: 1596687 - RNA, 19 nt, Artificial Sequence
  Description of Artificial Sequence: Synthetic oligonucleotide
cccacgccguguugccgcc

SEQ ID NO: 1596688 - RNA, 19 nt, Artificial Sequence
  Description of Artificial Sequence: Synthetic oligonucleotide
ccgggcgaccggcagagaa

SEQ ID NO: 1596689 - RNA, 19 nt, Artificial Sequence
  Description of Artificial Sequence: Synthetic oligonucleotide
ccagcccacuucgcacucc

SEQ ID NO: 1596690 - RNA, 19 nt, Artificial Sequence
  Description of Artificial Sequence: Synthetic oligonucleotide
cgcccggcaccucuggcac

SEQ ID NO: 1596691 - RNA, 19 nt, Artificial Sequence
  Description of Artificial Sequence: Synthetic oligonucleotide
cccgucgcccugucugcug

SEQ ID NO: 1596692 - RNA, 19 nt, Artificial Sequence
  Description of Artificial Sequence: Synthetic oligonucleotide
ccguugacauuuucacagu

SEQ ID NO: 1596693 - RNA, 19 nt, Artificial Sequence
  Description of Artificial Sequence: Synthetic oligonucleotide
caggugcauggcgggugca

SEQ ID NO: 1596694 - RNA, 19 nt, Artificial Sequence
  Description of Artificial Sequence: Synthetic oligonucleotide
ggcgaccggcagagaacug

SEQ ID NO: 1596695 - RNA, 19 nt, Artificial Sequence
  Description of Artificial Sequence: Synthetic oligonucleotide
ccaaaacuuccuggagaaa

SEQ ID NO: 1596696 - RNA, 19 nt, Artificial Sequence
  Description of Artificial Sequence: Synthetic oligonucleotide
gucuggcccauaggugccu

SEQ ID NO: 1596697 - RNA, 19 nt, Artificial Sequence
  Description of Artificial Sequence: Synthetic oligonucleotide
gccauccaugcagucgaua

SEQ ID NO: 1596698 - RNA, 19 nt, Artificial Sequence
  Description of Artificial Sequence: Synthetic oligonucleotide
cgucgcccugucugcugcc

SEQ ID NO: 1596699 - RNA, 19 nt, Artificial Sequence
  Description of Artificial Sequence: Synthetic oligonucleotide
ccgucgcaguggccauucc

SEQ ID NO: 1596700 - RNA, 19 nt, Artificial Sequence
  Description of Artificial Sequence: Synthetic oligonucleotide
cagcccacacagguagaau

SEQ ID NO: 1596701 - RNA, 19 nt, Artificial Sequence
  Description of Artificial Sequence: Synthetic oligonucleotide
cuggagaaaugggguugau

SEQ ID NO: 1596702 - RNA, 19 nt, Artificial Sequence
  Description of Artificial Sequence: Synthetic oligonucleotide
gccgcgggaggcggcagca

SEQ ID NO: 1596703 - RNA, 19 nt, Artificial Sequence
  Description of Artificial Sequence: Synthetic oligonucleotide
cguguugccgccgccgaaa

SEQ ID NO: 1596704 - RNA, 19 nt, Artificial Sequence
  Description of Artificial Sequence: Synthetic oligonucleotide
gcccgucacaaauccucau

SEQ ID NO: 1596705 - RNA, 19 nt, Artificial Sequence
  Description of Artificial Sequence: Synthetic oligonucleotide
ccacgccguguugccgccg

SEQ ID NO: 1596706 - RNA, 19 nt, Artificial Sequence
  Description of Artificial Sequence: Synthetic oligonucleotide
cgaccggcagagaacugcu

SEQ ID NO: 1596707 - RNA, 19 nt, Artificial Sequence
  Description of Artificial Sequence: Synthetic oligonucleotide
ccguguugccgccgccgaa

SEQ ID NO: 1596708 - RNA, 19 nt, Artificial Sequence
  Description of Artificial Sequence: Synthetic oligonucleotide
gucugccaccaggccucua

SEQ ID NO: 1596709 - RNA, 19 nt, Artificial Sequence
  Description of Artificial Sequence: Synthetic oligonucleotide
cggcuuccgggaggccacg

SEQ ID NO: 1596710 - RNA, 19 nt, Artificial Sequence
  Description of Artificial Sequence: Synthetic oligonucleotide
ccuggccguguuggccauc

SEQ ID NO: 1596711 - RNA, 19 nt, Artificial Sequence
  Description of Artificial Sequence: Synthetic oligonucleotide
cccggcaccucuggcacau

SEQ ID NO: 1596712 - RNA, 19 nt, Artificial Sequence
  Description of Artificial Sequence: Synthetic oligonucleotide
cuccgucgcaguggccauu

SEQ ID NO: 1596713 - RNA, 19 nt, Artificial Sequence
  Description of Artificial Sequence: Synthetic oligonucleotide
cgggugcacugccgggcga

SEQ ID NO: 1596714 - RNA, 19 nt, Artificial Sequence
  Description of Artificial Sequence: Synthetic oligonucleotide
cgccgccgaaauucuuccu

SEQ ID NO: 1596715 - RNA, 19 nt, Artificial Sequence
  Description of Artificial Sequence: Synthetic oligonucleotide
cgauacacagcggccccuu

SEQ ID NO: 1596716 - RNA, 19 nt, Artificial Sequence
  Description of Artificial Sequence: Synthetic oligonucleotide
gccgggcgaccggcagaga

SEQ ID NO: 1596717 - RNA, 19 nt, Artificial Sequence
  Description of Artificial Sequence: Synthetic oligonucleotide
ccggcaccucuggcacauu

SEQ ID NO: 1596718 - RNA, 19 nt, Artificial Sequence
  Description of Artificial Sequence: Synthetic oligonucleotide
augaauauaacacacuucc

SEQ ID NO: 1596719 - RNA, 19 nt, Artificial Sequence
  Description of Artificial Sequence: Synthetic oligonucleotide
uuuacuaugaauauaacac

SEQ ID NO: 1596720 - RNA, 19 nt, Artificial Sequence
  Description of Artificial Sequence: Synthetic oligonucleotide
auagauacggggcucaagc

SEQ ID NO: 1596721 - RNA, 19 nt, Artificial Sequence
  Description of Artificial Sequence: Synthetic oligonucleotide
ugagccaugaccaaaggcc

SEQ ID NO: 1596722 - RNA, 19 nt, Artificial Sequence
  Description of Artificial Sequence: Synthetic oligonucleotide
aauagauccugagugggcc

SEQ ID NO: 1596723 - RNA, 19 nt, Artificial Sequence
  Description of Artificial Sequence: Synthetic oligonucleotide
aagauagaacaauaucagg

SEQ ID NO: 1596724 - RNA, 19 nt, Artificial Sequence
  Description of Artificial Sequence: Synthetic oligonucleotide
aagagaucugcccuggccg

SEQ ID NO: 1596725 - RNA, 19 nt, Artificial Sequence
  Description of Artificial Sequence: Synthetic oligonucleotide
gaagauagaacaauaucag

SEQ ID NO: 1596726 - RNA, 19 nt, Artificial Sequence
  Description of Artificial Sequence: Synthetic oligonucleotide
uggcaauagauccugagug

SEQ ID NO: 1596727 - RNA, 19 nt, Artificial Sequence
  Description of Artificial Sequence: Synthetic oligonucleotide
agaagauagaacaauauca

SEQ ID NO: 1596728 - RNA, 19 nt, Artificial Sequence
  Description of Artificial Sequence: Synthetic oligonucleotide
gauuccagcacagaaacag

SEQ ID NO: 1596729 - RNA, 19 nt, Artificial Sequence
  Description of Artificial Sequence: Synthetic oligonucleotide
uacuaugaauauaacacac

SEQ ID NO: 1596730 - RNA, 19 nt, Artificial Sequence
  Description of Artificial Sequence: Synthetic oligonucleotide
guuuaagcagcgcagagcc

SEQ ID NO: 1596731 - RNA, 19 nt, Artificial Sequence
  Description of Artificial Sequence: Synthetic oligonucleotide
uucccaaccaccauggaug

SEQ ID NO: 1596732 - RNA, 19 nt, Artificial Sequence
  Description of Artificial Sequence: Synthetic oligonucleotide
uuacuaugaauauaacaca

SEQ ID NO: 1596733 - RNA, 19 nt, Artificial Sequence
  Description of Artificial Sequence: Synthetic oligonucleotide
gauuuuacuaugaauauaa

SEQ ID NO: 1596734 - RNA, 19 nt, Artificial Sequence
  Description of Artificial Sequence: Synthetic oligonucleotide
gaugccucgauguugggcc

SEQ ID NO: 1596735 - RNA, 19 nt, Artificial Sequence
  Description of Artificial Sequence: Synthetic oligonucleotide
uggaacucugcccaaaggc

SEQ ID NO: 1596736 - RNA, 19 nt, Artificial Sequence
  Description of Artificial Sequence: Synthetic oligonucleotide
agcacuggggacaagaucg

SEQ ID NO: 1596737 - RNA, 19 nt, Artificial Sequence
  Description of Artificial Sequence: Synthetic oligonucleotide
gaggaugggauuucggagg

SEQ ID NO: 1596738 - RNA, 19 nt, Artificial Sequence
  Description of Artificial Sequence: Synthetic oligonucleotide
agauagaacaauaucagga

SEQ ID NO: 1596739 - RNA, 19 nt, Artificial Sequence
  Description of Artificial Sequence: Synthetic oligonucleotide
aagagcuucgacggaaggc

SEQ ID NO: 1596740 - RNA, 19 nt, Artificial Sequence
  Description of Artificial Sequence: Synthetic oligonucleotide
augaccaaaggccuugccg

SEQ ID NO: 1596741 - RNA, 19 nt, Artificial Sequence
  Description of Artificial Sequence: Synthetic oligonucleotide
uguugggccagcaaugagc

SEQ ID NO: 1596742 - RNA, 19 nt, Artificial Sequence
  Description of Artificial Sequence: Synthetic oligonucleotide
acaagaucgggguuagaac

SEQ ID NO: 1596743 - RNA, 19 nt, Artificial Sequence
  Description of Artificial Sequence: Synthetic oligonucleotide
agaauggacguggaggugc

SEQ ID NO: 1596744 - RNA, 19 nt, Artificial Sequence
  Description of Artificial Sequence: Synthetic oligonucleotide
cuaggaaagagaucugccc

SEQ ID NO: 1596745 - RNA, 19 nt, Artificial Sequence
  Description of Artificial Sequence: Synthetic oligonucleotide
ugcaaguuggaacucugcc

SEQ ID NO: 1596746 - RNA, 19 nt, Artificial Sequence
  Description of Artificial Sequence: Synthetic oligonucleotide
augagccaugaccaaaggc

SEQ ID NO: 1596747 - RNA, 19 nt, Artificial Sequence
  Description of Artificial Sequence: Synthetic oligonucleotide
ucgauguugggccagugug

SEQ ID NO: 1596748 - RNA, 19 nt, Artificial Sequence
  Description of Artificial Sequence: Synthetic oligonucleotide
ugaauauaacacacuuccc

SEQ ID NO: 1596749 - RNA, 19 nt, Artificial Sequence
  Description of Artificial Sequence: Synthetic oligonucleotide
gaggauuuuacuaugaaua

SEQ ID NO: 1596750 - RNA, 19 nt, Artificial Sequence
  Description of Artificial Sequence: Synthetic oligonucleotide
gucaguuugggacuugcgg

SEQ ID NO: 1596751 - RNA, 19 nt, Artificial Sequence
  Description of Artificial Sequence: Synthetic oligonucleotide
cuuuacuccaucaggcccc

SEQ ID NO: 1596752 - RNA, 19 nt, Artificial Sequence
  Description of Artificial Sequence: Synthetic oligonucleotide
ucaguuugggacuugcggu

SEQ ID NO: 1596753 - RNA, 19 nt, Artificial Sequence
  Description of Artificial Sequence: Synthetic oligonucleotide
gaagggacgagguggacug

SEQ ID NO: 1596754 - RNA, 19 nt, Artificial Sequence
  Description of Artificial Sequence: Synthetic oligonucleotide
agcuucaggaccuaggaaa

SEQ ID NO: 1596755 - RNA, 19 nt, Artificial Sequence
  Description of Artificial Sequence: Synthetic oligonucleotide
cuugguuaggacuggguac

SEQ ID NO: 1596756 - RNA, 19 nt, Artificial Sequence
  Description of Artificial Sequence: Synthetic oligonucleotide
uguuggcucagcccaagag

SEQ ID NO: 1596757 - RNA, 19 nt, Artificial Sequence
  Description of Artificial Sequence: Synthetic oligonucleotide
agaacaauaucaggacugg

SEQ ID NO: 1596758 - RNA, 19 nt, Artificial Sequence
  Description of Artificial Sequence: Synthetic oligonucleotide
uuggaacucugcccaaagg

SEQ ID NO: 1596759 - RNA, 19 nt, Artificial Sequence
  Description of Artificial Sequence: Synthetic oligonucleotide
cauaccgggcacuuguggg

SEQ ID NO: 1596760 - RNA, 19 nt, Artificial Sequence
  Description of Artificial Sequence: Synthetic oligonucleotide
agagaucugcccuggccgc

SEQ ID NO: 1596761 - RNA, 19 nt, Artificial Sequence
  Description of Artificial Sequence: Synthetic oligonucleotide
uuaagcagcgcagagcccu

SEQ ID NO: 1596762 - RNA, 19 nt, Artificial Sequence
  Description of Artificial Sequence: Synthetic oligonucleotide
ucuugguuaggacugggua

SEQ ID NO: 1596763 - RNA, 19 nt, Artificial Sequence
  Description of Artificial Sequence: Synthetic oligonucleotide
cuggccgccucauagauac

SEQ ID NO: 1596764 - RNA, 19 nt, Artificial Sequence
  Description of Artificial Sequence: Synthetic oligonucleotide
aguagcguggaccgccagc

SEQ ID NO: 1596765 - RNA, 19 nt, Artificial Sequence
  Description of Artificial Sequence: Synthetic oligonucleotide
aggauuuuacuaugaauau

SEQ ID NO: 1596766 - RNA, 19 nt, Artificial Sequence
  Description of Artificial Sequence: Synthetic oligonucleotide
cagcccaagagcuucgacg

SEQ ID NO: 1596767 - RNA, 19 nt, Artificial Sequence
  Description of Artificial Sequence: Synthetic oligonucleotide
uguuuaagcagcgcagagc

SEQ ID NO: 1596768 - RNA, 19 nt, Artificial Sequence
  Description of Artificial Sequence: Synthetic oligonucleotide
ccagcaaugagccaugacc

SEQ ID NO: 1596769 - RNA, 19 nt, Artificial Sequence
  Description of Artificial Sequence: Synthetic oligonucleotide
gacgagguggacuggcagg

SEQ ID NO: 1596770 - RNA, 19 nt, Artificial Sequence
  Description of Artificial Sequence: Synthetic oligonucleotide
uucgacggaaggcucgucc

SEQ ID NO: 1596771 - RNA, 19 nt, Artificial Sequence
  Description of Artificial Sequence: Synthetic oligonucleotide
ugucaugagugggagagca

SEQ ID NO: 1596772 - RNA, 19 nt, Artificial Sequence
  Description of Artificial Sequence: Synthetic oligonucleotide
ucagauucuugguuaggac

SEQ ID NO: 1596773 - RNA, 19 nt, Artificial Sequence
  Description of Artificial Sequence: Synthetic oligonucleotide
agauucuugguuaggacug

SEQ ID NO: 1596774 - RNA, 19 nt, Artificial Sequence
  Description of Artificial Sequence: Synthetic oligonucleotide
uuucggagggaacccagca

SEQ ID NO: 1596775 - RNA, 19 nt, Artificial Sequence
  Description of Artificial Sequence: Synthetic oligonucleotide
auuuuacuaugaauauaac

SEQ ID NO: 1596776 - RNA, 19 nt, Artificial Sequence
  Description of Artificial Sequence: Synthetic oligonucleotide
ugcccgaaagccuugccgc

SEQ ID NO: 1596777 - RNA, 19 nt, Artificial Sequence
  Description of Artificial Sequence: Synthetic oligonucleotide
agauacggggcucaagcca

SEQ ID NO: 1596778 - RNA, 19 nt, Artificial Sequence
  Description of Artificial Sequence: Synthetic oligonucleotide
auaccgggcacuugugggg

SEQ ID NO: 1596779 - RNA, 19 nt, Artificial Sequence
  Description of Artificial Sequence: Synthetic oligonucleotide
ugcgguuggggucagcacu

SEQ ID NO: 1596780 - RNA, 19 nt, Artificial Sequence
  Description of Artificial Sequence: Synthetic oligonucleotide
aacgguaggggcgcucgcc

SEQ ID NO: 1596781 - RNA, 19 nt, Artificial Sequence
  Description of Artificial Sequence: Synthetic oligonucleotide
caaguuggaacucugccca

SEQ ID NO: 1596782 - RNA, 19 nt, Artificial Sequence
  Description of Artificial Sequence: Synthetic oligonucleotide
acauaccgggcacuugugg

SEQ ID NO: 1596783 - RNA, 19 nt, Artificial Sequence
  Description of Artificial Sequence: Synthetic oligonucleotide
ggcaauagauccugagugg

SEQ ID NO: 1596784 - RNA, 19 nt, Artificial Sequence
  Description of Artificial Sequence: Synthetic oligonucleotide
uggaccgccagccgaaggc

SEQ ID NO: 1596785 - RNA, 19 nt, Artificial Sequence
  Description of Artificial Sequence: Synthetic oligonucleotide
aggaaagagaucugcccug

SEQ ID NO: 1596786 - RNA, 19 nt, Artificial Sequence
  Description of Artificial Sequence: Synthetic oligonucleotide
caauagauccugagugggc

SEQ ID NO: 1596787 - RNA, 19 nt, Artificial Sequence
  Description of Artificial Sequence: Synthetic oligonucleotide
ugcccaaagcccuuggcac

SEQ ID NO: 1596788 - RNA, 19 nt, Artificial Sequence
  Description of Artificial Sequence: Synthetic oligonucleotide
gcuugaguagcguggaccg

SEQ ID NO: 1596789 - RNA, 19 nt, Artificial Sequence
  Description of Artificial Sequence: Synthetic oligonucleotide
uugaguagcguggaccgcc

SEQ ID NO: 1596790 - RNA, 19 nt, Artificial Sequence
  Description of Artificial Sequence: Synthetic oligonucleotide
uagauacggggcucaagcc

SEQ ID NO: 1596791 - RNA, 19 nt, Artificial Sequence
  Description of Artificial Sequence: Synthetic oligonucleotide
ucaugcacccgcuuaugcu

SEQ ID NO: 1596792 - RNA, 19 nt, Artificial Sequence
  Description of Artificial Sequence: Synthetic oligonucleotide
uggugcugcaaguuggaac

SEQ ID NO: 1596793 - RNA, 19 nt, Artificial Sequence
  Description of Artificial Sequence: Synthetic oligonucleotide
ucaggacuggcaauagauc

SEQ ID NO: 1596794 - RNA, 19 nt, Artificial Sequence
  Description of Artificial Sequence: Synthetic oligonucleotide
cucgccagaauggacgugg

SEQ ID NO: 1596795 - RNA, 19 nt, Artificial Sequence
  Description of Artificial Sequence: Synthetic oligonucleotide
gauguugggccaguguggc

SEQ ID NO: 1596796 - RNA, 19 nt, Artificial Sequence
  Description of Artificial Sequence: Synthetic oligonucleotide
uguugggccaguguggcac

SEQ ID NO: 1596797 - RNA, 19 nt, Artificial Sequence
  Description of Artificial Sequence: Synthetic oligonucleotide
gauucuugguuaggacugg

SEQ ID NO: 1596798 - RNA, 19 nt, Artificial Sequence
  Description of Artificial Sequence: Synthetic oligonucleotide
uagggucagaagauagaac

SEQ ID NO: 1596799 - RNA, 19 nt, Artificial Sequence
  Description of Artificial Sequence: Synthetic oligonucleotide
uaucaggacuggcaauaga

SEQ ID NO: 1596800 - RNA, 19 nt, Artificial Sequence
  Description of Artificial Sequence: Synthetic oligonucleotide
uuuaagcagcgcagagccc

SEQ ID NO: 1596801 - RNA, 19 nt, Artificial Sequence
  Description of Artificial Sequence: Synthetic oligonucleotide
gacaagaucgggguuagaa

SEQ ID NO: 1596802 - RNA, 19 nt, Artificial Sequence
  Description of Artificial Sequence: Synthetic oligonucleotide
guguuuaagcagcgcagag

SEQ ID NO: 1596803 - RNA, 19 nt, Artificial Sequence
  Description of Artificial Sequence: Synthetic oligonucleotide
guuaggacuggguaccaca

SEQ ID NO: 1596804 - RNA, 19 nt, Artificial Sequence
  Description of Artificial Sequence: Synthetic oligonucleotide
ggccuugccgcacacaggg

SEQ ID NO: 1596805 - RNA, 19 nt, Artificial Sequence
  Description of Artificial Sequence: Synthetic oligonucleotide
cucaagccagacccgaggc

SEQ ID NO: 1596806 - RNA, 19 nt, Artificial Sequence
  Description of Artificial Sequence: Synthetic oligonucleotide
gaucagauucuugguuagg

SEQ ID NO: 1596807 - RNA, 19 nt, Artificial Sequence
  Description of Artificial Sequence: Synthetic oligonucleotide
agcaucauggccuggcuua

SEQ ID NO: 1596808 - RNA, 19 nt, Artificial Sequence
  Description of Artificial Sequence: Synthetic oligonucleotide
aagaucgggguuagaacug

SEQ ID NO: 1596809 - RNA, 19 nt, Artificial Sequence
  Description of Artificial Sequence: Synthetic oligonucleotide
ugggaucagauucuugguu

SEQ ID NO: 1596810 - RNA, 19 nt, Artificial Sequence
  Description of Artificial Sequence: Synthetic oligonucleotide
aucaggccccagcaaugcc

SEQ ID NO: 1596811 - RNA, 19 nt, Artificial Sequence
  Description of Artificial Sequence: Synthetic oligonucleotide
uucuugguuaggacugggu

SEQ ID NO: 1596812 - RNA, 19 nt, Artificial Sequence
  Description of Artificial Sequence: Synthetic oligonucleotide
gauuucggagggaacccag

SEQ ID NO: 1596813 - RNA, 19 nt, Artificial Sequence
  Description of Artificial Sequence: Synthetic oligonucleotide
agggccaccgugugugcgc

SEQ ID NO: 1596814 - RNA, 19 nt, Artificial Sequence
  Description of Artificial Sequence: Synthetic oligonucleotide
aucaggacuggcaauagau

SEQ ID NO: 1596815 - RNA, 19 nt, Artificial Sequence
  Description of Artificial Sequence: Synthetic oligonucleotide
gcaauagauccugaguggg

SEQ ID NO: 1596816 - RNA, 19 nt, Artificial Sequence
  Description of Artificial Sequence: Synthetic oligonucleotide
caagaucgggguuagaacu

SEQ ID NO: 1596817 - RNA, 19 nt, Artificial Sequence
  Description of Artificial Sequence: Synthetic oligonucleotide
gcaggggucaguuugggac

SEQ ID NO: 1596818 - RNA, 19 nt, Artificial Sequence
  Description of Artificial Sequence: Synthetic oligonucleotide
gagggaacccagcacagaa

SEQ ID NO: 1596819 - RNA, 19 nt, Artificial Sequence
  Description of Artificial Sequence: Synthetic oligonucleotide
ugcugcgaugcuugaguag

SEQ ID NO: 1596820 - RNA, 19 nt, Artificial Sequence
  Description of Artificial Sequence: Synthetic oligonucleotide
ugugggcaggcauaagguc

SEQ ID NO: 1596821 - RNA, 19 nt, Artificial Sequence
  Description of Artificial Sequence: Synthetic oligonucleotide
uucggagggaacccagcac

SEQ ID NO: 1596822 - RNA, 19 nt, Artificial Sequence
  Description of Artificial Sequence: Synthetic oligonucleotide
caagagcuucgacggaagg

SEQ ID NO: 1596823 - RNA, 19 nt, Artificial Sequence
  Description of Artificial Sequence: Synthetic oligonucleotide
acccgcuuaugcuugguga

SEQ ID NO: 1596824 - RNA, 19 nt, Artificial Sequence
  Description of Artificial Sequence: Synthetic oligonucleotide
cucgcaccaguguggaugc

SEQ ID NO: 1596825 - RNA, 19 nt, Artificial Sequence
  Description of Artificial Sequence: Synthetic oligonucleotide
ucccaaccaccauggaugc

SEQ ID NO: 1596826 - RNA, 19 nt, Artificial Sequence
  Description of Artificial Sequence: Synthetic oligonucleotide
agaucgggguuagaacugg

SEQ ID NO: 1596827 - RNA, 19 nt, Artificial Sequence
  Description of Artificial Sequence: Synthetic oligonucleotide
uggguaccacaucaggguc

SEQ ID NO: 1596828 - RNA, 19 nt, Artificial Sequence
  Description of Artificial Sequence: Synthetic oligonucleotide
agaacugggaucagauucu

SEQ ID NO: 1596829 - RNA, 19 nt, Artificial Sequence
  Description of Artificial Sequence: Synthetic oligonucleotide
ggaucagauucuugguuag

SEQ ID NO: 1596830 - RNA, 19 nt, Artificial Sequence
  Description of Artificial Sequence: Synthetic oligonucleotide
guagcguggaccgccagcc

SEQ ID NO: 1596831 - RNA, 19 nt, Artificial Sequence
  Description of Artificial Sequence: Synthetic oligonucleotide
ucgacggaaggcucgucca

SEQ ID NO: 1596832 - RNA, 19 nt, Artificial Sequence
  Description of Artificial Sequence: Synthetic oligonucleotide
aggaggauuuuacuaugaa

SEQ ID NO: 1596833 - RNA, 19 nt, Artificial Sequence
  Description of Artificial Sequence: Synthetic oligonucleotide
cuuggcacauaccgggcac

SEQ ID NO: 1596834 - RNA, 19 nt, Artificial Sequence
  Description of Artificial Sequence: Synthetic oligonucleotide
cucguccacaaucaggaca

SEQ ID NO: 1596835 - RNA, 19 nt, Artificial Sequence
  Description of Artificial Sequence: Synthetic oligonucleotide
cugacaacgguaggggcgc

SEQ ID NO: 1596836 - RNA, 19 nt, Artificial Sequence
  Description of Artificial Sequence: Synthetic oligonucleotide
auucuugguuaggacuggg

SEQ ID NO: 1596837 - RNA, 19 nt, Artificial Sequence
  Description of Artificial Sequence: Synthetic oligonucleotide
ccuuuacuccaucaggccc

SEQ ID NO: 1596838 - RNA, 19 nt, Artificial Sequence
  Description of Artificial Sequence: Synthetic oligonucleotide
gcccuuggcacauaccggg

SEQ ID NO: 1596839 - RNA, 19 nt, Artificial Sequence
  Description of Artificial Sequence: Synthetic oligonucleotide
cagaaguugggucaggacu

SEQ ID NO: 1596840 - RNA, 19 nt, Artificial Sequence
  Description of Artificial Sequence: Synthetic oligonucleotide
gcugacaacgguaggggcg

SEQ ID NO: 1596841 - RNA, 19 nt, Artificial Sequence
  Description of Artificial Sequence: Synthetic oligonucleotide
uuugggacuugcgguuggg

SEQ ID NO: 1596842 - RNA, 19 nt, Artificial Sequence
  Description of Artificial Sequence: Synthetic oligonucleotide
acggggcucaagccagacc

SEQ ID NO: 1596843 - RNA, 19 nt, Artificial Sequence
  Description of Artificial Sequence: Synthetic oligonucleotide
uccaguuguaagggcuggg

SEQ ID NO: 1596844 - RNA, 19 nt, Artificial Sequence
  Description of Artificial Sequence: Synthetic oligonucleotide
agcgguagggacgcucagc

SEQ ID NO: 1596845 - RNA, 19 nt, Artificial Sequence
  Description of Artificial Sequence: Synthetic oligonucleotide
agaagggacgagguggacu

SEQ ID NO: 1596846 - RNA, 19 nt, Artificial Sequence
  Description of Artificial Sequence: Synthetic oligonucleotide
caaagcccuuggcacauac

SEQ ID NO: 1596847 - RNA, 19 nt, Artificial Sequence
  Description of Artificial Sequence: Synthetic oligonucleotide
ggugcugcaaguuggaacu

SEQ ID NO: 1596848 - RNA, 19 nt, Artificial Sequence
  Description of Artificial Sequence: Synthetic oligonucleotide
ugaguagcguggaccgcca

SEQ ID NO: 1596849 - RNA, 19 nt, Artificial Sequence
  Description of Artificial Sequence: Synthetic oligonucleotide
cagauucuugguuaggacu

SEQ ID NO: 1596850 - RNA, 19 nt, Artificial Sequence
  Description of Artificial Sequence: Synthetic oligonucleotide
cugggacugucaugagugg

SEQ ID NO: 1596851 - RNA, 19 nt, Artificial Sequence
  Description of Artificial Sequence: Synthetic oligonucleotide
cagcacagaaguuggguca

SEQ ID NO: 1596852 - RNA, 19 nt, Artificial Sequence
  Description of Artificial Sequence: Synthetic oligonucleotide
gcuuagggucagaagauag

SEQ ID NO: 1596853 - RNA, 19 nt, Artificial Sequence
  Description of Artificial Sequence: Synthetic oligonucleotide
ggugcgcugaugcuggagc

SEQ ID NO: 1596854 - RNA, 19 nt, Artificial Sequence
  Description of Artificial Sequence: Synthetic oligonucleotide
ggaaagagaucugcccugg

SEQ ID NO: 1596855 - RNA, 19 nt, Artificial Sequence
  Description of Artificial Sequence: Synthetic oligonucleotide
ccccuuuacuccaucaggc

SEQ ID NO: 1596856 - RNA, 19 nt, Artificial Sequence
  Description of Artificial Sequence: Synthetic oligonucleotide
acgagggccaccgugugug

SEQ ID NO: 1596857 - RNA, 19 nt, Artificial Sequence
  Description of Artificial Sequence: Synthetic oligonucleotide
agagcaggggucaguuugg

SEQ ID NO: 1596858 - RNA, 19 nt, Artificial Sequence
  Description of Artificial Sequence: Synthetic oligonucleotide
uucgggcagagcuggcacc

SEQ ID NO: 1596859 - RNA, 19 nt, Artificial Sequence
  Description of Artificial Sequence: Synthetic oligonucleotide
gcugcgaugcuugaguagc

SEQ ID NO: 1596860 - RNA, 19 nt, Artificial Sequence
  Description of Artificial Sequence: Synthetic oligonucleotide
caugaccaaaggccuugcc

SEQ ID NO: 1596861 - RNA, 19 nt, Artificial Sequence
  Description of Artificial Sequence: Synthetic oligonucleotide
cugcgaugcuugaguagcg

SEQ ID NO: 1596862 - RNA, 19 nt, Artificial Sequence
  Description of Artificial Sequence: Synthetic oligonucleotide
ucagcccaagagcuucgac

SEQ ID NO: 1596863 - RNA, 19 nt, Artificial Sequence
  Description of Artificial Sequence: Synthetic oligonucleotide
augacuugccacagucggg

SEQ ID NO: 1596864 - RNA, 19 nt, Artificial Sequence
  Description of Artificial Sequence: Synthetic oligonucleotide
aagccuugccgcacugcgg

SEQ ID NO: 1596865 - RNA, 19 nt, Artificial Sequence
  Description of Artificial Sequence: Synthetic oligonucleotide
gaucgggguuagaacuggg

SEQ ID NO: 1596866 - RNA, 19 nt, Artificial Sequence
  Description of Artificial Sequence: Synthetic oligonucleotide
cauagauacggggcucaag

SEQ ID NO: 1596867 - RNA, 19 nt, Artificial Sequence
  Description of Artificial Sequence: Synthetic oligonucleotide
gugcgcagguguuuaagca

SEQ ID NO: 1596868 - RNA, 19 nt, Artificial Sequence
  Description of Artificial Sequence: Synthetic oligonucleotide
aggaccuaggaaagagauc

SEQ ID NO: 1596869 - RNA, 19 nt, Artificial Sequence
  Description of Artificial Sequence: Synthetic oligonucleotide
ggaagcaccucugggcugg

SEQ ID NO: 1596870 - RNA, 19 nt, Artificial Sequence
  Description of Artificial Sequence: Synthetic oligonucleotide
agcuucgacggaaggcucg

SEQ ID NO: 1596871 - RNA, 19 nt, Artificial Sequence
  Description of Artificial Sequence: Synthetic oligonucleotide
gcacuuguggggacgaggg

SEQ ID NO: 1596872 - RNA, 19 nt, Artificial Sequence
  Description of Artificial Sequence: Synthetic oligonucleotide
aaguuggaacucugcccaa

SEQ ID NO: 1596873 - RNA, 19 nt, Artificial Sequence
  Description of Artificial Sequence: Synthetic oligonucleotide
gcaggaggauuuuacuaug

SEQ ID NO: 1596874 - RNA, 19 nt, Artificial Sequence
  Description of Artificial Sequence: Synthetic oligonucleotide
aggcucguccacaaucagg

SEQ ID NO: 1596875 - RNA, 19 nt, Artificial Sequence
  Description of Artificial Sequence: Synthetic oligonucleotide
uggacguggaggugcugca

SEQ ID NO: 1596876 - RNA, 19 nt, Artificial Sequence
  Description of Artificial Sequence: Synthetic oligonucleotide
ugggcugguggccaagauu

SEQ ID NO: 1596877 - RNA, 19 nt, Artificial Sequence
  Description of Artificial Sequence: Synthetic oligonucleotide
ugcugcaggagugccgagc

SEQ ID NO: 1596878 - RNA, 19 nt, Artificial Sequence
  Description of Artificial Sequence: Synthetic oligonucleotide
gugggugcgucgguguugg

SEQ ID NO: 1596879 - RNA, 19 nt, Artificial Sequence
  Description of Artificial Sequence: Synthetic oligonucleotide
agcguggaccgccagccga

SEQ ID NO: 1596880 - RNA, 19 nt, Artificial Sequence
  Description of Artificial Sequence: Synthetic oligonucleotide
guggggacgagggccaccg

SEQ ID NO: 1596881 - RNA, 19 nt, Artificial Sequence
  Description of Artificial Sequence: Synthetic oligonucleotide
aguuugggacuugcgguug

SEQ ID NO: 1596882 - RNA, 19 nt, Artificial Sequence
  Description of Artificial Sequence: Synthetic oligonucleotide
caucaggccccagcaaugc

SEQ ID NO: 1596883 - RNA, 19 nt, Artificial Sequence
  Description of Artificial Sequence: Synthetic oligonucleotide
ucccucaugcacccgcuua

SEQ ID NO: 1596884 - RNA, 19 nt, Artificial Sequence
  Description of Artificial Sequence: Synthetic oligonucleotide
cuggaggccuggccaaagg

SEQ ID NO: 1596885 - RNA, 19 nt, Artificial Sequence
  Description of Artificial Sequence: Synthetic oligonucleotide
cgaugcuugaguagcgugg

SEQ ID NO: 1596886 - RNA, 19 nt, Artificial Sequence
  Description of Artificial Sequence: Synthetic oligonucleotide
gcgguagggacgcucagcc

SEQ ID NO: 1596887 - RNA, 19 nt, Artificial Sequence
  Description of Artificial Sequence: Synthetic oligonucleotide
uuuacuccaucaggcccca

SEQ ID NO: 1596888 - RNA, 19 nt, Artificial Sequence
  Description of Artificial Sequence: Synthetic oligonucleotide
caggaggauuuuacuauga

SEQ ID NO: 1596889 - RNA, 19 nt, Artificial Sequence
  Description of Artificial Sequence: Synthetic oligonucleotide
augggauuucggagggaac

SEQ ID NO: 1596890 - RNA, 19 nt, Artificial Sequence
  Description of Artificial Sequence: Synthetic oligonucleotide
guggcaccguggcugaaug

SEQ ID NO: 1596891 - RNA, 19 nt, Artificial Sequence
  Description of Artificial Sequence: Synthetic oligonucleotide
aaugccccuuccuccuuua

SEQ ID NO: 1596892 - RNA, 19 nt, Artificial Sequence
  Description of Artificial Sequence: Synthetic oligonucleotide
ugcgggcacggguagggac

SEQ ID NO: 1596893 - RNA, 19 nt, Artificial Sequence
  Description of Artificial Sequence: Synthetic oligonucleotide
aggacuggcaauagauccu

SEQ ID NO: 1596894 - RNA, 19 nt, Artificial Sequence
  Description of Artificial Sequence: Synthetic oligonucleotide
gggaucagauucuugguua

SEQ ID NO: 1596895 - RNA, 19 nt, Artificial Sequence
  Description of Artificial Sequence: Synthetic oligonucleotide
guguugggccagcaaugag

SEQ ID NO: 1596896 - RNA, 19 nt, Artificial Sequence
  Description of Artificial Sequence: Synthetic oligonucleotide
agguguugggccagcaaug

SEQ ID NO: 1596897 - RNA, 19 nt, Artificial Sequence
  Description of Artificial Sequence: Synthetic oligonucleotide
cuggguaccacaucagggu

SEQ ID NO: 1596898 - RNA, 19 nt, Artificial Sequence
  Description of Artificial Sequence: Synthetic oligonucleotide
ggugcgucgguguuggcuc

SEQ ID NO: 1596899 - RNA, 19 nt, Artificial Sequence
  Description of Artificial Sequence: Synthetic oligonucleotide
cggggcucaagccagaccc

SEQ ID NO: 1596900 - RNA, 19 nt, Artificial Sequence
  Description of Artificial Sequence: Synthetic oligonucleotide
uaugcuuggugaggcugga

SEQ ID NO: 1596901 - RNA, 19 nt, Artificial Sequence
  Description of Artificial Sequence: Synthetic oligonucleotide
ugcgaugcuugaguagcgu

SEQ ID NO: 1596902 - RNA, 19 nt, Artificial Sequence
  Description of Artificial Sequence: Synthetic oligonucleotide
caccaguguggaugccucg

SEQ ID NO: 1596903 - RNA, 19 nt, Artificial Sequence
  Description of Artificial Sequence: Synthetic oligonucleotide
ggacuucgggcagagcugg

SEQ ID NO: 1596904 - RNA, 19 nt, Artificial Sequence
  Description of Artificial Sequence: Synthetic oligonucleotide
aagggacgagguggacugg

SEQ ID NO: 1596905 - RNA, 19 nt, Artificial Sequence
  Description of Artificial Sequence: Synthetic oligonucleotide
agcccuuggcacauaccgg

SEQ ID NO: 1596906 - RNA, 19 nt, Artificial Sequence
  Description of Artificial Sequence: Synthetic oligonucleotide
cacauaccgggcacuugug

SEQ ID NO: 1596907 - RNA, 19 nt, Artificial Sequence
  Description of Artificial Sequence: Synthetic oligonucleotide
ggccgccucauagauacgg

SEQ ID NO: 1596908 - RNA, 19 nt, Artificial Sequence
  Description of Artificial Sequence: Synthetic oligonucleotide
cucuccaguuguaagggcu

SEQ ID NO: 1596909 - RNA, 19 nt, Artificial Sequence
  Description of Artificial Sequence: Synthetic oligonucleotide
uggaugccucgauguuggg

SEQ ID NO: 1596910 - RNA, 19 nt, Artificial Sequence
  Description of Artificial Sequence: Synthetic oligonucleotide
augccccuuccuccuuuac

SEQ ID NO: 1596911 - RNA, 19 nt, Artificial Sequence
  Description of Artificial Sequence: Synthetic oligonucleotide
cugcagcucccucaugcac

SEQ ID NO: 1596912 - RNA, 19 nt, Artificial Sequence
  Description of Artificial Sequence: Synthetic oligonucleotide
aggacuucgggcagagcug

SEQ ID NO: 1596913 - RNA, 19 nt, Artificial Sequence
  Description of Artificial Sequence: Synthetic oligonucleotide
ggacgagguggacuggcag

SEQ ID NO: 1596914 - RNA, 19 nt, Artificial Sequence
  Description of Artificial Sequence: Synthetic oligonucleotide
cuugaguagcguggaccgc

SEQ ID NO: 1596915 - RNA, 19 nt, Artificial Sequence
  Description of Artificial Sequence: Synthetic oligonucleotide
ucgccagaauggacgugga

SEQ ID NO: 1596916 - RNA, 19 nt, Artificial Sequence
  Description of Artificial Sequence: Synthetic oligonucleotide
uugcgguuggggucagcac

SEQ ID NO: 1596917 - RNA, 19 nt, Artificial Sequence
  Description of Artificial Sequence: Synthetic oligonucleotide
gagugggagagcagggguc

SEQ ID NO: 1596918 - RNA, 19 nt, Artificial Sequence
  Description of Artificial Sequence: Synthetic oligonucleotide
guggaccgccagccgaagg

SEQ ID NO: 1596919 - RNA, 19 nt, Artificial Sequence
  Description of Artificial Sequence: Synthetic oligonucleotide
cuggcaauagauccugagu

SEQ ID NO: 1596920 - RNA, 19 nt, Artificial Sequence
  Description of Artificial Sequence: Synthetic oligonucleotide
augcuggagcaaugcugag

SEQ ID NO: 1596921 - RNA, 19 nt, Artificial Sequence
  Description of Artificial Sequence: Synthetic oligonucleotide
gggacuugcgguugggguc

SEQ ID NO: 1596922 - RNA, 19 nt, Artificial Sequence
  Description of Artificial Sequence: Synthetic oligonucleotide
gacugucaugagugggaga

SEQ ID NO: 1596923 - RNA, 19 nt, Artificial Sequence
  Description of Artificial Sequence: Synthetic oligonucleotide
gagugccgagcucugccca

SEQ ID NO: 1596924 - RNA, 19 nt, Artificial Sequence
  Description of Artificial Sequence: Synthetic oligonucleotide
gcgcucgccagaauggacg

SEQ ID NO: 1596925 - RNA, 19 nt, Artificial Sequence
  Description of Artificial Sequence: Synthetic oligonucleotide
ggacuggcaauagauccug

SEQ ID NO: 1596926 - RNA, 19 nt, Artificial Sequence
  Description of Artificial Sequence: Synthetic oligonucleotide
cucauagauacggggcuca

SEQ ID NO: 1596927 - RNA, 19 nt, Artificial Sequence
  Description of Artificial Sequence: Synthetic oligonucleotide
gguguuuaagcagcgcaga

SEQ ID NO: 1596928 - RNA, 19 nt, Artificial Sequence
  Description of Artificial Sequence: Synthetic oligonucleotide
uuggcacauaccgggcacu

SEQ ID NO: 1596929 - RNA, 19 nt, Artificial Sequence
  Description of Artificial Sequence: Synthetic oligonucleotide
cccgcuuaugcuuggugag

SEQ ID NO: 1596930 - RNA, 19 nt, Artificial Sequence
  Description of Artificial Sequence: Synthetic oligonucleotide
uggggucagcacuggggac

SEQ ID NO: 1596931 - RNA, 19 nt, Artificial Sequence
  Description of Artificial Sequence: Synthetic oligonucleotide
aauggacguggaggugcug

SEQ ID NO: 1596932 - RNA, 19 nt, Artificial Sequence
  Description of Artificial Sequence: Synthetic oligonucleotide
uuacccacuugggacucuc

SEQ ID NO: 1596933 - RNA, 19 nt, Artificial Sequence
  Description of Artificial Sequence: Synthetic oligonucleotide
cgauguugggccagugugg

SEQ ID NO: 1596934 - RNA, 19 nt, Artificial Sequence
  Description of Artificial Sequence: Synthetic oligonucleotide
ucauagauacggggcucaa

SEQ ID NO: 1596935 - RNA, 19 nt, Artificial Sequence
  Description of Artificial Sequence: Synthetic oligonucleotide
gaguagcguggaccgccag

SEQ ID NO: 1596936 - RNA, 19 nt, Artificial Sequence
  Description of Artificial Sequence: Synthetic oligonucleotide
ccgccucauagauacgggg

SEQ ID NO: 1596937 - RNA, 19 nt, Artificial Sequence
  Description of Artificial Sequence: Synthetic oligonucleotide
ggcaccguggcugaaugac

SEQ ID NO: 1596938 - RNA, 19 nt, Artificial Sequence
  Description of Artificial Sequence: Synthetic oligonucleotide
gggauuucggagggaaccc

SEQ ID NO: 1596939 - RNA, 19 nt, Artificial Sequence
  Description of Artificial Sequence: Synthetic oligonucleotide
gcgaugcuugaguagcgug

SEQ ID NO: 1596940 - RNA, 19 nt, Artificial Sequence
  Description of Artificial Sequence: Synthetic oligonucleotide
ggagugccgagcucugccc

SEQ ID NO: 1596941 - RNA, 19 nt, Artificial Sequence
  Description of Artificial Sequence: Synthetic oligonucleotide
aucgggguuagaacuggga

SEQ ID NO: 1596942 - RNA, 19 nt, Artificial Sequence
  Description of Artificial Sequence: Synthetic oligonucleotide
ggucaguuugggacuugcg

SEQ ID NO: 1596943 - RNA, 19 nt, Artificial Sequence
  Description of Artificial Sequence: Synthetic oligonucleotide
gagaucugcccuggccgcc

SEQ ID NO: 1596944 - RNA, 19 nt, Artificial Sequence
  Description of Artificial Sequence: Synthetic oligonucleotide
uacccacuugggacucucu

SEQ ID NO: 1596945 - RNA, 19 nt, Artificial Sequence
  Description of Artificial Sequence: Synthetic oligonucleotide
uguggcaccguggcugaau

SEQ ID NO: 1596946 - RNA, 19 nt, Artificial Sequence
  Description of Artificial Sequence: Synthetic oligonucleotide
aggggccggaagcaccucu

SEQ ID NO: 1596947 - RNA, 19 nt, Artificial Sequence
  Description of Artificial Sequence: Synthetic oligonucleotide
uggggacaagaucgggguu

SEQ ID NO: 1596948 - RNA, 19 nt, Artificial Sequence
  Description of Artificial Sequence: Synthetic oligonucleotide
agauuccagcacagaaaca

SEQ ID NO: 1596949 - RNA, 19 nt, Artificial Sequence
  Description of Artificial Sequence: Synthetic oligonucleotide
gggacagcgguagggacgc

SEQ ID NO: 1596950 - RNA, 19 nt, Artificial Sequence
  Description of Artificial Sequence: Synthetic oligonucleotide
ccucgcaccaguguggaug

SEQ ID NO: 1596951 - RNA, 19 nt, Artificial Sequence
  Description of Artificial Sequence: Synthetic oligonucleotide
cacccgcuuaugcuuggug

SEQ ID NO: 1596952 - RNA, 19 nt, Artificial Sequence
  Description of Artificial Sequence: Synthetic oligonucleotide
cgccucauagauacggggc

SEQ ID NO: 1596953 - RNA, 19 nt, Artificial Sequence
  Description of Artificial Sequence: Synthetic oligonucleotide
ggaugccucgauguugggc

SEQ ID NO: 1596954 - RNA, 19 nt, Artificial Sequence
  Description of Artificial Sequence: Synthetic oligonucleotide
gguggacuggcaggggccg

SEQ ID NO: 1596955 - RNA, 19 nt, Artificial Sequence
  Description of Artificial Sequence: Synthetic oligonucleotide
uggcaccguggcugaauga

SEQ ID NO: 1596956 - RNA, 19 nt, Artificial Sequence
  Description of Artificial Sequence: Synthetic oligonucleotide
uuuacccacuugggacucu

SEQ ID NO: 1596957 - RNA, 19 nt, Artificial Sequence
  Description of Artificial Sequence: Synthetic oligonucleotide
gguuagaacugggaucaga

SEQ ID NO: 1596958 - RNA, 19 nt, Artificial Sequence
  Description of Artificial Sequence: Synthetic oligonucleotide
ccaguuguaagggcugggc

SEQ ID NO: 1596959 - RNA, 19 nt, Artificial Sequence
  Description of Artificial Sequence: Synthetic oligonucleotide
cuucccaaccaccauggau

SEQ ID NO: 1596960 - RNA, 19 nt, Artificial Sequence
  Description of Artificial Sequence: Synthetic oligonucleotide
agugccgagcucugcccaa

SEQ ID NO: 1596961 - RNA, 19 nt, Artificial Sequence
  Description of Artificial Sequence: Synthetic oligonucleotide
cagaauggacguggaggug

SEQ ID NO: 1596962 - RNA, 19 nt, Artificial Sequence
  Description of Artificial Sequence: Synthetic oligonucleotide
ugccucgauguugggccag

SEQ ID NO: 1596963 - RNA, 19 nt, Artificial Sequence
  Description of Artificial Sequence: Synthetic oligonucleotide
uggccgccucauagauacg

SEQ ID NO: 1596964 - RNA, 19 nt, Artificial Sequence
  Description of Artificial Sequence: Synthetic oligonucleotide
ugcgcugaugcuggagcaa

SEQ ID NO: 1596965 - RNA, 19 nt, Artificial Sequence
  Description of Artificial Sequence: Synthetic oligonucleotide
auguugggccaguguggca

SEQ ID NO: 1596966 - RNA, 19 nt, Artificial Sequence
  Description of Artificial Sequence: Synthetic oligonucleotide
augcacccgcuuaugcuug

SEQ ID NO: 1596967 - RNA, 19 nt, Artificial Sequence
  Description of Artificial Sequence: Synthetic oligonucleotide
cagcgcagagcccugccca

SEQ ID NO: 1596968 - RNA, 19 nt, Artificial Sequence
  Description of Artificial Sequence: Synthetic oligonucleotide
gcugcaaguuggaacucug

SEQ ID NO: 1596969 - RNA, 19 nt, Artificial Sequence
  Description of Artificial Sequence: Synthetic oligonucleotide
gggacaagaucgggguuag

SEQ ID NO: 1596970 - RNA, 19 nt, Artificial Sequence
  Description of Artificial Sequence: Synthetic oligonucleotide
gccaugaccaaaggccuug

SEQ ID NO: 1596971 - RNA, 19 nt, Artificial Sequence
  Description of Artificial Sequence: Synthetic oligonucleotide
ccaucaggccccagcaaug

SEQ ID NO: 1596972 - RNA, 19 nt, Artificial Sequence
  Description of Artificial Sequence: Synthetic oligonucleotide
gggacugucaugaguggga

SEQ ID NO: 1596973 - RNA, 19 nt, Artificial Sequence
  Description of Artificial Sequence: Synthetic oligonucleotide
uacggggcucaagccagac

SEQ ID NO: 1596974 - RNA, 19 nt, Artificial Sequence
  Description of Artificial Sequence: Synthetic oligonucleotide
gguguugggccagcaauga

SEQ ID NO: 1596975 - RNA, 19 nt, Artificial Sequence
  Description of Artificial Sequence: Synthetic oligonucleotide
agcgcagagcccugcccaa

SEQ ID NO: 1596976 - RNA, 19 nt, Artificial Sequence
  Description of Artificial Sequence: Synthetic oligonucleotide
ccagaauggacguggaggu

SEQ ID NO: 1596977 - RNA, 19 nt, Artificial Sequence
  Description of Artificial Sequence: Synthetic oligonucleotide
gguguuggcucagcccaag

SEQ ID NO: 1596978 - RNA, 19 nt, Artificial Sequence
  Description of Artificial Sequence: Synthetic oligonucleotide
cgggguuagaacugggauc

SEQ ID NO: 1596979 - RNA, 19 nt, Artificial Sequence
  Description of Artificial Sequence: Synthetic oligonucleotide
gugugggcaggcauaaggu

SEQ ID NO: 1596980 - RNA, 19 nt, Artificial Sequence
  Description of Artificial Sequence: Synthetic oligonucleotide
ccuggaggaugggauuucg

SEQ ID NO: 1596981 - RNA, 19 nt, Artificial Sequence
  Description of Artificial Sequence: Synthetic oligonucleotide
gggucaguuugggacuugc

SEQ ID NO: 1596982 - RNA, 19 nt, Artificial Sequence
  Description of Artificial Sequence: Synthetic oligonucleotide
gagcuucgacggaaggcuc

SEQ ID NO: 1596983 - RNA, 19 nt, Artificial Sequence
  Description of Artificial Sequence: Synthetic oligonucleotide
cuugggacucucuccaguu

SEQ ID NO: 1596984 - RNA, 19 nt, Artificial Sequence
  Description of Artificial Sequence: Synthetic oligonucleotide
acuugcgguuggggucagc

SEQ ID NO: 1596985 - RNA, 19 nt, Artificial Sequence
  Description of Artificial Sequence: Synthetic oligonucleotide
ggacuugcgguugggguca

SEQ ID NO: 1596986 - RNA, 19 nt, Artificial Sequence
  Description of Artificial Sequence: Synthetic oligonucleotide
gacccgaggcccagcccag

SEQ ID NO: 1596987 - RNA, 19 nt, Artificial Sequence
  Description of Artificial Sequence: Synthetic oligonucleotide
gaauggacguggaggugcu

SEQ ID NO: 1596988 - RNA, 19 nt, Artificial Sequence
  Description of Artificial Sequence: Synthetic oligonucleotide
uacggagguggugcugcaa

SEQ ID NO: 1596989 - RNA, 19 nt, Artificial Sequence
  Description of Artificial Sequence: Synthetic oligonucleotide
gccucauagauacggggcu

SEQ ID NO: 1596990 - RNA, 19 nt, Artificial Sequence
  Description of Artificial Sequence: Synthetic oligonucleotide
uggcacauaccgggcacuu

SEQ ID NO: 1596991 - RNA, 19 nt, Artificial Sequence
  Description of Artificial Sequence: Synthetic oligonucleotide
gccgccucauagauacggg

SEQ ID NO: 1596992 - RNA, 19 nt, Artificial Sequence
  Description of Artificial Sequence: Synthetic oligonucleotide
gcagcgcagagcccugccc

SEQ ID NO: 1596993 - RNA, 19 nt, Artificial Sequence
  Description of Artificial Sequence: Synthetic oligonucleotide
gccaccgugugugcgcagg

SEQ ID NO: 1596994 - RNA, 19 nt, Artificial Sequence
  Description of Artificial Sequence: Synthetic oligonucleotide
gagcagugugggcaggcau

SEQ ID NO: 1596995 - RNA, 19 nt, Artificial Sequence
  Description of Artificial Sequence: Synthetic oligonucleotide
ggauuucggagggaaccca

SEQ ID NO: 1596996 - RNA, 19 nt, Artificial Sequence
  Description of Artificial Sequence: Synthetic oligonucleotide
gcaucauggccuggcuuag

SEQ ID NO: 1596997 - RNA, 19 nt, Artificial Sequence
  Description of Artificial Sequence: Synthetic oligonucleotide
cugcugcgaugcuugagua

SEQ ID NO: 1596998 - RNA, 19 nt, Artificial Sequence
  Description of Artificial Sequence: Synthetic oligonucleotide
ggguaccacaucaggguca

SEQ ID NO: 1596999 - RNA, 19 nt, Artificial Sequence
  Description of Artificial Sequence: Synthetic oligonucleotide
cucgauguugggccagugu

SEQ ID NO: 1597000 - RNA, 19 nt, Artificial Sequence
  Description of Artificial Sequence: Synthetic oligonucleotide
gacuucgggcagagcuggc

SEQ ID NO: 1597001 - RNA, 19 nt, Artificial Sequence
  Description of Artificial Sequence: Synthetic oligonucleotide
ggggacaagaucgggguua

SEQ ID NO: 1597002 - RNA, 19 nt, Artificial Sequence
  Description of Artificial Sequence: Synthetic oligonucleotide
ggacgagggccaccgugug

SEQ ID NO: 1597003 - RNA, 19 nt, Artificial Sequence
  Description of Artificial Sequence: Synthetic oligonucleotide
gguuaggacuggguaccac

SEQ ID NO: 1597004 - RNA, 19 nt, Artificial Sequence
  Description of Artificial Sequence: Synthetic oligonucleotide
ggaccgccagccgaaggcc

SEQ ID NO: 1597005 - RNA, 19 nt, Artificial Sequence
  Description of Artificial Sequence: Synthetic oligonucleotide
caguuugggacuugcgguu

SEQ ID NO: 1597006 - RNA, 19 nt, Artificial Sequence
  Description of Artificial Sequence: Synthetic oligonucleotide
cacugcgggcacggguagg

SEQ ID NO: 1597007 - RNA, 19 nt, Artificial Sequence
  Description of Artificial Sequence: Synthetic oligonucleotide
ggauacggagguggugcug

SEQ ID NO: 1597008 - RNA, 19 nt, Artificial Sequence
  Description of Artificial Sequence: Synthetic oligonucleotide
gccagcaaugagccaugac

SEQ ID NO: 1597009 - RNA, 19 nt, Artificial Sequence
  Description of Artificial Sequence: Synthetic oligonucleotide
uggcaggggccggaagcac

SEQ ID NO: 1597010 - RNA, 19 nt, Artificial Sequence
  Description of Artificial Sequence: Synthetic oligonucleotide
uuacuccaucaggccccag

SEQ ID NO: 1597011 - RNA, 19 nt, Artificial Sequence
  Description of Artificial Sequence: Synthetic oligonucleotide
ccuuuacccacuugggacu

SEQ ID NO: 1597012 - RNA, 19 nt, Artificial Sequence
  Description of Artificial Sequence: Synthetic oligonucleotide
gacgagggccaccgugugu

SEQ ID NO: 1597013 - RNA, 19 nt, Artificial Sequence
  Description of Artificial Sequence: Synthetic oligonucleotide
gggcugguggccaagauuu

SEQ ID NO: 1597014 - RNA, 19 nt, Artificial Sequence
  Description of Artificial Sequence: Synthetic oligonucleotide
caccguggcugaaugacuu

SEQ ID NO: 1597015 - RNA, 19 nt, Artificial Sequence
  Description of Artificial Sequence: Synthetic oligonucleotide
gguggugcugcaaguugga

SEQ ID NO: 1597016 - RNA, 19 nt, Artificial Sequence
  Description of Artificial Sequence: Synthetic oligonucleotide
ccucauagauacggggcuc

SEQ ID NO: 1597017 - RNA, 19 nt, Artificial Sequence
  Description of Artificial Sequence: Synthetic oligonucleotide
cugcaggagugccgagcuc

SEQ ID NO: 1597018 - RNA, 19 nt, Artificial Sequence
  Description of Artificial Sequence: Synthetic oligonucleotide
ugacaacgguaggggcgcu

SEQ ID NO: 1597019 - RNA, 19 nt, Artificial Sequence
  Description of Artificial Sequence: Synthetic oligonucleotide
ggcacauaccgggcacuug

SEQ ID NO: 1597020 - RNA, 19 nt, Artificial Sequence
  Description of Artificial Sequence: Synthetic oligonucleotide
uggggacgagggccaccgu

SEQ ID NO: 1597021 - RNA, 19 nt, Artificial Sequence
  Description of Artificial Sequence: Synthetic oligonucleotide
gacuugcgguuggggucag

SEQ ID NO: 1597022 - RNA, 19 nt, Artificial Sequence
  Description of Artificial Sequence: Synthetic oligonucleotide
gcaccaguguggaugccuc

SEQ ID NO: 1597023 - RNA, 19 nt, Artificial Sequence
  Description of Artificial Sequence: Synthetic oligonucleotide
gaacugggaucagauucuu

SEQ ID NO: 1597024 - RNA, 19 nt, Artificial Sequence
  Description of Artificial Sequence: Synthetic oligonucleotide
cuucgacggaaggcucguc

SEQ ID NO: 1597025 - RNA, 19 nt, Artificial Sequence
  Description of Artificial Sequence: Synthetic oligonucleotide
ccaugaccaaaggccuugc

SEQ ID NO: 1597026 - RNA, 19 nt, Artificial Sequence
  Description of Artificial Sequence: Synthetic oligonucleotide
gacgcucagccgugugggu

SEQ ID NO: 1597027 - RNA, 19 nt, Artificial Sequence
  Description of Artificial Sequence: Synthetic oligonucleotide
ucgcaccaguguggaugcc

SEQ ID NO: 1597028 - RNA, 19 nt, Artificial Sequence
  Description of Artificial Sequence: Synthetic oligonucleotide
gggugcgcugaugcuggag

SEQ ID NO: 1597029 - RNA, 19 nt, Artificial Sequence
  Description of Artificial Sequence: Synthetic oligonucleotide
cucagcccaagagcuucga

SEQ ID NO: 1597030 - RNA, 19 nt, Artificial Sequence
  Description of Artificial Sequence: Synthetic oligonucleotide
ugggugcgucgguguuggc

SEQ ID NO: 1597031 - RNA, 19 nt, Artificial Sequence
  Description of Artificial Sequence: Synthetic oligonucleotide
gcccgaaagccuugccgca

SEQ ID NO: 1597032 - RNA, 19 nt, Artificial Sequence
  Description of Artificial Sequence: Synthetic oligonucleotide
ggcuuagggucagaagaua

SEQ ID NO: 1597033 - RNA, 19 nt, Artificial Sequence
  Description of Artificial Sequence: Synthetic oligonucleotide
guguggaugccucgauguu

SEQ ID NO: 1597034 - RNA, 19 nt, Artificial Sequence
  Description of Artificial Sequence: Synthetic oligonucleotide
ggggccggaagcaccucug

SEQ ID NO: 1597035 - RNA, 19 nt, Artificial Sequence
  Description of Artificial Sequence: Synthetic oligonucleotide
ggguuagaacugggaucag

SEQ ID NO: 1597036 - RNA, 19 nt, Artificial Sequence
  Description of Artificial Sequence: Synthetic oligonucleotide
gggcucaagccagacccga

SEQ ID NO: 1597037 - RNA, 19 nt, Artificial Sequence
  Description of Artificial Sequence: Synthetic oligonucleotide
cgguagggacgcucagccg

SEQ ID NO: 1597038 - RNA, 19 nt, Artificial Sequence
  Description of Artificial Sequence: Synthetic oligonucleotide
gccccagcaaugccccuuc

SEQ ID NO: 1597039 - RNA, 19 nt, Artificial Sequence
  Description of Artificial Sequence: Synthetic oligonucleotide
cccgaaagccuugccgcac

SEQ ID NO: 1597040 - RNA, 19 nt, Artificial Sequence
  Description of Artificial Sequence: Synthetic oligonucleotide
guaccacaucagggucagc

SEQ ID NO: 1597041 - RNA, 19 nt, Artificial Sequence
  Description of Artificial Sequence: Synthetic oligonucleotide
ggucaggacuucgggcaga

SEQ ID NO: 1597042 - RNA, 19 nt, Artificial Sequence
  Description of Artificial Sequence: Synthetic oligonucleotide
ccggaagcaccucugggcu

SEQ ID NO: 1597043 - RNA, 19 nt, Artificial Sequence
  Description of Artificial Sequence: Synthetic oligonucleotide
gggacgagggccaccgugu

SEQ ID NO: 1597044 - RNA, 19 nt, Artificial Sequence
  Description of Artificial Sequence: Synthetic oligonucleotide
gaccgccagccgaaggccu

SEQ ID NO: 1597045 - RNA, 19 nt, Artificial Sequence
  Description of Artificial Sequence: Synthetic oligonucleotide
cgacggaaggcucguccac

SEQ ID NO: 1597046 - RNA, 19 nt, Artificial Sequence
  Description of Artificial Sequence: Synthetic oligonucleotide
gcccuggccgccucauaga

SEQ ID NO: 1597047 - RNA, 19 nt, Artificial Sequence
  Description of Artificial Sequence: Synthetic oligonucleotide
cagcaucauggccuggcuu

SEQ ID NO: 1597048 - RNA, 19 nt, Artificial Sequence
  Description of Artificial Sequence: Synthetic oligonucleotide
gggugcgucgguguuggcu

SEQ ID NO: 1597049 - RNA, 19 nt, Artificial Sequence
  Description of Artificial Sequence: Synthetic oligonucleotide
gcucugcccgaaagccuug

SEQ ID NO: 1597050 - RNA, 19 nt, Artificial Sequence
  Description of Artificial Sequence: Synthetic oligonucleotide
gcucgccagaauggacgug

SEQ ID NO: 1597051 - RNA, 19 nt, Artificial Sequence
  Description of Artificial Sequence: Synthetic oligonucleotide
gugccgagcucugcccaaa

SEQ ID NO: 1597052 - RNA, 19 nt, Artificial Sequence
  Description of Artificial Sequence: Synthetic oligonucleotide
ggcugguggccaagauuuc

SEQ ID NO: 1597053 - RNA, 19 nt, Artificial Sequence
  Description of Artificial Sequence: Synthetic oligonucleotide
gggacucucuccaguugua

SEQ ID NO: 1597054 - RNA, 19 nt, Artificial Sequence
  Description of Artificial Sequence: Synthetic oligonucleotide
cccaaccaccauggaugcc

SEQ ID NO: 1597055 - RNA, 19 nt, Artificial Sequence
  Description of Artificial Sequence: Synthetic oligonucleotide
ggccaccgugugugcgcag

SEQ ID NO: 1597056 - RNA, 19 nt, Artificial Sequence
  Description of Artificial Sequence: Synthetic oligonucleotide
cccgcuguggcugcugcga

SEQ ID NO: 1597057 - RNA, 19 nt, Artificial Sequence
  Description of Artificial Sequence: Synthetic oligonucleotide
agcccugcccaaagcccuu

SEQ ID NO: 1597058 - RNA, 19 nt, Artificial Sequence
  Description of Artificial Sequence: Synthetic oligonucleotide
cgcacugcgggcacgggua

SEQ ID NO: 1597059 - RNA, 19 nt, Artificial Sequence
  Description of Artificial Sequence: Synthetic oligonucleotide
ggcugggcugggacuguca

SEQ ID NO: 1597060 - RNA, 19 nt, Artificial Sequence
  Description of Artificial Sequence: Synthetic oligonucleotide
gcuucgacggaaggcucgu

SEQ ID NO: 1597061 - RNA, 19 nt, Artificial Sequence
  Description of Artificial Sequence: Synthetic oligonucleotide
caggggccggaagcaccuc

SEQ ID NO: 1597062 - RNA, 19 nt, Artificial Sequence
  Description of Artificial Sequence: Synthetic oligonucleotide
gcaccguggcugaaugacu

SEQ ID NO: 1597063 - RNA, 19 nt, Artificial Sequence
  Description of Artificial Sequence: Synthetic oligonucleotide
ggacaagaucgggguuaga

SEQ ID NO: 1597064 - RNA, 19 nt, Artificial Sequence
  Description of Artificial Sequence: Synthetic oligonucleotide
gcguggaccgccagccgaa

SEQ ID NO: 1597065 - RNA, 19 nt, Artificial Sequence
  Description of Artificial Sequence: Synthetic oligonucleotide
ccuggccgccucauagaua

SEQ ID NO: 1597066 - RNA, 19 nt, Artificial Sequence
  Description of Artificial Sequence: Synthetic oligonucleotide
cguggaccgccagccgaag

SEQ ID NO: 1597067 - RNA, 19 nt, Artificial Sequence
  Description of Artificial Sequence: Synthetic oligonucleotide
cgcucgccagaauggacgu

SEQ ID NO: 1597068 - RNA, 19 nt, Artificial Sequence
  Description of Artificial Sequence: Synthetic oligonucleotide
gcgcagagcccugcccaaa

SEQ ID NO: 1597069 - RNA, 19 nt, Artificial Sequence
  Description of Artificial Sequence: Synthetic oligonucleotide
ggccccagcaaugccccuu

SEQ ID NO: 1597070 - RNA, 19 nt, Artificial Sequence
  Description of Artificial Sequence: Synthetic oligonucleotide
ccgcacugcgggcacgggu

SEQ ID NO: 1597071 - RNA, 19 nt, Artificial Sequence
  Description of Artificial Sequence: Synthetic oligonucleotide
ccaccgugugugcgcaggu

SEQ ID NO: 1597072 - RNA, 19 nt, Artificial Sequence
  Description of Artificial Sequence: Synthetic oligonucleotide
cgguguuggcucagcccaa

SEQ ID NO: 1597073 - RNA, 19 nt, Artificial Sequence
  Description of Artificial Sequence: Synthetic oligonucleotide
gcacccgcuuaugcuuggu

SEQ ID NO: 1597074 - RNA, 19 nt, Artificial Sequence
  Description of Artificial Sequence: Synthetic oligonucleotide
gccucgcaccaguguggau

SEQ ID NO: 1597075 - RNA, 19 nt, Artificial Sequence
  Description of Artificial Sequence: Synthetic oligonucleotide
cggaaggcucguccacaau

SEQ ID NO: 1597076 - RNA, 19 nt, Artificial Sequence
  Description of Artificial Sequence: Synthetic oligonucleotide
aauaaauaguucuugcucc

SEQ ID NO: 1597077 - RNA, 19 nt, Artificial Sequence
  Description of Artificial Sequence: Synthetic oligonucleotide
aauaguucuugcuccuagc

SEQ ID NO: 1597078 - RNA, 19 nt, Artificial Sequence
  Description of Artificial Sequence: Synthetic oligonucleotide
acaucauucaauuuguagu

SEQ ID NO: 1597079 - RNA, 19 nt, Artificial Sequence
  Description of Artificial Sequence: Synthetic oligonucleotide
uuuauuuggccauuuuaag

SEQ ID NO: 1597080 - RNA, 19 nt, Artificial Sequence
  Description of Artificial Sequence: Synthetic oligonucleotide
uuaauaaauaguucuugcu

SEQ ID NO: 1597081 - RNA, 19 nt, Artificial Sequence
  Description of Artificial Sequence: Synthetic oligonucleotide
aguucuugcuccuagcccg

SEQ ID NO: 1597082 - RNA, 19 nt, Artificial Sequence
  Description of Artificial Sequence: Synthetic oligonucleotide
auuuguaguaggcaaacug

SEQ ID NO: 1597083 - RNA, 19 nt, Artificial Sequence
  Description of Artificial Sequence: Synthetic oligonucleotide
auaguucuugcuccuagcc

SEQ ID NO: 1597084 - RNA, 19 nt, Artificial Sequence
  Description of Artificial Sequence: Synthetic oligonucleotide
uguagagcuucacagcccg

SEQ ID NO: 1597085 - RNA, 19 nt, Artificial Sequence
  Description of Artificial Sequence: Synthetic oligonucleotide
gaagucuaccugcucaugg

SEQ ID NO: 1597086 - RNA, 19 nt, Artificial Sequence
  Description of Artificial Sequence: Synthetic oligonucleotide
aaguguaggccgcagccac

SEQ ID NO: 1597087 - RNA, 19 nt, Artificial Sequence
  Description of Artificial Sequence: Synthetic oligonucleotide
aacacagccucguagggcu

SEQ ID NO: 1597088 - RNA, 19 nt, Artificial Sequence
  Description of Artificial Sequence: Synthetic oligonucleotide
cucguacugcucuagagcg

SEQ ID NO: 1597089 - RNA, 19 nt, Artificial Sequence
  Description of Artificial Sequence: Synthetic oligonucleotide
gaaaguguaggccgcagcc

SEQ ID NO: 1597090 - RNA, 19 nt, Artificial Sequence
  Description of Artificial Sequence: Synthetic oligonucleotide
aagagcauguagcuagcag

SEQ ID NO: 1597091 - RNA, 19 nt, Artificial Sequence
  Description of Artificial Sequence: Synthetic oligonucleotide
aaacugcagguagugauac

SEQ ID NO: 1597092 - RNA, 19 nt, Artificial Sequence
  Description of Artificial Sequence: Synthetic oligonucleotide
cuguuguagagcuucacag

SEQ ID NO: 1597093 - RNA, 19 nt, Artificial Sequence
  Description of Artificial Sequence: Synthetic oligonucleotide
uguagcuagcagcacugcg

SEQ ID NO: 1597094 - RNA, 19 nt, Artificial Sequence
  Description of Artificial Sequence: Synthetic oligonucleotide
agcgaagacugucauguac

SEQ ID NO: 1597095 - RNA, 19 nt, Artificial Sequence
  Description of Artificial Sequence: Synthetic oligonucleotide
guagcugagguacuuggcg

SEQ ID NO: 1597096 - RNA, 19 nt, Artificial Sequence
  Description of Artificial Sequence: Synthetic oligonucleotide
uacguuggggaugagauug

SEQ ID NO: 1597097 - RNA, 19 nt, Artificial Sequence
  Description of Artificial Sequence: Synthetic oligonucleotide
aauacaccagguucugcug

SEQ ID NO: 1597098 - RNA, 19 nt, Artificial Sequence
  Description of Artificial Sequence: Synthetic oligonucleotide
ugacugaagguacaugugu

SEQ ID NO: 1597099 - RNA, 19 nt, Artificial Sequence
  Description of Artificial Sequence: Synthetic oligonucleotide
uguuguagagcuucacagc

SEQ ID NO: 1597100 - RNA, 19 nt, Artificial Sequence
  Description of Artificial Sequence: Synthetic oligonucleotide
uugugguagagcauggccu

SEQ ID NO: 1597101 - RNA, 19 nt, Artificial Sequence
  Description of Artificial Sequence: Synthetic oligonucleotide
uugaacugcgcguagugca

SEQ ID NO: 1597102 - RNA, 19 nt, Artificial Sequence
  Description of Artificial Sequence: Synthetic oligonucleotide
cucgccaucgccaucgccg

SEQ ID NO: 1597103 - RNA, 19 nt, Artificial Sequence
  Description of Artificial Sequence: Synthetic oligonucleotide
ucaauuuguaguaggcaaa

SEQ ID NO: 1597104 - RNA, 19 nt, Artificial Sequence
  Description of Artificial Sequence: Synthetic oligonucleotide
cacaaaguagccaccuacg

SEQ ID NO: 1597105 - RNA, 19 nt, Artificial Sequence
  Description of Artificial Sequence: Synthetic oligonucleotide
uagcuagcagcacugcggg

SEQ ID NO: 1597106 - RNA, 19 nt, Artificial Sequence
  Description of Artificial Sequence: Synthetic oligonucleotide
agaggcaucagguccuccg

SEQ ID NO: 1597107 - RNA, 19 nt, Artificial Sequence
  Description of Artificial Sequence: Synthetic oligonucleotide
ucaucuccgacauccagca

SEQ ID NO: 1597108 - RNA, 19 nt, Artificial Sequence
  Description of Artificial Sequence: Synthetic oligonucleotide
uaggggaccuggaaggcgg

SEQ ID NO: 1597109 - RNA, 19 nt, Artificial Sequence
  Description of Artificial Sequence: Synthetic oligonucleotide
uagcugagguacuuggcgg

SEQ ID NO: 1597110 - RNA, 19 nt, Artificial Sequence
  Description of Artificial Sequence: Synthetic oligonucleotide
guacuucucguacugcgcg

SEQ ID NO: 1597111 - RNA, 19 nt, Artificial Sequence
  Description of Artificial Sequence: Synthetic oligonucleotide
aggacgugaccgaagagcc

SEQ ID NO: 1597112 - RNA, 19 nt, Artificial Sequence
  Description of Artificial Sequence: Synthetic oligonucleotide
cagguagugauacauggug

SEQ ID NO: 1597113 - RNA, 19 nt, Artificial Sequence
  Description of Artificial Sequence: Synthetic oligonucleotide
gaggaacacagccucguag

SEQ ID NO: 1597114 - RNA, 19 nt, Artificial Sequence
  Description of Artificial Sequence: Synthetic oligonucleotide
uuccaucucaucaucugac

SEQ ID NO: 1597115 - RNA, 19 nt, Artificial Sequence
  Description of Artificial Sequence: Synthetic oligonucleotide
agagcguggccguaggccg

SEQ ID NO: 1597116 - RNA, 19 nt, Artificial Sequence
  Description of Artificial Sequence: Synthetic oligonucleotide
ugugugugaacuccaguaa

SEQ ID NO: 1597117 - RNA, 19 nt, Artificial Sequence
  Description of Artificial Sequence: Synthetic oligonucleotide
guagcuagcagcacugcgg

SEQ ID NO: 1597118 - RNA, 19 nt, Artificial Sequence
  Description of Artificial Sequence: Synthetic oligonucleotide
agccgguucgccuugaacu

SEQ ID NO: 1597119 - RNA, 19 nt, Artificial Sequence
  Description of Artificial Sequence: Synthetic oligonucleotide
ucuagguccguaagggacu

SEQ ID NO: 1597120 - RNA, 19 nt, Artificial Sequence
  Description of Artificial Sequence: Synthetic oligonucleotide
guacugguagggcaggcgg

SEQ ID NO: 1597121 - RNA, 19 nt, Artificial Sequence
  Description of Artificial Sequence: Synthetic oligonucleotide
aucaucugacugaagguac

SEQ ID NO: 1597122 - RNA, 19 nt, Artificial Sequence
  Description of Artificial Sequence: Synthetic oligonucleotide
uauccugaggugauucugu

SEQ ID NO: 1597123 - RNA, 19 nt, Artificial Sequence
  Description of Artificial Sequence: Synthetic oligonucleotide
ucuagagcguggccguagg

SEQ ID NO: 1597124 - RNA, 19 nt, Artificial Sequence
  Description of Artificial Sequence: Synthetic oligonucleotide
aagggacucaucuccgaca

SEQ ID NO: 1597125 - RNA, 19 nt, Artificial Sequence
  Description of Artificial Sequence: Synthetic oligonucleotide
agccucguagggcugggcc

SEQ ID NO: 1597126 - RNA, 19 nt, Artificial Sequence
  Description of Artificial Sequence: Synthetic oligonucleotide
agguacaugugugugaacu

SEQ ID NO: 1597127 - RNA, 19 nt, Artificial Sequence
  Description of Artificial Sequence: Synthetic oligonucleotide
acaaaguagccaccuacgu

SEQ ID NO: 1597128 - RNA, 19 nt, Artificial Sequence
  Description of Artificial Sequence: Synthetic oligonucleotide
ugucauguacucugccaag

SEQ ID NO: 1597129 - RNA, 19 nt, Artificial Sequence
  Description of Artificial Sequence: Synthetic oligonucleotide
gaagucgcgcagcagcugc

SEQ ID NO: 1597130 - RNA, 19 nt, Artificial Sequence
  Description of Artificial Sequence: Synthetic oligonucleotide
uccaggacgugaccgaaga

SEQ ID NO: 1597131 - RNA, 19 nt, Artificial Sequence
  Description of Artificial Sequence: Synthetic oligonucleotide
guagugcagguacugguag

SEQ ID NO: 1597132 - RNA, 19 nt, Artificial Sequence
  Description of Artificial Sequence: Synthetic oligonucleotide
agugcagguacugguaggg

SEQ ID NO: 1597133 - RNA, 19 nt, Artificial Sequence
  Description of Artificial Sequence: Synthetic oligonucleotide
ucaucugacugaagguaca

SEQ ID NO: 1597134 - RNA, 19 nt, Artificial Sequence
  Description of Artificial Sequence: Synthetic oligonucleotide
gguagugauacaugguggc

SEQ ID NO: 1597135 - RNA, 19 nt, Artificial Sequence
  Description of Artificial Sequence: Synthetic oligonucleotide
uagcccgguauccugaggu

SEQ ID NO: 1597136 - RNA, 19 nt, Artificial Sequence
  Description of Artificial Sequence: Synthetic oligonucleotide
aauuuguaguaggcaaacu

SEQ ID NO: 1597137 - RNA, 19 nt, Artificial Sequence
  Description of Artificial Sequence: Synthetic oligonucleotide
ugcaugacgcuguccuugg

SEQ ID NO: 1597138 - RNA, 19 nt, Artificial Sequence
  Description of Artificial Sequence: Synthetic oligonucleotide
gccagcuagacaccgagcg

SEQ ID NO: 1597139 - RNA, 19 nt, Artificial Sequence
  Description of Artificial Sequence: Synthetic oligonucleotide
uggaagcgguaauacacca

SEQ ID NO: 1597140 - RNA, 19 nt, Artificial Sequence
  Description of Artificial Sequence: Synthetic oligonucleotide
gacgugaccgaagagccgc

SEQ ID NO: 1597141 - RNA, 19 nt, Artificial Sequence
  Description of Artificial Sequence: Synthetic oligonucleotide
guacaugugugugaacucc

SEQ ID NO: 1597142 - RNA, 19 nt, Artificial Sequence
  Description of Artificial Sequence: Synthetic oligonucleotide
gucugguugugguagagca

SEQ ID NO: 1597143 - RNA, 19 nt, Artificial Sequence
  Description of Artificial Sequence: Synthetic oligonucleotide
uuggcggucagcucgugcu

SEQ ID NO: 1597144 - RNA, 19 nt, Artificial Sequence
  Description of Artificial Sequence: Synthetic oligonucleotide
caucauucaauuuguagua

SEQ ID NO: 1597145 - RNA, 19 nt, Artificial Sequence
  Description of Artificial Sequence: Synthetic oligonucleotide
uucgccuugaacugcgcgu

SEQ ID NO: 1597146 - RNA, 19 nt, Artificial Sequence
  Description of Artificial Sequence: Synthetic oligonucleotide
caggacgugaccgaagagc

SEQ ID NO: 1597147 - RNA, 19 nt, Artificial Sequence
  Description of Artificial Sequence: Synthetic oligonucleotide
guagccaccuacguugggg

SEQ ID NO: 1597148 - RNA, 19 nt, Artificial Sequence
  Description of Artificial Sequence: Synthetic oligonucleotide
cuagacaccgagcgaagac

SEQ ID NO: 1597149 - RNA, 19 nt, Artificial Sequence
  Description of Artificial Sequence: Synthetic oligonucleotide
aagcuguacuucucguacu

SEQ ID NO: 1597150 - RNA, 19 nt, Artificial Sequence
  Description of Artificial Sequence: Synthetic oligonucleotide
acuucucguacugcgcgcc

SEQ ID NO: 1597151 - RNA, 19 nt, Artificial Sequence
  Description of Artificial Sequence: Synthetic oligonucleotide
gaggcaucagguccuccgg

SEQ ID NO: 1597152 - RNA, 19 nt, Artificial Sequence
  Description of Artificial Sequence: Synthetic oligonucleotide
aggaccgacgggcuccagc

SEQ ID NO: 1597153 - RNA, 19 nt, Artificial Sequence
  Description of Artificial Sequence: Synthetic oligonucleotide
uagggacucugcaaagaga

SEQ ID NO: 1597154 - RNA, 19 nt, Artificial Sequence
  Description of Artificial Sequence: Synthetic oligonucleotide
ggguaggggaccuggaagg

SEQ ID NO: 1597155 - RNA, 19 nt, Artificial Sequence
  Description of Artificial Sequence: Synthetic oligonucleotide
cugacugaagguacaugug

SEQ ID NO: 1597156 - RNA, 19 nt, Artificial Sequence
  Description of Artificial Sequence: Synthetic oligonucleotide
aaaguguaggccgcagcca

SEQ ID NO: 1597157 - RNA, 19 nt, Artificial Sequence
  Description of Artificial Sequence: Synthetic oligonucleotide
agccggaggaccgacgggc

SEQ ID NO: 1597158 - RNA, 19 nt, Artificial Sequence
  Description of Artificial Sequence: Synthetic oligonucleotide
augacgcuguccuuggggu

SEQ ID NO: 1597159 - RNA, 19 nt, Artificial Sequence
  Description of Artificial Sequence: Synthetic oligonucleotide
gcgcacaucauucaauuug

SEQ ID NO: 1597160 - RNA, 19 nt, Artificial Sequence
  Description of Artificial Sequence: Synthetic oligonucleotide
caaagagcauguagcuagc

SEQ ID NO: 1597161 - RNA, 19 nt, Artificial Sequence
  Description of Artificial Sequence: Synthetic oligonucleotide
ugauacaugguggccacaa

SEQ ID NO: 1597162 - RNA, 19 nt, Artificial Sequence
  Description of Artificial Sequence: Synthetic oligonucleotide
aagccucggaagcuguacu

SEQ ID NO: 1597163 - RNA, 19 nt, Artificial Sequence
  Description of Artificial Sequence: Synthetic oligonucleotide
ccuuuaguuuuauuuggcc

SEQ ID NO: 1597164 - RNA, 19 nt, Artificial Sequence
  Description of Artificial Sequence: Synthetic oligonucleotide
gugugugaacuccaguaac

SEQ ID NO: 1597165 - RNA, 19 nt, Artificial Sequence
  Description of Artificial Sequence: Synthetic oligonucleotide
uguagggacucugcaaaga

SEQ ID NO: 1597166 - RNA, 19 nt, Artificial Sequence
  Description of Artificial Sequence: Synthetic oligonucleotide
guucgccuugaacugcgcg

SEQ ID NO: 1597167 - RNA, 19 nt, Artificial Sequence
  Description of Artificial Sequence: Synthetic oligonucleotide
cugcucuagagcguggccg

SEQ ID NO: 1597168 - RNA, 19 nt, Artificial Sequence
  Description of Artificial Sequence: Synthetic oligonucleotide
gaagguacaugugugugaa

SEQ ID NO: 1597169 - RNA, 19 nt, Artificial Sequence
  Description of Artificial Sequence: Synthetic oligonucleotide
ugucuucugugcugccgcg

SEQ ID NO: 1597170 - RNA, 19 nt, Artificial Sequence
  Description of Artificial Sequence: Synthetic oligonucleotide
uggaaggcgggcagcgucc

SEQ ID NO: 1597171 - RNA, 19 nt, Artificial Sequence
  Description of Artificial Sequence: Synthetic oligonucleotide
uagacaccgagcgaagacu

SEQ ID NO: 1597172 - RNA, 19 nt, Artificial Sequence
  Description of Artificial Sequence: Synthetic oligonucleotide
gacugucauguacucugcc

SEQ ID NO: 1597173 - RNA, 19 nt, Artificial Sequence
  Description of Artificial Sequence: Synthetic oligonucleotide
aaagagcauguagcuagca

SEQ ID NO: 1597174 - RNA, 19 nt, Artificial Sequence
  Description of Artificial Sequence: Synthetic oligonucleotide
uacugguagggcaggcggc

SEQ ID NO: 1597175 - RNA, 19 nt, Artificial Sequence
  Description of Artificial Sequence: Synthetic oligonucleotide
uacuuaaguuucuuuccuu

SEQ ID NO: 1597176 - RNA, 19 nt, Artificial Sequence
  Description of Artificial Sequence: Synthetic oligonucleotide
gagcauguagcuagcagca

SEQ ID NO: 1597177 - RNA, 19 nt, Artificial Sequence
  Description of Artificial Sequence: Synthetic oligonucleotide
gcgguaauacaccagguuc

SEQ ID NO: 1597178 - RNA, 19 nt, Artificial Sequence
  Description of Artificial Sequence: Synthetic oligonucleotide
gucgccgucaccguccggg

SEQ ID NO: 1597179 - RNA, 19 nt, Artificial Sequence
  Description of Artificial Sequence: Synthetic oligonucleotide
uacuucucguacugcgcgc

SEQ ID NO: 1597180 - RNA, 19 nt, Artificial Sequence
  Description of Artificial Sequence: Synthetic oligonucleotide
uagccaccuacguugggga

SEQ ID NO: 1597181 - RNA, 19 nt, Artificial Sequence
  Description of Artificial Sequence: Synthetic oligonucleotide
agacugucauguacucugc

SEQ ID NO: 1597182 - RNA, 19 nt, Artificial Sequence
  Description of Artificial Sequence: Synthetic oligonucleotide
ucgugcuugggguuccucu

SEQ ID NO: 1597183 - RNA, 19 nt, Artificial Sequence
  Description of Artificial Sequence: Synthetic oligonucleotide
agggacucaucuccgacau

SEQ ID NO: 1597184 - RNA, 19 nt, Artificial Sequence
  Description of Artificial Sequence: Synthetic oligonucleotide
ugcucuagagcguggccgu

SEQ ID NO: 1597185 - RNA, 19 nt, Artificial Sequence
  Description of Artificial Sequence: Synthetic oligonucleotide
ucggaggucugguuguggu

SEQ ID NO: 1597186 - RNA, 19 nt, Artificial Sequence
  Description of Artificial Sequence: Synthetic oligonucleotide
acaccgagcgaagacuguc

SEQ ID NO: 1597187 - RNA, 19 nt, Artificial Sequence
  Description of Artificial Sequence: Synthetic oligonucleotide
gaaguccuugaagucuacc

SEQ ID NO: 1597188 - RNA, 19 nt, Artificial Sequence
  Description of Artificial Sequence: Synthetic oligonucleotide
aacugcgcguagugcaggu

SEQ ID NO: 1597189 - RNA, 19 nt, Artificial Sequence
  Description of Artificial Sequence: Synthetic oligonucleotide
agcguccgcuugcagcgcc

SEQ ID NO: 1597190 - RNA, 19 nt, Artificial Sequence
  Description of Artificial Sequence: Synthetic oligonucleotide
gguggccacaaacuugucc

SEQ ID NO: 1597191 - RNA, 19 nt, Artificial Sequence
  Description of Artificial Sequence: Synthetic oligonucleotide
guggaagcgguaauacacc

SEQ ID NO: 1597192 - RNA, 19 nt, Artificial Sequence
  Description of Artificial Sequence: Synthetic oligonucleotide
guauccugaggugauucug

SEQ ID NO: 1597193 - RNA, 19 nt, Artificial Sequence
  Description of Artificial Sequence: Synthetic oligonucleotide
uccuagcccgguauccuga

SEQ ID NO: 1597194 - RNA, 19 nt, Artificial Sequence
  Description of Artificial Sequence: Synthetic oligonucleotide
uucucguacugcgcgcccg

SEQ ID NO: 1597195 - RNA, 19 nt, Artificial Sequence
  Description of Artificial Sequence: Synthetic oligonucleotide
cugaggugauucugucucc

SEQ ID NO: 1597196 - RNA, 19 nt, Artificial Sequence
  Description of Artificial Sequence: Synthetic oligonucleotide
agcugagguacuuggcggu

SEQ ID NO: 1597197 - RNA, 19 nt, Artificial Sequence
  Description of Artificial Sequence: Synthetic oligonucleotide
cugcgcguagugcagguac

SEQ ID NO: 1597198 - RNA, 19 nt, Artificial Sequence
  Description of Artificial Sequence: Synthetic oligonucleotide
aagucgcgcagcagcugcc

SEQ ID NO: 1597199 - RNA, 19 nt, Artificial Sequence
  Description of Artificial Sequence: Synthetic oligonucleotide
uuggccauuuuaaguuuua

SEQ ID NO: 1597200 - RNA, 19 nt, Artificial Sequence
  Description of Artificial Sequence: Synthetic oligonucleotide
ucucguacugcgcgcccgc

SEQ ID NO: 1597201 - RNA, 19 nt, Artificial Sequence
  Description of Artificial Sequence: Synthetic oligonucleotide
guccguaagggacucaucu

SEQ ID NO: 1597202 - RNA, 19 nt, Artificial Sequence
  Description of Artificial Sequence: Synthetic oligonucleotide
ugaagucuaccugcucaug

SEQ ID NO: 1597203 - RNA, 19 nt, Artificial Sequence
  Description of Artificial Sequence: Synthetic oligonucleotide
gacucugcaaagagaucug

SEQ ID NO: 1597204 - RNA, 19 nt, Artificial Sequence
  Description of Artificial Sequence: Synthetic oligonucleotide
gccucuagguccguaaggg

SEQ ID NO: 1597205 - RNA, 19 nt, Artificial Sequence
  Description of Artificial Sequence: Synthetic oligonucleotide
uacugcucuagagcguggc

SEQ ID NO: 1597206 - RNA, 19 nt, Artificial Sequence
  Description of Artificial Sequence: Synthetic oligonucleotide
gaagccucggaagcuguac

SEQ ID NO: 1597207 - RNA, 19 nt, Artificial Sequence
  Description of Artificial Sequence: Synthetic oligonucleotide
guaggggaccuggaaggcg

SEQ ID NO: 1597208 - RNA, 19 nt, Artificial Sequence
  Description of Artificial Sequence: Synthetic oligonucleotide
agcauguagcuagcagcac

SEQ ID NO: 1597209 - RNA, 19 nt, Artificial Sequence
  Description of Artificial Sequence: Synthetic oligonucleotide
ccacaaaguagccaccuac

SEQ ID NO: 1597210 - RNA, 19 nt, Artificial Sequence
  Description of Artificial Sequence: Synthetic oligonucleotide
guguaggccgcagccaccg

SEQ ID NO: 1597211 - RNA, 19 nt, Artificial Sequence
  Description of Artificial Sequence: Synthetic oligonucleotide
agcucggaggucugguugu

SEQ ID NO: 1597212 - RNA, 19 nt, Artificial Sequence
  Description of Artificial Sequence: Synthetic oligonucleotide
ccucguacugcucuagagc

SEQ ID NO: 1597213 - RNA, 19 nt, Artificial Sequence
  Description of Artificial Sequence: Synthetic oligonucleotide
guaauacaccagguucugc

SEQ ID NO: 1597214 - RNA, 19 nt, Artificial Sequence
  Description of Artificial Sequence: Synthetic oligonucleotide
ucguacugcucuagagcgu

SEQ ID NO: 1597215 - RNA, 19 nt, Artificial Sequence
  Description of Artificial Sequence: Synthetic oligonucleotide
agccuggcgcacaucauuc

SEQ ID NO: 1597216 - RNA, 19 nt, Artificial Sequence
  Description of Artificial Sequence: Synthetic oligonucleotide
ugccucggcggguagggga

SEQ ID NO: 1597217 - RNA, 19 nt, Artificial Sequence
  Description of Artificial Sequence: Synthetic oligonucleotide
ggaccgacgggcuccagcc

SEQ ID NO: 1597218 - RNA, 19 nt, Artificial Sequence
  Description of Artificial Sequence: Synthetic oligonucleotide
cugcaugacgcuguccuug

SEQ ID NO: 1597219 - RNA, 19 nt, Artificial Sequence
  Description of Artificial Sequence: Synthetic oligonucleotide
aagcgguaauacaccaggu

SEQ ID NO: 1597220 - RNA, 19 nt, Artificial Sequence
  Description of Artificial Sequence: Synthetic oligonucleotide
ugcgcguagugcagguacu

SEQ ID NO: 1597221 - RNA, 19 nt, Artificial Sequence
  Description of Artificial Sequence: Synthetic oligonucleotide
gguaauacaccagguucug

SEQ ID NO: 1597222 - RNA, 19 nt, Artificial Sequence
  Description of Artificial Sequence: Synthetic oligonucleotide
cuuggcggucagcucgugc

SEQ ID NO: 1597223 - RNA, 19 nt, Artificial Sequence
  Description of Artificial Sequence: Synthetic oligonucleotide
gacgcuguccuugggguca

SEQ ID NO: 1597224 - RNA, 19 nt, Artificial Sequence
  Description of Artificial Sequence: Synthetic oligonucleotide
aguaacucccggagcucgg

SEQ ID NO: 1597225 - RNA, 19 nt, Artificial Sequence
  Description of Artificial Sequence: Synthetic oligonucleotide
cuagagcguggccguaggc

SEQ ID NO: 1597226 - RNA, 19 nt, Artificial Sequence
  Description of Artificial Sequence: Synthetic oligonucleotide
ggucagcucgugcuugggg

SEQ ID NO: 1597227 - RNA, 19 nt, Artificial Sequence
  Description of Artificial Sequence: Synthetic oligonucleotide
gcagccggaggaccgacgg

SEQ ID NO: 1597228 - RNA, 19 nt, Artificial Sequence
  Description of Artificial Sequence: Synthetic oligonucleotide
gguacugguagggcaggcg

SEQ ID NO: 1597229 - RNA, 19 nt, Artificial Sequence
  Description of Artificial Sequence: Synthetic oligonucleotide
ggccucuagguccguaagg

SEQ ID NO: 1597230 - RNA, 19 nt, Artificial Sequence
  Description of Artificial Sequence: Synthetic oligonucleotide
gauacaugguggccacaaa

SEQ ID NO: 1597231 - RNA, 19 nt, Artificial Sequence
  Description of Artificial Sequence: Synthetic oligonucleotide
cucgcgccagcucucgccc

SEQ ID NO: 1597232 - RNA, 19 nt, Artificial Sequence
  Description of Artificial Sequence: Synthetic oligonucleotide
ggacucugcaaagagaucu

SEQ ID NO: 1597233 - RNA, 19 nt, Artificial Sequence
  Description of Artificial Sequence: Synthetic oligonucleotide
ugggccucuagguccguaa

SEQ ID NO: 1597234 - RNA, 19 nt, Artificial Sequence
  Description of Artificial Sequence: Synthetic oligonucleotide
uacucugccaaggcccgcu

SEQ ID NO: 1597235 - RNA, 19 nt, Artificial Sequence
  Description of Artificial Sequence: Synthetic oligonucleotide
agcucgcgcgcccaguccu

SEQ ID NO: 1597236 - RNA, 19 nt, Artificial Sequence
  Description of Artificial Sequence: Synthetic oligonucleotide
gcuauggcuggguagaagu

SEQ ID NO: 1597237 - RNA, 19 nt, Artificial Sequence
  Description of Artificial Sequence: Synthetic oligonucleotide
cuagcccgguauccugagg

SEQ ID NO: 1597238 - RNA, 19 nt, Artificial Sequence
  Description of Artificial Sequence: Synthetic oligonucleotide
agccagcuagacaccgagc

SEQ ID NO: 1597239 - RNA, 19 nt, Artificial Sequence
  Description of Artificial Sequence: Synthetic oligonucleotide
cuccuagcccgguauccug

SEQ ID NO: 1597240 - RNA, 19 nt, Artificial Sequence
  Description of Artificial Sequence: Synthetic oligonucleotide
uggccagaggcaucagguc

SEQ ID NO: 1597241 - RNA, 19 nt, Artificial Sequence
  Description of Artificial Sequence: Synthetic oligonucleotide
gguagcgcgcgcucucgcg

SEQ ID NO: 1597242 - RNA, 19 nt, Artificial Sequence
  Description of Artificial Sequence: Synthetic oligonucleotide
ucagcucgugcuugggguu

SEQ ID NO: 1597243 - RNA, 19 nt, Artificial Sequence
  Description of Artificial Sequence: Synthetic oligonucleotide
accgagcgaagacugucau

SEQ ID NO: 1597244 - RNA, 19 nt, Artificial Sequence
  Description of Artificial Sequence: Synthetic oligonucleotide
cuucucguacugcgcgccc

SEQ ID NO: 1597245 - RNA, 19 nt, Artificial Sequence
  Description of Artificial Sequence: Synthetic oligonucleotide
cuccaggacgugaccgaag

SEQ ID NO: 1597246 - RNA, 19 nt, Artificial Sequence
  Description of Artificial Sequence: Synthetic oligonucleotide
agcccgguauccugaggug

SEQ ID NO: 1597247 - RNA, 19 nt, Artificial Sequence
  Description of Artificial Sequence: Synthetic oligonucleotide
ucuugcuccuagcccggua

SEQ ID NO: 1597248 - RNA, 19 nt, Artificial Sequence
  Description of Artificial Sequence: Synthetic oligonucleotide
gggcugggccucuaggucc

SEQ ID NO: 1597249 - RNA, 19 nt, Artificial Sequence
  Description of Artificial Sequence: Synthetic oligonucleotide
ggaggaaaguguaggccgc

SEQ ID NO: 1597250 - RNA, 19 nt, Artificial Sequence
  Description of Artificial Sequence: Synthetic oligonucleotide
agcgccgcaggcaggcggc

SEQ ID NO: 1597251 - RNA, 19 nt, Artificial Sequence
  Description of Artificial Sequence: Synthetic oligonucleotide
cagcgagcccgguggaagc

SEQ ID NO: 1597252 - RNA, 19 nt, Artificial Sequence
  Description of Artificial Sequence: Synthetic oligonucleotide
ugacgcuguccuugggguc

SEQ ID NO: 1597253 - RNA, 19 nt, Artificial Sequence
  Description of Artificial Sequence: Synthetic oligonucleotide
accuacguuggggaugaga

SEQ ID NO: 1597254 - RNA, 19 nt, Artificial Sequence
  Description of Artificial Sequence: Synthetic oligonucleotide
uugcuccuagcccgguauc

SEQ ID NO: 1597255 - RNA, 19 nt, Artificial Sequence
  Description of Artificial Sequence: Synthetic oligonucleotide
acguuggggaugagauugg

SEQ ID NO: 1597256 - RNA, 19 nt, Artificial Sequence
  Description of Artificial Sequence: Synthetic oligonucleotide
ucgccuugaacugcgcgua

SEQ ID NO: 1597257 - RNA, 19 nt, Artificial Sequence
  Description of Artificial Sequence: Synthetic oligonucleotide
cagcuagacaccgagcgaa

SEQ ID NO: 1597258 - RNA, 19 nt, Artificial Sequence
  Description of Artificial Sequence: Synthetic oligonucleotide
uagcgcgcgcucucgcgcc

SEQ ID NO: 1597259 - RNA, 19 nt, Artificial Sequence
  Description of Artificial Sequence: Synthetic oligonucleotide
gaagacugucauguacucu

SEQ ID NO: 1597260 - RNA, 19 nt, Artificial Sequence
  Description of Artificial Sequence: Synthetic oligonucleotide
cucggaggucugguugugg

SEQ ID NO: 1597261 - RNA, 19 nt, Artificial Sequence
  Description of Artificial Sequence: Synthetic oligonucleotide
gccgguucgccuugaacug

SEQ ID NO: 1597262 - RNA, 19 nt, Artificial Sequence
  Description of Artificial Sequence: Synthetic oligonucleotide
guagagcuucacagcccgg

SEQ ID NO: 1597263 - RNA, 19 nt, Artificial Sequence
  Description of Artificial Sequence: Synthetic oligonucleotide
agcuagacaccgagcgaag

SEQ ID NO: 1597264 - RNA, 19 nt, Artificial Sequence
  Description of Artificial Sequence: Synthetic oligonucleotide
agguccguaagggacucau

SEQ ID NO: 1597265 - RNA, 19 nt, Artificial Sequence
  Description of Artificial Sequence: Synthetic oligonucleotide
ucccggggcuggaaguccu

SEQ ID NO: 1597266 - RNA, 19 nt, Artificial Sequence
  Description of Artificial Sequence: Synthetic oligonucleotide
cuagguccguaagggacuc

SEQ ID NO: 1597267 - RNA, 19 nt, Artificial Sequence
  Description of Artificial Sequence: Synthetic oligonucleotide
cagcgccgcaggcaggcgg

SEQ ID NO: 1597268 - RNA, 19 nt, Artificial Sequence
  Description of Artificial Sequence: Synthetic oligonucleotide
gagccaugcccgcgccgcg

SEQ ID NO: 1597269 - RNA, 19 nt, Artificial Sequence
  Description of Artificial Sequence: Synthetic oligonucleotide
acgccgggcgagccaugcc

SEQ ID NO: 1597270 - RNA, 19 nt, Artificial Sequence
  Description of Artificial Sequence: Synthetic oligonucleotide
guacugcucuagagcgugg

SEQ ID NO: 1597271 - RNA, 19 nt, Artificial Sequence
  Description of Artificial Sequence: Synthetic oligonucleotide
cccucguacugcucuagag

SEQ ID NO: 1597272 - RNA, 19 nt, Artificial Sequence
  Description of Artificial Sequence: Synthetic oligonucleotide
caccgagcgaagacuguca

SEQ ID NO: 1597273 - RNA, 19 nt, Artificial Sequence
  Description of Artificial Sequence: Synthetic oligonucleotide
cagccgguucgccuugaac

SEQ ID NO: 1597274 - RNA, 19 nt, Artificial Sequence
  Description of Artificial Sequence: Synthetic oligonucleotide
cagguagcgcgcgcucucg

SEQ ID NO: 1597275 - RNA, 19 nt, Artificial Sequence
  Description of Artificial Sequence: Synthetic oligonucleotide
ugggguuccucuggaggaa

SEQ ID NO: 1597276 - RNA, 19 nt, Artificial Sequence
  Description of Artificial Sequence: Synthetic oligonucleotide
ucgccgucaccguccgggc

SEQ ID NO: 1597277 - RNA, 19 nt, Artificial Sequence
  Description of Artificial Sequence: Synthetic oligonucleotide
acagccucguagggcuggg

SEQ ID NO: 1597278 - RNA, 19 nt, Artificial Sequence
  Description of Artificial Sequence: Synthetic oligonucleotide
ccuacguuggggaugagau

SEQ ID NO: 1597279 - RNA, 19 nt, Artificial Sequence
  Description of Artificial Sequence: Synthetic oligonucleotide
gaccgaagagccgcagcuc

SEQ ID NO: 1597280 - RNA, 19 nt, Artificial Sequence
  Description of Artificial Sequence: Synthetic oligonucleotide
aguccaccuugcacuguag

SEQ ID NO: 1597281 - RNA, 19 nt, Artificial Sequence
  Description of Artificial Sequence: Synthetic oligonucleotide
cagccggaggaccgacggg

SEQ ID NO: 1597282 - RNA, 19 nt, Artificial Sequence
  Description of Artificial Sequence: Synthetic oligonucleotide
gacucaucuccgacaucca

SEQ ID NO: 1597283 - RNA, 19 nt, Artificial Sequence
  Description of Artificial Sequence: Synthetic oligonucleotide
ggacgugaccgaagagccg

SEQ ID NO: 1597284 - RNA, 19 nt, Artificial Sequence
  Description of Artificial Sequence: Synthetic oligonucleotide
cuugcuccuagcccgguau

SEQ ID NO: 1597285 - RNA, 19 nt, Artificial Sequence
  Description of Artificial Sequence: Synthetic oligonucleotide
agccaccuacguuggggau

SEQ ID NO: 1597286 - RNA, 19 nt, Artificial Sequence
  Description of Artificial Sequence: Synthetic oligonucleotide
ugcugccgcggaagucccc

SEQ ID NO: 1597287 - RNA, 19 nt, Artificial Sequence
  Description of Artificial Sequence: Synthetic oligonucleotide
guaacucccggagcucgga

SEQ ID NO: 1597288 - RNA, 19 nt, Artificial Sequence
  Description of Artificial Sequence: Synthetic oligonucleotide
gcggucagcucgugcuugg

SEQ ID NO: 1597289 - RNA, 19 nt, Artificial Sequence
  Description of Artificial Sequence: Synthetic oligonucleotide
cagcucgcgcgcccagucc

SEQ ID NO: 1597290 - RNA, 19 nt, Artificial Sequence
  Description of Artificial Sequence: Synthetic oligonucleotide
cucguacugcgcgcccgcg

SEQ ID NO: 1597291 - RNA, 19 nt, Artificial Sequence
  Description of Artificial Sequence: Synthetic oligonucleotide
uggcggucagcucgugcuu

SEQ ID NO: 1597292 - RNA, 19 nt, Artificial Sequence
  Description of Artificial Sequence: Synthetic oligonucleotide
ggccgcugcaguuggcgug

SEQ ID NO: 1597293 - RNA, 19 nt, Artificial Sequence
  Description of Artificial Sequence: Synthetic oligonucleotide
gccaccuacguuggggaug

SEQ ID NO: 1597294 - RNA, 19 nt, Artificial Sequence
  Description of Artificial Sequence: Synthetic oligonucleotide
gccgcaggcaggcggcgcg

SEQ ID NO: 1597295 - RNA, 19 nt, Artificial Sequence
  Description of Artificial Sequence: Synthetic oligonucleotide
gguauccugaggugauucu

SEQ ID NO: 1597296 - RNA, 19 nt, Artificial Sequence
  Description of Artificial Sequence: Synthetic oligonucleotide
cacgccgggcgagccaugc

SEQ ID NO: 1597297 - RNA, 19 nt, Artificial Sequence
  Description of Artificial Sequence: Synthetic oligonucleotide
cgaagacugucauguacuc

SEQ ID NO: 1597298 - RNA, 19 nt, Artificial Sequence
  Description of Artificial Sequence: Synthetic oligonucleotide
cucgcgcgcccaguccucg

SEQ ID NO: 1597299 - RNA, 19 nt, Artificial Sequence
  Description of Artificial Sequence: Synthetic oligonucleotide
cggguaggggaccuggaag

SEQ ID NO: 1597300 - RNA, 19 nt, Artificial Sequence
  Description of Artificial Sequence: Synthetic oligonucleotide
gcgaagacugucauguacu

SEQ ID NO: 1597301 - RNA, 19 nt, Artificial Sequence
  Description of Artificial Sequence: Synthetic oligonucleotide
uucuugcuccuagcccggu

SEQ ID NO: 1597302 - RNA, 19 nt, Artificial Sequence
  Description of Artificial Sequence: Synthetic oligonucleotide
agcccgguggaagcgguaa

SEQ ID NO: 1597303 - RNA, 19 nt, Artificial Sequence
  Description of Artificial Sequence: Synthetic oligonucleotide
ccuugcacuguagggacuc

SEQ ID NO: 1597304 - RNA, 19 nt, Artificial Sequence
  Description of Artificial Sequence: Synthetic oligonucleotide
ccggaggaacacagccucg

SEQ ID NO: 1597305 - RNA, 19 nt, Artificial Sequence
  Description of Artificial Sequence: Synthetic oligonucleotide
ccuagcccgguauccugag

SEQ ID NO: 1597306 - RNA, 19 nt, Artificial Sequence
  Description of Artificial Sequence: Synthetic oligonucleotide
cucucgcgccagcucucgc

SEQ ID NO: 1597307 - RNA, 19 nt, Artificial Sequence
  Description of Artificial Sequence: Synthetic oligonucleotide
cgguucgccuugaacugcg

SEQ ID NO: 1597308 - RNA, 19 nt, Artificial Sequence
  Description of Artificial Sequence: Synthetic oligonucleotide
acaguccaccuugcacugu

SEQ ID NO: 1597309 - RNA, 19 nt, Artificial Sequence
  Description of Artificial Sequence: Synthetic oligonucleotide
ccgguggaagcgguaauac

SEQ ID NO: 1597310 - RNA, 19 nt, Artificial Sequence
  Description of Artificial Sequence: Synthetic oligonucleotide
ccagcgagcccgguggaag

SEQ ID NO: 1597311 - RNA, 19 nt, Artificial Sequence
  Description of Artificial Sequence: Synthetic oligonucleotide
ggguuccucuggaggaaag

SEQ ID NO: 1597312 - RNA, 19 nt, Artificial Sequence
  Description of Artificial Sequence: Synthetic oligonucleotide
cagcucgugcuugggguuc

SEQ ID NO: 1597313 - RNA, 19 nt, Artificial Sequence
  Description of Artificial Sequence: Synthetic oligonucleotide
gucaccguccgggccgggc

SEQ ID NO: 1597314 - RNA, 19 nt, Artificial Sequence
  Description of Artificial Sequence: Synthetic oligonucleotide
aggccguggccagaggcau

SEQ ID NO: 1597315 - RNA, 19 nt, Artificial Sequence
  Description of Artificial Sequence: Synthetic oligonucleotide
ggcguggcagaaggccucg

SEQ ID NO: 1597316 - RNA, 19 nt, Artificial Sequence
  Description of Artificial Sequence: Synthetic oligonucleotide
ggaagucgcgcagcagcug

SEQ ID NO: 1597317 - RNA, 19 nt, Artificial Sequence
  Description of Artificial Sequence: Synthetic oligonucleotide
uagguccguaagggacuca

SEQ ID NO: 1597318 - RNA, 19 nt, Artificial Sequence
  Description of Artificial Sequence: Synthetic oligonucleotide
cgagcgaagacugucaugu

SEQ ID NO: 1597319 - RNA, 19 nt, Artificial Sequence
  Description of Artificial Sequence: Synthetic oligonucleotide
cugccgcggaaguccccgc

SEQ ID NO: 1597320 - RNA, 19 nt, Artificial Sequence
  Description of Artificial Sequence: Synthetic oligonucleotide
cugcgggcagccuggcgca

SEQ ID NO: 1597321 - RNA, 19 nt, Artificial Sequence
  Description of Artificial Sequence: Synthetic oligonucleotide
ucgcccucguacugcucua

SEQ ID NO: 1597322 - RNA, 19 nt, Artificial Sequence
  Description of Artificial Sequence: Synthetic oligonucleotide
cuggcgcacaucauucaau

SEQ ID NO: 1597323 - RNA, 19 nt, Artificial Sequence
  Description of Artificial Sequence: Synthetic oligonucleotide
gcuagacaccgagcgaaga

SEQ ID NO: 1597324 - RNA, 19 nt, Artificial Sequence
  Description of Artificial Sequence: Synthetic oligonucleotide
gcguagugcagguacuggu

SEQ ID NO: 1597325 - RNA, 19 nt, Artificial Sequence
  Description of Artificial Sequence: Synthetic oligonucleotide
ccaggacgugaccgaagag

SEQ ID NO: 1597326 - RNA, 19 nt, Artificial Sequence
  Description of Artificial Sequence: Synthetic oligonucleotide
ucgcgcgcccaguccucgc

SEQ ID NO: 1597327 - RNA, 19 nt, Artificial Sequence
  Description of Artificial Sequence: Synthetic oligonucleotide
agcguggccguaggccgug

SEQ ID NO: 1597328 - RNA, 19 nt, Artificial Sequence
  Description of Artificial Sequence: Synthetic oligonucleotide
ggcggucagcucgugcuug

SEQ ID NO: 1597329 - RNA, 19 nt, Artificial Sequence
  Description of Artificial Sequence: Synthetic oligonucleotide
ccgagcgaagacugucaug

SEQ ID NO: 1597330 - RNA, 19 nt, Artificial Sequence
  Description of Artificial Sequence: Synthetic oligonucleotide
gcggcucuggaagucgcgc

SEQ ID NO: 1597331 - RNA, 19 nt, Artificial Sequence
  Description of Artificial Sequence: Synthetic oligonucleotide
gggcgagccaugcccgcgc

SEQ ID NO: 1597332 - RNA, 19 nt, Artificial Sequence
  Description of Artificial Sequence: Synthetic oligonucleotide
gccucggaagcuguacuuc

SEQ ID NO: 1597333 - RNA, 19 nt, Artificial Sequence
  Description of Artificial Sequence: Synthetic oligonucleotide
gggaccuggaaggcgggca

SEQ ID NO: 1597334 - RNA, 19 nt, Artificial Sequence
  Description of Artificial Sequence: Synthetic oligonucleotide
gcgggcagcguccgcuugc

SEQ ID NO: 1597335 - RNA, 19 nt, Artificial Sequence
  Description of Artificial Sequence: Synthetic oligonucleotide
cgguaauacaccagguucu

SEQ ID NO: 1597336 - RNA, 19 nt, Artificial Sequence
  Description of Artificial Sequence: Synthetic oligonucleotide
gacaccgagcgaagacugu

SEQ ID NO: 1597337 - RNA, 19 nt, Artificial Sequence
  Description of Artificial Sequence: Synthetic oligonucleotide
ggaggaacacagccucgua

SEQ ID NO: 1597338 - RNA, 19 nt, Artificial Sequence
  Description of Artificial Sequence: Synthetic oligonucleotide
cugccucggcggguagggg

SEQ ID NO: 1597339 - RNA, 19 nt, Artificial Sequence
  Description of Artificial Sequence: Synthetic oligonucleotide
ccagcuagacaccgagcga

SEQ ID NO: 1597340 - RNA, 19 nt, Artificial Sequence
  Description of Artificial Sequence: Synthetic oligonucleotide
caucugacugaagguacau

SEQ ID NO: 1597341 - RNA, 19 nt, Artificial Sequence
  Description of Artificial Sequence: Synthetic oligonucleotide
cuacguuggggaugagauu

SEQ ID NO: 1597342 - RNA, 19 nt, Artificial Sequence
  Description of Artificial Sequence: Synthetic oligonucleotide
ggcgagccaugcccgcgcc

SEQ ID NO: 1597343 - RNA, 19 nt, Artificial Sequence
  Description of Artificial Sequence: Synthetic oligonucleotide
gcgcguagugcagguacug

SEQ ID NO: 1597344 - RNA, 19 nt, Artificial Sequence
  Description of Artificial Sequence: Synthetic oligonucleotide
cgcguagugcagguacugg

SEQ ID NO: 1597345 - RNA, 19 nt, Artificial Sequence
  Description of Artificial Sequence: Synthetic oligonucleotide
ccaccuacguuggggauga

SEQ ID NO: 1597346 - RNA, 19 nt, Artificial Sequence
  Description of Artificial Sequence: Synthetic oligonucleotide
cacagcccggaggaacaca

SEQ ID NO: 1597347 - RNA, 19 nt, Artificial Sequence
  Description of Artificial Sequence: Synthetic oligonucleotide
cgccgggcgagccaugccc

SEQ ID NO: 1597348 - RNA, 19 nt, Artificial Sequence
  Description of Artificial Sequence: Synthetic oligonucleotide
acgugaccgaagagccgca

SEQ ID NO: 1597349 - RNA, 19 nt, Artificial Sequence
  Description of Artificial Sequence: Synthetic oligonucleotide
ccgguucgccuugaacugc

SEQ ID NO: 1597350 - RNA, 19 nt, Artificial Sequence
  Description of Artificial Sequence: Synthetic oligonucleotide
gcccgguauccugagguga

SEQ ID NO: 1597351 - RNA, 19 nt, Artificial Sequence
  Description of Artificial Sequence: Synthetic oligonucleotide
cgagccaugcccgcgccgc

SEQ ID NO: 1597352 - RNA, 19 nt, Artificial Sequence
  Description of Artificial Sequence: Synthetic oligonucleotide
cguagugcagguacuggua

SEQ ID NO: 1597353 - RNA, 19 nt, Artificial Sequence
  Description of Artificial Sequence: Synthetic oligonucleotide
gguucgccuugaacugcgc

SEQ ID NO: 1597354 - RNA, 19 nt, Artificial Sequence
  Description of Artificial Sequence: Synthetic oligonucleotide
gggaugagauuggcuucac

SEQ ID NO: 1597355 - RNA, 19 nt, Artificial Sequence
  Description of Artificial Sequence: Synthetic oligonucleotide
cuccgacauccagcauccc

SEQ ID NO: 1597356 - RNA, 19 nt, Artificial Sequence
  Description of Artificial Sequence: Synthetic oligonucleotide
ccuggcgcacaucauucaa

SEQ ID NO: 1597357 - RNA, 19 nt, Artificial Sequence
  Description of Artificial Sequence: Synthetic oligonucleotide
cgguauccugaggugauuc

SEQ ID NO: 1597358 - RNA, 19 nt, Artificial Sequence
  Description of Artificial Sequence: Synthetic oligonucleotide
gcggguaggggaccuggaa

SEQ ID NO: 1597359 - RNA, 19 nt, Artificial Sequence
  Description of Artificial Sequence: Synthetic oligonucleotide
cggaggaccgacgggcucc

SEQ ID NO: 1597360 - RNA, 19 nt, Artificial Sequence
  Description of Artificial Sequence: Synthetic oligonucleotide
caucgccgucgccgucacc

SEQ ID NO: 1597361 - RNA, 19 nt, Artificial Sequence
  Description of Artificial Sequence: Synthetic oligonucleotide
gguccguaagggacucauc

SEQ ID NO: 1597362 - RNA, 19 nt, Artificial Sequence
  Description of Artificial Sequence: Synthetic oligonucleotide
caguccucgccaucgccau

SEQ ID NO: 1597363 - RNA, 19 nt, Artificial Sequence
  Description of Artificial Sequence: Synthetic oligonucleotide
ccaaggcccgcuccauguc

SEQ ID NO: 1597364 - RNA, 19 nt, Artificial Sequence
  Description of Artificial Sequence: Synthetic oligonucleotide
gggacucaucuccgacauc

SEQ ID NO: 1597365 - RNA, 19 nt, Artificial Sequence
  Description of Artificial Sequence: Synthetic oligonucleotide
ccguaggccguggccagag

SEQ ID NO: 1597366 - RNA, 19 nt, Artificial Sequence
  Description of Artificial Sequence: Synthetic oligonucleotide
gaggaccgacgggcuccag

SEQ ID NO: 1597367 - RNA, 19 nt, Artificial Sequence
  Description of Artificial Sequence: Synthetic oligonucleotide
ccgcuccaugucuucugug

SEQ ID NO: 1597368 - RNA, 19 nt, Artificial Sequence
  Description of Artificial Sequence: Synthetic oligonucleotide
gccucguagggcugggccu

SEQ ID NO: 1597369 - RNA, 19 nt, Artificial Sequence
  Description of Artificial Sequence: Synthetic oligonucleotide
gccucggcggguaggggac

SEQ ID NO: 1597370 - RNA, 19 nt, Artificial Sequence
  Description of Artificial Sequence: Synthetic oligonucleotide
gcccucguacugcucuaga

SEQ ID NO: 1597371 - RNA, 19 nt, Artificial Sequence
  Description of Artificial Sequence: Synthetic oligonucleotide
ccgaggcucccggagcagc

SEQ ID NO: 1597372 - RNA, 19 nt, Artificial Sequence
  Description of Artificial Sequence: Synthetic oligonucleotide
cgguggaagcgguaauaca

SEQ ID NO: 1597373 - RNA, 19 nt, Artificial Sequence
  Description of Artificial Sequence: Synthetic oligonucleotide
gcguccgcuugcagcgccg

SEQ ID NO: 1597374 - RNA, 19 nt, Artificial Sequence
  Description of Artificial Sequence: Synthetic oligonucleotide
ggcgcacaucauucaauuu

SEQ ID NO: 1597375 - RNA, 19 nt, Artificial Sequence
  Description of Artificial Sequence: Synthetic oligonucleotide
ccgccuccagguagcgcgc

SEQ ID NO: 1597376 - RNA, 19 nt, Artificial Sequence
  Description of Artificial Sequence: Synthetic oligonucleotide
gagcguggccguaggccgu

SEQ ID NO: 1597377 - RNA, 19 nt, Artificial Sequence
  Description of Artificial Sequence: Synthetic oligonucleotide
gcgcgcuccaggacgugac

SEQ ID NO: 1597378 - RNA, 19 nt, Artificial Sequence
  Description of Artificial Sequence: Synthetic oligonucleotide
gcgccagcucucgcccucg

SEQ ID NO: 1597379 - RNA, 19 nt, Artificial Sequence
  Description of Artificial Sequence: Synthetic oligonucleotide
acgcuguccuuggggucaa

SEQ ID NO: 1597380 - RNA, 19 nt, Artificial Sequence
  Description of Artificial Sequence: Synthetic oligonucleotide
ccccuguaguagcugaggu

SEQ ID NO: 1597381 - RNA, 19 nt, Artificial Sequence
  Description of Artificial Sequence: Synthetic oligonucleotide
ccgggcgagccaugcccgc

SEQ ID NO: 1597382 - RNA, 19 nt, Artificial Sequence
  Description of Artificial Sequence: Synthetic oligonucleotide
ggaagccucggaagcugua

SEQ ID NO: 1597383 - RNA, 19 nt, Artificial Sequence
  Description of Artificial Sequence: Synthetic oligonucleotide
ggaggaccgacgggcucca

SEQ ID NO: 1597384 - RNA, 19 nt, Artificial Sequence
  Description of Artificial Sequence: Synthetic oligonucleotide
cccggagcagccggaggac

SEQ ID NO: 1597385 - RNA, 19 nt, Artificial Sequence
  Description of Artificial Sequence: Synthetic oligonucleotide
gagcccgguggaagcggua

SEQ ID NO: 1597386 - RNA, 19 nt, Artificial Sequence
  Description of Artificial Sequence: Synthetic oligonucleotide
cguggccguaggccguggc

SEQ ID NO: 1597387 - RNA, 19 nt, Artificial Sequence
  Description of Artificial Sequence: Synthetic oligonucleotide
ggcggguaggggaccugga

SEQ ID NO: 1597388 - RNA, 19 nt, Artificial Sequence
  Description of Artificial Sequence: Synthetic oligonucleotide
cgcuccaggacgugaccga

SEQ ID NO: 1597389 - RNA, 19 nt, Artificial Sequence
  Description of Artificial Sequence: Synthetic oligonucleotide
caccuacguuggggaugag

SEQ ID NO: 1597390 - RNA, 19 nt, Artificial Sequence
  Description of Artificial Sequence: Synthetic oligonucleotide
cccgguauccugaggugau

SEQ ID NO: 1597391 - RNA, 19 nt, Artificial Sequence
  Description of Artificial Sequence: Synthetic oligonucleotide
caucuccgacauccagcau

SEQ ID NO: 1597392 - RNA, 19 nt, Artificial Sequence
  Description of Artificial Sequence: Synthetic oligonucleotide
cgggcgagccaugcccgcg

SEQ ID NO: 1597393 - RNA, 19 nt, Artificial Sequence
  Description of Artificial Sequence: Synthetic oligonucleotide
cccgguggaagcgguaaua

SEQ ID NO: 1597394 - RNA, 19 nt, Artificial Sequence
  Description of Artificial Sequence: Synthetic oligonucleotide
cucggcggguaggggaccu

SEQ ID NO: 1597395 - RNA, 19 nt, Artificial Sequence
  Description of Artificial Sequence: Synthetic oligonucleotide
ccucggcggguaggggacc

SEQ ID NO: 1597396 - RNA, 19 nt, Artificial Sequence
  Description of Artificial Sequence: Synthetic oligonucleotide
gcgcccgcgcugcccagca

SEQ ID NO: 1597397 - RNA, 19 nt, Artificial Sequence
  Description of Artificial Sequence: Synthetic oligonucleotide
gcguggccguaggccgugg

SEQ ID NO: 1597398 - RNA, 19 nt, Artificial Sequence
  Description of Artificial Sequence: Synthetic oligonucleotide
gcgcccaguccucgccauc

SEQ ID NO: 1597399 - RNA, 19 nt, Artificial Sequence
  Description of Artificial Sequence: Synthetic oligonucleotide
cguccgcuugcagcgccgc

SEQ ID NO: 1597400 - RNA, 19 nt, Artificial Sequence
  Description of Artificial Sequence: Synthetic oligonucleotide
cgcccucguacugcucuag

SEQ ID NO: 1597401 - RNA, 19 nt, Artificial Sequence
  Description of Artificial Sequence: Synthetic oligonucleotide
cgcgccagcucucgcccuc

SEQ ID NO: 1597402 - RNA, 19 nt, Artificial Sequence
  Description of Artificial Sequence: Synthetic oligonucleotide
cgccgcgccccgaggcucc

SEQ ID NO: 1597403 - RNA, 19 nt, Artificial Sequence
  Description of Artificial Sequence: Synthetic oligonucleotide
gcucuagagcguggccgua

SEQ ID NO: 1597404 - RNA, 19 nt, Artificial Sequence
  Description of Artificial Sequence: Synthetic oligonucleotide
gcgcgcgcucucgcgccag

SEQ ID NO: 1597405 - RNA, 19 nt, Artificial Sequence
  Description of Artificial Sequence: Synthetic oligonucleotide
gccguaggccguggccaga

SEQ ID NO: 1597406 - RNA, 19 nt, Artificial Sequence
  Description of Artificial Sequence: Synthetic oligonucleotide
cggaggaacacagccucgu

SEQ ID NO: 1597407 - RNA, 19 nt, Artificial Sequence
  Description of Artificial Sequence: Synthetic oligonucleotide
ccacgccgggcgagccaug

SEQ ID NO: 1597408 - RNA, 19 nt, Artificial Sequence
  Description of Artificial Sequence: Synthetic oligonucleotide
ccgcggaaguccccgcugu

SEQ ID NO: 1597409 - RNA, 19 nt, Artificial Sequence
  Description of Artificial Sequence: Synthetic oligonucleotide
gcccgguggaagcgguaau

SEQ ID NO: 1597410 - RNA, 19 nt, Artificial Sequence
  Description of Artificial Sequence: Synthetic oligonucleotide
gccggaggaccgacgggcu

SEQ ID NO: 1597411 - RNA, 19 nt, Artificial Sequence
  Description of Artificial Sequence: Synthetic oligonucleotide
gcgccccgaggcucccgga

SEQ ID NO: 1597412 - RNA, 19 nt, Artificial Sequence
  Description of Artificial Sequence: Synthetic oligonucleotide
cgcgcgcucucgcgccagc

SEQ ID NO: 1597413 - RNA, 19 nt, Artificial Sequence
  Description of Artificial Sequence: Synthetic oligonucleotide
cgucgccgucaccguccgg

SEQ ID NO: 1597414 - RNA, 19 nt, Artificial Sequence
  Description of Artificial Sequence: Synthetic oligonucleotide
ccccacgccgggcgagcca

SEQ ID NO: 1597415 - RNA, 19 nt, Artificial Sequence
  Description of Artificial Sequence: Synthetic oligonucleotide
gcucgugcuugggguuccu

SEQ ID NO: 1597416 - RNA, 19 nt, Artificial Sequence
  Description of Artificial Sequence: Synthetic oligonucleotide
gcgcgcucucgcgccagcu

SEQ ID NO: 1597417 - RNA, 19 nt, Artificial Sequence
  Description of Artificial Sequence: Synthetic oligonucleotide
cccacgccgggcgagccau

SEQ ID NO: 1597418 - RNA, 19 nt, Artificial Sequence
  Description of Artificial Sequence: Synthetic oligonucleotide
ccgguauccugaggugauu

SEQ ID NO: 1597419 - RNA, 19 nt, Artificial Sequence
  Description of Artificial Sequence: Synthetic oligonucleotide
ccccgcuguuguagagcuu

SEQ ID NO: 1597420 - RNA, 19 nt, Artificial Sequence
  Description of Artificial Sequence: Synthetic oligonucleotide
cgcggaaguccccgcuguu

SEQ ID NO: 1597421 - RNA, 19 nt, Artificial Sequence
  Description of Artificial Sequence: Synthetic oligonucleotide
uguagaacaagugacaucg

SEQ ID NO: 1597422 - RNA, 19 nt, Artificial Sequence
  Description of Artificial Sequence: Synthetic oligonucleotide
accgguuacacucauaugc

SEQ ID NO: 1597423 - RNA, 19 nt, Artificial Sequence
  Description of Artificial Sequence: Synthetic oligonucleotide
ucuguucuaaauaacauug

SEQ ID NO: 1597424 - RNA, 19 nt, Artificial Sequence
  Description of Artificial Sequence: Synthetic oligonucleotide
uaguuuauucuucacaccg

SEQ ID NO: 1597425 - RNA, 19 nt, Artificial Sequence
  Description of Artificial Sequence: Synthetic oligonucleotide
uaacauuggaaccucaagg

SEQ ID NO: 1597426 - RNA, 19 nt, Artificial Sequence
  Description of Artificial Sequence: Synthetic oligonucleotide
uucuaaauaacauuggaac

SEQ ID NO: 1597427 - RNA, 19 nt, Artificial Sequence
  Description of Artificial Sequence: Synthetic oligonucleotide
uaaaggaugaaucgugccg

SEQ ID NO: 1597428 - RNA, 19 nt, Artificial Sequence
  Description of Artificial Sequence: Synthetic oligonucleotide
ucuaaauaacauuggaacc

SEQ ID NO: 1597429 - RNA, 19 nt, Artificial Sequence
  Description of Artificial Sequence: Synthetic oligonucleotide
ucuuguguauuuuauagug

SEQ ID NO: 1597430 - RNA, 19 nt, Artificial Sequence
  Description of Artificial Sequence: Synthetic oligonucleotide
uuuuacagcacgaagugca

SEQ ID NO: 1597431 - RNA, 19 nt, Artificial Sequence
  Description of Artificial Sequence: Synthetic oligonucleotide
uucaauguagaacaaguga

SEQ ID NO: 1597432 - RNA, 19 nt, Artificial Sequence
  Description of Artificial Sequence: Synthetic oligonucleotide
aaaagugcucuuuuccacg

SEQ ID NO: 1597433 - RNA, 19 nt, Artificial Sequence
  Description of Artificial Sequence: Synthetic oligonucleotide
uguaguuuauucuucacac

SEQ ID NO: 1597434 - RNA, 19 nt, Artificial Sequence
  Description of Artificial Sequence: Synthetic oligonucleotide
uugaaucuaacuuauauuu

SEQ ID NO: 1597435 - RNA, 19 nt, Artificial Sequence
  Description of Artificial Sequence: Synthetic oligonucleotide
aacauuggaaccucaaggu

SEQ ID NO: 1597436 - RNA, 19 nt, Artificial Sequence
  Description of Artificial Sequence: Synthetic oligonucleotide
aaggugucuaaucugccgg

SEQ ID NO: 1597437 - RNA, 19 nt, Artificial Sequence
  Description of Artificial Sequence: Synthetic oligonucleotide
ucagggacgaguuauagcu

SEQ ID NO: 1597438 - RNA, 19 nt, Artificial Sequence
  Description of Artificial Sequence: Synthetic oligonucleotide
ucuguugcaaggaugcuag

SEQ ID NO: 1597439 - RNA, 19 nt, Artificial Sequence
  Description of Artificial Sequence: Synthetic oligonucleotide
aagucaaugauuccuguga

SEQ ID NO: 1597440 - RNA, 19 nt, Artificial Sequence
  Description of Artificial Sequence: Synthetic oligonucleotide
ucuaacuuauauuuguuuc

SEQ ID NO: 1597441 - RNA, 19 nt, Artificial Sequence
  Description of Artificial Sequence: Synthetic oligonucleotide
aaaggaugaaucgugccgg

SEQ ID NO: 1597442 - RNA, 19 nt, Artificial Sequence
  Description of Artificial Sequence: Synthetic oligonucleotide
uguucuaaauaacauugga

SEQ ID NO: 1597443 - RNA, 19 nt, Artificial Sequence
  Description of Artificial Sequence: Synthetic oligonucleotide
aaauguuggaccaagcuga

SEQ ID NO: 1597444 - RNA, 19 nt, Artificial Sequence
  Description of Artificial Sequence: Synthetic oligonucleotide
aacguuuuacagcacgaag

SEQ ID NO: 1597445 - RNA, 19 nt, Artificial Sequence
  Description of Artificial Sequence: Synthetic oligonucleotide
gacgaguuauagcugaagg

SEQ ID NO: 1597446 - RNA, 19 nt, Artificial Sequence
  Description of Artificial Sequence: Synthetic oligonucleotide
uguauccucugccuaaagg

SEQ ID NO: 1597447 - RNA, 19 nt, Artificial Sequence
  Description of Artificial Sequence: Synthetic oligonucleotide
aaguugguaucccacugac

SEQ ID NO: 1597448 - RNA, 19 nt, Artificial Sequence
  Description of Artificial Sequence: Synthetic oligonucleotide
gacuaaacguuuuacagca

SEQ ID NO: 1597449 - RNA, 19 nt, Artificial Sequence
  Description of Artificial Sequence: Synthetic oligonucleotide
agcuaaacgguuucucucc

SEQ ID NO: 1597450 - RNA, 19 nt, Artificial Sequence
  Description of Artificial Sequence: Synthetic oligonucleotide
agaacaagugacaucgucc

SEQ ID NO: 1597451 - RNA, 19 nt, Artificial Sequence
  Description of Artificial Sequence: Synthetic oligonucleotide
ugagcgaugagcgaugccg

SEQ ID NO: 1597452 - RNA, 19 nt, Artificial Sequence
  Description of Artificial Sequence: Synthetic oligonucleotide
ugucuaaucugccggaaag

SEQ ID NO: 1597453 - RNA, 19 nt, Artificial Sequence
  Description of Artificial Sequence: Synthetic oligonucleotide
aaagugcucuuuuccacgg

SEQ ID NO: 1597454 - RNA, 19 nt, Artificial Sequence
  Description of Artificial Sequence: Synthetic oligonucleotide
guugguaucccacugacac

SEQ ID NO: 1597455 - RNA, 19 nt, Artificial Sequence
  Description of Artificial Sequence: Synthetic oligonucleotide
ucuuacgugcucacuaagg

SEQ ID NO: 1597456 - RNA, 19 nt, Artificial Sequence
  Description of Artificial Sequence: Synthetic oligonucleotide
ugaaucuaacuuauauuug

SEQ ID NO: 1597457 - RNA, 19 nt, Artificial Sequence
  Description of Artificial Sequence: Synthetic oligonucleotide
ucaaauguuggaccaagcu

SEQ ID NO: 1597458 - RNA, 19 nt, Artificial Sequence
  Description of Artificial Sequence: Synthetic oligonucleotide
ugacuaaacguuuuacagc

SEQ ID NO: 1597459 - RNA, 19 nt, Artificial Sequence
  Description of Artificial Sequence: Synthetic oligonucleotide
cuaugaugcugguugagcg

SEQ ID NO: 1597460 - RNA, 19 nt, Artificial Sequence
  Description of Artificial Sequence: Synthetic oligonucleotide
aaagucaaugauuccugug

SEQ ID NO: 1597461 - RNA, 19 nt, Artificial Sequence
  Description of Artificial Sequence: Synthetic oligonucleotide
auuugucacagacgaaugg

SEQ ID NO: 1597462 - RNA, 19 nt, Artificial Sequence
  Description of Artificial Sequence: Synthetic oligonucleotide
cguaugaacaguuuuaugg

SEQ ID NO: 1597463 - RNA, 19 nt, Artificial Sequence
  Description of Artificial Sequence: Synthetic oligonucleotide
uguguauuuagcgaugcgc

SEQ ID NO: 1597464 - RNA, 19 nt, Artificial Sequence
  Description of Artificial Sequence: Synthetic oligonucleotide
ucaaugauuccugugauuc

SEQ ID NO: 1597465 - RNA, 19 nt, Artificial Sequence
  Description of Artificial Sequence: Synthetic oligonucleotide
ugugacuaaacguuuuaca

SEQ ID NO: 1597466 - RNA, 19 nt, Artificial Sequence
  Description of Artificial Sequence: Synthetic oligonucleotide
auuuuauagugucugcuca

SEQ ID NO: 1597467 - RNA, 19 nt, Artificial Sequence
  Description of Artificial Sequence: Synthetic oligonucleotide
ucucugguguuucuuaaag

SEQ ID NO: 1597468 - RNA, 19 nt, Artificial Sequence
  Description of Artificial Sequence: Synthetic oligonucleotide
acaucguccucugugagcc

SEQ ID NO: 1597469 - RNA, 19 nt, Artificial Sequence
  Description of Artificial Sequence: Synthetic oligonucleotide
cuucacaccgaucaugggg

SEQ ID NO: 1597470 - RNA, 19 nt, Artificial Sequence
  Description of Artificial Sequence: Synthetic oligonucleotide
uacgugcucacuaaggugu

SEQ ID NO: 1597471 - RNA, 19 nt, Artificial Sequence
  Description of Artificial Sequence: Synthetic oligonucleotide
auaacauuggaaccucaag

SEQ ID NO: 1597472 - RNA, 19 nt, Artificial Sequence
  Description of Artificial Sequence: Synthetic oligonucleotide
uuaaaggaugaaucgugcc

SEQ ID NO: 1597473 - RNA, 19 nt, Artificial Sequence
  Description of Artificial Sequence: Synthetic oligonucleotide
uuuuauagugucugcucag

SEQ ID NO: 1597474 - RNA, 19 nt, Artificial Sequence
  Description of Artificial Sequence: Synthetic oligonucleotide
aaugauuccugugauucug

SEQ ID NO: 1597475 - RNA, 19 nt, Artificial Sequence
  Description of Artificial Sequence: Synthetic oligonucleotide
uucucaugugcucuguaag

SEQ ID NO: 1597476 - RNA, 19 nt, Artificial Sequence
  Description of Artificial Sequence: Synthetic oligonucleotide
uguauuuuauagugucugc

SEQ ID NO: 1597477 - RNA, 19 nt, Artificial Sequence
  Description of Artificial Sequence: Synthetic oligonucleotide
ucacuaaggugucuaaucu

SEQ ID NO: 1597478 - RNA, 19 nt, Artificial Sequence
  Description of Artificial Sequence: Synthetic oligonucleotide
uacauucuggcuccuaggc

SEQ ID NO: 1597479 - RNA, 19 nt, Artificial Sequence
  Description of Artificial Sequence: Synthetic oligonucleotide
agaauguguccucaaaugu

SEQ ID NO: 1597480 - RNA, 19 nt, Artificial Sequence
  Description of Artificial Sequence: Synthetic oligonucleotide
uauuuuauagugucugcuc

SEQ ID NO: 1597481 - RNA, 19 nt, Artificial Sequence
  Description of Artificial Sequence: Synthetic oligonucleotide
caaauguuggaccaagcug

SEQ ID NO: 1597482 - RNA, 19 nt, Artificial Sequence
  Description of Artificial Sequence: Synthetic oligonucleotide
caagguuuccccaaauuug

SEQ ID NO: 1597483 - RNA, 19 nt, Artificial Sequence
  Description of Artificial Sequence: Synthetic oligonucleotide
acccagguuguauuuaugg

SEQ ID NO: 1597484 - RNA, 19 nt, Artificial Sequence
  Description of Artificial Sequence: Synthetic oligonucleotide
uugguuuguaguuuauucu

SEQ ID NO: 1597485 - RNA, 19 nt, Artificial Sequence
  Description of Artificial Sequence: Synthetic oligonucleotide
uaaacguuuuacagcacga

SEQ ID NO: 1597486 - RNA, 19 nt, Artificial Sequence
  Description of Artificial Sequence: Synthetic oligonucleotide
uuuauagugucugcucagg

SEQ ID NO: 1597487 - RNA, 19 nt, Artificial Sequence
  Description of Artificial Sequence: Synthetic oligonucleotide
uaaucugccggaaaguuuu

SEQ ID NO: 1597488 - RNA, 19 nt, Artificial Sequence
  Description of Artificial Sequence: Synthetic oligonucleotide
ugaacaguuuuaugguugc

SEQ ID NO: 1597489 - RNA, 19 nt, Artificial Sequence
  Description of Artificial Sequence: Synthetic oligonucleotide
ucugguguguauuuagcga

SEQ ID NO: 1597490 - RNA, 19 nt, Artificial Sequence
  Description of Artificial Sequence: Synthetic oligonucleotide
accaagcugauguucuggc

SEQ ID NO: 1597491 - RNA, 19 nt, Artificial Sequence
  Description of Artificial Sequence: Synthetic oligonucleotide
uguccucaaauguuggacc

SEQ ID NO: 1597492 - RNA, 19 nt, Artificial Sequence
  Description of Artificial Sequence: Synthetic oligonucleotide
ugugagauaugcucuguga

SEQ ID NO: 1597493 - RNA, 19 nt, Artificial Sequence
  Description of Artificial Sequence: Synthetic oligonucleotide
gauacaaaucccgguaugc

SEQ ID NO: 1597494 - RNA, 19 nt, Artificial Sequence
  Description of Artificial Sequence: Synthetic oligonucleotide
ugugagucaaaagugcucu

SEQ ID NO: 1597495 - RNA, 19 nt, Artificial Sequence
  Description of Artificial Sequence: Synthetic oligonucleotide
uuugaaagucaaugauucc

SEQ ID NO: 1597496 - RNA, 19 nt, Artificial Sequence
  Description of Artificial Sequence: Synthetic oligonucleotide
gaaucuaacuuauauuugu

SEQ ID NO: 1597497 - RNA, 19 nt, Artificial Sequence
  Description of Artificial Sequence: Synthetic oligonucleotide
gaugaaucgugccgguagg

SEQ ID NO: 1597498 - RNA, 19 nt, Artificial Sequence
  Description of Artificial Sequence: Synthetic oligonucleotide
aucaguugaaucuaacuua

SEQ ID NO: 1597499 - RNA, 19 nt, Artificial Sequence
  Description of Artificial Sequence: Synthetic oligonucleotide
uguguauuuuauagugucu

SEQ ID NO: 1597500 - RNA, 19 nt, Artificial Sequence
  Description of Artificial Sequence: Synthetic oligonucleotide
ucauaugcuuucacucccg

SEQ ID NO: 1597501 - RNA, 19 nt, Artificial Sequence
  Description of Artificial Sequence: Synthetic oligonucleotide
cuguucuaaauaacauugg

SEQ ID NO: 1597502 - RNA, 19 nt, Artificial Sequence
  Description of Artificial Sequence: Synthetic oligonucleotide
agucaaaagugcucuuuuc

SEQ ID NO: 1597503 - RNA, 19 nt, Artificial Sequence
  Description of Artificial Sequence: Synthetic oligonucleotide
ugcucugugacuaaacguu

SEQ ID NO: 1597504 - RNA, 19 nt, Artificial Sequence
  Description of Artificial Sequence: Synthetic oligonucleotide
aaucccgguaugcaggagu

SEQ ID NO: 1597505 - RNA, 19 nt, Artificial Sequence
  Description of Artificial Sequence: Synthetic oligonucleotide
gacucucugccauccaugg

SEQ ID NO: 1597506 - RNA, 19 nt, Artificial Sequence
  Description of Artificial Sequence: Synthetic oligonucleotide
cagaauguguccucaaaug

SEQ ID NO: 1597507 - RNA, 19 nt, Artificial Sequence
  Description of Artificial Sequence: Synthetic oligonucleotide
uggcauucccuuuugugag

SEQ ID NO: 1597508 - RNA, 19 nt, Artificial Sequence
  Description of Artificial Sequence: Synthetic oligonucleotide
acugggagaucacacuagg

SEQ ID NO: 1597509 - RNA, 19 nt, Artificial Sequence
  Description of Artificial Sequence: Synthetic oligonucleotide
agaagaguuccucuugugu

SEQ ID NO: 1597510 - RNA, 19 nt, Artificial Sequence
  Description of Artificial Sequence: Synthetic oligonucleotide
ucaagcaucaccucccgau

SEQ ID NO: 1597511 - RNA, 19 nt, Artificial Sequence
  Description of Artificial Sequence: Synthetic oligonucleotide
cuaagguguauccucugcc

SEQ ID NO: 1597512 - RNA, 19 nt, Artificial Sequence
  Description of Artificial Sequence: Synthetic oligonucleotide
uccuuucuccaacugggag

SEQ ID NO: 1597513 - RNA, 19 nt, Artificial Sequence
  Description of Artificial Sequence: Synthetic oligonucleotide
uuucuguaguucucaagca

SEQ ID NO: 1597514 - RNA, 19 nt, Artificial Sequence
  Description of Artificial Sequence: Synthetic oligonucleotide
uguaaggugaauggguugu

SEQ ID NO: 1597515 - RNA, 19 nt, Artificial Sequence
  Description of Artificial Sequence: Synthetic oligonucleotide
cucauaugcuuucacuccc

SEQ ID NO: 1597516 - RNA, 19 nt, Artificial Sequence
  Description of Artificial Sequence: Synthetic oligonucleotide
auguagaacaagugacauc

SEQ ID NO: 1597517 - RNA, 19 nt, Artificial Sequence
  Description of Artificial Sequence: Synthetic oligonucleotide
uucccuggugccuuucucg

SEQ ID NO: 1597518 - RNA, 19 nt, Artificial Sequence
  Description of Artificial Sequence: Synthetic oligonucleotide
cucacuaaggugucuaauc

SEQ ID NO: 1597519 - RNA, 19 nt, Artificial Sequence
  Description of Artificial Sequence: Synthetic oligonucleotide
guugcuaagguguauccuc

SEQ ID NO: 1597520 - RNA, 19 nt, Artificial Sequence
  Description of Artificial Sequence: Synthetic oligonucleotide
agcucauuggaucaucagu

SEQ ID NO: 1597521 - RNA, 19 nt, Artificial Sequence
  Description of Artificial Sequence: Synthetic oligonucleotide
acaguuuuaugguugcuaa

SEQ ID NO: 1597522 - RNA, 19 nt, Artificial Sequence
  Description of Artificial Sequence: Synthetic oligonucleotide
uagaacaagugacaucguc

SEQ ID NO: 1597523 - RNA, 19 nt, Artificial Sequence
  Description of Artificial Sequence: Synthetic oligonucleotide
uaaaggcccuuccacauuc

SEQ ID NO: 1597524 - RNA, 19 nt, Artificial Sequence
  Description of Artificial Sequence: Synthetic oligonucleotide
ucuguaaggugaauggguu

SEQ ID NO: 1597525 - RNA, 19 nt, Artificial Sequence
  Description of Artificial Sequence: Synthetic oligonucleotide
uuacgugcucacuaaggug

SEQ ID NO: 1597526 - RNA, 19 nt, Artificial Sequence
  Description of Artificial Sequence: Synthetic oligonucleotide
uccacggauucccuggugc

SEQ ID NO: 1597527 - RNA, 19 nt, Artificial Sequence
  Description of Artificial Sequence: Synthetic oligonucleotide
ucuaugaugcugguugagc

SEQ ID NO: 1597528 - RNA, 19 nt, Artificial Sequence
  Description of Artificial Sequence: Synthetic oligonucleotide
acgaguuauagcugaagga

SEQ ID NO: 1597529 - RNA, 19 nt, Artificial Sequence
  Description of Artificial Sequence: Synthetic oligonucleotide
uguuucuuaaaggaugaau

SEQ ID NO: 1597530 - RNA, 19 nt, Artificial Sequence
  Description of Artificial Sequence: Synthetic oligonucleotide
uucuucaauguagaacaag

SEQ ID NO: 1597531 - RNA, 19 nt, Artificial Sequence
  Description of Artificial Sequence: Synthetic oligonucleotide
guaguuuauucuucacacc

SEQ ID NO: 1597532 - RNA, 19 nt, Artificial Sequence
  Description of Artificial Sequence: Synthetic oligonucleotide
uaagguguauccucugccu

SEQ ID NO: 1597533 - RNA, 19 nt, Artificial Sequence
  Description of Artificial Sequence: Synthetic oligonucleotide
acauuugucacagacgaau

SEQ ID NO: 1597534 - RNA, 19 nt, Artificial Sequence
  Description of Artificial Sequence: Synthetic oligonucleotide
aagguuuccccaaauuugu

SEQ ID NO: 1597535 - RNA, 19 nt, Artificial Sequence
  Description of Artificial Sequence: Synthetic oligonucleotide
ugguuuguaguuuauucuu

SEQ ID NO: 1597536 - RNA, 19 nt, Artificial Sequence
  Description of Artificial Sequence: Synthetic oligonucleotide
aagcugauguucuggcuga

SEQ ID NO: 1597537 - RNA, 19 nt, Artificial Sequence
  Description of Artificial Sequence: Synthetic oligonucleotide
aauaacauuggaaccucaa

SEQ ID NO: 1597538 - RNA, 19 nt, Artificial Sequence
  Description of Artificial Sequence: Synthetic oligonucleotide
uaaauaacauuggaaccuc

SEQ ID NO: 1597539 - RNA, 19 nt, Artificial Sequence
  Description of Artificial Sequence: Synthetic oligonucleotide
uaacuuauauuuguuucuc

SEQ ID NO: 1597540 - RNA, 19 nt, Artificial Sequence
  Description of Artificial Sequence: Synthetic oligonucleotide
cacucguugcagcuaaacg

SEQ ID NO: 1597541 - RNA, 19 nt, Artificial Sequence
  Description of Artificial Sequence: Synthetic oligonucleotide
gugagauaugcucugugac

SEQ ID NO: 1597542 - RNA, 19 nt, Artificial Sequence
  Description of Artificial Sequence: Synthetic oligonucleotide
gaagaguuccucuugugua

SEQ ID NO: 1597543 - RNA, 19 nt, Artificial Sequence
  Description of Artificial Sequence: Synthetic oligonucleotide
ggugaugugugagauaugc

SEQ ID NO: 1597544 - RNA, 19 nt, Artificial Sequence
  Description of Artificial Sequence: Synthetic oligonucleotide
caugaugccaugaccgaac

SEQ ID NO: 1597545 - RNA, 19 nt, Artificial Sequence
  Description of Artificial Sequence: Synthetic oligonucleotide
uuagcgaugcgcucugacu

SEQ ID NO: 1597546 - RNA, 19 nt, Artificial Sequence
  Description of Artificial Sequence: Synthetic oligonucleotide
ccucuuguguauuuuauag

SEQ ID NO: 1597547 - RNA, 19 nt, Artificial Sequence
  Description of Artificial Sequence: Synthetic oligonucleotide
acuaggcuuggaaaguugg

SEQ ID NO: 1597548 - RNA, 19 nt, Artificial Sequence
  Description of Artificial Sequence: Synthetic oligonucleotide
auuggaaccucaagguuuc

SEQ ID NO: 1597549 - RNA, 19 nt, Artificial Sequence
  Description of Artificial Sequence: Synthetic oligonucleotide
guuguauuuauggugcuuc

SEQ ID NO: 1597550 - RNA, 19 nt, Artificial Sequence
  Description of Artificial Sequence: Synthetic oligonucleotide
augaacaguuuuaugguug

SEQ ID NO: 1597551 - RNA, 19 nt, Artificial Sequence
  Description of Artificial Sequence: Synthetic oligonucleotide
uaugaacaguuuuaugguu

SEQ ID NO: 1597552 - RNA, 19 nt, Artificial Sequence
  Description of Artificial Sequence: Synthetic oligonucleotide
aucacacuaggcuuggaaa

SEQ ID NO: 1597553 - RNA, 19 nt, Artificial Sequence
  Description of Artificial Sequence: Synthetic oligonucleotide
ugcugguugagcgaugagc

SEQ ID NO: 1597554 - RNA, 19 nt, Artificial Sequence
  Description of Artificial Sequence: Synthetic oligonucleotide
aaacgguuucucuccagaa

SEQ ID NO: 1597555 - RNA, 19 nt, Artificial Sequence
  Description of Artificial Sequence: Synthetic oligonucleotide
uuuauucuucacaccgauc

SEQ ID NO: 1597556 - RNA, 19 nt, Artificial Sequence
  Description of Artificial Sequence: Synthetic oligonucleotide
uguauuuauggugcuucug

SEQ ID NO: 1597557 - RNA, 19 nt, Artificial Sequence
  Description of Artificial Sequence: Synthetic oligonucleotide
gaugagcgaugccggaagg

SEQ ID NO: 1597558 - RNA, 19 nt, Artificial Sequence
  Description of Artificial Sequence: Synthetic oligonucleotide
ucaugggguccucugggcc

SEQ ID NO: 1597559 - RNA, 19 nt, Artificial Sequence
  Description of Artificial Sequence: Synthetic oligonucleotide
acguuuuacagcacgaagu

SEQ ID NO: 1597560 - RNA, 19 nt, Artificial Sequence
  Description of Artificial Sequence: Synthetic oligonucleotide
uagcgaugcgcucugacua

SEQ ID NO: 1597561 - RNA, 19 nt, Artificial Sequence
  Description of Artificial Sequence: Synthetic oligonucleotide
cuaaauaacauuggaaccu

SEQ ID NO: 1597562 - RNA, 19 nt, Artificial Sequence
  Description of Artificial Sequence: Synthetic oligonucleotide
ugacaucguccucugugag

SEQ ID NO: 1597563 - RNA, 19 nt, Artificial Sequence
  Description of Artificial Sequence: Synthetic oligonucleotide
ugguugcuaagguguaucc

SEQ ID NO: 1597564 - RNA, 19 nt, Artificial Sequence
  Description of Artificial Sequence: Synthetic oligonucleotide
augcucugugacuaaacgu

SEQ ID NO: 1597565 - RNA, 19 nt, Artificial Sequence
  Description of Artificial Sequence: Synthetic oligonucleotide
ucugugacuaaacguuuua

SEQ ID NO: 1597566 - RNA, 19 nt, Artificial Sequence
  Description of Artificial Sequence: Synthetic oligonucleotide
agggacgaguuauagcuga

SEQ ID NO: 1597567 - RNA, 19 nt, Artificial Sequence
  Description of Artificial Sequence: Synthetic oligonucleotide
gcugguugagcgaugagcg

SEQ ID NO: 1597568 - RNA, 19 nt, Artificial Sequence
  Description of Artificial Sequence: Synthetic oligonucleotide
cucaaauguuggaccaagc

SEQ ID NO: 1597569 - RNA, 19 nt, Artificial Sequence
  Description of Artificial Sequence: Synthetic oligonucleotide
aacugggagaucacacuag

SEQ ID NO: 1597570 - RNA, 19 nt, Artificial Sequence
  Description of Artificial Sequence: Synthetic oligonucleotide
ggaaccucaagguuucccc

SEQ ID NO: 1597571 - RNA, 19 nt, Artificial Sequence
  Description of Artificial Sequence: Synthetic oligonucleotide
cacuaaggugucuaaucug

SEQ ID NO: 1597572 - RNA, 19 nt, Artificial Sequence
  Description of Artificial Sequence: Synthetic oligonucleotide
guauuuauggugcuucugu

SEQ ID NO: 1597573 - RNA, 19 nt, Artificial Sequence
  Description of Artificial Sequence: Synthetic oligonucleotide
ugguguguauuuagcgaug

SEQ ID NO: 1597574 - RNA, 19 nt, Artificial Sequence
  Description of Artificial Sequence: Synthetic oligonucleotide
augugugagauaugcucug

SEQ ID NO: 1597575 - RNA, 19 nt, Artificial Sequence
  Description of Artificial Sequence: Synthetic oligonucleotide
auucucaugugcucuguaa

SEQ ID NO: 1597576 - RNA, 19 nt, Artificial Sequence
  Description of Artificial Sequence: Synthetic oligonucleotide
aauggguuguuugaacauu

SEQ ID NO: 1597577 - RNA, 19 nt, Artificial Sequence
  Description of Artificial Sequence: Synthetic oligonucleotide
agucagcuguccccacucc

SEQ ID NO: 1597578 - RNA, 19 nt, Artificial Sequence
  Description of Artificial Sequence: Synthetic oligonucleotide
gaccaagcugauguucugg

SEQ ID NO: 1597579 - RNA, 19 nt, Artificial Sequence
  Description of Artificial Sequence: Synthetic oligonucleotide
cucagggacgaguuauagc

SEQ ID NO: 1597580 - RNA, 19 nt, Artificial Sequence
  Description of Artificial Sequence: Synthetic oligonucleotide
cuccuaggcagcucauugg

SEQ ID NO: 1597581 - RNA, 19 nt, Artificial Sequence
  Description of Artificial Sequence: Synthetic oligonucleotide
aaacguuuuacagcacgaa

SEQ ID NO: 1597582 - RNA, 19 nt, Artificial Sequence
  Description of Artificial Sequence: Synthetic oligonucleotide
aggcuuggaaaguugguau

SEQ ID NO: 1597583 - RNA, 19 nt, Artificial Sequence
  Description of Artificial Sequence: Synthetic oligonucleotide
ucuaaucugccggaaaguu

SEQ ID NO: 1597584 - RNA, 19 nt, Artificial Sequence
  Description of Artificial Sequence: Synthetic oligonucleotide
uuucuucaauguagaacaa

SEQ ID NO: 1597585 - RNA, 19 nt, Artificial Sequence
  Description of Artificial Sequence: Synthetic oligonucleotide
gaucacacuaggcuuggaa

SEQ ID NO: 1597586 - RNA, 19 nt, Artificial Sequence
  Description of Artificial Sequence: Synthetic oligonucleotide
auucuuacgugcucacuaa

SEQ ID NO: 1597587 - RNA, 19 nt, Artificial Sequence
  Description of Artificial Sequence: Synthetic oligonucleotide
augaaucgugccgguaggc

SEQ ID NO: 1597588 - RNA, 19 nt, Artificial Sequence
  Description of Artificial Sequence: Synthetic oligonucleotide
cagacgaaugguuucucuc

SEQ ID NO: 1597589 - RNA, 19 nt, Artificial Sequence
  Description of Artificial Sequence: Synthetic oligonucleotide
agugcaggcauagggcuuc

SEQ ID NO: 1597590 - RNA, 19 nt, Artificial Sequence
  Description of Artificial Sequence: Synthetic oligonucleotide
ugcuuucacucccguauga

SEQ ID NO: 1597591 - RNA, 19 nt, Artificial Sequence
  Description of Artificial Sequence: Synthetic oligonucleotide
aaauaacauuggaaccuca

SEQ ID NO: 1597592 - RNA, 19 nt, Artificial Sequence
  Description of Artificial Sequence: Synthetic oligonucleotide
uugguaucccacugacacc

SEQ ID NO: 1597593 - RNA, 19 nt, Artificial Sequence
  Description of Artificial Sequence: Synthetic oligonucleotide
aagguguauccucugccua

SEQ ID NO: 1597594 - RNA, 19 nt, Artificial Sequence
  Description of Artificial Sequence: Synthetic oligonucleotide
uuacccagguuguauuuau

SEQ ID NO: 1597595 - RNA, 19 nt, Artificial Sequence
  Description of Artificial Sequence: Synthetic oligonucleotide
augagcgaugccggaaggc

SEQ ID NO: 1597596 - RNA, 19 nt, Artificial Sequence
  Description of Artificial Sequence: Synthetic oligonucleotide
aaggaugaaucgugccggu

SEQ ID NO: 1597597 - RNA, 19 nt, Artificial Sequence
  Description of Artificial Sequence: Synthetic oligonucleotide
caguuuuaugguugcuaag

SEQ ID NO: 1597598 - RNA, 19 nt, Artificial Sequence
  Description of Artificial Sequence: Synthetic oligonucleotide
cagcuaaacgguuucucuc

SEQ ID NO: 1597599 - RNA, 19 nt, Artificial Sequence
  Description of Artificial Sequence: Synthetic oligonucleotide
acagacgaaugguuucucu

SEQ ID NO: 1597600 - RNA, 19 nt, Artificial Sequence
  Description of Artificial Sequence: Synthetic oligonucleotide
cuguaaggugaauggguug

SEQ ID NO: 1597601 - RNA, 19 nt, Artificial Sequence
  Description of Artificial Sequence: Synthetic oligonucleotide
guguguauuuagcgaugcg

SEQ ID NO: 1597602 - RNA, 19 nt, Artificial Sequence
  Description of Artificial Sequence: Synthetic oligonucleotide
auacaaaucccgguaugca

SEQ ID NO: 1597603 - RNA, 19 nt, Artificial Sequence
  Description of Artificial Sequence: Synthetic oligonucleotide
acacucguugcagcuaaac

SEQ ID NO: 1597604 - RNA, 19 nt, Artificial Sequence
  Description of Artificial Sequence: Synthetic oligonucleotide
cucgugugcucacuguagc

SEQ ID NO: 1597605 - RNA, 19 nt, Artificial Sequence
  Description of Artificial Sequence: Synthetic oligonucleotide
gaagugcaggcauagggcu

SEQ ID NO: 1597606 - RNA, 19 nt, Artificial Sequence
  Description of Artificial Sequence: Synthetic oligonucleotide
guaucccacugacaccagg

SEQ ID NO: 1597607 - RNA, 19 nt, Artificial Sequence
  Description of Artificial Sequence: Synthetic oligonucleotide
gagaucacacuaggcuugg

SEQ ID NO: 1597608 - RNA, 19 nt, Artificial Sequence
  Description of Artificial Sequence: Synthetic oligonucleotide
ggcuuucugacauuuguca

SEQ ID NO: 1597609 - RNA, 19 nt, Artificial Sequence
  Description of Artificial Sequence: Synthetic oligonucleotide
cauuggaucaucaguugaa

SEQ ID NO: 1597610 - RNA, 19 nt, Artificial Sequence
  Description of Artificial Sequence: Synthetic oligonucleotide
uuucucgugugcucacugu

SEQ ID NO: 1597611 - RNA, 19 nt, Artificial Sequence
  Description of Artificial Sequence: Synthetic oligonucleotide
uaugcaggagucagcuguc

SEQ ID NO: 1597612 - RNA, 19 nt, Artificial Sequence
  Description of Artificial Sequence: Synthetic oligonucleotide
gggauaaguccacagcuac

SEQ ID NO: 1597613 - RNA, 19 nt, Artificial Sequence
  Description of Artificial Sequence: Synthetic oligonucleotide
cuuucucgugugcucacug

SEQ ID NO: 1597614 - RNA, 19 nt, Artificial Sequence
  Description of Artificial Sequence: Synthetic oligonucleotide
guugaaucuaacuuauauu

SEQ ID NO: 1597615 - RNA, 19 nt, Artificial Sequence
  Description of Artificial Sequence: Synthetic oligonucleotide
uuccugacaucugaagggu

SEQ ID NO: 1597616 - RNA, 19 nt, Artificial Sequence
  Description of Artificial Sequence: Synthetic oligonucleotide
uccucuuguguauuuuaua

SEQ ID NO: 1597617 - RNA, 19 nt, Artificial Sequence
  Description of Artificial Sequence: Synthetic oligonucleotide
uggaggcuuucuucaaugu

SEQ ID NO: 1597618 - RNA, 19 nt, Artificial Sequence
  Description of Artificial Sequence: Synthetic oligonucleotide
ugaaucgugccgguaggcu

SEQ ID NO: 1597619 - RNA, 19 nt, Artificial Sequence
  Description of Artificial Sequence: Synthetic oligonucleotide
ucccuuuugugagucaaaa

SEQ ID NO: 1597620 - RNA, 19 nt, Artificial Sequence
  Description of Artificial Sequence: Synthetic oligonucleotide
aguuauagcugaaggacuu

SEQ ID NO: 1597621 - RNA, 19 nt, Artificial Sequence
  Description of Artificial Sequence: Synthetic oligonucleotide
uaggcuuggaaaguuggua

SEQ ID NO: 1597622 - RNA, 19 nt, Artificial Sequence
  Description of Artificial Sequence: Synthetic oligonucleotide
ucuuacccagguuguauuu

SEQ ID NO: 1597623 - RNA, 19 nt, Artificial Sequence
  Description of Artificial Sequence: Synthetic oligonucleotide
uacccagguuguauuuaug

SEQ ID NO: 1597624 - RNA, 19 nt, Artificial Sequence
  Description of Artificial Sequence: Synthetic oligonucleotide
augcuuucacucccguaug

SEQ ID NO: 1597625 - RNA, 19 nt, Artificial Sequence
  Description of Artificial Sequence: Synthetic oligonucleotide
ugguugagcgaugagcgau

SEQ ID NO: 1597626 - RNA, 19 nt, Artificial Sequence
  Description of Artificial Sequence: Synthetic oligonucleotide
accaugaugccaugaccga

SEQ ID NO: 1597627 - RNA, 19 nt, Artificial Sequence
  Description of Artificial Sequence: Synthetic oligonucleotide
ugcuaagguguauccucug

SEQ ID NO: 1597628 - RNA, 19 nt, Artificial Sequence
  Description of Artificial Sequence: Synthetic oligonucleotide
cugugacuaaacguuuuac

SEQ ID NO: 1597629 - RNA, 19 nt, Artificial Sequence
  Description of Artificial Sequence: Synthetic oligonucleotide
aguuuauucuucacaccga

SEQ ID NO: 1597630 - RNA, 19 nt, Artificial Sequence
  Description of Artificial Sequence: Synthetic oligonucleotide
auuggaucaucaguugaau

SEQ ID NO: 1597631 - RNA, 19 nt, Artificial Sequence
  Description of Artificial Sequence: Synthetic oligonucleotide
acuaaacguuuuacagcac

SEQ ID NO: 1597632 - RNA, 19 nt, Artificial Sequence
  Description of Artificial Sequence: Synthetic oligonucleotide
gacaccagguuucuguagu

SEQ ID NO: 1597633 - RNA, 19 nt, Artificial Sequence
  Description of Artificial Sequence: Synthetic oligonucleotide
guauuuuauagugucugcu

SEQ ID NO: 1597634 - RNA, 19 nt, Artificial Sequence
  Description of Artificial Sequence: Synthetic oligonucleotide
ucgugugcucacuguagcu

SEQ ID NO: 1597635 - RNA, 19 nt, Artificial Sequence
  Description of Artificial Sequence: Synthetic oligonucleotide
caagugacaucguccucug

SEQ ID NO: 1597636 - RNA, 19 nt, Artificial Sequence
  Description of Artificial Sequence: Synthetic oligonucleotide
gcucacuguagcuggaggc

SEQ ID NO: 1597637 - RNA, 19 nt, Artificial Sequence
  Description of Artificial Sequence: Synthetic oligonucleotide
cacuaggcuuggaaaguug

SEQ ID NO: 1597638 - RNA, 19 nt, Artificial Sequence
  Description of Artificial Sequence: Synthetic oligonucleotide
ugugcucacuguagcugga

SEQ ID NO: 1597639 - RNA, 19 nt, Artificial Sequence
  Description of Artificial Sequence: Synthetic oligonucleotide
ccugugauucuguugcaag

SEQ ID NO: 1597640 - RNA, 19 nt, Artificial Sequence
  Description of Artificial Sequence: Synthetic oligonucleotide
cuuacgugcucacuaaggu

SEQ ID NO: 1597641 - RNA, 19 nt, Artificial Sequence
  Description of Artificial Sequence: Synthetic oligonucleotide
aaucugccggaaaguuuuc

SEQ ID NO: 1597642 - RNA, 19 nt, Artificial Sequence
  Description of Artificial Sequence: Synthetic oligonucleotide
cgaguuauagcugaaggac

SEQ ID NO: 1597643 - RNA, 19 nt, Artificial Sequence
  Description of Artificial Sequence: Synthetic oligonucleotide
ugccgguaggcuuucccac

SEQ ID NO: 1597644 - RNA, 19 nt, Artificial Sequence
  Description of Artificial Sequence: Synthetic oligonucleotide
ugagccuuuccaccaugau

SEQ ID NO: 1597645 - RNA, 19 nt, Artificial Sequence
  Description of Artificial Sequence: Synthetic oligonucleotide
aggugucuaaucugccgga

SEQ ID NO: 1597646 - RNA, 19 nt, Artificial Sequence
  Description of Artificial Sequence: Synthetic oligonucleotide
ggagaucacacuaggcuug

SEQ ID NO: 1597647 - RNA, 19 nt, Artificial Sequence
  Description of Artificial Sequence: Synthetic oligonucleotide
gcuccuaggcagcucauug

SEQ ID NO: 1597648 - RNA, 19 nt, Artificial Sequence
  Description of Artificial Sequence: Synthetic oligonucleotide
cauuggaaccucaagguuu

SEQ ID NO: 1597649 - RNA, 19 nt, Artificial Sequence
  Description of Artificial Sequence: Synthetic oligonucleotide
guguauuuagcgaugcgcu

SEQ ID NO: 1597650 - RNA, 19 nt, Artificial Sequence
  Description of Artificial Sequence: Synthetic oligonucleotide
ugaugcugguugagcgaug

SEQ ID NO: 1597651 - RNA, 19 nt, Artificial Sequence
  Description of Artificial Sequence: Synthetic oligonucleotide
aauguuggaccaagcugau

SEQ ID NO: 1597652 - RNA, 19 nt, Artificial Sequence
  Description of Artificial Sequence: Synthetic oligonucleotide
gaguuauagcugaaggacu

SEQ ID NO: 1597653 - RNA, 19 nt, Artificial Sequence
  Description of Artificial Sequence: Synthetic oligonucleotide
uucccuuuugugagucaaa

SEQ ID NO: 1597654 - RNA, 19 nt, Artificial Sequence
  Description of Artificial Sequence: Synthetic oligonucleotide
aaaucccgguaugcaggag

SEQ ID NO: 1597655 - RNA, 19 nt, Artificial Sequence
  Description of Artificial Sequence: Synthetic oligonucleotide
aucccgguaugcaggaguc

SEQ ID NO: 1597656 - RNA, 19 nt, Artificial Sequence
  Description of Artificial Sequence: Synthetic oligonucleotide
cguuuuacagcacgaagug

SEQ ID NO: 1597657 - RNA, 19 nt, Artificial Sequence
  Description of Artificial Sequence: Synthetic oligonucleotide
ugauuccugugauucuguu

SEQ ID NO: 1597658 - RNA, 19 nt, Artificial Sequence
  Description of Artificial Sequence: Synthetic oligonucleotide
aaucgugccgguaggcuuu

SEQ ID NO: 1597659 - RNA, 19 nt, Artificial Sequence
  Description of Artificial Sequence: Synthetic oligonucleotide
caaaucccgguaugcagga

SEQ ID NO: 1597660 - RNA, 19 nt, Artificial Sequence
  Description of Artificial Sequence: Synthetic oligonucleotide
gcucuguaaggugaauggg

SEQ ID NO: 1597661 - RNA, 19 nt, Artificial Sequence
  Description of Artificial Sequence: Synthetic oligonucleotide
ugcucacuaaggugucuaa

SEQ ID NO: 1597662 - RNA, 19 nt, Artificial Sequence
  Description of Artificial Sequence: Synthetic oligonucleotide
auaugcuuucacucccgua

SEQ ID NO: 1597663 - RNA, 19 nt, Artificial Sequence
  Description of Artificial Sequence: Synthetic oligonucleotide
uaugguugcuaagguguau

SEQ ID NO: 1597664 - RNA, 19 nt, Artificial Sequence
  Description of Artificial Sequence: Synthetic oligonucleotide
accucccgauacaaauccc

SEQ ID NO: 1597665 - RNA, 19 nt, Artificial Sequence
  Description of Artificial Sequence: Synthetic oligonucleotide
uggugaugugugagauaug

SEQ ID NO: 1597666 - RNA, 19 nt, Artificial Sequence
  Description of Artificial Sequence: Synthetic oligonucleotide
guugagcgaugagcgaugc

SEQ ID NO: 1597667 - RNA, 19 nt, Artificial Sequence
  Description of Artificial Sequence: Synthetic oligonucleotide
gguuuguaguuuauucuuc

SEQ ID NO: 1597668 - RNA, 19 nt, Artificial Sequence
  Description of Artificial Sequence: Synthetic oligonucleotide
uccugugauucuguugcaa

SEQ ID NO: 1597669 - RNA, 19 nt, Artificial Sequence
  Description of Artificial Sequence: Synthetic oligonucleotide
acaccgaucaugggguccu

SEQ ID NO: 1597670 - RNA, 19 nt, Artificial Sequence
  Description of Artificial Sequence: Synthetic oligonucleotide
cucuuguguauuuuauagu

SEQ ID NO: 1597671 - RNA, 19 nt, Artificial Sequence
  Description of Artificial Sequence: Synthetic oligonucleotide
uggugccuuucucgugugc

SEQ ID NO: 1597672 - RNA, 19 nt, Artificial Sequence
  Description of Artificial Sequence: Synthetic oligonucleotide
ugcucagggacgaguuaua

SEQ ID NO: 1597673 - RNA, 19 nt, Artificial Sequence
  Description of Artificial Sequence: Synthetic oligonucleotide
auggguuguuugaacauuu

SEQ ID NO: 1597674 - RNA, 19 nt, Artificial Sequence
  Description of Artificial Sequence: Synthetic oligonucleotide
cugggccuugacucucugc

SEQ ID NO: 1597675 - RNA, 19 nt, Artificial Sequence
  Description of Artificial Sequence: Synthetic oligonucleotide
agcgaugcgcucugacuaa

SEQ ID NO: 1597676 - RNA, 19 nt, Artificial Sequence
  Description of Artificial Sequence: Synthetic oligonucleotide
augauuccugugauucugu

SEQ ID NO: 1597677 - RNA, 19 nt, Artificial Sequence
  Description of Artificial Sequence: Synthetic oligonucleotide
ggcuuggaaaguugguauc

SEQ ID NO: 1597678 - RNA, 19 nt, Artificial Sequence
  Description of Artificial Sequence: Synthetic oligonucleotide
accucaagguuuccccaaa

SEQ ID NO: 1597679 - RNA, 19 nt, Artificial Sequence
  Description of Artificial Sequence: Synthetic oligonucleotide
ucguugcagcuaaacgguu

SEQ ID NO: 1597680 - RNA, 19 nt, Artificial Sequence
  Description of Artificial Sequence: Synthetic oligonucleotide
caccgguuacacucauaug

SEQ ID NO: 1597681 - RNA, 19 nt, Artificial Sequence
  Description of Artificial Sequence: Synthetic oligonucleotide
gugccgguaggcuuuccca

SEQ ID NO: 1597682 - RNA, 19 nt, Artificial Sequence
  Description of Artificial Sequence: Synthetic oligonucleotide
ggacgaguuauagcugaag

SEQ ID NO: 1597683 - RNA, 19 nt, Artificial Sequence
  Description of Artificial Sequence: Synthetic oligonucleotide
ggggaaugucauucucugc

SEQ ID NO: 1597684 - RNA, 19 nt, Artificial Sequence
  Description of Artificial Sequence: Synthetic oligonucleotide
uugcagcuaaacgguuucu

SEQ ID NO: 1597685 - RNA, 19 nt, Artificial Sequence
  Description of Artificial Sequence: Synthetic oligonucleotide
augcugguugagcgaugag

SEQ ID NO: 1597686 - RNA, 19 nt, Artificial Sequence
  Description of Artificial Sequence: Synthetic oligonucleotide
gaaucgugccgguaggcuu

SEQ ID NO: 1597687 - RNA, 19 nt, Artificial Sequence
  Description of Artificial Sequence: Synthetic oligonucleotide
gugucuaaucugccggaaa

SEQ ID NO: 1597688 - RNA, 19 nt, Artificial Sequence
  Description of Artificial Sequence: Synthetic oligonucleotide
cugccauccaugguccuuc

SEQ ID NO: 1597689 - RNA, 19 nt, Artificial Sequence
  Description of Artificial Sequence: Synthetic oligonucleotide
ccucaaauguuggaccaag

SEQ ID NO: 1597690 - RNA, 19 nt, Artificial Sequence
  Description of Artificial Sequence: Synthetic oligonucleotide
auucuguugcaaggaugcu

SEQ ID NO: 1597691 - RNA, 19 nt, Artificial Sequence
  Description of Artificial Sequence: Synthetic oligonucleotide
aguuccucuuguguauuuu

SEQ ID NO: 1597692 - RNA, 19 nt, Artificial Sequence
  Description of Artificial Sequence: Synthetic oligonucleotide
gucucugguguuucuuaaa

SEQ ID NO: 1597693 - RNA, 19 nt, Artificial Sequence
  Description of Artificial Sequence: Synthetic oligonucleotide
acacuaggcuuggaaaguu

SEQ ID NO: 1597694 - RNA, 19 nt, Artificial Sequence
  Description of Artificial Sequence: Synthetic oligonucleotide
ucacaccgaucaugggguc

SEQ ID NO: 1597695 - RNA, 19 nt, Artificial Sequence
  Description of Artificial Sequence: Synthetic oligonucleotide
ccggggauaaguccacagc

SEQ ID NO: 1597696 - RNA, 19 nt, Artificial Sequence
  Description of Artificial Sequence: Synthetic oligonucleotide
ucacucccguaugaacagu

SEQ ID NO: 1597697 - RNA, 19 nt, Artificial Sequence
  Description of Artificial Sequence: Synthetic oligonucleotide
acgugcucacuaagguguc

SEQ ID NO: 1597698 - RNA, 19 nt, Artificial Sequence
  Description of Artificial Sequence: Synthetic oligonucleotide
cuccuuucuccaacuggga

SEQ ID NO: 1597699 - RNA, 19 nt, Artificial Sequence
  Description of Artificial Sequence: Synthetic oligonucleotide
cuaaucugccggaaaguuu

SEQ ID NO: 1597700 - RNA, 19 nt, Artificial Sequence
  Description of Artificial Sequence: Synthetic oligonucleotide
ggaccaagcugauguucug

SEQ ID NO: 1597701 - RNA, 19 nt, Artificial Sequence
  Description of Artificial Sequence: Synthetic oligonucleotide
gacauuugucacagacgaa

SEQ ID NO: 1597702 - RNA, 19 nt, Artificial Sequence
  Description of Artificial Sequence: Synthetic oligonucleotide
gcucagggacgaguuauag

SEQ ID NO: 1597703 - RNA, 19 nt, Artificial Sequence
  Description of Artificial Sequence: Synthetic oligonucleotide
gguugagcgaugagcgaug

SEQ ID NO: 1597704 - RNA, 19 nt, Artificial Sequence
  Description of Artificial Sequence: Synthetic oligonucleotide
ccguaugaacaguuuuaug

SEQ ID NO: 1597705 - RNA, 19 nt, Artificial Sequence
  Description of Artificial Sequence: Synthetic oligonucleotide
uuggaaccucaagguuucc

SEQ ID NO: 1597706 - RNA, 19 nt, Artificial Sequence
  Description of Artificial Sequence: Synthetic oligonucleotide
gcuaaacgguuucucucca

SEQ ID NO: 1597707 - RNA, 19 nt, Artificial Sequence
  Description of Artificial Sequence: Synthetic oligonucleotide
gcagcuaaacgguuucucu

SEQ ID NO: 1597708 - RNA, 19 nt, Artificial Sequence
  Description of Artificial Sequence: Synthetic oligonucleotide
cuaggcuuggaaaguuggu

SEQ ID NO: 1597709 - RNA, 19 nt, Artificial Sequence
  Description of Artificial Sequence: Synthetic oligonucleotide
caagcaucaccucccgaua

SEQ ID NO: 1597710 - RNA, 19 nt, Artificial Sequence
  Description of Artificial Sequence: Synthetic oligonucleotide
cugguugagcgaugagcga

SEQ ID NO: 1597711 - RNA, 19 nt, Artificial Sequence
  Description of Artificial Sequence: Synthetic oligonucleotide
ccacggauucccuggugcc

SEQ ID NO: 1597712 - RNA, 19 nt, Artificial Sequence
  Description of Artificial Sequence: Synthetic oligonucleotide
auccgcuggugauguguga

SEQ ID NO: 1597713 - RNA, 19 nt, Artificial Sequence
  Description of Artificial Sequence: Synthetic oligonucleotide
gauucccuggugccuuucu

SEQ ID NO: 1597714 - RNA, 19 nt, Artificial Sequence
  Description of Artificial Sequence: Synthetic oligonucleotide
ugccauccaugguccuucu

SEQ ID NO: 1597715 - RNA, 19 nt, Artificial Sequence
  Description of Artificial Sequence: Synthetic oligonucleotide
cauucccuuuugugaguca

SEQ ID NO: 1597716 - RNA, 19 nt, Artificial Sequence
  Description of Artificial Sequence: Synthetic oligonucleotide
cgauacaaaucccgguaug

SEQ ID NO: 1597717 - RNA, 19 nt, Artificial Sequence
  Description of Artificial Sequence: Synthetic oligonucleotide
uccucuuacccagguugua

SEQ ID NO: 1597718 - RNA, 19 nt, Artificial Sequence
  Description of Artificial Sequence: Synthetic oligonucleotide
cucugacuaaaggcccuuc

SEQ ID NO: 1597719 - RNA, 19 nt, Artificial Sequence
  Description of Artificial Sequence: Synthetic oligonucleotide
uccccacuccuccggggau

SEQ ID NO: 1597720 - RNA, 19 nt, Artificial Sequence
  Description of Artificial Sequence: Synthetic oligonucleotide
ucccgguaugcaggaguca

SEQ ID NO: 1597721 - RNA, 19 nt, Artificial Sequence
  Description of Artificial Sequence: Synthetic oligonucleotide
cgaugagcgaugccggaag

SEQ ID NO: 1597722 - RNA, 19 nt, Artificial Sequence
  Description of Artificial Sequence: Synthetic oligonucleotide
agcgaugccggaaggcuuu

SEQ ID NO: 1597723 - RNA, 19 nt, Artificial Sequence
  Description of Artificial Sequence: Synthetic oligonucleotide
aucguccucugugagccuu

SEQ ID NO: 1597724 - RNA, 19 nt, Artificial Sequence
  Description of Artificial Sequence: Synthetic oligonucleotide
caugggguccucugggccu

SEQ ID NO: 1597725 - RNA, 19 nt, Artificial Sequence
  Description of Artificial Sequence: Synthetic oligonucleotide
cucacuguagcuggaggcu

SEQ ID NO: 1597726 - RNA, 19 nt, Artificial Sequence
  Description of Artificial Sequence: Synthetic oligonucleotide
ccgaucaugggguccucug

SEQ ID NO: 1597727 - RNA, 19 nt, Artificial Sequence
  Description of Artificial Sequence: Synthetic oligonucleotide
cucaagcaucaccucccga

SEQ ID NO: 1597728 - RNA, 19 nt, Artificial Sequence
  Description of Artificial Sequence: Synthetic oligonucleotide
acggauucccuggugccuu

SEQ ID NO: 1597729 - RNA, 19 nt, Artificial Sequence
  Description of Artificial Sequence: Synthetic oligonucleotide
aucgugccgguaggcuuuc

SEQ ID NO: 1597730 - RNA, 19 nt, Artificial Sequence
  Description of Artificial Sequence: Synthetic oligonucleotide
uggauccgcuggugaugug

SEQ ID NO: 1597731 - RNA, 19 nt, Artificial Sequence
  Description of Artificial Sequence: Synthetic oligonucleotide
augugcucuguaaggugaa

SEQ ID NO: 1597732 - RNA, 19 nt, Artificial Sequence
  Description of Artificial Sequence: Synthetic oligonucleotide
cacacuaggcuuggaaagu

SEQ ID NO: 1597733 - RNA, 19 nt, Artificial Sequence
  Description of Artificial Sequence: Synthetic oligonucleotide
cucuuacccagguuguauu

SEQ ID NO: 1597734 - RNA, 19 nt, Artificial Sequence
  Description of Artificial Sequence: Synthetic oligonucleotide
ccgguaugcaggagucagc

SEQ ID NO: 1597735 - RNA, 19 nt, Artificial Sequence
  Description of Artificial Sequence: Synthetic oligonucleotide
cccgauacaaaucccggua

SEQ ID NO: 1597736 - RNA, 19 nt, Artificial Sequence
  Description of Artificial Sequence: Synthetic oligonucleotide
aggaugaaucgugccggua

SEQ ID NO: 1597737 - RNA, 19 nt, Artificial Sequence
  Description of Artificial Sequence: Synthetic oligonucleotide
gcagcucauuggaucauca

SEQ ID NO: 1597738 - RNA, 19 nt, Artificial Sequence
  Description of Artificial Sequence: Synthetic oligonucleotide
cucugugacuaaacguuuu

SEQ ID NO: 1597739 - RNA, 19 nt, Artificial Sequence
  Description of Artificial Sequence: Synthetic oligonucleotide
acucccguaugaacaguuu

SEQ ID NO: 1597740 - RNA, 19 nt, Artificial Sequence
  Description of Artificial Sequence: Synthetic oligonucleotide
guggauccgcuggugaugu

SEQ ID NO: 1597741 - RNA, 19 nt, Artificial Sequence
  Description of Artificial Sequence: Synthetic oligonucleotide
cgugugcucacuguagcug

SEQ ID NO: 1597742 - RNA, 19 nt, Artificial Sequence
  Description of Artificial Sequence: Synthetic oligonucleotide
cucccguaugaacaguuuu

SEQ ID NO: 1597743 - RNA, 19 nt, Artificial Sequence
  Description of Artificial Sequence: Synthetic oligonucleotide
uggcuccuaggcagcucau

SEQ ID NO: 1597744 - RNA, 19 nt, Artificial Sequence
  Description of Artificial Sequence: Synthetic oligonucleotide
ccuuacauuuguagggccu

SEQ ID NO: 1597745 - RNA, 19 nt, Artificial Sequence
  Description of Artificial Sequence: Synthetic oligonucleotide
gguugcuaagguguauccu

SEQ ID NO: 1597746 - RNA, 19 nt, Artificial Sequence
  Description of Artificial Sequence: Synthetic oligonucleotide
gccgguaggcuuucccaca

SEQ ID NO: 1597747 - RNA, 19 nt, Artificial Sequence
  Description of Artificial Sequence: Synthetic oligonucleotide
ccagaauguguccucaaau

SEQ ID NO: 1597748 - RNA, 19 nt, Artificial Sequence
  Description of Artificial Sequence: Synthetic oligonucleotide
ggugucuaaucugccggaa

SEQ ID NO: 1597749 - RNA, 19 nt, Artificial Sequence
  Description of Artificial Sequence: Synthetic oligonucleotide
guuauagcugaaggacuuu

SEQ ID NO: 1597750 - RNA, 19 nt, Artificial Sequence
  Description of Artificial Sequence: Synthetic oligonucleotide
cgugccgguaggcuuuccc

SEQ ID NO: 1597751 - RNA, 19 nt, Artificial Sequence
  Description of Artificial Sequence: Synthetic oligonucleotide
cugcucagggacgaguuau

SEQ ID NO: 1597752 - RNA, 19 nt, Artificial Sequence
  Description of Artificial Sequence: Synthetic oligonucleotide
ggauccgcuggugaugugu

SEQ ID NO: 1597753 - RNA, 19 nt, Artificial Sequence
  Description of Artificial Sequence: Synthetic oligonucleotide
cacucccguaugaacaguu

SEQ ID NO: 1597754 - RNA, 19 nt, Artificial Sequence
  Description of Artificial Sequence: Synthetic oligonucleotide
guagaacaagugacaucgu

SEQ ID NO: 1597755 - RNA, 19 nt, Artificial Sequence
  Description of Artificial Sequence: Synthetic oligonucleotide
uuucuccaacugggagauc

SEQ ID NO: 1597756 - RNA, 19 nt, Artificial Sequence
  Description of Artificial Sequence: Synthetic oligonucleotide
ccgguuacacucauaugcu

SEQ ID NO: 1597757 - RNA, 19 nt, Artificial Sequence
  Description of Artificial Sequence: Synthetic oligonucleotide
ccucucgccgguguggauc

SEQ ID NO: 1597758 - RNA, 19 nt, Artificial Sequence
  Description of Artificial Sequence: Synthetic oligonucleotide
ggccuugacucucugccau

SEQ ID NO: 1597759 - RNA, 19 nt, Artificial Sequence
  Description of Artificial Sequence: Synthetic oligonucleotide
ggcauucccuuuugugagu

SEQ ID NO: 1597760 - RNA, 19 nt, Artificial Sequence
  Description of Artificial Sequence: Synthetic oligonucleotide
gcuggugaugugugagaua

SEQ ID NO: 1597761 - RNA, 19 nt, Artificial Sequence
  Description of Artificial Sequence: Synthetic oligonucleotide
gccuugacucucugccauc

SEQ ID NO: 1597762 - RNA, 19 nt, Artificial Sequence
  Description of Artificial Sequence: Synthetic oligonucleotide
augggguccucugggccuu

SEQ ID NO: 1597763 - RNA, 19 nt, Artificial Sequence
  Description of Artificial Sequence: Synthetic oligonucleotide
cggggauaaguccacagcu

SEQ ID NO: 1597764 - RNA, 19 nt, Artificial Sequence
  Description of Artificial Sequence: Synthetic oligonucleotide
ucgugccgguaggcuuucc

SEQ ID NO: 1597765 - RNA, 19 nt, Artificial Sequence
  Description of Artificial Sequence: Synthetic oligonucleotide
cccuggugccuuucucgug

SEQ ID NO: 1597766 - RNA, 19 nt, Artificial Sequence
  Description of Artificial Sequence: Synthetic oligonucleotide
gagcgaugccggaaggcuu

SEQ ID NO: 1597767 - RNA, 19 nt, Artificial Sequence
  Description of Artificial Sequence: Synthetic oligonucleotide
ccuuuccaccaugaugcca

SEQ ID NO: 1597768 - RNA, 19 nt, Artificial Sequence
  Description of Artificial Sequence: Synthetic oligonucleotide
cacggauucccuggugccu

SEQ ID NO: 1597769 - RNA, 19 nt, Artificial Sequence
  Description of Artificial Sequence: Synthetic oligonucleotide
ccaugaugccaugaccgaa

SEQ ID NO: 1597770 - RNA, 19 nt, Artificial Sequence
  Description of Artificial Sequence: Synthetic oligonucleotide
ugggguccucugggccuug

SEQ ID NO: 1597771 - RNA, 19 nt, Artificial Sequence
  Description of Artificial Sequence: Synthetic oligonucleotide
cuccggggauaaguccaca

SEQ ID NO: 1597772 - RNA, 19 nt, Artificial Sequence
  Description of Artificial Sequence: Synthetic oligonucleotide
ccaagcugauguucuggcu

SEQ ID NO: 1597773 - RNA, 19 nt, Artificial Sequence
  Description of Artificial Sequence: Synthetic oligonucleotide
ccgauacaaaucccgguau

SEQ ID NO: 1597774 - RNA, 19 nt, Artificial Sequence
  Description of Artificial Sequence: Synthetic oligonucleotide
gggacgaguuauagcugaa

SEQ ID NO: 1597775 - RNA, 19 nt, Artificial Sequence
  Description of Artificial Sequence: Synthetic oligonucleotide
gcucacuaaggugucuaau

SEQ ID NO: 1597776 - RNA, 19 nt, Artificial Sequence
  Description of Artificial Sequence: Synthetic oligonucleotide
ggauucccuggugccuuuc

SEQ ID NO: 1597777 - RNA, 19 nt, Artificial Sequence
  Description of Artificial Sequence: Synthetic oligonucleotide
cucugccauccaugguccu

SEQ ID NO: 1597778 - RNA, 19 nt, Artificial Sequence
  Description of Artificial Sequence: Synthetic oligonucleotide
cccguaugaacaguuuuau

SEQ ID NO: 1597779 - RNA, 19 nt, Artificial Sequence
  Description of Artificial Sequence: Synthetic oligonucleotide
caccgaucaugggguccuc

SEQ ID NO: 1597780 - RNA, 19 nt, Artificial Sequence
  Description of Artificial Sequence: Synthetic oligonucleotide
gcgaugccggaaggcuuug

SEQ ID NO: 1597781 - RNA, 19 nt, Artificial Sequence
  Description of Artificial Sequence: Synthetic oligonucleotide
caucguccucugugagccu

SEQ ID NO: 1597782 - RNA, 19 nt, Artificial Sequence
  Description of Artificial Sequence: Synthetic oligonucleotide
gcgaugcgcucugacuaaa

SEQ ID NO: 1597783 - RNA, 19 nt, Artificial Sequence
  Description of Artificial Sequence: Synthetic oligonucleotide
ccucuuacccagguuguau

SEQ ID NO: 1597784 - RNA, 19 nt, Artificial Sequence
  Description of Artificial Sequence: Synthetic oligonucleotide
cgcacuccucacauucaaa

SEQ ID NO: 1597785 - RNA, 19 nt, Artificial Sequence
  Description of Artificial Sequence: Synthetic oligonucleotide
cgaugccggaaggcuuugc

SEQ ID NO: 1597786 - RNA, 19 nt, Artificial Sequence
  Description of Artificial Sequence: Synthetic oligonucleotide
ccucaagguuuccccaaau

SEQ ID NO: 1597787 - RNA, 19 nt, Artificial Sequence
  Description of Artificial Sequence: Synthetic oligonucleotide
ccuuucucgugugcucacu

SEQ ID NO: 1597788 - RNA, 19 nt, Artificial Sequence
  Description of Artificial Sequence: Synthetic oligonucleotide
ggcuccuaggcagcucauu

SEQ ID NO: 1597789 - RNA, 19 nt, Artificial Sequence
  Description of Artificial Sequence: Synthetic oligonucleotide
cgcuggugaugugugagau

SEQ ID NO: 1597790 - RNA, 19 nt, Artificial Sequence
  Description of Artificial Sequence: Synthetic oligonucleotide
cggauucccuggugccuuu

SEQ ID NO: 1597791 - RNA, 19 nt, Artificial Sequence
  Description of Artificial Sequence: Synthetic oligonucleotide
uguaaugucaccaucaggc

SEQ ID NO: 1597792 - RNA, 19 nt, Artificial Sequence
  Description of Artificial Sequence: Synthetic oligonucleotide
uuaauauucucaacaaugg

SEQ ID NO: 1597793 - RNA, 19 nt, Artificial Sequence
  Description of Artificial Sequence: Synthetic oligonucleotide
uuaacaugauuauuuaugg

SEQ ID NO: 1597794 - RNA, 19 nt, Artificial Sequence
  Description of Artificial Sequence: Synthetic oligonucleotide
aauauucucaacaauggac

SEQ ID NO: 1597795 - RNA, 19 nt, Artificial Sequence
  Description of Artificial Sequence: Synthetic oligonucleotide
aaagugagccaacauauuc

SEQ ID NO: 1597796 - RNA, 19 nt, Artificial Sequence
  Description of Artificial Sequence: Synthetic oligonucleotide
aguaacugcacgcaugugc

SEQ ID NO: 1597797 - RNA, 19 nt, Artificial Sequence
  Description of Artificial Sequence: Synthetic oligonucleotide
agaaucaagagacacuugg

SEQ ID NO: 1597798 - RNA, 19 nt, Artificial Sequence
  Description of Artificial Sequence: Synthetic oligonucleotide
agaaauaccuacaauaggg

SEQ ID NO: 1597799 - RNA, 19 nt, Artificial Sequence
  Description of Artificial Sequence: Synthetic oligonucleotide
auuuuguucagaaggaucc

SEQ ID NO: 1597800 - RNA, 19 nt, Artificial Sequence
  Description of Artificial Sequence: Synthetic oligonucleotide
ugccaaaucaaucccagcg

SEQ ID NO: 1597801 - RNA, 19 nt, Artificial Sequence
  Description of Artificial Sequence: Synthetic oligonucleotide
aaauaccuacaauaggguc

SEQ ID NO: 1597802 - RNA, 19 nt, Artificial Sequence
  Description of Artificial Sequence: Synthetic oligonucleotide
aaacaggagggugugaugc

SEQ ID NO: 1597803 - RNA, 19 nt, Artificial Sequence
  Description of Artificial Sequence: Synthetic oligonucleotide
ugugcuucagucaaacagg

SEQ ID NO: 1597804 - RNA, 19 nt, Artificial Sequence
  Description of Artificial Sequence: Synthetic oligonucleotide
aguucucugaaucacacag

SEQ ID NO: 1597805 - RNA, 19 nt, Artificial Sequence
  Description of Artificial Sequence: Synthetic oligonucleotide
aauguaacugccccaguuc

SEQ ID NO: 1597806 - RNA, 19 nt, Artificial Sequence
  Description of Artificial Sequence: Synthetic oligonucleotide
uguacagauagccauuuug

SEQ ID NO: 1597807 - RNA, 19 nt, Artificial Sequence
  Description of Artificial Sequence: Synthetic oligonucleotide
uacaauaauuaccaaggca

SEQ ID NO: 1597808 - RNA, 19 nt, Artificial Sequence
  Description of Artificial Sequence: Synthetic oligonucleotide
acagauagccauuuuguuc

SEQ ID NO: 1597809 - RNA, 19 nt, Artificial Sequence
  Description of Artificial Sequence: Synthetic oligonucleotide
guuaacaugauuauuuaug

SEQ ID NO: 1597810 - RNA, 19 nt, Artificial Sequence
  Description of Artificial Sequence: Synthetic oligonucleotide
uaaugucaccaucaggccg

SEQ ID NO: 1597811 - RNA, 19 nt, Artificial Sequence
  Description of Artificial Sequence: Synthetic oligonucleotide
guugacuucauuucucgcg

SEQ ID NO: 1597812 - RNA, 19 nt, Artificial Sequence
  Description of Artificial Sequence: Synthetic oligonucleotide
acuugacaaacacaguggg

SEQ ID NO: 1597813 - RNA, 19 nt, Artificial Sequence
  Description of Artificial Sequence: Synthetic oligonucleotide
aguugaacagagcacaaug

SEQ ID NO: 1597814 - RNA, 19 nt, Artificial Sequence
  Description of Artificial Sequence: Synthetic oligonucleotide
gacacaauguaacugcccc

SEQ ID NO: 1597815 - RNA, 19 nt, Artificial Sequence
  Description of Artificial Sequence: Synthetic oligonucleotide
acaauaauuaccaaggcaa

SEQ ID NO: 1597816 - RNA, 19 nt, Artificial Sequence
  Description of Artificial Sequence: Synthetic oligonucleotide
aaugucaccaucaggccgg

SEQ ID NO: 1597817 - RNA, 19 nt, Artificial Sequence
  Description of Artificial Sequence: Synthetic oligonucleotide
ugaacagagcacaaugucu

SEQ ID NO: 1597818 - RNA, 19 nt, Artificial Sequence
  Description of Artificial Sequence: Synthetic oligonucleotide
ugaacauugucuugguuca

SEQ ID NO: 1597819 - RNA, 19 nt, Artificial Sequence
  Description of Artificial Sequence: Synthetic oligonucleotide
aggagaaauaccuacaaua

SEQ ID NO: 1597820 - RNA, 19 nt, Artificial Sequence
  Description of Artificial Sequence: Synthetic oligonucleotide
uaauauucucaacaaugga

SEQ ID NO: 1597821 - RNA, 19 nt, Artificial Sequence
  Description of Artificial Sequence: Synthetic oligonucleotide
cugaacauugucuugguuc

SEQ ID NO: 1597822 - RNA, 19 nt, Artificial Sequence
  Description of Artificial Sequence: Synthetic oligonucleotide
aauggacacaauguaacug

SEQ ID NO: 1597823 - RNA, 19 nt, Artificial Sequence
  Description of Artificial Sequence: Synthetic oligonucleotide
ucaagagacacuugguuac

SEQ ID NO: 1597824 - RNA, 19 nt, Artificial Sequence
  Description of Artificial Sequence: Synthetic oligonucleotide
uccuacauuuucuaaggcc

SEQ ID NO: 1597825 - RNA, 19 nt, Artificial Sequence
  Description of Artificial Sequence: Synthetic oligonucleotide
uuucaguucuauaacuacu

SEQ ID NO: 1597826 - RNA, 19 nt, Artificial Sequence
  Description of Artificial Sequence: Synthetic oligonucleotide
aaccccuacaaucacuucu

SEQ ID NO: 1597827 - RNA, 19 nt, Artificial Sequence
  Description of Artificial Sequence: Synthetic oligonucleotide
uucacgagagggaacaugu

SEQ ID NO: 1597828 - RNA, 19 nt, Artificial Sequence
  Description of Artificial Sequence: Synthetic oligonucleotide
aaaucaaccccuacaauca

SEQ ID NO: 1597829 - RNA, 19 nt, Artificial Sequence
  Description of Artificial Sequence: Synthetic oligonucleotide
acuugguuaccauuuugac

SEQ ID NO: 1597830 - RNA, 19 nt, Artificial Sequence
  Description of Artificial Sequence: Synthetic oligonucleotide
aaucaaccccuacaaucac

SEQ ID NO: 1597831 - RNA, 19 nt, Artificial Sequence
  Description of Artificial Sequence: Synthetic oligonucleotide
aaucaagagacacuugguu

SEQ ID NO: 1597832 - RNA, 19 nt, Artificial Sequence
  Description of Artificial Sequence: Synthetic oligonucleotide
auuugaacggucaaaagcu

SEQ ID NO: 1597833 - RNA, 19 nt, Artificial Sequence
  Description of Artificial Sequence: Synthetic oligonucleotide
auugucuugguucacgaga

SEQ ID NO: 1597834 - RNA, 19 nt, Artificial Sequence
  Description of Artificial Sequence: Synthetic oligonucleotide
acuugagaguuaccggucc

SEQ ID NO: 1597835 - RNA, 19 nt, Artificial Sequence
  Description of Artificial Sequence: Synthetic oligonucleotide
aaacuuagaacaaaguguu

SEQ ID NO: 1597836 - RNA, 19 nt, Artificial Sequence
  Description of Artificial Sequence: Synthetic oligonucleotide
uugucuugguucacgagag

SEQ ID NO: 1597837 - RNA, 19 nt, Artificial Sequence
  Description of Artificial Sequence: Synthetic oligonucleotide
uugacaaacacagugggaa

SEQ ID NO: 1597838 - RNA, 19 nt, Artificial Sequence
  Description of Artificial Sequence: Synthetic oligonucleotide
ucuacagggacucaagcua

SEQ ID NO: 1597839 - RNA, 19 nt, Artificial Sequence
  Description of Artificial Sequence: Synthetic oligonucleotide
aaucccagcgucaacagug

SEQ ID NO: 1597840 - RNA, 19 nt, Artificial Sequence
  Description of Artificial Sequence: Synthetic oligonucleotide
cacacaagccaucagacug

SEQ ID NO: 1597841 - RNA, 19 nt, Artificial Sequence
  Description of Artificial Sequence: Synthetic oligonucleotide
uguauuugaacggucaaaa

SEQ ID NO: 1597842 - RNA, 19 nt, Artificial Sequence
  Description of Artificial Sequence: Synthetic oligonucleotide
aauucgacgcuaguaacug

SEQ ID NO: 1597843 - RNA, 19 nt, Artificial Sequence
  Description of Artificial Sequence: Synthetic oligonucleotide
aacauugucuugguucacg

SEQ ID NO: 1597844 - RNA, 19 nt, Artificial Sequence
  Description of Artificial Sequence: Synthetic oligonucleotide
ggaacauguauuugaacgg

SEQ ID NO: 1597845 - RNA, 19 nt, Artificial Sequence
  Description of Artificial Sequence: Synthetic oligonucleotide
gacgcuaguaacugcacgc

SEQ ID NO: 1597846 - RNA, 19 nt, Artificial Sequence
  Description of Artificial Sequence: Synthetic oligonucleotide
uugacuucauuucucgcga

SEQ ID NO: 1597847 - RNA, 19 nt, Artificial Sequence
  Description of Artificial Sequence: Synthetic oligonucleotide
uucuaaggcccacagguga

SEQ ID NO: 1597848 - RNA, 19 nt, Artificial Sequence
  Description of Artificial Sequence: Synthetic oligonucleotide
auaauuaccaaggcaaagu

SEQ ID NO: 1597849 - RNA, 19 nt, Artificial Sequence
  Description of Artificial Sequence: Synthetic oligonucleotide
cacacagacaauaucaaca

SEQ ID NO: 1597850 - RNA, 19 nt, Artificial Sequence
  Description of Artificial Sequence: Synthetic oligonucleotide
ucugagacuggcagugacg

SEQ ID NO: 1597851 - RNA, 19 nt, Artificial Sequence
  Description of Artificial Sequence: Synthetic oligonucleotide
uuucucgcgagggagaaag

SEQ ID NO: 1597852 - RNA, 19 nt, Artificial Sequence
  Description of Artificial Sequence: Synthetic oligonucleotide
uugaacagagcacaauguc

SEQ ID NO: 1597853 - RNA, 19 nt, Artificial Sequence
  Description of Artificial Sequence: Synthetic oligonucleotide
aauagggucacagcacuug

SEQ ID NO: 1597854 - RNA, 19 nt, Artificial Sequence
  Description of Artificial Sequence: Synthetic oligonucleotide
auauucucaacaauggaca

SEQ ID NO: 1597855 - RNA, 19 nt, Artificial Sequence
  Description of Artificial Sequence: Synthetic oligonucleotide
agagagacaagagguagcg

SEQ ID NO: 1597856 - RNA, 19 nt, Artificial Sequence
  Description of Artificial Sequence: Synthetic oligonucleotide
cacagcaugaccagcaaac

SEQ ID NO: 1597857 - RNA, 19 nt, Artificial Sequence
  Description of Artificial Sequence: Synthetic oligonucleotide
cacuucucccuuaaaagag

SEQ ID NO: 1597858 - RNA, 19 nt, Artificial Sequence
  Description of Artificial Sequence: Synthetic oligonucleotide
agacuugagaguuaccggu

SEQ ID NO: 1597859 - RNA, 19 nt, Artificial Sequence
  Description of Artificial Sequence: Synthetic oligonucleotide
ccuacauuuucuaaggccc

SEQ ID NO: 1597860 - RNA, 19 nt, Artificial Sequence
  Description of Artificial Sequence: Synthetic oligonucleotide
ugaacggucaaaagcucug

SEQ ID NO: 1597861 - RNA, 19 nt, Artificial Sequence
  Description of Artificial Sequence: Synthetic oligonucleotide
uaucuacagggacucaagc

SEQ ID NO: 1597862 - RNA, 19 nt, Artificial Sequence
  Description of Artificial Sequence: Synthetic oligonucleotide
cagauagccauuuuguuca

SEQ ID NO: 1597863 - RNA, 19 nt, Artificial Sequence
  Description of Artificial Sequence: Synthetic oligonucleotide
uucgacgcuaguaacugca

SEQ ID NO: 1597864 - RNA, 19 nt, Artificial Sequence
  Description of Artificial Sequence: Synthetic oligonucleotide
agaguuaccgguccuguug

SEQ ID NO: 1597865 - RNA, 19 nt, Artificial Sequence
  Description of Artificial Sequence: Synthetic oligonucleotide
uucucaacaauggacacaa

SEQ ID NO: 1597866 - RNA, 19 nt, Artificial Sequence
  Description of Artificial Sequence: Synthetic oligonucleotide
auagcuugaauuccuuugu

SEQ ID NO: 1597867 - RNA, 19 nt, Artificial Sequence
  Description of Artificial Sequence: Synthetic oligonucleotide
ucugcguugacuucauuuc

SEQ ID NO: 1597868 - RNA, 19 nt, Artificial Sequence
  Description of Artificial Sequence: Synthetic oligonucleotide
aguauucugggcuccccac

SEQ ID NO: 1597869 - RNA, 19 nt, Artificial Sequence
  Description of Artificial Sequence: Synthetic oligonucleotide
agacaauaucaacaagcag

SEQ ID NO: 1597870 - RNA, 19 nt, Artificial Sequence
  Description of Artificial Sequence: Synthetic oligonucleotide
aacaagcagagagacaaga

SEQ ID NO: 1597871 - RNA, 19 nt, Artificial Sequence
  Description of Artificial Sequence: Synthetic oligonucleotide
aacaugccucuucugaagu

SEQ ID NO: 1597872 - RNA, 19 nt, Artificial Sequence
  Description of Artificial Sequence: Synthetic oligonucleotide
auaccuacaauagggucac

SEQ ID NO: 1597873 - RNA, 19 nt, Artificial Sequence
  Description of Artificial Sequence: Synthetic oligonucleotide
uaauuaccaaggcaaaguu

SEQ ID NO: 1597874 - RNA, 19 nt, Artificial Sequence
  Description of Artificial Sequence: Synthetic oligonucleotide
auagccauuuuguucagaa

SEQ ID NO: 1597875 - RNA, 19 nt, Artificial Sequence
  Description of Artificial Sequence: Synthetic oligonucleotide
aacauguauuugaacgguc

SEQ ID NO: 1597876 - RNA, 19 nt, Artificial Sequence
  Description of Artificial Sequence: Synthetic oligonucleotide
ugaugccaaaucaauccca

SEQ ID NO: 1597877 - RNA, 19 nt, Artificial Sequence
  Description of Artificial Sequence: Synthetic oligonucleotide
uguuaacaugauuauuuau

SEQ ID NO: 1597878 - RNA, 19 nt, Artificial Sequence
  Description of Artificial Sequence: Synthetic oligonucleotide
agaaagugagccaacauau

SEQ ID NO: 1597879 - RNA, 19 nt, Artificial Sequence
  Description of Artificial Sequence: Synthetic oligonucleotide
aggggugcagaucuuguuc

SEQ ID NO: 1597880 - RNA, 19 nt, Artificial Sequence
  Description of Artificial Sequence: Synthetic oligonucleotide
uauucucaacaauggacac

SEQ ID NO: 1597881 - RNA, 19 nt, Artificial Sequence
  Description of Artificial Sequence: Synthetic oligonucleotide
aaguuuggaaaguuuuguu

SEQ ID NO: 1597882 - RNA, 19 nt, Artificial Sequence
  Description of Artificial Sequence: Synthetic oligonucleotide
aagugagccaacauauucu

SEQ ID NO: 1597883 - RNA, 19 nt, Artificial Sequence
  Description of Artificial Sequence: Synthetic oligonucleotide
uucccaggcaaucaccuac

SEQ ID NO: 1597884 - RNA, 19 nt, Artificial Sequence
  Description of Artificial Sequence: Synthetic oligonucleotide
ucuuuguaaugucaccauc

SEQ ID NO: 1597885 - RNA, 19 nt, Artificial Sequence
  Description of Artificial Sequence: Synthetic oligonucleotide
uguucccaggcaaucaccu

SEQ ID NO: 1597886 - RNA, 19 nt, Artificial Sequence
  Description of Artificial Sequence: Synthetic oligonucleotide
cagacuugagaguuaccgg

SEQ ID NO: 1597887 - RNA, 19 nt, Artificial Sequence
  Description of Artificial Sequence: Synthetic oligonucleotide
uuucuaaggcccacaggug

SEQ ID NO: 1597888 - RNA, 19 nt, Artificial Sequence
  Description of Artificial Sequence: Synthetic oligonucleotide
cauuuucuaaggcccacag

SEQ ID NO: 1597889 - RNA, 19 nt, Artificial Sequence
  Description of Artificial Sequence: Synthetic oligonucleotide
gacaguagcacgugagaac

SEQ ID NO: 1597890 - RNA, 19 nt, Artificial Sequence
  Description of Artificial Sequence: Synthetic oligonucleotide
uacauagccuugcuuuggc

SEQ ID NO: 1597891 - RNA, 19 nt, Artificial Sequence
  Description of Artificial Sequence: Synthetic oligonucleotide
gcacuugacaaacacagug

SEQ ID NO: 1597892 - RNA, 19 nt, Artificial Sequence
  Description of Artificial Sequence: Synthetic oligonucleotide
gaaguaggggugcagaucu

SEQ ID NO: 1597893 - RNA, 19 nt, Artificial Sequence
  Description of Artificial Sequence: Synthetic oligonucleotide
gucuugguucacgagaggg

SEQ ID NO: 1597894 - RNA, 19 nt, Artificial Sequence
  Description of Artificial Sequence: Synthetic oligonucleotide
aaggaucccaggccgcauc

SEQ ID NO: 1597895 - RNA, 19 nt, Artificial Sequence
  Description of Artificial Sequence: Synthetic oligonucleotide
auucgacgcuaguaacugc

SEQ ID NO: 1597896 - RNA, 19 nt, Artificial Sequence
  Description of Artificial Sequence: Synthetic oligonucleotide
ugccucuucugaaguaggg

SEQ ID NO: 1597897 - RNA, 19 nt, Artificial Sequence
  Description of Artificial Sequence: Synthetic oligonucleotide
gcagacuugagaguuaccg

SEQ ID NO: 1597898 - RNA, 19 nt, Artificial Sequence
  Description of Artificial Sequence: Synthetic oligonucleotide
gcuacaggaagccagugcc

SEQ ID NO: 1597899 - RNA, 19 nt, Artificial Sequence
  Description of Artificial Sequence: Synthetic oligonucleotide
uggacacaauguaacugcc

SEQ ID NO: 1597900 - RNA, 19 nt, Artificial Sequence
  Description of Artificial Sequence: Synthetic oligonucleotide
gauuauuuaugggauugca

SEQ ID NO: 1597901 - RNA, 19 nt, Artificial Sequence
  Description of Artificial Sequence: Synthetic oligonucleotide
cuugguuaccauuuugaca

SEQ ID NO: 1597902 - RNA, 19 nt, Artificial Sequence
  Description of Artificial Sequence: Synthetic oligonucleotide
acuuagaacaaaguguuua

SEQ ID NO: 1597903 - RNA, 19 nt, Artificial Sequence
  Description of Artificial Sequence: Synthetic oligonucleotide
gacaagagguagcgggacg

SEQ ID NO: 1597904 - RNA, 19 nt, Artificial Sequence
  Description of Artificial Sequence: Synthetic oligonucleotide
agcgggacgggacagauaa

SEQ ID NO: 1597905 - RNA, 19 nt, Artificial Sequence
  Description of Artificial Sequence: Synthetic oligonucleotide
caaaguugaacagagcaca

SEQ ID NO: 1597906 - RNA, 19 nt, Artificial Sequence
  Description of Artificial Sequence: Synthetic oligonucleotide
cuaucuacagggacucaag

SEQ ID NO: 1597907 - RNA, 19 nt, Artificial Sequence
  Description of Artificial Sequence: Synthetic oligonucleotide
aaaucaaucccagcgucaa

SEQ ID NO: 1597908 - RNA, 19 nt, Artificial Sequence
  Description of Artificial Sequence: Synthetic oligonucleotide
uuugaacggucaaaagcuc

SEQ ID NO: 1597909 - RNA, 19 nt, Artificial Sequence
  Description of Artificial Sequence: Synthetic oligonucleotide
auguaacugccccaguucu

SEQ ID NO: 1597910 - RNA, 19 nt, Artificial Sequence
  Description of Artificial Sequence: Synthetic oligonucleotide
ugugagugucacauucuac

SEQ ID NO: 1597911 - RNA, 19 nt, Artificial Sequence
  Description of Artificial Sequence: Synthetic oligonucleotide
caaucaccuaccucaagug

SEQ ID NO: 1597912 - RNA, 19 nt, Artificial Sequence
  Description of Artificial Sequence: Synthetic oligonucleotide
ugucggugguuccaguuca

SEQ ID NO: 1597913 - RNA, 19 nt, Artificial Sequence
  Description of Artificial Sequence: Synthetic oligonucleotide
uuccuacauuuucuaaggc

SEQ ID NO: 1597914 - RNA, 19 nt, Artificial Sequence
  Description of Artificial Sequence: Synthetic oligonucleotide
ucaaccccuacaaucacuu

SEQ ID NO: 1597915 - RNA, 19 nt, Artificial Sequence
  Description of Artificial Sequence: Synthetic oligonucleotide
ugauuauuuaugggauugc

SEQ ID NO: 1597916 - RNA, 19 nt, Artificial Sequence
  Description of Artificial Sequence: Synthetic oligonucleotide
auagccuugcuuuggcucu

SEQ ID NO: 1597917 - RNA, 19 nt, Artificial Sequence
  Description of Artificial Sequence: Synthetic oligonucleotide
acaagagguagcgggacgg

SEQ ID NO: 1597918 - RNA, 19 nt, Artificial Sequence
  Description of Artificial Sequence: Synthetic oligonucleotide
caggccggcaauucgacgc

SEQ ID NO: 1597919 - RNA, 19 nt, Artificial Sequence
  Description of Artificial Sequence: Synthetic oligonucleotide
cucccuuaaaagaggcagg

SEQ ID NO: 1597920 - RNA, 19 nt, Artificial Sequence
  Description of Artificial Sequence: Synthetic oligonucleotide
cauagccuugcuuuggcuc

SEQ ID NO: 1597921 - RNA, 19 nt, Artificial Sequence
  Description of Artificial Sequence: Synthetic oligonucleotide
ugugcacaguugaggacag

SEQ ID NO: 1597922 - RNA, 19 nt, Artificial Sequence
  Description of Artificial Sequence: Synthetic oligonucleotide
uuaccgguccuguugacau

SEQ ID NO: 1597923 - RNA, 19 nt, Artificial Sequence
  Description of Artificial Sequence: Synthetic oligonucleotide
ucauuucucgcgagggaga

SEQ ID NO: 1597924 - RNA, 19 nt, Artificial Sequence
  Description of Artificial Sequence: Synthetic oligonucleotide
guccuguugacauggggcc

SEQ ID NO: 1597925 - RNA, 19 nt, Artificial Sequence
  Description of Artificial Sequence: Synthetic oligonucleotide
cuucacacaagccaucaga

SEQ ID NO: 1597926 - RNA, 19 nt, Artificial Sequence
  Description of Artificial Sequence: Synthetic oligonucleotide
guucagucugcuuuccuac

SEQ ID NO: 1597927 - RNA, 19 nt, Artificial Sequence
  Description of Artificial Sequence: Synthetic oligonucleotide
acuuaggccugugaguguc

SEQ ID NO: 1597928 - RNA, 19 nt, Artificial Sequence
  Description of Artificial Sequence: Synthetic oligonucleotide
cuacagggacucaagcuac

SEQ ID NO: 1597929 - RNA, 19 nt, Artificial Sequence
  Description of Artificial Sequence: Synthetic oligonucleotide
uuuuguucagaaggauccc

SEQ ID NO: 1597930 - RNA, 19 nt, Artificial Sequence
  Description of Artificial Sequence: Synthetic oligonucleotide
cugcccauagcuugaauuc

SEQ ID NO: 1597931 - RNA, 19 nt, Artificial Sequence
  Description of Artificial Sequence: Synthetic oligonucleotide
agaaccaucugcguugacu

SEQ ID NO: 1597932 - RNA, 19 nt, Artificial Sequence
  Description of Artificial Sequence: Synthetic oligonucleotide
ugguucacgagagggaaca

SEQ ID NO: 1597933 - RNA, 19 nt, Artificial Sequence
  Description of Artificial Sequence: Synthetic oligonucleotide
agggucacagcacuugaca

SEQ ID NO: 1597934 - RNA, 19 nt, Artificial Sequence
  Description of Artificial Sequence: Synthetic oligonucleotide
gacgggacagauaacccgc

SEQ ID NO: 1597935 - RNA, 19 nt, Artificial Sequence
  Description of Artificial Sequence: Synthetic oligonucleotide
acuucucccuuaaaagagg

SEQ ID NO: 1597936 - RNA, 19 nt, Artificial Sequence
  Description of Artificial Sequence: Synthetic oligonucleotide
gagggugugaugccaaauc

SEQ ID NO: 1597937 - RNA, 19 nt, Artificial Sequence
  Description of Artificial Sequence: Synthetic oligonucleotide
gagccaacauauucuuccc

SEQ ID NO: 1597938 - RNA, 19 nt, Artificial Sequence
  Description of Artificial Sequence: Synthetic oligonucleotide
aguguuucccaagggcugg

SEQ ID NO: 1597939 - RNA, 19 nt, Artificial Sequence
  Description of Artificial Sequence: Synthetic oligonucleotide
cuuguucccaggcaaucac

SEQ ID NO: 1597940 - RNA, 19 nt, Artificial Sequence
  Description of Artificial Sequence: Synthetic oligonucleotide
acggucaaaagcucugaga

SEQ ID NO: 1597941 - RNA, 19 nt, Artificial Sequence
  Description of Artificial Sequence: Synthetic oligonucleotide
acacuugguuaccauuuug

SEQ ID NO: 1597942 - RNA, 19 nt, Artificial Sequence
  Description of Artificial Sequence: Synthetic oligonucleotide
acugcuaucuacagggacu

SEQ ID NO: 1597943 - RNA, 19 nt, Artificial Sequence
  Description of Artificial Sequence: Synthetic oligonucleotide
caggacaguagcacgugag

SEQ ID NO: 1597944 - RNA, 19 nt, Artificial Sequence
  Description of Artificial Sequence: Synthetic oligonucleotide
aucaccuaccucaagugug

SEQ ID NO: 1597945 - RNA, 19 nt, Artificial Sequence
  Description of Artificial Sequence: Synthetic oligonucleotide
ugcguugacuucauuucuc

SEQ ID NO: 1597946 - RNA, 19 nt, Artificial Sequence
  Description of Artificial Sequence: Synthetic oligonucleotide
agacaagagguagcgggac

SEQ ID NO: 1597947 - RNA, 19 nt, Artificial Sequence
  Description of Artificial Sequence: Synthetic oligonucleotide
uacagauagccauuuuguu

SEQ ID NO: 1597948 - RNA, 19 nt, Artificial Sequence
  Description of Artificial Sequence: Synthetic oligonucleotide
agugagccaacauauucuu

SEQ ID NO: 1597949 - RNA, 19 nt, Artificial Sequence
  Description of Artificial Sequence: Synthetic oligonucleotide
caugccucuucugaaguag

SEQ ID NO: 1597950 - RNA, 19 nt, Artificial Sequence
  Description of Artificial Sequence: Synthetic oligonucleotide
ucaguucuauaacuacuuu

SEQ ID NO: 1597951 - RNA, 19 nt, Artificial Sequence
  Description of Artificial Sequence: Synthetic oligonucleotide
ucacacaagccaucagacu

SEQ ID NO: 1597952 - RNA, 19 nt, Artificial Sequence
  Description of Artificial Sequence: Synthetic oligonucleotide
ggacgggacagauaacccg

SEQ ID NO: 1597953 - RNA, 19 nt, Artificial Sequence
  Description of Artificial Sequence: Synthetic oligonucleotide
cacuugguuaccauuuuga

SEQ ID NO: 1597954 - RNA, 19 nt, Artificial Sequence
  Description of Artificial Sequence: Synthetic oligonucleotide
guugacauggggccugcug

SEQ ID NO: 1597955 - RNA, 19 nt, Artificial Sequence
  Description of Artificial Sequence: Synthetic oligonucleotide
acauggggccugcugggac

SEQ ID NO: 1597956 - RNA, 19 nt, Artificial Sequence
  Description of Artificial Sequence: Synthetic oligonucleotide
acagugggaagaaucaaga

SEQ ID NO: 1597957 - RNA, 19 nt, Artificial Sequence
  Description of Artificial Sequence: Synthetic oligonucleotide
ucucgcgagggagaaagug

SEQ ID NO: 1597958 - RNA, 19 nt, Artificial Sequence
  Description of Artificial Sequence: Synthetic oligonucleotide
ugggaagaaucaagagaca

SEQ ID NO: 1597959 - RNA, 19 nt, Artificial Sequence
  Description of Artificial Sequence: Synthetic oligonucleotide
accgguccuguugacaugg

SEQ ID NO: 1597960 - RNA, 19 nt, Artificial Sequence
  Description of Artificial Sequence: Synthetic oligonucleotide
cuacaggaagccagugccc

SEQ ID NO: 1597961 - RNA, 19 nt, Artificial Sequence
  Description of Artificial Sequence: Synthetic oligonucleotide
aacacauggaugggaugug

SEQ ID NO: 1597962 - RNA, 19 nt, Artificial Sequence
  Description of Artificial Sequence: Synthetic oligonucleotide
guaacugcacgcaugugca

SEQ ID NO: 1597963 - RNA, 19 nt, Artificial Sequence
  Description of Artificial Sequence: Synthetic oligonucleotide
ucccaggcaaucaccuacc

SEQ ID NO: 1597964 - RNA, 19 nt, Artificial Sequence
  Description of Artificial Sequence: Synthetic oligonucleotide
agcgucaacaguggagggg

SEQ ID NO: 1597965 - RNA, 19 nt, Artificial Sequence
  Description of Artificial Sequence: Synthetic oligonucleotide
ucaggccggcaauucgacg

SEQ ID NO: 1597966 - RNA, 19 nt, Artificial Sequence
  Description of Artificial Sequence: Synthetic oligonucleotide
ugacuucauuucucgcgag

SEQ ID NO: 1597967 - RNA, 19 nt, Artificial Sequence
  Description of Artificial Sequence: Synthetic oligonucleotide
ccuaccucaagugugguag

SEQ ID NO: 1597968 - RNA, 19 nt, Artificial Sequence
  Description of Artificial Sequence: Synthetic oligonucleotide
ugcccauagcuugaauucc

SEQ ID NO: 1597969 - RNA, 19 nt, Artificial Sequence
  Description of Artificial Sequence: Synthetic oligonucleotide
aggacaguagcacgugaga

SEQ ID NO: 1597970 - RNA, 19 nt, Artificial Sequence
  Description of Artificial Sequence: Synthetic oligonucleotide
acaaucacuucucccuuaa

SEQ ID NO: 1597971 - RNA, 19 nt, Artificial Sequence
  Description of Artificial Sequence: Synthetic oligonucleotide
gcacgugagaaccaucugc

SEQ ID NO: 1597972 - RNA, 19 nt, Artificial Sequence
  Description of Artificial Sequence: Synthetic oligonucleotide
cuuggcuaccaccucacca

SEQ ID NO: 1597973 - RNA, 19 nt, Artificial Sequence
  Description of Artificial Sequence: Synthetic oligonucleotide
uguaacugccccaguucuc

SEQ ID NO: 1597974 - RNA, 19 nt, Artificial Sequence
  Description of Artificial Sequence: Synthetic oligonucleotide
aaaguugaacagagcacaa

SEQ ID NO: 1597975 - RNA, 19 nt, Artificial Sequence
  Description of Artificial Sequence: Synthetic oligonucleotide
acacaauguaacugcccca

SEQ ID NO: 1597976 - RNA, 19 nt, Artificial Sequence
  Description of Artificial Sequence: Synthetic oligonucleotide
aucuuguucccaggcaauc

SEQ ID NO: 1597977 - RNA, 19 nt, Artificial Sequence
  Description of Artificial Sequence: Synthetic oligonucleotide
uugagaguuaccgguccug

SEQ ID NO: 1597978 - RNA, 19 nt, Artificial Sequence
  Description of Artificial Sequence: Synthetic oligonucleotide
ugaaguaggggugcagauc

SEQ ID NO: 1597979 - RNA, 19 nt, Artificial Sequence
  Description of Artificial Sequence: Synthetic oligonucleotide
aacagagcacaaugucuuu

SEQ ID NO: 1597980 - RNA, 19 nt, Artificial Sequence
  Description of Artificial Sequence: Synthetic oligonucleotide
ggacuuaggccugugagug

SEQ ID NO: 1597981 - RNA, 19 nt, Artificial Sequence
  Description of Artificial Sequence: Synthetic oligonucleotide
cacugcuaucuacagggac

SEQ ID NO: 1597982 - RNA, 19 nt, Artificial Sequence
  Description of Artificial Sequence: Synthetic oligonucleotide
ggacagauaacccgcuccc

SEQ ID NO: 1597983 - RNA, 19 nt, Artificial Sequence
  Description of Artificial Sequence: Synthetic oligonucleotide
caugugcacaguugaggac

SEQ ID NO: 1597984 - RNA, 19 nt, Artificial Sequence
  Description of Artificial Sequence: Synthetic oligonucleotide
aaguugaacagagcacaau

SEQ ID NO: 1597985 - RNA, 19 nt, Artificial Sequence
  Description of Artificial Sequence: Synthetic oligonucleotide
gaaauaccuacaauagggu

SEQ ID NO: 1597986 - RNA, 19 nt, Artificial Sequence
  Description of Artificial Sequence: Synthetic oligonucleotide
ugacggagggugcccaaca

SEQ ID NO: 1597987 - RNA, 19 nt, Artificial Sequence
  Description of Artificial Sequence: Synthetic oligonucleotide
cagcaaacccggcugucgg

SEQ ID NO: 1597988 - RNA, 19 nt, Artificial Sequence
  Description of Artificial Sequence: Synthetic oligonucleotide
cuugacaaacacaguggga

SEQ ID NO: 1597989 - RNA, 19 nt, Artificial Sequence
  Description of Artificial Sequence: Synthetic oligonucleotide
gggaagaaucaagagacac

SEQ ID NO: 1597990 - RNA, 19 nt, Artificial Sequence
  Description of Artificial Sequence: Synthetic oligonucleotide
gagagacaagagguagcgg

SEQ ID NO: 1597991 - RNA, 19 nt, Artificial Sequence
  Description of Artificial Sequence: Synthetic oligonucleotide
ugagaguuaccgguccugu

SEQ ID NO: 1597992 - RNA, 19 nt, Artificial Sequence
  Description of Artificial Sequence: Synthetic oligonucleotide
accccuacaaucacuucuc

SEQ ID NO: 1597993 - RNA, 19 nt, Artificial Sequence
  Description of Artificial Sequence: Synthetic oligonucleotide
aguuaccgguccuguugac

SEQ ID NO: 1597994 - RNA, 19 nt, Artificial Sequence
  Description of Artificial Sequence: Synthetic oligonucleotide
uacauuuucuaaggcccac

SEQ ID NO: 1597995 - RNA, 19 nt, Artificial Sequence
  Description of Artificial Sequence: Synthetic oligonucleotide
aguaggggugcagaucuug

SEQ ID NO: 1597996 - RNA, 19 nt, Artificial Sequence
  Description of Artificial Sequence: Synthetic oligonucleotide
ggcaauucgacgcuaguaa

SEQ ID NO: 1597997 - RNA, 19 nt, Artificial Sequence
  Description of Artificial Sequence: Synthetic oligonucleotide
cggucaaaagcucugagac

SEQ ID NO: 1597998 - RNA, 19 nt, Artificial Sequence
  Description of Artificial Sequence: Synthetic oligonucleotide
uugguucacgagagggaac

SEQ ID NO: 1597999 - RNA, 19 nt, Artificial Sequence
  Description of Artificial Sequence: Synthetic oligonucleotide
cacauucuacauagccuug

SEQ ID NO: 1598000 - RNA, 19 nt, Artificial Sequence
  Description of Artificial Sequence: Synthetic oligonucleotide
uguggcgcagccucauccu

SEQ ID NO: 1598001 - RNA, 19 nt, Artificial Sequence
  Description of Artificial Sequence: Synthetic oligonucleotide
agauagccauuuuguucag

SEQ ID NO: 1598002 - RNA, 19 nt, Artificial Sequence
  Description of Artificial Sequence: Synthetic oligonucleotide
ggggugcagaucuuguucc

SEQ ID NO: 1598003 - RNA, 19 nt, Artificial Sequence
  Description of Artificial Sequence: Synthetic oligonucleotide
cugaaucacacagacaaua

SEQ ID NO: 1598004 - RNA, 19 nt, Artificial Sequence
  Description of Artificial Sequence: Synthetic oligonucleotide
auucuacauagccuugcuu

SEQ ID NO: 1598005 - RNA, 19 nt, Artificial Sequence
  Description of Artificial Sequence: Synthetic oligonucleotide
agagacacuugguuaccau

SEQ ID NO: 1598006 - RNA, 19 nt, Artificial Sequence
  Description of Artificial Sequence: Synthetic oligonucleotide
ccaacauauucuucccagg

SEQ ID NO: 1598007 - RNA, 19 nt, Artificial Sequence
  Description of Artificial Sequence: Synthetic oligonucleotide
ucgacgcuaguaacugcac

SEQ ID NO: 1598008 - RNA, 19 nt, Artificial Sequence
  Description of Artificial Sequence: Synthetic oligonucleotide
caaacccggcugucggugg

SEQ ID NO: 1598009 - RNA, 19 nt, Artificial Sequence
  Description of Artificial Sequence: Synthetic oligonucleotide
guacagauagccauuuugu

SEQ ID NO: 1598010 - RNA, 19 nt, Artificial Sequence
  Description of Artificial Sequence: Synthetic oligonucleotide
ccagcgucaacaguggagg

SEQ ID NO: 1598011 - RNA, 19 nt, Artificial Sequence
  Description of Artificial Sequence: Synthetic oligonucleotide
acauagccuugcuuuggcu

SEQ ID NO: 1598012 - RNA, 19 nt, Artificial Sequence
  Description of Artificial Sequence: Synthetic oligonucleotide
aagggcuggcuuggcuacc

SEQ ID NO: 1598013 - RNA, 19 nt, Artificial Sequence
  Description of Artificial Sequence: Synthetic oligonucleotide
ugagaaccaucugcguuga

SEQ ID NO: 1598014 - RNA, 19 nt, Artificial Sequence
  Description of Artificial Sequence: Synthetic oligonucleotide
cucgcgagggagaaaguga

SEQ ID NO: 1598015 - RNA, 19 nt, Artificial Sequence
  Description of Artificial Sequence: Synthetic oligonucleotide
cagugcccaguauucuggg

SEQ ID NO: 1598016 - RNA, 19 nt, Artificial Sequence
  Description of Artificial Sequence: Synthetic oligonucleotide
agcacgugagaaccaucug

SEQ ID NO: 1598017 - RNA, 19 nt, Artificial Sequence
  Description of Artificial Sequence: Synthetic oligonucleotide
cuccccacuaaagugcaac

SEQ ID NO: 1598018 - RNA, 19 nt, Artificial Sequence
  Description of Artificial Sequence: Synthetic oligonucleotide
gacagauaacccgcucccc

SEQ ID NO: 1598019 - RNA, 19 nt, Artificial Sequence
  Description of Artificial Sequence: Synthetic oligonucleotide
guucacgagagggaacaug

SEQ ID NO: 1598020 - RNA, 19 nt, Artificial Sequence
  Description of Artificial Sequence: Synthetic oligonucleotide
guaguguuucccaagggcu

SEQ ID NO: 1598021 - RNA, 19 nt, Artificial Sequence
  Description of Artificial Sequence: Synthetic oligonucleotide
cuaguaacugcacgcaugu

SEQ ID NO: 1598022 - RNA, 19 nt, Artificial Sequence
  Description of Artificial Sequence: Synthetic oligonucleotide
acagcacuugacaaacaca

SEQ ID NO: 1598023 - RNA, 19 nt, Artificial Sequence
  Description of Artificial Sequence: Synthetic oligonucleotide
uaccucaagugugguagug

SEQ ID NO: 1598024 - RNA, 19 nt, Artificial Sequence
  Description of Artificial Sequence: Synthetic oligonucleotide
caaagaccuggagggaggc

SEQ ID NO: 1598025 - RNA, 19 nt, Artificial Sequence
  Description of Artificial Sequence: Synthetic oligonucleotide
ggggcaggacaguagcacg

SEQ ID NO: 1598026 - RNA, 19 nt, Artificial Sequence
  Description of Artificial Sequence: Synthetic oligonucleotide
acaauguaacugccccagu

SEQ ID NO: 1598027 - RNA, 19 nt, Artificial Sequence
  Description of Artificial Sequence: Synthetic oligonucleotide
gcaauucgacgcuaguaac

SEQ ID NO: 1598028 - RNA, 19 nt, Artificial Sequence
  Description of Artificial Sequence: Synthetic oligonucleotide
ugcacgcaugugcacaguu

SEQ ID NO: 1598029 - RNA, 19 nt, Artificial Sequence
  Description of Artificial Sequence: Synthetic oligonucleotide
aguagcacgugagaaccau

SEQ ID NO: 1598030 - RNA, 19 nt, Artificial Sequence
  Description of Artificial Sequence: Synthetic oligonucleotide
caggccgcaucuuuucuuc

SEQ ID NO: 1598031 - RNA, 19 nt, Artificial Sequence
  Description of Artificial Sequence: Synthetic oligonucleotide
caucaggccggcaauucga

SEQ ID NO: 1598032 - RNA, 19 nt, Artificial Sequence
  Description of Artificial Sequence: Synthetic oligonucleotide
aucaggccggcaauucgac

SEQ ID NO: 1598033 - RNA, 19 nt, Artificial Sequence
  Description of Artificial Sequence: Synthetic oligonucleotide
uaaggcccacaggugagga

SEQ ID NO: 1598034 - RNA, 19 nt, Artificial Sequence
  Description of Artificial Sequence: Synthetic oligonucleotide
aguguacagauagccauuu

SEQ ID NO: 1598035 - RNA, 19 nt, Artificial Sequence
  Description of Artificial Sequence: Synthetic oligonucleotide
caguugaggacagcaguug

SEQ ID NO: 1598036 - RNA, 19 nt, Artificial Sequence
  Description of Artificial Sequence: Synthetic oligonucleotide
gugugaugccaaaucaauc

SEQ ID NO: 1598037 - RNA, 19 nt, Artificial Sequence
  Description of Artificial Sequence: Synthetic oligonucleotide
cugcuaucuacagggacuc

SEQ ID NO: 1598038 - RNA, 19 nt, Artificial Sequence
  Description of Artificial Sequence: Synthetic oligonucleotide
cuugcuccuuuuccucagc

SEQ ID NO: 1598039 - RNA, 19 nt, Artificial Sequence
  Description of Artificial Sequence: Synthetic oligonucleotide
gaacagagcacaaugucuu

SEQ ID NO: 1598040 - RNA, 19 nt, Artificial Sequence
  Description of Artificial Sequence: Synthetic oligonucleotide
ugcccaguauucugggcuc

SEQ ID NO: 1598041 - RNA, 19 nt, Artificial Sequence
  Description of Artificial Sequence: Synthetic oligonucleotide
cuugguucacgagagggaa

SEQ ID NO: 1598042 - RNA, 19 nt, Artificial Sequence
  Description of Artificial Sequence: Synthetic oligonucleotide
guugaacagagcacaaugu

SEQ ID NO: 1598043 - RNA, 19 nt, Artificial Sequence
  Description of Artificial Sequence: Synthetic oligonucleotide
agccaaacacauggauggg

SEQ ID NO: 1598044 - RNA, 19 nt, Artificial Sequence
  Description of Artificial Sequence: Synthetic oligonucleotide
gaaucaagagacacuuggu

SEQ ID NO: 1598045 - RNA, 19 nt, Artificial Sequence
  Description of Artificial Sequence: Synthetic oligonucleotide
ccaaggcaaaguugaacag

SEQ ID NO: 1598046 - RNA, 19 nt, Artificial Sequence
  Description of Artificial Sequence: Synthetic oligonucleotide
cugucggugguuccaguuc

SEQ ID NO: 1598047 - RNA, 19 nt, Artificial Sequence
  Description of Artificial Sequence: Synthetic oligonucleotide
caauucgacgcuaguaacu

SEQ ID NO: 1598048 - RNA, 19 nt, Artificial Sequence
  Description of Artificial Sequence: Synthetic oligonucleotide
gagggugcccaacaggccu

SEQ ID NO: 1598049 - RNA, 19 nt, Artificial Sequence
  Description of Artificial Sequence: Synthetic oligonucleotide
agggagaaagugagccaac

SEQ ID NO: 1598050 - RNA, 19 nt, Artificial Sequence
  Description of Artificial Sequence: Synthetic oligonucleotide
cagcgucaacaguggaggg

SEQ ID NO: 1598051 - RNA, 19 nt, Artificial Sequence
  Description of Artificial Sequence: Synthetic oligonucleotide
aggaucccaggccgcaucu

SEQ ID NO: 1598052 - RNA, 19 nt, Artificial Sequence
  Description of Artificial Sequence: Synthetic oligonucleotide
gccugugagugucacauuc

SEQ ID NO: 1598053 - RNA, 19 nt, Artificial Sequence
  Description of Artificial Sequence: Synthetic oligonucleotide
gcaaucaccuaccucaagu

SEQ ID NO: 1598054 - RNA, 19 nt, Artificial Sequence
  Description of Artificial Sequence: Synthetic oligonucleotide
cuucauuucucgcgaggga

SEQ ID NO: 1598055 - RNA, 19 nt, Artificial Sequence
  Description of Artificial Sequence: Synthetic oligonucleotide
cacaagccaucagacugcc

SEQ ID NO: 1598056 - RNA, 19 nt, Artificial Sequence
  Description of Artificial Sequence: Synthetic oligonucleotide
ccuacaaucacuucucccu

SEQ ID NO: 1598057 - RNA, 19 nt, Artificial Sequence
  Description of Artificial Sequence: Synthetic oligonucleotide
acgagagggaacauguauu

SEQ ID NO: 1598058 - RNA, 19 nt, Artificial Sequence
  Description of Artificial Sequence: Synthetic oligonucleotide
acgugagaaccaucugcgu

SEQ ID NO: 1598059 - RNA, 19 nt, Artificial Sequence
  Description of Artificial Sequence: Synthetic oligonucleotide
gaacggucaaaagcucuga

SEQ ID NO: 1598060 - RNA, 19 nt, Artificial Sequence
  Description of Artificial Sequence: Synthetic oligonucleotide
acaguugaggacagcaguu

SEQ ID NO: 1598061 - RNA, 19 nt, Artificial Sequence
  Description of Artificial Sequence: Synthetic oligonucleotide
aucccagcgucaacagugg

SEQ ID NO: 1598062 - RNA, 19 nt, Artificial Sequence
  Description of Artificial Sequence: Synthetic oligonucleotide
ucacgagagggaacaugua

SEQ ID NO: 1598063 - RNA, 19 nt, Artificial Sequence
  Description of Artificial Sequence: Synthetic oligonucleotide
aucaaccccuacaaucacu

SEQ ID NO: 1598064 - RNA, 19 nt, Artificial Sequence
  Description of Artificial Sequence: Synthetic oligonucleotide
acugccccaguucucugaa

SEQ ID NO: 1598065 - RNA, 19 nt, Artificial Sequence
  Description of Artificial Sequence: Synthetic oligonucleotide
cccuacaaucacuucuccc

SEQ ID NO: 1598066 - RNA, 19 nt, Artificial Sequence
  Description of Artificial Sequence: Synthetic oligonucleotide
agcaaacccggcugucggu

SEQ ID NO: 1598067 - RNA, 19 nt, Artificial Sequence
  Description of Artificial Sequence: Synthetic oligonucleotide
gugcccaguauucugggcu

SEQ ID NO: 1598068 - RNA, 19 nt, Artificial Sequence
  Description of Artificial Sequence: Synthetic oligonucleotide
acgcuaguaacugcacgca

SEQ ID NO: 1598069 - RNA, 19 nt, Artificial Sequence
  Description of Artificial Sequence: Synthetic oligonucleotide
gcgucaacaguggaggggc

SEQ ID NO: 1598070 - RNA, 19 nt, Artificial Sequence
  Description of Artificial Sequence: Synthetic oligonucleotide
acaugccucuucugaagua

SEQ ID NO: 1598071 - RNA, 19 nt, Artificial Sequence
  Description of Artificial Sequence: Synthetic oligonucleotide
guuaccgguccuguugaca

SEQ ID NO: 1598072 - RNA, 19 nt, Artificial Sequence
  Description of Artificial Sequence: Synthetic oligonucleotide
caguucuauaacuacuuuu

SEQ ID NO: 1598073 - RNA, 19 nt, Artificial Sequence
  Description of Artificial Sequence: Synthetic oligonucleotide
gcaugaccagcaaacccgg

SEQ ID NO: 1598074 - RNA, 19 nt, Artificial Sequence
  Description of Artificial Sequence: Synthetic oligonucleotide
cuaccaccucaccaaccug

SEQ ID NO: 1598075 - RNA, 19 nt, Artificial Sequence
  Description of Artificial Sequence: Synthetic oligonucleotide
ucccagcgucaacagugga

SEQ ID NO: 1598076 - RNA, 19 nt, Artificial Sequence
  Description of Artificial Sequence: Synthetic oligonucleotide
gagacacuugguuaccauu

SEQ ID NO: 1598077 - RNA, 19 nt, Artificial Sequence
  Description of Artificial Sequence: Synthetic oligonucleotide
uucucgcgagggagaaagu

SEQ ID NO: 1598078 - RNA, 19 nt, Artificial Sequence
  Description of Artificial Sequence: Synthetic oligonucleotide
guaacugccccaguucucu

SEQ ID NO: 1598079 - RNA, 19 nt, Artificial Sequence
  Description of Artificial Sequence: Synthetic oligonucleotide
gaacauugucuugguucac

SEQ ID NO: 1598080 - RNA, 19 nt, Artificial Sequence
  Description of Artificial Sequence: Synthetic oligonucleotide
uaccgguccuguugacaug

SEQ ID NO: 1598081 - RNA, 19 nt, Artificial Sequence
  Description of Artificial Sequence: Synthetic oligonucleotide
cccagcgucaacaguggag

SEQ ID NO: 1598082 - RNA, 19 nt, Artificial Sequence
  Description of Artificial Sequence: Synthetic oligonucleotide
uaggccugugagugucaca

SEQ ID NO: 1598083 - RNA, 19 nt, Artificial Sequence
  Description of Artificial Sequence: Synthetic oligonucleotide
cagagcacaaugucuuugu

SEQ ID NO: 1598084 - RNA, 19 nt, Artificial Sequence
  Description of Artificial Sequence: Synthetic oligonucleotide
cacgagagggaacauguau

SEQ ID NO: 1598085 - RNA, 19 nt, Artificial Sequence
  Description of Artificial Sequence: Synthetic oligonucleotide
gggcuccccacuaaagugc

SEQ ID NO: 1598086 - RNA, 19 nt, Artificial Sequence
  Description of Artificial Sequence: Synthetic oligonucleotide
caaccccuacaaucacuuc

SEQ ID NO: 1598087 - RNA, 19 nt, Artificial Sequence
  Description of Artificial Sequence: Synthetic oligonucleotide
accuaccucaaguguggua

SEQ ID NO: 1598088 - RNA, 19 nt, Artificial Sequence
  Description of Artificial Sequence: Synthetic oligonucleotide
cauucuacauagccuugcu

SEQ ID NO: 1598089 - RNA, 19 nt, Artificial Sequence
  Description of Artificial Sequence: Synthetic oligonucleotide
caauguaacugccccaguu

SEQ ID NO: 1598090 - RNA, 19 nt, Artificial Sequence
  Description of Artificial Sequence: Synthetic oligonucleotide
acgcaugugcacaguugag

SEQ ID NO: 1598091 - RNA, 19 nt, Artificial Sequence
  Description of Artificial Sequence: Synthetic oligonucleotide
ggacaguagcacgugagaa

SEQ ID NO: 1598092 - RNA, 19 nt, Artificial Sequence
  Description of Artificial Sequence: Synthetic oligonucleotide
agguagcgggacgggacag

SEQ ID NO: 1598093 - RNA, 19 nt, Artificial Sequence
  Description of Artificial Sequence: Synthetic oligonucleotide
cccaacaggccuguggcgc

SEQ ID NO: 1598094 - RNA, 19 nt, Artificial Sequence
  Description of Artificial Sequence: Synthetic oligonucleotide
gcuaccaccucaccaaccu

SEQ ID NO: 1598095 - RNA, 19 nt, Artificial Sequence
  Description of Artificial Sequence: Synthetic oligonucleotide
ugcuaucuacagggacuca

SEQ ID NO: 1598096 - RNA, 19 nt, Artificial Sequence
  Description of Artificial Sequence: Synthetic oligonucleotide
gggugcagaucuuguuccc

SEQ ID NO: 1598097 - RNA, 19 nt, Artificial Sequence
  Description of Artificial Sequence: Synthetic oligonucleotide
gggacgggacagauaaccc

SEQ ID NO: 1598098 - RNA, 19 nt, Artificial Sequence
  Description of Artificial Sequence: Synthetic oligonucleotide
aggccgcaucuuuucuuca

SEQ ID NO: 1598099 - RNA, 19 nt, Artificial Sequence
  Description of Artificial Sequence: Synthetic oligonucleotide
guauucugggcuccccacu

SEQ ID NO: 1598100 - RNA, 19 nt, Artificial Sequence
  Description of Artificial Sequence: Synthetic oligonucleotide
gcuaucuacagggacucaa

SEQ ID NO: 1598101 - RNA, 19 nt, Artificial Sequence
  Description of Artificial Sequence: Synthetic oligonucleotide
cuuaggccugugaguguca

SEQ ID NO: 1598102 - RNA, 19 nt, Artificial Sequence
  Description of Artificial Sequence: Synthetic oligonucleotide
agugacggagggugcccaa

SEQ ID NO: 1598103 - RNA, 19 nt, Artificial Sequence
  Description of Artificial Sequence: Synthetic oligonucleotide
cauuucucgcgagggagaa

SEQ ID NO: 1598104 - RNA, 19 nt, Artificial Sequence
  Description of Artificial Sequence: Synthetic oligonucleotide
gccaaaucaaucccagcgu

SEQ ID NO: 1598105 - RNA, 19 nt, Artificial Sequence
  Description of Artificial Sequence: Synthetic oligonucleotide
cgggacgggacagauaacc

SEQ ID NO: 1598106 - RNA, 19 nt, Artificial Sequence
  Description of Artificial Sequence: Synthetic oligonucleotide
ggucaaaagcucugagacu

SEQ ID NO: 1598107 - RNA, 19 nt, Artificial Sequence
  Description of Artificial Sequence: Synthetic oligonucleotide
cgacgcuaguaacugcacg

SEQ ID NO: 1598108 - RNA, 19 nt, Artificial Sequence
  Description of Artificial Sequence: Synthetic oligonucleotide
guagcacgugagaaccauc

SEQ ID NO: 1598109 - RNA, 19 nt, Artificial Sequence
  Description of Artificial Sequence: Synthetic oligonucleotide
cuguugacauggggccugc

SEQ ID NO: 1598110 - RNA, 19 nt, Artificial Sequence
  Description of Artificial Sequence: Synthetic oligonucleotide
cuugagaguuaccgguccu

SEQ ID NO: 1598111 - RNA, 19 nt, Artificial Sequence
  Description of Artificial Sequence: Synthetic oligonucleotide
caauaucaacaagcagaga

SEQ ID NO: 1598112 - RNA, 19 nt, Artificial Sequence
  Description of Artificial Sequence: Synthetic oligonucleotide
gcaaacccggcugucggug

SEQ ID NO: 1598113 - RNA, 19 nt, Artificial Sequence
  Description of Artificial Sequence: Synthetic oligonucleotide
gggacuuaggccugugagu

SEQ ID NO: 1598114 - RNA, 19 nt, Artificial Sequence
  Description of Artificial Sequence: Synthetic oligonucleotide
gaucuuguucccaggcaau

SEQ ID NO: 1598115 - RNA, 19 nt, Artificial Sequence
  Description of Artificial Sequence: Synthetic oligonucleotide
gacuuaggccugugagugu

SEQ ID NO: 1598116 - RNA, 19 nt, Artificial Sequence
  Description of Artificial Sequence: Synthetic oligonucleotide
gucggugguuccaguucag

SEQ ID NO: 1598117 - RNA, 19 nt, Artificial Sequence
  Description of Artificial Sequence: Synthetic oligonucleotide
acccggcugucggugguuc

SEQ ID NO: 1598118 - RNA, 19 nt, Artificial Sequence
  Description of Artificial Sequence: Synthetic oligonucleotide
ggagaaagugagccaacau

SEQ ID NO: 1598119 - RNA, 19 nt, Artificial Sequence
  Description of Artificial Sequence: Synthetic oligonucleotide
agccuugcuuuggcucuuc

SEQ ID NO: 1598120 - RNA, 19 nt, Artificial Sequence
  Description of Artificial Sequence: Synthetic oligonucleotide
ggugcagaucuuguuccca

SEQ ID NO: 1598121 - RNA, 19 nt, Artificial Sequence
  Description of Artificial Sequence: Synthetic oligonucleotide
cugggacuuaggccuguga

SEQ ID NO: 1598122 - RNA, 19 nt, Artificial Sequence
  Description of Artificial Sequence: Synthetic oligonucleotide
gcacgcaugugcacaguug

SEQ ID NO: 1598123 - RNA, 19 nt, Artificial Sequence
  Description of Artificial Sequence: Synthetic oligonucleotide
guucccaggcaaucaccua

SEQ ID NO: 1598124 - RNA, 19 nt, Artificial Sequence
  Description of Artificial Sequence: Synthetic oligonucleotide
cuacaaucacuucucccuu

SEQ ID NO: 1598125 - RNA, 19 nt, Artificial Sequence
  Description of Artificial Sequence: Synthetic oligonucleotide
gccccaguucucugaauca

SEQ ID NO: 1598126 - RNA, 19 nt, Artificial Sequence
  Description of Artificial Sequence: Synthetic oligonucleotide
uagcgggacgggacagaua

SEQ ID NO: 1598127 - RNA, 19 nt, Artificial Sequence
  Description of Artificial Sequence: Synthetic oligonucleotide
cccuuaaaagaggcaggag

SEQ ID NO: 1598128 - RNA, 19 nt, Artificial Sequence
  Description of Artificial Sequence: Synthetic oligonucleotide
gugacggagggugcccaac

SEQ ID NO: 1598129 - RNA, 19 nt, Artificial Sequence
  Description of Artificial Sequence: Synthetic oligonucleotide
ccuguugacauggggccug

SEQ ID NO: 1598130 - RNA, 19 nt, Artificial Sequence
  Description of Artificial Sequence: Synthetic oligonucleotide
gucaaacaggaggguguga

SEQ ID NO: 1598131 - RNA, 19 nt, Artificial Sequence
  Description of Artificial Sequence: Synthetic oligonucleotide
acgggacagauaacccgcu

SEQ ID NO: 1598132 - RNA, 19 nt, Artificial Sequence
  Description of Artificial Sequence: Synthetic oligonucleotide
gguuaccauuuugacacua

SEQ ID NO: 1598133 - RNA, 19 nt, Artificial Sequence
  Description of Artificial Sequence: Synthetic oligonucleotide
ggagggugcccaacaggcc

SEQ ID NO: 1598134 - RNA, 19 nt, Artificial Sequence
  Description of Artificial Sequence: Synthetic oligonucleotide
gcuggggaggcagacuuga

SEQ ID NO: 1598135 - RNA, 19 nt, Artificial Sequence
  Description of Artificial Sequence: Synthetic oligonucleotide
auuucucgcgagggagaaa

SEQ ID NO: 1598136 - RNA, 19 nt, Artificial Sequence
  Description of Artificial Sequence: Synthetic oligonucleotide
gagaguuaccgguccuguu

SEQ ID NO: 1598137 - RNA, 19 nt, Artificial Sequence
  Description of Artificial Sequence: Synthetic oligonucleotide
guaggggugcagaucuugu

SEQ ID NO: 1598138 - RNA, 19 nt, Artificial Sequence
  Description of Artificial Sequence: Synthetic oligonucleotide
cuucaucccugaacauugu

SEQ ID NO: 1598139 - RNA, 19 nt, Artificial Sequence
  Description of Artificial Sequence: Synthetic oligonucleotide
aaguaggggugcagaucuu

SEQ ID NO: 1598140 - RNA, 19 nt, Artificial Sequence
  Description of Artificial Sequence: Synthetic oligonucleotide
ccaguauucugggcucccc

SEQ ID NO: 1598141 - RNA, 19 nt, Artificial Sequence
  Description of Artificial Sequence: Synthetic oligonucleotide
gccagugggccugugcuuc

SEQ ID NO: 1598142 - RNA, 19 nt, Artificial Sequence
  Description of Artificial Sequence: Synthetic oligonucleotide
cuaccucaagugugguagu

SEQ ID NO: 1598143 - RNA, 19 nt, Artificial Sequence
  Description of Artificial Sequence: Synthetic oligonucleotide
gcagugacggagggugccc

SEQ ID NO: 1598144 - RNA, 19 nt, Artificial Sequence
  Description of Artificial Sequence: Synthetic oligonucleotide
cgguccuguugacaugggg

SEQ ID NO: 1598145 - RNA, 19 nt, Artificial Sequence
  Description of Artificial Sequence: Synthetic oligonucleotide
caaucccagcgucaacagu

SEQ ID NO: 1598146 - RNA, 19 nt, Artificial Sequence
  Description of Artificial Sequence: Synthetic oligonucleotide
ccaagggcuggcuuggcua

SEQ ID NO: 1598147 - RNA, 19 nt, Artificial Sequence
  Description of Artificial Sequence: Synthetic oligonucleotide
uaccuacaauagggucaca

SEQ ID NO: 1598148 - RNA, 19 nt, Artificial Sequence
  Description of Artificial Sequence: Synthetic oligonucleotide
ggcagacuugagaguuacc

SEQ ID NO: 1598149 - RNA, 19 nt, Artificial Sequence
  Description of Artificial Sequence: Synthetic oligonucleotide
ggggccugcugggacuuag

SEQ ID NO: 1598150 - RNA, 19 nt, Artificial Sequence
  Description of Artificial Sequence: Synthetic oligonucleotide
aacccggcugucggugguu

SEQ ID NO: 1598151 - RNA, 19 nt, Artificial Sequence
  Description of Artificial Sequence: Synthetic oligonucleotide
gugcacaguugaggacagc

SEQ ID NO: 1598152 - RNA, 19 nt, Artificial Sequence
  Description of Artificial Sequence: Synthetic oligonucleotide
gccaucagacugccaccac

SEQ ID NO: 1598153 - RNA, 19 nt, Artificial Sequence
  Description of Artificial Sequence: Synthetic oligonucleotide
cagugacggagggugccca

SEQ ID NO: 1598154 - RNA, 19 nt, Artificial Sequence
  Description of Artificial Sequence: Synthetic oligonucleotide
guagcgggacgggacagau

SEQ ID NO: 1598155 - RNA, 19 nt, Artificial Sequence
  Description of Artificial Sequence: Synthetic oligonucleotide
cccaguauucugggcuccc

SEQ ID NO: 1598156 - RNA, 19 nt, Artificial Sequence
  Description of Artificial Sequence: Synthetic oligonucleotide
gcccaguauucugggcucc

SEQ ID NO: 1598157 - RNA, 19 nt, Artificial Sequence
  Description of Artificial Sequence: Synthetic oligonucleotide
ccaacaggccuguggcgca

SEQ ID NO: 1598158 - RNA, 19 nt, Artificial Sequence
  Description of Artificial Sequence: Synthetic oligonucleotide
gguagcgggacgggacaga

SEQ ID NO: 1598159 - RNA, 19 nt, Artificial Sequence
  Description of Artificial Sequence: Synthetic oligonucleotide
gcccauagcuugaauuccu

SEQ ID NO: 1598160 - RNA, 19 nt, Artificial Sequence
  Description of Artificial Sequence: Synthetic oligonucleotide
ccacugcuaucuacaggga

SEQ ID NO: 1598161 - RNA, 19 nt, Artificial Sequence
  Description of Artificial Sequence: Synthetic oligonucleotide
cccggcugucggugguucc

SEQ ID NO: 1598162 - RNA, 19 nt, Artificial Sequence
  Description of Artificial Sequence: Synthetic oligonucleotide
cgagagggaacauguauuu

SEQ ID NO: 1598163 - RNA, 19 nt, Artificial Sequence
  Description of Artificial Sequence: Synthetic oligonucleotide
cgugagaaccaucugcguu

SEQ ID NO: 1598164 - RNA, 19 nt, Artificial Sequence
  Description of Artificial Sequence: Synthetic oligonucleotide
gggcuggcuuggcuaccac

SEQ ID NO: 1598165 - RNA, 19 nt, Artificial Sequence
  Description of Artificial Sequence: Synthetic oligonucleotide
cgggacagauaacccgcuc

SEQ ID NO: 1598166 - RNA, 19 nt, Artificial Sequence
  Description of Artificial Sequence: Synthetic oligonucleotide
ccuguggcgcagccucauc

SEQ ID NO: 1598167 - RNA, 19 nt, Artificial Sequence
  Description of Artificial Sequence: Synthetic oligonucleotide
caccuaccucaaguguggu

SEQ ID NO: 1598168 - RNA, 19 nt, Artificial Sequence
  Description of Artificial Sequence: Synthetic oligonucleotide
cggcaauucgacgcuagua

SEQ ID NO: 1598169 - RNA, 19 nt, Artificial Sequence
  Description of Artificial Sequence: Synthetic oligonucleotide
ccugaacauugucuugguu

SEQ ID NO: 1598170 - RNA, 19 nt, Artificial Sequence
  Description of Artificial Sequence: Synthetic oligonucleotide
cgucaacaguggaggggca

SEQ ID NO: 1598171 - RNA, 19 nt, Artificial Sequence
  Description of Artificial Sequence: Synthetic oligonucleotide
gguucacgagagggaacau

SEQ ID NO: 1598172 - RNA, 19 nt, Artificial Sequence
  Description of Artificial Sequence: Synthetic oligonucleotide
ccccacuaaagugcaacau

SEQ ID NO: 1598173 - RNA, 19 nt, Artificial Sequence
  Description of Artificial Sequence: Synthetic oligonucleotide
gcgggacgggacagauaac

SEQ ID NO: 1598174 - RNA, 19 nt, Artificial Sequence
  Description of Artificial Sequence: Synthetic oligonucleotide
caucugcguugacuucauu

SEQ ID NO: 1598175 - RNA, 19 nt, Artificial Sequence
  Description of Artificial Sequence: Synthetic oligonucleotide
cugcacgcaugugcacagu

SEQ ID NO: 1598176 - RNA, 19 nt, Artificial Sequence
  Description of Artificial Sequence: Synthetic oligonucleotide
ccggcaauucgacgcuagu

SEQ ID NO: 1598177 - RNA, 19 nt, Artificial Sequence
  Description of Artificial Sequence: Synthetic oligonucleotide
gcuccccacuaaagugcaa

SEQ ID NO: 1598178 - RNA, 19 nt, Artificial Sequence
  Description of Artificial Sequence: Synthetic oligonucleotide
cgcuaguaacugcacgcau

SEQ ID NO: 1598179 - RNA, 19 nt, Artificial Sequence
  Description of Artificial Sequence: Synthetic oligonucleotide
aaugaaaugucucagggcg

SEQ ID NO: 1598180 - RNA, 19 nt, Artificial Sequence
  Description of Artificial Sequence: Synthetic oligonucleotide
aaaauaggcaaaccaaugc

SEQ ID NO: 1598181 - RNA, 19 nt, Artificial Sequence
  Description of Artificial Sequence: Synthetic oligonucleotide
aauuuccacaacucgaugg

SEQ ID NO: 1598182 - RNA, 19 nt, Artificial Sequence
  Description of Artificial Sequence: Synthetic oligonucleotide
uuugccucaauaaugaucu

SEQ ID NO: 1598183 - RNA, 19 nt, Artificial Sequence
  Description of Artificial Sequence: Synthetic oligonucleotide
gagaauggaagcuuuacgg

SEQ ID NO: 1598184 - RNA, 19 nt, Artificial Sequence
  Description of Artificial Sequence: Synthetic oligonucleotide
agaucacaugcucagaugc

SEQ ID NO: 1598185 - RNA, 19 nt, Artificial Sequence
  Description of Artificial Sequence: Synthetic oligonucleotide
gaauguuuaaauguucucg

SEQ ID NO: 1598186 - RNA, 19 nt, Artificial Sequence
  Description of Artificial Sequence: Synthetic oligonucleotide
aauguuuaaauguucucga

SEQ ID NO: 1598187 - RNA, 19 nt, Artificial Sequence
  Description of Artificial Sequence: Synthetic oligonucleotide
ucgauaauggguuagcgcc

SEQ ID NO: 1598188 - RNA, 19 nt, Artificial Sequence
  Description of Artificial Sequence: Synthetic oligonucleotide
aaaaccuuagauacuggcc

SEQ ID NO: 1598189 - RNA, 19 nt, Artificial Sequence
  Description of Artificial Sequence: Synthetic oligonucleotide
aaaccuuagauacuggccu

SEQ ID NO: 1598190 - RNA, 19 nt, Artificial Sequence
  Description of Artificial Sequence: Synthetic oligonucleotide
aaauaggcaaaccaaugca

SEQ ID NO: 1598191 - RNA, 19 nt, Artificial Sequence
  Description of Artificial Sequence: Synthetic oligonucleotide
aaugaucuggcguuccagg

SEQ ID NO: 1598192 - RNA, 19 nt, Artificial Sequence
  Description of Artificial Sequence: Synthetic oligonucleotide
gaauggaagcuuuacgggg

SEQ ID NO: 1598193 - RNA, 19 nt, Artificial Sequence
  Description of Artificial Sequence: Synthetic oligonucleotide
aaugcugugacucuuccaa

SEQ ID NO: 1598194 - RNA, 19 nt, Artificial Sequence
  Description of Artificial Sequence: Synthetic oligonucleotide
uuaagaauuucuuuucgcu

SEQ ID NO: 1598195 - RNA, 19 nt, Artificial Sequence
  Description of Artificial Sequence: Synthetic oligonucleotide
ucaacuuugcuccuguaug

SEQ ID NO: 1598196 - RNA, 19 nt, Artificial Sequence
  Description of Artificial Sequence: Synthetic oligonucleotide
ucuaggaaccugaagaggu

SEQ ID NO: 1598197 - RNA, 19 nt, Artificial Sequence
  Description of Artificial Sequence: Synthetic oligonucleotide
auacuuaguucuuccaucg

SEQ ID NO: 1598198 - RNA, 19 nt, Artificial Sequence
  Description of Artificial Sequence: Synthetic oligonucleotide
agacucuagaugucgaucg

SEQ ID NO: 1598199 - RNA, 19 nt, Artificial Sequence
  Description of Artificial Sequence: Synthetic oligonucleotide
agaauggaagcuuuacggg

SEQ ID NO: 1598200 - RNA, 19 nt, Artificial Sequence
  Description of Artificial Sequence: Synthetic oligonucleotide
gagcucucuauuuucauag

SEQ ID NO: 1598201 - RNA, 19 nt, Artificial Sequence
  Description of Artificial Sequence: Synthetic oligonucleotide
aaguucagucuuugugucc

SEQ ID NO: 1598202 - RNA, 19 nt, Artificial Sequence
  Description of Artificial Sequence: Synthetic oligonucleotide
gacgucuuacccuggaugg

SEQ ID NO: 1598203 - RNA, 19 nt, Artificial Sequence
  Description of Artificial Sequence: Synthetic oligonucleotide
ucuuccaucgaauuugcga

SEQ ID NO: 1598204 - RNA, 19 nt, Artificial Sequence
  Description of Artificial Sequence: Synthetic oligonucleotide
agcaaaugauacuuaguuc

SEQ ID NO: 1598205 - RNA, 19 nt, Artificial Sequence
  Description of Artificial Sequence: Synthetic oligonucleotide
uuagauacuggccuucgga

SEQ ID NO: 1598206 - RNA, 19 nt, Artificial Sequence
  Description of Artificial Sequence: Synthetic oligonucleotide
ugcaauaucuggacagggg

SEQ ID NO: 1598207 - RNA, 19 nt, Artificial Sequence
  Description of Artificial Sequence: Synthetic oligonucleotide
acuaagacgucuuacccug

SEQ ID NO: 1598208 - RNA, 19 nt, Artificial Sequence
  Description of Artificial Sequence: Synthetic oligonucleotide
ugacuaagacgucuuaccc

SEQ ID NO: 1598209 - RNA, 19 nt, Artificial Sequence
  Description of Artificial Sequence: Synthetic oligonucleotide
ucaauaaugaucuggcguu

SEQ ID NO: 1598210 - RNA, 19 nt, Artificial Sequence
  Description of Artificial Sequence: Synthetic oligonucleotide
ucggaaaaggaucucuuug

SEQ ID NO: 1598211 - RNA, 19 nt, Artificial Sequence
  Description of Artificial Sequence: Synthetic oligonucleotide
gaagaucagaacugcagug

SEQ ID NO: 1598212 - RNA, 19 nt, Artificial Sequence
  Description of Artificial Sequence: Synthetic oligonucleotide
uccugcaauaucuggacag

SEQ ID NO: 1598213 - RNA, 19 nt, Artificial Sequence
  Description of Artificial Sequence: Synthetic oligonucleotide
ucuauuuucauaggcagaa

SEQ ID NO: 1598214 - RNA, 19 nt, Artificial Sequence
  Description of Artificial Sequence: Synthetic oligonucleotide
gaugacguuuccaucaugc

SEQ ID NO: 1598215 - RNA, 19 nt, Artificial Sequence
  Description of Artificial Sequence: Synthetic oligonucleotide
ucuaucuaggaaccugaag

SEQ ID NO: 1598216 - RNA, 19 nt, Artificial Sequence
  Description of Artificial Sequence: Synthetic oligonucleotide
ucgguguagugauagaagc

SEQ ID NO: 1598217 - RNA, 19 nt, Artificial Sequence
  Description of Artificial Sequence: Synthetic oligonucleotide
gauacuuaguucuuccauc

SEQ ID NO: 1598218 - RNA, 19 nt, Artificial Sequence
  Description of Artificial Sequence: Synthetic oligonucleotide
aguccugcaauaucuggac

SEQ ID NO: 1598219 - RNA, 19 nt, Artificial Sequence
  Description of Artificial Sequence: Synthetic oligonucleotide
aauguucucgauaaugggu

SEQ ID NO: 1598220 - RNA, 19 nt, Artificial Sequence
  Description of Artificial Sequence: Synthetic oligonucleotide
uagugauagaagcaggcgu

SEQ ID NO: 1598221 - RNA, 19 nt, Artificial Sequence
  Description of Artificial Sequence: Synthetic oligonucleotide
acaucauggcacuugagcu

SEQ ID NO: 1598222 - RNA, 19 nt, Artificial Sequence
  Description of Artificial Sequence: Synthetic oligonucleotide
aauggguuagcgccagcuc

SEQ ID NO: 1598223 - RNA, 19 nt, Artificial Sequence
  Description of Artificial Sequence: Synthetic oligonucleotide
gaauuugcgagcuguugag

SEQ ID NO: 1598224 - RNA, 19 nt, Artificial Sequence
  Description of Artificial Sequence: Synthetic oligonucleotide
uggccuucggauaaugucc

SEQ ID NO: 1598225 - RNA, 19 nt, Artificial Sequence
  Description of Artificial Sequence: Synthetic oligonucleotide
aguucuuccaucgaauuug

SEQ ID NO: 1598226 - RNA, 19 nt, Artificial Sequence
  Description of Artificial Sequence: Synthetic oligonucleotide
cugacuaagacgucuuacc

SEQ ID NO: 1598227 - RNA, 19 nt, Artificial Sequence
  Description of Artificial Sequence: Synthetic oligonucleotide
caaaucagccugaagauca

SEQ ID NO: 1598228 - RNA, 19 nt, Artificial Sequence
  Description of Artificial Sequence: Synthetic oligonucleotide
gacguuuccaucaugcaug

SEQ ID NO: 1598229 - RNA, 19 nt, Artificial Sequence
  Description of Artificial Sequence: Synthetic oligonucleotide
aagaucacaugcucagaug

SEQ ID NO: 1598230 - RNA, 19 nt, Artificial Sequence
  Description of Artificial Sequence: Synthetic oligonucleotide
agggcaucgacgucauucc

SEQ ID NO: 1598231 - RNA, 19 nt, Artificial Sequence
  Description of Artificial Sequence: Synthetic oligonucleotide
uuaguggcuaaguucaguc

SEQ ID NO: 1598232 - RNA, 19 nt, Artificial Sequence
  Description of Artificial Sequence: Synthetic oligonucleotide
cucgauggaagccaauggg

SEQ ID NO: 1598233 - RNA, 19 nt, Artificial Sequence
  Description of Artificial Sequence: Synthetic oligonucleotide
caauaucuggacaggggcg

SEQ ID NO: 1598234 - RNA, 19 nt, Artificial Sequence
  Description of Artificial Sequence: Synthetic oligonucleotide
uaugcaagcaacugcugac

SEQ ID NO: 1598235 - RNA, 19 nt, Artificial Sequence
  Description of Artificial Sequence: Synthetic oligonucleotide
cagucauuacuauaauccc

SEQ ID NO: 1598236 - RNA, 19 nt, Artificial Sequence
  Description of Artificial Sequence: Synthetic oligonucleotide
ugauacuuaguucuuccau

SEQ ID NO: 1598237 - RNA, 19 nt, Artificial Sequence
  Description of Artificial Sequence: Synthetic oligonucleotide
ugccucaauaaugaucugg

SEQ ID NO: 1598238 - RNA, 19 nt, Artificial Sequence
  Description of Artificial Sequence: Synthetic oligonucleotide
uaaggagcggaaucguucc

SEQ ID NO: 1598239 - RNA, 19 nt, Artificial Sequence
  Description of Artificial Sequence: Synthetic oligonucleotide
ugcaagcaacugcugacgg

SEQ ID NO: 1598240 - RNA, 19 nt, Artificial Sequence
  Description of Artificial Sequence: Synthetic oligonucleotide
cuucggauaaugucccugg

SEQ ID NO: 1598241 - RNA, 19 nt, Artificial Sequence
  Description of Artificial Sequence: Synthetic oligonucleotide
gaaugacaggcuugagugg

SEQ ID NO: 1598242 - RNA, 19 nt, Artificial Sequence
  Description of Artificial Sequence: Synthetic oligonucleotide
agauccuuuaucaacuuug

SEQ ID NO: 1598243 - RNA, 19 nt, Artificial Sequence
  Description of Artificial Sequence: Synthetic oligonucleotide
cucgauaauggguuagcgc

SEQ ID NO: 1598244 - RNA, 19 nt, Artificial Sequence
  Description of Artificial Sequence: Synthetic oligonucleotide
uguucuaucuaggaaccug

SEQ ID NO: 1598245 - RNA, 19 nt, Artificial Sequence
  Description of Artificial Sequence: Synthetic oligonucleotide
aagcaggcguagaagagcg

SEQ ID NO: 1598246 - RNA, 19 nt, Artificial Sequence
  Description of Artificial Sequence: Synthetic oligonucleotide
ucgauggaagccaaugggu

SEQ ID NO: 1598247 - RNA, 19 nt, Artificial Sequence
  Description of Artificial Sequence: Synthetic oligonucleotide
gucuaaaagcagcuucugg

SEQ ID NO: 1598248 - RNA, 19 nt, Artificial Sequence
  Description of Artificial Sequence: Synthetic oligonucleotide
ccugaagaggucuaaaagc

SEQ ID NO: 1598249 - RNA, 19 nt, Artificial Sequence
  Description of Artificial Sequence: Synthetic oligonucleotide
caugcuuacugccuccucc

SEQ ID NO: 1598250 - RNA, 19 nt, Artificial Sequence
  Description of Artificial Sequence: Synthetic oligonucleotide
agagcguugucaccagugg

SEQ ID NO: 1598251 - RNA, 19 nt, Artificial Sequence
  Description of Artificial Sequence: Synthetic oligonucleotide
aauaggcaaaccaaugcaa

SEQ ID NO: 1598252 - RNA, 19 nt, Artificial Sequence
  Description of Artificial Sequence: Synthetic oligonucleotide
ugaaugcugugacucuucc

SEQ ID NO: 1598253 - RNA, 19 nt, Artificial Sequence
  Description of Artificial Sequence: Synthetic oligonucleotide
acguuuccaucaugcaugc

SEQ ID NO: 1598254 - RNA, 19 nt, Artificial Sequence
  Description of Artificial Sequence: Synthetic oligonucleotide
cguguaauggucuuguacg

SEQ ID NO: 1598255 - RNA, 19 nt, Artificial Sequence
  Description of Artificial Sequence: Synthetic oligonucleotide
uagaugucgaucguuugcc

SEQ ID NO: 1598256 - RNA, 19 nt, Artificial Sequence
  Description of Artificial Sequence: Synthetic oligonucleotide
ucucgauaauggguuagcg

SEQ ID NO: 1598257 - RNA, 19 nt, Artificial Sequence
  Description of Artificial Sequence: Synthetic oligonucleotide
ugacguuuccaucaugcau

SEQ ID NO: 1598258 - RNA, 19 nt, Artificial Sequence
  Description of Artificial Sequence: Synthetic oligonucleotide
agacgucuuacccuggaug

SEQ ID NO: 1598259 - RNA, 19 nt, Artificial Sequence
  Description of Artificial Sequence: Synthetic oligonucleotide
uuugcuccuguaugcaagc

SEQ ID NO: 1598260 - RNA, 19 nt, Artificial Sequence
  Description of Artificial Sequence: Synthetic oligonucleotide
aggcaaaccaaugcaaguc

SEQ ID NO: 1598261 - RNA, 19 nt, Artificial Sequence
  Description of Artificial Sequence: Synthetic oligonucleotide
gauacuggccuucggauaa

SEQ ID NO: 1598262 - RNA, 19 nt, Artificial Sequence
  Description of Artificial Sequence: Synthetic oligonucleotide
ucuagaugucgaucguuug

SEQ ID NO: 1598263 - RNA, 19 nt, Artificial Sequence
  Description of Artificial Sequence: Synthetic oligonucleotide
agcuuaguggcuaaguuca

SEQ ID NO: 1598264 - RNA, 19 nt, Artificial Sequence
  Description of Artificial Sequence: Synthetic oligonucleotide
gagcuuaguggcuaaguuc

SEQ ID NO: 1598265 - RNA, 19 nt, Artificial Sequence
  Description of Artificial Sequence: Synthetic oligonucleotide
cucgguguagugauagaag

SEQ ID NO: 1598266 - RNA, 19 nt, Artificial Sequence
  Description of Artificial Sequence: Synthetic oligonucleotide
auaggcaaaccaaugcaag

SEQ ID NO: 1598267 - RNA, 19 nt, Artificial Sequence
  Description of Artificial Sequence: Synthetic oligonucleotide
gcaauaucuggacaggggc

SEQ ID NO: 1598268 - RNA, 19 nt, Artificial Sequence
  Description of Artificial Sequence: Synthetic oligonucleotide
gguguagugauagaagcag

SEQ ID NO: 1598269 - RNA, 19 nt, Artificial Sequence
  Description of Artificial Sequence: Synthetic oligonucleotide
auuugcgagcuguugagaa

SEQ ID NO: 1598270 - RNA, 19 nt, Artificial Sequence
  Description of Artificial Sequence: Synthetic oligonucleotide
aucguuugccucaauaaug

SEQ ID NO: 1598271 - RNA, 19 nt, Artificial Sequence
  Description of Artificial Sequence: Synthetic oligonucleotide
ucgacgucauuccaggcuc

SEQ ID NO: 1598272 - RNA, 19 nt, Artificial Sequence
  Description of Artificial Sequence: Synthetic oligonucleotide
ugagcuuaguggcuaaguu

SEQ ID NO: 1598273 - RNA, 19 nt, Artificial Sequence
  Description of Artificial Sequence: Synthetic oligonucleotide
auggguuagcgccagcucu

SEQ ID NO: 1598274 - RNA, 19 nt, Artificial Sequence
  Description of Artificial Sequence: Synthetic oligonucleotide
ugcugugacucuuccaaga

SEQ ID NO: 1598275 - RNA, 19 nt, Artificial Sequence
  Description of Artificial Sequence: Synthetic oligonucleotide
uuccaggagcguguaaugg

SEQ ID NO: 1598276 - RNA, 19 nt, Artificial Sequence
  Description of Artificial Sequence: Synthetic oligonucleotide
uucagggcagcaaaugaua

SEQ ID NO: 1598277 - RNA, 19 nt, Artificial Sequence
  Description of Artificial Sequence: Synthetic oligonucleotide
aucgacgucauuccaggcu

SEQ ID NO: 1598278 - RNA, 19 nt, Artificial Sequence
  Description of Artificial Sequence: Synthetic oligonucleotide
aaaucagccugaagaucac

SEQ ID NO: 1598279 - RNA, 19 nt, Artificial Sequence
  Description of Artificial Sequence: Synthetic oligonucleotide
uguugagaauggaagcuuu

SEQ ID NO: 1598280 - RNA, 19 nt, Artificial Sequence
  Description of Artificial Sequence: Synthetic oligonucleotide
gauaauggguuagcgccag

SEQ ID NO: 1598281 - RNA, 19 nt, Artificial Sequence
  Description of Artificial Sequence: Synthetic oligonucleotide
aguggcauguugagaaugg

SEQ ID NO: 1598282 - RNA, 19 nt, Artificial Sequence
  Description of Artificial Sequence: Synthetic oligonucleotide
uaaugaucuggcguuccag

SEQ ID NO: 1598283 - RNA, 19 nt, Artificial Sequence
  Description of Artificial Sequence: Synthetic oligonucleotide
uguaauggucuuguacgug

SEQ ID NO: 1598284 - RNA, 19 nt, Artificial Sequence
  Description of Artificial Sequence: Synthetic oligonucleotide
ucuugguguaacccagcca

SEQ ID NO: 1598285 - RNA, 19 nt, Artificial Sequence
  Description of Artificial Sequence: Synthetic oligonucleotide
ucgcacuguaucacugggg

SEQ ID NO: 1598286 - RNA, 19 nt, Artificial Sequence
  Description of Artificial Sequence: Synthetic oligonucleotide
uugagaauggaagcuuuac

SEQ ID NO: 1598287 - RNA, 19 nt, Artificial Sequence
  Description of Artificial Sequence: Synthetic oligonucleotide
gaagagggcaucgacguca

SEQ ID NO: 1598288 - RNA, 19 nt, Artificial Sequence
  Description of Artificial Sequence: Synthetic oligonucleotide
aucaacuuugcuccuguau

SEQ ID NO: 1598289 - RNA, 19 nt, Artificial Sequence
  Description of Artificial Sequence: Synthetic oligonucleotide
guugaugggacugcugaag

SEQ ID NO: 1598290 - RNA, 19 nt, Artificial Sequence
  Description of Artificial Sequence: Synthetic oligonucleotide
ugaaaugucucagggcgac

SEQ ID NO: 1598291 - RNA, 19 nt, Artificial Sequence
  Description of Artificial Sequence: Synthetic oligonucleotide
aagagcguugucaccagug

SEQ ID NO: 1598292 - RNA, 19 nt, Artificial Sequence
  Description of Artificial Sequence: Synthetic oligonucleotide
gcuguugagaauggcaucg

SEQ ID NO: 1598293 - RNA, 19 nt, Artificial Sequence
  Description of Artificial Sequence: Synthetic oligonucleotide
aguucagucuuugugucca

SEQ ID NO: 1598294 - RNA, 19 nt, Artificial Sequence
  Description of Artificial Sequence: Synthetic oligonucleotide
agucauuacuauaaucccu

SEQ ID NO: 1598295 - RNA, 19 nt, Artificial Sequence
  Description of Artificial Sequence: Synthetic oligonucleotide
gaugucgaucguuugccuc

SEQ ID NO: 1598296 - RNA, 19 nt, Artificial Sequence
  Description of Artificial Sequence: Synthetic oligonucleotide
agcucucuauuuucauagg

SEQ ID NO: 1598297 - RNA, 19 nt, Artificial Sequence
  Description of Artificial Sequence: Synthetic oligonucleotide
ugucagcacauacugcuua

SEQ ID NO: 1598298 - RNA, 19 nt, Artificial Sequence
  Description of Artificial Sequence: Synthetic oligonucleotide
uucuuccaucgaauuugcg

SEQ ID NO: 1598299 - RNA, 19 nt, Artificial Sequence
  Description of Artificial Sequence: Synthetic oligonucleotide
cuuagauacuggccuucgg

SEQ ID NO: 1598300 - RNA, 19 nt, Artificial Sequence
  Description of Artificial Sequence: Synthetic oligonucleotide
ggcaaaaccuuagauacug

SEQ ID NO: 1598301 - RNA, 19 nt, Artificial Sequence
  Description of Artificial Sequence: Synthetic oligonucleotide
guuagcgccagcucuucug

SEQ ID NO: 1598302 - RNA, 19 nt, Artificial Sequence
  Description of Artificial Sequence: Synthetic oligonucleotide
ucucagggcgaccuggcgu

SEQ ID NO: 1598303 - RNA, 19 nt, Artificial Sequence
  Description of Artificial Sequence: Synthetic oligonucleotide
uccaggagcguguaauggu

SEQ ID NO: 1598304 - RNA, 19 nt, Artificial Sequence
  Description of Artificial Sequence: Synthetic oligonucleotide
cucaauaaugaucuggcgu

SEQ ID NO: 1598305 - RNA, 19 nt, Artificial Sequence
  Description of Artificial Sequence: Synthetic oligonucleotide
uaauggguuagcgccagcu

SEQ ID NO: 1598306 - RNA, 19 nt, Artificial Sequence
  Description of Artificial Sequence: Synthetic oligonucleotide
gcauguugagaauggaagc

SEQ ID NO: 1598307 - RNA, 19 nt, Artificial Sequence
  Description of Artificial Sequence: Synthetic oligonucleotide
ucagucuuuguguccacau

SEQ ID NO: 1598308 - RNA, 19 nt, Artificial Sequence
  Description of Artificial Sequence: Synthetic oligonucleotide
auaaugaucuggcguucca

SEQ ID NO: 1598309 - RNA, 19 nt, Artificial Sequence
  Description of Artificial Sequence: Synthetic oligonucleotide
uggugcagagcaucuuucc

SEQ ID NO: 1598310 - RNA, 19 nt, Artificial Sequence
  Description of Artificial Sequence: Synthetic oligonucleotide
ucgaucguuugccucaaua

SEQ ID NO: 1598311 - RNA, 19 nt, Artificial Sequence
  Description of Artificial Sequence: Synthetic oligonucleotide
auggcaucgaucuucucuu

SEQ ID NO: 1598312 - RNA, 19 nt, Artificial Sequence
  Description of Artificial Sequence: Synthetic oligonucleotide
guuugccucaauaaugauc

SEQ ID NO: 1598313 - RNA, 19 nt, Artificial Sequence
  Description of Artificial Sequence: Synthetic oligonucleotide
auguuuaaauguucucgau

SEQ ID NO: 1598314 - RNA, 19 nt, Artificial Sequence
  Description of Artificial Sequence: Synthetic oligonucleotide
uaguucuuccaucgaauuu

SEQ ID NO: 1598315 - RNA, 19 nt, Artificial Sequence
  Description of Artificial Sequence: Synthetic oligonucleotide
augcaagcaacugcugacg

SEQ ID NO: 1598316 - RNA, 19 nt, Artificial Sequence
  Description of Artificial Sequence: Synthetic oligonucleotide
ucgaauuugcgagcuguug

SEQ ID NO: 1598317 - RNA, 19 nt, Artificial Sequence
  Description of Artificial Sequence: Synthetic oligonucleotide
aucugggaucuugaaaguc

SEQ ID NO: 1598318 - RNA, 19 nt, Artificial Sequence
  Description of Artificial Sequence: Synthetic oligonucleotide
auaauggguuagcgccagc

SEQ ID NO: 1598319 - RNA, 19 nt, Artificial Sequence
  Description of Artificial Sequence: Synthetic oligonucleotide
aauuugcgagcuguugaga

SEQ ID NO: 1598320 - RNA, 19 nt, Artificial Sequence
  Description of Artificial Sequence: Synthetic oligonucleotide
gaagaucacaugcucagau

SEQ ID NO: 1598321 - RNA, 19 nt, Artificial Sequence
  Description of Artificial Sequence: Synthetic oligonucleotide
uuccaucgaauuugcgagc

SEQ ID NO: 1598322 - RNA, 19 nt, Artificial Sequence
  Description of Artificial Sequence: Synthetic oligonucleotide
guguagugauagaagcagg

SEQ ID NO: 1598323 - RNA, 19 nt, Artificial Sequence
  Description of Artificial Sequence: Synthetic oligonucleotide
uucucgauaauggguuagc

SEQ ID NO: 1598324 - RNA, 19 nt, Artificial Sequence
  Description of Artificial Sequence: Synthetic oligonucleotide
guagaagagcguugucacc

SEQ ID NO: 1598325 - RNA, 19 nt, Artificial Sequence
  Description of Artificial Sequence: Synthetic oligonucleotide
uuaguccagauguccuucu

SEQ ID NO: 1598326 - RNA, 19 nt, Artificial Sequence
  Description of Artificial Sequence: Synthetic oligonucleotide
uguaaggagcggaaucguu

SEQ ID NO: 1598327 - RNA, 19 nt, Artificial Sequence
  Description of Artificial Sequence: Synthetic oligonucleotide
guugagaauggcaucgauc

SEQ ID NO: 1598328 - RNA, 19 nt, Artificial Sequence
  Description of Artificial Sequence: Synthetic oligonucleotide
ugcuccuguaugcaagcaa

SEQ ID NO: 1598329 - RNA, 19 nt, Artificial Sequence
  Description of Artificial Sequence: Synthetic oligonucleotide
ucggacucgguguagugau

SEQ ID NO: 1598330 - RNA, 19 nt, Artificial Sequence
  Description of Artificial Sequence: Synthetic oligonucleotide
gcaucgacgucauuccagg

SEQ ID NO: 1598331 - RNA, 19 nt, Artificial Sequence
  Description of Artificial Sequence: Synthetic oligonucleotide
aaccuuagauacuggccuu

SEQ ID NO: 1598332 - RNA, 19 nt, Artificial Sequence
  Description of Artificial Sequence: Synthetic oligonucleotide
ucucggaaaaggaucucuu

SEQ ID NO: 1598333 - RNA, 19 nt, Artificial Sequence
  Description of Artificial Sequence: Synthetic oligonucleotide
agaagagcguugucaccag

SEQ ID NO: 1598334 - RNA, 19 nt, Artificial Sequence
  Description of Artificial Sequence: Synthetic oligonucleotide
guaauggucuuguacgugu

SEQ ID NO: 1598335 - RNA, 19 nt, Artificial Sequence
  Description of Artificial Sequence: Synthetic oligonucleotide
guaaggagcggaaucguuc

SEQ ID NO: 1598336 - RNA, 19 nt, Artificial Sequence
  Description of Artificial Sequence: Synthetic oligonucleotide
uucuaucuaggaaccugaa

SEQ ID NO: 1598337 - RNA, 19 nt, Artificial Sequence
  Description of Artificial Sequence: Synthetic oligonucleotide
agauugacauaguccugca

SEQ ID NO: 1598338 - RNA, 19 nt, Artificial Sequence
  Description of Artificial Sequence: Synthetic oligonucleotide
gacuaagacgucuuacccu

SEQ ID NO: 1598339 - RNA, 19 nt, Artificial Sequence
  Description of Artificial Sequence: Synthetic oligonucleotide
cugcagacucuagaugucg

SEQ ID NO: 1598340 - RNA, 19 nt, Artificial Sequence
  Description of Artificial Sequence: Synthetic oligonucleotide
uugagcuuaguggcuaagu

SEQ ID NO: 1598341 - RNA, 19 nt, Artificial Sequence
  Description of Artificial Sequence: Synthetic oligonucleotide
cuaagacgucuuacccugg

SEQ ID NO: 1598342 - RNA, 19 nt, Artificial Sequence
  Description of Artificial Sequence: Synthetic oligonucleotide
agagcucucuauuuucaua

SEQ ID NO: 1598343 - RNA, 19 nt, Artificial Sequence
  Description of Artificial Sequence: Synthetic oligonucleotide
gucucggcagguaucaaug

SEQ ID NO: 1598344 - RNA, 19 nt, Artificial Sequence
  Description of Artificial Sequence: Synthetic oligonucleotide
ucucugacuaagacgucuu

SEQ ID NO: 1598345 - RNA, 19 nt, Artificial Sequence
  Description of Artificial Sequence: Synthetic oligonucleotide
guuccaggagcguguaaug

SEQ ID NO: 1598346 - RNA, 19 nt, Artificial Sequence
  Description of Artificial Sequence: Synthetic oligonucleotide
gaucagaacugcagugaug

SEQ ID NO: 1598347 - RNA, 19 nt, Artificial Sequence
  Description of Artificial Sequence: Synthetic oligonucleotide
ugaagaucacaugcucaga

SEQ ID NO: 1598348 - RNA, 19 nt, Artificial Sequence
  Description of Artificial Sequence: Synthetic oligonucleotide
guucucgauaauggguuag

SEQ ID NO: 1598349 - RNA, 19 nt, Artificial Sequence
  Description of Artificial Sequence: Synthetic oligonucleotide
ccuguaaggagcggaaucg

SEQ ID NO: 1598350 - RNA, 19 nt, Artificial Sequence
  Description of Artificial Sequence: Synthetic oligonucleotide
guucuaucuaggaaccuga

SEQ ID NO: 1598351 - RNA, 19 nt, Artificial Sequence
  Description of Artificial Sequence: Synthetic oligonucleotide
gcggaaucguuccagggag

SEQ ID NO: 1598352 - RNA, 19 nt, Artificial Sequence
  Description of Artificial Sequence: Synthetic oligonucleotide
ugcaagucuuaagaauuuc

SEQ ID NO: 1598353 - RNA, 19 nt, Artificial Sequence
  Description of Artificial Sequence: Synthetic oligonucleotide
cuuacccuggaugggcucc

SEQ ID NO: 1598354 - RNA, 19 nt, Artificial Sequence
  Description of Artificial Sequence: Synthetic oligonucleotide
gaucguuugccucaauaau

SEQ ID NO: 1598355 - RNA, 19 nt, Artificial Sequence
  Description of Artificial Sequence: Synthetic oligonucleotide
cacagauccuuuaucaacu

SEQ ID NO: 1598356 - RNA, 19 nt, Artificial Sequence
  Description of Artificial Sequence: Synthetic oligonucleotide
ugcuuacugccuccuccag

SEQ ID NO: 1598357 - RNA, 19 nt, Artificial Sequence
  Description of Artificial Sequence: Synthetic oligonucleotide
auguucucgauaauggguu

SEQ ID NO: 1598358 - RNA, 19 nt, Artificial Sequence
  Description of Artificial Sequence: Synthetic oligonucleotide
agauacuggccuucggaua

SEQ ID NO: 1598359 - RNA, 19 nt, Artificial Sequence
  Description of Artificial Sequence: Synthetic oligonucleotide
ugacaggcuugagugguug

SEQ ID NO: 1598360 - RNA, 19 nt, Artificial Sequence
  Description of Artificial Sequence: Synthetic oligonucleotide
uguucucgauaauggguua

SEQ ID NO: 1598361 - RNA, 19 nt, Artificial Sequence
  Description of Artificial Sequence: Synthetic oligonucleotide
acucgguguagugauagaa

SEQ ID NO: 1598362 - RNA, 19 nt, Artificial Sequence
  Description of Artificial Sequence: Synthetic oligonucleotide
cuucuguucuaucuaggaa

SEQ ID NO: 1598363 - RNA, 19 nt, Artificial Sequence
  Description of Artificial Sequence: Synthetic oligonucleotide
uggggcagucacuucucug

SEQ ID NO: 1598364 - RNA, 19 nt, Artificial Sequence
  Description of Artificial Sequence: Synthetic oligonucleotide
ccugaauguuuaaauguuc

SEQ ID NO: 1598365 - RNA, 19 nt, Artificial Sequence
  Description of Artificial Sequence: Synthetic oligonucleotide
gauugacauaguccugcaa

SEQ ID NO: 1598366 - RNA, 19 nt, Artificial Sequence
  Description of Artificial Sequence: Synthetic oligonucleotide
uguacgugugcagaaucuu

SEQ ID NO: 1598367 - RNA, 19 nt, Artificial Sequence
  Description of Artificial Sequence: Synthetic oligonucleotide
ucuuguacgugugcagaau

SEQ ID NO: 1598368 - RNA, 19 nt, Artificial Sequence
  Description of Artificial Sequence: Synthetic oligonucleotide
caacaucauggcacuugag

SEQ ID NO: 1598369 - RNA, 19 nt, Artificial Sequence
  Description of Artificial Sequence: Synthetic oligonucleotide
aggagcggaaucguuccag

SEQ ID NO: 1598370 - RNA, 19 nt, Artificial Sequence
  Description of Artificial Sequence: Synthetic oligonucleotide
caaugcaagucuuaagaau

SEQ ID NO: 1598371 - RNA, 19 nt, Artificial Sequence
  Description of Artificial Sequence: Synthetic oligonucleotide
gcguguaauggucuuguac

SEQ ID NO: 1598372 - RNA, 19 nt, Artificial Sequence
  Description of Artificial Sequence: Synthetic oligonucleotide
uggcguuccaggagcgugu

SEQ ID NO: 1598373 - RNA, 19 nt, Artificial Sequence
  Description of Artificial Sequence: Synthetic oligonucleotide
cguagaagagcguugucac

SEQ ID NO: 1598374 - RNA, 19 nt, Artificial Sequence
  Description of Artificial Sequence: Synthetic oligonucleotide
cagacucuagaugucgauc

SEQ ID NO: 1598375 - RNA, 19 nt, Artificial Sequence
  Description of Artificial Sequence: Synthetic oligonucleotide
gaagccaaugggugcucuc

SEQ ID NO: 1598376 - RNA, 19 nt, Artificial Sequence
  Description of Artificial Sequence: Synthetic oligonucleotide
gcguacuuccaacucucgg

SEQ ID NO: 1598377 - RNA, 19 nt, Artificial Sequence
  Description of Artificial Sequence: Synthetic oligonucleotide
ggaaaugaaugaaaugucu

SEQ ID NO: 1598378 - RNA, 19 nt, Artificial Sequence
  Description of Artificial Sequence: Synthetic oligonucleotide
uuuccacaacucgauggaa

SEQ ID NO: 1598379 - RNA, 19 nt, Artificial Sequence
  Description of Artificial Sequence: Synthetic oligonucleotide
caucgacgucauuccaggc

SEQ ID NO: 1598380 - RNA, 19 nt, Artificial Sequence
  Description of Artificial Sequence: Synthetic oligonucleotide
caauaaugaucuggcguuc

SEQ ID NO: 1598381 - RNA, 19 nt, Artificial Sequence
  Description of Artificial Sequence: Synthetic oligonucleotide
caguggcauguugagaaug

SEQ ID NO: 1598382 - RNA, 19 nt, Artificial Sequence
  Description of Artificial Sequence: Synthetic oligonucleotide
uuccaucaugcaugcuuac

SEQ ID NO: 1598383 - RNA, 19 nt, Artificial Sequence
  Description of Artificial Sequence: Synthetic oligonucleotide
aagguccccucggacucgg

SEQ ID NO: 1598384 - RNA, 19 nt, Artificial Sequence
  Description of Artificial Sequence: Synthetic oligonucleotide
auguugagaauggaagcuu

SEQ ID NO: 1598385 - RNA, 19 nt, Artificial Sequence
  Description of Artificial Sequence: Synthetic oligonucleotide
uggguuagcgccagcucuu

SEQ ID NO: 1598386 - RNA, 19 nt, Artificial Sequence
  Description of Artificial Sequence: Synthetic oligonucleotide
gaaaugucucagggcgacc

SEQ ID NO: 1598387 - RNA, 19 nt, Artificial Sequence
  Description of Artificial Sequence: Synthetic oligonucleotide
acgucuuacccuggauggg

SEQ ID NO: 1598388 - RNA, 19 nt, Artificial Sequence
  Description of Artificial Sequence: Synthetic oligonucleotide
cauguugagaauggaagcu

SEQ ID NO: 1598389 - RNA, 19 nt, Artificial Sequence
  Description of Artificial Sequence: Synthetic oligonucleotide
aucguuccagggagcagac

SEQ ID NO: 1598390 - RNA, 19 nt, Artificial Sequence
  Description of Artificial Sequence: Synthetic oligonucleotide
gaagguccccucggacucg

SEQ ID NO: 1598391 - RNA, 19 nt, Artificial Sequence
  Description of Artificial Sequence: Synthetic oligonucleotide
aggcgucgcacuguaucac

SEQ ID NO: 1598392 - RNA, 19 nt, Artificial Sequence
  Description of Artificial Sequence: Synthetic oligonucleotide
agcagaccuugccccggcg

SEQ ID NO: 1598393 - RNA, 19 nt, Artificial Sequence
  Description of Artificial Sequence: Synthetic oligonucleotide
ugguguaacccagccaguu

SEQ ID NO: 1598394 - RNA, 19 nt, Artificial Sequence
  Description of Artificial Sequence: Synthetic oligonucleotide
augaaaugucucagggcga

SEQ ID NO: 1598395 - RNA, 19 nt, Artificial Sequence
  Description of Artificial Sequence: Synthetic oligonucleotide
ggcgaccuggcguacuucc

SEQ ID NO: 1598396 - RNA, 19 nt, Artificial Sequence
  Description of Artificial Sequence: Synthetic oligonucleotide
uaucaacuuugcuccugua

SEQ ID NO: 1598397 - RNA, 19 nt, Artificial Sequence
  Description of Artificial Sequence: Synthetic oligonucleotide
guguaauggucuuguacgu

SEQ ID NO: 1598398 - RNA, 19 nt, Artificial Sequence
  Description of Artificial Sequence: Synthetic oligonucleotide
gcuccuguaugcaagcaac

SEQ ID NO: 1598399 - RNA, 19 nt, Artificial Sequence
  Description of Artificial Sequence: Synthetic oligonucleotide
agccugaagaucacaugcu

SEQ ID NO: 1598400 - RNA, 19 nt, Artificial Sequence
  Description of Artificial Sequence: Synthetic oligonucleotide
acucucggaaaaggaucuc

SEQ ID NO: 1598401 - RNA, 19 nt, Artificial Sequence
  Description of Artificial Sequence: Synthetic oligonucleotide
acccuggaugggcucccac

SEQ ID NO: 1598402 - RNA, 19 nt, Artificial Sequence
  Description of Artificial Sequence: Synthetic oligonucleotide
uaucuggacaggggcgcug

SEQ ID NO: 1598403 - RNA, 19 nt, Artificial Sequence
  Description of Artificial Sequence: Synthetic oligonucleotide
uacuggccuucggauaaug

SEQ ID NO: 1598404 - RNA, 19 nt, Artificial Sequence
  Description of Artificial Sequence: Synthetic oligonucleotide
uuacccuggaugggcuccc

SEQ ID NO: 1598405 - RNA, 19 nt, Artificial Sequence
  Description of Artificial Sequence: Synthetic oligonucleotide
cgauggaagccaaugggug

SEQ ID NO: 1598406 - RNA, 19 nt, Artificial Sequence
  Description of Artificial Sequence: Synthetic oligonucleotide
gggagcagaccuugccccg

SEQ ID NO: 1598407 - RNA, 19 nt, Artificial Sequence
  Description of Artificial Sequence: Synthetic oligonucleotide
gcagaccuugccccggcgg

SEQ ID NO: 1598408 - RNA, 19 nt, Artificial Sequence
  Description of Artificial Sequence: Synthetic oligonucleotide
aggagcguguaauggucuu

SEQ ID NO: 1598409 - RNA, 19 nt, Artificial Sequence
  Description of Artificial Sequence: Synthetic oligonucleotide
gcguagaagagcguuguca

SEQ ID NO: 1598410 - RNA, 19 nt, Artificial Sequence
  Description of Artificial Sequence: Synthetic oligonucleotide
ugcagguuucuguccccaa

SEQ ID NO: 1598411 - RNA, 19 nt, Artificial Sequence
  Description of Artificial Sequence: Synthetic oligonucleotide
guccugcaauaucuggaca

SEQ ID NO: 1598412 - RNA, 19 nt, Artificial Sequence
  Description of Artificial Sequence: Synthetic oligonucleotide
ggcaaaccaaugcaagucu

SEQ ID NO: 1598413 - RNA, 19 nt, Artificial Sequence
  Description of Artificial Sequence: Synthetic oligonucleotide
augcaagucuuaagaauuu

SEQ ID NO: 1598414 - RNA, 19 nt, Artificial Sequence
  Description of Artificial Sequence: Synthetic oligonucleotide
agaggucuaaaagcagcuu

SEQ ID NO: 1598415 - RNA, 19 nt, Artificial Sequence
  Description of Artificial Sequence: Synthetic oligonucleotide
caucgaauuugcgagcugu

SEQ ID NO: 1598416 - RNA, 19 nt, Artificial Sequence
  Description of Artificial Sequence: Synthetic oligonucleotide
cagguaucaaugacaacau

SEQ ID NO: 1598417 - RNA, 19 nt, Artificial Sequence
  Description of Artificial Sequence: Synthetic oligonucleotide
ccaggagcguguaaugguc

SEQ ID NO: 1598418 - RNA, 19 nt, Artificial Sequence
  Description of Artificial Sequence: Synthetic oligonucleotide
ggaaucguuccagggagca

SEQ ID NO: 1598419 - RNA, 19 nt, Artificial Sequence
  Description of Artificial Sequence: Synthetic oligonucleotide
ccuuagauacuggccuucg

SEQ ID NO: 1598420 - RNA, 19 nt, Artificial Sequence
  Description of Artificial Sequence: Synthetic oligonucleotide
acaacucgauggaagccaa

SEQ ID NO: 1598421 - RNA, 19 nt, Artificial Sequence
  Description of Artificial Sequence: Synthetic oligonucleotide
acuggccuucggauaaugu

SEQ ID NO: 1598422 - RNA, 19 nt, Artificial Sequence
  Description of Artificial Sequence: Synthetic oligonucleotide
cucuagaugucgaucguuu

SEQ ID NO: 1598423 - RNA, 19 nt, Artificial Sequence
  Description of Artificial Sequence: Synthetic oligonucleotide
auaucuggacaggggcgcu

SEQ ID NO: 1598424 - RNA, 19 nt, Artificial Sequence
  Description of Artificial Sequence: Synthetic oligonucleotide
gagcguguaauggucuugu

SEQ ID NO: 1598425 - RNA, 19 nt, Artificial Sequence
  Description of Artificial Sequence: Synthetic oligonucleotide
agaccuugccccggcggag

SEQ ID NO: 1598426 - RNA, 19 nt, Artificial Sequence
  Description of Artificial Sequence: Synthetic oligonucleotide
cucagggcgaccuggcgua

SEQ ID NO: 1598427 - RNA, 19 nt, Artificial Sequence
  Description of Artificial Sequence: Synthetic oligonucleotide
cagccaaggcugucagcac

SEQ ID NO: 1598428 - RNA, 19 nt, Artificial Sequence
  Description of Artificial Sequence: Synthetic oligonucleotide
cgaauuugcgagcuguuga

SEQ ID NO: 1598429 - RNA, 19 nt, Artificial Sequence
  Description of Artificial Sequence: Synthetic oligonucleotide
cagaccuugccccggcgga

SEQ ID NO: 1598430 - RNA, 19 nt, Artificial Sequence
  Description of Artificial Sequence: Synthetic oligonucleotide
gaagagcguugucaccagu

SEQ ID NO: 1598431 - RNA, 19 nt, Artificial Sequence
  Description of Artificial Sequence: Synthetic oligonucleotide
cccuggaugggcucccacc

SEQ ID NO: 1598432 - RNA, 19 nt, Artificial Sequence
  Description of Artificial Sequence: Synthetic oligonucleotide
cucggacucgguguaguga

SEQ ID NO: 1598433 - RNA, 19 nt, Artificial Sequence
  Description of Artificial Sequence: Synthetic oligonucleotide
ggguccugaauguuuaaau

SEQ ID NO: 1598434 - RNA, 19 nt, Artificial Sequence
  Description of Artificial Sequence: Synthetic oligonucleotide
ggagcagaccuugccccgg

SEQ ID NO: 1598435 - RNA, 19 nt, Artificial Sequence
  Description of Artificial Sequence: Synthetic oligonucleotide
ggagcguguaauggucuug

SEQ ID NO: 1598436 - RNA, 19 nt, Artificial Sequence
  Description of Artificial Sequence: Synthetic oligonucleotide
guaucacuggggcuccagu

SEQ ID NO: 1598437 - RNA, 19 nt, Artificial Sequence
  Description of Artificial Sequence: Synthetic oligonucleotide
cuuaguggcuaaguucagu

SEQ ID NO: 1598438 - RNA, 19 nt, Artificial Sequence
  Description of Artificial Sequence: Synthetic oligonucleotide
ucguuccagggagcagacc

SEQ ID NO: 1598439 - RNA, 19 nt, Artificial Sequence
  Description of Artificial Sequence: Synthetic oligonucleotide
agcguguaauggucuugua

SEQ ID NO: 1598440 - RNA, 19 nt, Artificial Sequence
  Description of Artificial Sequence: Synthetic oligonucleotide
ccacaacucgauggaagcc

SEQ ID NO: 1598441 - RNA, 19 nt, Artificial Sequence
  Description of Artificial Sequence: Synthetic oligonucleotide
cgucgcacuguaucacugg

SEQ ID NO: 1598442 - RNA, 19 nt, Artificial Sequence
  Description of Artificial Sequence: Synthetic oligonucleotide
aucgaauuugcgagcuguu

SEQ ID NO: 1598443 - RNA, 19 nt, Artificial Sequence
  Description of Artificial Sequence: Synthetic oligonucleotide
ggcguacuuccaacucucg

SEQ ID NO: 1598444 - RNA, 19 nt, Artificial Sequence
  Description of Artificial Sequence: Synthetic oligonucleotide
ccuggcguacuuccaacuc

SEQ ID NO: 1598445 - RNA, 19 nt, Artificial Sequence
  Description of Artificial Sequence: Synthetic oligonucleotide
agguuucagggcagcaaau

SEQ ID NO: 1598446 - RNA, 19 nt, Artificial Sequence
  Description of Artificial Sequence: Synthetic oligonucleotide
guccccucggacucggugu

SEQ ID NO: 1598447 - RNA, 19 nt, Artificial Sequence
  Description of Artificial Sequence: Synthetic oligonucleotide
agggcgaccuggcguacuu

SEQ ID NO: 1598448 - RNA, 19 nt, Artificial Sequence
  Description of Artificial Sequence: Synthetic oligonucleotide
cucucggaaaaggaucucu

SEQ ID NO: 1598449 - RNA, 19 nt, Artificial Sequence
  Description of Artificial Sequence: Synthetic oligonucleotide
cgaucguuugccucaauaa

SEQ ID NO: 1598450 - RNA, 19 nt, Artificial Sequence
  Description of Artificial Sequence: Synthetic oligonucleotide
gccaaugggugcucucuuc

SEQ ID NO: 1598451 - RNA, 19 nt, Artificial Sequence
  Description of Artificial Sequence: Synthetic oligonucleotide
cacuugagcuuaguggcua

SEQ ID NO: 1598452 - RNA, 19 nt, Artificial Sequence
  Description of Artificial Sequence: Synthetic oligonucleotide
cucggaaaaggaucucuuu

SEQ ID NO: 1598453 - RNA, 19 nt, Artificial Sequence
  Description of Artificial Sequence: Synthetic oligonucleotide
cucugacuaagacgucuua

SEQ ID NO: 1598454 - RNA, 19 nt, Artificial Sequence
  Description of Artificial Sequence: Synthetic oligonucleotide
gcuuaguggcuaaguucag

SEQ ID NO: 1598455 - RNA, 19 nt, Artificial Sequence
  Description of Artificial Sequence: Synthetic oligonucleotide
caggagcguguaauggucu

SEQ ID NO: 1598456 - RNA, 19 nt, Artificial Sequence
  Description of Artificial Sequence: Synthetic oligonucleotide
gggugcuuucggaagaucu

SEQ ID NO: 1598457 - RNA, 19 nt, Artificial Sequence
  Description of Artificial Sequence: Synthetic oligonucleotide
ccaacucucggaaaaggau

SEQ ID NO: 1598458 - RNA, 19 nt, Artificial Sequence
  Description of Artificial Sequence: Synthetic oligonucleotide
acgucauuccaggcucgaa

SEQ ID NO: 1598459 - RNA, 19 nt, Artificial Sequence
  Description of Artificial Sequence: Synthetic oligonucleotide
cgauaauggguuagcgcca

SEQ ID NO: 1598460 - RNA, 19 nt, Artificial Sequence
  Description of Artificial Sequence: Synthetic oligonucleotide
gcgucgcacuguaucacug

SEQ ID NO: 1598461 - RNA, 19 nt, Artificial Sequence
  Description of Artificial Sequence: Synthetic oligonucleotide
ccaucgaauuugcgagcug

SEQ ID NO: 1598462 - RNA, 19 nt, Artificial Sequence
  Description of Artificial Sequence: Synthetic oligonucleotide
ggucucggcagguaucaau

SEQ ID NO: 1598463 - RNA, 19 nt, Artificial Sequence
  Description of Artificial Sequence: Synthetic oligonucleotide
gcgagcuguugagaauggc

SEQ ID NO: 1598464 - RNA, 19 nt, Artificial Sequence
  Description of Artificial Sequence: Synthetic oligonucleotide
ccucggacucgguguagug

SEQ ID NO: 1598465 - RNA, 19 nt, Artificial Sequence
  Description of Artificial Sequence: Synthetic oligonucleotide
cgacgucauuccaggcucg

SEQ ID NO: 1598466 - RNA, 19 nt, Artificial Sequence
  Description of Artificial Sequence: Synthetic oligonucleotide
gucuuacccuggaugggcu

SEQ ID NO: 1598467 - RNA, 19 nt, Artificial Sequence
  Description of Artificial Sequence: Synthetic oligonucleotide
gcaugcuuacugccuccuc

SEQ ID NO: 1598468 - RNA, 19 nt, Artificial Sequence
  Description of Artificial Sequence: Synthetic oligonucleotide
ggcuaaguucagucuuugu

SEQ ID NO: 1598469 - RNA, 19 nt, Artificial Sequence
  Description of Artificial Sequence: Synthetic oligonucleotide
cggaaucguuccagggagc

SEQ ID NO: 1598470 - RNA, 19 nt, Artificial Sequence
  Description of Artificial Sequence: Synthetic oligonucleotide
agcaggcguagaagagcgu

SEQ ID NO: 1598471 - RNA, 19 nt, Artificial Sequence
  Description of Artificial Sequence: Synthetic oligonucleotide
ccaaugggugcucucuucu

SEQ ID NO: 1598472 - RNA, 19 nt, Artificial Sequence
  Description of Artificial Sequence: Synthetic oligonucleotide
caaugggugcucucuucuu

SEQ ID NO: 1598473 - RNA, 19 nt, Artificial Sequence
  Description of Artificial Sequence: Synthetic oligonucleotide
gcucgaagcuuggcacgag

SEQ ID NO: 1598474 - RNA, 19 nt, Artificial Sequence
  Description of Artificial Sequence: Synthetic oligonucleotide
ggcgucgcacuguaucacu

SEQ ID NO: 1598475 - RNA, 19 nt, Artificial Sequence
  Description of Artificial Sequence: Synthetic oligonucleotide
cuguucuaucuaggaaccu

SEQ ID NO: 1598476 - RNA, 19 nt, Artificial Sequence
  Description of Artificial Sequence: Synthetic oligonucleotide
cuugccccggcggaggcgu

SEQ ID NO: 1598477 - RNA, 19 nt, Artificial Sequence
  Description of Artificial Sequence: Synthetic oligonucleotide
ggaugggcucccaccuuuc

SEQ ID NO: 1598478 - RNA, 19 nt, Artificial Sequence
  Description of Artificial Sequence: Synthetic oligonucleotide
cuggggcagucacuucucu

SEQ ID NO: 1598479 - RNA, 19 nt, Artificial Sequence
  Description of Artificial Sequence: Synthetic oligonucleotide
gcaaaccaaugcaagucuu

SEQ ID NO: 1598480 - RNA, 19 nt, Artificial Sequence
  Description of Artificial Sequence: Synthetic oligonucleotide
gguuagcgccagcucuucu

SEQ ID NO: 1598481 - RNA, 19 nt, Artificial Sequence
  Description of Artificial Sequence: Synthetic oligonucleotide
gcaggcguagaagagcguu

SEQ ID NO: 1598482 - RNA, 19 nt, Artificial Sequence
  Description of Artificial Sequence: Synthetic oligonucleotide
ggguuagcgccagcucuuc

SEQ ID NO: 1598483 - RNA, 19 nt, Artificial Sequence
  Description of Artificial Sequence: Synthetic oligonucleotide
caacucgauggaagccaau

SEQ ID NO: 1598484 - RNA, 19 nt, Artificial Sequence
  Description of Artificial Sequence: Synthetic oligonucleotide
ggggugcuuucggaagauc

SEQ ID NO: 1598485 - RNA, 19 nt, Artificial Sequence
  Description of Artificial Sequence: Synthetic oligonucleotide
ggaagccaaugggugcucu

SEQ ID NO: 1598486 - RNA, 19 nt, Artificial Sequence
  Description of Artificial Sequence: Synthetic oligonucleotide
cuguaucacuggggcucca

SEQ ID NO: 1598487 - RNA, 19 nt, Artificial Sequence
  Description of Artificial Sequence: Synthetic oligonucleotide
cgagcagccaaggcuguca

SEQ ID NO: 1598488 - RNA, 19 nt, Artificial Sequence
  Description of Artificial Sequence: Synthetic oligonucleotide
gcggaggcgucgcacugua

SEQ ID NO: 1598489 - RNA, 19 nt, Artificial Sequence
  Description of Artificial Sequence: Synthetic oligonucleotide
gcgaccuggcguacuucca

SEQ ID NO: 1598490 - RNA, 19 nt, Artificial Sequence
  Description of Artificial Sequence: Synthetic oligonucleotide
gcguugucaccaguggcau

SEQ ID NO: 1598491 - RNA, 19 nt, Artificial Sequence
  Description of Artificial Sequence: Synthetic oligonucleotide
cccggcggaggcgucgcac

SEQ ID NO: 1598492 - RNA, 19 nt, Artificial Sequence
  Description of Artificial Sequence: Synthetic oligonucleotide
gggcgaccuggcguacuuc

SEQ ID NO: 1598493 - RNA, 19 nt, Artificial Sequence
  Description of Artificial Sequence: Synthetic oligonucleotide
ccaguggcauguugagaau

SEQ ID NO: 1598494 - RNA, 19 nt, Artificial Sequence
  Description of Artificial Sequence: Synthetic oligonucleotide
cacuggggcuccagucauu

SEQ ID NO: 1598495 - RNA, 19 nt, Artificial Sequence
  Description of Artificial Sequence: Synthetic oligonucleotide
cguuugccucaauaaugau

SEQ ID NO: 1598496 - RNA, 19 nt, Artificial Sequence
  Description of Artificial Sequence: Synthetic oligonucleotide
cagggcgaccuggcguacu

SEQ ID NO: 1598497 - RNA, 19 nt, Artificial Sequence
  Description of Artificial Sequence: Synthetic oligonucleotide
cccucggacucgguguagu

SEQ ID NO: 1598498 - RNA, 19 nt, Artificial Sequence
  Description of Artificial Sequence: Synthetic oligonucleotide
cggacucgguguagugaua

SEQ ID NO: 1598499 - RNA, 19 nt, Artificial Sequence
  Description of Artificial Sequence: Synthetic oligonucleotide
ccccggcggaggcgucgca

SEQ ID NO: 1598500 - RNA, 19 nt, Artificial Sequence
  Description of Artificial Sequence: Synthetic oligonucleotide
aagacaucauucuccaagg

SEQ ID NO: 1598501 - RNA, 19 nt, Artificial Sequence
  Description of Artificial Sequence: Synthetic oligonucleotide
aaaaggguacucgucaccc

SEQ ID NO: 1598502 - RNA, 19 nt, Artificial Sequence
  Description of Artificial Sequence: Synthetic oligonucleotide
aaguacuuuauuucugguc

SEQ ID NO: 1598503 - RNA, 19 nt, Artificial Sequence
  Description of Artificial Sequence: Synthetic oligonucleotide
acacacgcaggucugaacc

SEQ ID NO: 1598504 - RNA, 19 nt, Artificial Sequence
  Description of Artificial Sequence: Synthetic oligonucleotide
acugccauaccuuaaagga

SEQ ID NO: 1598505 - RNA, 19 nt, Artificial Sequence
  Description of Artificial Sequence: Synthetic oligonucleotide
gauaaaaccaccggcagug

SEQ ID NO: 1598506 - RNA, 19 nt, Artificial Sequence
  Description of Artificial Sequence: Synthetic oligonucleotide
aacggcaggacccagccag

SEQ ID NO: 1598507 - RNA, 19 nt, Artificial Sequence
  Description of Artificial Sequence: Synthetic oligonucleotide
agcgcauaggcccaaaggg

SEQ ID NO: 1598508 - RNA, 19 nt, Artificial Sequence
  Description of Artificial Sequence: Synthetic oligonucleotide
aaucccaagacaucauucu

SEQ ID NO: 1598509 - RNA, 19 nt, Artificial Sequence
  Description of Artificial Sequence: Synthetic oligonucleotide
cuucuggcgaguaacaccc

SEQ ID NO: 1598510 - RNA, 19 nt, Artificial Sequence
  Description of Artificial Sequence: Synthetic oligonucleotide
ccuuaaaggacccaaaucc

SEQ ID NO: 1598511 - RNA, 19 nt, Artificial Sequence
  Description of Artificial Sequence: Synthetic oligonucleotide
cuuaaaggacccaaauccc

SEQ ID NO: 1598512 - RNA, 19 nt, Artificial Sequence
  Description of Artificial Sequence: Synthetic oligonucleotide
uuaaaggacccaaauccca

SEQ ID NO: 1598513 - RNA, 19 nt, Artificial Sequence
  Description of Artificial Sequence: Synthetic oligonucleotide
aguguggugagaaugcggc

SEQ ID NO: 1598514 - RNA, 19 nt, Artificial Sequence
  Description of Artificial Sequence: Synthetic oligonucleotide
gaaaggaagcaccaauggc

SEQ ID NO: 1598515 - RNA, 19 nt, Artificial Sequence
  Description of Artificial Sequence: Synthetic oligonucleotide
uccuuuuccgcaaaacccc

SEQ ID NO: 1598516 - RNA, 19 nt, Artificial Sequence
  Description of Artificial Sequence: Synthetic oligonucleotide
aaaggguacucgucacccc

SEQ ID NO: 1598517 - RNA, 19 nt, Artificial Sequence
  Description of Artificial Sequence: Synthetic oligonucleotide
ugagaaugcggcuccagag

SEQ ID NO: 1598518 - RNA, 19 nt, Artificial Sequence
  Description of Artificial Sequence: Synthetic oligonucleotide
agaaugcggcuccagagcg

SEQ ID NO: 1598519 - RNA, 19 nt, Artificial Sequence
  Description of Artificial Sequence: Synthetic oligonucleotide
aaaccaccggcagugaacg

SEQ ID NO: 1598520 - RNA, 19 nt, Artificial Sequence
  Description of Artificial Sequence: Synthetic oligonucleotide
uuuauuucuggucaccguu

SEQ ID NO: 1598521 - RNA, 19 nt, Artificial Sequence
  Description of Artificial Sequence: Synthetic oligonucleotide
accuuaaaggacccaaauc

SEQ ID NO: 1598522 - RNA, 19 nt, Artificial Sequence
  Description of Artificial Sequence: Synthetic oligonucleotide
gugacaagggcacacgccg

SEQ ID NO: 1598523 - RNA, 19 nt, Artificial Sequence
  Description of Artificial Sequence: Synthetic oligonucleotide
gaucaguaccaucaugacc

SEQ ID NO: 1598524 - RNA, 19 nt, Artificial Sequence
  Description of Artificial Sequence: Synthetic oligonucleotide
ucuccaaggcuaaaacucc

SEQ ID NO: 1598525 - RNA, 19 nt, Artificial Sequence
  Description of Artificial Sequence: Synthetic oligonucleotide
cacguagauaaaaccaccg

SEQ ID NO: 1598526 - RNA, 19 nt, Artificial Sequence
  Description of Artificial Sequence: Synthetic oligonucleotide
acguagauaaaaccaccgg

SEQ ID NO: 1598527 - RNA, 19 nt, Artificial Sequence
  Description of Artificial Sequence: Synthetic oligonucleotide
ucaggcaacacggacacug

SEQ ID NO: 1598528 - RNA, 19 nt, Artificial Sequence
  Description of Artificial Sequence: Synthetic oligonucleotide
ugucauuguggucaggauc

SEQ ID NO: 1598529 - RNA, 19 nt, Artificial Sequence
  Description of Artificial Sequence: Synthetic oligonucleotide
uucuuuugaaggacacucc

SEQ ID NO: 1598530 - RNA, 19 nt, Artificial Sequence
  Description of Artificial Sequence: Synthetic oligonucleotide
ucccgacccauucaaacag

SEQ ID NO: 1598531 - RNA, 19 nt, Artificial Sequence
  Description of Artificial Sequence: Synthetic oligonucleotide
agacaucauucuccaaggc

SEQ ID NO: 1598532 - RNA, 19 nt, Artificial Sequence
  Description of Artificial Sequence: Synthetic oligonucleotide
uccguguccgccuuucacg

SEQ ID NO: 1598533 - RNA, 19 nt, Artificial Sequence
  Description of Artificial Sequence: Synthetic oligonucleotide
aaagggacuguaaugggga

SEQ ID NO: 1598534 - RNA, 19 nt, Artificial Sequence
  Description of Artificial Sequence: Synthetic oligonucleotide
aaggcgacaaucccacuga

SEQ ID NO: 1598535 - RNA, 19 nt, Artificial Sequence
  Description of Artificial Sequence: Synthetic oligonucleotide
caaaagggacuguaauggg

SEQ ID NO: 1598536 - RNA, 19 nt, Artificial Sequence
  Description of Artificial Sequence: Synthetic oligonucleotide
aauggggacgccucucuca

SEQ ID NO: 1598537 - RNA, 19 nt, Artificial Sequence
  Description of Artificial Sequence: Synthetic oligonucleotide
cugucuaucugggaguugg

SEQ ID NO: 1598538 - RNA, 19 nt, Artificial Sequence
  Description of Artificial Sequence: Synthetic oligonucleotide
aggagcuggagacgcaucg

SEQ ID NO: 1598539 - RNA, 19 nt, Artificial Sequence
  Description of Artificial Sequence: Synthetic oligonucleotide
uaaaggacccaaaucccaa

SEQ ID NO: 1598540 - RNA, 19 nt, Artificial Sequence
  Description of Artificial Sequence: Synthetic oligonucleotide
augagcauggcuuccgugu

SEQ ID NO: 1598541 - RNA, 19 nt, Artificial Sequence
  Description of Artificial Sequence: Synthetic oligonucleotide
cugagcaagaccuggagca

SEQ ID NO: 1598542 - RNA, 19 nt, Artificial Sequence
  Description of Artificial Sequence: Synthetic oligonucleotide
gagaaugcggcuccagagc

SEQ ID NO: 1598543 - RNA, 19 nt, Artificial Sequence
  Description of Artificial Sequence: Synthetic oligonucleotide
uucgacuccaccgggauga

SEQ ID NO: 1598544 - RNA, 19 nt, Artificial Sequence
  Description of Artificial Sequence: Synthetic oligonucleotide
uggcgaguaacacccgccg

SEQ ID NO: 1598545 - RNA, 19 nt, Artificial Sequence
  Description of Artificial Sequence: Synthetic oligonucleotide
aggcuaaaacuccuucuuc

SEQ ID NO: 1598546 - RNA, 19 nt, Artificial Sequence
  Description of Artificial Sequence: Synthetic oligonucleotide
uguugagcagugcccaaca

SEQ ID NO: 1598547 - RNA, 19 nt, Artificial Sequence
  Description of Artificial Sequence: Synthetic oligonucleotide
ugacugccauaccuuaaag

SEQ ID NO: 1598548 - RNA, 19 nt, Artificial Sequence
  Description of Artificial Sequence: Synthetic oligonucleotide
aguaacacccgccgccagg

SEQ ID NO: 1598549 - RNA, 19 nt, Artificial Sequence
  Description of Artificial Sequence: Synthetic oligonucleotide
uacucgucaccccaguccu

SEQ ID NO: 1598550 - RNA, 19 nt, Artificial Sequence
  Description of Artificial Sequence: Synthetic oligonucleotide
gugacuguguccguguccg

SEQ ID NO: 1598551 - RNA, 19 nt, Artificial Sequence
  Description of Artificial Sequence: Synthetic oligonucleotide
uaccuuaaaggacccaaau

SEQ ID NO: 1598552 - RNA, 19 nt, Artificial Sequence
  Description of Artificial Sequence: Synthetic oligonucleotide
caccucacuacccauugcc

SEQ ID NO: 1598553 - RNA, 19 nt, Artificial Sequence
  Description of Artificial Sequence: Synthetic oligonucleotide
accgggaugaggaagagca

SEQ ID NO: 1598554 - RNA, 19 nt, Artificial Sequence
  Description of Artificial Sequence: Synthetic oligonucleotide
ugcgggauaaggugcagga

SEQ ID NO: 1598555 - RNA, 19 nt, Artificial Sequence
  Description of Artificial Sequence: Synthetic oligonucleotide
cagguacccagacacacgc

SEQ ID NO: 1598556 - RNA, 19 nt, Artificial Sequence
  Description of Artificial Sequence: Synthetic oligonucleotide
ccaaguacuuuauuucugg

SEQ ID NO: 1598557 - RNA, 19 nt, Artificial Sequence
  Description of Artificial Sequence: Synthetic oligonucleotide
ucaaggugggcgaucagua

SEQ ID NO: 1598558 - RNA, 19 nt, Artificial Sequence
  Description of Artificial Sequence: Synthetic oligonucleotide
aagauggcaaaguccccga

SEQ ID NO: 1598559 - RNA, 19 nt, Artificial Sequence
  Description of Artificial Sequence: Synthetic oligonucleotide
agcaggacugucauugugg

SEQ ID NO: 1598560 - RNA, 19 nt, Artificial Sequence
  Description of Artificial Sequence: Synthetic oligonucleotide
uggcaggacagacugcccc

SEQ ID NO: 1598561 - RNA, 19 nt, Artificial Sequence
  Description of Artificial Sequence: Synthetic oligonucleotide
uggggucugaagauccaag

SEQ ID NO: 1598562 - RNA, 19 nt, Artificial Sequence
  Description of Artificial Sequence: Synthetic oligonucleotide
ucuggcgaguaacacccgc

SEQ ID NO: 1598563 - RNA, 19 nt, Artificial Sequence
  Description of Artificial Sequence: Synthetic oligonucleotide
ugaggcacuucaugcagca

SEQ ID NO: 1598564 - RNA, 19 nt, Artificial Sequence
  Description of Artificial Sequence: Synthetic oligonucleotide
aaguccccgaccucaugag

SEQ ID NO: 1598565 - RNA, 19 nt, Artificial Sequence
  Description of Artificial Sequence: Synthetic oligonucleotide
accaccggcagugaacggc

SEQ ID NO: 1598566 - RNA, 19 nt, Artificial Sequence
  Description of Artificial Sequence: Synthetic oligonucleotide
ugagcauggcuuccgugug

SEQ ID NO: 1598567 - RNA, 19 nt, Artificial Sequence
  Description of Artificial Sequence: Synthetic oligonucleotide
aaucccacugaggacccag

SEQ ID NO: 1598568 - RNA, 19 nt, Artificial Sequence
  Description of Artificial Sequence: Synthetic oligonucleotide
uacccagacacacgcaggu

SEQ ID NO: 1598569 - RNA, 19 nt, Artificial Sequence
  Description of Artificial Sequence: Synthetic oligonucleotide
ggcgaguucgacuccaccg

SEQ ID NO: 1598570 - RNA, 19 nt, Artificial Sequence
  Description of Artificial Sequence: Synthetic oligonucleotide
ugugugacugccauaccuu

SEQ ID NO: 1598571 - RNA, 19 nt, Artificial Sequence
  Description of Artificial Sequence: Synthetic oligonucleotide
aaugcggcuccagagcgug

SEQ ID NO: 1598572 - RNA, 19 nt, Artificial Sequence
  Description of Artificial Sequence: Synthetic oligonucleotide
uaccaucaugaccacuccc

SEQ ID NO: 1598573 - RNA, 19 nt, Artificial Sequence
  Description of Artificial Sequence: Synthetic oligonucleotide
ugucuaucugggaguuggg

SEQ ID NO: 1598574 - RNA, 19 nt, Artificial Sequence
  Description of Artificial Sequence: Synthetic oligonucleotide
ucacgugccucacaaacuu

SEQ ID NO: 1598575 - RNA, 19 nt, Artificial Sequence
  Description of Artificial Sequence: Synthetic oligonucleotide
uccagguggugcuuggcgc

SEQ ID NO: 1598576 - RNA, 19 nt, Artificial Sequence
  Description of Artificial Sequence: Synthetic oligonucleotide
cucucaacagcucaggcaa

SEQ ID NO: 1598577 - RNA, 19 nt, Artificial Sequence
  Description of Artificial Sequence: Synthetic oligonucleotide
acuguaauggggacgccuc

SEQ ID NO: 1598578 - RNA, 19 nt, Artificial Sequence
  Description of Artificial Sequence: Synthetic oligonucleotide
uacuuuauuucuggucacc

SEQ ID NO: 1598579 - RNA, 19 nt, Artificial Sequence
  Description of Artificial Sequence: Synthetic oligonucleotide
gagcgugcgggauaaggug

SEQ ID NO: 1598580 - RNA, 19 nt, Artificial Sequence
  Description of Artificial Sequence: Synthetic oligonucleotide
agcgugcgggauaaggugc

SEQ ID NO: 1598581 - RNA, 19 nt, Artificial Sequence
  Description of Artificial Sequence: Synthetic oligonucleotide
uguggugagaaugcggcuc

SEQ ID NO: 1598582 - RNA, 19 nt, Artificial Sequence
  Description of Artificial Sequence: Synthetic oligonucleotide
agauggcaaaguccccgac

SEQ ID NO: 1598583 - RNA, 19 nt, Artificial Sequence
  Description of Artificial Sequence: Synthetic oligonucleotide
gacccauucaaacagugau

SEQ ID NO: 1598584 - RNA, 19 nt, Artificial Sequence
  Description of Artificial Sequence: Synthetic oligonucleotide
agacgcaucgccuguuucu

SEQ ID NO: 1598585 - RNA, 19 nt, Artificial Sequence
  Description of Artificial Sequence: Synthetic oligonucleotide
gagcuggagacgcaucgcc

SEQ ID NO: 1598586 - RNA, 19 nt, Artificial Sequence
  Description of Artificial Sequence: Synthetic oligonucleotide
aacacccgccgccagggcu

SEQ ID NO: 1598587 - RNA, 19 nt, Artificial Sequence
  Description of Artificial Sequence: Synthetic oligonucleotide
uuucuggucaccguuccuc

SEQ ID NO: 1598588 - RNA, 19 nt, Artificial Sequence
  Description of Artificial Sequence: Synthetic oligonucleotide
auaaggugcaggaaggcau

SEQ ID NO: 1598589 - RNA, 19 nt, Artificial Sequence
  Description of Artificial Sequence: Synthetic oligonucleotide
cagcgcauaggcccaaagg

SEQ ID NO: 1598590 - RNA, 19 nt, Artificial Sequence
  Description of Artificial Sequence: Synthetic oligonucleotide
uggaccaagauggcaaagu

SEQ ID NO: 1598591 - RNA, 19 nt, Artificial Sequence
  Description of Artificial Sequence: Synthetic oligonucleotide
cauugccccuccuucagug

SEQ ID NO: 1598592 - RNA, 19 nt, Artificial Sequence
  Description of Artificial Sequence: Synthetic oligonucleotide
acgaaaggaagcaccaaug

SEQ ID NO: 1598593 - RNA, 19 nt, Artificial Sequence
  Description of Artificial Sequence: Synthetic oligonucleotide
ucauucuccaaggcuaaaa

SEQ ID NO: 1598594 - RNA, 19 nt, Artificial Sequence
  Description of Artificial Sequence: Synthetic oligonucleotide
ugugacugccauaccuuaa

SEQ ID NO: 1598595 - RNA, 19 nt, Artificial Sequence
  Description of Artificial Sequence: Synthetic oligonucleotide
guaacacccgccgccaggg

SEQ ID NO: 1598596 - RNA, 19 nt, Artificial Sequence
  Description of Artificial Sequence: Synthetic oligonucleotide
gucuaucugggaguugggg

SEQ ID NO: 1598597 - RNA, 19 nt, Artificial Sequence
  Description of Artificial Sequence: Synthetic oligonucleotide
cuggucaccguuccucccg

SEQ ID NO: 1598598 - RNA, 19 nt, Artificial Sequence
  Description of Artificial Sequence: Synthetic oligonucleotide
guguccgccuuucacgugc

SEQ ID NO: 1598599 - RNA, 19 nt, Artificial Sequence
  Description of Artificial Sequence: Synthetic oligonucleotide
augaggcacuucaugcagc

SEQ ID NO: 1598600 - RNA, 19 nt, Artificial Sequence
  Description of Artificial Sequence: Synthetic oligonucleotide
gacacuguugccacguaga

SEQ ID NO: 1598601 - RNA, 19 nt, Artificial Sequence
  Description of Artificial Sequence: Synthetic oligonucleotide
ugcuguugagcagugccca

SEQ ID NO: 1598602 - RNA, 19 nt, Artificial Sequence
  Description of Artificial Sequence: Synthetic oligonucleotide
gacaagggcacacgccgug

SEQ ID NO: 1598603 - RNA, 19 nt, Artificial Sequence
  Description of Artificial Sequence: Synthetic oligonucleotide
uggagcagagagcggugcc

SEQ ID NO: 1598604 - RNA, 19 nt, Artificial Sequence
  Description of Artificial Sequence: Synthetic oligonucleotide
cuggcgaguaacacccgcc

SEQ ID NO: 1598605 - RNA, 19 nt, Artificial Sequence
  Description of Artificial Sequence: Synthetic oligonucleotide
acaaucccacugaggaccc

SEQ ID NO: 1598606 - RNA, 19 nt, Artificial Sequence
  Description of Artificial Sequence: Synthetic oligonucleotide
agcaccaggaacggagccg

SEQ ID NO: 1598607 - RNA, 19 nt, Artificial Sequence
  Description of Artificial Sequence: Synthetic oligonucleotide
aguccccgaccucaugagg

SEQ ID NO: 1598608 - RNA, 19 nt, Artificial Sequence
  Description of Artificial Sequence: Synthetic oligonucleotide
cucucucaacagcucaggc

SEQ ID NO: 1598609 - RNA, 19 nt, Artificial Sequence
  Description of Artificial Sequence: Synthetic oligonucleotide
guggugagaaugcggcucc

SEQ ID NO: 1598610 - RNA, 19 nt, Artificial Sequence
  Description of Artificial Sequence: Synthetic oligonucleotide
uugugcgccaggucagcag

SEQ ID NO: 1598611 - RNA, 19 nt, Artificial Sequence
  Description of Artificial Sequence: Synthetic oligonucleotide
acaagggcacacgccgugc

SEQ ID NO: 1598612 - RNA, 19 nt, Artificial Sequence
  Description of Artificial Sequence: Synthetic oligonucleotide
cagugacaagggcacacgc

SEQ ID NO: 1598613 - RNA, 19 nt, Artificial Sequence
  Description of Artificial Sequence: Synthetic oligonucleotide
agccgcggagaugagcacc

SEQ ID NO: 1598614 - RNA, 19 nt, Artificial Sequence
  Description of Artificial Sequence: Synthetic oligonucleotide
agggugacggcguccaggu

SEQ ID NO: 1598615 - RNA, 19 nt, Artificial Sequence
  Description of Artificial Sequence: Synthetic oligonucleotide
gacuguguccguguccgcc

SEQ ID NO: 1598616 - RNA, 19 nt, Artificial Sequence
  Description of Artificial Sequence: Synthetic oligonucleotide
cacgcaggucugaaccugg

SEQ ID NO: 1598617 - RNA, 19 nt, Artificial Sequence
  Description of Artificial Sequence: Synthetic oligonucleotide
uccguguccguguccgugc

SEQ ID NO: 1598618 - RNA, 19 nt, Artificial Sequence
  Description of Artificial Sequence: Synthetic oligonucleotide
aguucgacuccaccgggau

SEQ ID NO: 1598619 - RNA, 19 nt, Artificial Sequence
  Description of Artificial Sequence: Synthetic oligonucleotide
cacuuuggucccucugacc

SEQ ID NO: 1598620 - RNA, 19 nt, Artificial Sequence
  Description of Artificial Sequence: Synthetic oligonucleotide
gcgaguucgacuccaccgg

SEQ ID NO: 1598621 - RNA, 19 nt, Artificial Sequence
  Description of Artificial Sequence: Synthetic oligonucleotide
aguugugcgccaggucagc

SEQ ID NO: 1598622 - RNA, 19 nt, Artificial Sequence
  Description of Artificial Sequence: Synthetic oligonucleotide
uuccucccgacccauucaa

SEQ ID NO: 1598623 - RNA, 19 nt, Artificial Sequence
  Description of Artificial Sequence: Synthetic oligonucleotide
agcaccuccaaaagggacu

SEQ ID NO: 1598624 - RNA, 19 nt, Artificial Sequence
  Description of Artificial Sequence: Synthetic oligonucleotide
ccguccgugaaguugugcg

SEQ ID NO: 1598625 - RNA, 19 nt, Artificial Sequence
  Description of Artificial Sequence: Synthetic oligonucleotide
aaagggugacggcguccag

SEQ ID NO: 1598626 - RNA, 19 nt, Artificial Sequence
  Description of Artificial Sequence: Synthetic oligonucleotide
uucuggcgaguaacacccg

SEQ ID NO: 1598627 - RNA, 19 nt, Artificial Sequence
  Description of Artificial Sequence: Synthetic oligonucleotide
aaccaccggcagugaacgg

SEQ ID NO: 1598628 - RNA, 19 nt, Artificial Sequence
  Description of Artificial Sequence: Synthetic oligonucleotide
ugacaagggcacacgccgu

SEQ ID NO: 1598629 - RNA, 19 nt, Artificial Sequence
  Description of Artificial Sequence: Synthetic oligonucleotide
uggucccucugaccucucg

SEQ ID NO: 1598630 - RNA, 19 nt, Artificial Sequence
  Description of Artificial Sequence: Synthetic oligonucleotide
ggcagugaacggcaggacc

SEQ ID NO: 1598631 - RNA, 19 nt, Artificial Sequence
  Description of Artificial Sequence: Synthetic oligonucleotide
cagcaccuccaaaagggac

SEQ ID NO: 1598632 - RNA, 19 nt, Artificial Sequence
  Description of Artificial Sequence: Synthetic oligonucleotide
aagggcacacgccgugccu

SEQ ID NO: 1598633 - RNA, 19 nt, Artificial Sequence
  Description of Artificial Sequence: Synthetic oligonucleotide
gacacacgcaggucugaac

SEQ ID NO: 1598634 - RNA, 19 nt, Artificial Sequence
  Description of Artificial Sequence: Synthetic oligonucleotide
gacagacugccccacccuc

SEQ ID NO: 1598635 - RNA, 19 nt, Artificial Sequence
  Description of Artificial Sequence: Synthetic oligonucleotide
cagacuggaccaagauggc

SEQ ID NO: 1598636 - RNA, 19 nt, Artificial Sequence
  Description of Artificial Sequence: Synthetic oligonucleotide
uguaauggggacgccucuc

SEQ ID NO: 1598637 - RNA, 19 nt, Artificial Sequence
  Description of Artificial Sequence: Synthetic oligonucleotide
accggcagugaacggcagg

SEQ ID NO: 1598638 - RNA, 19 nt, Artificial Sequence
  Description of Artificial Sequence: Synthetic oligonucleotide
guacccagacacacgcagg

SEQ ID NO: 1598639 - RNA, 19 nt, Artificial Sequence
  Description of Artificial Sequence: Synthetic oligonucleotide
uccgugacuguguccgugu

SEQ ID NO: 1598640 - RNA, 19 nt, Artificial Sequence
  Description of Artificial Sequence: Synthetic oligonucleotide
gcgaucaguaccaucauga

SEQ ID NO: 1598641 - RNA, 19 nt, Artificial Sequence
  Description of Artificial Sequence: Synthetic oligonucleotide
ugccccacccucacucaag

SEQ ID NO: 1598642 - RNA, 19 nt, Artificial Sequence
  Description of Artificial Sequence: Synthetic oligonucleotide
guccccgaccucaugaggc

SEQ ID NO: 1598643 - RNA, 19 nt, Artificial Sequence
  Description of Artificial Sequence: Synthetic oligonucleotide
acacuccugucucccauga

SEQ ID NO: 1598644 - RNA, 19 nt, Artificial Sequence
  Description of Artificial Sequence: Synthetic oligonucleotide
ucucaacagcucaggcaac

SEQ ID NO: 1598645 - RNA, 19 nt, Artificial Sequence
  Description of Artificial Sequence: Synthetic oligonucleotide
auuucuggucaccguuccu

SEQ ID NO: 1598646 - RNA, 19 nt, Artificial Sequence
  Description of Artificial Sequence: Synthetic oligonucleotide
gucaccguuccucccgacc

SEQ ID NO: 1598647 - RNA, 19 nt, Artificial Sequence
  Description of Artificial Sequence: Synthetic oligonucleotide
gacccaaaucccaagacau

SEQ ID NO: 1598648 - RNA, 19 nt, Artificial Sequence
  Description of Artificial Sequence: Synthetic oligonucleotide
gcgaguaacacccgccgcc

SEQ ID NO: 1598649 - RNA, 19 nt, Artificial Sequence
  Description of Artificial Sequence: Synthetic oligonucleotide
ggcccaaagggugacggcg

SEQ ID NO: 1598650 - RNA, 19 nt, Artificial Sequence
  Description of Artificial Sequence: Synthetic oligonucleotide
gugacugccauaccuuaaa

SEQ ID NO: 1598651 - RNA, 19 nt, Artificial Sequence
  Description of Artificial Sequence: Synthetic oligonucleotide
gacggcguccagguggugc

SEQ ID NO: 1598652 - RNA, 19 nt, Artificial Sequence
  Description of Artificial Sequence: Synthetic oligonucleotide
ggacccaaaucccaagaca

SEQ ID NO: 1598653 - RNA, 19 nt, Artificial Sequence
  Description of Artificial Sequence: Synthetic oligonucleotide
gcuuccguguguguggccg

SEQ ID NO: 1598654 - RNA, 19 nt, Artificial Sequence
  Description of Artificial Sequence: Synthetic oligonucleotide
ggucccucugaccucucgg

SEQ ID NO: 1598655 - RNA, 19 nt, Artificial Sequence
  Description of Artificial Sequence: Synthetic oligonucleotide
uccgugaaguugugcgcca

SEQ ID NO: 1598656 - RNA, 19 nt, Artificial Sequence
  Description of Artificial Sequence: Synthetic oligonucleotide
cuggcccaucccucgaccc

SEQ ID NO: 1598657 - RNA, 19 nt, Artificial Sequence
  Description of Artificial Sequence: Synthetic oligonucleotide
caagggcacacgccgugcc

SEQ ID NO: 1598658 - RNA, 19 nt, Artificial Sequence
  Description of Artificial Sequence: Synthetic oligonucleotide
ucgccuguuucuugcugca

SEQ ID NO: 1598659 - RNA, 19 nt, Artificial Sequence
  Description of Artificial Sequence: Synthetic oligonucleotide
auugccccuccuucaguga

SEQ ID NO: 1598660 - RNA, 19 nt, Artificial Sequence
  Description of Artificial Sequence: Synthetic oligonucleotide
acgugccucacaaacuucu

SEQ ID NO: 1598661 - RNA, 19 nt, Artificial Sequence
  Description of Artificial Sequence: Synthetic oligonucleotide
aggcgacaaucccacugag

SEQ ID NO: 1598662 - RNA, 19 nt, Artificial Sequence
  Description of Artificial Sequence: Synthetic oligonucleotide
ugccccuacugccgucagg

SEQ ID NO: 1598663 - RNA, 19 nt, Artificial Sequence
  Description of Artificial Sequence: Synthetic oligonucleotide
guccccguguccgugacug

SEQ ID NO: 1598664 - RNA, 19 nt, Artificial Sequence
  Description of Artificial Sequence: Synthetic oligonucleotide
caaggcuaaaacuccuucu

SEQ ID NO: 1598665 - RNA, 19 nt, Artificial Sequence
  Description of Artificial Sequence: Synthetic oligonucleotide
caacacggacacuguugcc

SEQ ID NO: 1598666 - RNA, 19 nt, Artificial Sequence
  Description of Artificial Sequence: Synthetic oligonucleotide
ccaauggccaagccguccg

SEQ ID NO: 1598667 - RNA, 19 nt, Artificial Sequence
  Description of Artificial Sequence: Synthetic oligonucleotide
cgggauaaggugcaggaag

SEQ ID NO: 1598668 - RNA, 19 nt, Artificial Sequence
  Description of Artificial Sequence: Synthetic oligonucleotide
gaguaacacccgccgccag

SEQ ID NO: 1598669 - RNA, 19 nt, Artificial Sequence
  Description of Artificial Sequence: Synthetic oligonucleotide
uccuucuucuggcgaguaa

SEQ ID NO: 1598670 - RNA, 19 nt, Artificial Sequence
  Description of Artificial Sequence: Synthetic oligonucleotide
cauuguggucaggaucccc

SEQ ID NO: 1598671 - RNA, 19 nt, Artificial Sequence
  Description of Artificial Sequence: Synthetic oligonucleotide
acccauugccccuccuuca

SEQ ID NO: 1598672 - RNA, 19 nt, Artificial Sequence
  Description of Artificial Sequence: Synthetic oligonucleotide
cucccgacccauucaaaca

SEQ ID NO: 1598673 - RNA, 19 nt, Artificial Sequence
  Description of Artificial Sequence: Synthetic oligonucleotide
agccagacuggaccaagau

SEQ ID NO: 1598674 - RNA, 19 nt, Artificial Sequence
  Description of Artificial Sequence: Synthetic oligonucleotide
gccuguuucuugcugcagc

SEQ ID NO: 1598675 - RNA, 19 nt, Artificial Sequence
  Description of Artificial Sequence: Synthetic oligonucleotide
ggcaacacggacacuguug

SEQ ID NO: 1598676 - RNA, 19 nt, Artificial Sequence
  Description of Artificial Sequence: Synthetic oligonucleotide
auggggacgccucucucaa

SEQ ID NO: 1598677 - RNA, 19 nt, Artificial Sequence
  Description of Artificial Sequence: Synthetic oligonucleotide
cagcucaggcaacacggac

SEQ ID NO: 1598678 - RNA, 19 nt, Artificial Sequence
  Description of Artificial Sequence: Synthetic oligonucleotide
gagacgcaucgccuguuuc

SEQ ID NO: 1598679 - RNA, 19 nt, Artificial Sequence
  Description of Artificial Sequence: Synthetic oligonucleotide
gggaguguggugagaaugc

SEQ ID NO: 1598680 - RNA, 19 nt, Artificial Sequence
  Description of Artificial Sequence: Synthetic oligonucleotide
agacuggaccaagauggca

SEQ ID NO: 1598681 - RNA, 19 nt, Artificial Sequence
  Description of Artificial Sequence: Synthetic oligonucleotide
uggucaccguuccucccga

SEQ ID NO: 1598682 - RNA, 19 nt, Artificial Sequence
  Description of Artificial Sequence: Synthetic oligonucleotide
gccagacuggaccaagaug

SEQ ID NO: 1598683 - RNA, 19 nt, Artificial Sequence
  Description of Artificial Sequence: Synthetic oligonucleotide
ggguccugagguuuugcug

SEQ ID NO: 1598684 - RNA, 19 nt, Artificial Sequence
  Description of Artificial Sequence: Synthetic oligonucleotide
ucauuguggucaggauccc

SEQ ID NO: 1598685 - RNA, 19 nt, Artificial Sequence
  Description of Artificial Sequence: Synthetic oligonucleotide
cagagagcggugccugggc

SEQ ID NO: 1598686 - RNA, 19 nt, Artificial Sequence
  Description of Artificial Sequence: Synthetic oligonucleotide
cucgacccugcguuucccc

SEQ ID NO: 1598687 - RNA, 19 nt, Artificial Sequence
  Description of Artificial Sequence: Synthetic oligonucleotide
cacccucacucaagguggg

SEQ ID NO: 1598688 - RNA, 19 nt, Artificial Sequence
  Description of Artificial Sequence: Synthetic oligonucleotide
guuuugcuggcccaucccu

SEQ ID NO: 1598689 - RNA, 19 nt, Artificial Sequence
  Description of Artificial Sequence: Synthetic oligonucleotide
uggccaagccguccgugaa

SEQ ID NO: 1598690 - RNA, 19 nt, Artificial Sequence
  Description of Artificial Sequence: Synthetic oligonucleotide
acacgcaggucugaaccug

SEQ ID NO: 1598691 - RNA, 19 nt, Artificial Sequence
  Description of Artificial Sequence: Synthetic oligonucleotide
guucgacuccaccgggaug

SEQ ID NO: 1598692 - RNA, 19 nt, Artificial Sequence
  Description of Artificial Sequence: Synthetic oligonucleotide
uggcccaucccucgacccu

SEQ ID NO: 1598693 - RNA, 19 nt, Artificial Sequence
  Description of Artificial Sequence: Synthetic oligonucleotide
cugugugacugccauaccu

SEQ ID NO: 1598694 - RNA, 19 nt, Artificial Sequence
  Description of Artificial Sequence: Synthetic oligonucleotide
acggacacuguugccacgu

SEQ ID NO: 1598695 - RNA, 19 nt, Artificial Sequence
  Description of Artificial Sequence: Synthetic oligonucleotide
ccccacgaaaggaagcacc

SEQ ID NO: 1598696 - RNA, 19 nt, Artificial Sequence
  Description of Artificial Sequence: Synthetic oligonucleotide
ugccugggcgaguucgacu

SEQ ID NO: 1598697 - RNA, 19 nt, Artificial Sequence
  Description of Artificial Sequence: Synthetic oligonucleotide
cacuucaugcagcaggacu

SEQ ID NO: 1598698 - RNA, 19 nt, Artificial Sequence
  Description of Artificial Sequence: Synthetic oligonucleotide
accugccaccucacuaccc

SEQ ID NO: 1598699 - RNA, 19 nt, Artificial Sequence
  Description of Artificial Sequence: Synthetic oligonucleotide
cuguugagcagugcccaac

SEQ ID NO: 1598700 - RNA, 19 nt, Artificial Sequence
  Description of Artificial Sequence: Synthetic oligonucleotide
cauaggcccaaagggugac

SEQ ID NO: 1598701 - RNA, 19 nt, Artificial Sequence
  Description of Artificial Sequence: Synthetic oligonucleotide
auaccuuaaaggacccaaa

SEQ ID NO: 1598702 - RNA, 19 nt, Artificial Sequence
  Description of Artificial Sequence: Synthetic oligonucleotide
gagagcggugccugggcga

SEQ ID NO: 1598703 - RNA, 19 nt, Artificial Sequence
  Description of Artificial Sequence: Synthetic oligonucleotide
agagcggugccugggcgag

SEQ ID NO: 1598704 - RNA, 19 nt, Artificial Sequence
  Description of Artificial Sequence: Synthetic oligonucleotide
guccguguccgccuuucac

SEQ ID NO: 1598705 - RNA, 19 nt, Artificial Sequence
  Description of Artificial Sequence: Synthetic oligonucleotide
uguguguggccguccccgu

SEQ ID NO: 1598706 - RNA, 19 nt, Artificial Sequence
  Description of Artificial Sequence: Synthetic oligonucleotide
uguccguguccgccuuuca

SEQ ID NO: 1598707 - RNA, 19 nt, Artificial Sequence
  Description of Artificial Sequence: Synthetic oligonucleotide
ucgggcucugugugacugc

SEQ ID NO: 1598708 - RNA, 19 nt, Artificial Sequence
  Description of Artificial Sequence: Synthetic oligonucleotide
caaagggugacggcgucca

SEQ ID NO: 1598709 - RNA, 19 nt, Artificial Sequence
  Description of Artificial Sequence: Synthetic oligonucleotide
acucaaggugggcgaucag

SEQ ID NO: 1598710 - RNA, 19 nt, Artificial Sequence
  Description of Artificial Sequence: Synthetic oligonucleotide
cacggacacuguugccacg

SEQ ID NO: 1598711 - RNA, 19 nt, Artificial Sequence
  Description of Artificial Sequence: Synthetic oligonucleotide
ccaaggcuaaaacuccuuc

SEQ ID NO: 1598712 - RNA, 19 nt, Artificial Sequence
  Description of Artificial Sequence: Synthetic oligonucleotide
ccucccgacccauucaaac

SEQ ID NO: 1598713 - RNA, 19 nt, Artificial Sequence
  Description of Artificial Sequence: Synthetic oligonucleotide
cacacgccgugccugccag

SEQ ID NO: 1598714 - RNA, 19 nt, Artificial Sequence
  Description of Artificial Sequence: Synthetic oligonucleotide
cucgucaccccaguccuuc

SEQ ID NO: 1598715 - RNA, 19 nt, Artificial Sequence
  Description of Artificial Sequence: Synthetic oligonucleotide
gccaccucacuacccauug

SEQ ID NO: 1598716 - RNA, 19 nt, Artificial Sequence
  Description of Artificial Sequence: Synthetic oligonucleotide
aggugggcgaucaguacca

SEQ ID NO: 1598717 - RNA, 19 nt, Artificial Sequence
  Description of Artificial Sequence: Synthetic oligonucleotide
ugcuggcccaucccucgac

SEQ ID NO: 1598718 - RNA, 19 nt, Artificial Sequence
  Description of Artificial Sequence: Synthetic oligonucleotide
cuggaccaagauggcaaag

SEQ ID NO: 1598719 - RNA, 19 nt, Artificial Sequence
  Description of Artificial Sequence: Synthetic oligonucleotide
ccaccugccaccucacuac

SEQ ID NO: 1598720 - RNA, 19 nt, Artificial Sequence
  Description of Artificial Sequence: Synthetic oligonucleotide
gacuguaauggggacgccu

SEQ ID NO: 1598721 - RNA, 19 nt, Artificial Sequence
  Description of Artificial Sequence: Synthetic oligonucleotide
ggcgacaaucccacugagg

SEQ ID NO: 1598722 - RNA, 19 nt, Artificial Sequence
  Description of Artificial Sequence: Synthetic oligonucleotide
acccucacucaaggugggc

SEQ ID NO: 1598723 - RNA, 19 nt, Artificial Sequence
  Description of Artificial Sequence: Synthetic oligonucleotide
guuccucccgacccauuca

SEQ ID NO: 1598724 - RNA, 19 nt, Artificial Sequence
  Description of Artificial Sequence: Synthetic oligonucleotide
aggaacggagccgcggaga

SEQ ID NO: 1598725 - RNA, 19 nt, Artificial Sequence
  Description of Artificial Sequence: Synthetic oligonucleotide
uugcuggcccaucccucga

SEQ ID NO: 1598726 - RNA, 19 nt, Artificial Sequence
  Description of Artificial Sequence: Synthetic oligonucleotide
caaugcuguugagcagugc

SEQ ID NO: 1598727 - RNA, 19 nt, Artificial Sequence
  Description of Artificial Sequence: Synthetic oligonucleotide
cacgugccucacaaacuuc

SEQ ID NO: 1598728 - RNA, 19 nt, Artificial Sequence
  Description of Artificial Sequence: Synthetic oligonucleotide
agugccccuacugccguca

SEQ ID NO: 1598729 - RNA, 19 nt, Artificial Sequence
  Description of Artificial Sequence: Synthetic oligonucleotide
gugaacggcaggacccagc

SEQ ID NO: 1598730 - RNA, 19 nt, Artificial Sequence
  Description of Artificial Sequence: Synthetic oligonucleotide
acccagacacacgcagguc

SEQ ID NO: 1598731 - RNA, 19 nt, Artificial Sequence
  Description of Artificial Sequence: Synthetic oligonucleotide
acgcaucgccuguuucuug

SEQ ID NO: 1598732 - RNA, 19 nt, Artificial Sequence
  Description of Artificial Sequence: Synthetic oligonucleotide
gugugacugccauaccuua

SEQ ID NO: 1598733 - RNA, 19 nt, Artificial Sequence
  Description of Artificial Sequence: Synthetic oligonucleotide
cuccaaaagggacuguaau

SEQ ID NO: 1598734 - RNA, 19 nt, Artificial Sequence
  Description of Artificial Sequence: Synthetic oligonucleotide
ugacuguguccguguccgc

SEQ ID NO: 1598735 - RNA, 19 nt, Artificial Sequence
  Description of Artificial Sequence: Synthetic oligonucleotide
agggcacacgccgugccug

SEQ ID NO: 1598736 - RNA, 19 nt, Artificial Sequence
  Description of Artificial Sequence: Synthetic oligonucleotide
ucccguggccccauuuauu

SEQ ID NO: 1598737 - RNA, 19 nt, Artificial Sequence
  Description of Artificial Sequence: Synthetic oligonucleotide
gccugggcgaguucgacuc

SEQ ID NO: 1598738 - RNA, 19 nt, Artificial Sequence
  Description of Artificial Sequence: Synthetic oligonucleotide
uccucccgacccauucaaa

SEQ ID NO: 1598739 - RNA, 19 nt, Artificial Sequence
  Description of Artificial Sequence: Synthetic oligonucleotide
cacucaaggugggcgauca

SEQ ID NO: 1598740 - RNA, 19 nt, Artificial Sequence
  Description of Artificial Sequence: Synthetic oligonucleotide
acuacccauugccccuccu

SEQ ID NO: 1598741 - RNA, 19 nt, Artificial Sequence
  Description of Artificial Sequence: Synthetic oligonucleotide
ugggcgaguucgacuccac

SEQ ID NO: 1598742 - RNA, 19 nt, Artificial Sequence
  Description of Artificial Sequence: Synthetic oligonucleotide
caugcagcaggacugucau

SEQ ID NO: 1598743 - RNA, 19 nt, Artificial Sequence
  Description of Artificial Sequence: Synthetic oligonucleotide
ccaagauggcaaagucccc

SEQ ID NO: 1598744 - RNA, 19 nt, Artificial Sequence
  Description of Artificial Sequence: Synthetic oligonucleotide
acagacugccccacccuca

SEQ ID NO: 1598745 - RNA, 19 nt, Artificial Sequence
  Description of Artificial Sequence: Synthetic oligonucleotide
gaagagcaccaggaacgga

SEQ ID NO: 1598746 - RNA, 19 nt, Artificial Sequence
  Description of Artificial Sequence: Synthetic oligonucleotide
ggcgaguaacacccgccgc

SEQ ID NO: 1598747 - RNA, 19 nt, Artificial Sequence
  Description of Artificial Sequence: Synthetic oligonucleotide
gaguucgacuccaccggga

SEQ ID NO: 1598748 - RNA, 19 nt, Artificial Sequence
  Description of Artificial Sequence: Synthetic oligonucleotide
ccgacccauucaaacagug

SEQ ID NO: 1598749 - RNA, 19 nt, Artificial Sequence
  Description of Artificial Sequence: Synthetic oligonucleotide
gggucugaagauccaagua

SEQ ID NO: 1598750 - RNA, 19 nt, Artificial Sequence
  Description of Artificial Sequence: Synthetic oligonucleotide
aggcaacacggacacuguu

SEQ ID NO: 1598751 - RNA, 19 nt, Artificial Sequence
  Description of Artificial Sequence: Synthetic oligonucleotide
aggguacucgucaccccag

SEQ ID NO: 1598752 - RNA, 19 nt, Artificial Sequence
  Description of Artificial Sequence: Synthetic oligonucleotide
ucacuacccauugccccuc

SEQ ID NO: 1598753 - RNA, 19 nt, Artificial Sequence
  Description of Artificial Sequence: Synthetic oligonucleotide
gcaccaggaacggagccgc

SEQ ID NO: 1598754 - RNA, 19 nt, Artificial Sequence
  Description of Artificial Sequence: Synthetic oligonucleotide
ccugucucccaugagcaug

SEQ ID NO: 1598755 - RNA, 19 nt, Artificial Sequence
  Description of Artificial Sequence: Synthetic oligonucleotide
cccggaggcaaaacugagc

SEQ ID NO: 1598756 - RNA, 19 nt, Artificial Sequence
  Description of Artificial Sequence: Synthetic oligonucleotide
uccguguguguggccgucc

SEQ ID NO: 1598757 - RNA, 19 nt, Artificial Sequence
  Description of Artificial Sequence: Synthetic oligonucleotide
ggugagaaugcggcuccag

SEQ ID NO: 1598758 - RNA, 19 nt, Artificial Sequence
  Description of Artificial Sequence: Synthetic oligonucleotide
ccuacugccgucaggagcu

SEQ ID NO: 1598759 - RNA, 19 nt, Artificial Sequence
  Description of Artificial Sequence: Synthetic oligonucleotide
cugugggaguguccguguc

SEQ ID NO: 1598760 - RNA, 19 nt, Artificial Sequence
  Description of Artificial Sequence: Synthetic oligonucleotide
gaccuggagcagagagcgg

SEQ ID NO: 1598761 - RNA, 19 nt, Artificial Sequence
  Description of Artificial Sequence: Synthetic oligonucleotide
gguacucgucaccccaguc

SEQ ID NO: 1598762 - RNA, 19 nt, Artificial Sequence
  Description of Artificial Sequence: Synthetic oligonucleotide
gaccucucgggcucugugu

SEQ ID NO: 1598763 - RNA, 19 nt, Artificial Sequence
  Description of Artificial Sequence: Synthetic oligonucleotide
gaacggcaggacccagcca

SEQ ID NO: 1598764 - RNA, 19 nt, Artificial Sequence
  Description of Artificial Sequence: Synthetic oligonucleotide
gggaguguccguguccgug

SEQ ID NO: 1598765 - RNA, 19 nt, Artificial Sequence
  Description of Artificial Sequence: Synthetic oligonucleotide
gccccagcaccuccaaaag

SEQ ID NO: 1598766 - RNA, 19 nt, Artificial Sequence
  Description of Artificial Sequence: Synthetic oligonucleotide
gaacggagccgcggagaug

SEQ ID NO: 1598767 - RNA, 19 nt, Artificial Sequence
  Description of Artificial Sequence: Synthetic oligonucleotide
caccgggaugaggaagagc

SEQ ID NO: 1598768 - RNA, 19 nt, Artificial Sequence
  Description of Artificial Sequence: Synthetic oligonucleotide
uguccguguccgugcugcu

SEQ ID NO: 1598769 - RNA, 19 nt, Artificial Sequence
  Description of Artificial Sequence: Synthetic oligonucleotide
gccgcggagaugagcaccg

SEQ ID NO: 1598770 - RNA, 19 nt, Artificial Sequence
  Description of Artificial Sequence: Synthetic oligonucleotide
guguguggccguccccgug

SEQ ID NO: 1598771 - RNA, 19 nt, Artificial Sequence
  Description of Artificial Sequence: Synthetic oligonucleotide
caccaggaacggagccgcg

SEQ ID NO: 1598772 - RNA, 19 nt, Artificial Sequence
  Description of Artificial Sequence: Synthetic oligonucleotide
cccacgaaaggaagcacca

SEQ ID NO: 1598773 - RNA, 19 nt, Artificial Sequence
  Description of Artificial Sequence: Synthetic oligonucleotide
caucccucgacccugcguu

SEQ ID NO: 1598774 - RNA, 19 nt, Artificial Sequence
  Description of Artificial Sequence: Synthetic oligonucleotide
caccaauggccaagccguc

SEQ ID NO: 1598775 - RNA, 19 nt, Artificial Sequence
  Description of Artificial Sequence: Synthetic oligonucleotide
cacuacccauugccccucc

SEQ ID NO: 1598776 - RNA, 19 nt, Artificial Sequence
  Description of Artificial Sequence: Synthetic oligonucleotide
cucaaggugggcgaucagu

SEQ ID NO: 1598777 - RNA, 19 nt, Artificial Sequence
  Description of Artificial Sequence: Synthetic oligonucleotide
ggggucugaagauccaagu

SEQ ID NO: 1598778 - RNA, 19 nt, Artificial Sequence
  Description of Artificial Sequence: Synthetic oligonucleotide
gagccgcggagaugagcac

SEQ ID NO: 1598779 - RNA, 19 nt, Artificial Sequence
  Description of Artificial Sequence: Synthetic oligonucleotide
gcuggcccaucccucgacc

SEQ ID NO: 1598780 - RNA, 19 nt, Artificial Sequence
  Description of Artificial Sequence: Synthetic oligonucleotide
cccauugccccuccuucag

SEQ ID NO: 1598781 - RNA, 19 nt, Artificial Sequence
  Description of Artificial Sequence: Synthetic oligonucleotide
ugcagccagacuggaccaa

SEQ ID NO: 1598782 - RNA, 19 nt, Artificial Sequence
  Description of Artificial Sequence: Synthetic oligonucleotide
guugugcgccaggucagca

SEQ ID NO: 1598783 - RNA, 19 nt, Artificial Sequence
  Description of Artificial Sequence: Synthetic oligonucleotide
ugggaguguccguguccgu

SEQ ID NO: 1598784 - RNA, 19 nt, Artificial Sequence
  Description of Artificial Sequence: Synthetic oligonucleotide
acggcaggacccagccagg

SEQ ID NO: 1598785 - RNA, 19 nt, Artificial Sequence
  Description of Artificial Sequence: Synthetic oligonucleotide
uggggacgccucucucaac

SEQ ID NO: 1598786 - RNA, 19 nt, Artificial Sequence
  Description of Artificial Sequence: Synthetic oligonucleotide
ucccucgacccugcguuuc

SEQ ID NO: 1598787 - RNA, 19 nt, Artificial Sequence
  Description of Artificial Sequence: Synthetic oligonucleotide
agggcuccccacugucuau

SEQ ID NO: 1598788 - RNA, 19 nt, Artificial Sequence
  Description of Artificial Sequence: Synthetic oligonucleotide
gccccuacugccgucagga

SEQ ID NO: 1598789 - RNA, 19 nt, Artificial Sequence
  Description of Artificial Sequence: Synthetic oligonucleotide
gagcauggcuuccgugugu

SEQ ID NO: 1598790 - RNA, 19 nt, Artificial Sequence
  Description of Artificial Sequence: Synthetic oligonucleotide
cgaguucgacuccaccggg

SEQ ID NO: 1598791 - RNA, 19 nt, Artificial Sequence
  Description of Artificial Sequence: Synthetic oligonucleotide
augcggcuccagagcgugc

SEQ ID NO: 1598792 - RNA, 19 nt, Artificial Sequence
  Description of Artificial Sequence: Synthetic oligonucleotide
cacacgcaggucugaaccu

SEQ ID NO: 1598793 - RNA, 19 nt, Artificial Sequence
  Description of Artificial Sequence: Synthetic oligonucleotide
ggcaggacccagccaggac

SEQ ID NO: 1598794 - RNA, 19 nt, Artificial Sequence
  Description of Artificial Sequence: Synthetic oligonucleotide
caggacccagccaggaccu

SEQ ID NO: 1598795 - RNA, 19 nt, Artificial Sequence
  Description of Artificial Sequence: Synthetic oligonucleotide
ccagcgcauaggcccaaag

SEQ ID NO: 1598796 - RNA, 19 nt, Artificial Sequence
  Description of Artificial Sequence: Synthetic oligonucleotide
uggagacgcaucgccuguu

SEQ ID NO: 1598797 - RNA, 19 nt, Artificial Sequence
  Description of Artificial Sequence: Synthetic oligonucleotide
cccauucaaacagugauau

SEQ ID NO: 1598798 - RNA, 19 nt, Artificial Sequence
  Description of Artificial Sequence: Synthetic oligonucleotide
ccucacucaaggugggcga

SEQ ID NO: 1598799 - RNA, 19 nt, Artificial Sequence
  Description of Artificial Sequence: Synthetic oligonucleotide
gugccccuacugccgucag

SEQ ID NO: 1598800 - RNA, 19 nt, Artificial Sequence
  Description of Artificial Sequence: Synthetic oligonucleotide
guguccguguccgccuuuc

SEQ ID NO: 1598801 - RNA, 19 nt, Artificial Sequence
  Description of Artificial Sequence: Synthetic oligonucleotide
ggaguguccguguccgugu

SEQ ID NO: 1598802 - RNA, 19 nt, Artificial Sequence
  Description of Artificial Sequence: Synthetic oligonucleotide
agguacccagacacacgca

SEQ ID NO: 1598803 - RNA, 19 nt, Artificial Sequence
  Description of Artificial Sequence: Synthetic oligonucleotide
cugggcgaguucgacucca

SEQ ID NO: 1598804 - RNA, 19 nt, Artificial Sequence
  Description of Artificial Sequence: Synthetic oligonucleotide
aucccacugaggacccaga

SEQ ID NO: 1598805 - RNA, 19 nt, Artificial Sequence
  Description of Artificial Sequence: Synthetic oligonucleotide
uccccguguccgugacugu

SEQ ID NO: 1598806 - RNA, 19 nt, Artificial Sequence
  Description of Artificial Sequence: Synthetic oligonucleotide
aucccucgacccugcguuu

SEQ ID NO: 1598807 - RNA, 19 nt, Artificial Sequence
  Description of Artificial Sequence: Synthetic oligonucleotide
ccuccaaaagggacuguaa

SEQ ID NO: 1598808 - RNA, 19 nt, Artificial Sequence
  Description of Artificial Sequence: Synthetic oligonucleotide
cacuguugccacguagaua

SEQ ID NO: 1598809 - RNA, 19 nt, Artificial Sequence
  Description of Artificial Sequence: Synthetic oligonucleotide
agcggugccugggcgaguu

SEQ ID NO: 1598810 - RNA, 19 nt, Artificial Sequence
  Description of Artificial Sequence: Synthetic oligonucleotide
uggccguccccguguccgu

SEQ ID NO: 1598811 - RNA, 19 nt, Artificial Sequence
  Description of Artificial Sequence: Synthetic oligonucleotide
ccaccucacuacccauugc

SEQ ID NO: 1598812 - RNA, 19 nt, Artificial Sequence
  Description of Artificial Sequence: Synthetic oligonucleotide
gacgcaucgccuguuucuu

SEQ ID NO: 1598813 - RNA, 19 nt, Artificial Sequence
  Description of Artificial Sequence: Synthetic oligonucleotide
uuggucccucugaccucuc

SEQ ID NO: 1598814 - RNA, 19 nt, Artificial Sequence
  Description of Artificial Sequence: Synthetic oligonucleotide
ggcccaucccucgacccug

SEQ ID NO: 1598815 - RNA, 19 nt, Artificial Sequence
  Description of Artificial Sequence: Synthetic oligonucleotide
caccguuccucccgaccca

SEQ ID NO: 1598816 - RNA, 19 nt, Artificial Sequence
  Description of Artificial Sequence: Synthetic oligonucleotide
ccguguguguggccguccc

SEQ ID NO: 1598817 - RNA, 19 nt, Artificial Sequence
  Description of Artificial Sequence: Synthetic oligonucleotide
caggcaacacggacacugu

SEQ ID NO: 1598818 - RNA, 19 nt, Artificial Sequence
  Description of Artificial Sequence: Synthetic oligonucleotide
gugccugggcgaguucgac

SEQ ID NO: 1598819 - RNA, 19 nt, Artificial Sequence
  Description of Artificial Sequence: Synthetic oligonucleotide
ccaccggcagugaacggca

SEQ ID NO: 1598820 - RNA, 19 nt, Artificial Sequence
  Description of Artificial Sequence: Synthetic oligonucleotide
acacgccgugccugccagu

SEQ ID NO: 1598821 - RNA, 19 nt, Artificial Sequence
  Description of Artificial Sequence: Synthetic oligonucleotide
ccgggaugaggaagagcac

SEQ ID NO: 1598822 - RNA, 19 nt, Artificial Sequence
  Description of Artificial Sequence: Synthetic oligonucleotide
cuccagagcgugcgggaua

SEQ ID NO: 1598823 - RNA, 19 nt, Artificial Sequence
  Description of Artificial Sequence: Synthetic oligonucleotide
ggaacggagccgcggagau

SEQ ID NO: 1598824 - RNA, 19 nt, Artificial Sequence
  Description of Artificial Sequence: Synthetic oligonucleotide
cagugccccuacugccguc

SEQ ID NO: 1598825 - RNA, 19 nt, Artificial Sequence
  Description of Artificial Sequence: Synthetic oligonucleotide
cccucgacccugcguuucc

SEQ ID NO: 1598826 - RNA, 19 nt, Artificial Sequence
  Description of Artificial Sequence: Synthetic oligonucleotide
cuacugccgucaggagcug

SEQ ID NO: 1598827 - RNA, 19 nt, Artificial Sequence
  Description of Artificial Sequence: Synthetic oligonucleotide
cggugccugggcgaguucg

SEQ ID NO: 1598828 - RNA, 19 nt, Artificial Sequence
  Description of Artificial Sequence: Synthetic oligonucleotide
cuuccguguguguggccgu

SEQ ID NO: 1598829 - RNA, 19 nt, Artificial Sequence
  Description of Artificial Sequence: Synthetic oligonucleotide
ccugggcgaguucgacucc

SEQ ID NO: 1598830 - RNA, 19 nt, Artificial Sequence
  Description of Artificial Sequence: Synthetic oligonucleotide
ccggcagugaacggcagga

SEQ ID NO: 1598831 - RNA, 19 nt, Artificial Sequence
  Description of Artificial Sequence: Synthetic oligonucleotide
cgugccucacaaacuucuc

SEQ ID NO: 1598832 - RNA, 19 nt, Artificial Sequence
  Description of Artificial Sequence: Synthetic oligonucleotide
cgacccauucaaacaguga

SEQ ID NO: 1598833 - RNA, 19 nt, Artificial Sequence
  Description of Artificial Sequence: Synthetic oligonucleotide
cccaaagggugacggcguc

SEQ ID NO: 1598834 - RNA, 19 nt, Artificial Sequence
  Description of Artificial Sequence: Synthetic oligonucleotide
gcgcauaggcccaaagggu

SEQ ID NO: 1598835 - RNA, 19 nt, Artificial Sequence
  Description of Artificial Sequence: Synthetic oligonucleotide
ggcuuccguguguguggcc

SEQ ID NO: 1598836 - RNA, 19 nt, Artificial Sequence
  Description of Artificial Sequence: Synthetic oligonucleotide
gugacggcguccagguggu

SEQ ID NO: 1598837 - RNA, 19 nt, Artificial Sequence
  Description of Artificial Sequence: Synthetic oligonucleotide
ccacugucuaucugggagu

SEQ ID NO: 1598838 - RNA, 19 nt, Artificial Sequence
  Description of Artificial Sequence: Synthetic oligonucleotide
ggacuguaauggggacgcc

SEQ ID NO: 1598839 - RNA, 19 nt, Artificial Sequence
  Description of Artificial Sequence: Synthetic oligonucleotide
ccguggccccauuuauuuc

SEQ ID NO: 1598840 - RNA, 19 nt, Artificial Sequence
  Description of Artificial Sequence: Synthetic oligonucleotide
ccccguguccgugacugug

SEQ ID NO: 1598841 - RNA, 19 nt, Artificial Sequence
  Description of Artificial Sequence: Synthetic oligonucleotide
gccguccgugaaguugugc

SEQ ID NO: 1598842 - RNA, 19 nt, Artificial Sequence
  Description of Artificial Sequence: Synthetic oligonucleotide
gcugugggaguguccgugu

SEQ ID NO: 1598843 - RNA, 19 nt, Artificial Sequence
  Description of Artificial Sequence: Synthetic oligonucleotide
ccgugaaguugugcgccag

SEQ ID NO: 1598844 - RNA, 19 nt, Artificial Sequence
  Description of Artificial Sequence: Synthetic oligonucleotide
ccguguccgugacuguguc

SEQ ID NO: 1598845 - RNA, 19 nt, Artificial Sequence
  Description of Artificial Sequence: Synthetic oligonucleotide
ugacggcguccagguggug

SEQ ID NO: 1598846 - RNA, 19 nt, Artificial Sequence
  Description of Artificial Sequence: Synthetic oligonucleotide
caauggccaagccguccgu

SEQ ID NO: 1598847 - RNA, 19 nt, Artificial Sequence
  Description of Artificial Sequence: Synthetic oligonucleotide
ccauucaaacagugauaua

SEQ ID NO: 1598848 - RNA, 19 nt, Artificial Sequence
  Description of Artificial Sequence: Synthetic oligonucleotide
uccuucccguggccccauu

SEQ ID NO: 1598849 - RNA, 19 nt, Artificial Sequence
  Description of Artificial Sequence: Synthetic oligonucleotide
ggugccugggcgaguucga

SEQ ID NO: 1598850 - RNA, 19 nt, Artificial Sequence
  Description of Artificial Sequence: Synthetic oligonucleotide
gcgugcgggauaaggugca

SEQ ID NO: 1598851 - RNA, 19 nt, Artificial Sequence
  Description of Artificial Sequence: Synthetic oligonucleotide
agccguccgugaaguugug

SEQ ID NO: 1598852 - RNA, 19 nt, Artificial Sequence
  Description of Artificial Sequence: Synthetic oligonucleotide
ccucgacccugcguuuccc

SEQ ID NO: 1598853 - RNA, 19 nt, Artificial Sequence
  Description of Artificial Sequence: Synthetic oligonucleotide
ccaagacaucauucuccaa

SEQ ID NO: 1598854 - RNA, 19 nt, Artificial Sequence
  Description of Artificial Sequence: Synthetic oligonucleotide
caaucccacugaggaccca

SEQ ID NO: 1598855 - RNA, 19 nt, Artificial Sequence
  Description of Artificial Sequence: Synthetic oligonucleotide
cucacucaaggugggcgau

SEQ ID NO: 1598856 - RNA, 19 nt, Artificial Sequence
  Description of Artificial Sequence: Synthetic oligonucleotide
cccaucccucgacccugcg

SEQ ID NO: 1598857 - RNA, 19 nt, Artificial Sequence
  Description of Artificial Sequence: Synthetic oligonucleotide
ccaccgggaugaggaagag

SEQ ID NO: 1598858 - RNA, 19 nt, Artificial Sequence
  Description of Artificial Sequence: Synthetic oligonucleotide
ggguacucgucaccccagu

SEQ ID NO: 1598859 - RNA, 19 nt, Artificial Sequence
  Description of Artificial Sequence: Synthetic oligonucleotide
gcgggauaaggugcaggaa

SEQ ID NO: 1598860 - RNA, 19 nt, Artificial Sequence
  Description of Artificial Sequence: Synthetic oligonucleotide
acucgucaccccaguccuu

SEQ ID NO: 1598861 - RNA, 19 nt, Artificial Sequence
  Description of Artificial Sequence: Synthetic oligonucleotide
gcaucgccuguuucuugcu

SEQ ID NO: 1598862 - RNA, 19 nt, Artificial Sequence
  Description of Artificial Sequence: Synthetic oligonucleotide
acggagccgcggagaugag

SEQ ID NO: 1598863 - RNA, 19 nt, Artificial Sequence
  Description of Artificial Sequence: Synthetic oligonucleotide
ccguguccgccuuucacgu

SEQ ID NO: 1598864 - RNA, 19 nt, Artificial Sequence
  Description of Artificial Sequence: Synthetic oligonucleotide
ggagacgcaucgccuguuu

SEQ ID NO: 1598865 - RNA, 19 nt, Artificial Sequence
  Description of Artificial Sequence: Synthetic oligonucleotide
cguguccgccuuucacgug

SEQ ID NO: 1598866 - RNA, 19 nt, Artificial Sequence
  Description of Artificial Sequence: Synthetic oligonucleotide
gccguccccguguccguga

SEQ ID NO: 1598867 - RNA, 19 nt, Artificial Sequence
  Description of Artificial Sequence: Synthetic oligonucleotide
gcuggggaguguggugaga

SEQ ID NO: 1598868 - RNA, 19 nt, Artificial Sequence
  Description of Artificial Sequence: Synthetic oligonucleotide
ccacgaaaggaagcaccaa

SEQ ID NO: 1598869 - RNA, 19 nt, Artificial Sequence
  Description of Artificial Sequence: Synthetic oligonucleotide
cggagccgcggagaugagc

SEQ ID NO: 1598870 - RNA, 19 nt, Artificial Sequence
  Description of Artificial Sequence: Synthetic oligonucleotide
ccaacacuuuggucccucu

SEQ ID NO: 1598871 - RNA, 19 nt, Artificial Sequence
  Description of Artificial Sequence: Synthetic oligonucleotide
ccaugagcauggcuuccgu

SEQ ID NO: 1598872 - RNA, 19 nt, Artificial Sequence
  Description of Artificial Sequence: Synthetic oligonucleotide
cgccuguuucuugcugcag

SEQ ID NO: 1598873 - RNA, 19 nt, Artificial Sequence
  Description of Artificial Sequence: Synthetic oligonucleotide
cccgacccauucaaacagu

SEQ ID NO: 1598874 - RNA, 19 nt, Artificial Sequence
  Description of Artificial Sequence: Synthetic oligonucleotide
cccguguccgugacugugu

SEQ ID NO: 1598875 - RNA, 19 nt, Artificial Sequence
  Description of Artificial Sequence: Synthetic oligonucleotide
cguguccguguccgugcug

SEQ ID NO: 1598876 - RNA, 19 nt, Artificial Sequence
  Description of Artificial Sequence: Synthetic oligonucleotide
ccccuccuucagugacaag

SEQ ID NO: 1598877 - RNA, 19 nt, Artificial Sequence
  Description of Artificial Sequence: Synthetic oligonucleotide
cucugaccucucgggcucu

SEQ ID NO: 1598878 - RNA, 19 nt, Artificial Sequence
  Description of Artificial Sequence: Synthetic oligonucleotide
cggcagugaacggcaggac

SEQ ID NO: 1598879 - RNA, 19 nt, Artificial Sequence
  Description of Artificial Sequence: Synthetic oligonucleotide
ccaucccucgacccugcgu

SEQ ID NO: 1598880 - RNA, 19 nt, Artificial Sequence
  Description of Artificial Sequence: Synthetic oligonucleotide
ccauugccccuccuucagu

SEQ ID NO: 1598881 - RNA, 19 nt, Artificial Sequence
  Description of Artificial Sequence: Synthetic oligonucleotide
gagcggugccugggcgagu

SEQ ID NO: 1598882 - RNA, 19 nt, Artificial Sequence
  Description of Artificial Sequence: Synthetic oligonucleotide
ggugggcgaucaguaccau

SEQ ID NO: 1598883 - RNA, 19 nt, Artificial Sequence
  Description of Artificial Sequence: Synthetic oligonucleotide
cgaccucaugaggcacuuc

SEQ ID NO: 1598884 - RNA, 19 nt, Artificial Sequence
  Description of Artificial Sequence: Synthetic oligonucleotide
guccuucccguggccccau

SEQ ID NO: 1598885 - RNA, 19 nt, Artificial Sequence
  Description of Artificial Sequence: Synthetic oligonucleotide
ccguguccguguccgugcu

SEQ ID NO: 1598886 - RNA, 19 nt, Artificial Sequence
  Description of Artificial Sequence: Synthetic oligonucleotide
cggacacuguugccacgua

SEQ ID NO: 1598887 - RNA, 19 nt, Artificial Sequence
  Description of Artificial Sequence: Synthetic oligonucleotide
ccgaccucaugaggcacuu

SEQ ID NO: 1598888 - RNA, 19 nt, Artificial Sequence
  Description of Artificial Sequence: Synthetic oligonucleotide
cccagcgcauaggcccaaa

SEQ ID NO: 1598889 - RNA, 19 nt, Artificial Sequence
  Description of Artificial Sequence: Synthetic oligonucleotide
ccgcugugggaguguccgu

SEQ ID NO: 1598890 - RNA, 19 nt, Artificial Sequence
  Description of Artificial Sequence: Synthetic oligonucleotide
ccguuccucccgacccauu

SEQ ID NO: 1598891 - RNA, 19 nt, Artificial Sequence
  Description of Artificial Sequence: Synthetic oligonucleotide
cguccccguguccgugacu

SEQ ID NO: 1598892 - RNA, 19 nt, Artificial Sequence
  Description of Artificial Sequence: Synthetic oligonucleotide
aauaucaagauccugcagc

SEQ ID NO: 1598893 - RNA, 19 nt, Artificial Sequence
  Description of Artificial Sequence: Synthetic oligonucleotide
auauaaacuauauaugggc

SEQ ID NO: 1598894 - RNA, 19 nt, Artificial Sequence
  Description of Artificial Sequence: Synthetic oligonucleotide
cuugguaacacuaauaagg

SEQ ID NO: 1598895 - RNA, 19 nt, Artificial Sequence
  Description of Artificial Sequence: Synthetic oligonucleotide
uauauauagauucaaagga

SEQ ID NO: 1598896 - RNA, 19 nt, Artificial Sequence
  Description of Artificial Sequence: Synthetic oligonucleotide
aauacauuuucuuggcucc

SEQ ID NO: 1598897 - RNA, 19 nt, Artificial Sequence
  Description of Artificial Sequence: Synthetic oligonucleotide
uaaaauuagaauaaggauc

SEQ ID NO: 1598898 - RNA, 19 nt, Artificial Sequence
  Description of Artificial Sequence: Synthetic oligonucleotide
uaaauugugauuacgaaug

SEQ ID NO: 1598899 - RNA, 19 nt, Artificial Sequence
  Description of Artificial Sequence: Synthetic oligonucleotide
aaagaagucaccaucaagg

SEQ ID NO: 1598900 - RNA, 19 nt, Artificial Sequence
  Description of Artificial Sequence: Synthetic oligonucleotide
aagauuguacaguugggcc

SEQ ID NO: 1598901 - RNA, 19 nt, Artificial Sequence
  Description of Artificial Sequence: Synthetic oligonucleotide
uguaucauauaacaaaagc

SEQ ID NO: 1598902 - RNA, 19 nt, Artificial Sequence
  Description of Artificial Sequence: Synthetic oligonucleotide
ucuacuaccuaaaagacac

SEQ ID NO: 1598903 - RNA, 19 nt, Artificial Sequence
  Description of Artificial Sequence: Synthetic oligonucleotide
aaaauuagaauaaggaucu

SEQ ID NO: 1598904 - RNA, 19 nt, Artificial Sequence
  Description of Artificial Sequence: Synthetic oligonucleotide
uauauagauucaaaggaag

SEQ ID NO: 1598905 - RNA, 19 nt, Artificial Sequence
  Description of Artificial Sequence: Synthetic oligonucleotide
uaucaauacauauuguuug

SEQ ID NO: 1598906 - RNA, 19 nt, Artificial Sequence
  Description of Artificial Sequence: Synthetic oligonucleotide
cuauauaugggccugaaac

SEQ ID NO: 1598907 - RNA, 19 nt, Artificial Sequence
  Description of Artificial Sequence: Synthetic oligonucleotide
auagauucaaaggaagugc

SEQ ID NO: 1598908 - RNA, 19 nt, Artificial Sequence
  Description of Artificial Sequence: Synthetic oligonucleotide
aauaagguagauuuggaua

SEQ ID NO: 1598909 - RNA, 19 nt, Artificial Sequence
  Description of Artificial Sequence: Synthetic oligonucleotide
auaaggaucuaguuuugcc

SEQ ID NO: 1598910 - RNA, 19 nt, Artificial Sequence
  Description of Artificial Sequence: Synthetic oligonucleotide
acuuguaggacauucaucu

SEQ ID NO: 1598911 - RNA, 19 nt, Artificial Sequence
  Description of Artificial Sequence: Synthetic oligonucleotide
uguuuguccacgaauauac

SEQ ID NO: 1598912 - RNA, 19 nt, Artificial Sequence
  Description of Artificial Sequence: Synthetic oligonucleotide
auaaaauuagaauaaggau

SEQ ID NO: 1598913 - RNA, 19 nt, Artificial Sequence
  Description of Artificial Sequence: Synthetic oligonucleotide
acuaauaagguagauuugg

SEQ ID NO: 1598914 - RNA, 19 nt, Artificial Sequence
  Description of Artificial Sequence: Synthetic oligonucleotide
aaagcaccacaauacugcc

SEQ ID NO: 1598915 - RNA, 19 nt, Artificial Sequence
  Description of Artificial Sequence: Synthetic oligonucleotide
gauauuacgaugcugaaua

SEQ ID NO: 1598916 - RNA, 19 nt, Artificial Sequence
  Description of Artificial Sequence: Synthetic oligonucleotide
aacacuuaaauugugauua

SEQ ID NO: 1598917 - RNA, 19 nt, Artificial Sequence
  Description of Artificial Sequence: Synthetic oligonucleotide
uuacgaauguuuaauugag

SEQ ID NO: 1598918 - RNA, 19 nt, Artificial Sequence
  Description of Artificial Sequence: Synthetic oligonucleotide
aauuagaauaaggaucuag

SEQ ID NO: 1598919 - RNA, 19 nt, Artificial Sequence
  Description of Artificial Sequence: Synthetic oligonucleotide
ucaaauaugauugggaaaa

SEQ ID NO: 1598920 - RNA, 19 nt, Artificial Sequence
  Description of Artificial Sequence: Synthetic oligonucleotide
gaugaagauauuacgaugc

SEQ ID NO: 1598921 - RNA, 19 nt, Artificial Sequence
  Description of Artificial Sequence: Synthetic oligonucleotide
gauuacgaauguuuaauug

SEQ ID NO: 1598922 - RNA, 19 nt, Artificial Sequence
  Description of Artificial Sequence: Synthetic oligonucleotide
aaacaucauauauauagau

SEQ ID NO: 1598923 - RNA, 19 nt, Artificial Sequence
  Description of Artificial Sequence: Synthetic oligonucleotide
uuuaauugaguauuuuccu

SEQ ID NO: 1598924 - RNA, 19 nt, Artificial Sequence
  Description of Artificial Sequence: Synthetic oligonucleotide
auaaauuucuacuaccuaa

SEQ ID NO: 1598925 - RNA, 19 nt, Artificial Sequence
  Description of Artificial Sequence: Synthetic oligonucleotide
accuaaaagacacauucuc

SEQ ID NO: 1598926 - RNA, 19 nt, Artificial Sequence
  Description of Artificial Sequence: Synthetic oligonucleotide
ucuagcacugugcagaugu

SEQ ID NO: 1598927 - RNA, 19 nt, Artificial Sequence
  Description of Artificial Sequence: Synthetic oligonucleotide
acgaauauaccauucacca

SEQ ID NO: 1598928 - RNA, 19 nt, Artificial Sequence
  Description of Artificial Sequence: Synthetic oligonucleotide
uuuaucaauacauauuguu

SEQ ID NO: 1598929 - RNA, 19 nt, Artificial Sequence
  Description of Artificial Sequence: Synthetic oligonucleotide
aauaaggaucuaguuuugc

SEQ ID NO: 1598930 - RNA, 19 nt, Artificial Sequence
  Description of Artificial Sequence: Synthetic oligonucleotide
ucgucaaccucaaauauga

SEQ ID NO: 1598931 - RNA, 19 nt, Artificial Sequence
  Description of Artificial Sequence: Synthetic oligonucleotide
gguaacacuaauaagguag

SEQ ID NO: 1598932 - RNA, 19 nt, Artificial Sequence
  Description of Artificial Sequence: Synthetic oligonucleotide
agauuguacaguugggccg

SEQ ID NO: 1598933 - RNA, 19 nt, Artificial Sequence
  Description of Artificial Sequence: Synthetic oligonucleotide
auaagguagauuuggauaa

SEQ ID NO: 1598934 - RNA, 19 nt, Artificial Sequence
  Description of Artificial Sequence: Synthetic oligonucleotide
uuaucaauacauauuguuu

SEQ ID NO: 1598935 - RNA, 19 nt, Artificial Sequence
  Description of Artificial Sequence: Synthetic oligonucleotide
gaaagcaccacaauacugc

SEQ ID NO: 1598936 - RNA, 19 nt, Artificial Sequence
  Description of Artificial Sequence: Synthetic oligonucleotide
cuuaacacgguguggaccc

SEQ ID NO: 1598937 - RNA, 19 nt, Artificial Sequence
  Description of Artificial Sequence: Synthetic oligonucleotide
auacauauuguuuguccac

SEQ ID NO: 1598938 - RNA, 19 nt, Artificial Sequence
  Description of Artificial Sequence: Synthetic oligonucleotide
uguuuaauugaguauuuuc

SEQ ID NO: 1598939 - RNA, 19 nt, Artificial Sequence
  Description of Artificial Sequence: Synthetic oligonucleotide
acaauguggggacaccugc

SEQ ID NO: 1598940 - RNA, 19 nt, Artificial Sequence
  Description of Artificial Sequence: Synthetic oligonucleotide
uagauucaaaggaagugcc

SEQ ID NO: 1598941 - RNA, 19 nt, Artificial Sequence
  Description of Artificial Sequence: Synthetic oligonucleotide
ucuauuucacccuagcaau

SEQ ID NO: 1598942 - RNA, 19 nt, Artificial Sequence
  Description of Artificial Sequence: Synthetic oligonucleotide
uuucuacuaccuaaaagac

SEQ ID NO: 1598943 - RNA, 19 nt, Artificial Sequence
  Description of Artificial Sequence: Synthetic oligonucleotide
uggauaacacuuaaauugu

SEQ ID NO: 1598944 - RNA, 19 nt, Artificial Sequence
  Description of Artificial Sequence: Synthetic oligonucleotide
acaucuauuucacccuagc

SEQ ID NO: 1598945 - RNA, 19 nt, Artificial Sequence
  Description of Artificial Sequence: Synthetic oligonucleotide
uauuguuuguccacgaaua

SEQ ID NO: 1598946 - RNA, 19 nt, Artificial Sequence
  Description of Artificial Sequence: Synthetic oligonucleotide
uuuguccacgaauauacca

SEQ ID NO: 1598947 - RNA, 19 nt, Artificial Sequence
  Description of Artificial Sequence: Synthetic oligonucleotide
uaauuguuguaauuacagc

SEQ ID NO: 1598948 - RNA, 19 nt, Artificial Sequence
  Description of Artificial Sequence: Synthetic oligonucleotide
uaaggaucuaguuuugccu

SEQ ID NO: 1598949 - RNA, 19 nt, Artificial Sequence
  Description of Artificial Sequence: Synthetic oligonucleotide
ucaaaaguucagaugugca

SEQ ID NO: 1598950 - RNA, 19 nt, Artificial Sequence
  Description of Artificial Sequence: Synthetic oligonucleotide
aaugcuggucgucaaccuc

SEQ ID NO: 1598951 - RNA, 19 nt, Artificial Sequence
  Description of Artificial Sequence: Synthetic oligonucleotide
uucacagauucuaagcaga

SEQ ID NO: 1598952 - RNA, 19 nt, Artificial Sequence
  Description of Artificial Sequence: Synthetic oligonucleotide
aucuauuucacccuagcaa

SEQ ID NO: 1598953 - RNA, 19 nt, Artificial Sequence
  Description of Artificial Sequence: Synthetic oligonucleotide
uguaauuacagcacuugua

SEQ ID NO: 1598954 - RNA, 19 nt, Artificial Sequence
  Description of Artificial Sequence: Synthetic oligonucleotide
uacauauuguuuguccacg

SEQ ID NO: 1598955 - RNA, 19 nt, Artificial Sequence
  Description of Artificial Sequence: Synthetic oligonucleotide
guaaugucgaugcugugcc

SEQ ID NO: 1598956 - RNA, 19 nt, Artificial Sequence
  Description of Artificial Sequence: Synthetic oligonucleotide
aaaagcucuaguaaacaca

SEQ ID NO: 1598957 - RNA, 19 nt, Artificial Sequence
  Description of Artificial Sequence: Synthetic oligonucleotide
auguuuaucaaacaucaua

SEQ ID NO: 1598958 - RNA, 19 nt, Artificial Sequence
  Description of Artificial Sequence: Synthetic oligonucleotide
cacgaauauaccauucacc

SEQ ID NO: 1598959 - RNA, 19 nt, Artificial Sequence
  Description of Artificial Sequence: Synthetic oligonucleotide
uucagaucuagcacugugc

SEQ ID NO: 1598960 - RNA, 19 nt, Artificial Sequence
  Description of Artificial Sequence: Synthetic oligonucleotide
uauccaaaacaaugugggg

SEQ ID NO: 1598961 - RNA, 19 nt, Artificial Sequence
  Description of Artificial Sequence: Synthetic oligonucleotide
cuuugugcgaaucugcaug

SEQ ID NO: 1598962 - RNA, 19 nt, Artificial Sequence
  Description of Artificial Sequence: Synthetic oligonucleotide
uuuuaucaauacauauugu

SEQ ID NO: 1598963 - RNA, 19 nt, Artificial Sequence
  Description of Artificial Sequence: Synthetic oligonucleotide
uccucaagccuucuuaucu

SEQ ID NO: 1598964 - RNA, 19 nt, Artificial Sequence
  Description of Artificial Sequence: Synthetic oligonucleotide
guucuaaguaagcugauga

SEQ ID NO: 1598965 - RNA, 19 nt, Artificial Sequence
  Description of Artificial Sequence: Synthetic oligonucleotide
aaauugugauuacgaaugu

SEQ ID NO: 1598966 - RNA, 19 nt, Artificial Sequence
  Description of Artificial Sequence: Synthetic oligonucleotide
uauaccauucaccaucaua

SEQ ID NO: 1598967 - RNA, 19 nt, Artificial Sequence
  Description of Artificial Sequence: Synthetic oligonucleotide
ucucuauagauuccugcca

SEQ ID NO: 1598968 - RNA, 19 nt, Artificial Sequence
  Description of Artificial Sequence: Synthetic oligonucleotide
auuagaauaaggaucuagu

SEQ ID NO: 1598969 - RNA, 19 nt, Artificial Sequence
  Description of Artificial Sequence: Synthetic oligonucleotide
ugugcagaaagcaccacaa

SEQ ID NO: 1598970 - RNA, 19 nt, Artificial Sequence
  Description of Artificial Sequence: Synthetic oligonucleotide
auuacagcacuuguaggac

SEQ ID NO: 1598971 - RNA, 19 nt, Artificial Sequence
  Description of Artificial Sequence: Synthetic oligonucleotide
uacauacucacagacauau

SEQ ID NO: 1598972 - RNA, 19 nt, Artificial Sequence
  Description of Artificial Sequence: Synthetic oligonucleotide
ugaaacgacaacuggcuuc

SEQ ID NO: 1598973 - RNA, 19 nt, Artificial Sequence
  Description of Artificial Sequence: Synthetic oligonucleotide
aguaaacacaggcagcagu

SEQ ID NO: 1598974 - RNA, 19 nt, Artificial Sequence
  Description of Artificial Sequence: Synthetic oligonucleotide
uaauaagguagauuuggau

SEQ ID NO: 1598975 - RNA, 19 nt, Artificial Sequence
  Description of Artificial Sequence: Synthetic oligonucleotide
uguuguccaguccucaaga

SEQ ID NO: 1598976 - RNA, 19 nt, Artificial Sequence
  Description of Artificial Sequence: Synthetic oligonucleotide
ugguucggucuuaacacgg

SEQ ID NO: 1598977 - RNA, 19 nt, Artificial Sequence
  Description of Artificial Sequence: Synthetic oligonucleotide
uacgaugcugaauacauuu

SEQ ID NO: 1598978 - RNA, 19 nt, Artificial Sequence
  Description of Artificial Sequence: Synthetic oligonucleotide
acgaauguuuaauugagua

SEQ ID NO: 1598979 - RNA, 19 nt, Artificial Sequence
  Description of Artificial Sequence: Synthetic oligonucleotide
uggaugaagauauuacgau

SEQ ID NO: 1598980 - RNA, 19 nt, Artificial Sequence
  Description of Artificial Sequence: Synthetic oligonucleotide
auauuacgaugcugaauac

SEQ ID NO: 1598981 - RNA, 19 nt, Artificial Sequence
  Description of Artificial Sequence: Synthetic oligonucleotide
cacaaugcuggcgagaagc

SEQ ID NO: 1598982 - RNA, 19 nt, Artificial Sequence
  Description of Artificial Sequence: Synthetic oligonucleotide
agaucuagcacugugcaga

SEQ ID NO: 1598983 - RNA, 19 nt, Artificial Sequence
  Description of Artificial Sequence: Synthetic oligonucleotide
uuuugucggggcugaaagg

SEQ ID NO: 1598984 - RNA, 19 nt, Artificial Sequence
  Description of Artificial Sequence: Synthetic oligonucleotide
uguaaagcuuagauuugcu

SEQ ID NO: 1598985 - RNA, 19 nt, Artificial Sequence
  Description of Artificial Sequence: Synthetic oligonucleotide
auauuguuuguccacgaau

SEQ ID NO: 1598986 - RNA, 19 nt, Artificial Sequence
  Description of Artificial Sequence: Synthetic oligonucleotide
ugugauuacgaauguuuaa

SEQ ID NO: 1598987 - RNA, 19 nt, Artificial Sequence
  Description of Artificial Sequence: Synthetic oligonucleotide
uuugucggggcugaaagga

SEQ ID NO: 1598988 - RNA, 19 nt, Artificial Sequence
  Description of Artificial Sequence: Synthetic oligonucleotide
uuguccacgaauauaccau

SEQ ID NO: 1598989 - RNA, 19 nt, Artificial Sequence
  Description of Artificial Sequence: Synthetic oligonucleotide
ugggguaaaacaagauugu

SEQ ID NO: 1598990 - RNA, 19 nt, Artificial Sequence
  Description of Artificial Sequence: Synthetic oligonucleotide
acacuuaaauugugauuac

SEQ ID NO: 1598991 - RNA, 19 nt, Artificial Sequence
  Description of Artificial Sequence: Synthetic oligonucleotide
acccaguguagccauugcc

SEQ ID NO: 1598992 - RNA, 19 nt, Artificial Sequence
  Description of Artificial Sequence: Synthetic oligonucleotide
aauauaccauucaccauca

SEQ ID NO: 1598993 - RNA, 19 nt, Artificial Sequence
  Description of Artificial Sequence: Synthetic oligonucleotide
aaugucgaugcugugccug

SEQ ID NO: 1598994 - RNA, 19 nt, Artificial Sequence
  Description of Artificial Sequence: Synthetic oligonucleotide
uucacccuagcaauaaaau

SEQ ID NO: 1598995 - RNA, 19 nt, Artificial Sequence
  Description of Artificial Sequence: Synthetic oligonucleotide
uugcaaaguugccagcggc

SEQ ID NO: 1598996 - RNA, 19 nt, Artificial Sequence
  Description of Artificial Sequence: Synthetic oligonucleotide
ugaagauauuacgaugcug

SEQ ID NO: 1598997 - RNA, 19 nt, Artificial Sequence
  Description of Artificial Sequence: Synthetic oligonucleotide
aguccucaagaauaucaag

SEQ ID NO: 1598998 - RNA, 19 nt, Artificial Sequence
  Description of Artificial Sequence: Synthetic oligonucleotide
ucggucuuaacacggugug

SEQ ID NO: 1598999 - RNA, 19 nt, Artificial Sequence
  Description of Artificial Sequence: Synthetic oligonucleotide
guuguaauuacagcacuug

SEQ ID NO: 1599000 - RNA, 19 nt, Artificial Sequence
  Description of Artificial Sequence: Synthetic oligonucleotide
aagauccugcagcauauaa

SEQ ID NO: 1599001 - RNA, 19 nt, Artificial Sequence
  Description of Artificial Sequence: Synthetic oligonucleotide
ucccuuuacuucucaaacc

SEQ ID NO: 1599002 - RNA, 19 nt, Artificial Sequence
  Description of Artificial Sequence: Synthetic oligonucleotide
uauuacgaugcugaauaca

SEQ ID NO: 1599003 - RNA, 19 nt, Artificial Sequence
  Description of Artificial Sequence: Synthetic oligonucleotide
uugugauuacgaauguuua

SEQ ID NO: 1599004 - RNA, 19 nt, Artificial Sequence
  Description of Artificial Sequence: Synthetic oligonucleotide
ucuuaacacgguguggacc

SEQ ID NO: 1599005 - RNA, 19 nt, Artificial Sequence
  Description of Artificial Sequence: Synthetic oligonucleotide
uaccuaaaagacacauucu

SEQ ID NO: 1599006 - RNA, 19 nt, Artificial Sequence
  Description of Artificial Sequence: Synthetic oligonucleotide
auuacgaugcugaauacau

SEQ ID NO: 1599007 - RNA, 19 nt, Artificial Sequence
  Description of Artificial Sequence: Synthetic oligonucleotide
gaagcucaucauuccacag

SEQ ID NO: 1599008 - RNA, 19 nt, Artificial Sequence
  Description of Artificial Sequence: Synthetic oligonucleotide
uucggucuuaacacggugu

SEQ ID NO: 1599009 - RNA, 19 nt, Artificial Sequence
  Description of Artificial Sequence: Synthetic oligonucleotide
ucuauagauuccugccacc

SEQ ID NO: 1599010 - RNA, 19 nt, Artificial Sequence
  Description of Artificial Sequence: Synthetic oligonucleotide
cucuauagauuccugccac

SEQ ID NO: 1599011 - RNA, 19 nt, Artificial Sequence
  Description of Artificial Sequence: Synthetic oligonucleotide
ucaagauccugcagcauau

SEQ ID NO: 1599012 - RNA, 19 nt, Artificial Sequence
  Description of Artificial Sequence: Synthetic oligonucleotide
aggugguucggucuuaaca

SEQ ID NO: 1599013 - RNA, 19 nt, Artificial Sequence
  Description of Artificial Sequence: Synthetic oligonucleotide
gauacugggcauuauccaa

SEQ ID NO: 1599014 - RNA, 19 nt, Artificial Sequence
  Description of Artificial Sequence: Synthetic oligonucleotide
uagcugugaaauguaaagc

SEQ ID NO: 1599015 - RNA, 19 nt, Artificial Sequence
  Description of Artificial Sequence: Synthetic oligonucleotide
guaaacacaggcagcagug

SEQ ID NO: 1599016 - RNA, 19 nt, Artificial Sequence
  Description of Artificial Sequence: Synthetic oligonucleotide
gauuguacaguugggccgc

SEQ ID NO: 1599017 - RNA, 19 nt, Artificial Sequence
  Description of Artificial Sequence: Synthetic oligonucleotide
aagauauuacgaugcugaa

SEQ ID NO: 1599018 - RNA, 19 nt, Artificial Sequence
  Description of Artificial Sequence: Synthetic oligonucleotide
uauaugggccugaaacgac

SEQ ID NO: 1599019 - RNA, 19 nt, Artificial Sequence
  Description of Artificial Sequence: Synthetic oligonucleotide
ggugguucggucuuaacac

SEQ ID NO: 1599020 - RNA, 19 nt, Artificial Sequence
  Description of Artificial Sequence: Synthetic oligonucleotide
uacgaauguuuaauugagu

SEQ ID NO: 1599021 - RNA, 19 nt, Artificial Sequence
  Description of Artificial Sequence: Synthetic oligonucleotide
gacugaagcucaucauucc

SEQ ID NO: 1599022 - RNA, 19 nt, Artificial Sequence
  Description of Artificial Sequence: Synthetic oligonucleotide
auagauuccugccaccuuu

SEQ ID NO: 1599023 - RNA, 19 nt, Artificial Sequence
  Description of Artificial Sequence: Synthetic oligonucleotide
agguagauuuggauaacac

SEQ ID NO: 1599024 - RNA, 19 nt, Artificial Sequence
  Description of Artificial Sequence: Synthetic oligonucleotide
cacuuaaauugugauuacg

SEQ ID NO: 1599025 - RNA, 19 nt, Artificial Sequence
  Description of Artificial Sequence: Synthetic oligonucleotide
uggcacauuacacuuggua

SEQ ID NO: 1599026 - RNA, 19 nt, Artificial Sequence
  Description of Artificial Sequence: Synthetic oligonucleotide
ugauuacgaauguuuaauu

SEQ ID NO: 1599027 - RNA, 19 nt, Artificial Sequence
  Description of Artificial Sequence: Synthetic oligonucleotide
agagagggaaauccagucu

SEQ ID NO: 1599028 - RNA, 19 nt, Artificial Sequence
  Description of Artificial Sequence: Synthetic oligonucleotide
ugcaaaguugccagcggcu

SEQ ID NO: 1599029 - RNA, 19 nt, Artificial Sequence
  Description of Artificial Sequence: Synthetic oligonucleotide
ugcucacacugauacuggg

SEQ ID NO: 1599030 - RNA, 19 nt, Artificial Sequence
  Description of Artificial Sequence: Synthetic oligonucleotide
aauuguuguccaguccuca

SEQ ID NO: 1599031 - RNA, 19 nt, Artificial Sequence
  Description of Artificial Sequence: Synthetic oligonucleotide
agauuuggauaacacuuaa

SEQ ID NO: 1599032 - RNA, 19 nt, Artificial Sequence
  Description of Artificial Sequence: Synthetic oligonucleotide
cauacucacagacauaugu

SEQ ID NO: 1599033 - RNA, 19 nt, Artificial Sequence
  Description of Artificial Sequence: Synthetic oligonucleotide
gaauguuuaauugaguauu

SEQ ID NO: 1599034 - RNA, 19 nt, Artificial Sequence
  Description of Artificial Sequence: Synthetic oligonucleotide
uacuaccuaaaagacacau

SEQ ID NO: 1599035 - RNA, 19 nt, Artificial Sequence
  Description of Artificial Sequence: Synthetic oligonucleotide
cuaauaagguagauuugga

SEQ ID NO: 1599036 - RNA, 19 nt, Artificial Sequence
  Description of Artificial Sequence: Synthetic oligonucleotide
uccuaauuguuguccaguc

SEQ ID NO: 1599037 - RNA, 19 nt, Artificial Sequence
  Description of Artificial Sequence: Synthetic oligonucleotide
uauuucacccuagcaauaa

SEQ ID NO: 1599038 - RNA, 19 nt, Artificial Sequence
  Description of Artificial Sequence: Synthetic oligonucleotide
ucacccuagcaauaaaauu

SEQ ID NO: 1599039 - RNA, 19 nt, Artificial Sequence
  Description of Artificial Sequence: Synthetic oligonucleotide
uacagcacuuguaggacau

SEQ ID NO: 1599040 - RNA, 19 nt, Artificial Sequence
  Description of Artificial Sequence: Synthetic oligonucleotide
agaaagcaccacaauacug

SEQ ID NO: 1599041 - RNA, 19 nt, Artificial Sequence
  Description of Artificial Sequence: Synthetic oligonucleotide
uuccugccaccuuugugcg

SEQ ID NO: 1599042 - RNA, 19 nt, Artificial Sequence
  Description of Artificial Sequence: Synthetic oligonucleotide
acauauuguuuguccacga

SEQ ID NO: 1599043 - RNA, 19 nt, Artificial Sequence
  Description of Artificial Sequence: Synthetic oligonucleotide
acccuagcaauaaaauuag

SEQ ID NO: 1599044 - RNA, 19 nt, Artificial Sequence
  Description of Artificial Sequence: Synthetic oligonucleotide
uaauuguuguccaguccuc

SEQ ID NO: 1599045 - RNA, 19 nt, Artificial Sequence
  Description of Artificial Sequence: Synthetic oligonucleotide
cuuccuaauuguuguccag

SEQ ID NO: 1599046 - RNA, 19 nt, Artificial Sequence
  Description of Artificial Sequence: Synthetic oligonucleotide
gguaaugucgaugcugugc

SEQ ID NO: 1599047 - RNA, 19 nt, Artificial Sequence
  Description of Artificial Sequence: Synthetic oligonucleotide
aacaauguggggacaccug

SEQ ID NO: 1599048 - RNA, 19 nt, Artificial Sequence
  Description of Artificial Sequence: Synthetic oligonucleotide
ugugcgaaucugcauguuu

SEQ ID NO: 1599049 - RNA, 19 nt, Artificial Sequence
  Description of Artificial Sequence: Synthetic oligonucleotide
aacgacaacuggcuucuuu

SEQ ID NO: 1599050 - RNA, 19 nt, Artificial Sequence
  Description of Artificial Sequence: Synthetic oligonucleotide
ugccucuggaaaaugcuua

SEQ ID NO: 1599051 - RNA, 19 nt, Artificial Sequence
  Description of Artificial Sequence: Synthetic oligonucleotide
uuccuaauuguuguccagu

SEQ ID NO: 1599052 - RNA, 19 nt, Artificial Sequence
  Description of Artificial Sequence: Synthetic oligonucleotide
acugggcauuauccaaaac

SEQ ID NO: 1599053 - RNA, 19 nt, Artificial Sequence
  Description of Artificial Sequence: Synthetic oligonucleotide
gcccacaucuauuucaccc

SEQ ID NO: 1599054 - RNA, 19 nt, Artificial Sequence
  Description of Artificial Sequence: Synthetic oligonucleotide
caauguggggacaccugcc

SEQ ID NO: 1599055 - RNA, 19 nt, Artificial Sequence
  Description of Artificial Sequence: Synthetic oligonucleotide
augguuaauuguuguaauu

SEQ ID NO: 1599056 - RNA, 19 nt, Artificial Sequence
  Description of Artificial Sequence: Synthetic oligonucleotide
acgacaacuggcuucuuuu

SEQ ID NO: 1599057 - RNA, 19 nt, Artificial Sequence
  Description of Artificial Sequence: Synthetic oligonucleotide
caaaguugccagcggcucc

SEQ ID NO: 1599058 - RNA, 19 nt, Artificial Sequence
  Description of Artificial Sequence: Synthetic oligonucleotide
guuuucacaggugguucgg

SEQ ID NO: 1599059 - RNA, 19 nt, Artificial Sequence
  Description of Artificial Sequence: Synthetic oligonucleotide
ccaaacuucaucaugguua

SEQ ID NO: 1599060 - RNA, 19 nt, Artificial Sequence
  Description of Artificial Sequence: Synthetic oligonucleotide
aaacuauauaugggccuga

SEQ ID NO: 1599061 - RNA, 19 nt, Artificial Sequence
  Description of Artificial Sequence: Synthetic oligonucleotide
aucaugguuaauuguugua

SEQ ID NO: 1599062 - RNA, 19 nt, Artificial Sequence
  Description of Artificial Sequence: Synthetic oligonucleotide
cacaucuauuucacccuag

SEQ ID NO: 1599063 - RNA, 19 nt, Artificial Sequence
  Description of Artificial Sequence: Synthetic oligonucleotide
uucuaagcagagcucucua

SEQ ID NO: 1599064 - RNA, 19 nt, Artificial Sequence
  Description of Artificial Sequence: Synthetic oligonucleotide
accucaaauaugauuggga

SEQ ID NO: 1599065 - RNA, 19 nt, Artificial Sequence
  Description of Artificial Sequence: Synthetic oligonucleotide
ccuagcaauaaaauuagaa

SEQ ID NO: 1599066 - RNA, 19 nt, Artificial Sequence
  Description of Artificial Sequence: Synthetic oligonucleotide
uauagauuccugccaccuu

SEQ ID NO: 1599067 - RNA, 19 nt, Artificial Sequence
  Description of Artificial Sequence: Synthetic oligonucleotide
cagauucuaagcagagcuc

SEQ ID NO: 1599068 - RNA, 19 nt, Artificial Sequence
  Description of Artificial Sequence: Synthetic oligonucleotide
gucgucaaccucaaauaug

SEQ ID NO: 1599069 - RNA, 19 nt, Artificial Sequence
  Description of Artificial Sequence: Synthetic oligonucleotide
acuauauaugggccugaaa

SEQ ID NO: 1599070 - RNA, 19 nt, Artificial Sequence
  Description of Artificial Sequence: Synthetic oligonucleotide
agauauuacgaugcugaau

SEQ ID NO: 1599071 - RNA, 19 nt, Artificial Sequence
  Description of Artificial Sequence: Synthetic oligonucleotide
ugguaacacuaauaaggua

SEQ ID NO: 1599072 - RNA, 19 nt, Artificial Sequence
  Description of Artificial Sequence: Synthetic oligonucleotide
acaguugggccgccaguuc

SEQ ID NO: 1599073 - RNA, 19 nt, Artificial Sequence
  Description of Artificial Sequence: Synthetic oligonucleotide
cauucaccaucauaauaca

SEQ ID NO: 1599074 - RNA, 19 nt, Artificial Sequence
  Description of Artificial Sequence: Synthetic oligonucleotide
ccaccuacugcucacacug

SEQ ID NO: 1599075 - RNA, 19 nt, Artificial Sequence
  Description of Artificial Sequence: Synthetic oligonucleotide
ugcgaaucugcauguuuuc

SEQ ID NO: 1599076 - RNA, 19 nt, Artificial Sequence
  Description of Artificial Sequence: Synthetic oligonucleotide
ucaggccucuuaaaccaaa

SEQ ID NO: 1599077 - RNA, 19 nt, Artificial Sequence
  Description of Artificial Sequence: Synthetic oligonucleotide
aggaucuaguuuugccucu

SEQ ID NO: 1599078 - RNA, 19 nt, Artificial Sequence
  Description of Artificial Sequence: Synthetic oligonucleotide
guucggucuuaacacggug

SEQ ID NO: 1599079 - RNA, 19 nt, Artificial Sequence
  Description of Artificial Sequence: Synthetic oligonucleotide
aacuauauaugggccugaa

SEQ ID NO: 1599080 - RNA, 19 nt, Artificial Sequence
  Description of Artificial Sequence: Synthetic oligonucleotide
aggccucuuaaaccaaacu

SEQ ID NO: 1599081 - RNA, 19 nt, Artificial Sequence
  Description of Artificial Sequence: Synthetic oligonucleotide
caucuauuucacccuagca

SEQ ID NO: 1599082 - RNA, 19 nt, Artificial Sequence
  Description of Artificial Sequence: Synthetic oligonucleotide
augggccugaaacgacaac

SEQ ID NO: 1599083 - RNA, 19 nt, Artificial Sequence
  Description of Artificial Sequence: Synthetic oligonucleotide
aagcucuaguaaacacagg

SEQ ID NO: 1599084 - RNA, 19 nt, Artificial Sequence
  Description of Artificial Sequence: Synthetic oligonucleotide
gaaacgacaacuggcuucu

SEQ ID NO: 1599085 - RNA, 19 nt, Artificial Sequence
  Description of Artificial Sequence: Synthetic oligonucleotide
caccaucaaggaagaagag

SEQ ID NO: 1599086 - RNA, 19 nt, Artificial Sequence
  Description of Artificial Sequence: Synthetic oligonucleotide
uacugggcauuauccaaaa

SEQ ID NO: 1599087 - RNA, 19 nt, Artificial Sequence
  Description of Artificial Sequence: Synthetic oligonucleotide
guguggacccaguguagcc

SEQ ID NO: 1599088 - RNA, 19 nt, Artificial Sequence
  Description of Artificial Sequence: Synthetic oligonucleotide
cuaagcagagcucucuaua

SEQ ID NO: 1599089 - RNA, 19 nt, Artificial Sequence
  Description of Artificial Sequence: Synthetic oligonucleotide
gccucuuaaaccaaacuuc

SEQ ID NO: 1599090 - RNA, 19 nt, Artificial Sequence
  Description of Artificial Sequence: Synthetic oligonucleotide
gucgaugcugugccugucc

SEQ ID NO: 1599091 - RNA, 19 nt, Artificial Sequence
  Description of Artificial Sequence: Synthetic oligonucleotide
ggucuuaacacggugugga

SEQ ID NO: 1599092 - RNA, 19 nt, Artificial Sequence
  Description of Artificial Sequence: Synthetic oligonucleotide
ccuaauuguuguccagucc

SEQ ID NO: 1599093 - RNA, 19 nt, Artificial Sequence
  Description of Artificial Sequence: Synthetic oligonucleotide
ucucacaaugcuggcgaga

SEQ ID NO: 1599094 - RNA, 19 nt, Artificial Sequence
  Description of Artificial Sequence: Synthetic oligonucleotide
aguuuaauuugggguaaaa

SEQ ID NO: 1599095 - RNA, 19 nt, Artificial Sequence
  Description of Artificial Sequence: Synthetic oligonucleotide
guuuguccacgaauauacc

SEQ ID NO: 1599096 - RNA, 19 nt, Artificial Sequence
  Description of Artificial Sequence: Synthetic oligonucleotide
agauccugcagcauauaaa

SEQ ID NO: 1599097 - RNA, 19 nt, Artificial Sequence
  Description of Artificial Sequence: Synthetic oligonucleotide
gugauuacgaauguuuaau

SEQ ID NO: 1599098 - RNA, 19 nt, Artificial Sequence
  Description of Artificial Sequence: Synthetic oligonucleotide
gaagagagggaaauccagu

SEQ ID NO: 1599099 - RNA, 19 nt, Artificial Sequence
  Description of Artificial Sequence: Synthetic oligonucleotide
uaacacgguguggacccag

SEQ ID NO: 1599100 - RNA, 19 nt, Artificial Sequence
  Description of Artificial Sequence: Synthetic oligonucleotide
acucuggacuguaucauau

SEQ ID NO: 1599101 - RNA, 19 nt, Artificial Sequence
  Description of Artificial Sequence: Synthetic oligonucleotide
caucauuccacagcucuga

SEQ ID NO: 1599102 - RNA, 19 nt, Artificial Sequence
  Description of Artificial Sequence: Synthetic oligonucleotide
gccugaaacgacaacuggc

SEQ ID NO: 1599103 - RNA, 19 nt, Artificial Sequence
  Description of Artificial Sequence: Synthetic oligonucleotide
augcuggucgucaaccuca

SEQ ID NO: 1599104 - RNA, 19 nt, Artificial Sequence
  Description of Artificial Sequence: Synthetic oligonucleotide
cauauuguuuguccacgaa

SEQ ID NO: 1599105 - RNA, 19 nt, Artificial Sequence
  Description of Artificial Sequence: Synthetic oligonucleotide
ccacgaauauaccauucac

SEQ ID NO: 1599106 - RNA, 19 nt, Artificial Sequence
  Description of Artificial Sequence: Synthetic oligonucleotide
ggauaacacuuaaauugug

SEQ ID NO: 1599107 - RNA, 19 nt, Artificial Sequence
  Description of Artificial Sequence: Synthetic oligonucleotide
aagcaccacaauacugcca

SEQ ID NO: 1599108 - RNA, 19 nt, Artificial Sequence
  Description of Artificial Sequence: Synthetic oligonucleotide
auuguacaguugggccgcc

SEQ ID NO: 1599109 - RNA, 19 nt, Artificial Sequence
  Description of Artificial Sequence: Synthetic oligonucleotide
acacgguguggacccagug

SEQ ID NO: 1599110 - RNA, 19 nt, Artificial Sequence
  Description of Artificial Sequence: Synthetic oligonucleotide
cucaaacccaacaguuuaa

SEQ ID NO: 1599111 - RNA, 19 nt, Artificial Sequence
  Description of Artificial Sequence: Synthetic oligonucleotide
auacugggcauuauccaaa

SEQ ID NO: 1599112 - RNA, 19 nt, Artificial Sequence
  Description of Artificial Sequence: Synthetic oligonucleotide
accuuugugcgaaucugca

SEQ ID NO: 1599113 - RNA, 19 nt, Artificial Sequence
  Description of Artificial Sequence: Synthetic oligonucleotide
cacaauacugccaccuacu

SEQ ID NO: 1599114 - RNA, 19 nt, Artificial Sequence
  Description of Artificial Sequence: Synthetic oligonucleotide
guggucacaugugacacaa

SEQ ID NO: 1599115 - RNA, 19 nt, Artificial Sequence
  Description of Artificial Sequence: Synthetic oligonucleotide
agguaaugucgaugcugug

SEQ ID NO: 1599116 - RNA, 19 nt, Artificial Sequence
  Description of Artificial Sequence: Synthetic oligonucleotide
cugaaaggauccuuccucu

SEQ ID NO: 1599117 - RNA, 19 nt, Artificial Sequence
  Description of Artificial Sequence: Synthetic oligonucleotide
guuguccaguccucaagaa

SEQ ID NO: 1599118 - RNA, 19 nt, Artificial Sequence
  Description of Artificial Sequence: Synthetic oligonucleotide
ccucaagaauaucaagauc

SEQ ID NO: 1599119 - RNA, 19 nt, Artificial Sequence
  Description of Artificial Sequence: Synthetic oligonucleotide
accacaauacugccaccua

SEQ ID NO: 1599120 - RNA, 19 nt, Artificial Sequence
  Description of Artificial Sequence: Synthetic oligonucleotide
aaggaagugcccacaucua

SEQ ID NO: 1599121 - RNA, 19 nt, Artificial Sequence
  Description of Artificial Sequence: Synthetic oligonucleotide
ccacaauacugccaccuac

SEQ ID NO: 1599122 - RNA, 19 nt, Artificial Sequence
  Description of Artificial Sequence: Synthetic oligonucleotide
guugccagcggcuccaaau

SEQ ID NO: 1599123 - RNA, 19 nt, Artificial Sequence
  Description of Artificial Sequence: Synthetic oligonucleotide
ugccuuccuaauuguuguc

SEQ ID NO: 1599124 - RNA, 19 nt, Artificial Sequence
  Description of Artificial Sequence: Synthetic oligonucleotide
ugacacaaugcuggucguc

SEQ ID NO: 1599125 - RNA, 19 nt, Artificial Sequence
  Description of Artificial Sequence: Synthetic oligonucleotide
gccuuccuaauuguugucc

SEQ ID NO: 1599126 - RNA, 19 nt, Artificial Sequence
  Description of Artificial Sequence: Synthetic oligonucleotide
aguaagcugaugacaucau

SEQ ID NO: 1599127 - RNA, 19 nt, Artificial Sequence
  Description of Artificial Sequence: Synthetic oligonucleotide
gguguggacccaguguagc

SEQ ID NO: 1599128 - RNA, 19 nt, Artificial Sequence
  Description of Artificial Sequence: Synthetic oligonucleotide
augcuggcgagaagccugg

SEQ ID NO: 1599129 - RNA, 19 nt, Artificial Sequence
  Description of Artificial Sequence: Synthetic oligonucleotide
aacacgguguggacccagu

SEQ ID NO: 1599130 - RNA, 19 nt, Artificial Sequence
  Description of Artificial Sequence: Synthetic oligonucleotide
gccgccaguucuaaguaag

SEQ ID NO: 1599131 - RNA, 19 nt, Artificial Sequence
  Description of Artificial Sequence: Synthetic oligonucleotide
acauacucacagacauaug

SEQ ID NO: 1599132 - RNA, 19 nt, Artificial Sequence
  Description of Artificial Sequence: Synthetic oligonucleotide
auauaccauucaccaucau

SEQ ID NO: 1599133 - RNA, 19 nt, Artificial Sequence
  Description of Artificial Sequence: Synthetic oligonucleotide
uuaacacgguguggaccca

SEQ ID NO: 1599134 - RNA, 19 nt, Artificial Sequence
  Description of Artificial Sequence: Synthetic oligonucleotide
agcucucuauagauuccug

SEQ ID NO: 1599135 - RNA, 19 nt, Artificial Sequence
  Description of Artificial Sequence: Synthetic oligonucleotide
gaucuagcacugugcagau

SEQ ID NO: 1599136 - RNA, 19 nt, Artificial Sequence
  Description of Artificial Sequence: Synthetic oligonucleotide
auacugccaccuacugcuc

SEQ ID NO: 1599137 - RNA, 19 nt, Artificial Sequence
  Description of Artificial Sequence: Synthetic oligonucleotide
auacauacucacagacaua

SEQ ID NO: 1599138 - RNA, 19 nt, Artificial Sequence
  Description of Artificial Sequence: Synthetic oligonucleotide
ggaucuaguuuugccucug

SEQ ID NO: 1599139 - RNA, 19 nt, Artificial Sequence
  Description of Artificial Sequence: Synthetic oligonucleotide
ggacuguaucauauaacaa

SEQ ID NO: 1599140 - RNA, 19 nt, Artificial Sequence
  Description of Artificial Sequence: Synthetic oligonucleotide
acgaugcugaauacauuuu

SEQ ID NO: 1599141 - RNA, 19 nt, Artificial Sequence
  Description of Artificial Sequence: Synthetic oligonucleotide
ggacccaguguagccauug

SEQ ID NO: 1599142 - RNA, 19 nt, Artificial Sequence
  Description of Artificial Sequence: Synthetic oligonucleotide
ggggcugaaaggauccuuc

SEQ ID NO: 1599143 - RNA, 19 nt, Artificial Sequence
  Description of Artificial Sequence: Synthetic oligonucleotide
caggugguucggucuuaac

SEQ ID NO: 1599144 - RNA, 19 nt, Artificial Sequence
  Description of Artificial Sequence: Synthetic oligonucleotide
caccaucauaauacagucu

SEQ ID NO: 1599145 - RNA, 19 nt, Artificial Sequence
  Description of Artificial Sequence: Synthetic oligonucleotide
cuggcgagaagccuggauu

SEQ ID NO: 1599146 - RNA, 19 nt, Artificial Sequence
  Description of Artificial Sequence: Synthetic oligonucleotide
gcaaaguugccagcggcuc

SEQ ID NO: 1599147 - RNA, 19 nt, Artificial Sequence
  Description of Artificial Sequence: Synthetic oligonucleotide
cugcagcauauaaacuaua

SEQ ID NO: 1599148 - RNA, 19 nt, Artificial Sequence
  Description of Artificial Sequence: Synthetic oligonucleotide
uggucacaugugacacaau

SEQ ID NO: 1599149 - RNA, 19 nt, Artificial Sequence
  Description of Artificial Sequence: Synthetic oligonucleotide
ugucgaugcugugccuguc

SEQ ID NO: 1599150 - RNA, 19 nt, Artificial Sequence
  Description of Artificial Sequence: Synthetic oligonucleotide
ugccaccuuugugcgaauc

SEQ ID NO: 1599151 - RNA, 19 nt, Artificial Sequence
  Description of Artificial Sequence: Synthetic oligonucleotide
aucuagcacugugcagaug

SEQ ID NO: 1599152 - RNA, 19 nt, Artificial Sequence
  Description of Artificial Sequence: Synthetic oligonucleotide
acaggugguucggucuuaa

SEQ ID NO: 1599153 - RNA, 19 nt, Artificial Sequence
  Description of Artificial Sequence: Synthetic oligonucleotide
ccgccaguucuaaguaagc

SEQ ID NO: 1599154 - RNA, 19 nt, Artificial Sequence
  Description of Artificial Sequence: Synthetic oligonucleotide
cacgguguggacccagugu

SEQ ID NO: 1599155 - RNA, 19 nt, Artificial Sequence
  Description of Artificial Sequence: Synthetic oligonucleotide
guacaguugggccgccagu

SEQ ID NO: 1599156 - RNA, 19 nt, Artificial Sequence
  Description of Artificial Sequence: Synthetic oligonucleotide
ucggggcugaaaggauccu

SEQ ID NO: 1599157 - RNA, 19 nt, Artificial Sequence
  Description of Artificial Sequence: Synthetic oligonucleotide
gugacacaaugcuggucgu

SEQ ID NO: 1599158 - RNA, 19 nt, Artificial Sequence
  Description of Artificial Sequence: Synthetic oligonucleotide
gcugugccuguccuccuca

SEQ ID NO: 1599159 - RNA, 19 nt, Artificial Sequence
  Description of Artificial Sequence: Synthetic oligonucleotide
guggacccaguguagccau

SEQ ID NO: 1599160 - RNA, 19 nt, Artificial Sequence
  Description of Artificial Sequence: Synthetic oligonucleotide
caguuuaauuugggguaaa

SEQ ID NO: 1599161 - RNA, 19 nt, Artificial Sequence
  Description of Artificial Sequence: Synthetic oligonucleotide
agccuggauuucacauuca

SEQ ID NO: 1599162 - RNA, 19 nt, Artificial Sequence
  Description of Artificial Sequence: Synthetic oligonucleotide
cgaauguuuaauugaguau

SEQ ID NO: 1599163 - RNA, 19 nt, Artificial Sequence
  Description of Artificial Sequence: Synthetic oligonucleotide
caguucuaaguaagcugau

SEQ ID NO: 1599164 - RNA, 19 nt, Artificial Sequence
  Description of Artificial Sequence: Synthetic oligonucleotide
aaacgacaacuggcuucuu

SEQ ID NO: 1599165 - RNA, 19 nt, Artificial Sequence
  Description of Artificial Sequence: Synthetic oligonucleotide
cccuagcaauaaaauuaga

SEQ ID NO: 1599166 - RNA, 19 nt, Artificial Sequence
  Description of Artificial Sequence: Synthetic oligonucleotide
cggucuuaacacggugugg

SEQ ID NO: 1599167 - RNA, 19 nt, Artificial Sequence
  Description of Artificial Sequence: Synthetic oligonucleotide
gcgaaucugcauguuuucu

SEQ ID NO: 1599168 - RNA, 19 nt, Artificial Sequence
  Description of Artificial Sequence: Synthetic oligonucleotide
cgguguggacccaguguag

SEQ ID NO: 1599169 - RNA, 19 nt, Artificial Sequence
  Description of Artificial Sequence: Synthetic oligonucleotide
gggccgccaguucuaagua

SEQ ID NO: 1599170 - RNA, 19 nt, Artificial Sequence
  Description of Artificial Sequence: Synthetic oligonucleotide
cugacuggaugaagauauu

SEQ ID NO: 1599171 - RNA, 19 nt, Artificial Sequence
  Description of Artificial Sequence: Synthetic oligonucleotide
gguucggucuuaacacggu

SEQ ID NO: 1599172 - RNA, 19 nt, Artificial Sequence
  Description of Artificial Sequence: Synthetic oligonucleotide
cuagcacugugcagauguu

SEQ ID NO: 1599173 - RNA, 19 nt, Artificial Sequence
  Description of Artificial Sequence: Synthetic oligonucleotide
gggcauuauccaaaacaau

SEQ ID NO: 1599174 - RNA, 19 nt, Artificial Sequence
  Description of Artificial Sequence: Synthetic oligonucleotide
gccaccuacugcucacacu

SEQ ID NO: 1599175 - RNA, 19 nt, Artificial Sequence
  Description of Artificial Sequence: Synthetic oligonucleotide
ccauugccuuccuaauugu

SEQ ID NO: 1599176 - RNA, 19 nt, Artificial Sequence
  Description of Artificial Sequence: Synthetic oligonucleotide
ccaaauacucuggugcuuu

SEQ ID NO: 1599177 - RNA, 19 nt, Artificial Sequence
  Description of Artificial Sequence: Synthetic oligonucleotide
cgaauauaccauucaccau

SEQ ID NO: 1599178 - RNA, 19 nt, Artificial Sequence
  Description of Artificial Sequence: Synthetic oligonucleotide
ccuuugugcgaaucugcau

SEQ ID NO: 1599179 - RNA, 19 nt, Artificial Sequence
  Description of Artificial Sequence: Synthetic oligonucleotide
gcucugagguaaugucgau

SEQ ID NO: 1599180 - RNA, 19 nt, Artificial Sequence
  Description of Artificial Sequence: Synthetic oligonucleotide
cgccaguucuaaguaagcu

SEQ ID NO: 1599181 - RNA, 19 nt, Artificial Sequence
  Description of Artificial Sequence: Synthetic oligonucleotide
cugccaccuuugugcgaau

SEQ ID NO: 1599182 - RNA, 19 nt, Artificial Sequence
  Description of Artificial Sequence: Synthetic oligonucleotide
cgucaaccucaaauaugau

SEQ ID NO: 1599183 - RNA, 19 nt, Artificial Sequence
  Description of Artificial Sequence: Synthetic oligonucleotide
cggggcugaaaggauccuu

SEQ ID NO: 1599184 - RNA, 19 nt, Artificial Sequence
  Description of Artificial Sequence: Synthetic oligonucleotide
aauagagugaggucaauuc

SEQ ID NO: 1599185 - RNA, 19 nt, Artificial Sequence
  Description of Artificial Sequence: Synthetic oligonucleotide
aacuagauugacuagucag

SEQ ID NO: 1599186 - RNA, 19 nt, Artificial Sequence
  Description of Artificial Sequence: Synthetic oligonucleotide
uacuucauaguacugagcc

SEQ ID NO: 1599187 - RNA, 19 nt, Artificial Sequence
  Description of Artificial Sequence: Synthetic oligonucleotide
aaacuucaaccuuagcagc

SEQ ID NO: 1599188 - RNA, 19 nt, Artificial Sequence
  Description of Artificial Sequence: Synthetic oligonucleotide
uauaauaggauggagguga

SEQ ID NO: 1599189 - RNA, 19 nt, Artificial Sequence
  Description of Artificial Sequence: Synthetic oligonucleotide
guauuaaucuggaagaagg

SEQ ID NO: 1599190 - RNA, 19 nt, Artificial Sequence
  Description of Artificial Sequence: Synthetic oligonucleotide
uguacaauuuucuucugag

SEQ ID NO: 1599191 - RNA, 19 nt, Artificial Sequence
  Description of Artificial Sequence: Synthetic oligonucleotide
aagacucuaguguuuguac

SEQ ID NO: 1599192 - RNA, 19 nt, Artificial Sequence
  Description of Artificial Sequence: Synthetic oligonucleotide
auugguucgaacugugagc

SEQ ID NO: 1599193 - RNA, 19 nt, Artificial Sequence
  Description of Artificial Sequence: Synthetic oligonucleotide
aacgugaugauagccaucg

SEQ ID NO: 1599194 - RNA, 19 nt, Artificial Sequence
  Description of Artificial Sequence: Synthetic oligonucleotide
agaaaggccaaucacaccu

SEQ ID NO: 1599195 - RNA, 19 nt, Artificial Sequence
  Description of Artificial Sequence: Synthetic oligonucleotide
uauugguucgaacugugag

SEQ ID NO: 1599196 - RNA, 19 nt, Artificial Sequence
  Description of Artificial Sequence: Synthetic oligonucleotide
ucuuagcagaguuuggagg

SEQ ID NO: 1599197 - RNA, 19 nt, Artificial Sequence
  Description of Artificial Sequence: Synthetic oligonucleotide
agugcaaccccucugaaug

SEQ ID NO: 1599198 - RNA, 19 nt, Artificial Sequence
  Description of Artificial Sequence: Synthetic oligonucleotide
aaucacaccuguuccacag

SEQ ID NO: 1599199 - RNA, 19 nt, Artificial Sequence
  Description of Artificial Sequence: Synthetic oligonucleotide
aagacugucgaaggaauac

SEQ ID NO: 1599200 - RNA, 19 nt, Artificial Sequence
  Description of Artificial Sequence: Synthetic oligonucleotide
aaaaucuucucugcucuac

SEQ ID NO: 1599201 - RNA, 19 nt, Artificial Sequence
  Description of Artificial Sequence: Synthetic oligonucleotide
ucgaaggaauacuucauag

SEQ ID NO: 1599202 - RNA, 19 nt, Artificial Sequence
  Description of Artificial Sequence: Synthetic oligonucleotide
aaggaauacuucauaguac

SEQ ID NO: 1599203 - RNA, 19 nt, Artificial Sequence
  Description of Artificial Sequence: Synthetic oligonucleotide
accauuaaaggcugcaguc

SEQ ID NO: 1599204 - RNA, 19 nt, Artificial Sequence
  Description of Artificial Sequence: Synthetic oligonucleotide
ucagauggcuacaagguac

SEQ ID NO: 1599205 - RNA, 19 nt, Artificial Sequence
  Description of Artificial Sequence: Synthetic oligonucleotide
uuggcuauugguucgaacu

SEQ ID NO: 1599206 - RNA, 19 nt, Artificial Sequence
  Description of Artificial Sequence: Synthetic oligonucleotide
uguuuguacaauuuucuuc

SEQ ID NO: 1599207 - RNA, 19 nt, Artificial Sequence
  Description of Artificial Sequence: Synthetic oligonucleotide
uggggaaacaaauccacag

SEQ ID NO: 1599208 - RNA, 19 nt, Artificial Sequence
  Description of Artificial Sequence: Synthetic oligonucleotide
ugacuagucaggaaagccc

SEQ ID NO: 1599209 - RNA, 19 nt, Artificial Sequence
  Description of Artificial Sequence: Synthetic oligonucleotide
agucuuuggauugccaucc

SEQ ID NO: 1599210 - RNA, 19 nt, Artificial Sequence
  Description of Artificial Sequence: Synthetic oligonucleotide
acgauauucccaucucucc

SEQ ID NO: 1599211 - RNA, 19 nt, Artificial Sequence
  Description of Artificial Sequence: Synthetic oligonucleotide
cuuuggauugccauccggg

SEQ ID NO: 1599212 - RNA, 19 nt, Artificial Sequence
  Description of Artificial Sequence: Synthetic oligonucleotide
ucaaugauaggagaggggu

SEQ ID NO: 1599213 - RNA, 19 nt, Artificial Sequence
  Description of Artificial Sequence: Synthetic oligonucleotide
cugggaugcacacugagcc

SEQ ID NO: 1599214 - RNA, 19 nt, Artificial Sequence
  Description of Artificial Sequence: Synthetic oligonucleotide
aacuagagugcggauggcc

SEQ ID NO: 1599215 - RNA, 19 nt, Artificial Sequence
  Description of Artificial Sequence: Synthetic oligonucleotide
cacagcaacaauuaacuuc

SEQ ID NO: 1599216 - RNA, 19 nt, Artificial Sequence
  Description of Artificial Sequence: Synthetic oligonucleotide
agauugacuagucaggaaa

SEQ ID NO: 1599217 - RNA, 19 nt, Artificial Sequence
  Description of Artificial Sequence: Synthetic oligonucleotide
ucugaaacuucaaccuuag

SEQ ID NO: 1599218 - RNA, 19 nt, Artificial Sequence
  Description of Artificial Sequence: Synthetic oligonucleotide
uuaacuagauugacuaguc

SEQ ID NO: 1599219 - RNA, 19 nt, Artificial Sequence
  Description of Artificial Sequence: Synthetic oligonucleotide
gaugcggaucuucaaaccc

SEQ ID NO: 1599220 - RNA, 19 nt, Artificial Sequence
  Description of Artificial Sequence: Synthetic oligonucleotide
agaugcggaucuucaaacc

SEQ ID NO: 1599221 - RNA, 19 nt, Artificial Sequence
  Description of Artificial Sequence: Synthetic oligonucleotide
auuaacuagauugacuagu

SEQ ID NO: 1599222 - RNA, 19 nt, Artificial Sequence
  Description of Artificial Sequence: Synthetic oligonucleotide
agguacacagacgauauuc

SEQ ID NO: 1599223 - RNA, 19 nt, Artificial Sequence
  Description of Artificial Sequence: Synthetic oligonucleotide
agcguuaucgagugaagag

SEQ ID NO: 1599224 - RNA, 19 nt, Artificial Sequence
  Description of Artificial Sequence: Synthetic oligonucleotide
augaaacgugaugauagcc

SEQ ID NO: 1599225 - RNA, 19 nt, Artificial Sequence
  Description of Artificial Sequence: Synthetic oligonucleotide
gugaggucaauucacagac

SEQ ID NO: 1599226 - RNA, 19 nt, Artificial Sequence
  Description of Artificial Sequence: Synthetic oligonucleotide
ugauagagcaauucugcac

SEQ ID NO: 1599227 - RNA, 19 nt, Artificial Sequence
  Description of Artificial Sequence: Synthetic oligonucleotide
agagggguauaauaggaug

SEQ ID NO: 1599228 - RNA, 19 nt, Artificial Sequence
  Description of Artificial Sequence: Synthetic oligonucleotide
gagggguauaauaggaugg

SEQ ID NO: 1599229 - RNA, 19 nt, Artificial Sequence
  Description of Artificial Sequence: Synthetic oligonucleotide
aaugauaggagagggguau

SEQ ID NO: 1599230 - RNA, 19 nt, Artificial Sequence
  Description of Artificial Sequence: Synthetic oligonucleotide
acuagauugacuagucagg

SEQ ID NO: 1599231 - RNA, 19 nt, Artificial Sequence
  Description of Artificial Sequence: Synthetic oligonucleotide
uagccaucaaugauaggag

SEQ ID NO: 1599232 - RNA, 19 nt, Artificial Sequence
  Description of Artificial Sequence: Synthetic oligonucleotide
ucuccuagcguuaucgagu

SEQ ID NO: 1599233 - RNA, 19 nt, Artificial Sequence
  Description of Artificial Sequence: Synthetic oligonucleotide
uagagugaggucaauucac

SEQ ID NO: 1599234 - RNA, 19 nt, Artificial Sequence
  Description of Artificial Sequence: Synthetic oligonucleotide
ugggguuccccaaacagca

SEQ ID NO: 1599235 - RNA, 19 nt, Artificial Sequence
  Description of Artificial Sequence: Synthetic oligonucleotide
ucuuuggauugccauccgg

SEQ ID NO: 1599236 - RNA, 19 nt, Artificial Sequence
  Description of Artificial Sequence: Synthetic oligonucleotide
uggauugccauccgggccc

SEQ ID NO: 1599237 - RNA, 19 nt, Artificial Sequence
  Description of Artificial Sequence: Synthetic oligonucleotide
aggccaaucacaccuguuc

SEQ ID NO: 1599238 - RNA, 19 nt, Artificial Sequence
  Description of Artificial Sequence: Synthetic oligonucleotide
augauagccaucguguguc

SEQ ID NO: 1599239 - RNA, 19 nt, Artificial Sequence
  Description of Artificial Sequence: Synthetic oligonucleotide
gaaacucacaguuggugac

SEQ ID NO: 1599240 - RNA, 19 nt, Artificial Sequence
  Description of Artificial Sequence: Synthetic oligonucleotide
auagagugaggucaauuca

SEQ ID NO: 1599241 - RNA, 19 nt, Artificial Sequence
  Description of Artificial Sequence: Synthetic oligonucleotide
aguauuaaucuggaagaag

SEQ ID NO: 1599242 - RNA, 19 nt, Artificial Sequence
  Description of Artificial Sequence: Synthetic oligonucleotide
uuuggauugccauccgggc

SEQ ID NO: 1599243 - RNA, 19 nt, Artificial Sequence
  Description of Artificial Sequence: Synthetic oligonucleotide
auugacuagucaggaaagc

SEQ ID NO: 1599244 - RNA, 19 nt, Artificial Sequence
  Description of Artificial Sequence: Synthetic oligonucleotide
gaugaaacgugaugauagc

SEQ ID NO: 1599245 - RNA, 19 nt, Artificial Sequence
  Description of Artificial Sequence: Synthetic oligonucleotide
ggaugaaacgugaugauag

SEQ ID NO: 1599246 - RNA, 19 nt, Artificial Sequence
  Description of Artificial Sequence: Synthetic oligonucleotide
aauggucugauagagcaau

SEQ ID NO: 1599247 - RNA, 19 nt, Artificial Sequence
  Description of Artificial Sequence: Synthetic oligonucleotide
gacagcuugucucaggaca

SEQ ID NO: 1599248 - RNA, 19 nt, Artificial Sequence
  Description of Artificial Sequence: Synthetic oligonucleotide
caacaauuaacuucucauc

SEQ ID NO: 1599249 - RNA, 19 nt, Artificial Sequence
  Description of Artificial Sequence: Synthetic oligonucleotide
aauuggaguucacuccacu

SEQ ID NO: 1599250 - RNA, 19 nt, Artificial Sequence
  Description of Artificial Sequence: Synthetic oligonucleotide
caaguuccuagguaguagc

SEQ ID NO: 1599251 - RNA, 19 nt, Artificial Sequence
  Description of Artificial Sequence: Synthetic oligonucleotide
acagacgauauucccaucu

SEQ ID NO: 1599252 - RNA, 19 nt, Artificial Sequence
  Description of Artificial Sequence: Synthetic oligonucleotide
cagcucgacaccaaggacc

SEQ ID NO: 1599253 - RNA, 19 nt, Artificial Sequence
  Description of Artificial Sequence: Synthetic oligonucleotide
acuagagugcggauggccc

SEQ ID NO: 1599254 - RNA, 19 nt, Artificial Sequence
  Description of Artificial Sequence: Synthetic oligonucleotide
ucuaguguuuguacaauuu

SEQ ID NO: 1599255 - RNA, 19 nt, Artificial Sequence
  Description of Artificial Sequence: Synthetic oligonucleotide
ugagaugcggaucuucaaa

SEQ ID NO: 1599256 - RNA, 19 nt, Artificial Sequence
  Description of Artificial Sequence: Synthetic oligonucleotide
agugaggucaauucacaga

SEQ ID NO: 1599257 - RNA, 19 nt, Artificial Sequence
  Description of Artificial Sequence: Synthetic oligonucleotide
aaccccuggggaugaaacg

SEQ ID NO: 1599258 - RNA, 19 nt, Artificial Sequence
  Description of Artificial Sequence: Synthetic oligonucleotide
uaucgagugaagaggagua

SEQ ID NO: 1599259 - RNA, 19 nt, Artificial Sequence
  Description of Artificial Sequence: Synthetic oligonucleotide
ugucucaggacaaacgguu

SEQ ID NO: 1599260 - RNA, 19 nt, Artificial Sequence
  Description of Artificial Sequence: Synthetic oligonucleotide
uuggauugccauccgggcc

SEQ ID NO: 1599261 - RNA, 19 nt, Artificial Sequence
  Description of Artificial Sequence: Synthetic oligonucleotide
aacucacaguuggugacac

SEQ ID NO: 1599262 - RNA, 19 nt, Artificial Sequence
  Description of Artificial Sequence: Synthetic oligonucleotide
gagaugcggaucuucaaac

SEQ ID NO: 1599263 - RNA, 19 nt, Artificial Sequence
  Description of Artificial Sequence: Synthetic oligonucleotide
uaacuagauugacuaguca

SEQ ID NO: 1599264 - RNA, 19 nt, Artificial Sequence
  Description of Artificial Sequence: Synthetic oligonucleotide
uuccgaauggccugcacca

SEQ ID NO: 1599265 - RNA, 19 nt, Artificial Sequence
  Description of Artificial Sequence: Synthetic oligonucleotide
uuaucgagugaagaggagu

SEQ ID NO: 1599266 - RNA, 19 nt, Artificial Sequence
  Description of Artificial Sequence: Synthetic oligonucleotide
uugguucgaacugugagcu

SEQ ID NO: 1599267 - RNA, 19 nt, Artificial Sequence
  Description of Artificial Sequence: Synthetic oligonucleotide
ucgaacugugagcucacgc

SEQ ID NO: 1599268 - RNA, 19 nt, Artificial Sequence
  Description of Artificial Sequence: Synthetic oligonucleotide
ucauagcucagccuccaga

SEQ ID NO: 1599269 - RNA, 19 nt, Artificial Sequence
  Description of Artificial Sequence: Synthetic oligonucleotide
uuccuggaaauagagugag

SEQ ID NO: 1599270 - RNA, 19 nt, Artificial Sequence
  Description of Artificial Sequence: Synthetic oligonucleotide
agucacaacaucagccagc

SEQ ID NO: 1599271 - RNA, 19 nt, Artificial Sequence
  Description of Artificial Sequence: Synthetic oligonucleotide
guacaauuuucuucugagc

SEQ ID NO: 1599272 - RNA, 19 nt, Artificial Sequence
  Description of Artificial Sequence: Synthetic oligonucleotide
ugaagacugucgaaggaau

SEQ ID NO: 1599273 - RNA, 19 nt, Artificial Sequence
  Description of Artificial Sequence: Synthetic oligonucleotide
gagugaggucaauucacag

SEQ ID NO: 1599274 - RNA, 19 nt, Artificial Sequence
  Description of Artificial Sequence: Synthetic oligonucleotide
aagaggaguaccagcucac

SEQ ID NO: 1599275 - RNA, 19 nt, Artificial Sequence
  Description of Artificial Sequence: Synthetic oligonucleotide
uuaaaggcugcaguccacc

SEQ ID NO: 1599276 - RNA, 19 nt, Artificial Sequence
  Description of Artificial Sequence: Synthetic oligonucleotide
agcuucuuagcagaguuug

SEQ ID NO: 1599277 - RNA, 19 nt, Artificial Sequence
  Description of Artificial Sequence: Synthetic oligonucleotide
aaaggccaaucacaccugu

SEQ ID NO: 1599278 - RNA, 19 nt, Artificial Sequence
  Description of Artificial Sequence: Synthetic oligonucleotide
cucgacaccaaggaccugg

SEQ ID NO: 1599279 - RNA, 19 nt, Artificial Sequence
  Description of Artificial Sequence: Synthetic oligonucleotide
guacacagacgauauuccc

SEQ ID NO: 1599280 - RNA, 19 nt, Artificial Sequence
  Description of Artificial Sequence: Synthetic oligonucleotide
ucugcgaccuuaacagcug

SEQ ID NO: 1599281 - RNA, 19 nt, Artificial Sequence
  Description of Artificial Sequence: Synthetic oligonucleotide
acuuauucgguagccauca

SEQ ID NO: 1599282 - RNA, 19 nt, Artificial Sequence
  Description of Artificial Sequence: Synthetic oligonucleotide
cagagaaaggccaaucaca

SEQ ID NO: 1599283 - RNA, 19 nt, Artificial Sequence
  Description of Artificial Sequence: Synthetic oligonucleotide
gagucacaacaucagccag

SEQ ID NO: 1599284 - RNA, 19 nt, Artificial Sequence
  Description of Artificial Sequence: Synthetic oligonucleotide
uaaccccuggggaugaaac

SEQ ID NO: 1599285 - RNA, 19 nt, Artificial Sequence
  Description of Artificial Sequence: Synthetic oligonucleotide
gaccuuaacagcuguggca

SEQ ID NO: 1599286 - RNA, 19 nt, Artificial Sequence
  Description of Artificial Sequence: Synthetic oligonucleotide
ugagcucacgccagugucc

SEQ ID NO: 1599287 - RNA, 19 nt, Artificial Sequence
  Description of Artificial Sequence: Synthetic oligonucleotide
agacucuaguguuuguaca

SEQ ID NO: 1599288 - RNA, 19 nt, Artificial Sequence
  Description of Artificial Sequence: Synthetic oligonucleotide
ggacaaacgguucaccgag

SEQ ID NO: 1599289 - RNA, 19 nt, Artificial Sequence
  Description of Artificial Sequence: Synthetic oligonucleotide
acacagacgauauucccau

SEQ ID NO: 1599290 - RNA, 19 nt, Artificial Sequence
  Description of Artificial Sequence: Synthetic oligonucleotide
uccgcaugcuuucaccaug

SEQ ID NO: 1599291 - RNA, 19 nt, Artificial Sequence
  Description of Artificial Sequence: Synthetic oligonucleotide
cugucuccuagcguuaucg

SEQ ID NO: 1599292 - RNA, 19 nt, Artificial Sequence
  Description of Artificial Sequence: Synthetic oligonucleotide
gguauaauaggauggaggu

SEQ ID NO: 1599293 - RNA, 19 nt, Artificial Sequence
  Description of Artificial Sequence: Synthetic oligonucleotide
guggcaaaaucuucucugc

SEQ ID NO: 1599294 - RNA, 19 nt, Artificial Sequence
  Description of Artificial Sequence: Synthetic oligonucleotide
aaauagagugaggucaauu

SEQ ID NO: 1599295 - RNA, 19 nt, Artificial Sequence
  Description of Artificial Sequence: Synthetic oligonucleotide
uccagcacgggccggauuc

SEQ ID NO: 1599296 - RNA, 19 nt, Artificial Sequence
  Description of Artificial Sequence: Synthetic oligonucleotide
uccugacuuaaccccuggg

SEQ ID NO: 1599297 - RNA, 19 nt, Artificial Sequence
  Description of Artificial Sequence: Synthetic oligonucleotide
ugucgaaggaauacuucau

SEQ ID NO: 1599298 - RNA, 19 nt, Artificial Sequence
  Description of Artificial Sequence: Synthetic oligonucleotide
ggcuacaagguacacagac

SEQ ID NO: 1599299 - RNA, 19 nt, Artificial Sequence
  Description of Artificial Sequence: Synthetic oligonucleotide
uucagauggcuacaaggua

SEQ ID NO: 1599300 - RNA, 19 nt, Artificial Sequence
  Description of Artificial Sequence: Synthetic oligonucleotide
agacgauauucccaucucu

SEQ ID NO: 1599301 - RNA, 19 nt, Artificial Sequence
  Description of Artificial Sequence: Synthetic oligonucleotide
gauauucccaucucuccaa

SEQ ID NO: 1599302 - RNA, 19 nt, Artificial Sequence
  Description of Artificial Sequence: Synthetic oligonucleotide
augcaguccagcacgggcc

SEQ ID NO: 1599303 - RNA, 19 nt, Artificial Sequence
  Description of Artificial Sequence: Synthetic oligonucleotide
ugacuuaaccccuggggau

SEQ ID NO: 1599304 - RNA, 19 nt, Artificial Sequence
  Description of Artificial Sequence: Synthetic oligonucleotide
auucgguagccaucaauga

SEQ ID NO: 1599305 - RNA, 19 nt, Artificial Sequence
  Description of Artificial Sequence: Synthetic oligonucleotide
acaaacgguucaccgagga

SEQ ID NO: 1599306 - RNA, 19 nt, Artificial Sequence
  Description of Artificial Sequence: Synthetic oligonucleotide
cuugcagguaagacucuag

SEQ ID NO: 1599307 - RNA, 19 nt, Artificial Sequence
  Description of Artificial Sequence: Synthetic oligonucleotide
aggacaaacgguucaccga

SEQ ID NO: 1599308 - RNA, 19 nt, Artificial Sequence
  Description of Artificial Sequence: Synthetic oligonucleotide
gacagugcaaccccucuga

SEQ ID NO: 1599309 - RNA, 19 nt, Artificial Sequence
  Description of Artificial Sequence: Synthetic oligonucleotide
gucuccuagcguuaucgag

SEQ ID NO: 1599310 - RNA, 19 nt, Artificial Sequence
  Description of Artificial Sequence: Synthetic oligonucleotide
uggcaaaaucuucucugcu

SEQ ID NO: 1599311 - RNA, 19 nt, Artificial Sequence
  Description of Artificial Sequence: Synthetic oligonucleotide
gagaaaggccaaucacacc

SEQ ID NO: 1599312 - RNA, 19 nt, Artificial Sequence
  Description of Artificial Sequence: Synthetic oligonucleotide
auauucccaucucuccaag

SEQ ID NO: 1599313 - RNA, 19 nt, Artificial Sequence
  Description of Artificial Sequence: Synthetic oligonucleotide
auucccaucucuccaaguu

SEQ ID NO: 1599314 - RNA, 19 nt, Artificial Sequence
  Description of Artificial Sequence: Synthetic oligonucleotide
gacgauauucccaucucuc

SEQ ID NO: 1599315 - RNA, 19 nt, Artificial Sequence
  Description of Artificial Sequence: Synthetic oligonucleotide
uucucaucuuucugcgacc

SEQ ID NO: 1599316 - RNA, 19 nt, Artificial Sequence
  Description of Artificial Sequence: Synthetic oligonucleotide
cuagagugcggauggcccc

SEQ ID NO: 1599317 - RNA, 19 nt, Artificial Sequence
  Description of Artificial Sequence: Synthetic oligonucleotide
cauuaaaggcugcagucca

SEQ ID NO: 1599318 - RNA, 19 nt, Artificial Sequence
  Description of Artificial Sequence: Synthetic oligonucleotide
aggucaauucacagacugc

SEQ ID NO: 1599319 - RNA, 19 nt, Artificial Sequence
  Description of Artificial Sequence: Synthetic oligonucleotide
uuucugcgaccuuaacagc

SEQ ID NO: 1599320 - RNA, 19 nt, Artificial Sequence
  Description of Artificial Sequence: Synthetic oligonucleotide
aaacgugaugauagccauc

SEQ ID NO: 1599321 - RNA, 19 nt, Artificial Sequence
  Description of Artificial Sequence: Synthetic oligonucleotide
gcugcaacgggucauggug

SEQ ID NO: 1599322 - RNA, 19 nt, Artificial Sequence
  Description of Artificial Sequence: Synthetic oligonucleotide
aagguggacuuauucggua

SEQ ID NO: 1599323 - RNA, 19 nt, Artificial Sequence
  Description of Artificial Sequence: Synthetic oligonucleotide
uaagacucuaguguuugua

SEQ ID NO: 1599324 - RNA, 19 nt, Artificial Sequence
  Description of Artificial Sequence: Synthetic oligonucleotide
cuagcguuaucgagugaag

SEQ ID NO: 1599325 - RNA, 19 nt, Artificial Sequence
  Description of Artificial Sequence: Synthetic oligonucleotide
aacgggucauggugcuuuc

SEQ ID NO: 1599326 - RNA, 19 nt, Artificial Sequence
  Description of Artificial Sequence: Synthetic oligonucleotide
uaguacugagccacuugac

SEQ ID NO: 1599327 - RNA, 19 nt, Artificial Sequence
  Description of Artificial Sequence: Synthetic oligonucleotide
guauaauaggauggaggug

SEQ ID NO: 1599328 - RNA, 19 nt, Artificial Sequence
  Description of Artificial Sequence: Synthetic oligonucleotide
ccugacuuaaccccugggg

SEQ ID NO: 1599329 - RNA, 19 nt, Artificial Sequence
  Description of Artificial Sequence: Synthetic oligonucleotide
ugcaaccccucugaauggg

SEQ ID NO: 1599330 - RNA, 19 nt, Artificial Sequence
  Description of Artificial Sequence: Synthetic oligonucleotide
aucgagugaagaggaguac

SEQ ID NO: 1599331 - RNA, 19 nt, Artificial Sequence
  Description of Artificial Sequence: Synthetic oligonucleotide
gaugugggguuccccaaac

SEQ ID NO: 1599332 - RNA, 19 nt, Artificial Sequence
  Description of Artificial Sequence: Synthetic oligonucleotide
gaguggagucacaacauca

SEQ ID NO: 1599333 - RNA, 19 nt, Artificial Sequence
  Description of Artificial Sequence: Synthetic oligonucleotide
uccccaauggucugauaga

SEQ ID NO: 1599334 - RNA, 19 nt, Artificial Sequence
  Description of Artificial Sequence: Synthetic oligonucleotide
cugcaacgggucauggugc

SEQ ID NO: 1599335 - RNA, 19 nt, Artificial Sequence
  Description of Artificial Sequence: Synthetic oligonucleotide
cuccuagcguuaucgagug

SEQ ID NO: 1599336 - RNA, 19 nt, Artificial Sequence
  Description of Artificial Sequence: Synthetic oligonucleotide
aagaugugggguuccccaa

SEQ ID NO: 1599337 - RNA, 19 nt, Artificial Sequence
  Description of Artificial Sequence: Synthetic oligonucleotide
auagagcaauucugcacca

SEQ ID NO: 1599338 - RNA, 19 nt, Artificial Sequence
  Description of Artificial Sequence: Synthetic oligonucleotide
uagauugacuagucaggaa

SEQ ID NO: 1599339 - RNA, 19 nt, Artificial Sequence
  Description of Artificial Sequence: Synthetic oligonucleotide
accuuaacagcuguggcaa

SEQ ID NO: 1599340 - RNA, 19 nt, Artificial Sequence
  Description of Artificial Sequence: Synthetic oligonucleotide
ugggguguggggaaacaaa

SEQ ID NO: 1599341 - RNA, 19 nt, Artificial Sequence
  Description of Artificial Sequence: Synthetic oligonucleotide
uagcguuaucgagugaaga

SEQ ID NO: 1599342 - RNA, 19 nt, Artificial Sequence
  Description of Artificial Sequence: Synthetic oligonucleotide
gacuuaaccccuggggaug

SEQ ID NO: 1599343 - RNA, 19 nt, Artificial Sequence
  Description of Artificial Sequence: Synthetic oligonucleotide
cuuggcuauugguucgaac

SEQ ID NO: 1599344 - RNA, 19 nt, Artificial Sequence
  Description of Artificial Sequence: Synthetic oligonucleotide
gaaacgugaugauagccau

SEQ ID NO: 1599345 - RNA, 19 nt, Artificial Sequence
  Description of Artificial Sequence: Synthetic oligonucleotide
ucucaucuuucugcgaccu

SEQ ID NO: 1599346 - RNA, 19 nt, Artificial Sequence
  Description of Artificial Sequence: Synthetic oligonucleotide
ucaaagaugugggguuccc

SEQ ID NO: 1599347 - RNA, 19 nt, Artificial Sequence
  Description of Artificial Sequence: Synthetic oligonucleotide
ugaggucaauucacagacu

SEQ ID NO: 1599348 - RNA, 19 nt, Artificial Sequence
  Description of Artificial Sequence: Synthetic oligonucleotide
gcguuaucgagugaagagg

SEQ ID NO: 1599349 - RNA, 19 nt, Artificial Sequence
  Description of Artificial Sequence: Synthetic oligonucleotide
aaagcccucaggauccccu

SEQ ID NO: 1599350 - RNA, 19 nt, Artificial Sequence
  Description of Artificial Sequence: Synthetic oligonucleotide
gguacacagacgauauucc

SEQ ID NO: 1599351 - RNA, 19 nt, Artificial Sequence
  Description of Artificial Sequence: Synthetic oligonucleotide
cagucuuuggauugccauc

SEQ ID NO: 1599352 - RNA, 19 nt, Artificial Sequence
  Description of Artificial Sequence: Synthetic oligonucleotide
caccagcucgacaccaagg

SEQ ID NO: 1599353 - RNA, 19 nt, Artificial Sequence
  Description of Artificial Sequence: Synthetic oligonucleotide
accuggcaucaucuacugc

SEQ ID NO: 1599354 - RNA, 19 nt, Artificial Sequence
  Description of Artificial Sequence: Synthetic oligonucleotide
aguuggugacaccauuaaa

SEQ ID NO: 1599355 - RNA, 19 nt, Artificial Sequence
  Description of Artificial Sequence: Synthetic oligonucleotide
ugucuccuagcguuaucga

SEQ ID NO: 1599356 - RNA, 19 nt, Artificial Sequence
  Description of Artificial Sequence: Synthetic oligonucleotide
uagagugcggauggccccg

SEQ ID NO: 1599357 - RNA, 19 nt, Artificial Sequence
  Description of Artificial Sequence: Synthetic oligonucleotide
caacacagcucaaugaagu

SEQ ID NO: 1599358 - RNA, 19 nt, Artificial Sequence
  Description of Artificial Sequence: Synthetic oligonucleotide
uacaagguacacagacgau

SEQ ID NO: 1599359 - RNA, 19 nt, Artificial Sequence
  Description of Artificial Sequence: Synthetic oligonucleotide
uggacuuauucgguagcca

SEQ ID NO: 1599360 - RNA, 19 nt, Artificial Sequence
  Description of Artificial Sequence: Synthetic oligonucleotide
gcuacaagguacacagacg

SEQ ID NO: 1599361 - RNA, 19 nt, Artificial Sequence
  Description of Artificial Sequence: Synthetic oligonucleotide
caaacgguucaccgaggag

SEQ ID NO: 1599362 - RNA, 19 nt, Artificial Sequence
  Description of Artificial Sequence: Synthetic oligonucleotide
gaugcacacugagccagag

SEQ ID NO: 1599363 - RNA, 19 nt, Artificial Sequence
  Description of Artificial Sequence: Synthetic oligonucleotide
ccccucugaaacuucaacc

SEQ ID NO: 1599364 - RNA, 19 nt, Artificial Sequence
  Description of Artificial Sequence: Synthetic oligonucleotide
gugaugauagccaucgugu

SEQ ID NO: 1599365 - RNA, 19 nt, Artificial Sequence
  Description of Artificial Sequence: Synthetic oligonucleotide
cucugaaacuucaaccuua

SEQ ID NO: 1599366 - RNA, 19 nt, Artificial Sequence
  Description of Artificial Sequence: Synthetic oligonucleotide
gugcaaccccucugaaugg

SEQ ID NO: 1599367 - RNA, 19 nt, Artificial Sequence
  Description of Artificial Sequence: Synthetic oligonucleotide
guuaucgagugaagaggag

SEQ ID NO: 1599368 - RNA, 19 nt, Artificial Sequence
  Description of Artificial Sequence: Synthetic oligonucleotide
ugauagccaucgugugucc

SEQ ID NO: 1599369 - RNA, 19 nt, Artificial Sequence
  Description of Artificial Sequence: Synthetic oligonucleotide
ccacuuagcuccccaaugg

SEQ ID NO: 1599370 - RNA, 19 nt, Artificial Sequence
  Description of Artificial Sequence: Synthetic oligonucleotide
ggugacaccauuaaaggcu

SEQ ID NO: 1599371 - RNA, 19 nt, Artificial Sequence
  Description of Artificial Sequence: Synthetic oligonucleotide
gacaaacgguucaccgagg

SEQ ID NO: 1599372 - RNA, 19 nt, Artificial Sequence
  Description of Artificial Sequence: Synthetic oligonucleotide
uguccaccuucaugaaaca

SEQ ID NO: 1599373 - RNA, 19 nt, Artificial Sequence
  Description of Artificial Sequence: Synthetic oligonucleotide
agggguauaauaggaugga

SEQ ID NO: 1599374 - RNA, 19 nt, Artificial Sequence
  Description of Artificial Sequence: Synthetic oligonucleotide
ggccaaucacaccuguucc

SEQ ID NO: 1599375 - RNA, 19 nt, Artificial Sequence
  Description of Artificial Sequence: Synthetic oligonucleotide
gauggaauuggaguucacu

SEQ ID NO: 1599376 - RNA, 19 nt, Artificial Sequence
  Description of Artificial Sequence: Synthetic oligonucleotide
guggacuuauucgguagcc

SEQ ID NO: 1599377 - RNA, 19 nt, Artificial Sequence
  Description of Artificial Sequence: Synthetic oligonucleotide
cgaacugugagcucacgcc

SEQ ID NO: 1599378 - RNA, 19 nt, Artificial Sequence
  Description of Artificial Sequence: Synthetic oligonucleotide
agagugaggucaauucaca

SEQ ID NO: 1599379 - RNA, 19 nt, Artificial Sequence
  Description of Artificial Sequence: Synthetic oligonucleotide
gugagcucacgccaguguc

SEQ ID NO: 1599380 - RNA, 19 nt, Artificial Sequence
  Description of Artificial Sequence: Synthetic oligonucleotide
gacuuauucgguagccauc

SEQ ID NO: 1599381 - RNA, 19 nt, Artificial Sequence
  Description of Artificial Sequence: Synthetic oligonucleotide
caucguguguccuuggcua

SEQ ID NO: 1599382 - RNA, 19 nt, Artificial Sequence
  Description of Artificial Sequence: Synthetic oligonucleotide
cuucaaagaugugggguuc

SEQ ID NO: 1599383 - RNA, 19 nt, Artificial Sequence
  Description of Artificial Sequence: Synthetic oligonucleotide
cugaaacuucaaccuuagc

SEQ ID NO: 1599384 - RNA, 19 nt, Artificial Sequence
  Description of Artificial Sequence: Synthetic oligonucleotide
gcgaccuuaacagcugugg

SEQ ID NO: 1599385 - RNA, 19 nt, Artificial Sequence
  Description of Artificial Sequence: Synthetic oligonucleotide
uucgaacugugagcucacg

SEQ ID NO: 1599386 - RNA, 19 nt, Artificial Sequence
  Description of Artificial Sequence: Synthetic oligonucleotide
cagacgauauucccaucuc

SEQ ID NO: 1599387 - RNA, 19 nt, Artificial Sequence
  Description of Artificial Sequence: Synthetic oligonucleotide
gguggacuuauucgguagc

SEQ ID NO: 1599388 - RNA, 19 nt, Artificial Sequence
  Description of Artificial Sequence: Synthetic oligonucleotide
gugggguuccccaaacagc

SEQ ID NO: 1599389 - RNA, 19 nt, Artificial Sequence
  Description of Artificial Sequence: Synthetic oligonucleotide
gcuccuccugacuuaaccc

SEQ ID NO: 1599390 - RNA, 19 nt, Artificial Sequence
  Description of Artificial Sequence: Synthetic oligonucleotide
aagguacacagacgauauu

SEQ ID NO: 1599391 - RNA, 19 nt, Artificial Sequence
  Description of Artificial Sequence: Synthetic oligonucleotide
cacgccaguguccaccuuc

SEQ ID NO: 1599392 - RNA, 19 nt, Artificial Sequence
  Description of Artificial Sequence: Synthetic oligonucleotide
gguucgaacugugagcuca

SEQ ID NO: 1599393 - RNA, 19 nt, Artificial Sequence
  Description of Artificial Sequence: Synthetic oligonucleotide
gacuagucaggaaagcccu

SEQ ID NO: 1599394 - RNA, 19 nt, Artificial Sequence
  Description of Artificial Sequence: Synthetic oligonucleotide
aaaugucaaggaggaugga

SEQ ID NO: 1599395 - RNA, 19 nt, Artificial Sequence
  Description of Artificial Sequence: Synthetic oligonucleotide
gaauuggaguucacuccac

SEQ ID NO: 1599396 - RNA, 19 nt, Artificial Sequence
  Description of Artificial Sequence: Synthetic oligonucleotide
cuauugguucgaacuguga

SEQ ID NO: 1599397 - RNA, 19 nt, Artificial Sequence
  Description of Artificial Sequence: Synthetic oligonucleotide
caagguacacagacgauau

SEQ ID NO: 1599398 - RNA, 19 nt, Artificial Sequence
  Description of Artificial Sequence: Synthetic oligonucleotide
agcucgacaccaaggaccu

SEQ ID NO: 1599399 - RNA, 19 nt, Artificial Sequence
  Description of Artificial Sequence: Synthetic oligonucleotide
caccuggcaucaucuacug

SEQ ID NO: 1599400 - RNA, 19 nt, Artificial Sequence
  Description of Artificial Sequence: Synthetic oligonucleotide
augcggaucuucaaaccca

SEQ ID NO: 1599401 - RNA, 19 nt, Artificial Sequence
  Description of Artificial Sequence: Synthetic oligonucleotide
acuagucaggaaagcccuc

SEQ ID NO: 1599402 - RNA, 19 nt, Artificial Sequence
  Description of Artificial Sequence: Synthetic oligonucleotide
agaugugggguuccccaaa

SEQ ID NO: 1599403 - RNA, 19 nt, Artificial Sequence
  Description of Artificial Sequence: Synthetic oligonucleotide
caccgaggagcuucuuagc

SEQ ID NO: 1599404 - RNA, 19 nt, Artificial Sequence
  Description of Artificial Sequence: Synthetic oligonucleotide
gauccccucugaaacuuca

SEQ ID NO: 1599405 - RNA, 19 nt, Artificial Sequence
  Description of Artificial Sequence: Synthetic oligonucleotide
aauuucaccuugagcuguu

SEQ ID NO: 1599406 - RNA, 19 nt, Artificial Sequence
  Description of Artificial Sequence: Synthetic oligonucleotide
ggaauacuucauaguacug

SEQ ID NO: 1599407 - RNA, 19 nt, Artificial Sequence
  Description of Artificial Sequence: Synthetic oligonucleotide
cucuaccagcaugaaacuc

SEQ ID NO: 1599408 - RNA, 19 nt, Artificial Sequence
  Description of Artificial Sequence: Synthetic oligonucleotide
uuaaccccuggggaugaaa

SEQ ID NO: 1599409 - RNA, 19 nt, Artificial Sequence
  Description of Artificial Sequence: Synthetic oligonucleotide
ccugggaugcacacugagc

SEQ ID NO: 1599410 - RNA, 19 nt, Artificial Sequence
  Description of Artificial Sequence: Synthetic oligonucleotide
caaccuuagcagccugcug

SEQ ID NO: 1599411 - RNA, 19 nt, Artificial Sequence
  Description of Artificial Sequence: Synthetic oligonucleotide
gggguauaauaggauggag

SEQ ID NO: 1599412 - RNA, 19 nt, Artificial Sequence
  Description of Artificial Sequence: Synthetic oligonucleotide
caaugauaggagaggggua

SEQ ID NO: 1599413 - RNA, 19 nt, Artificial Sequence
  Description of Artificial Sequence: Synthetic oligonucleotide
acuccacuuagcuccccaa

SEQ ID NO: 1599414 - RNA, 19 nt, Artificial Sequence
  Description of Artificial Sequence: Synthetic oligonucleotide
acgggucauggugcuuucc

SEQ ID NO: 1599415 - RNA, 19 nt, Artificial Sequence
  Description of Artificial Sequence: Synthetic oligonucleotide
acgggccggauucaccaca

SEQ ID NO: 1599416 - RNA, 19 nt, Artificial Sequence
  Description of Artificial Sequence: Synthetic oligonucleotide
gaagacugucgaaggaaua

SEQ ID NO: 1599417 - RNA, 19 nt, Artificial Sequence
  Description of Artificial Sequence: Synthetic oligonucleotide
gcuauugguucgaacugug

SEQ ID NO: 1599418 - RNA, 19 nt, Artificial Sequence
  Description of Artificial Sequence: Synthetic oligonucleotide
ccaaguuccuagguaguag

SEQ ID NO: 1599419 - RNA, 19 nt, Artificial Sequence
  Description of Artificial Sequence: Synthetic oligonucleotide
ggugagaugcggaucuuca

SEQ ID NO: 1599420 - RNA, 19 nt, Artificial Sequence
  Description of Artificial Sequence: Synthetic oligonucleotide
caaucacaccuguuccaca

SEQ ID NO: 1599421 - RNA, 19 nt, Artificial Sequence
  Description of Artificial Sequence: Synthetic oligonucleotide
caguauuaaucuggaagaa

SEQ ID NO: 1599422 - RNA, 19 nt, Artificial Sequence
  Description of Artificial Sequence: Synthetic oligonucleotide
gagcucacgccagugucca

SEQ ID NO: 1599423 - RNA, 19 nt, Artificial Sequence
  Description of Artificial Sequence: Synthetic oligonucleotide
gaaguuccgcaugcuuuca

SEQ ID NO: 1599424 - RNA, 19 nt, Artificial Sequence
  Description of Artificial Sequence: Synthetic oligonucleotide
auggggugcggccacuguu

SEQ ID NO: 1599425 - RNA, 19 nt, Artificial Sequence
  Description of Artificial Sequence: Synthetic oligonucleotide
gugagaugcggaucuucaa

SEQ ID NO: 1599426 - RNA, 19 nt, Artificial Sequence
  Description of Artificial Sequence: Synthetic oligonucleotide
ucacaacaucagccagccu

SEQ ID NO: 1599427 - RNA, 19 nt, Artificial Sequence
  Description of Artificial Sequence: Synthetic oligonucleotide
uccuagcguuaucgaguga

SEQ ID NO: 1599428 - RNA, 19 nt, Artificial Sequence
  Description of Artificial Sequence: Synthetic oligonucleotide
cccgcaguuccgaauggcc

SEQ ID NO: 1599429 - RNA, 19 nt, Artificial Sequence
  Description of Artificial Sequence: Synthetic oligonucleotide
cguuaucgagugaagagga

SEQ ID NO: 1599430 - RNA, 19 nt, Artificial Sequence
  Description of Artificial Sequence: Synthetic oligonucleotide
caaggaccugggaugcaca

SEQ ID NO: 1599431 - RNA, 19 nt, Artificial Sequence
  Description of Artificial Sequence: Synthetic oligonucleotide
caauggucugauagagcaa

SEQ ID NO: 1599432 - RNA, 19 nt, Artificial Sequence
  Description of Artificial Sequence: Synthetic oligonucleotide
aggauccccucugaaacuu

SEQ ID NO: 1599433 - RNA, 19 nt, Artificial Sequence
  Description of Artificial Sequence: Synthetic oligonucleotide
ggccccgcaguuccgaaug

SEQ ID NO: 1599434 - RNA, 19 nt, Artificial Sequence
  Description of Artificial Sequence: Synthetic oligonucleotide
ccccaauggucugauagag

SEQ ID NO: 1599435 - RNA, 19 nt, Artificial Sequence
  Description of Artificial Sequence: Synthetic oligonucleotide
agcucacgccaguguccac

SEQ ID NO: 1599436 - RNA, 19 nt, Artificial Sequence
  Description of Artificial Sequence: Synthetic oligonucleotide
uccgaauggccugcaccac

SEQ ID NO: 1599437 - RNA, 19 nt, Artificial Sequence
  Description of Artificial Sequence: Synthetic oligonucleotide
cacagacgauauucccauc

SEQ ID NO: 1599438 - RNA, 19 nt, Artificial Sequence
  Description of Artificial Sequence: Synthetic oligonucleotide
aaggccaaucacaccuguu

SEQ ID NO: 1599439 - RNA, 19 nt, Artificial Sequence
  Description of Artificial Sequence: Synthetic oligonucleotide
ggacuuauucgguagccau

SEQ ID NO: 1599440 - RNA, 19 nt, Artificial Sequence
  Description of Artificial Sequence: Synthetic oligonucleotide
gcucacgccaguguccacc

SEQ ID NO: 1599441 - RNA, 19 nt, Artificial Sequence
  Description of Artificial Sequence: Synthetic oligonucleotide
ccuggaaauagagugaggu

SEQ ID NO: 1599442 - RNA, 19 nt, Artificial Sequence
  Description of Artificial Sequence: Synthetic oligonucleotide
ugguucgaacugugagcuc

SEQ ID NO: 1599443 - RNA, 19 nt, Artificial Sequence
  Description of Artificial Sequence: Synthetic oligonucleotide
gagagggguauaauaggau

SEQ ID NO: 1599444 - RNA, 19 nt, Artificial Sequence
  Description of Artificial Sequence: Synthetic oligonucleotide
guucgaacugugagcucac

SEQ ID NO: 1599445 - RNA, 19 nt, Artificial Sequence
  Description of Artificial Sequence: Synthetic oligonucleotide
acgugaugauagccaucgu

SEQ ID NO: 1599446 - RNA, 19 nt, Artificial Sequence
  Description of Artificial Sequence: Synthetic oligonucleotide
guaagacucuaguguuugu

SEQ ID NO: 1599447 - RNA, 19 nt, Artificial Sequence
  Description of Artificial Sequence: Synthetic oligonucleotide
gauggccccgcaguuccga

SEQ ID NO: 1599448 - RNA, 19 nt, Artificial Sequence
  Description of Artificial Sequence: Synthetic oligonucleotide
ccuagcguuaucgagugaa

SEQ ID NO: 1599449 - RNA, 19 nt, Artificial Sequence
  Description of Artificial Sequence: Synthetic oligonucleotide
cgaccuuaacagcuguggc

SEQ ID NO: 1599450 - RNA, 19 nt, Artificial Sequence
  Description of Artificial Sequence: Synthetic oligonucleotide
ugcugucuccuagcguuau

SEQ ID NO: 1599451 - RNA, 19 nt, Artificial Sequence
  Description of Artificial Sequence: Synthetic oligonucleotide
ggaguucacuccacuuagc

SEQ ID NO: 1599452 - RNA, 19 nt, Artificial Sequence
  Description of Artificial Sequence: Synthetic oligonucleotide
gccaucguguguccuuggc

SEQ ID NO: 1599453 - RNA, 19 nt, Artificial Sequence
  Description of Artificial Sequence: Synthetic oligonucleotide
gcaaccccucugaaugggg

SEQ ID NO: 1599454 - RNA, 19 nt, Artificial Sequence
  Description of Artificial Sequence: Synthetic oligonucleotide
cacuccacuuagcucccca

SEQ ID NO: 1599455 - RNA, 19 nt, Artificial Sequence
  Description of Artificial Sequence: Synthetic oligonucleotide
agcaaaugucaaggaggau

SEQ ID NO: 1599456 - RNA, 19 nt, Artificial Sequence
  Description of Artificial Sequence: Synthetic oligonucleotide
ucacuccacuuagcucccc

SEQ ID NO: 1599457 - RNA, 19 nt, Artificial Sequence
  Description of Artificial Sequence: Synthetic oligonucleotide
cacuuagcuccccaauggu

SEQ ID NO: 1599458 - RNA, 19 nt, Artificial Sequence
  Description of Artificial Sequence: Synthetic oligonucleotide
cgauauucccaucucucca

SEQ ID NO: 1599459 - RNA, 19 nt, Artificial Sequence
  Description of Artificial Sequence: Synthetic oligonucleotide
cacgggccggauucaccac

SEQ ID NO: 1599460 - RNA, 19 nt, Artificial Sequence
  Description of Artificial Sequence: Synthetic oligonucleotide
augauaggagagggguaua

SEQ ID NO: 1599461 - RNA, 19 nt, Artificial Sequence
  Description of Artificial Sequence: Synthetic oligonucleotide
acgccaguguccaccuuca

SEQ ID NO: 1599462 - RNA, 19 nt, Artificial Sequence
  Description of Artificial Sequence: Synthetic oligonucleotide
gaaauagagugaggucaau

SEQ ID NO: 1599463 - RNA, 19 nt, Artificial Sequence
  Description of Artificial Sequence: Synthetic oligonucleotide
caaccccucugaauggggu

SEQ ID NO: 1599464 - RNA, 19 nt, Artificial Sequence
  Description of Artificial Sequence: Synthetic oligonucleotide
ggguguggggaaacaaauc

SEQ ID NO: 1599465 - RNA, 19 nt, Artificial Sequence
  Description of Artificial Sequence: Synthetic oligonucleotide
cagcaguauuaaucuggaa

SEQ ID NO: 1599466 - RNA, 19 nt, Artificial Sequence
  Description of Artificial Sequence: Synthetic oligonucleotide
cuuauucgguagccaucaa

SEQ ID NO: 1599467 - RNA, 19 nt, Artificial Sequence
  Description of Artificial Sequence: Synthetic oligonucleotide
aggcauccggugagaugcg

SEQ ID NO: 1599468 - RNA, 19 nt, Artificial Sequence
  Description of Artificial Sequence: Synthetic oligonucleotide
cauccggugagaugcggau

SEQ ID NO: 1599469 - RNA, 19 nt, Artificial Sequence
  Description of Artificial Sequence: Synthetic oligonucleotide
gggauguuuucagauggcu

SEQ ID NO: 1599470 - RNA, 19 nt, Artificial Sequence
  Description of Artificial Sequence: Synthetic oligonucleotide
ugccauccgggccccgguu

SEQ ID NO: 1599471 - RNA, 19 nt, Artificial Sequence
  Description of Artificial Sequence: Synthetic oligonucleotide
ggccccgguucacagagaa

SEQ ID NO: 1599472 - RNA, 19 nt, Artificial Sequence
  Description of Artificial Sequence: Synthetic oligonucleotide
gccggauucaccacagcaa

SEQ ID NO: 1599473 - RNA, 19 nt, Artificial Sequence
  Description of Artificial Sequence: Synthetic oligonucleotide
caggauccccucugaaacu

SEQ ID NO: 1599474 - RNA, 19 nt, Artificial Sequence
  Description of Artificial Sequence: Synthetic oligonucleotide
auggccccgcaguuccgaa

SEQ ID NO: 1599475 - RNA, 19 nt, Artificial Sequence
  Description of Artificial Sequence: Synthetic oligonucleotide
cucacgccaguguccaccu

SEQ ID NO: 1599476 - RNA, 19 nt, Artificial Sequence
  Description of Artificial Sequence: Synthetic oligonucleotide
gccccgcaguuccgaaugg

SEQ ID NO: 1599477 - RNA, 19 nt, Artificial Sequence
  Description of Artificial Sequence: Synthetic oligonucleotide
ccaccuggcaucaucuacu

SEQ ID NO: 1599478 - RNA, 19 nt, Artificial Sequence
  Description of Artificial Sequence: Synthetic oligonucleotide
cuccacuuagcuccccaau

SEQ ID NO: 1599479 - RNA, 19 nt, Artificial Sequence
  Description of Artificial Sequence: Synthetic oligonucleotide
gagugcggauggccccgca

SEQ ID NO: 1599480 - RNA, 19 nt, Artificial Sequence
  Description of Artificial Sequence: Synthetic oligonucleotide
ucacgccaguguccaccuu

SEQ ID NO: 1599481 - RNA, 19 nt, Artificial Sequence
  Description of Artificial Sequence: Synthetic oligonucleotide
cagcacgggccggauucac

SEQ ID NO: 1599482 - RNA, 19 nt, Artificial Sequence
  Description of Artificial Sequence: Synthetic oligonucleotide
caacgggucauggugcuuu

SEQ ID NO: 1599483 - RNA, 19 nt, Artificial Sequence
  Description of Artificial Sequence: Synthetic oligonucleotide
gggguguggggaaacaaau

SEQ ID NO: 1599484 - RNA, 19 nt, Artificial Sequence
  Description of Artificial Sequence: Synthetic oligonucleotide
ggauugccauccgggcccc

SEQ ID NO: 1599485 - RNA, 19 nt, Artificial Sequence
  Description of Artificial Sequence: Synthetic oligonucleotide
cugcgaccuuaacagcugu

SEQ ID NO: 1599486 - RNA, 19 nt, Artificial Sequence
  Description of Artificial Sequence: Synthetic oligonucleotide
auccgggccccgguucaca

SEQ ID NO: 1599487 - RNA, 19 nt, Artificial Sequence
  Description of Artificial Sequence: Synthetic oligonucleotide
gcucacaguguggggugug

SEQ ID NO: 1599488 - RNA, 19 nt, Artificial Sequence
  Description of Artificial Sequence: Synthetic oligonucleotide
gccauccgggccccgguuc

SEQ ID NO: 1599489 - RNA, 19 nt, Artificial Sequence
  Description of Artificial Sequence: Synthetic oligonucleotide
ggauccccucugaaacuuc

SEQ ID NO: 1599490 - RNA, 19 nt, Artificial Sequence
  Description of Artificial Sequence: Synthetic oligonucleotide
guaguagcccacagucuuu

SEQ ID NO: 1599491 - RNA, 19 nt, Artificial Sequence
  Description of Artificial Sequence: Synthetic oligonucleotide
ggauggccccgcaguuccg

SEQ ID NO: 1599492 - RNA, 19 nt, Artificial Sequence
  Description of Artificial Sequence: Synthetic oligonucleotide
cauccgggccccgguucac

SEQ ID NO: 1599493 - RNA, 19 nt, Artificial Sequence
  Description of Artificial Sequence: Synthetic oligonucleotide
ccccucugaauggggugcg

SEQ ID NO: 1599494 - RNA, 19 nt, Artificial Sequence
  Description of Artificial Sequence: Synthetic oligonucleotide
ggaugcacacugagccaga

SEQ ID NO: 1599495 - RNA, 19 nt, Artificial Sequence
  Description of Artificial Sequence: Synthetic oligonucleotide
cgggccggauucaccacag

SEQ ID NO: 1599496 - RNA, 19 nt, Artificial Sequence
  Description of Artificial Sequence: Synthetic oligonucleotide
gggccggauucaccacagc

SEQ ID NO: 1599497 - RNA, 19 nt, Artificial Sequence
  Description of Artificial Sequence: Synthetic oligonucleotide
cagcuugucucaggacaaa

SEQ ID NO: 1599498 - RNA, 19 nt, Artificial Sequence
  Description of Artificial Sequence: Synthetic oligonucleotide
ggcugcaacgggucauggu

SEQ ID NO: 1599499 - RNA, 19 nt, Artificial Sequence
  Description of Artificial Sequence: Synthetic oligonucleotide
ccccgcaguuccgaauggc

SEQ ID NO: 1599500 - RNA, 19 nt, Artificial Sequence
  Description of Artificial Sequence: Synthetic oligonucleotide
cccucugaauggggugcgg

SEQ ID NO: 1599501 - RNA, 19 nt, Artificial Sequence
  Description of Artificial Sequence: Synthetic oligonucleotide
cuuaaccccuggggaugaa

SEQ ID NO: 1599502 - RNA, 19 nt, Artificial Sequence
  Description of Artificial Sequence: Synthetic oligonucleotide
caguuccgaauggccugca

SEQ ID NO: 1599503 - RNA, 19 nt, Artificial Sequence
  Description of Artificial Sequence: Synthetic oligonucleotide
ccuuaacagcuguggcaaa

SEQ ID NO: 1599504 - RNA, 19 nt, Artificial Sequence
  Description of Artificial Sequence: Synthetic oligonucleotide
cggccacuguuccacugac

SEQ ID NO: 1599505 - RNA, 19 nt, Artificial Sequence
  Description of Artificial Sequence: Synthetic oligonucleotide
ccauccgggccccgguuca

SEQ ID NO: 1599506 - RNA, 19 nt, Artificial Sequence
  Description of Artificial Sequence: Synthetic oligonucleotide
acgguucaccgaggagcuu

SEQ ID NO: 1599507 - RNA, 19 nt, Artificial Sequence
  Description of Artificial Sequence: Synthetic oligonucleotide
cggugagaugcggaucuuc

SEQ ID NO: 1599508 - RNA, 19 nt, Artificial Sequence
  Description of Artificial Sequence: Synthetic oligonucleotide
ccuggggaugaaacgugau

SEQ ID NO: 1599509 - RNA, 19 nt, Artificial Sequence
  Description of Artificial Sequence: Synthetic oligonucleotide
cgggucauggugcuuuccu

SEQ ID NO: 1599510 - RNA, 19 nt, Artificial Sequence
  Description of Artificial Sequence: Synthetic oligonucleotide
gcucgacaccaaggaccug

SEQ ID NO: 1599511 - RNA, 19 nt, Artificial Sequence
  Description of Artificial Sequence: Synthetic oligonucleotide
ccuuggcuauugguucgaa

SEQ ID NO: 1599512 - RNA, 19 nt, Artificial Sequence
  Description of Artificial Sequence: Synthetic oligonucleotide
ccggugagaugcggaucuu

SEQ ID NO: 1599513 - RNA, 19 nt, Artificial Sequence
  Description of Artificial Sequence: Synthetic oligonucleotide
aacauuuggagauagucug

SEQ ID NO: 1599514 - RNA, 19 nt, Artificial Sequence
  Description of Artificial Sequence: Synthetic oligonucleotide
agagugaugguuuccaucg

SEQ ID NO: 1599515 - RNA, 19 nt, Artificial Sequence
  Description of Artificial Sequence: Synthetic oligonucleotide
ucgacugccagccaguugg

SEQ ID NO: 1599516 - RNA, 19 nt, Artificial Sequence
  Description of Artificial Sequence: Synthetic oligonucleotide
gauggcagagcucagggcg

SEQ ID NO: 1599517 - RNA, 19 nt, Artificial Sequence
  Description of Artificial Sequence: Synthetic oligonucleotide
gaagcuguccuccucaacg

SEQ ID NO: 1599518 - RNA, 19 nt, Artificial Sequence
  Description of Artificial Sequence: Synthetic oligonucleotide
ucuuggaugaggucuaacg

SEQ ID NO: 1599519 - RNA, 19 nt, Artificial Sequence
  Description of Artificial Sequence: Synthetic oligonucleotide
guagaggucaacuucuucg

SEQ ID NO: 1599520 - RNA, 19 nt, Artificial Sequence
  Description of Artificial Sequence: Synthetic oligonucleotide
aaagcuuuauccuugucaa

SEQ ID NO: 1599521 - RNA, 19 nt, Artificial Sequence
  Description of Artificial Sequence: Synthetic oligonucleotide
uuuggagauagucugugcc

SEQ ID NO: 1599522 - RNA, 19 nt, Artificial Sequence
  Description of Artificial Sequence: Synthetic oligonucleotide
agucacucaggucaaacac

SEQ ID NO: 1599523 - RNA, 19 nt, Artificial Sequence
  Description of Artificial Sequence: Synthetic oligonucleotide
uuuccuugcuaccaggucc

SEQ ID NO: 1599524 - RNA, 19 nt, Artificial Sequence
  Description of Artificial Sequence: Synthetic oligonucleotide
ucugucucgaguagggugg

SEQ ID NO: 1599525 - RNA, 19 nt, Artificial Sequence
  Description of Artificial Sequence: Synthetic oligonucleotide
aaguucucugcacaagagg

SEQ ID NO: 1599526 - RNA, 19 nt, Artificial Sequence
  Description of Artificial Sequence: Synthetic oligonucleotide
aaauuccagaccugucccc

SEQ ID NO: 1599527 - RNA, 19 nt, Artificial Sequence
  Description of Artificial Sequence: Synthetic oligonucleotide
cuuucagcaccacauagcg

SEQ ID NO: 1599528 - RNA, 19 nt, Artificial Sequence
  Description of Artificial Sequence: Synthetic oligonucleotide
caaaucucccugaaaaucc

SEQ ID NO: 1599529 - RNA, 19 nt, Artificial Sequence
  Description of Artificial Sequence: Synthetic oligonucleotide
caggauacgguucuuagcc

SEQ ID NO: 1599530 - RNA, 19 nt, Artificial Sequence
  Description of Artificial Sequence: Synthetic oligonucleotide
ucagcaucccaucugaggu

SEQ ID NO: 1599531 - RNA, 19 nt, Artificial Sequence
  Description of Artificial Sequence: Synthetic oligonucleotide
acacuuuucauagucacuc

SEQ ID NO: 1599532 - RNA, 19 nt, Artificial Sequence
  Description of Artificial Sequence: Synthetic oligonucleotide
gaugguuuccaucgggagg

SEQ ID NO: 1599533 - RNA, 19 nt, Artificial Sequence
  Description of Artificial Sequence: Synthetic oligonucleotide
agaggucgaggccacagcc

SEQ ID NO: 1599534 - RNA, 19 nt, Artificial Sequence
  Description of Artificial Sequence: Synthetic oligonucleotide
uuuauccuugucaacauuu

SEQ ID NO: 1599535 - RNA, 19 nt, Artificial Sequence
  Description of Artificial Sequence: Synthetic oligonucleotide
acugccagccaguugggcc

SEQ ID NO: 1599536 - RNA, 19 nt, Artificial Sequence
  Description of Artificial Sequence: Synthetic oligonucleotide
aguuggacgaagccucucc

SEQ ID NO: 1599537 - RNA, 19 nt, Artificial Sequence
  Description of Artificial Sequence: Synthetic oligonucleotide
uucacaguaggcucuuccg

SEQ ID NO: 1599538 - RNA, 19 nt, Artificial Sequence
  Description of Artificial Sequence: Synthetic oligonucleotide
cacagacuuguccagaucc

SEQ ID NO: 1599539 - RNA, 19 nt, Artificial Sequence
  Description of Artificial Sequence: Synthetic oligonucleotide
ugcucuuagauuuccggag

SEQ ID NO: 1599540 - RNA, 19 nt, Artificial Sequence
  Description of Artificial Sequence: Synthetic oligonucleotide
ugagguguccccgaguugg

SEQ ID NO: 1599541 - RNA, 19 nt, Artificial Sequence
  Description of Artificial Sequence: Synthetic oligonucleotide
cuugcagucucccaguccc

SEQ ID NO: 1599542 - RNA, 19 nt, Artificial Sequence
  Description of Artificial Sequence: Synthetic oligonucleotide
aggucaacuucuucggggc

SEQ ID NO: 1599543 - RNA, 19 nt, Artificial Sequence
  Description of Artificial Sequence: Synthetic oligonucleotide
gaggucaacuucuucgggg

SEQ ID NO: 1599544 - RNA, 19 nt, Artificial Sequence
  Description of Artificial Sequence: Synthetic oligonucleotide
agccaguugggccacagac

SEQ ID NO: 1599545 - RNA, 19 nt, Artificial Sequence
  Description of Artificial Sequence: Synthetic oligonucleotide
aauuuccggacccagccga

SEQ ID NO: 1599546 - RNA, 19 nt, Artificial Sequence
  Description of Artificial Sequence: Synthetic oligonucleotide
ucuaacgucagcaucccau

SEQ ID NO: 1599547 - RNA, 19 nt, Artificial Sequence
  Description of Artificial Sequence: Synthetic oligonucleotide
uucgcuugcagucucccag

SEQ ID NO: 1599548 - RNA, 19 nt, Artificial Sequence
  Description of Artificial Sequence: Synthetic oligonucleotide
ucacaguaggcucuuccgg

SEQ ID NO: 1599549 - RNA, 19 nt, Artificial Sequence
  Description of Artificial Sequence: Synthetic oligonucleotide
ucaacauuuggagauaguc

SEQ ID NO: 1599550 - RNA, 19 nt, Artificial Sequence
  Description of Artificial Sequence: Synthetic oligonucleotide
uggaugaggucuaacguca

SEQ ID NO: 1599551 - RNA, 19 nt, Artificial Sequence
  Description of Artificial Sequence: Synthetic oligonucleotide
aggucuaacgucagcaucc

SEQ ID NO: 1599552 - RNA, 19 nt, Artificial Sequence
  Description of Artificial Sequence: Synthetic oligonucleotide
uuuuaccuccuucucggag

SEQ ID NO: 1599553 - RNA, 19 nt, Artificial Sequence
  Description of Artificial Sequence: Synthetic oligonucleotide
aagcuguccuccucaacgg

SEQ ID NO: 1599554 - RNA, 19 nt, Artificial Sequence
  Description of Artificial Sequence: Synthetic oligonucleotide
uuuaccuccuucucggaga

SEQ ID NO: 1599555 - RNA, 19 nt, Artificial Sequence
  Description of Artificial Sequence: Synthetic oligonucleotide
guacaggucucucaguucc

SEQ ID NO: 1599556 - RNA, 19 nt, Artificial Sequence
  Description of Artificial Sequence: Synthetic oligonucleotide
uuucccgcagaauuuccgg

SEQ ID NO: 1599557 - RNA, 19 nt, Artificial Sequence
  Description of Artificial Sequence: Synthetic oligonucleotide
cucagaaucggguggagac

SEQ ID NO: 1599558 - RNA, 19 nt, Artificial Sequence
  Description of Artificial Sequence: Synthetic oligonucleotide
acucaggucaaacaccucu

SEQ ID NO: 1599559 - RNA, 19 nt, Artificial Sequence
  Description of Artificial Sequence: Synthetic oligonucleotide
ucacacuuuucauagucac

SEQ ID NO: 1599560 - RNA, 19 nt, Artificial Sequence
  Description of Artificial Sequence: Synthetic oligonucleotide
uccagauccacccgaaagu

SEQ ID NO: 1599561 - RNA, 19 nt, Artificial Sequence
  Description of Artificial Sequence: Synthetic oligonucleotide
cuugcaucgggccagggug

SEQ ID NO: 1599562 - RNA, 19 nt, Artificial Sequence
  Description of Artificial Sequence: Synthetic oligonucleotide
ugggaggucugucugaagu

SEQ ID NO: 1599563 - RNA, 19 nt, Artificial Sequence
  Description of Artificial Sequence: Synthetic oligonucleotide
ugaaaaucccuuucccgca

SEQ ID NO: 1599564 - RNA, 19 nt, Artificial Sequence
  Description of Artificial Sequence: Synthetic oligonucleotide
cucaacggugaccucaucc

SEQ ID NO: 1599565 - RNA, 19 nt, Artificial Sequence
  Description of Artificial Sequence: Synthetic oligonucleotide
uauugacugugcugggagg

SEQ ID NO: 1599566 - RNA, 19 nt, Artificial Sequence
  Description of Artificial Sequence: Synthetic oligonucleotide
ggauuccucagcuuggagg

SEQ ID NO: 1599567 - RNA, 19 nt, Artificial Sequence
  Description of Artificial Sequence: Synthetic oligonucleotide
cucaccgccaggaagauca

SEQ ID NO: 1599568 - RNA, 19 nt, Artificial Sequence
  Description of Artificial Sequence: Synthetic oligonucleotide
ucuucgucgacugccagcc

SEQ ID NO: 1599569 - RNA, 19 nt, Artificial Sequence
  Description of Artificial Sequence: Synthetic oligonucleotide
aggauacgguucuuagccc

SEQ ID NO: 1599570 - RNA, 19 nt, Artificial Sequence
  Description of Artificial Sequence: Synthetic oligonucleotide
uuggaugaggucuaacguc

SEQ ID NO: 1599571 - RNA, 19 nt, Artificial Sequence
  Description of Artificial Sequence: Synthetic oligonucleotide
ggagacguagagcuggucg

SEQ ID NO: 1599572 - RNA, 19 nt, Artificial Sequence
  Description of Artificial Sequence: Synthetic oligonucleotide
uggacgaagccucucccag

SEQ ID NO: 1599573 - RNA, 19 nt, Artificial Sequence
  Description of Artificial Sequence: Synthetic oligonucleotide
uucgucgacugccagccag

SEQ ID NO: 1599574 - RNA, 19 nt, Artificial Sequence
  Description of Artificial Sequence: Synthetic oligonucleotide
gagacguagagcuggucgc

SEQ ID NO: 1599575 - RNA, 19 nt, Artificial Sequence
  Description of Artificial Sequence: Synthetic oligonucleotide
uuuccggaguucuucacac

SEQ ID NO: 1599576 - RNA, 19 nt, Artificial Sequence
  Description of Artificial Sequence: Synthetic oligonucleotide
ucccugaaaaucccuuucc

SEQ ID NO: 1599577 - RNA, 19 nt, Artificial Sequence
  Description of Artificial Sequence: Synthetic oligonucleotide
uccggucagagucagcucu

SEQ ID NO: 1599578 - RNA, 19 nt, Artificial Sequence
  Description of Artificial Sequence: Synthetic oligonucleotide
ugggccacagacuugucca

SEQ ID NO: 1599579 - RNA, 19 nt, Artificial Sequence
  Description of Artificial Sequence: Synthetic oligonucleotide
auagucacucaggucaaac

SEQ ID NO: 1599580 - RNA, 19 nt, Artificial Sequence
  Description of Artificial Sequence: Synthetic oligonucleotide
uuuugcucugucucgagua

SEQ ID NO: 1599581 - RNA, 19 nt, Artificial Sequence
  Description of Artificial Sequence: Synthetic oligonucleotide
gaauuuccggacccagccg

SEQ ID NO: 1599582 - RNA, 19 nt, Artificial Sequence
  Description of Artificial Sequence: Synthetic oligonucleotide
gagccgcucuucuucaugg

SEQ ID NO: 1599583 - RNA, 19 nt, Artificial Sequence
  Description of Artificial Sequence: Synthetic oligonucleotide
ucucaguucccugacuucc

SEQ ID NO: 1599584 - RNA, 19 nt, Artificial Sequence
  Description of Artificial Sequence: Synthetic oligonucleotide
gaccucauccaggauacgg

SEQ ID NO: 1599585 - RNA, 19 nt, Artificial Sequence
  Description of Artificial Sequence: Synthetic oligonucleotide
cuuucccgcagaauuuccg

SEQ ID NO: 1599586 - RNA, 19 nt, Artificial Sequence
  Description of Artificial Sequence: Synthetic oligonucleotide
gacccagccgaccuucucg

SEQ ID NO: 1599587 - RNA, 19 nt, Artificial Sequence
  Description of Artificial Sequence: Synthetic oligonucleotide
cuucacaguaggcucuucc

SEQ ID NO: 1599588 - RNA, 19 nt, Artificial Sequence
  Description of Artificial Sequence: Synthetic oligonucleotide
guccagauccacccgaaag

SEQ ID NO: 1599589 - RNA, 19 nt, Artificial Sequence
  Description of Artificial Sequence: Synthetic oligonucleotide
agaggucaacuucuucggg

SEQ ID NO: 1599590 - RNA, 19 nt, Artificial Sequence
  Description of Artificial Sequence: Synthetic oligonucleotide
uccgguauugacugugcug

SEQ ID NO: 1599591 - RNA, 19 nt, Artificial Sequence
  Description of Artificial Sequence: Synthetic oligonucleotide
ugcucugacucagaaucgg

SEQ ID NO: 1599592 - RNA, 19 nt, Artificial Sequence
  Description of Artificial Sequence: Synthetic oligonucleotide
agguccaucugucuguaca

SEQ ID NO: 1599593 - RNA, 19 nt, Artificial Sequence
  Description of Artificial Sequence: Synthetic oligonucleotide
caggucaaacaccucuugg

SEQ ID NO: 1599594 - RNA, 19 nt, Artificial Sequence
  Description of Artificial Sequence: Synthetic oligonucleotide
ucgccuuucagcaccacau

SEQ ID NO: 1599595 - RNA, 19 nt, Artificial Sequence
  Description of Artificial Sequence: Synthetic oligonucleotide
gauuccucagcuuggaggu

SEQ ID NO: 1599596 - RNA, 19 nt, Artificial Sequence
  Description of Artificial Sequence: Synthetic oligonucleotide
aggacucaccgccaggaag

SEQ ID NO: 1599597 - RNA, 19 nt, Artificial Sequence
  Description of Artificial Sequence: Synthetic oligonucleotide
ucucucaguucccugacuu

SEQ ID NO: 1599598 - RNA, 19 nt, Artificial Sequence
  Description of Artificial Sequence: Synthetic oligonucleotide
cucugucucgaguagggug

SEQ ID NO: 1599599 - RNA, 19 nt, Artificial Sequence
  Description of Artificial Sequence: Synthetic oligonucleotide
cuggggauuccucagcuug

SEQ ID NO: 1599600 - RNA, 19 nt, Artificial Sequence
  Description of Artificial Sequence: Synthetic oligonucleotide
ggcagugucccucugagac

SEQ ID NO: 1599601 - RNA, 19 nt, Artificial Sequence
  Description of Artificial Sequence: Synthetic oligonucleotide
uuucauagucacucagguc

SEQ ID NO: 1599602 - RNA, 19 nt, Artificial Sequence
  Description of Artificial Sequence: Synthetic oligonucleotide
cucggagacguagagcugg

SEQ ID NO: 1599603 - RNA, 19 nt, Artificial Sequence
  Description of Artificial Sequence: Synthetic oligonucleotide
ucuuccgguauugacugug

SEQ ID NO: 1599604 - RNA, 19 nt, Artificial Sequence
  Description of Artificial Sequence: Synthetic oligonucleotide
augaggucuaacgucagca

SEQ ID NO: 1599605 - RNA, 19 nt, Artificial Sequence
  Description of Artificial Sequence: Synthetic oligonucleotide
gaugaggucuaacgucagc

SEQ ID NO: 1599606 - RNA, 19 nt, Artificial Sequence
  Description of Artificial Sequence: Synthetic oligonucleotide
aaucggguggagacugugg

SEQ ID NO: 1599607 - RNA, 19 nt, Artificial Sequence
  Description of Artificial Sequence: Synthetic oligonucleotide
uuccuugcuaccagguccu

SEQ ID NO: 1599608 - RNA, 19 nt, Artificial Sequence
  Description of Artificial Sequence: Synthetic oligonucleotide
aggcucuuccgguauugac

SEQ ID NO: 1599609 - RNA, 19 nt, Artificial Sequence
  Description of Artificial Sequence: Synthetic oligonucleotide
uggccuuucgcuugcaguc

SEQ ID NO: 1599610 - RNA, 19 nt, Artificial Sequence
  Description of Artificial Sequence: Synthetic oligonucleotide
uuuccaaaucucccugaaa

SEQ ID NO: 1599611 - RNA, 19 nt, Artificial Sequence
  Description of Artificial Sequence: Synthetic oligonucleotide
agauuuccggaguucuuca

SEQ ID NO: 1599612 - RNA, 19 nt, Artificial Sequence
  Description of Artificial Sequence: Synthetic oligonucleotide
uagauuuccggaguucuuc

SEQ ID NO: 1599613 - RNA, 19 nt, Artificial Sequence
  Description of Artificial Sequence: Synthetic oligonucleotide
cuggauccgggacagcugc

SEQ ID NO: 1599614 - RNA, 19 nt, Artificial Sequence
  Description of Artificial Sequence: Synthetic oligonucleotide
acccgaaaguucucugcac

SEQ ID NO: 1599615 - RNA, 19 nt, Artificial Sequence
  Description of Artificial Sequence: Synthetic oligonucleotide
ucgaguagggugggcaagg

SEQ ID NO: 1599616 - RNA, 19 nt, Artificial Sequence
  Description of Artificial Sequence: Synthetic oligonucleotide
cuggucgccuuucagcacc

SEQ ID NO: 1599617 - RNA, 19 nt, Artificial Sequence
  Description of Artificial Sequence: Synthetic oligonucleotide
gaggucuaacgucagcauc

SEQ ID NO: 1599618 - RNA, 19 nt, Artificial Sequence
  Description of Artificial Sequence: Synthetic oligonucleotide
cugcacaagaggcugguuc

SEQ ID NO: 1599619 - RNA, 19 nt, Artificial Sequence
  Description of Artificial Sequence: Synthetic oligonucleotide
uccggaguucuucacacuu

SEQ ID NO: 1599620 - RNA, 19 nt, Artificial Sequence
  Description of Artificial Sequence: Synthetic oligonucleotide
cuaacgucagcaucccauc

SEQ ID NO: 1599621 - RNA, 19 nt, Artificial Sequence
  Description of Artificial Sequence: Synthetic oligonucleotide
gacuccuuuucuucaggac

SEQ ID NO: 1599622 - RNA, 19 nt, Artificial Sequence
  Description of Artificial Sequence: Synthetic oligonucleotide
uaacgucagcaucccaucu

SEQ ID NO: 1599623 - RNA, 19 nt, Artificial Sequence
  Description of Artificial Sequence: Synthetic oligonucleotide
gagugaugguuuccaucgg

SEQ ID NO: 1599624 - RNA, 19 nt, Artificial Sequence
  Description of Artificial Sequence: Synthetic oligonucleotide
ucuucaggacucaccgcca

SEQ ID NO: 1599625 - RNA, 19 nt, Artificial Sequence
  Description of Artificial Sequence: Synthetic oligonucleotide
ucaggacucaccgccagga

SEQ ID NO: 1599626 - RNA, 19 nt, Artificial Sequence
  Description of Artificial Sequence: Synthetic oligonucleotide
uugcugugguucuucuugc

SEQ ID NO: 1599627 - RNA, 19 nt, Artificial Sequence
  Description of Artificial Sequence: Synthetic oligonucleotide
uguacaggucucucaguuc

SEQ ID NO: 1599628 - RNA, 19 nt, Artificial Sequence
  Description of Artificial Sequence: Synthetic oligonucleotide
aguugggccacagacuugu

SEQ ID NO: 1599629 - RNA, 19 nt, Artificial Sequence
  Description of Artificial Sequence: Synthetic oligonucleotide
cagagugaugguuuccauc

SEQ ID NO: 1599630 - RNA, 19 nt, Artificial Sequence
  Description of Artificial Sequence: Synthetic oligonucleotide
gaagccucucccaguagcc

SEQ ID NO: 1599631 - RNA, 19 nt, Artificial Sequence
  Description of Artificial Sequence: Synthetic oligonucleotide
uagaggucgaggccacagc

SEQ ID NO: 1599632 - RNA, 19 nt, Artificial Sequence
  Description of Artificial Sequence: Synthetic oligonucleotide
gauuuccggaguucuucac

SEQ ID NO: 1599633 - RNA, 19 nt, Artificial Sequence
  Description of Artificial Sequence: Synthetic oligonucleotide
agcaucccaucugagguag

SEQ ID NO: 1599634 - RNA, 19 nt, Artificial Sequence
  Description of Artificial Sequence: Synthetic oligonucleotide
ccgguauugacugugcugg

SEQ ID NO: 1599635 - RNA, 19 nt, Artificial Sequence
  Description of Artificial Sequence: Synthetic oligonucleotide
ugaggucuaacgucagcau

SEQ ID NO: 1599636 - RNA, 19 nt, Artificial Sequence
  Description of Artificial Sequence: Synthetic oligonucleotide
uuagauuuccggaguucuu

SEQ ID NO: 1599637 - RNA, 19 nt, Artificial Sequence
  Description of Artificial Sequence: Synthetic oligonucleotide
cuuccgguauugacugugc

SEQ ID NO: 1599638 - RNA, 19 nt, Artificial Sequence
  Description of Artificial Sequence: Synthetic oligonucleotide
gucccucugagacaggauc

SEQ ID NO: 1599639 - RNA, 19 nt, Artificial Sequence
  Description of Artificial Sequence: Synthetic oligonucleotide
ucuuagauuuccggaguuc

SEQ ID NO: 1599640 - RNA, 19 nt, Artificial Sequence
  Description of Artificial Sequence: Synthetic oligonucleotide
uugcucugucucgaguagg

SEQ ID NO: 1599641 - RNA, 19 nt, Artificial Sequence
  Description of Artificial Sequence: Synthetic oligonucleotide
gaggccacagccaugaggu

SEQ ID NO: 1599642 - RNA, 19 nt, Artificial Sequence
  Description of Artificial Sequence: Synthetic oligonucleotide
cagccgaccuucucgggcg

SEQ ID NO: 1599643 - RNA, 19 nt, Artificial Sequence
  Description of Artificial Sequence: Synthetic oligonucleotide
caucuuuuaccuccuucuc

SEQ ID NO: 1599644 - RNA, 19 nt, Artificial Sequence
  Description of Artificial Sequence: Synthetic oligonucleotide
ucaacuucuucggggcuug

SEQ ID NO: 1599645 - RNA, 19 nt, Artificial Sequence
  Description of Artificial Sequence: Synthetic oligonucleotide
uucccgcagaauuuccgga

SEQ ID NO: 1599646 - RNA, 19 nt, Artificial Sequence
  Description of Artificial Sequence: Synthetic oligonucleotide
cucuucgucgacugccagc

SEQ ID NO: 1599647 - RNA, 19 nt, Artificial Sequence
  Description of Artificial Sequence: Synthetic oligonucleotide
ugacucagaaucgggugga

SEQ ID NO: 1599648 - RNA, 19 nt, Artificial Sequence
  Description of Artificial Sequence: Synthetic oligonucleotide
ucccgcagaauuuccggac

SEQ ID NO: 1599649 - RNA, 19 nt, Artificial Sequence
  Description of Artificial Sequence: Synthetic oligonucleotide
guuuccaucgggaggcccc

SEQ ID NO: 1599650 - RNA, 19 nt, Artificial Sequence
  Description of Artificial Sequence: Synthetic oligonucleotide
ucucccagucccugaaccu

SEQ ID NO: 1599651 - RNA, 19 nt, Artificial Sequence
  Description of Artificial Sequence: Synthetic oligonucleotide
uccacccgaaaguucucug

SEQ ID NO: 1599652 - RNA, 19 nt, Artificial Sequence
  Description of Artificial Sequence: Synthetic oligonucleotide
guagaggucgaggccacag

SEQ ID NO: 1599653 - RNA, 19 nt, Artificial Sequence
  Description of Artificial Sequence: Synthetic oligonucleotide
uuccgguauugacugugcu

SEQ ID NO: 1599654 - RNA, 19 nt, Artificial Sequence
  Description of Artificial Sequence: Synthetic oligonucleotide
caagaggcugguuccucag

SEQ ID NO: 1599655 - RNA, 19 nt, Artificial Sequence
  Description of Artificial Sequence: Synthetic oligonucleotide
cagaaucggguggagacug

SEQ ID NO: 1599656 - RNA, 19 nt, Artificial Sequence
  Description of Artificial Sequence: Synthetic oligonucleotide
gguguccccgaguuggagg

SEQ ID NO: 1599657 - RNA, 19 nt, Artificial Sequence
  Description of Artificial Sequence: Synthetic oligonucleotide
ucccaaggccgagaaaggc

SEQ ID NO: 1599658 - RNA, 19 nt, Artificial Sequence
  Description of Artificial Sequence: Synthetic oligonucleotide
cagcuccugagucuucucc

SEQ ID NO: 1599659 - RNA, 19 nt, Artificial Sequence
  Description of Artificial Sequence: Synthetic oligonucleotide
gauacgguucuuagcccug

SEQ ID NO: 1599660 - RNA, 19 nt, Artificial Sequence
  Description of Artificial Sequence: Synthetic oligonucleotide
gauccggucagagucagcu

SEQ ID NO: 1599661 - RNA, 19 nt, Artificial Sequence
  Description of Artificial Sequence: Synthetic oligonucleotide
aaucucccugaaaaucccu

SEQ ID NO: 1599662 - RNA, 19 nt, Artificial Sequence
  Description of Artificial Sequence: Synthetic oligonucleotide
uuccggacccagccgaccu

SEQ ID NO: 1599663 - RNA, 19 nt, Artificial Sequence
  Description of Artificial Sequence: Synthetic oligonucleotide
uugcaucgggccaggguga

SEQ ID NO: 1599664 - RNA, 19 nt, Artificial Sequence
  Description of Artificial Sequence: Synthetic oligonucleotide
cuucaggacucaccgccag

SEQ ID NO: 1599665 - RNA, 19 nt, Artificial Sequence
  Description of Artificial Sequence: Synthetic oligonucleotide
ggccgagaaaggcugcugg

SEQ ID NO: 1599666 - RNA, 19 nt, Artificial Sequence
  Description of Artificial Sequence: Synthetic oligonucleotide
cugcucuuagauuuccgga

SEQ ID NO: 1599667 - RNA, 19 nt, Artificial Sequence
  Description of Artificial Sequence: Synthetic oligonucleotide
uuucgcuugcagucuccca

SEQ ID NO: 1599668 - RNA, 19 nt, Artificial Sequence
  Description of Artificial Sequence: Synthetic oligonucleotide
acgguucuuagcccuggug

SEQ ID NO: 1599669 - RNA, 19 nt, Artificial Sequence
  Description of Artificial Sequence: Synthetic oligonucleotide
ucucggagacguagagcug

SEQ ID NO: 1599670 - RNA, 19 nt, Artificial Sequence
  Description of Artificial Sequence: Synthetic oligonucleotide
guuuccuugcuaccagguc

SEQ ID NO: 1599671 - RNA, 19 nt, Artificial Sequence
  Description of Artificial Sequence: Synthetic oligonucleotide
ucucccugaaaaucccuuu

SEQ ID NO: 1599672 - RNA, 19 nt, Artificial Sequence
  Description of Artificial Sequence: Synthetic oligonucleotide
ucucgaguagggugggcaa

SEQ ID NO: 1599673 - RNA, 19 nt, Artificial Sequence
  Description of Artificial Sequence: Synthetic oligonucleotide
auacgguucuuagcccugg

SEQ ID NO: 1599674 - RNA, 19 nt, Artificial Sequence
  Description of Artificial Sequence: Synthetic oligonucleotide
gaaucggguggagacugug

SEQ ID NO: 1599675 - RNA, 19 nt, Artificial Sequence
  Description of Artificial Sequence: Synthetic oligonucleotide
uuguccagauccacccgaa

SEQ ID NO: 1599676 - RNA, 19 nt, Artificial Sequence
  Description of Artificial Sequence: Synthetic oligonucleotide
uugccugacuccaguugga

SEQ ID NO: 1599677 - RNA, 19 nt, Artificial Sequence
  Description of Artificial Sequence: Synthetic oligonucleotide
caguucccugacuuccugc

SEQ ID NO: 1599678 - RNA, 19 nt, Artificial Sequence
  Description of Artificial Sequence: Synthetic oligonucleotide
ggugaccucauccaggaua

SEQ ID NO: 1599679 - RNA, 19 nt, Artificial Sequence
  Description of Artificial Sequence: Synthetic oligonucleotide
uccgggacagcugcaccgg

SEQ ID NO: 1599680 - RNA, 19 nt, Artificial Sequence
  Description of Artificial Sequence: Synthetic oligonucleotide
cuuucgcuugcagucuccc

SEQ ID NO: 1599681 - RNA, 19 nt, Artificial Sequence
  Description of Artificial Sequence: Synthetic oligonucleotide
gaagggucuuccucuugga

SEQ ID NO: 1599682 - RNA, 19 nt, Artificial Sequence
  Description of Artificial Sequence: Synthetic oligonucleotide
aggucgaggccacagccau

SEQ ID NO: 1599683 - RNA, 19 nt, Artificial Sequence
  Description of Artificial Sequence: Synthetic oligonucleotide
auccggucagagucagcuc

SEQ ID NO: 1599684 - RNA, 19 nt, Artificial Sequence
  Description of Artificial Sequence: Synthetic oligonucleotide
uccucaacggugaccucau

SEQ ID NO: 1599685 - RNA, 19 nt, Artificial Sequence
  Description of Artificial Sequence: Synthetic oligonucleotide
agggcggcgggaguguugg

SEQ ID NO: 1599686 - RNA, 19 nt, Artificial Sequence
  Description of Artificial Sequence: Synthetic oligonucleotide
uggauccggucagagucag

SEQ ID NO: 1599687 - RNA, 19 nt, Artificial Sequence
  Description of Artificial Sequence: Synthetic oligonucleotide
aguuggagggcggcgggag

SEQ ID NO: 1599688 - RNA, 19 nt, Artificial Sequence
  Description of Artificial Sequence: Synthetic oligonucleotide
uuggagggcggcgggagug

SEQ ID NO: 1599689 - RNA, 19 nt, Artificial Sequence
  Description of Artificial Sequence: Synthetic oligonucleotide
cuuagauuuccggaguucu

SEQ ID NO: 1599690 - RNA, 19 nt, Artificial Sequence
  Description of Artificial Sequence: Synthetic oligonucleotide
cagauccacccgaaaguuc

SEQ ID NO: 1599691 - RNA, 19 nt, Artificial Sequence
  Description of Artificial Sequence: Synthetic oligonucleotide
ucgucgacugccagccagu

SEQ ID NO: 1599692 - RNA, 19 nt, Artificial Sequence
  Description of Artificial Sequence: Synthetic oligonucleotide
uggggcagugucccucuga

SEQ ID NO: 1599693 - RNA, 19 nt, Artificial Sequence
  Description of Artificial Sequence: Synthetic oligonucleotide
aaggccgagaaaggcugcu

SEQ ID NO: 1599694 - RNA, 19 nt, Artificial Sequence
  Description of Artificial Sequence: Synthetic oligonucleotide
caaggccgagaaaggcugc

SEQ ID NO: 1599695 - RNA, 19 nt, Artificial Sequence
  Description of Artificial Sequence: Synthetic oligonucleotide
ccaaggccgagaaaggcug

SEQ ID NO: 1599696 - RNA, 19 nt, Artificial Sequence
  Description of Artificial Sequence: Synthetic oligonucleotide
ccgcucuucuucauggccg

SEQ ID NO: 1599697 - RNA, 19 nt, Artificial Sequence
  Description of Artificial Sequence: Synthetic oligonucleotide
guucuuagcccuggugaug

SEQ ID NO: 1599698 - RNA, 19 nt, Artificial Sequence
  Description of Artificial Sequence: Synthetic oligonucleotide
acaguaggcucuuccggua

SEQ ID NO: 1599699 - RNA, 19 nt, Artificial Sequence
  Description of Artificial Sequence: Synthetic oligonucleotide
aaucccuuucccgcagaau

SEQ ID NO: 1599700 - RNA, 19 nt, Artificial Sequence
  Description of Artificial Sequence: Synthetic oligonucleotide
ucgcuugcagucucccagu

SEQ ID NO: 1599701 - RNA, 19 nt, Artificial Sequence
  Description of Artificial Sequence: Synthetic oligonucleotide
caggggaagggucuuccuc

SEQ ID NO: 1599702 - RNA, 19 nt, Artificial Sequence
  Description of Artificial Sequence: Synthetic oligonucleotide
caggaagaucagguugggg

SEQ ID NO: 1599703 - RNA, 19 nt, Artificial Sequence
  Description of Artificial Sequence: Synthetic oligonucleotide
ugcagucucccagucccug

SEQ ID NO: 1599704 - RNA, 19 nt, Artificial Sequence
  Description of Artificial Sequence: Synthetic oligonucleotide
ucaggggaagggucuuccu

SEQ ID NO: 1599705 - RNA, 19 nt, Artificial Sequence
  Description of Artificial Sequence: Synthetic oligonucleotide
guaggcucuuccgguauug

SEQ ID NO: 1599706 - RNA, 19 nt, Artificial Sequence
  Description of Artificial Sequence: Synthetic oligonucleotide
ccaggauacgguucuuagc

SEQ ID NO: 1599707 - RNA, 19 nt, Artificial Sequence
  Description of Artificial Sequence: Synthetic oligonucleotide
uccccgaguuggagggcgg

SEQ ID NO: 1599708 - RNA, 19 nt, Artificial Sequence
  Description of Artificial Sequence: Synthetic oligonucleotide
auuuccggacccagccgac

SEQ ID NO: 1599709 - RNA, 19 nt, Artificial Sequence
  Description of Artificial Sequence: Synthetic oligonucleotide
guagguggcucccuugucu

SEQ ID NO: 1599710 - RNA, 19 nt, Artificial Sequence
  Description of Artificial Sequence: Synthetic oligonucleotide
uacgguucuuagcccuggu

SEQ ID NO: 1599711 - RNA, 19 nt, Artificial Sequence
  Description of Artificial Sequence: Synthetic oligonucleotide
gccugacuccaguuggacg

SEQ ID NO: 1599712 - RNA, 19 nt, Artificial Sequence
  Description of Artificial Sequence: Synthetic oligonucleotide
cacccgaaaguucucugca

SEQ ID NO: 1599713 - RNA, 19 nt, Artificial Sequence
  Description of Artificial Sequence: Synthetic oligonucleotide
uuccggaguucuucacacu

SEQ ID NO: 1599714 - RNA, 19 nt, Artificial Sequence
  Description of Artificial Sequence: Synthetic oligonucleotide
agccgaccuucucgggcgc

SEQ ID NO: 1599715 - RNA, 19 nt, Artificial Sequence
  Description of Artificial Sequence: Synthetic oligonucleotide
ugucccucugagacaggau

SEQ ID NO: 1599716 - RNA, 19 nt, Artificial Sequence
  Description of Artificial Sequence: Synthetic oligonucleotide
acucagaaucggguggaga

SEQ ID NO: 1599717 - RNA, 19 nt, Artificial Sequence
  Description of Artificial Sequence: Synthetic oligonucleotide
uuuccggacccagccgacc

SEQ ID NO: 1599718 - RNA, 19 nt, Artificial Sequence
  Description of Artificial Sequence: Synthetic oligonucleotide
cagccaugagguguccccg

SEQ ID NO: 1599719 - RNA, 19 nt, Artificial Sequence
  Description of Artificial Sequence: Synthetic oligonucleotide
uugccggagccgcucuucu

SEQ ID NO: 1599720 - RNA, 19 nt, Artificial Sequence
  Description of Artificial Sequence: Synthetic oligonucleotide
cucgaguagggugggcaag

SEQ ID NO: 1599721 - RNA, 19 nt, Artificial Sequence
  Description of Artificial Sequence: Synthetic oligonucleotide
ucuuagcccuggugauggc

SEQ ID NO: 1599722 - RNA, 19 nt, Artificial Sequence
  Description of Artificial Sequence: Synthetic oligonucleotide
guuccucaggggaaggguc

SEQ ID NO: 1599723 - RNA, 19 nt, Artificial Sequence
  Description of Artificial Sequence: Synthetic oligonucleotide
ucaccgccaggaagaucag

SEQ ID NO: 1599724 - RNA, 19 nt, Artificial Sequence
  Description of Artificial Sequence: Synthetic oligonucleotide
acgaagccucucccaguag

SEQ ID NO: 1599725 - RNA, 19 nt, Artificial Sequence
  Description of Artificial Sequence: Synthetic oligonucleotide
uguccuccucaacggugac

SEQ ID NO: 1599726 - RNA, 19 nt, Artificial Sequence
  Description of Artificial Sequence: Synthetic oligonucleotide
gucucgaguagggugggca

SEQ ID NO: 1599727 - RNA, 19 nt, Artificial Sequence
  Description of Artificial Sequence: Synthetic oligonucleotide
agcugcucugacucagaau

SEQ ID NO: 1599728 - RNA, 19 nt, Artificial Sequence
  Description of Artificial Sequence: Synthetic oligonucleotide
agguagaggucgaggccac

SEQ ID NO: 1599729 - RNA, 19 nt, Artificial Sequence
  Description of Artificial Sequence: Synthetic oligonucleotide
cuucucgggcgccgcagag

SEQ ID NO: 1599730 - RNA, 19 nt, Artificial Sequence
  Description of Artificial Sequence: Synthetic oligonucleotide
gcagaauuuccggacccag

SEQ ID NO: 1599731 - RNA, 19 nt, Artificial Sequence
  Description of Artificial Sequence: Synthetic oligonucleotide
ccacccgaaaguucucugc

SEQ ID NO: 1599732 - RNA, 19 nt, Artificial Sequence
  Description of Artificial Sequence: Synthetic oligonucleotide
cagggcguugauccaggac

SEQ ID NO: 1599733 - RNA, 19 nt, Artificial Sequence
  Description of Artificial Sequence: Synthetic oligonucleotide
ugccugacuccaguuggac

SEQ ID NO: 1599734 - RNA, 19 nt, Artificial Sequence
  Description of Artificial Sequence: Synthetic oligonucleotide
uggauccgggacagcugca

SEQ ID NO: 1599735 - RNA, 19 nt, Artificial Sequence
  Description of Artificial Sequence: Synthetic oligonucleotide
uggucgccuuucagcacca

SEQ ID NO: 1599736 - RNA, 19 nt, Artificial Sequence
  Description of Artificial Sequence: Synthetic oligonucleotide
uugcagucucccagucccu

SEQ ID NO: 1599737 - RNA, 19 nt, Artificial Sequence
  Description of Artificial Sequence: Synthetic oligonucleotide
cucugacucagaaucgggu

SEQ ID NO: 1599738 - RNA, 19 nt, Artificial Sequence
  Description of Artificial Sequence: Synthetic oligonucleotide
agccaugagguguccccga

SEQ ID NO: 1599739 - RNA, 19 nt, Artificial Sequence
  Description of Artificial Sequence: Synthetic oligonucleotide
aguaggcucuuccgguauu

SEQ ID NO: 1599740 - RNA, 19 nt, Artificial Sequence
  Description of Artificial Sequence: Synthetic oligonucleotide
ugaccucauccaggauacg

SEQ ID NO: 1599741 - RNA, 19 nt, Artificial Sequence
  Description of Artificial Sequence: Synthetic oligonucleotide
cuuuuaccuccuucucgga

SEQ ID NO: 1599742 - RNA, 19 nt, Artificial Sequence
  Description of Artificial Sequence: Synthetic oligonucleotide
cacaguaggcucuuccggu

SEQ ID NO: 1599743 - RNA, 19 nt, Artificial Sequence
  Description of Artificial Sequence: Synthetic oligonucleotide
auccacccgaaaguucucu

SEQ ID NO: 1599744 - RNA, 19 nt, Artificial Sequence
  Description of Artificial Sequence: Synthetic oligonucleotide
gucgacugccagccaguug

SEQ ID NO: 1599745 - RNA, 19 nt, Artificial Sequence
  Description of Artificial Sequence: Synthetic oligonucleotide
auggccggcgggaucgggg

SEQ ID NO: 1599746 - RNA, 19 nt, Artificial Sequence
  Description of Artificial Sequence: Synthetic oligonucleotide
ucgggcgccgcagagugau

SEQ ID NO: 1599747 - RNA, 19 nt, Artificial Sequence
  Description of Artificial Sequence: Synthetic oligonucleotide
ugcaccggcugggagggaa

SEQ ID NO: 1599748 - RNA, 19 nt, Artificial Sequence
  Description of Artificial Sequence: Synthetic oligonucleotide
uagcccuggugauggcaga

SEQ ID NO: 1599749 - RNA, 19 nt, Artificial Sequence
  Description of Artificial Sequence: Synthetic oligonucleotide
uccucagcuuggaggugaa

SEQ ID NO: 1599750 - RNA, 19 nt, Artificial Sequence
  Description of Artificial Sequence: Synthetic oligonucleotide
ggauacgguucuuagcccu

SEQ ID NO: 1599751 - RNA, 19 nt, Artificial Sequence
  Description of Artificial Sequence: Synthetic oligonucleotide
ggagccgcucuucuucaug

SEQ ID NO: 1599752 - RNA, 19 nt, Artificial Sequence
  Description of Artificial Sequence: Synthetic oligonucleotide
agcucagggcguugaucca

SEQ ID NO: 1599753 - RNA, 19 nt, Artificial Sequence
  Description of Artificial Sequence: Synthetic oligonucleotide
cugucuguacaggucucuc

SEQ ID NO: 1599754 - RNA, 19 nt, Artificial Sequence
  Description of Artificial Sequence: Synthetic oligonucleotide
gaggucgaggccacagcca

SEQ ID NO: 1599755 - RNA, 19 nt, Artificial Sequence
  Description of Artificial Sequence: Synthetic oligonucleotide
gugugagggcuggauccgg

SEQ ID NO: 1599756 - RNA, 19 nt, Artificial Sequence
  Description of Artificial Sequence: Synthetic oligonucleotide
cugucucgaguaggguggg

SEQ ID NO: 1599757 - RNA, 19 nt, Artificial Sequence
  Description of Artificial Sequence: Synthetic oligonucleotide
gcuugcagucucccagucc

SEQ ID NO: 1599758 - RNA, 19 nt, Artificial Sequence
  Description of Artificial Sequence: Synthetic oligonucleotide
gccgagaaaggcugcuggc

SEQ ID NO: 1599759 - RNA, 19 nt, Artificial Sequence
  Description of Artificial Sequence: Synthetic oligonucleotide
cuucauggccggcgggauc

SEQ ID NO: 1599760 - RNA, 19 nt, Artificial Sequence
  Description of Artificial Sequence: Synthetic oligonucleotide
ccuuucccgcagaauuucc

SEQ ID NO: 1599761 - RNA, 19 nt, Artificial Sequence
  Description of Artificial Sequence: Synthetic oligonucleotide
cucuuggaugaggucuaac

SEQ ID NO: 1599762 - RNA, 19 nt, Artificial Sequence
  Description of Artificial Sequence: Synthetic oligonucleotide
gggauuccucagcuuggag

SEQ ID NO: 1599763 - RNA, 19 nt, Artificial Sequence
  Description of Artificial Sequence: Synthetic oligonucleotide
gacugccagccaguugggc

SEQ ID NO: 1599764 - RNA, 19 nt, Artificial Sequence
  Description of Artificial Sequence: Synthetic oligonucleotide
caugagguguccccgaguu

SEQ ID NO: 1599765 - RNA, 19 nt, Artificial Sequence
  Description of Artificial Sequence: Synthetic oligonucleotide
ggucuaacgucagcauccc

SEQ ID NO: 1599766 - RNA, 19 nt, Artificial Sequence
  Description of Artificial Sequence: Synthetic oligonucleotide
caguugggccacagacuug

SEQ ID NO: 1599767 - RNA, 19 nt, Artificial Sequence
  Description of Artificial Sequence: Synthetic oligonucleotide
cuguacaggucucucaguu

SEQ ID NO: 1599768 - RNA, 19 nt, Artificial Sequence
  Description of Artificial Sequence: Synthetic oligonucleotide
aucucccugaaaaucccuu

SEQ ID NO: 1599769 - RNA, 19 nt, Artificial Sequence
  Description of Artificial Sequence: Synthetic oligonucleotide
cacaagaggcugguuccuc

SEQ ID NO: 1599770 - RNA, 19 nt, Artificial Sequence
  Description of Artificial Sequence: Synthetic oligonucleotide
acucaccgccaggaagauc

SEQ ID NO: 1599771 - RNA, 19 nt, Artificial Sequence
  Description of Artificial Sequence: Synthetic oligonucleotide
cuaccagguccuggauccg

SEQ ID NO: 1599772 - RNA, 19 nt, Artificial Sequence
  Description of Artificial Sequence: Synthetic oligonucleotide
gggcgccgcagagugaugg

SEQ ID NO: 1599773 - RNA, 19 nt, Artificial Sequence
  Description of Artificial Sequence: Synthetic oligonucleotide
uucucgggcgccgcagagu

SEQ ID NO: 1599774 - RNA, 19 nt, Artificial Sequence
  Description of Artificial Sequence: Synthetic oligonucleotide
cccgcagaauuuccggacc

SEQ ID NO: 1599775 - RNA, 19 nt, Artificial Sequence
  Description of Artificial Sequence: Synthetic oligonucleotide
ccgagaaaggcugcuggcc

SEQ ID NO: 1599776 - RNA, 19 nt, Artificial Sequence
  Description of Artificial Sequence: Synthetic oligonucleotide
ugucucgaguagggugggc

SEQ ID NO: 1599777 - RNA, 19 nt, Artificial Sequence
  Description of Artificial Sequence: Synthetic oligonucleotide
auggcagagcucagggcgu

SEQ ID NO: 1599778 - RNA, 19 nt, Artificial Sequence
  Description of Artificial Sequence: Synthetic oligonucleotide
agcucuucgucgacugcca

SEQ ID NO: 1599779 - RNA, 19 nt, Artificial Sequence
  Description of Artificial Sequence: Synthetic oligonucleotide
cuugccggagccgcucuuc

SEQ ID NO: 1599780 - RNA, 19 nt, Artificial Sequence
  Description of Artificial Sequence: Synthetic oligonucleotide
ccgcagaauuuccggaccc

SEQ ID NO: 1599781 - RNA, 19 nt, Artificial Sequence
  Description of Artificial Sequence: Synthetic oligonucleotide
cacucaggucaaacaccuc

SEQ ID NO: 1599782 - RNA, 19 nt, Artificial Sequence
  Description of Artificial Sequence: Synthetic oligonucleotide
ggaugaggucuaacgucag

SEQ ID NO: 1599783 - RNA, 19 nt, Artificial Sequence
  Description of Artificial Sequence: Synthetic oligonucleotide
gcucagggcguugauccag

SEQ ID NO: 1599784 - RNA, 19 nt, Artificial Sequence
  Description of Artificial Sequence: Synthetic oligonucleotide
gauccacccgaaaguucuc

SEQ ID NO: 1599785 - RNA, 19 nt, Artificial Sequence
  Description of Artificial Sequence: Synthetic oligonucleotide
caccgccaggaagaucagg

SEQ ID NO: 1599786 - RNA, 19 nt, Artificial Sequence
  Description of Artificial Sequence: Synthetic oligonucleotide
guagagcuggucgccuuuc

SEQ ID NO: 1599787 - RNA, 19 nt, Artificial Sequence
  Description of Artificial Sequence: Synthetic oligonucleotide
gccaugagguguccccgag

SEQ ID NO: 1599788 - RNA, 19 nt, Artificial Sequence
  Description of Artificial Sequence: Synthetic oligonucleotide
caccggcugggagggaagg

SEQ ID NO: 1599789 - RNA, 19 nt, Artificial Sequence
  Description of Artificial Sequence: Synthetic oligonucleotide
gucuaacgucagcauccca

SEQ ID NO: 1599790 - RNA, 19 nt, Artificial Sequence
  Description of Artificial Sequence: Synthetic oligonucleotide
aggccgagaaaggcugcug

SEQ ID NO: 1599791 - RNA, 19 nt, Artificial Sequence
  Description of Artificial Sequence: Synthetic oligonucleotide
acagcugcaccggcuggga

SEQ ID NO: 1599792 - RNA, 19 nt, Artificial Sequence
  Description of Artificial Sequence: Synthetic oligonucleotide
ucauggccggcgggaucgg

SEQ ID NO: 1599793 - RNA, 19 nt, Artificial Sequence
  Description of Artificial Sequence: Synthetic oligonucleotide
cccgaaaguucucugcaca

SEQ ID NO: 1599794 - RNA, 19 nt, Artificial Sequence
  Description of Artificial Sequence: Synthetic oligonucleotide
gguucuuagcccuggugau

SEQ ID NO: 1599795 - RNA, 19 nt, Artificial Sequence
  Description of Artificial Sequence: Synthetic oligonucleotide
caucgggccagggugaacu

SEQ ID NO: 1599796 - RNA, 19 nt, Artificial Sequence
  Description of Artificial Sequence: Synthetic oligonucleotide
cgguucuuagcccugguga

SEQ ID NO: 1599797 - RNA, 19 nt, Artificial Sequence
  Description of Artificial Sequence: Synthetic oligonucleotide
gcucuuagauuuccggagu

SEQ ID NO: 1599798 - RNA, 19 nt, Artificial Sequence
  Description of Artificial Sequence: Synthetic oligonucleotide
cuccaguuggacgaagccu

SEQ ID NO: 1599799 - RNA, 19 nt, Artificial Sequence
  Description of Artificial Sequence: Synthetic oligonucleotide
cgcucuucuucauggccgg

SEQ ID NO: 1599800 - RNA, 19 nt, Artificial Sequence
  Description of Artificial Sequence: Synthetic oligonucleotide
ccuugcuaccagguccugg

SEQ ID NO: 1599801 - RNA, 19 nt, Artificial Sequence
  Description of Artificial Sequence: Synthetic oligonucleotide
cagcugcaccggcugggag

SEQ ID NO: 1599802 - RNA, 19 nt, Artificial Sequence
  Description of Artificial Sequence: Synthetic oligonucleotide
cagcggcccuucucuguag

SEQ ID NO: 1599803 - RNA, 19 nt, Artificial Sequence
  Description of Artificial Sequence: Synthetic oligonucleotide
gcucuucgucgacugccag

SEQ ID NO: 1599804 - RNA, 19 nt, Artificial Sequence
  Description of Artificial Sequence: Synthetic oligonucleotide
agaaucggguggagacugu

SEQ ID NO: 1599805 - RNA, 19 nt, Artificial Sequence
  Description of Artificial Sequence: Synthetic oligonucleotide
ggccguggugccuggcugc

SEQ ID NO: 1599806 - RNA, 19 nt, Artificial Sequence
  Description of Artificial Sequence: Synthetic oligonucleotide
cuuuauccuugucaacauu

SEQ ID NO: 1599807 - RNA, 19 nt, Artificial Sequence
  Description of Artificial Sequence: Synthetic oligonucleotide
gcuuuauccuugucaacau

SEQ ID NO: 1599808 - RNA, 19 nt, Artificial Sequence
  Description of Artificial Sequence: Synthetic oligonucleotide
uccggacccagccgaccuu

SEQ ID NO: 1599809 - RNA, 19 nt, Artificial Sequence
  Description of Artificial Sequence: Synthetic oligonucleotide
ggauccgggacagcugcac

SEQ ID NO: 1599810 - RNA, 19 nt, Artificial Sequence
  Description of Artificial Sequence: Synthetic oligonucleotide
agggaggcgcagcggcccu

SEQ ID NO: 1599811 - RNA, 19 nt, Artificial Sequence
  Description of Artificial Sequence: Synthetic oligonucleotide
gagggcggcgggaguguug

SEQ ID NO: 1599812 - RNA, 19 nt, Artificial Sequence
  Description of Artificial Sequence: Synthetic oligonucleotide
cagcaucccaucugaggua

SEQ ID NO: 1599813 - RNA, 19 nt, Artificial Sequence
  Description of Artificial Sequence: Synthetic oligonucleotide
cauggccggcgggaucggg

SEQ ID NO: 1599814 - RNA, 19 nt, Artificial Sequence
  Description of Artificial Sequence: Synthetic oligonucleotide
cucuuagauuuccggaguu

SEQ ID NO: 1599815 - RNA, 19 nt, Artificial Sequence
  Description of Artificial Sequence: Synthetic oligonucleotide
gaguuggagggcggcggga

SEQ ID NO: 1599816 - RNA, 19 nt, Artificial Sequence
  Description of Artificial Sequence: Synthetic oligonucleotide
caguuggacgaagccucuc

SEQ ID NO: 1599817 - RNA, 19 nt, Artificial Sequence
  Description of Artificial Sequence: Synthetic oligonucleotide
uccucaggggaagggucuu

SEQ ID NO: 1599818 - RNA, 19 nt, Artificial Sequence
  Description of Artificial Sequence: Synthetic oligonucleotide
gacguagagcuggucgccu

SEQ ID NO: 1599819 - RNA, 19 nt, Artificial Sequence
  Description of Artificial Sequence: Synthetic oligonucleotide
ccgaaaguucucugcacaa

SEQ ID NO: 1599820 - RNA, 19 nt, Artificial Sequence
  Description of Artificial Sequence: Synthetic oligonucleotide
gccgcagagugaugguuuc

SEQ ID NO: 1599821 - RNA, 19 nt, Artificial Sequence
  Description of Artificial Sequence: Synthetic oligonucleotide
aucgggccagggugaacuu

SEQ ID NO: 1599822 - RNA, 19 nt, Artificial Sequence
  Description of Artificial Sequence: Synthetic oligonucleotide
cguggugccuggcugcuug

SEQ ID NO: 1599823 - RNA, 19 nt, Artificial Sequence
  Description of Artificial Sequence: Synthetic oligonucleotide
gagguguccccgaguugga

SEQ ID NO: 1599824 - RNA, 19 nt, Artificial Sequence
  Description of Artificial Sequence: Synthetic oligonucleotide
gcuggucgccuuucagcac

SEQ ID NO: 1599825 - RNA, 19 nt, Artificial Sequence
  Description of Artificial Sequence: Synthetic oligonucleotide
ggcgcagcggcccuucucu

SEQ ID NO: 1599826 - RNA, 19 nt, Artificial Sequence
  Description of Artificial Sequence: Synthetic oligonucleotide
gggcguugauccaggacuc

SEQ ID NO: 1599827 - RNA, 19 nt, Artificial Sequence
  Description of Artificial Sequence: Synthetic oligonucleotide
ugccggagccgcucuucuu

SEQ ID NO: 1599828 - RNA, 19 nt, Artificial Sequence
  Description of Artificial Sequence: Synthetic oligonucleotide
ccccuaaauuccagaccug

SEQ ID NO: 1599829 - RNA, 19 nt, Artificial Sequence
  Description of Artificial Sequence: Synthetic oligonucleotide
cgguauugacugugcuggg

SEQ ID NO: 1599830 - RNA, 19 nt, Artificial Sequence
  Description of Artificial Sequence: Synthetic oligonucleotide
gggcuggauccggucagag

SEQ ID NO: 1599831 - RNA, 19 nt, Artificial Sequence
  Description of Artificial Sequence: Synthetic oligonucleotide
ggcuggggauuccucagcu

SEQ ID NO: 1599832 - RNA, 19 nt, Artificial Sequence
  Description of Artificial Sequence: Synthetic oligonucleotide
cccuuucccgcagaauuuc

SEQ ID NO: 1599833 - RNA, 19 nt, Artificial Sequence
  Description of Artificial Sequence: Synthetic oligonucleotide
caggacucaccgccaggaa

SEQ ID NO: 1599834 - RNA, 19 nt, Artificial Sequence
  Description of Artificial Sequence: Synthetic oligonucleotide
ccaguugggccacagacuu

SEQ ID NO: 1599835 - RNA, 19 nt, Artificial Sequence
  Description of Artificial Sequence: Synthetic oligonucleotide
ggcccggugugagggcugg

SEQ ID NO: 1599836 - RNA, 19 nt, Artificial Sequence
  Description of Artificial Sequence: Synthetic oligonucleotide
gcaaggaagcuguccuccu

SEQ ID NO: 1599837 - RNA, 19 nt, Artificial Sequence
  Description of Artificial Sequence: Synthetic oligonucleotide
cccaaggccgagaaaggcu

SEQ ID NO: 1599838 - RNA, 19 nt, Artificial Sequence
  Description of Artificial Sequence: Synthetic oligonucleotide
cugacuccaguuggacgaa

SEQ ID NO: 1599839 - RNA, 19 nt, Artificial Sequence
  Description of Artificial Sequence: Synthetic oligonucleotide
cagccaguugggccacaga

SEQ ID NO: 1599840 - RNA, 19 nt, Artificial Sequence
  Description of Artificial Sequence: Synthetic oligonucleotide
ggacccagccgaccuucuc

SEQ ID NO: 1599841 - RNA, 19 nt, Artificial Sequence
  Description of Artificial Sequence: Synthetic oligonucleotide
cuucgucgacugccagcca

SEQ ID NO: 1599842 - RNA, 19 nt, Artificial Sequence
  Description of Artificial Sequence: Synthetic oligonucleotide
caguaggcucuuccgguau

SEQ ID NO: 1599843 - RNA, 19 nt, Artificial Sequence
  Description of Artificial Sequence: Synthetic oligonucleotide
gcagcggcccuucucugua

SEQ ID NO: 1599844 - RNA, 19 nt, Artificial Sequence
  Description of Artificial Sequence: Synthetic oligonucleotide
cucugcacaagaggcuggu

SEQ ID NO: 1599845 - RNA, 19 nt, Artificial Sequence
  Description of Artificial Sequence: Synthetic oligonucleotide
cccaguagccucucugucu

SEQ ID NO: 1599846 - RNA, 19 nt, Artificial Sequence
  Description of Artificial Sequence: Synthetic oligonucleotide
cccagccgaccuucucggg

SEQ ID NO: 1599847 - RNA, 19 nt, Artificial Sequence
  Description of Artificial Sequence: Synthetic oligonucleotide
gcuggcccggugugagggc

SEQ ID NO: 1599848 - RNA, 19 nt, Artificial Sequence
  Description of Artificial Sequence: Synthetic oligonucleotide
cccuaaauuccagaccugu

SEQ ID NO: 1599849 - RNA, 19 nt, Artificial Sequence
  Description of Artificial Sequence: Synthetic oligonucleotide
ccgaccuucucgggcgccg

SEQ ID NO: 1599850 - RNA, 19 nt, Artificial Sequence
  Description of Artificial Sequence: Synthetic oligonucleotide
ggucgaggccacagccaug

SEQ ID NO: 1599851 - RNA, 19 nt, Artificial Sequence
  Description of Artificial Sequence: Synthetic oligonucleotide
ggcuggauccggucagagu

SEQ ID NO: 1599852 - RNA, 19 nt, Artificial Sequence
  Description of Artificial Sequence: Synthetic oligonucleotide
gguggcucccuugucuggu

SEQ ID NO: 1599853 - RNA, 19 nt, Artificial Sequence
  Description of Artificial Sequence: Synthetic oligonucleotide
gcagagugaugguuuccau

SEQ ID NO: 1599854 - RNA, 19 nt, Artificial Sequence
  Description of Artificial Sequence: Synthetic oligonucleotide
gcaccggcugggagggaag

SEQ ID NO: 1599855 - RNA, 19 nt, Artificial Sequence
  Description of Artificial Sequence: Synthetic oligonucleotide
gacucaccgccaggaagau

SEQ ID NO: 1599856 - RNA, 19 nt, Artificial Sequence
  Description of Artificial Sequence: Synthetic oligonucleotide
ggauccggucagagucagc

SEQ ID NO: 1599857 - RNA, 19 nt, Artificial Sequence
  Description of Artificial Sequence: Synthetic oligonucleotide
cucuuccgguauugacugu

SEQ ID NO: 1599858 - RNA, 19 nt, Artificial Sequence
  Description of Artificial Sequence: Synthetic oligonucleotide
ccgggacagcugcaccggc

SEQ ID NO: 1599859 - RNA, 19 nt, Artificial Sequence
  Description of Artificial Sequence: Synthetic oligonucleotide
gcguugauccaggacuccu

SEQ ID NO: 1599860 - RNA, 19 nt, Artificial Sequence
  Description of Artificial Sequence: Synthetic oligonucleotide
gcgcagcggcccuucucug

SEQ ID NO: 1599861 - RNA, 19 nt, Artificial Sequence
  Description of Artificial Sequence: Synthetic oligonucleotide
gccuggcugcuugcaucgg

SEQ ID NO: 1599862 - RNA, 19 nt, Artificial Sequence
  Description of Artificial Sequence: Synthetic oligonucleotide
ggaggcgcagcggcccuuc

SEQ ID NO: 1599863 - RNA, 19 nt, Artificial Sequence
  Description of Artificial Sequence: Synthetic oligonucleotide
ccggacccagccgaccuuc

SEQ ID NO: 1599864 - RNA, 19 nt, Artificial Sequence
  Description of Artificial Sequence: Synthetic oligonucleotide
gcagguccaucugucugua

SEQ ID NO: 1599865 - RNA, 19 nt, Artificial Sequence
  Description of Artificial Sequence: Synthetic oligonucleotide
cuggcccggugugagggcu

SEQ ID NO: 1599866 - RNA, 19 nt, Artificial Sequence
  Description of Artificial Sequence: Synthetic oligonucleotide
cagagcucagggcguugau

SEQ ID NO: 1599867 - RNA, 19 nt, Artificial Sequence
  Description of Artificial Sequence: Synthetic oligonucleotide
guggcucccuugucugguu

SEQ ID NO: 1599868 - RNA, 19 nt, Artificial Sequence
  Description of Artificial Sequence: Synthetic oligonucleotide
gcacaagaggcugguuccu

SEQ ID NO: 1599869 - RNA, 19 nt, Artificial Sequence
  Description of Artificial Sequence: Synthetic oligonucleotide
ggacccucuuugccugacu

SEQ ID NO: 1599870 - RNA, 19 nt, Artificial Sequence
  Description of Artificial Sequence: Synthetic oligonucleotide
ggggccguggugccuggcu

SEQ ID NO: 1599871 - RNA, 19 nt, Artificial Sequence
  Description of Artificial Sequence: Synthetic oligonucleotide
ccagauccacccgaaaguu

SEQ ID NO: 1599872 - RNA, 19 nt, Artificial Sequence
  Description of Artificial Sequence: Synthetic oligonucleotide
ccucaacggugaccucauc

SEQ ID NO: 1599873 - RNA, 19 nt, Artificial Sequence
  Description of Artificial Sequence: Synthetic oligonucleotide
gcggcgggaguguuggauu

SEQ ID NO: 1599874 - RNA, 19 nt, Artificial Sequence
  Description of Artificial Sequence: Synthetic oligonucleotide
ggguguagguggcucccuu

SEQ ID NO: 1599875 - RNA, 19 nt, Artificial Sequence
  Description of Artificial Sequence: Synthetic oligonucleotide
cccugacuuccugcaggac

SEQ ID NO: 1599876 - RNA, 19 nt, Artificial Sequence
  Description of Artificial Sequence: Synthetic oligonucleotide
ggucgccuuucagcaccac

SEQ ID NO: 1599877 - RNA, 19 nt, Artificial Sequence
  Description of Artificial Sequence: Synthetic oligonucleotide
ggcgccgcagagugauggu

SEQ ID NO: 1599878 - RNA, 19 nt, Artificial Sequence
  Description of Artificial Sequence: Synthetic oligonucleotide
ggcggcgggaguguuggau

SEQ ID NO: 1599879 - RNA, 19 nt, Artificial Sequence
  Description of Artificial Sequence: Synthetic oligonucleotide
cgcagaauuuccggaccca

SEQ ID NO: 1599880 - RNA, 19 nt, Artificial Sequence
  Description of Artificial Sequence: Synthetic oligonucleotide
gcaucgggccagggugaac

SEQ ID NO: 1599881 - RNA, 19 nt, Artificial Sequence
  Description of Artificial Sequence: Synthetic oligonucleotide
ccaugagguguccccgagu

SEQ ID NO: 1599882 - RNA, 19 nt, Artificial Sequence
  Description of Artificial Sequence: Synthetic oligonucleotide
ccggaguucuucacacuuu

SEQ ID NO: 1599883 - RNA, 19 nt, Artificial Sequence
  Description of Artificial Sequence: Synthetic oligonucleotide
cgaguagggugggcaagga

SEQ ID NO: 1599884 - RNA, 19 nt, Artificial Sequence
  Description of Artificial Sequence: Synthetic oligonucleotide
cguugauccaggacuccuu

SEQ ID NO: 1599885 - RNA, 19 nt, Artificial Sequence
  Description of Artificial Sequence: Synthetic oligonucleotide
ggggccgcgcccgcugcuc

SEQ ID NO: 1599886 - RNA, 19 nt, Artificial Sequence
  Description of Artificial Sequence: Synthetic oligonucleotide
cggagacguagagcugguc

SEQ ID NO: 1599887 - RNA, 19 nt, Artificial Sequence
  Description of Artificial Sequence: Synthetic oligonucleotide
ccgccaggaagaucagguu

SEQ ID NO: 1599888 - RNA, 19 nt, Artificial Sequence
  Description of Artificial Sequence: Synthetic oligonucleotide
cgccgcagagugaugguuu

SEQ ID NO: 1599889 - RNA, 19 nt, Artificial Sequence
  Description of Artificial Sequence: Synthetic oligonucleotide
ggcgggaguguuggauuuu

SEQ ID NO: 1599890 - RNA, 19 nt, Artificial Sequence
  Description of Artificial Sequence: Synthetic oligonucleotide
gggcggcgggaguguugga

SEQ ID NO: 1599891 - RNA, 19 nt, Artificial Sequence
  Description of Artificial Sequence: Synthetic oligonucleotide
gcgccgcagagugaugguu

SEQ ID NO: 1599892 - RNA, 19 nt, Artificial Sequence
  Description of Artificial Sequence: Synthetic oligonucleotide
cgcagcggcccuucucugu

SEQ ID NO: 1599893 - RNA, 19 nt, Artificial Sequence
  Description of Artificial Sequence: Synthetic oligonucleotide
cgggcgccgcagagugaug

SEQ ID NO: 1599894 - RNA, 19 nt, Artificial Sequence
  Description of Artificial Sequence: Synthetic oligonucleotide
ggagggcggcgggaguguu

SEQ ID NO: 1599895 - RNA, 19 nt, Artificial Sequence
  Description of Artificial Sequence: Synthetic oligonucleotide
cgcccgcugcucgcucgcc

SEQ ID NO: 1599896 - RNA, 19 nt, Artificial Sequence
  Description of Artificial Sequence: Synthetic oligonucleotide
gcccggugugagggcugga

SEQ ID NO: 1599897 - RNA, 19 nt, Artificial Sequence
  Description of Artificial Sequence: Synthetic oligonucleotide
cgucgacugccagccaguu

SEQ ID NO: 1599898 - RNA, 19 nt, Artificial Sequence
  Description of Artificial Sequence: Synthetic oligonucleotide
ccguggugccuggcugcuu

SEQ ID NO: 1599899 - RNA, 19 nt, Artificial Sequence
  Description of Artificial Sequence: Synthetic oligonucleotide
auuaaggaaguauugaagc

SEQ ID NO: 1599900 - RNA, 19 nt, Artificial Sequence
  Description of Artificial Sequence: Synthetic oligonucleotide
ugauauuugacuuucauca

SEQ ID NO: 1599901 - RNA, 19 nt, Artificial Sequence
  Description of Artificial Sequence: Synthetic oligonucleotide
uuuacguucaauauccagg

SEQ ID NO: 1599902 - RNA, 19 nt, Artificial Sequence
  Description of Artificial Sequence: Synthetic oligonucleotide
uuuuaguugaaguaaaucu

SEQ ID NO: 1599903 - RNA, 19 nt, Artificial Sequence
  Description of Artificial Sequence: Synthetic oligonucleotide
auugaagcauucuaguugc

SEQ ID NO: 1599904 - RNA, 19 nt, Artificial Sequence
  Description of Artificial Sequence: Synthetic oligonucleotide
aauuuauuugccucacuac

SEQ ID NO: 1599905 - RNA, 19 nt, Artificial Sequence
  Description of Artificial Sequence: Synthetic oligonucleotide
aauucuaucuagcuuagcu

SEQ ID NO: 1599906 - RNA, 19 nt, Artificial Sequence
  Description of Artificial Sequence: Synthetic oligonucleotide
uuuaguugaaguaaaucug

SEQ ID NO: 1599907 - RNA, 19 nt, Artificial Sequence
  Description of Artificial Sequence: Synthetic oligonucleotide
auguggaaggcuuagauuc

SEQ ID NO: 1599908 - RNA, 19 nt, Artificial Sequence
  Description of Artificial Sequence: Synthetic oligonucleotide
uuuagcucaaucuguaggg

SEQ ID NO: 1599909 - RNA, 19 nt, Artificial Sequence
  Description of Artificial Sequence: Synthetic oligonucleotide
aguaaaucugcauaauagg

SEQ ID NO: 1599910 - RNA, 19 nt, Artificial Sequence
  Description of Artificial Sequence: Synthetic oligonucleotide
uauugaagcauucuaguug

SEQ ID NO: 1599911 - RNA, 19 nt, Artificial Sequence
  Description of Artificial Sequence: Synthetic oligonucleotide
aagcuuuacacauuucuuc

SEQ ID NO: 1599912 - RNA, 19 nt, Artificial Sequence
  Description of Artificial Sequence: Synthetic oligonucleotide
gaaguggcaaucuagaaac

SEQ ID NO: 1599913 - RNA, 19 nt, Artificial Sequence
  Description of Artificial Sequence: Synthetic oligonucleotide
aaguaaaucugcauaauag

SEQ ID NO: 1599914 - RNA, 19 nt, Artificial Sequence
  Description of Artificial Sequence: Synthetic oligonucleotide
uuaguugaaguaaaucugc

SEQ ID NO: 1599915 - RNA, 19 nt, Artificial Sequence
  Description of Artificial Sequence: Synthetic oligonucleotide
uuacguucaauauccaggg

SEQ ID NO: 1599916 - RNA, 19 nt, Artificial Sequence
  Description of Artificial Sequence: Synthetic oligonucleotide
uuagaagucauuauguaau

SEQ ID NO: 1599917 - RNA, 19 nt, Artificial Sequence
  Description of Artificial Sequence: Synthetic oligonucleotide
agcauuaacauuuaaacua

SEQ ID NO: 1599918 - RNA, 19 nt, Artificial Sequence
  Description of Artificial Sequence: Synthetic oligonucleotide
aaacaaccguucuugcugc

SEQ ID NO: 1599919 - RNA, 19 nt, Artificial Sequence
  Description of Artificial Sequence: Synthetic oligonucleotide
uuagcucucaguuugauau

SEQ ID NO: 1599920 - RNA, 19 nt, Artificial Sequence
  Description of Artificial Sequence: Synthetic oligonucleotide
uaaaucugcauaauaggug

SEQ ID NO: 1599921 - RNA, 19 nt, Artificial Sequence
  Description of Artificial Sequence: Synthetic oligonucleotide
uauaauacgccacugcuuc

SEQ ID NO: 1599922 - RNA, 19 nt, Artificial Sequence
  Description of Artificial Sequence: Synthetic oligonucleotide
aauguggagauuuguaacu

SEQ ID NO: 1599923 - RNA, 19 nt, Artificial Sequence
  Description of Artificial Sequence: Synthetic oligonucleotide
uauaaguacuuaaauuucu

SEQ ID NO: 1599924 - RNA, 19 nt, Artificial Sequence
  Description of Artificial Sequence: Synthetic oligonucleotide
gaaugguugaagaagcugg

SEQ ID NO: 1599925 - RNA, 19 nt, Artificial Sequence
  Description of Artificial Sequence: Synthetic oligonucleotide
uacacauuucuucuuaggc

SEQ ID NO: 1599926 - RNA, 19 nt, Artificial Sequence
  Description of Artificial Sequence: Synthetic oligonucleotide
uucaccucuucuuugagag

SEQ ID NO: 1599927 - RNA, 19 nt, Artificial Sequence
  Description of Artificial Sequence: Synthetic oligonucleotide
cauagcuacccuucgaucg

SEQ ID NO: 1599928 - RNA, 19 nt, Artificial Sequence
  Description of Artificial Sequence: Synthetic oligonucleotide
ucuaaggcguuauaauacg

SEQ ID NO: 1599929 - RNA, 19 nt, Artificial Sequence
  Description of Artificial Sequence: Synthetic oligonucleotide
aacuauuaaggcaggauuc

SEQ ID NO: 1599930 - RNA, 19 nt, Artificial Sequence
  Description of Artificial Sequence: Synthetic oligonucleotide
ucucuguauggauaguucg

SEQ ID NO: 1599931 - RNA, 19 nt, Artificial Sequence
  Description of Artificial Sequence: Synthetic oligonucleotide
uuuaagccggucuaccugg

SEQ ID NO: 1599932 - RNA, 19 nt, Artificial Sequence
  Description of Artificial Sequence: Synthetic oligonucleotide
aaacuauuaaggcaggauu

SEQ ID NO: 1599933 - RNA, 19 nt, Artificial Sequence
  Description of Artificial Sequence: Synthetic oligonucleotide
uuuaaacuauuaaggcagg

SEQ ID NO: 1599934 - RNA, 19 nt, Artificial Sequence
  Description of Artificial Sequence: Synthetic oligonucleotide
auuuauuugccucacuacu

SEQ ID NO: 1599935 - RNA, 19 nt, Artificial Sequence
  Description of Artificial Sequence: Synthetic oligonucleotide
uauguaauuuauuugccuc

SEQ ID NO: 1599936 - RNA, 19 nt, Artificial Sequence
  Description of Artificial Sequence: Synthetic oligonucleotide
auuauguaauuuauuugcc

SEQ ID NO: 1599937 - RNA, 19 nt, Artificial Sequence
  Description of Artificial Sequence: Synthetic oligonucleotide
auucuaucuagcuuagcuc

SEQ ID NO: 1599938 - RNA, 19 nt, Artificial Sequence
  Description of Artificial Sequence: Synthetic oligonucleotide
aucgaguuuccuuuacugc

SEQ ID NO: 1599939 - RNA, 19 nt, Artificial Sequence
  Description of Artificial Sequence: Synthetic oligonucleotide
aagguguuuuauuucacca

SEQ ID NO: 1599940 - RNA, 19 nt, Artificial Sequence
  Description of Artificial Sequence: Synthetic oligonucleotide
aacaguuuacguucaauau

SEQ ID NO: 1599941 - RNA, 19 nt, Artificial Sequence
  Description of Artificial Sequence: Synthetic oligonucleotide
gacuggacuauccacaagc

SEQ ID NO: 1599942 - RNA, 19 nt, Artificial Sequence
  Description of Artificial Sequence: Synthetic oligonucleotide
aaacaguuuacguucaaua

SEQ ID NO: 1599943 - RNA, 19 nt, Artificial Sequence
  Description of Artificial Sequence: Synthetic oligonucleotide
uguacugcaguucauucac

SEQ ID NO: 1599944 - RNA, 19 nt, Artificial Sequence
  Description of Artificial Sequence: Synthetic oligonucleotide
auauuugacuuucaucaag

SEQ ID NO: 1599945 - RNA, 19 nt, Artificial Sequence
  Description of Artificial Sequence: Synthetic oligonucleotide
ucuugcugcuacaaaauca

SEQ ID NO: 1599946 - RNA, 19 nt, Artificial Sequence
  Description of Artificial Sequence: Synthetic oligonucleotide
acuuaucuaguuuuaguug

SEQ ID NO: 1599947 - RNA, 19 nt, Artificial Sequence
  Description of Artificial Sequence: Synthetic oligonucleotide
acaagcuuuacacauuucu

SEQ ID NO: 1599948 - RNA, 19 nt, Artificial Sequence
  Description of Artificial Sequence: Synthetic oligonucleotide
aaguauugaagcauucuag

SEQ ID NO: 1599949 - RNA, 19 nt, Artificial Sequence
  Description of Artificial Sequence: Synthetic oligonucleotide
ugucuucuagaguacaaag

SEQ ID NO: 1599950 - RNA, 19 nt, Artificial Sequence
  Description of Artificial Sequence: Synthetic oligonucleotide
uuauuugccucacuacugc

SEQ ID NO: 1599951 - RNA, 19 nt, Artificial Sequence
  Description of Artificial Sequence: Synthetic oligonucleotide
uuaaggaaguauugaagca

SEQ ID NO: 1599952 - RNA, 19 nt, Artificial Sequence
  Description of Artificial Sequence: Synthetic oligonucleotide
uaggcuguguaucuagagg

SEQ ID NO: 1599953 - RNA, 19 nt, Artificial Sequence
  Description of Artificial Sequence: Synthetic oligonucleotide
uucacuucuguuugaagcc

SEQ ID NO: 1599954 - RNA, 19 nt, Artificial Sequence
  Description of Artificial Sequence: Synthetic oligonucleotide
uugagagucagucuucaca

SEQ ID NO: 1599955 - RNA, 19 nt, Artificial Sequence
  Description of Artificial Sequence: Synthetic oligonucleotide
uaaggcguuauaauacgcc

SEQ ID NO: 1599956 - RNA, 19 nt, Artificial Sequence
  Description of Artificial Sequence: Synthetic oligonucleotide
uuauguaauuuauuugccu

SEQ ID NO: 1599957 - RNA, 19 nt, Artificial Sequence
  Description of Artificial Sequence: Synthetic oligonucleotide
uuccuauucucucuucagg

SEQ ID NO: 1599958 - RNA, 19 nt, Artificial Sequence
  Description of Artificial Sequence: Synthetic oligonucleotide
ucugaaguggcaaucuaga

SEQ ID NO: 1599959 - RNA, 19 nt, Artificial Sequence
  Description of Artificial Sequence: Synthetic oligonucleotide
aguauugaagcauucuagu

SEQ ID NO: 1599960 - RNA, 19 nt, Artificial Sequence
  Description of Artificial Sequence: Synthetic oligonucleotide
ucuagcuuagcucucaguu

SEQ ID NO: 1599961 - RNA, 19 nt, Artificial Sequence
  Description of Artificial Sequence: Synthetic oligonucleotide
uuuuaagccggucuaccug

SEQ ID NO: 1599962 - RNA, 19 nt, Artificial Sequence
  Description of Artificial Sequence: Synthetic oligonucleotide
aauaaugccuucauucucu

SEQ ID NO: 1599963 - RNA, 19 nt, Artificial Sequence
  Description of Artificial Sequence: Synthetic oligonucleotide
auugggugugauuucuuac

SEQ ID NO: 1599964 - RNA, 19 nt, Artificial Sequence
  Description of Artificial Sequence: Synthetic oligonucleotide
cuugauucugcaguuaacc

SEQ ID NO: 1599965 - RNA, 19 nt, Artificial Sequence
  Description of Artificial Sequence: Synthetic oligonucleotide
ugacuuugaugacacauac

SEQ ID NO: 1599966 - RNA, 19 nt, Artificial Sequence
  Description of Artificial Sequence: Synthetic oligonucleotide
uauucgagcuuucucuaag

SEQ ID NO: 1599967 - RNA, 19 nt, Artificial Sequence
  Description of Artificial Sequence: Synthetic oligonucleotide
uggacuauccacaagcuuu

SEQ ID NO: 1599968 - RNA, 19 nt, Artificial Sequence
  Description of Artificial Sequence: Synthetic oligonucleotide
aucaguuugagauccccuc

SEQ ID NO: 1599969 - RNA, 19 nt, Artificial Sequence
  Description of Artificial Sequence: Synthetic oligonucleotide
ggugugauuucuuacaagc

SEQ ID NO: 1599970 - RNA, 19 nt, Artificial Sequence
  Description of Artificial Sequence: Synthetic oligonucleotide
ucgagcuuucucuaaggcg

SEQ ID NO: 1599971 - RNA, 19 nt, Artificial Sequence
  Description of Artificial Sequence: Synthetic oligonucleotide
uucaucugaucucugguga

SEQ ID NO: 1599972 - RNA, 19 nt, Artificial Sequence
  Description of Artificial Sequence: Synthetic oligonucleotide
aaggcguuauaauacgcca

SEQ ID NO: 1599973 - RNA, 19 nt, Artificial Sequence
  Description of Artificial Sequence: Synthetic oligonucleotide
ugaagaagcuggcuguugc

SEQ ID NO: 1599974 - RNA, 19 nt, Artificial Sequence
  Description of Artificial Sequence: Synthetic oligonucleotide
acacauacaugauugggug

SEQ ID NO: 1599975 - RNA, 19 nt, Artificial Sequence
  Description of Artificial Sequence: Synthetic oligonucleotide
uuguuuguacugcaguuca

SEQ ID NO: 1599976 - RNA, 19 nt, Artificial Sequence
  Description of Artificial Sequence: Synthetic oligonucleotide
uccacuuuguucacguaag

SEQ ID NO: 1599977 - RNA, 19 nt, Artificial Sequence
  Description of Artificial Sequence: Synthetic oligonucleotide
caaacaaccguucuugcug

SEQ ID NO: 1599978 - RNA, 19 nt, Artificial Sequence
  Description of Artificial Sequence: Synthetic oligonucleotide
gaucgaguuuccuuuacug

SEQ ID NO: 1599979 - RNA, 19 nt, Artificial Sequence
  Description of Artificial Sequence: Synthetic oligonucleotide
cuuaucuaguuuuaguuga

SEQ ID NO: 1599980 - RNA, 19 nt, Artificial Sequence
  Description of Artificial Sequence: Synthetic oligonucleotide
cucuaaggcguuauaauac

SEQ ID NO: 1599981 - RNA, 19 nt, Artificial Sequence
  Description of Artificial Sequence: Synthetic oligonucleotide
uuaacuuaucuaguuuuag

SEQ ID NO: 1599982 - RNA, 19 nt, Artificial Sequence
  Description of Artificial Sequence: Synthetic oligonucleotide
ucuggugaacacauuuugc

SEQ ID NO: 1599983 - RNA, 19 nt, Artificial Sequence
  Description of Artificial Sequence: Synthetic oligonucleotide
ugacacauacaugauuggg

SEQ ID NO: 1599984 - RNA, 19 nt, Artificial Sequence
  Description of Artificial Sequence: Synthetic oligonucleotide
ugcauaauagguguugucu

SEQ ID NO: 1599985 - RNA, 19 nt, Artificial Sequence
  Description of Artificial Sequence: Synthetic oligonucleotide
uuagauuccguacuuucau

SEQ ID NO: 1599986 - RNA, 19 nt, Artificial Sequence
  Description of Artificial Sequence: Synthetic oligonucleotide
uucagugacugauauuuga

SEQ ID NO: 1599987 - RNA, 19 nt, Artificial Sequence
  Description of Artificial Sequence: Synthetic oligonucleotide
cuggcucucaaauaaugcc

SEQ ID NO: 1599988 - RNA, 19 nt, Artificial Sequence
  Description of Artificial Sequence: Synthetic oligonucleotide
uaacuuaucuaguuuuagu

SEQ ID NO: 1599989 - RNA, 19 nt, Artificial Sequence
  Description of Artificial Sequence: Synthetic oligonucleotide
ucgaguuuccuuuacugcu

SEQ ID NO: 1599990 - RNA, 19 nt, Artificial Sequence
  Description of Artificial Sequence: Synthetic oligonucleotide
ucccuaguagcaucaauag

SEQ ID NO: 1599991 - RNA, 19 nt, Artificial Sequence
  Description of Artificial Sequence: Synthetic oligonucleotide
gaagucauuauguaauuua

SEQ ID NO: 1599992 - RNA, 19 nt, Artificial Sequence
  Description of Artificial Sequence: Synthetic oligonucleotide
aggucuugauuuucuauuc

SEQ ID NO: 1599993 - RNA, 19 nt, Artificial Sequence
  Description of Artificial Sequence: Synthetic oligonucleotide
acacauuucuucuuaggcu

SEQ ID NO: 1599994 - RNA, 19 nt, Artificial Sequence
  Description of Artificial Sequence: Synthetic oligonucleotide
uagcauuaaggaaguauug

SEQ ID NO: 1599995 - RNA, 19 nt, Artificial Sequence
  Description of Artificial Sequence: Synthetic oligonucleotide
agcuuuaauucuaucuagc

SEQ ID NO: 1599996 - RNA, 19 nt, Artificial Sequence
  Description of Artificial Sequence: Synthetic oligonucleotide
uuuaacuuaucuaguuuua

SEQ ID NO: 1599997 - RNA, 19 nt, Artificial Sequence
  Description of Artificial Sequence: Synthetic oligonucleotide
cguacuuucauauaaguac

SEQ ID NO: 1599998 - RNA, 19 nt, Artificial Sequence
  Description of Artificial Sequence: Synthetic oligonucleotide
uguuuaacuuaucuaguuu

SEQ ID NO: 1599999 - RNA, 19 nt, Artificial Sequence
  Description of Artificial Sequence: Synthetic oligonucleotide
uguucaucugaucucuggu

SEQ ID NO: 1600000 - RNA, 19 nt, Artificial Sequence
  Description of Artificial Sequence: Synthetic oligonucleotide
ucuguuugaagccuugauu

SEQ ID NO: 1600001 - RNA, 19 nt, Artificial Sequence
  Description of Artificial Sequence: Synthetic oligonucleotide
cuuucaucaaguugagcug

SEQ ID NO: 1600002 - RNA, 19 nt, Artificial Sequence
  Description of Artificial Sequence: Synthetic oligonucleotide
uuaggcuguguaucuagag

SEQ ID NO: 1600003 - RNA, 19 nt, Artificial Sequence
  Description of Artificial Sequence: Synthetic oligonucleotide
uaaggcaggauucuuucuc

SEQ ID NO: 1600004 - RNA, 19 nt, Artificial Sequence
  Description of Artificial Sequence: Synthetic oligonucleotide
uccuauucucucuucaggu

SEQ ID NO: 1600005 - RNA, 19 nt, Artificial Sequence
  Description of Artificial Sequence: Synthetic oligonucleotide
gaaggcuuagauuccguac

SEQ ID NO: 1600006 - RNA, 19 nt, Artificial Sequence
  Description of Artificial Sequence: Synthetic oligonucleotide
uuugagauccccucauccu

SEQ ID NO: 1600007 - RNA, 19 nt, Artificial Sequence
  Description of Artificial Sequence: Synthetic oligonucleotide
ucucuaaggcguuauaaua

SEQ ID NO: 1600008 - RNA, 19 nt, Artificial Sequence
  Description of Artificial Sequence: Synthetic oligonucleotide
uucccuaguagcaucaaua

SEQ ID NO: 1600009 - RNA, 19 nt, Artificial Sequence
  Description of Artificial Sequence: Synthetic oligonucleotide
auaauacgccacugcuucc

SEQ ID NO: 1600010 - RNA, 19 nt, Artificial Sequence
  Description of Artificial Sequence: Synthetic oligonucleotide
agugacugauauuugacuu

SEQ ID NO: 1600011 - RNA, 19 nt, Artificial Sequence
  Description of Artificial Sequence: Synthetic oligonucleotide
uggcaaucuagaaacuucu

SEQ ID NO: 1600012 - RNA, 19 nt, Artificial Sequence
  Description of Artificial Sequence: Synthetic oligonucleotide
ugagcuggcauuccauagc

SEQ ID NO: 1600013 - RNA, 19 nt, Artificial Sequence
  Description of Artificial Sequence: Synthetic oligonucleotide
uccgaagacacgcuauuga

SEQ ID NO: 1600014 - RNA, 19 nt, Artificial Sequence
  Description of Artificial Sequence: Synthetic oligonucleotide
uggcucucaaauaaugccu

SEQ ID NO: 1600015 - RNA, 19 nt, Artificial Sequence
  Description of Artificial Sequence: Synthetic oligonucleotide
ucuagaaacuucuucccua

SEQ ID NO: 1600016 - RNA, 19 nt, Artificial Sequence
  Description of Artificial Sequence: Synthetic oligonucleotide
agagucagucuucacaccu

SEQ ID NO: 1600017 - RNA, 19 nt, Artificial Sequence
  Description of Artificial Sequence: Synthetic oligonucleotide
aaaaucaguuugagauccc

SEQ ID NO: 1600018 - RNA, 19 nt, Artificial Sequence
  Description of Artificial Sequence: Synthetic oligonucleotide
ugaucucuggugaacacau

SEQ ID NO: 1600019 - RNA, 19 nt, Artificial Sequence
  Description of Artificial Sequence: Synthetic oligonucleotide
cugauauuugacuuucauc

SEQ ID NO: 1600020 - RNA, 19 nt, Artificial Sequence
  Description of Artificial Sequence: Synthetic oligonucleotide
uuuccuuuacugcugggau

SEQ ID NO: 1600021 - RNA, 19 nt, Artificial Sequence
  Description of Artificial Sequence: Synthetic oligonucleotide
gaaguauugaagcauucua

SEQ ID NO: 1600022 - RNA, 19 nt, Artificial Sequence
  Description of Artificial Sequence: Synthetic oligonucleotide
uucgagcuuucucuaaggc

SEQ ID NO: 1600023 - RNA, 19 nt, Artificial Sequence
  Description of Artificial Sequence: Synthetic oligonucleotide
auucgagcuuucucuaagg

SEQ ID NO: 1600024 - RNA, 19 nt, Artificial Sequence
  Description of Artificial Sequence: Synthetic oligonucleotide
uuguaguacugguacuucc

SEQ ID NO: 1600025 - RNA, 19 nt, Artificial Sequence
  Description of Artificial Sequence: Synthetic oligonucleotide
uuucuuacaagcuccuuuu

SEQ ID NO: 1600026 - RNA, 19 nt, Artificial Sequence
  Description of Artificial Sequence: Synthetic oligonucleotide
uuucuauucgagcuuucuc

SEQ ID NO: 1600027 - RNA, 19 nt, Artificial Sequence
  Description of Artificial Sequence: Synthetic oligonucleotide
uugagcuggcauuccauag

SEQ ID NO: 1600028 - RNA, 19 nt, Artificial Sequence
  Description of Artificial Sequence: Synthetic oligonucleotide
ccuaguagcaucaauagca

SEQ ID NO: 1600029 - RNA, 19 nt, Artificial Sequence
  Description of Artificial Sequence: Synthetic oligonucleotide
uuccacuuuguucacguaa

SEQ ID NO: 1600030 - RNA, 19 nt, Artificial Sequence
  Description of Artificial Sequence: Synthetic oligonucleotide
uuauaauacgccacugcuu

SEQ ID NO: 1600031 - RNA, 19 nt, Artificial Sequence
  Description of Artificial Sequence: Synthetic oligonucleotide
gauaguucgccuuuugugu

SEQ ID NO: 1600032 - RNA, 19 nt, Artificial Sequence
  Description of Artificial Sequence: Synthetic oligonucleotide
cuaaggcguuauaauacgc

SEQ ID NO: 1600033 - RNA, 19 nt, Artificial Sequence
  Description of Artificial Sequence: Synthetic oligonucleotide
uccgguguugacuuugaug

SEQ ID NO: 1600034 - RNA, 19 nt, Artificial Sequence
  Description of Artificial Sequence: Synthetic oligonucleotide
cucuguauggauaguucgc

SEQ ID NO: 1600035 - RNA, 19 nt, Artificial Sequence
  Description of Artificial Sequence: Synthetic oligonucleotide
uaaggaaguauugaagcau

SEQ ID NO: 1600036 - RNA, 19 nt, Artificial Sequence
  Description of Artificial Sequence: Synthetic oligonucleotide
uaaacuauuaaggcaggau

SEQ ID NO: 1600037 - RNA, 19 nt, Artificial Sequence
  Description of Artificial Sequence: Synthetic oligonucleotide
uguggaaggcuuagauucc

SEQ ID NO: 1600038 - RNA, 19 nt, Artificial Sequence
  Description of Artificial Sequence: Synthetic oligonucleotide
gaaguaaaucugcauaaua

SEQ ID NO: 1600039 - RNA, 19 nt, Artificial Sequence
  Description of Artificial Sequence: Synthetic oligonucleotide
uguaauuuauuugccucac

SEQ ID NO: 1600040 - RNA, 19 nt, Artificial Sequence
  Description of Artificial Sequence: Synthetic oligonucleotide
cauaauagguguugucuuc

SEQ ID NO: 1600041 - RNA, 19 nt, Artificial Sequence
  Description of Artificial Sequence: Synthetic oligonucleotide
aagucauuauguaauuuau

SEQ ID NO: 1600042 - RNA, 19 nt, Artificial Sequence
  Description of Artificial Sequence: Synthetic oligonucleotide
acauacaugauugggugug

SEQ ID NO: 1600043 - RNA, 19 nt, Artificial Sequence
  Description of Artificial Sequence: Synthetic oligonucleotide
uguaucuagaggugggcuc

SEQ ID NO: 1600044 - RNA, 19 nt, Artificial Sequence
  Description of Artificial Sequence: Synthetic oligonucleotide
guucacguaaggcaucagc

SEQ ID NO: 1600045 - RNA, 19 nt, Artificial Sequence
  Description of Artificial Sequence: Synthetic oligonucleotide
uccguacuuucauauaagu

SEQ ID NO: 1600046 - RNA, 19 nt, Artificial Sequence
  Description of Artificial Sequence: Synthetic oligonucleotide
agauuccguacuuucauau

SEQ ID NO: 1600047 - RNA, 19 nt, Artificial Sequence
  Description of Artificial Sequence: Synthetic oligonucleotide
uacuuaaauuucuccagau

SEQ ID NO: 1600048 - RNA, 19 nt, Artificial Sequence
  Description of Artificial Sequence: Synthetic oligonucleotide
guuaaccugggagaucugg

SEQ ID NO: 1600049 - RNA, 19 nt, Artificial Sequence
  Description of Artificial Sequence: Synthetic oligonucleotide
gcuuuuguaguacugguac

SEQ ID NO: 1600050 - RNA, 19 nt, Artificial Sequence
  Description of Artificial Sequence: Synthetic oligonucleotide
guuauaauacgccacugcu

SEQ ID NO: 1600051 - RNA, 19 nt, Artificial Sequence
  Description of Artificial Sequence: Synthetic oligonucleotide
uugacuuugaugacacaua

SEQ ID NO: 1600052 - RNA, 19 nt, Artificial Sequence
  Description of Artificial Sequence: Synthetic oligonucleotide
ucagcaauguggagauuug

SEQ ID NO: 1600053 - RNA, 19 nt, Artificial Sequence
  Description of Artificial Sequence: Synthetic oligonucleotide
cuguguaucuagagguggg

SEQ ID NO: 1600054 - RNA, 19 nt, Artificial Sequence
  Description of Artificial Sequence: Synthetic oligonucleotide
uauccacaagcuuuacaca

SEQ ID NO: 1600055 - RNA, 19 nt, Artificial Sequence
  Description of Artificial Sequence: Synthetic oligonucleotide
uucucuguauggauaguuc

SEQ ID NO: 1600056 - RNA, 19 nt, Artificial Sequence
  Description of Artificial Sequence: Synthetic oligonucleotide
ggauaguucgccuuuugug

SEQ ID NO: 1600057 - RNA, 19 nt, Artificial Sequence
  Description of Artificial Sequence: Synthetic oligonucleotide
acaugauugggugugauuu

SEQ ID NO: 1600058 - RNA, 19 nt, Artificial Sequence
  Description of Artificial Sequence: Synthetic oligonucleotide
ucuagaggugggcucuugc

SEQ ID NO: 1600059 - RNA, 19 nt, Artificial Sequence
  Description of Artificial Sequence: Synthetic oligonucleotide
gguguugucuucuagagua

SEQ ID NO: 1600060 - RNA, 19 nt, Artificial Sequence
  Description of Artificial Sequence: Synthetic oligonucleotide
ugauuucuuacaagcuccu

SEQ ID NO: 1600061 - RNA, 19 nt, Artificial Sequence
  Description of Artificial Sequence: Synthetic oligonucleotide
agcauuaaggaaguauuga

SEQ ID NO: 1600062 - RNA, 19 nt, Artificial Sequence
  Description of Artificial Sequence: Synthetic oligonucleotide
uggauaguucgccuuuugu

SEQ ID NO: 1600063 - RNA, 19 nt, Artificial Sequence
  Description of Artificial Sequence: Synthetic oligonucleotide
uuaaacuauuaaggcagga

SEQ ID NO: 1600064 - RNA, 19 nt, Artificial Sequence
  Description of Artificial Sequence: Synthetic oligonucleotide
gaagaagcuggcuguugcc

SEQ ID NO: 1600065 - RNA, 19 nt, Artificial Sequence
  Description of Artificial Sequence: Synthetic oligonucleotide
uuaucuaguuuuaguugaa

SEQ ID NO: 1600066 - RNA, 19 nt, Artificial Sequence
  Description of Artificial Sequence: Synthetic oligonucleotide
agguucauacuucagcuuu

SEQ ID NO: 1600067 - RNA, 19 nt, Artificial Sequence
  Description of Artificial Sequence: Synthetic oligonucleotide
uucgccuuuugugucuucg

SEQ ID NO: 1600068 - RNA, 19 nt, Artificial Sequence
  Description of Artificial Sequence: Synthetic oligonucleotide
uacccuucgaucgaguuuc

SEQ ID NO: 1600069 - RNA, 19 nt, Artificial Sequence
  Description of Artificial Sequence: Synthetic oligonucleotide
aaguugagcuggcauucca

SEQ ID NO: 1600070 - RNA, 19 nt, Artificial Sequence
  Description of Artificial Sequence: Synthetic oligonucleotide
uuuuguaguacugguacuu

SEQ ID NO: 1600071 - RNA, 19 nt, Artificial Sequence
  Description of Artificial Sequence: Synthetic oligonucleotide
ggaggugucuuucauuugc

SEQ ID NO: 1600072 - RNA, 19 nt, Artificial Sequence
  Description of Artificial Sequence: Synthetic oligonucleotide
uucuugcugcuacaaaauc

SEQ ID NO: 1600073 - RNA, 19 nt, Artificial Sequence
  Description of Artificial Sequence: Synthetic oligonucleotide
uuauuucaccauucuucug

SEQ ID NO: 1600074 - RNA, 19 nt, Artificial Sequence
  Description of Artificial Sequence: Synthetic oligonucleotide
uacugguacuuccuauucu

SEQ ID NO: 1600075 - RNA, 19 nt, Artificial Sequence
  Description of Artificial Sequence: Synthetic oligonucleotide
acuauuaaggcaggauucu

SEQ ID NO: 1600076 - RNA, 19 nt, Artificial Sequence
  Description of Artificial Sequence: Synthetic oligonucleotide
uuucuucuuaggcugugua

SEQ ID NO: 1600077 - RNA, 19 nt, Artificial Sequence
  Description of Artificial Sequence: Synthetic oligonucleotide
uguauggauaguucgccuu

SEQ ID NO: 1600078 - RNA, 19 nt, Artificial Sequence
  Description of Artificial Sequence: Synthetic oligonucleotide
aucucuggugaacacauuu

SEQ ID NO: 1600079 - RNA, 19 nt, Artificial Sequence
  Description of Artificial Sequence: Synthetic oligonucleotide
aucaaguugagcuggcauu

SEQ ID NO: 1600080 - RNA, 19 nt, Artificial Sequence
  Description of Artificial Sequence: Synthetic oligonucleotide
ucaaguugagcuggcauuc

SEQ ID NO: 1600081 - RNA, 19 nt, Artificial Sequence
  Description of Artificial Sequence: Synthetic oligonucleotide
acuuaaauuucuccagauu

SEQ ID NO: 1600082 - RNA, 19 nt, Artificial Sequence
  Description of Artificial Sequence: Synthetic oligonucleotide
cuuagauuccguacuuuca

SEQ ID NO: 1600083 - RNA, 19 nt, Artificial Sequence
  Description of Artificial Sequence: Synthetic oligonucleotide
uuccuuuuaagccggucua

SEQ ID NO: 1600084 - RNA, 19 nt, Artificial Sequence
  Description of Artificial Sequence: Synthetic oligonucleotide
ucuguuccaacauggcaaa

SEQ ID NO: 1600085 - RNA, 19 nt, Artificial Sequence
  Description of Artificial Sequence: Synthetic oligonucleotide
cacuuuguucacguaaggc

SEQ ID NO: 1600086 - RNA, 19 nt, Artificial Sequence
  Description of Artificial Sequence: Synthetic oligonucleotide
ggucuugauuuucuauucg

SEQ ID NO: 1600087 - RNA, 19 nt, Artificial Sequence
  Description of Artificial Sequence: Synthetic oligonucleotide
acuauccacaagcuuuaca

SEQ ID NO: 1600088 - RNA, 19 nt, Artificial Sequence
  Description of Artificial Sequence: Synthetic oligonucleotide
uuucuccugcuuuuguagu

SEQ ID NO: 1600089 - RNA, 19 nt, Artificial Sequence
  Description of Artificial Sequence: Synthetic oligonucleotide
ugacugauauuugacuuuc

SEQ ID NO: 1600090 - RNA, 19 nt, Artificial Sequence
  Description of Artificial Sequence: Synthetic oligonucleotide
ugggugugauuucuuacaa

SEQ ID NO: 1600091 - RNA, 19 nt, Artificial Sequence
  Description of Artificial Sequence: Synthetic oligonucleotide
uuaagccggucuaccuggg

SEQ ID NO: 1600092 - RNA, 19 nt, Artificial Sequence
  Description of Artificial Sequence: Synthetic oligonucleotide
gucuugauuuucuauucga

SEQ ID NO: 1600093 - RNA, 19 nt, Artificial Sequence
  Description of Artificial Sequence: Synthetic oligonucleotide
uguguaucuagaggugggc

SEQ ID NO: 1600094 - RNA, 19 nt, Artificial Sequence
  Description of Artificial Sequence: Synthetic oligonucleotide
aguacugguacuuccuauu

SEQ ID NO: 1600095 - RNA, 19 nt, Artificial Sequence
  Description of Artificial Sequence: Synthetic oligonucleotide
ugccucacuacugcugugg

SEQ ID NO: 1600096 - RNA, 19 nt, Artificial Sequence
  Description of Artificial Sequence: Synthetic oligonucleotide
auagcuacccuucgaucga

SEQ ID NO: 1600097 - RNA, 19 nt, Artificial Sequence
  Description of Artificial Sequence: Synthetic oligonucleotide
agacacgcuauugagcaug

SEQ ID NO: 1600098 - RNA, 19 nt, Artificial Sequence
  Description of Artificial Sequence: Synthetic oligonucleotide
ucaccuaaaagguguuuua

SEQ ID NO: 1600099 - RNA, 19 nt, Artificial Sequence
  Description of Artificial Sequence: Synthetic oligonucleotide
uguugucuucuagaguaca

SEQ ID NO: 1600100 - RNA, 19 nt, Artificial Sequence
  Description of Artificial Sequence: Synthetic oligonucleotide
ucuaucuagcuuagcucuc

SEQ ID NO: 1600101 - RNA, 19 nt, Artificial Sequence
  Description of Artificial Sequence: Synthetic oligonucleotide
acugacuggacuauccaca

SEQ ID NO: 1600102 - RNA, 19 nt, Artificial Sequence
  Description of Artificial Sequence: Synthetic oligonucleotide
uacguucaauauccagggc

SEQ ID NO: 1600103 - RNA, 19 nt, Artificial Sequence
  Description of Artificial Sequence: Synthetic oligonucleotide
ucaaucuguagggccagca

SEQ ID NO: 1600104 - RNA, 19 nt, Artificial Sequence
  Description of Artificial Sequence: Synthetic oligonucleotide
ugaaguaaaucugcauaau

SEQ ID NO: 1600105 - RNA, 19 nt, Artificial Sequence
  Description of Artificial Sequence: Synthetic oligonucleotide
ccgguguugacuuugauga

SEQ ID NO: 1600106 - RNA, 19 nt, Artificial Sequence
  Description of Artificial Sequence: Synthetic oligonucleotide
aaggaaguauugaagcauu

SEQ ID NO: 1600107 - RNA, 19 nt, Artificial Sequence
  Description of Artificial Sequence: Synthetic oligonucleotide
gcaaucuagaaacuucuuc

SEQ ID NO: 1600108 - RNA, 19 nt, Artificial Sequence
  Description of Artificial Sequence: Synthetic oligonucleotide
uuuguaguacugguacuuc

SEQ ID NO: 1600109 - RNA, 19 nt, Artificial Sequence
  Description of Artificial Sequence: Synthetic oligonucleotide
uuccauagcuacccuucga

SEQ ID NO: 1600110 - RNA, 19 nt, Artificial Sequence
  Description of Artificial Sequence: Synthetic oligonucleotide
uggugaacacauuuugcuu

SEQ ID NO: 1600111 - RNA, 19 nt, Artificial Sequence
  Description of Artificial Sequence: Synthetic oligonucleotide
cuagaguacaaaggcuggc

SEQ ID NO: 1600112 - RNA, 19 nt, Artificial Sequence
  Description of Artificial Sequence: Synthetic oligonucleotide
uccucugucugaaguggca

SEQ ID NO: 1600113 - RNA, 19 nt, Artificial Sequence
  Description of Artificial Sequence: Synthetic oligonucleotide
agccggucuaccuggguag

SEQ ID NO: 1600114 - RNA, 19 nt, Artificial Sequence
  Description of Artificial Sequence: Synthetic oligonucleotide
ugacuggacuauccacaag

SEQ ID NO: 1600115 - RNA, 19 nt, Artificial Sequence
  Description of Artificial Sequence: Synthetic oligonucleotide
gaggcuggcuggaugaaug

SEQ ID NO: 1600116 - RNA, 19 nt, Artificial Sequence
  Description of Artificial Sequence: Synthetic oligonucleotide
aggcguuauaauacgccac

SEQ ID NO: 1600117 - RNA, 19 nt, Artificial Sequence
  Description of Artificial Sequence: Synthetic oligonucleotide
uugucuucuagaguacaaa

SEQ ID NO: 1600118 - RNA, 19 nt, Artificial Sequence
  Description of Artificial Sequence: Synthetic oligonucleotide
uuguucacguaaggcauca

SEQ ID NO: 1600119 - RNA, 19 nt, Artificial Sequence
  Description of Artificial Sequence: Synthetic oligonucleotide
ggagauuuguaacuucauc

SEQ ID NO: 1600120 - RNA, 19 nt, Artificial Sequence
  Description of Artificial Sequence: Synthetic oligonucleotide
ucaauauccagggcccgcu

SEQ ID NO: 1600121 - RNA, 19 nt, Artificial Sequence
  Description of Artificial Sequence: Synthetic oligonucleotide
caaccguucuugcugcuac

SEQ ID NO: 1600122 - RNA, 19 nt, Artificial Sequence
  Description of Artificial Sequence: Synthetic oligonucleotide
ugcaguuaaccugggagau

SEQ ID NO: 1600123 - RNA, 19 nt, Artificial Sequence
  Description of Artificial Sequence: Synthetic oligonucleotide
uaguacugguacuuccuau

SEQ ID NO: 1600124 - RNA, 19 nt, Artificial Sequence
  Description of Artificial Sequence: Synthetic oligonucleotide
uuugagagucagucuucac

SEQ ID NO: 1600125 - RNA, 19 nt, Artificial Sequence
  Description of Artificial Sequence: Synthetic oligonucleotide
aagccuugauucugcaguu

SEQ ID NO: 1600126 - RNA, 19 nt, Artificial Sequence
  Description of Artificial Sequence: Synthetic oligonucleotide
aagccggucuaccugggua

SEQ ID NO: 1600127 - RNA, 19 nt, Artificial Sequence
  Description of Artificial Sequence: Synthetic oligonucleotide
aggaaguauugaagcauuc

SEQ ID NO: 1600128 - RNA, 19 nt, Artificial Sequence
  Description of Artificial Sequence: Synthetic oligonucleotide
gauugggugugauuucuua

SEQ ID NO: 1600129 - RNA, 19 nt, Artificial Sequence
  Description of Artificial Sequence: Synthetic oligonucleotide
ucgaucgaguuuccuuuac

SEQ ID NO: 1600130 - RNA, 19 nt, Artificial Sequence
  Description of Artificial Sequence: Synthetic oligonucleotide
augauugggugugauuucu

SEQ ID NO: 1600131 - RNA, 19 nt, Artificial Sequence
  Description of Artificial Sequence: Synthetic oligonucleotide
guacugguacuuccuauuc

SEQ ID NO: 1600132 - RNA, 19 nt, Artificial Sequence
  Description of Artificial Sequence: Synthetic oligonucleotide
uaguugcucuuguuuguac

SEQ ID NO: 1600133 - RNA, 19 nt, Artificial Sequence
  Description of Artificial Sequence: Synthetic oligonucleotide
caaucuguagggccagcac

SEQ ID NO: 1600134 - RNA, 19 nt, Artificial Sequence
  Description of Artificial Sequence: Synthetic oligonucleotide
auacgccacugcuuccuuc

SEQ ID NO: 1600135 - RNA, 19 nt, Artificial Sequence
  Description of Artificial Sequence: Synthetic oligonucleotide
guggagauuuguaacuuca

SEQ ID NO: 1600136 - RNA, 19 nt, Artificial Sequence
  Description of Artificial Sequence: Synthetic oligonucleotide
ucuccugcuuuuguaguac

SEQ ID NO: 1600137 - RNA, 19 nt, Artificial Sequence
  Description of Artificial Sequence: Synthetic oligonucleotide
guggaaggcuuagauuccg

SEQ ID NO: 1600138 - RNA, 19 nt, Artificial Sequence
  Description of Artificial Sequence: Synthetic oligonucleotide
gcauuaaggaaguauugaa

SEQ ID NO: 1600139 - RNA, 19 nt, Artificial Sequence
  Description of Artificial Sequence: Synthetic oligonucleotide
acuuucauauaaguacuua

SEQ ID NO: 1600140 - RNA, 19 nt, Artificial Sequence
  Description of Artificial Sequence: Synthetic oligonucleotide
cauucaccucuucuuugag

SEQ ID NO: 1600141 - RNA, 19 nt, Artificial Sequence
  Description of Artificial Sequence: Synthetic oligonucleotide
cuggugaacacauuuugcu

SEQ ID NO: 1600142 - RNA, 19 nt, Artificial Sequence
  Description of Artificial Sequence: Synthetic oligonucleotide
guggcaaucuagaaacuuc

SEQ ID NO: 1600143 - RNA, 19 nt, Artificial Sequence
  Description of Artificial Sequence: Synthetic oligonucleotide
uaguucgccuuuugugucu

SEQ ID NO: 1600144 - RNA, 19 nt, Artificial Sequence
  Description of Artificial Sequence: Synthetic oligonucleotide
cuuuguucacguaaggcau

SEQ ID NO: 1600145 - RNA, 19 nt, Artificial Sequence
  Description of Artificial Sequence: Synthetic oligonucleotide
uagauuccguacuuucaua

SEQ ID NO: 1600146 - RNA, 19 nt, Artificial Sequence
  Description of Artificial Sequence: Synthetic oligonucleotide
uccacaagcuuuacacauu

SEQ ID NO: 1600147 - RNA, 19 nt, Artificial Sequence
  Description of Artificial Sequence: Synthetic oligonucleotide
uaauucuaucuagcuuagc

SEQ ID NO: 1600148 - RNA, 19 nt, Artificial Sequence
  Description of Artificial Sequence: Synthetic oligonucleotide
uucuccugcuuuuguagua

SEQ ID NO: 1600149 - RNA, 19 nt, Artificial Sequence
  Description of Artificial Sequence: Synthetic oligonucleotide
guucaauauccagggcccg

SEQ ID NO: 1600150 - RNA, 19 nt, Artificial Sequence
  Description of Artificial Sequence: Synthetic oligonucleotide
aucugaucucuggugaaca

SEQ ID NO: 1600151 - RNA, 19 nt, Artificial Sequence
  Description of Artificial Sequence: Synthetic oligonucleotide
uucauacuucagcuuuaau

SEQ ID NO: 1600152 - RNA, 19 nt, Artificial Sequence
  Description of Artificial Sequence: Synthetic oligonucleotide
cguucaauauccagggccc

SEQ ID NO: 1600153 - RNA, 19 nt, Artificial Sequence
  Description of Artificial Sequence: Synthetic oligonucleotide
uacaugauugggugugauu

SEQ ID NO: 1600154 - RNA, 19 nt, Artificial Sequence
  Description of Artificial Sequence: Synthetic oligonucleotide
aaccguucuugcugcuaca

SEQ ID NO: 1600155 - RNA, 19 nt, Artificial Sequence
  Description of Artificial Sequence: Synthetic oligonucleotide
uccuuuuaagccggucuac

SEQ ID NO: 1600156 - RNA, 19 nt, Artificial Sequence
  Description of Artificial Sequence: Synthetic oligonucleotide
cuuccauuucaguuuagcu

SEQ ID NO: 1600157 - RNA, 19 nt, Artificial Sequence
  Description of Artificial Sequence: Synthetic oligonucleotide
aacaaccguucuugcugcu

SEQ ID NO: 1600158 - RNA, 19 nt, Artificial Sequence
  Description of Artificial Sequence: Synthetic oligonucleotide
aucuagcuuagcucucagu

SEQ ID NO: 1600159 - RNA, 19 nt, Artificial Sequence
  Description of Artificial Sequence: Synthetic oligonucleotide
gauuccguacuuucauaua

SEQ ID NO: 1600160 - RNA, 19 nt, Artificial Sequence
  Description of Artificial Sequence: Synthetic oligonucleotide
aagacacgcuauugagcau

SEQ ID NO: 1600161 - RNA, 19 nt, Artificial Sequence
  Description of Artificial Sequence: Synthetic oligonucleotide
auuuucuauucgagcuuuc

SEQ ID NO: 1600162 - RNA, 19 nt, Artificial Sequence
  Description of Artificial Sequence: Synthetic oligonucleotide
cuagaggugggcucuugca

SEQ ID NO: 1600163 - RNA, 19 nt, Artificial Sequence
  Description of Artificial Sequence: Synthetic oligonucleotide
cuccucugucugaaguggc

SEQ ID NO: 1600164 - RNA, 19 nt, Artificial Sequence
  Description of Artificial Sequence: Synthetic oligonucleotide
ucuccgguguugacuuuga

SEQ ID NO: 1600165 - RNA, 19 nt, Artificial Sequence
  Description of Artificial Sequence: Synthetic oligonucleotide
guagcauuaaggaaguauu

SEQ ID NO: 1600166 - RNA, 19 nt, Artificial Sequence
  Description of Artificial Sequence: Synthetic oligonucleotide
cguuauaauacgccacugc

SEQ ID NO: 1600167 - RNA, 19 nt, Artificial Sequence
  Description of Artificial Sequence: Synthetic oligonucleotide
cuuaggcuguguaucuaga

SEQ ID NO: 1600168 - RNA, 19 nt, Artificial Sequence
  Description of Artificial Sequence: Synthetic oligonucleotide
gacacgcuauugagcaugc

SEQ ID NO: 1600169 - RNA, 19 nt, Artificial Sequence
  Description of Artificial Sequence: Synthetic oligonucleotide
agucauuauguaauuuauu

SEQ ID NO: 1600170 - RNA, 19 nt, Artificial Sequence
  Description of Artificial Sequence: Synthetic oligonucleotide
uucgaucgaguuuccuuua

SEQ ID NO: 1600171 - RNA, 19 nt, Artificial Sequence
  Description of Artificial Sequence: Synthetic oligonucleotide
gauccgaggcuugcugaag

SEQ ID NO: 1600172 - RNA, 19 nt, Artificial Sequence
  Description of Artificial Sequence: Synthetic oligonucleotide
guauugaagcauucuaguu

SEQ ID NO: 1600173 - RNA, 19 nt, Artificial Sequence
  Description of Artificial Sequence: Synthetic oligonucleotide
gcuuuaauucuaucuagcu

SEQ ID NO: 1600174 - RNA, 19 nt, Artificial Sequence
  Description of Artificial Sequence: Synthetic oligonucleotide
ugauugggugugauuucuu

SEQ ID NO: 1600175 - RNA, 19 nt, Artificial Sequence
  Description of Artificial Sequence: Synthetic oligonucleotide
ugcugugggcacugugucu

SEQ ID NO: 1600176 - RNA, 19 nt, Artificial Sequence
  Description of Artificial Sequence: Synthetic oligonucleotide
gcuggcucucaaauaaugc

SEQ ID NO: 1600177 - RNA, 19 nt, Artificial Sequence
  Description of Artificial Sequence: Synthetic oligonucleotide
cuuugagagucagucuuca

SEQ ID NO: 1600178 - RNA, 19 nt, Artificial Sequence
  Description of Artificial Sequence: Synthetic oligonucleotide
uaagccggucuaccugggu

SEQ ID NO: 1600179 - RNA, 19 nt, Artificial Sequence
  Description of Artificial Sequence: Synthetic oligonucleotide
ucgccuuuugugucuucgu

SEQ ID NO: 1600180 - RNA, 19 nt, Artificial Sequence
  Description of Artificial Sequence: Synthetic oligonucleotide
cugaaguggcaaucuagaa

SEQ ID NO: 1600181 - RNA, 19 nt, Artificial Sequence
  Description of Artificial Sequence: Synthetic oligonucleotide
caaguugagcuggcauucc

SEQ ID NO: 1600182 - RNA, 19 nt, Artificial Sequence
  Description of Artificial Sequence: Synthetic oligonucleotide
ugaaagcuggaggugucuu

SEQ ID NO: 1600183 - RNA, 19 nt, Artificial Sequence
  Description of Artificial Sequence: Synthetic oligonucleotide
caguuuagcucaaucugua

SEQ ID NO: 1600184 - RNA, 19 nt, Artificial Sequence
  Description of Artificial Sequence: Synthetic oligonucleotide
agcucucaguuugauauuu

SEQ ID NO: 1600185 - RNA, 19 nt, Artificial Sequence
  Description of Artificial Sequence: Synthetic oligonucleotide
gcuauugagcaugcgcugc

SEQ ID NO: 1600186 - RNA, 19 nt, Artificial Sequence
  Description of Artificial Sequence: Synthetic oligonucleotide
gugaacacauuuugcuucu

SEQ ID NO: 1600187 - RNA, 19 nt, Artificial Sequence
  Description of Artificial Sequence: Synthetic oligonucleotide
guugccacuguccagcauu

SEQ ID NO: 1600188 - RNA, 19 nt, Artificial Sequence
  Description of Artificial Sequence: Synthetic oligonucleotide
gguacuuccuauucucucu

SEQ ID NO: 1600189 - RNA, 19 nt, Artificial Sequence
  Description of Artificial Sequence: Synthetic oligonucleotide
uguucacguaaggcaucag

SEQ ID NO: 1600190 - RNA, 19 nt, Artificial Sequence
  Description of Artificial Sequence: Synthetic oligonucleotide
cugacuggacuauccacaa

SEQ ID NO: 1600191 - RNA, 19 nt, Artificial Sequence
  Description of Artificial Sequence: Synthetic oligonucleotide
guaguacugguacuuccua

SEQ ID NO: 1600192 - RNA, 19 nt, Artificial Sequence
  Description of Artificial Sequence: Synthetic oligonucleotide
gaggugucuuucauuugca

SEQ ID NO: 1600193 - RNA, 19 nt, Artificial Sequence
  Description of Artificial Sequence: Synthetic oligonucleotide
uagcuacccuucgaucgag

SEQ ID NO: 1600194 - RNA, 19 nt, Artificial Sequence
  Description of Artificial Sequence: Synthetic oligonucleotide
uauggauaguucgccuuuu

SEQ ID NO: 1600195 - RNA, 19 nt, Artificial Sequence
  Description of Artificial Sequence: Synthetic oligonucleotide
auguggagauuuguaacuu

SEQ ID NO: 1600196 - RNA, 19 nt, Artificial Sequence
  Description of Artificial Sequence: Synthetic oligonucleotide
caguuaaccugggagaucu

SEQ ID NO: 1600197 - RNA, 19 nt, Artificial Sequence
  Description of Artificial Sequence: Synthetic oligonucleotide
aggcuuagauuccguacuu

SEQ ID NO: 1600198 - RNA, 19 nt, Artificial Sequence
  Description of Artificial Sequence: Synthetic oligonucleotide
cuuagcucucaguuugaua

SEQ ID NO: 1600199 - RNA, 19 nt, Artificial Sequence
  Description of Artificial Sequence: Synthetic oligonucleotide
cuauucgagcuuucucuaa

SEQ ID NO: 1600200 - RNA, 19 nt, Artificial Sequence
  Description of Artificial Sequence: Synthetic oligonucleotide
cuccgaagacacgcuauug

SEQ ID NO: 1600201 - RNA, 19 nt, Artificial Sequence
  Description of Artificial Sequence: Synthetic oligonucleotide
cuucgaucgaguuuccuuu

SEQ ID NO: 1600202 - RNA, 19 nt, Artificial Sequence
  Description of Artificial Sequence: Synthetic oligonucleotide
caagcuuuacacauuucuu

SEQ ID NO: 1600203 - RNA, 19 nt, Artificial Sequence
  Description of Artificial Sequence: Synthetic oligonucleotide
cccuaguagcaucaauagc

SEQ ID NO: 1600204 - RNA, 19 nt, Artificial Sequence
  Description of Artificial Sequence: Synthetic oligonucleotide
cugaucucuggugaacaca

SEQ ID NO: 1600205 - RNA, 19 nt, Artificial Sequence
  Description of Artificial Sequence: Synthetic oligonucleotide
auacaugauugggugugau

SEQ ID NO: 1600206 - RNA, 19 nt, Artificial Sequence
  Description of Artificial Sequence: Synthetic oligonucleotide
ggugggcucuugcaaggag

SEQ ID NO: 1600207 - RNA, 19 nt, Artificial Sequence
  Description of Artificial Sequence: Synthetic oligonucleotide
gguguuuuauuucaccauu

SEQ ID NO: 1600208 - RNA, 19 nt, Artificial Sequence
  Description of Artificial Sequence: Synthetic oligonucleotide
gguagcauuaaggaaguau

SEQ ID NO: 1600209 - RNA, 19 nt, Artificial Sequence
  Description of Artificial Sequence: Synthetic oligonucleotide
cuucuuugagagucagucu

SEQ ID NO: 1600210 - RNA, 19 nt, Artificial Sequence
  Description of Artificial Sequence: Synthetic oligonucleotide
guacugcaguucauucacc

SEQ ID NO: 1600211 - RNA, 19 nt, Artificial Sequence
  Description of Artificial Sequence: Synthetic oligonucleotide
uagcucucaguuugauauu

SEQ ID NO: 1600212 - RNA, 19 nt, Artificial Sequence
  Description of Artificial Sequence: Synthetic oligonucleotide
gugucuucguuuucuuugu

SEQ ID NO: 1600213 - RNA, 19 nt, Artificial Sequence
  Description of Artificial Sequence: Synthetic oligonucleotide
uguugccacuguccagcau

SEQ ID NO: 1600214 - RNA, 19 nt, Artificial Sequence
  Description of Artificial Sequence: Synthetic oligonucleotide
gcucuugcaaggagagagg

SEQ ID NO: 1600215 - RNA, 19 nt, Artificial Sequence
  Description of Artificial Sequence: Synthetic oligonucleotide
gccucacuacugcuguggg

SEQ ID NO: 1600216 - RNA, 19 nt, Artificial Sequence
  Description of Artificial Sequence: Synthetic oligonucleotide
ggcguuauaauacgccacu

SEQ ID NO: 1600217 - RNA, 19 nt, Artificial Sequence
  Description of Artificial Sequence: Synthetic oligonucleotide
gacuauccacaagcuuuac

SEQ ID NO: 1600218 - RNA, 19 nt, Artificial Sequence
  Description of Artificial Sequence: Synthetic oligonucleotide
guacaaaggcuggcugaug

SEQ ID NO: 1600219 - RNA, 19 nt, Artificial Sequence
  Description of Artificial Sequence: Synthetic oligonucleotide
agcaucaauagcagcuguu

SEQ ID NO: 1600220 - RNA, 19 nt, Artificial Sequence
  Description of Artificial Sequence: Synthetic oligonucleotide
guguugucuucuagaguac

SEQ ID NO: 1600221 - RNA, 19 nt, Artificial Sequence
  Description of Artificial Sequence: Synthetic oligonucleotide
caguucauucaccucuucu

SEQ ID NO: 1600222 - RNA, 19 nt, Artificial Sequence
  Description of Artificial Sequence: Synthetic oligonucleotide
acacgcuauugagcaugcg

SEQ ID NO: 1600223 - RNA, 19 nt, Artificial Sequence
  Description of Artificial Sequence: Synthetic oligonucleotide
guauggauaguucgccuuu

SEQ ID NO: 1600224 - RNA, 19 nt, Artificial Sequence
  Description of Artificial Sequence: Synthetic oligonucleotide
caucaaguugagcuggcau

SEQ ID NO: 1600225 - RNA, 19 nt, Artificial Sequence
  Description of Artificial Sequence: Synthetic oligonucleotide
cacauacaugauugggugu

SEQ ID NO: 1600226 - RNA, 19 nt, Artificial Sequence
  Description of Artificial Sequence: Synthetic oligonucleotide
accguucuugcugcuacaa

SEQ ID NO: 1600227 - RNA, 19 nt, Artificial Sequence
  Description of Artificial Sequence: Synthetic oligonucleotide
cuagcuuagcucucaguuu

SEQ ID NO: 1600228 - RNA, 19 nt, Artificial Sequence
  Description of Artificial Sequence: Synthetic oligonucleotide
cucaaucuguagggccagc

SEQ ID NO: 1600229 - RNA, 19 nt, Artificial Sequence
  Description of Artificial Sequence: Synthetic oligonucleotide
ggcacugugucuccggugu

SEQ ID NO: 1600230 - RNA, 19 nt, Artificial Sequence
  Description of Artificial Sequence: Synthetic oligonucleotide
cuguauggauaguucgccu

SEQ ID NO: 1600231 - RNA, 19 nt, Artificial Sequence
  Description of Artificial Sequence: Synthetic oligonucleotide
ccauagcuacccuucgauc

SEQ ID NO: 1600232 - RNA, 19 nt, Artificial Sequence
  Description of Artificial Sequence: Synthetic oligonucleotide
cgaguuuccuuuacugcug

SEQ ID NO: 1600233 - RNA, 19 nt, Artificial Sequence
  Description of Artificial Sequence: Synthetic oligonucleotide
aucuagaggugggcucuug

SEQ ID NO: 1600234 - RNA, 19 nt, Artificial Sequence
  Description of Artificial Sequence: Synthetic oligonucleotide
gcaaacaaccguucuugcu

SEQ ID NO: 1600235 - RNA, 19 nt, Artificial Sequence
  Description of Artificial Sequence: Synthetic oligonucleotide
cagcaccuccgaagacacg

SEQ ID NO: 1600236 - RNA, 19 nt, Artificial Sequence
  Description of Artificial Sequence: Synthetic oligonucleotide
gcguuauaauacgccacug

SEQ ID NO: 1600237 - RNA, 19 nt, Artificial Sequence
  Description of Artificial Sequence: Synthetic oligonucleotide
guguaucuagaggugggcu

SEQ ID NO: 1600238 - RNA, 19 nt, Artificial Sequence
  Description of Artificial Sequence: Synthetic oligonucleotide
gcauaauagguguugucuu

SEQ ID NO: 1600239 - RNA, 19 nt, Artificial Sequence
  Description of Artificial Sequence: Synthetic oligonucleotide
accuccgaagacacgcuau

SEQ ID NO: 1600240 - RNA, 19 nt, Artificial Sequence
  Description of Artificial Sequence: Synthetic oligonucleotide
acaaccguucuugcugcua

SEQ ID NO: 1600241 - RNA, 19 nt, Artificial Sequence
  Description of Artificial Sequence: Synthetic oligonucleotide
acccuucgaucgaguuucc

SEQ ID NO: 1600242 - RNA, 19 nt, Artificial Sequence
  Description of Artificial Sequence: Synthetic oligonucleotide
ccguacuuucauauaagua

SEQ ID NO: 1600243 - RNA, 19 nt, Artificial Sequence
  Description of Artificial Sequence: Synthetic oligonucleotide
aguuaaccugggagaucug

SEQ ID NO: 1600244 - RNA, 19 nt, Artificial Sequence
  Description of Artificial Sequence: Synthetic oligonucleotide
caaacaguuuacguucaau

SEQ ID NO: 1600245 - RNA, 19 nt, Artificial Sequence
  Description of Artificial Sequence: Synthetic oligonucleotide
cccgcuggcucucaaauaa

SEQ ID NO: 1600246 - RNA, 19 nt, Artificial Sequence
  Description of Artificial Sequence: Synthetic oligonucleotide
cauucuaguugcucuuguu

SEQ ID NO: 1600247 - RNA, 19 nt, Artificial Sequence
  Description of Artificial Sequence: Synthetic oligonucleotide
aguucgccuuuugugucuu

SEQ ID NO: 1600248 - RNA, 19 nt, Artificial Sequence
  Description of Artificial Sequence: Synthetic oligonucleotide
aggugggcucuugcaagga

SEQ ID NO: 1600249 - RNA, 19 nt, Artificial Sequence
  Description of Artificial Sequence: Synthetic oligonucleotide
ggacuauccacaagcuuua

SEQ ID NO: 1600250 - RNA, 19 nt, Artificial Sequence
  Description of Artificial Sequence: Synthetic oligonucleotide
caucagcacugacuggacu

SEQ ID NO: 1600251 - RNA, 19 nt, Artificial Sequence
  Description of Artificial Sequence: Synthetic oligonucleotide
caguuugagauccccucau

SEQ ID NO: 1600252 - RNA, 19 nt, Artificial Sequence
  Description of Artificial Sequence: Synthetic oligonucleotide
cgcuauugagcaugcgcug

SEQ ID NO: 1600253 - RNA, 19 nt, Artificial Sequence
  Description of Artificial Sequence: Synthetic oligonucleotide
caccuaaaagguguuuuau

SEQ ID NO: 1600254 - RNA, 19 nt, Artificial Sequence
  Description of Artificial Sequence: Synthetic oligonucleotide
cugcaccugaaggucuuga

SEQ ID NO: 1600255 - RNA, 19 nt, Artificial Sequence
  Description of Artificial Sequence: Synthetic oligonucleotide
gcaaacaguuuacguucaa

SEQ ID NO: 1600256 - RNA, 19 nt, Artificial Sequence
  Description of Artificial Sequence: Synthetic oligonucleotide
cuacccuucgaucgaguuu

SEQ ID NO: 1600257 - RNA, 19 nt, Artificial Sequence
  Description of Artificial Sequence: Synthetic oligonucleotide
agcuuucucuaaggcguua

SEQ ID NO: 1600258 - RNA, 19 nt, Artificial Sequence
  Description of Artificial Sequence: Synthetic oligonucleotide
gcauucuaguugcucuugu

SEQ ID NO: 1600259 - RNA, 19 nt, Artificial Sequence
  Description of Artificial Sequence: Synthetic oligonucleotide
gcaguuaaccugggagauc

SEQ ID NO: 1600260 - RNA, 19 nt, Artificial Sequence
  Description of Artificial Sequence: Synthetic oligonucleotide
cagguucauacuucagcuu

SEQ ID NO: 1600261 - RNA, 19 nt, Artificial Sequence
  Description of Artificial Sequence: Synthetic oligonucleotide
gcaucagcacugacuggac

SEQ ID NO: 1600262 - RNA, 19 nt, Artificial Sequence
  Description of Artificial Sequence: Synthetic oligonucleotide
gcuuuacacauuucuucuu

SEQ ID NO: 1600263 - RNA, 19 nt, Artificial Sequence
  Description of Artificial Sequence: Synthetic oligonucleotide
cugaaagcuggaggugucu

SEQ ID NO: 1600264 - RNA, 19 nt, Artificial Sequence
  Description of Artificial Sequence: Synthetic oligonucleotide
cagcaauguggagauuugu

SEQ ID NO: 1600265 - RNA, 19 nt, Artificial Sequence
  Description of Artificial Sequence: Synthetic oligonucleotide
caccuccgaagacacgcua

SEQ ID NO: 1600266 - RNA, 19 nt, Artificial Sequence
  Description of Artificial Sequence: Synthetic oligonucleotide
ggcucucaaauaaugccuu

SEQ ID NO: 1600267 - RNA, 19 nt, Artificial Sequence
  Description of Artificial Sequence: Synthetic oligonucleotide
ccuucgaucgaguuuccuu

SEQ ID NO: 1600268 - RNA, 19 nt, Artificial Sequence
  Description of Artificial Sequence: Synthetic oligonucleotide
cauucucuguauggauagu

SEQ ID NO: 1600269 - RNA, 19 nt, Artificial Sequence
  Description of Artificial Sequence: Synthetic oligonucleotide
gcuacccuucgaucgaguu

SEQ ID NO: 1600270 - RNA, 19 nt, Artificial Sequence
  Description of Artificial Sequence: Synthetic oligonucleotide
ccuauucucucuucagguu

SEQ ID NO: 1600271 - RNA, 19 nt, Artificial Sequence
  Description of Artificial Sequence: Synthetic oligonucleotide
agggcccgcuggcucucaa

SEQ ID NO: 1600272 - RNA, 19 nt, Artificial Sequence
  Description of Artificial Sequence: Synthetic oligonucleotide
gcuuucucuaaggcguuau

SEQ ID NO: 1600273 - RNA, 19 nt, Artificial Sequence
  Description of Artificial Sequence: Synthetic oligonucleotide
gggguguuuccacuuuguu

SEQ ID NO: 1600274 - RNA, 19 nt, Artificial Sequence
  Description of Artificial Sequence: Synthetic oligonucleotide
ggcaaucuagaaacuucuu

SEQ ID NO: 1600275 - RNA, 19 nt, Artificial Sequence
  Description of Artificial Sequence: Synthetic oligonucleotide
gcuugcugaagugcguuuu

SEQ ID NO: 1600276 - RNA, 19 nt, Artificial Sequence
  Description of Artificial Sequence: Synthetic oligonucleotide
ccguucuugcugcuacaaa

SEQ ID NO: 1600277 - RNA, 19 nt, Artificial Sequence
  Description of Artificial Sequence: Synthetic oligonucleotide
ggcuugcugaagugcguuu

SEQ ID NO: 1600278 - RNA, 19 nt, Artificial Sequence
  Description of Artificial Sequence: Synthetic oligonucleotide
gcuuagcucucaguuugau

SEQ ID NO: 1600279 - RNA, 19 nt, Artificial Sequence
  Description of Artificial Sequence: Synthetic oligonucleotide
ggcuuagauuccguacuuu

SEQ ID NO: 1600280 - RNA, 19 nt, Artificial Sequence
  Description of Artificial Sequence: Synthetic oligonucleotide
cuccgguguugacuuugau

SEQ ID NO: 1600281 - RNA, 19 nt, Artificial Sequence
  Description of Artificial Sequence: Synthetic oligonucleotide
gggcccgcuggcucucaaa

SEQ ID NO: 1600282 - RNA, 19 nt, Artificial Sequence
  Description of Artificial Sequence: Synthetic oligonucleotide
ccuccgaagacacgcuauu

SEQ ID NO: 1600283 - RNA, 19 nt, Artificial Sequence
  Description of Artificial Sequence: Synthetic oligonucleotide
ggguagcauuaaggaagua

SEQ ID NO: 1600284 - RNA, 19 nt, Artificial Sequence
  Description of Artificial Sequence: Synthetic oligonucleotide
ccggucuaccuggguagca

SEQ ID NO: 1600285 - RNA, 19 nt, Artificial Sequence
  Description of Artificial Sequence: Synthetic oligonucleotide
gcaccuccgaagacacgcu

SEQ ID NO: 1600286 - RNA, 19 nt, Artificial Sequence
  Description of Artificial Sequence: Synthetic oligonucleotide
cgccuuuugugucuucguu

SEQ ID NO: 1600287 - RNA, 19 nt, Artificial Sequence
  Description of Artificial Sequence: Synthetic oligonucleotide
ccgcuggcucucaaauaau

SEQ ID NO: 1600288 - RNA, 19 nt, Artificial Sequence
  Description of Artificial Sequence: Synthetic oligonucleotide
cccuucgaucgaguuuccu

SEQ ID NO: 1600289 - RNA, 19 nt, Artificial Sequence
  Description of Artificial Sequence: Synthetic oligonucleotide
aauuucauggguuaguuca

SEQ ID NO: 1600290 - RNA, 19 nt, Artificial Sequence
  Description of Artificial Sequence: Synthetic oligonucleotide
aacaaguagauucauuagg

SEQ ID NO: 1600291 - RNA, 19 nt, Artificial Sequence
  Description of Artificial Sequence: Synthetic oligonucleotide
uguuuagucacacuuuggg

SEQ ID NO: 1600292 - RNA, 19 nt, Artificial Sequence
  Description of Artificial Sequence: Synthetic oligonucleotide
ucaaacuaacauaaugacg

SEQ ID NO: 1600293 - RNA, 19 nt, Artificial Sequence
  Description of Artificial Sequence: Synthetic oligonucleotide
aauaguuuagaaauauggg

SEQ ID NO: 1600294 - RNA, 19 nt, Artificial Sequence
  Description of Artificial Sequence: Synthetic oligonucleotide
uucaaauugaccccaaagc

SEQ ID NO: 1600295 - RNA, 19 nt, Artificial Sequence
  Description of Artificial Sequence: Synthetic oligonucleotide
aacauaaugacgaaugaag

SEQ ID NO: 1600296 - RNA, 19 nt, Artificial Sequence
  Description of Artificial Sequence: Synthetic oligonucleotide
auuaugauacaacacacug

SEQ ID NO: 1600297 - RNA, 19 nt, Artificial Sequence
  Description of Artificial Sequence: Synthetic oligonucleotide
cuaagaaugacaucggggc

SEQ ID NO: 1600298 - RNA, 19 nt, Artificial Sequence
  Description of Artificial Sequence: Synthetic oligonucleotide
caaacuaacauaaugacga

SEQ ID NO: 1600299 - RNA, 19 nt, Artificial Sequence
  Description of Artificial Sequence: Synthetic oligonucleotide
aaucaagucauccaaacua

SEQ ID NO: 1600300 - RNA, 19 nt, Artificial Sequence
  Description of Artificial Sequence: Synthetic oligonucleotide
uuaugauacaacacacugg

SEQ ID NO: 1600301 - RNA, 19 nt, Artificial Sequence
  Description of Artificial Sequence: Synthetic oligonucleotide
uuucuugugucuuacgagg

SEQ ID NO: 1600302 - RNA, 19 nt, Artificial Sequence
  Description of Artificial Sequence: Synthetic oligonucleotide
ucaacuauuugucuugaag

SEQ ID NO: 1600303 - RNA, 19 nt, Artificial Sequence
  Description of Artificial Sequence: Synthetic oligonucleotide
aacuuaugauagcaaauuc

SEQ ID NO: 1600304 - RNA, 19 nt, Artificial Sequence
  Description of Artificial Sequence: Synthetic oligonucleotide
auaguuuagaaauauggga

SEQ ID NO: 1600305 - RNA, 19 nt, Artificial Sequence
  Description of Artificial Sequence: Synthetic oligonucleotide
aauuaauuguucaggaauc

SEQ ID NO: 1600306 - RNA, 19 nt, Artificial Sequence
  Description of Artificial Sequence: Synthetic oligonucleotide
ugaauuuuaugcuccaugc

SEQ ID NO: 1600307 - RNA, 19 nt, Artificial Sequence
  Description of Artificial Sequence: Synthetic oligonucleotide
uuucaaauugaccccaaag

SEQ ID NO: 1600308 - RNA, 19 nt, Artificial Sequence
  Description of Artificial Sequence: Synthetic oligonucleotide
auagcaaauucauuaacag

SEQ ID NO: 1600309 - RNA, 19 nt, Artificial Sequence
  Description of Artificial Sequence: Synthetic oligonucleotide
ugggcuaacaaguagauuc

SEQ ID NO: 1600310 - RNA, 19 nt, Artificial Sequence
  Description of Artificial Sequence: Synthetic oligonucleotide
agagcucacacacacacac

SEQ ID NO: 1600311 - RNA, 19 nt, Artificial Sequence
  Description of Artificial Sequence: Synthetic oligonucleotide
uaguuuagaaauaugggaa

SEQ ID NO: 1600312 - RNA, 19 nt, Artificial Sequence
  Description of Artificial Sequence: Synthetic oligonucleotide
aaacacaaaagaaucagug

SEQ ID NO: 1600313 - RNA, 19 nt, Artificial Sequence
  Description of Artificial Sequence: Synthetic oligonucleotide
uaggaauaggcuuaaauaa

SEQ ID NO: 1600314 - RNA, 19 nt, Artificial Sequence
  Description of Artificial Sequence: Synthetic oligonucleotide
gaaggcacaucccugaugc

SEQ ID NO: 1600315 - RNA, 19 nt, Artificial Sequence
  Description of Artificial Sequence: Synthetic oligonucleotide
uuaggaauaggcuuaaaua

SEQ ID NO: 1600316 - RNA, 19 nt, Artificial Sequence
  Description of Artificial Sequence: Synthetic oligonucleotide
cacacacacacacagaucc

SEQ ID NO: 1600317 - RNA, 19 nt, Artificial Sequence
  Description of Artificial Sequence: Synthetic oligonucleotide
uccucaaacuaacauaaug

SEQ ID NO: 1600318 - RNA, 19 nt, Artificial Sequence
  Description of Artificial Sequence: Synthetic oligonucleotide
uuucguaugguccacucug

SEQ ID NO: 1600319 - RNA, 19 nt, Artificial Sequence
  Description of Artificial Sequence: Synthetic oligonucleotide
aaguagauucauuagggaa

SEQ ID NO: 1600320 - RNA, 19 nt, Artificial Sequence
  Description of Artificial Sequence: Synthetic oligonucleotide
ucuuuuaugagcugguuuc

SEQ ID NO: 1600321 - RNA, 19 nt, Artificial Sequence
  Description of Artificial Sequence: Synthetic oligonucleotide
auaaugacgaaugaagcag

SEQ ID NO: 1600322 - RNA, 19 nt, Artificial Sequence
  Description of Artificial Sequence: Synthetic oligonucleotide
ggcacuaagaaugacaucg

SEQ ID NO: 1600323 - RNA, 19 nt, Artificial Sequence
  Description of Artificial Sequence: Synthetic oligonucleotide
aauuguucaggaaucagug

SEQ ID NO: 1600324 - RNA, 19 nt, Artificial Sequence
  Description of Artificial Sequence: Synthetic oligonucleotide
aaagcuaaauuugugggca

SEQ ID NO: 1600325 - RNA, 19 nt, Artificial Sequence
  Description of Artificial Sequence: Synthetic oligonucleotide
uuuaggaauaggcuuaaau

SEQ ID NO: 1600326 - RNA, 19 nt, Artificial Sequence
  Description of Artificial Sequence: Synthetic oligonucleotide
auauuaugauacaacacac

SEQ ID NO: 1600327 - RNA, 19 nt, Artificial Sequence
  Description of Artificial Sequence: Synthetic oligonucleotide
aaguuuuaggaauaggcuu

SEQ ID NO: 1600328 - RNA, 19 nt, Artificial Sequence
  Description of Artificial Sequence: Synthetic oligonucleotide
acauaaugacgaaugaagc

SEQ ID NO: 1600329 - RNA, 19 nt, Artificial Sequence
  Description of Artificial Sequence: Synthetic oligonucleotide
aaaguuuuaggaauaggcu

SEQ ID NO: 1600330 - RNA, 19 nt, Artificial Sequence
  Description of Artificial Sequence: Synthetic oligonucleotide
cauggguuaguucaggacc

SEQ ID NO: 1600331 - RNA, 19 nt, Artificial Sequence
  Description of Artificial Sequence: Synthetic oligonucleotide
acaaguagauucauuaggg

SEQ ID NO: 1600332 - RNA, 19 nt, Artificial Sequence
  Description of Artificial Sequence: Synthetic oligonucleotide
acuaacauaaugacgaaug

SEQ ID NO: 1600333 - RNA, 19 nt, Artificial Sequence
  Description of Artificial Sequence: Synthetic oligonucleotide
aaaacguuguuccacgcau

SEQ ID NO: 1600334 - RNA, 19 nt, Artificial Sequence
  Description of Artificial Sequence: Synthetic oligonucleotide
gaagagcucacacacacac

SEQ ID NO: 1600335 - RNA, 19 nt, Artificial Sequence
  Description of Artificial Sequence: Synthetic oligonucleotide
aauuugccuuaauaugauc

SEQ ID NO: 1600336 - RNA, 19 nt, Artificial Sequence
  Description of Artificial Sequence: Synthetic oligonucleotide
aagugcuuucguauggucc

SEQ ID NO: 1600337 - RNA, 19 nt, Artificial Sequence
  Description of Artificial Sequence: Synthetic oligonucleotide
agcucacacacacacacac

SEQ ID NO: 1600338 - RNA, 19 nt, Artificial Sequence
  Description of Artificial Sequence: Synthetic oligonucleotide
gaaguuagaagugcuuucg

SEQ ID NO: 1600339 - RNA, 19 nt, Artificial Sequence
  Description of Artificial Sequence: Synthetic oligonucleotide
gaaucaguguaacaucgag

SEQ ID NO: 1600340 - RNA, 19 nt, Artificial Sequence
  Description of Artificial Sequence: Synthetic oligonucleotide
auuuuaugcuccaugcccc

SEQ ID NO: 1600341 - RNA, 19 nt, Artificial Sequence
  Description of Artificial Sequence: Synthetic oligonucleotide
cucaaacuaacauaaugac

SEQ ID NO: 1600342 - RNA, 19 nt, Artificial Sequence
  Description of Artificial Sequence: Synthetic oligonucleotide
uccaaacuaaugagcacgg

SEQ ID NO: 1600343 - RNA, 19 nt, Artificial Sequence
  Description of Artificial Sequence: Synthetic oligonucleotide
aaucaguguaacaucgagg

SEQ ID NO: 1600344 - RNA, 19 nt, Artificial Sequence
  Description of Artificial Sequence: Synthetic oligonucleotide
acucuggucauuaagcuac

SEQ ID NO: 1600345 - RNA, 19 nt, Artificial Sequence
  Description of Artificial Sequence: Synthetic oligonucleotide
acuauuugucuugaagagc

SEQ ID NO: 1600346 - RNA, 19 nt, Artificial Sequence
  Description of Artificial Sequence: Synthetic oligonucleotide
auccaaacuaaugagcacg

SEQ ID NO: 1600347 - RNA, 19 nt, Artificial Sequence
  Description of Artificial Sequence: Synthetic oligonucleotide
augaauuuuaugcuccaug

SEQ ID NO: 1600348 - RNA, 19 nt, Artificial Sequence
  Description of Artificial Sequence: Synthetic oligonucleotide
uggucauuaagcuacacuu

SEQ ID NO: 1600349 - RNA, 19 nt, Artificial Sequence
  Description of Artificial Sequence: Synthetic oligonucleotide
aacggccuugucccaaucc

SEQ ID NO: 1600350 - RNA, 19 nt, Artificial Sequence
  Description of Artificial Sequence: Synthetic oligonucleotide
ucaggaaucaguguaacau

SEQ ID NO: 1600351 - RNA, 19 nt, Artificial Sequence
  Description of Artificial Sequence: Synthetic oligonucleotide
acuaagaaugacaucgggg

SEQ ID NO: 1600352 - RNA, 19 nt, Artificial Sequence
  Description of Artificial Sequence: Synthetic oligonucleotide
ugacugauaaugaauuaaa

SEQ ID NO: 1600353 - RNA, 19 nt, Artificial Sequence
  Description of Artificial Sequence: Synthetic oligonucleotide
gauagcaaauucauuaaca

SEQ ID NO: 1600354 - RNA, 19 nt, Artificial Sequence
  Description of Artificial Sequence: Synthetic oligonucleotide
uuuaaccagauuuaagauu

SEQ ID NO: 1600355 - RNA, 19 nt, Artificial Sequence
  Description of Artificial Sequence: Synthetic oligonucleotide
uuugcaguucauuagugau

SEQ ID NO: 1600356 - RNA, 19 nt, Artificial Sequence
  Description of Artificial Sequence: Synthetic oligonucleotide
agaauuugccuuaauauga

SEQ ID NO: 1600357 - RNA, 19 nt, Artificial Sequence
  Description of Artificial Sequence: Synthetic oligonucleotide
gaauuuuaugcuccaugcc

SEQ ID NO: 1600358 - RNA, 19 nt, Artificial Sequence
  Description of Artificial Sequence: Synthetic oligonucleotide
acugcuagaaugcugacuu

SEQ ID NO: 1600359 - RNA, 19 nt, Artificial Sequence
  Description of Artificial Sequence: Synthetic oligonucleotide
uguaacaucgaggcacucg

SEQ ID NO: 1600360 - RNA, 19 nt, Artificial Sequence
  Description of Artificial Sequence: Synthetic oligonucleotide
aaacuuaugauagcaaauu

SEQ ID NO: 1600361 - RNA, 19 nt, Artificial Sequence
  Description of Artificial Sequence: Synthetic oligonucleotide
cuaacaaguagauucauua

SEQ ID NO: 1600362 - RNA, 19 nt, Artificial Sequence
  Description of Artificial Sequence: Synthetic oligonucleotide
auaggcuuaaauaauacau

SEQ ID NO: 1600363 - RNA, 19 nt, Artificial Sequence
  Description of Artificial Sequence: Synthetic oligonucleotide
uaugagcugguuucuuugg

SEQ ID NO: 1600364 - RNA, 19 nt, Artificial Sequence
  Description of Artificial Sequence: Synthetic oligonucleotide
uguguccgaaggcacaucc

SEQ ID NO: 1600365 - RNA, 19 nt, Artificial Sequence
  Description of Artificial Sequence: Synthetic oligonucleotide
gugagcauguguccgaagg

SEQ ID NO: 1600366 - RNA, 19 nt, Artificial Sequence
  Description of Artificial Sequence: Synthetic oligonucleotide
cacacacacacacacacag

SEQ ID NO: 1600367 - RNA, 19 nt, Artificial Sequence
  Description of Artificial Sequence: Synthetic oligonucleotide
cuuucuugugucuuacgag

SEQ ID NO: 1600368 - RNA, 19 nt, Artificial Sequence
  Description of Artificial Sequence: Synthetic oligonucleotide
acuuucuugugucuuacga

SEQ ID NO: 1600369 - RNA, 19 nt, Artificial Sequence
  Description of Artificial Sequence: Synthetic oligonucleotide
ggcaauucugacaagaaag

SEQ ID NO: 1600370 - RNA, 19 nt, Artificial Sequence
  Description of Artificial Sequence: Synthetic oligonucleotide
gaaaaggcucuccucaaac

SEQ ID NO: 1600371 - RNA, 19 nt, Artificial Sequence
  Description of Artificial Sequence: Synthetic oligonucleotide
cucacacacacacacacac

SEQ ID NO: 1600372 - RNA, 19 nt, Artificial Sequence
  Description of Artificial Sequence: Synthetic oligonucleotide
aggaaucaguguaacaucg

SEQ ID NO: 1600373 - RNA, 19 nt, Artificial Sequence
  Description of Artificial Sequence: Synthetic oligonucleotide
uaaucuuuuaugagcuggu

SEQ ID NO: 1600374 - RNA, 19 nt, Artificial Sequence
  Description of Artificial Sequence: Synthetic oligonucleotide
auaugggaauuaaauaauc

SEQ ID NO: 1600375 - RNA, 19 nt, Artificial Sequence
  Description of Artificial Sequence: Synthetic oligonucleotide
gauucccuuacucaauuuc

SEQ ID NO: 1600376 - RNA, 19 nt, Artificial Sequence
  Description of Artificial Sequence: Synthetic oligonucleotide
gaugccuagugccuacggg

SEQ ID NO: 1600377 - RNA, 19 nt, Artificial Sequence
  Description of Artificial Sequence: Synthetic oligonucleotide
acggccuugucccaauccc

SEQ ID NO: 1600378 - RNA, 19 nt, Artificial Sequence
  Description of Artificial Sequence: Synthetic oligonucleotide
agugcuuucguauggucca

SEQ ID NO: 1600379 - RNA, 19 nt, Artificial Sequence
  Description of Artificial Sequence: Synthetic oligonucleotide
cuaucuugcacagacauga

SEQ ID NO: 1600380 - RNA, 19 nt, Artificial Sequence
  Description of Artificial Sequence: Synthetic oligonucleotide
uugcuacugacacuucucc

SEQ ID NO: 1600381 - RNA, 19 nt, Artificial Sequence
  Description of Artificial Sequence: Synthetic oligonucleotide
cacacacacacacacacac

SEQ ID NO: 1600382 - RNA, 19 nt, Artificial Sequence
  Description of Artificial Sequence: Synthetic oligonucleotide
uaaugacgaaugaagcagu

SEQ ID NO: 1600383 - RNA, 19 nt, Artificial Sequence
  Description of Artificial Sequence: Synthetic oligonucleotide
aaauugaccccaaagcaaa

SEQ ID NO: 1600384 - RNA, 19 nt, Artificial Sequence
  Description of Artificial Sequence: Synthetic oligonucleotide
cugggaguuacaugaaagc

SEQ ID NO: 1600385 - RNA, 19 nt, Artificial Sequence
  Description of Artificial Sequence: Synthetic oligonucleotide
acuugggauucccuuacuc

SEQ ID NO: 1600386 - RNA, 19 nt, Artificial Sequence
  Description of Artificial Sequence: Synthetic oligonucleotide
acgaaugaagcagugagca

SEQ ID NO: 1600387 - RNA, 19 nt, Artificial Sequence
  Description of Artificial Sequence: Synthetic oligonucleotide
uucguaugguccacucugg

SEQ ID NO: 1600388 - RNA, 19 nt, Artificial Sequence
  Description of Artificial Sequence: Synthetic oligonucleotide
aaugagcacggguuauucu

SEQ ID NO: 1600389 - RNA, 19 nt, Artificial Sequence
  Description of Artificial Sequence: Synthetic oligonucleotide
uuuacuugggauucccuua

SEQ ID NO: 1600390 - RNA, 19 nt, Artificial Sequence
  Description of Artificial Sequence: Synthetic oligonucleotide
uaggcuuaaauaauacauu

SEQ ID NO: 1600391 - RNA, 19 nt, Artificial Sequence
  Description of Artificial Sequence: Synthetic oligonucleotide
ccuugcaaacuuaugauag

SEQ ID NO: 1600392 - RNA, 19 nt, Artificial Sequence
  Description of Artificial Sequence: Synthetic oligonucleotide
ugagcauguguccgaaggc

SEQ ID NO: 1600393 - RNA, 19 nt, Artificial Sequence
  Description of Artificial Sequence: Synthetic oligonucleotide
gucauuaagcuacacuuuc

SEQ ID NO: 1600394 - RNA, 19 nt, Artificial Sequence
  Description of Artificial Sequence: Synthetic oligonucleotide
uugugucuuacgaggguag

SEQ ID NO: 1600395 - RNA, 19 nt, Artificial Sequence
  Description of Artificial Sequence: Synthetic oligonucleotide
agugaucauaaucuuuuau

SEQ ID NO: 1600396 - RNA, 19 nt, Artificial Sequence
  Description of Artificial Sequence: Synthetic oligonucleotide
cuauuugucuugaagagcu

SEQ ID NO: 1600397 - RNA, 19 nt, Artificial Sequence
  Description of Artificial Sequence: Synthetic oligonucleotide
ucuuacgaggguagacucc

SEQ ID NO: 1600398 - RNA, 19 nt, Artificial Sequence
  Description of Artificial Sequence: Synthetic oligonucleotide
aguucauuagugaucauaa

SEQ ID NO: 1600399 - RNA, 19 nt, Artificial Sequence
  Description of Artificial Sequence: Synthetic oligonucleotide
aaacuaacauaaugacgaa

SEQ ID NO: 1600400 - RNA, 19 nt, Artificial Sequence
  Description of Artificial Sequence: Synthetic oligonucleotide
ugggaguuacaugaaagcu

SEQ ID NO: 1600401 - RNA, 19 nt, Artificial Sequence
  Description of Artificial Sequence: Synthetic oligonucleotide
aaugacaucggggcacuug

SEQ ID NO: 1600402 - RNA, 19 nt, Artificial Sequence
  Description of Artificial Sequence: Synthetic oligonucleotide
cuuacgaggguagacuccc

SEQ ID NO: 1600403 - RNA, 19 nt, Artificial Sequence
  Description of Artificial Sequence: Synthetic oligonucleotide
aacuaaugagcacggguua

SEQ ID NO: 1600404 - RNA, 19 nt, Artificial Sequence
  Description of Artificial Sequence: Synthetic oligonucleotide
cacuaagaaugacaucggg

SEQ ID NO: 1600405 - RNA, 19 nt, Artificial Sequence
  Description of Artificial Sequence: Synthetic oligonucleotide
ugaugccuagugccuacgg

SEQ ID NO: 1600406 - RNA, 19 nt, Artificial Sequence
  Description of Artificial Sequence: Synthetic oligonucleotide
guaacaucgaggcacucga

SEQ ID NO: 1600407 - RNA, 19 nt, Artificial Sequence
  Description of Artificial Sequence: Synthetic oligonucleotide
acugggaguuacaugaaag

SEQ ID NO: 1600408 - RNA, 19 nt, Artificial Sequence
  Description of Artificial Sequence: Synthetic oligonucleotide
auuaauuguucaggaauca

SEQ ID NO: 1600409 - RNA, 19 nt, Artificial Sequence
  Description of Artificial Sequence: Synthetic oligonucleotide
aaaccacucuuacucugcu

SEQ ID NO: 1600410 - RNA, 19 nt, Artificial Sequence
  Description of Artificial Sequence: Synthetic oligonucleotide
acaucgaggcacucgaaga

SEQ ID NO: 1600411 - RNA, 19 nt, Artificial Sequence
  Description of Artificial Sequence: Synthetic oligonucleotide
ucacacuuuggggugaaug

SEQ ID NO: 1600412 - RNA, 19 nt, Artificial Sequence
  Description of Artificial Sequence: Synthetic oligonucleotide
aaugacgaaugaagcagug

SEQ ID NO: 1600413 - RNA, 19 nt, Artificial Sequence
  Description of Artificial Sequence: Synthetic oligonucleotide
uaccuugcaaacuuaugau

SEQ ID NO: 1600414 - RNA, 19 nt, Artificial Sequence
  Description of Artificial Sequence: Synthetic oligonucleotide
uuuggggugaaugaauuuu

SEQ ID NO: 1600415 - RNA, 19 nt, Artificial Sequence
  Description of Artificial Sequence: Synthetic oligonucleotide
cuguuuagucacacuuugg

SEQ ID NO: 1600416 - RNA, 19 nt, Artificial Sequence
  Description of Artificial Sequence: Synthetic oligonucleotide
aguggcaaauuuugaguca

SEQ ID NO: 1600417 - RNA, 19 nt, Artificial Sequence
  Description of Artificial Sequence: Synthetic oligonucleotide
ugucuuacgaggguagacu

SEQ ID NO: 1600418 - RNA, 19 nt, Artificial Sequence
  Description of Artificial Sequence: Synthetic oligonucleotide
acugacacuucuccacauc

SEQ ID NO: 1600419 - RNA, 19 nt, Artificial Sequence
  Description of Artificial Sequence: Synthetic oligonucleotide
aagagugacuccugccacu

SEQ ID NO: 1600420 - RNA, 19 nt, Artificial Sequence
  Description of Artificial Sequence: Synthetic oligonucleotide
uuuaugagcugguuucuuu

SEQ ID NO: 1600421 - RNA, 19 nt, Artificial Sequence
  Description of Artificial Sequence: Synthetic oligonucleotide
augccuagugccuacggga

SEQ ID NO: 1600422 - RNA, 19 nt, Artificial Sequence
  Description of Artificial Sequence: Synthetic oligonucleotide
gcaauucugacaagaaagg

SEQ ID NO: 1600423 - RNA, 19 nt, Artificial Sequence
  Description of Artificial Sequence: Synthetic oligonucleotide
augacaucggggcacuuga

SEQ ID NO: 1600424 - RNA, 19 nt, Artificial Sequence
  Description of Artificial Sequence: Synthetic oligonucleotide
aacacccuuguuugcaaaa

SEQ ID NO: 1600425 - RNA, 19 nt, Artificial Sequence
  Description of Artificial Sequence: Synthetic oligonucleotide
ugacacuucuccacaucug

SEQ ID NO: 1600426 - RNA, 19 nt, Artificial Sequence
  Description of Artificial Sequence: Synthetic oligonucleotide
cuugcuacugacacuucuc

SEQ ID NO: 1600427 - RNA, 19 nt, Artificial Sequence
  Description of Artificial Sequence: Synthetic oligonucleotide
caucggggcacuugaaaag

SEQ ID NO: 1600428 - RNA, 19 nt, Artificial Sequence
  Description of Artificial Sequence: Synthetic oligonucleotide
ucccucaugcuccaagagu

SEQ ID NO: 1600429 - RNA, 19 nt, Artificial Sequence
  Description of Artificial Sequence: Synthetic oligonucleotide
ucuugugucuuacgagggu

SEQ ID NO: 1600430 - RNA, 19 nt, Artificial Sequence
  Description of Artificial Sequence: Synthetic oligonucleotide
ugccuuaauaugaucuuuu

SEQ ID NO: 1600431 - RNA, 19 nt, Artificial Sequence
  Description of Artificial Sequence: Synthetic oligonucleotide
aacacacugggaguuacau

SEQ ID NO: 1600432 - RNA, 19 nt, Artificial Sequence
  Description of Artificial Sequence: Synthetic oligonucleotide
agaaacacccuuguuugca

SEQ ID NO: 1600433 - RNA, 19 nt, Artificial Sequence
  Description of Artificial Sequence: Synthetic oligonucleotide
uggggagugaaugucauuu

SEQ ID NO: 1600434 - RNA, 19 nt, Artificial Sequence
  Description of Artificial Sequence: Synthetic oligonucleotide
acucuuacucugcuguaca

SEQ ID NO: 1600435 - RNA, 19 nt, Artificial Sequence
  Description of Artificial Sequence: Synthetic oligonucleotide
ucgaggcacucgaagauuc

SEQ ID NO: 1600436 - RNA, 19 nt, Artificial Sequence
  Description of Artificial Sequence: Synthetic oligonucleotide
uccgaaggcacaucccuga

SEQ ID NO: 1600437 - RNA, 19 nt, Artificial Sequence
  Description of Artificial Sequence: Synthetic oligonucleotide
ccucaaacuaacauaauga

SEQ ID NO: 1600438 - RNA, 19 nt, Artificial Sequence
  Description of Artificial Sequence: Synthetic oligonucleotide
aucggggcacuugaaaagg

SEQ ID NO: 1600439 - RNA, 19 nt, Artificial Sequence
  Description of Artificial Sequence: Synthetic oligonucleotide
uuggggugaaugaauuuua

SEQ ID NO: 1600440 - RNA, 19 nt, Artificial Sequence
  Description of Artificial Sequence: Synthetic oligonucleotide
gacgaaugaagcagugagc

SEQ ID NO: 1600441 - RNA, 19 nt, Artificial Sequence
  Description of Artificial Sequence: Synthetic oligonucleotide
ucgaagauuccaugcucug

SEQ ID NO: 1600442 - RNA, 19 nt, Artificial Sequence
  Description of Artificial Sequence: Synthetic oligonucleotide
gucccaaucccauccuggg

SEQ ID NO: 1600443 - RNA, 19 nt, Artificial Sequence
  Description of Artificial Sequence: Synthetic oligonucleotide
agauucauuagggaaguua

SEQ ID NO: 1600444 - RNA, 19 nt, Artificial Sequence
  Description of Artificial Sequence: Synthetic oligonucleotide
ucacacacacacacacaca

SEQ ID NO: 1600445 - RNA, 19 nt, Artificial Sequence
  Description of Artificial Sequence: Synthetic oligonucleotide
auucccuuacucaauuuca

SEQ ID NO: 1600446 - RNA, 19 nt, Artificial Sequence
  Description of Artificial Sequence: Synthetic oligonucleotide
auccugggcuaacaaguag

SEQ ID NO: 1600447 - RNA, 19 nt, Artificial Sequence
  Description of Artificial Sequence: Synthetic oligonucleotide
ugggcaaacaaacggccuu

SEQ ID NO: 1600448 - RNA, 19 nt, Artificial Sequence
  Description of Artificial Sequence: Synthetic oligonucleotide
gcuacugacacuucuccac

SEQ ID NO: 1600449 - RNA, 19 nt, Artificial Sequence
  Description of Artificial Sequence: Synthetic oligonucleotide
auuagugaucauaaucuuu

SEQ ID NO: 1600450 - RNA, 19 nt, Artificial Sequence
  Description of Artificial Sequence: Synthetic oligonucleotide
uggauucuguuuagucaca

SEQ ID NO: 1600451 - RNA, 19 nt, Artificial Sequence
  Description of Artificial Sequence: Synthetic oligonucleotide
ugccuagugccuacgggac

SEQ ID NO: 1600452 - RNA, 19 nt, Artificial Sequence
  Description of Artificial Sequence: Synthetic oligonucleotide
agugccuacgggaccuucc

SEQ ID NO: 1600453 - RNA, 19 nt, Artificial Sequence
  Description of Artificial Sequence: Synthetic oligonucleotide
acucaauuucauggguuag

SEQ ID NO: 1600454 - RNA, 19 nt, Artificial Sequence
  Description of Artificial Sequence: Synthetic oligonucleotide
cugggucuaucuugcacag

SEQ ID NO: 1600455 - RNA, 19 nt, Artificial Sequence
  Description of Artificial Sequence: Synthetic oligonucleotide
accuugcaaacuuaugaua

SEQ ID NO: 1600456 - RNA, 19 nt, Artificial Sequence
  Description of Artificial Sequence: Synthetic oligonucleotide
aacaaacggccuuguccca

SEQ ID NO: 1600457 - RNA, 19 nt, Artificial Sequence
  Description of Artificial Sequence: Synthetic oligonucleotide
uggggugaaugaauuuuau

SEQ ID NO: 1600458 - RNA, 19 nt, Artificial Sequence
  Description of Artificial Sequence: Synthetic oligonucleotide
guuaguucaggacccucuc

SEQ ID NO: 1600459 - RNA, 19 nt, Artificial Sequence
  Description of Artificial Sequence: Synthetic oligonucleotide
aggaauaggcuuaaauaau

SEQ ID NO: 1600460 - RNA, 19 nt, Artificial Sequence
  Description of Artificial Sequence: Synthetic oligonucleotide
gucuuacgaggguagacuc

SEQ ID NO: 1600461 - RNA, 19 nt, Artificial Sequence
  Description of Artificial Sequence: Synthetic oligonucleotide
acacacugggaguuacaug

SEQ ID NO: 1600462 - RNA, 19 nt, Artificial Sequence
  Description of Artificial Sequence: Synthetic oligonucleotide
aaacguuguuccacgcaug

SEQ ID NO: 1600463 - RNA, 19 nt, Artificial Sequence
  Description of Artificial Sequence: Synthetic oligonucleotide
agcacggguuauucuguag

SEQ ID NO: 1600464 - RNA, 19 nt, Artificial Sequence
  Description of Artificial Sequence: Synthetic oligonucleotide
caaacuaaugagcacgggu

SEQ ID NO: 1600465 - RNA, 19 nt, Artificial Sequence
  Description of Artificial Sequence: Synthetic oligonucleotide
aucaagucauccaaacuaa

SEQ ID NO: 1600466 - RNA, 19 nt, Artificial Sequence
  Description of Artificial Sequence: Synthetic oligonucleotide
uguuccacgcaugacugau

SEQ ID NO: 1600467 - RNA, 19 nt, Artificial Sequence
  Description of Artificial Sequence: Synthetic oligonucleotide
cacuuucuugugucuuacg

SEQ ID NO: 1600468 - RNA, 19 nt, Artificial Sequence
  Description of Artificial Sequence: Synthetic oligonucleotide
ccacgcaugacugauaaug

SEQ ID NO: 1600469 - RNA, 19 nt, Artificial Sequence
  Description of Artificial Sequence: Synthetic oligonucleotide
ucguaugguccacucuggu

SEQ ID NO: 1600470 - RNA, 19 nt, Artificial Sequence
  Description of Artificial Sequence: Synthetic oligonucleotide
agaaucaguggcaaauuuu

SEQ ID NO: 1600471 - RNA, 19 nt, Artificial Sequence
  Description of Artificial Sequence: Synthetic oligonucleotide
acacccuuguuugcaaaag

SEQ ID NO: 1600472 - RNA, 19 nt, Artificial Sequence
  Description of Artificial Sequence: Synthetic oligonucleotide
gaaacacccuuguuugcaa

SEQ ID NO: 1600473 - RNA, 19 nt, Artificial Sequence
  Description of Artificial Sequence: Synthetic oligonucleotide
uacgaggguagacucccuc

SEQ ID NO: 1600474 - RNA, 19 nt, Artificial Sequence
  Description of Artificial Sequence: Synthetic oligonucleotide
acgaggguagacucccuca

SEQ ID NO: 1600475 - RNA, 19 nt, Artificial Sequence
  Description of Artificial Sequence: Synthetic oligonucleotide
acucacugaauaaauuaau

SEQ ID NO: 1600476 - RNA, 19 nt, Artificial Sequence
  Description of Artificial Sequence: Synthetic oligonucleotide
cacgcaugacugauaauga

SEQ ID NO: 1600477 - RNA, 19 nt, Artificial Sequence
  Description of Artificial Sequence: Synthetic oligonucleotide
gaggguagacucccucaug

SEQ ID NO: 1600478 - RNA, 19 nt, Artificial Sequence
  Description of Artificial Sequence: Synthetic oligonucleotide
gagcauguguccgaaggca

SEQ ID NO: 1600479 - RNA, 19 nt, Artificial Sequence
  Description of Artificial Sequence: Synthetic oligonucleotide
ggggugaaugaauuuuaug

SEQ ID NO: 1600480 - RNA, 19 nt, Artificial Sequence
  Description of Artificial Sequence: Synthetic oligonucleotide
caaaacguuguuccacgca

SEQ ID NO: 1600481 - RNA, 19 nt, Artificial Sequence
  Description of Artificial Sequence: Synthetic oligonucleotide
gcacucgaagauuccaugc

SEQ ID NO: 1600482 - RNA, 19 nt, Artificial Sequence
  Description of Artificial Sequence: Synthetic oligonucleotide
gacaucggggcacuugaaa

SEQ ID NO: 1600483 - RNA, 19 nt, Artificial Sequence
  Description of Artificial Sequence: Synthetic oligonucleotide
agagugacuccugccacug

SEQ ID NO: 1600484 - RNA, 19 nt, Artificial Sequence
  Description of Artificial Sequence: Synthetic oligonucleotide
agccaagacgacaaacucu

SEQ ID NO: 1600485 - RNA, 19 nt, Artificial Sequence
  Description of Artificial Sequence: Synthetic oligonucleotide
agaagugcuuucguauggu

SEQ ID NO: 1600486 - RNA, 19 nt, Artificial Sequence
  Description of Artificial Sequence: Synthetic oligonucleotide
ucuuacucugcuguacauu

SEQ ID NO: 1600487 - RNA, 19 nt, Artificial Sequence
  Description of Artificial Sequence: Synthetic oligonucleotide
aggcucuccucaaacuaac

SEQ ID NO: 1600488 - RNA, 19 nt, Artificial Sequence
  Description of Artificial Sequence: Synthetic oligonucleotide
agugagcauguguccgaag

SEQ ID NO: 1600489 - RNA, 19 nt, Artificial Sequence
  Description of Artificial Sequence: Synthetic oligonucleotide
acacacacacacacagauc

SEQ ID NO: 1600490 - RNA, 19 nt, Artificial Sequence
  Description of Artificial Sequence: Synthetic oligonucleotide
acuaaugagcacggguuau

SEQ ID NO: 1600491 - RNA, 19 nt, Artificial Sequence
  Description of Artificial Sequence: Synthetic oligonucleotide
agcuacuuugcagccaaga

SEQ ID NO: 1600492 - RNA, 19 nt, Artificial Sequence
  Description of Artificial Sequence: Synthetic oligonucleotide
uuuuaugagcugguuucuu

SEQ ID NO: 1600493 - RNA, 19 nt, Artificial Sequence
  Description of Artificial Sequence: Synthetic oligonucleotide
augacgaaugaagcaguga

SEQ ID NO: 1600494 - RNA, 19 nt, Artificial Sequence
  Description of Artificial Sequence: Synthetic oligonucleotide
gguagacucccucaugcuc

SEQ ID NO: 1600495 - RNA, 19 nt, Artificial Sequence
  Description of Artificial Sequence: Synthetic oligonucleotide
caugacugauaaugaauua

SEQ ID NO: 1600496 - RNA, 19 nt, Artificial Sequence
  Description of Artificial Sequence: Synthetic oligonucleotide
gaaaagcccuuaccuugca

SEQ ID NO: 1600497 - RNA, 19 nt, Artificial Sequence
  Description of Artificial Sequence: Synthetic oligonucleotide
ggcacucgaagauuccaug

SEQ ID NO: 1600498 - RNA, 19 nt, Artificial Sequence
  Description of Artificial Sequence: Synthetic oligonucleotide
aagagcucacacacacaca

SEQ ID NO: 1600499 - RNA, 19 nt, Artificial Sequence
  Description of Artificial Sequence: Synthetic oligonucleotide
ggaaaagcccuuaccuugc

SEQ ID NO: 1600500 - RNA, 19 nt, Artificial Sequence
  Description of Artificial Sequence: Synthetic oligonucleotide
cucacugaauaaauuaauu

SEQ ID NO: 1600501 - RNA, 19 nt, Artificial Sequence
  Description of Artificial Sequence: Synthetic oligonucleotide
uaacaucgaggcacucgaa

SEQ ID NO: 1600502 - RNA, 19 nt, Artificial Sequence
  Description of Artificial Sequence: Synthetic oligonucleotide
uacuugggauucccuuacu

SEQ ID NO: 1600503 - RNA, 19 nt, Artificial Sequence
  Description of Artificial Sequence: Synthetic oligonucleotide
gaccccaaagcaaaacuua

SEQ ID NO: 1600504 - RNA, 19 nt, Artificial Sequence
  Description of Artificial Sequence: Synthetic oligonucleotide
ugccuacgggaccuucccc

SEQ ID NO: 1600505 - RNA, 19 nt, Artificial Sequence
  Description of Artificial Sequence: Synthetic oligonucleotide
ggaauaggcuuaaauaaua

SEQ ID NO: 1600506 - RNA, 19 nt, Artificial Sequence
  Description of Artificial Sequence: Synthetic oligonucleotide
agaaugacaucggggcacu

SEQ ID NO: 1600507 - RNA, 19 nt, Artificial Sequence
  Description of Artificial Sequence: Synthetic oligonucleotide
acguuguuccacgcaugac

SEQ ID NO: 1600508 - RNA, 19 nt, Artificial Sequence
  Description of Artificial Sequence: Synthetic oligonucleotide
gugccuacgggaccuuccc

SEQ ID NO: 1600509 - RNA, 19 nt, Artificial Sequence
  Description of Artificial Sequence: Synthetic oligonucleotide
cacacacacacacacagau

SEQ ID NO: 1600510 - RNA, 19 nt, Artificial Sequence
  Description of Artificial Sequence: Synthetic oligonucleotide
auucuguaguaaauaguuu

SEQ ID NO: 1600511 - RNA, 19 nt, Artificial Sequence
  Description of Artificial Sequence: Synthetic oligonucleotide
cucgaagauuccaugcucu

SEQ ID NO: 1600512 - RNA, 19 nt, Artificial Sequence
  Description of Artificial Sequence: Synthetic oligonucleotide
cuuugcagccaagacgaca

SEQ ID NO: 1600513 - RNA, 19 nt, Artificial Sequence
  Description of Artificial Sequence: Synthetic oligonucleotide
gaauuugccuuaauaugau

SEQ ID NO: 1600514 - RNA, 19 nt, Artificial Sequence
  Description of Artificial Sequence: Synthetic oligonucleotide
gcuaaauuugugggcaaac

SEQ ID NO: 1600515 - RNA, 19 nt, Artificial Sequence
  Description of Artificial Sequence: Synthetic oligonucleotide
gcaaaacguuguuccacgc

SEQ ID NO: 1600516 - RNA, 19 nt, Artificial Sequence
  Description of Artificial Sequence: Synthetic oligonucleotide
gugucuuacgaggguagac

SEQ ID NO: 1600517 - RNA, 19 nt, Artificial Sequence
  Description of Artificial Sequence: Synthetic oligonucleotide
uuacgaggguagacucccu

SEQ ID NO: 1600518 - RNA, 19 nt, Artificial Sequence
  Description of Artificial Sequence: Synthetic oligonucleotide
caguucauuagugaucaua

SEQ ID NO: 1600519 - RNA, 19 nt, Artificial Sequence
  Description of Artificial Sequence: Synthetic oligonucleotide
agcccuuaccuugcaaacu

SEQ ID NO: 1600520 - RNA, 19 nt, Artificial Sequence
  Description of Artificial Sequence: Synthetic oligonucleotide
ugacaucggggcacuugaa

SEQ ID NO: 1600521 - RNA, 19 nt, Artificial Sequence
  Description of Artificial Sequence: Synthetic oligonucleotide
cacccuuguuugcaaaaga

SEQ ID NO: 1600522 - RNA, 19 nt, Artificial Sequence
  Description of Artificial Sequence: Synthetic oligonucleotide
acggguuauucuguaguaa

SEQ ID NO: 1600523 - RNA, 19 nt, Artificial Sequence
  Description of Artificial Sequence: Synthetic oligonucleotide
cugaugccuagugccuacg

SEQ ID NO: 1600524 - RNA, 19 nt, Artificial Sequence
  Description of Artificial Sequence: Synthetic oligonucleotide
gagugacuccugccacugc

SEQ ID NO: 1600525 - RNA, 19 nt, Artificial Sequence
  Description of Artificial Sequence: Synthetic oligonucleotide
cuugugucuuacgagggua

SEQ ID NO: 1600526 - RNA, 19 nt, Artificial Sequence
  Description of Artificial Sequence: Synthetic oligonucleotide
gggaguuacaugaaagcua

SEQ ID NO: 1600527 - RNA, 19 nt, Artificial Sequence
  Description of Artificial Sequence: Synthetic oligonucleotide
cacucuggucauuaagcua

SEQ ID NO: 1600528 - RNA, 19 nt, Artificial Sequence
  Description of Artificial Sequence: Synthetic oligonucleotide
cauuagugaucauaaucuu

SEQ ID NO: 1600529 - RNA, 19 nt, Artificial Sequence
  Description of Artificial Sequence: Synthetic oligonucleotide
ugcuuucguaugguccacu

SEQ ID NO: 1600530 - RNA, 19 nt, Artificial Sequence
  Description of Artificial Sequence: Synthetic oligonucleotide
acaaacggccuugucccaa

SEQ ID NO: 1600531 - RNA, 19 nt, Artificial Sequence
  Description of Artificial Sequence: Synthetic oligonucleotide
acacacacacacacacaca

SEQ ID NO: 1600532 - RNA, 19 nt, Artificial Sequence
  Description of Artificial Sequence: Synthetic oligonucleotide
gacgacaaacucugggcuu

SEQ ID NO: 1600533 - RNA, 19 nt, Artificial Sequence
  Description of Artificial Sequence: Synthetic oligonucleotide
auguguccgaaggcacauc

SEQ ID NO: 1600534 - RNA, 19 nt, Artificial Sequence
  Description of Artificial Sequence: Synthetic oligonucleotide
cacggguuauucuguagua

SEQ ID NO: 1600535 - RNA, 19 nt, Artificial Sequence
  Description of Artificial Sequence: Synthetic oligonucleotide
guccgaaggcacaucccug

SEQ ID NO: 1600536 - RNA, 19 nt, Artificial Sequence
  Description of Artificial Sequence: Synthetic oligonucleotide
gcuuucguaugguccacuc

SEQ ID NO: 1600537 - RNA, 19 nt, Artificial Sequence
  Description of Artificial Sequence: Synthetic oligonucleotide
cacucgaagauuccaugcu

SEQ ID NO: 1600538 - RNA, 19 nt, Artificial Sequence
  Description of Artificial Sequence: Synthetic oligonucleotide
acacacacacacacacaga

SEQ ID NO: 1600539 - RNA, 19 nt, Artificial Sequence
  Description of Artificial Sequence: Synthetic oligonucleotide
guguccgaaggcacauccc

SEQ ID NO: 1600540 - RNA, 19 nt, Artificial Sequence
  Description of Artificial Sequence: Synthetic oligonucleotide
uggguuaguucaggacccu

SEQ ID NO: 1600541 - RNA, 19 nt, Artificial Sequence
  Description of Artificial Sequence: Synthetic oligonucleotide
ccacagcuacuuugcagcc

SEQ ID NO: 1600542 - RNA, 19 nt, Artificial Sequence
  Description of Artificial Sequence: Synthetic oligonucleotide
agggaaguuagaagugcuu

SEQ ID NO: 1600543 - RNA, 19 nt, Artificial Sequence
  Description of Artificial Sequence: Synthetic oligonucleotide
cacugggaguuacaugaaa

SEQ ID NO: 1600544 - RNA, 19 nt, Artificial Sequence
  Description of Artificial Sequence: Synthetic oligonucleotide
cuuucguaugguccacucu

SEQ ID NO: 1600545 - RNA, 19 nt, Artificial Sequence
  Description of Artificial Sequence: Synthetic oligonucleotide
ccaaacuaaugagcacggg

SEQ ID NO: 1600546 - RNA, 19 nt, Artificial Sequence
  Description of Artificial Sequence: Synthetic oligonucleotide
ggaaucaguguaacaucga

SEQ ID NO: 1600547 - RNA, 19 nt, Artificial Sequence
  Description of Artificial Sequence: Synthetic oligonucleotide
gggcuaacaaguagauuca

SEQ ID NO: 1600548 - RNA, 19 nt, Artificial Sequence
  Description of Artificial Sequence: Synthetic oligonucleotide
gagcucacacacacacaca

SEQ ID NO: 1600549 - RNA, 19 nt, Artificial Sequence
  Description of Artificial Sequence: Synthetic oligonucleotide
ugggucuaucuugcacaga

SEQ ID NO: 1600550 - RNA, 19 nt, Artificial Sequence
  Description of Artificial Sequence: Synthetic oligonucleotide
cucuggucauuaagcuaca

SEQ ID NO: 1600551 - RNA, 19 nt, Artificial Sequence
  Description of Artificial Sequence: Synthetic oligonucleotide
gcaaacaaacggccuuguc

SEQ ID NO: 1600552 - RNA, 19 nt, Artificial Sequence
  Description of Artificial Sequence: Synthetic oligonucleotide
aggcacucgaagauuccau

SEQ ID NO: 1600553 - RNA, 19 nt, Artificial Sequence
  Description of Artificial Sequence: Synthetic oligonucleotide
gcaugacugauaaugaauu

SEQ ID NO: 1600554 - RNA, 19 nt, Artificial Sequence
  Description of Artificial Sequence: Synthetic oligonucleotide
caucgaggcacucgaagau

SEQ ID NO: 1600555 - RNA, 19 nt, Artificial Sequence
  Description of Artificial Sequence: Synthetic oligonucleotide
uagauucauuagggaaguu

SEQ ID NO: 1600556 - RNA, 19 nt, Artificial Sequence
  Description of Artificial Sequence: Synthetic oligonucleotide
gguuaguucaggacccucu

SEQ ID NO: 1600557 - RNA, 19 nt, Artificial Sequence
  Description of Artificial Sequence: Synthetic oligonucleotide
gccuagugccuacgggacc

SEQ ID NO: 1600558 - RNA, 19 nt, Artificial Sequence
  Description of Artificial Sequence: Synthetic oligonucleotide
cacagcuacuuugcagcca

SEQ ID NO: 1600559 - RNA, 19 nt, Artificial Sequence
  Description of Artificial Sequence: Synthetic oligonucleotide
uagugccuacgggaccuuc

SEQ ID NO: 1600560 - RNA, 19 nt, Artificial Sequence
  Description of Artificial Sequence: Synthetic oligonucleotide
gcuacacuuucuugugucu

SEQ ID NO: 1600561 - RNA, 19 nt, Artificial Sequence
  Description of Artificial Sequence: Synthetic oligonucleotide
gugcuuucguaugguccac

SEQ ID NO: 1600562 - RNA, 19 nt, Artificial Sequence
  Description of Artificial Sequence: Synthetic oligonucleotide
cucuuacucugcuguacau

SEQ ID NO: 1600563 - RNA, 19 nt, Artificial Sequence
  Description of Artificial Sequence: Synthetic oligonucleotide
gaugagguuugcaguucau

SEQ ID NO: 1600564 - RNA, 19 nt, Artificial Sequence
  Description of Artificial Sequence: Synthetic oligonucleotide
cguuguuccacgcaugacu

SEQ ID NO: 1600565 - RNA, 19 nt, Artificial Sequence
  Description of Artificial Sequence: Synthetic oligonucleotide
gcuccaagagugacuccug

SEQ ID NO: 1600566 - RNA, 19 nt, Artificial Sequence
  Description of Artificial Sequence: Synthetic oligonucleotide
cgaggcacucgaagauucc

SEQ ID NO: 1600567 - RNA, 19 nt, Artificial Sequence
  Description of Artificial Sequence: Synthetic oligonucleotide
cuacacuuucuugugucuu

SEQ ID NO: 1600568 - RNA, 19 nt, Artificial Sequence
  Description of Artificial Sequence: Synthetic oligonucleotide
cauguguccgaaggcacau

SEQ ID NO: 1600569 - RNA, 19 nt, Artificial Sequence
  Description of Artificial Sequence: Synthetic oligonucleotide
gcucacacacacacacaca

SEQ ID NO: 1600570 - RNA, 19 nt, Artificial Sequence
  Description of Artificial Sequence: Synthetic oligonucleotide
cuaaugagcacggguuauu

SEQ ID NO: 1600571 - RNA, 19 nt, Artificial Sequence
  Description of Artificial Sequence: Synthetic oligonucleotide
ggguuaguucaggacccuc

SEQ ID NO: 1600572 - RNA, 19 nt, Artificial Sequence
  Description of Artificial Sequence: Synthetic oligonucleotide
ccaaagcaaaacuuacauu

SEQ ID NO: 1600573 - RNA, 19 nt, Artificial Sequence
  Description of Artificial Sequence: Synthetic oligonucleotide
gcuaacaaguagauucauu

SEQ ID NO: 1600574 - RNA, 19 nt, Artificial Sequence
  Description of Artificial Sequence: Synthetic oligonucleotide
caaacggccuugucccaau

SEQ ID NO: 1600575 - RNA, 19 nt, Artificial Sequence
  Description of Artificial Sequence: Synthetic oligonucleotide
ggauucccuuacucaauuu

SEQ ID NO: 1600576 - RNA, 19 nt, Artificial Sequence
  Description of Artificial Sequence: Synthetic oligonucleotide
ggggagugaaugucauuuu

SEQ ID NO: 1600577 - RNA, 19 nt, Artificial Sequence
  Description of Artificial Sequence: Synthetic oligonucleotide
caaucccauccugggcuaa

SEQ ID NO: 1600578 - RNA, 19 nt, Artificial Sequence
  Description of Artificial Sequence: Synthetic oligonucleotide
ggcuaacaaguagauucau

SEQ ID NO: 1600579 - RNA, 19 nt, Artificial Sequence
  Description of Artificial Sequence: Synthetic oligonucleotide
ccaaucccauccugggcua

SEQ ID NO: 1600580 - RNA, 19 nt, Artificial Sequence
  Description of Artificial Sequence: Synthetic oligonucleotide
cugggcuaacaaguagauu

SEQ ID NO: 1600581 - RNA, 19 nt, Artificial Sequence
  Description of Artificial Sequence: Synthetic oligonucleotide
cccuuaccuugcaaacuua

SEQ ID NO: 1600582 - RNA, 19 nt, Artificial Sequence
  Description of Artificial Sequence: Synthetic oligonucleotide
ccccuugcuacugacacuu

SEQ ID NO: 1600583 - RNA, 19 nt, Artificial Sequence
  Description of Artificial Sequence: Synthetic oligonucleotide
cuagugccuacgggaccuu

SEQ ID NO: 1600584 - RNA, 19 nt, Artificial Sequence
  Description of Artificial Sequence: Synthetic oligonucleotide
ccgaaggcacaucccugau

SEQ ID NO: 1600585 - RNA, 19 nt, Artificial Sequence
  Description of Artificial Sequence: Synthetic oligonucleotide
auuuauuacauacagagca

SEQ ID NO: 1600586 - RNA, 19 nt, Artificial Sequence
  Description of Artificial Sequence: Synthetic oligonucleotide
agaguuuaagaccagggcc

SEQ ID NO: 1600587 - RNA, 19 nt, Artificial Sequence
  Description of Artificial Sequence: Synthetic oligonucleotide
aaguugagagguuaaaagg

SEQ ID NO: 1600588 - RNA, 19 nt, Artificial Sequence
  Description of Artificial Sequence: Synthetic oligonucleotide
aagaguuuaagaccagggc

SEQ ID NO: 1600589 - RNA, 19 nt, Artificial Sequence
  Description of Artificial Sequence: Synthetic oligonucleotide
auuaaccugaggcugagcc

SEQ ID NO: 1600590 - RNA, 19 nt, Artificial Sequence
  Description of Artificial Sequence: Synthetic oligonucleotide
aaagcaaguagacuugggg

SEQ ID NO: 1600591 - RNA, 19 nt, Artificial Sequence
  Description of Artificial Sequence: Synthetic oligonucleotide
agaaauucuacccuugggg

SEQ ID NO: 1600592 - RNA, 19 nt, Artificial Sequence
  Description of Artificial Sequence: Synthetic oligonucleotide
aaagacaucugcuccugcc

SEQ ID NO: 1600593 - RNA, 19 nt, Artificial Sequence
  Description of Artificial Sequence: Synthetic oligonucleotide
aauguaaguuuggagaugg

SEQ ID NO: 1600594 - RNA, 19 nt, Artificial Sequence
  Description of Artificial Sequence: Synthetic oligonucleotide
uuaacugugcccauccugg

SEQ ID NO: 1600595 - RNA, 19 nt, Artificial Sequence
  Description of Artificial Sequence: Synthetic oligonucleotide
aguaugaggcucuugcucc

SEQ ID NO: 1600596 - RNA, 19 nt, Artificial Sequence
  Description of Artificial Sequence: Synthetic oligonucleotide
aagacuaggcaguaugagg

SEQ ID NO: 1600597 - RNA, 19 nt, Artificial Sequence
  Description of Artificial Sequence: Synthetic oligonucleotide
agguccugaaucuagauag

SEQ ID NO: 1600598 - RNA, 19 nt, Artificial Sequence
  Description of Artificial Sequence: Synthetic oligonucleotide
uuuauuacauacagagcag

SEQ ID NO: 1600599 - RNA, 19 nt, Artificial Sequence
  Description of Artificial Sequence: Synthetic oligonucleotide
uccugacuuacccugaggg

SEQ ID NO: 1600600 - RNA, 19 nt, Artificial Sequence
  Description of Artificial Sequence: Synthetic oligonucleotide
aacccuaggcacuuaguac

SEQ ID NO: 1600601 - RNA, 19 nt, Artificial Sequence
  Description of Artificial Sequence: Synthetic oligonucleotide
guuaaguacauuuauuaca

SEQ ID NO: 1600602 - RNA, 19 nt, Artificial Sequence
  Description of Artificial Sequence: Synthetic oligonucleotide
aguagaagccagcugacuc

SEQ ID NO: 1600603 - RNA, 19 nt, Artificial Sequence
  Description of Artificial Sequence: Synthetic oligonucleotide
uuaguugcuuuccaaagga

SEQ ID NO: 1600604 - RNA, 19 nt, Artificial Sequence
  Description of Artificial Sequence: Synthetic oligonucleotide
uuuaagaccagggccaggg

SEQ ID NO: 1600605 - RNA, 19 nt, Artificial Sequence
  Description of Artificial Sequence: Synthetic oligonucleotide
agacuaggcaguaugaggc

SEQ ID NO: 1600606 - RNA, 19 nt, Artificial Sequence
  Description of Artificial Sequence: Synthetic oligonucleotide
ugaaucuagauaguccugg

SEQ ID NO: 1600607 - RNA, 19 nt, Artificial Sequence
  Description of Artificial Sequence: Synthetic oligonucleotide
uguaaguuuggagaugggg

SEQ ID NO: 1600608 - RNA, 19 nt, Artificial Sequence
  Description of Artificial Sequence: Synthetic oligonucleotide
aggagaguugcacuggccc

SEQ ID NO: 1600609 - RNA, 19 nt, Artificial Sequence
  Description of Artificial Sequence: Synthetic oligonucleotide
uguuaguugcuuuccaaag

SEQ ID NO: 1600610 - RNA, 19 nt, Artificial Sequence
  Description of Artificial Sequence: Synthetic oligonucleotide
ugagaaauucuacccuugg

SEQ ID NO: 1600611 - RNA, 19 nt, Artificial Sequence
  Description of Artificial Sequence: Synthetic oligonucleotide
aagcaaguagacuugggga

SEQ ID NO: 1600612 - RNA, 19 nt, Artificial Sequence
  Description of Artificial Sequence: Synthetic oligonucleotide
uguuaaguacauuuauuac

SEQ ID NO: 1600613 - RNA, 19 nt, Artificial Sequence
  Description of Artificial Sequence: Synthetic oligonucleotide
aguugagagguuaaaaggg

SEQ ID NO: 1600614 - RNA, 19 nt, Artificial Sequence
  Description of Artificial Sequence: Synthetic oligonucleotide
agauaugugaguucacuug

SEQ ID NO: 1600615 - RNA, 19 nt, Artificial Sequence
  Description of Artificial Sequence: Synthetic oligonucleotide
auaucugucaucuuuuaaa

SEQ ID NO: 1600616 - RNA, 19 nt, Artificial Sequence
  Description of Artificial Sequence: Synthetic oligonucleotide
guuaguugcuuuccaaagg

SEQ ID NO: 1600617 - RNA, 19 nt, Artificial Sequence
  Description of Artificial Sequence: Synthetic oligonucleotide
acccuaggcacuuaguacg

SEQ ID NO: 1600618 - RNA, 19 nt, Artificial Sequence
  Description of Artificial Sequence: Synthetic oligonucleotide
agggacauacaucacagug

SEQ ID NO: 1600619 - RNA, 19 nt, Artificial Sequence
  Description of Artificial Sequence: Synthetic oligonucleotide
uaauggauaucugucaucu

SEQ ID NO: 1600620 - RNA, 19 nt, Artificial Sequence
  Description of Artificial Sequence: Synthetic oligonucleotide
auaguccuggccuuguuuc

SEQ ID NO: 1600621 - RNA, 19 nt, Artificial Sequence
  Description of Artificial Sequence: Synthetic oligonucleotide
aucuagauaguccuggccu

SEQ ID NO: 1600622 - RNA, 19 nt, Artificial Sequence
  Description of Artificial Sequence: Synthetic oligonucleotide
uugggaaucaggaaacccu

SEQ ID NO: 1600623 - RNA, 19 nt, Artificial Sequence
  Description of Artificial Sequence: Synthetic oligonucleotide
gagaaauucuacccuuggg

SEQ ID NO: 1600624 - RNA, 19 nt, Artificial Sequence
  Description of Artificial Sequence: Synthetic oligonucleotide
aguugcuuuccaaaggagc

SEQ ID NO: 1600625 - RNA, 19 nt, Artificial Sequence
  Description of Artificial Sequence: Synthetic oligonucleotide
uccugaaucuagauagucc

SEQ ID NO: 1600626 - RNA, 19 nt, Artificial Sequence
  Description of Artificial Sequence: Synthetic oligonucleotide
gaaauucuacccuugggga

SEQ ID NO: 1600627 - RNA, 19 nt, Artificial Sequence
  Description of Artificial Sequence: Synthetic oligonucleotide
ucacuucacaauccugugg

SEQ ID NO: 1600628 - RNA, 19 nt, Artificial Sequence
  Description of Artificial Sequence: Synthetic oligonucleotide
aaaaggggauggacgaacc

SEQ ID NO: 1600629 - RNA, 19 nt, Artificial Sequence
  Description of Artificial Sequence: Synthetic oligonucleotide
cauacaucacaguggagag

SEQ ID NO: 1600630 - RNA, 19 nt, Artificial Sequence
  Description of Artificial Sequence: Synthetic oligonucleotide
cuuuuaaagcagcugcccc

SEQ ID NO: 1600631 - RNA, 19 nt, Artificial Sequence
  Description of Artificial Sequence: Synthetic oligonucleotide
aaggccaaagccugaggag

SEQ ID NO: 1600632 - RNA, 19 nt, Artificial Sequence
  Description of Artificial Sequence: Synthetic oligonucleotide
acagacaagggacauacau

SEQ ID NO: 1600633 - RNA, 19 nt, Artificial Sequence
  Description of Artificial Sequence: Synthetic oligonucleotide
aguuguuaaguacauuuau

SEQ ID NO: 1600634 - RNA, 19 nt, Artificial Sequence
  Description of Artificial Sequence: Synthetic oligonucleotide
uggguuaauggauaucugu

SEQ ID NO: 1600635 - RNA, 19 nt, Artificial Sequence
  Description of Artificial Sequence: Synthetic oligonucleotide
gaacagacaagggacauac

SEQ ID NO: 1600636 - RNA, 19 nt, Artificial Sequence
  Description of Artificial Sequence: Synthetic oligonucleotide
caauccucagcucuucugg

SEQ ID NO: 1600637 - RNA, 19 nt, Artificial Sequence
  Description of Artificial Sequence: Synthetic oligonucleotide
cuugcaaggccaaagccug

SEQ ID NO: 1600638 - RNA, 19 nt, Artificial Sequence
  Description of Artificial Sequence: Synthetic oligonucleotide
ggauggacgaaccugacug

SEQ ID NO: 1600639 - RNA, 19 nt, Artificial Sequence
  Description of Artificial Sequence: Synthetic oligonucleotide
guugagagguuaaaagggg

SEQ ID NO: 1600640 - RNA, 19 nt, Artificial Sequence
  Description of Artificial Sequence: Synthetic oligonucleotide
aaauucuacccuuggggau

SEQ ID NO: 1600641 - RNA, 19 nt, Artificial Sequence
  Description of Artificial Sequence: Synthetic oligonucleotide
ucuuuuaaagcagcugccc

SEQ ID NO: 1600642 - RNA, 19 nt, Artificial Sequence
  Description of Artificial Sequence: Synthetic oligonucleotide
cugcccauagcauucuugg

SEQ ID NO: 1600643 - RNA, 19 nt, Artificial Sequence
  Description of Artificial Sequence: Synthetic oligonucleotide
uugagagguuaaaagggga

SEQ ID NO: 1600644 - RNA, 19 nt, Artificial Sequence
  Description of Artificial Sequence: Synthetic oligonucleotide
aucuuuuaaagcagcugcc

SEQ ID NO: 1600645 - RNA, 19 nt, Artificial Sequence
  Description of Artificial Sequence: Synthetic oligonucleotide
auauugaugcagcucguca

SEQ ID NO: 1600646 - RNA, 19 nt, Artificial Sequence
  Description of Artificial Sequence: Synthetic oligonucleotide
aggaaacccuuccucaggg

SEQ ID NO: 1600647 - RNA, 19 nt, Artificial Sequence
  Description of Artificial Sequence: Synthetic oligonucleotide
uauuacauacagagcagau

SEQ ID NO: 1600648 - RNA, 19 nt, Artificial Sequence
  Description of Artificial Sequence: Synthetic oligonucleotide
ucacuugcaaggccaaagc

SEQ ID NO: 1600649 - RNA, 19 nt, Artificial Sequence
  Description of Artificial Sequence: Synthetic oligonucleotide
aguugcacuggccccuucc

SEQ ID NO: 1600650 - RNA, 19 nt, Artificial Sequence
  Description of Artificial Sequence: Synthetic oligonucleotide
gggaauguaaguuuggaga

SEQ ID NO: 1600651 - RNA, 19 nt, Artificial Sequence
  Description of Artificial Sequence: Synthetic oligonucleotide
gguuaaaaggggauggacg

SEQ ID NO: 1600652 - RNA, 19 nt, Artificial Sequence
  Description of Artificial Sequence: Synthetic oligonucleotide
aagacaucugcuccugccu

SEQ ID NO: 1600653 - RNA, 19 nt, Artificial Sequence
  Description of Artificial Sequence: Synthetic oligonucleotide
uacguguccgggaacuggg

SEQ ID NO: 1600654 - RNA, 19 nt, Artificial Sequence
  Description of Artificial Sequence: Synthetic oligonucleotide
agagcagauaugugaguuc

SEQ ID NO: 1600655 - RNA, 19 nt, Artificial Sequence
  Description of Artificial Sequence: Synthetic oligonucleotide
ucaggaaacccuuccucag

SEQ ID NO: 1600656 - RNA, 19 nt, Artificial Sequence
  Description of Artificial Sequence: Synthetic oligonucleotide
caagaugaaucuugugccc

SEQ ID NO: 1600657 - RNA, 19 nt, Artificial Sequence
  Description of Artificial Sequence: Synthetic oligonucleotide
auggauaucugucaucuuu

SEQ ID NO: 1600658 - RNA, 19 nt, Artificial Sequence
  Description of Artificial Sequence: Synthetic oligonucleotide
cugacuuacccugaggggc

SEQ ID NO: 1600659 - RNA, 19 nt, Artificial Sequence
  Description of Artificial Sequence: Synthetic oligonucleotide
augugaguucacuugcaag

SEQ ID NO: 1600660 - RNA, 19 nt, Artificial Sequence
  Description of Artificial Sequence: Synthetic oligonucleotide
aaucuugugcccaggaaga

SEQ ID NO: 1600661 - RNA, 19 nt, Artificial Sequence
  Description of Artificial Sequence: Synthetic oligonucleotide
cuuguuucugggcagagga

SEQ ID NO: 1600662 - RNA, 19 nt, Artificial Sequence
  Description of Artificial Sequence: Synthetic oligonucleotide
ucuuguuaguugcuuucca

SEQ ID NO: 1600663 - RNA, 19 nt, Artificial Sequence
  Description of Artificial Sequence: Synthetic oligonucleotide
aggcacuuaguacgugucc

SEQ ID NO: 1600664 - RNA, 19 nt, Artificial Sequence
  Description of Artificial Sequence: Synthetic oligonucleotide
ugagagguuaaaaggggau

SEQ ID NO: 1600665 - RNA, 19 nt, Artificial Sequence
  Description of Artificial Sequence: Synthetic oligonucleotide
gaaucuagauaguccuggc

SEQ ID NO: 1600666 - RNA, 19 nt, Artificial Sequence
  Description of Artificial Sequence: Synthetic oligonucleotide
ccagguaagacccaggcag

SEQ ID NO: 1600667 - RNA, 19 nt, Artificial Sequence
  Description of Artificial Sequence: Synthetic oligonucleotide
uauugaugcagcucgucau

SEQ ID NO: 1600668 - RNA, 19 nt, Artificial Sequence
  Description of Artificial Sequence: Synthetic oligonucleotide
uucucugguugggagaggg

SEQ ID NO: 1600669 - RNA, 19 nt, Artificial Sequence
  Description of Artificial Sequence: Synthetic oligonucleotide
ugcauccuaggacugacuc

SEQ ID NO: 1600670 - RNA, 19 nt, Artificial Sequence
  Description of Artificial Sequence: Synthetic oligonucleotide
agguuaaaaggggauggac

SEQ ID NO: 1600671 - RNA, 19 nt, Artificial Sequence
  Description of Artificial Sequence: Synthetic oligonucleotide
cuuuauuugagcugggugu

SEQ ID NO: 1600672 - RNA, 19 nt, Artificial Sequence
  Description of Artificial Sequence: Synthetic oligonucleotide
agcaaguagacuuggggaa

SEQ ID NO: 1600673 - RNA, 19 nt, Artificial Sequence
  Description of Artificial Sequence: Synthetic oligonucleotide
ugggacuuuauuugagcug

SEQ ID NO: 1600674 - RNA, 19 nt, Artificial Sequence
  Description of Artificial Sequence: Synthetic oligonucleotide
auugaugcagcucgucaug

SEQ ID NO: 1600675 - RNA, 19 nt, Artificial Sequence
  Description of Artificial Sequence: Synthetic oligonucleotide
uuggggaagacuaggcagu

SEQ ID NO: 1600676 - RNA, 19 nt, Artificial Sequence
  Description of Artificial Sequence: Synthetic oligonucleotide
cuggguguuggccagggcc

SEQ ID NO: 1600677 - RNA, 19 nt, Artificial Sequence
  Description of Artificial Sequence: Synthetic oligonucleotide
aagaugaaucuugugccca

SEQ ID NO: 1600678 - RNA, 19 nt, Artificial Sequence
  Description of Artificial Sequence: Synthetic oligonucleotide
uaugugaguucacuugcaa

SEQ ID NO: 1600679 - RNA, 19 nt, Artificial Sequence
  Description of Artificial Sequence: Synthetic oligonucleotide
auuugagcuggguguuggc

SEQ ID NO: 1600680 - RNA, 19 nt, Artificial Sequence
  Description of Artificial Sequence: Synthetic oligonucleotide
uaaaaggggauggacgaac

SEQ ID NO: 1600681 - RNA, 19 nt, Artificial Sequence
  Description of Artificial Sequence: Synthetic oligonucleotide
uaguuguuaaguacauuua

SEQ ID NO: 1600682 - RNA, 19 nt, Artificial Sequence
  Description of Artificial Sequence: Synthetic oligonucleotide
ugacuuacccugaggggcc

SEQ ID NO: 1600683 - RNA, 19 nt, Artificial Sequence
  Description of Artificial Sequence: Synthetic oligonucleotide
uccuaggacugacucuggg

SEQ ID NO: 1600684 - RNA, 19 nt, Artificial Sequence
  Description of Artificial Sequence: Synthetic oligonucleotide
aacccuuccucagggcugc

SEQ ID NO: 1600685 - RNA, 19 nt, Artificial Sequence
  Description of Artificial Sequence: Synthetic oligonucleotide
agcugcauauugaugcagc

SEQ ID NO: 1600686 - RNA, 19 nt, Artificial Sequence
  Description of Artificial Sequence: Synthetic oligonucleotide
ccuggaagaguuuaagacc

SEQ ID NO: 1600687 - RNA, 19 nt, Artificial Sequence
  Description of Artificial Sequence: Synthetic oligonucleotide
caaagcaaguagacuuggg

SEQ ID NO: 1600688 - RNA, 19 nt, Artificial Sequence
  Description of Artificial Sequence: Synthetic oligonucleotide
ggcaguaugaggcucuugc

SEQ ID NO: 1600689 - RNA, 19 nt, Artificial Sequence
  Description of Artificial Sequence: Synthetic oligonucleotide
caauccugugggaacagac

SEQ ID NO: 1600690 - RNA, 19 nt, Artificial Sequence
  Description of Artificial Sequence: Synthetic oligonucleotide
ggcucgauggucuugcucc

SEQ ID NO: 1600691 - RNA, 19 nt, Artificial Sequence
  Description of Artificial Sequence: Synthetic oligonucleotide
aagggaauguaaguuugga

SEQ ID NO: 1600692 - RNA, 19 nt, Artificial Sequence
  Description of Artificial Sequence: Synthetic oligonucleotide
uuccaaaggagcaggccac

SEQ ID NO: 1600693 - RNA, 19 nt, Artificial Sequence
  Description of Artificial Sequence: Synthetic oligonucleotide
cauccuaggacugacucug

SEQ ID NO: 1600694 - RNA, 19 nt, Artificial Sequence
  Description of Artificial Sequence: Synthetic oligonucleotide
agaugaaucuugugcccag

SEQ ID NO: 1600695 - RNA, 19 nt, Artificial Sequence
  Description of Artificial Sequence: Synthetic oligonucleotide
auggacgaaccugacugcc

SEQ ID NO: 1600696 - RNA, 19 nt, Artificial Sequence
  Description of Artificial Sequence: Synthetic oligonucleotide
uuggguuaauggauaucug

SEQ ID NO: 1600697 - RNA, 19 nt, Artificial Sequence
  Description of Artificial Sequence: Synthetic oligonucleotide
cugugcaggaggcaggccc

SEQ ID NO: 1600698 - RNA, 19 nt, Artificial Sequence
  Description of Artificial Sequence: Synthetic oligonucleotide
ugaaucuugugcccaggaa

SEQ ID NO: 1600699 - RNA, 19 nt, Artificial Sequence
  Description of Artificial Sequence: Synthetic oligonucleotide
uggauaucugucaucuuuu

SEQ ID NO: 1600700 - RNA, 19 nt, Artificial Sequence
  Description of Artificial Sequence: Synthetic oligonucleotide
gagagguuaaaaggggaug

SEQ ID NO: 1600701 - RNA, 19 nt, Artificial Sequence
  Description of Artificial Sequence: Synthetic oligonucleotide
agcuggcaacccuaggcac

SEQ ID NO: 1600702 - RNA, 19 nt, Artificial Sequence
  Description of Artificial Sequence: Synthetic oligonucleotide
agagcaaggguuugggaau

SEQ ID NO: 1600703 - RNA, 19 nt, Artificial Sequence
  Description of Artificial Sequence: Synthetic oligonucleotide
ggcaguagaagccagcuga

SEQ ID NO: 1600704 - RNA, 19 nt, Artificial Sequence
  Description of Artificial Sequence: Synthetic oligonucleotide
aaguagacuuggggaagac

SEQ ID NO: 1600705 - RNA, 19 nt, Artificial Sequence
  Description of Artificial Sequence: Synthetic oligonucleotide
uggucuugcuccuccaaga

SEQ ID NO: 1600706 - RNA, 19 nt, Artificial Sequence
  Description of Artificial Sequence: Synthetic oligonucleotide
cuaggacugacucugggga

SEQ ID NO: 1600707 - RNA, 19 nt, Artificial Sequence
  Description of Artificial Sequence: Synthetic oligonucleotide
uggagagggugucccagag

SEQ ID NO: 1600708 - RNA, 19 nt, Artificial Sequence
  Description of Artificial Sequence: Synthetic oligonucleotide
gauaucugucaucuuuuaa

SEQ ID NO: 1600709 - RNA, 19 nt, Artificial Sequence
  Description of Artificial Sequence: Synthetic oligonucleotide
gaauguaaguuuggagaug

SEQ ID NO: 1600710 - RNA, 19 nt, Artificial Sequence
  Description of Artificial Sequence: Synthetic oligonucleotide
cccaaaacuugcuucaccc

SEQ ID NO: 1600711 - RNA, 19 nt, Artificial Sequence
  Description of Artificial Sequence: Synthetic oligonucleotide
gguuaauggauaucuguca

SEQ ID NO: 1600712 - RNA, 19 nt, Artificial Sequence
  Description of Artificial Sequence: Synthetic oligonucleotide
aagagccuaggggacagug

SEQ ID NO: 1600713 - RNA, 19 nt, Artificial Sequence
  Description of Artificial Sequence: Synthetic oligonucleotide
guagaagccagcugacuca

SEQ ID NO: 1600714 - RNA, 19 nt, Artificial Sequence
  Description of Artificial Sequence: Synthetic oligonucleotide
gacagugauccgugagggg

SEQ ID NO: 1600715 - RNA, 19 nt, Artificial Sequence
  Description of Artificial Sequence: Synthetic oligonucleotide
acccaguuaaccccaguca

SEQ ID NO: 1600716 - RNA, 19 nt, Artificial Sequence
  Description of Artificial Sequence: Synthetic oligonucleotide
agacuuggggaagacuagg

SEQ ID NO: 1600717 - RNA, 19 nt, Artificial Sequence
  Description of Artificial Sequence: Synthetic oligonucleotide
gagcagauaugugaguuca

SEQ ID NO: 1600718 - RNA, 19 nt, Artificial Sequence
  Description of Artificial Sequence: Synthetic oligonucleotide
caguaugaggcucuugcuc

SEQ ID NO: 1600719 - RNA, 19 nt, Artificial Sequence
  Description of Artificial Sequence: Synthetic oligonucleotide
uggaagaguuuaagaccag

SEQ ID NO: 1600720 - RNA, 19 nt, Artificial Sequence
  Description of Artificial Sequence: Synthetic oligonucleotide
gcucgucauggccagaugg

SEQ ID NO: 1600721 - RNA, 19 nt, Artificial Sequence
  Description of Artificial Sequence: Synthetic oligonucleotide
acuaggcaguaugaggcuc

SEQ ID NO: 1600722 - RNA, 19 nt, Artificial Sequence
  Description of Artificial Sequence: Synthetic oligonucleotide
ugggagagggcaguagaag

SEQ ID NO: 1600723 - RNA, 19 nt, Artificial Sequence
  Description of Artificial Sequence: Synthetic oligonucleotide
cccauagcauucuuggucc

SEQ ID NO: 1600724 - RNA, 19 nt, Artificial Sequence
  Description of Artificial Sequence: Synthetic oligonucleotide
uuaagaccagggccagggc

SEQ ID NO: 1600725 - RNA, 19 nt, Artificial Sequence
  Description of Artificial Sequence: Synthetic oligonucleotide
ucuagauaguccuggccuu

SEQ ID NO: 1600726 - RNA, 19 nt, Artificial Sequence
  Description of Artificial Sequence: Synthetic oligonucleotide
gaaagacaucugcuccugc

SEQ ID NO: 1600727 - RNA, 19 nt, Artificial Sequence
  Description of Artificial Sequence: Synthetic oligonucleotide
caggaaacccuuccucagg

SEQ ID NO: 1600728 - RNA, 19 nt, Artificial Sequence
  Description of Artificial Sequence: Synthetic oligonucleotide
acuuaguacguguccggga

SEQ ID NO: 1600729 - RNA, 19 nt, Artificial Sequence
  Description of Artificial Sequence: Synthetic oligonucleotide
augaaucuugugcccagga

SEQ ID NO: 1600730 - RNA, 19 nt, Artificial Sequence
  Description of Artificial Sequence: Synthetic oligonucleotide
gggagaagccuacagcugc

SEQ ID NO: 1600731 - RNA, 19 nt, Artificial Sequence
  Description of Artificial Sequence: Synthetic oligonucleotide
cugaaucuagauaguccug

SEQ ID NO: 1600732 - RNA, 19 nt, Artificial Sequence
  Description of Artificial Sequence: Synthetic oligonucleotide
gaagccuacagcugcauau

SEQ ID NO: 1600733 - RNA, 19 nt, Artificial Sequence
  Description of Artificial Sequence: Synthetic oligonucleotide
uuaaccccagucacuucac

SEQ ID NO: 1600734 - RNA, 19 nt, Artificial Sequence
  Description of Artificial Sequence: Synthetic oligonucleotide
aaucuuggguuaauggaua

SEQ ID NO: 1600735 - RNA, 19 nt, Artificial Sequence
  Description of Artificial Sequence: Synthetic oligonucleotide
auacaucacaguggagagg

SEQ ID NO: 1600736 - RNA, 19 nt, Artificial Sequence
  Description of Artificial Sequence: Synthetic oligonucleotide
ucugggucccucagggaga

SEQ ID NO: 1600737 - RNA, 19 nt, Artificial Sequence
  Description of Artificial Sequence: Synthetic oligonucleotide
aaacccuuccucagggcug

SEQ ID NO: 1600738 - RNA, 19 nt, Artificial Sequence
  Description of Artificial Sequence: Synthetic oligonucleotide
uugggagagggcaguagaa

SEQ ID NO: 1600739 - RNA, 19 nt, Artificial Sequence
  Description of Artificial Sequence: Synthetic oligonucleotide
uucaccccucucuaacagc

SEQ ID NO: 1600740 - RNA, 19 nt, Artificial Sequence
  Description of Artificial Sequence: Synthetic oligonucleotide
ggaagaguuuaagaccagg

SEQ ID NO: 1600741 - RNA, 19 nt, Artificial Sequence
  Description of Artificial Sequence: Synthetic oligonucleotide
cucuuguuaguugcuuucc

SEQ ID NO: 1600742 - RNA, 19 nt, Artificial Sequence
  Description of Artificial Sequence: Synthetic oligonucleotide
cuuaguacguguccgggaa

SEQ ID NO: 1600743 - RNA, 19 nt, Artificial Sequence
  Description of Artificial Sequence: Synthetic oligonucleotide
cuuggguuaauggauaucu

SEQ ID NO: 1600744 - RNA, 19 nt, Artificial Sequence
  Description of Artificial Sequence: Synthetic oligonucleotide
uccgugaggggcuggacaa

SEQ ID NO: 1600745 - RNA, 19 nt, Artificial Sequence
  Description of Artificial Sequence: Synthetic oligonucleotide
uuaguacguguccgggaac

SEQ ID NO: 1600746 - RNA, 19 nt, Artificial Sequence
  Description of Artificial Sequence: Synthetic oligonucleotide
gaaacccuuccucagggcu

SEQ ID NO: 1600747 - RNA, 19 nt, Artificial Sequence
  Description of Artificial Sequence: Synthetic oligonucleotide
cuuggggauucugggaggg

SEQ ID NO: 1600748 - RNA, 19 nt, Artificial Sequence
  Description of Artificial Sequence: Synthetic oligonucleotide
auagcauucuugguccuga

SEQ ID NO: 1600749 - RNA, 19 nt, Artificial Sequence
  Description of Artificial Sequence: Synthetic oligonucleotide
aguuuaagaccagggccag

SEQ ID NO: 1600750 - RNA, 19 nt, Artificial Sequence
  Description of Artificial Sequence: Synthetic oligonucleotide
aauggauaucugucaucuu

SEQ ID NO: 1600751 - RNA, 19 nt, Artificial Sequence
  Description of Artificial Sequence: Synthetic oligonucleotide
guuaauggauaucugucau

SEQ ID NO: 1600752 - RNA, 19 nt, Artificial Sequence
  Description of Artificial Sequence: Synthetic oligonucleotide
cuuguuaguugcuuuccaa

SEQ ID NO: 1600753 - RNA, 19 nt, Artificial Sequence
  Description of Artificial Sequence: Synthetic oligonucleotide
uaguacguguccgggaacu

SEQ ID NO: 1600754 - RNA, 19 nt, Artificial Sequence
  Description of Artificial Sequence: Synthetic oligonucleotide
cacuuaguacguguccggg

SEQ ID NO: 1600755 - RNA, 19 nt, Artificial Sequence
  Description of Artificial Sequence: Synthetic oligonucleotide
ugagguccugaaucuagau

SEQ ID NO: 1600756 - RNA, 19 nt, Artificial Sequence
  Description of Artificial Sequence: Synthetic oligonucleotide
ugacucacugccccuggaa

SEQ ID NO: 1600757 - RNA, 19 nt, Artificial Sequence
  Description of Artificial Sequence: Synthetic oligonucleotide
uacccugaggggccccugg

SEQ ID NO: 1600758 - RNA, 19 nt, Artificial Sequence
  Description of Artificial Sequence: Synthetic oligonucleotide
uaacugugcccauccuggc

SEQ ID NO: 1600759 - RNA, 19 nt, Artificial Sequence
  Description of Artificial Sequence: Synthetic oligonucleotide
agccuacagcugcauauug

SEQ ID NO: 1600760 - RNA, 19 nt, Artificial Sequence
  Description of Artificial Sequence: Synthetic oligonucleotide
ucgucauggccagaugggc

SEQ ID NO: 1600761 - RNA, 19 nt, Artificial Sequence
  Description of Artificial Sequence: Synthetic oligonucleotide
guacguguccgggaacugg

SEQ ID NO: 1600762 - RNA, 19 nt, Artificial Sequence
  Description of Artificial Sequence: Synthetic oligonucleotide
ugugcuucucugguuggga

SEQ ID NO: 1600763 - RNA, 19 nt, Artificial Sequence
  Description of Artificial Sequence: Synthetic oligonucleotide
uaggacugacucuggggac

SEQ ID NO: 1600764 - RNA, 19 nt, Artificial Sequence
  Description of Artificial Sequence: Synthetic oligonucleotide
agggccacccuucuuccug

SEQ ID NO: 1600765 - RNA, 19 nt, Artificial Sequence
  Description of Artificial Sequence: Synthetic oligonucleotide
ggggaaagcccagaguagg

SEQ ID NO: 1600766 - RNA, 19 nt, Artificial Sequence
  Description of Artificial Sequence: Synthetic oligonucleotide
aucuuggguuaauggauau

SEQ ID NO: 1600767 - RNA, 19 nt, Artificial Sequence
  Description of Artificial Sequence: Synthetic oligonucleotide
gagggugucccagaggcuc

SEQ ID NO: 1600768 - RNA, 19 nt, Artificial Sequence
  Description of Artificial Sequence: Synthetic oligonucleotide
gagccugcauccuaggacu

SEQ ID NO: 1600769 - RNA, 19 nt, Artificial Sequence
  Description of Artificial Sequence: Synthetic oligonucleotide
uguccgggaacugggcucc

SEQ ID NO: 1600770 - RNA, 19 nt, Artificial Sequence
  Description of Artificial Sequence: Synthetic oligonucleotide
ggguuugggaaucaggaaa

SEQ ID NO: 1600771 - RNA, 19 nt, Artificial Sequence
  Description of Artificial Sequence: Synthetic oligonucleotide
ccuaggacugacucugggg

SEQ ID NO: 1600772 - RNA, 19 nt, Artificial Sequence
  Description of Artificial Sequence: Synthetic oligonucleotide
caaaacuugcuucaccccu

SEQ ID NO: 1600773 - RNA, 19 nt, Artificial Sequence
  Description of Artificial Sequence: Synthetic oligonucleotide
uaaccccagucacuucaca

SEQ ID NO: 1600774 - RNA, 19 nt, Artificial Sequence
  Description of Artificial Sequence: Synthetic oligonucleotide
ucucugguugggagagggc

SEQ ID NO: 1600775 - RNA, 19 nt, Artificial Sequence
  Description of Artificial Sequence: Synthetic oligonucleotide
gccuaggggacagugaucc

SEQ ID NO: 1600776 - RNA, 19 nt, Artificial Sequence
  Description of Artificial Sequence: Synthetic oligonucleotide
guuugggaaucaggaaacc

SEQ ID NO: 1600777 - RNA, 19 nt, Artificial Sequence
  Description of Artificial Sequence: Synthetic oligonucleotide
cacacuugcuuuuaacugu

SEQ ID NO: 1600778 - RNA, 19 nt, Artificial Sequence
  Description of Artificial Sequence: Synthetic oligonucleotide
ggagaguugcacuggcccc

SEQ ID NO: 1600779 - RNA, 19 nt, Artificial Sequence
  Description of Artificial Sequence: Synthetic oligonucleotide
cacaguggagagguggcag

SEQ ID NO: 1600780 - RNA, 19 nt, Artificial Sequence
  Description of Artificial Sequence: Synthetic oligonucleotide
uccacacacuugcuuuuaa

SEQ ID NO: 1600781 - RNA, 19 nt, Artificial Sequence
  Description of Artificial Sequence: Synthetic oligonucleotide
uuguuucugggcagaggau

SEQ ID NO: 1600782 - RNA, 19 nt, Artificial Sequence
  Description of Artificial Sequence: Synthetic oligonucleotide
gagguccugaaucuagaua

SEQ ID NO: 1600783 - RNA, 19 nt, Artificial Sequence
  Description of Artificial Sequence: Synthetic oligonucleotide
ucuacccuuggggauucug

SEQ ID NO: 1600784 - RNA, 19 nt, Artificial Sequence
  Description of Artificial Sequence: Synthetic oligonucleotide
gcaaagcaaguagacuugg

SEQ ID NO: 1600785 - RNA, 19 nt, Artificial Sequence
  Description of Artificial Sequence: Synthetic oligonucleotide
ggguuaauggauaucuguc

SEQ ID NO: 1600786 - RNA, 19 nt, Artificial Sequence
  Description of Artificial Sequence: Synthetic oligonucleotide
ccugacuuacccugagggg

SEQ ID NO: 1600787 - RNA, 19 nt, Artificial Sequence
  Description of Artificial Sequence: Synthetic oligonucleotide
cuagauaguccuggccuug

SEQ ID NO: 1600788 - RNA, 19 nt, Artificial Sequence
  Description of Artificial Sequence: Synthetic oligonucleotide
ggaauguaaguuuggagau

SEQ ID NO: 1600789 - RNA, 19 nt, Artificial Sequence
  Description of Artificial Sequence: Synthetic oligonucleotide
cacuugcuuuuaacugugc

SEQ ID NO: 1600790 - RNA, 19 nt, Artificial Sequence
  Description of Artificial Sequence: Synthetic oligonucleotide
ugcccauagcauucuuggu

SEQ ID NO: 1600791 - RNA, 19 nt, Artificial Sequence
  Description of Artificial Sequence: Synthetic oligonucleotide
auaugugaguucacuugca

SEQ ID NO: 1600792 - RNA, 19 nt, Artificial Sequence
  Description of Artificial Sequence: Synthetic oligonucleotide
agcagauaugugaguucac

SEQ ID NO: 1600793 - RNA, 19 nt, Artificial Sequence
  Description of Artificial Sequence: Synthetic oligonucleotide
gagguuaaaaggggaugga

SEQ ID NO: 1600794 - RNA, 19 nt, Artificial Sequence
  Description of Artificial Sequence: Synthetic oligonucleotide
cugcauauugaugcagcuc

SEQ ID NO: 1600795 - RNA, 19 nt, Artificial Sequence
  Description of Artificial Sequence: Synthetic oligonucleotide
caacccuaggcacuuagua

SEQ ID NO: 1600796 - RNA, 19 nt, Artificial Sequence
  Description of Artificial Sequence: Synthetic oligonucleotide
cugacucuggggacaccag

SEQ ID NO: 1600797 - RNA, 19 nt, Artificial Sequence
  Description of Artificial Sequence: Synthetic oligonucleotide
cauagcauucuugguccug

SEQ ID NO: 1600798 - RNA, 19 nt, Artificial Sequence
  Description of Artificial Sequence: Synthetic oligonucleotide
gaggagaguugcacuggcc

SEQ ID NO: 1600799 - RNA, 19 nt, Artificial Sequence
  Description of Artificial Sequence: Synthetic oligonucleotide
aagccuacagcugcauauu

SEQ ID NO: 1600800 - RNA, 19 nt, Artificial Sequence
  Description of Artificial Sequence: Synthetic oligonucleotide
guccugaaucuagauaguc

SEQ ID NO: 1600801 - RNA, 19 nt, Artificial Sequence
  Description of Artificial Sequence: Synthetic oligonucleotide
ucacaguggagagguggca

SEQ ID NO: 1600802 - RNA, 19 nt, Artificial Sequence
  Description of Artificial Sequence: Synthetic oligonucleotide
aggacugacucuggggaca

SEQ ID NO: 1600803 - RNA, 19 nt, Artificial Sequence
  Description of Artificial Sequence: Synthetic oligonucleotide
gauggucuugcuccuccaa

SEQ ID NO: 1600804 - RNA, 19 nt, Artificial Sequence
  Description of Artificial Sequence: Synthetic oligonucleotide
cugggacuuuauuugagcu

SEQ ID NO: 1600805 - RNA, 19 nt, Artificial Sequence
  Description of Artificial Sequence: Synthetic oligonucleotide
uagauaguccuggccuugu

SEQ ID NO: 1600806 - RNA, 19 nt, Artificial Sequence
  Description of Artificial Sequence: Synthetic oligonucleotide
auguaaguuuggagauggg

SEQ ID NO: 1600807 - RNA, 19 nt, Artificial Sequence
  Description of Artificial Sequence: Synthetic oligonucleotide
ggcaacccuaggcacuuag

SEQ ID NO: 1600808 - RNA, 19 nt, Artificial Sequence
  Description of Artificial Sequence: Synthetic oligonucleotide
cagggcucgauggucuugc

SEQ ID NO: 1600809 - RNA, 19 nt, Artificial Sequence
  Description of Artificial Sequence: Synthetic oligonucleotide
gcaaguagacuuggggaag

SEQ ID NO: 1600810 - RNA, 19 nt, Artificial Sequence
  Description of Artificial Sequence: Synthetic oligonucleotide
ggggcaacaccccuggauc

SEQ ID NO: 1600811 - RNA, 19 nt, Artificial Sequence
  Description of Artificial Sequence: Synthetic oligonucleotide
gagccuaggggacagugau

SEQ ID NO: 1600812 - RNA, 19 nt, Artificial Sequence
  Description of Artificial Sequence: Synthetic oligonucleotide
ccugaaucuagauaguccu

SEQ ID NO: 1600813 - RNA, 19 nt, Artificial Sequence
  Description of Artificial Sequence: Synthetic oligonucleotide
gggagagcaaggguuuggg

SEQ ID NO: 1600814 - RNA, 19 nt, Artificial Sequence
  Description of Artificial Sequence: Synthetic oligonucleotide
cugggagcacaccauccuc

SEQ ID NO: 1600815 - RNA, 19 nt, Artificial Sequence
  Description of Artificial Sequence: Synthetic oligonucleotide
cuaggcacuuaguacgugu

SEQ ID NO: 1600816 - RNA, 19 nt, Artificial Sequence
  Description of Artificial Sequence: Synthetic oligonucleotide
ggggacagugauccgugag

SEQ ID NO: 1600817 - RNA, 19 nt, Artificial Sequence
  Description of Artificial Sequence: Synthetic oligonucleotide
guguccgggaacugggcuc

SEQ ID NO: 1600818 - RNA, 19 nt, Artificial Sequence
  Description of Artificial Sequence: Synthetic oligonucleotide
cugugcuucucugguuggg

SEQ ID NO: 1600819 - RNA, 19 nt, Artificial Sequence
  Description of Artificial Sequence: Synthetic oligonucleotide
cuuggagcccugugcagga

SEQ ID NO: 1600820 - RNA, 19 nt, Artificial Sequence
  Description of Artificial Sequence: Synthetic oligonucleotide
gagggcaguagaagccagc

SEQ ID NO: 1600821 - RNA, 19 nt, Artificial Sequence
  Description of Artificial Sequence: Synthetic oligonucleotide
ugauccgugaggggcugga

SEQ ID NO: 1600822 - RNA, 19 nt, Artificial Sequence
  Description of Artificial Sequence: Synthetic oligonucleotide
cugcuccugccucacuccc

SEQ ID NO: 1600823 - RNA, 19 nt, Artificial Sequence
  Description of Artificial Sequence: Synthetic oligonucleotide
cagaguaggcuggcugagg

SEQ ID NO: 1600824 - RNA, 19 nt, Artificial Sequence
  Description of Artificial Sequence: Synthetic oligonucleotide
gaguaggcuggcugagguc

SEQ ID NO: 1600825 - RNA, 19 nt, Artificial Sequence
  Description of Artificial Sequence: Synthetic oligonucleotide
ucuccucccugaugggaaa

SEQ ID NO: 1600826 - RNA, 19 nt, Artificial Sequence
  Description of Artificial Sequence: Synthetic oligonucleotide
uccugccaggacugaugag

SEQ ID NO: 1600827 - RNA, 19 nt, Artificial Sequence
  Description of Artificial Sequence: Synthetic oligonucleotide
cccagucacuucacaaucc

SEQ ID NO: 1600828 - RNA, 19 nt, Artificial Sequence
  Description of Artificial Sequence: Synthetic oligonucleotide
aacagacaagggacauaca

SEQ ID NO: 1600829 - RNA, 19 nt, Artificial Sequence
  Description of Artificial Sequence: Synthetic oligonucleotide
cagcuggcaacccuaggca

SEQ ID NO: 1600830 - RNA, 19 nt, Artificial Sequence
  Description of Artificial Sequence: Synthetic oligonucleotide
acuuacccugaggggcccc

SEQ ID NO: 1600831 - RNA, 19 nt, Artificial Sequence
  Description of Artificial Sequence: Synthetic oligonucleotide
cuggccaauccucagcucu

SEQ ID NO: 1600832 - RNA, 19 nt, Artificial Sequence
  Description of Artificial Sequence: Synthetic oligonucleotide
aguacguguccgggaacug

SEQ ID NO: 1600833 - RNA, 19 nt, Artificial Sequence
  Description of Artificial Sequence: Synthetic oligonucleotide
gguccugacuuacccugag

SEQ ID NO: 1600834 - RNA, 19 nt, Artificial Sequence
  Description of Artificial Sequence: Synthetic oligonucleotide
uccucccugaugggaaaga

SEQ ID NO: 1600835 - RNA, 19 nt, Artificial Sequence
  Description of Artificial Sequence: Synthetic oligonucleotide
ugccccuggaagaguuuaa

SEQ ID NO: 1600836 - RNA, 19 nt, Artificial Sequence
  Description of Artificial Sequence: Synthetic oligonucleotide
uggccaauccucagcucuu

SEQ ID NO: 1600837 - RNA, 19 nt, Artificial Sequence
  Description of Artificial Sequence: Synthetic oligonucleotide
acguguccgggaacugggc

SEQ ID NO: 1600838 - RNA, 19 nt, Artificial Sequence
  Description of Artificial Sequence: Synthetic oligonucleotide
caaguagacuuggggaaga

SEQ ID NO: 1600839 - RNA, 19 nt, Artificial Sequence
  Description of Artificial Sequence: Synthetic oligonucleotide
gagcaaggguuugggaauc

SEQ ID NO: 1600840 - RNA, 19 nt, Artificial Sequence
  Description of Artificial Sequence: Synthetic oligonucleotide
cacaauccugugggaacag

SEQ ID NO: 1600841 - RNA, 19 nt, Artificial Sequence
  Description of Artificial Sequence: Synthetic oligonucleotide
ggggcuggacaaucuuggg

SEQ ID NO: 1600842 - RNA, 19 nt, Artificial Sequence
  Description of Artificial Sequence: Synthetic oligonucleotide
ccaauccucagcucuucug

SEQ ID NO: 1600843 - RNA, 19 nt, Artificial Sequence
  Description of Artificial Sequence: Synthetic oligonucleotide
agcucgucauggccagaug

SEQ ID NO: 1600844 - RNA, 19 nt, Artificial Sequence
  Description of Artificial Sequence: Synthetic oligonucleotide
acaauccugugggaacaga

SEQ ID NO: 1600845 - RNA, 19 nt, Artificial Sequence
  Description of Artificial Sequence: Synthetic oligonucleotide
aagccugaggagaguugca

SEQ ID NO: 1600846 - RNA, 19 nt, Artificial Sequence
  Description of Artificial Sequence: Synthetic oligonucleotide
gacuuuauuugagcugggu

SEQ ID NO: 1600847 - RNA, 19 nt, Artificial Sequence
  Description of Artificial Sequence: Synthetic oligonucleotide
gcugacucacugccccugg

SEQ ID NO: 1600848 - RNA, 19 nt, Artificial Sequence
  Description of Artificial Sequence: Synthetic oligonucleotide
agagccuaggggacaguga

SEQ ID NO: 1600849 - RNA, 19 nt, Artificial Sequence
  Description of Artificial Sequence: Synthetic oligonucleotide
cuaggcaguaugaggcucu

SEQ ID NO: 1600850 - RNA, 19 nt, Artificial Sequence
  Description of Artificial Sequence: Synthetic oligonucleotide
ccacacacuugcuuuuaac

SEQ ID NO: 1600851 - RNA, 19 nt, Artificial Sequence
  Description of Artificial Sequence: Synthetic oligonucleotide
agcugcacccacccaguua

SEQ ID NO: 1600852 - RNA, 19 nt, Artificial Sequence
  Description of Artificial Sequence: Synthetic oligonucleotide
cagauaugugaguucacuu

SEQ ID NO: 1600853 - RNA, 19 nt, Artificial Sequence
  Description of Artificial Sequence: Synthetic oligonucleotide
agauaguccuggccuuguu

SEQ ID NO: 1600854 - RNA, 19 nt, Artificial Sequence
  Description of Artificial Sequence: Synthetic oligonucleotide
ggaucugugcuucucuggu

SEQ ID NO: 1600855 - RNA, 19 nt, Artificial Sequence
  Description of Artificial Sequence: Synthetic oligonucleotide
gacuuacccugaggggccc

SEQ ID NO: 1600856 - RNA, 19 nt, Artificial Sequence
  Description of Artificial Sequence: Synthetic oligonucleotide
gcugagccugcauccuagg

SEQ ID NO: 1600857 - RNA, 19 nt, Artificial Sequence
  Description of Artificial Sequence: Synthetic oligonucleotide
cuuucaugccagguuccca

SEQ ID NO: 1600858 - RNA, 19 nt, Artificial Sequence
  Description of Artificial Sequence: Synthetic oligonucleotide
gcccagaguaggcuggcug

SEQ ID NO: 1600859 - RNA, 19 nt, Artificial Sequence
  Description of Artificial Sequence: Synthetic oligonucleotide
gggaaagcccagaguaggc

SEQ ID NO: 1600860 - RNA, 19 nt, Artificial Sequence
  Description of Artificial Sequence: Synthetic oligonucleotide
agccuaggggacagugauc

SEQ ID NO: 1600861 - RNA, 19 nt, Artificial Sequence
  Description of Artificial Sequence: Synthetic oligonucleotide
aggggacagugauccguga

SEQ ID NO: 1600862 - RNA, 19 nt, Artificial Sequence
  Description of Artificial Sequence: Synthetic oligonucleotide
auccuaggacugacucugg

SEQ ID NO: 1600863 - RNA, 19 nt, Artificial Sequence
  Description of Artificial Sequence: Synthetic oligonucleotide
cugagccugcauccuagga

SEQ ID NO: 1600864 - RNA, 19 nt, Artificial Sequence
  Description of Artificial Sequence: Synthetic oligonucleotide
uggggaagacuaggcagua

SEQ ID NO: 1600865 - RNA, 19 nt, Artificial Sequence
  Description of Artificial Sequence: Synthetic oligonucleotide
ggacuuuauuugagcuggg

SEQ ID NO: 1600866 - RNA, 19 nt, Artificial Sequence
  Description of Artificial Sequence: Synthetic oligonucleotide
gguugggagagggcaguag

SEQ ID NO: 1600867 - RNA, 19 nt, Artificial Sequence
  Description of Artificial Sequence: Synthetic oligonucleotide
gggaaagacaucugcuccu

SEQ ID NO: 1600868 - RNA, 19 nt, Artificial Sequence
  Description of Artificial Sequence: Synthetic oligonucleotide
ggauaucugucaucuuuua

SEQ ID NO: 1600869 - RNA, 19 nt, Artificial Sequence
  Description of Artificial Sequence: Synthetic oligonucleotide
cccugggacuuuauuugag

SEQ ID NO: 1600870 - RNA, 19 nt, Artificial Sequence
  Description of Artificial Sequence: Synthetic oligonucleotide
gggucccucagggagagca

SEQ ID NO: 1600871 - RNA, 19 nt, Artificial Sequence
  Description of Artificial Sequence: Synthetic oligonucleotide
cuaggggacagugauccgu

SEQ ID NO: 1600872 - RNA, 19 nt, Artificial Sequence
  Description of Artificial Sequence: Synthetic oligonucleotide
caccccucucuaacagcug

SEQ ID NO: 1600873 - RNA, 19 nt, Artificial Sequence
  Description of Artificial Sequence: Synthetic oligonucleotide
cuccucccugaugggaaag

SEQ ID NO: 1600874 - RNA, 19 nt, Artificial Sequence
  Description of Artificial Sequence: Synthetic oligonucleotide
gcagauaugugaguucacu

SEQ ID NO: 1600875 - RNA, 19 nt, Artificial Sequence
  Description of Artificial Sequence: Synthetic oligonucleotide
gugucccagaggcucucuc

SEQ ID NO: 1600876 - RNA, 19 nt, Artificial Sequence
  Description of Artificial Sequence: Synthetic oligonucleotide
cagggagagcaaggguuug

SEQ ID NO: 1600877 - RNA, 19 nt, Artificial Sequence
  Description of Artificial Sequence: Synthetic oligonucleotide
cugaguggagccggggcca

SEQ ID NO: 1600878 - RNA, 19 nt, Artificial Sequence
  Description of Artificial Sequence: Synthetic oligonucleotide
ggggcucggaccucaggac

SEQ ID NO: 1600879 - RNA, 19 nt, Artificial Sequence
  Description of Artificial Sequence: Synthetic oligonucleotide
gugguggggagaagccuac

SEQ ID NO: 1600880 - RNA, 19 nt, Artificial Sequence
  Description of Artificial Sequence: Synthetic oligonucleotide
gcaguagaagccagcugac

SEQ ID NO: 1600881 - RNA, 19 nt, Artificial Sequence
  Description of Artificial Sequence: Synthetic oligonucleotide
ccccucucuaacagcuggg

SEQ ID NO: 1600882 - RNA, 19 nt, Artificial Sequence
  Description of Artificial Sequence: Synthetic oligonucleotide
gccccuggaagaguuuaag

SEQ ID NO: 1600883 - RNA, 19 nt, Artificial Sequence
  Description of Artificial Sequence: Synthetic oligonucleotide
gcaggccacagcuggcaac

SEQ ID NO: 1600884 - RNA, 19 nt, Artificial Sequence
  Description of Artificial Sequence: Synthetic oligonucleotide
gccaagggaauguaaguuu

SEQ ID NO: 1600885 - RNA, 19 nt, Artificial Sequence
  Description of Artificial Sequence: Synthetic oligonucleotide
cuggacaaucuuggguuaa

SEQ ID NO: 1600886 - RNA, 19 nt, Artificial Sequence
  Description of Artificial Sequence: Synthetic oligonucleotide
agggcucgauggucuugcu

SEQ ID NO: 1600887 - RNA, 19 nt, Artificial Sequence
  Description of Artificial Sequence: Synthetic oligonucleotide
cagugauccgugaggggcu

SEQ ID NO: 1600888 - RNA, 19 nt, Artificial Sequence
  Description of Artificial Sequence: Synthetic oligonucleotide
gccuacagcugcauauuga

SEQ ID NO: 1600889 - RNA, 19 nt, Artificial Sequence
  Description of Artificial Sequence: Synthetic oligonucleotide
aggcaguaugaggcucuug

SEQ ID NO: 1600890 - RNA, 19 nt, Artificial Sequence
  Description of Artificial Sequence: Synthetic oligonucleotide
cugacucacugccccugga

SEQ ID NO: 1600891 - RNA, 19 nt, Artificial Sequence
  Description of Artificial Sequence: Synthetic oligonucleotide
gugcccauccuggccaauc

SEQ ID NO: 1600892 - RNA, 19 nt, Artificial Sequence
  Description of Artificial Sequence: Synthetic oligonucleotide
caguuaaccccagucacuu

SEQ ID NO: 1600893 - RNA, 19 nt, Artificial Sequence
  Description of Artificial Sequence: Synthetic oligonucleotide
gggcuggacaaucuugggu

SEQ ID NO: 1600894 - RNA, 19 nt, Artificial Sequence
  Description of Artificial Sequence: Synthetic oligonucleotide
agccugcauccuaggacug

SEQ ID NO: 1600895 - RNA, 19 nt, Artificial Sequence
  Description of Artificial Sequence: Synthetic oligonucleotide
uaggcaguaugaggcucuu

SEQ ID NO: 1600896 - RNA, 19 nt, Artificial Sequence
  Description of Artificial Sequence: Synthetic oligonucleotide
ggugguggggagaagccua

SEQ ID NO: 1600897 - RNA, 19 nt, Artificial Sequence
  Description of Artificial Sequence: Synthetic oligonucleotide
ugguugggagagggcagua

SEQ ID NO: 1600898 - RNA, 19 nt, Artificial Sequence
  Description of Artificial Sequence: Synthetic oligonucleotide
cugcacccacccaguuaac

SEQ ID NO: 1600899 - RNA, 19 nt, Artificial Sequence
  Description of Artificial Sequence: Synthetic oligonucleotide
gggccaagggaauguaagu

SEQ ID NO: 1600900 - RNA, 19 nt, Artificial Sequence
  Description of Artificial Sequence: Synthetic oligonucleotide
cuucuuccugaggccugug

SEQ ID NO: 1600901 - RNA, 19 nt, Artificial Sequence
  Description of Artificial Sequence: Synthetic oligonucleotide
gcauccuaggacugacucu

SEQ ID NO: 1600902 - RNA, 19 nt, Artificial Sequence
  Description of Artificial Sequence: Synthetic oligonucleotide
ccccuggaagaguuuaaga

SEQ ID NO: 1600903 - RNA, 19 nt, Artificial Sequence
  Description of Artificial Sequence: Synthetic oligonucleotide
guucacuugcaaggccaaa

SEQ ID NO: 1600904 - RNA, 19 nt, Artificial Sequence
  Description of Artificial Sequence: Synthetic oligonucleotide
gaguugcacuggccccuuc

SEQ ID NO: 1600905 - RNA, 19 nt, Artificial Sequence
  Description of Artificial Sequence: Synthetic oligonucleotide
gggcucgauggucuugcuc

SEQ ID NO: 1600906 - RNA, 19 nt, Artificial Sequence
  Description of Artificial Sequence: Synthetic oligonucleotide
ccgggaacugggcuccuug

SEQ ID NO: 1600907 - RNA, 19 nt, Artificial Sequence
  Description of Artificial Sequence: Synthetic oligonucleotide
ccucccugaugggaaagac

SEQ ID NO: 1600908 - RNA, 19 nt, Artificial Sequence
  Description of Artificial Sequence: Synthetic oligonucleotide
cuggcagccucuuguuagu

SEQ ID NO: 1600909 - RNA, 19 nt, Artificial Sequence
  Description of Artificial Sequence: Synthetic oligonucleotide
ggucuugcuccuccaagau

SEQ ID NO: 1600910 - RNA, 19 nt, Artificial Sequence
  Description of Artificial Sequence: Synthetic oligonucleotide
gaguggagccggggccacc

SEQ ID NO: 1600911 - RNA, 19 nt, Artificial Sequence
  Description of Artificial Sequence: Synthetic oligonucleotide
ggagccggggccaccugug

SEQ ID NO: 1600912 - RNA, 19 nt, Artificial Sequence
  Description of Artificial Sequence: Synthetic oligonucleotide
gggauggacgaaccugacu

SEQ ID NO: 1600913 - RNA, 19 nt, Artificial Sequence
  Description of Artificial Sequence: Synthetic oligonucleotide
ggccccugggacuuuauuu

SEQ ID NO: 1600914 - RNA, 19 nt, Artificial Sequence
  Description of Artificial Sequence: Synthetic oligonucleotide
ccaguuaaccccagucacu

SEQ ID NO: 1600915 - RNA, 19 nt, Artificial Sequence
  Description of Artificial Sequence: Synthetic oligonucleotide
gcugggucugggucccuca

SEQ ID NO: 1600916 - RNA, 19 nt, Artificial Sequence
  Description of Artificial Sequence: Synthetic oligonucleotide
uucuacccuuggggauucu

SEQ ID NO: 1600917 - RNA, 19 nt, Artificial Sequence
  Description of Artificial Sequence: Synthetic oligonucleotide
gccugaggagaguugcacu

SEQ ID NO: 1600918 - RNA, 19 nt, Artificial Sequence
  Description of Artificial Sequence: Synthetic oligonucleotide
gggccacccuucuuccuga

SEQ ID NO: 1600919 - RNA, 19 nt, Artificial Sequence
  Description of Artificial Sequence: Synthetic oligonucleotide
guggagccggggccaccug

SEQ ID NO: 1600920 - RNA, 19 nt, Artificial Sequence
  Description of Artificial Sequence: Synthetic oligonucleotide
cucggaccucaggacaaaa

SEQ ID NO: 1600921 - RNA, 19 nt, Artificial Sequence
  Description of Artificial Sequence: Synthetic oligonucleotide
ggcugcaugcaaagcaagu

SEQ ID NO: 1600922 - RNA, 19 nt, Artificial Sequence
  Description of Artificial Sequence: Synthetic oligonucleotide
gcuggguguuggccagggc

SEQ ID NO: 1600923 - RNA, 19 nt, Artificial Sequence
  Description of Artificial Sequence: Synthetic oligonucleotide
ccugccucacuccccaaaa

SEQ ID NO: 1600924 - RNA, 19 nt, Artificial Sequence
  Description of Artificial Sequence: Synthetic oligonucleotide
ccuaggcacuuaguacgug

SEQ ID NO: 1600925 - RNA, 19 nt, Artificial Sequence
  Description of Artificial Sequence: Synthetic oligonucleotide
cacuccccaaaacuugcuu

SEQ ID NO: 1600926 - RNA, 19 nt, Artificial Sequence
  Description of Artificial Sequence: Synthetic oligonucleotide
ggcucggaccucaggacaa

SEQ ID NO: 1600927 - RNA, 19 nt, Artificial Sequence
  Description of Artificial Sequence: Synthetic oligonucleotide
ccccugggacuuuauuuga

SEQ ID NO: 1600928 - RNA, 19 nt, Artificial Sequence
  Description of Artificial Sequence: Synthetic oligonucleotide
cacugccccuggaagaguu

SEQ ID NO: 1600929 - RNA, 19 nt, Artificial Sequence
  Description of Artificial Sequence: Synthetic oligonucleotide
cugguugggagagggcagu

SEQ ID NO: 1600930 - RNA, 19 nt, Artificial Sequence
  Description of Artificial Sequence: Synthetic oligonucleotide
ggccaauccucagcucuuc

SEQ ID NO: 1600931 - RNA, 19 nt, Artificial Sequence
  Description of Artificial Sequence: Synthetic oligonucleotide
gggaacagacaagggacau

SEQ ID NO: 1600932 - RNA, 19 nt, Artificial Sequence
  Description of Artificial Sequence: Synthetic oligonucleotide
uccgggaacugggcuccuu

SEQ ID NO: 1600933 - RNA, 19 nt, Artificial Sequence
  Description of Artificial Sequence: Synthetic oligonucleotide
gguccugaaucuagauagu

SEQ ID NO: 1600934 - RNA, 19 nt, Artificial Sequence
  Description of Artificial Sequence: Synthetic oligonucleotide
cgugaggggcuggacaauc

SEQ ID NO: 1600935 - RNA, 19 nt, Artificial Sequence
  Description of Artificial Sequence: Synthetic oligonucleotide
caggacugaugaggccuga

SEQ ID NO: 1600936 - RNA, 19 nt, Artificial Sequence
  Description of Artificial Sequence: Synthetic oligonucleotide
gaagagccuaggggacagu

SEQ ID NO: 1600937 - RNA, 19 nt, Artificial Sequence
  Description of Artificial Sequence: Synthetic oligonucleotide
cuuacccugaggggccccu

SEQ ID NO: 1600938 - RNA, 19 nt, Artificial Sequence
  Description of Artificial Sequence: Synthetic oligonucleotide
gcauauugaugcagcucgu

SEQ ID NO: 1600939 - RNA, 19 nt, Artificial Sequence
  Description of Artificial Sequence: Synthetic oligonucleotide
gcucaggggcaacaccccu

SEQ ID NO: 1600940 - RNA, 19 nt, Artificial Sequence
  Description of Artificial Sequence: Synthetic oligonucleotide
cagaggcucucuccucccu

SEQ ID NO: 1600941 - RNA, 19 nt, Artificial Sequence
  Description of Artificial Sequence: Synthetic oligonucleotide
gccugcauccuaggacuga

SEQ ID NO: 1600942 - RNA, 19 nt, Artificial Sequence
  Description of Artificial Sequence: Synthetic oligonucleotide
cagcucgucauggccagau

SEQ ID NO: 1600943 - RNA, 19 nt, Artificial Sequence
  Description of Artificial Sequence: Synthetic oligonucleotide
uggcaacccuaggcacuua

SEQ ID NO: 1600944 - RNA, 19 nt, Artificial Sequence
  Description of Artificial Sequence: Synthetic oligonucleotide
cuggcaacccuaggcacuu

SEQ ID NO: 1600945 - RNA, 19 nt, Artificial Sequence
  Description of Artificial Sequence: Synthetic oligonucleotide
gccucacuccccaaaacuu

SEQ ID NO: 1600946 - RNA, 19 nt, Artificial Sequence
  Description of Artificial Sequence: Synthetic oligonucleotide
cugccuccacacacuugcu

SEQ ID NO: 1600947 - RNA, 19 nt, Artificial Sequence
  Description of Artificial Sequence: Synthetic oligonucleotide
ggcugagguccugaaucua

SEQ ID NO: 1600948 - RNA, 19 nt, Artificial Sequence
  Description of Artificial Sequence: Synthetic oligonucleotide
cgucauggccagaugggcu

SEQ ID NO: 1600949 - RNA, 19 nt, Artificial Sequence
  Description of Artificial Sequence: Synthetic oligonucleotide
gcaacccuaggcacuuagu

SEQ ID NO: 1600950 - RNA, 19 nt, Artificial Sequence
  Description of Artificial Sequence: Synthetic oligonucleotide
cccuaggcacuuaguacgu

SEQ ID NO: 1600951 - RNA, 19 nt, Artificial Sequence
  Description of Artificial Sequence: Synthetic oligonucleotide
ggucccucagggagagcaa

SEQ ID NO: 1600952 - RNA, 19 nt, Artificial Sequence
  Description of Artificial Sequence: Synthetic oligonucleotide
ggcugggucugggucccuc

SEQ ID NO: 1600953 - RNA, 19 nt, Artificial Sequence
  Description of Artificial Sequence: Synthetic oligonucleotide
gggcagggcucgauggucu

SEQ ID NO: 1600954 - RNA, 19 nt, Artificial Sequence
  Description of Artificial Sequence: Synthetic oligonucleotide
caccugccuccacacacuu

SEQ ID NO: 1600955 - RNA, 19 nt, Artificial Sequence
  Description of Artificial Sequence: Synthetic oligonucleotide
ccauagcauucuugguccu

SEQ ID NO: 1600956 - RNA, 19 nt, Artificial Sequence
  Description of Artificial Sequence: Synthetic oligonucleotide
ggacaccagggccacccuu

SEQ ID NO: 1600957 - RNA, 19 nt, Artificial Sequence
  Description of Artificial Sequence: Synthetic oligonucleotide
cuccuccaagaugaaucuu

SEQ ID NO: 1600958 - RNA, 19 nt, Artificial Sequence
  Description of Artificial Sequence: Synthetic oligonucleotide
gccaaagccugaggagagu

SEQ ID NO: 1600959 - RNA, 19 nt, Artificial Sequence
  Description of Artificial Sequence: Synthetic oligonucleotide
gcucggaccucaggacaaa

SEQ ID NO: 1600960 - RNA, 19 nt, Artificial Sequence
  Description of Artificial Sequence: Synthetic oligonucleotide
cguguccgggaacugggcu

SEQ ID NO: 1600961 - RNA, 19 nt, Artificial Sequence
  Description of Artificial Sequence: Synthetic oligonucleotide
ggcagggcucgauggucuu

SEQ ID NO: 1600962 - RNA, 19 nt, Artificial Sequence
  Description of Artificial Sequence: Synthetic oligonucleotide
gcagcucgucauggccaga

SEQ ID NO: 1600963 - RNA, 19 nt, Artificial Sequence
  Description of Artificial Sequence: Synthetic oligonucleotide
cagcugcacccacccaguu

SEQ ID NO: 1600964 - RNA, 19 nt, Artificial Sequence
  Description of Artificial Sequence: Synthetic oligonucleotide
gcuggcccugagcuuucau

SEQ ID NO: 1600965 - RNA, 19 nt, Artificial Sequence
  Description of Artificial Sequence: Synthetic oligonucleotide
ccacccaguuaaccccagu

SEQ ID NO: 1600966 - RNA, 19 nt, Artificial Sequence
  Description of Artificial Sequence: Synthetic oligonucleotide
guccgggaacugggcuccu

SEQ ID NO: 1600967 - RNA, 19 nt, Artificial Sequence
  Description of Artificial Sequence: Synthetic oligonucleotide
ccgugaggggcuggacaau

SEQ ID NO: 1600968 - RNA, 19 nt, Artificial Sequence
  Description of Artificial Sequence: Synthetic oligonucleotide
gacauaauuagcuaggugc

SEQ ID NO: 1600969 - RNA, 19 nt, Artificial Sequence
  Description of Artificial Sequence: Synthetic oligonucleotide
aaauuccuagcuucaaucc

SEQ ID NO: 1600970 - RNA, 19 nt, Artificial Sequence
  Description of Artificial Sequence: Synthetic oligonucleotide
uggacuuuaaguuuuaccc

SEQ ID NO: 1600971 - RNA, 19 nt, Artificial Sequence
  Description of Artificial Sequence: Synthetic oligonucleotide
cuaaauuugagaguggucg

SEQ ID NO: 1600972 - RNA, 19 nt, Artificial Sequence
  Description of Artificial Sequence: Synthetic oligonucleotide
uuggauaucuguauaauug

SEQ ID NO: 1600973 - RNA, 19 nt, Artificial Sequence
  Description of Artificial Sequence: Synthetic oligonucleotide
uaucauaguacccaaaacu

SEQ ID NO: 1600974 - RNA, 19 nt, Artificial Sequence
  Description of Artificial Sequence: Synthetic oligonucleotide
gaaagggucucauauaaag

SEQ ID NO: 1600975 - RNA, 19 nt, Artificial Sequence
  Description of Artificial Sequence: Synthetic oligonucleotide
auaaccaucugccaaggac

SEQ ID NO: 1600976 - RNA, 19 nt, Artificial Sequence
  Description of Artificial Sequence: Synthetic oligonucleotide
uaaguuuuacccuuggggc

SEQ ID NO: 1600977 - RNA, 19 nt, Artificial Sequence
  Description of Artificial Sequence: Synthetic oligonucleotide
aaagcggccacucacagga

SEQ ID NO: 1600978 - RNA, 19 nt, Artificial Sequence
  Description of Artificial Sequence: Synthetic oligonucleotide
auugcaauaauauuggaua

SEQ ID NO: 1600979 - RNA, 19 nt, Artificial Sequence
  Description of Artificial Sequence: Synthetic oligonucleotide
uauaauugggcuuaugaaa

SEQ ID NO: 1600980 - RNA, 19 nt, Artificial Sequence
  Description of Artificial Sequence: Synthetic oligonucleotide
acuuaaaagcuucaugguc

SEQ ID NO: 1600981 - RNA, 19 nt, Artificial Sequence
  Description of Artificial Sequence: Synthetic oligonucleotide
auauaaagcggccacucac

SEQ ID NO: 1600982 - RNA, 19 nt, Artificial Sequence
  Description of Artificial Sequence: Synthetic oligonucleotide
aagacuaggggacgaagcg

SEQ ID NO: 1600983 - RNA, 19 nt, Artificial Sequence
  Description of Artificial Sequence: Synthetic oligonucleotide
caaucacuaacauaucugg

SEQ ID NO: 1600984 - RNA, 19 nt, Artificial Sequence
  Description of Artificial Sequence: Synthetic oligonucleotide
uuaugaaagggucucauau

SEQ ID NO: 1600985 - RNA, 19 nt, Artificial Sequence
  Description of Artificial Sequence: Synthetic oligonucleotide
auggacuuuaaguuuuacc

SEQ ID NO: 1600986 - RNA, 19 nt, Artificial Sequence
  Description of Artificial Sequence: Synthetic oligonucleotide
uguggacauaauuagcuag

SEQ ID NO: 1600987 - RNA, 19 nt, Artificial Sequence
  Description of Artificial Sequence: Synthetic oligonucleotide
gaugaugcaaccaggauug

SEQ ID NO: 1600988 - RNA, 19 nt, Artificial Sequence
  Description of Artificial Sequence: Synthetic oligonucleotide
aaagggucucauauaaagc

SEQ ID NO: 1600989 - RNA, 19 nt, Artificial Sequence
  Description of Artificial Sequence: Synthetic oligonucleotide
uucauagaagccuagcugu

SEQ ID NO: 1600990 - RNA, 19 nt, Artificial Sequence
  Description of Artificial Sequence: Synthetic oligonucleotide
ucuaaaacaguaccccugc

SEQ ID NO: 1600991 - RNA, 19 nt, Artificial Sequence
  Description of Artificial Sequence: Synthetic oligonucleotide
aucaucauaauuucuccag

SEQ ID NO: 1600992 - RNA, 19 nt, Artificial Sequence
  Description of Artificial Sequence: Synthetic oligonucleotide
auaucuguauaauugggcu

SEQ ID NO: 1600993 - RNA, 19 nt, Artificial Sequence
  Description of Artificial Sequence: Synthetic oligonucleotide
cuuauaaccaucugccaag

SEQ ID NO: 1600994 - RNA, 19 nt, Artificial Sequence
  Description of Artificial Sequence: Synthetic oligonucleotide
agcgacuucaacaaucucc

SEQ ID NO: 1600995 - RNA, 19 nt, Artificial Sequence
  Description of Artificial Sequence: Synthetic oligonucleotide
guauucauaaccugcgucc

SEQ ID NO: 1600996 - RNA, 19 nt, Artificial Sequence
  Description of Artificial Sequence: Synthetic oligonucleotide
gaguauacaaugcuucugc

SEQ ID NO: 1600997 - RNA, 19 nt, Artificial Sequence
  Description of Artificial Sequence: Synthetic oligonucleotide
uaugcagagguauucauaa

SEQ ID NO: 1600998 - RNA, 19 nt, Artificial Sequence
  Description of Artificial Sequence: Synthetic oligonucleotide
aauugggcuuaugaaaggg

SEQ ID NO: 1600999 - RNA, 19 nt, Artificial Sequence
  Description of Artificial Sequence: Synthetic oligonucleotide
uuacgguccauucauagaa

SEQ ID NO: 1601000 - RNA, 19 nt, Artificial Sequence
  Description of Artificial Sequence: Synthetic oligonucleotide
acugaugcaggcaucaggc

SEQ ID NO: 1601001 - RNA, 19 nt, Artificial Sequence
  Description of Artificial Sequence: Synthetic oligonucleotide
cauagaaauucuuugcuuc

SEQ ID NO: 1601002 - RNA, 19 nt, Artificial Sequence
  Description of Artificial Sequence: Synthetic oligonucleotide
accugcacagguuuuauuc

SEQ ID NO: 1601003 - RNA, 19 nt, Artificial Sequence
  Description of Artificial Sequence: Synthetic oligonucleotide
uuggacaugaguagaggag

SEQ ID NO: 1601004 - RNA, 19 nt, Artificial Sequence
  Description of Artificial Sequence: Synthetic oligonucleotide
aauuacaucuucauucuga

SEQ ID NO: 1601005 - RNA, 19 nt, Artificial Sequence
  Description of Artificial Sequence: Synthetic oligonucleotide
uucuaaaacaguaccccug

SEQ ID NO: 1601006 - RNA, 19 nt, Artificial Sequence
  Description of Artificial Sequence: Synthetic oligonucleotide
aauuccuagcuucaauccu

SEQ ID NO: 1601007 - RNA, 19 nt, Artificial Sequence
  Description of Artificial Sequence: Synthetic oligonucleotide
aggaaucauaaauaucauc

SEQ ID NO: 1601008 - RNA, 19 nt, Artificial Sequence
  Description of Artificial Sequence: Synthetic oligonucleotide
aucauaguacccaaaacuc

SEQ ID NO: 1601009 - RNA, 19 nt, Artificial Sequence
  Description of Artificial Sequence: Synthetic oligonucleotide
uggucguucccaaacuucg

SEQ ID NO: 1601010 - RNA, 19 nt, Artificial Sequence
  Description of Artificial Sequence: Synthetic oligonucleotide
auaauuagcuaggugcugg

SEQ ID NO: 1601011 - RNA, 19 nt, Artificial Sequence
  Description of Artificial Sequence: Synthetic oligonucleotide
gauaucuguauaauugggc

SEQ ID NO: 1601012 - RNA, 19 nt, Artificial Sequence
  Description of Artificial Sequence: Synthetic oligonucleotide
ggaaucauaaauaucauca

SEQ ID NO: 1601013 - RNA, 19 nt, Artificial Sequence
  Description of Artificial Sequence: Synthetic oligonucleotide
uaagacuaggggacgaagc

SEQ ID NO: 1601014 - RNA, 19 nt, Artificial Sequence
  Description of Artificial Sequence: Synthetic oligonucleotide
agaguggucguucccaaac

SEQ ID NO: 1601015 - RNA, 19 nt, Artificial Sequence
  Description of Artificial Sequence: Synthetic oligonucleotide
aauuugagaguggucguuc

SEQ ID NO: 1601016 - RNA, 19 nt, Artificial Sequence
  Description of Artificial Sequence: Synthetic oligonucleotide
cauaguaggaguccgcgcc

SEQ ID NO: 1601017 - RNA, 19 nt, Artificial Sequence
  Description of Artificial Sequence: Synthetic oligonucleotide
gaugcaaccaggauugcag

SEQ ID NO: 1601018 - RNA, 19 nt, Artificial Sequence
  Description of Artificial Sequence: Synthetic oligonucleotide
gagagcuuuggcuugggag

SEQ ID NO: 1601019 - RNA, 19 nt, Artificial Sequence
  Description of Artificial Sequence: Synthetic oligonucleotide
auuugagaguggucguucc

SEQ ID NO: 1601020 - RNA, 19 nt, Artificial Sequence
  Description of Artificial Sequence: Synthetic oligonucleotide
ucauuggacaugaguagag

SEQ ID NO: 1601021 - RNA, 19 nt, Artificial Sequence
  Description of Artificial Sequence: Synthetic oligonucleotide
ugaugaugcaaccaggauu

SEQ ID NO: 1601022 - RNA, 19 nt, Artificial Sequence
  Description of Artificial Sequence: Synthetic oligonucleotide
aagguuacgguccauucau

SEQ ID NO: 1601023 - RNA, 19 nt, Artificial Sequence
  Description of Artificial Sequence: Synthetic oligonucleotide
aauugcaauaauauuggau

SEQ ID NO: 1601024 - RNA, 19 nt, Artificial Sequence
  Description of Artificial Sequence: Synthetic oligonucleotide
uucaguuuacugcagcuaa

SEQ ID NO: 1601025 - RNA, 19 nt, Artificial Sequence
  Description of Artificial Sequence: Synthetic oligonucleotide
acgagguccaccaauuucc

SEQ ID NO: 1601026 - RNA, 19 nt, Artificial Sequence
  Description of Artificial Sequence: Synthetic oligonucleotide
uccaguaauugcaauaaua

SEQ ID NO: 1601027 - RNA, 19 nt, Artificial Sequence
  Description of Artificial Sequence: Synthetic oligonucleotide
uccacuaggaaagcgcugg

SEQ ID NO: 1601028 - RNA, 19 nt, Artificial Sequence
  Description of Artificial Sequence: Synthetic oligonucleotide
acgguccauucauagaagc

SEQ ID NO: 1601029 - RNA, 19 nt, Artificial Sequence
  Description of Artificial Sequence: Synthetic oligonucleotide
uuagcuaggugcuggauuc

SEQ ID NO: 1601030 - RNA, 19 nt, Artificial Sequence
  Description of Artificial Sequence: Synthetic oligonucleotide
aacuucgauuuuguuuucc

SEQ ID NO: 1601031 - RNA, 19 nt, Artificial Sequence
  Description of Artificial Sequence: Synthetic oligonucleotide
uuugucggagaucauugga

SEQ ID NO: 1601032 - RNA, 19 nt, Artificial Sequence
  Description of Artificial Sequence: Synthetic oligonucleotide
ucacuaacauaucuggguc

SEQ ID NO: 1601033 - RNA, 19 nt, Artificial Sequence
  Description of Artificial Sequence: Synthetic oligonucleotide
acuuauaaccaucugccaa

SEQ ID NO: 1601034 - RNA, 19 nt, Artificial Sequence
  Description of Artificial Sequence: Synthetic oligonucleotide
gacuucaacaaucuccuuc

SEQ ID NO: 1601035 - RNA, 19 nt, Artificial Sequence
  Description of Artificial Sequence: Synthetic oligonucleotide
gauuugucggagaucauug

SEQ ID NO: 1601036 - RNA, 19 nt, Artificial Sequence
  Description of Artificial Sequence: Synthetic oligonucleotide
caugauagcccagagggcc

SEQ ID NO: 1601037 - RNA, 19 nt, Artificial Sequence
  Description of Artificial Sequence: Synthetic oligonucleotide
ucaaauuuuagcagaucua

SEQ ID NO: 1601038 - RNA, 19 nt, Artificial Sequence
  Description of Artificial Sequence: Synthetic oligonucleotide
ugccugagggauuuauucg

SEQ ID NO: 1601039 - RNA, 19 nt, Artificial Sequence
  Description of Artificial Sequence: Synthetic oligonucleotide
agcgcaagcucacagacca

SEQ ID NO: 1601040 - RNA, 19 nt, Artificial Sequence
  Description of Artificial Sequence: Synthetic oligonucleotide
gauuccacuaggaaagcgc

SEQ ID NO: 1601041 - RNA, 19 nt, Artificial Sequence
  Description of Artificial Sequence: Synthetic oligonucleotide
uccuauucaaggccaagga

SEQ ID NO: 1601042 - RNA, 19 nt, Artificial Sequence
  Description of Artificial Sequence: Synthetic oligonucleotide
auuggacaugaguagagga

SEQ ID NO: 1601043 - RNA, 19 nt, Artificial Sequence
  Description of Artificial Sequence: Synthetic oligonucleotide
auaaccugcguccuuccag

SEQ ID NO: 1601044 - RNA, 19 nt, Artificial Sequence
  Description of Artificial Sequence: Synthetic oligonucleotide
ugguccagcgacuucaaca

SEQ ID NO: 1601045 - RNA, 19 nt, Artificial Sequence
  Description of Artificial Sequence: Synthetic oligonucleotide
gaagucggcccuuugaguc

SEQ ID NO: 1601046 - RNA, 19 nt, Artificial Sequence
  Description of Artificial Sequence: Synthetic oligonucleotide
caagaauacuccagaaaac

SEQ ID NO: 1601047 - RNA, 19 nt, Artificial Sequence
  Description of Artificial Sequence: Synthetic oligonucleotide
ugaaggagagcuuuggcuu

SEQ ID NO: 1601048 - RNA, 19 nt, Artificial Sequence
  Description of Artificial Sequence: Synthetic oligonucleotide
aaacuaagacuaggggacg

SEQ ID NO: 1601049 - RNA, 19 nt, Artificial Sequence
  Description of Artificial Sequence: Synthetic oligonucleotide
caacucaggccaaaguugc

SEQ ID NO: 1601050 - RNA, 19 nt, Artificial Sequence
  Description of Artificial Sequence: Synthetic oligonucleotide
auuugucggagaucauugg

SEQ ID NO: 1601051 - RNA, 19 nt, Artificial Sequence
  Description of Artificial Sequence: Synthetic oligonucleotide
guaagaacgagguccacca

SEQ ID NO: 1601052 - RNA, 19 nt, Artificial Sequence
  Description of Artificial Sequence: Synthetic oligonucleotide
uucgauuuuguuuuccuuu

SEQ ID NO: 1601053 - RNA, 19 nt, Artificial Sequence
  Description of Artificial Sequence: Synthetic oligonucleotide
uaaauuugagaguggucgu

SEQ ID NO: 1601054 - RNA, 19 nt, Artificial Sequence
  Description of Artificial Sequence: Synthetic oligonucleotide
gaagcgcaagcucacagac

SEQ ID NO: 1601055 - RNA, 19 nt, Artificial Sequence
  Description of Artificial Sequence: Synthetic oligonucleotide
uccagaaaacuaagacuag

SEQ ID NO: 1601056 - RNA, 19 nt, Artificial Sequence
  Description of Artificial Sequence: Synthetic oligonucleotide
gauugcaggcuauuccuug

SEQ ID NO: 1601057 - RNA, 19 nt, Artificial Sequence
  Description of Artificial Sequence: Synthetic oligonucleotide
aagaacgagguccaccaau

SEQ ID NO: 1601058 - RNA, 19 nt, Artificial Sequence
  Description of Artificial Sequence: Synthetic oligonucleotide
caugaaacguucccagugc

SEQ ID NO: 1601059 - RNA, 19 nt, Artificial Sequence
  Description of Artificial Sequence: Synthetic oligonucleotide
auuacaucuucauucugaa

SEQ ID NO: 1601060 - RNA, 19 nt, Artificial Sequence
  Description of Artificial Sequence: Synthetic oligonucleotide
uuauaaccaucugccaagg

SEQ ID NO: 1601061 - RNA, 19 nt, Artificial Sequence
  Description of Artificial Sequence: Synthetic oligonucleotide
ucugggucauuccaacccc

SEQ ID NO: 1601062 - RNA, 19 nt, Artificial Sequence
  Description of Artificial Sequence: Synthetic oligonucleotide
uaaaacaguaccccugcuu

SEQ ID NO: 1601063 - RNA, 19 nt, Artificial Sequence
  Description of Artificial Sequence: Synthetic oligonucleotide
uuaagguuacgguccauuc

SEQ ID NO: 1601064 - RNA, 19 nt, Artificial Sequence
  Description of Artificial Sequence: Synthetic oligonucleotide
uugggcuuaugaaaggguc

SEQ ID NO: 1601065 - RNA, 19 nt, Artificial Sequence
  Description of Artificial Sequence: Synthetic oligonucleotide
uugcaauaauauuggauau

SEQ ID NO: 1601066 - RNA, 19 nt, Artificial Sequence
  Description of Artificial Sequence: Synthetic oligonucleotide
aaacuucgauuuuguuuuc

SEQ ID NO: 1601067 - RNA, 19 nt, Artificial Sequence
  Description of Artificial Sequence: Synthetic oligonucleotide
auaaagcggccacucacag

SEQ ID NO: 1601068 - RNA, 19 nt, Artificial Sequence
  Description of Artificial Sequence: Synthetic oligonucleotide
ugaugcaggcaucaggcuc

SEQ ID NO: 1601069 - RNA, 19 nt, Artificial Sequence
  Description of Artificial Sequence: Synthetic oligonucleotide
gaauacuccagaaaacuaa

SEQ ID NO: 1601070 - RNA, 19 nt, Artificial Sequence
  Description of Artificial Sequence: Synthetic oligonucleotide
aguuuuacccuuggggcgg

SEQ ID NO: 1601071 - RNA, 19 nt, Artificial Sequence
  Description of Artificial Sequence: Synthetic oligonucleotide
ugagggauuuauucgaguu

SEQ ID NO: 1601072 - RNA, 19 nt, Artificial Sequence
  Description of Artificial Sequence: Synthetic oligonucleotide
uuugagaguggucguuccc

SEQ ID NO: 1601073 - RNA, 19 nt, Artificial Sequence
  Description of Artificial Sequence: Synthetic oligonucleotide
aaggccaaggacauguacu

SEQ ID NO: 1601074 - RNA, 19 nt, Artificial Sequence
  Description of Artificial Sequence: Synthetic oligonucleotide
uaauugcaauaauauugga

SEQ ID NO: 1601075 - RNA, 19 nt, Artificial Sequence
  Description of Artificial Sequence: Synthetic oligonucleotide
auagaagccuagcuguacu

SEQ ID NO: 1601076 - RNA, 19 nt, Artificial Sequence
  Description of Artificial Sequence: Synthetic oligonucleotide
cuuucaggagccauccaac

SEQ ID NO: 1601077 - RNA, 19 nt, Artificial Sequence
  Description of Artificial Sequence: Synthetic oligonucleotide
uccaacagucaucuaugca

SEQ ID NO: 1601078 - RNA, 19 nt, Artificial Sequence
  Description of Artificial Sequence: Synthetic oligonucleotide
uucuuggcagucgagguug

SEQ ID NO: 1601079 - RNA, 19 nt, Artificial Sequence
  Description of Artificial Sequence: Synthetic oligonucleotide
uaacauggacuuuaaguuu

SEQ ID NO: 1601080 - RNA, 19 nt, Artificial Sequence
  Description of Artificial Sequence: Synthetic oligonucleotide
aagcuucauggucauagaa

SEQ ID NO: 1601081 - RNA, 19 nt, Artificial Sequence
  Description of Artificial Sequence: Synthetic oligonucleotide
uagaaauucuuugcuucag

SEQ ID NO: 1601082 - RNA, 19 nt, Artificial Sequence
  Description of Artificial Sequence: Synthetic oligonucleotide
gaugguguaagaacgaggu

SEQ ID NO: 1601083 - RNA, 19 nt, Artificial Sequence
  Description of Artificial Sequence: Synthetic oligonucleotide
aggaguauacaaugcuucu

SEQ ID NO: 1601084 - RNA, 19 nt, Artificial Sequence
  Description of Artificial Sequence: Synthetic oligonucleotide
cuaacauggacuuuaaguu

SEQ ID NO: 1601085 - RNA, 19 nt, Artificial Sequence
  Description of Artificial Sequence: Synthetic oligonucleotide
ucauauaaagcggccacuc

SEQ ID NO: 1601086 - RNA, 19 nt, Artificial Sequence
  Description of Artificial Sequence: Synthetic oligonucleotide
agacuaggggacgaagcgc

SEQ ID NO: 1601087 - RNA, 19 nt, Artificial Sequence
  Description of Artificial Sequence: Synthetic oligonucleotide
uaggggacgaagcgcaagc

SEQ ID NO: 1601088 - RNA, 19 nt, Artificial Sequence
  Description of Artificial Sequence: Synthetic oligonucleotide
aaccugcguccuuccagcc

SEQ ID NO: 1601089 - RNA, 19 nt, Artificial Sequence
  Description of Artificial Sequence: Synthetic oligonucleotide
acuucgauuuuguuuuccu

SEQ ID NO: 1601090 - RNA, 19 nt, Artificial Sequence
  Description of Artificial Sequence: Synthetic oligonucleotide
uuaaaagcuucauggucau

SEQ ID NO: 1601091 - RNA, 19 nt, Artificial Sequence
  Description of Artificial Sequence: Synthetic oligonucleotide
uaaagcggccacucacagg

SEQ ID NO: 1601092 - RNA, 19 nt, Artificial Sequence
  Description of Artificial Sequence: Synthetic oligonucleotide
uaggaguccgcgccaagcc

SEQ ID NO: 1601093 - RNA, 19 nt, Artificial Sequence
  Description of Artificial Sequence: Synthetic oligonucleotide
ucccaggaaucauaaauau

SEQ ID NO: 1601094 - RNA, 19 nt, Artificial Sequence
  Description of Artificial Sequence: Synthetic oligonucleotide
acauaauuagcuaggugcu

SEQ ID NO: 1601095 - RNA, 19 nt, Artificial Sequence
  Description of Artificial Sequence: Synthetic oligonucleotide
uacgguccauucauagaag

SEQ ID NO: 1601096 - RNA, 19 nt, Artificial Sequence
  Description of Artificial Sequence: Synthetic oligonucleotide
auuagcuaggugcuggauu

SEQ ID NO: 1601097 - RNA, 19 nt, Artificial Sequence
  Description of Artificial Sequence: Synthetic oligonucleotide
acaguaccccugcuugccc

SEQ ID NO: 1601098 - RNA, 19 nt, Artificial Sequence
  Description of Artificial Sequence: Synthetic oligonucleotide
gcuaacauggacuuuaagu

SEQ ID NO: 1601099 - RNA, 19 nt, Artificial Sequence
  Description of Artificial Sequence: Synthetic oligonucleotide
gguuacgguccauucauag

SEQ ID NO: 1601100 - RNA, 19 nt, Artificial Sequence
  Description of Artificial Sequence: Synthetic oligonucleotide
ugcaaccaggauugcaggc

SEQ ID NO: 1601101 - RNA, 19 nt, Artificial Sequence
  Description of Artificial Sequence: Synthetic oligonucleotide
uucaauccuuugcugugga

SEQ ID NO: 1601102 - RNA, 19 nt, Artificial Sequence
  Description of Artificial Sequence: Synthetic oligonucleotide
ugcaauaauauuggauauc

SEQ ID NO: 1601103 - RNA, 19 nt, Artificial Sequence
  Description of Artificial Sequence: Synthetic oligonucleotide
ucuaugcagagguauucau

SEQ ID NO: 1601104 - RNA, 19 nt, Artificial Sequence
  Description of Artificial Sequence: Synthetic oligonucleotide
uaucugggucauuccaacc

SEQ ID NO: 1601105 - RNA, 19 nt, Artificial Sequence
  Description of Artificial Sequence: Synthetic oligonucleotide
uauucauaaccugcguccu

SEQ ID NO: 1601106 - RNA, 19 nt, Artificial Sequence
  Description of Artificial Sequence: Synthetic oligonucleotide
caagcucacagaccagccg

SEQ ID NO: 1601107 - RNA, 19 nt, Artificial Sequence
  Description of Artificial Sequence: Synthetic oligonucleotide
acgaagcgcaagcucacag

SEQ ID NO: 1601108 - RNA, 19 nt, Artificial Sequence
  Description of Artificial Sequence: Synthetic oligonucleotide
gagaucauuggacaugagu

SEQ ID NO: 1601109 - RNA, 19 nt, Artificial Sequence
  Description of Artificial Sequence: Synthetic oligonucleotide
ugcaggcuauuccuugacc

SEQ ID NO: 1601110 - RNA, 19 nt, Artificial Sequence
  Description of Artificial Sequence: Synthetic oligonucleotide
cauuggacaugaguagagg

SEQ ID NO: 1601111 - RNA, 19 nt, Artificial Sequence
  Description of Artificial Sequence: Synthetic oligonucleotide
ugaaagggucucauauaaa

SEQ ID NO: 1601112 - RNA, 19 nt, Artificial Sequence
  Description of Artificial Sequence: Synthetic oligonucleotide
ugagucccuuucaggagcc

SEQ ID NO: 1601113 - RNA, 19 nt, Artificial Sequence
  Description of Artificial Sequence: Synthetic oligonucleotide
ucaucuaugcagagguauu

SEQ ID NO: 1601114 - RNA, 19 nt, Artificial Sequence
  Description of Artificial Sequence: Synthetic oligonucleotide
uugagaguggucguuccca

SEQ ID NO: 1601115 - RNA, 19 nt, Artificial Sequence
  Description of Artificial Sequence: Synthetic oligonucleotide
ccaaucacuaacauaucug

SEQ ID NO: 1601116 - RNA, 19 nt, Artificial Sequence
  Description of Artificial Sequence: Synthetic oligonucleotide
uuuaagguuacgguccauu

SEQ ID NO: 1601117 - RNA, 19 nt, Artificial Sequence
  Description of Artificial Sequence: Synthetic oligonucleotide
auugcaggcuauuccuuga

SEQ ID NO: 1601118 - RNA, 19 nt, Artificial Sequence
  Description of Artificial Sequence: Synthetic oligonucleotide
augaaacguucccagugca

SEQ ID NO: 1601119 - RNA, 19 nt, Artificial Sequence
  Description of Artificial Sequence: Synthetic oligonucleotide
ugaagucggcccuuugagu

SEQ ID NO: 1601120 - RNA, 19 nt, Artificial Sequence
  Description of Artificial Sequence: Synthetic oligonucleotide
acgucacacugucacagug

SEQ ID NO: 1601121 - RNA, 19 nt, Artificial Sequence
  Description of Artificial Sequence: Synthetic oligonucleotide
gguauucauaaccugcguc

SEQ ID NO: 1601122 - RNA, 19 nt, Artificial Sequence
  Description of Artificial Sequence: Synthetic oligonucleotide
ugauuugucggagaucauu

SEQ ID NO: 1601123 - RNA, 19 nt, Artificial Sequence
  Description of Artificial Sequence: Synthetic oligonucleotide
guuaucuguuguccaggcc

SEQ ID NO: 1601124 - RNA, 19 nt, Artificial Sequence
  Description of Artificial Sequence: Synthetic oligonucleotide
ucggagaucauuggacaug

SEQ ID NO: 1601125 - RNA, 19 nt, Artificial Sequence
  Description of Artificial Sequence: Synthetic oligonucleotide
aacuaagacuaggggacga

SEQ ID NO: 1601126 - RNA, 19 nt, Artificial Sequence
  Description of Artificial Sequence: Synthetic oligonucleotide
aaauuugagaguggucguu

SEQ ID NO: 1601127 - RNA, 19 nt, Artificial Sequence
  Description of Artificial Sequence: Synthetic oligonucleotide
aggaguccgcgccaagccg

SEQ ID NO: 1601128 - RNA, 19 nt, Artificial Sequence
  Description of Artificial Sequence: Synthetic oligonucleotide
ccuagcuucaauccuuugc

SEQ ID NO: 1601129 - RNA, 19 nt, Artificial Sequence
  Description of Artificial Sequence: Synthetic oligonucleotide
uccuuugcuguggacauaa

SEQ ID NO: 1601130 - RNA, 19 nt, Artificial Sequence
  Description of Artificial Sequence: Synthetic oligonucleotide
uauucccaacaucugcaua

SEQ ID NO: 1601131 - RNA, 19 nt, Artificial Sequence
  Description of Artificial Sequence: Synthetic oligonucleotide
agcuaacauggacuuuaag

SEQ ID NO: 1601132 - RNA, 19 nt, Artificial Sequence
  Description of Artificial Sequence: Synthetic oligonucleotide
cuaagacuaggggacgaag

SEQ ID NO: 1601133 - RNA, 19 nt, Artificial Sequence
  Description of Artificial Sequence: Synthetic oligonucleotide
accauaaggucugccaucu

SEQ ID NO: 1601134 - RNA, 19 nt, Artificial Sequence
  Description of Artificial Sequence: Synthetic oligonucleotide
ucccuuucaggagccaucc

SEQ ID NO: 1601135 - RNA, 19 nt, Artificial Sequence
  Description of Artificial Sequence: Synthetic oligonucleotide
uuccacuaggaaagcgcug

SEQ ID NO: 1601136 - RNA, 19 nt, Artificial Sequence
  Description of Artificial Sequence: Synthetic oligonucleotide
agcagaucuacaccccagu

SEQ ID NO: 1601137 - RNA, 19 nt, Artificial Sequence
  Description of Artificial Sequence: Synthetic oligonucleotide
gaccauaaggucugccauc

SEQ ID NO: 1601138 - RNA, 19 nt, Artificial Sequence
  Description of Artificial Sequence: Synthetic oligonucleotide
acuaacauaucugggucau

SEQ ID NO: 1601139 - RNA, 19 nt, Artificial Sequence
  Description of Artificial Sequence: Synthetic oligonucleotide
ucacagaccagccgcggau

SEQ ID NO: 1601140 - RNA, 19 nt, Artificial Sequence
  Description of Artificial Sequence: Synthetic oligonucleotide
cauaauuagcuaggugcug

SEQ ID NO: 1601141 - RNA, 19 nt, Artificial Sequence
  Description of Artificial Sequence: Synthetic oligonucleotide
gacaaccaucaaauuuuag

SEQ ID NO: 1601142 - RNA, 19 nt, Artificial Sequence
  Description of Artificial Sequence: Synthetic oligonucleotide
ucgaagcagaacagugccu

SEQ ID NO: 1601143 - RNA, 19 nt, Artificial Sequence
  Description of Artificial Sequence: Synthetic oligonucleotide
agccauccaacagucaucu

SEQ ID NO: 1601144 - RNA, 19 nt, Artificial Sequence
  Description of Artificial Sequence: Synthetic oligonucleotide
cgagguugcacaugaaacg

SEQ ID NO: 1601145 - RNA, 19 nt, Artificial Sequence
  Description of Artificial Sequence: Synthetic oligonucleotide
auaguaggaguccgcgcca

SEQ ID NO: 1601146 - RNA, 19 nt, Artificial Sequence
  Description of Artificial Sequence: Synthetic oligonucleotide
agguauucauaaccugcgu

SEQ ID NO: 1601147 - RNA, 19 nt, Artificial Sequence
  Description of Artificial Sequence: Synthetic oligonucleotide
caauccuuugcuguggaca

SEQ ID NO: 1601148 - RNA, 19 nt, Artificial Sequence
  Description of Artificial Sequence: Synthetic oligonucleotide
gacuaggggacgaagcgca

SEQ ID NO: 1601149 - RNA, 19 nt, Artificial Sequence
  Description of Artificial Sequence: Synthetic oligonucleotide
ccaacucaggccaaaguug

SEQ ID NO: 1601150 - RNA, 19 nt, Artificial Sequence
  Description of Artificial Sequence: Synthetic oligonucleotide
gguuaucuguuguccaggc

SEQ ID NO: 1601151 - RNA, 19 nt, Artificial Sequence
  Description of Artificial Sequence: Synthetic oligonucleotide
cauagaagccuagcuguac

SEQ ID NO: 1601152 - RNA, 19 nt, Artificial Sequence
  Description of Artificial Sequence: Synthetic oligonucleotide
caaggccaaggacauguac

SEQ ID NO: 1601153 - RNA, 19 nt, Artificial Sequence
  Description of Artificial Sequence: Synthetic oligonucleotide
caucuaugcagagguauuc

SEQ ID NO: 1601154 - RNA, 19 nt, Artificial Sequence
  Description of Artificial Sequence: Synthetic oligonucleotide
aggcuauuccuugaccaag

SEQ ID NO: 1601155 - RNA, 19 nt, Artificial Sequence
  Description of Artificial Sequence: Synthetic oligonucleotide
ggacauguacuuauaacca

SEQ ID NO: 1601156 - RNA, 19 nt, Artificial Sequence
  Description of Artificial Sequence: Synthetic oligonucleotide
agucggcccuuugaguccc

SEQ ID NO: 1601157 - RNA, 19 nt, Artificial Sequence
  Description of Artificial Sequence: Synthetic oligonucleotide
aauuagcuaggugcuggau

SEQ ID NO: 1601158 - RNA, 19 nt, Artificial Sequence
  Description of Artificial Sequence: Synthetic oligonucleotide
cuucauucugaaggagagc

SEQ ID NO: 1601159 - RNA, 19 nt, Artificial Sequence
  Description of Artificial Sequence: Synthetic oligonucleotide
agaauacuccagaaaacua

SEQ ID NO: 1601160 - RNA, 19 nt, Artificial Sequence
  Description of Artificial Sequence: Synthetic oligonucleotide
ugagaguggucguucccaa

SEQ ID NO: 1601161 - RNA, 19 nt, Artificial Sequence
  Description of Artificial Sequence: Synthetic oligonucleotide
cacuaacauaucuggguca

SEQ ID NO: 1601162 - RNA, 19 nt, Artificial Sequence
  Description of Artificial Sequence: Synthetic oligonucleotide
uuggcagucgagguugcac

SEQ ID NO: 1601163 - RNA, 19 nt, Artificial Sequence
  Description of Artificial Sequence: Synthetic oligonucleotide
gacauguacuuauaaccau

SEQ ID NO: 1601164 - RNA, 19 nt, Artificial Sequence
  Description of Artificial Sequence: Synthetic oligonucleotide
uuccagcccucagagacca

SEQ ID NO: 1601165 - RNA, 19 nt, Artificial Sequence
  Description of Artificial Sequence: Synthetic oligonucleotide
cauauaaagcggccacuca

SEQ ID NO: 1601166 - RNA, 19 nt, Artificial Sequence
  Description of Artificial Sequence: Synthetic oligonucleotide
cacuaggaaagcgcugggg

SEQ ID NO: 1601167 - RNA, 19 nt, Artificial Sequence
  Description of Artificial Sequence: Synthetic oligonucleotide
auugggcuuaugaaagggu

SEQ ID NO: 1601168 - RNA, 19 nt, Artificial Sequence
  Description of Artificial Sequence: Synthetic oligonucleotide
ucaauccuuugcuguggac

SEQ ID NO: 1601169 - RNA, 19 nt, Artificial Sequence
  Description of Artificial Sequence: Synthetic oligonucleotide
uuuacccuuggggcggacc

SEQ ID NO: 1601170 - RNA, 19 nt, Artificial Sequence
  Description of Artificial Sequence: Synthetic oligonucleotide
uccccacuuaaaagcuuca

SEQ ID NO: 1601171 - RNA, 19 nt, Artificial Sequence
  Description of Artificial Sequence: Synthetic oligonucleotide
cggauccccacuuaaaagc

SEQ ID NO: 1601172 - RNA, 19 nt, Artificial Sequence
  Description of Artificial Sequence: Synthetic oligonucleotide
gugacaaccaucaaauuuu

SEQ ID NO: 1601173 - RNA, 19 nt, Artificial Sequence
  Description of Artificial Sequence: Synthetic oligonucleotide
aguggucguucccaaacuu

SEQ ID NO: 1601174 - RNA, 19 nt, Artificial Sequence
  Description of Artificial Sequence: Synthetic oligonucleotide
gucgagguugcacaugaaa

SEQ ID NO: 1601175 - RNA, 19 nt, Artificial Sequence
  Description of Artificial Sequence: Synthetic oligonucleotide
accugcuggucccaacuca

SEQ ID NO: 1601176 - RNA, 19 nt, Artificial Sequence
  Description of Artificial Sequence: Synthetic oligonucleotide
ggaguauacaaugcuucug

SEQ ID NO: 1601177 - RNA, 19 nt, Artificial Sequence
  Description of Artificial Sequence: Synthetic oligonucleotide
ccuauucaaggccaaggac

SEQ ID NO: 1601178 - RNA, 19 nt, Artificial Sequence
  Description of Artificial Sequence: Synthetic oligonucleotide
guaggaguccgcgccaagc

SEQ ID NO: 1601179 - RNA, 19 nt, Artificial Sequence
  Description of Artificial Sequence: Synthetic oligonucleotide
uagaagccuagcuguacuu

SEQ ID NO: 1601180 - RNA, 19 nt, Artificial Sequence
  Description of Artificial Sequence: Synthetic oligonucleotide
ggggaucugccugaagucg

SEQ ID NO: 1601181 - RNA, 19 nt, Artificial Sequence
  Description of Artificial Sequence: Synthetic oligonucleotide
uuccuagcuucaauccuuu

SEQ ID NO: 1601182 - RNA, 19 nt, Artificial Sequence
  Description of Artificial Sequence: Synthetic oligonucleotide
acaggaguauacaaugcuu

SEQ ID NO: 1601183 - RNA, 19 nt, Artificial Sequence
  Description of Artificial Sequence: Synthetic oligonucleotide
ggauuccacuaggaaagcg

SEQ ID NO: 1601184 - RNA, 19 nt, Artificial Sequence
  Description of Artificial Sequence: Synthetic oligonucleotide
cccacuuaaaagcuucaug

SEQ ID NO: 1601185 - RNA, 19 nt, Artificial Sequence
  Description of Artificial Sequence: Synthetic oligonucleotide
ugccaaucacuaacauauc

SEQ ID NO: 1601186 - RNA, 19 nt, Artificial Sequence
  Description of Artificial Sequence: Synthetic oligonucleotide
gcggauccccacuuaaaag

SEQ ID NO: 1601187 - RNA, 19 nt, Artificial Sequence
  Description of Artificial Sequence: Synthetic oligonucleotide
aguaggaguccgcgccaag

SEQ ID NO: 1601188 - RNA, 19 nt, Artificial Sequence
  Description of Artificial Sequence: Synthetic oligonucleotide
guuguccaggccaagauau

SEQ ID NO: 1601189 - RNA, 19 nt, Artificial Sequence
  Description of Artificial Sequence: Synthetic oligonucleotide
caguuuacugcagcuaaca

SEQ ID NO: 1601190 - RNA, 19 nt, Artificial Sequence
  Description of Artificial Sequence: Synthetic oligonucleotide
ucccaacaucugcauaaau

SEQ ID NO: 1601191 - RNA, 19 nt, Artificial Sequence
  Description of Artificial Sequence: Synthetic oligonucleotide
cacucacaggaguauacaa

SEQ ID NO: 1601192 - RNA, 19 nt, Artificial Sequence
  Description of Artificial Sequence: Synthetic oligonucleotide
caauaucauaguacccaaa

SEQ ID NO: 1601193 - RNA, 19 nt, Artificial Sequence
  Description of Artificial Sequence: Synthetic oligonucleotide
agcccucagagaccauaag

SEQ ID NO: 1601194 - RNA, 19 nt, Artificial Sequence
  Description of Artificial Sequence: Synthetic oligonucleotide
ucacugaugcaggcaucag

SEQ ID NO: 1601195 - RNA, 19 nt, Artificial Sequence
  Description of Artificial Sequence: Synthetic oligonucleotide
aggaaagcgcuggggaucu

SEQ ID NO: 1601196 - RNA, 19 nt, Artificial Sequence
  Description of Artificial Sequence: Synthetic oligonucleotide
ucuacaccccagucagcaa

SEQ ID NO: 1601197 - RNA, 19 nt, Artificial Sequence
  Description of Artificial Sequence: Synthetic oligonucleotide
agaacgagguccaccaauu

SEQ ID NO: 1601198 - RNA, 19 nt, Artificial Sequence
  Description of Artificial Sequence: Synthetic oligonucleotide
gaaaccugcacagguuuua

SEQ ID NO: 1601199 - RNA, 19 nt, Artificial Sequence
  Description of Artificial Sequence: Synthetic oligonucleotide
cuaggggacgaagcgcaag

SEQ ID NO: 1601200 - RNA, 19 nt, Artificial Sequence
  Description of Artificial Sequence: Synthetic oligonucleotide
guuaccugcuggucccaac

SEQ ID NO: 1601201 - RNA, 19 nt, Artificial Sequence
  Description of Artificial Sequence: Synthetic oligonucleotide
gggaucugccugaagucgg

SEQ ID NO: 1601202 - RNA, 19 nt, Artificial Sequence
  Description of Artificial Sequence: Synthetic oligonucleotide
caagccguuguccagugcu

SEQ ID NO: 1601203 - RNA, 19 nt, Artificial Sequence
  Description of Artificial Sequence: Synthetic oligonucleotide
cacaggaguauacaaugcu

SEQ ID NO: 1601204 - RNA, 19 nt, Artificial Sequence
  Description of Artificial Sequence: Synthetic oligonucleotide
aggcuaaauuugagagugg

SEQ ID NO: 1601205 - RNA, 19 nt, Artificial Sequence
  Description of Artificial Sequence: Synthetic oligonucleotide
gguguaagaacgaggucca

SEQ ID NO: 1601206 - RNA, 19 nt, Artificial Sequence
  Description of Artificial Sequence: Synthetic oligonucleotide
uugcccaaggggucuuggu

SEQ ID NO: 1601207 - RNA, 19 nt, Artificial Sequence
  Description of Artificial Sequence: Synthetic oligonucleotide
ccugagggauuuauucgag

SEQ ID NO: 1601208 - RNA, 19 nt, Artificial Sequence
  Description of Artificial Sequence: Synthetic oligonucleotide
acuaagacuaggggacgaa

SEQ ID NO: 1601209 - RNA, 19 nt, Artificial Sequence
  Description of Artificial Sequence: Synthetic oligonucleotide
gucaucuaugcagagguau

SEQ ID NO: 1601210 - RNA, 19 nt, Artificial Sequence
  Description of Artificial Sequence: Synthetic oligonucleotide
cuguggacauaauuagcua

SEQ ID NO: 1601211 - RNA, 19 nt, Artificial Sequence
  Description of Artificial Sequence: Synthetic oligonucleotide
guggucguucccaaacuuc

SEQ ID NO: 1601212 - RNA, 19 nt, Artificial Sequence
  Description of Artificial Sequence: Synthetic oligonucleotide
cccauaguaggaguccgcg

SEQ ID NO: 1601213 - RNA, 19 nt, Artificial Sequence
  Description of Artificial Sequence: Synthetic oligonucleotide
gaucuacaccccagucagc

SEQ ID NO: 1601214 - RNA, 19 nt, Artificial Sequence
  Description of Artificial Sequence: Synthetic oligonucleotide
ccaaggacgucacacuguc

SEQ ID NO: 1601215 - RNA, 19 nt, Artificial Sequence
  Description of Artificial Sequence: Synthetic oligonucleotide
ccauaguaggaguccgcgc

SEQ ID NO: 1601216 - RNA, 19 nt, Artificial Sequence
  Description of Artificial Sequence: Synthetic oligonucleotide
gcagcuaacauggacuuua

SEQ ID NO: 1601217 - RNA, 19 nt, Artificial Sequence
  Description of Artificial Sequence: Synthetic oligonucleotide
gaguggucguucccaaacu

SEQ ID NO: 1601218 - RNA, 19 nt, Artificial Sequence
  Description of Artificial Sequence: Synthetic oligonucleotide
ggagccauccaacagucau

SEQ ID NO: 1601219 - RNA, 19 nt, Artificial Sequence
  Description of Artificial Sequence: Synthetic oligonucleotide
cagagggccaucuguguua

SEQ ID NO: 1601220 - RNA, 19 nt, Artificial Sequence
  Description of Artificial Sequence: Synthetic oligonucleotide
cgguccauucauagaagcc

SEQ ID NO: 1601221 - RNA, 19 nt, Artificial Sequence
  Description of Artificial Sequence: Synthetic oligonucleotide
cagguuuuauucccaacau

SEQ ID NO: 1601222 - RNA, 19 nt, Artificial Sequence
  Description of Artificial Sequence: Synthetic oligonucleotide
ugauagcccagagggccau

SEQ ID NO: 1601223 - RNA, 19 nt, Artificial Sequence
  Description of Artificial Sequence: Synthetic oligonucleotide
ccaaaacucccagggaaac

SEQ ID NO: 1601224 - RNA, 19 nt, Artificial Sequence
  Description of Artificial Sequence: Synthetic oligonucleotide
gguccaccaauuuccugca

SEQ ID NO: 1601225 - RNA, 19 nt, Artificial Sequence
  Description of Artificial Sequence: Synthetic oligonucleotide
aagccaccuggauggugua

SEQ ID NO: 1601226 - RNA, 19 nt, Artificial Sequence
  Description of Artificial Sequence: Synthetic oligonucleotide
gggcuuaugaaagggucuc

SEQ ID NO: 1601227 - RNA, 19 nt, Artificial Sequence
  Description of Artificial Sequence: Synthetic oligonucleotide
uguuaccugcuggucccaa

SEQ ID NO: 1601228 - RNA, 19 nt, Artificial Sequence
  Description of Artificial Sequence: Synthetic oligonucleotide
gugaugaugcaaccaggau

SEQ ID NO: 1601229 - RNA, 19 nt, Artificial Sequence
  Description of Artificial Sequence: Synthetic oligonucleotide
ccuuucaggagccauccaa

SEQ ID NO: 1601230 - RNA, 19 nt, Artificial Sequence
  Description of Artificial Sequence: Synthetic oligonucleotide
ggcuaaauuugagaguggu

SEQ ID NO: 1601231 - RNA, 19 nt, Artificial Sequence
  Description of Artificial Sequence: Synthetic oligonucleotide
cacaugaaacguucccagu

SEQ ID NO: 1601232 - RNA, 19 nt, Artificial Sequence
  Description of Artificial Sequence: Synthetic oligonucleotide
gcgacuucaacaaucuccu

SEQ ID NO: 1601233 - RNA, 19 nt, Artificial Sequence
  Description of Artificial Sequence: Synthetic oligonucleotide
cuucgauuuuguuuuccuu

SEQ ID NO: 1601234 - RNA, 19 nt, Artificial Sequence
  Description of Artificial Sequence: Synthetic oligonucleotide
gccaaggacauguacuuau

SEQ ID NO: 1601235 - RNA, 19 nt, Artificial Sequence
  Description of Artificial Sequence: Synthetic oligonucleotide
uccgcgccaagccguuguc

SEQ ID NO: 1601236 - RNA, 19 nt, Artificial Sequence
  Description of Artificial Sequence: Synthetic oligonucleotide
gucggagaucauuggacau

SEQ ID NO: 1601237 - RNA, 19 nt, Artificial Sequence
  Description of Artificial Sequence: Synthetic oligonucleotide
ccaagauauucuuuaugcu

SEQ ID NO: 1601238 - RNA, 19 nt, Artificial Sequence
  Description of Artificial Sequence: Synthetic oligonucleotide
cuaaaacaguaccccugcu

SEQ ID NO: 1601239 - RNA, 19 nt, Artificial Sequence
  Description of Artificial Sequence: Synthetic oligonucleotide
cagcgacuucaacaaucuc

SEQ ID NO: 1601240 - RNA, 19 nt, Artificial Sequence
  Description of Artificial Sequence: Synthetic oligonucleotide
cacagaccagccgcggauc

SEQ ID NO: 1601241 - RNA, 19 nt, Artificial Sequence
  Description of Artificial Sequence: Synthetic oligonucleotide
ugcagcuaacauggacuuu

SEQ ID NO: 1601242 - RNA, 19 nt, Artificial Sequence
  Description of Artificial Sequence: Synthetic oligonucleotide
ccguuguccagugcuuugg

SEQ ID NO: 1601243 - RNA, 19 nt, Artificial Sequence
  Description of Artificial Sequence: Synthetic oligonucleotide
gccuagcuguacuuucuca

SEQ ID NO: 1601244 - RNA, 19 nt, Artificial Sequence
  Description of Artificial Sequence: Synthetic oligonucleotide
cagagaccauaaggucugc

SEQ ID NO: 1601245 - RNA, 19 nt, Artificial Sequence
  Description of Artificial Sequence: Synthetic oligonucleotide
ccugaagucggcccuuuga

SEQ ID NO: 1601246 - RNA, 19 nt, Artificial Sequence
  Description of Artificial Sequence: Synthetic oligonucleotide
gaacgagguccaccaauuu

SEQ ID NO: 1601247 - RNA, 19 nt, Artificial Sequence
  Description of Artificial Sequence: Synthetic oligonucleotide
ggauccccacuuaaaagcu

SEQ ID NO: 1601248 - RNA, 19 nt, Artificial Sequence
  Description of Artificial Sequence: Synthetic oligonucleotide
uuuuacccuuggggcggac

SEQ ID NO: 1601249 - RNA, 19 nt, Artificial Sequence
  Description of Artificial Sequence: Synthetic oligonucleotide
agccguuguccagugcuuu

SEQ ID NO: 1601250 - RNA, 19 nt, Artificial Sequence
  Description of Artificial Sequence: Synthetic oligonucleotide
ggacgaagcgcaagcucac

SEQ ID NO: 1601251 - RNA, 19 nt, Artificial Sequence
  Description of Artificial Sequence: Synthetic oligonucleotide
uacccuuggggcggaccaa

SEQ ID NO: 1601252 - RNA, 19 nt, Artificial Sequence
  Description of Artificial Sequence: Synthetic oligonucleotide
cuucuuggcagucgagguu

SEQ ID NO: 1601253 - RNA, 19 nt, Artificial Sequence
  Description of Artificial Sequence: Synthetic oligonucleotide
ggcuuaugaaagggucuca

SEQ ID NO: 1601254 - RNA, 19 nt, Artificial Sequence
  Description of Artificial Sequence: Synthetic oligonucleotide
gcagucgagguugcacaug

SEQ ID NO: 1601255 - RNA, 19 nt, Artificial Sequence
  Description of Artificial Sequence: Synthetic oligonucleotide
ggacaugaguagaggagcu

SEQ ID NO: 1601256 - RNA, 19 nt, Artificial Sequence
  Description of Artificial Sequence: Synthetic oligonucleotide
guuuuacccuuggggcgga

SEQ ID NO: 1601257 - RNA, 19 nt, Artificial Sequence
  Description of Artificial Sequence: Synthetic oligonucleotide
acuaggggacgaagcgcaa

SEQ ID NO: 1601258 - RNA, 19 nt, Artificial Sequence
  Description of Artificial Sequence: Synthetic oligonucleotide
ccaggcuaaauuugagagu

SEQ ID NO: 1601259 - RNA, 19 nt, Artificial Sequence
  Description of Artificial Sequence: Synthetic oligonucleotide
agguuacgguccauucaua

SEQ ID NO: 1601260 - RNA, 19 nt, Artificial Sequence
  Description of Artificial Sequence: Synthetic oligonucleotide
cgaagcgcaagcucacaga

SEQ ID NO: 1601261 - RNA, 19 nt, Artificial Sequence
  Description of Artificial Sequence: Synthetic oligonucleotide
guccgcgccaagccguugu

SEQ ID NO: 1601262 - RNA, 19 nt, Artificial Sequence
  Description of Artificial Sequence: Synthetic oligonucleotide
gagucccuuucaggagcca

SEQ ID NO: 1601263 - RNA, 19 nt, Artificial Sequence
  Description of Artificial Sequence: Synthetic oligonucleotide
ccaaggacauguacuuaua

SEQ ID NO: 1601264 - RNA, 19 nt, Artificial Sequence
  Description of Artificial Sequence: Synthetic oligonucleotide
agucgagguugcacaugaa

SEQ ID NO: 1601265 - RNA, 19 nt, Artificial Sequence
  Description of Artificial Sequence: Synthetic oligonucleotide
aguccgcgccaagccguug

SEQ ID NO: 1601266 - RNA, 19 nt, Artificial Sequence
  Description of Artificial Sequence: Synthetic oligonucleotide
ccaagccguuguccagugc

SEQ ID NO: 1601267 - RNA, 19 nt, Artificial Sequence
  Description of Artificial Sequence: Synthetic oligonucleotide
gccgcggauccccacuuaa

SEQ ID NO: 1601268 - RNA, 19 nt, Artificial Sequence
  Description of Artificial Sequence: Synthetic oligonucleotide
guguuaccugcugguccca

SEQ ID NO: 1601269 - RNA, 19 nt, Artificial Sequence
  Description of Artificial Sequence: Synthetic oligonucleotide
agccgcggauccccacuua

SEQ ID NO: 1601270 - RNA, 19 nt, Artificial Sequence
  Description of Artificial Sequence: Synthetic oligonucleotide
cugcguccuuccagcccuc

SEQ ID NO: 1601271 - RNA, 19 nt, Artificial Sequence
  Description of Artificial Sequence: Synthetic oligonucleotide
ggaguccgcgccaagccgu

SEQ ID NO: 1601272 - RNA, 19 nt, Artificial Sequence
  Description of Artificial Sequence: Synthetic oligonucleotide
cgcggauccccacuuaaaa

SEQ ID NO: 1601273 - RNA, 19 nt, Artificial Sequence
  Description of Artificial Sequence: Synthetic oligonucleotide
ggcagucgagguugcacau

SEQ ID NO: 1601274 - RNA, 19 nt, Artificial Sequence
  Description of Artificial Sequence: Synthetic oligonucleotide
ucggcccuuugagucccuu

SEQ ID NO: 1601275 - RNA, 19 nt, Artificial Sequence
  Description of Artificial Sequence: Synthetic oligonucleotide
gcuugcccaaggggucuug

SEQ ID NO: 1601276 - RNA, 19 nt, Artificial Sequence
  Description of Artificial Sequence: Synthetic oligonucleotide
gcggccacucacaggagua

SEQ ID NO: 1601277 - RNA, 19 nt, Artificial Sequence
  Description of Artificial Sequence: Synthetic oligonucleotide
cagugccugagggauuuau

SEQ ID NO: 1601278 - RNA, 19 nt, Artificial Sequence
  Description of Artificial Sequence: Synthetic oligonucleotide
cccuuggggcggaccaauc

SEQ ID NO: 1601279 - RNA, 19 nt, Artificial Sequence
  Description of Artificial Sequence: Synthetic oligonucleotide
ggaaagcgcuggggaucug

SEQ ID NO: 1601280 - RNA, 19 nt, Artificial Sequence
  Description of Artificial Sequence: Synthetic oligonucleotide
ccgcggauccccacuuaaa

SEQ ID NO: 1601281 - RNA, 19 nt, Artificial Sequence
  Description of Artificial Sequence: Synthetic oligonucleotide
gaguccgcgccaagccguu

SEQ ID NO: 1601282 - RNA, 19 nt, Artificial Sequence
  Description of Artificial Sequence: Synthetic oligonucleotide
cgagguccaccaauuuccu

SEQ ID NO: 1601283 - RNA, 19 nt, Artificial Sequence
  Description of Artificial Sequence: Synthetic oligonucleotide
cagccgcggauccccacuu

SEQ ID NO: 1601284 - RNA, 19 nt, Artificial Sequence
  Description of Artificial Sequence: Synthetic oligonucleotide
ccagccgcggauccccacu

SEQ ID NO: 1601285 - RNA, 19 nt, Artificial Sequence
  Description of Artificial Sequence: Synthetic oligonucleotide
ccccacuuaaaagcuucau

SEQ ID NO: 1601286 - RNA, 19 nt, Artificial Sequence
  Description of Artificial Sequence: Synthetic oligonucleotide
gucggcccuuugagucccu

SEQ ID NO: 1601287 - RNA, 19 nt, Artificial Sequence
  Description of Artificial Sequence: Synthetic oligonucleotide
cgccaagccguuguccagu

SEQ ID NO: 1601288 - RNA, 19 nt, Artificial Sequence
  Description of Artificial Sequence: Synthetic oligonucleotide
cgacuucaacaaucuccuu

SEQ ID NO: 1601289 - RNA, 19 nt, Artificial Sequence
  Description of Artificial Sequence: Synthetic oligonucleotide
aauaccuccacagucgccg

SEQ ID NO: 1601290 - RNA, 19 nt, Artificial Sequence
  Description of Artificial Sequence: Synthetic oligonucleotide
aauuuucucucaaucgggc

SEQ ID NO: 1601291 - RNA, 19 nt, Artificial Sequence
  Description of Artificial Sequence: Synthetic oligonucleotide
gauacaugcaccaagccug

SEQ ID NO: 1601292 - RNA, 19 nt, Artificial Sequence
  Description of Artificial Sequence: Synthetic oligonucleotide
aacagcugauuccaucccc

SEQ ID NO: 1601293 - RNA, 19 nt, Artificial Sequence
  Description of Artificial Sequence: Synthetic oligonucleotide
ugaguaaugggccccauug

SEQ ID NO: 1601294 - RNA, 19 nt, Artificial Sequence
  Description of Artificial Sequence: Synthetic oligonucleotide
guugaagguacucaggaag

SEQ ID NO: 1601295 - RNA, 19 nt, Artificial Sequence
  Description of Artificial Sequence: Synthetic oligonucleotide
aguccuaauaccuccacag

SEQ ID NO: 1601296 - RNA, 19 nt, Artificial Sequence
  Description of Artificial Sequence: Synthetic oligonucleotide
aaacagcugauuccauccc

SEQ ID NO: 1601297 - RNA, 19 nt, Artificial Sequence
  Description of Artificial Sequence: Synthetic oligonucleotide
uaaugggccccauuggucg

SEQ ID NO: 1601298 - RNA, 19 nt, Artificial Sequence
  Description of Artificial Sequence: Synthetic oligonucleotide
cugaucaugguccugguag

SEQ ID NO: 1601299 - RNA, 19 nt, Artificial Sequence
  Description of Artificial Sequence: Synthetic oligonucleotide
ugauacaugcaccaagccu

SEQ ID NO: 1601300 - RNA, 19 nt, Artificial Sequence
  Description of Artificial Sequence: Synthetic oligonucleotide
ugugguacuguccuugccc

SEQ ID NO: 1601301 - RNA, 19 nt, Artificial Sequence
  Description of Artificial Sequence: Synthetic oligonucleotide
uuugcugcgcuuacgacug

SEQ ID NO: 1601302 - RNA, 19 nt, Artificial Sequence
  Description of Artificial Sequence: Synthetic oligonucleotide
auuggucgggcccaggggc

SEQ ID NO: 1601303 - RNA, 19 nt, Artificial Sequence
  Description of Artificial Sequence: Synthetic oligonucleotide
gagggaagcaccaucauug

SEQ ID NO: 1601304 - RNA, 19 nt, Artificial Sequence
  Description of Artificial Sequence: Synthetic oligonucleotide
gaguuggucagucgggucg

SEQ ID NO: 1601305 - RNA, 19 nt, Artificial Sequence
  Description of Artificial Sequence: Synthetic oligonucleotide
agcgacagucggcagagcc

SEQ ID NO: 1601306 - RNA, 19 nt, Artificial Sequence
  Description of Artificial Sequence: Synthetic oligonucleotide
uaaaccgaggucugcauug

SEQ ID NO: 1601307 - RNA, 19 nt, Artificial Sequence
  Description of Artificial Sequence: Synthetic oligonucleotide
ugugaguuggucagucggg

SEQ ID NO: 1601308 - RNA, 19 nt, Artificial Sequence
  Description of Artificial Sequence: Synthetic oligonucleotide
gcaauuuucucucaaucgg

SEQ ID NO: 1601309 - RNA, 19 nt, Artificial Sequence
  Description of Artificial Sequence: Synthetic oligonucleotide
ggaagccacaguuacaagg

SEQ ID NO: 1601310 - RNA, 19 nt, Artificial Sequence
  Description of Artificial Sequence: Synthetic oligonucleotide
cccaugauggcaaagaggc

SEQ ID NO: 1601311 - RNA, 19 nt, Artificial Sequence
  Description of Artificial Sequence: Synthetic oligonucleotide
ugugccuaguggaaggccc

SEQ ID NO: 1601312 - RNA, 19 nt, Artificial Sequence
  Description of Artificial Sequence: Synthetic oligonucleotide
ucgaaaacagcugauucca

SEQ ID NO: 1601313 - RNA, 19 nt, Artificial Sequence
  Description of Artificial Sequence: Synthetic oligonucleotide
ugggaguuccagcugacgc

SEQ ID NO: 1601314 - RNA, 19 nt, Artificial Sequence
  Description of Artificial Sequence: Synthetic oligonucleotide
ugaucaugguccugguagg

SEQ ID NO: 1601315 - RNA, 19 nt, Artificial Sequence
  Description of Artificial Sequence: Synthetic oligonucleotide
cugcgagaccccaugaugg

SEQ ID NO: 1601316 - RNA, 19 nt, Artificial Sequence
  Description of Artificial Sequence: Synthetic oligonucleotide
ugagguugaggggagaccc

SEQ ID NO: 1601317 - RNA, 19 nt, Artificial Sequence
  Description of Artificial Sequence: Synthetic oligonucleotide
ugaacuggggcccaggguu

SEQ ID NO: 1601318 - RNA, 19 nt, Artificial Sequence
  Description of Artificial Sequence: Synthetic oligonucleotide
gugugaguuggucagucgg

SEQ ID NO: 1601319 - RNA, 19 nt, Artificial Sequence
  Description of Artificial Sequence: Synthetic oligonucleotide
aacgcaaccuugucugcag

SEQ ID NO: 1601320 - RNA, 19 nt, Artificial Sequence
  Description of Artificial Sequence: Synthetic oligonucleotide
cauugaagcuguguaaacc

SEQ ID NO: 1601321 - RNA, 19 nt, Artificial Sequence
  Description of Artificial Sequence: Synthetic oligonucleotide
aguaaugggccccauuggu

SEQ ID NO: 1601322 - RNA, 19 nt, Artificial Sequence
  Description of Artificial Sequence: Synthetic oligonucleotide
gcaggugucacacugcccg

SEQ ID NO: 1601323 - RNA, 19 nt, Artificial Sequence
  Description of Artificial Sequence: Synthetic oligonucleotide
gaguaaugggccccauugg

SEQ ID NO: 1601324 - RNA, 19 nt, Artificial Sequence
  Description of Artificial Sequence: Synthetic oligonucleotide
cauagaagccugugggugc

SEQ ID NO: 1601325 - RNA, 19 nt, Artificial Sequence
  Description of Artificial Sequence: Synthetic oligonucleotide
ccuaauaccuccacagucg

SEQ ID NO: 1601326 - RNA, 19 nt, Artificial Sequence
  Description of Artificial Sequence: Synthetic oligonucleotide
aaaccgaggucugcauugc

SEQ ID NO: 1601327 - RNA, 19 nt, Artificial Sequence
  Description of Artificial Sequence: Synthetic oligonucleotide
gaggacugcgugaagaggc

SEQ ID NO: 1601328 - RNA, 19 nt, Artificial Sequence
  Description of Artificial Sequence: Synthetic oligonucleotide
cucaaucgggcacugcugg

SEQ ID NO: 1601329 - RNA, 19 nt, Artificial Sequence
  Description of Artificial Sequence: Synthetic oligonucleotide
ugggcuguuggccaacgcc

SEQ ID NO: 1601330 - RNA, 19 nt, Artificial Sequence
  Description of Artificial Sequence: Synthetic oligonucleotide
aaguccuaauaccuccaca

SEQ ID NO: 1601331 - RNA, 19 nt, Artificial Sequence
  Description of Artificial Sequence: Synthetic oligonucleotide
gacacaccugugcugaggc

SEQ ID NO: 1601332 - RNA, 19 nt, Artificial Sequence
  Description of Artificial Sequence: Synthetic oligonucleotide
ugugugaguuggucagucg

SEQ ID NO: 1601333 - RNA, 19 nt, Artificial Sequence
  Description of Artificial Sequence: Synthetic oligonucleotide
cuaauaccuccacagucgc

SEQ ID NO: 1601334 - RNA, 19 nt, Artificial Sequence
  Description of Artificial Sequence: Synthetic oligonucleotide
gaggacuucgucgaaaaca

SEQ ID NO: 1601335 - RNA, 19 nt, Artificial Sequence
  Description of Artificial Sequence: Synthetic oligonucleotide
gugccagaggacuucgucg

SEQ ID NO: 1601336 - RNA, 19 nt, Artificial Sequence
  Description of Artificial Sequence: Synthetic oligonucleotide
ggaagcaccaucauugaag

SEQ ID NO: 1601337 - RNA, 19 nt, Artificial Sequence
  Description of Artificial Sequence: Synthetic oligonucleotide
ucaggggacgagauggcug

SEQ ID NO: 1601338 - RNA, 19 nt, Artificial Sequence
  Description of Artificial Sequence: Synthetic oligonucleotide
ugugcugcgagaccccaug

SEQ ID NO: 1601339 - RNA, 19 nt, Artificial Sequence
  Description of Artificial Sequence: Synthetic oligonucleotide
aaugggccccauuggucgg

SEQ ID NO: 1601340 - RNA, 19 nt, Artificial Sequence
  Description of Artificial Sequence: Synthetic oligonucleotide
aggacuucgucgaaaacag

SEQ ID NO: 1601341 - RNA, 19 nt, Artificial Sequence
  Description of Artificial Sequence: Synthetic oligonucleotide
gacgagauggcugugaucu

SEQ ID NO: 1601342 - RNA, 19 nt, Artificial Sequence
  Description of Artificial Sequence: Synthetic oligonucleotide
aggcuggccacuucagggc

SEQ ID NO: 1601343 - RNA, 19 nt, Artificial Sequence
  Description of Artificial Sequence: Synthetic oligonucleotide
uugaagcuguguaaaccga

SEQ ID NO: 1601344 - RNA, 19 nt, Artificial Sequence
  Description of Artificial Sequence: Synthetic oligonucleotide
ucucaaucgggcacugcug

SEQ ID NO: 1601345 - RNA, 19 nt, Artificial Sequence
  Description of Artificial Sequence: Synthetic oligonucleotide
auuuucucucaaucgggca

SEQ ID NO: 1601346 - RNA, 19 nt, Artificial Sequence
  Description of Artificial Sequence: Synthetic oligonucleotide
caguggugaguaaugggcc

SEQ ID NO: 1601347 - RNA, 19 nt, Artificial Sequence
  Description of Artificial Sequence: Synthetic oligonucleotide
gcugauuccauccccgagg

SEQ ID NO: 1601348 - RNA, 19 nt, Artificial Sequence
  Description of Artificial Sequence: Synthetic oligonucleotide
caggguugaagguacucag

SEQ ID NO: 1601349 - RNA, 19 nt, Artificial Sequence
  Description of Artificial Sequence: Synthetic oligonucleotide
ggcaacgcaaccuugucug

SEQ ID NO: 1601350 - RNA, 19 nt, Artificial Sequence
  Description of Artificial Sequence: Synthetic oligonucleotide
agcagagaugaagagguug

SEQ ID NO: 1601351 - RNA, 19 nt, Artificial Sequence
  Description of Artificial Sequence: Synthetic oligonucleotide
cuuacgacuguccugccca

SEQ ID NO: 1601352 - RNA, 19 nt, Artificial Sequence
  Description of Artificial Sequence: Synthetic oligonucleotide
caguuacaaggccagggcc

SEQ ID NO: 1601353 - RNA, 19 nt, Artificial Sequence
  Description of Artificial Sequence: Synthetic oligonucleotide
cugagaguuggugugcagg

SEQ ID NO: 1601354 - RNA, 19 nt, Artificial Sequence
  Description of Artificial Sequence: Synthetic oligonucleotide
gccaacgccccacugaugg

SEQ ID NO: 1601355 - RNA, 19 nt, Artificial Sequence
  Description of Artificial Sequence: Synthetic oligonucleotide
guggaugauacaugcacca

SEQ ID NO: 1601356 - RNA, 19 nt, Artificial Sequence
  Description of Artificial Sequence: Synthetic oligonucleotide
ggaguuucgaggcugcggc

SEQ ID NO: 1601357 - RNA, 19 nt, Artificial Sequence
  Description of Artificial Sequence: Synthetic oligonucleotide
aaucgggcacugcugggcu

SEQ ID NO: 1601358 - RNA, 19 nt, Artificial Sequence
  Description of Artificial Sequence: Synthetic oligonucleotide
uuggccaacgccccacuga

SEQ ID NO: 1601359 - RNA, 19 nt, Artificial Sequence
  Description of Artificial Sequence: Synthetic oligonucleotide
uugucugcaggcccgcaca

SEQ ID NO: 1601360 - RNA, 19 nt, Artificial Sequence
  Description of Artificial Sequence: Synthetic oligonucleotide
ugggaagcucacagaggcg

SEQ ID NO: 1601361 - RNA, 19 nt, Artificial Sequence
  Description of Artificial Sequence: Synthetic oligonucleotide
agcauagaagccugugggu

SEQ ID NO: 1601362 - RNA, 19 nt, Artificial Sequence
  Description of Artificial Sequence: Synthetic oligonucleotide
ugcagcacggaggagccag

SEQ ID NO: 1601363 - RNA, 19 nt, Artificial Sequence
  Description of Artificial Sequence: Synthetic oligonucleotide
ucagucgggucgcagugga

SEQ ID NO: 1601364 - RNA, 19 nt, Artificial Sequence
  Description of Artificial Sequence: Synthetic oligonucleotide
aguuggucagucgggucgc

SEQ ID NO: 1601365 - RNA, 19 nt, Artificial Sequence
  Description of Artificial Sequence: Synthetic oligonucleotide
auacaugcaccaagccugc

SEQ ID NO: 1601366 - RNA, 19 nt, Artificial Sequence
  Description of Artificial Sequence: Synthetic oligonucleotide
cacgcuuccuuuugcugcg

SEQ ID NO: 1601367 - RNA, 19 nt, Artificial Sequence
  Description of Artificial Sequence: Synthetic oligonucleotide
gaaguccuaauaccuccac

SEQ ID NO: 1601368 - RNA, 19 nt, Artificial Sequence
  Description of Artificial Sequence: Synthetic oligonucleotide
ugcgcuuacgacuguccug

SEQ ID NO: 1601369 - RNA, 19 nt, Artificial Sequence
  Description of Artificial Sequence: Synthetic oligonucleotide
gugguacuguccuugcccc

SEQ ID NO: 1601370 - RNA, 19 nt, Artificial Sequence
  Description of Artificial Sequence: Synthetic oligonucleotide
auaccuccacagucgccgc

SEQ ID NO: 1601371 - RNA, 19 nt, Artificial Sequence
  Description of Artificial Sequence: Synthetic oligonucleotide
ucgcaguggaugauacaug

SEQ ID NO: 1601372 - RNA, 19 nt, Artificial Sequence
  Description of Artificial Sequence: Synthetic oligonucleotide
uguaaaccgaggucugcau

SEQ ID NO: 1601373 - RNA, 19 nt, Artificial Sequence
  Description of Artificial Sequence: Synthetic oligonucleotide
ugcgugaagaggccagcga

SEQ ID NO: 1601374 - RNA, 19 nt, Artificial Sequence
  Description of Artificial Sequence: Synthetic oligonucleotide
agggcccggaguuucgagg

SEQ ID NO: 1601375 - RNA, 19 nt, Artificial Sequence
  Description of Artificial Sequence: Synthetic oligonucleotide
uuucucucaaucgggcacu

SEQ ID NO: 1601376 - RNA, 19 nt, Artificial Sequence
  Description of Artificial Sequence: Synthetic oligonucleotide
ugacgcacgcuuccuuuug

SEQ ID NO: 1601377 - RNA, 19 nt, Artificial Sequence
  Description of Artificial Sequence: Synthetic oligonucleotide
aguuucgaggcugcggcag

SEQ ID NO: 1601378 - RNA, 19 nt, Artificial Sequence
  Description of Artificial Sequence: Synthetic oligonucleotide
cauuggucgggcccagggg

SEQ ID NO: 1601379 - RNA, 19 nt, Artificial Sequence
  Description of Artificial Sequence: Synthetic oligonucleotide
uguugcugaccauggaguu

SEQ ID NO: 1601380 - RNA, 19 nt, Artificial Sequence
  Description of Artificial Sequence: Synthetic oligonucleotide
cuucgucgaaaacagcuga

SEQ ID NO: 1601381 - RNA, 19 nt, Artificial Sequence
  Description of Artificial Sequence: Synthetic oligonucleotide
uucgucgaaaacagcugau

SEQ ID NO: 1601382 - RNA, 19 nt, Artificial Sequence
  Description of Artificial Sequence: Synthetic oligonucleotide
acugcgugaagaggccagc

SEQ ID NO: 1601383 - RNA, 19 nt, Artificial Sequence
  Description of Artificial Sequence: Synthetic oligonucleotide
ugcgagaccccaugauggc

SEQ ID NO: 1601384 - RNA, 19 nt, Artificial Sequence
  Description of Artificial Sequence: Synthetic oligonucleotide
guagaaguccuaauaccuc

SEQ ID NO: 1601385 - RNA, 19 nt, Artificial Sequence
  Description of Artificial Sequence: Synthetic oligonucleotide
acuucgucgaaaacagcug

SEQ ID NO: 1601386 - RNA, 19 nt, Artificial Sequence
  Description of Artificial Sequence: Synthetic oligonucleotide
guggugugcugcgagaccc

SEQ ID NO: 1601387 - RNA, 19 nt, Artificial Sequence
  Description of Artificial Sequence: Synthetic oligonucleotide
uugagguugaggggagacc

SEQ ID NO: 1601388 - RNA, 19 nt, Artificial Sequence
  Description of Artificial Sequence: Synthetic oligonucleotide
agagggaagcaccaucauu

SEQ ID NO: 1601389 - RNA, 19 nt, Artificial Sequence
  Description of Artificial Sequence: Synthetic oligonucleotide
agguugaggggagaccccg

SEQ ID NO: 1601390 - RNA, 19 nt, Artificial Sequence
  Description of Artificial Sequence: Synthetic oligonucleotide
aggcaacgcaaccuugucu

SEQ ID NO: 1601391 - RNA, 19 nt, Artificial Sequence
  Description of Artificial Sequence: Synthetic oligonucleotide
cccagagugaacuggggcc

SEQ ID NO: 1601392 - RNA, 19 nt, Artificial Sequence
  Description of Artificial Sequence: Synthetic oligonucleotide
ugguacuguccuugccccg

SEQ ID NO: 1601393 - RNA, 19 nt, Artificial Sequence
  Description of Artificial Sequence: Synthetic oligonucleotide
agucgggucgcaguggaug

SEQ ID NO: 1601394 - RNA, 19 nt, Artificial Sequence
  Description of Artificial Sequence: Synthetic oligonucleotide
uccuuuugcugcgcuuacg

SEQ ID NO: 1601395 - RNA, 19 nt, Artificial Sequence
  Description of Artificial Sequence: Synthetic oligonucleotide
ucacgacccuugcuggccc

SEQ ID NO: 1601396 - RNA, 19 nt, Artificial Sequence
  Description of Artificial Sequence: Synthetic oligonucleotide
uacucaggaagggccgggg

SEQ ID NO: 1601397 - RNA, 19 nt, Artificial Sequence
  Description of Artificial Sequence: Synthetic oligonucleotide
cugcccauggcucuguaca

SEQ ID NO: 1601398 - RNA, 19 nt, Artificial Sequence
  Description of Artificial Sequence: Synthetic oligonucleotide
gauggcaaagaggcugcug

SEQ ID NO: 1601399 - RNA, 19 nt, Artificial Sequence
  Description of Artificial Sequence: Synthetic oligonucleotide
gacgcacgcuuccuuuugc

SEQ ID NO: 1601400 - RNA, 19 nt, Artificial Sequence
  Description of Artificial Sequence: Synthetic oligonucleotide
gcacgcuuccuuuugcugc

SEQ ID NO: 1601401 - RNA, 19 nt, Artificial Sequence
  Description of Artificial Sequence: Synthetic oligonucleotide
uggucagucgggucgcagu

SEQ ID NO: 1601402 - RNA, 19 nt, Artificial Sequence
  Description of Artificial Sequence: Synthetic oligonucleotide
acagucggcagagcccggc

SEQ ID NO: 1601403 - RNA, 19 nt, Artificial Sequence
  Description of Artificial Sequence: Synthetic oligonucleotide
uuccuuuugcugcgcuuac

SEQ ID NO: 1601404 - RNA, 19 nt, Artificial Sequence
  Description of Artificial Sequence: Synthetic oligonucleotide
acagucgccgcaccccgag

SEQ ID NO: 1601405 - RNA, 19 nt, Artificial Sequence
  Description of Artificial Sequence: Synthetic oligonucleotide
ggaguugagguugagggga

SEQ ID NO: 1601406 - RNA, 19 nt, Artificial Sequence
  Description of Artificial Sequence: Synthetic oligonucleotide
gggaagcucacagaggcgc

SEQ ID NO: 1601407 - RNA, 19 nt, Artificial Sequence
  Description of Artificial Sequence: Synthetic oligonucleotide
ugaguuggucagucggguc

SEQ ID NO: 1601408 - RNA, 19 nt, Artificial Sequence
  Description of Artificial Sequence: Synthetic oligonucleotide
guugagguugaggggagac

SEQ ID NO: 1601409 - RNA, 19 nt, Artificial Sequence
  Description of Artificial Sequence: Synthetic oligonucleotide
caaucgggcacugcugggc

SEQ ID NO: 1601410 - RNA, 19 nt, Artificial Sequence
  Description of Artificial Sequence: Synthetic oligonucleotide
gagguuguggccgcccuug

SEQ ID NO: 1601411 - RNA, 19 nt, Artificial Sequence
  Description of Artificial Sequence: Synthetic oligonucleotide
cuugucugcaggcccgcac

SEQ ID NO: 1601412 - RNA, 19 nt, Artificial Sequence
  Description of Artificial Sequence: Synthetic oligonucleotide
ggcugugaucuccaggggc

SEQ ID NO: 1601413 - RNA, 19 nt, Artificial Sequence
  Description of Artificial Sequence: Synthetic oligonucleotide
caacgccccacugauggcc

SEQ ID NO: 1601414 - RNA, 19 nt, Artificial Sequence
  Description of Artificial Sequence: Synthetic oligonucleotide
agucgccgcaccccgagga

SEQ ID NO: 1601415 - RNA, 19 nt, Artificial Sequence
  Description of Artificial Sequence: Synthetic oligonucleotide
gaccccaugauggcaaaga

SEQ ID NO: 1601416 - RNA, 19 nt, Artificial Sequence
  Description of Artificial Sequence: Synthetic oligonucleotide
guugcugaccauggaguug

SEQ ID NO: 1601417 - RNA, 19 nt, Artificial Sequence
  Description of Artificial Sequence: Synthetic oligonucleotide
gucacacucaggcggggac

SEQ ID NO: 1601418 - RNA, 19 nt, Artificial Sequence
  Description of Artificial Sequence: Synthetic oligonucleotide
gaggcgcucaggcuggcca

SEQ ID NO: 1601419 - RNA, 19 nt, Artificial Sequence
  Description of Artificial Sequence: Synthetic oligonucleotide
gaagagguuguggccgccc

SEQ ID NO: 1601420 - RNA, 19 nt, Artificial Sequence
  Description of Artificial Sequence: Synthetic oligonucleotide
accuccacagucgccgcac

SEQ ID NO: 1601421 - RNA, 19 nt, Artificial Sequence
  Description of Artificial Sequence: Synthetic oligonucleotide
guuacaaggccagggccac

SEQ ID NO: 1601422 - RNA, 19 nt, Artificial Sequence
  Description of Artificial Sequence: Synthetic oligonucleotide
guaaugggccccauugguc

SEQ ID NO: 1601423 - RNA, 19 nt, Artificial Sequence
  Description of Artificial Sequence: Synthetic oligonucleotide
gaaguccagcucccgguca

SEQ ID NO: 1601424 - RNA, 19 nt, Artificial Sequence
  Description of Artificial Sequence: Synthetic oligonucleotide
aggcgcucaggcuggccac

SEQ ID NO: 1601425 - RNA, 19 nt, Artificial Sequence
  Description of Artificial Sequence: Synthetic oligonucleotide
ugccgccugcugaggaagg

SEQ ID NO: 1601426 - RNA, 19 nt, Artificial Sequence
  Description of Artificial Sequence: Synthetic oligonucleotide
ugcugcgagaccccaugau

SEQ ID NO: 1601427 - RNA, 19 nt, Artificial Sequence
  Description of Artificial Sequence: Synthetic oligonucleotide
gguccugguagggaguggg

SEQ ID NO: 1601428 - RNA, 19 nt, Artificial Sequence
  Description of Artificial Sequence: Synthetic oligonucleotide
ugcccauggcucuguacac

SEQ ID NO: 1601429 - RNA, 19 nt, Artificial Sequence
  Description of Artificial Sequence: Synthetic oligonucleotide
uggaugauacaugcaccaa

SEQ ID NO: 1601430 - RNA, 19 nt, Artificial Sequence
  Description of Artificial Sequence: Synthetic oligonucleotide
ccccaugauggcaaagagg

SEQ ID NO: 1601431 - RNA, 19 nt, Artificial Sequence
  Description of Artificial Sequence: Synthetic oligonucleotide
guuucgaggcugcggcagc

SEQ ID NO: 1601432 - RNA, 19 nt, Artificial Sequence
  Description of Artificial Sequence: Synthetic oligonucleotide
agcaggugucacacugccc

SEQ ID NO: 1601433 - RNA, 19 nt, Artificial Sequence
  Description of Artificial Sequence: Synthetic oligonucleotide
acgagauggcugugaucuc

SEQ ID NO: 1601434 - RNA, 19 nt, Artificial Sequence
  Description of Artificial Sequence: Synthetic oligonucleotide
cauugcaauuuucucucaa

SEQ ID NO: 1601435 - RNA, 19 nt, Artificial Sequence
  Description of Artificial Sequence: Synthetic oligonucleotide
ugguggugugcugcgagac

SEQ ID NO: 1601436 - RNA, 19 nt, Artificial Sequence
  Description of Artificial Sequence: Synthetic oligonucleotide
aggggagaccccgaggacu

SEQ ID NO: 1601437 - RNA, 19 nt, Artificial Sequence
  Description of Artificial Sequence: Synthetic oligonucleotide
guggugaguaaugggcccc

SEQ ID NO: 1601438 - RNA, 19 nt, Artificial Sequence
  Description of Artificial Sequence: Synthetic oligonucleotide
uggugugcugcgagacccc

SEQ ID NO: 1601439 - RNA, 19 nt, Artificial Sequence
  Description of Artificial Sequence: Synthetic oligonucleotide
cagcucccggucacgaccc

SEQ ID NO: 1601440 - RNA, 19 nt, Artificial Sequence
  Description of Artificial Sequence: Synthetic oligonucleotide
acucaggaagggccgggga

SEQ ID NO: 1601441 - RNA, 19 nt, Artificial Sequence
  Description of Artificial Sequence: Synthetic oligonucleotide
ucgucgaaaacagcugauu

SEQ ID NO: 1601442 - RNA, 19 nt, Artificial Sequence
  Description of Artificial Sequence: Synthetic oligonucleotide
accccgaggagaagcugcc

SEQ ID NO: 1601443 - RNA, 19 nt, Artificial Sequence
  Description of Artificial Sequence: Synthetic oligonucleotide
gucacgacccuugcuggcc

SEQ ID NO: 1601444 - RNA, 19 nt, Artificial Sequence
  Description of Artificial Sequence: Synthetic oligonucleotide
gcuguguaaaccgaggucu

SEQ ID NO: 1601445 - RNA, 19 nt, Artificial Sequence
  Description of Artificial Sequence: Synthetic oligonucleotide
gagugaacuggggcccagg

SEQ ID NO: 1601446 - RNA, 19 nt, Artificial Sequence
  Description of Artificial Sequence: Synthetic oligonucleotide
cugcgugaagaggccagcg

SEQ ID NO: 1601447 - RNA, 19 nt, Artificial Sequence
  Description of Artificial Sequence: Synthetic oligonucleotide
guacucaggaagggccggg

SEQ ID NO: 1601448 - RNA, 19 nt, Artificial Sequence
  Description of Artificial Sequence: Synthetic oligonucleotide
gcgugaagaggccagcgac

SEQ ID NO: 1601449 - RNA, 19 nt, Artificial Sequence
  Description of Artificial Sequence: Synthetic oligonucleotide
ggucagucgggucgcagug

SEQ ID NO: 1601450 - RNA, 19 nt, Artificial Sequence
  Description of Artificial Sequence: Synthetic oligonucleotide
cucucaaucgggcacugcu

SEQ ID NO: 1601451 - RNA, 19 nt, Artificial Sequence
  Description of Artificial Sequence: Synthetic oligonucleotide
ugccccgcugugaugggaa

SEQ ID NO: 1601452 - RNA, 19 nt, Artificial Sequence
  Description of Artificial Sequence: Synthetic oligonucleotide
gccugugggugccaaggcg

SEQ ID NO: 1601453 - RNA, 19 nt, Artificial Sequence
  Description of Artificial Sequence: Synthetic oligonucleotide
uucaggccacccagacccc

SEQ ID NO: 1601454 - RNA, 19 nt, Artificial Sequence
  Description of Artificial Sequence: Synthetic oligonucleotide
uuggucagucgggucgcag

SEQ ID NO: 1601455 - RNA, 19 nt, Artificial Sequence
  Description of Artificial Sequence: Synthetic oligonucleotide
uggcugagaguuggugugc

SEQ ID NO: 1601456 - RNA, 19 nt, Artificial Sequence
  Description of Artificial Sequence: Synthetic oligonucleotide
gaacuggggcccaggguug

SEQ ID NO: 1601457 - RNA, 19 nt, Artificial Sequence
  Description of Artificial Sequence: Synthetic oligonucleotide
ugcccauggugugugaguu

SEQ ID NO: 1601458 - RNA, 19 nt, Artificial Sequence
  Description of Artificial Sequence: Synthetic oligonucleotide
aucgggcacugcugggcuc

SEQ ID NO: 1601459 - RNA, 19 nt, Artificial Sequence
  Description of Artificial Sequence: Synthetic oligonucleotide
acgcacgcuuccuuuugcu

SEQ ID NO: 1601460 - RNA, 19 nt, Artificial Sequence
  Description of Artificial Sequence: Synthetic oligonucleotide
cagagaugaagagguugug

SEQ ID NO: 1601461 - RNA, 19 nt, Artificial Sequence
  Description of Artificial Sequence: Synthetic oligonucleotide
ggugccagaggacuucguc

SEQ ID NO: 1601462 - RNA, 19 nt, Artificial Sequence
  Description of Artificial Sequence: Synthetic oligonucleotide
caggugucacacugcccgc

SEQ ID NO: 1601463 - RNA, 19 nt, Artificial Sequence
  Description of Artificial Sequence: Synthetic oligonucleotide
cuccacagucgccgcaccc

SEQ ID NO: 1601464 - RNA, 19 nt, Artificial Sequence
  Description of Artificial Sequence: Synthetic oligonucleotide
gguacucaggaagggccgg

SEQ ID NO: 1601465 - RNA, 19 nt, Artificial Sequence
  Description of Artificial Sequence: Synthetic oligonucleotide
uggugaguaaugggcccca

SEQ ID NO: 1601466 - RNA, 19 nt, Artificial Sequence
  Description of Artificial Sequence: Synthetic oligonucleotide
aggccagcgacagucggca

SEQ ID NO: 1601467 - RNA, 19 nt, Artificial Sequence
  Description of Artificial Sequence: Synthetic oligonucleotide
gucgcaguggaugauacau

SEQ ID NO: 1601468 - RNA, 19 nt, Artificial Sequence
  Description of Artificial Sequence: Synthetic oligonucleotide
uaccuccacagucgccgca

SEQ ID NO: 1601469 - RNA, 19 nt, Artificial Sequence
  Description of Artificial Sequence: Synthetic oligonucleotide
cugugccuaguggaaggcc

SEQ ID NO: 1601470 - RNA, 19 nt, Artificial Sequence
  Description of Artificial Sequence: Synthetic oligonucleotide
gucagucgggucgcagugg

SEQ ID NO: 1601471 - RNA, 19 nt, Artificial Sequence
  Description of Artificial Sequence: Synthetic oligonucleotide
ucgggcacugcugggcuca

SEQ ID NO: 1601472 - RNA, 19 nt, Artificial Sequence
  Description of Artificial Sequence: Synthetic oligonucleotide
gucgggucgcaguggauga

SEQ ID NO: 1601473 - RNA, 19 nt, Artificial Sequence
  Description of Artificial Sequence: Synthetic oligonucleotide
uucucucaaucgggcacug

SEQ ID NO: 1601474 - RNA, 19 nt, Artificial Sequence
  Description of Artificial Sequence: Synthetic oligonucleotide
gucaaggggcugugccuag

SEQ ID NO: 1601475 - RNA, 19 nt, Artificial Sequence
  Description of Artificial Sequence: Synthetic oligonucleotide
ccuugugggagagggaagc

SEQ ID NO: 1601476 - RNA, 19 nt, Artificial Sequence
  Description of Artificial Sequence: Synthetic oligonucleotide
gcugauugauguugcugac

SEQ ID NO: 1601477 - RNA, 19 nt, Artificial Sequence
  Description of Artificial Sequence: Synthetic oligonucleotide
gguacuguccuugccccgc

SEQ ID NO: 1601478 - RNA, 19 nt, Artificial Sequence
  Description of Artificial Sequence: Synthetic oligonucleotide
ccauuggucgggcccaggg

SEQ ID NO: 1601479 - RNA, 19 nt, Artificial Sequence
  Description of Artificial Sequence: Synthetic oligonucleotide
gagguugaggggagacccc

SEQ ID NO: 1601480 - RNA, 19 nt, Artificial Sequence
  Description of Artificial Sequence: Synthetic oligonucleotide
uugccugcacugcccucgc

SEQ ID NO: 1601481 - RNA, 19 nt, Artificial Sequence
  Description of Artificial Sequence: Synthetic oligonucleotide
uacuguccuugccccgcug

SEQ ID NO: 1601482 - RNA, 19 nt, Artificial Sequence
  Description of Artificial Sequence: Synthetic oligonucleotide
ccuaguggaaggcccuggg

SEQ ID NO: 1601483 - RNA, 19 nt, Artificial Sequence
  Description of Artificial Sequence: Synthetic oligonucleotide
ggugucacacugcccgcag

SEQ ID NO: 1601484 - RNA, 19 nt, Artificial Sequence
  Description of Artificial Sequence: Synthetic oligonucleotide
cgucgaaaacagcugauuc

SEQ ID NO: 1601485 - RNA, 19 nt, Artificial Sequence
  Description of Artificial Sequence: Synthetic oligonucleotide
gaguuucgaggcugcggca

SEQ ID NO: 1601486 - RNA, 19 nt, Artificial Sequence
  Description of Artificial Sequence: Synthetic oligonucleotide
uggcuccucaucugagguc

SEQ ID NO: 1601487 - RNA, 19 nt, Artificial Sequence
  Description of Artificial Sequence: Synthetic oligonucleotide
gcuuacgacuguccugccc

SEQ ID NO: 1601488 - RNA, 19 nt, Artificial Sequence
  Description of Artificial Sequence: Synthetic oligonucleotide
aacgccccacugauggcca

SEQ ID NO: 1601489 - RNA, 19 nt, Artificial Sequence
  Description of Artificial Sequence: Synthetic oligonucleotide
uggccgcccuugaagucca

SEQ ID NO: 1601490 - RNA, 19 nt, Artificial Sequence
  Description of Artificial Sequence: Synthetic oligonucleotide
guacacaguccccacgggu

SEQ ID NO: 1601491 - RNA, 19 nt, Artificial Sequence
  Description of Artificial Sequence: Synthetic oligonucleotide
gaguuccagcugacgcacg

SEQ ID NO: 1601492 - RNA, 19 nt, Artificial Sequence
  Description of Artificial Sequence: Synthetic oligonucleotide
gggcccggaguuucgaggc

SEQ ID NO: 1601493 - RNA, 19 nt, Artificial Sequence
  Description of Artificial Sequence: Synthetic oligonucleotide
uggaggucaaggggcugug

SEQ ID NO: 1601494 - RNA, 19 nt, Artificial Sequence
  Description of Artificial Sequence: Synthetic oligonucleotide
ggcuccucaucugagguca

SEQ ID NO: 1601495 - RNA, 19 nt, Artificial Sequence
  Description of Artificial Sequence: Synthetic oligonucleotide
cacucaggcggggacuggc

SEQ ID NO: 1601496 - RNA, 19 nt, Artificial Sequence
  Description of Artificial Sequence: Synthetic oligonucleotide
ggcaaagaggcugcuggug

SEQ ID NO: 1601497 - RNA, 19 nt, Artificial Sequence
  Description of Artificial Sequence: Synthetic oligonucleotide
cuugccccgcugugauggg

SEQ ID NO: 1601498 - RNA, 19 nt, Artificial Sequence
  Description of Artificial Sequence: Synthetic oligonucleotide
ggacacaccugugcugagg

SEQ ID NO: 1601499 - RNA, 19 nt, Artificial Sequence
  Description of Artificial Sequence: Synthetic oligonucleotide
uggucacacucaggcgggg

SEQ ID NO: 1601500 - RNA, 19 nt, Artificial Sequence
  Description of Artificial Sequence: Synthetic oligonucleotide
cuguccuugccccgcugug

SEQ ID NO: 1601501 - RNA, 19 nt, Artificial Sequence
  Description of Artificial Sequence: Synthetic oligonucleotide
uuacgacuguccugcccau

SEQ ID NO: 1601502 - RNA, 19 nt, Artificial Sequence
  Description of Artificial Sequence: Synthetic oligonucleotide
acggaggagccagccacag

SEQ ID NO: 1601503 - RNA, 19 nt, Artificial Sequence
  Description of Artificial Sequence: Synthetic oligonucleotide
ccagcugacgcacgcuucc

SEQ ID NO: 1601504 - RNA, 19 nt, Artificial Sequence
  Description of Artificial Sequence: Synthetic oligonucleotide
gccacccagaccccucugg

SEQ ID NO: 1601505 - RNA, 19 nt, Artificial Sequence
  Description of Artificial Sequence: Synthetic oligonucleotide
gccugcacugcccucgccc

SEQ ID NO: 1601506 - RNA, 19 nt, Artificial Sequence
  Description of Artificial Sequence: Synthetic oligonucleotide
ccuuuugcugcgcuuacga

SEQ ID NO: 1601507 - RNA, 19 nt, Artificial Sequence
  Description of Artificial Sequence: Synthetic oligonucleotide
agagugaacuggggcccag

SEQ ID NO: 1601508 - RNA, 19 nt, Artificial Sequence
  Description of Artificial Sequence: Synthetic oligonucleotide
aacuggggcccaggguuga

SEQ ID NO: 1601509 - RNA, 19 nt, Artificial Sequence
  Description of Artificial Sequence: Synthetic oligonucleotide
cuucggggacacaccugug

SEQ ID NO: 1601510 - RNA, 19 nt, Artificial Sequence
  Description of Artificial Sequence: Synthetic oligonucleotide
ugccuaguggaaggcccug

SEQ ID NO: 1601511 - RNA, 19 nt, Artificial Sequence
  Description of Artificial Sequence: Synthetic oligonucleotide
uuacaaggccagggccacc

SEQ ID NO: 1601512 - RNA, 19 nt, Artificial Sequence
  Description of Artificial Sequence: Synthetic oligonucleotide
uacgacuguccugcccaug

SEQ ID NO: 1601513 - RNA, 19 nt, Artificial Sequence
  Description of Artificial Sequence: Synthetic oligonucleotide
ccgaggacugcgugaagag

SEQ ID NO: 1601514 - RNA, 19 nt, Artificial Sequence
  Description of Artificial Sequence: Synthetic oligonucleotide
ggucacgacccuugcuggc

SEQ ID NO: 1601515 - RNA, 19 nt, Artificial Sequence
  Description of Artificial Sequence: Synthetic oligonucleotide
ugcacugcccucgcccuuc

SEQ ID NO: 1601516 - RNA, 19 nt, Artificial Sequence
  Description of Artificial Sequence: Synthetic oligonucleotide
guccugguagggagugggg

SEQ ID NO: 1601517 - RNA, 19 nt, Artificial Sequence
  Description of Artificial Sequence: Synthetic oligonucleotide
ggccacugagccagcauag

SEQ ID NO: 1601518 - RNA, 19 nt, Artificial Sequence
  Description of Artificial Sequence: Synthetic oligonucleotide
guccuaauaccuccacagu

SEQ ID NO: 1601519 - RNA, 19 nt, Artificial Sequence
  Description of Artificial Sequence: Synthetic oligonucleotide
accgaggucugcauugcaa

SEQ ID NO: 1601520 - RNA, 19 nt, Artificial Sequence
  Description of Artificial Sequence: Synthetic oligonucleotide
cugggcuguuggccaacgc

SEQ ID NO: 1601521 - RNA, 19 nt, Artificial Sequence
  Description of Artificial Sequence: Synthetic oligonucleotide
cagggcccggaguuucgag

SEQ ID NO: 1601522 - RNA, 19 nt, Artificial Sequence
  Description of Artificial Sequence: Synthetic oligonucleotide
ggagaccccgaggacugcg

SEQ ID NO: 1601523 - RNA, 19 nt, Artificial Sequence
  Description of Artificial Sequence: Synthetic oligonucleotide
cugccgccugcugaggaag

SEQ ID NO: 1601524 - RNA, 19 nt, Artificial Sequence
  Description of Artificial Sequence: Synthetic oligonucleotide
gggcccagagugaacuggg

SEQ ID NO: 1601525 - RNA, 19 nt, Artificial Sequence
  Description of Artificial Sequence: Synthetic oligonucleotide
caacgcaaccuugucugca

SEQ ID NO: 1601526 - RNA, 19 nt, Artificial Sequence
  Description of Artificial Sequence: Synthetic oligonucleotide
gucucgccgggcuccuugc

SEQ ID NO: 1601527 - RNA, 19 nt, Artificial Sequence
  Description of Artificial Sequence: Synthetic oligonucleotide
gaggucugcauugcaauuu

SEQ ID NO: 1601528 - RNA, 19 nt, Artificial Sequence
  Description of Artificial Sequence: Synthetic oligonucleotide
gcaacgcaaccuugucugc

SEQ ID NO: 1601529 - RNA, 19 nt, Artificial Sequence
  Description of Artificial Sequence: Synthetic oligonucleotide
gcugagaguuggugugcag

SEQ ID NO: 1601530 - RNA, 19 nt, Artificial Sequence
  Description of Artificial Sequence: Synthetic oligonucleotide
aggugucacacugcccgca

SEQ ID NO: 1601531 - RNA, 19 nt, Artificial Sequence
  Description of Artificial Sequence: Synthetic oligonucleotide
acgcuuccuuuugcugcgc

SEQ ID NO: 1601532 - RNA, 19 nt, Artificial Sequence
  Description of Artificial Sequence: Synthetic oligonucleotide
gaagggccggggagccugg

SEQ ID NO: 1601533 - RNA, 19 nt, Artificial Sequence
  Description of Artificial Sequence: Synthetic oligonucleotide
ccugugggugccaaggcga

SEQ ID NO: 1601534 - RNA, 19 nt, Artificial Sequence
  Description of Artificial Sequence: Synthetic oligonucleotide
guaaaccgaggucugcauu

SEQ ID NO: 1601535 - RNA, 19 nt, Artificial Sequence
  Description of Artificial Sequence: Synthetic oligonucleotide
acgccccacugauggccac

SEQ ID NO: 1601536 - RNA, 19 nt, Artificial Sequence
  Description of Artificial Sequence: Synthetic oligonucleotide
cugcugaggaaggguuggc

SEQ ID NO: 1601537 - RNA, 19 nt, Artificial Sequence
  Description of Artificial Sequence: Synthetic oligonucleotide
caggggacgagauggcugu

SEQ ID NO: 1601538 - RNA, 19 nt, Artificial Sequence
  Description of Artificial Sequence: Synthetic oligonucleotide
ggucucgccgggcuccuug

SEQ ID NO: 1601539 - RNA, 19 nt, Artificial Sequence
  Description of Artificial Sequence: Synthetic oligonucleotide
aggggccgcuccuuccuga

SEQ ID NO: 1601540 - RNA, 19 nt, Artificial Sequence
  Description of Artificial Sequence: Synthetic oligonucleotide
ccagcgacagucggcagag

SEQ ID NO: 1601541 - RNA, 19 nt, Artificial Sequence
  Description of Artificial Sequence: Synthetic oligonucleotide
cuugugggagagggaagca

SEQ ID NO: 1601542 - RNA, 19 nt, Artificial Sequence
  Description of Artificial Sequence: Synthetic oligonucleotide
agcugacgcacgcuuccuu

SEQ ID NO: 1601543 - RNA, 19 nt, Artificial Sequence
  Description of Artificial Sequence: Synthetic oligonucleotide
ggguuggcgucugugguac

SEQ ID NO: 1601544 - RNA, 19 nt, Artificial Sequence
  Description of Artificial Sequence: Synthetic oligonucleotide
gauugauguugcugaccau

SEQ ID NO: 1601545 - RNA, 19 nt, Artificial Sequence
  Description of Artificial Sequence: Synthetic oligonucleotide
agguuguggccgcccuuga

SEQ ID NO: 1601546 - RNA, 19 nt, Artificial Sequence
  Description of Artificial Sequence: Synthetic oligonucleotide
gcuucggggacacaccugu

SEQ ID NO: 1601547 - RNA, 19 nt, Artificial Sequence
  Description of Artificial Sequence: Synthetic oligonucleotide
gcagagaugaagagguugu

SEQ ID NO: 1601548 - RNA, 19 nt, Artificial Sequence
  Description of Artificial Sequence: Synthetic oligonucleotide
gacagucggcagagcccgg

SEQ ID NO: 1601549 - RNA, 19 nt, Artificial Sequence
  Description of Artificial Sequence: Synthetic oligonucleotide
agcucucaggggacgagau

SEQ ID NO: 1601550 - RNA, 19 nt, Artificial Sequence
  Description of Artificial Sequence: Synthetic oligonucleotide
accccgaggacugcgugaa

SEQ ID NO: 1601551 - RNA, 19 nt, Artificial Sequence
  Description of Artificial Sequence: Synthetic oligonucleotide
acacucaggcggggacugg

SEQ ID NO: 1601552 - RNA, 19 nt, Artificial Sequence
  Description of Artificial Sequence: Synthetic oligonucleotide
ugcugccaugaggcaacgc

SEQ ID NO: 1601553 - RNA, 19 nt, Artificial Sequence
  Description of Artificial Sequence: Synthetic oligonucleotide
gcgacagucggcagagccc

SEQ ID NO: 1601554 - RNA, 19 nt, Artificial Sequence
  Description of Artificial Sequence: Synthetic oligonucleotide
gcugcgcuuacgacugucc

SEQ ID NO: 1601555 - RNA, 19 nt, Artificial Sequence
  Description of Artificial Sequence: Synthetic oligonucleotide
cuggggcccaggguugaag

SEQ ID NO: 1601556 - RNA, 19 nt, Artificial Sequence
  Description of Artificial Sequence: Synthetic oligonucleotide
gcucucaggggacgagaug

SEQ ID NO: 1601557 - RNA, 19 nt, Artificial Sequence
  Description of Artificial Sequence: Synthetic oligonucleotide
gugaguuggucagucgggu

SEQ ID NO: 1601558 - RNA, 19 nt, Artificial Sequence
  Description of Artificial Sequence: Synthetic oligonucleotide
cagucgccgcaccccgagg

SEQ ID NO: 1601559 - RNA, 19 nt, Artificial Sequence
  Description of Artificial Sequence: Synthetic oligonucleotide
uugccccgcugugauggga

SEQ ID NO: 1601560 - RNA, 19 nt, Artificial Sequence
  Description of Artificial Sequence: Synthetic oligonucleotide
cuaguggaaggcccugggu

SEQ ID NO: 1601561 - RNA, 19 nt, Artificial Sequence
  Description of Artificial Sequence: Synthetic oligonucleotide
cagaggagcugggcuguug

SEQ ID NO: 1601562 - RNA, 19 nt, Artificial Sequence
  Description of Artificial Sequence: Synthetic oligonucleotide
gggaagcaccaucauugaa

SEQ ID NO: 1601563 - RNA, 19 nt, Artificial Sequence
  Description of Artificial Sequence: Synthetic oligonucleotide
ggagcucucaggggacgag

SEQ ID NO: 1601564 - RNA, 19 nt, Artificial Sequence
  Description of Artificial Sequence: Synthetic oligonucleotide
ggcuguuggccaacgcccc

SEQ ID NO: 1601565 - RNA, 19 nt, Artificial Sequence
  Description of Artificial Sequence: Synthetic oligonucleotide
gccuaguggaaggcccugg

SEQ ID NO: 1601566 - RNA, 19 nt, Artificial Sequence
  Description of Artificial Sequence: Synthetic oligonucleotide
ggcccaggguugaagguac

SEQ ID NO: 1601567 - RNA, 19 nt, Artificial Sequence
  Description of Artificial Sequence: Synthetic oligonucleotide
gccagcgacagucggcaga

SEQ ID NO: 1601568 - RNA, 19 nt, Artificial Sequence
  Description of Artificial Sequence: Synthetic oligonucleotide
uugcugcgcuuacgacugu

SEQ ID NO: 1601569 - RNA, 19 nt, Artificial Sequence
  Description of Artificial Sequence: Synthetic oligonucleotide
caugguccugguagggagu

SEQ ID NO: 1601570 - RNA, 19 nt, Artificial Sequence
  Description of Artificial Sequence: Synthetic oligonucleotide
acgggugcuggaggucaag

SEQ ID NO: 1601571 - RNA, 19 nt, Artificial Sequence
  Description of Artificial Sequence: Synthetic oligonucleotide
ggacuucgucgaaaacagc

SEQ ID NO: 1601572 - RNA, 19 nt, Artificial Sequence
  Description of Artificial Sequence: Synthetic oligonucleotide
cugcugccaugaggcaacg

SEQ ID NO: 1601573 - RNA, 19 nt, Artificial Sequence
  Description of Artificial Sequence: Synthetic oligonucleotide
acucaggcggggacuggcu

SEQ ID NO: 1601574 - RNA, 19 nt, Artificial Sequence
  Description of Artificial Sequence: Synthetic oligonucleotide
gagcugggcuguuggccaa

SEQ ID NO: 1601575 - RNA, 19 nt, Artificial Sequence
  Description of Artificial Sequence: Synthetic oligonucleotide
ccaggguugaagguacuca

SEQ ID NO: 1601576 - RNA, 19 nt, Artificial Sequence
  Description of Artificial Sequence: Synthetic oligonucleotide
cccggaguuucgaggcugc

SEQ ID NO: 1601577 - RNA, 19 nt, Artificial Sequence
  Description of Artificial Sequence: Synthetic oligonucleotide
ggucgcaguggaugauaca

SEQ ID NO: 1601578 - RNA, 19 nt, Artificial Sequence
  Description of Artificial Sequence: Synthetic oligonucleotide
cugugaugggaagcucaca

SEQ ID NO: 1601579 - RNA, 19 nt, Artificial Sequence
  Description of Artificial Sequence: Synthetic oligonucleotide
ggcgcuucggggacacacc

SEQ ID NO: 1601580 - RNA, 19 nt, Artificial Sequence
  Description of Artificial Sequence: Synthetic oligonucleotide
uccugcccauggcucugua

SEQ ID NO: 1601581 - RNA, 19 nt, Artificial Sequence
  Description of Artificial Sequence: Synthetic oligonucleotide
cugcgcuuacgacuguccu

SEQ ID NO: 1601582 - RNA, 19 nt, Artificial Sequence
  Description of Artificial Sequence: Synthetic oligonucleotide
cgaggacugcgugaagagg

SEQ ID NO: 1601583 - RNA, 19 nt, Artificial Sequence
  Description of Artificial Sequence: Synthetic oligonucleotide
ggucaaggggcugugccua

SEQ ID NO: 1601584 - RNA, 19 nt, Artificial Sequence
  Description of Artificial Sequence: Synthetic oligonucleotide
ccauccccgaggccagagg

SEQ ID NO: 1601585 - RNA, 19 nt, Artificial Sequence
  Description of Artificial Sequence: Synthetic oligonucleotide
ccaacgccccacugauggc

SEQ ID NO: 1601586 - RNA, 19 nt, Artificial Sequence
  Description of Artificial Sequence: Synthetic oligonucleotide
acgacccuugcuggcccug

SEQ ID NO: 1601587 - RNA, 19 nt, Artificial Sequence
  Description of Artificial Sequence: Synthetic oligonucleotide
ucgggucgcaguggaugau

SEQ ID NO: 1601588 - RNA, 19 nt, Artificial Sequence
  Description of Artificial Sequence: Synthetic oligonucleotide
cggaguuucgaggcugcgg

SEQ ID NO: 1601589 - RNA, 19 nt, Artificial Sequence
  Description of Artificial Sequence: Synthetic oligonucleotide
caccugugcugaggcuggg

SEQ ID NO: 1601590 - RNA, 19 nt, Artificial Sequence
  Description of Artificial Sequence: Synthetic oligonucleotide
gugaguaaugggccccauu

SEQ ID NO: 1601591 - RNA, 19 nt, Artificial Sequence
  Description of Artificial Sequence: Synthetic oligonucleotide
cugcccgcagaggaagcca

SEQ ID NO: 1601592 - RNA, 19 nt, Artificial Sequence
  Description of Artificial Sequence: Synthetic oligonucleotide
ggcagggcccggaguuucg

SEQ ID NO: 1601593 - RNA, 19 nt, Artificial Sequence
  Description of Artificial Sequence: Synthetic oligonucleotide
gguuguggccgcccuugaa

SEQ ID NO: 1601594 - RNA, 19 nt, Artificial Sequence
  Description of Artificial Sequence: Synthetic oligonucleotide
gcccggaguuucgaggcug

SEQ ID NO: 1601595 - RNA, 19 nt, Artificial Sequence
  Description of Artificial Sequence: Synthetic oligonucleotide
aggggacgagauggcugug

SEQ ID NO: 1601596 - RNA, 19 nt, Artificial Sequence
  Description of Artificial Sequence: Synthetic oligonucleotide
ccgcaccccgaggagaagc

SEQ ID NO: 1601597 - RNA, 19 nt, Artificial Sequence
  Description of Artificial Sequence: Synthetic oligonucleotide
ggggacgagauggcuguga

SEQ ID NO: 1601598 - RNA, 19 nt, Artificial Sequence
  Description of Artificial Sequence: Synthetic oligonucleotide
cacagucgccgcaccccga

SEQ ID NO: 1601599 - RNA, 19 nt, Artificial Sequence
  Description of Artificial Sequence: Synthetic oligonucleotide
cccgaggacugcgugaaga

SEQ ID NO: 1601600 - RNA, 19 nt, Artificial Sequence
  Description of Artificial Sequence: Synthetic oligonucleotide
guuggccugcagggacaug

SEQ ID NO: 1601601 - RNA, 19 nt, Artificial Sequence
  Description of Artificial Sequence: Synthetic oligonucleotide
guuggucagucgggucgca

SEQ ID NO: 1601602 - RNA, 19 nt, Artificial Sequence
  Description of Artificial Sequence: Synthetic oligonucleotide
cgagaccccaugauggcaa

SEQ ID NO: 1601603 - RNA, 19 nt, Artificial Sequence
  Description of Artificial Sequence: Synthetic oligonucleotide
gcgagaccccaugauggca

SEQ ID NO: 1601604 - RNA, 19 nt, Artificial Sequence
  Description of Artificial Sequence: Synthetic oligonucleotide
gcagagcccggcgcuucgg

SEQ ID NO: 1601605 - RNA, 19 nt, Artificial Sequence
  Description of Artificial Sequence: Synthetic oligonucleotide
gagaccccgaggacugcgu

SEQ ID NO: 1601606 - RNA, 19 nt, Artificial Sequence
  Description of Artificial Sequence: Synthetic oligonucleotide
gggugccaaggcgaggcuc

SEQ ID NO: 1601607 - RNA, 19 nt, Artificial Sequence
  Description of Artificial Sequence: Synthetic oligonucleotide
cugacgcacgcuuccuuuu

SEQ ID NO: 1601608 - RNA, 19 nt, Artificial Sequence
  Description of Artificial Sequence: Synthetic oligonucleotide
cucgccgggcuccuugccu

SEQ ID NO: 1601609 - RNA, 19 nt, Artificial Sequence
  Description of Artificial Sequence: Synthetic oligonucleotide
gguugaggggagaccccga

SEQ ID NO: 1601610 - RNA, 19 nt, Artificial Sequence
  Description of Artificial Sequence: Synthetic oligonucleotide
ggccagcgacagucggcag

SEQ ID NO: 1601611 - RNA, 19 nt, Artificial Sequence
  Description of Artificial Sequence: Synthetic oligonucleotide
gggccgcuccuuccugagc

SEQ ID NO: 1601612 - RNA, 19 nt, Artificial Sequence
  Description of Artificial Sequence: Synthetic oligonucleotide
gcugacgcacgcuuccuuu

SEQ ID NO: 1601613 - RNA, 19 nt, Artificial Sequence
  Description of Artificial Sequence: Synthetic oligonucleotide
ccccgcugugaugggaagc

SEQ ID NO: 1601614 - RNA, 19 nt, Artificial Sequence
  Description of Artificial Sequence: Synthetic oligonucleotide
cacgggugcuggaggucaa

SEQ ID NO: 1601615 - RNA, 19 nt, Artificial Sequence
  Description of Artificial Sequence: Synthetic oligonucleotide
gccgcccuugaaguccagc

SEQ ID NO: 1601616 - RNA, 19 nt, Artificial Sequence
  Description of Artificial Sequence: Synthetic oligonucleotide
cgacuguccugcccauggc

SEQ ID NO: 1601617 - RNA, 19 nt, Artificial Sequence
  Description of Artificial Sequence: Synthetic oligonucleotide
agggucucgccgggcuccu

SEQ ID NO: 1601618 - RNA, 19 nt, Artificial Sequence
  Description of Artificial Sequence: Synthetic oligonucleotide
ccggaguuucgaggcugcg

SEQ ID NO: 1601619 - RNA, 19 nt, Artificial Sequence
  Description of Artificial Sequence: Synthetic oligonucleotide
ggagcucuugagggagcuc

SEQ ID NO: 1601620 - RNA, 19 nt, Artificial Sequence
  Description of Artificial Sequence: Synthetic oligonucleotide
gcgcuucggggacacaccu

SEQ ID NO: 1601621 - RNA, 19 nt, Artificial Sequence
  Description of Artificial Sequence: Synthetic oligonucleotide
acuggggcccaggguugaa

SEQ ID NO: 1601622 - RNA, 19 nt, Artificial Sequence
  Description of Artificial Sequence: Synthetic oligonucleotide
ggggcugauugauguugcu

SEQ ID NO: 1601623 - RNA, 19 nt, Artificial Sequence
  Description of Artificial Sequence: Synthetic oligonucleotide
ccgaggucugcauugcaau

SEQ ID NO: 1601624 - RNA, 19 nt, Artificial Sequence
  Description of Artificial Sequence: Synthetic oligonucleotide
gccccauuggucgggccca

SEQ ID NO: 1601625 - RNA, 19 nt, Artificial Sequence
  Description of Artificial Sequence: Synthetic oligonucleotide
gccagaggacuucgucgaa

SEQ ID NO: 1601626 - RNA, 19 nt, Artificial Sequence
  Description of Artificial Sequence: Synthetic oligonucleotide
gggccccauuggucgggcc

SEQ ID NO: 1601627 - RNA, 19 nt, Artificial Sequence
  Description of Artificial Sequence: Synthetic oligonucleotide
ccaugauggcaaagaggcu

SEQ ID NO: 1601628 - RNA, 19 nt, Artificial Sequence
  Description of Artificial Sequence: Synthetic oligonucleotide
gggagaccccgaggacugc

SEQ ID NO: 1601629 - RNA, 19 nt, Artificial Sequence
  Description of Artificial Sequence: Synthetic oligonucleotide
cagcagagaugaagagguu

SEQ ID NO: 1601630 - RNA, 19 nt, Artificial Sequence
  Description of Artificial Sequence: Synthetic oligonucleotide
cccauuggucgggcccagg

SEQ ID NO: 1601631 - RNA, 19 nt, Artificial Sequence
  Description of Artificial Sequence: Synthetic oligonucleotide
ccugcacugcccucgcccu

SEQ ID NO: 1601632 - RNA, 19 nt, Artificial Sequence
  Description of Artificial Sequence: Synthetic oligonucleotide
cacgacccuugcuggcccu

SEQ ID NO: 1601633 - RNA, 19 nt, Artificial Sequence
  Description of Artificial Sequence: Synthetic oligonucleotide
cgcuuacgacuguccugcc

SEQ ID NO: 1601634 - RNA, 19 nt, Artificial Sequence
  Description of Artificial Sequence: Synthetic oligonucleotide
cccgcugugaugggaagcu

SEQ ID NO: 1601635 - RNA, 19 nt, Artificial Sequence
  Description of Artificial Sequence: Synthetic oligonucleotide
gcagggcccggaguuucga

SEQ ID NO: 1601636 - RNA, 19 nt, Artificial Sequence
  Description of Artificial Sequence: Synthetic oligonucleotide
cugcagcacggaggagcca

SEQ ID NO: 1601637 - RNA, 19 nt, Artificial Sequence
  Description of Artificial Sequence: Synthetic oligonucleotide
ccgcacaggggaagggucu

SEQ ID NO: 1601638 - RNA, 19 nt, Artificial Sequence
  Description of Artificial Sequence: Synthetic oligonucleotide
gguuggccugcagggacau

SEQ ID NO: 1601639 - RNA, 19 nt, Artificial Sequence
  Description of Artificial Sequence: Synthetic oligonucleotide
gccgcaccccgaggagaag

SEQ ID NO: 1601640 - RNA, 19 nt, Artificial Sequence
  Description of Artificial Sequence: Synthetic oligonucleotide
ccccgaggacugcgugaag

SEQ ID NO: 1601641 - RNA, 19 nt, Artificial Sequence
  Description of Artificial Sequence: Synthetic oligonucleotide
gugugcugcgagaccccau

SEQ ID NO: 1601642 - RNA, 19 nt, Artificial Sequence
  Description of Artificial Sequence: Synthetic oligonucleotide
ccgcugugaugggaagcuc

SEQ ID NO: 1601643 - RNA, 19 nt, Artificial Sequence
  Description of Artificial Sequence: Synthetic oligonucleotide
cagucgggucgcaguggau

SEQ ID NO: 1601644 - RNA, 19 nt, Artificial Sequence
  Description of Artificial Sequence: Synthetic oligonucleotide
gcccgcagaggaagccaca

SEQ ID NO: 1601645 - RNA, 19 nt, Artificial Sequence
  Description of Artificial Sequence: Synthetic oligonucleotide
cccggcgcuucggggacac

SEQ ID NO: 1601646 - RNA, 19 nt, Artificial Sequence
  Description of Artificial Sequence: Synthetic oligonucleotide
ggugaguaaugggccccau

SEQ ID NO: 1601647 - RNA, 19 nt, Artificial Sequence
  Description of Artificial Sequence: Synthetic oligonucleotide
ggcgcucaggcuggccacu

SEQ ID NO: 1601648 - RNA, 19 nt, Artificial Sequence
  Description of Artificial Sequence: Synthetic oligonucleotide
ccccacugauggccacuga

SEQ ID NO: 1601649 - RNA, 19 nt, Artificial Sequence
  Description of Artificial Sequence: Synthetic oligonucleotide
ggccgcccuugaaguccag

SEQ ID NO: 1601650 - RNA, 19 nt, Artificial Sequence
  Description of Artificial Sequence: Synthetic oligonucleotide
cgccugcugaggaaggguu

SEQ ID NO: 1601651 - RNA, 19 nt, Artificial Sequence
  Description of Artificial Sequence: Synthetic oligonucleotide
cgggucgcaguggaugaua

SEQ ID NO: 1601652 - RNA, 19 nt, Artificial Sequence
  Description of Artificial Sequence: Synthetic oligonucleotide
ccgccugcugaggaagggu

SEQ ID NO: 1601653 - RNA, 19 nt, Artificial Sequence
  Description of Artificial Sequence: Synthetic oligonucleotide
ccgcuccuuccugagcacu

SEQ ID NO: 1601654 - RNA, 19 nt, Artificial Sequence
  Description of Artificial Sequence: Synthetic oligonucleotide
gcgcucaggcuggccacuu

SEQ ID NO: 1601655 - RNA, 19 nt, Artificial Sequence
  Description of Artificial Sequence: Synthetic oligonucleotide
ccggcgcuucggggacaca

SEQ ID NO: 1601656 - RNA, 19 nt, Artificial Sequence
  Description of Artificial Sequence: Synthetic oligonucleotide
gggucucgccgggcuccuu

SEQ ID NO: 1601657 - RNA, 19 nt, Artificial Sequence
  Description of Artificial Sequence: Synthetic oligonucleotide
aguuauuugacucauacag

SEQ ID NO: 1601658 - RNA, 19 nt, Artificial Sequence
  Description of Artificial Sequence: Synthetic oligonucleotide
aaccgaagcacuuugggcc

SEQ ID NO: 1601659 - RNA, 19 nt, Artificial Sequence
  Description of Artificial Sequence: Synthetic oligonucleotide
uuuauuaagacucauccaa

SEQ ID NO: 1601660 - RNA, 19 nt, Artificial Sequence
  Description of Artificial Sequence: Synthetic oligonucleotide
aaguuuacucacuaccugg

SEQ ID NO: 1601661 - RNA, 19 nt, Artificial Sequence
  Description of Artificial Sequence: Synthetic oligonucleotide
auuaaccccagucuggagc

SEQ ID NO: 1601662 - RNA, 19 nt, Artificial Sequence
  Description of Artificial Sequence: Synthetic oligonucleotide
uacaaguuuacucacuacc

SEQ ID NO: 1601663 - RNA, 19 nt, Artificial Sequence
  Description of Artificial Sequence: Synthetic oligonucleotide
agccgugugacauuaaccc

SEQ ID NO: 1601664 - RNA, 19 nt, Artificial Sequence
  Description of Artificial Sequence: Synthetic oligonucleotide
cuagcauugagauagacca

SEQ ID NO: 1601665 - RNA, 19 nt, Artificial Sequence
  Description of Artificial Sequence: Synthetic oligonucleotide
aggacuuugugccuggacc

SEQ ID NO: 1601666 - RNA, 19 nt, Artificial Sequence
  Description of Artificial Sequence: Synthetic oligonucleotide
uccgaguaggcacagaugc

SEQ ID NO: 1601667 - RNA, 19 nt, Artificial Sequence
  Description of Artificial Sequence: Synthetic oligonucleotide
ucuccugucuggaauagcg

SEQ ID NO: 1601668 - RNA, 19 nt, Artificial Sequence
  Description of Artificial Sequence: Synthetic oligonucleotide
uuuacucacuaccugguug

SEQ ID NO: 1601669 - RNA, 19 nt, Artificial Sequence
  Description of Artificial Sequence: Synthetic oligonucleotide
ucguaggacaaacaaaucu

SEQ ID NO: 1601670 - RNA, 19 nt, Artificial Sequence
  Description of Artificial Sequence: Synthetic oligonucleotide
gauauuugcccacggacag

SEQ ID NO: 1601671 - RNA, 19 nt, Artificial Sequence
  Description of Artificial Sequence: Synthetic oligonucleotide
auagugacagccgacacac

SEQ ID NO: 1601672 - RNA, 19 nt, Artificial Sequence
  Description of Artificial Sequence: Synthetic oligonucleotide
aauagcgucuccuucugca

SEQ ID NO: 1601673 - RNA, 19 nt, Artificial Sequence
  Description of Artificial Sequence: Synthetic oligonucleotide
agauagaccacccucucag

SEQ ID NO: 1601674 - RNA, 19 nt, Artificial Sequence
  Description of Artificial Sequence: Synthetic oligonucleotide
cugauugagguacacaccc

SEQ ID NO: 1601675 - RNA, 19 nt, Artificial Sequence
  Description of Artificial Sequence: Synthetic oligonucleotide
ucugcuugucauacaaagg

SEQ ID NO: 1601676 - RNA, 19 nt, Artificial Sequence
  Description of Artificial Sequence: Synthetic oligonucleotide
ugauauuugcccacggaca

SEQ ID NO: 1601677 - RNA, 19 nt, Artificial Sequence
  Description of Artificial Sequence: Synthetic oligonucleotide
agcauugagauagaccacc

SEQ ID NO: 1601678 - RNA, 19 nt, Artificial Sequence
  Description of Artificial Sequence: Synthetic oligonucleotide
ugcaggacagggcaagucg

SEQ ID NO: 1601679 - RNA, 19 nt, Artificial Sequence
  Description of Artificial Sequence: Synthetic oligonucleotide
ggauaauuuauuaagacuc

SEQ ID NO: 1601680 - RNA, 19 nt, Artificial Sequence
  Description of Artificial Sequence: Synthetic oligonucleotide
uccgcaaaggccagcaggg

SEQ ID NO: 1601681 - RNA, 19 nt, Artificial Sequence
  Description of Artificial Sequence: Synthetic oligonucleotide
uaaggcaucugccuuugag

SEQ ID NO: 1601682 - RNA, 19 nt, Artificial Sequence
  Description of Artificial Sequence: Synthetic oligonucleotide
uucauaguuauuugacuca

SEQ ID NO: 1601683 - RNA, 19 nt, Artificial Sequence
  Description of Artificial Sequence: Synthetic oligonucleotide
auacagacacccaaauugc

SEQ ID NO: 1601684 - RNA, 19 nt, Artificial Sequence
  Description of Artificial Sequence: Synthetic oligonucleotide
uauuugcccacggacagcg

SEQ ID NO: 1601685 - RNA, 19 nt, Artificial Sequence
  Description of Artificial Sequence: Synthetic oligonucleotide
cauuguagcuuccucuucg

SEQ ID NO: 1601686 - RNA, 19 nt, Artificial Sequence
  Description of Artificial Sequence: Synthetic oligonucleotide
uaggaguggggaaacaggc

SEQ ID NO: 1601687 - RNA, 19 nt, Artificial Sequence
  Description of Artificial Sequence: Synthetic oligonucleotide
auagaccacccucucagcg

SEQ ID NO: 1601688 - RNA, 19 nt, Artificial Sequence
  Description of Artificial Sequence: Synthetic oligonucleotide
auagccgugugacauuaac

SEQ ID NO: 1601689 - RNA, 19 nt, Artificial Sequence
  Description of Artificial Sequence: Synthetic oligonucleotide
guagcuuccucuucguagg

SEQ ID NO: 1601690 - RNA, 19 nt, Artificial Sequence
  Description of Artificial Sequence: Synthetic oligonucleotide
gacgcuuuuccgcaaaggc

SEQ ID NO: 1601691 - RNA, 19 nt, Artificial Sequence
  Description of Artificial Sequence: Synthetic oligonucleotide
ucuacaaguuuacucacua

SEQ ID NO: 1601692 - RNA, 19 nt, Artificial Sequence
  Description of Artificial Sequence: Synthetic oligonucleotide
auugcggggagccaucagg

SEQ ID NO: 1601693 - RNA, 19 nt, Artificial Sequence
  Description of Artificial Sequence: Synthetic oligonucleotide
aaaacuaggaguggggaaa

SEQ ID NO: 1601694 - RNA, 19 nt, Artificial Sequence
  Description of Artificial Sequence: Synthetic oligonucleotide
ucugauugagguacacacc

SEQ ID NO: 1601695 - RNA, 19 nt, Artificial Sequence
  Description of Artificial Sequence: Synthetic oligonucleotide
gacaugggcucauggagcg

SEQ ID NO: 1601696 - RNA, 19 nt, Artificial Sequence
  Description of Artificial Sequence: Synthetic oligonucleotide
uugagauagaccacccucu

SEQ ID NO: 1601697 - RNA, 19 nt, Artificial Sequence
  Description of Artificial Sequence: Synthetic oligonucleotide
uacauuguccccaccuucc

SEQ ID NO: 1601698 - RNA, 19 nt, Artificial Sequence
  Description of Artificial Sequence: Synthetic oligonucleotide
uuauuaagacucauccaaa

SEQ ID NO: 1601699 - RNA, 19 nt, Artificial Sequence
  Description of Artificial Sequence: Synthetic oligonucleotide
aggcucuacaaguuuacuc

SEQ ID NO: 1601700 - RNA, 19 nt, Artificial Sequence
  Description of Artificial Sequence: Synthetic oligonucleotide
uugagguacacacccaggu

SEQ ID NO: 1601701 - RNA, 19 nt, Artificial Sequence
  Description of Artificial Sequence: Synthetic oligonucleotide
cugauauuugcccacggac

SEQ ID NO: 1601702 - RNA, 19 nt, Artificial Sequence
  Description of Artificial Sequence: Synthetic oligonucleotide
cagacacccaaauugcggg

SEQ ID NO: 1601703 - RNA, 19 nt, Artificial Sequence
  Description of Artificial Sequence: Synthetic oligonucleotide
gcuccuagcauugagauag

SEQ ID NO: 1601704 - RNA, 19 nt, Artificial Sequence
  Description of Artificial Sequence: Synthetic oligonucleotide
ucuucguaggacaaacaaa

SEQ ID NO: 1601705 - RNA, 19 nt, Artificial Sequence
  Description of Artificial Sequence: Synthetic oligonucleotide
uguaagcauagucuccugu

SEQ ID NO: 1601706 - RNA, 19 nt, Artificial Sequence
  Description of Artificial Sequence: Synthetic oligonucleotide
guaggguggguauagagca

SEQ ID NO: 1601707 - RNA, 19 nt, Artificial Sequence
  Description of Artificial Sequence: Synthetic oligonucleotide
uucuguaagcauagucucc

SEQ ID NO: 1601708 - RNA, 19 nt, Artificial Sequence
  Description of Artificial Sequence: Synthetic oligonucleotide
uauuugacucauacagaca

SEQ ID NO: 1601709 - RNA, 19 nt, Artificial Sequence
  Description of Artificial Sequence: Synthetic oligonucleotide
gaaccgaagcacuuugggc

SEQ ID NO: 1601710 - RNA, 19 nt, Artificial Sequence
  Description of Artificial Sequence: Synthetic oligonucleotide
acaucuaaggcaucugccu

SEQ ID NO: 1601711 - RNA, 19 nt, Artificial Sequence
  Description of Artificial Sequence: Synthetic oligonucleotide
uggacagcgcuccaggucu

SEQ ID NO: 1601712 - RNA, 19 nt, Artificial Sequence
  Description of Artificial Sequence: Synthetic oligonucleotide
aaacuaggaguggggaaac

SEQ ID NO: 1601713 - RNA, 19 nt, Artificial Sequence
  Description of Artificial Sequence: Synthetic oligonucleotide
uguguuucgcagcugcaga

SEQ ID NO: 1601714 - RNA, 19 nt, Artificial Sequence
  Description of Artificial Sequence: Synthetic oligonucleotide
agagcagccacacaucuaa

SEQ ID NO: 1601715 - RNA, 19 nt, Artificial Sequence
  Description of Artificial Sequence: Synthetic oligonucleotide
ggaaauagaaccgaagcac

SEQ ID NO: 1601716 - RNA, 19 nt, Artificial Sequence
  Description of Artificial Sequence: Synthetic oligonucleotide
uuaaccccagucuggagcu

SEQ ID NO: 1601717 - RNA, 19 nt, Artificial Sequence
  Description of Artificial Sequence: Synthetic oligonucleotide
uugcggggagccaucaggg

SEQ ID NO: 1601718 - RNA, 19 nt, Artificial Sequence
  Description of Artificial Sequence: Synthetic oligonucleotide
uguggcauagccgugugac

SEQ ID NO: 1601719 - RNA, 19 nt, Artificial Sequence
  Description of Artificial Sequence: Synthetic oligonucleotide
ucagcuugccacuggaccu

SEQ ID NO: 1601720 - RNA, 19 nt, Artificial Sequence
  Description of Artificial Sequence: Synthetic oligonucleotide
uaguuauuugacucauaca

SEQ ID NO: 1601721 - RNA, 19 nt, Artificial Sequence
  Description of Artificial Sequence: Synthetic oligonucleotide
uggucagacgcuuuuccgc

SEQ ID NO: 1601722 - RNA, 19 nt, Artificial Sequence
  Description of Artificial Sequence: Synthetic oligonucleotide
uagccgugugacauuaacc

SEQ ID NO: 1601723 - RNA, 19 nt, Artificial Sequence
  Description of Artificial Sequence: Synthetic oligonucleotide
acauuguccccaccuuccc

SEQ ID NO: 1601724 - RNA, 19 nt, Artificial Sequence
  Description of Artificial Sequence: Synthetic oligonucleotide
ugggugucugcauuguagc

SEQ ID NO: 1601725 - RNA, 19 nt, Artificial Sequence
  Description of Artificial Sequence: Synthetic oligonucleotide
guggguauagagcagccac

SEQ ID NO: 1601726 - RNA, 19 nt, Artificial Sequence
  Description of Artificial Sequence: Synthetic oligonucleotide
guaggacaaacaaaucugc

SEQ ID NO: 1601727 - RNA, 19 nt, Artificial Sequence
  Description of Artificial Sequence: Synthetic oligonucleotide
guuggauaauuuauuaaga

SEQ ID NO: 1601728 - RNA, 19 nt, Artificial Sequence
  Description of Artificial Sequence: Synthetic oligonucleotide
acccaaauugcggggagcc

SEQ ID NO: 1601729 - RNA, 19 nt, Artificial Sequence
  Description of Artificial Sequence: Synthetic oligonucleotide
caaguuuacucacuaccug

SEQ ID NO: 1601730 - RNA, 19 nt, Artificial Sequence
  Description of Artificial Sequence: Synthetic oligonucleotide
acgcuuuuccgcaaaggcc

SEQ ID NO: 1601731 - RNA, 19 nt, Artificial Sequence
  Description of Artificial Sequence: Synthetic oligonucleotide
aaaaggguccuugucugcu

SEQ ID NO: 1601732 - RNA, 19 nt, Artificial Sequence
  Description of Artificial Sequence: Synthetic oligonucleotide
ucaucugucuuggucagac

SEQ ID NO: 1601733 - RNA, 19 nt, Artificial Sequence
  Description of Artificial Sequence: Synthetic oligonucleotide
acccacgccaaauguggcc

SEQ ID NO: 1601734 - RNA, 19 nt, Artificial Sequence
  Description of Artificial Sequence: Synthetic oligonucleotide
accuucccugucaagaggc

SEQ ID NO: 1601735 - RNA, 19 nt, Artificial Sequence
  Description of Artificial Sequence: Synthetic oligonucleotide
aauagaaccgaagcacuuu

SEQ ID NO: 1601736 - RNA, 19 nt, Artificial Sequence
  Description of Artificial Sequence: Synthetic oligonucleotide
acaaguuuacucacuaccu

SEQ ID NO: 1601737 - RNA, 19 nt, Artificial Sequence
  Description of Artificial Sequence: Synthetic oligonucleotide
gagcugaccaggugguggg

SEQ ID NO: 1601738 - RNA, 19 nt, Artificial Sequence
  Description of Artificial Sequence: Synthetic oligonucleotide
gaaaaggguccuugucugc

SEQ ID NO: 1601739 - RNA, 19 nt, Artificial Sequence
  Description of Artificial Sequence: Synthetic oligonucleotide
ggcucuacaaguuuacuca

SEQ ID NO: 1601740 - RNA, 19 nt, Artificial Sequence
  Description of Artificial Sequence: Synthetic oligonucleotide
cuucguaggacaaacaaau

SEQ ID NO: 1601741 - RNA, 19 nt, Artificial Sequence
  Description of Artificial Sequence: Synthetic oligonucleotide
uccugucuggaauagcguc

SEQ ID NO: 1601742 - RNA, 19 nt, Artificial Sequence
  Description of Artificial Sequence: Synthetic oligonucleotide
cuuccgggagucuguaggg

SEQ ID NO: 1601743 - RNA, 19 nt, Artificial Sequence
  Description of Artificial Sequence: Synthetic oligonucleotide
aguccgaguaggcacagau

SEQ ID NO: 1601744 - RNA, 19 nt, Artificial Sequence
  Description of Artificial Sequence: Synthetic oligonucleotide
uagaucagagcagggauuc

SEQ ID NO: 1601745 - RNA, 19 nt, Artificial Sequence
  Description of Artificial Sequence: Synthetic oligonucleotide
auagcgucuccuucugcag

SEQ ID NO: 1601746 - RNA, 19 nt, Artificial Sequence
  Description of Artificial Sequence: Synthetic oligonucleotide
ugauugagguacacaccca

SEQ ID NO: 1601747 - RNA, 19 nt, Artificial Sequence
  Description of Artificial Sequence: Synthetic oligonucleotide
ucauacagacacccaaauu

SEQ ID NO: 1601748 - RNA, 19 nt, Artificial Sequence
  Description of Artificial Sequence: Synthetic oligonucleotide
ugagauagaccacccucuc

SEQ ID NO: 1601749 - RNA, 19 nt, Artificial Sequence
  Description of Artificial Sequence: Synthetic oligonucleotide
gcuaagcuagcauagugac

SEQ ID NO: 1601750 - RNA, 19 nt, Artificial Sequence
  Description of Artificial Sequence: Synthetic oligonucleotide
cacuccagcgaguucuggg

SEQ ID NO: 1601751 - RNA, 19 nt, Artificial Sequence
  Description of Artificial Sequence: Synthetic oligonucleotide
aauugcggggagccaucag

SEQ ID NO: 1601752 - RNA, 19 nt, Artificial Sequence
  Description of Artificial Sequence: Synthetic oligonucleotide
cuacaaguuuacucacuac

SEQ ID NO: 1601753 - RNA, 19 nt, Artificial Sequence
  Description of Artificial Sequence: Synthetic oligonucleotide
auauuugcccacggacagc

SEQ ID NO: 1601754 - RNA, 19 nt, Artificial Sequence
  Description of Artificial Sequence: Synthetic oligonucleotide
uuugcccacggacagcgau

SEQ ID NO: 1601755 - RNA, 19 nt, Artificial Sequence
  Description of Artificial Sequence: Synthetic oligonucleotide
acuuugggccgcaugcagc

SEQ ID NO: 1601756 - RNA, 19 nt, Artificial Sequence
  Description of Artificial Sequence: Synthetic oligonucleotide
cucccaugugcucccaugg

SEQ ID NO: 1601757 - RNA, 19 nt, Artificial Sequence
  Description of Artificial Sequence: Synthetic oligonucleotide
uucguaggacaaacaaauc

SEQ ID NO: 1601758 - RNA, 19 nt, Artificial Sequence
  Description of Artificial Sequence: Synthetic oligonucleotide
ccuagcauugagauagacc

SEQ ID NO: 1601759 - RNA, 19 nt, Artificial Sequence
  Description of Artificial Sequence: Synthetic oligonucleotide
agcgaugaagaaaaggaaa

SEQ ID NO: 1601760 - RNA, 19 nt, Artificial Sequence
  Description of Artificial Sequence: Synthetic oligonucleotide
aaauagaaccgaagcacuu

SEQ ID NO: 1601761 - RNA, 19 nt, Artificial Sequence
  Description of Artificial Sequence: Synthetic oligonucleotide
augggugucugcauuguag

SEQ ID NO: 1601762 - RNA, 19 nt, Artificial Sequence
  Description of Artificial Sequence: Synthetic oligonucleotide
cuuugugccuggacccugg

SEQ ID NO: 1601763 - RNA, 19 nt, Artificial Sequence
  Description of Artificial Sequence: Synthetic oligonucleotide
agugccaaccucagccacc

SEQ ID NO: 1601764 - RNA, 19 nt, Artificial Sequence
  Description of Artificial Sequence: Synthetic oligonucleotide
gaaauagaaccgaagcacu

SEQ ID NO: 1601765 - RNA, 19 nt, Artificial Sequence
  Description of Artificial Sequence: Synthetic oligonucleotide
ucuaaggcaucugccuuug

SEQ ID NO: 1601766 - RNA, 19 nt, Artificial Sequence
  Description of Artificial Sequence: Synthetic oligonucleotide
gugucugcauuguagcuuc

SEQ ID NO: 1601767 - RNA, 19 nt, Artificial Sequence
  Description of Artificial Sequence: Synthetic oligonucleotide
uccgggagucuguagggug

SEQ ID NO: 1601768 - RNA, 19 nt, Artificial Sequence
  Description of Artificial Sequence: Synthetic oligonucleotide
agcauagugacagccgaca

SEQ ID NO: 1601769 - RNA, 19 nt, Artificial Sequence
  Description of Artificial Sequence: Synthetic oligonucleotide
ugggcaccaaacacugcug

SEQ ID NO: 1601770 - RNA, 19 nt, Artificial Sequence
  Description of Artificial Sequence: Synthetic oligonucleotide
gguaucuguaagguccugg

SEQ ID NO: 1601771 - RNA, 19 nt, Artificial Sequence
  Description of Artificial Sequence: Synthetic oligonucleotide
gaauagcgucuccuucugc

SEQ ID NO: 1601772 - RNA, 19 nt, Artificial Sequence
  Description of Artificial Sequence: Synthetic oligonucleotide
gauguggcauagccgugug

SEQ ID NO: 1601773 - RNA, 19 nt, Artificial Sequence
  Description of Artificial Sequence: Synthetic oligonucleotide
cucuucguaggacaaacaa

SEQ ID NO: 1601774 - RNA, 19 nt, Artificial Sequence
  Description of Artificial Sequence: Synthetic oligonucleotide
uaggacuuugugccuggac

SEQ ID NO: 1601775 - RNA, 19 nt, Artificial Sequence
  Description of Artificial Sequence: Synthetic oligonucleotide
uuuccgcaaaggccagcag

SEQ ID NO: 1601776 - RNA, 19 nt, Artificial Sequence
  Description of Artificial Sequence: Synthetic oligonucleotide
agguacacacccagguugg

SEQ ID NO: 1601777 - RNA, 19 nt, Artificial Sequence
  Description of Artificial Sequence: Synthetic oligonucleotide
aguuuacucacuaccuggu

SEQ ID NO: 1601778 - RNA, 19 nt, Artificial Sequence
  Description of Artificial Sequence: Synthetic oligonucleotide
agacgcuuuuccgcaaagg

SEQ ID NO: 1601779 - RNA, 19 nt, Artificial Sequence
  Description of Artificial Sequence: Synthetic oligonucleotide
uggcauagccgugugacau

SEQ ID NO: 1601780 - RNA, 19 nt, Artificial Sequence
  Description of Artificial Sequence: Synthetic oligonucleotide
ggcagguguauggauaggg

SEQ ID NO: 1601781 - RNA, 19 nt, Artificial Sequence
  Description of Artificial Sequence: Synthetic oligonucleotide
cauagugacagccgacaca

SEQ ID NO: 1601782 - RNA, 19 nt, Artificial Sequence
  Description of Artificial Sequence: Synthetic oligonucleotide
uguuucgcagcugcagaca

SEQ ID NO: 1601783 - RNA, 19 nt, Artificial Sequence
  Description of Artificial Sequence: Synthetic oligonucleotide
uccagcgaguucugggaca

SEQ ID NO: 1601784 - RNA, 19 nt, Artificial Sequence
  Description of Artificial Sequence: Synthetic oligonucleotide
ggacccacgccaaaugugg

SEQ ID NO: 1601785 - RNA, 19 nt, Artificial Sequence
  Description of Artificial Sequence: Synthetic oligonucleotide
gagcagggauucuguaagc

SEQ ID NO: 1601786 - RNA, 19 nt, Artificial Sequence
  Description of Artificial Sequence: Synthetic oligonucleotide
gccgcaugcagcaagauca

SEQ ID NO: 1601787 - RNA, 19 nt, Artificial Sequence
  Description of Artificial Sequence: Synthetic oligonucleotide
ugucugcuugucauacaaa

SEQ ID NO: 1601788 - RNA, 19 nt, Artificial Sequence
  Description of Artificial Sequence: Synthetic oligonucleotide
agguagaucagagcaggga

SEQ ID NO: 1601789 - RNA, 19 nt, Artificial Sequence
  Description of Artificial Sequence: Synthetic oligonucleotide
cagguugguccucuuccgg

SEQ ID NO: 1601790 - RNA, 19 nt, Artificial Sequence
  Description of Artificial Sequence: Synthetic oligonucleotide
gcuagcauagugacagccg

SEQ ID NO: 1601791 - RNA, 19 nt, Artificial Sequence
  Description of Artificial Sequence: Synthetic oligonucleotide
ugcucccauggucauggcu

SEQ ID NO: 1601792 - RNA, 19 nt, Artificial Sequence
  Description of Artificial Sequence: Synthetic oligonucleotide
caccuucccugucaagagg

SEQ ID NO: 1601793 - RNA, 19 nt, Artificial Sequence
  Description of Artificial Sequence: Synthetic oligonucleotide
caggacagggcaagucgcc

SEQ ID NO: 1601794 - RNA, 19 nt, Artificial Sequence
  Description of Artificial Sequence: Synthetic oligonucleotide
cuaagcuagcauagugaca

SEQ ID NO: 1601795 - RNA, 19 nt, Artificial Sequence
  Description of Artificial Sequence: Synthetic oligonucleotide
caucugucuuggucagacg

SEQ ID NO: 1601796 - RNA, 19 nt, Artificial Sequence
  Description of Artificial Sequence: Synthetic oligonucleotide
gggguuguuuccgauaggc

SEQ ID NO: 1601797 - RNA, 19 nt, Artificial Sequence
  Description of Artificial Sequence: Synthetic oligonucleotide
gucuguaggguggguauag

SEQ ID NO: 1601798 - RNA, 19 nt, Artificial Sequence
  Description of Artificial Sequence: Synthetic oligonucleotide
uugggaggcucuacaaguu

SEQ ID NO: 1601799 - RNA, 19 nt, Artificial Sequence
  Description of Artificial Sequence: Synthetic oligonucleotide
guugguccucuuccgggag

SEQ ID NO: 1601800 - RNA, 19 nt, Artificial Sequence
  Description of Artificial Sequence: Synthetic oligonucleotide
gucgccaugggccugagau

SEQ ID NO: 1601801 - RNA, 19 nt, Artificial Sequence
  Description of Artificial Sequence: Synthetic oligonucleotide
cacuaccugguuguccugg

SEQ ID NO: 1601802 - RNA, 19 nt, Artificial Sequence
  Description of Artificial Sequence: Synthetic oligonucleotide
cauguucugcaaguccgag

SEQ ID NO: 1601803 - RNA, 19 nt, Artificial Sequence
  Description of Artificial Sequence: Synthetic oligonucleotide
agcagggauucuguaagca

SEQ ID NO: 1601804 - RNA, 19 nt, Artificial Sequence
  Description of Artificial Sequence: Synthetic oligonucleotide
caaauugcggggagccauc

SEQ ID NO: 1601805 - RNA, 19 nt, Artificial Sequence
  Description of Artificial Sequence: Synthetic oligonucleotide
cucacuaccugguuguccu

SEQ ID NO: 1601806 - RNA, 19 nt, Artificial Sequence
  Description of Artificial Sequence: Synthetic oligonucleotide
ggaauagcgucuccuucug

SEQ ID NO: 1601807 - RNA, 19 nt, Artificial Sequence
  Description of Artificial Sequence: Synthetic oligonucleotide
gguuguuuccgauaggcau

SEQ ID NO: 1601808 - RNA, 19 nt, Artificial Sequence
  Description of Artificial Sequence: Synthetic oligonucleotide
ugggcucauggagcggugg

SEQ ID NO: 1601809 - RNA, 19 nt, Artificial Sequence
  Description of Artificial Sequence: Synthetic oligonucleotide
guguacauuguccccaccu

SEQ ID NO: 1601810 - RNA, 19 nt, Artificial Sequence
  Description of Artificial Sequence: Synthetic oligonucleotide
acuaccugguuguccugga

SEQ ID NO: 1601811 - RNA, 19 nt, Artificial Sequence
  Description of Artificial Sequence: Synthetic oligonucleotide
gcaggcuaagcuagcauag

SEQ ID NO: 1601812 - RNA, 19 nt, Artificial Sequence
  Description of Artificial Sequence: Synthetic oligonucleotide
cgaguucugggacacaaag

SEQ ID NO: 1601813 - RNA, 19 nt, Artificial Sequence
  Description of Artificial Sequence: Synthetic oligonucleotide
cuggacagcgcuccagguc

SEQ ID NO: 1601814 - RNA, 19 nt, Artificial Sequence
  Description of Artificial Sequence: Synthetic oligonucleotide
gcagguguauggauagggg

SEQ ID NO: 1601815 - RNA, 19 nt, Artificial Sequence
  Description of Artificial Sequence: Synthetic oligonucleotide
ugaugggugucugcauugu

SEQ ID NO: 1601816 - RNA, 19 nt, Artificial Sequence
  Description of Artificial Sequence: Synthetic oligonucleotide
aucagagcagggauucugu

SEQ ID NO: 1601817 - RNA, 19 nt, Artificial Sequence
  Description of Artificial Sequence: Synthetic oligonucleotide
acggacagcgaugaagaaa

SEQ ID NO: 1601818 - RNA, 19 nt, Artificial Sequence
  Description of Artificial Sequence: Synthetic oligonucleotide
ugucaagaggcuggagaaa

SEQ ID NO: 1601819 - RNA, 19 nt, Artificial Sequence
  Description of Artificial Sequence: Synthetic oligonucleotide
ucccauggucaguacuggu

SEQ ID NO: 1601820 - RNA, 19 nt, Artificial Sequence
  Description of Artificial Sequence: Synthetic oligonucleotide
ugucugcauuguagcuucc

SEQ ID NO: 1601821 - RNA, 19 nt, Artificial Sequence
  Description of Artificial Sequence: Synthetic oligonucleotide
uggugguguucugauauuu

SEQ ID NO: 1601822 - RNA, 19 nt, Artificial Sequence
  Description of Artificial Sequence: Synthetic oligonucleotide
gauuucugggcuggaaaua

SEQ ID NO: 1601823 - RNA, 19 nt, Artificial Sequence
  Description of Artificial Sequence: Synthetic oligonucleotide
cuucccugucaagaggcug

SEQ ID NO: 1601824 - RNA, 19 nt, Artificial Sequence
  Description of Artificial Sequence: Synthetic oligonucleotide
ucuguaggguggguauaga

SEQ ID NO: 1601825 - RNA, 19 nt, Artificial Sequence
  Description of Artificial Sequence: Synthetic oligonucleotide
ggucagacgcuuuuccgca

SEQ ID NO: 1601826 - RNA, 19 nt, Artificial Sequence
  Description of Artificial Sequence: Synthetic oligonucleotide
ucagggccgugccccaugu

SEQ ID NO: 1601827 - RNA, 19 nt, Artificial Sequence
  Description of Artificial Sequence: Synthetic oligonucleotide
caguggcuucugauugagg

SEQ ID NO: 1601828 - RNA, 19 nt, Artificial Sequence
  Description of Artificial Sequence: Synthetic oligonucleotide
ggacaugggcucauggagc

SEQ ID NO: 1601829 - RNA, 19 nt, Artificial Sequence
  Description of Artificial Sequence: Synthetic oligonucleotide
gguagaucagagcagggau

SEQ ID NO: 1601830 - RNA, 19 nt, Artificial Sequence
  Description of Artificial Sequence: Synthetic oligonucleotide
ggcagcuccuagcauugag

SEQ ID NO: 1601831 - RNA, 19 nt, Artificial Sequence
  Description of Artificial Sequence: Synthetic oligonucleotide
cagacgcuuuuccgcaaag

SEQ ID NO: 1601832 - RNA, 19 nt, Artificial Sequence
  Description of Artificial Sequence: Synthetic oligonucleotide
ggcuaagcuagcauaguga

SEQ ID NO: 1601833 - RNA, 19 nt, Artificial Sequence
  Description of Artificial Sequence: Synthetic oligonucleotide
ucacuaccugguuguccug

SEQ ID NO: 1601834 - RNA, 19 nt, Artificial Sequence
  Description of Artificial Sequence: Synthetic oligonucleotide
gcgaugaagaaaaggaaaa

SEQ ID NO: 1601835 - RNA, 19 nt, Artificial Sequence
  Description of Artificial Sequence: Synthetic oligonucleotide
cugcauuguagcuuccucu

SEQ ID NO: 1601836 - RNA, 19 nt, Artificial Sequence
  Description of Artificial Sequence: Synthetic oligonucleotide
acugggcaccaaacacugc

SEQ ID NO: 1601837 - RNA, 19 nt, Artificial Sequence
  Description of Artificial Sequence: Synthetic oligonucleotide
gccgugugacauuaacccc

SEQ ID NO: 1601838 - RNA, 19 nt, Artificial Sequence
  Description of Artificial Sequence: Synthetic oligonucleotide
cagggcaagucgccauggg

SEQ ID NO: 1601839 - RNA, 19 nt, Artificial Sequence
  Description of Artificial Sequence: Synthetic oligonucleotide
cagugccaaccucagccac

SEQ ID NO: 1601840 - RNA, 19 nt, Artificial Sequence
  Description of Artificial Sequence: Synthetic oligonucleotide
aggcucccagcuguguuuc

SEQ ID NO: 1601841 - RNA, 19 nt, Artificial Sequence
  Description of Artificial Sequence: Synthetic oligonucleotide
ugucuuggucagacgcuuu

SEQ ID NO: 1601842 - RNA, 19 nt, Artificial Sequence
  Description of Artificial Sequence: Synthetic oligonucleotide
cuuccucuucguaggacaa

SEQ ID NO: 1601843 - RNA, 19 nt, Artificial Sequence
  Description of Artificial Sequence: Synthetic oligonucleotide
acuggaccugauggguguc

SEQ ID NO: 1601844 - RNA, 19 nt, Artificial Sequence
  Description of Artificial Sequence: Synthetic oligonucleotide
aucagggccgugccccaug

SEQ ID NO: 1601845 - RNA, 19 nt, Artificial Sequence
  Description of Artificial Sequence: Synthetic oligonucleotide
guacuggugauguggcaua

SEQ ID NO: 1601846 - RNA, 19 nt, Artificial Sequence
  Description of Artificial Sequence: Synthetic oligonucleotide
gacccacgccaaauguggc

SEQ ID NO: 1601847 - RNA, 19 nt, Artificial Sequence
  Description of Artificial Sequence: Synthetic oligonucleotide
gaugggugucugcauugua

SEQ ID NO: 1601848 - RNA, 19 nt, Artificial Sequence
  Description of Artificial Sequence: Synthetic oligonucleotide
ccgugugacauuaacccca

SEQ ID NO: 1601849 - RNA, 19 nt, Artificial Sequence
  Description of Artificial Sequence: Synthetic oligonucleotide
auguggcauagccguguga

SEQ ID NO: 1601850 - RNA, 19 nt, Artificial Sequence
  Description of Artificial Sequence: Synthetic oligonucleotide
cacccucucagcgccagug

SEQ ID NO: 1601851 - RNA, 19 nt, Artificial Sequence
  Description of Artificial Sequence: Synthetic oligonucleotide
ccacggacagcgaugaaga

SEQ ID NO: 1601852 - RNA, 19 nt, Artificial Sequence
  Description of Artificial Sequence: Synthetic oligonucleotide
guccgaguaggcacagaug

SEQ ID NO: 1601853 - RNA, 19 nt, Artificial Sequence
  Description of Artificial Sequence: Synthetic oligonucleotide
cuggacccuggcucccagg

SEQ ID NO: 1601854 - RNA, 19 nt, Artificial Sequence
  Description of Artificial Sequence: Synthetic oligonucleotide
cggacagcgaugaagaaaa

SEQ ID NO: 1601855 - RNA, 19 nt, Artificial Sequence
  Description of Artificial Sequence: Synthetic oligonucleotide
cagggugaacaugaggaaa

SEQ ID NO: 1601856 - RNA, 19 nt, Artificial Sequence
  Description of Artificial Sequence: Synthetic oligonucleotide
cccacggacagcgaugaag

SEQ ID NO: 1601857 - RNA, 19 nt, Artificial Sequence
  Description of Artificial Sequence: Synthetic oligonucleotide
cucuacaaguuuacucacu

SEQ ID NO: 1601858 - RNA, 19 nt, Artificial Sequence
  Description of Artificial Sequence: Synthetic oligonucleotide
ccauggucaguacugguga

SEQ ID NO: 1601859 - RNA, 19 nt, Artificial Sequence
  Description of Artificial Sequence: Synthetic oligonucleotide
cucauacagacacccaaau

SEQ ID NO: 1601860 - RNA, 19 nt, Artificial Sequence
  Description of Artificial Sequence: Synthetic oligonucleotide
caaguccgaguaggcacag

SEQ ID NO: 1601861 - RNA, 19 nt, Artificial Sequence
  Description of Artificial Sequence: Synthetic oligonucleotide
gguugguccucuuccggga

SEQ ID NO: 1601862 - RNA, 19 nt, Artificial Sequence
  Description of Artificial Sequence: Synthetic oligonucleotide
gugacagccgacacacaga

SEQ ID NO: 1601863 - RNA, 19 nt, Artificial Sequence
  Description of Artificial Sequence: Synthetic oligonucleotide
gcaggacagggcaagucgc

SEQ ID NO: 1601864 - RNA, 19 nt, Artificial Sequence
  Description of Artificial Sequence: Synthetic oligonucleotide
uuccucuucguaggacaaa

SEQ ID NO: 1601865 - RNA, 19 nt, Artificial Sequence
  Description of Artificial Sequence: Synthetic oligonucleotide
ggaggcucuacaaguuuac

SEQ ID NO: 1601866 - RNA, 19 nt, Artificial Sequence
  Description of Artificial Sequence: Synthetic oligonucleotide
agaucagagcagggauucu

SEQ ID NO: 1601867 - RNA, 19 nt, Artificial Sequence
  Description of Artificial Sequence: Synthetic oligonucleotide
cauugagauagaccacccu

SEQ ID NO: 1601868 - RNA, 19 nt, Artificial Sequence
  Description of Artificial Sequence: Synthetic oligonucleotide
ccgaguaggcacagaugcc

SEQ ID NO: 1601869 - RNA, 19 nt, Artificial Sequence
  Description of Artificial Sequence: Synthetic oligonucleotide
cccacgccaaauguggccc

SEQ ID NO: 1601870 - RNA, 19 nt, Artificial Sequence
  Description of Artificial Sequence: Synthetic oligonucleotide
cugcaggacagggcaaguc

SEQ ID NO: 1601871 - RNA, 19 nt, Artificial Sequence
  Description of Artificial Sequence: Synthetic oligonucleotide
cugcaaguccgaguaggca

SEQ ID NO: 1601872 - RNA, 19 nt, Artificial Sequence
  Description of Artificial Sequence: Synthetic oligonucleotide
gcauuguagcuuccucuuc

SEQ ID NO: 1601873 - RNA, 19 nt, Artificial Sequence
  Description of Artificial Sequence: Synthetic oligonucleotide
gcauaagcagggaccagca

SEQ ID NO: 1601874 - RNA, 19 nt, Artificial Sequence
  Description of Artificial Sequence: Synthetic oligonucleotide
ucccauggucauggcugag

SEQ ID NO: 1601875 - RNA, 19 nt, Artificial Sequence
  Description of Artificial Sequence: Synthetic oligonucleotide
ggucaguacuggugaugug

SEQ ID NO: 1601876 - RNA, 19 nt, Artificial Sequence
  Description of Artificial Sequence: Synthetic oligonucleotide
cccucucagcgccagugcc

SEQ ID NO: 1601877 - RNA, 19 nt, Artificial Sequence
  Description of Artificial Sequence: Synthetic oligonucleotide
ggcucauggagcgguggcc

SEQ ID NO: 1601878 - RNA, 19 nt, Artificial Sequence
  Description of Artificial Sequence: Synthetic oligonucleotide
ggccgcaugcagcaagauc

SEQ ID NO: 1601879 - RNA, 19 nt, Artificial Sequence
  Description of Artificial Sequence: Synthetic oligonucleotide
cacuggaccugaugggugu

SEQ ID NO: 1601880 - RNA, 19 nt, Artificial Sequence
  Description of Artificial Sequence: Synthetic oligonucleotide
gcaaguccgaguaggcaca

SEQ ID NO: 1601881 - RNA, 19 nt, Artificial Sequence
  Description of Artificial Sequence: Synthetic oligonucleotide
gcuucugauugagguacac

SEQ ID NO: 1601882 - RNA, 19 nt, Artificial Sequence
  Description of Artificial Sequence: Synthetic oligonucleotide
gaggcucuacaaguuuacu

SEQ ID NO: 1601883 - RNA, 19 nt, Artificial Sequence
  Description of Artificial Sequence: Synthetic oligonucleotide
ggggaaacaggcaggcuaa

SEQ ID NO: 1601884 - RNA, 19 nt, Artificial Sequence
  Description of Artificial Sequence: Synthetic oligonucleotide
ggaaauccaggccacuguu

SEQ ID NO: 1601885 - RNA, 19 nt, Artificial Sequence
  Description of Artificial Sequence: Synthetic oligonucleotide
gccgacacacagaaugaca

SEQ ID NO: 1601886 - RNA, 19 nt, Artificial Sequence
  Description of Artificial Sequence: Synthetic oligonucleotide
caggccacuguuaggacuu

SEQ ID NO: 1601887 - RNA, 19 nt, Artificial Sequence
  Description of Artificial Sequence: Synthetic oligonucleotide
uuugggccgcaugcagcaa

SEQ ID NO: 1601888 - RNA, 19 nt, Artificial Sequence
  Description of Artificial Sequence: Synthetic oligonucleotide
aagucgccaugggccugag

SEQ ID NO: 1601889 - RNA, 19 nt, Artificial Sequence
  Description of Artificial Sequence: Synthetic oligonucleotide
gacuuugugccuggacccu

SEQ ID NO: 1601890 - RNA, 19 nt, Artificial Sequence
  Description of Artificial Sequence: Synthetic oligonucleotide
caggacccacgccaaaugu

SEQ ID NO: 1601891 - RNA, 19 nt, Artificial Sequence
  Description of Artificial Sequence: Synthetic oligonucleotide
gguggguauagagcagcca

SEQ ID NO: 1601892 - RNA, 19 nt, Artificial Sequence
  Description of Artificial Sequence: Synthetic oligonucleotide
cuggcacuccagcgaguuc

SEQ ID NO: 1601893 - RNA, 19 nt, Artificial Sequence
  Description of Artificial Sequence: Synthetic oligonucleotide
gcuuuuccgcaaaggccag

SEQ ID NO: 1601894 - RNA, 19 nt, Artificial Sequence
  Description of Artificial Sequence: Synthetic oligonucleotide
agcuugcuucagggugaac

SEQ ID NO: 1601895 - RNA, 19 nt, Artificial Sequence
  Description of Artificial Sequence: Synthetic oligonucleotide
cuccugucuggaauagcgu

SEQ ID NO: 1601896 - RNA, 19 nt, Artificial Sequence
  Description of Artificial Sequence: Synthetic oligonucleotide
cucucagcgccagugccaa

SEQ ID NO: 1601897 - RNA, 19 nt, Artificial Sequence
  Description of Artificial Sequence: Synthetic oligonucleotide
ggguuguuuccgauaggca

SEQ ID NO: 1601898 - RNA, 19 nt, Artificial Sequence
  Description of Artificial Sequence: Synthetic oligonucleotide
caagucgccaugggccuga

SEQ ID NO: 1601899 - RNA, 19 nt, Artificial Sequence
  Description of Artificial Sequence: Synthetic oligonucleotide
cugccuuugaggugggguu

SEQ ID NO: 1601900 - RNA, 19 nt, Artificial Sequence
  Description of Artificial Sequence: Synthetic oligonucleotide
ccagcgaguucugggacac

SEQ ID NO: 1601901 - RNA, 19 nt, Artificial Sequence
  Description of Artificial Sequence: Synthetic oligonucleotide
cuguuaggacuuugugccu

SEQ ID NO: 1601902 - RNA, 19 nt, Artificial Sequence
  Description of Artificial Sequence: Synthetic oligonucleotide
agcucccaugugcucccau

SEQ ID NO: 1601903 - RNA, 19 nt, Artificial Sequence
  Description of Artificial Sequence: Synthetic oligonucleotide
gggcuggaaauagaaccga

SEQ ID NO: 1601904 - RNA, 19 nt, Artificial Sequence
  Description of Artificial Sequence: Synthetic oligonucleotide
ggucuucccauggucagua

SEQ ID NO: 1601905 - RNA, 19 nt, Artificial Sequence
  Description of Artificial Sequence: Synthetic oligonucleotide
ucucagcgccagugccaac

SEQ ID NO: 1601906 - RNA, 19 nt, Artificial Sequence
  Description of Artificial Sequence: Synthetic oligonucleotide
ggcucccagcuguguuucg

SEQ ID NO: 1601907 - RNA, 19 nt, Artificial Sequence
  Description of Artificial Sequence: Synthetic oligonucleotide
gacagcgcuccaggucuuc

SEQ ID NO: 1601908 - RNA, 19 nt, Artificial Sequence
  Description of Artificial Sequence: Synthetic oligonucleotide
cuaaggcaucugccuuuga

SEQ ID NO: 1601909 - RNA, 19 nt, Artificial Sequence
  Description of Artificial Sequence: Synthetic oligonucleotide
cauagccgugugacauuaa

SEQ ID NO: 1601910 - RNA, 19 nt, Artificial Sequence
  Description of Artificial Sequence: Synthetic oligonucleotide
agcuugccacuggaccuga

SEQ ID NO: 1601911 - RNA, 19 nt, Artificial Sequence
  Description of Artificial Sequence: Synthetic oligonucleotide
ggagucuguagggugggua

SEQ ID NO: 1601912 - RNA, 19 nt, Artificial Sequence
  Description of Artificial Sequence: Synthetic oligonucleotide
cacggacagcgaugaagaa

SEQ ID NO: 1601913 - RNA, 19 nt, Artificial Sequence
  Description of Artificial Sequence: Synthetic oligonucleotide
gggaggcucuacaaguuua

SEQ ID NO: 1601914 - RNA, 19 nt, Artificial Sequence
  Description of Artificial Sequence: Synthetic oligonucleotide
cauggucaguacuggugau

SEQ ID NO: 1601915 - RNA, 19 nt, Artificial Sequence
  Description of Artificial Sequence: Synthetic oligonucleotide
ccgcaugcagcaagaucac

SEQ ID NO: 1601916 - RNA, 19 nt, Artificial Sequence
  Description of Artificial Sequence: Synthetic oligonucleotide
gcauagccgugugacauua

SEQ ID NO: 1601917 - RNA, 19 nt, Artificial Sequence
  Description of Artificial Sequence: Synthetic oligonucleotide
ggccgugccccauguucug

SEQ ID NO: 1601918 - RNA, 19 nt, Artificial Sequence
  Description of Artificial Sequence: Synthetic oligonucleotide
ccucuucguaggacaaaca

SEQ ID NO: 1601919 - RNA, 19 nt, Artificial Sequence
  Description of Artificial Sequence: Synthetic oligonucleotide
gccaauggugguaucugua

SEQ ID NO: 1601920 - RNA, 19 nt, Artificial Sequence
  Description of Artificial Sequence: Synthetic oligonucleotide
caugugcucccauggucau

SEQ ID NO: 1601921 - RNA, 19 nt, Artificial Sequence
  Description of Artificial Sequence: Synthetic oligonucleotide
auuugcccacggacagcga

SEQ ID NO: 1601922 - RNA, 19 nt, Artificial Sequence
  Description of Artificial Sequence: Synthetic oligonucleotide
ccucucagcgccagugcca

SEQ ID NO: 1601923 - RNA, 19 nt, Artificial Sequence
  Description of Artificial Sequence: Synthetic oligonucleotide
acgccaaauguggcccaau

SEQ ID NO: 1601924 - RNA, 19 nt, Artificial Sequence
  Description of Artificial Sequence: Synthetic oligonucleotide
cgccaaauguggcccaauc

SEQ ID NO: 1601925 - RNA, 19 nt, Artificial Sequence
  Description of Artificial Sequence: Synthetic oligonucleotide
gccacuguuaggacuuugu

SEQ ID NO: 1601926 - RNA, 19 nt, Artificial Sequence
  Description of Artificial Sequence: Synthetic oligonucleotide
caggcuaagcuagcauagu

SEQ ID NO: 1601927 - RNA, 19 nt, Artificial Sequence
  Description of Artificial Sequence: Synthetic oligonucleotide
gcaagucgccaugggccug

SEQ ID NO: 1601928 - RNA, 19 nt, Artificial Sequence
  Description of Artificial Sequence: Synthetic oligonucleotide
gggagcugaccagguggug

SEQ ID NO: 1601929 - RNA, 19 nt, Artificial Sequence
  Description of Artificial Sequence: Synthetic oligonucleotide
ccaaauugcggggagccau

SEQ ID NO: 1601930 - RNA, 19 nt, Artificial Sequence
  Description of Artificial Sequence: Synthetic oligonucleotide
cuggugguguucugauauu

SEQ ID NO: 1601931 - RNA, 19 nt, Artificial Sequence
  Description of Artificial Sequence: Synthetic oligonucleotide
gccgugccccauguucugc

SEQ ID NO: 1601932 - RNA, 19 nt, Artificial Sequence
  Description of Artificial Sequence: Synthetic oligonucleotide
gaccacccucucagcgcca

SEQ ID NO: 1601933 - RNA, 19 nt, Artificial Sequence
  Description of Artificial Sequence: Synthetic oligonucleotide
ccgugccccauguucugca

SEQ ID NO: 1601934 - RNA, 19 nt, Artificial Sequence
  Description of Artificial Sequence: Synthetic oligonucleotide
gaagcacuuugggccgcau

SEQ ID NO: 1601935 - RNA, 19 nt, Artificial Sequence
  Description of Artificial Sequence: Synthetic oligonucleotide
ggcauagccgugugacauu

SEQ ID NO: 1601936 - RNA, 19 nt, Artificial Sequence
  Description of Artificial Sequence: Synthetic oligonucleotide
gccacacaucuaaggcauc

SEQ ID NO: 1601937 - RNA, 19 nt, Artificial Sequence
  Description of Artificial Sequence: Synthetic oligonucleotide
aggccacuguuaggacuuu

SEQ ID NO: 1601938 - RNA, 19 nt, Artificial Sequence
  Description of Artificial Sequence: Synthetic oligonucleotide
ccacgccaaauguggccca

SEQ ID NO: 1601939 - RNA, 19 nt, Artificial Sequence
  Description of Artificial Sequence: Synthetic oligonucleotide
gcgaguucugggacacaaa

SEQ ID NO: 1601940 - RNA, 19 nt, Artificial Sequence
  Description of Artificial Sequence: Synthetic oligonucleotide
gggauucuguaagcauagu

SEQ ID NO: 1601941 - RNA, 19 nt, Artificial Sequence
  Description of Artificial Sequence: Synthetic oligonucleotide
cccaaauugcggggagcca

SEQ ID NO: 1601942 - RNA, 19 nt, Artificial Sequence
  Description of Artificial Sequence: Synthetic oligonucleotide
gguacacacccagguuggu

SEQ ID NO: 1601943 - RNA, 19 nt, Artificial Sequence
  Description of Artificial Sequence: Synthetic oligonucleotide
ccaucagggccgugcccca

SEQ ID NO: 1601944 - RNA, 19 nt, Artificial Sequence
  Description of Artificial Sequence: Synthetic oligonucleotide
cgauaggcauaagcaggga

SEQ ID NO: 1601945 - RNA, 19 nt, Artificial Sequence
  Description of Artificial Sequence: Synthetic oligonucleotide
ccuggcacuccagcgaguu

SEQ ID NO: 1601946 - RNA, 19 nt, Artificial Sequence
  Description of Artificial Sequence: Synthetic oligonucleotide
cgugccccauguucugcaa

SEQ ID NO: 1601947 - RNA, 19 nt, Artificial Sequence
  Description of Artificial Sequence: Synthetic oligonucleotide
caucagggccgugccccau

SEQ ID NO: 1601948 - RNA, 19 nt, Artificial Sequence
  Description of Artificial Sequence: Synthetic oligonucleotide
cgaagcacuuugggccgca

SEQ ID NO: 1601949 - RNA, 19 nt, Artificial Sequence
  Description of Artificial Sequence: Synthetic oligonucleotide
gcccacggacagcgaugaa

SEQ ID NO: 1601950 - RNA, 19 nt, Artificial Sequence
  Description of Artificial Sequence: Synthetic oligonucleotide
cagggccgugccccauguu

SEQ ID NO: 1601951 - RNA, 19 nt, Artificial Sequence
  Description of Artificial Sequence: Synthetic oligonucleotide
ggacagcgcuccaggucuu

SEQ ID NO: 1601952 - RNA, 19 nt, Artificial Sequence
  Description of Artificial Sequence: Synthetic oligonucleotide
ccacccucucagcgccagu

SEQ ID NO: 1601953 - RNA, 19 nt, Artificial Sequence
  Description of Artificial Sequence: Synthetic oligonucleotide
aauauauacagucugaucc

SEQ ID NO: 1601954 - RNA, 19 nt, Artificial Sequence
  Description of Artificial Sequence: Synthetic oligonucleotide
aaagauaacagucacauuu

SEQ ID NO: 1601955 - RNA, 19 nt, Artificial Sequence
  Description of Artificial Sequence: Synthetic oligonucleotide
agaauauuaauguaggcag

SEQ ID NO: 1601956 - RNA, 19 nt, Artificial Sequence
  Description of Artificial Sequence: Synthetic oligonucleotide
uacaauauggcuaauaauc

SEQ ID NO: 1601957 - RNA, 19 nt, Artificial Sequence
  Description of Artificial Sequence: Synthetic oligonucleotide
gauaaucucacugagaaag

SEQ ID NO: 1601958 - RNA, 19 nt, Artificial Sequence
  Description of Artificial Sequence: Synthetic oligonucleotide
cuugauuuucccaugaugc

SEQ ID NO: 1601959 - RNA, 19 nt, Artificial Sequence
  Description of Artificial Sequence: Synthetic oligonucleotide
uguagagucacuagggagg

SEQ ID NO: 1601960 - RNA, 19 nt, Artificial Sequence
  Description of Artificial Sequence: Synthetic oligonucleotide
aauauaagacaaaugguuc

SEQ ID NO: 1601961 - RNA, 19 nt, Artificial Sequence
  Description of Artificial Sequence: Synthetic oligonucleotide
aauccaauagccaaagaac

SEQ ID NO: 1601962 - RNA, 19 nt, Artificial Sequence
  Description of Artificial Sequence: Synthetic oligonucleotide
agauauuugcuguuggagc

SEQ ID NO: 1601963 - RNA, 19 nt, Artificial Sequence
  Description of Artificial Sequence: Synthetic oligonucleotide
aaauccaauagccaaagaa

SEQ ID NO: 1601964 - RNA, 19 nt, Artificial Sequence
  Description of Artificial Sequence: Synthetic oligonucleotide
ugaugaucuuuuaaaauag

SEQ ID NO: 1601965 - RNA, 19 nt, Artificial Sequence
  Description of Artificial Sequence: Synthetic oligonucleotide
auauuugggaaaauuaagc

SEQ ID NO: 1601966 - RNA, 19 nt, Artificial Sequence
  Description of Artificial Sequence: Synthetic oligonucleotide
uuuccuaugcuauaaucgg

SEQ ID NO: 1601967 - RNA, 19 nt, Artificial Sequence
  Description of Artificial Sequence: Synthetic oligonucleotide
aaucagaguguuuucauca

SEQ ID NO: 1601968 - RNA, 19 nt, Artificial Sequence
  Description of Artificial Sequence: Synthetic oligonucleotide
aguguagaaaacuccaagg

SEQ ID NO: 1601969 - RNA, 19 nt, Artificial Sequence
  Description of Artificial Sequence: Synthetic oligonucleotide
uuaagauaacaucauuaag

SEQ ID NO: 1601970 - RNA, 19 nt, Artificial Sequence
  Description of Artificial Sequence: Synthetic oligonucleotide
aaaauaguggccuuaggaa

SEQ ID NO: 1601971 - RNA, 19 nt, Artificial Sequence
  Description of Artificial Sequence: Synthetic oligonucleotide
uuggacaaauccaauagcc

SEQ ID NO: 1601972 - RNA, 19 nt, Artificial Sequence
  Description of Artificial Sequence: Synthetic oligonucleotide
ucaaguuccaugcuggggc

SEQ ID NO: 1601973 - RNA, 19 nt, Artificial Sequence
  Description of Artificial Sequence: Synthetic oligonucleotide
gauauuugcuguuggagcc

SEQ ID NO: 1601974 - RNA, 19 nt, Artificial Sequence
  Description of Artificial Sequence: Synthetic oligonucleotide
aaagauuugcuuccauauc

SEQ ID NO: 1601975 - RNA, 19 nt, Artificial Sequence
  Description of Artificial Sequence: Synthetic oligonucleotide
augaucaugggacaggauc

SEQ ID NO: 1601976 - RNA, 19 nt, Artificial Sequence
  Description of Artificial Sequence: Synthetic oligonucleotide
uuuaacuacagguucacaa

SEQ ID NO: 1601977 - RNA, 19 nt, Artificial Sequence
  Description of Artificial Sequence: Synthetic oligonucleotide
acaguuuucgaguaucgcg

SEQ ID NO: 1601978 - RNA, 19 nt, Artificial Sequence
  Description of Artificial Sequence: Synthetic oligonucleotide
uguuaagauaacaucauua

SEQ ID NO: 1601979 - RNA, 19 nt, Artificial Sequence
  Description of Artificial Sequence: Synthetic oligonucleotide
agaaacugugcauuuguac

SEQ ID NO: 1601980 - RNA, 19 nt, Artificial Sequence
  Description of Artificial Sequence: Synthetic oligonucleotide
ucaaaguucacaguccgcg

SEQ ID NO: 1601981 - RNA, 19 nt, Artificial Sequence
  Description of Artificial Sequence: Synthetic oligonucleotide
agugggaaugguuuuggcc

SEQ ID NO: 1601982 - RNA, 19 nt, Artificial Sequence
  Description of Artificial Sequence: Synthetic oligonucleotide
aucucuuagauauucagcu

SEQ ID NO: 1601983 - RNA, 19 nt, Artificial Sequence
  Description of Artificial Sequence: Synthetic oligonucleotide
aauuucaguguuaagauaa

SEQ ID NO: 1601984 - RNA, 19 nt, Artificial Sequence
  Description of Artificial Sequence: Synthetic oligonucleotide
gaacaauauauacagucug

SEQ ID NO: 1601985 - RNA, 19 nt, Artificial Sequence
  Description of Artificial Sequence: Synthetic oligonucleotide
uaaucggggaaauauaaga

SEQ ID NO: 1601986 - RNA, 19 nt, Artificial Sequence
  Description of Artificial Sequence: Synthetic oligonucleotide
auaaacaagggcugcuggc

SEQ ID NO: 1601987 - RNA, 19 nt, Artificial Sequence
  Description of Artificial Sequence: Synthetic oligonucleotide
uccuaugcuauaaucgggg

SEQ ID NO: 1601988 - RNA, 19 nt, Artificial Sequence
  Description of Artificial Sequence: Synthetic oligonucleotide
uaaguaaauggguuucagg

SEQ ID NO: 1601989 - RNA, 19 nt, Artificial Sequence
  Description of Artificial Sequence: Synthetic oligonucleotide
aaucggggaaauauaagac

SEQ ID NO: 1601990 - RNA, 19 nt, Artificial Sequence
  Description of Artificial Sequence: Synthetic oligonucleotide
cuaauaaucuguccagugg

SEQ ID NO: 1601991 - RNA, 19 nt, Artificial Sequence
  Description of Artificial Sequence: Synthetic oligonucleotide
uuauaauuaacacguugcu

SEQ ID NO: 1601992 - RNA, 19 nt, Artificial Sequence
  Description of Artificial Sequence: Synthetic oligonucleotide
uauaaucggggaaauauaa

SEQ ID NO: 1601993 - RNA, 19 nt, Artificial Sequence
  Description of Artificial Sequence: Synthetic oligonucleotide
guuuauaauuaacacguug

SEQ ID NO: 1601994 - RNA, 19 nt, Artificial Sequence
  Description of Artificial Sequence: Synthetic oligonucleotide
ucacaagaaaucauacaag

SEQ ID NO: 1601995 - RNA, 19 nt, Artificial Sequence
  Description of Artificial Sequence: Synthetic oligonucleotide
uuuucacaagaaaucauac

SEQ ID NO: 1601996 - RNA, 19 nt, Artificial Sequence
  Description of Artificial Sequence: Synthetic oligonucleotide
agauaacaucauuaagagc

SEQ ID NO: 1601997 - RNA, 19 nt, Artificial Sequence
  Description of Artificial Sequence: Synthetic oligonucleotide
guuuccuaugcuauaaucg

SEQ ID NO: 1601998 - RNA, 19 nt, Artificial Sequence
  Description of Artificial Sequence: Synthetic oligonucleotide
aaauaguggccuuaggaaa

SEQ ID NO: 1601999 - RNA, 19 nt, Artificial Sequence
  Description of Artificial Sequence: Synthetic oligonucleotide
uacaaguauuuuauuaugu

SEQ ID NO: 1602000 - RNA, 19 nt, Artificial Sequence
  Description of Artificial Sequence: Synthetic oligonucleotide
agauaaacggucugcauug

SEQ ID NO: 1602001 - RNA, 19 nt, Artificial Sequence
  Description of Artificial Sequence: Synthetic oligonucleotide
aauauggcuaauaaucugu

SEQ ID NO: 1602002 - RNA, 19 nt, Artificial Sequence
  Description of Artificial Sequence: Synthetic oligonucleotide
acacguugcuuccaaauac

SEQ ID NO: 1602003 - RNA, 19 nt, Artificial Sequence
  Description of Artificial Sequence: Synthetic oligonucleotide
uauuaugucaaaguucaca

SEQ ID NO: 1602004 - RNA, 19 nt, Artificial Sequence
  Description of Artificial Sequence: Synthetic oligonucleotide
augguuagcaguuguagag

SEQ ID NO: 1602005 - RNA, 19 nt, Artificial Sequence
  Description of Artificial Sequence: Synthetic oligonucleotide
augguuuuggcccaaggag

SEQ ID NO: 1602006 - RNA, 19 nt, Artificial Sequence
  Description of Artificial Sequence: Synthetic oligonucleotide
uuuggacaaauccaauagc

SEQ ID NO: 1602007 - RNA, 19 nt, Artificial Sequence
  Description of Artificial Sequence: Synthetic oligonucleotide
uagauauucagcuuuuauc

SEQ ID NO: 1602008 - RNA, 19 nt, Artificial Sequence
  Description of Artificial Sequence: Synthetic oligonucleotide
gcuguuuauaauuaacacg

SEQ ID NO: 1602009 - RNA, 19 nt, Artificial Sequence
  Description of Artificial Sequence: Synthetic oligonucleotide
auauaagacaaaugguuca

SEQ ID NO: 1602010 - RNA, 19 nt, Artificial Sequence
  Description of Artificial Sequence: Synthetic oligonucleotide
ucgaguaucgcguucaccu

SEQ ID NO: 1602011 - RNA, 19 nt, Artificial Sequence
  Description of Artificial Sequence: Synthetic oligonucleotide
ugcaaccuaagaaacccgg

SEQ ID NO: 1602012 - RNA, 19 nt, Artificial Sequence
  Description of Artificial Sequence: Synthetic oligonucleotide
ucaauauuucuccacaguu

SEQ ID NO: 1602013 - RNA, 19 nt, Artificial Sequence
  Description of Artificial Sequence: Synthetic oligonucleotide
aguucuugcaaccuaagaa

SEQ ID NO: 1602014 - RNA, 19 nt, Artificial Sequence
  Description of Artificial Sequence: Synthetic oligonucleotide
aaagauauuugcuguugga

SEQ ID NO: 1602015 - RNA, 19 nt, Artificial Sequence
  Description of Artificial Sequence: Synthetic oligonucleotide
aauacucuggaggaugauc

SEQ ID NO: 1602016 - RNA, 19 nt, Artificial Sequence
  Description of Artificial Sequence: Synthetic oligonucleotide
gaaaucuagagaaacugug

SEQ ID NO: 1602017 - RNA, 19 nt, Artificial Sequence
  Description of Artificial Sequence: Synthetic oligonucleotide
uucaguguuaagauaacau

SEQ ID NO: 1602018 - RNA, 19 nt, Artificial Sequence
  Description of Artificial Sequence: Synthetic oligonucleotide
aguaguuggaugaacacag

SEQ ID NO: 1602019 - RNA, 19 nt, Artificial Sequence
  Description of Artificial Sequence: Synthetic oligonucleotide
ugggcauauaaacaagggc

SEQ ID NO: 1602020 - RNA, 19 nt, Artificial Sequence
  Description of Artificial Sequence: Synthetic oligonucleotide
ugaaaucuagagaaacugu

SEQ ID NO: 1602021 - RNA, 19 nt, Artificial Sequence
  Description of Artificial Sequence: Synthetic oligonucleotide
auuaagcacugccagaugu

SEQ ID NO: 1602022 - RNA, 19 nt, Artificial Sequence
  Description of Artificial Sequence: Synthetic oligonucleotide
gagaauauuaauguaggca

SEQ ID NO: 1602023 - RNA, 19 nt, Artificial Sequence
  Description of Artificial Sequence: Synthetic oligonucleotide
ucaggagagaccuuuuagc

SEQ ID NO: 1602024 - RNA, 19 nt, Artificial Sequence
  Description of Artificial Sequence: Synthetic oligonucleotide
uccaucaagcugaucgucg

SEQ ID NO: 1602025 - RNA, 19 nt, Artificial Sequence
  Description of Artificial Sequence: Synthetic oligonucleotide
ugguaaauagucuucugcu

SEQ ID NO: 1602026 - RNA, 19 nt, Artificial Sequence
  Description of Artificial Sequence: Synthetic oligonucleotide
ucugcucacaucuacccag

SEQ ID NO: 1602027 - RNA, 19 nt, Artificial Sequence
  Description of Artificial Sequence: Synthetic oligonucleotide
ucaguguuaagauaacauc

SEQ ID NO: 1602028 - RNA, 19 nt, Artificial Sequence
  Description of Artificial Sequence: Synthetic oligonucleotide
cagaguccuaaguaaaugg

SEQ ID NO: 1602029 - RNA, 19 nt, Artificial Sequence
  Description of Artificial Sequence: Synthetic oligonucleotide
acuacagaggcuccugugg

SEQ ID NO: 1602030 - RNA, 19 nt, Artificial Sequence
  Description of Artificial Sequence: Synthetic oligonucleotide
aagauaacagucacauuuc

SEQ ID NO: 1602031 - RNA, 19 nt, Artificial Sequence
  Description of Artificial Sequence: Synthetic oligonucleotide
ugaucaugggacaggaucu

SEQ ID NO: 1602032 - RNA, 19 nt, Artificial Sequence
  Description of Artificial Sequence: Synthetic oligonucleotide
cuugcaaccuaagaaaccc

SEQ ID NO: 1602033 - RNA, 19 nt, Artificial Sequence
  Description of Artificial Sequence: Synthetic oligonucleotide
cuguuuauaauuaacacgu

SEQ ID NO: 1602034 - RNA, 19 nt, Artificial Sequence
  Description of Artificial Sequence: Synthetic oligonucleotide
uuucacaagaaaucauaca

SEQ ID NO: 1602035 - RNA, 19 nt, Artificial Sequence
  Description of Artificial Sequence: Synthetic oligonucleotide
aaagcauccaguauuugga

SEQ ID NO: 1602036 - RNA, 19 nt, Artificial Sequence
  Description of Artificial Sequence: Synthetic oligonucleotide
uuccuaugcuauaaucggg

SEQ ID NO: 1602037 - RNA, 19 nt, Artificial Sequence
  Description of Artificial Sequence: Synthetic oligonucleotide
guuaagauaacaucauuaa

SEQ ID NO: 1602038 - RNA, 19 nt, Artificial Sequence
  Description of Artificial Sequence: Synthetic oligonucleotide
augaaaucuagagaaacug

SEQ ID NO: 1602039 - RNA, 19 nt, Artificial Sequence
  Description of Artificial Sequence: Synthetic oligonucleotide
cucacaucuacccagacca

SEQ ID NO: 1602040 - RNA, 19 nt, Artificial Sequence
  Description of Artificial Sequence: Synthetic oligonucleotide
ugaugaaaucuagagaaac

SEQ ID NO: 1602041 - RNA, 19 nt, Artificial Sequence
  Description of Artificial Sequence: Synthetic oligonucleotide
aaaguucacaguccgcgca

SEQ ID NO: 1602042 - RNA, 19 nt, Artificial Sequence
  Description of Artificial Sequence: Synthetic oligonucleotide
uaauuaacacguugcuucc

SEQ ID NO: 1602043 - RNA, 19 nt, Artificial Sequence
  Description of Artificial Sequence: Synthetic oligonucleotide
uaugcuauaaucggggaaa

SEQ ID NO: 1602044 - RNA, 19 nt, Artificial Sequence
  Description of Artificial Sequence: Synthetic oligonucleotide
guaaauagucuucugcuca

SEQ ID NO: 1602045 - RNA, 19 nt, Artificial Sequence
  Description of Artificial Sequence: Synthetic oligonucleotide
ugauaucucccugagauaa

SEQ ID NO: 1602046 - RNA, 19 nt, Artificial Sequence
  Description of Artificial Sequence: Synthetic oligonucleotide
aagaaacccgggcaaaaga

SEQ ID NO: 1602047 - RNA, 19 nt, Artificial Sequence
  Description of Artificial Sequence: Synthetic oligonucleotide
uguccauauggcuuugaag

SEQ ID NO: 1602048 - RNA, 19 nt, Artificial Sequence
  Description of Artificial Sequence: Synthetic oligonucleotide
caguguuaagauaacauca

SEQ ID NO: 1602049 - RNA, 19 nt, Artificial Sequence
  Description of Artificial Sequence: Synthetic oligonucleotide
aaucuguccagugggaaug

SEQ ID NO: 1602050 - RNA, 19 nt, Artificial Sequence
  Description of Artificial Sequence: Synthetic oligonucleotide
uggacaaauccaauagcca

SEQ ID NO: 1602051 - RNA, 19 nt, Artificial Sequence
  Description of Artificial Sequence: Synthetic oligonucleotide
ggcaagaaacuacagaggc

SEQ ID NO: 1602052 - RNA, 19 nt, Artificial Sequence
  Description of Artificial Sequence: Synthetic oligonucleotide
aacaauauauacagucuga

SEQ ID NO: 1602053 - RNA, 19 nt, Artificial Sequence
  Description of Artificial Sequence: Synthetic oligonucleotide
aggaagaaccuccugucag

SEQ ID NO: 1602054 - RNA, 19 nt, Artificial Sequence
  Description of Artificial Sequence: Synthetic oligonucleotide
agagaaacugugcauuugu

SEQ ID NO: 1602055 - RNA, 19 nt, Artificial Sequence
  Description of Artificial Sequence: Synthetic oligonucleotide
uaaguaguuggaugaacac

SEQ ID NO: 1602056 - RNA, 19 nt, Artificial Sequence
  Description of Artificial Sequence: Synthetic oligonucleotide
uuaggaaaucugcuuuggc

SEQ ID NO: 1602057 - RNA, 19 nt, Artificial Sequence
  Description of Artificial Sequence: Synthetic oligonucleotide
ugaagcuuguuuucacaag

SEQ ID NO: 1602058 - RNA, 19 nt, Artificial Sequence
  Description of Artificial Sequence: Synthetic oligonucleotide
caguuguagagucacuagg

SEQ ID NO: 1602059 - RNA, 19 nt, Artificial Sequence
  Description of Artificial Sequence: Synthetic oligonucleotide
uggacgaaacuuuucccag

SEQ ID NO: 1602060 - RNA, 19 nt, Artificial Sequence
  Description of Artificial Sequence: Synthetic oligonucleotide
cugggcauauaaacaaggg

SEQ ID NO: 1602061 - RNA, 19 nt, Artificial Sequence
  Description of Artificial Sequence: Synthetic oligonucleotide
ugaauacucuggaggauga

SEQ ID NO: 1602062 - RNA, 19 nt, Artificial Sequence
  Description of Artificial Sequence: Synthetic oligonucleotide
uuggcuuagucauugucac

SEQ ID NO: 1602063 - RNA, 19 nt, Artificial Sequence
  Description of Artificial Sequence: Synthetic oligonucleotide
aggaaaucugcuuuggcaa

SEQ ID NO: 1602064 - RNA, 19 nt, Artificial Sequence
  Description of Artificial Sequence: Synthetic oligonucleotide
cuaaguaguuggaugaaca

SEQ ID NO: 1602065 - RNA, 19 nt, Artificial Sequence
  Description of Artificial Sequence: Synthetic oligonucleotide
aauuaagcacugccagaug

SEQ ID NO: 1602066 - RNA, 19 nt, Artificial Sequence
  Description of Artificial Sequence: Synthetic oligonucleotide
accaacuaugguuagcagu

SEQ ID NO: 1602067 - RNA, 19 nt, Artificial Sequence
  Description of Artificial Sequence: Synthetic oligonucleotide
ucuccuuuaacuacagguu

SEQ ID NO: 1602068 - RNA, 19 nt, Artificial Sequence
  Description of Artificial Sequence: Synthetic oligonucleotide
caauauggcuaauaaucug

SEQ ID NO: 1602069 - RNA, 19 nt, Artificial Sequence
  Description of Artificial Sequence: Synthetic oligonucleotide
aucggggaaauauaagaca

SEQ ID NO: 1602070 - RNA, 19 nt, Artificial Sequence
  Description of Artificial Sequence: Synthetic oligonucleotide
cuucugcucacaucuaccc

SEQ ID NO: 1602071 - RNA, 19 nt, Artificial Sequence
  Description of Artificial Sequence: Synthetic oligonucleotide
uguuuggacaaauccaaua

SEQ ID NO: 1602072 - RNA, 19 nt, Artificial Sequence
  Description of Artificial Sequence: Synthetic oligonucleotide
ucagucaguucuugcaacc

SEQ ID NO: 1602073 - RNA, 19 nt, Artificial Sequence
  Description of Artificial Sequence: Synthetic oligonucleotide
uguuuucacaagaaaucau

SEQ ID NO: 1602074 - RNA, 19 nt, Artificial Sequence
  Description of Artificial Sequence: Synthetic oligonucleotide
ugaccaacuaugguuagca

SEQ ID NO: 1602075 - RNA, 19 nt, Artificial Sequence
  Description of Artificial Sequence: Synthetic oligonucleotide
cuuagucauugucacagug

SEQ ID NO: 1602076 - RNA, 19 nt, Artificial Sequence
  Description of Artificial Sequence: Synthetic oligonucleotide
aacuacagaggcuccugug

SEQ ID NO: 1602077 - RNA, 19 nt, Artificial Sequence
  Description of Artificial Sequence: Synthetic oligonucleotide
uaaauagucuucugcucac

SEQ ID NO: 1602078 - RNA, 19 nt, Artificial Sequence
  Description of Artificial Sequence: Synthetic oligonucleotide
ugcuuccaaauacuccggg

SEQ ID NO: 1602079 - RNA, 19 nt, Artificial Sequence
  Description of Artificial Sequence: Synthetic oligonucleotide
guucuugcaaccuaagaaa

SEQ ID NO: 1602080 - RNA, 19 nt, Artificial Sequence
  Description of Artificial Sequence: Synthetic oligonucleotide
uugcaaccuaagaaacccg

SEQ ID NO: 1602081 - RNA, 19 nt, Artificial Sequence
  Description of Artificial Sequence: Synthetic oligonucleotide
agaguccuaaguaaauggg

SEQ ID NO: 1602082 - RNA, 19 nt, Artificial Sequence
  Description of Artificial Sequence: Synthetic oligonucleotide
ucgucgugaccaacuaugg

SEQ ID NO: 1602083 - RNA, 19 nt, Artificial Sequence
  Description of Artificial Sequence: Synthetic oligonucleotide
uuucagaucucgacagaca

SEQ ID NO: 1602084 - RNA, 19 nt, Artificial Sequence
  Description of Artificial Sequence: Synthetic oligonucleotide
auuaauguaggcagcauaa

SEQ ID NO: 1602085 - RNA, 19 nt, Artificial Sequence
  Description of Artificial Sequence: Synthetic oligonucleotide
cuugauaucucccugagau

SEQ ID NO: 1602086 - RNA, 19 nt, Artificial Sequence
  Description of Artificial Sequence: Synthetic oligonucleotide
cacuagggagguaaucugg

SEQ ID NO: 1602087 - RNA, 19 nt, Artificial Sequence
  Description of Artificial Sequence: Synthetic oligonucleotide
gauugcuugucuucucaug

SEQ ID NO: 1602088 - RNA, 19 nt, Artificial Sequence
  Description of Artificial Sequence: Synthetic oligonucleotide
ugagcucuuucagaucucg

SEQ ID NO: 1602089 - RNA, 19 nt, Artificial Sequence
  Description of Artificial Sequence: Synthetic oligonucleotide
cuuggcuuagucauuguca

SEQ ID NO: 1602090 - RNA, 19 nt, Artificial Sequence
  Description of Artificial Sequence: Synthetic oligonucleotide
aaggaggugauugcuuguc

SEQ ID NO: 1602091 - RNA, 19 nt, Artificial Sequence
  Description of Artificial Sequence: Synthetic oligonucleotide
uuuucgaguaucgcguuca

SEQ ID NO: 1602092 - RNA, 19 nt, Artificial Sequence
  Description of Artificial Sequence: Synthetic oligonucleotide
cagaucucgacagacagug

SEQ ID NO: 1602093 - RNA, 19 nt, Artificial Sequence
  Description of Artificial Sequence: Synthetic oligonucleotide
ucuagagaaacugugcauu

SEQ ID NO: 1602094 - RNA, 19 nt, Artificial Sequence
  Description of Artificial Sequence: Synthetic oligonucleotide
uauaagacaaaugguucaa

SEQ ID NO: 1602095 - RNA, 19 nt, Artificial Sequence
  Description of Artificial Sequence: Synthetic oligonucleotide
agagcagaacagauugugc

SEQ ID NO: 1602096 - RNA, 19 nt, Artificial Sequence
  Description of Artificial Sequence: Synthetic oligonucleotide
aacacguugcuuccaaaua

SEQ ID NO: 1602097 - RNA, 19 nt, Artificial Sequence
  Description of Artificial Sequence: Synthetic oligonucleotide
guaaauggguuucaggcaa

SEQ ID NO: 1602098 - RNA, 19 nt, Artificial Sequence
  Description of Artificial Sequence: Synthetic oligonucleotide
cuaugguuagcaguuguag

SEQ ID NO: 1602099 - RNA, 19 nt, Artificial Sequence
  Description of Artificial Sequence: Synthetic oligonucleotide
uaaacaagggcugcuggca

SEQ ID NO: 1602100 - RNA, 19 nt, Artificial Sequence
  Description of Artificial Sequence: Synthetic oligonucleotide
cuuuuagcuguccuggguc

SEQ ID NO: 1602101 - RNA, 19 nt, Artificial Sequence
  Description of Artificial Sequence: Synthetic oligonucleotide
gucaggagagaccuuuuag

SEQ ID NO: 1602102 - RNA, 19 nt, Artificial Sequence
  Description of Artificial Sequence: Synthetic oligonucleotide
aggcucaauauuucuccac

SEQ ID NO: 1602103 - RNA, 19 nt, Artificial Sequence
  Description of Artificial Sequence: Synthetic oligonucleotide
uucacaguccgcgcaauag

SEQ ID NO: 1602104 - RNA, 19 nt, Artificial Sequence
  Description of Artificial Sequence: Synthetic oligonucleotide
aaacggucugcauugcuuu

SEQ ID NO: 1602105 - RNA, 19 nt, Artificial Sequence
  Description of Artificial Sequence: Synthetic oligonucleotide
uaagaaacccgggcaaaag

SEQ ID NO: 1602106 - RNA, 19 nt, Artificial Sequence
  Description of Artificial Sequence: Synthetic oligonucleotide
aauaguggccuuaggaaau

SEQ ID NO: 1602107 - RNA, 19 nt, Artificial Sequence
  Description of Artificial Sequence: Synthetic oligonucleotide
aaacuacagaggcuccugu

SEQ ID NO: 1602108 - RNA, 19 nt, Artificial Sequence
  Description of Artificial Sequence: Synthetic oligonucleotide
ucacuagggagguaaucug

SEQ ID NO: 1602109 - RNA, 19 nt, Artificial Sequence
  Description of Artificial Sequence: Synthetic oligonucleotide
ucaguucuugcaaccuaag

SEQ ID NO: 1602110 - RNA, 19 nt, Artificial Sequence
  Description of Artificial Sequence: Synthetic oligonucleotide
cuuaggaaaucugcuuugg

SEQ ID NO: 1602111 - RNA, 19 nt, Artificial Sequence
  Description of Artificial Sequence: Synthetic oligonucleotide
agauaacagucacauuucu

SEQ ID NO: 1602112 - RNA, 19 nt, Artificial Sequence
  Description of Artificial Sequence: Synthetic oligonucleotide
uuaugucaaaguucacagu

SEQ ID NO: 1602113 - RNA, 19 nt, Artificial Sequence
  Description of Artificial Sequence: Synthetic oligonucleotide
auccaauagccaaagaacu

SEQ ID NO: 1602114 - RNA, 19 nt, Artificial Sequence
  Description of Artificial Sequence: Synthetic oligonucleotide
aacggucugcauugcuuuc

SEQ ID NO: 1602115 - RNA, 19 nt, Artificial Sequence
  Description of Artificial Sequence: Synthetic oligonucleotide
ugggaacuugauaucuccc

SEQ ID NO: 1602116 - RNA, 19 nt, Artificial Sequence
  Description of Artificial Sequence: Synthetic oligonucleotide
ucucccugagauaaacggu

SEQ ID NO: 1602117 - RNA, 19 nt, Artificial Sequence
  Description of Artificial Sequence: Synthetic oligonucleotide
ucaggugaggcucaauauu

SEQ ID NO: 1602118 - RNA, 19 nt, Artificial Sequence
  Description of Artificial Sequence: Synthetic oligonucleotide
uaaacggucugcauugcuu

SEQ ID NO: 1602119 - RNA, 19 nt, Artificial Sequence
  Description of Artificial Sequence: Synthetic oligonucleotide
guacuuugguccaucaagc

SEQ ID NO: 1602120 - RNA, 19 nt, Artificial Sequence
  Description of Artificial Sequence: Synthetic oligonucleotide
aauaaucuguccaguggga

SEQ ID NO: 1602121 - RNA, 19 nt, Artificial Sequence
  Description of Artificial Sequence: Synthetic oligonucleotide
uaacacguugcuuccaaau

SEQ ID NO: 1602122 - RNA, 19 nt, Artificial Sequence
  Description of Artificial Sequence: Synthetic oligonucleotide
aggagagaccuuuuagcug

SEQ ID NO: 1602123 - RNA, 19 nt, Artificial Sequence
  Description of Artificial Sequence: Synthetic oligonucleotide
auacucuggaggaugauca

SEQ ID NO: 1602124 - RNA, 19 nt, Artificial Sequence
  Description of Artificial Sequence: Synthetic oligonucleotide
uggagguuuccuaugcuau

SEQ ID NO: 1602125 - RNA, 19 nt, Artificial Sequence
  Description of Artificial Sequence: Synthetic oligonucleotide
gaacuugauaucucccuga

SEQ ID NO: 1602126 - RNA, 19 nt, Artificial Sequence
  Description of Artificial Sequence: Synthetic oligonucleotide
ucgugaccaacuaugguua

SEQ ID NO: 1602127 - RNA, 19 nt, Artificial Sequence
  Description of Artificial Sequence: Synthetic oligonucleotide
cucccugagauaaacgguc

SEQ ID NO: 1602128 - RNA, 19 nt, Artificial Sequence
  Description of Artificial Sequence: Synthetic oligonucleotide
agcagaacagaguccuaag

SEQ ID NO: 1602129 - RNA, 19 nt, Artificial Sequence
  Description of Artificial Sequence: Synthetic oligonucleotide
cuuucagaucucgacagac

SEQ ID NO: 1602130 - RNA, 19 nt, Artificial Sequence
  Description of Artificial Sequence: Synthetic oligonucleotide
aucgcguucaccugcuucu

SEQ ID NO: 1602131 - RNA, 19 nt, Artificial Sequence
  Description of Artificial Sequence: Synthetic oligonucleotide
aguauuuggacgaaacuuu

SEQ ID NO: 1602132 - RNA, 19 nt, Artificial Sequence
  Description of Artificial Sequence: Synthetic oligonucleotide
cuaaguaaauggguuucag

SEQ ID NO: 1602133 - RNA, 19 nt, Artificial Sequence
  Description of Artificial Sequence: Synthetic oligonucleotide
uaagagcagaacagauugu

SEQ ID NO: 1602134 - RNA, 19 nt, Artificial Sequence
  Description of Artificial Sequence: Synthetic oligonucleotide
auaaucggggaaauauaag

SEQ ID NO: 1602135 - RNA, 19 nt, Artificial Sequence
  Description of Artificial Sequence: Synthetic oligonucleotide
caaaguucacaguccgcgc

SEQ ID NO: 1602136 - RNA, 19 nt, Artificial Sequence
  Description of Artificial Sequence: Synthetic oligonucleotide
auaguucagagagcagaac

SEQ ID NO: 1602137 - RNA, 19 nt, Artificial Sequence
  Description of Artificial Sequence: Synthetic oligonucleotide
auuucaguguuaagauaac

SEQ ID NO: 1602138 - RNA, 19 nt, Artificial Sequence
  Description of Artificial Sequence: Synthetic oligonucleotide
uggccuuaggaaaucugcu

SEQ ID NO: 1602139 - RNA, 19 nt, Artificial Sequence
  Description of Artificial Sequence: Synthetic oligonucleotide
gcuaauaaucuguccagug

SEQ ID NO: 1602140 - RNA, 19 nt, Artificial Sequence
  Description of Artificial Sequence: Synthetic oligonucleotide
cuuuggcaagaaacuacag

SEQ ID NO: 1602141 - RNA, 19 nt, Artificial Sequence
  Description of Artificial Sequence: Synthetic oligonucleotide
aucgucgugaccaacuaug

SEQ ID NO: 1602142 - RNA, 19 nt, Artificial Sequence
  Description of Artificial Sequence: Synthetic oligonucleotide
aucaaguuccaugcugggg

SEQ ID NO: 1602143 - RNA, 19 nt, Artificial Sequence
  Description of Artificial Sequence: Synthetic oligonucleotide
ggagaauauuaauguaggc

SEQ ID NO: 1602144 - RNA, 19 nt, Artificial Sequence
  Description of Artificial Sequence: Synthetic oligonucleotide
uucaggugaggcucaauau

SEQ ID NO: 1602145 - RNA, 19 nt, Artificial Sequence
  Description of Artificial Sequence: Synthetic oligonucleotide
ucuuucagaucucgacaga

SEQ ID NO: 1602146 - RNA, 19 nt, Artificial Sequence
  Description of Artificial Sequence: Synthetic oligonucleotide
cugaauacucuggaggaug

SEQ ID NO: 1602147 - RNA, 19 nt, Artificial Sequence
  Description of Artificial Sequence: Synthetic oligonucleotide
gaaacuacagaggcuccug

SEQ ID NO: 1602148 - RNA, 19 nt, Artificial Sequence
  Description of Artificial Sequence: Synthetic oligonucleotide
gaucucgacagacagugua

SEQ ID NO: 1602149 - RNA, 19 nt, Artificial Sequence
  Description of Artificial Sequence: Synthetic oligonucleotide
uacuuugguccaucaagcu

SEQ ID NO: 1602150 - RNA, 19 nt, Artificial Sequence
  Description of Artificial Sequence: Synthetic oligonucleotide
uaaucuguccagugggaau

SEQ ID NO: 1602151 - RNA, 19 nt, Artificial Sequence
  Description of Artificial Sequence: Synthetic oligonucleotide
aucuacccagaccaaucag

SEQ ID NO: 1602152 - RNA, 19 nt, Artificial Sequence
  Description of Artificial Sequence: Synthetic oligonucleotide
aucuagagaaacugugcau

SEQ ID NO: 1602153 - RNA, 19 nt, Artificial Sequence
  Description of Artificial Sequence: Synthetic oligonucleotide
guaaucugggaaaagauau

SEQ ID NO: 1602154 - RNA, 19 nt, Artificial Sequence
  Description of Artificial Sequence: Synthetic oligonucleotide
uguuuauaauuaacacguu

SEQ ID NO: 1602155 - RNA, 19 nt, Artificial Sequence
  Description of Artificial Sequence: Synthetic oligonucleotide
ugagauaaacggucugcau

SEQ ID NO: 1602156 - RNA, 19 nt, Artificial Sequence
  Description of Artificial Sequence: Synthetic oligonucleotide
caucaaguuccaugcuggg

SEQ ID NO: 1602157 - RNA, 19 nt, Artificial Sequence
  Description of Artificial Sequence: Synthetic oligonucleotide
guuguagagucacuaggga

SEQ ID NO: 1602158 - RNA, 19 nt, Artificial Sequence
  Description of Artificial Sequence: Synthetic oligonucleotide
agagucacuagggagguaa

SEQ ID NO: 1602159 - RNA, 19 nt, Artificial Sequence
  Description of Artificial Sequence: Synthetic oligonucleotide
uuggagguuuccuaugcua

SEQ ID NO: 1602160 - RNA, 19 nt, Artificial Sequence
  Description of Artificial Sequence: Synthetic oligonucleotide
auaaacggucugcauugcu

SEQ ID NO: 1602161 - RNA, 19 nt, Artificial Sequence
  Description of Artificial Sequence: Synthetic oligonucleotide
uaaucucacugagaaagau

SEQ ID NO: 1602162 - RNA, 19 nt, Artificial Sequence
  Description of Artificial Sequence: Synthetic oligonucleotide
auugugcucaaacccugcu

SEQ ID NO: 1602163 - RNA, 19 nt, Artificial Sequence
  Description of Artificial Sequence: Synthetic oligonucleotide
gaggaugaucaugggacag

SEQ ID NO: 1602164 - RNA, 19 nt, Artificial Sequence
  Description of Artificial Sequence: Synthetic oligonucleotide
agggagguaaucugggaaa

SEQ ID NO: 1602165 - RNA, 19 nt, Artificial Sequence
  Description of Artificial Sequence: Synthetic oligonucleotide
ugauuuucccaugaugcuu

SEQ ID NO: 1602166 - RNA, 19 nt, Artificial Sequence
  Description of Artificial Sequence: Synthetic oligonucleotide
ggacaaauccaauagccaa

SEQ ID NO: 1602167 - RNA, 19 nt, Artificial Sequence
  Description of Artificial Sequence: Synthetic oligonucleotide
uuucccagauaaucucacu

SEQ ID NO: 1602168 - RNA, 19 nt, Artificial Sequence
  Description of Artificial Sequence: Synthetic oligonucleotide
aucaagcugaucgucguga

SEQ ID NO: 1602169 - RNA, 19 nt, Artificial Sequence
  Description of Artificial Sequence: Synthetic oligonucleotide
caaguuccaugcuggggcc

SEQ ID NO: 1602170 - RNA, 19 nt, Artificial Sequence
  Description of Artificial Sequence: Synthetic oligonucleotide
aaucucacugagaaagaua

SEQ ID NO: 1602171 - RNA, 19 nt, Artificial Sequence
  Description of Artificial Sequence: Synthetic oligonucleotide
gagauaaacggucugcauu

SEQ ID NO: 1602172 - RNA, 19 nt, Artificial Sequence
  Description of Artificial Sequence: Synthetic oligonucleotide
ugcuuucuucaggugaggc

SEQ ID NO: 1602173 - RNA, 19 nt, Artificial Sequence
  Description of Artificial Sequence: Synthetic oligonucleotide
gaccaacuaugguuagcag

SEQ ID NO: 1602174 - RNA, 19 nt, Artificial Sequence
  Description of Artificial Sequence: Synthetic oligonucleotide
uuaauguaggcagcauaaa

SEQ ID NO: 1602175 - RNA, 19 nt, Artificial Sequence
  Description of Artificial Sequence: Synthetic oligonucleotide
agcaaaccuguuuggacaa

SEQ ID NO: 1602176 - RNA, 19 nt, Artificial Sequence
  Description of Artificial Sequence: Synthetic oligonucleotide
ucucuuagauauucagcuu

SEQ ID NO: 1602177 - RNA, 19 nt, Artificial Sequence
  Description of Artificial Sequence: Synthetic oligonucleotide
gaaccuccugucaggagag

SEQ ID NO: 1602178 - RNA, 19 nt, Artificial Sequence
  Description of Artificial Sequence: Synthetic oligonucleotide
ucccugagauaaacggucu

SEQ ID NO: 1602179 - RNA, 19 nt, Artificial Sequence
  Description of Artificial Sequence: Synthetic oligonucleotide
ggauaguucagagagcaga

SEQ ID NO: 1602180 - RNA, 19 nt, Artificial Sequence
  Description of Artificial Sequence: Synthetic oligonucleotide
accuccugucaggagagac

SEQ ID NO: 1602181 - RNA, 19 nt, Artificial Sequence
  Description of Artificial Sequence: Synthetic oligonucleotide
ucucgacagacaguguaga

SEQ ID NO: 1602182 - RNA, 19 nt, Artificial Sequence
  Description of Artificial Sequence: Synthetic oligonucleotide
agagaccuuuuagcugucc

SEQ ID NO: 1602183 - RNA, 19 nt, Artificial Sequence
  Description of Artificial Sequence: Synthetic oligonucleotide
uuaacacguugcuuccaaa

SEQ ID NO: 1602184 - RNA, 19 nt, Artificial Sequence
  Description of Artificial Sequence: Synthetic oligonucleotide
auaguggccuuaggaaauc

SEQ ID NO: 1602185 - RNA, 19 nt, Artificial Sequence
  Description of Artificial Sequence: Synthetic oligonucleotide
gauaaacggucugcauugc

SEQ ID NO: 1602186 - RNA, 19 nt, Artificial Sequence
  Description of Artificial Sequence: Synthetic oligonucleotide
ugguuagcaguuguagagu

SEQ ID NO: 1602187 - RNA, 19 nt, Artificial Sequence
  Description of Artificial Sequence: Synthetic oligonucleotide
cuauaaucggggaaauaua

SEQ ID NO: 1602188 - RNA, 19 nt, Artificial Sequence
  Description of Artificial Sequence: Synthetic oligonucleotide
gauugugcucaaacccugc

SEQ ID NO: 1602189 - RNA, 19 nt, Artificial Sequence
  Description of Artificial Sequence: Synthetic oligonucleotide
aguccuaaguaaauggguu

SEQ ID NO: 1602190 - RNA, 19 nt, Artificial Sequence
  Description of Artificial Sequence: Synthetic oligonucleotide
gcucaauauuucuccacag

SEQ ID NO: 1602191 - RNA, 19 nt, Artificial Sequence
  Description of Artificial Sequence: Synthetic oligonucleotide
ugaucgucgugaccaacua

SEQ ID NO: 1602192 - RNA, 19 nt, Artificial Sequence
  Description of Artificial Sequence: Synthetic oligonucleotide
uaaauggguuucaggcaau

SEQ ID NO: 1602193 - RNA, 19 nt, Artificial Sequence
  Description of Artificial Sequence: Synthetic oligonucleotide
agaaacccgggcaaaagau

SEQ ID NO: 1602194 - RNA, 19 nt, Artificial Sequence
  Description of Artificial Sequence: Synthetic oligonucleotide
acuccaaggagaauauuaa

SEQ ID NO: 1602195 - RNA, 19 nt, Artificial Sequence
  Description of Artificial Sequence: Synthetic oligonucleotide
aucucgacagacaguguag

SEQ ID NO: 1602196 - RNA, 19 nt, Artificial Sequence
  Description of Artificial Sequence: Synthetic oligonucleotide
agaaacuacagaggcuccu

SEQ ID NO: 1602197 - RNA, 19 nt, Artificial Sequence
  Description of Artificial Sequence: Synthetic oligonucleotide
gcauccaguauuuggacga

SEQ ID NO: 1602198 - RNA, 19 nt, Artificial Sequence
  Description of Artificial Sequence: Synthetic oligonucleotide
cacaguuuucgaguaucgc

SEQ ID NO: 1602199 - RNA, 19 nt, Artificial Sequence
  Description of Artificial Sequence: Synthetic oligonucleotide
gcaguuguagagucacuag

SEQ ID NO: 1602200 - RNA, 19 nt, Artificial Sequence
  Description of Artificial Sequence: Synthetic oligonucleotide
ucaaagcauccaguauuug

SEQ ID NO: 1602201 - RNA, 19 nt, Artificial Sequence
  Description of Artificial Sequence: Synthetic oligonucleotide
gaggcucaauauuucucca

SEQ ID NO: 1602202 - RNA, 19 nt, Artificial Sequence
  Description of Artificial Sequence: Synthetic oligonucleotide
uugauaucucccugagaua

SEQ ID NO: 1602203 - RNA, 19 nt, Artificial Sequence
  Description of Artificial Sequence: Synthetic oligonucleotide
agauugugcucaaacccug

SEQ ID NO: 1602204 - RNA, 19 nt, Artificial Sequence
  Description of Artificial Sequence: Synthetic oligonucleotide
gguuagcaguuguagaguc

SEQ ID NO: 1602205 - RNA, 19 nt, Artificial Sequence
  Description of Artificial Sequence: Synthetic oligonucleotide
ggagagaccuuuuagcugu

SEQ ID NO: 1602206 - RNA, 19 nt, Artificial Sequence
  Description of Artificial Sequence: Synthetic oligonucleotide
auaaucuguccagugggaa

SEQ ID NO: 1602207 - RNA, 19 nt, Artificial Sequence
  Description of Artificial Sequence: Synthetic oligonucleotide
caaggagaauauuaaugua

SEQ ID NO: 1602208 - RNA, 19 nt, Artificial Sequence
  Description of Artificial Sequence: Synthetic oligonucleotide
uuucgaguaucgcguucac

SEQ ID NO: 1602209 - RNA, 19 nt, Artificial Sequence
  Description of Artificial Sequence: Synthetic oligonucleotide
auaaucucacugagaaaga

SEQ ID NO: 1602210 - RNA, 19 nt, Artificial Sequence
  Description of Artificial Sequence: Synthetic oligonucleotide
aaauacuccggggccccug

SEQ ID NO: 1602211 - RNA, 19 nt, Artificial Sequence
  Description of Artificial Sequence: Synthetic oligonucleotide
agguaaucugggaaaagau

SEQ ID NO: 1602212 - RNA, 19 nt, Artificial Sequence
  Description of Artificial Sequence: Synthetic oligonucleotide
caaacccugcuguuuauaa

SEQ ID NO: 1602213 - RNA, 19 nt, Artificial Sequence
  Description of Artificial Sequence: Synthetic oligonucleotide
gggccagcaaaccuguuug

SEQ ID NO: 1602214 - RNA, 19 nt, Artificial Sequence
  Description of Artificial Sequence: Synthetic oligonucleotide
uucgaguaucgcguucacc

SEQ ID NO: 1602215 - RNA, 19 nt, Artificial Sequence
  Description of Artificial Sequence: Synthetic oligonucleotide
aggaggugauugcuugucu

SEQ ID NO: 1602216 - RNA, 19 nt, Artificial Sequence
  Description of Artificial Sequence: Synthetic oligonucleotide
agugaaaaggcugggcaua

SEQ ID NO: 1602217 - RNA, 19 nt, Artificial Sequence
  Description of Artificial Sequence: Synthetic oligonucleotide
ggcucaauauuucuccaca

SEQ ID NO: 1602218 - RNA, 19 nt, Artificial Sequence
  Description of Artificial Sequence: Synthetic oligonucleotide
gucgugaccaacuaugguu

SEQ ID NO: 1602219 - RNA, 19 nt, Artificial Sequence
  Description of Artificial Sequence: Synthetic oligonucleotide
cuaugcuauaaucggggaa

SEQ ID NO: 1602220 - RNA, 19 nt, Artificial Sequence
  Description of Artificial Sequence: Synthetic oligonucleotide
caguuuucgaguaucgcgu

SEQ ID NO: 1602221 - RNA, 19 nt, Artificial Sequence
  Description of Artificial Sequence: Synthetic oligonucleotide
caucuacccagaccaauca

SEQ ID NO: 1602222 - RNA, 19 nt, Artificial Sequence
  Description of Artificial Sequence: Synthetic oligonucleotide
auagcucugaugaaaucua

SEQ ID NO: 1602223 - RNA, 19 nt, Artificial Sequence
  Description of Artificial Sequence: Synthetic oligonucleotide
ggggauaguucagagagca

SEQ ID NO: 1602224 - RNA, 19 nt, Artificial Sequence
  Description of Artificial Sequence: Synthetic oligonucleotide
gaugaucuuuuaaaauagu

SEQ ID NO: 1602225 - RNA, 19 nt, Artificial Sequence
  Description of Artificial Sequence: Synthetic oligonucleotide
aggugauugcuugucuucu

SEQ ID NO: 1602226 - RNA, 19 nt, Artificial Sequence
  Description of Artificial Sequence: Synthetic oligonucleotide
ccaaggagaauauuaaugu

SEQ ID NO: 1602227 - RNA, 19 nt, Artificial Sequence
  Description of Artificial Sequence: Synthetic oligonucleotide
aggugaggcucaauauuuc

SEQ ID NO: 1602228 - RNA, 19 nt, Artificial Sequence
  Description of Artificial Sequence: Synthetic oligonucleotide
aguuuucgaguaucgcguu

SEQ ID NO: 1602229 - RNA, 19 nt, Artificial Sequence
  Description of Artificial Sequence: Synthetic oligonucleotide
guuuucgaguaucgcguuc

SEQ ID NO: 1602230 - RNA, 19 nt, Artificial Sequence
  Description of Artificial Sequence: Synthetic oligonucleotide
gucacuagggagguaaucu

SEQ ID NO: 1602231 - RNA, 19 nt, Artificial Sequence
  Description of Artificial Sequence: Synthetic oligonucleotide
aaauggguuucaggcaauu

SEQ ID NO: 1602232 - RNA, 19 nt, Artificial Sequence
  Description of Artificial Sequence: Synthetic oligonucleotide
cugagauaaacggucugca

SEQ ID NO: 1602233 - RNA, 19 nt, Artificial Sequence
  Description of Artificial Sequence: Synthetic oligonucleotide
cgcgcaauagcucugauga

SEQ ID NO: 1602234 - RNA, 19 nt, Artificial Sequence
  Description of Artificial Sequence: Synthetic oligonucleotide
gacgaaacuuuucccagau

SEQ ID NO: 1602235 - RNA, 19 nt, Artificial Sequence
  Description of Artificial Sequence: Synthetic oligonucleotide
cgaaacuuuucccagauaa

SEQ ID NO: 1602236 - RNA, 19 nt, Artificial Sequence
  Description of Artificial Sequence: Synthetic oligonucleotide
cugaugaaaucuagagaaa

SEQ ID NO: 1602237 - RNA, 19 nt, Artificial Sequence
  Description of Artificial Sequence: Synthetic oligonucleotide
ugcucacaucuacccagac

SEQ ID NO: 1602238 - RNA, 19 nt, Artificial Sequence
  Description of Artificial Sequence: Synthetic oligonucleotide
gaguccuaaguaaaugggu

SEQ ID NO: 1602239 - RNA, 19 nt, Artificial Sequence
  Description of Artificial Sequence: Synthetic oligonucleotide
caucaagcugaucgucgug

SEQ ID NO: 1602240 - RNA, 19 nt, Artificial Sequence
  Description of Artificial Sequence: Synthetic oligonucleotide
cucuuagauauucagcuuu

SEQ ID NO: 1602241 - RNA, 19 nt, Artificial Sequence
  Description of Artificial Sequence: Synthetic oligonucleotide
aggaucuuuuggagguuuc

SEQ ID NO: 1602242 - RNA, 19 nt, Artificial Sequence
  Description of Artificial Sequence: Synthetic oligonucleotide
uuuggcccaaggaggugau

SEQ ID NO: 1602243 - RNA, 19 nt, Artificial Sequence
  Description of Artificial Sequence: Synthetic oligonucleotide
gcuauaaucggggaaauau

SEQ ID NO: 1602244 - RNA, 19 nt, Artificial Sequence
  Description of Artificial Sequence: Synthetic oligonucleotide
guaguuggaugaacacagc

SEQ ID NO: 1602245 - RNA, 19 nt, Artificial Sequence
  Description of Artificial Sequence: Synthetic oligonucleotide
cuuccauaucucuuagaua

SEQ ID NO: 1602246 - RNA, 19 nt, Artificial Sequence
  Description of Artificial Sequence: Synthetic oligonucleotide
gcaaccuaagaaacccggg

SEQ ID NO: 1602247 - RNA, 19 nt, Artificial Sequence
  Description of Artificial Sequence: Synthetic oligonucleotide
aguggccuuaggaaaucug

SEQ ID NO: 1602248 - RNA, 19 nt, Artificial Sequence
  Description of Artificial Sequence: Synthetic oligonucleotide
cucaauauuucuccacagu

SEQ ID NO: 1602249 - RNA, 19 nt, Artificial Sequence
  Description of Artificial Sequence: Synthetic oligonucleotide
acaguccgcgcaauagcuc

SEQ ID NO: 1602250 - RNA, 19 nt, Artificial Sequence
  Description of Artificial Sequence: Synthetic oligonucleotide
cuagggagguaaucuggga

SEQ ID NO: 1602251 - RNA, 19 nt, Artificial Sequence
  Description of Artificial Sequence: Synthetic oligonucleotide
cgggcaaaagauuugcuuc

SEQ ID NO: 1602252 - RNA, 19 nt, Artificial Sequence
  Description of Artificial Sequence: Synthetic oligonucleotide
agguuuccuaugcuauaau

SEQ ID NO: 1602253 - RNA, 19 nt, Artificial Sequence
  Description of Artificial Sequence: Synthetic oligonucleotide
gugaccaacuaugguuagc

SEQ ID NO: 1602254 - RNA, 19 nt, Artificial Sequence
  Description of Artificial Sequence: Synthetic oligonucleotide
gucaguucuugcaaccuaa

SEQ ID NO: 1602255 - RNA, 19 nt, Artificial Sequence
  Description of Artificial Sequence: Synthetic oligonucleotide
ugcucaaacccugcuguuu

SEQ ID NO: 1602256 - RNA, 19 nt, Artificial Sequence
  Description of Artificial Sequence: Synthetic oligonucleotide
gcagaacagauugugcuca

SEQ ID NO: 1602257 - RNA, 19 nt, Artificial Sequence
  Description of Artificial Sequence: Synthetic oligonucleotide
acuaugguuagcaguugua

SEQ ID NO: 1602258 - RNA, 19 nt, Artificial Sequence
  Description of Artificial Sequence: Synthetic oligonucleotide
aguaucgcguucaccugcu

SEQ ID NO: 1602259 - RNA, 19 nt, Artificial Sequence
  Description of Artificial Sequence: Synthetic oligonucleotide
caguauuuggacgaaacuu

SEQ ID NO: 1602260 - RNA, 19 nt, Artificial Sequence
  Description of Artificial Sequence: Synthetic oligonucleotide
gcuaaguaguuggaugaac

SEQ ID NO: 1602261 - RNA, 19 nt, Artificial Sequence
  Description of Artificial Sequence: Synthetic oligonucleotide
guguccauauggcuuugaa

SEQ ID NO: 1602262 - RNA, 19 nt, Artificial Sequence
  Description of Artificial Sequence: Synthetic oligonucleotide
ugcuauaaucggggaaaua

SEQ ID NO: 1602263 - RNA, 19 nt, Artificial Sequence
  Description of Artificial Sequence: Synthetic oligonucleotide
caacuaugguuagcaguug

SEQ ID NO: 1602264 - RNA, 19 nt, Artificial Sequence
  Description of Artificial Sequence: Synthetic oligonucleotide
acggucugcauugcuuucu

SEQ ID NO: 1602265 - RNA, 19 nt, Artificial Sequence
  Description of Artificial Sequence: Synthetic oligonucleotide
cugaucgucgugaccaacu

SEQ ID NO: 1602266 - RNA, 19 nt, Artificial Sequence
  Description of Artificial Sequence: Synthetic oligonucleotide
cuuuaacuacagguucaca

SEQ ID NO: 1602267 - RNA, 19 nt, Artificial Sequence
  Description of Artificial Sequence: Synthetic oligonucleotide
gauaucucccugagauaaa

SEQ ID NO: 1602268 - RNA, 19 nt, Artificial Sequence
  Description of Artificial Sequence: Synthetic oligonucleotide
cacaguccgcgcaauagcu

SEQ ID NO: 1602269 - RNA, 19 nt, Artificial Sequence
  Description of Artificial Sequence: Synthetic oligonucleotide
cacguugcuuccaaauacu

SEQ ID NO: 1602270 - RNA, 19 nt, Artificial Sequence
  Description of Artificial Sequence: Synthetic oligonucleotide
uacuccggggccccuggua

SEQ ID NO: 1602271 - RNA, 19 nt, Artificial Sequence
  Description of Artificial Sequence: Synthetic oligonucleotide
ggacgaaacuuuucccaga

SEQ ID NO: 1602272 - RNA, 19 nt, Artificial Sequence
  Description of Artificial Sequence: Synthetic oligonucleotide
caggugaggcucaauauuu

SEQ ID NO: 1602273 - RNA, 19 nt, Artificial Sequence
  Description of Artificial Sequence: Synthetic oligonucleotide
cucgacagacaguguagaa

SEQ ID NO: 1602274 - RNA, 19 nt, Artificial Sequence
  Description of Artificial Sequence: Synthetic oligonucleotide
ggcugggcauauaaacaag

SEQ ID NO: 1602275 - RNA, 19 nt, Artificial Sequence
  Description of Artificial Sequence: Synthetic oligonucleotide
augcuauaaucggggaaau

SEQ ID NO: 1602276 - RNA, 19 nt, Artificial Sequence
  Description of Artificial Sequence: Synthetic oligonucleotide
acgaaacuuuucccagaua

SEQ ID NO: 1602277 - RNA, 19 nt, Artificial Sequence
  Description of Artificial Sequence: Synthetic oligonucleotide
ccagugggaaugguuuugg

SEQ ID NO: 1602278 - RNA, 19 nt, Artificial Sequence
  Description of Artificial Sequence: Synthetic oligonucleotide
guuuuggcccaaggaggug

SEQ ID NO: 1602279 - RNA, 19 nt, Artificial Sequence
  Description of Artificial Sequence: Synthetic oligonucleotide
caguccgcgcaauagcucu

SEQ ID NO: 1602280 - RNA, 19 nt, Artificial Sequence
  Description of Artificial Sequence: Synthetic oligonucleotide
guagagucacuagggaggu

SEQ ID NO: 1602281 - RNA, 19 nt, Artificial Sequence
  Description of Artificial Sequence: Synthetic oligonucleotide
ccuguggagaggaagugaa

SEQ ID NO: 1602282 - RNA, 19 nt, Artificial Sequence
  Description of Artificial Sequence: Synthetic oligonucleotide
ccaacuaugguuagcaguu

SEQ ID NO: 1602283 - RNA, 19 nt, Artificial Sequence
  Description of Artificial Sequence: Synthetic oligonucleotide
gaucgucgugaccaacuau

SEQ ID NO: 1602284 - RNA, 19 nt, Artificial Sequence
  Description of Artificial Sequence: Synthetic oligonucleotide
acuauacaauauggcuaau

SEQ ID NO: 1602285 - RNA, 19 nt, Artificial Sequence
  Description of Artificial Sequence: Synthetic oligonucleotide
gguucaaagcauccaguau

SEQ ID NO: 1602286 - RNA, 19 nt, Artificial Sequence
  Description of Artificial Sequence: Synthetic oligonucleotide
aguguccauauggcuuuga

SEQ ID NO: 1602287 - RNA, 19 nt, Artificial Sequence
  Description of Artificial Sequence: Synthetic oligonucleotide
cuccugucaggagagaccu

SEQ ID NO: 1602288 - RNA, 19 nt, Artificial Sequence
  Description of Artificial Sequence: Synthetic oligonucleotide
ccaaauacuccggggcccc

SEQ ID NO: 1602289 - RNA, 19 nt, Artificial Sequence
  Description of Artificial Sequence: Synthetic oligonucleotide
gaaacccgggcaaaagauu

SEQ ID NO: 1602290 - RNA, 19 nt, Artificial Sequence
  Description of Artificial Sequence: Synthetic oligonucleotide
auccaguauuuggacgaaa

SEQ ID NO: 1602291 - RNA, 19 nt, Artificial Sequence
  Description of Artificial Sequence: Synthetic oligonucleotide
uccgcgcaauagcucugau

SEQ ID NO: 1602292 - RNA, 19 nt, Artificial Sequence
  Description of Artificial Sequence: Synthetic oligonucleotide
aguucacaguccgcgcaau

SEQ ID NO: 1602293 - RNA, 19 nt, Artificial Sequence
  Description of Artificial Sequence: Synthetic oligonucleotide
ccuaugcuauaaucgggga

SEQ ID NO: 1602294 - RNA, 19 nt, Artificial Sequence
  Description of Artificial Sequence: Synthetic oligonucleotide
ccaauagccaaagaacucu

SEQ ID NO: 1602295 - RNA, 19 nt, Artificial Sequence
  Description of Artificial Sequence: Synthetic oligonucleotide
guucacaguccgcgcaaua

SEQ ID NO: 1602296 - RNA, 19 nt, Artificial Sequence
  Description of Artificial Sequence: Synthetic oligonucleotide
agaucucgacagacagugu

SEQ ID NO: 1602297 - RNA, 19 nt, Artificial Sequence
  Description of Artificial Sequence: Synthetic oligonucleotide
auacuccggggccccuggu

SEQ ID NO: 1602298 - RNA, 19 nt, Artificial Sequence
  Description of Artificial Sequence: Synthetic oligonucleotide
cccugagauaaacggucug

SEQ ID NO: 1602299 - RNA, 19 nt, Artificial Sequence
  Description of Artificial Sequence: Synthetic oligonucleotide
ccccugguaaauagucuuc

SEQ ID NO: 1602300 - RNA, 19 nt, Artificial Sequence
  Description of Artificial Sequence: Synthetic oligonucleotide
aguccgcgcaauagcucug

SEQ ID NO: 1602301 - RNA, 19 nt, Artificial Sequence
  Description of Artificial Sequence: Synthetic oligonucleotide
gggccccugguaaauaguc

SEQ ID NO: 1602302 - RNA, 19 nt, Artificial Sequence
  Description of Artificial Sequence: Synthetic oligonucleotide
ucgcguucaccugcuucuc

SEQ ID NO: 1602303 - RNA, 19 nt, Artificial Sequence
  Description of Artificial Sequence: Synthetic oligonucleotide
uccggggccccugguaaau

SEQ ID NO: 1602304 - RNA, 19 nt, Artificial Sequence
  Description of Artificial Sequence: Synthetic oligonucleotide
gccagcaaaccuguuugga

SEQ ID NO: 1602305 - RNA, 19 nt, Artificial Sequence
  Description of Artificial Sequence: Synthetic oligonucleotide
ccgcgcaauagcucugaug

SEQ ID NO: 1602306 - RNA, 19 nt, Artificial Sequence
  Description of Artificial Sequence: Synthetic oligonucleotide
gcaagaaacuacagaggcu

SEQ ID NO: 1602307 - RNA, 19 nt, Artificial Sequence
  Description of Artificial Sequence: Synthetic oligonucleotide
cgugaccaacuaugguuag

SEQ ID NO: 1602308 - RNA, 19 nt, Artificial Sequence
  Description of Artificial Sequence: Synthetic oligonucleotide
gaucaugggacaggaucuu

SEQ ID NO: 1602309 - RNA, 19 nt, Artificial Sequence
  Description of Artificial Sequence: Synthetic oligonucleotide
ccacaauacuauacaauau

SEQ ID NO: 1602310 - RNA, 19 nt, Artificial Sequence
  Description of Artificial Sequence: Synthetic oligonucleotide
gaugaucaugggacaggau

SEQ ID NO: 1602311 - RNA, 19 nt, Artificial Sequence
  Description of Artificial Sequence: Synthetic oligonucleotide
gaauacucuggaggaugau

SEQ ID NO: 1602312 - RNA, 19 nt, Artificial Sequence
  Description of Artificial Sequence: Synthetic oligonucleotide
caguguccauauggcuuug

SEQ ID NO: 1602313 - RNA, 19 nt, Artificial Sequence
  Description of Artificial Sequence: Synthetic oligonucleotide
cauccaguauuuggacgaa

SEQ ID NO: 1602314 - RNA, 19 nt, Artificial Sequence
  Description of Artificial Sequence: Synthetic oligonucleotide
ccaguauuuggacgaaacu

SEQ ID NO: 1602315 - RNA, 19 nt, Artificial Sequence
  Description of Artificial Sequence: Synthetic oligonucleotide
uagagucacuagggaggua

SEQ ID NO: 1602316 - RNA, 19 nt, Artificial Sequence
  Description of Artificial Sequence: Synthetic oligonucleotide
guccgcgcaauagcucuga

SEQ ID NO: 1602317 - RNA, 19 nt, Artificial Sequence
  Description of Artificial Sequence: Synthetic oligonucleotide
ggccuuaggaaaucugcuu

SEQ ID NO: 1602318 - RNA, 19 nt, Artificial Sequence
  Description of Artificial Sequence: Synthetic oligonucleotide
cacaucuacccagaccaau

SEQ ID NO: 1602319 - RNA, 19 nt, Artificial Sequence
  Description of Artificial Sequence: Synthetic oligonucleotide
cgcaauagcucugaugaaa

SEQ ID NO: 1602320 - RNA, 19 nt, Artificial Sequence
  Description of Artificial Sequence: Synthetic oligonucleotide
gccccugguaaauagucuu

SEQ ID NO: 1602321 - RNA, 19 nt, Artificial Sequence
  Description of Artificial Sequence: Synthetic oligonucleotide
ccuaagaaacccgggcaaa

SEQ ID NO: 1602322 - RNA, 19 nt, Artificial Sequence
  Description of Artificial Sequence: Synthetic oligonucleotide
ccuuuuagcuguccugggu

SEQ ID NO: 1602323 - RNA, 19 nt, Artificial Sequence
  Description of Artificial Sequence: Synthetic oligonucleotide
uuggcccaaggaggugauu

SEQ ID NO: 1602324 - RNA, 19 nt, Artificial Sequence
  Description of Artificial Sequence: Synthetic oligonucleotide
cgcguucaccugcuucucc

SEQ ID NO: 1602325 - RNA, 19 nt, Artificial Sequence
  Description of Artificial Sequence: Synthetic oligonucleotide
caggaucuuuuggagguuu

SEQ ID NO: 1602326 - RNA, 19 nt, Artificial Sequence
  Description of Artificial Sequence: Synthetic oligonucleotide
gcgcaauagcucugaugaa

SEQ ID NO: 1602327 - RNA, 19 nt, Artificial Sequence
  Description of Artificial Sequence: Synthetic oligonucleotide
gugcucaaacccugcuguu

SEQ ID NO: 1602328 - RNA, 19 nt, Artificial Sequence
  Description of Artificial Sequence: Synthetic oligonucleotide
ggccagcuaaguaguugga

SEQ ID NO: 1602329 - RNA, 19 nt, Artificial Sequence
  Description of Artificial Sequence: Synthetic oligonucleotide
cuccggggccccugguaaa

SEQ ID NO: 1602330 - RNA, 19 nt, Artificial Sequence
  Description of Artificial Sequence: Synthetic oligonucleotide
gccagcuaaguaguuggau

SEQ ID NO: 1602331 - RNA, 19 nt, Artificial Sequence
  Description of Artificial Sequence: Synthetic oligonucleotide
ggccccugguaaauagucu

SEQ ID NO: 1602332 - RNA, 19 nt, Artificial Sequence
  Description of Artificial Sequence: Synthetic oligonucleotide
caaauacuccggggccccu

SEQ ID NO: 1602333 - RNA, 19 nt, Artificial Sequence
  Description of Artificial Sequence: Synthetic oligonucleotide
guaucgcguucaccugcuu

SEQ ID NO: 1602334 - RNA, 19 nt, Artificial Sequence
  Description of Artificial Sequence: Synthetic oligonucleotide
ggggccccugguaaauagu

SEQ ID NO: 1602335 - RNA, 19 nt, Artificial Sequence
  Description of Artificial Sequence: Synthetic oligonucleotide
cgucgugaccaacuauggu

SEQ ID NO: 1602336 - RNA, 19 nt, Artificial Sequence
  Description of Artificial Sequence: Synthetic oligonucleotide
ccuggccagcuaaguaguu

SEQ ID NO: 1602337 - RNA, 19 nt, Artificial Sequence
  Description of Artificial Sequence: Synthetic oligonucleotide
ccggggccccugguaaaua

SEQ ID NO: 1602338 - RNA, 19 nt, Artificial Sequence
  Description of Artificial Sequence: Synthetic oligonucleotide
aaauaaguaacaucaaaac

SEQ ID NO: 1602339 - RNA, 19 nt, Artificial Sequence
  Description of Artificial Sequence: Synthetic oligonucleotide
uaaguguuuagccauaugg

SEQ ID NO: 1602340 - RNA, 19 nt, Artificial Sequence
  Description of Artificial Sequence: Synthetic oligonucleotide
uucaguaugaaauuuaggc

SEQ ID NO: 1602341 - RNA, 19 nt, Artificial Sequence
  Description of Artificial Sequence: Synthetic oligonucleotide
uccuaaugaaguuugaucg

SEQ ID NO: 1602342 - RNA, 19 nt, Artificial Sequence
  Description of Artificial Sequence: Synthetic oligonucleotide
aaugaaguuugaucgauac

SEQ ID NO: 1602343 - RNA, 19 nt, Artificial Sequence
  Description of Artificial Sequence: Synthetic oligonucleotide
aacuauauucaauguaacc

SEQ ID NO: 1602344 - RNA, 19 nt, Artificial Sequence
  Description of Artificial Sequence: Synthetic oligonucleotide
ugauauuucuccaacaaag

SEQ ID NO: 1602345 - RNA, 19 nt, Artificial Sequence
  Description of Artificial Sequence: Synthetic oligonucleotide
uguuuuaagaucuguaagg

SEQ ID NO: 1602346 - RNA, 19 nt, Artificial Sequence
  Description of Artificial Sequence: Synthetic oligonucleotide
aaaggaauugcaucaacgg

SEQ ID NO: 1602347 - RNA, 19 nt, Artificial Sequence
  Description of Artificial Sequence: Synthetic oligonucleotide
aaucacaauuuauaacugc

SEQ ID NO: 1602348 - RNA, 19 nt, Artificial Sequence
  Description of Artificial Sequence: Synthetic oligonucleotide
aauaaguaacaucaaaacu

SEQ ID NO: 1602349 - RNA, 19 nt, Artificial Sequence
  Description of Artificial Sequence: Synthetic oligonucleotide
uuuaagaucuguaagggga

SEQ ID NO: 1602350 - RNA, 19 nt, Artificial Sequence
  Description of Artificial Sequence: Synthetic oligonucleotide
uuuacguugauuuaagugu

SEQ ID NO: 1602351 - RNA, 19 nt, Artificial Sequence
  Description of Artificial Sequence: Synthetic oligonucleotide
auagucucaagauagacag

SEQ ID NO: 1602352 - RNA, 19 nt, Artificial Sequence
  Description of Artificial Sequence: Synthetic oligonucleotide
aaugauagucucaagauag

SEQ ID NO: 1602353 - RNA, 19 nt, Artificial Sequence
  Description of Artificial Sequence: Synthetic oligonucleotide
aguuuagugguauacuugc

SEQ ID NO: 1602354 - RNA, 19 nt, Artificial Sequence
  Description of Artificial Sequence: Synthetic oligonucleotide
uguauuaaugucuaaugag

SEQ ID NO: 1602355 - RNA, 19 nt, Artificial Sequence
  Description of Artificial Sequence: Synthetic oligonucleotide
aaaucuauuacaacuuggc

SEQ ID NO: 1602356 - RNA, 19 nt, Artificial Sequence
  Description of Artificial Sequence: Synthetic oligonucleotide
aaggaauugcaucaacggc

SEQ ID NO: 1602357 - RNA, 19 nt, Artificial Sequence
  Description of Artificial Sequence: Synthetic oligonucleotide
cuuuguuacaguuuagugg

SEQ ID NO: 1602358 - RNA, 19 nt, Artificial Sequence
  Description of Artificial Sequence: Synthetic oligonucleotide
aauguaaccaaaauaaaca

SEQ ID NO: 1602359 - RNA, 19 nt, Artificial Sequence
  Description of Artificial Sequence: Synthetic oligonucleotide
aauuccugaucccuaagac

SEQ ID NO: 1602360 - RNA, 19 nt, Artificial Sequence
  Description of Artificial Sequence: Synthetic oligonucleotide
auauaugugggcaagaaac

SEQ ID NO: 1602361 - RNA, 19 nt, Artificial Sequence
  Description of Artificial Sequence: Synthetic oligonucleotide
aaucuuuuauuuuggaaug

SEQ ID NO: 1602362 - RNA, 19 nt, Artificial Sequence
  Description of Artificial Sequence: Synthetic oligonucleotide
uuuggauuaacacuguugu

SEQ ID NO: 1602363 - RNA, 19 nt, Artificial Sequence
  Description of Artificial Sequence: Synthetic oligonucleotide
acaaguaccacauaugucu

SEQ ID NO: 1602364 - RNA, 19 nt, Artificial Sequence
  Description of Artificial Sequence: Synthetic oligonucleotide
aaugagucacuccuuaguc

SEQ ID NO: 1602365 - RNA, 19 nt, Artificial Sequence
  Description of Artificial Sequence: Synthetic oligonucleotide
auaaguaacaucaaaacug

SEQ ID NO: 1602366 - RNA, 19 nt, Artificial Sequence
  Description of Artificial Sequence: Synthetic oligonucleotide
uguuuuaauccuaaugaag

SEQ ID NO: 1602367 - RNA, 19 nt, Artificial Sequence
  Description of Artificial Sequence: Synthetic oligonucleotide
auuaugagagcucauauga

SEQ ID NO: 1602368 - RNA, 19 nt, Artificial Sequence
  Description of Artificial Sequence: Synthetic oligonucleotide
aaaagggaaaucuauuaca

SEQ ID NO: 1602369 - RNA, 19 nt, Artificial Sequence
  Description of Artificial Sequence: Synthetic oligonucleotide
aaccguuuuacuuuggaug

SEQ ID NO: 1602370 - RNA, 19 nt, Artificial Sequence
  Description of Artificial Sequence: Synthetic oligonucleotide
uuuuacguugauuuaagug

SEQ ID NO: 1602371 - RNA, 19 nt, Artificial Sequence
  Description of Artificial Sequence: Synthetic oligonucleotide
aauuugugaggccaagguc

SEQ ID NO: 1602372 - RNA, 19 nt, Artificial Sequence
  Description of Artificial Sequence: Synthetic oligonucleotide
ugaaguuugaucgauaccu

SEQ ID NO: 1602373 - RNA, 19 nt, Artificial Sequence
  Description of Artificial Sequence: Synthetic oligonucleotide
auuagcaaaagcuggacug

SEQ ID NO: 1602374 - RNA, 19 nt, Artificial Sequence
  Description of Artificial Sequence: Synthetic oligonucleotide
uuuaucuaaaggaauugca

SEQ ID NO: 1602375 - RNA, 19 nt, Artificial Sequence
  Description of Artificial Sequence: Synthetic oligonucleotide
ugaauauauuagcaaaagc

SEQ ID NO: 1602376 - RNA, 19 nt, Artificial Sequence
  Description of Artificial Sequence: Synthetic oligonucleotide
cuaacuguaagacagaaga

SEQ ID NO: 1602377 - RNA, 19 nt, Artificial Sequence
  Description of Artificial Sequence: Synthetic oligonucleotide
agaagaagcaccuggauca

SEQ ID NO: 1602378 - RNA, 19 nt, Artificial Sequence
  Description of Artificial Sequence: Synthetic oligonucleotide
aaauccagcacuugggaug

SEQ ID NO: 1602379 - RNA, 19 nt, Artificial Sequence
  Description of Artificial Sequence: Synthetic oligonucleotide
aaaacuauauucaauguaa

SEQ ID NO: 1602380 - RNA, 19 nt, Artificial Sequence
  Description of Artificial Sequence: Synthetic oligonucleotide
aacuguaagacagaagaag

SEQ ID NO: 1602381 - RNA, 19 nt, Artificial Sequence
  Description of Artificial Sequence: Synthetic oligonucleotide
uauuaaugucuaaugagcu

SEQ ID NO: 1602382 - RNA, 19 nt, Artificial Sequence
  Description of Artificial Sequence: Synthetic oligonucleotide
ugcaucaacggcuaagagg

SEQ ID NO: 1602383 - RNA, 19 nt, Artificial Sequence
  Description of Artificial Sequence: Synthetic oligonucleotide
uguuucagaaacacuugcg

SEQ ID NO: 1602384 - RNA, 19 nt, Artificial Sequence
  Description of Artificial Sequence: Synthetic oligonucleotide
agggaaaucuauuacaacu

SEQ ID NO: 1602385 - RNA, 19 nt, Artificial Sequence
  Description of Artificial Sequence: Synthetic oligonucleotide
aguguuuagccauaugguc

SEQ ID NO: 1602386 - RNA, 19 nt, Artificial Sequence
  Description of Artificial Sequence: Synthetic oligonucleotide
caauguaaccaaaauaaac

SEQ ID NO: 1602387 - RNA, 19 nt, Artificial Sequence
  Description of Artificial Sequence: Synthetic oligonucleotide
uuuuaagaucuguaagggg

SEQ ID NO: 1602388 - RNA, 19 nt, Artificial Sequence
  Description of Artificial Sequence: Synthetic oligonucleotide
aauggcacucaauacacgu

SEQ ID NO: 1602389 - RNA, 19 nt, Artificial Sequence
  Description of Artificial Sequence: Synthetic oligonucleotide
uauauuagcaaaagcugga

SEQ ID NO: 1602390 - RNA, 19 nt, Artificial Sequence
  Description of Artificial Sequence: Synthetic oligonucleotide
uuuggaauggcacucaaua

SEQ ID NO: 1602391 - RNA, 19 nt, Artificial Sequence
  Description of Artificial Sequence: Synthetic oligonucleotide
auaacuacuaagugaguag

SEQ ID NO: 1602392 - RNA, 19 nt, Artificial Sequence
  Description of Artificial Sequence: Synthetic oligonucleotide
uccaacaaagaucaacuca

SEQ ID NO: 1602393 - RNA, 19 nt, Artificial Sequence
  Description of Artificial Sequence: Synthetic oligonucleotide
uguagguuugaauauauua

SEQ ID NO: 1602394 - RNA, 19 nt, Artificial Sequence
  Description of Artificial Sequence: Synthetic oligonucleotide
aagggaaaucuauuacaac

SEQ ID NO: 1602395 - RNA, 19 nt, Artificial Sequence
  Description of Artificial Sequence: Synthetic oligonucleotide
uucagaaacacuugcguug

SEQ ID NO: 1602396 - RNA, 19 nt, Artificial Sequence
  Description of Artificial Sequence: Synthetic oligonucleotide
ugggcaagaaacaagugca

SEQ ID NO: 1602397 - RNA, 19 nt, Artificial Sequence
  Description of Artificial Sequence: Synthetic oligonucleotide
aguaacaucaaaacuguuc

SEQ ID NO: 1602398 - RNA, 19 nt, Artificial Sequence
  Description of Artificial Sequence: Synthetic oligonucleotide
uuaaugucuaaugagcuga

SEQ ID NO: 1602399 - RNA, 19 nt, Artificial Sequence
  Description of Artificial Sequence: Synthetic oligonucleotide
auccuaaugaaguuugauc

SEQ ID NO: 1602400 - RNA, 19 nt, Artificial Sequence
  Description of Artificial Sequence: Synthetic oligonucleotide
uucaaagcuaaacugaauu

SEQ ID NO: 1602401 - RNA, 19 nt, Artificial Sequence
  Description of Artificial Sequence: Synthetic oligonucleotide
uuccugaucccuaagacgu

SEQ ID NO: 1602402 - RNA, 19 nt, Artificial Sequence
  Description of Artificial Sequence: Synthetic oligonucleotide
aucuauauaguaaacaaca

SEQ ID NO: 1602403 - RNA, 19 nt, Artificial Sequence
  Description of Artificial Sequence: Synthetic oligonucleotide
guaacaucaaaacuguuca

SEQ ID NO: 1602404 - RNA, 19 nt, Artificial Sequence
  Description of Artificial Sequence: Synthetic oligonucleotide
uacuaagugaguagcaaug

SEQ ID NO: 1602405 - RNA, 19 nt, Artificial Sequence
  Description of Artificial Sequence: Synthetic oligonucleotide
cauguauuaaugucuaaug

SEQ ID NO: 1602406 - RNA, 19 nt, Artificial Sequence
  Description of Artificial Sequence: Synthetic oligonucleotide
uuaagaucuguaaggggag

SEQ ID NO: 1602407 - RNA, 19 nt, Artificial Sequence
  Description of Artificial Sequence: Synthetic oligonucleotide
uuaucuaaaggaauugcau

SEQ ID NO: 1602408 - RNA, 19 nt, Artificial Sequence
  Description of Artificial Sequence: Synthetic oligonucleotide
uccuuagucccuuugaaga

SEQ ID NO: 1602409 - RNA, 19 nt, Artificial Sequence
  Description of Artificial Sequence: Synthetic oligonucleotide
aagugaguagcaauguaac

SEQ ID NO: 1602410 - RNA, 19 nt, Artificial Sequence
  Description of Artificial Sequence: Synthetic oligonucleotide
uggauuaacacuguugucu

SEQ ID NO: 1602411 - RNA, 19 nt, Artificial Sequence
  Description of Artificial Sequence: Synthetic oligonucleotide
acacgugugaauucccugc

SEQ ID NO: 1602412 - RNA, 19 nt, Artificial Sequence
  Description of Artificial Sequence: Synthetic oligonucleotide
guauuaaugucuaaugagc

SEQ ID NO: 1602413 - RNA, 19 nt, Artificial Sequence
  Description of Artificial Sequence: Synthetic oligonucleotide
aggauaacuacuaagugag

SEQ ID NO: 1602414 - RNA, 19 nt, Artificial Sequence
  Description of Artificial Sequence: Synthetic oligonucleotide
aaacuauauucaauguaac

SEQ ID NO: 1602415 - RNA, 19 nt, Artificial Sequence
  Description of Artificial Sequence: Synthetic oligonucleotide
aucccuaagacguuaauga

SEQ ID NO: 1602416 - RNA, 19 nt, Artificial Sequence
  Description of Artificial Sequence: Synthetic oligonucleotide
ugaacaaguaccacauaug

SEQ ID NO: 1602417 - RNA, 19 nt, Artificial Sequence
  Description of Artificial Sequence: Synthetic oligonucleotide
augagucacuccuuagucc

SEQ ID NO: 1602418 - RNA, 19 nt, Artificial Sequence
  Description of Artificial Sequence: Synthetic oligonucleotide
uaagcaagaugauugcccc

SEQ ID NO: 1602419 - RNA, 19 nt, Artificial Sequence
  Description of Artificial Sequence: Synthetic oligonucleotide
uuuuaucuaaaggaauugc

SEQ ID NO: 1602420 - RNA, 19 nt, Artificial Sequence
  Description of Artificial Sequence: Synthetic oligonucleotide
auuccugaucccuaagacg

SEQ ID NO: 1602421 - RNA, 19 nt, Artificial Sequence
  Description of Artificial Sequence: Synthetic oligonucleotide
auguauuaaugucuaauga

SEQ ID NO: 1602422 - RNA, 19 nt, Artificial Sequence
  Description of Artificial Sequence: Synthetic oligonucleotide
gaggauaacuacuaaguga

SEQ ID NO: 1602423 - RNA, 19 nt, Artificial Sequence
  Description of Artificial Sequence: Synthetic oligonucleotide
uaugugggcaagaaacaag

SEQ ID NO: 1602424 - RNA, 19 nt, Artificial Sequence
  Description of Artificial Sequence: Synthetic oligonucleotide
aaauuuaggcaaagcaguc

SEQ ID NO: 1602425 - RNA, 19 nt, Artificial Sequence
  Description of Artificial Sequence: Synthetic oligonucleotide
aucucauguucuucaaagc

SEQ ID NO: 1602426 - RNA, 19 nt, Artificial Sequence
  Description of Artificial Sequence: Synthetic oligonucleotide
uaagacguuaaugauaguc

SEQ ID NO: 1602427 - RNA, 19 nt, Artificial Sequence
  Description of Artificial Sequence: Synthetic oligonucleotide
uaucuaaaggaauugcauc

SEQ ID NO: 1602428 - RNA, 19 nt, Artificial Sequence
  Description of Artificial Sequence: Synthetic oligonucleotide
uauaugugggcaagaaaca

SEQ ID NO: 1602429 - RNA, 19 nt, Artificial Sequence
  Description of Artificial Sequence: Synthetic oligonucleotide
uuuggaaguggaaggaugu

SEQ ID NO: 1602430 - RNA, 19 nt, Artificial Sequence
  Description of Artificial Sequence: Synthetic oligonucleotide
agaucaacucaucaucguc

SEQ ID NO: 1602431 - RNA, 19 nt, Artificial Sequence
  Description of Artificial Sequence: Synthetic oligonucleotide
acaauuuauaacugcagaa

SEQ ID NO: 1602432 - RNA, 19 nt, Artificial Sequence
  Description of Artificial Sequence: Synthetic oligonucleotide
aucgauaccuucuguacuc

SEQ ID NO: 1602433 - RNA, 19 nt, Artificial Sequence
  Description of Artificial Sequence: Synthetic oligonucleotide
auuaaugucuaaugagcug

SEQ ID NO: 1602434 - RNA, 19 nt, Artificial Sequence
  Description of Artificial Sequence: Synthetic oligonucleotide
caaagaucaacucaucauc

SEQ ID NO: 1602435 - RNA, 19 nt, Artificial Sequence
  Description of Artificial Sequence: Synthetic oligonucleotide
ucuauauaguaaacaacaa

SEQ ID NO: 1602436 - RNA, 19 nt, Artificial Sequence
  Description of Artificial Sequence: Synthetic oligonucleotide
augaaguuugaucgauacc

SEQ ID NO: 1602437 - RNA, 19 nt, Artificial Sequence
  Description of Artificial Sequence: Synthetic oligonucleotide
agacguuaaugauagucuc

SEQ ID NO: 1602438 - RNA, 19 nt, Artificial Sequence
  Description of Artificial Sequence: Synthetic oligonucleotide
aaaacuagguuuagaaaca

SEQ ID NO: 1602439 - RNA, 19 nt, Artificial Sequence
  Description of Artificial Sequence: Synthetic oligonucleotide
agaugauugccccugugag

SEQ ID NO: 1602440 - RNA, 19 nt, Artificial Sequence
  Description of Artificial Sequence: Synthetic oligonucleotide
uaaugagcugaacaaguac

SEQ ID NO: 1602441 - RNA, 19 nt, Artificial Sequence
  Description of Artificial Sequence: Synthetic oligonucleotide
aaaaccguuuuacuuugga

SEQ ID NO: 1602442 - RNA, 19 nt, Artificial Sequence
  Description of Artificial Sequence: Synthetic oligonucleotide
gcucauaugauuuguaaag

SEQ ID NO: 1602443 - RNA, 19 nt, Artificial Sequence
  Description of Artificial Sequence: Synthetic oligonucleotide
aauacacgugugaauuccc

SEQ ID NO: 1602444 - RNA, 19 nt, Artificial Sequence
  Description of Artificial Sequence: Synthetic oligonucleotide
aauugcaucaacggcuaag

SEQ ID NO: 1602445 - RNA, 19 nt, Artificial Sequence
  Description of Artificial Sequence: Synthetic oligonucleotide
ucuaacuguaagacagaag

SEQ ID NO: 1602446 - RNA, 19 nt, Artificial Sequence
  Description of Artificial Sequence: Synthetic oligonucleotide
gaugauugccccugugagg

SEQ ID NO: 1602447 - RNA, 19 nt, Artificial Sequence
  Description of Artificial Sequence: Synthetic oligonucleotide
aagacguuaaugauagucu

SEQ ID NO: 1602448 - RNA, 19 nt, Artificial Sequence
  Description of Artificial Sequence: Synthetic oligonucleotide
ucauguucuucaaagcuaa

SEQ ID NO: 1602449 - RNA, 19 nt, Artificial Sequence
  Description of Artificial Sequence: Synthetic oligonucleotide
agaggauaacuacuaagug

SEQ ID NO: 1602450 - RNA, 19 nt, Artificial Sequence
  Description of Artificial Sequence: Synthetic oligonucleotide
acuagguuuagaaacagca

SEQ ID NO: 1602451 - RNA, 19 nt, Artificial Sequence
  Description of Artificial Sequence: Synthetic oligonucleotide
ccuaagacguuaaugauag

SEQ ID NO: 1602452 - RNA, 19 nt, Artificial Sequence
  Description of Artificial Sequence: Synthetic oligonucleotide
uugagucuaacuguaagac

SEQ ID NO: 1602453 - RNA, 19 nt, Artificial Sequence
  Description of Artificial Sequence: Synthetic oligonucleotide
cuugaaugcuucuuuauga

SEQ ID NO: 1602454 - RNA, 19 nt, Artificial Sequence
  Description of Artificial Sequence: Synthetic oligonucleotide
ucuauauauaugugggcaa

SEQ ID NO: 1602455 - RNA, 19 nt, Artificial Sequence
  Description of Artificial Sequence: Synthetic oligonucleotide
uguaucaaugguugagucu

SEQ ID NO: 1602456 - RNA, 19 nt, Artificial Sequence
  Description of Artificial Sequence: Synthetic oligonucleotide
uauauaugugggcaagaaa

SEQ ID NO: 1602457 - RNA, 19 nt, Artificial Sequence
  Description of Artificial Sequence: Synthetic oligonucleotide
aacuagguuuagaaacagc

SEQ ID NO: 1602458 - RNA, 19 nt, Artificial Sequence
  Description of Artificial Sequence: Synthetic oligonucleotide
aaagggaaaucuauuacaa

SEQ ID NO: 1602459 - RNA, 19 nt, Artificial Sequence
  Description of Artificial Sequence: Synthetic oligonucleotide
ucuuuuauuuuggaauggc

SEQ ID NO: 1602460 - RNA, 19 nt, Artificial Sequence
  Description of Artificial Sequence: Synthetic oligonucleotide
uaacuacuaagugaguagc

SEQ ID NO: 1602461 - RNA, 19 nt, Artificial Sequence
  Description of Artificial Sequence: Synthetic oligonucleotide
uaugaaauuuaggcaaagc

SEQ ID NO: 1602462 - RNA, 19 nt, Artificial Sequence
  Description of Artificial Sequence: Synthetic oligonucleotide
aacagcaugaaaaccagaa

SEQ ID NO: 1602463 - RNA, 19 nt, Artificial Sequence
  Description of Artificial Sequence: Synthetic oligonucleotide
cucauaugauuuguaaagg

SEQ ID NO: 1602464 - RNA, 19 nt, Artificial Sequence
  Description of Artificial Sequence: Synthetic oligonucleotide
aaacuagguuuagaaacag

SEQ ID NO: 1602465 - RNA, 19 nt, Artificial Sequence
  Description of Artificial Sequence: Synthetic oligonucleotide
ugaucgauaccuucuguac

SEQ ID NO: 1602466 - RNA, 19 nt, Artificial Sequence
  Description of Artificial Sequence: Synthetic oligonucleotide
uuagugguauacuugcaaa

SEQ ID NO: 1602467 - RNA, 19 nt, Artificial Sequence
  Description of Artificial Sequence: Synthetic oligonucleotide
ucucuauauauaugugggc

SEQ ID NO: 1602468 - RNA, 19 nt, Artificial Sequence
  Description of Artificial Sequence: Synthetic oligonucleotide
gaaauuugugaggccaagg

SEQ ID NO: 1602469 - RNA, 19 nt, Artificial Sequence
  Description of Artificial Sequence: Synthetic oligonucleotide
auauggucuaagcaagaug

SEQ ID NO: 1602470 - RNA, 19 nt, Artificial Sequence
  Description of Artificial Sequence: Synthetic oligonucleotide
auauuagcaaaagcuggac

SEQ ID NO: 1602471 - RNA, 19 nt, Artificial Sequence
  Description of Artificial Sequence: Synthetic oligonucleotide
aauuuaggcaaagcaguca

SEQ ID NO: 1602472 - RNA, 19 nt, Artificial Sequence
  Description of Artificial Sequence: Synthetic oligonucleotide
aagaucaacucaucaucgu

SEQ ID NO: 1602473 - RNA, 19 nt, Artificial Sequence
  Description of Artificial Sequence: Synthetic oligonucleotide
uaugauuuguaaaggcuuu

SEQ ID NO: 1602474 - RNA, 19 nt, Artificial Sequence
  Description of Artificial Sequence: Synthetic oligonucleotide
ugaguagcaauguaacuua

SEQ ID NO: 1602475 - RNA, 19 nt, Artificial Sequence
  Description of Artificial Sequence: Synthetic oligonucleotide
ucaacggcuaagaggauaa

SEQ ID NO: 1602476 - RNA, 19 nt, Artificial Sequence
  Description of Artificial Sequence: Synthetic oligonucleotide
ggauguuuuaauccuaaug

SEQ ID NO: 1602477 - RNA, 19 nt, Artificial Sequence
  Description of Artificial Sequence: Synthetic oligonucleotide
uuaggugauggauuucugu

SEQ ID NO: 1602478 - RNA, 19 nt, Artificial Sequence
  Description of Artificial Sequence: Synthetic oligonucleotide
agucccuuugaagaagagc

SEQ ID NO: 1602479 - RNA, 19 nt, Artificial Sequence
  Description of Artificial Sequence: Synthetic oligonucleotide
aaugucuaaugagcugaac

SEQ ID NO: 1602480 - RNA, 19 nt, Artificial Sequence
  Description of Artificial Sequence: Synthetic oligonucleotide
agccauauggucuaagcaa

SEQ ID NO: 1602481 - RNA, 19 nt, Artificial Sequence
  Description of Artificial Sequence: Synthetic oligonucleotide
aaaccguuuuacuuuggau

SEQ ID NO: 1602482 - RNA, 19 nt, Artificial Sequence
  Description of Artificial Sequence: Synthetic oligonucleotide
aaguguuuagccauauggu

SEQ ID NO: 1602483 - RNA, 19 nt, Artificial Sequence
  Description of Artificial Sequence: Synthetic oligonucleotide
uuagucccuuugaagaaga

SEQ ID NO: 1602484 - RNA, 19 nt, Artificial Sequence
  Description of Artificial Sequence: Synthetic oligonucleotide
uaugagagcucauaugauu

SEQ ID NO: 1602485 - RNA, 19 nt, Artificial Sequence
  Description of Artificial Sequence: Synthetic oligonucleotide
ugagucuaacuguaagaca

SEQ ID NO: 1602486 - RNA, 19 nt, Artificial Sequence
  Description of Artificial Sequence: Synthetic oligonucleotide
ugaaugagucacuccuuag

SEQ ID NO: 1602487 - RNA, 19 nt, Artificial Sequence
  Description of Artificial Sequence: Synthetic oligonucleotide
uggcacucaauacacgugu

SEQ ID NO: 1602488 - RNA, 19 nt, Artificial Sequence
  Description of Artificial Sequence: Synthetic oligonucleotide
uaacaucaaaacuguucag

SEQ ID NO: 1602489 - RNA, 19 nt, Artificial Sequence
  Description of Artificial Sequence: Synthetic oligonucleotide
agagcauguauuaaugucu

SEQ ID NO: 1602490 - RNA, 19 nt, Artificial Sequence
  Description of Artificial Sequence: Synthetic oligonucleotide
uucuccaacaaagaucaac

SEQ ID NO: 1602491 - RNA, 19 nt, Artificial Sequence
  Description of Artificial Sequence: Synthetic oligonucleotide
aggaauugcaucaacggcu

SEQ ID NO: 1602492 - RNA, 19 nt, Artificial Sequence
  Description of Artificial Sequence: Synthetic oligonucleotide
ggucuaagcaagaugauug

SEQ ID NO: 1602493 - RNA, 19 nt, Artificial Sequence
  Description of Artificial Sequence: Synthetic oligonucleotide
gacagagcauguauuaaug

SEQ ID NO: 1602494 - RNA, 19 nt, Artificial Sequence
  Description of Artificial Sequence: Synthetic oligonucleotide
ugucuuugaauuccugauc

SEQ ID NO: 1602495 - RNA, 19 nt, Artificial Sequence
  Description of Artificial Sequence: Synthetic oligonucleotide
uuacaguuuagugguauac

SEQ ID NO: 1602496 - RNA, 19 nt, Artificial Sequence
  Description of Artificial Sequence: Synthetic oligonucleotide
gauaacuacuaagugagua

SEQ ID NO: 1602497 - RNA, 19 nt, Artificial Sequence
  Description of Artificial Sequence: Synthetic oligonucleotide
gauagucucaagauagaca

SEQ ID NO: 1602498 - RNA, 19 nt, Artificial Sequence
  Description of Artificial Sequence: Synthetic oligonucleotide
uuacguugauuuaaguguu

SEQ ID NO: 1602499 - RNA, 19 nt, Artificial Sequence
  Description of Artificial Sequence: Synthetic oligonucleotide
caauacacgugugaauucc

SEQ ID NO: 1602500 - RNA, 19 nt, Artificial Sequence
  Description of Artificial Sequence: Synthetic oligonucleotide
guaagacagaagaagcacc

SEQ ID NO: 1602501 - RNA, 19 nt, Artificial Sequence
  Description of Artificial Sequence: Synthetic oligonucleotide
uuucagaaacacuugcguu

SEQ ID NO: 1602502 - RNA, 19 nt, Artificial Sequence
  Description of Artificial Sequence: Synthetic oligonucleotide
ugguguaucaaugguugag

SEQ ID NO: 1602503 - RNA, 19 nt, Artificial Sequence
  Description of Artificial Sequence: Synthetic oligonucleotide
uuggaauggcacucaauac

SEQ ID NO: 1602504 - RNA, 19 nt, Artificial Sequence
  Description of Artificial Sequence: Synthetic oligonucleotide
guugagucuaacuguaaga

SEQ ID NO: 1602505 - RNA, 19 nt, Artificial Sequence
  Description of Artificial Sequence: Synthetic oligonucleotide
ugaauuccugaucccuaag

SEQ ID NO: 1602506 - RNA, 19 nt, Artificial Sequence
  Description of Artificial Sequence: Synthetic oligonucleotide
ugauagucucaagauagac

SEQ ID NO: 1602507 - RNA, 19 nt, Artificial Sequence
  Description of Artificial Sequence: Synthetic oligonucleotide
gacugaaugagucacuccu

SEQ ID NO: 1602508 - RNA, 19 nt, Artificial Sequence
  Description of Artificial Sequence: Synthetic oligonucleotide
ucuuugaauuccugauccc

SEQ ID NO: 1602509 - RNA, 19 nt, Artificial Sequence
  Description of Artificial Sequence: Synthetic oligonucleotide
acuuuggauggucauuaug

SEQ ID NO: 1602510 - RNA, 19 nt, Artificial Sequence
  Description of Artificial Sequence: Synthetic oligonucleotide
caguuuagugguauacuug

SEQ ID NO: 1602511 - RNA, 19 nt, Artificial Sequence
  Description of Artificial Sequence: Synthetic oligonucleotide
aacggcuaagaggauaacu

SEQ ID NO: 1602512 - RNA, 19 nt, Artificial Sequence
  Description of Artificial Sequence: Synthetic oligonucleotide
gaauuccugaucccuaaga

SEQ ID NO: 1602513 - RNA, 19 nt, Artificial Sequence
  Description of Artificial Sequence: Synthetic oligonucleotide
agaaacacuugcguugguc

SEQ ID NO: 1602514 - RNA, 19 nt, Artificial Sequence
  Description of Artificial Sequence: Synthetic oligonucleotide
agugaguagcaauguaacu

SEQ ID NO: 1602515 - RNA, 19 nt, Artificial Sequence
  Description of Artificial Sequence: Synthetic oligonucleotide
uguuuagccauauggucua

SEQ ID NO: 1602516 - RNA, 19 nt, Artificial Sequence
  Description of Artificial Sequence: Synthetic oligonucleotide
auucaguaugaaauuuagg

SEQ ID NO: 1602517 - RNA, 19 nt, Artificial Sequence
  Description of Artificial Sequence: Synthetic oligonucleotide
uggucauuaugagagcuca

SEQ ID NO: 1602518 - RNA, 19 nt, Artificial Sequence
  Description of Artificial Sequence: Synthetic oligonucleotide
uuagcaaaagcuggacuga

SEQ ID NO: 1602519 - RNA, 19 nt, Artificial Sequence
  Description of Artificial Sequence: Synthetic oligonucleotide
ugcuugagaugaugaagag

SEQ ID NO: 1602520 - RNA, 19 nt, Artificial Sequence
  Description of Artificial Sequence: Synthetic oligonucleotide
augauugccccugugaggu

SEQ ID NO: 1602521 - RNA, 19 nt, Artificial Sequence
  Description of Artificial Sequence: Synthetic oligonucleotide
uugaucgauaccuucugua

SEQ ID NO: 1602522 - RNA, 19 nt, Artificial Sequence
  Description of Artificial Sequence: Synthetic oligonucleotide
agcucauaugauuuguaaa

SEQ ID NO: 1602523 - RNA, 19 nt, Artificial Sequence
  Description of Artificial Sequence: Synthetic oligonucleotide
uuacuuuggauggucauua

SEQ ID NO: 1602524 - RNA, 19 nt, Artificial Sequence
  Description of Artificial Sequence: Synthetic oligonucleotide
guuugaucgauaccuucug

SEQ ID NO: 1602525 - RNA, 19 nt, Artificial Sequence
  Description of Artificial Sequence: Synthetic oligonucleotide
uuaugagagcucauaugau

SEQ ID NO: 1602526 - RNA, 19 nt, Artificial Sequence
  Description of Artificial Sequence: Synthetic oligonucleotide
cucuauauauaugugggca

SEQ ID NO: 1602527 - RNA, 19 nt, Artificial Sequence
  Description of Artificial Sequence: Synthetic oligonucleotide
acugguuuggaacuugaua

SEQ ID NO: 1602528 - RNA, 19 nt, Artificial Sequence
  Description of Artificial Sequence: Synthetic oligonucleotide
uagugguauacuugcaaaa

SEQ ID NO: 1602529 - RNA, 19 nt, Artificial Sequence
  Description of Artificial Sequence: Synthetic oligonucleotide
gguugagucuaacuguaag

SEQ ID NO: 1602530 - RNA, 19 nt, Artificial Sequence
  Description of Artificial Sequence: Synthetic oligonucleotide
uaauccuaaugaaguuuga

SEQ ID NO: 1602531 - RNA, 19 nt, Artificial Sequence
  Description of Artificial Sequence: Synthetic oligonucleotide
uacacgugugaauucccug

SEQ ID NO: 1602532 - RNA, 19 nt, Artificial Sequence
  Description of Artificial Sequence: Synthetic oligonucleotide
ucaauacacgugugaauuc

SEQ ID NO: 1602533 - RNA, 19 nt, Artificial Sequence
  Description of Artificial Sequence: Synthetic oligonucleotide
ugugggcaagaaacaagug

SEQ ID NO: 1602534 - RNA, 19 nt, Artificial Sequence
  Description of Artificial Sequence: Synthetic oligonucleotide
ucuguaaggggaguuuugu

SEQ ID NO: 1602535 - RNA, 19 nt, Artificial Sequence
  Description of Artificial Sequence: Synthetic oligonucleotide
auugcaucaacggcuaaga

SEQ ID NO: 1602536 - RNA, 19 nt, Artificial Sequence
  Description of Artificial Sequence: Synthetic oligonucleotide
gcaucaacggcuaagagga

SEQ ID NO: 1602537 - RNA, 19 nt, Artificial Sequence
  Description of Artificial Sequence: Synthetic oligonucleotide
uggaggaugguguaucaau

SEQ ID NO: 1602538 - RNA, 19 nt, Artificial Sequence
  Description of Artificial Sequence: Synthetic oligonucleotide
cauaugauuuguaaaggcu

SEQ ID NO: 1602539 - RNA, 19 nt, Artificial Sequence
  Description of Artificial Sequence: Synthetic oligonucleotide
uacaguuuagugguauacu

SEQ ID NO: 1602540 - RNA, 19 nt, Artificial Sequence
  Description of Artificial Sequence: Synthetic oligonucleotide
uugaauuccugaucccuaa

SEQ ID NO: 1602541 - RNA, 19 nt, Artificial Sequence
  Description of Artificial Sequence: Synthetic oligonucleotide
uggaucaucuugugaagaa

SEQ ID NO: 1602542 - RNA, 19 nt, Artificial Sequence
  Description of Artificial Sequence: Synthetic oligonucleotide
cuccuuagucccuuugaag

SEQ ID NO: 1602543 - RNA, 19 nt, Artificial Sequence
  Description of Artificial Sequence: Synthetic oligonucleotide
uugcaucaacggcuaagag

SEQ ID NO: 1602544 - RNA, 19 nt, Artificial Sequence
  Description of Artificial Sequence: Synthetic oligonucleotide
gucuaaugagcugaacaag

SEQ ID NO: 1602545 - RNA, 19 nt, Artificial Sequence
  Description of Artificial Sequence: Synthetic oligonucleotide
cuugugcuugagaugauga

SEQ ID NO: 1602546 - RNA, 19 nt, Artificial Sequence
  Description of Artificial Sequence: Synthetic oligonucleotide
uuuaggcaaagcagucacu

SEQ ID NO: 1602547 - RNA, 19 nt, Artificial Sequence
  Description of Artificial Sequence: Synthetic oligonucleotide
uuuccuggugcgcuguuuc

SEQ ID NO: 1602548 - RNA, 19 nt, Artificial Sequence
  Description of Artificial Sequence: Synthetic oligonucleotide
ugaagaccuggauucagua

SEQ ID NO: 1602549 - RNA, 19 nt, Artificial Sequence
  Description of Artificial Sequence: Synthetic oligonucleotide
guaucaaugguugagucua

SEQ ID NO: 1602550 - RNA, 19 nt, Artificial Sequence
  Description of Artificial Sequence: Synthetic oligonucleotide
uaaugaaguuugaucgaua

SEQ ID NO: 1602551 - RNA, 19 nt, Artificial Sequence
  Description of Artificial Sequence: Synthetic oligonucleotide
cuguaagacagaagaagca

SEQ ID NO: 1602552 - RNA, 19 nt, Artificial Sequence
  Description of Artificial Sequence: Synthetic oligonucleotide
ucuaaaggaauugcaucaa

SEQ ID NO: 1602553 - RNA, 19 nt, Artificial Sequence
  Description of Artificial Sequence: Synthetic oligonucleotide
cuuagucccuuugaagaag

SEQ ID NO: 1602554 - RNA, 19 nt, Artificial Sequence
  Description of Artificial Sequence: Synthetic oligonucleotide
ggcaaguaugaguuuuacg

SEQ ID NO: 1602555 - RNA, 19 nt, Artificial Sequence
  Description of Artificial Sequence: Synthetic oligonucleotide
uguuacaguuuagugguau

SEQ ID NO: 1602556 - RNA, 19 nt, Artificial Sequence
  Description of Artificial Sequence: Synthetic oligonucleotide
aacuacuaagugaguagca

SEQ ID NO: 1602557 - RNA, 19 nt, Artificial Sequence
  Description of Artificial Sequence: Synthetic oligonucleotide
aaacacuugcguuggucuu

SEQ ID NO: 1602558 - RNA, 19 nt, Artificial Sequence
  Description of Artificial Sequence: Synthetic oligonucleotide
uuuuggaauggcacucaau

SEQ ID NO: 1602559 - RNA, 19 nt, Artificial Sequence
  Description of Artificial Sequence: Synthetic oligonucleotide
agcaagaugauugccccug

SEQ ID NO: 1602560 - RNA, 19 nt, Artificial Sequence
  Description of Artificial Sequence: Synthetic oligonucleotide
gaguuuuacguugauuuaa

SEQ ID NO: 1602561 - RNA, 19 nt, Artificial Sequence
  Description of Artificial Sequence: Synthetic oligonucleotide
uuuagccauauggucuaag

SEQ ID NO: 1602562 - RNA, 19 nt, Artificial Sequence
  Description of Artificial Sequence: Synthetic oligonucleotide
caaaagcuggacugaauga

SEQ ID NO: 1602563 - RNA, 19 nt, Artificial Sequence
  Description of Artificial Sequence: Synthetic oligonucleotide
uaaugucuaaugagcugaa

SEQ ID NO: 1602564 - RNA, 19 nt, Artificial Sequence
  Description of Artificial Sequence: Synthetic oligonucleotide
uuuacuuuggauggucauu

SEQ ID NO: 1602565 - RNA, 19 nt, Artificial Sequence
  Description of Artificial Sequence: Synthetic oligonucleotide
aucaaugguugagucuaac

SEQ ID NO: 1602566 - RNA, 19 nt, Artificial Sequence
  Description of Artificial Sequence: Synthetic oligonucleotide
gaauggcacucaauacacg

SEQ ID NO: 1602567 - RNA, 19 nt, Artificial Sequence
  Description of Artificial Sequence: Synthetic oligonucleotide
acucaauacacgugugaau

SEQ ID NO: 1602568 - RNA, 19 nt, Artificial Sequence
  Description of Artificial Sequence: Synthetic oligonucleotide
acuacuaagugaguagcaa

SEQ ID NO: 1602569 - RNA, 19 nt, Artificial Sequence
  Description of Artificial Sequence: Synthetic oligonucleotide
gagcucauaugauuuguaa

SEQ ID NO: 1602570 - RNA, 19 nt, Artificial Sequence
  Description of Artificial Sequence: Synthetic oligonucleotide
aagcagucacuggauuagg

SEQ ID NO: 1602571 - RNA, 19 nt, Artificial Sequence
  Description of Artificial Sequence: Synthetic oligonucleotide
aagcaagaugauugccccu

SEQ ID NO: 1602572 - RNA, 19 nt, Artificial Sequence
  Description of Artificial Sequence: Synthetic oligonucleotide
guacuguugacuuguaggu

SEQ ID NO: 1602573 - RNA, 19 nt, Artificial Sequence
  Description of Artificial Sequence: Synthetic oligonucleotide
uuggauuaacacuguuguc

SEQ ID NO: 1602574 - RNA, 19 nt, Artificial Sequence
  Description of Artificial Sequence: Synthetic oligonucleotide
gugcuugagaugaugaaga

SEQ ID NO: 1602575 - RNA, 19 nt, Artificial Sequence
  Description of Artificial Sequence: Synthetic oligonucleotide
auauucaauguaaccaaaa

SEQ ID NO: 1602576 - RNA, 19 nt, Artificial Sequence
  Description of Artificial Sequence: Synthetic oligonucleotide
acguuaaugauagucucaa

SEQ ID NO: 1602577 - RNA, 19 nt, Artificial Sequence
  Description of Artificial Sequence: Synthetic oligonucleotide
cugcugacaucucauguuc

SEQ ID NO: 1602578 - RNA, 19 nt, Artificial Sequence
  Description of Artificial Sequence: Synthetic oligonucleotide
auaccuucuguacucuuuu

SEQ ID NO: 1602579 - RNA, 19 nt, Artificial Sequence
  Description of Artificial Sequence: Synthetic oligonucleotide
guaaggggaguuuuguucu

SEQ ID NO: 1602580 - RNA, 19 nt, Artificial Sequence
  Description of Artificial Sequence: Synthetic oligonucleotide
uuugucuuuccuggugcgc

SEQ ID NO: 1602581 - RNA, 19 nt, Artificial Sequence
  Description of Artificial Sequence: Synthetic oligonucleotide
uggacugaaugagucacuc

SEQ ID NO: 1602582 - RNA, 19 nt, Artificial Sequence
  Description of Artificial Sequence: Synthetic oligonucleotide
ucccuaagacguuaaugau

SEQ ID NO: 1602583 - RNA, 19 nt, Artificial Sequence
  Description of Artificial Sequence: Synthetic oligonucleotide
ucacuccuuagucccuuug

SEQ ID NO: 1602584 - RNA, 19 nt, Artificial Sequence
  Description of Artificial Sequence: Synthetic oligonucleotide
gacguuaaugauagucuca

SEQ ID NO: 1602585 - RNA, 19 nt, Artificial Sequence
  Description of Artificial Sequence: Synthetic oligonucleotide
ugcugacaucucauguucu

SEQ ID NO: 1602586 - RNA, 19 nt, Artificial Sequence
  Description of Artificial Sequence: Synthetic oligonucleotide
auaugugggcaagaaacaa

SEQ ID NO: 1602587 - RNA, 19 nt, Artificial Sequence
  Description of Artificial Sequence: Synthetic oligonucleotide
gaucgauaccuucuguacu

SEQ ID NO: 1602588 - RNA, 19 nt, Artificial Sequence
  Description of Artificial Sequence: Synthetic oligonucleotide
gacagaagaagcaccugga

SEQ ID NO: 1602589 - RNA, 19 nt, Artificial Sequence
  Description of Artificial Sequence: Synthetic oligonucleotide
aaguaccacauaugucuuu

SEQ ID NO: 1602590 - RNA, 19 nt, Artificial Sequence
  Description of Artificial Sequence: Synthetic oligonucleotide
agaacuuucugaagaccug

SEQ ID NO: 1602591 - RNA, 19 nt, Artificial Sequence
  Description of Artificial Sequence: Synthetic oligonucleotide
ggaauggcacucaauacac

SEQ ID NO: 1602592 - RNA, 19 nt, Artificial Sequence
  Description of Artificial Sequence: Synthetic oligonucleotide
aguaugcuggaggauggug

SEQ ID NO: 1602593 - RNA, 19 nt, Artificial Sequence
  Description of Artificial Sequence: Synthetic oligonucleotide
ugagcugaacaaguaccac

SEQ ID NO: 1602594 - RNA, 19 nt, Artificial Sequence
  Description of Artificial Sequence: Synthetic oligonucleotide
auuuuggaauggcacucaa

SEQ ID NO: 1602595 - RNA, 19 nt, Artificial Sequence
  Description of Artificial Sequence: Synthetic oligonucleotide
cugaacaaguaccacauau

SEQ ID NO: 1602596 - RNA, 19 nt, Artificial Sequence
  Description of Artificial Sequence: Synthetic oligonucleotide
uagacagagcauguauuaa

SEQ ID NO: 1602597 - RNA, 19 nt, Artificial Sequence
  Description of Artificial Sequence: Synthetic oligonucleotide
uagucucaagauagacaga

SEQ ID NO: 1602598 - RNA, 19 nt, Artificial Sequence
  Description of Artificial Sequence: Synthetic oligonucleotide
augagagcucauaugauuu

SEQ ID NO: 1602599 - RNA, 19 nt, Artificial Sequence
  Description of Artificial Sequence: Synthetic oligonucleotide
aguaccacauaugucuuua

SEQ ID NO: 1602600 - RNA, 19 nt, Artificial Sequence
  Description of Artificial Sequence: Synthetic oligonucleotide
agagccaggacuacaucug

SEQ ID NO: 1602601 - RNA, 19 nt, Artificial Sequence
  Description of Artificial Sequence: Synthetic oligonucleotide
cugcagaaaaguggcuugg

SEQ ID NO: 1602602 - RNA, 19 nt, Artificial Sequence
  Description of Artificial Sequence: Synthetic oligonucleotide
gauggucauuaugagagcu

SEQ ID NO: 1602603 - RNA, 19 nt, Artificial Sequence
  Description of Artificial Sequence: Synthetic oligonucleotide
uugcguuggucuuuggcuu

SEQ ID NO: 1602604 - RNA, 19 nt, Artificial Sequence
  Description of Artificial Sequence: Synthetic oligonucleotide
uaagaucuguaaggggagu

SEQ ID NO: 1602605 - RNA, 19 nt, Artificial Sequence
  Description of Artificial Sequence: Synthetic oligonucleotide
ucuuuggaaguggaaggau

SEQ ID NO: 1602606 - RNA, 19 nt, Artificial Sequence
  Description of Artificial Sequence: Synthetic oligonucleotide
acggcuaagaggauaacua

SEQ ID NO: 1602607 - RNA, 19 nt, Artificial Sequence
  Description of Artificial Sequence: Synthetic oligonucleotide
ugccgaggcagauggaaau

SEQ ID NO: 1602608 - RNA, 19 nt, Artificial Sequence
  Description of Artificial Sequence: Synthetic oligonucleotide
uaucaaugguugagucuaa

SEQ ID NO: 1602609 - RNA, 19 nt, Artificial Sequence
  Description of Artificial Sequence: Synthetic oligonucleotide
aggacuacaucuguucaaa

SEQ ID NO: 1602610 - RNA, 19 nt, Artificial Sequence
  Description of Artificial Sequence: Synthetic oligonucleotide
uggucuaagcaagaugauu

SEQ ID NO: 1602611 - RNA, 19 nt, Artificial Sequence
  Description of Artificial Sequence: Synthetic oligonucleotide
caucaaaacuguucagaaa

SEQ ID NO: 1602612 - RNA, 19 nt, Artificial Sequence
  Description of Artificial Sequence: Synthetic oligonucleotide
augguguaucaaugguuga

SEQ ID NO: 1602613 - RNA, 19 nt, Artificial Sequence
  Description of Artificial Sequence: Synthetic oligonucleotide
cuacaucuguucaaaauau

SEQ ID NO: 1602614 - RNA, 19 nt, Artificial Sequence
  Description of Artificial Sequence: Synthetic oligonucleotide
ggaucaucuugugaagaag

SEQ ID NO: 1602615 - RNA, 19 nt, Artificial Sequence
  Description of Artificial Sequence: Synthetic oligonucleotide
ugaucccuaagacguuaau

SEQ ID NO: 1602616 - RNA, 19 nt, Artificial Sequence
  Description of Artificial Sequence: Synthetic oligonucleotide
gauuuguaaaggcuuuguu

SEQ ID NO: 1602617 - RNA, 19 nt, Artificial Sequence
  Description of Artificial Sequence: Synthetic oligonucleotide
gaugccgaggcagauggaa

SEQ ID NO: 1602618 - RNA, 19 nt, Artificial Sequence
  Description of Artificial Sequence: Synthetic oligonucleotide
uggcuuggaaaaucuuuua

SEQ ID NO: 1602619 - RNA, 19 nt, Artificial Sequence
  Description of Artificial Sequence: Synthetic oligonucleotide
aacacuugcguuggucuuu

SEQ ID NO: 1602620 - RNA, 19 nt, Artificial Sequence
  Description of Artificial Sequence: Synthetic oligonucleotide
guguuuagccauauggucu

SEQ ID NO: 1602621 - RNA, 19 nt, Artificial Sequence
  Description of Artificial Sequence: Synthetic oligonucleotide
uacguugauuuaaguguuu

SEQ ID NO: 1602622 - RNA, 19 nt, Artificial Sequence
  Description of Artificial Sequence: Synthetic oligonucleotide
auuaggugauggauuucug

SEQ ID NO: 1602623 - RNA, 19 nt, Artificial Sequence
  Description of Artificial Sequence: Synthetic oligonucleotide
uggacugguuuggaacuug

SEQ ID NO: 1602624 - RNA, 19 nt, Artificial Sequence
  Description of Artificial Sequence: Synthetic oligonucleotide
aggauguuuuaauccuaau

SEQ ID NO: 1602625 - RNA, 19 nt, Artificial Sequence
  Description of Artificial Sequence: Synthetic oligonucleotide
acgugugaauucccugcug

SEQ ID NO: 1602626 - RNA, 19 nt, Artificial Sequence
  Description of Artificial Sequence: Synthetic oligonucleotide
gucauuaugagagcucaua

SEQ ID NO: 1602627 - RNA, 19 nt, Artificial Sequence
  Description of Artificial Sequence: Synthetic oligonucleotide
ggaaauuugugaggccaag

SEQ ID NO: 1602628 - RNA, 19 nt, Artificial Sequence
  Description of Artificial Sequence: Synthetic oligonucleotide
agcauguauuaaugucuaa

SEQ ID NO: 1602629 - RNA, 19 nt, Artificial Sequence
  Description of Artificial Sequence: Synthetic oligonucleotide
guuacaguuuagugguaua

SEQ ID NO: 1602630 - RNA, 19 nt, Artificial Sequence
  Description of Artificial Sequence: Synthetic oligonucleotide
cuaagugaguagcaaugua

SEQ ID NO: 1602631 - RNA, 19 nt, Artificial Sequence
  Description of Artificial Sequence: Synthetic oligonucleotide
gagcauguauuaaugucua

SEQ ID NO: 1602632 - RNA, 19 nt, Artificial Sequence
  Description of Artificial Sequence: Synthetic oligonucleotide
gucuuuggaaguggaagga

SEQ ID NO: 1602633 - RNA, 19 nt, Artificial Sequence
  Description of Artificial Sequence: Synthetic oligonucleotide
aguagcaauguaacuuaaa

SEQ ID NO: 1602634 - RNA, 19 nt, Artificial Sequence
  Description of Artificial Sequence: Synthetic oligonucleotide
auggcacucaauacacgug

SEQ ID NO: 1602635 - RNA, 19 nt, Artificial Sequence
  Description of Artificial Sequence: Synthetic oligonucleotide
uagcaaaagcuggacugaa

SEQ ID NO: 1602636 - RNA, 19 nt, Artificial Sequence
  Description of Artificial Sequence: Synthetic oligonucleotide
auacacgugugaauucccu

SEQ ID NO: 1602637 - RNA, 19 nt, Artificial Sequence
  Description of Artificial Sequence: Synthetic oligonucleotide
augauagucucaagauaga

SEQ ID NO: 1602638 - RNA, 19 nt, Artificial Sequence
  Description of Artificial Sequence: Synthetic oligonucleotide
guuuuacguugauuuaagu

SEQ ID NO: 1602639 - RNA, 19 nt, Artificial Sequence
  Description of Artificial Sequence: Synthetic oligonucleotide
aucaacggcuaagaggaua

SEQ ID NO: 1602640 - RNA, 19 nt, Artificial Sequence
  Description of Artificial Sequence: Synthetic oligonucleotide
gcuggacugaaugagucac

SEQ ID NO: 1602641 - RNA, 19 nt, Artificial Sequence
  Description of Artificial Sequence: Synthetic oligonucleotide
cacucaauacacgugugaa

SEQ ID NO: 1602642 - RNA, 19 nt, Artificial Sequence
  Description of Artificial Sequence: Synthetic oligonucleotide
gucuaacuguaagacagaa

SEQ ID NO: 1602643 - RNA, 19 nt, Artificial Sequence
  Description of Artificial Sequence: Synthetic oligonucleotide
gaagaccuggauucaguau

SEQ ID NO: 1602644 - RNA, 19 nt, Artificial Sequence
  Description of Artificial Sequence: Synthetic oligonucleotide
cuuugaauuccugaucccu

SEQ ID NO: 1602645 - RNA, 19 nt, Artificial Sequence
  Description of Artificial Sequence: Synthetic oligonucleotide
uacuuuggauggucauuau

SEQ ID NO: 1602646 - RNA, 19 nt, Artificial Sequence
  Description of Artificial Sequence: Synthetic oligonucleotide
cuagguuuagaaacagcau

SEQ ID NO: 1602647 - RNA, 19 nt, Artificial Sequence
  Description of Artificial Sequence: Synthetic oligonucleotide
uguugacuuguagguuuga

SEQ ID NO: 1602648 - RNA, 19 nt, Artificial Sequence
  Description of Artificial Sequence: Synthetic oligonucleotide
gucucaagauagacagagc

SEQ ID NO: 1602649 - RNA, 19 nt, Artificial Sequence
  Description of Artificial Sequence: Synthetic oligonucleotide
acguugauuuaaguguuua

SEQ ID NO: 1602650 - RNA, 19 nt, Artificial Sequence
  Description of Artificial Sequence: Synthetic oligonucleotide
augguugagucuaacugua

SEQ ID NO: 1602651 - RNA, 19 nt, Artificial Sequence
  Description of Artificial Sequence: Synthetic oligonucleotide
agaucuguaaggggaguuu

SEQ ID NO: 1602652 - RNA, 19 nt, Artificial Sequence
  Description of Artificial Sequence: Synthetic oligonucleotide
aggaguuguuucagaaaca

SEQ ID NO: 1602653 - RNA, 19 nt, Artificial Sequence
  Description of Artificial Sequence: Synthetic oligonucleotide
uacuguugacuuguagguu

SEQ ID NO: 1602654 - RNA, 19 nt, Artificial Sequence
  Description of Artificial Sequence: Synthetic oligonucleotide
agaccuggauucaguauga

SEQ ID NO: 1602655 - RNA, 19 nt, Artificial Sequence
  Description of Artificial Sequence: Synthetic oligonucleotide
uuguuacaguuuaguggua

SEQ ID NO: 1602656 - RNA, 19 nt, Artificial Sequence
  Description of Artificial Sequence: Synthetic oligonucleotide
cuacuaagugaguagcaau

SEQ ID NO: 1602657 - RNA, 19 nt, Artificial Sequence
  Description of Artificial Sequence: Synthetic oligonucleotide
uuccuggugcgcuguuucu

SEQ ID NO: 1602658 - RNA, 19 nt, Artificial Sequence
  Description of Artificial Sequence: Synthetic oligonucleotide
guuuagugguauacuugca

SEQ ID NO: 1602659 - RNA, 19 nt, Artificial Sequence
  Description of Artificial Sequence: Synthetic oligonucleotide
agucuaacuguaagacaga

SEQ ID NO: 1602660 - RNA, 19 nt, Artificial Sequence
  Description of Artificial Sequence: Synthetic oligonucleotide
gcuaagaggauaacuacua

SEQ ID NO: 1602661 - RNA, 19 nt, Artificial Sequence
  Description of Artificial Sequence: Synthetic oligonucleotide
cuggaucaucuugugaaga

SEQ ID NO: 1602662 - RNA, 19 nt, Artificial Sequence
  Description of Artificial Sequence: Synthetic oligonucleotide
aaggggaguuuuguucuuu

SEQ ID NO: 1602663 - RNA, 19 nt, Artificial Sequence
  Description of Artificial Sequence: Synthetic oligonucleotide
gagagcucauaugauuugu

SEQ ID NO: 1602664 - RNA, 19 nt, Artificial Sequence
  Description of Artificial Sequence: Synthetic oligonucleotide
agcagucacuggauuaggu

SEQ ID NO: 1602665 - RNA, 19 nt, Artificial Sequence
  Description of Artificial Sequence: Synthetic oligonucleotide
uaaggggaguuuuguucuu

SEQ ID NO: 1602666 - RNA, 19 nt, Artificial Sequence
  Description of Artificial Sequence: Synthetic oligonucleotide
ccuaaugaaguuugaucga

SEQ ID NO: 1602667 - RNA, 19 nt, Artificial Sequence
  Description of Artificial Sequence: Synthetic oligonucleotide
caggacuacaucuguucaa

SEQ ID NO: 1602668 - RNA, 19 nt, Artificial Sequence
  Description of Artificial Sequence: Synthetic oligonucleotide
cacuggauuaggugaugga

SEQ ID NO: 1602669 - RNA, 19 nt, Artificial Sequence
  Description of Artificial Sequence: Synthetic oligonucleotide
cuaaugaaguuugaucgau

SEQ ID NO: 1602670 - RNA, 19 nt, Artificial Sequence
  Description of Artificial Sequence: Synthetic oligonucleotide
ggauuucuguacuguugac

SEQ ID NO: 1602671 - RNA, 19 nt, Artificial Sequence
  Description of Artificial Sequence: Synthetic oligonucleotide
ugcguuggucuuuggcuuu

SEQ ID NO: 1602672 - RNA, 19 nt, Artificial Sequence
  Description of Artificial Sequence: Synthetic oligonucleotide
cuggauuaggugauggauu

SEQ ID NO: 1602673 - RNA, 19 nt, Artificial Sequence
  Description of Artificial Sequence: Synthetic oligonucleotide
gaggccaaggucagccuga

SEQ ID NO: 1602674 - RNA, 19 nt, Artificial Sequence
  Description of Artificial Sequence: Synthetic oligonucleotide
uucuugugcuugagaugau

SEQ ID NO: 1602675 - RNA, 19 nt, Artificial Sequence
  Description of Artificial Sequence: Synthetic oligonucleotide
uuggaaguggaaggauguu

SEQ ID NO: 1602676 - RNA, 19 nt, Artificial Sequence
  Description of Artificial Sequence: Synthetic oligonucleotide
gucuugaaugcuucuuuau

SEQ ID NO: 1602677 - RNA, 19 nt, Artificial Sequence
  Description of Artificial Sequence: Synthetic oligonucleotide
gcacucaauacacguguga

SEQ ID NO: 1602678 - RNA, 19 nt, Artificial Sequence
  Description of Artificial Sequence: Synthetic oligonucleotide
cuggauucaguaugaaauu

SEQ ID NO: 1602679 - RNA, 19 nt, Artificial Sequence
  Description of Artificial Sequence: Synthetic oligonucleotide
ggucuugaaugcuucuuua

SEQ ID NO: 1602680 - RNA, 19 nt, Artificial Sequence
  Description of Artificial Sequence: Synthetic oligonucleotide
gauugccccugugaggucu

SEQ ID NO: 1602681 - RNA, 19 nt, Artificial Sequence
  Description of Artificial Sequence: Synthetic oligonucleotide
uccugaucccuaagacguu

SEQ ID NO: 1602682 - RNA, 19 nt, Artificial Sequence
  Description of Artificial Sequence: Synthetic oligonucleotide
gaauugcaucaacggcuaa

SEQ ID NO: 1602683 - RNA, 19 nt, Artificial Sequence
  Description of Artificial Sequence: Synthetic oligonucleotide
cuucaaagcuaaacugaau

SEQ ID NO: 1602684 - RNA, 19 nt, Artificial Sequence
  Description of Artificial Sequence: Synthetic oligonucleotide
guaccacauaugucuuuaa

SEQ ID NO: 1602685 - RNA, 19 nt, Artificial Sequence
  Description of Artificial Sequence: Synthetic oligonucleotide
aggcuuuguuacaguuuag

SEQ ID NO: 1602686 - RNA, 19 nt, Artificial Sequence
  Description of Artificial Sequence: Synthetic oligonucleotide
gguguaucaaugguugagu

SEQ ID NO: 1602687 - RNA, 19 nt, Artificial Sequence
  Description of Artificial Sequence: Synthetic oligonucleotide
ccuggugcgcuguuucuug

SEQ ID NO: 1602688 - RNA, 19 nt, Artificial Sequence
  Description of Artificial Sequence: Synthetic oligonucleotide
cugaucccuaagacguuaa

SEQ ID NO: 1602689 - RNA, 19 nt, Artificial Sequence
  Description of Artificial Sequence: Synthetic oligonucleotide
cggcuaagaggauaacuac

SEQ ID NO: 1602690 - RNA, 19 nt, Artificial Sequence
  Description of Artificial Sequence: Synthetic oligonucleotide
ggaauugcaucaacggcua

SEQ ID NO: 1602691 - RNA, 19 nt, Artificial Sequence
  Description of Artificial Sequence: Synthetic oligonucleotide
gaaguuugaucgauaccuu

SEQ ID NO: 1602692 - RNA, 19 nt, Artificial Sequence
  Description of Artificial Sequence: Synthetic oligonucleotide
caccuggaucaucuuguga

SEQ ID NO: 1602693 - RNA, 19 nt, Artificial Sequence
  Description of Artificial Sequence: Synthetic oligonucleotide
gucuuuaaauccagcacuu

SEQ ID NO: 1602694 - RNA, 19 nt, Artificial Sequence
  Description of Artificial Sequence: Synthetic oligonucleotide
auggucuaagcaagaugau

SEQ ID NO: 1602695 - RNA, 19 nt, Artificial Sequence
  Description of Artificial Sequence: Synthetic oligonucleotide
ggcuuggaaaaucuuuuau

SEQ ID NO: 1602696 - RNA, 19 nt, Artificial Sequence
  Description of Artificial Sequence: Synthetic oligonucleotide
ugauugccccugugagguc

SEQ ID NO: 1602697 - RNA, 19 nt, Artificial Sequence
  Description of Artificial Sequence: Synthetic oligonucleotide
cccuaagacguuaaugaua

SEQ ID NO: 1602698 - RNA, 19 nt, Artificial Sequence
  Description of Artificial Sequence: Synthetic oligonucleotide
ggcuaagaggauaacuacu

SEQ ID NO: 1602699 - RNA, 19 nt, Artificial Sequence
  Description of Artificial Sequence: Synthetic oligonucleotide
cacuugcguuggucuuugg

SEQ ID NO: 1602700 - RNA, 19 nt, Artificial Sequence
  Description of Artificial Sequence: Synthetic oligonucleotide
ggcacucaauacacgugug

SEQ ID NO: 1602701 - RNA, 19 nt, Artificial Sequence
  Description of Artificial Sequence: Synthetic oligonucleotide
agucacuccuuagucccuu

SEQ ID NO: 1602702 - RNA, 19 nt, Artificial Sequence
  Description of Artificial Sequence: Synthetic oligonucleotide
gcaccuggaucaucuugug

SEQ ID NO: 1602703 - RNA, 19 nt, Artificial Sequence
  Description of Artificial Sequence: Synthetic oligonucleotide
gcuggaggaugguguauca

SEQ ID NO: 1602704 - RNA, 19 nt, Artificial Sequence
  Description of Artificial Sequence: Synthetic oligonucleotide
ccuuagucccuuugaagaa

SEQ ID NO: 1602705 - RNA, 19 nt, Artificial Sequence
  Description of Artificial Sequence: Synthetic oligonucleotide
ugccccugugaggucuuga

SEQ ID NO: 1602706 - RNA, 19 nt, Artificial Sequence
  Description of Artificial Sequence: Synthetic oligonucleotide
ccaggacuacaucuguuca

SEQ ID NO: 1602707 - RNA, 19 nt, Artificial Sequence
  Description of Artificial Sequence: Synthetic oligonucleotide
augccgaggcagauggaaa

SEQ ID NO: 1602708 - RNA, 19 nt, Artificial Sequence
  Description of Artificial Sequence: Synthetic oligonucleotide
caacggcuaagaggauaac

SEQ ID NO: 1602709 - RNA, 19 nt, Artificial Sequence
  Description of Artificial Sequence: Synthetic oligonucleotide
cguuuuacuuuggaugguc

SEQ ID NO: 1602710 - RNA, 19 nt, Artificial Sequence
  Description of Artificial Sequence: Synthetic oligonucleotide
ccauauggucuaagcaaga

SEQ ID NO: 1602711 - RNA, 19 nt, Artificial Sequence
  Description of Artificial Sequence: Synthetic oligonucleotide
cacgugugaauucccugcu

SEQ ID NO: 1602712 - RNA, 19 nt, Artificial Sequence
  Description of Artificial Sequence: Synthetic oligonucleotide
gaccuggauucaguaugaa

SEQ ID NO: 1602713 - RNA, 19 nt, Artificial Sequence
  Description of Artificial Sequence: Synthetic oligonucleotide
gaagaagcaccuggaucau

SEQ ID NO: 1602714 - RNA, 19 nt, Artificial Sequence
  Description of Artificial Sequence: Synthetic oligonucleotide
ggacugguuuggaacuuga

SEQ ID NO: 1602715 - RNA, 19 nt, Artificial Sequence
  Description of Artificial Sequence: Synthetic oligonucleotide
cuggaggaugguguaucaa

SEQ ID NO: 1602716 - RNA, 19 nt, Artificial Sequence
  Description of Artificial Sequence: Synthetic oligonucleotide
agccaggacuacaucuguu

SEQ ID NO: 1602717 - RNA, 19 nt, Artificial Sequence
  Description of Artificial Sequence: Synthetic oligonucleotide
guuuagccauauggucuaa

SEQ ID NO: 1602718 - RNA, 19 nt, Artificial Sequence
  Description of Artificial Sequence: Synthetic oligonucleotide
gacugguuuggaacuugau

SEQ ID NO: 1602719 - RNA, 19 nt, Artificial Sequence
  Description of Artificial Sequence: Synthetic oligonucleotide
gagucacuccuuagucccu

SEQ ID NO: 1602720 - RNA, 19 nt, Artificial Sequence
  Description of Artificial Sequence: Synthetic oligonucleotide
aggccaaggucagccugau

SEQ ID NO: 1602721 - RNA, 19 nt, Artificial Sequence
  Description of Artificial Sequence: Synthetic oligonucleotide
cuggugcgcuguuucuugu

SEQ ID NO: 1602722 - RNA, 19 nt, Artificial Sequence
  Description of Artificial Sequence: Synthetic oligonucleotide
ggauaacuacuaagugagu

SEQ ID NO: 1602723 - RNA, 19 nt, Artificial Sequence
  Description of Artificial Sequence: Synthetic oligonucleotide
auugccccugugaggucuu

SEQ ID NO: 1602724 - RNA, 19 nt, Artificial Sequence
  Description of Artificial Sequence: Synthetic oligonucleotide
cccugcugacaucucaugu

SEQ ID NO: 1602725 - RNA, 19 nt, Artificial Sequence
  Description of Artificial Sequence: Synthetic oligonucleotide
cagaaacacuugcguuggu

SEQ ID NO: 1602726 - RNA, 19 nt, Artificial Sequence
  Description of Artificial Sequence: Synthetic oligonucleotide
gggcaagaaacaagugcau

SEQ ID NO: 1602727 - RNA, 19 nt, Artificial Sequence
  Description of Artificial Sequence: Synthetic oligonucleotide
caucaacggcuaagaggau

SEQ ID NO: 1602728 - RNA, 19 nt, Artificial Sequence
  Description of Artificial Sequence: Synthetic oligonucleotide
ggucauuaugagagcucau

SEQ ID NO: 1602729 - RNA, 19 nt, Artificial Sequence
  Description of Artificial Sequence: Synthetic oligonucleotide
ggaugccgaggcagaugga

SEQ ID NO: 1602730 - RNA, 19 nt, Artificial Sequence
  Description of Artificial Sequence: Synthetic oligonucleotide
gccgaggcagauggaaauu

SEQ ID NO: 1602731 - RNA, 19 nt, Artificial Sequence
  Description of Artificial Sequence: Synthetic oligonucleotide
ccgaggcagauggaaauuu

SEQ ID NO: 1602732 - RNA, 19 nt, Artificial Sequence
  Description of Artificial Sequence: Synthetic oligonucleotide
ccguuuuacuuuggauggu

SEQ ID NO: 1602733 - RNA, 19 nt, Artificial Sequence
  Description of Artificial Sequence: Synthetic oligonucleotide
aauauauaaguauaagagc

SEQ ID NO: 1602734 - RNA, 19 nt, Artificial Sequence
  Description of Artificial Sequence: Synthetic oligonucleotide
aacuagaaaaccuucagcc

SEQ ID NO: 1602735 - RNA, 19 nt, Artificial Sequence
  Description of Artificial Sequence: Synthetic oligonucleotide
aaauacaccauucaacuuc

SEQ ID NO: 1602736 - RNA, 19 nt, Artificial Sequence
  Description of Artificial Sequence: Synthetic oligonucleotide
gaauggaugacucaguugg

SEQ ID NO: 1602737 - RNA, 19 nt, Artificial Sequence
  Description of Artificial Sequence: Synthetic oligonucleotide
uuugauguuguacaaaugc

SEQ ID NO: 1602738 - RNA, 19 nt, Artificial Sequence
  Description of Artificial Sequence: Synthetic oligonucleotide
ucuucaaucagcaugcugc

SEQ ID NO: 1602739 - RNA, 19 nt, Artificial Sequence
  Description of Artificial Sequence: Synthetic oligonucleotide
aagauagcuuuucauauac

SEQ ID NO: 1602740 - RNA, 19 nt, Artificial Sequence
  Description of Artificial Sequence: Synthetic oligonucleotide
aacucaucagaguucaagc

SEQ ID NO: 1602741 - RNA, 19 nt, Artificial Sequence
  Description of Artificial Sequence: Synthetic oligonucleotide
auggcuaucaguuuagucg

SEQ ID NO: 1602742 - RNA, 19 nt, Artificial Sequence
  Description of Artificial Sequence: Synthetic oligonucleotide
aaauacaacauuaauacgu

SEQ ID NO: 1602743 - RNA, 19 nt, Artificial Sequence
  Description of Artificial Sequence: Synthetic oligonucleotide
uguaaaacagccaaguagu

SEQ ID NO: 1602744 - RNA, 19 nt, Artificial Sequence
  Description of Artificial Sequence: Synthetic oligonucleotide
ucuagaauuugacagagga

SEQ ID NO: 1602745 - RNA, 19 nt, Artificial Sequence
  Description of Artificial Sequence: Synthetic oligonucleotide
ugaauauauaaguauaaga

SEQ ID NO: 1602746 - RNA, 19 nt, Artificial Sequence
  Description of Artificial Sequence: Synthetic oligonucleotide
uauuugaagaaguugccgg

SEQ ID NO: 1602747 - RNA, 19 nt, Artificial Sequence
  Description of Artificial Sequence: Synthetic oligonucleotide
gauuaaaggaucuguaugc

SEQ ID NO: 1602748 - RNA, 19 nt, Artificial Sequence
  Description of Artificial Sequence: Synthetic oligonucleotide
uucuaaacuguccagaaug

SEQ ID NO: 1602749 - RNA, 19 nt, Artificial Sequence
  Description of Artificial Sequence: Synthetic oligonucleotide
aauacguaagugauguucc

SEQ ID NO: 1602750 - RNA, 19 nt, Artificial Sequence
  Description of Artificial Sequence: Synthetic oligonucleotide
uauaagagcagaaugcucu

SEQ ID NO: 1602751 - RNA, 19 nt, Artificial Sequence
  Description of Artificial Sequence: Synthetic oligonucleotide
ugaaauacaccauucaacu

SEQ ID NO: 1602752 - RNA, 19 nt, Artificial Sequence
  Description of Artificial Sequence: Synthetic oligonucleotide
agaauuguguuugaaauac

SEQ ID NO: 1602753 - RNA, 19 nt, Artificial Sequence
  Description of Artificial Sequence: Synthetic oligonucleotide
uaaauuucaauguaguguc

SEQ ID NO: 1602754 - RNA, 19 nt, Artificial Sequence
  Description of Artificial Sequence: Synthetic oligonucleotide
uuucaaaauagcugaaugc

SEQ ID NO: 1602755 - RNA, 19 nt, Artificial Sequence
  Description of Artificial Sequence: Synthetic oligonucleotide
aagauuaaacucaucagag

SEQ ID NO: 1602756 - RNA, 19 nt, Artificial Sequence
  Description of Artificial Sequence: Synthetic oligonucleotide
auauauaaguauaagagca

SEQ ID NO: 1602757 - RNA, 19 nt, Artificial Sequence
  Description of Artificial Sequence: Synthetic oligonucleotide
uauauaaguauaagagcag

SEQ ID NO: 1602758 - RNA, 19 nt, Artificial Sequence
  Description of Artificial Sequence: Synthetic oligonucleotide
uaaauacaacauuaauacg

SEQ ID NO: 1602759 - RNA, 19 nt, Artificial Sequence
  Description of Artificial Sequence: Synthetic oligonucleotide
aaaguaacugacuucuacu

SEQ ID NO: 1602760 - RNA, 19 nt, Artificial Sequence
  Description of Artificial Sequence: Synthetic oligonucleotide
uugaaauacaccauucaac

SEQ ID NO: 1602761 - RNA, 19 nt, Artificial Sequence
  Description of Artificial Sequence: Synthetic oligonucleotide
auuaagugggcgauaaucc

SEQ ID NO: 1602762 - RNA, 19 nt, Artificial Sequence
  Description of Artificial Sequence: Synthetic oligonucleotide
gauauggucuaugaaaucc

SEQ ID NO: 1602763 - RNA, 19 nt, Artificial Sequence
  Description of Artificial Sequence: Synthetic oligonucleotide
aauacaccauucaacuucc

SEQ ID NO: 1602764 - RNA, 19 nt, Artificial Sequence
  Description of Artificial Sequence: Synthetic oligonucleotide
uaaaggaucuguaugcuac

SEQ ID NO: 1602765 - RNA, 19 nt, Artificial Sequence
  Description of Artificial Sequence: Synthetic oligonucleotide
ucuaaacuguccagaaugg

SEQ ID NO: 1602766 - RNA, 19 nt, Artificial Sequence
  Description of Artificial Sequence: Synthetic oligonucleotide
uguauuguucaaaaguccu

SEQ ID NO: 1602767 - RNA, 19 nt, Artificial Sequence
  Description of Artificial Sequence: Synthetic oligonucleotide
uuugaaauacaccauucaa

SEQ ID NO: 1602768 - RNA, 19 nt, Artificial Sequence
  Description of Artificial Sequence: Synthetic oligonucleotide
uauccaacuaucuauggcu

SEQ ID NO: 1602769 - RNA, 19 nt, Artificial Sequence
  Description of Artificial Sequence: Synthetic oligonucleotide
uuuucauauacacagucua

SEQ ID NO: 1602770 - RNA, 19 nt, Artificial Sequence
  Description of Artificial Sequence: Synthetic oligonucleotide
gacucuagaacucucauga

SEQ ID NO: 1602771 - RNA, 19 nt, Artificial Sequence
  Description of Artificial Sequence: Synthetic oligonucleotide
gauaaucccagcugcaaag

SEQ ID NO: 1602772 - RNA, 19 nt, Artificial Sequence
  Description of Artificial Sequence: Synthetic oligonucleotide
uguguguagugcaagaacu

SEQ ID NO: 1602773 - RNA, 19 nt, Artificial Sequence
  Description of Artificial Sequence: Synthetic oligonucleotide
auaacuagaaaaccuucag

SEQ ID NO: 1602774 - RNA, 19 nt, Artificial Sequence
  Description of Artificial Sequence: Synthetic oligonucleotide
aucagcaugcugcaguacc

SEQ ID NO: 1602775 - RNA, 19 nt, Artificial Sequence
  Description of Artificial Sequence: Synthetic oligonucleotide
ugaaugcaaaucaucaaga

SEQ ID NO: 1602776 - RNA, 19 nt, Artificial Sequence
  Description of Artificial Sequence: Synthetic oligonucleotide
cucaugaagaguuccaacc

SEQ ID NO: 1602777 - RNA, 19 nt, Artificial Sequence
  Description of Artificial Sequence: Synthetic oligonucleotide
uguucaaaaguccuagaac

SEQ ID NO: 1602778 - RNA, 19 nt, Artificial Sequence
  Description of Artificial Sequence: Synthetic oligonucleotide
uuucauauacacagucuag

SEQ ID NO: 1602779 - RNA, 19 nt, Artificial Sequence
  Description of Artificial Sequence: Synthetic oligonucleotide
acaacauuaauacguaagu

SEQ ID NO: 1602780 - RNA, 19 nt, Artificial Sequence
  Description of Artificial Sequence: Synthetic oligonucleotide
uuguacuucagcuguauug

SEQ ID NO: 1602781 - RNA, 19 nt, Artificial Sequence
  Description of Artificial Sequence: Synthetic oligonucleotide
acagaauuguguuugaaau

SEQ ID NO: 1602782 - RNA, 19 nt, Artificial Sequence
  Description of Artificial Sequence: Synthetic oligonucleotide
guaacugacuucuacuucc

SEQ ID NO: 1602783 - RNA, 19 nt, Artificial Sequence
  Description of Artificial Sequence: Synthetic oligonucleotide
uauuguucaaaaguccuag

SEQ ID NO: 1602784 - RNA, 19 nt, Artificial Sequence
  Description of Artificial Sequence: Synthetic oligonucleotide
aauggauuaaaggaucugu

SEQ ID NO: 1602785 - RNA, 19 nt, Artificial Sequence
  Description of Artificial Sequence: Synthetic oligonucleotide
uggucuaugaaauccuucc

SEQ ID NO: 1602786 - RNA, 19 nt, Artificial Sequence
  Description of Artificial Sequence: Synthetic oligonucleotide
uuauccaacuaucuauggc

SEQ ID NO: 1602787 - RNA, 19 nt, Artificial Sequence
  Description of Artificial Sequence: Synthetic oligonucleotide
aauuccucuggcuacggcu

SEQ ID NO: 1602788 - RNA, 19 nt, Artificial Sequence
  Description of Artificial Sequence: Synthetic oligonucleotide
uaacuagaaaaccuucagc

SEQ ID NO: 1602789 - RNA, 19 nt, Artificial Sequence
  Description of Artificial Sequence: Synthetic oligonucleotide
aacucucaugaagaguucc

SEQ ID NO: 1602790 - RNA, 19 nt, Artificial Sequence
  Description of Artificial Sequence: Synthetic oligonucleotide
ucuaugaaauccuuccaca

SEQ ID NO: 1602791 - RNA, 19 nt, Artificial Sequence
  Description of Artificial Sequence: Synthetic oligonucleotide
uaaaacagccaaguagugg

SEQ ID NO: 1602792 - RNA, 19 nt, Artificial Sequence
  Description of Artificial Sequence: Synthetic oligonucleotide
ucaucaagaagagaauucc

SEQ ID NO: 1602793 - RNA, 19 nt, Artificial Sequence
  Description of Artificial Sequence: Synthetic oligonucleotide
uuacuuauuuuccaaccac

SEQ ID NO: 1602794 - RNA, 19 nt, Artificial Sequence
  Description of Artificial Sequence: Synthetic oligonucleotide
uguucauuauccaacuauc

SEQ ID NO: 1602795 - RNA, 19 nt, Artificial Sequence
  Description of Artificial Sequence: Synthetic oligonucleotide
ucaaucagcaugcugcagu

SEQ ID NO: 1602796 - RNA, 19 nt, Artificial Sequence
  Description of Artificial Sequence: Synthetic oligonucleotide
ugcaaaguaacugacuucu

SEQ ID NO: 1602797 - RNA, 19 nt, Artificial Sequence
  Description of Artificial Sequence: Synthetic oligonucleotide
uauaaguauaagagcagaa

SEQ ID NO: 1602798 - RNA, 19 nt, Artificial Sequence
  Description of Artificial Sequence: Synthetic oligonucleotide
ugcucaugcucuuugaugu

SEQ ID NO: 1602799 - RNA, 19 nt, Artificial Sequence
  Description of Artificial Sequence: Synthetic oligonucleotide
aguaacugacuucuacuuc

SEQ ID NO: 1602800 - RNA, 19 nt, Artificial Sequence
  Description of Artificial Sequence: Synthetic oligonucleotide
uauuaagugggcgauaauc

SEQ ID NO: 1602801 - RNA, 19 nt, Artificial Sequence
  Description of Artificial Sequence: Synthetic oligonucleotide
aagcugugcaguuuguucu

SEQ ID NO: 1602802 - RNA, 19 nt, Artificial Sequence
  Description of Artificial Sequence: Synthetic oligonucleotide
augagcuacuaucagccgg

SEQ ID NO: 1602803 - RNA, 19 nt, Artificial Sequence
  Description of Artificial Sequence: Synthetic oligonucleotide
ugugagguuccaaagugca

SEQ ID NO: 1602804 - RNA, 19 nt, Artificial Sequence
  Description of Artificial Sequence: Synthetic oligonucleotide
aagagaauuccucuggcua

SEQ ID NO: 1602805 - RNA, 19 nt, Artificial Sequence
  Description of Artificial Sequence: Synthetic oligonucleotide
aagagcagaaugcucuucu

SEQ ID NO: 1602806 - RNA, 19 nt, Artificial Sequence
  Description of Artificial Sequence: Synthetic oligonucleotide
uguuugaaauacaccauuc

SEQ ID NO: 1602807 - RNA, 19 nt, Artificial Sequence
  Description of Artificial Sequence: Synthetic oligonucleotide
uaauacguaagugauguuc

SEQ ID NO: 1602808 - RNA, 19 nt, Artificial Sequence
  Description of Artificial Sequence: Synthetic oligonucleotide
aauuucaauguagugucca

SEQ ID NO: 1602809 - RNA, 19 nt, Artificial Sequence
  Description of Artificial Sequence: Synthetic oligonucleotide
ugccggacaaugaagagcu

SEQ ID NO: 1602810 - RNA, 19 nt, Artificial Sequence
  Description of Artificial Sequence: Synthetic oligonucleotide
cugacuucuacuuccacac

SEQ ID NO: 1602811 - RNA, 19 nt, Artificial Sequence
  Description of Artificial Sequence: Synthetic oligonucleotide
ggcuacagcaauuugcugg

SEQ ID NO: 1602812 - RNA, 19 nt, Artificial Sequence
  Description of Artificial Sequence: Synthetic oligonucleotide
aaauuucaauguagugucc

SEQ ID NO: 1602813 - RNA, 19 nt, Artificial Sequence
  Description of Artificial Sequence: Synthetic oligonucleotide
uggggauucaucugugagg

SEQ ID NO: 1602814 - RNA, 19 nt, Artificial Sequence
  Description of Artificial Sequence: Synthetic oligonucleotide
uuaagugggcgauaauccc

SEQ ID NO: 1602815 - RNA, 19 nt, Artificial Sequence
  Description of Artificial Sequence: Synthetic oligonucleotide
ugaagugccugcauguugu

SEQ ID NO: 1602816 - RNA, 19 nt, Artificial Sequence
  Description of Artificial Sequence: Synthetic oligonucleotide
aaguaaauuucaauguagu

SEQ ID NO: 1602817 - RNA, 19 nt, Artificial Sequence
  Description of Artificial Sequence: Synthetic oligonucleotide
uucaccucuggauauuaag

SEQ ID NO: 1602818 - RNA, 19 nt, Artificial Sequence
  Description of Artificial Sequence: Synthetic oligonucleotide
uaucagccggcuuaaauac

SEQ ID NO: 1602819 - RNA, 19 nt, Artificial Sequence
  Description of Artificial Sequence: Synthetic oligonucleotide
ugagcuacuaucagccggc

SEQ ID NO: 1602820 - RNA, 19 nt, Artificial Sequence
  Description of Artificial Sequence: Synthetic oligonucleotide
uuggggauucaucugugag

SEQ ID NO: 1602821 - RNA, 19 nt, Artificial Sequence
  Description of Artificial Sequence: Synthetic oligonucleotide
ucuggauauuaagugggcg

SEQ ID NO: 1602822 - RNA, 19 nt, Artificial Sequence
  Description of Artificial Sequence: Synthetic oligonucleotide
uguucaccaggccauaacu

SEQ ID NO: 1602823 - RNA, 19 nt, Artificial Sequence
  Description of Artificial Sequence: Synthetic oligonucleotide
aaguaacugacuucuacuu

SEQ ID NO: 1602824 - RNA, 19 nt, Artificial Sequence
  Description of Artificial Sequence: Synthetic oligonucleotide
acguaagugauguuccauc

SEQ ID NO: 1602825 - RNA, 19 nt, Artificial Sequence
  Description of Artificial Sequence: Synthetic oligonucleotide
uguacuucagcuguauugu

SEQ ID NO: 1602826 - RNA, 19 nt, Artificial Sequence
  Description of Artificial Sequence: Synthetic oligonucleotide
uucauauacacagucuaga

SEQ ID NO: 1602827 - RNA, 19 nt, Artificial Sequence
  Description of Artificial Sequence: Synthetic oligonucleotide
aagcaaaagauagcuuuuc

SEQ ID NO: 1602828 - RNA, 19 nt, Artificial Sequence
  Description of Artificial Sequence: Synthetic oligonucleotide
augaaauccuuccacauua

SEQ ID NO: 1602829 - RNA, 19 nt, Artificial Sequence
  Description of Artificial Sequence: Synthetic oligonucleotide
aauacagaauuguguuuga

SEQ ID NO: 1602830 - RNA, 19 nt, Artificial Sequence
  Description of Artificial Sequence: Synthetic oligonucleotide
acaccauucaacuucccca

SEQ ID NO: 1602831 - RNA, 19 nt, Artificial Sequence
  Description of Artificial Sequence: Synthetic oligonucleotide
caaaguaacugacuucuac

SEQ ID NO: 1602832 - RNA, 19 nt, Artificial Sequence
  Description of Artificial Sequence: Synthetic oligonucleotide
cuauuugaagaaguugccg

SEQ ID NO: 1602833 - RNA, 19 nt, Artificial Sequence
  Description of Artificial Sequence: Synthetic oligonucleotide
gaugacucaguugggaaag

SEQ ID NO: 1602834 - RNA, 19 nt, Artificial Sequence
  Description of Artificial Sequence: Synthetic oligonucleotide
aacccuugauuuucaauga

SEQ ID NO: 1602835 - RNA, 19 nt, Artificial Sequence
  Description of Artificial Sequence: Synthetic oligonucleotide
uuuuguugaauggaugacu

SEQ ID NO: 1602836 - RNA, 19 nt, Artificial Sequence
  Description of Artificial Sequence: Synthetic oligonucleotide
aaagauagcuuuucauaua

SEQ ID NO: 1602837 - RNA, 19 nt, Artificial Sequence
  Description of Artificial Sequence: Synthetic oligonucleotide
cucuagaacucucaugaag

SEQ ID NO: 1602838 - RNA, 19 nt, Artificial Sequence
  Description of Artificial Sequence: Synthetic oligonucleotide
ucaucagaguucaagcaaa

SEQ ID NO: 1602839 - RNA, 19 nt, Artificial Sequence
  Description of Artificial Sequence: Synthetic oligonucleotide
uaucaguuuagucgggccu

SEQ ID NO: 1602840 - RNA, 19 nt, Artificial Sequence
  Description of Artificial Sequence: Synthetic oligonucleotide
uccccaugguuccugaucc

SEQ ID NO: 1602841 - RNA, 19 nt, Artificial Sequence
  Description of Artificial Sequence: Synthetic oligonucleotide
aucaucaagaagagaauuc

SEQ ID NO: 1602842 - RNA, 19 nt, Artificial Sequence
  Description of Artificial Sequence: Synthetic oligonucleotide
uacagaauuguguuugaaa

SEQ ID NO: 1602843 - RNA, 19 nt, Artificial Sequence
  Description of Artificial Sequence: Synthetic oligonucleotide
uaagugggcgauaauccca

SEQ ID NO: 1602844 - RNA, 19 nt, Artificial Sequence
  Description of Artificial Sequence: Synthetic oligonucleotide
acuaucuauggcuaucagu

SEQ ID NO: 1602845 - RNA, 19 nt, Artificial Sequence
  Description of Artificial Sequence: Synthetic oligonucleotide
aauuugacagaggaauccu

SEQ ID NO: 1602846 - RNA, 19 nt, Artificial Sequence
  Description of Artificial Sequence: Synthetic oligonucleotide
uagaaaaccuucagcccag

SEQ ID NO: 1602847 - RNA, 19 nt, Artificial Sequence
  Description of Artificial Sequence: Synthetic oligonucleotide
aguauaagagcagaaugcu

SEQ ID NO: 1602848 - RNA, 19 nt, Artificial Sequence
  Description of Artificial Sequence: Synthetic oligonucleotide
uggccauuucaaaauagcu

SEQ ID NO: 1602849 - RNA, 19 nt, Artificial Sequence
  Description of Artificial Sequence: Synthetic oligonucleotide
uucuacuuccacacugugc

SEQ ID NO: 1602850 - RNA, 19 nt, Artificial Sequence
  Description of Artificial Sequence: Synthetic oligonucleotide
ucacuauuugaagaaguug

SEQ ID NO: 1602851 - RNA, 19 nt, Artificial Sequence
  Description of Artificial Sequence: Synthetic oligonucleotide
guuuagucgggccuggggc

SEQ ID NO: 1602852 - RNA, 19 nt, Artificial Sequence
  Description of Artificial Sequence: Synthetic oligonucleotide
cagaguguagcucuuguac

SEQ ID NO: 1602853 - RNA, 19 nt, Artificial Sequence
  Description of Artificial Sequence: Synthetic oligonucleotide
uuguuggggauucaucugu

SEQ ID NO: 1602854 - RNA, 19 nt, Artificial Sequence
  Description of Artificial Sequence: Synthetic oligonucleotide
uguguuugaaauacaccau

SEQ ID NO: 1602855 - RNA, 19 nt, Artificial Sequence
  Description of Artificial Sequence: Synthetic oligonucleotide
ugaauggaugacucaguug

SEQ ID NO: 1602856 - RNA, 19 nt, Artificial Sequence
  Description of Artificial Sequence: Synthetic oligonucleotide
uuccacauuaauucagagu

SEQ ID NO: 1602857 - RNA, 19 nt, Artificial Sequence
  Description of Artificial Sequence: Synthetic oligonucleotide
auauaaguauaagagcaga

SEQ ID NO: 1602858 - RNA, 19 nt, Artificial Sequence
  Description of Artificial Sequence: Synthetic oligonucleotide
aacuaucuauggcuaucag

SEQ ID NO: 1602859 - RNA, 19 nt, Artificial Sequence
  Description of Artificial Sequence: Synthetic oligonucleotide
agucuagaauuugacagag

SEQ ID NO: 1602860 - RNA, 19 nt, Artificial Sequence
  Description of Artificial Sequence: Synthetic oligonucleotide
uguguguguguguagugca

SEQ ID NO: 1602861 - RNA, 19 nt, Artificial Sequence
  Description of Artificial Sequence: Synthetic oligonucleotide
cauuaauacguaagugaug

SEQ ID NO: 1602862 - RNA, 19 nt, Artificial Sequence
  Description of Artificial Sequence: Synthetic oligonucleotide
uggauuaaaggaucuguau

SEQ ID NO: 1602863 - RNA, 19 nt, Artificial Sequence
  Description of Artificial Sequence: Synthetic oligonucleotide
aaauggauuaaaggaucug

SEQ ID NO: 1602864 - RNA, 19 nt, Artificial Sequence
  Description of Artificial Sequence: Synthetic oligonucleotide
ugggcgauaaucccagcug

SEQ ID NO: 1602865 - RNA, 19 nt, Artificial Sequence
  Description of Artificial Sequence: Synthetic oligonucleotide
uaccuugaaggauucuugc

SEQ ID NO: 1602866 - RNA, 19 nt, Artificial Sequence
  Description of Artificial Sequence: Synthetic oligonucleotide
uguaguguccacugaauuu

SEQ ID NO: 1602867 - RNA, 19 nt, Artificial Sequence
  Description of Artificial Sequence: Synthetic oligonucleotide
cuagaacucucaugaagag

SEQ ID NO: 1602868 - RNA, 19 nt, Artificial Sequence
  Description of Artificial Sequence: Synthetic oligonucleotide
aguuuagucgggccugggg

SEQ ID NO: 1602869 - RNA, 19 nt, Artificial Sequence
  Description of Artificial Sequence: Synthetic oligonucleotide
cauaacuagaaaaccuuca

SEQ ID NO: 1602870 - RNA, 19 nt, Artificial Sequence
  Description of Artificial Sequence: Synthetic oligonucleotide
uccacugaauuuugauuag

SEQ ID NO: 1602871 - RNA, 19 nt, Artificial Sequence
  Description of Artificial Sequence: Synthetic oligonucleotide
cuugcugcagacguguugc

SEQ ID NO: 1602872 - RNA, 19 nt, Artificial Sequence
  Description of Artificial Sequence: Synthetic oligonucleotide
agaacucucaugaagaguu

SEQ ID NO: 1602873 - RNA, 19 nt, Artificial Sequence
  Description of Artificial Sequence: Synthetic oligonucleotide
cuguaugcuaccaucucac

SEQ ID NO: 1602874 - RNA, 19 nt, Artificial Sequence
  Description of Artificial Sequence: Synthetic oligonucleotide
gucuaugaaauccuuccac

SEQ ID NO: 1602875 - RNA, 19 nt, Artificial Sequence
  Description of Artificial Sequence: Synthetic oligonucleotide
agaguguagcucuuguacu

SEQ ID NO: 1602876 - RNA, 19 nt, Artificial Sequence
  Description of Artificial Sequence: Synthetic oligonucleotide
aagacucuagaacucucau

SEQ ID NO: 1602877 - RNA, 19 nt, Artificial Sequence
  Description of Artificial Sequence: Synthetic oligonucleotide
cuaucaguuuagucgggcc

SEQ ID NO: 1602878 - RNA, 19 nt, Artificial Sequence
  Description of Artificial Sequence: Synthetic oligonucleotide
agcaauuugcuggacguag

SEQ ID NO: 1602879 - RNA, 19 nt, Artificial Sequence
  Description of Artificial Sequence: Synthetic oligonucleotide
acauuaauacguaagugau

SEQ ID NO: 1602880 - RNA, 19 nt, Artificial Sequence
  Description of Artificial Sequence: Synthetic oligonucleotide
aaggcaugagcuacuauca

SEQ ID NO: 1602881 - RNA, 19 nt, Artificial Sequence
  Description of Artificial Sequence: Synthetic oligonucleotide
uugaauggaugacucaguu

SEQ ID NO: 1602882 - RNA, 19 nt, Artificial Sequence
  Description of Artificial Sequence: Synthetic oligonucleotide
agaauuugacagaggaauc

SEQ ID NO: 1602883 - RNA, 19 nt, Artificial Sequence
  Description of Artificial Sequence: Synthetic oligonucleotide
uacggcucaagguccaugc

SEQ ID NO: 1602884 - RNA, 19 nt, Artificial Sequence
  Description of Artificial Sequence: Synthetic oligonucleotide
ucagccggcuuaaauacaa

SEQ ID NO: 1602885 - RNA, 19 nt, Artificial Sequence
  Description of Artificial Sequence: Synthetic oligonucleotide
agcaaaagauagcuuuuca

SEQ ID NO: 1602886 - RNA, 19 nt, Artificial Sequence
  Description of Artificial Sequence: Synthetic oligonucleotide
caacauuaauacguaagug

SEQ ID NO: 1602887 - RNA, 19 nt, Artificial Sequence
  Description of Artificial Sequence: Synthetic oligonucleotide
uacuucagcuguauuguuc

SEQ ID NO: 1602888 - RNA, 19 nt, Artificial Sequence
  Description of Artificial Sequence: Synthetic oligonucleotide
aaagacucuagaacucuca

SEQ ID NO: 1602889 - RNA, 19 nt, Artificial Sequence
  Description of Artificial Sequence: Synthetic oligonucleotide
uauggcuaucaguuuaguc

SEQ ID NO: 1602890 - RNA, 19 nt, Artificial Sequence
  Description of Artificial Sequence: Synthetic oligonucleotide
gagcagaaugcucuucuug

SEQ ID NO: 1602891 - RNA, 19 nt, Artificial Sequence
  Description of Artificial Sequence: Synthetic oligonucleotide
cuaucuauggcuaucaguu

SEQ ID NO: 1602892 - RNA, 19 nt, Artificial Sequence
  Description of Artificial Sequence: Synthetic oligonucleotide
guagggaucugucugcuca

SEQ ID NO: 1602893 - RNA, 19 nt, Artificial Sequence
  Description of Artificial Sequence: Synthetic oligonucleotide
agcugaaugcaaaucauca

SEQ ID NO: 1602894 - RNA, 19 nt, Artificial Sequence
  Description of Artificial Sequence: Synthetic oligonucleotide
ucuggcuacggcucaaggu

SEQ ID NO: 1602895 - RNA, 19 nt, Artificial Sequence
  Description of Artificial Sequence: Synthetic oligonucleotide
cuggcuacggcucaagguc

SEQ ID NO: 1602896 - RNA, 19 nt, Artificial Sequence
  Description of Artificial Sequence: Synthetic oligonucleotide
gcugauauggucuaugaaa

SEQ ID NO: 1602897 - RNA, 19 nt, Artificial Sequence
  Description of Artificial Sequence: Synthetic oligonucleotide
uauacacagucuagaauuu

SEQ ID NO: 1602898 - RNA, 19 nt, Artificial Sequence
  Description of Artificial Sequence: Synthetic oligonucleotide
agguccaugccuguucacc

SEQ ID NO: 1602899 - RNA, 19 nt, Artificial Sequence
  Description of Artificial Sequence: Synthetic oligonucleotide
aguugggaaagacucuaga

SEQ ID NO: 1602900 - RNA, 19 nt, Artificial Sequence
  Description of Artificial Sequence: Synthetic oligonucleotide
aauggaugacucaguuggg

SEQ ID NO: 1602901 - RNA, 19 nt, Artificial Sequence
  Description of Artificial Sequence: Synthetic oligonucleotide
caagcugugcaguuuguuc

SEQ ID NO: 1602902 - RNA, 19 nt, Artificial Sequence
  Description of Artificial Sequence: Synthetic oligonucleotide
augaagugccugcauguug

SEQ ID NO: 1602903 - RNA, 19 nt, Artificial Sequence
  Description of Artificial Sequence: Synthetic oligonucleotide
gacguagggaucugucugc

SEQ ID NO: 1602904 - RNA, 19 nt, Artificial Sequence
  Description of Artificial Sequence: Synthetic oligonucleotide
gaaguugccggacaaugaa

SEQ ID NO: 1602905 - RNA, 19 nt, Artificial Sequence
  Description of Artificial Sequence: Synthetic oligonucleotide
aaacuguccagaauggcua

SEQ ID NO: 1602906 - RNA, 19 nt, Artificial Sequence
  Description of Artificial Sequence: Synthetic oligonucleotide
uuuagucgggccuggggcu

SEQ ID NO: 1602907 - RNA, 19 nt, Artificial Sequence
  Description of Artificial Sequence: Synthetic oligonucleotide
acacagucuagaauuugac

SEQ ID NO: 1602908 - RNA, 19 nt, Artificial Sequence
  Description of Artificial Sequence: Synthetic oligonucleotide
cuggauauuaagugggcga

SEQ ID NO: 1602909 - RNA, 19 nt, Artificial Sequence
  Description of Artificial Sequence: Synthetic oligonucleotide
gugauguuccaucugaaua

SEQ ID NO: 1602910 - RNA, 19 nt, Artificial Sequence
  Description of Artificial Sequence: Synthetic oligonucleotide
uguuggggauucaucugug

SEQ ID NO: 1602911 - RNA, 19 nt, Artificial Sequence
  Description of Artificial Sequence: Synthetic oligonucleotide
auuguucaaaaguccuaga

SEQ ID NO: 1602912 - RNA, 19 nt, Artificial Sequence
  Description of Artificial Sequence: Synthetic oligonucleotide
ucaccaggccauaacuaga

SEQ ID NO: 1602913 - RNA, 19 nt, Artificial Sequence
  Description of Artificial Sequence: Synthetic oligonucleotide
aagugggcgauaaucccag

SEQ ID NO: 1602914 - RNA, 19 nt, Artificial Sequence
  Description of Artificial Sequence: Synthetic oligonucleotide
caaagugcacucaaaguaa

SEQ ID NO: 1602915 - RNA, 19 nt, Artificial Sequence
  Description of Artificial Sequence: Synthetic oligonucleotide
uguguguguguguguagug

SEQ ID NO: 1602916 - RNA, 19 nt, Artificial Sequence
  Description of Artificial Sequence: Synthetic oligonucleotide
guugcauggcccaaacugc

SEQ ID NO: 1602917 - RNA, 19 nt, Artificial Sequence
  Description of Artificial Sequence: Synthetic oligonucleotide
aaucagcaugcugcaguac

SEQ ID NO: 1602918 - RNA, 19 nt, Artificial Sequence
  Description of Artificial Sequence: Synthetic oligonucleotide
ccucuggauauuaaguggg

SEQ ID NO: 1602919 - RNA, 19 nt, Artificial Sequence
  Description of Artificial Sequence: Synthetic oligonucleotide
guaagugauguuccaucug

SEQ ID NO: 1602920 - RNA, 19 nt, Artificial Sequence
  Description of Artificial Sequence: Synthetic oligonucleotide
ugauauggucuaugaaauc

SEQ ID NO: 1602921 - RNA, 19 nt, Artificial Sequence
  Description of Artificial Sequence: Synthetic oligonucleotide
aauguaguguccacugaau

SEQ ID NO: 1602922 - RNA, 19 nt, Artificial Sequence
  Description of Artificial Sequence: Synthetic oligonucleotide
agccggcuuaaauacaaca

SEQ ID NO: 1602923 - RNA, 19 nt, Artificial Sequence
  Description of Artificial Sequence: Synthetic oligonucleotide
acaauacagaauuguguuu

SEQ ID NO: 1602924 - RNA, 19 nt, Artificial Sequence
  Description of Artificial Sequence: Synthetic oligonucleotide
caugagcuacuaucagccg

SEQ ID NO: 1602925 - RNA, 19 nt, Artificial Sequence
  Description of Artificial Sequence: Synthetic oligonucleotide
cucuggauauuaagugggc

SEQ ID NO: 1602926 - RNA, 19 nt, Artificial Sequence
  Description of Artificial Sequence: Synthetic oligonucleotide
uguguguguguguguguag

SEQ ID NO: 1602927 - RNA, 19 nt, Artificial Sequence
  Description of Artificial Sequence: Synthetic oligonucleotide
aagguccaugccuguucac

SEQ ID NO: 1602928 - RNA, 19 nt, Artificial Sequence
  Description of Artificial Sequence: Synthetic oligonucleotide
guuggccauuucaaaauag

SEQ ID NO: 1602929 - RNA, 19 nt, Artificial Sequence
  Description of Artificial Sequence: Synthetic oligonucleotide
agugauguuccaucugaau

SEQ ID NO: 1602930 - RNA, 19 nt, Artificial Sequence
  Description of Artificial Sequence: Synthetic oligonucleotide
aaguugccggacaaugaag

SEQ ID NO: 1602931 - RNA, 19 nt, Artificial Sequence
  Description of Artificial Sequence: Synthetic oligonucleotide
uuguucaccaggccauaac

SEQ ID NO: 1602932 - RNA, 19 nt, Artificial Sequence
  Description of Artificial Sequence: Synthetic oligonucleotide
guguguguagugcaagaac

SEQ ID NO: 1602933 - RNA, 19 nt, Artificial Sequence
  Description of Artificial Sequence: Synthetic oligonucleotide
ugcugauauggucuaugaa

SEQ ID NO: 1602934 - RNA, 19 nt, Artificial Sequence
  Description of Artificial Sequence: Synthetic oligonucleotide
uauggucuaugaaauccuu

SEQ ID NO: 1602935 - RNA, 19 nt, Artificial Sequence
  Description of Artificial Sequence: Synthetic oligonucleotide
cuaccaucucacacucugg

SEQ ID NO: 1602936 - RNA, 19 nt, Artificial Sequence
  Description of Artificial Sequence: Synthetic oligonucleotide
uucaagcaaaagauagcuu

SEQ ID NO: 1602937 - RNA, 19 nt, Artificial Sequence
  Description of Artificial Sequence: Synthetic oligonucleotide
ugguuccugauccuugaaa

SEQ ID NO: 1602938 - RNA, 19 nt, Artificial Sequence
  Description of Artificial Sequence: Synthetic oligonucleotide
uggauauuaagugggcgau

SEQ ID NO: 1602939 - RNA, 19 nt, Artificial Sequence
  Description of Artificial Sequence: Synthetic oligonucleotide
uguaugcuaccaucucaca

SEQ ID NO: 1602940 - RNA, 19 nt, Artificial Sequence
  Description of Artificial Sequence: Synthetic oligonucleotide
ugaaauccuuccacauuaa

SEQ ID NO: 1602941 - RNA, 19 nt, Artificial Sequence
  Description of Artificial Sequence: Synthetic oligonucleotide
guugccggacaaugaagag

SEQ ID NO: 1602942 - RNA, 19 nt, Artificial Sequence
  Description of Artificial Sequence: Synthetic oligonucleotide
aaggaucuguaugcuacca

SEQ ID NO: 1602943 - RNA, 19 nt, Artificial Sequence
  Description of Artificial Sequence: Synthetic oligonucleotide
uagaacucucaugaagagu

SEQ ID NO: 1602944 - RNA, 19 nt, Artificial Sequence
  Description of Artificial Sequence: Synthetic oligonucleotide
uaguguccacugaauuuug

SEQ ID NO: 1602945 - RNA, 19 nt, Artificial Sequence
  Description of Artificial Sequence: Synthetic oligonucleotide
uggcuacggcucaaggucc

SEQ ID NO: 1602946 - RNA, 19 nt, Artificial Sequence
  Description of Artificial Sequence: Synthetic oligonucleotide
ccaaacugcccacagcugg

SEQ ID NO: 1602947 - RNA, 19 nt, Artificial Sequence
  Description of Artificial Sequence: Synthetic oligonucleotide
guaccuugaaggauucuug

SEQ ID NO: 1602948 - RNA, 19 nt, Artificial Sequence
  Description of Artificial Sequence: Synthetic oligonucleotide
aaaugcugcagaccuccuu

SEQ ID NO: 1602949 - RNA, 19 nt, Artificial Sequence
  Description of Artificial Sequence: Synthetic oligonucleotide
ucaguugggaaagacucua

SEQ ID NO: 1602950 - RNA, 19 nt, Artificial Sequence
  Description of Artificial Sequence: Synthetic oligonucleotide
auggucuaugaaauccuuc

SEQ ID NO: 1602951 - RNA, 19 nt, Artificial Sequence
  Description of Artificial Sequence: Synthetic oligonucleotide
auccuuccacauuaauuca

SEQ ID NO: 1602952 - RNA, 19 nt, Artificial Sequence
  Description of Artificial Sequence: Synthetic oligonucleotide
ucaguuuagucgggccugg

SEQ ID NO: 1602953 - RNA, 19 nt, Artificial Sequence
  Description of Artificial Sequence: Synthetic oligonucleotide
aucagaguucaagcaaaag

SEQ ID NO: 1602954 - RNA, 19 nt, Artificial Sequence
  Description of Artificial Sequence: Synthetic oligonucleotide
aaagcuuggcagccaggau

SEQ ID NO: 1602955 - RNA, 19 nt, Artificial Sequence
  Description of Artificial Sequence: Synthetic oligonucleotide
cacagucuagaauuugaca

SEQ ID NO: 1602956 - RNA, 19 nt, Artificial Sequence
  Description of Artificial Sequence: Synthetic oligonucleotide
auacguaagugauguucca

SEQ ID NO: 1602957 - RNA, 19 nt, Artificial Sequence
  Description of Artificial Sequence: Synthetic oligonucleotide
auauggucuaugaaauccu

SEQ ID NO: 1602958 - RNA, 19 nt, Artificial Sequence
  Description of Artificial Sequence: Synthetic oligonucleotide
aucaguuuagucgggccug

SEQ ID NO: 1602959 - RNA, 19 nt, Artificial Sequence
  Description of Artificial Sequence: Synthetic oligonucleotide
acuuauuuuccaaccacaa

SEQ ID NO: 1602960 - RNA, 19 nt, Artificial Sequence
  Description of Artificial Sequence: Synthetic oligonucleotide
acggcucaagguccaugcc

SEQ ID NO: 1602961 - RNA, 19 nt, Artificial Sequence
  Description of Artificial Sequence: Synthetic oligonucleotide
auguaguguccacugaauu

SEQ ID NO: 1602962 - RNA, 19 nt, Artificial Sequence
  Description of Artificial Sequence: Synthetic oligonucleotide
guaaaacagccaaguagug

SEQ ID NO: 1602963 - RNA, 19 nt, Artificial Sequence
  Description of Artificial Sequence: Synthetic oligonucleotide
cucaucagaguucaagcaa

SEQ ID NO: 1602964 - RNA, 19 nt, Artificial Sequence
  Description of Artificial Sequence: Synthetic oligonucleotide
uguguagugcaagaacuuu

SEQ ID NO: 1602965 - RNA, 19 nt, Artificial Sequence
  Description of Artificial Sequence: Synthetic oligonucleotide
aggcaugagcuacuaucag

SEQ ID NO: 1602966 - RNA, 19 nt, Artificial Sequence
  Description of Artificial Sequence: Synthetic oligonucleotide
cuagaauuugacagaggaa

SEQ ID NO: 1602967 - RNA, 19 nt, Artificial Sequence
  Description of Artificial Sequence: Synthetic oligonucleotide
gauuaguuuucugcuucac

SEQ ID NO: 1602968 - RNA, 19 nt, Artificial Sequence
  Description of Artificial Sequence: Synthetic oligonucleotide
ggacguagggaucugucug

SEQ ID NO: 1602969 - RNA, 19 nt, Artificial Sequence
  Description of Artificial Sequence: Synthetic oligonucleotide
agaccuccuucuucaauca

SEQ ID NO: 1602970 - RNA, 19 nt, Artificial Sequence
  Description of Artificial Sequence: Synthetic oligonucleotide
ggaucuguaugcuaccauc

SEQ ID NO: 1602971 - RNA, 19 nt, Artificial Sequence
  Description of Artificial Sequence: Synthetic oligonucleotide
gaauuccucuggcuacggc

SEQ ID NO: 1602972 - RNA, 19 nt, Artificial Sequence
  Description of Artificial Sequence: Synthetic oligonucleotide
agacguguugcauggccca

SEQ ID NO: 1602973 - RNA, 19 nt, Artificial Sequence
  Description of Artificial Sequence: Synthetic oligonucleotide
cugcaaaguaacugacuuc

SEQ ID NO: 1602974 - RNA, 19 nt, Artificial Sequence
  Description of Artificial Sequence: Synthetic oligonucleotide
cugauauggucuaugaaau

SEQ ID NO: 1602975 - RNA, 19 nt, Artificial Sequence
  Description of Artificial Sequence: Synthetic oligonucleotide
auacacagucuagaauuug

SEQ ID NO: 1602976 - RNA, 19 nt, Artificial Sequence
  Description of Artificial Sequence: Synthetic oligonucleotide
auuugacagaggaauccug

SEQ ID NO: 1602977 - RNA, 19 nt, Artificial Sequence
  Description of Artificial Sequence: Synthetic oligonucleotide
cagucuagaauuugacaga

SEQ ID NO: 1602978 - RNA, 19 nt, Artificial Sequence
  Description of Artificial Sequence: Synthetic oligonucleotide
agcaugcugcaguaccuug

SEQ ID NO: 1602979 - RNA, 19 nt, Artificial Sequence
  Description of Artificial Sequence: Synthetic oligonucleotide
gaagagaauuccucuggcu

SEQ ID NO: 1602980 - RNA, 19 nt, Artificial Sequence
  Description of Artificial Sequence: Synthetic oligonucleotide
ucagaguguagcucuugua

SEQ ID NO: 1602981 - RNA, 19 nt, Artificial Sequence
  Description of Artificial Sequence: Synthetic oligonucleotide
uucaaucagcaugcugcag

SEQ ID NO: 1602982 - RNA, 19 nt, Artificial Sequence
  Description of Artificial Sequence: Synthetic oligonucleotide
auaagagcagaaugcucuu

SEQ ID NO: 1602983 - RNA, 19 nt, Artificial Sequence
  Description of Artificial Sequence: Synthetic oligonucleotide
guauaagagcagaaugcuc

SEQ ID NO: 1602984 - RNA, 19 nt, Artificial Sequence
  Description of Artificial Sequence: Synthetic oligonucleotide
agcugugcaguuuguucug

SEQ ID NO: 1602985 - RNA, 19 nt, Artificial Sequence
  Description of Artificial Sequence: Synthetic oligonucleotide
gcuacuaucagccggcuua

SEQ ID NO: 1602986 - RNA, 19 nt, Artificial Sequence
  Description of Artificial Sequence: Synthetic oligonucleotide
agaauggcuacagcaauuu

SEQ ID NO: 1602987 - RNA, 19 nt, Artificial Sequence
  Description of Artificial Sequence: Synthetic oligonucleotide
uccaacuaucuauggcuau

SEQ ID NO: 1602988 - RNA, 19 nt, Artificial Sequence
  Description of Artificial Sequence: Synthetic oligonucleotide
guguguguguguguagugc

SEQ ID NO: 1602989 - RNA, 19 nt, Artificial Sequence
  Description of Artificial Sequence: Synthetic oligonucleotide
caccaagcugugcaguuug

SEQ ID NO: 1602990 - RNA, 19 nt, Artificial Sequence
  Description of Artificial Sequence: Synthetic oligonucleotide
auaaucccagcugcaaagu

SEQ ID NO: 1602991 - RNA, 19 nt, Artificial Sequence
  Description of Artificial Sequence: Synthetic oligonucleotide
cuucaaucagcaugcugca

SEQ ID NO: 1602992 - RNA, 19 nt, Artificial Sequence
  Description of Artificial Sequence: Synthetic oligonucleotide
ugacucaguugggaaagac

SEQ ID NO: 1602993 - RNA, 19 nt, Artificial Sequence
  Description of Artificial Sequence: Synthetic oligonucleotide
ugugugugugugugugugu

SEQ ID NO: 1602994 - RNA, 19 nt, Artificial Sequence
  Description of Artificial Sequence: Synthetic oligonucleotide
uaucuauggcuaucaguuu

SEQ ID NO: 1602995 - RNA, 19 nt, Artificial Sequence
  Description of Artificial Sequence: Synthetic oligonucleotide
gaauuuugauuaguuuucu

SEQ ID NO: 1602996 - RNA, 19 nt, Artificial Sequence
  Description of Artificial Sequence: Synthetic oligonucleotide
gcugcagacguguugcaug

SEQ ID NO: 1602997 - RNA, 19 nt, Artificial Sequence
  Description of Artificial Sequence: Synthetic oligonucleotide
gaguuggccauuucaaaau

SEQ ID NO: 1602998 - RNA, 19 nt, Artificial Sequence
  Description of Artificial Sequence: Synthetic oligonucleotide
agaauuccucuggcuacgg

SEQ ID NO: 1602999 - RNA, 19 nt, Artificial Sequence
  Description of Artificial Sequence: Synthetic oligonucleotide
cacucaaaguaaauuucaa

SEQ ID NO: 1603000 - RNA, 19 nt, Artificial Sequence
  Description of Artificial Sequence: Synthetic oligonucleotide
gugugugugugugugugug

SEQ ID NO: 1603001 - RNA, 19 nt, Artificial Sequence
  Description of Artificial Sequence: Synthetic oligonucleotide
cagaauuguguuugaaaua

SEQ ID NO: 1603002 - RNA, 19 nt, Artificial Sequence
  Description of Artificial Sequence: Synthetic oligonucleotide
agaaguugccggacaauga

SEQ ID NO: 1603003 - RNA, 19 nt, Artificial Sequence
  Description of Artificial Sequence: Synthetic oligonucleotide
ccauaacuagaaaaccuuc

SEQ ID NO: 1603004 - RNA, 19 nt, Artificial Sequence
  Description of Artificial Sequence: Synthetic oligonucleotide
ccaaagugcacucaaagua

SEQ ID NO: 1603005 - RNA, 19 nt, Artificial Sequence
  Description of Artificial Sequence: Synthetic oligonucleotide
acagccaaguagugggaaa

SEQ ID NO: 1603006 - RNA, 19 nt, Artificial Sequence
  Description of Artificial Sequence: Synthetic oligonucleotide
uuaauacguaagugauguu

SEQ ID NO: 1603007 - RNA, 19 nt, Artificial Sequence
  Description of Artificial Sequence: Synthetic oligonucleotide
cuggacguagggaucuguc

SEQ ID NO: 1603008 - RNA, 19 nt, Artificial Sequence
  Description of Artificial Sequence: Synthetic oligonucleotide
uugcuggacguagggaucu

SEQ ID NO: 1603009 - RNA, 19 nt, Artificial Sequence
  Description of Artificial Sequence: Synthetic oligonucleotide
uggcuacagcaauuugcug

SEQ ID NO: 1603010 - RNA, 19 nt, Artificial Sequence
  Description of Artificial Sequence: Synthetic oligonucleotide
gcuacagcaauuugcugga

SEQ ID NO: 1603011 - RNA, 19 nt, Artificial Sequence
  Description of Artificial Sequence: Synthetic oligonucleotide
ggagacugcugauaugguc

SEQ ID NO: 1603012 - RNA, 19 nt, Artificial Sequence
  Description of Artificial Sequence: Synthetic oligonucleotide
cuucagcccagacaauaca

SEQ ID NO: 1603013 - RNA, 19 nt, Artificial Sequence
  Description of Artificial Sequence: Synthetic oligonucleotide
auucagaguguagcucuug

SEQ ID NO: 1603014 - RNA, 19 nt, Artificial Sequence
  Description of Artificial Sequence: Synthetic oligonucleotide
accauucaacuuccccaug

SEQ ID NO: 1603015 - RNA, 19 nt, Artificial Sequence
  Description of Artificial Sequence: Synthetic oligonucleotide
caacuaucuauggcuauca

SEQ ID NO: 1603016 - RNA, 19 nt, Artificial Sequence
  Description of Artificial Sequence: Synthetic oligonucleotide
acucuagaacucucaugaa

SEQ ID NO: 1603017 - RNA, 19 nt, Artificial Sequence
  Description of Artificial Sequence: Synthetic oligonucleotide
uguucaccucuggauauua

SEQ ID NO: 1603018 - RNA, 19 nt, Artificial Sequence
  Description of Artificial Sequence: Synthetic oligonucleotide
uggacucccgguguuguaa

SEQ ID NO: 1603019 - RNA, 19 nt, Artificial Sequence
  Description of Artificial Sequence: Synthetic oligonucleotide
cccgguguuguaaaacagc

SEQ ID NO: 1603020 - RNA, 19 nt, Artificial Sequence
  Description of Artificial Sequence: Synthetic oligonucleotide
auacaccauucaacuuccc

SEQ ID NO: 1603021 - RNA, 19 nt, Artificial Sequence
  Description of Artificial Sequence: Synthetic oligonucleotide
agcaccaagcugugcaguu

SEQ ID NO: 1603022 - RNA, 19 nt, Artificial Sequence
  Description of Artificial Sequence: Synthetic oligonucleotide
cagcccagacaauacagaa

SEQ ID NO: 1603023 - RNA, 19 nt, Artificial Sequence
  Description of Artificial Sequence: Synthetic oligonucleotide
gauguuccaucugaauaua

SEQ ID NO: 1603024 - RNA, 19 nt, Artificial Sequence
  Description of Artificial Sequence: Synthetic oligonucleotide
ugccugcauguuguugggg

SEQ ID NO: 1603025 - RNA, 19 nt, Artificial Sequence
  Description of Artificial Sequence: Synthetic oligonucleotide
guauuguucaaaaguccua

SEQ ID NO: 1603026 - RNA, 19 nt, Artificial Sequence
  Description of Artificial Sequence: Synthetic oligonucleotide
cauggcccaaacugcccac

SEQ ID NO: 1603027 - RNA, 19 nt, Artificial Sequence
  Description of Artificial Sequence: Synthetic oligonucleotide
gcacucaaaguaaauuuca

SEQ ID NO: 1603028 - RNA, 19 nt, Artificial Sequence
  Description of Artificial Sequence: Synthetic oligonucleotide
agcugcaaaguaacugacu

SEQ ID NO: 1603029 - RNA, 19 nt, Artificial Sequence
  Description of Artificial Sequence: Synthetic oligonucleotide
uccaacccuugauuuucaa

SEQ ID NO: 1603030 - RNA, 19 nt, Artificial Sequence
  Description of Artificial Sequence: Synthetic oligonucleotide
accuucagcccagacaaua

SEQ ID NO: 1603031 - RNA, 19 nt, Artificial Sequence
  Description of Artificial Sequence: Synthetic oligonucleotide
gaguguagcucuuguacuu

SEQ ID NO: 1603032 - RNA, 19 nt, Artificial Sequence
  Description of Artificial Sequence: Synthetic oligonucleotide
gcuaucaguuuagucgggc

SEQ ID NO: 1603033 - RNA, 19 nt, Artificial Sequence
  Description of Artificial Sequence: Synthetic oligonucleotide
ggaugacucaguugggaaa

SEQ ID NO: 1603034 - RNA, 19 nt, Artificial Sequence
  Description of Artificial Sequence: Synthetic oligonucleotide
caucagaguucaagcaaaa

SEQ ID NO: 1603035 - RNA, 19 nt, Artificial Sequence
  Description of Artificial Sequence: Synthetic oligonucleotide
caaucagcaugcugcagua

SEQ ID NO: 1603036 - RNA, 19 nt, Artificial Sequence
  Description of Artificial Sequence: Synthetic oligonucleotide
aguguccacugaauuuuga

SEQ ID NO: 1603037 - RNA, 19 nt, Artificial Sequence
  Description of Artificial Sequence: Synthetic oligonucleotide
caugcugcaguaccuugaa

SEQ ID NO: 1603038 - RNA, 19 nt, Artificial Sequence
  Description of Artificial Sequence: Synthetic oligonucleotide
auggcgcacaauguguuuu

SEQ ID NO: 1603039 - RNA, 19 nt, Artificial Sequence
  Description of Artificial Sequence: Synthetic oligonucleotide
auccaacuaucuauggcua

SEQ ID NO: 1603040 - RNA, 19 nt, Artificial Sequence
  Description of Artificial Sequence: Synthetic oligonucleotide
guagaaagcuuggcagcca

SEQ ID NO: 1603041 - RNA, 19 nt, Artificial Sequence
  Description of Artificial Sequence: Synthetic oligonucleotide
cagccggcuuaaauacaac

SEQ ID NO: 1603042 - RNA, 19 nt, Artificial Sequence
  Description of Artificial Sequence: Synthetic oligonucleotide
accaggccauaacuagaaa

SEQ ID NO: 1603043 - RNA, 19 nt, Artificial Sequence
  Description of Artificial Sequence: Synthetic oligonucleotide
ggggauucaucugugaggu

SEQ ID NO: 1603044 - RNA, 19 nt, Artificial Sequence
  Description of Artificial Sequence: Synthetic oligonucleotide
guugaauggaugacucagu

SEQ ID NO: 1603045 - RNA, 19 nt, Artificial Sequence
  Description of Artificial Sequence: Synthetic oligonucleotide
cucucaugaagaguuccaa

SEQ ID NO: 1603046 - RNA, 19 nt, Artificial Sequence
  Description of Artificial Sequence: Synthetic oligonucleotide
gcccaaacugcccacagcu

SEQ ID NO: 1603047 - RNA, 19 nt, Artificial Sequence
  Description of Artificial Sequence: Synthetic oligonucleotide
auguuccaucugaauauau

SEQ ID NO: 1603048 - RNA, 19 nt, Artificial Sequence
  Description of Artificial Sequence: Synthetic oligonucleotide
aucucacacucuggaguug

SEQ ID NO: 1603049 - RNA, 19 nt, Artificial Sequence
  Description of Artificial Sequence: Synthetic oligonucleotide
cucaguugggaaagacucu

SEQ ID NO: 1603050 - RNA, 19 nt, Artificial Sequence
  Description of Artificial Sequence: Synthetic oligonucleotide
cuacggcucaagguccaug

SEQ ID NO: 1603051 - RNA, 19 nt, Artificial Sequence
  Description of Artificial Sequence: Synthetic oligonucleotide
ggccauaacuagaaaaccu

SEQ ID NO: 1603052 - RNA, 19 nt, Artificial Sequence
  Description of Artificial Sequence: Synthetic oligonucleotide
acguagggaucugucugcu

SEQ ID NO: 1603053 - RNA, 19 nt, Artificial Sequence
  Description of Artificial Sequence: Synthetic oligonucleotide
ccaacuaucuauggcuauc

SEQ ID NO: 1603054 - RNA, 19 nt, Artificial Sequence
  Description of Artificial Sequence: Synthetic oligonucleotide
aucagccggcuuaaauaca

SEQ ID NO: 1603055 - RNA, 19 nt, Artificial Sequence
  Description of Artificial Sequence: Synthetic oligonucleotide
caucucacacucuggaguu

SEQ ID NO: 1603056 - RNA, 19 nt, Artificial Sequence
  Description of Artificial Sequence: Synthetic oligonucleotide
caguuuagucgggccuggg

SEQ ID NO: 1603057 - RNA, 19 nt, Artificial Sequence
  Description of Artificial Sequence: Synthetic oligonucleotide
agcuacuaucagccggcuu

SEQ ID NO: 1603058 - RNA, 19 nt, Artificial Sequence
  Description of Artificial Sequence: Synthetic oligonucleotide
gugugugugugugugugua

SEQ ID NO: 1603059 - RNA, 19 nt, Artificial Sequence
  Description of Artificial Sequence: Synthetic oligonucleotide
gauuuucaaugaagugccu

SEQ ID NO: 1603060 - RNA, 19 nt, Artificial Sequence
  Description of Artificial Sequence: Synthetic oligonucleotide
ggcuaucaguuuagucggg

SEQ ID NO: 1603061 - RNA, 19 nt, Artificial Sequence
  Description of Artificial Sequence: Synthetic oligonucleotide
gacucccgguguuguaaaa

SEQ ID NO: 1603062 - RNA, 19 nt, Artificial Sequence
  Description of Artificial Sequence: Synthetic oligonucleotide
guguguguguguguguagu

SEQ ID NO: 1603063 - RNA, 19 nt, Artificial Sequence
  Description of Artificial Sequence: Synthetic oligonucleotide
gaagaaguugccggacaau

SEQ ID NO: 1603064 - RNA, 19 nt, Artificial Sequence
  Description of Artificial Sequence: Synthetic oligonucleotide
cuacagcaauuugcuggac

SEQ ID NO: 1603065 - RNA, 19 nt, Artificial Sequence
  Description of Artificial Sequence: Synthetic oligonucleotide
ggcccaaacugcccacagc

SEQ ID NO: 1603066 - RNA, 19 nt, Artificial Sequence
  Description of Artificial Sequence: Synthetic oligonucleotide
gguccaugccuguucaccu

SEQ ID NO: 1603067 - RNA, 19 nt, Artificial Sequence
  Description of Artificial Sequence: Synthetic oligonucleotide
cuacuaucagccggcuuaa

SEQ ID NO: 1603068 - RNA, 19 nt, Artificial Sequence
  Description of Artificial Sequence: Synthetic oligonucleotide
ugcuggacguagggaucug

SEQ ID NO: 1603069 - RNA, 19 nt, Artificial Sequence
  Description of Artificial Sequence: Synthetic oligonucleotide
cucuuguacuucagcugua

SEQ ID NO: 1603070 - RNA, 19 nt, Artificial Sequence
  Description of Artificial Sequence: Synthetic oligonucleotide
cccaaacugcccacagcug

SEQ ID NO: 1603071 - RNA, 19 nt, Artificial Sequence
  Description of Artificial Sequence: Synthetic oligonucleotide
uacuaucagccggcuuaaa

SEQ ID NO: 1603072 - RNA, 19 nt, Artificial Sequence
  Description of Artificial Sequence: Synthetic oligonucleotide
guucaccucuggauauuaa

SEQ ID NO: 1603073 - RNA, 19 nt, Artificial Sequence
  Description of Artificial Sequence: Synthetic oligonucleotide
guguguguguguagugcaa

SEQ ID NO: 1603074 - RNA, 19 nt, Artificial Sequence
  Description of Artificial Sequence: Synthetic oligonucleotide
gcaugcugcaguaccuuga

SEQ ID NO: 1603075 - RNA, 19 nt, Artificial Sequence
  Description of Artificial Sequence: Synthetic oligonucleotide
acguguugcauggcccaaa

SEQ ID NO: 1603076 - RNA, 19 nt, Artificial Sequence
  Description of Artificial Sequence: Synthetic oligonucleotide
ggcgauaaucccagcugca

SEQ ID NO: 1603077 - RNA, 19 nt, Artificial Sequence
  Description of Artificial Sequence: Synthetic oligonucleotide
gccauaacuagaaaaccuu

SEQ ID NO: 1603078 - RNA, 19 nt, Artificial Sequence
  Description of Artificial Sequence: Synthetic oligonucleotide
guacuucagcuguauuguu

SEQ ID NO: 1603079 - RNA, 19 nt, Artificial Sequence
  Description of Artificial Sequence: Synthetic oligonucleotide
cguaagugauguuccaucu

SEQ ID NO: 1603080 - RNA, 19 nt, Artificial Sequence
  Description of Artificial Sequence: Synthetic oligonucleotide
guguguagugcaagaacuu

SEQ ID NO: 1603081 - RNA, 19 nt, Artificial Sequence
  Description of Artificial Sequence: Synthetic oligonucleotide
ggauauuaagugggcgaua

SEQ ID NO: 1603082 - RNA, 19 nt, Artificial Sequence
  Description of Artificial Sequence: Synthetic oligonucleotide
ggacucccgguguuguaaa

SEQ ID NO: 1603083 - RNA, 19 nt, Artificial Sequence
  Description of Artificial Sequence: Synthetic oligonucleotide
gccggcuuaaauacaacau

SEQ ID NO: 1603084 - RNA, 19 nt, Artificial Sequence
  Description of Artificial Sequence: Synthetic oligonucleotide
caaaugcugcagaccuccu

SEQ ID NO: 1603085 - RNA, 19 nt, Artificial Sequence
  Description of Artificial Sequence: Synthetic oligonucleotide
cgauaaucccagcugcaaa

SEQ ID NO: 1603086 - RNA, 19 nt, Artificial Sequence
  Description of Artificial Sequence: Synthetic oligonucleotide
ccggcuuaaauacaacauu

SEQ ID NO: 1603087 - RNA, 19 nt, Artificial Sequence
  Description of Artificial Sequence: Synthetic oligonucleotide
cauggcgcacaauguguuu

SEQ ID NO: 1603088 - RNA, 19 nt, Artificial Sequence
  Description of Artificial Sequence: Synthetic oligonucleotide
cuggacucccgguguugua

SEQ ID NO: 1603089 - RNA, 19 nt, Artificial Sequence
  Description of Artificial Sequence: Synthetic oligonucleotide
gagcuacuaucagccggcu

SEQ ID NO: 1603090 - RNA, 19 nt, Artificial Sequence
  Description of Artificial Sequence: Synthetic oligonucleotide
ggcuacggcucaaggucca

SEQ ID NO: 1603091 - RNA, 19 nt, Artificial Sequence
  Description of Artificial Sequence: Synthetic oligonucleotide
cguagggaucugucugcuc

SEQ ID NO: 1603092 - RNA, 19 nt, Artificial Sequence
  Description of Artificial Sequence: Synthetic oligonucleotide
cugcauguuguuggggauu

SEQ ID NO: 1603093 - RNA, 19 nt, Artificial Sequence
  Description of Artificial Sequence: Synthetic oligonucleotide
ccacugaauuuugauuagu

SEQ ID NO: 1603094 - RNA, 19 nt, Artificial Sequence
  Description of Artificial Sequence: Synthetic oligonucleotide
ggggccucccauggcgcac

SEQ ID NO: 1603095 - RNA, 19 nt, Artificial Sequence
  Description of Artificial Sequence: Synthetic oligonucleotide
cuguucaccucuggauauu

SEQ ID NO: 1603096 - RNA, 19 nt, Artificial Sequence
  Description of Artificial Sequence: Synthetic oligonucleotide
cagcaugcugcaguaccuu

SEQ ID NO: 1603097 - RNA, 19 nt, Artificial Sequence
  Description of Artificial Sequence: Synthetic oligonucleotide
gggccucccauggcgcaca

SEQ ID NO: 1603098 - RNA, 19 nt, Artificial Sequence
  Description of Artificial Sequence: Synthetic oligonucleotide
agucgggccuggggcuguu

SEQ ID NO: 1603099 - RNA, 19 nt, Artificial Sequence
  Description of Artificial Sequence: Synthetic oligonucleotide
cacucuggaguuggccauu

SEQ ID NO: 1603100 - RNA, 19 nt, Artificial Sequence
  Description of Artificial Sequence: Synthetic oligonucleotide
gccggacaaugaagagcuc

SEQ ID NO: 1603101 - RNA, 19 nt, Artificial Sequence
  Description of Artificial Sequence: Synthetic oligonucleotide
gggauucaucugugagguu

SEQ ID NO: 1603102 - RNA, 19 nt, Artificial Sequence
  Description of Artificial Sequence: Synthetic oligonucleotide
gcuacggcucaagguccau

SEQ ID NO: 1603103 - RNA, 19 nt, Artificial Sequence
  Description of Artificial Sequence: Synthetic oligonucleotide
gucgggccuggggcuguuu

SEQ ID NO: 1603104 - RNA, 19 nt, Artificial Sequence
  Description of Artificial Sequence: Synthetic oligonucleotide
ucuacgaucagaaauacuc

SEQ ID NO: 1603105 - RNA, 19 nt, Artificial Sequence
  Description of Artificial Sequence: Synthetic oligonucleotide
gucauuaugaucuuguugc

SEQ ID NO: 1603106 - RNA, 19 nt, Artificial Sequence
  Description of Artificial Sequence: Synthetic oligonucleotide
ucgggugucauuaugaucu

SEQ ID NO: 1603107 - RNA, 19 nt, Artificial Sequence
  Description of Artificial Sequence: Synthetic oligonucleotide
uguaagagugcacacgaag

SEQ ID NO: 1603108 - RNA, 19 nt, Artificial Sequence
  Description of Artificial Sequence: Synthetic oligonucleotide
aauggugccagguagucca

SEQ ID NO: 1603109 - RNA, 19 nt, Artificial Sequence
  Description of Artificial Sequence: Synthetic oligonucleotide
uuguuuauguguuucagcu

SEQ ID NO: 1603110 - RNA, 19 nt, Artificial Sequence
  Description of Artificial Sequence: Synthetic oligonucleotide
ugugauuuucaccaugggc

SEQ ID NO: 1603111 - RNA, 19 nt, Artificial Sequence
  Description of Artificial Sequence: Synthetic oligonucleotide
ucauagaacuccaugacuc

SEQ ID NO: 1603112 - RNA, 19 nt, Artificial Sequence
  Description of Artificial Sequence: Synthetic oligonucleotide
ucuagguccaaaauugaug

SEQ ID NO: 1603113 - RNA, 19 nt, Artificial Sequence
  Description of Artificial Sequence: Synthetic oligonucleotide
aaaauugauguggcgauag

SEQ ID NO: 1603114 - RNA, 19 nt, Artificial Sequence
  Description of Artificial Sequence: Synthetic oligonucleotide
ugucauuaugaucuuguug

SEQ ID NO: 1603115 - RNA, 19 nt, Artificial Sequence
  Description of Artificial Sequence: Synthetic oligonucleotide
ugcaagacacguuccaugg

SEQ ID NO: 1603116 - RNA, 19 nt, Artificial Sequence
  Description of Artificial Sequence: Synthetic oligonucleotide
aaugcgcuccucuacgauc

SEQ ID NO: 1603117 - RNA, 19 nt, Artificial Sequence
  Description of Artificial Sequence: Synthetic oligonucleotide
aagacuuucacaaagucua

SEQ ID NO: 1603118 - RNA, 19 nt, Artificial Sequence
  Description of Artificial Sequence: Synthetic oligonucleotide
ucgaagcugauacacaugu

SEQ ID NO: 1603119 - RNA, 19 nt, Artificial Sequence
  Description of Artificial Sequence: Synthetic oligonucleotide
ugauguggcgauaggagag

SEQ ID NO: 1603120 - RNA, 19 nt, Artificial Sequence
  Description of Artificial Sequence: Synthetic oligonucleotide
gacucgauccaucucaggc

SEQ ID NO: 1603121 - RNA, 19 nt, Artificial Sequence
  Description of Artificial Sequence: Synthetic oligonucleotide
ucauccuugaggcgcacgg

SEQ ID NO: 1603122 - RNA, 19 nt, Artificial Sequence
  Description of Artificial Sequence: Synthetic oligonucleotide
gacucuagguccaaaauug

SEQ ID NO: 1603123 - RNA, 19 nt, Artificial Sequence
  Description of Artificial Sequence: Synthetic oligonucleotide
ugaagugauguagucgucg

SEQ ID NO: 1603124 - RNA, 19 nt, Artificial Sequence
  Description of Artificial Sequence: Synthetic oligonucleotide
aaauugauguggcgauagg

SEQ ID NO: 1603125 - RNA, 19 nt, Artificial Sequence
  Description of Artificial Sequence: Synthetic oligonucleotide
uccaaaauugauguggcga

SEQ ID NO: 1603126 - RNA, 19 nt, Artificial Sequence
  Description of Artificial Sequence: Synthetic oligonucleotide
gaaauacucgcucugccac

SEQ ID NO: 1603127 - RNA, 19 nt, Artificial Sequence
  Description of Artificial Sequence: Synthetic oligonucleotide
cuacgaucagaaauacucg

SEQ ID NO: 1603128 - RNA, 19 nt, Artificial Sequence
  Description of Artificial Sequence: Synthetic oligonucleotide
uacgaucagaaauacucgc

SEQ ID NO: 1603129 - RNA, 19 nt, Artificial Sequence
  Description of Artificial Sequence: Synthetic oligonucleotide
ugauaguacucugucauug

SEQ ID NO: 1603130 - RNA, 19 nt, Artificial Sequence
  Description of Artificial Sequence: Synthetic oligonucleotide
aauugauguggcgauagga

SEQ ID NO: 1603131 - RNA, 19 nt, Artificial Sequence
  Description of Artificial Sequence: Synthetic oligonucleotide
uucucauugcgcuuggugu

SEQ ID NO: 1603132 - RNA, 19 nt, Artificial Sequence
  Description of Artificial Sequence: Synthetic oligonucleotide
agcguguuagcuucucgcc

SEQ ID NO: 1603133 - RNA, 19 nt, Artificial Sequence
  Description of Artificial Sequence: Synthetic oligonucleotide
aagugauguagucgucgcg

SEQ ID NO: 1603134 - RNA, 19 nt, Artificial Sequence
  Description of Artificial Sequence: Synthetic oligonucleotide
gucugagcgcccuugauag

SEQ ID NO: 1603135 - RNA, 19 nt, Artificial Sequence
  Description of Artificial Sequence: Synthetic oligonucleotide
uucuuugugccgauugagc

SEQ ID NO: 1603136 - RNA, 19 nt, Artificial Sequence
  Description of Artificial Sequence: Synthetic oligonucleotide
uaguacucugucauuguca

SEQ ID NO: 1603137 - RNA, 19 nt, Artificial Sequence
  Description of Artificial Sequence: Synthetic oligonucleotide
auuaugaucuuguugccuu

SEQ ID NO: 1603138 - RNA, 19 nt, Artificial Sequence
  Description of Artificial Sequence: Synthetic oligonucleotide
uagcuucucgccuggaggg

SEQ ID NO: 1603139 - RNA, 19 nt, Artificial Sequence
  Description of Artificial Sequence: Synthetic oligonucleotide
aagucuaccaagcgugggu

SEQ ID NO: 1603140 - RNA, 19 nt, Artificial Sequence
  Description of Artificial Sequence: Synthetic oligonucleotide
cuuugugccgauugagccg

SEQ ID NO: 1603141 - RNA, 19 nt, Artificial Sequence
  Description of Artificial Sequence: Synthetic oligonucleotide
aagaugcggauucggaaca

SEQ ID NO: 1603142 - RNA, 19 nt, Artificial Sequence
  Description of Artificial Sequence: Synthetic oligonucleotide
auugauguggcgauaggag

SEQ ID NO: 1603143 - RNA, 19 nt, Artificial Sequence
  Description of Artificial Sequence: Synthetic oligonucleotide
uguguuucagcuccagcgu

SEQ ID NO: 1603144 - RNA, 19 nt, Artificial Sequence
  Description of Artificial Sequence: Synthetic oligonucleotide
uuaucaggccauccacacg

SEQ ID NO: 1603145 - RNA, 19 nt, Artificial Sequence
  Description of Artificial Sequence: Synthetic oligonucleotide
ucuccagaaccuuuguaca

SEQ ID NO: 1603146 - RNA, 19 nt, Artificial Sequence
  Description of Artificial Sequence: Synthetic oligonucleotide
uccucuacgaucagaaaua

SEQ ID NO: 1603147 - RNA, 19 nt, Artificial Sequence
  Description of Artificial Sequence: Synthetic oligonucleotide
cacacggaucuuuucauag

SEQ ID NO: 1603148 - RNA, 19 nt, Artificial Sequence
  Description of Artificial Sequence: Synthetic oligonucleotide
aaagucuaccaagcguggg

SEQ ID NO: 1603149 - RNA, 19 nt, Artificial Sequence
  Description of Artificial Sequence: Synthetic oligonucleotide
cagguacaggucuucaucc

SEQ ID NO: 1603150 - RNA, 19 nt, Artificial Sequence
  Description of Artificial Sequence: Synthetic oligonucleotide
ucauuaugaucuuguugcc

SEQ ID NO: 1603151 - RNA, 19 nt, Artificial Sequence
  Description of Artificial Sequence: Synthetic oligonucleotide
ggggccaucaaacaaagac

SEQ ID NO: 1603152 - RNA, 19 nt, Artificial Sequence
  Description of Artificial Sequence: Synthetic oligonucleotide
gcuucuugacucuaggucc

SEQ ID NO: 1603153 - RNA, 19 nt, Artificial Sequence
  Description of Artificial Sequence: Synthetic oligonucleotide
gauguagucgucgcggcag

SEQ ID NO: 1603154 - RNA, 19 nt, Artificial Sequence
  Description of Artificial Sequence: Synthetic oligonucleotide
auagacuuguaagagugca

SEQ ID NO: 1603155 - RNA, 19 nt, Artificial Sequence
  Description of Artificial Sequence: Synthetic oligonucleotide
cagcauaugugcgucaucc

SEQ ID NO: 1603156 - RNA, 19 nt, Artificial Sequence
  Description of Artificial Sequence: Synthetic oligonucleotide
ucaaagcgggccuggauga

SEQ ID NO: 1603157 - RNA, 19 nt, Artificial Sequence
  Description of Artificial Sequence: Synthetic oligonucleotide
caugacucgauccaucuca

SEQ ID NO: 1603158 - RNA, 19 nt, Artificial Sequence
  Description of Artificial Sequence: Synthetic oligonucleotide
gagaggaagucugagcgcc

SEQ ID NO: 1603159 - RNA, 19 nt, Artificial Sequence
  Description of Artificial Sequence: Synthetic oligonucleotide
cugagucuccuucucaaag

SEQ ID NO: 1603160 - RNA, 19 nt, Artificial Sequence
  Description of Artificial Sequence: Synthetic oligonucleotide
uccaagaugcggauucgga

SEQ ID NO: 1603161 - RNA, 19 nt, Artificial Sequence
  Description of Artificial Sequence: Synthetic oligonucleotide
caggaauggugccagguag

SEQ ID NO: 1603162 - RNA, 19 nt, Artificial Sequence
  Description of Artificial Sequence: Synthetic oligonucleotide
ugacucccaggcuugaugu

SEQ ID NO: 1603163 - RNA, 19 nt, Artificial Sequence
  Description of Artificial Sequence: Synthetic oligonucleotide
agcauagacuuguaagagu

SEQ ID NO: 1603164 - RNA, 19 nt, Artificial Sequence
  Description of Artificial Sequence: Synthetic oligonucleotide
agacuuguaagagugcaca

SEQ ID NO: 1603165 - RNA, 19 nt, Artificial Sequence
  Description of Artificial Sequence: Synthetic oligonucleotide
cauagacuuguaagagugc

SEQ ID NO: 1603166 - RNA, 19 nt, Artificial Sequence
  Description of Artificial Sequence: Synthetic oligonucleotide
agaaccuuuguacacugua

SEQ ID NO: 1603167 - RNA, 19 nt, Artificial Sequence
  Description of Artificial Sequence: Synthetic oligonucleotide
ugcuccauuggcuccaccu

SEQ ID NO: 1603168 - RNA, 19 nt, Artificial Sequence
  Description of Artificial Sequence: Synthetic oligonucleotide
cuggauuucggaggaaccg

SEQ ID NO: 1603169 - RNA, 19 nt, Artificial Sequence
  Description of Artificial Sequence: Synthetic oligonucleotide
guggcgauaggagaggaag

SEQ ID NO: 1603170 - RNA, 19 nt, Artificial Sequence
  Description of Artificial Sequence: Synthetic oligonucleotide
cucgauccaucucaggcag

SEQ ID NO: 1603171 - RNA, 19 nt, Artificial Sequence
  Description of Artificial Sequence: Synthetic oligonucleotide
uguuuauguguuucagcuc

SEQ ID NO: 1603172 - RNA, 19 nt, Artificial Sequence
  Description of Artificial Sequence: Synthetic oligonucleotide
acucgauccaucucaggca

SEQ ID NO: 1603173 - RNA, 19 nt, Artificial Sequence
  Description of Artificial Sequence: Synthetic oligonucleotide
agagugcacacgaagagcu

SEQ ID NO: 1603174 - RNA, 19 nt, Artificial Sequence
  Description of Artificial Sequence: Synthetic oligonucleotide
ucacgcuuggaugaaguga

SEQ ID NO: 1603175 - RNA, 19 nt, Artificial Sequence
  Description of Artificial Sequence: Synthetic oligonucleotide
uuuauguguuucagcucca

SEQ ID NO: 1603176 - RNA, 19 nt, Artificial Sequence
  Description of Artificial Sequence: Synthetic oligonucleotide
aagcugaaugcgcuccucu

SEQ ID NO: 1603177 - RNA, 19 nt, Artificial Sequence
  Description of Artificial Sequence: Synthetic oligonucleotide
cuuuguacacuguaggucu

SEQ ID NO: 1603178 - RNA, 19 nt, Artificial Sequence
  Description of Artificial Sequence: Synthetic oligonucleotide
gauguggcgauaggagagg

SEQ ID NO: 1603179 - RNA, 19 nt, Artificial Sequence
  Description of Artificial Sequence: Synthetic oligonucleotide
ugcggauucggaacauggc

SEQ ID NO: 1603180 - RNA, 19 nt, Artificial Sequence
  Description of Artificial Sequence: Synthetic oligonucleotide
cuccauuggcuccaccucg

SEQ ID NO: 1603181 - RNA, 19 nt, Artificial Sequence
  Description of Artificial Sequence: Synthetic oligonucleotide
ucucauugcgcuugguguc

SEQ ID NO: 1603182 - RNA, 19 nt, Artificial Sequence
  Description of Artificial Sequence: Synthetic oligonucleotide
aaagcgggccuggaugagg

SEQ ID NO: 1603183 - RNA, 19 nt, Artificial Sequence
  Description of Artificial Sequence: Synthetic oligonucleotide
caucaaacaaagacuuuca

SEQ ID NO: 1603184 - RNA, 19 nt, Artificial Sequence
  Description of Artificial Sequence: Synthetic oligonucleotide
gcauagacuuguaagagug

SEQ ID NO: 1603185 - RNA, 19 nt, Artificial Sequence
  Description of Artificial Sequence: Synthetic oligonucleotide
uacugguagagaaguuucu

SEQ ID NO: 1603186 - RNA, 19 nt, Artificial Sequence
  Description of Artificial Sequence: Synthetic oligonucleotide
ggaugaagugauguagucg

SEQ ID NO: 1603187 - RNA, 19 nt, Artificial Sequence
  Description of Artificial Sequence: Synthetic oligonucleotide
cagcguguuagcuucucgc

SEQ ID NO: 1603188 - RNA, 19 nt, Artificial Sequence
  Description of Artificial Sequence: Synthetic oligonucleotide
acucccaggcuugaugucg

SEQ ID NO: 1603189 - RNA, 19 nt, Artificial Sequence
  Description of Artificial Sequence: Synthetic oligonucleotide
cucaugcaagacacguucc

SEQ ID NO: 1603190 - RNA, 19 nt, Artificial Sequence
  Description of Artificial Sequence: Synthetic oligonucleotide
ucugccacguccucaucug

SEQ ID NO: 1603191 - RNA, 19 nt, Artificial Sequence
  Description of Artificial Sequence: Synthetic oligonucleotide
uggauuucggaggaaccgc

SEQ ID NO: 1603192 - RNA, 19 nt, Artificial Sequence
  Description of Artificial Sequence: Synthetic oligonucleotide
gacuuguaagagugcacac

SEQ ID NO: 1603193 - RNA, 19 nt, Artificial Sequence
  Description of Artificial Sequence: Synthetic oligonucleotide
guaagagugcacacgaaga

SEQ ID NO: 1603194 - RNA, 19 nt, Artificial Sequence
  Description of Artificial Sequence: Synthetic oligonucleotide
guccaaaauugauguggcg

SEQ ID NO: 1603195 - RNA, 19 nt, Artificial Sequence
  Description of Artificial Sequence: Synthetic oligonucleotide
agucuaccaagcguggguc

SEQ ID NO: 1603196 - RNA, 19 nt, Artificial Sequence
  Description of Artificial Sequence: Synthetic oligonucleotide
cacguccucaucugcaggc

SEQ ID NO: 1603197 - RNA, 19 nt, Artificial Sequence
  Description of Artificial Sequence: Synthetic oligonucleotide
ugguagcgaagcugaaugc

SEQ ID NO: 1603198 - RNA, 19 nt, Artificial Sequence
  Description of Artificial Sequence: Synthetic oligonucleotide
cagcauagacuuguaagag

SEQ ID NO: 1603199 - RNA, 19 nt, Artificial Sequence
  Description of Artificial Sequence: Synthetic oligonucleotide
uagcgaagcugaaugcgcu

SEQ ID NO: 1603200 - RNA, 19 nt, Artificial Sequence
  Description of Artificial Sequence: Synthetic oligonucleotide
guucuuugugccgauugag

SEQ ID NO: 1603201 - RNA, 19 nt, Artificial Sequence
  Description of Artificial Sequence: Synthetic oligonucleotide
gguagcgaagcugaaugcg

SEQ ID NO: 1603202 - RNA, 19 nt, Artificial Sequence
  Description of Artificial Sequence: Synthetic oligonucleotide
cuugauaguacucugucau

SEQ ID NO: 1603203 - RNA, 19 nt, Artificial Sequence
  Description of Artificial Sequence: Synthetic oligonucleotide
uagacggugaggcggcaca

SEQ ID NO: 1603204 - RNA, 19 nt, Artificial Sequence
  Description of Artificial Sequence: Synthetic oligonucleotide
caguucuuugugccgauug

SEQ ID NO: 1603205 - RNA, 19 nt, Artificial Sequence
  Description of Artificial Sequence: Synthetic oligonucleotide
uuauguguuucagcuccag

SEQ ID NO: 1603206 - RNA, 19 nt, Artificial Sequence
  Description of Artificial Sequence: Synthetic oligonucleotide
augcggauucggaacaugg

SEQ ID NO: 1603207 - RNA, 19 nt, Artificial Sequence
  Description of Artificial Sequence: Synthetic oligonucleotide
ggaacucacgcuuggauga

SEQ ID NO: 1603208 - RNA, 19 nt, Artificial Sequence
  Description of Artificial Sequence: Synthetic oligonucleotide
gucgggacagcuuuucuuc

SEQ ID NO: 1603209 - RNA, 19 nt, Artificial Sequence
  Description of Artificial Sequence: Synthetic oligonucleotide
guagcgaagcugaaugcgc

SEQ ID NO: 1603210 - RNA, 19 nt, Artificial Sequence
  Description of Artificial Sequence: Synthetic oligonucleotide
gauacucuuugcucuucuc

SEQ ID NO: 1603211 - RNA, 19 nt, Artificial Sequence
  Description of Artificial Sequence: Synthetic oligonucleotide
agcgaagcugaaugcgcuc

SEQ ID NO: 1603212 - RNA, 19 nt, Artificial Sequence
  Description of Artificial Sequence: Synthetic oligonucleotide
agacacguuccauggccuc

SEQ ID NO: 1603213 - RNA, 19 nt, Artificial Sequence
  Description of Artificial Sequence: Synthetic oligonucleotide
aggguuaccugguucuccu

SEQ ID NO: 1603214 - RNA, 19 nt, Artificial Sequence
  Description of Artificial Sequence: Synthetic oligonucleotide
uccacgugcaggccuguga

SEQ ID NO: 1603215 - RNA, 19 nt, Artificial Sequence
  Description of Artificial Sequence: Synthetic oligonucleotide
acacguuccauggccuccc

SEQ ID NO: 1603216 - RNA, 19 nt, Artificial Sequence
  Description of Artificial Sequence: Synthetic oligonucleotide
uccauuggcuccaccucga

SEQ ID NO: 1603217 - RNA, 19 nt, Artificial Sequence
  Description of Artificial Sequence: Synthetic oligonucleotide
uaguccacgugcaggccug

SEQ ID NO: 1603218 - RNA, 19 nt, Artificial Sequence
  Description of Artificial Sequence: Synthetic oligonucleotide
cucgguucugguaccacuc

SEQ ID NO: 1603219 - RNA, 19 nt, Artificial Sequence
  Description of Artificial Sequence: Synthetic oligonucleotide
gcggauucggaacauggcc

SEQ ID NO: 1603220 - RNA, 19 nt, Artificial Sequence
  Description of Artificial Sequence: Synthetic oligonucleotide
cuugacucuagguccaaaa

SEQ ID NO: 1603221 - RNA, 19 nt, Artificial Sequence
  Description of Artificial Sequence: Synthetic oligonucleotide
uugaagucgcugaggcacu

SEQ ID NO: 1603222 - RNA, 19 nt, Artificial Sequence
  Description of Artificial Sequence: Synthetic oligonucleotide
caugucgggugucauuaug

SEQ ID NO: 1603223 - RNA, 19 nt, Artificial Sequence
  Description of Artificial Sequence: Synthetic oligonucleotide
guguuucagcuccagcgug

SEQ ID NO: 1603224 - RNA, 19 nt, Artificial Sequence
  Description of Artificial Sequence: Synthetic oligonucleotide
acggaucuuuucauagaac

SEQ ID NO: 1603225 - RNA, 19 nt, Artificial Sequence
  Description of Artificial Sequence: Synthetic oligonucleotide
gaggggccaucaaacaaag

SEQ ID NO: 1603226 - RNA, 19 nt, Artificial Sequence
  Description of Artificial Sequence: Synthetic oligonucleotide
uagucgucgcggcaguggu

SEQ ID NO: 1603227 - RNA, 19 nt, Artificial Sequence
  Description of Artificial Sequence: Synthetic oligonucleotide
agucugagcgcccuugaua

SEQ ID NO: 1603228 - RNA, 19 nt, Artificial Sequence
  Description of Artificial Sequence: Synthetic oligonucleotide
cucugugcgccgcaggaac

SEQ ID NO: 1603229 - RNA, 19 nt, Artificial Sequence
  Description of Artificial Sequence: Synthetic oligonucleotide
ugucgggacagcuuuucuu

SEQ ID NO: 1603230 - RNA, 19 nt, Artificial Sequence
  Description of Artificial Sequence: Synthetic oligonucleotide
cucgaagcugauacacaug

SEQ ID NO: 1603231 - RNA, 19 nt, Artificial Sequence
  Description of Artificial Sequence: Synthetic oligonucleotide
uuggcuccaccucgaagcu

SEQ ID NO: 1603232 - RNA, 19 nt, Artificial Sequence
  Description of Artificial Sequence: Synthetic oligonucleotide
guagucgucgcggcagugg

SEQ ID NO: 1603233 - RNA, 19 nt, Artificial Sequence
  Description of Artificial Sequence: Synthetic oligonucleotide
cucggguuggacucugcac

SEQ ID NO: 1603234 - RNA, 19 nt, Artificial Sequence
  Description of Artificial Sequence: Synthetic oligonucleotide
uugauaguacucugucauu

SEQ ID NO: 1603235 - RNA, 19 nt, Artificial Sequence
  Description of Artificial Sequence: Synthetic oligonucleotide
cauuggcuccaccucgaag

SEQ ID NO: 1603236 - RNA, 19 nt, Artificial Sequence
  Description of Artificial Sequence: Synthetic oligonucleotide
gauaggagaggaagucuga

SEQ ID NO: 1603237 - RNA, 19 nt, Artificial Sequence
  Description of Artificial Sequence: Synthetic oligonucleotide
caccucgaagcugauacac

SEQ ID NO: 1603238 - RNA, 19 nt, Artificial Sequence
  Description of Artificial Sequence: Synthetic oligonucleotide
aacucacgcuuggaugaag

SEQ ID NO: 1603239 - RNA, 19 nt, Artificial Sequence
  Description of Artificial Sequence: Synthetic oligonucleotide
gucgucgcggcagugguag

SEQ ID NO: 1603240 - RNA, 19 nt, Artificial Sequence
  Description of Artificial Sequence: Synthetic oligonucleotide
acgaucagaaauacucgcu

SEQ ID NO: 1603241 - RNA, 19 nt, Artificial Sequence
  Description of Artificial Sequence: Synthetic oligonucleotide
ucauacugguagagaaguu

SEQ ID NO: 1603242 - RNA, 19 nt, Artificial Sequence
  Description of Artificial Sequence: Synthetic oligonucleotide
cuucuugacucuaggucca

SEQ ID NO: 1603243 - RNA, 19 nt, Artificial Sequence
  Description of Artificial Sequence: Synthetic oligonucleotide
agcauaugugcgucauccu

SEQ ID NO: 1603244 - RNA, 19 nt, Artificial Sequence
  Description of Artificial Sequence: Synthetic oligonucleotide
gacacguuccauggccucc

SEQ ID NO: 1603245 - RNA, 19 nt, Artificial Sequence
  Description of Artificial Sequence: Synthetic oligonucleotide
uuuguacacuguaggucuu

SEQ ID NO: 1603246 - RNA, 19 nt, Artificial Sequence
  Description of Artificial Sequence: Synthetic oligonucleotide
ucugugcgccgcaggaacu

SEQ ID NO: 1603247 - RNA, 19 nt, Artificial Sequence
  Description of Artificial Sequence: Synthetic oligonucleotide
cauugucaggggugucucc

SEQ ID NO: 1603248 - RNA, 19 nt, Artificial Sequence
  Description of Artificial Sequence: Synthetic oligonucleotide
ccucaugcaagacacguuc

SEQ ID NO: 1603249 - RNA, 19 nt, Artificial Sequence
  Description of Artificial Sequence: Synthetic oligonucleotide
ucauugucaggggugucuc

SEQ ID NO: 1603250 - RNA, 19 nt, Artificial Sequence
  Description of Artificial Sequence: Synthetic oligonucleotide
cacggaucuuuucauagaa

SEQ ID NO: 1603251 - RNA, 19 nt, Artificial Sequence
  Description of Artificial Sequence: Synthetic oligonucleotide
ucagcauaugugcgucauc

SEQ ID NO: 1603252 - RNA, 19 nt, Artificial Sequence
  Description of Artificial Sequence: Synthetic oligonucleotide
auagacggugaggcggcac

SEQ ID NO: 1603253 - RNA, 19 nt, Artificial Sequence
  Description of Artificial Sequence: Synthetic oligonucleotide
augucgggugucauuauga

SEQ ID NO: 1603254 - RNA, 19 nt, Artificial Sequence
  Description of Artificial Sequence: Synthetic oligonucleotide
uguggcgauaggagaggaa

SEQ ID NO: 1603255 - RNA, 19 nt, Artificial Sequence
  Description of Artificial Sequence: Synthetic oligonucleotide
gauugagccgcuguuccaa

SEQ ID NO: 1603256 - RNA, 19 nt, Artificial Sequence
  Description of Artificial Sequence: Synthetic oligonucleotide
agcguguccucucgguucu

SEQ ID NO: 1603257 - RNA, 19 nt, Artificial Sequence
  Description of Artificial Sequence: Synthetic oligonucleotide
agaggaagucugagcgccc

SEQ ID NO: 1603258 - RNA, 19 nt, Artificial Sequence
  Description of Artificial Sequence: Synthetic oligonucleotide
gucuaccaagcgugggucc

SEQ ID NO: 1603259 - RNA, 19 nt, Artificial Sequence
  Description of Artificial Sequence: Synthetic oligonucleotide
gaagucugagcgcccuuga

SEQ ID NO: 1603260 - RNA, 19 nt, Artificial Sequence
  Description of Artificial Sequence: Synthetic oligonucleotide
cugggacuccaccugccgc

SEQ ID NO: 1603261 - RNA, 19 nt, Artificial Sequence
  Description of Artificial Sequence: Synthetic oligonucleotide
gcacucauccuugaggcgc

SEQ ID NO: 1603262 - RNA, 19 nt, Artificial Sequence
  Description of Artificial Sequence: Synthetic oligonucleotide
aggggugucuccucccgcu

SEQ ID NO: 1603263 - RNA, 19 nt, Artificial Sequence
  Description of Artificial Sequence: Synthetic oligonucleotide
cucauacugguagagaagu

SEQ ID NO: 1603264 - RNA, 19 nt, Artificial Sequence
  Description of Artificial Sequence: Synthetic oligonucleotide
cagcguguccucucgguuc

SEQ ID NO: 1603265 - RNA, 19 nt, Artificial Sequence
  Description of Artificial Sequence: Synthetic oligonucleotide
gucgggugucauuaugauc

SEQ ID NO: 1603266 - RNA, 19 nt, Artificial Sequence
  Description of Artificial Sequence: Synthetic oligonucleotide
auacacaugucggguguca

SEQ ID NO: 1603267 - RNA, 19 nt, Artificial Sequence
  Description of Artificial Sequence: Synthetic oligonucleotide
cuccucuacgaucagaaau

SEQ ID NO: 1603268 - RNA, 19 nt, Artificial Sequence
  Description of Artificial Sequence: Synthetic oligonucleotide
agugguagcgaagcugaau

SEQ ID NO: 1603269 - RNA, 19 nt, Artificial Sequence
  Description of Artificial Sequence: Synthetic oligonucleotide
acaggguuaccugguucuc

SEQ ID NO: 1603270 - RNA, 19 nt, Artificial Sequence
  Description of Artificial Sequence: Synthetic oligonucleotide
ccgcaugugcuccucaugc

SEQ ID NO: 1603271 - RNA, 19 nt, Artificial Sequence
  Description of Artificial Sequence: Synthetic oligonucleotide
gauacacaugucggguguc

SEQ ID NO: 1603272 - RNA, 19 nt, Artificial Sequence
  Description of Artificial Sequence: Synthetic oligonucleotide
uccugguaccauugcugcu

SEQ ID NO: 1603273 - RNA, 19 nt, Artificial Sequence
  Description of Artificial Sequence: Synthetic oligonucleotide
caggguuaccugguucucc

SEQ ID NO: 1603274 - RNA, 19 nt, Artificial Sequence
  Description of Artificial Sequence: Synthetic oligonucleotide
cacuguaggucuucauaga

SEQ ID NO: 1603275 - RNA, 19 nt, Artificial Sequence
  Description of Artificial Sequence: Synthetic oligonucleotide
acucacgcuuggaugaagu

SEQ ID NO: 1603276 - RNA, 19 nt, Artificial Sequence
  Description of Artificial Sequence: Synthetic oligonucleotide
ggcgugggaucacagugcc

SEQ ID NO: 1603277 - RNA, 19 nt, Artificial Sequence
  Description of Artificial Sequence: Synthetic oligonucleotide
ccgauugagccgcuguucc

SEQ ID NO: 1603278 - RNA, 19 nt, Artificial Sequence
  Description of Artificial Sequence: Synthetic oligonucleotide
uuguacacuguaggucuuc

SEQ ID NO: 1603279 - RNA, 19 nt, Artificial Sequence
  Description of Artificial Sequence: Synthetic oligonucleotide
auguagucgucgcggcagu

SEQ ID NO: 1603280 - RNA, 19 nt, Artificial Sequence
  Description of Artificial Sequence: Synthetic oligonucleotide
cacaugucgggugucauua

SEQ ID NO: 1603281 - RNA, 19 nt, Artificial Sequence
  Description of Artificial Sequence: Synthetic oligonucleotide
gaaccgcucugugauuuuc

SEQ ID NO: 1603282 - RNA, 19 nt, Artificial Sequence
  Description of Artificial Sequence: Synthetic oligonucleotide
uguagucgucgcggcagug

SEQ ID NO: 1603283 - RNA, 19 nt, Artificial Sequence
  Description of Artificial Sequence: Synthetic oligonucleotide
uccucgggugacaggguua

SEQ ID NO: 1603284 - RNA, 19 nt, Artificial Sequence
  Description of Artificial Sequence: Synthetic oligonucleotide
gccuggagggaguugugcc

SEQ ID NO: 1603285 - RNA, 19 nt, Artificial Sequence
  Description of Artificial Sequence: Synthetic oligonucleotide
agcgcccuugauaguacuc

SEQ ID NO: 1603286 - RNA, 19 nt, Artificial Sequence
  Description of Artificial Sequence: Synthetic oligonucleotide
aggaaccgcucugugauuu

SEQ ID NO: 1603287 - RNA, 19 nt, Artificial Sequence
  Description of Artificial Sequence: Synthetic oligonucleotide
ccagaaccuuuguacacug

SEQ ID NO: 1603288 - RNA, 19 nt, Artificial Sequence
  Description of Artificial Sequence: Synthetic oligonucleotide
acacaugucgggugucauu

SEQ ID NO: 1603289 - RNA, 19 nt, Artificial Sequence
  Description of Artificial Sequence: Synthetic oligonucleotide
ucugagcgcccuugauagu

SEQ ID NO: 1603290 - RNA, 19 nt, Artificial Sequence
  Description of Artificial Sequence: Synthetic oligonucleotide
gcagugguagcgaagcuga

SEQ ID NO: 1603291 - RNA, 19 nt, Artificial Sequence
  Description of Artificial Sequence: Synthetic oligonucleotide
uacuucaguggagccaguu

SEQ ID NO: 1603292 - RNA, 19 nt, Artificial Sequence
  Description of Artificial Sequence: Synthetic oligonucleotide
ggcgauaggagaggaaguc

SEQ ID NO: 1603293 - RNA, 19 nt, Artificial Sequence
  Description of Artificial Sequence: Synthetic oligonucleotide
gcaagacacguuccauggc

SEQ ID NO: 1603294 - RNA, 19 nt, Artificial Sequence
  Description of Artificial Sequence: Synthetic oligonucleotide
gacggugaggcggcacacc

SEQ ID NO: 1603295 - RNA, 19 nt, Artificial Sequence
  Description of Artificial Sequence: Synthetic oligonucleotide
ugugcgccgcaggaacuca

SEQ ID NO: 1603296 - RNA, 19 nt, Artificial Sequence
  Description of Artificial Sequence: Synthetic oligonucleotide
ugugccgauugagccgcug

SEQ ID NO: 1603297 - RNA, 19 nt, Artificial Sequence
  Description of Artificial Sequence: Synthetic oligonucleotide
cauuaugaucuuguugccu

SEQ ID NO: 1603298 - RNA, 19 nt, Artificial Sequence
  Description of Artificial Sequence: Synthetic oligonucleotide
ccggcgugggaucacagug

SEQ ID NO: 1603299 - RNA, 19 nt, Artificial Sequence
  Description of Artificial Sequence: Synthetic oligonucleotide
auguggcgauaggagagga

SEQ ID NO: 1603300 - RNA, 19 nt, Artificial Sequence
  Description of Artificial Sequence: Synthetic oligonucleotide
ugaagucgcugaggcacuc

SEQ ID NO: 1603301 - RNA, 19 nt, Artificial Sequence
  Description of Artificial Sequence: Synthetic oligonucleotide
caggcuugaugucgggaca

SEQ ID NO: 1603302 - RNA, 19 nt, Artificial Sequence
  Description of Artificial Sequence: Synthetic oligonucleotide
caccucugugcgccgcagg

SEQ ID NO: 1603303 - RNA, 19 nt, Artificial Sequence
  Description of Artificial Sequence: Synthetic oligonucleotide
gcgaagcugaaugcgcucc

SEQ ID NO: 1603304 - RNA, 19 nt, Artificial Sequence
  Description of Artificial Sequence: Synthetic oligonucleotide
ggaauggugccagguaguc

SEQ ID NO: 1603305 - RNA, 19 nt, Artificial Sequence
  Description of Artificial Sequence: Synthetic oligonucleotide
gaaugcgcuccucuacgau

SEQ ID NO: 1603306 - RNA, 19 nt, Artificial Sequence
  Description of Artificial Sequence: Synthetic oligonucleotide
ccaagaugcggauucggaa

SEQ ID NO: 1603307 - RNA, 19 nt, Artificial Sequence
  Description of Artificial Sequence: Synthetic oligonucleotide
gaagucgcugaggcacuca

SEQ ID NO: 1603308 - RNA, 19 nt, Artificial Sequence
  Description of Artificial Sequence: Synthetic oligonucleotide
cacguuccauggccucccg

SEQ ID NO: 1603309 - RNA, 19 nt, Artificial Sequence
  Description of Artificial Sequence: Synthetic oligonucleotide
cugagcgcccuugauagua

SEQ ID NO: 1603310 - RNA, 19 nt, Artificial Sequence
  Description of Artificial Sequence: Synthetic oligonucleotide
uucuugacucuagguccaa

SEQ ID NO: 1603311 - RNA, 19 nt, Artificial Sequence
  Description of Artificial Sequence: Synthetic oligonucleotide
caaaauugauguggcgaua

SEQ ID NO: 1603312 - RNA, 19 nt, Artificial Sequence
  Description of Artificial Sequence: Synthetic oligonucleotide
cacgugcaggccugugauc

SEQ ID NO: 1603313 - RNA, 19 nt, Artificial Sequence
  Description of Artificial Sequence: Synthetic oligonucleotide
acguccucaucugcaggcu

SEQ ID NO: 1603314 - RNA, 19 nt, Artificial Sequence
  Description of Artificial Sequence: Synthetic oligonucleotide
cucuacgaucagaaauacu

SEQ ID NO: 1603315 - RNA, 19 nt, Artificial Sequence
  Description of Artificial Sequence: Synthetic oligonucleotide
ccucuacgaucagaaauac

SEQ ID NO: 1603316 - RNA, 19 nt, Artificial Sequence
  Description of Artificial Sequence: Synthetic oligonucleotide
gaacucacgcuuggaugaa

SEQ ID NO: 1603317 - RNA, 19 nt, Artificial Sequence
  Description of Artificial Sequence: Synthetic oligonucleotide
ggcuucgcuggauuucgga

SEQ ID NO: 1603318 - RNA, 19 nt, Artificial Sequence
  Description of Artificial Sequence: Synthetic oligonucleotide
gcuucucgccuggagggag

SEQ ID NO: 1603319 - RNA, 19 nt, Artificial Sequence
  Description of Artificial Sequence: Synthetic oligonucleotide
cugaggcacucauccuuga

SEQ ID NO: 1603320 - RNA, 19 nt, Artificial Sequence
  Description of Artificial Sequence: Synthetic oligonucleotide
accaagcguggguccuugu

SEQ ID NO: 1603321 - RNA, 19 nt, Artificial Sequence
  Description of Artificial Sequence: Synthetic oligonucleotide
cugugcgccgcaggaacuc

SEQ ID NO: 1603322 - RNA, 19 nt, Artificial Sequence
  Description of Artificial Sequence: Synthetic oligonucleotide
ucucgccuggagggaguug

SEQ ID NO: 1603323 - RNA, 19 nt, Artificial Sequence
  Description of Artificial Sequence: Synthetic oligonucleotide
gguuagccuugucgaugag

SEQ ID NO: 1603324 - RNA, 19 nt, Artificial Sequence
  Description of Artificial Sequence: Synthetic oligonucleotide
gugaggcggcacaccaggc

SEQ ID NO: 1603325 - RNA, 19 nt, Artificial Sequence
  Description of Artificial Sequence: Synthetic oligonucleotide
aggcuucgcuggauuucgg

SEQ ID NO: 1603326 - RNA, 19 nt, Artificial Sequence
  Description of Artificial Sequence: Synthetic oligonucleotide
ucgucgcggcagugguagc

SEQ ID NO: 1603327 - RNA, 19 nt, Artificial Sequence
  Description of Artificial Sequence: Synthetic oligonucleotide
ggucagcauaugugcguca

SEQ ID NO: 1603328 - RNA, 19 nt, Artificial Sequence
  Description of Artificial Sequence: Synthetic oligonucleotide
gugaggccggcgugggauc

SEQ ID NO: 1603329 - RNA, 19 nt, Artificial Sequence
  Description of Artificial Sequence: Synthetic oligonucleotide
ggguuaccugguucuccug

SEQ ID NO: 1603330 - RNA, 19 nt, Artificial Sequence
  Description of Artificial Sequence: Synthetic oligonucleotide
cucgccuggagggaguugu

SEQ ID NO: 1603331 - RNA, 19 nt, Artificial Sequence
  Description of Artificial Sequence: Synthetic oligonucleotide
gugccgauugagccgcugu

SEQ ID NO: 1603332 - RNA, 19 nt, Artificial Sequence
  Description of Artificial Sequence: Synthetic oligonucleotide
gucagcauaugugcgucau

SEQ ID NO: 1603333 - RNA, 19 nt, Artificial Sequence
  Description of Artificial Sequence: Synthetic oligonucleotide
gccugugaucuuguuuaug

SEQ ID NO: 1603334 - RNA, 19 nt, Artificial Sequence
  Description of Artificial Sequence: Synthetic oligonucleotide
acgcuuggaugaagugaug

SEQ ID NO: 1603335 - RNA, 19 nt, Artificial Sequence
  Description of Artificial Sequence: Synthetic oligonucleotide
gucgcggcagugguagcga

SEQ ID NO: 1603336 - RNA, 19 nt, Artificial Sequence
  Description of Artificial Sequence: Synthetic oligonucleotide
gaguugugccaggaauggu

SEQ ID NO: 1603337 - RNA, 19 nt, Artificial Sequence
  Description of Artificial Sequence: Synthetic oligonucleotide
ccucgggugacaggguuac

SEQ ID NO: 1603338 - RNA, 19 nt, Artificial Sequence
  Description of Artificial Sequence: Synthetic oligonucleotide
gccgauugagccgcuguuc

SEQ ID NO: 1603339 - RNA, 19 nt, Artificial Sequence
  Description of Artificial Sequence: Synthetic oligonucleotide
gcguguuagcuucucgccu

SEQ ID NO: 1603340 - RNA, 19 nt, Artificial Sequence
  Description of Artificial Sequence: Synthetic oligonucleotide
ggauuucggaggaaccgcu

SEQ ID NO: 1603341 - RNA, 19 nt, Artificial Sequence
  Description of Artificial Sequence: Synthetic oligonucleotide
cagaaccuuuguacacugu

SEQ ID NO: 1603342 - RNA, 19 nt, Artificial Sequence
  Description of Artificial Sequence: Synthetic oligonucleotide
ggcgcacggccugccagcg

SEQ ID NO: 1603343 - RNA, 19 nt, Artificial Sequence
  Description of Artificial Sequence: Synthetic oligonucleotide
guguccucucgguucuggu

SEQ ID NO: 1603344 - RNA, 19 nt, Artificial Sequence
  Description of Artificial Sequence: Synthetic oligonucleotide
cucgggugacaggguuacc

SEQ ID NO: 1603345 - RNA, 19 nt, Artificial Sequence
  Description of Artificial Sequence: Synthetic oligonucleotide
cgcuccucuacgaucagaa

SEQ ID NO: 1603346 - RNA, 19 nt, Artificial Sequence
  Description of Artificial Sequence: Synthetic oligonucleotide
aggggccaucaaacaaaga

SEQ ID NO: 1603347 - RNA, 19 nt, Artificial Sequence
  Description of Artificial Sequence: Synthetic oligonucleotide
cgcacggccugccagcgug

SEQ ID NO: 1603348 - RNA, 19 nt, Artificial Sequence
  Description of Artificial Sequence: Synthetic oligonucleotide
gccgcaggaacucacgcuu

SEQ ID NO: 1603349 - RNA, 19 nt, Artificial Sequence
  Description of Artificial Sequence: Synthetic oligonucleotide
cagugguagcgaagcugaa

SEQ ID NO: 1603350 - RNA, 19 nt, Artificial Sequence
  Description of Artificial Sequence: Synthetic oligonucleotide
gccucccgauacucuuugc

SEQ ID NO: 1603351 - RNA, 19 nt, Artificial Sequence
  Description of Artificial Sequence: Synthetic oligonucleotide
cuucucgccuggagggagu

SEQ ID NO: 1603352 - RNA, 19 nt, Artificial Sequence
  Description of Artificial Sequence: Synthetic oligonucleotide
gugcgccgcaggaacucac

SEQ ID NO: 1603353 - RNA, 19 nt, Artificial Sequence
  Description of Artificial Sequence: Synthetic oligonucleotide
gcuguuccaagaugcggau

SEQ ID NO: 1603354 - RNA, 19 nt, Artificial Sequence
  Description of Artificial Sequence: Synthetic oligonucleotide
gcuccucuacgaucagaaa

SEQ ID NO: 1603355 - RNA, 19 nt, Artificial Sequence
  Description of Artificial Sequence: Synthetic oligonucleotide
guccacgugcaggccugug

SEQ ID NO: 1603356 - RNA, 19 nt, Artificial Sequence
  Description of Artificial Sequence: Synthetic oligonucleotide
cauagacggugaggcggca

SEQ ID NO: 1603357 - RNA, 19 nt, Artificial Sequence
  Description of Artificial Sequence: Synthetic oligonucleotide
cguguccucucgguucugg

SEQ ID NO: 1603358 - RNA, 19 nt, Artificial Sequence
  Description of Artificial Sequence: Synthetic oligonucleotide
gaggaaccgcucugugauu

SEQ ID NO: 1603359 - RNA, 19 nt, Artificial Sequence
  Description of Artificial Sequence: Synthetic oligonucleotide
gggagggacuccauucucu

SEQ ID NO: 1603360 - RNA, 19 nt, Artificial Sequence
  Description of Artificial Sequence: Synthetic oligonucleotide
gaggccggcgugggaucac

SEQ ID NO: 1603361 - RNA, 19 nt, Artificial Sequence
  Description of Artificial Sequence: Synthetic oligonucleotide
ccucccgauacucuuugcu

SEQ ID NO: 1603362 - RNA, 19 nt, Artificial Sequence
  Description of Artificial Sequence: Synthetic oligonucleotide
gcgcccuugauaguacucu

SEQ ID NO: 1603363 - RNA, 19 nt, Artificial Sequence
  Description of Artificial Sequence: Synthetic oligonucleotide
gagaagggagggacuccau

SEQ ID NO: 1603364 - RNA, 19 nt, Artificial Sequence
  Description of Artificial Sequence: Synthetic oligonucleotide
cggaggaaccgcucuguga

SEQ ID NO: 1603365 - RNA, 19 nt, Artificial Sequence
  Description of Artificial Sequence: Synthetic oligonucleotide
ccgauacucuuugcucuuc

SEQ ID NO: 1603366 - RNA, 19 nt, Artificial Sequence
  Description of Artificial Sequence: Synthetic oligonucleotide
agucgucgcggcaguggua

SEQ ID NO: 1603367 - RNA, 19 nt, Artificial Sequence
  Description of Artificial Sequence: Synthetic oligonucleotide
ccaagcguggguccuugua

SEQ ID NO: 1603368 - RNA, 19 nt, Artificial Sequence
  Description of Artificial Sequence: Synthetic oligonucleotide
ggccugccagcguguuagc

SEQ ID NO: 1603369 - RNA, 19 nt, Artificial Sequence
  Description of Artificial Sequence: Synthetic oligonucleotide
cccgcuuuaucaggccauc

SEQ ID NO: 1603370 - RNA, 19 nt, Artificial Sequence
  Description of Artificial Sequence: Synthetic oligonucleotide
cgauugagccgcuguucca

SEQ ID NO: 1603371 - RNA, 19 nt, Artificial Sequence
  Description of Artificial Sequence: Synthetic oligonucleotide
ccugccagcguguuagcuu

SEQ ID NO: 1603372 - RNA, 19 nt, Artificial Sequence
  Description of Artificial Sequence: Synthetic oligonucleotide
ggccucggguuggacucug

SEQ ID NO: 1603373 - RNA, 19 nt, Artificial Sequence
  Description of Artificial Sequence: Synthetic oligonucleotide
cuccaccucgaagcugaua

SEQ ID NO: 1603374 - RNA, 19 nt, Artificial Sequence
  Description of Artificial Sequence: Synthetic oligonucleotide
ccacgugcaggccugugau

SEQ ID NO: 1603375 - RNA, 19 nt, Artificial Sequence
  Description of Artificial Sequence: Synthetic oligonucleotide
ggaaccgcucugugauuuu

SEQ ID NO: 1603376 - RNA, 19 nt, Artificial Sequence
  Description of Artificial Sequence: Synthetic oligonucleotide
cuguuccaagaugcggauu

SEQ ID NO: 1603377 - RNA, 19 nt, Artificial Sequence
  Description of Artificial Sequence: Synthetic oligonucleotide
gccaucaaacaaagacuuu

SEQ ID NO: 1603378 - RNA, 19 nt, Artificial Sequence
  Description of Artificial Sequence: Synthetic oligonucleotide
gcgcuccucuacgaucaga

SEQ ID NO: 1603379 - RNA, 19 nt, Artificial Sequence
  Description of Artificial Sequence: Synthetic oligonucleotide
guacuucaguggagccagu

SEQ ID NO: 1603380 - RNA, 19 nt, Artificial Sequence
  Description of Artificial Sequence: Synthetic oligonucleotide
ccauuggcuccaccucgaa

SEQ ID NO: 1603381 - RNA, 19 nt, Artificial Sequence
  Description of Artificial Sequence: Synthetic oligonucleotide
gccucggguuggacucugc

SEQ ID NO: 1603382 - RNA, 19 nt, Artificial Sequence
  Description of Artificial Sequence: Synthetic oligonucleotide
cuaccaagcguggguccuu

SEQ ID NO: 1603383 - RNA, 19 nt, Artificial Sequence
  Description of Artificial Sequence: Synthetic oligonucleotide
cccgauacucuuugcucuu

SEQ ID NO: 1603384 - RNA, 19 nt, Artificial Sequence
  Description of Artificial Sequence: Synthetic oligonucleotide
ccucugugcgccgcaggaa

SEQ ID NO: 1603385 - RNA, 19 nt, Artificial Sequence
  Description of Artificial Sequence: Synthetic oligonucleotide
gcguguccucucgguucug

SEQ ID NO: 1603386 - RNA, 19 nt, Artificial Sequence
  Description of Artificial Sequence: Synthetic oligonucleotide
cgccgcaggaacucacgcu

SEQ ID NO: 1603387 - RNA, 19 nt, Artificial Sequence
  Description of Artificial Sequence: Synthetic oligonucleotide
gggacuccaccugccgcau

SEQ ID NO: 1603388 - RNA, 19 nt, Artificial Sequence
  Description of Artificial Sequence: Synthetic oligonucleotide
gcgugggaucacagugccu

SEQ ID NO: 1603389 - RNA, 19 nt, Artificial Sequence
  Description of Artificial Sequence: Synthetic oligonucleotide
cacggccugccagcguguu

SEQ ID NO: 1603390 - RNA, 19 nt, Artificial Sequence
  Description of Artificial Sequence: Synthetic oligonucleotide
gggccucggguuggacucu

SEQ ID NO: 1603391 - RNA, 19 nt, Artificial Sequence
  Description of Artificial Sequence: Synthetic oligonucleotide
cgggugucauuaugaucuu

SEQ ID NO: 1603392 - RNA, 19 nt, Artificial Sequence
  Description of Artificial Sequence: Synthetic oligonucleotide
uguauacuagcauacaugg

SEQ ID NO: 1603393 - RNA, 19 nt, Artificial Sequence
  Description of Artificial Sequence: Synthetic oligonucleotide
aagguaaggagauucaggg

SEQ ID NO: 1603394 - RNA, 19 nt, Artificial Sequence
  Description of Artificial Sequence: Synthetic oligonucleotide
uauacuagcauacaugggc

SEQ ID NO: 1603395 - RNA, 19 nt, Artificial Sequence
  Description of Artificial Sequence: Synthetic oligonucleotide
agacauacagaacugggcc

SEQ ID NO: 1603396 - RNA, 19 nt, Artificial Sequence
  Description of Artificial Sequence: Synthetic oligonucleotide
agcacuaagggacuggucc

SEQ ID NO: 1603397 - RNA, 19 nt, Artificial Sequence
  Description of Artificial Sequence: Synthetic oligonucleotide
aaccauuucaucccugagc

SEQ ID NO: 1603398 - RNA, 19 nt, Artificial Sequence
  Description of Artificial Sequence: Synthetic oligonucleotide
ucaacaguuguccugaggc

SEQ ID NO: 1603399 - RNA, 19 nt, Artificial Sequence
  Description of Artificial Sequence: Synthetic oligonucleotide
aaaugcacaggccccaggc

SEQ ID NO: 1603400 - RNA, 19 nt, Artificial Sequence
  Description of Artificial Sequence: Synthetic oligonucleotide
ucaaccaggagugauacgg

SEQ ID NO: 1603401 - RNA, 19 nt, Artificial Sequence
  Description of Artificial Sequence: Synthetic oligonucleotide
ugcauaguuugguugaugg

SEQ ID NO: 1603402 - RNA, 19 nt, Artificial Sequence
  Description of Artificial Sequence: Synthetic oligonucleotide
uguaacaccugcaaucucc

SEQ ID NO: 1603403 - RNA, 19 nt, Artificial Sequence
  Description of Artificial Sequence: Synthetic oligonucleotide
ugugagaccaggauuuggg

SEQ ID NO: 1603404 - RNA, 19 nt, Artificial Sequence
  Description of Artificial Sequence: Synthetic oligonucleotide
agugacaggcaguucagcc

SEQ ID NO: 1603405 - RNA, 19 nt, Artificial Sequence
  Description of Artificial Sequence: Synthetic oligonucleotide
auaagugacaggcaguuca

SEQ ID NO: 1603406 - RNA, 19 nt, Artificial Sequence
  Description of Artificial Sequence: Synthetic oligonucleotide
ucuggagccaaugugaggc

SEQ ID NO: 1603407 - RNA, 19 nt, Artificial Sequence
  Description of Artificial Sequence: Synthetic oligonucleotide
ugaagcuuccucuugcacc

SEQ ID NO: 1603408 - RNA, 19 nt, Artificial Sequence
  Description of Artificial Sequence: Synthetic oligonucleotide
augcccgggacacugagcc

SEQ ID NO: 1603409 - RNA, 19 nt, Artificial Sequence
  Description of Artificial Sequence: Synthetic oligonucleotide
cucacaaccauuucauccc

SEQ ID NO: 1603410 - RNA, 19 nt, Artificial Sequence
  Description of Artificial Sequence: Synthetic oligonucleotide
uagacauacagaacugggc

SEQ ID NO: 1603411 - RNA, 19 nt, Artificial Sequence
  Description of Artificial Sequence: Synthetic oligonucleotide
aaucccaugugcuccagcu

SEQ ID NO: 1603412 - RNA, 19 nt, Artificial Sequence
  Description of Artificial Sequence: Synthetic oligonucleotide
aacaccugcaaucuccgcu

SEQ ID NO: 1603413 - RNA, 19 nt, Artificial Sequence
  Description of Artificial Sequence: Synthetic oligonucleotide
aaauugaagcuuccucuug

SEQ ID NO: 1603414 - RNA, 19 nt, Artificial Sequence
  Description of Artificial Sequence: Synthetic oligonucleotide
ugggaaggagccuuagugg

SEQ ID NO: 1603415 - RNA, 19 nt, Artificial Sequence
  Description of Artificial Sequence: Synthetic oligonucleotide
agccuuaguggccagcacc

SEQ ID NO: 1603416 - RNA, 19 nt, Artificial Sequence
  Description of Artificial Sequence: Synthetic oligonucleotide
caagguaaggagauucagg

SEQ ID NO: 1603417 - RNA, 19 nt, Artificial Sequence
  Description of Artificial Sequence: Synthetic oligonucleotide
aguagcacagccagcagcc

SEQ ID NO: 1603418 - RNA, 19 nt, Artificial Sequence
  Description of Artificial Sequence: Synthetic oligonucleotide
agcagcauaggcuagucca

SEQ ID NO: 1603419 - RNA, 19 nt, Artificial Sequence
  Description of Artificial Sequence: Synthetic oligonucleotide
caaacgagcugcaggaagg

SEQ ID NO: 1603420 - RNA, 19 nt, Artificial Sequence
  Description of Artificial Sequence: Synthetic oligonucleotide
agcauuuguucauccaggg

SEQ ID NO: 1603421 - RNA, 19 nt, Artificial Sequence
  Description of Artificial Sequence: Synthetic oligonucleotide
cuguauacuagcauacaug

SEQ ID NO: 1603422 - RNA, 19 nt, Artificial Sequence
  Description of Artificial Sequence: Synthetic oligonucleotide
agguaucacgaagugaagc

SEQ ID NO: 1603423 - RNA, 19 nt, Artificial Sequence
  Description of Artificial Sequence: Synthetic oligonucleotide
ugcauuggacaccccaagg

SEQ ID NO: 1603424 - RNA, 19 nt, Artificial Sequence
  Description of Artificial Sequence: Synthetic oligonucleotide
ucucacuccagcaggauaa

SEQ ID NO: 1603425 - RNA, 19 nt, Artificial Sequence
  Description of Artificial Sequence: Synthetic oligonucleotide
aggguaguaacucugcccu

SEQ ID NO: 1603426 - RNA, 19 nt, Artificial Sequence
  Description of Artificial Sequence: Synthetic oligonucleotide
uaucacgaagugaagccug

SEQ ID NO: 1603427 - RNA, 19 nt, Artificial Sequence
  Description of Artificial Sequence: Synthetic oligonucleotide
uccuguaacaccugcaauc

SEQ ID NO: 1603428 - RNA, 19 nt, Artificial Sequence
  Description of Artificial Sequence: Synthetic oligonucleotide
auagacauacagaacuggg

SEQ ID NO: 1603429 - RNA, 19 nt, Artificial Sequence
  Description of Artificial Sequence: Synthetic oligonucleotide
caggauaagugacaggcag

SEQ ID NO: 1603430 - RNA, 19 nt, Artificial Sequence
  Description of Artificial Sequence: Synthetic oligonucleotide
gcguagagugccuagaugg

SEQ ID NO: 1603431 - RNA, 19 nt, Artificial Sequence
  Description of Artificial Sequence: Synthetic oligonucleotide
gcaaucuccgcucugagag

SEQ ID NO: 1603432 - RNA, 19 nt, Artificial Sequence
  Description of Artificial Sequence: Synthetic oligonucleotide
accggaaggccccagcagc

SEQ ID NO: 1603433 - RNA, 19 nt, Artificial Sequence
  Description of Artificial Sequence: Synthetic oligonucleotide
ggcuaguccagcaagaagg

SEQ ID NO: 1603434 - RNA, 19 nt, Artificial Sequence
  Description of Artificial Sequence: Synthetic oligonucleotide
acaucgggguuccuggagc

SEQ ID NO: 1603435 - RNA, 19 nt, Artificial Sequence
  Description of Artificial Sequence: Synthetic oligonucleotide
ugauacggcacccuccaca

SEQ ID NO: 1603436 - RNA, 19 nt, Artificial Sequence
  Description of Artificial Sequence: Synthetic oligonucleotide
gauggacaggcauguaucc

SEQ ID NO: 1603437 - RNA, 19 nt, Artificial Sequence
  Description of Artificial Sequence: Synthetic oligonucleotide
acuagcauacaugggcacc

SEQ ID NO: 1603438 - RNA, 19 nt, Artificial Sequence
  Description of Artificial Sequence: Synthetic oligonucleotide
uuuggggaagcaagguaag

SEQ ID NO: 1603439 - RNA, 19 nt, Artificial Sequence
  Description of Artificial Sequence: Synthetic oligonucleotide
aacaguuguccugaggcug

SEQ ID NO: 1603440 - RNA, 19 nt, Artificial Sequence
  Description of Artificial Sequence: Synthetic oligonucleotide
uugggcaaccacaucaagu

SEQ ID NO: 1603441 - RNA, 19 nt, Artificial Sequence
  Description of Artificial Sequence: Synthetic oligonucleotide
gacugguccauagacauac

SEQ ID NO: 1603442 - RNA, 19 nt, Artificial Sequence
  Description of Artificial Sequence: Synthetic oligonucleotide
ugagaccaggauuugggga

SEQ ID NO: 1603443 - RNA, 19 nt, Artificial Sequence
  Description of Artificial Sequence: Synthetic oligonucleotide
uugugcaggaagcguagag

SEQ ID NO: 1603444 - RNA, 19 nt, Artificial Sequence
  Description of Artificial Sequence: Synthetic oligonucleotide
aguucuggggacccugaac

SEQ ID NO: 1603445 - RNA, 19 nt, Artificial Sequence
  Description of Artificial Sequence: Synthetic oligonucleotide
cauaggcuaguccagcaag

SEQ ID NO: 1603446 - RNA, 19 nt, Artificial Sequence
  Description of Artificial Sequence: Synthetic oligonucleotide
cucuccaaugcuuggagac

SEQ ID NO: 1603447 - RNA, 19 nt, Artificial Sequence
  Description of Artificial Sequence: Synthetic oligonucleotide
gaacggagguaucacgaag

SEQ ID NO: 1603448 - RNA, 19 nt, Artificial Sequence
  Description of Artificial Sequence: Synthetic oligonucleotide
cuaaauugaagcuuccucu

SEQ ID NO: 1603449 - RNA, 19 nt, Artificial Sequence
  Description of Artificial Sequence: Synthetic oligonucleotide
aguccuucaaccaggagug

SEQ ID NO: 1603450 - RNA, 19 nt, Artificial Sequence
  Description of Artificial Sequence: Synthetic oligonucleotide
acaccugcaaucuccgcuc

SEQ ID NO: 1603451 - RNA, 19 nt, Artificial Sequence
  Description of Artificial Sequence: Synthetic oligonucleotide
caugugaaaugcacaggcc

SEQ ID NO: 1603452 - RNA, 19 nt, Artificial Sequence
  Description of Artificial Sequence: Synthetic oligonucleotide
gauacggcacccuccacac

SEQ ID NO: 1603453 - RNA, 19 nt, Artificial Sequence
  Description of Artificial Sequence: Synthetic oligonucleotide
cauaguuugguugauggca

SEQ ID NO: 1603454 - RNA, 19 nt, Artificial Sequence
  Description of Artificial Sequence: Synthetic oligonucleotide
ugggcaaccacaucaaguu

SEQ ID NO: 1603455 - RNA, 19 nt, Artificial Sequence
  Description of Artificial Sequence: Synthetic oligonucleotide
cauuuguucauccagggcu

SEQ ID NO: 1603456 - RNA, 19 nt, Artificial Sequence
  Description of Artificial Sequence: Synthetic oligonucleotide
caugggaguagccauggug

SEQ ID NO: 1603457 - RNA, 19 nt, Artificial Sequence
  Description of Artificial Sequence: Synthetic oligonucleotide
agugauacggcacccucca

SEQ ID NO: 1603458 - RNA, 19 nt, Artificial Sequence
  Description of Artificial Sequence: Synthetic oligonucleotide
aaacgagcugcaggaaggg

SEQ ID NO: 1603459 - RNA, 19 nt, Artificial Sequence
  Description of Artificial Sequence: Synthetic oligonucleotide
aguccugcaaaggacacug

SEQ ID NO: 1603460 - RNA, 19 nt, Artificial Sequence
  Description of Artificial Sequence: Synthetic oligonucleotide
aggagcaucagaacugagg

SEQ ID NO: 1603461 - RNA, 19 nt, Artificial Sequence
  Description of Artificial Sequence: Synthetic oligonucleotide
cuuaguggccagcaccggg

SEQ ID NO: 1603462 - RNA, 19 nt, Artificial Sequence
  Description of Artificial Sequence: Synthetic oligonucleotide
caggguaguaacucugccc

SEQ ID NO: 1603463 - RNA, 19 nt, Artificial Sequence
  Description of Artificial Sequence: Synthetic oligonucleotide
acauacagaacugggccuc

SEQ ID NO: 1603464 - RNA, 19 nt, Artificial Sequence
  Description of Artificial Sequence: Synthetic oligonucleotide
auaguuugguugauggcag

SEQ ID NO: 1603465 - RNA, 19 nt, Artificial Sequence
  Description of Artificial Sequence: Synthetic oligonucleotide
uccaggguaguaacucugc

SEQ ID NO: 1603466 - RNA, 19 nt, Artificial Sequence
  Description of Artificial Sequence: Synthetic oligonucleotide
cuaagggacugguccauag

SEQ ID NO: 1603467 - RNA, 19 nt, Artificial Sequence
  Description of Artificial Sequence: Synthetic oligonucleotide
aacgagcugcaggaagggc

SEQ ID NO: 1603468 - RNA, 19 nt, Artificial Sequence
  Description of Artificial Sequence: Synthetic oligonucleotide
aacggagguaucacgaagu

SEQ ID NO: 1603469 - RNA, 19 nt, Artificial Sequence
  Description of Artificial Sequence: Synthetic oligonucleotide
aaucuccgcucugagagcu

SEQ ID NO: 1603470 - RNA, 19 nt, Artificial Sequence
  Description of Artificial Sequence: Synthetic oligonucleotide
ugcaccuucucacaaccau

SEQ ID NO: 1603471 - RNA, 19 nt, Artificial Sequence
  Description of Artificial Sequence: Synthetic oligonucleotide
aaagcuggaugccgcccag

SEQ ID NO: 1603472 - RNA, 19 nt, Artificial Sequence
  Description of Artificial Sequence: Synthetic oligonucleotide
gugagaccaggauuugggg

SEQ ID NO: 1603473 - RNA, 19 nt, Artificial Sequence
  Description of Artificial Sequence: Synthetic oligonucleotide
cugagagcuccaaccaccg

SEQ ID NO: 1603474 - RNA, 19 nt, Artificial Sequence
  Description of Artificial Sequence: Synthetic oligonucleotide
uggcagucaacaguugucc

SEQ ID NO: 1603475 - RNA, 19 nt, Artificial Sequence
  Description of Artificial Sequence: Synthetic oligonucleotide
aguuugguugauggcaguc

SEQ ID NO: 1603476 - RNA, 19 nt, Artificial Sequence
  Description of Artificial Sequence: Synthetic oligonucleotide
agcauacaugggcaccugg

SEQ ID NO: 1603477 - RNA, 19 nt, Artificial Sequence
  Description of Artificial Sequence: Synthetic oligonucleotide
acgagcugcaggaagggcg

SEQ ID NO: 1603478 - RNA, 19 nt, Artificial Sequence
  Description of Artificial Sequence: Synthetic oligonucleotide
agcaugggucaguagccgg

SEQ ID NO: 1603479 - RNA, 19 nt, Artificial Sequence
  Description of Artificial Sequence: Synthetic oligonucleotide
augccgcccaguccaagcc

SEQ ID NO: 1603480 - RNA, 19 nt, Artificial Sequence
  Description of Artificial Sequence: Synthetic oligonucleotide
gggucaccuaaauugaagc

SEQ ID NO: 1603481 - RNA, 19 nt, Artificial Sequence
  Description of Artificial Sequence: Synthetic oligonucleotide
uuguccugaggcuguauac

SEQ ID NO: 1603482 - RNA, 19 nt, Artificial Sequence
  Description of Artificial Sequence: Synthetic oligonucleotide
guaacaccugcaaucuccg

SEQ ID NO: 1603483 - RNA, 19 nt, Artificial Sequence
  Description of Artificial Sequence: Synthetic oligonucleotide
uccugcaaaggacacuguc

SEQ ID NO: 1603484 - RNA, 19 nt, Artificial Sequence
  Description of Artificial Sequence: Synthetic oligonucleotide
uaagggacugguccauaga

SEQ ID NO: 1603485 - RNA, 19 nt, Artificial Sequence
  Description of Artificial Sequence: Synthetic oligonucleotide
ugugcaggaagcguagagu

SEQ ID NO: 1603486 - RNA, 19 nt, Artificial Sequence
  Description of Artificial Sequence: Synthetic oligonucleotide
guauacuagcauacauggg

SEQ ID NO: 1603487 - RNA, 19 nt, Artificial Sequence
  Description of Artificial Sequence: Synthetic oligonucleotide
uucaucccugagcacuaag

SEQ ID NO: 1603488 - RNA, 19 nt, Artificial Sequence
  Description of Artificial Sequence: Synthetic oligonucleotide
aaugcccgggacacugagc

SEQ ID NO: 1603489 - RNA, 19 nt, Artificial Sequence
  Description of Artificial Sequence: Synthetic oligonucleotide
aggcuguauacuagcauac

SEQ ID NO: 1603490 - RNA, 19 nt, Artificial Sequence
  Description of Artificial Sequence: Synthetic oligonucleotide
uucuggggacccugaacgg

SEQ ID NO: 1603491 - RNA, 19 nt, Artificial Sequence
  Description of Artificial Sequence: Synthetic oligonucleotide
gucaacaguuguccugagg

SEQ ID NO: 1603492 - RNA, 19 nt, Artificial Sequence
  Description of Artificial Sequence: Synthetic oligonucleotide
gaugccgcccaguccaagc

SEQ ID NO: 1603493 - RNA, 19 nt, Artificial Sequence
  Description of Artificial Sequence: Synthetic oligonucleotide
caccaguccuucaaccagg

SEQ ID NO: 1603494 - RNA, 19 nt, Artificial Sequence
  Description of Artificial Sequence: Synthetic oligonucleotide
ggggaagcaagguaaggag

SEQ ID NO: 1603495 - RNA, 19 nt, Artificial Sequence
  Description of Artificial Sequence: Synthetic oligonucleotide
cuguagcauuuguucaucc

SEQ ID NO: 1603496 - RNA, 19 nt, Artificial Sequence
  Description of Artificial Sequence: Synthetic oligonucleotide
gguaaggagauucaggggu

SEQ ID NO: 1603497 - RNA, 19 nt, Artificial Sequence
  Description of Artificial Sequence: Synthetic oligonucleotide
aagcguagagugccuagau

SEQ ID NO: 1603498 - RNA, 19 nt, Artificial Sequence
  Description of Artificial Sequence: Synthetic oligonucleotide
agugcccuugcagugggcg

SEQ ID NO: 1603499 - RNA, 19 nt, Artificial Sequence
  Description of Artificial Sequence: Synthetic oligonucleotide
ggagguaucacgaagugaa

SEQ ID NO: 1603500 - RNA, 19 nt, Artificial Sequence
  Description of Artificial Sequence: Synthetic oligonucleotide
cugaacggagguaucacga

SEQ ID NO: 1603501 - RNA, 19 nt, Artificial Sequence
  Description of Artificial Sequence: Synthetic oligonucleotide
gauuuggggaagcaaggua

SEQ ID NO: 1603502 - RNA, 19 nt, Artificial Sequence
  Description of Artificial Sequence: Synthetic oligonucleotide
augggucaguagccggugc

SEQ ID NO: 1603503 - RNA, 19 nt, Artificial Sequence
  Description of Artificial Sequence: Synthetic oligonucleotide
agaggcaaugcccgggaca

SEQ ID NO: 1603504 - RNA, 19 nt, Artificial Sequence
  Description of Artificial Sequence: Synthetic oligonucleotide
auacuagcauacaugggca

SEQ ID NO: 1603505 - RNA, 19 nt, Artificial Sequence
  Description of Artificial Sequence: Synthetic oligonucleotide
auggcagucaacaguuguc

SEQ ID NO: 1603506 - RNA, 19 nt, Artificial Sequence
  Description of Artificial Sequence: Synthetic oligonucleotide
acugccuggggugggaagg

SEQ ID NO: 1603507 - RNA, 19 nt, Artificial Sequence
  Description of Artificial Sequence: Synthetic oligonucleotide
ccugcaaaggacacugucc

SEQ ID NO: 1603508 - RNA, 19 nt, Artificial Sequence
  Description of Artificial Sequence: Synthetic oligonucleotide
ugaacggagguaucacgaa

SEQ ID NO: 1603509 - RNA, 19 nt, Artificial Sequence
  Description of Artificial Sequence: Synthetic oligonucleotide
agcguagagugccuagaug

SEQ ID NO: 1603510 - RNA, 19 nt, Artificial Sequence
  Description of Artificial Sequence: Synthetic oligonucleotide
ugggucaguagccggugca

SEQ ID NO: 1603511 - RNA, 19 nt, Artificial Sequence
  Description of Artificial Sequence: Synthetic oligonucleotide
aggaagcaagaggcaaugc

SEQ ID NO: 1603512 - RNA, 19 nt, Artificial Sequence
  Description of Artificial Sequence: Synthetic oligonucleotide
uacuagcauacaugggcac

SEQ ID NO: 1603513 - RNA, 19 nt, Artificial Sequence
  Description of Artificial Sequence: Synthetic oligonucleotide
cugccaccagcccagagug

SEQ ID NO: 1603514 - RNA, 19 nt, Artificial Sequence
  Description of Artificial Sequence: Synthetic oligonucleotide
gcauuggacaccccaaggc

SEQ ID NO: 1603515 - RNA, 19 nt, Artificial Sequence
  Description of Artificial Sequence: Synthetic oligonucleotide
caggcucaagagcaggccc

SEQ ID NO: 1603516 - RNA, 19 nt, Artificial Sequence
  Description of Artificial Sequence: Synthetic oligonucleotide
gaggacuugggcaaccaca

SEQ ID NO: 1603517 - RNA, 19 nt, Artificial Sequence
  Description of Artificial Sequence: Synthetic oligonucleotide
agaguccugcaaaggacac

SEQ ID NO: 1603518 - RNA, 19 nt, Artificial Sequence
  Description of Artificial Sequence: Synthetic oligonucleotide
gauggcagucaacaguugu

SEQ ID NO: 1603519 - RNA, 19 nt, Artificial Sequence
  Description of Artificial Sequence: Synthetic oligonucleotide
auacaugggcaccuggauu

SEQ ID NO: 1603520 - RNA, 19 nt, Artificial Sequence
  Description of Artificial Sequence: Synthetic oligonucleotide
ugagcacuaagggacuggu

SEQ ID NO: 1603521 - RNA, 19 nt, Artificial Sequence
  Description of Artificial Sequence: Synthetic oligonucleotide
accaccggaaggccccagc

SEQ ID NO: 1603522 - RNA, 19 nt, Artificial Sequence
  Description of Artificial Sequence: Synthetic oligonucleotide
guaaggagauucaggggug

SEQ ID NO: 1603523 - RNA, 19 nt, Artificial Sequence
  Description of Artificial Sequence: Synthetic oligonucleotide
uugguugauggcagucaac

SEQ ID NO: 1603524 - RNA, 19 nt, Artificial Sequence
  Description of Artificial Sequence: Synthetic oligonucleotide
gagcaugggucaguagccg

SEQ ID NO: 1603525 - RNA, 19 nt, Artificial Sequence
  Description of Artificial Sequence: Synthetic oligonucleotide
ggagcaaagcuggaugccg

SEQ ID NO: 1603526 - RNA, 19 nt, Artificial Sequence
  Description of Artificial Sequence: Synthetic oligonucleotide
agcucuggagccaauguga

SEQ ID NO: 1603527 - RNA, 19 nt, Artificial Sequence
  Description of Artificial Sequence: Synthetic oligonucleotide
ggacacugagccaucagag

SEQ ID NO: 1603528 - RNA, 19 nt, Artificial Sequence
  Description of Artificial Sequence: Synthetic oligonucleotide
gagugauacggcacccucc

SEQ ID NO: 1603529 - RNA, 19 nt, Artificial Sequence
  Description of Artificial Sequence: Synthetic oligonucleotide
cugcauuggacaccccaag

SEQ ID NO: 1603530 - RNA, 19 nt, Artificial Sequence
  Description of Artificial Sequence: Synthetic oligonucleotide
ugaaaugcacaggccccag

SEQ ID NO: 1603531 - RNA, 19 nt, Artificial Sequence
  Description of Artificial Sequence: Synthetic oligonucleotide
guaguaacucugcccugcc

SEQ ID NO: 1603532 - RNA, 19 nt, Artificial Sequence
  Description of Artificial Sequence: Synthetic oligonucleotide
cagaguccugcaaaggaca

SEQ ID NO: 1603533 - RNA, 19 nt, Artificial Sequence
  Description of Artificial Sequence: Synthetic oligonucleotide
caaccauuucaucccugag

SEQ ID NO: 1603534 - RNA, 19 nt, Artificial Sequence
  Description of Artificial Sequence: Synthetic oligonucleotide
uggccagauggacaggcau

SEQ ID NO: 1603535 - RNA, 19 nt, Artificial Sequence
  Description of Artificial Sequence: Synthetic oligonucleotide
uggggaaucccaugugcuc

SEQ ID NO: 1603536 - RNA, 19 nt, Artificial Sequence
  Description of Artificial Sequence: Synthetic oligonucleotide
uauccacagccuccagcug

SEQ ID NO: 1603537 - RNA, 19 nt, Artificial Sequence
  Description of Artificial Sequence: Synthetic oligonucleotide
gagcaaagcuggaugccgc

SEQ ID NO: 1603538 - RNA, 19 nt, Artificial Sequence
  Description of Artificial Sequence: Synthetic oligonucleotide
cucaguggggaaucccaug

SEQ ID NO: 1603539 - RNA, 19 nt, Artificial Sequence
  Description of Artificial Sequence: Synthetic oligonucleotide
guucagccagacugccugg

SEQ ID NO: 1603540 - RNA, 19 nt, Artificial Sequence
  Description of Artificial Sequence: Synthetic oligonucleotide
ggaagggcggcucagagcu

SEQ ID NO: 1603541 - RNA, 19 nt, Artificial Sequence
  Description of Artificial Sequence: Synthetic oligonucleotide
ucuggggacccugaacgga

SEQ ID NO: 1603542 - RNA, 19 nt, Artificial Sequence
  Description of Artificial Sequence: Synthetic oligonucleotide
aagggcggcucagagcuga

SEQ ID NO: 1603543 - RNA, 19 nt, Artificial Sequence
  Description of Artificial Sequence: Synthetic oligonucleotide
gcaugcauaguuugguuga

SEQ ID NO: 1603544 - RNA, 19 nt, Artificial Sequence
  Description of Artificial Sequence: Synthetic oligonucleotide
caaucuccgcucugagagc

SEQ ID NO: 1603545 - RNA, 19 nt, Artificial Sequence
  Description of Artificial Sequence: Synthetic oligonucleotide
gagguaucacgaagugaag

SEQ ID NO: 1603546 - RNA, 19 nt, Artificial Sequence
  Description of Artificial Sequence: Synthetic oligonucleotide
aggcucaagagcaggcccg

SEQ ID NO: 1603547 - RNA, 19 nt, Artificial Sequence
  Description of Artificial Sequence: Synthetic oligonucleotide
ugggcgggaccacuccucc

SEQ ID NO: 1603548 - RNA, 19 nt, Artificial Sequence
  Description of Artificial Sequence: Synthetic oligonucleotide
gcaggaagcguagagugcc

SEQ ID NO: 1603549 - RNA, 19 nt, Artificial Sequence
  Description of Artificial Sequence: Synthetic oligonucleotide
agccaucacugugagacca

SEQ ID NO: 1603550 - RNA, 19 nt, Artificial Sequence
  Description of Artificial Sequence: Synthetic oligonucleotide
uaacucugcccugccagca

SEQ ID NO: 1603551 - RNA, 19 nt, Artificial Sequence
  Description of Artificial Sequence: Synthetic oligonucleotide
ccugaacggagguaucacg

SEQ ID NO: 1603552 - RNA, 19 nt, Artificial Sequence
  Description of Artificial Sequence: Synthetic oligonucleotide
ccgcagagaagacacagag

SEQ ID NO: 1603553 - RNA, 19 nt, Artificial Sequence
  Description of Artificial Sequence: Synthetic oligonucleotide
ccugaggcuguauacuagc

SEQ ID NO: 1603554 - RNA, 19 nt, Artificial Sequence
  Description of Artificial Sequence: Synthetic oligonucleotide
cauuucaucccugagcacu

SEQ ID NO: 1603555 - RNA, 19 nt, Artificial Sequence
  Description of Artificial Sequence: Synthetic oligonucleotide
gaagcguagagugccuaga

SEQ ID NO: 1603556 - RNA, 19 nt, Artificial Sequence
  Description of Artificial Sequence: Synthetic oligonucleotide
ggaagcguagagugccuag

SEQ ID NO: 1603557 - RNA, 19 nt, Artificial Sequence
  Description of Artificial Sequence: Synthetic oligonucleotide
gcauaguuugguugauggc

SEQ ID NO: 1603558 - RNA, 19 nt, Artificial Sequence
  Description of Artificial Sequence: Synthetic oligonucleotide
uccuucaaccaggagugau

SEQ ID NO: 1603559 - RNA, 19 nt, Artificial Sequence
  Description of Artificial Sequence: Synthetic oligonucleotide
caaugcccgggacacugag

SEQ ID NO: 1603560 - RNA, 19 nt, Artificial Sequence
  Description of Artificial Sequence: Synthetic oligonucleotide
uggagccaaugugaggcug

SEQ ID NO: 1603561 - RNA, 19 nt, Artificial Sequence
  Description of Artificial Sequence: Synthetic oligonucleotide
auaggcuaguccagcaaga

SEQ ID NO: 1603562 - RNA, 19 nt, Artificial Sequence
  Description of Artificial Sequence: Synthetic oligonucleotide
gagccaaugugaggcuggg

SEQ ID NO: 1603563 - RNA, 19 nt, Artificial Sequence
  Description of Artificial Sequence: Synthetic oligonucleotide
aucccaugugcuccagcug

SEQ ID NO: 1603564 - RNA, 19 nt, Artificial Sequence
  Description of Artificial Sequence: Synthetic oligonucleotide
gagccaucacugugagacc

SEQ ID NO: 1603565 - RNA, 19 nt, Artificial Sequence
  Description of Artificial Sequence: Synthetic oligonucleotide
ugccuagauggcacuccug

SEQ ID NO: 1603566 - RNA, 19 nt, Artificial Sequence
  Description of Artificial Sequence: Synthetic oligonucleotide
uaggcuaguccagcaagaa

SEQ ID NO: 1603567 - RNA, 19 nt, Artificial Sequence
  Description of Artificial Sequence: Synthetic oligonucleotide
ugccgcccaguccaagccc

SEQ ID NO: 1603568 - RNA, 19 nt, Artificial Sequence
  Description of Artificial Sequence: Synthetic oligonucleotide
aggauaagugacaggcagu

SEQ ID NO: 1603569 - RNA, 19 nt, Artificial Sequence
  Description of Artificial Sequence: Synthetic oligonucleotide
cugcaaaggacacuguccu

SEQ ID NO: 1603570 - RNA, 19 nt, Artificial Sequence
  Description of Artificial Sequence: Synthetic oligonucleotide
gccuuaguggccagcaccg

SEQ ID NO: 1603571 - RNA, 19 nt, Artificial Sequence
  Description of Artificial Sequence: Synthetic oligonucleotide
cauacagaacugggccucc

SEQ ID NO: 1603572 - RNA, 19 nt, Artificial Sequence
  Description of Artificial Sequence: Synthetic oligonucleotide
ccaggagugauacggcacc

SEQ ID NO: 1603573 - RNA, 19 nt, Artificial Sequence
  Description of Artificial Sequence: Synthetic oligonucleotide
cagucaacaguuguccuga

SEQ ID NO: 1603574 - RNA, 19 nt, Artificial Sequence
  Description of Artificial Sequence: Synthetic oligonucleotide
gacugccuggggugggaag

SEQ ID NO: 1603575 - RNA, 19 nt, Artificial Sequence
  Description of Artificial Sequence: Synthetic oligonucleotide
cccacaucgggguuccugg

SEQ ID NO: 1603576 - RNA, 19 nt, Artificial Sequence
  Description of Artificial Sequence: Synthetic oligonucleotide
gacacugagccaucagagu

SEQ ID NO: 1603577 - RNA, 19 nt, Artificial Sequence
  Description of Artificial Sequence: Synthetic oligonucleotide
auccaggguaguaacucug

SEQ ID NO: 1603578 - RNA, 19 nt, Artificial Sequence
  Description of Artificial Sequence: Synthetic oligonucleotide
aggagauucagggguggca

SEQ ID NO: 1603579 - RNA, 19 nt, Artificial Sequence
  Description of Artificial Sequence: Synthetic oligonucleotide
aggacuugggcaaccacau

SEQ ID NO: 1603580 - RNA, 19 nt, Artificial Sequence
  Description of Artificial Sequence: Synthetic oligonucleotide
auacggcacccuccacacg

SEQ ID NO: 1603581 - RNA, 19 nt, Artificial Sequence
  Description of Artificial Sequence: Synthetic oligonucleotide
uccccucggucacuagggc

SEQ ID NO: 1603582 - RNA, 19 nt, Artificial Sequence
  Description of Artificial Sequence: Synthetic oligonucleotide
gaguugugcaggaagcgua

SEQ ID NO: 1603583 - RNA, 19 nt, Artificial Sequence
  Description of Artificial Sequence: Synthetic oligonucleotide
ggagccaaugugaggcugg

SEQ ID NO: 1603584 - RNA, 19 nt, Artificial Sequence
  Description of Artificial Sequence: Synthetic oligonucleotide
cucaagagcaggcccggca

SEQ ID NO: 1603585 - RNA, 19 nt, Artificial Sequence
  Description of Artificial Sequence: Synthetic oligonucleotide
gagcaucagaacugaggaa

SEQ ID NO: 1603586 - RNA, 19 nt, Artificial Sequence
  Description of Artificial Sequence: Synthetic oligonucleotide
cugcaaucuccgcucugag

SEQ ID NO: 1603587 - RNA, 19 nt, Artificial Sequence
  Description of Artificial Sequence: Synthetic oligonucleotide
agugggcgggaccacuccu

SEQ ID NO: 1603588 - RNA, 19 nt, Artificial Sequence
  Description of Artificial Sequence: Synthetic oligonucleotide
gggaccacuccuccccucg

SEQ ID NO: 1603589 - RNA, 19 nt, Artificial Sequence
  Description of Artificial Sequence: Synthetic oligonucleotide
auaaccacaggcagcucau

SEQ ID NO: 1603590 - RNA, 19 nt, Artificial Sequence
  Description of Artificial Sequence: Synthetic oligonucleotide
ccccaauaaccacaggcag

SEQ ID NO: 1603591 - RNA, 19 nt, Artificial Sequence
  Description of Artificial Sequence: Synthetic oligonucleotide
cagggcggaguugugcagg

SEQ ID NO: 1603592 - RNA, 19 nt, Artificial Sequence
  Description of Artificial Sequence: Synthetic oligonucleotide
aggagccuuaguggccagc

SEQ ID NO: 1603593 - RNA, 19 nt, Artificial Sequence
  Description of Artificial Sequence: Synthetic oligonucleotide
ucggucacuagggcuucag

SEQ ID NO: 1603594 - RNA, 19 nt, Artificial Sequence
  Description of Artificial Sequence: Synthetic oligonucleotide
gcauguauccacagccucc

SEQ ID NO: 1603595 - RNA, 19 nt, Artificial Sequence
  Description of Artificial Sequence: Synthetic oligonucleotide
ggcauguauccacagccuc

SEQ ID NO: 1603596 - RNA, 19 nt, Artificial Sequence
  Description of Artificial Sequence: Synthetic oligonucleotide
caguagccggugcaccugc

SEQ ID NO: 1603597 - RNA, 19 nt, Artificial Sequence
  Description of Artificial Sequence: Synthetic oligonucleotide
cugaguccauccaugugaa

SEQ ID NO: 1603598 - RNA, 19 nt, Artificial Sequence
  Description of Artificial Sequence: Synthetic oligonucleotide
gucacuagggcuucaguuu

SEQ ID NO: 1603599 - RNA, 19 nt, Artificial Sequence
  Description of Artificial Sequence: Synthetic oligonucleotide
ccacaaacgagcugcagga

SEQ ID NO: 1603600 - RNA, 19 nt, Artificial Sequence
  Description of Artificial Sequence: Synthetic oligonucleotide
caaccacaucaaguucugg

SEQ ID NO: 1603601 - RNA, 19 nt, Artificial Sequence
  Description of Artificial Sequence: Synthetic oligonucleotide
caucacugugagaccagga

SEQ ID NO: 1603602 - RNA, 19 nt, Artificial Sequence
  Description of Artificial Sequence: Synthetic oligonucleotide
aggcaugcauaguuugguu

SEQ ID NO: 1603603 - RNA, 19 nt, Artificial Sequence
  Description of Artificial Sequence: Synthetic oligonucleotide
uccaagccccucucugagu

SEQ ID NO: 1603604 - RNA, 19 nt, Artificial Sequence
  Description of Artificial Sequence: Synthetic oligonucleotide
uccugccaccagcccagag

SEQ ID NO: 1603605 - RNA, 19 nt, Artificial Sequence
  Description of Artificial Sequence: Synthetic oligonucleotide
ucacgaagugaagccugga

SEQ ID NO: 1603606 - RNA, 19 nt, Artificial Sequence
  Description of Artificial Sequence: Synthetic oligonucleotide
caccggaaggccccagcag

SEQ ID NO: 1603607 - RNA, 19 nt, Artificial Sequence
  Description of Artificial Sequence: Synthetic oligonucleotide
gugaaaugcacaggcccca

SEQ ID NO: 1603608 - RNA, 19 nt, Artificial Sequence
  Description of Artificial Sequence: Synthetic oligonucleotide
ggcggcucagagcugagca

SEQ ID NO: 1603609 - RNA, 19 nt, Artificial Sequence
  Description of Artificial Sequence: Synthetic oligonucleotide
ccuagauggcacuccugcc

SEQ ID NO: 1603610 - RNA, 19 nt, Artificial Sequence
  Description of Artificial Sequence: Synthetic oligonucleotide
gcuaguccagcaagaaggc

SEQ ID NO: 1603611 - RNA, 19 nt, Artificial Sequence
  Description of Artificial Sequence: Synthetic oligonucleotide
acccugaacggagguauca

SEQ ID NO: 1603612 - RNA, 19 nt, Artificial Sequence
  Description of Artificial Sequence: Synthetic oligonucleotide
cuguaacaccugcaaucuc

SEQ ID NO: 1603613 - RNA, 19 nt, Artificial Sequence
  Description of Artificial Sequence: Synthetic oligonucleotide
agggcaagcagggcggagu

SEQ ID NO: 1603614 - RNA, 19 nt, Artificial Sequence
  Description of Artificial Sequence: Synthetic oligonucleotide
ccaccaguccuucaaccag

SEQ ID NO: 1603615 - RNA, 19 nt, Artificial Sequence
  Description of Artificial Sequence: Synthetic oligonucleotide
ggcaguucagccagacugc

SEQ ID NO: 1603616 - RNA, 19 nt, Artificial Sequence
  Description of Artificial Sequence: Synthetic oligonucleotide
guccugaggcuguauacua

SEQ ID NO: 1603617 - RNA, 19 nt, Artificial Sequence
  Description of Artificial Sequence: Synthetic oligonucleotide
caguggggaaucccaugug

SEQ ID NO: 1603618 - RNA, 19 nt, Artificial Sequence
  Description of Artificial Sequence: Synthetic oligonucleotide
gcaucagaacugaggaagc

SEQ ID NO: 1603619 - RNA, 19 nt, Artificial Sequence
  Description of Artificial Sequence: Synthetic oligonucleotide
uagcauacaugggcaccug

SEQ ID NO: 1603620 - RNA, 19 nt, Artificial Sequence
  Description of Artificial Sequence: Synthetic oligonucleotide
auuucaucccugagcacua

SEQ ID NO: 1603621 - RNA, 19 nt, Artificial Sequence
  Description of Artificial Sequence: Synthetic oligonucleotide
ccacacgcccuguagcugc

SEQ ID NO: 1603622 - RNA, 19 nt, Artificial Sequence
  Description of Artificial Sequence: Synthetic oligonucleotide
agcaccgggccagaguccu

SEQ ID NO: 1603623 - RNA, 19 nt, Artificial Sequence
  Description of Artificial Sequence: Synthetic oligonucleotide
acgcccuguagcugccaag

SEQ ID NO: 1603624 - RNA, 19 nt, Artificial Sequence
  Description of Artificial Sequence: Synthetic oligonucleotide
ggaaggagccuuaguggcc

SEQ ID NO: 1603625 - RNA, 19 nt, Artificial Sequence
  Description of Artificial Sequence: Synthetic oligonucleotide
ggucaccuaaauugaagcu

SEQ ID NO: 1603626 - RNA, 19 nt, Artificial Sequence
  Description of Artificial Sequence: Synthetic oligonucleotide
guaucacgaagugaagccu

SEQ ID NO: 1603627 - RNA, 19 nt, Artificial Sequence
  Description of Artificial Sequence: Synthetic oligonucleotide
agggcggaguugugcagga

SEQ ID NO: 1603628 - RNA, 19 nt, Artificial Sequence
  Description of Artificial Sequence: Synthetic oligonucleotide
aggcauguauccacagccu

SEQ ID NO: 1603629 - RNA, 19 nt, Artificial Sequence
  Description of Artificial Sequence: Synthetic oligonucleotide
gagacagggucaccuaaau

SEQ ID NO: 1603630 - RNA, 19 nt, Artificial Sequence
  Description of Artificial Sequence: Synthetic oligonucleotide
gggccagaguccugcaaag

SEQ ID NO: 1603631 - RNA, 19 nt, Artificial Sequence
  Description of Artificial Sequence: Synthetic oligonucleotide
gccaugggaguagccaugg

SEQ ID NO: 1603632 - RNA, 19 nt, Artificial Sequence
  Description of Artificial Sequence: Synthetic oligonucleotide
gcagcauaggcuaguccag

SEQ ID NO: 1603633 - RNA, 19 nt, Artificial Sequence
  Description of Artificial Sequence: Synthetic oligonucleotide
gcuguauacuagcauacau

SEQ ID NO: 1603634 - RNA, 19 nt, Artificial Sequence
  Description of Artificial Sequence: Synthetic oligonucleotide
aggagugauacggcacccu

SEQ ID NO: 1603635 - RNA, 19 nt, Artificial Sequence
  Description of Artificial Sequence: Synthetic oligonucleotide
ccaagccccucucugaguc

SEQ ID NO: 1603636 - RNA, 19 nt, Artificial Sequence
  Description of Artificial Sequence: Synthetic oligonucleotide
cagugggcgggaccacucc

SEQ ID NO: 1603637 - RNA, 19 nt, Artificial Sequence
  Description of Artificial Sequence: Synthetic oligonucleotide
agccaaugugaggcugggg

SEQ ID NO: 1603638 - RNA, 19 nt, Artificial Sequence
  Description of Artificial Sequence: Synthetic oligonucleotide
cuagcauacaugggcaccu

SEQ ID NO: 1603639 - RNA, 19 nt, Artificial Sequence
  Description of Artificial Sequence: Synthetic oligonucleotide
cugcucaguggggaauccc

SEQ ID NO: 1603640 - RNA, 19 nt, Artificial Sequence
  Description of Artificial Sequence: Synthetic oligonucleotide
caccgggccagaguccugc

SEQ ID NO: 1603641 - RNA, 19 nt, Artificial Sequence
  Description of Artificial Sequence: Synthetic oligonucleotide
gauuugcucuccaaugcuu

SEQ ID NO: 1603642 - RNA, 19 nt, Artificial Sequence
  Description of Artificial Sequence: Synthetic oligonucleotide
gcucuggagccaaugugag

SEQ ID NO: 1603643 - RNA, 19 nt, Artificial Sequence
  Description of Artificial Sequence: Synthetic oligonucleotide
cacacgcccuguagcugcc

SEQ ID NO: 1603644 - RNA, 19 nt, Artificial Sequence
  Description of Artificial Sequence: Synthetic oligonucleotide
uuucaucccugagcacuaa

SEQ ID NO: 1603645 - RNA, 19 nt, Artificial Sequence
  Description of Artificial Sequence: Synthetic oligonucleotide
gucaguagccggugcaccu

SEQ ID NO: 1603646 - RNA, 19 nt, Artificial Sequence
  Description of Artificial Sequence: Synthetic oligonucleotide
ccuccacacgcccuguagc

SEQ ID NO: 1603647 - RNA, 19 nt, Artificial Sequence
  Description of Artificial Sequence: Synthetic oligonucleotide
ggauuugcucuccaaugcu

SEQ ID NO: 1603648 - RNA, 19 nt, Artificial Sequence
  Description of Artificial Sequence: Synthetic oligonucleotide
guagccggugcaccugcca

SEQ ID NO: 1603649 - RNA, 19 nt, Artificial Sequence
  Description of Artificial Sequence: Synthetic oligonucleotide
ccauccaggguaguaacuc

SEQ ID NO: 1603650 - RNA, 19 nt, Artificial Sequence
  Description of Artificial Sequence: Synthetic oligonucleotide
gcuggaugccgcccagucc

SEQ ID NO: 1603651 - RNA, 19 nt, Artificial Sequence
  Description of Artificial Sequence: Synthetic oligonucleotide
aucaaguucuggggacccu

SEQ ID NO: 1603652 - RNA, 19 nt, Artificial Sequence
  Description of Artificial Sequence: Synthetic oligonucleotide
cauacaugggcaccuggau

SEQ ID NO: 1603653 - RNA, 19 nt, Artificial Sequence
  Description of Artificial Sequence: Synthetic oligonucleotide
aucccuuccuguagcauuu

SEQ ID NO: 1603654 - RNA, 19 nt, Artificial Sequence
  Description of Artificial Sequence: Synthetic oligonucleotide
ccuccccucggucacuagg

SEQ ID NO: 1603655 - RNA, 19 nt, Artificial Sequence
  Description of Artificial Sequence: Synthetic oligonucleotide
ggucaguagccggugcacc

SEQ ID NO: 1603656 - RNA, 19 nt, Artificial Sequence
  Description of Artificial Sequence: Synthetic oligonucleotide
ggaagcaagguaaggagau

SEQ ID NO: 1603657 - RNA, 19 nt, Artificial Sequence
  Description of Artificial Sequence: Synthetic oligonucleotide
cauccaggguaguaacucu

SEQ ID NO: 1603658 - RNA, 19 nt, Artificial Sequence
  Description of Artificial Sequence: Synthetic oligonucleotide
caacaguuguccugaggcu

SEQ ID NO: 1603659 - RNA, 19 nt, Artificial Sequence
  Description of Artificial Sequence: Synthetic oligonucleotide
gagugccuagauggcacuc

SEQ ID NO: 1603660 - RNA, 19 nt, Artificial Sequence
  Description of Artificial Sequence: Synthetic oligonucleotide
cagggucaccuaaauugaa

SEQ ID NO: 1603661 - RNA, 19 nt, Artificial Sequence
  Description of Artificial Sequence: Synthetic oligonucleotide
accaguccuucaaccagga

SEQ ID NO: 1603662 - RNA, 19 nt, Artificial Sequence
  Description of Artificial Sequence: Synthetic oligonucleotide
gagcacuaagggacugguc

SEQ ID NO: 1603663 - RNA, 19 nt, Artificial Sequence
  Description of Artificial Sequence: Synthetic oligonucleotide
ggguaguaacucugcccug

SEQ ID NO: 1603664 - RNA, 19 nt, Artificial Sequence
  Description of Artificial Sequence: Synthetic oligonucleotide
ggagccuuaguggccagca

SEQ ID NO: 1603665 - RNA, 19 nt, Artificial Sequence
  Description of Artificial Sequence: Synthetic oligonucleotide
ggcucaagagcaggcccgg

SEQ ID NO: 1603666 - RNA, 19 nt, Artificial Sequence
  Description of Artificial Sequence: Synthetic oligonucleotide
gcaguucagccagacugcc

SEQ ID NO: 1603667 - RNA, 19 nt, Artificial Sequence
  Description of Artificial Sequence: Synthetic oligonucleotide
aaccaccggaaggccccag

SEQ ID NO: 1603668 - RNA, 19 nt, Artificial Sequence
  Description of Artificial Sequence: Synthetic oligonucleotide
ccacaucaaguucugggga

SEQ ID NO: 1603669 - RNA, 19 nt, Artificial Sequence
  Description of Artificial Sequence: Synthetic oligonucleotide
ccaucacugugagaccagg

SEQ ID NO: 1603670 - RNA, 19 nt, Artificial Sequence
  Description of Artificial Sequence: Synthetic oligonucleotide
gagggcccagugcccuugc

SEQ ID NO: 1603671 - RNA, 19 nt, Artificial Sequence
  Description of Artificial Sequence: Synthetic oligonucleotide
cuccacacgcccuguagcu

SEQ ID NO: 1603672 - RNA, 19 nt, Artificial Sequence
  Description of Artificial Sequence: Synthetic oligonucleotide
uggacaccccaaggccugc

SEQ ID NO: 1603673 - RNA, 19 nt, Artificial Sequence
  Description of Artificial Sequence: Synthetic oligonucleotide
guugugcaggaagcguaga

SEQ ID NO: 1603674 - RNA, 19 nt, Artificial Sequence
  Description of Artificial Sequence: Synthetic oligonucleotide
ggaaguugggcagagccau

SEQ ID NO: 1603675 - RNA, 19 nt, Artificial Sequence
  Description of Artificial Sequence: Synthetic oligonucleotide
acuaagggacugguccaua

SEQ ID NO: 1603676 - RNA, 19 nt, Artificial Sequence
  Description of Artificial Sequence: Synthetic oligonucleotide
guggggaaucccaugugcu

SEQ ID NO: 1603677 - RNA, 19 nt, Artificial Sequence
  Description of Artificial Sequence: Synthetic oligonucleotide
gccggugcaccugccaggg

SEQ ID NO: 1603678 - RNA, 19 nt, Artificial Sequence
  Description of Artificial Sequence: Synthetic oligonucleotide
gugauacggcacccuccac

SEQ ID NO: 1603679 - RNA, 19 nt, Artificial Sequence
  Description of Artificial Sequence: Synthetic oligonucleotide
gccugccaguagcacagcc

SEQ ID NO: 1603680 - RNA, 19 nt, Artificial Sequence
  Description of Artificial Sequence: Synthetic oligonucleotide
ggauaagugacaggcaguu

SEQ ID NO: 1603681 - RNA, 19 nt, Artificial Sequence
  Description of Artificial Sequence: Synthetic oligonucleotide
ggcuguauacuagcauaca

SEQ ID NO: 1603682 - RNA, 19 nt, Artificial Sequence
  Description of Artificial Sequence: Synthetic oligonucleotide
ccuggggccauccagggua

SEQ ID NO: 1603683 - RNA, 19 nt, Artificial Sequence
  Description of Artificial Sequence: Synthetic oligonucleotide
gugccuagauggcacuccu

SEQ ID NO: 1603684 - RNA, 19 nt, Artificial Sequence
  Description of Artificial Sequence: Synthetic oligonucleotide
gcacccuccacacgcccug

SEQ ID NO: 1603685 - RNA, 19 nt, Artificial Sequence
  Description of Artificial Sequence: Synthetic oligonucleotide
gcagggcggaguugugcag

SEQ ID NO: 1603686 - RNA, 19 nt, Artificial Sequence
  Description of Artificial Sequence: Synthetic oligonucleotide
caggcaugcauaguuuggu

SEQ ID NO: 1603687 - RNA, 19 nt, Artificial Sequence
  Description of Artificial Sequence: Synthetic oligonucleotide
ccuguagcauuuguucauc

SEQ ID NO: 1603688 - RNA, 19 nt, Artificial Sequence
  Description of Artificial Sequence: Synthetic oligonucleotide
gacccugaacggagguauc

SEQ ID NO: 1603689 - RNA, 19 nt, Artificial Sequence
  Description of Artificial Sequence: Synthetic oligonucleotide
cugcagccgcagagaagac

SEQ ID NO: 1603690 - RNA, 19 nt, Artificial Sequence
  Description of Artificial Sequence: Synthetic oligonucleotide
aguuguccugaggcuguau

SEQ ID NO: 1603691 - RNA, 19 nt, Artificial Sequence
  Description of Artificial Sequence: Synthetic oligonucleotide
aucuccgcucugagagcuc

SEQ ID NO: 1603692 - RNA, 19 nt, Artificial Sequence
  Description of Artificial Sequence: Synthetic oligonucleotide
caauaaccacaggcagcuc

SEQ ID NO: 1603693 - RNA, 19 nt, Artificial Sequence
  Description of Artificial Sequence: Synthetic oligonucleotide
gcaggauaagugacaggca

SEQ ID NO: 1603694 - RNA, 19 nt, Artificial Sequence
  Description of Artificial Sequence: Synthetic oligonucleotide
gaagggcggcucagagcug

SEQ ID NO: 1603695 - RNA, 19 nt, Artificial Sequence
  Description of Artificial Sequence: Synthetic oligonucleotide
ccuucaaccaggagugaua

SEQ ID NO: 1603696 - RNA, 19 nt, Artificial Sequence
  Description of Artificial Sequence: Synthetic oligonucleotide
ggacaggcauguauccaca

SEQ ID NO: 1603697 - RNA, 19 nt, Artificial Sequence
  Description of Artificial Sequence: Synthetic oligonucleotide
cagugcccuugcagugggc

SEQ ID NO: 1603698 - RNA, 19 nt, Artificial Sequence
  Description of Artificial Sequence: Synthetic oligonucleotide
gcugcauuggacaccccaa

SEQ ID NO: 1603699 - RNA, 19 nt, Artificial Sequence
  Description of Artificial Sequence: Synthetic oligonucleotide
cccuccacacgcccuguag

SEQ ID NO: 1603700 - RNA, 19 nt, Artificial Sequence
  Description of Artificial Sequence: Synthetic oligonucleotide
cgcccuguagcugccaagg

SEQ ID NO: 1603701 - RNA, 19 nt, Artificial Sequence
  Description of Artificial Sequence: Synthetic oligonucleotide
gaguccugcaaaggacacu

SEQ ID NO: 1603702 - RNA, 19 nt, Artificial Sequence
  Description of Artificial Sequence: Synthetic oligonucleotide
gguggaaguugggcagagc

SEQ ID NO: 1603703 - RNA, 19 nt, Artificial Sequence
  Description of Artificial Sequence: Synthetic oligonucleotide
gggucaguagccggugcac

SEQ ID NO: 1603704 - RNA, 19 nt, Artificial Sequence
  Description of Artificial Sequence: Synthetic oligonucleotide
gcccuguagcugccaaggc

SEQ ID NO: 1603705 - RNA, 19 nt, Artificial Sequence
  Description of Artificial Sequence: Synthetic oligonucleotide
cagggcaagcagggcggag

SEQ ID NO: 1603706 - RNA, 19 nt, Artificial Sequence
  Description of Artificial Sequence: Synthetic oligonucleotide
ggcagucaacaguuguccu

SEQ ID NO: 1603707 - RNA, 19 nt, Artificial Sequence
  Description of Artificial Sequence: Synthetic oligonucleotide
ggccacaaacgagcugcag

SEQ ID NO: 1603708 - RNA, 19 nt, Artificial Sequence
  Description of Artificial Sequence: Synthetic oligonucleotide
ccuguaacaccugcaaucu

SEQ ID NO: 1603709 - RNA, 19 nt, Artificial Sequence
  Description of Artificial Sequence: Synthetic oligonucleotide
ccagggcugcccacaucgg

SEQ ID NO: 1603710 - RNA, 19 nt, Artificial Sequence
  Description of Artificial Sequence: Synthetic oligonucleotide
cacaaacgagcugcaggaa

SEQ ID NO: 1603711 - RNA, 19 nt, Artificial Sequence
  Description of Artificial Sequence: Synthetic oligonucleotide
caggcccggcagugcagug

SEQ ID NO: 1603712 - RNA, 19 nt, Artificial Sequence
  Description of Artificial Sequence: Synthetic oligonucleotide
ccuuaguggccagcaccgg

SEQ ID NO: 1603713 - RNA, 19 nt, Artificial Sequence
  Description of Artificial Sequence: Synthetic oligonucleotide
cccugaacggagguaucac

SEQ ID NO: 1603714 - RNA, 19 nt, Artificial Sequence
  Description of Artificial Sequence: Synthetic oligonucleotide
gcccacaucgggguuccug

SEQ ID NO: 1603715 - RNA, 19 nt, Artificial Sequence
  Description of Artificial Sequence: Synthetic oligonucleotide
agacugccuggggugggaa

SEQ ID NO: 1603716 - RNA, 19 nt, Artificial Sequence
  Description of Artificial Sequence: Synthetic oligonucleotide
gcugcccacaucgggguuc

SEQ ID NO: 1603717 - RNA, 19 nt, Artificial Sequence
  Description of Artificial Sequence: Synthetic oligonucleotide
caguucagccagacugccu

SEQ ID NO: 1603718 - RNA, 19 nt, Artificial Sequence
  Description of Artificial Sequence: Synthetic oligonucleotide
cacgcccuguagcugccaa

SEQ ID NO: 1603719 - RNA, 19 nt, Artificial Sequence
  Description of Artificial Sequence: Synthetic oligonucleotide
cagcugcauuggacacccc

SEQ ID NO: 1603720 - RNA, 19 nt, Artificial Sequence
  Description of Artificial Sequence: Synthetic oligonucleotide
caccccaaggccugccagu

SEQ ID NO: 1603721 - RNA, 19 nt, Artificial Sequence
  Description of Artificial Sequence: Synthetic oligonucleotide
caugcauaguuugguugau

SEQ ID NO: 1603722 - RNA, 19 nt, Artificial Sequence
  Description of Artificial Sequence: Synthetic oligonucleotide
ggaugccgcccaguccaag

SEQ ID NO: 1603723 - RNA, 19 nt, Artificial Sequence
  Description of Artificial Sequence: Synthetic oligonucleotide
caggaagcguagagugccu

SEQ ID NO: 1603724 - RNA, 19 nt, Artificial Sequence
  Description of Artificial Sequence: Synthetic oligonucleotide
gggcgggaccacuccuccc

SEQ ID NO: 1603725 - RNA, 19 nt, Artificial Sequence
  Description of Artificial Sequence: Synthetic oligonucleotide
caccugccagggguccagc

SEQ ID NO: 1603726 - RNA, 19 nt, Artificial Sequence
  Description of Artificial Sequence: Synthetic oligonucleotide
ccagacugccugggguggg

SEQ ID NO: 1603727 - RNA, 19 nt, Artificial Sequence
  Description of Artificial Sequence: Synthetic oligonucleotide
ggacaccccaaggccugcc

SEQ ID NO: 1603728 - RNA, 19 nt, Artificial Sequence
  Description of Artificial Sequence: Synthetic oligonucleotide
cagacugccugggguggga

SEQ ID NO: 1603729 - RNA, 19 nt, Artificial Sequence
  Description of Artificial Sequence: Synthetic oligonucleotide
ccaccggaaggccccagca

SEQ ID NO: 1603730 - RNA, 19 nt, Artificial Sequence
  Description of Artificial Sequence: Synthetic oligonucleotide
acacgcccuguagcugcca

SEQ ID NO: 1603731 - RNA, 19 nt, Artificial Sequence
  Description of Artificial Sequence: Synthetic oligonucleotide
ccgcucugagagcuccaac

SEQ ID NO: 1603732 - RNA, 19 nt, Artificial Sequence
  Description of Artificial Sequence: Synthetic oligonucleotide
gcaugggucaguagccggu

SEQ ID NO: 1603733 - RNA, 19 nt, Artificial Sequence
  Description of Artificial Sequence: Synthetic oligonucleotide
caaccaccggaaggcccca

SEQ ID NO: 1603734 - RNA, 19 nt, Artificial Sequence
  Description of Artificial Sequence: Synthetic oligonucleotide
ccacaucgggguuccugga

SEQ ID NO: 1603735 - RNA, 19 nt, Artificial Sequence
  Description of Artificial Sequence: Synthetic oligonucleotide
cagugcaguguggcccaga

SEQ ID NO: 1603736 - RNA, 19 nt, Artificial Sequence
  Description of Artificial Sequence: Synthetic oligonucleotide
ggggccauccaggguagua

SEQ ID NO: 1603737 - RNA, 19 nt, Artificial Sequence
  Description of Artificial Sequence: Synthetic oligonucleotide
ggacugguccauagacaua

SEQ ID NO: 1603738 - RNA, 19 nt, Artificial Sequence
  Description of Artificial Sequence: Synthetic oligonucleotide
cgggccagaguccugcaaa

SEQ ID NO: 1603739 - RNA, 19 nt, Artificial Sequence
  Description of Artificial Sequence: Synthetic oligonucleotide
cggagguaucacgaaguga

SEQ ID NO: 1603740 - RNA, 19 nt, Artificial Sequence
  Description of Artificial Sequence: Synthetic oligonucleotide
gggacccugaacggaggua

SEQ ID NO: 1603741 - RNA, 19 nt, Artificial Sequence
  Description of Artificial Sequence: Synthetic oligonucleotide
cccgggacacugagccauc

SEQ ID NO: 1603742 - RNA, 19 nt, Artificial Sequence
  Description of Artificial Sequence: Synthetic oligonucleotide
ccggugcaccugccagggg

SEQ ID NO: 1603743 - RNA, 19 nt, Artificial Sequence
  Description of Artificial Sequence: Synthetic oligonucleotide
ggccugccaguagcacagc

SEQ ID NO: 1603744 - RNA, 19 nt, Artificial Sequence
  Description of Artificial Sequence: Synthetic oligonucleotide
gccccucucugaguccauc

SEQ ID NO: 1603745 - RNA, 19 nt, Artificial Sequence
  Description of Artificial Sequence: Synthetic oligonucleotide
ccugccagcauggccagau

SEQ ID NO: 1603746 - RNA, 19 nt, Artificial Sequence
  Description of Artificial Sequence: Synthetic oligonucleotide
cuggggugggaaggagccu

SEQ ID NO: 1603747 - RNA, 19 nt, Artificial Sequence
  Description of Artificial Sequence: Synthetic oligonucleotide
ggucucacuccagcaggau

SEQ ID NO: 1603748 - RNA, 19 nt, Artificial Sequence
  Description of Artificial Sequence: Synthetic oligonucleotide
agccccucucugaguccau

SEQ ID NO: 1603749 - RNA, 19 nt, Artificial Sequence
  Description of Artificial Sequence: Synthetic oligonucleotide
ccgggacacugagccauca

SEQ ID NO: 1603750 - RNA, 19 nt, Artificial Sequence
  Description of Artificial Sequence: Synthetic oligonucleotide
gcaccgggccagaguccug

SEQ ID NO: 1603751 - RNA, 19 nt, Artificial Sequence
  Description of Artificial Sequence: Synthetic oligonucleotide
gcgggaccacuccuccccu

SEQ ID NO: 1603752 - RNA, 19 nt, Artificial Sequence
  Description of Artificial Sequence: Synthetic oligonucleotide
ccagggcaagcagggcgga

SEQ ID NO: 1603753 - RNA, 19 nt, Artificial Sequence
  Description of Artificial Sequence: Synthetic oligonucleotide
ccagauggacaggcaugua

SEQ ID NO: 1603754 - RNA, 19 nt, Artificial Sequence
  Description of Artificial Sequence: Synthetic oligonucleotide
cacccuccacacgcccugu

SEQ ID NO: 1603755 - RNA, 19 nt, Artificial Sequence
  Description of Artificial Sequence: Synthetic oligonucleotide
ccaugggaguagccauggu

SEQ ID NO: 1603756 - RNA, 19 nt, Artificial Sequence
  Description of Artificial Sequence: Synthetic oligonucleotide
cggucacuagggcuucagu

SEQ ID NO: 1603757 - RNA, 19 nt, Artificial Sequence
  Description of Artificial Sequence: Synthetic oligonucleotide
ccgcccaguccaagccccu

SEQ ID NO: 1603758 - RNA, 19 nt, Artificial Sequence
  Description of Artificial Sequence: Synthetic oligonucleotide
auaaaagagucauuugugc

SEQ ID NO: 1603759 - RNA, 19 nt, Artificial Sequence
  Description of Artificial Sequence: Synthetic oligonucleotide
ucgaauuaaauauaaaaga

SEQ ID NO: 1603760 - RNA, 19 nt, Artificial Sequence
  Description of Artificial Sequence: Synthetic oligonucleotide
aauuaaaacucccaagggu

SEQ ID NO: 1603761 - RNA, 19 nt, Artificial Sequence
  Description of Artificial Sequence: Synthetic oligonucleotide
ucucugagcguuuugaugg

SEQ ID NO: 1603762 - RNA, 19 nt, Artificial Sequence
  Description of Artificial Sequence: Synthetic oligonucleotide
agaguuucaaaauauucuc

SEQ ID NO: 1603763 - RNA, 19 nt, Artificial Sequence
  Description of Artificial Sequence: Synthetic oligonucleotide
aaauaaaagaccuggggaa

SEQ ID NO: 1603764 - RNA, 19 nt, Artificial Sequence
  Description of Artificial Sequence: Synthetic oligonucleotide
aaugaagucgaauuaaaua

SEQ ID NO: 1603765 - RNA, 19 nt, Artificial Sequence
  Description of Artificial Sequence: Synthetic oligonucleotide
auuaaugccccuaaguccc

SEQ ID NO: 1603766 - RNA, 19 nt, Artificial Sequence
  Description of Artificial Sequence: Synthetic oligonucleotide
aucaccacgucucugagcg

SEQ ID NO: 1603767 - RNA, 19 nt, Artificial Sequence
  Description of Artificial Sequence: Synthetic oligonucleotide
augaagucgaauuaaauau

SEQ ID NO: 1603768 - RNA, 19 nt, Artificial Sequence
  Description of Artificial Sequence: Synthetic oligonucleotide
ugcauuugugcucugagug

SEQ ID NO: 1603769 - RNA, 19 nt, Artificial Sequence
  Description of Artificial Sequence: Synthetic oligonucleotide
gucgaauuaaauauaaaag

SEQ ID NO: 1603770 - RNA, 19 nt, Artificial Sequence
  Description of Artificial Sequence: Synthetic oligonucleotide
aucuguuaaauuaagagug

SEQ ID NO: 1603771 - RNA, 19 nt, Artificial Sequence
  Description of Artificial Sequence: Synthetic oligonucleotide
uuugauggggagaaggggc

SEQ ID NO: 1603772 - RNA, 19 nt, Artificial Sequence
  Description of Artificial Sequence: Synthetic oligonucleotide
aaggcuagaggguugcuag

SEQ ID NO: 1603773 - RNA, 19 nt, Artificial Sequence
  Description of Artificial Sequence: Synthetic oligonucleotide
uguuaaauuaagagugucu

SEQ ID NO: 1603774 - RNA, 19 nt, Artificial Sequence
  Description of Artificial Sequence: Synthetic oligonucleotide
cauuaaugccccuaagucc

SEQ ID NO: 1603775 - RNA, 19 nt, Artificial Sequence
  Description of Artificial Sequence: Synthetic oligonucleotide
ucucccaauagaaaagcag

SEQ ID NO: 1603776 - RNA, 19 nt, Artificial Sequence
  Description of Artificial Sequence: Synthetic oligonucleotide
aaagguuuguaaacugagc

SEQ ID NO: 1603777 - RNA, 19 nt, Artificial Sequence
  Description of Artificial Sequence: Synthetic oligonucleotide
uccauuuguccauugaagc

SEQ ID NO: 1603778 - RNA, 19 nt, Artificial Sequence
  Description of Artificial Sequence: Synthetic oligonucleotide
uaaaagagucauuugugca

SEQ ID NO: 1603779 - RNA, 19 nt, Artificial Sequence
  Description of Artificial Sequence: Synthetic oligonucleotide
caagguaacguccuggcgg

SEQ ID NO: 1603780 - RNA, 19 nt, Artificial Sequence
  Description of Artificial Sequence: Synthetic oligonucleotide
cuuuguaccuuucacuggg

SEQ ID NO: 1603781 - RNA, 19 nt, Artificial Sequence
  Description of Artificial Sequence: Synthetic oligonucleotide
auaaucgucagucgcauca

SEQ ID NO: 1603782 - RNA, 19 nt, Artificial Sequence
  Description of Artificial Sequence: Synthetic oligonucleotide
uguaugggaggagagaucc

SEQ ID NO: 1603783 - RNA, 19 nt, Artificial Sequence
  Description of Artificial Sequence: Synthetic oligonucleotide
uuccauuuguccauugaag

SEQ ID NO: 1603784 - RNA, 19 nt, Artificial Sequence
  Description of Artificial Sequence: Synthetic oligonucleotide
uccccuuagcgccugaugg

SEQ ID NO: 1603785 - RNA, 19 nt, Artificial Sequence
  Description of Artificial Sequence: Synthetic oligonucleotide
aagguaacguccuggcggg

SEQ ID NO: 1603786 - RNA, 19 nt, Artificial Sequence
  Description of Artificial Sequence: Synthetic oligonucleotide
aacaaauaaaagaccuggg

SEQ ID NO: 1603787 - RNA, 19 nt, Artificial Sequence
  Description of Artificial Sequence: Synthetic oligonucleotide
ucaaagguuuguaaacuga

SEQ ID NO: 1603788 - RNA, 19 nt, Artificial Sequence
  Description of Artificial Sequence: Synthetic oligonucleotide
guaccuuucacugggaagg

SEQ ID NO: 1603789 - RNA, 19 nt, Artificial Sequence
  Description of Artificial Sequence: Synthetic oligonucleotide
gagacuuucugacuguccc

SEQ ID NO: 1603790 - RNA, 19 nt, Artificial Sequence
  Description of Artificial Sequence: Synthetic oligonucleotide
cuggcuuuaagaagggagg

SEQ ID NO: 1603791 - RNA, 19 nt, Artificial Sequence
  Description of Artificial Sequence: Synthetic oligonucleotide
cucaggaugggauuuguag

SEQ ID NO: 1603792 - RNA, 19 nt, Artificial Sequence
  Description of Artificial Sequence: Synthetic oligonucleotide
uucuccuccggccacgacg

SEQ ID NO: 1603793 - RNA, 19 nt, Artificial Sequence
  Description of Artificial Sequence: Synthetic oligonucleotide
uugcauaaucgucagucgc

SEQ ID NO: 1603794 - RNA, 19 nt, Artificial Sequence
  Description of Artificial Sequence: Synthetic oligonucleotide
aguuucaaaauauucucau

SEQ ID NO: 1603795 - RNA, 19 nt, Artificial Sequence
  Description of Artificial Sequence: Synthetic oligonucleotide
gaagggguugcauuugugc

SEQ ID NO: 1603796 - RNA, 19 nt, Artificial Sequence
  Description of Artificial Sequence: Synthetic oligonucleotide
ucuguuaaauuaagagugu

SEQ ID NO: 1603797 - RNA, 19 nt, Artificial Sequence
  Description of Artificial Sequence: Synthetic oligonucleotide
uuaaaacucccaagggucu

SEQ ID NO: 1603798 - RNA, 19 nt, Artificial Sequence
  Description of Artificial Sequence: Synthetic oligonucleotide
uuguauuuucuccuccggc

SEQ ID NO: 1603799 - RNA, 19 nt, Artificial Sequence
  Description of Artificial Sequence: Synthetic oligonucleotide
ucucaucuguuaaauuaag

SEQ ID NO: 1603800 - RNA, 19 nt, Artificial Sequence
  Description of Artificial Sequence: Synthetic oligonucleotide
uguaccuuucacugggaag

SEQ ID NO: 1603801 - RNA, 19 nt, Artificial Sequence
  Description of Artificial Sequence: Synthetic oligonucleotide
uuaagguccucagaauggg

SEQ ID NO: 1603802 - RNA, 19 nt, Artificial Sequence
  Description of Artificial Sequence: Synthetic oligonucleotide
ggggcuaaggcacugaggg

SEQ ID NO: 1603803 - RNA, 19 nt, Artificial Sequence
  Description of Artificial Sequence: Synthetic oligonucleotide
uccauugaagccaccacga

SEQ ID NO: 1603804 - RNA, 19 nt, Artificial Sequence
  Description of Artificial Sequence: Synthetic oligonucleotide
uuuaagaagggaggcaaug

SEQ ID NO: 1603805 - RNA, 19 nt, Artificial Sequence
  Description of Artificial Sequence: Synthetic oligonucleotide
ugcauaaucgucagucgca

SEQ ID NO: 1603806 - RNA, 19 nt, Artificial Sequence
  Description of Artificial Sequence: Synthetic oligonucleotide
ucccaauagaaaagcagug

SEQ ID NO: 1603807 - RNA, 19 nt, Artificial Sequence
  Description of Artificial Sequence: Synthetic oligonucleotide
guugcauaaucgucagucg

SEQ ID NO: 1603808 - RNA, 19 nt, Artificial Sequence
  Description of Artificial Sequence: Synthetic oligonucleotide
uuaagagugucucccaaua

SEQ ID NO: 1603809 - RNA, 19 nt, Artificial Sequence
  Description of Artificial Sequence: Synthetic oligonucleotide
guccauugaagccaccacg

SEQ ID NO: 1603810 - RNA, 19 nt, Artificial Sequence
  Description of Artificial Sequence: Synthetic oligonucleotide
uuucugacuguccccgggg

SEQ ID NO: 1603811 - RNA, 19 nt, Artificial Sequence
  Description of Artificial Sequence: Synthetic oligonucleotide
accauuaaugccccuaagu

SEQ ID NO: 1603812 - RNA, 19 nt, Artificial Sequence
  Description of Artificial Sequence: Synthetic oligonucleotide
agacuuucugacugucccc

SEQ ID NO: 1603813 - RNA, 19 nt, Artificial Sequence
  Description of Artificial Sequence: Synthetic oligonucleotide
cagggcaaguacaaaacag

SEQ ID NO: 1603814 - RNA, 19 nt, Artificial Sequence
  Description of Artificial Sequence: Synthetic oligonucleotide
uguaguguguaugggagga

SEQ ID NO: 1603815 - RNA, 19 nt, Artificial Sequence
  Description of Artificial Sequence: Synthetic oligonucleotide
uccgguuggaccacguugc

SEQ ID NO: 1603816 - RNA, 19 nt, Artificial Sequence
  Description of Artificial Sequence: Synthetic oligonucleotide
uauugcuuuguaccuuuca

SEQ ID NO: 1603817 - RNA, 19 nt, Artificial Sequence
  Description of Artificial Sequence: Synthetic oligonucleotide
agugguugggucccuuucg

SEQ ID NO: 1603818 - RNA, 19 nt, Artificial Sequence
  Description of Artificial Sequence: Synthetic oligonucleotide
aguguaguguguaugggag

SEQ ID NO: 1603819 - RNA, 19 nt, Artificial Sequence
  Description of Artificial Sequence: Synthetic oligonucleotide
acucccaaggcucagcacu

SEQ ID NO: 1603820 - RNA, 19 nt, Artificial Sequence
  Description of Artificial Sequence: Synthetic oligonucleotide
aaucgucagucgcaucauc

SEQ ID NO: 1603821 - RNA, 19 nt, Artificial Sequence
  Description of Artificial Sequence: Synthetic oligonucleotide
aaugggucccaggaagggg

SEQ ID NO: 1603822 - RNA, 19 nt, Artificial Sequence
  Description of Artificial Sequence: Synthetic oligonucleotide
uggaccacguugcauaauc

SEQ ID NO: 1603823 - RNA, 19 nt, Artificial Sequence
  Description of Artificial Sequence: Synthetic oligonucleotide
agguuuguaaacugagccu

SEQ ID NO: 1603824 - RNA, 19 nt, Artificial Sequence
  Description of Artificial Sequence: Synthetic oligonucleotide
cauuugugcucugaguggg

SEQ ID NO: 1603825 - RNA, 19 nt, Artificial Sequence
  Description of Artificial Sequence: Synthetic oligonucleotide
uguguaugggaggagagau

SEQ ID NO: 1603826 - RNA, 19 nt, Artificial Sequence
  Description of Artificial Sequence: Synthetic oligonucleotide
agcuagcuccccauuaugc

SEQ ID NO: 1603827 - RNA, 19 nt, Artificial Sequence
  Description of Artificial Sequence: Synthetic oligonucleotide
ugagcguuuugauggggag

SEQ ID NO: 1603828 - RNA, 19 nt, Artificial Sequence
  Description of Artificial Sequence: Synthetic oligonucleotide
ugucucccaauagaaaagc

SEQ ID NO: 1603829 - RNA, 19 nt, Artificial Sequence
  Description of Artificial Sequence: Synthetic oligonucleotide
ggaugcauggugcuuauug

SEQ ID NO: 1603830 - RNA, 19 nt, Artificial Sequence
  Description of Artificial Sequence: Synthetic oligonucleotide
gaagucgaauuaaauauaa

SEQ ID NO: 1603831 - RNA, 19 nt, Artificial Sequence
  Description of Artificial Sequence: Synthetic oligonucleotide
cacgacgagacuuucugac

SEQ ID NO: 1603832 - RNA, 19 nt, Artificial Sequence
  Description of Artificial Sequence: Synthetic oligonucleotide
ggcaguguaguguguaugg

SEQ ID NO: 1603833 - RNA, 19 nt, Artificial Sequence
  Description of Artificial Sequence: Synthetic oligonucleotide
aggguuguauuuucuccuc

SEQ ID NO: 1603834 - RNA, 19 nt, Artificial Sequence
  Description of Artificial Sequence: Synthetic oligonucleotide
uggucucaccauuaaugcc

SEQ ID NO: 1603835 - RNA, 19 nt, Artificial Sequence
  Description of Artificial Sequence: Synthetic oligonucleotide
ugaguggggaguagugccc

SEQ ID NO: 1603836 - RNA, 19 nt, Artificial Sequence
  Description of Artificial Sequence: Synthetic oligonucleotide
gguuuguaaacugagccug

SEQ ID NO: 1603837 - RNA, 19 nt, Artificial Sequence
  Description of Artificial Sequence: Synthetic oligonucleotide
ggccucuucagugacaugg

SEQ ID NO: 1603838 - RNA, 19 nt, Artificial Sequence
  Description of Artificial Sequence: Synthetic oligonucleotide
aauggcucaggaugggauu

SEQ ID NO: 1603839 - RNA, 19 nt, Artificial Sequence
  Description of Artificial Sequence: Synthetic oligonucleotide
aggcccacagggcaaguac

SEQ ID NO: 1603840 - RNA, 19 nt, Artificial Sequence
  Description of Artificial Sequence: Synthetic oligonucleotide
cuagcuccccauuaugcug

SEQ ID NO: 1603841 - RNA, 19 nt, Artificial Sequence
  Description of Artificial Sequence: Synthetic oligonucleotide
ucaccauuaaugccccuaa

SEQ ID NO: 1603842 - RNA, 19 nt, Artificial Sequence
  Description of Artificial Sequence: Synthetic oligonucleotide
auuaagagugucucccaau

SEQ ID NO: 1603843 - RNA, 19 nt, Artificial Sequence
  Description of Artificial Sequence: Synthetic oligonucleotide
ucaggagaaccauggggug

SEQ ID NO: 1603844 - RNA, 19 nt, Artificial Sequence
  Description of Artificial Sequence: Synthetic oligonucleotide
ucaucaccacgucucugag

SEQ ID NO: 1603845 - RNA, 19 nt, Artificial Sequence
  Description of Artificial Sequence: Synthetic oligonucleotide
auuaugcugccagugguug

SEQ ID NO: 1603846 - RNA, 19 nt, Artificial Sequence
  Description of Artificial Sequence: Synthetic oligonucleotide
cuuucugacuguccccggg

SEQ ID NO: 1603847 - RNA, 19 nt, Artificial Sequence
  Description of Artificial Sequence: Synthetic oligonucleotide
ucuccuccggccacgacga

SEQ ID NO: 1603848 - RNA, 19 nt, Artificial Sequence
  Description of Artificial Sequence: Synthetic oligonucleotide
ucgcaucaucaucaccacg

SEQ ID NO: 1603849 - RNA, 19 nt, Artificial Sequence
  Description of Artificial Sequence: Synthetic oligonucleotide
gaaugggucccaggaaggg

SEQ ID NO: 1603850 - RNA, 19 nt, Artificial Sequence
  Description of Artificial Sequence: Synthetic oligonucleotide
cuccccauuaugcugccag

SEQ ID NO: 1603851 - RNA, 19 nt, Artificial Sequence
  Description of Artificial Sequence: Synthetic oligonucleotide
aaaacucccaagggucuug

SEQ ID NO: 1603852 - RNA, 19 nt, Artificial Sequence
  Description of Artificial Sequence: Synthetic oligonucleotide
accacguugcauaaucguc

SEQ ID NO: 1603853 - RNA, 19 nt, Artificial Sequence
  Description of Artificial Sequence: Synthetic oligonucleotide
gucucugagcguuuugaug

SEQ ID NO: 1603854 - RNA, 19 nt, Artificial Sequence
  Description of Artificial Sequence: Synthetic oligonucleotide
ccuggucucaccauuaaug

SEQ ID NO: 1603855 - RNA, 19 nt, Artificial Sequence
  Description of Artificial Sequence: Synthetic oligonucleotide
guguaguguguaugggagg

SEQ ID NO: 1603856 - RNA, 19 nt, Artificial Sequence
  Description of Artificial Sequence: Synthetic oligonucleotide
ucagcuagcuccccauuau

SEQ ID NO: 1603857 - RNA, 19 nt, Artificial Sequence
  Description of Artificial Sequence: Synthetic oligonucleotide
gaagggguguuccccuuag

SEQ ID NO: 1603858 - RNA, 19 nt, Artificial Sequence
  Description of Artificial Sequence: Synthetic oligonucleotide
ggauuuguaggggaagggg

SEQ ID NO: 1603859 - RNA, 19 nt, Artificial Sequence
  Description of Artificial Sequence: Synthetic oligonucleotide
ggugcuuauugcuuuguac

SEQ ID NO: 1603860 - RNA, 19 nt, Artificial Sequence
  Description of Artificial Sequence: Synthetic oligonucleotide
agaggguugcuagagggug

SEQ ID NO: 1603861 - RNA, 19 nt, Artificial Sequence
  Description of Artificial Sequence: Synthetic oligonucleotide
agaaugggucccaggaagg

SEQ ID NO: 1603862 - RNA, 19 nt, Artificial Sequence
  Description of Artificial Sequence: Synthetic oligonucleotide
uaaacugagccugcuggcu

SEQ ID NO: 1603863 - RNA, 19 nt, Artificial Sequence
  Description of Artificial Sequence: Synthetic oligonucleotide
gaagggaggcaaugaaguc

SEQ ID NO: 1603864 - RNA, 19 nt, Artificial Sequence
  Description of Artificial Sequence: Synthetic oligonucleotide
cucaucuguuaaauuaaga

SEQ ID NO: 1603865 - RNA, 19 nt, Artificial Sequence
  Description of Artificial Sequence: Synthetic oligonucleotide
gagggugcgggaaggaugc

SEQ ID NO: 1603866 - RNA, 19 nt, Artificial Sequence
  Description of Artificial Sequence: Synthetic oligonucleotide
cacguugcauaaucgucag

SEQ ID NO: 1603867 - RNA, 19 nt, Artificial Sequence
  Description of Artificial Sequence: Synthetic oligonucleotide
uuuguaccuuucacuggga

SEQ ID NO: 1603868 - RNA, 19 nt, Artificial Sequence
  Description of Artificial Sequence: Synthetic oligonucleotide
uaguguguaugggaggaga

SEQ ID NO: 1603869 - RNA, 19 nt, Artificial Sequence
  Description of Artificial Sequence: Synthetic oligonucleotide
uuguaccuuucacugggaa

SEQ ID NO: 1603870 - RNA, 19 nt, Artificial Sequence
  Description of Artificial Sequence: Synthetic oligonucleotide
guauuuucuccuccggcca

SEQ ID NO: 1603871 - RNA, 19 nt, Artificial Sequence
  Description of Artificial Sequence: Synthetic oligonucleotide
gcuggcuuuaagaagggag

SEQ ID NO: 1603872 - RNA, 19 nt, Artificial Sequence
  Description of Artificial Sequence: Synthetic oligonucleotide
ggguguuccccuuagcgcc

SEQ ID NO: 1603873 - RNA, 19 nt, Artificial Sequence
  Description of Artificial Sequence: Synthetic oligonucleotide
ccagguauggcugcuaugg

SEQ ID NO: 1603874 - RNA, 19 nt, Artificial Sequence
  Description of Artificial Sequence: Synthetic oligonucleotide
aggacguccagggcgggcc

SEQ ID NO: 1603875 - RNA, 19 nt, Artificial Sequence
  Description of Artificial Sequence: Synthetic oligonucleotide
ucugagcguuuugaugggg

SEQ ID NO: 1603876 - RNA, 19 nt, Artificial Sequence
  Description of Artificial Sequence: Synthetic oligonucleotide
ugcuguuccgggcaggguu

SEQ ID NO: 1603877 - RNA, 19 nt, Artificial Sequence
  Description of Artificial Sequence: Synthetic oligonucleotide
gguauggcugcuauggggc

SEQ ID NO: 1603878 - RNA, 19 nt, Artificial Sequence
  Description of Artificial Sequence: Synthetic oligonucleotide
guagcucaaagguuuguaa

SEQ ID NO: 1603879 - RNA, 19 nt, Artificial Sequence
  Description of Artificial Sequence: Synthetic oligonucleotide
uuugugcucugagugggga

SEQ ID NO: 1603880 - RNA, 19 nt, Artificial Sequence
  Description of Artificial Sequence: Synthetic oligonucleotide
ccuuaagguccucagaaug

SEQ ID NO: 1603881 - RNA, 19 nt, Artificial Sequence
  Description of Artificial Sequence: Synthetic oligonucleotide
uuaaugccccuaagucccc

SEQ ID NO: 1603882 - RNA, 19 nt, Artificial Sequence
  Description of Artificial Sequence: Synthetic oligonucleotide
cuccgguuggaccacguug

SEQ ID NO: 1603883 - RNA, 19 nt, Artificial Sequence
  Description of Artificial Sequence: Synthetic oligonucleotide
aguguguaugggaggagag

SEQ ID NO: 1603884 - RNA, 19 nt, Artificial Sequence
  Description of Artificial Sequence: Synthetic oligonucleotide
agcguuuugauggggagaa

SEQ ID NO: 1603885 - RNA, 19 nt, Artificial Sequence
  Description of Artificial Sequence: Synthetic oligonucleotide
cucccaauagaaaagcagu

SEQ ID NO: 1603886 - RNA, 19 nt, Artificial Sequence
  Description of Artificial Sequence: Synthetic oligonucleotide
ucagggucagauccagcuc

SEQ ID NO: 1603887 - RNA, 19 nt, Artificial Sequence
  Description of Artificial Sequence: Synthetic oligonucleotide
caccuuaagguccucagaa

SEQ ID NO: 1603888 - RNA, 19 nt, Artificial Sequence
  Description of Artificial Sequence: Synthetic oligonucleotide
aaaggcuagaggguugcua

SEQ ID NO: 1603889 - RNA, 19 nt, Artificial Sequence
  Description of Artificial Sequence: Synthetic oligonucleotide
uggguuccaagguaacguc

SEQ ID NO: 1603890 - RNA, 19 nt, Artificial Sequence
  Description of Artificial Sequence: Synthetic oligonucleotide
ugguuguagggcuggguuc

SEQ ID NO: 1603891 - RNA, 19 nt, Artificial Sequence
  Description of Artificial Sequence: Synthetic oligonucleotide
aggaugggauuuguagggg

SEQ ID NO: 1603892 - RNA, 19 nt, Artificial Sequence
  Description of Artificial Sequence: Synthetic oligonucleotide
cugcuauggggccaguuuc

SEQ ID NO: 1603893 - RNA, 19 nt, Artificial Sequence
  Description of Artificial Sequence: Synthetic oligonucleotide
uuccccuuagcgccugaug

SEQ ID NO: 1603894 - RNA, 19 nt, Artificial Sequence
  Description of Artificial Sequence: Synthetic oligonucleotide
ugcaauggcucaggauggg

SEQ ID NO: 1603895 - RNA, 19 nt, Artificial Sequence
  Description of Artificial Sequence: Synthetic oligonucleotide
aagucgaauuaaauauaaa

SEQ ID NO: 1603896 - RNA, 19 nt, Artificial Sequence
  Description of Artificial Sequence: Synthetic oligonucleotide
auuuucuccuccggccacg

SEQ ID NO: 1603897 - RNA, 19 nt, Artificial Sequence
  Description of Artificial Sequence: Synthetic oligonucleotide
aggcaaugaagucgaauua

SEQ ID NO: 1603898 - RNA, 19 nt, Artificial Sequence
  Description of Artificial Sequence: Synthetic oligonucleotide
agagggccauauaccaccc

SEQ ID NO: 1603899 - RNA, 19 nt, Artificial Sequence
  Description of Artificial Sequence: Synthetic oligonucleotide
gugcgggaaggaugcaugg

SEQ ID NO: 1603900 - RNA, 19 nt, Artificial Sequence
  Description of Artificial Sequence: Synthetic oligonucleotide
gagcuacugcuguuccggg

SEQ ID NO: 1603901 - RNA, 19 nt, Artificial Sequence
  Description of Artificial Sequence: Synthetic oligonucleotide
caggagaaccauggggugg

SEQ ID NO: 1603902 - RNA, 19 nt, Artificial Sequence
  Description of Artificial Sequence: Synthetic oligonucleotide
acgacgagacuuucugacu

SEQ ID NO: 1603903 - RNA, 19 nt, Artificial Sequence
  Description of Artificial Sequence: Synthetic oligonucleotide
uccgguucgagggcugagg

SEQ ID NO: 1603904 - RNA, 19 nt, Artificial Sequence
  Description of Artificial Sequence: Synthetic oligonucleotide
aaggaugcauggugcuuau

SEQ ID NO: 1603905 - RNA, 19 nt, Artificial Sequence
  Description of Artificial Sequence: Synthetic oligonucleotide
gggaccguuccauuugucc

SEQ ID NO: 1603906 - RNA, 19 nt, Artificial Sequence
  Description of Artificial Sequence: Synthetic oligonucleotide
agccugcuggcuuuaagaa

SEQ ID NO: 1603907 - RNA, 19 nt, Artificial Sequence
  Description of Artificial Sequence: Synthetic oligonucleotide
ggagagauccaaaggcuag

SEQ ID NO: 1603908 - RNA, 19 nt, Artificial Sequence
  Description of Artificial Sequence: Synthetic oligonucleotide
agcagccaacaguagcuca

SEQ ID NO: 1603909 - RNA, 19 nt, Artificial Sequence
  Description of Artificial Sequence: Synthetic oligonucleotide
gguugcuagagggugcggg

SEQ ID NO: 1603910 - RNA, 19 nt, Artificial Sequence
  Description of Artificial Sequence: Synthetic oligonucleotide
guaacguccuggcgggagc

SEQ ID NO: 1603911 - RNA, 19 nt, Artificial Sequence
  Description of Artificial Sequence: Synthetic oligonucleotide
caucaccacgucucugagc

SEQ ID NO: 1603912 - RNA, 19 nt, Artificial Sequence
  Description of Artificial Sequence: Synthetic oligonucleotide
ucgucagucgcaucaucau

SEQ ID NO: 1603913 - RNA, 19 nt, Artificial Sequence
  Description of Artificial Sequence: Synthetic oligonucleotide
cagguauggcugcuauggg

SEQ ID NO: 1603914 - RNA, 19 nt, Artificial Sequence
  Description of Artificial Sequence: Synthetic oligonucleotide
cacuugagggccagucggc

SEQ ID NO: 1603915 - RNA, 19 nt, Artificial Sequence
  Description of Artificial Sequence: Synthetic oligonucleotide
gguugggucccuuucguuc

SEQ ID NO: 1603916 - RNA, 19 nt, Artificial Sequence
  Description of Artificial Sequence: Synthetic oligonucleotide
agagggugcgggaaggaug

SEQ ID NO: 1603917 - RNA, 19 nt, Artificial Sequence
  Description of Artificial Sequence: Synthetic oligonucleotide
gucggccaggcucucggcg

SEQ ID NO: 1603918 - RNA, 19 nt, Artificial Sequence
  Description of Artificial Sequence: Synthetic oligonucleotide
acgagacuuucugacuguc

SEQ ID NO: 1603919 - RNA, 19 nt, Artificial Sequence
  Description of Artificial Sequence: Synthetic oligonucleotide
cugcuggcuuuaagaaggg

SEQ ID NO: 1603920 - RNA, 19 nt, Artificial Sequence
  Description of Artificial Sequence: Synthetic oligonucleotide
aaacucccaagggucuugu

SEQ ID NO: 1603921 - RNA, 19 nt, Artificial Sequence
  Description of Artificial Sequence: Synthetic oligonucleotide
gaugggauuuguaggggaa

SEQ ID NO: 1603922 - RNA, 19 nt, Artificial Sequence
  Description of Artificial Sequence: Synthetic oligonucleotide
gccacgacgagacuuucug

SEQ ID NO: 1603923 - RNA, 19 nt, Artificial Sequence
  Description of Artificial Sequence: Synthetic oligonucleotide
gguuguagggcuggguucc

SEQ ID NO: 1603924 - RNA, 19 nt, Artificial Sequence
  Description of Artificial Sequence: Synthetic oligonucleotide
gggguguuccccuuagcgc

SEQ ID NO: 1603925 - RNA, 19 nt, Artificial Sequence
  Description of Artificial Sequence: Synthetic oligonucleotide
gguuggaccacguugcaua

SEQ ID NO: 1603926 - RNA, 19 nt, Artificial Sequence
  Description of Artificial Sequence: Synthetic oligonucleotide
gggagagggccauauacca

SEQ ID NO: 1603927 - RNA, 19 nt, Artificial Sequence
  Description of Artificial Sequence: Synthetic oligonucleotide
uccagggcgggcccgggga

SEQ ID NO: 1603928 - RNA, 19 nt, Artificial Sequence
  Description of Artificial Sequence: Synthetic oligonucleotide
ggaccguuccauuugucca

SEQ ID NO: 1603929 - RNA, 19 nt, Artificial Sequence
  Description of Artificial Sequence: Synthetic oligonucleotide
caccauuaaugccccuaag

SEQ ID NO: 1603930 - RNA, 19 nt, Artificial Sequence
  Description of Artificial Sequence: Synthetic oligonucleotide
gcugccagugguugggucc

SEQ ID NO: 1603931 - RNA, 19 nt, Artificial Sequence
  Description of Artificial Sequence: Synthetic oligonucleotide
uuucacugggaaggaggca

SEQ ID NO: 1603932 - RNA, 19 nt, Artificial Sequence
  Description of Artificial Sequence: Synthetic oligonucleotide
gucgcaucaucaucaccac

SEQ ID NO: 1603933 - RNA, 19 nt, Artificial Sequence
  Description of Artificial Sequence: Synthetic oligonucleotide
cugagcguuuugaugggga

SEQ ID NO: 1603934 - RNA, 19 nt, Artificial Sequence
  Description of Artificial Sequence: Synthetic oligonucleotide
auuuguaggggaagggguu

SEQ ID NO: 1603935 - RNA, 19 nt, Artificial Sequence
  Description of Artificial Sequence: Synthetic oligonucleotide
ccaacaguagcucaaaggu

SEQ ID NO: 1603936 - RNA, 19 nt, Artificial Sequence
  Description of Artificial Sequence: Synthetic oligonucleotide
gaccacguugcauaaucgu

SEQ ID NO: 1603937 - RNA, 19 nt, Artificial Sequence
  Description of Artificial Sequence: Synthetic oligonucleotide
ggcuaaggcacugagggga

SEQ ID NO: 1603938 - RNA, 19 nt, Artificial Sequence
  Description of Artificial Sequence: Synthetic oligonucleotide
cauaaucgucagucgcauc

SEQ ID NO: 1603939 - RNA, 19 nt, Artificial Sequence
  Description of Artificial Sequence: Synthetic oligonucleotide
gaguggggaguagugcccc

SEQ ID NO: 1603940 - RNA, 19 nt, Artificial Sequence
  Description of Artificial Sequence: Synthetic oligonucleotide
gagaaccaugggguggggc

SEQ ID NO: 1603941 - RNA, 19 nt, Artificial Sequence
  Description of Artificial Sequence: Synthetic oligonucleotide
uggcgggagcuacugcugu

SEQ ID NO: 1603942 - RNA, 19 nt, Artificial Sequence
  Description of Artificial Sequence: Synthetic oligonucleotide
uccccauuaugcugccagu

SEQ ID NO: 1603943 - RNA, 19 nt, Artificial Sequence
  Description of Artificial Sequence: Synthetic oligonucleotide
acaguagcucaaagguuug

SEQ ID NO: 1603944 - RNA, 19 nt, Artificial Sequence
  Description of Artificial Sequence: Synthetic oligonucleotide
gcuuuaagaagggaggcaa

SEQ ID NO: 1603945 - RNA, 19 nt, Artificial Sequence
  Description of Artificial Sequence: Synthetic oligonucleotide
uaaucgucagucgcaucau

SEQ ID NO: 1603946 - RNA, 19 nt, Artificial Sequence
  Description of Artificial Sequence: Synthetic oligonucleotide
ugcuggccgcuccgguugg

SEQ ID NO: 1603947 - RNA, 19 nt, Artificial Sequence
  Description of Artificial Sequence: Synthetic oligonucleotide
guaguguguaugggaggag

SEQ ID NO: 1603948 - RNA, 19 nt, Artificial Sequence
  Description of Artificial Sequence: Synthetic oligonucleotide
gugcuggccgcuccgguug

SEQ ID NO: 1603949 - RNA, 19 nt, Artificial Sequence
  Description of Artificial Sequence: Synthetic oligonucleotide
acguccuggcgggagcuac

SEQ ID NO: 1603950 - RNA, 19 nt, Artificial Sequence
  Description of Artificial Sequence: Synthetic oligonucleotide
ggcuagaggguugcuagag

SEQ ID NO: 1603951 - RNA, 19 nt, Artificial Sequence
  Description of Artificial Sequence: Synthetic oligonucleotide
cagcuagcuccccauuaug

SEQ ID NO: 1603952 - RNA, 19 nt, Artificial Sequence
  Description of Artificial Sequence: Synthetic oligonucleotide
ggaccacguugcauaaucg

SEQ ID NO: 1603953 - RNA, 19 nt, Artificial Sequence
  Description of Artificial Sequence: Synthetic oligonucleotide
ggcaaugaagucgaauuaa

SEQ ID NO: 1603954 - RNA, 19 nt, Artificial Sequence
  Description of Artificial Sequence: Synthetic oligonucleotide
ucccagugagcagcucagg

SEQ ID NO: 1603955 - RNA, 19 nt, Artificial Sequence
  Description of Artificial Sequence: Synthetic oligonucleotide
ggaugggauuuguagggga

SEQ ID NO: 1603956 - RNA, 19 nt, Artificial Sequence
  Description of Artificial Sequence: Synthetic oligonucleotide
gagggccauauaccacccc

SEQ ID NO: 1603957 - RNA, 19 nt, Artificial Sequence
  Description of Artificial Sequence: Synthetic oligonucleotide
gacucccaaggcucagcac

SEQ ID NO: 1603958 - RNA, 19 nt, Artificial Sequence
  Description of Artificial Sequence: Synthetic oligonucleotide
gccccguuuccccugaccc

SEQ ID NO: 1603959 - RNA, 19 nt, Artificial Sequence
  Description of Artificial Sequence: Synthetic oligonucleotide
cuacugcuguuccgggcag

SEQ ID NO: 1603960 - RNA, 19 nt, Artificial Sequence
  Description of Artificial Sequence: Synthetic oligonucleotide
ccacguugcauaaucguca

SEQ ID NO: 1603961 - RNA, 19 nt, Artificial Sequence
  Description of Artificial Sequence: Synthetic oligonucleotide
cuggcgggagcuacugcug

SEQ ID NO: 1603962 - RNA, 19 nt, Artificial Sequence
  Description of Artificial Sequence: Synthetic oligonucleotide
guuggaccacguugcauaa

SEQ ID NO: 1603963 - RNA, 19 nt, Artificial Sequence
  Description of Artificial Sequence: Synthetic oligonucleotide
ggggugagcuucccuaccc

SEQ ID NO: 1603964 - RNA, 19 nt, Artificial Sequence
  Description of Artificial Sequence: Synthetic oligonucleotide
gguaacguccuggcgggag

SEQ ID NO: 1603965 - RNA, 19 nt, Artificial Sequence
  Description of Artificial Sequence: Synthetic oligonucleotide
aggcuagaggguugcuaga

SEQ ID NO: 1603966 - RNA, 19 nt, Artificial Sequence
  Description of Artificial Sequence: Synthetic oligonucleotide
ggugcgggaaggaugcaug

SEQ ID NO: 1603967 - RNA, 19 nt, Artificial Sequence
  Description of Artificial Sequence: Synthetic oligonucleotide
acagccgcucugguuguag

SEQ ID NO: 1603968 - RNA, 19 nt, Artificial Sequence
  Description of Artificial Sequence: Synthetic oligonucleotide
uccuggcgggagcuacugc

SEQ ID NO: 1603969 - RNA, 19 nt, Artificial Sequence
  Description of Artificial Sequence: Synthetic oligonucleotide
gagugucucccaauagaaa

SEQ ID NO: 1603970 - RNA, 19 nt, Artificial Sequence
  Description of Artificial Sequence: Synthetic oligonucleotide
gggcuaaggcacugagggg

SEQ ID NO: 1603971 - RNA, 19 nt, Artificial Sequence
  Description of Artificial Sequence: Synthetic oligonucleotide
ugcuggcuuuaagaaggga

SEQ ID NO: 1603972 - RNA, 19 nt, Artificial Sequence
  Description of Artificial Sequence: Synthetic oligonucleotide
uccggccacgacgagacuu

SEQ ID NO: 1603973 - RNA, 19 nt, Artificial Sequence
  Description of Artificial Sequence: Synthetic oligonucleotide
acguggcuggcagggacuc

SEQ ID NO: 1603974 - RNA, 19 nt, Artificial Sequence
  Description of Artificial Sequence: Synthetic oligonucleotide
guguguaugggaggagaga

SEQ ID NO: 1603975 - RNA, 19 nt, Artificial Sequence
  Description of Artificial Sequence: Synthetic oligonucleotide
gacgagacuuucugacugu

SEQ ID NO: 1603976 - RNA, 19 nt, Artificial Sequence
  Description of Artificial Sequence: Synthetic oligonucleotide
uccuccggccacgacgaga

SEQ ID NO: 1603977 - RNA, 19 nt, Artificial Sequence
  Description of Artificial Sequence: Synthetic oligonucleotide
ccuccggccacgacgagac

SEQ ID NO: 1603978 - RNA, 19 nt, Artificial Sequence
  Description of Artificial Sequence: Synthetic oligonucleotide
ggugcacguggcuggcagg

SEQ ID NO: 1603979 - RNA, 19 nt, Artificial Sequence
  Description of Artificial Sequence: Synthetic oligonucleotide
gcgccugauggggagaggg

SEQ ID NO: 1603980 - RNA, 19 nt, Artificial Sequence
  Description of Artificial Sequence: Synthetic oligonucleotide
uuccgggcaggguuguauu

SEQ ID NO: 1603981 - RNA, 19 nt, Artificial Sequence
  Description of Artificial Sequence: Synthetic oligonucleotide
uugaagccaccacgacguc

SEQ ID NO: 1603982 - RNA, 19 nt, Artificial Sequence
  Description of Artificial Sequence: Synthetic oligonucleotide
auggugcuuauugcuuugu

SEQ ID NO: 1603983 - RNA, 19 nt, Artificial Sequence
  Description of Artificial Sequence: Synthetic oligonucleotide
cgacgagacuuucugacug

SEQ ID NO: 1603984 - RNA, 19 nt, Artificial Sequence
  Description of Artificial Sequence: Synthetic oligonucleotide
gcuuucggccucugccugg

SEQ ID NO: 1603985 - RNA, 19 nt, Artificial Sequence
  Description of Artificial Sequence: Synthetic oligonucleotide
uccccuccggccccguuuc

SEQ ID NO: 1603986 - RNA, 19 nt, Artificial Sequence
  Description of Artificial Sequence: Synthetic oligonucleotide
uggcucaggaugggauuug

SEQ ID NO: 1603987 - RNA, 19 nt, Artificial Sequence
  Description of Artificial Sequence: Synthetic oligonucleotide
acguugcauaaucgucagu

SEQ ID NO: 1603988 - RNA, 19 nt, Artificial Sequence
  Description of Artificial Sequence: Synthetic oligonucleotide
ugcugccagugguuggguc

SEQ ID NO: 1603989 - RNA, 19 nt, Artificial Sequence
  Description of Artificial Sequence: Synthetic oligonucleotide
gaccguuccauuuguccau

SEQ ID NO: 1603990 - RNA, 19 nt, Artificial Sequence
  Description of Artificial Sequence: Synthetic oligonucleotide
cuggguuccaagguaacgu

SEQ ID NO: 1603991 - RNA, 19 nt, Artificial Sequence
  Description of Artificial Sequence: Synthetic oligonucleotide
ccaaaggcuagaggguugc

SEQ ID NO: 1603992 - RNA, 19 nt, Artificial Sequence
  Description of Artificial Sequence: Synthetic oligonucleotide
aaccaugggguggggcuaa

SEQ ID NO: 1603993 - RNA, 19 nt, Artificial Sequence
  Description of Artificial Sequence: Synthetic oligonucleotide
gccugauggggagagggcc

SEQ ID NO: 1603994 - RNA, 19 nt, Artificial Sequence
  Description of Artificial Sequence: Synthetic oligonucleotide
cacccacuguccacaggug

SEQ ID NO: 1603995 - RNA, 19 nt, Artificial Sequence
  Description of Artificial Sequence: Synthetic oligonucleotide
ugguugggucccuuucguu

SEQ ID NO: 1603996 - RNA, 19 nt, Artificial Sequence
  Description of Artificial Sequence: Synthetic oligonucleotide
ccccuuagcgccugauggg

SEQ ID NO: 1603997 - RNA, 19 nt, Artificial Sequence
  Description of Artificial Sequence: Synthetic oligonucleotide
uccgggcaggguuguauuu

SEQ ID NO: 1603998 - RNA, 19 nt, Artificial Sequence
  Description of Artificial Sequence: Synthetic oligonucleotide
cucaccauuaaugccccua

SEQ ID NO: 1603999 - RNA, 19 nt, Artificial Sequence
  Description of Artificial Sequence: Synthetic oligonucleotide
caauggcucaggaugggau

SEQ ID NO: 1604000 - RNA, 19 nt, Artificial Sequence
  Description of Artificial Sequence: Synthetic oligonucleotide
cuuuaagaagggaggcaau

SEQ ID NO: 1604001 - RNA, 19 nt, Artificial Sequence
  Description of Artificial Sequence: Synthetic oligonucleotide
ggacucccaaggcucagca

SEQ ID NO: 1604002 - RNA, 19 nt, Artificial Sequence
  Description of Artificial Sequence: Synthetic oligonucleotide
aggaagggguggauccuug

SEQ ID NO: 1604003 - RNA, 19 nt, Artificial Sequence
  Description of Artificial Sequence: Synthetic oligonucleotide
gggugagcuucccuacccc

SEQ ID NO: 1604004 - RNA, 19 nt, Artificial Sequence
  Description of Artificial Sequence: Synthetic oligonucleotide
guguaugggaggagagauc

SEQ ID NO: 1604005 - RNA, 19 nt, Artificial Sequence
  Description of Artificial Sequence: Synthetic oligonucleotide
ucgagggcugaggcggggc

SEQ ID NO: 1604006 - RNA, 19 nt, Artificial Sequence
  Description of Artificial Sequence: Synthetic oligonucleotide
gguccucagaauggguccc

SEQ ID NO: 1604007 - RNA, 19 nt, Artificial Sequence
  Description of Artificial Sequence: Synthetic oligonucleotide
ggcuuuaagaagggaggca

SEQ ID NO: 1604008 - RNA, 19 nt, Artificial Sequence
  Description of Artificial Sequence: Synthetic oligonucleotide
cccuuagcgccugaugggg

SEQ ID NO: 1604009 - RNA, 19 nt, Artificial Sequence
  Description of Artificial Sequence: Synthetic oligonucleotide
ggcuuucggccucugccug

SEQ ID NO: 1604010 - RNA, 19 nt, Artificial Sequence
  Description of Artificial Sequence: Synthetic oligonucleotide
caacaguagcucaaagguu

SEQ ID NO: 1604011 - RNA, 19 nt, Artificial Sequence
  Description of Artificial Sequence: Synthetic oligonucleotide
gggcaguguaguguguaug

SEQ ID NO: 1604012 - RNA, 19 nt, Artificial Sequence
  Description of Artificial Sequence: Synthetic oligonucleotide
gauggggagagggccauau

SEQ ID NO: 1604013 - RNA, 19 nt, Artificial Sequence
  Description of Artificial Sequence: Synthetic oligonucleotide
gcuagcuccccauuaugcu

SEQ ID NO: 1604014 - RNA, 19 nt, Artificial Sequence
  Description of Artificial Sequence: Synthetic oligonucleotide
ucaccacgucucugagcgu

SEQ ID NO: 1604015 - RNA, 19 nt, Artificial Sequence
  Description of Artificial Sequence: Synthetic oligonucleotide
cucccaagggucuugucuu

SEQ ID NO: 1604016 - RNA, 19 nt, Artificial Sequence
  Description of Artificial Sequence: Synthetic oligonucleotide
aggccgggcaggcuccggu

SEQ ID NO: 1604017 - RNA, 19 nt, Artificial Sequence
  Description of Artificial Sequence: Synthetic oligonucleotide
gugguugggucccuuucgu

SEQ ID NO: 1604018 - RNA, 19 nt, Artificial Sequence
  Description of Artificial Sequence: Synthetic oligonucleotide
aggggcaguguagugugua

SEQ ID NO: 1604019 - RNA, 19 nt, Artificial Sequence
  Description of Artificial Sequence: Synthetic oligonucleotide
ggccgcuccgguuggacca

SEQ ID NO: 1604020 - RNA, 19 nt, Artificial Sequence
  Description of Artificial Sequence: Synthetic oligonucleotide
gcuguuccgggcaggguug

SEQ ID NO: 1604021 - RNA, 19 nt, Artificial Sequence
  Description of Artificial Sequence: Synthetic oligonucleotide
guccuggcgggagcuacug

SEQ ID NO: 1604022 - RNA, 19 nt, Artificial Sequence
  Description of Artificial Sequence: Synthetic oligonucleotide
cgcaucaucaucaccacgu

SEQ ID NO: 1604023 - RNA, 19 nt, Artificial Sequence
  Description of Artificial Sequence: Synthetic oligonucleotide
guaugggaggagagaucca

SEQ ID NO: 1604024 - RNA, 19 nt, Artificial Sequence
  Description of Artificial Sequence: Synthetic oligonucleotide
ugacuguccccggggccac

SEQ ID NO: 1604025 - RNA, 19 nt, Artificial Sequence
  Description of Artificial Sequence: Synthetic oligonucleotide
gccucuucagugacauggc

SEQ ID NO: 1604026 - RNA, 19 nt, Artificial Sequence
  Description of Artificial Sequence: Synthetic oligonucleotide
acguccagggcgggcccgg

SEQ ID NO: 1604027 - RNA, 19 nt, Artificial Sequence
  Description of Artificial Sequence: Synthetic oligonucleotide
ccccauuaugcugccagug

SEQ ID NO: 1604028 - RNA, 19 nt, Artificial Sequence
  Description of Artificial Sequence: Synthetic oligonucleotide
ccaagggucuugucuuuca

SEQ ID NO: 1604029 - RNA, 19 nt, Artificial Sequence
  Description of Artificial Sequence: Synthetic oligonucleotide
cuccgguucgagggcugag

SEQ ID NO: 1604030 - RNA, 19 nt, Artificial Sequence
  Description of Artificial Sequence: Synthetic oligonucleotide
ccauuaugcugccaguggu

SEQ ID NO: 1604031 - RNA, 19 nt, Artificial Sequence
  Description of Artificial Sequence: Synthetic oligonucleotide
ggccccguuuccccugacc

SEQ ID NO: 1604032 - RNA, 19 nt, Artificial Sequence
  Description of Artificial Sequence: Synthetic oligonucleotide
cgucagucgcaucaucauc

SEQ ID NO: 1604033 - RNA, 19 nt, Artificial Sequence
  Description of Artificial Sequence: Synthetic oligonucleotide
accguuccauuuguccauu

SEQ ID NO: 1604034 - RNA, 19 nt, Artificial Sequence
  Description of Artificial Sequence: Synthetic oligonucleotide
cuggccgcuccgguuggac

SEQ ID NO: 1604035 - RNA, 19 nt, Artificial Sequence
  Description of Artificial Sequence: Synthetic oligonucleotide
ggcucucggcggcugccag

SEQ ID NO: 1604036 - RNA, 19 nt, Artificial Sequence
  Description of Artificial Sequence: Synthetic oligonucleotide
ggagaaccauggggugggg

SEQ ID NO: 1604037 - RNA, 19 nt, Artificial Sequence
  Description of Artificial Sequence: Synthetic oligonucleotide
aacguccuggcgggagcua

SEQ ID NO: 1604038 - RNA, 19 nt, Artificial Sequence
  Description of Artificial Sequence: Synthetic oligonucleotide
gggacucccaaggcucagc

SEQ ID NO: 1604039 - RNA, 19 nt, Artificial Sequence
  Description of Artificial Sequence: Synthetic oligonucleotide
ccgggcaggcuccgguucg

SEQ ID NO: 1604040 - RNA, 19 nt, Artificial Sequence
  Description of Artificial Sequence: Synthetic oligonucleotide
gcugcuauggggccaguuu

SEQ ID NO: 1604041 - RNA, 19 nt, Artificial Sequence
  Description of Artificial Sequence: Synthetic oligonucleotide
augcugccagugguugggu

SEQ ID NO: 1604042 - RNA, 19 nt, Artificial Sequence
  Description of Artificial Sequence: Synthetic oligonucleotide
guuguagggcuggguucca

SEQ ID NO: 1604043 - RNA, 19 nt, Artificial Sequence
  Description of Artificial Sequence: Synthetic oligonucleotide
guguuccccuuagcgccug

SEQ ID NO: 1604044 - RNA, 19 nt, Artificial Sequence
  Description of Artificial Sequence: Synthetic oligonucleotide
cuccagguauggcugcuau

SEQ ID NO: 1604045 - RNA, 19 nt, Artificial Sequence
  Description of Artificial Sequence: Synthetic oligonucleotide
cacguggcuggcagggacu

SEQ ID NO: 1604046 - RNA, 19 nt, Artificial Sequence
  Description of Artificial Sequence: Synthetic oligonucleotide
guuccgggcaggguuguau

SEQ ID NO: 1604047 - RNA, 19 nt, Artificial Sequence
  Description of Artificial Sequence: Synthetic oligonucleotide
ccuggcgggagcuacugcu

SEQ ID NO: 1604048 - RNA, 19 nt, Artificial Sequence
  Description of Artificial Sequence: Synthetic oligonucleotide
gcauaaucgucagucgcau

SEQ ID NO: 1604049 - RNA, 19 nt, Artificial Sequence
  Description of Artificial Sequence: Synthetic oligonucleotide
gcgggagcuacugcuguuc

SEQ ID NO: 1604050 - RNA, 19 nt, Artificial Sequence
  Description of Artificial Sequence: Synthetic oligonucleotide
ggguugcuagagggugcgg

SEQ ID NO: 1604051 - RNA, 19 nt, Artificial Sequence
  Description of Artificial Sequence: Synthetic oligonucleotide
ccacgacgagacuuucuga

SEQ ID NO: 1604052 - RNA, 19 nt, Artificial Sequence
  Description of Artificial Sequence: Synthetic oligonucleotide
ggcuggguuccaagguaac

SEQ ID NO: 1604053 - RNA, 19 nt, Artificial Sequence
  Description of Artificial Sequence: Synthetic oligonucleotide
ccguuccauuuguccauug

SEQ ID NO: 1604054 - RNA, 19 nt, Artificial Sequence
  Description of Artificial Sequence: Synthetic oligonucleotide
ccuuagcgccugaugggga

SEQ ID NO: 1604055 - RNA, 19 nt, Artificial Sequence
  Description of Artificial Sequence: Synthetic oligonucleotide
cuggucgugcuggccgcuc

SEQ ID NO: 1604056 - RNA, 19 nt, Artificial Sequence
  Description of Artificial Sequence: Synthetic oligonucleotide
gggcuggguuccaagguaa

SEQ ID NO: 1604057 - RNA, 19 nt, Artificial Sequence
  Description of Artificial Sequence: Synthetic oligonucleotide
agguaacguccuggcggga

SEQ ID NO: 1604058 - RNA, 19 nt, Artificial Sequence
  Description of Artificial Sequence: Synthetic oligonucleotide
gcguuuugauggggagaag

SEQ ID NO: 1604059 - RNA, 19 nt, Artificial Sequence
  Description of Artificial Sequence: Synthetic oligonucleotide
guggauccuugggcucagc

SEQ ID NO: 1604060 - RNA, 19 nt, Artificial Sequence
  Description of Artificial Sequence: Synthetic oligonucleotide
ggccuggucucaccauuaa

SEQ ID NO: 1604061 - RNA, 19 nt, Artificial Sequence
  Description of Artificial Sequence: Synthetic oligonucleotide
ugccagugguugggucccu

SEQ ID NO: 1604062 - RNA, 19 nt, Artificial Sequence
  Description of Artificial Sequence: Synthetic oligonucleotide
caguagcucaaagguuugu

SEQ ID NO: 1604063 - RNA, 19 nt, Artificial Sequence
  Description of Artificial Sequence: Synthetic oligonucleotide
gcuuauugcuuuguaccuu

SEQ ID NO: 1604064 - RNA, 19 nt, Artificial Sequence
  Description of Artificial Sequence: Synthetic oligonucleotide
aggaugcauggugcuuauu

SEQ ID NO: 1604065 - RNA, 19 nt, Artificial Sequence
  Description of Artificial Sequence: Synthetic oligonucleotide
cuccuccggccacgacgag

SEQ ID NO: 1604066 - RNA, 19 nt, Artificial Sequence
  Description of Artificial Sequence: Synthetic oligonucleotide
accacgucucugagcguuu

SEQ ID NO: 1604067 - RNA, 19 nt, Artificial Sequence
  Description of Artificial Sequence: Synthetic oligonucleotide
caccacgucucugagcguu

SEQ ID NO: 1604068 - RNA, 19 nt, Artificial Sequence
  Description of Artificial Sequence: Synthetic oligonucleotide
ccaggcucucggcggcugc

SEQ ID NO: 1604069 - RNA, 19 nt, Artificial Sequence
  Description of Artificial Sequence: Synthetic oligonucleotide
gccgggcaggcuccgguuc

SEQ ID NO: 1604070 - RNA, 19 nt, Artificial Sequence
  Description of Artificial Sequence: Synthetic oligonucleotide
cucggcggcugccaggcuu

SEQ ID NO: 1604071 - RNA, 19 nt, Artificial Sequence
  Description of Artificial Sequence: Synthetic oligonucleotide
ccagucggccaggcucucg

SEQ ID NO: 1604072 - RNA, 19 nt, Artificial Sequence
  Description of Artificial Sequence: Synthetic oligonucleotide
guccccggggccaccuuaa

SEQ ID NO: 1604073 - RNA, 19 nt, Artificial Sequence
  Description of Artificial Sequence: Synthetic oligonucleotide
gggcaggcuccgguucgag

SEQ ID NO: 1604074 - RNA, 19 nt, Artificial Sequence
  Description of Artificial Sequence: Synthetic oligonucleotide
ggcuccgguucgagggcug

SEQ ID NO: 1604075 - RNA, 19 nt, Artificial Sequence
  Description of Artificial Sequence: Synthetic oligonucleotide
ggggaccguuccauuuguc

SEQ ID NO: 1604076 - RNA, 19 nt, Artificial Sequence
  Description of Artificial Sequence: Synthetic oligonucleotide
gguguuccccuuagcgccu

SEQ ID NO: 1604077 - RNA, 19 nt, Artificial Sequence
  Description of Artificial Sequence: Synthetic oligonucleotide
ggcucaggaugggauuugu

SEQ ID NO: 1604078 - RNA, 19 nt, Artificial Sequence
  Description of Artificial Sequence: Synthetic oligonucleotide
caggugcacguggcuggca

SEQ ID NO: 1604079 - RNA, 19 nt, Artificial Sequence
  Description of Artificial Sequence: Synthetic oligonucleotide
gcuccgguucgagggcuga

SEQ ID NO: 1604080 - RNA, 19 nt, Artificial Sequence
  Description of Artificial Sequence: Synthetic oligonucleotide
ccgguuggaccacguugca

SEQ ID NO: 1604081 - RNA, 19 nt, Artificial Sequence
  Description of Artificial Sequence: Synthetic oligonucleotide
ggccacgacgagacuuucu

SEQ ID NO: 1604082 - RNA, 19 nt, Artificial Sequence
  Description of Artificial Sequence: Synthetic oligonucleotide
gccgcuccgguuggaccac

SEQ ID NO: 1604083 - RNA, 19 nt, Artificial Sequence
  Description of Artificial Sequence: Synthetic oligonucleotide
cccugcaauggcucaggau

SEQ ID NO: 1604084 - RNA, 19 nt, Artificial Sequence
  Description of Artificial Sequence: Synthetic oligonucleotide
ggcgggagcuacugcuguu

SEQ ID NO: 1604085 - RNA, 19 nt, Artificial Sequence
  Description of Artificial Sequence: Synthetic oligonucleotide
gcuccccauuaugcugcca

SEQ ID NO: 1604086 - RNA, 19 nt, Artificial Sequence
  Description of Artificial Sequence: Synthetic oligonucleotide
cgucucugagcguuuugau

SEQ ID NO: 1604087 - RNA, 19 nt, Artificial Sequence
  Description of Artificial Sequence: Synthetic oligonucleotide
ccgcuccgguuggaccacg

SEQ ID NO: 1604088 - RNA, 19 nt, Artificial Sequence
  Description of Artificial Sequence: Synthetic oligonucleotide
gcuccgguuggaccacguu

SEQ ID NO: 1604089 - RNA, 19 nt, Artificial Sequence
  Description of Artificial Sequence: Synthetic oligonucleotide
ccggccacgacgagacuuu

SEQ ID NO: 1604090 - RNA, 19 nt, Artificial Sequence
  Description of Artificial Sequence: Synthetic oligonucleotide
cuccggccacgacgagacu

SEQ ID NO: 1604091 - RNA, 19 nt, Artificial Sequence
  Description of Artificial Sequence: Synthetic oligonucleotide
gcuggccgcuccgguugga

SEQ ID NO: 1604092 - RNA, 19 nt, Artificial Sequence
  Description of Artificial Sequence: Synthetic oligonucleotide
ggaggcccacagggcaagu

SEQ ID NO: 1604093 - RNA, 19 nt, Artificial Sequence
  Description of Artificial Sequence: Synthetic oligonucleotide
gcuggucgugcuggccgcu

SEQ ID NO: 1604094 - RNA, 19 nt, Artificial Sequence
  Description of Artificial Sequence: Synthetic oligonucleotide
ccggccccguuuccccuga

SEQ ID NO: 1604095 - RNA, 19 nt, Artificial Sequence
  Description of Artificial Sequence: Synthetic oligonucleotide
cggccacgacgagacuuuc

SEQ ID NO: 1604096 - RNA, 19 nt, Artificial Sequence
  Description of Artificial Sequence: Synthetic oligonucleotide
cgugcuggccgcuccgguu

SEQ ID NO: 1604097 - RNA, 19 nt, Artificial Sequence
  Description of Artificial Sequence: Synthetic oligonucleotide
gccagugguugggucccuu

SEQ ID NO: 1604098 - RNA, 19 nt, Artificial Sequence
  Description of Artificial Sequence: Synthetic oligonucleotide
ccacgucucugagcguuuu

SEQ ID NO: 1604099 - RNA, 19 nt, Artificial Sequence
  Description of Artificial Sequence: Synthetic oligonucleotide
cgcuccgguuggaccacgu

SEQ ID NO: 1604100 - RNA, 19 nt, Artificial Sequence
  Description of Artificial Sequence: Synthetic oligonucleotide
cgguuggaccacguugcau

SEQ ID NO: 1604101 - RNA, 19 nt, Artificial Sequence
  Description of Artificial Sequence: Synthetic oligonucleotide
cgggcaggcuccgguucga

SEQ ID NO: 1604102 - RNA, 19 nt, Artificial Sequence
  Description of Artificial Sequence: Synthetic oligonucleotide
cggccccguuuccccugac

SEQ ID NO: 1604103 - RNA, 19 nt, Artificial Sequence
  Description of Artificial Sequence: Synthetic oligonucleotide
aaguuaacagaucuacugc

SEQ ID NO: 1604104 - RNA, 19 nt, Artificial Sequence
  Description of Artificial Sequence: Synthetic oligonucleotide
aaguaguugucucggaugg

SEQ ID NO: 1604105 - RNA, 19 nt, Artificial Sequence
  Description of Artificial Sequence: Synthetic oligonucleotide
acaagaucaguuucgaggg

SEQ ID NO: 1604106 - RNA, 19 nt, Artificial Sequence
  Description of Artificial Sequence: Synthetic oligonucleotide
gauuuuaucuuccucggcc

SEQ ID NO: 1604107 - RNA, 19 nt, Artificial Sequence
  Description of Artificial Sequence: Synthetic oligonucleotide
caugauaacuuugugaagg

SEQ ID NO: 1604108 - RNA, 19 nt, Artificial Sequence
  Description of Artificial Sequence: Synthetic oligonucleotide
agaacaacaucccacuuuc

SEQ ID NO: 1604109 - RNA, 19 nt, Artificial Sequence
  Description of Artificial Sequence: Synthetic oligonucleotide
uuucuuaucaucccaacuc

SEQ ID NO: 1604110 - RNA, 19 nt, Artificial Sequence
  Description of Artificial Sequence: Synthetic oligonucleotide
guaacugucagcuuuggug

SEQ ID NO: 1604111 - RNA, 19 nt, Artificial Sequence
  Description of Artificial Sequence: Synthetic oligonucleotide
uuaaaggagugacagugag

SEQ ID NO: 1604112 - RNA, 19 nt, Artificial Sequence
  Description of Artificial Sequence: Synthetic oligonucleotide
ucuguaaaagaccuagcca

SEQ ID NO: 1604113 - RNA, 19 nt, Artificial Sequence
  Description of Artificial Sequence: Synthetic oligonucleotide
aaaagcaagcccacuaugg

SEQ ID NO: 1604114 - RNA, 19 nt, Artificial Sequence
  Description of Artificial Sequence: Synthetic oligonucleotide
agauucucaaagcuccugc

SEQ ID NO: 1604115 - RNA, 19 nt, Artificial Sequence
  Description of Artificial Sequence: Synthetic oligonucleotide
gauaacuuugugaagggcc

SEQ ID NO: 1604116 - RNA, 19 nt, Artificial Sequence
  Description of Artificial Sequence: Synthetic oligonucleotide
ucccucacuaaauagagug

SEQ ID NO: 1604117 - RNA, 19 nt, Artificial Sequence
  Description of Artificial Sequence: Synthetic oligonucleotide
agaucuacugcacaaaggu

SEQ ID NO: 1604118 - RNA, 19 nt, Artificial Sequence
  Description of Artificial Sequence: Synthetic oligonucleotide
aaacucaccuuucuagcuc

SEQ ID NO: 1604119 - RNA, 19 nt, Artificial Sequence
  Description of Artificial Sequence: Synthetic oligonucleotide
uuuuccgacaucuucuuug

SEQ ID NO: 1604120 - RNA, 19 nt, Artificial Sequence
  Description of Artificial Sequence: Synthetic oligonucleotide
auaucggucccauuuaaag

SEQ ID NO: 1604121 - RNA, 19 nt, Artificial Sequence
  Description of Artificial Sequence: Synthetic oligonucleotide
aacucaguuguuugggauc

SEQ ID NO: 1604122 - RNA, 19 nt, Artificial Sequence
  Description of Artificial Sequence: Synthetic oligonucleotide
uugcccacgaccaacagug

SEQ ID NO: 1604123 - RNA, 19 nt, Artificial Sequence
  Description of Artificial Sequence: Synthetic oligonucleotide
cuggcauuuaaauaagaag

SEQ ID NO: 1604124 - RNA, 19 nt, Artificial Sequence
  Description of Artificial Sequence: Synthetic oligonucleotide
uaucggucccauuuaaagg

SEQ ID NO: 1604125 - RNA, 19 nt, Artificial Sequence
  Description of Artificial Sequence: Synthetic oligonucleotide
aauaagaagagaacaacau

SEQ ID NO: 1604126 - RNA, 19 nt, Artificial Sequence
  Description of Artificial Sequence: Synthetic oligonucleotide
uuggaagugacacaagauc

SEQ ID NO: 1604127 - RNA, 19 nt, Artificial Sequence
  Description of Artificial Sequence: Synthetic oligonucleotide
ucaaggaccaccuucuuuc

SEQ ID NO: 1604128 - RNA, 19 nt, Artificial Sequence
  Description of Artificial Sequence: Synthetic oligonucleotide
agaaugucuaucuggaccu

SEQ ID NO: 1604129 - RNA, 19 nt, Artificial Sequence
  Description of Artificial Sequence: Synthetic oligonucleotide
cagaaugucuaucuggacc

SEQ ID NO: 1604130 - RNA, 19 nt, Artificial Sequence
  Description of Artificial Sequence: Synthetic oligonucleotide
agcgaagccagacuggagg

SEQ ID NO: 1604131 - RNA, 19 nt, Artificial Sequence
  Description of Artificial Sequence: Synthetic oligonucleotide
ugaaacucaccuuucuagc

SEQ ID NO: 1604132 - RNA, 19 nt, Artificial Sequence
  Description of Artificial Sequence: Synthetic oligonucleotide
cucuguaaaagaccuagcc

SEQ ID NO: 1604133 - RNA, 19 nt, Artificial Sequence
  Description of Artificial Sequence: Synthetic oligonucleotide
gaugcacagauaucggucc

SEQ ID NO: 1604134 - RNA, 19 nt, Artificial Sequence
  Description of Artificial Sequence: Synthetic oligonucleotide
agacucgccgcucucacgc

SEQ ID NO: 1604135 - RNA, 19 nt, Artificial Sequence
  Description of Artificial Sequence: Synthetic oligonucleotide
uucuuaucaucccaacuca

SEQ ID NO: 1604136 - RNA, 19 nt, Artificial Sequence
  Description of Artificial Sequence: Synthetic oligonucleotide
uccagaaugucuaucugga

SEQ ID NO: 1604137 - RNA, 19 nt, Artificial Sequence
  Description of Artificial Sequence: Synthetic oligonucleotide
acuaaauagagugcugagg

SEQ ID NO: 1604138 - RNA, 19 nt, Artificial Sequence
  Description of Artificial Sequence: Synthetic oligonucleotide
ucuuccucggccuugacuc

SEQ ID NO: 1604139 - RNA, 19 nt, Artificial Sequence
  Description of Artificial Sequence: Synthetic oligonucleotide
ugcucugugauggagaaca

SEQ ID NO: 1604140 - RNA, 19 nt, Artificial Sequence
  Description of Artificial Sequence: Synthetic oligonucleotide
aagcaagcccacuauggag

SEQ ID NO: 1604141 - RNA, 19 nt, Artificial Sequence
  Description of Artificial Sequence: Synthetic oligonucleotide
aaagcaagcccacuaugga

SEQ ID NO: 1604142 - RNA, 19 nt, Artificial Sequence
  Description of Artificial Sequence: Synthetic oligonucleotide
aguuaacagaucuacugca

SEQ ID NO: 1604143 - RNA, 19 nt, Artificial Sequence
  Description of Artificial Sequence: Synthetic oligonucleotide
aauagagugcugaggagag

SEQ ID NO: 1604144 - RNA, 19 nt, Artificial Sequence
  Description of Artificial Sequence: Synthetic oligonucleotide
ucggauuucucucaucaga

SEQ ID NO: 1604145 - RNA, 19 nt, Artificial Sequence
  Description of Artificial Sequence: Synthetic oligonucleotide
aacaucccacuuucacucc

SEQ ID NO: 1604146 - RNA, 19 nt, Artificial Sequence
  Description of Artificial Sequence: Synthetic oligonucleotide
augauaacuuugugaaggg

SEQ ID NO: 1604147 - RNA, 19 nt, Artificial Sequence
  Description of Artificial Sequence: Synthetic oligonucleotide
uucggaaguaguugucucg

SEQ ID NO: 1604148 - RNA, 19 nt, Artificial Sequence
  Description of Artificial Sequence: Synthetic oligonucleotide
caacucugcgcucugaugc

SEQ ID NO: 1604149 - RNA, 19 nt, Artificial Sequence
  Description of Artificial Sequence: Synthetic oligonucleotide
aguugucucggauggcugc

SEQ ID NO: 1604150 - RNA, 19 nt, Artificial Sequence
  Description of Artificial Sequence: Synthetic oligonucleotide
caucagaucaaagaacacc

SEQ ID NO: 1604151 - RNA, 19 nt, Artificial Sequence
  Description of Artificial Sequence: Synthetic oligonucleotide
gagaacacaagcagaaagc

SEQ ID NO: 1604152 - RNA, 19 nt, Artificial Sequence
  Description of Artificial Sequence: Synthetic oligonucleotide
acagaucuacugcacaaag

SEQ ID NO: 1604153 - RNA, 19 nt, Artificial Sequence
  Description of Artificial Sequence: Synthetic oligonucleotide
acagauaucggucccauuu

SEQ ID NO: 1604154 - RNA, 19 nt, Artificial Sequence
  Description of Artificial Sequence: Synthetic oligonucleotide
ucuuaucaucccaacucag

SEQ ID NO: 1604155 - RNA, 19 nt, Artificial Sequence
  Description of Artificial Sequence: Synthetic oligonucleotide
gcugucacgauucagggag

SEQ ID NO: 1604156 - RNA, 19 nt, Artificial Sequence
  Description of Artificial Sequence: Synthetic oligonucleotide
uuaucaucccaacucaguu

SEQ ID NO: 1604157 - RNA, 19 nt, Artificial Sequence
  Description of Artificial Sequence: Synthetic oligonucleotide
uucuguaacugucagcuuu

SEQ ID NO: 1604158 - RNA, 19 nt, Artificial Sequence
  Description of Artificial Sequence: Synthetic oligonucleotide
agacccaugauucuuugga

SEQ ID NO: 1604159 - RNA, 19 nt, Artificial Sequence
  Description of Artificial Sequence: Synthetic oligonucleotide
uuuggaagugacacaagau

SEQ ID NO: 1604160 - RNA, 19 nt, Artificial Sequence
  Description of Artificial Sequence: Synthetic oligonucleotide
agcaagcccacuauggagc

SEQ ID NO: 1604161 - RNA, 19 nt, Artificial Sequence
  Description of Artificial Sequence: Synthetic oligonucleotide
uccacauuggcacgggucu

SEQ ID NO: 1604162 - RNA, 19 nt, Artificial Sequence
  Description of Artificial Sequence: Synthetic oligonucleotide
ugaacugaagcgucagggc

SEQ ID NO: 1604163 - RNA, 19 nt, Artificial Sequence
  Description of Artificial Sequence: Synthetic oligonucleotide
uaucaucccaacucaguug

SEQ ID NO: 1604164 - RNA, 19 nt, Artificial Sequence
  Description of Artificial Sequence: Synthetic oligonucleotide
aagacccaugauucuuugg

SEQ ID NO: 1604165 - RNA, 19 nt, Artificial Sequence
  Description of Artificial Sequence: Synthetic oligonucleotide
gaggugauggcacacggac

SEQ ID NO: 1604166 - RNA, 19 nt, Artificial Sequence
  Description of Artificial Sequence: Synthetic oligonucleotide
guuucgagggaucagaucu

SEQ ID NO: 1604167 - RNA, 19 nt, Artificial Sequence
  Description of Artificial Sequence: Synthetic oligonucleotide
aaaguucccucacuaaaua

SEQ ID NO: 1604168 - RNA, 19 nt, Artificial Sequence
  Description of Artificial Sequence: Synthetic oligonucleotide
ugggaacccagucccaccg

SEQ ID NO: 1604169 - RNA, 19 nt, Artificial Sequence
  Description of Artificial Sequence: Synthetic oligonucleotide
aacucaccuuucuagcucu

SEQ ID NO: 1604170 - RNA, 19 nt, Artificial Sequence
  Description of Artificial Sequence: Synthetic oligonucleotide
ugaugucuccacauacugc

SEQ ID NO: 1604171 - RNA, 19 nt, Artificial Sequence
  Description of Artificial Sequence: Synthetic oligonucleotide
caccgaugcacagauaucg

SEQ ID NO: 1604172 - RNA, 19 nt, Artificial Sequence
  Description of Artificial Sequence: Synthetic oligonucleotide
accucuguaaaagaccuag

SEQ ID NO: 1604173 - RNA, 19 nt, Artificial Sequence
  Description of Artificial Sequence: Synthetic oligonucleotide
ucacgauucagggagggug

SEQ ID NO: 1604174 - RNA, 19 nt, Artificial Sequence
  Description of Artificial Sequence: Synthetic oligonucleotide
aguguggcuguggagagcg

SEQ ID NO: 1604175 - RNA, 19 nt, Artificial Sequence
  Description of Artificial Sequence: Synthetic oligonucleotide
cacaaccucuguaaaagac

SEQ ID NO: 1604176 - RNA, 19 nt, Artificial Sequence
  Description of Artificial Sequence: Synthetic oligonucleotide
cagaucuacugcacaaagg

SEQ ID NO: 1604177 - RNA, 19 nt, Artificial Sequence
  Description of Artificial Sequence: Synthetic oligonucleotide
ucugaugcucugaucgccc

SEQ ID NO: 1604178 - RNA, 19 nt, Artificial Sequence
  Description of Artificial Sequence: Synthetic oligonucleotide
uuugcucggauuucucuca

SEQ ID NO: 1604179 - RNA, 19 nt, Artificial Sequence
  Description of Artificial Sequence: Synthetic oligonucleotide
ucccauuuaaaggagugac

SEQ ID NO: 1604180 - RNA, 19 nt, Artificial Sequence
  Description of Artificial Sequence: Synthetic oligonucleotide
agaagagaacaacauccca

SEQ ID NO: 1604181 - RNA, 19 nt, Artificial Sequence
  Description of Artificial Sequence: Synthetic oligonucleotide
ucggccuugacucgcagga

SEQ ID NO: 1604182 - RNA, 19 nt, Artificial Sequence
  Description of Artificial Sequence: Synthetic oligonucleotide
agggaucagaucucaguuc

SEQ ID NO: 1604183 - RNA, 19 nt, Artificial Sequence
  Description of Artificial Sequence: Synthetic oligonucleotide
uggcugucacgauucaggg

SEQ ID NO: 1604184 - RNA, 19 nt, Artificial Sequence
  Description of Artificial Sequence: Synthetic oligonucleotide
aacuuugugaagggccagg

SEQ ID NO: 1604185 - RNA, 19 nt, Artificial Sequence
  Description of Artificial Sequence: Synthetic oligonucleotide
aucagaucucaguucccac

SEQ ID NO: 1604186 - RNA, 19 nt, Artificial Sequence
  Description of Artificial Sequence: Synthetic oligonucleotide
aggagugacagugagugug

SEQ ID NO: 1604187 - RNA, 19 nt, Artificial Sequence
  Description of Artificial Sequence: Synthetic oligonucleotide
agugacacaagaucaguuu

SEQ ID NO: 1604188 - RNA, 19 nt, Artificial Sequence
  Description of Artificial Sequence: Synthetic oligonucleotide
ucuuucuguaacugucagc

SEQ ID NO: 1604189 - RNA, 19 nt, Artificial Sequence
  Description of Artificial Sequence: Synthetic oligonucleotide
ugcuggucugaggugaugg

SEQ ID NO: 1604190 - RNA, 19 nt, Artificial Sequence
  Description of Artificial Sequence: Synthetic oligonucleotide
uccgacaucuucuuugcuc

SEQ ID NO: 1604191 - RNA, 19 nt, Artificial Sequence
  Description of Artificial Sequence: Synthetic oligonucleotide
gaugccaggaggcuuuuca

SEQ ID NO: 1604192 - RNA, 19 nt, Artificial Sequence
  Description of Artificial Sequence: Synthetic oligonucleotide
ggcauuuaaauaagaagag

SEQ ID NO: 1604193 - RNA, 19 nt, Artificial Sequence
  Description of Artificial Sequence: Synthetic oligonucleotide
acagauggcccagaguggg

SEQ ID NO: 1604194 - RNA, 19 nt, Artificial Sequence
  Description of Artificial Sequence: Synthetic oligonucleotide
guucccucacuaaauagag

SEQ ID NO: 1604195 - RNA, 19 nt, Artificial Sequence
  Description of Artificial Sequence: Synthetic oligonucleotide
cacuaaauagagugcugag

SEQ ID NO: 1604196 - RNA, 19 nt, Artificial Sequence
  Description of Artificial Sequence: Synthetic oligonucleotide
augcacagauaucgguccc

SEQ ID NO: 1604197 - RNA, 19 nt, Artificial Sequence
  Description of Artificial Sequence: Synthetic oligonucleotide
cacgauucagggagggugg

SEQ ID NO: 1604198 - RNA, 19 nt, Artificial Sequence
  Description of Artificial Sequence: Synthetic oligonucleotide
caagcagcaacgcucuuug

SEQ ID NO: 1604199 - RNA, 19 nt, Artificial Sequence
  Description of Artificial Sequence: Synthetic oligonucleotide
gggauuuuaucuuccucgg

SEQ ID NO: 1604200 - RNA, 19 nt, Artificial Sequence
  Description of Artificial Sequence: Synthetic oligonucleotide
gggaucagaucucaguucc

SEQ ID NO: 1604201 - RNA, 19 nt, Artificial Sequence
  Description of Artificial Sequence: Synthetic oligonucleotide
ucucaguucccacaaccuc

SEQ ID NO: 1604202 - RNA, 19 nt, Artificial Sequence
  Description of Artificial Sequence: Synthetic oligonucleotide
cccacuauggagcacaggc

SEQ ID NO: 1604203 - RNA, 19 nt, Artificial Sequence
  Description of Artificial Sequence: Synthetic oligonucleotide
ucugaggugauggcacacg

SEQ ID NO: 1604204 - RNA, 19 nt, Artificial Sequence
  Description of Artificial Sequence: Synthetic oligonucleotide
aagaucaguuucgagggau

SEQ ID NO: 1604205 - RNA, 19 nt, Artificial Sequence
  Description of Artificial Sequence: Synthetic oligonucleotide
ugauaacuuugugaagggc

SEQ ID NO: 1604206 - RNA, 19 nt, Artificial Sequence
  Description of Artificial Sequence: Synthetic oligonucleotide
cuuucacuccagaugccag

SEQ ID NO: 1604207 - RNA, 19 nt, Artificial Sequence
  Description of Artificial Sequence: Synthetic oligonucleotide
cuuugcucggauuucucuc

SEQ ID NO: 1604208 - RNA, 19 nt, Artificial Sequence
  Description of Artificial Sequence: Synthetic oligonucleotide
uuucuucugccagccaccg

SEQ ID NO: 1604209 - RNA, 19 nt, Artificial Sequence
  Description of Artificial Sequence: Synthetic oligonucleotide
auaacuuugugaagggcca

SEQ ID NO: 1604210 - RNA, 19 nt, Artificial Sequence
  Description of Artificial Sequence: Synthetic oligonucleotide
aggucccuagagcuggugg

SEQ ID NO: 1604211 - RNA, 19 nt, Artificial Sequence
  Description of Artificial Sequence: Synthetic oligonucleotide
uggcuggcauuuaaauaag

SEQ ID NO: 1604212 - RNA, 19 nt, Artificial Sequence
  Description of Artificial Sequence: Synthetic oligonucleotide
ggcagauucucaaagcucc

SEQ ID NO: 1604213 - RNA, 19 nt, Artificial Sequence
  Description of Artificial Sequence: Synthetic oligonucleotide
aucccaacucaguuguuug

SEQ ID NO: 1604214 - RNA, 19 nt, Artificial Sequence
  Description of Artificial Sequence: Synthetic oligonucleotide
gugacacaagaucaguuuc

SEQ ID NO: 1604215 - RNA, 19 nt, Artificial Sequence
  Description of Artificial Sequence: Synthetic oligonucleotide
uguaacugucagcuuuggu

SEQ ID NO: 1604216 - RNA, 19 nt, Artificial Sequence
  Description of Artificial Sequence: Synthetic oligonucleotide
cugaggugauggcacacgg

SEQ ID NO: 1604217 - RNA, 19 nt, Artificial Sequence
  Description of Artificial Sequence: Synthetic oligonucleotide
ugucacgauucagggaggg

SEQ ID NO: 1604218 - RNA, 19 nt, Artificial Sequence
  Description of Artificial Sequence: Synthetic oligonucleotide
gaucuacugcacaaaggug

SEQ ID NO: 1604219 - RNA, 19 nt, Artificial Sequence
  Description of Artificial Sequence: Synthetic oligonucleotide
agggcugacuugccgacuc

SEQ ID NO: 1604220 - RNA, 19 nt, Artificial Sequence
  Description of Artificial Sequence: Synthetic oligonucleotide
cucacuaaauagagugcug

SEQ ID NO: 1604221 - RNA, 19 nt, Artificial Sequence
  Description of Artificial Sequence: Synthetic oligonucleotide
ggagagcgaagccagacug

SEQ ID NO: 1604222 - RNA, 19 nt, Artificial Sequence
  Description of Artificial Sequence: Synthetic oligonucleotide
aguucccucacuaaauaga

SEQ ID NO: 1604223 - RNA, 19 nt, Artificial Sequence
  Description of Artificial Sequence: Synthetic oligonucleotide
ccaaaguuaacagaucuac

SEQ ID NO: 1604224 - RNA, 19 nt, Artificial Sequence
  Description of Artificial Sequence: Synthetic oligonucleotide
aacucugcgcucugaugcu

SEQ ID NO: 1604225 - RNA, 19 nt, Artificial Sequence
  Description of Artificial Sequence: Synthetic oligonucleotide
agaaagcccucuccacuuc

SEQ ID NO: 1604226 - RNA, 19 nt, Artificial Sequence
  Description of Artificial Sequence: Synthetic oligonucleotide
agugaguguggcuguggag

SEQ ID NO: 1604227 - RNA, 19 nt, Artificial Sequence
  Description of Artificial Sequence: Synthetic oligonucleotide
uuggcacgggucuuggcug

SEQ ID NO: 1604228 - RNA, 19 nt, Artificial Sequence
  Description of Artificial Sequence: Synthetic oligonucleotide
uaguugucucggauggcug

SEQ ID NO: 1604229 - RNA, 19 nt, Artificial Sequence
  Description of Artificial Sequence: Synthetic oligonucleotide
ucuggccgugcgcacaacc

SEQ ID NO: 1604230 - RNA, 19 nt, Artificial Sequence
  Description of Artificial Sequence: Synthetic oligonucleotide
guuaacagaucuacugcac

SEQ ID NO: 1604231 - RNA, 19 nt, Artificial Sequence
  Description of Artificial Sequence: Synthetic oligonucleotide
agaucucaguucccacaac

SEQ ID NO: 1604232 - RNA, 19 nt, Artificial Sequence
  Description of Artificial Sequence: Synthetic oligonucleotide
ucuacugcacaaagguguu

SEQ ID NO: 1604233 - RNA, 19 nt, Artificial Sequence
  Description of Artificial Sequence: Synthetic oligonucleotide
uuguugcccacgaccaaca

SEQ ID NO: 1604234 - RNA, 19 nt, Artificial Sequence
  Description of Artificial Sequence: Synthetic oligonucleotide
gcagcaacgcucuuugaag

SEQ ID NO: 1604235 - RNA, 19 nt, Artificial Sequence
  Description of Artificial Sequence: Synthetic oligonucleotide
ccgacaucuucuuugcucg

SEQ ID NO: 1604236 - RNA, 19 nt, Artificial Sequence
  Description of Artificial Sequence: Synthetic oligonucleotide
gaucgcccagcucacagca

SEQ ID NO: 1604237 - RNA, 19 nt, Artificial Sequence
  Description of Artificial Sequence: Synthetic oligonucleotide
gaaacucaccuuucuagcu

SEQ ID NO: 1604238 - RNA, 19 nt, Artificial Sequence
  Description of Artificial Sequence: Synthetic oligonucleotide
gaacugaagcgucagggcu

SEQ ID NO: 1604239 - RNA, 19 nt, Artificial Sequence
  Description of Artificial Sequence: Synthetic oligonucleotide
gacagauggcccagagugg

SEQ ID NO: 1604240 - RNA, 19 nt, Artificial Sequence
  Description of Artificial Sequence: Synthetic oligonucleotide
gaucagaucucaguuccca

SEQ ID NO: 1604241 - RNA, 19 nt, Artificial Sequence
  Description of Artificial Sequence: Synthetic oligonucleotide
agauaucggucccauuuaa

SEQ ID NO: 1604242 - RNA, 19 nt, Artificial Sequence
  Description of Artificial Sequence: Synthetic oligonucleotide
uggagagcgaagccagacu

SEQ ID NO: 1604243 - RNA, 19 nt, Artificial Sequence
  Description of Artificial Sequence: Synthetic oligonucleotide
cuucggaaguaguugucuc

SEQ ID NO: 1604244 - RNA, 19 nt, Artificial Sequence
  Description of Artificial Sequence: Synthetic oligonucleotide
aaagcccucuccacuucgg

SEQ ID NO: 1604245 - RNA, 19 nt, Artificial Sequence
  Description of Artificial Sequence: Synthetic oligonucleotide
agcaacgcucuuugaagcu

SEQ ID NO: 1604246 - RNA, 19 nt, Artificial Sequence
  Description of Artificial Sequence: Synthetic oligonucleotide
cugaucgcccagcucacag

SEQ ID NO: 1604247 - RNA, 19 nt, Artificial Sequence
  Description of Artificial Sequence: Synthetic oligonucleotide
gagagcgaagccagacugg

SEQ ID NO: 1604248 - RNA, 19 nt, Artificial Sequence
  Description of Artificial Sequence: Synthetic oligonucleotide
uucacuccagaugccagga

SEQ ID NO: 1604249 - RNA, 19 nt, Artificial Sequence
  Description of Artificial Sequence: Synthetic oligonucleotide
ccagcucacagcaagcagc

SEQ ID NO: 1604250 - RNA, 19 nt, Artificial Sequence
  Description of Artificial Sequence: Synthetic oligonucleotide
cugguggcugucacgauuc

SEQ ID NO: 1604251 - RNA, 19 nt, Artificial Sequence
  Description of Artificial Sequence: Synthetic oligonucleotide
uuucgagggaucagaucuc

SEQ ID NO: 1604252 - RNA, 19 nt, Artificial Sequence
  Description of Artificial Sequence: Synthetic oligonucleotide
gcucugaucgcccagcuca

SEQ ID NO: 1604253 - RNA, 19 nt, Artificial Sequence
  Description of Artificial Sequence: Synthetic oligonucleotide
aaggagugacagugagugu

SEQ ID NO: 1604254 - RNA, 19 nt, Artificial Sequence
  Description of Artificial Sequence: Synthetic oligonucleotide
ucacgcgccgccccgcccg

SEQ ID NO: 1604255 - RNA, 19 nt, Artificial Sequence
  Description of Artificial Sequence: Synthetic oligonucleotide
cuuguugcccacgaccaac

SEQ ID NO: 1604256 - RNA, 19 nt, Artificial Sequence
  Description of Artificial Sequence: Synthetic oligonucleotide
uaacuuugugaagggccag

SEQ ID NO: 1604257 - RNA, 19 nt, Artificial Sequence
  Description of Artificial Sequence: Synthetic oligonucleotide
uggcccaagugaaacucac

SEQ ID NO: 1604258 - RNA, 19 nt, Artificial Sequence
  Description of Artificial Sequence: Synthetic oligonucleotide
ugaucgcccagcucacagc

SEQ ID NO: 1604259 - RNA, 19 nt, Artificial Sequence
  Description of Artificial Sequence: Synthetic oligonucleotide
uucccucacuaaauagagu

SEQ ID NO: 1604260 - RNA, 19 nt, Artificial Sequence
  Description of Artificial Sequence: Synthetic oligonucleotide
acgaccaacagugggauuu

SEQ ID NO: 1604261 - RNA, 19 nt, Artificial Sequence
  Description of Artificial Sequence: Synthetic oligonucleotide
aagugacacaagaucaguu

SEQ ID NO: 1604262 - RNA, 19 nt, Artificial Sequence
  Description of Artificial Sequence: Synthetic oligonucleotide
cuggcucuugcccuuguug

SEQ ID NO: 1604263 - RNA, 19 nt, Artificial Sequence
  Description of Artificial Sequence: Synthetic oligonucleotide
gaucaguuucgagggauca

SEQ ID NO: 1604264 - RNA, 19 nt, Artificial Sequence
  Description of Artificial Sequence: Synthetic oligonucleotide
uggcacacggacagauggc

SEQ ID NO: 1604265 - RNA, 19 nt, Artificial Sequence
  Description of Artificial Sequence: Synthetic oligonucleotide
uuaucuuccucggccuuga

SEQ ID NO: 1604266 - RNA, 19 nt, Artificial Sequence
  Description of Artificial Sequence: Synthetic oligonucleotide
uucgagggaucagaucuca

SEQ ID NO: 1604267 - RNA, 19 nt, Artificial Sequence
  Description of Artificial Sequence: Synthetic oligonucleotide
agaucaguuucgagggauc

SEQ ID NO: 1604268 - RNA, 19 nt, Artificial Sequence
  Description of Artificial Sequence: Synthetic oligonucleotide
ugcgcucugaugcucugau

SEQ ID NO: 1604269 - RNA, 19 nt, Artificial Sequence
  Description of Artificial Sequence: Synthetic oligonucleotide
guugucucggauggcugcg

SEQ ID NO: 1604270 - RNA, 19 nt, Artificial Sequence
  Description of Artificial Sequence: Synthetic oligonucleotide
accuggcuggcauuuaaau

SEQ ID NO: 1604271 - RNA, 19 nt, Artificial Sequence
  Description of Artificial Sequence: Synthetic oligonucleotide
ucucggauggcugcguagu

SEQ ID NO: 1604272 - RNA, 19 nt, Artificial Sequence
  Description of Artificial Sequence: Synthetic oligonucleotide
ugaagcgucagggcugacu

SEQ ID NO: 1604273 - RNA, 19 nt, Artificial Sequence
  Description of Artificial Sequence: Synthetic oligonucleotide
uguguccagaaugucuauc

SEQ ID NO: 1604274 - RNA, 19 nt, Artificial Sequence
  Description of Artificial Sequence: Synthetic oligonucleotide
cgcacaaccagacucgccg

SEQ ID NO: 1604275 - RNA, 19 nt, Artificial Sequence
  Description of Artificial Sequence: Synthetic oligonucleotide
acggacagauggcccagag

SEQ ID NO: 1604276 - RNA, 19 nt, Artificial Sequence
  Description of Artificial Sequence: Synthetic oligonucleotide
gugcgcacaaccagacucg

SEQ ID NO: 1604277 - RNA, 19 nt, Artificial Sequence
  Description of Artificial Sequence: Synthetic oligonucleotide
agagcgaagccagacugga

SEQ ID NO: 1604278 - RNA, 19 nt, Artificial Sequence
  Description of Artificial Sequence: Synthetic oligonucleotide
agucccaccgccgcucugg

SEQ ID NO: 1604279 - RNA, 19 nt, Artificial Sequence
  Description of Artificial Sequence: Synthetic oligonucleotide
uugacucgcaggaucuguu

SEQ ID NO: 1604280 - RNA, 19 nt, Artificial Sequence
  Description of Artificial Sequence: Synthetic oligonucleotide
cucaugcucugugauggag

SEQ ID NO: 1604281 - RNA, 19 nt, Artificial Sequence
  Description of Artificial Sequence: Synthetic oligonucleotide
ugacucgcaggaucuguuc

SEQ ID NO: 1604282 - RNA, 19 nt, Artificial Sequence
  Description of Artificial Sequence: Synthetic oligonucleotide
gacccaugauucuuuggaa

SEQ ID NO: 1604283 - RNA, 19 nt, Artificial Sequence
  Description of Artificial Sequence: Synthetic oligonucleotide
acaaccagacucgccgcuc

SEQ ID NO: 1604284 - RNA, 19 nt, Artificial Sequence
  Description of Artificial Sequence: Synthetic oligonucleotide
cuuaucaucccaacucagu

SEQ ID NO: 1604285 - RNA, 19 nt, Artificial Sequence
  Description of Artificial Sequence: Synthetic oligonucleotide
cuuccucggccuugacucg

SEQ ID NO: 1604286 - RNA, 19 nt, Artificial Sequence
  Description of Artificial Sequence: Synthetic oligonucleotide
accgaugcacagauaucgg

SEQ ID NO: 1604287 - RNA, 19 nt, Artificial Sequence
  Description of Artificial Sequence: Synthetic oligonucleotide
ugcacagauaucgguccca

SEQ ID NO: 1604288 - RNA, 19 nt, Artificial Sequence
  Description of Artificial Sequence: Synthetic oligonucleotide
cugucacgauucagggagg

SEQ ID NO: 1604289 - RNA, 19 nt, Artificial Sequence
  Description of Artificial Sequence: Synthetic oligonucleotide
ggucccuagagcugguggc

SEQ ID NO: 1604290 - RNA, 19 nt, Artificial Sequence
  Description of Artificial Sequence: Synthetic oligonucleotide
cucggccuugacucgcagg

SEQ ID NO: 1604291 - RNA, 19 nt, Artificial Sequence
  Description of Artificial Sequence: Synthetic oligonucleotide
cuccgcuuugccccgggcc

SEQ ID NO: 1604292 - RNA, 19 nt, Artificial Sequence
  Description of Artificial Sequence: Synthetic oligonucleotide
caaaguuaacagaucuacu

SEQ ID NO: 1604293 - RNA, 19 nt, Artificial Sequence
  Description of Artificial Sequence: Synthetic oligonucleotide
ugcccacgaccaacagugg

SEQ ID NO: 1604294 - RNA, 19 nt, Artificial Sequence
  Description of Artificial Sequence: Synthetic oligonucleotide
gaagcgucagggcugacuu

SEQ ID NO: 1604295 - RNA, 19 nt, Artificial Sequence
  Description of Artificial Sequence: Synthetic oligonucleotide
ggagugacagugagugugg

SEQ ID NO: 1604296 - RNA, 19 nt, Artificial Sequence
  Description of Artificial Sequence: Synthetic oligonucleotide
gucucggauggcugcguag

SEQ ID NO: 1604297 - RNA, 19 nt, Artificial Sequence
  Description of Artificial Sequence: Synthetic oligonucleotide
gauaucggucccauuuaaa

SEQ ID NO: 1604298 - RNA, 19 nt, Artificial Sequence
  Description of Artificial Sequence: Synthetic oligonucleotide
ccaaagaaaguucccucac

SEQ ID NO: 1604299 - RNA, 19 nt, Artificial Sequence
  Description of Artificial Sequence: Synthetic oligonucleotide
ucccuggcccaagugaaac

SEQ ID NO: 1604300 - RNA, 19 nt, Artificial Sequence
  Description of Artificial Sequence: Synthetic oligonucleotide
cacuauggagcacaggccu

SEQ ID NO: 1604301 - RNA, 19 nt, Artificial Sequence
  Description of Artificial Sequence: Synthetic oligonucleotide
ucggccaacucugcgcucu

SEQ ID NO: 1604302 - RNA, 19 nt, Artificial Sequence
  Description of Artificial Sequence: Synthetic oligonucleotide
cagaucucaguucccacaa

SEQ ID NO: 1604303 - RNA, 19 nt, Artificial Sequence
  Description of Artificial Sequence: Synthetic oligonucleotide
gacucgccgcucucacgcg

SEQ ID NO: 1604304 - RNA, 19 nt, Artificial Sequence
  Description of Artificial Sequence: Synthetic oligonucleotide
uucuagcucugcuuccauu

SEQ ID NO: 1604305 - RNA, 19 nt, Artificial Sequence
  Description of Artificial Sequence: Synthetic oligonucleotide
cuggaccucuucuccauca

SEQ ID NO: 1604306 - RNA, 19 nt, Artificial Sequence
  Description of Artificial Sequence: Synthetic oligonucleotide
acuauggagcacaggccug

SEQ ID NO: 1604307 - RNA, 19 nt, Artificial Sequence
  Description of Artificial Sequence: Synthetic oligonucleotide
gucuaucuggaccucuucu

SEQ ID NO: 1604308 - RNA, 19 nt, Artificial Sequence
  Description of Artificial Sequence: Synthetic oligonucleotide
ucugcgcucugaugcucug

SEQ ID NO: 1604309 - RNA, 19 nt, Artificial Sequence
  Description of Artificial Sequence: Synthetic oligonucleotide
cagacucgccgcucucacg

SEQ ID NO: 1604310 - RNA, 19 nt, Artificial Sequence
  Description of Artificial Sequence: Synthetic oligonucleotide
cccucacuaaauagagugc

SEQ ID NO: 1604311 - RNA, 19 nt, Artificial Sequence
  Description of Artificial Sequence: Synthetic oligonucleotide
ccucacguucugcagcucg

SEQ ID NO: 1604312 - RNA, 19 nt, Artificial Sequence
  Description of Artificial Sequence: Synthetic oligonucleotide
acugaagcgucagggcuga

SEQ ID NO: 1604313 - RNA, 19 nt, Artificial Sequence
  Description of Artificial Sequence: Synthetic oligonucleotide
cuuugugaagggccaggga

SEQ ID NO: 1604314 - RNA, 19 nt, Artificial Sequence
  Description of Artificial Sequence: Synthetic oligonucleotide
guaguugucucggauggcu

SEQ ID NO: 1604315 - RNA, 19 nt, Artificial Sequence
  Description of Artificial Sequence: Synthetic oligonucleotide
caguuguuugggaucucca

SEQ ID NO: 1604316 - RNA, 19 nt, Artificial Sequence
  Description of Artificial Sequence: Synthetic oligonucleotide
ugcgcacaaccagacucgc

SEQ ID NO: 1604317 - RNA, 19 nt, Artificial Sequence
  Description of Artificial Sequence: Synthetic oligonucleotide
uugcucggauuucucucau

SEQ ID NO: 1604318 - RNA, 19 nt, Artificial Sequence
  Description of Artificial Sequence: Synthetic oligonucleotide
cauuggcacgggucuuggc

SEQ ID NO: 1604319 - RNA, 19 nt, Artificial Sequence
  Description of Artificial Sequence: Synthetic oligonucleotide
ugucucggauggcugcgua

SEQ ID NO: 1604320 - RNA, 19 nt, Artificial Sequence
  Description of Artificial Sequence: Synthetic oligonucleotide
uccuccgcuuugccccggg

SEQ ID NO: 1604321 - RNA, 19 nt, Artificial Sequence
  Description of Artificial Sequence: Synthetic oligonucleotide
uggcacgggucuuggcuga

SEQ ID NO: 1604322 - RNA, 19 nt, Artificial Sequence
  Description of Artificial Sequence: Synthetic oligonucleotide
agcccucuccacuucggaa

SEQ ID NO: 1604323 - RNA, 19 nt, Artificial Sequence
  Description of Artificial Sequence: Synthetic oligonucleotide
acucugcgcucugaugcuc

SEQ ID NO: 1604324 - RNA, 19 nt, Artificial Sequence
  Description of Artificial Sequence: Synthetic oligonucleotide
uccagaugccaggaggcuu

SEQ ID NO: 1604325 - RNA, 19 nt, Artificial Sequence
  Description of Artificial Sequence: Synthetic oligonucleotide
cgugcgcacaaccagacuc

SEQ ID NO: 1604326 - RNA, 19 nt, Artificial Sequence
  Description of Artificial Sequence: Synthetic oligonucleotide
ccucuguaaaagaccuagc

SEQ ID NO: 1604327 - RNA, 19 nt, Artificial Sequence
  Description of Artificial Sequence: Synthetic oligonucleotide
ugccccgggccucauccac

SEQ ID NO: 1604328 - RNA, 19 nt, Artificial Sequence
  Description of Artificial Sequence: Synthetic oligonucleotide
gaacucggcuguggcagug

SEQ ID NO: 1604329 - RNA, 19 nt, Artificial Sequence
  Description of Artificial Sequence: Synthetic oligonucleotide
ucucacgcgccgccccgcc

SEQ ID NO: 1604330 - RNA, 19 nt, Artificial Sequence
  Description of Artificial Sequence: Synthetic oligonucleotide
ucgcaggaucuguucccug

SEQ ID NO: 1604331 - RNA, 19 nt, Artificial Sequence
  Description of Artificial Sequence: Synthetic oligonucleotide
acgcucuuugaagcucuuc

SEQ ID NO: 1604332 - RNA, 19 nt, Artificial Sequence
  Description of Artificial Sequence: Synthetic oligonucleotide
cgaugcacagauaucgguc

SEQ ID NO: 1604333 - RNA, 19 nt, Artificial Sequence
  Description of Artificial Sequence: Synthetic oligonucleotide
gcucugaugcucugaucgc

SEQ ID NO: 1604334 - RNA, 19 nt, Artificial Sequence
  Description of Artificial Sequence: Synthetic oligonucleotide
aacucggcuguggcaguga

SEQ ID NO: 1604335 - RNA, 19 nt, Artificial Sequence
  Description of Artificial Sequence: Synthetic oligonucleotide
gaaugucuaucuggaccuc

SEQ ID NO: 1604336 - RNA, 19 nt, Artificial Sequence
  Description of Artificial Sequence: Synthetic oligonucleotide
gagcgaagccagacuggag

SEQ ID NO: 1604337 - RNA, 19 nt, Artificial Sequence
  Description of Artificial Sequence: Synthetic oligonucleotide
acuugccgacuccuccacu

SEQ ID NO: 1604338 - RNA, 19 nt, Artificial Sequence
  Description of Artificial Sequence: Synthetic oligonucleotide
ugcucggauuucucucauc

SEQ ID NO: 1604339 - RNA, 19 nt, Artificial Sequence
  Description of Artificial Sequence: Synthetic oligonucleotide
cuggccgugcgcacaacca

SEQ ID NO: 1604340 - RNA, 19 nt, Artificial Sequence
  Description of Artificial Sequence: Synthetic oligonucleotide
caagaucaguuucgaggga

SEQ ID NO: 1604341 - RNA, 19 nt, Artificial Sequence
  Description of Artificial Sequence: Synthetic oligonucleotide
gcugcguaguccuccuggc

SEQ ID NO: 1604342 - RNA, 19 nt, Artificial Sequence
  Description of Artificial Sequence: Synthetic oligonucleotide
cagauaucggucccauuua

SEQ ID NO: 1604343 - RNA, 19 nt, Artificial Sequence
  Description of Artificial Sequence: Synthetic oligonucleotide
acacggacagauggcccag

SEQ ID NO: 1604344 - RNA, 19 nt, Artificial Sequence
  Description of Artificial Sequence: Synthetic oligonucleotide
ucugaucgcccagcucaca

SEQ ID NO: 1604345 - RNA, 19 nt, Artificial Sequence
  Description of Artificial Sequence: Synthetic oligonucleotide
agcuccugccaaaguuaac

SEQ ID NO: 1604346 - RNA, 19 nt, Artificial Sequence
  Description of Artificial Sequence: Synthetic oligonucleotide
auagagugcugaggagaga

SEQ ID NO: 1604347 - RNA, 19 nt, Artificial Sequence
  Description of Artificial Sequence: Synthetic oligonucleotide
ggccuugacucgcaggauc

SEQ ID NO: 1604348 - RNA, 19 nt, Artificial Sequence
  Description of Artificial Sequence: Synthetic oligonucleotide
cugaugcucugaucgccca

SEQ ID NO: 1604349 - RNA, 19 nt, Artificial Sequence
  Description of Artificial Sequence: Synthetic oligonucleotide
gccaccgaugcacagauau

SEQ ID NO: 1604350 - RNA, 19 nt, Artificial Sequence
  Description of Artificial Sequence: Synthetic oligonucleotide
ccagaaugucuaucuggac

SEQ ID NO: 1604351 - RNA, 19 nt, Artificial Sequence
  Description of Artificial Sequence: Synthetic oligonucleotide
aggugauggcacacggaca

SEQ ID NO: 1604352 - RNA, 19 nt, Artificial Sequence
  Description of Artificial Sequence: Synthetic oligonucleotide
cucggauggcugcguaguc

SEQ ID NO: 1604353 - RNA, 19 nt, Artificial Sequence
  Description of Artificial Sequence: Synthetic oligonucleotide
cccauuuaaaggagugaca

SEQ ID NO: 1604354 - RNA, 19 nt, Artificial Sequence
  Description of Artificial Sequence: Synthetic oligonucleotide
gcacaaccagacucgccgc

SEQ ID NO: 1604355 - RNA, 19 nt, Artificial Sequence
  Description of Artificial Sequence: Synthetic oligonucleotide
aaccucuguaaaagaccua

SEQ ID NO: 1604356 - RNA, 19 nt, Artificial Sequence
  Description of Artificial Sequence: Synthetic oligonucleotide
gggcagauucucaaagcuc

SEQ ID NO: 1604357 - RNA, 19 nt, Artificial Sequence
  Description of Artificial Sequence: Synthetic oligonucleotide
uggcugcguaguccuccug

SEQ ID NO: 1604358 - RNA, 19 nt, Artificial Sequence
  Description of Artificial Sequence: Synthetic oligonucleotide
cccacgaccaacaguggga

SEQ ID NO: 1604359 - RNA, 19 nt, Artificial Sequence
  Description of Artificial Sequence: Synthetic oligonucleotide
cacauacugcacgccccac

SEQ ID NO: 1604360 - RNA, 19 nt, Artificial Sequence
  Description of Artificial Sequence: Synthetic oligonucleotide
gcaacgcucuuugaagcuc

SEQ ID NO: 1604361 - RNA, 19 nt, Artificial Sequence
  Description of Artificial Sequence: Synthetic oligonucleotide
accgccgcucuggccgugc

SEQ ID NO: 1604362 - RNA, 19 nt, Artificial Sequence
  Description of Artificial Sequence: Synthetic oligonucleotide
ccaacucaguuguuuggga

SEQ ID NO: 1604363 - RNA, 19 nt, Artificial Sequence
  Description of Artificial Sequence: Synthetic oligonucleotide
gcucucacgcgccgccccg

SEQ ID NO: 1604364 - RNA, 19 nt, Artificial Sequence
  Description of Artificial Sequence: Synthetic oligonucleotide
ccuggcuggcauuuaaaua

SEQ ID NO: 1604365 - RNA, 19 nt, Artificial Sequence
  Description of Artificial Sequence: Synthetic oligonucleotide
caccuggcuggcauuuaaa

SEQ ID NO: 1604366 - RNA, 19 nt, Artificial Sequence
  Description of Artificial Sequence: Synthetic oligonucleotide
acucaccuuucuagcucug

SEQ ID NO: 1604367 - RNA, 19 nt, Artificial Sequence
  Description of Artificial Sequence: Synthetic oligonucleotide
caaggaccaccuucuuucu

SEQ ID NO: 1604368 - RNA, 19 nt, Artificial Sequence
  Description of Artificial Sequence: Synthetic oligonucleotide
gcucuugcccuuguuggca

SEQ ID NO: 1604369 - RNA, 19 nt, Artificial Sequence
  Description of Artificial Sequence: Synthetic oligonucleotide
gggaacccagucccaccgc

SEQ ID NO: 1604370 - RNA, 19 nt, Artificial Sequence
  Description of Artificial Sequence: Synthetic oligonucleotide
caagcccacuauggagcac

SEQ ID NO: 1604371 - RNA, 19 nt, Artificial Sequence
  Description of Artificial Sequence: Synthetic oligonucleotide
aacgcucuuugaagcucuu

SEQ ID NO: 1604372 - RNA, 19 nt, Artificial Sequence
  Description of Artificial Sequence: Synthetic oligonucleotide
ccucacuaaauagagugcu

SEQ ID NO: 1604373 - RNA, 19 nt, Artificial Sequence
  Description of Artificial Sequence: Synthetic oligonucleotide
ccagacucgccgcucucac

SEQ ID NO: 1604374 - RNA, 19 nt, Artificial Sequence
  Description of Artificial Sequence: Synthetic oligonucleotide
ggcuggcauuuaaauaaga

SEQ ID NO: 1604375 - RNA, 19 nt, Artificial Sequence
  Description of Artificial Sequence: Synthetic oligonucleotide
ccacaaccucuguaaaaga

SEQ ID NO: 1604376 - RNA, 19 nt, Artificial Sequence
  Description of Artificial Sequence: Synthetic oligonucleotide
ccaccgaugcacagauauc

SEQ ID NO: 1604377 - RNA, 19 nt, Artificial Sequence
  Description of Artificial Sequence: Synthetic oligonucleotide
cucaguuguuugggaucuc

SEQ ID NO: 1604378 - RNA, 19 nt, Artificial Sequence
  Description of Artificial Sequence: Synthetic oligonucleotide
cucugcgcucugaugcucu

SEQ ID NO: 1604379 - RNA, 19 nt, Artificial Sequence
  Description of Artificial Sequence: Synthetic oligonucleotide
cucggccaacucugcgcuc

SEQ ID NO: 1604380 - RNA, 19 nt, Artificial Sequence
  Description of Artificial Sequence: Synthetic oligonucleotide
cacaaccagacucgccgcu

SEQ ID NO: 1604381 - RNA, 19 nt, Artificial Sequence
  Description of Artificial Sequence: Synthetic oligonucleotide
cucucacgcgccgccccgc

SEQ ID NO: 1604382 - RNA, 19 nt, Artificial Sequence
  Description of Artificial Sequence: Synthetic oligonucleotide
caggucccuagagcuggug

SEQ ID NO: 1604383 - RNA, 19 nt, Artificial Sequence
  Description of Artificial Sequence: Synthetic oligonucleotide
gcaccuggcuggcauuuaa

SEQ ID NO: 1604384 - RNA, 19 nt, Artificial Sequence
  Description of Artificial Sequence: Synthetic oligonucleotide
cccacuccuccgcuuugcc

SEQ ID NO: 1604385 - RNA, 19 nt, Artificial Sequence
  Description of Artificial Sequence: Synthetic oligonucleotide
ggccucacguucugcagcu

SEQ ID NO: 1604386 - RNA, 19 nt, Artificial Sequence
  Description of Artificial Sequence: Synthetic oligonucleotide
ccacauacugcacgcccca

SEQ ID NO: 1604387 - RNA, 19 nt, Artificial Sequence
  Description of Artificial Sequence: Synthetic oligonucleotide
gccgugcgcacaaccagac

SEQ ID NO: 1604388 - RNA, 19 nt, Artificial Sequence
  Description of Artificial Sequence: Synthetic oligonucleotide
ggccaccucuggccucacg

SEQ ID NO: 1604389 - RNA, 19 nt, Artificial Sequence
  Description of Artificial Sequence: Synthetic oligonucleotide
ggccgugcgcacaaccaga

SEQ ID NO: 1604390 - RNA, 19 nt, Artificial Sequence
  Description of Artificial Sequence: Synthetic oligonucleotide
cuucuccaucaaggaccac

SEQ ID NO: 1604391 - RNA, 19 nt, Artificial Sequence
  Description of Artificial Sequence: Synthetic oligonucleotide
gucacgauucagggagggu

SEQ ID NO: 1604392 - RNA, 19 nt, Artificial Sequence
  Description of Artificial Sequence: Synthetic oligonucleotide
ccgaugcacagauaucggu

SEQ ID NO: 1604393 - RNA, 19 nt, Artificial Sequence
  Description of Artificial Sequence: Synthetic oligonucleotide
gcugguggcugucacgauu

SEQ ID NO: 1604394 - RNA, 19 nt, Artificial Sequence
  Description of Artificial Sequence: Synthetic oligonucleotide
cuguguccagaaugucuau

SEQ ID NO: 1604395 - RNA, 19 nt, Artificial Sequence
  Description of Artificial Sequence: Synthetic oligonucleotide
cagucccaccgccgcucug

SEQ ID NO: 1604396 - RNA, 19 nt, Artificial Sequence
  Description of Artificial Sequence: Synthetic oligonucleotide
ccacaggcaccugccuccg

SEQ ID NO: 1604397 - RNA, 19 nt, Artificial Sequence
  Description of Artificial Sequence: Synthetic oligonucleotide
cugcgcucugaugcucuga

SEQ ID NO: 1604398 - RNA, 19 nt, Artificial Sequence
  Description of Artificial Sequence: Synthetic oligonucleotide
gccgacuccuccacugcca

SEQ ID NO: 1604399 - RNA, 19 nt, Artificial Sequence
  Description of Artificial Sequence: Synthetic oligonucleotide
gcgcacaaccagacucgcc

SEQ ID NO: 1604400 - RNA, 19 nt, Artificial Sequence
  Description of Artificial Sequence: Synthetic oligonucleotide
aucgcccagcucacagcaa

SEQ ID NO: 1604401 - RNA, 19 nt, Artificial Sequence
  Description of Artificial Sequence: Synthetic oligonucleotide
cuccagaugccaggaggcu

SEQ ID NO: 1604402 - RNA, 19 nt, Artificial Sequence
  Description of Artificial Sequence: Synthetic oligonucleotide
gcucuggccgugcgcacaa

SEQ ID NO: 1604403 - RNA, 19 nt, Artificial Sequence
  Description of Artificial Sequence: Synthetic oligonucleotide
acgccccacuccuccgcuu

SEQ ID NO: 1604404 - RNA, 19 nt, Artificial Sequence
  Description of Artificial Sequence: Synthetic oligonucleotide
gcgcucugaugcucugauc

SEQ ID NO: 1604405 - RNA, 19 nt, Artificial Sequence
  Description of Artificial Sequence: Synthetic oligonucleotide
gcagauucucaaagcuccu

SEQ ID NO: 1604406 - RNA, 19 nt, Artificial Sequence
  Description of Artificial Sequence: Synthetic oligonucleotide
ccagaugccaggaggcuuu

SEQ ID NO: 1604407 - RNA, 19 nt, Artificial Sequence
  Description of Artificial Sequence: Synthetic oligonucleotide
cucuggccgugcgcacaac

SEQ ID NO: 1604408 - RNA, 19 nt, Artificial Sequence
  Description of Artificial Sequence: Synthetic oligonucleotide
gggagcuugggaacccagu

SEQ ID NO: 1604409 - RNA, 19 nt, Artificial Sequence
  Description of Artificial Sequence: Synthetic oligonucleotide
ccuccgcuuugccccgggc

SEQ ID NO: 1604410 - RNA, 19 nt, Artificial Sequence
  Description of Artificial Sequence: Synthetic oligonucleotide
cugaagcgucagggcugac

SEQ ID NO: 1604411 - RNA, 19 nt, Artificial Sequence
  Description of Artificial Sequence: Synthetic oligonucleotide
cgcucucacgcgccgcccc

SEQ ID NO: 1604412 - RNA, 19 nt, Artificial Sequence
  Description of Artificial Sequence: Synthetic oligonucleotide
cagcuuugguggguucaua

SEQ ID NO: 1604413 - RNA, 19 nt, Artificial Sequence
  Description of Artificial Sequence: Synthetic oligonucleotide
ccgacuccuccacugccaa

SEQ ID NO: 1604414 - RNA, 19 nt, Artificial Sequence
  Description of Artificial Sequence: Synthetic oligonucleotide
cggauggcugcguaguccu

SEQ ID NO: 1604415 - RNA, 19 nt, Artificial Sequence
  Description of Artificial Sequence: Synthetic oligonucleotide
cacgccccacuccuccgcu

SEQ ID NO: 1604416 - RNA, 19 nt, Artificial Sequence
  Description of Artificial Sequence: Synthetic oligonucleotide
cgacuccuccacugccaac

SEQ ID NO: 1604417 - RNA, 19 nt, Artificial Sequence
  Description of Artificial Sequence: Synthetic oligonucleotide
cacgaccaacagugggauu

SEQ ID NO: 1604418 - RNA, 19 nt, Artificial Sequence
  Description of Artificial Sequence: Synthetic oligonucleotide
ccgccgcucuggccgugcg

SEQ ID NO: 1604419 - RNA, 19 nt, Artificial Sequence
  Description of Artificial Sequence: Synthetic oligonucleotide
agccaccgaugcacagaua

SEQ ID NO: 1604420 - RNA, 19 nt, Artificial Sequence
  Description of Artificial Sequence: Synthetic oligonucleotide
cagggcugacuugccgacu

SEQ ID NO: 1604421 - RNA, 19 nt, Artificial Sequence
  Description of Artificial Sequence: Synthetic oligonucleotide
cccuggcccaagugaaacu

SEQ ID NO: 1604422 - RNA, 19 nt, Artificial Sequence
  Description of Artificial Sequence: Synthetic oligonucleotide
ccgcucuggccgugcgcac

SEQ ID NO: 1604423 - RNA, 19 nt, Artificial Sequence
  Description of Artificial Sequence: Synthetic oligonucleotide
ccgcucucacgcgccgccc

SEQ ID NO: 1604424 - RNA, 19 nt, Artificial Sequence
  Description of Artificial Sequence: Synthetic oligonucleotide
cgauucagggaggguggga

SEQ ID NO: 1604425 - RNA, 19 nt, Artificial Sequence
  Description of Artificial Sequence: Synthetic oligonucleotide
cggucccauuuaaaggagu

SEQ ID NO: 1604426 - RNA, 19 nt, Artificial Sequence
  Description of Artificial Sequence: Synthetic oligonucleotide
cagaugccaggaggcuuuu

SEQ ID NO: 1604427 - RNA, 19 nt, Artificial Sequence
  Description of Artificial Sequence: Synthetic oligonucleotide
ccgugcgcacaaccagacu

SEQ ID NO: 1604428 - RNA, 19 nt, Artificial Sequence
  Description of Artificial Sequence: Synthetic oligonucleotide
cgccgcucucacgcgccgc

SEQ ID NO: 1604429 - RNA, 19 nt, Artificial Sequence
  Description of Artificial Sequence: Synthetic oligonucleotide
cacgcgccgccccgcccgu

SEQ ID NO: 1604430 - RNA, 19 nt, Artificial Sequence
  Description of Artificial Sequence: Synthetic oligonucleotide
ccacauuggcacgggucuu

SEQ ID NO: 1604431 - RNA, 19 nt, Artificial Sequence
  Description of Artificial Sequence: Synthetic oligonucleotide
aaagcauugacacuguugg

SEQ ID NO: 1604432 - RNA, 19 nt, Artificial Sequence
  Description of Artificial Sequence: Synthetic oligonucleotide
agauaauuagcauuuaacc

SEQ ID NO: 1604433 - RNA, 19 nt, Artificial Sequence
  Description of Artificial Sequence: Synthetic oligonucleotide
aauaauaauaauaauaagu

SEQ ID NO: 1604434 - RNA, 19 nt, Artificial Sequence
  Description of Artificial Sequence: Synthetic oligonucleotide
ucuacuauuauuaacuccc

SEQ ID NO: 1604435 - RNA, 19 nt, Artificial Sequence
  Description of Artificial Sequence: Synthetic oligonucleotide
uuagguaagggacugaggg

SEQ ID NO: 1604436 - RNA, 19 nt, Artificial Sequence
  Description of Artificial Sequence: Synthetic oligonucleotide
aauaauaauaauaauaaua

SEQ ID NO: 1604437 - RNA, 19 nt, Artificial Sequence
  Description of Artificial Sequence: Synthetic oligonucleotide
aaaauucaaccuuuacuac

SEQ ID NO: 1604438 - RNA, 19 nt, Artificial Sequence
  Description of Artificial Sequence: Synthetic oligonucleotide
cuagaaauugauaauuucc

SEQ ID NO: 1604439 - RNA, 19 nt, Artificial Sequence
  Description of Artificial Sequence: Synthetic oligonucleotide
uuagcauuuaaccuuuuag

SEQ ID NO: 1604440 - RNA, 19 nt, Artificial Sequence
  Description of Artificial Sequence: Synthetic oligonucleotide
aaaauaaauuccucacagg

SEQ ID NO: 1604441 - RNA, 19 nt, Artificial Sequence
  Description of Artificial Sequence: Synthetic oligonucleotide
aauaaguuaacaucuuggu

SEQ ID NO: 1604442 - RNA, 19 nt, Artificial Sequence
  Description of Artificial Sequence: Synthetic oligonucleotide
gaaauaauaauaauaauaa

SEQ ID NO: 1604443 - RNA, 19 nt, Artificial Sequence
  Description of Artificial Sequence: Synthetic oligonucleotide
gaaauugauaauuuccuug

SEQ ID NO: 1604444 - RNA, 19 nt, Artificial Sequence
  Description of Artificial Sequence: Synthetic oligonucleotide
ugaguugauccuaauauag

SEQ ID NO: 1604445 - RNA, 19 nt, Artificial Sequence
  Description of Artificial Sequence: Synthetic oligonucleotide
aaacaguucagucugauuu

SEQ ID NO: 1604446 - RNA, 19 nt, Artificial Sequence
  Description of Artificial Sequence: Synthetic oligonucleotide
uguauuaacacacucuuau

SEQ ID NO: 1604447 - RNA, 19 nt, Artificial Sequence
  Description of Artificial Sequence: Synthetic oligonucleotide
ucugauuucaguuccaaga

SEQ ID NO: 1604448 - RNA, 19 nt, Artificial Sequence
  Description of Artificial Sequence: Synthetic oligonucleotide
aaaccuagaggguuaaaag

SEQ ID NO: 1604449 - RNA, 19 nt, Artificial Sequence
  Description of Artificial Sequence: Synthetic oligonucleotide
auaauaauaauaauaauaa

SEQ ID NO: 1604450 - RNA, 19 nt, Artificial Sequence
  Description of Artificial Sequence: Synthetic oligonucleotide
uuugguauauuacaguggu

SEQ ID NO: 1604451 - RNA, 19 nt, Artificial Sequence
  Description of Artificial Sequence: Synthetic oligonucleotide
uaauaauaauaauaauaag

SEQ ID NO: 1604452 - RNA, 19 nt, Artificial Sequence
  Description of Artificial Sequence: Synthetic oligonucleotide
auuuaagaguuucuuugcc

SEQ ID NO: 1604453 - RNA, 19 nt, Artificial Sequence
  Description of Artificial Sequence: Synthetic oligonucleotide
auaaauuccucacaggugu

SEQ ID NO: 1604454 - RNA, 19 nt, Artificial Sequence
  Description of Artificial Sequence: Synthetic oligonucleotide
aauagucauguguauuaac

SEQ ID NO: 1604455 - RNA, 19 nt, Artificial Sequence
  Description of Artificial Sequence: Synthetic oligonucleotide
uccuaggaaacaaugaggc

SEQ ID NO: 1604456 - RNA, 19 nt, Artificial Sequence
  Description of Artificial Sequence: Synthetic oligonucleotide
acaggugugacucagauaa

SEQ ID NO: 1604457 - RNA, 19 nt, Artificial Sequence
  Description of Artificial Sequence: Synthetic oligonucleotide
uaacacacucuuauuaagg

SEQ ID NO: 1604458 - RNA, 19 nt, Artificial Sequence
  Description of Artificial Sequence: Synthetic oligonucleotide
uuuugguauauuacagugg

SEQ ID NO: 1604459 - RNA, 19 nt, Artificial Sequence
  Description of Artificial Sequence: Synthetic oligonucleotide
ugauggaaagcguuggugg

SEQ ID NO: 1604460 - RNA, 19 nt, Artificial Sequence
  Description of Artificial Sequence: Synthetic oligonucleotide
aacucauucugacaagguc

SEQ ID NO: 1604461 - RNA, 19 nt, Artificial Sequence
  Description of Artificial Sequence: Synthetic oligonucleotide
uagaaauugauaauuuccu

SEQ ID NO: 1604462 - RNA, 19 nt, Artificial Sequence
  Description of Artificial Sequence: Synthetic oligonucleotide
ucauguuuuccuaauuuag

SEQ ID NO: 1604463 - RNA, 19 nt, Artificial Sequence
  Description of Artificial Sequence: Synthetic oligonucleotide
uaaacuggcagaugaaucc

SEQ ID NO: 1604464 - RNA, 19 nt, Artificial Sequence
  Description of Artificial Sequence: Synthetic oligonucleotide
aaaauagucauguguauua

SEQ ID NO: 1604465 - RNA, 19 nt, Artificial Sequence
  Description of Artificial Sequence: Synthetic oligonucleotide
uugauccuaauauagcuag

SEQ ID NO: 1604466 - RNA, 19 nt, Artificial Sequence
  Description of Artificial Sequence: Synthetic oligonucleotide
aaauaauaauaauaauaau

SEQ ID NO: 1604467 - RNA, 19 nt, Artificial Sequence
  Description of Artificial Sequence: Synthetic oligonucleotide
acuagaaauugauaauuuc

SEQ ID NO: 1604468 - RNA, 19 nt, Artificial Sequence
  Description of Artificial Sequence: Synthetic oligonucleotide
aaauaucuaagcaccaguc

SEQ ID NO: 1604469 - RNA, 19 nt, Artificial Sequence
  Description of Artificial Sequence: Synthetic oligonucleotide
gacucagauaaauacacug

SEQ ID NO: 1604470 - RNA, 19 nt, Artificial Sequence
  Description of Artificial Sequence: Synthetic oligonucleotide
uauagcuagaaauaucuaa

SEQ ID NO: 1604471 - RNA, 19 nt, Artificial Sequence
  Description of Artificial Sequence: Synthetic oligonucleotide
uauuaacacacucuuauua

SEQ ID NO: 1604472 - RNA, 19 nt, Artificial Sequence
  Description of Artificial Sequence: Synthetic oligonucleotide
aagaguuucuuugccauac

SEQ ID NO: 1604473 - RNA, 19 nt, Artificial Sequence
  Description of Artificial Sequence: Synthetic oligonucleotide
aaccuuuacuacuuauuuc

SEQ ID NO: 1604474 - RNA, 19 nt, Artificial Sequence
  Description of Artificial Sequence: Synthetic oligonucleotide
uauuuauauucaaaagcca

SEQ ID NO: 1604475 - RNA, 19 nt, Artificial Sequence
  Description of Artificial Sequence: Synthetic oligonucleotide
agcauuuaaccuuuuagug

SEQ ID NO: 1604476 - RNA, 19 nt, Artificial Sequence
  Description of Artificial Sequence: Synthetic oligonucleotide
ugucacggcaaccaaacag

SEQ ID NO: 1604477 - RNA, 19 nt, Artificial Sequence
  Description of Artificial Sequence: Synthetic oligonucleotide
acucauucugacaaggucc

SEQ ID NO: 1604478 - RNA, 19 nt, Artificial Sequence
  Description of Artificial Sequence: Synthetic oligonucleotide
uuuagugaacuagaaauug

SEQ ID NO: 1604479 - RNA, 19 nt, Artificial Sequence
  Description of Artificial Sequence: Synthetic oligonucleotide
aaugucacggcaaccaaac

SEQ ID NO: 1604480 - RNA, 19 nt, Artificial Sequence
  Description of Artificial Sequence: Synthetic oligonucleotide
guuuggaaaugacauaucc

SEQ ID NO: 1604481 - RNA, 19 nt, Artificial Sequence
  Description of Artificial Sequence: Synthetic oligonucleotide
uucucacucacacucgacg

SEQ ID NO: 1604482 - RNA, 19 nt, Artificial Sequence
  Description of Artificial Sequence: Synthetic oligonucleotide
cauguuuuccuaauuuagg

SEQ ID NO: 1604483 - RNA, 19 nt, Artificial Sequence
  Description of Artificial Sequence: Synthetic oligonucleotide
aaaguacuguuuugugugg

SEQ ID NO: 1604484 - RNA, 19 nt, Artificial Sequence
  Description of Artificial Sequence: Synthetic oligonucleotide
gaauucaccauucuccgug

SEQ ID NO: 1604485 - RNA, 19 nt, Artificial Sequence
  Description of Artificial Sequence: Synthetic oligonucleotide
uggaaaauaaauuccucac

SEQ ID NO: 1604486 - RNA, 19 nt, Artificial Sequence
  Description of Artificial Sequence: Synthetic oligonucleotide
ugaucaguaguauaaagua

SEQ ID NO: 1604487 - RNA, 19 nt, Artificial Sequence
  Description of Artificial Sequence: Synthetic oligonucleotide
aguugauccuaauauagcu

SEQ ID NO: 1604488 - RNA, 19 nt, Artificial Sequence
  Description of Artificial Sequence: Synthetic oligonucleotide
aucuuuguaaaauagucau

SEQ ID NO: 1604489 - RNA, 19 nt, Artificial Sequence
  Description of Artificial Sequence: Synthetic oligonucleotide
ugugacucagauaaauaca

SEQ ID NO: 1604490 - RNA, 19 nt, Artificial Sequence
  Description of Artificial Sequence: Synthetic oligonucleotide
uauaaaguacuguuuugug

SEQ ID NO: 1604491 - RNA, 19 nt, Artificial Sequence
  Description of Artificial Sequence: Synthetic oligonucleotide
cagucauugagauaauuag

SEQ ID NO: 1604492 - RNA, 19 nt, Artificial Sequence
  Description of Artificial Sequence: Synthetic oligonucleotide
accuacugaacugacaggc

SEQ ID NO: 1604493 - RNA, 19 nt, Artificial Sequence
  Description of Artificial Sequence: Synthetic oligonucleotide
ggaaaugacauauccaugc

SEQ ID NO: 1604494 - RNA, 19 nt, Artificial Sequence
  Description of Artificial Sequence: Synthetic oligonucleotide
uuuaagaguuucuuugcca

SEQ ID NO: 1604495 - RNA, 19 nt, Artificial Sequence
  Description of Artificial Sequence: Synthetic oligonucleotide
caaaauucaaccuuuacua

SEQ ID NO: 1604496 - RNA, 19 nt, Artificial Sequence
  Description of Artificial Sequence: Synthetic oligonucleotide
cuaccuacugaacugacag

SEQ ID NO: 1604497 - RNA, 19 nt, Artificial Sequence
  Description of Artificial Sequence: Synthetic oligonucleotide
gugguauuucuguacaugg

SEQ ID NO: 1604498 - RNA, 19 nt, Artificial Sequence
  Description of Artificial Sequence: Synthetic oligonucleotide
gugaacuagaaauugauaa

SEQ ID NO: 1604499 - RNA, 19 nt, Artificial Sequence
  Description of Artificial Sequence: Synthetic oligonucleotide
uccuauccaauacagaguc

SEQ ID NO: 1604500 - RNA, 19 nt, Artificial Sequence
  Description of Artificial Sequence: Synthetic oligonucleotide
augaggcacacacacacac

SEQ ID NO: 1604501 - RNA, 19 nt, Artificial Sequence
  Description of Artificial Sequence: Synthetic oligonucleotide
auuaacucccuuuugguau

SEQ ID NO: 1604502 - RNA, 19 nt, Artificial Sequence
  Description of Artificial Sequence: Synthetic oligonucleotide
cuaggaaacaaugaggcac

SEQ ID NO: 1604503 - RNA, 19 nt, Artificial Sequence
  Description of Artificial Sequence: Synthetic oligonucleotide
agaacuaaguucccuaugu

SEQ ID NO: 1604504 - RNA, 19 nt, Artificial Sequence
  Description of Artificial Sequence: Synthetic oligonucleotide
uucuccgugauggaaagcg

SEQ ID NO: 1604505 - RNA, 19 nt, Artificial Sequence
  Description of Artificial Sequence: Synthetic oligonucleotide
aaacuggcagaugaauccc

SEQ ID NO: 1604506 - RNA, 19 nt, Artificial Sequence
  Description of Artificial Sequence: Synthetic oligonucleotide
uuagugaacuagaaauuga

SEQ ID NO: 1604507 - RNA, 19 nt, Artificial Sequence
  Description of Artificial Sequence: Synthetic oligonucleotide
uagcauuuaaccuuuuagu

SEQ ID NO: 1604508 - RNA, 19 nt, Artificial Sequence
  Description of Artificial Sequence: Synthetic oligonucleotide
uuaaacuggcagaugaauc

SEQ ID NO: 1604509 - RNA, 19 nt, Artificial Sequence
  Description of Artificial Sequence: Synthetic oligonucleotide
agucauugagauaauuagc

SEQ ID NO: 1604510 - RNA, 19 nt, Artificial Sequence
  Description of Artificial Sequence: Synthetic oligonucleotide
aaugacauauccaugcuau

SEQ ID NO: 1604511 - RNA, 19 nt, Artificial Sequence
  Description of Artificial Sequence: Synthetic oligonucleotide
ucagauaaauacacugcug

SEQ ID NO: 1604512 - RNA, 19 nt, Artificial Sequence
  Description of Artificial Sequence: Synthetic oligonucleotide
uccuaauuuagguaaggga

SEQ ID NO: 1604513 - RNA, 19 nt, Artificial Sequence
  Description of Artificial Sequence: Synthetic oligonucleotide
uggucuuugcuuuaugccc

SEQ ID NO: 1604514 - RNA, 19 nt, Artificial Sequence
  Description of Artificial Sequence: Synthetic oligonucleotide
cauuuaagaguuucuuugc

SEQ ID NO: 1604515 - RNA, 19 nt, Artificial Sequence
  Description of Artificial Sequence: Synthetic oligonucleotide
gauggaaagcguugguggg

SEQ ID NO: 1604516 - RNA, 19 nt, Artificial Sequence
  Description of Artificial Sequence: Synthetic oligonucleotide
acggcaaccaaacaguuca

SEQ ID NO: 1604517 - RNA, 19 nt, Artificial Sequence
  Description of Artificial Sequence: Synthetic oligonucleotide
uaauaauaauaauaauaau

SEQ ID NO: 1604518 - RNA, 19 nt, Artificial Sequence
  Description of Artificial Sequence: Synthetic oligonucleotide
ccuaauuuagguaagggac

SEQ ID NO: 1604519 - RNA, 19 nt, Artificial Sequence
  Description of Artificial Sequence: Synthetic oligonucleotide
uaagcaccagucaaaauuc

SEQ ID NO: 1604520 - RNA, 19 nt, Artificial Sequence
  Description of Artificial Sequence: Synthetic oligonucleotide
uuuagguaagggacugagg

SEQ ID NO: 1604521 - RNA, 19 nt, Artificial Sequence
  Description of Artificial Sequence: Synthetic oligonucleotide
uuugaagcaacauucugua

SEQ ID NO: 1604522 - RNA, 19 nt, Artificial Sequence
  Description of Artificial Sequence: Synthetic oligonucleotide
uuuaugcccugaaagacaa

SEQ ID NO: 1604523 - RNA, 19 nt, Artificial Sequence
  Description of Artificial Sequence: Synthetic oligonucleotide
ugguugaucaguaguauaa

SEQ ID NO: 1604524 - RNA, 19 nt, Artificial Sequence
  Description of Artificial Sequence: Synthetic oligonucleotide
uucuuugccauacugcuau

SEQ ID NO: 1604525 - RNA, 19 nt, Artificial Sequence
  Description of Artificial Sequence: Synthetic oligonucleotide
uuauuaacucccuuuuggu

SEQ ID NO: 1604526 - RNA, 19 nt, Artificial Sequence
  Description of Artificial Sequence: Synthetic oligonucleotide
auguuuuccuaauuuaggu

SEQ ID NO: 1604527 - RNA, 19 nt, Artificial Sequence
  Description of Artificial Sequence: Synthetic oligonucleotide
accccuaaaacacagcugu

SEQ ID NO: 1604528 - RNA, 19 nt, Artificial Sequence
  Description of Artificial Sequence: Synthetic oligonucleotide
guugaucaguaguauaaag

SEQ ID NO: 1604529 - RNA, 19 nt, Artificial Sequence
  Description of Artificial Sequence: Synthetic oligonucleotide
uuuuguguggaucuuggua

SEQ ID NO: 1604530 - RNA, 19 nt, Artificial Sequence
  Description of Artificial Sequence: Synthetic oligonucleotide
ugguauauuacagugguau

SEQ ID NO: 1604531 - RNA, 19 nt, Artificial Sequence
  Description of Artificial Sequence: Synthetic oligonucleotide
ugagauaauuagcauuuaa

SEQ ID NO: 1604532 - RNA, 19 nt, Artificial Sequence
  Description of Artificial Sequence: Synthetic oligonucleotide
uguuggcugauccagggac

SEQ ID NO: 1604533 - RNA, 19 nt, Artificial Sequence
  Description of Artificial Sequence: Synthetic oligonucleotide
ugaacuagaaauugauaau

SEQ ID NO: 1604534 - RNA, 19 nt, Artificial Sequence
  Description of Artificial Sequence: Synthetic oligonucleotide
ugcagugcuuucaacaaga

SEQ ID NO: 1604535 - RNA, 19 nt, Artificial Sequence
  Description of Artificial Sequence: Synthetic oligonucleotide
agcuagaaauaucuaagca

SEQ ID NO: 1604536 - RNA, 19 nt, Artificial Sequence
  Description of Artificial Sequence: Synthetic oligonucleotide
uauuucagcuuuucugcag

SEQ ID NO: 1604537 - RNA, 19 nt, Artificial Sequence
  Description of Artificial Sequence: Synthetic oligonucleotide
agcauugacacuguugguc

SEQ ID NO: 1604538 - RNA, 19 nt, Artificial Sequence
  Description of Artificial Sequence: Synthetic oligonucleotide
aaauacacugcuguuugcu

SEQ ID NO: 1604539 - RNA, 19 nt, Artificial Sequence
  Description of Artificial Sequence: Synthetic oligonucleotide
uagcccacgccuuuaaucc

SEQ ID NO: 1604540 - RNA, 19 nt, Artificial Sequence
  Description of Artificial Sequence: Synthetic oligonucleotide
uccaagacuuccuaggaaa

SEQ ID NO: 1604541 - RNA, 19 nt, Artificial Sequence
  Description of Artificial Sequence: Synthetic oligonucleotide
uggaucuugguauuucaug

SEQ ID NO: 1604542 - RNA, 19 nt, Artificial Sequence
  Description of Artificial Sequence: Synthetic oligonucleotide
gcuagaaauaucuaagcac

SEQ ID NO: 1604543 - RNA, 19 nt, Artificial Sequence
  Description of Artificial Sequence: Synthetic oligonucleotide
aggguuaaaaggcugggga

SEQ ID NO: 1604544 - RNA, 19 nt, Artificial Sequence
  Description of Artificial Sequence: Synthetic oligonucleotide
uauauuacagugguauuuc

SEQ ID NO: 1604545 - RNA, 19 nt, Artificial Sequence
  Description of Artificial Sequence: Synthetic oligonucleotide
uaggaaacaaugaggcaca

SEQ ID NO: 1604546 - RNA, 19 nt, Artificial Sequence
  Description of Artificial Sequence: Synthetic oligonucleotide
aacaucuugguugaucagu

SEQ ID NO: 1604547 - RNA, 19 nt, Artificial Sequence
  Description of Artificial Sequence: Synthetic oligonucleotide
aucaguaguauaaaguacu

SEQ ID NO: 1604548 - RNA, 19 nt, Artificial Sequence
  Description of Artificial Sequence: Synthetic oligonucleotide
gucauugagauaauuagca

SEQ ID NO: 1604549 - RNA, 19 nt, Artificial Sequence
  Description of Artificial Sequence: Synthetic oligonucleotide
uagugaacuagaaauugau

SEQ ID NO: 1604550 - RNA, 19 nt, Artificial Sequence
  Description of Artificial Sequence: Synthetic oligonucleotide
guuggucuuugcuuuaugc

SEQ ID NO: 1604551 - RNA, 19 nt, Artificial Sequence
  Description of Artificial Sequence: Synthetic oligonucleotide
cagucuguauucacaaagg

SEQ ID NO: 1604552 - RNA, 19 nt, Artificial Sequence
  Description of Artificial Sequence: Synthetic oligonucleotide
uauauucaaaagccacaca

SEQ ID NO: 1604553 - RNA, 19 nt, Artificial Sequence
  Description of Artificial Sequence: Synthetic oligonucleotide
ucuugguugaucaguagua

SEQ ID NO: 1604554 - RNA, 19 nt, Artificial Sequence
  Description of Artificial Sequence: Synthetic oligonucleotide
cacacacacacacugguag

SEQ ID NO: 1604555 - RNA, 19 nt, Artificial Sequence
  Description of Artificial Sequence: Synthetic oligonucleotide
cauacugcuauuugaagca

SEQ ID NO: 1604556 - RNA, 19 nt, Artificial Sequence
  Description of Artificial Sequence: Synthetic oligonucleotide
uuuaaccuuuuagugaacu

SEQ ID NO: 1604557 - RNA, 19 nt, Artificial Sequence
  Description of Artificial Sequence: Synthetic oligonucleotide
acacacacacacugguagc

SEQ ID NO: 1604558 - RNA, 19 nt, Artificial Sequence
  Description of Artificial Sequence: Synthetic oligonucleotide
cauuuaaccuuuuagugaa

SEQ ID NO: 1604559 - RNA, 19 nt, Artificial Sequence
  Description of Artificial Sequence: Synthetic oligonucleotide
uccuauugcacuccaugug

SEQ ID NO: 1604560 - RNA, 19 nt, Artificial Sequence
  Description of Artificial Sequence: Synthetic oligonucleotide
ugcuauuugaagcaacauu

SEQ ID NO: 1604561 - RNA, 19 nt, Artificial Sequence
  Description of Artificial Sequence: Synthetic oligonucleotide
acaagguccuauugcacuc

SEQ ID NO: 1604562 - RNA, 19 nt, Artificial Sequence
  Description of Artificial Sequence: Synthetic oligonucleotide
gaaagcauugacacuguug

SEQ ID NO: 1604563 - RNA, 19 nt, Artificial Sequence
  Description of Artificial Sequence: Synthetic oligonucleotide
acauagaggaugggaaccc

SEQ ID NO: 1604564 - RNA, 19 nt, Artificial Sequence
  Description of Artificial Sequence: Synthetic oligonucleotide
cacacacacacacacacac

SEQ ID NO: 1604565 - RNA, 19 nt, Artificial Sequence
  Description of Artificial Sequence: Synthetic oligonucleotide
uauucaaaagccacacaua

SEQ ID NO: 1604566 - RNA, 19 nt, Artificial Sequence
  Description of Artificial Sequence: Synthetic oligonucleotide
uaaaccuagaggguuaaaa

SEQ ID NO: 1604567 - RNA, 19 nt, Artificial Sequence
  Description of Artificial Sequence: Synthetic oligonucleotide
agucucuaccuacugaacu

SEQ ID NO: 1604568 - RNA, 19 nt, Artificial Sequence
  Description of Artificial Sequence: Synthetic oligonucleotide
cacacacacacacacacug

SEQ ID NO: 1604569 - RNA, 19 nt, Artificial Sequence
  Description of Artificial Sequence: Synthetic oligonucleotide
ucucacucacacucgacgc

SEQ ID NO: 1604570 - RNA, 19 nt, Artificial Sequence
  Description of Artificial Sequence: Synthetic oligonucleotide
augugcuccuauccaauac

SEQ ID NO: 1604571 - RNA, 19 nt, Artificial Sequence
  Description of Artificial Sequence: Synthetic oligonucleotide
uagaguggggaaagcauug

SEQ ID NO: 1604572 - RNA, 19 nt, Artificial Sequence
  Description of Artificial Sequence: Synthetic oligonucleotide
gaggcacacacacacacac

SEQ ID NO: 1604573 - RNA, 19 nt, Artificial Sequence
  Description of Artificial Sequence: Synthetic oligonucleotide
ugguauuucuguacauggc

SEQ ID NO: 1604574 - RNA, 19 nt, Artificial Sequence
  Description of Artificial Sequence: Synthetic oligonucleotide
acugcuguuugcuugaguu

SEQ ID NO: 1604575 - RNA, 19 nt, Artificial Sequence
  Description of Artificial Sequence: Synthetic oligonucleotide
uuauuucagcuuuucugca

SEQ ID NO: 1604576 - RNA, 19 nt, Artificial Sequence
  Description of Artificial Sequence: Synthetic oligonucleotide
agaaauaucuaagcaccag

SEQ ID NO: 1604577 - RNA, 19 nt, Artificial Sequence
  Description of Artificial Sequence: Synthetic oligonucleotide
gaucaguaguauaaaguac

SEQ ID NO: 1604578 - RNA, 19 nt, Artificial Sequence
  Description of Artificial Sequence: Synthetic oligonucleotide
auuaaggcccuggagauga

SEQ ID NO: 1604579 - RNA, 19 nt, Artificial Sequence
  Description of Artificial Sequence: Synthetic oligonucleotide
ugauaauuuccuugagggu

SEQ ID NO: 1604580 - RNA, 19 nt, Artificial Sequence
  Description of Artificial Sequence: Synthetic oligonucleotide
agucagugcacucaucagu

SEQ ID NO: 1604581 - RNA, 19 nt, Artificial Sequence
  Description of Artificial Sequence: Synthetic oligonucleotide
uuuaaacuggcagaugaau

SEQ ID NO: 1604582 - RNA, 19 nt, Artificial Sequence
  Description of Artificial Sequence: Synthetic oligonucleotide
gcuauuugaagcaacauuc

SEQ ID NO: 1604583 - RNA, 19 nt, Artificial Sequence
  Description of Artificial Sequence: Synthetic oligonucleotide
aucuugguugaucaguagu

SEQ ID NO: 1604584 - RNA, 19 nt, Artificial Sequence
  Description of Artificial Sequence: Synthetic oligonucleotide
aauucaaccuuuacuacuu

SEQ ID NO: 1604585 - RNA, 19 nt, Artificial Sequence
  Description of Artificial Sequence: Synthetic oligonucleotide
accagucaaaauucaaccu

SEQ ID NO: 1604586 - RNA, 19 nt, Artificial Sequence
  Description of Artificial Sequence: Synthetic oligonucleotide
aguucagucugauuucagu

SEQ ID NO: 1604587 - RNA, 19 nt, Artificial Sequence
  Description of Artificial Sequence: Synthetic oligonucleotide
ucuaccuacugaacugaca

SEQ ID NO: 1604588 - RNA, 19 nt, Artificial Sequence
  Description of Artificial Sequence: Synthetic oligonucleotide
aagacuuccuaggaaacaa

SEQ ID NO: 1604589 - RNA, 19 nt, Artificial Sequence
  Description of Artificial Sequence: Synthetic oligonucleotide
cauuucucacucacacucg

SEQ ID NO: 1604590 - RNA, 19 nt, Artificial Sequence
  Description of Artificial Sequence: Synthetic oligonucleotide
uguacauagaguggggaaa

SEQ ID NO: 1604591 - RNA, 19 nt, Artificial Sequence
  Description of Artificial Sequence: Synthetic oligonucleotide
gugacucagauaaauacac

SEQ ID NO: 1604592 - RNA, 19 nt, Artificial Sequence
  Description of Artificial Sequence: Synthetic oligonucleotide
ugcuguuugcuugaguuga

SEQ ID NO: 1604593 - RNA, 19 nt, Artificial Sequence
  Description of Artificial Sequence: Synthetic oligonucleotide
uacauggcccagaacuaag

SEQ ID NO: 1604594 - RNA, 19 nt, Artificial Sequence
  Description of Artificial Sequence: Synthetic oligonucleotide
uccgugauggaaagcguug

SEQ ID NO: 1604595 - RNA, 19 nt, Artificial Sequence
  Description of Artificial Sequence: Synthetic oligonucleotide
uucuguaaaccuagagggu

SEQ ID NO: 1604596 - RNA, 19 nt, Artificial Sequence
  Description of Artificial Sequence: Synthetic oligonucleotide
uucacuugagucagugcac

SEQ ID NO: 1604597 - RNA, 19 nt, Artificial Sequence
  Description of Artificial Sequence: Synthetic oligonucleotide
aaaagguacucuacuauua

SEQ ID NO: 1604598 - RNA, 19 nt, Artificial Sequence
  Description of Artificial Sequence: Synthetic oligonucleotide
acucuuauuaaggcccugg

SEQ ID NO: 1604599 - RNA, 19 nt, Artificial Sequence
  Description of Artificial Sequence: Synthetic oligonucleotide
ucauguguauuaacacacu

SEQ ID NO: 1604600 - RNA, 19 nt, Artificial Sequence
  Description of Artificial Sequence: Synthetic oligonucleotide
ccauacugcuauuugaagc

SEQ ID NO: 1604601 - RNA, 19 nt, Artificial Sequence
  Description of Artificial Sequence: Synthetic oligonucleotide
aacuagaaauugauaauuu

SEQ ID NO: 1604602 - RNA, 19 nt, Artificial Sequence
  Description of Artificial Sequence: Synthetic oligonucleotide
gaguugauccuaauauagc

SEQ ID NO: 1604603 - RNA, 19 nt, Artificial Sequence
  Description of Artificial Sequence: Synthetic oligonucleotide
ucuguaaaccuagaggguu

SEQ ID NO: 1604604 - RNA, 19 nt, Artificial Sequence
  Description of Artificial Sequence: Synthetic oligonucleotide
aaccuuuuagugaacuaga

SEQ ID NO: 1604605 - RNA, 19 nt, Artificial Sequence
  Description of Artificial Sequence: Synthetic oligonucleotide
cuugaguugauccuaauau

SEQ ID NO: 1604606 - RNA, 19 nt, Artificial Sequence
  Description of Artificial Sequence: Synthetic oligonucleotide
guacucuacuauuauuaac

SEQ ID NO: 1604607 - RNA, 19 nt, Artificial Sequence
  Description of Artificial Sequence: Synthetic oligonucleotide
aaauagucauguguauuaa

SEQ ID NO: 1604608 - RNA, 19 nt, Artificial Sequence
  Description of Artificial Sequence: Synthetic oligonucleotide
uaccuacugaacugacagg

SEQ ID NO: 1604609 - RNA, 19 nt, Artificial Sequence
  Description of Artificial Sequence: Synthetic oligonucleotide
gacauauccaugcuauuua

SEQ ID NO: 1604610 - RNA, 19 nt, Artificial Sequence
  Description of Artificial Sequence: Synthetic oligonucleotide
uguacauggcccagaacua

SEQ ID NO: 1604611 - RNA, 19 nt, Artificial Sequence
  Description of Artificial Sequence: Synthetic oligonucleotide
cauucuccgugauggaaag

SEQ ID NO: 1604612 - RNA, 19 nt, Artificial Sequence
  Description of Artificial Sequence: Synthetic oligonucleotide
uuaaccuuuuagugaacua

SEQ ID NO: 1604613 - RNA, 19 nt, Artificial Sequence
  Description of Artificial Sequence: Synthetic oligonucleotide
cuuuaugcccugaaagaca

SEQ ID NO: 1604614 - RNA, 19 nt, Artificial Sequence
  Description of Artificial Sequence: Synthetic oligonucleotide
ggaaaauaaauuccucaca

SEQ ID NO: 1604615 - RNA, 19 nt, Artificial Sequence
  Description of Artificial Sequence: Synthetic oligonucleotide
uccuugaggguuuggaaau

SEQ ID NO: 1604616 - RNA, 19 nt, Artificial Sequence
  Description of Artificial Sequence: Synthetic oligonucleotide
ucacaggugugacucagau

SEQ ID NO: 1604617 - RNA, 19 nt, Artificial Sequence
  Description of Artificial Sequence: Synthetic oligonucleotide
gauccuaauauagcuagaa

SEQ ID NO: 1604618 - RNA, 19 nt, Artificial Sequence
  Description of Artificial Sequence: Synthetic oligonucleotide
gcauuuaaccuuuuaguga

SEQ ID NO: 1604619 - RNA, 19 nt, Artificial Sequence
  Description of Artificial Sequence: Synthetic oligonucleotide
aaauuccucacagguguga

SEQ ID NO: 1604620 - RNA, 19 nt, Artificial Sequence
  Description of Artificial Sequence: Synthetic oligonucleotide
agguaagggacugagggga

SEQ ID NO: 1604621 - RNA, 19 nt, Artificial Sequence
  Description of Artificial Sequence: Synthetic oligonucleotide
acacugguagcccacgccu

SEQ ID NO: 1604622 - RNA, 19 nt, Artificial Sequence
  Description of Artificial Sequence: Synthetic oligonucleotide
ugauccuaauauagcuaga

SEQ ID NO: 1604623 - RNA, 19 nt, Artificial Sequence
  Description of Artificial Sequence: Synthetic oligonucleotide
guacauagaguggggaaag

SEQ ID NO: 1604624 - RNA, 19 nt, Artificial Sequence
  Description of Artificial Sequence: Synthetic oligonucleotide
auguguauuaacacacucu

SEQ ID NO: 1604625 - RNA, 19 nt, Artificial Sequence
  Description of Artificial Sequence: Synthetic oligonucleotide
acauauccaugcuauuuau

SEQ ID NO: 1604626 - RNA, 19 nt, Artificial Sequence
  Description of Artificial Sequence: Synthetic oligonucleotide
gaaccccuaaaacacagcu

SEQ ID NO: 1604627 - RNA, 19 nt, Artificial Sequence
  Description of Artificial Sequence: Synthetic oligonucleotide
gucuuguguuggcugaucc

SEQ ID NO: 1604628 - RNA, 19 nt, Artificial Sequence
  Description of Artificial Sequence: Synthetic oligonucleotide
cacacauagaggaugggaa

SEQ ID NO: 1604629 - RNA, 19 nt, Artificial Sequence
  Description of Artificial Sequence: Synthetic oligonucleotide
ccuauugcacuccaugugc

SEQ ID NO: 1604630 - RNA, 19 nt, Artificial Sequence
  Description of Artificial Sequence: Synthetic oligonucleotide
auugcggaccugcaugcug

SEQ ID NO: 1604631 - RNA, 19 nt, Artificial Sequence
  Description of Artificial Sequence: Synthetic oligonucleotide
uuccaagacuuccuaggaa

SEQ ID NO: 1604632 - RNA, 19 nt, Artificial Sequence
  Description of Artificial Sequence: Synthetic oligonucleotide
guauucacaaaggccauca

SEQ ID NO: 1604633 - RNA, 19 nt, Artificial Sequence
  Description of Artificial Sequence: Synthetic oligonucleotide
uguuggucuuugcuuuaug

SEQ ID NO: 1604634 - RNA, 19 nt, Artificial Sequence
  Description of Artificial Sequence: Synthetic oligonucleotide
auuagcauuuaaccuuuua

SEQ ID NO: 1604635 - RNA, 19 nt, Artificial Sequence
  Description of Artificial Sequence: Synthetic oligonucleotide
gaacugacaggcucauuuc

SEQ ID NO: 1604636 - RNA, 19 nt, Artificial Sequence
  Description of Artificial Sequence: Synthetic oligonucleotide
auuuccuugaggguuugga

SEQ ID NO: 1604637 - RNA, 19 nt, Artificial Sequence
  Description of Artificial Sequence: Synthetic oligonucleotide
ugaggcacacacacacaca

SEQ ID NO: 1604638 - RNA, 19 nt, Artificial Sequence
  Description of Artificial Sequence: Synthetic oligonucleotide
ggcacacacacacacacac

SEQ ID NO: 1604639 - RNA, 19 nt, Artificial Sequence
  Description of Artificial Sequence: Synthetic oligonucleotide
acauagaguggggaaagca

SEQ ID NO: 1604640 - RNA, 19 nt, Artificial Sequence
  Description of Artificial Sequence: Synthetic oligonucleotide
cuaauuuagguaagggacu

SEQ ID NO: 1604641 - RNA, 19 nt, Artificial Sequence
  Description of Artificial Sequence: Synthetic oligonucleotide
gguccuauugcacuccaug

SEQ ID NO: 1604642 - RNA, 19 nt, Artificial Sequence
  Description of Artificial Sequence: Synthetic oligonucleotide
acugcuauuugaagcaaca

SEQ ID NO: 1604643 - RNA, 19 nt, Artificial Sequence
  Description of Artificial Sequence: Synthetic oligonucleotide
auccuaauauagcuagaaa

SEQ ID NO: 1604644 - RNA, 19 nt, Artificial Sequence
  Description of Artificial Sequence: Synthetic oligonucleotide
uugguugaucaguaguaua

SEQ ID NO: 1604645 - RNA, 19 nt, Artificial Sequence
  Description of Artificial Sequence: Synthetic oligonucleotide
gacaagguccuauugcacu

SEQ ID NO: 1604646 - RNA, 19 nt, Artificial Sequence
  Description of Artificial Sequence: Synthetic oligonucleotide
auggaaagcguuggugggg

SEQ ID NO: 1604647 - RNA, 19 nt, Artificial Sequence
  Description of Artificial Sequence: Synthetic oligonucleotide
acugacaggcucauuucuc

SEQ ID NO: 1604648 - RNA, 19 nt, Artificial Sequence
  Description of Artificial Sequence: Synthetic oligonucleotide
aaguacuguuuugugugga

SEQ ID NO: 1604649 - RNA, 19 nt, Artificial Sequence
  Description of Artificial Sequence: Synthetic oligonucleotide
aaccccuaaaacacagcug

SEQ ID NO: 1604650 - RNA, 19 nt, Artificial Sequence
  Description of Artificial Sequence: Synthetic oligonucleotide
aggaugggaaccccuaaaa

SEQ ID NO: 1604651 - RNA, 19 nt, Artificial Sequence
  Description of Artificial Sequence: Synthetic oligonucleotide
uuaacucccuuuugguaua

SEQ ID NO: 1604652 - RNA, 19 nt, Artificial Sequence
  Description of Artificial Sequence: Synthetic oligonucleotide
uuacagugguauuucugua

SEQ ID NO: 1604653 - RNA, 19 nt, Artificial Sequence
  Description of Artificial Sequence: Synthetic oligonucleotide
aagguccuauugcacucca

SEQ ID NO: 1604654 - RNA, 19 nt, Artificial Sequence
  Description of Artificial Sequence: Synthetic oligonucleotide
gaaaugacauauccaugcu

SEQ ID NO: 1604655 - RNA, 19 nt, Artificial Sequence
  Description of Artificial Sequence: Synthetic oligonucleotide
gaggguuuggaaaugacau

SEQ ID NO: 1604656 - RNA, 19 nt, Artificial Sequence
  Description of Artificial Sequence: Synthetic oligonucleotide
guuccaagacuuccuagga

SEQ ID NO: 1604657 - RNA, 19 nt, Artificial Sequence
  Description of Artificial Sequence: Synthetic oligonucleotide
gaguggggaaagcauugac

SEQ ID NO: 1604658 - RNA, 19 nt, Artificial Sequence
  Description of Artificial Sequence: Synthetic oligonucleotide
aguacuguuuuguguggau

SEQ ID NO: 1604659 - RNA, 19 nt, Artificial Sequence
  Description of Artificial Sequence: Synthetic oligonucleotide
cagaacuaaguucccuaug

SEQ ID NO: 1604660 - RNA, 19 nt, Artificial Sequence
  Description of Artificial Sequence: Synthetic oligonucleotide
gcaaccaaacaguucaguc

SEQ ID NO: 1604661 - RNA, 19 nt, Artificial Sequence
  Description of Artificial Sequence: Synthetic oligonucleotide
gaaaugucacggcaaccaa

SEQ ID NO: 1604662 - RNA, 19 nt, Artificial Sequence
  Description of Artificial Sequence: Synthetic oligonucleotide
ggaaaugucacggcaacca

SEQ ID NO: 1604663 - RNA, 19 nt, Artificial Sequence
  Description of Artificial Sequence: Synthetic oligonucleotide
auuuaaccuuuuagugaac

SEQ ID NO: 1604664 - RNA, 19 nt, Artificial Sequence
  Description of Artificial Sequence: Synthetic oligonucleotide
gagagaugccauugcggac

SEQ ID NO: 1604665 - RNA, 19 nt, Artificial Sequence
  Description of Artificial Sequence: Synthetic oligonucleotide
uguaaaccuagaggguuaa

SEQ ID NO: 1604666 - RNA, 19 nt, Artificial Sequence
  Description of Artificial Sequence: Synthetic oligonucleotide
ucuccgugauggaaagcgu

SEQ ID NO: 1604667 - RNA, 19 nt, Artificial Sequence
  Description of Artificial Sequence: Synthetic oligonucleotide
caaccaaacaguucagucu

SEQ ID NO: 1604668 - RNA, 19 nt, Artificial Sequence
  Description of Artificial Sequence: Synthetic oligonucleotide
ugacaggcucauuucucac

SEQ ID NO: 1604669 - RNA, 19 nt, Artificial Sequence
  Description of Artificial Sequence: Synthetic oligonucleotide
uaagaguuucuuugccaua

SEQ ID NO: 1604670 - RNA, 19 nt, Artificial Sequence
  Description of Artificial Sequence: Synthetic oligonucleotide
gucagugcacucaucaguc

SEQ ID NO: 1604671 - RNA, 19 nt, Artificial Sequence
  Description of Artificial Sequence: Synthetic oligonucleotide
ucuaagcaccagucaaaau

SEQ ID NO: 1604672 - RNA, 19 nt, Artificial Sequence
  Description of Artificial Sequence: Synthetic oligonucleotide
aaugaggcacacacacaca

SEQ ID NO: 1604673 - RNA, 19 nt, Artificial Sequence
  Description of Artificial Sequence: Synthetic oligonucleotide
uugcuugaguugauccuaa

SEQ ID NO: 1604674 - RNA, 19 nt, Artificial Sequence
  Description of Artificial Sequence: Synthetic oligonucleotide
uuaugcccugaaagacaag

SEQ ID NO: 1604675 - RNA, 19 nt, Artificial Sequence
  Description of Artificial Sequence: Synthetic oligonucleotide
ggaucuugguauuucaugu

SEQ ID NO: 1604676 - RNA, 19 nt, Artificial Sequence
  Description of Artificial Sequence: Synthetic oligonucleotide
uacauagaguggggaaagc

SEQ ID NO: 1604677 - RNA, 19 nt, Artificial Sequence
  Description of Artificial Sequence: Synthetic oligonucleotide
cagcuguggaaaugucacg

SEQ ID NO: 1604678 - RNA, 19 nt, Artificial Sequence
  Description of Artificial Sequence: Synthetic oligonucleotide
cugacaggcucauuucuca

SEQ ID NO: 1604679 - RNA, 19 nt, Artificial Sequence
  Description of Artificial Sequence: Synthetic oligonucleotide
cugcuguuugcuugaguug

SEQ ID NO: 1604680 - RNA, 19 nt, Artificial Sequence
  Description of Artificial Sequence: Synthetic oligonucleotide
acacacacacacacacugg

SEQ ID NO: 1604681 - RNA, 19 nt, Artificial Sequence
  Description of Artificial Sequence: Synthetic oligonucleotide
uggaaagcguugguggggu

SEQ ID NO: 1604682 - RNA, 19 nt, Artificial Sequence
  Description of Artificial Sequence: Synthetic oligonucleotide
ucagugcacucaucagucu

SEQ ID NO: 1604683 - RNA, 19 nt, Artificial Sequence
  Description of Artificial Sequence: Synthetic oligonucleotide
uugguauauuacaguggua

SEQ ID NO: 1604684 - RNA, 19 nt, Artificial Sequence
  Description of Artificial Sequence: Synthetic oligonucleotide
guaaaauagucauguguau

SEQ ID NO: 1604685 - RNA, 19 nt, Artificial Sequence
  Description of Artificial Sequence: Synthetic oligonucleotide
gaacuaaguucccuaugua

SEQ ID NO: 1604686 - RNA, 19 nt, Artificial Sequence
  Description of Artificial Sequence: Synthetic oligonucleotide
ggguuaaaaggcuggggac

SEQ ID NO: 1604687 - RNA, 19 nt, Artificial Sequence
  Description of Artificial Sequence: Synthetic oligonucleotide
cauagaggaugggaacccc

SEQ ID NO: 1604688 - RNA, 19 nt, Artificial Sequence
  Description of Artificial Sequence: Synthetic oligonucleotide
gcuuuaugcccugaaagac

SEQ ID NO: 1604689 - RNA, 19 nt, Artificial Sequence
  Description of Artificial Sequence: Synthetic oligonucleotide
auucuccgugauggaaagc

SEQ ID NO: 1604690 - RNA, 19 nt, Artificial Sequence
  Description of Artificial Sequence: Synthetic oligonucleotide
aggugugacucagauaaau

SEQ ID NO: 1604691 - RNA, 19 nt, Artificial Sequence
  Description of Artificial Sequence: Synthetic oligonucleotide
ggaugggaaccccuaaaac

SEQ ID NO: 1604692 - RNA, 19 nt, Artificial Sequence
  Description of Artificial Sequence: Synthetic oligonucleotide
uccucccacagucuguauu

SEQ ID NO: 1604693 - RNA, 19 nt, Artificial Sequence
  Description of Artificial Sequence: Synthetic oligonucleotide
cccuaaaacacagcugugg

SEQ ID NO: 1604694 - RNA, 19 nt, Artificial Sequence
  Description of Artificial Sequence: Synthetic oligonucleotide
auagaguggggaaagcauu

SEQ ID NO: 1604695 - RNA, 19 nt, Artificial Sequence
  Description of Artificial Sequence: Synthetic oligonucleotide
uaccgcuccuucacuugag

SEQ ID NO: 1604696 - RNA, 19 nt, Artificial Sequence
  Description of Artificial Sequence: Synthetic oligonucleotide
gccauugcggaccugcaug

SEQ ID NO: 1604697 - RNA, 19 nt, Artificial Sequence
  Description of Artificial Sequence: Synthetic oligonucleotide
agugaacuagaaauugaua

SEQ ID NO: 1604698 - RNA, 19 nt, Artificial Sequence
  Description of Artificial Sequence: Synthetic oligonucleotide
cucuaccuacugaacugac

SEQ ID NO: 1604699 - RNA, 19 nt, Artificial Sequence
  Description of Artificial Sequence: Synthetic oligonucleotide
cccuauguacauagagugg

SEQ ID NO: 1604700 - RNA, 19 nt, Artificial Sequence
  Description of Artificial Sequence: Synthetic oligonucleotide
gggagagaugccauugcgg

SEQ ID NO: 1604701 - RNA, 19 nt, Artificial Sequence
  Description of Artificial Sequence: Synthetic oligonucleotide
ucacggcaaccaaacaguu

SEQ ID NO: 1604702 - RNA, 19 nt, Artificial Sequence
  Description of Artificial Sequence: Synthetic oligonucleotide
gguacucuacuauuauuaa

SEQ ID NO: 1604703 - RNA, 19 nt, Artificial Sequence
  Description of Artificial Sequence: Synthetic oligonucleotide
guugauccuaauauagcua

SEQ ID NO: 1604704 - RNA, 19 nt, Artificial Sequence
  Description of Artificial Sequence: Synthetic oligonucleotide
uuggcugauccagggacac

SEQ ID NO: 1604705 - RNA, 19 nt, Artificial Sequence
  Description of Artificial Sequence: Synthetic oligonucleotide
uugcacuccaugugcuccu

SEQ ID NO: 1604706 - RNA, 19 nt, Artificial Sequence
  Description of Artificial Sequence: Synthetic oligonucleotide
gaggaugggaaccccuaaa

SEQ ID NO: 1604707 - RNA, 19 nt, Artificial Sequence
  Description of Artificial Sequence: Synthetic oligonucleotide
aagcaccagucaaaauuca

SEQ ID NO: 1604708 - RNA, 19 nt, Artificial Sequence
  Description of Artificial Sequence: Synthetic oligonucleotide
aggguuuggaaaugacaua

SEQ ID NO: 1604709 - RNA, 19 nt, Artificial Sequence
  Description of Artificial Sequence: Synthetic oligonucleotide
ucccacagucuguauucac

SEQ ID NO: 1604710 - RNA, 19 nt, Artificial Sequence
  Description of Artificial Sequence: Synthetic oligonucleotide
cacuccaugugcuccuauc

SEQ ID NO: 1604711 - RNA, 19 nt, Artificial Sequence
  Description of Artificial Sequence: Synthetic oligonucleotide
auagaggaugggaaccccu

SEQ ID NO: 1604712 - RNA, 19 nt, Artificial Sequence
  Description of Artificial Sequence: Synthetic oligonucleotide
cauagaguggggaaagcau

SEQ ID NO: 1604713 - RNA, 19 nt, Artificial Sequence
  Description of Artificial Sequence: Synthetic oligonucleotide
acaucuugguugaucagua

SEQ ID NO: 1604714 - RNA, 19 nt, Artificial Sequence
  Description of Artificial Sequence: Synthetic oligonucleotide
uugagauaauuagcauuua

SEQ ID NO: 1604715 - RNA, 19 nt, Artificial Sequence
  Description of Artificial Sequence: Synthetic oligonucleotide
uaaguucccuauguacaua

SEQ ID NO: 1604716 - RNA, 19 nt, Artificial Sequence
  Description of Artificial Sequence: Synthetic oligonucleotide
cuugaggguuuggaaauga

SEQ ID NO: 1604717 - RNA, 19 nt, Artificial Sequence
  Description of Artificial Sequence: Synthetic oligonucleotide
cuaaguucccuauguacau

SEQ ID NO: 1604718 - RNA, 19 nt, Artificial Sequence
  Description of Artificial Sequence: Synthetic oligonucleotide
gagucucuaccuacugaac

SEQ ID NO: 1604719 - RNA, 19 nt, Artificial Sequence
  Description of Artificial Sequence: Synthetic oligonucleotide
cucauucugacaagguccu

SEQ ID NO: 1604720 - RNA, 19 nt, Artificial Sequence
  Description of Artificial Sequence: Synthetic oligonucleotide
gcaccagucaaaauucaac

SEQ ID NO: 1604721 - RNA, 19 nt, Artificial Sequence
  Description of Artificial Sequence: Synthetic oligonucleotide
uugagucagugcacucauc

SEQ ID NO: 1604722 - RNA, 19 nt, Artificial Sequence
  Description of Artificial Sequence: Synthetic oligonucleotide
acuggcagaugaaucccug

SEQ ID NO: 1604723 - RNA, 19 nt, Artificial Sequence
  Description of Artificial Sequence: Synthetic oligonucleotide
cauauccaugcuauuuaua

SEQ ID NO: 1604724 - RNA, 19 nt, Artificial Sequence
  Description of Artificial Sequence: Synthetic oligonucleotide
guccuauugcacuccaugu

SEQ ID NO: 1604725 - RNA, 19 nt, Artificial Sequence
  Description of Artificial Sequence: Synthetic oligonucleotide
ccuaaaacacagcugugga

SEQ ID NO: 1604726 - RNA, 19 nt, Artificial Sequence
  Description of Artificial Sequence: Synthetic oligonucleotide
augacauauccaugcuauu

SEQ ID NO: 1604727 - RNA, 19 nt, Artificial Sequence
  Description of Artificial Sequence: Synthetic oligonucleotide
ugccauugcggaccugcau

SEQ ID NO: 1604728 - RNA, 19 nt, Artificial Sequence
  Description of Artificial Sequence: Synthetic oligonucleotide
auucaaccuuuacuacuua

SEQ ID NO: 1604729 - RNA, 19 nt, Artificial Sequence
  Description of Artificial Sequence: Synthetic oligonucleotide
uucagcuuuucugcaggau

SEQ ID NO: 1604730 - RNA, 19 nt, Artificial Sequence
  Description of Artificial Sequence: Synthetic oligonucleotide
acaaugaggcacacacaca

SEQ ID NO: 1604731 - RNA, 19 nt, Artificial Sequence
  Description of Artificial Sequence: Synthetic oligonucleotide
ccaagacuuccuaggaaac

SEQ ID NO: 1604732 - RNA, 19 nt, Artificial Sequence
  Description of Artificial Sequence: Synthetic oligonucleotide
augucacggcaaccaaaca

SEQ ID NO: 1604733 - RNA, 19 nt, Artificial Sequence
  Description of Artificial Sequence: Synthetic oligonucleotide
gauggcagucauugagaua

SEQ ID NO: 1604734 - RNA, 19 nt, Artificial Sequence
  Description of Artificial Sequence: Synthetic oligonucleotide
cuguaaaccuagaggguua

SEQ ID NO: 1604735 - RNA, 19 nt, Artificial Sequence
  Description of Artificial Sequence: Synthetic oligonucleotide
ccauugcggaccugcaugc

SEQ ID NO: 1604736 - RNA, 19 nt, Artificial Sequence
  Description of Artificial Sequence: Synthetic oligonucleotide
gucacggcaaccaaacagu

SEQ ID NO: 1604737 - RNA, 19 nt, Artificial Sequence
  Description of Artificial Sequence: Synthetic oligonucleotide
ugguagcccacgccuuuaa

SEQ ID NO: 1604738 - RNA, 19 nt, Artificial Sequence
  Description of Artificial Sequence: Synthetic oligonucleotide
accgcuccuucacuugagu

SEQ ID NO: 1604739 - RNA, 19 nt, Artificial Sequence
  Description of Artificial Sequence: Synthetic oligonucleotide
cacuugagucagugcacuc

SEQ ID NO: 1604740 - RNA, 19 nt, Artificial Sequence
  Description of Artificial Sequence: Synthetic oligonucleotide
auacugcuauuugaagcaa

SEQ ID NO: 1604741 - RNA, 19 nt, Artificial Sequence
  Description of Artificial Sequence: Synthetic oligonucleotide
gcagucauugagauaauua

SEQ ID NO: 1604742 - RNA, 19 nt, Artificial Sequence
  Description of Artificial Sequence: Synthetic oligonucleotide
gcuguuuugaauucaccau

SEQ ID NO: 1604743 - RNA, 19 nt, Artificial Sequence
  Description of Artificial Sequence: Synthetic oligonucleotide
cuccuauccaauacagagu

SEQ ID NO: 1604744 - RNA, 19 nt, Artificial Sequence
  Description of Artificial Sequence: Synthetic oligonucleotide
guauuaacacacucuuauu

SEQ ID NO: 1604745 - RNA, 19 nt, Artificial Sequence
  Description of Artificial Sequence: Synthetic oligonucleotide
acacucuuauuaaggcccu

SEQ ID NO: 1604746 - RNA, 19 nt, Artificial Sequence
  Description of Artificial Sequence: Synthetic oligonucleotide
cacacacacacacacuggu

SEQ ID NO: 1604747 - RNA, 19 nt, Artificial Sequence
  Description of Artificial Sequence: Synthetic oligonucleotide
cuacuauuauuaacucccu

SEQ ID NO: 1604748 - RNA, 19 nt, Artificial Sequence
  Description of Artificial Sequence: Synthetic oligonucleotide
agcaccagucaaaauucaa

SEQ ID NO: 1604749 - RNA, 19 nt, Artificial Sequence
  Description of Artificial Sequence: Synthetic oligonucleotide
ugcuugaguugauccuaau

SEQ ID NO: 1604750 - RNA, 19 nt, Artificial Sequence
  Description of Artificial Sequence: Synthetic oligonucleotide
auucaccauucuccgugau

SEQ ID NO: 1604751 - RNA, 19 nt, Artificial Sequence
  Description of Artificial Sequence: Synthetic oligonucleotide
uggcugauccagggacacg

SEQ ID NO: 1604752 - RNA, 19 nt, Artificial Sequence
  Description of Artificial Sequence: Synthetic oligonucleotide
cuauugcacuccaugugcu

SEQ ID NO: 1604753 - RNA, 19 nt, Artificial Sequence
  Description of Artificial Sequence: Synthetic oligonucleotide
cuguuugcuugaguugauc

SEQ ID NO: 1604754 - RNA, 19 nt, Artificial Sequence
  Description of Artificial Sequence: Synthetic oligonucleotide
guguggaucuugguauuuc

SEQ ID NO: 1604755 - RNA, 19 nt, Artificial Sequence
  Description of Artificial Sequence: Synthetic oligonucleotide
guacauggcccagaacuaa

SEQ ID NO: 1604756 - RNA, 19 nt, Artificial Sequence
  Description of Artificial Sequence: Synthetic oligonucleotide
acacacacacacacacaca

SEQ ID NO: 1604757 - RNA, 19 nt, Artificial Sequence
  Description of Artificial Sequence: Synthetic oligonucleotide
acacacacacacacacacu

SEQ ID NO: 1604758 - RNA, 19 nt, Artificial Sequence
  Description of Artificial Sequence: Synthetic oligonucleotide
ggguuuggaaaugacauau

SEQ ID NO: 1604759 - RNA, 19 nt, Artificial Sequence
  Description of Artificial Sequence: Synthetic oligonucleotide
uuaaggcccuggagaugaa

SEQ ID NO: 1604760 - RNA, 19 nt, Artificial Sequence
  Description of Artificial Sequence: Synthetic oligonucleotide
acuguuuuguguggaucuu

SEQ ID NO: 1604761 - RNA, 19 nt, Artificial Sequence
  Description of Artificial Sequence: Synthetic oligonucleotide
caugugcuccuauccaaua

SEQ ID NO: 1604762 - RNA, 19 nt, Artificial Sequence
  Description of Artificial Sequence: Synthetic oligonucleotide
gcuuuuaaacuggcagaug

SEQ ID NO: 1604763 - RNA, 19 nt, Artificial Sequence
  Description of Artificial Sequence: Synthetic oligonucleotide
cucauuucucacucacacu

SEQ ID NO: 1604764 - RNA, 19 nt, Artificial Sequence
  Description of Artificial Sequence: Synthetic oligonucleotide
gguaagggacugaggggag

SEQ ID NO: 1604765 - RNA, 19 nt, Artificial Sequence
  Description of Artificial Sequence: Synthetic oligonucleotide
guguuggcugauccaggga

SEQ ID NO: 1604766 - RNA, 19 nt, Artificial Sequence
  Description of Artificial Sequence: Synthetic oligonucleotide
gguugaucaguaguauaaa

SEQ ID NO: 1604767 - RNA, 19 nt, Artificial Sequence
  Description of Artificial Sequence: Synthetic oligonucleotide
cacagucuguauucacaaa

SEQ ID NO: 1604768 - RNA, 19 nt, Artificial Sequence
  Description of Artificial Sequence: Synthetic oligonucleotide
ccgugauggaaagcguugg

SEQ ID NO: 1604769 - RNA, 19 nt, Artificial Sequence
  Description of Artificial Sequence: Synthetic oligonucleotide
ggaaccccuaaaacacagc

SEQ ID NO: 1604770 - RNA, 19 nt, Artificial Sequence
  Description of Artificial Sequence: Synthetic oligonucleotide
gguuuggaaaugacauauc

SEQ ID NO: 1604771 - RNA, 19 nt, Artificial Sequence
  Description of Artificial Sequence: Synthetic oligonucleotide
aguucccuauguacauaga

SEQ ID NO: 1604772 - RNA, 19 nt, Artificial Sequence
  Description of Artificial Sequence: Synthetic oligonucleotide
cucacaggugugacucaga

SEQ ID NO: 1604773 - RNA, 19 nt, Artificial Sequence
  Description of Artificial Sequence: Synthetic oligonucleotide
caguaguauaaaguacugu

SEQ ID NO: 1604774 - RNA, 19 nt, Artificial Sequence
  Description of Artificial Sequence: Synthetic oligonucleotide
ccuaggaaacaaugaggca

SEQ ID NO: 1604775 - RNA, 19 nt, Artificial Sequence
  Description of Artificial Sequence: Synthetic oligonucleotide
ggugugacucagauaaaua

SEQ ID NO: 1604776 - RNA, 19 nt, Artificial Sequence
  Description of Artificial Sequence: Synthetic oligonucleotide
cacucuuauuaaggcccug

SEQ ID NO: 1604777 - RNA, 19 nt, Artificial Sequence
  Description of Artificial Sequence: Synthetic oligonucleotide
gguauauuacagugguauu

SEQ ID NO: 1604778 - RNA, 19 nt, Artificial Sequence
  Description of Artificial Sequence: Synthetic oligonucleotide
cugggcaacuuccuucugu

SEQ ID NO: 1604779 - RNA, 19 nt, Artificial Sequence
  Description of Artificial Sequence: Synthetic oligonucleotide
agggacugaggggaggcuu

SEQ ID NO: 1604780 - RNA, 19 nt, Artificial Sequence
  Description of Artificial Sequence: Synthetic oligonucleotide
acacacacacacacuggua

SEQ ID NO: 1604781 - RNA, 19 nt, Artificial Sequence
  Description of Artificial Sequence: Synthetic oligonucleotide
ggauggcagucauugagau

SEQ ID NO: 1604782 - RNA, 19 nt, Artificial Sequence
  Description of Artificial Sequence: Synthetic oligonucleotide
ggucuuugcuuuaugcccu

SEQ ID NO: 1604783 - RNA, 19 nt, Artificial Sequence
  Description of Artificial Sequence: Synthetic oligonucleotide
ggcuuuuaaacuggcagau

SEQ ID NO: 1604784 - RNA, 19 nt, Artificial Sequence
  Description of Artificial Sequence: Synthetic oligonucleotide
aggcacacacacacacaca

SEQ ID NO: 1604785 - RNA, 19 nt, Artificial Sequence
  Description of Artificial Sequence: Synthetic oligonucleotide
cacaggugugacucagaua

SEQ ID NO: 1604786 - RNA, 19 nt, Artificial Sequence
  Description of Artificial Sequence: Synthetic oligonucleotide
ccacacauagaggauggga

SEQ ID NO: 1604787 - RNA, 19 nt, Artificial Sequence
  Description of Artificial Sequence: Synthetic oligonucleotide
ccagucaaaauucaaccuu

SEQ ID NO: 1604788 - RNA, 19 nt, Artificial Sequence
  Description of Artificial Sequence: Synthetic oligonucleotide
cccagaacuaaguucccua

SEQ ID NO: 1604789 - RNA, 19 nt, Artificial Sequence
  Description of Artificial Sequence: Synthetic oligonucleotide
guaaaccuagaggguuaaa

SEQ ID NO: 1604790 - RNA, 19 nt, Artificial Sequence
  Description of Artificial Sequence: Synthetic oligonucleotide
ugcggaccugcaugcugua

SEQ ID NO: 1604791 - RNA, 19 nt, Artificial Sequence
  Description of Artificial Sequence: Synthetic oligonucleotide
cuccgugauggaaagcguu

SEQ ID NO: 1604792 - RNA, 19 nt, Artificial Sequence
  Description of Artificial Sequence: Synthetic oligonucleotide
cauggcccagaacuaaguu

SEQ ID NO: 1604793 - RNA, 19 nt, Artificial Sequence
  Description of Artificial Sequence: Synthetic oligonucleotide
aagcguuggugggguuggu

SEQ ID NO: 1604794 - RNA, 19 nt, Artificial Sequence
  Description of Artificial Sequence: Synthetic oligonucleotide
augccauugcggaccugca

SEQ ID NO: 1604795 - RNA, 19 nt, Artificial Sequence
  Description of Artificial Sequence: Synthetic oligonucleotide
ccccuaaaacacagcugug

SEQ ID NO: 1604796 - RNA, 19 nt, Artificial Sequence
  Description of Artificial Sequence: Synthetic oligonucleotide
ggcucauuucucacucaca

SEQ ID NO: 1604797 - RNA, 19 nt, Artificial Sequence
  Description of Artificial Sequence: Synthetic oligonucleotide
guggaucuugguauuucau

SEQ ID NO: 1604798 - RNA, 19 nt, Artificial Sequence
  Description of Artificial Sequence: Synthetic oligonucleotide
ccuugaggguuuggaaaug

SEQ ID NO: 1604799 - RNA, 19 nt, Artificial Sequence
  Description of Artificial Sequence: Synthetic oligonucleotide
cagugcacucaucagucuu

SEQ ID NO: 1604800 - RNA, 19 nt, Artificial Sequence
  Description of Artificial Sequence: Synthetic oligonucleotide
caggugugacucagauaaa

SEQ ID NO: 1604801 - RNA, 19 nt, Artificial Sequence
  Description of Artificial Sequence: Synthetic oligonucleotide
cuuugccauacugcuauuu

SEQ ID NO: 1604802 - RNA, 19 nt, Artificial Sequence
  Description of Artificial Sequence: Synthetic oligonucleotide
gcacacacacacacacaca

SEQ ID NO: 1604803 - RNA, 19 nt, Artificial Sequence
  Description of Artificial Sequence: Synthetic oligonucleotide
ggcaaccaaacaguucagu

SEQ ID NO: 1604804 - RNA, 19 nt, Artificial Sequence
  Description of Artificial Sequence: Synthetic oligonucleotide
agguccuauugcacuccau

SEQ ID NO: 1604805 - RNA, 19 nt, Artificial Sequence
  Description of Artificial Sequence: Synthetic oligonucleotide
gacugaggggaggcuuuua

SEQ ID NO: 1604806 - RNA, 19 nt, Artificial Sequence
  Description of Artificial Sequence: Synthetic oligonucleotide
ccagaacuaaguucccuau

SEQ ID NO: 1604807 - RNA, 19 nt, Artificial Sequence
  Description of Artificial Sequence: Synthetic oligonucleotide
cauugacacuguuggucuu

SEQ ID NO: 1604808 - RNA, 19 nt, Artificial Sequence
  Description of Artificial Sequence: Synthetic oligonucleotide
ggaaagcauugacacuguu

SEQ ID NO: 1604809 - RNA, 19 nt, Artificial Sequence
  Description of Artificial Sequence: Synthetic oligonucleotide
gucuccucccacagucugu

SEQ ID NO: 1604810 - RNA, 19 nt, Artificial Sequence
  Description of Artificial Sequence: Synthetic oligonucleotide
gggcaacuuccuucugucu

SEQ ID NO: 1604811 - RNA, 19 nt, Artificial Sequence
  Description of Artificial Sequence: Synthetic oligonucleotide
cacacucgacgccuauuuu

SEQ ID NO: 1604812 - RNA, 19 nt, Artificial Sequence
  Description of Artificial Sequence: Synthetic oligonucleotide
gggaaagcauugacacugu

SEQ ID NO: 1604813 - RNA, 19 nt, Artificial Sequence
  Description of Artificial Sequence: Synthetic oligonucleotide
ccuauccaauacagagucu

SEQ ID NO: 1604814 - RNA, 19 nt, Artificial Sequence
  Description of Artificial Sequence: Synthetic oligonucleotide
gguagcccacgccuuuaau

SEQ ID NO: 1604815 - RNA, 19 nt, Artificial Sequence
  Description of Artificial Sequence: Synthetic oligonucleotide
ccaugugcuccuauccaau

SEQ ID NO: 1604816 - RNA, 19 nt, Artificial Sequence
  Description of Artificial Sequence: Synthetic oligonucleotide
ggcagucauugagauaauu

SEQ ID NO: 1604817 - RNA, 19 nt, Artificial Sequence
  Description of Artificial Sequence: Synthetic oligonucleotide
cauugcggaccugcaugcu

SEQ ID NO: 1604818 - RNA, 19 nt, Artificial Sequence
  Description of Artificial Sequence: Synthetic oligonucleotide
gcggaccugcaugcuguac

SEQ ID NO: 1604819 - RNA, 19 nt, Artificial Sequence
  Description of Artificial Sequence: Synthetic oligonucleotide
cugcaggauggcagucauu

SEQ ID NO: 1604820 - RNA, 19 nt, Artificial Sequence
  Description of Artificial Sequence: Synthetic oligonucleotide
cuccucccacagucuguau

SEQ ID NO: 1604821 - RNA, 19 nt, Artificial Sequence
  Description of Artificial Sequence: Synthetic oligonucleotide
gcacuccaugugcuccuau

SEQ ID NO: 1604822 - RNA, 19 nt, Artificial Sequence
  Description of Artificial Sequence: Synthetic oligonucleotide
ggacugaggggaggcuuuu

SEQ ID NO: 1604823 - RNA, 19 nt, Artificial Sequence
  Description of Artificial Sequence: Synthetic oligonucleotide
uuaaaaucguuccauacag

SEQ ID NO: 1604824 - RNA, 19 nt, Artificial Sequence
  Description of Artificial Sequence: Synthetic oligonucleotide
aaaauuagccaauauguau

SEQ ID NO: 1604825 - RNA, 19 nt, Artificial Sequence
  Description of Artificial Sequence: Synthetic oligonucleotide
uuaaacugagccuucacug

SEQ ID NO: 1604826 - RNA, 19 nt, Artificial Sequence
  Description of Artificial Sequence: Synthetic oligonucleotide
uuagccaauauguauaacu

SEQ ID NO: 1604827 - RNA, 19 nt, Artificial Sequence
  Description of Artificial Sequence: Synthetic oligonucleotide
aaaccuuaaaacauauggg

SEQ ID NO: 1604828 - RNA, 19 nt, Artificial Sequence
  Description of Artificial Sequence: Synthetic oligonucleotide
aacacgcagauguuggugg

SEQ ID NO: 1604829 - RNA, 19 nt, Artificial Sequence
  Description of Artificial Sequence: Synthetic oligonucleotide
ucaagcugaaacauuuuag

SEQ ID NO: 1604830 - RNA, 19 nt, Artificial Sequence
  Description of Artificial Sequence: Synthetic oligonucleotide
uguggaagcgcacaggacc

SEQ ID NO: 1604831 - RNA, 19 nt, Artificial Sequence
  Description of Artificial Sequence: Synthetic oligonucleotide
uguacgaugcgcaagggcu

SEQ ID NO: 1604832 - RNA, 19 nt, Artificial Sequence
  Description of Artificial Sequence: Synthetic oligonucleotide
uguguaaugggcuuguccu

SEQ ID NO: 1604833 - RNA, 19 nt, Artificial Sequence
  Description of Artificial Sequence: Synthetic oligonucleotide
gcugauuuuaaacugagcc

SEQ ID NO: 1604834 - RNA, 19 nt, Artificial Sequence
  Description of Artificial Sequence: Synthetic oligonucleotide
acaaaugcauaaaaugccc

SEQ ID NO: 1604835 - RNA, 19 nt, Artificial Sequence
  Description of Artificial Sequence: Synthetic oligonucleotide
uccauacagaaaaccaagg

SEQ ID NO: 1604836 - RNA, 19 nt, Artificial Sequence
  Description of Artificial Sequence: Synthetic oligonucleotide
uagccaauauguauaacug

SEQ ID NO: 1604837 - RNA, 19 nt, Artificial Sequence
  Description of Artificial Sequence: Synthetic oligonucleotide
ugaacacggagccaguugc

SEQ ID NO: 1604838 - RNA, 19 nt, Artificial Sequence
  Description of Artificial Sequence: Synthetic oligonucleotide
aucacuuauugguaauuac

SEQ ID NO: 1604839 - RNA, 19 nt, Artificial Sequence
  Description of Artificial Sequence: Synthetic oligonucleotide
auacagaaaaccaaggucu

SEQ ID NO: 1604840 - RNA, 19 nt, Artificial Sequence
  Description of Artificial Sequence: Synthetic oligonucleotide
gagguguugacgcauguag

SEQ ID NO: 1604841 - RNA, 19 nt, Artificial Sequence
  Description of Artificial Sequence: Synthetic oligonucleotide
cuuaugauacugcagagca

SEQ ID NO: 1604842 - RNA, 19 nt, Artificial Sequence
  Description of Artificial Sequence: Synthetic oligonucleotide
ucugcggccaggacgaagg

SEQ ID NO: 1604843 - RNA, 19 nt, Artificial Sequence
  Description of Artificial Sequence: Synthetic oligonucleotide
aauccgggcugucacuccc

SEQ ID NO: 1604844 - RNA, 19 nt, Artificial Sequence
  Description of Artificial Sequence: Synthetic oligonucleotide
auaaacgccaaaccccgcg

SEQ ID NO: 1604845 - RNA, 19 nt, Artificial Sequence
  Description of Artificial Sequence: Synthetic oligonucleotide
uauaacuggaugcugguuu

SEQ ID NO: 1604846 - RNA, 19 nt, Artificial Sequence
  Description of Artificial Sequence: Synthetic oligonucleotide
aguugcacugcuuuugaag

SEQ ID NO: 1604847 - RNA, 19 nt, Artificial Sequence
  Description of Artificial Sequence: Synthetic oligonucleotide
aauuagccaauauguauaa

SEQ ID NO: 1604848 - RNA, 19 nt, Artificial Sequence
  Description of Artificial Sequence: Synthetic oligonucleotide
caauauguauaacuggaug

SEQ ID NO: 1604849 - RNA, 19 nt, Artificial Sequence
  Description of Artificial Sequence: Synthetic oligonucleotide
uuauugguaauuacuuuaa

SEQ ID NO: 1604850 - RNA, 19 nt, Artificial Sequence
  Description of Artificial Sequence: Synthetic oligonucleotide
agccaauauguauaacugg

SEQ ID NO: 1604851 - RNA, 19 nt, Artificial Sequence
  Description of Artificial Sequence: Synthetic oligonucleotide
aaguccagcgcgaagcggc

SEQ ID NO: 1604852 - RNA, 19 nt, Artificial Sequence
  Description of Artificial Sequence: Synthetic oligonucleotide
uaaacugagccuucacugc

SEQ ID NO: 1604853 - RNA, 19 nt, Artificial Sequence
  Description of Artificial Sequence: Synthetic oligonucleotide
aaacaucacuuauugguaa

SEQ ID NO: 1604854 - RNA, 19 nt, Artificial Sequence
  Description of Artificial Sequence: Synthetic oligonucleotide
uucuacucaagcugaaaca

SEQ ID NO: 1604855 - RNA, 19 nt, Artificial Sequence
  Description of Artificial Sequence: Synthetic oligonucleotide
aaauuagccaauauguaua

SEQ ID NO: 1604856 - RNA, 19 nt, Artificial Sequence
  Description of Artificial Sequence: Synthetic oligonucleotide
agaaaguguagaaaauuag

SEQ ID NO: 1604857 - RNA, 19 nt, Artificial Sequence
  Description of Artificial Sequence: Synthetic oligonucleotide
gaugccgcucagcacagcg

SEQ ID NO: 1604858 - RNA, 19 nt, Artificial Sequence
  Description of Artificial Sequence: Synthetic oligonucleotide
aaaccaaggucuucacucu

SEQ ID NO: 1604859 - RNA, 19 nt, Artificial Sequence
  Description of Artificial Sequence: Synthetic oligonucleotide
agcuuuaaaauccccacau

SEQ ID NO: 1604860 - RNA, 19 nt, Artificial Sequence
  Description of Artificial Sequence: Synthetic oligonucleotide
uguugacgcauguagcgcc

SEQ ID NO: 1604861 - RNA, 19 nt, Artificial Sequence
  Description of Artificial Sequence: Synthetic oligonucleotide
caucuguuuaaaaucguuc

SEQ ID NO: 1604862 - RNA, 19 nt, Artificial Sequence
  Description of Artificial Sequence: Synthetic oligonucleotide
cacaggaccgcaacuacgg

SEQ ID NO: 1604863 - RNA, 19 nt, Artificial Sequence
  Description of Artificial Sequence: Synthetic oligonucleotide
gguguugacgcauguagcg

SEQ ID NO: 1604864 - RNA, 19 nt, Artificial Sequence
  Description of Artificial Sequence: Synthetic oligonucleotide
caaaccccgcgguagaacg

SEQ ID NO: 1604865 - RNA, 19 nt, Artificial Sequence
  Description of Artificial Sequence: Synthetic oligonucleotide
uccacaaggucccucgucu

SEQ ID NO: 1604866 - RNA, 19 nt, Artificial Sequence
  Description of Artificial Sequence: Synthetic oligonucleotide
uugcuucccucacagcacg

SEQ ID NO: 1604867 - RNA, 19 nt, Artificial Sequence
  Description of Artificial Sequence: Synthetic oligonucleotide
uaaaaucguuccauacaga

SEQ ID NO: 1604868 - RNA, 19 nt, Artificial Sequence
  Description of Artificial Sequence: Synthetic oligonucleotide
ucuacucaagcugaaacau

SEQ ID NO: 1604869 - RNA, 19 nt, Artificial Sequence
  Description of Artificial Sequence: Synthetic oligonucleotide
uuuugaaggcucuggucug

SEQ ID NO: 1604870 - RNA, 19 nt, Artificial Sequence
  Description of Artificial Sequence: Synthetic oligonucleotide
aggacgaaggccgggacgc

SEQ ID NO: 1604871 - RNA, 19 nt, Artificial Sequence
  Description of Artificial Sequence: Synthetic oligonucleotide
aacaucacuuauugguaau

SEQ ID NO: 1604872 - RNA, 19 nt, Artificial Sequence
  Description of Artificial Sequence: Synthetic oligonucleotide
ugcagagcaauccgggcug

SEQ ID NO: 1604873 - RNA, 19 nt, Artificial Sequence
  Description of Artificial Sequence: Synthetic oligonucleotide
uguuuaaaaucguuccaua

SEQ ID NO: 1604874 - RNA, 19 nt, Artificial Sequence
  Description of Artificial Sequence: Synthetic oligonucleotide
aagcgcacaggaccgcaac

SEQ ID NO: 1604875 - RNA, 19 nt, Artificial Sequence
  Description of Artificial Sequence: Synthetic oligonucleotide
uguaaugggcuuguccugc

SEQ ID NO: 1604876 - RNA, 19 nt, Artificial Sequence
  Description of Artificial Sequence: Synthetic oligonucleotide
ggagcuguagccuucguug

SEQ ID NO: 1604877 - RNA, 19 nt, Artificial Sequence
  Description of Artificial Sequence: Synthetic oligonucleotide
aacacggagccaguugcac

SEQ ID NO: 1604878 - RNA, 19 nt, Artificial Sequence
  Description of Artificial Sequence: Synthetic oligonucleotide
ucgaacaccagccgccgcc

SEQ ID NO: 1604879 - RNA, 19 nt, Artificial Sequence
  Description of Artificial Sequence: Synthetic oligonucleotide
aacaagacgcccaggugag

SEQ ID NO: 1604880 - RNA, 19 nt, Artificial Sequence
  Description of Artificial Sequence: Synthetic oligonucleotide
ugccccaccauaugcaaug

SEQ ID NO: 1604881 - RNA, 19 nt, Artificial Sequence
  Description of Artificial Sequence: Synthetic oligonucleotide
ugucccuguguaaugggcu

SEQ ID NO: 1604882 - RNA, 19 nt, Artificial Sequence
  Description of Artificial Sequence: Synthetic oligonucleotide
caguccgaaguccagcgcg

SEQ ID NO: 1604883 - RNA, 19 nt, Artificial Sequence
  Description of Artificial Sequence: Synthetic oligonucleotide
ugcaaacacgcagauguug

SEQ ID NO: 1604884 - RNA, 19 nt, Artificial Sequence
  Description of Artificial Sequence: Synthetic oligonucleotide
aaugccccaccauaugcaa

SEQ ID NO: 1604885 - RNA, 19 nt, Artificial Sequence
  Description of Artificial Sequence: Synthetic oligonucleotide
ucguuccauacagaaaacc

SEQ ID NO: 1604886 - RNA, 19 nt, Artificial Sequence
  Description of Artificial Sequence: Synthetic oligonucleotide
augcgcaagggcucgccgc

SEQ ID NO: 1604887 - RNA, 19 nt, Artificial Sequence
  Description of Artificial Sequence: Synthetic oligonucleotide
ugucgaccuguucaucugc

SEQ ID NO: 1604888 - RNA, 19 nt, Artificial Sequence
  Description of Artificial Sequence: Synthetic oligonucleotide
auaugggaaaggucacuug

SEQ ID NO: 1604889 - RNA, 19 nt, Artificial Sequence
  Description of Artificial Sequence: Synthetic oligonucleotide
ucaucgucuuccacuguca

SEQ ID NO: 1604890 - RNA, 19 nt, Artificial Sequence
  Description of Artificial Sequence: Synthetic oligonucleotide
caagacgcccaggugagcg

SEQ ID NO: 1604891 - RNA, 19 nt, Artificial Sequence
  Description of Artificial Sequence: Synthetic oligonucleotide
aacauccaccgugaggucu

SEQ ID NO: 1604892 - RNA, 19 nt, Artificial Sequence
  Description of Artificial Sequence: Synthetic oligonucleotide
acgaaggcggccaccagcc

SEQ ID NO: 1604893 - RNA, 19 nt, Artificial Sequence
  Description of Artificial Sequence: Synthetic oligonucleotide
uuaugauacugcagagcaa

SEQ ID NO: 1604894 - RNA, 19 nt, Artificial Sequence
  Description of Artificial Sequence: Synthetic oligonucleotide
agguguugacgcauguagc

SEQ ID NO: 1604895 - RNA, 19 nt, Artificial Sequence
  Description of Artificial Sequence: Synthetic oligonucleotide
aacgugcaaggccgcuggc

SEQ ID NO: 1604896 - RNA, 19 nt, Artificial Sequence
  Description of Artificial Sequence: Synthetic oligonucleotide
auaaaaugccccaccauau

SEQ ID NO: 1604897 - RNA, 19 nt, Artificial Sequence
  Description of Artificial Sequence: Synthetic oligonucleotide
cucccggacgccuuguggg

SEQ ID NO: 1604898 - RNA, 19 nt, Artificial Sequence
  Description of Artificial Sequence: Synthetic oligonucleotide
aggaccgccccguacaugu

SEQ ID NO: 1604899 - RNA, 19 nt, Artificial Sequence
  Description of Artificial Sequence: Synthetic oligonucleotide
ucugugucccgggaugccg

SEQ ID NO: 1604900 - RNA, 19 nt, Artificial Sequence
  Description of Artificial Sequence: Synthetic oligonucleotide
aggucacuugagaagaaag

SEQ ID NO: 1604901 - RNA, 19 nt, Artificial Sequence
  Description of Artificial Sequence: Synthetic oligonucleotide
gaugcgcaagggcucgccg

SEQ ID NO: 1604902 - RNA, 19 nt, Artificial Sequence
  Description of Artificial Sequence: Synthetic oligonucleotide
aaacgccaaaccccgcggu

SEQ ID NO: 1604903 - RNA, 19 nt, Artificial Sequence
  Description of Artificial Sequence: Synthetic oligonucleotide
uacagaaaaccaaggucuu

SEQ ID NO: 1604904 - RNA, 19 nt, Artificial Sequence
  Description of Artificial Sequence: Synthetic oligonucleotide
acagaaaaccaaggucuuc

SEQ ID NO: 1604905 - RNA, 19 nt, Artificial Sequence
  Description of Artificial Sequence: Synthetic oligonucleotide
gcaaacacgcagauguugg

SEQ ID NO: 1604906 - RNA, 19 nt, Artificial Sequence
  Description of Artificial Sequence: Synthetic oligonucleotide
gagccgagaccacccagcg

SEQ ID NO: 1604907 - RNA, 19 nt, Artificial Sequence
  Description of Artificial Sequence: Synthetic oligonucleotide
uucccucacagcacgcccc

SEQ ID NO: 1604908 - RNA, 19 nt, Artificial Sequence
  Description of Artificial Sequence: Synthetic oligonucleotide
uacgaugcgcaagggcucg

SEQ ID NO: 1604909 - RNA, 19 nt, Artificial Sequence
  Description of Artificial Sequence: Synthetic oligonucleotide
cugauuuuaaacugagccu

SEQ ID NO: 1604910 - RNA, 19 nt, Artificial Sequence
  Description of Artificial Sequence: Synthetic oligonucleotide
auacugcagagcaauccgg

SEQ ID NO: 1604911 - RNA, 19 nt, Artificial Sequence
  Description of Artificial Sequence: Synthetic oligonucleotide
acagccggcguguacgaug

SEQ ID NO: 1604912 - RNA, 19 nt, Artificial Sequence
  Description of Artificial Sequence: Synthetic oligonucleotide
accuuaaaacauaugggaa

SEQ ID NO: 1604913 - RNA, 19 nt, Artificial Sequence
  Description of Artificial Sequence: Synthetic oligonucleotide
guggaagcgcacaggaccg

SEQ ID NO: 1604914 - RNA, 19 nt, Artificial Sequence
  Description of Artificial Sequence: Synthetic oligonucleotide
gauuuuaaacugagccuuc

SEQ ID NO: 1604915 - RNA, 19 nt, Artificial Sequence
  Description of Artificial Sequence: Synthetic oligonucleotide
ucuuugcagaacacacauc

SEQ ID NO: 1604916 - RNA, 19 nt, Artificial Sequence
  Description of Artificial Sequence: Synthetic oligonucleotide
gugaacacggagccaguug

SEQ ID NO: 1604917 - RNA, 19 nt, Artificial Sequence
  Description of Artificial Sequence: Synthetic oligonucleotide
ucccucacagcacgccccg

SEQ ID NO: 1604918 - RNA, 19 nt, Artificial Sequence
  Description of Artificial Sequence: Synthetic oligonucleotide
gucacucccgagccggugg

SEQ ID NO: 1604919 - RNA, 19 nt, Artificial Sequence
  Description of Artificial Sequence: Synthetic oligonucleotide
cucgcuccgcaccaggacc

SEQ ID NO: 1604920 - RNA, 19 nt, Artificial Sequence
  Description of Artificial Sequence: Synthetic oligonucleotide
ggaacauccaccgugaggu

SEQ ID NO: 1604921 - RNA, 19 nt, Artificial Sequence
  Description of Artificial Sequence: Synthetic oligonucleotide
gagcaauccgggcugucac

SEQ ID NO: 1604922 - RNA, 19 nt, Artificial Sequence
  Description of Artificial Sequence: Synthetic oligonucleotide
guguacgaugcgcaagggc

SEQ ID NO: 1604923 - RNA, 19 nt, Artificial Sequence
  Description of Artificial Sequence: Synthetic oligonucleotide
aagccaucccucaacgggu

SEQ ID NO: 1604924 - RNA, 19 nt, Artificial Sequence
  Description of Artificial Sequence: Synthetic oligonucleotide
ggucacuugagaagaaagc

SEQ ID NO: 1604925 - RNA, 19 nt, Artificial Sequence
  Description of Artificial Sequence: Synthetic oligonucleotide
ccuucacacgccacgaagg

SEQ ID NO: 1604926 - RNA, 19 nt, Artificial Sequence
  Description of Artificial Sequence: Synthetic oligonucleotide
uccgaaguccagcgcgaag

SEQ ID NO: 1604927 - RNA, 19 nt, Artificial Sequence
  Description of Artificial Sequence: Synthetic oligonucleotide
gacagcgcgggcguccucg

SEQ ID NO: 1604928 - RNA, 19 nt, Artificial Sequence
  Description of Artificial Sequence: Synthetic oligonucleotide
aucguuccauacagaaaac

SEQ ID NO: 1604929 - RNA, 19 nt, Artificial Sequence
  Description of Artificial Sequence: Synthetic oligonucleotide
gcccuuaugauacugcaga

SEQ ID NO: 1604930 - RNA, 19 nt, Artificial Sequence
  Description of Artificial Sequence: Synthetic oligonucleotide
gcguguacgaugcgcaagg

SEQ ID NO: 1604931 - RNA, 19 nt, Artificial Sequence
  Description of Artificial Sequence: Synthetic oligonucleotide
caucgucuuccacugucag

SEQ ID NO: 1604932 - RNA, 19 nt, Artificial Sequence
  Description of Artificial Sequence: Synthetic oligonucleotide
acgcauguagcgccgcuug

SEQ ID NO: 1604933 - RNA, 19 nt, Artificial Sequence
  Description of Artificial Sequence: Synthetic oligonucleotide
guugacgcauguagcgccg

SEQ ID NO: 1604934 - RNA, 19 nt, Artificial Sequence
  Description of Artificial Sequence: Synthetic oligonucleotide
acuugagaagaaagccauc

SEQ ID NO: 1604935 - RNA, 19 nt, Artificial Sequence
  Description of Artificial Sequence: Synthetic oligonucleotide
ucccggacgccuugugggg

SEQ ID NO: 1604936 - RNA, 19 nt, Artificial Sequence
  Description of Artificial Sequence: Synthetic oligonucleotide
ugucugugucccgggaugc

SEQ ID NO: 1604937 - RNA, 19 nt, Artificial Sequence
  Description of Artificial Sequence: Synthetic oligonucleotide
cagccggcguguacgaugc

SEQ ID NO: 1604938 - RNA, 19 nt, Artificial Sequence
  Description of Artificial Sequence: Synthetic oligonucleotide
gcagaacacacaucaaguc

SEQ ID NO: 1604939 - RNA, 19 nt, Artificial Sequence
  Description of Artificial Sequence: Synthetic oligonucleotide
gucgccuccauugucugug

SEQ ID NO: 1604940 - RNA, 19 nt, Artificial Sequence
  Description of Artificial Sequence: Synthetic oligonucleotide
gauaaacgccaaaccccgc

SEQ ID NO: 1604941 - RNA, 19 nt, Artificial Sequence
  Description of Artificial Sequence: Synthetic oligonucleotide
gaccgccccguacaugucc

SEQ ID NO: 1604942 - RNA, 19 nt, Artificial Sequence
  Description of Artificial Sequence: Synthetic oligonucleotide
cuuguccugcaacuuccac

SEQ ID NO: 1604943 - RNA, 19 nt, Artificial Sequence
  Description of Artificial Sequence: Synthetic oligonucleotide
aggaccgcaacuacggcca

SEQ ID NO: 1604944 - RNA, 19 nt, Artificial Sequence
  Description of Artificial Sequence: Synthetic oligonucleotide
gccgcuggcaaccccaggg

SEQ ID NO: 1604945 - RNA, 19 nt, Artificial Sequence
  Description of Artificial Sequence: Synthetic oligonucleotide
aacgccaaaccccgcggua

SEQ ID NO: 1604946 - RNA, 19 nt, Artificial Sequence
  Description of Artificial Sequence: Synthetic oligonucleotide
aaccccgcgguagaacgug

SEQ ID NO: 1604947 - RNA, 19 nt, Artificial Sequence
  Description of Artificial Sequence: Synthetic oligonucleotide
ucgagguguugacgcaugu

SEQ ID NO: 1604948 - RNA, 19 nt, Artificial Sequence
  Description of Artificial Sequence: Synthetic oligonucleotide
guguugacgcauguagcgc

SEQ ID NO: 1604949 - RNA, 19 nt, Artificial Sequence
  Description of Artificial Sequence: Synthetic oligonucleotide
cugucgaccuguucaucug

SEQ ID NO: 1604950 - RNA, 19 nt, Artificial Sequence
  Description of Artificial Sequence: Synthetic oligonucleotide
gauguugaccugggccucc

SEQ ID NO: 1604951 - RNA, 19 nt, Artificial Sequence
  Description of Artificial Sequence: Synthetic oligonucleotide
gccagcgucgccuccauug

SEQ ID NO: 1604952 - RNA, 19 nt, Artificial Sequence
  Description of Artificial Sequence: Synthetic oligonucleotide
ucgggauggcugauuuuaa

SEQ ID NO: 1604953 - RNA, 19 nt, Artificial Sequence
  Description of Artificial Sequence: Synthetic oligonucleotide
aucccucaacgggucaucg

SEQ ID NO: 1604954 - RNA, 19 nt, Artificial Sequence
  Description of Artificial Sequence: Synthetic oligonucleotide
ucgcuguaagcaucuuuuc

SEQ ID NO: 1604955 - RNA, 19 nt, Artificial Sequence
  Description of Artificial Sequence: Synthetic oligonucleotide
aaugugggcccggccaccu

SEQ ID NO: 1604956 - RNA, 19 nt, Artificial Sequence
  Description of Artificial Sequence: Synthetic oligonucleotide
agagcaauccgggcuguca

SEQ ID NO: 1604957 - RNA, 19 nt, Artificial Sequence
  Description of Artificial Sequence: Synthetic oligonucleotide
agaacgugcaaggccgcug

SEQ ID NO: 1604958 - RNA, 19 nt, Artificial Sequence
  Description of Artificial Sequence: Synthetic oligonucleotide
gcugucacucccgagccgg

SEQ ID NO: 1604959 - RNA, 19 nt, Artificial Sequence
  Description of Artificial Sequence: Synthetic oligonucleotide
accgacagcgcgggcgucc

SEQ ID NO: 1604960 - RNA, 19 nt, Artificial Sequence
  Description of Artificial Sequence: Synthetic oligonucleotide
acagcacgccccgugaaca

SEQ ID NO: 1604961 - RNA, 19 nt, Artificial Sequence
  Description of Artificial Sequence: Synthetic oligonucleotide
accgcaacuacggccaccu

SEQ ID NO: 1604962 - RNA, 19 nt, Artificial Sequence
  Description of Artificial Sequence: Synthetic oligonucleotide
cacuugagaagaaagccau

SEQ ID NO: 1604963 - RNA, 19 nt, Artificial Sequence
  Description of Artificial Sequence: Synthetic oligonucleotide
cuccgcaccaggaccgccc

SEQ ID NO: 1604964 - RNA, 19 nt, Artificial Sequence
  Description of Artificial Sequence: Synthetic oligonucleotide
ccuuaugauacugcagagc

SEQ ID NO: 1604965 - RNA, 19 nt, Artificial Sequence
  Description of Artificial Sequence: Synthetic oligonucleotide
caccgugaggucugcggcc

SEQ ID NO: 1604966 - RNA, 19 nt, Artificial Sequence
  Description of Artificial Sequence: Synthetic oligonucleotide
agcaauccgggcugucacu

SEQ ID NO: 1604967 - RNA, 19 nt, Artificial Sequence
  Description of Artificial Sequence: Synthetic oligonucleotide
acacgcagauguugguggu

SEQ ID NO: 1604968 - RNA, 19 nt, Artificial Sequence
  Description of Artificial Sequence: Synthetic oligonucleotide
ucaacgggucaucgucuuc

SEQ ID NO: 1604969 - RNA, 19 nt, Artificial Sequence
  Description of Artificial Sequence: Synthetic oligonucleotide
gacgcuguggaagcgcaca

SEQ ID NO: 1604970 - RNA, 19 nt, Artificial Sequence
  Description of Artificial Sequence: Synthetic oligonucleotide
caauccgggcugucacucc

SEQ ID NO: 1604971 - RNA, 19 nt, Artificial Sequence
  Description of Artificial Sequence: Synthetic oligonucleotide
aguccagcgcgaagcggcc

SEQ ID NO: 1604972 - RNA, 19 nt, Artificial Sequence
  Description of Artificial Sequence: Synthetic oligonucleotide
agccgagaccacccagcgg

SEQ ID NO: 1604973 - RNA, 19 nt, Artificial Sequence
  Description of Artificial Sequence: Synthetic oligonucleotide
acgccaaaccccgcgguag

SEQ ID NO: 1604974 - RNA, 19 nt, Artificial Sequence
  Description of Artificial Sequence: Synthetic oligonucleotide
ugacgcauguagcgccgcu

SEQ ID NO: 1604975 - RNA, 19 nt, Artificial Sequence
  Description of Artificial Sequence: Synthetic oligonucleotide
ucacagcacgccccgugaa

SEQ ID NO: 1604976 - RNA, 19 nt, Artificial Sequence
  Description of Artificial Sequence: Synthetic oligonucleotide
acaagacgcccaggugagc

SEQ ID NO: 1604977 - RNA, 19 nt, Artificial Sequence
  Description of Artificial Sequence: Synthetic oligonucleotide
agcgcacaggaccgcaacu

SEQ ID NO: 1604978 - RNA, 19 nt, Artificial Sequence
  Description of Artificial Sequence: Synthetic oligonucleotide
accgccccguacauguccc

SEQ ID NO: 1604979 - RNA, 19 nt, Artificial Sequence
  Description of Artificial Sequence: Synthetic oligonucleotide
gcggcaagcgucugcaagc

SEQ ID NO: 1604980 - RNA, 19 nt, Artificial Sequence
  Description of Artificial Sequence: Synthetic oligonucleotide
cucgcuguaagcaucuuuu

SEQ ID NO: 1604981 - RNA, 19 nt, Artificial Sequence
  Description of Artificial Sequence: Synthetic oligonucleotide
ucgaccuguucaucugcaa

SEQ ID NO: 1604982 - RNA, 19 nt, Artificial Sequence
  Description of Artificial Sequence: Synthetic oligonucleotide
cuccauugucugugucccg

SEQ ID NO: 1604983 - RNA, 19 nt, Artificial Sequence
  Description of Artificial Sequence: Synthetic oligonucleotide
acauccaccgugaggucug

SEQ ID NO: 1604984 - RNA, 19 nt, Artificial Sequence
  Description of Artificial Sequence: Synthetic oligonucleotide
agacgcccaggugagcguc

SEQ ID NO: 1604985 - RNA, 19 nt, Artificial Sequence
  Description of Artificial Sequence: Synthetic oligonucleotide
cucgucuuugcagaacaca

SEQ ID NO: 1604986 - RNA, 19 nt, Artificial Sequence
  Description of Artificial Sequence: Synthetic oligonucleotide
gcaacuacggccaccuuca

SEQ ID NO: 1604987 - RNA, 19 nt, Artificial Sequence
  Description of Artificial Sequence: Synthetic oligonucleotide
ggucccucgucuuugcaga

SEQ ID NO: 1604988 - RNA, 19 nt, Artificial Sequence
  Description of Artificial Sequence: Synthetic oligonucleotide
gcggccuagcgccagcacg

SEQ ID NO: 1604989 - RNA, 19 nt, Artificial Sequence
  Description of Artificial Sequence: Synthetic oligonucleotide
ccugcaacuuccacuauga

SEQ ID NO: 1604990 - RNA, 19 nt, Artificial Sequence
  Description of Artificial Sequence: Synthetic oligonucleotide
cacagcacgccccgugaac

SEQ ID NO: 1604991 - RNA, 19 nt, Artificial Sequence
  Description of Artificial Sequence: Synthetic oligonucleotide
agcacgccccgugaacacg

SEQ ID NO: 1604992 - RNA, 19 nt, Artificial Sequence
  Description of Artificial Sequence: Synthetic oligonucleotide
ugcggccaggacgaaggcc

SEQ ID NO: 1604993 - RNA, 19 nt, Artificial Sequence
  Description of Artificial Sequence: Synthetic oligonucleotide
agcgcgggcguccucgggu

SEQ ID NO: 1604994 - RNA, 19 nt, Artificial Sequence
  Description of Artificial Sequence: Synthetic oligonucleotide
agcgucgccuccauugucu

SEQ ID NO: 1604995 - RNA, 19 nt, Artificial Sequence
  Description of Artificial Sequence: Synthetic oligonucleotide
guaaugggcuuguccugca

SEQ ID NO: 1604996 - RNA, 19 nt, Artificial Sequence
  Description of Artificial Sequence: Synthetic oligonucleotide
ucccucaacgggucaucgu

SEQ ID NO: 1604997 - RNA, 19 nt, Artificial Sequence
  Description of Artificial Sequence: Synthetic oligonucleotide
acggagccaguugcacugc

SEQ ID NO: 1604998 - RNA, 19 nt, Artificial Sequence
  Description of Artificial Sequence: Synthetic oligonucleotide
ucggagccgagaccaccca

SEQ ID NO: 1604999 - RNA, 19 nt, Artificial Sequence
  Description of Artificial Sequence: Synthetic oligonucleotide
uccgggcugucacucccga

SEQ ID NO: 1605000 - RNA, 19 nt, Artificial Sequence
  Description of Artificial Sequence: Synthetic oligonucleotide
cucgggauggcugauuuua

SEQ ID NO: 1605001 - RNA, 19 nt, Artificial Sequence
  Description of Artificial Sequence: Synthetic oligonucleotide
gccuucguugugcaggaac

SEQ ID NO: 1605002 - RNA, 19 nt, Artificial Sequence
  Description of Artificial Sequence: Synthetic oligonucleotide
uagaacgugcaaggccgcu

SEQ ID NO: 1605003 - RNA, 19 nt, Artificial Sequence
  Description of Artificial Sequence: Synthetic oligonucleotide
aaaccccgcgguagaacgu

SEQ ID NO: 1605004 - RNA, 19 nt, Artificial Sequence
  Description of Artificial Sequence: Synthetic oligonucleotide
gaccacccagcggcaagcg

SEQ ID NO: 1605005 - RNA, 19 nt, Artificial Sequence
  Description of Artificial Sequence: Synthetic oligonucleotide
cuggcaaccccagggccag

SEQ ID NO: 1605006 - RNA, 19 nt, Artificial Sequence
  Description of Artificial Sequence: Synthetic oligonucleotide
uugacgcauguagcgccgc

SEQ ID NO: 1605007 - RNA, 19 nt, Artificial Sequence
  Description of Artificial Sequence: Synthetic oligonucleotide
gcacaggaccgcaacuacg

SEQ ID NO: 1605008 - RNA, 19 nt, Artificial Sequence
  Description of Artificial Sequence: Synthetic oligonucleotide
cucgccgccggugugcaug

SEQ ID NO: 1605009 - RNA, 19 nt, Artificial Sequence
  Description of Artificial Sequence: Synthetic oligonucleotide
cccgugaacacggagccag

SEQ ID NO: 1605010 - RNA, 19 nt, Artificial Sequence
  Description of Artificial Sequence: Synthetic oligonucleotide
ccuucguugugcaggaaca

SEQ ID NO: 1605011 - RNA, 19 nt, Artificial Sequence
  Description of Artificial Sequence: Synthetic oligonucleotide
ccgcacauggagcuguagc

SEQ ID NO: 1605012 - RNA, 19 nt, Artificial Sequence
  Description of Artificial Sequence: Synthetic oligonucleotide
augccgcucagcacagcgg

SEQ ID NO: 1605013 - RNA, 19 nt, Artificial Sequence
  Description of Artificial Sequence: Synthetic oligonucleotide
acagcgcgggcguccucgg

SEQ ID NO: 1605014 - RNA, 19 nt, Artificial Sequence
  Description of Artificial Sequence: Synthetic oligonucleotide
gccaguugcacugcuuuug

SEQ ID NO: 1605015 - RNA, 19 nt, Artificial Sequence
  Description of Artificial Sequence: Synthetic oligonucleotide
cuagcgccagcacggcgug

SEQ ID NO: 1605016 - RNA, 19 nt, Artificial Sequence
  Description of Artificial Sequence: Synthetic oligonucleotide
guacgaugcgcaagggcuc

SEQ ID NO: 1605017 - RNA, 19 nt, Artificial Sequence
  Description of Artificial Sequence: Synthetic oligonucleotide
cccucaacgggucaucguc

SEQ ID NO: 1605018 - RNA, 19 nt, Artificial Sequence
  Description of Artificial Sequence: Synthetic oligonucleotide
ccaccauaugcaaugucca

SEQ ID NO: 1605019 - RNA, 19 nt, Artificial Sequence
  Description of Artificial Sequence: Synthetic oligonucleotide
cauugucugugucccggga

SEQ ID NO: 1605020 - RNA, 19 nt, Artificial Sequence
  Description of Artificial Sequence: Synthetic oligonucleotide
gucgagguguugacgcaug

SEQ ID NO: 1605021 - RNA, 19 nt, Artificial Sequence
  Description of Artificial Sequence: Synthetic oligonucleotide
uggaagcgcacaggaccgc

SEQ ID NO: 1605022 - RNA, 19 nt, Artificial Sequence
  Description of Artificial Sequence: Synthetic oligonucleotide
gccgccgccgcacauaguc

SEQ ID NO: 1605023 - RNA, 19 nt, Artificial Sequence
  Description of Artificial Sequence: Synthetic oligonucleotide
ccacccagcggcaagcguc

SEQ ID NO: 1605024 - RNA, 19 nt, Artificial Sequence
  Description of Artificial Sequence: Synthetic oligonucleotide
acgccccgugaacacggag

SEQ ID NO: 1605025 - RNA, 19 nt, Artificial Sequence
  Description of Artificial Sequence: Synthetic oligonucleotide
cagccgccgccgcacauag

SEQ ID NO: 1605026 - RNA, 19 nt, Artificial Sequence
  Description of Artificial Sequence: Synthetic oligonucleotide
acgugcaaggccgcuggca

SEQ ID NO: 1605027 - RNA, 19 nt, Artificial Sequence
  Description of Artificial Sequence: Synthetic oligonucleotide
acacgccacgaaggcggcc

SEQ ID NO: 1605028 - RNA, 19 nt, Artificial Sequence
  Description of Artificial Sequence: Synthetic oligonucleotide
accacccagcggcaagcgu

SEQ ID NO: 1605029 - RNA, 19 nt, Artificial Sequence
  Description of Artificial Sequence: Synthetic oligonucleotide
aguccgaaguccagcgcga

SEQ ID NO: 1605030 - RNA, 19 nt, Artificial Sequence
  Description of Artificial Sequence: Synthetic oligonucleotide
acgaugcgcaagggcucgc

SEQ ID NO: 1605031 - RNA, 19 nt, Artificial Sequence
  Description of Artificial Sequence: Synthetic oligonucleotide
guucaucugcaaacacgca

SEQ ID NO: 1605032 - RNA, 19 nt, Artificial Sequence
  Description of Artificial Sequence: Synthetic oligonucleotide
ucucgggauggcugauuuu

SEQ ID NO: 1605033 - RNA, 19 nt, Artificial Sequence
  Description of Artificial Sequence: Synthetic oligonucleotide
ggcguguacgaugcgcaag

SEQ ID NO: 1605034 - RNA, 19 nt, Artificial Sequence
  Description of Artificial Sequence: Synthetic oligonucleotide
cagcacgccccgugaacac

SEQ ID NO: 1605035 - RNA, 19 nt, Artificial Sequence
  Description of Artificial Sequence: Synthetic oligonucleotide
agcacggcguggccgcaca

SEQ ID NO: 1605036 - RNA, 19 nt, Artificial Sequence
  Description of Artificial Sequence: Synthetic oligonucleotide
ggcguccucgggucgugcg

SEQ ID NO: 1605037 - RNA, 19 nt, Artificial Sequence
  Description of Artificial Sequence: Synthetic oligonucleotide
ucccucgucuuugcagaac

SEQ ID NO: 1605038 - RNA, 19 nt, Artificial Sequence
  Description of Artificial Sequence: Synthetic oligonucleotide
cacgcagauguugguggug

SEQ ID NO: 1605039 - RNA, 19 nt, Artificial Sequence
  Description of Artificial Sequence: Synthetic oligonucleotide
gccgggacgcuguggaagc

SEQ ID NO: 1605040 - RNA, 19 nt, Artificial Sequence
  Description of Artificial Sequence: Synthetic oligonucleotide
ucgccuccauugucugugu

SEQ ID NO: 1605041 - RNA, 19 nt, Artificial Sequence
  Description of Artificial Sequence: Synthetic oligonucleotide
accccgcgguagaacgugc

SEQ ID NO: 1605042 - RNA, 19 nt, Artificial Sequence
  Description of Artificial Sequence: Synthetic oligonucleotide
gucgaccuguucaucugca

SEQ ID NO: 1605043 - RNA, 19 nt, Artificial Sequence
  Description of Artificial Sequence: Synthetic oligonucleotide
gugcaaggccgcuggcaac

SEQ ID NO: 1605044 - RNA, 19 nt, Artificial Sequence
  Description of Artificial Sequence: Synthetic oligonucleotide
gcaagcgucugcaagcuua

SEQ ID NO: 1605045 - RNA, 19 nt, Artificial Sequence
  Description of Artificial Sequence: Synthetic oligonucleotide
acgaaggccgggacgcugu

SEQ ID NO: 1605046 - RNA, 19 nt, Artificial Sequence
  Description of Artificial Sequence: Synthetic oligonucleotide
guccucgggucgugcgggg

SEQ ID NO: 1605047 - RNA, 19 nt, Artificial Sequence
  Description of Artificial Sequence: Synthetic oligonucleotide
cgcaacuacggccaccuuc

SEQ ID NO: 1605048 - RNA, 19 nt, Artificial Sequence
  Description of Artificial Sequence: Synthetic oligonucleotide
cacgccacgaaggcggcca

SEQ ID NO: 1605049 - RNA, 19 nt, Artificial Sequence
  Description of Artificial Sequence: Synthetic oligonucleotide
caucccucaacgggucauc

SEQ ID NO: 1605050 - RNA, 19 nt, Artificial Sequence
  Description of Artificial Sequence: Synthetic oligonucleotide
caccaggaccgccccguac

SEQ ID NO: 1605051 - RNA, 19 nt, Artificial Sequence
  Description of Artificial Sequence: Synthetic oligonucleotide
auccgggcugucacucccg

SEQ ID NO: 1605052 - RNA, 19 nt, Artificial Sequence
  Description of Artificial Sequence: Synthetic oligonucleotide
gcacgccccgugaacacgg

SEQ ID NO: 1605053 - RNA, 19 nt, Artificial Sequence
  Description of Artificial Sequence: Synthetic oligonucleotide
cggccuagcgccagcacgg

SEQ ID NO: 1605054 - RNA, 19 nt, Artificial Sequence
  Description of Artificial Sequence: Synthetic oligonucleotide
agcgggcaccaguccgaag

SEQ ID NO: 1605055 - RNA, 19 nt, Artificial Sequence
  Description of Artificial Sequence: Synthetic oligonucleotide
uccugucgaccuguucauc

SEQ ID NO: 1605056 - RNA, 19 nt, Artificial Sequence
  Description of Artificial Sequence: Synthetic oligonucleotide
gguggggcuccugucgacc

SEQ ID NO: 1605057 - RNA, 19 nt, Artificial Sequence
  Description of Artificial Sequence: Synthetic oligonucleotide
caccagcccgcacgggcag

SEQ ID NO: 1605058 - RNA, 19 nt, Artificial Sequence
  Description of Artificial Sequence: Synthetic oligonucleotide
gcguccucgggucgugcgg

SEQ ID NO: 1605059 - RNA, 19 nt, Artificial Sequence
  Description of Artificial Sequence: Synthetic oligonucleotide
ccucccggacgccuugugg

SEQ ID NO: 1605060 - RNA, 19 nt, Artificial Sequence
  Description of Artificial Sequence: Synthetic oligonucleotide
ggccucggagccgagacca

SEQ ID NO: 1605061 - RNA, 19 nt, Artificial Sequence
  Description of Artificial Sequence: Synthetic oligonucleotide
gccgccggugugcaugucc

SEQ ID NO: 1605062 - RNA, 19 nt, Artificial Sequence
  Description of Artificial Sequence: Synthetic oligonucleotide
cuacucaagcugaaacauu

SEQ ID NO: 1605063 - RNA, 19 nt, Artificial Sequence
  Description of Artificial Sequence: Synthetic oligonucleotide
caugucccgguggccgcgg

SEQ ID NO: 1605064 - RNA, 19 nt, Artificial Sequence
  Description of Artificial Sequence: Synthetic oligonucleotide
gaagcgcacaggaccgcaa

SEQ ID NO: 1605065 - RNA, 19 nt, Artificial Sequence
  Description of Artificial Sequence: Synthetic oligonucleotide
caacuacggccaccuucac

SEQ ID NO: 1605066 - RNA, 19 nt, Artificial Sequence
  Description of Artificial Sequence: Synthetic oligonucleotide
accuccggacagccggcgu

SEQ ID NO: 1605067 - RNA, 19 nt, Artificial Sequence
  Description of Artificial Sequence: Synthetic oligonucleotide
gcaauccgggcugucacuc

SEQ ID NO: 1605068 - RNA, 19 nt, Artificial Sequence
  Description of Artificial Sequence: Synthetic oligonucleotide
gcacagcggugcuuucucc

SEQ ID NO: 1605069 - RNA, 19 nt, Artificial Sequence
  Description of Artificial Sequence: Synthetic oligonucleotide
cggacagccggcguguacg

SEQ ID NO: 1605070 - RNA, 19 nt, Artificial Sequence
  Description of Artificial Sequence: Synthetic oligonucleotide
caguugcacugcuuuugaa

SEQ ID NO: 1605071 - RNA, 19 nt, Artificial Sequence
  Description of Artificial Sequence: Synthetic oligonucleotide
cacgggcaguggauguuga

SEQ ID NO: 1605072 - RNA, 19 nt, Artificial Sequence
  Description of Artificial Sequence: Synthetic oligonucleotide
ccaguccgaaguccagcgc

SEQ ID NO: 1605073 - RNA, 19 nt, Artificial Sequence
  Description of Artificial Sequence: Synthetic oligonucleotide
caccauaugcaauguccau

SEQ ID NO: 1605074 - RNA, 19 nt, Artificial Sequence
  Description of Artificial Sequence: Synthetic oligonucleotide
ugggccucccggacgccuu

SEQ ID NO: 1605075 - RNA, 19 nt, Artificial Sequence
  Description of Artificial Sequence: Synthetic oligonucleotide
cacauggagcuguagccuu

SEQ ID NO: 1605076 - RNA, 19 nt, Artificial Sequence
  Description of Artificial Sequence: Synthetic oligonucleotide
ccgcgguagaacgugcaag

SEQ ID NO: 1605077 - RNA, 19 nt, Artificial Sequence
  Description of Artificial Sequence: Synthetic oligonucleotide
agccggcguguacgaugcg

SEQ ID NO: 1605078 - RNA, 19 nt, Artificial Sequence
  Description of Artificial Sequence: Synthetic oligonucleotide
ccucgucuuugcagaacac

SEQ ID NO: 1605079 - RNA, 19 nt, Artificial Sequence
  Description of Artificial Sequence: Synthetic oligonucleotide
gcucgcuccgcaccaggac

SEQ ID NO: 1605080 - RNA, 19 nt, Artificial Sequence
  Description of Artificial Sequence: Synthetic oligonucleotide
gccggcguguacgaugcgc

SEQ ID NO: 1605081 - RNA, 19 nt, Artificial Sequence
  Description of Artificial Sequence: Synthetic oligonucleotide
ucccgggaugccgcucagc

SEQ ID NO: 1605082 - RNA, 19 nt, Artificial Sequence
  Description of Artificial Sequence: Synthetic oligonucleotide
gccgcacauagucgaggug

SEQ ID NO: 1605083 - RNA, 19 nt, Artificial Sequence
  Description of Artificial Sequence: Synthetic oligonucleotide
ucccgagccgguggggcuc

SEQ ID NO: 1605084 - RNA, 19 nt, Artificial Sequence
  Description of Artificial Sequence: Synthetic oligonucleotide
guauaacuggaugcugguu

SEQ ID NO: 1605085 - RNA, 19 nt, Artificial Sequence
  Description of Artificial Sequence: Synthetic oligonucleotide
ggaagcgcacaggaccgca

SEQ ID NO: 1605086 - RNA, 19 nt, Artificial Sequence
  Description of Artificial Sequence: Synthetic oligonucleotide
augccccaccauaugcaau

SEQ ID NO: 1605087 - RNA, 19 nt, Artificial Sequence
  Description of Artificial Sequence: Synthetic oligonucleotide
ggggagcgggcaccagucc

SEQ ID NO: 1605088 - RNA, 19 nt, Artificial Sequence
  Description of Artificial Sequence: Synthetic oligonucleotide
cccgggaugccgcucagca

SEQ ID NO: 1605089 - RNA, 19 nt, Artificial Sequence
  Description of Artificial Sequence: Synthetic oligonucleotide
gcgucgccuccauugucug

SEQ ID NO: 1605090 - RNA, 19 nt, Artificial Sequence
  Description of Artificial Sequence: Synthetic oligonucleotide
cucucgggauggcugauuu

SEQ ID NO: 1605091 - RNA, 19 nt, Artificial Sequence
  Description of Artificial Sequence: Synthetic oligonucleotide
ccgcuggcaaccccagggc

SEQ ID NO: 1605092 - RNA, 19 nt, Artificial Sequence
  Description of Artificial Sequence: Synthetic oligonucleotide
ccggcguguacgaugcgca

SEQ ID NO: 1605093 - RNA, 19 nt, Artificial Sequence
  Description of Artificial Sequence: Synthetic oligonucleotide
ccaaaccccgcgguagaac

SEQ ID NO: 1605094 - RNA, 19 nt, Artificial Sequence
  Description of Artificial Sequence: Synthetic oligonucleotide
acucucgggauggcugauu

SEQ ID NO: 1605095 - RNA, 19 nt, Artificial Sequence
  Description of Artificial Sequence: Synthetic oligonucleotide
ccaccaccgacagcgcggg

SEQ ID NO: 1605096 - RNA, 19 nt, Artificial Sequence
  Description of Artificial Sequence: Synthetic oligonucleotide
cuccugucgaccuguucau

SEQ ID NO: 1605097 - RNA, 19 nt, Artificial Sequence
  Description of Artificial Sequence: Synthetic oligonucleotide
ggacagccggcguguacga

SEQ ID NO: 1605098 - RNA, 19 nt, Artificial Sequence
  Description of Artificial Sequence: Synthetic oligonucleotide
cucaacgggucaucgucuu

SEQ ID NO: 1605099 - RNA, 19 nt, Artificial Sequence
  Description of Artificial Sequence: Synthetic oligonucleotide
gggacgcuguggaagcgca

SEQ ID NO: 1605100 - RNA, 19 nt, Artificial Sequence
  Description of Artificial Sequence: Synthetic oligonucleotide
caggaccgccccguacaug

SEQ ID NO: 1605101 - RNA, 19 nt, Artificial Sequence
  Description of Artificial Sequence: Synthetic oligonucleotide
ccaucuguuuaaaaucguu

SEQ ID NO: 1605102 - RNA, 19 nt, Artificial Sequence
  Description of Artificial Sequence: Synthetic oligonucleotide
ggagcgggcaccaguccga

SEQ ID NO: 1605103 - RNA, 19 nt, Artificial Sequence
  Description of Artificial Sequence: Synthetic oligonucleotide
cagagcaauccgggcuguc

SEQ ID NO: 1605104 - RNA, 19 nt, Artificial Sequence
  Description of Artificial Sequence: Synthetic oligonucleotide
cacccagcggcaagcgucu

SEQ ID NO: 1605105 - RNA, 19 nt, Artificial Sequence
  Description of Artificial Sequence: Synthetic oligonucleotide
ccccguacaugucccggug

SEQ ID NO: 1605106 - RNA, 19 nt, Artificial Sequence
  Description of Artificial Sequence: Synthetic oligonucleotide
guagcgccgcuuggccagc

SEQ ID NO: 1605107 - RNA, 19 nt, Artificial Sequence
  Description of Artificial Sequence: Synthetic oligonucleotide
ccaccuccggacagccggc

SEQ ID NO: 1605108 - RNA, 19 nt, Artificial Sequence
  Description of Artificial Sequence: Synthetic oligonucleotide
ccgcacauagucgaggugu

SEQ ID NO: 1605109 - RNA, 19 nt, Artificial Sequence
  Description of Artificial Sequence: Synthetic oligonucleotide
cacaaggucccucgucuuu

SEQ ID NO: 1605110 - RNA, 19 nt, Artificial Sequence
  Description of Artificial Sequence: Synthetic oligonucleotide
agcgccgcuuggccagcaa

SEQ ID NO: 1605111 - RNA, 19 nt, Artificial Sequence
  Description of Artificial Sequence: Synthetic oligonucleotide
cguguacgaugcgcaaggg

SEQ ID NO: 1605112 - RNA, 19 nt, Artificial Sequence
  Description of Artificial Sequence: Synthetic oligonucleotide
gacgcauguagcgccgcuu

SEQ ID NO: 1605113 - RNA, 19 nt, Artificial Sequence
  Description of Artificial Sequence: Synthetic oligonucleotide
ugccagcgucgccuccauu

SEQ ID NO: 1605114 - RNA, 19 nt, Artificial Sequence
  Description of Artificial Sequence: Synthetic oligonucleotide
gagcgggcaccaguccgaa

SEQ ID NO: 1605115 - RNA, 19 nt, Artificial Sequence
  Description of Artificial Sequence: Synthetic oligonucleotide
gcguggccgcacauggagc

SEQ ID NO: 1605116 - RNA, 19 nt, Artificial Sequence
  Description of Artificial Sequence: Synthetic oligonucleotide
cgaccuguucaucugcaaa

SEQ ID NO: 1605117 - RNA, 19 nt, Artificial Sequence
  Description of Artificial Sequence: Synthetic oligonucleotide
gcuuguccugcaacuucca

SEQ ID NO: 1605118 - RNA, 19 nt, Artificial Sequence
  Description of Artificial Sequence: Synthetic oligonucleotide
cguccucgggucgugcggg

SEQ ID NO: 1605119 - RNA, 19 nt, Artificial Sequence
  Description of Artificial Sequence: Synthetic oligonucleotide
cgugcaaggccgcuggcaa

SEQ ID NO: 1605120 - RNA, 19 nt, Artificial Sequence
  Description of Artificial Sequence: Synthetic oligonucleotide
guccgaaguccagcgcgaa

SEQ ID NO: 1605121 - RNA, 19 nt, Artificial Sequence
  Description of Artificial Sequence: Synthetic oligonucleotide
uagcgccgcuuggccagca

SEQ ID NO: 1605122 - RNA, 19 nt, Artificial Sequence
  Description of Artificial Sequence: Synthetic oligonucleotide
ggaccgcaacuacggccac

SEQ ID NO: 1605123 - RNA, 19 nt, Artificial Sequence
  Description of Artificial Sequence: Synthetic oligonucleotide
ccucaacgggucaucgucu

SEQ ID NO: 1605124 - RNA, 19 nt, Artificial Sequence
  Description of Artificial Sequence: Synthetic oligonucleotide
cacgccccgugaacacgga

SEQ ID NO: 1605125 - RNA, 19 nt, Artificial Sequence
  Description of Artificial Sequence: Synthetic oligonucleotide
gcgcacaggaccgcaacua

SEQ ID NO: 1605126 - RNA, 19 nt, Artificial Sequence
  Description of Artificial Sequence: Synthetic oligonucleotide
accagcccgcacgggcagu

SEQ ID NO: 1605127 - RNA, 19 nt, Artificial Sequence
  Description of Artificial Sequence: Synthetic oligonucleotide
cagcacggcguggccgcac

SEQ ID NO: 1605128 - RNA, 19 nt, Artificial Sequence
  Description of Artificial Sequence: Synthetic oligonucleotide
cggagccgagaccacccag

SEQ ID NO: 1605129 - RNA, 19 nt, Artificial Sequence
  Description of Artificial Sequence: Synthetic oligonucleotide
gggccucccggacgccuug

SEQ ID NO: 1605130 - RNA, 19 nt, Artificial Sequence
  Description of Artificial Sequence: Synthetic oligonucleotide
ggacgcuguggaagcgcac

SEQ ID NO: 1605131 - RNA, 19 nt, Artificial Sequence
  Description of Artificial Sequence: Synthetic oligonucleotide
gccucccggacgccuugug

SEQ ID NO: 1605132 - RNA, 19 nt, Artificial Sequence
  Description of Artificial Sequence: Synthetic oligonucleotide
ccgggcugucacucccgag

SEQ ID NO: 1605133 - RNA, 19 nt, Artificial Sequence
  Description of Artificial Sequence: Synthetic oligonucleotide
ccgccccguacaugucccg

SEQ ID NO: 1605134 - RNA, 19 nt, Artificial Sequence
  Description of Artificial Sequence: Synthetic oligonucleotide
cucccgagccgguggggcu

SEQ ID NO: 1605135 - RNA, 19 nt, Artificial Sequence
  Description of Artificial Sequence: Synthetic oligonucleotide
acccagcggcaagcgucug

SEQ ID NO: 1605136 - RNA, 19 nt, Artificial Sequence
  Description of Artificial Sequence: Synthetic oligonucleotide
ccggacagccggcguguac

SEQ ID NO: 1605137 - RNA, 19 nt, Artificial Sequence
  Description of Artificial Sequence: Synthetic oligonucleotide
cgggauggcugauuuuaaa

SEQ ID NO: 1605138 - RNA, 19 nt, Artificial Sequence
  Description of Artificial Sequence: Synthetic oligonucleotide
cgggacgcuguggaagcgc

SEQ ID NO: 1605139 - RNA, 19 nt, Artificial Sequence
  Description of Artificial Sequence: Synthetic oligonucleotide
agccuucguugugcaggaa

SEQ ID NO: 1605140 - RNA, 19 nt, Artificial Sequence
  Description of Artificial Sequence: Synthetic oligonucleotide
ggguggcugccagcgucgc

SEQ ID NO: 1605141 - RNA, 19 nt, Artificial Sequence
  Description of Artificial Sequence: Synthetic oligonucleotide
cugucacucccgagccggu

SEQ ID NO: 1605142 - RNA, 19 nt, Artificial Sequence
  Description of Artificial Sequence: Synthetic oligonucleotide
ccgggacgcuguggaagcg

SEQ ID NO: 1605143 - RNA, 19 nt, Artificial Sequence
  Description of Artificial Sequence: Synthetic oligonucleotide
gcgcgggcguccucggguc

SEQ ID NO: 1605144 - RNA, 19 nt, Artificial Sequence
  Description of Artificial Sequence: Synthetic oligonucleotide
cgccccguacaugucccgg

SEQ ID NO: 1605145 - RNA, 19 nt, Artificial Sequence
  Description of Artificial Sequence: Synthetic oligonucleotide
ccagcccgcacgggcagug

SEQ ID NO: 1605146 - RNA, 19 nt, Artificial Sequence
  Description of Artificial Sequence: Synthetic oligonucleotide
gcgccagcacggcguggcc

SEQ ID NO: 1605147 - RNA, 19 nt, Artificial Sequence
  Description of Artificial Sequence: Synthetic oligonucleotide
cgggcaccaguccgaaguc

SEQ ID NO: 1605148 - RNA, 19 nt, Artificial Sequence
  Description of Artificial Sequence: Synthetic oligonucleotide
gacagccggcguguacgau

SEQ ID NO: 1605149 - RNA, 19 nt, Artificial Sequence
  Description of Artificial Sequence: Synthetic oligonucleotide
cgccgccgcacauagucga

SEQ ID NO: 1605150 - RNA, 19 nt, Artificial Sequence
  Description of Artificial Sequence: Synthetic oligonucleotide
gccaaaccccgcgguagaa

SEQ ID NO: 1605151 - RNA, 19 nt, Artificial Sequence
  Description of Artificial Sequence: Synthetic oligonucleotide
caccagccgccgccgcaca

SEQ ID NO: 1605152 - RNA, 19 nt, Artificial Sequence
  Description of Artificial Sequence: Synthetic oligonucleotide
ccccgcgguagaacgugca

SEQ ID NO: 1605153 - RNA, 19 nt, Artificial Sequence
  Description of Artificial Sequence: Synthetic oligonucleotide
ccgugaggucugcggccag

SEQ ID NO: 1605154 - RNA, 19 nt, Artificial Sequence
  Description of Artificial Sequence: Synthetic oligonucleotide
cccgcgguagaacgugcaa

SEQ ID NO: 1605155 - RNA, 19 nt, Artificial Sequence
  Description of Artificial Sequence: Synthetic oligonucleotide
caccgacagcgcgggcguc

SEQ ID NO: 1605156 - RNA, 19 nt, Artificial Sequence
  Description of Artificial Sequence: Synthetic oligonucleotide
ccccacauguugcuucccu

SEQ ID NO: 1605157 - RNA, 19 nt, Artificial Sequence
  Description of Artificial Sequence: Synthetic oligonucleotide
ggaccgccccguacauguc

SEQ ID NO: 1605158 - RNA, 19 nt, Artificial Sequence
  Description of Artificial Sequence: Synthetic oligonucleotide
cgcgggcguccucgggucg

SEQ ID NO: 1605159 - RNA, 19 nt, Artificial Sequence
  Description of Artificial Sequence: Synthetic oligonucleotide
ggagccaguugcacugcuu

SEQ ID NO: 1605160 - RNA, 19 nt, Artificial Sequence
  Description of Artificial Sequence: Synthetic oligonucleotide
gcccggccaccuccggaca

SEQ ID NO: 1605161 - RNA, 19 nt, Artificial Sequence
  Description of Artificial Sequence: Synthetic oligonucleotide
cccgagccgguggggcucc

SEQ ID NO: 1605162 - RNA, 19 nt, Artificial Sequence
  Description of Artificial Sequence: Synthetic oligonucleotide
cgccaaaccccgcgguaga

SEQ ID NO: 1605163 - RNA, 19 nt, Artificial Sequence
  Description of Artificial Sequence: Synthetic oligonucleotide
cgcggggcucgaacaccag

SEQ ID NO: 1605164 - RNA, 19 nt, Artificial Sequence
  Description of Artificial Sequence: Synthetic oligonucleotide
gccucggagccgagaccac

SEQ ID NO: 1605165 - RNA, 19 nt, Artificial Sequence
  Description of Artificial Sequence: Synthetic oligonucleotide
ggcaagcgucugcaagcuu

SEQ ID NO: 1605166 - RNA, 19 nt, Artificial Sequence
  Description of Artificial Sequence: Synthetic oligonucleotide
agccgccgccgcacauagu

SEQ ID NO: 1605167 - RNA, 19 nt, Artificial Sequence
  Description of Artificial Sequence: Synthetic oligonucleotide
cacucucgggauggcugau

SEQ ID NO: 1605168 - RNA, 19 nt, Artificial Sequence
  Description of Artificial Sequence: Synthetic oligonucleotide
ggugagcgucgggcagcuc

SEQ ID NO: 1605169 - RNA, 19 nt, Artificial Sequence
  Description of Artificial Sequence: Synthetic oligonucleotide
ggacgaaggccgggacgcu

SEQ ID NO: 1605170 - RNA, 19 nt, Artificial Sequence
  Description of Artificial Sequence: Synthetic oligonucleotide
ccaucccucaacgggucau

SEQ ID NO: 1605171 - RNA, 19 nt, Artificial Sequence
  Description of Artificial Sequence: Synthetic oligonucleotide
ccgugaacacggagccagu

SEQ ID NO: 1605172 - RNA, 19 nt, Artificial Sequence
  Description of Artificial Sequence: Synthetic oligonucleotide
cggcguguacgaugcgcaa

SEQ ID NO: 1605173 - RNA, 19 nt, Artificial Sequence
  Description of Artificial Sequence: Synthetic oligonucleotide
ggucugcggccaggacgaa

SEQ ID NO: 1605174 - RNA, 19 nt, Artificial Sequence
  Description of Artificial Sequence: Synthetic oligonucleotide
gcgggcguccucgggucgu

SEQ ID NO: 1605175 - RNA, 19 nt, Artificial Sequence
  Description of Artificial Sequence: Synthetic oligonucleotide
cggcaagcgucugcaagcu

SEQ ID NO: 1605176 - RNA, 19 nt, Artificial Sequence
  Description of Artificial Sequence: Synthetic oligonucleotide
gcccgcacgggcaguggau

SEQ ID NO: 1605177 - RNA, 19 nt, Artificial Sequence
  Description of Artificial Sequence: Synthetic oligonucleotide
cgucgccuccauugucugu

SEQ ID NO: 1605178 - RNA, 19 nt, Artificial Sequence
  Description of Artificial Sequence: Synthetic oligonucleotide
gcacggcguggccgcacau

SEQ ID NO: 1605179 - RNA, 19 nt, Artificial Sequence
  Description of Artificial Sequence: Synthetic oligonucleotide
cgggcguccucgggucgug

SEQ ID NO: 1605180 - RNA, 19 nt, Artificial Sequence
  Description of Artificial Sequence: Synthetic oligonucleotide
ggccucccggacgccuugu

SEQ ID NO: 1605181 - RNA, 19 nt, Artificial Sequence
  Description of Artificial Sequence: Synthetic oligonucleotide
cgacagcgcgggcguccuc

SEQ ID NO: 1605182 - RNA, 19 nt, Artificial Sequence
  Description of Artificial Sequence: Synthetic oligonucleotide
ccgacagcgcgggcguccu

SEQ ID NO: 1605183 - RNA, 19 nt, Artificial Sequence
  Description of Artificial Sequence: Synthetic oligonucleotide
gggcuccugucgaccuguu

SEQ ID NO: 1605184 - RNA, 19 nt, Artificial Sequence
  Description of Artificial Sequence: Synthetic oligonucleotide
ccgcaacuacggccaccuu

SEQ ID NO: 1605185 - RNA, 19 nt, Artificial Sequence
  Description of Artificial Sequence: Synthetic oligonucleotide
cgccgccggugugcauguc

SEQ ID NO: 1605186 - RNA, 19 nt, Artificial Sequence
  Description of Artificial Sequence: Synthetic oligonucleotide
ccgagccgguggggcuccu

SEQ ID NO: 1605187 - RNA, 19 nt, Artificial Sequence
  Description of Artificial Sequence: Synthetic oligonucleotide
cgguggccgcggggcucga

SEQ ID NO: 1605188 - RNA, 19 nt, Artificial Sequence
  Description of Artificial Sequence: Synthetic oligonucleotide
aauaucuuccgcuuaaggg

SEQ ID NO: 1605189 - RNA, 19 nt, Artificial Sequence
  Description of Artificial Sequence: Synthetic oligonucleotide
aauguugucauucagacaa

SEQ ID NO: 1605190 - RNA, 19 nt, Artificial Sequence
  Description of Artificial Sequence: Synthetic oligonucleotide
aagaaaacgguuccgauac

SEQ ID NO: 1605191 - RNA, 19 nt, Artificial Sequence
  Description of Artificial Sequence: Synthetic oligonucleotide
aauccugcaagcuuaaagg

SEQ ID NO: 1605192 - RNA, 19 nt, Artificial Sequence
  Description of Artificial Sequence: Synthetic oligonucleotide
auaucuuccgcuuaagggc

SEQ ID NO: 1605193 - RNA, 19 nt, Artificial Sequence
  Description of Artificial Sequence: Synthetic oligonucleotide
aaagauaucugucagaauu

SEQ ID NO: 1605194 - RNA, 19 nt, Artificial Sequence
  Description of Artificial Sequence: Synthetic oligonucleotide
auuaacauguguuccaaac

SEQ ID NO: 1605195 - RNA, 19 nt, Artificial Sequence
  Description of Artificial Sequence: Synthetic oligonucleotide
acaugagaaacauugguac

SEQ ID NO: 1605196 - RNA, 19 nt, Artificial Sequence
  Description of Artificial Sequence: Synthetic oligonucleotide
guacgaaucauuuuaaaag

SEQ ID NO: 1605197 - RNA, 19 nt, Artificial Sequence
  Description of Artificial Sequence: Synthetic oligonucleotide
aaaugugugccauuugggg

SEQ ID NO: 1605198 - RNA, 19 nt, Artificial Sequence
  Description of Artificial Sequence: Synthetic oligonucleotide
agugauauuagcaggaagc

SEQ ID NO: 1605199 - RNA, 19 nt, Artificial Sequence
  Description of Artificial Sequence: Synthetic oligonucleotide
aauacuauugaaaucacga

SEQ ID NO: 1605200 - RNA, 19 nt, Artificial Sequence
  Description of Artificial Sequence: Synthetic oligonucleotide
aaucaauguugcuaguacg

SEQ ID NO: 1605201 - RNA, 19 nt, Artificial Sequence
  Description of Artificial Sequence: Synthetic oligonucleotide
auaugaagaaaacgguucc

SEQ ID NO: 1605202 - RNA, 19 nt, Artificial Sequence
  Description of Artificial Sequence: Synthetic oligonucleotide
gucuuuauacgcuuuaugg

SEQ ID NO: 1605203 - RNA, 19 nt, Artificial Sequence
  Description of Artificial Sequence: Synthetic oligonucleotide
gauauuguucaguugagug

SEQ ID NO: 1605204 - RNA, 19 nt, Artificial Sequence
  Description of Artificial Sequence: Synthetic oligonucleotide
aaauaucuuccgcuuaagg

SEQ ID NO: 1605205 - RNA, 19 nt, Artificial Sequence
  Description of Artificial Sequence: Synthetic oligonucleotide
agaucaugaauccugguag

SEQ ID NO: 1605206 - RNA, 19 nt, Artificial Sequence
  Description of Artificial Sequence: Synthetic oligonucleotide
ugggauauuguucaguuga

SEQ ID NO: 1605207 - RNA, 19 nt, Artificial Sequence
  Description of Artificial Sequence: Synthetic oligonucleotide
aguugagugauauuagcag

SEQ ID NO: 1605208 - RNA, 19 nt, Artificial Sequence
  Description of Artificial Sequence: Synthetic oligonucleotide
uguucuugucuuuauacgc

SEQ ID NO: 1605209 - RNA, 19 nt, Artificial Sequence
  Description of Artificial Sequence: Synthetic oligonucleotide
uuaacauguguuccaaacc

SEQ ID NO: 1605210 - RNA, 19 nt, Artificial Sequence
  Description of Artificial Sequence: Synthetic oligonucleotide
augcauaugaagaaaacgg

SEQ ID NO: 1605211 - RNA, 19 nt, Artificial Sequence
  Description of Artificial Sequence: Synthetic oligonucleotide
acuuuuaguugacuggugg

SEQ ID NO: 1605212 - RNA, 19 nt, Artificial Sequence
  Description of Artificial Sequence: Synthetic oligonucleotide
uaacauguguuccaaaccu

SEQ ID NO: 1605213 - RNA, 19 nt, Artificial Sequence
  Description of Artificial Sequence: Synthetic oligonucleotide
auucaaaacgcacucagga

SEQ ID NO: 1605214 - RNA, 19 nt, Artificial Sequence
  Description of Artificial Sequence: Synthetic oligonucleotide
aaagcgauuucuucuucuc

SEQ ID NO: 1605215 - RNA, 19 nt, Artificial Sequence
  Description of Artificial Sequence: Synthetic oligonucleotide
aaaauuaugcugguggccu

SEQ ID NO: 1605216 - RNA, 19 nt, Artificial Sequence
  Description of Artificial Sequence: Synthetic oligonucleotide
aucaaaagauaucugucag

SEQ ID NO: 1605217 - RNA, 19 nt, Artificial Sequence
  Description of Artificial Sequence: Synthetic oligonucleotide
ucggauuucucuaucagac

SEQ ID NO: 1605218 - RNA, 19 nt, Artificial Sequence
  Description of Artificial Sequence: Synthetic oligonucleotide
uuggggaagaauacuauug

SEQ ID NO: 1605219 - RNA, 19 nt, Artificial Sequence
  Description of Artificial Sequence: Synthetic oligonucleotide
cauaugaagaaaacgguuc

SEQ ID NO: 1605220 - RNA, 19 nt, Artificial Sequence
  Description of Artificial Sequence: Synthetic oligonucleotide
aaugugugccauuugggga

SEQ ID NO: 1605221 - RNA, 19 nt, Artificial Sequence
  Description of Artificial Sequence: Synthetic oligonucleotide
ucuuaggcugcagugaugg

SEQ ID NO: 1605222 - RNA, 19 nt, Artificial Sequence
  Description of Artificial Sequence: Synthetic oligonucleotide
aacuugucucgguaugccc

SEQ ID NO: 1605223 - RNA, 19 nt, Artificial Sequence
  Description of Artificial Sequence: Synthetic oligonucleotide
agaaacauugguacgaauc

SEQ ID NO: 1605224 - RNA, 19 nt, Artificial Sequence
  Description of Artificial Sequence: Synthetic oligonucleotide
cauggauucauagaagucc

SEQ ID NO: 1605225 - RNA, 19 nt, Artificial Sequence
  Description of Artificial Sequence: Synthetic oligonucleotide
uuuaugauuguggucaaug

SEQ ID NO: 1605226 - RNA, 19 nt, Artificial Sequence
  Description of Artificial Sequence: Synthetic oligonucleotide
uaaucaauguugcuaguac

SEQ ID NO: 1605227 - RNA, 19 nt, Artificial Sequence
  Description of Artificial Sequence: Synthetic oligonucleotide
ucggcaaauccuuuaaaag

SEQ ID NO: 1605228 - RNA, 19 nt, Artificial Sequence
  Description of Artificial Sequence: Synthetic oligonucleotide
auugguacgaaucauuuua

SEQ ID NO: 1605229 - RNA, 19 nt, Artificial Sequence
  Description of Artificial Sequence: Synthetic oligonucleotide
aaaccugucaaauccugca

SEQ ID NO: 1605230 - RNA, 19 nt, Artificial Sequence
  Description of Artificial Sequence: Synthetic oligonucleotide
caagcuuaaaggcagauca

SEQ ID NO: 1605231 - RNA, 19 nt, Artificial Sequence
  Description of Artificial Sequence: Synthetic oligonucleotide
auugaaaucacgaucaaaa

SEQ ID NO: 1605232 - RNA, 19 nt, Artificial Sequence
  Description of Artificial Sequence: Synthetic oligonucleotide
aaaaugugugccauuuggg

SEQ ID NO: 1605233 - RNA, 19 nt, Artificial Sequence
  Description of Artificial Sequence: Synthetic oligonucleotide
aaacgguuccgauacucuc

SEQ ID NO: 1605234 - RNA, 19 nt, Artificial Sequence
  Description of Artificial Sequence: Synthetic oligonucleotide
uugaaaucacgaucaaaag

SEQ ID NO: 1605235 - RNA, 19 nt, Artificial Sequence
  Description of Artificial Sequence: Synthetic oligonucleotide
aucaauguugcuaguacgc

SEQ ID NO: 1605236 - RNA, 19 nt, Artificial Sequence
  Description of Artificial Sequence: Synthetic oligonucleotide
aaaccuauauuuguucuug

SEQ ID NO: 1605237 - RNA, 19 nt, Artificial Sequence
  Description of Artificial Sequence: Synthetic oligonucleotide
aucugucagaauucaaaac

SEQ ID NO: 1605238 - RNA, 19 nt, Artificial Sequence
  Description of Artificial Sequence: Synthetic oligonucleotide
acgaucaaaagauaucugu

SEQ ID NO: 1605239 - RNA, 19 nt, Artificial Sequence
  Description of Artificial Sequence: Synthetic oligonucleotide
gacaaacaaacuuccuggg

SEQ ID NO: 1605240 - RNA, 19 nt, Artificial Sequence
  Description of Artificial Sequence: Synthetic oligonucleotide
uucaguugagugauauuag

SEQ ID NO: 1605241 - RNA, 19 nt, Artificial Sequence
  Description of Artificial Sequence: Synthetic oligonucleotide
auuuacagcacaaacucag

SEQ ID NO: 1605242 - RNA, 19 nt, Artificial Sequence
  Description of Artificial Sequence: Synthetic oligonucleotide
uugagugauauuagcagga

SEQ ID NO: 1605243 - RNA, 19 nt, Artificial Sequence
  Description of Artificial Sequence: Synthetic oligonucleotide
uccgauacucucuuggcag

SEQ ID NO: 1605244 - RNA, 19 nt, Artificial Sequence
  Description of Artificial Sequence: Synthetic oligonucleotide
aagauaucugucagaauuc

SEQ ID NO: 1605245 - RNA, 19 nt, Artificial Sequence
  Description of Artificial Sequence: Synthetic oligonucleotide
ugugcugauuaauuccagg

SEQ ID NO: 1605246 - RNA, 19 nt, Artificial Sequence
  Description of Artificial Sequence: Synthetic oligonucleotide
ugugagauguucagaagac

SEQ ID NO: 1605247 - RNA, 19 nt, Artificial Sequence
  Description of Artificial Sequence: Synthetic oligonucleotide
ucacgaucaaaagauaucu

SEQ ID NO: 1605248 - RNA, 19 nt, Artificial Sequence
  Description of Artificial Sequence: Synthetic oligonucleotide
uacgcaauggguccaaaac

SEQ ID NO: 1605249 - RNA, 19 nt, Artificial Sequence
  Description of Artificial Sequence: Synthetic oligonucleotide
aauucaaaacgcacucagg

SEQ ID NO: 1605250 - RNA, 19 nt, Artificial Sequence
  Description of Artificial Sequence: Synthetic oligonucleotide
uguguauccuccuccgggg

SEQ ID NO: 1605251 - RNA, 19 nt, Artificial Sequence
  Description of Artificial Sequence: Synthetic oligonucleotide
aagggcaauuaucuguuca

SEQ ID NO: 1605252 - RNA, 19 nt, Artificial Sequence
  Description of Artificial Sequence: Synthetic oligonucleotide
ugucacaucauggugacaa

SEQ ID NO: 1605253 - RNA, 19 nt, Artificial Sequence
  Description of Artificial Sequence: Synthetic oligonucleotide
auggauucauagaaguccc

SEQ ID NO: 1605254 - RNA, 19 nt, Artificial Sequence
  Description of Artificial Sequence: Synthetic oligonucleotide
uaucugucagaauucaaaa

SEQ ID NO: 1605255 - RNA, 19 nt, Artificial Sequence
  Description of Artificial Sequence: Synthetic oligonucleotide
cuuuuaguugacugguggc

SEQ ID NO: 1605256 - RNA, 19 nt, Artificial Sequence
  Description of Artificial Sequence: Synthetic oligonucleotide
uggggaagaauacuauuga

SEQ ID NO: 1605257 - RNA, 19 nt, Artificial Sequence
  Description of Artificial Sequence: Synthetic oligonucleotide
agcauuugcucccaggcug

SEQ ID NO: 1605258 - RNA, 19 nt, Artificial Sequence
  Description of Artificial Sequence: Synthetic oligonucleotide
aaugaaaauuaugcuggug

SEQ ID NO: 1605259 - RNA, 19 nt, Artificial Sequence
  Description of Artificial Sequence: Synthetic oligonucleotide
ugucagaauucaaaacgca

SEQ ID NO: 1605260 - RNA, 19 nt, Artificial Sequence
  Description of Artificial Sequence: Synthetic oligonucleotide
uuaugauuguggucaaugu

SEQ ID NO: 1605261 - RNA, 19 nt, Artificial Sequence
  Description of Artificial Sequence: Synthetic oligonucleotide
gaaaucacgaucaaaagau

SEQ ID NO: 1605262 - RNA, 19 nt, Artificial Sequence
  Description of Artificial Sequence: Synthetic oligonucleotide
ggugacaacccugugaugg

SEQ ID NO: 1605263 - RNA, 19 nt, Artificial Sequence
  Description of Artificial Sequence: Synthetic oligonucleotide
caaaacgcacucaggaagc

SEQ ID NO: 1605264 - RNA, 19 nt, Artificial Sequence
  Description of Artificial Sequence: Synthetic oligonucleotide
uuuuaguugacugguggca

SEQ ID NO: 1605265 - RNA, 19 nt, Artificial Sequence
  Description of Artificial Sequence: Synthetic oligonucleotide
uggacuagcuuccuugugu

SEQ ID NO: 1605266 - RNA, 19 nt, Artificial Sequence
  Description of Artificial Sequence: Synthetic oligonucleotide
uuaagggcaauuaucuguu

SEQ ID NO: 1605267 - RNA, 19 nt, Artificial Sequence
  Description of Artificial Sequence: Synthetic oligonucleotide
uucggcaaauccuuuaaaa

SEQ ID NO: 1605268 - RNA, 19 nt, Artificial Sequence
  Description of Artificial Sequence: Synthetic oligonucleotide
uuaaaagcgauuucuucuu

SEQ ID NO: 1605269 - RNA, 19 nt, Artificial Sequence
  Description of Artificial Sequence: Synthetic oligonucleotide
accuauauuuguucuuguc

SEQ ID NO: 1605270 - RNA, 19 nt, Artificial Sequence
  Description of Artificial Sequence: Synthetic oligonucleotide
uuuaguugacugguggcag

SEQ ID NO: 1605271 - RNA, 19 nt, Artificial Sequence
  Description of Artificial Sequence: Synthetic oligonucleotide
aaucacgaucaaaagauau

SEQ ID NO: 1605272 - RNA, 19 nt, Artificial Sequence
  Description of Artificial Sequence: Synthetic oligonucleotide
uuucaaaccuauauuuguu

SEQ ID NO: 1605273 - RNA, 19 nt, Artificial Sequence
  Description of Artificial Sequence: Synthetic oligonucleotide
guaugggaaacauggauuc

SEQ ID NO: 1605274 - RNA, 19 nt, Artificial Sequence
  Description of Artificial Sequence: Synthetic oligonucleotide
ucucuuggcagcucaaacu

SEQ ID NO: 1605275 - RNA, 19 nt, Artificial Sequence
  Description of Artificial Sequence: Synthetic oligonucleotide
ugucagugaggguucauca

SEQ ID NO: 1605276 - RNA, 19 nt, Artificial Sequence
  Description of Artificial Sequence: Synthetic oligonucleotide
uaugauuguggucaauguu

SEQ ID NO: 1605277 - RNA, 19 nt, Artificial Sequence
  Description of Artificial Sequence: Synthetic oligonucleotide
guaggugauuuucaaauga

SEQ ID NO: 1605278 - RNA, 19 nt, Artificial Sequence
  Description of Artificial Sequence: Synthetic oligonucleotide
ugcuaguacgcaauggguc

SEQ ID NO: 1605279 - RNA, 19 nt, Artificial Sequence
  Description of Artificial Sequence: Synthetic oligonucleotide
gagugauauuagcaggaag

SEQ ID NO: 1605280 - RNA, 19 nt, Artificial Sequence
  Description of Artificial Sequence: Synthetic oligonucleotide
acgaaucauuuuaaaagcg

SEQ ID NO: 1605281 - RNA, 19 nt, Artificial Sequence
  Description of Artificial Sequence: Synthetic oligonucleotide
agggcaauuaucuguucag

SEQ ID NO: 1605282 - RNA, 19 nt, Artificial Sequence
  Description of Artificial Sequence: Synthetic oligonucleotide
gauucauagaagucccuga

SEQ ID NO: 1605283 - RNA, 19 nt, Artificial Sequence
  Description of Artificial Sequence: Synthetic oligonucleotide
uguugcuaguacgcaaugg

SEQ ID NO: 1605284 - RNA, 19 nt, Artificial Sequence
  Description of Artificial Sequence: Synthetic oligonucleotide
uucggauuucucuaucaga

SEQ ID NO: 1605285 - RNA, 19 nt, Artificial Sequence
  Description of Artificial Sequence: Synthetic oligonucleotide
cugguuuacaguuggugac

SEQ ID NO: 1605286 - RNA, 19 nt, Artificial Sequence
  Description of Artificial Sequence: Synthetic oligonucleotide
aguaugcuuccugaguugg

SEQ ID NO: 1605287 - RNA, 19 nt, Artificial Sequence
  Description of Artificial Sequence: Synthetic oligonucleotide
uuuauacgcuuuauggauu

SEQ ID NO: 1605288 - RNA, 19 nt, Artificial Sequence
  Description of Artificial Sequence: Synthetic oligonucleotide
uguucggauuucucuauca

SEQ ID NO: 1605289 - RNA, 19 nt, Artificial Sequence
  Description of Artificial Sequence: Synthetic oligonucleotide
uacgcuuuauggauuuugu

SEQ ID NO: 1605290 - RNA, 19 nt, Artificial Sequence
  Description of Artificial Sequence: Synthetic oligonucleotide
augguaaggugugagaugu

SEQ ID NO: 1605291 - RNA, 19 nt, Artificial Sequence
  Description of Artificial Sequence: Synthetic oligonucleotide
auacuauugaaaucacgau

SEQ ID NO: 1605292 - RNA, 19 nt, Artificial Sequence
  Description of Artificial Sequence: Synthetic oligonucleotide
gguuccgauacucucuugg

SEQ ID NO: 1605293 - RNA, 19 nt, Artificial Sequence
  Description of Artificial Sequence: Synthetic oligonucleotide
uucaaaacgcacucaggaa

SEQ ID NO: 1605294 - RNA, 19 nt, Artificial Sequence
  Description of Artificial Sequence: Synthetic oligonucleotide
aucacgaucaaaagauauc

SEQ ID NO: 1605295 - RNA, 19 nt, Artificial Sequence
  Description of Artificial Sequence: Synthetic oligonucleotide
uguucagaagacgcugagg

SEQ ID NO: 1605296 - RNA, 19 nt, Artificial Sequence
  Description of Artificial Sequence: Synthetic oligonucleotide
cucgguaugcccuccauuc

SEQ ID NO: 1605297 - RNA, 19 nt, Artificial Sequence
  Description of Artificial Sequence: Synthetic oligonucleotide
ugacugguggcagauuggg

SEQ ID NO: 1605298 - RNA, 19 nt, Artificial Sequence
  Description of Artificial Sequence: Synthetic oligonucleotide
agaauacuauugaaaucac

SEQ ID NO: 1605299 - RNA, 19 nt, Artificial Sequence
  Description of Artificial Sequence: Synthetic oligonucleotide
cuaucagacaagacaccag

SEQ ID NO: 1605300 - RNA, 19 nt, Artificial Sequence
  Description of Artificial Sequence: Synthetic oligonucleotide
uuccgauacucucuuggca

SEQ ID NO: 1605301 - RNA, 19 nt, Artificial Sequence
  Description of Artificial Sequence: Synthetic oligonucleotide
aauguugcuaguacgcaau

SEQ ID NO: 1605302 - RNA, 19 nt, Artificial Sequence
  Description of Artificial Sequence: Synthetic oligonucleotide
ugugucacaucauggugac

SEQ ID NO: 1605303 - RNA, 19 nt, Artificial Sequence
  Description of Artificial Sequence: Synthetic oligonucleotide
caaaccugucaaauccugc

SEQ ID NO: 1605304 - RNA, 19 nt, Artificial Sequence
  Description of Artificial Sequence: Synthetic oligonucleotide
aggugugagauguucagaa

SEQ ID NO: 1605305 - RNA, 19 nt, Artificial Sequence
  Description of Artificial Sequence: Synthetic oligonucleotide
ugaugguaaggugugagau

SEQ ID NO: 1605306 - RNA, 19 nt, Artificial Sequence
  Description of Artificial Sequence: Synthetic oligonucleotide
uugcuaguacgcaaugggu

SEQ ID NO: 1605307 - RNA, 19 nt, Artificial Sequence
  Description of Artificial Sequence: Synthetic oligonucleotide
uaauuccagggcaguaggc

SEQ ID NO: 1605308 - RNA, 19 nt, Artificial Sequence
  Description of Artificial Sequence: Synthetic oligonucleotide
ucacaucauggugacaacc

SEQ ID NO: 1605309 - RNA, 19 nt, Artificial Sequence
  Description of Artificial Sequence: Synthetic oligonucleotide
gaagaaaacgguuccgaua

SEQ ID NO: 1605310 - RNA, 19 nt, Artificial Sequence
  Description of Artificial Sequence: Synthetic oligonucleotide
aucguaguaugcuuccuga

SEQ ID NO: 1605311 - RNA, 19 nt, Artificial Sequence
  Description of Artificial Sequence: Synthetic oligonucleotide
cuuaagggcaauuaucugu

SEQ ID NO: 1605312 - RNA, 19 nt, Artificial Sequence
  Description of Artificial Sequence: Synthetic oligonucleotide
caaaagauaucugucagaa

SEQ ID NO: 1605313 - RNA, 19 nt, Artificial Sequence
  Description of Artificial Sequence: Synthetic oligonucleotide
guucggauuucucuaucag

SEQ ID NO: 1605314 - RNA, 19 nt, Artificial Sequence
  Description of Artificial Sequence: Synthetic oligonucleotide
agacuuuuaguugacuggu

SEQ ID NO: 1605315 - RNA, 19 nt, Artificial Sequence
  Description of Artificial Sequence: Synthetic oligonucleotide
auaucugucagaauucaaa

SEQ ID NO: 1605316 - RNA, 19 nt, Artificial Sequence
  Description of Artificial Sequence: Synthetic oligonucleotide
uuauacgcuuuauggauuu

SEQ ID NO: 1605317 - RNA, 19 nt, Artificial Sequence
  Description of Artificial Sequence: Synthetic oligonucleotide
ucaacuugucucgguaugc

SEQ ID NO: 1605318 - RNA, 19 nt, Artificial Sequence
  Description of Artificial Sequence: Synthetic oligonucleotide
agacaagacaccagauugg

SEQ ID NO: 1605319 - RNA, 19 nt, Artificial Sequence
  Description of Artificial Sequence: Synthetic oligonucleotide
guucaguugagugauauua

SEQ ID NO: 1605320 - RNA, 19 nt, Artificial Sequence
  Description of Artificial Sequence: Synthetic oligonucleotide
ggcaucuuuaugauugugg

SEQ ID NO: 1605321 - RNA, 19 nt, Artificial Sequence
  Description of Artificial Sequence: Synthetic oligonucleotide
aaaacgguuccgauacucu

SEQ ID NO: 1605322 - RNA, 19 nt, Artificial Sequence
  Description of Artificial Sequence: Synthetic oligonucleotide
agcauaggcaggagaaucg

SEQ ID NO: 1605323 - RNA, 19 nt, Artificial Sequence
  Description of Artificial Sequence: Synthetic oligonucleotide
uauugaaaucacgaucaaa

SEQ ID NO: 1605324 - RNA, 19 nt, Artificial Sequence
  Description of Artificial Sequence: Synthetic oligonucleotide
aacuucaacuugucucggu

SEQ ID NO: 1605325 - RNA, 19 nt, Artificial Sequence
  Description of Artificial Sequence: Synthetic oligonucleotide
gaaaacgguuccgauacuc

SEQ ID NO: 1605326 - RNA, 19 nt, Artificial Sequence
  Description of Artificial Sequence: Synthetic oligonucleotide
ucguaguaugcuuccugag

SEQ ID NO: 1605327 - RNA, 19 nt, Artificial Sequence
  Description of Artificial Sequence: Synthetic oligonucleotide
gucagaauucaaaacgcac

SEQ ID NO: 1605328 - RNA, 19 nt, Artificial Sequence
  Description of Artificial Sequence: Synthetic oligonucleotide
cagcucaugcauaugaaga

SEQ ID NO: 1605329 - RNA, 19 nt, Artificial Sequence
  Description of Artificial Sequence: Synthetic oligonucleotide
caucauggugacaacccug

SEQ ID NO: 1605330 - RNA, 19 nt, Artificial Sequence
  Description of Artificial Sequence: Synthetic oligonucleotide
uaguaugcuuccugaguug

SEQ ID NO: 1605331 - RNA, 19 nt, Artificial Sequence
  Description of Artificial Sequence: Synthetic oligonucleotide
uccgcuuaagggcaauuau

SEQ ID NO: 1605332 - RNA, 19 nt, Artificial Sequence
  Description of Artificial Sequence: Synthetic oligonucleotide
aaccugucaaauccugcaa

SEQ ID NO: 1605333 - RNA, 19 nt, Artificial Sequence
  Description of Artificial Sequence: Synthetic oligonucleotide
cuuuauacgcuuuauggau

SEQ ID NO: 1605334 - RNA, 19 nt, Artificial Sequence
  Description of Artificial Sequence: Synthetic oligonucleotide
gcuaguacgcaaugggucc

SEQ ID NO: 1605335 - RNA, 19 nt, Artificial Sequence
  Description of Artificial Sequence: Synthetic oligonucleotide
uuaguugacugguggcaga

SEQ ID NO: 1605336 - RNA, 19 nt, Artificial Sequence
  Description of Artificial Sequence: Synthetic oligonucleotide
auguucagaagacgcugag

SEQ ID NO: 1605337 - RNA, 19 nt, Artificial Sequence
  Description of Artificial Sequence: Synthetic oligonucleotide
aacauugguacgaaucauu

SEQ ID NO: 1605338 - RNA, 19 nt, Artificial Sequence
  Description of Artificial Sequence: Synthetic oligonucleotide
cauagaagucccugagcac

SEQ ID NO: 1605339 - RNA, 19 nt, Artificial Sequence
  Description of Artificial Sequence: Synthetic oligonucleotide
guuccgauacucucuuggc

SEQ ID NO: 1605340 - RNA, 19 nt, Artificial Sequence
  Description of Artificial Sequence: Synthetic oligonucleotide
auacgcuuuauggauuuug

SEQ ID NO: 1605341 - RNA, 19 nt, Artificial Sequence
  Description of Artificial Sequence: Synthetic oligonucleotide
caggagaaucgcuagguca

SEQ ID NO: 1605342 - RNA, 19 nt, Artificial Sequence
  Description of Artificial Sequence: Synthetic oligonucleotide
guaucuacuucaucaaaua

SEQ ID NO: 1605343 - RNA, 19 nt, Artificial Sequence
  Description of Artificial Sequence: Synthetic oligonucleotide
agugugcugauuaauucca

SEQ ID NO: 1605344 - RNA, 19 nt, Artificial Sequence
  Description of Artificial Sequence: Synthetic oligonucleotide
ucuacacccugauucgauc

SEQ ID NO: 1605345 - RNA, 19 nt, Artificial Sequence
  Description of Artificial Sequence: Synthetic oligonucleotide
cacgaucaaaagauaucug

SEQ ID NO: 1605346 - RNA, 19 nt, Artificial Sequence
  Description of Artificial Sequence: Synthetic oligonucleotide
aacgguuccgauacucucu

SEQ ID NO: 1605347 - RNA, 19 nt, Artificial Sequence
  Description of Artificial Sequence: Synthetic oligonucleotide
ugauauuagcaggaagcau

SEQ ID NO: 1605348 - RNA, 19 nt, Artificial Sequence
  Description of Artificial Sequence: Synthetic oligonucleotide
ggugacaagacuuuuaguu

SEQ ID NO: 1605349 - RNA, 19 nt, Artificial Sequence
  Description of Artificial Sequence: Synthetic oligonucleotide
uuguucaguugagugauau

SEQ ID NO: 1605350 - RNA, 19 nt, Artificial Sequence
  Description of Artificial Sequence: Synthetic oligonucleotide
gguaggugauuuucaaaug

SEQ ID NO: 1605351 - RNA, 19 nt, Artificial Sequence
  Description of Artificial Sequence: Synthetic oligonucleotide
cuuguguauccuccuccgg

SEQ ID NO: 1605352 - RNA, 19 nt, Artificial Sequence
  Description of Artificial Sequence: Synthetic oligonucleotide
cauuuggggaagaauacua

SEQ ID NO: 1605353 - RNA, 19 nt, Artificial Sequence
  Description of Artificial Sequence: Synthetic oligonucleotide
aaauuaugcugguggccuu

SEQ ID NO: 1605354 - RNA, 19 nt, Artificial Sequence
  Description of Artificial Sequence: Synthetic oligonucleotide
aauggguccaaaacuucaa

SEQ ID NO: 1605355 - RNA, 19 nt, Artificial Sequence
  Description of Artificial Sequence: Synthetic oligonucleotide
uucuacacccugauucgau

SEQ ID NO: 1605356 - RNA, 19 nt, Artificial Sequence
  Description of Artificial Sequence: Synthetic oligonucleotide
agaauucaaaacgcacuca

SEQ ID NO: 1605357 - RNA, 19 nt, Artificial Sequence
  Description of Artificial Sequence: Synthetic oligonucleotide
aaaccggcagccugucagu

SEQ ID NO: 1605358 - RNA, 19 nt, Artificial Sequence
  Description of Artificial Sequence: Synthetic oligonucleotide
ggcagcucaaacugggaag

SEQ ID NO: 1605359 - RNA, 19 nt, Artificial Sequence
  Description of Artificial Sequence: Synthetic oligonucleotide
aguguucggauuucucuau

SEQ ID NO: 1605360 - RNA, 19 nt, Artificial Sequence
  Description of Artificial Sequence: Synthetic oligonucleotide
gagaaucgcuaggucaaag

SEQ ID NO: 1605361 - RNA, 19 nt, Artificial Sequence
  Description of Artificial Sequence: Synthetic oligonucleotide
ugguacgaaucauuuuaaa

SEQ ID NO: 1605362 - RNA, 19 nt, Artificial Sequence
  Description of Artificial Sequence: Synthetic oligonucleotide
gugauauuagcaggaagca

SEQ ID NO: 1605363 - RNA, 19 nt, Artificial Sequence
  Description of Artificial Sequence: Synthetic oligonucleotide
caccagauuggucuguauc

SEQ ID NO: 1605364 - RNA, 19 nt, Artificial Sequence
  Description of Artificial Sequence: Synthetic oligonucleotide
acaacccugugaugguaag

SEQ ID NO: 1605365 - RNA, 19 nt, Artificial Sequence
  Description of Artificial Sequence: Synthetic oligonucleotide
cugaguuggugggauauug

SEQ ID NO: 1605366 - RNA, 19 nt, Artificial Sequence
  Description of Artificial Sequence: Synthetic oligonucleotide
ggcaauuaucuguucagca

SEQ ID NO: 1605367 - RNA, 19 nt, Artificial Sequence
  Description of Artificial Sequence: Synthetic oligonucleotide
uucuuaggcugcagugaug

SEQ ID NO: 1605368 - RNA, 19 nt, Artificial Sequence
  Description of Artificial Sequence: Synthetic oligonucleotide
auguugcuaguacgcaaug

SEQ ID NO: 1605369 - RNA, 19 nt, Artificial Sequence
  Description of Artificial Sequence: Synthetic oligonucleotide
uggugacaagacuuuuagu

SEQ ID NO: 1605370 - RNA, 19 nt, Artificial Sequence
  Description of Artificial Sequence: Synthetic oligonucleotide
gcagcucaugcauaugaag

SEQ ID NO: 1605371 - RNA, 19 nt, Artificial Sequence
  Description of Artificial Sequence: Synthetic oligonucleotide
ugagugauauuagcaggaa

SEQ ID NO: 1605372 - RNA, 19 nt, Artificial Sequence
  Description of Artificial Sequence: Synthetic oligonucleotide
aacgcacucaggaagcaua

SEQ ID NO: 1605373 - RNA, 19 nt, Artificial Sequence
  Description of Artificial Sequence: Synthetic oligonucleotide
gugugucacaucaugguga

SEQ ID NO: 1605374 - RNA, 19 nt, Artificial Sequence
  Description of Artificial Sequence: Synthetic oligonucleotide
aaaucacgaucaaaagaua

SEQ ID NO: 1605375 - RNA, 19 nt, Artificial Sequence
  Description of Artificial Sequence: Synthetic oligonucleotide
agauuggucuguaucuacu

SEQ ID NO: 1605376 - RNA, 19 nt, Artificial Sequence
  Description of Artificial Sequence: Synthetic oligonucleotide
ggauucauagaagucccug

SEQ ID NO: 1605377 - RNA, 19 nt, Artificial Sequence
  Description of Artificial Sequence: Synthetic oligonucleotide
aucgcuaggucaaagccaa

SEQ ID NO: 1605378 - RNA, 19 nt, Artificial Sequence
  Description of Artificial Sequence: Synthetic oligonucleotide
gacaagacuuuuaguugac

SEQ ID NO: 1605379 - RNA, 19 nt, Artificial Sequence
  Description of Artificial Sequence: Synthetic oligonucleotide
aauuaugcugguggccuuu

SEQ ID NO: 1605380 - RNA, 19 nt, Artificial Sequence
  Description of Artificial Sequence: Synthetic oligonucleotide
guaguaugcuuccugaguu

SEQ ID NO: 1605381 - RNA, 19 nt, Artificial Sequence
  Description of Artificial Sequence: Synthetic oligonucleotide
guaaggugugagauguuca

SEQ ID NO: 1605382 - RNA, 19 nt, Artificial Sequence
  Description of Artificial Sequence: Synthetic oligonucleotide
aggagaaucgcuaggucaa

SEQ ID NO: 1605383 - RNA, 19 nt, Artificial Sequence
  Description of Artificial Sequence: Synthetic oligonucleotide
ugauucgaucuggacuagc

SEQ ID NO: 1605384 - RNA, 19 nt, Artificial Sequence
  Description of Artificial Sequence: Synthetic oligonucleotide
cuugucucgguaugcccuc

SEQ ID NO: 1605385 - RNA, 19 nt, Artificial Sequence
  Description of Artificial Sequence: Synthetic oligonucleotide
caauguugcuaguacgcaa

SEQ ID NO: 1605386 - RNA, 19 nt, Artificial Sequence
  Description of Artificial Sequence: Synthetic oligonucleotide
gugaugguaaggugugaga

SEQ ID NO: 1605387 - RNA, 19 nt, Artificial Sequence
  Description of Artificial Sequence: Synthetic oligonucleotide
acaagacaccagauugguc

SEQ ID NO: 1605388 - RNA, 19 nt, Artificial Sequence
  Description of Artificial Sequence: Synthetic oligonucleotide
ccuuguguauccuccuccg

SEQ ID NO: 1605389 - RNA, 19 nt, Artificial Sequence
  Description of Artificial Sequence: Synthetic oligonucleotide
acuggccaaccacaugaga

SEQ ID NO: 1605390 - RNA, 19 nt, Artificial Sequence
  Description of Artificial Sequence: Synthetic oligonucleotide
uccugaguuggugggauau

SEQ ID NO: 1605391 - RNA, 19 nt, Artificial Sequence
  Description of Artificial Sequence: Synthetic oligonucleotide
ggcaaauccuuuaaaagua

SEQ ID NO: 1605392 - RNA, 19 nt, Artificial Sequence
  Description of Artificial Sequence: Synthetic oligonucleotide
gggaucguaguaugcuucc

SEQ ID NO: 1605393 - RNA, 19 nt, Artificial Sequence
  Description of Artificial Sequence: Synthetic oligonucleotide
cugggaagguaugggaaac

SEQ ID NO: 1605394 - RNA, 19 nt, Artificial Sequence
  Description of Artificial Sequence: Synthetic oligonucleotide
gcuuaagggcaauuaucug

SEQ ID NO: 1605395 - RNA, 19 nt, Artificial Sequence
  Description of Artificial Sequence: Synthetic oligonucleotide
uaagggcaauuaucuguuc

SEQ ID NO: 1605396 - RNA, 19 nt, Artificial Sequence
  Description of Artificial Sequence: Synthetic oligonucleotide
ggaagcauaggcaggagaa

SEQ ID NO: 1605397 - RNA, 19 nt, Artificial Sequence
  Description of Artificial Sequence: Synthetic oligonucleotide
acaagacuuuuaguugacu

SEQ ID NO: 1605398 - RNA, 19 nt, Artificial Sequence
  Description of Artificial Sequence: Synthetic oligonucleotide
gguaaggugugagauguuc

SEQ ID NO: 1605399 - RNA, 19 nt, Artificial Sequence
  Description of Artificial Sequence: Synthetic oligonucleotide
ccugugaugguaaggugug

SEQ ID NO: 1605400 - RNA, 19 nt, Artificial Sequence
  Description of Artificial Sequence: Synthetic oligonucleotide
agaaaacgguuccgauacu

SEQ ID NO: 1605401 - RNA, 19 nt, Artificial Sequence
  Description of Artificial Sequence: Synthetic oligonucleotide
gacaagacaccagauuggu

SEQ ID NO: 1605402 - RNA, 19 nt, Artificial Sequence
  Description of Artificial Sequence: Synthetic oligonucleotide
ccagugugcugauuaauuc

SEQ ID NO: 1605403 - RNA, 19 nt, Artificial Sequence
  Description of Artificial Sequence: Synthetic oligonucleotide
ugugugccauuuggggaag

SEQ ID NO: 1605404 - RNA, 19 nt, Artificial Sequence
  Description of Artificial Sequence: Synthetic oligonucleotide
acgcuuuauggauuuuguu

SEQ ID NO: 1605405 - RNA, 19 nt, Artificial Sequence
  Description of Artificial Sequence: Synthetic oligonucleotide
ccugauucgaucuggacua

SEQ ID NO: 1605406 - RNA, 19 nt, Artificial Sequence
  Description of Artificial Sequence: Synthetic oligonucleotide
agggcaguaggcucuucau

SEQ ID NO: 1605407 - RNA, 19 nt, Artificial Sequence
  Description of Artificial Sequence: Synthetic oligonucleotide
gcugacagguccuucggca

SEQ ID NO: 1605408 - RNA, 19 nt, Artificial Sequence
  Description of Artificial Sequence: Synthetic oligonucleotide
uuccgcuuaagggcaauua

SEQ ID NO: 1605409 - RNA, 19 nt, Artificial Sequence
  Description of Artificial Sequence: Synthetic oligonucleotide
aaccggcagccugucagug

SEQ ID NO: 1605410 - RNA, 19 nt, Artificial Sequence
  Description of Artificial Sequence: Synthetic oligonucleotide
gucacaucauggugacaac

SEQ ID NO: 1605411 - RNA, 19 nt, Artificial Sequence
  Description of Artificial Sequence: Synthetic oligonucleotide
ggccuuuggaaugcaaagc

SEQ ID NO: 1605412 - RNA, 19 nt, Artificial Sequence
  Description of Artificial Sequence: Synthetic oligonucleotide
gagauguucagaagacgcu

SEQ ID NO: 1605413 - RNA, 19 nt, Artificial Sequence
  Description of Artificial Sequence: Synthetic oligonucleotide
cacgcugucccuucuucca

SEQ ID NO: 1605414 - RNA, 19 nt, Artificial Sequence
  Description of Artificial Sequence: Synthetic oligonucleotide
acgguuccgauacucucuu

SEQ ID NO: 1605415 - RNA, 19 nt, Artificial Sequence
  Description of Artificial Sequence: Synthetic oligonucleotide
guacgcaauggguccaaaa

SEQ ID NO: 1605416 - RNA, 19 nt, Artificial Sequence
  Description of Artificial Sequence: Synthetic oligonucleotide
aucagacaagacaccagau

SEQ ID NO: 1605417 - RNA, 19 nt, Artificial Sequence
  Description of Artificial Sequence: Synthetic oligonucleotide
gacaacccugugaugguaa

SEQ ID NO: 1605418 - RNA, 19 nt, Artificial Sequence
  Description of Artificial Sequence: Synthetic oligonucleotide
cagugauggugguaggaaa

SEQ ID NO: 1605419 - RNA, 19 nt, Artificial Sequence
  Description of Artificial Sequence: Synthetic oligonucleotide
ugguagccaguguucggau

SEQ ID NO: 1605420 - RNA, 19 nt, Artificial Sequence
  Description of Artificial Sequence: Synthetic oligonucleotide
guuggugacaagacuuuua

SEQ ID NO: 1605421 - RNA, 19 nt, Artificial Sequence
  Description of Artificial Sequence: Synthetic oligonucleotide
guguucggauuucucuauc

SEQ ID NO: 1605422 - RNA, 19 nt, Artificial Sequence
  Description of Artificial Sequence: Synthetic oligonucleotide
guucaguuacugguuuaca

SEQ ID NO: 1605423 - RNA, 19 nt, Artificial Sequence
  Description of Artificial Sequence: Synthetic oligonucleotide
gggcaauuaucuguucagc

SEQ ID NO: 1605424 - RNA, 19 nt, Artificial Sequence
  Description of Artificial Sequence: Synthetic oligonucleotide
ccgcuuaagggcaauuauc

SEQ ID NO: 1605425 - RNA, 19 nt, Artificial Sequence
  Description of Artificial Sequence: Synthetic oligonucleotide
aggaaaccggcagccuguc

SEQ ID NO: 1605426 - RNA, 19 nt, Artificial Sequence
  Description of Artificial Sequence: Synthetic oligonucleotide
ugacaacccugugauggua

SEQ ID NO: 1605427 - RNA, 19 nt, Artificial Sequence
  Description of Artificial Sequence: Synthetic oligonucleotide
cuacacccugauucgaucu

SEQ ID NO: 1605428 - RNA, 19 nt, Artificial Sequence
  Description of Artificial Sequence: Synthetic oligonucleotide
agcucaaacugggaaggua

SEQ ID NO: 1605429 - RNA, 19 nt, Artificial Sequence
  Description of Artificial Sequence: Synthetic oligonucleotide
gagaaacauugguacgaau

SEQ ID NO: 1605430 - RNA, 19 nt, Artificial Sequence
  Description of Artificial Sequence: Synthetic oligonucleotide
cuucuuaggcugcagugau

SEQ ID NO: 1605431 - RNA, 19 nt, Artificial Sequence
  Description of Artificial Sequence: Synthetic oligonucleotide
cugauucgaucuggacuag

SEQ ID NO: 1605432 - RNA, 19 nt, Artificial Sequence
  Description of Artificial Sequence: Synthetic oligonucleotide
gcuucuuaggcugcaguga

SEQ ID NO: 1605433 - RNA, 19 nt, Artificial Sequence
  Description of Artificial Sequence: Synthetic oligonucleotide
ccgauacucucuuggcagc

SEQ ID NO: 1605434 - RNA, 19 nt, Artificial Sequence
  Description of Artificial Sequence: Synthetic oligonucleotide
cuucaacuugucucgguau

SEQ ID NO: 1605435 - RNA, 19 nt, Artificial Sequence
  Description of Artificial Sequence: Synthetic oligonucleotide
cuaguacgcaaugggucca

SEQ ID NO: 1605436 - RNA, 19 nt, Artificial Sequence
  Description of Artificial Sequence: Synthetic oligonucleotide
uauacgcuuuauggauuuu

SEQ ID NO: 1605437 - RNA, 19 nt, Artificial Sequence
  Description of Artificial Sequence: Synthetic oligonucleotide
gguaugcccuccauuccug

SEQ ID NO: 1605438 - RNA, 19 nt, Artificial Sequence
  Description of Artificial Sequence: Synthetic oligonucleotide
gguaugggaaacauggauu

SEQ ID NO: 1605439 - RNA, 19 nt, Artificial Sequence
  Description of Artificial Sequence: Synthetic oligonucleotide
ggcagauugggaucguagu

SEQ ID NO: 1605440 - RNA, 19 nt, Artificial Sequence
  Description of Artificial Sequence: Synthetic oligonucleotide
uaguacgcaauggguccaa

SEQ ID NO: 1605441 - RNA, 19 nt, Artificial Sequence
  Description of Artificial Sequence: Synthetic oligonucleotide
gcgauuucuucuucuccca

SEQ ID NO: 1605442 - RNA, 19 nt, Artificial Sequence
  Description of Artificial Sequence: Synthetic oligonucleotide
agacaccagauuggucugu

SEQ ID NO: 1605443 - RNA, 19 nt, Artificial Sequence
  Description of Artificial Sequence: Synthetic oligonucleotide
ccggggaaauaucuuccgc

SEQ ID NO: 1605444 - RNA, 19 nt, Artificial Sequence
  Description of Artificial Sequence: Synthetic oligonucleotide
cuucuacacccugauucga

SEQ ID NO: 1605445 - RNA, 19 nt, Artificial Sequence
  Description of Artificial Sequence: Synthetic oligonucleotide
ugguaaggugugagauguu

SEQ ID NO: 1605446 - RNA, 19 nt, Artificial Sequence
  Description of Artificial Sequence: Synthetic oligonucleotide
gcacgcugucccuucuucc

SEQ ID NO: 1605447 - RNA, 19 nt, Artificial Sequence
  Description of Artificial Sequence: Synthetic oligonucleotide
ggacuagcuuccuugugua

SEQ ID NO: 1605448 - RNA, 19 nt, Artificial Sequence
  Description of Artificial Sequence: Synthetic oligonucleotide
uuccugaguuggugggaua

SEQ ID NO: 1605449 - RNA, 19 nt, Artificial Sequence
  Description of Artificial Sequence: Synthetic oligonucleotide
acgcugagguaggugauuu

SEQ ID NO: 1605450 - RNA, 19 nt, Artificial Sequence
  Description of Artificial Sequence: Synthetic oligonucleotide
gcaagcuuaaaggcagauc

SEQ ID NO: 1605451 - RNA, 19 nt, Artificial Sequence
  Description of Artificial Sequence: Synthetic oligonucleotide
gaagcauaggcaggagaau

SEQ ID NO: 1605452 - RNA, 19 nt, Artificial Sequence
  Description of Artificial Sequence: Synthetic oligonucleotide
gucugcacgcugucccuuc

SEQ ID NO: 1605453 - RNA, 19 nt, Artificial Sequence
  Description of Artificial Sequence: Synthetic oligonucleotide
gacaccagauuggucugua

SEQ ID NO: 1605454 - RNA, 19 nt, Artificial Sequence
  Description of Artificial Sequence: Synthetic oligonucleotide
gugacaacccugugauggu

SEQ ID NO: 1605455 - RNA, 19 nt, Artificial Sequence
  Description of Artificial Sequence: Synthetic oligonucleotide
cauugguacgaaucauuuu

SEQ ID NO: 1605456 - RNA, 19 nt, Artificial Sequence
  Description of Artificial Sequence: Synthetic oligonucleotide
gcucaugcauaugaagaaa

SEQ ID NO: 1605457 - RNA, 19 nt, Artificial Sequence
  Description of Artificial Sequence: Synthetic oligonucleotide
cuccuccggggaaauaucu

SEQ ID NO: 1605458 - RNA, 19 nt, Artificial Sequence
  Description of Artificial Sequence: Synthetic oligonucleotide
cgcuuaagggcaauuaucu

SEQ ID NO: 1605459 - RNA, 19 nt, Artificial Sequence
  Description of Artificial Sequence: Synthetic oligonucleotide
gcauaugaagaaaacgguu

SEQ ID NO: 1605460 - RNA, 19 nt, Artificial Sequence
  Description of Artificial Sequence: Synthetic oligonucleotide
cggcaaauccuuuaaaagu

SEQ ID NO: 1605461 - RNA, 19 nt, Artificial Sequence
  Description of Artificial Sequence: Synthetic oligonucleotide
ugucugcacgcugucccuu

SEQ ID NO: 1605462 - RNA, 19 nt, Artificial Sequence
  Description of Artificial Sequence: Synthetic oligonucleotide
gggcaucuuuaugauugug

SEQ ID NO: 1605463 - RNA, 19 nt, Artificial Sequence
  Description of Artificial Sequence: Synthetic oligonucleotide
ucgcuaggucaaagccaaa

SEQ ID NO: 1605464 - RNA, 19 nt, Artificial Sequence
  Description of Artificial Sequence: Synthetic oligonucleotide
cagccugucagugaggguu

SEQ ID NO: 1605465 - RNA, 19 nt, Artificial Sequence
  Description of Artificial Sequence: Synthetic oligonucleotide
ccaacuggccaaccacaug

SEQ ID NO: 1605466 - RNA, 19 nt, Artificial Sequence
  Description of Artificial Sequence: Synthetic oligonucleotide
cccugauucgaucuggacu

SEQ ID NO: 1605467 - RNA, 19 nt, Artificial Sequence
  Description of Artificial Sequence: Synthetic oligonucleotide
gcucaaacugggaagguau

SEQ ID NO: 1605468 - RNA, 19 nt, Artificial Sequence
  Description of Artificial Sequence: Synthetic oligonucleotide
ggggaaauaucuuccgcuu

SEQ ID NO: 1605469 - RNA, 19 nt, Artificial Sequence
  Description of Artificial Sequence: Synthetic oligonucleotide
aguacgcaauggguccaaa

SEQ ID NO: 1605470 - RNA, 19 nt, Artificial Sequence
  Description of Artificial Sequence: Synthetic oligonucleotide
cccugugaugguaaggugu

SEQ ID NO: 1605471 - RNA, 19 nt, Artificial Sequence
  Description of Artificial Sequence: Synthetic oligonucleotide
cagcacaaacucaguauuu

SEQ ID NO: 1605472 - RNA, 19 nt, Artificial Sequence
  Description of Artificial Sequence: Synthetic oligonucleotide
gacagguccuucggcaaau

SEQ ID NO: 1605473 - RNA, 19 nt, Artificial Sequence
  Description of Artificial Sequence: Synthetic oligonucleotide
ggggucccucagcauuugc

SEQ ID NO: 1605474 - RNA, 19 nt, Artificial Sequence
  Description of Artificial Sequence: Synthetic oligonucleotide
ccuccuccggggaaauauc

SEQ ID NO: 1605475 - RNA, 19 nt, Artificial Sequence
  Description of Artificial Sequence: Synthetic oligonucleotide
gcaguaggcucuucaugcu

SEQ ID NO: 1605476 - RNA, 19 nt, Artificial Sequence
  Description of Artificial Sequence: Synthetic oligonucleotide
ccaagcaggcuguguguca

SEQ ID NO: 1605477 - RNA, 19 nt, Artificial Sequence
  Description of Artificial Sequence: Synthetic oligonucleotide
gguccuucggcaaauccuu

SEQ ID NO: 1605478 - RNA, 19 nt, Artificial Sequence
  Description of Artificial Sequence: Synthetic oligonucleotide
gggaagguaugggaaacau

SEQ ID NO: 1605479 - RNA, 19 nt, Artificial Sequence
  Description of Artificial Sequence: Synthetic oligonucleotide
cguaguaugcuuccugagu

SEQ ID NO: 1605480 - RNA, 19 nt, Artificial Sequence
  Description of Artificial Sequence: Synthetic oligonucleotide
gugccauuuggggaagaau

SEQ ID NO: 1605481 - RNA, 19 nt, Artificial Sequence
  Description of Artificial Sequence: Synthetic oligonucleotide
cuuuaugauuguggucaau

SEQ ID NO: 1605482 - RNA, 19 nt, Artificial Sequence
  Description of Artificial Sequence: Synthetic oligonucleotide
ggagaaucgcuaggucaaa

SEQ ID NO: 1605483 - RNA, 19 nt, Artificial Sequence
  Description of Artificial Sequence: Synthetic oligonucleotide
gacgcugagguaggugauu

SEQ ID NO: 1605484 - RNA, 19 nt, Artificial Sequence
  Description of Artificial Sequence: Synthetic oligonucleotide
gucucgguaugcccuccau

SEQ ID NO: 1605485 - RNA, 19 nt, Artificial Sequence
  Description of Artificial Sequence: Synthetic oligonucleotide
ccauuuggggaagaauacu

SEQ ID NO: 1605486 - RNA, 19 nt, Artificial Sequence
  Description of Artificial Sequence: Synthetic oligonucleotide
ccagauuggucuguaucua

SEQ ID NO: 1605487 - RNA, 19 nt, Artificial Sequence
  Description of Artificial Sequence: Synthetic oligonucleotide
ggaucguaguaugcuuccu

SEQ ID NO: 1605488 - RNA, 19 nt, Artificial Sequence
  Description of Artificial Sequence: Synthetic oligonucleotide
cgcuaggucaaagccaaaa

SEQ ID NO: 1605489 - RNA, 19 nt, Artificial Sequence
  Description of Artificial Sequence: Synthetic oligonucleotide
cgguaugcccuccauuccu

SEQ ID NO: 1605490 - RNA, 19 nt, Artificial Sequence
  Description of Artificial Sequence: Synthetic oligonucleotide
cgguuccgauacucucuug

SEQ ID NO: 1605491 - RNA, 19 nt, Artificial Sequence
  Description of Artificial Sequence: Synthetic oligonucleotide
guccuucggcaaauccuuu

SEQ ID NO: 1605492 - RNA, 19 nt, Artificial Sequence
  Description of Artificial Sequence: Synthetic oligonucleotide
cugcacgcugucccuucuu

SEQ ID NO: 1605493 - RNA, 19 nt, Artificial Sequence
  Description of Artificial Sequence: Synthetic oligonucleotide
gguggcagauugggaucgu

SEQ ID NO: 1605494 - RNA, 19 nt, Artificial Sequence
  Description of Artificial Sequence: Synthetic oligonucleotide
cgauacucucuuggcagcu

SEQ ID NO: 1605495 - RNA, 19 nt, Artificial Sequence
  Description of Artificial Sequence: Synthetic oligonucleotide
ccugucagugaggguucau

SEQ ID NO: 1605496 - RNA, 19 nt, Artificial Sequence
  Description of Artificial Sequence: Synthetic oligonucleotide
aagaaagcaaaacugauac

SEQ ID NO: 1605497 - RNA, 19 nt, Artificial Sequence
  Description of Artificial Sequence: Synthetic oligonucleotide
uguaucaucaagaauaaca

SEQ ID NO: 1605498 - RNA, 19 nt, Artificial Sequence
  Description of Artificial Sequence: Synthetic oligonucleotide
aauaguacaaauuucucga

SEQ ID NO: 1605499 - RNA, 19 nt, Artificial Sequence
  Description of Artificial Sequence: Synthetic oligonucleotide
uaaauguaggucuacacgg

SEQ ID NO: 1605500 - RNA, 19 nt, Artificial Sequence
  Description of Artificial Sequence: Synthetic oligonucleotide
agauucaguaucuauacac

SEQ ID NO: 1605501 - RNA, 19 nt, Artificial Sequence
  Description of Artificial Sequence: Synthetic oligonucleotide
ucugacagcacuauagggg

SEQ ID NO: 1605502 - RNA, 19 nt, Artificial Sequence
  Description of Artificial Sequence: Synthetic oligonucleotide
uuauucauggcaaucacca

SEQ ID NO: 1605503 - RNA, 19 nt, Artificial Sequence
  Description of Artificial Sequence: Synthetic oligonucleotide
auaaauguaggucuacacg

SEQ ID NO: 1605504 - RNA, 19 nt, Artificial Sequence
  Description of Artificial Sequence: Synthetic oligonucleotide
aaaaccuggucuuugagca

SEQ ID NO: 1605505 - RNA, 19 nt, Artificial Sequence
  Description of Artificial Sequence: Synthetic oligonucleotide
agagauucaguaucuauac

SEQ ID NO: 1605506 - RNA, 19 nt, Artificial Sequence
  Description of Artificial Sequence: Synthetic oligonucleotide
uacgauugcagcaauacug

SEQ ID NO: 1605507 - RNA, 19 nt, Artificial Sequence
  Description of Artificial Sequence: Synthetic oligonucleotide
auaacagcuucaucaaugc

SEQ ID NO: 1605508 - RNA, 19 nt, Artificial Sequence
  Description of Artificial Sequence: Synthetic oligonucleotide
aaagguaccgagaaaacuc

SEQ ID NO: 1605509 - RNA, 19 nt, Artificial Sequence
  Description of Artificial Sequence: Synthetic oligonucleotide
aaaugaucauuucuucuuc

SEQ ID NO: 1605510 - RNA, 19 nt, Artificial Sequence
  Description of Artificial Sequence: Synthetic oligonucleotide
uaaguauguuccuugcugg

SEQ ID NO: 1605511 - RNA, 19 nt, Artificial Sequence
  Description of Artificial Sequence: Synthetic oligonucleotide
aaucauaggucugucugcc

SEQ ID NO: 1605512 - RNA, 19 nt, Artificial Sequence
  Description of Artificial Sequence: Synthetic oligonucleotide
accgagaaaacucugcacg

SEQ ID NO: 1605513 - RNA, 19 nt, Artificial Sequence
  Description of Artificial Sequence: Synthetic oligonucleotide
uugacuuuuacuuggugcc

SEQ ID NO: 1605514 - RNA, 19 nt, Artificial Sequence
  Description of Artificial Sequence: Synthetic oligonucleotide
ucaguaucuauacacuuug

SEQ ID NO: 1605515 - RNA, 19 nt, Artificial Sequence
  Description of Artificial Sequence: Synthetic oligonucleotide
uguuccuguaaucauaggu

SEQ ID NO: 1605516 - RNA, 19 nt, Artificial Sequence
  Description of Artificial Sequence: Synthetic oligonucleotide
cuugacuuuuacuuggugc

SEQ ID NO: 1605517 - RNA, 19 nt, Artificial Sequence
  Description of Artificial Sequence: Synthetic oligonucleotide
cuaucugacagcacuauag

SEQ ID NO: 1605518 - RNA, 19 nt, Artificial Sequence
  Description of Artificial Sequence: Synthetic oligonucleotide
uacaauacagcauccauaa

SEQ ID NO: 1605519 - RNA, 19 nt, Artificial Sequence
  Description of Artificial Sequence: Synthetic oligonucleotide
uaucugacagcacuauagg

SEQ ID NO: 1605520 - RNA, 19 nt, Artificial Sequence
  Description of Artificial Sequence: Synthetic oligonucleotide
aaucugagcaguuccagga

SEQ ID NO: 1605521 - RNA, 19 nt, Artificial Sequence
  Description of Artificial Sequence: Synthetic oligonucleotide
guaaucauaggucugucug

SEQ ID NO: 1605522 - RNA, 19 nt, Artificial Sequence
  Description of Artificial Sequence: Synthetic oligonucleotide
ucucgaugcuuauucaugg

SEQ ID NO: 1605523 - RNA, 19 nt, Artificial Sequence
  Description of Artificial Sequence: Synthetic oligonucleotide
aguguacaguguuacuucc

SEQ ID NO: 1605524 - RNA, 19 nt, Artificial Sequence
  Description of Artificial Sequence: Synthetic oligonucleotide
auggcaaucaccagcaagc

SEQ ID NO: 1605525 - RNA, 19 nt, Artificial Sequence
  Description of Artificial Sequence: Synthetic oligonucleotide
uucgcuaucugacagcacu

SEQ ID NO: 1605526 - RNA, 19 nt, Artificial Sequence
  Description of Artificial Sequence: Synthetic oligonucleotide
aauaaguauguuccuugcu

SEQ ID NO: 1605527 - RNA, 19 nt, Artificial Sequence
  Description of Artificial Sequence: Synthetic oligonucleotide
uuugcuauagacucugcaa

SEQ ID NO: 1605528 - RNA, 19 nt, Artificial Sequence
  Description of Artificial Sequence: Synthetic oligonucleotide
ucggaagugacacaaggcu

SEQ ID NO: 1605529 - RNA, 19 nt, Artificial Sequence
  Description of Artificial Sequence: Synthetic oligonucleotide
uucuauuccaucuccaauc

SEQ ID NO: 1605530 - RNA, 19 nt, Artificial Sequence
  Description of Artificial Sequence: Synthetic oligonucleotide
aaagcuuucuguauuagau

SEQ ID NO: 1605531 - RNA, 19 nt, Artificial Sequence
  Description of Artificial Sequence: Synthetic oligonucleotide
uccuucauaguguugggcc

SEQ ID NO: 1605532 - RNA, 19 nt, Artificial Sequence
  Description of Artificial Sequence: Synthetic oligonucleotide
uuagaucuguaauuucugc

SEQ ID NO: 1605533 - RNA, 19 nt, Artificial Sequence
  Description of Artificial Sequence: Synthetic oligonucleotide
uuaucccaccacuagacug

SEQ ID NO: 1605534 - RNA, 19 nt, Artificial Sequence
  Description of Artificial Sequence: Synthetic oligonucleotide
uauagacucugcaaagcca

SEQ ID NO: 1605535 - RNA, 19 nt, Artificial Sequence
  Description of Artificial Sequence: Synthetic oligonucleotide
uucacuugacuuuuacuug

SEQ ID NO: 1605536 - RNA, 19 nt, Artificial Sequence
  Description of Artificial Sequence: Synthetic oligonucleotide
cuauagacucugcaaagcc

SEQ ID NO: 1605537 - RNA, 19 nt, Artificial Sequence
  Description of Artificial Sequence: Synthetic oligonucleotide
caagagucgauucagcuuc

SEQ ID NO: 1605538 - RNA, 19 nt, Artificial Sequence
  Description of Artificial Sequence: Synthetic oligonucleotide
uaaucuguuccgaaugaga

SEQ ID NO: 1605539 - RNA, 19 nt, Artificial Sequence
  Description of Artificial Sequence: Synthetic oligonucleotide
ucuacaauacagcauccau

SEQ ID NO: 1605540 - RNA, 19 nt, Artificial Sequence
  Description of Artificial Sequence: Synthetic oligonucleotide
uguauuagaucuguaauuu

SEQ ID NO: 1605541 - RNA, 19 nt, Artificial Sequence
  Description of Artificial Sequence: Synthetic oligonucleotide
aaccuggucuuugagcagc

SEQ ID NO: 1605542 - RNA, 19 nt, Artificial Sequence
  Description of Artificial Sequence: Synthetic oligonucleotide
guuggagguaucaacagag

SEQ ID NO: 1605543 - RNA, 19 nt, Artificial Sequence
  Description of Artificial Sequence: Synthetic oligonucleotide
ucuauuccaucuccaaucu

SEQ ID NO: 1605544 - RNA, 19 nt, Artificial Sequence
  Description of Artificial Sequence: Synthetic oligonucleotide
uccauuuuaaaugcuguga

SEQ ID NO: 1605545 - RNA, 19 nt, Artificial Sequence
  Description of Artificial Sequence: Synthetic oligonucleotide
acaaggcuacgauugcagc

SEQ ID NO: 1605546 - RNA, 19 nt, Artificial Sequence
  Description of Artificial Sequence: Synthetic oligonucleotide
ugcuauagacucugcaaag

SEQ ID NO: 1605547 - RNA, 19 nt, Artificial Sequence
  Description of Artificial Sequence: Synthetic oligonucleotide
acugaauaguacaaauuuc

SEQ ID NO: 1605548 - RNA, 19 nt, Artificial Sequence
  Description of Artificial Sequence: Synthetic oligonucleotide
ucaaaaccuggucuuugag

SEQ ID NO: 1605549 - RNA, 19 nt, Artificial Sequence
  Description of Artificial Sequence: Synthetic oligonucleotide
agcauuaucccaccacuag

SEQ ID NO: 1605550 - RNA, 19 nt, Artificial Sequence
  Description of Artificial Sequence: Synthetic oligonucleotide
agcagcauuaucccaccac

SEQ ID NO: 1605551 - RNA, 19 nt, Artificial Sequence
  Description of Artificial Sequence: Synthetic oligonucleotide
aaccuuuucaccagcaaca

SEQ ID NO: 1605552 - RNA, 19 nt, Artificial Sequence
  Description of Artificial Sequence: Synthetic oligonucleotide
uucggaagugacacaaggc

SEQ ID NO: 1605553 - RNA, 19 nt, Artificial Sequence
  Description of Artificial Sequence: Synthetic oligonucleotide
ucgaugcuuauucauggca

SEQ ID NO: 1605554 - RNA, 19 nt, Artificial Sequence
  Description of Artificial Sequence: Synthetic oligonucleotide
uauugaguuuuggagaaac

SEQ ID NO: 1605555 - RNA, 19 nt, Artificial Sequence
  Description of Artificial Sequence: Synthetic oligonucleotide
aggaguuuucuauuccauc

SEQ ID NO: 1605556 - RNA, 19 nt, Artificial Sequence
  Description of Artificial Sequence: Synthetic oligonucleotide
uagacugaauaguacaaau

SEQ ID NO: 1605557 - RNA, 19 nt, Artificial Sequence
  Description of Artificial Sequence: Synthetic oligonucleotide
ucuucaaggucaccccagg

SEQ ID NO: 1605558 - RNA, 19 nt, Artificial Sequence
  Description of Artificial Sequence: Synthetic oligonucleotide
gaucuguaauuucugcuac

SEQ ID NO: 1605559 - RNA, 19 nt, Artificial Sequence
  Description of Artificial Sequence: Synthetic oligonucleotide
ugcucuauugaguuuugga

SEQ ID NO: 1605560 - RNA, 19 nt, Artificial Sequence
  Description of Artificial Sequence: Synthetic oligonucleotide
ugauuugcuauagacucug

SEQ ID NO: 1605561 - RNA, 19 nt, Artificial Sequence
  Description of Artificial Sequence: Synthetic oligonucleotide
ucuguugcucuauugaguu

SEQ ID NO: 1605562 - RNA, 19 nt, Artificial Sequence
  Description of Artificial Sequence: Synthetic oligonucleotide
aaucuguuccgaaugagau

SEQ ID NO: 1605563 - RNA, 19 nt, Artificial Sequence
  Description of Artificial Sequence: Synthetic oligonucleotide
aggagaucggacugccugc

SEQ ID NO: 1605564 - RNA, 19 nt, Artificial Sequence
  Description of Artificial Sequence: Synthetic oligonucleotide
caucuuuguaucaucaaga

SEQ ID NO: 1605565 - RNA, 19 nt, Artificial Sequence
  Description of Artificial Sequence: Synthetic oligonucleotide
gcucuauugaguuuuggag

SEQ ID NO: 1605566 - RNA, 19 nt, Artificial Sequence
  Description of Artificial Sequence: Synthetic oligonucleotide
aucugccaaaccuuuucac

SEQ ID NO: 1605567 - RNA, 19 nt, Artificial Sequence
  Description of Artificial Sequence: Synthetic oligonucleotide
auuugcuauagacucugca

SEQ ID NO: 1605568 - RNA, 19 nt, Artificial Sequence
  Description of Artificial Sequence: Synthetic oligonucleotide
aauguaggucuacacggau

SEQ ID NO: 1605569 - RNA, 19 nt, Artificial Sequence
  Description of Artificial Sequence: Synthetic oligonucleotide
uuccaauaucagaaacucc

SEQ ID NO: 1605570 - RNA, 19 nt, Artificial Sequence
  Description of Artificial Sequence: Synthetic oligonucleotide
ugcuuauucauggcaauca

SEQ ID NO: 1605571 - RNA, 19 nt, Artificial Sequence
  Description of Artificial Sequence: Synthetic oligonucleotide
uucuguugcucuauugagu

SEQ ID NO: 1605572 - RNA, 19 nt, Artificial Sequence
  Description of Artificial Sequence: Synthetic oligonucleotide
aauacuggcggcgucaaua

SEQ ID NO: 1605573 - RNA, 19 nt, Artificial Sequence
  Description of Artificial Sequence: Synthetic oligonucleotide
cuuggacagagacauccgg

SEQ ID NO: 1605574 - RNA, 19 nt, Artificial Sequence
  Description of Artificial Sequence: Synthetic oligonucleotide
agaucuguaauuucugcua

SEQ ID NO: 1605575 - RNA, 19 nt, Artificial Sequence
  Description of Artificial Sequence: Synthetic oligonucleotide
acacggaucugccaaaccu

SEQ ID NO: 1605576 - RNA, 19 nt, Artificial Sequence
  Description of Artificial Sequence: Synthetic oligonucleotide
aaagcuggagcagccaucu

SEQ ID NO: 1605577 - RNA, 19 nt, Artificial Sequence
  Description of Artificial Sequence: Synthetic oligonucleotide
agcggcguuuccuucauag

SEQ ID NO: 1605578 - RNA, 19 nt, Artificial Sequence
  Description of Artificial Sequence: Synthetic oligonucleotide
aaaccuguccaagaacucu

SEQ ID NO: 1605579 - RNA, 19 nt, Artificial Sequence
  Description of Artificial Sequence: Synthetic oligonucleotide
cucuauugaguuuuggaga

SEQ ID NO: 1605580 - RNA, 19 nt, Artificial Sequence
  Description of Artificial Sequence: Synthetic oligonucleotide
ucuuuguaucaucaagaau

SEQ ID NO: 1605581 - RNA, 19 nt, Artificial Sequence
  Description of Artificial Sequence: Synthetic oligonucleotide
guucacaggaaaccugucc

SEQ ID NO: 1605582 - RNA, 19 nt, Artificial Sequence
  Description of Artificial Sequence: Synthetic oligonucleotide
aguguugggccacgcagcg

SEQ ID NO: 1605583 - RNA, 19 nt, Artificial Sequence
  Description of Artificial Sequence: Synthetic oligonucleotide
ucugucugccauccagccg

SEQ ID NO: 1605584 - RNA, 19 nt, Artificial Sequence
  Description of Artificial Sequence: Synthetic oligonucleotide
cugaauaguacaaauuucu

SEQ ID NO: 1605585 - RNA, 19 nt, Artificial Sequence
  Description of Artificial Sequence: Synthetic oligonucleotide
agaucggacugccugccgg

SEQ ID NO: 1605586 - RNA, 19 nt, Artificial Sequence
  Description of Artificial Sequence: Synthetic oligonucleotide
aauaccuucuguugcucua

SEQ ID NO: 1605587 - RNA, 19 nt, Artificial Sequence
  Description of Artificial Sequence: Synthetic oligonucleotide
agagacauccggucuucgg

SEQ ID NO: 1605588 - RNA, 19 nt, Artificial Sequence
  Description of Artificial Sequence: Synthetic oligonucleotide
acgauugcagcaauacugg

SEQ ID NO: 1605589 - RNA, 19 nt, Artificial Sequence
  Description of Artificial Sequence: Synthetic oligonucleotide
gcauccauaaucuguuccg

SEQ ID NO: 1605590 - RNA, 19 nt, Artificial Sequence
  Description of Artificial Sequence: Synthetic oligonucleotide
gaguguacaguguuacuuc

SEQ ID NO: 1605591 - RNA, 19 nt, Artificial Sequence
  Description of Artificial Sequence: Synthetic oligonucleotide
agcuauuuuacugcaucuc

SEQ ID NO: 1605592 - RNA, 19 nt, Artificial Sequence
  Description of Artificial Sequence: Synthetic oligonucleotide
cacaaggcuacgauugcag

SEQ ID NO: 1605593 - RNA, 19 nt, Artificial Sequence
  Description of Artificial Sequence: Synthetic oligonucleotide
aaaccuggucuuugagcag

SEQ ID NO: 1605594 - RNA, 19 nt, Artificial Sequence
  Description of Artificial Sequence: Synthetic oligonucleotide
auucaguaucuauacacuu

SEQ ID NO: 1605595 - RNA, 19 nt, Artificial Sequence
  Description of Artificial Sequence: Synthetic oligonucleotide
ugcacgccagcuucuaucc

SEQ ID NO: 1605596 - RNA, 19 nt, Artificial Sequence
  Description of Artificial Sequence: Synthetic oligonucleotide
gaaaacucugcacgccagc

SEQ ID NO: 1605597 - RNA, 19 nt, Artificial Sequence
  Description of Artificial Sequence: Synthetic oligonucleotide
ccuuugauuugcuauagac

SEQ ID NO: 1605598 - RNA, 19 nt, Artificial Sequence
  Description of Artificial Sequence: Synthetic oligonucleotide
ucuucgcuaucugacagca

SEQ ID NO: 1605599 - RNA, 19 nt, Artificial Sequence
  Description of Artificial Sequence: Synthetic oligonucleotide
aggucugucugccauccag

SEQ ID NO: 1605600 - RNA, 19 nt, Artificial Sequence
  Description of Artificial Sequence: Synthetic oligonucleotide
guuccuguaaucauagguc

SEQ ID NO: 1605601 - RNA, 19 nt, Artificial Sequence
  Description of Artificial Sequence: Synthetic oligonucleotide
agugacacaaggcuacgau

SEQ ID NO: 1605602 - RNA, 19 nt, Artificial Sequence
  Description of Artificial Sequence: Synthetic oligonucleotide
uaggucuacacggaucugc

SEQ ID NO: 1605603 - RNA, 19 nt, Artificial Sequence
  Description of Artificial Sequence: Synthetic oligonucleotide
uccgaaugagauccugaug

SEQ ID NO: 1605604 - RNA, 19 nt, Artificial Sequence
  Description of Artificial Sequence: Synthetic oligonucleotide
ugauuuccaauaucagaaa

SEQ ID NO: 1605605 - RNA, 19 nt, Artificial Sequence
  Description of Artificial Sequence: Synthetic oligonucleotide
gagaaaacucugcacgcca

SEQ ID NO: 1605606 - RNA, 19 nt, Artificial Sequence
  Description of Artificial Sequence: Synthetic oligonucleotide
cacuagacugaauaguaca

SEQ ID NO: 1605607 - RNA, 19 nt, Artificial Sequence
  Description of Artificial Sequence: Synthetic oligonucleotide
aaaagcggcguucgcaguu

SEQ ID NO: 1605608 - RNA, 19 nt, Artificial Sequence
  Description of Artificial Sequence: Synthetic oligonucleotide
uuacucguucuucucguuc

SEQ ID NO: 1605609 - RNA, 19 nt, Artificial Sequence
  Description of Artificial Sequence: Synthetic oligonucleotide
auacagaugggcauguggu

SEQ ID NO: 1605610 - RNA, 19 nt, Artificial Sequence
  Description of Artificial Sequence: Synthetic oligonucleotide
auuucucgaugcuuauuca

SEQ ID NO: 1605611 - RNA, 19 nt, Artificial Sequence
  Description of Artificial Sequence: Synthetic oligonucleotide
aaauguaggucuacacgga

SEQ ID NO: 1605612 - RNA, 19 nt, Artificial Sequence
  Description of Artificial Sequence: Synthetic oligonucleotide
uccucuauguuggagguau

SEQ ID NO: 1605613 - RNA, 19 nt, Artificial Sequence
  Description of Artificial Sequence: Synthetic oligonucleotide
uggucauuuuccaaagcuu

SEQ ID NO: 1605614 - RNA, 19 nt, Artificial Sequence
  Description of Artificial Sequence: Synthetic oligonucleotide
auccauuacucguucuucu

SEQ ID NO: 1605615 - RNA, 19 nt, Artificial Sequence
  Description of Artificial Sequence: Synthetic oligonucleotide
gagacauccggucuucgga

SEQ ID NO: 1605616 - RNA, 19 nt, Artificial Sequence
  Description of Artificial Sequence: Synthetic oligonucleotide
aaggcuacgauugcagcaa

SEQ ID NO: 1605617 - RNA, 19 nt, Artificial Sequence
  Description of Artificial Sequence: Synthetic oligonucleotide
auuaucccaccacuagacu

SEQ ID NO: 1605618 - RNA, 19 nt, Artificial Sequence
  Description of Artificial Sequence: Synthetic oligonucleotide
gaucggacugccugccggg

SEQ ID NO: 1605619 - RNA, 19 nt, Artificial Sequence
  Description of Artificial Sequence: Synthetic oligonucleotide
gagucgauucagcuucacc

SEQ ID NO: 1605620 - RNA, 19 nt, Artificial Sequence
  Description of Artificial Sequence: Synthetic oligonucleotide
aggucuacacggaucugcc

SEQ ID NO: 1605621 - RNA, 19 nt, Artificial Sequence
  Description of Artificial Sequence: Synthetic oligonucleotide
cugccaaaccuuuucacca

SEQ ID NO: 1605622 - RNA, 19 nt, Artificial Sequence
  Description of Artificial Sequence: Synthetic oligonucleotide
ccaauaaguauguuccuug

SEQ ID NO: 1605623 - RNA, 19 nt, Artificial Sequence
  Description of Artificial Sequence: Synthetic oligonucleotide
aucaagaauaacagcuuca

SEQ ID NO: 1605624 - RNA, 19 nt, Artificial Sequence
  Description of Artificial Sequence: Synthetic oligonucleotide
uaccgagaaaacucugcac

SEQ ID NO: 1605625 - RNA, 19 nt, Artificial Sequence
  Description of Artificial Sequence: Synthetic oligonucleotide
cauaaucuguuccgaauga

SEQ ID NO: 1605626 - RNA, 19 nt, Artificial Sequence
  Description of Artificial Sequence: Synthetic oligonucleotide
guaccgagaaaacucugca

SEQ ID NO: 1605627 - RNA, 19 nt, Artificial Sequence
  Description of Artificial Sequence: Synthetic oligonucleotide
gaagugacacaaggcuacg

SEQ ID NO: 1605628 - RNA, 19 nt, Artificial Sequence
  Description of Artificial Sequence: Synthetic oligonucleotide
cugugauccuuugauuugc

SEQ ID NO: 1605629 - RNA, 19 nt, Artificial Sequence
  Description of Artificial Sequence: Synthetic oligonucleotide
ugugauccuuugauuugcu

SEQ ID NO: 1605630 - RNA, 19 nt, Artificial Sequence
  Description of Artificial Sequence: Synthetic oligonucleotide
cucgaugcuuauucauggc

SEQ ID NO: 1605631 - RNA, 19 nt, Artificial Sequence
  Description of Artificial Sequence: Synthetic oligonucleotide
gagguaucaacagaggccu

SEQ ID NO: 1605632 - RNA, 19 nt, Artificial Sequence
  Description of Artificial Sequence: Synthetic oligonucleotide
gagauucaguaucuauaca

SEQ ID NO: 1605633 - RNA, 19 nt, Artificial Sequence
  Description of Artificial Sequence: Synthetic oligonucleotide
caagaauaacagcuucauc

SEQ ID NO: 1605634 - RNA, 19 nt, Artificial Sequence
  Description of Artificial Sequence: Synthetic oligonucleotide
uccaucuuuguaucaucaa

SEQ ID NO: 1605635 - RNA, 19 nt, Artificial Sequence
  Description of Artificial Sequence: Synthetic oligonucleotide
gacauccggucuucggaag

SEQ ID NO: 1605636 - RNA, 19 nt, Artificial Sequence
  Description of Artificial Sequence: Synthetic oligonucleotide
acaccuuuccaagagucga

SEQ ID NO: 1605637 - RNA, 19 nt, Artificial Sequence
  Description of Artificial Sequence: Synthetic oligonucleotide
gauucaguaucuauacacu

SEQ ID NO: 1605638 - RNA, 19 nt, Artificial Sequence
  Description of Artificial Sequence: Synthetic oligonucleotide
caaggcuacgauugcagca

SEQ ID NO: 1605639 - RNA, 19 nt, Artificial Sequence
  Description of Artificial Sequence: Synthetic oligonucleotide
uucauaguguugggccacg

SEQ ID NO: 1605640 - RNA, 19 nt, Artificial Sequence
  Description of Artificial Sequence: Synthetic oligonucleotide
auguaggucuacacggauc

SEQ ID NO: 1605641 - RNA, 19 nt, Artificial Sequence
  Description of Artificial Sequence: Synthetic oligonucleotide
cucaauggcgcgaagcaaa

SEQ ID NO: 1605642 - RNA, 19 nt, Artificial Sequence
  Description of Artificial Sequence: Synthetic oligonucleotide
ugguggaugcucaguggca

SEQ ID NO: 1605643 - RNA, 19 nt, Artificial Sequence
  Description of Artificial Sequence: Synthetic oligonucleotide
gaaagguaccgagaaaacu

SEQ ID NO: 1605644 - RNA, 19 nt, Artificial Sequence
  Description of Artificial Sequence: Synthetic oligonucleotide
uuuuccucaauggcgcgaa

SEQ ID NO: 1605645 - RNA, 19 nt, Artificial Sequence
  Description of Artificial Sequence: Synthetic oligonucleotide
gucuacacggaucugccaa

SEQ ID NO: 1605646 - RNA, 19 nt, Artificial Sequence
  Description of Artificial Sequence: Synthetic oligonucleotide
aguguccaucuuuguauca

SEQ ID NO: 1605647 - RNA, 19 nt, Artificial Sequence
  Description of Artificial Sequence: Synthetic oligonucleotide
gucugucugccauccagcc

SEQ ID NO: 1605648 - RNA, 19 nt, Artificial Sequence
  Description of Artificial Sequence: Synthetic oligonucleotide
agaaaacucugcacgccag

SEQ ID NO: 1605649 - RNA, 19 nt, Artificial Sequence
  Description of Artificial Sequence: Synthetic oligonucleotide
ccauuacucguucuucucg

SEQ ID NO: 1605650 - RNA, 19 nt, Artificial Sequence
  Description of Artificial Sequence: Synthetic oligonucleotide
aaacucugcacgccagcuu

SEQ ID NO: 1605651 - RNA, 19 nt, Artificial Sequence
  Description of Artificial Sequence: Synthetic oligonucleotide
ucuacacggaucugccaaa

SEQ ID NO: 1605652 - RNA, 19 nt, Artificial Sequence
  Description of Artificial Sequence: Synthetic oligonucleotide
caggaguguacaguguuac

SEQ ID NO: 1605653 - RNA, 19 nt, Artificial Sequence
  Description of Artificial Sequence: Synthetic oligonucleotide
ucauugggguccaccaaua

SEQ ID NO: 1605654 - RNA, 19 nt, Artificial Sequence
  Description of Artificial Sequence: Synthetic oligonucleotide
aaagcggcguucgcaguug

SEQ ID NO: 1605655 - RNA, 19 nt, Artificial Sequence
  Description of Artificial Sequence: Synthetic oligonucleotide
acuauaggggcaccuugau

SEQ ID NO: 1605656 - RNA, 19 nt, Artificial Sequence
  Description of Artificial Sequence: Synthetic oligonucleotide
aggaguccacagcacaggu

SEQ ID NO: 1605657 - RNA, 19 nt, Artificial Sequence
  Description of Artificial Sequence: Synthetic oligonucleotide
aaauuucucgaugcuuauu

SEQ ID NO: 1605658 - RNA, 19 nt, Artificial Sequence
  Description of Artificial Sequence: Synthetic oligonucleotide
gaguccacagcacagguuu

SEQ ID NO: 1605659 - RNA, 19 nt, Artificial Sequence
  Description of Artificial Sequence: Synthetic oligonucleotide
agacauccggucuucggaa

SEQ ID NO: 1605660 - RNA, 19 nt, Artificial Sequence
  Description of Artificial Sequence: Synthetic oligonucleotide
gcggaagaaagguaccgag

SEQ ID NO: 1605661 - RNA, 19 nt, Artificial Sequence
  Description of Artificial Sequence: Synthetic oligonucleotide
cagcggaagaaagguaccg

SEQ ID NO: 1605662 - RNA, 19 nt, Artificial Sequence
  Description of Artificial Sequence: Synthetic oligonucleotide
ggcguucgcaguuggagag

SEQ ID NO: 1605663 - RNA, 19 nt, Artificial Sequence
  Description of Artificial Sequence: Synthetic oligonucleotide
acucuuguuuucccaaguu

SEQ ID NO: 1605664 - RNA, 19 nt, Artificial Sequence
  Description of Artificial Sequence: Synthetic oligonucleotide
acagcauccauaaucuguu

SEQ ID NO: 1605665 - RNA, 19 nt, Artificial Sequence
  Description of Artificial Sequence: Synthetic oligonucleotide
cucaaaaccuggucuuuga

SEQ ID NO: 1605666 - RNA, 19 nt, Artificial Sequence
  Description of Artificial Sequence: Synthetic oligonucleotide
aagugacacaaggcuacga

SEQ ID NO: 1605667 - RNA, 19 nt, Artificial Sequence
  Description of Artificial Sequence: Synthetic oligonucleotide
accacuagacugaauagua

SEQ ID NO: 1605668 - RNA, 19 nt, Artificial Sequence
  Description of Artificial Sequence: Synthetic oligonucleotide
cuucucguucauugggguc

SEQ ID NO: 1605669 - RNA, 19 nt, Artificial Sequence
  Description of Artificial Sequence: Synthetic oligonucleotide
ucguucauugggguccacc

SEQ ID NO: 1605670 - RNA, 19 nt, Artificial Sequence
  Description of Artificial Sequence: Synthetic oligonucleotide
cauccauuacucguucuuc

SEQ ID NO: 1605671 - RNA, 19 nt, Artificial Sequence
  Description of Artificial Sequence: Synthetic oligonucleotide
gcuacgauugcagcaauac

SEQ ID NO: 1605672 - RNA, 19 nt, Artificial Sequence
  Description of Artificial Sequence: Synthetic oligonucleotide
uccugauguuccuguaauc

SEQ ID NO: 1605673 - RNA, 19 nt, Artificial Sequence
  Description of Artificial Sequence: Synthetic oligonucleotide
uugcauugguggucugagc

SEQ ID NO: 1605674 - RNA, 19 nt, Artificial Sequence
  Description of Artificial Sequence: Synthetic oligonucleotide
gaaaccuguccaagaacuc

SEQ ID NO: 1605675 - RNA, 19 nt, Artificial Sequence
  Description of Artificial Sequence: Synthetic oligonucleotide
acauccggucuucggaagu

SEQ ID NO: 1605676 - RNA, 19 nt, Artificial Sequence
  Description of Artificial Sequence: Synthetic oligonucleotide
uccggucuucggaagugac

SEQ ID NO: 1605677 - RNA, 19 nt, Artificial Sequence
  Description of Artificial Sequence: Synthetic oligonucleotide
agcaauacuggcggcguca

SEQ ID NO: 1605678 - RNA, 19 nt, Artificial Sequence
  Description of Artificial Sequence: Synthetic oligonucleotide
cauaggucugucugccauc

SEQ ID NO: 1605679 - RNA, 19 nt, Artificial Sequence
  Description of Artificial Sequence: Synthetic oligonucleotide
cacuauaggggcaccuuga

SEQ ID NO: 1605680 - RNA, 19 nt, Artificial Sequence
  Description of Artificial Sequence: Synthetic oligonucleotide
ucacaccagcuauuuuacu

SEQ ID NO: 1605681 - RNA, 19 nt, Artificial Sequence
  Description of Artificial Sequence: Synthetic oligonucleotide
cuauuccaucuccaaucug

SEQ ID NO: 1605682 - RNA, 19 nt, Artificial Sequence
  Description of Artificial Sequence: Synthetic oligonucleotide
gauuugcuauagacucugc

SEQ ID NO: 1605683 - RNA, 19 nt, Artificial Sequence
  Description of Artificial Sequence: Synthetic oligonucleotide
uaucaacagaggccuucuc

SEQ ID NO: 1605684 - RNA, 19 nt, Artificial Sequence
  Description of Artificial Sequence: Synthetic oligonucleotide
aggaguguacaguguuacu

SEQ ID NO: 1605685 - RNA, 19 nt, Artificial Sequence
  Description of Artificial Sequence: Synthetic oligonucleotide
aguauguuccuugcuggaa

SEQ ID NO: 1605686 - RNA, 19 nt, Artificial Sequence
  Description of Artificial Sequence: Synthetic oligonucleotide
gucuuugagcagcauuauc

SEQ ID NO: 1605687 - RNA, 19 nt, Artificial Sequence
  Description of Artificial Sequence: Synthetic oligonucleotide
ugccugccggguucaaaag

SEQ ID NO: 1605688 - RNA, 19 nt, Artificial Sequence
  Description of Artificial Sequence: Synthetic oligonucleotide
acagcacuauaggggcacc

SEQ ID NO: 1605689 - RNA, 19 nt, Artificial Sequence
  Description of Artificial Sequence: Synthetic oligonucleotide
gagagcggcguuuccuuca

SEQ ID NO: 1605690 - RNA, 19 nt, Artificial Sequence
  Description of Artificial Sequence: Synthetic oligonucleotide
gaauaccuucuguugcucu

SEQ ID NO: 1605691 - RNA, 19 nt, Artificial Sequence
  Description of Artificial Sequence: Synthetic oligonucleotide
aaccuguccaagaacucuu

SEQ ID NO: 1605692 - RNA, 19 nt, Artificial Sequence
  Description of Artificial Sequence: Synthetic oligonucleotide
gaugcuuauucauggcaau

SEQ ID NO: 1605693 - RNA, 19 nt, Artificial Sequence
  Description of Artificial Sequence: Synthetic oligonucleotide
ucgcuaucugacagcacua

SEQ ID NO: 1605694 - RNA, 19 nt, Artificial Sequence
  Description of Artificial Sequence: Synthetic oligonucleotide
gcaagccauccauuacucg

SEQ ID NO: 1605695 - RNA, 19 nt, Artificial Sequence
  Description of Artificial Sequence: Synthetic oligonucleotide
ccgaaugagauccugaugu

SEQ ID NO: 1605696 - RNA, 19 nt, Artificial Sequence
  Description of Artificial Sequence: Synthetic oligonucleotide
agagucgauucagcuucac

SEQ ID NO: 1605697 - RNA, 19 nt, Artificial Sequence
  Description of Artificial Sequence: Synthetic oligonucleotide
agcggaagaaagguaccga

SEQ ID NO: 1605698 - RNA, 19 nt, Artificial Sequence
  Description of Artificial Sequence: Synthetic oligonucleotide
caggaaaccuguccaagaa

SEQ ID NO: 1605699 - RNA, 19 nt, Artificial Sequence
  Description of Artificial Sequence: Synthetic oligonucleotide
ucauaguguugggccacgc

SEQ ID NO: 1605700 - RNA, 19 nt, Artificial Sequence
  Description of Artificial Sequence: Synthetic oligonucleotide
cuuucuguauuagaucugu

SEQ ID NO: 1605701 - RNA, 19 nt, Artificial Sequence
  Description of Artificial Sequence: Synthetic oligonucleotide
acuggcggcgucaauaaua

SEQ ID NO: 1605702 - RNA, 19 nt, Artificial Sequence
  Description of Artificial Sequence: Synthetic oligonucleotide
auuacucguucuucucguu

SEQ ID NO: 1605703 - RNA, 19 nt, Artificial Sequence
  Description of Artificial Sequence: Synthetic oligonucleotide
cuacuuucacaccagcuau

SEQ ID NO: 1605704 - RNA, 19 nt, Artificial Sequence
  Description of Artificial Sequence: Synthetic oligonucleotide
ggcgucaauaauauuucca

SEQ ID NO: 1605705 - RNA, 19 nt, Artificial Sequence
  Description of Artificial Sequence: Synthetic oligonucleotide
guacaaauuucucgaugcu

SEQ ID NO: 1605706 - RNA, 19 nt, Artificial Sequence
  Description of Artificial Sequence: Synthetic oligonucleotide
cauuacucguucuucucgu

SEQ ID NO: 1605707 - RNA, 19 nt, Artificial Sequence
  Description of Artificial Sequence: Synthetic oligonucleotide
cauaguguugggccacgca

SEQ ID NO: 1605708 - RNA, 19 nt, Artificial Sequence
  Description of Artificial Sequence: Synthetic oligonucleotide
ccaccacuagacugaauag

SEQ ID NO: 1605709 - RNA, 19 nt, Artificial Sequence
  Description of Artificial Sequence: Synthetic oligonucleotide
caguaucuauacacuuuga

SEQ ID NO: 1605710 - RNA, 19 nt, Artificial Sequence
  Description of Artificial Sequence: Synthetic oligonucleotide
ucugcacgccagcuucuau

SEQ ID NO: 1605711 - RNA, 19 nt, Artificial Sequence
  Description of Artificial Sequence: Synthetic oligonucleotide
gguaucaacagaggccuuc

SEQ ID NO: 1605712 - RNA, 19 nt, Artificial Sequence
  Description of Artificial Sequence: Synthetic oligonucleotide
cuacacggaucugccaaac

SEQ ID NO: 1605713 - RNA, 19 nt, Artificial Sequence
  Description of Artificial Sequence: Synthetic oligonucleotide
cgcagcggaagaaagguac

SEQ ID NO: 1605714 - RNA, 19 nt, Artificial Sequence
  Description of Artificial Sequence: Synthetic oligonucleotide
ccacuagacugaauaguac

SEQ ID NO: 1605715 - RNA, 19 nt, Artificial Sequence
  Description of Artificial Sequence: Synthetic oligonucleotide
aagagucgauucagcuuca

SEQ ID NO: 1605716 - RNA, 19 nt, Artificial Sequence
  Description of Artificial Sequence: Synthetic oligonucleotide
cauccauaaucuguuccga

SEQ ID NO: 1605717 - RNA, 19 nt, Artificial Sequence
  Description of Artificial Sequence: Synthetic oligonucleotide
guucauugggguccaccaa

SEQ ID NO: 1605718 - RNA, 19 nt, Artificial Sequence
  Description of Artificial Sequence: Synthetic oligonucleotide
gcgucaauaauauuuccau

SEQ ID NO: 1605719 - RNA, 19 nt, Artificial Sequence
  Description of Artificial Sequence: Synthetic oligonucleotide
cauccggucuucggaagug

SEQ ID NO: 1605720 - RNA, 19 nt, Artificial Sequence
  Description of Artificial Sequence: Synthetic oligonucleotide
cugccugccggguucaaaa

SEQ ID NO: 1605721 - RNA, 19 nt, Artificial Sequence
  Description of Artificial Sequence: Synthetic oligonucleotide
cuucgcuaucugacagcac

SEQ ID NO: 1605722 - RNA, 19 nt, Artificial Sequence
  Description of Artificial Sequence: Synthetic oligonucleotide
ccacgcagcggaagaaagg

SEQ ID NO: 1605723 - RNA, 19 nt, Artificial Sequence
  Description of Artificial Sequence: Synthetic oligonucleotide
gcagcauuaucccaccacu

SEQ ID NO: 1605724 - RNA, 19 nt, Artificial Sequence
  Description of Artificial Sequence: Synthetic oligonucleotide
ggucugucugccauccagc

SEQ ID NO: 1605725 - RNA, 19 nt, Artificial Sequence
  Description of Artificial Sequence: Synthetic oligonucleotide
uaccuucuguugcucuauu

SEQ ID NO: 1605726 - RNA, 19 nt, Artificial Sequence
  Description of Artificial Sequence: Synthetic oligonucleotide
aucucaaaaccuggucuuu

SEQ ID NO: 1605727 - RNA, 19 nt, Artificial Sequence
  Description of Artificial Sequence: Synthetic oligonucleotide
cuacgauugcagcaauacu

SEQ ID NO: 1605728 - RNA, 19 nt, Artificial Sequence
  Description of Artificial Sequence: Synthetic oligonucleotide
agcacuauaggggcaccuu

SEQ ID NO: 1605729 - RNA, 19 nt, Artificial Sequence
  Description of Artificial Sequence: Synthetic oligonucleotide
cagcauuaucccaccacua

SEQ ID NO: 1605730 - RNA, 19 nt, Artificial Sequence
  Description of Artificial Sequence: Synthetic oligonucleotide
ggcggcgucaauaauauuu

SEQ ID NO: 1605731 - RNA, 19 nt, Artificial Sequence
  Description of Artificial Sequence: Synthetic oligonucleotide
gcggcguucgcaguuggag

SEQ ID NO: 1605732 - RNA, 19 nt, Artificial Sequence
  Description of Artificial Sequence: Synthetic oligonucleotide
guaucaacagaggccuucu

SEQ ID NO: 1605733 - RNA, 19 nt, Artificial Sequence
  Description of Artificial Sequence: Synthetic oligonucleotide
cauugggguccaccaauaa

SEQ ID NO: 1605734 - RNA, 19 nt, Artificial Sequence
  Description of Artificial Sequence: Synthetic oligonucleotide
cuggcggcgucaauaauau

SEQ ID NO: 1605735 - RNA, 19 nt, Artificial Sequence
  Description of Artificial Sequence: Synthetic oligonucleotide
gcggcgucaauaauauuuc

SEQ ID NO: 1605736 - RNA, 19 nt, Artificial Sequence
  Description of Artificial Sequence: Synthetic oligonucleotide
gcagcggaagaaagguacc

SEQ ID NO: 1605737 - RNA, 19 nt, Artificial Sequence
  Description of Artificial Sequence: Synthetic oligonucleotide
cacgcagcggaagaaaggu

SEQ ID NO: 1605738 - RNA, 19 nt, Artificial Sequence
  Description of Artificial Sequence: Synthetic oligonucleotide
cggucuucggaagugacac

SEQ ID NO: 1605739 - RNA, 19 nt, Artificial Sequence
  Description of Artificial Sequence: Synthetic oligonucleotide
gccacgcagcggaagaaag

SEQ ID NO: 1605740 - RNA, 19 nt, Artificial Sequence
  Description of Artificial Sequence: Synthetic oligonucleotide
caguguuacuuccucuccu

SEQ ID NO: 1605741 - RNA, 19 nt, Artificial Sequence
  Description of Artificial Sequence: Synthetic oligonucleotide
ggaguguacaguguuacuu

SEQ ID NO: 1605742 - RNA, 19 nt, Artificial Sequence
  Description of Artificial Sequence: Synthetic oligonucleotide
caccacuagacugaauagu

SEQ ID NO: 1605743 - RNA, 19 nt, Artificial Sequence
  Description of Artificial Sequence: Synthetic oligonucleotide
ucggacugccugccggguu

SEQ ID NO: 1605744 - RNA, 19 nt, Artificial Sequence
  Description of Artificial Sequence: Synthetic oligonucleotide
auccggucuucggaaguga

SEQ ID NO: 1605745 - RNA, 19 nt, Artificial Sequence
  Description of Artificial Sequence: Synthetic oligonucleotide
aggcuacgauugcagcaau

SEQ ID NO: 1605746 - RNA, 19 nt, Artificial Sequence
  Description of Artificial Sequence: Synthetic oligonucleotide
cucuucaggaguguacagu

SEQ ID NO: 1605747 - RNA, 19 nt, Artificial Sequence
  Description of Artificial Sequence: Synthetic oligonucleotide
guguugggccacgcagcgg

SEQ ID NO: 1605748 - RNA, 19 nt, Artificial Sequence
  Description of Artificial Sequence: Synthetic oligonucleotide
cguucauugggguccacca

SEQ ID NO: 1605749 - RNA, 19 nt, Artificial Sequence
  Description of Artificial Sequence: Synthetic oligonucleotide
cagcaauacuggcggcguc

SEQ ID NO: 1605750 - RNA, 19 nt, Artificial Sequence
  Description of Artificial Sequence: Synthetic oligonucleotide
cugcaucucaaaaccuggu

SEQ ID NO: 1605751 - RNA, 19 nt, Artificial Sequence
  Description of Artificial Sequence: Synthetic oligonucleotide
caccaauaaguauguuccu

SEQ ID NO: 1605752 - RNA, 19 nt, Artificial Sequence
  Description of Artificial Sequence: Synthetic oligonucleotide
ggucuacacggaucugcca

SEQ ID NO: 1605753 - RNA, 19 nt, Artificial Sequence
  Description of Artificial Sequence: Synthetic oligonucleotide
cgaugcuuauucauggcaa

SEQ ID NO: 1605754 - RNA, 19 nt, Artificial Sequence
  Description of Artificial Sequence: Synthetic oligonucleotide
ccuccuuuucacuugacuu

SEQ ID NO: 1605755 - RNA, 19 nt, Artificial Sequence
  Description of Artificial Sequence: Synthetic oligonucleotide
cagccgcuucuuuuccuca

SEQ ID NO: 1605756 - RNA, 19 nt, Artificial Sequence
  Description of Artificial Sequence: Synthetic oligonucleotide
cggcgucaauaauauuucc

SEQ ID NO: 1605757 - RNA, 19 nt, Artificial Sequence
  Description of Artificial Sequence: Synthetic oligonucleotide
aucggacugccugccgggu

SEQ ID NO: 1605758 - RNA, 19 nt, Artificial Sequence
  Description of Artificial Sequence: Synthetic oligonucleotide
cugauacagaugggcaugu

SEQ ID NO: 1605759 - RNA, 19 nt, Artificial Sequence
  Description of Artificial Sequence: Synthetic oligonucleotide
cuauaggggcaccuugauu

SEQ ID NO: 1605760 - RNA, 19 nt, Artificial Sequence
  Description of Artificial Sequence: Synthetic oligonucleotide
aggucaccccaggaguuuu

SEQ ID NO: 1605761 - RNA, 19 nt, Artificial Sequence
  Description of Artificial Sequence: Synthetic oligonucleotide
ccugccggguucaaaagcu

SEQ ID NO: 1605762 - RNA, 19 nt, Artificial Sequence
  Description of Artificial Sequence: Synthetic oligonucleotide
gguccaccaauaaguaugu

SEQ ID NO: 1605763 - RNA, 19 nt, Artificial Sequence
  Description of Artificial Sequence: Synthetic oligonucleotide
caugugguggaugcucagu

SEQ ID NO: 1605764 - RNA, 19 nt, Artificial Sequence
  Description of Artificial Sequence: Synthetic oligonucleotide
caacagaggccuucuccau

SEQ ID NO: 1605765 - RNA, 19 nt, Artificial Sequence
  Description of Artificial Sequence: Synthetic oligonucleotide
uggcggcgucaauaauauu

SEQ ID NO: 1605766 - RNA, 19 nt, Artificial Sequence
  Description of Artificial Sequence: Synthetic oligonucleotide
agcagccaucugagaaagu

SEQ ID NO: 1605767 - RNA, 19 nt, Artificial Sequence
  Description of Artificial Sequence: Synthetic oligonucleotide
ccggucuucggaagugaca

SEQ ID NO: 1605768 - RNA, 19 nt, Artificial Sequence
  Description of Artificial Sequence: Synthetic oligonucleotide
acgcagcggaagaaaggua

SEQ ID NO: 1605769 - RNA, 19 nt, Artificial Sequence
  Description of Artificial Sequence: Synthetic oligonucleotide
gcguucgcaguuggagagc

SEQ ID NO: 1605770 - RNA, 19 nt, Artificial Sequence
  Description of Artificial Sequence: Synthetic oligonucleotide
gcaauacuggcggcgucaa

SEQ ID NO: 1605771 - RNA, 19 nt, Artificial Sequence
  Description of Artificial Sequence: Synthetic oligonucleotide
agguaucaacagaggccuu

SEQ ID NO: 1605772 - RNA, 19 nt, Artificial Sequence
  Description of Artificial Sequence: Synthetic oligonucleotide
ggucuuugagcagcauuau

SEQ ID NO: 1605773 - RNA, 19 nt, Artificial Sequence
  Description of Artificial Sequence: Synthetic oligonucleotide
gccaucugagaaaguucaa

SEQ ID NO: 1605774 - RNA, 19 nt, Artificial Sequence
  Description of Artificial Sequence: Synthetic oligonucleotide
cuccucuauguuggaggua

SEQ ID NO: 1605775 - RNA, 19 nt, Artificial Sequence
  Description of Artificial Sequence: Synthetic oligonucleotide
ggccacgcagcggaagaaa

SEQ ID NO: 1605776 - RNA, 19 nt, Artificial Sequence
  Description of Artificial Sequence: Synthetic oligonucleotide
cagcacuauaggggcaccu

SEQ ID NO: 1605777 - RNA, 19 nt, Artificial Sequence
  Description of Artificial Sequence: Synthetic oligonucleotide
ggcuacgauugcagcaaua

SEQ ID NO: 1605778 - RNA, 19 nt, Artificial Sequence
  Description of Artificial Sequence: Synthetic oligonucleotide
gagcggcguuuccuucaua

SEQ ID NO: 1605779 - RNA, 19 nt, Artificial Sequence
  Description of Artificial Sequence: Synthetic oligonucleotide
cucugcacgccagcuucua

SEQ ID NO: 1605780 - RNA, 19 nt, Artificial Sequence
  Description of Artificial Sequence: Synthetic oligonucleotide
ccucaauggcgcgaagcaa

SEQ ID NO: 1605781 - RNA, 19 nt, Artificial Sequence
  Description of Artificial Sequence: Synthetic oligonucleotide
gcggcguuuccuucauagu

SEQ ID NO: 1605782 - RNA, 19 nt, Artificial Sequence
  Description of Artificial Sequence: Synthetic oligonucleotide
cggcguucgcaguuggaga

SEQ ID NO: 1605783 - RNA, 19 nt, Artificial Sequence
  Description of Artificial Sequence: Synthetic oligonucleotide
caauacuggcggcgucaau

SEQ ID NO: 1605784 - RNA, 19 nt, Artificial Sequence
  Description of Artificial Sequence: Synthetic oligonucleotide
caguuggagagcggcguuu

SEQ ID NO: 1605785 - RNA, 19 nt, Artificial Sequence
  Description of Artificial Sequence: Synthetic oligonucleotide
gcaguuggagagcggcguu

SEQ ID NO: 1605786 - RNA, 19 nt, Artificial Sequence
  Description of Artificial Sequence: Synthetic oligonucleotide
ggaguccacagcacagguu

SEQ ID NO: 1605787 - RNA, 19 nt, Artificial Sequence
  Description of Artificial Sequence: Synthetic oligonucleotide
gggccacgcagcggaagaa

SEQ ID NO: 1605788 - RNA, 19 nt, Artificial Sequence
  Description of Artificial Sequence: Synthetic oligonucleotide
cgcaguuggagagcggcgu

SEQ ID NO: 1605789 - RNA, 19 nt, Artificial Sequence
  Description of Artificial Sequence: Synthetic oligonucleotide
cgcuaucugacagcacuau

SEQ ID NO: 1605790 - RNA, 19 nt, Artificial Sequence
  Description of Artificial Sequence: Synthetic oligonucleotide
aaaauugaccacuacaucc

SEQ ID NO: 1605791 - RNA, 19 nt, Artificial Sequence
  Description of Artificial Sequence: Synthetic oligonucleotide
aaagagguaauacugcugc

SEQ ID NO: 1605792 - RNA, 19 nt, Artificial Sequence
  Description of Artificial Sequence: Synthetic oligonucleotide
aauagcuucaaucuggauc

SEQ ID NO: 1605793 - RNA, 19 nt, Artificial Sequence
  Description of Artificial Sequence: Synthetic oligonucleotide
uguccuugaauuuagaggg

SEQ ID NO: 1605794 - RNA, 19 nt, Artificial Sequence
  Description of Artificial Sequence: Synthetic oligonucleotide
aauaauaucacggccuugc

SEQ ID NO: 1605795 - RNA, 19 nt, Artificial Sequence
  Description of Artificial Sequence: Synthetic oligonucleotide
aauaucacggccuugcaag

SEQ ID NO: 1605796 - RNA, 19 nt, Artificial Sequence
  Description of Artificial Sequence: Synthetic oligonucleotide
aauagaggaccccagugcc

SEQ ID NO: 1605797 - RNA, 19 nt, Artificial Sequence
  Description of Artificial Sequence: Synthetic oligonucleotide
aagacguuugcucugacuc

SEQ ID NO: 1605798 - RNA, 19 nt, Artificial Sequence
  Description of Artificial Sequence: Synthetic oligonucleotide
uguuaagggauccaagacg

SEQ ID NO: 1605799 - RNA, 19 nt, Artificial Sequence
  Description of Artificial Sequence: Synthetic oligonucleotide
aacccaauaauaucacggc

SEQ ID NO: 1605800 - RNA, 19 nt, Artificial Sequence
  Description of Artificial Sequence: Synthetic oligonucleotide
cuuagaaugaguuggaaug

SEQ ID NO: 1605801 - RNA, 19 nt, Artificial Sequence
  Description of Artificial Sequence: Synthetic oligonucleotide
aauuaagugcucaaugcgc

SEQ ID NO: 1605802 - RNA, 19 nt, Artificial Sequence
  Description of Artificial Sequence: Synthetic oligonucleotide
auauaaaccagguaggugu

SEQ ID NO: 1605803 - RNA, 19 nt, Artificial Sequence
  Description of Artificial Sequence: Synthetic oligonucleotide
uuagagggaauaaagaggu

SEQ ID NO: 1605804 - RNA, 19 nt, Artificial Sequence
  Description of Artificial Sequence: Synthetic oligonucleotide
ugaguauuguuacaggugc

SEQ ID NO: 1605805 - RNA, 19 nt, Artificial Sequence
  Description of Artificial Sequence: Synthetic oligonucleotide
ugugugacgaaaguaaugg

SEQ ID NO: 1605806 - RNA, 19 nt, Artificial Sequence
  Description of Artificial Sequence: Synthetic oligonucleotide
ugugacgaaaguaauggcc

SEQ ID NO: 1605807 - RNA, 19 nt, Artificial Sequence
  Description of Artificial Sequence: Synthetic oligonucleotide
uugauugggacauugaauc

SEQ ID NO: 1605808 - RNA, 19 nt, Artificial Sequence
  Description of Artificial Sequence: Synthetic oligonucleotide
gaauuuagagggaauaaag

SEQ ID NO: 1605809 - RNA, 19 nt, Artificial Sequence
  Description of Artificial Sequence: Synthetic oligonucleotide
cacucgauggauauaaucc

SEQ ID NO: 1605810 - RNA, 19 nt, Artificial Sequence
  Description of Artificial Sequence: Synthetic oligonucleotide
uuucggaguagcaaagccg

SEQ ID NO: 1605811 - RNA, 19 nt, Artificial Sequence
  Description of Artificial Sequence: Synthetic oligonucleotide
ggauauaauccuuagaaug

SEQ ID NO: 1605812 - RNA, 19 nt, Artificial Sequence
  Description of Artificial Sequence: Synthetic oligonucleotide
ucaaaauccauguucagua

SEQ ID NO: 1605813 - RNA, 19 nt, Artificial Sequence
  Description of Artificial Sequence: Synthetic oligonucleotide
cuuccugacgccauuagcg

SEQ ID NO: 1605814 - RNA, 19 nt, Artificial Sequence
  Description of Artificial Sequence: Synthetic oligonucleotide
augaccaaguacuuaagag

SEQ ID NO: 1605815 - RNA, 19 nt, Artificial Sequence
  Description of Artificial Sequence: Synthetic oligonucleotide
uuaagagcucuuaaguuga

SEQ ID NO: 1605816 - RNA, 19 nt, Artificial Sequence
  Description of Artificial Sequence: Synthetic oligonucleotide
uuuugcaccuucuugguca

SEQ ID NO: 1605817 - RNA, 19 nt, Artificial Sequence
  Description of Artificial Sequence: Synthetic oligonucleotide
aaagagaaauguuuuccga

SEQ ID NO: 1605818 - RNA, 19 nt, Artificial Sequence
  Description of Artificial Sequence: Synthetic oligonucleotide
uuaaguugaagccuuuggu

SEQ ID NO: 1605819 - RNA, 19 nt, Artificial Sequence
  Description of Artificial Sequence: Synthetic oligonucleotide
aucauaaaggaguugccag

SEQ ID NO: 1605820 - RNA, 19 nt, Artificial Sequence
  Description of Artificial Sequence: Synthetic oligonucleotide
ugucucaaaauccauguuc

SEQ ID NO: 1605821 - RNA, 19 nt, Artificial Sequence
  Description of Artificial Sequence: Synthetic oligonucleotide
acauugaaucaauuccacc

SEQ ID NO: 1605822 - RNA, 19 nt, Artificial Sequence
  Description of Artificial Sequence: Synthetic oligonucleotide
aaggcuauugauugggaca

SEQ ID NO: 1605823 - RNA, 19 nt, Artificial Sequence
  Description of Artificial Sequence: Synthetic oligonucleotide
auauccagaccucugcugg

SEQ ID NO: 1605824 - RNA, 19 nt, Artificial Sequence
  Description of Artificial Sequence: Synthetic oligonucleotide
caauuaagugcucaaugcg

SEQ ID NO: 1605825 - RNA, 19 nt, Artificial Sequence
  Description of Artificial Sequence: Synthetic oligonucleotide
caaaggaauagcuucaauc

SEQ ID NO: 1605826 - RNA, 19 nt, Artificial Sequence
  Description of Artificial Sequence: Synthetic oligonucleotide
gaaugggcaaagcaaaggc

SEQ ID NO: 1605827 - RNA, 19 nt, Artificial Sequence
  Description of Artificial Sequence: Synthetic oligonucleotide
uucagaaugggcaaagcaa

SEQ ID NO: 1605828 - RNA, 19 nt, Artificial Sequence
  Description of Artificial Sequence: Synthetic oligonucleotide
aguucgucccacucgaugg

SEQ ID NO: 1605829 - RNA, 19 nt, Artificial Sequence
  Description of Artificial Sequence: Synthetic oligonucleotide
ucaacagucugguacuuag

SEQ ID NO: 1605830 - RNA, 19 nt, Artificial Sequence
  Description of Artificial Sequence: Synthetic oligonucleotide
aaugucuuagcuuccuccu

SEQ ID NO: 1605831 - RNA, 19 nt, Artificial Sequence
  Description of Artificial Sequence: Synthetic oligonucleotide
cuuaaguugaagccuuugg

SEQ ID NO: 1605832 - RNA, 19 nt, Artificial Sequence
  Description of Artificial Sequence: Synthetic oligonucleotide
cauugaaucaauuccacca

SEQ ID NO: 1605833 - RNA, 19 nt, Artificial Sequence
  Description of Artificial Sequence: Synthetic oligonucleotide
auguuuuccgaucucgggg

SEQ ID NO: 1605834 - RNA, 19 nt, Artificial Sequence
  Description of Artificial Sequence: Synthetic oligonucleotide
aauuuagagggaauaaaga

SEQ ID NO: 1605835 - RNA, 19 nt, Artificial Sequence
  Description of Artificial Sequence: Synthetic oligonucleotide
aauauaaaccagguaggug

SEQ ID NO: 1605836 - RNA, 19 nt, Artificial Sequence
  Description of Artificial Sequence: Synthetic oligonucleotide
aauugaccacuacauccac

SEQ ID NO: 1605837 - RNA, 19 nt, Artificial Sequence
  Description of Artificial Sequence: Synthetic oligonucleotide
acccaauaauaucacggcc

SEQ ID NO: 1605838 - RNA, 19 nt, Artificial Sequence
  Description of Artificial Sequence: Synthetic oligonucleotide
ugccaacccaauaauauca

SEQ ID NO: 1605839 - RNA, 19 nt, Artificial Sequence
  Description of Artificial Sequence: Synthetic oligonucleotide
gauauaauccuuagaauga

SEQ ID NO: 1605840 - RNA, 19 nt, Artificial Sequence
  Description of Artificial Sequence: Synthetic oligonucleotide
auaaagagguaauacugcu

SEQ ID NO: 1605841 - RNA, 19 nt, Artificial Sequence
  Description of Artificial Sequence: Synthetic oligonucleotide
aauucauugagaauauaaa

SEQ ID NO: 1605842 - RNA, 19 nt, Artificial Sequence
  Description of Artificial Sequence: Synthetic oligonucleotide
uggcuauuacuauaugcgg

SEQ ID NO: 1605843 - RNA, 19 nt, Artificial Sequence
  Description of Artificial Sequence: Synthetic oligonucleotide
uacugugugacgaaaguaa

SEQ ID NO: 1605844 - RNA, 19 nt, Artificial Sequence
  Description of Artificial Sequence: Synthetic oligonucleotide
cagaauaucauaaaggagu

SEQ ID NO: 1605845 - RNA, 19 nt, Artificial Sequence
  Description of Artificial Sequence: Synthetic oligonucleotide
augggguauauccagaccu

SEQ ID NO: 1605846 - RNA, 19 nt, Artificial Sequence
  Description of Artificial Sequence: Synthetic oligonucleotide
guucccuuaacuccauucg

SEQ ID NO: 1605847 - RNA, 19 nt, Artificial Sequence
  Description of Artificial Sequence: Synthetic oligonucleotide
uucccuuaacuccauucgg

SEQ ID NO: 1605848 - RNA, 19 nt, Artificial Sequence
  Description of Artificial Sequence: Synthetic oligonucleotide
gggacauugaaucaauucc

SEQ ID NO: 1605849 - RNA, 19 nt, Artificial Sequence
  Description of Artificial Sequence: Synthetic oligonucleotide
uaauccuuagaaugaguug

SEQ ID NO: 1605850 - RNA, 19 nt, Artificial Sequence
  Description of Artificial Sequence: Synthetic oligonucleotide
uuaaacuuguuaagggauc

SEQ ID NO: 1605851 - RNA, 19 nt, Artificial Sequence
  Description of Artificial Sequence: Synthetic oligonucleotide
aaggccaacucucgagugg

SEQ ID NO: 1605852 - RNA, 19 nt, Artificial Sequence
  Description of Artificial Sequence: Synthetic oligonucleotide
ucauacugugugacgaaag

SEQ ID NO: 1605853 - RNA, 19 nt, Artificial Sequence
  Description of Artificial Sequence: Synthetic oligonucleotide
aggggaauggcagugaauc

SEQ ID NO: 1605854 - RNA, 19 nt, Artificial Sequence
  Description of Artificial Sequence: Synthetic oligonucleotide
aaauguuuuccgaucucgg

SEQ ID NO: 1605855 - RNA, 19 nt, Artificial Sequence
  Description of Artificial Sequence: Synthetic oligonucleotide
uucggaguagcaaagccgu

SEQ ID NO: 1605856 - RNA, 19 nt, Artificial Sequence
  Description of Artificial Sequence: Synthetic oligonucleotide
guacuuaagagcucuuaag

SEQ ID NO: 1605857 - RNA, 19 nt, Artificial Sequence
  Description of Artificial Sequence: Synthetic oligonucleotide
ucgaauuguucagagaucu

SEQ ID NO: 1605858 - RNA, 19 nt, Artificial Sequence
  Description of Artificial Sequence: Synthetic oligonucleotide
ugguacuuagaggacacgg

SEQ ID NO: 1605859 - RNA, 19 nt, Artificial Sequence
  Description of Artificial Sequence: Synthetic oligonucleotide
uuguuaagggauccaagac

SEQ ID NO: 1605860 - RNA, 19 nt, Artificial Sequence
  Description of Artificial Sequence: Synthetic oligonucleotide
uuuuccaaguggucaauca

SEQ ID NO: 1605861 - RNA, 19 nt, Artificial Sequence
  Description of Artificial Sequence: Synthetic oligonucleotide
uaaacuuguuaagggaucc

SEQ ID NO: 1605862 - RNA, 19 nt, Artificial Sequence
  Description of Artificial Sequence: Synthetic oligonucleotide
aggaauagcuucaaucugg

SEQ ID NO: 1605863 - RNA, 19 nt, Artificial Sequence
  Description of Artificial Sequence: Synthetic oligonucleotide
uccguguucccuuaacucc

SEQ ID NO: 1605864 - RNA, 19 nt, Artificial Sequence
  Description of Artificial Sequence: Synthetic oligonucleotide
aaauugaccacuacaucca

SEQ ID NO: 1605865 - RNA, 19 nt, Artificial Sequence
  Description of Artificial Sequence: Synthetic oligonucleotide
acaugggguauauccagac

SEQ ID NO: 1605866 - RNA, 19 nt, Artificial Sequence
  Description of Artificial Sequence: Synthetic oligonucleotide
caugguagcagaaaagaga

SEQ ID NO: 1605867 - RNA, 19 nt, Artificial Sequence
  Description of Artificial Sequence: Synthetic oligonucleotide
cuagaagaauggaacgagc

SEQ ID NO: 1605868 - RNA, 19 nt, Artificial Sequence
  Description of Artificial Sequence: Synthetic oligonucleotide
aaugaguuggaaugucaaa

SEQ ID NO: 1605869 - RNA, 19 nt, Artificial Sequence
  Description of Artificial Sequence: Synthetic oligonucleotide
gagguaauacugcugcagc

SEQ ID NO: 1605870 - RNA, 19 nt, Artificial Sequence
  Description of Artificial Sequence: Synthetic oligonucleotide
caauagaggaccccagugc

SEQ ID NO: 1605871 - RNA, 19 nt, Artificial Sequence
  Description of Artificial Sequence: Synthetic oligonucleotide
aucacggccuugcaaggcc

SEQ ID NO: 1605872 - RNA, 19 nt, Artificial Sequence
  Description of Artificial Sequence: Synthetic oligonucleotide
auaucauaaaggaguugcc

SEQ ID NO: 1605873 - RNA, 19 nt, Artificial Sequence
  Description of Artificial Sequence: Synthetic oligonucleotide
uguuuuccgaucucgggga

SEQ ID NO: 1605874 - RNA, 19 nt, Artificial Sequence
  Description of Artificial Sequence: Synthetic oligonucleotide
ugaauccgagauuucggag

SEQ ID NO: 1605875 - RNA, 19 nt, Artificial Sequence
  Description of Artificial Sequence: Synthetic oligonucleotide
aucccaacuggucgcaagc

SEQ ID NO: 1605876 - RNA, 19 nt, Artificial Sequence
  Description of Artificial Sequence: Synthetic oligonucleotide
aaaggccaacucucgagug

SEQ ID NO: 1605877 - RNA, 19 nt, Artificial Sequence
  Description of Artificial Sequence: Synthetic oligonucleotide
ugaauuuagagggaauaaa

SEQ ID NO: 1605878 - RNA, 19 nt, Artificial Sequence
  Description of Artificial Sequence: Synthetic oligonucleotide
agaaauguuuuccgaucuc

SEQ ID NO: 1605879 - RNA, 19 nt, Artificial Sequence
  Description of Artificial Sequence: Synthetic oligonucleotide
cuuguuaagggauccaaga

SEQ ID NO: 1605880 - RNA, 19 nt, Artificial Sequence
  Description of Artificial Sequence: Synthetic oligonucleotide
uugaccacuacauccacau

SEQ ID NO: 1605881 - RNA, 19 nt, Artificial Sequence
  Description of Artificial Sequence: Synthetic oligonucleotide
aguacuuaagagcucuuaa

SEQ ID NO: 1605882 - RNA, 19 nt, Artificial Sequence
  Description of Artificial Sequence: Synthetic oligonucleotide
auggcagugaauccgagau

SEQ ID NO: 1605883 - RNA, 19 nt, Artificial Sequence
  Description of Artificial Sequence: Synthetic oligonucleotide
uuccugacgccauuagcgg

SEQ ID NO: 1605884 - RNA, 19 nt, Artificial Sequence
  Description of Artificial Sequence: Synthetic oligonucleotide
cacggcacacuucacaggg

SEQ ID NO: 1605885 - RNA, 19 nt, Artificial Sequence
  Description of Artificial Sequence: Synthetic oligonucleotide
ugggacauugaaucaauuc

SEQ ID NO: 1605886 - RNA, 19 nt, Artificial Sequence
  Description of Artificial Sequence: Synthetic oligonucleotide
acuacauccacauggggua

SEQ ID NO: 1605887 - RNA, 19 nt, Artificial Sequence
  Description of Artificial Sequence: Synthetic oligonucleotide
acucgauggauauaauccu

SEQ ID NO: 1605888 - RNA, 19 nt, Artificial Sequence
  Description of Artificial Sequence: Synthetic oligonucleotide
ugugagcaucauaacuucc

SEQ ID NO: 1605889 - RNA, 19 nt, Artificial Sequence
  Description of Artificial Sequence: Synthetic oligonucleotide
uuacaggugcugcagaaua

SEQ ID NO: 1605890 - RNA, 19 nt, Artificial Sequence
  Description of Artificial Sequence: Synthetic oligonucleotide
gaccaaggcaaacaaucgc

SEQ ID NO: 1605891 - RNA, 19 nt, Artificial Sequence
  Description of Artificial Sequence: Synthetic oligonucleotide
acuuaagagcucuuaaguu

SEQ ID NO: 1605892 - RNA, 19 nt, Artificial Sequence
  Description of Artificial Sequence: Synthetic oligonucleotide
uccacaugggguauaucca

SEQ ID NO: 1605893 - RNA, 19 nt, Artificial Sequence
  Description of Artificial Sequence: Synthetic oligonucleotide
ccaauuaagugcucaaugc

SEQ ID NO: 1605894 - RNA, 19 nt, Artificial Sequence
  Description of Artificial Sequence: Synthetic oligonucleotide
agccaauucauugagaaua

SEQ ID NO: 1605895 - RNA, 19 nt, Artificial Sequence
  Description of Artificial Sequence: Synthetic oligonucleotide
aguaauggccuuuccagaa

SEQ ID NO: 1605896 - RNA, 19 nt, Artificial Sequence
  Description of Artificial Sequence: Synthetic oligonucleotide
acucacacgcucugugagc

SEQ ID NO: 1605897 - RNA, 19 nt, Artificial Sequence
  Description of Artificial Sequence: Synthetic oligonucleotide
ucggggaaucacuuugagg

SEQ ID NO: 1605898 - RNA, 19 nt, Artificial Sequence
  Description of Artificial Sequence: Synthetic oligonucleotide
ugcaaggccaaaggaauag

SEQ ID NO: 1605899 - RNA, 19 nt, Artificial Sequence
  Description of Artificial Sequence: Synthetic oligonucleotide
ucgcacaacacaucuguca

SEQ ID NO: 1605900 - RNA, 19 nt, Artificial Sequence
  Description of Artificial Sequence: Synthetic oligonucleotide
caccuuguuccucacaccc

SEQ ID NO: 1605901 - RNA, 19 nt, Artificial Sequence
  Description of Artificial Sequence: Synthetic oligonucleotide
uguucccuuaacuccauuc

SEQ ID NO: 1605902 - RNA, 19 nt, Artificial Sequence
  Description of Artificial Sequence: Synthetic oligonucleotide
aauggccuuuccagaacgc

SEQ ID NO: 1605903 - RNA, 19 nt, Artificial Sequence
  Description of Artificial Sequence: Synthetic oligonucleotide
uuggaaugucaaaauugac

SEQ ID NO: 1605904 - RNA, 19 nt, Artificial Sequence
  Description of Artificial Sequence: Synthetic oligonucleotide
agugaauccgagauuucgg

SEQ ID NO: 1605905 - RNA, 19 nt, Artificial Sequence
  Description of Artificial Sequence: Synthetic oligonucleotide
uggucaugguagcagaaaa

SEQ ID NO: 1605906 - RNA, 19 nt, Artificial Sequence
  Description of Artificial Sequence: Synthetic oligonucleotide
ucgggcaaaucucugggcu

SEQ ID NO: 1605907 - RNA, 19 nt, Artificial Sequence
  Description of Artificial Sequence: Synthetic oligonucleotide
acuuagaggacacggcaca

SEQ ID NO: 1605908 - RNA, 19 nt, Artificial Sequence
  Description of Artificial Sequence: Synthetic oligonucleotide
uacuuagaggacacggcac

SEQ ID NO: 1605909 - RNA, 19 nt, Artificial Sequence
  Description of Artificial Sequence: Synthetic oligonucleotide
aucugucacgcccaggucu

SEQ ID NO: 1605910 - RNA, 19 nt, Artificial Sequence
  Description of Artificial Sequence: Synthetic oligonucleotide
ugauugggacauugaauca

SEQ ID NO: 1605911 - RNA, 19 nt, Artificial Sequence
  Description of Artificial Sequence: Synthetic oligonucleotide
agagggaauaaagagguaa

SEQ ID NO: 1605912 - RNA, 19 nt, Artificial Sequence
  Description of Artificial Sequence: Synthetic oligonucleotide
uccauucgggcaaaucucu

SEQ ID NO: 1605913 - RNA, 19 nt, Artificial Sequence
  Description of Artificial Sequence: Synthetic oligonucleotide
auaucacggccuugcaagg

SEQ ID NO: 1605914 - RNA, 19 nt, Artificial Sequence
  Description of Artificial Sequence: Synthetic oligonucleotide
cacaucauacugugugacg

SEQ ID NO: 1605915 - RNA, 19 nt, Artificial Sequence
  Description of Artificial Sequence: Synthetic oligonucleotide
gaggacacggcacacuuca

SEQ ID NO: 1605916 - RNA, 19 nt, Artificial Sequence
  Description of Artificial Sequence: Synthetic oligonucleotide
aucacuuugaggaucuugu

SEQ ID NO: 1605917 - RNA, 19 nt, Artificial Sequence
  Description of Artificial Sequence: Synthetic oligonucleotide
acgagccuuggccuuaaac

SEQ ID NO: 1605918 - RNA, 19 nt, Artificial Sequence
  Description of Artificial Sequence: Synthetic oligonucleotide
ucgcaguucgucccacucg

SEQ ID NO: 1605919 - RNA, 19 nt, Artificial Sequence
  Description of Artificial Sequence: Synthetic oligonucleotide
augaguuggaaugucaaaa

SEQ ID NO: 1605920 - RNA, 19 nt, Artificial Sequence
  Description of Artificial Sequence: Synthetic oligonucleotide
cagugaauccgagauuucg

SEQ ID NO: 1605921 - RNA, 19 nt, Artificial Sequence
  Description of Artificial Sequence: Synthetic oligonucleotide
ugcucugacucaucugucc

SEQ ID NO: 1605922 - RNA, 19 nt, Artificial Sequence
  Description of Artificial Sequence: Synthetic oligonucleotide
agcuucgcacaacacaucu

SEQ ID NO: 1605923 - RNA, 19 nt, Artificial Sequence
  Description of Artificial Sequence: Synthetic oligonucleotide
auuaagugcucaaugcgcu

SEQ ID NO: 1605924 - RNA, 19 nt, Artificial Sequence
  Description of Artificial Sequence: Synthetic oligonucleotide
auaaaccagguaggugucc

SEQ ID NO: 1605925 - RNA, 19 nt, Artificial Sequence
  Description of Artificial Sequence: Synthetic oligonucleotide
uuaagugcucaaugcgcug

SEQ ID NO: 1605926 - RNA, 19 nt, Artificial Sequence
  Description of Artificial Sequence: Synthetic oligonucleotide
uuggccaaggcuauugauu

SEQ ID NO: 1605927 - RNA, 19 nt, Artificial Sequence
  Description of Artificial Sequence: Synthetic oligonucleotide
auaauccuuagaaugaguu

SEQ ID NO: 1605928 - RNA, 19 nt, Artificial Sequence
  Description of Artificial Sequence: Synthetic oligonucleotide
agacgggcaguuucuuccc

SEQ ID NO: 1605929 - RNA, 19 nt, Artificial Sequence
  Description of Artificial Sequence: Synthetic oligonucleotide
cucgguaucaucaucgucu

SEQ ID NO: 1605930 - RNA, 19 nt, Artificial Sequence
  Description of Artificial Sequence: Synthetic oligonucleotide
ucgauggauauaauccuua

SEQ ID NO: 1605931 - RNA, 19 nt, Artificial Sequence
  Description of Artificial Sequence: Synthetic oligonucleotide
aagagguaauacugcugca

SEQ ID NO: 1605932 - RNA, 19 nt, Artificial Sequence
  Description of Artificial Sequence: Synthetic oligonucleotide
ucuccguguucccuuaacu

SEQ ID NO: 1605933 - RNA, 19 nt, Artificial Sequence
  Description of Artificial Sequence: Synthetic oligonucleotide
aagaauggaacgagccuug

SEQ ID NO: 1605934 - RNA, 19 nt, Artificial Sequence
  Description of Artificial Sequence: Synthetic oligonucleotide
ucuuaaguugaagccuuug

SEQ ID NO: 1605935 - RNA, 19 nt, Artificial Sequence
  Description of Artificial Sequence: Synthetic oligonucleotide
aacuuguuaagggauccaa

SEQ ID NO: 1605936 - RNA, 19 nt, Artificial Sequence
  Description of Artificial Sequence: Synthetic oligonucleotide
auuuuccaaguggucaauc

SEQ ID NO: 1605937 - RNA, 19 nt, Artificial Sequence
  Description of Artificial Sequence: Synthetic oligonucleotide
caacuggucgcaagcuucg

SEQ ID NO: 1605938 - RNA, 19 nt, Artificial Sequence
  Description of Artificial Sequence: Synthetic oligonucleotide
guaauacugcugcagcuuc

SEQ ID NO: 1605939 - RNA, 19 nt, Artificial Sequence
  Description of Artificial Sequence: Synthetic oligonucleotide
auugauugggacauugaau

SEQ ID NO: 1605940 - RNA, 19 nt, Artificial Sequence
  Description of Artificial Sequence: Synthetic oligonucleotide
cuuaacuccauucgggcaa

SEQ ID NO: 1605941 - RNA, 19 nt, Artificial Sequence
  Description of Artificial Sequence: Synthetic oligonucleotide
uccgagauuucggaguagc

SEQ ID NO: 1605942 - RNA, 19 nt, Artificial Sequence
  Description of Artificial Sequence: Synthetic oligonucleotide
acgcccaggucuuuaaaug

SEQ ID NO: 1605943 - RNA, 19 nt, Artificial Sequence
  Description of Artificial Sequence: Synthetic oligonucleotide
agcucuuaaguugaagccu

SEQ ID NO: 1605944 - RNA, 19 nt, Artificial Sequence
  Description of Artificial Sequence: Synthetic oligonucleotide
gauccaagacguuugcucu

SEQ ID NO: 1605945 - RNA, 19 nt, Artificial Sequence
  Description of Artificial Sequence: Synthetic oligonucleotide
cuuugcccaucccaacugg

SEQ ID NO: 1605946 - RNA, 19 nt, Artificial Sequence
  Description of Artificial Sequence: Synthetic oligonucleotide
gaauccgagauuucggagu

SEQ ID NO: 1605947 - RNA, 19 nt, Artificial Sequence
  Description of Artificial Sequence: Synthetic oligonucleotide
acgaaaguaauggccuuuc

SEQ ID NO: 1605948 - RNA, 19 nt, Artificial Sequence
  Description of Artificial Sequence: Synthetic oligonucleotide
ucgcaagcuucgcacaaca

SEQ ID NO: 1605949 - RNA, 19 nt, Artificial Sequence
  Description of Artificial Sequence: Synthetic oligonucleotide
gaccaaguacuuaagagcu

SEQ ID NO: 1605950 - RNA, 19 nt, Artificial Sequence
  Description of Artificial Sequence: Synthetic oligonucleotide
ggaguugccagccaauuca

SEQ ID NO: 1605951 - RNA, 19 nt, Artificial Sequence
  Description of Artificial Sequence: Synthetic oligonucleotide
ucaaucagucggccaggag

SEQ ID NO: 1605952 - RNA, 19 nt, Artificial Sequence
  Description of Artificial Sequence: Synthetic oligonucleotide
guauuguuacaggugcugc

SEQ ID NO: 1605953 - RNA, 19 nt, Artificial Sequence
  Description of Artificial Sequence: Synthetic oligonucleotide
cuggucgcaagcuucgcac

SEQ ID NO: 1605954 - RNA, 19 nt, Artificial Sequence
  Description of Artificial Sequence: Synthetic oligonucleotide
guauuuuccaaguggucaa

SEQ ID NO: 1605955 - RNA, 19 nt, Artificial Sequence
  Description of Artificial Sequence: Synthetic oligonucleotide
gccauuagcggccuuuccg

SEQ ID NO: 1605956 - RNA, 19 nt, Artificial Sequence
  Description of Artificial Sequence: Synthetic oligonucleotide
uuccucauccuguguuggg

SEQ ID NO: 1605957 - RNA, 19 nt, Artificial Sequence
  Description of Artificial Sequence: Synthetic oligonucleotide
gaucuuggugggcuuugcc

SEQ ID NO: 1605958 - RNA, 19 nt, Artificial Sequence
  Description of Artificial Sequence: Synthetic oligonucleotide
auaauaucacggccuugca

SEQ ID NO: 1605959 - RNA, 19 nt, Artificial Sequence
  Description of Artificial Sequence: Synthetic oligonucleotide
cugacucaucuguccaugg

SEQ ID NO: 1605960 - RNA, 19 nt, Artificial Sequence
  Description of Artificial Sequence: Synthetic oligonucleotide
cugugagcaucauaacuuc

SEQ ID NO: 1605961 - RNA, 19 nt, Artificial Sequence
  Description of Artificial Sequence: Synthetic oligonucleotide
acacccauagcgcccucgg

SEQ ID NO: 1605962 - RNA, 19 nt, Artificial Sequence
  Description of Artificial Sequence: Synthetic oligonucleotide
guuaagggauccaagacgu

SEQ ID NO: 1605963 - RNA, 19 nt, Artificial Sequence
  Description of Artificial Sequence: Synthetic oligonucleotide
ucccacucgauggauauaa

SEQ ID NO: 1605964 - RNA, 19 nt, Artificial Sequence
  Description of Artificial Sequence: Synthetic oligonucleotide
aaacuuguuaagggaucca

SEQ ID NO: 1605965 - RNA, 19 nt, Artificial Sequence
  Description of Artificial Sequence: Synthetic oligonucleotide
cacucacacgcucugugag

SEQ ID NO: 1605966 - RNA, 19 nt, Artificial Sequence
  Description of Artificial Sequence: Synthetic oligonucleotide
cuccguguucccuuaacuc

SEQ ID NO: 1605967 - RNA, 19 nt, Artificial Sequence
  Description of Artificial Sequence: Synthetic oligonucleotide
uccugacgccauuagcggc

SEQ ID NO: 1605968 - RNA, 19 nt, Artificial Sequence
  Description of Artificial Sequence: Synthetic oligonucleotide
aacuggucgcaagcuucgc

SEQ ID NO: 1605969 - RNA, 19 nt, Artificial Sequence
  Description of Artificial Sequence: Synthetic oligonucleotide
uucgggcaaaucucugggc

SEQ ID NO: 1605970 - RNA, 19 nt, Artificial Sequence
  Description of Artificial Sequence: Synthetic oligonucleotide
aagugcucaaugcgcugga

SEQ ID NO: 1605971 - RNA, 19 nt, Artificial Sequence
  Description of Artificial Sequence: Synthetic oligonucleotide
gugugacgaaaguaauggc

SEQ ID NO: 1605972 - RNA, 19 nt, Artificial Sequence
  Description of Artificial Sequence: Synthetic oligonucleotide
cucaaugcgcuggaagagc

SEQ ID NO: 1605973 - RNA, 19 nt, Artificial Sequence
  Description of Artificial Sequence: Synthetic oligonucleotide
agacguuugcucugacuca

SEQ ID NO: 1605974 - RNA, 19 nt, Artificial Sequence
  Description of Artificial Sequence: Synthetic oligonucleotide
acuccaauagaggacccca

SEQ ID NO: 1605975 - RNA, 19 nt, Artificial Sequence
  Description of Artificial Sequence: Synthetic oligonucleotide
uagaaugaguuggaauguc

SEQ ID NO: 1605976 - RNA, 19 nt, Artificial Sequence
  Description of Artificial Sequence: Synthetic oligonucleotide
cggggaaucacuuugagga

SEQ ID NO: 1605977 - RNA, 19 nt, Artificial Sequence
  Description of Artificial Sequence: Synthetic oligonucleotide
cccaauuaagugcucaaug

SEQ ID NO: 1605978 - RNA, 19 nt, Artificial Sequence
  Description of Artificial Sequence: Synthetic oligonucleotide
uuuccgaucucggggaauc

SEQ ID NO: 1605979 - RNA, 19 nt, Artificial Sequence
  Description of Artificial Sequence: Synthetic oligonucleotide
ucgguaucaucaucgucuc

SEQ ID NO: 1605980 - RNA, 19 nt, Artificial Sequence
  Description of Artificial Sequence: Synthetic oligonucleotide
cucauccuguguugggaag

SEQ ID NO: 1605981 - RNA, 19 nt, Artificial Sequence
  Description of Artificial Sequence: Synthetic oligonucleotide
cuugucaaccucugucuca

SEQ ID NO: 1605982 - RNA, 19 nt, Artificial Sequence
  Description of Artificial Sequence: Synthetic oligonucleotide
aggaguggcuauuacuaua

SEQ ID NO: 1605983 - RNA, 19 nt, Artificial Sequence
  Description of Artificial Sequence: Synthetic oligonucleotide
aggcuauugauugggacau

SEQ ID NO: 1605984 - RNA, 19 nt, Artificial Sequence
  Description of Artificial Sequence: Synthetic oligonucleotide
accccagugccucgaauug

SEQ ID NO: 1605985 - RNA, 19 nt, Artificial Sequence
  Description of Artificial Sequence: Synthetic oligonucleotide
cauucagaaugggcaaagc

SEQ ID NO: 1605986 - RNA, 19 nt, Artificial Sequence
  Description of Artificial Sequence: Synthetic oligonucleotide
aagccguucucugaguauu

SEQ ID NO: 1605987 - RNA, 19 nt, Artificial Sequence
  Description of Artificial Sequence: Synthetic oligonucleotide
uccucauccuguguuggga

SEQ ID NO: 1605988 - RNA, 19 nt, Artificial Sequence
  Description of Artificial Sequence: Synthetic oligonucleotide
caggguucuugagagcugc

SEQ ID NO: 1605989 - RNA, 19 nt, Artificial Sequence
  Description of Artificial Sequence: Synthetic oligonucleotide
uaucacggccuugcaaggc

SEQ ID NO: 1605990 - RNA, 19 nt, Artificial Sequence
  Description of Artificial Sequence: Synthetic oligonucleotide
gguacuuagaggacacggc

SEQ ID NO: 1605991 - RNA, 19 nt, Artificial Sequence
  Description of Artificial Sequence: Synthetic oligonucleotide
gcaagcuucgcacaacaca

SEQ ID NO: 1605992 - RNA, 19 nt, Artificial Sequence
  Description of Artificial Sequence: Synthetic oligonucleotide
ucugucacgcccaggucuu

SEQ ID NO: 1605993 - RNA, 19 nt, Artificial Sequence
  Description of Artificial Sequence: Synthetic oligonucleotide
uugcaaggccaaaggaaua

SEQ ID NO: 1605994 - RNA, 19 nt, Artificial Sequence
  Description of Artificial Sequence: Synthetic oligonucleotide
ugaccacuacauccacaug

SEQ ID NO: 1605995 - RNA, 19 nt, Artificial Sequence
  Description of Artificial Sequence: Synthetic oligonucleotide
uucgcacaacacaucuguc

SEQ ID NO: 1605996 - RNA, 19 nt, Artificial Sequence
  Description of Artificial Sequence: Synthetic oligonucleotide
caagcuucgcacaacacau

SEQ ID NO: 1605997 - RNA, 19 nt, Artificial Sequence
  Description of Artificial Sequence: Synthetic oligonucleotide
gguagcagaaaagagaaau

SEQ ID NO: 1605998 - RNA, 19 nt, Artificial Sequence
  Description of Artificial Sequence: Synthetic oligonucleotide
cuucgcacaacacaucugu

SEQ ID NO: 1605999 - RNA, 19 nt, Artificial Sequence
  Description of Artificial Sequence: Synthetic oligonucleotide
cacuacauccacauggggu

SEQ ID NO: 1606000 - RNA, 19 nt, Artificial Sequence
  Description of Artificial Sequence: Synthetic oligonucleotide
gccaaggcuauugauuggg

SEQ ID NO: 1606001 - RNA, 19 nt, Artificial Sequence
  Description of Artificial Sequence: Synthetic oligonucleotide
ugcauccucucgcuugcgu

SEQ ID NO: 1606002 - RNA, 19 nt, Artificial Sequence
  Description of Artificial Sequence: Synthetic oligonucleotide
ccauuagcggccuuuccgc

SEQ ID NO: 1606003 - RNA, 19 nt, Artificial Sequence
  Description of Artificial Sequence: Synthetic oligonucleotide
caguucgucccacucgaug

SEQ ID NO: 1606004 - RNA, 19 nt, Artificial Sequence
  Description of Artificial Sequence: Synthetic oligonucleotide
ggccuugcaaggccaaagg

SEQ ID NO: 1606005 - RNA, 19 nt, Artificial Sequence
  Description of Artificial Sequence: Synthetic oligonucleotide
aaaggaguugccagccaau

SEQ ID NO: 1606006 - RNA, 19 nt, Artificial Sequence
  Description of Artificial Sequence: Synthetic oligonucleotide
uggcgacaucaguagcuag

SEQ ID NO: 1606007 - RNA, 19 nt, Artificial Sequence
  Description of Artificial Sequence: Synthetic oligonucleotide
ugacgaaaguaauggccuu

SEQ ID NO: 1606008 - RNA, 19 nt, Artificial Sequence
  Description of Artificial Sequence: Synthetic oligonucleotide
ucacggccuugcaaggcca

SEQ ID NO: 1606009 - RNA, 19 nt, Artificial Sequence
  Description of Artificial Sequence: Synthetic oligonucleotide
uuuucuccguguucccuua

SEQ ID NO: 1606010 - RNA, 19 nt, Artificial Sequence
  Description of Artificial Sequence: Synthetic oligonucleotide
acccauagcgcccucggua

SEQ ID NO: 1606011 - RNA, 19 nt, Artificial Sequence
  Description of Artificial Sequence: Synthetic oligonucleotide
ccaauagaggaccccagug

SEQ ID NO: 1606012 - RNA, 19 nt, Artificial Sequence
  Description of Artificial Sequence: Synthetic oligonucleotide
accaaguacuuaagagcuc

SEQ ID NO: 1606013 - RNA, 19 nt, Artificial Sequence
  Description of Artificial Sequence: Synthetic oligonucleotide
auacugugugacgaaagua

SEQ ID NO: 1606014 - RNA, 19 nt, Artificial Sequence
  Description of Artificial Sequence: Synthetic oligonucleotide
uugggacauugaaucaauu

SEQ ID NO: 1606015 - RNA, 19 nt, Artificial Sequence
  Description of Artificial Sequence: Synthetic oligonucleotide
uggucgcaagcuucgcaca

SEQ ID NO: 1606016 - RNA, 19 nt, Artificial Sequence
  Description of Artificial Sequence: Synthetic oligonucleotide
cuuagaggacacggcacac

SEQ ID NO: 1606017 - RNA, 19 nt, Artificial Sequence
  Description of Artificial Sequence: Synthetic oligonucleotide
cccuuaacuccauucgggc

SEQ ID NO: 1606018 - RNA, 19 nt, Artificial Sequence
  Description of Artificial Sequence: Synthetic oligonucleotide
ccacaugggguauauccag

SEQ ID NO: 1606019 - RNA, 19 nt, Artificial Sequence
  Description of Artificial Sequence: Synthetic oligonucleotide
aucauacugugugacgaaa

SEQ ID NO: 1606020 - RNA, 19 nt, Artificial Sequence
  Description of Artificial Sequence: Synthetic oligonucleotide
agcgcccucgguaucauca

SEQ ID NO: 1606021 - RNA, 19 nt, Artificial Sequence
  Description of Artificial Sequence: Synthetic oligonucleotide
ccugacgccauuagcggcc

SEQ ID NO: 1606022 - RNA, 19 nt, Artificial Sequence
  Description of Artificial Sequence: Synthetic oligonucleotide
ggccuuuccagaacgcccg

SEQ ID NO: 1606023 - RNA, 19 nt, Artificial Sequence
  Description of Artificial Sequence: Synthetic oligonucleotide
cauacugugugacgaaagu

SEQ ID NO: 1606024 - RNA, 19 nt, Artificial Sequence
  Description of Artificial Sequence: Synthetic oligonucleotide
uagagggaauaaagaggua

SEQ ID NO: 1606025 - RNA, 19 nt, Artificial Sequence
  Description of Artificial Sequence: Synthetic oligonucleotide
agaggaccccagugccucg

SEQ ID NO: 1606026 - RNA, 19 nt, Artificial Sequence
  Description of Artificial Sequence: Synthetic oligonucleotide
uuaagggauccaagacguu

SEQ ID NO: 1606027 - RNA, 19 nt, Artificial Sequence
  Description of Artificial Sequence: Synthetic oligonucleotide
uggaucuuggugggcuuug

SEQ ID NO: 1606028 - RNA, 19 nt, Artificial Sequence
  Description of Artificial Sequence: Synthetic oligonucleotide
cuucccaauuaagugcuca

SEQ ID NO: 1606029 - RNA, 19 nt, Artificial Sequence
  Description of Artificial Sequence: Synthetic oligonucleotide
gaguuggaaugucaaaauu

SEQ ID NO: 1606030 - RNA, 19 nt, Artificial Sequence
  Description of Artificial Sequence: Synthetic oligonucleotide
cucgcaguucgucccacuc

SEQ ID NO: 1606031 - RNA, 19 nt, Artificial Sequence
  Description of Artificial Sequence: Synthetic oligonucleotide
auugaccacuacauccaca

SEQ ID NO: 1606032 - RNA, 19 nt, Artificial Sequence
  Description of Artificial Sequence: Synthetic oligonucleotide
auuagcggccuuuccgcuu

SEQ ID NO: 1606033 - RNA, 19 nt, Artificial Sequence
  Description of Artificial Sequence: Synthetic oligonucleotide
ccaacuggucgcaagcuuc

SEQ ID NO: 1606034 - RNA, 19 nt, Artificial Sequence
  Description of Artificial Sequence: Synthetic oligonucleotide
cucaaaauccauguucagu

SEQ ID NO: 1606035 - RNA, 19 nt, Artificial Sequence
  Description of Artificial Sequence: Synthetic oligonucleotide
ggggaauggcagugaaucc

SEQ ID NO: 1606036 - RNA, 19 nt, Artificial Sequence
  Description of Artificial Sequence: Synthetic oligonucleotide
uccgaucucggggaaucac

SEQ ID NO: 1606037 - RNA, 19 nt, Artificial Sequence
  Description of Artificial Sequence: Synthetic oligonucleotide
cucacacgcucugugagca

SEQ ID NO: 1606038 - RNA, 19 nt, Artificial Sequence
  Description of Artificial Sequence: Synthetic oligonucleotide
cacuccaauagaggacccc

SEQ ID NO: 1606039 - RNA, 19 nt, Artificial Sequence
  Description of Artificial Sequence: Synthetic oligonucleotide
ccacucgauggauauaauc

SEQ ID NO: 1606040 - RNA, 19 nt, Artificial Sequence
  Description of Artificial Sequence: Synthetic oligonucleotide
uucccagauccaguuucug

SEQ ID NO: 1606041 - RNA, 19 nt, Artificial Sequence
  Description of Artificial Sequence: Synthetic oligonucleotide
cacaugggguauauccaga

SEQ ID NO: 1606042 - RNA, 19 nt, Artificial Sequence
  Description of Artificial Sequence: Synthetic oligonucleotide
ucacgcccaggucuuuaaa

SEQ ID NO: 1606043 - RNA, 19 nt, Artificial Sequence
  Description of Artificial Sequence: Synthetic oligonucleotide
auccuuagaaugaguugga

SEQ ID NO: 1606044 - RNA, 19 nt, Artificial Sequence
  Description of Artificial Sequence: Synthetic oligonucleotide
cagaacgcccggcucucgc

SEQ ID NO: 1606045 - RNA, 19 nt, Artificial Sequence
  Description of Artificial Sequence: Synthetic oligonucleotide
uuccaccaacaaucacagc

SEQ ID NO: 1606046 - RNA, 19 nt, Artificial Sequence
  Description of Artificial Sequence: Synthetic oligonucleotide
ggcucucgcaguucguccc

SEQ ID NO: 1606047 - RNA, 19 nt, Artificial Sequence
  Description of Artificial Sequence: Synthetic oligonucleotide
aacgcccggcucucgcagu

SEQ ID NO: 1606048 - RNA, 19 nt, Artificial Sequence
  Description of Artificial Sequence: Synthetic oligonucleotide
uuucuccguguucccuuaa

SEQ ID NO: 1606049 - RNA, 19 nt, Artificial Sequence
  Description of Artificial Sequence: Synthetic oligonucleotide
uggcagugaauccgagauu

SEQ ID NO: 1606050 - RNA, 19 nt, Artificial Sequence
  Description of Artificial Sequence: Synthetic oligonucleotide
gagggaauaaagagguaau

SEQ ID NO: 1606051 - RNA, 19 nt, Artificial Sequence
  Description of Artificial Sequence: Synthetic oligonucleotide
caucauacugugugacgaa

SEQ ID NO: 1606052 - RNA, 19 nt, Artificial Sequence
  Description of Artificial Sequence: Synthetic oligonucleotide
uuuuccgaucucggggaau

SEQ ID NO: 1606053 - RNA, 19 nt, Artificial Sequence
  Description of Artificial Sequence: Synthetic oligonucleotide
ggacacggcacacuucaca

SEQ ID NO: 1606054 - RNA, 19 nt, Artificial Sequence
  Description of Artificial Sequence: Synthetic oligonucleotide
auagaggaccccagugccu

SEQ ID NO: 1606055 - RNA, 19 nt, Artificial Sequence
  Description of Artificial Sequence: Synthetic oligonucleotide
acgccauuagcggccuuuc

SEQ ID NO: 1606056 - RNA, 19 nt, Artificial Sequence
  Description of Artificial Sequence: Synthetic oligonucleotide
ucgucccacucgauggaua

SEQ ID NO: 1606057 - RNA, 19 nt, Artificial Sequence
  Description of Artificial Sequence: Synthetic oligonucleotide
caaagccguucucugagua

SEQ ID NO: 1606058 - RNA, 19 nt, Artificial Sequence
  Description of Artificial Sequence: Synthetic oligonucleotide
guucgucccacucgaugga

SEQ ID NO: 1606059 - RNA, 19 nt, Artificial Sequence
  Description of Artificial Sequence: Synthetic oligonucleotide
gggaaucacuuugaggauc

SEQ ID NO: 1606060 - RNA, 19 nt, Artificial Sequence
  Description of Artificial Sequence: Synthetic oligonucleotide
cgcacaacacaucugucac

SEQ ID NO: 1606061 - RNA, 19 nt, Artificial Sequence
  Description of Artificial Sequence: Synthetic oligonucleotide
cccaauaauaucacggccu

SEQ ID NO: 1606062 - RNA, 19 nt, Artificial Sequence
  Description of Artificial Sequence: Synthetic oligonucleotide
caucgucuccugcauccuc

SEQ ID NO: 1606063 - RNA, 19 nt, Artificial Sequence
  Description of Artificial Sequence: Synthetic oligonucleotide
gcuauuacuauaugcgguu

SEQ ID NO: 1606064 - RNA, 19 nt, Artificial Sequence
  Description of Artificial Sequence: Synthetic oligonucleotide
ccucgaauuguucagagau

SEQ ID NO: 1606065 - RNA, 19 nt, Artificial Sequence
  Description of Artificial Sequence: Synthetic oligonucleotide
ccauguucaguauccuguc

SEQ ID NO: 1606066 - RNA, 19 nt, Artificial Sequence
  Description of Artificial Sequence: Synthetic oligonucleotide
caucugucacgcccagguc

SEQ ID NO: 1606067 - RNA, 19 nt, Artificial Sequence
  Description of Artificial Sequence: Synthetic oligonucleotide
ggaguagcaaagccguucu

SEQ ID NO: 1606068 - RNA, 19 nt, Artificial Sequence
  Description of Artificial Sequence: Synthetic oligonucleotide
caaaauccauguucaguau

SEQ ID NO: 1606069 - RNA, 19 nt, Artificial Sequence
  Description of Artificial Sequence: Synthetic oligonucleotide
cuucaaucuggaucuuggu

SEQ ID NO: 1606070 - RNA, 19 nt, Artificial Sequence
  Description of Artificial Sequence: Synthetic oligonucleotide
ggcgacaucaguagcuaga

SEQ ID NO: 1606071 - RNA, 19 nt, Artificial Sequence
  Description of Artificial Sequence: Synthetic oligonucleotide
ccugaagcguuucugugga

SEQ ID NO: 1606072 - RNA, 19 nt, Artificial Sequence
  Description of Artificial Sequence: Synthetic oligonucleotide
ggcuauuacuauaugcggu

SEQ ID NO: 1606073 - RNA, 19 nt, Artificial Sequence
  Description of Artificial Sequence: Synthetic oligonucleotide
agcggccugaagcguuucu

SEQ ID NO: 1606074 - RNA, 19 nt, Artificial Sequence
  Description of Artificial Sequence: Synthetic oligonucleotide
gaccccagugccucgaauu

SEQ ID NO: 1606075 - RNA, 19 nt, Artificial Sequence
  Description of Artificial Sequence: Synthetic oligonucleotide
uuccgaucucggggaauca

SEQ ID NO: 1606076 - RNA, 19 nt, Artificial Sequence
  Description of Artificial Sequence: Synthetic oligonucleotide
ccacuacauccacaugggg

SEQ ID NO: 1606077 - RNA, 19 nt, Artificial Sequence
  Description of Artificial Sequence: Synthetic oligonucleotide
ucggaguagcaaagccguu

SEQ ID NO: 1606078 - RNA, 19 nt, Artificial Sequence
  Description of Artificial Sequence: Synthetic oligonucleotide
caaaucucugggcuucacu

SEQ ID NO: 1606079 - RNA, 19 nt, Artificial Sequence
  Description of Artificial Sequence: Synthetic oligonucleotide
ccuuaacuccauucgggca

SEQ ID NO: 1606080 - RNA, 19 nt, Artificial Sequence
  Description of Artificial Sequence: Synthetic oligonucleotide
aguauccugucugcuucau

SEQ ID NO: 1606081 - RNA, 19 nt, Artificial Sequence
  Description of Artificial Sequence: Synthetic oligonucleotide
gcaaggccaaaggaauagc

SEQ ID NO: 1606082 - RNA, 19 nt, Artificial Sequence
  Description of Artificial Sequence: Synthetic oligonucleotide
aggacacggcacacuucac

SEQ ID NO: 1606083 - RNA, 19 nt, Artificial Sequence
  Description of Artificial Sequence: Synthetic oligonucleotide
caagacguuugcucugacu

SEQ ID NO: 1606084 - RNA, 19 nt, Artificial Sequence
  Description of Artificial Sequence: Synthetic oligonucleotide
uacauccacaugggguaua

SEQ ID NO: 1606085 - RNA, 19 nt, Artificial Sequence
  Description of Artificial Sequence: Synthetic oligonucleotide
gccuugcaaggccaaagga

SEQ ID NO: 1606086 - RNA, 19 nt, Artificial Sequence
  Description of Artificial Sequence: Synthetic oligonucleotide
acacgcucugugagcauca

SEQ ID NO: 1606087 - RNA, 19 nt, Artificial Sequence
  Description of Artificial Sequence: Synthetic oligonucleotide
guuuuccgaucucggggaa

SEQ ID NO: 1606088 - RNA, 19 nt, Artificial Sequence
  Description of Artificial Sequence: Synthetic oligonucleotide
agccguucucugaguauug

SEQ ID NO: 1606089 - RNA, 19 nt, Artificial Sequence
  Description of Artificial Sequence: Synthetic oligonucleotide
ggcagugaauccgagauuu

SEQ ID NO: 1606090 - RNA, 19 nt, Artificial Sequence
  Description of Artificial Sequence: Synthetic oligonucleotide
ugucaaccucugucucaaa

SEQ ID NO: 1606091 - RNA, 19 nt, Artificial Sequence
  Description of Artificial Sequence: Synthetic oligonucleotide
gucgcaagcuucgcacaac

SEQ ID NO: 1606092 - RNA, 19 nt, Artificial Sequence
  Description of Artificial Sequence: Synthetic oligonucleotide
cagauccaguuucugccaa

SEQ ID NO: 1606093 - RNA, 19 nt, Artificial Sequence
  Description of Artificial Sequence: Synthetic oligonucleotide
acguuugcucugacucauc

SEQ ID NO: 1606094 - RNA, 19 nt, Artificial Sequence
  Description of Artificial Sequence: Synthetic oligonucleotide
ugucacgcccaggucuuua

SEQ ID NO: 1606095 - RNA, 19 nt, Artificial Sequence
  Description of Artificial Sequence: Synthetic oligonucleotide
caccuucuuggucauggua

SEQ ID NO: 1606096 - RNA, 19 nt, Artificial Sequence
  Description of Artificial Sequence: Synthetic oligonucleotide
gacgaaaguaauggccuuu

SEQ ID NO: 1606097 - RNA, 19 nt, Artificial Sequence
  Description of Artificial Sequence: Synthetic oligonucleotide
aacgagccuuggccuuaaa

SEQ ID NO: 1606098 - RNA, 19 nt, Artificial Sequence
  Description of Artificial Sequence: Synthetic oligonucleotide
ggaguggcuauuacuauau

SEQ ID NO: 1606099 - RNA, 19 nt, Artificial Sequence
  Description of Artificial Sequence: Synthetic oligonucleotide
ccuuagaaugaguuggaau

SEQ ID NO: 1606100 - RNA, 19 nt, Artificial Sequence
  Description of Artificial Sequence: Synthetic oligonucleotide
cauuagcggccuuuccgcu

SEQ ID NO: 1606101 - RNA, 19 nt, Artificial Sequence
  Description of Artificial Sequence: Synthetic oligonucleotide
ggucgcaagcuucgcacaa

SEQ ID NO: 1606102 - RNA, 19 nt, Artificial Sequence
  Description of Artificial Sequence: Synthetic oligonucleotide
gcuucgcacaacacaucug

SEQ ID NO: 1606103 - RNA, 19 nt, Artificial Sequence
  Description of Artificial Sequence: Synthetic oligonucleotide
cacgcccaggucuuuaaau

SEQ ID NO: 1606104 - RNA, 19 nt, Artificial Sequence
  Description of Artificial Sequence: Synthetic oligonucleotide
ccagauccaguuucugcca

SEQ ID NO: 1606105 - RNA, 19 nt, Artificial Sequence
  Description of Artificial Sequence: Synthetic oligonucleotide
gguaauacugcugcagcuu

SEQ ID NO: 1606106 - RNA, 19 nt, Artificial Sequence
  Description of Artificial Sequence: Synthetic oligonucleotide
gccucgaauuguucagaga

SEQ ID NO: 1606107 - RNA, 19 nt, Artificial Sequence
  Description of Artificial Sequence: Synthetic oligonucleotide
cgaauuguucagagaucug

SEQ ID NO: 1606108 - RNA, 19 nt, Artificial Sequence
  Description of Artificial Sequence: Synthetic oligonucleotide
guuacaggugcugcagaau

SEQ ID NO: 1606109 - RNA, 19 nt, Artificial Sequence
  Description of Artificial Sequence: Synthetic oligonucleotide
cugcauccucucgcuugcg

SEQ ID NO: 1606110 - RNA, 19 nt, Artificial Sequence
  Description of Artificial Sequence: Synthetic oligonucleotide
gcgacaucaguagcuagaa

SEQ ID NO: 1606111 - RNA, 19 nt, Artificial Sequence
  Description of Artificial Sequence: Synthetic oligonucleotide
cauccacaugggguauauc

SEQ ID NO: 1606112 - RNA, 19 nt, Artificial Sequence
  Description of Artificial Sequence: Synthetic oligonucleotide
cuggcgacaucaguagcua

SEQ ID NO: 1606113 - RNA, 19 nt, Artificial Sequence
  Description of Artificial Sequence: Synthetic oligonucleotide
cauccaugaccaaguacuu

SEQ ID NO: 1606114 - RNA, 19 nt, Artificial Sequence
  Description of Artificial Sequence: Synthetic oligonucleotide
gcggccugaagcguuucug

SEQ ID NO: 1606115 - RNA, 19 nt, Artificial Sequence
  Description of Artificial Sequence: Synthetic oligonucleotide
caucaguagcuagaagaau

SEQ ID NO: 1606116 - RNA, 19 nt, Artificial Sequence
  Description of Artificial Sequence: Synthetic oligonucleotide
cuauuacuauaugcgguuu

SEQ ID NO: 1606117 - RNA, 19 nt, Artificial Sequence
  Description of Artificial Sequence: Synthetic oligonucleotide
ggccaggaguggcuauuac

SEQ ID NO: 1606118 - RNA, 19 nt, Artificial Sequence
  Description of Artificial Sequence: Synthetic oligonucleotide
cagccaauucauugagaau

SEQ ID NO: 1606119 - RNA, 19 nt, Artificial Sequence
  Description of Artificial Sequence: Synthetic oligonucleotide
ccaaggcuauugauuggga

SEQ ID NO: 1606120 - RNA, 19 nt, Artificial Sequence
  Description of Artificial Sequence: Synthetic oligonucleotide
auagcgcccucgguaucau

SEQ ID NO: 1606121 - RNA, 19 nt, Artificial Sequence
  Description of Artificial Sequence: Synthetic oligonucleotide
aggaccccagugccucgaa

SEQ ID NO: 1606122 - RNA, 19 nt, Artificial Sequence
  Description of Artificial Sequence: Synthetic oligonucleotide
gacgccauuagcggccuuu

SEQ ID NO: 1606123 - RNA, 19 nt, Artificial Sequence
  Description of Artificial Sequence: Synthetic oligonucleotide
cggaguagcaaagccguuc

SEQ ID NO: 1606124 - RNA, 19 nt, Artificial Sequence
  Description of Artificial Sequence: Synthetic oligonucleotide
ccgagauuucggaguagca

SEQ ID NO: 1606125 - RNA, 19 nt, Artificial Sequence
  Description of Artificial Sequence: Synthetic oligonucleotide
uagcgcccucgguaucauc

SEQ ID NO: 1606126 - RNA, 19 nt, Artificial Sequence
  Description of Artificial Sequence: Synthetic oligonucleotide
gcacuccaauagaggaccc

SEQ ID NO: 1606127 - RNA, 19 nt, Artificial Sequence
  Description of Artificial Sequence: Synthetic oligonucleotide
ccaauaauaucacggccuu

SEQ ID NO: 1606128 - RNA, 19 nt, Artificial Sequence
  Description of Artificial Sequence: Synthetic oligonucleotide
gcucuuaaguugaagccuu

SEQ ID NO: 1606129 - RNA, 19 nt, Artificial Sequence
  Description of Artificial Sequence: Synthetic oligonucleotide
gggguauauccagaccucu

SEQ ID NO: 1606130 - RNA, 19 nt, Artificial Sequence
  Description of Artificial Sequence: Synthetic oligonucleotide
cggcucucgcaguucgucc

SEQ ID NO: 1606131 - RNA, 19 nt, Artificial Sequence
  Description of Artificial Sequence: Synthetic oligonucleotide
gggaagacgggcaguuucu

SEQ ID NO: 1606132 - RNA, 19 nt, Artificial Sequence
  Description of Artificial Sequence: Synthetic oligonucleotide
ccaagacguuugcucugac

SEQ ID NO: 1606133 - RNA, 19 nt, Artificial Sequence
  Description of Artificial Sequence: Synthetic oligonucleotide
cgcaagcuucgcacaacac

SEQ ID NO: 1606134 - RNA, 19 nt, Artificial Sequence
  Description of Artificial Sequence: Synthetic oligonucleotide
cucuuaaguugaagccuuu

SEQ ID NO: 1606135 - RNA, 19 nt, Artificial Sequence
  Description of Artificial Sequence: Synthetic oligonucleotide
gcagugaauccgagauuuc

SEQ ID NO: 1606136 - RNA, 19 nt, Artificial Sequence
  Description of Artificial Sequence: Synthetic oligonucleotide
cagucggccaggaguggcu

SEQ ID NO: 1606137 - RNA, 19 nt, Artificial Sequence
  Description of Artificial Sequence: Synthetic oligonucleotide
ugacgccauuagcggccuu

SEQ ID NO: 1606138 - RNA, 19 nt, Artificial Sequence
  Description of Artificial Sequence: Synthetic oligonucleotide
ggcaccuguuuucccagau

SEQ ID NO: 1606139 - RNA, 19 nt, Artificial Sequence
  Description of Artificial Sequence: Synthetic oligonucleotide
ccuugaauuuagagggaau

SEQ ID NO: 1606140 - RNA, 19 nt, Artificial Sequence
  Description of Artificial Sequence: Synthetic oligonucleotide
gccagccaauucauugaga

SEQ ID NO: 1606141 - RNA, 19 nt, Artificial Sequence
  Description of Artificial Sequence: Synthetic oligonucleotide
ggaacgagccuuggccuua

SEQ ID NO: 1606142 - RNA, 19 nt, Artificial Sequence
  Description of Artificial Sequence: Synthetic oligonucleotide
caguuucugccaacccaau

SEQ ID NO: 1606143 - RNA, 19 nt, Artificial Sequence
  Description of Artificial Sequence: Synthetic oligonucleotide
cggccuugcaaggccaaag

SEQ ID NO: 1606144 - RNA, 19 nt, Artificial Sequence
  Description of Artificial Sequence: Synthetic oligonucleotide
cgguaucaucaucgucucc

SEQ ID NO: 1606145 - RNA, 19 nt, Artificial Sequence
  Description of Artificial Sequence: Synthetic oligonucleotide
cgccauuagcggccuuucc

SEQ ID NO: 1606146 - RNA, 19 nt, Artificial Sequence
  Description of Artificial Sequence: Synthetic oligonucleotide
ccgaucucggggaaucacu

SEQ ID NO: 1606147 - RNA, 19 nt, Artificial Sequence
  Description of Artificial Sequence: Synthetic oligonucleotide
cuacauccacaugggguau

SEQ ID NO: 1606148 - RNA, 19 nt, Artificial Sequence
  Description of Artificial Sequence: Synthetic oligonucleotide
ccauagcgcccucgguauc

SEQ ID NO: 1606149 - RNA, 19 nt, Artificial Sequence
  Description of Artificial Sequence: Synthetic oligonucleotide
ccaaaggaauagcuucaau

SEQ ID NO: 1606150 - RNA, 19 nt, Artificial Sequence
  Description of Artificial Sequence: Synthetic oligonucleotide
gucccacucgauggauaua

SEQ ID NO: 1606151 - RNA, 19 nt, Artificial Sequence
  Description of Artificial Sequence: Synthetic oligonucleotide
cacccauagcgcccucggu

SEQ ID NO: 1606152 - RNA, 19 nt, Artificial Sequence
  Description of Artificial Sequence: Synthetic oligonucleotide
cugacgccauuagcggccu

SEQ ID NO: 1606153 - RNA, 19 nt, Artificial Sequence
  Description of Artificial Sequence: Synthetic oligonucleotide
gccguucucugaguauugu

SEQ ID NO: 1606154 - RNA, 19 nt, Artificial Sequence
  Description of Artificial Sequence: Synthetic oligonucleotide
agcggccuuuccgcuucuu

SEQ ID NO: 1606155 - RNA, 19 nt, Artificial Sequence
  Description of Artificial Sequence: Synthetic oligonucleotide
ggaagacgggcaguuucuu

SEQ ID NO: 1606156 - RNA, 19 nt, Artificial Sequence
  Description of Artificial Sequence: Synthetic oligonucleotide
cgucccacucgauggauau

SEQ ID NO: 1606157 - RNA, 19 nt, Artificial Sequence
  Description of Artificial Sequence: Synthetic oligonucleotide
cccucgguaucaucaucgu

SEQ ID NO: 1606158 - RNA, 19 nt, Artificial Sequence
  Description of Artificial Sequence: Synthetic oligonucleotide
ggaccccagugccucgaau

SEQ ID NO: 1606159 - RNA, 19 nt, Artificial Sequence
  Description of Artificial Sequence: Synthetic oligonucleotide
cgaucucggggaaucacuu

SEQ ID NO: 1606160 - RNA, 19 nt, Artificial Sequence
  Description of Artificial Sequence: Synthetic oligonucleotide
gcgcccucgguaucaucau

SEQ ID NO: 1606161 - RNA, 19 nt, Artificial Sequence
  Description of Artificial Sequence: Synthetic oligonucleotide
cacgcucugugagcaucau

SEQ ID NO: 1606162 - RNA, 19 nt, Artificial Sequence
  Description of Artificial Sequence: Synthetic oligonucleotide
ggcuauugauugggacauu

SEQ ID NO: 1606163 - RNA, 19 nt, Artificial Sequence
  Description of Artificial Sequence: Synthetic oligonucleotide
cgggcaaaucucugggcuu

SEQ ID NO: 1606164 - RNA, 19 nt, Artificial Sequence
  Description of Artificial Sequence: Synthetic oligonucleotide
cugucacgcccaggucuuu

SEQ ID NO: 1606165 - RNA, 19 nt, Artificial Sequence
  Description of Artificial Sequence: Synthetic oligonucleotide
cccggcucucgcaguucgu

SEQ ID NO: 1606166 - RNA, 19 nt, Artificial Sequence
  Description of Artificial Sequence: Synthetic oligonucleotide
cggccaggaguggcuauua

SEQ ID NO: 1606167 - RNA, 19 nt, Artificial Sequence
  Description of Artificial Sequence: Synthetic oligonucleotide
aaaacagugauucaucaag

SEQ ID NO: 1606168 - RNA, 19 nt, Artificial Sequence
  Description of Artificial Sequence: Synthetic oligonucleotide
aagauuuacauuuguauag

SEQ ID NO: 1606169 - RNA, 19 nt, Artificial Sequence
  Description of Artificial Sequence: Synthetic oligonucleotide
uugucuuucacucgcaucg

SEQ ID NO: 1606170 - RNA, 19 nt, Artificial Sequence
  Description of Artificial Sequence: Synthetic oligonucleotide
aauccuaucaugauggcac

SEQ ID NO: 1606171 - RNA, 19 nt, Artificial Sequence
  Description of Artificial Sequence: Synthetic oligonucleotide
cagugauucaucaagauug

SEQ ID NO: 1606172 - RNA, 19 nt, Artificial Sequence
  Description of Artificial Sequence: Synthetic oligonucleotide
aaauaguugaacaacuuug

SEQ ID NO: 1606173 - RNA, 19 nt, Artificial Sequence
  Description of Artificial Sequence: Synthetic oligonucleotide
uguucacacacuaugucgg

SEQ ID NO: 1606174 - RNA, 19 nt, Artificial Sequence
  Description of Artificial Sequence: Synthetic oligonucleotide
ugccuaagaaugaagaccc

SEQ ID NO: 1606175 - RNA, 19 nt, Artificial Sequence
  Description of Artificial Sequence: Synthetic oligonucleotide
acuauggauagucugugac

SEQ ID NO: 1606176 - RNA, 19 nt, Artificial Sequence
  Description of Artificial Sequence: Synthetic oligonucleotide
uuguucacacacuaugucg

SEQ ID NO: 1606177 - RNA, 19 nt, Artificial Sequence
  Description of Artificial Sequence: Synthetic oligonucleotide
uuaagucuccaaauugagg

SEQ ID NO: 1606178 - RNA, 19 nt, Artificial Sequence
  Description of Artificial Sequence: Synthetic oligonucleotide
uaugucuuagugcccaagg

SEQ ID NO: 1606179 - RNA, 19 nt, Artificial Sequence
  Description of Artificial Sequence: Synthetic oligonucleotide
aaaugccucacccacccuc

SEQ ID NO: 1606180 - RNA, 19 nt, Artificial Sequence
  Description of Artificial Sequence: Synthetic oligonucleotide
uacacuuugucuuucacuc

SEQ ID NO: 1606181 - RNA, 19 nt, Artificial Sequence
  Description of Artificial Sequence: Synthetic oligonucleotide
acuaugucggaguugauga

SEQ ID NO: 1606182 - RNA, 19 nt, Artificial Sequence
  Description of Artificial Sequence: Synthetic oligonucleotide
uuugauugaaagaugugua

SEQ ID NO: 1606183 - RNA, 19 nt, Artificial Sequence
  Description of Artificial Sequence: Synthetic oligonucleotide
ugucaguuacuauggauag

SEQ ID NO: 1606184 - RNA, 19 nt, Artificial Sequence
  Description of Artificial Sequence: Synthetic oligonucleotide
agugccuaagaaugaagac

SEQ ID NO: 1606185 - RNA, 19 nt, Artificial Sequence
  Description of Artificial Sequence: Synthetic oligonucleotide
aucaagauugcuuuaaaua

SEQ ID NO: 1606186 - RNA, 19 nt, Artificial Sequence
  Description of Artificial Sequence: Synthetic oligonucleotide
ggaaauccuaucaugaugg

SEQ ID NO: 1606187 - RNA, 19 nt, Artificial Sequence
  Description of Artificial Sequence: Synthetic oligonucleotide
uuaguccacucauagaugu

SEQ ID NO: 1606188 - RNA, 19 nt, Artificial Sequence
  Description of Artificial Sequence: Synthetic oligonucleotide
uagucugugaccauaaauu

SEQ ID NO: 1606189 - RNA, 19 nt, Artificial Sequence
  Description of Artificial Sequence: Synthetic oligonucleotide
ucuaaaucaucccauugau

SEQ ID NO: 1606190 - RNA, 19 nt, Artificial Sequence
  Description of Artificial Sequence: Synthetic oligonucleotide
uugucaguuacuauggaua

SEQ ID NO: 1606191 - RNA, 19 nt, Artificial Sequence
  Description of Artificial Sequence: Synthetic oligonucleotide
agaacugggaaauccuauc

SEQ ID NO: 1606192 - RNA, 19 nt, Artificial Sequence
  Description of Artificial Sequence: Synthetic oligonucleotide
ugauucaucaagauugcuu

SEQ ID NO: 1606193 - RNA, 19 nt, Artificial Sequence
  Description of Artificial Sequence: Synthetic oligonucleotide
cucagguucccaaagugcc

SEQ ID NO: 1606194 - RNA, 19 nt, Artificial Sequence
  Description of Artificial Sequence: Synthetic oligonucleotide
ucuccuaagaaaugccuca

SEQ ID NO: 1606195 - RNA, 19 nt, Artificial Sequence
  Description of Artificial Sequence: Synthetic oligonucleotide
uugcauuaugucaugugga

SEQ ID NO: 1606196 - RNA, 19 nt, Artificial Sequence
  Description of Artificial Sequence: Synthetic oligonucleotide
auugaaagauguguauuuc

SEQ ID NO: 1606197 - RNA, 19 nt, Artificial Sequence
  Description of Artificial Sequence: Synthetic oligonucleotide
cuauggauagucugugacc

SEQ ID NO: 1606198 - RNA, 19 nt, Artificial Sequence
  Description of Artificial Sequence: Synthetic oligonucleotide
agaaaugcuucuggcaggc

SEQ ID NO: 1606199 - RNA, 19 nt, Artificial Sequence
  Description of Artificial Sequence: Synthetic oligonucleotide
uaugucauguggaugcuau

SEQ ID NO: 1606200 - RNA, 19 nt, Artificial Sequence
  Description of Artificial Sequence: Synthetic oligonucleotide
uccugcacaacuuccgucc

SEQ ID NO: 1606201 - RNA, 19 nt, Artificial Sequence
  Description of Artificial Sequence: Synthetic oligonucleotide
uugaucuuaguccacucau

SEQ ID NO: 1606202 - RNA, 19 nt, Artificial Sequence
  Description of Artificial Sequence: Synthetic oligonucleotide
ugaggcaauccucaugcca

SEQ ID NO: 1606203 - RNA, 19 nt, Artificial Sequence
  Description of Artificial Sequence: Synthetic oligonucleotide
aacagugauucaucaagau

SEQ ID NO: 1606204 - RNA, 19 nt, Artificial Sequence
  Description of Artificial Sequence: Synthetic oligonucleotide
ucauguggaugcuaugucu

SEQ ID NO: 1606205 - RNA, 19 nt, Artificial Sequence
  Description of Artificial Sequence: Synthetic oligonucleotide
aauucucucuaagggcugg

SEQ ID NO: 1606206 - RNA, 19 nt, Artificial Sequence
  Description of Artificial Sequence: Synthetic oligonucleotide
agugauucaucaagauugc

SEQ ID NO: 1606207 - RNA, 19 nt, Artificial Sequence
  Description of Artificial Sequence: Synthetic oligonucleotide
auagucugugaccauaaau

SEQ ID NO: 1606208 - RNA, 19 nt, Artificial Sequence
  Description of Artificial Sequence: Synthetic oligonucleotide
acacuuuaggccuugggaa

SEQ ID NO: 1606209 - RNA, 19 nt, Artificial Sequence
  Description of Artificial Sequence: Synthetic oligonucleotide
uugauugaaagauguguau

SEQ ID NO: 1606210 - RNA, 19 nt, Artificial Sequence
  Description of Artificial Sequence: Synthetic oligonucleotide
caugcugguccccaaauac

SEQ ID NO: 1606211 - RNA, 19 nt, Artificial Sequence
  Description of Artificial Sequence: Synthetic oligonucleotide
aagauugcuuuaaauauuu

SEQ ID NO: 1606212 - RNA, 19 nt, Artificial Sequence
  Description of Artificial Sequence: Synthetic oligonucleotide
uggaugcuaugucuuagug

SEQ ID NO: 1606213 - RNA, 19 nt, Artificial Sequence
  Description of Artificial Sequence: Synthetic oligonucleotide
ugaccauaaauucucucua

SEQ ID NO: 1606214 - RNA, 19 nt, Artificial Sequence
  Description of Artificial Sequence: Synthetic oligonucleotide
aagugccuaagaaugaaga

SEQ ID NO: 1606215 - RNA, 19 nt, Artificial Sequence
  Description of Artificial Sequence: Synthetic oligonucleotide
aaauccuaucaugauggca

SEQ ID NO: 1606216 - RNA, 19 nt, Artificial Sequence
  Description of Artificial Sequence: Synthetic oligonucleotide
auugaucuuaguccacuca

SEQ ID NO: 1606217 - RNA, 19 nt, Artificial Sequence
  Description of Artificial Sequence: Synthetic oligonucleotide
gaaacacuccaggugauac

SEQ ID NO: 1606218 - RNA, 19 nt, Artificial Sequence
  Description of Artificial Sequence: Synthetic oligonucleotide
aaucuccuaagaaaugccu

SEQ ID NO: 1606219 - RNA, 19 nt, Artificial Sequence
  Description of Artificial Sequence: Synthetic oligonucleotide
gugccuaagaaugaagacc

SEQ ID NO: 1606220 - RNA, 19 nt, Artificial Sequence
  Description of Artificial Sequence: Synthetic oligonucleotide
ugacuucuuaagauuuaca

SEQ ID NO: 1606221 - RNA, 19 nt, Artificial Sequence
  Description of Artificial Sequence: Synthetic oligonucleotide
cuaucaugauggcacagug

SEQ ID NO: 1606222 - RNA, 19 nt, Artificial Sequence
  Description of Artificial Sequence: Synthetic oligonucleotide
gauucaucaagauugcuuu

SEQ ID NO: 1606223 - RNA, 19 nt, Artificial Sequence
  Description of Artificial Sequence: Synthetic oligonucleotide
aagccugagauagucucuc

SEQ ID NO: 1606224 - RNA, 19 nt, Artificial Sequence
  Description of Artificial Sequence: Synthetic oligonucleotide
ugccaguacuggucgaugg

SEQ ID NO: 1606225 - RNA, 19 nt, Artificial Sequence
  Description of Artificial Sequence: Synthetic oligonucleotide
aaacagugauucaucaaga

SEQ ID NO: 1606226 - RNA, 19 nt, Artificial Sequence
  Description of Artificial Sequence: Synthetic oligonucleotide
agguaucugucaccuacac

SEQ ID NO: 1606227 - RNA, 19 nt, Artificial Sequence
  Description of Artificial Sequence: Synthetic oligonucleotide
cugagauagucucuccugc

SEQ ID NO: 1606228 - RNA, 19 nt, Artificial Sequence
  Description of Artificial Sequence: Synthetic oligonucleotide
auccgcuugucacaggaag

SEQ ID NO: 1606229 - RNA, 19 nt, Artificial Sequence
  Description of Artificial Sequence: Synthetic oligonucleotide
uuaggccuugggaagguga

SEQ ID NO: 1606230 - RNA, 19 nt, Artificial Sequence
  Description of Artificial Sequence: Synthetic oligonucleotide
aggugauacacuuugucuu

SEQ ID NO: 1606231 - RNA, 19 nt, Artificial Sequence
  Description of Artificial Sequence: Synthetic oligonucleotide
uuacuauggauagucugug

SEQ ID NO: 1606232 - RNA, 19 nt, Artificial Sequence
  Description of Artificial Sequence: Synthetic oligonucleotide
cucauagaugucuuguuca

SEQ ID NO: 1606233 - RNA, 19 nt, Artificial Sequence
  Description of Artificial Sequence: Synthetic oligonucleotide
aaacacuccaggugauaca

SEQ ID NO: 1606234 - RNA, 19 nt, Artificial Sequence
  Description of Artificial Sequence: Synthetic oligonucleotide
ugcauuaugucauguggau

SEQ ID NO: 1606235 - RNA, 19 nt, Artificial Sequence
  Description of Artificial Sequence: Synthetic oligonucleotide
cccaaagugccuaagaaug

SEQ ID NO: 1606236 - RNA, 19 nt, Artificial Sequence
  Description of Artificial Sequence: Synthetic oligonucleotide
uucuaaugacacacaacaa

SEQ ID NO: 1606237 - RNA, 19 nt, Artificial Sequence
  Description of Artificial Sequence: Synthetic oligonucleotide
uguguauuucauucccaac

SEQ ID NO: 1606238 - RNA, 19 nt, Artificial Sequence
  Description of Artificial Sequence: Synthetic oligonucleotide
uccuaagaaaugccucacc

SEQ ID NO: 1606239 - RNA, 19 nt, Artificial Sequence
  Description of Artificial Sequence: Synthetic oligonucleotide
ccucaccucaaaaugaagg

SEQ ID NO: 1606240 - RNA, 19 nt, Artificial Sequence
  Description of Artificial Sequence: Synthetic oligonucleotide
acugaacaccuccccaagg

SEQ ID NO: 1606241 - RNA, 19 nt, Artificial Sequence
  Description of Artificial Sequence: Synthetic oligonucleotide
ucgucaucucauaggcacg

SEQ ID NO: 1606242 - RNA, 19 nt, Artificial Sequence
  Description of Artificial Sequence: Synthetic oligonucleotide
cuuguucacacacuauguc

SEQ ID NO: 1606243 - RNA, 19 nt, Artificial Sequence
  Description of Artificial Sequence: Synthetic oligonucleotide
ucaccucaaaaugaaggug

SEQ ID NO: 1606244 - RNA, 19 nt, Artificial Sequence
  Description of Artificial Sequence: Synthetic oligonucleotide
ucgccccucacgcucaagg

SEQ ID NO: 1606245 - RNA, 19 nt, Artificial Sequence
  Description of Artificial Sequence: Synthetic oligonucleotide
ucacacacuaugucggagu

SEQ ID NO: 1606246 - RNA, 19 nt, Artificial Sequence
  Description of Artificial Sequence: Synthetic oligonucleotide
cuaaaucaucccauugauc

SEQ ID NO: 1606247 - RNA, 19 nt, Artificial Sequence
  Description of Artificial Sequence: Synthetic oligonucleotide
ugcccgucaccacagcccg

SEQ ID NO: 1606248 - RNA, 19 nt, Artificial Sequence
  Description of Artificial Sequence: Synthetic oligonucleotide
ugagauagucucuccugca

SEQ ID NO: 1606249 - RNA, 19 nt, Artificial Sequence
  Description of Artificial Sequence: Synthetic oligonucleotide
cuuucgauggccgaggaca

SEQ ID NO: 1606250 - RNA, 19 nt, Artificial Sequence
  Description of Artificial Sequence: Synthetic oligonucleotide
accgcgcucccuuccaucc

SEQ ID NO: 1606251 - RNA, 19 nt, Artificial Sequence
  Description of Artificial Sequence: Synthetic oligonucleotide
cuuaguccacucauagaug

SEQ ID NO: 1606252 - RNA, 19 nt, Artificial Sequence
  Description of Artificial Sequence: Synthetic oligonucleotide
uuugacuucuuaagauuua

SEQ ID NO: 1606253 - RNA, 19 nt, Artificial Sequence
  Description of Artificial Sequence: Synthetic oligonucleotide
aaucaucccauugaucuua

SEQ ID NO: 1606254 - RNA, 19 nt, Artificial Sequence
  Description of Artificial Sequence: Synthetic oligonucleotide
uccgcuugucacaggaagc

SEQ ID NO: 1606255 - RNA, 19 nt, Artificial Sequence
  Description of Artificial Sequence: Synthetic oligonucleotide
cacuuuaggccuugggaag

SEQ ID NO: 1606256 - RNA, 19 nt, Artificial Sequence
  Description of Artificial Sequence: Synthetic oligonucleotide
ucaucaagauugcuuuaaa

SEQ ID NO: 1606257 - RNA, 19 nt, Artificial Sequence
  Description of Artificial Sequence: Synthetic oligonucleotide
uaugucggaguugaugaga

SEQ ID NO: 1606258 - RNA, 19 nt, Artificial Sequence
  Description of Artificial Sequence: Synthetic oligonucleotide
ugauauaaucuaagauaau

SEQ ID NO: 1606259 - RNA, 19 nt, Artificial Sequence
  Description of Artificial Sequence: Synthetic oligonucleotide
cuccaggugauacacuuug

SEQ ID NO: 1606260 - RNA, 19 nt, Artificial Sequence
  Description of Artificial Sequence: Synthetic oligonucleotide
cugggaaauccuaucauga

SEQ ID NO: 1606261 - RNA, 19 nt, Artificial Sequence
  Description of Artificial Sequence: Synthetic oligonucleotide
guagcgguccccuauguuc

SEQ ID NO: 1606262 - RNA, 19 nt, Artificial Sequence
  Description of Artificial Sequence: Synthetic oligonucleotide
cuuaagauuuacauuugua

SEQ ID NO: 1606263 - RNA, 19 nt, Artificial Sequence
  Description of Artificial Sequence: Synthetic oligonucleotide
gagauagucucuccugcac

SEQ ID NO: 1606264 - RNA, 19 nt, Artificial Sequence
  Description of Artificial Sequence: Synthetic oligonucleotide
agauagucucuccugcaca

SEQ ID NO: 1606265 - RNA, 19 nt, Artificial Sequence
  Description of Artificial Sequence: Synthetic oligonucleotide
ucuggccccaacacuuuag

SEQ ID NO: 1606266 - RNA, 19 nt, Artificial Sequence
  Description of Artificial Sequence: Synthetic oligonucleotide
ugauugaaagauguguauu

SEQ ID NO: 1606267 - RNA, 19 nt, Artificial Sequence
  Description of Artificial Sequence: Synthetic oligonucleotide
auacuuccuccacuaaucu

SEQ ID NO: 1606268 - RNA, 19 nt, Artificial Sequence
  Description of Artificial Sequence: Synthetic oligonucleotide
uguaguagaggcgccgccc

SEQ ID NO: 1606269 - RNA, 19 nt, Artificial Sequence
  Description of Artificial Sequence: Synthetic oligonucleotide
ggugccucaccucaaaaug

SEQ ID NO: 1606270 - RNA, 19 nt, Artificial Sequence
  Description of Artificial Sequence: Synthetic oligonucleotide
gauugaaagauguguauuu

SEQ ID NO: 1606271 - RNA, 19 nt, Artificial Sequence
  Description of Artificial Sequence: Synthetic oligonucleotide
ugcuaugucuuagugccca

SEQ ID NO: 1606272 - RNA, 19 nt, Artificial Sequence
  Description of Artificial Sequence: Synthetic oligonucleotide
uuggccuuugcauuauguc

SEQ ID NO: 1606273 - RNA, 19 nt, Artificial Sequence
  Description of Artificial Sequence: Synthetic oligonucleotide
uagaaacaaucugugugug

SEQ ID NO: 1606274 - RNA, 19 nt, Artificial Sequence
  Description of Artificial Sequence: Synthetic oligonucleotide
ugugaccauaaauucucuc

SEQ ID NO: 1606275 - RNA, 19 nt, Artificial Sequence
  Description of Artificial Sequence: Synthetic oligonucleotide
gggaaauccuaucaugaug

SEQ ID NO: 1606276 - RNA, 19 nt, Artificial Sequence
  Description of Artificial Sequence: Synthetic oligonucleotide
cuaagaaaugccucaccca

SEQ ID NO: 1606277 - RNA, 19 nt, Artificial Sequence
  Description of Artificial Sequence: Synthetic oligonucleotide
ucgauggccgaggacauug

SEQ ID NO: 1606278 - RNA, 19 nt, Artificial Sequence
  Description of Artificial Sequence: Synthetic oligonucleotide
gauagucucuccugcacaa

SEQ ID NO: 1606279 - RNA, 19 nt, Artificial Sequence
  Description of Artificial Sequence: Synthetic oligonucleotide
ucgcaucgucaucucauag

SEQ ID NO: 1606280 - RNA, 19 nt, Artificial Sequence
  Description of Artificial Sequence: Synthetic oligonucleotide
gaaguagcgguccccuaug

SEQ ID NO: 1606281 - RNA, 19 nt, Artificial Sequence
  Description of Artificial Sequence: Synthetic oligonucleotide
augucuuagugcccaagga

SEQ ID NO: 1606282 - RNA, 19 nt, Artificial Sequence
  Description of Artificial Sequence: Synthetic oligonucleotide
gacggguccaggcucuucc

SEQ ID NO: 1606283 - RNA, 19 nt, Artificial Sequence
  Description of Artificial Sequence: Synthetic oligonucleotide
cacaaucuccuaagaaaug

SEQ ID NO: 1606284 - RNA, 19 nt, Artificial Sequence
  Description of Artificial Sequence: Synthetic oligonucleotide
ggaugcuaugucuuagugc

SEQ ID NO: 1606285 - RNA, 19 nt, Artificial Sequence
  Description of Artificial Sequence: Synthetic oligonucleotide
cagcuuguaguagaggcgc

SEQ ID NO: 1606286 - RNA, 19 nt, Artificial Sequence
  Description of Artificial Sequence: Synthetic oligonucleotide
aguccacucauagaugucu

SEQ ID NO: 1606287 - RNA, 19 nt, Artificial Sequence
  Description of Artificial Sequence: Synthetic oligonucleotide
ggccccaacacuuuaggcc

SEQ ID NO: 1606288 - RNA, 19 nt, Artificial Sequence
  Description of Artificial Sequence: Synthetic oligonucleotide
aucgcgcgcagucgcaggc

SEQ ID NO: 1606289 - RNA, 19 nt, Artificial Sequence
  Description of Artificial Sequence: Synthetic oligonucleotide
gggaaggugaccaagaaaa

SEQ ID NO: 1606290 - RNA, 19 nt, Artificial Sequence
  Description of Artificial Sequence: Synthetic oligonucleotide
cuggucgauggcuuucagg

SEQ ID NO: 1606291 - RNA, 19 nt, Artificial Sequence
  Description of Artificial Sequence: Synthetic oligonucleotide
ugaucuuaguccacucaua

SEQ ID NO: 1606292 - RNA, 19 nt, Artificial Sequence
  Description of Artificial Sequence: Synthetic oligonucleotide
cuuuguggcgcgugccugg

SEQ ID NO: 1606293 - RNA, 19 nt, Artificial Sequence
  Description of Artificial Sequence: Synthetic oligonucleotide
uccucagacggguccaggc

SEQ ID NO: 1606294 - RNA, 19 nt, Artificial Sequence
  Description of Artificial Sequence: Synthetic oligonucleotide
uaucugucaccuacacaga

SEQ ID NO: 1606295 - RNA, 19 nt, Artificial Sequence
  Description of Artificial Sequence: Synthetic oligonucleotide
uagcgguccccuauguucu

SEQ ID NO: 1606296 - RNA, 19 nt, Artificial Sequence
  Description of Artificial Sequence: Synthetic oligonucleotide
uacuauggauagucuguga

SEQ ID NO: 1606297 - RNA, 19 nt, Artificial Sequence
  Description of Artificial Sequence: Synthetic oligonucleotide
uuccuuucgauggccgagg

SEQ ID NO: 1606298 - RNA, 19 nt, Artificial Sequence
  Description of Artificial Sequence: Synthetic oligonucleotide
ugggaaauccuaucaugau

SEQ ID NO: 1606299 - RNA, 19 nt, Artificial Sequence
  Description of Artificial Sequence: Synthetic oligonucleotide
agccugagauagucucucc

SEQ ID NO: 1606300 - RNA, 19 nt, Artificial Sequence
  Description of Artificial Sequence: Synthetic oligonucleotide
ugccucaccucaaaaugaa

SEQ ID NO: 1606301 - RNA, 19 nt, Artificial Sequence
  Description of Artificial Sequence: Synthetic oligonucleotide
uccccuauguucugcuggc

SEQ ID NO: 1606302 - RNA, 19 nt, Artificial Sequence
  Description of Artificial Sequence: Synthetic oligonucleotide
aaagccugagauagucucu

SEQ ID NO: 1606303 - RNA, 19 nt, Artificial Sequence
  Description of Artificial Sequence: Synthetic oligonucleotide
aucuuaguccacucauaga

SEQ ID NO: 1606304 - RNA, 19 nt, Artificial Sequence
  Description of Artificial Sequence: Synthetic oligonucleotide
agucaccgcgcucccuucc

SEQ ID NO: 1606305 - RNA, 19 nt, Artificial Sequence
  Description of Artificial Sequence: Synthetic oligonucleotide
cacacuaugucggaguuga

SEQ ID NO: 1606306 - RNA, 19 nt, Artificial Sequence
  Description of Artificial Sequence: Synthetic oligonucleotide
cuaugucggaguugaugag

SEQ ID NO: 1606307 - RNA, 19 nt, Artificial Sequence
  Description of Artificial Sequence: Synthetic oligonucleotide
uaggccuugggaaggugac

SEQ ID NO: 1606308 - RNA, 19 nt, Artificial Sequence
  Description of Artificial Sequence: Synthetic oligonucleotide
cagcacacuugaaacacuc

SEQ ID NO: 1606309 - RNA, 19 nt, Artificial Sequence
  Description of Artificial Sequence: Synthetic oligonucleotide
cauugaucuuaguccacuc

SEQ ID NO: 1606310 - RNA, 19 nt, Artificial Sequence
  Description of Artificial Sequence: Synthetic oligonucleotide
aaguagcgguccccuaugu

SEQ ID NO: 1606311 - RNA, 19 nt, Artificial Sequence
  Description of Artificial Sequence: Synthetic oligonucleotide
cacuaugucggaguugaug

SEQ ID NO: 1606312 - RNA, 19 nt, Artificial Sequence
  Description of Artificial Sequence: Synthetic oligonucleotide
gaccauaaauucucucuaa

SEQ ID NO: 1606313 - RNA, 19 nt, Artificial Sequence
  Description of Artificial Sequence: Synthetic oligonucleotide
uagaugucuuguucacaca

SEQ ID NO: 1606314 - RNA, 19 nt, Artificial Sequence
  Description of Artificial Sequence: Synthetic oligonucleotide
guuacuauggauagucugu

SEQ ID NO: 1606315 - RNA, 19 nt, Artificial Sequence
  Description of Artificial Sequence: Synthetic oligonucleotide
guaguagaggcgccgcccc

SEQ ID NO: 1606316 - RNA, 19 nt, Artificial Sequence
  Description of Artificial Sequence: Synthetic oligonucleotide
caacuuccgucccagcuug

SEQ ID NO: 1606317 - RNA, 19 nt, Artificial Sequence
  Description of Artificial Sequence: Synthetic oligonucleotide
cugcccgucaccacagccc

SEQ ID NO: 1606318 - RNA, 19 nt, Artificial Sequence
  Description of Artificial Sequence: Synthetic oligonucleotide
auggccgaggacauugggg

SEQ ID NO: 1606319 - RNA, 19 nt, Artificial Sequence
  Description of Artificial Sequence: Synthetic oligonucleotide
aaugccucacccacccuca

SEQ ID NO: 1606320 - RNA, 19 nt, Artificial Sequence
  Description of Artificial Sequence: Synthetic oligonucleotide
uuucgauggccgaggacau

SEQ ID NO: 1606321 - RNA, 19 nt, Artificial Sequence
  Description of Artificial Sequence: Synthetic oligonucleotide
ccuccacuaaucuugucag

SEQ ID NO: 1606322 - RNA, 19 nt, Artificial Sequence
  Description of Artificial Sequence: Synthetic oligonucleotide
cuaaucuugucaguuacua

SEQ ID NO: 1606323 - RNA, 19 nt, Artificial Sequence
  Description of Artificial Sequence: Synthetic oligonucleotide
ccaaggagagcccacaauc

SEQ ID NO: 1606324 - RNA, 19 nt, Artificial Sequence
  Description of Artificial Sequence: Synthetic oligonucleotide
caccucaaaaugaaggugu

SEQ ID NO: 1606325 - RNA, 19 nt, Artificial Sequence
  Description of Artificial Sequence: Synthetic oligonucleotide
aagguaucugucaccuaca

SEQ ID NO: 1606326 - RNA, 19 nt, Artificial Sequence
  Description of Artificial Sequence: Synthetic oligonucleotide
uccaggugauacacuuugu

SEQ ID NO: 1606327 - RNA, 19 nt, Artificial Sequence
  Description of Artificial Sequence: Synthetic oligonucleotide
uggccccaacacuuuaggc

SEQ ID NO: 1606328 - RNA, 19 nt, Artificial Sequence
  Description of Artificial Sequence: Synthetic oligonucleotide
aggcagcacacuugaaaca

SEQ ID NO: 1606329 - RNA, 19 nt, Artificial Sequence
  Description of Artificial Sequence: Synthetic oligonucleotide
uccuuuugucgcugaaguc

SEQ ID NO: 1606330 - RNA, 19 nt, Artificial Sequence
  Description of Artificial Sequence: Synthetic oligonucleotide
ugucggaguugaugagaag

SEQ ID NO: 1606331 - RNA, 19 nt, Artificial Sequence
  Description of Artificial Sequence: Synthetic oligonucleotide
gaucgcgcgcagucgcagg

SEQ ID NO: 1606332 - RNA, 19 nt, Artificial Sequence
  Description of Artificial Sequence: Synthetic oligonucleotide
uggucuaaaucaucccauu

SEQ ID NO: 1606333 - RNA, 19 nt, Artificial Sequence
  Description of Artificial Sequence: Synthetic oligonucleotide
caggcucuuccuuucgaug

SEQ ID NO: 1606334 - RNA, 19 nt, Artificial Sequence
  Description of Artificial Sequence: Synthetic oligonucleotide
guccuuuugucgcugaagu

SEQ ID NO: 1606335 - RNA, 19 nt, Artificial Sequence
  Description of Artificial Sequence: Synthetic oligonucleotide
agacaguguuuucacugaa

SEQ ID NO: 1606336 - RNA, 19 nt, Artificial Sequence
  Description of Artificial Sequence: Synthetic oligonucleotide
gagaccaucuugaccaaaa

SEQ ID NO: 1606337 - RNA, 19 nt, Artificial Sequence
  Description of Artificial Sequence: Synthetic oligonucleotide
uccuuucgauggccgagga

SEQ ID NO: 1606338 - RNA, 19 nt, Artificial Sequence
  Description of Artificial Sequence: Synthetic oligonucleotide
cuaugucuuagugcccaag

SEQ ID NO: 1606339 - RNA, 19 nt, Artificial Sequence
  Description of Artificial Sequence: Synthetic oligonucleotide
auuaugucauguggaugcu

SEQ ID NO: 1606340 - RNA, 19 nt, Artificial Sequence
  Description of Artificial Sequence: Synthetic oligonucleotide
ccugagauagucucuccug

SEQ ID NO: 1606341 - RNA, 19 nt, Artificial Sequence
  Description of Artificial Sequence: Synthetic oligonucleotide
guaccucauccacugguuc

SEQ ID NO: 1606342 - RNA, 19 nt, Artificial Sequence
  Description of Artificial Sequence: Synthetic oligonucleotide
uaguccacucauagauguc

SEQ ID NO: 1606343 - RNA, 19 nt, Artificial Sequence
  Description of Artificial Sequence: Synthetic oligonucleotide
ggcagcacacuugaaacac

SEQ ID NO: 1606344 - RNA, 19 nt, Artificial Sequence
  Description of Artificial Sequence: Synthetic oligonucleotide
augcuaugucuuagugccc

SEQ ID NO: 1606345 - RNA, 19 nt, Artificial Sequence
  Description of Artificial Sequence: Synthetic oligonucleotide
uccgccggcgagcucgccc

SEQ ID NO: 1606346 - RNA, 19 nt, Artificial Sequence
  Description of Artificial Sequence: Synthetic oligonucleotide
uuuaggccuugggaaggug

SEQ ID NO: 1606347 - RNA, 19 nt, Artificial Sequence
  Description of Artificial Sequence: Synthetic oligonucleotide
cuugcucggucgcuccgcc

SEQ ID NO: 1606348 - RNA, 19 nt, Artificial Sequence
  Description of Artificial Sequence: Synthetic oligonucleotide
ucuugcucggucgcuccgc

SEQ ID NO: 1606349 - RNA, 19 nt, Artificial Sequence
  Description of Artificial Sequence: Synthetic oligonucleotide
acucgcaucgucaucucau

SEQ ID NO: 1606350 - RNA, 19 nt, Artificial Sequence
  Description of Artificial Sequence: Synthetic oligonucleotide
ugaaacacuccaggugaua

SEQ ID NO: 1606351 - RNA, 19 nt, Artificial Sequence
  Description of Artificial Sequence: Synthetic oligonucleotide
ugucuuucacucgcaucgu

SEQ ID NO: 1606352 - RNA, 19 nt, Artificial Sequence
  Description of Artificial Sequence: Synthetic oligonucleotide
gcuuguaguagaggcgccg

SEQ ID NO: 1606353 - RNA, 19 nt, Artificial Sequence
  Description of Artificial Sequence: Synthetic oligonucleotide
cacgcucaaggcagucacc

SEQ ID NO: 1606354 - RNA, 19 nt, Artificial Sequence
  Description of Artificial Sequence: Synthetic oligonucleotide
uuuguggcgcgugccuggc

SEQ ID NO: 1606355 - RNA, 19 nt, Artificial Sequence
  Description of Artificial Sequence: Synthetic oligonucleotide
agccggcauccacagaggu

SEQ ID NO: 1606356 - RNA, 19 nt, Artificial Sequence
  Description of Artificial Sequence: Synthetic oligonucleotide
caauccucaugccaguacu

SEQ ID NO: 1606357 - RNA, 19 nt, Artificial Sequence
  Description of Artificial Sequence: Synthetic oligonucleotide
cugucaccuacacagaaau

SEQ ID NO: 1606358 - RNA, 19 nt, Artificial Sequence
  Description of Artificial Sequence: Synthetic oligonucleotide
cucuugcucggucgcuccg

SEQ ID NO: 1606359 - RNA, 19 nt, Artificial Sequence
  Description of Artificial Sequence: Synthetic oligonucleotide
cucccuuuguggcgcgugc

SEQ ID NO: 1606360 - RNA, 19 nt, Artificial Sequence
  Description of Artificial Sequence: Synthetic oligonucleotide
agcccacaaucuccuaaga

SEQ ID NO: 1606361 - RNA, 19 nt, Artificial Sequence
  Description of Artificial Sequence: Synthetic oligonucleotide
aguagcgguccccuauguu

SEQ ID NO: 1606362 - RNA, 19 nt, Artificial Sequence
  Description of Artificial Sequence: Synthetic oligonucleotide
ucccgaucgcgcgcagucg

SEQ ID NO: 1606363 - RNA, 19 nt, Artificial Sequence
  Description of Artificial Sequence: Synthetic oligonucleotide
ugcccaaggagagcccaca

SEQ ID NO: 1606364 - RNA, 19 nt, Artificial Sequence
  Description of Artificial Sequence: Synthetic oligonucleotide
ucccuuuguggcgcgugcc

SEQ ID NO: 1606365 - RNA, 19 nt, Artificial Sequence
  Description of Artificial Sequence: Synthetic oligonucleotide
ccucaugccaguacugguc

SEQ ID NO: 1606366 - RNA, 19 nt, Artificial Sequence
  Description of Artificial Sequence: Synthetic oligonucleotide
cacggauccgcuugucaca

SEQ ID NO: 1606367 - RNA, 19 nt, Artificial Sequence
  Description of Artificial Sequence: Synthetic oligonucleotide
gucccgaucgcgcgcaguc

SEQ ID NO: 1606368 - RNA, 19 nt, Artificial Sequence
  Description of Artificial Sequence: Synthetic oligonucleotide
auggauagucugugaccau

SEQ ID NO: 1606369 - RNA, 19 nt, Artificial Sequence
  Description of Artificial Sequence: Synthetic oligonucleotide
aguaccucauccacugguu

SEQ ID NO: 1606370 - RNA, 19 nt, Artificial Sequence
  Description of Artificial Sequence: Synthetic oligonucleotide
cacaacuuccgucccagcu

SEQ ID NO: 1606371 - RNA, 19 nt, Artificial Sequence
  Description of Artificial Sequence: Synthetic oligonucleotide
cuggucuaaaucaucccau

SEQ ID NO: 1606372 - RNA, 19 nt, Artificial Sequence
  Description of Artificial Sequence: Synthetic oligonucleotide
augccaguacuggucgaug

SEQ ID NO: 1606373 - RNA, 19 nt, Artificial Sequence
  Description of Artificial Sequence: Synthetic oligonucleotide
guagaggcgccgccccacc

SEQ ID NO: 1606374 - RNA, 19 nt, Artificial Sequence
  Description of Artificial Sequence: Synthetic oligonucleotide
ggggcgcucccuuuguggc

SEQ ID NO: 1606375 - RNA, 19 nt, Artificial Sequence
  Description of Artificial Sequence: Synthetic oligonucleotide
agaagguaucugucaccua

SEQ ID NO: 1606376 - RNA, 19 nt, Artificial Sequence
  Description of Artificial Sequence: Synthetic oligonucleotide
uagaggcgccgccccaccu

SEQ ID NO: 1606377 - RNA, 19 nt, Artificial Sequence
  Description of Artificial Sequence: Synthetic oligonucleotide
ucacucgcaucgucaucuc

SEQ ID NO: 1606378 - RNA, 19 nt, Artificial Sequence
  Description of Artificial Sequence: Synthetic oligonucleotide
ccaaauugagguuuguuuu

SEQ ID NO: 1606379 - RNA, 19 nt, Artificial Sequence
  Description of Artificial Sequence: Synthetic oligonucleotide
cuuuugucgcugaagucuu

SEQ ID NO: 1606380 - RNA, 19 nt, Artificial Sequence
  Description of Artificial Sequence: Synthetic oligonucleotide
caguaccucauccacuggu

SEQ ID NO: 1606381 - RNA, 19 nt, Artificial Sequence
  Description of Artificial Sequence: Synthetic oligonucleotide
guggaugcuaugucuuagu

SEQ ID NO: 1606382 - RNA, 19 nt, Artificial Sequence
  Description of Artificial Sequence: Synthetic oligonucleotide
ccggcauccacagagguca

SEQ ID NO: 1606383 - RNA, 19 nt, Artificial Sequence
  Description of Artificial Sequence: Synthetic oligonucleotide
ucggucgcuccgccggcga

SEQ ID NO: 1606384 - RNA, 19 nt, Artificial Sequence
  Description of Artificial Sequence: Synthetic oligonucleotide
guacuggucgauggcuuuc

SEQ ID NO: 1606385 - RNA, 19 nt, Artificial Sequence
  Description of Artificial Sequence: Synthetic oligonucleotide
agcgguccccuauguucug

SEQ ID NO: 1606386 - RNA, 19 nt, Artificial Sequence
  Description of Artificial Sequence: Synthetic oligonucleotide
agguucccaaagugccuaa

SEQ ID NO: 1606387 - RNA, 19 nt, Artificial Sequence
  Description of Artificial Sequence: Synthetic oligonucleotide
gaaaugcuucuggcaggca

SEQ ID NO: 1606388 - RNA, 19 nt, Artificial Sequence
  Description of Artificial Sequence: Synthetic oligonucleotide
ccuuuugucgcugaagucu

SEQ ID NO: 1606389 - RNA, 19 nt, Artificial Sequence
  Description of Artificial Sequence: Synthetic oligonucleotide
gccuuugcauuaugucaug

SEQ ID NO: 1606390 - RNA, 19 nt, Artificial Sequence
  Description of Artificial Sequence: Synthetic oligonucleotide
cgucaucucauaggcacgg

SEQ ID NO: 1606391 - RNA, 19 nt, Artificial Sequence
  Description of Artificial Sequence: Synthetic oligonucleotide
agucucuccugcacaacuu

SEQ ID NO: 1606392 - RNA, 19 nt, Artificial Sequence
  Description of Artificial Sequence: Synthetic oligonucleotide
ucaccgcgcucccuuccau

SEQ ID NO: 1606393 - RNA, 19 nt, Artificial Sequence
  Description of Artificial Sequence: Synthetic oligonucleotide
caguuacuauggauagucu

SEQ ID NO: 1606394 - RNA, 19 nt, Artificial Sequence
  Description of Artificial Sequence: Synthetic oligonucleotide
gcccacaaucuccuaagaa

SEQ ID NO: 1606395 - RNA, 19 nt, Artificial Sequence
  Description of Artificial Sequence: Synthetic oligonucleotide
gucaccgcgcucccuucca

SEQ ID NO: 1606396 - RNA, 19 nt, Artificial Sequence
  Description of Artificial Sequence: Synthetic oligonucleotide
cuuugucuuucacucgcau

SEQ ID NO: 1606397 - RNA, 19 nt, Artificial Sequence
  Description of Artificial Sequence: Synthetic oligonucleotide
cacucgcaucgucaucuca

SEQ ID NO: 1606398 - RNA, 19 nt, Artificial Sequence
  Description of Artificial Sequence: Synthetic oligonucleotide
gauccgcuugucacaggaa

SEQ ID NO: 1606399 - RNA, 19 nt, Artificial Sequence
  Description of Artificial Sequence: Synthetic oligonucleotide
cugcacaacuuccguccca

SEQ ID NO: 1606400 - RNA, 19 nt, Artificial Sequence
  Description of Artificial Sequence: Synthetic oligonucleotide
ggcgcucccuuuguggcgc

SEQ ID NO: 1606401 - RNA, 19 nt, Artificial Sequence
  Description of Artificial Sequence: Synthetic oligonucleotide
caccgcgcucccuuccauc

SEQ ID NO: 1606402 - RNA, 19 nt, Artificial Sequence
  Description of Artificial Sequence: Synthetic oligonucleotide
cccgaucgcgcgcagucgc

SEQ ID NO: 1606403 - RNA, 19 nt, Artificial Sequence
  Description of Artificial Sequence: Synthetic oligonucleotide
cacucauagaugucuuguu

SEQ ID NO: 1606404 - RNA, 19 nt, Artificial Sequence
  Description of Artificial Sequence: Synthetic oligonucleotide
aacuuccgucccagcuugu

SEQ ID NO: 1606405 - RNA, 19 nt, Artificial Sequence
  Description of Artificial Sequence: Synthetic oligonucleotide
gugauucaucaagauugcu

SEQ ID NO: 1606406 - RNA, 19 nt, Artificial Sequence
  Description of Artificial Sequence: Synthetic oligonucleotide
gccccucacgcucaaggca

SEQ ID NO: 1606407 - RNA, 19 nt, Artificial Sequence
  Description of Artificial Sequence: Synthetic oligonucleotide
cucggucgcuccgccggcg

SEQ ID NO: 1606408 - RNA, 19 nt, Artificial Sequence
  Description of Artificial Sequence: Synthetic oligonucleotide
gucaguuacuauggauagu

SEQ ID NO: 1606409 - RNA, 19 nt, Artificial Sequence
  Description of Artificial Sequence: Synthetic oligonucleotide
caccuacacagaaaugcuu

SEQ ID NO: 1606410 - RNA, 19 nt, Artificial Sequence
  Description of Artificial Sequence: Synthetic oligonucleotide
gggguaucugcaguaccuc

SEQ ID NO: 1606411 - RNA, 19 nt, Artificial Sequence
  Description of Artificial Sequence: Synthetic oligonucleotide
cccgucaccacagcccgcc

SEQ ID NO: 1606412 - RNA, 19 nt, Artificial Sequence
  Description of Artificial Sequence: Synthetic oligonucleotide
cacacacuaugucggaguu

SEQ ID NO: 1606413 - RNA, 19 nt, Artificial Sequence
  Description of Artificial Sequence: Synthetic oligonucleotide
ccuuucgauggccgaggac

SEQ ID NO: 1606414 - RNA, 19 nt, Artificial Sequence
  Description of Artificial Sequence: Synthetic oligonucleotide
cuccacuaaucuugucagu

SEQ ID NO: 1606415 - RNA, 19 nt, Artificial Sequence
  Description of Artificial Sequence: Synthetic oligonucleotide
gccugagauagucucuccu

SEQ ID NO: 1606416 - RNA, 19 nt, Artificial Sequence
  Description of Artificial Sequence: Synthetic oligonucleotide
ggucacagcugaggcaauc

SEQ ID NO: 1606417 - RNA, 19 nt, Artificial Sequence
  Description of Artificial Sequence: Synthetic oligonucleotide
uucgauggccgaggacauu

SEQ ID NO: 1606418 - RNA, 19 nt, Artificial Sequence
  Description of Artificial Sequence: Synthetic oligonucleotide
cucgggugcucgggcgccg

SEQ ID NO: 1606419 - RNA, 19 nt, Artificial Sequence
  Description of Artificial Sequence: Synthetic oligonucleotide
ccuuuguggcgcgugccug

SEQ ID NO: 1606420 - RNA, 19 nt, Artificial Sequence
  Description of Artificial Sequence: Synthetic oligonucleotide
cgcuccgccggcgagcucg

SEQ ID NO: 1606421 - RNA, 19 nt, Artificial Sequence
  Description of Artificial Sequence: Synthetic oligonucleotide
cgauggccgaggacauugg

SEQ ID NO: 1606422 - RNA, 19 nt, Artificial Sequence
  Description of Artificial Sequence: Synthetic oligonucleotide
gggugcucgggcgccgccg

SEQ ID NO: 1606423 - RNA, 19 nt, Artificial Sequence
  Description of Artificial Sequence: Synthetic oligonucleotide
gcgcgugccuggcuggcug

SEQ ID NO: 1606424 - RNA, 19 nt, Artificial Sequence
  Description of Artificial Sequence: Synthetic oligonucleotide
gcuaugucuuagugcccaa

SEQ ID NO: 1606425 - RNA, 19 nt, Artificial Sequence
  Description of Artificial Sequence: Synthetic oligonucleotide
ggucgcuccgccggcgagc

SEQ ID NO: 1606426 - RNA, 19 nt, Artificial Sequence
  Description of Artificial Sequence: Synthetic oligonucleotide
gccgccccaccucucccag

SEQ ID NO: 1606427 - RNA, 19 nt, Artificial Sequence
  Description of Artificial Sequence: Synthetic oligonucleotide
ccacucauagaugucuugu

SEQ ID NO: 1606428 - RNA, 19 nt, Artificial Sequence
  Description of Artificial Sequence: Synthetic oligonucleotide
ccuaucaugauggcacagu

SEQ ID NO: 1606429 - RNA, 19 nt, Artificial Sequence
  Description of Artificial Sequence: Synthetic oligonucleotide
cacccacccucagguuccc

SEQ ID NO: 1606430 - RNA, 19 nt, Artificial Sequence
  Description of Artificial Sequence: Synthetic oligonucleotide
cauaggcacggauccgcuu

SEQ ID NO: 1606431 - RNA, 19 nt, Artificial Sequence
  Description of Artificial Sequence: Synthetic oligonucleotide
acacuaugucggaguugau

SEQ ID NO: 1606432 - RNA, 19 nt, Artificial Sequence
  Description of Artificial Sequence: Synthetic oligonucleotide
gccggcauccacagagguc

SEQ ID NO: 1606433 - RNA, 19 nt, Artificial Sequence
  Description of Artificial Sequence: Synthetic oligonucleotide
cucgccccucacgcucaag

SEQ ID NO: 1606434 - RNA, 19 nt, Artificial Sequence
  Description of Artificial Sequence: Synthetic oligonucleotide
cgccgcccggucccgaucg

SEQ ID NO: 1606435 - RNA, 19 nt, Artificial Sequence
  Description of Artificial Sequence: Synthetic oligonucleotide
cccggucccgaucgcgcgc

SEQ ID NO: 1606436 - RNA, 19 nt, Artificial Sequence
  Description of Artificial Sequence: Synthetic oligonucleotide
gucgcuccgccggcgagcu

SEQ ID NO: 1606437 - RNA, 19 nt, Artificial Sequence
  Description of Artificial Sequence: Synthetic oligonucleotide
gcgcucccuuuguggcgcg

SEQ ID NO: 1606438 - RNA, 19 nt, Artificial Sequence
  Description of Artificial Sequence: Synthetic oligonucleotide
ccucgggugcucgggcgcc

SEQ ID NO: 1606439 - RNA, 19 nt, Artificial Sequence
  Description of Artificial Sequence: Synthetic oligonucleotide
cgaucgcgcgcagucgcag

SEQ ID NO: 1606440 - RNA, 19 nt, Artificial Sequence
  Description of Artificial Sequence: Synthetic oligonucleotide
ccaggcucuuccuuucgau

SEQ ID NO: 1606441 - RNA, 19 nt, Artificial Sequence
  Description of Artificial Sequence: Synthetic oligonucleotide
cgcgugccuggcuggcugc

SEQ ID NO: 1606442 - RNA, 19 nt, Artificial Sequence
  Description of Artificial Sequence: Synthetic oligonucleotide
gcuggggacucuggucuaa

SEQ ID NO: 1606443 - RNA, 19 nt, Artificial Sequence
  Description of Artificial Sequence: Synthetic oligonucleotide
ucgcuccgccggcgagcuc

SEQ ID NO: 1606444 - RNA, 19 nt, Artificial Sequence
  Description of Artificial Sequence: Synthetic oligonucleotide
cuccgccggcgagcucgcc

SEQ ID NO: 1606445 - RNA, 19 nt, Artificial Sequence
  Description of Artificial Sequence: Synthetic oligonucleotide
ccgccccaccucucccagc

SEQ ID NO: 1606446 - RNA, 19 nt, Artificial Sequence
  Description of Artificial Sequence: Synthetic oligonucleotide
gcuccgccggcgagcucgc

SEQ ID NO: 1606447 - RNA, 19 nt, Artificial Sequence
  Description of Artificial Sequence: Synthetic oligonucleotide
cggucgcuccgccggcgag

SEQ ID NO: 1606448 - RNA, 19 nt, Artificial Sequence
  Description of Artificial Sequence: Synthetic oligonucleotide
ggucccgaucgcgcgcagu

SEQ ID NO: 1606449 - RNA, 19 nt, Artificial Sequence
  Description of Artificial Sequence: Synthetic oligonucleotide
cgggugcucgggcgccgcc

SEQ ID NO: 1606450 - RNA, 19 nt, Artificial Sequence
  Description of Artificial Sequence: Synthetic oligonucleotide
gcucgccccucacgcucaa

SEQ ID NO: 1606451 - RNA, 19 nt, Artificial Sequence
  Description of Artificial Sequence: Synthetic oligonucleotide
ccccacugagacaguguuu

SEQ ID NO: 1606452 - RNA, 19 nt, Artificial Sequence
  Description of Artificial Sequence: Synthetic oligonucleotide
ggcgcgugccuggcuggcu

SEQ ID NO: 1606453 - RNA, 19 nt, Artificial Sequence
  Description of Artificial Sequence: Synthetic oligonucleotide
ccccaaggugcuggggacu

SEQ ID NO: 1606454 - RNA, 19 nt, Artificial Sequence
  Description of Artificial Sequence: Synthetic oligonucleotide
ccggucccgcugcccguca

SEQ ID NO: 1606455 - RNA, 19 nt, Artificial Sequence
  Description of Artificial Sequence: Synthetic oligonucleotide
cucgggcgccgccgcuccu

SEQ ID NO: 1606456 - RNA, 19 nt, Artificial Sequence
  Description of Artificial Sequence: Synthetic oligonucleotide
cggucccgaucgcgcgcag

SEQ ID NO: 1606457 - RNA, 19 nt, Artificial Sequence
  Description of Artificial Sequence: Synthetic oligonucleotide
gggaggcggcgugccgggu

SEQ ID NO: 1606458 - RNA, 19 nt, Artificial Sequence
  Description of Artificial Sequence: Synthetic oligonucleotide
cgcucccuuuguggcgcgu

SEQ ID NO: 1606459 - RNA, 19 nt, Artificial Sequence
  Description of Artificial Sequence: Synthetic oligonucleotide
uuaaucuuguguuuuagag

SEQ ID NO: 1606460 - RNA, 19 nt, Artificial Sequence
  Description of Artificial Sequence: Synthetic oligonucleotide
uuuaaagcggugcuggugg

SEQ ID NO: 1606461 - RNA, 19 nt, Artificial Sequence
  Description of Artificial Sequence: Synthetic oligonucleotide
auacaguucacuuuagagg

SEQ ID NO: 1606462 - RNA, 19 nt, Artificial Sequence
  Description of Artificial Sequence: Synthetic oligonucleotide
uacaguucacuuuagaggc

SEQ ID NO: 1606463 - RNA, 19 nt, Artificial Sequence
  Description of Artificial Sequence: Synthetic oligonucleotide
aauuuugcccuccucgugg

SEQ ID NO: 1606464 - RNA, 19 nt, Artificial Sequence
  Description of Artificial Sequence: Synthetic oligonucleotide
auugucaccaccacgaggc

SEQ ID NO: 1606465 - RNA, 19 nt, Artificial Sequence
  Description of Artificial Sequence: Synthetic oligonucleotide
aggaagaagcaucaaacac

SEQ ID NO: 1606466 - RNA, 19 nt, Artificial Sequence
  Description of Artificial Sequence: Synthetic oligonucleotide
cucaugacgaugaaaaccc

SEQ ID NO: 1606467 - RNA, 19 nt, Artificial Sequence
  Description of Artificial Sequence: Synthetic oligonucleotide
aagaccgucccauccaggc

SEQ ID NO: 1606468 - RNA, 19 nt, Artificial Sequence
  Description of Artificial Sequence: Synthetic oligonucleotide
uauccaauaaaccugcuua

SEQ ID NO: 1606469 - RNA, 19 nt, Artificial Sequence
  Description of Artificial Sequence: Synthetic oligonucleotide
uguuuuagagucucugagg

SEQ ID NO: 1606470 - RNA, 19 nt, Artificial Sequence
  Description of Artificial Sequence: Synthetic oligonucleotide
guuucuagguaauacgagg

SEQ ID NO: 1606471 - RNA, 19 nt, Artificial Sequence
  Description of Artificial Sequence: Synthetic oligonucleotide
uuuagagucucugagguug

SEQ ID NO: 1606472 - RNA, 19 nt, Artificial Sequence
  Description of Artificial Sequence: Synthetic oligonucleotide
agauauacagaucacugca

SEQ ID NO: 1606473 - RNA, 19 nt, Artificial Sequence
  Description of Artificial Sequence: Synthetic oligonucleotide
gagguuaucagcaauaaga

SEQ ID NO: 1606474 - RNA, 19 nt, Artificial Sequence
  Description of Artificial Sequence: Synthetic oligonucleotide
gaggcuucagcucaugacg

SEQ ID NO: 1606475 - RNA, 19 nt, Artificial Sequence
  Description of Artificial Sequence: Synthetic oligonucleotide
ugcauugucaccaccacga

SEQ ID NO: 1606476 - RNA, 19 nt, Artificial Sequence
  Description of Artificial Sequence: Synthetic oligonucleotide
uccaucacaaagauuuucc

SEQ ID NO: 1606477 - RNA, 19 nt, Artificial Sequence
  Description of Artificial Sequence: Synthetic oligonucleotide
ucugccaucaccauacagu

SEQ ID NO: 1606478 - RNA, 19 nt, Artificial Sequence
  Description of Artificial Sequence: Synthetic oligonucleotide
acaugagaucaccauaugg

SEQ ID NO: 1606479 - RNA, 19 nt, Artificial Sequence
  Description of Artificial Sequence: Synthetic oligonucleotide
uaguauguagcuuucacuc

SEQ ID NO: 1606480 - RNA, 19 nt, Artificial Sequence
  Description of Artificial Sequence: Synthetic oligonucleotide
acaagaguagaccucacug

SEQ ID NO: 1606481 - RNA, 19 nt, Artificial Sequence
  Description of Artificial Sequence: Synthetic oligonucleotide
ugaaggguuaaucuugugu

SEQ ID NO: 1606482 - RNA, 19 nt, Artificial Sequence
  Description of Artificial Sequence: Synthetic oligonucleotide
agaugugaggacuacaagu

SEQ ID NO: 1606483 - RNA, 19 nt, Artificial Sequence
  Description of Artificial Sequence: Synthetic oligonucleotide
aauacgagguaacuucaca

SEQ ID NO: 1606484 - RNA, 19 nt, Artificial Sequence
  Description of Artificial Sequence: Synthetic oligonucleotide
uuucuagguaauacgaggu

SEQ ID NO: 1606485 - RNA, 19 nt, Artificial Sequence
  Description of Artificial Sequence: Synthetic oligonucleotide
uuuagaggcacccacuuua

SEQ ID NO: 1606486 - RNA, 19 nt, Artificial Sequence
  Description of Artificial Sequence: Synthetic oligonucleotide
ucagcaauaagauguagua

SEQ ID NO: 1606487 - RNA, 19 nt, Artificial Sequence
  Description of Artificial Sequence: Synthetic oligonucleotide
uguaguauguagcuuucac

SEQ ID NO: 1606488 - RNA, 19 nt, Artificial Sequence
  Description of Artificial Sequence: Synthetic oligonucleotide
ugagaucaccauauggcag

SEQ ID NO: 1606489 - RNA, 19 nt, Artificial Sequence
  Description of Artificial Sequence: Synthetic oligonucleotide
auacgagguaacuucacag

SEQ ID NO: 1606490 - RNA, 19 nt, Artificial Sequence
  Description of Artificial Sequence: Synthetic oligonucleotide
uucagaaaggaguggaaca

SEQ ID NO: 1606491 - RNA, 19 nt, Artificial Sequence
  Description of Artificial Sequence: Synthetic oligonucleotide
cacucgacuuuccagaugg

SEQ ID NO: 1606492 - RNA, 19 nt, Artificial Sequence
  Description of Artificial Sequence: Synthetic oligonucleotide
gguaacuucacaguggagg

SEQ ID NO: 1606493 - RNA, 19 nt, Artificial Sequence
  Description of Artificial Sequence: Synthetic oligonucleotide
uuucacucgacuuuccaga

SEQ ID NO: 1606494 - RNA, 19 nt, Artificial Sequence
  Description of Artificial Sequence: Synthetic oligonucleotide
acagcuaacguuggcagcc

SEQ ID NO: 1606495 - RNA, 19 nt, Artificial Sequence
  Description of Artificial Sequence: Synthetic oligonucleotide
aguauguagcuuucacucg

SEQ ID NO: 1606496 - RNA, 19 nt, Artificial Sequence
  Description of Artificial Sequence: Synthetic oligonucleotide
cuccacucagcacauaucg

SEQ ID NO: 1606497 - RNA, 19 nt, Artificial Sequence
  Description of Artificial Sequence: Synthetic oligonucleotide
uaaucuuguguuuuagagu

SEQ ID NO: 1606498 - RNA, 19 nt, Artificial Sequence
  Description of Artificial Sequence: Synthetic oligonucleotide
gagaucaccauauggcagc

SEQ ID NO: 1606499 - RNA, 19 nt, Artificial Sequence
  Description of Artificial Sequence: Synthetic oligonucleotide
ggaagaagcaucaaacacg

SEQ ID NO: 1606500 - RNA, 19 nt, Artificial Sequence
  Description of Artificial Sequence: Synthetic oligonucleotide
ugugaggacuacaagucac

SEQ ID NO: 1606501 - RNA, 19 nt, Artificial Sequence
  Description of Artificial Sequence: Synthetic oligonucleotide
uucacacggaucaugcagc

SEQ ID NO: 1606502 - RNA, 19 nt, Artificial Sequence
  Description of Artificial Sequence: Synthetic oligonucleotide
aaaguaggccagcuuggag

SEQ ID NO: 1606503 - RNA, 19 nt, Artificial Sequence
  Description of Artificial Sequence: Synthetic oligonucleotide
gguaauacgagguaacuuc

SEQ ID NO: 1606504 - RNA, 19 nt, Artificial Sequence
  Description of Artificial Sequence: Synthetic oligonucleotide
guguuuuagagucucugag

SEQ ID NO: 1606505 - RNA, 19 nt, Artificial Sequence
  Description of Artificial Sequence: Synthetic oligonucleotide
cuaaaggcauccauccugc

SEQ ID NO: 1606506 - RNA, 19 nt, Artificial Sequence
  Description of Artificial Sequence: Synthetic oligonucleotide
caugcagcuaaccucagug

SEQ ID NO: 1606507 - RNA, 19 nt, Artificial Sequence
  Description of Artificial Sequence: Synthetic oligonucleotide
cagauauacagaucacugc

SEQ ID NO: 1606508 - RNA, 19 nt, Artificial Sequence
  Description of Artificial Sequence: Synthetic oligonucleotide
acaugugacacagcuaacg

SEQ ID NO: 1606509 - RNA, 19 nt, Artificial Sequence
  Description of Artificial Sequence: Synthetic oligonucleotide
acuacaagucacaugugac

SEQ ID NO: 1606510 - RNA, 19 nt, Artificial Sequence
  Description of Artificial Sequence: Synthetic oligonucleotide
acuuauaagcauccugucu

SEQ ID NO: 1606511 - RNA, 19 nt, Artificial Sequence
  Description of Artificial Sequence: Synthetic oligonucleotide
ugguguauacagcaagaca

SEQ ID NO: 1606512 - RNA, 19 nt, Artificial Sequence
  Description of Artificial Sequence: Synthetic oligonucleotide
agcacggugauccgugagc

SEQ ID NO: 1606513 - RNA, 19 nt, Artificial Sequence
  Description of Artificial Sequence: Synthetic oligonucleotide
guagguauccaauaaaccu

SEQ ID NO: 1606514 - RNA, 19 nt, Artificial Sequence
  Description of Artificial Sequence: Synthetic oligonucleotide
ggcaauuuugcccuccucg

SEQ ID NO: 1606515 - RNA, 19 nt, Artificial Sequence
  Description of Artificial Sequence: Synthetic oligonucleotide
ugcagcuaaccucagugca

SEQ ID NO: 1606516 - RNA, 19 nt, Artificial Sequence
  Description of Artificial Sequence: Synthetic oligonucleotide
augagaucaccauauggca

SEQ ID NO: 1606517 - RNA, 19 nt, Artificial Sequence
  Description of Artificial Sequence: Synthetic oligonucleotide
gaugugaggacuacaaguc

SEQ ID NO: 1606518 - RNA, 19 nt, Artificial Sequence
  Description of Artificial Sequence: Synthetic oligonucleotide
ucacuuuagaggcacccac

SEQ ID NO: 1606519 - RNA, 19 nt, Artificial Sequence
  Description of Artificial Sequence: Synthetic oligonucleotide
acguccaucacaaagauuu

SEQ ID NO: 1606520 - RNA, 19 nt, Artificial Sequence
  Description of Artificial Sequence: Synthetic oligonucleotide
uguggccuguacaacacca

SEQ ID NO: 1606521 - RNA, 19 nt, Artificial Sequence
  Description of Artificial Sequence: Synthetic oligonucleotide
cuuucacucgacuuuccag

SEQ ID NO: 1606522 - RNA, 19 nt, Artificial Sequence
  Description of Artificial Sequence: Synthetic oligonucleotide
accauauggcagcuggaac

SEQ ID NO: 1606523 - RNA, 19 nt, Artificial Sequence
  Description of Artificial Sequence: Synthetic oligonucleotide
gacuacaagucacauguga

SEQ ID NO: 1606524 - RNA, 19 nt, Artificial Sequence
  Description of Artificial Sequence: Synthetic oligonucleotide
acgagguaacuucacagug

SEQ ID NO: 1606525 - RNA, 19 nt, Artificial Sequence
  Description of Artificial Sequence: Synthetic oligonucleotide
ugugcuaccaguuccuuuu

SEQ ID NO: 1606526 - RNA, 19 nt, Artificial Sequence
  Description of Artificial Sequence: Synthetic oligonucleotide
cuuauaagcauccugucua

SEQ ID NO: 1606527 - RNA, 19 nt, Artificial Sequence
  Description of Artificial Sequence: Synthetic oligonucleotide
ucgacuuuccagauggcaa

SEQ ID NO: 1606528 - RNA, 19 nt, Artificial Sequence
  Description of Artificial Sequence: Synthetic oligonucleotide
acacagcuaacguuggcag

SEQ ID NO: 1606529 - RNA, 19 nt, Artificial Sequence
  Description of Artificial Sequence: Synthetic oligonucleotide
gaaaacccugcauugucac

SEQ ID NO: 1606530 - RNA, 19 nt, Artificial Sequence
  Description of Artificial Sequence: Synthetic oligonucleotide
aaccucagugcaguccugc

SEQ ID NO: 1606531 - RNA, 19 nt, Artificial Sequence
  Description of Artificial Sequence: Synthetic oligonucleotide
ugacguuccaugccaagac

SEQ ID NO: 1606532 - RNA, 19 nt, Artificial Sequence
  Description of Artificial Sequence: Synthetic oligonucleotide
ccugcuuauaaacugcugg

SEQ ID NO: 1606533 - RNA, 19 nt, Artificial Sequence
  Description of Artificial Sequence: Synthetic oligonucleotide
uccacucagcacauaucgg

SEQ ID NO: 1606534 - RNA, 19 nt, Artificial Sequence
  Description of Artificial Sequence: Synthetic oligonucleotide
gaucaugcagcuaaccuca

SEQ ID NO: 1606535 - RNA, 19 nt, Artificial Sequence
  Description of Artificial Sequence: Synthetic oligonucleotide
acgaugaaaacccugcauu

SEQ ID NO: 1606536 - RNA, 19 nt, Artificial Sequence
  Description of Artificial Sequence: Synthetic oligonucleotide
cauucugcaccaccaagcc

SEQ ID NO: 1606537 - RNA, 19 nt, Artificial Sequence
  Description of Artificial Sequence: Synthetic oligonucleotide
acacggaucaugcagcuaa

SEQ ID NO: 1606538 - RNA, 19 nt, Artificial Sequence
  Description of Artificial Sequence: Synthetic oligonucleotide
uacgagguaacuucacagu

SEQ ID NO: 1606539 - RNA, 19 nt, Artificial Sequence
  Description of Artificial Sequence: Synthetic oligonucleotide
ucggagcccacccauaccu

SEQ ID NO: 1606540 - RNA, 19 nt, Artificial Sequence
  Description of Artificial Sequence: Synthetic oligonucleotide
aggaguggaacauguaggu

SEQ ID NO: 1606541 - RNA, 19 nt, Artificial Sequence
  Description of Artificial Sequence: Synthetic oligonucleotide
cuuggugcuaccucccagc

SEQ ID NO: 1606542 - RNA, 19 nt, Artificial Sequence
  Description of Artificial Sequence: Synthetic oligonucleotide
agcucaugacgaugaaaac

SEQ ID NO: 1606543 - RNA, 19 nt, Artificial Sequence
  Description of Artificial Sequence: Synthetic oligonucleotide
uccagauggcaauuuugcc

SEQ ID NO: 1606544 - RNA, 19 nt, Artificial Sequence
  Description of Artificial Sequence: Synthetic oligonucleotide
uccagauauacagaucacu

SEQ ID NO: 1606545 - RNA, 19 nt, Artificial Sequence
  Description of Artificial Sequence: Synthetic oligonucleotide
ugggugucgagguccaucc

SEQ ID NO: 1606546 - RNA, 19 nt, Artificial Sequence
  Description of Artificial Sequence: Synthetic oligonucleotide
uacaagaguagaccucacu

SEQ ID NO: 1606547 - RNA, 19 nt, Artificial Sequence
  Description of Artificial Sequence: Synthetic oligonucleotide
acccacuuuaaagcggugc

SEQ ID NO: 1606548 - RNA, 19 nt, Artificial Sequence
  Description of Artificial Sequence: Synthetic oligonucleotide
cucggacuuauaagcaucc

SEQ ID NO: 1606549 - RNA, 19 nt, Artificial Sequence
  Description of Artificial Sequence: Synthetic oligonucleotide
guuuuagagucucugaggu

SEQ ID NO: 1606550 - RNA, 19 nt, Artificial Sequence
  Description of Artificial Sequence: Synthetic oligonucleotide
caugacgaugaaaacccug

SEQ ID NO: 1606551 - RNA, 19 nt, Artificial Sequence
  Description of Artificial Sequence: Synthetic oligonucleotide
cauauggcagcuggaaccg

SEQ ID NO: 1606552 - RNA, 19 nt, Artificial Sequence
  Description of Artificial Sequence: Synthetic oligonucleotide
uaauacgagguaacuucac

SEQ ID NO: 1606553 - RNA, 19 nt, Artificial Sequence
  Description of Artificial Sequence: Synthetic oligonucleotide
cauugucaccaccacgagg

SEQ ID NO: 1606554 - RNA, 19 nt, Artificial Sequence
  Description of Artificial Sequence: Synthetic oligonucleotide
gauauacagaucacugcac

SEQ ID NO: 1606555 - RNA, 19 nt, Artificial Sequence
  Description of Artificial Sequence: Synthetic oligonucleotide
ugauccgugagcuguuugu

SEQ ID NO: 1606556 - RNA, 19 nt, Artificial Sequence
  Description of Artificial Sequence: Synthetic oligonucleotide
cuuccgaggaggcuggccc

SEQ ID NO: 1606557 - RNA, 19 nt, Artificial Sequence
  Description of Artificial Sequence: Synthetic oligonucleotide
gaccgcagcacggugaucc

SEQ ID NO: 1606558 - RNA, 19 nt, Artificial Sequence
  Description of Artificial Sequence: Synthetic oligonucleotide
uggacaugagaucaccaua

SEQ ID NO: 1606559 - RNA, 19 nt, Artificial Sequence
  Description of Artificial Sequence: Synthetic oligonucleotide
cacauaucgguccucagca

SEQ ID NO: 1606560 - RNA, 19 nt, Artificial Sequence
  Description of Artificial Sequence: Synthetic oligonucleotide
gguccauccgagcuaaagg

SEQ ID NO: 1606561 - RNA, 19 nt, Artificial Sequence
  Description of Artificial Sequence: Synthetic oligonucleotide
ucccauccaggcuacaaga

SEQ ID NO: 1606562 - RNA, 19 nt, Artificial Sequence
  Description of Artificial Sequence: Synthetic oligonucleotide
ccauauggcagcuggaacc

SEQ ID NO: 1606563 - RNA, 19 nt, Artificial Sequence
  Description of Artificial Sequence: Synthetic oligonucleotide
ccagauauacagaucacug

SEQ ID NO: 1606564 - RNA, 19 nt, Artificial Sequence
  Description of Artificial Sequence: Synthetic oligonucleotide
guuaaucuuguguuuuaga

SEQ ID NO: 1606565 - RNA, 19 nt, Artificial Sequence
  Description of Artificial Sequence: Synthetic oligonucleotide
aaggguuaaucuuguguuu

SEQ ID NO: 1606566 - RNA, 19 nt, Artificial Sequence
  Description of Artificial Sequence: Synthetic oligonucleotide
aaagcggugcugguggaug

SEQ ID NO: 1606567 - RNA, 19 nt, Artificial Sequence
  Description of Artificial Sequence: Synthetic oligonucleotide
agugucggagugugcuacc

SEQ ID NO: 1606568 - RNA, 19 nt, Artificial Sequence
  Description of Artificial Sequence: Synthetic oligonucleotide
ugccaagaccgucccaucc

SEQ ID NO: 1606569 - RNA, 19 nt, Artificial Sequence
  Description of Artificial Sequence: Synthetic oligonucleotide
gaggacuacaagucacaug

SEQ ID NO: 1606570 - RNA, 19 nt, Artificial Sequence
  Description of Artificial Sequence: Synthetic oligonucleotide
cuacaagucacaugugaca

SEQ ID NO: 1606571 - RNA, 19 nt, Artificial Sequence
  Description of Artificial Sequence: Synthetic oligonucleotide
auccgagcuaaaggcaucc

SEQ ID NO: 1606572 - RNA, 19 nt, Artificial Sequence
  Description of Artificial Sequence: Synthetic oligonucleotide
gacuuauaagcauccuguc

SEQ ID NO: 1606573 - RNA, 19 nt, Artificial Sequence
  Description of Artificial Sequence: Synthetic oligonucleotide
agaguagaccucacugggc

SEQ ID NO: 1606574 - RNA, 19 nt, Artificial Sequence
  Description of Artificial Sequence: Synthetic oligonucleotide
aagugggucuuccgaggag

SEQ ID NO: 1606575 - RNA, 19 nt, Artificial Sequence
  Description of Artificial Sequence: Synthetic oligonucleotide
gacguuccaugccaagacc

SEQ ID NO: 1606576 - RNA, 19 nt, Artificial Sequence
  Description of Artificial Sequence: Synthetic oligonucleotide
uucuagguaauacgaggua

SEQ ID NO: 1606577 - RNA, 19 nt, Artificial Sequence
  Description of Artificial Sequence: Synthetic oligonucleotide
aggcuacaagaguagaccu

SEQ ID NO: 1606578 - RNA, 19 nt, Artificial Sequence
  Description of Artificial Sequence: Synthetic oligonucleotide
uaucagcaauaagauguag

SEQ ID NO: 1606579 - RNA, 19 nt, Artificial Sequence
  Description of Artificial Sequence: Synthetic oligonucleotide
uccugucuauccuuguccu

SEQ ID NO: 1606580 - RNA, 19 nt, Artificial Sequence
  Description of Artificial Sequence: Synthetic oligonucleotide
acguuccaugccaagaccg

SEQ ID NO: 1606581 - RNA, 19 nt, Artificial Sequence
  Description of Artificial Sequence: Synthetic oligonucleotide
aucagcaauaagauguagu

SEQ ID NO: 1606582 - RNA, 19 nt, Artificial Sequence
  Description of Artificial Sequence: Synthetic oligonucleotide
acucgcagcgugcugacgu

SEQ ID NO: 1606583 - RNA, 19 nt, Artificial Sequence
  Description of Artificial Sequence: Synthetic oligonucleotide
uggccuguacaacaccaca

SEQ ID NO: 1606584 - RNA, 19 nt, Artificial Sequence
  Description of Artificial Sequence: Synthetic oligonucleotide
aaggcgcccugguguauac

SEQ ID NO: 1606585 - RNA, 19 nt, Artificial Sequence
  Description of Artificial Sequence: Synthetic oligonucleotide
gacaugagaucaccauaug

SEQ ID NO: 1606586 - RNA, 19 nt, Artificial Sequence
  Description of Artificial Sequence: Synthetic oligonucleotide
auucagggcgcaccacaac

SEQ ID NO: 1606587 - RNA, 19 nt, Artificial Sequence
  Description of Artificial Sequence: Synthetic oligonucleotide
aguggaacauguagguauc

SEQ ID NO: 1606588 - RNA, 19 nt, Artificial Sequence
  Description of Artificial Sequence: Synthetic oligonucleotide
auugagccgagccuucaga

SEQ ID NO: 1606589 - RNA, 19 nt, Artificial Sequence
  Description of Artificial Sequence: Synthetic oligonucleotide
augugaggacuacaaguca

SEQ ID NO: 1606590 - RNA, 19 nt, Artificial Sequence
  Description of Artificial Sequence: Synthetic oligonucleotide
gcucaugacgaugaaaacc

SEQ ID NO: 1606591 - RNA, 19 nt, Artificial Sequence
  Description of Artificial Sequence: Synthetic oligonucleotide
uuagaggcacccacuuuaa

SEQ ID NO: 1606592 - RNA, 19 nt, Artificial Sequence
  Description of Artificial Sequence: Synthetic oligonucleotide
gacacagcuaacguuggca

SEQ ID NO: 1606593 - RNA, 19 nt, Artificial Sequence
  Description of Artificial Sequence: Synthetic oligonucleotide
cuucagcucaugacgauga

SEQ ID NO: 1606594 - RNA, 19 nt, Artificial Sequence
  Description of Artificial Sequence: Synthetic oligonucleotide
ggaucaugcagcuaaccuc

SEQ ID NO: 1606595 - RNA, 19 nt, Artificial Sequence
  Description of Artificial Sequence: Synthetic oligonucleotide
cuuuaaagcggugcuggug

SEQ ID NO: 1606596 - RNA, 19 nt, Artificial Sequence
  Description of Artificial Sequence: Synthetic oligonucleotide
ugucggagugugcuaccag

SEQ ID NO: 1606597 - RNA, 19 nt, Artificial Sequence
  Description of Artificial Sequence: Synthetic oligonucleotide
caaacacgaccacuuugcc

SEQ ID NO: 1606598 - RNA, 19 nt, Artificial Sequence
  Description of Artificial Sequence: Synthetic oligonucleotide
uugagccgagccuucagaa

SEQ ID NO: 1606599 - RNA, 19 nt, Artificial Sequence
  Description of Artificial Sequence: Synthetic oligonucleotide
gaaccggcuggucacucgc

SEQ ID NO: 1606600 - RNA, 19 nt, Artificial Sequence
  Description of Artificial Sequence: Synthetic oligonucleotide
uucacuuuagaggcaccca

SEQ ID NO: 1606601 - RNA, 19 nt, Artificial Sequence
  Description of Artificial Sequence: Synthetic oligonucleotide
agccagugaccgcagcacg

SEQ ID NO: 1606602 - RNA, 19 nt, Artificial Sequence
  Description of Artificial Sequence: Synthetic oligonucleotide
acggaucaugcagcuaacc

SEQ ID NO: 1606603 - RNA, 19 nt, Artificial Sequence
  Description of Artificial Sequence: Synthetic oligonucleotide
auaucgguccucagcagag

SEQ ID NO: 1606604 - RNA, 19 nt, Artificial Sequence
  Description of Artificial Sequence: Synthetic oligonucleotide
ucaugacgaugaaaacccu

SEQ ID NO: 1606605 - RNA, 19 nt, Artificial Sequence
  Description of Artificial Sequence: Synthetic oligonucleotide
guaacuucacaguggaggu

SEQ ID NO: 1606606 - RNA, 19 nt, Artificial Sequence
  Description of Artificial Sequence: Synthetic oligonucleotide
guaauacgagguaacuuca

SEQ ID NO: 1606607 - RNA, 19 nt, Artificial Sequence
  Description of Artificial Sequence: Synthetic oligonucleotide
uuucacuccucaucuuguc

SEQ ID NO: 1606608 - RNA, 19 nt, Artificial Sequence
  Description of Artificial Sequence: Synthetic oligonucleotide
ucacucgacuuuccagaug

SEQ ID NO: 1606609 - RNA, 19 nt, Artificial Sequence
  Description of Artificial Sequence: Synthetic oligonucleotide
gauguaguauguagcuuuc

SEQ ID NO: 1606610 - RNA, 19 nt, Artificial Sequence
  Description of Artificial Sequence: Synthetic oligonucleotide
gaguagaccucacugggcu

SEQ ID NO: 1606611 - RNA, 19 nt, Artificial Sequence
  Description of Artificial Sequence: Synthetic oligonucleotide
gaguccucggagcccaccc

SEQ ID NO: 1606612 - RNA, 19 nt, Artificial Sequence
  Description of Artificial Sequence: Synthetic oligonucleotide
cacagcuaacguuggcagc

SEQ ID NO: 1606613 - RNA, 19 nt, Artificial Sequence
  Description of Artificial Sequence: Synthetic oligonucleotide
aucgguccucagcagagca

SEQ ID NO: 1606614 - RNA, 19 nt, Artificial Sequence
  Description of Artificial Sequence: Synthetic oligonucleotide
agcuggaaccggcugguca

SEQ ID NO: 1606615 - RNA, 19 nt, Artificial Sequence
  Description of Artificial Sequence: Synthetic oligonucleotide
agcaucaaacacgaccacu

SEQ ID NO: 1606616 - RNA, 19 nt, Artificial Sequence
  Description of Artificial Sequence: Synthetic oligonucleotide
uucacucgacuuuccagau

SEQ ID NO: 1606617 - RNA, 19 nt, Artificial Sequence
  Description of Artificial Sequence: Synthetic oligonucleotide
uccucggacuuauaagcau

SEQ ID NO: 1606618 - RNA, 19 nt, Artificial Sequence
  Description of Artificial Sequence: Synthetic oligonucleotide
aagcauccugucuauccuu

SEQ ID NO: 1606619 - RNA, 19 nt, Artificial Sequence
  Description of Artificial Sequence: Synthetic oligonucleotide
ucacacggaucaugcagcu

SEQ ID NO: 1606620 - RNA, 19 nt, Artificial Sequence
  Description of Artificial Sequence: Synthetic oligonucleotide
uuuuagagucucugagguu

SEQ ID NO: 1606621 - RNA, 19 nt, Artificial Sequence
  Description of Artificial Sequence: Synthetic oligonucleotide
uuaaagcggugcuggugga

SEQ ID NO: 1606622 - RNA, 19 nt, Artificial Sequence
  Description of Artificial Sequence: Synthetic oligonucleotide
gcugauggacaugagauca

SEQ ID NO: 1606623 - RNA, 19 nt, Artificial Sequence
  Description of Artificial Sequence: Synthetic oligonucleotide
gguuaaucuuguguuuuag

SEQ ID NO: 1606624 - RNA, 19 nt, Artificial Sequence
  Description of Artificial Sequence: Synthetic oligonucleotide
agcgugcugacguuccaug

SEQ ID NO: 1606625 - RNA, 19 nt, Artificial Sequence
  Description of Artificial Sequence: Synthetic oligonucleotide
cauccugccauugagccga

SEQ ID NO: 1606626 - RNA, 19 nt, Artificial Sequence
  Description of Artificial Sequence: Synthetic oligonucleotide
cauaucgguccucagcaga

SEQ ID NO: 1606627 - RNA, 19 nt, Artificial Sequence
  Description of Artificial Sequence: Synthetic oligonucleotide
acggugauccgugagcugu

SEQ ID NO: 1606628 - RNA, 19 nt, Artificial Sequence
  Description of Artificial Sequence: Synthetic oligonucleotide
agcuaaaggcauccauccu

SEQ ID NO: 1606629 - RNA, 19 nt, Artificial Sequence
  Description of Artificial Sequence: Synthetic oligonucleotide
aguucacuuuagaggcacc

SEQ ID NO: 1606630 - RNA, 19 nt, Artificial Sequence
  Description of Artificial Sequence: Synthetic oligonucleotide
cugauggacaugagaucac

SEQ ID NO: 1606631 - RNA, 19 nt, Artificial Sequence
  Description of Artificial Sequence: Synthetic oligonucleotide
caguucacuuuagaggcac

SEQ ID NO: 1606632 - RNA, 19 nt, Artificial Sequence
  Description of Artificial Sequence: Synthetic oligonucleotide
cuccagauauacagaucac

SEQ ID NO: 1606633 - RNA, 19 nt, Artificial Sequence
  Description of Artificial Sequence: Synthetic oligonucleotide
agcacauaucgguccucag

SEQ ID NO: 1606634 - RNA, 19 nt, Artificial Sequence
  Description of Artificial Sequence: Synthetic oligonucleotide
cagugucuucacagugucg

SEQ ID NO: 1606635 - RNA, 19 nt, Artificial Sequence
  Description of Artificial Sequence: Synthetic oligonucleotide
caccauacaguucacuuua

SEQ ID NO: 1606636 - RNA, 19 nt, Artificial Sequence
  Description of Artificial Sequence: Synthetic oligonucleotide
auguagcuuucacucgacu

SEQ ID NO: 1606637 - RNA, 19 nt, Artificial Sequence
  Description of Artificial Sequence: Synthetic oligonucleotide
ggugcuaccucccagcugu

SEQ ID NO: 1606638 - RNA, 19 nt, Artificial Sequence
  Description of Artificial Sequence: Synthetic oligonucleotide
ugaggacuacaagucacau

SEQ ID NO: 1606639 - RNA, 19 nt, Artificial Sequence
  Description of Artificial Sequence: Synthetic oligonucleotide
ucgagguccauccgagcua

SEQ ID NO: 1606640 - RNA, 19 nt, Artificial Sequence
  Description of Artificial Sequence: Synthetic oligonucleotide
agcuaaccucagugcaguc

SEQ ID NO: 1606641 - RNA, 19 nt, Artificial Sequence
  Description of Artificial Sequence: Synthetic oligonucleotide
gcuacaagaguagaccuca

SEQ ID NO: 1606642 - RNA, 19 nt, Artificial Sequence
  Description of Artificial Sequence: Synthetic oligonucleotide
uauaagcauccugucuauc

SEQ ID NO: 1606643 - RNA, 19 nt, Artificial Sequence
  Description of Artificial Sequence: Synthetic oligonucleotide
cgagguaacuucacagugg

SEQ ID NO: 1606644 - RNA, 19 nt, Artificial Sequence
  Description of Artificial Sequence: Synthetic oligonucleotide
aggguuaaucuuguguuuu

SEQ ID NO: 1606645 - RNA, 19 nt, Artificial Sequence
  Description of Artificial Sequence: Synthetic oligonucleotide
guagcuuucacucgacuuu

SEQ ID NO: 1606646 - RNA, 19 nt, Artificial Sequence
  Description of Artificial Sequence: Synthetic oligonucleotide
uggugcuaccucccagcug

SEQ ID NO: 1606647 - RNA, 19 nt, Artificial Sequence
  Description of Artificial Sequence: Synthetic oligonucleotide
cuggucacucgcagcgugc

SEQ ID NO: 1606648 - RNA, 19 nt, Artificial Sequence
  Description of Artificial Sequence: Synthetic oligonucleotide
ugucgagguccauccgagc

SEQ ID NO: 1606649 - RNA, 19 nt, Artificial Sequence
  Description of Artificial Sequence: Synthetic oligonucleotide
ggcgcccugguguauacag

SEQ ID NO: 1606650 - RNA, 19 nt, Artificial Sequence
  Description of Artificial Sequence: Synthetic oligonucleotide
agaguccucggagcccacc

SEQ ID NO: 1606651 - RNA, 19 nt, Artificial Sequence
  Description of Artificial Sequence: Synthetic oligonucleotide
ggacuuauaagcauccugu

SEQ ID NO: 1606652 - RNA, 19 nt, Artificial Sequence
  Description of Artificial Sequence: Synthetic oligonucleotide
gaccgucccauccaggcua

SEQ ID NO: 1606653 - RNA, 19 nt, Artificial Sequence
  Description of Artificial Sequence: Synthetic oligonucleotide
gugucgagguccauccgag

SEQ ID NO: 1606654 - RNA, 19 nt, Artificial Sequence
  Description of Artificial Sequence: Synthetic oligonucleotide
uccugcaagugggucuucc

SEQ ID NO: 1606655 - RNA, 19 nt, Artificial Sequence
  Description of Artificial Sequence: Synthetic oligonucleotide
gccaugggcauuucacucc

SEQ ID NO: 1606656 - RNA, 19 nt, Artificial Sequence
  Description of Artificial Sequence: Synthetic oligonucleotide
gugcugacguuccaugcca

SEQ ID NO: 1606657 - RNA, 19 nt, Artificial Sequence
  Description of Artificial Sequence: Synthetic oligonucleotide
agcauccugucuauccuug

SEQ ID NO: 1606658 - RNA, 19 nt, Artificial Sequence
  Description of Artificial Sequence: Synthetic oligonucleotide
cugaaggguuaaucuugug

SEQ ID NO: 1606659 - RNA, 19 nt, Artificial Sequence
  Description of Artificial Sequence: Synthetic oligonucleotide
cuccucggacuuauaagca

SEQ ID NO: 1606660 - RNA, 19 nt, Artificial Sequence
  Description of Artificial Sequence: Synthetic oligonucleotide
cagucauugugcaggcuga

SEQ ID NO: 1606661 - RNA, 19 nt, Artificial Sequence
  Description of Artificial Sequence: Synthetic oligonucleotide
caggcugauggacaugaga

SEQ ID NO: 1606662 - RNA, 19 nt, Artificial Sequence
  Description of Artificial Sequence: Synthetic oligonucleotide
guagaccucacugggcuuc

SEQ ID NO: 1606663 - RNA, 19 nt, Artificial Sequence
  Description of Artificial Sequence: Synthetic oligonucleotide
ugggcauuucacuccucau

SEQ ID NO: 1606664 - RNA, 19 nt, Artificial Sequence
  Description of Artificial Sequence: Synthetic oligonucleotide
cacaugugacacagcuaac

SEQ ID NO: 1606665 - RNA, 19 nt, Artificial Sequence
  Description of Artificial Sequence: Synthetic oligonucleotide
uaucgguccucagcagagc

SEQ ID NO: 1606666 - RNA, 19 nt, Artificial Sequence
  Description of Artificial Sequence: Synthetic oligonucleotide
gugauccgugagcuguuug

SEQ ID NO: 1606667 - RNA, 19 nt, Artificial Sequence
  Description of Artificial Sequence: Synthetic oligonucleotide
caugugacacagcuaacgu

SEQ ID NO: 1606668 - RNA, 19 nt, Artificial Sequence
  Description of Artificial Sequence: Synthetic oligonucleotide
agaccgucccauccaggcu

SEQ ID NO: 1606669 - RNA, 19 nt, Artificial Sequence
  Description of Artificial Sequence: Synthetic oligonucleotide
gcuaaccucagugcagucc

SEQ ID NO: 1606670 - RNA, 19 nt, Artificial Sequence
  Description of Artificial Sequence: Synthetic oligonucleotide
guggaacauguagguaucc

SEQ ID NO: 1606671 - RNA, 19 nt, Artificial Sequence
  Description of Artificial Sequence: Synthetic oligonucleotide
cauaccuggcugugcucug

SEQ ID NO: 1606672 - RNA, 19 nt, Artificial Sequence
  Description of Artificial Sequence: Synthetic oligonucleotide
ugcugacguuccaugccaa

SEQ ID NO: 1606673 - RNA, 19 nt, Artificial Sequence
  Description of Artificial Sequence: Synthetic oligonucleotide
ggugucgagguccauccga

SEQ ID NO: 1606674 - RNA, 19 nt, Artificial Sequence
  Description of Artificial Sequence: Synthetic oligonucleotide
ggcacccacuuuaaagcgg

SEQ ID NO: 1606675 - RNA, 19 nt, Artificial Sequence
  Description of Artificial Sequence: Synthetic oligonucleotide
gucgagguccauccgagcu

SEQ ID NO: 1606676 - RNA, 19 nt, Artificial Sequence
  Description of Artificial Sequence: Synthetic oligonucleotide
auauggcagcuggaaccgg

SEQ ID NO: 1606677 - RNA, 19 nt, Artificial Sequence
  Description of Artificial Sequence: Synthetic oligonucleotide
cugcaagugggucuuccga

SEQ ID NO: 1606678 - RNA, 19 nt, Artificial Sequence
  Description of Artificial Sequence: Synthetic oligonucleotide
acgaggcuguggccuguac

SEQ ID NO: 1606679 - RNA, 19 nt, Artificial Sequence
  Description of Artificial Sequence: Synthetic oligonucleotide
cucgacuuuccagauggca

SEQ ID NO: 1606680 - RNA, 19 nt, Artificial Sequence
  Description of Artificial Sequence: Synthetic oligonucleotide
ucggacuuauaagcauccu

SEQ ID NO: 1606681 - RNA, 19 nt, Artificial Sequence
  Description of Artificial Sequence: Synthetic oligonucleotide
gucauugugcaggcugaug

SEQ ID NO: 1606682 - RNA, 19 nt, Artificial Sequence
  Description of Artificial Sequence: Synthetic oligonucleotide
agccgagccuucagaaagg

SEQ ID NO: 1606683 - RNA, 19 nt, Artificial Sequence
  Description of Artificial Sequence: Synthetic oligonucleotide
cgagcuaaaggcauccauc

SEQ ID NO: 1606684 - RNA, 19 nt, Artificial Sequence
  Description of Artificial Sequence: Synthetic oligonucleotide
agaucaccauauggcagcu

SEQ ID NO: 1606685 - RNA, 19 nt, Artificial Sequence
  Description of Artificial Sequence: Synthetic oligonucleotide
gugaggacuacaagucaca

SEQ ID NO: 1606686 - RNA, 19 nt, Artificial Sequence
  Description of Artificial Sequence: Synthetic oligonucleotide
cacggaucaugcagcuaac

SEQ ID NO: 1606687 - RNA, 19 nt, Artificial Sequence
  Description of Artificial Sequence: Synthetic oligonucleotide
cugacguuccaugccaaga

SEQ ID NO: 1606688 - RNA, 19 nt, Artificial Sequence
  Description of Artificial Sequence: Synthetic oligonucleotide
uaggucuccucggacuuau

SEQ ID NO: 1606689 - RNA, 19 nt, Artificial Sequence
  Description of Artificial Sequence: Synthetic oligonucleotide
ucacucgcagcgugcugac

SEQ ID NO: 1606690 - RNA, 19 nt, Artificial Sequence
  Description of Artificial Sequence: Synthetic oligonucleotide
cauucagggcgcaccacaa

SEQ ID NO: 1606691 - RNA, 19 nt, Artificial Sequence
  Description of Artificial Sequence: Synthetic oligonucleotide
guauccaauaaaccugcuu

SEQ ID NO: 1606692 - RNA, 19 nt, Artificial Sequence
  Description of Artificial Sequence: Synthetic oligonucleotide
ccucggacuuauaagcauc

SEQ ID NO: 1606693 - RNA, 19 nt, Artificial Sequence
  Description of Artificial Sequence: Synthetic oligonucleotide
uggucacucgcagcgugcu

SEQ ID NO: 1606694 - RNA, 19 nt, Artificial Sequence
  Description of Artificial Sequence: Synthetic oligonucleotide
ccugcaagugggucuuccg

SEQ ID NO: 1606695 - RNA, 19 nt, Artificial Sequence
  Description of Artificial Sequence: Synthetic oligonucleotide
uaacuucacaguggagguu

SEQ ID NO: 1606696 - RNA, 19 nt, Artificial Sequence
  Description of Artificial Sequence: Synthetic oligonucleotide
gucggagugugcuaccagu

SEQ ID NO: 1606697 - RNA, 19 nt, Artificial Sequence
  Description of Artificial Sequence: Synthetic oligonucleotide
ggucuccucggacuuauaa

SEQ ID NO: 1606698 - RNA, 19 nt, Artificial Sequence
  Description of Artificial Sequence: Synthetic oligonucleotide
gaucaccauauggcagcug

SEQ ID NO: 1606699 - RNA, 19 nt, Artificial Sequence
  Description of Artificial Sequence: Synthetic oligonucleotide
uccgaggaggcuggcccag

SEQ ID NO: 1606700 - RNA, 19 nt, Artificial Sequence
  Description of Artificial Sequence: Synthetic oligonucleotide
cggacuuauaagcauccug

SEQ ID NO: 1606701 - RNA, 19 nt, Artificial Sequence
  Description of Artificial Sequence: Synthetic oligonucleotide
ggggugugcauccucaacu

SEQ ID NO: 1606702 - RNA, 19 nt, Artificial Sequence
  Description of Artificial Sequence: Synthetic oligonucleotide
gcugacguuccaugccaag

SEQ ID NO: 1606703 - RNA, 19 nt, Artificial Sequence
  Description of Artificial Sequence: Synthetic oligonucleotide
ccauccugccauugagccg

SEQ ID NO: 1606704 - RNA, 19 nt, Artificial Sequence
  Description of Artificial Sequence: Synthetic oligonucleotide
ggucaaggcgcccuggugu

SEQ ID NO: 1606705 - RNA, 19 nt, Artificial Sequence
  Description of Artificial Sequence: Synthetic oligonucleotide
uccgagcuaaaggcaucca

SEQ ID NO: 1606706 - RNA, 19 nt, Artificial Sequence
  Description of Artificial Sequence: Synthetic oligonucleotide
ugcaccccgcacaggccac

SEQ ID NO: 1606707 - RNA, 19 nt, Artificial Sequence
  Description of Artificial Sequence: Synthetic oligonucleotide
gcaauaagauguaguaugu

SEQ ID NO: 1606708 - RNA, 19 nt, Artificial Sequence
  Description of Artificial Sequence: Synthetic oligonucleotide
gcgugcugacguuccaugc

SEQ ID NO: 1606709 - RNA, 19 nt, Artificial Sequence
  Description of Artificial Sequence: Synthetic oligonucleotide
cacuuuagaggcacccacu

SEQ ID NO: 1606710 - RNA, 19 nt, Artificial Sequence
  Description of Artificial Sequence: Synthetic oligonucleotide
cacggugauccgugagcug

SEQ ID NO: 1606711 - RNA, 19 nt, Artificial Sequence
  Description of Artificial Sequence: Synthetic oligonucleotide
guuuucccugcgacagccc

SEQ ID NO: 1606712 - RNA, 19 nt, Artificial Sequence
  Description of Artificial Sequence: Synthetic oligonucleotide
ggacaugagaucaccauau

SEQ ID NO: 1606713 - RNA, 19 nt, Artificial Sequence
  Description of Artificial Sequence: Synthetic oligonucleotide
cgugcugacguuccaugcc

SEQ ID NO: 1606714 - RNA, 19 nt, Artificial Sequence
  Description of Artificial Sequence: Synthetic oligonucleotide
accgucccauccaggcuac

SEQ ID NO: 1606715 - RNA, 19 nt, Artificial Sequence
  Description of Artificial Sequence: Synthetic oligonucleotide
caugccaagaccgucccau

SEQ ID NO: 1606716 - RNA, 19 nt, Artificial Sequence
  Description of Artificial Sequence: Synthetic oligonucleotide
aucaugcagcuaaccucag

SEQ ID NO: 1606717 - RNA, 19 nt, Artificial Sequence
  Description of Artificial Sequence: Synthetic oligonucleotide
ggcuacaagaguagaccuc

SEQ ID NO: 1606718 - RNA, 19 nt, Artificial Sequence
  Description of Artificial Sequence: Synthetic oligonucleotide
uccucggagcccacccaua

SEQ ID NO: 1606719 - RNA, 19 nt, Artificial Sequence
  Description of Artificial Sequence: Synthetic oligonucleotide
gucaaggcgcccuggugua

SEQ ID NO: 1606720 - RNA, 19 nt, Artificial Sequence
  Description of Artificial Sequence: Synthetic oligonucleotide
agucauugugcaggcugau

SEQ ID NO: 1606721 - RNA, 19 nt, Artificial Sequence
  Description of Artificial Sequence: Synthetic oligonucleotide
caguccugcaagugggucu

SEQ ID NO: 1606722 - RNA, 19 nt, Artificial Sequence
  Description of Artificial Sequence: Synthetic oligonucleotide
aucugucucuucacacgga

SEQ ID NO: 1606723 - RNA, 19 nt, Artificial Sequence
  Description of Artificial Sequence: Synthetic oligonucleotide
uaccucccagcuguggauu

SEQ ID NO: 1606724 - RNA, 19 nt, Artificial Sequence
  Description of Artificial Sequence: Synthetic oligonucleotide
cacccauaccuggcugugc

SEQ ID NO: 1606725 - RNA, 19 nt, Artificial Sequence
  Description of Artificial Sequence: Synthetic oligonucleotide
cucagcacauaucgguccu

SEQ ID NO: 1606726 - RNA, 19 nt, Artificial Sequence
  Description of Artificial Sequence: Synthetic oligonucleotide
gggucaaggcgcccuggug

SEQ ID NO: 1606727 - RNA, 19 nt, Artificial Sequence
  Description of Artificial Sequence: Synthetic oligonucleotide
ggguuaaucuuguguuuua

SEQ ID NO: 1606728 - RNA, 19 nt, Artificial Sequence
  Description of Artificial Sequence: Synthetic oligonucleotide
aaccggcuggucacucgca

SEQ ID NO: 1606729 - RNA, 19 nt, Artificial Sequence
  Description of Artificial Sequence: Synthetic oligonucleotide
gggugucgagguccauccg

SEQ ID NO: 1606730 - RNA, 19 nt, Artificial Sequence
  Description of Artificial Sequence: Synthetic oligonucleotide
agugugcuaccaguuccuu

SEQ ID NO: 1606731 - RNA, 19 nt, Artificial Sequence
  Description of Artificial Sequence: Synthetic oligonucleotide
ccacuuuaaagcggugcug

SEQ ID NO: 1606732 - RNA, 19 nt, Artificial Sequence
  Description of Artificial Sequence: Synthetic oligonucleotide
gugucggagugugcuacca

SEQ ID NO: 1606733 - RNA, 19 nt, Artificial Sequence
  Description of Artificial Sequence: Synthetic oligonucleotide
ccacucagcacauaucggu

SEQ ID NO: 1606734 - RNA, 19 nt, Artificial Sequence
  Description of Artificial Sequence: Synthetic oligonucleotide
caguggagguuaucagcaa

SEQ ID NO: 1606735 - RNA, 19 nt, Artificial Sequence
  Description of Artificial Sequence: Synthetic oligonucleotide
caccacaacuuggggugug

SEQ ID NO: 1606736 - RNA, 19 nt, Artificial Sequence
  Description of Artificial Sequence: Synthetic oligonucleotide
ucgcagcgugcugacguuc

SEQ ID NO: 1606737 - RNA, 19 nt, Artificial Sequence
  Description of Artificial Sequence: Synthetic oligonucleotide
cagcaauaagauguaguau

SEQ ID NO: 1606738 - RNA, 19 nt, Artificial Sequence
  Description of Artificial Sequence: Synthetic oligonucleotide
gauccgugagcuguuuguu

SEQ ID NO: 1606739 - RNA, 19 nt, Artificial Sequence
  Description of Artificial Sequence: Synthetic oligonucleotide
cacucgcagcgugcugacg

SEQ ID NO: 1606740 - RNA, 19 nt, Artificial Sequence
  Description of Artificial Sequence: Synthetic oligonucleotide
ccgagccuucagaaaggag

SEQ ID NO: 1606741 - RNA, 19 nt, Artificial Sequence
  Description of Artificial Sequence: Synthetic oligonucleotide
ucaaggcgcccugguguau

SEQ ID NO: 1606742 - RNA, 19 nt, Artificial Sequence
  Description of Artificial Sequence: Synthetic oligonucleotide
caacaccacaggcagucau

SEQ ID NO: 1606743 - RNA, 19 nt, Artificial Sequence
  Description of Artificial Sequence: Synthetic oligonucleotide
cagcuaaccucagugcagu

SEQ ID NO: 1606744 - RNA, 19 nt, Artificial Sequence
  Description of Artificial Sequence: Synthetic oligonucleotide
cgcagcacggugauccgug

SEQ ID NO: 1606745 - RNA, 19 nt, Artificial Sequence
  Description of Artificial Sequence: Synthetic oligonucleotide
cccacuuuaaagcggugcu

SEQ ID NO: 1606746 - RNA, 19 nt, Artificial Sequence
  Description of Artificial Sequence: Synthetic oligonucleotide
gugaccgcagcacggugau

SEQ ID NO: 1606747 - RNA, 19 nt, Artificial Sequence
  Description of Artificial Sequence: Synthetic oligonucleotide
cgcagcgugcugacguucc

SEQ ID NO: 1606748 - RNA, 19 nt, Artificial Sequence
  Description of Artificial Sequence: Synthetic oligonucleotide
gacuuuccagauggcaauu

SEQ ID NO: 1606749 - RNA, 19 nt, Artificial Sequence
  Description of Artificial Sequence: Synthetic oligonucleotide
gcccacccauaccuggcug

SEQ ID NO: 1606750 - RNA, 19 nt, Artificial Sequence
  Description of Artificial Sequence: Synthetic oligonucleotide
caccccgcacaggccaccc

SEQ ID NO: 1606751 - RNA, 19 nt, Artificial Sequence
  Description of Artificial Sequence: Synthetic oligonucleotide
cacccacccagaucugucu

SEQ ID NO: 1606752 - RNA, 19 nt, Artificial Sequence
  Description of Artificial Sequence: Synthetic oligonucleotide
gugugcuaccaguuccuuu

SEQ ID NO: 1606753 - RNA, 19 nt, Artificial Sequence
  Description of Artificial Sequence: Synthetic oligonucleotide
caccacgaggcuguggccu

SEQ ID NO: 1606754 - RNA, 19 nt, Artificial Sequence
  Description of Artificial Sequence: Synthetic oligonucleotide
uggcagccuuggugcuacc

SEQ ID NO: 1606755 - RNA, 19 nt, Artificial Sequence
  Description of Artificial Sequence: Synthetic oligonucleotide
gcacccacuuuaaagcggu

SEQ ID NO: 1606756 - RNA, 19 nt, Artificial Sequence
  Description of Artificial Sequence: Synthetic oligonucleotide
guccucggagcccacccau

SEQ ID NO: 1606757 - RNA, 19 nt, Artificial Sequence
  Description of Artificial Sequence: Synthetic oligonucleotide
guaggucuccucggacuua

SEQ ID NO: 1606758 - RNA, 19 nt, Artificial Sequence
  Description of Artificial Sequence: Synthetic oligonucleotide
gcacggugauccgugagcu

SEQ ID NO: 1606759 - RNA, 19 nt, Artificial Sequence
  Description of Artificial Sequence: Synthetic oligonucleotide
caaggcgcccugguguaua

SEQ ID NO: 1606760 - RNA, 19 nt, Artificial Sequence
  Description of Artificial Sequence: Synthetic oligonucleotide
ugaccgcagcacggugauc

SEQ ID NO: 1606761 - RNA, 19 nt, Artificial Sequence
  Description of Artificial Sequence: Synthetic oligonucleotide
guggcccgcuccacucagc

SEQ ID NO: 1606762 - RNA, 19 nt, Artificial Sequence
  Description of Artificial Sequence: Synthetic oligonucleotide
ccacccauaccuggcugug

SEQ ID NO: 1606763 - RNA, 19 nt, Artificial Sequence
  Description of Artificial Sequence: Synthetic oligonucleotide
cggaucaugcagcuaaccu

SEQ ID NO: 1606764 - RNA, 19 nt, Artificial Sequence
  Description of Artificial Sequence: Synthetic oligonucleotide
gcgcccugguguauacagc

SEQ ID NO: 1606765 - RNA, 19 nt, Artificial Sequence
  Description of Artificial Sequence: Synthetic oligonucleotide
aggcgcccugguguauaca

SEQ ID NO: 1606766 - RNA, 19 nt, Artificial Sequence
  Description of Artificial Sequence: Synthetic oligonucleotide
cacguccaucacaaagauu

SEQ ID NO: 1606767 - RNA, 19 nt, Artificial Sequence
  Description of Artificial Sequence: Synthetic oligonucleotide
gccauugagccgagccuuc

SEQ ID NO: 1606768 - RNA, 19 nt, Artificial Sequence
  Description of Artificial Sequence: Synthetic oligonucleotide
ccgugagcuguuuguugca

SEQ ID NO: 1606769 - RNA, 19 nt, Artificial Sequence
  Description of Artificial Sequence: Synthetic oligonucleotide
ccauaccuggcugugcucu

SEQ ID NO: 1606770 - RNA, 19 nt, Artificial Sequence
  Description of Artificial Sequence: Synthetic oligonucleotide
gggacugccaugggcauuu

SEQ ID NO: 1606771 - RNA, 19 nt, Artificial Sequence
  Description of Artificial Sequence: Synthetic oligonucleotide
cguggcccgcuccacucag

SEQ ID NO: 1606772 - RNA, 19 nt, Artificial Sequence
  Description of Artificial Sequence: Synthetic oligonucleotide
cacacggaucaugcagcua

SEQ ID NO: 1606773 - RNA, 19 nt, Artificial Sequence
  Description of Artificial Sequence: Synthetic oligonucleotide
cagcuggaaccggcugguc

SEQ ID NO: 1606774 - RNA, 19 nt, Artificial Sequence
  Description of Artificial Sequence: Synthetic oligonucleotide
ccucagacuugggugucga

SEQ ID NO: 1606775 - RNA, 19 nt, Artificial Sequence
  Description of Artificial Sequence: Synthetic oligonucleotide
cgacuuuccagauggcaau

SEQ ID NO: 1606776 - RNA, 19 nt, Artificial Sequence
  Description of Artificial Sequence: Synthetic oligonucleotide
ccgagcuaaaggcauccau

SEQ ID NO: 1606777 - RNA, 19 nt, Artificial Sequence
  Description of Artificial Sequence: Synthetic oligonucleotide
ccauugagccgagccuuca

SEQ ID NO: 1606778 - RNA, 19 nt, Artificial Sequence
  Description of Artificial Sequence: Synthetic oligonucleotide
cucgcagcgugcugacguu

SEQ ID NO: 1606779 - RNA, 19 nt, Artificial Sequence
  Description of Artificial Sequence: Synthetic oligonucleotide
cagcuaacguuggcagccu

SEQ ID NO: 1606780 - RNA, 19 nt, Artificial Sequence
  Description of Artificial Sequence: Synthetic oligonucleotide
guccugcaagugggucuuc

SEQ ID NO: 1606781 - RNA, 19 nt, Artificial Sequence
  Description of Artificial Sequence: Synthetic oligonucleotide
cguuccaugccaagaccgu

SEQ ID NO: 1606782 - RNA, 19 nt, Artificial Sequence
  Description of Artificial Sequence: Synthetic oligonucleotide
cgagguccauccgagcuaa

SEQ ID NO: 1606783 - RNA, 19 nt, Artificial Sequence
  Description of Artificial Sequence: Synthetic oligonucleotide
cuggaaccggcuggucacu

SEQ ID NO: 1606784 - RNA, 19 nt, Artificial Sequence
  Description of Artificial Sequence: Synthetic oligonucleotide
gcaccccgcacaggccacc

SEQ ID NO: 1606785 - RNA, 19 nt, Artificial Sequence
  Description of Artificial Sequence: Synthetic oligonucleotide
cccgcacaggccacccaca

SEQ ID NO: 1606786 - RNA, 19 nt, Artificial Sequence
  Description of Artificial Sequence: Synthetic oligonucleotide
cagcgugcugacguuccau

SEQ ID NO: 1606787 - RNA, 19 nt, Artificial Sequence
  Description of Artificial Sequence: Synthetic oligonucleotide
aggucuccucggacuuaua

SEQ ID NO: 1606788 - RNA, 19 nt, Artificial Sequence
  Description of Artificial Sequence: Synthetic oligonucleotide
cacgaggcuguggccugua

SEQ ID NO: 1606789 - RNA, 19 nt, Artificial Sequence
  Description of Artificial Sequence: Synthetic oligonucleotide
ggacugccaugggcauuuc

SEQ ID NO: 1606790 - RNA, 19 nt, Artificial Sequence
  Description of Artificial Sequence: Synthetic oligonucleotide
cuugggugucgagguccau

SEQ ID NO: 1606791 - RNA, 19 nt, Artificial Sequence
  Description of Artificial Sequence: Synthetic oligonucleotide
cccgcuccacucagcacau

SEQ ID NO: 1606792 - RNA, 19 nt, Artificial Sequence
  Description of Artificial Sequence: Synthetic oligonucleotide
ccacccagaucugucucuu

SEQ ID NO: 1606793 - RNA, 19 nt, Artificial Sequence
  Description of Artificial Sequence: Synthetic oligonucleotide
ccccggccacccacccaga

SEQ ID NO: 1606794 - RNA, 19 nt, Artificial Sequence
  Description of Artificial Sequence: Synthetic oligonucleotide
ccgucccauccaggcuaca

SEQ ID NO: 1606795 - RNA, 19 nt, Artificial Sequence
  Description of Artificial Sequence: Synthetic oligonucleotide
gauaaaaggggccaggugg

SEQ ID NO: 1606796 - RNA, 19 nt, Artificial Sequence
  Description of Artificial Sequence: Synthetic oligonucleotide
ugacaucucaucuaugucg

SEQ ID NO: 1606797 - RNA, 19 nt, Artificial Sequence
  Description of Artificial Sequence: Synthetic oligonucleotide
aaagccucuucauaugugg

SEQ ID NO: 1606798 - RNA, 19 nt, Artificial Sequence
  Description of Artificial Sequence: Synthetic oligonucleotide
aaguuggucgagaagaagc

SEQ ID NO: 1606799 - RNA, 19 nt, Artificial Sequence
  Description of Artificial Sequence: Synthetic oligonucleotide
ugcaguguagaccaacugg

SEQ ID NO: 1606800 - RNA, 19 nt, Artificial Sequence
  Description of Artificial Sequence: Synthetic oligonucleotide
aaagagcgcaggcaguccc

SEQ ID NO: 1606801 - RNA, 19 nt, Artificial Sequence
  Description of Artificial Sequence: Synthetic oligonucleotide
aaggacaggucauggagcg

SEQ ID NO: 1606802 - RNA, 19 nt, Artificial Sequence
  Description of Artificial Sequence: Synthetic oligonucleotide
gaaaguucaggugugugcg

SEQ ID NO: 1606803 - RNA, 19 nt, Artificial Sequence
  Description of Artificial Sequence: Synthetic oligonucleotide
augaacugcacaaacuugc

SEQ ID NO: 1606804 - RNA, 19 nt, Artificial Sequence
  Description of Artificial Sequence: Synthetic oligonucleotide
auccgaggaacauggaugc

SEQ ID NO: 1606805 - RNA, 19 nt, Artificial Sequence
  Description of Artificial Sequence: Synthetic oligonucleotide
cuuucgguaguucaggagc

SEQ ID NO: 1606806 - RNA, 19 nt, Artificial Sequence
  Description of Artificial Sequence: Synthetic oligonucleotide
aaaggacaggucauggagc

SEQ ID NO: 1606807 - RNA, 19 nt, Artificial Sequence
  Description of Artificial Sequence: Synthetic oligonucleotide
agccacgucagcuacaguc

SEQ ID NO: 1606808 - RNA, 19 nt, Artificial Sequence
  Description of Artificial Sequence: Synthetic oligonucleotide
ugcacaaacuugcugauaa

SEQ ID NO: 1606809 - RNA, 19 nt, Artificial Sequence
  Description of Artificial Sequence: Synthetic oligonucleotide
ugaaaguucaggugugugc

SEQ ID NO: 1606810 - RNA, 19 nt, Artificial Sequence
  Description of Artificial Sequence: Synthetic oligonucleotide
gagggcugcaaucauaggc

SEQ ID NO: 1606811 - RNA, 19 nt, Artificial Sequence
  Description of Artificial Sequence: Synthetic oligonucleotide
aggcaagugccucaguagc

SEQ ID NO: 1606812 - RNA, 19 nt, Artificial Sequence
  Description of Artificial Sequence: Synthetic oligonucleotide
cuugcugauaaaaggggcc

SEQ ID NO: 1606813 - RNA, 19 nt, Artificial Sequence
  Description of Artificial Sequence: Synthetic oligonucleotide
ucagcuacagucaguggag

SEQ ID NO: 1606814 - RNA, 19 nt, Artificial Sequence
  Description of Artificial Sequence: Synthetic oligonucleotide
aguccagggaggcugaggg

SEQ ID NO: 1606815 - RNA, 19 nt, Artificial Sequence
  Description of Artificial Sequence: Synthetic oligonucleotide
ugccucaguagcaggaugg

SEQ ID NO: 1606816 - RNA, 19 nt, Artificial Sequence
  Description of Artificial Sequence: Synthetic oligonucleotide
aguuccaccaggcugagaa

SEQ ID NO: 1606817 - RNA, 19 nt, Artificial Sequence
  Description of Artificial Sequence: Synthetic oligonucleotide
ugcaaucauaggcaagugc

SEQ ID NO: 1606818 - RNA, 19 nt, Artificial Sequence
  Description of Artificial Sequence: Synthetic oligonucleotide
aaguucaggugugugcggc

SEQ ID NO: 1606819 - RNA, 19 nt, Artificial Sequence
  Description of Artificial Sequence: Synthetic oligonucleotide
ucuccgacaggccauguug

SEQ ID NO: 1606820 - RNA, 19 nt, Artificial Sequence
  Description of Artificial Sequence: Synthetic oligonucleotide
agcacuagcuccucccgcc

SEQ ID NO: 1606821 - RNA, 19 nt, Artificial Sequence
  Description of Artificial Sequence: Synthetic oligonucleotide
aaaguucaggugugugcgg

SEQ ID NO: 1606822 - RNA, 19 nt, Artificial Sequence
  Description of Artificial Sequence: Synthetic oligonucleotide
aggaccucaggucuccgcc

SEQ ID NO: 1606823 - RNA, 19 nt, Artificial Sequence
  Description of Artificial Sequence: Synthetic oligonucleotide
aguacgcuggucccggccc

SEQ ID NO: 1606824 - RNA, 19 nt, Artificial Sequence
  Description of Artificial Sequence: Synthetic oligonucleotide
gauccgaggaacauggaug

SEQ ID NO: 1606825 - RNA, 19 nt, Artificial Sequence
  Description of Artificial Sequence: Synthetic oligonucleotide
guagggagccggcugaucg

SEQ ID NO: 1606826 - RNA, 19 nt, Artificial Sequence
  Description of Artificial Sequence: Synthetic oligonucleotide
aguuggucgagaagaagcc

SEQ ID NO: 1606827 - RNA, 19 nt, Artificial Sequence
  Description of Artificial Sequence: Synthetic oligonucleotide
uuggucgagaagaagccca

SEQ ID NO: 1606828 - RNA, 19 nt, Artificial Sequence
  Description of Artificial Sequence: Synthetic oligonucleotide
auaaaaggggccagguggc

SEQ ID NO: 1606829 - RNA, 19 nt, Artificial Sequence
  Description of Artificial Sequence: Synthetic oligonucleotide
ugauaaaaggggccaggug

SEQ ID NO: 1606830 - RNA, 19 nt, Artificial Sequence
  Description of Artificial Sequence: Synthetic oligonucleotide
augcucuugacagaguagg

SEQ ID NO: 1606831 - RNA, 19 nt, Artificial Sequence
  Description of Artificial Sequence: Synthetic oligonucleotide
cuucuguggaguacgcugg

SEQ ID NO: 1606832 - RNA, 19 nt, Artificial Sequence
  Description of Artificial Sequence: Synthetic oligonucleotide
ucgagcacauccucaacag

SEQ ID NO: 1606833 - RNA, 19 nt, Artificial Sequence
  Description of Artificial Sequence: Synthetic oligonucleotide
ugcucucucucauuguugc

SEQ ID NO: 1606834 - RNA, 19 nt, Artificial Sequence
  Description of Artificial Sequence: Synthetic oligonucleotide
aagucagcggcgaugcugg

SEQ ID NO: 1606835 - RNA, 19 nt, Artificial Sequence
  Description of Artificial Sequence: Synthetic oligonucleotide
uuucgguaguucaggagca

SEQ ID NO: 1606836 - RNA, 19 nt, Artificial Sequence
  Description of Artificial Sequence: Synthetic oligonucleotide
aagaucuucagggccuccg

SEQ ID NO: 1606837 - RNA, 19 nt, Artificial Sequence
  Description of Artificial Sequence: Synthetic oligonucleotide
gacaucucaucuaugucgc

SEQ ID NO: 1606838 - RNA, 19 nt, Artificial Sequence
  Description of Artificial Sequence: Synthetic oligonucleotide
agccgcugcaaguuggucg

SEQ ID NO: 1606839 - RNA, 19 nt, Artificial Sequence
  Description of Artificial Sequence: Synthetic oligonucleotide
uaggcaagugccucaguag

SEQ ID NO: 1606840 - RNA, 19 nt, Artificial Sequence
  Description of Artificial Sequence: Synthetic oligonucleotide
gaagcacuagcuccucccg

SEQ ID NO: 1606841 - RNA, 19 nt, Artificial Sequence
  Description of Artificial Sequence: Synthetic oligonucleotide
cauauguggagccacguca

SEQ ID NO: 1606842 - RNA, 19 nt, Artificial Sequence
  Description of Artificial Sequence: Synthetic oligonucleotide
agaccaacuggccuggugu

SEQ ID NO: 1606843 - RNA, 19 nt, Artificial Sequence
  Description of Artificial Sequence: Synthetic oligonucleotide
aggcaguacaugaaggugg

SEQ ID NO: 1606844 - RNA, 19 nt, Artificial Sequence
  Description of Artificial Sequence: Synthetic oligonucleotide
ugcggcaagacuccucugc

SEQ ID NO: 1606845 - RNA, 19 nt, Artificial Sequence
  Description of Artificial Sequence: Synthetic oligonucleotide
ucuugacagaguagggugu

SEQ ID NO: 1606846 - RNA, 19 nt, Artificial Sequence
  Description of Artificial Sequence: Synthetic oligonucleotide
uaggguguacucuggcagg

SEQ ID NO: 1606847 - RNA, 19 nt, Artificial Sequence
  Description of Artificial Sequence: Synthetic oligonucleotide
gucagcuacagucagugga

SEQ ID NO: 1606848 - RNA, 19 nt, Artificial Sequence
  Description of Artificial Sequence: Synthetic oligonucleotide
cuucauauguggagccacg

SEQ ID NO: 1606849 - RNA, 19 nt, Artificial Sequence
  Description of Artificial Sequence: Synthetic oligonucleotide
gagcaggcggauaaaagag

SEQ ID NO: 1606850 - RNA, 19 nt, Artificial Sequence
  Description of Artificial Sequence: Synthetic oligonucleotide
ugccuagcaggauacggag

SEQ ID NO: 1606851 - RNA, 19 nt, Artificial Sequence
  Description of Artificial Sequence: Synthetic oligonucleotide
gaagacacgcggcugcagc

SEQ ID NO: 1606852 - RNA, 19 nt, Artificial Sequence
  Description of Artificial Sequence: Synthetic oligonucleotide
ucgagaagaagcccaggac

SEQ ID NO: 1606853 - RNA, 19 nt, Artificial Sequence
  Description of Artificial Sequence: Synthetic oligonucleotide
gaggcugaggggucgagcc

SEQ ID NO: 1606854 - RNA, 19 nt, Artificial Sequence
  Description of Artificial Sequence: Synthetic oligonucleotide
augaagcacuagcuccucc

SEQ ID NO: 1606855 - RNA, 19 nt, Artificial Sequence
  Description of Artificial Sequence: Synthetic oligonucleotide
ugaacugcacaaacuugcu

SEQ ID NO: 1606856 - RNA, 19 nt, Artificial Sequence
  Description of Artificial Sequence: Synthetic oligonucleotide
guacuuguggaugaacugc

SEQ ID NO: 1606857 - RNA, 19 nt, Artificial Sequence
  Description of Artificial Sequence: Synthetic oligonucleotide
cuggauggagcgcagcgcg

SEQ ID NO: 1606858 - RNA, 19 nt, Artificial Sequence
  Description of Artificial Sequence: Synthetic oligonucleotide
uugccuagcaggauacgga

SEQ ID NO: 1606859 - RNA, 19 nt, Artificial Sequence
  Description of Artificial Sequence: Synthetic oligonucleotide
ucagcggcgaugcuggggu

SEQ ID NO: 1606860 - RNA, 19 nt, Artificial Sequence
  Description of Artificial Sequence: Synthetic oligonucleotide
acuuucgguaguucaggag

SEQ ID NO: 1606861 - RNA, 19 nt, Artificial Sequence
  Description of Artificial Sequence: Synthetic oligonucleotide
aguucaggugugugcggcc

SEQ ID NO: 1606862 - RNA, 19 nt, Artificial Sequence
  Description of Artificial Sequence: Synthetic oligonucleotide
cucucucucauuguugccg

SEQ ID NO: 1606863 - RNA, 19 nt, Artificial Sequence
  Description of Artificial Sequence: Synthetic oligonucleotide
ucuaugucgcucagagucu

SEQ ID NO: 1606864 - RNA, 19 nt, Artificial Sequence
  Description of Artificial Sequence: Synthetic oligonucleotide
ucgggucuggaugagagug

SEQ ID NO: 1606865 - RNA, 19 nt, Artificial Sequence
  Description of Artificial Sequence: Synthetic oligonucleotide
aucucaucuaugucgcuca

SEQ ID NO: 1606866 - RNA, 19 nt, Artificial Sequence
  Description of Artificial Sequence: Synthetic oligonucleotide
cuugccuagcaggauacgg

SEQ ID NO: 1606867 - RNA, 19 nt, Artificial Sequence
  Description of Artificial Sequence: Synthetic oligonucleotide
ugcggcacuguccccaucc

SEQ ID NO: 1606868 - RNA, 19 nt, Artificial Sequence
  Description of Artificial Sequence: Synthetic oligonucleotide
uguagaccaacuggccugg

SEQ ID NO: 1606869 - RNA, 19 nt, Artificial Sequence
  Description of Artificial Sequence: Synthetic oligonucleotide
uguggaguacgcugguccc

SEQ ID NO: 1606870 - RNA, 19 nt, Artificial Sequence
  Description of Artificial Sequence: Synthetic oligonucleotide
gaacugcacaaacuugcug

SEQ ID NO: 1606871 - RNA, 19 nt, Artificial Sequence
  Description of Artificial Sequence: Synthetic oligonucleotide
gccaguaaagacuucagca

SEQ ID NO: 1606872 - RNA, 19 nt, Artificial Sequence
  Description of Artificial Sequence: Synthetic oligonucleotide
ucucucucauuguugccgc

SEQ ID NO: 1606873 - RNA, 19 nt, Artificial Sequence
  Description of Artificial Sequence: Synthetic oligonucleotide
uugucaaaggacaggucau

SEQ ID NO: 1606874 - RNA, 19 nt, Artificial Sequence
  Description of Artificial Sequence: Synthetic oligonucleotide
gaagucagcggcgaugcug

SEQ ID NO: 1606875 - RNA, 19 nt, Artificial Sequence
  Description of Artificial Sequence: Synthetic oligonucleotide
gucaaaggacaggucaugg

SEQ ID NO: 1606876 - RNA, 19 nt, Artificial Sequence
  Description of Artificial Sequence: Synthetic oligonucleotide
ucucucauuguugccgcgg

SEQ ID NO: 1606877 - RNA, 19 nt, Artificial Sequence
  Description of Artificial Sequence: Synthetic oligonucleotide
ccuagcaggauacggagcg

SEQ ID NO: 1606878 - RNA, 19 nt, Artificial Sequence
  Description of Artificial Sequence: Synthetic oligonucleotide
uggaugagagugcgugcgg

SEQ ID NO: 1606879 - RNA, 19 nt, Artificial Sequence
  Description of Artificial Sequence: Synthetic oligonucleotide
caggcagucccacagcgcc

SEQ ID NO: 1606880 - RNA, 19 nt, Artificial Sequence
  Description of Artificial Sequence: Synthetic oligonucleotide
agaagggcuagguagggua

SEQ ID NO: 1606881 - RNA, 19 nt, Artificial Sequence
  Description of Artificial Sequence: Synthetic oligonucleotide
uguugccgcggucagcagc

SEQ ID NO: 1606882 - RNA, 19 nt, Artificial Sequence
  Description of Artificial Sequence: Synthetic oligonucleotide
uuggucaguucucccgucc

SEQ ID NO: 1606883 - RNA, 19 nt, Artificial Sequence
  Description of Artificial Sequence: Synthetic oligonucleotide
ucgaugcagcagcacagcc

SEQ ID NO: 1606884 - RNA, 19 nt, Artificial Sequence
  Description of Artificial Sequence: Synthetic oligonucleotide
gauacggagcggugcagug

SEQ ID NO: 1606885 - RNA, 19 nt, Artificial Sequence
  Description of Artificial Sequence: Synthetic oligonucleotide
ucauauguggagccacguc

SEQ ID NO: 1606886 - RNA, 19 nt, Artificial Sequence
  Description of Artificial Sequence: Synthetic oligonucleotide
agcaggcggauaaaagagc

SEQ ID NO: 1606887 - RNA, 19 nt, Artificial Sequence
  Description of Artificial Sequence: Synthetic oligonucleotide
agauccgaggaacauggau

SEQ ID NO: 1606888 - RNA, 19 nt, Artificial Sequence
  Description of Artificial Sequence: Synthetic oligonucleotide
uugcugauaaaaggggcca

SEQ ID NO: 1606889 - RNA, 19 nt, Artificial Sequence
  Description of Artificial Sequence: Synthetic oligonucleotide
gacagaguaggguguacuc

SEQ ID NO: 1606890 - RNA, 19 nt, Artificial Sequence
  Description of Artificial Sequence: Synthetic oligonucleotide
ugcucgcucuggaagacac

SEQ ID NO: 1606891 - RNA, 19 nt, Artificial Sequence
  Description of Artificial Sequence: Synthetic oligonucleotide
uggucgagaagaagcccag

SEQ ID NO: 1606892 - RNA, 19 nt, Artificial Sequence
  Description of Artificial Sequence: Synthetic oligonucleotide
gucuggaugagagugcgug

SEQ ID NO: 1606893 - RNA, 19 nt, Artificial Sequence
  Description of Artificial Sequence: Synthetic oligonucleotide
agugcgugcggcacugucc

SEQ ID NO: 1606894 - RNA, 19 nt, Artificial Sequence
  Description of Artificial Sequence: Synthetic oligonucleotide
cuccgacaggccauguugg

SEQ ID NO: 1606895 - RNA, 19 nt, Artificial Sequence
  Description of Artificial Sequence: Synthetic oligonucleotide
cucgcucuggaagacacgc

SEQ ID NO: 1606896 - RNA, 19 nt, Artificial Sequence
  Description of Artificial Sequence: Synthetic oligonucleotide
caguguagaccaacuggcc

SEQ ID NO: 1606897 - RNA, 19 nt, Artificial Sequence
  Description of Artificial Sequence: Synthetic oligonucleotide
aggcggauaaaagagcgca

SEQ ID NO: 1606898 - RNA, 19 nt, Artificial Sequence
  Description of Artificial Sequence: Synthetic oligonucleotide
uagaccaacuggccuggug

SEQ ID NO: 1606899 - RNA, 19 nt, Artificial Sequence
  Description of Artificial Sequence: Synthetic oligonucleotide
uggucaguucucccguccc

SEQ ID NO: 1606900 - RNA, 19 nt, Artificial Sequence
  Description of Artificial Sequence: Synthetic oligonucleotide
auauguggagccacgucag

SEQ ID NO: 1606901 - RNA, 19 nt, Artificial Sequence
  Description of Artificial Sequence: Synthetic oligonucleotide
agcuacagucaguggagug

SEQ ID NO: 1606902 - RNA, 19 nt, Artificial Sequence
  Description of Artificial Sequence: Synthetic oligonucleotide
uguugucaaaggacagguc

SEQ ID NO: 1606903 - RNA, 19 nt, Artificial Sequence
  Description of Artificial Sequence: Synthetic oligonucleotide
uggaguacgcuggucccgg

SEQ ID NO: 1606904 - RNA, 19 nt, Artificial Sequence
  Description of Artificial Sequence: Synthetic oligonucleotide
acacugaccagggguaggg

SEQ ID NO: 1606905 - RNA, 19 nt, Artificial Sequence
  Description of Artificial Sequence: Synthetic oligonucleotide
agcccaggaccucaggucu

SEQ ID NO: 1606906 - RNA, 19 nt, Artificial Sequence
  Description of Artificial Sequence: Synthetic oligonucleotide
gcaggcggauaaaagagcg

SEQ ID NO: 1606907 - RNA, 19 nt, Artificial Sequence
  Description of Artificial Sequence: Synthetic oligonucleotide
gaguaggguguacucuggc

SEQ ID NO: 1606908 - RNA, 19 nt, Artificial Sequence
  Description of Artificial Sequence: Synthetic oligonucleotide
aucuucagggccuccgaga

SEQ ID NO: 1606909 - RNA, 19 nt, Artificial Sequence
  Description of Artificial Sequence: Synthetic oligonucleotide
ucgcucuggaagacacgcg

SEQ ID NO: 1606910 - RNA, 19 nt, Artificial Sequence
  Description of Artificial Sequence: Synthetic oligonucleotide
gcggucagcagcuaagcag

SEQ ID NO: 1606911 - RNA, 19 nt, Artificial Sequence
  Description of Artificial Sequence: Synthetic oligonucleotide
uccgagaucugggcgcugg

SEQ ID NO: 1606912 - RNA, 19 nt, Artificial Sequence
  Description of Artificial Sequence: Synthetic oligonucleotide
ugacagaguaggguguacu

SEQ ID NO: 1606913 - RNA, 19 nt, Artificial Sequence
  Description of Artificial Sequence: Synthetic oligonucleotide
aggacuuucgguaguucag

SEQ ID NO: 1606914 - RNA, 19 nt, Artificial Sequence
  Description of Artificial Sequence: Synthetic oligonucleotide
uucauauguggagccacgu

SEQ ID NO: 1606915 - RNA, 19 nt, Artificial Sequence
  Description of Artificial Sequence: Synthetic oligonucleotide
ugcugauaaaaggggccag

SEQ ID NO: 1606916 - RNA, 19 nt, Artificial Sequence
  Description of Artificial Sequence: Synthetic oligonucleotide
acagaguaggguguacucu

SEQ ID NO: 1606917 - RNA, 19 nt, Artificial Sequence
  Description of Artificial Sequence: Synthetic oligonucleotide
gcaguguagaccaacuggc

SEQ ID NO: 1606918 - RNA, 19 nt, Artificial Sequence
  Description of Artificial Sequence: Synthetic oligonucleotide
uacggagcggugcagugua

SEQ ID NO: 1606919 - RNA, 19 nt, Artificial Sequence
  Description of Artificial Sequence: Synthetic oligonucleotide
gauggagcgcagcgcgagg

SEQ ID NO: 1606920 - RNA, 19 nt, Artificial Sequence
  Description of Artificial Sequence: Synthetic oligonucleotide
ucauggagcggcuccgcgu

SEQ ID NO: 1606921 - RNA, 19 nt, Artificial Sequence
  Description of Artificial Sequence: Synthetic oligonucleotide
gacuuucgguaguucagga

SEQ ID NO: 1606922 - RNA, 19 nt, Artificial Sequence
  Description of Artificial Sequence: Synthetic oligonucleotide
gguaguucaggagcaggcg

SEQ ID NO: 1606923 - RNA, 19 nt, Artificial Sequence
  Description of Artificial Sequence: Synthetic oligonucleotide
ugucgcucagagucucgag

SEQ ID NO: 1606924 - RNA, 19 nt, Artificial Sequence
  Description of Artificial Sequence: Synthetic oligonucleotide
gaccaacuggccuggugug

SEQ ID NO: 1606925 - RNA, 19 nt, Artificial Sequence
  Description of Artificial Sequence: Synthetic oligonucleotide
cucgagcacauccucaaca

SEQ ID NO: 1606926 - RNA, 19 nt, Artificial Sequence
  Description of Artificial Sequence: Synthetic oligonucleotide
acaugaagcacuagcuccu

SEQ ID NO: 1606927 - RNA, 19 nt, Artificial Sequence
  Description of Artificial Sequence: Synthetic oligonucleotide
aagugccucaguagcagga

SEQ ID NO: 1606928 - RNA, 19 nt, Artificial Sequence
  Description of Artificial Sequence: Synthetic oligonucleotide
cauggagcggcuccgcgug

SEQ ID NO: 1606929 - RNA, 19 nt, Artificial Sequence
  Description of Artificial Sequence: Synthetic oligonucleotide
ugcccaccaggaaggcucg

SEQ ID NO: 1606930 - RNA, 19 nt, Artificial Sequence
  Description of Artificial Sequence: Synthetic oligonucleotide
caaguuggucgagaagaag

SEQ ID NO: 1606931 - RNA, 19 nt, Artificial Sequence
  Description of Artificial Sequence: Synthetic oligonucleotide
guucaggugugugcggccg

SEQ ID NO: 1606932 - RNA, 19 nt, Artificial Sequence
  Description of Artificial Sequence: Synthetic oligonucleotide
ugccggaacuccugaaagu

SEQ ID NO: 1606933 - RNA, 19 nt, Artificial Sequence
  Description of Artificial Sequence: Synthetic oligonucleotide
guuggucgagaagaagccc

SEQ ID NO: 1606934 - RNA, 19 nt, Artificial Sequence
  Description of Artificial Sequence: Synthetic oligonucleotide
ugagcucaucagccgcugc

SEQ ID NO: 1606935 - RNA, 19 nt, Artificial Sequence
  Description of Artificial Sequence: Synthetic oligonucleotide
gcggauaaaagagcgcagg

SEQ ID NO: 1606936 - RNA, 19 nt, Artificial Sequence
  Description of Artificial Sequence: Synthetic oligonucleotide
cugaaaguucaggugugug

SEQ ID NO: 1606937 - RNA, 19 nt, Artificial Sequence
  Description of Artificial Sequence: Synthetic oligonucleotide
gucaguucucccgucccgg

SEQ ID NO: 1606938 - RNA, 19 nt, Artificial Sequence
  Description of Artificial Sequence: Synthetic oligonucleotide
gugcgugcggcacuguccc

SEQ ID NO: 1606939 - RNA, 19 nt, Artificial Sequence
  Description of Artificial Sequence: Synthetic oligonucleotide
agaucuucagggccuccga

SEQ ID NO: 1606940 - RNA, 19 nt, Artificial Sequence
  Description of Artificial Sequence: Synthetic oligonucleotide
caggcggauaaaagagcgc

SEQ ID NO: 1606941 - RNA, 19 nt, Artificial Sequence
  Description of Artificial Sequence: Synthetic oligonucleotide
ucuugccuagcaggauacg

SEQ ID NO: 1606942 - RNA, 19 nt, Artificial Sequence
  Description of Artificial Sequence: Synthetic oligonucleotide
uacagucaguggaguggag

SEQ ID NO: 1606943 - RNA, 19 nt, Artificial Sequence
  Description of Artificial Sequence: Synthetic oligonucleotide
gagcucaucagccgcugca

SEQ ID NO: 1606944 - RNA, 19 nt, Artificial Sequence
  Description of Artificial Sequence: Synthetic oligonucleotide
gaguacgcuggucccggcc

SEQ ID NO: 1606945 - RNA, 19 nt, Artificial Sequence
  Description of Artificial Sequence: Synthetic oligonucleotide
uccgacaggccauguuggc

SEQ ID NO: 1606946 - RNA, 19 nt, Artificial Sequence
  Description of Artificial Sequence: Synthetic oligonucleotide
cacaugcaggaagaaggcc

SEQ ID NO: 1606947 - RNA, 19 nt, Artificial Sequence
  Description of Artificial Sequence: Synthetic oligonucleotide
acgcggcugcagcagcucc

SEQ ID NO: 1606948 - RNA, 19 nt, Artificial Sequence
  Description of Artificial Sequence: Synthetic oligonucleotide
ggacuuucgguaguucagg

SEQ ID NO: 1606949 - RNA, 19 nt, Artificial Sequence
  Description of Artificial Sequence: Synthetic oligonucleotide
caagacuccucugcugagc

SEQ ID NO: 1606950 - RNA, 19 nt, Artificial Sequence
  Description of Artificial Sequence: Synthetic oligonucleotide
ggguagucgggucuggaug

SEQ ID NO: 1606951 - RNA, 19 nt, Artificial Sequence
  Description of Artificial Sequence: Synthetic oligonucleotide
cugcucucucucauuguug

SEQ ID NO: 1606952 - RNA, 19 nt, Artificial Sequence
  Description of Artificial Sequence: Synthetic oligonucleotide
cugagccccgccaguaaag

SEQ ID NO: 1606953 - RNA, 19 nt, Artificial Sequence
  Description of Artificial Sequence: Synthetic oligonucleotide
cuccugaaaguucaggugu

SEQ ID NO: 1606954 - RNA, 19 nt, Artificial Sequence
  Description of Artificial Sequence: Synthetic oligonucleotide
ucuccgccgugacaucuca

SEQ ID NO: 1606955 - RNA, 19 nt, Artificial Sequence
  Description of Artificial Sequence: Synthetic oligonucleotide
caggccacguacuugugga

SEQ ID NO: 1606956 - RNA, 19 nt, Artificial Sequence
  Description of Artificial Sequence: Synthetic oligonucleotide
guggcgggaggacuuucgg

SEQ ID NO: 1606957 - RNA, 19 nt, Artificial Sequence
  Description of Artificial Sequence: Synthetic oligonucleotide
ucucgagcacauccucaac

SEQ ID NO: 1606958 - RNA, 19 nt, Artificial Sequence
  Description of Artificial Sequence: Synthetic oligonucleotide
caaagucccggcugcccag

SEQ ID NO: 1606959 - RNA, 19 nt, Artificial Sequence
  Description of Artificial Sequence: Synthetic oligonucleotide
aggaaggcucgaugcagca

SEQ ID NO: 1606960 - RNA, 19 nt, Artificial Sequence
  Description of Artificial Sequence: Synthetic oligonucleotide
gcugauaaaaggggccagg

SEQ ID NO: 1606961 - RNA, 19 nt, Artificial Sequence
  Description of Artificial Sequence: Synthetic oligonucleotide
ggcaguacaugaagguggg

SEQ ID NO: 1606962 - RNA, 19 nt, Artificial Sequence
  Description of Artificial Sequence: Synthetic oligonucleotide
uucgguaguucaggagcag

SEQ ID NO: 1606963 - RNA, 19 nt, Artificial Sequence
  Description of Artificial Sequence: Synthetic oligonucleotide
ggacaggucauggagcggc

SEQ ID NO: 1606964 - RNA, 19 nt, Artificial Sequence
  Description of Artificial Sequence: Synthetic oligonucleotide
guuguucuggauggagcgc

SEQ ID NO: 1606965 - RNA, 19 nt, Artificial Sequence
  Description of Artificial Sequence: Synthetic oligonucleotide
guugcggcaagacuccucu

SEQ ID NO: 1606966 - RNA, 19 nt, Artificial Sequence
  Description of Artificial Sequence: Synthetic oligonucleotide
ucucauuguugccgcgguc

SEQ ID NO: 1606967 - RNA, 19 nt, Artificial Sequence
  Description of Artificial Sequence: Synthetic oligonucleotide
agagucucgagcacauccu

SEQ ID NO: 1606968 - RNA, 19 nt, Artificial Sequence
  Description of Artificial Sequence: Synthetic oligonucleotide
guuccaccaggcugagaag

SEQ ID NO: 1606969 - RNA, 19 nt, Artificial Sequence
  Description of Artificial Sequence: Synthetic oligonucleotide
ggcgcuggugucaaucugg

SEQ ID NO: 1606970 - RNA, 19 nt, Artificial Sequence
  Description of Artificial Sequence: Synthetic oligonucleotide
acggcugcuggugcacugc

SEQ ID NO: 1606971 - RNA, 19 nt, Artificial Sequence
  Description of Artificial Sequence: Synthetic oligonucleotide
acugcaggccacguacuug

SEQ ID NO: 1606972 - RNA, 19 nt, Artificial Sequence
  Description of Artificial Sequence: Synthetic oligonucleotide
cucucucauuguugccgcg

SEQ ID NO: 1606973 - RNA, 19 nt, Artificial Sequence
  Description of Artificial Sequence: Synthetic oligonucleotide
ggucaguucucccgucccg

SEQ ID NO: 1606974 - RNA, 19 nt, Artificial Sequence
  Description of Artificial Sequence: Synthetic oligonucleotide
ugagccccgccaguaaaga

SEQ ID NO: 1606975 - RNA, 19 nt, Artificial Sequence
  Description of Artificial Sequence: Synthetic oligonucleotide
gacacgcggcugcagcagc

SEQ ID NO: 1606976 - RNA, 19 nt, Artificial Sequence
  Description of Artificial Sequence: Synthetic oligonucleotide
aggggucgagccucugcuc

SEQ ID NO: 1606977 - RNA, 19 nt, Artificial Sequence
  Description of Artificial Sequence: Synthetic oligonucleotide
gcaucagccacucugcucu

SEQ ID NO: 1606978 - RNA, 19 nt, Artificial Sequence
  Description of Artificial Sequence: Synthetic oligonucleotide
aggucauggagcggcuccg

SEQ ID NO: 1606979 - RNA, 19 nt, Artificial Sequence
  Description of Artificial Sequence: Synthetic oligonucleotide
ucuggccauacaugcccac

SEQ ID NO: 1606980 - RNA, 19 nt, Artificial Sequence
  Description of Artificial Sequence: Synthetic oligonucleotide
cuagcaggauacggagcgg

SEQ ID NO: 1606981 - RNA, 19 nt, Artificial Sequence
  Description of Artificial Sequence: Synthetic oligonucleotide
gagagugcgugcggcacug

SEQ ID NO: 1606982 - RNA, 19 nt, Artificial Sequence
  Description of Artificial Sequence: Synthetic oligonucleotide
guggaguacgcuggucccg

SEQ ID NO: 1606983 - RNA, 19 nt, Artificial Sequence
  Description of Artificial Sequence: Synthetic oligonucleotide
agacacugaccagggguag

SEQ ID NO: 1606984 - RNA, 19 nt, Artificial Sequence
  Description of Artificial Sequence: Synthetic oligonucleotide
gcaggccacguacuugugg

SEQ ID NO: 1606985 - RNA, 19 nt, Artificial Sequence
  Description of Artificial Sequence: Synthetic oligonucleotide
gucucgagcacauccucaa

SEQ ID NO: 1606986 - RNA, 19 nt, Artificial Sequence
  Description of Artificial Sequence: Synthetic oligonucleotide
uggugcacugcaggccacg

SEQ ID NO: 1606987 - RNA, 19 nt, Artificial Sequence
  Description of Artificial Sequence: Synthetic oligonucleotide
uucaggugugugcggccgu

SEQ ID NO: 1606988 - RNA, 19 nt, Artificial Sequence
  Description of Artificial Sequence: Synthetic oligonucleotide
uggcgggaggacuuucggu

SEQ ID NO: 1606989 - RNA, 19 nt, Artificial Sequence
  Description of Artificial Sequence: Synthetic oligonucleotide
cuggccauacaugcccacc

SEQ ID NO: 1606990 - RNA, 19 nt, Artificial Sequence
  Description of Artificial Sequence: Synthetic oligonucleotide
gugccucaguagcaggaug

SEQ ID NO: 1606991 - RNA, 19 nt, Artificial Sequence
  Description of Artificial Sequence: Synthetic oligonucleotide
cuaugucgcucagagucuc

SEQ ID NO: 1606992 - RNA, 19 nt, Artificial Sequence
  Description of Artificial Sequence: Synthetic oligonucleotide
ggaugaacugcacaaacuu

SEQ ID NO: 1606993 - RNA, 19 nt, Artificial Sequence
  Description of Artificial Sequence: Synthetic oligonucleotide
gugucaaucuggccauaca

SEQ ID NO: 1606994 - RNA, 19 nt, Artificial Sequence
  Description of Artificial Sequence: Synthetic oligonucleotide
cauacaugcccaccaggaa

SEQ ID NO: 1606995 - RNA, 19 nt, Artificial Sequence
  Description of Artificial Sequence: Synthetic oligonucleotide
ggagccacgucagcuacag

SEQ ID NO: 1606996 - RNA, 19 nt, Artificial Sequence
  Description of Artificial Sequence: Synthetic oligonucleotide
caaucauaggcaagugccu

SEQ ID NO: 1606997 - RNA, 19 nt, Artificial Sequence
  Description of Artificial Sequence: Synthetic oligonucleotide
gccgcuucuguggaguacg

SEQ ID NO: 1606998 - RNA, 19 nt, Artificial Sequence
  Description of Artificial Sequence: Synthetic oligonucleotide
caggauacggagcggugca

SEQ ID NO: 1606999 - RNA, 19 nt, Artificial Sequence
  Description of Artificial Sequence: Synthetic oligonucleotide
ucaggugugugcggccgug

SEQ ID NO: 1607000 - RNA, 19 nt, Artificial Sequence
  Description of Artificial Sequence: Synthetic oligonucleotide
gagccccgccaguaaagac

SEQ ID NO: 1607001 - RNA, 19 nt, Artificial Sequence
  Description of Artificial Sequence: Synthetic oligonucleotide
agucucgagcacauccuca

SEQ ID NO: 1607002 - RNA, 19 nt, Artificial Sequence
  Description of Artificial Sequence: Synthetic oligonucleotide
caucagccgcugcaaguug

SEQ ID NO: 1607003 - RNA, 19 nt, Artificial Sequence
  Description of Artificial Sequence: Synthetic oligonucleotide
gucagcggcgaugcugggg

SEQ ID NO: 1607004 - RNA, 19 nt, Artificial Sequence
  Description of Artificial Sequence: Synthetic oligonucleotide
gaacauggaugcaggccca

SEQ ID NO: 1607005 - RNA, 19 nt, Artificial Sequence
  Description of Artificial Sequence: Synthetic oligonucleotide
agacacgcggcugcagcag

SEQ ID NO: 1607006 - RNA, 19 nt, Artificial Sequence
  Description of Artificial Sequence: Synthetic oligonucleotide
gaggggucgagccucugcu

SEQ ID NO: 1607007 - RNA, 19 nt, Artificial Sequence
  Description of Artificial Sequence: Synthetic oligonucleotide
cagcgcgaggcugaaggcc

SEQ ID NO: 1607008 - RNA, 19 nt, Artificial Sequence
  Description of Artificial Sequence: Synthetic oligonucleotide
aaggcucgaugcagcagca

SEQ ID NO: 1607009 - RNA, 19 nt, Artificial Sequence
  Description of Artificial Sequence: Synthetic oligonucleotide
aagagcgcaggcaguccca

SEQ ID NO: 1607010 - RNA, 19 nt, Artificial Sequence
  Description of Artificial Sequence: Synthetic oligonucleotide
ucccgucccggcugggcag

SEQ ID NO: 1607011 - RNA, 19 nt, Artificial Sequence
  Description of Artificial Sequence: Synthetic oligonucleotide
cgcagcgcgaggcugaagg

SEQ ID NO: 1607012 - RNA, 19 nt, Artificial Sequence
  Description of Artificial Sequence: Synthetic oligonucleotide
gagugcgugcggcacuguc

SEQ ID NO: 1607013 - RNA, 19 nt, Artificial Sequence
  Description of Artificial Sequence: Synthetic oligonucleotide
ugugugcggccgugcagga

SEQ ID NO: 1607014 - RNA, 19 nt, Artificial Sequence
  Description of Artificial Sequence: Synthetic oligonucleotide
cacguacuuguggaugaac

SEQ ID NO: 1607015 - RNA, 19 nt, Artificial Sequence
  Description of Artificial Sequence: Synthetic oligonucleotide
uagcaggaugggguuggcc

SEQ ID NO: 1607016 - RNA, 19 nt, Artificial Sequence
  Description of Artificial Sequence: Synthetic oligonucleotide
cgcucuggaagacacgcgg

SEQ ID NO: 1607017 - RNA, 19 nt, Artificial Sequence
  Description of Artificial Sequence: Synthetic oligonucleotide
auacggagcggugcagugu

SEQ ID NO: 1607018 - RNA, 19 nt, Artificial Sequence
  Description of Artificial Sequence: Synthetic oligonucleotide
cugcaaucauaggcaagug

SEQ ID NO: 1607019 - RNA, 19 nt, Artificial Sequence
  Description of Artificial Sequence: Synthetic oligonucleotide
gcucgaugcagcagcacag

SEQ ID NO: 1607020 - RNA, 19 nt, Artificial Sequence
  Description of Artificial Sequence: Synthetic oligonucleotide
ggcugaucgcucaucuucc

SEQ ID NO: 1607021 - RNA, 19 nt, Artificial Sequence
  Description of Artificial Sequence: Synthetic oligonucleotide
ccgaggaacauggaugcag

SEQ ID NO: 1607022 - RNA, 19 nt, Artificial Sequence
  Description of Artificial Sequence: Synthetic oligonucleotide
ucuguggaguacgcugguc

SEQ ID NO: 1607023 - RNA, 19 nt, Artificial Sequence
  Description of Artificial Sequence: Synthetic oligonucleotide
augucgcucagagucucga

SEQ ID NO: 1607024 - RNA, 19 nt, Artificial Sequence
  Description of Artificial Sequence: Synthetic oligonucleotide
cauuguugccgcggucagc

SEQ ID NO: 1607025 - RNA, 19 nt, Artificial Sequence
  Description of Artificial Sequence: Synthetic oligonucleotide
aggcagucccacagcgccc

SEQ ID NO: 1607026 - RNA, 19 nt, Artificial Sequence
  Description of Artificial Sequence: Synthetic oligonucleotide
gcuggugcacugcaggcca

SEQ ID NO: 1607027 - RNA, 19 nt, Artificial Sequence
  Description of Artificial Sequence: Synthetic oligonucleotide
cagcuaagcagcaggggua

SEQ ID NO: 1607028 - RNA, 19 nt, Artificial Sequence
  Description of Artificial Sequence: Synthetic oligonucleotide
gcaggauacggagcggugc

SEQ ID NO: 1607029 - RNA, 19 nt, Artificial Sequence
  Description of Artificial Sequence: Synthetic oligonucleotide
ggccauacaugcccaccag

SEQ ID NO: 1607030 - RNA, 19 nt, Artificial Sequence
  Description of Artificial Sequence: Synthetic oligonucleotide
gcaugcucuugacagagua

SEQ ID NO: 1607031 - RNA, 19 nt, Artificial Sequence
  Description of Artificial Sequence: Synthetic oligonucleotide
agugccucaguagcaggau

SEQ ID NO: 1607032 - RNA, 19 nt, Artificial Sequence
  Description of Artificial Sequence: Synthetic oligonucleotide
gcugcaaucauaggcaagu

SEQ ID NO: 1607033 - RNA, 19 nt, Artificial Sequence
  Description of Artificial Sequence: Synthetic oligonucleotide
uggccacagccagucuccg

SEQ ID NO: 1607034 - RNA, 19 nt, Artificial Sequence
  Description of Artificial Sequence: Synthetic oligonucleotide
ugccagauccgaggaacau

SEQ ID NO: 1607035 - RNA, 19 nt, Artificial Sequence
  Description of Artificial Sequence: Synthetic oligonucleotide
ccucagacaggaucaguuc

SEQ ID NO: 1607036 - RNA, 19 nt, Artificial Sequence
  Description of Artificial Sequence: Synthetic oligonucleotide
agucagcggcgaugcuggg

SEQ ID NO: 1607037 - RNA, 19 nt, Artificial Sequence
  Description of Artificial Sequence: Synthetic oligonucleotide
uuguugccgcggucagcag

SEQ ID NO: 1607038 - RNA, 19 nt, Artificial Sequence
  Description of Artificial Sequence: Synthetic oligonucleotide
caugaagcacuagcuccuc

SEQ ID NO: 1607039 - RNA, 19 nt, Artificial Sequence
  Description of Artificial Sequence: Synthetic oligonucleotide
ggcgggaggacuuucggua

SEQ ID NO: 1607040 - RNA, 19 nt, Artificial Sequence
  Description of Artificial Sequence: Synthetic oligonucleotide
uguuggcaucagccacucu

SEQ ID NO: 1607041 - RNA, 19 nt, Artificial Sequence
  Description of Artificial Sequence: Synthetic oligonucleotide
agggccgucuguaccaccu

SEQ ID NO: 1607042 - RNA, 19 nt, Artificial Sequence
  Description of Artificial Sequence: Synthetic oligonucleotide
ggcggauaaaagagcgcag

SEQ ID NO: 1607043 - RNA, 19 nt, Artificial Sequence
  Description of Artificial Sequence: Synthetic oligonucleotide
uugcggcaagacuccucug

SEQ ID NO: 1607044 - RNA, 19 nt, Artificial Sequence
  Description of Artificial Sequence: Synthetic oligonucleotide
gguggcgggaggacuuucg

SEQ ID NO: 1607045 - RNA, 19 nt, Artificial Sequence
  Description of Artificial Sequence: Synthetic oligonucleotide
ggauggagcgcagcgcgag

SEQ ID NO: 1607046 - RNA, 19 nt, Artificial Sequence
  Description of Artificial Sequence: Synthetic oligonucleotide
aggucuccgccgugacauc

SEQ ID NO: 1607047 - RNA, 19 nt, Artificial Sequence
  Description of Artificial Sequence: Synthetic oligonucleotide
gagggccgucuguaccacc

SEQ ID NO: 1607048 - RNA, 19 nt, Artificial Sequence
  Description of Artificial Sequence: Synthetic oligonucleotide
agcaggauacggagcggug

SEQ ID NO: 1607049 - RNA, 19 nt, Artificial Sequence
  Description of Artificial Sequence: Synthetic oligonucleotide
ugccgcggucagcagcuaa

SEQ ID NO: 1607050 - RNA, 19 nt, Artificial Sequence
  Description of Artificial Sequence: Synthetic oligonucleotide
cugccagauccgaggaaca

SEQ ID NO: 1607051 - RNA, 19 nt, Artificial Sequence
  Description of Artificial Sequence: Synthetic oligonucleotide
accaacuggccuggugugu

SEQ ID NO: 1607052 - RNA, 19 nt, Artificial Sequence
  Description of Artificial Sequence: Synthetic oligonucleotide
ggucgagaagaagcccagg

SEQ ID NO: 1607053 - RNA, 19 nt, Artificial Sequence
  Description of Artificial Sequence: Synthetic oligonucleotide
cugauaaaaggggccaggu

SEQ ID NO: 1607054 - RNA, 19 nt, Artificial Sequence
  Description of Artificial Sequence: Synthetic oligonucleotide
ucucccgucccggcugggc

SEQ ID NO: 1607055 - RNA, 19 nt, Artificial Sequence
  Description of Artificial Sequence: Synthetic oligonucleotide
cagccuggccccgggaaag

SEQ ID NO: 1607056 - RNA, 19 nt, Artificial Sequence
  Description of Artificial Sequence: Synthetic oligonucleotide
cugagcucaucagccgcug

SEQ ID NO: 1607057 - RNA, 19 nt, Artificial Sequence
  Description of Artificial Sequence: Synthetic oligonucleotide
ugagggccgucuguaccac

SEQ ID NO: 1607058 - RNA, 19 nt, Artificial Sequence
  Description of Artificial Sequence: Synthetic oligonucleotide
ggaaggcucgaugcagcag

SEQ ID NO: 1607059 - RNA, 19 nt, Artificial Sequence
  Description of Artificial Sequence: Synthetic oligonucleotide
cuugacagaguagggugua

SEQ ID NO: 1607060 - RNA, 19 nt, Artificial Sequence
  Description of Artificial Sequence: Synthetic oligonucleotide
ccaguaaagacuucagcau

SEQ ID NO: 1607061 - RNA, 19 nt, Artificial Sequence
  Description of Artificial Sequence: Synthetic oligonucleotide
ugcucccggcucuugccua

SEQ ID NO: 1607062 - RNA, 19 nt, Artificial Sequence
  Description of Artificial Sequence: Synthetic oligonucleotide
cgccaguaaagacuucagc

SEQ ID NO: 1607063 - RNA, 19 nt, Artificial Sequence
  Description of Artificial Sequence: Synthetic oligonucleotide
cucaucuaugucgcucaga

SEQ ID NO: 1607064 - RNA, 19 nt, Artificial Sequence
  Description of Artificial Sequence: Synthetic oligonucleotide
accucaggucuccgccgug

SEQ ID NO: 1607065 - RNA, 19 nt, Artificial Sequence
  Description of Artificial Sequence: Synthetic oligonucleotide
ccgccaguaaagacuucag

SEQ ID NO: 1607066 - RNA, 19 nt, Artificial Sequence
  Description of Artificial Sequence: Synthetic oligonucleotide
ccgcaugcucuugacagag

SEQ ID NO: 1607067 - RNA, 19 nt, Artificial Sequence
  Description of Artificial Sequence: Synthetic oligonucleotide
agguggcgggaggacuuuc

SEQ ID NO: 1607068 - RNA, 19 nt, Artificial Sequence
  Description of Artificial Sequence: Synthetic oligonucleotide
guugccgcggucagcagcu

SEQ ID NO: 1607069 - RNA, 19 nt, Artificial Sequence
  Description of Artificial Sequence: Synthetic oligonucleotide
gggcuagguaggguagggg

SEQ ID NO: 1607070 - RNA, 19 nt, Artificial Sequence
  Description of Artificial Sequence: Synthetic oligonucleotide
cggcugaucgcucaucuuc

SEQ ID NO: 1607071 - RNA, 19 nt, Artificial Sequence
  Description of Artificial Sequence: Synthetic oligonucleotide
ggcaagugccucaguagca

SEQ ID NO: 1607072 - RNA, 19 nt, Artificial Sequence
  Description of Artificial Sequence: Synthetic oligonucleotide
agccggcugaucgcucauc

SEQ ID NO: 1607073 - RNA, 19 nt, Artificial Sequence
  Description of Artificial Sequence: Synthetic oligonucleotide
ucugggcccuggacaugaa

SEQ ID NO: 1607074 - RNA, 19 nt, Artificial Sequence
  Description of Artificial Sequence: Synthetic oligonucleotide
gcagcgcgaggcugaaggc

SEQ ID NO: 1607075 - RNA, 19 nt, Artificial Sequence
  Description of Artificial Sequence: Synthetic oligonucleotide
ugcgugcggcacugucccc

SEQ ID NO: 1607076 - RNA, 19 nt, Artificial Sequence
  Description of Artificial Sequence: Synthetic oligonucleotide
ggucgagccucugcucccg

SEQ ID NO: 1607077 - RNA, 19 nt, Artificial Sequence
  Description of Artificial Sequence: Synthetic oligonucleotide
caucagccacucugcucuc

SEQ ID NO: 1607078 - RNA, 19 nt, Artificial Sequence
  Description of Artificial Sequence: Synthetic oligonucleotide
cagucuccgacaggccaug

SEQ ID NO: 1607079 - RNA, 19 nt, Artificial Sequence
  Description of Artificial Sequence: Synthetic oligonucleotide
caggucuccgccgugacau

SEQ ID NO: 1607080 - RNA, 19 nt, Artificial Sequence
  Description of Artificial Sequence: Synthetic oligonucleotide
uacgcuggucccggcccug

SEQ ID NO: 1607081 - RNA, 19 nt, Artificial Sequence
  Description of Artificial Sequence: Synthetic oligonucleotide
caacuggccugguguguga

SEQ ID NO: 1607082 - RNA, 19 nt, Artificial Sequence
  Description of Artificial Sequence: Synthetic oligonucleotide
gcucagagucucgagcaca

SEQ ID NO: 1607083 - RNA, 19 nt, Artificial Sequence
  Description of Artificial Sequence: Synthetic oligonucleotide
ucccgccgcuucuguggag

SEQ ID NO: 1607084 - RNA, 19 nt, Artificial Sequence
  Description of Artificial Sequence: Synthetic oligonucleotide
caucuaugucgcucagagu

SEQ ID NO: 1607085 - RNA, 19 nt, Artificial Sequence
  Description of Artificial Sequence: Synthetic oligonucleotide
gggcgcuggugucaaucug

SEQ ID NO: 1607086 - RNA, 19 nt, Artificial Sequence
  Description of Artificial Sequence: Synthetic oligonucleotide
ggugcucgcucuggaagac

SEQ ID NO: 1607087 - RNA, 19 nt, Artificial Sequence
  Description of Artificial Sequence: Synthetic oligonucleotide
gccgcggucagcagcuaag

SEQ ID NO: 1607088 - RNA, 19 nt, Artificial Sequence
  Description of Artificial Sequence: Synthetic oligonucleotide
gcucuugacagaguagggu

SEQ ID NO: 1607089 - RNA, 19 nt, Artificial Sequence
  Description of Artificial Sequence: Synthetic oligonucleotide
gccuagcaggauacggagc

SEQ ID NO: 1607090 - RNA, 19 nt, Artificial Sequence
  Description of Artificial Sequence: Synthetic oligonucleotide
gcaggcccagaggaagucc

SEQ ID NO: 1607091 - RNA, 19 nt, Artificial Sequence
  Description of Artificial Sequence: Synthetic oligonucleotide
gccgugacaucucaucuau

SEQ ID NO: 1607092 - RNA, 19 nt, Artificial Sequence
  Description of Artificial Sequence: Synthetic oligonucleotide
aucugggcgcuggugucaa

SEQ ID NO: 1607093 - RNA, 19 nt, Artificial Sequence
  Description of Artificial Sequence: Synthetic oligonucleotide
uggccccgggaaagccucu

SEQ ID NO: 1607094 - RNA, 19 nt, Artificial Sequence
  Description of Artificial Sequence: Synthetic oligonucleotide
ggcgaugcugggguuguuc

SEQ ID NO: 1607095 - RNA, 19 nt, Artificial Sequence
  Description of Artificial Sequence: Synthetic oligonucleotide
ggcccuggacaugaagcac

SEQ ID NO: 1607096 - RNA, 19 nt, Artificial Sequence
  Description of Artificial Sequence: Synthetic oligonucleotide
acacgcggcugcagcagcu

SEQ ID NO: 1607097 - RNA, 19 nt, Artificial Sequence
  Description of Artificial Sequence: Synthetic oligonucleotide
gcugagccccgccaguaaa

SEQ ID NO: 1607098 - RNA, 19 nt, Artificial Sequence
  Description of Artificial Sequence: Synthetic oligonucleotide
gcucgcucuggaagacacg

SEQ ID NO: 1607099 - RNA, 19 nt, Artificial Sequence
  Description of Artificial Sequence: Synthetic oligonucleotide
ggucauggagcggcuccgc

SEQ ID NO: 1607100 - RNA, 19 nt, Artificial Sequence
  Description of Artificial Sequence: Synthetic oligonucleotide
gcgcuggugucaaucuggc

SEQ ID NO: 1607101 - RNA, 19 nt, Artificial Sequence
  Description of Artificial Sequence: Synthetic oligonucleotide
ggaggacuuucgguaguuc

SEQ ID NO: 1607102 - RNA, 19 nt, Artificial Sequence
  Description of Artificial Sequence: Synthetic oligonucleotide
agucuccgacaggccaugu

SEQ ID NO: 1607103 - RNA, 19 nt, Artificial Sequence
  Description of Artificial Sequence: Synthetic oligonucleotide
gugugcggccgugcaggag

SEQ ID NO: 1607104 - RNA, 19 nt, Artificial Sequence
  Description of Artificial Sequence: Synthetic oligonucleotide
cgucagcuacagucagugg

SEQ ID NO: 1607105 - RNA, 19 nt, Artificial Sequence
  Description of Artificial Sequence: Synthetic oligonucleotide
cccgccaguaaagacuuca

SEQ ID NO: 1607106 - RNA, 19 nt, Artificial Sequence
  Description of Artificial Sequence: Synthetic oligonucleotide
ccagggguagggagccggc

SEQ ID NO: 1607107 - RNA, 19 nt, Artificial Sequence
  Description of Artificial Sequence: Synthetic oligonucleotide
gcaagaucuucagggccuc

SEQ ID NO: 1607108 - RNA, 19 nt, Artificial Sequence
  Description of Artificial Sequence: Synthetic oligonucleotide
gucgggucuggaugagagu

SEQ ID NO: 1607109 - RNA, 19 nt, Artificial Sequence
  Description of Artificial Sequence: Synthetic oligonucleotide
gcgaugcugggguuguucu

SEQ ID NO: 1607110 - RNA, 19 nt, Artificial Sequence
  Description of Artificial Sequence: Synthetic oligonucleotide
gcaguacaugaaggugggc

SEQ ID NO: 1607111 - RNA, 19 nt, Artificial Sequence
  Description of Artificial Sequence: Synthetic oligonucleotide
cccggcucuugccuagcag

SEQ ID NO: 1607112 - RNA, 19 nt, Artificial Sequence
  Description of Artificial Sequence: Synthetic oligonucleotide
cacgucagcuacagucagu

SEQ ID NO: 1607113 - RNA, 19 nt, Artificial Sequence
  Description of Artificial Sequence: Synthetic oligonucleotide
gucuccgccgugacaucuc

SEQ ID NO: 1607114 - RNA, 19 nt, Artificial Sequence
  Description of Artificial Sequence: Synthetic oligonucleotide
gguugcggcaagacuccuc

SEQ ID NO: 1607115 - RNA, 19 nt, Artificial Sequence
  Description of Artificial Sequence: Synthetic oligonucleotide
acggagcggugcaguguag

SEQ ID NO: 1607116 - RNA, 19 nt, Artificial Sequence
  Description of Artificial Sequence: Synthetic oligonucleotide
cacgcggcugcagcagcuc

SEQ ID NO: 1607117 - RNA, 19 nt, Artificial Sequence
  Description of Artificial Sequence: Synthetic oligonucleotide
gccagguugcggcaagacu

SEQ ID NO: 1607118 - RNA, 19 nt, Artificial Sequence
  Description of Artificial Sequence: Synthetic oligonucleotide
ccgcuucuguggaguacgc

SEQ ID NO: 1607119 - RNA, 19 nt, Artificial Sequence
  Description of Artificial Sequence: Synthetic oligonucleotide
gugcacugcaggccacgua

SEQ ID NO: 1607120 - RNA, 19 nt, Artificial Sequence
  Description of Artificial Sequence: Synthetic oligonucleotide
ggccagguugcggcaagac

SEQ ID NO: 1607121 - RNA, 19 nt, Artificial Sequence
  Description of Artificial Sequence: Synthetic oligonucleotide
gcggcaagacuccucugcu

SEQ ID NO: 1607122 - RNA, 19 nt, Artificial Sequence
  Description of Artificial Sequence: Synthetic oligonucleotide
agagugcgugcggcacugu

SEQ ID NO: 1607123 - RNA, 19 nt, Artificial Sequence
  Description of Artificial Sequence: Synthetic oligonucleotide
guacgcuggucccggcccu

SEQ ID NO: 1607124 - RNA, 19 nt, Artificial Sequence
  Description of Artificial Sequence: Synthetic oligonucleotide
ggccgugcaggagggcugc

SEQ ID NO: 1607125 - RNA, 19 nt, Artificial Sequence
  Description of Artificial Sequence: Synthetic oligonucleotide
ggauacggagcggugcagu

SEQ ID NO: 1607126 - RNA, 19 nt, Artificial Sequence
  Description of Artificial Sequence: Synthetic oligonucleotide
gccucagacaggaucaguu

SEQ ID NO: 1607127 - RNA, 19 nt, Artificial Sequence
  Description of Artificial Sequence: Synthetic oligonucleotide
ccuggacaugaagcacuag

SEQ ID NO: 1607128 - RNA, 19 nt, Artificial Sequence
  Description of Artificial Sequence: Synthetic oligonucleotide
gccggcugaucgcucaucu

SEQ ID NO: 1607129 - RNA, 19 nt, Artificial Sequence
  Description of Artificial Sequence: Synthetic oligonucleotide
cauaggcaagugccucagu

SEQ ID NO: 1607130 - RNA, 19 nt, Artificial Sequence
  Description of Artificial Sequence: Synthetic oligonucleotide
ccgcggucagcagcuaagc

SEQ ID NO: 1607131 - RNA, 19 nt, Artificial Sequence
  Description of Artificial Sequence: Synthetic oligonucleotide
gguagggagccggcugauc

SEQ ID NO: 1607132 - RNA, 19 nt, Artificial Sequence
  Description of Artificial Sequence: Synthetic oligonucleotide
gucuccgacaggccauguu

SEQ ID NO: 1607133 - RNA, 19 nt, Artificial Sequence
  Description of Artificial Sequence: Synthetic oligonucleotide
gccggaacuccugaaaguu

SEQ ID NO: 1607134 - RNA, 19 nt, Artificial Sequence
  Description of Artificial Sequence: Synthetic oligonucleotide
gcgugcggcacugucccca

SEQ ID NO: 1607135 - RNA, 19 nt, Artificial Sequence
  Description of Artificial Sequence: Synthetic oligonucleotide
cugcucccggcucuugccu

SEQ ID NO: 1607136 - RNA, 19 nt, Artificial Sequence
  Description of Artificial Sequence: Synthetic oligonucleotide
ccgggaaagccucuucaua

SEQ ID NO: 1607137 - RNA, 19 nt, Artificial Sequence
  Description of Artificial Sequence: Synthetic oligonucleotide
gggguagucgggucuggau

SEQ ID NO: 1607138 - RNA, 19 nt, Artificial Sequence
  Description of Artificial Sequence: Synthetic oligonucleotide
ggucuccgccgugacaucu

SEQ ID NO: 1607139 - RNA, 19 nt, Artificial Sequence
  Description of Artificial Sequence: Synthetic oligonucleotide
gcagcagggguagucgggu

SEQ ID NO: 1607140 - RNA, 19 nt, Artificial Sequence
  Description of Artificial Sequence: Synthetic oligonucleotide
cuccgagaucugggcgcug

SEQ ID NO: 1607141 - RNA, 19 nt, Artificial Sequence
  Description of Artificial Sequence: Synthetic oligonucleotide
gggccgucuguaccaccuc

SEQ ID NO: 1607142 - RNA, 19 nt, Artificial Sequence
  Description of Artificial Sequence: Synthetic oligonucleotide
gagccacgucagcuacagu

SEQ ID NO: 1607143 - RNA, 19 nt, Artificial Sequence
  Description of Artificial Sequence: Synthetic oligonucleotide
gccgucuguaccaccucaa

SEQ ID NO: 1607144 - RNA, 19 nt, Artificial Sequence
  Description of Artificial Sequence: Synthetic oligonucleotide
gccccgggaaagccucuuc

SEQ ID NO: 1607145 - RNA, 19 nt, Artificial Sequence
  Description of Artificial Sequence: Synthetic oligonucleotide
gugcggcacuguccccauc

SEQ ID NO: 1607146 - RNA, 19 nt, Artificial Sequence
  Description of Artificial Sequence: Synthetic oligonucleotide
ccgucuguaccaccucaaa

SEQ ID NO: 1607147 - RNA, 19 nt, Artificial Sequence
  Description of Artificial Sequence: Synthetic oligonucleotide
gcaggagggcugcaaucau

SEQ ID NO: 1607148 - RNA, 19 nt, Artificial Sequence
  Description of Artificial Sequence: Synthetic oligonucleotide
ggccagguggcgggaggac

SEQ ID NO: 1607149 - RNA, 19 nt, Artificial Sequence
  Description of Artificial Sequence: Synthetic oligonucleotide
ccagucuccgacaggccau

SEQ ID NO: 1607150 - RNA, 19 nt, Artificial Sequence
  Description of Artificial Sequence: Synthetic oligonucleotide
ggugcacugcaggccacgu

SEQ ID NO: 1607151 - RNA, 19 nt, Artificial Sequence
  Description of Artificial Sequence: Synthetic oligonucleotide
gcgcgaggcugaaggccag

SEQ ID NO: 1607152 - RNA, 19 nt, Artificial Sequence
  Description of Artificial Sequence: Synthetic oligonucleotide
uugccgcggucagcagcua

SEQ ID NO: 1607153 - RNA, 19 nt, Artificial Sequence
  Description of Artificial Sequence: Synthetic oligonucleotide
cggccgugcaggagggcug

SEQ ID NO: 1607154 - RNA, 19 nt, Artificial Sequence
  Description of Artificial Sequence: Synthetic oligonucleotide
guagaccaacuggccuggu

SEQ ID NO: 1607155 - RNA, 19 nt, Artificial Sequence
  Description of Artificial Sequence: Synthetic oligonucleotide
cgcggucagcagcuaagca

SEQ ID NO: 1607156 - RNA, 19 nt, Artificial Sequence
  Description of Artificial Sequence: Synthetic oligonucleotide
caguuccaccaggcugaga

SEQ ID NO: 1607157 - RNA, 19 nt, Artificial Sequence
  Description of Artificial Sequence: Synthetic oligonucleotide
ccggcugcccaggcaguac

SEQ ID NO: 1607158 - RNA, 19 nt, Artificial Sequence
  Description of Artificial Sequence: Synthetic oligonucleotide
gcggccgugcaggagggcu

SEQ ID NO: 1607159 - RNA, 19 nt, Artificial Sequence
  Description of Artificial Sequence: Synthetic oligonucleotide
cgccgugacaucucaucua

SEQ ID NO: 1607160 - RNA, 19 nt, Artificial Sequence
  Description of Artificial Sequence: Synthetic oligonucleotide
cccgggaaagccucuucau

SEQ ID NO: 1607161 - RNA, 19 nt, Artificial Sequence
  Description of Artificial Sequence: Synthetic oligonucleotide
ccagguggcgggaggacuu

SEQ ID NO: 1607162 - RNA, 19 nt, Artificial Sequence
  Description of Artificial Sequence: Synthetic oligonucleotide
gccccgccaguaaagacuu

SEQ ID NO: 1607163 - RNA, 19 nt, Artificial Sequence
  Description of Artificial Sequence: Synthetic oligonucleotide
cuccgccgugacaucucau

SEQ ID NO: 1607164 - RNA, 19 nt, Artificial Sequence
  Description of Artificial Sequence: Synthetic oligonucleotide
gcggcuccgcgugcuucug

SEQ ID NO: 1607165 - RNA, 19 nt, Artificial Sequence
  Description of Artificial Sequence: Synthetic oligonucleotide
ccacguacuuguggaugaa

SEQ ID NO: 1607166 - RNA, 19 nt, Artificial Sequence
  Description of Artificial Sequence: Synthetic oligonucleotide
cgcugcaaguuggucgaga

SEQ ID NO: 1607167 - RNA, 19 nt, Artificial Sequence
  Description of Artificial Sequence: Synthetic oligonucleotide
cccugccagauccgaggaa

SEQ ID NO: 1607168 - RNA, 19 nt, Artificial Sequence
  Description of Artificial Sequence: Synthetic oligonucleotide
cgccgcuucuguggaguac

SEQ ID NO: 1607169 - RNA, 19 nt, Artificial Sequence
  Description of Artificial Sequence: Synthetic oligonucleotide
cgugcaggagggcugcaau

SEQ ID NO: 1607170 - RNA, 19 nt, Artificial Sequence
  Description of Artificial Sequence: Synthetic oligonucleotide
gcugaggggucgagccucu

SEQ ID NO: 1607171 - RNA, 19 nt, Artificial Sequence
  Description of Artificial Sequence: Synthetic oligonucleotide
ccccgccaguaaagacuuc

SEQ ID NO: 1607172 - RNA, 19 nt, Artificial Sequence
  Description of Artificial Sequence: Synthetic oligonucleotide
gcgcagcgcgaggcugaag

SEQ ID NO: 1607173 - RNA, 19 nt, Artificial Sequence
  Description of Artificial Sequence: Synthetic oligonucleotide
ggcugcccaggcaguacau

SEQ ID NO: 1607174 - RNA, 19 nt, Artificial Sequence
  Description of Artificial Sequence: Synthetic oligonucleotide
cccgccgcuucuguggagu

SEQ ID NO: 1607175 - RNA, 19 nt, Artificial Sequence
  Description of Artificial Sequence: Synthetic oligonucleotide
ccgugcaggagggcugcaa

SEQ ID NO: 1607176 - RNA, 19 nt, Artificial Sequence
  Description of Artificial Sequence: Synthetic oligonucleotide
cagguggcgggaggacuuu

SEQ ID NO: 1607177 - RNA, 19 nt, Artificial Sequence
  Description of Artificial Sequence: Synthetic oligonucleotide
ggguagggagccggcugau

SEQ ID NO: 1607178 - RNA, 19 nt, Artificial Sequence
  Description of Artificial Sequence: Synthetic oligonucleotide
ccgccgcuucuguggagua

SEQ ID NO: 1607179 - RNA, 19 nt, Artificial Sequence
  Description of Artificial Sequence: Synthetic oligonucleotide
cgcaugcucuugacagagu

SEQ ID NO: 1607180 - RNA, 19 nt, Artificial Sequence
  Description of Artificial Sequence: Synthetic oligonucleotide
gcccaccaggaaggcucga

SEQ ID NO: 1607181 - RNA, 19 nt, Artificial Sequence
  Description of Artificial Sequence: Synthetic oligonucleotide
ccggcugaucgcucaucuu

SEQ ID NO: 1607182 - RNA, 19 nt, Artificial Sequence
  Description of Artificial Sequence: Synthetic oligonucleotide
ggccccgggaaagccucuu

SEQ ID NO: 1607183 - RNA, 19 nt, Artificial Sequence
  Description of Artificial Sequence: Synthetic oligonucleotide
cggcgaugcugggguuguu

SEQ ID NO: 1607184 - RNA, 19 nt, Artificial Sequence
  Description of Artificial Sequence: Synthetic oligonucleotide
aaaccagccacucugcugc

SEQ ID NO: 1607185 - RNA, 19 nt, Artificial Sequence
  Description of Artificial Sequence: Synthetic oligonucleotide
auaucuauguucuucaguc

SEQ ID NO: 1607186 - RNA, 19 nt, Artificial Sequence
  Description of Artificial Sequence: Synthetic oligonucleotide
aaaggacgaauauucauuc

SEQ ID NO: 1607187 - RNA, 19 nt, Artificial Sequence
  Description of Artificial Sequence: Synthetic oligonucleotide
aauuacuugguagucacac

SEQ ID NO: 1607188 - RNA, 19 nt, Artificial Sequence
  Description of Artificial Sequence: Synthetic oligonucleotide
cuuaguucaaccaggcugg

SEQ ID NO: 1607189 - RNA, 19 nt, Artificial Sequence
  Description of Artificial Sequence: Synthetic oligonucleotide
uguguuucaaaagaccugg

SEQ ID NO: 1607190 - RNA, 19 nt, Artificial Sequence
  Description of Artificial Sequence: Synthetic oligonucleotide
cuaauaggcacuuuggaug

SEQ ID NO: 1607191 - RNA, 19 nt, Artificial Sequence
  Description of Artificial Sequence: Synthetic oligonucleotide
uuuggccacacuaauaggc

SEQ ID NO: 1607192 - RNA, 19 nt, Artificial Sequence
  Description of Artificial Sequence: Synthetic oligonucleotide
uuacuugguagucacaccc

SEQ ID NO: 1607193 - RNA, 19 nt, Artificial Sequence
  Description of Artificial Sequence: Synthetic oligonucleotide
aguguaggagacuaaagag

SEQ ID NO: 1607194 - RNA, 19 nt, Artificial Sequence
  Description of Artificial Sequence: Synthetic oligonucleotide
aagacuacagaagcuaaac

SEQ ID NO: 1607195 - RNA, 19 nt, Artificial Sequence
  Description of Artificial Sequence: Synthetic oligonucleotide
uccuaaaggacgaauauuc

SEQ ID NO: 1607196 - RNA, 19 nt, Artificial Sequence
  Description of Artificial Sequence: Synthetic oligonucleotide
uguaggagacuaaagagaa

SEQ ID NO: 1607197 - RNA, 19 nt, Artificial Sequence
  Description of Artificial Sequence: Synthetic oligonucleotide
uacguaaauaucuauguuc

SEQ ID NO: 1607198 - RNA, 19 nt, Artificial Sequence
  Description of Artificial Sequence: Synthetic oligonucleotide
uauuugacugacacaaagc

SEQ ID NO: 1607199 - RNA, 19 nt, Artificial Sequence
  Description of Artificial Sequence: Synthetic oligonucleotide
acuacguaaauaucuaugu

SEQ ID NO: 1607200 - RNA, 19 nt, Artificial Sequence
  Description of Artificial Sequence: Synthetic oligonucleotide
uguacucugccucucaagc

SEQ ID NO: 1607201 - RNA, 19 nt, Artificial Sequence
  Description of Artificial Sequence: Synthetic oligonucleotide
aauauucauucuccucugg

SEQ ID NO: 1607202 - RNA, 19 nt, Artificial Sequence
  Description of Artificial Sequence: Synthetic oligonucleotide
uaggagacuaaagagaaug

SEQ ID NO: 1607203 - RNA, 19 nt, Artificial Sequence
  Description of Artificial Sequence: Synthetic oligonucleotide
aggacgaauauucauucuc

SEQ ID NO: 1607204 - RNA, 19 nt, Artificial Sequence
  Description of Artificial Sequence: Synthetic oligonucleotide
ucaagcucaccuuaguuca

SEQ ID NO: 1607205 - RNA, 19 nt, Artificial Sequence
  Description of Artificial Sequence: Synthetic oligonucleotide
acuagguauuccaucaucc

SEQ ID NO: 1607206 - RNA, 19 nt, Artificial Sequence
  Description of Artificial Sequence: Synthetic oligonucleotide
auuacuugguagucacacc

SEQ ID NO: 1607207 - RNA, 19 nt, Artificial Sequence
  Description of Artificial Sequence: Synthetic oligonucleotide
gagacuaaagagaauggag

SEQ ID NO: 1607208 - RNA, 19 nt, Artificial Sequence
  Description of Artificial Sequence: Synthetic oligonucleotide
gacuaaagagaauggagac

SEQ ID NO: 1607209 - RNA, 19 nt, Artificial Sequence
  Description of Artificial Sequence: Synthetic oligonucleotide
aguucaaccaggcugggca

SEQ ID NO: 1607210 - RNA, 19 nt, Artificial Sequence
  Description of Artificial Sequence: Synthetic oligonucleotide
uaaaggacgaauauucauu

SEQ ID NO: 1607211 - RNA, 19 nt, Artificial Sequence
  Description of Artificial Sequence: Synthetic oligonucleotide
caugauuggguucggagcc

SEQ ID NO: 1607212 - RNA, 19 nt, Artificial Sequence
  Description of Artificial Sequence: Synthetic oligonucleotide
uggaccaugauuggguucg

SEQ ID NO: 1607213 - RNA, 19 nt, Artificial Sequence
  Description of Artificial Sequence: Synthetic oligonucleotide
agaauggagaccaggaggg

SEQ ID NO: 1607214 - RNA, 19 nt, Artificial Sequence
  Description of Artificial Sequence: Synthetic oligonucleotide
guaauuacuugguagucac

SEQ ID NO: 1607215 - RNA, 19 nt, Artificial Sequence
  Description of Artificial Sequence: Synthetic oligonucleotide
agcucuucgacuucuuggg

SEQ ID NO: 1607216 - RNA, 19 nt, Artificial Sequence
  Description of Artificial Sequence: Synthetic oligonucleotide
cuuaaccuccaccaguccg

SEQ ID NO: 1607217 - RNA, 19 nt, Artificial Sequence
  Description of Artificial Sequence: Synthetic oligonucleotide
gcauaugcugaguugaugg

SEQ ID NO: 1607218 - RNA, 19 nt, Artificial Sequence
  Description of Artificial Sequence: Synthetic oligonucleotide
ugcuauauuggugagcaca

SEQ ID NO: 1607219 - RNA, 19 nt, Artificial Sequence
  Description of Artificial Sequence: Synthetic oligonucleotide
ugaaucuucauugggccag

SEQ ID NO: 1607220 - RNA, 19 nt, Artificial Sequence
  Description of Artificial Sequence: Synthetic oligonucleotide
agcucucgccaauacaccc

SEQ ID NO: 1607221 - RNA, 19 nt, Artificial Sequence
  Description of Artificial Sequence: Synthetic oligonucleotide
aauacacccgugcuugugu

SEQ ID NO: 1607222 - RNA, 19 nt, Artificial Sequence
  Description of Artificial Sequence: Synthetic oligonucleotide
acuaauaggcacuuuggau

SEQ ID NO: 1607223 - RNA, 19 nt, Artificial Sequence
  Description of Artificial Sequence: Synthetic oligonucleotide
acgaauauucauucuccuc

SEQ ID NO: 1607224 - RNA, 19 nt, Artificial Sequence
  Description of Artificial Sequence: Synthetic oligonucleotide
ucugcuaaagccagaguaa

SEQ ID NO: 1607225 - RNA, 19 nt, Artificial Sequence
  Description of Artificial Sequence: Synthetic oligonucleotide
ucucagaaaagcccaguga

SEQ ID NO: 1607226 - RNA, 19 nt, Artificial Sequence
  Description of Artificial Sequence: Synthetic oligonucleotide
uguaauuacuugguaguca

SEQ ID NO: 1607227 - RNA, 19 nt, Artificial Sequence
  Description of Artificial Sequence: Synthetic oligonucleotide
agcugaaucuucauugggc

SEQ ID NO: 1607228 - RNA, 19 nt, Artificial Sequence
  Description of Artificial Sequence: Synthetic oligonucleotide
auugggugguaguacauug

SEQ ID NO: 1607229 - RNA, 19 nt, Artificial Sequence
  Description of Artificial Sequence: Synthetic oligonucleotide
caggacuuaaacaaagcuc

SEQ ID NO: 1607230 - RNA, 19 nt, Artificial Sequence
  Description of Artificial Sequence: Synthetic oligonucleotide
uuaaccuccaccaguccga

SEQ ID NO: 1607231 - RNA, 19 nt, Artificial Sequence
  Description of Artificial Sequence: Synthetic oligonucleotide
ugacacaaagcucuucgac

SEQ ID NO: 1607232 - RNA, 19 nt, Artificial Sequence
  Description of Artificial Sequence: Synthetic oligonucleotide
gaauggcucguccaccugg

SEQ ID NO: 1607233 - RNA, 19 nt, Artificial Sequence
  Description of Artificial Sequence: Synthetic oligonucleotide
agugcaagcuccuggaacu

SEQ ID NO: 1607234 - RNA, 19 nt, Artificial Sequence
  Description of Artificial Sequence: Synthetic oligonucleotide
gaguugauggguaauuuug

SEQ ID NO: 1607235 - RNA, 19 nt, Artificial Sequence
  Description of Artificial Sequence: Synthetic oligonucleotide
aucugcuaaagccagagua

SEQ ID NO: 1607236 - RNA, 19 nt, Artificial Sequence
  Description of Artificial Sequence: Synthetic oligonucleotide
aauuuugacggugcuauau

SEQ ID NO: 1607237 - RNA, 19 nt, Artificial Sequence
  Description of Artificial Sequence: Synthetic oligonucleotide
cacacuaauaggcacuuug

SEQ ID NO: 1607238 - RNA, 19 nt, Artificial Sequence
  Description of Artificial Sequence: Synthetic oligonucleotide
gauguuacgggagcucucg

SEQ ID NO: 1607239 - RNA, 19 nt, Artificial Sequence
  Description of Artificial Sequence: Synthetic oligonucleotide
ugacuuaaccuccaccagu

SEQ ID NO: 1607240 - RNA, 19 nt, Artificial Sequence
  Description of Artificial Sequence: Synthetic oligonucleotide
cacuacguaaauaucuaug

SEQ ID NO: 1607241 - RNA, 19 nt, Artificial Sequence
  Description of Artificial Sequence: Synthetic oligonucleotide
uugggugguaguacauugg

SEQ ID NO: 1607242 - RNA, 19 nt, Artificial Sequence
  Description of Artificial Sequence: Synthetic oligonucleotide
aauucaaacccagccugag

SEQ ID NO: 1607243 - RNA, 19 nt, Artificial Sequence
  Description of Artificial Sequence: Synthetic oligonucleotide
accaugauuggguucggag

SEQ ID NO: 1607244 - RNA, 19 nt, Artificial Sequence
  Description of Artificial Sequence: Synthetic oligonucleotide
aacugggcaagugcguggc

SEQ ID NO: 1607245 - RNA, 19 nt, Artificial Sequence
  Description of Artificial Sequence: Synthetic oligonucleotide
agugugauaccuccccauc

SEQ ID NO: 1607246 - RNA, 19 nt, Artificial Sequence
  Description of Artificial Sequence: Synthetic oligonucleotide
agacuaaagagaauggaga

SEQ ID NO: 1607247 - RNA, 19 nt, Artificial Sequence
  Description of Artificial Sequence: Synthetic oligonucleotide
ugaaaggguucacugucca

SEQ ID NO: 1607248 - RNA, 19 nt, Artificial Sequence
  Description of Artificial Sequence: Synthetic oligonucleotide
ugggugguaguacauuggc

SEQ ID NO: 1607249 - RNA, 19 nt, Artificial Sequence
  Description of Artificial Sequence: Synthetic oligonucleotide
acguaaauaucuauguucu

SEQ ID NO: 1607250 - RNA, 19 nt, Artificial Sequence
  Description of Artificial Sequence: Synthetic oligonucleotide
aagcuaaacaucugcuaaa

SEQ ID NO: 1607251 - RNA, 19 nt, Artificial Sequence
  Description of Artificial Sequence: Synthetic oligonucleotide
aggcacacgauguuacggg

SEQ ID NO: 1607252 - RNA, 19 nt, Artificial Sequence
  Description of Artificial Sequence: Synthetic oligonucleotide
agcucaccuuaguucaacc

SEQ ID NO: 1607253 - RNA, 19 nt, Artificial Sequence
  Description of Artificial Sequence: Synthetic oligonucleotide
acuugguagucacacccuc

SEQ ID NO: 1607254 - RNA, 19 nt, Artificial Sequence
  Description of Artificial Sequence: Synthetic oligonucleotide
accuggauccuaaaggacg

SEQ ID NO: 1607255 - RNA, 19 nt, Artificial Sequence
  Description of Artificial Sequence: Synthetic oligonucleotide
cugauggcaagguccauag

SEQ ID NO: 1607256 - RNA, 19 nt, Artificial Sequence
  Description of Artificial Sequence: Synthetic oligonucleotide
acuuaaacaaagcucccua

SEQ ID NO: 1607257 - RNA, 19 nt, Artificial Sequence
  Description of Artificial Sequence: Synthetic oligonucleotide
uuggguucggagcccaaag

SEQ ID NO: 1607258 - RNA, 19 nt, Artificial Sequence
  Description of Artificial Sequence: Synthetic oligonucleotide
cuucauugggccaggugcc

SEQ ID NO: 1607259 - RNA, 19 nt, Artificial Sequence
  Description of Artificial Sequence: Synthetic oligonucleotide
acaaagcucccuagaaacc

SEQ ID NO: 1607260 - RNA, 19 nt, Artificial Sequence
  Description of Artificial Sequence: Synthetic oligonucleotide
ucaacagaagugugauacc

SEQ ID NO: 1607261 - RNA, 19 nt, Artificial Sequence
  Description of Artificial Sequence: Synthetic oligonucleotide
aaggacgaauauucauucu

SEQ ID NO: 1607262 - RNA, 19 nt, Artificial Sequence
  Description of Artificial Sequence: Synthetic oligonucleotide
ugcuuggcagaacugggca

SEQ ID NO: 1607263 - RNA, 19 nt, Artificial Sequence
  Description of Artificial Sequence: Synthetic oligonucleotide
acuuaaccuccaccagucc

SEQ ID NO: 1607264 - RNA, 19 nt, Artificial Sequence
  Description of Artificial Sequence: Synthetic oligonucleotide
ugauaccuccccaucuuca

SEQ ID NO: 1607265 - RNA, 19 nt, Artificial Sequence
  Description of Artificial Sequence: Synthetic oligonucleotide
uugacggugcuauauuggu

SEQ ID NO: 1607266 - RNA, 19 nt, Artificial Sequence
  Description of Artificial Sequence: Synthetic oligonucleotide
cagaguaagcuuagaacug

SEQ ID NO: 1607267 - RNA, 19 nt, Artificial Sequence
  Description of Artificial Sequence: Synthetic oligonucleotide
uagugucuuucucaggccu

SEQ ID NO: 1607268 - RNA, 19 nt, Artificial Sequence
  Description of Artificial Sequence: Synthetic oligonucleotide
gguacuccgggauagcuag

SEQ ID NO: 1607269 - RNA, 19 nt, Artificial Sequence
  Description of Artificial Sequence: Synthetic oligonucleotide
uaguacauuggcaggugcu

SEQ ID NO: 1607270 - RNA, 19 nt, Artificial Sequence
  Description of Artificial Sequence: Synthetic oligonucleotide
caagagugcaccaguugcc

SEQ ID NO: 1607271 - RNA, 19 nt, Artificial Sequence
  Description of Artificial Sequence: Synthetic oligonucleotide
uccgggauagcuaguggcc

SEQ ID NO: 1607272 - RNA, 19 nt, Artificial Sequence
  Description of Artificial Sequence: Synthetic oligonucleotide
uguuacgggagcucucgcc

SEQ ID NO: 1607273 - RNA, 19 nt, Artificial Sequence
  Description of Artificial Sequence: Synthetic oligonucleotide
ucuaguaccgaggccuuag

SEQ ID NO: 1607274 - RNA, 19 nt, Artificial Sequence
  Description of Artificial Sequence: Synthetic oligonucleotide
agacuacagaagcuaaaca

SEQ ID NO: 1607275 - RNA, 19 nt, Artificial Sequence
  Description of Artificial Sequence: Synthetic oligonucleotide
cuucuaguggugacugugc

SEQ ID NO: 1607276 - RNA, 19 nt, Artificial Sequence
  Description of Artificial Sequence: Synthetic oligonucleotide
ugggcuaggcacuacguaa

SEQ ID NO: 1607277 - RNA, 19 nt, Artificial Sequence
  Description of Artificial Sequence: Synthetic oligonucleotide
uagaaaccagccacucugc

SEQ ID NO: 1607278 - RNA, 19 nt, Artificial Sequence
  Description of Artificial Sequence: Synthetic oligonucleotide
uuagcccaggauauuugac

SEQ ID NO: 1607279 - RNA, 19 nt, Artificial Sequence
  Description of Artificial Sequence: Synthetic oligonucleotide
uaucuauguucuucagucu

SEQ ID NO: 1607280 - RNA, 19 nt, Artificial Sequence
  Description of Artificial Sequence: Synthetic oligonucleotide
aagcucaccuuaguucaac

SEQ ID NO: 1607281 - RNA, 19 nt, Artificial Sequence
  Description of Artificial Sequence: Synthetic oligonucleotide
gaacugauaucuggucugg

SEQ ID NO: 1607282 - RNA, 19 nt, Artificial Sequence
  Description of Artificial Sequence: Synthetic oligonucleotide
uuccccugacuuaaccucc

SEQ ID NO: 1607283 - RNA, 19 nt, Artificial Sequence
  Description of Artificial Sequence: Synthetic oligonucleotide
uaguaccgaggccuuaggc

SEQ ID NO: 1607284 - RNA, 19 nt, Artificial Sequence
  Description of Artificial Sequence: Synthetic oligonucleotide
ugauaucuggucugggcaa

SEQ ID NO: 1607285 - RNA, 19 nt, Artificial Sequence
  Description of Artificial Sequence: Synthetic oligonucleotide
uucuaguggugacugugcu

SEQ ID NO: 1607286 - RNA, 19 nt, Artificial Sequence
  Description of Artificial Sequence: Synthetic oligonucleotide
ugguagucacacccucugg

SEQ ID NO: 1607287 - RNA, 19 nt, Artificial Sequence
  Description of Artificial Sequence: Synthetic oligonucleotide
gaguaaggaggcuggagca

SEQ ID NO: 1607288 - RNA, 19 nt, Artificial Sequence
  Description of Artificial Sequence: Synthetic oligonucleotide
acuacgguacagcaucacu

SEQ ID NO: 1607289 - RNA, 19 nt, Artificial Sequence
  Description of Artificial Sequence: Synthetic oligonucleotide
ucuaaguuccccugacuua

SEQ ID NO: 1607290 - RNA, 19 nt, Artificial Sequence
  Description of Artificial Sequence: Synthetic oligonucleotide
cuccgggauagcuaguggc

SEQ ID NO: 1607291 - RNA, 19 nt, Artificial Sequence
  Description of Artificial Sequence: Synthetic oligonucleotide
ugacggugcuauauuggug

SEQ ID NO: 1607292 - RNA, 19 nt, Artificial Sequence
  Description of Artificial Sequence: Synthetic oligonucleotide
cucgccaauacacccgugc

SEQ ID NO: 1607293 - RNA, 19 nt, Artificial Sequence
  Description of Artificial Sequence: Synthetic oligonucleotide
auagagcauccugagaaug

SEQ ID NO: 1607294 - RNA, 19 nt, Artificial Sequence
  Description of Artificial Sequence: Synthetic oligonucleotide
uaauuacuugguagucaca

SEQ ID NO: 1607295 - RNA, 19 nt, Artificial Sequence
  Description of Artificial Sequence: Synthetic oligonucleotide
cuccuagugucuuucucag

SEQ ID NO: 1607296 - RNA, 19 nt, Artificial Sequence
  Description of Artificial Sequence: Synthetic oligonucleotide
uaggguugccugacugugg

SEQ ID NO: 1607297 - RNA, 19 nt, Artificial Sequence
  Description of Artificial Sequence: Synthetic oligonucleotide
gacacaaagcucuucgacu

SEQ ID NO: 1607298 - RNA, 19 nt, Artificial Sequence
  Description of Artificial Sequence: Synthetic oligonucleotide
cacacgauguuacgggagc

SEQ ID NO: 1607299 - RNA, 19 nt, Artificial Sequence
  Description of Artificial Sequence: Synthetic oligonucleotide
cuagugucuuucucaggcc

SEQ ID NO: 1607300 - RNA, 19 nt, Artificial Sequence
  Description of Artificial Sequence: Synthetic oligonucleotide
aauggcucguccaccuggg

SEQ ID NO: 1607301 - RNA, 19 nt, Artificial Sequence
  Description of Artificial Sequence: Synthetic oligonucleotide
ugugauaccuccccaucuu

SEQ ID NO: 1607302 - RNA, 19 nt, Artificial Sequence
  Description of Artificial Sequence: Synthetic oligonucleotide
uauguacucugccucucaa

SEQ ID NO: 1607303 - RNA, 19 nt, Artificial Sequence
  Description of Artificial Sequence: Synthetic oligonucleotide
ugagaggcucugucaacag

SEQ ID NO: 1607304 - RNA, 19 nt, Artificial Sequence
  Description of Artificial Sequence: Synthetic oligonucleotide
gacuucuuggguacuccgg

SEQ ID NO: 1607305 - RNA, 19 nt, Artificial Sequence
  Description of Artificial Sequence: Synthetic oligonucleotide
agaguaagcuuagaacuga

SEQ ID NO: 1607306 - RNA, 19 nt, Artificial Sequence
  Description of Artificial Sequence: Synthetic oligonucleotide
caggcucuaguaccgaggc

SEQ ID NO: 1607307 - RNA, 19 nt, Artificial Sequence
  Description of Artificial Sequence: Synthetic oligonucleotide
uccugagaauggcucgucc

SEQ ID NO: 1607308 - RNA, 19 nt, Artificial Sequence
  Description of Artificial Sequence: Synthetic oligonucleotide
guaguacauuggcaggugc

SEQ ID NO: 1607309 - RNA, 19 nt, Artificial Sequence
  Description of Artificial Sequence: Synthetic oligonucleotide
cugauaucuggucugggca

SEQ ID NO: 1607310 - RNA, 19 nt, Artificial Sequence
  Description of Artificial Sequence: Synthetic oligonucleotide
auguacucugccucucaag

SEQ ID NO: 1607311 - RNA, 19 nt, Artificial Sequence
  Description of Artificial Sequence: Synthetic oligonucleotide
ccuacuacgguacagcauc

SEQ ID NO: 1607312 - RNA, 19 nt, Artificial Sequence
  Description of Artificial Sequence: Synthetic oligonucleotide
aggcacuacguaaauaucu

SEQ ID NO: 1607313 - RNA, 19 nt, Artificial Sequence
  Description of Artificial Sequence: Synthetic oligonucleotide
gauaucuggucugggcaag

SEQ ID NO: 1607314 - RNA, 19 nt, Artificial Sequence
  Description of Artificial Sequence: Synthetic oligonucleotide
guaccgaggccuuaggcca

SEQ ID NO: 1607315 - RNA, 19 nt, Artificial Sequence
  Description of Artificial Sequence: Synthetic oligonucleotide
auggguaauuuugacggug

SEQ ID NO: 1607316 - RNA, 19 nt, Artificial Sequence
  Description of Artificial Sequence: Synthetic oligonucleotide
gacuuaaccuccaccaguc

SEQ ID NO: 1607317 - RNA, 19 nt, Artificial Sequence
  Description of Artificial Sequence: Synthetic oligonucleotide
cuaggcacuacguaaauau

SEQ ID NO: 1607318 - RNA, 19 nt, Artificial Sequence
  Description of Artificial Sequence: Synthetic oligonucleotide
uacuugguagucacacccu

SEQ ID NO: 1607319 - RNA, 19 nt, Artificial Sequence
  Description of Artificial Sequence: Synthetic oligonucleotide
ccaagagugcaccaguugc

SEQ ID NO: 1607320 - RNA, 19 nt, Artificial Sequence
  Description of Artificial Sequence: Synthetic oligonucleotide
ggugcuauauuggugagca

SEQ ID NO: 1607321 - RNA, 19 nt, Artificial Sequence
  Description of Artificial Sequence: Synthetic oligonucleotide
auuuugacggugcuauauu

SEQ ID NO: 1607322 - RNA, 19 nt, Artificial Sequence
  Description of Artificial Sequence: Synthetic oligonucleotide
auguuacgggagcucucgc

SEQ ID NO: 1607323 - RNA, 19 nt, Artificial Sequence
  Description of Artificial Sequence: Synthetic oligonucleotide
agugcaccugguuugccca

SEQ ID NO: 1607324 - RNA, 19 nt, Artificial Sequence
  Description of Artificial Sequence: Synthetic oligonucleotide
agccuagagaccaugcuug

SEQ ID NO: 1607325 - RNA, 19 nt, Artificial Sequence
  Description of Artificial Sequence: Synthetic oligonucleotide
gaugagaggcucugucaac

SEQ ID NO: 1607326 - RNA, 19 nt, Artificial Sequence
  Description of Artificial Sequence: Synthetic oligonucleotide
cugacuuaaccuccaccag

SEQ ID NO: 1607327 - RNA, 19 nt, Artificial Sequence
  Description of Artificial Sequence: Synthetic oligonucleotide
guuacgggagcucucgcca

SEQ ID NO: 1607328 - RNA, 19 nt, Artificial Sequence
  Description of Artificial Sequence: Synthetic oligonucleotide
ucgccaauacacccgugcu

SEQ ID NO: 1607329 - RNA, 19 nt, Artificial Sequence
  Description of Artificial Sequence: Synthetic oligonucleotide
gccagaguaagcuuagaac

SEQ ID NO: 1607330 - RNA, 19 nt, Artificial Sequence
  Description of Artificial Sequence: Synthetic oligonucleotide
cugcuaaagccagaguaag

SEQ ID NO: 1607331 - RNA, 19 nt, Artificial Sequence
  Description of Artificial Sequence: Synthetic oligonucleotide
uucuuggguacuccgggau

SEQ ID NO: 1607332 - RNA, 19 nt, Artificial Sequence
  Description of Artificial Sequence: Synthetic oligonucleotide
ucugggcuaggcacuacgu

SEQ ID NO: 1607333 - RNA, 19 nt, Artificial Sequence
  Description of Artificial Sequence: Synthetic oligonucleotide
ugccuacuacgguacagca

SEQ ID NO: 1607334 - RNA, 19 nt, Artificial Sequence
  Description of Artificial Sequence: Synthetic oligonucleotide
uggguucggagcccaaaga

SEQ ID NO: 1607335 - RNA, 19 nt, Artificial Sequence
  Description of Artificial Sequence: Synthetic oligonucleotide
uaggcacuacguaaauauc

SEQ ID NO: 1607336 - RNA, 19 nt, Artificial Sequence
  Description of Artificial Sequence: Synthetic oligonucleotide
uccaguguaggagacuaaa

SEQ ID NO: 1607337 - RNA, 19 nt, Artificial Sequence
  Description of Artificial Sequence: Synthetic oligonucleotide
gaagugugauaccucccca

SEQ ID NO: 1607338 - RNA, 19 nt, Artificial Sequence
  Description of Artificial Sequence: Synthetic oligonucleotide
auaucuggucugggcaagc

SEQ ID NO: 1607339 - RNA, 19 nt, Artificial Sequence
  Description of Artificial Sequence: Synthetic oligonucleotide
gauccuaaaggacgaauau

SEQ ID NO: 1607340 - RNA, 19 nt, Artificial Sequence
  Description of Artificial Sequence: Synthetic oligonucleotide
acuccgggauagcuagugg

SEQ ID NO: 1607341 - RNA, 19 nt, Artificial Sequence
  Description of Artificial Sequence: Synthetic oligonucleotide
ucaaaagaccugggcagga

SEQ ID NO: 1607342 - RNA, 19 nt, Artificial Sequence
  Description of Artificial Sequence: Synthetic oligonucleotide
augauuggguucggagccc

SEQ ID NO: 1607343 - RNA, 19 nt, Artificial Sequence
  Description of Artificial Sequence: Synthetic oligonucleotide
gaccucaccaucucuaagu

SEQ ID NO: 1607344 - RNA, 19 nt, Artificial Sequence
  Description of Artificial Sequence: Synthetic oligonucleotide
cucugggcuaggcacuacg

SEQ ID NO: 1607345 - RNA, 19 nt, Artificial Sequence
  Description of Artificial Sequence: Synthetic oligonucleotide
ggacgaauauucauucucc

SEQ ID NO: 1607346 - RNA, 19 nt, Artificial Sequence
  Description of Artificial Sequence: Synthetic oligonucleotide
ccaugauuggguucggagc

SEQ ID NO: 1607347 - RNA, 19 nt, Artificial Sequence
  Description of Artificial Sequence: Synthetic oligonucleotide
aggccuuaggccaggcugc

SEQ ID NO: 1607348 - RNA, 19 nt, Artificial Sequence
  Description of Artificial Sequence: Synthetic oligonucleotide
ggguucggagcccaaagag

SEQ ID NO: 1607349 - RNA, 19 nt, Artificial Sequence
  Description of Artificial Sequence: Synthetic oligonucleotide
gcuauauuggugagcacag

SEQ ID NO: 1607350 - RNA, 19 nt, Artificial Sequence
  Description of Artificial Sequence: Synthetic oligonucleotide
augagaggcucugucaaca

SEQ ID NO: 1607351 - RNA, 19 nt, Artificial Sequence
  Description of Artificial Sequence: Synthetic oligonucleotide
agaaaccagccacucugcu

SEQ ID NO: 1607352 - RNA, 19 nt, Artificial Sequence
  Description of Artificial Sequence: Synthetic oligonucleotide
gcaagugcguggcacacag

SEQ ID NO: 1607353 - RNA, 19 nt, Artificial Sequence
  Description of Artificial Sequence: Synthetic oligonucleotide
aggcucuaguaccgaggcc

SEQ ID NO: 1607354 - RNA, 19 nt, Artificial Sequence
  Description of Artificial Sequence: Synthetic oligonucleotide
uccuauugggugguaguac

SEQ ID NO: 1607355 - RNA, 19 nt, Artificial Sequence
  Description of Artificial Sequence: Synthetic oligonucleotide
cacuagguauuccaucauc

SEQ ID NO: 1607356 - RNA, 19 nt, Artificial Sequence
  Description of Artificial Sequence: Synthetic oligonucleotide
aggguugccugacugugga

SEQ ID NO: 1607357 - RNA, 19 nt, Artificial Sequence
  Description of Artificial Sequence: Synthetic oligonucleotide
uacuccgggauagcuagug

SEQ ID NO: 1607358 - RNA, 19 nt, Artificial Sequence
  Description of Artificial Sequence: Synthetic oligonucleotide
ggugaagagguggaguaag

SEQ ID NO: 1607359 - RNA, 19 nt, Artificial Sequence
  Description of Artificial Sequence: Synthetic oligonucleotide
guucaaccaggcugggcag

SEQ ID NO: 1607360 - RNA, 19 nt, Artificial Sequence
  Description of Artificial Sequence: Synthetic oligonucleotide
gcauugugccagcauaugc

SEQ ID NO: 1607361 - RNA, 19 nt, Artificial Sequence
  Description of Artificial Sequence: Synthetic oligonucleotide
gugaagagguggaguaagg

SEQ ID NO: 1607362 - RNA, 19 nt, Artificial Sequence
  Description of Artificial Sequence: Synthetic oligonucleotide
uggccacacuaauaggcac

SEQ ID NO: 1607363 - RNA, 19 nt, Artificial Sequence
  Description of Artificial Sequence: Synthetic oligonucleotide
cuaguaccgaggccuuagg

SEQ ID NO: 1607364 - RNA, 19 nt, Artificial Sequence
  Description of Artificial Sequence: Synthetic oligonucleotide
gcuuguguuucaaaagacc

SEQ ID NO: 1607365 - RNA, 19 nt, Artificial Sequence
  Description of Artificial Sequence: Synthetic oligonucleotide
cucugucaacagaagugug

SEQ ID NO: 1607366 - RNA, 19 nt, Artificial Sequence
  Description of Artificial Sequence: Synthetic oligonucleotide
gacgaauauucauucuccu

SEQ ID NO: 1607367 - RNA, 19 nt, Artificial Sequence
  Description of Artificial Sequence: Synthetic oligonucleotide
aagaccugggcaggaugag

SEQ ID NO: 1607368 - RNA, 19 nt, Artificial Sequence
  Description of Artificial Sequence: Synthetic oligonucleotide
ugggccaggugccuacuac

SEQ ID NO: 1607369 - RNA, 19 nt, Artificial Sequence
  Description of Artificial Sequence: Synthetic oligonucleotide
ugcuccuauugggugguag

SEQ ID NO: 1607370 - RNA, 19 nt, Artificial Sequence
  Description of Artificial Sequence: Synthetic oligonucleotide
cuaaaggacgaauauucau

SEQ ID NO: 1607371 - RNA, 19 nt, Artificial Sequence
  Description of Artificial Sequence: Synthetic oligonucleotide
cuaaguuccccugacuuaa

SEQ ID NO: 1607372 - RNA, 19 nt, Artificial Sequence
  Description of Artificial Sequence: Synthetic oligonucleotide
agcauaugcugaguugaug

SEQ ID NO: 1607373 - RNA, 19 nt, Artificial Sequence
  Description of Artificial Sequence: Synthetic oligonucleotide
uccacacuacacugggaaa

SEQ ID NO: 1607374 - RNA, 19 nt, Artificial Sequence
  Description of Artificial Sequence: Synthetic oligonucleotide
ucuuggguacuccgggaua

SEQ ID NO: 1607375 - RNA, 19 nt, Artificial Sequence
  Description of Artificial Sequence: Synthetic oligonucleotide
ucuaguggugacugugcuu

SEQ ID NO: 1607376 - RNA, 19 nt, Artificial Sequence
  Description of Artificial Sequence: Synthetic oligonucleotide
agguggaccucaccaucuc

SEQ ID NO: 1607377 - RNA, 19 nt, Artificial Sequence
  Description of Artificial Sequence: Synthetic oligonucleotide
caggugccuacuacgguac

SEQ ID NO: 1607378 - RNA, 19 nt, Artificial Sequence
  Description of Artificial Sequence: Synthetic oligonucleotide
acgauguuacgggagcucu

SEQ ID NO: 1607379 - RNA, 19 nt, Artificial Sequence
  Description of Artificial Sequence: Synthetic oligonucleotide
gccaauacacccgugcuug

SEQ ID NO: 1607380 - RNA, 19 nt, Artificial Sequence
  Description of Artificial Sequence: Synthetic oligonucleotide
uccaccaguccgagccuag

SEQ ID NO: 1607381 - RNA, 19 nt, Artificial Sequence
  Description of Artificial Sequence: Synthetic oligonucleotide
gaaggucagcacugggguc

SEQ ID NO: 1607382 - RNA, 19 nt, Artificial Sequence
  Description of Artificial Sequence: Synthetic oligonucleotide
guguaauuacuugguaguc

SEQ ID NO: 1607383 - RNA, 19 nt, Artificial Sequence
  Description of Artificial Sequence: Synthetic oligonucleotide
uaaguuccccugacuuaac

SEQ ID NO: 1607384 - RNA, 19 nt, Artificial Sequence
  Description of Artificial Sequence: Synthetic oligonucleotide
aaagcccagugaaaggguu

SEQ ID NO: 1607385 - RNA, 19 nt, Artificial Sequence
  Description of Artificial Sequence: Synthetic oligonucleotide
ccugggacaacagugcacc

SEQ ID NO: 1607386 - RNA, 19 nt, Artificial Sequence
  Description of Artificial Sequence: Synthetic oligonucleotide
acggugcuauauuggugag

SEQ ID NO: 1607387 - RNA, 19 nt, Artificial Sequence
  Description of Artificial Sequence: Synthetic oligonucleotide
uggauccuaaaggacgaau

SEQ ID NO: 1607388 - RNA, 19 nt, Artificial Sequence
  Description of Artificial Sequence: Synthetic oligonucleotide
accuuaguucaaccaggcu

SEQ ID NO: 1607389 - RNA, 19 nt, Artificial Sequence
  Description of Artificial Sequence: Synthetic oligonucleotide
ccaguccgagccuagagac

SEQ ID NO: 1607390 - RNA, 19 nt, Artificial Sequence
  Description of Artificial Sequence: Synthetic oligonucleotide
gguuugcccaucucuggcc

SEQ ID NO: 1607391 - RNA, 19 nt, Artificial Sequence
  Description of Artificial Sequence: Synthetic oligonucleotide
uauugggugguaguacauu

SEQ ID NO: 1607392 - RNA, 19 nt, Artificial Sequence
  Description of Artificial Sequence: Synthetic oligonucleotide
ugauggcaagguccauaga

SEQ ID NO: 1607393 - RNA, 19 nt, Artificial Sequence
  Description of Artificial Sequence: Synthetic oligonucleotide
cugaaucuucauugggcca

SEQ ID NO: 1607394 - RNA, 19 nt, Artificial Sequence
  Description of Artificial Sequence: Synthetic oligonucleotide
gugccuacuacgguacagc

SEQ ID NO: 1607395 - RNA, 19 nt, Artificial Sequence
  Description of Artificial Sequence: Synthetic oligonucleotide
gaggcucugucaacagaag

SEQ ID NO: 1607396 - RNA, 19 nt, Artificial Sequence
  Description of Artificial Sequence: Synthetic oligonucleotide
auccuaaaggacgaauauu

SEQ ID NO: 1607397 - RNA, 19 nt, Artificial Sequence
  Description of Artificial Sequence: Synthetic oligonucleotide
uccccugacuuaaccucca

SEQ ID NO: 1607398 - RNA, 19 nt, Artificial Sequence
  Description of Artificial Sequence: Synthetic oligonucleotide
ugucaacagaagugugaua

SEQ ID NO: 1607399 - RNA, 19 nt, Artificial Sequence
  Description of Artificial Sequence: Synthetic oligonucleotide
ccugguuugcccaucucug

SEQ ID NO: 1607400 - RNA, 19 nt, Artificial Sequence
  Description of Artificial Sequence: Synthetic oligonucleotide
gcuccuagugucuuucuca

SEQ ID NO: 1607401 - RNA, 19 nt, Artificial Sequence
  Description of Artificial Sequence: Synthetic oligonucleotide
gagaccaugcuuggcagaa

SEQ ID NO: 1607402 - RNA, 19 nt, Artificial Sequence
  Description of Artificial Sequence: Synthetic oligonucleotide
aacaucugcuaaagccaga

SEQ ID NO: 1607403 - RNA, 19 nt, Artificial Sequence
  Description of Artificial Sequence: Synthetic oligonucleotide
ugcccacuagguauuccau

SEQ ID NO: 1607404 - RNA, 19 nt, Artificial Sequence
  Description of Artificial Sequence: Synthetic oligonucleotide
uggguacuccgggauagcu

SEQ ID NO: 1607405 - RNA, 19 nt, Artificial Sequence
  Description of Artificial Sequence: Synthetic oligonucleotide
gguucggagcccaaagagc

SEQ ID NO: 1607406 - RNA, 19 nt, Artificial Sequence
  Description of Artificial Sequence: Synthetic oligonucleotide
cugcccacuagguauucca

SEQ ID NO: 1607407 - RNA, 19 nt, Artificial Sequence
  Description of Artificial Sequence: Synthetic oligonucleotide
ugcugguggaaggcacacg

SEQ ID NO: 1607408 - RNA, 19 nt, Artificial Sequence
  Description of Artificial Sequence: Synthetic oligonucleotide
gggccaggugccuacuacg

SEQ ID NO: 1607409 - RNA, 19 nt, Artificial Sequence
  Description of Artificial Sequence: Synthetic oligonucleotide
aguaagcuuagaacugaaa

SEQ ID NO: 1607410 - RNA, 19 nt, Artificial Sequence
  Description of Artificial Sequence: Synthetic oligonucleotide
gcuucuaguggugacugug

SEQ ID NO: 1607411 - RNA, 19 nt, Artificial Sequence
  Description of Artificial Sequence: Synthetic oligonucleotide
agugucuuucucaggccug

SEQ ID NO: 1607412 - RNA, 19 nt, Artificial Sequence
  Description of Artificial Sequence: Synthetic oligonucleotide
uaguucaaccaggcugggc

SEQ ID NO: 1607413 - RNA, 19 nt, Artificial Sequence
  Description of Artificial Sequence: Synthetic oligonucleotide
gugauaccuccccaucuuc

SEQ ID NO: 1607414 - RNA, 19 nt, Artificial Sequence
  Description of Artificial Sequence: Synthetic oligonucleotide
guuucccaccagaagguca

SEQ ID NO: 1607415 - RNA, 19 nt, Artificial Sequence
  Description of Artificial Sequence: Synthetic oligonucleotide
caauacacccgugcuugug

SEQ ID NO: 1607416 - RNA, 19 nt, Artificial Sequence
  Description of Artificial Sequence: Synthetic oligonucleotide
uucgacuucuuggguacuc

SEQ ID NO: 1607417 - RNA, 19 nt, Artificial Sequence
  Description of Artificial Sequence: Synthetic oligonucleotide
ucugcccacuagguauucc

SEQ ID NO: 1607418 - RNA, 19 nt, Artificial Sequence
  Description of Artificial Sequence: Synthetic oligonucleotide
gcugcuagggcugauggca

SEQ ID NO: 1607419 - RNA, 19 nt, Artificial Sequence
  Description of Artificial Sequence: Synthetic oligonucleotide
caucucuaaguuccccuga

SEQ ID NO: 1607420 - RNA, 19 nt, Artificial Sequence
  Description of Artificial Sequence: Synthetic oligonucleotide
agagugcaagcuccuggaa

SEQ ID NO: 1607421 - RNA, 19 nt, Artificial Sequence
  Description of Artificial Sequence: Synthetic oligonucleotide
uccgagccuagagaccaug

SEQ ID NO: 1607422 - RNA, 19 nt, Artificial Sequence
  Description of Artificial Sequence: Synthetic oligonucleotide
uggcaggugcuuuggccac

SEQ ID NO: 1607423 - RNA, 19 nt, Artificial Sequence
  Description of Artificial Sequence: Synthetic oligonucleotide
agaccaugcuuggcagaac

SEQ ID NO: 1607424 - RNA, 19 nt, Artificial Sequence
  Description of Artificial Sequence: Synthetic oligonucleotide
uacuacgguacagcaucac

SEQ ID NO: 1607425 - RNA, 19 nt, Artificial Sequence
  Description of Artificial Sequence: Synthetic oligonucleotide
auacacccgugcuuguguu

SEQ ID NO: 1607426 - RNA, 19 nt, Artificial Sequence
  Description of Artificial Sequence: Synthetic oligonucleotide
cuucuuggguacuccggga

SEQ ID NO: 1607427 - RNA, 19 nt, Artificial Sequence
  Description of Artificial Sequence: Synthetic oligonucleotide
gccuagagaccaugcuugg

SEQ ID NO: 1607428 - RNA, 19 nt, Artificial Sequence
  Description of Artificial Sequence: Synthetic oligonucleotide
agggaaccuccagaccuuc

SEQ ID NO: 1607429 - RNA, 19 nt, Artificial Sequence
  Description of Artificial Sequence: Synthetic oligonucleotide
cugggcaggaguguaauua

SEQ ID NO: 1607430 - RNA, 19 nt, Artificial Sequence
  Description of Artificial Sequence: Synthetic oligonucleotide
ccuuaggguugccugacug

SEQ ID NO: 1607431 - RNA, 19 nt, Artificial Sequence
  Description of Artificial Sequence: Synthetic oligonucleotide
ccuauugggugguaguaca

SEQ ID NO: 1607432 - RNA, 19 nt, Artificial Sequence
  Description of Artificial Sequence: Synthetic oligonucleotide
gaguaagcuuagaacugaa

SEQ ID NO: 1607433 - RNA, 19 nt, Artificial Sequence
  Description of Artificial Sequence: Synthetic oligonucleotide
cucuggcccagagugcaag

SEQ ID NO: 1607434 - RNA, 19 nt, Artificial Sequence
  Description of Artificial Sequence: Synthetic oligonucleotide
ccuaaaggacgaauauuca

SEQ ID NO: 1607435 - RNA, 19 nt, Artificial Sequence
  Description of Artificial Sequence: Synthetic oligonucleotide
ucucgccaauacacccgug

SEQ ID NO: 1607436 - RNA, 19 nt, Artificial Sequence
  Description of Artificial Sequence: Synthetic oligonucleotide
gcaggcucuaguaccgagg

SEQ ID NO: 1607437 - RNA, 19 nt, Artificial Sequence
  Description of Artificial Sequence: Synthetic oligonucleotide
gugugauaccuccccaucu

SEQ ID NO: 1607438 - RNA, 19 nt, Artificial Sequence
  Description of Artificial Sequence: Synthetic oligonucleotide
cuacuacgguacagcauca

SEQ ID NO: 1607439 - RNA, 19 nt, Artificial Sequence
  Description of Artificial Sequence: Synthetic oligonucleotide
acacgauguuacgggagcu

SEQ ID NO: 1607440 - RNA, 19 nt, Artificial Sequence
  Description of Artificial Sequence: Synthetic oligonucleotide
gcucaccuuaguucaacca

SEQ ID NO: 1607441 - RNA, 19 nt, Artificial Sequence
  Description of Artificial Sequence: Synthetic oligonucleotide
uacgggagcucucgccaau

SEQ ID NO: 1607442 - RNA, 19 nt, Artificial Sequence
  Description of Artificial Sequence: Synthetic oligonucleotide
gacugacacaaagcucuuc

SEQ ID NO: 1607443 - RNA, 19 nt, Artificial Sequence
  Description of Artificial Sequence: Synthetic oligonucleotide
cacgauguuacgggagcuc

SEQ ID NO: 1607444 - RNA, 19 nt, Artificial Sequence
  Description of Artificial Sequence: Synthetic oligonucleotide
ggugcuuuggccacacuaa

SEQ ID NO: 1607445 - RNA, 19 nt, Artificial Sequence
  Description of Artificial Sequence: Synthetic oligonucleotide
ggccaggugccuacuacgg

SEQ ID NO: 1607446 - RNA, 19 nt, Artificial Sequence
  Description of Artificial Sequence: Synthetic oligonucleotide
ggauccuaaaggacgaaua

SEQ ID NO: 1607447 - RNA, 19 nt, Artificial Sequence
  Description of Artificial Sequence: Synthetic oligonucleotide
auuggguucggagcccaaa

SEQ ID NO: 1607448 - RNA, 19 nt, Artificial Sequence
  Description of Artificial Sequence: Synthetic oligonucleotide
cuacguaaauaucuauguu

SEQ ID NO: 1607449 - RNA, 19 nt, Artificial Sequence
  Description of Artificial Sequence: Synthetic oligonucleotide
ugcguggcacacagcugaa

SEQ ID NO: 1607450 - RNA, 19 nt, Artificial Sequence
  Description of Artificial Sequence: Synthetic oligonucleotide
cccugacuuaaccuccacc

SEQ ID NO: 1607451 - RNA, 19 nt, Artificial Sequence
  Description of Artificial Sequence: Synthetic oligonucleotide
ucucuggcccagagugcaa

SEQ ID NO: 1607452 - RNA, 19 nt, Artificial Sequence
  Description of Artificial Sequence: Synthetic oligonucleotide
ggcacacgauguuacggga

SEQ ID NO: 1607453 - RNA, 19 nt, Artificial Sequence
  Description of Artificial Sequence: Synthetic oligonucleotide
gcacacgauguuacgggag

SEQ ID NO: 1607454 - RNA, 19 nt, Artificial Sequence
  Description of Artificial Sequence: Synthetic oligonucleotide
gguggaaggcacacgaugu

SEQ ID NO: 1607455 - RNA, 19 nt, Artificial Sequence
  Description of Artificial Sequence: Synthetic oligonucleotide
cguggcacacagcugaauc

SEQ ID NO: 1607456 - RNA, 19 nt, Artificial Sequence
  Description of Artificial Sequence: Synthetic oligonucleotide
cauagagcauccugagaau

SEQ ID NO: 1607457 - RNA, 19 nt, Artificial Sequence
  Description of Artificial Sequence: Synthetic oligonucleotide
uugggccaggugccuacua

SEQ ID NO: 1607458 - RNA, 19 nt, Artificial Sequence
  Description of Artificial Sequence: Synthetic oligonucleotide
gugcuauauuggugagcac

SEQ ID NO: 1607459 - RNA, 19 nt, Artificial Sequence
  Description of Artificial Sequence: Synthetic oligonucleotide
cgacuucuuggguacuccg

SEQ ID NO: 1607460 - RNA, 19 nt, Artificial Sequence
  Description of Artificial Sequence: Synthetic oligonucleotide
caucacucccaggaaugca

SEQ ID NO: 1607461 - RNA, 19 nt, Artificial Sequence
  Description of Artificial Sequence: Synthetic oligonucleotide
ggcacuacguaaauaucua

SEQ ID NO: 1607462 - RNA, 19 nt, Artificial Sequence
  Description of Artificial Sequence: Synthetic oligonucleotide
gccccggagccacuuagcc

SEQ ID NO: 1607463 - RNA, 19 nt, Artificial Sequence
  Description of Artificial Sequence: Synthetic oligonucleotide
ccgagccuagagaccaugc

SEQ ID NO: 1607464 - RNA, 19 nt, Artificial Sequence
  Description of Artificial Sequence: Synthetic oligonucleotide
ccucuggaccaugauuggg

SEQ ID NO: 1607465 - RNA, 19 nt, Artificial Sequence
  Description of Artificial Sequence: Synthetic oligonucleotide
gcggugaagagguggagua

SEQ ID NO: 1607466 - RNA, 19 nt, Artificial Sequence
  Description of Artificial Sequence: Synthetic oligonucleotide
ggcuccuagugucuuucuc

SEQ ID NO: 1607467 - RNA, 19 nt, Artificial Sequence
  Description of Artificial Sequence: Synthetic oligonucleotide
gggauagcuaguggcccag

SEQ ID NO: 1607468 - RNA, 19 nt, Artificial Sequence
  Description of Artificial Sequence: Synthetic oligonucleotide
gaccaugauuggguucgga

SEQ ID NO: 1607469 - RNA, 19 nt, Artificial Sequence
  Description of Artificial Sequence: Synthetic oligonucleotide
gcccacuagguauuccauc

SEQ ID NO: 1607470 - RNA, 19 nt, Artificial Sequence
  Description of Artificial Sequence: Synthetic oligonucleotide
ugcaccugguuugcccauc

SEQ ID NO: 1607471 - RNA, 19 nt, Artificial Sequence
  Description of Artificial Sequence: Synthetic oligonucleotide
gcucugucaacagaagugu

SEQ ID NO: 1607472 - RNA, 19 nt, Artificial Sequence
  Description of Artificial Sequence: Synthetic oligonucleotide
aggcggugaagagguggag

SEQ ID NO: 1607473 - RNA, 19 nt, Artificial Sequence
  Description of Artificial Sequence: Synthetic oligonucleotide
cuauugggugguaguacau

SEQ ID NO: 1607474 - RNA, 19 nt, Artificial Sequence
  Description of Artificial Sequence: Synthetic oligonucleotide
cugggcuaggcacuacgua

SEQ ID NO: 1607475 - RNA, 19 nt, Artificial Sequence
  Description of Artificial Sequence: Synthetic oligonucleotide
ccuagagaccaugcuuggc

SEQ ID NO: 1607476 - RNA, 19 nt, Artificial Sequence
  Description of Artificial Sequence: Synthetic oligonucleotide
ggauagcuaguggcccagg

SEQ ID NO: 1607477 - RNA, 19 nt, Artificial Sequence
  Description of Artificial Sequence: Synthetic oligonucleotide
cuccuauugggugguagua

SEQ ID NO: 1607478 - RNA, 19 nt, Artificial Sequence
  Description of Artificial Sequence: Synthetic oligonucleotide
ccgggauagcuaguggccc

SEQ ID NO: 1607479 - RNA, 19 nt, Artificial Sequence
  Description of Artificial Sequence: Synthetic oligonucleotide
guugcuccuauuggguggu

SEQ ID NO: 1607480 - RNA, 19 nt, Artificial Sequence
  Description of Artificial Sequence: Synthetic oligonucleotide
cucucgccaauacacccgu

SEQ ID NO: 1607481 - RNA, 19 nt, Artificial Sequence
  Description of Artificial Sequence: Synthetic oligonucleotide
cucucaagcucaccuuagu

SEQ ID NO: 1607482 - RNA, 19 nt, Artificial Sequence
  Description of Artificial Sequence: Synthetic oligonucleotide
ccaguugccccggagccac

SEQ ID NO: 1607483 - RNA, 19 nt, Artificial Sequence
  Description of Artificial Sequence: Synthetic oligonucleotide
ccaggugccuacuacggua

SEQ ID NO: 1607484 - RNA, 19 nt, Artificial Sequence
  Description of Artificial Sequence: Synthetic oligonucleotide
gcuccuauugggugguagu

SEQ ID NO: 1607485 - RNA, 19 nt, Artificial Sequence
  Description of Artificial Sequence: Synthetic oligonucleotide
accuucccuuaggguugcc

SEQ ID NO: 1607486 - RNA, 19 nt, Artificial Sequence
  Description of Artificial Sequence: Synthetic oligonucleotide
ggguaauuuugacggugcu

SEQ ID NO: 1607487 - RNA, 19 nt, Artificial Sequence
  Description of Artificial Sequence: Synthetic oligonucleotide
ggcacacagcugaaucuuc

SEQ ID NO: 1607488 - RNA, 19 nt, Artificial Sequence
  Description of Artificial Sequence: Synthetic oligonucleotide
cuauauuggugagcacagu

SEQ ID NO: 1607489 - RNA, 19 nt, Artificial Sequence
  Description of Artificial Sequence: Synthetic oligonucleotide
caucugcuaaagccagagu

SEQ ID NO: 1607490 - RNA, 19 nt, Artificial Sequence
  Description of Artificial Sequence: Synthetic oligonucleotide
gcacuacguaaauaucuau

SEQ ID NO: 1607491 - RNA, 19 nt, Artificial Sequence
  Description of Artificial Sequence: Synthetic oligonucleotide
gggucuucauccaccugga

SEQ ID NO: 1607492 - RNA, 19 nt, Artificial Sequence
  Description of Artificial Sequence: Synthetic oligonucleotide
cauccugagaauggcucgu

SEQ ID NO: 1607493 - RNA, 19 nt, Artificial Sequence
  Description of Artificial Sequence: Synthetic oligonucleotide
cucugcccacuagguauuc

SEQ ID NO: 1607494 - RNA, 19 nt, Artificial Sequence
  Description of Artificial Sequence: Synthetic oligonucleotide
gcuaguggcccaggguuuc

SEQ ID NO: 1607495 - RNA, 19 nt, Artificial Sequence
  Description of Artificial Sequence: Synthetic oligonucleotide
guaggagacuaaagagaau

SEQ ID NO: 1607496 - RNA, 19 nt, Artificial Sequence
  Description of Artificial Sequence: Synthetic oligonucleotide
cacuuagcccaggauauuu

SEQ ID NO: 1607497 - RNA, 19 nt, Artificial Sequence
  Description of Artificial Sequence: Synthetic oligonucleotide
auccaguguaggagacuaa

SEQ ID NO: 1607498 - RNA, 19 nt, Artificial Sequence
  Description of Artificial Sequence: Synthetic oligonucleotide
ggcaggaguguaauuacuu

SEQ ID NO: 1607499 - RNA, 19 nt, Artificial Sequence
  Description of Artificial Sequence: Synthetic oligonucleotide
acccgugcuuguguuucaa

SEQ ID NO: 1607500 - RNA, 19 nt, Artificial Sequence
  Description of Artificial Sequence: Synthetic oligonucleotide
gagcacaguagaaggcauu

SEQ ID NO: 1607501 - RNA, 19 nt, Artificial Sequence
  Description of Artificial Sequence: Synthetic oligonucleotide
gcuaggcacuacguaaaua

SEQ ID NO: 1607502 - RNA, 19 nt, Artificial Sequence
  Description of Artificial Sequence: Synthetic oligonucleotide
cacccgugcuuguguuuca

SEQ ID NO: 1607503 - RNA, 19 nt, Artificial Sequence
  Description of Artificial Sequence: Synthetic oligonucleotide
ggccacacuaauaggcacu

SEQ ID NO: 1607504 - RNA, 19 nt, Artificial Sequence
  Description of Artificial Sequence: Synthetic oligonucleotide
cuggauccuaaaggacgaa

SEQ ID NO: 1607505 - RNA, 19 nt, Artificial Sequence
  Description of Artificial Sequence: Synthetic oligonucleotide
cugguggaaggcacacgau

SEQ ID NO: 1607506 - RNA, 19 nt, Artificial Sequence
  Description of Artificial Sequence: Synthetic oligonucleotide
cugggacaacagugcaccu

SEQ ID NO: 1607507 - RNA, 19 nt, Artificial Sequence
  Description of Artificial Sequence: Synthetic oligonucleotide
gcucuucgacuucuugggu

SEQ ID NO: 1607508 - RNA, 19 nt, Artificial Sequence
  Description of Artificial Sequence: Synthetic oligonucleotide
cggugcuauauuggugagc

SEQ ID NO: 1607509 - RNA, 19 nt, Artificial Sequence
  Description of Artificial Sequence: Synthetic oligonucleotide
cagggaaccuccagaccuu

SEQ ID NO: 1607510 - RNA, 19 nt, Artificial Sequence
  Description of Artificial Sequence: Synthetic oligonucleotide
ggcuaggcacuacguaaau

SEQ ID NO: 1607511 - RNA, 19 nt, Artificial Sequence
  Description of Artificial Sequence: Synthetic oligonucleotide
cucuaguaccgaggccuua

SEQ ID NO: 1607512 - RNA, 19 nt, Artificial Sequence
  Description of Artificial Sequence: Synthetic oligonucleotide
uugcuccuauuggguggua

SEQ ID NO: 1607513 - RNA, 19 nt, Artificial Sequence
  Description of Artificial Sequence: Synthetic oligonucleotide
gggcaggaguguaauuacu

SEQ ID NO: 1607514 - RNA, 19 nt, Artificial Sequence
  Description of Artificial Sequence: Synthetic oligonucleotide
cgggauagcuaguggccca

SEQ ID NO: 1607515 - RNA, 19 nt, Artificial Sequence
  Description of Artificial Sequence: Synthetic oligonucleotide
cuucgacuucuuggguacu

SEQ ID NO: 1607516 - RNA, 19 nt, Artificial Sequence
  Description of Artificial Sequence: Synthetic oligonucleotide
gccacacuaauaggcacuu

SEQ ID NO: 1607517 - RNA, 19 nt, Artificial Sequence
  Description of Artificial Sequence: Synthetic oligonucleotide
guacuccgggauagcuagu

SEQ ID NO: 1607518 - RNA, 19 nt, Artificial Sequence
  Description of Artificial Sequence: Synthetic oligonucleotide
gccuacuacgguacagcau

SEQ ID NO: 1607519 - RNA, 19 nt, Artificial Sequence
  Description of Artificial Sequence: Synthetic oligonucleotide
gcauugcagcaguggacuu

SEQ ID NO: 1607520 - RNA, 19 nt, Artificial Sequence
  Description of Artificial Sequence: Synthetic oligonucleotide
gggcuccuagugucuuucu

SEQ ID NO: 1607521 - RNA, 19 nt, Artificial Sequence
  Description of Artificial Sequence: Synthetic oligonucleotide
ccaauacacccgugcuugu

SEQ ID NO: 1607522 - RNA, 19 nt, Artificial Sequence
  Description of Artificial Sequence: Synthetic oligonucleotide
ccaccaguccgagccuaga

SEQ ID NO: 1607523 - RNA, 19 nt, Artificial Sequence
  Description of Artificial Sequence: Synthetic oligonucleotide
ggccuuaggccaggcugcu

SEQ ID NO: 1607524 - RNA, 19 nt, Artificial Sequence
  Description of Artificial Sequence: Synthetic oligonucleotide
gcucuaguaccgaggccuu

SEQ ID NO: 1607525 - RNA, 19 nt, Artificial Sequence
  Description of Artificial Sequence: Synthetic oligonucleotide
caguugccccggagccacu

SEQ ID NO: 1607526 - RNA, 19 nt, Artificial Sequence
  Description of Artificial Sequence: Synthetic oligonucleotide
cccuuaggguugccugacu

SEQ ID NO: 1607527 - RNA, 19 nt, Artificial Sequence
  Description of Artificial Sequence: Synthetic oligonucleotide
ccacacuaauaggcacuuu

SEQ ID NO: 1607528 - RNA, 19 nt, Artificial Sequence
  Description of Artificial Sequence: Synthetic oligonucleotide
uuaaguuuuacccagaaag

SEQ ID NO: 1607529 - RNA, 19 nt, Artificial Sequence
  Description of Artificial Sequence: Synthetic oligonucleotide
uuaaguuaaauauaaaaca

SEQ ID NO: 1607530 - RNA, 19 nt, Artificial Sequence
  Description of Artificial Sequence: Synthetic oligonucleotide
auaacuacugccuuaaaac

SEQ ID NO: 1607531 - RNA, 19 nt, Artificial Sequence
  Description of Artificial Sequence: Synthetic oligonucleotide
aauacuaugaaugaaguga

SEQ ID NO: 1607532 - RNA, 19 nt, Artificial Sequence
  Description of Artificial Sequence: Synthetic oligonucleotide
uaaaauaacaaacaugguc

SEQ ID NO: 1607533 - RNA, 19 nt, Artificial Sequence
  Description of Artificial Sequence: Synthetic oligonucleotide
uccuugguaaaucagaagg

SEQ ID NO: 1607534 - RNA, 19 nt, Artificial Sequence
  Description of Artificial Sequence: Synthetic oligonucleotide
ugguauacagaucauagag

SEQ ID NO: 1607535 - RNA, 19 nt, Artificial Sequence
  Description of Artificial Sequence: Synthetic oligonucleotide
agagguauaaucugaauuc

SEQ ID NO: 1607536 - RNA, 19 nt, Artificial Sequence
  Description of Artificial Sequence: Synthetic oligonucleotide
  modified_base (7)..(7): a, c, u, g, unknown or other
uaaaagnuuaacuaccacu

SEQ ID NO: 1607537 - RNA, 19 nt, Artificial Sequence
  Description of Artificial Sequence: Synthetic oligonucleotide
augaaaauggauuugauaa

SEQ ID NO: 1607538 - RNA, 19 nt, Artificial Sequence
  Description of Artificial Sequence: Synthetic oligonucleotide
aaauuuggaauauauacua

SEQ ID NO: 1607539 - RNA, 19 nt, Artificial Sequence
  Description of Artificial Sequence: Synthetic oligonucleotide
  modified_base (4)..(4): a, c, u, g, unknown or other
aagnuuaacuaccacuucu

SEQ ID NO: 1607540 - RNA, 19 nt, Artificial Sequence
  Description of Artificial Sequence: Synthetic oligonucleotide
aaaccuauuuaccaaauaa

SEQ ID NO: 1607541 - RNA, 19 nt, Artificial Sequence
  Description of Artificial Sequence: Synthetic oligonucleotide
aaguaacagagguauaauc

SEQ ID NO: 1607542 - RNA, 19 nt, Artificial Sequence
  Description of Artificial Sequence: Synthetic oligonucleotide
auaaucugaauucacacca

SEQ ID NO: 1607543 - RNA, 19 nt, Artificial Sequence
  Description of Artificial Sequence: Synthetic oligonucleotide
  modified_base (11)..(11): a, c, u, g, unknown or other
cuuguaaaagnuuaacuac

SEQ ID NO: 1607544 - RNA, 19 nt, Artificial Sequence
  Description of Artificial Sequence: Synthetic oligonucleotide
uauacuacuuauuaccuga

SEQ ID NO: 1607545 - RNA, 19 nt, Artificial Sequence
  Description of Artificial Sequence: Synthetic oligonucleotide
uucagaucugaaaagcagg

SEQ ID NO: 1607546 - RNA, 19 nt, Artificial Sequence
  Description of Artificial Sequence: Synthetic oligonucleotide
aacaauacuaugaaugaag

SEQ ID NO: 1607547 - RNA, 19 nt, Artificial Sequence
  Description of Artificial Sequence: Synthetic oligonucleotide
uacaacuugacacuguaca

SEQ ID NO: 1607548 - RNA, 19 nt, Artificial Sequence
  Description of Artificial Sequence: Synthetic oligonucleotide
aggaucauagcacuucugc

SEQ ID NO: 1607549 - RNA, 19 nt, Artificial Sequence
  Description of Artificial Sequence: Synthetic oligonucleotide
agcagauauauucugaucu

SEQ ID NO: 1607550 - RNA, 19 nt, Artificial Sequence
  Description of Artificial Sequence: Synthetic oligonucleotide
aauacuuggccccaguggu

SEQ ID NO: 1607551 - RNA, 19 nt, Artificial Sequence
  Description of Artificial Sequence: Synthetic oligonucleotide
uguaccucaggaaaagucc

SEQ ID NO: 1607552 - RNA, 19 nt, Artificial Sequence
  Description of Artificial Sequence: Synthetic oligonucleotide
  modified_base (5)..(5): a, c, u, g, unknown or other
aaagnuuaacuaccacuuc

SEQ ID NO: 1607553 - RNA, 19 nt, Artificial Sequence
  Description of Artificial Sequence: Synthetic oligonucleotide
  modified_base (9)..(9): a, c, u, g, unknown or other
uguaaaagnuuaacuacca

SEQ ID NO: 1607554 - RNA, 19 nt, Artificial Sequence
  Description of Artificial Sequence: Synthetic oligonucleotide
uuugaaucauaauagcgcu

SEQ ID NO: 1607555 - RNA, 19 nt, Artificial Sequence
  Description of Artificial Sequence: Synthetic oligonucleotide
aguaccuaaguuaaacucc

SEQ ID NO: 1607556 - RNA, 19 nt, Artificial Sequence
  Description of Artificial Sequence: Synthetic oligonucleotide
uuaguuuaguucauaauau

SEQ ID NO: 1607557 - RNA, 19 nt, Artificial Sequence
  Description of Artificial Sequence: Synthetic oligonucleotide
uuaucaguaccuaaguuaa

SEQ ID NO: 1607558 - RNA, 19 nt, Artificial Sequence
  Description of Artificial Sequence: Synthetic oligonucleotide
uaaguuuuacccagaaagc

SEQ ID NO: 1607559 - RNA, 19 nt, Artificial Sequence
  Description of Artificial Sequence: Synthetic oligonucleotide
uacauuaagagaaaacaau

SEQ ID NO: 1607560 - RNA, 19 nt, Artificial Sequence
  Description of Artificial Sequence: Synthetic oligonucleotide
ugagaguauuaaaauaaca

SEQ ID NO: 1607561 - RNA, 19 nt, Artificial Sequence
  Description of Artificial Sequence: Synthetic oligonucleotide
agacaaaaguuagucaugc

SEQ ID NO: 1607562 - RNA, 19 nt, Artificial Sequence
  Description of Artificial Sequence: Synthetic oligonucleotide
  modified_base (13)..(13): a, c, u, g, unknown or other
uucuuguaaaagnuuaacu

SEQ ID NO: 1607563 - RNA, 19 nt, Artificial Sequence
  Description of Artificial Sequence: Synthetic oligonucleotide
uggacaauggacaaugaaa

SEQ ID NO: 1607564 - RNA, 19 nt, Artificial Sequence
  Description of Artificial Sequence: Synthetic oligonucleotide
  modified_base (6)..(6): a, c, u, g, unknown or other
aaaagnuuaacuaccacuu

SEQ ID NO: 1607565 - RNA, 19 nt, Artificial Sequence
  Description of Artificial Sequence: Synthetic oligonucleotide
aaucauaauagcgcuguag

SEQ ID NO: 1607566 - RNA, 19 nt, Artificial Sequence
  Description of Artificial Sequence: Synthetic oligonucleotide
uuguacaguagcuaguucu

SEQ ID NO: 1607567 - RNA, 19 nt, Artificial Sequence
  Description of Artificial Sequence: Synthetic oligonucleotide
aaacaugguccuuuaaagu

SEQ ID NO: 1607568 - RNA, 19 nt, Artificial Sequence
  Description of Artificial Sequence: Synthetic oligonucleotide
agucaauaguaacuuguac

SEQ ID NO: 1607569 - RNA, 19 nt, Artificial Sequence
  Description of Artificial Sequence: Synthetic oligonucleotide
uaaaguauuccaccuuaag

SEQ ID NO: 1607570 - RNA, 19 nt, Artificial Sequence
  Description of Artificial Sequence: Synthetic oligonucleotide
aacaugguccuuuaaagua

SEQ ID NO: 1607571 - RNA, 19 nt, Artificial Sequence
  Description of Artificial Sequence: Synthetic oligonucleotide
ugcguaucaauacuuggcc

SEQ ID NO: 1607572 - RNA, 19 nt, Artificial Sequence
  Description of Artificial Sequence: Synthetic oligonucleotide
gauaaguuuagacaagaaa

SEQ ID NO: 1607573 - RNA, 19 nt, Artificial Sequence
  Description of Artificial Sequence: Synthetic oligonucleotide
ugggcuaaacagaaaauga

SEQ ID NO: 1607574 - RNA, 19 nt, Artificial Sequence
  Description of Artificial Sequence: Synthetic oligonucleotide
cuaaagacaaaaguuaguc

SEQ ID NO: 1607575 - RNA, 19 nt, Artificial Sequence
  Description of Artificial Sequence: Synthetic oligonucleotide
aaccuauuuaccaaauaag

SEQ ID NO: 1607576 - RNA, 19 nt, Artificial Sequence
  Description of Artificial Sequence: Synthetic oligonucleotide
aauuaggccaaaccuacau

SEQ ID NO: 1607577 - RNA, 19 nt, Artificial Sequence
  Description of Artificial Sequence: Synthetic oligonucleotide
guauaaucugaauucacac

SEQ ID NO: 1607578 - RNA, 19 nt, Artificial Sequence
  Description of Artificial Sequence: Synthetic oligonucleotide
uccucuuaaaauagaagac

SEQ ID NO: 1607579 - RNA, 19 nt, Artificial Sequence
  Description of Artificial Sequence: Synthetic oligonucleotide
aaguggcaacaguacaagc

SEQ ID NO: 1607580 - RNA, 19 nt, Artificial Sequence
  Description of Artificial Sequence: Synthetic oligonucleotide
caaauuaggccaaaccuac

SEQ ID NO: 1607581 - RNA, 19 nt, Artificial Sequence
  Description of Artificial Sequence: Synthetic oligonucleotide
aucaguaccuaaguuaaac

SEQ ID NO: 1607582 - RNA, 19 nt, Artificial Sequence
  Description of Artificial Sequence: Synthetic oligonucleotide
acuacuuauuaccugaaau

SEQ ID NO: 1607583 - RNA, 19 nt, Artificial Sequence
  Description of Artificial Sequence: Synthetic oligonucleotide
ucuacuuaaaacaggucau

SEQ ID NO: 1607584 - RNA, 19 nt, Artificial Sequence
  Description of Artificial Sequence: Synthetic oligonucleotide
gucuacuuaaaacagguca

SEQ ID NO: 1607585 - RNA, 19 nt, Artificial Sequence
  Description of Artificial Sequence: Synthetic oligonucleotide
uucuugcuaauuaauuggc

SEQ ID NO: 1607586 - RNA, 19 nt, Artificial Sequence
  Description of Artificial Sequence: Synthetic oligonucleotide
auuaauuggcuuaaaaccu

SEQ ID NO: 1607587 - RNA, 19 nt, Artificial Sequence
  Description of Artificial Sequence: Synthetic oligonucleotide
uaguucuccaaauaggaaa

SEQ ID NO: 1607588 - RNA, 19 nt, Artificial Sequence
  Description of Artificial Sequence: Synthetic oligonucleotide
aggcuagcuauccagaaag

SEQ ID NO: 1607589 - RNA, 19 nt, Artificial Sequence
  Description of Artificial Sequence: Synthetic oligonucleotide
ucuaaagacaaaaguuagu

SEQ ID NO: 1607590 - RNA, 19 nt, Artificial Sequence
  Description of Artificial Sequence: Synthetic oligonucleotide
caacaguacaagcauagag

SEQ ID NO: 1607591 - RNA, 19 nt, Artificial Sequence
  Description of Artificial Sequence: Synthetic oligonucleotide
cuugaauaccuccugugcc

SEQ ID NO: 1607592 - RNA, 19 nt, Artificial Sequence
  Description of Artificial Sequence: Synthetic oligonucleotide
uguuuaucaguaccuaagu

SEQ ID NO: 1607593 - RNA, 19 nt, Artificial Sequence
  Description of Artificial Sequence: Synthetic oligonucleotide
caugagaguauuaaaauaa

SEQ ID NO: 1607594 - RNA, 19 nt, Artificial Sequence
  Description of Artificial Sequence: Synthetic oligonucleotide
  modified_base (14)..(14): a, c, u, g, unknown or other
uuucuuguaaaagnuuaac

SEQ ID NO: 1607595 - RNA, 19 nt, Artificial Sequence
  Description of Artificial Sequence: Synthetic oligonucleotide
cuguuuaucaguaccuaag

SEQ ID NO: 1607596 - RNA, 19 nt, Artificial Sequence
  Description of Artificial Sequence: Synthetic oligonucleotide
uaaaguggcaacaguacaa

SEQ ID NO: 1607597 - RNA, 19 nt, Artificial Sequence
  Description of Artificial Sequence: Synthetic oligonucleotide
aguaacagagguauaaucu

SEQ ID NO: 1607598 - RNA, 19 nt, Artificial Sequence
  Description of Artificial Sequence: Synthetic oligonucleotide
ugaaucauaauagcgcugu

SEQ ID NO: 1607599 - RNA, 19 nt, Artificial Sequence
  Description of Artificial Sequence: Synthetic oligonucleotide
agguaguuucauuaauuuc

SEQ ID NO: 1607600 - RNA, 19 nt, Artificial Sequence
  Description of Artificial Sequence: Synthetic oligonucleotide
acuaugaaugaagugaaca

SEQ ID NO: 1607601 - RNA, 19 nt, Artificial Sequence
  Description of Artificial Sequence: Synthetic oligonucleotide
aaagccucuaaagacaaaa

SEQ ID NO: 1607602 - RNA, 19 nt, Artificial Sequence
  Description of Artificial Sequence: Synthetic oligonucleotide
cauaauauuuucccuggac

SEQ ID NO: 1607603 - RNA, 19 nt, Artificial Sequence
  Description of Artificial Sequence: Synthetic oligonucleotide
aacuguuggcuuuaaguaa

SEQ ID NO: 1607604 - RNA, 19 nt, Artificial Sequence
  Description of Artificial Sequence: Synthetic oligonucleotide
augaaagaaucuucagauc

SEQ ID NO: 1607605 - RNA, 19 nt, Artificial Sequence
  Description of Artificial Sequence: Synthetic oligonucleotide
agaucugaaaagcagguuu

SEQ ID NO: 1607606 - RNA, 19 nt, Artificial Sequence
  Description of Artificial Sequence: Synthetic oligonucleotide
gagauaggaaaguuucccc

SEQ ID NO: 1607607 - RNA, 19 nt, Artificial Sequence
  Description of Artificial Sequence: Synthetic oligonucleotide
acagcuauuggagagugag

SEQ ID NO: 1607608 - RNA, 19 nt, Artificial Sequence
  Description of Artificial Sequence: Synthetic oligonucleotide
caugcguaucaauacuugg

SEQ ID NO: 1607609 - RNA, 19 nt, Artificial Sequence
  Description of Artificial Sequence: Synthetic oligonucleotide
cuguugccaaacaugagag

SEQ ID NO: 1607610 - RNA, 19 nt, Artificial Sequence
  Description of Artificial Sequence: Synthetic oligonucleotide
auauacuacuuauuaccug

SEQ ID NO: 1607611 - RNA, 19 nt, Artificial Sequence
  Description of Artificial Sequence: Synthetic oligonucleotide
aaccuguucuggcucuccc

SEQ ID NO: 1607612 - RNA, 19 nt, Artificial Sequence
  Description of Artificial Sequence: Synthetic oligonucleotide
agauaggaaaguuucccca

SEQ ID NO: 1607613 - RNA, 19 nt, Artificial Sequence
  Description of Artificial Sequence: Synthetic oligonucleotide
acaaacaugguccuuuaaa

SEQ ID NO: 1607614 - RNA, 19 nt, Artificial Sequence
  Description of Artificial Sequence: Synthetic oligonucleotide
ucaauauaguucuccaaau

SEQ ID NO: 1607615 - RNA, 19 nt, Artificial Sequence
  Description of Artificial Sequence: Synthetic oligonucleotide
caguacuuccuaaaguggc

SEQ ID NO: 1607616 - RNA, 19 nt, Artificial Sequence
  Description of Artificial Sequence: Synthetic oligonucleotide
uugaauaccuccugugcca

SEQ ID NO: 1607617 - RNA, 19 nt, Artificial Sequence
  Description of Artificial Sequence: Synthetic oligonucleotide
uugagauaggaaaguuucc

SEQ ID NO: 1607618 - RNA, 19 nt, Artificial Sequence
  Description of Artificial Sequence: Synthetic oligonucleotide
uccuaaaguggcaacagua

SEQ ID NO: 1607619 - RNA, 19 nt, Artificial Sequence
  Description of Artificial Sequence: Synthetic oligonucleotide
auagaagacuacugcaugu

SEQ ID NO: 1607620 - RNA, 19 nt, Artificial Sequence
  Description of Artificial Sequence: Synthetic oligonucleotide
acuacugcauguuuagcca

SEQ ID NO: 1607621 - RNA, 19 nt, Artificial Sequence
  Description of Artificial Sequence: Synthetic oligonucleotide
augcguaucaauacuuggc

SEQ ID NO: 1607622 - RNA, 19 nt, Artificial Sequence
  Description of Artificial Sequence: Synthetic oligonucleotide
gguucugguauacagauca

SEQ ID NO: 1607623 - RNA, 19 nt, Artificial Sequence
  Description of Artificial Sequence: Synthetic oligonucleotide
uuaauuggcuuaaaaccua

SEQ ID NO: 1607624 - RNA, 19 nt, Artificial Sequence
  Description of Artificial Sequence: Synthetic oligonucleotide
ucaguaccuaaguuaaacu

SEQ ID NO: 1607625 - RNA, 19 nt, Artificial Sequence
  Description of Artificial Sequence: Synthetic oligonucleotide
uuauuaccugaaauucuca

SEQ ID NO: 1607626 - RNA, 19 nt, Artificial Sequence
  Description of Artificial Sequence: Synthetic oligonucleotide
ccuaaugucuacuuaaaac

SEQ ID NO: 1607627 - RNA, 19 nt, Artificial Sequence
  Description of Artificial Sequence: Synthetic oligonucleotide
aaaguuuccccaugcguau

SEQ ID NO: 1607628 - RNA, 19 nt, Artificial Sequence
  Description of Artificial Sequence: Synthetic oligonucleotide
uauuaccugaaauucucaa

SEQ ID NO: 1607629 - RNA, 19 nt, Artificial Sequence
  Description of Artificial Sequence: Synthetic oligonucleotide
ugagguucucauaauuuaa

SEQ ID NO: 1607630 - RNA, 19 nt, Artificial Sequence
  Description of Artificial Sequence: Synthetic oligonucleotide
uggcuuuaaguaacagagg

SEQ ID NO: 1607631 - RNA, 19 nt, Artificial Sequence
  Description of Artificial Sequence: Synthetic oligonucleotide
uagcuauccagaaagccuc

SEQ ID NO: 1607632 - RNA, 19 nt, Artificial Sequence
  Description of Artificial Sequence: Synthetic oligonucleotide
caguaccuaaguuaaacuc

SEQ ID NO: 1607633 - RNA, 19 nt, Artificial Sequence
  Description of Artificial Sequence: Synthetic oligonucleotide
augagaguauuaaaauaac

SEQ ID NO: 1607634 - RNA, 19 nt, Artificial Sequence
  Description of Artificial Sequence: Synthetic oligonucleotide
ggauuugauaaguuuagac

SEQ ID NO: 1607635 - RNA, 19 nt, Artificial Sequence
  Description of Artificial Sequence: Synthetic oligonucleotide
uuaagggacugacugcacu

SEQ ID NO: 1607636 - RNA, 19 nt, Artificial Sequence
  Description of Artificial Sequence: Synthetic oligonucleotide
agccucuaaagacaaaagu

SEQ ID NO: 1607637 - RNA, 19 nt, Artificial Sequence
  Description of Artificial Sequence: Synthetic oligonucleotide
uguuuagccaucccauuuc

SEQ ID NO: 1607638 - RNA, 19 nt, Artificial Sequence
  Description of Artificial Sequence: Synthetic oligonucleotide
uugaaucauaauagcgcug

SEQ ID NO: 1607639 - RNA, 19 nt, Artificial Sequence
  Description of Artificial Sequence: Synthetic oligonucleotide
uauccagaaagccucuaaa

SEQ ID NO: 1607640 - RNA, 19 nt, Artificial Sequence
  Description of Artificial Sequence: Synthetic oligonucleotide
uaagggacugacugcacug

SEQ ID NO: 1607641 - RNA, 19 nt, Artificial Sequence
  Description of Artificial Sequence: Synthetic oligonucleotide
accuauuuaccaaauaaga

SEQ ID NO: 1607642 - RNA, 19 nt, Artificial Sequence
  Description of Artificial Sequence: Synthetic oligonucleotide
cccauuucauucaagauug

SEQ ID NO: 1607643 - RNA, 19 nt, Artificial Sequence
  Description of Artificial Sequence: Synthetic oligonucleotide
uaaaaccuauuuaccaaau

SEQ ID NO: 1607644 - RNA, 19 nt, Artificial Sequence
  Description of Artificial Sequence: Synthetic oligonucleotide
agaaauggacaauggacaa

SEQ ID NO: 1607645 - RNA, 19 nt, Artificial Sequence
  Description of Artificial Sequence: Synthetic oligonucleotide
agcuauuggagagugaggu

SEQ ID NO: 1607646 - RNA, 19 nt, Artificial Sequence
  Description of Artificial Sequence: Synthetic oligonucleotide
uugcuaauuaauuggcuua

SEQ ID NO: 1607647 - RNA, 19 nt, Artificial Sequence
  Description of Artificial Sequence: Synthetic oligonucleotide
uaaguugguacguugucua

SEQ ID NO: 1607648 - RNA, 19 nt, Artificial Sequence
  Description of Artificial Sequence: Synthetic oligonucleotide
auuaccugaaauucucaau

SEQ ID NO: 1607649 - RNA, 19 nt, Artificial Sequence
  Description of Artificial Sequence: Synthetic oligonucleotide
ucuguuuaucaguaccuaa

SEQ ID NO: 1607650 - RNA, 19 nt, Artificial Sequence
  Description of Artificial Sequence: Synthetic oligonucleotide
ugauaaguuuagacaagaa

SEQ ID NO: 1607651 - RNA, 19 nt, Artificial Sequence
  Description of Artificial Sequence: Synthetic oligonucleotide
aucuguuccuaaugucuac

SEQ ID NO: 1607652 - RNA, 19 nt, Artificial Sequence
  Description of Artificial Sequence: Synthetic oligonucleotide
accuacauuaagagaaaac

SEQ ID NO: 1607653 - RNA, 19 nt, Artificial Sequence
  Description of Artificial Sequence: Synthetic oligonucleotide
aguauuccaccuuaaguua

SEQ ID NO: 1607654 - RNA, 19 nt, Artificial Sequence
  Description of Artificial Sequence: Synthetic oligonucleotide
  modified_base (8)..(8): a, c, u, g, unknown or other
guaaaagnuuaacuaccac

SEQ ID NO: 1607655 - RNA, 19 nt, Artificial Sequence
  Description of Artificial Sequence: Synthetic oligonucleotide
acaccaguacuuccuaaag

SEQ ID NO: 1607656 - RNA, 19 nt, Artificial Sequence
  Description of Artificial Sequence: Synthetic oligonucleotide
uggacaaugaaagaaucuu

SEQ ID NO: 1607657 - RNA, 19 nt, Artificial Sequence
  Description of Artificial Sequence: Synthetic oligonucleotide
uccaaucuccacuucaaua

SEQ ID NO: 1607658 - RNA, 19 nt, Artificial Sequence
  Description of Artificial Sequence: Synthetic oligonucleotide
uugguacguugucuaaucc

SEQ ID NO: 1607659 - RNA, 19 nt, Artificial Sequence
  Description of Artificial Sequence: Synthetic oligonucleotide
gcuuaaaaccuauuuacca

SEQ ID NO: 1607660 - RNA, 19 nt, Artificial Sequence
  Description of Artificial Sequence: Synthetic oligonucleotide
ugguaaguugguacguugu

SEQ ID NO: 1607661 - RNA, 19 nt, Artificial Sequence
  Description of Artificial Sequence: Synthetic oligonucleotide
uauccaaucuccacuucaa

SEQ ID NO: 1607662 - RNA, 19 nt, Artificial Sequence
  Description of Artificial Sequence: Synthetic oligonucleotide
uuagccaucccauuucauu

SEQ ID NO: 1607663 - RNA, 19 nt, Artificial Sequence
  Description of Artificial Sequence: Synthetic oligonucleotide
auuuucccuggacuagcac

SEQ ID NO: 1607664 - RNA, 19 nt, Artificial Sequence
  Description of Artificial Sequence: Synthetic oligonucleotide
acaauacuaugaaugaagu

SEQ ID NO: 1607665 - RNA, 19 nt, Artificial Sequence
  Description of Artificial Sequence: Synthetic oligonucleotide
uggacuagacagcuuagua

SEQ ID NO: 1607666 - RNA, 19 nt, Artificial Sequence
  Description of Artificial Sequence: Synthetic oligonucleotide
uauuggagagugagguucu

SEQ ID NO: 1607667 - RNA, 19 nt, Artificial Sequence
  Description of Artificial Sequence: Synthetic oligonucleotide
ugguacguugucuaauccu

SEQ ID NO: 1607668 - RNA, 19 nt, Artificial Sequence
  Description of Artificial Sequence: Synthetic oligonucleotide
uuuagacaagaaagucugu

SEQ ID NO: 1607669 - RNA, 19 nt, Artificial Sequence
  Description of Artificial Sequence: Synthetic oligonucleotide
cacuucaauauaguucucc

SEQ ID NO: 1607670 - RNA, 19 nt, Artificial Sequence
  Description of Artificial Sequence: Synthetic oligonucleotide
aguggcaacaguacaagca

SEQ ID NO: 1607671 - RNA, 19 nt, Artificial Sequence
  Description of Artificial Sequence: Synthetic oligonucleotide
auaggaaaguuuccccaug

SEQ ID NO: 1607672 - RNA, 19 nt, Artificial Sequence
  Description of Artificial Sequence: Synthetic oligonucleotide
uaauuggcuuaaaaccuau

SEQ ID NO: 1607673 - RNA, 19 nt, Artificial Sequence
  Description of Artificial Sequence: Synthetic oligonucleotide
uguaagcuugccuccaaau

SEQ ID NO: 1607674 - RNA, 19 nt, Artificial Sequence
  Description of Artificial Sequence: Synthetic oligonucleotide
uagucaugcucacugcccu

SEQ ID NO: 1607675 - RNA, 19 nt, Artificial Sequence
  Description of Artificial Sequence: Synthetic oligonucleotide
cuaccacuucuugagauag

SEQ ID NO: 1607676 - RNA, 19 nt, Artificial Sequence
  Description of Artificial Sequence: Synthetic oligonucleotide
caccuuaaguuaaauauaa

SEQ ID NO: 1607677 - RNA, 19 nt, Artificial Sequence
  Description of Artificial Sequence: Synthetic oligonucleotide
cuugcuuaccuuaguaaca

SEQ ID NO: 1607678 - RNA, 19 nt, Artificial Sequence
  Description of Artificial Sequence: Synthetic oligonucleotide
gccaaaccuacauuaagag

SEQ ID NO: 1607679 - RNA, 19 nt, Artificial Sequence
  Description of Artificial Sequence: Synthetic oligonucleotide
gacuagacagcuuaguaau

SEQ ID NO: 1607680 - RNA, 19 nt, Artificial Sequence
  Description of Artificial Sequence: Synthetic oligonucleotide
aguauaacuacugccuuaa

SEQ ID NO: 1607681 - RNA, 19 nt, Artificial Sequence
  Description of Artificial Sequence: Synthetic oligonucleotide
uugcuuaccuuaguaacac

SEQ ID NO: 1607682 - RNA, 19 nt, Artificial Sequence
  Description of Artificial Sequence: Synthetic oligonucleotide
uguuccuaaugucuacuua

SEQ ID NO: 1607683 - RNA, 19 nt, Artificial Sequence
  Description of Artificial Sequence: Synthetic oligonucleotide
cugccuuaaaacuguuggc

SEQ ID NO: 1607684 - RNA, 19 nt, Artificial Sequence
  Description of Artificial Sequence: Synthetic oligonucleotide
auaguaacuuguacaguag

SEQ ID NO: 1607685 - RNA, 19 nt, Artificial Sequence
  Description of Artificial Sequence: Synthetic oligonucleotide
uauucugaucuguuccuaa

SEQ ID NO: 1607686 - RNA, 19 nt, Artificial Sequence
  Description of Artificial Sequence: Synthetic oligonucleotide
acaacuugacacuguacaa

SEQ ID NO: 1607687 - RNA, 19 nt, Artificial Sequence
  Description of Artificial Sequence: Synthetic oligonucleotide
uuuaaguaacagagguaua

SEQ ID NO: 1607688 - RNA, 19 nt, Artificial Sequence
  Description of Artificial Sequence: Synthetic oligonucleotide
uugccuccaaauuuggaau

SEQ ID NO: 1607689 - RNA, 19 nt, Artificial Sequence
  Description of Artificial Sequence: Synthetic oligonucleotide
aagccucuaaagacaaaag

SEQ ID NO: 1607690 - RNA, 19 nt, Artificial Sequence
  Description of Artificial Sequence: Synthetic oligonucleotide
acuuauuaccugaaauucu

SEQ ID NO: 1607691 - RNA, 19 nt, Artificial Sequence
  Description of Artificial Sequence: Synthetic oligonucleotide
cagaaagccucuaaagaca

SEQ ID NO: 1607692 - RNA, 19 nt, Artificial Sequence
  Description of Artificial Sequence: Synthetic oligonucleotide
cuaaaguggcaacaguaca

SEQ ID NO: 1607693 - RNA, 19 nt, Artificial Sequence
  Description of Artificial Sequence: Synthetic oligonucleotide
guugguacguugucuaauc

SEQ ID NO: 1607694 - RNA, 19 nt, Artificial Sequence
  Description of Artificial Sequence: Synthetic oligonucleotide
uacuaugaaugaagugaac

SEQ ID NO: 1607695 - RNA, 19 nt, Artificial Sequence
  Description of Artificial Sequence: Synthetic oligonucleotide
gcugacagcuauuggagag

SEQ ID NO: 1607696 - RNA, 19 nt, Artificial Sequence
  Description of Artificial Sequence: Synthetic oligonucleotide
uuccuaaaguggcaacagu

SEQ ID NO: 1607697 - RNA, 19 nt, Artificial Sequence
  Description of Artificial Sequence: Synthetic oligonucleotide
aaaguuagucaugcucacu

SEQ ID NO: 1607698 - RNA, 19 nt, Artificial Sequence
  Description of Artificial Sequence: Synthetic oligonucleotide
cuuccuaaaguggcaacag

SEQ ID NO: 1607699 - RNA, 19 nt, Artificial Sequence
  Description of Artificial Sequence: Synthetic oligonucleotide
ugcuaauuaauuggcuuaa

SEQ ID NO: 1607700 - RNA, 19 nt, Artificial Sequence
  Description of Artificial Sequence: Synthetic oligonucleotide
uacuacuuauuaccugaaa

SEQ ID NO: 1607701 - RNA, 19 nt, Artificial Sequence
  Description of Artificial Sequence: Synthetic oligonucleotide
uaaguaacagagguauaau

SEQ ID NO: 1607702 - RNA, 19 nt, Artificial Sequence
  Description of Artificial Sequence: Synthetic oligonucleotide
uccccaugcguaucaauac

SEQ ID NO: 1607703 - RNA, 19 nt, Artificial Sequence
  Description of Artificial Sequence: Synthetic oligonucleotide
guugccaaacaugagagua

SEQ ID NO: 1607704 - RNA, 19 nt, Artificial Sequence
  Description of Artificial Sequence: Synthetic oligonucleotide
guuuuacccagaaagcaga

SEQ ID NO: 1607705 - RNA, 19 nt, Artificial Sequence
  Description of Artificial Sequence: Synthetic oligonucleotide
uacguugucuaauccuuuc

SEQ ID NO: 1607706 - RNA, 19 nt, Artificial Sequence
  Description of Artificial Sequence: Synthetic oligonucleotide
auacuaugaaugaagugaa

SEQ ID NO: 1607707 - RNA, 19 nt, Artificial Sequence
  Description of Artificial Sequence: Synthetic oligonucleotide
auggacaauggacaaugaa

SEQ ID NO: 1607708 - RNA, 19 nt, Artificial Sequence
  Description of Artificial Sequence: Synthetic oligonucleotide
uugcuguaagcuugccucc

SEQ ID NO: 1607709 - RNA, 19 nt, Artificial Sequence
  Description of Artificial Sequence: Synthetic oligonucleotide
acuuccuaaaguggcaaca

SEQ ID NO: 1607710 - RNA, 19 nt, Artificial Sequence
  Description of Artificial Sequence: Synthetic oligonucleotide
agcauagagcuuuucuaau

SEQ ID NO: 1607711 - RNA, 19 nt, Artificial Sequence
  Description of Artificial Sequence: Synthetic oligonucleotide
agacuacugcauguuuagc

SEQ ID NO: 1607712 - RNA, 19 nt, Artificial Sequence
  Description of Artificial Sequence: Synthetic oligonucleotide
uucaaauggccaguauaac

SEQ ID NO: 1607713 - RNA, 19 nt, Artificial Sequence
  Description of Artificial Sequence: Synthetic oligonucleotide
ugaggcuagcuauccagaa

SEQ ID NO: 1607714 - RNA, 19 nt, Artificial Sequence
  Description of Artificial Sequence: Synthetic oligonucleotide
aauaacaaacaugguccuu

SEQ ID NO: 1607715 - RNA, 19 nt, Artificial Sequence
  Description of Artificial Sequence: Synthetic oligonucleotide
aguuuccccaugcguauca

SEQ ID NO: 1607716 - RNA, 19 nt, Artificial Sequence
  Description of Artificial Sequence: Synthetic oligonucleotide
ccuaaaguggcaacaguac

SEQ ID NO: 1607717 - RNA, 19 nt, Artificial Sequence
  Description of Artificial Sequence: Synthetic oligonucleotide
aacuuguacaguagcuagu

SEQ ID NO: 1607718 - RNA, 19 nt, Artificial Sequence
  Description of Artificial Sequence: Synthetic oligonucleotide
cuagcuauccagaaagccu

SEQ ID NO: 1607719 - RNA, 19 nt, Artificial Sequence
  Description of Artificial Sequence: Synthetic oligonucleotide
cuggguccuagaaauggac

SEQ ID NO: 1607720 - RNA, 19 nt, Artificial Sequence
  Description of Artificial Sequence: Synthetic oligonucleotide
agucuguuuaucaguaccu

SEQ ID NO: 1607721 - RNA, 19 nt, Artificial Sequence
  Description of Artificial Sequence: Synthetic oligonucleotide
ccuugcuuaccuuaguaac

SEQ ID NO: 1607722 - RNA, 19 nt, Artificial Sequence
  Description of Artificial Sequence: Synthetic oligonucleotide
ggccaguauaacuacugcc

SEQ ID NO: 1607723 - RNA, 19 nt, Artificial Sequence
  Description of Artificial Sequence: Synthetic oligonucleotide
aaguugguacguugucuaa

SEQ ID NO: 1607724 - RNA, 19 nt, Artificial Sequence
  Description of Artificial Sequence: Synthetic oligonucleotide
uguugccaaacaugagagu

SEQ ID NO: 1607725 - RNA, 19 nt, Artificial Sequence
  Description of Artificial Sequence: Synthetic oligonucleotide
cguaucaauacuuggcccc

SEQ ID NO: 1607726 - RNA, 19 nt, Artificial Sequence
  Description of Artificial Sequence: Synthetic oligonucleotide
gcagauauauucugaucug

SEQ ID NO: 1607727 - RNA, 19 nt, Artificial Sequence
  Description of Artificial Sequence: Synthetic oligonucleotide
gcuuaccuuaguaacacug

SEQ ID NO: 1607728 - RNA, 19 nt, Artificial Sequence
  Description of Artificial Sequence: Synthetic oligonucleotide
aggaaaaguccuugguaaa

SEQ ID NO: 1607729 - RNA, 19 nt, Artificial Sequence
  Description of Artificial Sequence: Synthetic oligonucleotide
auucacaccaguacuuccu

SEQ ID NO: 1607730 - RNA, 19 nt, Artificial Sequence
  Description of Artificial Sequence: Synthetic oligonucleotide
uagaaccuguucuggcucu

SEQ ID NO: 1607731 - RNA, 19 nt, Artificial Sequence
  Description of Artificial Sequence: Synthetic oligonucleotide
cagcuauuggagagugagg

SEQ ID NO: 1607732 - RNA, 19 nt, Artificial Sequence
  Description of Artificial Sequence: Synthetic oligonucleotide
gaagacuacugcauguuua

SEQ ID NO: 1607733 - RNA, 19 nt, Artificial Sequence
  Description of Artificial Sequence: Synthetic oligonucleotide
cuacuuaaaacaggucauc

SEQ ID NO: 1607734 - RNA, 19 nt, Artificial Sequence
  Description of Artificial Sequence: Synthetic oligonucleotide
aaguuuccccaugcguauc

SEQ ID NO: 1607735 - RNA, 19 nt, Artificial Sequence
  Description of Artificial Sequence: Synthetic oligonucleotide
acagagguauaaucugaau

SEQ ID NO: 1607736 - RNA, 19 nt, Artificial Sequence
  Description of Artificial Sequence: Synthetic oligonucleotide
aaauuaggccaaaccuaca

SEQ ID NO: 1607737 - RNA, 19 nt, Artificial Sequence
  Description of Artificial Sequence: Synthetic oligonucleotide
agaagacuacugcauguuu

SEQ ID NO: 1607738 - RNA, 19 nt, Artificial Sequence
  Description of Artificial Sequence: Synthetic oligonucleotide
aguacuuccuaaaguggca

SEQ ID NO: 1607739 - RNA, 19 nt, Artificial Sequence
  Description of Artificial Sequence: Synthetic oligonucleotide
uuuagccaucccauuucau

SEQ ID NO: 1607740 - RNA, 19 nt, Artificial Sequence
  Description of Artificial Sequence: Synthetic oligonucleotide
acaggucaucauuuuaguu

SEQ ID NO: 1607741 - RNA, 19 nt, Artificial Sequence
  Description of Artificial Sequence: Synthetic oligonucleotide
gugagguucucauaauuua

SEQ ID NO: 1607742 - RNA, 19 nt, Artificial Sequence
  Description of Artificial Sequence: Synthetic oligonucleotide
aauggacaauggacaauga

SEQ ID NO: 1607743 - RNA, 19 nt, Artificial Sequence
  Description of Artificial Sequence: Synthetic oligonucleotide
uacugcauguuuagccauc

SEQ ID NO: 1607744 - RNA, 19 nt, Artificial Sequence
  Description of Artificial Sequence: Synthetic oligonucleotide
agugagguucucauaauuu

SEQ ID NO: 1607745 - RNA, 19 nt, Artificial Sequence
  Description of Artificial Sequence: Synthetic oligonucleotide
uaucaguaccuaaguuaaa

SEQ ID NO: 1607746 - RNA, 19 nt, Artificial Sequence
  Description of Artificial Sequence: Synthetic oligonucleotide
gauaggaaaguuuccccau

SEQ ID NO: 1607747 - RNA, 19 nt, Artificial Sequence
  Description of Artificial Sequence: Synthetic oligonucleotide
ugugccaauggaucucuuu

SEQ ID NO: 1607748 - RNA, 19 nt, Artificial Sequence
  Description of Artificial Sequence: Synthetic oligonucleotide
cuucaauauaguucuccaa

SEQ ID NO: 1607749 - RNA, 19 nt, Artificial Sequence
  Description of Artificial Sequence: Synthetic oligonucleotide
auaaaacaagguaguuuca

SEQ ID NO: 1607750 - RNA, 19 nt, Artificial Sequence
  Description of Artificial Sequence: Synthetic oligonucleotide
aucaauacuuggccccagu

SEQ ID NO: 1607751 - RNA, 19 nt, Artificial Sequence
  Description of Artificial Sequence: Synthetic oligonucleotide
auucucaauuccucuuaaa

SEQ ID NO: 1607752 - RNA, 19 nt, Artificial Sequence
  Description of Artificial Sequence: Synthetic oligonucleotide
caauauaguucuccaaaua

SEQ ID NO: 1607753 - RNA, 19 nt, Artificial Sequence
  Description of Artificial Sequence: Synthetic oligonucleotide
uucugguauacagaucaua

SEQ ID NO: 1607754 - RNA, 19 nt, Artificial Sequence
  Description of Artificial Sequence: Synthetic oligonucleotide
auucaagauuggccuuaag

SEQ ID NO: 1607755 - RNA, 19 nt, Artificial Sequence
  Description of Artificial Sequence: Synthetic oligonucleotide
ggacuagacagcuuaguaa

SEQ ID NO: 1607756 - RNA, 19 nt, Artificial Sequence
  Description of Artificial Sequence: Synthetic oligonucleotide
  modified_base (3)..(3): a, c, u, g, unknown or other
agnuuaacuaccacuucuu

SEQ ID NO: 1607757 - RNA, 19 nt, Artificial Sequence
  Description of Artificial Sequence: Synthetic oligonucleotide
gcuagcuauccagaaagcc

SEQ ID NO: 1607758 - RNA, 19 nt, Artificial Sequence
  Description of Artificial Sequence: Synthetic oligonucleotide
gguauacagaucauagaga

SEQ ID NO: 1607759 - RNA, 19 nt, Artificial Sequence
  Description of Artificial Sequence: Synthetic oligonucleotide
guagcuaguucuggacuag

SEQ ID NO: 1607760 - RNA, 19 nt, Artificial Sequence
  Description of Artificial Sequence: Synthetic oligonucleotide
agauauauucugaucuguu

SEQ ID NO: 1607761 - RNA, 19 nt, Artificial Sequence
  Description of Artificial Sequence: Synthetic oligonucleotide
uuggagagugagguucuca

SEQ ID NO: 1607762 - RNA, 19 nt, Artificial Sequence
  Description of Artificial Sequence: Synthetic oligonucleotide
agagugagguucucauaau

SEQ ID NO: 1607763 - RNA, 19 nt, Artificial Sequence
  Description of Artificial Sequence: Synthetic oligonucleotide
auaguucuccaaauaggaa

SEQ ID NO: 1607764 - RNA, 19 nt, Artificial Sequence
  Description of Artificial Sequence: Synthetic oligonucleotide
uggccuuaagggacugacu

SEQ ID NO: 1607765 - RNA, 19 nt, Artificial Sequence
  Description of Artificial Sequence: Synthetic oligonucleotide
gaucuguuccuaaugucua

SEQ ID NO: 1607766 - RNA, 19 nt, Artificial Sequence
  Description of Artificial Sequence: Synthetic oligonucleotide
uaccuggguccuagaaaug

SEQ ID NO: 1607767 - RNA, 19 nt, Artificial Sequence
  Description of Artificial Sequence: Synthetic oligonucleotide
cuggaaagacuggugguuc

SEQ ID NO: 1607768 - RNA, 19 nt, Artificial Sequence
  Description of Artificial Sequence: Synthetic oligonucleotide
gcguaucaauacuuggccc

SEQ ID NO: 1607769 - RNA, 19 nt, Artificial Sequence
  Description of Artificial Sequence: Synthetic oligonucleotide
uggcaacaguacaagcaua

SEQ ID NO: 1607770 - RNA, 19 nt, Artificial Sequence
  Description of Artificial Sequence: Synthetic oligonucleotide
cauaauagcgcuguaggau

SEQ ID NO: 1607771 - RNA, 19 nt, Artificial Sequence
  Description of Artificial Sequence: Synthetic oligonucleotide
gugguucugguauacagau

SEQ ID NO: 1607772 - RNA, 19 nt, Artificial Sequence
  Description of Artificial Sequence: Synthetic oligonucleotide
ugcuuaccuuaguaacacu

SEQ ID NO: 1607773 - RNA, 19 nt, Artificial Sequence
  Description of Artificial Sequence: Synthetic oligonucleotide
acuagacagcuuaguaaug

SEQ ID NO: 1607774 - RNA, 19 nt, Artificial Sequence
  Description of Artificial Sequence: Synthetic oligonucleotide
ucacaccaguacuuccuaa

SEQ ID NO: 1607775 - RNA, 19 nt, Artificial Sequence
  Description of Artificial Sequence: Synthetic oligonucleotide
gaggcuagcuauccagaaa

SEQ ID NO: 1607776 - RNA, 19 nt, Artificial Sequence
  Description of Artificial Sequence: Synthetic oligonucleotide
cuccaaauuuggaauauau

SEQ ID NO: 1607777 - RNA, 19 nt, Artificial Sequence
  Description of Artificial Sequence: Synthetic oligonucleotide
ggacaaugaaagaaucuuc

SEQ ID NO: 1607778 - RNA, 19 nt, Artificial Sequence
  Description of Artificial Sequence: Synthetic oligonucleotide
uugccugaggcuagcuauc

SEQ ID NO: 1607779 - RNA, 19 nt, Artificial Sequence
  Description of Artificial Sequence: Synthetic oligonucleotide
cagagguauaaucugaauu

SEQ ID NO: 1607780 - RNA, 19 nt, Artificial Sequence
  Description of Artificial Sequence: Synthetic oligonucleotide
ggcuaaacagaaaaugaaa

SEQ ID NO: 1607781 - RNA, 19 nt, Artificial Sequence
  Description of Artificial Sequence: Synthetic oligonucleotide
ccccaaauuaggccaaacc

SEQ ID NO: 1607782 - RNA, 19 nt, Artificial Sequence
  Description of Artificial Sequence: Synthetic oligonucleotide
ggccccagugguaaguugg

SEQ ID NO: 1607783 - RNA, 19 nt, Artificial Sequence
  Description of Artificial Sequence: Synthetic oligonucleotide
cuugccugaggcuagcuau

SEQ ID NO: 1607784 - RNA, 19 nt, Artificial Sequence
  Description of Artificial Sequence: Synthetic oligonucleotide
agaaagccuaugacaucuc

SEQ ID NO: 1607785 - RNA, 19 nt, Artificial Sequence
  Description of Artificial Sequence: Synthetic oligonucleotide
ugcuguaagcuugccucca

SEQ ID NO: 1607786 - RNA, 19 nt, Artificial Sequence
  Description of Artificial Sequence: Synthetic oligonucleotide
guaucaauacuuggcccca

SEQ ID NO: 1607787 - RNA, 19 nt, Artificial Sequence
  Description of Artificial Sequence: Synthetic oligonucleotide
caacuugacacuguacaaa

SEQ ID NO: 1607788 - RNA, 19 nt, Artificial Sequence
  Description of Artificial Sequence: Synthetic oligonucleotide
guucuccaaauaggaaaug

SEQ ID NO: 1607789 - RNA, 19 nt, Artificial Sequence
  Description of Artificial Sequence: Synthetic oligonucleotide
ccaaauuaggccaaaccua

SEQ ID NO: 1607790 - RNA, 19 nt, Artificial Sequence
  Description of Artificial Sequence: Synthetic oligonucleotide
cagucaauaguaacuugua

SEQ ID NO: 1607791 - RNA, 19 nt, Artificial Sequence
  Description of Artificial Sequence: Synthetic oligonucleotide
auuggagagugagguucuc

SEQ ID NO: 1607792 - RNA, 19 nt, Artificial Sequence
  Description of Artificial Sequence: Synthetic oligonucleotide
uuaguaacacugggcuaaa

SEQ ID NO: 1607793 - RNA, 19 nt, Artificial Sequence
  Description of Artificial Sequence: Synthetic oligonucleotide
guggcaacaguacaagcau

SEQ ID NO: 1607794 - RNA, 19 nt, Artificial Sequence
  Description of Artificial Sequence: Synthetic oligonucleotide
guaaguugguacguugucu

SEQ ID NO: 1607795 - RNA, 19 nt, Artificial Sequence
  Description of Artificial Sequence: Synthetic oligonucleotide
ccuagaaauggacaaugga

SEQ ID NO: 1607796 - RNA, 19 nt, Artificial Sequence
  Description of Artificial Sequence: Synthetic oligonucleotide
ggaaaguuuccccaugcgu

SEQ ID NO: 1607797 - RNA, 19 nt, Artificial Sequence
  Description of Artificial Sequence: Synthetic oligonucleotide
cugaggcuagcuauccaga

SEQ ID NO: 1607798 - RNA, 19 nt, Artificial Sequence
  Description of Artificial Sequence: Synthetic oligonucleotide
ccaugcguaucaauacuug

SEQ ID NO: 1607799 - RNA, 19 nt, Artificial Sequence
  Description of Artificial Sequence: Synthetic oligonucleotide
gaaccuguucuggcucucc

SEQ ID NO: 1607800 - RNA, 19 nt, Artificial Sequence
  Description of Artificial Sequence: Synthetic oligonucleotide
ugcccuugcuuaccuuagu

SEQ ID NO: 1607801 - RNA, 19 nt, Artificial Sequence
  Description of Artificial Sequence: Synthetic oligonucleotide
acugggcuaaacagaaaau

SEQ ID NO: 1607802 - RNA, 19 nt, Artificial Sequence
  Description of Artificial Sequence: Synthetic oligonucleotide
ccuugguaaaucagaagga

SEQ ID NO: 1607803 - RNA, 19 nt, Artificial Sequence
  Description of Artificial Sequence: Synthetic oligonucleotide
gcuuaguaaugcugacagc

SEQ ID NO: 1607804 - RNA, 19 nt, Artificial Sequence
  Description of Artificial Sequence: Synthetic oligonucleotide
gaaucauaauagcgcugua

SEQ ID NO: 1607805 - RNA, 19 nt, Artificial Sequence
  Description of Artificial Sequence: Synthetic oligonucleotide
cucccuugccugaggcuag

SEQ ID NO: 1607806 - RNA, 19 nt, Artificial Sequence
  Description of Artificial Sequence: Synthetic oligonucleotide
gcgcuguaggaucauagca

SEQ ID NO: 1607807 - RNA, 19 nt, Artificial Sequence
  Description of Artificial Sequence: Synthetic oligonucleotide
guaagcuugccuccaaauu

SEQ ID NO: 1607808 - RNA, 19 nt, Artificial Sequence
  Description of Artificial Sequence: Synthetic oligonucleotide
cccaaauuaggccaaaccu

SEQ ID NO: 1607809 - RNA, 19 nt, Artificial Sequence
  Description of Artificial Sequence: Synthetic oligonucleotide
guacuuccuaaaguggcaa

SEQ ID NO: 1607810 - RNA, 19 nt, Artificial Sequence
  Description of Artificial Sequence: Synthetic oligonucleotide
uccugugccaauggaucuc

SEQ ID NO: 1607811 - RNA, 19 nt, Artificial Sequence
  Description of Artificial Sequence: Synthetic oligonucleotide
cagcuuaccuggguccuag

SEQ ID NO: 1607812 - RNA, 19 nt, Artificial Sequence
  Description of Artificial Sequence: Synthetic oligonucleotide
auacuacuuauuaccugaa

SEQ ID NO: 1607813 - RNA, 19 nt, Artificial Sequence
  Description of Artificial Sequence: Synthetic oligonucleotide
accuuaaguuaaauauaaa

SEQ ID NO: 1607814 - RNA, 19 nt, Artificial Sequence
  Description of Artificial Sequence: Synthetic oligonucleotide
guucuggcucucccuugcc

SEQ ID NO: 1607815 - RNA, 19 nt, Artificial Sequence
  Description of Artificial Sequence: Synthetic oligonucleotide
ccagucaauaguaacuugu

SEQ ID NO: 1607816 - RNA, 19 nt, Artificial Sequence
  Description of Artificial Sequence: Synthetic oligonucleotide
gaaauggacaauggacaau

SEQ ID NO: 1607817 - RNA, 19 nt, Artificial Sequence
  Description of Artificial Sequence: Synthetic oligonucleotide
gugccaauggaucucuuuu

SEQ ID NO: 1607818 - RNA, 19 nt, Artificial Sequence
  Description of Artificial Sequence: Synthetic oligonucleotide
ccauuucauucaagauugg

SEQ ID NO: 1607819 - RNA, 19 nt, Artificial Sequence
  Description of Artificial Sequence: Synthetic oligonucleotide
cagauauauucugaucugu

SEQ ID NO: 1607820 - RNA, 19 nt, Artificial Sequence
  Description of Artificial Sequence: Synthetic oligonucleotide
cagcuuaguaaugcugaca

SEQ ID NO: 1607821 - RNA, 19 nt, Artificial Sequence
  Description of Artificial Sequence: Synthetic oligonucleotide
caguagcuaguucuggacu

SEQ ID NO: 1607822 - RNA, 19 nt, Artificial Sequence
  Description of Artificial Sequence: Synthetic oligonucleotide
gucuguuuaucaguaccua

SEQ ID NO: 1607823 - RNA, 19 nt, Artificial Sequence
  Description of Artificial Sequence: Synthetic oligonucleotide
agucaugcucacugcccuu

SEQ ID NO: 1607824 - RNA, 19 nt, Artificial Sequence
  Description of Artificial Sequence: Synthetic oligonucleotide
gccucuaaagacaaaaguu

SEQ ID NO: 1607825 - RNA, 19 nt, Artificial Sequence
  Description of Artificial Sequence: Synthetic oligonucleotide
ccucuuaaaauagaagacu

SEQ ID NO: 1607826 - RNA, 19 nt, Artificial Sequence
  Description of Artificial Sequence: Synthetic oligonucleotide
auuggccuuaagggacuga

SEQ ID NO: 1607827 - RNA, 19 nt, Artificial Sequence
  Description of Artificial Sequence: Synthetic oligonucleotide
ggcuagcuauccagaaagc

SEQ ID NO: 1607828 - RNA, 19 nt, Artificial Sequence
  Description of Artificial Sequence: Synthetic oligonucleotide
gcuuaccuggguccuagaa

SEQ ID NO: 1607829 - RNA, 19 nt, Artificial Sequence
  Description of Artificial Sequence: Synthetic oligonucleotide
agcuuaccuggguccuaga

SEQ ID NO: 1607830 - RNA, 19 nt, Artificial Sequence
  Description of Artificial Sequence: Synthetic oligonucleotide
cuccugugccaauggaucu

SEQ ID NO: 1607831 - RNA, 19 nt, Artificial Sequence
  Description of Artificial Sequence: Synthetic oligonucleotide
cuacugcauguuuagccau

SEQ ID NO: 1607832 - RNA, 19 nt, Artificial Sequence
  Description of Artificial Sequence: Synthetic oligonucleotide
gguacguugucuaauccuu

SEQ ID NO: 1607833 - RNA, 19 nt, Artificial Sequence
  Description of Artificial Sequence: Synthetic oligonucleotide
auagcgcuguaggaucaua

SEQ ID NO: 1607834 - RNA, 19 nt, Artificial Sequence
  Description of Artificial Sequence: Synthetic oligonucleotide
gcacuucugcuuuucaaau

SEQ ID NO: 1607835 - RNA, 19 nt, Artificial Sequence
  Description of Artificial Sequence: Synthetic oligonucleotide
gcaacaguacaagcauaga

SEQ ID NO: 1607836 - RNA, 19 nt, Artificial Sequence
  Description of Artificial Sequence: Synthetic oligonucleotide
cccuugcuuaccuuaguaa

SEQ ID NO: 1607837 - RNA, 19 nt, Artificial Sequence
  Description of Artificial Sequence: Synthetic oligonucleotide
auacuuggccccaguggua

SEQ ID NO: 1607838 - RNA, 19 nt, Artificial Sequence
  Description of Artificial Sequence: Synthetic oligonucleotide
gcuaauuaauuggcuuaaa

SEQ ID NO: 1607839 - RNA, 19 nt, Artificial Sequence
  Description of Artificial Sequence: Synthetic oligonucleotide
cugacagcuauuggagagu

SEQ ID NO: 1607840 - RNA, 19 nt, Artificial Sequence
  Description of Artificial Sequence: Synthetic oligonucleotide
cuggacuagacagcuuagu

SEQ ID NO: 1607841 - RNA, 19 nt, Artificial Sequence
  Description of Artificial Sequence: Synthetic oligonucleotide
gcuguaagcuugccuccaa

SEQ ID NO: 1607842 - RNA, 19 nt, Artificial Sequence
  Description of Artificial Sequence: Synthetic oligonucleotide
cuuggccccagugguaagu

SEQ ID NO: 1607843 - RNA, 19 nt, Artificial Sequence
  Description of Artificial Sequence: Synthetic oligonucleotide
cuguaggaucauagcacuu

SEQ ID NO: 1607844 - RNA, 19 nt, Artificial Sequence
  Description of Artificial Sequence: Synthetic oligonucleotide
ccacuucaauauaguucuc

SEQ ID NO: 1607845 - RNA, 19 nt, Artificial Sequence
  Description of Artificial Sequence: Synthetic oligonucleotide
guacguugucuaauccuuu

SEQ ID NO: 1607846 - RNA, 19 nt, Artificial Sequence
  Description of Artificial Sequence: Synthetic oligonucleotide
ccacuucuugagauaggaa

SEQ ID NO: 1607847 - RNA, 19 nt, Artificial Sequence
  Description of Artificial Sequence: Synthetic oligonucleotide
guucugguauacagaucau

SEQ ID NO: 1607848 - RNA, 19 nt, Artificial Sequence
  Description of Artificial Sequence: Synthetic oligonucleotide
cagaucugaaaagcagguu

SEQ ID NO: 1607849 - RNA, 19 nt, Artificial Sequence
  Description of Artificial Sequence: Synthetic oligonucleotide
ccaguauaacuacugccuu

SEQ ID NO: 1607850 - RNA, 19 nt, Artificial Sequence
  Description of Artificial Sequence: Synthetic oligonucleotide
cccaugcguaucaauacuu

SEQ ID NO: 1607851 - RNA, 19 nt, Artificial Sequence
  Description of Artificial Sequence: Synthetic oligonucleotide
gcuauccagaaagccucua

SEQ ID NO: 1607852 - RNA, 19 nt, Artificial Sequence
  Description of Artificial Sequence: Synthetic oligonucleotide
ccccaugcguaucaauacu

SEQ ID NO: 1607853 - RNA, 19 nt, Artificial Sequence
  Description of Artificial Sequence: Synthetic oligonucleotide
gccccagugguaaguuggu

SEQ ID NO: 1607854 - RNA, 19 nt, Artificial Sequence
  Description of Artificial Sequence: Synthetic oligonucleotide
ucaaucuccaggauuaucc

SEQ ID NO: 1607855 - RNA, 19 nt, Artificial Sequence
  Description of Artificial Sequence: Synthetic oligonucleotide
ugaggguaggcgaaaaucg

SEQ ID NO: 1607856 - RNA, 19 nt, Artificial Sequence
  Description of Artificial Sequence: Synthetic oligonucleotide
aggauuauccucucugagc

SEQ ID NO: 1607857 - RNA, 19 nt, Artificial Sequence
  Description of Artificial Sequence: Synthetic oligonucleotide
aauaauccucacauaggcc

SEQ ID NO: 1607858 - RNA, 19 nt, Artificial Sequence
  Description of Artificial Sequence: Synthetic oligonucleotide
agcggcauaacuuagcucu

SEQ ID NO: 1607859 - RNA, 19 nt, Artificial Sequence
  Description of Artificial Sequence: Synthetic oligonucleotide
agaacaggcggccacggcc

SEQ ID NO: 1607860 - RNA, 19 nt, Artificial Sequence
  Description of Artificial Sequence: Synthetic oligonucleotide
aaccgucauacccaaagag

SEQ ID NO: 1607861 - RNA, 19 nt, Artificial Sequence
  Description of Artificial Sequence: Synthetic oligonucleotide
uaaucggugucaucuaggg

SEQ ID NO: 1607862 - RNA, 19 nt, Artificial Sequence
  Description of Artificial Sequence: Synthetic oligonucleotide
aagauguacagguaaccgu

SEQ ID NO: 1607863 - RNA, 19 nt, Artificial Sequence
  Description of Artificial Sequence: Synthetic oligonucleotide
guaaccgucauacccaaag

SEQ ID NO: 1607864 - RNA, 19 nt, Artificial Sequence
  Description of Artificial Sequence: Synthetic oligonucleotide
gaagcgguggcuuccaucc

SEQ ID NO: 1607865 - RNA, 19 nt, Artificial Sequence
  Description of Artificial Sequence: Synthetic oligonucleotide
ggcaauaauccucacauag

SEQ ID NO: 1607866 - RNA, 19 nt, Artificial Sequence
  Description of Artificial Sequence: Synthetic oligonucleotide
ucuagggacagguagcggc

SEQ ID NO: 1607867 - RNA, 19 nt, Artificial Sequence
  Description of Artificial Sequence: Synthetic oligonucleotide
ugugauuggaggcugguuc

SEQ ID NO: 1607868 - RNA, 19 nt, Artificial Sequence
  Description of Artificial Sequence: Synthetic oligonucleotide
uguaccauagcaacagggu

SEQ ID NO: 1607869 - RNA, 19 nt, Artificial Sequence
  Description of Artificial Sequence: Synthetic oligonucleotide
gacugauuugcccagcuug

SEQ ID NO: 1607870 - RNA, 19 nt, Artificial Sequence
  Description of Artificial Sequence: Synthetic oligonucleotide
aaaauguagaggccauuga

SEQ ID NO: 1607871 - RNA, 19 nt, Artificial Sequence
  Description of Artificial Sequence: Synthetic oligonucleotide
uccaggauuauccucucug

SEQ ID NO: 1607872 - RNA, 19 nt, Artificial Sequence
  Description of Artificial Sequence: Synthetic oligonucleotide
agggcguagaccucgggcc

SEQ ID NO: 1607873 - RNA, 19 nt, Artificial Sequence
  Description of Artificial Sequence: Synthetic oligonucleotide
uauggauaguaguuguuga

SEQ ID NO: 1607874 - RNA, 19 nt, Artificial Sequence
  Description of Artificial Sequence: Synthetic oligonucleotide
ugauguauggauaguaguu

SEQ ID NO: 1607875 - RNA, 19 nt, Artificial Sequence
  Description of Artificial Sequence: Synthetic oligonucleotide
gauguauggauaguaguug

SEQ ID NO: 1607876 - RNA, 19 nt, Artificial Sequence
  Description of Artificial Sequence: Synthetic oligonucleotide
uuucgaagaccauuggcca

SEQ ID NO: 1607877 - RNA, 19 nt, Artificial Sequence
  Description of Artificial Sequence: Synthetic oligonucleotide
ggauuauccucucugagcc

SEQ ID NO: 1607878 - RNA, 19 nt, Artificial Sequence
  Description of Artificial Sequence: Synthetic oligonucleotide
aaaggaucuccggccaucc

SEQ ID NO: 1607879 - RNA, 19 nt, Artificial Sequence
  Description of Artificial Sequence: Synthetic oligonucleotide
ugucucaggguucucucgg

SEQ ID NO: 1607880 - RNA, 19 nt, Artificial Sequence
  Description of Artificial Sequence: Synthetic oligonucleotide
ugucuaggcaauaauccuc

SEQ ID NO: 1607881 - RNA, 19 nt, Artificial Sequence
  Description of Artificial Sequence: Synthetic oligonucleotide
augauguauggauaguagu

SEQ ID NO: 1607882 - RNA, 19 nt, Artificial Sequence
  Description of Artificial Sequence: Synthetic oligonucleotide
accgucauacccaaagagc

SEQ ID NO: 1607883 - RNA, 19 nt, Artificial Sequence
  Description of Artificial Sequence: Synthetic oligonucleotide
ucguugaccaacaggcuug

SEQ ID NO: 1607884 - RNA, 19 nt, Artificial Sequence
  Description of Artificial Sequence: Synthetic oligonucleotide
gaaagcacaugucugucca

SEQ ID NO: 1607885 - RNA, 19 nt, Artificial Sequence
  Description of Artificial Sequence: Synthetic oligonucleotide
aagcacaugucuguccacg

SEQ ID NO: 1607886 - RNA, 19 nt, Artificial Sequence
  Description of Artificial Sequence: Synthetic oligonucleotide
ggagaugauguauggauag

SEQ ID NO: 1607887 - RNA, 19 nt, Artificial Sequence
  Description of Artificial Sequence: Synthetic oligonucleotide
aaaucggcagcacgucauc

SEQ ID NO: 1607888 - RNA, 19 nt, Artificial Sequence
  Description of Artificial Sequence: Synthetic oligonucleotide
uuugcccagcuugugaggg

SEQ ID NO: 1607889 - RNA, 19 nt, Artificial Sequence
  Description of Artificial Sequence: Synthetic oligonucleotide
aaaaggaucuccggccauc

SEQ ID NO: 1607890 - RNA, 19 nt, Artificial Sequence
  Description of Artificial Sequence: Synthetic oligonucleotide
aacaggguuucgaagacca

SEQ ID NO: 1607891 - RNA, 19 nt, Artificial Sequence
  Description of Artificial Sequence: Synthetic oligonucleotide
ucgaaagaggccucugcag

SEQ ID NO: 1607892 - RNA, 19 nt, Artificial Sequence
  Description of Artificial Sequence: Synthetic oligonucleotide
acauaggccaggcaccguc

SEQ ID NO: 1607893 - RNA, 19 nt, Artificial Sequence
  Description of Artificial Sequence: Synthetic oligonucleotide
ucguccucugcaaaggaga

SEQ ID NO: 1607894 - RNA, 19 nt, Artificial Sequence
  Description of Artificial Sequence: Synthetic oligonucleotide
ucagagacucugaacucgc

SEQ ID NO: 1607895 - RNA, 19 nt, Artificial Sequence
  Description of Artificial Sequence: Synthetic oligonucleotide
guacagguaaccgucauac

SEQ ID NO: 1607896 - RNA, 19 nt, Artificial Sequence
  Description of Artificial Sequence: Synthetic oligonucleotide
gaaacaguaaucgguguca

SEQ ID NO: 1607897 - RNA, 19 nt, Artificial Sequence
  Description of Artificial Sequence: Synthetic oligonucleotide
augucuaggcaauaauccu

SEQ ID NO: 1607898 - RNA, 19 nt, Artificial Sequence
  Description of Artificial Sequence: Synthetic oligonucleotide
uggucgaggggacaggugu

SEQ ID NO: 1607899 - RNA, 19 nt, Artificial Sequence
  Description of Artificial Sequence: Synthetic oligonucleotide
guagacauacagcuugcug

SEQ ID NO: 1607900 - RNA, 19 nt, Artificial Sequence
  Description of Artificial Sequence: Synthetic oligonucleotide
guauggauaguaguuguug

SEQ ID NO: 1607901 - RNA, 19 nt, Artificial Sequence
  Description of Artificial Sequence: Synthetic oligonucleotide
auguaccauagcaacaggg

SEQ ID NO: 1607902 - RNA, 19 nt, Artificial Sequence
  Description of Artificial Sequence: Synthetic oligonucleotide
gagacucugaacucgcuga

SEQ ID NO: 1607903 - RNA, 19 nt, Artificial Sequence
  Description of Artificial Sequence: Synthetic oligonucleotide
ucucggagggacaucaguc

SEQ ID NO: 1607904 - RNA, 19 nt, Artificial Sequence
  Description of Artificial Sequence: Synthetic oligonucleotide
ugggaaagcacaugucugu

SEQ ID NO: 1607905 - RNA, 19 nt, Artificial Sequence
  Description of Artificial Sequence: Synthetic oligonucleotide
cucggagggacaucagucg

SEQ ID NO: 1607906 - RNA, 19 nt, Artificial Sequence
  Description of Artificial Sequence: Synthetic oligonucleotide
cagacaucgggucuccgcg

SEQ ID NO: 1607907 - RNA, 19 nt, Artificial Sequence
  Description of Artificial Sequence: Synthetic oligonucleotide
acaggugucgaaagaggcc

SEQ ID NO: 1607908 - RNA, 19 nt, Artificial Sequence
  Description of Artificial Sequence: Synthetic oligonucleotide
uacccaaagagcagcuggc

SEQ ID NO: 1607909 - RNA, 19 nt, Artificial Sequence
  Description of Artificial Sequence: Synthetic oligonucleotide
ucaucguccucagagacuc

SEQ ID NO: 1607910 - RNA, 19 nt, Artificial Sequence
  Description of Artificial Sequence: Synthetic oligonucleotide
ucugagccaugauccacgg

SEQ ID NO: 1607911 - RNA, 19 nt, Artificial Sequence
  Description of Artificial Sequence: Synthetic oligonucleotide
acaucagucgcccacucau

SEQ ID NO: 1607912 - RNA, 19 nt, Artificial Sequence
  Description of Artificial Sequence: Synthetic oligonucleotide
guaguugcggccccgcucc

SEQ ID NO: 1607913 - RNA, 19 nt, Artificial Sequence
  Description of Artificial Sequence: Synthetic oligonucleotide
uugcgguccacgucaaugc

SEQ ID NO: 1607914 - RNA, 19 nt, Artificial Sequence
  Description of Artificial Sequence: Synthetic oligonucleotide
acgaauggguugucgggcg

SEQ ID NO: 1607915 - RNA, 19 nt, Artificial Sequence
  Description of Artificial Sequence: Synthetic oligonucleotide
uaaccgucauacccaaaga

SEQ ID NO: 1607916 - RNA, 19 nt, Artificial Sequence
  Description of Artificial Sequence: Synthetic oligonucleotide
ucgccgguaaagauguaca

SEQ ID NO: 1607917 - RNA, 19 nt, Artificial Sequence
  Description of Artificial Sequence: Synthetic oligonucleotide
gguaaagauguacagguaa

SEQ ID NO: 1607918 - RNA, 19 nt, Artificial Sequence
  Description of Artificial Sequence: Synthetic oligonucleotide
uccggauccacucucggua

SEQ ID NO: 1607919 - RNA, 19 nt, Artificial Sequence
  Description of Artificial Sequence: Synthetic oligonucleotide
gaggguaggcgaaaaucgg

SEQ ID NO: 1607920 - RNA, 19 nt, Artificial Sequence
  Description of Artificial Sequence: Synthetic oligonucleotide
aucgccgguaaagauguac

SEQ ID NO: 1607921 - RNA, 19 nt, Artificial Sequence
  Description of Artificial Sequence: Synthetic oligonucleotide
cacgucaaugcgcagcacc

SEQ ID NO: 1607922 - RNA, 19 nt, Artificial Sequence
  Description of Artificial Sequence: Synthetic oligonucleotide
cuguccacggcccaugcag

SEQ ID NO: 1607923 - RNA, 19 nt, Artificial Sequence
  Description of Artificial Sequence: Synthetic oligonucleotide
uugggguacucgcagcccc

SEQ ID NO: 1607924 - RNA, 19 nt, Artificial Sequence
  Description of Artificial Sequence: Synthetic oligonucleotide
agcacgucaucugagggag

SEQ ID NO: 1607925 - RNA, 19 nt, Artificial Sequence
  Description of Artificial Sequence: Synthetic oligonucleotide
aaucggugucaucuaggga

SEQ ID NO: 1607926 - RNA, 19 nt, Artificial Sequence
  Description of Artificial Sequence: Synthetic oligonucleotide
guaaucggugucaucuagg

SEQ ID NO: 1607927 - RNA, 19 nt, Artificial Sequence
  Description of Artificial Sequence: Synthetic oligonucleotide
ucauacccaaagagcagcu

SEQ ID NO: 1607928 - RNA, 19 nt, Artificial Sequence
  Description of Artificial Sequence: Synthetic oligonucleotide
aggguaggcgaaaaucggc

SEQ ID NO: 1607929 - RNA, 19 nt, Artificial Sequence
  Description of Artificial Sequence: Synthetic oligonucleotide
auuugcccagcuugugagg

SEQ ID NO: 1607930 - RNA, 19 nt, Artificial Sequence
  Description of Artificial Sequence: Synthetic oligonucleotide
ucggagggacaucagucgc

SEQ ID NO: 1607931 - RNA, 19 nt, Artificial Sequence
  Description of Artificial Sequence: Synthetic oligonucleotide
aauccucacauaggccagg

SEQ ID NO: 1607932 - RNA, 19 nt, Artificial Sequence
  Description of Artificial Sequence: Synthetic oligonucleotide
uuggcgucggccacuacac

SEQ ID NO: 1607933 - RNA, 19 nt, Artificial Sequence
  Description of Artificial Sequence: Synthetic oligonucleotide
guaggcgaaaaucggcagc

SEQ ID NO: 1607934 - RNA, 19 nt, Artificial Sequence
  Description of Artificial Sequence: Synthetic oligonucleotide
aaaaucggcagcacgucau

SEQ ID NO: 1607935 - RNA, 19 nt, Artificial Sequence
  Description of Artificial Sequence: Synthetic oligonucleotide
caggauuauccucucugag

SEQ ID NO: 1607936 - RNA, 19 nt, Artificial Sequence
  Description of Artificial Sequence: Synthetic oligonucleotide
agccccgguacacguagcc

SEQ ID NO: 1607937 - RNA, 19 nt, Artificial Sequence
  Description of Artificial Sequence: Synthetic oligonucleotide
cacuguacuuccacuggcc

SEQ ID NO: 1607938 - RNA, 19 nt, Artificial Sequence
  Description of Artificial Sequence: Synthetic oligonucleotide
gauccggauccacucucgg

SEQ ID NO: 1607939 - RNA, 19 nt, Artificial Sequence
  Description of Artificial Sequence: Synthetic oligonucleotide
gguuucgaagaccauuggc

SEQ ID NO: 1607940 - RNA, 19 nt, Artificial Sequence
  Description of Artificial Sequence: Synthetic oligonucleotide
ucgaagaccauuggccacc

SEQ ID NO: 1607941 - RNA, 19 nt, Artificial Sequence
  Description of Artificial Sequence: Synthetic oligonucleotide
cauugugauuggaggcugg

SEQ ID NO: 1607942 - RNA, 19 nt, Artificial Sequence
  Description of Artificial Sequence: Synthetic oligonucleotide
cauguaccauagcaacagg

SEQ ID NO: 1607943 - RNA, 19 nt, Artificial Sequence
  Description of Artificial Sequence: Synthetic oligonucleotide
ucggcagcacgucaucuga

SEQ ID NO: 1607944 - RNA, 19 nt, Artificial Sequence
  Description of Artificial Sequence: Synthetic oligonucleotide
uucgaagaccauuggccac

SEQ ID NO: 1607945 - RNA, 19 nt, Artificial Sequence
  Description of Artificial Sequence: Synthetic oligonucleotide
ggcgggauacgguagggcg

SEQ ID NO: 1607946 - RNA, 19 nt, Artificial Sequence
  Description of Artificial Sequence: Synthetic oligonucleotide
gcaauaauccucacauagg

SEQ ID NO: 1607947 - RNA, 19 nt, Artificial Sequence
  Description of Artificial Sequence: Synthetic oligonucleotide
agcuugugaggguaggcga

SEQ ID NO: 1607948 - RNA, 19 nt, Artificial Sequence
  Description of Artificial Sequence: Synthetic oligonucleotide
aggcuugggaaacaguaau

SEQ ID NO: 1607949 - RNA, 19 nt, Artificial Sequence
  Description of Artificial Sequence: Synthetic oligonucleotide
aggguuucgaagaccauug

SEQ ID NO: 1607950 - RNA, 19 nt, Artificial Sequence
  Description of Artificial Sequence: Synthetic oligonucleotide
agcacucgaagcccucgcg

SEQ ID NO: 1607951 - RNA, 19 nt, Artificial Sequence
  Description of Artificial Sequence: Synthetic oligonucleotide
acgcucauccccuucccag

SEQ ID NO: 1607952 - RNA, 19 nt, Artificial Sequence
  Description of Artificial Sequence: Synthetic oligonucleotide
uguacagguaaccgucaua

SEQ ID NO: 1607953 - RNA, 19 nt, Artificial Sequence
  Description of Artificial Sequence: Synthetic oligonucleotide
ggcgaaaaucggcagcacg

SEQ ID NO: 1607954 - RNA, 19 nt, Artificial Sequence
  Description of Artificial Sequence: Synthetic oligonucleotide
gcauguaccauagcaacag

SEQ ID NO: 1607955 - RNA, 19 nt, Artificial Sequence
  Description of Artificial Sequence: Synthetic oligonucleotide
uuggcgcacagcuugcggu

SEQ ID NO: 1607956 - RNA, 19 nt, Artificial Sequence
  Description of Artificial Sequence: Synthetic oligonucleotide
guugcgguccacgucaaug

SEQ ID NO: 1607957 - RNA, 19 nt, Artificial Sequence
  Description of Artificial Sequence: Synthetic oligonucleotide
auaggccaggcaccguccg

SEQ ID NO: 1607958 - RNA, 19 nt, Artificial Sequence
  Description of Artificial Sequence: Synthetic oligonucleotide
uacagguaaccgucauacc

SEQ ID NO: 1607959 - RNA, 19 nt, Artificial Sequence
  Description of Artificial Sequence: Synthetic oligonucleotide
cccaaaaggaucuccggcc

SEQ ID NO: 1607960 - RNA, 19 nt, Artificial Sequence
  Description of Artificial Sequence: Synthetic oligonucleotide
uccccggcauguaccauag

SEQ ID NO: 1607961 - RNA, 19 nt, Artificial Sequence
  Description of Artificial Sequence: Synthetic oligonucleotide
acucucgguagccgacccc

SEQ ID NO: 1607962 - RNA, 19 nt, Artificial Sequence
  Description of Artificial Sequence: Synthetic oligonucleotide
cagguaaccgucauaccca

SEQ ID NO: 1607963 - RNA, 19 nt, Artificial Sequence
  Description of Artificial Sequence: Synthetic oligonucleotide
auuauccucucugagccau

SEQ ID NO: 1607964 - RNA, 19 nt, Artificial Sequence
  Description of Artificial Sequence: Synthetic oligonucleotide
aaacaguaaucggugucau

SEQ ID NO: 1607965 - RNA, 19 nt, Artificial Sequence
  Description of Artificial Sequence: Synthetic oligonucleotide
ugggguacucgcagccccg

SEQ ID NO: 1607966 - RNA, 19 nt, Artificial Sequence
  Description of Artificial Sequence: Synthetic oligonucleotide
cucugaacucgcugauccg

SEQ ID NO: 1607967 - RNA, 19 nt, Artificial Sequence
  Description of Artificial Sequence: Synthetic oligonucleotide
cacgucaucugagggaggc

SEQ ID NO: 1607968 - RNA, 19 nt, Artificial Sequence
  Description of Artificial Sequence: Synthetic oligonucleotide
cucguugcgguccacguca

SEQ ID NO: 1607969 - RNA, 19 nt, Artificial Sequence
  Description of Artificial Sequence: Synthetic oligonucleotide
cacgaauggguugucgggc

SEQ ID NO: 1607970 - RNA, 19 nt, Artificial Sequence
  Description of Artificial Sequence: Synthetic oligonucleotide
gauccacucucgguagccg

SEQ ID NO: 1607971 - RNA, 19 nt, Artificial Sequence
  Description of Artificial Sequence: Synthetic oligonucleotide
gaggugagcacugcuuggc

SEQ ID NO: 1607972 - RNA, 19 nt, Artificial Sequence
  Description of Artificial Sequence: Synthetic oligonucleotide
aucggcagcacgucaucug

SEQ ID NO: 1607973 - RNA, 19 nt, Artificial Sequence
  Description of Artificial Sequence: Synthetic oligonucleotide
cucgcgagcacgccagccg

SEQ ID NO: 1607974 - RNA, 19 nt, Artificial Sequence
  Description of Artificial Sequence: Synthetic oligonucleotide
ggcgucggccacuacacgg

SEQ ID NO: 1607975 - RNA, 19 nt, Artificial Sequence
  Description of Artificial Sequence: Synthetic oligonucleotide
cagggcguagaccucgggc

SEQ ID NO: 1607976 - RNA, 19 nt, Artificial Sequence
  Description of Artificial Sequence: Synthetic oligonucleotide
gugaggguaggcgaaaauc

SEQ ID NO: 1607977 - RNA, 19 nt, Artificial Sequence
  Description of Artificial Sequence: Synthetic oligonucleotide
gaaggagcagcgccacaug

SEQ ID NO: 1607978 - RNA, 19 nt, Artificial Sequence
  Description of Artificial Sequence: Synthetic oligonucleotide
ggagcagcgccacauguug

SEQ ID NO: 1607979 - RNA, 19 nt, Artificial Sequence
  Description of Artificial Sequence: Synthetic oligonucleotide
ucaucugagggaggcguug

SEQ ID NO: 1607980 - RNA, 19 nt, Artificial Sequence
  Description of Artificial Sequence: Synthetic oligonucleotide
gguaggcgaaaaucggcag

SEQ ID NO: 1607981 - RNA, 19 nt, Artificial Sequence
  Description of Artificial Sequence: Synthetic oligonucleotide
gucuaggcaauaauccuca

SEQ ID NO: 1607982 - RNA, 19 nt, Artificial Sequence
  Description of Artificial Sequence: Synthetic oligonucleotide
gcauaacuuagcucuguug

SEQ ID NO: 1607983 - RNA, 19 nt, Artificial Sequence
  Description of Artificial Sequence: Synthetic oligonucleotide
uguccacggcccaugcaga

SEQ ID NO: 1607984 - RNA, 19 nt, Artificial Sequence
  Description of Artificial Sequence: Synthetic oligonucleotide
acugauuugcccagcuugu

SEQ ID NO: 1607985 - RNA, 19 nt, Artificial Sequence
  Description of Artificial Sequence: Synthetic oligonucleotide
ucuccgcggucgaaggagc

SEQ ID NO: 1607986 - RNA, 19 nt, Artificial Sequence
  Description of Artificial Sequence: Synthetic oligonucleotide
uccacucucgguagccgac

SEQ ID NO: 1607987 - RNA, 19 nt, Artificial Sequence
  Description of Artificial Sequence: Synthetic oligonucleotide
cuuggcgucggccacuaca

SEQ ID NO: 1607988 - RNA, 19 nt, Artificial Sequence
  Description of Artificial Sequence: Synthetic oligonucleotide
uucaaucuccaggauuauc

SEQ ID NO: 1607989 - RNA, 19 nt, Artificial Sequence
  Description of Artificial Sequence: Synthetic oligonucleotide
uuauccucucugagccaug

SEQ ID NO: 1607990 - RNA, 19 nt, Artificial Sequence
  Description of Artificial Sequence: Synthetic oligonucleotide
guagcacucgaagcccucg

SEQ ID NO: 1607991 - RNA, 19 nt, Artificial Sequence
  Description of Artificial Sequence: Synthetic oligonucleotide
gaacucgcugauccggauc

SEQ ID NO: 1607992 - RNA, 19 nt, Artificial Sequence
  Description of Artificial Sequence: Synthetic oligonucleotide
guacucgcagccccgguac

SEQ ID NO: 1607993 - RNA, 19 nt, Artificial Sequence
  Description of Artificial Sequence: Synthetic oligonucleotide
ucauggucgaggggacagg

SEQ ID NO: 1607994 - RNA, 19 nt, Artificial Sequence
  Description of Artificial Sequence: Synthetic oligonucleotide
gacagguagcggcauaacu

SEQ ID NO: 1607995 - RNA, 19 nt, Artificial Sequence
  Description of Artificial Sequence: Synthetic oligonucleotide
ggaggugagcacugcuugg

SEQ ID NO: 1607996 - RNA, 19 nt, Artificial Sequence
  Description of Artificial Sequence: Synthetic oligonucleotide
caggcgagagaggucaggc

SEQ ID NO: 1607997 - RNA, 19 nt, Artificial Sequence
  Description of Artificial Sequence: Synthetic oligonucleotide
gucguagcacucgaagccc

SEQ ID NO: 1607998 - RNA, 19 nt, Artificial Sequence
  Description of Artificial Sequence: Synthetic oligonucleotide
gccgguaaagauguacagg

SEQ ID NO: 1607999 - RNA, 19 nt, Artificial Sequence
  Description of Artificial Sequence: Synthetic oligonucleotide
guagcggcauaacuuagcu

SEQ ID NO: 1608000 - RNA, 19 nt, Artificial Sequence
  Description of Artificial Sequence: Synthetic oligonucleotide
agcagcgccgaccuuguuu

SEQ ID NO: 1608001 - RNA, 19 nt, Artificial Sequence
  Description of Artificial Sequence: Synthetic oligonucleotide
auguacagguaaccgucau

SEQ ID NO: 1608002 - RNA, 19 nt, Artificial Sequence
  Description of Artificial Sequence: Synthetic oligonucleotide
ccgucauacccaaagagca

SEQ ID NO: 1608003 - RNA, 19 nt, Artificial Sequence
  Description of Artificial Sequence: Synthetic oligonucleotide
cacgccagccguaguugcg

SEQ ID NO: 1608004 - RNA, 19 nt, Artificial Sequence
  Description of Artificial Sequence: Synthetic oligonucleotide
auccacucucgguagccga

SEQ ID NO: 1608005 - RNA, 19 nt, Artificial Sequence
  Description of Artificial Sequence: Synthetic oligonucleotide
gucuccgcggucgaaggag

SEQ ID NO: 1608006 - RNA, 19 nt, Artificial Sequence
  Description of Artificial Sequence: Synthetic oligonucleotide
agaccucgggccgcgcucc

SEQ ID NO: 1608007 - RNA, 19 nt, Artificial Sequence
  Description of Artificial Sequence: Synthetic oligonucleotide
aauggguugucgggcggga

SEQ ID NO: 1608008 - RNA, 19 nt, Artificial Sequence
  Description of Artificial Sequence: Synthetic oligonucleotide
gaagcccucgcgagcacgc

SEQ ID NO: 1608009 - RNA, 19 nt, Artificial Sequence
  Description of Artificial Sequence: Synthetic oligonucleotide
aguagacauacagcuugcu

SEQ ID NO: 1608010 - RNA, 19 nt, Artificial Sequence
  Description of Artificial Sequence: Synthetic oligonucleotide
gucguccacgaauggguug

SEQ ID NO: 1608011 - RNA, 19 nt, Artificial Sequence
  Description of Artificial Sequence: Synthetic oligonucleotide
ugacugauuugcccagcuu

SEQ ID NO: 1608012 - RNA, 19 nt, Artificial Sequence
  Description of Artificial Sequence: Synthetic oligonucleotide
caucagucgcccacucaug

SEQ ID NO: 1608013 - RNA, 19 nt, Artificial Sequence
  Description of Artificial Sequence: Synthetic oligonucleotide
ggcugguucuucaaucucc

SEQ ID NO: 1608014 - RNA, 19 nt, Artificial Sequence
  Description of Artificial Sequence: Synthetic oligonucleotide
uggguugucgggcgggaua

SEQ ID NO: 1608015 - RNA, 19 nt, Artificial Sequence
  Description of Artificial Sequence: Synthetic oligonucleotide
aagcccucgcgagcacgcc

SEQ ID NO: 1608016 - RNA, 19 nt, Artificial Sequence
  Description of Artificial Sequence: Synthetic oligonucleotide
gacaucagucgcccacuca

SEQ ID NO: 1608017 - RNA, 19 nt, Artificial Sequence
  Description of Artificial Sequence: Synthetic oligonucleotide
ucgcgagcacgccagccgu

SEQ ID NO: 1608018 - RNA, 19 nt, Artificial Sequence
  Description of Artificial Sequence: Synthetic oligonucleotide
aacaggcggccacggccag

SEQ ID NO: 1608019 - RNA, 19 nt, Artificial Sequence
  Description of Artificial Sequence: Synthetic oligonucleotide
uacgguagggcgggccgcg

SEQ ID NO: 1608020 - RNA, 19 nt, Artificial Sequence
  Description of Artificial Sequence: Synthetic oligonucleotide
acggcccagguuugaguuc

SEQ ID NO: 1608021 - RNA, 19 nt, Artificial Sequence
  Description of Artificial Sequence: Synthetic oligonucleotide
acucgcagccccgguacac

SEQ ID NO: 1608022 - RNA, 19 nt, Artificial Sequence
  Description of Artificial Sequence: Synthetic oligonucleotide
ugaacucgcugauccggau

SEQ ID NO: 1608023 - RNA, 19 nt, Artificial Sequence
  Description of Artificial Sequence: Synthetic oligonucleotide
agguaaccgucauacccaa

SEQ ID NO: 1608024 - RNA, 19 nt, Artificial Sequence
  Description of Artificial Sequence: Synthetic oligonucleotide
auccggauccacucucggu

SEQ ID NO: 1608025 - RNA, 19 nt, Artificial Sequence
  Description of Artificial Sequence: Synthetic oligonucleotide
ccacgaauggguugucggg

SEQ ID NO: 1608026 - RNA, 19 nt, Artificial Sequence
  Description of Artificial Sequence: Synthetic oligonucleotide
acgucaaugcgcagcaccu

SEQ ID NO: 1608027 - RNA, 19 nt, Artificial Sequence
  Description of Artificial Sequence: Synthetic oligonucleotide
uagcggcauaacuuagcuc

SEQ ID NO: 1608028 - RNA, 19 nt, Artificial Sequence
  Description of Artificial Sequence: Synthetic oligonucleotide
uagaccucgggccgcgcuc

SEQ ID NO: 1608029 - RNA, 19 nt, Artificial Sequence
  Description of Artificial Sequence: Synthetic oligonucleotide
ggguuucgaagaccauugg

SEQ ID NO: 1608030 - RNA, 19 nt, Artificial Sequence
  Description of Artificial Sequence: Synthetic oligonucleotide
uaggccaggcaccguccgc

SEQ ID NO: 1608031 - RNA, 19 nt, Artificial Sequence
  Description of Artificial Sequence: Synthetic oligonucleotide
uugcgcacgcccagggcgu

SEQ ID NO: 1608032 - RNA, 19 nt, Artificial Sequence
  Description of Artificial Sequence: Synthetic oligonucleotide
acgccagccguaguugcgg

SEQ ID NO: 1608033 - RNA, 19 nt, Artificial Sequence
  Description of Artificial Sequence: Synthetic oligonucleotide
gauuggaggcugguucuuc

SEQ ID NO: 1608034 - RNA, 19 nt, Artificial Sequence
  Description of Artificial Sequence: Synthetic oligonucleotide
gaacaggcggccacggcca

SEQ ID NO: 1608035 - RNA, 19 nt, Artificial Sequence
  Description of Artificial Sequence: Synthetic oligonucleotide
cuccaggcgagagagguca

SEQ ID NO: 1608036 - RNA, 19 nt, Artificial Sequence
  Description of Artificial Sequence: Synthetic oligonucleotide
gcggucguagcacucgaag

SEQ ID NO: 1608037 - RNA, 19 nt, Artificial Sequence
  Description of Artificial Sequence: Synthetic oligonucleotide
cacucucgguagccgaccc

SEQ ID NO: 1608038 - RNA, 19 nt, Artificial Sequence
  Description of Artificial Sequence: Synthetic oligonucleotide
aggagaugauguauggaua

SEQ ID NO: 1608039 - RNA, 19 nt, Artificial Sequence
  Description of Artificial Sequence: Synthetic oligonucleotide
augauccacgguguucuca

SEQ ID NO: 1608040 - RNA, 19 nt, Artificial Sequence
  Description of Artificial Sequence: Synthetic oligonucleotide
gguagcggcauaacuuagc

SEQ ID NO: 1608041 - RNA, 19 nt, Artificial Sequence
  Description of Artificial Sequence: Synthetic oligonucleotide
gugauuggaggcugguucu

SEQ ID NO: 1608042 - RNA, 19 nt, Artificial Sequence
  Description of Artificial Sequence: Synthetic oligonucleotide
aggcgagagaggucaggca

SEQ ID NO: 1608043 - RNA, 19 nt, Artificial Sequence
  Description of Artificial Sequence: Synthetic oligonucleotide
cagcacgucaucugaggga

SEQ ID NO: 1608044 - RNA, 19 nt, Artificial Sequence
  Description of Artificial Sequence: Synthetic oligonucleotide
agcacgccagccguaguug

SEQ ID NO: 1608045 - RNA, 19 nt, Artificial Sequence
  Description of Artificial Sequence: Synthetic oligonucleotide
uccgcggucgaaggagcag

SEQ ID NO: 1608046 - RNA, 19 nt, Artificial Sequence
  Description of Artificial Sequence: Synthetic oligonucleotide
guaccauagcaacaggguu

SEQ ID NO: 1608047 - RNA, 19 nt, Artificial Sequence
  Description of Artificial Sequence: Synthetic oligonucleotide
cugauuugcccagcuugug

SEQ ID NO: 1608048 - RNA, 19 nt, Artificial Sequence
  Description of Artificial Sequence: Synthetic oligonucleotide
ccccgguacacguagcccc

SEQ ID NO: 1608049 - RNA, 19 nt, Artificial Sequence
  Description of Artificial Sequence: Synthetic oligonucleotide
guugggguacucgcagccc

SEQ ID NO: 1608050 - RNA, 19 nt, Artificial Sequence
  Description of Artificial Sequence: Synthetic oligonucleotide
agucgcccacucaugaagu

SEQ ID NO: 1608051 - RNA, 19 nt, Artificial Sequence
  Description of Artificial Sequence: Synthetic oligonucleotide
aggcaauaauccucacaua

SEQ ID NO: 1608052 - RNA, 19 nt, Artificial Sequence
  Description of Artificial Sequence: Synthetic oligonucleotide
uacucgcagccccgguaca

SEQ ID NO: 1608053 - RNA, 19 nt, Artificial Sequence
  Description of Artificial Sequence: Synthetic oligonucleotide
auccccggcauguaccaua

SEQ ID NO: 1608054 - RNA, 19 nt, Artificial Sequence
  Description of Artificial Sequence: Synthetic oligonucleotide
gcagccccgguacacguag

SEQ ID NO: 1608055 - RNA, 19 nt, Artificial Sequence
  Description of Artificial Sequence: Synthetic oligonucleotide
cucgcagccccgguacacg

SEQ ID NO: 1608056 - RNA, 19 nt, Artificial Sequence
  Description of Artificial Sequence: Synthetic oligonucleotide
ggugagcacugcuuggcuc

SEQ ID NO: 1608057 - RNA, 19 nt, Artificial Sequence
  Description of Artificial Sequence: Synthetic oligonucleotide
agguagcggcauaacuuag

SEQ ID NO: 1608058 - RNA, 19 nt, Artificial Sequence
  Description of Artificial Sequence: Synthetic oligonucleotide
gggcguagaccucgggccg

SEQ ID NO: 1608059 - RNA, 19 nt, Artificial Sequence
  Description of Artificial Sequence: Synthetic oligonucleotide
gccaucgccgguaaagaug

SEQ ID NO: 1608060 - RNA, 19 nt, Artificial Sequence
  Description of Artificial Sequence: Synthetic oligonucleotide
gacucugaacucgcugauc

SEQ ID NO: 1608061 - RNA, 19 nt, Artificial Sequence
  Description of Artificial Sequence: Synthetic oligonucleotide
uacuuccacuggccugucu

SEQ ID NO: 1608062 - RNA, 19 nt, Artificial Sequence
  Description of Artificial Sequence: Synthetic oligonucleotide
gaucuccggccaucccgcc

SEQ ID NO: 1608063 - RNA, 19 nt, Artificial Sequence
  Description of Artificial Sequence: Synthetic oligonucleotide
uccggccaucccgccaucg

SEQ ID NO: 1608064 - RNA, 19 nt, Artificial Sequence
  Description of Artificial Sequence: Synthetic oligonucleotide
ucgcagccccgguacacgu

SEQ ID NO: 1608065 - RNA, 19 nt, Artificial Sequence
  Description of Artificial Sequence: Synthetic oligonucleotide
cucgaagcccucgcgagca

SEQ ID NO: 1608066 - RNA, 19 nt, Artificial Sequence
  Description of Artificial Sequence: Synthetic oligonucleotide
ggauccacucucgguagcc

SEQ ID NO: 1608067 - RNA, 19 nt, Artificial Sequence
  Description of Artificial Sequence: Synthetic oligonucleotide
ggguaggcgaaaaucggca

SEQ ID NO: 1608068 - RNA, 19 nt, Artificial Sequence
  Description of Artificial Sequence: Synthetic oligonucleotide
caggugucgaaagaggccu

SEQ ID NO: 1608069 - RNA, 19 nt, Artificial Sequence
  Description of Artificial Sequence: Synthetic oligonucleotide
agcgccgaccuuguuuugu

SEQ ID NO: 1608070 - RNA, 19 nt, Artificial Sequence
  Description of Artificial Sequence: Synthetic oligonucleotide
gagaugauguauggauagu

SEQ ID NO: 1608071 - RNA, 19 nt, Artificial Sequence
  Description of Artificial Sequence: Synthetic oligonucleotide
caugauccacgguguucuc

SEQ ID NO: 1608072 - RNA, 19 nt, Artificial Sequence
  Description of Artificial Sequence: Synthetic oligonucleotide
gucgaaggagcagcgccac

SEQ ID NO: 1608073 - RNA, 19 nt, Artificial Sequence
  Description of Artificial Sequence: Synthetic oligonucleotide
guagggcgggccgcgcucg

SEQ ID NO: 1608074 - RNA, 19 nt, Artificial Sequence
  Description of Artificial Sequence: Synthetic oligonucleotide
aggugucgaaagaggccuc

SEQ ID NO: 1608075 - RNA, 19 nt, Artificial Sequence
  Description of Artificial Sequence: Synthetic oligonucleotide
agcccucgcgagcacgcca

SEQ ID NO: 1608076 - RNA, 19 nt, Artificial Sequence
  Description of Artificial Sequence: Synthetic oligonucleotide
gcgggauacgguagggcgg

SEQ ID NO: 1608077 - RNA, 19 nt, Artificial Sequence
  Description of Artificial Sequence: Synthetic oligonucleotide
ucgaggggacaggugucga

SEQ ID NO: 1608078 - RNA, 19 nt, Artificial Sequence
  Description of Artificial Sequence: Synthetic oligonucleotide
ugauuggaggcugguucuu

SEQ ID NO: 1608079 - RNA, 19 nt, Artificial Sequence
  Description of Artificial Sequence: Synthetic oligonucleotide
gucgcccacucaugaaguc

SEQ ID NO: 1608080 - RNA, 19 nt, Artificial Sequence
  Description of Artificial Sequence: Synthetic oligonucleotide
cgucauacccaaagagcag

SEQ ID NO: 1608081 - RNA, 19 nt, Artificial Sequence
  Description of Artificial Sequence: Synthetic oligonucleotide
guccucugcaaaggagaug

SEQ ID NO: 1608082 - RNA, 19 nt, Artificial Sequence
  Description of Artificial Sequence: Synthetic oligonucleotide
ccaggauuauccucucuga

SEQ ID NO: 1608083 - RNA, 19 nt, Artificial Sequence
  Description of Artificial Sequence: Synthetic oligonucleotide
gugucgaaagaggccucug

SEQ ID NO: 1608084 - RNA, 19 nt, Artificial Sequence
  Description of Artificial Sequence: Synthetic oligonucleotide
cagcccuuggcgucggcca

SEQ ID NO: 1608085 - RNA, 19 nt, Artificial Sequence
  Description of Artificial Sequence: Synthetic oligonucleotide
cucguugaccaacaggcuu

SEQ ID NO: 1608086 - RNA, 19 nt, Artificial Sequence
  Description of Artificial Sequence: Synthetic oligonucleotide
ccaaacuucccaaaaggau

SEQ ID NO: 1608087 - RNA, 19 nt, Artificial Sequence
  Description of Artificial Sequence: Synthetic oligonucleotide
ccaaaaggaucuccggcca

SEQ ID NO: 1608088 - RNA, 19 nt, Artificial Sequence
  Description of Artificial Sequence: Synthetic oligonucleotide
ggauggaaggcaaggccca

SEQ ID NO: 1608089 - RNA, 19 nt, Artificial Sequence
  Description of Artificial Sequence: Synthetic oligonucleotide
aggccugggaaagcacaug

SEQ ID NO: 1608090 - RNA, 19 nt, Artificial Sequence
  Description of Artificial Sequence: Synthetic oligonucleotide
ucguugcgguccacgucaa

SEQ ID NO: 1608091 - RNA, 19 nt, Artificial Sequence
  Description of Artificial Sequence: Synthetic oligonucleotide
ggauacgguagggcgggcc

SEQ ID NO: 1608092 - RNA, 19 nt, Artificial Sequence
  Description of Artificial Sequence: Synthetic oligonucleotide
gaccuuguuuugugcauuu

SEQ ID NO: 1608093 - RNA, 19 nt, Artificial Sequence
  Description of Artificial Sequence: Synthetic oligonucleotide
agccaugauccacgguguu

SEQ ID NO: 1608094 - RNA, 19 nt, Artificial Sequence
  Description of Artificial Sequence: Synthetic oligonucleotide
cgcccacucaugaagucgc

SEQ ID NO: 1608095 - RNA, 19 nt, Artificial Sequence
  Description of Artificial Sequence: Synthetic oligonucleotide
gggaaagcacaugucuguc

SEQ ID NO: 1608096 - RNA, 19 nt, Artificial Sequence
  Description of Artificial Sequence: Synthetic oligonucleotide
cuggcccacguccccgcag

SEQ ID NO: 1608097 - RNA, 19 nt, Artificial Sequence
  Description of Artificial Sequence: Synthetic oligonucleotide
ggguugucgggcgggauac

SEQ ID NO: 1608098 - RNA, 19 nt, Artificial Sequence
  Description of Artificial Sequence: Synthetic oligonucleotide
gcgaaaaucggcagcacgu

SEQ ID NO: 1608099 - RNA, 19 nt, Artificial Sequence
  Description of Artificial Sequence: Synthetic oligonucleotide
cggccagugccagacaucg

SEQ ID NO: 1608100 - RNA, 19 nt, Artificial Sequence
  Description of Artificial Sequence: Synthetic oligonucleotide
cgaaagaggccucugcaga

SEQ ID NO: 1608101 - RNA, 19 nt, Artificial Sequence
  Description of Artificial Sequence: Synthetic oligonucleotide
cccgccaucgccgguaaag

SEQ ID NO: 1608102 - RNA, 19 nt, Artificial Sequence
  Description of Artificial Sequence: Synthetic oligonucleotide
gagggaggcguuggcgcac

SEQ ID NO: 1608103 - RNA, 19 nt, Artificial Sequence
  Description of Artificial Sequence: Synthetic oligonucleotide
gcacgccagccguaguugc

SEQ ID NO: 1608104 - RNA, 19 nt, Artificial Sequence
  Description of Artificial Sequence: Synthetic oligonucleotide
acggcccaugcagacuuca

SEQ ID NO: 1608105 - RNA, 19 nt, Artificial Sequence
  Description of Artificial Sequence: Synthetic oligonucleotide
aucgggucuccgcggucga

SEQ ID NO: 1608106 - RNA, 19 nt, Artificial Sequence
  Description of Artificial Sequence: Synthetic oligonucleotide
ggccugggaaagcacaugu

SEQ ID NO: 1608107 - RNA, 19 nt, Artificial Sequence
  Description of Artificial Sequence: Synthetic oligonucleotide
gaccucgggccgcgcuccg

SEQ ID NO: 1608108 - RNA, 19 nt, Artificial Sequence
  Description of Artificial Sequence: Synthetic oligonucleotide
cagccguaguugcggcccc

SEQ ID NO: 1608109 - RNA, 19 nt, Artificial Sequence
  Description of Artificial Sequence: Synthetic oligonucleotide
ccaucgccgguaaagaugu

SEQ ID NO: 1608110 - RNA, 19 nt, Artificial Sequence
  Description of Artificial Sequence: Synthetic oligonucleotide
ggcgcacagcuugcggucg

SEQ ID NO: 1608111 - RNA, 19 nt, Artificial Sequence
  Description of Artificial Sequence: Synthetic oligonucleotide
uaguugcggccccgcucca

SEQ ID NO: 1608112 - RNA, 19 nt, Artificial Sequence
  Description of Artificial Sequence: Synthetic oligonucleotide
agggacagguagcggcaua

SEQ ID NO: 1608113 - RNA, 19 nt, Artificial Sequence
  Description of Artificial Sequence: Synthetic oligonucleotide
ggucgaaggagcagcgcca

SEQ ID NO: 1608114 - RNA, 19 nt, Artificial Sequence
  Description of Artificial Sequence: Synthetic oligonucleotide
cauugagguugggguacuc

SEQ ID NO: 1608115 - RNA, 19 nt, Artificial Sequence
  Description of Artificial Sequence: Synthetic oligonucleotide
agccguaguugcggccccg

SEQ ID NO: 1608116 - RNA, 19 nt, Artificial Sequence
  Description of Artificial Sequence: Synthetic oligonucleotide
gagcacgccagccguaguu

SEQ ID NO: 1608117 - RNA, 19 nt, Artificial Sequence
  Description of Artificial Sequence: Synthetic oligonucleotide
ggccacuacacggcccagg

SEQ ID NO: 1608118 - RNA, 19 nt, Artificial Sequence
  Description of Artificial Sequence: Synthetic oligonucleotide
cacgcucauccccuuccca

SEQ ID NO: 1608119 - RNA, 19 nt, Artificial Sequence
  Description of Artificial Sequence: Synthetic oligonucleotide
gcgccgaccuuguuuugug

SEQ ID NO: 1608120 - RNA, 19 nt, Artificial Sequence
  Description of Artificial Sequence: Synthetic oligonucleotide
cagccccgguacacguagc

SEQ ID NO: 1608121 - RNA, 19 nt, Artificial Sequence
  Description of Artificial Sequence: Synthetic oligonucleotide
ccggcauguaccauagcaa

SEQ ID NO: 1608122 - RNA, 19 nt, Artificial Sequence
  Description of Artificial Sequence: Synthetic oligonucleotide
ggacaucagucgcccacuc

SEQ ID NO: 1608123 - RNA, 19 nt, Artificial Sequence
  Description of Artificial Sequence: Synthetic oligonucleotide
gcgguggcuuccauccccg

SEQ ID NO: 1608124 - RNA, 19 nt, Artificial Sequence
  Description of Artificial Sequence: Synthetic oligonucleotide
cgaauggguugucgggcgg

SEQ ID NO: 1608125 - RNA, 19 nt, Artificial Sequence
  Description of Artificial Sequence: Synthetic oligonucleotide
gccaugauccacgguguuc

SEQ ID NO: 1608126 - RNA, 19 nt, Artificial Sequence
  Description of Artificial Sequence: Synthetic oligonucleotide
cacggcccagguuugaguu

SEQ ID NO: 1608127 - RNA, 19 nt, Artificial Sequence
  Description of Artificial Sequence: Synthetic oligonucleotide
guagaccucgggccgcgcu

SEQ ID NO: 1608128 - RNA, 19 nt, Artificial Sequence
  Description of Artificial Sequence: Synthetic oligonucleotide
cgcugauccggauccacuc

SEQ ID NO: 1608129 - RNA, 19 nt, Artificial Sequence
  Description of Artificial Sequence: Synthetic oligonucleotide
gggucguccacgaaugggu

SEQ ID NO: 1608130 - RNA, 19 nt, Artificial Sequence
  Description of Artificial Sequence: Synthetic oligonucleotide
cuccgcggucgaaggagca

SEQ ID NO: 1608131 - RNA, 19 nt, Artificial Sequence
  Description of Artificial Sequence: Synthetic oligonucleotide
cgggauacgguagggcggg

SEQ ID NO: 1608132 - RNA, 19 nt, Artificial Sequence
  Description of Artificial Sequence: Synthetic oligonucleotide
gggguacucgcagccccgg

SEQ ID NO: 1608133 - RNA, 19 nt, Artificial Sequence
  Description of Artificial Sequence: Synthetic oligonucleotide
cauggucgaggggacaggu

SEQ ID NO: 1608134 - RNA, 19 nt, Artificial Sequence
  Description of Artificial Sequence: Synthetic oligonucleotide
gcgagcacgccagccguag

SEQ ID NO: 1608135 - RNA, 19 nt, Artificial Sequence
  Description of Artificial Sequence: Synthetic oligonucleotide
caaaaggaucuccggccau

SEQ ID NO: 1608136 - RNA, 19 nt, Artificial Sequence
  Description of Artificial Sequence: Synthetic oligonucleotide
acucgcugauccggaucca

SEQ ID NO: 1608137 - RNA, 19 nt, Artificial Sequence
  Description of Artificial Sequence: Synthetic oligonucleotide
ggaggcguuggcgcacagc

SEQ ID NO: 1608138 - RNA, 19 nt, Artificial Sequence
  Description of Artificial Sequence: Synthetic oligonucleotide
guucucucggagggacauc

SEQ ID NO: 1608139 - RNA, 19 nt, Artificial Sequence
  Description of Artificial Sequence: Synthetic oligonucleotide
gcagcccuuggcgucggcc

SEQ ID NO: 1608140 - RNA, 19 nt, Artificial Sequence
  Description of Artificial Sequence: Synthetic oligonucleotide
cguaguugcggccccgcuc

SEQ ID NO: 1608141 - RNA, 19 nt, Artificial Sequence
  Description of Artificial Sequence: Synthetic oligonucleotide
ggacagguagcggcauaac

SEQ ID NO: 1608142 - RNA, 19 nt, Artificial Sequence
  Description of Artificial Sequence: Synthetic oligonucleotide
cguugaccaacaggcuugg

SEQ ID NO: 1608143 - RNA, 19 nt, Artificial Sequence
  Description of Artificial Sequence: Synthetic oligonucleotide
gcagcgccgaccuuguuuu

SEQ ID NO: 1608144 - RNA, 19 nt, Artificial Sequence
  Description of Artificial Sequence: Synthetic oligonucleotide
agggaggcguuggcgcaca

SEQ ID NO: 1608145 - RNA, 19 nt, Artificial Sequence
  Description of Artificial Sequence: Synthetic oligonucleotide
cgcggucgaaggagcagcg

SEQ ID NO: 1608146 - RNA, 19 nt, Artificial Sequence
  Description of Artificial Sequence: Synthetic oligonucleotide
gggcgggccgcgcucguug

SEQ ID NO: 1608147 - RNA, 19 nt, Artificial Sequence
  Description of Artificial Sequence: Synthetic oligonucleotide
ccgcggucgaaggagcagc

SEQ ID NO: 1608148 - RNA, 19 nt, Artificial Sequence
  Description of Artificial Sequence: Synthetic oligonucleotide
gcggcauaacuuagcucug

SEQ ID NO: 1608149 - RNA, 19 nt, Artificial Sequence
  Description of Artificial Sequence: Synthetic oligonucleotide
gcugauccggauccacucu

SEQ ID NO: 1608150 - RNA, 19 nt, Artificial Sequence
  Description of Artificial Sequence: Synthetic oligonucleotide
uagggcgggccgcgcucgu

SEQ ID NO: 1608151 - RNA, 19 nt, Artificial Sequence
  Description of Artificial Sequence: Synthetic oligonucleotide
cagagacucugaacucgcu

SEQ ID NO: 1608152 - RNA, 19 nt, Artificial Sequence
  Description of Artificial Sequence: Synthetic oligonucleotide
ggcauaacuuagcucuguu

SEQ ID NO: 1608153 - RNA, 19 nt, Artificial Sequence
  Description of Artificial Sequence: Synthetic oligonucleotide
cacggcccaugcagacuuc

SEQ ID NO: 1608154 - RNA, 19 nt, Artificial Sequence
  Description of Artificial Sequence: Synthetic oligonucleotide
ggcguagaccucgggccgc

SEQ ID NO: 1608155 - RNA, 19 nt, Artificial Sequence
  Description of Artificial Sequence: Synthetic oligonucleotide
gggcgggauacgguagggc

SEQ ID NO: 1608156 - RNA, 19 nt, Artificial Sequence
  Description of Artificial Sequence: Synthetic oligonucleotide
cagcgccgaccuuguuuug

SEQ ID NO: 1608157 - RNA, 19 nt, Artificial Sequence
  Description of Artificial Sequence: Synthetic oligonucleotide
gcccucgcgagcacgccag

SEQ ID NO: 1608158 - RNA, 19 nt, Artificial Sequence
  Description of Artificial Sequence: Synthetic oligonucleotide
gccgcgcucguugcggucc

SEQ ID NO: 1608159 - RNA, 19 nt, Artificial Sequence
  Description of Artificial Sequence: Synthetic oligonucleotide
ccgcagaacaggcggccac

SEQ ID NO: 1608160 - RNA, 19 nt, Artificial Sequence
  Description of Artificial Sequence: Synthetic oligonucleotide
ccacucucgguagccgacc

SEQ ID NO: 1608161 - RNA, 19 nt, Artificial Sequence
  Description of Artificial Sequence: Synthetic oligonucleotide
ggucgaggggacagguguc

SEQ ID NO: 1608162 - RNA, 19 nt, Artificial Sequence
  Description of Artificial Sequence: Synthetic oligonucleotide
cgccacauguugcgcacgc

SEQ ID NO: 1608163 - RNA, 19 nt, Artificial Sequence
  Description of Artificial Sequence: Synthetic oligonucleotide
caucccgccaucgccggua

SEQ ID NO: 1608164 - RNA, 19 nt, Artificial Sequence
  Description of Artificial Sequence: Synthetic oligonucleotide
gcguagaccucgggccgcg

SEQ ID NO: 1608165 - RNA, 19 nt, Artificial Sequence
  Description of Artificial Sequence: Synthetic oligonucleotide
cggccaucccgccaucgcc

SEQ ID NO: 1608166 - RNA, 19 nt, Artificial Sequence
  Description of Artificial Sequence: Synthetic oligonucleotide
ggugucgaaagaggccucu

SEQ ID NO: 1608167 - RNA, 19 nt, Artificial Sequence
  Description of Artificial Sequence: Synthetic oligonucleotide
gccacauguugcgcacgcc

SEQ ID NO: 1608168 - RNA, 19 nt, Artificial Sequence
  Description of Artificial Sequence: Synthetic oligonucleotide
gcacgucaucugagggagg

SEQ ID NO: 1608169 - RNA, 19 nt, Artificial Sequence
  Description of Artificial Sequence: Synthetic oligonucleotide
ggcgggccgcgcucguugc

SEQ ID NO: 1608170 - RNA, 19 nt, Artificial Sequence
  Description of Artificial Sequence: Synthetic oligonucleotide
ucgggucuccgcggucgaa

SEQ ID NO: 1608171 - RNA, 19 nt, Artificial Sequence
  Description of Artificial Sequence: Synthetic oligonucleotide
ucccgccaucgccgguaaa

SEQ ID NO: 1608172 - RNA, 19 nt, Artificial Sequence
  Description of Artificial Sequence: Synthetic oligonucleotide
cuccaggauuauccucucu

SEQ ID NO: 1608173 - RNA, 19 nt, Artificial Sequence
  Description of Artificial Sequence: Synthetic oligonucleotide
cgaagcccucgcgagcacg

SEQ ID NO: 1608174 - RNA, 19 nt, Artificial Sequence
  Description of Artificial Sequence: Synthetic oligonucleotide
ccucgcgagcacgccagcc

SEQ ID NO: 1608175 - RNA, 19 nt, Artificial Sequence
  Description of Artificial Sequence: Synthetic oligonucleotide
gccagacaucgggucuccg

SEQ ID NO: 1608176 - RNA, 19 nt, Artificial Sequence
  Description of Artificial Sequence: Synthetic oligonucleotide
cgccgaccuuguuuugugc

SEQ ID NO: 1608177 - RNA, 19 nt, Artificial Sequence
  Description of Artificial Sequence: Synthetic oligonucleotide
cguagcacucgaagcccuc

SEQ ID NO: 1608178 - RNA, 19 nt, Artificial Sequence
  Description of Artificial Sequence: Synthetic oligonucleotide
ccauagcaacaggguuucg

SEQ ID NO: 1608179 - RNA, 19 nt, Artificial Sequence
  Description of Artificial Sequence: Synthetic oligonucleotide
cuucaaucuccaggauuau

SEQ ID NO: 1608180 - RNA, 19 nt, Artificial Sequence
  Description of Artificial Sequence: Synthetic oligonucleotide
gcggucgaaggagcagcgc

SEQ ID NO: 1608181 - RNA, 19 nt, Artificial Sequence
  Description of Artificial Sequence: Synthetic oligonucleotide
gccguaguugcggccccgc

SEQ ID NO: 1608182 - RNA, 19 nt, Artificial Sequence
  Description of Artificial Sequence: Synthetic oligonucleotide
gggacaucagucgcccacu

SEQ ID NO: 1608183 - RNA, 19 nt, Artificial Sequence
  Description of Artificial Sequence: Synthetic oligonucleotide
gcgggccgcgcucguugcg

SEQ ID NO: 1608184 - RNA, 19 nt, Artificial Sequence
  Description of Artificial Sequence: Synthetic oligonucleotide
gcuugcggucguagcacuc

SEQ ID NO: 1608185 - RNA, 19 nt, Artificial Sequence
  Description of Artificial Sequence: Synthetic oligonucleotide
cguuggcgcacagcuugcg

SEQ ID NO: 1608186 - RNA, 19 nt, Artificial Sequence
  Description of Artificial Sequence: Synthetic oligonucleotide
ugcgcacgcccagggcgua

SEQ ID NO: 1608187 - RNA, 19 nt, Artificial Sequence
  Description of Artificial Sequence: Synthetic oligonucleotide
cugagccaugauccacggu

SEQ ID NO: 1608188 - RNA, 19 nt, Artificial Sequence
  Description of Artificial Sequence: Synthetic oligonucleotide
gguaaccgucauacccaaa

SEQ ID NO: 1608189 - RNA, 19 nt, Artificial Sequence
  Description of Artificial Sequence: Synthetic oligonucleotide
gcucauggucgaggggaca

SEQ ID NO: 1608190 - RNA, 19 nt, Artificial Sequence
  Description of Artificial Sequence: Synthetic oligonucleotide
ccagugccagacaucgggu

SEQ ID NO: 1608191 - RNA, 19 nt, Artificial Sequence
  Description of Artificial Sequence: Synthetic oligonucleotide
aggcguuggcgcacagcuu

SEQ ID NO: 1608192 - RNA, 19 nt, Artificial Sequence
  Description of Artificial Sequence: Synthetic oligonucleotide
ccguccgcgaggggcgugg

SEQ ID NO: 1608193 - RNA, 19 nt, Artificial Sequence
  Description of Artificial Sequence: Synthetic oligonucleotide
cgggucuccgcggucgaag

SEQ ID NO: 1608194 - RNA, 19 nt, Artificial Sequence
  Description of Artificial Sequence: Synthetic oligonucleotide
gcacgcccagggcguagac

SEQ ID NO: 1608195 - RNA, 19 nt, Artificial Sequence
  Description of Artificial Sequence: Synthetic oligonucleotide
ccgcgcuccggggucgucc

SEQ ID NO: 1608196 - RNA, 19 nt, Artificial Sequence
  Description of Artificial Sequence: Synthetic oligonucleotide
gggauacgguagggcgggc

SEQ ID NO: 1608197 - RNA, 19 nt, Artificial Sequence
  Description of Artificial Sequence: Synthetic oligonucleotide
caucgccgguaaagaugua

SEQ ID NO: 1608198 - RNA, 19 nt, Artificial Sequence
  Description of Artificial Sequence: Synthetic oligonucleotide
gggccgcgcuccggggucg

SEQ ID NO: 1608199 - RNA, 19 nt, Artificial Sequence
  Description of Artificial Sequence: Synthetic oligonucleotide
ccgaccuuguuuugugcau

SEQ ID NO: 1608200 - RNA, 19 nt, Artificial Sequence
  Description of Artificial Sequence: Synthetic oligonucleotide
cgggcgggauacgguaggg

SEQ ID NO: 1608201 - RNA, 19 nt, Artificial Sequence
  Description of Artificial Sequence: Synthetic oligonucleotide
ccgccaucgccgguaaaga

SEQ ID NO: 1608202 - RNA, 19 nt, Artificial Sequence
  Description of Artificial Sequence: Synthetic oligonucleotide
cgggccgcgcucguugcgg

SEQ ID NO: 1608203 - RNA, 19 nt, Artificial Sequence
  Description of Artificial Sequence: Synthetic oligonucleotide
ggucguccacgaauggguu

SEQ ID NO: 1608204 - RNA, 19 nt, Artificial Sequence
  Description of Artificial Sequence: Synthetic oligonucleotide
guccgcgaggggcguggcu

SEQ ID NO: 1608205 - RNA, 19 nt, Artificial Sequence
  Description of Artificial Sequence: Synthetic oligonucleotide
cccucgcgagcacgccagc

SEQ ID NO: 1608206 - RNA, 19 nt, Artificial Sequence
  Description of Artificial Sequence: Synthetic oligonucleotide
ggccgcgcucguugcgguc

SEQ ID NO: 1608207 - RNA, 19 nt, Artificial Sequence
  Description of Artificial Sequence: Synthetic oligonucleotide
cgaaggagcagcgccacau

SEQ ID NO: 1608208 - RNA, 19 nt, Artificial Sequence
  Description of Artificial Sequence: Synthetic oligonucleotide
ccccggcauguaccauagc

SEQ ID NO: 1608209 - RNA, 19 nt, Artificial Sequence
  Description of Artificial Sequence: Synthetic oligonucleotide
ggguacucgcagccccggu

SEQ ID NO: 1608210 - RNA, 19 nt, Artificial Sequence
  Description of Artificial Sequence: Synthetic oligonucleotide
cuccggggucguccacgaa

SEQ ID NO: 1608211 - RNA, 19 nt, Artificial Sequence
  Description of Artificial Sequence: Synthetic oligonucleotide
cguccucugcaaaggagau

SEQ ID NO: 1608212 - RNA, 19 nt, Artificial Sequence
  Description of Artificial Sequence: Synthetic oligonucleotide
agggcgggccgcgcucguu

SEQ ID NO: 1608213 - RNA, 19 nt, Artificial Sequence
  Description of Artificial Sequence: Synthetic oligonucleotide
gcgcacgcccagggcguag

SEQ ID NO: 1608214 - RNA, 19 nt, Artificial Sequence
  Description of Artificial Sequence: Synthetic oligonucleotide
cccgcagaacaggcggcca

SEQ ID NO: 1608215 - RNA, 19 nt, Artificial Sequence
  Description of Artificial Sequence: Synthetic oligonucleotide
ccuuggcgucggccacuac

SEQ ID NO: 1608216 - RNA, 19 nt, Artificial Sequence
  Description of Artificial Sequence: Synthetic oligonucleotide
cauccccggcauguaccau

SEQ ID NO: 1608217 - RNA, 19 nt, Artificial Sequence
  Description of Artificial Sequence: Synthetic oligonucleotide
cguagaccucgggccgcgc

SEQ ID NO: 1608218 - RNA, 19 nt, Artificial Sequence
  Description of Artificial Sequence: Synthetic oligonucleotide
gggccgcgcucguugcggu

SEQ ID NO: 1608219 - RNA, 19 nt, Artificial Sequence
  Description of Artificial Sequence: Synthetic oligonucleotide
cgggccgcgcuccgggguc

SEQ ID NO: 1608220 - RNA, 19 nt, Artificial Sequence
  Description of Artificial Sequence: Synthetic oligonucleotide
gcgcuccggggucguccac

SEQ ID NO: 1608221 - RNA, 19 nt, Artificial Sequence
  Description of Artificial Sequence: Synthetic oligonucleotide
cguccacgaauggguuguc

SEQ ID NO: 1608222 - RNA, 19 nt, Artificial Sequence
  Description of Artificial Sequence: Synthetic oligonucleotide
cggcauaacuuagcucugu

SEQ ID NO: 1608223 - RNA, 19 nt, Artificial Sequence
  Description of Artificial Sequence: Synthetic oligonucleotide
cgccaucgccgguaaagau

SEQ ID NO: 1608224 - RNA, 19 nt, Artificial Sequence
  Description of Artificial Sequence: Synthetic oligonucleotide
ccguaguugcggccccgcu

SEQ ID NO: 1608225 - RNA, 19 nt, Artificial Sequence
  Description of Artificial Sequence: Synthetic oligonucleotide
cguccgcgaggggcguggc

SEQ ID NO: 1608226 - RNA, 19 nt, Artificial Sequence
  Description of Artificial Sequence: Synthetic oligonucleotide
cgaccuuguuuugugcauu

SEQ ID NO: 1608227 - RNA, 19 nt, Artificial Sequence
  Description of Artificial Sequence: Synthetic oligonucleotide
caccguccgcgaggggcgu

SEQ ID NO: 1608228 - RNA, 19 nt, Artificial Sequence
  Description of Artificial Sequence: Synthetic oligonucleotide
cccuuggcgucggccacua

SEQ ID NO: 1608229 - RNA, 19 nt, Artificial Sequence
  Description of Artificial Sequence: Synthetic oligonucleotide
cgcacgcccagggcguaga

SEQ ID NO: 1608230 - RNA, 19 nt, Artificial Sequence
  Description of Artificial Sequence: Synthetic oligonucleotide
cggccacuacacggcccag

SEQ ID NO: 1608231 - RNA, 19 nt, Artificial Sequence
  Description of Artificial Sequence: Synthetic oligonucleotide
cgcagccccgguacacgua

SEQ ID NO: 1608232 - RNA, 19 nt, Artificial Sequence
  Description of Artificial Sequence: Synthetic oligonucleotide
cgcgagcacgccagccgua

SEQ ID NO: 1608233 - RNA, 19 nt, Artificial Sequence
  Description of Artificial Sequence: Synthetic oligonucleotide
ccaucccgccaucgccggu

SEQ ID NO: 1608234 - RNA, 19 nt, Artificial Sequence
  Description of Artificial Sequence: Synthetic oligonucleotide
cgucaaugcgcagcaccuu

SEQ ID NO: 1608235 - RNA, 19 nt, Artificial Sequence
  Description of Artificial Sequence: Synthetic oligonucleotide
cgagcacgccagccguagu

SEQ ID NO: 1608236 - RNA, 19 nt, Artificial Sequence
  Description of Artificial Sequence: Synthetic oligonucleotide
gccgcgcuccggggucguc

SEQ ID NO: 1608237 - RNA, 19 nt, Artificial Sequence
  Description of Artificial Sequence: Synthetic oligonucleotide
ggccgcgcuccggggucgu

SEQ ID NO: 1608238 - RNA, 19 nt, Artificial Sequence
  Description of Artificial Sequence: Synthetic oligonucleotide
aaaagcauugucuucaaag

SEQ ID NO: 1608239 - RNA, 19 nt, Artificial Sequence
  Description of Artificial Sequence: Synthetic oligonucleotide
ugugauaaaucucuggugg

SEQ ID NO: 1608240 - RNA, 19 nt, Artificial Sequence
  Description of Artificial Sequence: Synthetic oligonucleotide
aaagcauugucuucaaagg

SEQ ID NO: 1608241 - RNA, 19 nt, Artificial Sequence
  Description of Artificial Sequence: Synthetic oligonucleotide
ugcacaucgauaaagccgg

SEQ ID NO: 1608242 - RNA, 19 nt, Artificial Sequence
  Description of Artificial Sequence: Synthetic oligonucleotide
uccgguuuaacucaggggc

SEQ ID NO: 1608243 - RNA, 19 nt, Artificial Sequence
  Description of Artificial Sequence: Synthetic oligonucleotide
agauccucaagucacggcc

SEQ ID NO: 1608244 - RNA, 19 nt, Artificial Sequence
  Description of Artificial Sequence: Synthetic oligonucleotide
ucgaguaccacaaagucug

SEQ ID NO: 1608245 - RNA, 19 nt, Artificial Sequence
  Description of Artificial Sequence: Synthetic oligonucleotide
ugcccuacgagacacacag

SEQ ID NO: 1608246 - RNA, 19 nt, Artificial Sequence
  Description of Artificial Sequence: Synthetic oligonucleotide
ucaccagagauguaagugg

SEQ ID NO: 1608247 - RNA, 19 nt, Artificial Sequence
  Description of Artificial Sequence: Synthetic oligonucleotide
uccucuccagccaagaucc

SEQ ID NO: 1608248 - RNA, 19 nt, Artificial Sequence
  Description of Artificial Sequence: Synthetic oligonucleotide
aaguguaccccaaggaccc

SEQ ID NO: 1608249 - RNA, 19 nt, Artificial Sequence
  Description of Artificial Sequence: Synthetic oligonucleotide
aagauccucaagucacggc

SEQ ID NO: 1608250 - RNA, 19 nt, Artificial Sequence
  Description of Artificial Sequence: Synthetic oligonucleotide
auggcaauugaagaggugg

SEQ ID NO: 1608251 - RNA, 19 nt, Artificial Sequence
  Description of Artificial Sequence: Synthetic oligonucleotide
uaugccugggucacggugg

SEQ ID NO: 1608252 - RNA, 19 nt, Artificial Sequence
  Description of Artificial Sequence: Synthetic oligonucleotide
caauugaagaggugggugg

SEQ ID NO: 1608253 - RNA, 19 nt, Artificial Sequence
  Description of Artificial Sequence: Synthetic oligonucleotide
aggcuauuagcccaucuac

SEQ ID NO: 1608254 - RNA, 19 nt, Artificial Sequence
  Description of Artificial Sequence: Synthetic oligonucleotide
cacaaugcggacauugucc

SEQ ID NO: 1608255 - RNA, 19 nt, Artificial Sequence
  Description of Artificial Sequence: Synthetic oligonucleotide
uaugccaucggcaaucauc

SEQ ID NO: 1608256 - RNA, 19 nt, Artificial Sequence
  Description of Artificial Sequence: Synthetic oligonucleotide
aagucaacaccaaauccac

SEQ ID NO: 1608257 - RNA, 19 nt, Artificial Sequence
  Description of Artificial Sequence: Synthetic oligonucleotide
caaguguaccccaaggacc

SEQ ID NO: 1608258 - RNA, 19 nt, Artificial Sequence
  Description of Artificial Sequence: Synthetic oligonucleotide
acaucgauaaagccgggag

SEQ ID NO: 1608259 - RNA, 19 nt, Artificial Sequence
  Description of Artificial Sequence: Synthetic oligonucleotide
ugcaacguaggcuauuagc

SEQ ID NO: 1608260 - RNA, 19 nt, Artificial Sequence
  Description of Artificial Sequence: Synthetic oligonucleotide
ugaggaaggaccuugugau

SEQ ID NO: 1608261 - RNA, 19 nt, Artificial Sequence
  Description of Artificial Sequence: Synthetic oligonucleotide
ugauaaaucucuggugggg

SEQ ID NO: 1608262 - RNA, 19 nt, Artificial Sequence
  Description of Artificial Sequence: Synthetic oligonucleotide
ucuucaaaggagcggaggu

SEQ ID NO: 1608263 - RNA, 19 nt, Artificial Sequence
  Description of Artificial Sequence: Synthetic oligonucleotide
aaugcccuacgagacacac

SEQ ID NO: 1608264 - RNA, 19 nt, Artificial Sequence
  Description of Artificial Sequence: Synthetic oligonucleotide
uugugauaaaucucuggug

SEQ ID NO: 1608265 - RNA, 19 nt, Artificial Sequence
  Description of Artificial Sequence: Synthetic oligonucleotide
uggcaauugaagagguggg

SEQ ID NO: 1608266 - RNA, 19 nt, Artificial Sequence
  Description of Artificial Sequence: Synthetic oligonucleotide
gauguaaguggccuggaca

SEQ ID NO: 1608267 - RNA, 19 nt, Artificial Sequence
  Description of Artificial Sequence: Synthetic oligonucleotide
acuagggcaaucccagaac

SEQ ID NO: 1608268 - RNA, 19 nt, Artificial Sequence
  Description of Artificial Sequence: Synthetic oligonucleotide
accaauucaccagagaugu

SEQ ID NO: 1608269 - RNA, 19 nt, Artificial Sequence
  Description of Artificial Sequence: Synthetic oligonucleotide
ugucuuggugccugcaacg

SEQ ID NO: 1608270 - RNA, 19 nt, Artificial Sequence
  Description of Artificial Sequence: Synthetic oligonucleotide
aaggcaacauggcaauuga

SEQ ID NO: 1608271 - RNA, 19 nt, Artificial Sequence
  Description of Artificial Sequence: Synthetic oligonucleotide
uaguguguaugccaucggc

SEQ ID NO: 1608272 - RNA, 19 nt, Artificial Sequence
  Description of Artificial Sequence: Synthetic oligonucleotide
ucggcaaucaucccauaga

SEQ ID NO: 1608273 - RNA, 19 nt, Artificial Sequence
  Description of Artificial Sequence: Synthetic oligonucleotide
uuaguguguaugccaucgg

SEQ ID NO: 1608274 - RNA, 19 nt, Artificial Sequence
  Description of Artificial Sequence: Synthetic oligonucleotide
acccaacaagcuuugggcg

SEQ ID NO: 1608275 - RNA, 19 nt, Artificial Sequence
  Description of Artificial Sequence: Synthetic oligonucleotide
uccacaccaauucaccaga

SEQ ID NO: 1608276 - RNA, 19 nt, Artificial Sequence
  Description of Artificial Sequence: Synthetic oligonucleotide
caguacaucgugaaaagca

SEQ ID NO: 1608277 - RNA, 19 nt, Artificial Sequence
  Description of Artificial Sequence: Synthetic oligonucleotide
ucuccagccaagauccuca

SEQ ID NO: 1608278 - RNA, 19 nt, Artificial Sequence
  Description of Artificial Sequence: Synthetic oligonucleotide
cuagggcaaucccagaacc

SEQ ID NO: 1608279 - RNA, 19 nt, Artificial Sequence
  Description of Artificial Sequence: Synthetic oligonucleotide
caagucacggcccagcuuc

SEQ ID NO: 1608280 - RNA, 19 nt, Artificial Sequence
  Description of Artificial Sequence: Synthetic oligonucleotide
ugaaugggcccuccaagug

SEQ ID NO: 1608281 - RNA, 19 nt, Artificial Sequence
  Description of Artificial Sequence: Synthetic oligonucleotide
ucgugagucgugccgaacc

SEQ ID NO: 1608282 - RNA, 19 nt, Artificial Sequence
  Description of Artificial Sequence: Synthetic oligonucleotide
cauggcuccgguuuaacuc

SEQ ID NO: 1608283 - RNA, 19 nt, Artificial Sequence
  Description of Artificial Sequence: Synthetic oligonucleotide
agugucacaaugcggacau

SEQ ID NO: 1608284 - RNA, 19 nt, Artificial Sequence
  Description of Artificial Sequence: Synthetic oligonucleotide
gacauggagggugucgucg

SEQ ID NO: 1608285 - RNA, 19 nt, Artificial Sequence
  Description of Artificial Sequence: Synthetic oligonucleotide
cuucacagggaucugagga

SEQ ID NO: 1608286 - RNA, 19 nt, Artificial Sequence
  Description of Artificial Sequence: Synthetic oligonucleotide
gacaccgugggacaggauc

SEQ ID NO: 1608287 - RNA, 19 nt, Artificial Sequence
  Description of Artificial Sequence: Synthetic oligonucleotide
acaaugcggacauugucca

SEQ ID NO: 1608288 - RNA, 19 nt, Artificial Sequence
  Description of Artificial Sequence: Synthetic oligonucleotide
aggggcaagugucacaaug

SEQ ID NO: 1608289 - RNA, 19 nt, Artificial Sequence
  Description of Artificial Sequence: Synthetic oligonucleotide
ucgucgaguaccacaaagu

SEQ ID NO: 1608290 - RNA, 19 nt, Artificial Sequence
  Description of Artificial Sequence: Synthetic oligonucleotide
uguccaaguguccucucca

SEQ ID NO: 1608291 - RNA, 19 nt, Artificial Sequence
  Description of Artificial Sequence: Synthetic oligonucleotide
cacacagugucuuggugcc

SEQ ID NO: 1608292 - RNA, 19 nt, Artificial Sequence
  Description of Artificial Sequence: Synthetic oligonucleotide
gagggugucgucgaguacc

SEQ ID NO: 1608293 - RNA, 19 nt, Artificial Sequence
  Description of Artificial Sequence: Synthetic oligonucleotide
uacuaugccugggucacgg

SEQ ID NO: 1608294 - RNA, 19 nt, Artificial Sequence
  Description of Artificial Sequence: Synthetic oligonucleotide
aagccgggagccaggaugc

SEQ ID NO: 1608295 - RNA, 19 nt, Artificial Sequence
  Description of Artificial Sequence: Synthetic oligonucleotide
aucgugaaaagcauugucu

SEQ ID NO: 1608296 - RNA, 19 nt, Artificial Sequence
  Description of Artificial Sequence: Synthetic oligonucleotide
gucgucgaguaccacaaag

SEQ ID NO: 1608297 - RNA, 19 nt, Artificial Sequence
  Description of Artificial Sequence: Synthetic oligonucleotide
caucgauaaagccgggagc

SEQ ID NO: 1608298 - RNA, 19 nt, Artificial Sequence
  Description of Artificial Sequence: Synthetic oligonucleotide
uccaccguucaucugcaca

SEQ ID NO: 1608299 - RNA, 19 nt, Artificial Sequence
  Description of Artificial Sequence: Synthetic oligonucleotide
aauugaagaggugggugga

SEQ ID NO: 1608300 - RNA, 19 nt, Artificial Sequence
  Description of Artificial Sequence: Synthetic oligonucleotide
ucgugaaaagcauugucuu

SEQ ID NO: 1608301 - RNA, 19 nt, Artificial Sequence
  Description of Artificial Sequence: Synthetic oligonucleotide
agagcugcaggguuagugu

SEQ ID NO: 1608302 - RNA, 19 nt, Artificial Sequence
  Description of Artificial Sequence: Synthetic oligonucleotide
ucacaaugcggacauuguc

SEQ ID NO: 1608303 - RNA, 19 nt, Artificial Sequence
  Description of Artificial Sequence: Synthetic oligonucleotide
acacagaugccuugggcug

SEQ ID NO: 1608304 - RNA, 19 nt, Artificial Sequence
  Description of Artificial Sequence: Synthetic oligonucleotide
ugaaugcccuacgagacac

SEQ ID NO: 1608305 - RNA, 19 nt, Artificial Sequence
  Description of Artificial Sequence: Synthetic oligonucleotide
ugcaggguuaguguguaug

SEQ ID NO: 1608306 - RNA, 19 nt, Artificial Sequence
  Description of Artificial Sequence: Synthetic oligonucleotide
caccaauucaccagagaug

SEQ ID NO: 1608307 - RNA, 19 nt, Artificial Sequence
  Description of Artificial Sequence: Synthetic oligonucleotide
cuagcagcugugcagggug

SEQ ID NO: 1608308 - RNA, 19 nt, Artificial Sequence
  Description of Artificial Sequence: Synthetic oligonucleotide
agggugugcaccccgcuuc

SEQ ID NO: 1608309 - RNA, 19 nt, Artificial Sequence
  Description of Artificial Sequence: Synthetic oligonucleotide
uaggcuauuagcccaucua

SEQ ID NO: 1608310 - RNA, 19 nt, Artificial Sequence
  Description of Artificial Sequence: Synthetic oligonucleotide
gagguggguggagugaacg

SEQ ID NO: 1608311 - RNA, 19 nt, Artificial Sequence
  Description of Artificial Sequence: Synthetic oligonucleotide
gcaacguaggcuauuagcc

SEQ ID NO: 1608312 - RNA, 19 nt, Artificial Sequence
  Description of Artificial Sequence: Synthetic oligonucleotide
acuuuugucacugcuacuu

SEQ ID NO: 1608313 - RNA, 19 nt, Artificial Sequence
  Description of Artificial Sequence: Synthetic oligonucleotide
cuugugauaaaucucuggu

SEQ ID NO: 1608314 - RNA, 19 nt, Artificial Sequence
  Description of Artificial Sequence: Synthetic oligonucleotide
caucugcacaucgauaaag

SEQ ID NO: 1608315 - RNA, 19 nt, Artificial Sequence
  Description of Artificial Sequence: Synthetic oligonucleotide
ggcaacauggcaauugaag

SEQ ID NO: 1608316 - RNA, 19 nt, Artificial Sequence
  Description of Artificial Sequence: Synthetic oligonucleotide
uacgagacacacagaugcc

SEQ ID NO: 1608317 - RNA, 19 nt, Artificial Sequence
  Description of Artificial Sequence: Synthetic oligonucleotide
cuucuccaacccuagcagc

SEQ ID NO: 1608318 - RNA, 19 nt, Artificial Sequence
  Description of Artificial Sequence: Synthetic oligonucleotide
caucgugaaaagcauuguc

SEQ ID NO: 1608319 - RNA, 19 nt, Artificial Sequence
  Description of Artificial Sequence: Synthetic oligonucleotide
auggcuccgguuuaacuca

SEQ ID NO: 1608320 - RNA, 19 nt, Artificial Sequence
  Description of Artificial Sequence: Synthetic oligonucleotide
cacugaaugcccuacgaga

SEQ ID NO: 1608321 - RNA, 19 nt, Artificial Sequence
  Description of Artificial Sequence: Synthetic oligonucleotide
caaugcgcagagcugcagg

SEQ ID NO: 1608322 - RNA, 19 nt, Artificial Sequence
  Description of Artificial Sequence: Synthetic oligonucleotide
ugucuucaaaggagcggag

SEQ ID NO: 1608323 - RNA, 19 nt, Artificial Sequence
  Description of Artificial Sequence: Synthetic oligonucleotide
acuacagccuguggcuugc

SEQ ID NO: 1608324 - RNA, 19 nt, Artificial Sequence
  Description of Artificial Sequence: Synthetic oligonucleotide
aagugucacaaugcggaca

SEQ ID NO: 1608325 - RNA, 19 nt, Artificial Sequence
  Description of Artificial Sequence: Synthetic oligonucleotide
ugucccagcguauggcggc

SEQ ID NO: 1608326 - RNA, 19 nt, Artificial Sequence
  Description of Artificial Sequence: Synthetic oligonucleotide
ucgugccgaacccaacaag

SEQ ID NO: 1608327 - RNA, 19 nt, Artificial Sequence
  Description of Artificial Sequence: Synthetic oligonucleotide
agucgugccgaacccaaca

SEQ ID NO: 1608328 - RNA, 19 nt, Artificial Sequence
  Description of Artificial Sequence: Synthetic oligonucleotide
uggugagaagcccuacuau

SEQ ID NO: 1608329 - RNA, 19 nt, Artificial Sequence
  Description of Artificial Sequence: Synthetic oligonucleotide
agucaacaccaaauccacc

SEQ ID NO: 1608330 - RNA, 19 nt, Artificial Sequence
  Description of Artificial Sequence: Synthetic oligonucleotide
aacccacguccuccguggc

SEQ ID NO: 1608331 - RNA, 19 nt, Artificial Sequence
  Description of Artificial Sequence: Synthetic oligonucleotide
caagauccucaagucacgg

SEQ ID NO: 1608332 - RNA, 19 nt, Artificial Sequence
  Description of Artificial Sequence: Synthetic oligonucleotide
guggaaaggcaacauggca

SEQ ID NO: 1608333 - RNA, 19 nt, Artificial Sequence
  Description of Artificial Sequence: Synthetic oligonucleotide
guggagugaacgguggucc

SEQ ID NO: 1608334 - RNA, 19 nt, Artificial Sequence
  Description of Artificial Sequence: Synthetic oligonucleotide
ugagucgugccgaacccaa

SEQ ID NO: 1608335 - RNA, 19 nt, Artificial Sequence
  Description of Artificial Sequence: Synthetic oligonucleotide
aguacaucgugaaaagcau

SEQ ID NO: 1608336 - RNA, 19 nt, Artificial Sequence
  Description of Artificial Sequence: Synthetic oligonucleotide
ccuugugauaaaucucugg

SEQ ID NO: 1608337 - RNA, 19 nt, Artificial Sequence
  Description of Artificial Sequence: Synthetic oligonucleotide
caggaaaugccggaugcag

SEQ ID NO: 1608338 - RNA, 19 nt, Artificial Sequence
  Description of Artificial Sequence: Synthetic oligonucleotide
caggaugcagccuccgcag

SEQ ID NO: 1608339 - RNA, 19 nt, Artificial Sequence
  Description of Artificial Sequence: Synthetic oligonucleotide
uguguaugccaucggcaau

SEQ ID NO: 1608340 - RNA, 19 nt, Artificial Sequence
  Description of Artificial Sequence: Synthetic oligonucleotide
gcaagugucacaaugcgga

SEQ ID NO: 1608341 - RNA, 19 nt, Artificial Sequence
  Description of Artificial Sequence: Synthetic oligonucleotide
gaccuugugauaaaucucu

SEQ ID NO: 1608342 - RNA, 19 nt, Artificial Sequence
  Description of Artificial Sequence: Synthetic oligonucleotide
ugugcaccccgcuucuccc

SEQ ID NO: 1608343 - RNA, 19 nt, Artificial Sequence
  Description of Artificial Sequence: Synthetic oligonucleotide
gauccucaagucacggccc

SEQ ID NO: 1608344 - RNA, 19 nt, Artificial Sequence
  Description of Artificial Sequence: Synthetic oligonucleotide
uaccccaaggaccccugcc

SEQ ID NO: 1608345 - RNA, 19 nt, Artificial Sequence
  Description of Artificial Sequence: Synthetic oligonucleotide
cacccauagauccucccug

SEQ ID NO: 1608346 - RNA, 19 nt, Artificial Sequence
  Description of Artificial Sequence: Synthetic oligonucleotide
agcguauggcggccauugc

SEQ ID NO: 1608347 - RNA, 19 nt, Artificial Sequence
  Description of Artificial Sequence: Synthetic oligonucleotide
acccuagcagcugugcagg

SEQ ID NO: 1608348 - RNA, 19 nt, Artificial Sequence
  Description of Artificial Sequence: Synthetic oligonucleotide
gcuaugcugccacacagug

SEQ ID NO: 1608349 - RNA, 19 nt, Artificial Sequence
  Description of Artificial Sequence: Synthetic oligonucleotide
cugucccagcguauggcgg

SEQ ID NO: 1608350 - RNA, 19 nt, Artificial Sequence
  Description of Artificial Sequence: Synthetic oligonucleotide
agccacugaaugcccuacg

SEQ ID NO: 1608351 - RNA, 19 nt, Artificial Sequence
  Description of Artificial Sequence: Synthetic oligonucleotide
gcuccgguuuaacucaggg

SEQ ID NO: 1608352 - RNA, 19 nt, Artificial Sequence
  Description of Artificial Sequence: Synthetic oligonucleotide
ggaggugacaccgugggac

SEQ ID NO: 1608353 - RNA, 19 nt, Artificial Sequence
  Description of Artificial Sequence: Synthetic oligonucleotide
aucccauagaagaugcagu

SEQ ID NO: 1608354 - RNA, 19 nt, Artificial Sequence
  Description of Artificial Sequence: Synthetic oligonucleotide
guguguaugccaucggcaa

SEQ ID NO: 1608355 - RNA, 19 nt, Artificial Sequence
  Description of Artificial Sequence: Synthetic oligonucleotide
uccagccaagauccucaag

SEQ ID NO: 1608356 - RNA, 19 nt, Artificial Sequence
  Description of Artificial Sequence: Synthetic oligonucleotide
cagccaagauccucaaguc

SEQ ID NO: 1608357 - RNA, 19 nt, Artificial Sequence
  Description of Artificial Sequence: Synthetic oligonucleotide
uggagggugucgucgagua

SEQ ID NO: 1608358 - RNA, 19 nt, Artificial Sequence
  Description of Artificial Sequence: Synthetic oligonucleotide
acccauagauccucccuga

SEQ ID NO: 1608359 - RNA, 19 nt, Artificial Sequence
  Description of Artificial Sequence: Synthetic oligonucleotide
ccacacuacagccuguggc

SEQ ID NO: 1608360 - RNA, 19 nt, Artificial Sequence
  Description of Artificial Sequence: Synthetic oligonucleotide
acauggagggugucgucga

SEQ ID NO: 1608361 - RNA, 19 nt, Artificial Sequence
  Description of Artificial Sequence: Synthetic oligonucleotide
agauccucccugagcagcg

SEQ ID NO: 1608362 - RNA, 19 nt, Artificial Sequence
  Description of Artificial Sequence: Synthetic oligonucleotide
agagccgacuccacacuac

SEQ ID NO: 1608363 - RNA, 19 nt, Artificial Sequence
  Description of Artificial Sequence: Synthetic oligonucleotide
ggaccuccacucuucacag

SEQ ID NO: 1608364 - RNA, 19 nt, Artificial Sequence
  Description of Artificial Sequence: Synthetic oligonucleotide
gccaagauccucaagucac

SEQ ID NO: 1608365 - RNA, 19 nt, Artificial Sequence
  Description of Artificial Sequence: Synthetic oligonucleotide
caguuggugaacuggcgca

SEQ ID NO: 1608366 - RNA, 19 nt, Artificial Sequence
  Description of Artificial Sequence: Synthetic oligonucleotide
acgcaucgugagucgugcc

SEQ ID NO: 1608367 - RNA, 19 nt, Artificial Sequence
  Description of Artificial Sequence: Synthetic oligonucleotide
agcccuacuaugccugggu

SEQ ID NO: 1608368 - RNA, 19 nt, Artificial Sequence
  Description of Artificial Sequence: Synthetic oligonucleotide
ccgacuccacacuacagcc

SEQ ID NO: 1608369 - RNA, 19 nt, Artificial Sequence
  Description of Artificial Sequence: Synthetic oligonucleotide
ugcgcagagcugcaggguu

SEQ ID NO: 1608370 - RNA, 19 nt, Artificial Sequence
  Description of Artificial Sequence: Synthetic oligonucleotide
gugccugcaacguaggcua

SEQ ID NO: 1608371 - RNA, 19 nt, Artificial Sequence
  Description of Artificial Sequence: Synthetic oligonucleotide
gaaugggcccuccaagugu

SEQ ID NO: 1608372 - RNA, 19 nt, Artificial Sequence
  Description of Artificial Sequence: Synthetic oligonucleotide
ggugucgucgaguaccaca

SEQ ID NO: 1608373 - RNA, 19 nt, Artificial Sequence
  Description of Artificial Sequence: Synthetic oligonucleotide
acauggcaauugaagaggu

SEQ ID NO: 1608374 - RNA, 19 nt, Artificial Sequence
  Description of Artificial Sequence: Synthetic oligonucleotide
acuguguggccuguccaag

SEQ ID NO: 1608375 - RNA, 19 nt, Artificial Sequence
  Description of Artificial Sequence: Synthetic oligonucleotide
gggaccuccacucuucaca

SEQ ID NO: 1608376 - RNA, 19 nt, Artificial Sequence
  Description of Artificial Sequence: Synthetic oligonucleotide
cugccacacagugucuugg

SEQ ID NO: 1608377 - RNA, 19 nt, Artificial Sequence
  Description of Artificial Sequence: Synthetic oligonucleotide
cacgcaucgugagucgugc

SEQ ID NO: 1608378 - RNA, 19 nt, Artificial Sequence
  Description of Artificial Sequence: Synthetic oligonucleotide
gccgacuccacacuacagc

SEQ ID NO: 1608379 - RNA, 19 nt, Artificial Sequence
  Description of Artificial Sequence: Synthetic oligonucleotide
cgugccgaacccaacaagc

SEQ ID NO: 1608380 - RNA, 19 nt, Artificial Sequence
  Description of Artificial Sequence: Synthetic oligonucleotide
ccaagauccucaagucacg

SEQ ID NO: 1608381 - RNA, 19 nt, Artificial Sequence
  Description of Artificial Sequence: Synthetic oligonucleotide
ucaagucacggcccagcuu

SEQ ID NO: 1608382 - RNA, 19 nt, Artificial Sequence
  Description of Artificial Sequence: Synthetic oligonucleotide
acggugguggaaaggcaac

SEQ ID NO: 1608383 - RNA, 19 nt, Artificial Sequence
  Description of Artificial Sequence: Synthetic oligonucleotide
uggugccugcaacguaggc

SEQ ID NO: 1608384 - RNA, 19 nt, Artificial Sequence
  Description of Artificial Sequence: Synthetic oligonucleotide
cauauguggccaguacauc

SEQ ID NO: 1608385 - RNA, 19 nt, Artificial Sequence
  Description of Artificial Sequence: Synthetic oligonucleotide
gagccgacuccacacuaca

SEQ ID NO: 1608386 - RNA, 19 nt, Artificial Sequence
  Description of Artificial Sequence: Synthetic oligonucleotide
cagcguauggcggccauug

SEQ ID NO: 1608387 - RNA, 19 nt, Artificial Sequence
  Description of Artificial Sequence: Synthetic oligonucleotide
auaaagccgggagccagga

SEQ ID NO: 1608388 - RNA, 19 nt, Artificial Sequence
  Description of Artificial Sequence: Synthetic oligonucleotide
cguauggcggccauugccc

SEQ ID NO: 1608389 - RNA, 19 nt, Artificial Sequence
  Description of Artificial Sequence: Synthetic oligonucleotide
cucuggguccaggaugcgg

SEQ ID NO: 1608390 - RNA, 19 nt, Artificial Sequence
  Description of Artificial Sequence: Synthetic oligonucleotide
ucgauaaagccgggagcca

SEQ ID NO: 1608391 - RNA, 19 nt, Artificial Sequence
  Description of Artificial Sequence: Synthetic oligonucleotide
ggggcaagugucacaaugc

SEQ ID NO: 1608392 - RNA, 19 nt, Artificial Sequence
  Description of Artificial Sequence: Synthetic oligonucleotide
guggguggagugaacggug

SEQ ID NO: 1608393 - RNA, 19 nt, Artificial Sequence
  Description of Artificial Sequence: Synthetic oligonucleotide
ggcaaucccagaacccacg

SEQ ID NO: 1608394 - RNA, 19 nt, Artificial Sequence
  Description of Artificial Sequence: Synthetic oligonucleotide
cucccggcugaugaauggg

SEQ ID NO: 1608395 - RNA, 19 nt, Artificial Sequence
  Description of Artificial Sequence: Synthetic oligonucleotide
cacuagggcaaucccagaa

SEQ ID NO: 1608396 - RNA, 19 nt, Artificial Sequence
  Description of Artificial Sequence: Synthetic oligonucleotide
aucgugagucgugccgaac

SEQ ID NO: 1608397 - RNA, 19 nt, Artificial Sequence
  Description of Artificial Sequence: Synthetic oligonucleotide
cugcaacguaggcuauuag

SEQ ID NO: 1608398 - RNA, 19 nt, Artificial Sequence
  Description of Artificial Sequence: Synthetic oligonucleotide
cugcccgccacgcaucgug

SEQ ID NO: 1608399 - RNA, 19 nt, Artificial Sequence
  Description of Artificial Sequence: Synthetic oligonucleotide
cgacuuuugucacugcuac

SEQ ID NO: 1608400 - RNA, 19 nt, Artificial Sequence
  Description of Artificial Sequence: Synthetic oligonucleotide
cacggugguggaaaggcaa

SEQ ID NO: 1608401 - RNA, 19 nt, Artificial Sequence
  Description of Artificial Sequence: Synthetic oligonucleotide
cauggagggugucgucgag

SEQ ID NO: 1608402 - RNA, 19 nt, Artificial Sequence
  Description of Artificial Sequence: Synthetic oligonucleotide
auccaccguucaucugcac

SEQ ID NO: 1608403 - RNA, 19 nt, Artificial Sequence
  Description of Artificial Sequence: Synthetic oligonucleotide
agaugccuugggcugucaa

SEQ ID NO: 1608404 - RNA, 19 nt, Artificial Sequence
  Description of Artificial Sequence: Synthetic oligonucleotide
auccucccugagcagcgug

SEQ ID NO: 1608405 - RNA, 19 nt, Artificial Sequence
  Description of Artificial Sequence: Synthetic oligonucleotide
accuugugauaaaucucug

SEQ ID NO: 1608406 - RNA, 19 nt, Artificial Sequence
  Description of Artificial Sequence: Synthetic oligonucleotide
gucgaguaccacaaagucu

SEQ ID NO: 1608407 - RNA, 19 nt, Artificial Sequence
  Description of Artificial Sequence: Synthetic oligonucleotide
cacaccaauucaccagaga

SEQ ID NO: 1608408 - RNA, 19 nt, Artificial Sequence
  Description of Artificial Sequence: Synthetic oligonucleotide
gugcaccccgcuucucccg

SEQ ID NO: 1608409 - RNA, 19 nt, Artificial Sequence
  Description of Artificial Sequence: Synthetic oligonucleotide
ccuacgagacacacagaug

SEQ ID NO: 1608410 - RNA, 19 nt, Artificial Sequence
  Description of Artificial Sequence: Synthetic oligonucleotide
ccacugaaugcccuacgag

SEQ ID NO: 1608411 - RNA, 19 nt, Artificial Sequence
  Description of Artificial Sequence: Synthetic oligonucleotide
cagugaccaguaccagccc

SEQ ID NO: 1608412 - RNA, 19 nt, Artificial Sequence
  Description of Artificial Sequence: Synthetic oligonucleotide
ugucgucgaguaccacaaa

SEQ ID NO: 1608413 - RNA, 19 nt, Artificial Sequence
  Description of Artificial Sequence: Synthetic oligonucleotide
guauggcggccauugccca

SEQ ID NO: 1608414 - RNA, 19 nt, Artificial Sequence
  Description of Artificial Sequence: Synthetic oligonucleotide
ggcccggugagcaaugcgc

SEQ ID NO: 1608415 - RNA, 19 nt, Artificial Sequence
  Description of Artificial Sequence: Synthetic oligonucleotide
ggaccuugugauaaaucuc

SEQ ID NO: 1608416 - RNA, 19 nt, Artificial Sequence
  Description of Artificial Sequence: Synthetic oligonucleotide
aacggugguccccgacuuu

SEQ ID NO: 1608417 - RNA, 19 nt, Artificial Sequence
  Description of Artificial Sequence: Synthetic oligonucleotide
ugccaucggcaaucauccc

SEQ ID NO: 1608418 - RNA, 19 nt, Artificial Sequence
  Description of Artificial Sequence: Synthetic oligonucleotide
caacccuagcagcugugca

SEQ ID NO: 1608419 - RNA, 19 nt, Artificial Sequence
  Description of Artificial Sequence: Synthetic oligonucleotide
gugguccccgacuuuuguc

SEQ ID NO: 1608420 - RNA, 19 nt, Artificial Sequence
  Description of Artificial Sequence: Synthetic oligonucleotide
guaggccucagggugugca

SEQ ID NO: 1608421 - RNA, 19 nt, Artificial Sequence
  Description of Artificial Sequence: Synthetic oligonucleotide
acuaugccugggucacggu

SEQ ID NO: 1608422 - RNA, 19 nt, Artificial Sequence
  Description of Artificial Sequence: Synthetic oligonucleotide
ggauccuccgggccacuag

SEQ ID NO: 1608423 - RNA, 19 nt, Artificial Sequence
  Description of Artificial Sequence: Synthetic oligonucleotide
ugcccgccacgcaucguga

SEQ ID NO: 1608424 - RNA, 19 nt, Artificial Sequence
  Description of Artificial Sequence: Synthetic oligonucleotide
gagauguaaguggccugga

SEQ ID NO: 1608425 - RNA, 19 nt, Artificial Sequence
  Description of Artificial Sequence: Synthetic oligonucleotide
ucucuggguccaggaugcg

SEQ ID NO: 1608426 - RNA, 19 nt, Artificial Sequence
  Description of Artificial Sequence: Synthetic oligonucleotide
cgucgaguaccacaaaguc

SEQ ID NO: 1608427 - RNA, 19 nt, Artificial Sequence
  Description of Artificial Sequence: Synthetic oligonucleotide
cuacuaugccugggucacg

SEQ ID NO: 1608428 - RNA, 19 nt, Artificial Sequence
  Description of Artificial Sequence: Synthetic oligonucleotide
ccaguacaucgugaaaagc

SEQ ID NO: 1608429 - RNA, 19 nt, Artificial Sequence
  Description of Artificial Sequence: Synthetic oligonucleotide
gugaacggugguccccgac

SEQ ID NO: 1608430 - RNA, 19 nt, Artificial Sequence
  Description of Artificial Sequence: Synthetic oligonucleotide
gucgugccgaacccaacaa

SEQ ID NO: 1608431 - RNA, 19 nt, Artificial Sequence
  Description of Artificial Sequence: Synthetic oligonucleotide
ccggcugaugaaugggccc

SEQ ID NO: 1608432 - RNA, 19 nt, Artificial Sequence
  Description of Artificial Sequence: Synthetic oligonucleotide
gccacugaaugcccuacga

SEQ ID NO: 1608433 - RNA, 19 nt, Artificial Sequence
  Description of Artificial Sequence: Synthetic oligonucleotide
cgcaucgugagucgugccg

SEQ ID NO: 1608434 - RNA, 19 nt, Artificial Sequence
  Description of Artificial Sequence: Synthetic oligonucleotide
ccgugggacaggauccucc

SEQ ID NO: 1608435 - RNA, 19 nt, Artificial Sequence
  Description of Artificial Sequence: Synthetic oligonucleotide
ggucacggugguggaaagg

SEQ ID NO: 1608436 - RNA, 19 nt, Artificial Sequence
  Description of Artificial Sequence: Synthetic oligonucleotide
gccacacagugucuuggug

SEQ ID NO: 1608437 - RNA, 19 nt, Artificial Sequence
  Description of Artificial Sequence: Synthetic oligonucleotide
cacaucgauaaagccggga

SEQ ID NO: 1608438 - RNA, 19 nt, Artificial Sequence
  Description of Artificial Sequence: Synthetic oligonucleotide
agugaacggugguccccga

SEQ ID NO: 1608439 - RNA, 19 nt, Artificial Sequence
  Description of Artificial Sequence: Synthetic oligonucleotide
cuucaaaggagcggaggua

SEQ ID NO: 1608440 - RNA, 19 nt, Artificial Sequence
  Description of Artificial Sequence: Synthetic oligonucleotide
accgugggacaggauccuc

SEQ ID NO: 1608441 - RNA, 19 nt, Artificial Sequence
  Description of Artificial Sequence: Synthetic oligonucleotide
caugcgccucuccucaaaa

SEQ ID NO: 1608442 - RNA, 19 nt, Artificial Sequence
  Description of Artificial Sequence: Synthetic oligonucleotide
cagccacugaaugcccuac

SEQ ID NO: 1608443 - RNA, 19 nt, Artificial Sequence
  Description of Artificial Sequence: Synthetic oligonucleotide
gugacaccgugggacagga

SEQ ID NO: 1608444 - RNA, 19 nt, Artificial Sequence
  Description of Artificial Sequence: Synthetic oligonucleotide
gguccccgacuuuugucac

SEQ ID NO: 1608445 - RNA, 19 nt, Artificial Sequence
  Description of Artificial Sequence: Synthetic oligonucleotide
uggcggccauugcccaagc

SEQ ID NO: 1608446 - RNA, 19 nt, Artificial Sequence
  Description of Artificial Sequence: Synthetic oligonucleotide
agggugucgucgaguacca

SEQ ID NO: 1608447 - RNA, 19 nt, Artificial Sequence
  Description of Artificial Sequence: Synthetic oligonucleotide
agccggucacuggugagaa

SEQ ID NO: 1608448 - RNA, 19 nt, Artificial Sequence
  Description of Artificial Sequence: Synthetic oligonucleotide
gugagucgugccgaaccca

SEQ ID NO: 1608449 - RNA, 19 nt, Artificial Sequence
  Description of Artificial Sequence: Synthetic oligonucleotide
gaacggugguccccgacuu

SEQ ID NO: 1608450 - RNA, 19 nt, Artificial Sequence
  Description of Artificial Sequence: Synthetic oligonucleotide
cgugagucgugccgaaccc

SEQ ID NO: 1608451 - RNA, 19 nt, Artificial Sequence
  Description of Artificial Sequence: Synthetic oligonucleotide
gggcccggugagcaaugcg

SEQ ID NO: 1608452 - RNA, 19 nt, Artificial Sequence
  Description of Artificial Sequence: Synthetic oligonucleotide
gggccacuagggcaauccc

SEQ ID NO: 1608453 - RNA, 19 nt, Artificial Sequence
  Description of Artificial Sequence: Synthetic oligonucleotide
ggaucacuucauggcuccg

SEQ ID NO: 1608454 - RNA, 19 nt, Artificial Sequence
  Description of Artificial Sequence: Synthetic oligonucleotide
ugccugcaacguaggcuau

SEQ ID NO: 1608455 - RNA, 19 nt, Artificial Sequence
  Description of Artificial Sequence: Synthetic oligonucleotide
gagucgugccgaacccaac

SEQ ID NO: 1608456 - RNA, 19 nt, Artificial Sequence
  Description of Artificial Sequence: Synthetic oligonucleotide
cgauaaagccgggagccag

SEQ ID NO: 1608457 - RNA, 19 nt, Artificial Sequence
  Description of Artificial Sequence: Synthetic oligonucleotide
cggcaguuggugaacuggc

SEQ ID NO: 1608458 - RNA, 19 nt, Artificial Sequence
  Description of Artificial Sequence: Synthetic oligonucleotide
ccgaacccaacaagcuuug

SEQ ID NO: 1608459 - RNA, 19 nt, Artificial Sequence
  Description of Artificial Sequence: Synthetic oligonucleotide
ggugccugcaacguaggcu

SEQ ID NO: 1608460 - RNA, 19 nt, Artificial Sequence
  Description of Artificial Sequence: Synthetic oligonucleotide
ccaacccuagcagcugugc

SEQ ID NO: 1608461 - RNA, 19 nt, Artificial Sequence
  Description of Artificial Sequence: Synthetic oligonucleotide
cucaagucacggcccagcu

SEQ ID NO: 1608462 - RNA, 19 nt, Artificial Sequence
  Description of Artificial Sequence: Synthetic oligonucleotide
gcaucgugagucgugccga

SEQ ID NO: 1608463 - RNA, 19 nt, Artificial Sequence
  Description of Artificial Sequence: Synthetic oligonucleotide
acguaggcuauuagcccau

SEQ ID NO: 1608464 - RNA, 19 nt, Artificial Sequence
  Description of Artificial Sequence: Synthetic oligonucleotide
gaugggcccggugagcaau

SEQ ID NO: 1608465 - RNA, 19 nt, Artificial Sequence
  Description of Artificial Sequence: Synthetic oligonucleotide
ugacaccgugggacaggau

SEQ ID NO: 1608466 - RNA, 19 nt, Artificial Sequence
  Description of Artificial Sequence: Synthetic oligonucleotide
caccguucaucugcacauc

SEQ ID NO: 1608467 - RNA, 19 nt, Artificial Sequence
  Description of Artificial Sequence: Synthetic oligonucleotide
ccgguuuaacucaggggca

SEQ ID NO: 1608468 - RNA, 19 nt, Artificial Sequence
  Description of Artificial Sequence: Synthetic oligonucleotide
gucccagcguauggcggcc

SEQ ID NO: 1608469 - RNA, 19 nt, Artificial Sequence
  Description of Artificial Sequence: Synthetic oligonucleotide
gggaugggcccggugagca

SEQ ID NO: 1608470 - RNA, 19 nt, Artificial Sequence
  Description of Artificial Sequence: Synthetic oligonucleotide
cagagccgacuccacacua

SEQ ID NO: 1608471 - RNA, 19 nt, Artificial Sequence
  Description of Artificial Sequence: Synthetic oligonucleotide
augcccuacgagacacaca

SEQ ID NO: 1608472 - RNA, 19 nt, Artificial Sequence
  Description of Artificial Sequence: Synthetic oligonucleotide
cccuacgagacacacagau

SEQ ID NO: 1608473 - RNA, 19 nt, Artificial Sequence
  Description of Artificial Sequence: Synthetic oligonucleotide
ggagggugucgucgaguac

SEQ ID NO: 1608474 - RNA, 19 nt, Artificial Sequence
  Description of Artificial Sequence: Synthetic oligonucleotide
ccacgcaucgugagucgug

SEQ ID NO: 1608475 - RNA, 19 nt, Artificial Sequence
  Description of Artificial Sequence: Synthetic oligonucleotide
ggacauggagggugucguc

SEQ ID NO: 1608476 - RNA, 19 nt, Artificial Sequence
  Description of Artificial Sequence: Synthetic oligonucleotide
caucgugagucgugccgaa

SEQ ID NO: 1608477 - RNA, 19 nt, Artificial Sequence
  Description of Artificial Sequence: Synthetic oligonucleotide
gcccuacuaugccuggguc

SEQ ID NO: 1608478 - RNA, 19 nt, Artificial Sequence
  Description of Artificial Sequence: Synthetic oligonucleotide
cuucauggcuccgguuuaa

SEQ ID NO: 1608479 - RNA, 19 nt, Artificial Sequence
  Description of Artificial Sequence: Synthetic oligonucleotide
guacaucgugaaaagcauu

SEQ ID NO: 1608480 - RNA, 19 nt, Artificial Sequence
  Description of Artificial Sequence: Synthetic oligonucleotide
acuccacacuacagccugu

SEQ ID NO: 1608481 - RNA, 19 nt, Artificial Sequence
  Description of Artificial Sequence: Synthetic oligonucleotide
gggcaaucccagaacccac

SEQ ID NO: 1608482 - RNA, 19 nt, Artificial Sequence
  Description of Artificial Sequence: Synthetic oligonucleotide
cagccggucacuggugaga

SEQ ID NO: 1608483 - RNA, 19 nt, Artificial Sequence
  Description of Artificial Sequence: Synthetic oligonucleotide
gcaggaaaugccggaugca

SEQ ID NO: 1608484 - RNA, 19 nt, Artificial Sequence
  Description of Artificial Sequence: Synthetic oligonucleotide
ucccagcguauggcggcca

SEQ ID NO: 1608485 - RNA, 19 nt, Artificial Sequence
  Description of Artificial Sequence: Synthetic oligonucleotide
cuccaacccuagcagcugu

SEQ ID NO: 1608486 - RNA, 19 nt, Artificial Sequence
  Description of Artificial Sequence: Synthetic oligonucleotide
ggggaccuccacucuucac

SEQ ID NO: 1608487 - RNA, 19 nt, Artificial Sequence
  Description of Artificial Sequence: Synthetic oligonucleotide
cggcaaucaucccauagaa

SEQ ID NO: 1608488 - RNA, 19 nt, Artificial Sequence
  Description of Artificial Sequence: Synthetic oligonucleotide
gcagcgugccgccgcgcag

SEQ ID NO: 1608489 - RNA, 19 nt, Artificial Sequence
  Description of Artificial Sequence: Synthetic oligonucleotide
ggguuaguguguaugccau

SEQ ID NO: 1608490 - RNA, 19 nt, Artificial Sequence
  Description of Artificial Sequence: Synthetic oligonucleotide
cgggccacuagggcaaucc

SEQ ID NO: 1608491 - RNA, 19 nt, Artificial Sequence
  Description of Artificial Sequence: Synthetic oligonucleotide
cacgcugcccgccacgcau

SEQ ID NO: 1608492 - RNA, 19 nt, Artificial Sequence
  Description of Artificial Sequence: Synthetic oligonucleotide
ccuugggcugucaaugccu

SEQ ID NO: 1608493 - RNA, 19 nt, Artificial Sequence
  Description of Artificial Sequence: Synthetic oligonucleotide
cuggacuguguggccuguc

SEQ ID NO: 1608494 - RNA, 19 nt, Artificial Sequence
  Description of Artificial Sequence: Synthetic oligonucleotide
ccgccacgcaucgugaguc

SEQ ID NO: 1608495 - RNA, 19 nt, Artificial Sequence
  Description of Artificial Sequence: Synthetic oligonucleotide
gcccgccacgcaucgugag

SEQ ID NO: 1608496 - RNA, 19 nt, Artificial Sequence
  Description of Artificial Sequence: Synthetic oligonucleotide
gccgaacccaacaagcuuu

SEQ ID NO: 1608497 - RNA, 19 nt, Artificial Sequence
  Description of Artificial Sequence: Synthetic oligonucleotide
gagcagcgugccgccgcgc

SEQ ID NO: 1608498 - RNA, 19 nt, Artificial Sequence
  Description of Artificial Sequence: Synthetic oligonucleotide
gccggucacuggugagaag

SEQ ID NO: 1608499 - RNA, 19 nt, Artificial Sequence
  Description of Artificial Sequence: Synthetic oligonucleotide
ggagcggagguaggccuca

SEQ ID NO: 1608500 - RNA, 19 nt, Artificial Sequence
  Description of Artificial Sequence: Synthetic oligonucleotide
ccugcaacguaggcuauua

SEQ ID NO: 1608501 - RNA, 19 nt, Artificial Sequence
  Description of Artificial Sequence: Synthetic oligonucleotide
cgaacccaacaagcuuugg

SEQ ID NO: 1608502 - RNA, 19 nt, Artificial Sequence
  Description of Artificial Sequence: Synthetic oligonucleotide
gcccaucuaccuccaccuc

SEQ ID NO: 1608503 - RNA, 19 nt, Artificial Sequence
  Description of Artificial Sequence: Synthetic oligonucleotide
ggcuaugcugccacacagu

SEQ ID NO: 1608504 - RNA, 19 nt, Artificial Sequence
  Description of Artificial Sequence: Synthetic oligonucleotide
gccauugcccaagcccaga

SEQ ID NO: 1608505 - RNA, 19 nt, Artificial Sequence
  Description of Artificial Sequence: Synthetic oligonucleotide
gguaggccucagggugugc

SEQ ID NO: 1608506 - RNA, 19 nt, Artificial Sequence
  Description of Artificial Sequence: Synthetic oligonucleotide
ccccgacuuuugucacugc

SEQ ID NO: 1608507 - RNA, 19 nt, Artificial Sequence
  Description of Artificial Sequence: Synthetic oligonucleotide
gccuguccaaguguccucu

SEQ ID NO: 1608508 - RNA, 19 nt, Artificial Sequence
  Description of Artificial Sequence: Synthetic oligonucleotide
ggaugggcccggugagcaa

SEQ ID NO: 1608509 - RNA, 19 nt, Artificial Sequence
  Description of Artificial Sequence: Synthetic oligonucleotide
cugggucacggugguggaa

SEQ ID NO: 1608510 - RNA, 19 nt, Artificial Sequence
  Description of Artificial Sequence: Synthetic oligonucleotide
ccgcacgcugcccgccacg

SEQ ID NO: 1608511 - RNA, 19 nt, Artificial Sequence
  Description of Artificial Sequence: Synthetic oligonucleotide
ccacuagggcaaucccaga

SEQ ID NO: 1608512 - RNA, 19 nt, Artificial Sequence
  Description of Artificial Sequence: Synthetic oligonucleotide
gcgcacccauagauccucc

SEQ ID NO: 1608513 - RNA, 19 nt, Artificial Sequence
  Description of Artificial Sequence: Synthetic oligonucleotide
cccuccaaguguaccccaa

SEQ ID NO: 1608514 - RNA, 19 nt, Artificial Sequence
  Description of Artificial Sequence: Synthetic oligonucleotide
cagggugugcaccccgcuu

SEQ ID NO: 1608515 - RNA, 19 nt, Artificial Sequence
  Description of Artificial Sequence: Synthetic oligonucleotide
cagaacccacguccuccgu

SEQ ID NO: 1608516 - RNA, 19 nt, Artificial Sequence
  Description of Artificial Sequence: Synthetic oligonucleotide
gcgcaggaugcggcaguug

SEQ ID NO: 1608517 - RNA, 19 nt, Artificial Sequence
  Description of Artificial Sequence: Synthetic oligonucleotide
gggugucgucgaguaccac

SEQ ID NO: 1608518 - RNA, 19 nt, Artificial Sequence
  Description of Artificial Sequence: Synthetic oligonucleotide
gcgcagagcugcaggguua

SEQ ID NO: 1608519 - RNA, 19 nt, Artificial Sequence
  Description of Artificial Sequence: Synthetic oligonucleotide
gccccauauguggccagua

SEQ ID NO: 1608520 - RNA, 19 nt, Artificial Sequence
  Description of Artificial Sequence: Synthetic oligonucleotide
cguaggcuauuagcccauc

SEQ ID NO: 1608521 - RNA, 19 nt, Artificial Sequence
  Description of Artificial Sequence: Synthetic oligonucleotide
ccuagcagcugugcagggu

SEQ ID NO: 1608522 - RNA, 19 nt, Artificial Sequence
  Description of Artificial Sequence: Synthetic oligonucleotide
gccacgcaucgugagucgu

SEQ ID NO: 1608523 - RNA, 19 nt, Artificial Sequence
  Description of Artificial Sequence: Synthetic oligonucleotide
gcccuacgagacacacaga

SEQ ID NO: 1608524 - RNA, 19 nt, Artificial Sequence
  Description of Artificial Sequence: Synthetic oligonucleotide
ccguggccuuggagaaguc

SEQ ID NO: 1608525 - RNA, 19 nt, Artificial Sequence
  Description of Artificial Sequence: Synthetic oligonucleotide
ccauggggaccuccacucu

SEQ ID NO: 1608526 - RNA, 19 nt, Artificial Sequence
  Description of Artificial Sequence: Synthetic oligonucleotide
cccgccacgcaucgugagu

SEQ ID NO: 1608527 - RNA, 19 nt, Artificial Sequence
  Description of Artificial Sequence: Synthetic oligonucleotide
gugucacaaugcggacauu

SEQ ID NO: 1608528 - RNA, 19 nt, Artificial Sequence
  Description of Artificial Sequence: Synthetic oligonucleotide
gccugcaacguaggcuauu

SEQ ID NO: 1608529 - RNA, 19 nt, Artificial Sequence
  Description of Artificial Sequence: Synthetic oligonucleotide
cgccgcgcaggaugcggca

SEQ ID NO: 1608530 - RNA, 19 nt, Artificial Sequence
  Description of Artificial Sequence: Synthetic oligonucleotide
cccagcguauggcggccau

SEQ ID NO: 1608531 - RNA, 19 nt, Artificial Sequence
  Description of Artificial Sequence: Synthetic oligonucleotide
cgccgcacgcugcccgcca

SEQ ID NO: 1608532 - RNA, 19 nt, Artificial Sequence
  Description of Artificial Sequence: Synthetic oligonucleotide
gcugcccgccacgcaucgu

SEQ ID NO: 1608533 - RNA, 19 nt, Artificial Sequence
  Description of Artificial Sequence: Synthetic oligonucleotide
ccagcguauggcggccauu

SEQ ID NO: 1608534 - RNA, 19 nt, Artificial Sequence
  Description of Artificial Sequence: Synthetic oligonucleotide
ccacguccuccguggccuu

SEQ ID NO: 1608535 - RNA, 19 nt, Artificial Sequence
  Description of Artificial Sequence: Synthetic oligonucleotide
aucguugucacuuagauag

SEQ ID NO: 1608536 - RNA, 19 nt, Artificial Sequence
  Description of Artificial Sequence: Synthetic oligonucleotide
uuaacugugacauuuaagu

SEQ ID NO: 1608537 - RNA, 19 nt, Artificial Sequence
  Description of Artificial Sequence: Synthetic oligonucleotide
aaggaaguuauuauaaggc

SEQ ID NO: 1608538 - RNA, 19 nt, Artificial Sequence
  Description of Artificial Sequence: Synthetic oligonucleotide
cauuauauuuauuugagac

SEQ ID NO: 1608539 - RNA, 19 nt, Artificial Sequence
  Description of Artificial Sequence: Synthetic oligonucleotide
ucuuuugauaauaagcagc

SEQ ID NO: 1608540 - RNA, 19 nt, Artificial Sequence
  Description of Artificial Sequence: Synthetic oligonucleotide
augaguaaagcauuaaaag

SEQ ID NO: 1608541 - RNA, 19 nt, Artificial Sequence
  Description of Artificial Sequence: Synthetic oligonucleotide
uuauugaagaaguuaagca

SEQ ID NO: 1608542 - RNA, 19 nt, Artificial Sequence
  Description of Artificial Sequence: Synthetic oligonucleotide
guuaaaugaacauaauagc

SEQ ID NO: 1608543 - RNA, 19 nt, Artificial Sequence
  Description of Artificial Sequence: Synthetic oligonucleotide
uaaaaguaggcacaaacac

SEQ ID NO: 1608544 - RNA, 19 nt, Artificial Sequence
  Description of Artificial Sequence: Synthetic oligonucleotide
aacauauuggagaugcccc

SEQ ID NO: 1608545 - RNA, 19 nt, Artificial Sequence
  Description of Artificial Sequence: Synthetic oligonucleotide
ugaguaaagcauuaaaagu

SEQ ID NO: 1608546 - RNA, 19 nt, Artificial Sequence
  Description of Artificial Sequence: Synthetic oligonucleotide
aacauaauagcuuggcggu

SEQ ID NO: 1608547 - RNA, 19 nt, Artificial Sequence
  Description of Artificial Sequence: Synthetic oligonucleotide
acuuagauagagugcacgc

SEQ ID NO: 1608548 - RNA, 19 nt, Artificial Sequence
  Description of Artificial Sequence: Synthetic oligonucleotide
uuauuugagacagagcaag

SEQ ID NO: 1608549 - RNA, 19 nt, Artificial Sequence
  Description of Artificial Sequence: Synthetic oligonucleotide
ugaacauaauagcuuggcg

SEQ ID NO: 1608550 - RNA, 19 nt, Artificial Sequence
  Description of Artificial Sequence: Synthetic oligonucleotide
aggucguuaucccugaggc

SEQ ID NO: 1608551 - RNA, 19 nt, Artificial Sequence
  Description of Artificial Sequence: Synthetic oligonucleotide
uggauuuaagacuuuauaa

SEQ ID NO: 1608552 - RNA, 19 nt, Artificial Sequence
  Description of Artificial Sequence: Synthetic oligonucleotide
cuuguugugacugagcacc

SEQ ID NO: 1608553 - RNA, 19 nt, Artificial Sequence
  Description of Artificial Sequence: Synthetic oligonucleotide
aguguguucaaccuguuca

SEQ ID NO: 1608554 - RNA, 19 nt, Artificial Sequence
  Description of Artificial Sequence: Synthetic oligonucleotide
cuucugacccguuaaaucc

SEQ ID NO: 1608555 - RNA, 19 nt, Artificial Sequence
  Description of Artificial Sequence: Synthetic oligonucleotide
aaaucguugucacuuagau

SEQ ID NO: 1608556 - RNA, 19 nt, Artificial Sequence
  Description of Artificial Sequence: Synthetic oligonucleotide
uuugauuugucguuauucu

SEQ ID NO: 1608557 - RNA, 19 nt, Artificial Sequence
  Description of Artificial Sequence: Synthetic oligonucleotide
ucguuauucuucuuugggg

SEQ ID NO: 1608558 - RNA, 19 nt, Artificial Sequence
  Description of Artificial Sequence: Synthetic oligonucleotide
uccaacauauuggagaugc

SEQ ID NO: 1608559 - RNA, 19 nt, Artificial Sequence
  Description of Artificial Sequence: Synthetic oligonucleotide
uaauaagcagccuugugac

SEQ ID NO: 1608560 - RNA, 19 nt, Artificial Sequence
  Description of Artificial Sequence: Synthetic oligonucleotide
ucuagcauugggaggaaag

SEQ ID NO: 1608561 - RNA, 19 nt, Artificial Sequence
  Description of Artificial Sequence: Synthetic oligonucleotide
uuuaauuauucuuuugaua

SEQ ID NO: 1608562 - RNA, 19 nt, Artificial Sequence
  Description of Artificial Sequence: Synthetic oligonucleotide
agugacuuagacauguucg

SEQ ID NO: 1608563 - RNA, 19 nt, Artificial Sequence
  Description of Artificial Sequence: Synthetic oligonucleotide
uuucagagcggauauauuc

SEQ ID NO: 1608564 - RNA, 19 nt, Artificial Sequence
  Description of Artificial Sequence: Synthetic oligonucleotide
aauaucuggaggcaggauu

SEQ ID NO: 1608565 - RNA, 19 nt, Artificial Sequence
  Description of Artificial Sequence: Synthetic oligonucleotide
agagccgaauccucgaggc

SEQ ID NO: 1608566 - RNA, 19 nt, Artificial Sequence
  Description of Artificial Sequence: Synthetic oligonucleotide
ugacguuuauucaaggaac

SEQ ID NO: 1608567 - RNA, 19 nt, Artificial Sequence
  Description of Artificial Sequence: Synthetic oligonucleotide
auugggguaacccaggggu

SEQ ID NO: 1608568 - RNA, 19 nt, Artificial Sequence
  Description of Artificial Sequence: Synthetic oligonucleotide
aagaguuagagaggaggcc

SEQ ID NO: 1608569 - RNA, 19 nt, Artificial Sequence
  Description of Artificial Sequence: Synthetic oligonucleotide
ugauuugucguuauucuuc

SEQ ID NO: 1608570 - RNA, 19 nt, Artificial Sequence
  Description of Artificial Sequence: Synthetic oligonucleotide
gaaguuaagcaccuccaag

SEQ ID NO: 1608571 - RNA, 19 nt, Artificial Sequence
  Description of Artificial Sequence: Synthetic oligonucleotide
aacaaaugggaauggauuu

SEQ ID NO: 1608572 - RNA, 19 nt, Artificial Sequence
  Description of Artificial Sequence: Synthetic oligonucleotide
gguagaagaaguuuccggg

SEQ ID NO: 1608573 - RNA, 19 nt, Artificial Sequence
  Description of Artificial Sequence: Synthetic oligonucleotide
aauaagcagccuugugacg

SEQ ID NO: 1608574 - RNA, 19 nt, Artificial Sequence
  Description of Artificial Sequence: Synthetic oligonucleotide
augaacauaauagcuuggc

SEQ ID NO: 1608575 - RNA, 19 nt, Artificial Sequence
  Description of Artificial Sequence: Synthetic oligonucleotide
aauccaaguugccuagcuc

SEQ ID NO: 1608576 - RNA, 19 nt, Artificial Sequence
  Description of Artificial Sequence: Synthetic oligonucleotide
aacuuugugagcuucccaa

SEQ ID NO: 1608577 - RNA, 19 nt, Artificial Sequence
  Description of Artificial Sequence: Synthetic oligonucleotide
gaacugaucggcaauuggg

SEQ ID NO: 1608578 - RNA, 19 nt, Artificial Sequence
  Description of Artificial Sequence: Synthetic oligonucleotide
ugagguagaagaaguuucc

SEQ ID NO: 1608579 - RNA, 19 nt, Artificial Sequence
  Description of Artificial Sequence: Synthetic oligonucleotide
aauugggguaacccagggg

SEQ ID NO: 1608580 - RNA, 19 nt, Artificial Sequence
  Description of Artificial Sequence: Synthetic oligonucleotide
uucagguuguuguagguca

SEQ ID NO: 1608581 - RNA, 19 nt, Artificial Sequence
  Description of Artificial Sequence: Synthetic oligonucleotide
uauuugagacagagcaagg

SEQ ID NO: 1608582 - RNA, 19 nt, Artificial Sequence
  Description of Artificial Sequence: Synthetic oligonucleotide
gaacaagccguugacaucc

SEQ ID NO: 1608583 - RNA, 19 nt, Artificial Sequence
  Description of Artificial Sequence: Synthetic oligonucleotide
agguagaagaaguuuccgg

SEQ ID NO: 1608584 - RNA, 19 nt, Artificial Sequence
  Description of Artificial Sequence: Synthetic oligonucleotide
auuauaaggcacauaauga

SEQ ID NO: 1608585 - RNA, 19 nt, Artificial Sequence
  Description of Artificial Sequence: Synthetic oligonucleotide
uccuuaggcagugagauca

SEQ ID NO: 1608586 - RNA, 19 nt, Artificial Sequence
  Description of Artificial Sequence: Synthetic oligonucleotide
aagccguugacauccaaca

SEQ ID NO: 1608587 - RNA, 19 nt, Artificial Sequence
  Description of Artificial Sequence: Synthetic oligonucleotide
uucagagcggauauauuca

SEQ ID NO: 1608588 - RNA, 19 nt, Artificial Sequence
  Description of Artificial Sequence: Synthetic oligonucleotide
guagaagaaguuuccgggg

SEQ ID NO: 1608589 - RNA, 19 nt, Artificial Sequence
  Description of Artificial Sequence: Synthetic oligonucleotide
aaggagaacaagccguuga

SEQ ID NO: 1608590 - RNA, 19 nt, Artificial Sequence
  Description of Artificial Sequence: Synthetic oligonucleotide
gaauccucgaggcagugug

SEQ ID NO: 1608591 - RNA, 19 nt, Artificial Sequence
  Description of Artificial Sequence: Synthetic oligonucleotide
gucguuauucuucuuuggg

SEQ ID NO: 1608592 - RNA, 19 nt, Artificial Sequence
  Description of Artificial Sequence: Synthetic oligonucleotide
aacugaucggcaauugggg

SEQ ID NO: 1608593 - RNA, 19 nt, Artificial Sequence
  Description of Artificial Sequence: Synthetic oligonucleotide
aguugccuagcucuggagg

SEQ ID NO: 1608594 - RNA, 19 nt, Artificial Sequence
  Description of Artificial Sequence: Synthetic oligonucleotide
gauuuccuuaggcagugag

SEQ ID NO: 1608595 - RNA, 19 nt, Artificial Sequence
  Description of Artificial Sequence: Synthetic oligonucleotide
aggaaguuauuauaaggca

SEQ ID NO: 1608596 - RNA, 19 nt, Artificial Sequence
  Description of Artificial Sequence: Synthetic oligonucleotide
gaaaccugugccuaccaug

SEQ ID NO: 1608597 - RNA, 19 nt, Artificial Sequence
  Description of Artificial Sequence: Synthetic oligonucleotide
uucucugcuuugaagaccu

SEQ ID NO: 1608598 - RNA, 19 nt, Artificial Sequence
  Description of Artificial Sequence: Synthetic oligonucleotide
ugucacuuagauagagugc

SEQ ID NO: 1608599 - RNA, 19 nt, Artificial Sequence
  Description of Artificial Sequence: Synthetic oligonucleotide
uuuauuugagacagagcaa

SEQ ID NO: 1608600 - RNA, 19 nt, Artificial Sequence
  Description of Artificial Sequence: Synthetic oligonucleotide
gauaauaagcagccuugug

SEQ ID NO: 1608601 - RNA, 19 nt, Artificial Sequence
  Description of Artificial Sequence: Synthetic oligonucleotide
agauagagugcacgcaggg

SEQ ID NO: 1608602 - RNA, 19 nt, Artificial Sequence
  Description of Artificial Sequence: Synthetic oligonucleotide
uuugucguuauucuucuuu

SEQ ID NO: 1608603 - RNA, 19 nt, Artificial Sequence
  Description of Artificial Sequence: Synthetic oligonucleotide
uagauagagugcacgcagg

SEQ ID NO: 1608604 - RNA, 19 nt, Artificial Sequence
  Description of Artificial Sequence: Synthetic oligonucleotide
aaacaaaugggaauggauu

SEQ ID NO: 1608605 - RNA, 19 nt, Artificial Sequence
  Description of Artificial Sequence: Synthetic oligonucleotide
gaaguuauuauaaggcaca

SEQ ID NO: 1608606 - RNA, 19 nt, Artificial Sequence
  Description of Artificial Sequence: Synthetic oligonucleotide
cuugugacguuuauucaag

SEQ ID NO: 1608607 - RNA, 19 nt, Artificial Sequence
  Description of Artificial Sequence: Synthetic oligonucleotide
acgguuguuagcuuguugu

SEQ ID NO: 1608608 - RNA, 19 nt, Artificial Sequence
  Description of Artificial Sequence: Synthetic oligonucleotide
ugagguugcacucuagcau

SEQ ID NO: 1608609 - RNA, 19 nt, Artificial Sequence
  Description of Artificial Sequence: Synthetic oligonucleotide
acccguuaaauccaaguug

SEQ ID NO: 1608610 - RNA, 19 nt, Artificial Sequence
  Description of Artificial Sequence: Synthetic oligonucleotide
uugucguuauucuucuuug

SEQ ID NO: 1608611 - RNA, 19 nt, Artificial Sequence
  Description of Artificial Sequence: Synthetic oligonucleotide
guuaaauccaaguugccua

SEQ ID NO: 1608612 - RNA, 19 nt, Artificial Sequence
  Description of Artificial Sequence: Synthetic oligonucleotide
uagagugcacgcagggugg

SEQ ID NO: 1608613 - RNA, 19 nt, Artificial Sequence
  Description of Artificial Sequence: Synthetic oligonucleotide
ugaauguggagcuccuuca

SEQ ID NO: 1608614 - RNA, 19 nt, Artificial Sequence
  Description of Artificial Sequence: Synthetic oligonucleotide
acauuuaagugguuacaug

SEQ ID NO: 1608615 - RNA, 19 nt, Artificial Sequence
  Description of Artificial Sequence: Synthetic oligonucleotide
agagcggauauauucaaaa

SEQ ID NO: 1608616 - RNA, 19 nt, Artificial Sequence
  Description of Artificial Sequence: Synthetic oligonucleotide
agcuuguugugacugagca

SEQ ID NO: 1608617 - RNA, 19 nt, Artificial Sequence
  Description of Artificial Sequence: Synthetic oligonucleotide
uguuagcuuguugugacug

SEQ ID NO: 1608618 - RNA, 19 nt, Artificial Sequence
  Description of Artificial Sequence: Synthetic oligonucleotide
uuugugagcuucccaauau

SEQ ID NO: 1608619 - RNA, 19 nt, Artificial Sequence
  Description of Artificial Sequence: Synthetic oligonucleotide
aaccuguucaugcccaggu

SEQ ID NO: 1608620 - RNA, 19 nt, Artificial Sequence
  Description of Artificial Sequence: Synthetic oligonucleotide
ggaaagacggaaaagaauc

SEQ ID NO: 1608621 - RNA, 19 nt, Artificial Sequence
  Description of Artificial Sequence: Synthetic oligonucleotide
uugaagaccugcuucugac

SEQ ID NO: 1608622 - RNA, 19 nt, Artificial Sequence
  Description of Artificial Sequence: Synthetic oligonucleotide
agaacaagccguugacauc

SEQ ID NO: 1608623 - RNA, 19 nt, Artificial Sequence
  Description of Artificial Sequence: Synthetic oligonucleotide
auggauuuaagacuuuaua

SEQ ID NO: 1608624 - RNA, 19 nt, Artificial Sequence
  Description of Artificial Sequence: Synthetic oligonucleotide
uguuaacugugacauuuaa

SEQ ID NO: 1608625 - RNA, 19 nt, Artificial Sequence
  Description of Artificial Sequence: Synthetic oligonucleotide
augauuuuaauuauucuuu

SEQ ID NO: 1608626 - RNA, 19 nt, Artificial Sequence
  Description of Artificial Sequence: Synthetic oligonucleotide
gugacuuagacauguucgc

SEQ ID NO: 1608627 - RNA, 19 nt, Artificial Sequence
  Description of Artificial Sequence: Synthetic oligonucleotide
ugugugauaugggccaagg

SEQ ID NO: 1608628 - RNA, 19 nt, Artificial Sequence
  Description of Artificial Sequence: Synthetic oligonucleotide
uccggggagagaauguuca

SEQ ID NO: 1608629 - RNA, 19 nt, Artificial Sequence
  Description of Artificial Sequence: Synthetic oligonucleotide
uugugacguuuauucaagg

SEQ ID NO: 1608630 - RNA, 19 nt, Artificial Sequence
  Description of Artificial Sequence: Synthetic oligonucleotide
auaagcagccuugugacgu

SEQ ID NO: 1608631 - RNA, 19 nt, Artificial Sequence
  Description of Artificial Sequence: Synthetic oligonucleotide
gucacuuagauagagugca

SEQ ID NO: 1608632 - RNA, 19 nt, Artificial Sequence
  Description of Artificial Sequence: Synthetic oligonucleotide
gaaugagagcuuuguuucc

SEQ ID NO: 1608633 - RNA, 19 nt, Artificial Sequence
  Description of Artificial Sequence: Synthetic oligonucleotide
acugaaaccugugccuacc

SEQ ID NO: 1608634 - RNA, 19 nt, Artificial Sequence
  Description of Artificial Sequence: Synthetic oligonucleotide
guuaacugugacauuuaag

SEQ ID NO: 1608635 - RNA, 19 nt, Artificial Sequence
  Description of Artificial Sequence: Synthetic oligonucleotide
ugacccguuaaauccaagu

SEQ ID NO: 1608636 - RNA, 19 nt, Artificial Sequence
  Description of Artificial Sequence: Synthetic oligonucleotide
agggguuuccggcugaucu

SEQ ID NO: 1608637 - RNA, 19 nt, Artificial Sequence
  Description of Artificial Sequence: Synthetic oligonucleotide
uaauuauucuuuugauaau

SEQ ID NO: 1608638 - RNA, 19 nt, Artificial Sequence
  Description of Artificial Sequence: Synthetic oligonucleotide
uuagcuuguugugacugag

SEQ ID NO: 1608639 - RNA, 19 nt, Artificial Sequence
  Description of Artificial Sequence: Synthetic oligonucleotide
agacggaaaagaaucuuuc

SEQ ID NO: 1608640 - RNA, 19 nt, Artificial Sequence
  Description of Artificial Sequence: Synthetic oligonucleotide
gagaucaggucguuauccc

SEQ ID NO: 1608641 - RNA, 19 nt, Artificial Sequence
  Description of Artificial Sequence: Synthetic oligonucleotide
gaaguuuccggggagagaa

SEQ ID NO: 1608642 - RNA, 19 nt, Artificial Sequence
  Description of Artificial Sequence: Synthetic oligonucleotide
augugucugccguagaggu

SEQ ID NO: 1608643 - RNA, 19 nt, Artificial Sequence
  Description of Artificial Sequence: Synthetic oligonucleotide
agaguuagagaggaggcca

SEQ ID NO: 1608644 - RNA, 19 nt, Artificial Sequence
  Description of Artificial Sequence: Synthetic oligonucleotide
gagagccgaauccucgagg

SEQ ID NO: 1608645 - RNA, 19 nt, Artificial Sequence
  Description of Artificial Sequence: Synthetic oligonucleotide
cacuuagauagagugcacg

SEQ ID NO: 1608646 - RNA, 19 nt, Artificial Sequence
  Description of Artificial Sequence: Synthetic oligonucleotide
gugacguuuauucaaggaa

SEQ ID NO: 1608647 - RNA, 19 nt, Artificial Sequence
  Description of Artificial Sequence: Synthetic oligonucleotide
agagcuuuguuuccugccu

SEQ ID NO: 1608648 - RNA, 19 nt, Artificial Sequence
  Description of Artificial Sequence: Synthetic oligonucleotide
caaaaucguugucacuuag

SEQ ID NO: 1608649 - RNA, 19 nt, Artificial Sequence
  Description of Artificial Sequence: Synthetic oligonucleotide
aauggauuuaagacuuuau

SEQ ID NO: 1608650 - RNA, 19 nt, Artificial Sequence
  Description of Artificial Sequence: Synthetic oligonucleotide
uucugacccguuaaaucca

SEQ ID NO: 1608651 - RNA, 19 nt, Artificial Sequence
  Description of Artificial Sequence: Synthetic oligonucleotide
gaaacucggguggcgagcg

SEQ ID NO: 1608652 - RNA, 19 nt, Artificial Sequence
  Description of Artificial Sequence: Synthetic oligonucleotide
aaucguugucacuuagaua

SEQ ID NO: 1608653 - RNA, 19 nt, Artificial Sequence
  Description of Artificial Sequence: Synthetic oligonucleotide
acauauuggagaugccccu

SEQ ID NO: 1608654 - RNA, 19 nt, Artificial Sequence
  Description of Artificial Sequence: Synthetic oligonucleotide
agacauguucgcagaaggc

SEQ ID NO: 1608655 - RNA, 19 nt, Artificial Sequence
  Description of Artificial Sequence: Synthetic oligonucleotide
aaaaucguugucacuuaga

SEQ ID NO: 1608656 - RNA, 19 nt, Artificial Sequence
  Description of Artificial Sequence: Synthetic oligonucleotide
ucggcaauugggguaaccc

SEQ ID NO: 1608657 - RNA, 19 nt, Artificial Sequence
  Description of Artificial Sequence: Synthetic oligonucleotide
ugacugagcaccagcugug

SEQ ID NO: 1608658 - RNA, 19 nt, Artificial Sequence
  Description of Artificial Sequence: Synthetic oligonucleotide
aaguugccuagcucuggag

SEQ ID NO: 1608659 - RNA, 19 nt, Artificial Sequence
  Description of Artificial Sequence: Synthetic oligonucleotide
ugaagaccugcuucugacc

SEQ ID NO: 1608660 - RNA, 19 nt, Artificial Sequence
  Description of Artificial Sequence: Synthetic oligonucleotide
agcgaugcacucgaacagc

SEQ ID NO: 1608661 - RNA, 19 nt, Artificial Sequence
  Description of Artificial Sequence: Synthetic oligonucleotide
gguguuugaguuucugaag

SEQ ID NO: 1608662 - RNA, 19 nt, Artificial Sequence
  Description of Artificial Sequence: Synthetic oligonucleotide
caugggacacaccaagcug

SEQ ID NO: 1608663 - RNA, 19 nt, Artificial Sequence
  Description of Artificial Sequence: Synthetic oligonucleotide
ggaaguuauuauaaggcac

SEQ ID NO: 1608664 - RNA, 19 nt, Artificial Sequence
  Description of Artificial Sequence: Synthetic oligonucleotide
agaaggcaacagcuggcgg

SEQ ID NO: 1608665 - RNA, 19 nt, Artificial Sequence
  Description of Artificial Sequence: Synthetic oligonucleotide
ugauaauaagcagccuugu

SEQ ID NO: 1608666 - RNA, 19 nt, Artificial Sequence
  Description of Artificial Sequence: Synthetic oligonucleotide
cugaauguggagcuccuuc

SEQ ID NO: 1608667 - RNA, 19 nt, Artificial Sequence
  Description of Artificial Sequence: Synthetic oligonucleotide
aggcaggauuucaaaaucg

SEQ ID NO: 1608668 - RNA, 19 nt, Artificial Sequence
  Description of Artificial Sequence: Synthetic oligonucleotide
auaaggcacauaaugagua

SEQ ID NO: 1608669 - RNA, 19 nt, Artificial Sequence
  Description of Artificial Sequence: Synthetic oligonucleotide
ggaacugaucggcaauugg

SEQ ID NO: 1608670 - RNA, 19 nt, Artificial Sequence
  Description of Artificial Sequence: Synthetic oligonucleotide
caagccguugacauccaac

SEQ ID NO: 1608671 - RNA, 19 nt, Artificial Sequence
  Description of Artificial Sequence: Synthetic oligonucleotide
uugauuugucguuauucuu

SEQ ID NO: 1608672 - RNA, 19 nt, Artificial Sequence
  Description of Artificial Sequence: Synthetic oligonucleotide
acugaucggcaauuggggu

SEQ ID NO: 1608673 - RNA, 19 nt, Artificial Sequence
  Description of Artificial Sequence: Synthetic oligonucleotide
aagacggaaaagaaucuuu

SEQ ID NO: 1608674 - RNA, 19 nt, Artificial Sequence
  Description of Artificial Sequence: Synthetic oligonucleotide
uuccccugaauguggagcu

SEQ ID NO: 1608675 - RNA, 19 nt, Artificial Sequence
  Description of Artificial Sequence: Synthetic oligonucleotide
aaggcacauaaugaguaaa

SEQ ID NO: 1608676 - RNA, 19 nt, Artificial Sequence
  Description of Artificial Sequence: Synthetic oligonucleotide
aguuaagcaccuccaaguu

SEQ ID NO: 1608677 - RNA, 19 nt, Artificial Sequence
  Description of Artificial Sequence: Synthetic oligonucleotide
gccccugucacucaugucc

SEQ ID NO: 1608678 - RNA, 19 nt, Artificial Sequence
  Description of Artificial Sequence: Synthetic oligonucleotide
ugacuuagacauguucgca

SEQ ID NO: 1608679 - RNA, 19 nt, Artificial Sequence
  Description of Artificial Sequence: Synthetic oligonucleotide
cauaaugaguaaagcauua

SEQ ID NO: 1608680 - RNA, 19 nt, Artificial Sequence
  Description of Artificial Sequence: Synthetic oligonucleotide
agugguuacaugauuuuaa

SEQ ID NO: 1608681 - RNA, 19 nt, Artificial Sequence
  Description of Artificial Sequence: Synthetic oligonucleotide
gauuugucguuauucuucu

SEQ ID NO: 1608682 - RNA, 19 nt, Artificial Sequence
  Description of Artificial Sequence: Synthetic oligonucleotide
ucaaaaucguugucacuua

SEQ ID NO: 1608683 - RNA, 19 nt, Artificial Sequence
  Description of Artificial Sequence: Synthetic oligonucleotide
uuguagguuucagagcgga

SEQ ID NO: 1608684 - RNA, 19 nt, Artificial Sequence
  Description of Artificial Sequence: Synthetic oligonucleotide
cucgccgauuuccuuaggc

SEQ ID NO: 1608685 - RNA, 19 nt, Artificial Sequence
  Description of Artificial Sequence: Synthetic oligonucleotide
caggucguuaucccugagg

SEQ ID NO: 1608686 - RNA, 19 nt, Artificial Sequence
  Description of Artificial Sequence: Synthetic oligonucleotide
uuuugauaauaagcagccu

SEQ ID NO: 1608687 - RNA, 19 nt, Artificial Sequence
  Description of Artificial Sequence: Synthetic oligonucleotide
auauuggagaugccccugu

SEQ ID NO: 1608688 - RNA, 19 nt, Artificial Sequence
  Description of Artificial Sequence: Synthetic oligonucleotide
aggcacauaaugaguaaag

SEQ ID NO: 1608689 - RNA, 19 nt, Artificial Sequence
  Description of Artificial Sequence: Synthetic oligonucleotide
agccgaauccucgaggcag

SEQ ID NO: 1608690 - RNA, 19 nt, Artificial Sequence
  Description of Artificial Sequence: Synthetic oligonucleotide
gacauccaacauauuggag

SEQ ID NO: 1608691 - RNA, 19 nt, Artificial Sequence
  Description of Artificial Sequence: Synthetic oligonucleotide
ggacacaccaagcuggaac

SEQ ID NO: 1608692 - RNA, 19 nt, Artificial Sequence
  Description of Artificial Sequence: Synthetic oligonucleotide
agagagccgaauccucgag

SEQ ID NO: 1608693 - RNA, 19 nt, Artificial Sequence
  Description of Artificial Sequence: Synthetic oligonucleotide
uugggaggaaagacggaaa

SEQ ID NO: 1608694 - RNA, 19 nt, Artificial Sequence
  Description of Artificial Sequence: Synthetic oligonucleotide
ucugccguagagguacuug

SEQ ID NO: 1608695 - RNA, 19 nt, Artificial Sequence
  Description of Artificial Sequence: Synthetic oligonucleotide
aguuuccggggagagaaug

SEQ ID NO: 1608696 - RNA, 19 nt, Artificial Sequence
  Description of Artificial Sequence: Synthetic oligonucleotide
guuccccugaauguggagc

SEQ ID NO: 1608697 - RNA, 19 nt, Artificial Sequence
  Description of Artificial Sequence: Synthetic oligonucleotide
uucgccugcaugugucugc

SEQ ID NO: 1608698 - RNA, 19 nt, Artificial Sequence
  Description of Artificial Sequence: Synthetic oligonucleotide
caggcgguuccccugaaug

SEQ ID NO: 1608699 - RNA, 19 nt, Artificial Sequence
  Description of Artificial Sequence: Synthetic oligonucleotide
gugccuaccauggaauuug

SEQ ID NO: 1608700 - RNA, 19 nt, Artificial Sequence
  Description of Artificial Sequence: Synthetic oligonucleotide
cauguucgcagaaggcaac

SEQ ID NO: 1608701 - RNA, 19 nt, Artificial Sequence
  Description of Artificial Sequence: Synthetic oligonucleotide
ucacuuagauagagugcac

SEQ ID NO: 1608702 - RNA, 19 nt, Artificial Sequence
  Description of Artificial Sequence: Synthetic oligonucleotide
auaaugaguaaagcauuaa

SEQ ID NO: 1608703 - RNA, 19 nt, Artificial Sequence
  Description of Artificial Sequence: Synthetic oligonucleotide
gacacaccaagcuggaacu

SEQ ID NO: 1608704 - RNA, 19 nt, Artificial Sequence
  Description of Artificial Sequence: Synthetic oligonucleotide
gcugcuagggguuuccggc

SEQ ID NO: 1608705 - RNA, 19 nt, Artificial Sequence
  Description of Artificial Sequence: Synthetic oligonucleotide
ugaucggcaauugggguaa

SEQ ID NO: 1608706 - RNA, 19 nt, Artificial Sequence
  Description of Artificial Sequence: Synthetic oligonucleotide
aaggcaacagcuggcgggu

SEQ ID NO: 1608707 - RNA, 19 nt, Artificial Sequence
  Description of Artificial Sequence: Synthetic oligonucleotide
ucugacccguuaaauccaa

SEQ ID NO: 1608708 - RNA, 19 nt, Artificial Sequence
  Description of Artificial Sequence: Synthetic oligonucleotide
ucccaauaucuggaggcag

SEQ ID NO: 1608709 - RNA, 19 nt, Artificial Sequence
  Description of Artificial Sequence: Synthetic oligonucleotide
gaguuagagaggaggccag

SEQ ID NO: 1608710 - RNA, 19 nt, Artificial Sequence
  Description of Artificial Sequence: Synthetic oligonucleotide
cacucuagcauugggagga

SEQ ID NO: 1608711 - RNA, 19 nt, Artificial Sequence
  Description of Artificial Sequence: Synthetic oligonucleotide
ugugcgugggagcccgcag

SEQ ID NO: 1608712 - RNA, 19 nt, Artificial Sequence
  Description of Artificial Sequence: Synthetic oligonucleotide
ggcaauugggguaacccag

SEQ ID NO: 1608713 - RNA, 19 nt, Artificial Sequence
  Description of Artificial Sequence: Synthetic oligonucleotide
uuguugugacugagcacca

SEQ ID NO: 1608714 - RNA, 19 nt, Artificial Sequence
  Description of Artificial Sequence: Synthetic oligonucleotide
ugggagagagccgaauccu

SEQ ID NO: 1608715 - RNA, 19 nt, Artificial Sequence
  Description of Artificial Sequence: Synthetic oligonucleotide
gagcaaggaaggccagaag

SEQ ID NO: 1608716 - RNA, 19 nt, Artificial Sequence
  Description of Artificial Sequence: Synthetic oligonucleotide
agcucgccgauuuccuuag

SEQ ID NO: 1608717 - RNA, 19 nt, Artificial Sequence
  Description of Artificial Sequence: Synthetic oligonucleotide
uggcgagcgaugcacucga

SEQ ID NO: 1608718 - RNA, 19 nt, Artificial Sequence
  Description of Artificial Sequence: Synthetic oligonucleotide
uucccaauaucuggaggca

SEQ ID NO: 1608719 - RNA, 19 nt, Artificial Sequence
  Description of Artificial Sequence: Synthetic oligonucleotide
cuuagauagagugcacgca

SEQ ID NO: 1608720 - RNA, 19 nt, Artificial Sequence
  Description of Artificial Sequence: Synthetic oligonucleotide
acuuugugagcuucccaau

SEQ ID NO: 1608721 - RNA, 19 nt, Artificial Sequence
  Description of Artificial Sequence: Synthetic oligonucleotide
uuguuagcuuguugugacu

SEQ ID NO: 1608722 - RNA, 19 nt, Artificial Sequence
  Description of Artificial Sequence: Synthetic oligonucleotide
uaugggccaaggagaacaa

SEQ ID NO: 1608723 - RNA, 19 nt, Artificial Sequence
  Description of Artificial Sequence: Synthetic oligonucleotide
uuggcggugaaggaaguua

SEQ ID NO: 1608724 - RNA, 19 nt, Artificial Sequence
  Description of Artificial Sequence: Synthetic oligonucleotide
uggaacugaucggcaauug

SEQ ID NO: 1608725 - RNA, 19 nt, Artificial Sequence
  Description of Artificial Sequence: Synthetic oligonucleotide
agcuuggcggugaaggaag

SEQ ID NO: 1608726 - RNA, 19 nt, Artificial Sequence
  Description of Artificial Sequence: Synthetic oligonucleotide
gaagaaguuuccggggaga

SEQ ID NO: 1608727 - RNA, 19 nt, Artificial Sequence
  Description of Artificial Sequence: Synthetic oligonucleotide
ggagagagccgaauccucg

SEQ ID NO: 1608728 - RNA, 19 nt, Artificial Sequence
  Description of Artificial Sequence: Synthetic oligonucleotide
ggaauuugcaggagaauga

SEQ ID NO: 1608729 - RNA, 19 nt, Artificial Sequence
  Description of Artificial Sequence: Synthetic oligonucleotide
cauauuggagaugccccug

SEQ ID NO: 1608730 - RNA, 19 nt, Artificial Sequence
  Description of Artificial Sequence: Synthetic oligonucleotide
ugccuaccauggaauuugc

SEQ ID NO: 1608731 - RNA, 19 nt, Artificial Sequence
  Description of Artificial Sequence: Synthetic oligonucleotide
uguagguuucagagcggau

SEQ ID NO: 1608732 - RNA, 19 nt, Artificial Sequence
  Description of Artificial Sequence: Synthetic oligonucleotide
guuagcuuguugugacuga

SEQ ID NO: 1608733 - RNA, 19 nt, Artificial Sequence
  Description of Artificial Sequence: Synthetic oligonucleotide
gagagagccgaauccucga

SEQ ID NO: 1608734 - RNA, 19 nt, Artificial Sequence
  Description of Artificial Sequence: Synthetic oligonucleotide
gcuucugacccguuaaauc

SEQ ID NO: 1608735 - RNA, 19 nt, Artificial Sequence
  Description of Artificial Sequence: Synthetic oligonucleotide
ucguugucacuuagauaga

SEQ ID NO: 1608736 - RNA, 19 nt, Artificial Sequence
  Description of Artificial Sequence: Synthetic oligonucleotide
ccguagagguacuuguagg

SEQ ID NO: 1608737 - RNA, 19 nt, Artificial Sequence
  Description of Artificial Sequence: Synthetic oligonucleotide
gccguagagguacuuguag

SEQ ID NO: 1608738 - RNA, 19 nt, Artificial Sequence
  Description of Artificial Sequence: Synthetic oligonucleotide
acauaauagcuuggcggug

SEQ ID NO: 1608739 - RNA, 19 nt, Artificial Sequence
  Description of Artificial Sequence: Synthetic oligonucleotide
uuccggggagagaauguuc

SEQ ID NO: 1608740 - RNA, 19 nt, Artificial Sequence
  Description of Artificial Sequence: Synthetic oligonucleotide
gcaugugucugccguagag

SEQ ID NO: 1608741 - RNA, 19 nt, Artificial Sequence
  Description of Artificial Sequence: Synthetic oligonucleotide
acaaaugggaauggauuua

SEQ ID NO: 1608742 - RNA, 19 nt, Artificial Sequence
  Description of Artificial Sequence: Synthetic oligonucleotide
acauguucgcagaaggcaa

SEQ ID NO: 1608743 - RNA, 19 nt, Artificial Sequence
  Description of Artificial Sequence: Synthetic oligonucleotide
uaauagcuuggcggugaag

SEQ ID NO: 1608744 - RNA, 19 nt, Artificial Sequence
  Description of Artificial Sequence: Synthetic oligonucleotide
acagucaggcgguuccccu

SEQ ID NO: 1608745 - RNA, 19 nt, Artificial Sequence
  Description of Artificial Sequence: Synthetic oligonucleotide
guagguuucagagcggaua

SEQ ID NO: 1608746 - RNA, 19 nt, Artificial Sequence
  Description of Artificial Sequence: Synthetic oligonucleotide
auaauagcuuggcggugaa

SEQ ID NO: 1608747 - RNA, 19 nt, Artificial Sequence
  Description of Artificial Sequence: Synthetic oligonucleotide
cuuuggcaauuuuaaggaa

SEQ ID NO: 1608748 - RNA, 19 nt, Artificial Sequence
  Description of Artificial Sequence: Synthetic oligonucleotide
gacguuuauucaaggaacu

SEQ ID NO: 1608749 - RNA, 19 nt, Artificial Sequence
  Description of Artificial Sequence: Synthetic oligonucleotide
ugcuucugacccguuaaau

SEQ ID NO: 1608750 - RNA, 19 nt, Artificial Sequence
  Description of Artificial Sequence: Synthetic oligonucleotide
uggguucgccugcaugugu

SEQ ID NO: 1608751 - RNA, 19 nt, Artificial Sequence
  Description of Artificial Sequence: Synthetic oligonucleotide
agcucuggaggcagaacag

SEQ ID NO: 1608752 - RNA, 19 nt, Artificial Sequence
  Description of Artificial Sequence: Synthetic oligonucleotide
gcacucuagcauugggagg

SEQ ID NO: 1608753 - RNA, 19 nt, Artificial Sequence
  Description of Artificial Sequence: Synthetic oligonucleotide
cacgguuguuagcuuguug

SEQ ID NO: 1608754 - RNA, 19 nt, Artificial Sequence
  Description of Artificial Sequence: Synthetic oligonucleotide
ugugccuaccauggaauuu

SEQ ID NO: 1608755 - RNA, 19 nt, Artificial Sequence
  Description of Artificial Sequence: Synthetic oligonucleotide
ugcaugugucugccguaga

SEQ ID NO: 1608756 - RNA, 19 nt, Artificial Sequence
  Description of Artificial Sequence: Synthetic oligonucleotide
ggugagcucgccgauuucc

SEQ ID NO: 1608757 - RNA, 19 nt, Artificial Sequence
  Description of Artificial Sequence: Synthetic oligonucleotide
ugugucugccguagaggua

SEQ ID NO: 1608758 - RNA, 19 nt, Artificial Sequence
  Description of Artificial Sequence: Synthetic oligonucleotide
guggcgagcgaugcacucg

SEQ ID NO: 1608759 - RNA, 19 nt, Artificial Sequence
  Description of Artificial Sequence: Synthetic oligonucleotide
aaccugugccuaccaugga

SEQ ID NO: 1608760 - RNA, 19 nt, Artificial Sequence
  Description of Artificial Sequence: Synthetic oligonucleotide
caaaugggaauggauuuaa

SEQ ID NO: 1608761 - RNA, 19 nt, Artificial Sequence
  Description of Artificial Sequence: Synthetic oligonucleotide
cugcaugugucugccguag

SEQ ID NO: 1608762 - RNA, 19 nt, Artificial Sequence
  Description of Artificial Sequence: Synthetic oligonucleotide
uuggcugcuagggguuucc

SEQ ID NO: 1608763 - RNA, 19 nt, Artificial Sequence
  Description of Artificial Sequence: Synthetic oligonucleotide
aacucggguggcgagcgau

SEQ ID NO: 1608764 - RNA, 19 nt, Artificial Sequence
  Description of Artificial Sequence: Synthetic oligonucleotide
gacccguuaaauccaaguu

SEQ ID NO: 1608765 - RNA, 19 nt, Artificial Sequence
  Description of Artificial Sequence: Synthetic oligonucleotide
cuuugugagcuucccaaua

SEQ ID NO: 1608766 - RNA, 19 nt, Artificial Sequence
  Description of Artificial Sequence: Synthetic oligonucleotide
gugagaucaggucguuauc

SEQ ID NO: 1608767 - RNA, 19 nt, Artificial Sequence
  Description of Artificial Sequence: Synthetic oligonucleotide
ccuguucaugcccagguuc

SEQ ID NO: 1608768 - RNA, 19 nt, Artificial Sequence
  Description of Artificial Sequence: Synthetic oligonucleotide
uuuccggggagagaauguu

SEQ ID NO: 1608769 - RNA, 19 nt, Artificial Sequence
  Description of Artificial Sequence: Synthetic oligonucleotide
gcaauugggguaacccagg

SEQ ID NO: 1608770 - RNA, 19 nt, Artificial Sequence
  Description of Artificial Sequence: Synthetic oligonucleotide
acgcaggguggugagguag

SEQ ID NO: 1608771 - RNA, 19 nt, Artificial Sequence
  Description of Artificial Sequence: Synthetic oligonucleotide
aauccucgaggcagugugu

SEQ ID NO: 1608772 - RNA, 19 nt, Artificial Sequence
  Description of Artificial Sequence: Synthetic oligonucleotide
cuuagacauguucgcagaa

SEQ ID NO: 1608773 - RNA, 19 nt, Artificial Sequence
  Description of Artificial Sequence: Synthetic oligonucleotide
caaguugccuagcucugga

SEQ ID NO: 1608774 - RNA, 19 nt, Artificial Sequence
  Description of Artificial Sequence: Synthetic oligonucleotide
cugaucggcaauuggggua

SEQ ID NO: 1608775 - RNA, 19 nt, Artificial Sequence
  Description of Artificial Sequence: Synthetic oligonucleotide
gguuguuagcuuguuguga

SEQ ID NO: 1608776 - RNA, 19 nt, Artificial Sequence
  Description of Artificial Sequence: Synthetic oligonucleotide
ggagaugccccugucacuc

SEQ ID NO: 1608777 - RNA, 19 nt, Artificial Sequence
  Description of Artificial Sequence: Synthetic oligonucleotide
cugacccguuaaauccaag

SEQ ID NO: 1608778 - RNA, 19 nt, Artificial Sequence
  Description of Artificial Sequence: Synthetic oligonucleotide
guaacccagggguuguucu

SEQ ID NO: 1608779 - RNA, 19 nt, Artificial Sequence
  Description of Artificial Sequence: Synthetic oligonucleotide
uggcgggugugcgugggag

SEQ ID NO: 1608780 - RNA, 19 nt, Artificial Sequence
  Description of Artificial Sequence: Synthetic oligonucleotide
agccguugacauccaacau

SEQ ID NO: 1608781 - RNA, 19 nt, Artificial Sequence
  Description of Artificial Sequence: Synthetic oligonucleotide
aagcuggaacugaucggca

SEQ ID NO: 1608782 - RNA, 19 nt, Artificial Sequence
  Description of Artificial Sequence: Synthetic oligonucleotide
caaggagaacaagccguug

SEQ ID NO: 1608783 - RNA, 19 nt, Artificial Sequence
  Description of Artificial Sequence: Synthetic oligonucleotide
cgaggcaguguguucaacc

SEQ ID NO: 1608784 - RNA, 19 nt, Artificial Sequence
  Description of Artificial Sequence: Synthetic oligonucleotide
aguuagagaggaggccaga

SEQ ID NO: 1608785 - RNA, 19 nt, Artificial Sequence
  Description of Artificial Sequence: Synthetic oligonucleotide
aaacucggguggcgagcga

SEQ ID NO: 1608786 - RNA, 19 nt, Artificial Sequence
  Description of Artificial Sequence: Synthetic oligonucleotide
uaagcagccuugugacguu

SEQ ID NO: 1608787 - RNA, 19 nt, Artificial Sequence
  Description of Artificial Sequence: Synthetic oligonucleotide
ccagaagaguuagagagga

SEQ ID NO: 1608788 - RNA, 19 nt, Artificial Sequence
  Description of Artificial Sequence: Synthetic oligonucleotide
ccuugugacguuuauucaa

SEQ ID NO: 1608789 - RNA, 19 nt, Artificial Sequence
  Description of Artificial Sequence: Synthetic oligonucleotide
cagguuguuguaggucaag

SEQ ID NO: 1608790 - RNA, 19 nt, Artificial Sequence
  Description of Artificial Sequence: Synthetic oligonucleotide
cucggguggcgagcgaugc

SEQ ID NO: 1608791 - RNA, 19 nt, Artificial Sequence
  Description of Artificial Sequence: Synthetic oligonucleotide
ggaggcaggauuucaaaau

SEQ ID NO: 1608792 - RNA, 19 nt, Artificial Sequence
  Description of Artificial Sequence: Synthetic oligonucleotide
gauagagugcacgcagggu

SEQ ID NO: 1608793 - RNA, 19 nt, Artificial Sequence
  Description of Artificial Sequence: Synthetic oligonucleotide
ugagcucgccgauuuccuu

SEQ ID NO: 1608794 - RNA, 19 nt, Artificial Sequence
  Description of Artificial Sequence: Synthetic oligonucleotide
gguugcacucuagcauugg

SEQ ID NO: 1608795 - RNA, 19 nt, Artificial Sequence
  Description of Artificial Sequence: Synthetic oligonucleotide
gcuuguugugacugagcac

SEQ ID NO: 1608796 - RNA, 19 nt, Artificial Sequence
  Description of Artificial Sequence: Synthetic oligonucleotide
uccucgaggcaguguguuc

SEQ ID NO: 1608797 - RNA, 19 nt, Artificial Sequence
  Description of Artificial Sequence: Synthetic oligonucleotide
acacaccaagcuggaacug

SEQ ID NO: 1608798 - RNA, 19 nt, Artificial Sequence
  Description of Artificial Sequence: Synthetic oligonucleotide
ucggguggcgagcgaugca

SEQ ID NO: 1608799 - RNA, 19 nt, Artificial Sequence
  Description of Artificial Sequence: Synthetic oligonucleotide
augggccaaggagaacaag

SEQ ID NO: 1608800 - RNA, 19 nt, Artificial Sequence
  Description of Artificial Sequence: Synthetic oligonucleotide
gggcacgguuguuagcuug

SEQ ID NO: 1608801 - RNA, 19 nt, Artificial Sequence
  Description of Artificial Sequence: Synthetic oligonucleotide
cgccgauuuccuuaggcag

SEQ ID NO: 1608802 - RNA, 19 nt, Artificial Sequence
  Description of Artificial Sequence: Synthetic oligonucleotide
cacaccaagcuggaacuga

SEQ ID NO: 1608803 - RNA, 19 nt, Artificial Sequence
  Description of Artificial Sequence: Synthetic oligonucleotide
gccguugacauccaacaua

SEQ ID NO: 1608804 - RNA, 19 nt, Artificial Sequence
  Description of Artificial Sequence: Synthetic oligonucleotide
gagccgaauccucgaggca

SEQ ID NO: 1608805 - RNA, 19 nt, Artificial Sequence
  Description of Artificial Sequence: Synthetic oligonucleotide
agguugcacucuagcauug

SEQ ID NO: 1608806 - RNA, 19 nt, Artificial Sequence
  Description of Artificial Sequence: Synthetic oligonucleotide
ccguuaaauccaaguugcc

SEQ ID NO: 1608807 - RNA, 19 nt, Artificial Sequence
  Description of Artificial Sequence: Synthetic oligonucleotide
guugucacuuagauagagu

SEQ ID NO: 1608808 - RNA, 19 nt, Artificial Sequence
  Description of Artificial Sequence: Synthetic oligonucleotide
ugucugccguagagguacu

SEQ ID NO: 1608809 - RNA, 19 nt, Artificial Sequence
  Description of Artificial Sequence: Synthetic oligonucleotide
cgagcgaugcacucgaaca

SEQ ID NO: 1608810 - RNA, 19 nt, Artificial Sequence
  Description of Artificial Sequence: Synthetic oligonucleotide
gguuucagagcggauauau

SEQ ID NO: 1608811 - RNA, 19 nt, Artificial Sequence
  Description of Artificial Sequence: Synthetic oligonucleotide
accugcuucugacccguua

SEQ ID NO: 1608812 - RNA, 19 nt, Artificial Sequence
  Description of Artificial Sequence: Synthetic oligonucleotide
aacaagccguugacaucca

SEQ ID NO: 1608813 - RNA, 19 nt, Artificial Sequence
  Description of Artificial Sequence: Synthetic oligonucleotide
cugccguagagguacuugu

SEQ ID NO: 1608814 - RNA, 19 nt, Artificial Sequence
  Description of Artificial Sequence: Synthetic oligonucleotide
cagaacagucaggcgguuc

SEQ ID NO: 1608815 - RNA, 19 nt, Artificial Sequence
  Description of Artificial Sequence: Synthetic oligonucleotide
gagaugccccugucacuca

SEQ ID NO: 1608816 - RNA, 19 nt, Artificial Sequence
  Description of Artificial Sequence: Synthetic oligonucleotide
cguugucacuuagauagag

SEQ ID NO: 1608817 - RNA, 19 nt, Artificial Sequence
  Description of Artificial Sequence: Synthetic oligonucleotide
gcgaugcacucgaacagcc

SEQ ID NO: 1608818 - RNA, 19 nt, Artificial Sequence
  Description of Artificial Sequence: Synthetic oligonucleotide
cuggguucgccugcaugug

SEQ ID NO: 1608819 - RNA, 19 nt, Artificial Sequence
  Description of Artificial Sequence: Synthetic oligonucleotide
ccaaguugccuagcucugg

SEQ ID NO: 1608820 - RNA, 19 nt, Artificial Sequence
  Description of Artificial Sequence: Synthetic oligonucleotide
gggugugcgugggagcccg

SEQ ID NO: 1608821 - RNA, 19 nt, Artificial Sequence
  Description of Artificial Sequence: Synthetic oligonucleotide
auccucgaggcaguguguu

SEQ ID NO: 1608822 - RNA, 19 nt, Artificial Sequence
  Description of Artificial Sequence: Synthetic oligonucleotide
gcgagcgaugcacucgaac

SEQ ID NO: 1608823 - RNA, 19 nt, Artificial Sequence
  Description of Artificial Sequence: Synthetic oligonucleotide
guaaagcauuaaaaguguu

SEQ ID NO: 1608824 - RNA, 19 nt, Artificial Sequence
  Description of Artificial Sequence: Synthetic oligonucleotide
aaguuuccggggagagaau

SEQ ID NO: 1608825 - RNA, 19 nt, Artificial Sequence
  Description of Artificial Sequence: Synthetic oligonucleotide
ccuuaggcagugagaucag

SEQ ID NO: 1608826 - RNA, 19 nt, Artificial Sequence
  Description of Artificial Sequence: Synthetic oligonucleotide
aagcagccuugugacguuu

SEQ ID NO: 1608827 - RNA, 19 nt, Artificial Sequence
  Description of Artificial Sequence: Synthetic oligonucleotide
gguggcgagcgaugcacuc

SEQ ID NO: 1608828 - RNA, 19 nt, Artificial Sequence
  Description of Artificial Sequence: Synthetic oligonucleotide
cacuuccggcugauucuuc

SEQ ID NO: 1608829 - RNA, 19 nt, Artificial Sequence
  Description of Artificial Sequence: Synthetic oligonucleotide
gcggugaaggaaguuauua

SEQ ID NO: 1608830 - RNA, 19 nt, Artificial Sequence
  Description of Artificial Sequence: Synthetic oligonucleotide
ccccugaauguggagcucc

SEQ ID NO: 1608831 - RNA, 19 nt, Artificial Sequence
  Description of Artificial Sequence: Synthetic oligonucleotide
ggcaggauuucaaaaucgu

SEQ ID NO: 1608832 - RNA, 19 nt, Artificial Sequence
  Description of Artificial Sequence: Synthetic oligonucleotide
guuuccggggagagaaugu

SEQ ID NO: 1608833 - RNA, 19 nt, Artificial Sequence
  Description of Artificial Sequence: Synthetic oligonucleotide
gguaacccagggguuguuc

SEQ ID NO: 1608834 - RNA, 19 nt, Artificial Sequence
  Description of Artificial Sequence: Synthetic oligonucleotide
gcccgcaggggaaacucgg

SEQ ID NO: 1608835 - RNA, 19 nt, Artificial Sequence
  Description of Artificial Sequence: Synthetic oligonucleotide
acucggguggcgagcgaug

SEQ ID NO: 1608836 - RNA, 19 nt, Artificial Sequence
  Description of Artificial Sequence: Synthetic oligonucleotide
cccgcaggggaaacucggg

SEQ ID NO: 1608837 - RNA, 19 nt, Artificial Sequence
  Description of Artificial Sequence: Synthetic oligonucleotide
gcgggugugcgugggagcc

SEQ ID NO: 1608838 - RNA, 19 nt, Artificial Sequence
  Description of Artificial Sequence: Synthetic oligonucleotide
cgguuguuagcuuguugug

SEQ ID NO: 1608839 - RNA, 19 nt, Artificial Sequence
  Description of Artificial Sequence: Synthetic oligonucleotide
ggcgggugugcgugggagc

SEQ ID NO: 1608840 - RNA, 19 nt, Artificial Sequence
  Description of Artificial Sequence: Synthetic oligonucleotide
gggagagagccgaauccuc

SEQ ID NO: 1608841 - RNA, 19 nt, Artificial Sequence
  Description of Artificial Sequence: Synthetic oligonucleotide
cucgaggcaguguguucaa

SEQ ID NO: 1608842 - RNA, 19 nt, Artificial Sequence
  Description of Artificial Sequence: Synthetic oligonucleotide
ccucgaggcaguguguuca

SEQ ID NO: 1608843 - RNA, 19 nt, Artificial Sequence
  Description of Artificial Sequence: Synthetic oligonucleotide
ggguucgccugcauguguc

SEQ ID NO: 1608844 - RNA, 19 nt, Artificial Sequence
  Description of Artificial Sequence: Synthetic oligonucleotide
ggguuguucucugcuuuga

SEQ ID NO: 1608845 - RNA, 19 nt, Artificial Sequence
  Description of Artificial Sequence: Synthetic oligonucleotide
guaccaccucccacaagaa

SEQ ID NO: 1608846 - RNA, 19 nt, Artificial Sequence
  Description of Artificial Sequence: Synthetic oligonucleotide
ggggaaacucggguggcga

SEQ ID NO: 1608847 - RNA, 19 nt, Artificial Sequence
  Description of Artificial Sequence: Synthetic oligonucleotide
ggucguuaucccugaggcu

SEQ ID NO: 1608848 - RNA, 19 nt, Artificial Sequence
  Description of Artificial Sequence: Synthetic oligonucleotide
guuucagagcggauauauu

SEQ ID NO: 1608849 - RNA, 19 nt, Artificial Sequence
  Description of Artificial Sequence: Synthetic oligonucleotide
gcuggaacugaucggcaau

SEQ ID NO: 1608850 - RNA, 19 nt, Artificial Sequence
  Description of Artificial Sequence: Synthetic oligonucleotide
cccagggguuguucucugc

SEQ ID NO: 1608851 - RNA, 19 nt, Artificial Sequence
  Description of Artificial Sequence: Synthetic oligonucleotide
gcucgccgauuuccuuagg

SEQ ID NO: 1608852 - RNA, 19 nt, Artificial Sequence
  Description of Artificial Sequence: Synthetic oligonucleotide
agcagccuugugacguuua

SEQ ID NO: 1608853 - RNA, 19 nt, Artificial Sequence
  Description of Artificial Sequence: Synthetic oligonucleotide
cguuaaauccaaguugccu

SEQ ID NO: 1608854 - RNA, 19 nt, Artificial Sequence
  Description of Artificial Sequence: Synthetic oligonucleotide
cucuagcauugggaggaaa

SEQ ID NO: 1608855 - RNA, 19 nt, Artificial Sequence
  Description of Artificial Sequence: Synthetic oligonucleotide
cggcaauugggguaaccca

SEQ ID NO: 1608856 - RNA, 19 nt, Artificial Sequence
  Description of Artificial Sequence: Synthetic oligonucleotide
gccgauuuccuuaggcagu

SEQ ID NO: 1608857 - RNA, 19 nt, Artificial Sequence
  Description of Artificial Sequence: Synthetic oligonucleotide
ccugugccuaccauggaau

SEQ ID NO: 1608858 - RNA, 19 nt, Artificial Sequence
  Description of Artificial Sequence: Synthetic oligonucleotide
gguucgccugcaugugucu

SEQ ID NO: 1608859 - RNA, 19 nt, Artificial Sequence
  Description of Artificial Sequence: Synthetic oligonucleotide
cagugagaucaggucguua

SEQ ID NO: 1608860 - RNA, 19 nt, Artificial Sequence
  Description of Artificial Sequence: Synthetic oligonucleotide
gccuaccauggaauuugca

SEQ ID NO: 1608861 - RNA, 19 nt, Artificial Sequence
  Description of Artificial Sequence: Synthetic oligonucleotide
ggcacgguuguuagcuugu

SEQ ID NO: 1608862 - RNA, 19 nt, Artificial Sequence
  Description of Artificial Sequence: Synthetic oligonucleotide
gcaggagaaugagagcuuu

SEQ ID NO: 1608863 - RNA, 19 nt, Artificial Sequence
  Description of Artificial Sequence: Synthetic oligonucleotide
cuggcgggugugcguggga

SEQ ID NO: 1608864 - RNA, 19 nt, Artificial Sequence
  Description of Artificial Sequence: Synthetic oligonucleotide
cacgcaggguggugaggua

SEQ ID NO: 1608865 - RNA, 19 nt, Artificial Sequence
  Description of Artificial Sequence: Synthetic oligonucleotide
gcagccuugugacguuuau

SEQ ID NO: 1608866 - RNA, 19 nt, Artificial Sequence
  Description of Artificial Sequence: Synthetic oligonucleotide
cggugaaggaaguuauuau

SEQ ID NO: 1608867 - RNA, 19 nt, Artificial Sequence
  Description of Artificial Sequence: Synthetic oligonucleotide
gcugaucugggugggcagu

SEQ ID NO: 1608868 - RNA, 19 nt, Artificial Sequence
  Description of Artificial Sequence: Synthetic oligonucleotide
ggcugaguaucugcaacuu

SEQ ID NO: 1608869 - RNA, 19 nt, Artificial Sequence
  Description of Artificial Sequence: Synthetic oligonucleotide
ccgaauccucgaggcagug

SEQ ID NO: 1608870 - RNA, 19 nt, Artificial Sequence
  Description of Artificial Sequence: Synthetic oligonucleotide
cuuggcggugaaggaaguu

SEQ ID NO: 1608871 - RNA, 19 nt, Artificial Sequence
  Description of Artificial Sequence: Synthetic oligonucleotide
guucuggguucgccugcau

SEQ ID NO: 1608872 - RNA, 19 nt, Artificial Sequence
  Description of Artificial Sequence: Synthetic oligonucleotide
gggguaacccagggguugu

SEQ ID NO: 1608873 - RNA, 19 nt, Artificial Sequence
  Description of Artificial Sequence: Synthetic oligonucleotide
gggacacaccaagcuggaa

SEQ ID NO: 1608874 - RNA, 19 nt, Artificial Sequence
  Description of Artificial Sequence: Synthetic oligonucleotide
gccgaauccucgaggcagu

SEQ ID NO: 1608875 - RNA, 19 nt, Artificial Sequence
  Description of Artificial Sequence: Synthetic oligonucleotide
ccggcugauucuucucccu

SEQ ID NO: 1608876 - RNA, 19 nt, Artificial Sequence
  Description of Artificial Sequence: Synthetic oligonucleotide
gucugccguagagguacuu

SEQ ID NO: 1608877 - RNA, 19 nt, Artificial Sequence
  Description of Artificial Sequence: Synthetic oligonucleotide
ggcggugaaggaaguuauu

SEQ ID NO: 1608878 - RNA, 19 nt, Artificial Sequence
  Description of Artificial Sequence: Synthetic oligonucleotide
ggguggcgagcgaugcacu

SEQ ID NO: 1608879 - RNA, 19 nt, Artificial Sequence
  Description of Artificial Sequence: Synthetic oligonucleotide
gguuuccggcugaucuuuu

SEQ ID NO: 1608880 - RNA, 19 nt, Artificial Sequence
  Description of Artificial Sequence: Synthetic oligonucleotide
ccggggagagaauguucau

SEQ ID NO: 1608881 - RNA, 19 nt, Artificial Sequence
  Description of Artificial Sequence: Synthetic oligonucleotide
ccacuuccggcugauucuu

SEQ ID NO: 1608882 - RNA, 19 nt, Artificial Sequence
  Description of Artificial Sequence: Synthetic oligonucleotide
gcacgguuguuagcuuguu

SEQ ID NO: 1608883 - RNA, 19 nt, Artificial Sequence
  Description of Artificial Sequence: Synthetic oligonucleotide
ggguaacccagggguuguu

SEQ ID NO: 1608884 - RNA, 19 nt, Artificial Sequence
  Description of Artificial Sequence: Synthetic oligonucleotide
uuugcuaguaggcauaucg

SEQ ID NO: 1608885 - RNA, 19 nt, Artificial Sequence
  Description of Artificial Sequence: Synthetic oligonucleotide
uuaaaucuagcuuacaagc

SEQ ID NO: 1608886 - RNA, 19 nt, Artificial Sequence
  Description of Artificial Sequence: Synthetic oligonucleotide
gauagugugaauuaagaug

SEQ ID NO: 1608887 - RNA, 19 nt, Artificial Sequence
  Description of Artificial Sequence: Synthetic oligonucleotide
auagugugaauuaagaugc

SEQ ID NO: 1608888 - RNA, 19 nt, Artificial Sequence
  Description of Artificial Sequence: Synthetic oligonucleotide
ugaauuaagaugccggagg

SEQ ID NO: 1608889 - RNA, 19 nt, Artificial Sequence
  Description of Artificial Sequence: Synthetic oligonucleotide
acagauucaauacacggcg

SEQ ID NO: 1608890 - RNA, 19 nt, Artificial Sequence
  Description of Artificial Sequence: Synthetic oligonucleotide
aucaucuuuagccuggggc

SEQ ID NO: 1608891 - RNA, 19 nt, Artificial Sequence
  Description of Artificial Sequence: Synthetic oligonucleotide
ugagcuuuaaggcauuccg

SEQ ID NO: 1608892 - RNA, 19 nt, Artificial Sequence
  Description of Artificial Sequence: Synthetic oligonucleotide
aauaagaguuuguugaagu

SEQ ID NO: 1608893 - RNA, 19 nt, Artificial Sequence
  Description of Artificial Sequence: Synthetic oligonucleotide
agaauucacacacuugagc

SEQ ID NO: 1608894 - RNA, 19 nt, Artificial Sequence
  Description of Artificial Sequence: Synthetic oligonucleotide
uuuaucaugugguucauca

SEQ ID NO: 1608895 - RNA, 19 nt, Artificial Sequence
  Description of Artificial Sequence: Synthetic oligonucleotide
uacuauguaagaaagcaga

SEQ ID NO: 1608896 - RNA, 19 nt, Artificial Sequence
  Description of Artificial Sequence: Synthetic oligonucleotide
ugugacucaagucucauga

SEQ ID NO: 1608897 - RNA, 19 nt, Artificial Sequence
  Description of Artificial Sequence: Synthetic oligonucleotide
ucgacaagaauccacaaga

SEQ ID NO: 1608898 - RNA, 19 nt, Artificial Sequence
  Description of Artificial Sequence: Synthetic oligonucleotide
uccauauuaaaucuguccu

SEQ ID NO: 1608899 - RNA, 19 nt, Artificial Sequence
  Description of Artificial Sequence: Synthetic oligonucleotide
agcacugugugucaguugc

SEQ ID NO: 1608900 - RNA, 19 nt, Artificial Sequence
  Description of Artificial Sequence: Synthetic oligonucleotide
uguuaucucgacaagaauc

SEQ ID NO: 1608901 - RNA, 19 nt, Artificial Sequence
  Description of Artificial Sequence: Synthetic oligonucleotide
uuuaagguucucuauagcu

SEQ ID NO: 1608902 - RNA, 19 nt, Artificial Sequence
  Description of Artificial Sequence: Synthetic oligonucleotide
ugaacuuagaaagugauuc

SEQ ID NO: 1608903 - RNA, 19 nt, Artificial Sequence
  Description of Artificial Sequence: Synthetic oligonucleotide
aaucucuauccaugcaugc

SEQ ID NO: 1608904 - RNA, 19 nt, Artificial Sequence
  Description of Artificial Sequence: Synthetic oligonucleotide
uccuuaaggucccagaaag

SEQ ID NO: 1608905 - RNA, 19 nt, Artificial Sequence
  Description of Artificial Sequence: Synthetic oligonucleotide
aauucuccgaauuucaaau

SEQ ID NO: 1608906 - RNA, 19 nt, Artificial Sequence
  Description of Artificial Sequence: Synthetic oligonucleotide
uaucaugugguucaucaag

SEQ ID NO: 1608907 - RNA, 19 nt, Artificial Sequence
  Description of Artificial Sequence: Synthetic oligonucleotide
gagcucuaagauuugaggg

SEQ ID NO: 1608908 - RNA, 19 nt, Artificial Sequence
  Description of Artificial Sequence: Synthetic oligonucleotide
aaagugauuccaaagaggu

SEQ ID NO: 1608909 - RNA, 19 nt, Artificial Sequence
  Description of Artificial Sequence: Synthetic oligonucleotide
ucuauagcugaaguuaugg

SEQ ID NO: 1608910 - RNA, 19 nt, Artificial Sequence
  Description of Artificial Sequence: Synthetic oligonucleotide
auuuuaagguucucuauag

SEQ ID NO: 1608911 - RNA, 19 nt, Artificial Sequence
  Description of Artificial Sequence: Synthetic oligonucleotide
auaacuguuaucucgacaa

SEQ ID NO: 1608912 - RNA, 19 nt, Artificial Sequence
  Description of Artificial Sequence: Synthetic oligonucleotide
agaaagugauuccaaagag

SEQ ID NO: 1608913 - RNA, 19 nt, Artificial Sequence
  Description of Artificial Sequence: Synthetic oligonucleotide
uuccauauuaaaucugucc

SEQ ID NO: 1608914 - RNA, 19 nt, Artificial Sequence
  Description of Artificial Sequence: Synthetic oligonucleotide
uuaagguucucuauagcug

SEQ ID NO: 1608915 - RNA, 19 nt, Artificial Sequence
  Description of Artificial Sequence: Synthetic oligonucleotide
cacacuugagcuuuaaggc

SEQ ID NO: 1608916 - RNA, 19 nt, Artificial Sequence
  Description of Artificial Sequence: Synthetic oligonucleotide
cuucauaugcucuauugag

SEQ ID NO: 1608917 - RNA, 19 nt, Artificial Sequence
  Description of Artificial Sequence: Synthetic oligonucleotide
cugacuuccauauuaaauc

SEQ ID NO: 1608918 - RNA, 19 nt, Artificial Sequence
  Description of Artificial Sequence: Synthetic oligonucleotide
agccauaacuguuaucucg

SEQ ID NO: 1608919 - RNA, 19 nt, Artificial Sequence
  Description of Artificial Sequence: Synthetic oligonucleotide
auaggucucggucuuuugc

SEQ ID NO: 1608920 - RNA, 19 nt, Artificial Sequence
  Description of Artificial Sequence: Synthetic oligonucleotide
aaaucuagcuuacaagcaa

SEQ ID NO: 1608921 - RNA, 19 nt, Artificial Sequence
  Description of Artificial Sequence: Synthetic oligonucleotide
ugcucuauugaguugcucc

SEQ ID NO: 1608922 - RNA, 19 nt, Artificial Sequence
  Description of Artificial Sequence: Synthetic oligonucleotide
acauagaacacauuauggu

SEQ ID NO: 1608923 - RNA, 19 nt, Artificial Sequence
  Description of Artificial Sequence: Synthetic oligonucleotide
gaaagugauuccaaagagg

SEQ ID NO: 1608924 - RNA, 19 nt, Artificial Sequence
  Description of Artificial Sequence: Synthetic oligonucleotide
aguuuguugaagugacagc

SEQ ID NO: 1608925 - RNA, 19 nt, Artificial Sequence
  Description of Artificial Sequence: Synthetic oligonucleotide
uaaaucuagcuuacaagca

SEQ ID NO: 1608926 - RNA, 19 nt, Artificial Sequence
  Description of Artificial Sequence: Synthetic oligonucleotide
ugugucaguugcaauaucu

SEQ ID NO: 1608927 - RNA, 19 nt, Artificial Sequence
  Description of Artificial Sequence: Synthetic oligonucleotide
aaaagcucuugacagaauu

SEQ ID NO: 1608928 - RNA, 19 nt, Artificial Sequence
  Description of Artificial Sequence: Synthetic oligonucleotide
aagguacauagccauaacu

SEQ ID NO: 1608929 - RNA, 19 nt, Artificial Sequence
  Description of Artificial Sequence: Synthetic oligonucleotide
cauagaacacauuaugguc

SEQ ID NO: 1608930 - RNA, 19 nt, Artificial Sequence
  Description of Artificial Sequence: Synthetic oligonucleotide
uaucaguacacuguauagg

SEQ ID NO: 1608931 - RNA, 19 nt, Artificial Sequence
  Description of Artificial Sequence: Synthetic oligonucleotide
aauaucugguauauuaagu

SEQ ID NO: 1608932 - RNA, 19 nt, Artificial Sequence
  Description of Artificial Sequence: Synthetic oligonucleotide
uauuaucccuuucaugaug

SEQ ID NO: 1608933 - RNA, 19 nt, Artificial Sequence
  Description of Artificial Sequence: Synthetic oligonucleotide
aaguuauggggucaauucu

SEQ ID NO: 1608934 - RNA, 19 nt, Artificial Sequence
  Description of Artificial Sequence: Synthetic oligonucleotide
uaagguucucuauagcuga

SEQ ID NO: 1608935 - RNA, 19 nt, Artificial Sequence
  Description of Artificial Sequence: Synthetic oligonucleotide
ucaucaagagucaaauuau

SEQ ID NO: 1608936 - RNA, 19 nt, Artificial Sequence
  Description of Artificial Sequence: Synthetic oligonucleotide
ugaaucucuauccaugcau

SEQ ID NO: 1608937 - RNA, 19 nt, Artificial Sequence
  Description of Artificial Sequence: Synthetic oligonucleotide
aguuaguaccacuaaguca

SEQ ID NO: 1608938 - RNA, 19 nt, Artificial Sequence
  Description of Artificial Sequence: Synthetic oligonucleotide
ucuugguguaacaacagau

SEQ ID NO: 1608939 - RNA, 19 nt, Artificial Sequence
  Description of Artificial Sequence: Synthetic oligonucleotide
caauaucugguauauuaag

SEQ ID NO: 1608940 - RNA, 19 nt, Artificial Sequence
  Description of Artificial Sequence: Synthetic oligonucleotide
ucaguuauuuuaagguucu

SEQ ID NO: 1608941 - RNA, 19 nt, Artificial Sequence
  Description of Artificial Sequence: Synthetic oligonucleotide
gacucaagucucaugauag

SEQ ID NO: 1608942 - RNA, 19 nt, Artificial Sequence
  Description of Artificial Sequence: Synthetic oligonucleotide
ugugaauuaagaugccgga

SEQ ID NO: 1608943 - RNA, 19 nt, Artificial Sequence
  Description of Artificial Sequence: Synthetic oligonucleotide
gaguuuguugaagugacag

SEQ ID NO: 1608944 - RNA, 19 nt, Artificial Sequence
  Description of Artificial Sequence: Synthetic oligonucleotide
guuaucucgacaagaaucc

SEQ ID NO: 1608945 - RNA, 19 nt, Artificial Sequence
  Description of Artificial Sequence: Synthetic oligonucleotide
aaccaucuuaaaucuagcu

SEQ ID NO: 1608946 - RNA, 19 nt, Artificial Sequence
  Description of Artificial Sequence: Synthetic oligonucleotide
uccgaauuucaaauaaagu

SEQ ID NO: 1608947 - RNA, 19 nt, Artificial Sequence
  Description of Artificial Sequence: Synthetic oligonucleotide
uacugcugaaucucuaucc

SEQ ID NO: 1608948 - RNA, 19 nt, Artificial Sequence
  Description of Artificial Sequence: Synthetic oligonucleotide
aaaccaucuuaaaucuagc

SEQ ID NO: 1608949 - RNA, 19 nt, Artificial Sequence
  Description of Artificial Sequence: Synthetic oligonucleotide
uccucuugguguaacaaca

SEQ ID NO: 1608950 - RNA, 19 nt, Artificial Sequence
  Description of Artificial Sequence: Synthetic oligonucleotide
cauuauggucuccagcugg

SEQ ID NO: 1608951 - RNA, 19 nt, Artificial Sequence
  Description of Artificial Sequence: Synthetic oligonucleotide
cuuacaagcaagcauucuc

SEQ ID NO: 1608952 - RNA, 19 nt, Artificial Sequence
  Description of Artificial Sequence: Synthetic oligonucleotide
gaacuuagaaagugauucc

SEQ ID NO: 1608953 - RNA, 19 nt, Artificial Sequence
  Description of Artificial Sequence: Synthetic oligonucleotide
auucaauacacggcguacc

SEQ ID NO: 1608954 - RNA, 19 nt, Artificial Sequence
  Description of Artificial Sequence: Synthetic oligonucleotide
ugcugaaucucuauccaug

SEQ ID NO: 1608955 - RNA, 19 nt, Artificial Sequence
  Description of Artificial Sequence: Synthetic oligonucleotide
ugacuuccauauuaaaucu

SEQ ID NO: 1608956 - RNA, 19 nt, Artificial Sequence
  Description of Artificial Sequence: Synthetic oligonucleotide
auaagaguuuguugaagug

SEQ ID NO: 1608957 - RNA, 19 nt, Artificial Sequence
  Description of Artificial Sequence: Synthetic oligonucleotide
ucaagcaaagguacauagc

SEQ ID NO: 1608958 - RNA, 19 nt, Artificial Sequence
  Description of Artificial Sequence: Synthetic oligonucleotide
auccacaagaaguagcugu

SEQ ID NO: 1608959 - RNA, 19 nt, Artificial Sequence
  Description of Artificial Sequence: Synthetic oligonucleotide
cuauagcugaaguuauggg

SEQ ID NO: 1608960 - RNA, 19 nt, Artificial Sequence
  Description of Artificial Sequence: Synthetic oligonucleotide
aaacacggagcucuaagau

SEQ ID NO: 1608961 - RNA, 19 nt, Artificial Sequence
  Description of Artificial Sequence: Synthetic oligonucleotide
aaagcucuugacagaauuc

SEQ ID NO: 1608962 - RNA, 19 nt, Artificial Sequence
  Description of Artificial Sequence: Synthetic oligonucleotide
uagcuuacaagcaagcauu

SEQ ID NO: 1608963 - RNA, 19 nt, Artificial Sequence
  Description of Artificial Sequence: Synthetic oligonucleotide
uguucggugucucuggagu

SEQ ID NO: 1608964 - RNA, 19 nt, Artificial Sequence
  Description of Artificial Sequence: Synthetic oligonucleotide
gugugaauuaagaugccgg

SEQ ID NO: 1608965 - RNA, 19 nt, Artificial Sequence
  Description of Artificial Sequence: Synthetic oligonucleotide
ugucuugguuaagaaaggg

SEQ ID NO: 1608966 - RNA, 19 nt, Artificial Sequence
  Description of Artificial Sequence: Synthetic oligonucleotide
uguuccuaguuucaguuua

SEQ ID NO: 1608967 - RNA, 19 nt, Artificial Sequence
  Description of Artificial Sequence: Synthetic oligonucleotide
uccuaguuucaguuuauca

SEQ ID NO: 1608968 - RNA, 19 nt, Artificial Sequence
  Description of Artificial Sequence: Synthetic oligonucleotide
ugauagugugaauuaagau

SEQ ID NO: 1608969 - RNA, 19 nt, Artificial Sequence
  Description of Artificial Sequence: Synthetic oligonucleotide
ugguauauuaaguuugcuu

SEQ ID NO: 1608970 - RNA, 19 nt, Artificial Sequence
  Description of Artificial Sequence: Synthetic oligonucleotide
uucaaaugugacucaaguc

SEQ ID NO: 1608971 - RNA, 19 nt, Artificial Sequence
  Description of Artificial Sequence: Synthetic oligonucleotide
cauaauaugucuguuuuca

SEQ ID NO: 1608972 - RNA, 19 nt, Artificial Sequence
  Description of Artificial Sequence: Synthetic oligonucleotide
agcaaagguacauagccau

SEQ ID NO: 1608973 - RNA, 19 nt, Artificial Sequence
  Description of Artificial Sequence: Synthetic oligonucleotide
cacuaagucagugucuugg

SEQ ID NO: 1608974 - RNA, 19 nt, Artificial Sequence
  Description of Artificial Sequence: Synthetic oligonucleotide
uaucucgacaagaauccac

SEQ ID NO: 1608975 - RNA, 19 nt, Artificial Sequence
  Description of Artificial Sequence: Synthetic oligonucleotide
uaggcauaucguaugaaau

SEQ ID NO: 1608976 - RNA, 19 nt, Artificial Sequence
  Description of Artificial Sequence: Synthetic oligonucleotide
agugugaauuaagaugccg

SEQ ID NO: 1608977 - RNA, 19 nt, Artificial Sequence
  Description of Artificial Sequence: Synthetic oligonucleotide
gaauuaagaugccggagga

SEQ ID NO: 1608978 - RNA, 19 nt, Artificial Sequence
  Description of Artificial Sequence: Synthetic oligonucleotide
aagcucuugacagaauuca

SEQ ID NO: 1608979 - RNA, 19 nt, Artificial Sequence
  Description of Artificial Sequence: Synthetic oligonucleotide
uucaauacacggcguaccu

SEQ ID NO: 1608980 - RNA, 19 nt, Artificial Sequence
  Description of Artificial Sequence: Synthetic oligonucleotide
cuaguaggcauaucguaug

SEQ ID NO: 1608981 - RNA, 19 nt, Artificial Sequence
  Description of Artificial Sequence: Synthetic oligonucleotide
uuuaaggcauuccgagucu

SEQ ID NO: 1608982 - RNA, 19 nt, Artificial Sequence
  Description of Artificial Sequence: Synthetic oligonucleotide
ugcuuaaguggucuuucug

SEQ ID NO: 1608983 - RNA, 19 nt, Artificial Sequence
  Description of Artificial Sequence: Synthetic oligonucleotide
aucugguauauuaaguuug

SEQ ID NO: 1608984 - RNA, 19 nt, Artificial Sequence
  Description of Artificial Sequence: Synthetic oligonucleotide
agugggaauuuauuuacau

SEQ ID NO: 1608985 - RNA, 19 nt, Artificial Sequence
  Description of Artificial Sequence: Synthetic oligonucleotide
ucucaugauagugugaauu

SEQ ID NO: 1608986 - RNA, 19 nt, Artificial Sequence
  Description of Artificial Sequence: Synthetic oligonucleotide
uuauggggucaauucuccg

SEQ ID NO: 1608987 - RNA, 19 nt, Artificial Sequence
  Description of Artificial Sequence: Synthetic oligonucleotide
accaucuuaaaucuagcuu

SEQ ID NO: 1608988 - RNA, 19 nt, Artificial Sequence
  Description of Artificial Sequence: Synthetic oligonucleotide
uggauguauuggacggugg

SEQ ID NO: 1608989 - RNA, 19 nt, Artificial Sequence
  Description of Artificial Sequence: Synthetic oligonucleotide
ucucuauagcugaaguuau

SEQ ID NO: 1608990 - RNA, 19 nt, Artificial Sequence
  Description of Artificial Sequence: Synthetic oligonucleotide
uuaaacagcgcuucuuguu

SEQ ID NO: 1608991 - RNA, 19 nt, Artificial Sequence
  Description of Artificial Sequence: Synthetic oligonucleotide
auaucguaugaaauucuuc

SEQ ID NO: 1608992 - RNA, 19 nt, Artificial Sequence
  Description of Artificial Sequence: Synthetic oligonucleotide
ucguaugaaauucuuccuu

SEQ ID NO: 1608993 - RNA, 19 nt, Artificial Sequence
  Description of Artificial Sequence: Synthetic oligonucleotide
uaacuguuaucucgacaag

SEQ ID NO: 1608994 - RNA, 19 nt, Artificial Sequence
  Description of Artificial Sequence: Synthetic oligonucleotide
aucguaugaaauucuuccu

SEQ ID NO: 1608995 - RNA, 19 nt, Artificial Sequence
  Description of Artificial Sequence: Synthetic oligonucleotide
uugucggaaggcuucauau

SEQ ID NO: 1608996 - RNA, 19 nt, Artificial Sequence
  Description of Artificial Sequence: Synthetic oligonucleotide
acaagcaagcauucuccag

SEQ ID NO: 1608997 - RNA, 19 nt, Artificial Sequence
  Description of Artificial Sequence: Synthetic oligonucleotide
aacacggagcucuaagauu

SEQ ID NO: 1608998 - RNA, 19 nt, Artificial Sequence
  Description of Artificial Sequence: Synthetic oligonucleotide
uggguugucucugacuucc

SEQ ID NO: 1608999 - RNA, 19 nt, Artificial Sequence
  Description of Artificial Sequence: Synthetic oligonucleotide
ugauuuuagcuugucaaua

SEQ ID NO: 1609000 - RNA, 19 nt, Artificial Sequence
  Description of Artificial Sequence: Synthetic oligonucleotide
cucgacaagaauccacaag

SEQ ID NO: 1609001 - RNA, 19 nt, Artificial Sequence
  Description of Artificial Sequence: Synthetic oligonucleotide
aucuagcuuacaagcaagc

SEQ ID NO: 1609002 - RNA, 19 nt, Artificial Sequence
  Description of Artificial Sequence: Synthetic oligonucleotide
gagaacauaauaugucugu

SEQ ID NO: 1609003 - RNA, 19 nt, Artificial Sequence
  Description of Artificial Sequence: Synthetic oligonucleotide
gucaguuauuuuaagguuc

SEQ ID NO: 1609004 - RNA, 19 nt, Artificial Sequence
  Description of Artificial Sequence: Synthetic oligonucleotide
uaguaggcauaucguauga

SEQ ID NO: 1609005 - RNA, 19 nt, Artificial Sequence
  Description of Artificial Sequence: Synthetic oligonucleotide
guacuauguaagaaagcag

SEQ ID NO: 1609006 - RNA, 19 nt, Artificial Sequence
  Description of Artificial Sequence: Synthetic oligonucleotide
ucuccgaauuucaaauaaa

SEQ ID NO: 1609007 - RNA, 19 nt, Artificial Sequence
  Description of Artificial Sequence: Synthetic oligonucleotide
ucccuuucaugauguaaag

SEQ ID NO: 1609008 - RNA, 19 nt, Artificial Sequence
  Description of Artificial Sequence: Synthetic oligonucleotide
augauagugugaauuaaga

SEQ ID NO: 1609009 - RNA, 19 nt, Artificial Sequence
  Description of Artificial Sequence: Synthetic oligonucleotide
guaccacuaagucaguguc

SEQ ID NO: 1609010 - RNA, 19 nt, Artificial Sequence
  Description of Artificial Sequence: Synthetic oligonucleotide
uugcuaguaggcauaucgu

SEQ ID NO: 1609011 - RNA, 19 nt, Artificial Sequence
  Description of Artificial Sequence: Synthetic oligonucleotide
gacacuucuugucuucuca

SEQ ID NO: 1609012 - RNA, 19 nt, Artificial Sequence
  Description of Artificial Sequence: Synthetic oligonucleotide
cagaauucacacacuugag

SEQ ID NO: 1609013 - RNA, 19 nt, Artificial Sequence
  Description of Artificial Sequence: Synthetic oligonucleotide
caguuaguaccacuaaguc

SEQ ID NO: 1609014 - RNA, 19 nt, Artificial Sequence
  Description of Artificial Sequence: Synthetic oligonucleotide
uuggacggugggaaaagcu

SEQ ID NO: 1609015 - RNA, 19 nt, Artificial Sequence
  Description of Artificial Sequence: Synthetic oligonucleotide
cuguuuuaccaaaguuucc

SEQ ID NO: 1609016 - RNA, 19 nt, Artificial Sequence
  Description of Artificial Sequence: Synthetic oligonucleotide
uugguuaagaaagggcuuc

SEQ ID NO: 1609017 - RNA, 19 nt, Artificial Sequence
  Description of Artificial Sequence: Synthetic oligonucleotide
gauucaauacacggcguac

SEQ ID NO: 1609018 - RNA, 19 nt, Artificial Sequence
  Description of Artificial Sequence: Synthetic oligonucleotide
agauguggcaggaguaugg

SEQ ID NO: 1609019 - RNA, 19 nt, Artificial Sequence
  Description of Artificial Sequence: Synthetic oligonucleotide
ggauguauuggacgguggg

SEQ ID NO: 1609020 - RNA, 19 nt, Artificial Sequence
  Description of Artificial Sequence: Synthetic oligonucleotide
ugucggaaggcuucauaug

SEQ ID NO: 1609021 - RNA, 19 nt, Artificial Sequence
  Description of Artificial Sequence: Synthetic oligonucleotide
cauugaacuuagaaaguga

SEQ ID NO: 1609022 - RNA, 19 nt, Artificial Sequence
  Description of Artificial Sequence: Synthetic oligonucleotide
uucucuauauuaucccuuu

SEQ ID NO: 1609023 - RNA, 19 nt, Artificial Sequence
  Description of Artificial Sequence: Synthetic oligonucleotide
auuaucccuuucaugaugu

SEQ ID NO: 1609024 - RNA, 19 nt, Artificial Sequence
  Description of Artificial Sequence: Synthetic oligonucleotide
agucucaugauagugugaa

SEQ ID NO: 1609025 - RNA, 19 nt, Artificial Sequence
  Description of Artificial Sequence: Synthetic oligonucleotide
gauguaaagggaggcugag

SEQ ID NO: 1609026 - RNA, 19 nt, Artificial Sequence
  Description of Artificial Sequence: Synthetic oligonucleotide
uauuggacggugggaaaag

SEQ ID NO: 1609027 - RNA, 19 nt, Artificial Sequence
  Description of Artificial Sequence: Synthetic oligonucleotide
ugcuaguaggcauaucgua

SEQ ID NO: 1609028 - RNA, 19 nt, Artificial Sequence
  Description of Artificial Sequence: Synthetic oligonucleotide
gugaauuaagaugccggag

SEQ ID NO: 1609029 - RNA, 19 nt, Artificial Sequence
  Description of Artificial Sequence: Synthetic oligonucleotide
aggaguauggauguucggu

SEQ ID NO: 1609030 - RNA, 19 nt, Artificial Sequence
  Description of Artificial Sequence: Synthetic oligonucleotide
guuuguugaagugacagcu

SEQ ID NO: 1609031 - RNA, 19 nt, Artificial Sequence
  Description of Artificial Sequence: Synthetic oligonucleotide
uauugaguugcuccccaau

SEQ ID NO: 1609032 - RNA, 19 nt, Artificial Sequence
  Description of Artificial Sequence: Synthetic oligonucleotide
auuggacggugggaaaagc

SEQ ID NO: 1609033 - RNA, 19 nt, Artificial Sequence
  Description of Artificial Sequence: Synthetic oligonucleotide
aggcauaucguaugaaauu

SEQ ID NO: 1609034 - RNA, 19 nt, Artificial Sequence
  Description of Artificial Sequence: Synthetic oligonucleotide
guugcucgcguauucuuug

SEQ ID NO: 1609035 - RNA, 19 nt, Artificial Sequence
  Description of Artificial Sequence: Synthetic oligonucleotide
ggaguauggauguucggug

SEQ ID NO: 1609036 - RNA, 19 nt, Artificial Sequence
  Description of Artificial Sequence: Synthetic oligonucleotide
gucuugguuaagaaagggc

SEQ ID NO: 1609037 - RNA, 19 nt, Artificial Sequence
  Description of Artificial Sequence: Synthetic oligonucleotide
guuauggggucaauucucc

SEQ ID NO: 1609038 - RNA, 19 nt, Artificial Sequence
  Description of Artificial Sequence: Synthetic oligonucleotide
cucuauccaugcaugcuug

SEQ ID NO: 1609039 - RNA, 19 nt, Artificial Sequence
  Description of Artificial Sequence: Synthetic oligonucleotide
agauucaauacacggcgua

SEQ ID NO: 1609040 - RNA, 19 nt, Artificial Sequence
  Description of Artificial Sequence: Synthetic oligonucleotide
uggauguucggugucucug

SEQ ID NO: 1609041 - RNA, 19 nt, Artificial Sequence
  Description of Artificial Sequence: Synthetic oligonucleotide
acaagaaguagcugugauu

SEQ ID NO: 1609042 - RNA, 19 nt, Artificial Sequence
  Description of Artificial Sequence: Synthetic oligonucleotide
ugugugucaguugcaauau

SEQ ID NO: 1609043 - RNA, 19 nt, Artificial Sequence
  Description of Artificial Sequence: Synthetic oligonucleotide
uaccacuaagucagugucu

SEQ ID NO: 1609044 - RNA, 19 nt, Artificial Sequence
  Description of Artificial Sequence: Synthetic oligonucleotide
uugagcuuuaaggcauucc

SEQ ID NO: 1609045 - RNA, 19 nt, Artificial Sequence
  Description of Artificial Sequence: Synthetic oligonucleotide
agaaagucuucucuauauu

SEQ ID NO: 1609046 - RNA, 19 nt, Artificial Sequence
  Description of Artificial Sequence: Synthetic oligonucleotide
uaucccuuucaugauguaa

SEQ ID NO: 1609047 - RNA, 19 nt, Artificial Sequence
  Description of Artificial Sequence: Synthetic oligonucleotide
acuguuaucucgacaagaa

SEQ ID NO: 1609048 - RNA, 19 nt, Artificial Sequence
  Description of Artificial Sequence: Synthetic oligonucleotide
ggcauuccgagucugugcc

SEQ ID NO: 1609049 - RNA, 19 nt, Artificial Sequence
  Description of Artificial Sequence: Synthetic oligonucleotide
uguauuggacggugggaaa

SEQ ID NO: 1609050 - RNA, 19 nt, Artificial Sequence
  Description of Artificial Sequence: Synthetic oligonucleotide
cauaacuguuaucucgaca

SEQ ID NO: 1609051 - RNA, 19 nt, Artificial Sequence
  Description of Artificial Sequence: Synthetic oligonucleotide
caaacacggagcucuaaga

SEQ ID NO: 1609052 - RNA, 19 nt, Artificial Sequence
  Description of Artificial Sequence: Synthetic oligonucleotide
aucucgacaagaauccaca

SEQ ID NO: 1609053 - RNA, 19 nt, Artificial Sequence
  Description of Artificial Sequence: Synthetic oligonucleotide
agcauucuccagcauuaca

SEQ ID NO: 1609054 - RNA, 19 nt, Artificial Sequence
  Description of Artificial Sequence: Synthetic oligonucleotide
uaaggcauuccgagucugu

SEQ ID NO: 1609055 - RNA, 19 nt, Artificial Sequence
  Description of Artificial Sequence: Synthetic oligonucleotide
auguauuggacggugggaa

SEQ ID NO: 1609056 - RNA, 19 nt, Artificial Sequence
  Description of Artificial Sequence: Synthetic oligonucleotide
gauguauuggacgguggga

SEQ ID NO: 1609057 - RNA, 19 nt, Artificial Sequence
  Description of Artificial Sequence: Synthetic oligonucleotide
ggauguucggugucucugg

SEQ ID NO: 1609058 - RNA, 19 nt, Artificial Sequence
  Description of Artificial Sequence: Synthetic oligonucleotide
auggggucaauucuccgaa

SEQ ID NO: 1609059 - RNA, 19 nt, Artificial Sequence
  Description of Artificial Sequence: Synthetic oligonucleotide
uguugcucgcguauucuuu

SEQ ID NO: 1609060 - RNA, 19 nt, Artificial Sequence
  Description of Artificial Sequence: Synthetic oligonucleotide
cucaugauagugugaauua

SEQ ID NO: 1609061 - RNA, 19 nt, Artificial Sequence
  Description of Artificial Sequence: Synthetic oligonucleotide
cucuauagcugaaguuaug

SEQ ID NO: 1609062 - RNA, 19 nt, Artificial Sequence
  Description of Artificial Sequence: Synthetic oligonucleotide
acucaagucucaugauagu

SEQ ID NO: 1609063 - RNA, 19 nt, Artificial Sequence
  Description of Artificial Sequence: Synthetic oligonucleotide
cucgcguauucuuuguuca

SEQ ID NO: 1609064 - RNA, 19 nt, Artificial Sequence
  Description of Artificial Sequence: Synthetic oligonucleotide
ugccuuugcuaguaggcau

SEQ ID NO: 1609065 - RNA, 19 nt, Artificial Sequence
  Description of Artificial Sequence: Synthetic oligonucleotide
uaugcucuauugaguugcu

SEQ ID NO: 1609066 - RNA, 19 nt, Artificial Sequence
  Description of Artificial Sequence: Synthetic oligonucleotide
auguaaagggaggcugagg

SEQ ID NO: 1609067 - RNA, 19 nt, Artificial Sequence
  Description of Artificial Sequence: Synthetic oligonucleotide
uguccauagguggaaacuu

SEQ ID NO: 1609068 - RNA, 19 nt, Artificial Sequence
  Description of Artificial Sequence: Synthetic oligonucleotide
uaaaucuguccuggcacac

SEQ ID NO: 1609069 - RNA, 19 nt, Artificial Sequence
  Description of Artificial Sequence: Synthetic oligonucleotide
cauuccgagucugugccag

SEQ ID NO: 1609070 - RNA, 19 nt, Artificial Sequence
  Description of Artificial Sequence: Synthetic oligonucleotide
ggcauaucguaugaaauuc

SEQ ID NO: 1609071 - RNA, 19 nt, Artificial Sequence
  Description of Artificial Sequence: Synthetic oligonucleotide
ucuauccaugcaugcuugu

SEQ ID NO: 1609072 - RNA, 19 nt, Artificial Sequence
  Description of Artificial Sequence: Synthetic oligonucleotide
gcucuauugaguugcuccc

SEQ ID NO: 1609073 - RNA, 19 nt, Artificial Sequence
  Description of Artificial Sequence: Synthetic oligonucleotide
acacggagcucuaagauuu

SEQ ID NO: 1609074 - RNA, 19 nt, Artificial Sequence
  Description of Artificial Sequence: Synthetic oligonucleotide
gccaguuaguaccacuaag

SEQ ID NO: 1609075 - RNA, 19 nt, Artificial Sequence
  Description of Artificial Sequence: Synthetic oligonucleotide
ucuaagauuugaggguuuu

SEQ ID NO: 1609076 - RNA, 19 nt, Artificial Sequence
  Description of Artificial Sequence: Synthetic oligonucleotide
augugacucaagucucaug

SEQ ID NO: 1609077 - RNA, 19 nt, Artificial Sequence
  Description of Artificial Sequence: Synthetic oligonucleotide
uaguaccacuaagucagug

SEQ ID NO: 1609078 - RNA, 19 nt, Artificial Sequence
  Description of Artificial Sequence: Synthetic oligonucleotide
auguucggugucucuggag

SEQ ID NO: 1609079 - RNA, 19 nt, Artificial Sequence
  Description of Artificial Sequence: Synthetic oligonucleotide
uguugaagugacagcuguu

SEQ ID NO: 1609080 - RNA, 19 nt, Artificial Sequence
  Description of Artificial Sequence: Synthetic oligonucleotide
caauacacggcguaccucu

SEQ ID NO: 1609081 - RNA, 19 nt, Artificial Sequence
  Description of Artificial Sequence: Synthetic oligonucleotide
ugccaguuaguaccacuaa

SEQ ID NO: 1609082 - RNA, 19 nt, Artificial Sequence
  Description of Artificial Sequence: Synthetic oligonucleotide
caggaguauggauguucgg

SEQ ID NO: 1609083 - RNA, 19 nt, Artificial Sequence
  Description of Artificial Sequence: Synthetic oligonucleotide
cucuauugaguugcucccc

SEQ ID NO: 1609084 - RNA, 19 nt, Artificial Sequence
  Description of Artificial Sequence: Synthetic oligonucleotide
aggucucggucuuuugcug

SEQ ID NO: 1609085 - RNA, 19 nt, Artificial Sequence
  Description of Artificial Sequence: Synthetic oligonucleotide
cuagcuuacaagcaagcau

SEQ ID NO: 1609086 - RNA, 19 nt, Artificial Sequence
  Description of Artificial Sequence: Synthetic oligonucleotide
gcaggaguauggauguucg

SEQ ID NO: 1609087 - RNA, 19 nt, Artificial Sequence
  Description of Artificial Sequence: Synthetic oligonucleotide
gauguucggugucucugga

SEQ ID NO: 1609088 - RNA, 19 nt, Artificial Sequence
  Description of Artificial Sequence: Synthetic oligonucleotide
cacggcguaccucuguuuc

SEQ ID NO: 1609089 - RNA, 19 nt, Artificial Sequence
  Description of Artificial Sequence: Synthetic oligonucleotide
gucagugucuugguuaaga

SEQ ID NO: 1609090 - RNA, 19 nt, Artificial Sequence
  Description of Artificial Sequence: Synthetic oligonucleotide
agcagagucacuguccaua

SEQ ID NO: 1609091 - RNA, 19 nt, Artificial Sequence
  Description of Artificial Sequence: Synthetic oligonucleotide
gagcuuuaaggcauuccga

SEQ ID NO: 1609092 - RNA, 19 nt, Artificial Sequence
  Description of Artificial Sequence: Synthetic oligonucleotide
ccgaauuucaaauaaaguu

SEQ ID NO: 1609093 - RNA, 19 nt, Artificial Sequence
  Description of Artificial Sequence: Synthetic oligonucleotide
agugacagcuguucuuguu

SEQ ID NO: 1609094 - RNA, 19 nt, Artificial Sequence
  Description of Artificial Sequence: Synthetic oligonucleotide
gaguauggauguucggugu

SEQ ID NO: 1609095 - RNA, 19 nt, Artificial Sequence
  Description of Artificial Sequence: Synthetic oligonucleotide
ucaauacacggcguaccuc

SEQ ID NO: 1609096 - RNA, 19 nt, Artificial Sequence
  Description of Artificial Sequence: Synthetic oligonucleotide
aucccuccuggauguauug

SEQ ID NO: 1609097 - RNA, 19 nt, Artificial Sequence
  Description of Artificial Sequence: Synthetic oligonucleotide
cucggucuuuugcuguagc

SEQ ID NO: 1609098 - RNA, 19 nt, Artificial Sequence
  Description of Artificial Sequence: Synthetic oligonucleotide
gagucugugccaguuagua

SEQ ID NO: 1609099 - RNA, 19 nt, Artificial Sequence
  Description of Artificial Sequence: Synthetic oligonucleotide
aagucucaugauaguguga

SEQ ID NO: 1609100 - RNA, 19 nt, Artificial Sequence
  Description of Artificial Sequence: Synthetic oligonucleotide
cauaggucucggucuuuug

SEQ ID NO: 1609101 - RNA, 19 nt, Artificial Sequence
  Description of Artificial Sequence: Synthetic oligonucleotide
uacacggcguaccucuguu

SEQ ID NO: 1609102 - RNA, 19 nt, Artificial Sequence
  Description of Artificial Sequence: Synthetic oligonucleotide
uauggauguucggugucuc

SEQ ID NO: 1609103 - RNA, 19 nt, Artificial Sequence
  Description of Artificial Sequence: Synthetic oligonucleotide
auggauguucggugucucu

SEQ ID NO: 1609104 - RNA, 19 nt, Artificial Sequence
  Description of Artificial Sequence: Synthetic oligonucleotide
cugaagugggaauuuauuu

SEQ ID NO: 1609105 - RNA, 19 nt, Artificial Sequence
  Description of Artificial Sequence: Synthetic oligonucleotide
uuguugcucgcguauucuu

SEQ ID NO: 1609106 - RNA, 19 nt, Artificial Sequence
  Description of Artificial Sequence: Synthetic oligonucleotide
cucggcccaguccucuugg

SEQ ID NO: 1609107 - RNA, 19 nt, Artificial Sequence
  Description of Artificial Sequence: Synthetic oligonucleotide
ucucggucuuuugcuguag

SEQ ID NO: 1609108 - RNA, 19 nt, Artificial Sequence
  Description of Artificial Sequence: Synthetic oligonucleotide
cuuaaacagcgcuucuugu

SEQ ID NO: 1609109 - RNA, 19 nt, Artificial Sequence
  Description of Artificial Sequence: Synthetic oligonucleotide
cucaucucggcccaguccu

SEQ ID NO: 1609110 - RNA, 19 nt, Artificial Sequence
  Description of Artificial Sequence: Synthetic oligonucleotide
uucugugccuuugcuagua

SEQ ID NO: 1609111 - RNA, 19 nt, Artificial Sequence
  Description of Artificial Sequence: Synthetic oligonucleotide
cuugucaauaagaguuugu

SEQ ID NO: 1609112 - RNA, 19 nt, Artificial Sequence
  Description of Artificial Sequence: Synthetic oligonucleotide
uuccuaguuucaguuuauc

SEQ ID NO: 1609113 - RNA, 19 nt, Artificial Sequence
  Description of Artificial Sequence: Synthetic oligonucleotide
uccaugcaugcuugucgga

SEQ ID NO: 1609114 - RNA, 19 nt, Artificial Sequence
  Description of Artificial Sequence: Synthetic oligonucleotide
guauaggcacagagcacug

SEQ ID NO: 1609115 - RNA, 19 nt, Artificial Sequence
  Description of Artificial Sequence: Synthetic oligonucleotide
ucauaggucucggucuuuu

SEQ ID NO: 1609116 - RNA, 19 nt, Artificial Sequence
  Description of Artificial Sequence: Synthetic oligonucleotide
cagugucuugguuaagaaa

SEQ ID NO: 1609117 - RNA, 19 nt, Artificial Sequence
  Description of Artificial Sequence: Synthetic oligonucleotide
ucacuguccauagguggaa

SEQ ID NO: 1609118 - RNA, 19 nt, Artificial Sequence
  Description of Artificial Sequence: Synthetic oligonucleotide
guauuggacggugggaaaa

SEQ ID NO: 1609119 - RNA, 19 nt, Artificial Sequence
  Description of Artificial Sequence: Synthetic oligonucleotide
cauaucguaugaaauucuu

SEQ ID NO: 1609120 - RNA, 19 nt, Artificial Sequence
  Description of Artificial Sequence: Synthetic oligonucleotide
caggcggguccugaagugg

SEQ ID NO: 1609121 - RNA, 19 nt, Artificial Sequence
  Description of Artificial Sequence: Synthetic oligonucleotide
cagauguggcaggaguaug

SEQ ID NO: 1609122 - RNA, 19 nt, Artificial Sequence
  Description of Artificial Sequence: Synthetic oligonucleotide
caugugguucaucaagagu

SEQ ID NO: 1609123 - RNA, 19 nt, Artificial Sequence
  Description of Artificial Sequence: Synthetic oligonucleotide
acggcguaccucuguuucu

SEQ ID NO: 1609124 - RNA, 19 nt, Artificial Sequence
  Description of Artificial Sequence: Synthetic oligonucleotide
uuaucccuuucaugaugua

SEQ ID NO: 1609125 - RNA, 19 nt, Artificial Sequence
  Description of Artificial Sequence: Synthetic oligonucleotide
gccuggggcuuaaacagcg

SEQ ID NO: 1609126 - RNA, 19 nt, Artificial Sequence
  Description of Artificial Sequence: Synthetic oligonucleotide
ugcucgcguauucuuuguu

SEQ ID NO: 1609127 - RNA, 19 nt, Artificial Sequence
  Description of Artificial Sequence: Synthetic oligonucleotide
uccgagucugugccaguua

SEQ ID NO: 1609128 - RNA, 19 nt, Artificial Sequence
  Description of Artificial Sequence: Synthetic oligonucleotide
agaguuuguugaagugaca

SEQ ID NO: 1609129 - RNA, 19 nt, Artificial Sequence
  Description of Artificial Sequence: Synthetic oligonucleotide
ccgagucugugccaguuag

SEQ ID NO: 1609130 - RNA, 19 nt, Artificial Sequence
  Description of Artificial Sequence: Synthetic oligonucleotide
ugguccucggacagcuuuu

SEQ ID NO: 1609131 - RNA, 19 nt, Artificial Sequence
  Description of Artificial Sequence: Synthetic oligonucleotide
cuugguuaagaaagggcuu

SEQ ID NO: 1609132 - RNA, 19 nt, Artificial Sequence
  Description of Artificial Sequence: Synthetic oligonucleotide
gaugccggaggaaaucccu

SEQ ID NO: 1609133 - RNA, 19 nt, Artificial Sequence
  Description of Artificial Sequence: Synthetic oligonucleotide
gcucgcguauucuuuguuc

SEQ ID NO: 1609134 - RNA, 19 nt, Artificial Sequence
  Description of Artificial Sequence: Synthetic oligonucleotide
gccauaacuguuaucucga

SEQ ID NO: 1609135 - RNA, 19 nt, Artificial Sequence
  Description of Artificial Sequence: Synthetic oligonucleotide
aguuuaucaugugguucau

SEQ ID NO: 1609136 - RNA, 19 nt, Artificial Sequence
  Description of Artificial Sequence: Synthetic oligonucleotide
agcuugucaauaagaguuu

SEQ ID NO: 1609137 - RNA, 19 nt, Artificial Sequence
  Description of Artificial Sequence: Synthetic oligonucleotide
ccaguuaguaccacuaagu

SEQ ID NO: 1609138 - RNA, 19 nt, Artificial Sequence
  Description of Artificial Sequence: Synthetic oligonucleotide
cacggagcucuaagauuug

SEQ ID NO: 1609139 - RNA, 19 nt, Artificial Sequence
  Description of Artificial Sequence: Synthetic oligonucleotide
ggggcuuaaacagcgcuuc

SEQ ID NO: 1609140 - RNA, 19 nt, Artificial Sequence
  Description of Artificial Sequence: Synthetic oligonucleotide
cggaggaaaucccuccugg

SEQ ID NO: 1609141 - RNA, 19 nt, Artificial Sequence
  Description of Artificial Sequence: Synthetic oligonucleotide
cuugucggaaggcuucaua

SEQ ID NO: 1609142 - RNA, 19 nt, Artificial Sequence
  Description of Artificial Sequence: Synthetic oligonucleotide
uggggucaauucuccgaau

SEQ ID NO: 1609143 - RNA, 19 nt, Artificial Sequence
  Description of Artificial Sequence: Synthetic oligonucleotide
cuauugaguugcuccccaa

SEQ ID NO: 1609144 - RNA, 19 nt, Artificial Sequence
  Description of Artificial Sequence: Synthetic oligonucleotide
gugccaguuaguaccacua

SEQ ID NO: 1609145 - RNA, 19 nt, Artificial Sequence
  Description of Artificial Sequence: Synthetic oligonucleotide
ccauaacuguuaucucgac

SEQ ID NO: 1609146 - RNA, 19 nt, Artificial Sequence
  Description of Artificial Sequence: Synthetic oligonucleotide
agcugugauuuuagcuugu

SEQ ID NO: 1609147 - RNA, 19 nt, Artificial Sequence
  Description of Artificial Sequence: Synthetic oligonucleotide
guauggauguucggugucu

SEQ ID NO: 1609148 - RNA, 19 nt, Artificial Sequence
  Description of Artificial Sequence: Synthetic oligonucleotide
cuggggcuuaaacagcgcu

SEQ ID NO: 1609149 - RNA, 19 nt, Artificial Sequence
  Description of Artificial Sequence: Synthetic oligonucleotide
cuuugcuaguaggcauauc

SEQ ID NO: 1609150 - RNA, 19 nt, Artificial Sequence
  Description of Artificial Sequence: Synthetic oligonucleotide
cagauucaauacacggcgu

SEQ ID NO: 1609151 - RNA, 19 nt, Artificial Sequence
  Description of Artificial Sequence: Synthetic oligonucleotide
guaagaaagcagagucacu

SEQ ID NO: 1609152 - RNA, 19 nt, Artificial Sequence
  Description of Artificial Sequence: Synthetic oligonucleotide
caguguuccuaguuucagu

SEQ ID NO: 1609153 - RNA, 19 nt, Artificial Sequence
  Description of Artificial Sequence: Synthetic oligonucleotide
gcuaguaggcauaucguau

SEQ ID NO: 1609154 - RNA, 19 nt, Artificial Sequence
  Description of Artificial Sequence: Synthetic oligonucleotide
acacggcguaccucuguuu

SEQ ID NO: 1609155 - RNA, 19 nt, Artificial Sequence
  Description of Artificial Sequence: Synthetic oligonucleotide
uucauaggucucggucuuu

SEQ ID NO: 1609156 - RNA, 19 nt, Artificial Sequence
  Description of Artificial Sequence: Synthetic oligonucleotide
ugugguccucggacagcuu

SEQ ID NO: 1609157 - RNA, 19 nt, Artificial Sequence
  Description of Artificial Sequence: Synthetic oligonucleotide
gaaaagcucuugacagaau

SEQ ID NO: 1609158 - RNA, 19 nt, Artificial Sequence
  Description of Artificial Sequence: Synthetic oligonucleotide
cugcugaaucucuauccau

SEQ ID NO: 1609159 - RNA, 19 nt, Artificial Sequence
  Description of Artificial Sequence: Synthetic oligonucleotide
gugguccucggacagcuuu

SEQ ID NO: 1609160 - RNA, 19 nt, Artificial Sequence
  Description of Artificial Sequence: Synthetic oligonucleotide
cugguauauuaaguuugcu

SEQ ID NO: 1609161 - RNA, 19 nt, Artificial Sequence
  Description of Artificial Sequence: Synthetic oligonucleotide
gcguaccucuguuucuauc

SEQ ID NO: 1609162 - RNA, 19 nt, Artificial Sequence
  Description of Artificial Sequence: Synthetic oligonucleotide
gcauaucguaugaaauucu

SEQ ID NO: 1609163 - RNA, 19 nt, Artificial Sequence
  Description of Artificial Sequence: Synthetic oligonucleotide
ggacggugggaaaagcucu

SEQ ID NO: 1609164 - RNA, 19 nt, Artificial Sequence
  Description of Artificial Sequence: Synthetic oligonucleotide
ccacuaagucagugucuug

SEQ ID NO: 1609165 - RNA, 19 nt, Artificial Sequence
  Description of Artificial Sequence: Synthetic oligonucleotide
cucuaagauuugaggguuu

SEQ ID NO: 1609166 - RNA, 19 nt, Artificial Sequence
  Description of Artificial Sequence: Synthetic oligonucleotide
gaguugcuccccaauuguu

SEQ ID NO: 1609167 - RNA, 19 nt, Artificial Sequence
  Description of Artificial Sequence: Synthetic oligonucleotide
gucucaugauagugugaau

SEQ ID NO: 1609168 - RNA, 19 nt, Artificial Sequence
  Description of Artificial Sequence: Synthetic oligonucleotide
ccugaagugggaauuuauu

SEQ ID NO: 1609169 - RNA, 19 nt, Artificial Sequence
  Description of Artificial Sequence: Synthetic oligonucleotide
gguccuuugaggguucuuu

SEQ ID NO: 1609170 - RNA, 19 nt, Artificial Sequence
  Description of Artificial Sequence: Synthetic oligonucleotide
gcauuccgagucugugcca

SEQ ID NO: 1609171 - RNA, 19 nt, Artificial Sequence
  Description of Artificial Sequence: Synthetic oligonucleotide
cacuguccauagguggaaa

SEQ ID NO: 1609172 - RNA, 19 nt, Artificial Sequence
  Description of Artificial Sequence: Synthetic oligonucleotide
gcuuacaagcaagcauucu

SEQ ID NO: 1609173 - RNA, 19 nt, Artificial Sequence
  Description of Artificial Sequence: Synthetic oligonucleotide
gcaugcuugucggaaggcu

SEQ ID NO: 1609174 - RNA, 19 nt, Artificial Sequence
  Description of Artificial Sequence: Synthetic oligonucleotide
ccuuaaggucccagaaagu

SEQ ID NO: 1609175 - RNA, 19 nt, Artificial Sequence
  Description of Artificial Sequence: Synthetic oligonucleotide
ggcuuaaacagcgcuucuu

SEQ ID NO: 1609176 - RNA, 19 nt, Artificial Sequence
  Description of Artificial Sequence: Synthetic oligonucleotide
gggcuuaaacagcgcuucu

SEQ ID NO: 1609177 - RNA, 19 nt, Artificial Sequence
  Description of Artificial Sequence: Synthetic oligonucleotide
gccggaggaaaucccuccu

SEQ ID NO: 1609178 - RNA, 19 nt, Artificial Sequence
  Description of Artificial Sequence: Synthetic oligonucleotide
gcacugugugucaguugca

SEQ ID NO: 1609179 - RNA, 19 nt, Artificial Sequence
  Description of Artificial Sequence: Synthetic oligonucleotide
cuuuagccuggggcuuaaa

SEQ ID NO: 1609180 - RNA, 19 nt, Artificial Sequence
  Description of Artificial Sequence: Synthetic oligonucleotide
gguccugaagugggaauuu

SEQ ID NO: 1609181 - RNA, 19 nt, Artificial Sequence
  Description of Artificial Sequence: Synthetic oligonucleotide
ggucuccagcuggcaaaca

SEQ ID NO: 1609182 - RNA, 19 nt, Artificial Sequence
  Description of Artificial Sequence: Synthetic oligonucleotide
cugaaguuauggggucaau

SEQ ID NO: 1609183 - RNA, 19 nt, Artificial Sequence
  Description of Artificial Sequence: Synthetic oligonucleotide
ggcguaccucuguuucuau

SEQ ID NO: 1609184 - RNA, 19 nt, Artificial Sequence
  Description of Artificial Sequence: Synthetic oligonucleotide
cggcguaccucuguuucua

SEQ ID NO: 1609185 - RNA, 19 nt, Artificial Sequence
  Description of Artificial Sequence: Synthetic oligonucleotide
uaagauguaguuaaggacg

SEQ ID NO: 1609186 - RNA, 19 nt, Artificial Sequence
  Description of Artificial Sequence: Synthetic oligonucleotide
aaauguuuggaccauguag

SEQ ID NO: 1609187 - RNA, 19 nt, Artificial Sequence
  Description of Artificial Sequence: Synthetic oligonucleotide
uuaaacuaagcccaugccg

SEQ ID NO: 1609188 - RNA, 19 nt, Artificial Sequence
  Description of Artificial Sequence: Synthetic oligonucleotide
cauauaaauacccaugucc

SEQ ID NO: 1609189 - RNA, 19 nt, Artificial Sequence
  Description of Artificial Sequence: Synthetic oligonucleotide
auaagauguaguuaaggac

SEQ ID NO: 1609190 - RNA, 19 nt, Artificial Sequence
  Description of Artificial Sequence: Synthetic oligonucleotide
gaaauugucuaccaagucc

SEQ ID NO: 1609191 - RNA, 19 nt, Artificial Sequence
  Description of Artificial Sequence: Synthetic oligonucleotide
acauaaaguaaucuagacg

SEQ ID NO: 1609192 - RNA, 19 nt, Artificial Sequence
  Description of Artificial Sequence: Synthetic oligonucleotide
ucuuacucagcaaugcugg

SEQ ID NO: 1609193 - RNA, 19 nt, Artificial Sequence
  Description of Artificial Sequence: Synthetic oligonucleotide
uaaacuaagcccaugccgc

SEQ ID NO: 1609194 - RNA, 19 nt, Artificial Sequence
  Description of Artificial Sequence: Synthetic oligonucleotide
uguccuuaaacuaagccca

SEQ ID NO: 1609195 - RNA, 19 nt, Artificial Sequence
  Description of Artificial Sequence: Synthetic oligonucleotide
aaugcugggaacugucccc

SEQ ID NO: 1609196 - RNA, 19 nt, Artificial Sequence
  Description of Artificial Sequence: Synthetic oligonucleotide
uucaaugcaggcucaaugg

SEQ ID NO: 1609197 - RNA, 19 nt, Artificial Sequence
  Description of Artificial Sequence: Synthetic oligonucleotide
uaaacagcagacauugugc

SEQ ID NO: 1609198 - RNA, 19 nt, Artificial Sequence
  Description of Artificial Sequence: Synthetic oligonucleotide
aacgccuugauucagcugu

SEQ ID NO: 1609199 - RNA, 19 nt, Artificial Sequence
  Description of Artificial Sequence: Synthetic oligonucleotide
gauuggcucauuuaaaaug

SEQ ID NO: 1609200 - RNA, 19 nt, Artificial Sequence
  Description of Artificial Sequence: Synthetic oligonucleotide
aguuaaggacgccaaacgc

SEQ ID NO: 1609201 - RNA, 19 nt, Artificial Sequence
  Description of Artificial Sequence: Synthetic oligonucleotide
cacgauacuacacauaaag

SEQ ID NO: 1609202 - RNA, 19 nt, Artificial Sequence
  Description of Artificial Sequence: Synthetic oligonucleotide
agaaauaugagcccagugu

SEQ ID NO: 1609203 - RNA, 19 nt, Artificial Sequence
  Description of Artificial Sequence: Synthetic oligonucleotide
ugaucuuacauagacacug

SEQ ID NO: 1609204 - RNA, 19 nt, Artificial Sequence
  Description of Artificial Sequence: Synthetic oligonucleotide
gauaagauguaguuaagga

SEQ ID NO: 1609205 - RNA, 19 nt, Artificial Sequence
  Description of Artificial Sequence: Synthetic oligonucleotide
ucuaaguagguuuccauug

SEQ ID NO: 1609206 - RNA, 19 nt, Artificial Sequence
  Description of Artificial Sequence: Synthetic oligonucleotide
ugggucuaaacacacauca

SEQ ID NO: 1609207 - RNA, 19 nt, Artificial Sequence
  Description of Artificial Sequence: Synthetic oligonucleotide
cauaaaguaaucuagacgu

SEQ ID NO: 1609208 - RNA, 19 nt, Artificial Sequence
  Description of Artificial Sequence: Synthetic oligonucleotide
ucaacaaguaacaauuuau

SEQ ID NO: 1609209 - RNA, 19 nt, Artificial Sequence
  Description of Artificial Sequence: Synthetic oligonucleotide
ucuuacauagacacuggag

SEQ ID NO: 1609210 - RNA, 19 nt, Artificial Sequence
  Description of Artificial Sequence: Synthetic oligonucleotide
uaguuaaggacgccaaacg

SEQ ID NO: 1609211 - RNA, 19 nt, Artificial Sequence
  Description of Artificial Sequence: Synthetic oligonucleotide
ugacuaacuacucaaggga

SEQ ID NO: 1609212 - RNA, 19 nt, Artificial Sequence
  Description of Artificial Sequence: Synthetic oligonucleotide
acgccaaacgccuugauuc

SEQ ID NO: 1609213 - RNA, 19 nt, Artificial Sequence
  Description of Artificial Sequence: Synthetic oligonucleotide
uguucuauccacaaacuuc

SEQ ID NO: 1609214 - RNA, 19 nt, Artificial Sequence
  Description of Artificial Sequence: Synthetic oligonucleotide
ucuaacuacaucuucuuuc

SEQ ID NO: 1609215 - RNA, 19 nt, Artificial Sequence
  Description of Artificial Sequence: Synthetic oligonucleotide
aaaucuacgggugagcuga

SEQ ID NO: 1609216 - RNA, 19 nt, Artificial Sequence
  Description of Artificial Sequence: Synthetic oligonucleotide
aguauacaaggucucaguc

SEQ ID NO: 1609217 - RNA, 19 nt, Artificial Sequence
  Description of Artificial Sequence: Synthetic oligonucleotide
aauguuuggaccauguagu

SEQ ID NO: 1609218 - RNA, 19 nt, Artificial Sequence
  Description of Artificial Sequence: Synthetic oligonucleotide
cuacuuguaaaucuacggg

SEQ ID NO: 1609219 - RNA, 19 nt, Artificial Sequence
  Description of Artificial Sequence: Synthetic oligonucleotide
acauaaguggagcugcugg

SEQ ID NO: 1609220 - RNA, 19 nt, Artificial Sequence
  Description of Artificial Sequence: Synthetic oligonucleotide
uccaugaauugucuuaaag

SEQ ID NO: 1609221 - RNA, 19 nt, Artificial Sequence
  Description of Artificial Sequence: Synthetic oligonucleotide
acuccuuacuguuaagaac

SEQ ID NO: 1609222 - RNA, 19 nt, Artificial Sequence
  Description of Artificial Sequence: Synthetic oligonucleotide
gugacuaacuacucaaggg

SEQ ID NO: 1609223 - RNA, 19 nt, Artificial Sequence
  Description of Artificial Sequence: Synthetic oligonucleotide
aguccccuuacucucagcc

SEQ ID NO: 1609224 - RNA, 19 nt, Artificial Sequence
  Description of Artificial Sequence: Synthetic oligonucleotide
agcauuacccacugaagac

SEQ ID NO: 1609225 - RNA, 19 nt, Artificial Sequence
  Description of Artificial Sequence: Synthetic oligonucleotide
aacaggacccuaucaaaag

SEQ ID NO: 1609226 - RNA, 19 nt, Artificial Sequence
  Description of Artificial Sequence: Synthetic oligonucleotide
uucaagucuguccccaacg

SEQ ID NO: 1609227 - RNA, 19 nt, Artificial Sequence
  Description of Artificial Sequence: Synthetic oligonucleotide
aagauguaguuaaggacgc

SEQ ID NO: 1609228 - RNA, 19 nt, Artificial Sequence
  Description of Artificial Sequence: Synthetic oligonucleotide
acaaaauugaucuuacaua

SEQ ID NO: 1609229 - RNA, 19 nt, Artificial Sequence
  Description of Artificial Sequence: Synthetic oligonucleotide
ucuaaacacacaucaacgu

SEQ ID NO: 1609230 - RNA, 19 nt, Artificial Sequence
  Description of Artificial Sequence: Synthetic oligonucleotide
acgucuuagcuauacugcc

SEQ ID NO: 1609231 - RNA, 19 nt, Artificial Sequence
  Description of Artificial Sequence: Synthetic oligonucleotide
uauacugccuugcucuuag

SEQ ID NO: 1609232 - RNA, 19 nt, Artificial Sequence
  Description of Artificial Sequence: Synthetic oligonucleotide
aguucuuacucagcaaugc

SEQ ID NO: 1609233 - RNA, 19 nt, Artificial Sequence
  Description of Artificial Sequence: Synthetic oligonucleotide
ugcuacuuguaaaucuacg

SEQ ID NO: 1609234 - RNA, 19 nt, Artificial Sequence
  Description of Artificial Sequence: Synthetic oligonucleotide
aaugauuugggaagcagca

SEQ ID NO: 1609235 - RNA, 19 nt, Artificial Sequence
  Description of Artificial Sequence: Synthetic oligonucleotide
ugauuugggaagcagcacu

SEQ ID NO: 1609236 - RNA, 19 nt, Artificial Sequence
  Description of Artificial Sequence: Synthetic oligonucleotide
uuaaggacgccaaacgccu

SEQ ID NO: 1609237 - RNA, 19 nt, Artificial Sequence
  Description of Artificial Sequence: Synthetic oligonucleotide
aacgugacuaacuacucaa

SEQ ID NO: 1609238 - RNA, 19 nt, Artificial Sequence
  Description of Artificial Sequence: Synthetic oligonucleotide
gucuaaacacacaucaacg

SEQ ID NO: 1609239 - RNA, 19 nt, Artificial Sequence
  Description of Artificial Sequence: Synthetic oligonucleotide
agcuauacugccuugcucu

SEQ ID NO: 1609240 - RNA, 19 nt, Artificial Sequence
  Description of Artificial Sequence: Synthetic oligonucleotide
aguugucuugauuguaaac

SEQ ID NO: 1609241 - RNA, 19 nt, Artificial Sequence
  Description of Artificial Sequence: Synthetic oligonucleotide
gauacuacacauaaaguaa

SEQ ID NO: 1609242 - RNA, 19 nt, Artificial Sequence
  Description of Artificial Sequence: Synthetic oligonucleotide
ugauuauguggucugugca

SEQ ID NO: 1609243 - RNA, 19 nt, Artificial Sequence
  Description of Artificial Sequence: Synthetic oligonucleotide
uacucaagggaacagcacu

SEQ ID NO: 1609244 - RNA, 19 nt, Artificial Sequence
  Description of Artificial Sequence: Synthetic oligonucleotide
ucuauccacaaacuucccc

SEQ ID NO: 1609245 - RNA, 19 nt, Artificial Sequence
  Description of Artificial Sequence: Synthetic oligonucleotide
uugauuauguggucugugc

SEQ ID NO: 1609246 - RNA, 19 nt, Artificial Sequence
  Description of Artificial Sequence: Synthetic oligonucleotide
caaugauuugggaagcagc

SEQ ID NO: 1609247 - RNA, 19 nt, Artificial Sequence
  Description of Artificial Sequence: Synthetic oligonucleotide
aaaggguguucacuucuuc

SEQ ID NO: 1609248 - RNA, 19 nt, Artificial Sequence
  Description of Artificial Sequence: Synthetic oligonucleotide
auauaaauacccaugucca

SEQ ID NO: 1609249 - RNA, 19 nt, Artificial Sequence
  Description of Artificial Sequence: Synthetic oligonucleotide
uuuccauuguucuauccac

SEQ ID NO: 1609250 - RNA, 19 nt, Artificial Sequence
  Description of Artificial Sequence: Synthetic oligonucleotide
gaugccagagacacaaggg

SEQ ID NO: 1609251 - RNA, 19 nt, Artificial Sequence
  Description of Artificial Sequence: Synthetic oligonucleotide
ucugggucuaaacacacau

SEQ ID NO: 1609252 - RNA, 19 nt, Artificial Sequence
  Description of Artificial Sequence: Synthetic oligonucleotide
ccaugaauugucuuaaagg

SEQ ID NO: 1609253 - RNA, 19 nt, Artificial Sequence
  Description of Artificial Sequence: Synthetic oligonucleotide
gcuacuuguaaaucuacgg

SEQ ID NO: 1609254 - RNA, 19 nt, Artificial Sequence
  Description of Artificial Sequence: Synthetic oligonucleotide
uuugcuacuuguaaaucua

SEQ ID NO: 1609255 - RNA, 19 nt, Artificial Sequence
  Description of Artificial Sequence: Synthetic oligonucleotide
aucaaauacaacccuaguu

SEQ ID NO: 1609256 - RNA, 19 nt, Artificial Sequence
  Description of Artificial Sequence: Synthetic oligonucleotide
cuuaaacuaagcccaugcc

SEQ ID NO: 1609257 - RNA, 19 nt, Artificial Sequence
  Description of Artificial Sequence: Synthetic oligonucleotide
acaagugauagaagggagc

SEQ ID NO: 1609258 - RNA, 19 nt, Artificial Sequence
  Description of Artificial Sequence: Synthetic oligonucleotide
cuuggugcaaucucaggag

SEQ ID NO: 1609259 - RNA, 19 nt, Artificial Sequence
  Description of Artificial Sequence: Synthetic oligonucleotide
aacgcaccggcucuuuagg

SEQ ID NO: 1609260 - RNA, 19 nt, Artificial Sequence
  Description of Artificial Sequence: Synthetic oligonucleotide
aucuagacgucuuagcuau

SEQ ID NO: 1609261 - RNA, 19 nt, Artificial Sequence
  Description of Artificial Sequence: Synthetic oligonucleotide
uauaaauacccauguccac

SEQ ID NO: 1609262 - RNA, 19 nt, Artificial Sequence
  Description of Artificial Sequence: Synthetic oligonucleotide
aguaaucuagacgucuuag

SEQ ID NO: 1609263 - RNA, 19 nt, Artificial Sequence
  Description of Artificial Sequence: Synthetic oligonucleotide
ucuacgggugagcugauuc

SEQ ID NO: 1609264 - RNA, 19 nt, Artificial Sequence
  Description of Artificial Sequence: Synthetic oligonucleotide
ucuuucucuaauuuugauu

SEQ ID NO: 1609265 - RNA, 19 nt, Artificial Sequence
  Description of Artificial Sequence: Synthetic oligonucleotide
guuaaggacgccaaacgcc

SEQ ID NO: 1609266 - RNA, 19 nt, Artificial Sequence
  Description of Artificial Sequence: Synthetic oligonucleotide
guaaucuagacgucuuagc

SEQ ID NO: 1609267 - RNA, 19 nt, Artificial Sequence
  Description of Artificial Sequence: Synthetic oligonucleotide
uugccccauauaaauaccc

SEQ ID NO: 1609268 - RNA, 19 nt, Artificial Sequence
  Description of Artificial Sequence: Synthetic oligonucleotide
auaaauacccauguccacu

SEQ ID NO: 1609269 - RNA, 19 nt, Artificial Sequence
  Description of Artificial Sequence: Synthetic oligonucleotide
ucuuaguauacaaggucuc

SEQ ID NO: 1609270 - RNA, 19 nt, Artificial Sequence
  Description of Artificial Sequence: Synthetic oligonucleotide
uacuuuagcuguucucucc

SEQ ID NO: 1609271 - RNA, 19 nt, Artificial Sequence
  Description of Artificial Sequence: Synthetic oligonucleotide
uuagcuauacugccuugcu

SEQ ID NO: 1609272 - RNA, 19 nt, Artificial Sequence
  Description of Artificial Sequence: Synthetic oligonucleotide
acaagucugcuucaagucu

SEQ ID NO: 1609273 - RNA, 19 nt, Artificial Sequence
  Description of Artificial Sequence: Synthetic oligonucleotide
aucaacgugacuaacuacu

SEQ ID NO: 1609274 - RNA, 19 nt, Artificial Sequence
  Description of Artificial Sequence: Synthetic oligonucleotide
aauugucuaccaagucccc

SEQ ID NO: 1609275 - RNA, 19 nt, Artificial Sequence
  Description of Artificial Sequence: Synthetic oligonucleotide
aauacaacccuaguucuua

SEQ ID NO: 1609276 - RNA, 19 nt, Artificial Sequence
  Description of Artificial Sequence: Synthetic oligonucleotide
uaaauacccauguccacuc

SEQ ID NO: 1609277 - RNA, 19 nt, Artificial Sequence
  Description of Artificial Sequence: Synthetic oligonucleotide
auuggcucauuuaaaaugu

SEQ ID NO: 1609278 - RNA, 19 nt, Artificial Sequence
  Description of Artificial Sequence: Synthetic oligonucleotide
uaguucuuacucagcaaug

SEQ ID NO: 1609279 - RNA, 19 nt, Artificial Sequence
  Description of Artificial Sequence: Synthetic oligonucleotide
uucucuaauuuugauuaug

SEQ ID NO: 1609280 - RNA, 19 nt, Artificial Sequence
  Description of Artificial Sequence: Synthetic oligonucleotide
ucaaaaggauuugcuauca

SEQ ID NO: 1609281 - RNA, 19 nt, Artificial Sequence
  Description of Artificial Sequence: Synthetic oligonucleotide
aggggcaagcauuacccac

SEQ ID NO: 1609282 - RNA, 19 nt, Artificial Sequence
  Description of Artificial Sequence: Synthetic oligonucleotide
uuacccacugaagacaaga

SEQ ID NO: 1609283 - RNA, 19 nt, Artificial Sequence
  Description of Artificial Sequence: Synthetic oligonucleotide
aggguacucaaugauuugg

SEQ ID NO: 1609284 - RNA, 19 nt, Artificial Sequence
  Description of Artificial Sequence: Synthetic oligonucleotide
caagcauuacccacugaag

SEQ ID NO: 1609285 - RNA, 19 nt, Artificial Sequence
  Description of Artificial Sequence: Synthetic oligonucleotide
cuuacucucagccccacuc

SEQ ID NO: 1609286 - RNA, 19 nt, Artificial Sequence
  Description of Artificial Sequence: Synthetic oligonucleotide
cuuacauagacacuggagu

SEQ ID NO: 1609287 - RNA, 19 nt, Artificial Sequence
  Description of Artificial Sequence: Synthetic oligonucleotide
aacagcacuccuuacuguu

SEQ ID NO: 1609288 - RNA, 19 nt, Artificial Sequence
  Description of Artificial Sequence: Synthetic oligonucleotide
uuugauuauguggucugug

SEQ ID NO: 1609289 - RNA, 19 nt, Artificial Sequence
  Description of Artificial Sequence: Synthetic oligonucleotide
uuguaaaucuacgggugag

SEQ ID NO: 1609290 - RNA, 19 nt, Artificial Sequence
  Description of Artificial Sequence: Synthetic oligonucleotide
uuaucaaaaggcucugauu

SEQ ID NO: 1609291 - RNA, 19 nt, Artificial Sequence
  Description of Artificial Sequence: Synthetic oligonucleotide
ggucuaaacacacaucaac

SEQ ID NO: 1609292 - RNA, 19 nt, Artificial Sequence
  Description of Artificial Sequence: Synthetic oligonucleotide
uuaaaacaaggacccgaac

SEQ ID NO: 1609293 - RNA, 19 nt, Artificial Sequence
  Description of Artificial Sequence: Synthetic oligonucleotide
aagggaacagcacuccuua

SEQ ID NO: 1609294 - RNA, 19 nt, Artificial Sequence
  Description of Artificial Sequence: Synthetic oligonucleotide
gaacccuugccccauauaa

SEQ ID NO: 1609295 - RNA, 19 nt, Artificial Sequence
  Description of Artificial Sequence: Synthetic oligonucleotide
acacacaucaacgugacua

SEQ ID NO: 1609296 - RNA, 19 nt, Artificial Sequence
  Description of Artificial Sequence: Synthetic oligonucleotide
ucuaccaaguccccaugcu

SEQ ID NO: 1609297 - RNA, 19 nt, Artificial Sequence
  Description of Artificial Sequence: Synthetic oligonucleotide
gaguacaaaauugcugagc

SEQ ID NO: 1609298 - RNA, 19 nt, Artificial Sequence
  Description of Artificial Sequence: Synthetic oligonucleotide
uggucugugcaucuaagua

SEQ ID NO: 1609299 - RNA, 19 nt, Artificial Sequence
  Description of Artificial Sequence: Synthetic oligonucleotide
caagaaagaacaugcacaa

SEQ ID NO: 1609300 - RNA, 19 nt, Artificial Sequence
  Description of Artificial Sequence: Synthetic oligonucleotide
uguaaaucuacgggugagc

SEQ ID NO: 1609301 - RNA, 19 nt, Artificial Sequence
  Description of Artificial Sequence: Synthetic oligonucleotide
uacuacacauaaaguaauc

SEQ ID NO: 1609302 - RNA, 19 nt, Artificial Sequence
  Description of Artificial Sequence: Synthetic oligonucleotide
uuacucucagccccacucc

SEQ ID NO: 1609303 - RNA, 19 nt, Artificial Sequence
  Description of Artificial Sequence: Synthetic oligonucleotide
auaugagcccaguguugcc

SEQ ID NO: 1609304 - RNA, 19 nt, Artificial Sequence
  Description of Artificial Sequence: Synthetic oligonucleotide
uaaaucuacgggugagcug

SEQ ID NO: 1609305 - RNA, 19 nt, Artificial Sequence
  Description of Artificial Sequence: Synthetic oligonucleotide
caaggucucagucuggguc

SEQ ID NO: 1609306 - RNA, 19 nt, Artificial Sequence
  Description of Artificial Sequence: Synthetic oligonucleotide
ugauuggcucauuuaaaau

SEQ ID NO: 1609307 - RNA, 19 nt, Artificial Sequence
  Description of Artificial Sequence: Synthetic oligonucleotide
ugcccaauucaacaaguaa

SEQ ID NO: 1609308 - RNA, 19 nt, Artificial Sequence
  Description of Artificial Sequence: Synthetic oligonucleotide
cacacauaaguggagcugc

SEQ ID NO: 1609309 - RNA, 19 nt, Artificial Sequence
  Description of Artificial Sequence: Synthetic oligonucleotide
uggaucaaauacaacccua

SEQ ID NO: 1609310 - RNA, 19 nt, Artificial Sequence
  Description of Artificial Sequence: Synthetic oligonucleotide
aaacuaagcccaugccgcu

SEQ ID NO: 1609311 - RNA, 19 nt, Artificial Sequence
  Description of Artificial Sequence: Synthetic oligonucleotide
augucaguccccuuacucu

SEQ ID NO: 1609312 - RNA, 19 nt, Artificial Sequence
  Description of Artificial Sequence: Synthetic oligonucleotide
aaggacgccaaacgccuug

SEQ ID NO: 1609313 - RNA, 19 nt, Artificial Sequence
  Description of Artificial Sequence: Synthetic oligonucleotide
acaucaacgugacuaacua

SEQ ID NO: 1609314 - RNA, 19 nt, Artificial Sequence
  Description of Artificial Sequence: Synthetic oligonucleotide
augccagagacacaagggu

SEQ ID NO: 1609315 - RNA, 19 nt, Artificial Sequence
  Description of Artificial Sequence: Synthetic oligonucleotide
ugauuguaaacagcagaca

SEQ ID NO: 1609316 - RNA, 19 nt, Artificial Sequence
  Description of Artificial Sequence: Synthetic oligonucleotide
uuccauuguucuauccaca

SEQ ID NO: 1609317 - RNA, 19 nt, Artificial Sequence
  Description of Artificial Sequence: Synthetic oligonucleotide
guaguuaaggacgccaaac

SEQ ID NO: 1609318 - RNA, 19 nt, Artificial Sequence
  Description of Artificial Sequence: Synthetic oligonucleotide
cugauucugaacccuugcc

SEQ ID NO: 1609319 - RNA, 19 nt, Artificial Sequence
  Description of Artificial Sequence: Synthetic oligonucleotide
cuuagcuauacugccuugc

SEQ ID NO: 1609320 - RNA, 19 nt, Artificial Sequence
  Description of Artificial Sequence: Synthetic oligonucleotide
uccauuguucuauccacaa

SEQ ID NO: 1609321 - RNA, 19 nt, Artificial Sequence
  Description of Artificial Sequence: Synthetic oligonucleotide
uugaucuuacauagacacu

SEQ ID NO: 1609322 - RNA, 19 nt, Artificial Sequence
  Description of Artificial Sequence: Synthetic oligonucleotide
ucaacgugacuaacuacuc

SEQ ID NO: 1609323 - RNA, 19 nt, Artificial Sequence
  Description of Artificial Sequence: Synthetic oligonucleotide
uuguucuauccacaaacuu

SEQ ID NO: 1609324 - RNA, 19 nt, Artificial Sequence
  Description of Artificial Sequence: Synthetic oligonucleotide
aauacccauguccacucua

SEQ ID NO: 1609325 - RNA, 19 nt, Artificial Sequence
  Description of Artificial Sequence: Synthetic oligonucleotide
cuccuuacuguuaagaacu

SEQ ID NO: 1609326 - RNA, 19 nt, Artificial Sequence
  Description of Artificial Sequence: Synthetic oligonucleotide
aacucccuuugcuacuugu

SEQ ID NO: 1609327 - RNA, 19 nt, Artificial Sequence
  Description of Artificial Sequence: Synthetic oligonucleotide
ugccccauauaaauaccca

SEQ ID NO: 1609328 - RNA, 19 nt, Artificial Sequence
  Description of Artificial Sequence: Synthetic oligonucleotide
auagaagggagcagaaaug

SEQ ID NO: 1609329 - RNA, 19 nt, Artificial Sequence
  Description of Artificial Sequence: Synthetic oligonucleotide
uguuuggaccauguaguug

SEQ ID NO: 1609330 - RNA, 19 nt, Artificial Sequence
  Description of Artificial Sequence: Synthetic oligonucleotide
uggugcaaucucaggagca

SEQ ID NO: 1609331 - RNA, 19 nt, Artificial Sequence
  Description of Artificial Sequence: Synthetic oligonucleotide
aucuaaguagguuuccauu

SEQ ID NO: 1609332 - RNA, 19 nt, Artificial Sequence
  Description of Artificial Sequence: Synthetic oligonucleotide
gacccuaucaaaagagaac

SEQ ID NO: 1609333 - RNA, 19 nt, Artificial Sequence
  Description of Artificial Sequence: Synthetic oligonucleotide
uugcuacuuguaaaucuac

SEQ ID NO: 1609334 - RNA, 19 nt, Artificial Sequence
  Description of Artificial Sequence: Synthetic oligonucleotide
cucagcacacauaagugga

SEQ ID NO: 1609335 - RNA, 19 nt, Artificial Sequence
  Description of Artificial Sequence: Synthetic oligonucleotide
ggaacagcacuccuuacug

SEQ ID NO: 1609336 - RNA, 19 nt, Artificial Sequence
  Description of Artificial Sequence: Synthetic oligonucleotide
ccuuaaacuaagcccaugc

SEQ ID NO: 1609337 - RNA, 19 nt, Artificial Sequence
  Description of Artificial Sequence: Synthetic oligonucleotide
gguguugccaguguuugcg

SEQ ID NO: 1609338 - RNA, 19 nt, Artificial Sequence
  Description of Artificial Sequence: Synthetic oligonucleotide
aaguaaucuagacgucuua

SEQ ID NO: 1609339 - RNA, 19 nt, Artificial Sequence
  Description of Artificial Sequence: Synthetic oligonucleotide
cuuuaggaccucagcacac

SEQ ID NO: 1609340 - RNA, 19 nt, Artificial Sequence
  Description of Artificial Sequence: Synthetic oligonucleotide
ugccaagaaagaacaugca

SEQ ID NO: 1609341 - RNA, 19 nt, Artificial Sequence
  Description of Artificial Sequence: Synthetic oligonucleotide
uuagcuguucucucccgcu

SEQ ID NO: 1609342 - RNA, 19 nt, Artificial Sequence
  Description of Artificial Sequence: Synthetic oligonucleotide
cuuaaaggguguucacuuc

SEQ ID NO: 1609343 - RNA, 19 nt, Artificial Sequence
  Description of Artificial Sequence: Synthetic oligonucleotide
aaacaaggacccgaaccug

SEQ ID NO: 1609344 - RNA, 19 nt, Artificial Sequence
  Description of Artificial Sequence: Synthetic oligonucleotide
aagcccaugccgcuauugu

SEQ ID NO: 1609345 - RNA, 19 nt, Artificial Sequence
  Description of Artificial Sequence: Synthetic oligonucleotide
aaaugucaguccccuuacu

SEQ ID NO: 1609346 - RNA, 19 nt, Artificial Sequence
  Description of Artificial Sequence: Synthetic oligonucleotide
uguccaugaauugucuuaa

SEQ ID NO: 1609347 - RNA, 19 nt, Artificial Sequence
  Description of Artificial Sequence: Synthetic oligonucleotide
guacaaaauugcugagccc

SEQ ID NO: 1609348 - RNA, 19 nt, Artificial Sequence
  Description of Artificial Sequence: Synthetic oligonucleotide
uaucagucauucaguuucu

SEQ ID NO: 1609349 - RNA, 19 nt, Artificial Sequence
  Description of Artificial Sequence: Synthetic oligonucleotide
guuaaaaccacaagugaua

SEQ ID NO: 1609350 - RNA, 19 nt, Artificial Sequence
  Description of Artificial Sequence: Synthetic oligonucleotide
aaaguaaucuagacgucuu

SEQ ID NO: 1609351 - RNA, 19 nt, Artificial Sequence
  Description of Artificial Sequence: Synthetic oligonucleotide
acuacucaagggaacagca

SEQ ID NO: 1609352 - RNA, 19 nt, Artificial Sequence
  Description of Artificial Sequence: Synthetic oligonucleotide
aucuuacauagacacugga

SEQ ID NO: 1609353 - RNA, 19 nt, Artificial Sequence
  Description of Artificial Sequence: Synthetic oligonucleotide
aagugauagaagggagcag

SEQ ID NO: 1609354 - RNA, 19 nt, Artificial Sequence
  Description of Artificial Sequence: Synthetic oligonucleotide
uucuguccuuaaacuaagc

SEQ ID NO: 1609355 - RNA, 19 nt, Artificial Sequence
  Description of Artificial Sequence: Synthetic oligonucleotide
aaacgccuugauucagcug

SEQ ID NO: 1609356 - RNA, 19 nt, Artificial Sequence
  Description of Artificial Sequence: Synthetic oligonucleotide
uacuguuaagaacucccuu

SEQ ID NO: 1609357 - RNA, 19 nt, Artificial Sequence
  Description of Artificial Sequence: Synthetic oligonucleotide
ugucuuaaaggguguucac

SEQ ID NO: 1609358 - RNA, 19 nt, Artificial Sequence
  Description of Artificial Sequence: Synthetic oligonucleotide
guuaagaacucccuuugcu

SEQ ID NO: 1609359 - RNA, 19 nt, Artificial Sequence
  Description of Artificial Sequence: Synthetic oligonucleotide
uauuguccugauucugaac

SEQ ID NO: 1609360 - RNA, 19 nt, Artificial Sequence
  Description of Artificial Sequence: Synthetic oligonucleotide
ugucccuuggugcaaucuc

SEQ ID NO: 1609361 - RNA, 19 nt, Artificial Sequence
  Description of Artificial Sequence: Synthetic oligonucleotide
ggaucaaauacaacccuag

SEQ ID NO: 1609362 - RNA, 19 nt, Artificial Sequence
  Description of Artificial Sequence: Synthetic oligonucleotide
ugauucucaccugggaaac

SEQ ID NO: 1609363 - RNA, 19 nt, Artificial Sequence
  Description of Artificial Sequence: Synthetic oligonucleotide
acucaagggaacagcacuc

SEQ ID NO: 1609364 - RNA, 19 nt, Artificial Sequence
  Description of Artificial Sequence: Synthetic oligonucleotide
uaaguagguuuccauuguu

SEQ ID NO: 1609365 - RNA, 19 nt, Artificial Sequence
  Description of Artificial Sequence: Synthetic oligonucleotide
agauguaguuaaggacgcc

SEQ ID NO: 1609366 - RNA, 19 nt, Artificial Sequence
  Description of Artificial Sequence: Synthetic oligonucleotide
auuguucuauccacaaacu

SEQ ID NO: 1609367 - RNA, 19 nt, Artificial Sequence
  Description of Artificial Sequence: Synthetic oligonucleotide
agguguugccaguguuugc

SEQ ID NO: 1609368 - RNA, 19 nt, Artificial Sequence
  Description of Artificial Sequence: Synthetic oligonucleotide
caucaacgugacuaacuac

SEQ ID NO: 1609369 - RNA, 19 nt, Artificial Sequence
  Description of Artificial Sequence: Synthetic oligonucleotide
aaccuggagggguacugga

SEQ ID NO: 1609370 - RNA, 19 nt, Artificial Sequence
  Description of Artificial Sequence: Synthetic oligonucleotide
ucuuguguugcugggcuac

SEQ ID NO: 1609371 - RNA, 19 nt, Artificial Sequence
  Description of Artificial Sequence: Synthetic oligonucleotide
uuuugauuauguggucugu

SEQ ID NO: 1609372 - RNA, 19 nt, Artificial Sequence
  Description of Artificial Sequence: Synthetic oligonucleotide
acuuccuaugaaauugucu

SEQ ID NO: 1609373 - RNA, 19 nt, Artificial Sequence
  Description of Artificial Sequence: Synthetic oligonucleotide
agcccaugccgcuauuguc

SEQ ID NO: 1609374 - RNA, 19 nt, Artificial Sequence
  Description of Artificial Sequence: Synthetic oligonucleotide
uucuauccacaaacuuccc

SEQ ID NO: 1609375 - RNA, 19 nt, Artificial Sequence
  Description of Artificial Sequence: Synthetic oligonucleotide
ucuuagcuauacugccuug

SEQ ID NO: 1609376 - RNA, 19 nt, Artificial Sequence
  Description of Artificial Sequence: Synthetic oligonucleotide
caagugauagaagggagca

SEQ ID NO: 1609377 - RNA, 19 nt, Artificial Sequence
  Description of Artificial Sequence: Synthetic oligonucleotide
uuuaggaccucagcacaca

SEQ ID NO: 1609378 - RNA, 19 nt, Artificial Sequence
  Description of Artificial Sequence: Synthetic oligonucleotide
cuacucaagggaacagcac

SEQ ID NO: 1609379 - RNA, 19 nt, Artificial Sequence
  Description of Artificial Sequence: Synthetic oligonucleotide
ccucagcacacauaagugg

SEQ ID NO: 1609380 - RNA, 19 nt, Artificial Sequence
  Description of Artificial Sequence: Synthetic oligonucleotide
ucucagucugggucuaaac

SEQ ID NO: 1609381 - RNA, 19 nt, Artificial Sequence
  Description of Artificial Sequence: Synthetic oligonucleotide
cuuguaaaucuacggguga

SEQ ID NO: 1609382 - RNA, 19 nt, Artificial Sequence
  Description of Artificial Sequence: Synthetic oligonucleotide
uacugccuugcucuuagua

SEQ ID NO: 1609383 - RNA, 19 nt, Artificial Sequence
  Description of Artificial Sequence: Synthetic oligonucleotide
uuucucuaauuuugauuau

SEQ ID NO: 1609384 - RNA, 19 nt, Artificial Sequence
  Description of Artificial Sequence: Synthetic oligonucleotide
auacuacacauaaaguaau

SEQ ID NO: 1609385 - RNA, 19 nt, Artificial Sequence
  Description of Artificial Sequence: Synthetic oligonucleotide
uagcuauacugccuugcuc

SEQ ID NO: 1609386 - RNA, 19 nt, Artificial Sequence
  Description of Artificial Sequence: Synthetic oligonucleotide
ugccuugcucuuaguauac

SEQ ID NO: 1609387 - RNA, 19 nt, Artificial Sequence
  Description of Artificial Sequence: Synthetic oligonucleotide
cuacuuuagcuguucucuc

SEQ ID NO: 1609388 - RNA, 19 nt, Artificial Sequence
  Description of Artificial Sequence: Synthetic oligonucleotide
gcucuuaguauacaagguc

SEQ ID NO: 1609389 - RNA, 19 nt, Artificial Sequence
  Description of Artificial Sequence: Synthetic oligonucleotide
caacgcaccggcucuuuag

SEQ ID NO: 1609390 - RNA, 19 nt, Artificial Sequence
  Description of Artificial Sequence: Synthetic oligonucleotide
uuaggaccucagcacacau

SEQ ID NO: 1609391 - RNA, 19 nt, Artificial Sequence
  Description of Artificial Sequence: Synthetic oligonucleotide
auacccauguccacucuag

SEQ ID NO: 1609392 - RNA, 19 nt, Artificial Sequence
  Description of Artificial Sequence: Synthetic oligonucleotide
acacaucaacgugacuaac

SEQ ID NO: 1609393 - RNA, 19 nt, Artificial Sequence
  Description of Artificial Sequence: Synthetic oligonucleotide
gcccaauucaacaaguaac

SEQ ID NO: 1609394 - RNA, 19 nt, Artificial Sequence
  Description of Artificial Sequence: Synthetic oligonucleotide
caauucaacaaguaacaau

SEQ ID NO: 1609395 - RNA, 19 nt, Artificial Sequence
  Description of Artificial Sequence: Synthetic oligonucleotide
ggaguacaaaauugcugag

SEQ ID NO: 1609396 - RNA, 19 nt, Artificial Sequence
  Description of Artificial Sequence: Synthetic oligonucleotide
aaauacaacccuaguucuu

SEQ ID NO: 1609397 - RNA, 19 nt, Artificial Sequence
  Description of Artificial Sequence: Synthetic oligonucleotide
uguccugauucugaacccu

SEQ ID NO: 1609398 - RNA, 19 nt, Artificial Sequence
  Description of Artificial Sequence: Synthetic oligonucleotide
cuuaguauacaaggucuca

SEQ ID NO: 1609399 - RNA, 19 nt, Artificial Sequence
  Description of Artificial Sequence: Synthetic oligonucleotide
acgauacuacacauaaagu

SEQ ID NO: 1609400 - RNA, 19 nt, Artificial Sequence
  Description of Artificial Sequence: Synthetic oligonucleotide
caaugcuggucuuguguug

SEQ ID NO: 1609401 - RNA, 19 nt, Artificial Sequence
  Description of Artificial Sequence: Synthetic oligonucleotide
gaucaaauacaacccuagu

SEQ ID NO: 1609402 - RNA, 19 nt, Artificial Sequence
  Description of Artificial Sequence: Synthetic oligonucleotide
ggguacucaaugauuuggg

SEQ ID NO: 1609403 - RNA, 19 nt, Artificial Sequence
  Description of Artificial Sequence: Synthetic oligonucleotide
cuaguucuuacucagcaau

SEQ ID NO: 1609404 - RNA, 19 nt, Artificial Sequence
  Description of Artificial Sequence: Synthetic oligonucleotide
guaguugucuugauuguaa

SEQ ID NO: 1609405 - RNA, 19 nt, Artificial Sequence
  Description of Artificial Sequence: Synthetic oligonucleotide
uaagcccaugccgcuauug

SEQ ID NO: 1609406 - RNA, 19 nt, Artificial Sequence
  Description of Artificial Sequence: Synthetic oligonucleotide
gcaauuuccauagguguug

SEQ ID NO: 1609407 - RNA, 19 nt, Artificial Sequence
  Description of Artificial Sequence: Synthetic oligonucleotide
acuaagcccaugccgcuau

SEQ ID NO: 1609408 - RNA, 19 nt, Artificial Sequence
  Description of Artificial Sequence: Synthetic oligonucleotide
cgugacuaacuacucaagg

SEQ ID NO: 1609409 - RNA, 19 nt, Artificial Sequence
  Description of Artificial Sequence: Synthetic oligonucleotide
uuccauagguguugccagu

SEQ ID NO: 1609410 - RNA, 19 nt, Artificial Sequence
  Description of Artificial Sequence: Synthetic oligonucleotide
cauuacccacugaagacaa

SEQ ID NO: 1609411 - RNA, 19 nt, Artificial Sequence
  Description of Artificial Sequence: Synthetic oligonucleotide
ucugugcaucuaaguaggu

SEQ ID NO: 1609412 - RNA, 19 nt, Artificial Sequence
  Description of Artificial Sequence: Synthetic oligonucleotide
cuaugaaauugucuaccaa

SEQ ID NO: 1609413 - RNA, 19 nt, Artificial Sequence
  Description of Artificial Sequence: Synthetic oligonucleotide
ugcaggcucaauggcaaac

SEQ ID NO: 1609414 - RNA, 19 nt, Artificial Sequence
  Description of Artificial Sequence: Synthetic oligonucleotide
cugggucuaaacacacauc

SEQ ID NO: 1609415 - RNA, 19 nt, Artificial Sequence
  Description of Artificial Sequence: Synthetic oligonucleotide
cacuccuuacuguuaagaa

SEQ ID NO: 1609416 - RNA, 19 nt, Artificial Sequence
  Description of Artificial Sequence: Synthetic oligonucleotide
auguuuggaccauguaguu

SEQ ID NO: 1609417 - RNA, 19 nt, Artificial Sequence
  Description of Artificial Sequence: Synthetic oligonucleotide
acuccccacgauacuacac

SEQ ID NO: 1609418 - RNA, 19 nt, Artificial Sequence
  Description of Artificial Sequence: Synthetic oligonucleotide
gaauuucaaugcaggcuca

SEQ ID NO: 1609419 - RNA, 19 nt, Artificial Sequence
  Description of Artificial Sequence: Synthetic oligonucleotide
aucagucauucaguuucuc

SEQ ID NO: 1609420 - RNA, 19 nt, Artificial Sequence
  Description of Artificial Sequence: Synthetic oligonucleotide
caaggguacucaaugauuu

SEQ ID NO: 1609421 - RNA, 19 nt, Artificial Sequence
  Description of Artificial Sequence: Synthetic oligonucleotide
guaaaucuacgggugagcu

SEQ ID NO: 1609422 - RNA, 19 nt, Artificial Sequence
  Description of Artificial Sequence: Synthetic oligonucleotide
agcacuccuuacuguuaag

SEQ ID NO: 1609423 - RNA, 19 nt, Artificial Sequence
  Description of Artificial Sequence: Synthetic oligonucleotide
cgauacuacacauaaagua

SEQ ID NO: 1609424 - RNA, 19 nt, Artificial Sequence
  Description of Artificial Sequence: Synthetic oligonucleotide
acaaggguacucaaugauu

SEQ ID NO: 1609425 - RNA, 19 nt, Artificial Sequence
  Description of Artificial Sequence: Synthetic oligonucleotide
caacgugacuaacuacuca

SEQ ID NO: 1609426 - RNA, 19 nt, Artificial Sequence
  Description of Artificial Sequence: Synthetic oligonucleotide
acaaggucucagucugggu

SEQ ID NO: 1609427 - RNA, 19 nt, Artificial Sequence
  Description of Artificial Sequence: Synthetic oligonucleotide
acccuaguucuuacucagc

SEQ ID NO: 1609428 - RNA, 19 nt, Artificial Sequence
  Description of Artificial Sequence: Synthetic oligonucleotide
acgugacuaacuacucaag

SEQ ID NO: 1609429 - RNA, 19 nt, Artificial Sequence
  Description of Artificial Sequence: Synthetic oligonucleotide
ggugcaaucucaggagcag

SEQ ID NO: 1609430 - RNA, 19 nt, Artificial Sequence
  Description of Artificial Sequence: Synthetic oligonucleotide
cacaucaacgugacuaacu

SEQ ID NO: 1609431 - RNA, 19 nt, Artificial Sequence
  Description of Artificial Sequence: Synthetic oligonucleotide
ggaccauguaguugucuug

SEQ ID NO: 1609432 - RNA, 19 nt, Artificial Sequence
  Description of Artificial Sequence: Synthetic oligonucleotide
auacaaggucucagucugg

SEQ ID NO: 1609433 - RNA, 19 nt, Artificial Sequence
  Description of Artificial Sequence: Synthetic oligonucleotide
uuugcggcugaaggaauuu

SEQ ID NO: 1609434 - RNA, 19 nt, Artificial Sequence
  Description of Artificial Sequence: Synthetic oligonucleotide
auuugggaagcagcacugu

SEQ ID NO: 1609435 - RNA, 19 nt, Artificial Sequence
  Description of Artificial Sequence: Synthetic oligonucleotide
gaagaaauaugagcccagu

SEQ ID NO: 1609436 - RNA, 19 nt, Artificial Sequence
  Description of Artificial Sequence: Synthetic oligonucleotide
aaggcucugauuggcucau

SEQ ID NO: 1609437 - RNA, 19 nt, Artificial Sequence
  Description of Artificial Sequence: Synthetic oligonucleotide
cuaaguagguuuccauugu

SEQ ID NO: 1609438 - RNA, 19 nt, Artificial Sequence
  Description of Artificial Sequence: Synthetic oligonucleotide
gugagcugauucucaccug

SEQ ID NO: 1609439 - RNA, 19 nt, Artificial Sequence
  Description of Artificial Sequence: Synthetic oligonucleotide
aggacccuaucaaaagaga

SEQ ID NO: 1609440 - RNA, 19 nt, Artificial Sequence
  Description of Artificial Sequence: Synthetic oligonucleotide
ccuuggugcaaucucagga

SEQ ID NO: 1609441 - RNA, 19 nt, Artificial Sequence
  Description of Artificial Sequence: Synthetic oligonucleotide
caagucuguccccaacgca

SEQ ID NO: 1609442 - RNA, 19 nt, Artificial Sequence
  Description of Artificial Sequence: Synthetic oligonucleotide
caugcacaagucugcuuca

SEQ ID NO: 1609443 - RNA, 19 nt, Artificial Sequence
  Description of Artificial Sequence: Synthetic oligonucleotide
ccuaugaaauugucuacca

SEQ ID NO: 1609444 - RNA, 19 nt, Artificial Sequence
  Description of Artificial Sequence: Synthetic oligonucleotide
caugccgcuauuguccuga

SEQ ID NO: 1609445 - RNA, 19 nt, Artificial Sequence
  Description of Artificial Sequence: Synthetic oligonucleotide
ccaaacgccuugauucagc

SEQ ID NO: 1609446 - RNA, 19 nt, Artificial Sequence
  Description of Artificial Sequence: Synthetic oligonucleotide
gauucagcugucccuuggu

SEQ ID NO: 1609447 - RNA, 19 nt, Artificial Sequence
  Description of Artificial Sequence: Synthetic oligonucleotide
gaacucccuuugcuacuug

SEQ ID NO: 1609448 - RNA, 19 nt, Artificial Sequence
  Description of Artificial Sequence: Synthetic oligonucleotide
gugcaucuaaguagguuuc

SEQ ID NO: 1609449 - RNA, 19 nt, Artificial Sequence
  Description of Artificial Sequence: Synthetic oligonucleotide
ugggcuacuuuagcuguuc

SEQ ID NO: 1609450 - RNA, 19 nt, Artificial Sequence
  Description of Artificial Sequence: Synthetic oligonucleotide
cccacgauacuacacauaa

SEQ ID NO: 1609451 - RNA, 19 nt, Artificial Sequence
  Description of Artificial Sequence: Synthetic oligonucleotide
aacuaagcccaugccgcua

SEQ ID NO: 1609452 - RNA, 19 nt, Artificial Sequence
  Description of Artificial Sequence: Synthetic oligonucleotide
gcauuacccacugaagaca

SEQ ID NO: 1609453 - RNA, 19 nt, Artificial Sequence
  Description of Artificial Sequence: Synthetic oligonucleotide
gucuuaaaggguguucacu

SEQ ID NO: 1609454 - RNA, 19 nt, Artificial Sequence
  Description of Artificial Sequence: Synthetic oligonucleotide
cuucccuggaacuuccuau

SEQ ID NO: 1609455 - RNA, 19 nt, Artificial Sequence
  Description of Artificial Sequence: Synthetic oligonucleotide
ggcuacuuuagcuguucuc

SEQ ID NO: 1609456 - RNA, 19 nt, Artificial Sequence
  Description of Artificial Sequence: Synthetic oligonucleotide
caaaaggauuugcuaucaa

SEQ ID NO: 1609457 - RNA, 19 nt, Artificial Sequence
  Description of Artificial Sequence: Synthetic oligonucleotide
cuggaaggggcaagcauua

SEQ ID NO: 1609458 - RNA, 19 nt, Artificial Sequence
  Description of Artificial Sequence: Synthetic oligonucleotide
ggacccuaucaaaagagaa

SEQ ID NO: 1609459 - RNA, 19 nt, Artificial Sequence
  Description of Artificial Sequence: Synthetic oligonucleotide
agcccaguguugccaagaa

SEQ ID NO: 1609460 - RNA, 19 nt, Artificial Sequence
  Description of Artificial Sequence: Synthetic oligonucleotide
gcacacauaaguggagcug

SEQ ID NO: 1609461 - RNA, 19 nt, Artificial Sequence
  Description of Artificial Sequence: Synthetic oligonucleotide
guguugcugggcuacuuua

SEQ ID NO: 1609462 - RNA, 19 nt, Artificial Sequence
  Description of Artificial Sequence: Synthetic oligonucleotide
acgcaccggcucuuuagga

SEQ ID NO: 1609463 - RNA, 19 nt, Artificial Sequence
  Description of Artificial Sequence: Synthetic oligonucleotide
uaaggacgccaaacgccuu

SEQ ID NO: 1609464 - RNA, 19 nt, Artificial Sequence
  Description of Artificial Sequence: Synthetic oligonucleotide
ucuagacgucuuagcuaua

SEQ ID NO: 1609465 - RNA, 19 nt, Artificial Sequence
  Description of Artificial Sequence: Synthetic oligonucleotide
gaacaugcacaagucugcu

SEQ ID NO: 1609466 - RNA, 19 nt, Artificial Sequence
  Description of Artificial Sequence: Synthetic oligonucleotide
caucuaaguagguuuccau

SEQ ID NO: 1609467 - RNA, 19 nt, Artificial Sequence
  Description of Artificial Sequence: Synthetic oligonucleotide
uugcggcugaaggaauuuc

SEQ ID NO: 1609468 - RNA, 19 nt, Artificial Sequence
  Description of Artificial Sequence: Synthetic oligonucleotide
cacaaggguacucaaugau

SEQ ID NO: 1609469 - RNA, 19 nt, Artificial Sequence
  Description of Artificial Sequence: Synthetic oligonucleotide
uggagggguacuggaucca

SEQ ID NO: 1609470 - RNA, 19 nt, Artificial Sequence
  Description of Artificial Sequence: Synthetic oligonucleotide
gugauagaagggagcagaa

SEQ ID NO: 1609471 - RNA, 19 nt, Artificial Sequence
  Description of Artificial Sequence: Synthetic oligonucleotide
cccuaguucuuacucagca

SEQ ID NO: 1609472 - RNA, 19 nt, Artificial Sequence
  Description of Artificial Sequence: Synthetic oligonucleotide
cucucagccccacucccca

SEQ ID NO: 1609473 - RNA, 19 nt, Artificial Sequence
  Description of Artificial Sequence: Synthetic oligonucleotide
cagcacuccuuacuguuaa

SEQ ID NO: 1609474 - RNA, 19 nt, Artificial Sequence
  Description of Artificial Sequence: Synthetic oligonucleotide
guggucugugcaucuaagu

SEQ ID NO: 1609475 - RNA, 19 nt, Artificial Sequence
  Description of Artificial Sequence: Synthetic oligonucleotide
ccuggagggguacuggauc

SEQ ID NO: 1609476 - RNA, 19 nt, Artificial Sequence
  Description of Artificial Sequence: Synthetic oligonucleotide
acaaaauugcugagcccua

SEQ ID NO: 1609477 - RNA, 19 nt, Artificial Sequence
  Description of Artificial Sequence: Synthetic oligonucleotide
gacgccaaacgccuugauu

SEQ ID NO: 1609478 - RNA, 19 nt, Artificial Sequence
  Description of Artificial Sequence: Synthetic oligonucleotide
gagcccuaucagucauuca

SEQ ID NO: 1609479 - RNA, 19 nt, Artificial Sequence
  Description of Artificial Sequence: Synthetic oligonucleotide
cuugauucagcugucccuu

SEQ ID NO: 1609480 - RNA, 19 nt, Artificial Sequence
  Description of Artificial Sequence: Synthetic oligonucleotide
auacugccuugcucuuagu

SEQ ID NO: 1609481 - RNA, 19 nt, Artificial Sequence
  Description of Artificial Sequence: Synthetic oligonucleotide
aggacgccaaacgccuuga

SEQ ID NO: 1609482 - RNA, 19 nt, Artificial Sequence
  Description of Artificial Sequence: Synthetic oligonucleotide
cacuccccacgauacuaca

SEQ ID NO: 1609483 - RNA, 19 nt, Artificial Sequence
  Description of Artificial Sequence: Synthetic oligonucleotide
acgccuugauucagcuguc

SEQ ID NO: 1609484 - RNA, 19 nt, Artificial Sequence
  Description of Artificial Sequence: Synthetic oligonucleotide
augcccaauucaacaagua

SEQ ID NO: 1609485 - RNA, 19 nt, Artificial Sequence
  Description of Artificial Sequence: Synthetic oligonucleotide
acagcacuccuuacuguua

SEQ ID NO: 1609486 - RNA, 19 nt, Artificial Sequence
  Description of Artificial Sequence: Synthetic oligonucleotide
augcacaagucugcuucaa

SEQ ID NO: 1609487 - RNA, 19 nt, Artificial Sequence
  Description of Artificial Sequence: Synthetic oligonucleotide
gacccgaaccuggaggggu

SEQ ID NO: 1609488 - RNA, 19 nt, Artificial Sequence
  Description of Artificial Sequence: Synthetic oligonucleotide
ccacuccccacgauacuac

SEQ ID NO: 1609489 - RNA, 19 nt, Artificial Sequence
  Description of Artificial Sequence: Synthetic oligonucleotide
ugccgcuauuguccugauu

SEQ ID NO: 1609490 - RNA, 19 nt, Artificial Sequence
  Description of Artificial Sequence: Synthetic oligonucleotide
aaucuacgggugagcugau

SEQ ID NO: 1609491 - RNA, 19 nt, Artificial Sequence
  Description of Artificial Sequence: Synthetic oligonucleotide
ccuaguucuuacucagcaa

SEQ ID NO: 1609492 - RNA, 19 nt, Artificial Sequence
  Description of Artificial Sequence: Synthetic oligonucleotide
gucucagucugggucuaaa

SEQ ID NO: 1609493 - RNA, 19 nt, Artificial Sequence
  Description of Artificial Sequence: Synthetic oligonucleotide
cgcaccggcucuuuaggac

SEQ ID NO: 1609494 - RNA, 19 nt, Artificial Sequence
  Description of Artificial Sequence: Synthetic oligonucleotide
ggguguucacuucuucccu

SEQ ID NO: 1609495 - RNA, 19 nt, Artificial Sequence
  Description of Artificial Sequence: Synthetic oligonucleotide
ggacccgaaccuggagggg

SEQ ID NO: 1609496 - RNA, 19 nt, Artificial Sequence
  Description of Artificial Sequence: Synthetic oligonucleotide
gccccauauaaauacccau

SEQ ID NO: 1609497 - RNA, 19 nt, Artificial Sequence
  Description of Artificial Sequence: Synthetic oligonucleotide
cuauacugccuugcucuua

SEQ ID NO: 1609498 - RNA, 19 nt, Artificial Sequence
  Description of Artificial Sequence: Synthetic oligonucleotide
accggcucuuuaggaccuc

SEQ ID NO: 1609499 - RNA, 19 nt, Artificial Sequence
  Description of Artificial Sequence: Synthetic oligonucleotide
gggucuaaacacacaucaa

SEQ ID NO: 1609500 - RNA, 19 nt, Artificial Sequence
  Description of Artificial Sequence: Synthetic oligonucleotide
caaaauugcugagcccuau

SEQ ID NO: 1609501 - RNA, 19 nt, Artificial Sequence
  Description of Artificial Sequence: Synthetic oligonucleotide
ggaccucagcacacauaag

SEQ ID NO: 1609502 - RNA, 19 nt, Artificial Sequence
  Description of Artificial Sequence: Synthetic oligonucleotide
augccgcuauuguccugau

SEQ ID NO: 1609503 - RNA, 19 nt, Artificial Sequence
  Description of Artificial Sequence: Synthetic oligonucleotide
ggggcaagcauuacccacu

SEQ ID NO: 1609504 - RNA, 19 nt, Artificial Sequence
  Description of Artificial Sequence: Synthetic oligonucleotide
cgggugagcugauucucac

SEQ ID NO: 1609505 - RNA, 19 nt, Artificial Sequence
  Description of Artificial Sequence: Synthetic oligonucleotide
cgcuauuguccugauucug

SEQ ID NO: 1609506 - RNA, 19 nt, Artificial Sequence
  Description of Artificial Sequence: Synthetic oligonucleotide
guuugcggcugaaggaauu

SEQ ID NO: 1609507 - RNA, 19 nt, Artificial Sequence
  Description of Artificial Sequence: Synthetic oligonucleotide
aucuacgggugagcugauu

SEQ ID NO: 1609508 - RNA, 19 nt, Artificial Sequence
  Description of Artificial Sequence: Synthetic oligonucleotide
cugucccuuggugcaaucu

SEQ ID NO: 1609509 - RNA, 19 nt, Artificial Sequence
  Description of Artificial Sequence: Synthetic oligonucleotide
ccacgauacuacacauaaa

SEQ ID NO: 1609510 - RNA, 19 nt, Artificial Sequence
  Description of Artificial Sequence: Synthetic oligonucleotide
cuuguguugcugggcuacu

SEQ ID NO: 1609511 - RNA, 19 nt, Artificial Sequence
  Description of Artificial Sequence: Synthetic oligonucleotide
ccuaucagucauucaguuu

SEQ ID NO: 1609512 - RNA, 19 nt, Artificial Sequence
  Description of Artificial Sequence: Synthetic oligonucleotide
gggcuacuuuagcuguucu

SEQ ID NO: 1609513 - RNA, 19 nt, Artificial Sequence
  Description of Artificial Sequence: Synthetic oligonucleotide
ccccuuacucucagcccca

SEQ ID NO: 1609514 - RNA, 19 nt, Artificial Sequence
  Description of Artificial Sequence: Synthetic oligonucleotide
cccacuccccacgauacua

SEQ ID NO: 1609515 - RNA, 19 nt, Artificial Sequence
  Description of Artificial Sequence: Synthetic oligonucleotide
ccccacgauacuacacaua

SEQ ID NO: 1609516 - RNA, 19 nt, Artificial Sequence
  Description of Artificial Sequence: Synthetic oligonucleotide
aggcucugauuggcucauu

SEQ ID NO: 1609517 - RNA, 19 nt, Artificial Sequence
  Description of Artificial Sequence: Synthetic oligonucleotide
ccaacgcaccggcucuuua

SEQ ID NO: 1609518 - RNA, 19 nt, Artificial Sequence
  Description of Artificial Sequence: Synthetic oligonucleotide
ggacgccaaacgccuugau

SEQ ID NO: 1609519 - RNA, 19 nt, Artificial Sequence
  Description of Artificial Sequence: Synthetic oligonucleotide
ccaaguccccaugcuuucu

SEQ ID NO: 1609520 - RNA, 19 nt, Artificial Sequence
  Description of Artificial Sequence: Synthetic oligonucleotide
cccaacgcaccggcucuuu

SEQ ID NO: 1609521 - RNA, 19 nt, Artificial Sequence
  Description of Artificial Sequence: Synthetic oligonucleotide
ccccaacgcaccggcucuu

SEQ ID NO: 1609522 - RNA, 19 nt, Artificial Sequence
  Description of Artificial Sequence: Synthetic oligonucleotide
auuugcaugaagaaaaucc

SEQ ID NO: 1609523 - RNA, 19 nt, Artificial Sequence
  Description of Artificial Sequence: Synthetic oligonucleotide
aagagauaccucucgaggc

SEQ ID NO: 1609524 - RNA, 19 nt, Artificial Sequence
  Description of Artificial Sequence: Synthetic oligonucleotide
aaagauacagccaacgcuc

SEQ ID NO: 1609525 - RNA, 19 nt, Artificial Sequence
  Description of Artificial Sequence: Synthetic oligonucleotide
auuacuagucaccagaaug

SEQ ID NO: 1609526 - RNA, 19 nt, Artificial Sequence
  Description of Artificial Sequence: Synthetic oligonucleotide
ugaugucucgaucaguucg

SEQ ID NO: 1609527 - RNA, 19 nt, Artificial Sequence
  Description of Artificial Sequence: Synthetic oligonucleotide
uagagagagagagagaugg

SEQ ID NO: 1609528 - RNA, 19 nt, Artificial Sequence
  Description of Artificial Sequence: Synthetic oligonucleotide
uuaguguagagagagagag

SEQ ID NO: 1609529 - RNA, 19 nt, Artificial Sequence
  Description of Artificial Sequence: Synthetic oligonucleotide
agcacagacauccauuagc

SEQ ID NO: 1609530 - RNA, 19 nt, Artificial Sequence
  Description of Artificial Sequence: Synthetic oligonucleotide
ucuauaugcucaaacacga

SEQ ID NO: 1609531 - RNA, 19 nt, Artificial Sequence
  Description of Artificial Sequence: Synthetic oligonucleotide
cagaaauccgcuuaugugg

SEQ ID NO: 1609532 - RNA, 19 nt, Artificial Sequence
  Description of Artificial Sequence: Synthetic oligonucleotide
acgagagugaccuugaugu

SEQ ID NO: 1609533 - RNA, 19 nt, Artificial Sequence
  Description of Artificial Sequence: Synthetic oligonucleotide
aaugcaauuugcaugaaga

SEQ ID NO: 1609534 - RNA, 19 nt, Artificial Sequence
  Description of Artificial Sequence: Synthetic oligonucleotide
aaaagaucccaguauaaau

SEQ ID NO: 1609535 - RNA, 19 nt, Artificial Sequence
  Description of Artificial Sequence: Synthetic oligonucleotide
agaagagaggcuuucgacg

SEQ ID NO: 1609536 - RNA, 19 nt, Artificial Sequence
  Description of Artificial Sequence: Synthetic oligonucleotide
gaggacaagccucauaggg

SEQ ID NO: 1609537 - RNA, 19 nt, Artificial Sequence
  Description of Artificial Sequence: Synthetic oligonucleotide
uauaugcucaaacacgaga

SEQ ID NO: 1609538 - RNA, 19 nt, Artificial Sequence
  Description of Artificial Sequence: Synthetic oligonucleotide
ucaaacacgagagugaccu

SEQ ID NO: 1609539 - RNA, 19 nt, Artificial Sequence
  Description of Artificial Sequence: Synthetic oligonucleotide
aguguagagagagagagag

SEQ ID NO: 1609540 - RNA, 19 nt, Artificial Sequence
  Description of Artificial Sequence: Synthetic oligonucleotide
cagauccugaucuauaugc

SEQ ID NO: 1609541 - RNA, 19 nt, Artificial Sequence
  Description of Artificial Sequence: Synthetic oligonucleotide
uauaaaucagggagggaag

SEQ ID NO: 1609542 - RNA, 19 nt, Artificial Sequence
  Description of Artificial Sequence: Synthetic oligonucleotide
gaucuauaugcucaaacac

SEQ ID NO: 1609543 - RNA, 19 nt, Artificial Sequence
  Description of Artificial Sequence: Synthetic oligonucleotide
ucgcguacagugcugaugg

SEQ ID NO: 1609544 - RNA, 19 nt, Artificial Sequence
  Description of Artificial Sequence: Synthetic oligonucleotide
uuuaaggguuaaaauauuc

SEQ ID NO: 1609545 - RNA, 19 nt, Artificial Sequence
  Description of Artificial Sequence: Synthetic oligonucleotide
uggguuaaaagucagcauc

SEQ ID NO: 1609546 - RNA, 19 nt, Artificial Sequence
  Description of Artificial Sequence: Synthetic oligonucleotide
agagauaccucucgaggcc

SEQ ID NO: 1609547 - RNA, 19 nt, Artificial Sequence
  Description of Artificial Sequence: Synthetic oligonucleotide
uuagccguacaacauuggg

SEQ ID NO: 1609548 - RNA, 19 nt, Artificial Sequence
  Description of Artificial Sequence: Synthetic oligonucleotide
uguauaccgucccauaggc

SEQ ID NO: 1609549 - RNA, 19 nt, Artificial Sequence
  Description of Artificial Sequence: Synthetic oligonucleotide
uauaccgucccauaggcac

SEQ ID NO: 1609550 - RNA, 19 nt, Artificial Sequence
  Description of Artificial Sequence: Synthetic oligonucleotide
uuguauaccgucccauagg

SEQ ID NO: 1609551 - RNA, 19 nt, Artificial Sequence
  Description of Artificial Sequence: Synthetic oligonucleotide
uguagagagagagagagau

SEQ ID NO: 1609552 - RNA, 19 nt, Artificial Sequence
  Description of Artificial Sequence: Synthetic oligonucleotide
uagccguacaacauugggg

SEQ ID NO: 1609553 - RNA, 19 nt, Artificial Sequence
  Description of Artificial Sequence: Synthetic oligonucleotide
acagacauccauuagccgu

SEQ ID NO: 1609554 - RNA, 19 nt, Artificial Sequence
  Description of Artificial Sequence: Synthetic oligonucleotide
cuaaucuucucacucuggg

SEQ ID NO: 1609555 - RNA, 19 nt, Artificial Sequence
  Description of Artificial Sequence: Synthetic oligonucleotide
aucuauaugcucaaacacg

SEQ ID NO: 1609556 - RNA, 19 nt, Artificial Sequence
  Description of Artificial Sequence: Synthetic oligonucleotide
uguggguuaaaagucagca

SEQ ID NO: 1609557 - RNA, 19 nt, Artificial Sequence
  Description of Artificial Sequence: Synthetic oligonucleotide
gagagagagagaugggagg

SEQ ID NO: 1609558 - RNA, 19 nt, Artificial Sequence
  Description of Artificial Sequence: Synthetic oligonucleotide
uccaucuccgguaccaccg

SEQ ID NO: 1609559 - RNA, 19 nt, Artificial Sequence
  Description of Artificial Sequence: Synthetic oligonucleotide
ugcaaagauacagccaacg

SEQ ID NO: 1609560 - RNA, 19 nt, Artificial Sequence
  Description of Artificial Sequence: Synthetic oligonucleotide
gacgcuacgggccagacca

SEQ ID NO: 1609561 - RNA, 19 nt, Artificial Sequence
  Description of Artificial Sequence: Synthetic oligonucleotide
gauggucucaacuggcaag

SEQ ID NO: 1609562 - RNA, 19 nt, Artificial Sequence
  Description of Artificial Sequence: Synthetic oligonucleotide
gauuuugcccaacugguca

SEQ ID NO: 1609563 - RNA, 19 nt, Artificial Sequence
  Description of Artificial Sequence: Synthetic oligonucleotide
uuuaguguagagagagaga

SEQ ID NO: 1609564 - RNA, 19 nt, Artificial Sequence
  Description of Artificial Sequence: Synthetic oligonucleotide
auaugcucaaacacgagag

SEQ ID NO: 1609565 - RNA, 19 nt, Artificial Sequence
  Description of Artificial Sequence: Synthetic oligonucleotide
gaaacugucgcaucagguc

SEQ ID NO: 1609566 - RNA, 19 nt, Artificial Sequence
  Description of Artificial Sequence: Synthetic oligonucleotide
aagauuuugcccaacuggu

SEQ ID NO: 1609567 - RNA, 19 nt, Artificial Sequence
  Description of Artificial Sequence: Synthetic oligonucleotide
caggccgcgagcuagagag

SEQ ID NO: 1609568 - RNA, 19 nt, Artificial Sequence
  Description of Artificial Sequence: Synthetic oligonucleotide
agccguacaacauuggggu

SEQ ID NO: 1609569 - RNA, 19 nt, Artificial Sequence
  Description of Artificial Sequence: Synthetic oligonucleotide
aaacacgagagugaccuug

SEQ ID NO: 1609570 - RNA, 19 nt, Artificial Sequence
  Description of Artificial Sequence: Synthetic oligonucleotide
accgauuucagccaccggu

SEQ ID NO: 1609571 - RNA, 19 nt, Artificial Sequence
  Description of Artificial Sequence: Synthetic oligonucleotide
cacaaguugagguucucgc

SEQ ID NO: 1609572 - RNA, 19 nt, Artificial Sequence
  Description of Artificial Sequence: Synthetic oligonucleotide
cuuguauaccgucccauag

SEQ ID NO: 1609573 - RNA, 19 nt, Artificial Sequence
  Description of Artificial Sequence: Synthetic oligonucleotide
gagguggcccuuuaucugg

SEQ ID NO: 1609574 - RNA, 19 nt, Artificial Sequence
  Description of Artificial Sequence: Synthetic oligonucleotide
uucgacgaaacaucucugc

SEQ ID NO: 1609575 - RNA, 19 nt, Artificial Sequence
  Description of Artificial Sequence: Synthetic oligonucleotide
cugaucuauaugcucaaac

SEQ ID NO: 1609576 - RNA, 19 nt, Artificial Sequence
  Description of Artificial Sequence: Synthetic oligonucleotide
ugcucaaacacgagaguga

SEQ ID NO: 1609577 - RNA, 19 nt, Artificial Sequence
  Description of Artificial Sequence: Synthetic oligonucleotide
agcuucagaguuuccacag

SEQ ID NO: 1609578 - RNA, 19 nt, Artificial Sequence
  Description of Artificial Sequence: Synthetic oligonucleotide
auccauuagccguacaaca

SEQ ID NO: 1609579 - RNA, 19 nt, Artificial Sequence
  Description of Artificial Sequence: Synthetic oligonucleotide
auggucucaacuggcaagc

SEQ ID NO: 1609580 - RNA, 19 nt, Artificial Sequence
  Description of Artificial Sequence: Synthetic oligonucleotide
ugcguauguagacugcaga

SEQ ID NO: 1609581 - RNA, 19 nt, Artificial Sequence
  Description of Artificial Sequence: Synthetic oligonucleotide
cauuagccguacaacauug

SEQ ID NO: 1609582 - RNA, 19 nt, Artificial Sequence
  Description of Artificial Sequence: Synthetic oligonucleotide
ugcggcgccauacaccggg

SEQ ID NO: 1609583 - RNA, 19 nt, Artificial Sequence
  Description of Artificial Sequence: Synthetic oligonucleotide
cccauaggcaccaacaccg

SEQ ID NO: 1609584 - RNA, 19 nt, Artificial Sequence
  Description of Artificial Sequence: Synthetic oligonucleotide
gaugucucgaucaguucgg

SEQ ID NO: 1609585 - RNA, 19 nt, Artificial Sequence
  Description of Artificial Sequence: Synthetic oligonucleotide
ucgacgaaacaucucugca

SEQ ID NO: 1609586 - RNA, 19 nt, Artificial Sequence
  Description of Artificial Sequence: Synthetic oligonucleotide
cucaguaaggccaccucgc

SEQ ID NO: 1609587 - RNA, 19 nt, Artificial Sequence
  Description of Artificial Sequence: Synthetic oligonucleotide
agagcugcggagguggccc

SEQ ID NO: 1609588 - RNA, 19 nt, Artificial Sequence
  Description of Artificial Sequence: Synthetic oligonucleotide
auuuugcccaacuggucag

SEQ ID NO: 1609589 - RNA, 19 nt, Artificial Sequence
  Description of Artificial Sequence: Synthetic oligonucleotide
uuucgacgaaacaucucug

SEQ ID NO: 1609590 - RNA, 19 nt, Artificial Sequence
  Description of Artificial Sequence: Synthetic oligonucleotide
uaugcucaaacacgagagu

SEQ ID NO: 1609591 - RNA, 19 nt, Artificial Sequence
  Description of Artificial Sequence: Synthetic oligonucleotide
aucccaguauaaaucaggg

SEQ ID NO: 1609592 - RNA, 19 nt, Artificial Sequence
  Description of Artificial Sequence: Synthetic oligonucleotide
uccgguaccaccgacugca

SEQ ID NO: 1609593 - RNA, 19 nt, Artificial Sequence
  Description of Artificial Sequence: Synthetic oligonucleotide
uccauuagccguacaacau

SEQ ID NO: 1609594 - RNA, 19 nt, Artificial Sequence
  Description of Artificial Sequence: Synthetic oligonucleotide
auacaccggggaucggucc

SEQ ID NO: 1609595 - RNA, 19 nt, Artificial Sequence
  Description of Artificial Sequence: Synthetic oligonucleotide
aggcagcuaaucuucucac

SEQ ID NO: 1609596 - RNA, 19 nt, Artificial Sequence
  Description of Artificial Sequence: Synthetic oligonucleotide
agcuaaucuucucacucug

SEQ ID NO: 1609597 - RNA, 19 nt, Artificial Sequence
  Description of Artificial Sequence: Synthetic oligonucleotide
ucuccgguaccaccgacug

SEQ ID NO: 1609598 - RNA, 19 nt, Artificial Sequence
  Description of Artificial Sequence: Synthetic oligonucleotide
ucagccaccgguucauagc

SEQ ID NO: 1609599 - RNA, 19 nt, Artificial Sequence
  Description of Artificial Sequence: Synthetic oligonucleotide
cuuuaucugggcccgggag

SEQ ID NO: 1609600 - RNA, 19 nt, Artificial Sequence
  Description of Artificial Sequence: Synthetic oligonucleotide
agagagagagagaugggag

SEQ ID NO: 1609601 - RNA, 19 nt, Artificial Sequence
  Description of Artificial Sequence: Synthetic oligonucleotide
agagacacccacccuuuag

SEQ ID NO: 1609602 - RNA, 19 nt, Artificial Sequence
  Description of Artificial Sequence: Synthetic oligonucleotide
agcuugacugucccauuac

SEQ ID NO: 1609603 - RNA, 19 nt, Artificial Sequence
  Description of Artificial Sequence: Synthetic oligonucleotide
ugcccaacuggucagcuuc

SEQ ID NO: 1609604 - RNA, 19 nt, Artificial Sequence
  Description of Artificial Sequence: Synthetic oligonucleotide
cagaagagaggcuuucgac

SEQ ID NO: 1609605 - RNA, 19 nt, Artificial Sequence
  Description of Artificial Sequence: Synthetic oligonucleotide
uucgggagguagcacagac

SEQ ID NO: 1609606 - RNA, 19 nt, Artificial Sequence
  Description of Artificial Sequence: Synthetic oligonucleotide
aguaaggccaccucgcgua

SEQ ID NO: 1609607 - RNA, 19 nt, Artificial Sequence
  Description of Artificial Sequence: Synthetic oligonucleotide
uccguugggaacucgcaca

SEQ ID NO: 1609608 - RNA, 19 nt, Artificial Sequence
  Description of Artificial Sequence: Synthetic oligonucleotide
caaugcaauuugcaugaag

SEQ ID NO: 1609609 - RNA, 19 nt, Artificial Sequence
  Description of Artificial Sequence: Synthetic oligonucleotide
aaggcagaaauccgcuuau

SEQ ID NO: 1609610 - RNA, 19 nt, Artificial Sequence
  Description of Artificial Sequence: Synthetic oligonucleotide
uguugcguauguagacugc

SEQ ID NO: 1609611 - RNA, 19 nt, Artificial Sequence
  Description of Artificial Sequence: Synthetic oligonucleotide
uugcguauguagacugcag

SEQ ID NO: 1609612 - RNA, 19 nt, Artificial Sequence
  Description of Artificial Sequence: Synthetic oligonucleotide
uuauccagguauguccuca

SEQ ID NO: 1609613 - RNA, 19 nt, Artificial Sequence
  Description of Artificial Sequence: Synthetic oligonucleotide
guugggaacucgcacacuc

SEQ ID NO: 1609614 - RNA, 19 nt, Artificial Sequence
  Description of Artificial Sequence: Synthetic oligonucleotide
agaggacaagccucauagg

SEQ ID NO: 1609615 - RNA, 19 nt, Artificial Sequence
  Description of Artificial Sequence: Synthetic oligonucleotide
agggcaagaggacaagccu

SEQ ID NO: 1609616 - RNA, 19 nt, Artificial Sequence
  Description of Artificial Sequence: Synthetic oligonucleotide
cuauaugcucaaacacgag

SEQ ID NO: 1609617 - RNA, 19 nt, Artificial Sequence
  Description of Artificial Sequence: Synthetic oligonucleotide
guguugcguauguagacug

SEQ ID NO: 1609618 - RNA, 19 nt, Artificial Sequence
  Description of Artificial Sequence: Synthetic oligonucleotide
gggaaugucauuuaagggu

SEQ ID NO: 1609619 - RNA, 19 nt, Artificial Sequence
  Description of Artificial Sequence: Synthetic oligonucleotide
uggcccuuuaucugggccc

SEQ ID NO: 1609620 - RNA, 19 nt, Artificial Sequence
  Description of Artificial Sequence: Synthetic oligonucleotide
uacgggccagaccauagac

SEQ ID NO: 1609621 - RNA, 19 nt, Artificial Sequence
  Description of Artificial Sequence: Synthetic oligonucleotide
gcaauuugcaugaagaaaa

SEQ ID NO: 1609622 - RNA, 19 nt, Artificial Sequence
  Description of Artificial Sequence: Synthetic oligonucleotide
aacaccgauuucagccacc

SEQ ID NO: 1609623 - RNA, 19 nt, Artificial Sequence
  Description of Artificial Sequence: Synthetic oligonucleotide
cagccaccgguucauagcg

SEQ ID NO: 1609624 - RNA, 19 nt, Artificial Sequence
  Description of Artificial Sequence: Synthetic oligonucleotide
cuuucgacgaaacaucucu

SEQ ID NO: 1609625 - RNA, 19 nt, Artificial Sequence
  Description of Artificial Sequence: Synthetic oligonucleotide
gcuuauguggguuaaaagu

SEQ ID NO: 1609626 - RNA, 19 nt, Artificial Sequence
  Description of Artificial Sequence: Synthetic oligonucleotide
cucgaggccagucaucuuc

SEQ ID NO: 1609627 - RNA, 19 nt, Artificial Sequence
  Description of Artificial Sequence: Synthetic oligonucleotide
agacacccacccuuuagug

SEQ ID NO: 1609628 - RNA, 19 nt, Artificial Sequence
  Description of Artificial Sequence: Synthetic oligonucleotide
gagagagagagagauggga

SEQ ID NO: 1609629 - RNA, 19 nt, Artificial Sequence
  Description of Artificial Sequence: Synthetic oligonucleotide
cacagacauccauuagccg

SEQ ID NO: 1609630 - RNA, 19 nt, Artificial Sequence
  Description of Artificial Sequence: Synthetic oligonucleotide
uagcacagacauccauuag

SEQ ID NO: 1609631 - RNA, 19 nt, Artificial Sequence
  Description of Artificial Sequence: Synthetic oligonucleotide
uaguguagagagagagaga

SEQ ID NO: 1609632 - RNA, 19 nt, Artificial Sequence
  Description of Artificial Sequence: Synthetic oligonucleotide
gauuccuccaucuccggua

SEQ ID NO: 1609633 - RNA, 19 nt, Artificial Sequence
  Description of Artificial Sequence: Synthetic oligonucleotide
ucccaguauaaaucaggga

SEQ ID NO: 1609634 - RNA, 19 nt, Artificial Sequence
  Description of Artificial Sequence: Synthetic oligonucleotide
aggcuuucgacgaaacauc

SEQ ID NO: 1609635 - RNA, 19 nt, Artificial Sequence
  Description of Artificial Sequence: Synthetic oligonucleotide
gccgcuuagaaacugucgc

SEQ ID NO: 1609636 - RNA, 19 nt, Artificial Sequence
  Description of Artificial Sequence: Synthetic oligonucleotide
cucaagugucccaaggaga

SEQ ID NO: 1609637 - RNA, 19 nt, Artificial Sequence
  Description of Artificial Sequence: Synthetic oligonucleotide
accauagacacaggccgcg

SEQ ID NO: 1609638 - RNA, 19 nt, Artificial Sequence
  Description of Artificial Sequence: Synthetic oligonucleotide
acaccgauuucagccaccg

SEQ ID NO: 1609639 - RNA, 19 nt, Artificial Sequence
  Description of Artificial Sequence: Synthetic oligonucleotide
ucaggagcacgguaccaga

SEQ ID NO: 1609640 - RNA, 19 nt, Artificial Sequence
  Description of Artificial Sequence: Synthetic oligonucleotide
uaagagugcugcagggcuc

SEQ ID NO: 1609641 - RNA, 19 nt, Artificial Sequence
  Description of Artificial Sequence: Synthetic oligonucleotide
aauccgcuuauguggguua

SEQ ID NO: 1609642 - RNA, 19 nt, Artificial Sequence
  Description of Artificial Sequence: Synthetic oligonucleotide
uccugcggcgccauacacc

SEQ ID NO: 1609643 - RNA, 19 nt, Artificial Sequence
  Description of Artificial Sequence: Synthetic oligonucleotide
auaccgucccauaggcacc

SEQ ID NO: 1609644 - RNA, 19 nt, Artificial Sequence
  Description of Artificial Sequence: Synthetic oligonucleotide
uucucgcugucgcucaagu

SEQ ID NO: 1609645 - RNA, 19 nt, Artificial Sequence
  Description of Artificial Sequence: Synthetic oligonucleotide
auuagccguacaacauugg

SEQ ID NO: 1609646 - RNA, 19 nt, Artificial Sequence
  Description of Artificial Sequence: Synthetic oligonucleotide
cacgagagugaccuugaug

SEQ ID NO: 1609647 - RNA, 19 nt, Artificial Sequence
  Description of Artificial Sequence: Synthetic oligonucleotide
guagcacagacauccauua

SEQ ID NO: 1609648 - RNA, 19 nt, Artificial Sequence
  Description of Artificial Sequence: Synthetic oligonucleotide
aaauccgcuuauguggguu

SEQ ID NO: 1609649 - RNA, 19 nt, Artificial Sequence
  Description of Artificial Sequence: Synthetic oligonucleotide
gaucaguucgggagguagc

SEQ ID NO: 1609650 - RNA, 19 nt, Artificial Sequence
  Description of Artificial Sequence: Synthetic oligonucleotide
accgguucauagcgggagg

SEQ ID NO: 1609651 - RNA, 19 nt, Artificial Sequence
  Description of Artificial Sequence: Synthetic oligonucleotide
cucgaaggccuccaaccgc

SEQ ID NO: 1609652 - RNA, 19 nt, Artificial Sequence
  Description of Artificial Sequence: Synthetic oligonucleotide
ucccauuacuagucaccag

SEQ ID NO: 1609653 - RNA, 19 nt, Artificial Sequence
  Description of Artificial Sequence: Synthetic oligonucleotide
guacagugcugaugggaag

SEQ ID NO: 1609654 - RNA, 19 nt, Artificial Sequence
  Description of Artificial Sequence: Synthetic oligonucleotide
uaccucucgaggccaguca

SEQ ID NO: 1609655 - RNA, 19 nt, Artificial Sequence
  Description of Artificial Sequence: Synthetic oligonucleotide
ugcuuuauccagguauguc

SEQ ID NO: 1609656 - RNA, 19 nt, Artificial Sequence
  Description of Artificial Sequence: Synthetic oligonucleotide
ccugcggcgccauacaccg

SEQ ID NO: 1609657 - RNA, 19 nt, Artificial Sequence
  Description of Artificial Sequence: Synthetic oligonucleotide
uuuauccagguauguccuc

SEQ ID NO: 1609658 - RNA, 19 nt, Artificial Sequence
  Description of Artificial Sequence: Synthetic oligonucleotide
ucgaggccagucaucuucu

SEQ ID NO: 1609659 - RNA, 19 nt, Artificial Sequence
  Description of Artificial Sequence: Synthetic oligonucleotide
gguucauagcgggagguag

SEQ ID NO: 1609660 - RNA, 19 nt, Artificial Sequence
  Description of Artificial Sequence: Synthetic oligonucleotide
aacacgagagugaccuuga

SEQ ID NO: 1609661 - RNA, 19 nt, Artificial Sequence
  Description of Artificial Sequence: Synthetic oligonucleotide
ucgggagguagcacagaca

SEQ ID NO: 1609662 - RNA, 19 nt, Artificial Sequence
  Description of Artificial Sequence: Synthetic oligonucleotide
agauuccuccaucuccggu

SEQ ID NO: 1609663 - RNA, 19 nt, Artificial Sequence
  Description of Artificial Sequence: Synthetic oligonucleotide
aucaguucgggagguagca

SEQ ID NO: 1609664 - RNA, 19 nt, Artificial Sequence
  Description of Artificial Sequence: Synthetic oligonucleotide
ugucucgaucaguucggga

SEQ ID NO: 1609665 - RNA, 19 nt, Artificial Sequence
  Description of Artificial Sequence: Synthetic oligonucleotide
agagagagagagagauggg

SEQ ID NO: 1609666 - RNA, 19 nt, Artificial Sequence
  Description of Artificial Sequence: Synthetic oligonucleotide
cagcuggacgcuacgggcc

SEQ ID NO: 1609667 - RNA, 19 nt, Artificial Sequence
  Description of Artificial Sequence: Synthetic oligonucleotide
cuugacugucccauuacua

SEQ ID NO: 1609668 - RNA, 19 nt, Artificial Sequence
  Description of Artificial Sequence: Synthetic oligonucleotide
cuccaaccgccucaguaag

SEQ ID NO: 1609669 - RNA, 19 nt, Artificial Sequence
  Description of Artificial Sequence: Synthetic oligonucleotide
aggagcacgguaccagagu

SEQ ID NO: 1609670 - RNA, 19 nt, Artificial Sequence
  Description of Artificial Sequence: Synthetic oligonucleotide
ccucaguaaggccaccucg

SEQ ID NO: 1609671 - RNA, 19 nt, Artificial Sequence
  Description of Artificial Sequence: Synthetic oligonucleotide
aggacaagccucauaggga

SEQ ID NO: 1609672 - RNA, 19 nt, Artificial Sequence
  Description of Artificial Sequence: Synthetic oligonucleotide
ugcagguaagagugcugca

SEQ ID NO: 1609673 - RNA, 19 nt, Artificial Sequence
  Description of Artificial Sequence: Synthetic oligonucleotide
ccagaccauagacacaggc

SEQ ID NO: 1609674 - RNA, 19 nt, Artificial Sequence
  Description of Artificial Sequence: Synthetic oligonucleotide
aagagaggcuuucgacgaa

SEQ ID NO: 1609675 - RNA, 19 nt, Artificial Sequence
  Description of Artificial Sequence: Synthetic oligonucleotide
caacgcuccacauguccac

SEQ ID NO: 1609676 - RNA, 19 nt, Artificial Sequence
  Description of Artificial Sequence: Synthetic oligonucleotide
gaccauagacacaggccgc

SEQ ID NO: 1609677 - RNA, 19 nt, Artificial Sequence
  Description of Artificial Sequence: Synthetic oligonucleotide
caggagcacgguaccagag

SEQ ID NO: 1609678 - RNA, 19 nt, Artificial Sequence
  Description of Artificial Sequence: Synthetic oligonucleotide
gcucgaaggccuccaaccg

SEQ ID NO: 1609679 - RNA, 19 nt, Artificial Sequence
  Description of Artificial Sequence: Synthetic oligonucleotide
acuggcaagccuggugggg

SEQ ID NO: 1609680 - RNA, 19 nt, Artificial Sequence
  Description of Artificial Sequence: Synthetic oligonucleotide
uuuugcccaacuggucagc

SEQ ID NO: 1609681 - RNA, 19 nt, Artificial Sequence
  Description of Artificial Sequence: Synthetic oligonucleotide
aacugucgcaucagguccu

SEQ ID NO: 1609682 - RNA, 19 nt, Artificial Sequence
  Description of Artificial Sequence: Synthetic oligonucleotide
guugcguauguagacugca

SEQ ID NO: 1609683 - RNA, 19 nt, Artificial Sequence
  Description of Artificial Sequence: Synthetic oligonucleotide
ugucgcucaagugucccaa

SEQ ID NO: 1609684 - RNA, 19 nt, Artificial Sequence
  Description of Artificial Sequence: Synthetic oligonucleotide
ccauucucggagcagggag

SEQ ID NO: 1609685 - RNA, 19 nt, Artificial Sequence
  Description of Artificial Sequence: Synthetic oligonucleotide
gccaccgguucauagcggg

SEQ ID NO: 1609686 - RNA, 19 nt, Artificial Sequence
  Description of Artificial Sequence: Synthetic oligonucleotide
guagagagagagagagaug

SEQ ID NO: 1609687 - RNA, 19 nt, Artificial Sequence
  Description of Artificial Sequence: Synthetic oligonucleotide
cuccguugggaacucgcac

SEQ ID NO: 1609688 - RNA, 19 nt, Artificial Sequence
  Description of Artificial Sequence: Synthetic oligonucleotide
ucuccucucgcccggccaa

SEQ ID NO: 1609689 - RNA, 19 nt, Artificial Sequence
  Description of Artificial Sequence: Synthetic oligonucleotide
cauguccacggguguugcg

SEQ ID NO: 1609690 - RNA, 19 nt, Artificial Sequence
  Description of Artificial Sequence: Synthetic oligonucleotide
gcagcuggacgcuacgggc

SEQ ID NO: 1609691 - RNA, 19 nt, Artificial Sequence
  Description of Artificial Sequence: Synthetic oligonucleotide
cucucgcccggccaagagc

SEQ ID NO: 1609692 - RNA, 19 nt, Artificial Sequence
  Description of Artificial Sequence: Synthetic oligonucleotide
caccgguucauagcgggag

SEQ ID NO: 1609693 - RNA, 19 nt, Artificial Sequence
  Description of Artificial Sequence: Synthetic oligonucleotide
gggagaucuccucucgccc

SEQ ID NO: 1609694 - RNA, 19 nt, Artificial Sequence
  Description of Artificial Sequence: Synthetic oligonucleotide
uuccugcggcgccauacac

SEQ ID NO: 1609695 - RNA, 19 nt, Artificial Sequence
  Description of Artificial Sequence: Synthetic oligonucleotide
guagccauucucggagcag

SEQ ID NO: 1609696 - RNA, 19 nt, Artificial Sequence
  Description of Artificial Sequence: Synthetic oligonucleotide
gguaagagugcugcagggc

SEQ ID NO: 1609697 - RNA, 19 nt, Artificial Sequence
  Description of Artificial Sequence: Synthetic oligonucleotide
uccaggccgcuuagaaacu

SEQ ID NO: 1609698 - RNA, 19 nt, Artificial Sequence
  Description of Artificial Sequence: Synthetic oligonucleotide
gccaacgcuccacaugucc

SEQ ID NO: 1609699 - RNA, 19 nt, Artificial Sequence
  Description of Artificial Sequence: Synthetic oligonucleotide
augucucgaucaguucggg

SEQ ID NO: 1609700 - RNA, 19 nt, Artificial Sequence
  Description of Artificial Sequence: Synthetic oligonucleotide
gagauaccucucgaggcca

SEQ ID NO: 1609701 - RNA, 19 nt, Artificial Sequence
  Description of Artificial Sequence: Synthetic oligonucleotide
uacuagucaccagaauguu

SEQ ID NO: 1609702 - RNA, 19 nt, Artificial Sequence
  Description of Artificial Sequence: Synthetic oligonucleotide
ucggagcagggagaucucc

SEQ ID NO: 1609703 - RNA, 19 nt, Artificial Sequence
  Description of Artificial Sequence: Synthetic oligonucleotide
ggguguugcguauguagac

SEQ ID NO: 1609704 - RNA, 19 nt, Artificial Sequence
  Description of Artificial Sequence: Synthetic oligonucleotide
guaccaccgacugcacagg

SEQ ID NO: 1609705 - RNA, 19 nt, Artificial Sequence
  Description of Artificial Sequence: Synthetic oligonucleotide
accucucgaggccagucau

SEQ ID NO: 1609706 - RNA, 19 nt, Artificial Sequence
  Description of Artificial Sequence: Synthetic oligonucleotide
accgacugcacaggccgcg

SEQ ID NO: 1609707 - RNA, 19 nt, Artificial Sequence
  Description of Artificial Sequence: Synthetic oligonucleotide
gacacccacccuuuagugu

SEQ ID NO: 1609708 - RNA, 19 nt, Artificial Sequence
  Description of Artificial Sequence: Synthetic oligonucleotide
cucgcguacagugcugaug

SEQ ID NO: 1609709 - RNA, 19 nt, Artificial Sequence
  Description of Artificial Sequence: Synthetic oligonucleotide
caaccgccucaguaaggcc

SEQ ID NO: 1609710 - RNA, 19 nt, Artificial Sequence
  Description of Artificial Sequence: Synthetic oligonucleotide
gcacaaguugagguucucg

SEQ ID NO: 1609711 - RNA, 19 nt, Artificial Sequence
  Description of Artificial Sequence: Synthetic oligonucleotide
gaucuccucucgcccggcc

SEQ ID NO: 1609712 - RNA, 19 nt, Artificial Sequence
  Description of Artificial Sequence: Synthetic oligonucleotide
ccguacaacauuggggugc

SEQ ID NO: 1609713 - RNA, 19 nt, Artificial Sequence
  Description of Artificial Sequence: Synthetic oligonucleotide
ggccaccucgcguacagug

SEQ ID NO: 1609714 - RNA, 19 nt, Artificial Sequence
  Description of Artificial Sequence: Synthetic oligonucleotide
aggccgcuuagaaacuguc

SEQ ID NO: 1609715 - RNA, 19 nt, Artificial Sequence
  Description of Artificial Sequence: Synthetic oligonucleotide
uccacggguguugcguaug

SEQ ID NO: 1609716 - RNA, 19 nt, Artificial Sequence
  Description of Artificial Sequence: Synthetic oligonucleotide
uaccgucccauaggcacca

SEQ ID NO: 1609717 - RNA, 19 nt, Artificial Sequence
  Description of Artificial Sequence: Synthetic oligonucleotide
ccaaccgccucaguaaggc

SEQ ID NO: 1609718 - RNA, 19 nt, Artificial Sequence
  Description of Artificial Sequence: Synthetic oligonucleotide
gcguauguagacugcagaa

SEQ ID NO: 1609719 - RNA, 19 nt, Artificial Sequence
  Description of Artificial Sequence: Synthetic oligonucleotide
cauagcgggagguagccau

SEQ ID NO: 1609720 - RNA, 19 nt, Artificial Sequence
  Description of Artificial Sequence: Synthetic oligonucleotide
ucauagcgggagguagcca

SEQ ID NO: 1609721 - RNA, 19 nt, Artificial Sequence
  Description of Artificial Sequence: Synthetic oligonucleotide
agccauucucggagcaggg

SEQ ID NO: 1609722 - RNA, 19 nt, Artificial Sequence
  Description of Artificial Sequence: Synthetic oligonucleotide
gcuuagaaacugucgcauc

SEQ ID NO: 1609723 - RNA, 19 nt, Artificial Sequence
  Description of Artificial Sequence: Synthetic oligonucleotide
uggucucaacuggcaagcc

SEQ ID NO: 1609724 - RNA, 19 nt, Artificial Sequence
  Description of Artificial Sequence: Synthetic oligonucleotide
ggccgcuuagaaacugucg

SEQ ID NO: 1609725 - RNA, 19 nt, Artificial Sequence
  Description of Artificial Sequence: Synthetic oligonucleotide
gggccuuguauaccguccc

SEQ ID NO: 1609726 - RNA, 19 nt, Artificial Sequence
  Description of Artificial Sequence: Synthetic oligonucleotide
augucauuuaaggguuaaa

SEQ ID NO: 1609727 - RNA, 19 nt, Artificial Sequence
  Description of Artificial Sequence: Synthetic oligonucleotide
gugcucgaaggccuccaac

SEQ ID NO: 1609728 - RNA, 19 nt, Artificial Sequence
  Description of Artificial Sequence: Synthetic oligonucleotide
ucgcccggccaagagcugc

SEQ ID NO: 1609729 - RNA, 19 nt, Artificial Sequence
  Description of Artificial Sequence: Synthetic oligonucleotide
agauaccucucgaggccag

SEQ ID NO: 1609730 - RNA, 19 nt, Artificial Sequence
  Description of Artificial Sequence: Synthetic oligonucleotide
cacccacccuuuaguguag

SEQ ID NO: 1609731 - RNA, 19 nt, Artificial Sequence
  Description of Artificial Sequence: Synthetic oligonucleotide
guuccugcggcgccauaca

SEQ ID NO: 1609732 - RNA, 19 nt, Artificial Sequence
  Description of Artificial Sequence: Synthetic oligonucleotide
caucuccgguaccaccgac

SEQ ID NO: 1609733 - RNA, 19 nt, Artificial Sequence
  Description of Artificial Sequence: Synthetic oligonucleotide
caccgauuucagccaccgg

SEQ ID NO: 1609734 - RNA, 19 nt, Artificial Sequence
  Description of Artificial Sequence: Synthetic oligonucleotide
ggcccuuuaucugggcccg

SEQ ID NO: 1609735 - RNA, 19 nt, Artificial Sequence
  Description of Artificial Sequence: Synthetic oligonucleotide
acaccggggaucggucccg

SEQ ID NO: 1609736 - RNA, 19 nt, Artificial Sequence
  Description of Artificial Sequence: Synthetic oligonucleotide
aucuccgguaccaccgacu

SEQ ID NO: 1609737 - RNA, 19 nt, Artificial Sequence
  Description of Artificial Sequence: Synthetic oligonucleotide
ugcggagguggcccuuuau

SEQ ID NO: 1609738 - RNA, 19 nt, Artificial Sequence
  Description of Artificial Sequence: Synthetic oligonucleotide
acaggccgcgagcuagaga

SEQ ID NO: 1609739 - RNA, 19 nt, Artificial Sequence
  Description of Artificial Sequence: Synthetic oligonucleotide
guggguuaaaagucagcau

SEQ ID NO: 1609740 - RNA, 19 nt, Artificial Sequence
  Description of Artificial Sequence: Synthetic oligonucleotide
gaaugucauuuaaggguua

SEQ ID NO: 1609741 - RNA, 19 nt, Artificial Sequence
  Description of Artificial Sequence: Synthetic oligonucleotide
agcgggagguagccauucu

SEQ ID NO: 1609742 - RNA, 19 nt, Artificial Sequence
  Description of Artificial Sequence: Synthetic oligonucleotide
ggaaugucauuuaaggguu

SEQ ID NO: 1609743 - RNA, 19 nt, Artificial Sequence
  Description of Artificial Sequence: Synthetic oligonucleotide
ggaucucgggccuuguaua

SEQ ID NO: 1609744 - RNA, 19 nt, Artificial Sequence
  Description of Artificial Sequence: Synthetic oligonucleotide
uagcgggagguagccauuc

SEQ ID NO: 1609745 - RNA, 19 nt, Artificial Sequence
  Description of Artificial Sequence: Synthetic oligonucleotide
gguuccugcggcgccauac

SEQ ID NO: 1609746 - RNA, 19 nt, Artificial Sequence
  Description of Artificial Sequence: Synthetic oligonucleotide
cuccgguaccaccgacugc

SEQ ID NO: 1609747 - RNA, 19 nt, Artificial Sequence
  Description of Artificial Sequence: Synthetic oligonucleotide
ccggccaagagcugcggag

SEQ ID NO: 1609748 - RNA, 19 nt, Artificial Sequence
  Description of Artificial Sequence: Synthetic oligonucleotide
accucgcguacagugcuga

SEQ ID NO: 1609749 - RNA, 19 nt, Artificial Sequence
  Description of Artificial Sequence: Synthetic oligonucleotide
guauaccgucccauaggca

SEQ ID NO: 1609750 - RNA, 19 nt, Artificial Sequence
  Description of Artificial Sequence: Synthetic oligonucleotide
acacgagagugaccuugau

SEQ ID NO: 1609751 - RNA, 19 nt, Artificial Sequence
  Description of Artificial Sequence: Synthetic oligonucleotide
uugcccaacuggucagcuu

SEQ ID NO: 1609752 - RNA, 19 nt, Artificial Sequence
  Description of Artificial Sequence: Synthetic oligonucleotide
guguagagagagagagaga

SEQ ID NO: 1609753 - RNA, 19 nt, Artificial Sequence
  Description of Artificial Sequence: Synthetic oligonucleotide
ggccgcgagcuagagaggc

SEQ ID NO: 1609754 - RNA, 19 nt, Artificial Sequence
  Description of Artificial Sequence: Synthetic oligonucleotide
agccaccgguucauagcgg

SEQ ID NO: 1609755 - RNA, 19 nt, Artificial Sequence
  Description of Artificial Sequence: Synthetic oligonucleotide
cucggagcagggagaucuc

SEQ ID NO: 1609756 - RNA, 19 nt, Artificial Sequence
  Description of Artificial Sequence: Synthetic oligonucleotide
ccauuacuagucaccagaa

SEQ ID NO: 1609757 - RNA, 19 nt, Artificial Sequence
  Description of Artificial Sequence: Synthetic oligonucleotide
uccgcuuauguggguuaaa

SEQ ID NO: 1609758 - RNA, 19 nt, Artificial Sequence
  Description of Artificial Sequence: Synthetic oligonucleotide
gcggagguggcccuuuauc

SEQ ID NO: 1609759 - RNA, 19 nt, Artificial Sequence
  Description of Artificial Sequence: Synthetic oligonucleotide
gggaacucgcacacucuug

SEQ ID NO: 1609760 - RNA, 19 nt, Artificial Sequence
  Description of Artificial Sequence: Synthetic oligonucleotide
cagcuugacugucccauua

SEQ ID NO: 1609761 - RNA, 19 nt, Artificial Sequence
  Description of Artificial Sequence: Synthetic oligonucleotide
cccuccguugggaacucgc

SEQ ID NO: 1609762 - RNA, 19 nt, Artificial Sequence
  Description of Artificial Sequence: Synthetic oligonucleotide
cucucgaggccagucaucu

SEQ ID NO: 1609763 - RNA, 19 nt, Artificial Sequence
  Description of Artificial Sequence: Synthetic oligonucleotide
cauuacuagucaccagaau

SEQ ID NO: 1609764 - RNA, 19 nt, Artificial Sequence
  Description of Artificial Sequence: Synthetic oligonucleotide
ccaacgcuccacaugucca

SEQ ID NO: 1609765 - RNA, 19 nt, Artificial Sequence
  Description of Artificial Sequence: Synthetic oligonucleotide
cgaucaguucgggagguag

SEQ ID NO: 1609766 - RNA, 19 nt, Artificial Sequence
  Description of Artificial Sequence: Synthetic oligonucleotide
gccguacaacauuggggug

SEQ ID NO: 1609767 - RNA, 19 nt, Artificial Sequence
  Description of Artificial Sequence: Synthetic oligonucleotide
cguacagugcugaugggaa

SEQ ID NO: 1609768 - RNA, 19 nt, Artificial Sequence
  Description of Artificial Sequence: Synthetic oligonucleotide
uggacgcuacgggccagac

SEQ ID NO: 1609769 - RNA, 19 nt, Artificial Sequence
  Description of Artificial Sequence: Synthetic oligonucleotide
cgucccauaggcaccaaca

SEQ ID NO: 1609770 - RNA, 19 nt, Artificial Sequence
  Description of Artificial Sequence: Synthetic oligonucleotide
ggacgcuacgggccagacc

SEQ ID NO: 1609771 - RNA, 19 nt, Artificial Sequence
  Description of Artificial Sequence: Synthetic oligonucleotide
ggucucaacuggcaagccu

SEQ ID NO: 1609772 - RNA, 19 nt, Artificial Sequence
  Description of Artificial Sequence: Synthetic oligonucleotide
auccgcuuauguggguuaa

SEQ ID NO: 1609773 - RNA, 19 nt, Artificial Sequence
  Description of Artificial Sequence: Synthetic oligonucleotide
gcguacagugcugauggga

SEQ ID NO: 1609774 - RNA, 19 nt, Artificial Sequence
  Description of Artificial Sequence: Synthetic oligonucleotide
gguguugcguauguagacu

SEQ ID NO: 1609775 - RNA, 19 nt, Artificial Sequence
  Description of Artificial Sequence: Synthetic oligonucleotide
ccgggagccgguuccugcg

SEQ ID NO: 1609776 - RNA, 19 nt, Artificial Sequence
  Description of Artificial Sequence: Synthetic oligonucleotide
agacacaggccgcgagcua

SEQ ID NO: 1609777 - RNA, 19 nt, Artificial Sequence
  Description of Artificial Sequence: Synthetic oligonucleotide
ccgcgagcuagagaggccc

SEQ ID NO: 1609778 - RNA, 19 nt, Artificial Sequence
  Description of Artificial Sequence: Synthetic oligonucleotide
gcuugacugucccauuacu

SEQ ID NO: 1609779 - RNA, 19 nt, Artificial Sequence
  Description of Artificial Sequence: Synthetic oligonucleotide
cacaggccgcgagcuagag

SEQ ID NO: 1609780 - RNA, 19 nt, Artificial Sequence
  Description of Artificial Sequence: Synthetic oligonucleotide
ggggaucggucccgggcag

SEQ ID NO: 1609781 - RNA, 19 nt, Artificial Sequence
  Description of Artificial Sequence: Synthetic oligonucleotide
ccgcuuagaaacugucgca

SEQ ID NO: 1609782 - RNA, 19 nt, Artificial Sequence
  Description of Artificial Sequence: Synthetic oligonucleotide
caacauuggggugcucgaa

SEQ ID NO: 1609783 - RNA, 19 nt, Artificial Sequence
  Description of Artificial Sequence: Synthetic oligonucleotide
gccaccucgcguacagugc

SEQ ID NO: 1609784 - RNA, 19 nt, Artificial Sequence
  Description of Artificial Sequence: Synthetic oligonucleotide
gcuuucgacgaaacaucuc

SEQ ID NO: 1609785 - RNA, 19 nt, Artificial Sequence
  Description of Artificial Sequence: Synthetic oligonucleotide
ucgaucaguucgggaggua

SEQ ID NO: 1609786 - RNA, 19 nt, Artificial Sequence
  Description of Artificial Sequence: Synthetic oligonucleotide
cccacccuuuaguguagag

SEQ ID NO: 1609787 - RNA, 19 nt, Artificial Sequence
  Description of Artificial Sequence: Synthetic oligonucleotide
ggcagcuaaucuucucacu

SEQ ID NO: 1609788 - RNA, 19 nt, Artificial Sequence
  Description of Artificial Sequence: Synthetic oligonucleotide
cgacgaaacaucucugcaa

SEQ ID NO: 1609789 - RNA, 19 nt, Artificial Sequence
  Description of Artificial Sequence: Synthetic oligonucleotide
agauucuggccaggccaaa

SEQ ID NO: 1609790 - RNA, 19 nt, Artificial Sequence
  Description of Artificial Sequence: Synthetic oligonucleotide
ccacccuuuaguguagaga

SEQ ID NO: 1609791 - RNA, 19 nt, Artificial Sequence
  Description of Artificial Sequence: Synthetic oligonucleotide
cugcggcgccauacaccgg

SEQ ID NO: 1609792 - RNA, 19 nt, Artificial Sequence
  Description of Artificial Sequence: Synthetic oligonucleotide
auagcgggagguagccauu

SEQ ID NO: 1609793 - RNA, 19 nt, Artificial Sequence
  Description of Artificial Sequence: Synthetic oligonucleotide
guucgggagguagcacaga

SEQ ID NO: 1609794 - RNA, 19 nt, Artificial Sequence
  Description of Artificial Sequence: Synthetic oligonucleotide
aggccgcgagcuagagagg

SEQ ID NO: 1609795 - RNA, 19 nt, Artificial Sequence
  Description of Artificial Sequence: Synthetic oligonucleotide
cccgggagccgguuccugc

SEQ ID NO: 1609796 - RNA, 19 nt, Artificial Sequence
  Description of Artificial Sequence: Synthetic oligonucleotide
cucgcccggccaagagcug

SEQ ID NO: 1609797 - RNA, 19 nt, Artificial Sequence
  Description of Artificial Sequence: Synthetic oligonucleotide
caggccgcuuagaaacugu

SEQ ID NO: 1609798 - RNA, 19 nt, Artificial Sequence
  Description of Artificial Sequence: Synthetic oligonucleotide
cuccucucgcccggccaag

SEQ ID NO: 1609799 - RNA, 19 nt, Artificial Sequence
  Description of Artificial Sequence: Synthetic oligonucleotide
cggguguugcguauguaga

SEQ ID NO: 1609800 - RNA, 19 nt, Artificial Sequence
  Description of Artificial Sequence: Synthetic oligonucleotide
cucgaucaguucgggaggu

SEQ ID NO: 1609801 - RNA, 19 nt, Artificial Sequence
  Description of Artificial Sequence: Synthetic oligonucleotide
caccggggaucggucccgg

SEQ ID NO: 1609802 - RNA, 19 nt, Artificial Sequence
  Description of Artificial Sequence: Synthetic oligonucleotide
ccuccguugggaacucgca

SEQ ID NO: 1609803 - RNA, 19 nt, Artificial Sequence
  Description of Artificial Sequence: Synthetic oligonucleotide
ccucucgaggccagucauc

SEQ ID NO: 1609804 - RNA, 19 nt, Artificial Sequence
  Description of Artificial Sequence: Synthetic oligonucleotide
ccucucgcccggccaagag

SEQ ID NO: 1609805 - RNA, 19 nt, Artificial Sequence
  Description of Artificial Sequence: Synthetic oligonucleotide
ccaggccgcuuagaaacug

SEQ ID NO: 1609806 - RNA, 19 nt, Artificial Sequence
  Description of Artificial Sequence: Synthetic oligonucleotide
ggcaauccaaugagaucaa

SEQ ID NO: 1609807 - RNA, 19 nt, Artificial Sequence
  Description of Artificial Sequence: Synthetic oligonucleotide
gccagaccauagacacagg

SEQ ID NO: 1609808 - RNA, 19 nt, Artificial Sequence
  Description of Artificial Sequence: Synthetic oligonucleotide
gcaauccaaugagaucaaa

SEQ ID NO: 1609809 - RNA, 19 nt, Artificial Sequence
  Description of Artificial Sequence: Synthetic oligonucleotide
cgcucaagugucccaagga

SEQ ID NO: 1609810 - RNA, 19 nt, Artificial Sequence
  Description of Artificial Sequence: Synthetic oligonucleotide
cagagacacccacccuuua

SEQ ID NO: 1609811 - RNA, 19 nt, Artificial Sequence
  Description of Artificial Sequence: Synthetic oligonucleotide
ccgucccauaggcaccaac

SEQ ID NO: 1609812 - RNA, 19 nt, Artificial Sequence
  Description of Artificial Sequence: Synthetic oligonucleotide
ccgcuuauguggguuaaaa

SEQ ID NO: 1609813 - RNA, 19 nt, Artificial Sequence
  Description of Artificial Sequence: Synthetic oligonucleotide
cacaggugugagggccauc

SEQ ID NO: 1609814 - RNA, 19 nt, Artificial Sequence
  Description of Artificial Sequence: Synthetic oligonucleotide
cuggacgcuacgggccaga

SEQ ID NO: 1609815 - RNA, 19 nt, Artificial Sequence
  Description of Artificial Sequence: Synthetic oligonucleotide
ccgggcagcuggacgcuac

SEQ ID NO: 1609816 - RNA, 19 nt, Artificial Sequence
  Description of Artificial Sequence: Synthetic oligonucleotide
ccauuagccguacaacauu

SEQ ID NO: 1609817 - RNA, 19 nt, Artificial Sequence
  Description of Artificial Sequence: Synthetic oligonucleotide
ccgacugcacaggccgcgg

SEQ ID NO: 1609818 - RNA, 19 nt, Artificial Sequence
  Description of Artificial Sequence: Synthetic oligonucleotide
cgcguacagugcugauggg

SEQ ID NO: 1609819 - RNA, 19 nt, Artificial Sequence
  Description of Artificial Sequence: Synthetic oligonucleotide
gccgcgagcuagagaggcc

SEQ ID NO: 1609820 - RNA, 19 nt, Artificial Sequence
  Description of Artificial Sequence: Synthetic oligonucleotide
gggaucggucccgggcagc

SEQ ID NO: 1609821 - RNA, 19 nt, Artificial Sequence
  Description of Artificial Sequence: Synthetic oligonucleotide
cgcgagcuagagaggcccc

SEQ ID NO: 1609822 - RNA, 19 nt, Artificial Sequence
  Description of Artificial Sequence: Synthetic oligonucleotide
cucaacuggcaagccuggu

SEQ ID NO: 1609823 - RNA, 19 nt, Artificial Sequence
  Description of Artificial Sequence: Synthetic oligonucleotide
gcggcgccauacaccgggg

SEQ ID NO: 1609824 - RNA, 19 nt, Artificial Sequence
  Description of Artificial Sequence: Synthetic oligonucleotide
ccgauuucagccaccgguu

SEQ ID NO: 1609825 - RNA, 19 nt, Artificial Sequence
  Description of Artificial Sequence: Synthetic oligonucleotide
gcccuuuaucugggcccgg

SEQ ID NO: 1609826 - RNA, 19 nt, Artificial Sequence
  Description of Artificial Sequence: Synthetic oligonucleotide
ccaucuccgguaccaccga

SEQ ID NO: 1609827 - RNA, 19 nt, Artificial Sequence
  Description of Artificial Sequence: Synthetic oligonucleotide
ccaccgguucauagcggga

SEQ ID NO: 1609828 - RNA, 19 nt, Artificial Sequence
  Description of Artificial Sequence: Synthetic oligonucleotide
ggggaucucgggccuugua

SEQ ID NO: 1609829 - RNA, 19 nt, Artificial Sequence
  Description of Artificial Sequence: Synthetic oligonucleotide
ccauacaccggggaucggu

SEQ ID NO: 1609830 - RNA, 19 nt, Artificial Sequence
  Description of Artificial Sequence: Synthetic oligonucleotide
ccaccucgcguacagugcu

SEQ ID NO: 1609831 - RNA, 19 nt, Artificial Sequence
  Description of Artificial Sequence: Synthetic oligonucleotide
ccgguaccaccgacugcac

SEQ ID NO: 1609832 - RNA, 19 nt, Artificial Sequence
  Description of Artificial Sequence: Synthetic oligonucleotide
cacggguguugcguaugua

SEQ ID NO: 1609833 - RNA, 19 nt, Artificial Sequence
  Description of Artificial Sequence: Synthetic oligonucleotide
ccauagacacaggccgcga

SEQ ID NO: 1609834 - RNA, 19 nt, Artificial Sequence
  Description of Artificial Sequence: Synthetic oligonucleotide
cggggaucggucccgggca

SEQ ID NO: 1609835 - RNA, 19 nt, Artificial Sequence
  Description of Artificial Sequence: Synthetic oligonucleotide
acgcuacgggccagaccau

SEQ ID NO: 1609836 - RNA, 19 nt, Artificial Sequence
  Description of Artificial Sequence: Synthetic oligonucleotide
cgcuuagaaacugucgcau

SEQ ID NO: 1609837 - RNA, 19 nt, Artificial Sequence
  Description of Artificial Sequence: Synthetic oligonucleotide
cccggccaagagcugcgga

SEQ ID NO: 1609838 - RNA, 19 nt, Artificial Sequence
  Description of Artificial Sequence: Synthetic oligonucleotide
cgguaccaccgacugcaca

SEQ ID NO: 1609839 - RNA, 19 nt, Artificial Sequence
  Description of Artificial Sequence: Synthetic oligonucleotide
ccgguucauagcgggaggu

SEQ ID NO: 1609840 - RNA, 19 nt, Artificial Sequence
  Description of Artificial Sequence: Synthetic oligonucleotide
ccccuccguugggaacucg

SEQ ID NO: 1609841 - RNA, 19 nt, Artificial Sequence
  Description of Artificial Sequence: Synthetic oligonucleotide
ccacggguguugcguaugu

SEQ ID NO: 1609842 - RNA, 19 nt, Artificial Sequence
  Description of Artificial Sequence: Synthetic oligonucleotide
gcaagaggacaagccucau

SEQ ID NO: 1609843 - RNA, 19 nt, Artificial Sequence
  Description of Artificial Sequence: Synthetic oligonucleotide
gcccgggagccgguuccug

SEQ ID NO: 1609844 - RNA, 19 nt, Artificial Sequence
  Description of Artificial Sequence: Synthetic oligonucleotide
ccgccucaguaaggccacc

SEQ ID NO: 1609845 - RNA, 19 nt, Artificial Sequence
  Description of Artificial Sequence: Synthetic oligonucleotide
ccagcuugacugucccauu

SEQ ID NO: 1609846 - RNA, 19 nt, Artificial Sequence
  Description of Artificial Sequence: Synthetic oligonucleotide
cgguucauagcgggaggua

SEQ ID NO: 1609847 - RNA, 19 nt, Artificial Sequence
  Description of Artificial Sequence: Synthetic oligonucleotide
cggcgccauacaccgggga

SEQ ID NO: 1609848 - RNA, 19 nt, Artificial Sequence
  Description of Artificial Sequence: Synthetic oligonucleotide
ccucgcguacagugcugau

SEQ ID NO: 1609849 - RNA, 19 nt, Artificial Sequence
  Description of Artificial Sequence: Synthetic oligonucleotide
ccacaggugugagggccau

SEQ ID NO: 1609850 - RNA, 19 nt, Artificial Sequence
  Description of Artificial Sequence: Synthetic oligonucleotide
cccgggcagcuggacgcua

SEQ ID NO: 1609851 - RNA, 19 nt, Artificial Sequence
  Description of Artificial Sequence: Synthetic oligonucleotide
ccgguuccugcggcgccau

SEQ ID NO: 1609852 - RNA, 19 nt, Artificial Sequence
  Description of Artificial Sequence: Synthetic oligonucleotide
cgguuccugcggcgccaua

SEQ ID NO: 1609853 - RNA, 19 nt, Artificial Sequence
  Description of Artificial Sequence: Synthetic oligonucleotide
ucuauuaccaccuugagga

SEQ ID NO: 1609854 - RNA, 19 nt, Artificial Sequence
  Description of Artificial Sequence: Synthetic oligonucleotide
auaucgaacagucugauac

SEQ ID NO: 1609855 - RNA, 19 nt, Artificial Sequence
  Description of Artificial Sequence: Synthetic oligonucleotide
augaauaagugucucaucc

SEQ ID NO: 1609856 - RNA, 19 nt, Artificial Sequence
  Description of Artificial Sequence: Synthetic oligonucleotide
aauaaagaagcuccagagc

SEQ ID NO: 1609857 - RNA, 19 nt, Artificial Sequence
  Description of Artificial Sequence: Synthetic oligonucleotide
aaggauaucauaucgaaca

SEQ ID NO: 1609858 - RNA, 19 nt, Artificial Sequence
  Description of Artificial Sequence: Synthetic oligonucleotide
acaaguuugaggaagaucc

SEQ ID NO: 1609859 - RNA, 19 nt, Artificial Sequence
  Description of Artificial Sequence: Synthetic oligonucleotide
ggagugaagaauuagaucg

SEQ ID NO: 1609860 - RNA, 19 nt, Artificial Sequence
  Description of Artificial Sequence: Synthetic oligonucleotide
aaugcuucugcuauugucc

SEQ ID NO: 1609861 - RNA, 19 nt, Artificial Sequence
  Description of Artificial Sequence: Synthetic oligonucleotide
uaucauaucgaacagucug

SEQ ID NO: 1609862 - RNA, 19 nt, Artificial Sequence
  Description of Artificial Sequence: Synthetic oligonucleotide
ucaaaucacaacaaaguug

SEQ ID NO: 1609863 - RNA, 19 nt, Artificial Sequence
  Description of Artificial Sequence: Synthetic oligonucleotide
agguaaauaaagaagcucc

SEQ ID NO: 1609864 - RNA, 19 nt, Artificial Sequence
  Description of Artificial Sequence: Synthetic oligonucleotide
aaaugaggaaaaguaaggg

SEQ ID NO: 1609865 - RNA, 19 nt, Artificial Sequence
  Description of Artificial Sequence: Synthetic oligonucleotide
uucggcucagcacagaacg

SEQ ID NO: 1609866 - RNA, 19 nt, Artificial Sequence
  Description of Artificial Sequence: Synthetic oligonucleotide
aaugaggaaaaguaaggga

SEQ ID NO: 1609867 - RNA, 19 nt, Artificial Sequence
  Description of Artificial Sequence: Synthetic oligonucleotide
aaacaccacaagcucauac

SEQ ID NO: 1609868 - RNA, 19 nt, Artificial Sequence
  Description of Artificial Sequence: Synthetic oligonucleotide
aggauguuugucuauuacc

SEQ ID NO: 1609869 - RNA, 19 nt, Artificial Sequence
  Description of Artificial Sequence: Synthetic oligonucleotide
gauuacagguaucaagggg

SEQ ID NO: 1609870 - RNA, 19 nt, Artificial Sequence
  Description of Artificial Sequence: Synthetic oligonucleotide
aaucaaaucacaacaaagu

SEQ ID NO: 1609871 - RNA, 19 nt, Artificial Sequence
  Description of Artificial Sequence: Synthetic oligonucleotide
uauaguaucuccucuuaag

SEQ ID NO: 1609872 - RNA, 19 nt, Artificial Sequence
  Description of Artificial Sequence: Synthetic oligonucleotide
aagguaaauaaagaagcuc

SEQ ID NO: 1609873 - RNA, 19 nt, Artificial Sequence
  Description of Artificial Sequence: Synthetic oligonucleotide
uugaggaugaaaucgggag

SEQ ID NO: 1609874 - RNA, 19 nt, Artificial Sequence
  Description of Artificial Sequence: Synthetic oligonucleotide
ugaauuaccgugcggaucu

SEQ ID NO: 1609875 - RNA, 19 nt, Artificial Sequence
  Description of Artificial Sequence: Synthetic oligonucleotide
aacacgaagagugaggcug

SEQ ID NO: 1609876 - RNA, 19 nt, Artificial Sequence
  Description of Artificial Sequence: Synthetic oligonucleotide
ugcuguaaacaccacaagc

SEQ ID NO: 1609877 - RNA, 19 nt, Artificial Sequence
  Description of Artificial Sequence: Synthetic oligonucleotide
ucugcuauuguccaguuua

SEQ ID NO: 1609878 - RNA, 19 nt, Artificial Sequence
  Description of Artificial Sequence: Synthetic oligonucleotide
aaaucccaggcucccaccc

SEQ ID NO: 1609879 - RNA, 19 nt, Artificial Sequence
  Description of Artificial Sequence: Synthetic oligonucleotide
ucuaagaagaaauccacau

SEQ ID NO: 1609880 - RNA, 19 nt, Artificial Sequence
  Description of Artificial Sequence: Synthetic oligonucleotide
aagguuucggcucagcaca

SEQ ID NO: 1609881 - RNA, 19 nt, Artificial Sequence
  Description of Artificial Sequence: Synthetic oligonucleotide
gauacugaauuaccgugcg

SEQ ID NO: 1609882 - RNA, 19 nt, Artificial Sequence
  Description of Artificial Sequence: Synthetic oligonucleotide
aacagucugauacugaauu

SEQ ID NO: 1609883 - RNA, 19 nt, Artificial Sequence
  Description of Artificial Sequence: Synthetic oligonucleotide
ugaaccaggauuugauagg

SEQ ID NO: 1609884 - RNA, 19 nt, Artificial Sequence
  Description of Artificial Sequence: Synthetic oligonucleotide
aagggaaggauaucauauc

SEQ ID NO: 1609885 - RNA, 19 nt, Artificial Sequence
  Description of Artificial Sequence: Synthetic oligonucleotide
gauaucauaucgaacaguc

SEQ ID NO: 1609886 - RNA, 19 nt, Artificial Sequence
  Description of Artificial Sequence: Synthetic oligonucleotide
auagggauggcauugucug

SEQ ID NO: 1609887 - RNA, 19 nt, Artificial Sequence
  Description of Artificial Sequence: Synthetic oligonucleotide
uugucuauuaccaccuuga

SEQ ID NO: 1609888 - RNA, 19 nt, Artificial Sequence
  Description of Artificial Sequence: Synthetic oligonucleotide
acaagcucauaccacuggc

SEQ ID NO: 1609889 - RNA, 19 nt, Artificial Sequence
  Description of Artificial Sequence: Synthetic oligonucleotide
ugauacugaauuaccgugc

SEQ ID NO: 1609890 - RNA, 19 nt, Artificial Sequence
  Description of Artificial Sequence: Synthetic oligonucleotide
aaaaucccaggcucccacc

SEQ ID NO: 1609891 - RNA, 19 nt, Artificial Sequence
  Description of Artificial Sequence: Synthetic oligonucleotide
uauuguccaguuuaucugc

SEQ ID NO: 1609892 - RNA, 19 nt, Artificial Sequence
  Description of Artificial Sequence: Synthetic oligonucleotide
cugaaccaggauuugauag

SEQ ID NO: 1609893 - RNA, 19 nt, Artificial Sequence
  Description of Artificial Sequence: Synthetic oligonucleotide
uuuaucugccacagcagag

SEQ ID NO: 1609894 - RNA, 19 nt, Artificial Sequence
  Description of Artificial Sequence: Synthetic oligonucleotide
uuuccauggagugugaaca

SEQ ID NO: 1609895 - RNA, 19 nt, Artificial Sequence
  Description of Artificial Sequence: Synthetic oligonucleotide
uguuugucuauuaccaccu

SEQ ID NO: 1609896 - RNA, 19 nt, Artificial Sequence
  Description of Artificial Sequence: Synthetic oligonucleotide
gauguagcugcccaacucc

SEQ ID NO: 1609897 - RNA, 19 nt, Artificial Sequence
  Description of Artificial Sequence: Synthetic oligonucleotide
ucgguuuuguacaagaguu

SEQ ID NO: 1609898 - RNA, 19 nt, Artificial Sequence
  Description of Artificial Sequence: Synthetic oligonucleotide
ucugauacugaauuaccgu

SEQ ID NO: 1609899 - RNA, 19 nt, Artificial Sequence
  Description of Artificial Sequence: Synthetic oligonucleotide
caggauuugauagggaugg

SEQ ID NO: 1609900 - RNA, 19 nt, Artificial Sequence
  Description of Artificial Sequence: Synthetic oligonucleotide
uuugauagggauggcauug

SEQ ID NO: 1609901 - RNA, 19 nt, Artificial Sequence
  Description of Artificial Sequence: Synthetic oligonucleotide
gauccaguggcccaaaauc

SEQ ID NO: 1609902 - RNA, 19 nt, Artificial Sequence
  Description of Artificial Sequence: Synthetic oligonucleotide
gugagaaugaauaaguguc

SEQ ID NO: 1609903 - RNA, 19 nt, Artificial Sequence
  Description of Artificial Sequence: Synthetic oligonucleotide
acaguuucagcucuccaag

SEQ ID NO: 1609904 - RNA, 19 nt, Artificial Sequence
  Description of Artificial Sequence: Synthetic oligonucleotide
cacuguaggccuuaggacc

SEQ ID NO: 1609905 - RNA, 19 nt, Artificial Sequence
  Description of Artificial Sequence: Synthetic oligonucleotide
auaguaucuccucuuaaga

SEQ ID NO: 1609906 - RNA, 19 nt, Artificial Sequence
  Description of Artificial Sequence: Synthetic oligonucleotide
cuauuguccaguuuaucug

SEQ ID NO: 1609907 - RNA, 19 nt, Artificial Sequence
  Description of Artificial Sequence: Synthetic oligonucleotide
cauaaauuuccaugcuugc

SEQ ID NO: 1609908 - RNA, 19 nt, Artificial Sequence
  Description of Artificial Sequence: Synthetic oligonucleotide
aaaaguaagggagggacaa

SEQ ID NO: 1609909 - RNA, 19 nt, Artificial Sequence
  Description of Artificial Sequence: Synthetic oligonucleotide
aagaauuagaucgguuuug

SEQ ID NO: 1609910 - RNA, 19 nt, Artificial Sequence
  Description of Artificial Sequence: Synthetic oligonucleotide
ucgauuccgggacagagga

SEQ ID NO: 1609911 - RNA, 19 nt, Artificial Sequence
  Description of Artificial Sequence: Synthetic oligonucleotide
cugauacugaauuaccgug

SEQ ID NO: 1609912 - RNA, 19 nt, Artificial Sequence
  Description of Artificial Sequence: Synthetic oligonucleotide
aaagaagcuccagagcuug

SEQ ID NO: 1609913 - RNA, 19 nt, Artificial Sequence
  Description of Artificial Sequence: Synthetic oligonucleotide
gucuauuaccaccuugagg

SEQ ID NO: 1609914 - RNA, 19 nt, Artificial Sequence
  Description of Artificial Sequence: Synthetic oligonucleotide
aucccgaugaccccggcac

SEQ ID NO: 1609915 - RNA, 19 nt, Artificial Sequence
  Description of Artificial Sequence: Synthetic oligonucleotide
uacugaauuaccgugcgga

SEQ ID NO: 1609916 - RNA, 19 nt, Artificial Sequence
  Description of Artificial Sequence: Synthetic oligonucleotide
gagccuauguuggugaagg

SEQ ID NO: 1609917 - RNA, 19 nt, Artificial Sequence
  Description of Artificial Sequence: Synthetic oligonucleotide
gaucacgucugucacggag

SEQ ID NO: 1609918 - RNA, 19 nt, Artificial Sequence
  Description of Artificial Sequence: Synthetic oligonucleotide
aaucgggagguguuccagg

SEQ ID NO: 1609919 - RNA, 19 nt, Artificial Sequence
  Description of Artificial Sequence: Synthetic oligonucleotide
gaaccaggauuugauaggg

SEQ ID NO: 1609920 - RNA, 19 nt, Artificial Sequence
  Description of Artificial Sequence: Synthetic oligonucleotide
aucaaaucacaacaaaguu

SEQ ID NO: 1609921 - RNA, 19 nt, Artificial Sequence
  Description of Artificial Sequence: Synthetic oligonucleotide
uccgcaaaagguaaauaaa

SEQ ID NO: 1609922 - RNA, 19 nt, Artificial Sequence
  Description of Artificial Sequence: Synthetic oligonucleotide
uccauaguggagugcagag

SEQ ID NO: 1609923 - RNA, 19 nt, Artificial Sequence
  Description of Artificial Sequence: Synthetic oligonucleotide
aaguuugaggaagauccag

SEQ ID NO: 1609924 - RNA, 19 nt, Artificial Sequence
  Description of Artificial Sequence: Synthetic oligonucleotide
ucuuaagaaugcuucugcu

SEQ ID NO: 1609925 - RNA, 19 nt, Artificial Sequence
  Description of Artificial Sequence: Synthetic oligonucleotide
agauaagggaaggauauca

SEQ ID NO: 1609926 - RNA, 19 nt, Artificial Sequence
  Description of Artificial Sequence: Synthetic oligonucleotide
ugaagguuucggcucagca

SEQ ID NO: 1609927 - RNA, 19 nt, Artificial Sequence
  Description of Artificial Sequence: Synthetic oligonucleotide
ugucuauaguaucuccucu

SEQ ID NO: 1609928 - RNA, 19 nt, Artificial Sequence
  Description of Artificial Sequence: Synthetic oligonucleotide
agucugauacugaauuacc

SEQ ID NO: 1609929 - RNA, 19 nt, Artificial Sequence
  Description of Artificial Sequence: Synthetic oligonucleotide
aauuaccgugcggaucugc

SEQ ID NO: 1609930 - RNA, 19 nt, Artificial Sequence
  Description of Artificial Sequence: Synthetic oligonucleotide
auccaguggcccaaaaucc

SEQ ID NO: 1609931 - RNA, 19 nt, Artificial Sequence
  Description of Artificial Sequence: Synthetic oligonucleotide
agaaugaauaagugucuca

SEQ ID NO: 1609932 - RNA, 19 nt, Artificial Sequence
  Description of Artificial Sequence: Synthetic oligonucleotide
cuggguggcuccuauaagc

SEQ ID NO: 1609933 - RNA, 19 nt, Artificial Sequence
  Description of Artificial Sequence: Synthetic oligonucleotide
ugugaacacgaagagugag

SEQ ID NO: 1609934 - RNA, 19 nt, Artificial Sequence
  Description of Artificial Sequence: Synthetic oligonucleotide
gaagguuucggcucagcac

SEQ ID NO: 1609935 - RNA, 19 nt, Artificial Sequence
  Description of Artificial Sequence: Synthetic oligonucleotide
aucgguuuuguacaagagu

SEQ ID NO: 1609936 - RNA, 19 nt, Artificial Sequence
  Description of Artificial Sequence: Synthetic oligonucleotide
ugucuauuaccaccuugag

SEQ ID NO: 1609937 - RNA, 19 nt, Artificial Sequence
  Description of Artificial Sequence: Synthetic oligonucleotide
aaguaagggagggacaagu

SEQ ID NO: 1609938 - RNA, 19 nt, Artificial Sequence
  Description of Artificial Sequence: Synthetic oligonucleotide
agagcuuggcagcgaaggc

SEQ ID NO: 1609939 - RNA, 19 nt, Artificial Sequence
  Description of Artificial Sequence: Synthetic oligonucleotide
uccaguuuaucugccacag

SEQ ID NO: 1609940 - RNA, 19 nt, Artificial Sequence
  Description of Artificial Sequence: Synthetic oligonucleotide
gucugauacugaauuaccg

SEQ ID NO: 1609941 - RNA, 19 nt, Artificial Sequence
  Description of Artificial Sequence: Synthetic oligonucleotide
uaguaucuccucuuaagaa

SEQ ID NO: 1609942 - RNA, 19 nt, Artificial Sequence
  Description of Artificial Sequence: Synthetic oligonucleotide
uguuggugaagguuucggc

SEQ ID NO: 1609943 - RNA, 19 nt, Artificial Sequence
  Description of Artificial Sequence: Synthetic oligonucleotide
gauguuugucuauuaccac

SEQ ID NO: 1609944 - RNA, 19 nt, Artificial Sequence
  Description of Artificial Sequence: Synthetic oligonucleotide
ucuucaccugggcuagucg

SEQ ID NO: 1609945 - RNA, 19 nt, Artificial Sequence
  Description of Artificial Sequence: Synthetic oligonucleotide
agaucgguuuuguacaaga

SEQ ID NO: 1609946 - RNA, 19 nt, Artificial Sequence
  Description of Artificial Sequence: Synthetic oligonucleotide
ucuauaguaucuccucuua

SEQ ID NO: 1609947 - RNA, 19 nt, Artificial Sequence
  Description of Artificial Sequence: Synthetic oligonucleotide
uuaucugccacagcagagc

SEQ ID NO: 1609948 - RNA, 19 nt, Artificial Sequence
  Description of Artificial Sequence: Synthetic oligonucleotide
gacaucagcagugaaccug

SEQ ID NO: 1609949 - RNA, 19 nt, Artificial Sequence
  Description of Artificial Sequence: Synthetic oligonucleotide
gagggcauccagcauuggg

SEQ ID NO: 1609950 - RNA, 19 nt, Artificial Sequence
  Description of Artificial Sequence: Synthetic oligonucleotide
acuguaggccuuaggaccc

SEQ ID NO: 1609951 - RNA, 19 nt, Artificial Sequence
  Description of Artificial Sequence: Synthetic oligonucleotide
uccaguggcccaaaauccc

SEQ ID NO: 1609952 - RNA, 19 nt, Artificial Sequence
  Description of Artificial Sequence: Synthetic oligonucleotide
gagugaagaauuagaucgg

SEQ ID NO: 1609953 - RNA, 19 nt, Artificial Sequence
  Description of Artificial Sequence: Synthetic oligonucleotide
accacaagcucauaccacu

SEQ ID NO: 1609954 - RNA, 19 nt, Artificial Sequence
  Description of Artificial Sequence: Synthetic oligonucleotide
gagugaggcugcuucacag

SEQ ID NO: 1609955 - RNA, 19 nt, Artificial Sequence
  Description of Artificial Sequence: Synthetic oligonucleotide
agauccagcaccaggaucu

SEQ ID NO: 1609956 - RNA, 19 nt, Artificial Sequence
  Description of Artificial Sequence: Synthetic oligonucleotide
ucugccuccgcaaaaggua

SEQ ID NO: 1609957 - RNA, 19 nt, Artificial Sequence
  Description of Artificial Sequence: Synthetic oligonucleotide
aaaccggacaggauguuug

SEQ ID NO: 1609958 - RNA, 19 nt, Artificial Sequence
  Description of Artificial Sequence: Synthetic oligonucleotide
uggguggcuccuauaagcc

SEQ ID NO: 1609959 - RNA, 19 nt, Artificial Sequence
  Description of Artificial Sequence: Synthetic oligonucleotide
cugcccaacuccaaagugc

SEQ ID NO: 1609960 - RNA, 19 nt, Artificial Sequence
  Description of Artificial Sequence: Synthetic oligonucleotide
auuaccgugcggaucugcc

SEQ ID NO: 1609961 - RNA, 19 nt, Artificial Sequence
  Description of Artificial Sequence: Synthetic oligonucleotide
aaguugacuuggcuucuug

SEQ ID NO: 1609962 - RNA, 19 nt, Artificial Sequence
  Description of Artificial Sequence: Synthetic oligonucleotide
accaggauuugauagggau

SEQ ID NO: 1609963 - RNA, 19 nt, Artificial Sequence
  Description of Artificial Sequence: Synthetic oligonucleotide
cacugcguccgcaucaucc

SEQ ID NO: 1609964 - RNA, 19 nt, Artificial Sequence
  Description of Artificial Sequence: Synthetic oligonucleotide
ugauguagcugcccaacuc

SEQ ID NO: 1609965 - RNA, 19 nt, Artificial Sequence
  Description of Artificial Sequence: Synthetic oligonucleotide
ugggcuagucgauuccggg

SEQ ID NO: 1609966 - RNA, 19 nt, Artificial Sequence
  Description of Artificial Sequence: Synthetic oligonucleotide
auaccacuggcuuaccacu

SEQ ID NO: 1609967 - RNA, 19 nt, Artificial Sequence
  Description of Artificial Sequence: Synthetic oligonucleotide
cuggcuuaccacuucuaag

SEQ ID NO: 1609968 - RNA, 19 nt, Artificial Sequence
  Description of Artificial Sequence: Synthetic oligonucleotide
agggacaaguuugaggaag

SEQ ID NO: 1609969 - RNA, 19 nt, Artificial Sequence
  Description of Artificial Sequence: Synthetic oligonucleotide
uucuuguaagccucuggga

SEQ ID NO: 1609970 - RNA, 19 nt, Artificial Sequence
  Description of Artificial Sequence: Synthetic oligonucleotide
ggaaaaguaagggagggac

SEQ ID NO: 1609971 - RNA, 19 nt, Artificial Sequence
  Description of Artificial Sequence: Synthetic oligonucleotide
aauaagugucucauccaga

SEQ ID NO: 1609972 - RNA, 19 nt, Artificial Sequence
  Description of Artificial Sequence: Synthetic oligonucleotide
agucuggccccaugugucc

SEQ ID NO: 1609973 - RNA, 19 nt, Artificial Sequence
  Description of Artificial Sequence: Synthetic oligonucleotide
uaucgaacagucugauacu

SEQ ID NO: 1609974 - RNA, 19 nt, Artificial Sequence
  Description of Artificial Sequence: Synthetic oligonucleotide
cagcauugggagaagguug

SEQ ID NO: 1609975 - RNA, 19 nt, Artificial Sequence
  Description of Artificial Sequence: Synthetic oligonucleotide
uauguuggugaagguuucg

SEQ ID NO: 1609976 - RNA, 19 nt, Artificial Sequence
  Description of Artificial Sequence: Synthetic oligonucleotide
ugaaaucgggagguguucc

SEQ ID NO: 1609977 - RNA, 19 nt, Artificial Sequence
  Description of Artificial Sequence: Synthetic oligonucleotide
aaaucgggagguguuccag

SEQ ID NO: 1609978 - RNA, 19 nt, Artificial Sequence
  Description of Artificial Sequence: Synthetic oligonucleotide
ugucacggaggccaguccu

SEQ ID NO: 1609979 - RNA, 19 nt, Artificial Sequence
  Description of Artificial Sequence: Synthetic oligonucleotide
gauuccgggacagaggaga

SEQ ID NO: 1609980 - RNA, 19 nt, Artificial Sequence
  Description of Artificial Sequence: Synthetic oligonucleotide
auacugaauuaccgugcgg

SEQ ID NO: 1609981 - RNA, 19 nt, Artificial Sequence
  Description of Artificial Sequence: Synthetic oligonucleotide
auaagggaaggauaucaua

SEQ ID NO: 1609982 - RNA, 19 nt, Artificial Sequence
  Description of Artificial Sequence: Synthetic oligonucleotide
cugucuauaguaucuccuc

SEQ ID NO: 1609983 - RNA, 19 nt, Artificial Sequence
  Description of Artificial Sequence: Synthetic oligonucleotide
gaaggauaucauaucgaac

SEQ ID NO: 1609984 - RNA, 19 nt, Artificial Sequence
  Description of Artificial Sequence: Synthetic oligonucleotide
guccgcaucaucccgauga

SEQ ID NO: 1609985 - RNA, 19 nt, Artificial Sequence
  Description of Artificial Sequence: Synthetic oligonucleotide
auccagacuccauagugga

SEQ ID NO: 1609986 - RNA, 19 nt, Artificial Sequence
  Description of Artificial Sequence: Synthetic oligonucleotide
ucacaacaaaguugacuug

SEQ ID NO: 1609987 - RNA, 19 nt, Artificial Sequence
  Description of Artificial Sequence: Synthetic oligonucleotide
ccuuaggaccccaucaugg

SEQ ID NO: 1609988 - RNA, 19 nt, Artificial Sequence
  Description of Artificial Sequence: Synthetic oligonucleotide
agaacggacaucagcagug

SEQ ID NO: 1609989 - RNA, 19 nt, Artificial Sequence
  Description of Artificial Sequence: Synthetic oligonucleotide
acagacgcaucccaagagu

SEQ ID NO: 1609990 - RNA, 19 nt, Artificial Sequence
  Description of Artificial Sequence: Synthetic oligonucleotide
ucacgucugucacggaggc

SEQ ID NO: 1609991 - RNA, 19 nt, Artificial Sequence
  Description of Artificial Sequence: Synthetic oligonucleotide
gugaacacgaagagugagg

SEQ ID NO: 1609992 - RNA, 19 nt, Artificial Sequence
  Description of Artificial Sequence: Synthetic oligonucleotide
cagucugauacugaauuac

SEQ ID NO: 1609993 - RNA, 19 nt, Artificial Sequence
  Description of Artificial Sequence: Synthetic oligonucleotide
ucauaccacuggcuuacca

SEQ ID NO: 1609994 - RNA, 19 nt, Artificial Sequence
  Description of Artificial Sequence: Synthetic oligonucleotide
agaauuagaucgguuuugu

SEQ ID NO: 1609995 - RNA, 19 nt, Artificial Sequence
  Description of Artificial Sequence: Synthetic oligonucleotide
gaucgguuuuguacaagag

SEQ ID NO: 1609996 - RNA, 19 nt, Artificial Sequence
  Description of Artificial Sequence: Synthetic oligonucleotide
ccgcaaaagguaaauaaag

SEQ ID NO: 1609997 - RNA, 19 nt, Artificial Sequence
  Description of Artificial Sequence: Synthetic oligonucleotide
aaaucacaacaaaguugac

SEQ ID NO: 1609998 - RNA, 19 nt, Artificial Sequence
  Description of Artificial Sequence: Synthetic oligonucleotide
uccagcauugggagaaggu

SEQ ID NO: 1609999 - RNA, 19 nt, Artificial Sequence
  Description of Artificial Sequence: Synthetic oligonucleotide
cucuccgccagacaguuuc

SEQ ID NO: 1610000 - RNA, 19 nt, Artificial Sequence
  Description of Artificial Sequence: Synthetic oligonucleotide
uugauguagcugcccaacu

SEQ ID NO: 1610001 - RNA, 19 nt, Artificial Sequence
  Description of Artificial Sequence: Synthetic oligonucleotide
ucgaacagucugauacuga

SEQ ID NO: 1610002 - RNA, 19 nt, Artificial Sequence
  Description of Artificial Sequence: Synthetic oligonucleotide
gagaaugaauaagugucuc

SEQ ID NO: 1610003 - RNA, 19 nt, Artificial Sequence
  Description of Artificial Sequence: Synthetic oligonucleotide
aguggcccaaaaucccagg

SEQ ID NO: 1610004 - RNA, 19 nt, Artificial Sequence
  Description of Artificial Sequence: Synthetic oligonucleotide
cuccgcaaaagguaaauaa

SEQ ID NO: 1610005 - RNA, 19 nt, Artificial Sequence
  Description of Artificial Sequence: Synthetic oligonucleotide
uccaugcuugcuguaaaca

SEQ ID NO: 1610006 - RNA, 19 nt, Artificial Sequence
  Description of Artificial Sequence: Synthetic oligonucleotide
ugggaucacgucugucacg

SEQ ID NO: 1610007 - RNA, 19 nt, Artificial Sequence
  Description of Artificial Sequence: Synthetic oligonucleotide
acgucugucacggaggcca

SEQ ID NO: 1610008 - RNA, 19 nt, Artificial Sequence
  Description of Artificial Sequence: Synthetic oligonucleotide
ggauguuugucuauuacca

SEQ ID NO: 1610009 - RNA, 19 nt, Artificial Sequence
  Description of Artificial Sequence: Synthetic oligonucleotide
gggagggacaaguuugagg

SEQ ID NO: 1610010 - RNA, 19 nt, Artificial Sequence
  Description of Artificial Sequence: Synthetic oligonucleotide
gacuccauaguggagugca

SEQ ID NO: 1610011 - RNA, 19 nt, Artificial Sequence
  Description of Artificial Sequence: Synthetic oligonucleotide
ucggcucagcacagaacgg

SEQ ID NO: 1610012 - RNA, 19 nt, Artificial Sequence
  Description of Artificial Sequence: Synthetic oligonucleotide
gcagcgaaggccacgaacg

SEQ ID NO: 1610013 - RNA, 19 nt, Artificial Sequence
  Description of Artificial Sequence: Synthetic oligonucleotide
augaaaucgggagguguuc

SEQ ID NO: 1610014 - RNA, 19 nt, Artificial Sequence
  Description of Artificial Sequence: Synthetic oligonucleotide
agggcaacagacgcauccc

SEQ ID NO: 1610015 - RNA, 19 nt, Artificial Sequence
  Description of Artificial Sequence: Synthetic oligonucleotide
agugaaccugagggcaucc

SEQ ID NO: 1610016 - RNA, 19 nt, Artificial Sequence
  Description of Artificial Sequence: Synthetic oligonucleotide
cuuaagaaugcuucugcua

SEQ ID NO: 1610017 - RNA, 19 nt, Artificial Sequence
  Description of Artificial Sequence: Synthetic oligonucleotide
agugaagaauuagaucggu

SEQ ID NO: 1610018 - RNA, 19 nt, Artificial Sequence
  Description of Artificial Sequence: Synthetic oligonucleotide
uccagacuccauaguggag

SEQ ID NO: 1610019 - RNA, 19 nt, Artificial Sequence
  Description of Artificial Sequence: Synthetic oligonucleotide
gacaaguuugaggaagauc

SEQ ID NO: 1610020 - RNA, 19 nt, Artificial Sequence
  Description of Artificial Sequence: Synthetic oligonucleotide
aucacgucugucacggagg

SEQ ID NO: 1610021 - RNA, 19 nt, Artificial Sequence
  Description of Artificial Sequence: Synthetic oligonucleotide
aucgaacagucugauacug

SEQ ID NO: 1610022 - RNA, 19 nt, Artificial Sequence
  Description of Artificial Sequence: Synthetic oligonucleotide
aacgugcgcagccccagca

SEQ ID NO: 1610023 - RNA, 19 nt, Artificial Sequence
  Description of Artificial Sequence: Synthetic oligonucleotide
aagaguucucccucccuuu

SEQ ID NO: 1610024 - RNA, 19 nt, Artificial Sequence
  Description of Artificial Sequence: Synthetic oligonucleotide
gaaugaauaagugucucau

SEQ ID NO: 1610025 - RNA, 19 nt, Artificial Sequence
  Description of Artificial Sequence: Synthetic oligonucleotide
acuggcuuaccacuucuaa

SEQ ID NO: 1610026 - RNA, 19 nt, Artificial Sequence
  Description of Artificial Sequence: Synthetic oligonucleotide
aaccggacaggauguuugu

SEQ ID NO: 1610027 - RNA, 19 nt, Artificial Sequence
  Description of Artificial Sequence: Synthetic oligonucleotide
agccauaaauuuccaugcu

SEQ ID NO: 1610028 - RNA, 19 nt, Artificial Sequence
  Description of Artificial Sequence: Synthetic oligonucleotide
gaagagugaggcugcuuca

SEQ ID NO: 1610029 - RNA, 19 nt, Artificial Sequence
  Description of Artificial Sequence: Synthetic oligonucleotide
gggaucacgucugucacgg

SEQ ID NO: 1610030 - RNA, 19 nt, Artificial Sequence
  Description of Artificial Sequence: Synthetic oligonucleotide
acacgaagagugaggcugc

SEQ ID NO: 1610031 - RNA, 19 nt, Artificial Sequence
  Description of Artificial Sequence: Synthetic oligonucleotide
caucaucccgaugaccccg

SEQ ID NO: 1610032 - RNA, 19 nt, Artificial Sequence
  Description of Artificial Sequence: Synthetic oligonucleotide
uaccgugcggaucugccuc

SEQ ID NO: 1610033 - RNA, 19 nt, Artificial Sequence
  Description of Artificial Sequence: Synthetic oligonucleotide
uuccaugcuugcuguaaac

SEQ ID NO: 1610034 - RNA, 19 nt, Artificial Sequence
  Description of Artificial Sequence: Synthetic oligonucleotide
ucacauuggacagggcaac

SEQ ID NO: 1610035 - RNA, 19 nt, Artificial Sequence
  Description of Artificial Sequence: Synthetic oligonucleotide
uuccauggagugugaacac

SEQ ID NO: 1610036 - RNA, 19 nt, Artificial Sequence
  Description of Artificial Sequence: Synthetic oligonucleotide
acugaauuaccgugcggau

SEQ ID NO: 1610037 - RNA, 19 nt, Artificial Sequence
  Description of Artificial Sequence: Synthetic oligonucleotide
gcuccgagggcagagaggg

SEQ ID NO: 1610038 - RNA, 19 nt, Artificial Sequence
  Description of Artificial Sequence: Synthetic oligonucleotide
ugauagggauggcauuguc

SEQ ID NO: 1610039 - RNA, 19 nt, Artificial Sequence
  Description of Artificial Sequence: Synthetic oligonucleotide
gauuugauagggauggcau

SEQ ID NO: 1610040 - RNA, 19 nt, Artificial Sequence
  Description of Artificial Sequence: Synthetic oligonucleotide
ggugagaaugaauaagugu

SEQ ID NO: 1610041 - RNA, 19 nt, Artificial Sequence
  Description of Artificial Sequence: Synthetic oligonucleotide
gcuauuguccaguuuaucu

SEQ ID NO: 1610042 - RNA, 19 nt, Artificial Sequence
  Description of Artificial Sequence: Synthetic oligonucleotide
gaaaucgggagguguucca

SEQ ID NO: 1610043 - RNA, 19 nt, Artificial Sequence
  Description of Artificial Sequence: Synthetic oligonucleotide
accgugcggaucugccucc

SEQ ID NO: 1610044 - RNA, 19 nt, Artificial Sequence
  Description of Artificial Sequence: Synthetic oligonucleotide
cugagggcauccagcauug

SEQ ID NO: 1610045 - RNA, 19 nt, Artificial Sequence
  Description of Artificial Sequence: Synthetic oligonucleotide
uccgccagacaguuucagc

SEQ ID NO: 1610046 - RNA, 19 nt, Artificial Sequence
  Description of Artificial Sequence: Synthetic oligonucleotide
ucccaagaguucucccucc

SEQ ID NO: 1610047 - RNA, 19 nt, Artificial Sequence
  Description of Artificial Sequence: Synthetic oligonucleotide
aaaaccggacaggauguuu

SEQ ID NO: 1610048 - RNA, 19 nt, Artificial Sequence
  Description of Artificial Sequence: Synthetic oligonucleotide
cugggaucacgucugucac

SEQ ID NO: 1610049 - RNA, 19 nt, Artificial Sequence
  Description of Artificial Sequence: Synthetic oligonucleotide
gagaggucuuugauguagc

SEQ ID NO: 1610050 - RNA, 19 nt, Artificial Sequence
  Description of Artificial Sequence: Synthetic oligonucleotide
cugggcuagucgauuccgg

SEQ ID NO: 1610051 - RNA, 19 nt, Artificial Sequence
  Description of Artificial Sequence: Synthetic oligonucleotide
agagugaggcugcuucaca

SEQ ID NO: 1610052 - RNA, 19 nt, Artificial Sequence
  Description of Artificial Sequence: Synthetic oligonucleotide
cuucaccugggcuagucga

SEQ ID NO: 1610053 - RNA, 19 nt, Artificial Sequence
  Description of Artificial Sequence: Synthetic oligonucleotide
agaaugcuucugcuauugu

SEQ ID NO: 1610054 - RNA, 19 nt, Artificial Sequence
  Description of Artificial Sequence: Synthetic oligonucleotide
uuaccgugcggaucugccu

SEQ ID NO: 1610055 - RNA, 19 nt, Artificial Sequence
  Description of Artificial Sequence: Synthetic oligonucleotide
gcaacagacgcaucccaag

SEQ ID NO: 1610056 - RNA, 19 nt, Artificial Sequence
  Description of Artificial Sequence: Synthetic oligonucleotide
gaggaugaaaucgggaggu

SEQ ID NO: 1610057 - RNA, 19 nt, Artificial Sequence
  Description of Artificial Sequence: Synthetic oligonucleotide
aggauuugauagggauggc

SEQ ID NO: 1610058 - RNA, 19 nt, Artificial Sequence
  Description of Artificial Sequence: Synthetic oligonucleotide
cuagucgauuccgggacag

SEQ ID NO: 1610059 - RNA, 19 nt, Artificial Sequence
  Description of Artificial Sequence: Synthetic oligonucleotide
cagucuggccccauguguc

SEQ ID NO: 1610060 - RNA, 19 nt, Artificial Sequence
  Description of Artificial Sequence: Synthetic oligonucleotide
aacggacaucagcagugaa

SEQ ID NO: 1610061 - RNA, 19 nt, Artificial Sequence
  Description of Artificial Sequence: Synthetic oligonucleotide
agaaauccacauggggucu

SEQ ID NO: 1610062 - RNA, 19 nt, Artificial Sequence
  Description of Artificial Sequence: Synthetic oligonucleotide
auaucauaucgaacagucu

SEQ ID NO: 1610063 - RNA, 19 nt, Artificial Sequence
  Description of Artificial Sequence: Synthetic oligonucleotide
ugcguccgcaucaucccga

SEQ ID NO: 1610064 - RNA, 19 nt, Artificial Sequence
  Description of Artificial Sequence: Synthetic oligonucleotide
gguaaauaaagaagcucca

SEQ ID NO: 1610065 - RNA, 19 nt, Artificial Sequence
  Description of Artificial Sequence: Synthetic oligonucleotide
aguuauccaggaucacaau

SEQ ID NO: 1610066 - RNA, 19 nt, Artificial Sequence
  Description of Artificial Sequence: Synthetic oligonucleotide
cugaauuaccgugcggauc

SEQ ID NO: 1610067 - RNA, 19 nt, Artificial Sequence
  Description of Artificial Sequence: Synthetic oligonucleotide
ucugucacggaggccaguc

SEQ ID NO: 1610068 - RNA, 19 nt, Artificial Sequence
  Description of Artificial Sequence: Synthetic oligonucleotide
aaagugcagugcugucuau

SEQ ID NO: 1610069 - RNA, 19 nt, Artificial Sequence
  Description of Artificial Sequence: Synthetic oligonucleotide
gauagggauggcauugucu

SEQ ID NO: 1610070 - RNA, 19 nt, Artificial Sequence
  Description of Artificial Sequence: Synthetic oligonucleotide
uccgagggcagagagggau

SEQ ID NO: 1610071 - RNA, 19 nt, Artificial Sequence
  Description of Artificial Sequence: Synthetic oligonucleotide
cuguggaccacagagaggu

SEQ ID NO: 1610072 - RNA, 19 nt, Artificial Sequence
  Description of Artificial Sequence: Synthetic oligonucleotide
gaauuagaucgguuuugua

SEQ ID NO: 1610073 - RNA, 19 nt, Artificial Sequence
  Description of Artificial Sequence: Synthetic oligonucleotide
cauuggacagggcaacaga

SEQ ID NO: 1610074 - RNA, 19 nt, Artificial Sequence
  Description of Artificial Sequence: Synthetic oligonucleotide
uccgcaucaucccgaugac

SEQ ID NO: 1610075 - RNA, 19 nt, Artificial Sequence
  Description of Artificial Sequence: Synthetic oligonucleotide
uaggccuuaggaccccauc

SEQ ID NO: 1610076 - RNA, 19 nt, Artificial Sequence
  Description of Artificial Sequence: Synthetic oligonucleotide
ggcuagucgauuccgggac

SEQ ID NO: 1610077 - RNA, 19 nt, Artificial Sequence
  Description of Artificial Sequence: Synthetic oligonucleotide
caaguuugaggaagaucca

SEQ ID NO: 1610078 - RNA, 19 nt, Artificial Sequence
  Description of Artificial Sequence: Synthetic oligonucleotide
ggagugcagagcuccgagg

SEQ ID NO: 1610079 - RNA, 19 nt, Artificial Sequence
  Description of Artificial Sequence: Synthetic oligonucleotide
uccaaagugcagugcuguc

SEQ ID NO: 1610080 - RNA, 19 nt, Artificial Sequence
  Description of Artificial Sequence: Synthetic oligonucleotide
cuauaguaucuccucuuaa

SEQ ID NO: 1610081 - RNA, 19 nt, Artificial Sequence
  Description of Artificial Sequence: Synthetic oligonucleotide
aggagauaagggaaggaua

SEQ ID NO: 1610082 - RNA, 19 nt, Artificial Sequence
  Description of Artificial Sequence: Synthetic oligonucleotide
caggaucacaaugcuggag

SEQ ID NO: 1610083 - RNA, 19 nt, Artificial Sequence
  Description of Artificial Sequence: Synthetic oligonucleotide
guuucggcucagcacagaa

SEQ ID NO: 1610084 - RNA, 19 nt, Artificial Sequence
  Description of Artificial Sequence: Synthetic oligonucleotide
caacagacgcaucccaaga

SEQ ID NO: 1610085 - RNA, 19 nt, Artificial Sequence
  Description of Artificial Sequence: Synthetic oligonucleotide
gggucucuuauguacaaaa

SEQ ID NO: 1610086 - RNA, 19 nt, Artificial Sequence
  Description of Artificial Sequence: Synthetic oligonucleotide
accccaacucagguggagg

SEQ ID NO: 1610087 - RNA, 19 nt, Artificial Sequence
  Description of Artificial Sequence: Synthetic oligonucleotide
cagacaguuucagcucucc

SEQ ID NO: 1610088 - RNA, 19 nt, Artificial Sequence
  Description of Artificial Sequence: Synthetic oligonucleotide
cgguguggcauuuccaugg

SEQ ID NO: 1610089 - RNA, 19 nt, Artificial Sequence
  Description of Artificial Sequence: Synthetic oligonucleotide
gagauaagggaaggauauc

SEQ ID NO: 1610090 - RNA, 19 nt, Artificial Sequence
  Description of Artificial Sequence: Synthetic oligonucleotide
cacgaacgugcgcagcccc

SEQ ID NO: 1610091 - RNA, 19 nt, Artificial Sequence
  Description of Artificial Sequence: Synthetic oligonucleotide
gaaggccacgaacgugcgc

SEQ ID NO: 1610092 - RNA, 19 nt, Artificial Sequence
  Description of Artificial Sequence: Synthetic oligonucleotide
ugcggaucugccuccgcaa

SEQ ID NO: 1610093 - RNA, 19 nt, Artificial Sequence
  Description of Artificial Sequence: Synthetic oligonucleotide
aggaccccaucauggugag

SEQ ID NO: 1610094 - RNA, 19 nt, Artificial Sequence
  Description of Artificial Sequence: Synthetic oligonucleotide
uugucuggguggcuccuau

SEQ ID NO: 1610095 - RNA, 19 nt, Artificial Sequence
  Description of Artificial Sequence: Synthetic oligonucleotide
auaguggagugcagagcuc

SEQ ID NO: 1610096 - RNA, 19 nt, Artificial Sequence
  Description of Artificial Sequence: Synthetic oligonucleotide
ggaucugccuccgcaaaag

SEQ ID NO: 1610097 - RNA, 19 nt, Artificial Sequence
  Description of Artificial Sequence: Synthetic oligonucleotide
ugcuauuguccaguuuauc

SEQ ID NO: 1610098 - RNA, 19 nt, Artificial Sequence
  Description of Artificial Sequence: Synthetic oligonucleotide
ggaguuauccaggaucaca

SEQ ID NO: 1610099 - RNA, 19 nt, Artificial Sequence
  Description of Artificial Sequence: Synthetic oligonucleotide
ggauuugauagggauggca

SEQ ID NO: 1610100 - RNA, 19 nt, Artificial Sequence
  Description of Artificial Sequence: Synthetic oligonucleotide
ucuccgccagacaguuuca

SEQ ID NO: 1610101 - RNA, 19 nt, Artificial Sequence
  Description of Artificial Sequence: Synthetic oligonucleotide
gcgaaggccacgaacgugc

SEQ ID NO: 1610102 - RNA, 19 nt, Artificial Sequence
  Description of Artificial Sequence: Synthetic oligonucleotide
gauaagggaaggauaucau

SEQ ID NO: 1610103 - RNA, 19 nt, Artificial Sequence
  Description of Artificial Sequence: Synthetic oligonucleotide
ucccgguguggcauuucca

SEQ ID NO: 1610104 - RNA, 19 nt, Artificial Sequence
  Description of Artificial Sequence: Synthetic oligonucleotide
uucugcuauuguccaguuu

SEQ ID NO: 1610105 - RNA, 19 nt, Artificial Sequence
  Description of Artificial Sequence: Synthetic oligonucleotide
cugcguccgcaucaucccg

SEQ ID NO: 1610106 - RNA, 19 nt, Artificial Sequence
  Description of Artificial Sequence: Synthetic oligonucleotide
gcugcccaacuccaaagug

SEQ ID NO: 1610107 - RNA, 19 nt, Artificial Sequence
  Description of Artificial Sequence: Synthetic oligonucleotide
ucccgaugaccccggcacc

SEQ ID NO: 1610108 - RNA, 19 nt, Artificial Sequence
  Description of Artificial Sequence: Synthetic oligonucleotide
aguggagugcagagcuccg

SEQ ID NO: 1610109 - RNA, 19 nt, Artificial Sequence
  Description of Artificial Sequence: Synthetic oligonucleotide
gcagacccugcccaggcag

SEQ ID NO: 1610110 - RNA, 19 nt, Artificial Sequence
  Description of Artificial Sequence: Synthetic oligonucleotide
caacuccaaagugcagugc

SEQ ID NO: 1610111 - RNA, 19 nt, Artificial Sequence
  Description of Artificial Sequence: Synthetic oligonucleotide
uucuucaccugggcuaguc

SEQ ID NO: 1610112 - RNA, 19 nt, Artificial Sequence
  Description of Artificial Sequence: Synthetic oligonucleotide
ccucacauuggacagggca

SEQ ID NO: 1610113 - RNA, 19 nt, Artificial Sequence
  Description of Artificial Sequence: Synthetic oligonucleotide
gaugaaaucgggagguguu

SEQ ID NO: 1610114 - RNA, 19 nt, Artificial Sequence
  Description of Artificial Sequence: Synthetic oligonucleotide
ggagauaagggaaggauau

SEQ ID NO: 1610115 - RNA, 19 nt, Artificial Sequence
  Description of Artificial Sequence: Synthetic oligonucleotide
accggacaggauguuuguc

SEQ ID NO: 1610116 - RNA, 19 nt, Artificial Sequence
  Description of Artificial Sequence: Synthetic oligonucleotide
gcucauaccacuggcuuac

SEQ ID NO: 1610117 - RNA, 19 nt, Artificial Sequence
  Description of Artificial Sequence: Synthetic oligonucleotide
guaagggagggacaaguuu

SEQ ID NO: 1610118 - RNA, 19 nt, Artificial Sequence
  Description of Artificial Sequence: Synthetic oligonucleotide
ggcagcgaaggccacgaac

SEQ ID NO: 1610119 - RNA, 19 nt, Artificial Sequence
  Description of Artificial Sequence: Synthetic oligonucleotide
cauugggagaagguugaga

SEQ ID NO: 1610120 - RNA, 19 nt, Artificial Sequence
  Description of Artificial Sequence: Synthetic oligonucleotide
ugccucuccgccagacagu

SEQ ID NO: 1610121 - RNA, 19 nt, Artificial Sequence
  Description of Artificial Sequence: Synthetic oligonucleotide
cugucacggaggccagucc

SEQ ID NO: 1610122 - RNA, 19 nt, Artificial Sequence
  Description of Artificial Sequence: Synthetic oligonucleotide
cgcaaaagguaaauaaaga

SEQ ID NO: 1610123 - RNA, 19 nt, Artificial Sequence
  Description of Artificial Sequence: Synthetic oligonucleotide
gaacgugcgcagccccagc

SEQ ID NO: 1610124 - RNA, 19 nt, Artificial Sequence
  Description of Artificial Sequence: Synthetic oligonucleotide
cacauggggucucuuaugu

SEQ ID NO: 1610125 - RNA, 19 nt, Artificial Sequence
  Description of Artificial Sequence: Synthetic oligonucleotide
accccggcaccgccggccc

SEQ ID NO: 1610126 - RNA, 19 nt, Artificial Sequence
  Description of Artificial Sequence: Synthetic oligonucleotide
caccugggcuagucgauuc

SEQ ID NO: 1610127 - RNA, 19 nt, Artificial Sequence
  Description of Artificial Sequence: Synthetic oligonucleotide
cuuaggaccccaucauggu

SEQ ID NO: 1610128 - RNA, 19 nt, Artificial Sequence
  Description of Artificial Sequence: Synthetic oligonucleotide
ggcuccuauaagccccggg

SEQ ID NO: 1610129 - RNA, 19 nt, Artificial Sequence
  Description of Artificial Sequence: Synthetic oligonucleotide
aggaugaaaucgggaggug

SEQ ID NO: 1610130 - RNA, 19 nt, Artificial Sequence
  Description of Artificial Sequence: Synthetic oligonucleotide
agccuauguuggugaaggu

SEQ ID NO: 1610131 - RNA, 19 nt, Artificial Sequence
  Description of Artificial Sequence: Synthetic oligonucleotide
aguaagggagggacaaguu

SEQ ID NO: 1610132 - RNA, 19 nt, Artificial Sequence
  Description of Artificial Sequence: Synthetic oligonucleotide
gucuauaguaucuccucuu

SEQ ID NO: 1610133 - RNA, 19 nt, Artificial Sequence
  Description of Artificial Sequence: Synthetic oligonucleotide
cauggagugugaacacgaa

SEQ ID NO: 1610134 - RNA, 19 nt, Artificial Sequence
  Description of Artificial Sequence: Synthetic oligonucleotide
agcuccgagggcagagagg

SEQ ID NO: 1610135 - RNA, 19 nt, Artificial Sequence
  Description of Artificial Sequence: Synthetic oligonucleotide
acauggggucucuuaugua

SEQ ID NO: 1610136 - RNA, 19 nt, Artificial Sequence
  Description of Artificial Sequence: Synthetic oligonucleotide
cuccauaguggagugcaga

SEQ ID NO: 1610137 - RNA, 19 nt, Artificial Sequence
  Description of Artificial Sequence: Synthetic oligonucleotide
gagggacaaguuugaggaa

SEQ ID NO: 1610138 - RNA, 19 nt, Artificial Sequence
  Description of Artificial Sequence: Synthetic oligonucleotide
acacugcguccgcaucauc

SEQ ID NO: 1610139 - RNA, 19 nt, Artificial Sequence
  Description of Artificial Sequence: Synthetic oligonucleotide
cacugaaccaggauuugau

SEQ ID NO: 1610140 - RNA, 19 nt, Artificial Sequence
  Description of Artificial Sequence: Synthetic oligonucleotide
gugcggaucugccuccgca

SEQ ID NO: 1610141 - RNA, 19 nt, Artificial Sequence
  Description of Artificial Sequence: Synthetic oligonucleotide
ugccuccgcaaaagguaaa

SEQ ID NO: 1610142 - RNA, 19 nt, Artificial Sequence
  Description of Artificial Sequence: Synthetic oligonucleotide
cugccuccgcaaaagguaa

SEQ ID NO: 1610143 - RNA, 19 nt, Artificial Sequence
  Description of Artificial Sequence: Synthetic oligonucleotide
gccuuaggaccccaucaug

SEQ ID NO: 1610144 - RNA, 19 nt, Artificial Sequence
  Description of Artificial Sequence: Synthetic oligonucleotide
aggccacgaacgugcgcag

SEQ ID NO: 1610145 - RNA, 19 nt, Artificial Sequence
  Description of Artificial Sequence: Synthetic oligonucleotide
gaauuaccgugcggaucug

SEQ ID NO: 1610146 - RNA, 19 nt, Artificial Sequence
  Description of Artificial Sequence: Synthetic oligonucleotide
gucacggaggccaguccug

SEQ ID NO: 1610147 - RNA, 19 nt, Artificial Sequence
  Description of Artificial Sequence: Synthetic oligonucleotide
cacggaggccaguccugcc

SEQ ID NO: 1610148 - RNA, 19 nt, Artificial Sequence
  Description of Artificial Sequence: Synthetic oligonucleotide
uaaacaccacaagcucaua

SEQ ID NO: 1610149 - RNA, 19 nt, Artificial Sequence
  Description of Artificial Sequence: Synthetic oligonucleotide
guggaccacagagaggucu

SEQ ID NO: 1610150 - RNA, 19 nt, Artificial Sequence
  Description of Artificial Sequence: Synthetic oligonucleotide
ugcgcagccccagcagaca

SEQ ID NO: 1610151 - RNA, 19 nt, Artificial Sequence
  Description of Artificial Sequence: Synthetic oligonucleotide
uagucgauuccgggacaga

SEQ ID NO: 1610152 - RNA, 19 nt, Artificial Sequence
  Description of Artificial Sequence: Synthetic oligonucleotide
ugucuggguggcuccuaua

SEQ ID NO: 1610153 - RNA, 19 nt, Artificial Sequence
  Description of Artificial Sequence: Synthetic oligonucleotide
ggcuuaccacuucuaagaa

SEQ ID NO: 1610154 - RNA, 19 nt, Artificial Sequence
  Description of Artificial Sequence: Synthetic oligonucleotide
agguuucggcucagcacag

SEQ ID NO: 1610155 - RNA, 19 nt, Artificial Sequence
  Description of Artificial Sequence: Synthetic oligonucleotide
ggcaccgccggccccgggg

SEQ ID NO: 1610156 - RNA, 19 nt, Artificial Sequence
  Description of Artificial Sequence: Synthetic oligonucleotide
cuccgccagacaguuucag

SEQ ID NO: 1610157 - RNA, 19 nt, Artificial Sequence
  Description of Artificial Sequence: Synthetic oligonucleotide
gggcuagucgauuccggga

SEQ ID NO: 1610158 - RNA, 19 nt, Artificial Sequence
  Description of Artificial Sequence: Synthetic oligonucleotide
gacccugcccaggcagucc

SEQ ID NO: 1610159 - RNA, 19 nt, Artificial Sequence
  Description of Artificial Sequence: Synthetic oligonucleotide
ucaccugggcuagucgauu

SEQ ID NO: 1610160 - RNA, 19 nt, Artificial Sequence
  Description of Artificial Sequence: Synthetic oligonucleotide
ccugggcuagucgauuccg

SEQ ID NO: 1610161 - RNA, 19 nt, Artificial Sequence
  Description of Artificial Sequence: Synthetic oligonucleotide
cauccagcauugggagaag

SEQ ID NO: 1610162 - RNA, 19 nt, Artificial Sequence
  Description of Artificial Sequence: Synthetic oligonucleotide
gagagggaugggaggggca

SEQ ID NO: 1610163 - RNA, 19 nt, Artificial Sequence
  Description of Artificial Sequence: Synthetic oligonucleotide
ggauaucauaucgaacagu

SEQ ID NO: 1610164 - RNA, 19 nt, Artificial Sequence
  Description of Artificial Sequence: Synthetic oligonucleotide
cucauaccacuggcuuacc

SEQ ID NO: 1610165 - RNA, 19 nt, Artificial Sequence
  Description of Artificial Sequence: Synthetic oligonucleotide
cagugaaccugagggcauc

SEQ ID NO: 1610166 - RNA, 19 nt, Artificial Sequence
  Description of Artificial Sequence: Synthetic oligonucleotide
accugucccgguguggcau

SEQ ID NO: 1610167 - RNA, 19 nt, Artificial Sequence
  Description of Artificial Sequence: Synthetic oligonucleotide
gaacagucugauacugaau

SEQ ID NO: 1610168 - RNA, 19 nt, Artificial Sequence
  Description of Artificial Sequence: Synthetic oligonucleotide
cuguaggccuuaggacccc

SEQ ID NO: 1610169 - RNA, 19 nt, Artificial Sequence
  Description of Artificial Sequence: Synthetic oligonucleotide
gagguguuccaggccucac

SEQ ID NO: 1610170 - RNA, 19 nt, Artificial Sequence
  Description of Artificial Sequence: Synthetic oligonucleotide
ccaguuuaucugccacagc

SEQ ID NO: 1610171 - RNA, 19 nt, Artificial Sequence
  Description of Artificial Sequence: Synthetic oligonucleotide
gggucacugaaccaggauu

SEQ ID NO: 1610172 - RNA, 19 nt, Artificial Sequence
  Description of Artificial Sequence: Synthetic oligonucleotide
gccuucaccugucccggug

SEQ ID NO: 1610173 - RNA, 19 nt, Artificial Sequence
  Description of Artificial Sequence: Synthetic oligonucleotide
cagacgcaucccaagaguu

SEQ ID NO: 1610174 - RNA, 19 nt, Artificial Sequence
  Description of Artificial Sequence: Synthetic oligonucleotide
gcugucuauaguaucuccu

SEQ ID NO: 1610175 - RNA, 19 nt, Artificial Sequence
  Description of Artificial Sequence: Synthetic oligonucleotide
acagggcaacagacgcauc

SEQ ID NO: 1610176 - RNA, 19 nt, Artificial Sequence
  Description of Artificial Sequence: Synthetic oligonucleotide
cacauuggacagggcaaca

SEQ ID NO: 1610177 - RNA, 19 nt, Artificial Sequence
  Description of Artificial Sequence: Synthetic oligonucleotide
accccaucauggugagaau

SEQ ID NO: 1610178 - RNA, 19 nt, Artificial Sequence
  Description of Artificial Sequence: Synthetic oligonucleotide
gccauaaauuuccaugcuu

SEQ ID NO: 1610179 - RNA, 19 nt, Artificial Sequence
  Description of Artificial Sequence: Synthetic oligonucleotide
cauuuccauggagugugaa

SEQ ID NO: 1610180 - RNA, 19 nt, Artificial Sequence
  Description of Artificial Sequence: Synthetic oligonucleotide
gggcaacagacgcauccca

SEQ ID NO: 1610181 - RNA, 19 nt, Artificial Sequence
  Description of Artificial Sequence: Synthetic oligonucleotide
gcuagucgauuccgggaca

SEQ ID NO: 1610182 - RNA, 19 nt, Artificial Sequence
  Description of Artificial Sequence: Synthetic oligonucleotide
cagagccuauguuggugaa

SEQ ID NO: 1610183 - RNA, 19 nt, Artificial Sequence
  Description of Artificial Sequence: Synthetic oligonucleotide
cacgucugucacggaggcc

SEQ ID NO: 1610184 - RNA, 19 nt, Artificial Sequence
  Description of Artificial Sequence: Synthetic oligonucleotide
cucugggaucacgucuguc

SEQ ID NO: 1610185 - RNA, 19 nt, Artificial Sequence
  Description of Artificial Sequence: Synthetic oligonucleotide
cccgaugaccccggcaccg

SEQ ID NO: 1610186 - RNA, 19 nt, Artificial Sequence
  Description of Artificial Sequence: Synthetic oligonucleotide
gugcgcagccccagcagac

SEQ ID NO: 1610187 - RNA, 19 nt, Artificial Sequence
  Description of Artificial Sequence: Synthetic oligonucleotide
uuccgggacagaggagaua

SEQ ID NO: 1610188 - RNA, 19 nt, Artificial Sequence
  Description of Artificial Sequence: Synthetic oligonucleotide
acgaacgugcgcagcccca

SEQ ID NO: 1610189 - RNA, 19 nt, Artificial Sequence
  Description of Artificial Sequence: Synthetic oligonucleotide
gugaagaauuagaucgguu

SEQ ID NO: 1610190 - RNA, 19 nt, Artificial Sequence
  Description of Artificial Sequence: Synthetic oligonucleotide
ggugaagguuucggcucag

SEQ ID NO: 1610191 - RNA, 19 nt, Artificial Sequence
  Description of Artificial Sequence: Synthetic oligonucleotide
ccgccagacaguuucagcu

SEQ ID NO: 1610192 - RNA, 19 nt, Artificial Sequence
  Description of Artificial Sequence: Synthetic oligonucleotide
cugcuauuguccaguuuau

SEQ ID NO: 1610193 - RNA, 19 nt, Artificial Sequence
  Description of Artificial Sequence: Synthetic oligonucleotide
gugcagugcugucuauagu

SEQ ID NO: 1610194 - RNA, 19 nt, Artificial Sequence
  Description of Artificial Sequence: Synthetic oligonucleotide
ggcaacagacgcaucccaa

SEQ ID NO: 1610195 - RNA, 19 nt, Artificial Sequence
  Description of Artificial Sequence: Synthetic oligonucleotide
uggcagcgaaggccacgaa

SEQ ID NO: 1610196 - RNA, 19 nt, Artificial Sequence
  Description of Artificial Sequence: Synthetic oligonucleotide
guuugucuauuaccaccuu

SEQ ID NO: 1610197 - RNA, 19 nt, Artificial Sequence
  Description of Artificial Sequence: Synthetic oligonucleotide
gacacugcguccgcaucau

SEQ ID NO: 1610198 - RNA, 19 nt, Artificial Sequence
  Description of Artificial Sequence: Synthetic oligonucleotide
gggaguuauccaggaucac

SEQ ID NO: 1610199 - RNA, 19 nt, Artificial Sequence
  Description of Artificial Sequence: Synthetic oligonucleotide
ggagguguuccaggccuca

SEQ ID NO: 1610200 - RNA, 19 nt, Artificial Sequence
  Description of Artificial Sequence: Synthetic oligonucleotide
ggccuuaggaccccaucau

SEQ ID NO: 1610201 - RNA, 19 nt, Artificial Sequence
  Description of Artificial Sequence: Synthetic oligonucleotide
ccacgaacgugcgcagccc

SEQ ID NO: 1610202 - RNA, 19 nt, Artificial Sequence
  Description of Artificial Sequence: Synthetic oligonucleotide
cccaacuccaaagugcagu

SEQ ID NO: 1610203 - RNA, 19 nt, Artificial Sequence
  Description of Artificial Sequence: Synthetic oligonucleotide
cagcugucaccagagccua

SEQ ID NO: 1610204 - RNA, 19 nt, Artificial Sequence
  Description of Artificial Sequence: Synthetic oligonucleotide
caccugucccgguguggca

SEQ ID NO: 1610205 - RNA, 19 nt, Artificial Sequence
  Description of Artificial Sequence: Synthetic oligonucleotide
cuucugcuauuguccaguu

SEQ ID NO: 1610206 - RNA, 19 nt, Artificial Sequence
  Description of Artificial Sequence: Synthetic oligonucleotide
ccgcaucaucccgaugacc

SEQ ID NO: 1610207 - RNA, 19 nt, Artificial Sequence
  Description of Artificial Sequence: Synthetic oligonucleotide
ggacaggauguuugucuau

SEQ ID NO: 1610208 - RNA, 19 nt, Artificial Sequence
  Description of Artificial Sequence: Synthetic oligonucleotide
gccuauguuggugaagguu

SEQ ID NO: 1610209 - RNA, 19 nt, Artificial Sequence
  Description of Artificial Sequence: Synthetic oligonucleotide
ccgggacagaggagauaag

SEQ ID NO: 1610210 - RNA, 19 nt, Artificial Sequence
  Description of Artificial Sequence: Synthetic oligonucleotide
gguuucggcucagcacaga

SEQ ID NO: 1610211 - RNA, 19 nt, Artificial Sequence
  Description of Artificial Sequence: Synthetic oligonucleotide
ggccacgaacgugcgcagc

SEQ ID NO: 1610212 - RNA, 19 nt, Artificial Sequence
  Description of Artificial Sequence: Synthetic oligonucleotide
gcccaacuccaaagugcag

SEQ ID NO: 1610213 - RNA, 19 nt, Artificial Sequence
  Description of Artificial Sequence: Synthetic oligonucleotide
ggggucucuuauguacaaa

SEQ ID NO: 1610214 - RNA, 19 nt, Artificial Sequence
  Description of Artificial Sequence: Synthetic oligonucleotide
cauugucuggguggcuccu

SEQ ID NO: 1610215 - RNA, 19 nt, Artificial Sequence
  Description of Artificial Sequence: Synthetic oligonucleotide
gcauuuccauggaguguga

SEQ ID NO: 1610216 - RNA, 19 nt, Artificial Sequence
  Description of Artificial Sequence: Synthetic oligonucleotide
cgaacgugcgcagccccag

SEQ ID NO: 1610217 - RNA, 19 nt, Artificial Sequence
  Description of Artificial Sequence: Synthetic oligonucleotide
ggggucacugaaccaggau

SEQ ID NO: 1610218 - RNA, 19 nt, Artificial Sequence
  Description of Artificial Sequence: Synthetic oligonucleotide
cggacaggauguuugucua

SEQ ID NO: 1610219 - RNA, 19 nt, Artificial Sequence
  Description of Artificial Sequence: Synthetic oligonucleotide
gggagguguuccaggccuc

SEQ ID NO: 1610220 - RNA, 19 nt, Artificial Sequence
  Description of Artificial Sequence: Synthetic oligonucleotide
agcugucaccagagccuau

SEQ ID NO: 1610221 - RNA, 19 nt, Artificial Sequence
  Description of Artificial Sequence: Synthetic oligonucleotide
ccagcauugggagaagguu

SEQ ID NO: 1610222 - RNA, 19 nt, Artificial Sequence
  Description of Artificial Sequence: Synthetic oligonucleotide
ccgaugaccccggcaccgc

SEQ ID NO: 1610223 - RNA, 19 nt, Artificial Sequence
  Description of Artificial Sequence: Synthetic oligonucleotide
cacgaagagugaggcugcu

SEQ ID NO: 1610224 - RNA, 19 nt, Artificial Sequence
  Description of Artificial Sequence: Synthetic oligonucleotide
cggcucagcacagaacgga

SEQ ID NO: 1610225 - RNA, 19 nt, Artificial Sequence
  Description of Artificial Sequence: Synthetic oligonucleotide
ccacuggcuuaccacuucu

SEQ ID NO: 1610226 - RNA, 19 nt, Artificial Sequence
  Description of Artificial Sequence: Synthetic oligonucleotide
ccuccgcaaaagguaaaua

SEQ ID NO: 1610227 - RNA, 19 nt, Artificial Sequence
  Description of Artificial Sequence: Synthetic oligonucleotide
guaggccuuaggaccccau

SEQ ID NO: 1610228 - RNA, 19 nt, Artificial Sequence
  Description of Artificial Sequence: Synthetic oligonucleotide
gccuccgcaaaagguaaau

SEQ ID NO: 1610229 - RNA, 19 nt, Artificial Sequence
  Description of Artificial Sequence: Synthetic oligonucleotide
ccgugcggaucugccuccg

SEQ ID NO: 1610230 - RNA, 19 nt, Artificial Sequence
  Description of Artificial Sequence: Synthetic oligonucleotide
cgugcggaucugccuccgc

SEQ ID NO: 1610231 - RNA, 19 nt, Artificial Sequence
  Description of Artificial Sequence: Synthetic oligonucleotide
ccaccccaacucaggugga

SEQ ID NO: 1610232 - RNA, 19 nt, Artificial Sequence
  Description of Artificial Sequence: Synthetic oligonucleotide
gccucuccgccagacaguu

SEQ ID NO: 1610233 - RNA, 19 nt, Artificial Sequence
  Description of Artificial Sequence: Synthetic oligonucleotide
cguccgcaucaucccgaug

SEQ ID NO: 1610234 - RNA, 19 nt, Artificial Sequence
  Description of Artificial Sequence: Synthetic oligonucleotide
ggaccccaucauggugaga

SEQ ID NO: 1610235 - RNA, 19 nt, Artificial Sequence
  Description of Artificial Sequence: Synthetic oligonucleotide
gcguccgcaucaucccgau

SEQ ID NO: 1610236 - RNA, 19 nt, Artificial Sequence
  Description of Artificial Sequence: Synthetic oligonucleotide
ggccuucaccugucccggu

SEQ ID NO: 1610237 - RNA, 19 nt, Artificial Sequence
  Description of Artificial Sequence: Synthetic oligonucleotide
ccugucccgguguggcauu

SEQ ID NO: 1610238 - RNA, 19 nt, Artificial Sequence
  Description of Artificial Sequence: Synthetic oligonucleotide
ccucuccgccagacaguuu

SEQ ID NO: 1610239 - RNA, 19 nt, Artificial Sequence
  Description of Artificial Sequence: Synthetic oligonucleotide
uuuagaaucaucaagcacu

SEQ ID NO: 1610240 - RNA, 19 nt, Artificial Sequence
  Description of Artificial Sequence: Synthetic oligonucleotide
aauaguggcagcuauuuuc

SEQ ID NO: 1610241 - RNA, 19 nt, Artificial Sequence
  Description of Artificial Sequence: Synthetic oligonucleotide
ucuucgaaaauuaagcuag

SEQ ID NO: 1610242 - RNA, 19 nt, Artificial Sequence
  Description of Artificial Sequence: Synthetic oligonucleotide
aaaucguuuguccuuagcg

SEQ ID NO: 1610243 - RNA, 19 nt, Artificial Sequence
  Description of Artificial Sequence: Synthetic oligonucleotide
uuaauuggcauacaaagga

SEQ ID NO: 1610244 - RNA, 19 nt, Artificial Sequence
  Description of Artificial Sequence: Synthetic oligonucleotide
aaauaguuccuuuugaaga

SEQ ID NO: 1610245 - RNA, 19 nt, Artificial Sequence
  Description of Artificial Sequence: Synthetic oligonucleotide
uuuaauuggcauacaaagg

SEQ ID NO: 1610246 - RNA, 19 nt, Artificial Sequence
  Description of Artificial Sequence: Synthetic oligonucleotide
aauuacuucuaaugacugc

SEQ ID NO: 1610247 - RNA, 19 nt, Artificial Sequence
  Description of Artificial Sequence: Synthetic oligonucleotide
caucuuauugacaaguugg

SEQ ID NO: 1610248 - RNA, 19 nt, Artificial Sequence
  Description of Artificial Sequence: Synthetic oligonucleotide
auguaauugauuuuguuug

SEQ ID NO: 1610249 - RNA, 19 nt, Artificial Sequence
  Description of Artificial Sequence: Synthetic oligonucleotide
aaauuaagcuagcaagguc

SEQ ID NO: 1610250 - RNA, 19 nt, Artificial Sequence
  Description of Artificial Sequence: Synthetic oligonucleotide
cuuauauucuucaauggag

SEQ ID NO: 1610251 - RNA, 19 nt, Artificial Sequence
  Description of Artificial Sequence: Synthetic oligonucleotide
ucagaauuacuucuaauga

SEQ ID NO: 1610252 - RNA, 19 nt, Artificial Sequence
  Description of Artificial Sequence: Synthetic oligonucleotide
aaucaucaagcacugauca

SEQ ID NO: 1610253 - RNA, 19 nt, Artificial Sequence
  Description of Artificial Sequence: Synthetic oligonucleotide
ugcucuucgaaaauuaagc

SEQ ID NO: 1610254 - RNA, 19 nt, Artificial Sequence
  Description of Artificial Sequence: Synthetic oligonucleotide
aaaguaucagcugauuuuc

SEQ ID NO: 1610255 - RNA, 19 nt, Artificial Sequence
  Description of Artificial Sequence: Synthetic oligonucleotide
aauuaagcuagcaagguca

SEQ ID NO: 1610256 - RNA, 19 nt, Artificial Sequence
  Description of Artificial Sequence: Synthetic oligonucleotide
cauggcuagaaauaguucc

SEQ ID NO: 1610257 - RNA, 19 nt, Artificial Sequence
  Description of Artificial Sequence: Synthetic oligonucleotide
ugauggaauggcaauacag

SEQ ID NO: 1610258 - RNA, 19 nt, Artificial Sequence
  Description of Artificial Sequence: Synthetic oligonucleotide
aaggagauaauaguggcag

SEQ ID NO: 1610259 - RNA, 19 nt, Artificial Sequence
  Description of Artificial Sequence: Synthetic oligonucleotide
ugaugguguuccaugaugg

SEQ ID NO: 1610260 - RNA, 19 nt, Artificial Sequence
  Description of Artificial Sequence: Synthetic oligonucleotide
agcaaggucaagcaauacc

SEQ ID NO: 1610261 - RNA, 19 nt, Artificial Sequence
  Description of Artificial Sequence: Synthetic oligonucleotide
aguaucagcugauuuuccc

SEQ ID NO: 1610262 - RNA, 19 nt, Artificial Sequence
  Description of Artificial Sequence: Synthetic oligonucleotide
acaaaggauacucuguguc

SEQ ID NO: 1610263 - RNA, 19 nt, Artificial Sequence
  Description of Artificial Sequence: Synthetic oligonucleotide
ucagcuauugaaccgagga

SEQ ID NO: 1610264 - RNA, 19 nt, Artificial Sequence
  Description of Artificial Sequence: Synthetic oligonucleotide
uuuauaggugugcaaagca

SEQ ID NO: 1610265 - RNA, 19 nt, Artificial Sequence
  Description of Artificial Sequence: Synthetic oligonucleotide
aacuccuaugacuuuguuc

SEQ ID NO: 1610266 - RNA, 19 nt, Artificial Sequence
  Description of Artificial Sequence: Synthetic oligonucleotide
aauauggugcacuucugca

SEQ ID NO: 1610267 - RNA, 19 nt, Artificial Sequence
  Description of Artificial Sequence: Synthetic oligonucleotide
aauggcaauacagcugggc

SEQ ID NO: 1610268 - RNA, 19 nt, Artificial Sequence
  Description of Artificial Sequence: Synthetic oligonucleotide
agugacguuucauagagcu

SEQ ID NO: 1610269 - RNA, 19 nt, Artificial Sequence
  Description of Artificial Sequence: Synthetic oligonucleotide
caucauuuugauugaaagg

SEQ ID NO: 1610270 - RNA, 19 nt, Artificial Sequence
  Description of Artificial Sequence: Synthetic oligonucleotide
ugagcauacauguaauuga

SEQ ID NO: 1610271 - RNA, 19 nt, Artificial Sequence
  Description of Artificial Sequence: Synthetic oligonucleotide
gacaauaccgcaaaaugcc

SEQ ID NO: 1610272 - RNA, 19 nt, Artificial Sequence
  Description of Artificial Sequence: Synthetic oligonucleotide
ucuagauccgucaacuugu

SEQ ID NO: 1610273 - RNA, 19 nt, Artificial Sequence
  Description of Artificial Sequence: Synthetic oligonucleotide
ucucuuaauguacagugcu

SEQ ID NO: 1610274 - RNA, 19 nt, Artificial Sequence
  Description of Artificial Sequence: Synthetic oligonucleotide
agauccgucaacuuguucu

SEQ ID NO: 1610275 - RNA, 19 nt, Artificial Sequence
  Description of Artificial Sequence: Synthetic oligonucleotide
uguguuaaaggcaugccuc

SEQ ID NO: 1610276 - RNA, 19 nt, Artificial Sequence
  Description of Artificial Sequence: Synthetic oligonucleotide
augaauauggugcacuucu

SEQ ID NO: 1610277 - RNA, 19 nt, Artificial Sequence
  Description of Artificial Sequence: Synthetic oligonucleotide
ucuuaauguacagugcuag

SEQ ID NO: 1610278 - RNA, 19 nt, Artificial Sequence
  Description of Artificial Sequence: Synthetic oligonucleotide
uugauugaaaggcuuaauc

SEQ ID NO: 1610279 - RNA, 19 nt, Artificial Sequence
  Description of Artificial Sequence: Synthetic oligonucleotide
accgcaaaaugccaaauag

SEQ ID NO: 1610280 - RNA, 19 nt, Artificial Sequence
  Description of Artificial Sequence: Synthetic oligonucleotide
uaagcuagcaaggucaagc

SEQ ID NO: 1610281 - RNA, 19 nt, Artificial Sequence
  Description of Artificial Sequence: Synthetic oligonucleotide
aaaaugccaaauaggcagc

SEQ ID NO: 1610282 - RNA, 19 nt, Artificial Sequence
  Description of Artificial Sequence: Synthetic oligonucleotide
aaugcaagugucucuagau

SEQ ID NO: 1610283 - RNA, 19 nt, Artificial Sequence
  Description of Artificial Sequence: Synthetic oligonucleotide
aggacaauaccgcaaaaug

SEQ ID NO: 1610284 - RNA, 19 nt, Artificial Sequence
  Description of Artificial Sequence: Synthetic oligonucleotide
aucguuuguccuuagcgac

SEQ ID NO: 1610285 - RNA, 19 nt, Artificial Sequence
  Description of Artificial Sequence: Synthetic oligonucleotide
aauuccucacacuccaugu

SEQ ID NO: 1610286 - RNA, 19 nt, Artificial Sequence
  Description of Artificial Sequence: Synthetic oligonucleotide
uauuuagaaucaucaagca

SEQ ID NO: 1610287 - RNA, 19 nt, Artificial Sequence
  Description of Artificial Sequence: Synthetic oligonucleotide
uuagaaucaucaagcacug

SEQ ID NO: 1610288 - RNA, 19 nt, Artificial Sequence
  Description of Artificial Sequence: Synthetic oligonucleotide
auauuaaguggcuccauug

SEQ ID NO: 1610289 - RNA, 19 nt, Artificial Sequence
  Description of Artificial Sequence: Synthetic oligonucleotide
ugacaaguuggcaaacucc

SEQ ID NO: 1610290 - RNA, 19 nt, Artificial Sequence
  Description of Artificial Sequence: Synthetic oligonucleotide
aaaugaugguguuccauga

SEQ ID NO: 1610291 - RNA, 19 nt, Artificial Sequence
  Description of Artificial Sequence: Synthetic oligonucleotide
cauuuguccagggaaaucg

SEQ ID NO: 1610292 - RNA, 19 nt, Artificial Sequence
  Description of Artificial Sequence: Synthetic oligonucleotide
gcuauuuagaaucaucaag

SEQ ID NO: 1610293 - RNA, 19 nt, Artificial Sequence
  Description of Artificial Sequence: Synthetic oligonucleotide
uugugaaggacaauaccgc

SEQ ID NO: 1610294 - RNA, 19 nt, Artificial Sequence
  Description of Artificial Sequence: Synthetic oligonucleotide
uugguaaucgcagagagau

SEQ ID NO: 1610295 - RNA, 19 nt, Artificial Sequence
  Description of Artificial Sequence: Synthetic oligonucleotide
auauggugcacuucugcac

SEQ ID NO: 1610296 - RNA, 19 nt, Artificial Sequence
  Description of Artificial Sequence: Synthetic oligonucleotide
auacauguaauugauuuug

SEQ ID NO: 1610297 - RNA, 19 nt, Artificial Sequence
  Description of Artificial Sequence: Synthetic oligonucleotide
uuuauucuccagcagugac

SEQ ID NO: 1610298 - RNA, 19 nt, Artificial Sequence
  Description of Artificial Sequence: Synthetic oligonucleotide
agaaucaucaagcacugau

SEQ ID NO: 1610299 - RNA, 19 nt, Artificial Sequence
  Description of Artificial Sequence: Synthetic oligonucleotide
gauggaauggcaauacagc

SEQ ID NO: 1610300 - RNA, 19 nt, Artificial Sequence
  Description of Artificial Sequence: Synthetic oligonucleotide
uauggugcacuucugcacc

SEQ ID NO: 1610301 - RNA, 19 nt, Artificial Sequence
  Description of Artificial Sequence: Synthetic oligonucleotide
agcuauugaaccgaggauc

SEQ ID NO: 1610302 - RNA, 19 nt, Artificial Sequence
  Description of Artificial Sequence: Synthetic oligonucleotide
uuaaguggcuccauugugu

SEQ ID NO: 1610303 - RNA, 19 nt, Artificial Sequence
  Description of Artificial Sequence: Synthetic oligonucleotide
ucgacuucagcuauugaac

SEQ ID NO: 1610304 - RNA, 19 nt, Artificial Sequence
  Description of Artificial Sequence: Synthetic oligonucleotide
ugacguuucauagagcuga

SEQ ID NO: 1610305 - RNA, 19 nt, Artificial Sequence
  Description of Artificial Sequence: Synthetic oligonucleotide
accgaggauccucauaggc

SEQ ID NO: 1610306 - RNA, 19 nt, Artificial Sequence
  Description of Artificial Sequence: Synthetic oligonucleotide
ugccaaauaggcagcaaag

SEQ ID NO: 1610307 - RNA, 19 nt, Artificial Sequence
  Description of Artificial Sequence: Synthetic oligonucleotide
aaggucaagcaauaccuga

SEQ ID NO: 1610308 - RNA, 19 nt, Artificial Sequence
  Description of Artificial Sequence: Synthetic oligonucleotide
acgaugauccaaaucaugg

SEQ ID NO: 1610309 - RNA, 19 nt, Artificial Sequence
  Description of Artificial Sequence: Synthetic oligonucleotide
uguaauugucgacuucagc

SEQ ID NO: 1610310 - RNA, 19 nt, Artificial Sequence
  Description of Artificial Sequence: Synthetic oligonucleotide
gaauauggugcacuucugc

SEQ ID NO: 1610311 - RNA, 19 nt, Artificial Sequence
  Description of Artificial Sequence: Synthetic oligonucleotide
ugugauaggcaacgcauga

SEQ ID NO: 1610312 - RNA, 19 nt, Artificial Sequence
  Description of Artificial Sequence: Synthetic oligonucleotide
ggucuuauauucuucaaug

SEQ ID NO: 1610313 - RNA, 19 nt, Artificial Sequence
  Description of Artificial Sequence: Synthetic oligonucleotide
cagaauuacuucuaaugac

SEQ ID NO: 1610314 - RNA, 19 nt, Artificial Sequence
  Description of Artificial Sequence: Synthetic oligonucleotide
guaauugucgacuucagcu

SEQ ID NO: 1610315 - RNA, 19 nt, Artificial Sequence
  Description of Artificial Sequence: Synthetic oligonucleotide
uguguuuacauguccugug

SEQ ID NO: 1610316 - RNA, 19 nt, Artificial Sequence
  Description of Artificial Sequence: Synthetic oligonucleotide
uaauguacagugcuagguc

SEQ ID NO: 1610317 - RNA, 19 nt, Artificial Sequence
  Description of Artificial Sequence: Synthetic oligonucleotide
aucuuauugacaaguuggc

SEQ ID NO: 1610318 - RNA, 19 nt, Artificial Sequence
  Description of Artificial Sequence: Synthetic oligonucleotide
caaaggauacucugugucc

SEQ ID NO: 1610319 - RNA, 19 nt, Artificial Sequence
  Description of Artificial Sequence: Synthetic oligonucleotide
caucagggauauuaagugg

SEQ ID NO: 1610320 - RNA, 19 nt, Artificial Sequence
  Description of Artificial Sequence: Synthetic oligonucleotide
cauugugaaggacaauacc

SEQ ID NO: 1610321 - RNA, 19 nt, Artificial Sequence
  Description of Artificial Sequence: Synthetic oligonucleotide
uacuucuaaugacugcugc

SEQ ID NO: 1610322 - RNA, 19 nt, Artificial Sequence
  Description of Artificial Sequence: Synthetic oligonucleotide
guaugaguuguucacacca

SEQ ID NO: 1610323 - RNA, 19 nt, Artificial Sequence
  Description of Artificial Sequence: Synthetic oligonucleotide
aguuguucacaccacgaug

SEQ ID NO: 1610324 - RNA, 19 nt, Artificial Sequence
  Description of Artificial Sequence: Synthetic oligonucleotide
agaaauaguuccuuuugaa

SEQ ID NO: 1610325 - RNA, 19 nt, Artificial Sequence
  Description of Artificial Sequence: Synthetic oligonucleotide
aaagagucagagcagucuu

SEQ ID NO: 1610326 - RNA, 19 nt, Artificial Sequence
  Description of Artificial Sequence: Synthetic oligonucleotide
cagaagauuaacaaaagcu

SEQ ID NO: 1610327 - RNA, 19 nt, Artificial Sequence
  Description of Artificial Sequence: Synthetic oligonucleotide
auaggcaacgcaugauagg

SEQ ID NO: 1610328 - RNA, 19 nt, Artificial Sequence
  Description of Artificial Sequence: Synthetic oligonucleotide
gauaggcaacgcaugauag

SEQ ID NO: 1610329 - RNA, 19 nt, Artificial Sequence
  Description of Artificial Sequence: Synthetic oligonucleotide
aauaccgcaaaaugccaaa

SEQ ID NO: 1610330 - RNA, 19 nt, Artificial Sequence
  Description of Artificial Sequence: Synthetic oligonucleotide
gaauuacuucuaaugacug

SEQ ID NO: 1610331 - RNA, 19 nt, Artificial Sequence
  Description of Artificial Sequence: Synthetic oligonucleotide
ugagcauugugaaggacaa

SEQ ID NO: 1610332 - RNA, 19 nt, Artificial Sequence
  Description of Artificial Sequence: Synthetic oligonucleotide
ugugguuuuaauuggcaua

SEQ ID NO: 1610333 - RNA, 19 nt, Artificial Sequence
  Description of Artificial Sequence: Synthetic oligonucleotide
aaucgcagagagaucacag

SEQ ID NO: 1610334 - RNA, 19 nt, Artificial Sequence
  Description of Artificial Sequence: Synthetic oligonucleotide
guccuuagcgacaucaggg

SEQ ID NO: 1610335 - RNA, 19 nt, Artificial Sequence
  Description of Artificial Sequence: Synthetic oligonucleotide
uccaccgcuucauacaucu

SEQ ID NO: 1610336 - RNA, 19 nt, Artificial Sequence
  Description of Artificial Sequence: Synthetic oligonucleotide
cauuguguucuugacauac

SEQ ID NO: 1610337 - RNA, 19 nt, Artificial Sequence
  Description of Artificial Sequence: Synthetic oligonucleotide
aggagauaauaguggcagc

SEQ ID NO: 1610338 - RNA, 19 nt, Artificial Sequence
  Description of Artificial Sequence: Synthetic oligonucleotide
augaugguguuccaugaug

SEQ ID NO: 1610339 - RNA, 19 nt, Artificial Sequence
  Description of Artificial Sequence: Synthetic oligonucleotide
ucuguagcuaaaauugcuu

SEQ ID NO: 1610340 - RNA, 19 nt, Artificial Sequence
  Description of Artificial Sequence: Synthetic oligonucleotide
uacagugcuaggucuguag

SEQ ID NO: 1610341 - RNA, 19 nt, Artificial Sequence
  Description of Artificial Sequence: Synthetic oligonucleotide
uguccagggaaaucguuug

SEQ ID NO: 1610342 - RNA, 19 nt, Artificial Sequence
  Description of Artificial Sequence: Synthetic oligonucleotide
acugaucaaaaugauggug

SEQ ID NO: 1610343 - RNA, 19 nt, Artificial Sequence
  Description of Artificial Sequence: Synthetic oligonucleotide
ugauaggcaacgcaugaua

SEQ ID NO: 1610344 - RNA, 19 nt, Artificial Sequence
  Description of Artificial Sequence: Synthetic oligonucleotide
ugguguuccaugauggaau

SEQ ID NO: 1610345 - RNA, 19 nt, Artificial Sequence
  Description of Artificial Sequence: Synthetic oligonucleotide
cuuuugaagaggaucuuca

SEQ ID NO: 1610346 - RNA, 19 nt, Artificial Sequence
  Description of Artificial Sequence: Synthetic oligonucleotide
aucgcagagagaucacagg

SEQ ID NO: 1610347 - RNA, 19 nt, Artificial Sequence
  Description of Artificial Sequence: Synthetic oligonucleotide
uaggcaacgcaugauagga

SEQ ID NO: 1610348 - RNA, 19 nt, Artificial Sequence
  Description of Artificial Sequence: Synthetic oligonucleotide
uggucuuauauucuucaau

SEQ ID NO: 1610349 - RNA, 19 nt, Artificial Sequence
  Description of Artificial Sequence: Synthetic oligonucleotide
uucacuucgcuguauguau

SEQ ID NO: 1610350 - RNA, 19 nt, Artificial Sequence
  Description of Artificial Sequence: Synthetic oligonucleotide
ugacuuuguucuucuuccg

SEQ ID NO: 1610351 - RNA, 19 nt, Artificial Sequence
  Description of Artificial Sequence: Synthetic oligonucleotide
uucuaaugacugcugcucu

SEQ ID NO: 1610352 - RNA, 19 nt, Artificial Sequence
  Description of Artificial Sequence: Synthetic oligonucleotide
uacauguaauugauuuugu

SEQ ID NO: 1610353 - RNA, 19 nt, Artificial Sequence
  Description of Artificial Sequence: Synthetic oligonucleotide
aaugucccaccauuuccug

SEQ ID NO: 1610354 - RNA, 19 nt, Artificial Sequence
  Description of Artificial Sequence: Synthetic oligonucleotide
ugauuauuuucaguguggu

SEQ ID NO: 1610355 - RNA, 19 nt, Artificial Sequence
  Description of Artificial Sequence: Synthetic oligonucleotide
cucuagauccgucaacuug

SEQ ID NO: 1610356 - RNA, 19 nt, Artificial Sequence
  Description of Artificial Sequence: Synthetic oligonucleotide
uaauugucgacuucagcua

SEQ ID NO: 1610357 - RNA, 19 nt, Artificial Sequence
  Description of Artificial Sequence: Synthetic oligonucleotide
cagcaaucagcaaugcaag

SEQ ID NO: 1610358 - RNA, 19 nt, Artificial Sequence
  Description of Artificial Sequence: Synthetic oligonucleotide
aggacaggaccucuaaugu

SEQ ID NO: 1610359 - RNA, 19 nt, Artificial Sequence
  Description of Artificial Sequence: Synthetic oligonucleotide
uccaauugugauaggcaac

SEQ ID NO: 1610360 - RNA, 19 nt, Artificial Sequence
  Description of Artificial Sequence: Synthetic oligonucleotide
agaaucugguugccugggc

SEQ ID NO: 1610361 - RNA, 19 nt, Artificial Sequence
  Description of Artificial Sequence: Synthetic oligonucleotide
uguagccuguaauugucga

SEQ ID NO: 1610362 - RNA, 19 nt, Artificial Sequence
  Description of Artificial Sequence: Synthetic oligonucleotide
uucagcuauugaaccgagg

SEQ ID NO: 1610363 - RNA, 19 nt, Artificial Sequence
  Description of Artificial Sequence: Synthetic oligonucleotide
cugcucuucgaaaauuaag

SEQ ID NO: 1610364 - RNA, 19 nt, Artificial Sequence
  Description of Artificial Sequence: Synthetic oligonucleotide
cgcaaaaugccaaauaggc

SEQ ID NO: 1610365 - RNA, 19 nt, Artificial Sequence
  Description of Artificial Sequence: Synthetic oligonucleotide
gauggccugggcuacacca

SEQ ID NO: 1610366 - RNA, 19 nt, Artificial Sequence
  Description of Artificial Sequence: Synthetic oligonucleotide
gcagugacguuucauagag

SEQ ID NO: 1610367 - RNA, 19 nt, Artificial Sequence
  Description of Artificial Sequence: Synthetic oligonucleotide
uggcaaacuccuaugacuu

SEQ ID NO: 1610368 - RNA, 19 nt, Artificial Sequence
  Description of Artificial Sequence: Synthetic oligonucleotide
aaggacaauaccgcaaaau

SEQ ID NO: 1610369 - RNA, 19 nt, Artificial Sequence
  Description of Artificial Sequence: Synthetic oligonucleotide
agcaauaccugauuucuuu

SEQ ID NO: 1610370 - RNA, 19 nt, Artificial Sequence
  Description of Artificial Sequence: Synthetic oligonucleotide
aaugacugcugcucuucga

SEQ ID NO: 1610371 - RNA, 19 nt, Artificial Sequence
  Description of Artificial Sequence: Synthetic oligonucleotide
gaaaucguuuguccuuagc

SEQ ID NO: 1610372 - RNA, 19 nt, Artificial Sequence
  Description of Artificial Sequence: Synthetic oligonucleotide
cauccuuucagugaauguc

SEQ ID NO: 1610373 - RNA, 19 nt, Artificial Sequence
  Description of Artificial Sequence: Synthetic oligonucleotide
ugaaaggcuuaaucuugcc

SEQ ID NO: 1610374 - RNA, 19 nt, Artificial Sequence
  Description of Artificial Sequence: Synthetic oligonucleotide
ugggcuauuuagaaucauc

SEQ ID NO: 1610375 - RNA, 19 nt, Artificial Sequence
  Description of Artificial Sequence: Synthetic oligonucleotide
ucagggauauuaaguggcu

SEQ ID NO: 1610376 - RNA, 19 nt, Artificial Sequence
  Description of Artificial Sequence: Synthetic oligonucleotide
uucgaaaauuaagcuagca

SEQ ID NO: 1610377 - RNA, 19 nt, Artificial Sequence
  Description of Artificial Sequence: Synthetic oligonucleotide
guguuaaaggcaugccucc

SEQ ID NO: 1610378 - RNA, 19 nt, Artificial Sequence
  Description of Artificial Sequence: Synthetic oligonucleotide
uccuuagcgacaucaggga

SEQ ID NO: 1610379 - RNA, 19 nt, Artificial Sequence
  Description of Artificial Sequence: Synthetic oligonucleotide
uacaaaggauacucugugu

SEQ ID NO: 1610380 - RNA, 19 nt, Artificial Sequence
  Description of Artificial Sequence: Synthetic oligonucleotide
uccucgucucuuaauguac

SEQ ID NO: 1610381 - RNA, 19 nt, Artificial Sequence
  Description of Artificial Sequence: Synthetic oligonucleotide
cugagcauugugaaggaca

SEQ ID NO: 1610382 - RNA, 19 nt, Artificial Sequence
  Description of Artificial Sequence: Synthetic oligonucleotide
uccuuucagugaauguccc

SEQ ID NO: 1610383 - RNA, 19 nt, Artificial Sequence
  Description of Artificial Sequence: Synthetic oligonucleotide
gucgacuucagcuauugaa

SEQ ID NO: 1610384 - RNA, 19 nt, Artificial Sequence
  Description of Artificial Sequence: Synthetic oligonucleotide
gcuuaaagcagcaaucagc

SEQ ID NO: 1610385 - RNA, 19 nt, Artificial Sequence
  Description of Artificial Sequence: Synthetic oligonucleotide
agcauugugaaggacaaua

SEQ ID NO: 1610386 - RNA, 19 nt, Artificial Sequence
  Description of Artificial Sequence: Synthetic oligonucleotide
agagaucacaggcagucau

SEQ ID NO: 1610387 - RNA, 19 nt, Artificial Sequence
  Description of Artificial Sequence: Synthetic oligonucleotide
gguaaucgcagagagauca

SEQ ID NO: 1610388 - RNA, 19 nt, Artificial Sequence
  Description of Artificial Sequence: Synthetic oligonucleotide
aacgcaugauaggacagga

SEQ ID NO: 1610389 - RNA, 19 nt, Artificial Sequence
  Description of Artificial Sequence: Synthetic oligonucleotide
auaauaguggcagcuauuu

SEQ ID NO: 1610390 - RNA, 19 nt, Artificial Sequence
  Description of Artificial Sequence: Synthetic oligonucleotide
aaauugcuugcuugauuau

SEQ ID NO: 1610391 - RNA, 19 nt, Artificial Sequence
  Description of Artificial Sequence: Synthetic oligonucleotide
aaggauacucuguguccug

SEQ ID NO: 1610392 - RNA, 19 nt, Artificial Sequence
  Description of Artificial Sequence: Synthetic oligonucleotide
cucugugguuuuaauuggc

SEQ ID NO: 1610393 - RNA, 19 nt, Artificial Sequence
  Description of Artificial Sequence: Synthetic oligonucleotide
aauucuccucgucucuuaa

SEQ ID NO: 1610394 - RNA, 19 nt, Artificial Sequence
  Description of Artificial Sequence: Synthetic oligonucleotide
aucuguguguuacuggaau

SEQ ID NO: 1610395 - RNA, 19 nt, Artificial Sequence
  Description of Artificial Sequence: Synthetic oligonucleotide
aaacaugcacugugcugug

SEQ ID NO: 1610396 - RNA, 19 nt, Artificial Sequence
  Description of Artificial Sequence: Synthetic oligonucleotide
ucauccuuucagugaaugu

SEQ ID NO: 1610397 - RNA, 19 nt, Artificial Sequence
  Description of Artificial Sequence: Synthetic oligonucleotide
cuucgaaaauuaagcuagc

SEQ ID NO: 1610398 - RNA, 19 nt, Artificial Sequence
  Description of Artificial Sequence: Synthetic oligonucleotide
cauagagcugagcauugug

SEQ ID NO: 1610399 - RNA, 19 nt, Artificial Sequence
  Description of Artificial Sequence: Synthetic oligonucleotide
ggacaauaccgcaaaaugc

SEQ ID NO: 1610400 - RNA, 19 nt, Artificial Sequence
  Description of Artificial Sequence: Synthetic oligonucleotide
ccaaaucauggcuuaaagc

SEQ ID NO: 1610401 - RNA, 19 nt, Artificial Sequence
  Description of Artificial Sequence: Synthetic oligonucleotide
uuuacauguccuguguuuu

SEQ ID NO: 1610402 - RNA, 19 nt, Artificial Sequence
  Description of Artificial Sequence: Synthetic oligonucleotide
aggaccucuaaugucacca

SEQ ID NO: 1610403 - RNA, 19 nt, Artificial Sequence
  Description of Artificial Sequence: Synthetic oligonucleotide
uauugaaccgaggauccuc

SEQ ID NO: 1610404 - RNA, 19 nt, Artificial Sequence
  Description of Artificial Sequence: Synthetic oligonucleotide
ucacuucgcuguauguaug

SEQ ID NO: 1610405 - RNA, 19 nt, Artificial Sequence
  Description of Artificial Sequence: Synthetic oligonucleotide
cacgaugauccaaaucaug

SEQ ID NO: 1610406 - RNA, 19 nt, Artificial Sequence
  Description of Artificial Sequence: Synthetic oligonucleotide
uuguccagggaaaucguuu

SEQ ID NO: 1610407 - RNA, 19 nt, Artificial Sequence
  Description of Artificial Sequence: Synthetic oligonucleotide
cagggcuugguaaucgcag

SEQ ID NO: 1610408 - RNA, 19 nt, Artificial Sequence
  Description of Artificial Sequence: Synthetic oligonucleotide
ugaucaaaaugaugguguu

SEQ ID NO: 1610409 - RNA, 19 nt, Artificial Sequence
  Description of Artificial Sequence: Synthetic oligonucleotide
ucaaaaugaugguguucca

SEQ ID NO: 1610410 - RNA, 19 nt, Artificial Sequence
  Description of Artificial Sequence: Synthetic oligonucleotide
aguguggucuuauauucuu

SEQ ID NO: 1610411 - RNA, 19 nt, Artificial Sequence
  Description of Artificial Sequence: Synthetic oligonucleotide
uguucacuucgcuguaugu

SEQ ID NO: 1610412 - RNA, 19 nt, Artificial Sequence
  Description of Artificial Sequence: Synthetic oligonucleotide
auagagcugagcauuguga

SEQ ID NO: 1610413 - RNA, 19 nt, Artificial Sequence
  Description of Artificial Sequence: Synthetic oligonucleotide
uguuuacauguccuguguu

SEQ ID NO: 1610414 - RNA, 19 nt, Artificial Sequence
  Description of Artificial Sequence: Synthetic oligonucleotide
agagaaagagucagagcag

SEQ ID NO: 1610415 - RNA, 19 nt, Artificial Sequence
  Description of Artificial Sequence: Synthetic oligonucleotide
agcagugacguuucauaga

SEQ ID NO: 1610416 - RNA, 19 nt, Artificial Sequence
  Description of Artificial Sequence: Synthetic oligonucleotide
auaguggcagcuauuuucu

SEQ ID NO: 1610417 - RNA, 19 nt, Artificial Sequence
  Description of Artificial Sequence: Synthetic oligonucleotide
caaggucaagcaauaccug

SEQ ID NO: 1610418 - RNA, 19 nt, Artificial Sequence
  Description of Artificial Sequence: Synthetic oligonucleotide
uuucccaauuccucacacu

SEQ ID NO: 1610419 - RNA, 19 nt, Artificial Sequence
  Description of Artificial Sequence: Synthetic oligonucleotide
ucucuccaccgcuucauac

SEQ ID NO: 1610420 - RNA, 19 nt, Artificial Sequence
  Description of Artificial Sequence: Synthetic oligonucleotide
gauaggacaggaccucuaa

SEQ ID NO: 1610421 - RNA, 19 nt, Artificial Sequence
  Description of Artificial Sequence: Synthetic oligonucleotide
ucuccaccgcuucauacau

SEQ ID NO: 1610422 - RNA, 19 nt, Artificial Sequence
  Description of Artificial Sequence: Synthetic oligonucleotide
cucuucgaaaauuaagcua

SEQ ID NO: 1610423 - RNA, 19 nt, Artificial Sequence
  Description of Artificial Sequence: Synthetic oligonucleotide
gaaggagauaauaguggca

SEQ ID NO: 1610424 - RNA, 19 nt, Artificial Sequence
  Description of Artificial Sequence: Synthetic oligonucleotide
uugucgacuucagcuauug

SEQ ID NO: 1610425 - RNA, 19 nt, Artificial Sequence
  Description of Artificial Sequence: Synthetic oligonucleotide
uaccgcaaaaugccaaaua

SEQ ID NO: 1610426 - RNA, 19 nt, Artificial Sequence
  Description of Artificial Sequence: Synthetic oligonucleotide
cucgucucuuaauguacag

SEQ ID NO: 1610427 - RNA, 19 nt, Artificial Sequence
  Description of Artificial Sequence: Synthetic oligonucleotide
cuccaauugugauaggcaa

SEQ ID NO: 1610428 - RNA, 19 nt, Artificial Sequence
  Description of Artificial Sequence: Synthetic oligonucleotide
uguuaaaggcaugccucca

SEQ ID NO: 1610429 - RNA, 19 nt, Artificial Sequence
  Description of Artificial Sequence: Synthetic oligonucleotide
uuuguccagggaaaucguu

SEQ ID NO: 1610430 - RNA, 19 nt, Artificial Sequence
  Description of Artificial Sequence: Synthetic oligonucleotide
augauggaauggcaauaca

SEQ ID NO: 1610431 - RNA, 19 nt, Artificial Sequence
  Description of Artificial Sequence: Synthetic oligonucleotide
cccuuguuaaaguaucagc

SEQ ID NO: 1610432 - RNA, 19 nt, Artificial Sequence
  Description of Artificial Sequence: Synthetic oligonucleotide
cuucagcuauugaaccgag

SEQ ID NO: 1610433 - RNA, 19 nt, Artificial Sequence
  Description of Artificial Sequence: Synthetic oligonucleotide
agcaaucagcaaugcaagu

SEQ ID NO: 1610434 - RNA, 19 nt, Artificial Sequence
  Description of Artificial Sequence: Synthetic oligonucleotide
aagugucucuagauccguc

SEQ ID NO: 1610435 - RNA, 19 nt, Artificial Sequence
  Description of Artificial Sequence: Synthetic oligonucleotide
gacaaguuggcaaacuccu

SEQ ID NO: 1610436 - RNA, 19 nt, Artificial Sequence
  Description of Artificial Sequence: Synthetic oligonucleotide
ucuaaugacugcugcucuu

SEQ ID NO: 1610437 - RNA, 19 nt, Artificial Sequence
  Description of Artificial Sequence: Synthetic oligonucleotide
gaugguguuccaugaugga

SEQ ID NO: 1610438 - RNA, 19 nt, Artificial Sequence
  Description of Artificial Sequence: Synthetic oligonucleotide
cgucucuuaauguacagug

SEQ ID NO: 1610439 - RNA, 19 nt, Artificial Sequence
  Description of Artificial Sequence: Synthetic oligonucleotide
gguugccugggcuauuuag

SEQ ID NO: 1610440 - RNA, 19 nt, Artificial Sequence
  Description of Artificial Sequence: Synthetic oligonucleotide
gucucuuaauguacagugc

SEQ ID NO: 1610441 - RNA, 19 nt, Artificial Sequence
  Description of Artificial Sequence: Synthetic oligonucleotide
cgcaugauaggacaggacc

SEQ ID NO: 1610442 - RNA, 19 nt, Artificial Sequence
  Description of Artificial Sequence: Synthetic oligonucleotide
uuaagcuagcaaggucaag

SEQ ID NO: 1610443 - RNA, 19 nt, Artificial Sequence
  Description of Artificial Sequence: Synthetic oligonucleotide
uaggcagcaaaguccuuuc

SEQ ID NO: 1610444 - RNA, 19 nt, Artificial Sequence
  Description of Artificial Sequence: Synthetic oligonucleotide
gcuauugaaccgaggaucc

SEQ ID NO: 1610445 - RNA, 19 nt, Artificial Sequence
  Description of Artificial Sequence: Synthetic oligonucleotide
caacgcaugauaggacagg

SEQ ID NO: 1610446 - RNA, 19 nt, Artificial Sequence
  Description of Artificial Sequence: Synthetic oligonucleotide
gaaagagucagagcagucu

SEQ ID NO: 1610447 - RNA, 19 nt, Artificial Sequence
  Description of Artificial Sequence: Synthetic oligonucleotide
gugaaugucccaccauuuc

SEQ ID NO: 1610448 - RNA, 19 nt, Artificial Sequence
  Description of Artificial Sequence: Synthetic oligonucleotide
cuguauguaugaguuguuc

SEQ ID NO: 1610449 - RNA, 19 nt, Artificial Sequence
  Description of Artificial Sequence: Synthetic oligonucleotide
ccgcaaaaugccaaauagg

SEQ ID NO: 1610450 - RNA, 19 nt, Artificial Sequence
  Description of Artificial Sequence: Synthetic oligonucleotide
uucauuuguccagggaaau

SEQ ID NO: 1610451 - RNA, 19 nt, Artificial Sequence
  Description of Artificial Sequence: Synthetic oligonucleotide
uccuaugacuuuguucuuc

SEQ ID NO: 1610452 - RNA, 19 nt, Artificial Sequence
  Description of Artificial Sequence: Synthetic oligonucleotide
uccgucaacuuguucugaa

SEQ ID NO: 1610453 - RNA, 19 nt, Artificial Sequence
  Description of Artificial Sequence: Synthetic oligonucleotide
cuaaugacugcugcucuuc

SEQ ID NO: 1610454 - RNA, 19 nt, Artificial Sequence
  Description of Artificial Sequence: Synthetic oligonucleotide
caaacaugcacugugcugu

SEQ ID NO: 1610455 - RNA, 19 nt, Artificial Sequence
  Description of Artificial Sequence: Synthetic oligonucleotide
ugauaggacaggaccucua

SEQ ID NO: 1610456 - RNA, 19 nt, Artificial Sequence
  Description of Artificial Sequence: Synthetic oligonucleotide
gcagcaaucagcaaugcaa

SEQ ID NO: 1610457 - RNA, 19 nt, Artificial Sequence
  Description of Artificial Sequence: Synthetic oligonucleotide
uugccaguauucuccucca

SEQ ID NO: 1610458 - RNA, 19 nt, Artificial Sequence
  Description of Artificial Sequence: Synthetic oligonucleotide
gauauuaaguggcuccauu

SEQ ID NO: 1610459 - RNA, 19 nt, Artificial Sequence
  Description of Artificial Sequence: Synthetic oligonucleotide
ucgucucuuaauguacagu

SEQ ID NO: 1610460 - RNA, 19 nt, Artificial Sequence
  Description of Artificial Sequence: Synthetic oligonucleotide
ugucaccauuugcuuggcc

SEQ ID NO: 1610461 - RNA, 19 nt, Artificial Sequence
  Description of Artificial Sequence: Synthetic oligonucleotide
aaacuccuaugacuuuguu

SEQ ID NO: 1610462 - RNA, 19 nt, Artificial Sequence
  Description of Artificial Sequence: Synthetic oligonucleotide
ugcaucaugcucccuuguu

SEQ ID NO: 1610463 - RNA, 19 nt, Artificial Sequence
  Description of Artificial Sequence: Synthetic oligonucleotide
uucugaaucuugccugcuu

SEQ ID NO: 1610464 - RNA, 19 nt, Artificial Sequence
  Description of Artificial Sequence: Synthetic oligonucleotide
auaggacaggaccucuaau

SEQ ID NO: 1610465 - RNA, 19 nt, Artificial Sequence
  Description of Artificial Sequence: Synthetic oligonucleotide
ccagggaaaucguuugucc

SEQ ID NO: 1610466 - RNA, 19 nt, Artificial Sequence
  Description of Artificial Sequence: Synthetic oligonucleotide
acaauaccgcaaaaugcca

SEQ ID NO: 1610467 - RNA, 19 nt, Artificial Sequence
  Description of Artificial Sequence: Synthetic oligonucleotide
agcaaugcaagugucucua

SEQ ID NO: 1610468 - RNA, 19 nt, Artificial Sequence
  Description of Artificial Sequence: Synthetic oligonucleotide
ggcaacgcaugauaggaca

SEQ ID NO: 1610469 - RNA, 19 nt, Artificial Sequence
  Description of Artificial Sequence: Synthetic oligonucleotide
ucgcuguauguaugaguug

SEQ ID NO: 1610470 - RNA, 19 nt, Artificial Sequence
  Description of Artificial Sequence: Synthetic oligonucleotide
aucaagcacugaucaaaau

SEQ ID NO: 1610471 - RNA, 19 nt, Artificial Sequence
  Description of Artificial Sequence: Synthetic oligonucleotide
ugucgacuucagcuauuga

SEQ ID NO: 1610472 - RNA, 19 nt, Artificial Sequence
  Description of Artificial Sequence: Synthetic oligonucleotide
cacaccacgaugauccaaa

SEQ ID NO: 1610473 - RNA, 19 nt, Artificial Sequence
  Description of Artificial Sequence: Synthetic oligonucleotide
agggcuugguaaucgcaga

SEQ ID NO: 1610474 - RNA, 19 nt, Artificial Sequence
  Description of Artificial Sequence: Synthetic oligonucleotide
caauaccgcaaaaugccaa

SEQ ID NO: 1610475 - RNA, 19 nt, Artificial Sequence
  Description of Artificial Sequence: Synthetic oligonucleotide
cugugcuguguuaaaggca

SEQ ID NO: 1610476 - RNA, 19 nt, Artificial Sequence
  Description of Artificial Sequence: Synthetic oligonucleotide
caaugcaagugucucuaga

SEQ ID NO: 1610477 - RNA, 19 nt, Artificial Sequence
  Description of Artificial Sequence: Synthetic oligonucleotide
caaugcaguguguguuuac

SEQ ID NO: 1610478 - RNA, 19 nt, Artificial Sequence
  Description of Artificial Sequence: Synthetic oligonucleotide
agugcuaggucuguagcua

SEQ ID NO: 1610479 - RNA, 19 nt, Artificial Sequence
  Description of Artificial Sequence: Synthetic oligonucleotide
gcaagugucucuagauccg

SEQ ID NO: 1610480 - RNA, 19 nt, Artificial Sequence
  Description of Artificial Sequence: Synthetic oligonucleotide
gacguuucauagagcugag

SEQ ID NO: 1610481 - RNA, 19 nt, Artificial Sequence
  Description of Artificial Sequence: Synthetic oligonucleotide
augguguuccaugauggaa

SEQ ID NO: 1610482 - RNA, 19 nt, Artificial Sequence
  Description of Artificial Sequence: Synthetic oligonucleotide
caauugugauaggcaacgc

SEQ ID NO: 1610483 - RNA, 19 nt, Artificial Sequence
  Description of Artificial Sequence: Synthetic oligonucleotide
cuagcaaggucaagcaaua

SEQ ID NO: 1610484 - RNA, 19 nt, Artificial Sequence
  Description of Artificial Sequence: Synthetic oligonucleotide
agcuagcaaggucaagcaa

SEQ ID NO: 1610485 - RNA, 19 nt, Artificial Sequence
  Description of Artificial Sequence: Synthetic oligonucleotide
gaaugucccaccauuuccu

SEQ ID NO: 1610486 - RNA, 19 nt, Artificial Sequence
  Description of Artificial Sequence: Synthetic oligonucleotide
guuucauagagcugagcau

SEQ ID NO: 1610487 - RNA, 19 nt, Artificial Sequence
  Description of Artificial Sequence: Synthetic oligonucleotide
caaacuuccaaugcagugu

SEQ ID NO: 1610488 - RNA, 19 nt, Artificial Sequence
  Description of Artificial Sequence: Synthetic oligonucleotide
ugcuaggucuguagcuaaa

SEQ ID NO: 1610489 - RNA, 19 nt, Artificial Sequence
  Description of Artificial Sequence: Synthetic oligonucleotide
uagauccgucaacuuguuc

SEQ ID NO: 1610490 - RNA, 19 nt, Artificial Sequence
  Description of Artificial Sequence: Synthetic oligonucleotide
cguuucauagagcugagca

SEQ ID NO: 1610491 - RNA, 19 nt, Artificial Sequence
  Description of Artificial Sequence: Synthetic oligonucleotide
auuaagcuagcaaggucaa

SEQ ID NO: 1610492 - RNA, 19 nt, Artificial Sequence
  Description of Artificial Sequence: Synthetic oligonucleotide
uugcuugcuugauuauuuu

SEQ ID NO: 1610493 - RNA, 19 nt, Artificial Sequence
  Description of Artificial Sequence: Synthetic oligonucleotide
ugguaaucgcagagagauc

SEQ ID NO: 1610494 - RNA, 19 nt, Artificial Sequence
  Description of Artificial Sequence: Synthetic oligonucleotide
aggcaacgcaugauaggac

SEQ ID NO: 1610495 - RNA, 19 nt, Artificial Sequence
  Description of Artificial Sequence: Synthetic oligonucleotide
auuguguucuugacauacu

SEQ ID NO: 1610496 - RNA, 19 nt, Artificial Sequence
  Description of Artificial Sequence: Synthetic oligonucleotide
ucucuagauccgucaacuu

SEQ ID NO: 1610497 - RNA, 19 nt, Artificial Sequence
  Description of Artificial Sequence: Synthetic oligonucleotide
acgcaugauaggacaggac

SEQ ID NO: 1610498 - RNA, 19 nt, Artificial Sequence
  Description of Artificial Sequence: Synthetic oligonucleotide
uguguccuguagccuguaa

SEQ ID NO: 1610499 - RNA, 19 nt, Artificial Sequence
  Description of Artificial Sequence: Synthetic oligonucleotide
cuguguuaaaggcaugccu

SEQ ID NO: 1610500 - RNA, 19 nt, Artificial Sequence
  Description of Artificial Sequence: Synthetic oligonucleotide
cagugacguuucauagagc

SEQ ID NO: 1610501 - RNA, 19 nt, Artificial Sequence
  Description of Artificial Sequence: Synthetic oligonucleotide
cgaugauccaaaucauggc

SEQ ID NO: 1610502 - RNA, 19 nt, Artificial Sequence
  Description of Artificial Sequence: Synthetic oligonucleotide
gcagucaucagcauggcua

SEQ ID NO: 1610503 - RNA, 19 nt, Artificial Sequence
  Description of Artificial Sequence: Synthetic oligonucleotide
cacuucgcuguauguauga

SEQ ID NO: 1610504 - RNA, 19 nt, Artificial Sequence
  Description of Artificial Sequence: Synthetic oligonucleotide
cgacuucagcuauugaacc

SEQ ID NO: 1610505 - RNA, 19 nt, Artificial Sequence
  Description of Artificial Sequence: Synthetic oligonucleotide
cucuuaauguacagugcua

SEQ ID NO: 1610506 - RNA, 19 nt, Artificial Sequence
  Description of Artificial Sequence: Synthetic oligonucleotide
ggcuauuuagaaucaucaa

SEQ ID NO: 1610507 - RNA, 19 nt, Artificial Sequence
  Description of Artificial Sequence: Synthetic oligonucleotide
gucucuagauccgucaacu

SEQ ID NO: 1610508 - RNA, 19 nt, Artificial Sequence
  Description of Artificial Sequence: Synthetic oligonucleotide
cucccuuguuaaaguauca

SEQ ID NO: 1610509 - RNA, 19 nt, Artificial Sequence
  Description of Artificial Sequence: Synthetic oligonucleotide
ccguuguugaacaggccag

SEQ ID NO: 1610510 - RNA, 19 nt, Artificial Sequence
  Description of Artificial Sequence: Synthetic oligonucleotide
aggauacucuguguccugu

SEQ ID NO: 1610511 - RNA, 19 nt, Artificial Sequence
  Description of Artificial Sequence: Synthetic oligonucleotide
guucacuucgcuguaugua

SEQ ID NO: 1610512 - RNA, 19 nt, Artificial Sequence
  Description of Artificial Sequence: Synthetic oligonucleotide
gugacguuucauagagcug

SEQ ID NO: 1610513 - RNA, 19 nt, Artificial Sequence
  Description of Artificial Sequence: Synthetic oligonucleotide
ggaaaucguuuguccuuag

SEQ ID NO: 1610514 - RNA, 19 nt, Artificial Sequence
  Description of Artificial Sequence: Synthetic oligonucleotide
aagcaauaccugauuucuu

SEQ ID NO: 1610515 - RNA, 19 nt, Artificial Sequence
  Description of Artificial Sequence: Synthetic oligonucleotide
uggcuagaaauaguuccuu

SEQ ID NO: 1610516 - RNA, 19 nt, Artificial Sequence
  Description of Artificial Sequence: Synthetic oligonucleotide
uagcaaggucaagcaauac

SEQ ID NO: 1610517 - RNA, 19 nt, Artificial Sequence
  Description of Artificial Sequence: Synthetic oligonucleotide
gccaguauucuccuccauc

SEQ ID NO: 1610518 - RNA, 19 nt, Artificial Sequence
  Description of Artificial Sequence: Synthetic oligonucleotide
aggcagcaaaguccuuuca

SEQ ID NO: 1610519 - RNA, 19 nt, Artificial Sequence
  Description of Artificial Sequence: Synthetic oligonucleotide
ggacaggaccucuaauguc

SEQ ID NO: 1610520 - RNA, 19 nt, Artificial Sequence
  Description of Artificial Sequence: Synthetic oligonucleotide
gcucuucgaaaauuaagcu

SEQ ID NO: 1610521 - RNA, 19 nt, Artificial Sequence
  Description of Artificial Sequence: Synthetic oligonucleotide
guaaucgcagagagaucac

SEQ ID NO: 1610522 - RNA, 19 nt, Artificial Sequence
  Description of Artificial Sequence: Synthetic oligonucleotide
ugccugcuuucagagcagc

SEQ ID NO: 1610523 - RNA, 19 nt, Artificial Sequence
  Description of Artificial Sequence: Synthetic oligonucleotide
gcaacgcaugauaggacag

SEQ ID NO: 1610524 - RNA, 19 nt, Artificial Sequence
  Description of Artificial Sequence: Synthetic oligonucleotide
gcuguguuaaaggcaugcc

SEQ ID NO: 1610525 - RNA, 19 nt, Artificial Sequence
  Description of Artificial Sequence: Synthetic oligonucleotide
gauaauaguggcagcuauu

SEQ ID NO: 1610526 - RNA, 19 nt, Artificial Sequence
  Description of Artificial Sequence: Synthetic oligonucleotide
ucauggcuuaaagcagcaa

SEQ ID NO: 1610527 - RNA, 19 nt, Artificial Sequence
  Description of Artificial Sequence: Synthetic oligonucleotide
cuccucgucucuuaaugua

SEQ ID NO: 1610528 - RNA, 19 nt, Artificial Sequence
  Description of Artificial Sequence: Synthetic oligonucleotide
caccgcuucauacaucugu

SEQ ID NO: 1610529 - RNA, 19 nt, Artificial Sequence
  Description of Artificial Sequence: Synthetic oligonucleotide
gagagaucacaggcaguca

SEQ ID NO: 1610530 - RNA, 19 nt, Artificial Sequence
  Description of Artificial Sequence: Synthetic oligonucleotide
gcaaugcaagugucucuag

SEQ ID NO: 1610531 - RNA, 19 nt, Artificial Sequence
  Description of Artificial Sequence: Synthetic oligonucleotide
ccuccaauugugauaggca

SEQ ID NO: 1610532 - RNA, 19 nt, Artificial Sequence
  Description of Artificial Sequence: Synthetic oligonucleotide
aacuuccaaugcagugugu

SEQ ID NO: 1610533 - RNA, 19 nt, Artificial Sequence
  Description of Artificial Sequence: Synthetic oligonucleotide
uugaaccgaggauccucau

SEQ ID NO: 1610534 - RNA, 19 nt, Artificial Sequence
  Description of Artificial Sequence: Synthetic oligonucleotide
cauacaucuguguguuacu

SEQ ID NO: 1610535 - RNA, 19 nt, Artificial Sequence
  Description of Artificial Sequence: Synthetic oligonucleotide
cgcuucauacaucugugug

SEQ ID NO: 1610536 - RNA, 19 nt, Artificial Sequence
  Description of Artificial Sequence: Synthetic oligonucleotide
gggauauuaaguggcucca

SEQ ID NO: 1610537 - RNA, 19 nt, Artificial Sequence
  Description of Artificial Sequence: Synthetic oligonucleotide
ugccaguauucuccuccau

SEQ ID NO: 1610538 - RNA, 19 nt, Artificial Sequence
  Description of Artificial Sequence: Synthetic oligonucleotide
cacugaucaaaaugauggu

SEQ ID NO: 1610539 - RNA, 19 nt, Artificial Sequence
  Description of Artificial Sequence: Synthetic oligonucleotide
agcagucuucauccacgau

SEQ ID NO: 1610540 - RNA, 19 nt, Artificial Sequence
  Description of Artificial Sequence: Synthetic oligonucleotide
caaacuccuaugacuuugu

SEQ ID NO: 1610541 - RNA, 19 nt, Artificial Sequence
  Description of Artificial Sequence: Synthetic oligonucleotide
aguuccuuuugaagaggau

SEQ ID NO: 1610542 - RNA, 19 nt, Artificial Sequence
  Description of Artificial Sequence: Synthetic oligonucleotide
cugugguuuuaauuggcau

SEQ ID NO: 1610543 - RNA, 19 nt, Artificial Sequence
  Description of Artificial Sequence: Synthetic oligonucleotide
aggccacugagaaucuggu

SEQ ID NO: 1610544 - RNA, 19 nt, Artificial Sequence
  Description of Artificial Sequence: Synthetic oligonucleotide
gugcuaggucuguagcuaa

SEQ ID NO: 1610545 - RNA, 19 nt, Artificial Sequence
  Description of Artificial Sequence: Synthetic oligonucleotide
gcuagcaaggucaagcaau

SEQ ID NO: 1610546 - RNA, 19 nt, Artificial Sequence
  Description of Artificial Sequence: Synthetic oligonucleotide
cagugcuaggucuguagcu

SEQ ID NO: 1610547 - RNA, 19 nt, Artificial Sequence
  Description of Artificial Sequence: Synthetic oligonucleotide
auccgucaacuuguucuga

SEQ ID NO: 1610548 - RNA, 19 nt, Artificial Sequence
  Description of Artificial Sequence: Synthetic oligonucleotide
acaaguuggcaaacuccua

SEQ ID NO: 1610549 - RNA, 19 nt, Artificial Sequence
  Description of Artificial Sequence: Synthetic oligonucleotide
ccagcagugacguuucaua

SEQ ID NO: 1610550 - RNA, 19 nt, Artificial Sequence
  Description of Artificial Sequence: Synthetic oligonucleotide
cuccaccgcuucauacauc

SEQ ID NO: 1610551 - RNA, 19 nt, Artificial Sequence
  Description of Artificial Sequence: Synthetic oligonucleotide
auugucgacuucagcuauu

SEQ ID NO: 1610552 - RNA, 19 nt, Artificial Sequence
  Description of Artificial Sequence: Synthetic oligonucleotide
gccagggcuugguaaucgc

SEQ ID NO: 1610553 - RNA, 19 nt, Artificial Sequence
  Description of Artificial Sequence: Synthetic oligonucleotide
ccucgucucuuaauguaca

SEQ ID NO: 1610554 - RNA, 19 nt, Artificial Sequence
  Description of Artificial Sequence: Synthetic oligonucleotide
gggaaaucguuuguccuua

SEQ ID NO: 1610555 - RNA, 19 nt, Artificial Sequence
  Description of Artificial Sequence: Synthetic oligonucleotide
cagcuauugaaccgaggau

SEQ ID NO: 1610556 - RNA, 19 nt, Artificial Sequence
  Description of Artificial Sequence: Synthetic oligonucleotide
ccugggcuauuuagaauca

SEQ ID NO: 1610557 - RNA, 19 nt, Artificial Sequence
  Description of Artificial Sequence: Synthetic oligonucleotide
gcuaggucuguagcuaaaa

SEQ ID NO: 1610558 - RNA, 19 nt, Artificial Sequence
  Description of Artificial Sequence: Synthetic oligonucleotide
gcgacaucagggauauuaa

SEQ ID NO: 1610559 - RNA, 19 nt, Artificial Sequence
  Description of Artificial Sequence: Synthetic oligonucleotide
gcugcucuucgaaaauuaa

SEQ ID NO: 1610560 - RNA, 19 nt, Artificial Sequence
  Description of Artificial Sequence: Synthetic oligonucleotide
gcugagcauugugaaggac

SEQ ID NO: 1610561 - RNA, 19 nt, Artificial Sequence
  Description of Artificial Sequence: Synthetic oligonucleotide
ggcuuaaucuugccaguau

SEQ ID NO: 1610562 - RNA, 19 nt, Artificial Sequence
  Description of Artificial Sequence: Synthetic oligonucleotide
gugauaggcaacgcaugau

SEQ ID NO: 1610563 - RNA, 19 nt, Artificial Sequence
  Description of Artificial Sequence: Synthetic oligonucleotide
caagugucucuagauccgu

SEQ ID NO: 1610564 - RNA, 19 nt, Artificial Sequence
  Description of Artificial Sequence: Synthetic oligonucleotide
ccagggcuugguaaucgca

SEQ ID NO: 1610565 - RNA, 19 nt, Artificial Sequence
  Description of Artificial Sequence: Synthetic oligonucleotide
cuagauccgucaacuuguu

SEQ ID NO: 1610566 - RNA, 19 nt, Artificial Sequence
  Description of Artificial Sequence: Synthetic oligonucleotide
gggcuacaccaacaaccuc

SEQ ID NO: 1610567 - RNA, 19 nt, Artificial Sequence
  Description of Artificial Sequence: Synthetic oligonucleotide
ggcaugccuccaauuguga

SEQ ID NO: 1610568 - RNA, 19 nt, Artificial Sequence
  Description of Artificial Sequence: Synthetic oligonucleotide
cuauugaaccgaggauccu

SEQ ID NO: 1610569 - RNA, 19 nt, Artificial Sequence
  Description of Artificial Sequence: Synthetic oligonucleotide
guacagugcuaggucugua

SEQ ID NO: 1610570 - RNA, 19 nt, Artificial Sequence
  Description of Artificial Sequence: Synthetic oligonucleotide
cgcuguauguaugaguugu

SEQ ID NO: 1610571 - RNA, 19 nt, Artificial Sequence
  Description of Artificial Sequence: Synthetic oligonucleotide
ggaccucuaaugucaccau

SEQ ID NO: 1610572 - RNA, 19 nt, Artificial Sequence
  Description of Artificial Sequence: Synthetic oligonucleotide
ggauauuaaguggcuccau

SEQ ID NO: 1610573 - RNA, 19 nt, Artificial Sequence
  Description of Artificial Sequence: Synthetic oligonucleotide
ggguguucacuucgcugua

SEQ ID NO: 1610574 - RNA, 19 nt, Artificial Sequence
  Description of Artificial Sequence: Synthetic oligonucleotide
ccaccgcuucauacaucug

SEQ ID NO: 1610575 - RNA, 19 nt, Artificial Sequence
  Description of Artificial Sequence: Synthetic oligonucleotide
cugggcuauuuagaaucau

SEQ ID NO: 1610576 - RNA, 19 nt, Artificial Sequence
  Description of Artificial Sequence: Synthetic oligonucleotide
ccuuagcgacaucagggau

SEQ ID NO: 1610577 - RNA, 19 nt, Artificial Sequence
  Description of Artificial Sequence: Synthetic oligonucleotide
ccaaugcaguguguguuua

SEQ ID NO: 1610578 - RNA, 19 nt, Artificial Sequence
  Description of Artificial Sequence: Synthetic oligonucleotide
gguguucacuucgcuguau

SEQ ID NO: 1610579 - RNA, 19 nt, Artificial Sequence
  Description of Artificial Sequence: Synthetic oligonucleotide
cgaugaauauggugcacuu

SEQ ID NO: 1610580 - RNA, 19 nt, Artificial Sequence
  Description of Artificial Sequence: Synthetic oligonucleotide
ccgucaacuuguucugaau

SEQ ID NO: 1610581 - RNA, 19 nt, Artificial Sequence
  Description of Artificial Sequence: Synthetic oligonucleotide
gggccagcggguguucacu

SEQ ID NO: 1610582 - RNA, 19 nt, Artificial Sequence
  Description of Artificial Sequence: Synthetic oligonucleotide
uagcgacaucagggauauu

SEQ ID NO: 1610583 - RNA, 19 nt, Artificial Sequence
  Description of Artificial Sequence: Synthetic oligonucleotide
ggccagcggguguucacuu

SEQ ID NO: 1610584 - RNA, 19 nt, Artificial Sequence
  Description of Artificial Sequence: Synthetic oligonucleotide
cguuuguccuuagcgacau

SEQ ID NO: 1610585 - RNA, 19 nt, Artificial Sequence
  Description of Artificial Sequence: Synthetic oligonucleotide
cucuauuucacuuagacac

SEQ ID NO: 1610586 - RNA, 19 nt, Artificial Sequence
  Description of Artificial Sequence: Synthetic oligonucleotide
ucacucuugacauugaggg

SEQ ID NO: 1610587 - RNA, 19 nt, Artificial Sequence
  Description of Artificial Sequence: Synthetic oligonucleotide
aguguguugagagagaucc

SEQ ID NO: 1610588 - RNA, 19 nt, Artificial Sequence
  Description of Artificial Sequence: Synthetic oligonucleotide
aaugugggcaaucuccgcc

SEQ ID NO: 1610589 - RNA, 19 nt, Artificial Sequence
  Description of Artificial Sequence: Synthetic oligonucleotide
aaagagugcaaauaguccu

SEQ ID NO: 1610590 - RNA, 19 nt, Artificial Sequence
  Description of Artificial Sequence: Synthetic oligonucleotide
uuagacacugcgcagauac

SEQ ID NO: 1610591 - RNA, 19 nt, Artificial Sequence
  Description of Artificial Sequence: Synthetic oligonucleotide
aaccuuuucacucuugaca

SEQ ID NO: 1610592 - RNA, 19 nt, Artificial Sequence
  Description of Artificial Sequence: Synthetic oligonucleotide
ugaaaacuugcucugagaa

SEQ ID NO: 1610593 - RNA, 19 nt, Artificial Sequence
  Description of Artificial Sequence: Synthetic oligonucleotide
cucagcuucagcacgagcg

SEQ ID NO: 1610594 - RNA, 19 nt, Artificial Sequence
  Description of Artificial Sequence: Synthetic oligonucleotide
uuugaaaacuugcucugag

SEQ ID NO: 1610595 - RNA, 19 nt, Artificial Sequence
  Description of Artificial Sequence: Synthetic oligonucleotide
ugaauguccuucaaggugu

SEQ ID NO: 1610596 - RNA, 19 nt, Artificial Sequence
  Description of Artificial Sequence: Synthetic oligonucleotide
gucauaugggccaugaugg

SEQ ID NO: 1610597 - RNA, 19 nt, Artificial Sequence
  Description of Artificial Sequence: Synthetic oligonucleotide
aaaccuuuucacucuugac

SEQ ID NO: 1610598 - RNA, 19 nt, Artificial Sequence
  Description of Artificial Sequence: Synthetic oligonucleotide
uucacucuugacauugagg

SEQ ID NO: 1610599 - RNA, 19 nt, Artificial Sequence
  Description of Artificial Sequence: Synthetic oligonucleotide
acugauacccauguugacc

SEQ ID NO: 1610600 - RNA, 19 nt, Artificial Sequence
  Description of Artificial Sequence: Synthetic oligonucleotide
accucgaugucauagguag

SEQ ID NO: 1610601 - RNA, 19 nt, Artificial Sequence
  Description of Artificial Sequence: Synthetic oligonucleotide
uucaccugggcaaugcccg

SEQ ID NO: 1610602 - RNA, 19 nt, Artificial Sequence
  Description of Artificial Sequence: Synthetic oligonucleotide
caaagagugcaaauagucc

SEQ ID NO: 1610603 - RNA, 19 nt, Artificial Sequence
  Description of Artificial Sequence: Synthetic oligonucleotide
agugcaaauaguccugguc

SEQ ID NO: 1610604 - RNA, 19 nt, Artificial Sequence
  Description of Artificial Sequence: Synthetic oligonucleotide
acucuugacauugaggguc

SEQ ID NO: 1610605 - RNA, 19 nt, Artificial Sequence
  Description of Artificial Sequence: Synthetic oligonucleotide
caugauggcccucuggugg

SEQ ID NO: 1610606 - RNA, 19 nt, Artificial Sequence
  Description of Artificial Sequence: Synthetic oligonucleotide
uuuggacuugcgcugugcg

SEQ ID NO: 1610607 - RNA, 19 nt, Artificial Sequence
  Description of Artificial Sequence: Synthetic oligonucleotide
ugaucuuauuggcugaggu

SEQ ID NO: 1610608 - RNA, 19 nt, Artificial Sequence
  Description of Artificial Sequence: Synthetic oligonucleotide
aaaacaugguugaggcugc

SEQ ID NO: 1610609 - RNA, 19 nt, Artificial Sequence
  Description of Artificial Sequence: Synthetic oligonucleotide
uugggagccgcgcagagcc

SEQ ID NO: 1610610 - RNA, 19 nt, Artificial Sequence
  Description of Artificial Sequence: Synthetic oligonucleotide
ucaugcuguccucaaaggc

SEQ ID NO: 1610611 - RNA, 19 nt, Artificial Sequence
  Description of Artificial Sequence: Synthetic oligonucleotide
ugcaugaucagcugggccu

SEQ ID NO: 1610612 - RNA, 19 nt, Artificial Sequence
  Description of Artificial Sequence: Synthetic oligonucleotide
gaggaggccacuuugaaaa

SEQ ID NO: 1610613 - RNA, 19 nt, Artificial Sequence
  Description of Artificial Sequence: Synthetic oligonucleotide
uggauuuguuggaugcagg

SEQ ID NO: 1610614 - RNA, 19 nt, Artificial Sequence
  Description of Artificial Sequence: Synthetic oligonucleotide
uucaugcuguccucaaagg

SEQ ID NO: 1610615 - RNA, 19 nt, Artificial Sequence
  Description of Artificial Sequence: Synthetic oligonucleotide
ucucuauuucacuuagaca

SEQ ID NO: 1610616 - RNA, 19 nt, Artificial Sequence
  Description of Artificial Sequence: Synthetic oligonucleotide
guugagagagauccucugg

SEQ ID NO: 1610617 - RNA, 19 nt, Artificial Sequence
  Description of Artificial Sequence: Synthetic oligonucleotide
ucaagguguagcuaaccac

SEQ ID NO: 1610618 - RNA, 19 nt, Artificial Sequence
  Description of Artificial Sequence: Synthetic oligonucleotide
uuucaccugggcaaugccc

SEQ ID NO: 1610619 - RNA, 19 nt, Artificial Sequence
  Description of Artificial Sequence: Synthetic oligonucleotide
auuuucaccugggcaaugc

SEQ ID NO: 1610620 - RNA, 19 nt, Artificial Sequence
  Description of Artificial Sequence: Synthetic oligonucleotide
uucuuagccauuugcucag

SEQ ID NO: 1610621 - RNA, 19 nt, Artificial Sequence
  Description of Artificial Sequence: Synthetic oligonucleotide
gguguagcuaaccacacug

SEQ ID NO: 1610622 - RNA, 19 nt, Artificial Sequence
  Description of Artificial Sequence: Synthetic oligonucleotide
aaaggcuuguugugguuca

SEQ ID NO: 1610623 - RNA, 19 nt, Artificial Sequence
  Description of Artificial Sequence: Synthetic oligonucleotide
ugggcaaugcccgugacug

SEQ ID NO: 1610624 - RNA, 19 nt, Artificial Sequence
  Description of Artificial Sequence: Synthetic oligonucleotide
agagagauccucuggauuu

SEQ ID NO: 1610625 - RNA, 19 nt, Artificial Sequence
  Description of Artificial Sequence: Synthetic oligonucleotide
accgcugaucucuucugcc

SEQ ID NO: 1610626 - RNA, 19 nt, Artificial Sequence
  Description of Artificial Sequence: Synthetic oligonucleotide
aacccggagaccaccaugg

SEQ ID NO: 1610627 - RNA, 19 nt, Artificial Sequence
  Description of Artificial Sequence: Synthetic oligonucleotide
gagccuuccccaaagagug

SEQ ID NO: 1610628 - RNA, 19 nt, Artificial Sequence
  Description of Artificial Sequence: Synthetic oligonucleotide
uguugagagagauccucug

SEQ ID NO: 1610629 - RNA, 19 nt, Artificial Sequence
  Description of Artificial Sequence: Synthetic oligonucleotide
cucgaugucauagguagcc

SEQ ID NO: 1610630 - RNA, 19 nt, Artificial Sequence
  Description of Artificial Sequence: Synthetic oligonucleotide
uauuucacuuagacacugc

SEQ ID NO: 1610631 - RNA, 19 nt, Artificial Sequence
  Description of Artificial Sequence: Synthetic oligonucleotide
uguagcuaaccacacugau

SEQ ID NO: 1610632 - RNA, 19 nt, Artificial Sequence
  Description of Artificial Sequence: Synthetic oligonucleotide
ucuuauuggcugaggucag

SEQ ID NO: 1610633 - RNA, 19 nt, Artificial Sequence
  Description of Artificial Sequence: Synthetic oligonucleotide
uggacuugcgcugugcgag

SEQ ID NO: 1610634 - RNA, 19 nt, Artificial Sequence
  Description of Artificial Sequence: Synthetic oligonucleotide
gaucuuauuggcugagguc

SEQ ID NO: 1610635 - RNA, 19 nt, Artificial Sequence
  Description of Artificial Sequence: Synthetic oligonucleotide
caagguguagcuaaccaca

SEQ ID NO: 1610636 - RNA, 19 nt, Artificial Sequence
  Description of Artificial Sequence: Synthetic oligonucleotide
augauggcccucugguggc

SEQ ID NO: 1610637 - RNA, 19 nt, Artificial Sequence
  Description of Artificial Sequence: Synthetic oligonucleotide
aaaacucggccuccggcca

SEQ ID NO: 1610638 - RNA, 19 nt, Artificial Sequence
  Description of Artificial Sequence: Synthetic oligonucleotide
agauggggaccccauggcg

SEQ ID NO: 1610639 - RNA, 19 nt, Artificial Sequence
  Description of Artificial Sequence: Synthetic oligonucleotide
aagguguagcuaaccacac

SEQ ID NO: 1610640 - RNA, 19 nt, Artificial Sequence
  Description of Artificial Sequence: Synthetic oligonucleotide
uccaguacuuccccaguca

SEQ ID NO: 1610641 - RNA, 19 nt, Artificial Sequence
  Description of Artificial Sequence: Synthetic oligonucleotide
cacgcauccucacagacuc

SEQ ID NO: 1610642 - RNA, 19 nt, Artificial Sequence
  Description of Artificial Sequence: Synthetic oligonucleotide
gauuuguuggaugcagggc

SEQ ID NO: 1610643 - RNA, 19 nt, Artificial Sequence
  Description of Artificial Sequence: Synthetic oligonucleotide
cugauacccauguugacca

SEQ ID NO: 1610644 - RNA, 19 nt, Artificial Sequence
  Description of Artificial Sequence: Synthetic oligonucleotide
ugcgcagauaccuucuccu

SEQ ID NO: 1610645 - RNA, 19 nt, Artificial Sequence
  Description of Artificial Sequence: Synthetic oligonucleotide
uauggcgaaggccucggcu

SEQ ID NO: 1610646 - RNA, 19 nt, Artificial Sequence
  Description of Artificial Sequence: Synthetic oligonucleotide
gauacccauguugaccagg

SEQ ID NO: 1610647 - RNA, 19 nt, Artificial Sequence
  Description of Artificial Sequence: Synthetic oligonucleotide
uccucacagacucagccuc

SEQ ID NO: 1610648 - RNA, 19 nt, Artificial Sequence
  Description of Artificial Sequence: Synthetic oligonucleotide
gucaucaugaauguccuuc

SEQ ID NO: 1610649 - RNA, 19 nt, Artificial Sequence
  Description of Artificial Sequence: Synthetic oligonucleotide
uuggccucccguaucccgg

SEQ ID NO: 1610650 - RNA, 19 nt, Artificial Sequence
  Description of Artificial Sequence: Synthetic oligonucleotide
uccgcuggacaccagugug

SEQ ID NO: 1610651 - RNA, 19 nt, Artificial Sequence
  Description of Artificial Sequence: Synthetic oligonucleotide
ucacuuagacacugcgcag

SEQ ID NO: 1610652 - RNA, 19 nt, Artificial Sequence
  Description of Artificial Sequence: Synthetic oligonucleotide
auguccaguacuuccccag

SEQ ID NO: 1610653 - RNA, 19 nt, Artificial Sequence
  Description of Artificial Sequence: Synthetic oligonucleotide
uucagcacgagcgcgggcc

SEQ ID NO: 1610654 - RNA, 19 nt, Artificial Sequence
  Description of Artificial Sequence: Synthetic oligonucleotide
uccccacgcauccucacag

SEQ ID NO: 1610655 - RNA, 19 nt, Artificial Sequence
  Description of Artificial Sequence: Synthetic oligonucleotide
ugguacaucuggaaggcuu

SEQ ID NO: 1610656 - RNA, 19 nt, Artificial Sequence
  Description of Artificial Sequence: Synthetic oligonucleotide
ugaccucgaugucauaggu

SEQ ID NO: 1610657 - RNA, 19 nt, Artificial Sequence
  Description of Artificial Sequence: Synthetic oligonucleotide
gucuguagcgcucagccuc

SEQ ID NO: 1610658 - RNA, 19 nt, Artificial Sequence
  Description of Artificial Sequence: Synthetic oligonucleotide
aguguuuccagggcaaugu

SEQ ID NO: 1610659 - RNA, 19 nt, Artificial Sequence
  Description of Artificial Sequence: Synthetic oligonucleotide
acacugcgcagauaccuuc

SEQ ID NO: 1610660 - RNA, 19 nt, Artificial Sequence
  Description of Artificial Sequence: Synthetic oligonucleotide
aaacucggccuccggccac

SEQ ID NO: 1610661 - RNA, 19 nt, Artificial Sequence
  Description of Artificial Sequence: Synthetic oligonucleotide
ugugaucuuauuggcugag

SEQ ID NO: 1610662 - RNA, 19 nt, Artificial Sequence
  Description of Artificial Sequence: Synthetic oligonucleotide
gcuaaccacacugauaccc

SEQ ID NO: 1610663 - RNA, 19 nt, Artificial Sequence
  Description of Artificial Sequence: Synthetic oligonucleotide
uuccacuuccgcuggacac

SEQ ID NO: 1610664 - RNA, 19 nt, Artificial Sequence
  Description of Artificial Sequence: Synthetic oligonucleotide
cagcauguccagcugggcg

SEQ ID NO: 1610665 - RNA, 19 nt, Artificial Sequence
  Description of Artificial Sequence: Synthetic oligonucleotide
ugcaaauaguccuggucau

SEQ ID NO: 1610666 - RNA, 19 nt, Artificial Sequence
  Description of Artificial Sequence: Synthetic oligonucleotide
agcgcgggccccuauggcg

SEQ ID NO: 1610667 - RNA, 19 nt, Artificial Sequence
  Description of Artificial Sequence: Synthetic oligonucleotide
cuggauuuucaccugggca

SEQ ID NO: 1610668 - RNA, 19 nt, Artificial Sequence
  Description of Artificial Sequence: Synthetic oligonucleotide
uugcucugagaauuucugu

SEQ ID NO: 1610669 - RNA, 19 nt, Artificial Sequence
  Description of Artificial Sequence: Synthetic oligonucleotide
augguuccacuuccgcugg

SEQ ID NO: 1610670 - RNA, 19 nt, Artificial Sequence
  Description of Artificial Sequence: Synthetic oligonucleotide
cuuggccucccguaucccg

SEQ ID NO: 1610671 - RNA, 19 nt, Artificial Sequence
  Description of Artificial Sequence: Synthetic oligonucleotide
aguacuuccccagucacuu

SEQ ID NO: 1610672 - RNA, 19 nt, Artificial Sequence
  Description of Artificial Sequence: Synthetic oligonucleotide
ugauaggccagguccgccu

SEQ ID NO: 1610673 - RNA, 19 nt, Artificial Sequence
  Description of Artificial Sequence: Synthetic oligonucleotide
gaacccggagaccaccaug

SEQ ID NO: 1610674 - RNA, 19 nt, Artificial Sequence
  Description of Artificial Sequence: Synthetic oligonucleotide
ugaggaggccacuuugaaa

SEQ ID NO: 1610675 - RNA, 19 nt, Artificial Sequence
  Description of Artificial Sequence: Synthetic oligonucleotide
agccucggcaggcuugcgc

SEQ ID NO: 1610676 - RNA, 19 nt, Artificial Sequence
  Description of Artificial Sequence: Synthetic oligonucleotide
ucuugggagccgcgcagag

SEQ ID NO: 1610677 - RNA, 19 nt, Artificial Sequence
  Description of Artificial Sequence: Synthetic oligonucleotide
aggaggccacuuugaaaac

SEQ ID NO: 1610678 - RNA, 19 nt, Artificial Sequence
  Description of Artificial Sequence: Synthetic oligonucleotide
gcggguauaaaccuuuuca

SEQ ID NO: 1610679 - RNA, 19 nt, Artificial Sequence
  Description of Artificial Sequence: Synthetic oligonucleotide
ugcucggcgaguguugacc

SEQ ID NO: 1610680 - RNA, 19 nt, Artificial Sequence
  Description of Artificial Sequence: Synthetic oligonucleotide
acugcgcagauaccuucuc

SEQ ID NO: 1610681 - RNA, 19 nt, Artificial Sequence
  Description of Artificial Sequence: Synthetic oligonucleotide
cuucaagguguagcuaacc

SEQ ID NO: 1610682 - RNA, 19 nt, Artificial Sequence
  Description of Artificial Sequence: Synthetic oligonucleotide
aggcuuguugugguucacc

SEQ ID NO: 1610683 - RNA, 19 nt, Artificial Sequence
  Description of Artificial Sequence: Synthetic oligonucleotide
cugagaauuucugucuguc

SEQ ID NO: 1610684 - RNA, 19 nt, Artificial Sequence
  Description of Artificial Sequence: Synthetic oligonucleotide
caugcuguccucaaaggcu

SEQ ID NO: 1610685 - RNA, 19 nt, Artificial Sequence
  Description of Artificial Sequence: Synthetic oligonucleotide
uccacuuccgcuggacacc

SEQ ID NO: 1610686 - RNA, 19 nt, Artificial Sequence
  Description of Artificial Sequence: Synthetic oligonucleotide
uuguucuggcccuggauuu

SEQ ID NO: 1610687 - RNA, 19 nt, Artificial Sequence
  Description of Artificial Sequence: Synthetic oligonucleotide
guugaccaggucugaggag

SEQ ID NO: 1610688 - RNA, 19 nt, Artificial Sequence
  Description of Artificial Sequence: Synthetic oligonucleotide
aaggcuuguugugguucac

SEQ ID NO: 1610689 - RNA, 19 nt, Artificial Sequence
  Description of Artificial Sequence: Synthetic oligonucleotide
acuuagacacugcgcagau

SEQ ID NO: 1610690 - RNA, 19 nt, Artificial Sequence
  Description of Artificial Sequence: Synthetic oligonucleotide
gaccgcugaucucuucugc

SEQ ID NO: 1610691 - RNA, 19 nt, Artificial Sequence
  Description of Artificial Sequence: Synthetic oligonucleotide
cccauggcggguauaaacc

SEQ ID NO: 1610692 - RNA, 19 nt, Artificial Sequence
  Description of Artificial Sequence: Synthetic oligonucleotide
uuccgcuggacaccagugu

SEQ ID NO: 1610693 - RNA, 19 nt, Artificial Sequence
  Description of Artificial Sequence: Synthetic oligonucleotide
uuccccaauccgagcaucu

SEQ ID NO: 1610694 - RNA, 19 nt, Artificial Sequence
  Description of Artificial Sequence: Synthetic oligonucleotide
agaugcugacgcccgugag

SEQ ID NO: 1610695 - RNA, 19 nt, Artificial Sequence
  Description of Artificial Sequence: Synthetic oligonucleotide
ccuccggccaccaugacug

SEQ ID NO: 1610696 - RNA, 19 nt, Artificial Sequence
  Description of Artificial Sequence: Synthetic oligonucleotide
uuugggccacaagugaaaa

SEQ ID NO: 1610697 - RNA, 19 nt, Artificial Sequence
  Description of Artificial Sequence: Synthetic oligonucleotide
cuuccgcuggacaccagug

SEQ ID NO: 1610698 - RNA, 19 nt, Artificial Sequence
  Description of Artificial Sequence: Synthetic oligonucleotide
guagcgcucagccucggca

SEQ ID NO: 1610699 - RNA, 19 nt, Artificial Sequence
  Description of Artificial Sequence: Synthetic oligonucleotide
uccccaaagagugcaaaua

SEQ ID NO: 1610700 - RNA, 19 nt, Artificial Sequence
  Description of Artificial Sequence: Synthetic oligonucleotide
acagucauaugggccauga

SEQ ID NO: 1610701 - RNA, 19 nt, Artificial Sequence
  Description of Artificial Sequence: Synthetic oligonucleotide
gaaaacuugcucugagaau

SEQ ID NO: 1610702 - RNA, 19 nt, Artificial Sequence
  Description of Artificial Sequence: Synthetic oligonucleotide
uccgccugugcucggcgag

SEQ ID NO: 1610703 - RNA, 19 nt, Artificial Sequence
  Description of Artificial Sequence: Synthetic oligonucleotide
cauuugggccacaagugaa

SEQ ID NO: 1610704 - RNA, 19 nt, Artificial Sequence
  Description of Artificial Sequence: Synthetic oligonucleotide
uuaggauguccaguacuuc

SEQ ID NO: 1610705 - RNA, 19 nt, Artificial Sequence
  Description of Artificial Sequence: Synthetic oligonucleotide
cugcgcagauaccuucucc

SEQ ID NO: 1610706 - RNA, 19 nt, Artificial Sequence
  Description of Artificial Sequence: Synthetic oligonucleotide
gugaucuuauuggcugagg

SEQ ID NO: 1610707 - RNA, 19 nt, Artificial Sequence
  Description of Artificial Sequence: Synthetic oligonucleotide
ugugcgagccuuccccaaa

SEQ ID NO: 1610708 - RNA, 19 nt, Artificial Sequence
  Description of Artificial Sequence: Synthetic oligonucleotide
gagagauccucuggauuug

SEQ ID NO: 1610709 - RNA, 19 nt, Artificial Sequence
  Description of Artificial Sequence: Synthetic oligonucleotide
ccaucucuauuucacuuag

SEQ ID NO: 1610710 - RNA, 19 nt, Artificial Sequence
  Description of Artificial Sequence: Synthetic oligonucleotide
cucugcuuccccaauccga

SEQ ID NO: 1610711 - RNA, 19 nt, Artificial Sequence
  Description of Artificial Sequence: Synthetic oligonucleotide
cccggcaucucuuuuggcc

SEQ ID NO: 1610712 - RNA, 19 nt, Artificial Sequence
  Description of Artificial Sequence: Synthetic oligonucleotide
acgcccgugagucucucca

SEQ ID NO: 1610713 - RNA, 19 nt, Artificial Sequence
  Description of Artificial Sequence: Synthetic oligonucleotide
cacugauacccauguugac

SEQ ID NO: 1610714 - RNA, 19 nt, Artificial Sequence
  Description of Artificial Sequence: Synthetic oligonucleotide
agguguagcuaaccacacu

SEQ ID NO: 1610715 - RNA, 19 nt, Artificial Sequence
  Description of Artificial Sequence: Synthetic oligonucleotide
gcggggagcaacccuacgg

SEQ ID NO: 1610716 - RNA, 19 nt, Artificial Sequence
  Description of Artificial Sequence: Synthetic oligonucleotide
cuccuucucgcgccgggcg

SEQ ID NO: 1610717 - RNA, 19 nt, Artificial Sequence
  Description of Artificial Sequence: Synthetic oligonucleotide
uguagcgcucagccucggc

SEQ ID NO: 1610718 - RNA, 19 nt, Artificial Sequence
  Description of Artificial Sequence: Synthetic oligonucleotide
ucaaaggcuuguugugguu

SEQ ID NO: 1610719 - RNA, 19 nt, Artificial Sequence
  Description of Artificial Sequence: Synthetic oligonucleotide
acccggagaccaccauggc

SEQ ID NO: 1610720 - RNA, 19 nt, Artificial Sequence
  Description of Artificial Sequence: Synthetic oligonucleotide
uuggccuuggccucccgua

SEQ ID NO: 1610721 - RNA, 19 nt, Artificial Sequence
  Description of Artificial Sequence: Synthetic oligonucleotide
gaugcugacgcccgugagu

SEQ ID NO: 1610722 - RNA, 19 nt, Artificial Sequence
  Description of Artificial Sequence: Synthetic oligonucleotide
gcgaguguugaccucgaug

SEQ ID NO: 1610723 - RNA, 19 nt, Artificial Sequence
  Description of Artificial Sequence: Synthetic oligonucleotide
ugcagaacccggagaccac

SEQ ID NO: 1610724 - RNA, 19 nt, Artificial Sequence
  Description of Artificial Sequence: Synthetic oligonucleotide
ugugcucggcgaguguuga

SEQ ID NO: 1610725 - RNA, 19 nt, Artificial Sequence
  Description of Artificial Sequence: Synthetic oligonucleotide
acauugagggucagugugu

SEQ ID NO: 1610726 - RNA, 19 nt, Artificial Sequence
  Description of Artificial Sequence: Synthetic oligonucleotide
aggcuugcgcacgcgggcc

SEQ ID NO: 1610727 - RNA, 19 nt, Artificial Sequence
  Description of Artificial Sequence: Synthetic oligonucleotide
cugggcgcguuccaccacc

SEQ ID NO: 1610728 - RNA, 19 nt, Artificial Sequence
  Description of Artificial Sequence: Synthetic oligonucleotide
ggcgcguuccaccaccugc

SEQ ID NO: 1610729 - RNA, 19 nt, Artificial Sequence
  Description of Artificial Sequence: Synthetic oligonucleotide
auggccucauuugggccac

SEQ ID NO: 1610730 - RNA, 19 nt, Artificial Sequence
  Description of Artificial Sequence: Synthetic oligonucleotide
uccuucucgcgccgggcga

SEQ ID NO: 1610731 - RNA, 19 nt, Artificial Sequence
  Description of Artificial Sequence: Synthetic oligonucleotide
ggguauaaaccuuuucacu

SEQ ID NO: 1610732 - RNA, 19 nt, Artificial Sequence
  Description of Artificial Sequence: Synthetic oligonucleotide
caggcuugcgcacgcgggc

SEQ ID NO: 1610733 - RNA, 19 nt, Artificial Sequence
  Description of Artificial Sequence: Synthetic oligonucleotide
ggggagcaacccuacgggg

SEQ ID NO: 1610734 - RNA, 19 nt, Artificial Sequence
  Description of Artificial Sequence: Synthetic oligonucleotide
cuuaggauguccaguacuu

SEQ ID NO: 1610735 - RNA, 19 nt, Artificial Sequence
  Description of Artificial Sequence: Synthetic oligonucleotide
cucggcuuccccacgcauc

SEQ ID NO: 1610736 - RNA, 19 nt, Artificial Sequence
  Description of Artificial Sequence: Synthetic oligonucleotide
ucggcaggcuugcgcacgc

SEQ ID NO: 1610737 - RNA, 19 nt, Artificial Sequence
  Description of Artificial Sequence: Synthetic oligonucleotide
uccgccaggcgcuccaguc

SEQ ID NO: 1610738 - RNA, 19 nt, Artificial Sequence
  Description of Artificial Sequence: Synthetic oligonucleotide
ggcaaugcccgugacugag

SEQ ID NO: 1610739 - RNA, 19 nt, Artificial Sequence
  Description of Artificial Sequence: Synthetic oligonucleotide
auuugggccacaagugaaa

SEQ ID NO: 1610740 - RNA, 19 nt, Artificial Sequence
  Description of Artificial Sequence: Synthetic oligonucleotide
gaguguugaccucgauguc

SEQ ID NO: 1610741 - RNA, 19 nt, Artificial Sequence
  Description of Artificial Sequence: Synthetic oligonucleotide
uccucuggauuuguuggau

SEQ ID NO: 1610742 - RNA, 19 nt, Artificial Sequence
  Description of Artificial Sequence: Synthetic oligonucleotide
uaguccuggucaucaugaa

SEQ ID NO: 1610743 - RNA, 19 nt, Artificial Sequence
  Description of Artificial Sequence: Synthetic oligonucleotide
ugcgcugugcgagccuucc

SEQ ID NO: 1610744 - RNA, 19 nt, Artificial Sequence
  Description of Artificial Sequence: Synthetic oligonucleotide
cacuuagacacugcgcaga

SEQ ID NO: 1610745 - RNA, 19 nt, Artificial Sequence
  Description of Artificial Sequence: Synthetic oligonucleotide
uccggccaccaugacuggg

SEQ ID NO: 1610746 - RNA, 19 nt, Artificial Sequence
  Description of Artificial Sequence: Synthetic oligonucleotide
guagcuaaccacacugaua

SEQ ID NO: 1610747 - RNA, 19 nt, Artificial Sequence
  Description of Artificial Sequence: Synthetic oligonucleotide
ccugguacaucuggaaggc

SEQ ID NO: 1610748 - RNA, 19 nt, Artificial Sequence
  Description of Artificial Sequence: Synthetic oligonucleotide
cugugcucggcgaguguug

SEQ ID NO: 1610749 - RNA, 19 nt, Artificial Sequence
  Description of Artificial Sequence: Synthetic oligonucleotide
guuggaugcagggcaggac

SEQ ID NO: 1610750 - RNA, 19 nt, Artificial Sequence
  Description of Artificial Sequence: Synthetic oligonucleotide
ucucuggcaggcggcuuag

SEQ ID NO: 1610751 - RNA, 19 nt, Artificial Sequence
  Description of Artificial Sequence: Synthetic oligonucleotide
gacuugcgcugugcgagcc

SEQ ID NO: 1610752 - RNA, 19 nt, Artificial Sequence
  Description of Artificial Sequence: Synthetic oligonucleotide
ucuugacauugagggucag

SEQ ID NO: 1610753 - RNA, 19 nt, Artificial Sequence
  Description of Artificial Sequence: Synthetic oligonucleotide
cucaaaggcuuguuguggu

SEQ ID NO: 1610754 - RNA, 19 nt, Artificial Sequence
  Description of Artificial Sequence: Synthetic oligonucleotide
ugcccgugacugagauggg

SEQ ID NO: 1610755 - RNA, 19 nt, Artificial Sequence
  Description of Artificial Sequence: Synthetic oligonucleotide
agagauccucuggauuugu

SEQ ID NO: 1610756 - RNA, 19 nt, Artificial Sequence
  Description of Artificial Sequence: Synthetic oligonucleotide
caguguuuccagggcaaug

SEQ ID NO: 1610757 - RNA, 19 nt, Artificial Sequence
  Description of Artificial Sequence: Synthetic oligonucleotide
cucggcaggcuugcgcacg

SEQ ID NO: 1610758 - RNA, 19 nt, Artificial Sequence
  Description of Artificial Sequence: Synthetic oligonucleotide
uggccuuggccucccguau

SEQ ID NO: 1610759 - RNA, 19 nt, Artificial Sequence
  Description of Artificial Sequence: Synthetic oligonucleotide
ggcaggcuugcgcacgcgg

SEQ ID NO: 1610760 - RNA, 19 nt, Artificial Sequence
  Description of Artificial Sequence: Synthetic oligonucleotide
cuuccccacgcauccucac

SEQ ID NO: 1610761 - RNA, 19 nt, Artificial Sequence
  Description of Artificial Sequence: Synthetic oligonucleotide
guguagcuaaccacacuga

SEQ ID NO: 1610762 - RNA, 19 nt, Artificial Sequence
  Description of Artificial Sequence: Synthetic oligonucleotide
aaucuccgccucggucuuc

SEQ ID NO: 1610763 - RNA, 19 nt, Artificial Sequence
  Description of Artificial Sequence: Synthetic oligonucleotide
cugcuuccccaauccgagc

SEQ ID NO: 1610764 - RNA, 19 nt, Artificial Sequence
  Description of Artificial Sequence: Synthetic oligonucleotide
ccccauggcggguauaaac

SEQ ID NO: 1610765 - RNA, 19 nt, Artificial Sequence
  Description of Artificial Sequence: Synthetic oligonucleotide
caucucuauuucacuuaga

SEQ ID NO: 1610766 - RNA, 19 nt, Artificial Sequence
  Description of Artificial Sequence: Synthetic oligonucleotide
gcccuggauuuucaccugg

SEQ ID NO: 1610767 - RNA, 19 nt, Artificial Sequence
  Description of Artificial Sequence: Synthetic oligonucleotide
agaacccggagaccaccau

SEQ ID NO: 1610768 - RNA, 19 nt, Artificial Sequence
  Description of Artificial Sequence: Synthetic oligonucleotide
cuauggcgaaggccucggc

SEQ ID NO: 1610769 - RNA, 19 nt, Artificial Sequence
  Description of Artificial Sequence: Synthetic oligonucleotide
ccaguacuuccccagucac

SEQ ID NO: 1610770 - RNA, 19 nt, Artificial Sequence
  Description of Artificial Sequence: Synthetic oligonucleotide
gauggcccucugguggccc

SEQ ID NO: 1610771 - RNA, 19 nt, Artificial Sequence
  Description of Artificial Sequence: Synthetic oligonucleotide
agcugggcggccuccuggu

SEQ ID NO: 1610772 - RNA, 19 nt, Artificial Sequence
  Description of Artificial Sequence: Synthetic oligonucleotide
uuccgggacgcggggagca

SEQ ID NO: 1610773 - RNA, 19 nt, Artificial Sequence
  Description of Artificial Sequence: Synthetic oligonucleotide
ucaggggaccgcugaucuc

SEQ ID NO: 1610774 - RNA, 19 nt, Artificial Sequence
  Description of Artificial Sequence: Synthetic oligonucleotide
ccucacagacucagccucg

SEQ ID NO: 1610775 - RNA, 19 nt, Artificial Sequence
  Description of Artificial Sequence: Synthetic oligonucleotide
acugagauggggaccccau

SEQ ID NO: 1610776 - RNA, 19 nt, Artificial Sequence
  Description of Artificial Sequence: Synthetic oligonucleotide
ggcggcuuaggauguccag

SEQ ID NO: 1610777 - RNA, 19 nt, Artificial Sequence
  Description of Artificial Sequence: Synthetic oligonucleotide
acgagcgcgggccccuaug

SEQ ID NO: 1610778 - RNA, 19 nt, Artificial Sequence
  Description of Artificial Sequence: Synthetic oligonucleotide
acuugcgcugugcgagccu

SEQ ID NO: 1610779 - RNA, 19 nt, Artificial Sequence
  Description of Artificial Sequence: Synthetic oligonucleotide
gaccccauggcggguauaa

SEQ ID NO: 1610780 - RNA, 19 nt, Artificial Sequence
  Description of Artificial Sequence: Synthetic oligonucleotide
ggaccgcugaucucuucug

SEQ ID NO: 1610781 - RNA, 19 nt, Artificial Sequence
  Description of Artificial Sequence: Synthetic oligonucleotide
ucccggcaucucuuuuggc

SEQ ID NO: 1610782 - RNA, 19 nt, Artificial Sequence
  Description of Artificial Sequence: Synthetic oligonucleotide
cugaggaggccacuuugaa

SEQ ID NO: 1610783 - RNA, 19 nt, Artificial Sequence
  Description of Artificial Sequence: Synthetic oligonucleotide
cgcagauaccuucuccugc

SEQ ID NO: 1610784 - RNA, 19 nt, Artificial Sequence
  Description of Artificial Sequence: Synthetic oligonucleotide
cagugugaucuuauuggcu

SEQ ID NO: 1610785 - RNA, 19 nt, Artificial Sequence
  Description of Artificial Sequence: Synthetic oligonucleotide
ccuucaagguguagcuaac

SEQ ID NO: 1610786 - RNA, 19 nt, Artificial Sequence
  Description of Artificial Sequence: Synthetic oligonucleotide
gaccaggucugaggaggcc

SEQ ID NO: 1610787 - RNA, 19 nt, Artificial Sequence
  Description of Artificial Sequence: Synthetic oligonucleotide
gacgcccgugagucucucc

SEQ ID NO: 1610788 - RNA, 19 nt, Artificial Sequence
  Description of Artificial Sequence: Synthetic oligonucleotide
cccggagaccaccauggcc

SEQ ID NO: 1610789 - RNA, 19 nt, Artificial Sequence
  Description of Artificial Sequence: Synthetic oligonucleotide
caccugggagaugcugacg

SEQ ID NO: 1610790 - RNA, 19 nt, Artificial Sequence
  Description of Artificial Sequence: Synthetic oligonucleotide
cucgcgccgggcgaucucc

SEQ ID NO: 1610791 - RNA, 19 nt, Artificial Sequence
  Description of Artificial Sequence: Synthetic oligonucleotide
ugguuccacuuccgcugga

SEQ ID NO: 1610792 - RNA, 19 nt, Artificial Sequence
  Description of Artificial Sequence: Synthetic oligonucleotide
ugauggcccucugguggcc

SEQ ID NO: 1610793 - RNA, 19 nt, Artificial Sequence
  Description of Artificial Sequence: Synthetic oligonucleotide
gacgcggggagcaacccua

SEQ ID NO: 1610794 - RNA, 19 nt, Artificial Sequence
  Description of Artificial Sequence: Synthetic oligonucleotide
gcgcagauaccuucuccug

SEQ ID NO: 1610795 - RNA, 19 nt, Artificial Sequence
  Description of Artificial Sequence: Synthetic oligonucleotide
gcagauaccuucuccugcu

SEQ ID NO: 1610796 - RNA, 19 nt, Artificial Sequence
  Description of Artificial Sequence: Synthetic oligonucleotide
ggcuuaggauguccaguac

SEQ ID NO: 1610797 - RNA, 19 nt, Artificial Sequence
  Description of Artificial Sequence: Synthetic oligonucleotide
gcaggcuugcgcacgcggg

SEQ ID NO: 1610798 - RNA, 19 nt, Artificial Sequence
  Description of Artificial Sequence: Synthetic oligonucleotide
uggcggguauaaaccuuuu

SEQ ID NO: 1610799 - RNA, 19 nt, Artificial Sequence
  Description of Artificial Sequence: Synthetic oligonucleotide
cggggagcaacccuacggg

SEQ ID NO: 1610800 - RNA, 19 nt, Artificial Sequence
  Description of Artificial Sequence: Synthetic oligonucleotide
gacaccagugugaucuuau

SEQ ID NO: 1610801 - RNA, 19 nt, Artificial Sequence
  Description of Artificial Sequence: Synthetic oligonucleotide
cccaugguuccacuuccgc

SEQ ID NO: 1610802 - RNA, 19 nt, Artificial Sequence
  Description of Artificial Sequence: Synthetic oligonucleotide
aggccucggcuuccccacg

SEQ ID NO: 1610803 - RNA, 19 nt, Artificial Sequence
  Description of Artificial Sequence: Synthetic oligonucleotide
gaccucgaugucauaggua

SEQ ID NO: 1610804 - RNA, 19 nt, Artificial Sequence
  Description of Artificial Sequence: Synthetic oligonucleotide
gcuucagcacgagcgcggg

SEQ ID NO: 1610805 - RNA, 19 nt, Artificial Sequence
  Description of Artificial Sequence: Synthetic oligonucleotide
ccggagaccaccauggccu

SEQ ID NO: 1610806 - RNA, 19 nt, Artificial Sequence
  Description of Artificial Sequence: Synthetic oligonucleotide
gggucaguguguugagaga

SEQ ID NO: 1610807 - RNA, 19 nt, Artificial Sequence
  Description of Artificial Sequence: Synthetic oligonucleotide
ggacuugcgcugugcgagc

SEQ ID NO: 1610808 - RNA, 19 nt, Artificial Sequence
  Description of Artificial Sequence: Synthetic oligonucleotide
ggagaugcugacgcccgug

SEQ ID NO: 1610809 - RNA, 19 nt, Artificial Sequence
  Description of Artificial Sequence: Synthetic oligonucleotide
gguccgccugugcucggcg

SEQ ID NO: 1610810 - RNA, 19 nt, Artificial Sequence
  Description of Artificial Sequence: Synthetic oligonucleotide
ccucgaugucauagguagc

SEQ ID NO: 1610811 - RNA, 19 nt, Artificial Sequence
  Description of Artificial Sequence: Synthetic oligonucleotide
ccagguccgccugugcucg

SEQ ID NO: 1610812 - RNA, 19 nt, Artificial Sequence
  Description of Artificial Sequence: Synthetic oligonucleotide
ugcugacgcccgugagucu

SEQ ID NO: 1610813 - RNA, 19 nt, Artificial Sequence
  Description of Artificial Sequence: Synthetic oligonucleotide
cucggcgaguguugaccuc

SEQ ID NO: 1610814 - RNA, 19 nt, Artificial Sequence
  Description of Artificial Sequence: Synthetic oligonucleotide
ccgugacugagauggggac

SEQ ID NO: 1610815 - RNA, 19 nt, Artificial Sequence
  Description of Artificial Sequence: Synthetic oligonucleotide
cuccggccaccaugacugg

SEQ ID NO: 1610816 - RNA, 19 nt, Artificial Sequence
  Description of Artificial Sequence: Synthetic oligonucleotide
gccucggcaggcuugcgca

SEQ ID NO: 1610817 - RNA, 19 nt, Artificial Sequence
  Description of Artificial Sequence: Synthetic oligonucleotide
gcccgugacugagaugggg

SEQ ID NO: 1610818 - RNA, 19 nt, Artificial Sequence
  Description of Artificial Sequence: Synthetic oligonucleotide
uggacaccagugugaucuu

SEQ ID NO: 1610819 - RNA, 19 nt, Artificial Sequence
  Description of Artificial Sequence: Synthetic oligonucleotide
cgcugugcgagccuucccc

SEQ ID NO: 1610820 - RNA, 19 nt, Artificial Sequence
  Description of Artificial Sequence: Synthetic oligonucleotide
auggcccucugguggcccu

SEQ ID NO: 1610821 - RNA, 19 nt, Artificial Sequence
  Description of Artificial Sequence: Synthetic oligonucleotide
gcugauaggccagguccgc

SEQ ID NO: 1610822 - RNA, 19 nt, Artificial Sequence
  Description of Artificial Sequence: Synthetic oligonucleotide
ucccguaucccggcaucuc

SEQ ID NO: 1610823 - RNA, 19 nt, Artificial Sequence
  Description of Artificial Sequence: Synthetic oligonucleotide
uucucgcgccgggcgaucu

SEQ ID NO: 1610824 - RNA, 19 nt, Artificial Sequence
  Description of Artificial Sequence: Synthetic oligonucleotide
cuuccgggacgcggggagc

SEQ ID NO: 1610825 - RNA, 19 nt, Artificial Sequence
  Description of Artificial Sequence: Synthetic oligonucleotide
cuugcgcacgcgggccucc

SEQ ID NO: 1610826 - RNA, 19 nt, Artificial Sequence
  Description of Artificial Sequence: Synthetic oligonucleotide
acgcggggagcaacccuac

SEQ ID NO: 1610827 - RNA, 19 nt, Artificial Sequence
  Description of Artificial Sequence: Synthetic oligonucleotide
cccgugagucucuccacac

SEQ ID NO: 1610828 - RNA, 19 nt, Artificial Sequence
  Description of Artificial Sequence: Synthetic oligonucleotide
ggccccuauggcgaaggcc

SEQ ID NO: 1610829 - RNA, 19 nt, Artificial Sequence
  Description of Artificial Sequence: Synthetic oligonucleotide
cucucuggcaggcggcuua

SEQ ID NO: 1610830 - RNA, 19 nt, Artificial Sequence
  Description of Artificial Sequence: Synthetic oligonucleotide
caggggaccgcugaucucu

SEQ ID NO: 1610831 - RNA, 19 nt, Artificial Sequence
  Description of Artificial Sequence: Synthetic oligonucleotide
caccugcaccugcacccgc

SEQ ID NO: 1610832 - RNA, 19 nt, Artificial Sequence
  Description of Artificial Sequence: Synthetic oligonucleotide
cccgugacugagaugggga

SEQ ID NO: 1610833 - RNA, 19 nt, Artificial Sequence
  Description of Artificial Sequence: Synthetic oligonucleotide
ucucgcgccgggcgaucuc

SEQ ID NO: 1610834 - RNA, 19 nt, Artificial Sequence
  Description of Artificial Sequence: Synthetic oligonucleotide
uccccaauccgagcaucuu

SEQ ID NO: 1610835 - RNA, 19 nt, Artificial Sequence
  Description of Artificial Sequence: Synthetic oligonucleotide
cugccaccugcugggcgcg

SEQ ID NO: 1610836 - RNA, 19 nt, Artificial Sequence
  Description of Artificial Sequence: Synthetic oligonucleotide
caaugcccgugacugagau

SEQ ID NO: 1610837 - RNA, 19 nt, Artificial Sequence
  Description of Artificial Sequence: Synthetic oligonucleotide
cgugacugagauggggacc

SEQ ID NO: 1610838 - RNA, 19 nt, Artificial Sequence
  Description of Artificial Sequence: Synthetic oligonucleotide
gcugugcgagccuucccca

SEQ ID NO: 1610839 - RNA, 19 nt, Artificial Sequence
  Description of Artificial Sequence: Synthetic oligonucleotide
cgcauccucacagacucag

SEQ ID NO: 1610840 - RNA, 19 nt, Artificial Sequence
  Description of Artificial Sequence: Synthetic oligonucleotide
gccucggucuuccccagga

SEQ ID NO: 1610841 - RNA, 19 nt, Artificial Sequence
  Description of Artificial Sequence: Synthetic oligonucleotide
gggucuugggagccgcgca

SEQ ID NO: 1610842 - RNA, 19 nt, Artificial Sequence
  Description of Artificial Sequence: Synthetic oligonucleotide
cacugcgcagauaccuucu

SEQ ID NO: 1610843 - RNA, 19 nt, Artificial Sequence
  Description of Artificial Sequence: Synthetic oligonucleotide
gucuugggagccgcgcaga

SEQ ID NO: 1610844 - RNA, 19 nt, Artificial Sequence
  Description of Artificial Sequence: Synthetic oligonucleotide
gggaccgcugaucucuucu

SEQ ID NO: 1610845 - RNA, 19 nt, Artificial Sequence
  Description of Artificial Sequence: Synthetic oligonucleotide
ccccaugguuccacuuccg

SEQ ID NO: 1610846 - RNA, 19 nt, Artificial Sequence
  Description of Artificial Sequence: Synthetic oligonucleotide
cauggcggguauaaaccuu

SEQ ID NO: 1610847 - RNA, 19 nt, Artificial Sequence
  Description of Artificial Sequence: Synthetic oligonucleotide
cuugacauugagggucagu

SEQ ID NO: 1610848 - RNA, 19 nt, Artificial Sequence
  Description of Artificial Sequence: Synthetic oligonucleotide
ggccaucucuauuucacuu

SEQ ID NO: 1610849 - RNA, 19 nt, Artificial Sequence
  Description of Artificial Sequence: Synthetic oligonucleotide
gugcucggcgaguguugac

SEQ ID NO: 1610850 - RNA, 19 nt, Artificial Sequence
  Description of Artificial Sequence: Synthetic oligonucleotide
cuguagcgcucagccucgg

SEQ ID NO: 1610851 - RNA, 19 nt, Artificial Sequence
  Description of Artificial Sequence: Synthetic oligonucleotide
gugagucucuccacacucu

SEQ ID NO: 1610852 - RNA, 19 nt, Artificial Sequence
  Description of Artificial Sequence: Synthetic oligonucleotide
ggccucggcuuccccacgc

SEQ ID NO: 1610853 - RNA, 19 nt, Artificial Sequence
  Description of Artificial Sequence: Synthetic oligonucleotide
cccaaagagugcaaauagu

SEQ ID NO: 1610854 - RNA, 19 nt, Artificial Sequence
  Description of Artificial Sequence: Synthetic oligonucleotide
cccuauggcgaaggccucg

SEQ ID NO: 1610855 - RNA, 19 nt, Artificial Sequence
  Description of Artificial Sequence: Synthetic oligonucleotide
ccagucacuuuggcggccc

SEQ ID NO: 1610856 - RNA, 19 nt, Artificial Sequence
  Description of Artificial Sequence: Synthetic oligonucleotide
cagguccgccugugcucgg

SEQ ID NO: 1610857 - RNA, 19 nt, Artificial Sequence
  Description of Artificial Sequence: Synthetic oligonucleotide
cugugcgagccuuccccaa

SEQ ID NO: 1610858 - RNA, 19 nt, Artificial Sequence
  Description of Artificial Sequence: Synthetic oligonucleotide
cgagcgcgggccccuaugg

SEQ ID NO: 1610859 - RNA, 19 nt, Artificial Sequence
  Description of Artificial Sequence: Synthetic oligonucleotide
ggaggccacuuugaaaacu

SEQ ID NO: 1610860 - RNA, 19 nt, Artificial Sequence
  Description of Artificial Sequence: Synthetic oligonucleotide
cugggcaaugcccgugacu

SEQ ID NO: 1610861 - RNA, 19 nt, Artificial Sequence
  Description of Artificial Sequence: Synthetic oligonucleotide
cuuagacacugcgcagaua

SEQ ID NO: 1610862 - RNA, 19 nt, Artificial Sequence
  Description of Artificial Sequence: Synthetic oligonucleotide
gucuguccuuauagaucuc

SEQ ID NO: 1610863 - RNA, 19 nt, Artificial Sequence
  Description of Artificial Sequence: Synthetic oligonucleotide
uugcgcacgcgggccucca

SEQ ID NO: 1610864 - RNA, 19 nt, Artificial Sequence
  Description of Artificial Sequence: Synthetic oligonucleotide
ggccuuggccucccguauc

SEQ ID NO: 1610865 - RNA, 19 nt, Artificial Sequence
  Description of Artificial Sequence: Synthetic oligonucleotide
cgagccuuccccaaagagu

SEQ ID NO: 1610866 - RNA, 19 nt, Artificial Sequence
  Description of Artificial Sequence: Synthetic oligonucleotide
ccauggcggguauaaaccu

SEQ ID NO: 1610867 - RNA, 19 nt, Artificial Sequence
  Description of Artificial Sequence: Synthetic oligonucleotide
ggauuuucaccugggcaau

SEQ ID NO: 1610868 - RNA, 19 nt, Artificial Sequence
  Description of Artificial Sequence: Synthetic oligonucleotide
ccggcaucucuuuuggccu

SEQ ID NO: 1610869 - RNA, 19 nt, Artificial Sequence
  Description of Artificial Sequence: Synthetic oligonucleotide
gcucggcgaguguugaccu

SEQ ID NO: 1610870 - RNA, 19 nt, Artificial Sequence
  Description of Artificial Sequence: Synthetic oligonucleotide
ccgcuggacaccaguguga

SEQ ID NO: 1610871 - RNA, 19 nt, Artificial Sequence
  Description of Artificial Sequence: Synthetic oligonucleotide
gggcaaugcccgugacuga

SEQ ID NO: 1610872 - RNA, 19 nt, Artificial Sequence
  Description of Artificial Sequence: Synthetic oligonucleotide
cuucucgcgccgggcgauc

SEQ ID NO: 1610873 - RNA, 19 nt, Artificial Sequence
  Description of Artificial Sequence: Synthetic oligonucleotide
uccgggacgcggggagcaa

SEQ ID NO: 1610874 - RNA, 19 nt, Artificial Sequence
  Description of Artificial Sequence: Synthetic oligonucleotide
accccauggcggguauaaa

SEQ ID NO: 1610875 - RNA, 19 nt, Artificial Sequence
  Description of Artificial Sequence: Synthetic oligonucleotide
acgcauccucacagacuca

SEQ ID NO: 1610876 - RNA, 19 nt, Artificial Sequence
  Description of Artificial Sequence: Synthetic oligonucleotide
cugccaacaucuccuuguu

SEQ ID NO: 1610877 - RNA, 19 nt, Artificial Sequence
  Description of Artificial Sequence: Synthetic oligonucleotide
gggccccuauggcgaaggc

SEQ ID NO: 1610878 - RNA, 19 nt, Artificial Sequence
  Description of Artificial Sequence: Synthetic oligonucleotide
cccaauccgagcaucuuuu

SEQ ID NO: 1610879 - RNA, 19 nt, Artificial Sequence
  Description of Artificial Sequence: Synthetic oligonucleotide
gcaaugcccgugacugaga

SEQ ID NO: 1610880 - RNA, 19 nt, Artificial Sequence
  Description of Artificial Sequence: Synthetic oligonucleotide
cggcuuaggauguccagua

SEQ ID NO: 1610881 - RNA, 19 nt, Artificial Sequence
  Description of Artificial Sequence: Synthetic oligonucleotide
gggccaugauggcccucug

SEQ ID NO: 1610882 - RNA, 19 nt, Artificial Sequence
  Description of Artificial Sequence: Synthetic oligonucleotide
ccucggcaggcuugcgcac

SEQ ID NO: 1610883 - RNA, 19 nt, Artificial Sequence
  Description of Artificial Sequence: Synthetic oligonucleotide
gcgcugugcgagccuuccc

SEQ ID NO: 1610884 - RNA, 19 nt, Artificial Sequence
  Description of Artificial Sequence: Synthetic oligonucleotide
cgccaggcgcuccagucug

SEQ ID NO: 1610885 - RNA, 19 nt, Artificial Sequence
  Description of Artificial Sequence: Synthetic oligonucleotide
gcugggcgcguuccaccac

SEQ ID NO: 1610886 - RNA, 19 nt, Artificial Sequence
  Description of Artificial Sequence: Synthetic oligonucleotide
cagccucggcaggcuugcg

SEQ ID NO: 1610887 - RNA, 19 nt, Artificial Sequence
  Description of Artificial Sequence: Synthetic oligonucleotide
cagucauaugggccaugau

SEQ ID NO: 1610888 - RNA, 19 nt, Artificial Sequence
  Description of Artificial Sequence: Synthetic oligonucleotide
guacuuccccagucacuuu

SEQ ID NO: 1610889 - RNA, 19 nt, Artificial Sequence
  Description of Artificial Sequence: Synthetic oligonucleotide
cugacgcccgugagucucu

SEQ ID NO: 1610890 - RNA, 19 nt, Artificial Sequence
  Description of Artificial Sequence: Synthetic oligonucleotide
caaucuccgccucggucuu

SEQ ID NO: 1610891 - RNA, 19 nt, Artificial Sequence
  Description of Artificial Sequence: Synthetic oligonucleotide
ggggaccgcugaucucuuc

SEQ ID NO: 1610892 - RNA, 19 nt, Artificial Sequence
  Description of Artificial Sequence: Synthetic oligonucleotide
ggagaccaccauggccuca

SEQ ID NO: 1610893 - RNA, 19 nt, Artificial Sequence
  Description of Artificial Sequence: Synthetic oligonucleotide
cugguacaucuggaaggcu

SEQ ID NO: 1610894 - RNA, 19 nt, Artificial Sequence
  Description of Artificial Sequence: Synthetic oligonucleotide
ccacgcauccucacagacu

SEQ ID NO: 1610895 - RNA, 19 nt, Artificial Sequence
  Description of Artificial Sequence: Synthetic oligonucleotide
cacucucuggcaggcggcu

SEQ ID NO: 1610896 - RNA, 19 nt, Artificial Sequence
  Description of Artificial Sequence: Synthetic oligonucleotide
ccacuuccgcuggacacca

SEQ ID NO: 1610897 - RNA, 19 nt, Artificial Sequence
  Description of Artificial Sequence: Synthetic oligonucleotide
gcgcuccagucuguagcgc

SEQ ID NO: 1610898 - RNA, 19 nt, Artificial Sequence
  Description of Artificial Sequence: Synthetic oligonucleotide
cgggccccuauggcgaagg

SEQ ID NO: 1610899 - RNA, 19 nt, Artificial Sequence
  Description of Artificial Sequence: Synthetic oligonucleotide
cagauaccuucuccugcuu

SEQ ID NO: 1610900 - RNA, 19 nt, Artificial Sequence
  Description of Artificial Sequence: Synthetic oligonucleotide
gcgcgggccccuauggcga

SEQ ID NO: 1610901 - RNA, 19 nt, Artificial Sequence
  Description of Artificial Sequence: Synthetic oligonucleotide
gccucggcuuccccacgca

SEQ ID NO: 1610902 - RNA, 19 nt, Artificial Sequence
  Description of Artificial Sequence: Synthetic oligonucleotide
aggggaccgcugaucucuu

SEQ ID NO: 1610903 - RNA, 19 nt, Artificial Sequence
  Description of Artificial Sequence: Synthetic oligonucleotide
cccguaucccggcaucucu

SEQ ID NO: 1610904 - RNA, 19 nt, Artificial Sequence
  Description of Artificial Sequence: Synthetic oligonucleotide
ggcaucucuuuuggccucu

SEQ ID NO: 1610905 - RNA, 19 nt, Artificial Sequence
  Description of Artificial Sequence: Synthetic oligonucleotide
ccgccucggucuuccccag

SEQ ID NO: 1610906 - RNA, 19 nt, Artificial Sequence
  Description of Artificial Sequence: Synthetic oligonucleotide
gggagaugcugacgcccgu

SEQ ID NO: 1610907 - RNA, 19 nt, Artificial Sequence
  Description of Artificial Sequence: Synthetic oligonucleotide
cgcccgugagucucuccac

SEQ ID NO: 1610908 - RNA, 19 nt, Artificial Sequence
  Description of Artificial Sequence: Synthetic oligonucleotide
gcaugaucagcugggccuu

SEQ ID NO: 1610909 - RNA, 19 nt, Artificial Sequence
  Description of Artificial Sequence: Synthetic oligonucleotide
ccccacgcauccucacaga

SEQ ID NO: 1610910 - RNA, 19 nt, Artificial Sequence
  Description of Artificial Sequence: Synthetic oligonucleotide
gcuugcgcacgcgggccuc

SEQ ID NO: 1610911 - RNA, 19 nt, Artificial Sequence
  Description of Artificial Sequence: Synthetic oligonucleotide
ccgugagucucuccacacu

SEQ ID NO: 1610912 - RNA, 19 nt, Artificial Sequence
  Description of Artificial Sequence: Synthetic oligonucleotide
ccuuuucacucuugacauu

SEQ ID NO: 1610913 - RNA, 19 nt, Artificial Sequence
  Description of Artificial Sequence: Synthetic oligonucleotide
ggcggccuccugguacauc

SEQ ID NO: 1610914 - RNA, 19 nt, Artificial Sequence
  Description of Artificial Sequence: Synthetic oligonucleotide
ggggaccccauggcgggua

SEQ ID NO: 1610915 - RNA, 19 nt, Artificial Sequence
  Description of Artificial Sequence: Synthetic oligonucleotide
gguucaccugggagaugcu

SEQ ID NO: 1610916 - RNA, 19 nt, Artificial Sequence
  Description of Artificial Sequence: Synthetic oligonucleotide
ggcgaguguugaccucgau

SEQ ID NO: 1610917 - RNA, 19 nt, Artificial Sequence
  Description of Artificial Sequence: Synthetic oligonucleotide
cgccucggucuuccccagg

SEQ ID NO: 1610918 - RNA, 19 nt, Artificial Sequence
  Description of Artificial Sequence: Synthetic oligonucleotide
gcgggccccuauggcgaag

SEQ ID NO: 1610919 - RNA, 19 nt, Artificial Sequence
  Description of Artificial Sequence: Synthetic oligonucleotide
caugaucagcugggccuuu

SEQ ID NO: 1610920 - RNA, 19 nt, Artificial Sequence
  Description of Artificial Sequence: Synthetic oligonucleotide
gccucccguaucccggcau

SEQ ID NO: 1610921 - RNA, 19 nt, Artificial Sequence
  Description of Artificial Sequence: Synthetic oligonucleotide
ccguaucccggcaucucuu

SEQ ID NO: 1610922 - RNA, 19 nt, Artificial Sequence
  Description of Artificial Sequence: Synthetic oligonucleotide
cgcgccgggcgaucuccug

SEQ ID NO: 1610923 - RNA, 19 nt, Artificial Sequence
  Description of Artificial Sequence: Synthetic oligonucleotide
ccgccaggcgcuccagucu

SEQ ID NO: 1610924 - RNA, 19 nt, Artificial Sequence
  Description of Artificial Sequence: Synthetic oligonucleotide
cguaucccggcaucucuuu

SEQ ID NO: 1610925 - RNA, 19 nt, Artificial Sequence
  Description of Artificial Sequence: Synthetic oligonucleotide
ggaccccauggcggguaua

SEQ ID NO: 1610926 - RNA, 19 nt, Artificial Sequence
  Description of Artificial Sequence: Synthetic oligonucleotide
cggcaggcuugcgcacgcg

SEQ ID NO: 1610927 - RNA, 19 nt, Artificial Sequence
  Description of Artificial Sequence: Synthetic oligonucleotide
cacgagcgcgggccccuau

SEQ ID NO: 1610928 - RNA, 19 nt, Artificial Sequence
  Description of Artificial Sequence: Synthetic oligonucleotide
ccucggcuuccccacgcau

SEQ ID NO: 1610929 - RNA, 19 nt, Artificial Sequence
  Description of Artificial Sequence: Synthetic oligonucleotide
ccuucucgcgccgggcgau

SEQ ID NO: 1610930 - RNA, 19 nt, Artificial Sequence
  Description of Artificial Sequence: Synthetic oligonucleotide
gcacgagcgcgggccccua

SEQ ID NO: 1610931 - RNA, 19 nt, Artificial Sequence
  Description of Artificial Sequence: Synthetic oligonucleotide
cgcgggccccuauggcgaa

SEQ ID NO: 1610932 - RNA, 19 nt, Artificial Sequence
  Description of Artificial Sequence: Synthetic oligonucleotide
augaauauaucuuuuagac

SEQ ID NO: 1610933 - RNA, 19 nt, Artificial Sequence
  Description of Artificial Sequence: Synthetic oligonucleotide
aaugcuuucauaacaaugc

SEQ ID NO: 1610934 - RNA, 19 nt, Artificial Sequence
  Description of Artificial Sequence: Synthetic oligonucleotide
aaaucuaguccacucaaac

SEQ ID NO: 1610935 - RNA, 19 nt, Artificial Sequence
  Description of Artificial Sequence: Synthetic oligonucleotide
auguauaugaguuuuagug

SEQ ID NO: 1610936 - RNA, 19 nt, Artificial Sequence
  Description of Artificial Sequence: Synthetic oligonucleotide
aaggauguuaacucaggcc

SEQ ID NO: 1610937 - RNA, 19 nt, Artificial Sequence
  Description of Artificial Sequence: Synthetic oligonucleotide
gaauauaucuuuuagacaa

SEQ ID NO: 1610938 - RNA, 19 nt, Artificial Sequence
  Description of Artificial Sequence: Synthetic oligonucleotide
aaaggauguuaacucaggc

SEQ ID NO: 1610939 - RNA, 19 nt, Artificial Sequence
  Description of Artificial Sequence: Synthetic oligonucleotide
aguguauacaacucaaaac

SEQ ID NO: 1610940 - RNA, 19 nt, Artificial Sequence
  Description of Artificial Sequence: Synthetic oligonucleotide
uauucuggcaucaugagga

SEQ ID NO: 1610941 - RNA, 19 nt, Artificial Sequence
  Description of Artificial Sequence: Synthetic oligonucleotide
aggauguuaacucaggccg

SEQ ID NO: 1610942 - RNA, 19 nt, Artificial Sequence
  Description of Artificial Sequence: Synthetic oligonucleotide
ucuggcauuagcuugcugg

SEQ ID NO: 1610943 - RNA, 19 nt, Artificial Sequence
  Description of Artificial Sequence: Synthetic oligonucleotide
ucacuugagaugaacaagg

SEQ ID NO: 1610944 - RNA, 19 nt, Artificial Sequence
  Description of Artificial Sequence: Synthetic oligonucleotide
ucuauuagauguaggaugc

SEQ ID NO: 1610945 - RNA, 19 nt, Artificial Sequence
  Description of Artificial Sequence: Synthetic oligonucleotide
aguggaggaaaucuagucc

SEQ ID NO: 1610946 - RNA, 19 nt, Artificial Sequence
  Description of Artificial Sequence: Synthetic oligonucleotide
agauagucgguacuguucc

SEQ ID NO: 1610947 - RNA, 19 nt, Artificial Sequence
  Description of Artificial Sequence: Synthetic oligonucleotide
ucuacugagaaaagguucc

SEQ ID NO: 1610948 - RNA, 19 nt, Artificial Sequence
  Description of Artificial Sequence: Synthetic oligonucleotide
ucacuuugaaacucaaggg

SEQ ID NO: 1610949 - RNA, 19 nt, Artificial Sequence
  Description of Artificial Sequence: Synthetic oligonucleotide
uguucuacugagaaaaggu

SEQ ID NO: 1610950 - RNA, 19 nt, Artificial Sequence
  Description of Artificial Sequence: Synthetic oligonucleotide
aauaucacuugagaugaac

SEQ ID NO: 1610951 - RNA, 19 nt, Artificial Sequence
  Description of Artificial Sequence: Synthetic oligonucleotide
uucuaauugcaucagcccc

SEQ ID NO: 1610952 - RNA, 19 nt, Artificial Sequence
  Description of Artificial Sequence: Synthetic oligonucleotide
uuagaaggauagauuaucc

SEQ ID NO: 1610953 - RNA, 19 nt, Artificial Sequence
  Description of Artificial Sequence: Synthetic oligonucleotide
uguauaugaguuuuagugu

SEQ ID NO: 1610954 - RNA, 19 nt, Artificial Sequence
  Description of Artificial Sequence: Synthetic oligonucleotide
ugcaauacgucuguggugg

SEQ ID NO: 1610955 - RNA, 19 nt, Artificial Sequence
  Description of Artificial Sequence: Synthetic oligonucleotide
agaugaauauaucuuuuag

SEQ ID NO: 1610956 - RNA, 19 nt, Artificial Sequence
  Description of Artificial Sequence: Synthetic oligonucleotide
uuauucuggcaucaugagg

SEQ ID NO: 1610957 - RNA, 19 nt, Artificial Sequence
  Description of Artificial Sequence: Synthetic oligonucleotide
aaggauagauuauccuugg

SEQ ID NO: 1610958 - RNA, 19 nt, Artificial Sequence
  Description of Artificial Sequence: Synthetic oligonucleotide
ugagaaaagguuccaaacu

SEQ ID NO: 1610959 - RNA, 19 nt, Artificial Sequence
  Description of Artificial Sequence: Synthetic oligonucleotide
aaaugggccagauuuccag

SEQ ID NO: 1610960 - RNA, 19 nt, Artificial Sequence
  Description of Artificial Sequence: Synthetic oligonucleotide
uugagcgugucuuggaucg

SEQ ID NO: 1610961 - RNA, 19 nt, Artificial Sequence
  Description of Artificial Sequence: Synthetic oligonucleotide
auuccacauccuuuaaugc

SEQ ID NO: 1610962 - RNA, 19 nt, Artificial Sequence
  Description of Artificial Sequence: Synthetic oligonucleotide
gucuauuagauguaggaug

SEQ ID NO: 1610963 - RNA, 19 nt, Artificial Sequence
  Description of Artificial Sequence: Synthetic oligonucleotide
auauauguuagaaggauag

SEQ ID NO: 1610964 - RNA, 19 nt, Artificial Sequence
  Description of Artificial Sequence: Synthetic oligonucleotide
aaguguauacaacucaaaa

SEQ ID NO: 1610965 - RNA, 19 nt, Artificial Sequence
  Description of Artificial Sequence: Synthetic oligonucleotide
cauccuuuaaugccgaagg

SEQ ID NO: 1610966 - RNA, 19 nt, Artificial Sequence
  Description of Artificial Sequence: Synthetic oligonucleotide
uguuaacucaggccgagag

SEQ ID NO: 1610967 - RNA, 19 nt, Artificial Sequence
  Description of Artificial Sequence: Synthetic oligonucleotide
uucaguuuaugucugcucu

SEQ ID NO: 1610968 - RNA, 19 nt, Artificial Sequence
  Description of Artificial Sequence: Synthetic oligonucleotide
gaugaauauaucuuuuaga

SEQ ID NO: 1610969 - RNA, 19 nt, Artificial Sequence
  Description of Artificial Sequence: Synthetic oligonucleotide
aaauauauguuagaaggau

SEQ ID NO: 1610970 - RNA, 19 nt, Artificial Sequence
  Description of Artificial Sequence: Synthetic oligonucleotide
aagaguacuuuacuggccu

SEQ ID NO: 1610971 - RNA, 19 nt, Artificial Sequence
  Description of Artificial Sequence: Synthetic oligonucleotide
uacaacucaaaacaauuuc

SEQ ID NO: 1610972 - RNA, 19 nt, Artificial Sequence
  Description of Artificial Sequence: Synthetic oligonucleotide
acucaagggaaauacuuuc

SEQ ID NO: 1610973 - RNA, 19 nt, Artificial Sequence
  Description of Artificial Sequence: Synthetic oligonucleotide
ucacuagucagucagcuuc

SEQ ID NO: 1610974 - RNA, 19 nt, Artificial Sequence
  Description of Artificial Sequence: Synthetic oligonucleotide
uguugcaauacgucugugg

SEQ ID NO: 1610975 - RNA, 19 nt, Artificial Sequence
  Description of Artificial Sequence: Synthetic oligonucleotide
aaucuaguccacucaaacu

SEQ ID NO: 1610976 - RNA, 19 nt, Artificial Sequence
  Description of Artificial Sequence: Synthetic oligonucleotide
cuguccaauguguugagcg

SEQ ID NO: 1610977 - RNA, 19 nt, Artificial Sequence
  Description of Artificial Sequence: Synthetic oligonucleotide
agaugaacaaggcuuagga

SEQ ID NO: 1610978 - RNA, 19 nt, Artificial Sequence
  Description of Artificial Sequence: Synthetic oligonucleotide
gauuauccuugguuuaggg

SEQ ID NO: 1610979 - RNA, 19 nt, Artificial Sequence
  Description of Artificial Sequence: Synthetic oligonucleotide
caugaggguagauagucgg

SEQ ID NO: 1610980 - RNA, 19 nt, Artificial Sequence
  Description of Artificial Sequence: Synthetic oligonucleotide
ugaugcaagugucuguugc

SEQ ID NO: 1610981 - RNA, 19 nt, Artificial Sequence
  Description of Artificial Sequence: Synthetic oligonucleotide
uggucuauuagauguagga

SEQ ID NO: 1610982 - RNA, 19 nt, Artificial Sequence
  Description of Artificial Sequence: Synthetic oligonucleotide
ucuuggaucgucacuccgg

SEQ ID NO: 1610983 - RNA, 19 nt, Artificial Sequence
  Description of Artificial Sequence: Synthetic oligonucleotide
uguauacaacucaaaacaa

SEQ ID NO: 1610984 - RNA, 19 nt, Artificial Sequence
  Description of Artificial Sequence: Synthetic oligonucleotide
gaaggauagauuauccuug

SEQ ID NO: 1610985 - RNA, 19 nt, Artificial Sequence
  Description of Artificial Sequence: Synthetic oligonucleotide
ugcuuucauaacaaugcag

SEQ ID NO: 1610986 - RNA, 19 nt, Artificial Sequence
  Description of Artificial Sequence: Synthetic oligonucleotide
ucuggcaucaugaggagaa

SEQ ID NO: 1610987 - RNA, 19 nt, Artificial Sequence
  Description of Artificial Sequence: Synthetic oligonucleotide
uuccacauccuuuaaugcc

SEQ ID NO: 1610988 - RNA, 19 nt, Artificial Sequence
  Description of Artificial Sequence: Synthetic oligonucleotide
aaaguagagggcguaagcu

SEQ ID NO: 1610989 - RNA, 19 nt, Artificial Sequence
  Description of Artificial Sequence: Synthetic oligonucleotide
uauguuagaaggauagauu

SEQ ID NO: 1610990 - RNA, 19 nt, Artificial Sequence
  Description of Artificial Sequence: Synthetic oligonucleotide
accccuggcacauaguagg

SEQ ID NO: 1610991 - RNA, 19 nt, Artificial Sequence
  Description of Artificial Sequence: Synthetic oligonucleotide
ugaguuuuaguguuugcaa

SEQ ID NO: 1610992 - RNA, 19 nt, Artificial Sequence
  Description of Artificial Sequence: Synthetic oligonucleotide
gaaaguagagggcguaagc

SEQ ID NO: 1610993 - RNA, 19 nt, Artificial Sequence
  Description of Artificial Sequence: Synthetic oligonucleotide
ugcuugacuggucagaaau

SEQ ID NO: 1610994 - RNA, 19 nt, Artificial Sequence
  Description of Artificial Sequence: Synthetic oligonucleotide
uccaugucaaacuccagcu

SEQ ID NO: 1610995 - RNA, 19 nt, Artificial Sequence
  Description of Artificial Sequence: Synthetic oligonucleotide
uuguugguacuguugaucu

SEQ ID NO: 1610996 - RNA, 19 nt, Artificial Sequence
  Description of Artificial Sequence: Synthetic oligonucleotide
ucaugaggguagauagucg

SEQ ID NO: 1610997 - RNA, 19 nt, Artificial Sequence
  Description of Artificial Sequence: Synthetic oligonucleotide
caacacauguucuacugag

SEQ ID NO: 1610998 - RNA, 19 nt, Artificial Sequence
  Description of Artificial Sequence: Synthetic oligonucleotide
uccacucaaacuugaagug

SEQ ID NO: 1610999 - RNA, 19 nt, Artificial Sequence
  Description of Artificial Sequence: Synthetic oligonucleotide
aagugucuguugcaauacg

SEQ ID NO: 1611000 - RNA, 19 nt, Artificial Sequence
  Description of Artificial Sequence: Synthetic oligonucleotide
aagaugaauauaucuuuua

SEQ ID NO: 1611001 - RNA, 19 nt, Artificial Sequence
  Description of Artificial Sequence: Synthetic oligonucleotide
auugcaucagccccucuuc

SEQ ID NO: 1611002 - RNA, 19 nt, Artificial Sequence
  Description of Artificial Sequence: Synthetic oligonucleotide
aaaaguguauacaacucaa

SEQ ID NO: 1611003 - RNA, 19 nt, Artificial Sequence
  Description of Artificial Sequence: Synthetic oligonucleotide
aucaugaggagaaaggaug

SEQ ID NO: 1611004 - RNA, 19 nt, Artificial Sequence
  Description of Artificial Sequence: Synthetic oligonucleotide
auaguagggacucaauaaa

SEQ ID NO: 1611005 - RNA, 19 nt, Artificial Sequence
  Description of Artificial Sequence: Synthetic oligonucleotide
gagggcguaagcuauugug

SEQ ID NO: 1611006 - RNA, 19 nt, Artificial Sequence
  Description of Artificial Sequence: Synthetic oligonucleotide
ucaacauuuguugguacug

SEQ ID NO: 1611007 - RNA, 19 nt, Artificial Sequence
  Description of Artificial Sequence: Synthetic oligonucleotide
auauguuagaaggauagau

SEQ ID NO: 1611008 - RNA, 19 nt, Artificial Sequence
  Description of Artificial Sequence: Synthetic oligonucleotide
aguuauucuggcaucauga

SEQ ID NO: 1611009 - RNA, 19 nt, Artificial Sequence
  Description of Artificial Sequence: Synthetic oligonucleotide
cuugacuggucagaaaugc

SEQ ID NO: 1611010 - RNA, 19 nt, Artificial Sequence
  Description of Artificial Sequence: Synthetic oligonucleotide
uguauauuccagguuucag

SEQ ID NO: 1611011 - RNA, 19 nt, Artificial Sequence
  Description of Artificial Sequence: Synthetic oligonucleotide
agauguauaugaguuuuag

SEQ ID NO: 1611012 - RNA, 19 nt, Artificial Sequence
  Description of Artificial Sequence: Synthetic oligonucleotide
uggaucgucacuccggcac

SEQ ID NO: 1611013 - RNA, 19 nt, Artificial Sequence
  Description of Artificial Sequence: Synthetic oligonucleotide
ugaacaaggcuuaggaguu

SEQ ID NO: 1611014 - RNA, 19 nt, Artificial Sequence
  Description of Artificial Sequence: Synthetic oligonucleotide
guuauucuggcaucaugag

SEQ ID NO: 1611015 - RNA, 19 nt, Artificial Sequence
  Description of Artificial Sequence: Synthetic oligonucleotide
acuggguuaagaugaauau

SEQ ID NO: 1611016 - RNA, 19 nt, Artificial Sequence
  Description of Artificial Sequence: Synthetic oligonucleotide
uuuacuggccucaguguga

SEQ ID NO: 1611017 - RNA, 19 nt, Artificial Sequence
  Description of Artificial Sequence: Synthetic oligonucleotide
ucuaaguuauucuggcauc

SEQ ID NO: 1611018 - RNA, 19 nt, Artificial Sequence
  Description of Artificial Sequence: Synthetic oligonucleotide
uagauagucgguacuguuc

SEQ ID NO: 1611019 - RNA, 19 nt, Artificial Sequence
  Description of Artificial Sequence: Synthetic oligonucleotide
uagauuauccuugguuuag

SEQ ID NO: 1611020 - RNA, 19 nt, Artificial Sequence
  Description of Artificial Sequence: Synthetic oligonucleotide
gagaaaggauguuaacuca

SEQ ID NO: 1611021 - RNA, 19 nt, Artificial Sequence
  Description of Artificial Sequence: Synthetic oligonucleotide
cagauuuccagguucugug

SEQ ID NO: 1611022 - RNA, 19 nt, Artificial Sequence
  Description of Artificial Sequence: Synthetic oligonucleotide
auguucuacugagaaaagg

SEQ ID NO: 1611023 - RNA, 19 nt, Artificial Sequence
  Description of Artificial Sequence: Synthetic oligonucleotide
uucaugaggguagauaguc

SEQ ID NO: 1611024 - RNA, 19 nt, Artificial Sequence
  Description of Artificial Sequence: Synthetic oligonucleotide
aaacucaagggaaauacuu

SEQ ID NO: 1611025 - RNA, 19 nt, Artificial Sequence
  Description of Artificial Sequence: Synthetic oligonucleotide
uaggaguuuccauuuauua

SEQ ID NO: 1611026 - RNA, 19 nt, Artificial Sequence
  Description of Artificial Sequence: Synthetic oligonucleotide
cuuuacuggccucagugug

SEQ ID NO: 1611027 - RNA, 19 nt, Artificial Sequence
  Description of Artificial Sequence: Synthetic oligonucleotide
ucuuguccugacaugcgug

SEQ ID NO: 1611028 - RNA, 19 nt, Artificial Sequence
  Description of Artificial Sequence: Synthetic oligonucleotide
uuccauuuauuauuuuaaa

SEQ ID NO: 1611029 - RNA, 19 nt, Artificial Sequence
  Description of Artificial Sequence: Synthetic oligonucleotide
ucucuuguccugacaugcg

SEQ ID NO: 1611030 - RNA, 19 nt, Artificial Sequence
  Description of Artificial Sequence: Synthetic oligonucleotide
aacagauguauaugaguuu

SEQ ID NO: 1611031 - RNA, 19 nt, Artificial Sequence
  Description of Artificial Sequence: Synthetic oligonucleotide
ugaaaguagagggcguaag

SEQ ID NO: 1611032 - RNA, 19 nt, Artificial Sequence
  Description of Artificial Sequence: Synthetic oligonucleotide
caagaguacuuuacuggcc

SEQ ID NO: 1611033 - RNA, 19 nt, Artificial Sequence
  Description of Artificial Sequence: Synthetic oligonucleotide
auaacaaugcagucucuaa

SEQ ID NO: 1611034 - RNA, 19 nt, Artificial Sequence
  Description of Artificial Sequence: Synthetic oligonucleotide
aaguagagggcguaagcua

SEQ ID NO: 1611035 - RNA, 19 nt, Artificial Sequence
  Description of Artificial Sequence: Synthetic oligonucleotide
ugacuggucagaaaugcuu

SEQ ID NO: 1611036 - RNA, 19 nt, Artificial Sequence
  Description of Artificial Sequence: Synthetic oligonucleotide
cauuuguugguacuguuga

SEQ ID NO: 1611037 - RNA, 19 nt, Artificial Sequence
  Description of Artificial Sequence: Synthetic oligonucleotide
gagaugaacaaggcuuagg

SEQ ID NO: 1611038 - RNA, 19 nt, Artificial Sequence
  Description of Artificial Sequence: Synthetic oligonucleotide
aggaaaucuaguccacuca

SEQ ID NO: 1611039 - RNA, 19 nt, Artificial Sequence
  Description of Artificial Sequence: Synthetic oligonucleotide
gguacuguugaucuggguc

SEQ ID NO: 1611040 - RNA, 19 nt, Artificial Sequence
  Description of Artificial Sequence: Synthetic oligonucleotide
ucuaucucgcugguuaucu

SEQ ID NO: 1611041 - RNA, 19 nt, Artificial Sequence
  Description of Artificial Sequence: Synthetic oligonucleotide
auuguauauuccagguuuc

SEQ ID NO: 1611042 - RNA, 19 nt, Artificial Sequence
  Description of Artificial Sequence: Synthetic oligonucleotide
uagggacucaauaaauaua

SEQ ID NO: 1611043 - RNA, 19 nt, Artificial Sequence
  Description of Artificial Sequence: Synthetic oligonucleotide
agggacucaauaaauauau

SEQ ID NO: 1611044 - RNA, 19 nt, Artificial Sequence
  Description of Artificial Sequence: Synthetic oligonucleotide
uuuaaugccgaaggcacau

SEQ ID NO: 1611045 - RNA, 19 nt, Artificial Sequence
  Description of Artificial Sequence: Synthetic oligonucleotide
aggccgagagcacagaggu

SEQ ID NO: 1611046 - RNA, 19 nt, Artificial Sequence
  Description of Artificial Sequence: Synthetic oligonucleotide
ugacaugcguggcagcaca

SEQ ID NO: 1611047 - RNA, 19 nt, Artificial Sequence
  Description of Artificial Sequence: Synthetic oligonucleotide
aauacgucuguggugggaa

SEQ ID NO: 1611048 - RNA, 19 nt, Artificial Sequence
  Description of Artificial Sequence: Synthetic oligonucleotide
agucgguacuguuccacuc

SEQ ID NO: 1611049 - RNA, 19 nt, Artificial Sequence
  Description of Artificial Sequence: Synthetic oligonucleotide
uauauguuagaaggauaga

SEQ ID NO: 1611050 - RNA, 19 nt, Artificial Sequence
  Description of Artificial Sequence: Synthetic oligonucleotide
ucucuaaguuauucuggca

SEQ ID NO: 1611051 - RNA, 19 nt, Artificial Sequence
  Description of Artificial Sequence: Synthetic oligonucleotide
cuuggaucgucacuccggc

SEQ ID NO: 1611052 - RNA, 19 nt, Artificial Sequence
  Description of Artificial Sequence: Synthetic oligonucleotide
ucuuagcucuggcauuagc

SEQ ID NO: 1611053 - RNA, 19 nt, Artificial Sequence
  Description of Artificial Sequence: Synthetic oligonucleotide
gguuaagaugaauauaucu

SEQ ID NO: 1611054 - RNA, 19 nt, Artificial Sequence
  Description of Artificial Sequence: Synthetic oligonucleotide
cuggucuauuagauguagg

SEQ ID NO: 1611055 - RNA, 19 nt, Artificial Sequence
  Description of Artificial Sequence: Synthetic oligonucleotide
uauaugaguuuuaguguuu

SEQ ID NO: 1611056 - RNA, 19 nt, Artificial Sequence
  Description of Artificial Sequence: Synthetic oligonucleotide
ugagaggguggcaguaggc

SEQ ID NO: 1611057 - RNA, 19 nt, Artificial Sequence
  Description of Artificial Sequence: Synthetic oligonucleotide
uugcaauacgucuguggug

SEQ ID NO: 1611058 - RNA, 19 nt, Artificial Sequence
  Description of Artificial Sequence: Synthetic oligonucleotide
uguccaauguguugagcgu

SEQ ID NO: 1611059 - RNA, 19 nt, Artificial Sequence
  Description of Artificial Sequence: Synthetic oligonucleotide
acagauguauaugaguuuu

SEQ ID NO: 1611060 - RNA, 19 nt, Artificial Sequence
  Description of Artificial Sequence: Synthetic oligonucleotide
gugacugcaauaaaauauc

SEQ ID NO: 1611061 - RNA, 19 nt, Artificial Sequence
  Description of Artificial Sequence: Synthetic oligonucleotide
cacuugagaugaacaaggc

SEQ ID NO: 1611062 - RNA, 19 nt, Artificial Sequence
  Description of Artificial Sequence: Synthetic oligonucleotide
ggaagacuggguuaagaug

SEQ ID NO: 1611063 - RNA, 19 nt, Artificial Sequence
  Description of Artificial Sequence: Synthetic oligonucleotide
uccaaguucaggcucccua

SEQ ID NO: 1611064 - RNA, 19 nt, Artificial Sequence
  Description of Artificial Sequence: Synthetic oligonucleotide
agauuauccuugguuuagg

SEQ ID NO: 1611065 - RNA, 19 nt, Artificial Sequence
  Description of Artificial Sequence: Synthetic oligonucleotide
ccuuuaaugccgaaggcac

SEQ ID NO: 1611066 - RNA, 19 nt, Artificial Sequence
  Description of Artificial Sequence: Synthetic oligonucleotide
caaacuugaggguggugac

SEQ ID NO: 1611067 - RNA, 19 nt, Artificial Sequence
  Description of Artificial Sequence: Synthetic oligonucleotide
ugcuggacuucuguaauca

SEQ ID NO: 1611068 - RNA, 19 nt, Artificial Sequence
  Description of Artificial Sequence: Synthetic oligonucleotide
gaugcaagugucuguugca

SEQ ID NO: 1611069 - RNA, 19 nt, Artificial Sequence
  Description of Artificial Sequence: Synthetic oligonucleotide
guuccaaacuugagggugg

SEQ ID NO: 1611070 - RNA, 19 nt, Artificial Sequence
  Description of Artificial Sequence: Synthetic oligonucleotide
ugauugcuugacuggucag

SEQ ID NO: 1611071 - RNA, 19 nt, Artificial Sequence
  Description of Artificial Sequence: Synthetic oligonucleotide
ugacuagcucucuuguccu

SEQ ID NO: 1611072 - RNA, 19 nt, Artificial Sequence
  Description of Artificial Sequence: Synthetic oligonucleotide
ucucacuagucagucagcu

SEQ ID NO: 1611073 - RNA, 19 nt, Artificial Sequence
  Description of Artificial Sequence: Synthetic oligonucleotide
uuccacucaccccuggcac

SEQ ID NO: 1611074 - RNA, 19 nt, Artificial Sequence
  Description of Artificial Sequence: Synthetic oligonucleotide
uaaugccgaaggcacauuu

SEQ ID NO: 1611075 - RNA, 19 nt, Artificial Sequence
  Description of Artificial Sequence: Synthetic oligonucleotide
caugcguggcagcacauug

SEQ ID NO: 1611076 - RNA, 19 nt, Artificial Sequence
  Description of Artificial Sequence: Synthetic oligonucleotide
agaguacuuuacuggccuc

SEQ ID NO: 1611077 - RNA, 19 nt, Artificial Sequence
  Description of Artificial Sequence: Synthetic oligonucleotide
guugcaauacgucuguggu

SEQ ID NO: 1611078 - RNA, 19 nt, Artificial Sequence
  Description of Artificial Sequence: Synthetic oligonucleotide
aaaguguauacaacucaaa

SEQ ID NO: 1611079 - RNA, 19 nt, Artificial Sequence
  Description of Artificial Sequence: Synthetic oligonucleotide
guauauuccagguuucagu

SEQ ID NO: 1611080 - RNA, 19 nt, Artificial Sequence
  Description of Artificial Sequence: Synthetic oligonucleotide
cauggggcugucuugcaac

SEQ ID NO: 1611081 - RNA, 19 nt, Artificial Sequence
  Description of Artificial Sequence: Synthetic oligonucleotide
uacgucuguggugggaagg

SEQ ID NO: 1611082 - RNA, 19 nt, Artificial Sequence
  Description of Artificial Sequence: Synthetic oligonucleotide
uuagcuugcuggacuucug

SEQ ID NO: 1611083 - RNA, 19 nt, Artificial Sequence
  Description of Artificial Sequence: Synthetic oligonucleotide
uuguauauuccagguuuca

SEQ ID NO: 1611084 - RNA, 19 nt, Artificial Sequence
  Description of Artificial Sequence: Synthetic oligonucleotide
gauguauaugaguuuuagu

SEQ ID NO: 1611085 - RNA, 19 nt, Artificial Sequence
  Description of Artificial Sequence: Synthetic oligonucleotide
acauuuguugguacuguug

SEQ ID NO: 1611086 - RNA, 19 nt, Artificial Sequence
  Description of Artificial Sequence: Synthetic oligonucleotide
gucuuggaucgucacuccg

SEQ ID NO: 1611087 - RNA, 19 nt, Artificial Sequence
  Description of Artificial Sequence: Synthetic oligonucleotide
gggaaauacuuucccagug

SEQ ID NO: 1611088 - RNA, 19 nt, Artificial Sequence
  Description of Artificial Sequence: Synthetic oligonucleotide
ugcagucucuaaguuauuc

SEQ ID NO: 1611089 - RNA, 19 nt, Artificial Sequence
  Description of Artificial Sequence: Synthetic oligonucleotide
guauaugaguuuuaguguu

SEQ ID NO: 1611090 - RNA, 19 nt, Artificial Sequence
  Description of Artificial Sequence: Synthetic oligonucleotide
auauaucuuuuagacaauu

SEQ ID NO: 1611091 - RNA, 19 nt, Artificial Sequence
  Description of Artificial Sequence: Synthetic oligonucleotide
gaaauacuuucccagugau

SEQ ID NO: 1611092 - RNA, 19 nt, Artificial Sequence
  Description of Artificial Sequence: Synthetic oligonucleotide
cucaccucuuuagaguggc

SEQ ID NO: 1611093 - RNA, 19 nt, Artificial Sequence
  Description of Artificial Sequence: Synthetic oligonucleotide
aguacuuuacuggccucag

SEQ ID NO: 1611094 - RNA, 19 nt, Artificial Sequence
  Description of Artificial Sequence: Synthetic oligonucleotide
ugugacuagcucucuuguc

SEQ ID NO: 1611095 - RNA, 19 nt, Artificial Sequence
  Description of Artificial Sequence: Synthetic oligonucleotide
ggcguaagcuauugugugg

SEQ ID NO: 1611096 - RNA, 19 nt, Artificial Sequence
  Description of Artificial Sequence: Synthetic oligonucleotide
aggcuuaggaguuuccauu

SEQ ID NO: 1611097 - RNA, 19 nt, Artificial Sequence
  Description of Artificial Sequence: Synthetic oligonucleotide
aacucaggccgagagcaca

SEQ ID NO: 1611098 - RNA, 19 nt, Artificial Sequence
  Description of Artificial Sequence: Synthetic oligonucleotide
aggguagauagucgguacu

SEQ ID NO: 1611099 - RNA, 19 nt, Artificial Sequence
  Description of Artificial Sequence: Synthetic oligonucleotide
uggagcgguggcuggaaug

SEQ ID NO: 1611100 - RNA, 19 nt, Artificial Sequence
  Description of Artificial Sequence: Synthetic oligonucleotide
guacuguugaucugggucu

SEQ ID NO: 1611101 - RNA, 19 nt, Artificial Sequence
  Description of Artificial Sequence: Synthetic oligonucleotide
guagggacucaauaaauau

SEQ ID NO: 1611102 - RNA, 19 nt, Artificial Sequence
  Description of Artificial Sequence: Synthetic oligonucleotide
ucgguacuguuccacucac

SEQ ID NO: 1611103 - RNA, 19 nt, Artificial Sequence
  Description of Artificial Sequence: Synthetic oligonucleotide
agagaacauaagauaaaau

SEQ ID NO: 1611104 - RNA, 19 nt, Artificial Sequence
  Description of Artificial Sequence: Synthetic oligonucleotide
guacuguuccacucacccc

SEQ ID NO: 1611105 - RNA, 19 nt, Artificial Sequence
  Description of Artificial Sequence: Synthetic oligonucleotide
gacuggguuaagaugaaua

SEQ ID NO: 1611106 - RNA, 19 nt, Artificial Sequence
  Description of Artificial Sequence: Synthetic oligonucleotide
cuaaguuauucuggcauca

SEQ ID NO: 1611107 - RNA, 19 nt, Artificial Sequence
  Description of Artificial Sequence: Synthetic oligonucleotide
ugaggguagauagucggua

SEQ ID NO: 1611108 - RNA, 19 nt, Artificial Sequence
  Description of Artificial Sequence: Synthetic oligonucleotide
auuuguugguacuguugau

SEQ ID NO: 1611109 - RNA, 19 nt, Artificial Sequence
  Description of Artificial Sequence: Synthetic oligonucleotide
ugguauugccaugaugcaa

SEQ ID NO: 1611110 - RNA, 19 nt, Artificial Sequence
  Description of Artificial Sequence: Synthetic oligonucleotide
auacaacucaaaacaauuu

SEQ ID NO: 1611111 - RNA, 19 nt, Artificial Sequence
  Description of Artificial Sequence: Synthetic oligonucleotide
gcuuggaaagcucuuguuc

SEQ ID NO: 1611112 - RNA, 19 nt, Artificial Sequence
  Description of Artificial Sequence: Synthetic oligonucleotide
gguuuagggagagagagaa

SEQ ID NO: 1611113 - RNA, 19 nt, Artificial Sequence
  Description of Artificial Sequence: Synthetic oligonucleotide
auguguugagcgugucuug

SEQ ID NO: 1611114 - RNA, 19 nt, Artificial Sequence
  Description of Artificial Sequence: Synthetic oligonucleotide
ugcguggcagcacauugua

SEQ ID NO: 1611115 - RNA, 19 nt, Artificial Sequence
  Description of Artificial Sequence: Synthetic oligonucleotide
gaaguggguggagcaagag

SEQ ID NO: 1611116 - RNA, 19 nt, Artificial Sequence
  Description of Artificial Sequence: Synthetic oligonucleotide
auggccaaggccccaucug

SEQ ID NO: 1611117 - RNA, 19 nt, Artificial Sequence
  Description of Artificial Sequence: Synthetic oligonucleotide
uagucgguacuguuccacu

SEQ ID NO: 1611118 - RNA, 19 nt, Artificial Sequence
  Description of Artificial Sequence: Synthetic oligonucleotide
uauugccaugaugcaagug

SEQ ID NO: 1611119 - RNA, 19 nt, Artificial Sequence
  Description of Artificial Sequence: Synthetic oligonucleotide
guugagcgugucuuggauc

SEQ ID NO: 1611120 - RNA, 19 nt, Artificial Sequence
  Description of Artificial Sequence: Synthetic oligonucleotide
aguagggacucaauaaaua

SEQ ID NO: 1611121 - RNA, 19 nt, Artificial Sequence
  Description of Artificial Sequence: Synthetic oligonucleotide
guaagcuauugugugggca

SEQ ID NO: 1611122 - RNA, 19 nt, Artificial Sequence
  Description of Artificial Sequence: Synthetic oligonucleotide
gcguaagcuauuguguggg

SEQ ID NO: 1611123 - RNA, 19 nt, Artificial Sequence
  Description of Artificial Sequence: Synthetic oligonucleotide
augaugcaagugucuguug

SEQ ID NO: 1611124 - RNA, 19 nt, Artificial Sequence
  Description of Artificial Sequence: Synthetic oligonucleotide
uugaaaguagagggcguaa

SEQ ID NO: 1611125 - RNA, 19 nt, Artificial Sequence
  Description of Artificial Sequence: Synthetic oligonucleotide
augaggagaaaggauguua

SEQ ID NO: 1611126 - RNA, 19 nt, Artificial Sequence
  Description of Artificial Sequence: Synthetic oligonucleotide
cucuaaguuauucuggcau

SEQ ID NO: 1611127 - RNA, 19 nt, Artificial Sequence
  Description of Artificial Sequence: Synthetic oligonucleotide
uagagggcguaagcuauug

SEQ ID NO: 1611128 - RNA, 19 nt, Artificial Sequence
  Description of Artificial Sequence: Synthetic oligonucleotide
aggauagauuauccuuggu

SEQ ID NO: 1611129 - RNA, 19 nt, Artificial Sequence
  Description of Artificial Sequence: Synthetic oligonucleotide
ugcaagugucuguugcaau

SEQ ID NO: 1611130 - RNA, 19 nt, Artificial Sequence
  Description of Artificial Sequence: Synthetic oligonucleotide
auacgucuguggugggaag

SEQ ID NO: 1611131 - RNA, 19 nt, Artificial Sequence
  Description of Artificial Sequence: Synthetic oligonucleotide
gaguacuuuacuggccuca

SEQ ID NO: 1611132 - RNA, 19 nt, Artificial Sequence
  Description of Artificial Sequence: Synthetic oligonucleotide
agggcguaagcuauugugu

SEQ ID NO: 1611133 - RNA, 19 nt, Artificial Sequence
  Description of Artificial Sequence: Synthetic oligonucleotide
guccaauguguugagcgug

SEQ ID NO: 1611134 - RNA, 19 nt, Artificial Sequence
  Description of Artificial Sequence: Synthetic oligonucleotide
caggcuggucuauuagaug

SEQ ID NO: 1611135 - RNA, 19 nt, Artificial Sequence
  Description of Artificial Sequence: Synthetic oligonucleotide
cacugguauugccaugaug

SEQ ID NO: 1611136 - RNA, 19 nt, Artificial Sequence
  Description of Artificial Sequence: Synthetic oligonucleotide
gguucugugcccaucgcug

SEQ ID NO: 1611137 - RNA, 19 nt, Artificial Sequence
  Description of Artificial Sequence: Synthetic oligonucleotide
gccagucccuuuuccaugg

SEQ ID NO: 1611138 - RNA, 19 nt, Artificial Sequence
  Description of Artificial Sequence: Synthetic oligonucleotide
guuccacucaccccuggca

SEQ ID NO: 1611139 - RNA, 19 nt, Artificial Sequence
  Description of Artificial Sequence: Synthetic oligonucleotide
gggcguaagcuauugugug

SEQ ID NO: 1611140 - RNA, 19 nt, Artificial Sequence
  Description of Artificial Sequence: Synthetic oligonucleotide
gcaauucccacugguauug

SEQ ID NO: 1611141 - RNA, 19 nt, Artificial Sequence
  Description of Artificial Sequence: Synthetic oligonucleotide
cuauugugugggcagugga

SEQ ID NO: 1611142 - RNA, 19 nt, Artificial Sequence
  Description of Artificial Sequence: Synthetic oligonucleotide
cacucagcuugaaaguaga

SEQ ID NO: 1611143 - RNA, 19 nt, Artificial Sequence
  Description of Artificial Sequence: Synthetic oligonucleotide
gauagucgguacuguucca

SEQ ID NO: 1611144 - RNA, 19 nt, Artificial Sequence
  Description of Artificial Sequence: Synthetic oligonucleotide
uggccagucccuuuuccau

SEQ ID NO: 1611145 - RNA, 19 nt, Artificial Sequence
  Description of Artificial Sequence: Synthetic oligonucleotide
aaugccgaaggcacauuuu

SEQ ID NO: 1611146 - RNA, 19 nt, Artificial Sequence
  Description of Artificial Sequence: Synthetic oligonucleotide
ugcugucacauuggcuucc

SEQ ID NO: 1611147 - RNA, 19 nt, Artificial Sequence
  Description of Artificial Sequence: Synthetic oligonucleotide
gugucuguugcaauacguc

SEQ ID NO: 1611148 - RNA, 19 nt, Artificial Sequence
  Description of Artificial Sequence: Synthetic oligonucleotide
gguuucaguuuaugucugc

SEQ ID NO: 1611149 - RNA, 19 nt, Artificial Sequence
  Description of Artificial Sequence: Synthetic oligonucleotide
caauuucagcuuugcccug

SEQ ID NO: 1611150 - RNA, 19 nt, Artificial Sequence
  Description of Artificial Sequence: Synthetic oligonucleotide
ccaaaugggccagauuucc

SEQ ID NO: 1611151 - RNA, 19 nt, Artificial Sequence
  Description of Artificial Sequence: Synthetic oligonucleotide
agcuucaugaggguagaua

SEQ ID NO: 1611152 - RNA, 19 nt, Artificial Sequence
  Description of Artificial Sequence: Synthetic oligonucleotide
ggauagauuauccuugguu

SEQ ID NO: 1611153 - RNA, 19 nt, Artificial Sequence
  Description of Artificial Sequence: Synthetic oligonucleotide
cauaacaaugcagucucua

SEQ ID NO: 1611154 - RNA, 19 nt, Artificial Sequence
  Description of Artificial Sequence: Synthetic oligonucleotide
gguggugacugcaauaaaa

SEQ ID NO: 1611155 - RNA, 19 nt, Artificial Sequence
  Description of Artificial Sequence: Synthetic oligonucleotide
uucuggcaucaugaggaga

SEQ ID NO: 1611156 - RNA, 19 nt, Artificial Sequence
  Description of Artificial Sequence: Synthetic oligonucleotide
cugguauugccaugaugca

SEQ ID NO: 1611157 - RNA, 19 nt, Artificial Sequence
  Description of Artificial Sequence: Synthetic oligonucleotide
agagggcguaagcuauugu

SEQ ID NO: 1611158 - RNA, 19 nt, Artificial Sequence
  Description of Artificial Sequence: Synthetic oligonucleotide
gcuggucuauuagauguag

SEQ ID NO: 1611159 - RNA, 19 nt, Artificial Sequence
  Description of Artificial Sequence: Synthetic oligonucleotide
gauguaggaugcuguccaa

SEQ ID NO: 1611160 - RNA, 19 nt, Artificial Sequence
  Description of Artificial Sequence: Synthetic oligonucleotide
ugguacuguugaucugggu

SEQ ID NO: 1611161 - RNA, 19 nt, Artificial Sequence
  Description of Artificial Sequence: Synthetic oligonucleotide
uuggaucgucacuccggca

SEQ ID NO: 1611162 - RNA, 19 nt, Artificial Sequence
  Description of Artificial Sequence: Synthetic oligonucleotide
cuaucucgcugguuaucuc

SEQ ID NO: 1611163 - RNA, 19 nt, Artificial Sequence
  Description of Artificial Sequence: Synthetic oligonucleotide
ggguagauagucgguacug

SEQ ID NO: 1611164 - RNA, 19 nt, Artificial Sequence
  Description of Artificial Sequence: Synthetic oligonucleotide
uucuaucucgcugguuauc

SEQ ID NO: 1611165 - RNA, 19 nt, Artificial Sequence
  Description of Artificial Sequence: Synthetic oligonucleotide
cacauguucuacugagaaa

SEQ ID NO: 1611166 - RNA, 19 nt, Artificial Sequence
  Description of Artificial Sequence: Synthetic oligonucleotide
aaauaucacuugagaugaa

SEQ ID NO: 1611167 - RNA, 19 nt, Artificial Sequence
  Description of Artificial Sequence: Synthetic oligonucleotide
caguuuaugucugcucuga

SEQ ID NO: 1611168 - RNA, 19 nt, Artificial Sequence
  Description of Artificial Sequence: Synthetic oligonucleotide
uugcuugacuggucagaaa

SEQ ID NO: 1611169 - RNA, 19 nt, Artificial Sequence
  Description of Artificial Sequence: Synthetic oligonucleotide
aagacuggguuaagaugaa

SEQ ID NO: 1611170 - RNA, 19 nt, Artificial Sequence
  Description of Artificial Sequence: Synthetic oligonucleotide
cugcugucacauuggcuuc

SEQ ID NO: 1611171 - RNA, 19 nt, Artificial Sequence
  Description of Artificial Sequence: Synthetic oligonucleotide
cuuaggaguuuccauuuau

SEQ ID NO: 1611172 - RNA, 19 nt, Artificial Sequence
  Description of Artificial Sequence: Synthetic oligonucleotide
ucagugugacuagcucucu

SEQ ID NO: 1611173 - RNA, 19 nt, Artificial Sequence
  Description of Artificial Sequence: Synthetic oligonucleotide
uggcauuagcuugcuggac

SEQ ID NO: 1611174 - RNA, 19 nt, Artificial Sequence
  Description of Artificial Sequence: Synthetic oligonucleotide
ucccacugguauugccaug

SEQ ID NO: 1611175 - RNA, 19 nt, Artificial Sequence
  Description of Artificial Sequence: Synthetic oligonucleotide
gaggguggugacugcaaua

SEQ ID NO: 1611176 - RNA, 19 nt, Artificial Sequence
  Description of Artificial Sequence: Synthetic oligonucleotide
ugggccagauuuccagguu

SEQ ID NO: 1611177 - RNA, 19 nt, Artificial Sequence
  Description of Artificial Sequence: Synthetic oligonucleotide
augaggguagauagucggu

SEQ ID NO: 1611178 - RNA, 19 nt, Artificial Sequence
  Description of Artificial Sequence: Synthetic oligonucleotide
agcgguggcuggaaugcag

SEQ ID NO: 1611179 - RNA, 19 nt, Artificial Sequence
  Description of Artificial Sequence: Synthetic oligonucleotide
uaggcaccauugcuccaaa

SEQ ID NO: 1611180 - RNA, 19 nt, Artificial Sequence
  Description of Artificial Sequence: Synthetic oligonucleotide
ggcauuagcuugcuggacu

SEQ ID NO: 1611181 - RNA, 19 nt, Artificial Sequence
  Description of Artificial Sequence: Synthetic oligonucleotide
guaggcaccauugcuccaa

SEQ ID NO: 1611182 - RNA, 19 nt, Artificial Sequence
  Description of Artificial Sequence: Synthetic oligonucleotide
gugugacuagcucucuugu

SEQ ID NO: 1611183 - RNA, 19 nt, Artificial Sequence
  Description of Artificial Sequence: Synthetic oligonucleotide
gggccagauuuccagguuc

SEQ ID NO: 1611184 - RNA, 19 nt, Artificial Sequence
  Description of Artificial Sequence: Synthetic oligonucleotide
ggccagucccuuuuccaug

SEQ ID NO: 1611185 - RNA, 19 nt, Artificial Sequence
  Description of Artificial Sequence: Synthetic oligonucleotide
ugcuccaaaugggccagau

SEQ ID NO: 1611186 - RNA, 19 nt, Artificial Sequence
  Description of Artificial Sequence: Synthetic oligonucleotide
cagauguauaugaguuuua

SEQ ID NO: 1611187 - RNA, 19 nt, Artificial Sequence
  Description of Artificial Sequence: Synthetic oligonucleotide
aggccccaucugcugucac

SEQ ID NO: 1611188 - RNA, 19 nt, Artificial Sequence
  Description of Artificial Sequence: Synthetic oligonucleotide
gggacucaauaaauauaug

SEQ ID NO: 1611189 - RNA, 19 nt, Artificial Sequence
  Description of Artificial Sequence: Synthetic oligonucleotide
cugacaugcguggcagcac

SEQ ID NO: 1611190 - RNA, 19 nt, Artificial Sequence
  Description of Artificial Sequence: Synthetic oligonucleotide
agucagcuucaugagggua

SEQ ID NO: 1611191 - RNA, 19 nt, Artificial Sequence
  Description of Artificial Sequence: Synthetic oligonucleotide
gucccuuuuccauggccaa

SEQ ID NO: 1611192 - RNA, 19 nt, Artificial Sequence
  Description of Artificial Sequence: Synthetic oligonucleotide
uuaaugccgaaggcacauu

SEQ ID NO: 1611193 - RNA, 19 nt, Artificial Sequence
  Description of Artificial Sequence: Synthetic oligonucleotide
auguuaacucaggccgaga

SEQ ID NO: 1611194 - RNA, 19 nt, Artificial Sequence
  Description of Artificial Sequence: Synthetic oligonucleotide
gcaauacgucugugguggg

SEQ ID NO: 1611195 - RNA, 19 nt, Artificial Sequence
  Description of Artificial Sequence: Synthetic oligonucleotide
ucgucacuccggcacucuu

SEQ ID NO: 1611196 - RNA, 19 nt, Artificial Sequence
  Description of Artificial Sequence: Synthetic oligonucleotide
cucugguuccuucagcaau

SEQ ID NO: 1611197 - RNA, 19 nt, Artificial Sequence
  Description of Artificial Sequence: Synthetic oligonucleotide
augcguggcagcacauugu

SEQ ID NO: 1611198 - RNA, 19 nt, Artificial Sequence
  Description of Artificial Sequence: Synthetic oligonucleotide
caugaugcaagugucuguu

SEQ ID NO: 1611199 - RNA, 19 nt, Artificial Sequence
  Description of Artificial Sequence: Synthetic oligonucleotide
gaucgucacuccggcacuc

SEQ ID NO: 1611200 - RNA, 19 nt, Artificial Sequence
  Description of Artificial Sequence: Synthetic oligonucleotide
guggcagcacauuguauau

SEQ ID NO: 1611201 - RNA, 19 nt, Artificial Sequence
  Description of Artificial Sequence: Synthetic oligonucleotide
agcgugucuuggaucguca

SEQ ID NO: 1611202 - RNA, 19 nt, Artificial Sequence
  Description of Artificial Sequence: Synthetic oligonucleotide
caauuccacauccuuuaau

SEQ ID NO: 1611203 - RNA, 19 nt, Artificial Sequence
  Description of Artificial Sequence: Synthetic oligonucleotide
caauacgucugugguggga

SEQ ID NO: 1611204 - RNA, 19 nt, Artificial Sequence
  Description of Artificial Sequence: Synthetic oligonucleotide
uggggcugucuugcaacac

SEQ ID NO: 1611205 - RNA, 19 nt, Artificial Sequence
  Description of Artificial Sequence: Synthetic oligonucleotide
agacuggguuaagaugaau

SEQ ID NO: 1611206 - RNA, 19 nt, Artificial Sequence
  Description of Artificial Sequence: Synthetic oligonucleotide
ggauguuaacucaggccga

SEQ ID NO: 1611207 - RNA, 19 nt, Artificial Sequence
  Description of Artificial Sequence: Synthetic oligonucleotide
cucuuguccugacaugcgu

SEQ ID NO: 1611208 - RNA, 19 nt, Artificial Sequence
  Description of Artificial Sequence: Synthetic oligonucleotide
caauguguugagcgugucu

SEQ ID NO: 1611209 - RNA, 19 nt, Artificial Sequence
  Description of Artificial Sequence: Synthetic oligonucleotide
ccuuuuccauggccaaggc

SEQ ID NO: 1611210 - RNA, 19 nt, Artificial Sequence
  Description of Artificial Sequence: Synthetic oligonucleotide
guucuaucucgcugguuau

SEQ ID NO: 1611211 - RNA, 19 nt, Artificial Sequence
  Description of Artificial Sequence: Synthetic oligonucleotide
caacauuuguugguacugu

SEQ ID NO: 1611212 - RNA, 19 nt, Artificial Sequence
  Description of Artificial Sequence: Synthetic oligonucleotide
guauugccaugaugcaagu

SEQ ID NO: 1611213 - RNA, 19 nt, Artificial Sequence
  Description of Artificial Sequence: Synthetic oligonucleotide
ggucuauuagauguaggau

SEQ ID NO: 1611214 - RNA, 19 nt, Artificial Sequence
  Description of Artificial Sequence: Synthetic oligonucleotide
cucuggcauuagcuugcug

SEQ ID NO: 1611215 - RNA, 19 nt, Artificial Sequence
  Description of Artificial Sequence: Synthetic oligonucleotide
cuggcacauaguagggacu

SEQ ID NO: 1611216 - RNA, 19 nt, Artificial Sequence
  Description of Artificial Sequence: Synthetic oligonucleotide
aucgucacuccggcacucu

SEQ ID NO: 1611217 - RNA, 19 nt, Artificial Sequence
  Description of Artificial Sequence: Synthetic oligonucleotide
aggcaccauugcuccaaau

SEQ ID NO: 1611218 - RNA, 19 nt, Artificial Sequence
  Description of Artificial Sequence: Synthetic oligonucleotide
guacuuuacuggccucagu

SEQ ID NO: 1611219 - RNA, 19 nt, Artificial Sequence
  Description of Artificial Sequence: Synthetic oligonucleotide
acaugcguggcagcacauu

SEQ ID NO: 1611220 - RNA, 19 nt, Artificial Sequence
  Description of Artificial Sequence: Synthetic oligonucleotide
cguaagcuauugugugggc

SEQ ID NO: 1611221 - RNA, 19 nt, Artificial Sequence
  Description of Artificial Sequence: Synthetic oligonucleotide
gguagauagucgguacugu

SEQ ID NO: 1611222 - RNA, 19 nt, Artificial Sequence
  Description of Artificial Sequence: Synthetic oligonucleotide
ggcuuaggaguuuccauuu

SEQ ID NO: 1611223 - RNA, 19 nt, Artificial Sequence
  Description of Artificial Sequence: Synthetic oligonucleotide
gcuuaggaguuuccauuua

SEQ ID NO: 1611224 - RNA, 19 nt, Artificial Sequence
  Description of Artificial Sequence: Synthetic oligonucleotide
cagcuuugcccugacucaa

SEQ ID NO: 1611225 - RNA, 19 nt, Artificial Sequence
  Description of Artificial Sequence: Synthetic oligonucleotide
ccccauggggcugucuugc

SEQ ID NO: 1611226 - RNA, 19 nt, Artificial Sequence
  Description of Artificial Sequence: Synthetic oligonucleotide
gcucccuaucuccuguucu

SEQ ID NO: 1611227 - RNA, 19 nt, Artificial Sequence
  Description of Artificial Sequence: Synthetic oligonucleotide
ggcucccuaucuccuguuc

SEQ ID NO: 1611228 - RNA, 19 nt, Artificial Sequence
  Description of Artificial Sequence: Synthetic oligonucleotide
ggccccaucugcugucaca

SEQ ID NO: 1611229 - RNA, 19 nt, Artificial Sequence
  Description of Artificial Sequence: Synthetic oligonucleotide
cgcugguuaucuccagggc

SEQ ID NO: 1611230 - RNA, 19 nt, Artificial Sequence
  Description of Artificial Sequence: Synthetic oligonucleotide
gccgaaggcacauuuucuu

SEQ ID NO: 1611231 - RNA, 19 nt, Artificial Sequence
  Description of Artificial Sequence: Synthetic oligonucleotide
cucacuagucagucagcuu

SEQ ID NO: 1611232 - RNA, 19 nt, Artificial Sequence
  Description of Artificial Sequence: Synthetic oligonucleotide
gcauuagcuugcuggacuu

SEQ ID NO: 1611233 - RNA, 19 nt, Artificial Sequence
  Description of Artificial Sequence: Synthetic oligonucleotide
ggaucgucacuccggcacu

SEQ ID NO: 1611234 - RNA, 19 nt, Artificial Sequence
  Description of Artificial Sequence: Synthetic oligonucleotide
gcaguggaggaaaucuagu

SEQ ID NO: 1611235 - RNA, 19 nt, Artificial Sequence
  Description of Artificial Sequence: Synthetic oligonucleotide
ccaaguucaggcucccuau

SEQ ID NO: 1611236 - RNA, 19 nt, Artificial Sequence
  Description of Artificial Sequence: Synthetic oligonucleotide
gcccugacucaaguacccc

SEQ ID NO: 1611237 - RNA, 19 nt, Artificial Sequence
  Description of Artificial Sequence: Synthetic oligonucleotide
ggguggugacugcaauaaa

SEQ ID NO: 1611238 - RNA, 19 nt, Artificial Sequence
  Description of Artificial Sequence: Synthetic oligonucleotide
gcuugaaaguagagggcgu

SEQ ID NO: 1611239 - RNA, 19 nt, Artificial Sequence
  Description of Artificial Sequence: Synthetic oligonucleotide
cgguacuguuccacucacc

SEQ ID NO: 1611240 - RNA, 19 nt, Artificial Sequence
  Description of Artificial Sequence: Synthetic oligonucleotide
cugcucugaggucaacauu

SEQ ID NO: 1611241 - RNA, 19 nt, Artificial Sequence
  Description of Artificial Sequence: Synthetic oligonucleotide
cucaggccgagagcacaga

SEQ ID NO: 1611242 - RNA, 19 nt, Artificial Sequence
  Description of Artificial Sequence: Synthetic oligonucleotide
ccaugaugcaagugucugu

SEQ ID NO: 1611243 - RNA, 19 nt, Artificial Sequence
  Description of Artificial Sequence: Synthetic oligonucleotide
gcucuuguucuaauugcau

SEQ ID NO: 1611244 - RNA, 19 nt, Artificial Sequence
  Description of Artificial Sequence: Synthetic oligonucleotide
gacaugcguggcagcacau

SEQ ID NO: 1611245 - RNA, 19 nt, Artificial Sequence
  Description of Artificial Sequence: Synthetic oligonucleotide
ccagauuuccagguucugu

SEQ ID NO: 1611246 - RNA, 19 nt, Artificial Sequence
  Description of Artificial Sequence: Synthetic oligonucleotide
augcagucucuaaguuauu

SEQ ID NO: 1611247 - RNA, 19 nt, Artificial Sequence
  Description of Artificial Sequence: Synthetic oligonucleotide
cucaccccuggcacauagu

SEQ ID NO: 1611248 - RNA, 19 nt, Artificial Sequence
  Description of Artificial Sequence: Synthetic oligonucleotide
cagugugacuagcucucuu

SEQ ID NO: 1611249 - RNA, 19 nt, Artificial Sequence
  Description of Artificial Sequence: Synthetic oligonucleotide
cagcuccccuuccaccucu

SEQ ID NO: 1611250 - RNA, 19 nt, Artificial Sequence
  Description of Artificial Sequence: Synthetic oligonucleotide
ggaugcuguccaauguguu

SEQ ID NO: 1611251 - RNA, 19 nt, Artificial Sequence
  Description of Artificial Sequence: Synthetic oligonucleotide
guggagcgguggcuggaau

SEQ ID NO: 1611252 - RNA, 19 nt, Artificial Sequence
  Description of Artificial Sequence: Synthetic oligonucleotide
cggcacucuuagcucuggc

SEQ ID NO: 1611253 - RNA, 19 nt, Artificial Sequence
  Description of Artificial Sequence: Synthetic oligonucleotide
ccauggccaaggccccauc

SEQ ID NO: 1611254 - RNA, 19 nt, Artificial Sequence
  Description of Artificial Sequence: Synthetic oligonucleotide
cgucacuccggcacucuua

SEQ ID NO: 1611255 - RNA, 19 nt, Artificial Sequence
  Description of Artificial Sequence: Synthetic oligonucleotide
cacucaccccuggcacaua

SEQ ID NO: 1611256 - RNA, 19 nt, Artificial Sequence
  Description of Artificial Sequence: Synthetic oligonucleotide
gcguggcagcacauuguau

SEQ ID NO: 1611257 - RNA, 19 nt, Artificial Sequence
  Description of Artificial Sequence: Synthetic oligonucleotide
ccacucaccccuggcacau

SEQ ID NO: 1611258 - RNA, 19 nt, Artificial Sequence
  Description of Artificial Sequence: Synthetic oligonucleotide
aauuuaguaacccaccuuc

SEQ ID NO: 1611259 - RNA, 19 nt, Artificial Sequence
  Description of Artificial Sequence: Synthetic oligonucleotide
acauaauacacauagagag

SEQ ID NO: 1611260 - RNA, 19 nt, Artificial Sequence
  Description of Artificial Sequence: Synthetic oligonucleotide
aaauggauaaggcuauccc

SEQ ID NO: 1611261 - RNA, 19 nt, Artificial Sequence
  Description of Artificial Sequence: Synthetic oligonucleotide
uauaguauaugaaauaauc

SEQ ID NO: 1611262 - RNA, 19 nt, Artificial Sequence
  Description of Artificial Sequence: Synthetic oligonucleotide
uauauuuaguaauaguccc

SEQ ID NO: 1611263 - RNA, 19 nt, Artificial Sequence
  Description of Artificial Sequence: Synthetic oligonucleotide
auauauuuaguaauagucc

SEQ ID NO: 1611264 - RNA, 19 nt, Artificial Sequence
  Description of Artificial Sequence: Synthetic oligonucleotide
uagaguuauaaacauaugu

SEQ ID NO: 1611265 - RNA, 19 nt, Artificial Sequence
  Description of Artificial Sequence: Synthetic oligonucleotide
aagaaagcccuuuaggcag

SEQ ID NO: 1611266 - RNA, 19 nt, Artificial Sequence
  Description of Artificial Sequence: Synthetic oligonucleotide
uuacaugagacguaaaugu

SEQ ID NO: 1611267 - RNA, 19 nt, Artificial Sequence
  Description of Artificial Sequence: Synthetic oligonucleotide
auaguagccaauaacauuc

SEQ ID NO: 1611268 - RNA, 19 nt, Artificial Sequence
  Description of Artificial Sequence: Synthetic oligonucleotide
aaaucugagaucaugcauc

SEQ ID NO: 1611269 - RNA, 19 nt, Artificial Sequence
  Description of Artificial Sequence: Synthetic oligonucleotide
accuauuacauuuacaaga

SEQ ID NO: 1611270 - RNA, 19 nt, Artificial Sequence
  Description of Artificial Sequence: Synthetic oligonucleotide
ugaccuuacagcuuguggg

SEQ ID NO: 1611271 - RNA, 19 nt, Artificial Sequence
  Description of Artificial Sequence: Synthetic oligonucleotide
uaaggaagcaucagcauag

SEQ ID NO: 1611272 - RNA, 19 nt, Artificial Sequence
  Description of Artificial Sequence: Synthetic oligonucleotide
uguauggugaucaaauugu

SEQ ID NO: 1611273 - RNA, 19 nt, Artificial Sequence
  Description of Artificial Sequence: Synthetic oligonucleotide
uguaagaaauggauaaggc

SEQ ID NO: 1611274 - RNA, 19 nt, Artificial Sequence
  Description of Artificial Sequence: Synthetic oligonucleotide
aauacaguacuagaauaac

SEQ ID NO: 1611275 - RNA, 19 nt, Artificial Sequence
  Description of Artificial Sequence: Synthetic oligonucleotide
uuacaauuauaguauauga

SEQ ID NO: 1611276 - RNA, 19 nt, Artificial Sequence
  Description of Artificial Sequence: Synthetic oligonucleotide
uauagcauaacaacucccc

SEQ ID NO: 1611277 - RNA, 19 nt, Artificial Sequence
  Description of Artificial Sequence: Synthetic oligonucleotide
guuauaaacauauguauca

SEQ ID NO: 1611278 - RNA, 19 nt, Artificial Sequence
  Description of Artificial Sequence: Synthetic oligonucleotide
aauuacaugagacguaaau

SEQ ID NO: 1611279 - RNA, 19 nt, Artificial Sequence
  Description of Artificial Sequence: Synthetic oligonucleotide
cuucuaagggcaauaaagg

SEQ ID NO: 1611280 - RNA, 19 nt, Artificial Sequence
  Description of Artificial Sequence: Synthetic oligonucleotide
acauaagacagccuugaac

SEQ ID NO: 1611281 - RNA, 19 nt, Artificial Sequence
  Description of Artificial Sequence: Synthetic oligonucleotide
aaagaauguaggcaagaug

SEQ ID NO: 1611282 - RNA, 19 nt, Artificial Sequence
  Description of Artificial Sequence: Synthetic oligonucleotide
uagaauaacccaccaaugc

SEQ ID NO: 1611283 - RNA, 19 nt, Artificial Sequence
  Description of Artificial Sequence: Synthetic oligonucleotide
caauuugacuuuauaaacc

SEQ ID NO: 1611284 - RNA, 19 nt, Artificial Sequence
  Description of Artificial Sequence: Synthetic oligonucleotide
uauuauauuaucccacagu

SEQ ID NO: 1611285 - RNA, 19 nt, Artificial Sequence
  Description of Artificial Sequence: Synthetic oligonucleotide
aauggauaaggcuaucccu

SEQ ID NO: 1611286 - RNA, 19 nt, Artificial Sequence
  Description of Artificial Sequence: Synthetic oligonucleotide
uuuauuauauuaucccaca

SEQ ID NO: 1611287 - RNA, 19 nt, Artificial Sequence
  Description of Artificial Sequence: Synthetic oligonucleotide
acuuguaccacuaucagag

SEQ ID NO: 1611288 - RNA, 19 nt, Artificial Sequence
  Description of Artificial Sequence: Synthetic oligonucleotide
cauaagacagccuugaaca

SEQ ID NO: 1611289 - RNA, 19 nt, Artificial Sequence
  Description of Artificial Sequence: Synthetic oligonucleotide
auuauauuaucccacaguu

SEQ ID NO: 1611290 - RNA, 19 nt, Artificial Sequence
  Description of Artificial Sequence: Synthetic oligonucleotide
acuucaaucauaauucaac

SEQ ID NO: 1611291 - RNA, 19 nt, Artificial Sequence
  Description of Artificial Sequence: Synthetic oligonucleotide
acuagaauaacccaccaau

SEQ ID NO: 1611292 - RNA, 19 nt, Artificial Sequence
  Description of Artificial Sequence: Synthetic oligonucleotide
uuuacaagaaacguugugu

SEQ ID NO: 1611293 - RNA, 19 nt, Artificial Sequence
  Description of Artificial Sequence: Synthetic oligonucleotide
uauccuucugaacauaaga

SEQ ID NO: 1611294 - RNA, 19 nt, Artificial Sequence
  Description of Artificial Sequence: Synthetic oligonucleotide
uuauuauauuaucccacag

SEQ ID NO: 1611295 - RNA, 19 nt, Artificial Sequence
  Description of Artificial Sequence: Synthetic oligonucleotide
uuacaagaaacguugugug

SEQ ID NO: 1611296 - RNA, 19 nt, Artificial Sequence
  Description of Artificial Sequence: Synthetic oligonucleotide
aaucccacaccccagaaau

SEQ ID NO: 1611297 - RNA, 19 nt, Artificial Sequence
  Description of Artificial Sequence: Synthetic oligonucleotide
ggugauaaagguuuggaag

SEQ ID NO: 1611298 - RNA, 19 nt, Artificial Sequence
  Description of Artificial Sequence: Synthetic oligonucleotide
aguuuauuauauuauccca

SEQ ID NO: 1611299 - RNA, 19 nt, Artificial Sequence
  Description of Artificial Sequence: Synthetic oligonucleotide
uagccaauaacauucuccc

SEQ ID NO: 1611300 - RNA, 19 nt, Artificial Sequence
  Description of Artificial Sequence: Synthetic oligonucleotide
aguacuagaauaacccacc

SEQ ID NO: 1611301 - RNA, 19 nt, Artificial Sequence
  Description of Artificial Sequence: Synthetic oligonucleotide
aauguaggcaagaugucuc

SEQ ID NO: 1611302 - RNA, 19 nt, Artificial Sequence
  Description of Artificial Sequence: Synthetic oligonucleotide
uuauaaaccaucucucuau

SEQ ID NO: 1611303 - RNA, 19 nt, Artificial Sequence
  Description of Artificial Sequence: Synthetic oligonucleotide
acauuuacaagaaacguug

SEQ ID NO: 1611304 - RNA, 19 nt, Artificial Sequence
  Description of Artificial Sequence: Synthetic oligonucleotide
ucccuuaaacauaauacac

SEQ ID NO: 1611305 - RNA, 19 nt, Artificial Sequence
  Description of Artificial Sequence: Synthetic oligonucleotide
ucggugaagaaacuucuag

SEQ ID NO: 1611306 - RNA, 19 nt, Artificial Sequence
  Description of Artificial Sequence: Synthetic oligonucleotide
uugaccuuacagcuugugg

SEQ ID NO: 1611307 - RNA, 19 nt, Artificial Sequence
  Description of Artificial Sequence: Synthetic oligonucleotide
uuuuauaucccuagaguua

SEQ ID NO: 1611308 - RNA, 19 nt, Artificial Sequence
  Description of Artificial Sequence: Synthetic oligonucleotide
uuuauaaaccaucucucua

SEQ ID NO: 1611309 - RNA, 19 nt, Artificial Sequence
  Description of Artificial Sequence: Synthetic oligonucleotide
aacaaguguauggugauca

SEQ ID NO: 1611310 - RNA, 19 nt, Artificial Sequence
  Description of Artificial Sequence: Synthetic oligonucleotide
aaagguuuggaagaccuca

SEQ ID NO: 1611311 - RNA, 19 nt, Artificial Sequence
  Description of Artificial Sequence: Synthetic oligonucleotide
uaguaacccaccuucaaca

SEQ ID NO: 1611312 - RNA, 19 nt, Artificial Sequence
  Description of Artificial Sequence: Synthetic oligonucleotide
auacaguacuagaauaacc

SEQ ID NO: 1611313 - RNA, 19 nt, Artificial Sequence
  Description of Artificial Sequence: Synthetic oligonucleotide
aaacguugugugcacuggg

SEQ ID NO: 1611314 - RNA, 19 nt, Artificial Sequence
  Description of Artificial Sequence: Synthetic oligonucleotide
ugaucaaauuguaauuuaa

SEQ ID NO: 1611315 - RNA, 19 nt, Artificial Sequence
  Description of Artificial Sequence: Synthetic oligonucleotide
uaacccaccuucaacauuc

SEQ ID NO: 1611316 - RNA, 19 nt, Artificial Sequence
  Description of Artificial Sequence: Synthetic oligonucleotide
agagagauauauuuaguaa

SEQ ID NO: 1611317 - RNA, 19 nt, Artificial Sequence
  Description of Artificial Sequence: Synthetic oligonucleotide
auuacaugagacguaaaug

SEQ ID NO: 1611318 - RNA, 19 nt, Artificial Sequence
  Description of Artificial Sequence: Synthetic oligonucleotide
auaucuuuugccagaaagg

SEQ ID NO: 1611319 - RNA, 19 nt, Artificial Sequence
  Description of Artificial Sequence: Synthetic oligonucleotide
ucucucuauaucuuuugcc

SEQ ID NO: 1611320 - RNA, 19 nt, Artificial Sequence
  Description of Artificial Sequence: Synthetic oligonucleotide
uuaguaacccaccuucaac

SEQ ID NO: 1611321 - RNA, 19 nt, Artificial Sequence
  Description of Artificial Sequence: Synthetic oligonucleotide
ucuauuaaugaggaagcca

SEQ ID NO: 1611322 - RNA, 19 nt, Artificial Sequence
  Description of Artificial Sequence: Synthetic oligonucleotide
uucuaagggcaauaaagga

SEQ ID NO: 1611323 - RNA, 19 nt, Artificial Sequence
  Description of Artificial Sequence: Synthetic oligonucleotide
uacauuuacaagaaacguu

SEQ ID NO: 1611324 - RNA, 19 nt, Artificial Sequence
  Description of Artificial Sequence: Synthetic oligonucleotide
ugaacauaagacagccuug

SEQ ID NO: 1611325 - RNA, 19 nt, Artificial Sequence
  Description of Artificial Sequence: Synthetic oligonucleotide
agacguaaaugucacaaga

SEQ ID NO: 1611326 - RNA, 19 nt, Artificial Sequence
  Description of Artificial Sequence: Synthetic oligonucleotide
uucugaacauaagacagcc

SEQ ID NO: 1611327 - RNA, 19 nt, Artificial Sequence
  Description of Artificial Sequence: Synthetic oligonucleotide
gcaauuauagcauaacaac

SEQ ID NO: 1611328 - RNA, 19 nt, Artificial Sequence
  Description of Artificial Sequence: Synthetic oligonucleotide
ucucuauaucuuuugccag

SEQ ID NO: 1611329 - RNA, 19 nt, Artificial Sequence
  Description of Artificial Sequence: Synthetic oligonucleotide
uccuucugaacauaagaca

SEQ ID NO: 1611330 - RNA, 19 nt, Artificial Sequence
  Description of Artificial Sequence: Synthetic oligonucleotide
ugcccuuugaccuuacagc

SEQ ID NO: 1611331 - RNA, 19 nt, Artificial Sequence
  Description of Artificial Sequence: Synthetic oligonucleotide
aagcccuuuaggcagaaau

SEQ ID NO: 1611332 - RNA, 19 nt, Artificial Sequence
  Description of Artificial Sequence: Synthetic oligonucleotide
cuauuaaugaggaagccaa

SEQ ID NO: 1611333 - RNA, 19 nt, Artificial Sequence
  Description of Artificial Sequence: Synthetic oligonucleotide
uuaaugaggaagccaaaua

SEQ ID NO: 1611334 - RNA, 19 nt, Artificial Sequence
  Description of Artificial Sequence: Synthetic oligonucleotide
auaaacauauguaucaaaa

SEQ ID NO: 1611335 - RNA, 19 nt, Artificial Sequence
  Description of Artificial Sequence: Synthetic oligonucleotide
uguaauuuaagaguuuauu

SEQ ID NO: 1611336 - RNA, 19 nt, Artificial Sequence
  Description of Artificial Sequence: Synthetic oligonucleotide
aagccaaauacaguacuag

SEQ ID NO: 1611337 - RNA, 19 nt, Artificial Sequence
  Description of Artificial Sequence: Synthetic oligonucleotide
cuaggggugaucuucuaag

SEQ ID NO: 1611338 - RNA, 19 nt, Artificial Sequence
  Description of Artificial Sequence: Synthetic oligonucleotide
gaccuuacagcuugugggg

SEQ ID NO: 1611339 - RNA, 19 nt, Artificial Sequence
  Description of Artificial Sequence: Synthetic oligonucleotide
ugagacguaaaugucacaa

SEQ ID NO: 1611340 - RNA, 19 nt, Artificial Sequence
  Description of Artificial Sequence: Synthetic oligonucleotide
gauaaggcuaucccuagga

SEQ ID NO: 1611341 - RNA, 19 nt, Artificial Sequence
  Description of Artificial Sequence: Synthetic oligonucleotide
guuuauuauauuaucccac

SEQ ID NO: 1611342 - RNA, 19 nt, Artificial Sequence
  Description of Artificial Sequence: Synthetic oligonucleotide
uuggcuaagccauuccacc

SEQ ID NO: 1611343 - RNA, 19 nt, Artificial Sequence
  Description of Artificial Sequence: Synthetic oligonucleotide
augagagacaucucgguga

SEQ ID NO: 1611344 - RNA, 19 nt, Artificial Sequence
  Description of Artificial Sequence: Synthetic oligonucleotide
uaacccaccaaugcaaugc

SEQ ID NO: 1611345 - RNA, 19 nt, Artificial Sequence
  Description of Artificial Sequence: Synthetic oligonucleotide
uaggcaagaugucucagac

SEQ ID NO: 1611346 - RNA, 19 nt, Artificial Sequence
  Description of Artificial Sequence: Synthetic oligonucleotide
uugcauaaauaccagcaau

SEQ ID NO: 1611347 - RNA, 19 nt, Artificial Sequence
  Description of Artificial Sequence: Synthetic oligonucleotide
aucuauuaaugaggaagcc

SEQ ID NO: 1611348 - RNA, 19 nt, Artificial Sequence
  Description of Artificial Sequence: Synthetic oligonucleotide
uacaagaaacguugugugc

SEQ ID NO: 1611349 - RNA, 19 nt, Artificial Sequence
  Description of Artificial Sequence: Synthetic oligonucleotide
accaaacaggggcaguggc

SEQ ID NO: 1611350 - RNA, 19 nt, Artificial Sequence
  Description of Artificial Sequence: Synthetic oligonucleotide
uuuaguaacccaccuucaa

SEQ ID NO: 1611351 - RNA, 19 nt, Artificial Sequence
  Description of Artificial Sequence: Synthetic oligonucleotide
caguacuagaauaacccac

SEQ ID NO: 1611352 - RNA, 19 nt, Artificial Sequence
  Description of Artificial Sequence: Synthetic oligonucleotide
agaaaucugagaucaugca

SEQ ID NO: 1611353 - RNA, 19 nt, Artificial Sequence
  Description of Artificial Sequence: Synthetic oligonucleotide
uguguaagaaauggauaag

SEQ ID NO: 1611354 - RNA, 19 nt, Artificial Sequence
  Description of Artificial Sequence: Synthetic oligonucleotide
aaguguauggugaucaaau

SEQ ID NO: 1611355 - RNA, 19 nt, Artificial Sequence
  Description of Artificial Sequence: Synthetic oligonucleotide
acaagaaacguugugugca

SEQ ID NO: 1611356 - RNA, 19 nt, Artificial Sequence
  Description of Artificial Sequence: Synthetic oligonucleotide
aggggugaucuucuaaggg

SEQ ID NO: 1611357 - RNA, 19 nt, Artificial Sequence
  Description of Artificial Sequence: Synthetic oligonucleotide
uauggugaucaaauuguaa

SEQ ID NO: 1611358 - RNA, 19 nt, Artificial Sequence
  Description of Artificial Sequence: Synthetic oligonucleotide
aguaaaagacaagggaaug

SEQ ID NO: 1611359 - RNA, 19 nt, Artificial Sequence
  Description of Artificial Sequence: Synthetic oligonucleotide
auaaagguuuggaagaccu

SEQ ID NO: 1611360 - RNA, 19 nt, Artificial Sequence
  Description of Artificial Sequence: Synthetic oligonucleotide
uggcauuauguaacugagg

SEQ ID NO: 1611361 - RNA, 19 nt, Artificial Sequence
  Description of Artificial Sequence: Synthetic oligonucleotide
ggcaagaugucucagacuc

SEQ ID NO: 1611362 - RNA, 19 nt, Artificial Sequence
  Description of Artificial Sequence: Synthetic oligonucleotide
uaagacagccuugaacaag

SEQ ID NO: 1611363 - RNA, 19 nt, Artificial Sequence
  Description of Artificial Sequence: Synthetic oligonucleotide
ccaauuugacuuuauaaac

SEQ ID NO: 1611364 - RNA, 19 nt, Artificial Sequence
  Description of Artificial Sequence: Synthetic oligonucleotide
aauguguguaagaaaugga

SEQ ID NO: 1611365 - RNA, 19 nt, Artificial Sequence
  Description of Artificial Sequence: Synthetic oligonucleotide
uaggggugaucuucuaagg

SEQ ID NO: 1611366 - RNA, 19 nt, Artificial Sequence
  Description of Artificial Sequence: Synthetic oligonucleotide
gagacguaaaugucacaag

SEQ ID NO: 1611367 - RNA, 19 nt, Artificial Sequence
  Description of Artificial Sequence: Synthetic oligonucleotide
agcaauuauagcauaacaa

SEQ ID NO: 1611368 - RNA, 19 nt, Artificial Sequence
  Description of Artificial Sequence: Synthetic oligonucleotide
aaggcuaucccuaggaaaa

SEQ ID NO: 1611369 - RNA, 19 nt, Artificial Sequence
  Description of Artificial Sequence: Synthetic oligonucleotide
uacaugagacguaaauguc

SEQ ID NO: 1611370 - RNA, 19 nt, Artificial Sequence
  Description of Artificial Sequence: Synthetic oligonucleotide
acaguacuagaauaaccca

SEQ ID NO: 1611371 - RNA, 19 nt, Artificial Sequence
  Description of Artificial Sequence: Synthetic oligonucleotide
agaaacguugugugcacug

SEQ ID NO: 1611372 - RNA, 19 nt, Artificial Sequence
  Description of Artificial Sequence: Synthetic oligonucleotide
gaggaggacucucuggcag

SEQ ID NO: 1611373 - RNA, 19 nt, Artificial Sequence
  Description of Artificial Sequence: Synthetic oligonucleotide
uuauauuaucccacaguuu

SEQ ID NO: 1611374 - RNA, 19 nt, Artificial Sequence
  Description of Artificial Sequence: Synthetic oligonucleotide
gaaacguugugugcacugg

SEQ ID NO: 1611375 - RNA, 19 nt, Artificial Sequence
  Description of Artificial Sequence: Synthetic oligonucleotide
uggauaaggcuaucccuag

SEQ ID NO: 1611376 - RNA, 19 nt, Artificial Sequence
  Description of Artificial Sequence: Synthetic oligonucleotide
cuuggcuaagccauuccac

SEQ ID NO: 1611377 - RNA, 19 nt, Artificial Sequence
  Description of Artificial Sequence: Synthetic oligonucleotide
auuauguaacugaggacag

SEQ ID NO: 1611378 - RNA, 19 nt, Artificial Sequence
  Description of Artificial Sequence: Synthetic oligonucleotide
auagcugucuauccuucug

SEQ ID NO: 1611379 - RNA, 19 nt, Artificial Sequence
  Description of Artificial Sequence: Synthetic oligonucleotide
acuaucagagcuuggugau

SEQ ID NO: 1611380 - RNA, 19 nt, Artificial Sequence
  Description of Artificial Sequence: Synthetic oligonucleotide
uguaccacuaucagagcuu

SEQ ID NO: 1611381 - RNA, 19 nt, Artificial Sequence
  Description of Artificial Sequence: Synthetic oligonucleotide
gugagaguccagcagaguc

SEQ ID NO: 1611382 - RNA, 19 nt, Artificial Sequence
  Description of Artificial Sequence: Synthetic oligonucleotide
auuaaugaggaagccaaau

SEQ ID NO: 1611383 - RNA, 19 nt, Artificial Sequence
  Description of Artificial Sequence: Synthetic oligonucleotide
ucccucaccuauuacauuu

SEQ ID NO: 1611384 - RNA, 19 nt, Artificial Sequence
  Description of Artificial Sequence: Synthetic oligonucleotide
uauuaaugaggaagccaaa

SEQ ID NO: 1611385 - RNA, 19 nt, Artificial Sequence
  Description of Artificial Sequence: Synthetic oligonucleotide
guucacuucaaucauaauu

SEQ ID NO: 1611386 - RNA, 19 nt, Artificial Sequence
  Description of Artificial Sequence: Synthetic oligonucleotide
agccaaauacaguacuaga

SEQ ID NO: 1611387 - RNA, 19 nt, Artificial Sequence
  Description of Artificial Sequence: Synthetic oligonucleotide
ugagagacaucucggugaa

SEQ ID NO: 1611388 - RNA, 19 nt, Artificial Sequence
  Description of Artificial Sequence: Synthetic oligonucleotide
uggccuggcaauuuaguaa

SEQ ID NO: 1611389 - RNA, 19 nt, Artificial Sequence
  Description of Artificial Sequence: Synthetic oligonucleotide
gaacauaagacagccuuga

SEQ ID NO: 1611390 - RNA, 19 nt, Artificial Sequence
  Description of Artificial Sequence: Synthetic oligonucleotide
uggugaucaaauuguaauu

SEQ ID NO: 1611391 - RNA, 19 nt, Artificial Sequence
  Description of Artificial Sequence: Synthetic oligonucleotide
uaucagagcuuggugauaa

SEQ ID NO: 1611392 - RNA, 19 nt, Artificial Sequence
  Description of Artificial Sequence: Synthetic oligonucleotide
acaugagacguaaauguca

SEQ ID NO: 1611393 - RNA, 19 nt, Artificial Sequence
  Description of Artificial Sequence: Synthetic oligonucleotide
guggcauuauguaacugag

SEQ ID NO: 1611394 - RNA, 19 nt, Artificial Sequence
  Description of Artificial Sequence: Synthetic oligonucleotide
aacccaccaaugcaaugca

SEQ ID NO: 1611395 - RNA, 19 nt, Artificial Sequence
  Description of Artificial Sequence: Synthetic oligonucleotide
gacuuguaccacuaucaga

SEQ ID NO: 1611396 - RNA, 19 nt, Artificial Sequence
  Description of Artificial Sequence: Synthetic oligonucleotide
ugcuuggcaguagagaauc

SEQ ID NO: 1611397 - RNA, 19 nt, Artificial Sequence
  Description of Artificial Sequence: Synthetic oligonucleotide
caguagagaaucccacacc

SEQ ID NO: 1611398 - RNA, 19 nt, Artificial Sequence
  Description of Artificial Sequence: Synthetic oligonucleotide
gaucaugcaucccucaccu

SEQ ID NO: 1611399 - RNA, 19 nt, Artificial Sequence
  Description of Artificial Sequence: Synthetic oligonucleotide
ugagaucaugcaucccuca

SEQ ID NO: 1611400 - RNA, 19 nt, Artificial Sequence
  Description of Artificial Sequence: Synthetic oligonucleotide
auguguguaagaaauggau

SEQ ID NO: 1611401 - RNA, 19 nt, Artificial Sequence
  Description of Artificial Sequence: Synthetic oligonucleotide
aggacagauggagccauac

SEQ ID NO: 1611402 - RNA, 19 nt, Artificial Sequence
  Description of Artificial Sequence: Synthetic oligonucleotide
aagaggcgguaucugcucu

SEQ ID NO: 1611403 - RNA, 19 nt, Artificial Sequence
  Description of Artificial Sequence: Synthetic oligonucleotide
uggcuaagccauuccacca

SEQ ID NO: 1611404 - RNA, 19 nt, Artificial Sequence
  Description of Artificial Sequence: Synthetic oligonucleotide
cacauagagagauauauuu

SEQ ID NO: 1611405 - RNA, 19 nt, Artificial Sequence
  Description of Artificial Sequence: Synthetic oligonucleotide
aauuguaauuuaagaguuu

SEQ ID NO: 1611406 - RNA, 19 nt, Artificial Sequence
  Description of Artificial Sequence: Synthetic oligonucleotide
auagagagauauauuuagu

SEQ ID NO: 1611407 - RNA, 19 nt, Artificial Sequence
  Description of Artificial Sequence: Synthetic oligonucleotide
caagaaacguugugugcac

SEQ ID NO: 1611408 - RNA, 19 nt, Artificial Sequence
  Description of Artificial Sequence: Synthetic oligonucleotide
agaauguaggcaagauguc

SEQ ID NO: 1611409 - RNA, 19 nt, Artificial Sequence
  Description of Artificial Sequence: Synthetic oligonucleotide
uaguagccaauaacauucu

SEQ ID NO: 1611410 - RNA, 19 nt, Artificial Sequence
  Description of Artificial Sequence: Synthetic oligonucleotide
uguaggcaagaugucucag

SEQ ID NO: 1611411 - RNA, 19 nt, Artificial Sequence
  Description of Artificial Sequence: Synthetic oligonucleotide
uaauacacauagagagaua

SEQ ID NO: 1611412 - RNA, 19 nt, Artificial Sequence
  Description of Artificial Sequence: Synthetic oligonucleotide
uggcuuuaggucacaggac

SEQ ID NO: 1611413 - RNA, 19 nt, Artificial Sequence
  Description of Artificial Sequence: Synthetic oligonucleotide
auaagacagccuugaacaa

SEQ ID NO: 1611414 - RNA, 19 nt, Artificial Sequence
  Description of Artificial Sequence: Synthetic oligonucleotide
auaaggcuaucccuaggaa

SEQ ID NO: 1611415 - RNA, 19 nt, Artificial Sequence
  Description of Artificial Sequence: Synthetic oligonucleotide
aguaacccaccuucaacau

SEQ ID NO: 1611416 - RNA, 19 nt, Artificial Sequence
  Description of Artificial Sequence: Synthetic oligonucleotide
aguguauggugaucaaauu

SEQ ID NO: 1611417 - RNA, 19 nt, Artificial Sequence
  Description of Artificial Sequence: Synthetic oligonucleotide
uuugaccuuacagcuugug

SEQ ID NO: 1611418 - RNA, 19 nt, Artificial Sequence
  Description of Artificial Sequence: Synthetic oligonucleotide
uuggccuggcaauuuagua

SEQ ID NO: 1611419 - RNA, 19 nt, Artificial Sequence
  Description of Artificial Sequence: Synthetic oligonucleotide
gacguaaaugucacaagaa

SEQ ID NO: 1611420 - RNA, 19 nt, Artificial Sequence
  Description of Artificial Sequence: Synthetic oligonucleotide
auaccagcaauuauagcau

SEQ ID NO: 1611421 - RNA, 19 nt, Artificial Sequence
  Description of Artificial Sequence: Synthetic oligonucleotide
uuauguaacugaggacaga

SEQ ID NO: 1611422 - RNA, 19 nt, Artificial Sequence
  Description of Artificial Sequence: Synthetic oligonucleotide
gcaguagagaaucccacac

SEQ ID NO: 1611423 - RNA, 19 nt, Artificial Sequence
  Description of Artificial Sequence: Synthetic oligonucleotide
uuccuaggggugaucuucu

SEQ ID NO: 1611424 - RNA, 19 nt, Artificial Sequence
  Description of Artificial Sequence: Synthetic oligonucleotide
ggacuuguaccacuaucag

SEQ ID NO: 1611425 - RNA, 19 nt, Artificial Sequence
  Description of Artificial Sequence: Synthetic oligonucleotide
gaauguaggcaagaugucu

SEQ ID NO: 1611426 - RNA, 19 nt, Artificial Sequence
  Description of Artificial Sequence: Synthetic oligonucleotide
gguaaagaaauguguguaa

SEQ ID NO: 1611427 - RNA, 19 nt, Artificial Sequence
  Description of Artificial Sequence: Synthetic oligonucleotide
guaggcaagaugucucaga

SEQ ID NO: 1611428 - RNA, 19 nt, Artificial Sequence
  Description of Artificial Sequence: Synthetic oligonucleotide
caagggaaugcaugguuca

SEQ ID NO: 1611429 - RNA, 19 nt, Artificial Sequence
  Description of Artificial Sequence: Synthetic oligonucleotide
ccuucucacaaagaggcgg

SEQ ID NO: 1611430 - RNA, 19 nt, Artificial Sequence
  Description of Artificial Sequence: Synthetic oligonucleotide
ccuuugaccuuacagcuug

SEQ ID NO: 1611431 - RNA, 19 nt, Artificial Sequence
  Description of Artificial Sequence: Synthetic oligonucleotide
ugaucuucuaagggcaaua

SEQ ID NO: 1611432 - RNA, 19 nt, Artificial Sequence
  Description of Artificial Sequence: Synthetic oligonucleotide
uggaaccagcagcauggca

SEQ ID NO: 1611433 - RNA, 19 nt, Artificial Sequence
  Description of Artificial Sequence: Synthetic oligonucleotide
gccuuaaggaagcaucagc

SEQ ID NO: 1611434 - RNA, 19 nt, Artificial Sequence
  Description of Artificial Sequence: Synthetic oligonucleotide
uaccacuaucagagcuugg

SEQ ID NO: 1611435 - RNA, 19 nt, Artificial Sequence
  Description of Artificial Sequence: Synthetic oligonucleotide
aagaaacguugugugcacu

SEQ ID NO: 1611436 - RNA, 19 nt, Artificial Sequence
  Description of Artificial Sequence: Synthetic oligonucleotide
ggccuggcaauuuaguaac

SEQ ID NO: 1611437 - RNA, 19 nt, Artificial Sequence
  Description of Artificial Sequence: Synthetic oligonucleotide
ccaauaacauucucccaag

SEQ ID NO: 1611438 - RNA, 19 nt, Artificial Sequence
  Description of Artificial Sequence: Synthetic oligonucleotide
auggauaaggcuaucccua

SEQ ID NO: 1611439 - RNA, 19 nt, Artificial Sequence
  Description of Artificial Sequence: Synthetic oligonucleotide
cccgguaaagaaaugugug

SEQ ID NO: 1611440 - RNA, 19 nt, Artificial Sequence
  Description of Artificial Sequence: Synthetic oligonucleotide
cucaccuauuacauuuaca

SEQ ID NO: 1611441 - RNA, 19 nt, Artificial Sequence
  Description of Artificial Sequence: Synthetic oligonucleotide
agcagucacccucaagaau

SEQ ID NO: 1611442 - RNA, 19 nt, Artificial Sequence
  Description of Artificial Sequence: Synthetic oligonucleotide
aacccaccuucaacauucc

SEQ ID NO: 1611443 - RNA, 19 nt, Artificial Sequence
  Description of Artificial Sequence: Synthetic oligonucleotide
aucugagaucaugcauccc

SEQ ID NO: 1611444 - RNA, 19 nt, Artificial Sequence
  Description of Artificial Sequence: Synthetic oligonucleotide
gaggcgguaucugcucugg

SEQ ID NO: 1611445 - RNA, 19 nt, Artificial Sequence
  Description of Artificial Sequence: Synthetic oligonucleotide
ccuuugcauaaauaccagc

SEQ ID NO: 1611446 - RNA, 19 nt, Artificial Sequence
  Description of Artificial Sequence: Synthetic oligonucleotide
ucucacaaagaggcgguau

SEQ ID NO: 1611447 - RNA, 19 nt, Artificial Sequence
  Description of Artificial Sequence: Synthetic oligonucleotide
ggcgguaucugcucuggcc

SEQ ID NO: 1611448 - RNA, 19 nt, Artificial Sequence
  Description of Artificial Sequence: Synthetic oligonucleotide
ugcaucccucaccuauuac

SEQ ID NO: 1611449 - RNA, 19 nt, Artificial Sequence
  Description of Artificial Sequence: Synthetic oligonucleotide
gcaucccucaccuauuaca

SEQ ID NO: 1611450 - RNA, 19 nt, Artificial Sequence
  Description of Artificial Sequence: Synthetic oligonucleotide
acauucucccaagggcggg

SEQ ID NO: 1611451 - RNA, 19 nt, Artificial Sequence
  Description of Artificial Sequence: Synthetic oligonucleotide
agcugucuauccuucugaa

SEQ ID NO: 1611452 - RNA, 19 nt, Artificial Sequence
  Description of Artificial Sequence: Synthetic oligonucleotide
cacuucaaucauaauucaa

SEQ ID NO: 1611453 - RNA, 19 nt, Artificial Sequence
  Description of Artificial Sequence: Synthetic oligonucleotide
aggcaagaugucucagacu

SEQ ID NO: 1611454 - RNA, 19 nt, Artificial Sequence
  Description of Artificial Sequence: Synthetic oligonucleotide
gaaucccacaccccagaaa

SEQ ID NO: 1611455 - RNA, 19 nt, Artificial Sequence
  Description of Artificial Sequence: Synthetic oligonucleotide
agacaucucggugaagaaa

SEQ ID NO: 1611456 - RNA, 19 nt, Artificial Sequence
  Description of Artificial Sequence: Synthetic oligonucleotide
cacaaagaggcgguaucug

SEQ ID NO: 1611457 - RNA, 19 nt, Artificial Sequence
  Description of Artificial Sequence: Synthetic oligonucleotide
guauaugaaauaaucuauu

SEQ ID NO: 1611458 - RNA, 19 nt, Artificial Sequence
  Description of Artificial Sequence: Synthetic oligonucleotide
aaauuacaugagacguaaa

SEQ ID NO: 1611459 - RNA, 19 nt, Artificial Sequence
  Description of Artificial Sequence: Synthetic oligonucleotide
agggaaugcaugguucacu

SEQ ID NO: 1611460 - RNA, 19 nt, Artificial Sequence
  Description of Artificial Sequence: Synthetic oligonucleotide
ccuuuaggcagaaaucuga

SEQ ID NO: 1611461 - RNA, 19 nt, Artificial Sequence
  Description of Artificial Sequence: Synthetic oligonucleotide
uuauaucccuagaguuaua

SEQ ID NO: 1611462 - RNA, 19 nt, Artificial Sequence
  Description of Artificial Sequence: Synthetic oligonucleotide
caccaaacaggggcagugg

SEQ ID NO: 1611463 - RNA, 19 nt, Artificial Sequence
  Description of Artificial Sequence: Synthetic oligonucleotide
ugugcccuuugaccuuaca

SEQ ID NO: 1611464 - RNA, 19 nt, Artificial Sequence
  Description of Artificial Sequence: Synthetic oligonucleotide
uggugggugugcccuuuga

SEQ ID NO: 1611465 - RNA, 19 nt, Artificial Sequence
  Description of Artificial Sequence: Synthetic oligonucleotide
gccaaauacaguacuagaa

SEQ ID NO: 1611466 - RNA, 19 nt, Artificial Sequence
  Description of Artificial Sequence: Synthetic oligonucleotide
aggcacuugggaucucagu

SEQ ID NO: 1611467 - RNA, 19 nt, Artificial Sequence
  Description of Artificial Sequence: Synthetic oligonucleotide
uucuggcuauagcugucua

SEQ ID NO: 1611468 - RNA, 19 nt, Artificial Sequence
  Description of Artificial Sequence: Synthetic oligonucleotide
aggaagcaucagcauagua

SEQ ID NO: 1611469 - RNA, 19 nt, Artificial Sequence
  Description of Artificial Sequence: Synthetic oligonucleotide
ucucccaagggcgggugcu

SEQ ID NO: 1611470 - RNA, 19 nt, Artificial Sequence
  Description of Artificial Sequence: Synthetic oligonucleotide
aggacucucuggcagccuu

SEQ ID NO: 1611471 - RNA, 19 nt, Artificial Sequence
  Description of Artificial Sequence: Synthetic oligonucleotide
cagaaaugguuugggucug

SEQ ID NO: 1611472 - RNA, 19 nt, Artificial Sequence
  Description of Artificial Sequence: Synthetic oligonucleotide
ggcaguagagaaucccaca

SEQ ID NO: 1611473 - RNA, 19 nt, Artificial Sequence
  Description of Artificial Sequence: Synthetic oligonucleotide
uuuccuuggccuggcaauu

SEQ ID NO: 1611474 - RNA, 19 nt, Artificial Sequence
  Description of Artificial Sequence: Synthetic oligonucleotide
ccagaaaugguuugggucu

SEQ ID NO: 1611475 - RNA, 19 nt, Artificial Sequence
  Description of Artificial Sequence: Synthetic oligonucleotide
gcaauuuaguaacccaccu

SEQ ID NO: 1611476 - RNA, 19 nt, Artificial Sequence
  Description of Artificial Sequence: Synthetic oligonucleotide
acucucuggcagccuuaag

SEQ ID NO: 1611477 - RNA, 19 nt, Artificial Sequence
  Description of Artificial Sequence: Synthetic oligonucleotide
caucccucaccuauuacau

SEQ ID NO: 1611478 - RNA, 19 nt, Artificial Sequence
  Description of Artificial Sequence: Synthetic oligonucleotide
caaguguauggugaucaaa

SEQ ID NO: 1611479 - RNA, 19 nt, Artificial Sequence
  Description of Artificial Sequence: Synthetic oligonucleotide
guauggugaucaaauugua

SEQ ID NO: 1611480 - RNA, 19 nt, Artificial Sequence
  Description of Artificial Sequence: Synthetic oligonucleotide
cccuuuaggcagaaaucug

SEQ ID NO: 1611481 - RNA, 19 nt, Artificial Sequence
  Description of Artificial Sequence: Synthetic oligonucleotide
agaaagcccuuuaggcaga

SEQ ID NO: 1611482 - RNA, 19 nt, Artificial Sequence
  Description of Artificial Sequence: Synthetic oligonucleotide
agggcgggugcuuggcagu

SEQ ID NO: 1611483 - RNA, 19 nt, Artificial Sequence
  Description of Artificial Sequence: Synthetic oligonucleotide
aucccucaccuauuacauu

SEQ ID NO: 1611484 - RNA, 19 nt, Artificial Sequence
  Description of Artificial Sequence: Synthetic oligonucleotide
cuugggaucucaguuuggu

SEQ ID NO: 1611485 - RNA, 19 nt, Artificial Sequence
  Description of Artificial Sequence: Synthetic oligonucleotide
cuuggccuggcaauuuagu

SEQ ID NO: 1611486 - RNA, 19 nt, Artificial Sequence
  Description of Artificial Sequence: Synthetic oligonucleotide
caauuuaguaacccaccuu

SEQ ID NO: 1611487 - RNA, 19 nt, Artificial Sequence
  Description of Artificial Sequence: Synthetic oligonucleotide
ggcacuugggaucucaguu

SEQ ID NO: 1611488 - RNA, 19 nt, Artificial Sequence
  Description of Artificial Sequence: Synthetic oligonucleotide
aucagagcuuggugauaaa

SEQ ID NO: 1611489 - RNA, 19 nt, Artificial Sequence
  Description of Artificial Sequence: Synthetic oligonucleotide
ggaaugcaugguucacuuc

SEQ ID NO: 1611490 - RNA, 19 nt, Artificial Sequence
  Description of Artificial Sequence: Synthetic oligonucleotide
uucucacaaagaggcggua

SEQ ID NO: 1611491 - RNA, 19 nt, Artificial Sequence
  Description of Artificial Sequence: Synthetic oligonucleotide
ccucaccuauuacauuuac

SEQ ID NO: 1611492 - RNA, 19 nt, Artificial Sequence
  Description of Artificial Sequence: Synthetic oligonucleotide
cuauaucuuuugccagaaa

SEQ ID NO: 1611493 - RNA, 19 nt, Artificial Sequence
  Description of Artificial Sequence: Synthetic oligonucleotide
ggcuauagcugucuauccu

SEQ ID NO: 1611494 - RNA, 19 nt, Artificial Sequence
  Description of Artificial Sequence: Synthetic oligonucleotide
gugugacccagcagucacc

SEQ ID NO: 1611495 - RNA, 19 nt, Artificial Sequence
  Description of Artificial Sequence: Synthetic oligonucleotide
cccaccaaugcaaugcaaa

SEQ ID NO: 1611496 - RNA, 19 nt, Artificial Sequence
  Description of Artificial Sequence: Synthetic oligonucleotide
gcaaauuacaugagacgua

SEQ ID NO: 1611497 - RNA, 19 nt, Artificial Sequence
  Description of Artificial Sequence: Synthetic oligonucleotide
gcuauagcugucuauccuu

SEQ ID NO: 1611498 - RNA, 19 nt, Artificial Sequence
  Description of Artificial Sequence: Synthetic oligonucleotide
uguggugggugugcccuuu

SEQ ID NO: 1611499 - RNA, 19 nt, Artificial Sequence
  Description of Artificial Sequence: Synthetic oligonucleotide
aucaugcaucccucaccua

SEQ ID NO: 1611500 - RNA, 19 nt, Artificial Sequence
  Description of Artificial Sequence: Synthetic oligonucleotide
guggugggugugcccuuug

SEQ ID NO: 1611501 - RNA, 19 nt, Artificial Sequence
  Description of Artificial Sequence: Synthetic oligonucleotide
gaaagcccuuuaggcagaa

SEQ ID NO: 1611502 - RNA, 19 nt, Artificial Sequence
  Description of Artificial Sequence: Synthetic oligonucleotide
cacaccccagaaaugguuu

SEQ ID NO: 1611503 - RNA, 19 nt, Artificial Sequence
  Description of Artificial Sequence: Synthetic oligonucleotide
gggaaugcaugguucacuu

SEQ ID NO: 1611504 - RNA, 19 nt, Artificial Sequence
  Description of Artificial Sequence: Synthetic oligonucleotide
cagccuugaacaaguguau

SEQ ID NO: 1611505 - RNA, 19 nt, Artificial Sequence
  Description of Artificial Sequence: Synthetic oligonucleotide
ccuuacagcuuguggggca

SEQ ID NO: 1611506 - RNA, 19 nt, Artificial Sequence
  Description of Artificial Sequence: Synthetic oligonucleotide
ccgguaaagaaaugugugu

SEQ ID NO: 1611507 - RNA, 19 nt, Artificial Sequence
  Description of Artificial Sequence: Synthetic oligonucleotide
gucuauccuucugaacaua

SEQ ID NO: 1611508 - RNA, 19 nt, Artificial Sequence
  Description of Artificial Sequence: Synthetic oligonucleotide
cccaagggcgggugcuugg

SEQ ID NO: 1611509 - RNA, 19 nt, Artificial Sequence
  Description of Artificial Sequence: Synthetic oligonucleotide
cuaucagagcuuggugaua

SEQ ID NO: 1611510 - RNA, 19 nt, Artificial Sequence
  Description of Artificial Sequence: Synthetic oligonucleotide
uuacagcuuguggggcauu

SEQ ID NO: 1611511 - RNA, 19 nt, Artificial Sequence
  Description of Artificial Sequence: Synthetic oligonucleotide
cuuugaccuuacagcuugu

SEQ ID NO: 1611512 - RNA, 19 nt, Artificial Sequence
  Description of Artificial Sequence: Synthetic oligonucleotide
ccuaggggugaucuucuaa

SEQ ID NO: 1611513 - RNA, 19 nt, Artificial Sequence
  Description of Artificial Sequence: Synthetic oligonucleotide
gggcaauaaaggaaacaau

SEQ ID NO: 1611514 - RNA, 19 nt, Artificial Sequence
  Description of Artificial Sequence: Synthetic oligonucleotide
cacgcccuugcuggagcac

SEQ ID NO: 1611515 - RNA, 19 nt, Artificial Sequence
  Description of Artificial Sequence: Synthetic oligonucleotide
cgguaaagaaaugugugua

SEQ ID NO: 1611516 - RNA, 19 nt, Artificial Sequence
  Description of Artificial Sequence: Synthetic oligonucleotide
cuuacagcuuguggggcau

SEQ ID NO: 1611517 - RNA, 19 nt, Artificial Sequence
  Description of Artificial Sequence: Synthetic oligonucleotide
ccccgguaaagaaaugugu

SEQ ID NO: 1611518 - RNA, 19 nt, Artificial Sequence
  Description of Artificial Sequence: Synthetic oligonucleotide
gacucuuccuaggggugau

SEQ ID NO: 1611519 - RNA, 19 nt, Artificial Sequence
  Description of Artificial Sequence: Synthetic oligonucleotide
ccaagggcgggugcuuggc

SEQ ID NO: 1611520 - RNA, 19 nt, Artificial Sequence
  Description of Artificial Sequence: Synthetic oligonucleotide
cggugaagaaacuucuagu

SEQ ID NO: 1611521 - RNA, 19 nt, Artificial Sequence
  Description of Artificial Sequence: Synthetic oligonucleotide
gaggacagauggagccaua

SEQ ID NO: 1611522 - RNA, 19 nt, Artificial Sequence
  Description of Artificial Sequence: Synthetic oligonucleotide
ggugugcccuuugaccuua

SEQ ID NO: 1611523 - RNA, 19 nt, Artificial Sequence
  Description of Artificial Sequence: Synthetic oligonucleotide
gccaggacuuguaccacua

SEQ ID NO: 1611524 - RNA, 19 nt, Artificial Sequence
  Description of Artificial Sequence: Synthetic oligonucleotide
ggcgggugcuuggcaguag

SEQ ID NO: 1611525 - RNA, 19 nt, Artificial Sequence
  Description of Artificial Sequence: Synthetic oligonucleotide
gugugcccuuugaccuuac

SEQ ID NO: 1611526 - RNA, 19 nt, Artificial Sequence
  Description of Artificial Sequence: Synthetic oligonucleotide
ggucaggccccagguggca

SEQ ID NO: 1611527 - RNA, 19 nt, Artificial Sequence
  Description of Artificial Sequence: Synthetic oligonucleotide
cccucaccuauuacauuua

SEQ ID NO: 1611528 - RNA, 19 nt, Artificial Sequence
  Description of Artificial Sequence: Synthetic oligonucleotide
ccccagaaaugguuugggu

SEQ ID NO: 1611529 - RNA, 19 nt, Artificial Sequence
  Description of Artificial Sequence: Synthetic oligonucleotide
gccauacuugguggccaga

SEQ ID NO: 1611530 - RNA, 19 nt, Artificial Sequence
  Description of Artificial Sequence: Synthetic oligonucleotide
ggacucucuggcagccuua

SEQ ID NO: 1611531 - RNA, 19 nt, Artificial Sequence
  Description of Artificial Sequence: Synthetic oligonucleotide
gucaggccccagguggcau

SEQ ID NO: 1611532 - RNA, 19 nt, Artificial Sequence
  Description of Artificial Sequence: Synthetic oligonucleotide
aggccccagguggcauuau

SEQ ID NO: 1611533 - RNA, 19 nt, Artificial Sequence
  Description of Artificial Sequence: Synthetic oligonucleotide
cccuuugaccuuacagcuu

SEQ ID NO: 1611534 - RNA, 19 nt, Artificial Sequence
  Description of Artificial Sequence: Synthetic oligonucleotide
gggcgggugcuuggcagua

SEQ ID NO: 1611535 - RNA, 19 nt, Artificial Sequence
  Description of Artificial Sequence: Synthetic oligonucleotide
ccaggacuuguaccacuau

SEQ ID NO: 1611536 - RNA, 19 nt, Artificial Sequence
  Description of Artificial Sequence: Synthetic oligonucleotide
cucccaagggcgggugcuu

SEQ ID NO: 1611537 - RNA, 19 nt, Artificial Sequence
  Description of Artificial Sequence: Synthetic oligonucleotide
aaaccaauugcguucaucc

SEQ ID NO: 1611538 - RNA, 19 nt, Artificial Sequence
  Description of Artificial Sequence: Synthetic oligonucleotide
aaaauagaugggcagauag

SEQ ID NO: 1611539 - RNA, 19 nt, Artificial Sequence
  Description of Artificial Sequence: Synthetic oligonucleotide
aacagcaugucauaaaaug

SEQ ID NO: 1611540 - RNA, 19 nt, Artificial Sequence
  Description of Artificial Sequence: Synthetic oligonucleotide
aauagaugggcagauaggg

SEQ ID NO: 1611541 - RNA, 19 nt, Artificial Sequence
  Description of Artificial Sequence: Synthetic oligonucleotide
aaguuuucguuugagaugg

SEQ ID NO: 1611542 - RNA, 19 nt, Artificial Sequence
  Description of Artificial Sequence: Synthetic oligonucleotide
agugcaaaguauuauacag

SEQ ID NO: 1611543 - RNA, 19 nt, Artificial Sequence
  Description of Artificial Sequence: Synthetic oligonucleotide
aacucuaagaaucugugga

SEQ ID NO: 1611544 - RNA, 19 nt, Artificial Sequence
  Description of Artificial Sequence: Synthetic oligonucleotide
uggaggacaauccaguacg

SEQ ID NO: 1611545 - RNA, 19 nt, Artificial Sequence
  Description of Artificial Sequence: Synthetic oligonucleotide
ucuacauucaacagcaugu

SEQ ID NO: 1611546 - RNA, 19 nt, Artificial Sequence
  Description of Artificial Sequence: Synthetic oligonucleotide
agaugauacacauacagca

SEQ ID NO: 1611547 - RNA, 19 nt, Artificial Sequence
  Description of Artificial Sequence: Synthetic oligonucleotide
uaauaugugugaugaaucg

SEQ ID NO: 1611548 - RNA, 19 nt, Artificial Sequence
  Description of Artificial Sequence: Synthetic oligonucleotide
ugaugaucaaaccaauugc

SEQ ID NO: 1611549 - RNA, 19 nt, Artificial Sequence
  Description of Artificial Sequence: Synthetic oligonucleotide
gaagacgaagcuuuaaggc

SEQ ID NO: 1611550 - RNA, 19 nt, Artificial Sequence
  Description of Artificial Sequence: Synthetic oligonucleotide
ugugaugaaucgaagacga

SEQ ID NO: 1611551 - RNA, 19 nt, Artificial Sequence
  Description of Artificial Sequence: Synthetic oligonucleotide
agaauggugccacacagcg

SEQ ID NO: 1611552 - RNA, 19 nt, Artificial Sequence
  Description of Artificial Sequence: Synthetic oligonucleotide
cuugugguaguucauaugc

SEQ ID NO: 1611553 - RNA, 19 nt, Artificial Sequence
  Description of Artificial Sequence: Synthetic oligonucleotide
augccagucauucuggagc

SEQ ID NO: 1611554 - RNA, 19 nt, Artificial Sequence
  Description of Artificial Sequence: Synthetic oligonucleotide
aguaggacugaugacaagc

SEQ ID NO: 1611555 - RNA, 19 nt, Artificial Sequence
  Description of Artificial Sequence: Synthetic oligonucleotide
aaguauuauacagauaagu

SEQ ID NO: 1611556 - RNA, 19 nt, Artificial Sequence
  Description of Artificial Sequence: Synthetic oligonucleotide
gaugaucaaaccaauugcg

SEQ ID NO: 1611557 - RNA, 19 nt, Artificial Sequence
  Description of Artificial Sequence: Synthetic oligonucleotide
uuacagauaaucuucucca

SEQ ID NO: 1611558 - RNA, 19 nt, Artificial Sequence
  Description of Artificial Sequence: Synthetic oligonucleotide
aguauuauacagauaaguc

SEQ ID NO: 1611559 - RNA, 19 nt, Artificial Sequence
  Description of Artificial Sequence: Synthetic oligonucleotide
aucucgaucaugcagcggg

SEQ ID NO: 1611560 - RNA, 19 nt, Artificial Sequence
  Description of Artificial Sequence: Synthetic oligonucleotide
aacaucuuugccuggaacu

SEQ ID NO: 1611561 - RNA, 19 nt, Artificial Sequence
  Description of Artificial Sequence: Synthetic oligonucleotide
ugugugaugaaucgaagac

SEQ ID NO: 1611562 - RNA, 19 nt, Artificial Sequence
  Description of Artificial Sequence: Synthetic oligonucleotide
cacaauucggucauggagg

SEQ ID NO: 1611563 - RNA, 19 nt, Artificial Sequence
  Description of Artificial Sequence: Synthetic oligonucleotide
augauacacauacagcaac

SEQ ID NO: 1611564 - RNA, 19 nt, Artificial Sequence
  Description of Artificial Sequence: Synthetic oligonucleotide
aagucgaagagucggaaug

SEQ ID NO: 1611565 - RNA, 19 nt, Artificial Sequence
  Description of Artificial Sequence: Synthetic oligonucleotide
gaagagucggaauggauag

SEQ ID NO: 1611566 - RNA, 19 nt, Artificial Sequence
  Description of Artificial Sequence: Synthetic oligonucleotide
aagacgaagcuuuaaggca

SEQ ID NO: 1611567 - RNA, 19 nt, Artificial Sequence
  Description of Artificial Sequence: Synthetic oligonucleotide
uuuucguuugagaugguca

SEQ ID NO: 1611568 - RNA, 19 nt, Artificial Sequence
  Description of Artificial Sequence: Synthetic oligonucleotide
uacuucauaugauacagga

SEQ ID NO: 1611569 - RNA, 19 nt, Artificial Sequence
  Description of Artificial Sequence: Synthetic oligonucleotide
acacaagugacaugcaagg

SEQ ID NO: 1611570 - RNA, 19 nt, Artificial Sequence
  Description of Artificial Sequence: Synthetic oligonucleotide
aacccaaggauuguccucc

SEQ ID NO: 1611571 - RNA, 19 nt, Artificial Sequence
  Description of Artificial Sequence: Synthetic oligonucleotide
aaugagugaaagcugccca

SEQ ID NO: 1611572 - RNA, 19 nt, Artificial Sequence
  Description of Artificial Sequence: Synthetic oligonucleotide
ugugcaagugcuaagguau

SEQ ID NO: 1611573 - RNA, 19 nt, Artificial Sequence
  Description of Artificial Sequence: Synthetic oligonucleotide
gaugaaucgaagacgaagc

SEQ ID NO: 1611574 - RNA, 19 nt, Artificial Sequence
  Description of Artificial Sequence: Synthetic oligonucleotide
ucaccaguaaacauguacu

SEQ ID NO: 1611575 - RNA, 19 nt, Artificial Sequence
  Description of Artificial Sequence: Synthetic oligonucleotide
augaguuccacacaaguga

SEQ ID NO: 1611576 - RNA, 19 nt, Artificial Sequence
  Description of Artificial Sequence: Synthetic oligonucleotide
cuauaucaaauacuggaag

SEQ ID NO: 1611577 - RNA, 19 nt, Artificial Sequence
  Description of Artificial Sequence: Synthetic oligonucleotide
ugaugaaucgaagacgaag

SEQ ID NO: 1611578 - RNA, 19 nt, Artificial Sequence
  Description of Artificial Sequence: Synthetic oligonucleotide
ucagcuugcaauaguagga

SEQ ID NO: 1611579 - RNA, 19 nt, Artificial Sequence
  Description of Artificial Sequence: Synthetic oligonucleotide
ucgaaauacagcuucucug

SEQ ID NO: 1611580 - RNA, 19 nt, Artificial Sequence
  Description of Artificial Sequence: Synthetic oligonucleotide
auaugauacaggaagucac

SEQ ID NO: 1611581 - RNA, 19 nt, Artificial Sequence
  Description of Artificial Sequence: Synthetic oligonucleotide
aaggauuguccucccgugc

SEQ ID NO: 1611582 - RNA, 19 nt, Artificial Sequence
  Description of Artificial Sequence: Synthetic oligonucleotide
aguaggaguccucuggaac

SEQ ID NO: 1611583 - RNA, 19 nt, Artificial Sequence
  Description of Artificial Sequence: Synthetic oligonucleotide
ugcaaaguauuauacagau

SEQ ID NO: 1611584 - RNA, 19 nt, Artificial Sequence
  Description of Artificial Sequence: Synthetic oligonucleotide
cacauuuccaaaauagaug

SEQ ID NO: 1611585 - RNA, 19 nt, Artificial Sequence
  Description of Artificial Sequence: Synthetic oligonucleotide
aauucggucauggaggaca

SEQ ID NO: 1611586 - RNA, 19 nt, Artificial Sequence
  Description of Artificial Sequence: Synthetic oligonucleotide
cuaauaugugugaugaauc

SEQ ID NO: 1611587 - RNA, 19 nt, Artificial Sequence
  Description of Artificial Sequence: Synthetic oligonucleotide
agaaacuuuggaaugagug

SEQ ID NO: 1611588 - RNA, 19 nt, Artificial Sequence
  Description of Artificial Sequence: Synthetic oligonucleotide
ucgaagacgaagcuuuaag

SEQ ID NO: 1611589 - RNA, 19 nt, Artificial Sequence
  Description of Artificial Sequence: Synthetic oligonucleotide
aauccaguacgguuccggg

SEQ ID NO: 1611590 - RNA, 19 nt, Artificial Sequence
  Description of Artificial Sequence: Synthetic oligonucleotide
ugucauaaaaugccacacc

SEQ ID NO: 1611591 - RNA, 19 nt, Artificial Sequence
  Description of Artificial Sequence: Synthetic oligonucleotide
agagucggaauggauagcc

SEQ ID NO: 1611592 - RNA, 19 nt, Artificial Sequence
  Description of Artificial Sequence: Synthetic oligonucleotide
aaauagaugggcagauagg

SEQ ID NO: 1611593 - RNA, 19 nt, Artificial Sequence
  Description of Artificial Sequence: Synthetic oligonucleotide
ucauaauagugcaaaguau

SEQ ID NO: 1611594 - RNA, 19 nt, Artificial Sequence
  Description of Artificial Sequence: Synthetic oligonucleotide
ucguaugccagucauucug

SEQ ID NO: 1611595 - RNA, 19 nt, Artificial Sequence
  Description of Artificial Sequence: Synthetic oligonucleotide
uccaguacgguuccgggag

SEQ ID NO: 1611596 - RNA, 19 nt, Artificial Sequence
  Description of Artificial Sequence: Synthetic oligonucleotide
ugacaugcaaggcaugggc

SEQ ID NO: 1611597 - RNA, 19 nt, Artificial Sequence
  Description of Artificial Sequence: Synthetic oligonucleotide
acuggaagcaacucuaaga

SEQ ID NO: 1611598 - RNA, 19 nt, Artificial Sequence
  Description of Artificial Sequence: Synthetic oligonucleotide
uuugagauggucacgguuu

SEQ ID NO: 1611599 - RNA, 19 nt, Artificial Sequence
  Description of Artificial Sequence: Synthetic oligonucleotide
uuccaaaauagaugggcag

SEQ ID NO: 1611600 - RNA, 19 nt, Artificial Sequence
  Description of Artificial Sequence: Synthetic oligonucleotide
augacaagcggugaagucg

SEQ ID NO: 1611601 - RNA, 19 nt, Artificial Sequence
  Description of Artificial Sequence: Synthetic oligonucleotide
uugcuaauaugugugauga

SEQ ID NO: 1611602 - RNA, 19 nt, Artificial Sequence
  Description of Artificial Sequence: Synthetic oligonucleotide
ucguggaauuuauauaagc

SEQ ID NO: 1611603 - RNA, 19 nt, Artificial Sequence
  Description of Artificial Sequence: Synthetic oligonucleotide
ugacuuuucaggacgacau

SEQ ID NO: 1611604 - RNA, 19 nt, Artificial Sequence
  Description of Artificial Sequence: Synthetic oligonucleotide
uucauaugauacaggaagu

SEQ ID NO: 1611605 - RNA, 19 nt, Artificial Sequence
  Description of Artificial Sequence: Synthetic oligonucleotide
caucuugcuaauaugugug

SEQ ID NO: 1611606 - RNA, 19 nt, Artificial Sequence
  Description of Artificial Sequence: Synthetic oligonucleotide
uaugugugaugaaucgaag

SEQ ID NO: 1611607 - RNA, 19 nt, Artificial Sequence
  Description of Artificial Sequence: Synthetic oligonucleotide
aagguauagcugcagcuca

SEQ ID NO: 1611608 - RNA, 19 nt, Artificial Sequence
  Description of Artificial Sequence: Synthetic oligonucleotide
uaauguucucucuuggcac

SEQ ID NO: 1611609 - RNA, 19 nt, Artificial Sequence
  Description of Artificial Sequence: Synthetic oligonucleotide
uucgaaauacagcuucucu

SEQ ID NO: 1611610 - RNA, 19 nt, Artificial Sequence
  Description of Artificial Sequence: Synthetic oligonucleotide
uuucguuugagauggucac

SEQ ID NO: 1611611 - RNA, 19 nt, Artificial Sequence
  Description of Artificial Sequence: Synthetic oligonucleotide
ucguuugagauggucacgg

SEQ ID NO: 1611612 - RNA, 19 nt, Artificial Sequence
  Description of Artificial Sequence: Synthetic oligonucleotide
aguucauaugcuucguaug

SEQ ID NO: 1611613 - RNA, 19 nt, Artificial Sequence
  Description of Artificial Sequence: Synthetic oligonucleotide
ugaguuacugguagagaug

SEQ ID NO: 1611614 - RNA, 19 nt, Artificial Sequence
  Description of Artificial Sequence: Synthetic oligonucleotide
gguccaugaaauuuaagug

SEQ ID NO: 1611615 - RNA, 19 nt, Artificial Sequence
  Description of Artificial Sequence: Synthetic oligonucleotide
ucauggaggacaauccagu

SEQ ID NO: 1611616 - RNA, 19 nt, Artificial Sequence
  Description of Artificial Sequence: Synthetic oligonucleotide
ucaucucggaguaggacug

SEQ ID NO: 1611617 - RNA, 19 nt, Artificial Sequence
  Description of Artificial Sequence: Synthetic oligonucleotide
uagacugaggugcuggaga

SEQ ID NO: 1611618 - RNA, 19 nt, Artificial Sequence
  Description of Artificial Sequence: Synthetic oligonucleotide
aauaugugugaugaaucga

SEQ ID NO: 1611619 - RNA, 19 nt, Artificial Sequence
  Description of Artificial Sequence: Synthetic oligonucleotide
caaguuuucguuugagaug

SEQ ID NO: 1611620 - RNA, 19 nt, Artificial Sequence
  Description of Artificial Sequence: Synthetic oligonucleotide
aauuuaagugugugcugca

SEQ ID NO: 1611621 - RNA, 19 nt, Artificial Sequence
  Description of Artificial Sequence: Synthetic oligonucleotide
cuggucuacauucaacagc

SEQ ID NO: 1611622 - RNA, 19 nt, Artificial Sequence
  Description of Artificial Sequence: Synthetic oligonucleotide
gaauggauagccaacccac

SEQ ID NO: 1611623 - RNA, 19 nt, Artificial Sequence
  Description of Artificial Sequence: Synthetic oligonucleotide
uuucaggacgacauuuaga

SEQ ID NO: 1611624 - RNA, 19 nt, Artificial Sequence
  Description of Artificial Sequence: Synthetic oligonucleotide
auaucaaauacuggaagga

SEQ ID NO: 1611625 - RNA, 19 nt, Artificial Sequence
  Description of Artificial Sequence: Synthetic oligonucleotide
cuugcuaauaugugugaug

SEQ ID NO: 1611626 - RNA, 19 nt, Artificial Sequence
  Description of Artificial Sequence: Synthetic oligonucleotide
guaaacauguacuucauau

SEQ ID NO: 1611627 - RNA, 19 nt, Artificial Sequence
  Description of Artificial Sequence: Synthetic oligonucleotide
auaagucacuggucggucg

SEQ ID NO: 1611628 - RNA, 19 nt, Artificial Sequence
  Description of Artificial Sequence: Synthetic oligonucleotide
aaauacagcuucucuggau

SEQ ID NO: 1611629 - RNA, 19 nt, Artificial Sequence
  Description of Artificial Sequence: Synthetic oligonucleotide
caagggcugacuuuucagg

SEQ ID NO: 1611630 - RNA, 19 nt, Artificial Sequence
  Description of Artificial Sequence: Synthetic oligonucleotide
auggauagccaacccacuc

SEQ ID NO: 1611631 - RNA, 19 nt, Artificial Sequence
  Description of Artificial Sequence: Synthetic oligonucleotide
acagauaaucuucuccacu

SEQ ID NO: 1611632 - RNA, 19 nt, Artificial Sequence
  Description of Artificial Sequence: Synthetic oligonucleotide
ucuaagaaucuguggauua

SEQ ID NO: 1611633 - RNA, 19 nt, Artificial Sequence
  Description of Artificial Sequence: Synthetic oligonucleotide
cauagcaugcuucagggga

SEQ ID NO: 1611634 - RNA, 19 nt, Artificial Sequence
  Description of Artificial Sequence: Synthetic oligonucleotide
cacagguuugggaagggcc

SEQ ID NO: 1611635 - RNA, 19 nt, Artificial Sequence
  Description of Artificial Sequence: Synthetic oligonucleotide
ugacaagcggugaagucga

SEQ ID NO: 1611636 - RNA, 19 nt, Artificial Sequence
  Description of Artificial Sequence: Synthetic oligonucleotide
uggauagccaacccacuca

SEQ ID NO: 1611637 - RNA, 19 nt, Artificial Sequence
  Description of Artificial Sequence: Synthetic oligonucleotide
caacucuaagaaucugugg

SEQ ID NO: 1611638 - RNA, 19 nt, Artificial Sequence
  Description of Artificial Sequence: Synthetic oligonucleotide
cuugcaauaguaggagucc

SEQ ID NO: 1611639 - RNA, 19 nt, Artificial Sequence
  Description of Artificial Sequence: Synthetic oligonucleotide
gucuacauucaacagcaug

SEQ ID NO: 1611640 - RNA, 19 nt, Artificial Sequence
  Description of Artificial Sequence: Synthetic oligonucleotide
uacauucaacagcauguca

SEQ ID NO: 1611641 - RNA, 19 nt, Artificial Sequence
  Description of Artificial Sequence: Synthetic oligonucleotide
aagcggugaagucgaagag

SEQ ID NO: 1611642 - RNA, 19 nt, Artificial Sequence
  Description of Artificial Sequence: Synthetic oligonucleotide
gugugaugaaucgaagacg

SEQ ID NO: 1611643 - RNA, 19 nt, Artificial Sequence
  Description of Artificial Sequence: Synthetic oligonucleotide
acuggucuacauucaacag

SEQ ID NO: 1611644 - RNA, 19 nt, Artificial Sequence
  Description of Artificial Sequence: Synthetic oligonucleotide
uaguucauaugcuucguau

SEQ ID NO: 1611645 - RNA, 19 nt, Artificial Sequence
  Description of Artificial Sequence: Synthetic oligonucleotide
aaucagcuugcaauaguag

SEQ ID NO: 1611646 - RNA, 19 nt, Artificial Sequence
  Description of Artificial Sequence: Synthetic oligonucleotide
uccaaaauagaugggcaga

SEQ ID NO: 1611647 - RNA, 19 nt, Artificial Sequence
  Description of Artificial Sequence: Synthetic oligonucleotide
ucggucguggaauuuauau

SEQ ID NO: 1611648 - RNA, 19 nt, Artificial Sequence
  Description of Artificial Sequence: Synthetic oligonucleotide
uaugccagucauucuggag

SEQ ID NO: 1611649 - RNA, 19 nt, Artificial Sequence
  Description of Artificial Sequence: Synthetic oligonucleotide
augugugaugaaucgaaga

SEQ ID NO: 1611650 - RNA, 19 nt, Artificial Sequence
  Description of Artificial Sequence: Synthetic oligonucleotide
ggugaagucgaagagucgg

SEQ ID NO: 1611651 - RNA, 19 nt, Artificial Sequence
  Description of Artificial Sequence: Synthetic oligonucleotide
ggauuacuauaucaaauac

SEQ ID NO: 1611652 - RNA, 19 nt, Artificial Sequence
  Description of Artificial Sequence: Synthetic oligonucleotide
ucgaucaugcagcgggucc

SEQ ID NO: 1611653 - RNA, 19 nt, Artificial Sequence
  Description of Artificial Sequence: Synthetic oligonucleotide
aagagucggaauggauagc

SEQ ID NO: 1611654 - RNA, 19 nt, Artificial Sequence
  Description of Artificial Sequence: Synthetic oligonucleotide
ggaagcaacucuaagaauc

SEQ ID NO: 1611655 - RNA, 19 nt, Artificial Sequence
  Description of Artificial Sequence: Synthetic oligonucleotide
aaccaauugcguucaucca

SEQ ID NO: 1611656 - RNA, 19 nt, Artificial Sequence
  Description of Artificial Sequence: Synthetic oligonucleotide
gacaauccaguacgguucc

SEQ ID NO: 1611657 - RNA, 19 nt, Artificial Sequence
  Description of Artificial Sequence: Synthetic oligonucleotide
gaguagacugaggugcugg

SEQ ID NO: 1611658 - RNA, 19 nt, Artificial Sequence
  Description of Artificial Sequence: Synthetic oligonucleotide
ucauaugauacaggaaguc

SEQ ID NO: 1611659 - RNA, 19 nt, Artificial Sequence
  Description of Artificial Sequence: Synthetic oligonucleotide
uacuggaaggaaccggaga

SEQ ID NO: 1611660 - RNA, 19 nt, Artificial Sequence
  Description of Artificial Sequence: Synthetic oligonucleotide
aauugcguucauccaugcu

SEQ ID NO: 1611661 - RNA, 19 nt, Artificial Sequence
  Description of Artificial Sequence: Synthetic oligonucleotide
agacgaagcuuuaaggcag

SEQ ID NO: 1611662 - RNA, 19 nt, Artificial Sequence
  Description of Artificial Sequence: Synthetic oligonucleotide
acacauuuccaaaauagau

SEQ ID NO: 1611663 - RNA, 19 nt, Artificial Sequence
  Description of Artificial Sequence: Synthetic oligonucleotide
gaagcuuuaaggcaggcuu

SEQ ID NO: 1611664 - RNA, 19 nt, Artificial Sequence
  Description of Artificial Sequence: Synthetic oligonucleotide
accaauugcguucauccau

SEQ ID NO: 1611665 - RNA, 19 nt, Artificial Sequence
  Description of Artificial Sequence: Synthetic oligonucleotide
auaguaggaguccucugga

SEQ ID NO: 1611666 - RNA, 19 nt, Artificial Sequence
  Description of Artificial Sequence: Synthetic oligonucleotide
gacaaguuuucguuugaga

SEQ ID NO: 1611667 - RNA, 19 nt, Artificial Sequence
  Description of Artificial Sequence: Synthetic oligonucleotide
uaagguauagcugcagcuc

SEQ ID NO: 1611668 - RNA, 19 nt, Artificial Sequence
  Description of Artificial Sequence: Synthetic oligonucleotide
cccaaugcuagaauggugc

SEQ ID NO: 1611669 - RNA, 19 nt, Artificial Sequence
  Description of Artificial Sequence: Synthetic oligonucleotide
uacagauaaucuucuccac

SEQ ID NO: 1611670 - RNA, 19 nt, Artificial Sequence
  Description of Artificial Sequence: Synthetic oligonucleotide
cagauaagucacuggucgg

SEQ ID NO: 1611671 - RNA, 19 nt, Artificial Sequence
  Description of Artificial Sequence: Synthetic oligonucleotide
gacauuuagaagggcauuc

SEQ ID NO: 1611672 - RNA, 19 nt, Artificial Sequence
  Description of Artificial Sequence: Synthetic oligonucleotide
uccuguuggaaucuuugua

SEQ ID NO: 1611673 - RNA, 19 nt, Artificial Sequence
  Description of Artificial Sequence: Synthetic oligonucleotide
agucgaagagucggaaugg

SEQ ID NO: 1611674 - RNA, 19 nt, Artificial Sequence
  Description of Artificial Sequence: Synthetic oligonucleotide
ugaaagcugcccaaugcua

SEQ ID NO: 1611675 - RNA, 19 nt, Artificial Sequence
  Description of Artificial Sequence: Synthetic oligonucleotide
ucggaauggauagccaacc

SEQ ID NO: 1611676 - RNA, 19 nt, Artificial Sequence
  Description of Artificial Sequence: Synthetic oligonucleotide
uaagucacuggucggucgu

SEQ ID NO: 1611677 - RNA, 19 nt, Artificial Sequence
  Description of Artificial Sequence: Synthetic oligonucleotide
uggauacuucuugugguag

SEQ ID NO: 1611678 - RNA, 19 nt, Artificial Sequence
  Description of Artificial Sequence: Synthetic oligonucleotide
aagugcuaagguauagcug

SEQ ID NO: 1611679 - RNA, 19 nt, Artificial Sequence
  Description of Artificial Sequence: Synthetic oligonucleotide
cucggaguaggacugauga

SEQ ID NO: 1611680 - RNA, 19 nt, Artificial Sequence
  Description of Artificial Sequence: Synthetic oligonucleotide
augaaucgaagacgaagcu

SEQ ID NO: 1611681 - RNA, 19 nt, Artificial Sequence
  Description of Artificial Sequence: Synthetic oligonucleotide
ugccagucauucuggagcc

SEQ ID NO: 1611682 - RNA, 19 nt, Artificial Sequence
  Description of Artificial Sequence: Synthetic oligonucleotide
acaauucggucauggagga

SEQ ID NO: 1611683 - RNA, 19 nt, Artificial Sequence
  Description of Artificial Sequence: Synthetic oligonucleotide
gaugacaagcggugaaguc

SEQ ID NO: 1611684 - RNA, 19 nt, Artificial Sequence
  Description of Artificial Sequence: Synthetic oligonucleotide
agaaucuguggauuacuau

SEQ ID NO: 1611685 - RNA, 19 nt, Artificial Sequence
  Description of Artificial Sequence: Synthetic oligonucleotide
uggggaacucauugaaucu

SEQ ID NO: 1611686 - RNA, 19 nt, Artificial Sequence
  Description of Artificial Sequence: Synthetic oligonucleotide
caagcggugaagucgaaga

SEQ ID NO: 1611687 - RNA, 19 nt, Artificial Sequence
  Description of Artificial Sequence: Synthetic oligonucleotide
acucuaagaaucuguggau

SEQ ID NO: 1611688 - RNA, 19 nt, Artificial Sequence
  Description of Artificial Sequence: Synthetic oligonucleotide
auaugugugaugaaucgaa

SEQ ID NO: 1611689 - RNA, 19 nt, Artificial Sequence
  Description of Artificial Sequence: Synthetic oligonucleotide
uugugguaguucauaugcu

SEQ ID NO: 1611690 - RNA, 19 nt, Artificial Sequence
  Description of Artificial Sequence: Synthetic oligonucleotide
ucauccaugcuguaauguu

SEQ ID NO: 1611691 - RNA, 19 nt, Artificial Sequence
  Description of Artificial Sequence: Synthetic oligonucleotide
uccucccgugcauucauag

SEQ ID NO: 1611692 - RNA, 19 nt, Artificial Sequence
  Description of Artificial Sequence: Synthetic oligonucleotide
agggucgaccuguucugcc

SEQ ID NO: 1611693 - RNA, 19 nt, Artificial Sequence
  Description of Artificial Sequence: Synthetic oligonucleotide
auagcaugcuucaggggac

SEQ ID NO: 1611694 - RNA, 19 nt, Artificial Sequence
  Description of Artificial Sequence: Synthetic oligonucleotide
uucguuugagauggucacg

SEQ ID NO: 1611695 - RNA, 19 nt, Artificial Sequence
  Description of Artificial Sequence: Synthetic oligonucleotide
aacccacucagucucugau

SEQ ID NO: 1611696 - RNA, 19 nt, Artificial Sequence
  Description of Artificial Sequence: Synthetic oligonucleotide
agucggaauggauagccaa

SEQ ID NO: 1611697 - RNA, 19 nt, Artificial Sequence
  Description of Artificial Sequence: Synthetic oligonucleotide
cauaugauacaggaaguca

SEQ ID NO: 1611698 - RNA, 19 nt, Artificial Sequence
  Description of Artificial Sequence: Synthetic oligonucleotide
uacgguuccgggagggcag

SEQ ID NO: 1611699 - RNA, 19 nt, Artificial Sequence
  Description of Artificial Sequence: Synthetic oligonucleotide
auaugcuucguaugccagu

SEQ ID NO: 1611700 - RNA, 19 nt, Artificial Sequence
  Description of Artificial Sequence: Synthetic oligonucleotide
ugcuucguaugccagucau

SEQ ID NO: 1611701 - RNA, 19 nt, Artificial Sequence
  Description of Artificial Sequence: Synthetic oligonucleotide
cuaagaaucuguggauuac

SEQ ID NO: 1611702 - RNA, 19 nt, Artificial Sequence
  Description of Artificial Sequence: Synthetic oligonucleotide
ugcuguaauguucucucuu

SEQ ID NO: 1611703 - RNA, 19 nt, Artificial Sequence
  Description of Artificial Sequence: Synthetic oligonucleotide
acugaugacaagcggugaa

SEQ ID NO: 1611704 - RNA, 19 nt, Artificial Sequence
  Description of Artificial Sequence: Synthetic oligonucleotide
aggauuguccucccgugca

SEQ ID NO: 1611705 - RNA, 19 nt, Artificial Sequence
  Description of Artificial Sequence: Synthetic oligonucleotide
ugcaagugcuaagguauag

SEQ ID NO: 1611706 - RNA, 19 nt, Artificial Sequence
  Description of Artificial Sequence: Synthetic oligonucleotide
ugcaauaguaggaguccuc

SEQ ID NO: 1611707 - RNA, 19 nt, Artificial Sequence
  Description of Artificial Sequence: Synthetic oligonucleotide
ucggucauggaggacaauc

SEQ ID NO: 1611708 - RNA, 19 nt, Artificial Sequence
  Description of Artificial Sequence: Synthetic oligonucleotide
uccagugauuuggacacug

SEQ ID NO: 1611709 - RNA, 19 nt, Artificial Sequence
  Description of Artificial Sequence: Synthetic oligonucleotide
ugaugacaagcggugaagu

SEQ ID NO: 1611710 - RNA, 19 nt, Artificial Sequence
  Description of Artificial Sequence: Synthetic oligonucleotide
caaggauuguccucccgug

SEQ ID NO: 1611711 - RNA, 19 nt, Artificial Sequence
  Description of Artificial Sequence: Synthetic oligonucleotide
caauccaguacgguuccgg

SEQ ID NO: 1611712 - RNA, 19 nt, Artificial Sequence
  Description of Artificial Sequence: Synthetic oligonucleotide
cacuguugagggcuugggg

SEQ ID NO: 1611713 - RNA, 19 nt, Artificial Sequence
  Description of Artificial Sequence: Synthetic oligonucleotide
agcaacucuaagaaucugu

SEQ ID NO: 1611714 - RNA, 19 nt, Artificial Sequence
  Description of Artificial Sequence: Synthetic oligonucleotide
cucccgugcauucauagca

SEQ ID NO: 1611715 - RNA, 19 nt, Artificial Sequence
  Description of Artificial Sequence: Synthetic oligonucleotide
ugaaucgaagacgaagcuu

SEQ ID NO: 1611716 - RNA, 19 nt, Artificial Sequence
  Description of Artificial Sequence: Synthetic oligonucleotide
aggacugaugacaagcggu

SEQ ID NO: 1611717 - RNA, 19 nt, Artificial Sequence
  Description of Artificial Sequence: Synthetic oligonucleotide
caugcagcggguccucucc

SEQ ID NO: 1611718 - RNA, 19 nt, Artificial Sequence
  Description of Artificial Sequence: Synthetic oligonucleotide
gcuguaauguucucucuug

SEQ ID NO: 1611719 - RNA, 19 nt, Artificial Sequence
  Description of Artificial Sequence: Synthetic oligonucleotide
augaucaaaccaauugcgu

SEQ ID NO: 1611720 - RNA, 19 nt, Artificial Sequence
  Description of Artificial Sequence: Synthetic oligonucleotide
auaauagugcaaaguauua

SEQ ID NO: 1611721 - RNA, 19 nt, Artificial Sequence
  Description of Artificial Sequence: Synthetic oligonucleotide
uugagauggucacgguuuc

SEQ ID NO: 1611722 - RNA, 19 nt, Artificial Sequence
  Description of Artificial Sequence: Synthetic oligonucleotide
gcugcacuggucuacauuc

SEQ ID NO: 1611723 - RNA, 19 nt, Artificial Sequence
  Description of Artificial Sequence: Synthetic oligonucleotide
aggaaccggagacacacau

SEQ ID NO: 1611724 - RNA, 19 nt, Artificial Sequence
  Description of Artificial Sequence: Synthetic oligonucleotide
gaaccggagacacacauuu

SEQ ID NO: 1611725 - RNA, 19 nt, Artificial Sequence
  Description of Artificial Sequence: Synthetic oligonucleotide
ggcuucacugaguuacugg

SEQ ID NO: 1611726 - RNA, 19 nt, Artificial Sequence
  Description of Artificial Sequence: Synthetic oligonucleotide
auggugucuaccagucggc

SEQ ID NO: 1611727 - RNA, 19 nt, Artificial Sequence
  Description of Artificial Sequence: Synthetic oligonucleotide
uagccaacccacucagucu

SEQ ID NO: 1611728 - RNA, 19 nt, Artificial Sequence
  Description of Artificial Sequence: Synthetic oligonucleotide
ggauagccaacccacucag

SEQ ID NO: 1611729 - RNA, 19 nt, Artificial Sequence
  Description of Artificial Sequence: Synthetic oligonucleotide
gaaucgaagacgaagcuuu

SEQ ID NO: 1611730 - RNA, 19 nt, Artificial Sequence
  Description of Artificial Sequence: Synthetic oligonucleotide
ucuugcuaauaugugugau

SEQ ID NO: 1611731 - RNA, 19 nt, Artificial Sequence
  Description of Artificial Sequence: Synthetic oligonucleotide
ucucggaguaggacugaug

SEQ ID NO: 1611732 - RNA, 19 nt, Artificial Sequence
  Description of Artificial Sequence: Synthetic oligonucleotide
uguugagggcuuggggagg

SEQ ID NO: 1611733 - RNA, 19 nt, Artificial Sequence
  Description of Artificial Sequence: Synthetic oligonucleotide
aagaaucuguggauuacua

SEQ ID NO: 1611734 - RNA, 19 nt, Artificial Sequence
  Description of Artificial Sequence: Synthetic oligonucleotide
caauaguaggaguccucug

SEQ ID NO: 1611735 - RNA, 19 nt, Artificial Sequence
  Description of Artificial Sequence: Synthetic oligonucleotide
caauugcguucauccaugc

SEQ ID NO: 1611736 - RNA, 19 nt, Artificial Sequence
  Description of Artificial Sequence: Synthetic oligonucleotide
gcuaagguauagcugcagc

SEQ ID NO: 1611737 - RNA, 19 nt, Artificial Sequence
  Description of Artificial Sequence: Synthetic oligonucleotide
gacgaagcuuuaaggcagg

SEQ ID NO: 1611738 - RNA, 19 nt, Artificial Sequence
  Description of Artificial Sequence: Synthetic oligonucleotide
ucgaagagucggaauggau

SEQ ID NO: 1611739 - RNA, 19 nt, Artificial Sequence
  Description of Artificial Sequence: Synthetic oligonucleotide
aagcaacucuaagaaucug

SEQ ID NO: 1611740 - RNA, 19 nt, Artificial Sequence
  Description of Artificial Sequence: Synthetic oligonucleotide
gacuggauuggcaccggag

SEQ ID NO: 1611741 - RNA, 19 nt, Artificial Sequence
  Description of Artificial Sequence: Synthetic oligonucleotide
ugcuaagguauagcugcag

SEQ ID NO: 1611742 - RNA, 19 nt, Artificial Sequence
  Description of Artificial Sequence: Synthetic oligonucleotide
cagcuugcaauaguaggag

SEQ ID NO: 1611743 - RNA, 19 nt, Artificial Sequence
  Description of Artificial Sequence: Synthetic oligonucleotide
caaucagcuugcaauagua

SEQ ID NO: 1611744 - RNA, 19 nt, Artificial Sequence
  Description of Artificial Sequence: Synthetic oligonucleotide
cagcucaucucggaguagg

SEQ ID NO: 1611745 - RNA, 19 nt, Artificial Sequence
  Description of Artificial Sequence: Synthetic oligonucleotide
ugaagucgaagagucggaa

SEQ ID NO: 1611746 - RNA, 19 nt, Artificial Sequence
  Description of Artificial Sequence: Synthetic oligonucleotide
cacuggaagcaacucuaag

SEQ ID NO: 1611747 - RNA, 19 nt, Artificial Sequence
  Description of Artificial Sequence: Synthetic oligonucleotide
ggaauggauagccaaccca

SEQ ID NO: 1611748 - RNA, 19 nt, Artificial Sequence
  Description of Artificial Sequence: Synthetic oligonucleotide
uugcaauaguaggaguccu

SEQ ID NO: 1611749 - RNA, 19 nt, Artificial Sequence
  Description of Artificial Sequence: Synthetic oligonucleotide
agccauggugucuaccagu

SEQ ID NO: 1611750 - RNA, 19 nt, Artificial Sequence
  Description of Artificial Sequence: Synthetic oligonucleotide
aagggucuccagugauuug

SEQ ID NO: 1611751 - RNA, 19 nt, Artificial Sequence
  Description of Artificial Sequence: Synthetic oligonucleotide
cuaagguauagcugcagcu

SEQ ID NO: 1611752 - RNA, 19 nt, Artificial Sequence
  Description of Artificial Sequence: Synthetic oligonucleotide
ugcccaaugcuagaauggu

SEQ ID NO: 1611753 - RNA, 19 nt, Artificial Sequence
  Description of Artificial Sequence: Synthetic oligonucleotide
agcuugcaauaguaggagu

SEQ ID NO: 1611754 - RNA, 19 nt, Artificial Sequence
  Description of Artificial Sequence: Synthetic oligonucleotide
agcgugugcaagugcuaag

SEQ ID NO: 1611755 - RNA, 19 nt, Artificial Sequence
  Description of Artificial Sequence: Synthetic oligonucleotide
ucggaguaggacugaugac

SEQ ID NO: 1611756 - RNA, 19 nt, Artificial Sequence
  Description of Artificial Sequence: Synthetic oligonucleotide
gcugaugacacucacaauu

SEQ ID NO: 1611757 - RNA, 19 nt, Artificial Sequence
  Description of Artificial Sequence: Synthetic oligonucleotide
aguacgguuccgggagggc

SEQ ID NO: 1611758 - RNA, 19 nt, Artificial Sequence
  Description of Artificial Sequence: Synthetic oligonucleotide
gugcaaaguauuauacaga

SEQ ID NO: 1611759 - RNA, 19 nt, Artificial Sequence
  Description of Artificial Sequence: Synthetic oligonucleotide
acccaaggauuguccuccc

SEQ ID NO: 1611760 - RNA, 19 nt, Artificial Sequence
  Description of Artificial Sequence: Synthetic oligonucleotide
cuucacaaaaucacuuacu

SEQ ID NO: 1611761 - RNA, 19 nt, Artificial Sequence
  Description of Artificial Sequence: Synthetic oligonucleotide
ggggacaaguuuucguuug

SEQ ID NO: 1611762 - RNA, 19 nt, Artificial Sequence
  Description of Artificial Sequence: Synthetic oligonucleotide
acgaagcuuuaaggcaggc

SEQ ID NO: 1611763 - RNA, 19 nt, Artificial Sequence
  Description of Artificial Sequence: Synthetic oligonucleotide
gugguaguucauaugcuuc

SEQ ID NO: 1611764 - RNA, 19 nt, Artificial Sequence
  Description of Artificial Sequence: Synthetic oligonucleotide
gugucuaccagucggccaa

SEQ ID NO: 1611765 - RNA, 19 nt, Artificial Sequence
  Description of Artificial Sequence: Synthetic oligonucleotide
auccaguacgguuccggga

SEQ ID NO: 1611766 - RNA, 19 nt, Artificial Sequence
  Description of Artificial Sequence: Synthetic oligonucleotide
ucucgaucaugcagcgggu

SEQ ID NO: 1611767 - RNA, 19 nt, Artificial Sequence
  Description of Artificial Sequence: Synthetic oligonucleotide
uccacacaagugacaugca

SEQ ID NO: 1611768 - RNA, 19 nt, Artificial Sequence
  Description of Artificial Sequence: Synthetic oligonucleotide
uaguaggaguccucuggaa

SEQ ID NO: 1611769 - RNA, 19 nt, Artificial Sequence
  Description of Artificial Sequence: Synthetic oligonucleotide
acaagcggugaagucgaag

SEQ ID NO: 1611770 - RNA, 19 nt, Artificial Sequence
  Description of Artificial Sequence: Synthetic oligonucleotide
ugcuaauaugugugaugaa

SEQ ID NO: 1611771 - RNA, 19 nt, Artificial Sequence
  Description of Artificial Sequence: Synthetic oligonucleotide
aaccggagacacacauuuc

SEQ ID NO: 1611772 - RNA, 19 nt, Artificial Sequence
  Description of Artificial Sequence: Synthetic oligonucleotide
cagugagaaacuuuggaau

SEQ ID NO: 1611773 - RNA, 19 nt, Artificial Sequence
  Description of Artificial Sequence: Synthetic oligonucleotide
agcggugaagucgaagagu

SEQ ID NO: 1611774 - RNA, 19 nt, Artificial Sequence
  Description of Artificial Sequence: Synthetic oligonucleotide
gccuucgaaauacagcuuc

SEQ ID NO: 1611775 - RNA, 19 nt, Artificial Sequence
  Description of Artificial Sequence: Synthetic oligonucleotide
uggauuggcaccggagggu

SEQ ID NO: 1611776 - RNA, 19 nt, Artificial Sequence
  Description of Artificial Sequence: Synthetic oligonucleotide
ucacuggucggucguggaa

SEQ ID NO: 1611777 - RNA, 19 nt, Artificial Sequence
  Description of Artificial Sequence: Synthetic oligonucleotide
cuggagagccacuguugag

SEQ ID NO: 1611778 - RNA, 19 nt, Artificial Sequence
  Description of Artificial Sequence: Synthetic oligonucleotide
cacaccaaucucgaucaug

SEQ ID NO: 1611779 - RNA, 19 nt, Artificial Sequence
  Description of Artificial Sequence: Synthetic oligonucleotide
guuuucguuugagaugguc

SEQ ID NO: 1611780 - RNA, 19 nt, Artificial Sequence
  Description of Artificial Sequence: Synthetic oligonucleotide
acgacauuuagaagggcau

SEQ ID NO: 1611781 - RNA, 19 nt, Artificial Sequence
  Description of Artificial Sequence: Synthetic oligonucleotide
gugaaagcugcccaaugcu

SEQ ID NO: 1611782 - RNA, 19 nt, Artificial Sequence
  Description of Artificial Sequence: Synthetic oligonucleotide
augcuguaauguucucucu

SEQ ID NO: 1611783 - RNA, 19 nt, Artificial Sequence
  Description of Artificial Sequence: Synthetic oligonucleotide
ccaauugcguucauccaug

SEQ ID NO: 1611784 - RNA, 19 nt, Artificial Sequence
  Description of Artificial Sequence: Synthetic oligonucleotide
ucgaccuguucugccaggc

SEQ ID NO: 1611785 - RNA, 19 nt, Artificial Sequence
  Description of Artificial Sequence: Synthetic oligonucleotide
auaaucuucuccacuuguu

SEQ ID NO: 1611786 - RNA, 19 nt, Artificial Sequence
  Description of Artificial Sequence: Synthetic oligonucleotide
gcuugcaauaguaggaguc

SEQ ID NO: 1611787 - RNA, 19 nt, Artificial Sequence
  Description of Artificial Sequence: Synthetic oligonucleotide
uggugucuaccagucggcc

SEQ ID NO: 1611788 - RNA, 19 nt, Artificial Sequence
  Description of Artificial Sequence: Synthetic oligonucleotide
ucggccaaucagcuugcaa

SEQ ID NO: 1611789 - RNA, 19 nt, Artificial Sequence
  Description of Artificial Sequence: Synthetic oligonucleotide
agucggccaaucagcuugc

SEQ ID NO: 1611790 - RNA, 19 nt, Artificial Sequence
  Description of Artificial Sequence: Synthetic oligonucleotide
gauuggcaccggagggucg

SEQ ID NO: 1611791 - RNA, 19 nt, Artificial Sequence
  Description of Artificial Sequence: Synthetic oligonucleotide
ggacugaugacaagcggug

SEQ ID NO: 1611792 - RNA, 19 nt, Artificial Sequence
  Description of Artificial Sequence: Synthetic oligonucleotide
gguuggggaacucauugaa

SEQ ID NO: 1611793 - RNA, 19 nt, Artificial Sequence
  Description of Artificial Sequence: Synthetic oligonucleotide
ccaaugcuagaauggugcc

SEQ ID NO: 1611794 - RNA, 19 nt, Artificial Sequence
  Description of Artificial Sequence: Synthetic oligonucleotide
ggagggucgaccuguucug

SEQ ID NO: 1611795 - RNA, 19 nt, Artificial Sequence
  Description of Artificial Sequence: Synthetic oligonucleotide
ggucauggaggacaaucca

SEQ ID NO: 1611796 - RNA, 19 nt, Artificial Sequence
  Description of Artificial Sequence: Synthetic oligonucleotide
guauagcugcagcucaucu

SEQ ID NO: 1611797 - RNA, 19 nt, Artificial Sequence
  Description of Artificial Sequence: Synthetic oligonucleotide
gucgaccuguucugccagg

SEQ ID NO: 1611798 - RNA, 19 nt, Artificial Sequence
  Description of Artificial Sequence: Synthetic oligonucleotide
aagucacuggucggucgug

SEQ ID NO: 1611799 - RNA, 19 nt, Artificial Sequence
  Description of Artificial Sequence: Synthetic oligonucleotide
gaagucgaagagucggaau

SEQ ID NO: 1611800 - RNA, 19 nt, Artificial Sequence
  Description of Artificial Sequence: Synthetic oligonucleotide
guaguucauaugcuucgua

SEQ ID NO: 1611801 - RNA, 19 nt, Artificial Sequence
  Description of Artificial Sequence: Synthetic oligonucleotide
auuggcaccggagggucga

SEQ ID NO: 1611802 - RNA, 19 nt, Artificial Sequence
  Description of Artificial Sequence: Synthetic oligonucleotide
ggacaaguuuucguuugag

SEQ ID NO: 1611803 - RNA, 19 nt, Artificial Sequence
  Description of Artificial Sequence: Synthetic oligonucleotide
caguacgguuccgggaggg

SEQ ID NO: 1611804 - RNA, 19 nt, Artificial Sequence
  Description of Artificial Sequence: Synthetic oligonucleotide
guaugccagucauucugga

SEQ ID NO: 1611805 - RNA, 19 nt, Artificial Sequence
  Description of Artificial Sequence: Synthetic oligonucleotide
ugagauggucacgguuucu

SEQ ID NO: 1611806 - RNA, 19 nt, Artificial Sequence
  Description of Artificial Sequence: Synthetic oligonucleotide
ccgugcauucauagcaugc

SEQ ID NO: 1611807 - RNA, 19 nt, Artificial Sequence
  Description of Artificial Sequence: Synthetic oligonucleotide
gcuaauaugugugaugaau

SEQ ID NO: 1611808 - RNA, 19 nt, Artificial Sequence
  Description of Artificial Sequence: Synthetic oligonucleotide
caugcuucaggggacaagu

SEQ ID NO: 1611809 - RNA, 19 nt, Artificial Sequence
  Description of Artificial Sequence: Synthetic oligonucleotide
ccagugauuuggacacugg

SEQ ID NO: 1611810 - RNA, 19 nt, Artificial Sequence
  Description of Artificial Sequence: Synthetic oligonucleotide
cggcccuacaagaugauac

SEQ ID NO: 1611811 - RNA, 19 nt, Artificial Sequence
  Description of Artificial Sequence: Synthetic oligonucleotide
caaugcuagaauggugcca

SEQ ID NO: 1611812 - RNA, 19 nt, Artificial Sequence
  Description of Artificial Sequence: Synthetic oligonucleotide
gcaugucauaaaaugccac

SEQ ID NO: 1611813 - RNA, 19 nt, Artificial Sequence
  Description of Artificial Sequence: Synthetic oligonucleotide
ggaggacaauccaguacgg

SEQ ID NO: 1611814 - RNA, 19 nt, Artificial Sequence
  Description of Artificial Sequence: Synthetic oligonucleotide
guuugagauggucacgguu

SEQ ID NO: 1611815 - RNA, 19 nt, Artificial Sequence
  Description of Artificial Sequence: Synthetic oligonucleotide
uggucggucguggaauuua

SEQ ID NO: 1611816 - RNA, 19 nt, Artificial Sequence
  Description of Artificial Sequence: Synthetic oligonucleotide
aucgaagacgaagcuuuaa

SEQ ID NO: 1611817 - RNA, 19 nt, Artificial Sequence
  Description of Artificial Sequence: Synthetic oligonucleotide
ucaaaccaauugcguucau

SEQ ID NO: 1611818 - RNA, 19 nt, Artificial Sequence
  Description of Artificial Sequence: Synthetic oligonucleotide
augcuggcaccugaguaga

SEQ ID NO: 1611819 - RNA, 19 nt, Artificial Sequence
  Description of Artificial Sequence: Synthetic oligonucleotide
gagggucgaccuguucugc

SEQ ID NO: 1611820 - RNA, 19 nt, Artificial Sequence
  Description of Artificial Sequence: Synthetic oligonucleotide
ccaggccuucgaaauacag

SEQ ID NO: 1611821 - RNA, 19 nt, Artificial Sequence
  Description of Artificial Sequence: Synthetic oligonucleotide
ggcccuacaagaugauaca

SEQ ID NO: 1611822 - RNA, 19 nt, Artificial Sequence
  Description of Artificial Sequence: Synthetic oligonucleotide
gcggugaagucgaagaguc

SEQ ID NO: 1611823 - RNA, 19 nt, Artificial Sequence
  Description of Artificial Sequence: Synthetic oligonucleotide
gaagggucuccagugauuu

SEQ ID NO: 1611824 - RNA, 19 nt, Artificial Sequence
  Description of Artificial Sequence: Synthetic oligonucleotide
augcuucguaugccaguca

SEQ ID NO: 1611825 - RNA, 19 nt, Artificial Sequence
  Description of Artificial Sequence: Synthetic oligonucleotide
cggucauggaggacaaucc

SEQ ID NO: 1611826 - RNA, 19 nt, Artificial Sequence
  Description of Artificial Sequence: Synthetic oligonucleotide
ggugucuaccagucggcca

SEQ ID NO: 1611827 - RNA, 19 nt, Artificial Sequence
  Description of Artificial Sequence: Synthetic oligonucleotide
guacgguuccgggagggca

SEQ ID NO: 1611828 - RNA, 19 nt, Artificial Sequence
  Description of Artificial Sequence: Synthetic oligonucleotide
aaggaaccggagacacaca

SEQ ID NO: 1611829 - RNA, 19 nt, Artificial Sequence
  Description of Artificial Sequence: Synthetic oligonucleotide
gagucggaauggauagcca

SEQ ID NO: 1611830 - RNA, 19 nt, Artificial Sequence
  Description of Artificial Sequence: Synthetic oligonucleotide
ugucaccaguaaacaugua

SEQ ID NO: 1611831 - RNA, 19 nt, Artificial Sequence
  Description of Artificial Sequence: Synthetic oligonucleotide
gccaaucagcuugcaauag

SEQ ID NO: 1611832 - RNA, 19 nt, Artificial Sequence
  Description of Artificial Sequence: Synthetic oligonucleotide
gucgaagagucggaaugga

SEQ ID NO: 1611833 - RNA, 19 nt, Artificial Sequence
  Description of Artificial Sequence: Synthetic oligonucleotide
ggaguaggacugaugacaa

SEQ ID NO: 1611834 - RNA, 19 nt, Artificial Sequence
  Description of Artificial Sequence: Synthetic oligonucleotide
ccagucauucuggagccag

SEQ ID NO: 1611835 - RNA, 19 nt, Artificial Sequence
  Description of Artificial Sequence: Synthetic oligonucleotide
cugcacuggucuacauuca

SEQ ID NO: 1611836 - RNA, 19 nt, Artificial Sequence
  Description of Artificial Sequence: Synthetic oligonucleotide
cucgaucaugcagcggguc

SEQ ID NO: 1611837 - RNA, 19 nt, Artificial Sequence
  Description of Artificial Sequence: Synthetic oligonucleotide
agaagggucuccagugauu

SEQ ID NO: 1611838 - RNA, 19 nt, Artificial Sequence
  Description of Artificial Sequence: Synthetic oligonucleotide
ggccaaucagcuugcaaua

SEQ ID NO: 1611839 - RNA, 19 nt, Artificial Sequence
  Description of Artificial Sequence: Synthetic oligonucleotide
gggacaaguuuucguuuga

SEQ ID NO: 1611840 - RNA, 19 nt, Artificial Sequence
  Description of Artificial Sequence: Synthetic oligonucleotide
auucggucauggaggacaa

SEQ ID NO: 1611841 - RNA, 19 nt, Artificial Sequence
  Description of Artificial Sequence: Synthetic oligonucleotide
aggcaggcuuuaaauuaca

SEQ ID NO: 1611842 - RNA, 19 nt, Artificial Sequence
  Description of Artificial Sequence: Synthetic oligonucleotide
caggggacaaguuuucguu

SEQ ID NO: 1611843 - RNA, 19 nt, Artificial Sequence
  Description of Artificial Sequence: Synthetic oligonucleotide
gugccacacagcgugugca

SEQ ID NO: 1611844 - RNA, 19 nt, Artificial Sequence
  Description of Artificial Sequence: Synthetic oligonucleotide
ugcaaggcaugggcagcga

SEQ ID NO: 1611845 - RNA, 19 nt, Artificial Sequence
  Description of Artificial Sequence: Synthetic oligonucleotide
caccaguaaacauguacuu

SEQ ID NO: 1611846 - RNA, 19 nt, Artificial Sequence
  Description of Artificial Sequence: Synthetic oligonucleotide
cgaagagucggaauggaua

SEQ ID NO: 1611847 - RNA, 19 nt, Artificial Sequence
  Description of Artificial Sequence: Synthetic oligonucleotide
caccaaucucgaucaugca

SEQ ID NO: 1611848 - RNA, 19 nt, Artificial Sequence
  Description of Artificial Sequence: Synthetic oligonucleotide
acacuggaagcaacucuaa

SEQ ID NO: 1611849 - RNA, 19 nt, Artificial Sequence
  Description of Artificial Sequence: Synthetic oligonucleotide
ccucccgugcauucauagc

SEQ ID NO: 1611850 - RNA, 19 nt, Artificial Sequence
  Description of Artificial Sequence: Synthetic oligonucleotide
cuaggugauccagaagggu

SEQ ID NO: 1611851 - RNA, 19 nt, Artificial Sequence
  Description of Artificial Sequence: Synthetic oligonucleotide
gguauagcugcagcucauc

SEQ ID NO: 1611852 - RNA, 19 nt, Artificial Sequence
  Description of Artificial Sequence: Synthetic oligonucleotide
caauucggucauggaggac

SEQ ID NO: 1611853 - RNA, 19 nt, Artificial Sequence
  Description of Artificial Sequence: Synthetic oligonucleotide
agguauagcugcagcucau

SEQ ID NO: 1611854 - RNA, 19 nt, Artificial Sequence
  Description of Artificial Sequence: Synthetic oligonucleotide
ggauuggcaccggaggguc

SEQ ID NO: 1611855 - RNA, 19 nt, Artificial Sequence
  Description of Artificial Sequence: Synthetic oligonucleotide
cggaguaggacugaugaca

SEQ ID NO: 1611856 - RNA, 19 nt, Artificial Sequence
  Description of Artificial Sequence: Synthetic oligonucleotide
gcacuggucuacauucaac

SEQ ID NO: 1611857 - RNA, 19 nt, Artificial Sequence
  Description of Artificial Sequence: Synthetic oligonucleotide
cggaauggauagccaaccc

SEQ ID NO: 1611858 - RNA, 19 nt, Artificial Sequence
  Description of Artificial Sequence: Synthetic oligonucleotide
gugcuaagguauagcugca

SEQ ID NO: 1611859 - RNA, 19 nt, Artificial Sequence
  Description of Artificial Sequence: Synthetic oligonucleotide
cucuaagaaucuguggauu

SEQ ID NO: 1611860 - RNA, 19 nt, Artificial Sequence
  Description of Artificial Sequence: Synthetic oligonucleotide
ggacgacauuuagaagggc

SEQ ID NO: 1611861 - RNA, 19 nt, Artificial Sequence
  Description of Artificial Sequence: Synthetic oligonucleotide
agcgaggguuggggaacuc

SEQ ID NO: 1611862 - RNA, 19 nt, Artificial Sequence
  Description of Artificial Sequence: Synthetic oligonucleotide
cccaaggauuguccucccg

SEQ ID NO: 1611863 - RNA, 19 nt, Artificial Sequence
  Description of Artificial Sequence: Synthetic oligonucleotide
agggcauucccaacaucuu

SEQ ID NO: 1611864 - RNA, 19 nt, Artificial Sequence
  Description of Artificial Sequence: Synthetic oligonucleotide
ccaguacgguuccgggagg

SEQ ID NO: 1611865 - RNA, 19 nt, Artificial Sequence
  Description of Artificial Sequence: Synthetic oligonucleotide
ccggagacacacauuucca

SEQ ID NO: 1611866 - RNA, 19 nt, Artificial Sequence
  Description of Artificial Sequence: Synthetic oligonucleotide
ggcagcgaggguuggggaa

SEQ ID NO: 1611867 - RNA, 19 nt, Artificial Sequence
  Description of Artificial Sequence: Synthetic oligonucleotide
gugaugaaucgaagacgaa

SEQ ID NO: 1611868 - RNA, 19 nt, Artificial Sequence
  Description of Artificial Sequence: Synthetic oligonucleotide
cagcgugugcaagugcuaa

SEQ ID NO: 1611869 - RNA, 19 nt, Artificial Sequence
  Description of Artificial Sequence: Synthetic oligonucleotide
gauagccaacccacucagu

SEQ ID NO: 1611870 - RNA, 19 nt, Artificial Sequence
  Description of Artificial Sequence: Synthetic oligonucleotide
ggucacgguuucucaggca

SEQ ID NO: 1611871 - RNA, 19 nt, Artificial Sequence
  Description of Artificial Sequence: Synthetic oligonucleotide
ugucuaccagucggccaau

SEQ ID NO: 1611872 - RNA, 19 nt, Artificial Sequence
  Description of Artificial Sequence: Synthetic oligonucleotide
ccacacaagugacaugcaa

SEQ ID NO: 1611873 - RNA, 19 nt, Artificial Sequence
  Description of Artificial Sequence: Synthetic oligonucleotide
cggugaagucgaagagucg

SEQ ID NO: 1611874 - RNA, 19 nt, Artificial Sequence
  Description of Artificial Sequence: Synthetic oligonucleotide
aguuuucguuugagauggu

SEQ ID NO: 1611875 - RNA, 19 nt, Artificial Sequence
  Description of Artificial Sequence: Synthetic oligonucleotide
gguaguucauaugcuucgu

SEQ ID NO: 1611876 - RNA, 19 nt, Artificial Sequence
  Description of Artificial Sequence: Synthetic oligonucleotide
gggacuggauuggcaccgg

SEQ ID NO: 1611877 - RNA, 19 nt, Artificial Sequence
  Description of Artificial Sequence: Synthetic oligonucleotide
gcugacuuuucaggacgac

SEQ ID NO: 1611878 - RNA, 19 nt, Artificial Sequence
  Description of Artificial Sequence: Synthetic oligonucleotide
cacucacaauucggucaug

SEQ ID NO: 1611879 - RNA, 19 nt, Artificial Sequence
  Description of Artificial Sequence: Synthetic oligonucleotide
acggcccuacaagaugaua

SEQ ID NO: 1611880 - RNA, 19 nt, Artificial Sequence
  Description of Artificial Sequence: Synthetic oligonucleotide
gauuguccucccgugcauu

SEQ ID NO: 1611881 - RNA, 19 nt, Artificial Sequence
  Description of Artificial Sequence: Synthetic oligonucleotide
gugcaagugcuaagguaua

SEQ ID NO: 1611882 - RNA, 19 nt, Artificial Sequence
  Description of Artificial Sequence: Synthetic oligonucleotide
ggacuggauuggcaccgga

SEQ ID NO: 1611883 - RNA, 19 nt, Artificial Sequence
  Description of Artificial Sequence: Synthetic oligonucleotide
ggaaggaaccggagacaca

SEQ ID NO: 1611884 - RNA, 19 nt, Artificial Sequence
  Description of Artificial Sequence: Synthetic oligonucleotide
ggcaccggagggucgaccu

SEQ ID NO: 1611885 - RNA, 19 nt, Artificial Sequence
  Description of Artificial Sequence: Synthetic oligonucleotide
uuggcaccggagggucgac

SEQ ID NO: 1611886 - RNA, 19 nt, Artificial Sequence
  Description of Artificial Sequence: Synthetic oligonucleotide
ccaaucagcuugcaauagu

SEQ ID NO: 1611887 - RNA, 19 nt, Artificial Sequence
  Description of Artificial Sequence: Synthetic oligonucleotide
ggacugcugaugacacuca

SEQ ID NO: 1611888 - RNA, 19 nt, Artificial Sequence
  Description of Artificial Sequence: Synthetic oligonucleotide
cugccaggccuucgaaaua

SEQ ID NO: 1611889 - RNA, 19 nt, Artificial Sequence
  Description of Artificial Sequence: Synthetic oligonucleotide
ccccuaggugauccagaag

SEQ ID NO: 1611890 - RNA, 19 nt, Artificial Sequence
  Description of Artificial Sequence: Synthetic oligonucleotide
gcguucauccaugcuguaa

SEQ ID NO: 1611891 - RNA, 19 nt, Artificial Sequence
  Description of Artificial Sequence: Synthetic oligonucleotide
ccaaaauagaugggcagau

SEQ ID NO: 1611892 - RNA, 19 nt, Artificial Sequence
  Description of Artificial Sequence: Synthetic oligonucleotide
cacuggucggucguggaau

SEQ ID NO: 1611893 - RNA, 19 nt, Artificial Sequence
  Description of Artificial Sequence: Synthetic oligonucleotide
gcaccggagggucgaccug

SEQ ID NO: 1611894 - RNA, 19 nt, Artificial Sequence
  Description of Artificial Sequence: Synthetic oligonucleotide
cccaacaucuuugccugga

SEQ ID NO: 1611895 - RNA, 19 nt, Artificial Sequence
  Description of Artificial Sequence: Synthetic oligonucleotide
gacaagcggugaagucgaa

SEQ ID NO: 1611896 - RNA, 19 nt, Artificial Sequence
  Description of Artificial Sequence: Synthetic oligonucleotide
cggccaaucagcuugcaau

SEQ ID NO: 1611897 - RNA, 19 nt, Artificial Sequence
  Description of Artificial Sequence: Synthetic oligonucleotide
gcgaggguuggggaacuca

SEQ ID NO: 1611898 - RNA, 19 nt, Artificial Sequence
  Description of Artificial Sequence: Synthetic oligonucleotide
gcuuuaaggcaggcuuuaa

SEQ ID NO: 1611899 - RNA, 19 nt, Artificial Sequence
  Description of Artificial Sequence: Synthetic oligonucleotide
gucggucguggaauuuaua

SEQ ID NO: 1611900 - RNA, 19 nt, Artificial Sequence
  Description of Artificial Sequence: Synthetic oligonucleotide
cggucguggaauuuauaua

SEQ ID NO: 1611901 - RNA, 19 nt, Artificial Sequence
  Description of Artificial Sequence: Synthetic oligonucleotide
gcaccaagggcugacuuuu

SEQ ID NO: 1611902 - RNA, 19 nt, Artificial Sequence
  Description of Artificial Sequence: Synthetic oligonucleotide
caccggagggucgaccugu

SEQ ID NO: 1611903 - RNA, 19 nt, Artificial Sequence
  Description of Artificial Sequence: Synthetic oligonucleotide
gucggccaaucagcuugca

SEQ ID NO: 1611904 - RNA, 19 nt, Artificial Sequence
  Description of Artificial Sequence: Synthetic oligonucleotide
cggagggucgaccuguucu

SEQ ID NO: 1611905 - RNA, 19 nt, Artificial Sequence
  Description of Artificial Sequence: Synthetic oligonucleotide
cgugcauucauagcaugcu

SEQ ID NO: 1611906 - RNA, 19 nt, Artificial Sequence
  Description of Artificial Sequence: Synthetic oligonucleotide
ggucggucguggaauuuau

SEQ ID NO: 1611907 - RNA, 19 nt, Artificial Sequence
  Description of Artificial Sequence: Synthetic oligonucleotide
gccaggccuucgaaauaca

SEQ ID NO: 1611908 - RNA, 19 nt, Artificial Sequence
  Description of Artificial Sequence: Synthetic oligonucleotide
ggaaccggagacacacauu

SEQ ID NO: 1611909 - RNA, 19 nt, Artificial Sequence
  Description of Artificial Sequence: Synthetic oligonucleotide
accggagggucgaccuguu

SEQ ID NO: 1611910 - RNA, 19 nt, Artificial Sequence
  Description of Artificial Sequence: Synthetic oligonucleotide
gccagucauucuggagcca

SEQ ID NO: 1611911 - RNA, 19 nt, Artificial Sequence
  Description of Artificial Sequence: Synthetic oligonucleotide
ccggagggucgaccuguuc

SEQ ID NO: 1611912 - RNA, 19 nt, Artificial Sequence
  Description of Artificial Sequence: Synthetic oligonucleotide
cgaagcuuuaaggcaggcu

SEQ ID NO: 1611913 - RNA, 19 nt, Artificial Sequence
  Description of Artificial Sequence: Synthetic oligonucleotide
gcuucguaugccagucauu

SEQ ID NO: 1611914 - RNA, 19 nt, Artificial Sequence
  Description of Artificial Sequence: Synthetic oligonucleotide
cagcgaggguuggggaacu

SEQ ID NO: 1611915 - RNA, 19 nt, Artificial Sequence
  Description of Artificial Sequence: Synthetic oligonucleotide
cgaucaugcagcggguccu

SEQ ID NO: 1611916 - RNA, 19 nt, Artificial Sequence
  Description of Artificial Sequence: Synthetic oligonucleotide
ggccuucgaaauacagcuu

SEQ ID NO: 1611917 - RNA, 19 nt, Artificial Sequence
  Description of Artificial Sequence: Synthetic oligonucleotide
cuggucggucguggaauuu

SEQ ID NO: 1611918 - RNA, 19 nt, Artificial Sequence
  Description of Artificial Sequence: Synthetic oligonucleotide
cgacauuuagaagggcauu

SEQ ID NO: 1611919 - RNA, 19 nt, Artificial Sequence
  Description of Artificial Sequence: Synthetic oligonucleotide
ccagucggccaaucagcuu

SEQ ID NO: 1611920 - RNA, 19 nt, Artificial Sequence
  Description of Artificial Sequence: Synthetic oligonucleotide
ccacaccaaucucgaucau

SEQ ID NO: 1611921 - RNA, 19 nt, Artificial Sequence
  Description of Artificial Sequence: Synthetic oligonucleotide
aaagcaucgaagcaguagg

SEQ ID NO: 1611922 - RNA, 19 nt, Artificial Sequence
  Description of Artificial Sequence: Synthetic oligonucleotide
uaaaggaugaugcugucgg

SEQ ID NO: 1611923 - RNA, 19 nt, Artificial Sequence
  Description of Artificial Sequence: Synthetic oligonucleotide
agugcuuugagacaccagc

SEQ ID NO: 1611924 - RNA, 19 nt, Artificial Sequence
  Description of Artificial Sequence: Synthetic oligonucleotide
aagagaaccguguaccugg

SEQ ID NO: 1611925 - RNA, 19 nt, Artificial Sequence
  Description of Artificial Sequence: Synthetic oligonucleotide
uuagggaaagcaucgaagc

SEQ ID NO: 1611926 - RNA, 19 nt, Artificial Sequence
  Description of Artificial Sequence: Synthetic oligonucleotide
aagucgaucaccucguccu

SEQ ID NO: 1611927 - RNA, 19 nt, Artificial Sequence
  Description of Artificial Sequence: Synthetic oligonucleotide
agauucuucuccgagggcc

SEQ ID NO: 1611928 - RNA, 19 nt, Artificial Sequence
  Description of Artificial Sequence: Synthetic oligonucleotide
agaaccguguaccuggcac

SEQ ID NO: 1611929 - RNA, 19 nt, Artificial Sequence
  Description of Artificial Sequence: Synthetic oligonucleotide
cauacaugcaggcaaugcg

SEQ ID NO: 1611930 - RNA, 19 nt, Artificial Sequence
  Description of Artificial Sequence: Synthetic oligonucleotide
aaggcgaacccucgggagc

SEQ ID NO: 1611931 - RNA, 19 nt, Artificial Sequence
  Description of Artificial Sequence: Synthetic oligonucleotide
ucggguaccagugaguagg

SEQ ID NO: 1611932 - RNA, 19 nt, Artificial Sequence
  Description of Artificial Sequence: Synthetic oligonucleotide
ucagguggaucuuccagcg

SEQ ID NO: 1611933 - RNA, 19 nt, Artificial Sequence
  Description of Artificial Sequence: Synthetic oligonucleotide
aaucuucgacaccuucucg

SEQ ID NO: 1611934 - RNA, 19 nt, Artificial Sequence
  Description of Artificial Sequence: Synthetic oligonucleotide
aggaaggcgagcuuggcag

SEQ ID NO: 1611935 - RNA, 19 nt, Artificial Sequence
  Description of Artificial Sequence: Synthetic oligonucleotide
ucugguucggguaccagug

SEQ ID NO: 1611936 - RNA, 19 nt, Artificial Sequence
  Description of Artificial Sequence: Synthetic oligonucleotide
cucaaugucguugugcccg

SEQ ID NO: 1611937 - RNA, 19 nt, Artificial Sequence
  Description of Artificial Sequence: Synthetic oligonucleotide
aaggaugaugcugucgggg

SEQ ID NO: 1611938 - RNA, 19 nt, Artificial Sequence
  Description of Artificial Sequence: Synthetic oligonucleotide
uucgacaccuucucgaugu

SEQ ID NO: 1611939 - RNA, 19 nt, Artificial Sequence
  Description of Artificial Sequence: Synthetic oligonucleotide
aaaggaugaugcugucggg

SEQ ID NO: 1611940 - RNA, 19 nt, Artificial Sequence
  Description of Artificial Sequence: Synthetic oligonucleotide
aaaaccucgauggugucca

SEQ ID NO: 1611941 - RNA, 19 nt, Artificial Sequence
  Description of Artificial Sequence: Synthetic oligonucleotide
auagcgcgaugccaggucc

SEQ ID NO: 1611942 - RNA, 19 nt, Artificial Sequence
  Description of Artificial Sequence: Synthetic oligonucleotide
ugcuuugagacaccagcag

SEQ ID NO: 1611943 - RNA, 19 nt, Artificial Sequence
  Description of Artificial Sequence: Synthetic oligonucleotide
uaaucuucgacaccuucuc

SEQ ID NO: 1611944 - RNA, 19 nt, Artificial Sequence
  Description of Artificial Sequence: Synthetic oligonucleotide
accgacaggccguucaugg

SEQ ID NO: 1611945 - RNA, 19 nt, Artificial Sequence
  Description of Artificial Sequence: Synthetic oligonucleotide
agcgcacauacaugcaggc

SEQ ID NO: 1611946 - RNA, 19 nt, Artificial Sequence
  Description of Artificial Sequence: Synthetic oligonucleotide
auacaugcaggcaaugcgg

SEQ ID NO: 1611947 - RNA, 19 nt, Artificial Sequence
  Description of Artificial Sequence: Synthetic oligonucleotide
guuagggaaagcaucgaag

SEQ ID NO: 1611948 - RNA, 19 nt, Artificial Sequence
  Description of Artificial Sequence: Synthetic oligonucleotide
gaugccguagcccgaguag

SEQ ID NO: 1611949 - RNA, 19 nt, Artificial Sequence
  Description of Artificial Sequence: Synthetic oligonucleotide
uguuagggaaagcaucgaa

SEQ ID NO: 1611950 - RNA, 19 nt, Artificial Sequence
  Description of Artificial Sequence: Synthetic oligonucleotide
uucucgauguuagggaaag

SEQ ID NO: 1611951 - RNA, 19 nt, Artificial Sequence
  Description of Artificial Sequence: Synthetic oligonucleotide
gugacguaaucuucgacac

SEQ ID NO: 1611952 - RNA, 19 nt, Artificial Sequence
  Description of Artificial Sequence: Synthetic oligonucleotide
aaugcgguuggcgcgcgcg

SEQ ID NO: 1611953 - RNA, 19 nt, Artificial Sequence
  Description of Artificial Sequence: Synthetic oligonucleotide
caggcaaugcgguuggcgc

SEQ ID NO: 1611954 - RNA, 19 nt, Artificial Sequence
  Description of Artificial Sequence: Synthetic oligonucleotide
ucgauguuagggaaagcau

SEQ ID NO: 1611955 - RNA, 19 nt, Artificial Sequence
  Description of Artificial Sequence: Synthetic oligonucleotide
ugggagaugaagcggcgca

SEQ ID NO: 1611956 - RNA, 19 nt, Artificial Sequence
  Description of Artificial Sequence: Synthetic oligonucleotide
uuggcagcgaugcggcccg

SEQ ID NO: 1611957 - RNA, 19 nt, Artificial Sequence
  Description of Artificial Sequence: Synthetic oligonucleotide
uucauggcgggcacggggc

SEQ ID NO: 1611958 - RNA, 19 nt, Artificial Sequence
  Description of Artificial Sequence: Synthetic oligonucleotide
guaccuggcaccgggaacg

SEQ ID NO: 1611959 - RNA, 19 nt, Artificial Sequence
  Description of Artificial Sequence: Synthetic oligonucleotide
gucagguggaucuuccagc

SEQ ID NO: 1611960 - RNA, 19 nt, Artificial Sequence
  Description of Artificial Sequence: Synthetic oligonucleotide
agggcuguacugcugaggu

SEQ ID NO: 1611961 - RNA, 19 nt, Artificial Sequence
  Description of Artificial Sequence: Synthetic oligonucleotide
ggugacguaaucuucgaca

SEQ ID NO: 1611962 - RNA, 19 nt, Artificial Sequence
  Description of Artificial Sequence: Synthetic oligonucleotide
gauucuucuccgagggccg

SEQ ID NO: 1611963 - RNA, 19 nt, Artificial Sequence
  Description of Artificial Sequence: Synthetic oligonucleotide
gaaccguguaccuggcacc

SEQ ID NO: 1611964 - RNA, 19 nt, Artificial Sequence
  Description of Artificial Sequence: Synthetic oligonucleotide
uacaugcaggcaaugcggu

SEQ ID NO: 1611965 - RNA, 19 nt, Artificial Sequence
  Description of Artificial Sequence: Synthetic oligonucleotide
ucaaugucguugugcccgg

SEQ ID NO: 1611966 - RNA, 19 nt, Artificial Sequence
  Description of Artificial Sequence: Synthetic oligonucleotide
gcauagagauucuucuccg

SEQ ID NO: 1611967 - RNA, 19 nt, Artificial Sequence
  Description of Artificial Sequence: Synthetic oligonucleotide
ugucguugugcccggcucc

SEQ ID NO: 1611968 - RNA, 19 nt, Artificial Sequence
  Description of Artificial Sequence: Synthetic oligonucleotide
cuggccauaaaggaugaug

SEQ ID NO: 1611969 - RNA, 19 nt, Artificial Sequence
  Description of Artificial Sequence: Synthetic oligonucleotide
ugacguaaucuucgacacc

SEQ ID NO: 1611970 - RNA, 19 nt, Artificial Sequence
  Description of Artificial Sequence: Synthetic oligonucleotide
accgcagcacacucauagc

SEQ ID NO: 1611971 - RNA, 19 nt, Artificial Sequence
  Description of Artificial Sequence: Synthetic oligonucleotide
augucguugugcccggcuc

SEQ ID NO: 1611972 - RNA, 19 nt, Artificial Sequence
  Description of Artificial Sequence: Synthetic oligonucleotide
gacguaaucuucgacaccu

SEQ ID NO: 1611973 - RNA, 19 nt, Artificial Sequence
  Description of Artificial Sequence: Synthetic oligonucleotide
uguaccuggcaccgggaac

SEQ ID NO: 1611974 - RNA, 19 nt, Artificial Sequence
  Description of Artificial Sequence: Synthetic oligonucleotide
aggcaaugcgguuggcgcg

SEQ ID NO: 1611975 - RNA, 19 nt, Artificial Sequence
  Description of Artificial Sequence: Synthetic oligonucleotide
caugugagaagucgaucac

SEQ ID NO: 1611976 - RNA, 19 nt, Artificial Sequence
  Description of Artificial Sequence: Synthetic oligonucleotide
accggugacguaaucuucg

SEQ ID NO: 1611977 - RNA, 19 nt, Artificial Sequence
  Description of Artificial Sequence: Synthetic oligonucleotide
cucgauguuagggaaagca

SEQ ID NO: 1611978 - RNA, 19 nt, Artificial Sequence
  Description of Artificial Sequence: Synthetic oligonucleotide
uggggugccgaguaggguc

SEQ ID NO: 1611979 - RNA, 19 nt, Artificial Sequence
  Description of Artificial Sequence: Synthetic oligonucleotide
aguccaguuaggaggccgc

SEQ ID NO: 1611980 - RNA, 19 nt, Artificial Sequence
  Description of Artificial Sequence: Synthetic oligonucleotide
gacggcugagguccgcagg

SEQ ID NO: 1611981 - RNA, 19 nt, Artificial Sequence
  Description of Artificial Sequence: Synthetic oligonucleotide
ucgugguccaaggcgaacc

SEQ ID NO: 1611982 - RNA, 19 nt, Artificial Sequence
  Description of Artificial Sequence: Synthetic oligonucleotide
gaaggcgagcuuggcagcg

SEQ ID NO: 1611983 - RNA, 19 nt, Artificial Sequence
  Description of Artificial Sequence: Synthetic oligonucleotide
gcuuugagacaccagcagc

SEQ ID NO: 1611984 - RNA, 19 nt, Artificial Sequence
  Description of Artificial Sequence: Synthetic oligonucleotide
aggcgaacccucgggagcc

SEQ ID NO: 1611985 - RNA, 19 nt, Artificial Sequence
  Description of Artificial Sequence: Synthetic oligonucleotide
gucagcacgcucugucagg

SEQ ID NO: 1611986 - RNA, 19 nt, Artificial Sequence
  Description of Artificial Sequence: Synthetic oligonucleotide
ggcgggagugcuuugagac

SEQ ID NO: 1611987 - RNA, 19 nt, Artificial Sequence
  Description of Artificial Sequence: Synthetic oligonucleotide
uccaguuaggaggccgcgg

SEQ ID NO: 1611988 - RNA, 19 nt, Artificial Sequence
  Description of Artificial Sequence: Synthetic oligonucleotide
gacaggccguucauggcgg

SEQ ID NO: 1611989 - RNA, 19 nt, Artificial Sequence
  Description of Artificial Sequence: Synthetic oligonucleotide
uccgugccguggaugauga

SEQ ID NO: 1611990 - RNA, 19 nt, Artificial Sequence
  Description of Artificial Sequence: Synthetic oligonucleotide
augccgugcagugggacac

SEQ ID NO: 1611991 - RNA, 19 nt, Artificial Sequence
  Description of Artificial Sequence: Synthetic oligonucleotide
ccgaguaggguccugggcg

SEQ ID NO: 1611992 - RNA, 19 nt, Artificial Sequence
  Description of Artificial Sequence: Synthetic oligonucleotide
cugccaggcggcaucaaug

SEQ ID NO: 1611993 - RNA, 19 nt, Artificial Sequence
  Description of Artificial Sequence: Synthetic oligonucleotide
ugucccucgggaccgcggc

SEQ ID NO: 1611994 - RNA, 19 nt, Artificial Sequence
  Description of Artificial Sequence: Synthetic oligonucleotide
uucggguaccagugaguag

SEQ ID NO: 1611995 - RNA, 19 nt, Artificial Sequence
  Description of Artificial Sequence: Synthetic oligonucleotide
augagcaccggugacguaa

SEQ ID NO: 1611996 - RNA, 19 nt, Artificial Sequence
  Description of Artificial Sequence: Synthetic oligonucleotide
uggcuaggugcguuggcug

SEQ ID NO: 1611997 - RNA, 19 nt, Artificial Sequence
  Description of Artificial Sequence: Synthetic oligonucleotide
acggccuucgggcagcgcu

SEQ ID NO: 1611998 - RNA, 19 nt, Artificial Sequence
  Description of Artificial Sequence: Synthetic oligonucleotide
gaacgcagcgcacauacau

SEQ ID NO: 1611999 - RNA, 19 nt, Artificial Sequence
  Description of Artificial Sequence: Synthetic oligonucleotide
ugcaggaccaccgcagcac

SEQ ID NO: 1612000 - RNA, 19 nt, Artificial Sequence
  Description of Artificial Sequence: Synthetic oligonucleotide
agugccagcccaugugaga

SEQ ID NO: 1612001 - RNA, 19 nt, Artificial Sequence
  Description of Artificial Sequence: Synthetic oligonucleotide
guaggugggcucaggaggc

SEQ ID NO: 1612002 - RNA, 19 nt, Artificial Sequence
  Description of Artificial Sequence: Synthetic oligonucleotide
ugccgaguaggguccuggg

SEQ ID NO: 1612003 - RNA, 19 nt, Artificial Sequence
  Description of Artificial Sequence: Synthetic oligonucleotide
ugagaggcgagugcaggac

SEQ ID NO: 1612004 - RNA, 19 nt, Artificial Sequence
  Description of Artificial Sequence: Synthetic oligonucleotide
uuggcgcgcgcgcucuugg

SEQ ID NO: 1612005 - RNA, 19 nt, Artificial Sequence
  Description of Artificial Sequence: Synthetic oligonucleotide
gggcugaugccguaccugg

SEQ ID NO: 1612006 - RNA, 19 nt, Artificial Sequence
  Description of Artificial Sequence: Synthetic oligonucleotide
ggcggcaucaaugucagca

SEQ ID NO: 1612007 - RNA, 19 nt, Artificial Sequence
  Description of Artificial Sequence: Synthetic oligonucleotide
aagcaucgaagcaguaggu

SEQ ID NO: 1612008 - RNA, 19 nt, Artificial Sequence
  Description of Artificial Sequence: Synthetic oligonucleotide
aggugcguuggcugggcag

SEQ ID NO: 1612009 - RNA, 19 nt, Artificial Sequence
  Description of Artificial Sequence: Synthetic oligonucleotide
agcaccggugacguaaucu

SEQ ID NO: 1612010 - RNA, 19 nt, Artificial Sequence
  Description of Artificial Sequence: Synthetic oligonucleotide
uggucaggaaaaccucgau

SEQ ID NO: 1612011 - RNA, 19 nt, Artificial Sequence
  Description of Artificial Sequence: Synthetic oligonucleotide
cagcucaaugucguugugc

SEQ ID NO: 1612012 - RNA, 19 nt, Artificial Sequence
  Description of Artificial Sequence: Synthetic oligonucleotide
ugaugccguagcccgagua

SEQ ID NO: 1612013 - RNA, 19 nt, Artificial Sequence
  Description of Artificial Sequence: Synthetic oligonucleotide
agagaaccguguaccuggc

SEQ ID NO: 1612014 - RNA, 19 nt, Artificial Sequence
  Description of Artificial Sequence: Synthetic oligonucleotide
ccaugugagaagucgauca

SEQ ID NO: 1612015 - RNA, 19 nt, Artificial Sequence
  Description of Artificial Sequence: Synthetic oligonucleotide
gcagcgcacauacaugcag

SEQ ID NO: 1612016 - RNA, 19 nt, Artificial Sequence
  Description of Artificial Sequence: Synthetic oligonucleotide
aaaccucgaugguguccag

SEQ ID NO: 1612017 - RNA, 19 nt, Artificial Sequence
  Description of Artificial Sequence: Synthetic oligonucleotide
cauagcgcgaugccagguc

SEQ ID NO: 1612018 - RNA, 19 nt, Artificial Sequence
  Description of Artificial Sequence: Synthetic oligonucleotide
ccguggaugaugagcaccg

SEQ ID NO: 1612019 - RNA, 19 nt, Artificial Sequence
  Description of Artificial Sequence: Synthetic oligonucleotide
guugcagccgaugcgcgug

SEQ ID NO: 1612020 - RNA, 19 nt, Artificial Sequence
  Description of Artificial Sequence: Synthetic oligonucleotide
uguugcagccgaugcgcgu

SEQ ID NO: 1612021 - RNA, 19 nt, Artificial Sequence
  Description of Artificial Sequence: Synthetic oligonucleotide
ccgcagcacacucauagcg

SEQ ID NO: 1612022 - RNA, 19 nt, Artificial Sequence
  Description of Artificial Sequence: Synthetic oligonucleotide
ucggggcugaugccguacc

SEQ ID NO: 1612023 - RNA, 19 nt, Artificial Sequence
  Description of Artificial Sequence: Synthetic oligonucleotide
ggcuaggugcguuggcugg

SEQ ID NO: 1612024 - RNA, 19 nt, Artificial Sequence
  Description of Artificial Sequence: Synthetic oligonucleotide
ucgcucaccgacaggccgu

SEQ ID NO: 1612025 - RNA, 19 nt, Artificial Sequence
  Description of Artificial Sequence: Synthetic oligonucleotide
ugacggcugagguccgcag

SEQ ID NO: 1612026 - RNA, 19 nt, Artificial Sequence
  Description of Artificial Sequence: Synthetic oligonucleotide
cuucgacaccuucucgaug

SEQ ID NO: 1612027 - RNA, 19 nt, Artificial Sequence
  Description of Artificial Sequence: Synthetic oligonucleotide
aggcgagugcaggaccacc

SEQ ID NO: 1612028 - RNA, 19 nt, Artificial Sequence
  Description of Artificial Sequence: Synthetic oligonucleotide
guccaaggcgaacccucgg

SEQ ID NO: 1612029 - RNA, 19 nt, Artificial Sequence
  Description of Artificial Sequence: Synthetic oligonucleotide
ggaugaugagcaccgguga

SEQ ID NO: 1612030 - RNA, 19 nt, Artificial Sequence
  Description of Artificial Sequence: Synthetic oligonucleotide
ggagaugaagcggcgcagg

SEQ ID NO: 1612031 - RNA, 19 nt, Artificial Sequence
  Description of Artificial Sequence: Synthetic oligonucleotide
uccgucugucccucgggac

SEQ ID NO: 1612032 - RNA, 19 nt, Artificial Sequence
  Description of Artificial Sequence: Synthetic oligonucleotide
cgauguuagggaaagcauc

SEQ ID NO: 1612033 - RNA, 19 nt, Artificial Sequence
  Description of Artificial Sequence: Synthetic oligonucleotide
augcggcccgggcagggcg

SEQ ID NO: 1612034 - RNA, 19 nt, Artificial Sequence
  Description of Artificial Sequence: Synthetic oligonucleotide
gcugaugccguaccuggug

SEQ ID NO: 1612035 - RNA, 19 nt, Artificial Sequence
  Description of Artificial Sequence: Synthetic oligonucleotide
ucauagcgcgaugccaggu

SEQ ID NO: 1612036 - RNA, 19 nt, Artificial Sequence
  Description of Artificial Sequence: Synthetic oligonucleotide
gagugcuuugagacaccag

SEQ ID NO: 1612037 - RNA, 19 nt, Artificial Sequence
  Description of Artificial Sequence: Synthetic oligonucleotide
ugagcaccggugacguaau

SEQ ID NO: 1612038 - RNA, 19 nt, Artificial Sequence
  Description of Artificial Sequence: Synthetic oligonucleotide
acaugcagucccggcagag

SEQ ID NO: 1612039 - RNA, 19 nt, Artificial Sequence
  Description of Artificial Sequence: Synthetic oligonucleotide
gcugucggggcugaugccg

SEQ ID NO: 1612040 - RNA, 19 nt, Artificial Sequence
  Description of Artificial Sequence: Synthetic oligonucleotide
ccaguuaggaggccgcggc

SEQ ID NO: 1612041 - RNA, 19 nt, Artificial Sequence
  Description of Artificial Sequence: Synthetic oligonucleotide
gugucagggaaggccaccc

SEQ ID NO: 1612042 - RNA, 19 nt, Artificial Sequence
  Description of Artificial Sequence: Synthetic oligonucleotide
aguaggguccugggcgccg

SEQ ID NO: 1612043 - RNA, 19 nt, Artificial Sequence
  Description of Artificial Sequence: Synthetic oligonucleotide
ucaccgacaggccguucau

SEQ ID NO: 1612044 - RNA, 19 nt, Artificial Sequence
  Description of Artificial Sequence: Synthetic oligonucleotide
cucgcgcuggccguacugg

SEQ ID NO: 1612045 - RNA, 19 nt, Artificial Sequence
  Description of Artificial Sequence: Synthetic oligonucleotide
uagcgcgaugccaggucca

SEQ ID NO: 1612046 - RNA, 19 nt, Artificial Sequence
  Description of Artificial Sequence: Synthetic oligonucleotide
ugggacacccgccgcccgc

SEQ ID NO: 1612047 - RNA, 19 nt, Artificial Sequence
  Description of Artificial Sequence: Synthetic oligonucleotide
uugcagccgaugcgcgugc

SEQ ID NO: 1612048 - RNA, 19 nt, Artificial Sequence
  Description of Artificial Sequence: Synthetic oligonucleotide
cuggcaccgggaacgcagc

SEQ ID NO: 1612049 - RNA, 19 nt, Artificial Sequence
  Description of Artificial Sequence: Synthetic oligonucleotide
ggcgagugcaggaccaccg

SEQ ID NO: 1612050 - RNA, 19 nt, Artificial Sequence
  Description of Artificial Sequence: Synthetic oligonucleotide
auguuagggaaagcaucga

SEQ ID NO: 1612051 - RNA, 19 nt, Artificial Sequence
  Description of Artificial Sequence: Synthetic oligonucleotide
caccggugacguaaucuuc

SEQ ID NO: 1612052 - RNA, 19 nt, Artificial Sequence
  Description of Artificial Sequence: Synthetic oligonucleotide
uccagcucgcgcuggccgu

SEQ ID NO: 1612053 - RNA, 19 nt, Artificial Sequence
  Description of Artificial Sequence: Synthetic oligonucleotide
agaggcgagugcaggacca

SEQ ID NO: 1612054 - RNA, 19 nt, Artificial Sequence
  Description of Artificial Sequence: Synthetic oligonucleotide
cugggagaugaagcggcgc

SEQ ID NO: 1612055 - RNA, 19 nt, Artificial Sequence
  Description of Artificial Sequence: Synthetic oligonucleotide
caugccgugcagugggaca

SEQ ID NO: 1612056 - RNA, 19 nt, Artificial Sequence
  Description of Artificial Sequence: Synthetic oligonucleotide
gcagagcucgcucaccgac

SEQ ID NO: 1612057 - RNA, 19 nt, Artificial Sequence
  Description of Artificial Sequence: Synthetic oligonucleotide
guggaucuuccagcgcccg

SEQ ID NO: 1612058 - RNA, 19 nt, Artificial Sequence
  Description of Artificial Sequence: Synthetic oligonucleotide
ucgggaccgcggccgagcc

SEQ ID NO: 1612059 - RNA, 19 nt, Artificial Sequence
  Description of Artificial Sequence: Synthetic oligonucleotide
guucggguaccagugagua

SEQ ID NO: 1612060 - RNA, 19 nt, Artificial Sequence
  Description of Artificial Sequence: Synthetic oligonucleotide
augccugaggugagaggcg

SEQ ID NO: 1612061 - RNA, 19 nt, Artificial Sequence
  Description of Artificial Sequence: Synthetic oligonucleotide
cgcgaugccagguccaccg

SEQ ID NO: 1612062 - RNA, 19 nt, Artificial Sequence
  Description of Artificial Sequence: Synthetic oligonucleotide
uaggugcguuggcugggca

SEQ ID NO: 1612063 - RNA, 19 nt, Artificial Sequence
  Description of Artificial Sequence: Synthetic oligonucleotide
augccguagcccgaguagu

SEQ ID NO: 1612064 - RNA, 19 nt, Artificial Sequence
  Description of Artificial Sequence: Synthetic oligonucleotide
uggugcgaagggccugcca

SEQ ID NO: 1612065 - RNA, 19 nt, Artificial Sequence
  Description of Artificial Sequence: Synthetic oligonucleotide
gugagaagucgaucaccuc

SEQ ID NO: 1612066 - RNA, 19 nt, Artificial Sequence
  Description of Artificial Sequence: Synthetic oligonucleotide
uaccagugaguaggugggc

SEQ ID NO: 1612067 - RNA, 19 nt, Artificial Sequence
  Description of Artificial Sequence: Synthetic oligonucleotide
guccaguuaggaggccgcg

SEQ ID NO: 1612068 - RNA, 19 nt, Artificial Sequence
  Description of Artificial Sequence: Synthetic oligonucleotide
cgacaggccguucauggcg

SEQ ID NO: 1612069 - RNA, 19 nt, Artificial Sequence
  Description of Artificial Sequence: Synthetic oligonucleotide
ucauggcccauggggugcc

SEQ ID NO: 1612070 - RNA, 19 nt, Artificial Sequence
  Description of Artificial Sequence: Synthetic oligonucleotide
cuaggugcguuggcugggc

SEQ ID NO: 1612071 - RNA, 19 nt, Artificial Sequence
  Description of Artificial Sequence: Synthetic oligonucleotide
cugucccucgggaccgcgg

SEQ ID NO: 1612072 - RNA, 19 nt, Artificial Sequence
  Description of Artificial Sequence: Synthetic oligonucleotide
ggugcguuggcugggcagc

SEQ ID NO: 1612073 - RNA, 19 nt, Artificial Sequence
  Description of Artificial Sequence: Synthetic oligonucleotide
gcaugccugaggugagagg

SEQ ID NO: 1612074 - RNA, 19 nt, Artificial Sequence
  Description of Artificial Sequence: Synthetic oligonucleotide
cucuggccauaaaggauga

SEQ ID NO: 1612075 - RNA, 19 nt, Artificial Sequence
  Description of Artificial Sequence: Synthetic oligonucleotide
cgugcagugggacacccgc

SEQ ID NO: 1612076 - RNA, 19 nt, Artificial Sequence
  Description of Artificial Sequence: Synthetic oligonucleotide
cacaggucuccaugccgug

SEQ ID NO: 1612077 - RNA, 19 nt, Artificial Sequence
  Description of Artificial Sequence: Synthetic oligonucleotide
ggaaggcgagcuuggcagc

SEQ ID NO: 1612078 - RNA, 19 nt, Artificial Sequence
  Description of Artificial Sequence: Synthetic oligonucleotide
gagaaccguguaccuggca

SEQ ID NO: 1612079 - RNA, 19 nt, Artificial Sequence
  Description of Artificial Sequence: Synthetic oligonucleotide
ucgcgcuggccguacugga

SEQ ID NO: 1612080 - RNA, 19 nt, Artificial Sequence
  Description of Artificial Sequence: Synthetic oligonucleotide
gcucauggcccauggggug

SEQ ID NO: 1612081 - RNA, 19 nt, Artificial Sequence
  Description of Artificial Sequence: Synthetic oligonucleotide
caccgcguugccgugcgag

SEQ ID NO: 1612082 - RNA, 19 nt, Artificial Sequence
  Description of Artificial Sequence: Synthetic oligonucleotide
aaggcgagcuuggcagcga

SEQ ID NO: 1612083 - RNA, 19 nt, Artificial Sequence
  Description of Artificial Sequence: Synthetic oligonucleotide
cacguagaagcugcacauc

SEQ ID NO: 1612084 - RNA, 19 nt, Artificial Sequence
  Description of Artificial Sequence: Synthetic oligonucleotide
gugccagcccaugugagaa

SEQ ID NO: 1612085 - RNA, 19 nt, Artificial Sequence
  Description of Artificial Sequence: Synthetic oligonucleotide
agccgaugcgcgugcccag

SEQ ID NO: 1612086 - RNA, 19 nt, Artificial Sequence
  Description of Artificial Sequence: Synthetic oligonucleotide
accgcguugccgugcgaga

SEQ ID NO: 1612087 - RNA, 19 nt, Artificial Sequence
  Description of Artificial Sequence: Synthetic oligonucleotide
ccguguaccuggcaccggg

SEQ ID NO: 1612088 - RNA, 19 nt, Artificial Sequence
  Description of Artificial Sequence: Synthetic oligonucleotide
gcgcuggccguacuggaag

SEQ ID NO: 1612089 - RNA, 19 nt, Artificial Sequence
  Description of Artificial Sequence: Synthetic oligonucleotide
uccguccgucugucccucg

SEQ ID NO: 1612090 - RNA, 19 nt, Artificial Sequence
  Description of Artificial Sequence: Synthetic oligonucleotide
ggccgcacaccucagucca

SEQ ID NO: 1612091 - RNA, 19 nt, Artificial Sequence
  Description of Artificial Sequence: Synthetic oligonucleotide
cgugccguggaugaugagc

SEQ ID NO: 1612092 - RNA, 19 nt, Artificial Sequence
  Description of Artificial Sequence: Synthetic oligonucleotide
gaguaggguccugggcgcc

SEQ ID NO: 1612093 - RNA, 19 nt, Artificial Sequence
  Description of Artificial Sequence: Synthetic oligonucleotide
ccgucugucccucgggacc

SEQ ID NO: 1612094 - RNA, 19 nt, Artificial Sequence
  Description of Artificial Sequence: Synthetic oligonucleotide
aggcggcaucaaugucagc

SEQ ID NO: 1612095 - RNA, 19 nt, Artificial Sequence
  Description of Artificial Sequence: Synthetic oligonucleotide
gugggacacccgccgcccg

SEQ ID NO: 1612096 - RNA, 19 nt, Artificial Sequence
  Description of Artificial Sequence: Synthetic oligonucleotide
gcugaugccguagcccgag

SEQ ID NO: 1612097 - RNA, 19 nt, Artificial Sequence
  Description of Artificial Sequence: Synthetic oligonucleotide
ggcaaugcgguuggcgcgc

SEQ ID NO: 1612098 - RNA, 19 nt, Artificial Sequence
  Description of Artificial Sequence: Synthetic oligonucleotide
cguaaucuucgacaccuuc

SEQ ID NO: 1612099 - RNA, 19 nt, Artificial Sequence
  Description of Artificial Sequence: Synthetic oligonucleotide
gccgaguaggguccugggc

SEQ ID NO: 1612100 - RNA, 19 nt, Artificial Sequence
  Description of Artificial Sequence: Synthetic oligonucleotide
cagugaguaggugggcuca

SEQ ID NO: 1612101 - RNA, 19 nt, Artificial Sequence
  Description of Artificial Sequence: Synthetic oligonucleotide
gcuaggugcguuggcuggg

SEQ ID NO: 1612102 - RNA, 19 nt, Artificial Sequence
  Description of Artificial Sequence: Synthetic oligonucleotide
cuggccguacuggaaguca

SEQ ID NO: 1612103 - RNA, 19 nt, Artificial Sequence
  Description of Artificial Sequence: Synthetic oligonucleotide
ggcuuggcuaggugcguug

SEQ ID NO: 1612104 - RNA, 19 nt, Artificial Sequence
  Description of Artificial Sequence: Synthetic oligonucleotide
gcaccgggaacgcagcgca

SEQ ID NO: 1612105 - RNA, 19 nt, Artificial Sequence
  Description of Artificial Sequence: Synthetic oligonucleotide
aggcgagcuuggcagcgau

SEQ ID NO: 1612106 - RNA, 19 nt, Artificial Sequence
  Description of Artificial Sequence: Synthetic oligonucleotide
ugcgguuggcgcgcgcgcu

SEQ ID NO: 1612107 - RNA, 19 nt, Artificial Sequence
  Description of Artificial Sequence: Synthetic oligonucleotide
ucuggccauaaaggaugau

SEQ ID NO: 1612108 - RNA, 19 nt, Artificial Sequence
  Description of Artificial Sequence: Synthetic oligonucleotide
auggggugccgaguagggu

SEQ ID NO: 1612109 - RNA, 19 nt, Artificial Sequence
  Description of Artificial Sequence: Synthetic oligonucleotide
ggggcgggagugcuuugag

SEQ ID NO: 1612110 - RNA, 19 nt, Artificial Sequence
  Description of Artificial Sequence: Synthetic oligonucleotide
ccggcagagggcuguacug

SEQ ID NO: 1612111 - RNA, 19 nt, Artificial Sequence
  Description of Artificial Sequence: Synthetic oligonucleotide
ggccgcacuccauggcucc

SEQ ID NO: 1612112 - RNA, 19 nt, Artificial Sequence
  Description of Artificial Sequence: Synthetic oligonucleotide
cugguucggguaccaguga

SEQ ID NO: 1612113 - RNA, 19 nt, Artificial Sequence
  Description of Artificial Sequence: Synthetic oligonucleotide
cugggcgccgggucacaug

SEQ ID NO: 1612114 - RNA, 19 nt, Artificial Sequence
  Description of Artificial Sequence: Synthetic oligonucleotide
gcgagugcaggaccaccgc

SEQ ID NO: 1612115 - RNA, 19 nt, Artificial Sequence
  Description of Artificial Sequence: Synthetic oligonucleotide
ggggcugaugccguaccug

SEQ ID NO: 1612116 - RNA, 19 nt, Artificial Sequence
  Description of Artificial Sequence: Synthetic oligonucleotide
cagcacacucauagcgcga

SEQ ID NO: 1612117 - RNA, 19 nt, Artificial Sequence
  Description of Artificial Sequence: Synthetic oligonucleotide
ugcagccgaugcgcgugcc

SEQ ID NO: 1612118 - RNA, 19 nt, Artificial Sequence
  Description of Artificial Sequence: Synthetic oligonucleotide
ggggugccgaguagggucc

SEQ ID NO: 1612119 - RNA, 19 nt, Artificial Sequence
  Description of Artificial Sequence: Synthetic oligonucleotide
ggccauaaaggaugaugcu

SEQ ID NO: 1612120 - RNA, 19 nt, Artificial Sequence
  Description of Artificial Sequence: Synthetic oligonucleotide
gaggggcgggagugcuuug

SEQ ID NO: 1612121 - RNA, 19 nt, Artificial Sequence
  Description of Artificial Sequence: Synthetic oligonucleotide
caaugcgguuggcgcgcgc

SEQ ID NO: 1612122 - RNA, 19 nt, Artificial Sequence
  Description of Artificial Sequence: Synthetic oligonucleotide
accuggugcgaagggccug

SEQ ID NO: 1612123 - RNA, 19 nt, Artificial Sequence
  Description of Artificial Sequence: Synthetic oligonucleotide
cgggagugcuuugagacac

SEQ ID NO: 1612124 - RNA, 19 nt, Artificial Sequence
  Description of Artificial Sequence: Synthetic oligonucleotide
caggccguucauggcgggc

SEQ ID NO: 1612125 - RNA, 19 nt, Artificial Sequence
  Description of Artificial Sequence: Synthetic oligonucleotide
guuggcgcgcgcgcucuug

SEQ ID NO: 1612126 - RNA, 19 nt, Artificial Sequence
  Description of Artificial Sequence: Synthetic oligonucleotide
gccacccgcaugccugagg

SEQ ID NO: 1612127 - RNA, 19 nt, Artificial Sequence
  Description of Artificial Sequence: Synthetic oligonucleotide
ccgacaggccguucauggc

SEQ ID NO: 1612128 - RNA, 19 nt, Artificial Sequence
  Description of Artificial Sequence: Synthetic oligonucleotide
ggcaccgggaacgcagcgc

SEQ ID NO: 1612129 - RNA, 19 nt, Artificial Sequence
  Description of Artificial Sequence: Synthetic oligonucleotide
cagcgaugcggcccgggca

SEQ ID NO: 1612130 - RNA, 19 nt, Artificial Sequence
  Description of Artificial Sequence: Synthetic oligonucleotide
ggcugagguccgcagggga

SEQ ID NO: 1612131 - RNA, 19 nt, Artificial Sequence
  Description of Artificial Sequence: Synthetic oligonucleotide
gcgaagggccugccaggcg

SEQ ID NO: 1612132 - RNA, 19 nt, Artificial Sequence
  Description of Artificial Sequence: Synthetic oligonucleotide
gagcaccggugacguaauc

SEQ ID NO: 1612133 - RNA, 19 nt, Artificial Sequence
  Description of Artificial Sequence: Synthetic oligonucleotide
gacacccgccgcccgcguc

SEQ ID NO: 1612134 - RNA, 19 nt, Artificial Sequence
  Description of Artificial Sequence: Synthetic oligonucleotide
caccgacaggccguucaug

SEQ ID NO: 1612135 - RNA, 19 nt, Artificial Sequence
  Description of Artificial Sequence: Synthetic oligonucleotide
cacccgcaugccugaggug

SEQ ID NO: 1612136 - RNA, 19 nt, Artificial Sequence
  Description of Artificial Sequence: Synthetic oligonucleotide
ccguaccuggugcgaaggg

SEQ ID NO: 1612137 - RNA, 19 nt, Artificial Sequence
  Description of Artificial Sequence: Synthetic oligonucleotide
gugacggcugagguccgca

SEQ ID NO: 1612138 - RNA, 19 nt, Artificial Sequence
  Description of Artificial Sequence: Synthetic oligonucleotide
augccguaccuggugcgaa

SEQ ID NO: 1612139 - RNA, 19 nt, Artificial Sequence
  Description of Artificial Sequence: Synthetic oligonucleotide
gaugagcaccggugacgua

SEQ ID NO: 1612140 - RNA, 19 nt, Artificial Sequence
  Description of Artificial Sequence: Synthetic oligonucleotide
cacaugcagucccggcaga

SEQ ID NO: 1612141 - RNA, 19 nt, Artificial Sequence
  Description of Artificial Sequence: Synthetic oligonucleotide
caccgggaacgcagcgcac

SEQ ID NO: 1612142 - RNA, 19 nt, Artificial Sequence
  Description of Artificial Sequence: Synthetic oligonucleotide
uggcgcgcgcgcucuuggu

SEQ ID NO: 1612143 - RNA, 19 nt, Artificial Sequence
  Description of Artificial Sequence: Synthetic oligonucleotide
cccaugugagaagucgauc

SEQ ID NO: 1612144 - RNA, 19 nt, Artificial Sequence
  Description of Artificial Sequence: Synthetic oligonucleotide
ccaaggcgaacccucggga

SEQ ID NO: 1612145 - RNA, 19 nt, Artificial Sequence
  Description of Artificial Sequence: Synthetic oligonucleotide
ccuggugcgaagggccugc

SEQ ID NO: 1612146 - RNA, 19 nt, Artificial Sequence
  Description of Artificial Sequence: Synthetic oligonucleotide
cucgcgggccgcacaccuc

SEQ ID NO: 1612147 - RNA, 19 nt, Artificial Sequence
  Description of Artificial Sequence: Synthetic oligonucleotide
ugcguuggcugggcagcuc

SEQ ID NO: 1612148 - RNA, 19 nt, Artificial Sequence
  Description of Artificial Sequence: Synthetic oligonucleotide
cgaacccucgggagccucg

SEQ ID NO: 1612149 - RNA, 19 nt, Artificial Sequence
  Description of Artificial Sequence: Synthetic oligonucleotide
cgggucacaugcagucccg

SEQ ID NO: 1612150 - RNA, 19 nt, Artificial Sequence
  Description of Artificial Sequence: Synthetic oligonucleotide
gcgcucuuggucaggaaaa

SEQ ID NO: 1612151 - RNA, 19 nt, Artificial Sequence
  Description of Artificial Sequence: Synthetic oligonucleotide
augcgcgugcccaggccca

SEQ ID NO: 1612152 - RNA, 19 nt, Artificial Sequence
  Description of Artificial Sequence: Synthetic oligonucleotide
gaggucccuguggcuuggc

SEQ ID NO: 1612153 - RNA, 19 nt, Artificial Sequence
  Description of Artificial Sequence: Synthetic oligonucleotide
ggcucauggcccauggggu

SEQ ID NO: 1612154 - RNA, 19 nt, Artificial Sequence
  Description of Artificial Sequence: Synthetic oligonucleotide
gggcgggagugcuuugaga

SEQ ID NO: 1612155 - RNA, 19 nt, Artificial Sequence
  Description of Artificial Sequence: Synthetic oligonucleotide
gggagugcuuugagacacc

SEQ ID NO: 1612156 - RNA, 19 nt, Artificial Sequence
  Description of Artificial Sequence: Synthetic oligonucleotide
cccgcaugccugaggugag

SEQ ID NO: 1612157 - RNA, 19 nt, Artificial Sequence
  Description of Artificial Sequence: Synthetic oligonucleotide
gcaccggugacguaaucuu

SEQ ID NO: 1612158 - RNA, 19 nt, Artificial Sequence
  Description of Artificial Sequence: Synthetic oligonucleotide
gccggccagagcugaugcc

SEQ ID NO: 1612159 - RNA, 19 nt, Artificial Sequence
  Description of Artificial Sequence: Synthetic oligonucleotide
cugcacaucuggcccagau

SEQ ID NO: 1612160 - RNA, 19 nt, Artificial Sequence
  Description of Artificial Sequence: Synthetic oligonucleotide
cuucuccgagggccggcca

SEQ ID NO: 1612161 - RNA, 19 nt, Artificial Sequence
  Description of Artificial Sequence: Synthetic oligonucleotide
cagucccggcagagggcug

SEQ ID NO: 1612162 - RNA, 19 nt, Artificial Sequence
  Description of Artificial Sequence: Synthetic oligonucleotide
acguaaucuucgacaccuu

SEQ ID NO: 1612163 - RNA, 19 nt, Artificial Sequence
  Description of Artificial Sequence: Synthetic oligonucleotide
ccgugcagugggacacccg

SEQ ID NO: 1612164 - RNA, 19 nt, Artificial Sequence
  Description of Artificial Sequence: Synthetic oligonucleotide
gcaaugcgguuggcgcgcg

SEQ ID NO: 1612165 - RNA, 19 nt, Artificial Sequence
  Description of Artificial Sequence: Synthetic oligonucleotide
cccauggggugccgaguag

SEQ ID NO: 1612166 - RNA, 19 nt, Artificial Sequence
  Description of Artificial Sequence: Synthetic oligonucleotide
cgcaugccugaggugagag

SEQ ID NO: 1612167 - RNA, 19 nt, Artificial Sequence
  Description of Artificial Sequence: Synthetic oligonucleotide
cucgggagccucgcagcca

SEQ ID NO: 1612168 - RNA, 19 nt, Artificial Sequence
  Description of Artificial Sequence: Synthetic oligonucleotide
ggggccgcacuccauggcu

SEQ ID NO: 1612169 - RNA, 19 nt, Artificial Sequence
  Description of Artificial Sequence: Synthetic oligonucleotide
gccgugcagugggacaccc

SEQ ID NO: 1612170 - RNA, 19 nt, Artificial Sequence
  Description of Artificial Sequence: Synthetic oligonucleotide
gcgcacauacaugcaggca

SEQ ID NO: 1612171 - RNA, 19 nt, Artificial Sequence
  Description of Artificial Sequence: Synthetic oligonucleotide
ggugacggcugagguccgc

SEQ ID NO: 1612172 - RNA, 19 nt, Artificial Sequence
  Description of Artificial Sequence: Synthetic oligonucleotide
cggugacguaaucuucgac

SEQ ID NO: 1612173 - RNA, 19 nt, Artificial Sequence
  Description of Artificial Sequence: Synthetic oligonucleotide
gguucggguaccagugagu

SEQ ID NO: 1612174 - RNA, 19 nt, Artificial Sequence
  Description of Artificial Sequence: Synthetic oligonucleotide
accuggcaccgggaacgca

SEQ ID NO: 1612175 - RNA, 19 nt, Artificial Sequence
  Description of Artificial Sequence: Synthetic oligonucleotide
uggcagcgaugcggcccgg

SEQ ID NO: 1612176 - RNA, 19 nt, Artificial Sequence
  Description of Artificial Sequence: Synthetic oligonucleotide
ccggugacguaaucuucga

SEQ ID NO: 1612177 - RNA, 19 nt, Artificial Sequence
  Description of Artificial Sequence: Synthetic oligonucleotide
ccgcgcugggccaggggag

SEQ ID NO: 1612178 - RNA, 19 nt, Artificial Sequence
  Description of Artificial Sequence: Synthetic oligonucleotide
gcccauggggugccgagua

SEQ ID NO: 1612179 - RNA, 19 nt, Artificial Sequence
  Description of Artificial Sequence: Synthetic oligonucleotide
gugguccaaggcgaacccu

SEQ ID NO: 1612180 - RNA, 19 nt, Artificial Sequence
  Description of Artificial Sequence: Synthetic oligonucleotide
ggaacgcagcgcacauaca

SEQ ID NO: 1612181 - RNA, 19 nt, Artificial Sequence
  Description of Artificial Sequence: Synthetic oligonucleotide
ccaugccgugcagugggac

SEQ ID NO: 1612182 - RNA, 19 nt, Artificial Sequence
  Description of Artificial Sequence: Synthetic oligonucleotide
ggcgagcuuggcagcgaug

SEQ ID NO: 1612183 - RNA, 19 nt, Artificial Sequence
  Description of Artificial Sequence: Synthetic oligonucleotide
ccgcacuccauggcucccg

SEQ ID NO: 1612184 - RNA, 19 nt, Artificial Sequence
  Description of Artificial Sequence: Synthetic oligonucleotide
gcgggcacggggcccgcgc

SEQ ID NO: 1612185 - RNA, 19 nt, Artificial Sequence
  Description of Artificial Sequence: Synthetic oligonucleotide
cgcgcucuuggucaggaaa

SEQ ID NO: 1612186 - RNA, 19 nt, Artificial Sequence
  Description of Artificial Sequence: Synthetic oligonucleotide
cgcucuuggucaggaaaac

SEQ ID NO: 1612187 - RNA, 19 nt, Artificial Sequence
  Description of Artificial Sequence: Synthetic oligonucleotide
ggugccgaguaggguccug

SEQ ID NO: 1612188 - RNA, 19 nt, Artificial Sequence
  Description of Artificial Sequence: Synthetic oligonucleotide
ccacccgcaugccugaggu

SEQ ID NO: 1612189 - RNA, 19 nt, Artificial Sequence
  Description of Artificial Sequence: Synthetic oligonucleotide
cagcucgcgcuggccguac

SEQ ID NO: 1612190 - RNA, 19 nt, Artificial Sequence
  Description of Artificial Sequence: Synthetic oligonucleotide
gggugacggcugagguccg

SEQ ID NO: 1612191 - RNA, 19 nt, Artificial Sequence
  Description of Artificial Sequence: Synthetic oligonucleotide
cgagugcaggaccaccgca

SEQ ID NO: 1612192 - RNA, 19 nt, Artificial Sequence
  Description of Artificial Sequence: Synthetic oligonucleotide
ccccaccgggcccaggcuc

SEQ ID NO: 1612193 - RNA, 19 nt, Artificial Sequence
  Description of Artificial Sequence: Synthetic oligonucleotide
cguugugcccggcucccuc

SEQ ID NO: 1612194 - RNA, 19 nt, Artificial Sequence
  Description of Artificial Sequence: Synthetic oligonucleotide
gggccgcacuccauggcuc

SEQ ID NO: 1612195 - RNA, 19 nt, Artificial Sequence
  Description of Artificial Sequence: Synthetic oligonucleotide
gcucgcgggccgcacaccu

SEQ ID NO: 1612196 - RNA, 19 nt, Artificial Sequence
  Description of Artificial Sequence: Synthetic oligonucleotide
ccgcggccuggccccaucg

SEQ ID NO: 1612197 - RNA, 19 nt, Artificial Sequence
  Description of Artificial Sequence: Synthetic oligonucleotide
cacggccuucgggcagcgc

SEQ ID NO: 1612198 - RNA, 19 nt, Artificial Sequence
  Description of Artificial Sequence: Synthetic oligonucleotide
gcgguuggcgcgcgcgcuc

SEQ ID NO: 1612199 - RNA, 19 nt, Artificial Sequence
  Description of Artificial Sequence: Synthetic oligonucleotide
gguccgcaggggacccgag

SEQ ID NO: 1612200 - RNA, 19 nt, Artificial Sequence
  Description of Artificial Sequence: Synthetic oligonucleotide
gcccgcgcugggccagggg

SEQ ID NO: 1612201 - RNA, 19 nt, Artificial Sequence
  Description of Artificial Sequence: Synthetic oligonucleotide
gccccugcguccguccguc

SEQ ID NO: 1612202 - RNA, 19 nt, Artificial Sequence
  Description of Artificial Sequence: Synthetic oligonucleotide
cguguaccuggcaccggga

SEQ ID NO: 1612203 - RNA, 19 nt, Artificial Sequence
  Description of Artificial Sequence: Synthetic oligonucleotide
cgcagcgcacauacaugca

SEQ ID NO: 1612204 - RNA, 19 nt, Artificial Sequence
  Description of Artificial Sequence: Synthetic oligonucleotide
cgaugcggcccgggcaggg

SEQ ID NO: 1612205 - RNA, 19 nt, Artificial Sequence
  Description of Artificial Sequence: Synthetic oligonucleotide
guccgccccugcguccguc

SEQ ID NO: 1612206 - RNA, 19 nt, Artificial Sequence
  Description of Artificial Sequence: Synthetic oligonucleotide
ggccacccgcaugccugag

SEQ ID NO: 1612207 - RNA, 19 nt, Artificial Sequence
  Description of Artificial Sequence: Synthetic oligonucleotide
gcgaacccucgggagccuc

SEQ ID NO: 1612208 - RNA, 19 nt, Artificial Sequence
  Description of Artificial Sequence: Synthetic oligonucleotide
cccggcagagggcuguacu

SEQ ID NO: 1612209 - RNA, 19 nt, Artificial Sequence
  Description of Artificial Sequence: Synthetic oligonucleotide
agggccggccagagcugau

SEQ ID NO: 1612210 - RNA, 19 nt, Artificial Sequence
  Description of Artificial Sequence: Synthetic oligonucleotide
ccaccgccgcuccgccgcg

SEQ ID NO: 1612211 - RNA, 19 nt, Artificial Sequence
  Description of Artificial Sequence: Synthetic oligonucleotide
ggcccacguagaagcugca

SEQ ID NO: 1612212 - RNA, 19 nt, Artificial Sequence
  Description of Artificial Sequence: Synthetic oligonucleotide
cgcggccgagccuccugag

SEQ ID NO: 1612213 - RNA, 19 nt, Artificial Sequence
  Description of Artificial Sequence: Synthetic oligonucleotide
cacgcucugucagguggau

SEQ ID NO: 1612214 - RNA, 19 nt, Artificial Sequence
  Description of Artificial Sequence: Synthetic oligonucleotide
gcgcgcgcucuuggucagg

SEQ ID NO: 1612215 - RNA, 19 nt, Artificial Sequence
  Description of Artificial Sequence: Synthetic oligonucleotide
ggaccgcggccgagccucc

SEQ ID NO: 1612216 - RNA, 19 nt, Artificial Sequence
  Description of Artificial Sequence: Synthetic oligonucleotide
ccgcguugccgugcgagaa

SEQ ID NO: 1612217 - RNA, 19 nt, Artificial Sequence
  Description of Artificial Sequence: Synthetic oligonucleotide
ccgcggccgagccuccuga

SEQ ID NO: 1612218 - RNA, 19 nt, Artificial Sequence
  Description of Artificial Sequence: Synthetic oligonucleotide
cacauggcucauggcccau

SEQ ID NO: 1612219 - RNA, 19 nt, Artificial Sequence
  Description of Artificial Sequence: Synthetic oligonucleotide
ccucgggaccgcggccgag

SEQ ID NO: 1612220 - RNA, 19 nt, Artificial Sequence
  Description of Artificial Sequence: Synthetic oligonucleotide
ccgcaugccugaggugaga

SEQ ID NO: 1612221 - RNA, 19 nt, Artificial Sequence
  Description of Artificial Sequence: Synthetic oligonucleotide
ccgcacaccucaguccagu

SEQ ID NO: 1612222 - RNA, 19 nt, Artificial Sequence
  Description of Artificial Sequence: Synthetic oligonucleotide
gggcgccgggucacaugca

SEQ ID NO: 1612223 - RNA, 19 nt, Artificial Sequence
  Description of Artificial Sequence: Synthetic oligonucleotide
gcgugcccaggcccacgua

SEQ ID NO: 1612224 - RNA, 19 nt, Artificial Sequence
  Description of Artificial Sequence: Synthetic oligonucleotide
gccccaccgggcccaggcu

SEQ ID NO: 1612225 - RNA, 19 nt, Artificial Sequence
  Description of Artificial Sequence: Synthetic oligonucleotide
cccucgggaccgcggccga

SEQ ID NO: 1612226 - RNA, 19 nt, Artificial Sequence
  Description of Artificial Sequence: Synthetic oligonucleotide
ggcgaacccucgggagccu

SEQ ID NO: 1612227 - RNA, 19 nt, Artificial Sequence
  Description of Artificial Sequence: Synthetic oligonucleotide
gggugccgaguaggguccu

SEQ ID NO: 1612228 - RNA, 19 nt, Artificial Sequence
  Description of Artificial Sequence: Synthetic oligonucleotide
gguuggcgcgcgcgcucuu

SEQ ID NO: 1612229 - RNA, 19 nt, Artificial Sequence
  Description of Artificial Sequence: Synthetic oligonucleotide
cgcgugcccaggcccacgu

SEQ ID NO: 1612230 - RNA, 19 nt, Artificial Sequence
  Description of Artificial Sequence: Synthetic oligonucleotide
cgcacaccucaguccaguu

SEQ ID NO: 1612231 - RNA, 19 nt, Artificial Sequence
  Description of Artificial Sequence: Synthetic oligonucleotide
ccugggcgccgggucacau

SEQ ID NO: 1612232 - RNA, 19 nt, Artificial Sequence
  Description of Artificial Sequence: Synthetic oligonucleotide
ccuccgugccguggaugau

SEQ ID NO: 1612233 - RNA, 19 nt, Artificial Sequence
  Description of Artificial Sequence: Synthetic oligonucleotide
cgguuggcgcgcgcgcucu

SEQ ID NO: 1612234 - RNA, 19 nt, Artificial Sequence
  Description of Artificial Sequence: Synthetic oligonucleotide
cgggcacggggcccgcgcu

SEQ ID NO: 1612235 - RNA, 19 nt, Artificial Sequence
  Description of Artificial Sequence: Synthetic oligonucleotide
cgccccugcguccguccgu

SEQ ID NO: 1612236 - RNA, 19 nt, Artificial Sequence
  Description of Artificial Sequence: Synthetic oligonucleotide
cguccgccccugcguccgu

SEQ ID NO: 1612237 - RNA, 19 nt, Artificial Sequence
  Description of Artificial Sequence: Synthetic oligonucleotide
auaacaaucauuaagaugc

SEQ ID NO: 1612238 - RNA, 19 nt, Artificial Sequence
  Description of Artificial Sequence: Synthetic oligonucleotide
aauacgaauuuucagaugg

SEQ ID NO: 1612239 - RNA, 19 nt, Artificial Sequence
  Description of Artificial Sequence: Synthetic oligonucleotide
aguaauaacaaucauuaag

SEQ ID NO: 1612240 - RNA, 19 nt, Artificial Sequence
  Description of Artificial Sequence: Synthetic oligonucleotide
aaacuaagcuaauagcccc

SEQ ID NO: 1612241 - RNA, 19 nt, Artificial Sequence
  Description of Artificial Sequence: Synthetic oligonucleotide
aucauuaagaugcaguggc

SEQ ID NO: 1612242 - RNA, 19 nt, Artificial Sequence
  Description of Artificial Sequence: Synthetic oligonucleotide
aaagauuguagugacauac

SEQ ID NO: 1612243 - RNA, 19 nt, Artificial Sequence
  Description of Artificial Sequence: Synthetic oligonucleotide
uuuaauugaccucagaaga

SEQ ID NO: 1612244 - RNA, 19 nt, Artificial Sequence
  Description of Artificial Sequence: Synthetic oligonucleotide
aacaaaagauuguagugac

SEQ ID NO: 1612245 - RNA, 19 nt, Artificial Sequence
  Description of Artificial Sequence: Synthetic oligonucleotide
agauacaagauuuauucac

SEQ ID NO: 1612246 - RNA, 19 nt, Artificial Sequence
  Description of Artificial Sequence: Synthetic oligonucleotide
uguguaguaacaguaaugg

SEQ ID NO: 1612247 - RNA, 19 nt, Artificial Sequence
  Description of Artificial Sequence: Synthetic oligonucleotide
uuuuaauugaccucagaag

SEQ ID NO: 1612248 - RNA, 19 nt, Artificial Sequence
  Description of Artificial Sequence: Synthetic oligonucleotide
aaaguaauaacaaucauua

SEQ ID NO: 1612249 - RNA, 19 nt, Artificial Sequence
  Description of Artificial Sequence: Synthetic oligonucleotide
aagauuuauucacaccaac

SEQ ID NO: 1612250 - RNA, 19 nt, Artificial Sequence
  Description of Artificial Sequence: Synthetic oligonucleotide
auuaucuauuuucuucucc

SEQ ID NO: 1612251 - RNA, 19 nt, Artificial Sequence
  Description of Artificial Sequence: Synthetic oligonucleotide
aacuagcuugucuucaugg

SEQ ID NO: 1612252 - RNA, 19 nt, Artificial Sequence
  Description of Artificial Sequence: Synthetic oligonucleotide
ucuuuuauccauguaaaag

SEQ ID NO: 1612253 - RNA, 19 nt, Artificial Sequence
  Description of Artificial Sequence: Synthetic oligonucleotide
gaaauguggaacuuccuag

SEQ ID NO: 1612254 - RNA, 19 nt, Artificial Sequence
  Description of Artificial Sequence: Synthetic oligonucleotide
aauguggaacuuccuagac

SEQ ID NO: 1612255 - RNA, 19 nt, Artificial Sequence
  Description of Artificial Sequence: Synthetic oligonucleotide
aagaacagaggcaaaguac

SEQ ID NO: 1612256 - RNA, 19 nt, Artificial Sequence
  Description of Artificial Sequence: Synthetic oligonucleotide
uguauguuugcuguaaugc

SEQ ID NO: 1612257 - RNA, 19 nt, Artificial Sequence
  Description of Artificial Sequence: Synthetic oligonucleotide
gaagcuuuuagguuacaag

SEQ ID NO: 1612258 - RNA, 19 nt, Artificial Sequence
  Description of Artificial Sequence: Synthetic oligonucleotide
aagccaaacugucaccucg

SEQ ID NO: 1612259 - RNA, 19 nt, Artificial Sequence
  Description of Artificial Sequence: Synthetic oligonucleotide
auacaagauuuauucacac

SEQ ID NO: 1612260 - RNA, 19 nt, Artificial Sequence
  Description of Artificial Sequence: Synthetic oligonucleotide
cuuccuuacucuuagaguc

SEQ ID NO: 1612261 - RNA, 19 nt, Artificial Sequence
  Description of Artificial Sequence: Synthetic oligonucleotide
acuagcuuucuguuugugc

SEQ ID NO: 1612262 - RNA, 19 nt, Artificial Sequence
  Description of Artificial Sequence: Synthetic oligonucleotide
uguaguugcuccuuggcug

SEQ ID NO: 1612263 - RNA, 19 nt, Artificial Sequence
  Description of Artificial Sequence: Synthetic oligonucleotide
agacucaucagaauggugg

SEQ ID NO: 1612264 - RNA, 19 nt, Artificial Sequence
  Description of Artificial Sequence: Synthetic oligonucleotide
acuugguucauccagcuga

SEQ ID NO: 1612265 - RNA, 19 nt, Artificial Sequence
  Description of Artificial Sequence: Synthetic oligonucleotide
uugaccgcaguccauaagc

SEQ ID NO: 1612266 - RNA, 19 nt, Artificial Sequence
  Description of Artificial Sequence: Synthetic oligonucleotide
ucucuuuuaauugaccuca

SEQ ID NO: 1612267 - RNA, 19 nt, Artificial Sequence
  Description of Artificial Sequence: Synthetic oligonucleotide
uaauggacucaucagacuc

SEQ ID NO: 1612268 - RNA, 19 nt, Artificial Sequence
  Description of Artificial Sequence: Synthetic oligonucleotide
aaaagcaaaguaaggagcu

SEQ ID NO: 1612269 - RNA, 19 nt, Artificial Sequence
  Description of Artificial Sequence: Synthetic oligonucleotide
gauuuauucacaccaacaa

SEQ ID NO: 1612270 - RNA, 19 nt, Artificial Sequence
  Description of Artificial Sequence: Synthetic oligonucleotide
uaagcuaauagccccaaau

SEQ ID NO: 1612271 - RNA, 19 nt, Artificial Sequence
  Description of Artificial Sequence: Synthetic oligonucleotide
uguuuguguaguaacagua

SEQ ID NO: 1612272 - RNA, 19 nt, Artificial Sequence
  Description of Artificial Sequence: Synthetic oligonucleotide
aaauguggaacuuccuaga

SEQ ID NO: 1612273 - RNA, 19 nt, Artificial Sequence
  Description of Artificial Sequence: Synthetic oligonucleotide
gagcaguuaauauucuugc

SEQ ID NO: 1612274 - RNA, 19 nt, Artificial Sequence
  Description of Artificial Sequence: Synthetic oligonucleotide
uuguguaguaacaguaaug

SEQ ID NO: 1612275 - RNA, 19 nt, Artificial Sequence
  Description of Artificial Sequence: Synthetic oligonucleotide
aaauacgaauuuucagaug

SEQ ID NO: 1612276 - RNA, 19 nt, Artificial Sequence
  Description of Artificial Sequence: Synthetic oligonucleotide
augacuagcuuucuguuug

SEQ ID NO: 1612277 - RNA, 19 nt, Artificial Sequence
  Description of Artificial Sequence: Synthetic oligonucleotide
ucauggagcaacaaacuaa

SEQ ID NO: 1612278 - RNA, 19 nt, Artificial Sequence
  Description of Artificial Sequence: Synthetic oligonucleotide
ugcuuuggaacuuuccuug

SEQ ID NO: 1612279 - RNA, 19 nt, Artificial Sequence
  Description of Artificial Sequence: Synthetic oligonucleotide
aaucgucagauucaucaga

SEQ ID NO: 1612280 - RNA, 19 nt, Artificial Sequence
  Description of Artificial Sequence: Synthetic oligonucleotide
gaggacacgacauucugug

SEQ ID NO: 1612281 - RNA, 19 nt, Artificial Sequence
  Description of Artificial Sequence: Synthetic oligonucleotide
ggaaauacgaauuuucaga

SEQ ID NO: 1612282 - RNA, 19 nt, Artificial Sequence
  Description of Artificial Sequence: Synthetic oligonucleotide
uuugcuucugagauggguc

SEQ ID NO: 1612283 - RNA, 19 nt, Artificial Sequence
  Description of Artificial Sequence: Synthetic oligonucleotide
uuucauggagcaacaaacu

SEQ ID NO: 1612284 - RNA, 19 nt, Artificial Sequence
  Description of Artificial Sequence: Synthetic oligonucleotide
ucagacgauggacaaccgg

SEQ ID NO: 1612285 - RNA, 19 nt, Artificial Sequence
  Description of Artificial Sequence: Synthetic oligonucleotide
uuauagauucucuuuuauc

SEQ ID NO: 1612286 - RNA, 19 nt, Artificial Sequence
  Description of Artificial Sequence: Synthetic oligonucleotide
uuuucagaugguuaauguc

SEQ ID NO: 1612287 - RNA, 19 nt, Artificial Sequence
  Description of Artificial Sequence: Synthetic oligonucleotide
caucagacucaucagaaug

SEQ ID NO: 1612288 - RNA, 19 nt, Artificial Sequence
  Description of Artificial Sequence: Synthetic oligonucleotide
aacucucuauuucauggga

SEQ ID NO: 1612289 - RNA, 19 nt, Artificial Sequence
  Description of Artificial Sequence: Synthetic oligonucleotide
uacaagauuuauucacacc

SEQ ID NO: 1612290 - RNA, 19 nt, Artificial Sequence
  Description of Artificial Sequence: Synthetic oligonucleotide
gaugggucgguuuccagcc

SEQ ID NO: 1612291 - RNA, 19 nt, Artificial Sequence
  Description of Artificial Sequence: Synthetic oligonucleotide
uuaauugaccucagaagau

SEQ ID NO: 1612292 - RNA, 19 nt, Artificial Sequence
  Description of Artificial Sequence: Synthetic oligonucleotide
ggaaucgucagauucauca

SEQ ID NO: 1612293 - RNA, 19 nt, Artificial Sequence
  Description of Artificial Sequence: Synthetic oligonucleotide
aaaguaaggagcugugguu

SEQ ID NO: 1612294 - RNA, 19 nt, Artificial Sequence
  Description of Artificial Sequence: Synthetic oligonucleotide
ucuugcuuagcccucacua

SEQ ID NO: 1612295 - RNA, 19 nt, Artificial Sequence
  Description of Artificial Sequence: Synthetic oligonucleotide
cuuuuagguuacaagggug

SEQ ID NO: 1612296 - RNA, 19 nt, Artificial Sequence
  Description of Artificial Sequence: Synthetic oligonucleotide
uucaccgggagagaggagg

SEQ ID NO: 1612297 - RNA, 19 nt, Artificial Sequence
  Description of Artificial Sequence: Synthetic oligonucleotide
cuaagauccucaucuguag

SEQ ID NO: 1612298 - RNA, 19 nt, Artificial Sequence
  Description of Artificial Sequence: Synthetic oligonucleotide
uacugaagcuuuuagguua

SEQ ID NO: 1612299 - RNA, 19 nt, Artificial Sequence
  Description of Artificial Sequence: Synthetic oligonucleotide
ucaugugggagcuaagauc

SEQ ID NO: 1612300 - RNA, 19 nt, Artificial Sequence
  Description of Artificial Sequence: Synthetic oligonucleotide
ucuuccuuacucuuagagu

SEQ ID NO: 1612301 - RNA, 19 nt, Artificial Sequence
  Description of Artificial Sequence: Synthetic oligonucleotide
uaagauccucaucuguagc

SEQ ID NO: 1612302 - RNA, 19 nt, Artificial Sequence
  Description of Artificial Sequence: Synthetic oligonucleotide
acauacacccacuaaacua

SEQ ID NO: 1612303 - RNA, 19 nt, Artificial Sequence
  Description of Artificial Sequence: Synthetic oligonucleotide
gaaucgucagauucaucag

SEQ ID NO: 1612304 - RNA, 19 nt, Artificial Sequence
  Description of Artificial Sequence: Synthetic oligonucleotide
uaauugaccucagaagaug

SEQ ID NO: 1612305 - RNA, 19 nt, Artificial Sequence
  Description of Artificial Sequence: Synthetic oligonucleotide
gauugcucauggcuguggg

SEQ ID NO: 1612306 - RNA, 19 nt, Artificial Sequence
  Description of Artificial Sequence: Synthetic oligonucleotide
ucauuaagaugcaguggcc

SEQ ID NO: 1612307 - RNA, 19 nt, Artificial Sequence
  Description of Artificial Sequence: Synthetic oligonucleotide
gacacgacauucugugggg

SEQ ID NO: 1612308 - RNA, 19 nt, Artificial Sequence
  Description of Artificial Sequence: Synthetic oligonucleotide
auguuugcuguaaugcagc

SEQ ID NO: 1612309 - RNA, 19 nt, Artificial Sequence
  Description of Artificial Sequence: Synthetic oligonucleotide
gauuguagugacauacaug

SEQ ID NO: 1612310 - RNA, 19 nt, Artificial Sequence
  Description of Artificial Sequence: Synthetic oligonucleotide
ugacuugauucauggcugg

SEQ ID NO: 1612311 - RNA, 19 nt, Artificial Sequence
  Description of Artificial Sequence: Synthetic oligonucleotide
cuucuguuuguguaguaac

SEQ ID NO: 1612312 - RNA, 19 nt, Artificial Sequence
  Description of Artificial Sequence: Synthetic oligonucleotide
cuugugucuacauacaucu

SEQ ID NO: 1612313 - RNA, 19 nt, Artificial Sequence
  Description of Artificial Sequence: Synthetic oligonucleotide
acaaucauuaagaugcagu

SEQ ID NO: 1612314 - RNA, 19 nt, Artificial Sequence
  Description of Artificial Sequence: Synthetic oligonucleotide
acuucuacagaaagaacag

SEQ ID NO: 1612315 - RNA, 19 nt, Artificial Sequence
  Description of Artificial Sequence: Synthetic oligonucleotide
uccauaagccaaacuguca

SEQ ID NO: 1612316 - RNA, 19 nt, Artificial Sequence
  Description of Artificial Sequence: Synthetic oligonucleotide
agaacagaggcaaaguacu

SEQ ID NO: 1612317 - RNA, 19 nt, Artificial Sequence
  Description of Artificial Sequence: Synthetic oligonucleotide
agaaauguggaacuuccua

SEQ ID NO: 1612318 - RNA, 19 nt, Artificial Sequence
  Description of Artificial Sequence: Synthetic oligonucleotide
aagcaaaguaaggagcugu

SEQ ID NO: 1612319 - RNA, 19 nt, Artificial Sequence
  Description of Artificial Sequence: Synthetic oligonucleotide
auuggaguugcuugggaga

SEQ ID NO: 1612320 - RNA, 19 nt, Artificial Sequence
  Description of Artificial Sequence: Synthetic oligonucleotide
gaaauacgaauuuucagau

SEQ ID NO: 1612321 - RNA, 19 nt, Artificial Sequence
  Description of Artificial Sequence: Synthetic oligonucleotide
uucauggagcaacaaacua

SEQ ID NO: 1612322 - RNA, 19 nt, Artificial Sequence
  Description of Artificial Sequence: Synthetic oligonucleotide
ucuuuuaauugaccucaga

SEQ ID NO: 1612323 - RNA, 19 nt, Artificial Sequence
  Description of Artificial Sequence: Synthetic oligonucleotide
guaguugcuccuuggcugg

SEQ ID NO: 1612324 - RNA, 19 nt, Artificial Sequence
  Description of Artificial Sequence: Synthetic oligonucleotide
uucauggcucugauguucc

SEQ ID NO: 1612325 - RNA, 19 nt, Artificial Sequence
  Description of Artificial Sequence: Synthetic oligonucleotide
gaagacuucuguuugugua

SEQ ID NO: 1612326 - RNA, 19 nt, Artificial Sequence
  Description of Artificial Sequence: Synthetic oligonucleotide
cauucuguggggcuaggag

SEQ ID NO: 1612327 - RNA, 19 nt, Artificial Sequence
  Description of Artificial Sequence: Synthetic oligonucleotide
gggaaauacgaauuuucag

SEQ ID NO: 1612328 - RNA, 19 nt, Artificial Sequence
  Description of Artificial Sequence: Synthetic oligonucleotide
uggguuuccacacuugguu

SEQ ID NO: 1612329 - RNA, 19 nt, Artificial Sequence
  Description of Artificial Sequence: Synthetic oligonucleotide
uucaugugggagcuaagau

SEQ ID NO: 1612330 - RNA, 19 nt, Artificial Sequence
  Description of Artificial Sequence: Synthetic oligonucleotide
cuaagaaaugagcaguuaa

SEQ ID NO: 1612331 - RNA, 19 nt, Artificial Sequence
  Description of Artificial Sequence: Synthetic oligonucleotide
cauaagccaaacugucacc

SEQ ID NO: 1612332 - RNA, 19 nt, Artificial Sequence
  Description of Artificial Sequence: Synthetic oligonucleotide
uaggagauuuugcuucuga

SEQ ID NO: 1612333 - RNA, 19 nt, Artificial Sequence
  Description of Artificial Sequence: Synthetic oligonucleotide
auaagccaaacugucaccu

SEQ ID NO: 1612334 - RNA, 19 nt, Artificial Sequence
  Description of Artificial Sequence: Synthetic oligonucleotide
auucauggcuggucuuccc

SEQ ID NO: 1612335 - RNA, 19 nt, Artificial Sequence
  Description of Artificial Sequence: Synthetic oligonucleotide
uuugaccgcaguccauaag

SEQ ID NO: 1612336 - RNA, 19 nt, Artificial Sequence
  Description of Artificial Sequence: Synthetic oligonucleotide
gugacauacauguuauaga

SEQ ID NO: 1612337 - RNA, 19 nt, Artificial Sequence
  Description of Artificial Sequence: Synthetic oligonucleotide
cauacacccacuaaacuaa

SEQ ID NO: 1612338 - RNA, 19 nt, Artificial Sequence
  Description of Artificial Sequence: Synthetic oligonucleotide
aaaagauuguagugacaua

SEQ ID NO: 1612339 - RNA, 19 nt, Artificial Sequence
  Description of Artificial Sequence: Synthetic oligonucleotide
ggagcuaagauccucaucu

SEQ ID NO: 1612340 - RNA, 19 nt, Artificial Sequence
  Description of Artificial Sequence: Synthetic oligonucleotide
acccacuaaacuaagaaau

SEQ ID NO: 1612341 - RNA, 19 nt, Artificial Sequence
  Description of Artificial Sequence: Synthetic oligonucleotide
cuuuccuugcuaucaauca

SEQ ID NO: 1612342 - RNA, 19 nt, Artificial Sequence
  Description of Artificial Sequence: Synthetic oligonucleotide
uggaacuuccuagacuuug

SEQ ID NO: 1612343 - RNA, 19 nt, Artificial Sequence
  Description of Artificial Sequence: Synthetic oligonucleotide
uuuugcuucugagaugggu

SEQ ID NO: 1612344 - RNA, 19 nt, Artificial Sequence
  Description of Artificial Sequence: Synthetic oligonucleotide
auuaagaugcaguggccau

SEQ ID NO: 1612345 - RNA, 19 nt, Artificial Sequence
  Description of Artificial Sequence: Synthetic oligonucleotide
uguuuaagaucaucuguuu

SEQ ID NO: 1612346 - RNA, 19 nt, Artificial Sequence
  Description of Artificial Sequence: Synthetic oligonucleotide
ucaugggaaauacgaauuu

SEQ ID NO: 1612347 - RNA, 19 nt, Artificial Sequence
  Description of Artificial Sequence: Synthetic oligonucleotide
agaugguuaaugucuuccu

SEQ ID NO: 1612348 - RNA, 19 nt, Artificial Sequence
  Description of Artificial Sequence: Synthetic oligonucleotide
ugaccgcaguccauaagcc

SEQ ID NO: 1612349 - RNA, 19 nt, Artificial Sequence
  Description of Artificial Sequence: Synthetic oligonucleotide
ugcuaucaaucacaucaga

SEQ ID NO: 1612350 - RNA, 19 nt, Artificial Sequence
  Description of Artificial Sequence: Synthetic oligonucleotide
aucgucagauucaucagag

SEQ ID NO: 1612351 - RNA, 19 nt, Artificial Sequence
  Description of Artificial Sequence: Synthetic oligonucleotide
gacaaccggaauaaccuug

SEQ ID NO: 1612352 - RNA, 19 nt, Artificial Sequence
  Description of Artificial Sequence: Synthetic oligonucleotide
aaguaaggagcugugguuu

SEQ ID NO: 1612353 - RNA, 19 nt, Artificial Sequence
  Description of Artificial Sequence: Synthetic oligonucleotide
ucagacagcucagugcucu

SEQ ID NO: 1612354 - RNA, 19 nt, Artificial Sequence
  Description of Artificial Sequence: Synthetic oligonucleotide
uucagacgauggacaaccg

SEQ ID NO: 1612355 - RNA, 19 nt, Artificial Sequence
  Description of Artificial Sequence: Synthetic oligonucleotide
agcuaagauccucaucugu

SEQ ID NO: 1612356 - RNA, 19 nt, Artificial Sequence
  Description of Artificial Sequence: Synthetic oligonucleotide
guuuucauggagcaacaaa

SEQ ID NO: 1612357 - RNA, 19 nt, Artificial Sequence
  Description of Artificial Sequence: Synthetic oligonucleotide
agaauggugggaaucguca

SEQ ID NO: 1612358 - RNA, 19 nt, Artificial Sequence
  Description of Artificial Sequence: Synthetic oligonucleotide
cuagacuuugaccgcaguc

SEQ ID NO: 1612359 - RNA, 19 nt, Artificial Sequence
  Description of Artificial Sequence: Synthetic oligonucleotide
uucagaugguuaaugucuu

SEQ ID NO: 1612360 - RNA, 19 nt, Artificial Sequence
  Description of Artificial Sequence: Synthetic oligonucleotide
aagauuguagugacauaca

SEQ ID NO: 1612361 - RNA, 19 nt, Artificial Sequence
  Description of Artificial Sequence: Synthetic oligonucleotide
ggagcaacaaacuaagcua

SEQ ID NO: 1612362 - RNA, 19 nt, Artificial Sequence
  Description of Artificial Sequence: Synthetic oligonucleotide
caucuguagcaucaggauc

SEQ ID NO: 1612363 - RNA, 19 nt, Artificial Sequence
  Description of Artificial Sequence: Synthetic oligonucleotide
ggugggaaucgucagauuc

SEQ ID NO: 1612364 - RNA, 19 nt, Artificial Sequence
  Description of Artificial Sequence: Synthetic oligonucleotide
uugcuuagcccucacuaau

SEQ ID NO: 1612365 - RNA, 19 nt, Artificial Sequence
  Description of Artificial Sequence: Synthetic oligonucleotide
uuccuuacucuuagagucu

SEQ ID NO: 1612366 - RNA, 19 nt, Artificial Sequence
  Description of Artificial Sequence: Synthetic oligonucleotide
uggggcuaggagauuuugc

SEQ ID NO: 1612367 - RNA, 19 nt, Artificial Sequence
  Description of Artificial Sequence: Synthetic oligonucleotide
gaacuuccuagacuuugac

SEQ ID NO: 1612368 - RNA, 19 nt, Artificial Sequence
  Description of Artificial Sequence: Synthetic oligonucleotide
cuuccuagacuuugaccgc

SEQ ID NO: 1612369 - RNA, 19 nt, Artificial Sequence
  Description of Artificial Sequence: Synthetic oligonucleotide
aaugagcaguuaauauucu

SEQ ID NO: 1612370 - RNA, 19 nt, Artificial Sequence
  Description of Artificial Sequence: Synthetic oligonucleotide
ucauggcuuucauuggagu

SEQ ID NO: 1612371 - RNA, 19 nt, Artificial Sequence
  Description of Artificial Sequence: Synthetic oligonucleotide
uuacucuuagagucuggaa

SEQ ID NO: 1612372 - RNA, 19 nt, Artificial Sequence
  Description of Artificial Sequence: Synthetic oligonucleotide
ugaagcuuuuagguuacaa

SEQ ID NO: 1612373 - RNA, 19 nt, Artificial Sequence
  Description of Artificial Sequence: Synthetic oligonucleotide
uacacccacuaaacuaaga

SEQ ID NO: 1612374 - RNA, 19 nt, Artificial Sequence
  Description of Artificial Sequence: Synthetic oligonucleotide
ucagacucaucagaauggu

SEQ ID NO: 1612375 - RNA, 19 nt, Artificial Sequence
  Description of Artificial Sequence: Synthetic oligonucleotide
aacuaagcuaauagcccca

SEQ ID NO: 1612376 - RNA, 19 nt, Artificial Sequence
  Description of Artificial Sequence: Synthetic oligonucleotide
acgauggacaaccggaaua

SEQ ID NO: 1612377 - RNA, 19 nt, Artificial Sequence
  Description of Artificial Sequence: Synthetic oligonucleotide
ugcuuagcccucacuaauc

SEQ ID NO: 1612378 - RNA, 19 nt, Artificial Sequence
  Description of Artificial Sequence: Synthetic oligonucleotide
aggacacgacauucugugg

SEQ ID NO: 1612379 - RNA, 19 nt, Artificial Sequence
  Description of Artificial Sequence: Synthetic oligonucleotide
uaguaacaguaauggacuc

SEQ ID NO: 1612380 - RNA, 19 nt, Artificial Sequence
  Description of Artificial Sequence: Synthetic oligonucleotide
ugggagaguuucuuguuua

SEQ ID NO: 1612381 - RNA, 19 nt, Artificial Sequence
  Description of Artificial Sequence: Synthetic oligonucleotide
ucaccgggagagaggaggc

SEQ ID NO: 1612382 - RNA, 19 nt, Artificial Sequence
  Description of Artificial Sequence: Synthetic oligonucleotide
uggcuuucauuggaguugc

SEQ ID NO: 1612383 - RNA, 19 nt, Artificial Sequence
  Description of Artificial Sequence: Synthetic oligonucleotide
uuucuucagaggacacgac

SEQ ID NO: 1612384 - RNA, 19 nt, Artificial Sequence
  Description of Artificial Sequence: Synthetic oligonucleotide
ccauaagccaaacugucac

SEQ ID NO: 1612385 - RNA, 19 nt, Artificial Sequence
  Description of Artificial Sequence: Synthetic oligonucleotide
ugauucauggcuggucuuc

SEQ ID NO: 1612386 - RNA, 19 nt, Artificial Sequence
  Description of Artificial Sequence: Synthetic oligonucleotide
uccuagacuuugaccgcag

SEQ ID NO: 1612387 - RNA, 19 nt, Artificial Sequence
  Description of Artificial Sequence: Synthetic oligonucleotide
uacgaauuuucagaugguu

SEQ ID NO: 1612388 - RNA, 19 nt, Artificial Sequence
  Description of Artificial Sequence: Synthetic oligonucleotide
ucucuauuucaugggaaau

SEQ ID NO: 1612389 - RNA, 19 nt, Artificial Sequence
  Description of Artificial Sequence: Synthetic oligonucleotide
gaggaggcaaugccaaaga

SEQ ID NO: 1612390 - RNA, 19 nt, Artificial Sequence
  Description of Artificial Sequence: Synthetic oligonucleotide
acacgacauucuguggggc

SEQ ID NO: 1612391 - RNA, 19 nt, Artificial Sequence
  Description of Artificial Sequence: Synthetic oligonucleotide
uagcccucacuaaucuucu

SEQ ID NO: 1612392 - RNA, 19 nt, Artificial Sequence
  Description of Artificial Sequence: Synthetic oligonucleotide
ggaucucuacuguagggac

SEQ ID NO: 1612393 - RNA, 19 nt, Artificial Sequence
  Description of Artificial Sequence: Synthetic oligonucleotide
cucaugacuagcuuucugu

SEQ ID NO: 1612394 - RNA, 19 nt, Artificial Sequence
  Description of Artificial Sequence: Synthetic oligonucleotide
cagaauggugggaaucguc

SEQ ID NO: 1612395 - RNA, 19 nt, Artificial Sequence
  Description of Artificial Sequence: Synthetic oligonucleotide
cagaggacacgacauucug

SEQ ID NO: 1612396 - RNA, 19 nt, Artificial Sequence
  Description of Artificial Sequence: Synthetic oligonucleotide
caagauuuauucacaccaa

SEQ ID NO: 1612397 - RNA, 19 nt, Artificial Sequence
  Description of Artificial Sequence: Synthetic oligonucleotide
uggcuacagcaucuguaug

SEQ ID NO: 1612398 - RNA, 19 nt, Artificial Sequence
  Description of Artificial Sequence: Synthetic oligonucleotide
cucucuauuucaugggaaa

SEQ ID NO: 1612399 - RNA, 19 nt, Artificial Sequence
  Description of Artificial Sequence: Synthetic oligonucleotide
agaauccuggcuguuugca

SEQ ID NO: 1612400 - RNA, 19 nt, Artificial Sequence
  Description of Artificial Sequence: Synthetic oligonucleotide
cucagugcucucaugacua

SEQ ID NO: 1612401 - RNA, 19 nt, Artificial Sequence
  Description of Artificial Sequence: Synthetic oligonucleotide
cuugauucauggcuggucu

SEQ ID NO: 1612402 - RNA, 19 nt, Artificial Sequence
  Description of Artificial Sequence: Synthetic oligonucleotide
agauucucuuuuauccaug

SEQ ID NO: 1612403 - RNA, 19 nt, Artificial Sequence
  Description of Artificial Sequence: Synthetic oligonucleotide
gucauggcuuucauuggag

SEQ ID NO: 1612404 - RNA, 19 nt, Artificial Sequence
  Description of Artificial Sequence: Synthetic oligonucleotide
uguuugcauggucuccguc

SEQ ID NO: 1612405 - RNA, 19 nt, Artificial Sequence
  Description of Artificial Sequence: Synthetic oligonucleotide
cauguuauagauucucuuu

SEQ ID NO: 1612406 - RNA, 19 nt, Artificial Sequence
  Description of Artificial Sequence: Synthetic oligonucleotide
guguaguaacaguaaugga

SEQ ID NO: 1612407 - RNA, 19 nt, Artificial Sequence
  Description of Artificial Sequence: Synthetic oligonucleotide
cuuacucuuagagucugga

SEQ ID NO: 1612408 - RNA, 19 nt, Artificial Sequence
  Description of Artificial Sequence: Synthetic oligonucleotide
gcuguuugcauggucuccg

SEQ ID NO: 1612409 - RNA, 19 nt, Artificial Sequence
  Description of Artificial Sequence: Synthetic oligonucleotide
acgaauuuucagaugguua

SEQ ID NO: 1612410 - RNA, 19 nt, Artificial Sequence
  Description of Artificial Sequence: Synthetic oligonucleotide
cacuuucaccgggagagag

SEQ ID NO: 1612411 - RNA, 19 nt, Artificial Sequence
  Description of Artificial Sequence: Synthetic oligonucleotide
uguucagacgauggacaac

SEQ ID NO: 1612412 - RNA, 19 nt, Artificial Sequence
  Description of Artificial Sequence: Synthetic oligonucleotide
cagacucaucagaauggug

SEQ ID NO: 1612413 - RNA, 19 nt, Artificial Sequence
  Description of Artificial Sequence: Synthetic oligonucleotide
guccauaagccaaacuguc

SEQ ID NO: 1612414 - RNA, 19 nt, Artificial Sequence
  Description of Artificial Sequence: Synthetic oligonucleotide
uggcuggucuucccagugc

SEQ ID NO: 1612415 - RNA, 19 nt, Artificial Sequence
  Description of Artificial Sequence: Synthetic oligonucleotide
gagaugggucgguuuccag

SEQ ID NO: 1612416 - RNA, 19 nt, Artificial Sequence
  Description of Artificial Sequence: Synthetic oligonucleotide
cuugcuuagcccucacuaa

SEQ ID NO: 1612417 - RNA, 19 nt, Artificial Sequence
  Description of Artificial Sequence: Synthetic oligonucleotide
gcaaaguaaggagcugugg

SEQ ID NO: 1612418 - RNA, 19 nt, Artificial Sequence
  Description of Artificial Sequence: Synthetic oligonucleotide
ucgucagauucaucagagu

SEQ ID NO: 1612419 - RNA, 19 nt, Artificial Sequence
  Description of Artificial Sequence: Synthetic oligonucleotide
auggugggaaucgucagau

SEQ ID NO: 1612420 - RNA, 19 nt, Artificial Sequence
  Description of Artificial Sequence: Synthetic oligonucleotide
uuuagguuacaaggguguu

SEQ ID NO: 1612421 - RNA, 19 nt, Artificial Sequence
  Description of Artificial Sequence: Synthetic oligonucleotide
aguaaggagcugugguuuu

SEQ ID NO: 1612422 - RNA, 19 nt, Artificial Sequence
  Description of Artificial Sequence: Synthetic oligonucleotide
ugugggagcuaagauccuc

SEQ ID NO: 1612423 - RNA, 19 nt, Artificial Sequence
  Description of Artificial Sequence: Synthetic oligonucleotide
ggcaaugccaaagaggcaa

SEQ ID NO: 1612424 - RNA, 19 nt, Artificial Sequence
  Description of Artificial Sequence: Synthetic oligonucleotide
gaccgcaguccauaagcca

SEQ ID NO: 1612425 - RNA, 19 nt, Artificial Sequence
  Description of Artificial Sequence: Synthetic oligonucleotide
acaaccggaauaaccuuga

SEQ ID NO: 1612426 - RNA, 19 nt, Artificial Sequence
  Description of Artificial Sequence: Synthetic oligonucleotide
uguggucauggcuuucauu

SEQ ID NO: 1612427 - RNA, 19 nt, Artificial Sequence
  Description of Artificial Sequence: Synthetic oligonucleotide
guuagggaucucuacugua

SEQ ID NO: 1612428 - RNA, 19 nt, Artificial Sequence
  Description of Artificial Sequence: Synthetic oligonucleotide
cuucaugugggagcuaaga

SEQ ID NO: 1612429 - RNA, 19 nt, Artificial Sequence
  Description of Artificial Sequence: Synthetic oligonucleotide
uuucaccgggagagaggag

SEQ ID NO: 1612430 - RNA, 19 nt, Artificial Sequence
  Description of Artificial Sequence: Synthetic oligonucleotide
agacuucuguuuguguagu

SEQ ID NO: 1612431 - RNA, 19 nt, Artificial Sequence
  Description of Artificial Sequence: Synthetic oligonucleotide
ugggaaucgucagauucau

SEQ ID NO: 1612432 - RNA, 19 nt, Artificial Sequence
  Description of Artificial Sequence: Synthetic oligonucleotide
acuaagaaaugagcaguua

SEQ ID NO: 1612433 - RNA, 19 nt, Artificial Sequence
  Description of Artificial Sequence: Synthetic oligonucleotide
ucggccguuagggaucucu

SEQ ID NO: 1612434 - RNA, 19 nt, Artificial Sequence
  Description of Artificial Sequence: Synthetic oligonucleotide
uucugagaugggucgguuu

SEQ ID NO: 1612435 - RNA, 19 nt, Artificial Sequence
  Description of Artificial Sequence: Synthetic oligonucleotide
gaugguuaaugucuuccuu

SEQ ID NO: 1612436 - RNA, 19 nt, Artificial Sequence
  Description of Artificial Sequence: Synthetic oligonucleotide
guaauggacucaucagacu

SEQ ID NO: 1612437 - RNA, 19 nt, Artificial Sequence
  Description of Artificial Sequence: Synthetic oligonucleotide
auacacccacuaaacuaag

SEQ ID NO: 1612438 - RNA, 19 nt, Artificial Sequence
  Description of Artificial Sequence: Synthetic oligonucleotide
agaggacacgacauucugu

SEQ ID NO: 1612439 - RNA, 19 nt, Artificial Sequence
  Description of Artificial Sequence: Synthetic oligonucleotide
gugggaaucgucagauuca

SEQ ID NO: 1612440 - RNA, 19 nt, Artificial Sequence
  Description of Artificial Sequence: Synthetic oligonucleotide
acuuugaccgcaguccaua

SEQ ID NO: 1612441 - RNA, 19 nt, Artificial Sequence
  Description of Artificial Sequence: Synthetic oligonucleotide
ugggucgguuuccagccau

SEQ ID NO: 1612442 - RNA, 19 nt, Artificial Sequence
  Description of Artificial Sequence: Synthetic oligonucleotide
accgcaguccauaagccaa

SEQ ID NO: 1612443 - RNA, 19 nt, Artificial Sequence
  Description of Artificial Sequence: Synthetic oligonucleotide
cuucuacagaaagaacaga

SEQ ID NO: 1612444 - RNA, 19 nt, Artificial Sequence
  Description of Artificial Sequence: Synthetic oligonucleotide
uagccccaaauauuaucua

SEQ ID NO: 1612445 - RNA, 19 nt, Artificial Sequence
  Description of Artificial Sequence: Synthetic oligonucleotide
auacgaauuuucagauggu

SEQ ID NO: 1612446 - RNA, 19 nt, Artificial Sequence
  Description of Artificial Sequence: Synthetic oligonucleotide
gucgguuuccagccaugug

SEQ ID NO: 1612447 - RNA, 19 nt, Artificial Sequence
  Description of Artificial Sequence: Synthetic oligonucleotide
ucuguagcaucaggauccu

SEQ ID NO: 1612448 - RNA, 19 nt, Artificial Sequence
  Description of Artificial Sequence: Synthetic oligonucleotide
agggcauguucagacgaug

SEQ ID NO: 1612449 - RNA, 19 nt, Artificial Sequence
  Description of Artificial Sequence: Synthetic oligonucleotide
ucaccucggccguuaggga

SEQ ID NO: 1612450 - RNA, 19 nt, Artificial Sequence
  Description of Artificial Sequence: Synthetic oligonucleotide
ccaaacugucaccucggcc

SEQ ID NO: 1612451 - RNA, 19 nt, Artificial Sequence
  Description of Artificial Sequence: Synthetic oligonucleotide
ugggagcuaagauccucau

SEQ ID NO: 1612452 - RNA, 19 nt, Artificial Sequence
  Description of Artificial Sequence: Synthetic oligonucleotide
ggcuacagcaucuguaugu

SEQ ID NO: 1612453 - RNA, 19 nt, Artificial Sequence
  Description of Artificial Sequence: Synthetic oligonucleotide
acuaagcuaauagccccaa

SEQ ID NO: 1612454 - RNA, 19 nt, Artificial Sequence
  Description of Artificial Sequence: Synthetic oligonucleotide
gaugaacucucuauuucau

SEQ ID NO: 1612455 - RNA, 19 nt, Artificial Sequence
  Description of Artificial Sequence: Synthetic oligonucleotide
cggaauaaccuugagggug

SEQ ID NO: 1612456 - RNA, 19 nt, Artificial Sequence
  Description of Artificial Sequence: Synthetic oligonucleotide
acucaucagaaugguggga

SEQ ID NO: 1612457 - RNA, 19 nt, Artificial Sequence
  Description of Artificial Sequence: Synthetic oligonucleotide
ccguuagggaucucuacug

SEQ ID NO: 1612458 - RNA, 19 nt, Artificial Sequence
  Description of Artificial Sequence: Synthetic oligonucleotide
gacauucuguggggcuagg

SEQ ID NO: 1612459 - RNA, 19 nt, Artificial Sequence
  Description of Artificial Sequence: Synthetic oligonucleotide
gcuuuuagguuacaagggu

SEQ ID NO: 1612460 - RNA, 19 nt, Artificial Sequence
  Description of Artificial Sequence: Synthetic oligonucleotide
ggggcuaggagauuuugcu

SEQ ID NO: 1612461 - RNA, 19 nt, Artificial Sequence
  Description of Artificial Sequence: Synthetic oligonucleotide
agacagcucagugcucuca

SEQ ID NO: 1612462 - RNA, 19 nt, Artificial Sequence
  Description of Artificial Sequence: Synthetic oligonucleotide
cauccauguggucauggcu

SEQ ID NO: 1612463 - RNA, 19 nt, Artificial Sequence
  Description of Artificial Sequence: Synthetic oligonucleotide
gcucucaugacuagcuuuc

SEQ ID NO: 1612464 - RNA, 19 nt, Artificial Sequence
  Description of Artificial Sequence: Synthetic oligonucleotide
agacgauggacaaccggaa

SEQ ID NO: 1612465 - RNA, 19 nt, Artificial Sequence
  Description of Artificial Sequence: Synthetic oligonucleotide
gagucuggaacuagcuugu

SEQ ID NO: 1612466 - RNA, 19 nt, Artificial Sequence
  Description of Artificial Sequence: Synthetic oligonucleotide
gcuaagauccucaucugua

SEQ ID NO: 1612467 - RNA, 19 nt, Artificial Sequence
  Description of Artificial Sequence: Synthetic oligonucleotide
acauucuguggggcuagga

SEQ ID NO: 1612468 - RNA, 19 nt, Artificial Sequence
  Description of Artificial Sequence: Synthetic oligonucleotide
cuguuugugcuccugggau

SEQ ID NO: 1612469 - RNA, 19 nt, Artificial Sequence
  Description of Artificial Sequence: Synthetic oligonucleotide
ccauuuguacuucuacaga

SEQ ID NO: 1612470 - RNA, 19 nt, Artificial Sequence
  Description of Artificial Sequence: Synthetic oligonucleotide
agggugucaaccagcuccu

SEQ ID NO: 1612471 - RNA, 19 nt, Artificial Sequence
  Description of Artificial Sequence: Synthetic oligonucleotide
cuuugaccgcaguccauaa

SEQ ID NO: 1612472 - RNA, 19 nt, Artificial Sequence
  Description of Artificial Sequence: Synthetic oligonucleotide
guggggcuaggagauuuug

SEQ ID NO: 1612473 - RNA, 19 nt, Artificial Sequence
  Description of Artificial Sequence: Synthetic oligonucleotide
ccuuacucuuagagucugg

SEQ ID NO: 1612474 - RNA, 19 nt, Artificial Sequence
  Description of Artificial Sequence: Synthetic oligonucleotide
gacuucuguuuguguagua

SEQ ID NO: 1612475 - RNA, 19 nt, Artificial Sequence
  Description of Artificial Sequence: Synthetic oligonucleotide
acgacauucuguggggcua

SEQ ID NO: 1612476 - RNA, 19 nt, Artificial Sequence
  Description of Artificial Sequence: Synthetic oligonucleotide
gacgauggacaaccggaau

SEQ ID NO: 1612477 - RNA, 19 nt, Artificial Sequence
  Description of Artificial Sequence: Synthetic oligonucleotide
augggucgguuuccagcca

SEQ ID NO: 1612478 - RNA, 19 nt, Artificial Sequence
  Description of Artificial Sequence: Synthetic oligonucleotide
cuaagcuaauagccccaaa

SEQ ID NO: 1612479 - RNA, 19 nt, Artificial Sequence
  Description of Artificial Sequence: Synthetic oligonucleotide
caugacuagcuuucuguuu

SEQ ID NO: 1612480 - RNA, 19 nt, Artificial Sequence
  Description of Artificial Sequence: Synthetic oligonucleotide
ggccguuagggaucucuac

SEQ ID NO: 1612481 - RNA, 19 nt, Artificial Sequence
  Description of Artificial Sequence: Synthetic oligonucleotide
aguugcuccuuggcuggcu

SEQ ID NO: 1612482 - RNA, 19 nt, Artificial Sequence
  Description of Artificial Sequence: Synthetic oligonucleotide
gccucucuuuuaauugacc

SEQ ID NO: 1612483 - RNA, 19 nt, Artificial Sequence
  Description of Artificial Sequence: Synthetic oligonucleotide
caucuguauguuugcugua

SEQ ID NO: 1612484 - RNA, 19 nt, Artificial Sequence
  Description of Artificial Sequence: Synthetic oligonucleotide
cagaaauguggaacuuccu

SEQ ID NO: 1612485 - RNA, 19 nt, Artificial Sequence
  Description of Artificial Sequence: Synthetic oligonucleotide
ggcuuccucggagaaugcc

SEQ ID NO: 1612486 - RNA, 19 nt, Artificial Sequence
  Description of Artificial Sequence: Synthetic oligonucleotide
uggugggaaucgucagauu

SEQ ID NO: 1612487 - RNA, 19 nt, Artificial Sequence
  Description of Artificial Sequence: Synthetic oligonucleotide
cugucaccucggccguuag

SEQ ID NO: 1612488 - RNA, 19 nt, Artificial Sequence
  Description of Artificial Sequence: Synthetic oligonucleotide
acugucaccucggccguua

SEQ ID NO: 1612489 - RNA, 19 nt, Artificial Sequence
  Description of Artificial Sequence: Synthetic oligonucleotide
cacgacauucuguggggcu

SEQ ID NO: 1612490 - RNA, 19 nt, Artificial Sequence
  Description of Artificial Sequence: Synthetic oligonucleotide
gccguuagggaucucuacu

SEQ ID NO: 1612491 - RNA, 19 nt, Artificial Sequence
  Description of Artificial Sequence: Synthetic oligonucleotide
gcuaggagauuuugcuucu

SEQ ID NO: 1612492 - RNA, 19 nt, Artificial Sequence
  Description of Artificial Sequence: Synthetic oligonucleotide
cuguagcaucaggauccug

SEQ ID NO: 1612493 - RNA, 19 nt, Artificial Sequence
  Description of Artificial Sequence: Synthetic oligonucleotide
caguggccauuuguacuuc

SEQ ID NO: 1612494 - RNA, 19 nt, Artificial Sequence
  Description of Artificial Sequence: Synthetic oligonucleotide
cuuagcccucacuaaucuu

SEQ ID NO: 1612495 - RNA, 19 nt, Artificial Sequence
  Description of Artificial Sequence: Synthetic oligonucleotide
augugggagcuaagauccu

SEQ ID NO: 1612496 - RNA, 19 nt, Artificial Sequence
  Description of Artificial Sequence: Synthetic oligonucleotide
caccucggccguuagggau

SEQ ID NO: 1612497 - RNA, 19 nt, Artificial Sequence
  Description of Artificial Sequence: Synthetic oligonucleotide
gagggcauguucagacgau

SEQ ID NO: 1612498 - RNA, 19 nt, Artificial Sequence
  Description of Artificial Sequence: Synthetic oligonucleotide
gacuuugaccgcaguccau

SEQ ID NO: 1612499 - RNA, 19 nt, Artificial Sequence
  Description of Artificial Sequence: Synthetic oligonucleotide
ggacaaccggaauaaccuu

SEQ ID NO: 1612500 - RNA, 19 nt, Artificial Sequence
  Description of Artificial Sequence: Synthetic oligonucleotide
gugcucucaugacuagcuu

SEQ ID NO: 1612501 - RNA, 19 nt, Artificial Sequence
  Description of Artificial Sequence: Synthetic oligonucleotide
gggucgguuuccagccaug

SEQ ID NO: 1612502 - RNA, 19 nt, Artificial Sequence
  Description of Artificial Sequence: Synthetic oligonucleotide
cucucaugacuagcuuucu

SEQ ID NO: 1612503 - RNA, 19 nt, Artificial Sequence
  Description of Artificial Sequence: Synthetic oligonucleotide
gggcuaggagauuuugcuu

SEQ ID NO: 1612504 - RNA, 19 nt, Artificial Sequence
  Description of Artificial Sequence: Synthetic oligonucleotide
ggucgguuuccagccaugu

SEQ ID NO: 1612505 - RNA, 19 nt, Artificial Sequence
  Description of Artificial Sequence: Synthetic oligonucleotide
ccggaauaaccuugagggu

SEQ ID NO: 1612506 - RNA, 19 nt, Artificial Sequence
  Description of Artificial Sequence: Synthetic oligonucleotide
cguuagggaucucuacugu

SEQ ID NO: 1612507 - RNA, 19 nt, Artificial Sequence
  Description of Artificial Sequence: Synthetic oligonucleotide
ccgcaguccauaagccaaa

SEQ ID NO: 1612508 - RNA, 19 nt, Artificial Sequence
  Description of Artificial Sequence: Synthetic oligonucleotide
guggaacuuccuagacuuu

SEQ ID NO: 1612509 - RNA, 19 nt, Artificial Sequence
  Description of Artificial Sequence: Synthetic oligonucleotide
gaguugcuugggagaguuu

SEQ ID NO: 1612510 - RNA, 19 nt, Artificial Sequence
  Description of Artificial Sequence: Synthetic oligonucleotide
ccuagacuuugaccgcagu

SEQ ID NO: 1612511 - RNA, 19 nt, Artificial Sequence
  Description of Artificial Sequence: Synthetic oligonucleotide
cggccguuagggaucucua

SEQ ID NO: 1612512 - RNA, 19 nt, Artificial Sequence
  Description of Artificial Sequence: Synthetic oligonucleotide
ggcuuucauuggaguugcu

SEQ ID NO: 1612513 - RNA, 19 nt, Artificial Sequence
  Description of Artificial Sequence: Synthetic oligonucleotide
aauaauguuucccuucccc

SEQ ID NO: 1612514 - RNA, 19 nt, Artificial Sequence
  Description of Artificial Sequence: Synthetic oligonucleotide
uuuaauaaaaguccugaag

SEQ ID NO: 1612515 - RNA, 19 nt, Artificial Sequence
  Description of Artificial Sequence: Synthetic oligonucleotide
acuucagcgaaauagucgc

SEQ ID NO: 1612516 - RNA, 19 nt, Artificial Sequence
  Description of Artificial Sequence: Synthetic oligonucleotide
uauaucuacacuuguaaag

SEQ ID NO: 1612517 - RNA, 19 nt, Artificial Sequence
  Description of Artificial Sequence: Synthetic oligonucleotide
accauuacuacuuggaguc

SEQ ID NO: 1612518 - RNA, 19 nt, Artificial Sequence
  Description of Artificial Sequence: Synthetic oligonucleotide
agaguggucaaauauugac

SEQ ID NO: 1612519 - RNA, 19 nt, Artificial Sequence
  Description of Artificial Sequence: Synthetic oligonucleotide
auaucuacacuuguaaagc

SEQ ID NO: 1612520 - RNA, 19 nt, Artificial Sequence
  Description of Artificial Sequence: Synthetic oligonucleotide
uccggaaucaucaggaaag

SEQ ID NO: 1612521 - RNA, 19 nt, Artificial Sequence
  Description of Artificial Sequence: Synthetic oligonucleotide
aauggcggcacuuuccuuc

SEQ ID NO: 1612522 - RNA, 19 nt, Artificial Sequence
  Description of Artificial Sequence: Synthetic oligonucleotide
ucaaauauugaccaauaau

SEQ ID NO: 1612523 - RNA, 19 nt, Artificial Sequence
  Description of Artificial Sequence: Synthetic oligonucleotide
ucucacuucagcgaaauag

SEQ ID NO: 1612524 - RNA, 19 nt, Artificial Sequence
  Description of Artificial Sequence: Synthetic oligonucleotide
aaagaaagcgccguccugg

SEQ ID NO: 1612525 - RNA, 19 nt, Artificial Sequence
  Description of Artificial Sequence: Synthetic oligonucleotide
aaauauugaccaauaaugu

SEQ ID NO: 1612526 - RNA, 19 nt, Artificial Sequence
  Description of Artificial Sequence: Synthetic oligonucleotide
aauauugaccaauaauguu

SEQ ID NO: 1612527 - RNA, 19 nt, Artificial Sequence
  Description of Artificial Sequence: Synthetic oligonucleotide
aauacccucugccucuugg

SEQ ID NO: 1612528 - RNA, 19 nt, Artificial Sequence
  Description of Artificial Sequence: Synthetic oligonucleotide
aaggguacccaggauacgc

SEQ ID NO: 1612529 - RNA, 19 nt, Artificial Sequence
  Description of Artificial Sequence: Synthetic oligonucleotide
uuaccagucacuuuacaga

SEQ ID NO: 1612530 - RNA, 19 nt, Artificial Sequence
  Description of Artificial Sequence: Synthetic oligonucleotide
aaccauuacuacuuggagu

SEQ ID NO: 1612531 - RNA, 19 nt, Artificial Sequence
  Description of Artificial Sequence: Synthetic oligonucleotide
agauggugaucuuguaucc

SEQ ID NO: 1612532 - RNA, 19 nt, Artificial Sequence
  Description of Artificial Sequence: Synthetic oligonucleotide
acuuguaaagcacugcugu

SEQ ID NO: 1612533 - RNA, 19 nt, Artificial Sequence
  Description of Artificial Sequence: Synthetic oligonucleotide
acaagugugcuggagaugg

SEQ ID NO: 1612534 - RNA, 19 nt, Artificial Sequence
  Description of Artificial Sequence: Synthetic oligonucleotide
ucacuuuacagaacagucc

SEQ ID NO: 1612535 - RNA, 19 nt, Artificial Sequence
  Description of Artificial Sequence: Synthetic oligonucleotide
uuuacagaacaguccagag

SEQ ID NO: 1612536 - RNA, 19 nt, Artificial Sequence
  Description of Artificial Sequence: Synthetic oligonucleotide
ucucuagacaaguugugcc

SEQ ID NO: 1612537 - RNA, 19 nt, Artificial Sequence
  Description of Artificial Sequence: Synthetic oligonucleotide
guuaccagucacuuuacag

SEQ ID NO: 1612538 - RNA, 19 nt, Artificial Sequence
  Description of Artificial Sequence: Synthetic oligonucleotide
ugaucuuguauccuugacu

SEQ ID NO: 1612539 - RNA, 19 nt, Artificial Sequence
  Description of Artificial Sequence: Synthetic oligonucleotide
acugguuauaucuacacuu

SEQ ID NO: 1612540 - RNA, 19 nt, Artificial Sequence
  Description of Artificial Sequence: Synthetic oligonucleotide
uccaccaggagauaggggu

SEQ ID NO: 1612541 - RNA, 19 nt, Artificial Sequence
  Description of Artificial Sequence: Synthetic oligonucleotide
ugaccaauaauguuucccu

SEQ ID NO: 1612542 - RNA, 19 nt, Artificial Sequence
  Description of Artificial Sequence: Synthetic oligonucleotide
uuaaagaaagcgccguccu

SEQ ID NO: 1612543 - RNA, 19 nt, Artificial Sequence
  Description of Artificial Sequence: Synthetic oligonucleotide
uauugaccaauaauguuuc

SEQ ID NO: 1612544 - RNA, 19 nt, Artificial Sequence
  Description of Artificial Sequence: Synthetic oligonucleotide
cuuaccauaguugucccgg

SEQ ID NO: 1612545 - RNA, 19 nt, Artificial Sequence
  Description of Artificial Sequence: Synthetic oligonucleotide
acccaggauacgcaggucc

SEQ ID NO: 1612546 - RNA, 19 nt, Artificial Sequence
  Description of Artificial Sequence: Synthetic oligonucleotide
cuugcuguggccuuagcug

SEQ ID NO: 1612547 - RNA, 19 nt, Artificial Sequence
  Description of Artificial Sequence: Synthetic oligonucleotide
cacuucagcgaaauagucg

SEQ ID NO: 1612548 - RNA, 19 nt, Artificial Sequence
  Description of Artificial Sequence: Synthetic oligonucleotide
uuagugggcagacuuggug

SEQ ID NO: 1612549 - RNA, 19 nt, Artificial Sequence
  Description of Artificial Sequence: Synthetic oligonucleotide
uccgguuugguggugaggg

SEQ ID NO: 1612550 - RNA, 19 nt, Artificial Sequence
  Description of Artificial Sequence: Synthetic oligonucleotide
guuauaucuacacuuguaa

SEQ ID NO: 1612551 - RNA, 19 nt, Artificial Sequence
  Description of Artificial Sequence: Synthetic oligonucleotide
uuauaucuacacuuguaaa

SEQ ID NO: 1612552 - RNA, 19 nt, Artificial Sequence
  Description of Artificial Sequence: Synthetic oligonucleotide
gaaagcgccguccuggggc

SEQ ID NO: 1612553 - RNA, 19 nt, Artificial Sequence
  Description of Artificial Sequence: Synthetic oligonucleotide
auagggguccauuggagag

SEQ ID NO: 1612554 - RNA, 19 nt, Artificial Sequence
  Description of Artificial Sequence: Synthetic oligonucleotide
aaagcgccguccuggggcc

SEQ ID NO: 1612555 - RNA, 19 nt, Artificial Sequence
  Description of Artificial Sequence: Synthetic oligonucleotide
uugaccaauaauguuuccc

SEQ ID NO: 1612556 - RNA, 19 nt, Artificial Sequence
  Description of Artificial Sequence: Synthetic oligonucleotide
agcuacugguuauaucuac

SEQ ID NO: 1612557 - RNA, 19 nt, Artificial Sequence
  Description of Artificial Sequence: Synthetic oligonucleotide
uuaauggcggcacuuuccu

SEQ ID NO: 1612558 - RNA, 19 nt, Artificial Sequence
  Description of Artificial Sequence: Synthetic oligonucleotide
ucccuuaaagaaagcgccg

SEQ ID NO: 1612559 - RNA, 19 nt, Artificial Sequence
  Description of Artificial Sequence: Synthetic oligonucleotide
aaucaucaggaaaggguac

SEQ ID NO: 1612560 - RNA, 19 nt, Artificial Sequence
  Description of Artificial Sequence: Synthetic oligonucleotide
ucagcgaaauagucgcgcg

SEQ ID NO: 1612561 - RNA, 19 nt, Artificial Sequence
  Description of Artificial Sequence: Synthetic oligonucleotide
aaaguccugaagaucagcu

SEQ ID NO: 1612562 - RNA, 19 nt, Artificial Sequence
  Description of Artificial Sequence: Synthetic oligonucleotide
agcgaaauagucgcgcggc

SEQ ID NO: 1612563 - RNA, 19 nt, Artificial Sequence
  Description of Artificial Sequence: Synthetic oligonucleotide
aagaaagcgccguccuggg

SEQ ID NO: 1612564 - RNA, 19 nt, Artificial Sequence
  Description of Artificial Sequence: Synthetic oligonucleotide
auuuugcacucacugcagg

SEQ ID NO: 1612565 - RNA, 19 nt, Artificial Sequence
  Description of Artificial Sequence: Synthetic oligonucleotide
auacgcaggucccuuaaag

SEQ ID NO: 1612566 - RNA, 19 nt, Artificial Sequence
  Description of Artificial Sequence: Synthetic oligonucleotide
ucucgucugaaccauuacu

SEQ ID NO: 1612567 - RNA, 19 nt, Artificial Sequence
  Description of Artificial Sequence: Synthetic oligonucleotide
auauugaccaauaauguuu

SEQ ID NO: 1612568 - RNA, 19 nt, Artificial Sequence
  Description of Artificial Sequence: Synthetic oligonucleotide
aucgcagggcuucucaggg

SEQ ID NO: 1612569 - RNA, 19 nt, Artificial Sequence
  Description of Artificial Sequence: Synthetic oligonucleotide
cuacugguuauaucuacac

SEQ ID NO: 1612570 - RNA, 19 nt, Artificial Sequence
  Description of Artificial Sequence: Synthetic oligonucleotide
aaggaggggccauuucauc

SEQ ID NO: 1612571 - RNA, 19 nt, Artificial Sequence
  Description of Artificial Sequence: Synthetic oligonucleotide
uguauccuugacuguagca

SEQ ID NO: 1612572 - RNA, 19 nt, Artificial Sequence
  Description of Artificial Sequence: Synthetic oligonucleotide
ugcggagggaguugcaggg

SEQ ID NO: 1612573 - RNA, 19 nt, Artificial Sequence
  Description of Artificial Sequence: Synthetic oligonucleotide
cugguuauaucuacacuug

SEQ ID NO: 1612574 - RNA, 19 nt, Artificial Sequence
  Description of Artificial Sequence: Synthetic oligonucleotide
uuuucuucccaggauuuug

SEQ ID NO: 1612575 - RNA, 19 nt, Artificial Sequence
  Description of Artificial Sequence: Synthetic oligonucleotide
uggaaagcgucccgggcgg

SEQ ID NO: 1612576 - RNA, 19 nt, Artificial Sequence
  Description of Artificial Sequence: Synthetic oligonucleotide
uaucgcagggcuucucagg

SEQ ID NO: 1612577 - RNA, 19 nt, Artificial Sequence
  Description of Artificial Sequence: Synthetic oligonucleotide
ugugccacuuuucuuccca

SEQ ID NO: 1612578 - RNA, 19 nt, Artificial Sequence
  Description of Artificial Sequence: Synthetic oligonucleotide
aagaucagcuacugguuau

SEQ ID NO: 1612579 - RNA, 19 nt, Artificial Sequence
  Description of Artificial Sequence: Synthetic oligonucleotide
gucccuuaaagaaagcgcc

SEQ ID NO: 1612580 - RNA, 19 nt, Artificial Sequence
  Description of Artificial Sequence: Synthetic oligonucleotide
ucugaaccauuacuacuug

SEQ ID NO: 1612581 - RNA, 19 nt, Artificial Sequence
  Description of Artificial Sequence: Synthetic oligonucleotide
uaaagaaagcgccguccug

SEQ ID NO: 1612582 - RNA, 19 nt, Artificial Sequence
  Description of Artificial Sequence: Synthetic oligonucleotide
ucuuaccauaguugucccg

SEQ ID NO: 1612583 - RNA, 19 nt, Artificial Sequence
  Description of Artificial Sequence: Synthetic oligonucleotide
uucucuagacaaguugugc

SEQ ID NO: 1612584 - RNA, 19 nt, Artificial Sequence
  Description of Artificial Sequence: Synthetic oligonucleotide
cuugacuguagcacuggag

SEQ ID NO: 1612585 - RNA, 19 nt, Artificial Sequence
  Description of Artificial Sequence: Synthetic oligonucleotide
gaaauagucgcgcggcuuc

SEQ ID NO: 1612586 - RNA, 19 nt, Artificial Sequence
  Description of Artificial Sequence: Synthetic oligonucleotide
gguauuuugcacucacugc

SEQ ID NO: 1612587 - RNA, 19 nt, Artificial Sequence
  Description of Artificial Sequence: Synthetic oligonucleotide
uacugguuauaucuacacu

SEQ ID NO: 1612588 - RNA, 19 nt, Artificial Sequence
  Description of Artificial Sequence: Synthetic oligonucleotide
ugguuauaucuacacuugu

SEQ ID NO: 1612589 - RNA, 19 nt, Artificial Sequence
  Description of Artificial Sequence: Synthetic oligonucleotide
aggucccuuaaagaaagcg

SEQ ID NO: 1612590 - RNA, 19 nt, Artificial Sequence
  Description of Artificial Sequence: Synthetic oligonucleotide
guauccuugacuguagcac

SEQ ID NO: 1612591 - RNA, 19 nt, Artificial Sequence
  Description of Artificial Sequence: Synthetic oligonucleotide
uuggguagagcugugcgug

SEQ ID NO: 1612592 - RNA, 19 nt, Artificial Sequence
  Description of Artificial Sequence: Synthetic oligonucleotide
agacugccugcauagaaca

SEQ ID NO: 1612593 - RNA, 19 nt, Artificial Sequence
  Description of Artificial Sequence: Synthetic oligonucleotide
uucagcgaaauagucgcgc

SEQ ID NO: 1612594 - RNA, 19 nt, Artificial Sequence
  Description of Artificial Sequence: Synthetic oligonucleotide
uuugcacucacugcagggc

SEQ ID NO: 1612595 - RNA, 19 nt, Artificial Sequence
  Description of Artificial Sequence: Synthetic oligonucleotide
gacuuggugaccaaggaaa

SEQ ID NO: 1612596 - RNA, 19 nt, Artificial Sequence
  Description of Artificial Sequence: Synthetic oligonucleotide
uccagaguggucaaauauu

SEQ ID NO: 1612597 - RNA, 19 nt, Artificial Sequence
  Description of Artificial Sequence: Synthetic oligonucleotide
ggaggggacaucaaggagg

SEQ ID NO: 1612598 - RNA, 19 nt, Artificial Sequence
  Description of Artificial Sequence: Synthetic oligonucleotide
aggagauagggguccauug

SEQ ID NO: 1612599 - RNA, 19 nt, Artificial Sequence
  Description of Artificial Sequence: Synthetic oligonucleotide
uuaccauaguugucccggg

SEQ ID NO: 1612600 - RNA, 19 nt, Artificial Sequence
  Description of Artificial Sequence: Synthetic oligonucleotide
gaauacauggcuucuugcu

SEQ ID NO: 1612601 - RNA, 19 nt, Artificial Sequence
  Description of Artificial Sequence: Synthetic oligonucleotide
aucagcuacugguuauauc

SEQ ID NO: 1612602 - RNA, 19 nt, Artificial Sequence
  Description of Artificial Sequence: Synthetic oligonucleotide
gucacuuuacagaacaguc

SEQ ID NO: 1612603 - RNA, 19 nt, Artificial Sequence
  Description of Artificial Sequence: Synthetic oligonucleotide
ucuuguauccuugacugua

SEQ ID NO: 1612604 - RNA, 19 nt, Artificial Sequence
  Description of Artificial Sequence: Synthetic oligonucleotide
uuuugguuaauggcggcac

SEQ ID NO: 1612605 - RNA, 19 nt, Artificial Sequence
  Description of Artificial Sequence: Synthetic oligonucleotide
aagaggcagggcuaucgca

SEQ ID NO: 1612606 - RNA, 19 nt, Artificial Sequence
  Description of Artificial Sequence: Synthetic oligonucleotide
ucacuucagcgaaauaguc

SEQ ID NO: 1612607 - RNA, 19 nt, Artificial Sequence
  Description of Artificial Sequence: Synthetic oligonucleotide
gguaacccaccacagcucg

SEQ ID NO: 1612608 - RNA, 19 nt, Artificial Sequence
  Description of Artificial Sequence: Synthetic oligonucleotide
uacuacuuggagucccgag

SEQ ID NO: 1612609 - RNA, 19 nt, Artificial Sequence
  Description of Artificial Sequence: Synthetic oligonucleotide
cuacuuggagucccgagac

SEQ ID NO: 1612610 - RNA, 19 nt, Artificial Sequence
  Description of Artificial Sequence: Synthetic oligonucleotide
agagguacgggcugcucag

SEQ ID NO: 1612611 - RNA, 19 nt, Artificial Sequence
  Description of Artificial Sequence: Synthetic oligonucleotide
ggagauagggguccauugg

SEQ ID NO: 1612612 - RNA, 19 nt, Artificial Sequence
  Description of Artificial Sequence: Synthetic oligonucleotide
ucgucugaaccauuacuac

SEQ ID NO: 1612613 - RNA, 19 nt, Artificial Sequence
  Description of Artificial Sequence: Synthetic oligonucleotide
ggauuuugguuaauggcgg

SEQ ID NO: 1612614 - RNA, 19 nt, Artificial Sequence
  Description of Artificial Sequence: Synthetic oligonucleotide
uacacuuguaaagcacugc

SEQ ID NO: 1612615 - RNA, 19 nt, Artificial Sequence
  Description of Artificial Sequence: Synthetic oligonucleotide
gauagggguccauuggaga

SEQ ID NO: 1612616 - RNA, 19 nt, Artificial Sequence
  Description of Artificial Sequence: Synthetic oligonucleotide
uggugaucuuguauccuug

SEQ ID NO: 1612617 - RNA, 19 nt, Artificial Sequence
  Description of Artificial Sequence: Synthetic oligonucleotide
guuaauggcggcacuuucc

SEQ ID NO: 1612618 - RNA, 19 nt, Artificial Sequence
  Description of Artificial Sequence: Synthetic oligonucleotide
aguugucccgggcugacca

SEQ ID NO: 1612619 - RNA, 19 nt, Artificial Sequence
  Description of Artificial Sequence: Synthetic oligonucleotide
uguagcacggggagggccu

SEQ ID NO: 1612620 - RNA, 19 nt, Artificial Sequence
  Description of Artificial Sequence: Synthetic oligonucleotide
gagauagggguccauugga

SEQ ID NO: 1612621 - RNA, 19 nt, Artificial Sequence
  Description of Artificial Sequence: Synthetic oligonucleotide
uuugguuaauggcggcacu

SEQ ID NO: 1612622 - RNA, 19 nt, Artificial Sequence
  Description of Artificial Sequence: Synthetic oligonucleotide
acuuggagucccgagacug

SEQ ID NO: 1612623 - RNA, 19 nt, Artificial Sequence
  Description of Artificial Sequence: Synthetic oligonucleotide
uggucaaauauugaccaau

SEQ ID NO: 1612624 - RNA, 19 nt, Artificial Sequence
  Description of Artificial Sequence: Synthetic oligonucleotide
accauaguugucccgggcu

SEQ ID NO: 1612625 - RNA, 19 nt, Artificial Sequence
  Description of Artificial Sequence: Synthetic oligonucleotide
gcaagcucauaguauuugg

SEQ ID NO: 1612626 - RNA, 19 nt, Artificial Sequence
  Description of Artificial Sequence: Synthetic oligonucleotide
gaagaggcagggcuaucgc

SEQ ID NO: 1612627 - RNA, 19 nt, Artificial Sequence
  Description of Artificial Sequence: Synthetic oligonucleotide
gguuggguagagcugugcg

SEQ ID NO: 1612628 - RNA, 19 nt, Artificial Sequence
  Description of Artificial Sequence: Synthetic oligonucleotide
ccaggauuuugguuaaugg

SEQ ID NO: 1612629 - RNA, 19 nt, Artificial Sequence
  Description of Artificial Sequence: Synthetic oligonucleotide
auagucgcgcggcuucugg

SEQ ID NO: 1612630 - RNA, 19 nt, Artificial Sequence
  Description of Artificial Sequence: Synthetic oligonucleotide
aaaggguacccaggauacg

SEQ ID NO: 1612631 - RNA, 19 nt, Artificial Sequence
  Description of Artificial Sequence: Synthetic oligonucleotide
ucuagacaaguugugccac

SEQ ID NO: 1612632 - RNA, 19 nt, Artificial Sequence
  Description of Artificial Sequence: Synthetic oligonucleotide
uuguaaagcacugcuguua

SEQ ID NO: 1612633 - RNA, 19 nt, Artificial Sequence
  Description of Artificial Sequence: Synthetic oligonucleotide
cagguacugaauacauggc

SEQ ID NO: 1612634 - RNA, 19 nt, Artificial Sequence
  Description of Artificial Sequence: Synthetic oligonucleotide
aacccaccacagcucgugg

SEQ ID NO: 1612635 - RNA, 19 nt, Artificial Sequence
  Description of Artificial Sequence: Synthetic oligonucleotide
agggcuaucgcagggcuuc

SEQ ID NO: 1612636 - RNA, 19 nt, Artificial Sequence
  Description of Artificial Sequence: Synthetic oligonucleotide
cagugcuuucuugugaagc

SEQ ID NO: 1612637 - RNA, 19 nt, Artificial Sequence
  Description of Artificial Sequence: Synthetic oligonucleotide
auuacuacuuggagucccg

SEQ ID NO: 1612638 - RNA, 19 nt, Artificial Sequence
  Description of Artificial Sequence: Synthetic oligonucleotide
cacuuguaaagcacugcug

SEQ ID NO: 1612639 - RNA, 19 nt, Artificial Sequence
  Description of Artificial Sequence: Synthetic oligonucleotide
acggucacuggguauuuug

SEQ ID NO: 1612640 - RNA, 19 nt, Artificial Sequence
  Description of Artificial Sequence: Synthetic oligonucleotide
uuuucacggucacugggua

SEQ ID NO: 1612641 - RNA, 19 nt, Artificial Sequence
  Description of Artificial Sequence: Synthetic oligonucleotide
acgcaggucccuuaaagaa

SEQ ID NO: 1612642 - RNA, 19 nt, Artificial Sequence
  Description of Artificial Sequence: Synthetic oligonucleotide
acagcucguggggagagcg

SEQ ID NO: 1612643 - RNA, 19 nt, Artificial Sequence
  Description of Artificial Sequence: Synthetic oligonucleotide
caauaauguuucccuuccc

SEQ ID NO: 1612644 - RNA, 19 nt, Artificial Sequence
  Description of Artificial Sequence: Synthetic oligonucleotide
gaagaucagcuacugguua

SEQ ID NO: 1612645 - RNA, 19 nt, Artificial Sequence
  Description of Artificial Sequence: Synthetic oligonucleotide
ggugcacucagccaccacc

SEQ ID NO: 1612646 - RNA, 19 nt, Artificial Sequence
  Description of Artificial Sequence: Synthetic oligonucleotide
ucccgggcugaccagguug

SEQ ID NO: 1612647 - RNA, 19 nt, Artificial Sequence
  Description of Artificial Sequence: Synthetic oligonucleotide
ggugaccaaggaaagaggc

SEQ ID NO: 1612648 - RNA, 19 nt, Artificial Sequence
  Description of Artificial Sequence: Synthetic oligonucleotide
cuucagcgaaauagucgcg

SEQ ID NO: 1612649 - RNA, 19 nt, Artificial Sequence
  Description of Artificial Sequence: Synthetic oligonucleotide
cuggguauuuugcacucac

SEQ ID NO: 1612650 - RNA, 19 nt, Artificial Sequence
  Description of Artificial Sequence: Synthetic oligonucleotide
cucuagacaaguugugcca

SEQ ID NO: 1612651 - RNA, 19 nt, Artificial Sequence
  Description of Artificial Sequence: Synthetic oligonucleotide
gggccuucucacuucagcg

SEQ ID NO: 1612652 - RNA, 19 nt, Artificial Sequence
  Description of Artificial Sequence: Synthetic oligonucleotide
ggggacaucaaggaggggc

SEQ ID NO: 1612653 - RNA, 19 nt, Artificial Sequence
  Description of Artificial Sequence: Synthetic oligonucleotide
ucagguccggaaucaucag

SEQ ID NO: 1612654 - RNA, 19 nt, Artificial Sequence
  Description of Artificial Sequence: Synthetic oligonucleotide
agacuuggugaccaaggaa

SEQ ID NO: 1612655 - RNA, 19 nt, Artificial Sequence
  Description of Artificial Sequence: Synthetic oligonucleotide
gcuguuaccagucacuuua

SEQ ID NO: 1612656 - RNA, 19 nt, Artificial Sequence
  Description of Artificial Sequence: Synthetic oligonucleotide
cuuggagucccgagacugc

SEQ ID NO: 1612657 - RNA, 19 nt, Artificial Sequence
  Description of Artificial Sequence: Synthetic oligonucleotide
cucgucugaaccauuacua

SEQ ID NO: 1612658 - RNA, 19 nt, Artificial Sequence
  Description of Artificial Sequence: Synthetic oligonucleotide
uaacccaccacagcucgug

SEQ ID NO: 1612659 - RNA, 19 nt, Artificial Sequence
  Description of Artificial Sequence: Synthetic oligonucleotide
guccauuggagagguacgg

SEQ ID NO: 1612660 - RNA, 19 nt, Artificial Sequence
  Description of Artificial Sequence: Synthetic oligonucleotide
gucaaauauugaccaauaa

SEQ ID NO: 1612661 - RNA, 19 nt, Artificial Sequence
  Description of Artificial Sequence: Synthetic oligonucleotide
ugcgcgcuccaccaggaga

SEQ ID NO: 1612662 - RNA, 19 nt, Artificial Sequence
  Description of Artificial Sequence: Synthetic oligonucleotide
cagguccggaaucaucagg

SEQ ID NO: 1612663 - RNA, 19 nt, Artificial Sequence
  Description of Artificial Sequence: Synthetic oligonucleotide
ggucccuuaaagaaagcgc

SEQ ID NO: 1612664 - RNA, 19 nt, Artificial Sequence
  Description of Artificial Sequence: Synthetic oligonucleotide
ggaagaggcagggcuaucg

SEQ ID NO: 1612665 - RNA, 19 nt, Artificial Sequence
  Description of Artificial Sequence: Synthetic oligonucleotide
cagcgaaauagucgcgcgg

SEQ ID NO: 1612666 - RNA, 19 nt, Artificial Sequence
  Description of Artificial Sequence: Synthetic oligonucleotide
uacugaauacauggcuucu

SEQ ID NO: 1612667 - RNA, 19 nt, Artificial Sequence
  Description of Artificial Sequence: Synthetic oligonucleotide
uagagcugugcgugaagcu

SEQ ID NO: 1612668 - RNA, 19 nt, Artificial Sequence
  Description of Artificial Sequence: Synthetic oligonucleotide
agaacaguccagagugguc

SEQ ID NO: 1612669 - RNA, 19 nt, Artificial Sequence
  Description of Artificial Sequence: Synthetic oligonucleotide
agaaagcgccguccugggg

SEQ ID NO: 1612670 - RNA, 19 nt, Artificial Sequence
  Description of Artificial Sequence: Synthetic oligonucleotide
auaguugucccgggcugac

SEQ ID NO: 1612671 - RNA, 19 nt, Artificial Sequence
  Description of Artificial Sequence: Synthetic oligonucleotide
ugccugcauagaacagggg

SEQ ID NO: 1612672 - RNA, 19 nt, Artificial Sequence
  Description of Artificial Sequence: Synthetic oligonucleotide
ccauuggagagguacgggc

SEQ ID NO: 1612673 - RNA, 19 nt, Artificial Sequence
  Description of Artificial Sequence: Synthetic oligonucleotide
ggccugaugggcauggagg

SEQ ID NO: 1612674 - RNA, 19 nt, Artificial Sequence
  Description of Artificial Sequence: Synthetic oligonucleotide
agguccggaaucaucagga

SEQ ID NO: 1612675 - RNA, 19 nt, Artificial Sequence
  Description of Artificial Sequence: Synthetic oligonucleotide
guaaagcacugcuguuacc

SEQ ID NO: 1612676 - RNA, 19 nt, Artificial Sequence
  Description of Artificial Sequence: Synthetic oligonucleotide
aaauagucgcgcggcuucu

SEQ ID NO: 1612677 - RNA, 19 nt, Artificial Sequence
  Description of Artificial Sequence: Synthetic oligonucleotide
gagagcgccacacacugcu

SEQ ID NO: 1612678 - RNA, 19 nt, Artificial Sequence
  Description of Artificial Sequence: Synthetic oligonucleotide
agguuggguagagcugugc

SEQ ID NO: 1612679 - RNA, 19 nt, Artificial Sequence
  Description of Artificial Sequence: Synthetic oligonucleotide
cauauacaacaugaaggca

SEQ ID NO: 1612680 - RNA, 19 nt, Artificial Sequence
  Description of Artificial Sequence: Synthetic oligonucleotide
uucacggucacuggguauu

SEQ ID NO: 1612681 - RNA, 19 nt, Artificial Sequence
  Description of Artificial Sequence: Synthetic oligonucleotide
cacuggguauuuugcacuc

SEQ ID NO: 1612682 - RNA, 19 nt, Artificial Sequence
  Description of Artificial Sequence: Synthetic oligonucleotide
uacuuggagucccgagacu

SEQ ID NO: 1612683 - RNA, 19 nt, Artificial Sequence
  Description of Artificial Sequence: Synthetic oligonucleotide
acagaacaguccagagugg

SEQ ID NO: 1612684 - RNA, 19 nt, Artificial Sequence
  Description of Artificial Sequence: Synthetic oligonucleotide
cucacuucagcgaaauagu

SEQ ID NO: 1612685 - RNA, 19 nt, Artificial Sequence
  Description of Artificial Sequence: Synthetic oligonucleotide
gcggcacuuuccuucaggg

SEQ ID NO: 1612686 - RNA, 19 nt, Artificial Sequence
  Description of Artificial Sequence: Synthetic oligonucleotide
aauagucgcgcggcuucug

SEQ ID NO: 1612687 - RNA, 19 nt, Artificial Sequence
  Description of Artificial Sequence: Synthetic oligonucleotide
gacaaguugugccacuuuu

SEQ ID NO: 1612688 - RNA, 19 nt, Artificial Sequence
  Description of Artificial Sequence: Synthetic oligonucleotide
uuucacggucacuggguau

SEQ ID NO: 1612689 - RNA, 19 nt, Artificial Sequence
  Description of Artificial Sequence: Synthetic oligonucleotide
cagguaacccaccacagcu

SEQ ID NO: 1612690 - RNA, 19 nt, Artificial Sequence
  Description of Artificial Sequence: Synthetic oligonucleotide
agguaacccaccacagcuc

SEQ ID NO: 1612691 - RNA, 19 nt, Artificial Sequence
  Description of Artificial Sequence: Synthetic oligonucleotide
ucgcgcggcuucuggaaag

SEQ ID NO: 1612692 - RNA, 19 nt, Artificial Sequence
  Description of Artificial Sequence: Synthetic oligonucleotide
ucgcagggcuucucagggg

SEQ ID NO: 1612693 - RNA, 19 nt, Artificial Sequence
  Description of Artificial Sequence: Synthetic oligonucleotide
uucccaggauuuugguuaa

SEQ ID NO: 1612694 - RNA, 19 nt, Artificial Sequence
  Description of Artificial Sequence: Synthetic oligonucleotide
gguacgugcgcgcuccacc

SEQ ID NO: 1612695 - RNA, 19 nt, Artificial Sequence
  Description of Artificial Sequence: Synthetic oligonucleotide
cucacugcagggcucacaa

SEQ ID NO: 1612696 - RNA, 19 nt, Artificial Sequence
  Description of Artificial Sequence: Synthetic oligonucleotide
ugugcgugaagcugccguu

SEQ ID NO: 1612697 - RNA, 19 nt, Artificial Sequence
  Description of Artificial Sequence: Synthetic oligonucleotide
uugguuaauggcggcacuu

SEQ ID NO: 1612698 - RNA, 19 nt, Artificial Sequence
  Description of Artificial Sequence: Synthetic oligonucleotide
agggcacggagcccagggg

SEQ ID NO: 1612699 - RNA, 19 nt, Artificial Sequence
  Description of Artificial Sequence: Synthetic oligonucleotide
uuacuacuuggagucccga

SEQ ID NO: 1612700 - RNA, 19 nt, Artificial Sequence
  Description of Artificial Sequence: Synthetic oligonucleotide
cuugcucggaguggguggc

SEQ ID NO: 1612701 - RNA, 19 nt, Artificial Sequence
  Description of Artificial Sequence: Synthetic oligonucleotide
ugcacucacugcagggcuc

SEQ ID NO: 1612702 - RNA, 19 nt, Artificial Sequence
  Description of Artificial Sequence: Synthetic oligonucleotide
caugaggcuucuucuccuc

SEQ ID NO: 1612703 - RNA, 19 nt, Artificial Sequence
  Description of Artificial Sequence: Synthetic oligonucleotide
agcgugcugccaugggaag

SEQ ID NO: 1612704 - RNA, 19 nt, Artificial Sequence
  Description of Artificial Sequence: Synthetic oligonucleotide
ugacaggaaggcagcugaa

SEQ ID NO: 1612705 - RNA, 19 nt, Artificial Sequence
  Description of Artificial Sequence: Synthetic oligonucleotide
uuccgggcaagcucauagu

SEQ ID NO: 1612706 - RNA, 19 nt, Artificial Sequence
  Description of Artificial Sequence: Synthetic oligonucleotide
ggguccauuggagagguac

SEQ ID NO: 1612707 - RNA, 19 nt, Artificial Sequence
  Description of Artificial Sequence: Synthetic oligonucleotide
uugugccacuuuucuuccc

SEQ ID NO: 1612708 - RNA, 19 nt, Artificial Sequence
  Description of Artificial Sequence: Synthetic oligonucleotide
ucacugcagggcucacaag

SEQ ID NO: 1612709 - RNA, 19 nt, Artificial Sequence
  Description of Artificial Sequence: Synthetic oligonucleotide
agguacgggcugcucaggu

SEQ ID NO: 1612710 - RNA, 19 nt, Artificial Sequence
  Description of Artificial Sequence: Synthetic oligonucleotide
aaagcgucccgggcgggcu

SEQ ID NO: 1612711 - RNA, 19 nt, Artificial Sequence
  Description of Artificial Sequence: Synthetic oligonucleotide
cucucgucugaaccauuac

SEQ ID NO: 1612712 - RNA, 19 nt, Artificial Sequence
  Description of Artificial Sequence: Synthetic oligonucleotide
gccuuagcugacaggaagg

SEQ ID NO: 1612713 - RNA, 19 nt, Artificial Sequence
  Description of Artificial Sequence: Synthetic oligonucleotide
auggcggcacuuuccuuca

SEQ ID NO: 1612714 - RNA, 19 nt, Artificial Sequence
  Description of Artificial Sequence: Synthetic oligonucleotide
uggguagagcugugcguga

SEQ ID NO: 1612715 - RNA, 19 nt, Artificial Sequence
  Description of Artificial Sequence: Synthetic oligonucleotide
ggcaagcucauaguauuug

SEQ ID NO: 1612716 - RNA, 19 nt, Artificial Sequence
  Description of Artificial Sequence: Synthetic oligonucleotide
uagacaaguugugccacuu

SEQ ID NO: 1612717 - RNA, 19 nt, Artificial Sequence
  Description of Artificial Sequence: Synthetic oligonucleotide
guccggaaucaucaggaaa

SEQ ID NO: 1612718 - RNA, 19 nt, Artificial Sequence
  Description of Artificial Sequence: Synthetic oligonucleotide
gguuaauggcggcacuuuc

SEQ ID NO: 1612719 - RNA, 19 nt, Artificial Sequence
  Description of Artificial Sequence: Synthetic oligonucleotide
uggagucccgagacugccu

SEQ ID NO: 1612720 - RNA, 19 nt, Artificial Sequence
  Description of Artificial Sequence: Synthetic oligonucleotide
uacgugcgcgcuccaccag

SEQ ID NO: 1612721 - RNA, 19 nt, Artificial Sequence
  Description of Artificial Sequence: Synthetic oligonucleotide
ggcggcacuuuccuucagg

SEQ ID NO: 1612722 - RNA, 19 nt, Artificial Sequence
  Description of Artificial Sequence: Synthetic oligonucleotide
cccgagacugccugcauag

SEQ ID NO: 1612723 - RNA, 19 nt, Artificial Sequence
  Description of Artificial Sequence: Synthetic oligonucleotide
guacgugcgcgcuccacca

SEQ ID NO: 1612724 - RNA, 19 nt, Artificial Sequence
  Description of Artificial Sequence: Synthetic oligonucleotide
gauacgcaggucccuuaaa

SEQ ID NO: 1612725 - RNA, 19 nt, Artificial Sequence
  Description of Artificial Sequence: Synthetic oligonucleotide
ggucacuggguauuuugca

SEQ ID NO: 1612726 - RNA, 19 nt, Artificial Sequence
  Description of Artificial Sequence: Synthetic oligonucleotide
ggagucccgagacugccug

SEQ ID NO: 1612727 - RNA, 19 nt, Artificial Sequence
  Description of Artificial Sequence: Synthetic oligonucleotide
gggacaucaaggaggggcc

SEQ ID NO: 1612728 - RNA, 19 nt, Artificial Sequence
  Description of Artificial Sequence: Synthetic oligonucleotide
uugcucuuagaggccagaa

SEQ ID NO: 1612729 - RNA, 19 nt, Artificial Sequence
  Description of Artificial Sequence: Synthetic oligonucleotide
uagucgcgcggcuucugga

SEQ ID NO: 1612730 - RNA, 19 nt, Artificial Sequence
  Description of Artificial Sequence: Synthetic oligonucleotide
aguccagcgugcugccaug

SEQ ID NO: 1612731 - RNA, 19 nt, Artificial Sequence
  Description of Artificial Sequence: Synthetic oligonucleotide
ggugaucuuguauccuuga

SEQ ID NO: 1612732 - RNA, 19 nt, Artificial Sequence
  Description of Artificial Sequence: Synthetic oligonucleotide
ucccgagacugccugcaua

SEQ ID NO: 1612733 - RNA, 19 nt, Artificial Sequence
  Description of Artificial Sequence: Synthetic oligonucleotide
ggguacccaggauacgcag

SEQ ID NO: 1612734 - RNA, 19 nt, Artificial Sequence
  Description of Artificial Sequence: Synthetic oligonucleotide
ugucccgggcugaccaggu

SEQ ID NO: 1612735 - RNA, 19 nt, Artificial Sequence
  Description of Artificial Sequence: Synthetic oligonucleotide
agacaaguugugccacuuu

SEQ ID NO: 1612736 - RNA, 19 nt, Artificial Sequence
  Description of Artificial Sequence: Synthetic oligonucleotide
cccuccucucgucugaacc

SEQ ID NO: 1612737 - RNA, 19 nt, Artificial Sequence
  Description of Artificial Sequence: Synthetic oligonucleotide
cugaccagguuggguagag

SEQ ID NO: 1612738 - RNA, 19 nt, Artificial Sequence
  Description of Artificial Sequence: Synthetic oligonucleotide
gaaagcgucccgggcgggc

SEQ ID NO: 1612739 - RNA, 19 nt, Artificial Sequence
  Description of Artificial Sequence: Synthetic oligonucleotide
guuggguagagcugugcgu

SEQ ID NO: 1612740 - RNA, 19 nt, Artificial Sequence
  Description of Artificial Sequence: Synthetic oligonucleotide
guugucccgggcugaccag

SEQ ID NO: 1612741 - RNA, 19 nt, Artificial Sequence
  Description of Artificial Sequence: Synthetic oligonucleotide
ugguuaauggcggcacuuu

SEQ ID NO: 1612742 - RNA, 19 nt, Artificial Sequence
  Description of Artificial Sequence: Synthetic oligonucleotide
ugcuguuaccagucacuuu

SEQ ID NO: 1612743 - RNA, 19 nt, Artificial Sequence
  Description of Artificial Sequence: Synthetic oligonucleotide
ugcagguacgugcgcgcuc

SEQ ID NO: 1612744 - RNA, 19 nt, Artificial Sequence
  Description of Artificial Sequence: Synthetic oligonucleotide
ugccguucuuuccgggcaa

SEQ ID NO: 1612745 - RNA, 19 nt, Artificial Sequence
  Description of Artificial Sequence: Synthetic oligonucleotide
gcuggcgaugccaaggcug

SEQ ID NO: 1612746 - RNA, 19 nt, Artificial Sequence
  Description of Artificial Sequence: Synthetic oligonucleotide
gguuauaucuacacuugua

SEQ ID NO: 1612747 - RNA, 19 nt, Artificial Sequence
  Description of Artificial Sequence: Synthetic oligonucleotide
gaauacccucugccucuug

SEQ ID NO: 1612748 - RNA, 19 nt, Artificial Sequence
  Description of Artificial Sequence: Synthetic oligonucleotide
gagucccgagacugccugc

SEQ ID NO: 1612749 - RNA, 19 nt, Artificial Sequence
  Description of Artificial Sequence: Synthetic oligonucleotide
gagguacgggcugcucagg

SEQ ID NO: 1612750 - RNA, 19 nt, Artificial Sequence
  Description of Artificial Sequence: Synthetic oligonucleotide
cccaccacagcucgugggg

SEQ ID NO: 1612751 - RNA, 19 nt, Artificial Sequence
  Description of Artificial Sequence: Synthetic oligonucleotide
aagcgucccgggcgggcug

SEQ ID NO: 1612752 - RNA, 19 nt, Artificial Sequence
  Description of Artificial Sequence: Synthetic oligonucleotide
ccauuucaucugcagguac

SEQ ID NO: 1612753 - RNA, 19 nt, Artificial Sequence
  Description of Artificial Sequence: Synthetic oligonucleotide
ucgggccuccgguuuggug

SEQ ID NO: 1612754 - RNA, 19 nt, Artificial Sequence
  Description of Artificial Sequence: Synthetic oligonucleotide
gcccagguaacccaccaca

SEQ ID NO: 1612755 - RNA, 19 nt, Artificial Sequence
  Description of Artificial Sequence: Synthetic oligonucleotide
acuggguauuuugcacuca

SEQ ID NO: 1612756 - RNA, 19 nt, Artificial Sequence
  Description of Artificial Sequence: Synthetic oligonucleotide
gucccgggcgggcugcggg

SEQ ID NO: 1612757 - RNA, 19 nt, Artificial Sequence
  Description of Artificial Sequence: Synthetic oligonucleotide
agguacgugcgcgcuccac

SEQ ID NO: 1612758 - RNA, 19 nt, Artificial Sequence
  Description of Artificial Sequence: Synthetic oligonucleotide
gcuaucgcagggcuucuca

SEQ ID NO: 1612759 - RNA, 19 nt, Artificial Sequence
  Description of Artificial Sequence: Synthetic oligonucleotide
cagcgugcugccaugggaa

SEQ ID NO: 1612760 - RNA, 19 nt, Artificial Sequence
  Description of Artificial Sequence: Synthetic oligonucleotide
gagaggucagcagggcaga

SEQ ID NO: 1612761 - RNA, 19 nt, Artificial Sequence
  Description of Artificial Sequence: Synthetic oligonucleotide
ccauaguugucccgggcug

SEQ ID NO: 1612762 - RNA, 19 nt, Artificial Sequence
  Description of Artificial Sequence: Synthetic oligonucleotide
ccuuaaagaaagcgccguc

SEQ ID NO: 1612763 - RNA, 19 nt, Artificial Sequence
  Description of Artificial Sequence: Synthetic oligonucleotide
uaauggcggcacuuuccuu

SEQ ID NO: 1612764 - RNA, 19 nt, Artificial Sequence
  Description of Artificial Sequence: Synthetic oligonucleotide
agcuggcgaugccaaggcu

SEQ ID NO: 1612765 - RNA, 19 nt, Artificial Sequence
  Description of Artificial Sequence: Synthetic oligonucleotide
caucaggaaaggguaccca

SEQ ID NO: 1612766 - RNA, 19 nt, Artificial Sequence
  Description of Artificial Sequence: Synthetic oligonucleotide
ggcagacuuggugaccaag

SEQ ID NO: 1612767 - RNA, 19 nt, Artificial Sequence
  Description of Artificial Sequence: Synthetic oligonucleotide
ggucaaauauugaccaaua

SEQ ID NO: 1612768 - RNA, 19 nt, Artificial Sequence
  Description of Artificial Sequence: Synthetic oligonucleotide
cuccgguuugguggugagg

SEQ ID NO: 1612769 - RNA, 19 nt, Artificial Sequence
  Description of Artificial Sequence: Synthetic oligonucleotide
ggcagguacugaauacaug

SEQ ID NO: 1612770 - RNA, 19 nt, Artificial Sequence
  Description of Artificial Sequence: Synthetic oligonucleotide
gcuggcguugcuugcugug

SEQ ID NO: 1612771 - RNA, 19 nt, Artificial Sequence
  Description of Artificial Sequence: Synthetic oligonucleotide
gcagguacgugcgcgcucc

SEQ ID NO: 1612772 - RNA, 19 nt, Artificial Sequence
  Description of Artificial Sequence: Synthetic oligonucleotide
aggguacccaggauacgca

SEQ ID NO: 1612773 - RNA, 19 nt, Artificial Sequence
  Description of Artificial Sequence: Synthetic oligonucleotide
cugcgggcgccucuccgcc

SEQ ID NO: 1612774 - RNA, 19 nt, Artificial Sequence
  Description of Artificial Sequence: Synthetic oligonucleotide
gguacugaauacauggcuu

SEQ ID NO: 1612775 - RNA, 19 nt, Artificial Sequence
  Description of Artificial Sequence: Synthetic oligonucleotide
cagguuggguagagcugug

SEQ ID NO: 1612776 - RNA, 19 nt, Artificial Sequence
  Description of Artificial Sequence: Synthetic oligonucleotide
cuguagcacuggaggggac

SEQ ID NO: 1612777 - RNA, 19 nt, Artificial Sequence
  Description of Artificial Sequence: Synthetic oligonucleotide
ccggaaucaucaggaaagg

SEQ ID NO: 1612778 - RNA, 19 nt, Artificial Sequence
  Description of Artificial Sequence: Synthetic oligonucleotide
uggagagguacgggcugcu

SEQ ID NO: 1612779 - RNA, 19 nt, Artificial Sequence
  Description of Artificial Sequence: Synthetic oligonucleotide
uggcggcacuuuccuucag

SEQ ID NO: 1612780 - RNA, 19 nt, Artificial Sequence
  Description of Artificial Sequence: Synthetic oligonucleotide
cuagacaaguugugccacu

SEQ ID NO: 1612781 - RNA, 19 nt, Artificial Sequence
  Description of Artificial Sequence: Synthetic oligonucleotide
gggcugaccagguugggua

SEQ ID NO: 1612782 - RNA, 19 nt, Artificial Sequence
  Description of Artificial Sequence: Synthetic oligonucleotide
cccaggauuuugguuaaug

SEQ ID NO: 1612783 - RNA, 19 nt, Artificial Sequence
  Description of Artificial Sequence: Synthetic oligonucleotide
gggaguugcaggggagucc

SEQ ID NO: 1612784 - RNA, 19 nt, Artificial Sequence
  Description of Artificial Sequence: Synthetic oligonucleotide
cugugcgugaagcugccgu

SEQ ID NO: 1612785 - RNA, 19 nt, Artificial Sequence
  Description of Artificial Sequence: Synthetic oligonucleotide
gcugcggagggaguugcag

SEQ ID NO: 1612786 - RNA, 19 nt, Artificial Sequence
  Description of Artificial Sequence: Synthetic oligonucleotide
cucguggggagagcgccac

SEQ ID NO: 1612787 - RNA, 19 nt, Artificial Sequence
  Description of Artificial Sequence: Synthetic oligonucleotide
gguacgggcugcucagguc

SEQ ID NO: 1612788 - RNA, 19 nt, Artificial Sequence
  Description of Artificial Sequence: Synthetic oligonucleotide
uccucucgucugaaccauu

SEQ ID NO: 1612789 - RNA, 19 nt, Artificial Sequence
  Description of Artificial Sequence: Synthetic oligonucleotide
cuugcucuuagaggccaga

SEQ ID NO: 1612790 - RNA, 19 nt, Artificial Sequence
  Description of Artificial Sequence: Synthetic oligonucleotide
ggauacgcaggucccuuaa

SEQ ID NO: 1612791 - RNA, 19 nt, Artificial Sequence
  Description of Artificial Sequence: Synthetic oligonucleotide
gaucagcuacugguuauau

SEQ ID NO: 1612792 - RNA, 19 nt, Artificial Sequence
  Description of Artificial Sequence: Synthetic oligonucleotide
ucguggggagagcgccaca

SEQ ID NO: 1612793 - RNA, 19 nt, Artificial Sequence
  Description of Artificial Sequence: Synthetic oligonucleotide
acaucaaggaggggccauu

SEQ ID NO: 1612794 - RNA, 19 nt, Artificial Sequence
  Description of Artificial Sequence: Synthetic oligonucleotide
ucccgggcgggcugcgggc

SEQ ID NO: 1612795 - RNA, 19 nt, Artificial Sequence
  Description of Artificial Sequence: Synthetic oligonucleotide
cagaacaguccagaguggu

SEQ ID NO: 1612796 - RNA, 19 nt, Artificial Sequence
  Description of Artificial Sequence: Synthetic oligonucleotide
acggagcccaggggcaaag

SEQ ID NO: 1612797 - RNA, 19 nt, Artificial Sequence
  Description of Artificial Sequence: Synthetic oligonucleotide
cagcuuagugggcagacuu

SEQ ID NO: 1612798 - RNA, 19 nt, Artificial Sequence
  Description of Artificial Sequence: Synthetic oligonucleotide
ugcucagguccggaaucau

SEQ ID NO: 1612799 - RNA, 19 nt, Artificial Sequence
  Description of Artificial Sequence: Synthetic oligonucleotide
cuuagugggcagacuuggu

SEQ ID NO: 1612800 - RNA, 19 nt, Artificial Sequence
  Description of Artificial Sequence: Synthetic oligonucleotide
uuuucacaugaggcuucuu

SEQ ID NO: 1612801 - RNA, 19 nt, Artificial Sequence
  Description of Artificial Sequence: Synthetic oligonucleotide
gcugcgggcgccucuccgc

SEQ ID NO: 1612802 - RNA, 19 nt, Artificial Sequence
  Description of Artificial Sequence: Synthetic oligonucleotide
guggggagagcgccacaca

SEQ ID NO: 1612803 - RNA, 19 nt, Artificial Sequence
  Description of Artificial Sequence: Synthetic oligonucleotide
ccauuacuacuuggagucc

SEQ ID NO: 1612804 - RNA, 19 nt, Artificial Sequence
  Description of Artificial Sequence: Synthetic oligonucleotide
agaauacccucugccucuu

SEQ ID NO: 1612805 - RNA, 19 nt, Artificial Sequence
  Description of Artificial Sequence: Synthetic oligonucleotide
accaggagauaggggucca

SEQ ID NO: 1612806 - RNA, 19 nt, Artificial Sequence
  Description of Artificial Sequence: Synthetic oligonucleotide
cuggggccuucucacuuca

SEQ ID NO: 1612807 - RNA, 19 nt, Artificial Sequence
  Description of Artificial Sequence: Synthetic oligonucleotide
uacccaggauacgcagguc

SEQ ID NO: 1612808 - RNA, 19 nt, Artificial Sequence
  Description of Artificial Sequence: Synthetic oligonucleotide
ggcagggcuaucgcagggc

SEQ ID NO: 1612809 - RNA, 19 nt, Artificial Sequence
  Description of Artificial Sequence: Synthetic oligonucleotide
ucacggucacuggguauuu

SEQ ID NO: 1612810 - RNA, 19 nt, Artificial Sequence
  Description of Artificial Sequence: Synthetic oligonucleotide
ccuccucucgucugaacca

SEQ ID NO: 1612811 - RNA, 19 nt, Artificial Sequence
  Description of Artificial Sequence: Synthetic oligonucleotide
gagggaguugcaggggagu

SEQ ID NO: 1612812 - RNA, 19 nt, Artificial Sequence
  Description of Artificial Sequence: Synthetic oligonucleotide
gagcgccacacacugcuuu

SEQ ID NO: 1612813 - RNA, 19 nt, Artificial Sequence
  Description of Artificial Sequence: Synthetic oligonucleotide
gcucggaguggguggcugc

SEQ ID NO: 1612814 - RNA, 19 nt, Artificial Sequence
  Description of Artificial Sequence: Synthetic oligonucleotide
cacagcucguggggagagc

SEQ ID NO: 1612815 - RNA, 19 nt, Artificial Sequence
  Description of Artificial Sequence: Synthetic oligonucleotide
gugcgcgcuccaccaggag

SEQ ID NO: 1612816 - RNA, 19 nt, Artificial Sequence
  Description of Artificial Sequence: Synthetic oligonucleotide
guagcacggggagggccug

SEQ ID NO: 1612817 - RNA, 19 nt, Artificial Sequence
  Description of Artificial Sequence: Synthetic oligonucleotide
gucgcgcggcuucuggaaa

SEQ ID NO: 1612818 - RNA, 19 nt, Artificial Sequence
  Description of Artificial Sequence: Synthetic oligonucleotide
guugcuugcuguggccuua

SEQ ID NO: 1612819 - RNA, 19 nt, Artificial Sequence
  Description of Artificial Sequence: Synthetic oligonucleotide
acgggcugcucagguccgg

SEQ ID NO: 1612820 - RNA, 19 nt, Artificial Sequence
  Description of Artificial Sequence: Synthetic oligonucleotide
gcgaugccaaggcugcgga

SEQ ID NO: 1612821 - RNA, 19 nt, Artificial Sequence
  Description of Artificial Sequence: Synthetic oligonucleotide
ggaaagcgucccgggcggg

SEQ ID NO: 1612822 - RNA, 19 nt, Artificial Sequence
  Description of Artificial Sequence: Synthetic oligonucleotide
ggggagaggucagcagggc

SEQ ID NO: 1612823 - RNA, 19 nt, Artificial Sequence
  Description of Artificial Sequence: Synthetic oligonucleotide
gcggagggaguugcagggg

SEQ ID NO: 1612824 - RNA, 19 nt, Artificial Sequence
  Description of Artificial Sequence: Synthetic oligonucleotide
gaaagaggcugggccugua

SEQ ID NO: 1612825 - RNA, 19 nt, Artificial Sequence
  Description of Artificial Sequence: Synthetic oligonucleotide
ccuggggccuucucacuuc

SEQ ID NO: 1612826 - RNA, 19 nt, Artificial Sequence
  Description of Artificial Sequence: Synthetic oligonucleotide
guagcacuggaggggacau

SEQ ID NO: 1612827 - RNA, 19 nt, Artificial Sequence
  Description of Artificial Sequence: Synthetic oligonucleotide
ccuccgguuugguggugag

SEQ ID NO: 1612828 - RNA, 19 nt, Artificial Sequence
  Description of Artificial Sequence: Synthetic oligonucleotide
ggagagcgccacacacugc

SEQ ID NO: 1612829 - RNA, 19 nt, Artificial Sequence
  Description of Artificial Sequence: Synthetic oligonucleotide
ccucucgucugaaccauua

SEQ ID NO: 1612830 - RNA, 19 nt, Artificial Sequence
  Description of Artificial Sequence: Synthetic oligonucleotide
gcacucacugcagggcuca

SEQ ID NO: 1612831 - RNA, 19 nt, Artificial Sequence
  Description of Artificial Sequence: Synthetic oligonucleotide
gcugugcgugaagcugccg

SEQ ID NO: 1612832 - RNA, 19 nt, Artificial Sequence
  Description of Artificial Sequence: Synthetic oligonucleotide
cgagacugccugcauagaa

SEQ ID NO: 1612833 - RNA, 19 nt, Artificial Sequence
  Description of Artificial Sequence: Synthetic oligonucleotide
cgcaggucccuuaaagaaa

SEQ ID NO: 1612834 - RNA, 19 nt, Artificial Sequence
  Description of Artificial Sequence: Synthetic oligonucleotide
gcgcggcuucuggaaagcg

SEQ ID NO: 1612835 - RNA, 19 nt, Artificial Sequence
  Description of Artificial Sequence: Synthetic oligonucleotide
cugggcucgggccuccggu

SEQ ID NO: 1612836 - RNA, 19 nt, Artificial Sequence
  Description of Artificial Sequence: Synthetic oligonucleotide
cugcuguuaccagucacuu

SEQ ID NO: 1612837 - RNA, 19 nt, Artificial Sequence
  Description of Artificial Sequence: Synthetic oligonucleotide
caagugugcuggagauggu

SEQ ID NO: 1612838 - RNA, 19 nt, Artificial Sequence
  Description of Artificial Sequence: Synthetic oligonucleotide
cagggcucacaagugugcu

SEQ ID NO: 1612839 - RNA, 19 nt, Artificial Sequence
  Description of Artificial Sequence: Synthetic oligonucleotide
aagcgccguccuggggccu

SEQ ID NO: 1612840 - RNA, 19 nt, Artificial Sequence
  Description of Artificial Sequence: Synthetic oligonucleotide
ggcucacaagugugcugga

SEQ ID NO: 1612841 - RNA, 19 nt, Artificial Sequence
  Description of Artificial Sequence: Synthetic oligonucleotide
ccguucuuuccgggcaagc

SEQ ID NO: 1612842 - RNA, 19 nt, Artificial Sequence
  Description of Artificial Sequence: Synthetic oligonucleotide
cacucacugcagggcucac

SEQ ID NO: 1612843 - RNA, 19 nt, Artificial Sequence
  Description of Artificial Sequence: Synthetic oligonucleotide
agagcgccacacacugcuu

SEQ ID NO: 1612844 - RNA, 19 nt, Artificial Sequence
  Description of Artificial Sequence: Synthetic oligonucleotide
gcgaaauagucgcgcggcu

SEQ ID NO: 1612845 - RNA, 19 nt, Artificial Sequence
  Description of Artificial Sequence: Synthetic oligonucleotide
gggugcacucagccaccac

SEQ ID NO: 1612846 - RNA, 19 nt, Artificial Sequence
  Description of Artificial Sequence: Synthetic oligonucleotide
cccuuaaagaaagcgccgu

SEQ ID NO: 1612847 - RNA, 19 nt, Artificial Sequence
  Description of Artificial Sequence: Synthetic oligonucleotide
guaacccaccacagcucgu

SEQ ID NO: 1612848 - RNA, 19 nt, Artificial Sequence
  Description of Artificial Sequence: Synthetic oligonucleotide
gcgugcugccaugggaaga

SEQ ID NO: 1612849 - RNA, 19 nt, Artificial Sequence
  Description of Artificial Sequence: Synthetic oligonucleotide
gcacggggagggccugaug

SEQ ID NO: 1612850 - RNA, 19 nt, Artificial Sequence
  Description of Artificial Sequence: Synthetic oligonucleotide
cuuuccgggcaagcucaua

SEQ ID NO: 1612851 - RNA, 19 nt, Artificial Sequence
  Description of Artificial Sequence: Synthetic oligonucleotide
cuccucucgucugaaccau

SEQ ID NO: 1612852 - RNA, 19 nt, Artificial Sequence
  Description of Artificial Sequence: Synthetic oligonucleotide
ggcuaucgcagggcuucuc

SEQ ID NO: 1612853 - RNA, 19 nt, Artificial Sequence
  Description of Artificial Sequence: Synthetic oligonucleotide
ccgggcaagcucauaguau

SEQ ID NO: 1612854 - RNA, 19 nt, Artificial Sequence
  Description of Artificial Sequence: Synthetic oligonucleotide
cagguacgugcgcgcucca

SEQ ID NO: 1612855 - RNA, 19 nt, Artificial Sequence
  Description of Artificial Sequence: Synthetic oligonucleotide
gccuccgguuuggugguga

SEQ ID NO: 1612856 - RNA, 19 nt, Artificial Sequence
  Description of Artificial Sequence: Synthetic oligonucleotide
gcguugcuugcuguggccu

SEQ ID NO: 1612857 - RNA, 19 nt, Artificial Sequence
  Description of Artificial Sequence: Synthetic oligonucleotide
gggcagcuuagugggcaga

SEQ ID NO: 1612858 - RNA, 19 nt, Artificial Sequence
  Description of Artificial Sequence: Synthetic oligonucleotide
cgggcaagcucauaguauu

SEQ ID NO: 1612859 - RNA, 19 nt, Artificial Sequence
  Description of Artificial Sequence: Synthetic oligonucleotide
ggacaggggcugggcuugc

SEQ ID NO: 1612860 - RNA, 19 nt, Artificial Sequence
  Description of Artificial Sequence: Synthetic oligonucleotide
ccgguuugguggugaggga

SEQ ID NO: 1612861 - RNA, 19 nt, Artificial Sequence
  Description of Artificial Sequence: Synthetic oligonucleotide
ccccuccucucgucugaac

SEQ ID NO: 1612862 - RNA, 19 nt, Artificial Sequence
  Description of Artificial Sequence: Synthetic oligonucleotide
caucuggcuggcguugcuu

SEQ ID NO: 1612863 - RNA, 19 nt, Artificial Sequence
  Description of Artificial Sequence: Synthetic oligonucleotide
gcgcgcuccaccaggagau

SEQ ID NO: 1612864 - RNA, 19 nt, Artificial Sequence
  Description of Artificial Sequence: Synthetic oligonucleotide
gggccuccgguuugguggu

SEQ ID NO: 1612865 - RNA, 19 nt, Artificial Sequence
  Description of Artificial Sequence: Synthetic oligonucleotide
ccaccacagcucgugggga

SEQ ID NO: 1612866 - RNA, 19 nt, Artificial Sequence
  Description of Artificial Sequence: Synthetic oligonucleotide
gucccgagacugccugcau

SEQ ID NO: 1612867 - RNA, 19 nt, Artificial Sequence
  Description of Artificial Sequence: Synthetic oligonucleotide
ccgggcugaccagguuggg

SEQ ID NO: 1612868 - RNA, 19 nt, Artificial Sequence
  Description of Artificial Sequence: Synthetic oligonucleotide
gcccaggggcaaaggccug

SEQ ID NO: 1612869 - RNA, 19 nt, Artificial Sequence
  Description of Artificial Sequence: Synthetic oligonucleotide
gggcaagcucauaguauuu

SEQ ID NO: 1612870 - RNA, 19 nt, Artificial Sequence
  Description of Artificial Sequence: Synthetic oligonucleotide
gccguccuggggccuucuc

SEQ ID NO: 1612871 - RNA, 19 nt, Artificial Sequence
  Description of Artificial Sequence: Synthetic oligonucleotide
gcacggagcccaggggcaa

SEQ ID NO: 1612872 - RNA, 19 nt, Artificial Sequence
  Description of Artificial Sequence: Synthetic oligonucleotide
ccaggauacgcaggucccu

SEQ ID NO: 1612873 - RNA, 19 nt, Artificial Sequence
  Description of Artificial Sequence: Synthetic oligonucleotide
ccgagacugccugcauaga

SEQ ID NO: 1612874 - RNA, 19 nt, Artificial Sequence
  Description of Artificial Sequence: Synthetic oligonucleotide
ccgggcgggcugcgggcgc

SEQ ID NO: 1612875 - RNA, 19 nt, Artificial Sequence
  Description of Artificial Sequence: Synthetic oligonucleotide
gucccgggcugaccagguu

SEQ ID NO: 1612876 - RNA, 19 nt, Artificial Sequence
  Description of Artificial Sequence: Synthetic oligonucleotide
gcgucccgggcgggcugcg

SEQ ID NO: 1612877 - RNA, 19 nt, Artificial Sequence
  Description of Artificial Sequence: Synthetic oligonucleotide
gcgugaagcugccguucuu

SEQ ID NO: 1612878 - RNA, 19 nt, Artificial Sequence
  Description of Artificial Sequence: Synthetic oligonucleotide
cgaaauagucgcgcggcuu

SEQ ID NO: 1612879 - RNA, 19 nt, Artificial Sequence
  Description of Artificial Sequence: Synthetic oligonucleotide
cggcacuuuccuucagggu

SEQ ID NO: 1612880 - RNA, 19 nt, Artificial Sequence
  Description of Artificial Sequence: Synthetic oligonucleotide
ccaucuggcuggcguugcu

SEQ ID NO: 1612881 - RNA, 19 nt, Artificial Sequence
  Description of Artificial Sequence: Synthetic oligonucleotide
gggcuaucgcagggcuucu

SEQ ID NO: 1612882 - RNA, 19 nt, Artificial Sequence
  Description of Artificial Sequence: Synthetic oligonucleotide
cucgggccuccgguuuggu

SEQ ID NO: 1612883 - RNA, 19 nt, Artificial Sequence
  Description of Artificial Sequence: Synthetic oligonucleotide
cgucccgggcgggcugcgg

SEQ ID NO: 1612884 - RNA, 19 nt, Artificial Sequence
  Description of Artificial Sequence: Synthetic oligonucleotide
gggcuugcucggagugggu

SEQ ID NO: 1612885 - RNA, 19 nt, Artificial Sequence
  Description of Artificial Sequence: Synthetic oligonucleotide
cgggcgggcugcgggcgcc

SEQ ID NO: 1612886 - RNA, 19 nt, Artificial Sequence
  Description of Artificial Sequence: Synthetic oligonucleotide
ggcgggcugcgggcgccuc

SEQ ID NO: 1612887 - RNA, 19 nt, Artificial Sequence
  Description of Artificial Sequence: Synthetic oligonucleotide
ccaggagauagggguccau

SEQ ID NO: 1612888 - RNA, 19 nt, Artificial Sequence
  Description of Artificial Sequence: Synthetic oligonucleotide
gcgccguccuggggccuuc

SEQ ID NO: 1612889 - RNA, 19 nt, Artificial Sequence
  Description of Artificial Sequence: Synthetic oligonucleotide
cauuagaucaaucauaacg

SEQ ID NO: 1612890 - RNA, 19 nt, Artificial Sequence
  Description of Artificial Sequence: Synthetic oligonucleotide
acuauugauuuauugauac

SEQ ID NO: 1612891 - RNA, 19 nt, Artificial Sequence
  Description of Artificial Sequence: Synthetic oligonucleotide
uuggauuauagaaaguugg

SEQ ID NO: 1612892 - RNA, 19 nt, Artificial Sequence
  Description of Artificial Sequence: Synthetic oligonucleotide
gauacuauaguuuuaauaa

SEQ ID NO: 1612893 - RNA, 19 nt, Artificial Sequence
  Description of Artificial Sequence: Synthetic oligonucleotide
aaacacaaucauuagauca

SEQ ID NO: 1612894 - RNA, 19 nt, Artificial Sequence
  Description of Artificial Sequence: Synthetic oligonucleotide
aauguuggcuuacugauug

SEQ ID NO: 1612895 - RNA, 19 nt, Artificial Sequence
  Description of Artificial Sequence: Synthetic oligonucleotide
agaacuuucugcuguagcc

SEQ ID NO: 1612896 - RNA, 19 nt, Artificial Sequence
  Description of Artificial Sequence: Synthetic oligonucleotide
auuagaucaaucauaacgg

SEQ ID NO: 1612897 - RNA, 19 nt, Artificial Sequence
  Description of Artificial Sequence: Synthetic oligonucleotide
uauacaaauuaaaacugug

SEQ ID NO: 1612898 - RNA, 19 nt, Artificial Sequence
  Description of Artificial Sequence: Synthetic oligonucleotide
aacuccaauccuuccaggc

SEQ ID NO: 1612899 - RNA, 19 nt, Artificial Sequence
  Description of Artificial Sequence: Synthetic oligonucleotide
uugccaacaaaccacaucu

SEQ ID NO: 1612900 - RNA, 19 nt, Artificial Sequence
  Description of Artificial Sequence: Synthetic oligonucleotide
aucauaacggcuuauaaaa

SEQ ID NO: 1612901 - RNA, 19 nt, Artificial Sequence
  Description of Artificial Sequence: Synthetic oligonucleotide
ugaaaggucugcuaugucc

SEQ ID NO: 1612902 - RNA, 19 nt, Artificial Sequence
  Description of Artificial Sequence: Synthetic oligonucleotide
acuaucuuuagccuaagga

SEQ ID NO: 1612903 - RNA, 19 nt, Artificial Sequence
  Description of Artificial Sequence: Synthetic oligonucleotide
gacucaaccucacagcugg

SEQ ID NO: 1612904 - RNA, 19 nt, Artificial Sequence
  Description of Artificial Sequence: Synthetic oligonucleotide
uacuuuucuuuccugaccc

SEQ ID NO: 1612905 - RNA, 19 nt, Artificial Sequence
  Description of Artificial Sequence: Synthetic oligonucleotide
auuauagaaaguugguucu

SEQ ID NO: 1612906 - RNA, 19 nt, Artificial Sequence
  Description of Artificial Sequence: Synthetic oligonucleotide
acaaauuaaaacuguggug

SEQ ID NO: 1612907 - RNA, 19 nt, Artificial Sequence
  Description of Artificial Sequence: Synthetic oligonucleotide
uucauuuucuucugaaccc

SEQ ID NO: 1612908 - RNA, 19 nt, Artificial Sequence
  Description of Artificial Sequence: Synthetic oligonucleotide
auaaccauagcucuuugca

SEQ ID NO: 1612909 - RNA, 19 nt, Artificial Sequence
  Description of Artificial Sequence: Synthetic oligonucleotide
aauuggauuauagaaaguu

SEQ ID NO: 1612910 - RNA, 19 nt, Artificial Sequence
  Description of Artificial Sequence: Synthetic oligonucleotide
aguaagcuuaagaagcucc

SEQ ID NO: 1612911 - RNA, 19 nt, Artificial Sequence
  Description of Artificial Sequence: Synthetic oligonucleotide
aggcauaugaauuggcuuc

SEQ ID NO: 1612912 - RNA, 19 nt, Artificial Sequence
  Description of Artificial Sequence: Synthetic oligonucleotide
uacuauaguuuuaauaaaa

SEQ ID NO: 1612913 - RNA, 19 nt, Artificial Sequence
  Description of Artificial Sequence: Synthetic oligonucleotide
ggaauuggauuauagaaag

SEQ ID NO: 1612914 - RNA, 19 nt, Artificial Sequence
  Description of Artificial Sequence: Synthetic oligonucleotide
ucuguauuuggcaaagagu

SEQ ID NO: 1612915 - RNA, 19 nt, Artificial Sequence
  Description of Artificial Sequence: Synthetic oligonucleotide
gaugaugugagugacuggc

SEQ ID NO: 1612916 - RNA, 19 nt, Artificial Sequence
  Description of Artificial Sequence: Synthetic oligonucleotide
uucugaguaagcuuaagaa

SEQ ID NO: 1612917 - RNA, 19 nt, Artificial Sequence
  Description of Artificial Sequence: Synthetic oligonucleotide
uuuauccugugacucaacc

SEQ ID NO: 1612918 - RNA, 19 nt, Artificial Sequence
  Description of Artificial Sequence: Synthetic oligonucleotide
uuauugauacuauaguuuu

SEQ ID NO: 1612919 - RNA, 19 nt, Artificial Sequence
  Description of Artificial Sequence: Synthetic oligonucleotide
uuaugcacugccagggacg

SEQ ID NO: 1612920 - RNA, 19 nt, Artificial Sequence
  Description of Artificial Sequence: Synthetic oligonucleotide
ugauacuauaguuuuaaua

SEQ ID NO: 1612921 - RNA, 19 nt, Artificial Sequence
  Description of Artificial Sequence: Synthetic oligonucleotide
aagaguuccaaggcaaagg

SEQ ID NO: 1612922 - RNA, 19 nt, Artificial Sequence
  Description of Artificial Sequence: Synthetic oligonucleotide
uucuuugccaacaaaccac

SEQ ID NO: 1612923 - RNA, 19 nt, Artificial Sequence
  Description of Artificial Sequence: Synthetic oligonucleotide
aagaaaacccauucugagu

SEQ ID NO: 1612924 - RNA, 19 nt, Artificial Sequence
  Description of Artificial Sequence: Synthetic oligonucleotide
uaugaggucggcgacagag

SEQ ID NO: 1612925 - RNA, 19 nt, Artificial Sequence
  Description of Artificial Sequence: Synthetic oligonucleotide
auaugaauuggcuuccaug

SEQ ID NO: 1612926 - RNA, 19 nt, Artificial Sequence
  Description of Artificial Sequence: Synthetic oligonucleotide
uguaacuccaauccuucca

SEQ ID NO: 1612927 - RNA, 19 nt, Artificial Sequence
  Description of Artificial Sequence: Synthetic oligonucleotide
gaugugagugacuggcucg

SEQ ID NO: 1612928 - RNA, 19 nt, Artificial Sequence
  Description of Artificial Sequence: Synthetic oligonucleotide
agaaaacccauucugagua

SEQ ID NO: 1612929 - RNA, 19 nt, Artificial Sequence
  Description of Artificial Sequence: Synthetic oligonucleotide
ugcaaaauguucuuucuuc

SEQ ID NO: 1612930 - RNA, 19 nt, Artificial Sequence
  Description of Artificial Sequence: Synthetic oligonucleotide
uuagaucaaucauaacggc

SEQ ID NO: 1612931 - RNA, 19 nt, Artificial Sequence
  Description of Artificial Sequence: Synthetic oligonucleotide
cuugcagcgggcuaggaag

SEQ ID NO: 1612932 - RNA, 19 nt, Artificial Sequence
  Description of Artificial Sequence: Synthetic oligonucleotide
aacgccacuuccuccaguc

SEQ ID NO: 1612933 - RNA, 19 nt, Artificial Sequence
  Description of Artificial Sequence: Synthetic oligonucleotide
ugucacaucaaauguuggc

SEQ ID NO: 1612934 - RNA, 19 nt, Artificial Sequence
  Description of Artificial Sequence: Synthetic oligonucleotide
aaaaccuguaagcuuccca

SEQ ID NO: 1612935 - RNA, 19 nt, Artificial Sequence
  Description of Artificial Sequence: Synthetic oligonucleotide
guauuuggcaaagaguucc

SEQ ID NO: 1612936 - RNA, 19 nt, Artificial Sequence
  Description of Artificial Sequence: Synthetic oligonucleotide
ugauuuaauuccucuagaa

SEQ ID NO: 1612937 - RNA, 19 nt, Artificial Sequence
  Description of Artificial Sequence: Synthetic oligonucleotide
cuugauauuuugcuuuggc

SEQ ID NO: 1612938 - RNA, 19 nt, Artificial Sequence
  Description of Artificial Sequence: Synthetic oligonucleotide
uugcgaaguguuaagaaaa

SEQ ID NO: 1612939 - RNA, 19 nt, Artificial Sequence
  Description of Artificial Sequence: Synthetic oligonucleotide
uugauauuuugcuuuggcu

SEQ ID NO: 1612940 - RNA, 19 nt, Artificial Sequence
  Description of Artificial Sequence: Synthetic oligonucleotide
auagaaaguugguucuggg

SEQ ID NO: 1612941 - RNA, 19 nt, Artificial Sequence
  Description of Artificial Sequence: Synthetic oligonucleotide
aacuaucuuuagccuaagg

SEQ ID NO: 1612942 - RNA, 19 nt, Artificial Sequence
  Description of Artificial Sequence: Synthetic oligonucleotide
ugucgucuucgccaaaagg

SEQ ID NO: 1612943 - RNA, 19 nt, Artificial Sequence
  Description of Artificial Sequence: Synthetic oligonucleotide
ugugacucaaccucacagc

SEQ ID NO: 1612944 - RNA, 19 nt, Artificial Sequence
  Description of Artificial Sequence: Synthetic oligonucleotide
agaaaguugguucugggua

SEQ ID NO: 1612945 - RNA, 19 nt, Artificial Sequence
  Description of Artificial Sequence: Synthetic oligonucleotide
uggauuauagaaaguuggu

SEQ ID NO: 1612946 - RNA, 19 nt, Artificial Sequence
  Description of Artificial Sequence: Synthetic oligonucleotide
ugaauuggcuuccauggaa

SEQ ID NO: 1612947 - RNA, 19 nt, Artificial Sequence
  Description of Artificial Sequence: Synthetic oligonucleotide
uuuaugcacugccagggac

SEQ ID NO: 1612948 - RNA, 19 nt, Artificial Sequence
  Description of Artificial Sequence: Synthetic oligonucleotide
ucgccaaaaggaaagcucu

SEQ ID NO: 1612949 - RNA, 19 nt, Artificial Sequence
  Description of Artificial Sequence: Synthetic oligonucleotide
ugaguaagcuuaagaagcu

SEQ ID NO: 1612950 - RNA, 19 nt, Artificial Sequence
  Description of Artificial Sequence: Synthetic oligonucleotide
aaagaguuccaaggcaaag

SEQ ID NO: 1612951 - RNA, 19 nt, Artificial Sequence
  Description of Artificial Sequence: Synthetic oligonucleotide
acuggcucguugcaggucg

SEQ ID NO: 1612952 - RNA, 19 nt, Artificial Sequence
  Description of Artificial Sequence: Synthetic oligonucleotide
aaggaaagcucugguggcc

SEQ ID NO: 1612953 - RNA, 19 nt, Artificial Sequence
  Description of Artificial Sequence: Synthetic oligonucleotide
guaacuccaauccuuccag

SEQ ID NO: 1612954 - RNA, 19 nt, Artificial Sequence
  Description of Artificial Sequence: Synthetic oligonucleotide
ucuuuccugacccacuccu

SEQ ID NO: 1612955 - RNA, 19 nt, Artificial Sequence
  Description of Artificial Sequence: Synthetic oligonucleotide
aaaacuaucuuuagccuaa

SEQ ID NO: 1612956 - RNA, 19 nt, Artificial Sequence
  Description of Artificial Sequence: Synthetic oligonucleotide
aguuggacgagguuuauuu

SEQ ID NO: 1612957 - RNA, 19 nt, Artificial Sequence
  Description of Artificial Sequence: Synthetic oligonucleotide
uguuggcuuacugauugcg

SEQ ID NO: 1612958 - RNA, 19 nt, Artificial Sequence
  Description of Artificial Sequence: Synthetic oligonucleotide
cuaaggauuccauauacaa

SEQ ID NO: 1612959 - RNA, 19 nt, Artificial Sequence
  Description of Artificial Sequence: Synthetic oligonucleotide
uucgccaaaaggaaagcuc

SEQ ID NO: 1612960 - RNA, 19 nt, Artificial Sequence
  Description of Artificial Sequence: Synthetic oligonucleotide
auugcgaaguguuaagaaa

SEQ ID NO: 1612961 - RNA, 19 nt, Artificial Sequence
  Description of Artificial Sequence: Synthetic oligonucleotide
auuaaaacuguggugccug

SEQ ID NO: 1612962 - RNA, 19 nt, Artificial Sequence
  Description of Artificial Sequence: Synthetic oligonucleotide
aaaacccauucugaguaag

SEQ ID NO: 1612963 - RNA, 19 nt, Artificial Sequence
  Description of Artificial Sequence: Synthetic oligonucleotide
aguuccaaggcaaaggcug

SEQ ID NO: 1612964 - RNA, 19 nt, Artificial Sequence
  Description of Artificial Sequence: Synthetic oligonucleotide
agaggaggcggcgacaagc

SEQ ID NO: 1612965 - RNA, 19 nt, Artificial Sequence
  Description of Artificial Sequence: Synthetic oligonucleotide
auugauacuauaguuuuaa

SEQ ID NO: 1612966 - RNA, 19 nt, Artificial Sequence
  Description of Artificial Sequence: Synthetic oligonucleotide
ucaaccauucuugauauuu

SEQ ID NO: 1612967 - RNA, 19 nt, Artificial Sequence
  Description of Artificial Sequence: Synthetic oligonucleotide
uggcaaagaguuccaaggc

SEQ ID NO: 1612968 - RNA, 19 nt, Artificial Sequence
  Description of Artificial Sequence: Synthetic oligonucleotide
aacacaaucauuagaucaa

SEQ ID NO: 1612969 - RNA, 19 nt, Artificial Sequence
  Description of Artificial Sequence: Synthetic oligonucleotide
uuaagaagcuccaggugaa

SEQ ID NO: 1612970 - RNA, 19 nt, Artificial Sequence
  Description of Artificial Sequence: Synthetic oligonucleotide
ugagugacuggcucguugc

SEQ ID NO: 1612971 - RNA, 19 nt, Artificial Sequence
  Description of Artificial Sequence: Synthetic oligonucleotide
uggcuuuaugcacugccag

SEQ ID NO: 1612972 - RNA, 19 nt, Artificial Sequence
  Description of Artificial Sequence: Synthetic oligonucleotide
ugcucuaucucuguauuug

SEQ ID NO: 1612973 - RNA, 19 nt, Artificial Sequence
  Description of Artificial Sequence: Synthetic oligonucleotide
gaagcgggugcacggaacg

SEQ ID NO: 1612974 - RNA, 19 nt, Artificial Sequence
  Description of Artificial Sequence: Synthetic oligonucleotide
uuacugauugcgaaguguu

SEQ ID NO: 1612975 - RNA, 19 nt, Artificial Sequence
  Description of Artificial Sequence: Synthetic oligonucleotide
uccuagcuucuuuuggagg

SEQ ID NO: 1612976 - RNA, 19 nt, Artificial Sequence
  Description of Artificial Sequence: Synthetic oligonucleotide
gucugcuauguccacaugc

SEQ ID NO: 1612977 - RNA, 19 nt, Artificial Sequence
  Description of Artificial Sequence: Synthetic oligonucleotide
cuuguuuauccugugacuc

SEQ ID NO: 1612978 - RNA, 19 nt, Artificial Sequence
  Description of Artificial Sequence: Synthetic oligonucleotide
auuggauuauagaaaguug

SEQ ID NO: 1612979 - RNA, 19 nt, Artificial Sequence
  Description of Artificial Sequence: Synthetic oligonucleotide
uccacaugcucuaucucug

SEQ ID NO: 1612980 - RNA, 19 nt, Artificial Sequence
  Description of Artificial Sequence: Synthetic oligonucleotide
aauugcaccugcuucuguu

SEQ ID NO: 1612981 - RNA, 19 nt, Artificial Sequence
  Description of Artificial Sequence: Synthetic oligonucleotide
uuauccugugacucaaccu

SEQ ID NO: 1612982 - RNA, 19 nt, Artificial Sequence
  Description of Artificial Sequence: Synthetic oligonucleotide
guguuaagaaaacccauuc

SEQ ID NO: 1612983 - RNA, 19 nt, Artificial Sequence
  Description of Artificial Sequence: Synthetic oligonucleotide
auacuauaguuuuaauaaa

SEQ ID NO: 1612984 - RNA, 19 nt, Artificial Sequence
  Description of Artificial Sequence: Synthetic oligonucleotide
gagacagccugccauggcc

SEQ ID NO: 1612985 - RNA, 19 nt, Artificial Sequence
  Description of Artificial Sequence: Synthetic oligonucleotide
ugacucacgggcuucuuca

SEQ ID NO: 1612986 - RNA, 19 nt, Artificial Sequence
  Description of Artificial Sequence: Synthetic oligonucleotide
aggaauuuccacuguaaaa

SEQ ID NO: 1612987 - RNA, 19 nt, Artificial Sequence
  Description of Artificial Sequence: Synthetic oligonucleotide
uagaaaguugguucugggu

SEQ ID NO: 1612988 - RNA, 19 nt, Artificial Sequence
  Description of Artificial Sequence: Synthetic oligonucleotide
ucguuuacuuuucuuuccu

SEQ ID NO: 1612989 - RNA, 19 nt, Artificial Sequence
  Description of Artificial Sequence: Synthetic oligonucleotide
gaacgggagagacagccug

SEQ ID NO: 1612990 - RNA, 19 nt, Artificial Sequence
  Description of Artificial Sequence: Synthetic oligonucleotide
cgaaguguuaagaaaaccc

SEQ ID NO: 1612991 - RNA, 19 nt, Artificial Sequence
  Description of Artificial Sequence: Synthetic oligonucleotide
aaaguugguucuggguagg

SEQ ID NO: 1612992 - RNA, 19 nt, Artificial Sequence
  Description of Artificial Sequence: Synthetic oligonucleotide
ucucacauucuucagcauu

SEQ ID NO: 1612993 - RNA, 19 nt, Artificial Sequence
  Description of Artificial Sequence: Synthetic oligonucleotide
ucggcgacagagcucgagg

SEQ ID NO: 1612994 - RNA, 19 nt, Artificial Sequence
  Description of Artificial Sequence: Synthetic oligonucleotide
cauaaccauagcucuuugc

SEQ ID NO: 1612995 - RNA, 19 nt, Artificial Sequence
  Description of Artificial Sequence: Synthetic oligonucleotide
cuaggaagcgggugcacgg

SEQ ID NO: 1612996 - RNA, 19 nt, Artificial Sequence
  Description of Artificial Sequence: Synthetic oligonucleotide
uccaauccuuccaggcucg

SEQ ID NO: 1612997 - RNA, 19 nt, Artificial Sequence
  Description of Artificial Sequence: Synthetic oligonucleotide
ugaugugagugacuggcuc

SEQ ID NO: 1612998 - RNA, 19 nt, Artificial Sequence
  Description of Artificial Sequence: Synthetic oligonucleotide
aacccauucugaguaagcu

SEQ ID NO: 1612999 - RNA, 19 nt, Artificial Sequence
  Description of Artificial Sequence: Synthetic oligonucleotide
ugcgaaguguuaagaaaac

SEQ ID NO: 1613000 - RNA, 19 nt, Artificial Sequence
  Description of Artificial Sequence: Synthetic oligonucleotide
acgaugaugugagugacug

SEQ ID NO: 1613001 - RNA, 19 nt, Artificial Sequence
  Description of Artificial Sequence: Synthetic oligonucleotide
uuguuuauccugugacuca

SEQ ID NO: 1613002 - RNA, 19 nt, Artificial Sequence
  Description of Artificial Sequence: Synthetic oligonucleotide
uuggcuuacugauugcgaa

SEQ ID NO: 1613003 - RNA, 19 nt, Artificial Sequence
  Description of Artificial Sequence: Synthetic oligonucleotide
gauugcgaaguguuaagaa

SEQ ID NO: 1613004 - RNA, 19 nt, Artificial Sequence
  Description of Artificial Sequence: Synthetic oligonucleotide
cacggaacgggagagacag

SEQ ID NO: 1613005 - RNA, 19 nt, Artificial Sequence
  Description of Artificial Sequence: Synthetic oligonucleotide
ucuggguaggaauuuccac

SEQ ID NO: 1613006 - RNA, 19 nt, Artificial Sequence
  Description of Artificial Sequence: Synthetic oligonucleotide
gucguuuacuuuucuuucc

SEQ ID NO: 1613007 - RNA, 19 nt, Artificial Sequence
  Description of Artificial Sequence: Synthetic oligonucleotide
cucuaucucuguauuuggc

SEQ ID NO: 1613008 - RNA, 19 nt, Artificial Sequence
  Description of Artificial Sequence: Synthetic oligonucleotide
ugcagcucagaggaggcgg

SEQ ID NO: 1613009 - RNA, 19 nt, Artificial Sequence
  Description of Artificial Sequence: Synthetic oligonucleotide
ucuugauauuuugcuuugg

SEQ ID NO: 1613010 - RNA, 19 nt, Artificial Sequence
  Description of Artificial Sequence: Synthetic oligonucleotide
uuuagccuaaggauuccau

SEQ ID NO: 1613011 - RNA, 19 nt, Artificial Sequence
  Description of Artificial Sequence: Synthetic oligonucleotide
ucgucuucgccaaaaggaa

SEQ ID NO: 1613012 - RNA, 19 nt, Artificial Sequence
  Description of Artificial Sequence: Synthetic oligonucleotide
uaacuccaauccuuccagg

SEQ ID NO: 1613013 - RNA, 19 nt, Artificial Sequence
  Description of Artificial Sequence: Synthetic oligonucleotide
aggucggcgacagagcucg

SEQ ID NO: 1613014 - RNA, 19 nt, Artificial Sequence
  Description of Artificial Sequence: Synthetic oligonucleotide
aaacuaaaacacaaucauu

SEQ ID NO: 1613015 - RNA, 19 nt, Artificial Sequence
  Description of Artificial Sequence: Synthetic oligonucleotide
acuccuagcuucuuuugga

SEQ ID NO: 1613016 - RNA, 19 nt, Artificial Sequence
  Description of Artificial Sequence: Synthetic oligonucleotide
uccaaccauuccuuaaacu

SEQ ID NO: 1613017 - RNA, 19 nt, Artificial Sequence
  Description of Artificial Sequence: Synthetic oligonucleotide
cuguauuuggcaaagaguu

SEQ ID NO: 1613018 - RNA, 19 nt, Artificial Sequence
  Description of Artificial Sequence: Synthetic oligonucleotide
uguaauucugcuugccguu

SEQ ID NO: 1613019 - RNA, 19 nt, Artificial Sequence
  Description of Artificial Sequence: Synthetic oligonucleotide
aaguguuaagaaaacccau

SEQ ID NO: 1613020 - RNA, 19 nt, Artificial Sequence
  Description of Artificial Sequence: Synthetic oligonucleotide
ucugcuguagccggccacg

SEQ ID NO: 1613021 - RNA, 19 nt, Artificial Sequence
  Description of Artificial Sequence: Synthetic oligonucleotide
cugauugcgaaguguuaag

SEQ ID NO: 1613022 - RNA, 19 nt, Artificial Sequence
  Description of Artificial Sequence: Synthetic oligonucleotide
aaccuguaagcuucccacu

SEQ ID NO: 1613023 - RNA, 19 nt, Artificial Sequence
  Description of Artificial Sequence: Synthetic oligonucleotide
cuaucuuuagccuaaggau

SEQ ID NO: 1613024 - RNA, 19 nt, Artificial Sequence
  Description of Artificial Sequence: Synthetic oligonucleotide
accuguaagcuucccacug

SEQ ID NO: 1613025 - RNA, 19 nt, Artificial Sequence
  Description of Artificial Sequence: Synthetic oligonucleotide
uguucuuguuuauccugug

SEQ ID NO: 1613026 - RNA, 19 nt, Artificial Sequence
  Description of Artificial Sequence: Synthetic oligonucleotide
uggcuuacugauugcgaag

SEQ ID NO: 1613027 - RNA, 19 nt, Artificial Sequence
  Description of Artificial Sequence: Synthetic oligonucleotide
uucugaacccauuccuugu

SEQ ID NO: 1613028 - RNA, 19 nt, Artificial Sequence
  Description of Artificial Sequence: Synthetic oligonucleotide
gucgucuucgccaaaagga

SEQ ID NO: 1613029 - RNA, 19 nt, Artificial Sequence
  Description of Artificial Sequence: Synthetic oligonucleotide
gucuucgccaaaaggaaag

SEQ ID NO: 1613030 - RNA, 19 nt, Artificial Sequence
  Description of Artificial Sequence: Synthetic oligonucleotide
uuccaaccauuccuuaaac

SEQ ID NO: 1613031 - RNA, 19 nt, Artificial Sequence
  Description of Artificial Sequence: Synthetic oligonucleotide
ugauugcgaaguguuaaga

SEQ ID NO: 1613032 - RNA, 19 nt, Artificial Sequence
  Description of Artificial Sequence: Synthetic oligonucleotide
auugauuuauugauacuau

SEQ ID NO: 1613033 - RNA, 19 nt, Artificial Sequence
  Description of Artificial Sequence: Synthetic oligonucleotide
ucacaucaaauguuggcuu

SEQ ID NO: 1613034 - RNA, 19 nt, Artificial Sequence
  Description of Artificial Sequence: Synthetic oligonucleotide
uguaagcuucccacuggca

SEQ ID NO: 1613035 - RNA, 19 nt, Artificial Sequence
  Description of Artificial Sequence: Synthetic oligonucleotide
aauuggcuuccauggaauu

SEQ ID NO: 1613036 - RNA, 19 nt, Artificial Sequence
  Description of Artificial Sequence: Synthetic oligonucleotide
gcugcucuuggcuuuaugc

SEQ ID NO: 1613037 - RNA, 19 nt, Artificial Sequence
  Description of Artificial Sequence: Synthetic oligonucleotide
ccaacaaaccacaucuccc

SEQ ID NO: 1613038 - RNA, 19 nt, Artificial Sequence
  Description of Artificial Sequence: Synthetic oligonucleotide
ugcuuucccguaauugcac

SEQ ID NO: 1613039 - RNA, 19 nt, Artificial Sequence
  Description of Artificial Sequence: Synthetic oligonucleotide
gcuuuaugcacugccaggg

SEQ ID NO: 1613040 - RNA, 19 nt, Artificial Sequence
  Description of Artificial Sequence: Synthetic oligonucleotide
ggagucugcuaugaggucg

SEQ ID NO: 1613041 - RNA, 19 nt, Artificial Sequence
  Description of Artificial Sequence: Synthetic oligonucleotide
cuguaagcuucccacuggc

SEQ ID NO: 1613042 - RNA, 19 nt, Artificial Sequence
  Description of Artificial Sequence: Synthetic oligonucleotide
uucccguaauugcaccugc

SEQ ID NO: 1613043 - RNA, 19 nt, Artificial Sequence
  Description of Artificial Sequence: Synthetic oligonucleotide
uguuuauccugugacucaa

SEQ ID NO: 1613044 - RNA, 19 nt, Artificial Sequence
  Description of Artificial Sequence: Synthetic oligonucleotide
ggaggaggcauaugaauug

SEQ ID NO: 1613045 - RNA, 19 nt, Artificial Sequence
  Description of Artificial Sequence: Synthetic oligonucleotide
ucaaucauaacggcuuaua

SEQ ID NO: 1613046 - RNA, 19 nt, Artificial Sequence
  Description of Artificial Sequence: Synthetic oligonucleotide
ucauuagaucaaucauaac

SEQ ID NO: 1613047 - RNA, 19 nt, Artificial Sequence
  Description of Artificial Sequence: Synthetic oligonucleotide
agggacgaugaugugagug

SEQ ID NO: 1613048 - RNA, 19 nt, Artificial Sequence
  Description of Artificial Sequence: Synthetic oligonucleotide
aggcaaaggcugcucuugg

SEQ ID NO: 1613049 - RNA, 19 nt, Artificial Sequence
  Description of Artificial Sequence: Synthetic oligonucleotide
cuaucucuguauuuggcaa

SEQ ID NO: 1613050 - RNA, 19 nt, Artificial Sequence
  Description of Artificial Sequence: Synthetic oligonucleotide
cagagcucgaggagggccg

SEQ ID NO: 1613051 - RNA, 19 nt, Artificial Sequence
  Description of Artificial Sequence: Synthetic oligonucleotide
gagucugcuaugaggucgg

SEQ ID NO: 1613052 - RNA, 19 nt, Artificial Sequence
  Description of Artificial Sequence: Synthetic oligonucleotide
cacaaucauuagaucaauc

SEQ ID NO: 1613053 - RNA, 19 nt, Artificial Sequence
  Description of Artificial Sequence: Synthetic oligonucleotide
uuucccguaauugcaccug

SEQ ID NO: 1613054 - RNA, 19 nt, Artificial Sequence
  Description of Artificial Sequence: Synthetic oligonucleotide
uggccaaggggagacaaca

SEQ ID NO: 1613055 - RNA, 19 nt, Artificial Sequence
  Description of Artificial Sequence: Synthetic oligonucleotide
aggugaaaggucugcuaug

SEQ ID NO: 1613056 - RNA, 19 nt, Artificial Sequence
  Description of Artificial Sequence: Synthetic oligonucleotide
ugucaggcugcuuucccgu

SEQ ID NO: 1613057 - RNA, 19 nt, Artificial Sequence
  Description of Artificial Sequence: Synthetic oligonucleotide
ucggucaacgccacuuccu

SEQ ID NO: 1613058 - RNA, 19 nt, Artificial Sequence
  Description of Artificial Sequence: Synthetic oligonucleotide
ccaaggggagacaacagag

SEQ ID NO: 1613059 - RNA, 19 nt, Artificial Sequence
  Description of Artificial Sequence: Synthetic oligonucleotide
augaauuggcuuccaugga

SEQ ID NO: 1613060 - RNA, 19 nt, Artificial Sequence
  Description of Artificial Sequence: Synthetic oligonucleotide
caaauguuggcuuacugau

SEQ ID NO: 1613061 - RNA, 19 nt, Artificial Sequence
  Description of Artificial Sequence: Synthetic oligonucleotide
gccccuguaacuccaaucc

SEQ ID NO: 1613062 - RNA, 19 nt, Artificial Sequence
  Description of Artificial Sequence: Synthetic oligonucleotide
uugauacuauaguuuuaau

SEQ ID NO: 1613063 - RNA, 19 nt, Artificial Sequence
  Description of Artificial Sequence: Synthetic oligonucleotide
uucuuuuggaggaggcaua

SEQ ID NO: 1613064 - RNA, 19 nt, Artificial Sequence
  Description of Artificial Sequence: Synthetic oligonucleotide
cuguaacuccaauccuucc

SEQ ID NO: 1613065 - RNA, 19 nt, Artificial Sequence
  Description of Artificial Sequence: Synthetic oligonucleotide
ggcuuuaugcacugccagg

SEQ ID NO: 1613066 - RNA, 19 nt, Artificial Sequence
  Description of Artificial Sequence: Synthetic oligonucleotide
caauugucacaucaaaugu

SEQ ID NO: 1613067 - RNA, 19 nt, Artificial Sequence
  Description of Artificial Sequence: Synthetic oligonucleotide
ucuucgccaaaaggaaagc

SEQ ID NO: 1613068 - RNA, 19 nt, Artificial Sequence
  Description of Artificial Sequence: Synthetic oligonucleotide
cucgaggagggccggaagc

SEQ ID NO: 1613069 - RNA, 19 nt, Artificial Sequence
  Description of Artificial Sequence: Synthetic oligonucleotide
uugcaguuggacgagguuu

SEQ ID NO: 1613070 - RNA, 19 nt, Artificial Sequence
  Description of Artificial Sequence: Synthetic oligonucleotide
cugacccacuccuagcuuc

SEQ ID NO: 1613071 - RNA, 19 nt, Artificial Sequence
  Description of Artificial Sequence: Synthetic oligonucleotide
caaucauaacggcuuauaa

SEQ ID NO: 1613072 - RNA, 19 nt, Artificial Sequence
  Description of Artificial Sequence: Synthetic oligonucleotide
uuugcaguuggacgagguu

SEQ ID NO: 1613073 - RNA, 19 nt, Artificial Sequence
  Description of Artificial Sequence: Synthetic oligonucleotide
ucuuuagccuaaggauucc

SEQ ID NO: 1613074 - RNA, 19 nt, Artificial Sequence
  Description of Artificial Sequence: Synthetic oligonucleotide
aguguuaagaaaacccauu

SEQ ID NO: 1613075 - RNA, 19 nt, Artificial Sequence
  Description of Artificial Sequence: Synthetic oligonucleotide
gucaacgccacuuccucca

SEQ ID NO: 1613076 - RNA, 19 nt, Artificial Sequence
  Description of Artificial Sequence: Synthetic oligonucleotide
ugcacggaacgggagagac

SEQ ID NO: 1613077 - RNA, 19 nt, Artificial Sequence
  Description of Artificial Sequence: Synthetic oligonucleotide
cccacuggcauaaccauag

SEQ ID NO: 1613078 - RNA, 19 nt, Artificial Sequence
  Description of Artificial Sequence: Synthetic oligonucleotide
uaugcacugccagggacga

SEQ ID NO: 1613079 - RNA, 19 nt, Artificial Sequence
  Description of Artificial Sequence: Synthetic oligonucleotide
uugcagcgggcuaggaagc

SEQ ID NO: 1613080 - RNA, 19 nt, Artificial Sequence
  Description of Artificial Sequence: Synthetic oligonucleotide
ggucguuuacuuuucuuuc

SEQ ID NO: 1613081 - RNA, 19 nt, Artificial Sequence
  Description of Artificial Sequence: Synthetic oligonucleotide
gugagugacuggcucguug

SEQ ID NO: 1613082 - RNA, 19 nt, Artificial Sequence
  Description of Artificial Sequence: Synthetic oligonucleotide
uaauugcaccugcuucugu

SEQ ID NO: 1613083 - RNA, 19 nt, Artificial Sequence
  Description of Artificial Sequence: Synthetic oligonucleotide
cacgcucuucuuuucuuug

SEQ ID NO: 1613084 - RNA, 19 nt, Artificial Sequence
  Description of Artificial Sequence: Synthetic oligonucleotide
ucaacgccacuuccuccag

SEQ ID NO: 1613085 - RNA, 19 nt, Artificial Sequence
  Description of Artificial Sequence: Synthetic oligonucleotide
gccuaaggauuccauauac

SEQ ID NO: 1613086 - RNA, 19 nt, Artificial Sequence
  Description of Artificial Sequence: Synthetic oligonucleotide
augaggucggcgacagagc

SEQ ID NO: 1613087 - RNA, 19 nt, Artificial Sequence
  Description of Artificial Sequence: Synthetic oligonucleotide
gcucuuugcaguuggacga

SEQ ID NO: 1613088 - RNA, 19 nt, Artificial Sequence
  Description of Artificial Sequence: Synthetic oligonucleotide
ugcaggucguuuacuuuuc

SEQ ID NO: 1613089 - RNA, 19 nt, Artificial Sequence
  Description of Artificial Sequence: Synthetic oligonucleotide
ccauggaauuggauuauag

SEQ ID NO: 1613090 - RNA, 19 nt, Artificial Sequence
  Description of Artificial Sequence: Synthetic oligonucleotide
ggaagcccggcuugcagcg

SEQ ID NO: 1613091 - RNA, 19 nt, Artificial Sequence
  Description of Artificial Sequence: Synthetic oligonucleotide
caaucauuagaucaaucau

SEQ ID NO: 1613092 - RNA, 19 nt, Artificial Sequence
  Description of Artificial Sequence: Synthetic oligonucleotide
aacuguggugccugucaau

SEQ ID NO: 1613093 - RNA, 19 nt, Artificial Sequence
  Description of Artificial Sequence: Synthetic oligonucleotide
cagcgggcuaggaagcggg

SEQ ID NO: 1613094 - RNA, 19 nt, Artificial Sequence
  Description of Artificial Sequence: Synthetic oligonucleotide
ucgaggagggccggaagcc

SEQ ID NO: 1613095 - RNA, 19 nt, Artificial Sequence
  Description of Artificial Sequence: Synthetic oligonucleotide
cucggucaacgccacuucc

SEQ ID NO: 1613096 - RNA, 19 nt, Artificial Sequence
  Description of Artificial Sequence: Synthetic oligonucleotide
gaucaaucauaacggcuua

SEQ ID NO: 1613097 - RNA, 19 nt, Artificial Sequence
  Description of Artificial Sequence: Synthetic oligonucleotide
gucacaucaaauguuggcu

SEQ ID NO: 1613098 - RNA, 19 nt, Artificial Sequence
  Description of Artificial Sequence: Synthetic oligonucleotide
acuuucugcuguagccggc

SEQ ID NO: 1613099 - RNA, 19 nt, Artificial Sequence
  Description of Artificial Sequence: Synthetic oligonucleotide
ugccccuguaacuccaauc

SEQ ID NO: 1613100 - RNA, 19 nt, Artificial Sequence
  Description of Artificial Sequence: Synthetic oligonucleotide
cuggcauaaccauagcucu

SEQ ID NO: 1613101 - RNA, 19 nt, Artificial Sequence
  Description of Artificial Sequence: Synthetic oligonucleotide
caguccugagcuccgggag

SEQ ID NO: 1613102 - RNA, 19 nt, Artificial Sequence
  Description of Artificial Sequence: Synthetic oligonucleotide
ucccguucuuuccuuuccu

SEQ ID NO: 1613103 - RNA, 19 nt, Artificial Sequence
  Description of Artificial Sequence: Synthetic oligonucleotide
uugccguugcuuuucuuuu

SEQ ID NO: 1613104 - RNA, 19 nt, Artificial Sequence
  Description of Artificial Sequence: Synthetic oligonucleotide
gaggagggccggaagcccg

SEQ ID NO: 1613105 - RNA, 19 nt, Artificial Sequence
  Description of Artificial Sequence: Synthetic oligonucleotide
aagcgggugcacggaacgg

SEQ ID NO: 1613106 - RNA, 19 nt, Artificial Sequence
  Description of Artificial Sequence: Synthetic oligonucleotide
cauucugaguaagcuuaag

SEQ ID NO: 1613107 - RNA, 19 nt, Artificial Sequence
  Description of Artificial Sequence: Synthetic oligonucleotide
cucguugcaggucguuuac

SEQ ID NO: 1613108 - RNA, 19 nt, Artificial Sequence
  Description of Artificial Sequence: Synthetic oligonucleotide
gaagcuccaggugaaaggu

SEQ ID NO: 1613109 - RNA, 19 nt, Artificial Sequence
  Description of Artificial Sequence: Synthetic oligonucleotide
gaguaagcuuaagaagcuc

SEQ ID NO: 1613110 - RNA, 19 nt, Artificial Sequence
  Description of Artificial Sequence: Synthetic oligonucleotide
agcgggugcacggaacggg

SEQ ID NO: 1613111 - RNA, 19 nt, Artificial Sequence
  Description of Artificial Sequence: Synthetic oligonucleotide
aguccugagcuccgggagu

SEQ ID NO: 1613112 - RNA, 19 nt, Artificial Sequence
  Description of Artificial Sequence: Synthetic oligonucleotide
ugccaacaaaccacaucuc

SEQ ID NO: 1613113 - RNA, 19 nt, Artificial Sequence
  Description of Artificial Sequence: Synthetic oligonucleotide
aaaccacaucucccauggu

SEQ ID NO: 1613114 - RNA, 19 nt, Artificial Sequence
  Description of Artificial Sequence: Synthetic oligonucleotide
ccugucaauugucacauca

SEQ ID NO: 1613115 - RNA, 19 nt, Artificial Sequence
  Description of Artificial Sequence: Synthetic oligonucleotide
cuucaaccauucuugauau

SEQ ID NO: 1613116 - RNA, 19 nt, Artificial Sequence
  Description of Artificial Sequence: Synthetic oligonucleotide
uaaaacuguggugccuguc

SEQ ID NO: 1613117 - RNA, 19 nt, Artificial Sequence
  Description of Artificial Sequence: Synthetic oligonucleotide
aggaggcggcgacaagcac

SEQ ID NO: 1613118 - RNA, 19 nt, Artificial Sequence
  Description of Artificial Sequence: Synthetic oligonucleotide
ucccguaauugcaccugcu

SEQ ID NO: 1613119 - RNA, 19 nt, Artificial Sequence
  Description of Artificial Sequence: Synthetic oligonucleotide
gggacgaugaugugaguga

SEQ ID NO: 1613120 - RNA, 19 nt, Artificial Sequence
  Description of Artificial Sequence: Synthetic oligonucleotide
ugacuggcucguugcaggu

SEQ ID NO: 1613121 - RNA, 19 nt, Artificial Sequence
  Description of Artificial Sequence: Synthetic oligonucleotide
ccgggagucugcuaugagg

SEQ ID NO: 1613122 - RNA, 19 nt, Artificial Sequence
  Description of Artificial Sequence: Synthetic oligonucleotide
ggcauaugaauuggcuucc

SEQ ID NO: 1613123 - RNA, 19 nt, Artificial Sequence
  Description of Artificial Sequence: Synthetic oligonucleotide
cugucgucuucgccaaaag

SEQ ID NO: 1613124 - RNA, 19 nt, Artificial Sequence
  Description of Artificial Sequence: Synthetic oligonucleotide
gcgacagagcucgaggagg

SEQ ID NO: 1613125 - RNA, 19 nt, Artificial Sequence
  Description of Artificial Sequence: Synthetic oligonucleotide
ccuguaacuccaauccuuc

SEQ ID NO: 1613126 - RNA, 19 nt, Artificial Sequence
  Description of Artificial Sequence: Synthetic oligonucleotide
uggcauaaccauagcucuu

SEQ ID NO: 1613127 - RNA, 19 nt, Artificial Sequence
  Description of Artificial Sequence: Synthetic oligonucleotide
ucccacuggcauaaccaua

SEQ ID NO: 1613128 - RNA, 19 nt, Artificial Sequence
  Description of Artificial Sequence: Synthetic oligonucleotide
cucugguggccaaggggag

SEQ ID NO: 1613129 - RNA, 19 nt, Artificial Sequence
  Description of Artificial Sequence: Synthetic oligonucleotide
guuggcuuacugauugcga

SEQ ID NO: 1613130 - RNA, 19 nt, Artificial Sequence
  Description of Artificial Sequence: Synthetic oligonucleotide
uggcuuccauggaauugga

SEQ ID NO: 1613131 - RNA, 19 nt, Artificial Sequence
  Description of Artificial Sequence: Synthetic oligonucleotide
aaguugguucuggguagga

SEQ ID NO: 1613132 - RNA, 19 nt, Artificial Sequence
  Description of Artificial Sequence: Synthetic oligonucleotide
ucucuguauuuggcaaaga

SEQ ID NO: 1613133 - RNA, 19 nt, Artificial Sequence
  Description of Artificial Sequence: Synthetic oligonucleotide
gcgaaguguuaagaaaacc

SEQ ID NO: 1613134 - RNA, 19 nt, Artificial Sequence
  Description of Artificial Sequence: Synthetic oligonucleotide
augugagugacuggcucgu

SEQ ID NO: 1613135 - RNA, 19 nt, Artificial Sequence
  Description of Artificial Sequence: Synthetic oligonucleotide
gcuuucccguaauugcacc

SEQ ID NO: 1613136 - RNA, 19 nt, Artificial Sequence
  Description of Artificial Sequence: Synthetic oligonucleotide
agcuggacugccccuguaa

SEQ ID NO: 1613137 - RNA, 19 nt, Artificial Sequence
  Description of Artificial Sequence: Synthetic oligonucleotide
gaggcggcgacaagcacuc

SEQ ID NO: 1613138 - RNA, 19 nt, Artificial Sequence
  Description of Artificial Sequence: Synthetic oligonucleotide
gcuaggaagcgggugcacg

SEQ ID NO: 1613139 - RNA, 19 nt, Artificial Sequence
  Description of Artificial Sequence: Synthetic oligonucleotide
cuuacugauugcgaagugu

SEQ ID NO: 1613140 - RNA, 19 nt, Artificial Sequence
  Description of Artificial Sequence: Synthetic oligonucleotide
acugucgucuucgccaaaa

SEQ ID NO: 1613141 - RNA, 19 nt, Artificial Sequence
  Description of Artificial Sequence: Synthetic oligonucleotide
gcuaugaggucggcgacag

SEQ ID NO: 1613142 - RNA, 19 nt, Artificial Sequence
  Description of Artificial Sequence: Synthetic oligonucleotide
ggcgacaagcacucgguca

SEQ ID NO: 1613143 - RNA, 19 nt, Artificial Sequence
  Description of Artificial Sequence: Synthetic oligonucleotide
ggugcacggaacgggagag

SEQ ID NO: 1613144 - RNA, 19 nt, Artificial Sequence
  Description of Artificial Sequence: Synthetic oligonucleotide
ggcgacagagcucgaggag

SEQ ID NO: 1613145 - RNA, 19 nt, Artificial Sequence
  Description of Artificial Sequence: Synthetic oligonucleotide
augcucuaucucuguauuu

SEQ ID NO: 1613146 - RNA, 19 nt, Artificial Sequence
  Description of Artificial Sequence: Synthetic oligonucleotide
ccguaauugcaccugcuuc

SEQ ID NO: 1613147 - RNA, 19 nt, Artificial Sequence
  Description of Artificial Sequence: Synthetic oligonucleotide
caggcucgccaccuuggcc

SEQ ID NO: 1613148 - RNA, 19 nt, Artificial Sequence
  Description of Artificial Sequence: Synthetic oligonucleotide
cugcuaugaggucggcgac

SEQ ID NO: 1613149 - RNA, 19 nt, Artificial Sequence
  Description of Artificial Sequence: Synthetic oligonucleotide
aucaaucauaacggcuuau

SEQ ID NO: 1613150 - RNA, 19 nt, Artificial Sequence
  Description of Artificial Sequence: Synthetic oligonucleotide
ggcugcuuucccguaauug

SEQ ID NO: 1613151 - RNA, 19 nt, Artificial Sequence
  Description of Artificial Sequence: Synthetic oligonucleotide
ggucaacgccacuuccucc

SEQ ID NO: 1613152 - RNA, 19 nt, Artificial Sequence
  Description of Artificial Sequence: Synthetic oligonucleotide
caauccuuccaggcucgcc

SEQ ID NO: 1613153 - RNA, 19 nt, Artificial Sequence
  Description of Artificial Sequence: Synthetic oligonucleotide
gugaaaggucugcuauguc

SEQ ID NO: 1613154 - RNA, 19 nt, Artificial Sequence
  Description of Artificial Sequence: Synthetic oligonucleotide
gcuguagccggccacgcuc

SEQ ID NO: 1613155 - RNA, 19 nt, Artificial Sequence
  Description of Artificial Sequence: Synthetic oligonucleotide
gaauuggcuuccauggaau

SEQ ID NO: 1613156 - RNA, 19 nt, Artificial Sequence
  Description of Artificial Sequence: Synthetic oligonucleotide
aguugguucuggguaggaa

SEQ ID NO: 1613157 - RNA, 19 nt, Artificial Sequence
  Description of Artificial Sequence: Synthetic oligonucleotide
ggcaaaggcugcucuuggc

SEQ ID NO: 1613158 - RNA, 19 nt, Artificial Sequence
  Description of Artificial Sequence: Synthetic oligonucleotide
gaggaggcggcgacaagca

SEQ ID NO: 1613159 - RNA, 19 nt, Artificial Sequence
  Description of Artificial Sequence: Synthetic oligonucleotide
uccauggaauuggauuaua

SEQ ID NO: 1613160 - RNA, 19 nt, Artificial Sequence
  Description of Artificial Sequence: Synthetic oligonucleotide
cuuuagccuaaggauucca

SEQ ID NO: 1613161 - RNA, 19 nt, Artificial Sequence
  Description of Artificial Sequence: Synthetic oligonucleotide
augaugugagugacuggcu

SEQ ID NO: 1613162 - RNA, 19 nt, Artificial Sequence
  Description of Artificial Sequence: Synthetic oligonucleotide
agucugcuaugaggucggc

SEQ ID NO: 1613163 - RNA, 19 nt, Artificial Sequence
  Description of Artificial Sequence: Synthetic oligonucleotide
uucaaccauucuugauauu

SEQ ID NO: 1613164 - RNA, 19 nt, Artificial Sequence
  Description of Artificial Sequence: Synthetic oligonucleotide
acgggcuucuucauccacu

SEQ ID NO: 1613165 - RNA, 19 nt, Artificial Sequence
  Description of Artificial Sequence: Synthetic oligonucleotide
cuuugcaguuggacgaggu

SEQ ID NO: 1613166 - RNA, 19 nt, Artificial Sequence
  Description of Artificial Sequence: Synthetic oligonucleotide
uuguucccguucuuuccuu

SEQ ID NO: 1613167 - RNA, 19 nt, Artificial Sequence
  Description of Artificial Sequence: Synthetic oligonucleotide
gcuggacugccccuguaac

SEQ ID NO: 1613168 - RNA, 19 nt, Artificial Sequence
  Description of Artificial Sequence: Synthetic oligonucleotide
gcgacaagcacucggucaa

SEQ ID NO: 1613169 - RNA, 19 nt, Artificial Sequence
  Description of Artificial Sequence: Synthetic oligonucleotide
cuuucccguaauugcaccu

SEQ ID NO: 1613170 - RNA, 19 nt, Artificial Sequence
  Description of Artificial Sequence: Synthetic oligonucleotide
ucguugcaggucguuuacu

SEQ ID NO: 1613171 - RNA, 19 nt, Artificial Sequence
  Description of Artificial Sequence: Synthetic oligonucleotide
ugguucuggguaggaauuu

SEQ ID NO: 1613172 - RNA, 19 nt, Artificial Sequence
  Description of Artificial Sequence: Synthetic oligonucleotide
gaagcccggcuugcagcgg

SEQ ID NO: 1613173 - RNA, 19 nt, Artificial Sequence
  Description of Artificial Sequence: Synthetic oligonucleotide
cagcaauuaucuuucuuuu

SEQ ID NO: 1613174 - RNA, 19 nt, Artificial Sequence
  Description of Artificial Sequence: Synthetic oligonucleotide
cggaacgggagagacagcc

SEQ ID NO: 1613175 - RNA, 19 nt, Artificial Sequence
  Description of Artificial Sequence: Synthetic oligonucleotide
cacuuccuccaguccugag

SEQ ID NO: 1613176 - RNA, 19 nt, Artificial Sequence
  Description of Artificial Sequence: Synthetic oligonucleotide
cgacagagcucgaggaggg

SEQ ID NO: 1613177 - RNA, 19 nt, Artificial Sequence
  Description of Artificial Sequence: Synthetic oligonucleotide
ggugaaaggucugcuaugu

SEQ ID NO: 1613178 - RNA, 19 nt, Artificial Sequence
  Description of Artificial Sequence: Synthetic oligonucleotide
gucggcgacagagcucgag

SEQ ID NO: 1613179 - RNA, 19 nt, Artificial Sequence
  Description of Artificial Sequence: Synthetic oligonucleotide
caugcucuaucucuguauu

SEQ ID NO: 1613180 - RNA, 19 nt, Artificial Sequence
  Description of Artificial Sequence: Synthetic oligonucleotide
auagcucuuugcaguugga

SEQ ID NO: 1613181 - RNA, 19 nt, Artificial Sequence
  Description of Artificial Sequence: Synthetic oligonucleotide
gaacccauuccuugugcuu

SEQ ID NO: 1613182 - RNA, 19 nt, Artificial Sequence
  Description of Artificial Sequence: Synthetic oligonucleotide
ggacugccccuguaacucc

SEQ ID NO: 1613183 - RNA, 19 nt, Artificial Sequence
  Description of Artificial Sequence: Synthetic oligonucleotide
agggccggaagcccggcuu

SEQ ID NO: 1613184 - RNA, 19 nt, Artificial Sequence
  Description of Artificial Sequence: Synthetic oligonucleotide
ggauuauagaaaguugguu

SEQ ID NO: 1613185 - RNA, 19 nt, Artificial Sequence
  Description of Artificial Sequence: Synthetic oligonucleotide
gguucuggguaggaauuuc

SEQ ID NO: 1613186 - RNA, 19 nt, Artificial Sequence
  Description of Artificial Sequence: Synthetic oligonucleotide
cauaugaauuggcuuccau

SEQ ID NO: 1613187 - RNA, 19 nt, Artificial Sequence
  Description of Artificial Sequence: Synthetic oligonucleotide
ggaggcauaugaauuggcu

SEQ ID NO: 1613188 - RNA, 19 nt, Artificial Sequence
  Description of Artificial Sequence: Synthetic oligonucleotide
guuggacgagguuuauuuu

SEQ ID NO: 1613189 - RNA, 19 nt, Artificial Sequence
  Description of Artificial Sequence: Synthetic oligonucleotide
cuuuccugacccacuccua

SEQ ID NO: 1613190 - RNA, 19 nt, Artificial Sequence
  Description of Artificial Sequence: Synthetic oligonucleotide
acggaacgggagagacagc

SEQ ID NO: 1613191 - RNA, 19 nt, Artificial Sequence
  Description of Artificial Sequence: Synthetic oligonucleotide
guccugagcuccgggaguc

SEQ ID NO: 1613192 - RNA, 19 nt, Artificial Sequence
  Description of Artificial Sequence: Synthetic oligonucleotide
cuucgccaaaaggaaagcu

SEQ ID NO: 1613193 - RNA, 19 nt, Artificial Sequence
  Description of Artificial Sequence: Synthetic oligonucleotide
gccagggacgaugauguga

SEQ ID NO: 1613194 - RNA, 19 nt, Artificial Sequence
  Description of Artificial Sequence: Synthetic oligonucleotide
gaggucggcgacagagcuc

SEQ ID NO: 1613195 - RNA, 19 nt, Artificial Sequence
  Description of Artificial Sequence: Synthetic oligonucleotide
agccugccauggccccgcc

SEQ ID NO: 1613196 - RNA, 19 nt, Artificial Sequence
  Description of Artificial Sequence: Synthetic oligonucleotide
cccguucuuuccuuuccug

SEQ ID NO: 1613197 - RNA, 19 nt, Artificial Sequence
  Description of Artificial Sequence: Synthetic oligonucleotide
cgaugaugugagugacugg

SEQ ID NO: 1613198 - RNA, 19 nt, Artificial Sequence
  Description of Artificial Sequence: Synthetic oligonucleotide
gcuucuuuuggaggaggca

SEQ ID NO: 1613199 - RNA, 19 nt, Artificial Sequence
  Description of Artificial Sequence: Synthetic oligonucleotide
ggcuuacugauugcgaagu

SEQ ID NO: 1613200 - RNA, 19 nt, Artificial Sequence
  Description of Artificial Sequence: Synthetic oligonucleotide
gcagcgggcuaggaagcgg

SEQ ID NO: 1613201 - RNA, 19 nt, Artificial Sequence
  Description of Artificial Sequence: Synthetic oligonucleotide
gcucgaggagggccggaag

SEQ ID NO: 1613202 - RNA, 19 nt, Artificial Sequence
  Description of Artificial Sequence: Synthetic oligonucleotide
gcucguugcaggucguuua

SEQ ID NO: 1613203 - RNA, 19 nt, Artificial Sequence
  Description of Artificial Sequence: Synthetic oligonucleotide
gcuugcagcgggcuaggaa

SEQ ID NO: 1613204 - RNA, 19 nt, Artificial Sequence
  Description of Artificial Sequence: Synthetic oligonucleotide
ggaagcgggugcacggaac

SEQ ID NO: 1613205 - RNA, 19 nt, Artificial Sequence
  Description of Artificial Sequence: Synthetic oligonucleotide
gccugcaucaggcccgcca

SEQ ID NO: 1613206 - RNA, 19 nt, Artificial Sequence
  Description of Artificial Sequence: Synthetic oligonucleotide
ggucugcuauguccacaug

SEQ ID NO: 1613207 - RNA, 19 nt, Artificial Sequence
  Description of Artificial Sequence: Synthetic oligonucleotide
cuucagcaauuaucuuucu

SEQ ID NO: 1613208 - RNA, 19 nt, Artificial Sequence
  Description of Artificial Sequence: Synthetic oligonucleotide
gggagucugcuaugagguc

SEQ ID NO: 1613209 - RNA, 19 nt, Artificial Sequence
  Description of Artificial Sequence: Synthetic oligonucleotide
cgggcuucuucauccacug

SEQ ID NO: 1613210 - RNA, 19 nt, Artificial Sequence
  Description of Artificial Sequence: Synthetic oligonucleotide
ugugagugacuggcucguu

SEQ ID NO: 1613211 - RNA, 19 nt, Artificial Sequence
  Description of Artificial Sequence: Synthetic oligonucleotide
agcucgaggagggccggaa

SEQ ID NO: 1613212 - RNA, 19 nt, Artificial Sequence
  Description of Artificial Sequence: Synthetic oligonucleotide
uguagccggccacgcucuu

SEQ ID NO: 1613213 - RNA, 19 nt, Artificial Sequence
  Description of Artificial Sequence: Synthetic oligonucleotide
caucaaauguuggcuuacu

SEQ ID NO: 1613214 - RNA, 19 nt, Artificial Sequence
  Description of Artificial Sequence: Synthetic oligonucleotide
ccacaucucccaugguguc

SEQ ID NO: 1613215 - RNA, 19 nt, Artificial Sequence
  Description of Artificial Sequence: Synthetic oligonucleotide
gcagcucagaggaggcggc

SEQ ID NO: 1613216 - RNA, 19 nt, Artificial Sequence
  Description of Artificial Sequence: Synthetic oligonucleotide
gguggccaaggggagacaa

SEQ ID NO: 1613217 - RNA, 19 nt, Artificial Sequence
  Description of Artificial Sequence: Synthetic oligonucleotide
gggccggaagcccggcuug

SEQ ID NO: 1613218 - RNA, 19 nt, Artificial Sequence
  Description of Artificial Sequence: Synthetic oligonucleotide
ggaggcggcgacaagcacu

SEQ ID NO: 1613219 - RNA, 19 nt, Artificial Sequence
  Description of Artificial Sequence: Synthetic oligonucleotide
ugguggccaaggggagaca

SEQ ID NO: 1613220 - RNA, 19 nt, Artificial Sequence
  Description of Artificial Sequence: Synthetic oligonucleotide
cuguagccggccacgcucu

SEQ ID NO: 1613221 - RNA, 19 nt, Artificial Sequence
  Description of Artificial Sequence: Synthetic oligonucleotide
guagccggccacgcucuuc

SEQ ID NO: 1613222 - RNA, 19 nt, Artificial Sequence
  Description of Artificial Sequence: Synthetic oligonucleotide
ccaggcucgccaccuuggc

SEQ ID NO: 1613223 - RNA, 19 nt, Artificial Sequence
  Description of Artificial Sequence: Synthetic oligonucleotide
ccaguccugagcuccggga

SEQ ID NO: 1613224 - RNA, 19 nt, Artificial Sequence
  Description of Artificial Sequence: Synthetic oligonucleotide
ccggaagcccggcuugcag

SEQ ID NO: 1613225 - RNA, 19 nt, Artificial Sequence
  Description of Artificial Sequence: Synthetic oligonucleotide
ucgccaccuuggccucuga

SEQ ID NO: 1613226 - RNA, 19 nt, Artificial Sequence
  Description of Artificial Sequence: Synthetic oligonucleotide
caggucguuuacuuuucuu

SEQ ID NO: 1613227 - RNA, 19 nt, Artificial Sequence
  Description of Artificial Sequence: Synthetic oligonucleotide
gcauaugaauuggcuucca

SEQ ID NO: 1613228 - RNA, 19 nt, Artificial Sequence
  Description of Artificial Sequence: Synthetic oligonucleotide
ccauagcucuuugcaguug

SEQ ID NO: 1613229 - RNA, 19 nt, Artificial Sequence
  Description of Artificial Sequence: Synthetic oligonucleotide
cgggagucugcuaugaggu

SEQ ID NO: 1613230 - RNA, 19 nt, Artificial Sequence
  Description of Artificial Sequence: Synthetic oligonucleotide
ccauucugaguaagcuuaa

SEQ ID NO: 1613231 - RNA, 19 nt, Artificial Sequence
  Description of Artificial Sequence: Synthetic oligonucleotide
cuaugaggucggcgacaga

SEQ ID NO: 1613232 - RNA, 19 nt, Artificial Sequence
  Description of Artificial Sequence: Synthetic oligonucleotide
cggucaacgccacuuccuc

SEQ ID NO: 1613233 - RNA, 19 nt, Artificial Sequence
  Description of Artificial Sequence: Synthetic oligonucleotide
ccugugacucaaccucaca

SEQ ID NO: 1613234 - RNA, 19 nt, Artificial Sequence
  Description of Artificial Sequence: Synthetic oligonucleotide
agcgggcuaggaagcgggu

SEQ ID NO: 1613235 - RNA, 19 nt, Artificial Sequence
  Description of Artificial Sequence: Synthetic oligonucleotide
acugccccuguaacuccaa

SEQ ID NO: 1613236 - RNA, 19 nt, Artificial Sequence
  Description of Artificial Sequence: Synthetic oligonucleotide
gugcacggaacgggagaga

SEQ ID NO: 1613237 - RNA, 19 nt, Artificial Sequence
  Description of Artificial Sequence: Synthetic oligonucleotide
ccguucuuuccuuuccugu

SEQ ID NO: 1613238 - RNA, 19 nt, Artificial Sequence
  Description of Artificial Sequence: Synthetic oligonucleotide
uggcucguugcaggucguu

SEQ ID NO: 1613239 - RNA, 19 nt, Artificial Sequence
  Description of Artificial Sequence: Synthetic oligonucleotide
cccuguaacuccaauccuu

SEQ ID NO: 1613240 - RNA, 19 nt, Artificial Sequence
  Description of Artificial Sequence: Synthetic oligonucleotide
aggcggcgacaagcacucg

SEQ ID NO: 1613241 - RNA, 19 nt, Artificial Sequence
  Description of Artificial Sequence: Synthetic oligonucleotide
cgucuucgccaaaaggaaa

SEQ ID NO: 1613242 - RNA, 19 nt, Artificial Sequence
  Description of Artificial Sequence: Synthetic oligonucleotide
ggcuaggaagcgggugcac

SEQ ID NO: 1613243 - RNA, 19 nt, Artificial Sequence
  Description of Artificial Sequence: Synthetic oligonucleotide
gcaggucguuuacuuuucu

SEQ ID NO: 1613244 - RNA, 19 nt, Artificial Sequence
  Description of Artificial Sequence: Synthetic oligonucleotide
ggccacgcucuucuuuucu

SEQ ID NO: 1613245 - RNA, 19 nt, Artificial Sequence
  Description of Artificial Sequence: Synthetic oligonucleotide
auggccccgccgccugcau

SEQ ID NO: 1613246 - RNA, 19 nt, Artificial Sequence
  Description of Artificial Sequence: Synthetic oligonucleotide
ggcucgccaccuuggccuc

SEQ ID NO: 1613247 - RNA, 19 nt, Artificial Sequence
  Description of Artificial Sequence: Synthetic oligonucleotide
gcgggugcacggaacggga

SEQ ID NO: 1613248 - RNA, 19 nt, Artificial Sequence
  Description of Artificial Sequence: Synthetic oligonucleotide
cucugacucacgggcuucu

SEQ ID NO: 1613249 - RNA, 19 nt, Artificial Sequence
  Description of Artificial Sequence: Synthetic oligonucleotide
ggaacgggagagacagccu

SEQ ID NO: 1613250 - RNA, 19 nt, Artificial Sequence
  Description of Artificial Sequence: Synthetic oligonucleotide
caacgccacuuccuccagu

SEQ ID NO: 1613251 - RNA, 19 nt, Artificial Sequence
  Description of Artificial Sequence: Synthetic oligonucleotide
cggcgacagagcucgagga

SEQ ID NO: 1613252 - RNA, 19 nt, Artificial Sequence
  Description of Artificial Sequence: Synthetic oligonucleotide
gcggcgacaagcacucggu

SEQ ID NO: 1613253 - RNA, 19 nt, Artificial Sequence
  Description of Artificial Sequence: Synthetic oligonucleotide
augcacugccagggacgau

SEQ ID NO: 1613254 - RNA, 19 nt, Artificial Sequence
  Description of Artificial Sequence: Synthetic oligonucleotide
cuggcucguugcaggucgu

SEQ ID NO: 1613255 - RNA, 19 nt, Artificial Sequence
  Description of Artificial Sequence: Synthetic oligonucleotide
ccacaugcucuaucucugu

SEQ ID NO: 1613256 - RNA, 19 nt, Artificial Sequence
  Description of Artificial Sequence: Synthetic oligonucleotide
gccacgcucuucuuuucuu

SEQ ID NO: 1613257 - RNA, 19 nt, Artificial Sequence
  Description of Artificial Sequence: Synthetic oligonucleotide
cguugcaggucguuuacuu

SEQ ID NO: 1613258 - RNA, 19 nt, Artificial Sequence
  Description of Artificial Sequence: Synthetic oligonucleotide
cacugucgucuucgccaaa

SEQ ID NO: 1613259 - RNA, 19 nt, Artificial Sequence
  Description of Artificial Sequence: Synthetic oligonucleotide
cagggacgaugaugugagu

SEQ ID NO: 1613260 - RNA, 19 nt, Artificial Sequence
  Description of Artificial Sequence: Synthetic oligonucleotide
caguuggacgagguuuauu

SEQ ID NO: 1613261 - RNA, 19 nt, Artificial Sequence
  Description of Artificial Sequence: Synthetic oligonucleotide
ccauggccccgccgccugc

SEQ ID NO: 1613262 - RNA, 19 nt, Artificial Sequence
  Description of Artificial Sequence: Synthetic oligonucleotide
cccguaauugcaccugcuu

SEQ ID NO: 1613263 - RNA, 19 nt, Artificial Sequence
  Description of Artificial Sequence: Synthetic oligonucleotide
cugccccuguaacuccaau

SEQ ID NO: 1613264 - RNA, 19 nt, Artificial Sequence
  Description of Artificial Sequence: Synthetic oligonucleotide
ccccuguaacuccaauccu

SEQ ID NO: 1613265 - RNA, 19 nt, Artificial Sequence
  Description of Artificial Sequence: Synthetic oligonucleotide
cggcgacaagcacucgguc

SEQ ID NO: 1613266 - RNA, 19 nt, Artificial Sequence
  Description of Artificial Sequence: Synthetic oligonucleotide
cgacaagcacucggucaac

SEQ ID NO: 1613267 - RNA, 19 nt, Artificial Sequence
  Description of Artificial Sequence: Synthetic oligonucleotide
ccacgcucuucuuuucuuu

SEQ ID NO: 1613268 - RNA, 19 nt, Artificial Sequence
  Description of Artificial Sequence: Synthetic oligonucleotide
ggcucguugcaggucguuu

SEQ ID NO: 1613269 - RNA, 19 nt, Artificial Sequence
  Description of Artificial Sequence: Synthetic oligonucleotide
ccggccacgcucuucuuuu

SEQ ID NO: 1613270 - RNA, 19 nt, Artificial Sequence
  Description of Artificial Sequence: Synthetic oligonucleotide
ccgccugcaucaggcccgc

SEQ ID NO: 1613271 - RNA, 19 nt, Artificial Sequence
  Description of Artificial Sequence: Synthetic oligonucleotide
gacccacuccuagcuucuu

SEQ ID NO: 1613272 - RNA, 19 nt, Artificial Sequence
  Description of Artificial Sequence: Synthetic oligonucleotide
gccggccacgcucuucuuu

SEQ ID NO: 1613273 - RNA, 19 nt, Artificial Sequence
  Description of Artificial Sequence: Synthetic oligonucleotide
cggccacgcucuucuuuuc

SEQ ID NO: 1613274 - RNA, 19 nt, Artificial Sequence
  Description of Artificial Sequence: Synthetic oligonucleotide
cgggagagacagccugcca

SEQ ID NO: 1613275 - RNA, 19 nt, Artificial Sequence
  Description of Artificial Sequence: Synthetic oligonucleotide
cacugccagggacgaugau

SEQ ID NO: 1613276 - RNA, 19 nt, Artificial Sequence
  Description of Artificial Sequence: Synthetic oligonucleotide
ccugacccacuccuagcuu

SEQ ID NO: 1613277 - RNA, 19 nt, Artificial Sequence
  Description of Artificial Sequence: Synthetic oligonucleotide
gcacucggucaacgccacu

SEQ ID NO: 1613278 - RNA, 19 nt, Artificial Sequence
  Description of Artificial Sequence: Synthetic oligonucleotide
gccccgccgccugcaucag

SEQ ID NO: 1613279 - RNA, 19 nt, Artificial Sequence
  Description of Artificial Sequence: Synthetic oligonucleotide
ggucggcgacagagcucga

SEQ ID NO: 1613280 - RNA, 19 nt, Artificial Sequence
  Description of Artificial Sequence: Synthetic oligonucleotide
  modified_base (9)..(9): a, c, u, g, unknown or other
aacacauunacuuagauac

SEQ ID NO: 1613281 - RNA, 19 nt, Artificial Sequence
  Description of Artificial Sequence: Synthetic oligonucleotide
aaucacucaauacagaugc

SEQ ID NO: 1613282 - RNA, 19 nt, Artificial Sequence
  Description of Artificial Sequence: Synthetic oligonucleotide
aauaauuaaucccucaaac

SEQ ID NO: 1613283 - RNA, 19 nt, Artificial Sequence
  Description of Artificial Sequence: Synthetic oligonucleotide
aacauaucauucuacauag

SEQ ID NO: 1613284 - RNA, 19 nt, Artificial Sequence
  Description of Artificial Sequence: Synthetic oligonucleotide
auaauuaaucccucaaacc

SEQ ID NO: 1613285 - RNA, 19 nt, Artificial Sequence
  Description of Artificial Sequence: Synthetic oligonucleotide
uuuaauucauggaucaagg

SEQ ID NO: 1613286 - RNA, 19 nt, Artificial Sequence
  Description of Artificial Sequence: Synthetic oligonucleotide
  modified_base (3)..(3): a, c, u, g, unknown or other
uunacuuagauacugauuu

SEQ ID NO: 1613287 - RNA, 19 nt, Artificial Sequence
  Description of Artificial Sequence: Synthetic oligonucleotide
acgauguaaacauaaaugg

SEQ ID NO: 1613288 - RNA, 19 nt, Artificial Sequence
  Description of Artificial Sequence: Synthetic oligonucleotide
aauuaguuuauaaugucac

SEQ ID NO: 1613289 - RNA, 19 nt, Artificial Sequence
  Description of Artificial Sequence: Synthetic oligonucleotide
uucaaaacaguaauguaag

SEQ ID NO: 1613290 - RNA, 19 nt, Artificial Sequence
  Description of Artificial Sequence: Synthetic oligonucleotide
aaaucuauuguauugcuau

SEQ ID NO: 1613291 - RNA, 19 nt, Artificial Sequence
  Description of Artificial Sequence: Synthetic oligonucleotide
uuuaacauaccauuaauau

SEQ ID NO: 1613292 - RNA, 19 nt, Artificial Sequence
  Description of Artificial Sequence: Synthetic oligonucleotide
uugagauucauuaaguggu

SEQ ID NO: 1613293 - RNA, 19 nt, Artificial Sequence
  Description of Artificial Sequence: Synthetic oligonucleotide
uauuguauugcuauuuuca

SEQ ID NO: 1613294 - RNA, 19 nt, Artificial Sequence
  Description of Artificial Sequence: Synthetic oligonucleotide
ugcacauucuaaaacauug

SEQ ID NO: 1613295 - RNA, 19 nt, Artificial Sequence
  Description of Artificial Sequence: Synthetic oligonucleotide
aaauagagcauaagguugc

SEQ ID NO: 1613296 - RNA, 19 nt, Artificial Sequence
  Description of Artificial Sequence: Synthetic oligonucleotide
guugagauucauuaagugg

SEQ ID NO: 1613297 - RNA, 19 nt, Artificial Sequence
  Description of Artificial Sequence: Synthetic oligonucleotide
gauugaaggguuuuaaaug

SEQ ID NO: 1613298 - RNA, 19 nt, Artificial Sequence
  Description of Artificial Sequence: Synthetic oligonucleotide
aguuauaaaggucauaaaa

SEQ ID NO: 1613299 - RNA, 19 nt, Artificial Sequence
  Description of Artificial Sequence: Synthetic oligonucleotide
caaaguauuuuaaggaugc

SEQ ID NO: 1613300 - RNA, 19 nt, Artificial Sequence
  Description of Artificial Sequence: Synthetic oligonucleotide
aaagggugugcauuuacuc

SEQ ID NO: 1613301 - RNA, 19 nt, Artificial Sequence
  Description of Artificial Sequence: Synthetic oligonucleotide
aaaauagagcauaagguug

SEQ ID NO: 1613302 - RNA, 19 nt, Artificial Sequence
  Description of Artificial Sequence: Synthetic oligonucleotide
ucugauuagacugagguac

SEQ ID NO: 1613303 - RNA, 19 nt, Artificial Sequence
  Description of Artificial Sequence: Synthetic oligonucleotide
aaccuuaugccaucaaauc

SEQ ID NO: 1613304 - RNA, 19 nt, Artificial Sequence
  Description of Artificial Sequence: Synthetic oligonucleotide
aguaaugugagaaauagcu

SEQ ID NO: 1613305 - RNA, 19 nt, Artificial Sequence
  Description of Artificial Sequence: Synthetic oligonucleotide
uuucuuacaccuaagguaa

SEQ ID NO: 1613306 - RNA, 19 nt, Artificial Sequence
  Description of Artificial Sequence: Synthetic oligonucleotide
aguguugagauucauuaag

SEQ ID NO: 1613307 - RNA, 19 nt, Artificial Sequence
  Description of Artificial Sequence: Synthetic oligonucleotide
aauacagaugcacaacaca

SEQ ID NO: 1613308 - RNA, 19 nt, Artificial Sequence
  Description of Artificial Sequence: Synthetic oligonucleotide
uuagauuauauuucuuuug

SEQ ID NO: 1613309 - RNA, 19 nt, Artificial Sequence
  Description of Artificial Sequence: Synthetic oligonucleotide
uucaauuauacaaaaucaa

SEQ ID NO: 1613310 - RNA, 19 nt, Artificial Sequence
  Description of Artificial Sequence: Synthetic oligonucleotide
aaaggucacccuuuuacag

SEQ ID NO: 1613311 - RNA, 19 nt, Artificial Sequence
  Description of Artificial Sequence: Synthetic oligonucleotide
uuaugcuuugcuaaacaag

SEQ ID NO: 1613312 - RNA, 19 nt, Artificial Sequence
  Description of Artificial Sequence: Synthetic oligonucleotide
  modified_base (19)..(19): a, c, u, g, unknown or other
uaaaacaaucaacacauun

SEQ ID NO: 1613313 - RNA, 19 nt, Artificial Sequence
  Description of Artificial Sequence: Synthetic oligonucleotide
uaugguuaucuacaaauac

SEQ ID NO: 1613314 - RNA, 19 nt, Artificial Sequence
  Description of Artificial Sequence: Synthetic oligonucleotide
gacauaacuacacugggac

SEQ ID NO: 1613315 - RNA, 19 nt, Artificial Sequence
  Description of Artificial Sequence: Synthetic oligonucleotide
auauuuuagauuauauuuc

SEQ ID NO: 1613316 - RNA, 19 nt, Artificial Sequence
  Description of Artificial Sequence: Synthetic oligonucleotide
cacgauguaaacauaaaug

SEQ ID NO: 1613317 - RNA, 19 nt, Artificial Sequence
  Description of Artificial Sequence: Synthetic oligonucleotide
auucaaaucuauuguauug

SEQ ID NO: 1613318 - RNA, 19 nt, Artificial Sequence
  Description of Artificial Sequence: Synthetic oligonucleotide
uugcuaauaaagcaccaag

SEQ ID NO: 1613319 - RNA, 19 nt, Artificial Sequence
  Description of Artificial Sequence: Synthetic oligonucleotide
uuuacucaaguccaccaag

SEQ ID NO: 1613320 - RNA, 19 nt, Artificial Sequence
  Description of Artificial Sequence: Synthetic oligonucleotide
auuucuuacaccuaaggua

SEQ ID NO: 1613321 - RNA, 19 nt, Artificial Sequence
  Description of Artificial Sequence: Synthetic oligonucleotide
aaccaaugcacauucucag

SEQ ID NO: 1613322 - RNA, 19 nt, Artificial Sequence
  Description of Artificial Sequence: Synthetic oligonucleotide
ugcuaaacaagaacuaugu

SEQ ID NO: 1613323 - RNA, 19 nt, Artificial Sequence
  Description of Artificial Sequence: Synthetic oligonucleotide
agguaaauuaaacaagacu

SEQ ID NO: 1613324 - RNA, 19 nt, Artificial Sequence
  Description of Artificial Sequence: Synthetic oligonucleotide
aaaucaaauuugcuucaag

SEQ ID NO: 1613325 - RNA, 19 nt, Artificial Sequence
  Description of Artificial Sequence: Synthetic oligonucleotide
uauaauugggaaagggugu

SEQ ID NO: 1613326 - RNA, 19 nt, Artificial Sequence
  Description of Artificial Sequence: Synthetic oligonucleotide
  modified_base (18)..(18): a, c, u, g, unknown or other
aaaacaaucaacacauuna

SEQ ID NO: 1613327 - RNA, 19 nt, Artificial Sequence
  Description of Artificial Sequence: Synthetic oligonucleotide
ugagguacauugcucaaag

SEQ ID NO: 1613328 - RNA, 19 nt, Artificial Sequence
  Description of Artificial Sequence: Synthetic oligonucleotide
agucugauuagacugaggu

SEQ ID NO: 1613329 - RNA, 19 nt, Artificial Sequence
  Description of Artificial Sequence: Synthetic oligonucleotide
auucuacauagcuuucucc

SEQ ID NO: 1613330 - RNA, 19 nt, Artificial Sequence
  Description of Artificial Sequence: Synthetic oligonucleotide
aaaucucuaaacacgaugu

SEQ ID NO: 1613331 - RNA, 19 nt, Artificial Sequence
  Description of Artificial Sequence: Synthetic oligonucleotide
ugaaggguuuuaaauguag

SEQ ID NO: 1613332 - RNA, 19 nt, Artificial Sequence
  Description of Artificial Sequence: Synthetic oligonucleotide
aaucccucaaaccaaugca

SEQ ID NO: 1613333 - RNA, 19 nt, Artificial Sequence
  Description of Artificial Sequence: Synthetic oligonucleotide
agguacauugcucaaagug

SEQ ID NO: 1613334 - RNA, 19 nt, Artificial Sequence
  Description of Artificial Sequence: Synthetic oligonucleotide
auuuuaaggaugccaggac

SEQ ID NO: 1613335 - RNA, 19 nt, Artificial Sequence
  Description of Artificial Sequence: Synthetic oligonucleotide
aguauuuuaaggaugccag

SEQ ID NO: 1613336 - RNA, 19 nt, Artificial Sequence
  Description of Artificial Sequence: Synthetic oligonucleotide
ucuacaaauacuguauucu

SEQ ID NO: 1613337 - RNA, 19 nt, Artificial Sequence
  Description of Artificial Sequence: Synthetic oligonucleotide
uaauguaaggggcaagaca

SEQ ID NO: 1613338 - RNA, 19 nt, Artificial Sequence
  Description of Artificial Sequence: Synthetic oligonucleotide
uaucauucuacauagcuuu

SEQ ID NO: 1613339 - RNA, 19 nt, Artificial Sequence
  Description of Artificial Sequence: Synthetic oligonucleotide
cauaaauggaguaauacaa

SEQ ID NO: 1613340 - RNA, 19 nt, Artificial Sequence
  Description of Artificial Sequence: Synthetic oligonucleotide
uucccuucaguaaacacug

SEQ ID NO: 1613341 - RNA, 19 nt, Artificial Sequence
  Description of Artificial Sequence: Synthetic oligonucleotide
caagacauuauuuucauaa

SEQ ID NO: 1613342 - RNA, 19 nt, Artificial Sequence
  Description of Artificial Sequence: Synthetic oligonucleotide
cucaguguacauauaauug

SEQ ID NO: 1613343 - RNA, 19 nt, Artificial Sequence
  Description of Artificial Sequence: Synthetic oligonucleotide
uggaguaauacaaaacauc

SEQ ID NO: 1613344 - RNA, 19 nt, Artificial Sequence
  Description of Artificial Sequence: Synthetic oligonucleotide
ucuaguaggagcuccagaa

SEQ ID NO: 1613345 - RNA, 19 nt, Artificial Sequence
  Description of Artificial Sequence: Synthetic oligonucleotide
uguacauauaauugggaaa

SEQ ID NO: 1613346 - RNA, 19 nt, Artificial Sequence
  Description of Artificial Sequence: Synthetic oligonucleotide
ugcuaauaaagcaccaaga

SEQ ID NO: 1613347 - RNA, 19 nt, Artificial Sequence
  Description of Artificial Sequence: Synthetic oligonucleotide
aaauaggugcaauuuuccu

SEQ ID NO: 1613348 - RNA, 19 nt, Artificial Sequence
  Description of Artificial Sequence: Synthetic oligonucleotide
cauaccauuaauauuuuga

SEQ ID NO: 1613349 - RNA, 19 nt, Artificial Sequence
  Description of Artificial Sequence: Synthetic oligonucleotide
agaguugcuaauaaagcac

SEQ ID NO: 1613350 - RNA, 19 nt, Artificial Sequence
  Description of Artificial Sequence: Synthetic oligonucleotide
uaaucccucaaaccaaugc

SEQ ID NO: 1613351 - RNA, 19 nt, Artificial Sequence
  Description of Artificial Sequence: Synthetic oligonucleotide
uucaaaucuauuguauugc

SEQ ID NO: 1613352 - RNA, 19 nt, Artificial Sequence
  Description of Artificial Sequence: Synthetic oligonucleotide
uuugccauauuaaaaguuu

SEQ ID NO: 1613353 - RNA, 19 nt, Artificial Sequence
  Description of Artificial Sequence: Synthetic oligonucleotide
uguugagauucauuaagug

SEQ ID NO: 1613354 - RNA, 19 nt, Artificial Sequence
  Description of Artificial Sequence: Synthetic oligonucleotide
auuauauuucuuuuggcua

SEQ ID NO: 1613355 - RNA, 19 nt, Artificial Sequence
  Description of Artificial Sequence: Synthetic oligonucleotide
gauuauauuucuuuuggcu

SEQ ID NO: 1613356 - RNA, 19 nt, Artificial Sequence
  Description of Artificial Sequence: Synthetic oligonucleotide
agggauauagaacauugcu

SEQ ID NO: 1613357 - RNA, 19 nt, Artificial Sequence
  Description of Artificial Sequence: Synthetic oligonucleotide
aaguauuuuaaggaugcca

SEQ ID NO: 1613358 - RNA, 19 nt, Artificial Sequence
  Description of Artificial Sequence: Synthetic oligonucleotide
ugaauuaguuuauaauguc

SEQ ID NO: 1613359 - RNA, 19 nt, Artificial Sequence
  Description of Artificial Sequence: Synthetic oligonucleotide
uaaacaagacugaauuagu

SEQ ID NO: 1613360 - RNA, 19 nt, Artificial Sequence
  Description of Artificial Sequence: Synthetic oligonucleotide
ucgaugacauuucuuacac

SEQ ID NO: 1613361 - RNA, 19 nt, Artificial Sequence
  Description of Artificial Sequence: Synthetic oligonucleotide
gaugccaggacacugcaac

SEQ ID NO: 1613362 - RNA, 19 nt, Artificial Sequence
  Description of Artificial Sequence: Synthetic oligonucleotide
ugcaaucuuagggauauag

SEQ ID NO: 1613363 - RNA, 19 nt, Artificial Sequence
  Description of Artificial Sequence: Synthetic oligonucleotide
ugaagugagcagaggagag

SEQ ID NO: 1613364 - RNA, 19 nt, Artificial Sequence
  Description of Artificial Sequence: Synthetic oligonucleotide
uaaccuuaugccaucaaau

SEQ ID NO: 1613365 - RNA, 19 nt, Artificial Sequence
  Description of Artificial Sequence: Synthetic oligonucleotide
acaagacugaauuaguuua

SEQ ID NO: 1613366 - RNA, 19 nt, Artificial Sequence
  Description of Artificial Sequence: Synthetic oligonucleotide
uuguauugcuauuuucacc

SEQ ID NO: 1613367 - RNA, 19 nt, Artificial Sequence
  Description of Artificial Sequence: Synthetic oligonucleotide
ucuccuuucaaaacaguaa

SEQ ID NO: 1613368 - RNA, 19 nt, Artificial Sequence
  Description of Artificial Sequence: Synthetic oligonucleotide
uuaacauaccauuaauauu

SEQ ID NO: 1613369 - RNA, 19 nt, Artificial Sequence
  Description of Artificial Sequence: Synthetic oligonucleotide
auaccauuaauauuuugau

SEQ ID NO: 1613370 - RNA, 19 nt, Artificial Sequence
  Description of Artificial Sequence: Synthetic oligonucleotide
ugcuuugcuaaacaagaac

SEQ ID NO: 1613371 - RNA, 19 nt, Artificial Sequence
  Description of Artificial Sequence: Synthetic oligonucleotide
acaaauacuguauucuaau

SEQ ID NO: 1613372 - RNA, 19 nt, Artificial Sequence
  Description of Artificial Sequence: Synthetic oligonucleotide
aagggugugcauuuacuca

SEQ ID NO: 1613373 - RNA, 19 nt, Artificial Sequence
  Description of Artificial Sequence: Synthetic oligonucleotide
ucuaaacacgauguaaaca

SEQ ID NO: 1613374 - RNA, 19 nt, Artificial Sequence
  Description of Artificial Sequence: Synthetic oligonucleotide
gcugacuauacccaaaugc

SEQ ID NO: 1613375 - RNA, 19 nt, Artificial Sequence
  Description of Artificial Sequence: Synthetic oligonucleotide
uaccauuaauauuuugaug

SEQ ID NO: 1613376 - RNA, 19 nt, Artificial Sequence
  Description of Artificial Sequence: Synthetic oligonucleotide
ugacuauacccaaaugcca

SEQ ID NO: 1613377 - RNA, 19 nt, Artificial Sequence
  Description of Artificial Sequence: Synthetic oligonucleotide
accuaagguaaauuaaaca

SEQ ID NO: 1613378 - RNA, 19 nt, Artificial Sequence
  Description of Artificial Sequence: Synthetic oligonucleotide
uacaccuaagguaaauuaa

SEQ ID NO: 1613379 - RNA, 19 nt, Artificial Sequence
  Description of Artificial Sequence: Synthetic oligonucleotide
auauuuugauguucccuuc

SEQ ID NO: 1613380 - RNA, 19 nt, Artificial Sequence
  Description of Artificial Sequence: Synthetic oligonucleotide
uuuaugcuuugcuaaacaa

SEQ ID NO: 1613381 - RNA, 19 nt, Artificial Sequence
  Description of Artificial Sequence: Synthetic oligonucleotide
uguaaacauaaauggagua

SEQ ID NO: 1613382 - RNA, 19 nt, Artificial Sequence
  Description of Artificial Sequence: Synthetic oligonucleotide
uuaacauaucauucuacau

SEQ ID NO: 1613383 - RNA, 19 nt, Artificial Sequence
  Description of Artificial Sequence: Synthetic oligonucleotide
  modified_base (7)..(7): a, c, u, g, unknown or other
cacauunacuuagauacug

SEQ ID NO: 1613384 - RNA, 19 nt, Artificial Sequence
  Description of Artificial Sequence: Synthetic oligonucleotide
cuagugaguaccuagagua

SEQ ID NO: 1613385 - RNA, 19 nt, Artificial Sequence
  Description of Artificial Sequence: Synthetic oligonucleotide
ucauguugaagugagcaga

SEQ ID NO: 1613386 - RNA, 19 nt, Artificial Sequence
  Description of Artificial Sequence: Synthetic oligonucleotide
guaguuauaaaggucauaa

SEQ ID NO: 1613387 - RNA, 19 nt, Artificial Sequence
  Description of Artificial Sequence: Synthetic oligonucleotide
aguuuauaaugucacuagu

SEQ ID NO: 1613388 - RNA, 19 nt, Artificial Sequence
  Description of Artificial Sequence: Synthetic oligonucleotide
ugaagaagaguugaggaau

SEQ ID NO: 1613389 - RNA, 19 nt, Artificial Sequence
  Description of Artificial Sequence: Synthetic oligonucleotide
aaaccaaugcacauucuca

SEQ ID NO: 1613390 - RNA, 19 nt, Artificial Sequence
  Description of Artificial Sequence: Synthetic oligonucleotide
accuuaugccaucaaauca

SEQ ID NO: 1613391 - RNA, 19 nt, Artificial Sequence
  Description of Artificial Sequence: Synthetic oligonucleotide
gauauagaacauugcugug

SEQ ID NO: 1613392 - RNA, 19 nt, Artificial Sequence
  Description of Artificial Sequence: Synthetic oligonucleotide
cugacauaacuacacuggg

SEQ ID NO: 1613393 - RNA, 19 nt, Artificial Sequence
  Description of Artificial Sequence: Synthetic oligonucleotide
auagcuaugguuaucuaca

SEQ ID NO: 1613394 - RNA, 19 nt, Artificial Sequence
  Description of Artificial Sequence: Synthetic oligonucleotide
uauucaaaucuauuguauu

SEQ ID NO: 1613395 - RNA, 19 nt, Artificial Sequence
  Description of Artificial Sequence: Synthetic oligonucleotide
uagagcauaagguugcuuu

SEQ ID NO: 1613396 - RNA, 19 nt, Artificial Sequence
  Description of Artificial Sequence: Synthetic oligonucleotide
uuacaccuaagguaaauua

SEQ ID NO: 1613397 - RNA, 19 nt, Artificial Sequence
  Description of Artificial Sequence: Synthetic oligonucleotide
aaaucacucaauacagaug

SEQ ID NO: 1613398 - RNA, 19 nt, Artificial Sequence
  Description of Artificial Sequence: Synthetic oligonucleotide
ugacauaacuacacuggga

SEQ ID NO: 1613399 - RNA, 19 nt, Artificial Sequence
  Description of Artificial Sequence: Synthetic oligonucleotide
aaauuaaacaagacugaau

SEQ ID NO: 1613400 - RNA, 19 nt, Artificial Sequence
  Description of Artificial Sequence: Synthetic oligonucleotide
aaugugagaaauagcuaug

SEQ ID NO: 1613401 - RNA, 19 nt, Artificial Sequence
  Description of Artificial Sequence: Synthetic oligonucleotide
auaggugcaauuuuccuuu

SEQ ID NO: 1613402 - RNA, 19 nt, Artificial Sequence
  Description of Artificial Sequence: Synthetic oligonucleotide
aaaggaauauccaccacaa

SEQ ID NO: 1613403 - RNA, 19 nt, Artificial Sequence
  Description of Artificial Sequence: Synthetic oligonucleotide
aacacccagaaacaggauu

SEQ ID NO: 1613404 - RNA, 19 nt, Artificial Sequence
  Description of Artificial Sequence: Synthetic oligonucleotide
agauucauuaagugguaga

SEQ ID NO: 1613405 - RNA, 19 nt, Artificial Sequence
  Description of Artificial Sequence: Synthetic oligonucleotide
aaagucugauuagacugag

SEQ ID NO: 1613406 - RNA, 19 nt, Artificial Sequence
  Description of Artificial Sequence: Synthetic oligonucleotide
uacauaaaucaaaguuuca

SEQ ID NO: 1613407 - RNA, 19 nt, Artificial Sequence
  Description of Artificial Sequence: Synthetic oligonucleotide
cucguugggaauuucgaug

SEQ ID NO: 1613408 - RNA, 19 nt, Artificial Sequence
  Description of Artificial Sequence: Synthetic oligonucleotide
ucuauuguauugcuauuuu

SEQ ID NO: 1613409 - RNA, 19 nt, Artificial Sequence
  Description of Artificial Sequence: Synthetic oligonucleotide
aagugagcagaggagagca

SEQ ID NO: 1613410 - RNA, 19 nt, Artificial Sequence
  Description of Artificial Sequence: Synthetic oligonucleotide
aauuaaucccucaaaccaa

SEQ ID NO: 1613411 - RNA, 19 nt, Artificial Sequence
  Description of Artificial Sequence: Synthetic oligonucleotide
aaacacgauguaaacauaa

SEQ ID NO: 1613412 - RNA, 19 nt, Artificial Sequence
  Description of Artificial Sequence: Synthetic oligonucleotide
cauguugaagugagcagag

SEQ ID NO: 1613413 - RNA, 19 nt, Artificial Sequence
  Description of Artificial Sequence: Synthetic oligonucleotide
uagggauauagaacauugc

SEQ ID NO: 1613414 - RNA, 19 nt, Artificial Sequence
  Description of Artificial Sequence: Synthetic oligonucleotide
uccgcucacaaacacccag

SEQ ID NO: 1613415 - RNA, 19 nt, Artificial Sequence
  Description of Artificial Sequence: Synthetic oligonucleotide
uuuggcuaaaauagagcau

SEQ ID NO: 1613416 - RNA, 19 nt, Artificial Sequence
  Description of Artificial Sequence: Synthetic oligonucleotide
acucaaguccaccaagcug

SEQ ID NO: 1613417 - RNA, 19 nt, Artificial Sequence
  Description of Artificial Sequence: Synthetic oligonucleotide
cuaaacacgauguaaacau

SEQ ID NO: 1613418 - RNA, 19 nt, Artificial Sequence
  Description of Artificial Sequence: Synthetic oligonucleotide
uacauauaauugggaaagg

SEQ ID NO: 1613419 - RNA, 19 nt, Artificial Sequence
  Description of Artificial Sequence: Synthetic oligonucleotide
acacgauguaaacauaaau

SEQ ID NO: 1613420 - RNA, 19 nt, Artificial Sequence
  Description of Artificial Sequence: Synthetic oligonucleotide
gggacuaccaaguaaugug

SEQ ID NO: 1613421 - RNA, 19 nt, Artificial Sequence
  Description of Artificial Sequence: Synthetic oligonucleotide
caccuuuaacauaucauuc

SEQ ID NO: 1613422 - RNA, 19 nt, Artificial Sequence
  Description of Artificial Sequence: Synthetic oligonucleotide
  modified_base (11)..(11): a, c, u, g, unknown or other
ucaacacauunacuuagau

SEQ ID NO: 1613423 - RNA, 19 nt, Artificial Sequence
  Description of Artificial Sequence: Synthetic oligonucleotide
gauucauuaagugguagaa

SEQ ID NO: 1613424 - RNA, 19 nt, Artificial Sequence
  Description of Artificial Sequence: Synthetic oligonucleotide
accugugcaaucuuaggga

SEQ ID NO: 1613425 - RNA, 19 nt, Artificial Sequence
  Description of Artificial Sequence: Synthetic oligonucleotide
uuuugauguucccuucagu

SEQ ID NO: 1613426 - RNA, 19 nt, Artificial Sequence
  Description of Artificial Sequence: Synthetic oligonucleotide
caaaggaauauccaccaca

SEQ ID NO: 1613427 - RNA, 19 nt, Artificial Sequence
  Description of Artificial Sequence: Synthetic oligonucleotide
aguaauguaaggggcaaga

SEQ ID NO: 1613428 - RNA, 19 nt, Artificial Sequence
  Description of Artificial Sequence: Synthetic oligonucleotide
uggaucaaggccauauuuu

SEQ ID NO: 1613429 - RNA, 19 nt, Artificial Sequence
  Description of Artificial Sequence: Synthetic oligonucleotide
agauuucauggcuuagucu

SEQ ID NO: 1613430 - RNA, 19 nt, Artificial Sequence
  Description of Artificial Sequence: Synthetic oligonucleotide
cucuaaacacgauguaaac

SEQ ID NO: 1613431 - RNA, 19 nt, Artificial Sequence
  Description of Artificial Sequence: Synthetic oligonucleotide
agagcauaagguugcuuug

SEQ ID NO: 1613432 - RNA, 19 nt, Artificial Sequence
  Description of Artificial Sequence: Synthetic oligonucleotide
ucacucaauacagaugcac

SEQ ID NO: 1613433 - RNA, 19 nt, Artificial Sequence
  Description of Artificial Sequence: Synthetic oligonucleotide
aagaagaguugaggaauag

SEQ ID NO: 1613434 - RNA, 19 nt, Artificial Sequence
  Description of Artificial Sequence: Synthetic oligonucleotide
cuacacugggacuaccaag

SEQ ID NO: 1613435 - RNA, 19 nt, Artificial Sequence
  Description of Artificial Sequence: Synthetic oligonucleotide
uuuuagcuagugaguaccu

SEQ ID NO: 1613436 - RNA, 19 nt, Artificial Sequence
  Description of Artificial Sequence: Synthetic oligonucleotide
augguuaucuacaaauacu

SEQ ID NO: 1613437 - RNA, 19 nt, Artificial Sequence
  Description of Artificial Sequence: Synthetic oligonucleotide
ggauauagaacauugcugu

SEQ ID NO: 1613438 - RNA, 19 nt, Artificial Sequence
  Description of Artificial Sequence: Synthetic oligonucleotide
caccuaagguaaauuaaac

SEQ ID NO: 1613439 - RNA, 19 nt, Artificial Sequence
  Description of Artificial Sequence: Synthetic oligonucleotide
cagaaugacaugagucacc

SEQ ID NO: 1613440 - RNA, 19 nt, Artificial Sequence
  Description of Artificial Sequence: Synthetic oligonucleotide
ccuaagguaaauuaaacaa

SEQ ID NO: 1613441 - RNA, 19 nt, Artificial Sequence
  Description of Artificial Sequence: Synthetic oligonucleotide
aaucuauuguauugcuauu

SEQ ID NO: 1613442 - RNA, 19 nt, Artificial Sequence
  Description of Artificial Sequence: Synthetic oligonucleotide
uuaaucccucaaaccaaug

SEQ ID NO: 1613443 - RNA, 19 nt, Artificial Sequence
  Description of Artificial Sequence: Synthetic oligonucleotide
uacauugcucaaaguguug

SEQ ID NO: 1613444 - RNA, 19 nt, Artificial Sequence
  Description of Artificial Sequence: Synthetic oligonucleotide
auguaaacauaaauggagu

SEQ ID NO: 1613445 - RNA, 19 nt, Artificial Sequence
  Description of Artificial Sequence: Synthetic oligonucleotide
cauaucauucuacauagcu

SEQ ID NO: 1613446 - RNA, 19 nt, Artificial Sequence
  Description of Artificial Sequence: Synthetic oligonucleotide
auaauugggaaagggugug

SEQ ID NO: 1613447 - RNA, 19 nt, Artificial Sequence
  Description of Artificial Sequence: Synthetic oligonucleotide
auaacuacacugggacuac

SEQ ID NO: 1613448 - RNA, 19 nt, Artificial Sequence
  Description of Artificial Sequence: Synthetic oligonucleotide
uacucaaguccaccaagcu

SEQ ID NO: 1613449 - RNA, 19 nt, Artificial Sequence
  Description of Artificial Sequence: Synthetic oligonucleotide
aaucucuaaacacgaugua

SEQ ID NO: 1613450 - RNA, 19 nt, Artificial Sequence
  Description of Artificial Sequence: Synthetic oligonucleotide
aaauguccuaccugugcaa

SEQ ID NO: 1613451 - RNA, 19 nt, Artificial Sequence
  Description of Artificial Sequence: Synthetic oligonucleotide
uauugcuauuuucaccuuu

SEQ ID NO: 1613452 - RNA, 19 nt, Artificial Sequence
  Description of Artificial Sequence: Synthetic oligonucleotide
cuaccugugcaaucuuagg

SEQ ID NO: 1613453 - RNA, 19 nt, Artificial Sequence
  Description of Artificial Sequence: Synthetic oligonucleotide
agacauguuacaagauuuc

SEQ ID NO: 1613454 - RNA, 19 nt, Artificial Sequence
  Description of Artificial Sequence: Synthetic oligonucleotide
uugccauauuaaaaguuua

SEQ ID NO: 1613455 - RNA, 19 nt, Artificial Sequence
  Description of Artificial Sequence: Synthetic oligonucleotide
cauauaauugggaaagggu

SEQ ID NO: 1613456 - RNA, 19 nt, Artificial Sequence
  Description of Artificial Sequence: Synthetic oligonucleotide
ccuuaugccaucaaaucac

SEQ ID NO: 1613457 - RNA, 19 nt, Artificial Sequence
  Description of Artificial Sequence: Synthetic oligonucleotide
auuuacucaaguccaccaa

SEQ ID NO: 1613458 - RNA, 19 nt, Artificial Sequence
  Description of Artificial Sequence: Synthetic oligonucleotide
uagcuagugaguaccuaga

SEQ ID NO: 1613459 - RNA, 19 nt, Artificial Sequence
  Description of Artificial Sequence: Synthetic oligonucleotide
aaacaagacugaauuaguu

SEQ ID NO: 1613460 - RNA, 19 nt, Artificial Sequence
  Description of Artificial Sequence: Synthetic oligonucleotide
gagauucauuaagugguag

SEQ ID NO: 1613461 - RNA, 19 nt, Artificial Sequence
  Description of Artificial Sequence: Synthetic oligonucleotide
aucaaaguuucaaaggaau

SEQ ID NO: 1613462 - RNA, 19 nt, Artificial Sequence
  Description of Artificial Sequence: Synthetic oligonucleotide
acauaccauuaauauuuug

SEQ ID NO: 1613463 - RNA, 19 nt, Artificial Sequence
  Description of Artificial Sequence: Synthetic oligonucleotide
uuccuaaaaggucacccuu

SEQ ID NO: 1613464 - RNA, 19 nt, Artificial Sequence
  Description of Artificial Sequence: Synthetic oligonucleotide
ucauggaucaaggccauau

SEQ ID NO: 1613465 - RNA, 19 nt, Artificial Sequence
  Description of Artificial Sequence: Synthetic oligonucleotide
ugcauuuacucaaguccac

SEQ ID NO: 1613466 - RNA, 19 nt, Artificial Sequence
  Description of Artificial Sequence: Synthetic oligonucleotide
caauccgcucacaaacacc

SEQ ID NO: 1613467 - RNA, 19 nt, Artificial Sequence
  Description of Artificial Sequence: Synthetic oligonucleotide
aguuuacuacaauaauuuu

SEQ ID NO: 1613468 - RNA, 19 nt, Artificial Sequence
  Description of Artificial Sequence: Synthetic oligonucleotide
acaguuuucucuaguagga

SEQ ID NO: 1613469 - RNA, 19 nt, Artificial Sequence
  Description of Artificial Sequence: Synthetic oligonucleotide
gacugaauuaguuuauaau

SEQ ID NO: 1613470 - RNA, 19 nt, Artificial Sequence
  Description of Artificial Sequence: Synthetic oligonucleotide
uucauaaccuuaugccauc

SEQ ID NO: 1613471 - RNA, 19 nt, Artificial Sequence
  Description of Artificial Sequence: Synthetic oligonucleotide
ugaguaccuagaguaauaa

SEQ ID NO: 1613472 - RNA, 19 nt, Artificial Sequence
  Description of Artificial Sequence: Synthetic oligonucleotide
auagcaauccgcucacaaa

SEQ ID NO: 1613473 - RNA, 19 nt, Artificial Sequence
  Description of Artificial Sequence: Synthetic oligonucleotide
cauugcucaaaguguugag

SEQ ID NO: 1613474 - RNA, 19 nt, Artificial Sequence
  Description of Artificial Sequence: Synthetic oligonucleotide
ugagauucauuaaguggua

SEQ ID NO: 1613475 - RNA, 19 nt, Artificial Sequence
  Description of Artificial Sequence: Synthetic oligonucleotide
aagcugcauauauuuuaga

SEQ ID NO: 1613476 - RNA, 19 nt, Artificial Sequence
  Description of Artificial Sequence: Synthetic oligonucleotide
uuacuucaugauagcaauc

SEQ ID NO: 1613477 - RNA, 19 nt, Artificial Sequence
  Description of Artificial Sequence: Synthetic oligonucleotide
aguugaggaauaguuuaug

SEQ ID NO: 1613478 - RNA, 19 nt, Artificial Sequence
  Description of Artificial Sequence: Synthetic oligonucleotide
acugggacuaccaaguaau

SEQ ID NO: 1613479 - RNA, 19 nt, Artificial Sequence
  Description of Artificial Sequence: Synthetic oligonucleotide
acauaacuacacugggacu

SEQ ID NO: 1613480 - RNA, 19 nt, Artificial Sequence
  Description of Artificial Sequence: Synthetic oligonucleotide
gacuaccaaguaaugugag

SEQ ID NO: 1613481 - RNA, 19 nt, Artificial Sequence
  Description of Artificial Sequence: Synthetic oligonucleotide
agggugugcauuuacucaa

SEQ ID NO: 1613482 - RNA, 19 nt, Artificial Sequence
  Description of Artificial Sequence: Synthetic oligonucleotide
aucucuaaacacgauguaa

SEQ ID NO: 1613483 - RNA, 19 nt, Artificial Sequence
  Description of Artificial Sequence: Synthetic oligonucleotide
gggauauagaacauugcug

SEQ ID NO: 1613484 - RNA, 19 nt, Artificial Sequence
  Description of Artificial Sequence: Synthetic oligonucleotide
ugugcugacuauacccaaa

SEQ ID NO: 1613485 - RNA, 19 nt, Artificial Sequence
  Description of Artificial Sequence: Synthetic oligonucleotide
ugccaauuuucauuauaaa

SEQ ID NO: 1613486 - RNA, 19 nt, Artificial Sequence
  Description of Artificial Sequence: Synthetic oligonucleotide
uccuaaaaggucacccuuu

SEQ ID NO: 1613487 - RNA, 19 nt, Artificial Sequence
  Description of Artificial Sequence: Synthetic oligonucleotide
gaagaguugaggaauaguu

SEQ ID NO: 1613488 - RNA, 19 nt, Artificial Sequence
  Description of Artificial Sequence: Synthetic oligonucleotide
  modified_base (2)..(2): a, c, u, g, unknown or other
unacuuagauacugauuua

SEQ ID NO: 1613489 - RNA, 19 nt, Artificial Sequence
  Description of Artificial Sequence: Synthetic oligonucleotide
auguccuaccugugcaauc

SEQ ID NO: 1613490 - RNA, 19 nt, Artificial Sequence
  Description of Artificial Sequence: Synthetic oligonucleotide
gacuauacccaaaugccaa

SEQ ID NO: 1613491 - RNA, 19 nt, Artificial Sequence
  Description of Artificial Sequence: Synthetic oligonucleotide
gagcauaagguugcuuugc

SEQ ID NO: 1613492 - RNA, 19 nt, Artificial Sequence
  Description of Artificial Sequence: Synthetic oligonucleotide
cuucaguaaacacugacau

SEQ ID NO: 1613493 - RNA, 19 nt, Artificial Sequence
  Description of Artificial Sequence: Synthetic oligonucleotide
aaauagcuaugguuaucua

SEQ ID NO: 1613494 - RNA, 19 nt, Artificial Sequence
  Description of Artificial Sequence: Synthetic oligonucleotide
ugggacuaccaaguaaugu

SEQ ID NO: 1613495 - RNA, 19 nt, Artificial Sequence
  Description of Artificial Sequence: Synthetic oligonucleotide
auacccaaaugccaauuuu

SEQ ID NO: 1613496 - RNA, 19 nt, Artificial Sequence
  Description of Artificial Sequence: Synthetic oligonucleotide
aggauugaaggguuuuaaa

SEQ ID NO: 1613497 - RNA, 19 nt, Artificial Sequence
  Description of Artificial Sequence: Synthetic oligonucleotide
uagugaguaccuagaguaa

SEQ ID NO: 1613498 - RNA, 19 nt, Artificial Sequence
  Description of Artificial Sequence: Synthetic oligonucleotide
aagucugauuagacugagg

SEQ ID NO: 1613499 - RNA, 19 nt, Artificial Sequence
  Description of Artificial Sequence: Synthetic oligonucleotide
aauguccuaccugugcaau

SEQ ID NO: 1613500 - RNA, 19 nt, Artificial Sequence
  Description of Artificial Sequence: Synthetic oligonucleotide
cauaacuacacugggacua

SEQ ID NO: 1613501 - RNA, 19 nt, Artificial Sequence
  Description of Artificial Sequence: Synthetic oligonucleotide
auggaguaauacaaaacau

SEQ ID NO: 1613502 - RNA, 19 nt, Artificial Sequence
  Description of Artificial Sequence: Synthetic oligonucleotide
auaucauucuacauagcuu

SEQ ID NO: 1613503 - RNA, 19 nt, Artificial Sequence
  Description of Artificial Sequence: Synthetic oligonucleotide
accaaugcacauucucagu

SEQ ID NO: 1613504 - RNA, 19 nt, Artificial Sequence
  Description of Artificial Sequence: Synthetic oligonucleotide
aguguacauauaauuggga

SEQ ID NO: 1613505 - RNA, 19 nt, Artificial Sequence
  Description of Artificial Sequence: Synthetic oligonucleotide
aucuauuguauugcuauuu

SEQ ID NO: 1613506 - RNA, 19 nt, Artificial Sequence
  Description of Artificial Sequence: Synthetic oligonucleotide
aacacgauguaaacauaaa

SEQ ID NO: 1613507 - RNA, 19 nt, Artificial Sequence
  Description of Artificial Sequence: Synthetic oligonucleotide
uaccuagaguaauaauuuu

SEQ ID NO: 1613508 - RNA, 19 nt, Artificial Sequence
  Description of Artificial Sequence: Synthetic oligonucleotide
gugcauuuacucaagucca

SEQ ID NO: 1613509 - RNA, 19 nt, Artificial Sequence
  Description of Artificial Sequence: Synthetic oligonucleotide
gugugcauuuacucaaguc

SEQ ID NO: 1613510 - RNA, 19 nt, Artificial Sequence
  Description of Artificial Sequence: Synthetic oligonucleotide
acaccuaagguaaauuaaa

SEQ ID NO: 1613511 - RNA, 19 nt, Artificial Sequence
  Description of Artificial Sequence: Synthetic oligonucleotide
uguaguuauaaaggucaua

SEQ ID NO: 1613512 - RNA, 19 nt, Artificial Sequence
  Description of Artificial Sequence: Synthetic oligonucleotide
uuaaggaugccaggacacu

SEQ ID NO: 1613513 - RNA, 19 nt, Artificial Sequence
  Description of Artificial Sequence: Synthetic oligonucleotide
gaauauccaccacaaggcu

SEQ ID NO: 1613514 - RNA, 19 nt, Artificial Sequence
  Description of Artificial Sequence: Synthetic oligonucleotide
cauuucuuacaccuaaggu

SEQ ID NO: 1613515 - RNA, 19 nt, Artificial Sequence
  Description of Artificial Sequence: Synthetic oligonucleotide
  modified_base (6)..(6): a, c, u, g, unknown or other
acauunacuuagauacuga

SEQ ID NO: 1613516 - RNA, 19 nt, Artificial Sequence
  Description of Artificial Sequence: Synthetic oligonucleotide
agugaguaccuagaguaau

SEQ ID NO: 1613517 - RNA, 19 nt, Artificial Sequence
  Description of Artificial Sequence: Synthetic oligonucleotide
cuaugguuaucuacaaaua

SEQ ID NO: 1613518 - RNA, 19 nt, Artificial Sequence
  Description of Artificial Sequence: Synthetic oligonucleotide
ccaaugcacauucucagug

SEQ ID NO: 1613519 - RNA, 19 nt, Artificial Sequence
  Description of Artificial Sequence: Synthetic oligonucleotide
guaauguaaggggcaagac

SEQ ID NO: 1613520 - RNA, 19 nt, Artificial Sequence
  Description of Artificial Sequence: Synthetic oligonucleotide
ucucuaguaggagcuccag

SEQ ID NO: 1613521 - RNA, 19 nt, Artificial Sequence
  Description of Artificial Sequence: Synthetic oligonucleotide
ucaaguccaccaagcugca

SEQ ID NO: 1613522 - RNA, 19 nt, Artificial Sequence
  Description of Artificial Sequence: Synthetic oligonucleotide
uagcuaugguuaucuacaa

SEQ ID NO: 1613523 - RNA, 19 nt, Artificial Sequence
  Description of Artificial Sequence: Synthetic oligonucleotide
aucauucuacauagcuuuc

SEQ ID NO: 1613524 - RNA, 19 nt, Artificial Sequence
  Description of Artificial Sequence: Synthetic oligonucleotide
cacaaggcuuucauguuga

SEQ ID NO: 1613525 - RNA, 19 nt, Artificial Sequence
  Description of Artificial Sequence: Synthetic oligonucleotide
caccacaaggcuuucaugu

SEQ ID NO: 1613526 - RNA, 19 nt, Artificial Sequence
  Description of Artificial Sequence: Synthetic oligonucleotide
gagacauguuacaagauuu

SEQ ID NO: 1613527 - RNA, 19 nt, Artificial Sequence
  Description of Artificial Sequence: Synthetic oligonucleotide
auaagguugcuuugccaua

SEQ ID NO: 1613528 - RNA, 19 nt, Artificial Sequence
  Description of Artificial Sequence: Synthetic oligonucleotide
aagagacauguuacaagau

SEQ ID NO: 1613529 - RNA, 19 nt, Artificial Sequence
  Description of Artificial Sequence: Synthetic oligonucleotide
uaaugucacuaguuuuaua

SEQ ID NO: 1613530 - RNA, 19 nt, Artificial Sequence
  Description of Artificial Sequence: Synthetic oligonucleotide
augacaugagucaccuuug

SEQ ID NO: 1613531 - RNA, 19 nt, Artificial Sequence
  Description of Artificial Sequence: Synthetic oligonucleotide
caaaucuauuguauugcua

SEQ ID NO: 1613532 - RNA, 19 nt, Artificial Sequence
  Description of Artificial Sequence: Synthetic oligonucleotide
ccuaccugugcaaucuuag

SEQ ID NO: 1613533 - RNA, 19 nt, Artificial Sequence
  Description of Artificial Sequence: Synthetic oligonucleotide
ggauugaaggguuuuaaau

SEQ ID NO: 1613534 - RNA, 19 nt, Artificial Sequence
  Description of Artificial Sequence: Synthetic oligonucleotide
auauccagaguugcuaaua

SEQ ID NO: 1613535 - RNA, 19 nt, Artificial Sequence
  Description of Artificial Sequence: Synthetic oligonucleotide
  modified_base (5)..(5): a, c, u, g, unknown or other
cauunacuuagauacugau

SEQ ID NO: 1613536 - RNA, 19 nt, Artificial Sequence
  Description of Artificial Sequence: Synthetic oligonucleotide
agauacugauuuaauucau

SEQ ID NO: 1613537 - RNA, 19 nt, Artificial Sequence
  Description of Artificial Sequence: Synthetic oligonucleotide
uuuagcuagugaguaccua

SEQ ID NO: 1613538 - RNA, 19 nt, Artificial Sequence
  Description of Artificial Sequence: Synthetic oligonucleotide
gaauuucgaugacauuucu

SEQ ID NO: 1613539 - RNA, 19 nt, Artificial Sequence
  Description of Artificial Sequence: Synthetic oligonucleotide
uccuaccugugcaaucuua

SEQ ID NO: 1613540 - RNA, 19 nt, Artificial Sequence
  Description of Artificial Sequence: Synthetic oligonucleotide
aguugcuaauaaagcacca

SEQ ID NO: 1613541 - RNA, 19 nt, Artificial Sequence
  Description of Artificial Sequence: Synthetic oligonucleotide
acugagguacauugcucaa

SEQ ID NO: 1613542 - RNA, 19 nt, Artificial Sequence
  Description of Artificial Sequence: Synthetic oligonucleotide
augaaaguuuucauucuuu

SEQ ID NO: 1613543 - RNA, 19 nt, Artificial Sequence
  Description of Artificial Sequence: Synthetic oligonucleotide
aaggggcaagacauuauuu

SEQ ID NO: 1613544 - RNA, 19 nt, Artificial Sequence
  Description of Artificial Sequence: Synthetic oligonucleotide
guugcuaauaaagcaccaa

SEQ ID NO: 1613545 - RNA, 19 nt, Artificial Sequence
  Description of Artificial Sequence: Synthetic oligonucleotide
aucaagguauucaaaucua

SEQ ID NO: 1613546 - RNA, 19 nt, Artificial Sequence
  Description of Artificial Sequence: Synthetic oligonucleotide
ggaauuucgaugacauuuc

SEQ ID NO: 1613547 - RNA, 19 nt, Artificial Sequence
  Description of Artificial Sequence: Synthetic oligonucleotide
cugauuagacugagguaca

SEQ ID NO: 1613548 - RNA, 19 nt, Artificial Sequence
  Description of Artificial Sequence: Synthetic oligonucleotide
ggaaagggugugcauuuac

SEQ ID NO: 1613549 - RNA, 19 nt, Artificial Sequence
  Description of Artificial Sequence: Synthetic oligonucleotide
uucuuacaccuaagguaaa

SEQ ID NO: 1613550 - RNA, 19 nt, Artificial Sequence
  Description of Artificial Sequence: Synthetic oligonucleotide
ugauuagacugagguacau

SEQ ID NO: 1613551 - RNA, 19 nt, Artificial Sequence
  Description of Artificial Sequence: Synthetic oligonucleotide
cugggacuaccaaguaaug

SEQ ID NO: 1613552 - RNA, 19 nt, Artificial Sequence
  Description of Artificial Sequence: Synthetic oligonucleotide
gcuuugcuaaacaagaacu

SEQ ID NO: 1613553 - RNA, 19 nt, Artificial Sequence
  Description of Artificial Sequence: Synthetic oligonucleotide
ggaauaguuuaugcuuugc

SEQ ID NO: 1613554 - RNA, 19 nt, Artificial Sequence
  Description of Artificial Sequence: Synthetic oligonucleotide
guaccuagaguaauaauuu

SEQ ID NO: 1613555 - RNA, 19 nt, Artificial Sequence
  Description of Artificial Sequence: Synthetic oligonucleotide
uaacuacacugggacuacc

SEQ ID NO: 1613556 - RNA, 19 nt, Artificial Sequence
  Description of Artificial Sequence: Synthetic oligonucleotide
  modified_base (8)..(8): a, c, u, g, unknown or other
acacauunacuuagauacu

SEQ ID NO: 1613557 - RNA, 19 nt, Artificial Sequence
  Description of Artificial Sequence: Synthetic oligonucleotide
gggaauuucgaugacauuu

SEQ ID NO: 1613558 - RNA, 19 nt, Artificial Sequence
  Description of Artificial Sequence: Synthetic oligonucleotide
gucugauuagacugaggua

SEQ ID NO: 1613559 - RNA, 19 nt, Artificial Sequence
  Description of Artificial Sequence: Synthetic oligonucleotide
gcaauccgcucacaaacac

SEQ ID NO: 1613560 - RNA, 19 nt, Artificial Sequence
  Description of Artificial Sequence: Synthetic oligonucleotide
caguaauguaaggggcaag

SEQ ID NO: 1613561 - RNA, 19 nt, Artificial Sequence
  Description of Artificial Sequence: Synthetic oligonucleotide
caacagcugaagaagaguu

SEQ ID NO: 1613562 - RNA, 19 nt, Artificial Sequence
  Description of Artificial Sequence: Synthetic oligonucleotide
gcauuuacucaaguccacc

SEQ ID NO: 1613563 - RNA, 19 nt, Artificial Sequence
  Description of Artificial Sequence: Synthetic oligonucleotide
agcaauccgcucacaaaca

SEQ ID NO: 1613564 - RNA, 19 nt, Artificial Sequence
  Description of Artificial Sequence: Synthetic oligonucleotide
aggugcaauuuuccuuuau

SEQ ID NO: 1613565 - RNA, 19 nt, Artificial Sequence
  Description of Artificial Sequence: Synthetic oligonucleotide
cccuucaguaaacacugac

SEQ ID NO: 1613566 - RNA, 19 nt, Artificial Sequence
  Description of Artificial Sequence: Synthetic oligonucleotide
gacucagccccuuccuaaa

SEQ ID NO: 1613567 - RNA, 19 nt, Artificial Sequence
  Description of Artificial Sequence: Synthetic oligonucleotide
ugggaauuucgaugacauu

SEQ ID NO: 1613568 - RNA, 19 nt, Artificial Sequence
  Description of Artificial Sequence: Synthetic oligonucleotide
ccagaaugacaugagucac

SEQ ID NO: 1613569 - RNA, 19 nt, Artificial Sequence
  Description of Artificial Sequence: Synthetic oligonucleotide
auguaguuauaaaggucau

SEQ ID NO: 1613570 - RNA, 19 nt, Artificial Sequence
  Description of Artificial Sequence: Synthetic oligonucleotide
aaacacccagaaacaggau

SEQ ID NO: 1613571 - RNA, 19 nt, Artificial Sequence
  Description of Artificial Sequence: Synthetic oligonucleotide
acaggauugaaggguuuua

SEQ ID NO: 1613572 - RNA, 19 nt, Artificial Sequence
  Description of Artificial Sequence: Synthetic oligonucleotide
caagacugaauuaguuuau

SEQ ID NO: 1613573 - RNA, 19 nt, Artificial Sequence
  Description of Artificial Sequence: Synthetic oligonucleotide
gaguaccuagaguaauaau

SEQ ID NO: 1613574 - RNA, 19 nt, Artificial Sequence
  Description of Artificial Sequence: Synthetic oligonucleotide
augcuuugcuaaacaagaa

SEQ ID NO: 1613575 - RNA, 19 nt, Artificial Sequence
  Description of Artificial Sequence: Synthetic oligonucleotide
acauugcugugcugacuau

SEQ ID NO: 1613576 - RNA, 19 nt, Artificial Sequence
  Description of Artificial Sequence: Synthetic oligonucleotide
caagauuucauggcuuagu

SEQ ID NO: 1613577 - RNA, 19 nt, Artificial Sequence
  Description of Artificial Sequence: Synthetic oligonucleotide
gccauauuaaaaguuuacu

SEQ ID NO: 1613578 - RNA, 19 nt, Artificial Sequence
  Description of Artificial Sequence: Synthetic oligonucleotide
auucauggaucaaggccau

SEQ ID NO: 1613579 - RNA, 19 nt, Artificial Sequence
  Description of Artificial Sequence: Synthetic oligonucleotide
guacauugcucaaaguguu

SEQ ID NO: 1613580 - RNA, 19 nt, Artificial Sequence
  Description of Artificial Sequence: Synthetic oligonucleotide
caggauugaaggguuuuaa

SEQ ID NO: 1613581 - RNA, 19 nt, Artificial Sequence
  Description of Artificial Sequence: Synthetic oligonucleotide
uaggugcaauuuuccuuua

SEQ ID NO: 1613582 - RNA, 19 nt, Artificial Sequence
  Description of Artificial Sequence: Synthetic oligonucleotide
gugaguaccuagaguaaua

SEQ ID NO: 1613583 - RNA, 19 nt, Artificial Sequence
  Description of Artificial Sequence: Synthetic oligonucleotide
auagagcauaagguugcuu

SEQ ID NO: 1613584 - RNA, 19 nt, Artificial Sequence
  Description of Artificial Sequence: Synthetic oligonucleotide
aucacucaauacagaugca

SEQ ID NO: 1613585 - RNA, 19 nt, Artificial Sequence
  Description of Artificial Sequence: Synthetic oligonucleotide
gagguacauugcucaaagu

SEQ ID NO: 1613586 - RNA, 19 nt, Artificial Sequence
  Description of Artificial Sequence: Synthetic oligonucleotide
cugugcugacuauacccaa

SEQ ID NO: 1613587 - RNA, 19 nt, Artificial Sequence
  Description of Artificial Sequence: Synthetic oligonucleotide
gcugugcugacuauaccca

SEQ ID NO: 1613588 - RNA, 19 nt, Artificial Sequence
  Description of Artificial Sequence: Synthetic oligonucleotide
accaagcugcauauauuuu

SEQ ID NO: 1613589 - RNA, 19 nt, Artificial Sequence
  Description of Artificial Sequence: Synthetic oligonucleotide
ccaaguaaugugagaaaua

SEQ ID NO: 1613590 - RNA, 19 nt, Artificial Sequence
  Description of Artificial Sequence: Synthetic oligonucleotide
cuuagggauauagaacauu

SEQ ID NO: 1613591 - RNA, 19 nt, Artificial Sequence
  Description of Artificial Sequence: Synthetic oligonucleotide
cuuacaccuaagguaaauu

SEQ ID NO: 1613592 - RNA, 19 nt, Artificial Sequence
  Description of Artificial Sequence: Synthetic oligonucleotide
cauugcugugcugacuaua

SEQ ID NO: 1613593 - RNA, 19 nt, Artificial Sequence
  Description of Artificial Sequence: Synthetic oligonucleotide
gggugugcauuuacucaag

SEQ ID NO: 1613594 - RNA, 19 nt, Artificial Sequence
  Description of Artificial Sequence: Synthetic oligonucleotide
ccaccacaaggcuuucaug

SEQ ID NO: 1613595 - RNA, 19 nt, Artificial Sequence
  Description of Artificial Sequence: Synthetic oligonucleotide
cagccccuuccuaaaaggu

SEQ ID NO: 1613596 - RNA, 19 nt, Artificial Sequence
  Description of Artificial Sequence: Synthetic oligonucleotide
ggugugcauuuacucaagu

SEQ ID NO: 1613597 - RNA, 19 nt, Artificial Sequence
  Description of Artificial Sequence: Synthetic oligonucleotide
gcaacagcugaagaagagu

SEQ ID NO: 1613598 - RNA, 19 nt, Artificial Sequence
  Description of Artificial Sequence: Synthetic oligonucleotide
auguaaggggcaagacauu

SEQ ID NO: 1613599 - RNA, 19 nt, Artificial Sequence
  Description of Artificial Sequence: Synthetic oligonucleotide
cuauacccaaaugccaauu

SEQ ID NO: 1613600 - RNA, 19 nt, Artificial Sequence
  Description of Artificial Sequence: Synthetic oligonucleotide
cauggaucaaggccauauu

SEQ ID NO: 1613601 - RNA, 19 nt, Artificial Sequence
  Description of Artificial Sequence: Synthetic oligonucleotide
ccccuuccuaaaaggucac

SEQ ID NO: 1613602 - RNA, 19 nt, Artificial Sequence
  Description of Artificial Sequence: Synthetic oligonucleotide
ggacacugcaacagcugaa

SEQ ID NO: 1613603 - RNA, 19 nt, Artificial Sequence
  Description of Artificial Sequence: Synthetic oligonucleotide
ccgcucacaaacacccaga

SEQ ID NO: 1613604 - RNA, 19 nt, Artificial Sequence
  Description of Artificial Sequence: Synthetic oligonucleotide
cccuuccuaaaaggucacc

SEQ ID NO: 1613605 - RNA, 19 nt, Artificial Sequence
  Description of Artificial Sequence: Synthetic oligonucleotide
cguugggaauuucgaugac

SEQ ID NO: 1613606 - RNA, 19 nt, Artificial Sequence
  Description of Artificial Sequence: Synthetic oligonucleotide
cccaaaugccaauuuucau

SEQ ID NO: 1613607 - RNA, 19 nt, Artificial Sequence
  Description of Artificial Sequence: Synthetic oligonucleotide
ccuaaaaggucacccuuuu

SEQ ID NO: 1613608 - RNA, 19 nt, Artificial Sequence
  Description of Artificial Sequence: Synthetic oligonucleotide
ggaugccaggacacugcaa

SEQ ID NO: 1613609 - RNA, 19 nt, Artificial Sequence
  Description of Artificial Sequence: Synthetic oligonucleotide
guccuaccugugcaaucuu

SEQ ID NO: 1613610 - RNA, 19 nt, Artificial Sequence
  Description of Artificial Sequence: Synthetic oligonucleotide
aauaauuuaaauaccaugc

SEQ ID NO: 1613611 - RNA, 19 nt, Artificial Sequence
  Description of Artificial Sequence: Synthetic oligonucleotide
aaacacauuguucauaagc

SEQ ID NO: 1613612 - RNA, 19 nt, Artificial Sequence
  Description of Artificial Sequence: Synthetic oligonucleotide
uaaauuagaacccuggagg

SEQ ID NO: 1613613 - RNA, 19 nt, Artificial Sequence
  Description of Artificial Sequence: Synthetic oligonucleotide
caucuauuaaauuagaacc

SEQ ID NO: 1613614 - RNA, 19 nt, Artificial Sequence
  Description of Artificial Sequence: Synthetic oligonucleotide
acaaagacgaacuauguac

SEQ ID NO: 1613615 - RNA, 19 nt, Artificial Sequence
  Description of Artificial Sequence: Synthetic oligonucleotide
uuaaauaccaugcaguuuc

SEQ ID NO: 1613616 - RNA, 19 nt, Artificial Sequence
  Description of Artificial Sequence: Synthetic oligonucleotide
aaguaaacugcauacauca

SEQ ID NO: 1613617 - RNA, 19 nt, Artificial Sequence
  Description of Artificial Sequence: Synthetic oligonucleotide
uuuaaaguaaacugcauac

SEQ ID NO: 1613618 - RNA, 19 nt, Artificial Sequence
  Description of Artificial Sequence: Synthetic oligonucleotide
aaauuagaacccuggaggg

SEQ ID NO: 1613619 - RNA, 19 nt, Artificial Sequence
  Description of Artificial Sequence: Synthetic oligonucleotide
uaauuuaaauaccaugcag

SEQ ID NO: 1613620 - RNA, 19 nt, Artificial Sequence
  Description of Artificial Sequence: Synthetic oligonucleotide
uuagaaacaauuccgaguc

SEQ ID NO: 1613621 - RNA, 19 nt, Artificial Sequence
  Description of Artificial Sequence: Synthetic oligonucleotide
uugagugcaaaccagagcu

SEQ ID NO: 1613622 - RNA, 19 nt, Artificial Sequence
  Description of Artificial Sequence: Synthetic oligonucleotide
uucucuaacuggaagaaag

SEQ ID NO: 1613623 - RNA, 19 nt, Artificial Sequence
  Description of Artificial Sequence: Synthetic oligonucleotide
ucaucuauuaaauuagaac

SEQ ID NO: 1613624 - RNA, 19 nt, Artificial Sequence
  Description of Artificial Sequence: Synthetic oligonucleotide
agacgaacuauguacagac

SEQ ID NO: 1613625 - RNA, 19 nt, Artificial Sequence
  Description of Artificial Sequence: Synthetic oligonucleotide
uaagaaguggaacagggga

SEQ ID NO: 1613626 - RNA, 19 nt, Artificial Sequence
  Description of Artificial Sequence: Synthetic oligonucleotide
ucaagaugaacucacuuga

SEQ ID NO: 1613627 - RNA, 19 nt, Artificial Sequence
  Description of Artificial Sequence: Synthetic oligonucleotide
acgaacuauguacagacac

SEQ ID NO: 1613628 - RNA, 19 nt, Artificial Sequence
  Description of Artificial Sequence: Synthetic oligonucleotide
ucuuauuuccggaaggccc

SEQ ID NO: 1613629 - RNA, 19 nt, Artificial Sequence
  Description of Artificial Sequence: Synthetic oligonucleotide
auguacaaaaccuaggcca

SEQ ID NO: 1613630 - RNA, 19 nt, Artificial Sequence
  Description of Artificial Sequence: Synthetic oligonucleotide
aucuauuaaauuagaaccc

SEQ ID NO: 1613631 - RNA, 19 nt, Artificial Sequence
  Description of Artificial Sequence: Synthetic oligonucleotide
uuucuguauguacaaaacc

SEQ ID NO: 1613632 - RNA, 19 nt, Artificial Sequence
  Description of Artificial Sequence: Synthetic oligonucleotide
acuuuuagaaacaauuccg

SEQ ID NO: 1613633 - RNA, 19 nt, Artificial Sequence
  Description of Artificial Sequence: Synthetic oligonucleotide
aauaccaugcaguuucugu

SEQ ID NO: 1613634 - RNA, 19 nt, Artificial Sequence
  Description of Artificial Sequence: Synthetic oligonucleotide
accuaggccacagagaucc

SEQ ID NO: 1613635 - RNA, 19 nt, Artificial Sequence
  Description of Artificial Sequence: Synthetic oligonucleotide
uccuauacaaagacgaacu

SEQ ID NO: 1613636 - RNA, 19 nt, Artificial Sequence
  Description of Artificial Sequence: Synthetic oligonucleotide
ucagagagaaacaauaauu

SEQ ID NO: 1613637 - RNA, 19 nt, Artificial Sequence
  Description of Artificial Sequence: Synthetic oligonucleotide
aacaauuccgagucacuuc

SEQ ID NO: 1613638 - RNA, 19 nt, Artificial Sequence
  Description of Artificial Sequence: Synthetic oligonucleotide
uuuuaaaguaaacugcaua

SEQ ID NO: 1613639 - RNA, 19 nt, Artificial Sequence
  Description of Artificial Sequence: Synthetic oligonucleotide
aaagcaaccugcuuagaga

SEQ ID NO: 1613640 - RNA, 19 nt, Artificial Sequence
  Description of Artificial Sequence: Synthetic oligonucleotide
uauguacaaaaccuaggcc

SEQ ID NO: 1613641 - RNA, 19 nt, Artificial Sequence
  Description of Artificial Sequence: Synthetic oligonucleotide
aaucacaacaguuggcacu

SEQ ID NO: 1613642 - RNA, 19 nt, Artificial Sequence
  Description of Artificial Sequence: Synthetic oligonucleotide
guauguacaaaaccuaggc

SEQ ID NO: 1613643 - RNA, 19 nt, Artificial Sequence
  Description of Artificial Sequence: Synthetic oligonucleotide
aauagcugauccccaaaag

SEQ ID NO: 1613644 - RNA, 19 nt, Artificial Sequence
  Description of Artificial Sequence: Synthetic oligonucleotide
ucaaucacccugcagcuag

SEQ ID NO: 1613645 - RNA, 19 nt, Artificial Sequence
  Description of Artificial Sequence: Synthetic oligonucleotide
guuauccuaacaaaguggg

SEQ ID NO: 1613646 - RNA, 19 nt, Artificial Sequence
  Description of Artificial Sequence: Synthetic oligonucleotide
cuaacuggaagaaaggcuc

SEQ ID NO: 1613647 - RNA, 19 nt, Artificial Sequence
  Description of Artificial Sequence: Synthetic oligonucleotide
aaucgagaggcucaagaug

SEQ ID NO: 1613648 - RNA, 19 nt, Artificial Sequence
  Description of Artificial Sequence: Synthetic oligonucleotide
cacauuguucauaagcagg

SEQ ID NO: 1613649 - RNA, 19 nt, Artificial Sequence
  Description of Artificial Sequence: Synthetic oligonucleotide
ggaaaagccaguuugacac

SEQ ID NO: 1613650 - RNA, 19 nt, Artificial Sequence
  Description of Artificial Sequence: Synthetic oligonucleotide
gaaagcaaccugcuuagag

SEQ ID NO: 1613651 - RNA, 19 nt, Artificial Sequence
  Description of Artificial Sequence: Synthetic oligonucleotide
auaauuuaaauaccaugca

SEQ ID NO: 1613652 - RNA, 19 nt, Artificial Sequence
  Description of Artificial Sequence: Synthetic oligonucleotide
uuguucauaagcaggagaa

SEQ ID NO: 1613653 - RNA, 19 nt, Artificial Sequence
  Description of Artificial Sequence: Synthetic oligonucleotide
aaagacgaacuauguacag

SEQ ID NO: 1613654 - RNA, 19 nt, Artificial Sequence
  Description of Artificial Sequence: Synthetic oligonucleotide
aauuagaacccuggagggc

SEQ ID NO: 1613655 - RNA, 19 nt, Artificial Sequence
  Description of Artificial Sequence: Synthetic oligonucleotide
uauccuaacaaagugggga

SEQ ID NO: 1613656 - RNA, 19 nt, Artificial Sequence
  Description of Artificial Sequence: Synthetic oligonucleotide
uguuugguuucucuaacug

SEQ ID NO: 1613657 - RNA, 19 nt, Artificial Sequence
  Description of Artificial Sequence: Synthetic oligonucleotide
ucucuaacuggaagaaagg

SEQ ID NO: 1613658 - RNA, 19 nt, Artificial Sequence
  Description of Artificial Sequence: Synthetic oligonucleotide
ucgaagaucaccacacuca

SEQ ID NO: 1613659 - RNA, 19 nt, Artificial Sequence
  Description of Artificial Sequence: Synthetic oligonucleotide
ucagaugggaaucgagagg

SEQ ID NO: 1613660 - RNA, 19 nt, Artificial Sequence
  Description of Artificial Sequence: Synthetic oligonucleotide
auggccuugaaauagcuga

SEQ ID NO: 1613661 - RNA, 19 nt, Artificial Sequence
  Description of Artificial Sequence: Synthetic oligonucleotide
agaaacaauuccgagucac

SEQ ID NO: 1613662 - RNA, 19 nt, Artificial Sequence
  Description of Artificial Sequence: Synthetic oligonucleotide
ucacuuuuagaaacaauuc

SEQ ID NO: 1613663 - RNA, 19 nt, Artificial Sequence
  Description of Artificial Sequence: Synthetic oligonucleotide
ugaacucacuugaaaacug

SEQ ID NO: 1613664 - RNA, 19 nt, Artificial Sequence
  Description of Artificial Sequence: Synthetic oligonucleotide
ugcucauuccaaaaguaca

SEQ ID NO: 1613665 - RNA, 19 nt, Artificial Sequence
  Description of Artificial Sequence: Synthetic oligonucleotide
ucccuaaagacccaaggcu

SEQ ID NO: 1613666 - RNA, 19 nt, Artificial Sequence
  Description of Artificial Sequence: Synthetic oligonucleotide
uacggcucccuaaagaccc

SEQ ID NO: 1613667 - RNA, 19 nt, Artificial Sequence
  Description of Artificial Sequence: Synthetic oligonucleotide
acuucaguuauccuaacaa

SEQ ID NO: 1613668 - RNA, 19 nt, Artificial Sequence
  Description of Artificial Sequence: Synthetic oligonucleotide
uuauucuauguacagcauc

SEQ ID NO: 1613669 - RNA, 19 nt, Artificial Sequence
  Description of Artificial Sequence: Synthetic oligonucleotide
ucuauuaaauuagaacccu

SEQ ID NO: 1613670 - RNA, 19 nt, Artificial Sequence
  Description of Artificial Sequence: Synthetic oligonucleotide
uguacaaaaccuaggccac

SEQ ID NO: 1613671 - RNA, 19 nt, Artificial Sequence
  Description of Artificial Sequence: Synthetic oligonucleotide
guaagugccauccuacagc

SEQ ID NO: 1613672 - RNA, 19 nt, Artificial Sequence
  Description of Artificial Sequence: Synthetic oligonucleotide
uaacaaaguggggaaacgg

SEQ ID NO: 1613673 - RNA, 19 nt, Artificial Sequence
  Description of Artificial Sequence: Synthetic oligonucleotide
caaaaccuaggccacagag

SEQ ID NO: 1613674 - RNA, 19 nt, Artificial Sequence
  Description of Artificial Sequence: Synthetic oligonucleotide
aaaguacaaacacauuguu

SEQ ID NO: 1613675 - RNA, 19 nt, Artificial Sequence
  Description of Artificial Sequence: Synthetic oligonucleotide
uggaccauuguguuguuug

SEQ ID NO: 1613676 - RNA, 19 nt, Artificial Sequence
  Description of Artificial Sequence: Synthetic oligonucleotide
uuccaaaaguacaaacaca

SEQ ID NO: 1613677 - RNA, 19 nt, Artificial Sequence
  Description of Artificial Sequence: Synthetic oligonucleotide
gacaccgucacuugagugc

SEQ ID NO: 1613678 - RNA, 19 nt, Artificial Sequence
  Description of Artificial Sequence: Synthetic oligonucleotide
uaauuaacuguugaauugu

SEQ ID NO: 1613679 - RNA, 19 nt, Artificial Sequence
  Description of Artificial Sequence: Synthetic oligonucleotide
auagcugauccccaaaaga

SEQ ID NO: 1613680 - RNA, 19 nt, Artificial Sequence
  Description of Artificial Sequence: Synthetic oligonucleotide
uuauccuaacaaagugggg

SEQ ID NO: 1613681 - RNA, 19 nt, Artificial Sequence
  Description of Artificial Sequence: Synthetic oligonucleotide
ugugacaccgucacuugag

SEQ ID NO: 1613682 - RNA, 19 nt, Artificial Sequence
  Description of Artificial Sequence: Synthetic oligonucleotide
acaauuccgagucacuuca

SEQ ID NO: 1613683 - RNA, 19 nt, Artificial Sequence
  Description of Artificial Sequence: Synthetic oligonucleotide
ucacuccuauacaaagacg

SEQ ID NO: 1613684 - RNA, 19 nt, Artificial Sequence
  Description of Artificial Sequence: Synthetic oligonucleotide
acacuccuaacucugagca

SEQ ID NO: 1613685 - RNA, 19 nt, Artificial Sequence
  Description of Artificial Sequence: Synthetic oligonucleotide
auuuccggaaggcccaugg

SEQ ID NO: 1613686 - RNA, 19 nt, Artificial Sequence
  Description of Artificial Sequence: Synthetic oligonucleotide
uugucaucacauucaauca

SEQ ID NO: 1613687 - RNA, 19 nt, Artificial Sequence
  Description of Artificial Sequence: Synthetic oligonucleotide
cucagaugggaaucgagag

SEQ ID NO: 1613688 - RNA, 19 nt, Artificial Sequence
  Description of Artificial Sequence: Synthetic oligonucleotide
ucuguauguacaaaaccua

SEQ ID NO: 1613689 - RNA, 19 nt, Artificial Sequence
  Description of Artificial Sequence: Synthetic oligonucleotide
ucaucggagcaacacacca

SEQ ID NO: 1613690 - RNA, 19 nt, Artificial Sequence
  Description of Artificial Sequence: Synthetic oligonucleotide
ugagcaagugacuucugca

SEQ ID NO: 1613691 - RNA, 19 nt, Artificial Sequence
  Description of Artificial Sequence: Synthetic oligonucleotide
guaaacugcauacaucauc

SEQ ID NO: 1613692 - RNA, 19 nt, Artificial Sequence
  Description of Artificial Sequence: Synthetic oligonucleotide
ugguuucucuaacuggaag

SEQ ID NO: 1613693 - RNA, 19 nt, Artificial Sequence
  Description of Artificial Sequence: Synthetic oligonucleotide
aucaggacuuuggaaaagc

SEQ ID NO: 1613694 - RNA, 19 nt, Artificial Sequence
  Description of Artificial Sequence: Synthetic oligonucleotide
uggcacuugucuuauuucc

SEQ ID NO: 1613695 - RNA, 19 nt, Artificial Sequence
  Description of Artificial Sequence: Synthetic oligonucleotide
cucacuccuauacaaagac

SEQ ID NO: 1613696 - RNA, 19 nt, Artificial Sequence
  Description of Artificial Sequence: Synthetic oligonucleotide
uucuugcuaaccugaaccc

SEQ ID NO: 1613697 - RNA, 19 nt, Artificial Sequence
  Description of Artificial Sequence: Synthetic oligonucleotide
guuacggcucccuaaagac

SEQ ID NO: 1613698 - RNA, 19 nt, Artificial Sequence
  Description of Artificial Sequence: Synthetic oligonucleotide
cacuccuauacaaagacga

SEQ ID NO: 1613699 - RNA, 19 nt, Artificial Sequence
  Description of Artificial Sequence: Synthetic oligonucleotide
cuuuuagaaacaauuccga

SEQ ID NO: 1613700 - RNA, 19 nt, Artificial Sequence
  Description of Artificial Sequence: Synthetic oligonucleotide
aauuccgagucacuucagu

SEQ ID NO: 1613701 - RNA, 19 nt, Artificial Sequence
  Description of Artificial Sequence: Synthetic oligonucleotide
uugaauugucacuuuuaga

SEQ ID NO: 1613702 - RNA, 19 nt, Artificial Sequence
  Description of Artificial Sequence: Synthetic oligonucleotide
augcaguuucuguauguac

SEQ ID NO: 1613703 - RNA, 19 nt, Artificial Sequence
  Description of Artificial Sequence: Synthetic oligonucleotide
uuuugugacaccgucacuu

SEQ ID NO: 1613704 - RNA, 19 nt, Artificial Sequence
  Description of Artificial Sequence: Synthetic oligonucleotide
aaacggugugguuacggcu

SEQ ID NO: 1613705 - RNA, 19 nt, Artificial Sequence
  Description of Artificial Sequence: Synthetic oligonucleotide
guaggaaccacuugucaug

SEQ ID NO: 1613706 - RNA, 19 nt, Artificial Sequence
  Description of Artificial Sequence: Synthetic oligonucleotide
uaagugccauccuacagcu

SEQ ID NO: 1613707 - RNA, 19 nt, Artificial Sequence
  Description of Artificial Sequence: Synthetic oligonucleotide
gaaaggcucacauuguaaa

SEQ ID NO: 1613708 - RNA, 19 nt, Artificial Sequence
  Description of Artificial Sequence: Synthetic oligonucleotide
acagccgucaucuauuaaa

SEQ ID NO: 1613709 - RNA, 19 nt, Artificial Sequence
  Description of Artificial Sequence: Synthetic oligonucleotide
caguuauccuaacaaagug

SEQ ID NO: 1613710 - RNA, 19 nt, Artificial Sequence
  Description of Artificial Sequence: Synthetic oligonucleotide
aacggugugguuacggcuc

SEQ ID NO: 1613711 - RNA, 19 nt, Artificial Sequence
  Description of Artificial Sequence: Synthetic oligonucleotide
agucauggaaggugacccc

SEQ ID NO: 1613712 - RNA, 19 nt, Artificial Sequence
  Description of Artificial Sequence: Synthetic oligonucleotide
cacaccacgaugcucauuc

SEQ ID NO: 1613713 - RNA, 19 nt, Artificial Sequence
  Description of Artificial Sequence: Synthetic oligonucleotide
uaacuguugaauugucacu

SEQ ID NO: 1613714 - RNA, 19 nt, Artificial Sequence
  Description of Artificial Sequence: Synthetic oligonucleotide
uucagaacaucuccucaca

SEQ ID NO: 1613715 - RNA, 19 nt, Artificial Sequence
  Description of Artificial Sequence: Synthetic oligonucleotide
ugaggcacacuccuaacuc

SEQ ID NO: 1613716 - RNA, 19 nt, Artificial Sequence
  Description of Artificial Sequence: Synthetic oligonucleotide
aacaguuggcacuugucuu

SEQ ID NO: 1613717 - RNA, 19 nt, Artificial Sequence
  Description of Artificial Sequence: Synthetic oligonucleotide
acgaugcucauuccaaaag

SEQ ID NO: 1613718 - RNA, 19 nt, Artificial Sequence
  Description of Artificial Sequence: Synthetic oligonucleotide
ucaaaaggagagcguaagu

SEQ ID NO: 1613719 - RNA, 19 nt, Artificial Sequence
  Description of Artificial Sequence: Synthetic oligonucleotide
cacucacuccuauacaaag

SEQ ID NO: 1613720 - RNA, 19 nt, Artificial Sequence
  Description of Artificial Sequence: Synthetic oligonucleotide
gcuacagccaucuggcucg

SEQ ID NO: 1613721 - RNA, 19 nt, Artificial Sequence
  Description of Artificial Sequence: Synthetic oligonucleotide
aacaaaguggggaaacggu

SEQ ID NO: 1613722 - RNA, 19 nt, Artificial Sequence
  Description of Artificial Sequence: Synthetic oligonucleotide
uguguuguuugguuucucu

SEQ ID NO: 1613723 - RNA, 19 nt, Artificial Sequence
  Description of Artificial Sequence: Synthetic oligonucleotide
cuugagugcaaaccagagc

SEQ ID NO: 1613724 - RNA, 19 nt, Artificial Sequence
  Description of Artificial Sequence: Synthetic oligonucleotide
gagagcguaagugccaucc

SEQ ID NO: 1613725 - RNA, 19 nt, Artificial Sequence
  Description of Artificial Sequence: Synthetic oligonucleotide
acagagauccaguuuaauu

SEQ ID NO: 1613726 - RNA, 19 nt, Artificial Sequence
  Description of Artificial Sequence: Synthetic oligonucleotide
uggcaggacaguguggugg

SEQ ID NO: 1613727 - RNA, 19 nt, Artificial Sequence
  Description of Artificial Sequence: Synthetic oligonucleotide
ugucuuauuuccggaaggc

SEQ ID NO: 1613728 - RNA, 19 nt, Artificial Sequence
  Description of Artificial Sequence: Synthetic oligonucleotide
ugcauggucauagcaagug

SEQ ID NO: 1613729 - RNA, 19 nt, Artificial Sequence
  Description of Artificial Sequence: Synthetic oligonucleotide
cucccuaaagacccaaggc

SEQ ID NO: 1613730 - RNA, 19 nt, Artificial Sequence
  Description of Artificial Sequence: Synthetic oligonucleotide
gacccaaggcuuucaaaag

SEQ ID NO: 1613731 - RNA, 19 nt, Artificial Sequence
  Description of Artificial Sequence: Synthetic oligonucleotide
acauggaccauuguguugu

SEQ ID NO: 1613732 - RNA, 19 nt, Artificial Sequence
  Description of Artificial Sequence: Synthetic oligonucleotide
uuacggcucccuaaagacc

SEQ ID NO: 1613733 - RNA, 19 nt, Artificial Sequence
  Description of Artificial Sequence: Synthetic oligonucleotide
cuaacaaaguggggaaacg

SEQ ID NO: 1613734 - RNA, 19 nt, Artificial Sequence
  Description of Artificial Sequence: Synthetic oligonucleotide
uccagaaagggauggcuac

SEQ ID NO: 1613735 - RNA, 19 nt, Artificial Sequence
  Description of Artificial Sequence: Synthetic oligonucleotide
cucuaacuggaagaaaggc

SEQ ID NO: 1613736 - RNA, 19 nt, Artificial Sequence
  Description of Artificial Sequence: Synthetic oligonucleotide
cauuguguuguuugguuuc

SEQ ID NO: 1613737 - RNA, 19 nt, Artificial Sequence
  Description of Artificial Sequence: Synthetic oligonucleotide
gucacuugagugcaaacca

SEQ ID NO: 1613738 - RNA, 19 nt, Artificial Sequence
  Description of Artificial Sequence: Synthetic oligonucleotide
gaucaccacacucacucac

SEQ ID NO: 1613739 - RNA, 19 nt, Artificial Sequence
  Description of Artificial Sequence: Synthetic oligonucleotide
uuugugacaccgucacuug

SEQ ID NO: 1613740 - RNA, 19 nt, Artificial Sequence
  Description of Artificial Sequence: Synthetic oligonucleotide
augcucauuccaaaaguac

SEQ ID NO: 1613741 - RNA, 19 nt, Artificial Sequence
  Description of Artificial Sequence: Synthetic oligonucleotide
aucgagaggcucaagauga

SEQ ID NO: 1613742 - RNA, 19 nt, Artificial Sequence
  Description of Artificial Sequence: Synthetic oligonucleotide
caacacaccacgaugcuca

SEQ ID NO: 1613743 - RNA, 19 nt, Artificial Sequence
  Description of Artificial Sequence: Synthetic oligonucleotide
gaucccauucaucggagca

SEQ ID NO: 1613744 - RNA, 19 nt, Artificial Sequence
  Description of Artificial Sequence: Synthetic oligonucleotide
aaacaauuccgagucacuu

SEQ ID NO: 1613745 - RNA, 19 nt, Artificial Sequence
  Description of Artificial Sequence: Synthetic oligonucleotide
caaagacgaacuauguaca

SEQ ID NO: 1613746 - RNA, 19 nt, Artificial Sequence
  Description of Artificial Sequence: Synthetic oligonucleotide
ugaucaggacuuuggaaaa

SEQ ID NO: 1613747 - RNA, 19 nt, Artificial Sequence
  Description of Artificial Sequence: Synthetic oligonucleotide
gagcucucagagcaucugg

SEQ ID NO: 1613748 - RNA, 19 nt, Artificial Sequence
  Description of Artificial Sequence: Synthetic oligonucleotide
cauacaucaucagagagaa

SEQ ID NO: 1613749 - RNA, 19 nt, Artificial Sequence
  Description of Artificial Sequence: Synthetic oligonucleotide
aagacgaacuauguacaga

SEQ ID NO: 1613750 - RNA, 19 nt, Artificial Sequence
  Description of Artificial Sequence: Synthetic oligonucleotide
cacucacucacuccuauac

SEQ ID NO: 1613751 - RNA, 19 nt, Artificial Sequence
  Description of Artificial Sequence: Synthetic oligonucleotide
uccgagucacuucaguuau

SEQ ID NO: 1613752 - RNA, 19 nt, Artificial Sequence
  Description of Artificial Sequence: Synthetic oligonucleotide
guaagaaguggaacagggg

SEQ ID NO: 1613753 - RNA, 19 nt, Artificial Sequence
  Description of Artificial Sequence: Synthetic oligonucleotide
agagauccaguuuaauuua

SEQ ID NO: 1613754 - RNA, 19 nt, Artificial Sequence
  Description of Artificial Sequence: Synthetic oligonucleotide
uuuccggaaggcccauggg

SEQ ID NO: 1613755 - RNA, 19 nt, Artificial Sequence
  Description of Artificial Sequence: Synthetic oligonucleotide
agugaucaggacuuuggaa

SEQ ID NO: 1613756 - RNA, 19 nt, Artificial Sequence
  Description of Artificial Sequence: Synthetic oligonucleotide
acaucuccucacauggacc

SEQ ID NO: 1613757 - RNA, 19 nt, Artificial Sequence
  Description of Artificial Sequence: Synthetic oligonucleotide
gaacucacuugaaaacugc

SEQ ID NO: 1613758 - RNA, 19 nt, Artificial Sequence
  Description of Artificial Sequence: Synthetic oligonucleotide
agagcaucuggggacaaag

SEQ ID NO: 1613759 - RNA, 19 nt, Artificial Sequence
  Description of Artificial Sequence: Synthetic oligonucleotide
cuuagagacugauggagga

SEQ ID NO: 1613760 - RNA, 19 nt, Artificial Sequence
  Description of Artificial Sequence: Synthetic oligonucleotide
ggcuuucaaaaggagagcg

SEQ ID NO: 1613761 - RNA, 19 nt, Artificial Sequence
  Description of Artificial Sequence: Synthetic oligonucleotide
caacuggaagaaagcaacc

SEQ ID NO: 1613762 - RNA, 19 nt, Artificial Sequence
  Description of Artificial Sequence: Synthetic oligonucleotide
agcguaagugccauccuac

SEQ ID NO: 1613763 - RNA, 19 nt, Artificial Sequence
  Description of Artificial Sequence: Synthetic oligonucleotide
cuuauuuccggaaggccca

SEQ ID NO: 1613764 - RNA, 19 nt, Artificial Sequence
  Description of Artificial Sequence: Synthetic oligonucleotide
ucuugcuaaccugaacccc

SEQ ID NO: 1613765 - RNA, 19 nt, Artificial Sequence
  Description of Artificial Sequence: Synthetic oligonucleotide
gcuaaccugaaccccacgg

SEQ ID NO: 1613766 - RNA, 19 nt, Artificial Sequence
  Description of Artificial Sequence: Synthetic oligonucleotide
gcagcuuuuccagaaaggg

SEQ ID NO: 1613767 - RNA, 19 nt, Artificial Sequence
  Description of Artificial Sequence: Synthetic oligonucleotide
aaccccacggugcucagau

SEQ ID NO: 1613768 - RNA, 19 nt, Artificial Sequence
  Description of Artificial Sequence: Synthetic oligonucleotide
uuguuugguuucucuaacu

SEQ ID NO: 1613769 - RNA, 19 nt, Artificial Sequence
  Description of Artificial Sequence: Synthetic oligonucleotide
caguuugacacauuuccca

SEQ ID NO: 1613770 - RNA, 19 nt, Artificial Sequence
  Description of Artificial Sequence: Synthetic oligonucleotide
agacugauggaggaagaag

SEQ ID NO: 1613771 - RNA, 19 nt, Artificial Sequence
  Description of Artificial Sequence: Synthetic oligonucleotide
cuugcuaaccugaacccca

SEQ ID NO: 1613772 - RNA, 19 nt, Artificial Sequence
  Description of Artificial Sequence: Synthetic oligonucleotide
uuuaaauaccaugcaguuu

SEQ ID NO: 1613773 - RNA, 19 nt, Artificial Sequence
  Description of Artificial Sequence: Synthetic oligonucleotide
ugugguuacggcucccuaa

SEQ ID NO: 1613774 - RNA, 19 nt, Artificial Sequence
  Description of Artificial Sequence: Synthetic oligonucleotide
ugcaugggcaaggugccgg

SEQ ID NO: 1613775 - RNA, 19 nt, Artificial Sequence
  Description of Artificial Sequence: Synthetic oligonucleotide
ugagugcaaaccagagcug

SEQ ID NO: 1613776 - RNA, 19 nt, Artificial Sequence
  Description of Artificial Sequence: Synthetic oligonucleotide
gagcaggugaggcacacuc

SEQ ID NO: 1613777 - RNA, 19 nt, Artificial Sequence
  Description of Artificial Sequence: Synthetic oligonucleotide
uccccaaaagaggugaccu

SEQ ID NO: 1613778 - RNA, 19 nt, Artificial Sequence
  Description of Artificial Sequence: Synthetic oligonucleotide
acaaaguggggaaacggug

SEQ ID NO: 1613779 - RNA, 19 nt, Artificial Sequence
  Description of Artificial Sequence: Synthetic oligonucleotide
uaaauaccaugcaguuucu

SEQ ID NO: 1613780 - RNA, 19 nt, Artificial Sequence
  Description of Artificial Sequence: Synthetic oligonucleotide
uuccgagucacuucaguua

SEQ ID NO: 1613781 - RNA, 19 nt, Artificial Sequence
  Description of Artificial Sequence: Synthetic oligonucleotide
ugcaaaccagagcuguggu

SEQ ID NO: 1613782 - RNA, 19 nt, Artificial Sequence
  Description of Artificial Sequence: Synthetic oligonucleotide
uggggacaaagugaucagg

SEQ ID NO: 1613783 - RNA, 19 nt, Artificial Sequence
  Description of Artificial Sequence: Synthetic oligonucleotide
cacacuccuaacucugagc

SEQ ID NO: 1613784 - RNA, 19 nt, Artificial Sequence
  Description of Artificial Sequence: Synthetic oligonucleotide
ugacaccgucacuugagug

SEQ ID NO: 1613785 - RNA, 19 nt, Artificial Sequence
  Description of Artificial Sequence: Synthetic oligonucleotide
ucagaacaucuccucacau

SEQ ID NO: 1613786 - RNA, 19 nt, Artificial Sequence
  Description of Artificial Sequence: Synthetic oligonucleotide
acaggggacucucugcuca

SEQ ID NO: 1613787 - RNA, 19 nt, Artificial Sequence
  Description of Artificial Sequence: Synthetic oligonucleotide
gguuucucuaacuggaaga

SEQ ID NO: 1613788 - RNA, 19 nt, Artificial Sequence
  Description of Artificial Sequence: Synthetic oligonucleotide
aaguggggaaacggugugg

SEQ ID NO: 1613789 - RNA, 19 nt, Artificial Sequence
  Description of Artificial Sequence: Synthetic oligonucleotide
ggagcaacacaccacgaug

SEQ ID NO: 1613790 - RNA, 19 nt, Artificial Sequence
  Description of Artificial Sequence: Synthetic oligonucleotide
auccccaaaagaggugacc

SEQ ID NO: 1613791 - RNA, 19 nt, Artificial Sequence
  Description of Artificial Sequence: Synthetic oligonucleotide
aaauaccaugcaguuucug

SEQ ID NO: 1613792 - RNA, 19 nt, Artificial Sequence
  Description of Artificial Sequence: Synthetic oligonucleotide
uauguacagcaucuuccuc

SEQ ID NO: 1613793 - RNA, 19 nt, Artificial Sequence
  Description of Artificial Sequence: Synthetic oligonucleotide
acuugagugcaaaccagag

SEQ ID NO: 1613794 - RNA, 19 nt, Artificial Sequence
  Description of Artificial Sequence: Synthetic oligonucleotide
acuugucuuauuuccggaa

SEQ ID NO: 1613795 - RNA, 19 nt, Artificial Sequence
  Description of Artificial Sequence: Synthetic oligonucleotide
cccgggaucccauucaucg

SEQ ID NO: 1613796 - RNA, 19 nt, Artificial Sequence
  Description of Artificial Sequence: Synthetic oligonucleotide
gucgaagaucaccacacuc

SEQ ID NO: 1613797 - RNA, 19 nt, Artificial Sequence
  Description of Artificial Sequence: Synthetic oligonucleotide
caaucacaacaguuggcac

SEQ ID NO: 1613798 - RNA, 19 nt, Artificial Sequence
  Description of Artificial Sequence: Synthetic oligonucleotide
ccgucaucuauuaaauuag

SEQ ID NO: 1613799 - RNA, 19 nt, Artificial Sequence
  Description of Artificial Sequence: Synthetic oligonucleotide
aaggugccgguggagggcg

SEQ ID NO: 1613800 - RNA, 19 nt, Artificial Sequence
  Description of Artificial Sequence: Synthetic oligonucleotide
gagcaagugacuucugcaa

SEQ ID NO: 1613801 - RNA, 19 nt, Artificial Sequence
  Description of Artificial Sequence: Synthetic oligonucleotide
agaaguggaacaggggacu

SEQ ID NO: 1613802 - RNA, 19 nt, Artificial Sequence
  Description of Artificial Sequence: Synthetic oligonucleotide
auuccgagucacuucaguu

SEQ ID NO: 1613803 - RNA, 19 nt, Artificial Sequence
  Description of Artificial Sequence: Synthetic oligonucleotide
uugugacaccgucacuuga

SEQ ID NO: 1613804 - RNA, 19 nt, Artificial Sequence
  Description of Artificial Sequence: Synthetic oligonucleotide
caucacauucaaucacaac

SEQ ID NO: 1613805 - RNA, 19 nt, Artificial Sequence
  Description of Artificial Sequence: Synthetic oligonucleotide
cauggguccugcuuuugug

SEQ ID NO: 1613806 - RNA, 19 nt, Artificial Sequence
  Description of Artificial Sequence: Synthetic oligonucleotide
acggugugguuacggcucc

SEQ ID NO: 1613807 - RNA, 19 nt, Artificial Sequence
  Description of Artificial Sequence: Synthetic oligonucleotide
gcuuuugugacaccgucac

SEQ ID NO: 1613808 - RNA, 19 nt, Artificial Sequence
  Description of Artificial Sequence: Synthetic oligonucleotide
uaccaugcaguuucuguau

SEQ ID NO: 1613809 - RNA, 19 nt, Artificial Sequence
  Description of Artificial Sequence: Synthetic oligonucleotide
acaguuggcacuugucuua

SEQ ID NO: 1613810 - RNA, 19 nt, Artificial Sequence
  Description of Artificial Sequence: Synthetic oligonucleotide
gacugauggaggaagaagu

SEQ ID NO: 1613811 - RNA, 19 nt, Artificial Sequence
  Description of Artificial Sequence: Synthetic oligonucleotide
ugcuaaccugaaccccacg

SEQ ID NO: 1613812 - RNA, 19 nt, Artificial Sequence
  Description of Artificial Sequence: Synthetic oligonucleotide
aaucacccugcagcuagag

SEQ ID NO: 1613813 - RNA, 19 nt, Artificial Sequence
  Description of Artificial Sequence: Synthetic oligonucleotide
gcucccuaaagacccaagg

SEQ ID NO: 1613814 - RNA, 19 nt, Artificial Sequence
  Description of Artificial Sequence: Synthetic oligonucleotide
agcaagugacuucugcaaa

SEQ ID NO: 1613815 - RNA, 19 nt, Artificial Sequence
  Description of Artificial Sequence: Synthetic oligonucleotide
ggaaucgagaggcucaaga

SEQ ID NO: 1613816 - RNA, 19 nt, Artificial Sequence
  Description of Artificial Sequence: Synthetic oligonucleotide
acauucaaucacaacaguu

SEQ ID NO: 1613817 - RNA, 19 nt, Artificial Sequence
  Description of Artificial Sequence: Synthetic oligonucleotide
caucuccucacauggacca

SEQ ID NO: 1613818 - RNA, 19 nt, Artificial Sequence
  Description of Artificial Sequence: Synthetic oligonucleotide
auggguccugcuuuuguga

SEQ ID NO: 1613819 - RNA, 19 nt, Artificial Sequence
  Description of Artificial Sequence: Synthetic oligonucleotide
gaugggaaucgagaggcuc

SEQ ID NO: 1613820 - RNA, 19 nt, Artificial Sequence
  Description of Artificial Sequence: Synthetic oligonucleotide
uccucauacagccgucauc

SEQ ID NO: 1613821 - RNA, 19 nt, Artificial Sequence
  Description of Artificial Sequence: Synthetic oligonucleotide
cauucaucggagcaacaca

SEQ ID NO: 1613822 - RNA, 19 nt, Artificial Sequence
  Description of Artificial Sequence: Synthetic oligonucleotide
uggguaggaaccacuuguc

SEQ ID NO: 1613823 - RNA, 19 nt, Artificial Sequence
  Description of Artificial Sequence: Synthetic oligonucleotide
cagagauccaguuuaauuu

SEQ ID NO: 1613824 - RNA, 19 nt, Artificial Sequence
  Description of Artificial Sequence: Synthetic oligonucleotide
gauggaggaagaagucaug

SEQ ID NO: 1613825 - RNA, 19 nt, Artificial Sequence
  Description of Artificial Sequence: Synthetic oligonucleotide
gacaaagugaucaggacuu

SEQ ID NO: 1613826 - RNA, 19 nt, Artificial Sequence
  Description of Artificial Sequence: Synthetic oligonucleotide
accaugcaguuucuguaug

SEQ ID NO: 1613827 - RNA, 19 nt, Artificial Sequence
  Description of Artificial Sequence: Synthetic oligonucleotide
aaaccugacggagcucuca

SEQ ID NO: 1613828 - RNA, 19 nt, Artificial Sequence
  Description of Artificial Sequence: Synthetic oligonucleotide
gucuuauuuccggaaggcc

SEQ ID NO: 1613829 - RNA, 19 nt, Artificial Sequence
  Description of Artificial Sequence: Synthetic oligonucleotide
gaugcucauuccaaaagua

SEQ ID NO: 1613830 - RNA, 19 nt, Artificial Sequence
  Description of Artificial Sequence: Synthetic oligonucleotide
cagcuagaggggugcaugg

SEQ ID NO: 1613831 - RNA, 19 nt, Artificial Sequence
  Description of Artificial Sequence: Synthetic oligonucleotide
uguucauaagcaggagaaa

SEQ ID NO: 1613832 - RNA, 19 nt, Artificial Sequence
  Description of Artificial Sequence: Synthetic oligonucleotide
cauuguucauaagcaggag

SEQ ID NO: 1613833 - RNA, 19 nt, Artificial Sequence
  Description of Artificial Sequence: Synthetic oligonucleotide
gucacuucaguuauccuaa

SEQ ID NO: 1613834 - RNA, 19 nt, Artificial Sequence
  Description of Artificial Sequence: Synthetic oligonucleotide
ugguuacggcucccuaaag

SEQ ID NO: 1613835 - RNA, 19 nt, Artificial Sequence
  Description of Artificial Sequence: Synthetic oligonucleotide
uaaagacccaaggcuuuca

SEQ ID NO: 1613836 - RNA, 19 nt, Artificial Sequence
  Description of Artificial Sequence: Synthetic oligonucleotide
aaccacuugucauggccuu

SEQ ID NO: 1613837 - RNA, 19 nt, Artificial Sequence
  Description of Artificial Sequence: Synthetic oligonucleotide
uggguccugcuuuugugac

SEQ ID NO: 1613838 - RNA, 19 nt, Artificial Sequence
  Description of Artificial Sequence: Synthetic oligonucleotide
ccuugaaauagcugauccc

SEQ ID NO: 1613839 - RNA, 19 nt, Artificial Sequence
  Description of Artificial Sequence: Synthetic oligonucleotide
gaaucgagaggcucaagau

SEQ ID NO: 1613840 - RNA, 19 nt, Artificial Sequence
  Description of Artificial Sequence: Synthetic oligonucleotide
cauacugcagcuggugcug

SEQ ID NO: 1613841 - RNA, 19 nt, Artificial Sequence
  Description of Artificial Sequence: Synthetic oligonucleotide
gccgucaucuauuaaauua

SEQ ID NO: 1613842 - RNA, 19 nt, Artificial Sequence
  Description of Artificial Sequence: Synthetic oligonucleotide
cugugguaagaaguggaac

SEQ ID NO: 1613843 - RNA, 19 nt, Artificial Sequence
  Description of Artificial Sequence: Synthetic oligonucleotide
agcaacacaccacgaugcu

SEQ ID NO: 1613844 - RNA, 19 nt, Artificial Sequence
  Description of Artificial Sequence: Synthetic oligonucleotide
cuagaggggugcaugggca

SEQ ID NO: 1613845 - RNA, 19 nt, Artificial Sequence
  Description of Artificial Sequence: Synthetic oligonucleotide
aaaaccugacggagcucuc

SEQ ID NO: 1613846 - RNA, 19 nt, Artificial Sequence
  Description of Artificial Sequence: Synthetic oligonucleotide
uuagaacccuggagggcac

SEQ ID NO: 1613847 - RNA, 19 nt, Artificial Sequence
  Description of Artificial Sequence: Synthetic oligonucleotide
aguggggaaacgguguggu

SEQ ID NO: 1613848 - RNA, 19 nt, Artificial Sequence
  Description of Artificial Sequence: Synthetic oligonucleotide
uugcuaaccugaaccccac

SEQ ID NO: 1613849 - RNA, 19 nt, Artificial Sequence
  Description of Artificial Sequence: Synthetic oligonucleotide
ggaaacggugugguuacgg

SEQ ID NO: 1613850 - RNA, 19 nt, Artificial Sequence
  Description of Artificial Sequence: Synthetic oligonucleotide
ccaguuugacacauuuccc

SEQ ID NO: 1613851 - RNA, 19 nt, Artificial Sequence
  Description of Artificial Sequence: Synthetic oligonucleotide
caucuggcucgccuuauuc

SEQ ID NO: 1613852 - RNA, 19 nt, Artificial Sequence
  Description of Artificial Sequence: Synthetic oligonucleotide
ccugacggagcucucagag

SEQ ID NO: 1613853 - RNA, 19 nt, Artificial Sequence
  Description of Artificial Sequence: Synthetic oligonucleotide
uggccuugaaauagcugau

SEQ ID NO: 1613854 - RNA, 19 nt, Artificial Sequence
  Description of Artificial Sequence: Synthetic oligonucleotide
cacuugagugcaaaccaga

SEQ ID NO: 1613855 - RNA, 19 nt, Artificial Sequence
  Description of Artificial Sequence: Synthetic oligonucleotide
ggcacuugucuuauuuccg

SEQ ID NO: 1613856 - RNA, 19 nt, Artificial Sequence
  Description of Artificial Sequence: Synthetic oligonucleotide
cuccucacauggaccauug

SEQ ID NO: 1613857 - RNA, 19 nt, Artificial Sequence
  Description of Artificial Sequence: Synthetic oligonucleotide
ccucacauggaccauugug

SEQ ID NO: 1613858 - RNA, 19 nt, Artificial Sequence
  Description of Artificial Sequence: Synthetic oligonucleotide
cagcuuuuccagaaaggga

SEQ ID NO: 1613859 - RNA, 19 nt, Artificial Sequence
  Description of Artificial Sequence: Synthetic oligonucleotide
cugcaaaaggacauuuucu

SEQ ID NO: 1613860 - RNA, 19 nt, Artificial Sequence
  Description of Artificial Sequence: Synthetic oligonucleotide
agaaaggcucacauuguaa

SEQ ID NO: 1613861 - RNA, 19 nt, Artificial Sequence
  Description of Artificial Sequence: Synthetic oligonucleotide
uccuaacucugagcaagug

SEQ ID NO: 1613862 - RNA, 19 nt, Artificial Sequence
  Description of Artificial Sequence: Synthetic oligonucleotide
agagcguaagugccauccu

SEQ ID NO: 1613863 - RNA, 19 nt, Artificial Sequence
  Description of Artificial Sequence: Synthetic oligonucleotide
augggaaucgagaggcuca

SEQ ID NO: 1613864 - RNA, 19 nt, Artificial Sequence
  Description of Artificial Sequence: Synthetic oligonucleotide
gcuagaggggugcaugggc

SEQ ID NO: 1613865 - RNA, 19 nt, Artificial Sequence
  Description of Artificial Sequence: Synthetic oligonucleotide
ggacaaagugaucaggacu

SEQ ID NO: 1613866 - RNA, 19 nt, Artificial Sequence
  Description of Artificial Sequence: Synthetic oligonucleotide
accugaaccccacggugcu

SEQ ID NO: 1613867 - RNA, 19 nt, Artificial Sequence
  Description of Artificial Sequence: Synthetic oligonucleotide
cuggcucgccuuauucccc

SEQ ID NO: 1613868 - RNA, 19 nt, Artificial Sequence
  Description of Artificial Sequence: Synthetic oligonucleotide
cuaaagacccaaggcuuuc

SEQ ID NO: 1613869 - RNA, 19 nt, Artificial Sequence
  Description of Artificial Sequence: Synthetic oligonucleotide
ucggagcaacacaccacga

SEQ ID NO: 1613870 - RNA, 19 nt, Artificial Sequence
  Description of Artificial Sequence: Synthetic oligonucleotide
ccccacggugcucagaugg

SEQ ID NO: 1613871 - RNA, 19 nt, Artificial Sequence
  Description of Artificial Sequence: Synthetic oligonucleotide
agcuagaggggugcauggg

SEQ ID NO: 1613872 - RNA, 19 nt, Artificial Sequence
  Description of Artificial Sequence: Synthetic oligonucleotide
acaccgucacuugagugca

SEQ ID NO: 1613873 - RNA, 19 nt, Artificial Sequence
  Description of Artificial Sequence: Synthetic oligonucleotide
acggagcucucagagcauc

SEQ ID NO: 1613874 - RNA, 19 nt, Artificial Sequence
  Description of Artificial Sequence: Synthetic oligonucleotide
caauuccgagucacuucag

SEQ ID NO: 1613875 - RNA, 19 nt, Artificial Sequence
  Description of Artificial Sequence: Synthetic oligonucleotide
aaccuaggccacagagauc

SEQ ID NO: 1613876 - RNA, 19 nt, Artificial Sequence
  Description of Artificial Sequence: Synthetic oligonucleotide
ucacuucaguuauccuaac

SEQ ID NO: 1613877 - RNA, 19 nt, Artificial Sequence
  Description of Artificial Sequence: Synthetic oligonucleotide
caacaguuggcacuugucu

SEQ ID NO: 1613878 - RNA, 19 nt, Artificial Sequence
  Description of Artificial Sequence: Synthetic oligonucleotide
gggacaaagugaucaggac

SEQ ID NO: 1613879 - RNA, 19 nt, Artificial Sequence
  Description of Artificial Sequence: Synthetic oligonucleotide
acggggucgaagaucacca

SEQ ID NO: 1613880 - RNA, 19 nt, Artificial Sequence
  Description of Artificial Sequence: Synthetic oligonucleotide
uccuaacaaaguggggaaa

SEQ ID NO: 1613881 - RNA, 19 nt, Artificial Sequence
  Description of Artificial Sequence: Synthetic oligonucleotide
ccuaacaaaguggggaaac

SEQ ID NO: 1613882 - RNA, 19 nt, Artificial Sequence
  Description of Artificial Sequence: Synthetic oligonucleotide
aacacaccacgaugcucau

SEQ ID NO: 1613883 - RNA, 19 nt, Artificial Sequence
  Description of Artificial Sequence: Synthetic oligonucleotide
gugguuacggcucccuaaa

SEQ ID NO: 1613884 - RNA, 19 nt, Artificial Sequence
  Description of Artificial Sequence: Synthetic oligonucleotide
auacagccgucaucuauua

SEQ ID NO: 1613885 - RNA, 19 nt, Artificial Sequence
  Description of Artificial Sequence: Synthetic oligonucleotide
cuauacaaagacgaacuau

SEQ ID NO: 1613886 - RNA, 19 nt, Artificial Sequence
  Description of Artificial Sequence: Synthetic oligonucleotide
cacuucaguuauccuaaca

SEQ ID NO: 1613887 - RNA, 19 nt, Artificial Sequence
  Description of Artificial Sequence: Synthetic oligonucleotide
gggucgaagaucaccacac

SEQ ID NO: 1613888 - RNA, 19 nt, Artificial Sequence
  Description of Artificial Sequence: Synthetic oligonucleotide
cacuugucuuauuuccgga

SEQ ID NO: 1613889 - RNA, 19 nt, Artificial Sequence
  Description of Artificial Sequence: Synthetic oligonucleotide
aaccugcuuagagacugau

SEQ ID NO: 1613890 - RNA, 19 nt, Artificial Sequence
  Description of Artificial Sequence: Synthetic oligonucleotide
gagcguaagugccauccua

SEQ ID NO: 1613891 - RNA, 19 nt, Artificial Sequence
  Description of Artificial Sequence: Synthetic oligonucleotide
uacagccgucaucuauuaa

SEQ ID NO: 1613892 - RNA, 19 nt, Artificial Sequence
  Description of Artificial Sequence: Synthetic oligonucleotide
ccaaggcuuucaaaaggag

SEQ ID NO: 1613893 - RNA, 19 nt, Artificial Sequence
  Description of Artificial Sequence: Synthetic oligonucleotide
uuuccagccucugcauggu

SEQ ID NO: 1613894 - RNA, 19 nt, Artificial Sequence
  Description of Artificial Sequence: Synthetic oligonucleotide
cacgaugcucauuccaaaa

SEQ ID NO: 1613895 - RNA, 19 nt, Artificial Sequence
  Description of Artificial Sequence: Synthetic oligonucleotide
gaaacaauuccgagucacu

SEQ ID NO: 1613896 - RNA, 19 nt, Artificial Sequence
  Description of Artificial Sequence: Synthetic oligonucleotide
ucgagaggcucaagaugaa

SEQ ID NO: 1613897 - RNA, 19 nt, Artificial Sequence
  Description of Artificial Sequence: Synthetic oligonucleotide
gagugcaaaccagagcugu

SEQ ID NO: 1613898 - RNA, 19 nt, Artificial Sequence
  Description of Artificial Sequence: Synthetic oligonucleotide
caucaaucacccugcagcu

SEQ ID NO: 1613899 - RNA, 19 nt, Artificial Sequence
  Description of Artificial Sequence: Synthetic oligonucleotide
acggugcucagaugggaau

SEQ ID NO: 1613900 - RNA, 19 nt, Artificial Sequence
  Description of Artificial Sequence: Synthetic oligonucleotide
gagacugauggaggaagaa

SEQ ID NO: 1613901 - RNA, 19 nt, Artificial Sequence
  Description of Artificial Sequence: Synthetic oligonucleotide
cugcuuagagacugaugga

SEQ ID NO: 1613902 - RNA, 19 nt, Artificial Sequence
  Description of Artificial Sequence: Synthetic oligonucleotide
gcacacuccuaacucugag

SEQ ID NO: 1613903 - RNA, 19 nt, Artificial Sequence
  Description of Artificial Sequence: Synthetic oligonucleotide
gacgaacuauguacagaca

SEQ ID NO: 1613904 - RNA, 19 nt, Artificial Sequence
  Description of Artificial Sequence: Synthetic oligonucleotide
ggggacaaagugaucagga

SEQ ID NO: 1613905 - RNA, 19 nt, Artificial Sequence
  Description of Artificial Sequence: Synthetic oligonucleotide
gcaucuggggacaaaguga

SEQ ID NO: 1613906 - RNA, 19 nt, Artificial Sequence
  Description of Artificial Sequence: Synthetic oligonucleotide
gauccccaaaagaggugac

SEQ ID NO: 1613907 - RNA, 19 nt, Artificial Sequence
  Description of Artificial Sequence: Synthetic oligonucleotide
ugggaaucgagaggcucaa

SEQ ID NO: 1613908 - RNA, 19 nt, Artificial Sequence
  Description of Artificial Sequence: Synthetic oligonucleotide
cauuccccuuucuugcuaa

SEQ ID NO: 1613909 - RNA, 19 nt, Artificial Sequence
  Description of Artificial Sequence: Synthetic oligonucleotide
uauuuccggaaggcccaug

SEQ ID NO: 1613910 - RNA, 19 nt, Artificial Sequence
  Description of Artificial Sequence: Synthetic oligonucleotide
cuaaccugaaccccacggu

SEQ ID NO: 1613911 - RNA, 19 nt, Artificial Sequence
  Description of Artificial Sequence: Synthetic oligonucleotide
ccuaacucugagcaaguga

SEQ ID NO: 1613912 - RNA, 19 nt, Artificial Sequence
  Description of Artificial Sequence: Synthetic oligonucleotide
ccauucaucggagcaacac

SEQ ID NO: 1613913 - RNA, 19 nt, Artificial Sequence
  Description of Artificial Sequence: Synthetic oligonucleotide
ccuaauuaacuguugaauu

SEQ ID NO: 1613914 - RNA, 19 nt, Artificial Sequence
  Description of Artificial Sequence: Synthetic oligonucleotide
caccacgaugcucauucca

SEQ ID NO: 1613915 - RNA, 19 nt, Artificial Sequence
  Description of Artificial Sequence: Synthetic oligonucleotide
cguaagugccauccuacag

SEQ ID NO: 1613916 - RNA, 19 nt, Artificial Sequence
  Description of Artificial Sequence: Synthetic oligonucleotide
cgucacuugagugcaaacc

SEQ ID NO: 1613917 - RNA, 19 nt, Artificial Sequence
  Description of Artificial Sequence: Synthetic oligonucleotide
agccgucaucuauuaaauu

SEQ ID NO: 1613918 - RNA, 19 nt, Artificial Sequence
  Description of Artificial Sequence: Synthetic oligonucleotide
ggcacggggucgaagauca

SEQ ID NO: 1613919 - RNA, 19 nt, Artificial Sequence
  Description of Artificial Sequence: Synthetic oligonucleotide
gagcccgggaucccauuca

SEQ ID NO: 1613920 - RNA, 19 nt, Artificial Sequence
  Description of Artificial Sequence: Synthetic oligonucleotide
ggguaggaaccacuuguca

SEQ ID NO: 1613921 - RNA, 19 nt, Artificial Sequence
  Description of Artificial Sequence: Synthetic oligonucleotide
gcagcuagaggggugcaug

SEQ ID NO: 1613922 - RNA, 19 nt, Artificial Sequence
  Description of Artificial Sequence: Synthetic oligonucleotide
ggaucccauucaucggagc

SEQ ID NO: 1613923 - RNA, 19 nt, Artificial Sequence
  Description of Artificial Sequence: Synthetic oligonucleotide
caaaagaggugaccucuua

SEQ ID NO: 1613924 - RNA, 19 nt, Artificial Sequence
  Description of Artificial Sequence: Synthetic oligonucleotide
cgaagaucaccacacucac

SEQ ID NO: 1613925 - RNA, 19 nt, Artificial Sequence
  Description of Artificial Sequence: Synthetic oligonucleotide
aggagagcguaagugccau

SEQ ID NO: 1613926 - RNA, 19 nt, Artificial Sequence
  Description of Artificial Sequence: Synthetic oligonucleotide
accugacggagcucucaga

SEQ ID NO: 1613927 - RNA, 19 nt, Artificial Sequence
  Description of Artificial Sequence: Synthetic oligonucleotide
uuguguuguuugguuucuc

SEQ ID NO: 1613928 - RNA, 19 nt, Artificial Sequence
  Description of Artificial Sequence: Synthetic oligonucleotide
agggauggcuacagccauc

SEQ ID NO: 1613929 - RNA, 19 nt, Artificial Sequence
  Description of Artificial Sequence: Synthetic oligonucleotide
ggugaggcacacuccuaac

SEQ ID NO: 1613930 - RNA, 19 nt, Artificial Sequence
  Description of Artificial Sequence: Synthetic oligonucleotide
gacuuuggaaaagccaguu

SEQ ID NO: 1613931 - RNA, 19 nt, Artificial Sequence
  Description of Artificial Sequence: Synthetic oligonucleotide
uuauuuccggaaggcccau

SEQ ID NO: 1613932 - RNA, 19 nt, Artificial Sequence
  Description of Artificial Sequence: Synthetic oligonucleotide
aaagccaguuugacacauu

SEQ ID NO: 1613933 - RNA, 19 nt, Artificial Sequence
  Description of Artificial Sequence: Synthetic oligonucleotide
guggcaggacaguguggug

SEQ ID NO: 1613934 - RNA, 19 nt, Artificial Sequence
  Description of Artificial Sequence: Synthetic oligonucleotide
accgucacuugagugcaaa

SEQ ID NO: 1613935 - RNA, 19 nt, Artificial Sequence
  Description of Artificial Sequence: Synthetic oligonucleotide
cacggugcucagaugggaa

SEQ ID NO: 1613936 - RNA, 19 nt, Artificial Sequence
  Description of Artificial Sequence: Synthetic oligonucleotide
ccuacagcuggggaggcug

SEQ ID NO: 1613937 - RNA, 19 nt, Artificial Sequence
  Description of Artificial Sequence: Synthetic oligonucleotide
agcccgggaucccauucau

SEQ ID NO: 1613938 - RNA, 19 nt, Artificial Sequence
  Description of Artificial Sequence: Synthetic oligonucleotide
gagauccaguuuaauuuau

SEQ ID NO: 1613939 - RNA, 19 nt, Artificial Sequence
  Description of Artificial Sequence: Synthetic oligonucleotide
cccuuucuugcuaaccuga

SEQ ID NO: 1613940 - RNA, 19 nt, Artificial Sequence
  Description of Artificial Sequence: Synthetic oligonucleotide
agcaaccugcuuagagacu

SEQ ID NO: 1613941 - RNA, 19 nt, Artificial Sequence
  Description of Artificial Sequence: Synthetic oligonucleotide
gggaucccauucaucggag

SEQ ID NO: 1613942 - RNA, 19 nt, Artificial Sequence
  Description of Artificial Sequence: Synthetic oligonucleotide
ccucauacagccgucaucu

SEQ ID NO: 1613943 - RNA, 19 nt, Artificial Sequence
  Description of Artificial Sequence: Synthetic oligonucleotide
agggcacggggucgaagau

SEQ ID NO: 1613944 - RNA, 19 nt, Artificial Sequence
  Description of Artificial Sequence: Synthetic oligonucleotide
cagccgucaucuauuaaau

SEQ ID NO: 1613945 - RNA, 19 nt, Artificial Sequence
  Description of Artificial Sequence: Synthetic oligonucleotide
ccgggaucccauucaucgg

SEQ ID NO: 1613946 - RNA, 19 nt, Artificial Sequence
  Description of Artificial Sequence: Synthetic oligonucleotide
gagccuggguaggaaccac

SEQ ID NO: 1613947 - RNA, 19 nt, Artificial Sequence
  Description of Artificial Sequence: Synthetic oligonucleotide
gugacaccgucacuugagu

SEQ ID NO: 1613948 - RNA, 19 nt, Artificial Sequence
  Description of Artificial Sequence: Synthetic oligonucleotide
gcguaagugccauccuaca

SEQ ID NO: 1613949 - RNA, 19 nt, Artificial Sequence
  Description of Artificial Sequence: Synthetic oligonucleotide
caaucacccugcagcuaga

SEQ ID NO: 1613950 - RNA, 19 nt, Artificial Sequence
  Description of Artificial Sequence: Synthetic oligonucleotide
ggagcccgggaucccauuc

SEQ ID NO: 1613951 - RNA, 19 nt, Artificial Sequence
  Description of Artificial Sequence: Synthetic oligonucleotide
ccuauacaaagacgaacua

SEQ ID NO: 1613952 - RNA, 19 nt, Artificial Sequence
  Description of Artificial Sequence: Synthetic oligonucleotide
ggccuugaaauagcugauc

SEQ ID NO: 1613953 - RNA, 19 nt, Artificial Sequence
  Description of Artificial Sequence: Synthetic oligonucleotide
accccacggugcucagaug

SEQ ID NO: 1613954 - RNA, 19 nt, Artificial Sequence
  Description of Artificial Sequence: Synthetic oligonucleotide
cgucaucuauuaaauuaga

SEQ ID NO: 1613955 - RNA, 19 nt, Artificial Sequence
  Description of Artificial Sequence: Synthetic oligonucleotide
gcauggucauagcaagugu

SEQ ID NO: 1613956 - RNA, 19 nt, Artificial Sequence
  Description of Artificial Sequence: Synthetic oligonucleotide
ggagggcgggaggugcugg

SEQ ID NO: 1613957 - RNA, 19 nt, Artificial Sequence
  Description of Artificial Sequence: Synthetic oligonucleotide
cuacagccaucuggcucgc

SEQ ID NO: 1613958 - RNA, 19 nt, Artificial Sequence
  Description of Artificial Sequence: Synthetic oligonucleotide
ccccuaauuaacuguugaa

SEQ ID NO: 1613959 - RNA, 19 nt, Artificial Sequence
  Description of Artificial Sequence: Synthetic oligonucleotide
gccauccuacagcugggga

SEQ ID NO: 1613960 - RNA, 19 nt, Artificial Sequence
  Description of Artificial Sequence: Synthetic oligonucleotide
cuuuugugacaccgucacu

SEQ ID NO: 1613961 - RNA, 19 nt, Artificial Sequence
  Description of Artificial Sequence: Synthetic oligonucleotide
auggaccauuguguuguuu

SEQ ID NO: 1613962 - RNA, 19 nt, Artificial Sequence
  Description of Artificial Sequence: Synthetic oligonucleotide
ggcucccuaaagacccaag

SEQ ID NO: 1613963 - RNA, 19 nt, Artificial Sequence
  Description of Artificial Sequence: Synthetic oligonucleotide
cugcauggucauagcaagu

SEQ ID NO: 1613964 - RNA, 19 nt, Artificial Sequence
  Description of Artificial Sequence: Synthetic oligonucleotide
gugugguuacggcucccua

SEQ ID NO: 1613965 - RNA, 19 nt, Artificial Sequence
  Description of Artificial Sequence: Synthetic oligonucleotide
ccgucacuugagugcaaac

SEQ ID NO: 1613966 - RNA, 19 nt, Artificial Sequence
  Description of Artificial Sequence: Synthetic oligonucleotide
uacagccaucuggcucgcc

SEQ ID NO: 1613967 - RNA, 19 nt, Artificial Sequence
  Description of Artificial Sequence: Synthetic oligonucleotide
gggaaacggugugguuacg

SEQ ID NO: 1613968 - RNA, 19 nt, Artificial Sequence
  Description of Artificial Sequence: Synthetic oligonucleotide
gaaccccacggugcucaga

SEQ ID NO: 1613969 - RNA, 19 nt, Artificial Sequence
  Description of Artificial Sequence: Synthetic oligonucleotide
ggcaggacagugugguggu

SEQ ID NO: 1613970 - RNA, 19 nt, Artificial Sequence
  Description of Artificial Sequence: Synthetic oligonucleotide
gcucaucaaucacccugca

SEQ ID NO: 1613971 - RNA, 19 nt, Artificial Sequence
  Description of Artificial Sequence: Synthetic oligonucleotide
cucauacagccgucaucua

SEQ ID NO: 1613972 - RNA, 19 nt, Artificial Sequence
  Description of Artificial Sequence: Synthetic oligonucleotide
cccaaaagaggugaccucu

SEQ ID NO: 1613973 - RNA, 19 nt, Artificial Sequence
  Description of Artificial Sequence: Synthetic oligonucleotide
cccuaaagacccaaggcuu

SEQ ID NO: 1613974 - RNA, 19 nt, Artificial Sequence
  Description of Artificial Sequence: Synthetic oligonucleotide
gggaaucgagaggcucaag

SEQ ID NO: 1613975 - RNA, 19 nt, Artificial Sequence
  Description of Artificial Sequence: Synthetic oligonucleotide
caggugaggcacacuccua

SEQ ID NO: 1613976 - RNA, 19 nt, Artificial Sequence
  Description of Artificial Sequence: Synthetic oligonucleotide
ggucgaagaucaccacacu

SEQ ID NO: 1613977 - RNA, 19 nt, Artificial Sequence
  Description of Artificial Sequence: Synthetic oligonucleotide
ggagggcacggggucgaag

SEQ ID NO: 1613978 - RNA, 19 nt, Artificial Sequence
  Description of Artificial Sequence: Synthetic oligonucleotide
ggagagcguaagugccauc

SEQ ID NO: 1613979 - RNA, 19 nt, Artificial Sequence
  Description of Artificial Sequence: Synthetic oligonucleotide
ggacuuuggaaaagccagu

SEQ ID NO: 1613980 - RNA, 19 nt, Artificial Sequence
  Description of Artificial Sequence: Synthetic oligonucleotide
ccagaaagggauggcuaca

SEQ ID NO: 1613981 - RNA, 19 nt, Artificial Sequence
  Description of Artificial Sequence: Synthetic oligonucleotide
ccaugcaguuucuguaugu

SEQ ID NO: 1613982 - RNA, 19 nt, Artificial Sequence
  Description of Artificial Sequence: Synthetic oligonucleotide
gcucagagcuuuccagccu

SEQ ID NO: 1613983 - RNA, 19 nt, Artificial Sequence
  Description of Artificial Sequence: Synthetic oligonucleotide
acacaccacgaugcucauu

SEQ ID NO: 1613984 - RNA, 19 nt, Artificial Sequence
  Description of Artificial Sequence: Synthetic oligonucleotide
acggcucccuaaagaccca

SEQ ID NO: 1613985 - RNA, 19 nt, Artificial Sequence
  Description of Artificial Sequence: Synthetic oligonucleotide
ccuaaagacccaaggcuuu

SEQ ID NO: 1613986 - RNA, 19 nt, Artificial Sequence
  Description of Artificial Sequence: Synthetic oligonucleotide
gggcacggggucgaagauc

SEQ ID NO: 1613987 - RNA, 19 nt, Artificial Sequence
  Description of Artificial Sequence: Synthetic oligonucleotide
gggcaaggugccgguggag

SEQ ID NO: 1613988 - RNA, 19 nt, Artificial Sequence
  Description of Artificial Sequence: Synthetic oligonucleotide
cacagagauccaguuuaau

SEQ ID NO: 1613989 - RNA, 19 nt, Artificial Sequence
  Description of Artificial Sequence: Synthetic oligonucleotide
cagagcaucuggggacaaa

SEQ ID NO: 1613990 - RNA, 19 nt, Artificial Sequence
  Description of Artificial Sequence: Synthetic oligonucleotide
ggugugguuacggcucccu

SEQ ID NO: 1613991 - RNA, 19 nt, Artificial Sequence
  Description of Artificial Sequence: Synthetic oligonucleotide
ggcucaagaugaacucacu

SEQ ID NO: 1613992 - RNA, 19 nt, Artificial Sequence
  Description of Artificial Sequence: Synthetic oligonucleotide
cccauucaucggagcaaca

SEQ ID NO: 1613993 - RNA, 19 nt, Artificial Sequence
  Description of Artificial Sequence: Synthetic oligonucleotide
caguuggcacuugucuuau

SEQ ID NO: 1613994 - RNA, 19 nt, Artificial Sequence
  Description of Artificial Sequence: Synthetic oligonucleotide
gacggagcucucagagcau

SEQ ID NO: 1613995 - RNA, 19 nt, Artificial Sequence
  Description of Artificial Sequence: Synthetic oligonucleotide
ccaaaagaggugaccucuu

SEQ ID NO: 1613996 - RNA, 19 nt, Artificial Sequence
  Description of Artificial Sequence: Synthetic oligonucleotide
cauggaccauuguguuguu

SEQ ID NO: 1613997 - RNA, 19 nt, Artificial Sequence
  Description of Artificial Sequence: Synthetic oligonucleotide
gcccgggaucccauucauc

SEQ ID NO: 1613998 - RNA, 19 nt, Artificial Sequence
  Description of Artificial Sequence: Synthetic oligonucleotide
ccuaggccacagagaucca

SEQ ID NO: 1613999 - RNA, 19 nt, Artificial Sequence
  Description of Artificial Sequence: Synthetic oligonucleotide
cggagcaacacaccacgau

SEQ ID NO: 1614000 - RNA, 19 nt, Artificial Sequence
  Description of Artificial Sequence: Synthetic oligonucleotide
gccuggguaggaaccacuu

SEQ ID NO: 1614001 - RNA, 19 nt, Artificial Sequence
  Description of Artificial Sequence: Synthetic oligonucleotide
gggagcccgggaucccauu

SEQ ID NO: 1614002 - RNA, 19 nt, Artificial Sequence
  Description of Artificial Sequence: Synthetic oligonucleotide
ccaucuggcucgccuuauu

SEQ ID NO: 1614003 - RNA, 19 nt, Artificial Sequence
  Description of Artificial Sequence: Synthetic oligonucleotide
cggcucccuaaagacccaa

SEQ ID NO: 1614004 - RNA, 19 nt, Artificial Sequence
  Description of Artificial Sequence: Synthetic oligonucleotide
aaacuaacgacccacaaag

SEQ ID NO: 1614005 - RNA, 19 nt, Artificial Sequence
  Description of Artificial Sequence: Synthetic oligonucleotide
agauagagauuucugaugc

SEQ ID NO: 1614006 - RNA, 19 nt, Artificial Sequence
  Description of Artificial Sequence: Synthetic oligonucleotide
ugugcuaugaaacuaacga

SEQ ID NO: 1614007 - RNA, 19 nt, Artificial Sequence
  Description of Artificial Sequence: Synthetic oligonucleotide
gaucuagucaucuaaacag

SEQ ID NO: 1614008 - RNA, 19 nt, Artificial Sequence
  Description of Artificial Sequence: Synthetic oligonucleotide
uaugguaucccuagaaugg

SEQ ID NO: 1614009 - RNA, 19 nt, Artificial Sequence
  Description of Artificial Sequence: Synthetic oligonucleotide
cauacuaaacaaaagcagg

SEQ ID NO: 1614010 - RNA, 19 nt, Artificial Sequence
  Description of Artificial Sequence: Synthetic oligonucleotide
aaugacccugaccaaaggc

SEQ ID NO: 1614011 - RNA, 19 nt, Artificial Sequence
  Description of Artificial Sequence: Synthetic oligonucleotide
aaagcugagucauaacgac

SEQ ID NO: 1614012 - RNA, 19 nt, Artificial Sequence
  Description of Artificial Sequence: Synthetic oligonucleotide
  modified_base (7)..(7): a, c, u, g, unknown or other
ugaggunuaauacuuuuca

SEQ ID NO: 1614013 - RNA, 19 nt, Artificial Sequence
  Description of Artificial Sequence: Synthetic oligonucleotide
acaaagaucccacugaaag

SEQ ID NO: 1614014 - RNA, 19 nt, Artificial Sequence
  Description of Artificial Sequence: Synthetic oligonucleotide
  modified_base (7)..(7): a, c, u, g, unknown or other
accaccngaauccagauag

SEQ ID NO: 1614015 - RNA, 19 nt, Artificial Sequence
  Description of Artificial Sequence: Synthetic oligonucleotide
  modified_base (2)..(2): a, c, u, g, unknown or other
unuaauacuuuucaugacu

SEQ ID NO: 1614016 - RNA, 19 nt, Artificial Sequence
  Description of Artificial Sequence: Synthetic oligonucleotide
aaagcuaugguaucccuag

SEQ ID NO: 1614017 - RNA, 19 nt, Artificial Sequence
  Description of Artificial Sequence: Synthetic oligonucleotide
uaagaaauggcuuagcuua

SEQ ID NO: 1614018 - RNA, 19 nt, Artificial Sequence
  Description of Artificial Sequence: Synthetic oligonucleotide
acaauuaugcugcucgagc

SEQ ID NO: 1614019 - RNA, 19 nt, Artificial Sequence
  Description of Artificial Sequence: Synthetic oligonucleotide
auagcuacgaaccaggagu

SEQ ID NO: 1614020 - RNA, 19 nt, Artificial Sequence
  Description of Artificial Sequence: Synthetic oligonucleotide
uaacgacccacaaagaucc

SEQ ID NO: 1614021 - RNA, 19 nt, Artificial Sequence
  Description of Artificial Sequence: Synthetic oligonucleotide
agauagugaacccauguuc

SEQ ID NO: 1614022 - RNA, 19 nt, Artificial Sequence
  Description of Artificial Sequence: Synthetic oligonucleotide
cauaaagcuccaaugaccc

SEQ ID NO: 1614023 - RNA, 19 nt, Artificial Sequence
  Description of Artificial Sequence: Synthetic oligonucleotide
uccaggucgacaaauaccc

SEQ ID NO: 1614024 - RNA, 19 nt, Artificial Sequence
  Description of Artificial Sequence: Synthetic oligonucleotide
acaaauacccgguagacgu

SEQ ID NO: 1614025 - RNA, 19 nt, Artificial Sequence
  Description of Artificial Sequence: Synthetic oligonucleotide
gguacaauuaugcugcucg

SEQ ID NO: 1614026 - RNA, 19 nt, Artificial Sequence
  Description of Artificial Sequence: Synthetic oligonucleotide
ucccauacaaauacaauug

SEQ ID NO: 1614027 - RNA, 19 nt, Artificial Sequence
  Description of Artificial Sequence: Synthetic oligonucleotide
aaauaaaccuuagaccguc

SEQ ID NO: 1614028 - RNA, 19 nt, Artificial Sequence
  Description of Artificial Sequence: Synthetic oligonucleotide
uagaauggcagugagaucu

SEQ ID NO: 1614029 - RNA, 19 nt, Artificial Sequence
  Description of Artificial Sequence: Synthetic oligonucleotide
ugaaucuuaccucuuggcc

SEQ ID NO: 1614030 - RNA, 19 nt, Artificial Sequence
  Description of Artificial Sequence: Synthetic oligonucleotide
agcgguacaauuaugcugc

SEQ ID NO: 1614031 - RNA, 19 nt, Artificial Sequence
  Description of Artificial Sequence: Synthetic oligonucleotide
gacguuucaacccugaaga

SEQ ID NO: 1614032 - RNA, 19 nt, Artificial Sequence
  Description of Artificial Sequence: Synthetic oligonucleotide
  modified_base (5)..(5): a, c, u, g, unknown or other
aggunuaauacuuuucaug

SEQ ID NO: 1614033 - RNA, 19 nt, Artificial Sequence
  Description of Artificial Sequence: Synthetic oligonucleotide
agugaacccauguucauag

SEQ ID NO: 1614034 - RNA, 19 nt, Artificial Sequence
  Description of Artificial Sequence: Synthetic oligonucleotide
uguagcucuaucaaucugu

SEQ ID NO: 1614035 - RNA, 19 nt, Artificial Sequence
  Description of Artificial Sequence: Synthetic oligonucleotide
gucauaacgacacuuggcc

SEQ ID NO: 1614036 - RNA, 19 nt, Artificial Sequence
  Description of Artificial Sequence: Synthetic oligonucleotide
uguccuuacuacuuugggg

SEQ ID NO: 1614037 - RNA, 19 nt, Artificial Sequence
  Description of Artificial Sequence: Synthetic oligonucleotide
auaaaccuuagaccguccc

SEQ ID NO: 1614038 - RNA, 19 nt, Artificial Sequence
  Description of Artificial Sequence: Synthetic oligonucleotide
ucaugacuuagucaaagcu

SEQ ID NO: 1614039 - RNA, 19 nt, Artificial Sequence
  Description of Artificial Sequence: Synthetic oligonucleotide
  modified_base (4)..(4): a, c, u, g, unknown or other
ggunuaauacuuuucauga

SEQ ID NO: 1614040 - RNA, 19 nt, Artificial Sequence
  Description of Artificial Sequence: Synthetic oligonucleotide
uacaauuggcuuuggacag

SEQ ID NO: 1614041 - RNA, 19 nt, Artificial Sequence
  Description of Artificial Sequence: Synthetic oligonucleotide
aucuuugcagcguaggauc

SEQ ID NO: 1614042 - RNA, 19 nt, Artificial Sequence
  Description of Artificial Sequence: Synthetic oligonucleotide
gauagcgguacaauuaugc

SEQ ID NO: 1614043 - RNA, 19 nt, Artificial Sequence
  Description of Artificial Sequence: Synthetic oligonucleotide
uuagcuuaaaaugaagauc

SEQ ID NO: 1614044 - RNA, 19 nt, Artificial Sequence
  Description of Artificial Sequence: Synthetic oligonucleotide
guccuuacuacuuuggggc

SEQ ID NO: 1614045 - RNA, 19 nt, Artificial Sequence
  Description of Artificial Sequence: Synthetic oligonucleotide
agugaaucuuaccucuugg

SEQ ID NO: 1614046 - RNA, 19 nt, Artificial Sequence
  Description of Artificial Sequence: Synthetic oligonucleotide
ugagucauaacgacacuug

SEQ ID NO: 1614047 - RNA, 19 nt, Artificial Sequence
  Description of Artificial Sequence: Synthetic oligonucleotide
acucauaaagcuccaauga

SEQ ID NO: 1614048 - RNA, 19 nt, Artificial Sequence
  Description of Artificial Sequence: Synthetic oligonucleotide
uuaaggugcagccuaggga

SEQ ID NO: 1614049 - RNA, 19 nt, Artificial Sequence
  Description of Artificial Sequence: Synthetic oligonucleotide
agaaugcagguccacaguc

SEQ ID NO: 1614050 - RNA, 19 nt, Artificial Sequence
  Description of Artificial Sequence: Synthetic oligonucleotide
aaaugaagaucuuucuuua

SEQ ID NO: 1614051 - RNA, 19 nt, Artificial Sequence
  Description of Artificial Sequence: Synthetic oligonucleotide
uaugaaacuaacgacccac

SEQ ID NO: 1614052 - RNA, 19 nt, Artificial Sequence
  Description of Artificial Sequence: Synthetic oligonucleotide
cagucacucauaaagcucc

SEQ ID NO: 1614053 - RNA, 19 nt, Artificial Sequence
  Description of Artificial Sequence: Synthetic oligonucleotide
uuauccccuacccacucgg

SEQ ID NO: 1614054 - RNA, 19 nt, Artificial Sequence
  Description of Artificial Sequence: Synthetic oligonucleotide
aacucaauaaaagcuaaau

SEQ ID NO: 1614055 - RNA, 19 nt, Artificial Sequence
  Description of Artificial Sequence: Synthetic oligonucleotide
agaucuagucaucuaaaca

SEQ ID NO: 1614056 - RNA, 19 nt, Artificial Sequence
  Description of Artificial Sequence: Synthetic oligonucleotide
caauuaugcugcucgagcc

SEQ ID NO: 1614057 - RNA, 19 nt, Artificial Sequence
  Description of Artificial Sequence: Synthetic oligonucleotide
aaaagcugagucauaacga

SEQ ID NO: 1614058 - RNA, 19 nt, Artificial Sequence
  Description of Artificial Sequence: Synthetic oligonucleotide
caugacuuagucaaagcuc

SEQ ID NO: 1614059 - RNA, 19 nt, Artificial Sequence
  Description of Artificial Sequence: Synthetic oligonucleotide
gaacccauguucauagugg

SEQ ID NO: 1614060 - RNA, 19 nt, Artificial Sequence
  Description of Artificial Sequence: Synthetic oligonucleotide
cacgaaggaaccaaccucc

SEQ ID NO: 1614061 - RNA, 19 nt, Artificial Sequence
  Description of Artificial Sequence: Synthetic oligonucleotide
aauuaugcugcucgagccu

SEQ ID NO: 1614062 - RNA, 19 nt, Artificial Sequence
  Description of Artificial Sequence: Synthetic oligonucleotide
aagguauuccugcuaucag

SEQ ID NO: 1614063 - RNA, 19 nt, Artificial Sequence
  Description of Artificial Sequence: Synthetic oligonucleotide
aaaggauagcgguacaauu

SEQ ID NO: 1614064 - RNA, 19 nt, Artificial Sequence
  Description of Artificial Sequence: Synthetic oligonucleotide
agaucuggcaugcuuaggu

SEQ ID NO: 1614065 - RNA, 19 nt, Artificial Sequence
  Description of Artificial Sequence: Synthetic oligonucleotide
aaaccuuagaccgucccug

SEQ ID NO: 1614066 - RNA, 19 nt, Artificial Sequence
  Description of Artificial Sequence: Synthetic oligonucleotide
agacguuucaacccugaag

SEQ ID NO: 1614067 - RNA, 19 nt, Artificial Sequence
  Description of Artificial Sequence: Synthetic oligonucleotide
ucgacaaauacccgguaga

SEQ ID NO: 1614068 - RNA, 19 nt, Artificial Sequence
  Description of Artificial Sequence: Synthetic oligonucleotide
gauagcuacgaaccaggag

SEQ ID NO: 1614069 - RNA, 19 nt, Artificial Sequence
  Description of Artificial Sequence: Synthetic oligonucleotide
uaucaaucuguucuccaga

SEQ ID NO: 1614070 - RNA, 19 nt, Artificial Sequence
  Description of Artificial Sequence: Synthetic oligonucleotide
agcaauaagaaauggcuua

SEQ ID NO: 1614071 - RNA, 19 nt, Artificial Sequence
  Description of Artificial Sequence: Synthetic oligonucleotide
aauaaaccuuagaccgucc

SEQ ID NO: 1614072 - RNA, 19 nt, Artificial Sequence
  Description of Artificial Sequence: Synthetic oligonucleotide
cuuggccuacuuaaggugc

SEQ ID NO: 1614073 - RNA, 19 nt, Artificial Sequence
  Description of Artificial Sequence: Synthetic oligonucleotide
agucauaacgacacuuggc

SEQ ID NO: 1614074 - RNA, 19 nt, Artificial Sequence
  Description of Artificial Sequence: Synthetic oligonucleotide
cuaacgacccacaaagauc

SEQ ID NO: 1614075 - RNA, 19 nt, Artificial Sequence
  Description of Artificial Sequence: Synthetic oligonucleotide
uagcgguacaauuaugcug

SEQ ID NO: 1614076 - RNA, 19 nt, Artificial Sequence
  Description of Artificial Sequence: Synthetic oligonucleotide
  modified_base (9)..(9): a, c, u, g, unknown or other
uuugaggunuaauacuuuu

SEQ ID NO: 1614077 - RNA, 19 nt, Artificial Sequence
  Description of Artificial Sequence: Synthetic oligonucleotide
acuaacgacccacaaagau

SEQ ID NO: 1614078 - RNA, 19 nt, Artificial Sequence
  Description of Artificial Sequence: Synthetic oligonucleotide
uguacugguugcaccaagc

SEQ ID NO: 1614079 - RNA, 19 nt, Artificial Sequence
  Description of Artificial Sequence: Synthetic oligonucleotide
guaagcaauaagaaauggc

SEQ ID NO: 1614080 - RNA, 19 nt, Artificial Sequence
  Description of Artificial Sequence: Synthetic oligonucleotide
ucuagucaucuaaacaguc

SEQ ID NO: 1614081 - RNA, 19 nt, Artificial Sequence
  Description of Artificial Sequence: Synthetic oligonucleotide
ggccauacuaaacaaaagc

SEQ ID NO: 1614082 - RNA, 19 nt, Artificial Sequence
  Description of Artificial Sequence: Synthetic oligonucleotide
gauagugaacccauguuca

SEQ ID NO: 1614083 - RNA, 19 nt, Artificial Sequence
  Description of Artificial Sequence: Synthetic oligonucleotide
cacucauaaagcuccaaug

SEQ ID NO: 1614084 - RNA, 19 nt, Artificial Sequence
  Description of Artificial Sequence: Synthetic oligonucleotide
agggaugaccuuccugucc

SEQ ID NO: 1614085 - RNA, 19 nt, Artificial Sequence
  Description of Artificial Sequence: Synthetic oligonucleotide
uucaacccugaagagaugc

SEQ ID NO: 1614086 - RNA, 19 nt, Artificial Sequence
  Description of Artificial Sequence: Synthetic oligonucleotide
caggucgacaaauacccgg

SEQ ID NO: 1614087 - RNA, 19 nt, Artificial Sequence
  Description of Artificial Sequence: Synthetic oligonucleotide
agucaguucucccucagga

SEQ ID NO: 1614088 - RNA, 19 nt, Artificial Sequence
  Description of Artificial Sequence: Synthetic oligonucleotide
cauuuugagagggaugacc

SEQ ID NO: 1614089 - RNA, 19 nt, Artificial Sequence
  Description of Artificial Sequence: Synthetic oligonucleotide
cauacaaauacaauuggcu

SEQ ID NO: 1614090 - RNA, 19 nt, Artificial Sequence
  Description of Artificial Sequence: Synthetic oligonucleotide
aacccauguucauagugga

SEQ ID NO: 1614091 - RNA, 19 nt, Artificial Sequence
  Description of Artificial Sequence: Synthetic oligonucleotide
  modified_base (10)..(10): a, c, u, g, unknown or other
uuuugaggunuaauacuuu

SEQ ID NO: 1614092 - RNA, 19 nt, Artificial Sequence
  Description of Artificial Sequence: Synthetic oligonucleotide
uucagccaauaccuguggg

SEQ ID NO: 1614093 - RNA, 19 nt, Artificial Sequence
  Description of Artificial Sequence: Synthetic oligonucleotide
ugcuaucaggggaauguag

SEQ ID NO: 1614094 - RNA, 19 nt, Artificial Sequence
  Description of Artificial Sequence: Synthetic oligonucleotide
aaccuuagaccgucccugg

SEQ ID NO: 1614095 - RNA, 19 nt, Artificial Sequence
  Description of Artificial Sequence: Synthetic oligonucleotide
aaucuuaccucuuggccua

SEQ ID NO: 1614096 - RNA, 19 nt, Artificial Sequence
  Description of Artificial Sequence: Synthetic oligonucleotide
gacaaauacccgguagacg

SEQ ID NO: 1614097 - RNA, 19 nt, Artificial Sequence
  Description of Artificial Sequence: Synthetic oligonucleotide
agcuccaaugacccugacc

SEQ ID NO: 1614098 - RNA, 19 nt, Artificial Sequence
  Description of Artificial Sequence: Synthetic oligonucleotide
uaaaccuuagaccgucccu

SEQ ID NO: 1614099 - RNA, 19 nt, Artificial Sequence
  Description of Artificial Sequence: Synthetic oligonucleotide
gagaucuagucaucuaaac

SEQ ID NO: 1614100 - RNA, 19 nt, Artificial Sequence
  Description of Artificial Sequence: Synthetic oligonucleotide
cagauagagauuucugaug

SEQ ID NO: 1614101 - RNA, 19 nt, Artificial Sequence
  Description of Artificial Sequence: Synthetic oligonucleotide
gauagagauuucugaugcc

SEQ ID NO: 1614102 - RNA, 19 nt, Artificial Sequence
  Description of Artificial Sequence: Synthetic oligonucleotide
agcaaagcacauuuugaga

SEQ ID NO: 1614103 - RNA, 19 nt, Artificial Sequence
  Description of Artificial Sequence: Synthetic oligonucleotide
auagagauuucugaugcca

SEQ ID NO: 1614104 - RNA, 19 nt, Artificial Sequence
  Description of Artificial Sequence: Synthetic oligonucleotide
guguggauagcuacgaacc

SEQ ID NO: 1614105 - RNA, 19 nt, Artificial Sequence
  Description of Artificial Sequence: Synthetic oligonucleotide
  modified_base (8)..(8): a, c, u, g, unknown or other
uugaggunuaauacuuuuc

SEQ ID NO: 1614106 - RNA, 19 nt, Artificial Sequence
  Description of Artificial Sequence: Synthetic oligonucleotide
ugaaacuaacgacccacaa

SEQ ID NO: 1614107 - RNA, 19 nt, Artificial Sequence
  Description of Artificial Sequence: Synthetic oligonucleotide
auuuugagagggaugaccu

SEQ ID NO: 1614108 - RNA, 19 nt, Artificial Sequence
  Description of Artificial Sequence: Synthetic oligonucleotide
gaaucuuaccucuuggccu

SEQ ID NO: 1614109 - RNA, 19 nt, Artificial Sequence
  Description of Artificial Sequence: Synthetic oligonucleotide
ucacucauaaagcuccaau

SEQ ID NO: 1614110 - RNA, 19 nt, Artificial Sequence
  Description of Artificial Sequence: Synthetic oligonucleotide
uggagaaccagagucuuca

SEQ ID NO: 1614111 - RNA, 19 nt, Artificial Sequence
  Description of Artificial Sequence: Synthetic oligonucleotide
aaaaggauagcgguacaau

SEQ ID NO: 1614112 - RNA, 19 nt, Artificial Sequence
  Description of Artificial Sequence: Synthetic oligonucleotide
aagcaggugacugccgugg

SEQ ID NO: 1614113 - RNA, 19 nt, Artificial Sequence
  Description of Artificial Sequence: Synthetic oligonucleotide
  modified_base (3)..(3): a, c, u, g, unknown or other
gunuaauacuuuucaugac

SEQ ID NO: 1614114 - RNA, 19 nt, Artificial Sequence
  Description of Artificial Sequence: Synthetic oligonucleotide
gaaacuaacgacccacaaa

SEQ ID NO: 1614115 - RNA, 19 nt, Artificial Sequence
  Description of Artificial Sequence: Synthetic oligonucleotide
augguaucccuagaauggc

SEQ ID NO: 1614116 - RNA, 19 nt, Artificial Sequence
  Description of Artificial Sequence: Synthetic oligonucleotide
aucaagguauuccugcuau

SEQ ID NO: 1614117 - RNA, 19 nt, Artificial Sequence
  Description of Artificial Sequence: Synthetic oligonucleotide
augcuuagguuucuagcag

SEQ ID NO: 1614118 - RNA, 19 nt, Artificial Sequence
  Description of Artificial Sequence: Synthetic oligonucleotide
uacaauuaugcugcucgag

SEQ ID NO: 1614119 - RNA, 19 nt, Artificial Sequence
  Description of Artificial Sequence: Synthetic oligonucleotide
gaugcuuuggagaaccaga

SEQ ID NO: 1614120 - RNA, 19 nt, Artificial Sequence
  Description of Artificial Sequence: Synthetic oligonucleotide
cugaaguuuggugacuggg

SEQ ID NO: 1614121 - RNA, 19 nt, Artificial Sequence
  Description of Artificial Sequence: Synthetic oligonucleotide
ccaauguuaaagcaugagc

SEQ ID NO: 1614122 - RNA, 19 nt, Artificial Sequence
  Description of Artificial Sequence: Synthetic oligonucleotide
acaaguauucugguccagg

SEQ ID NO: 1614123 - RNA, 19 nt, Artificial Sequence
  Description of Artificial Sequence: Synthetic oligonucleotide
gucgacaaauacccgguag

SEQ ID NO: 1614124 - RNA, 19 nt, Artificial Sequence
  Description of Artificial Sequence: Synthetic oligonucleotide
cuacgaaccaggagugugc

SEQ ID NO: 1614125 - RNA, 19 nt, Artificial Sequence
  Description of Artificial Sequence: Synthetic oligonucleotide
ucagccguucaaaaggaua

SEQ ID NO: 1614126 - RNA, 19 nt, Artificial Sequence
  Description of Artificial Sequence: Synthetic oligonucleotide
uaucccuagaauggcagug

SEQ ID NO: 1614127 - RNA, 19 nt, Artificial Sequence
  Description of Artificial Sequence: Synthetic oligonucleotide
ucuuugcagcguaggauca

SEQ ID NO: 1614128 - RNA, 19 nt, Artificial Sequence
  Description of Artificial Sequence: Synthetic oligonucleotide
acagucacucauaaagcuc

SEQ ID NO: 1614129 - RNA, 19 nt, Artificial Sequence
  Description of Artificial Sequence: Synthetic oligonucleotide
aggggaauguagcucuauc

SEQ ID NO: 1614130 - RNA, 19 nt, Artificial Sequence
  Description of Artificial Sequence: Synthetic oligonucleotide
uagcuacgaaccaggagug

SEQ ID NO: 1614131 - RNA, 19 nt, Artificial Sequence
  Description of Artificial Sequence: Synthetic oligonucleotide
uugcagcguaggaucaagg

SEQ ID NO: 1614132 - RNA, 19 nt, Artificial Sequence
  Description of Artificial Sequence: Synthetic oligonucleotide
ugugcggggaagccaaugu

SEQ ID NO: 1614133 - RNA, 19 nt, Artificial Sequence
  Description of Artificial Sequence: Synthetic oligonucleotide
ucugugcuaugaaacuaac

SEQ ID NO: 1614134 - RNA, 19 nt, Artificial Sequence
  Description of Artificial Sequence: Synthetic oligonucleotide
ucccuagaauggcagugag

SEQ ID NO: 1614135 - RNA, 19 nt, Artificial Sequence
  Description of Artificial Sequence: Synthetic oligonucleotide
cuagucaucuaaacaguca

SEQ ID NO: 1614136 - RNA, 19 nt, Artificial Sequence
  Description of Artificial Sequence: Synthetic oligonucleotide
guggccguaucuuugcagc

SEQ ID NO: 1614137 - RNA, 19 nt, Artificial Sequence
  Description of Artificial Sequence: Synthetic oligonucleotide
aggauagcgguacaauuau

SEQ ID NO: 1614138 - RNA, 19 nt, Artificial Sequence
  Description of Artificial Sequence: Synthetic oligonucleotide
aguuuugccuguucugcca

SEQ ID NO: 1614139 - RNA, 19 nt, Artificial Sequence
  Description of Artificial Sequence: Synthetic oligonucleotide
ucaaagcuaugguaucccu

SEQ ID NO: 1614140 - RNA, 19 nt, Artificial Sequence
  Description of Artificial Sequence: Synthetic oligonucleotide
acccgguagacguuucaac

SEQ ID NO: 1614141 - RNA, 19 nt, Artificial Sequence
  Description of Artificial Sequence: Synthetic oligonucleotide
uuugcagcguaggaucaag

SEQ ID NO: 1614142 - RNA, 19 nt, Artificial Sequence
  Description of Artificial Sequence: Synthetic oligonucleotide
uggcuuagcuuaaaaugaa

SEQ ID NO: 1614143 - RNA, 19 nt, Artificial Sequence
  Description of Artificial Sequence: Synthetic oligonucleotide
cugaccaaaggcacauuug

SEQ ID NO: 1614144 - RNA, 19 nt, Artificial Sequence
  Description of Artificial Sequence: Synthetic oligonucleotide
aggcaauaugcuugacuuc

SEQ ID NO: 1614145 - RNA, 19 nt, Artificial Sequence
  Description of Artificial Sequence: Synthetic oligonucleotide
uaguggacagugaaucuua

SEQ ID NO: 1614146 - RNA, 19 nt, Artificial Sequence
  Description of Artificial Sequence: Synthetic oligonucleotide
uccuuacuacuuuggggcc

SEQ ID NO: 1614147 - RNA, 19 nt, Artificial Sequence
  Description of Artificial Sequence: Synthetic oligonucleotide
agcuaugguaucccuagaa

SEQ ID NO: 1614148 - RNA, 19 nt, Artificial Sequence
  Description of Artificial Sequence: Synthetic oligonucleotide
ugguaucccuagaauggca

SEQ ID NO: 1614149 - RNA, 19 nt, Artificial Sequence
  Description of Artificial Sequence: Synthetic oligonucleotide
gagccauuauguuggugug

SEQ ID NO: 1614150 - RNA, 19 nt, Artificial Sequence
  Description of Artificial Sequence: Synthetic oligonucleotide
gaaccagagucuucacuac

SEQ ID NO: 1614151 - RNA, 19 nt, Artificial Sequence
  Description of Artificial Sequence: Synthetic oligonucleotide
gguguggauagcuacgaac

SEQ ID NO: 1614152 - RNA, 19 nt, Artificial Sequence
  Description of Artificial Sequence: Synthetic oligonucleotide
gcuuuggacagaaugcagg

SEQ ID NO: 1614153 - RNA, 19 nt, Artificial Sequence
  Description of Artificial Sequence: Synthetic oligonucleotide
auguagcucuaucaaucug

SEQ ID NO: 1614154 - RNA, 19 nt, Artificial Sequence
  Description of Artificial Sequence: Synthetic oligonucleotide
cacuuggccauacuaaaca

SEQ ID NO: 1614155 - RNA, 19 nt, Artificial Sequence
  Description of Artificial Sequence: Synthetic oligonucleotide
guauuccugcuaucagggg

SEQ ID NO: 1614156 - RNA, 19 nt, Artificial Sequence
  Description of Artificial Sequence: Synthetic oligonucleotide
uggccguaucuuugcagcg

SEQ ID NO: 1614157 - RNA, 19 nt, Artificial Sequence
  Description of Artificial Sequence: Synthetic oligonucleotide
uggcuccuaccaaauauaa

SEQ ID NO: 1614158 - RNA, 19 nt, Artificial Sequence
  Description of Artificial Sequence: Synthetic oligonucleotide
cuacuuuggggccauaaaa

SEQ ID NO: 1614159 - RNA, 19 nt, Artificial Sequence
  Description of Artificial Sequence: Synthetic oligonucleotide
ugcggggaagccaauguua

SEQ ID NO: 1614160 - RNA, 19 nt, Artificial Sequence
  Description of Artificial Sequence: Synthetic oligonucleotide
  modified_base (5)..(5): a, c, u, g, unknown or other
caccngaauccagauagag

SEQ ID NO: 1614161 - RNA, 19 nt, Artificial Sequence
  Description of Artificial Sequence: Synthetic oligonucleotide
aguucagccaauaccugug

SEQ ID NO: 1614162 - RNA, 19 nt, Artificial Sequence
  Description of Artificial Sequence: Synthetic oligonucleotide
uccccuacccacucggugu

SEQ ID NO: 1614163 - RNA, 19 nt, Artificial Sequence
  Description of Artificial Sequence: Synthetic oligonucleotide
acuacuuuggggccauaaa

SEQ ID NO: 1614164 - RNA, 19 nt, Artificial Sequence
  Description of Artificial Sequence: Synthetic oligonucleotide
guggauagcuacgaaccag

SEQ ID NO: 1614165 - RNA, 19 nt, Artificial Sequence
  Description of Artificial Sequence: Synthetic oligonucleotide
cuugcugcucauacaagca

SEQ ID NO: 1614166 - RNA, 19 nt, Artificial Sequence
  Description of Artificial Sequence: Synthetic oligonucleotide
cccauacaaauacaauugg

SEQ ID NO: 1614167 - RNA, 19 nt, Artificial Sequence
  Description of Artificial Sequence: Synthetic oligonucleotide
acguuucaacccugaagag

SEQ ID NO: 1614168 - RNA, 19 nt, Artificial Sequence
  Description of Artificial Sequence: Synthetic oligonucleotide
cuuauccccuacccacucg

SEQ ID NO: 1614169 - RNA, 19 nt, Artificial Sequence
  Description of Artificial Sequence: Synthetic oligonucleotide
uccaaugacccugaccaaa

SEQ ID NO: 1614170 - RNA, 19 nt, Artificial Sequence
  Description of Artificial Sequence: Synthetic oligonucleotide
cuuagaccgucccuggcuc

SEQ ID NO: 1614171 - RNA, 19 nt, Artificial Sequence
  Description of Artificial Sequence: Synthetic oligonucleotide
guaggaucaagguauuccu

SEQ ID NO: 1614172 - RNA, 19 nt, Artificial Sequence
  Description of Artificial Sequence: Synthetic oligonucleotide
gguugcaccaagcauggca

SEQ ID NO: 1614173 - RNA, 19 nt, Artificial Sequence
  Description of Artificial Sequence: Synthetic oligonucleotide
uuaugcugcucgagccucc

SEQ ID NO: 1614174 - RNA, 19 nt, Artificial Sequence
  Description of Artificial Sequence: Synthetic oligonucleotide
uccucaaagcuaugguauc

SEQ ID NO: 1614175 - RNA, 19 nt, Artificial Sequence
  Description of Artificial Sequence: Synthetic oligonucleotide
uugguguggauagcuacga

SEQ ID NO: 1614176 - RNA, 19 nt, Artificial Sequence
  Description of Artificial Sequence: Synthetic oligonucleotide
aauacccgguagacguuuc

SEQ ID NO: 1614177 - RNA, 19 nt, Artificial Sequence
  Description of Artificial Sequence: Synthetic oligonucleotide
aagccacgaaggaaccaac

SEQ ID NO: 1614178 - RNA, 19 nt, Artificial Sequence
  Description of Artificial Sequence: Synthetic oligonucleotide
uaucaggggaauguagcuc

SEQ ID NO: 1614179 - RNA, 19 nt, Artificial Sequence
  Description of Artificial Sequence: Synthetic oligonucleotide
augacaacccacaaguauu

SEQ ID NO: 1614180 - RNA, 19 nt, Artificial Sequence
  Description of Artificial Sequence: Synthetic oligonucleotide
gcaauaagaaauggcuuag

SEQ ID NO: 1614181 - RNA, 19 nt, Artificial Sequence
  Description of Artificial Sequence: Synthetic oligonucleotide
caaugacccugaccaaagg

SEQ ID NO: 1614182 - RNA, 19 nt, Artificial Sequence
  Description of Artificial Sequence: Synthetic oligonucleotide
cucuggagauagugaaccc

SEQ ID NO: 1614183 - RNA, 19 nt, Artificial Sequence
  Description of Artificial Sequence: Synthetic oligonucleotide
ugacauggcaucugugcua

SEQ ID NO: 1614184 - RNA, 19 nt, Artificial Sequence
  Description of Artificial Sequence: Synthetic oligonucleotide
  modified_base (10)..(10): a, c, u, g, unknown or other
aggaccaccngaauccaga

SEQ ID NO: 1614185 - RNA, 19 nt, Artificial Sequence
  Description of Artificial Sequence: Synthetic oligonucleotide
aaauacccgguagacguuu

SEQ ID NO: 1614186 - RNA, 19 nt, Artificial Sequence
  Description of Artificial Sequence: Synthetic oligonucleotide
auagugaacccauguucau

SEQ ID NO: 1614187 - RNA, 19 nt, Artificial Sequence
  Description of Artificial Sequence: Synthetic oligonucleotide
auaaagcuccaaugacccu

SEQ ID NO: 1614188 - RNA, 19 nt, Artificial Sequence
  Description of Artificial Sequence: Synthetic oligonucleotide
gaaccaaccuccaggguga

SEQ ID NO: 1614189 - RNA, 19 nt, Artificial Sequence
  Description of Artificial Sequence: Synthetic oligonucleotide
guuucaacccugaagagau

SEQ ID NO: 1614190 - RNA, 19 nt, Artificial Sequence
  Description of Artificial Sequence: Synthetic oligonucleotide
ccuaccaaauauaaacuca

SEQ ID NO: 1614191 - RNA, 19 nt, Artificial Sequence
  Description of Artificial Sequence: Synthetic oligonucleotide
agaucuuugcuggccucac

SEQ ID NO: 1614192 - RNA, 19 nt, Artificial Sequence
  Description of Artificial Sequence: Synthetic oligonucleotide
aucuagucaucuaaacagu

SEQ ID NO: 1614193 - RNA, 19 nt, Artificial Sequence
  Description of Artificial Sequence: Synthetic oligonucleotide
gguuucuagcagcaaagca

SEQ ID NO: 1614194 - RNA, 19 nt, Artificial Sequence
  Description of Artificial Sequence: Synthetic oligonucleotide
  modified_base (4)..(4): a, c, u, g, unknown or other
accngaauccagauagaga

SEQ ID NO: 1614195 - RNA, 19 nt, Artificial Sequence
  Description of Artificial Sequence: Synthetic oligonucleotide
aagcuaugguaucccuaga

SEQ ID NO: 1614196 - RNA, 19 nt, Artificial Sequence
  Description of Artificial Sequence: Synthetic oligonucleotide
ccguucaaaaggauagcgg

SEQ ID NO: 1614197 - RNA, 19 nt, Artificial Sequence
  Description of Artificial Sequence: Synthetic oligonucleotide
agccauuauguuggugugg

SEQ ID NO: 1614198 - RNA, 19 nt, Artificial Sequence
  Description of Artificial Sequence: Synthetic oligonucleotide
gaagccacgaaggaaccaa

SEQ ID NO: 1614199 - RNA, 19 nt, Artificial Sequence
  Description of Artificial Sequence: Synthetic oligonucleotide
gguaucccuagaauggcag

SEQ ID NO: 1614200 - RNA, 19 nt, Artificial Sequence
  Description of Artificial Sequence: Synthetic oligonucleotide
gccuacuuaaggugcagcc

SEQ ID NO: 1614201 - RNA, 19 nt, Artificial Sequence
  Description of Artificial Sequence: Synthetic oligonucleotide
uuagaccgucccuggcucc

SEQ ID NO: 1614202 - RNA, 19 nt, Artificial Sequence
  Description of Artificial Sequence: Synthetic oligonucleotide
cccgguagacguuucaacc

SEQ ID NO: 1614203 - RNA, 19 nt, Artificial Sequence
  Description of Artificial Sequence: Synthetic oligonucleotide
gccguucaaaaggauagcg

SEQ ID NO: 1614204 - RNA, 19 nt, Artificial Sequence
  Description of Artificial Sequence: Synthetic oligonucleotide
gucaaagcucuuucuugac

SEQ ID NO: 1614205 - RNA, 19 nt, Artificial Sequence
  Description of Artificial Sequence: Synthetic oligonucleotide
  modified_base (3)..(3): a, c, u, g, unknown or other
ccngaauccagauagagau

SEQ ID NO: 1614206 - RNA, 19 nt, Artificial Sequence
  Description of Artificial Sequence: Synthetic oligonucleotide
ggggaauguagcucuauca

SEQ ID NO: 1614207 - RNA, 19 nt, Artificial Sequence
  Description of Artificial Sequence: Synthetic oligonucleotide
guuuggugacuggggagcg

SEQ ID NO: 1614208 - RNA, 19 nt, Artificial Sequence
  Description of Artificial Sequence: Synthetic oligonucleotide
gccguggucugucuuaucc

SEQ ID NO: 1614209 - RNA, 19 nt, Artificial Sequence
  Description of Artificial Sequence: Synthetic oligonucleotide
uagacguuucaacccugaa

SEQ ID NO: 1614210 - RNA, 19 nt, Artificial Sequence
  Description of Artificial Sequence: Synthetic oligonucleotide
cauuauguugguguggaua

SEQ ID NO: 1614211 - RNA, 19 nt, Artificial Sequence
  Description of Artificial Sequence: Synthetic oligonucleotide
aacuaacgacccacaaaga

SEQ ID NO: 1614212 - RNA, 19 nt, Artificial Sequence
  Description of Artificial Sequence: Synthetic oligonucleotide
auccccuacccacucggug

SEQ ID NO: 1614213 - RNA, 19 nt, Artificial Sequence
  Description of Artificial Sequence: Synthetic oligonucleotide
ucccagaucuuugcuggcc

SEQ ID NO: 1614214 - RNA, 19 nt, Artificial Sequence
  Description of Artificial Sequence: Synthetic oligonucleotide
gaaugcagguccacaguca

SEQ ID NO: 1614215 - RNA, 19 nt, Artificial Sequence
  Description of Artificial Sequence: Synthetic oligonucleotide
guacaauuaugcugcucga

SEQ ID NO: 1614216 - RNA, 19 nt, Artificial Sequence
  Description of Artificial Sequence: Synthetic oligonucleotide
gggaauguagcucuaucaa

SEQ ID NO: 1614217 - RNA, 19 nt, Artificial Sequence
  Description of Artificial Sequence: Synthetic oligonucleotide
gaucaagguauuccugcua

SEQ ID NO: 1614218 - RNA, 19 nt, Artificial Sequence
  Description of Artificial Sequence: Synthetic oligonucleotide
  modified_base (6)..(6): a, c, u, g, unknown or other
gaggunuaauacuuuucau

SEQ ID NO: 1614219 - RNA, 19 nt, Artificial Sequence
  Description of Artificial Sequence: Synthetic oligonucleotide
cuagaauggcagugagauc

SEQ ID NO: 1614220 - RNA, 19 nt, Artificial Sequence
  Description of Artificial Sequence: Synthetic oligonucleotide
uacgaaccaggagugugcu

SEQ ID NO: 1614221 - RNA, 19 nt, Artificial Sequence
  Description of Artificial Sequence: Synthetic oligonucleotide
ggagacuuccuugaccagc

SEQ ID NO: 1614222 - RNA, 19 nt, Artificial Sequence
  Description of Artificial Sequence: Synthetic oligonucleotide
agugugcuguggccguauc

SEQ ID NO: 1614223 - RNA, 19 nt, Artificial Sequence
  Description of Artificial Sequence: Synthetic oligonucleotide
aucugugcuaugaaacuaa

SEQ ID NO: 1614224 - RNA, 19 nt, Artificial Sequence
  Description of Artificial Sequence: Synthetic oligonucleotide
cagcguaggaucaagguau

SEQ ID NO: 1614225 - RNA, 19 nt, Artificial Sequence
  Description of Artificial Sequence: Synthetic oligonucleotide
cauaacgacacuuggccau

SEQ ID NO: 1614226 - RNA, 19 nt, Artificial Sequence
  Description of Artificial Sequence: Synthetic oligonucleotide
agucaucuaaacagucacu

SEQ ID NO: 1614227 - RNA, 19 nt, Artificial Sequence
  Description of Artificial Sequence: Synthetic oligonucleotide
cguaggaucaagguauucc

SEQ ID NO: 1614228 - RNA, 19 nt, Artificial Sequence
  Description of Artificial Sequence: Synthetic oligonucleotide
ugcaccugacauggcaucu

SEQ ID NO: 1614229 - RNA, 19 nt, Artificial Sequence
  Description of Artificial Sequence: Synthetic oligonucleotide
ccgguagacguuucaaccc

SEQ ID NO: 1614230 - RNA, 19 nt, Artificial Sequence
  Description of Artificial Sequence: Synthetic oligonucleotide
  modified_base (12)..(12): a, c, u, g, unknown or other
ucaggaccaccngaaucca

SEQ ID NO: 1614231 - RNA, 19 nt, Artificial Sequence
  Description of Artificial Sequence: Synthetic oligonucleotide
augaaacuaacgacccaca

SEQ ID NO: 1614232 - RNA, 19 nt, Artificial Sequence
  Description of Artificial Sequence: Synthetic oligonucleotide
gagauagugaacccauguu

SEQ ID NO: 1614233 - RNA, 19 nt, Artificial Sequence
  Description of Artificial Sequence: Synthetic oligonucleotide
agucccauacaaauacaau

SEQ ID NO: 1614234 - RNA, 19 nt, Artificial Sequence
  Description of Artificial Sequence: Synthetic oligonucleotide
acccauguucauaguggac

SEQ ID NO: 1614235 - RNA, 19 nt, Artificial Sequence
  Description of Artificial Sequence: Synthetic oligonucleotide
auacccgguagacguuuca

SEQ ID NO: 1614236 - RNA, 19 nt, Artificial Sequence
  Description of Artificial Sequence: Synthetic oligonucleotide
acugccguggucugucuua

SEQ ID NO: 1614237 - RNA, 19 nt, Artificial Sequence
  Description of Artificial Sequence: Synthetic oligonucleotide
aggucgacaaauacccggu

SEQ ID NO: 1614238 - RNA, 19 nt, Artificial Sequence
  Description of Artificial Sequence: Synthetic oligonucleotide
caaguauucugguccaggu

SEQ ID NO: 1614239 - RNA, 19 nt, Artificial Sequence
  Description of Artificial Sequence: Synthetic oligonucleotide
ggagauagugaacccaugu

SEQ ID NO: 1614240 - RNA, 19 nt, Artificial Sequence
  Description of Artificial Sequence: Synthetic oligonucleotide
gcuacgaaccaggagugug

SEQ ID NO: 1614241 - RNA, 19 nt, Artificial Sequence
  Description of Artificial Sequence: Synthetic oligonucleotide
aucccuagaauggcaguga

SEQ ID NO: 1614242 - RNA, 19 nt, Artificial Sequence
  Description of Artificial Sequence: Synthetic oligonucleotide
acccacucggugugcgggg

SEQ ID NO: 1614243 - RNA, 19 nt, Artificial Sequence
  Description of Artificial Sequence: Synthetic oligonucleotide
cuaucaggggaauguagcu

SEQ ID NO: 1614244 - RNA, 19 nt, Artificial Sequence
  Description of Artificial Sequence: Synthetic oligonucleotide
aaccaaccuccagggugac

SEQ ID NO: 1614245 - RNA, 19 nt, Artificial Sequence
  Description of Artificial Sequence: Synthetic oligonucleotide
uauccccuacccacucggu

SEQ ID NO: 1614246 - RNA, 19 nt, Artificial Sequence
  Description of Artificial Sequence: Synthetic oligonucleotide
cccugugcaccugacaugg

SEQ ID NO: 1614247 - RNA, 19 nt, Artificial Sequence
  Description of Artificial Sequence: Synthetic oligonucleotide
  modified_base (11)..(11): a, c, u, g, unknown or other
caggaccaccngaauccag

SEQ ID NO: 1614248 - RNA, 19 nt, Artificial Sequence
  Description of Artificial Sequence: Synthetic oligonucleotide
ccauugucucuggagauag

SEQ ID NO: 1614249 - RNA, 19 nt, Artificial Sequence
  Description of Artificial Sequence: Synthetic oligonucleotide
ugacuuagucaaagcucuu

SEQ ID NO: 1614250 - RNA, 19 nt, Artificial Sequence
  Description of Artificial Sequence: Synthetic oligonucleotide
cuccugcuguacugguugc

SEQ ID NO: 1614251 - RNA, 19 nt, Artificial Sequence
  Description of Artificial Sequence: Synthetic oligonucleotide
acgacccacaaagauccca

SEQ ID NO: 1614252 - RNA, 19 nt, Artificial Sequence
  Description of Artificial Sequence: Synthetic oligonucleotide
gcuguggccguaucuuugc

SEQ ID NO: 1614253 - RNA, 19 nt, Artificial Sequence
  Description of Artificial Sequence: Synthetic oligonucleotide
ccuccugcuguacugguug

SEQ ID NO: 1614254 - RNA, 19 nt, Artificial Sequence
  Description of Artificial Sequence: Synthetic oligonucleotide
acaauuggcuuuggacaga

SEQ ID NO: 1614255 - RNA, 19 nt, Artificial Sequence
  Description of Artificial Sequence: Synthetic oligonucleotide
aggaaccaaccuccagggu

SEQ ID NO: 1614256 - RNA, 19 nt, Artificial Sequence
  Description of Artificial Sequence: Synthetic oligonucleotide
agaagccacgaaggaacca

SEQ ID NO: 1614257 - RNA, 19 nt, Artificial Sequence
  Description of Artificial Sequence: Synthetic oligonucleotide
uacccgguagacguuucaa

SEQ ID NO: 1614258 - RNA, 19 nt, Artificial Sequence
  Description of Artificial Sequence: Synthetic oligonucleotide
gcaacuuguccuuacuacu

SEQ ID NO: 1614259 - RNA, 19 nt, Artificial Sequence
  Description of Artificial Sequence: Synthetic oligonucleotide
gcagccuagggagacuucc

SEQ ID NO: 1614260 - RNA, 19 nt, Artificial Sequence
  Description of Artificial Sequence: Synthetic oligonucleotide
cacauuugguaagcaauaa

SEQ ID NO: 1614261 - RNA, 19 nt, Artificial Sequence
  Description of Artificial Sequence: Synthetic oligonucleotide
ucggugugcggggaagcca

SEQ ID NO: 1614262 - RNA, 19 nt, Artificial Sequence
  Description of Artificial Sequence: Synthetic oligonucleotide
cugacauggcaucugugcu

SEQ ID NO: 1614263 - RNA, 19 nt, Artificial Sequence
  Description of Artificial Sequence: Synthetic oligonucleotide
agccuagggagacuuccuu

SEQ ID NO: 1614264 - RNA, 19 nt, Artificial Sequence
  Description of Artificial Sequence: Synthetic oligonucleotide
acgaaccaggagugugcug

SEQ ID NO: 1614265 - RNA, 19 nt, Artificial Sequence
  Description of Artificial Sequence: Synthetic oligonucleotide
gccauuauguuggugugga

SEQ ID NO: 1614266 - RNA, 19 nt, Artificial Sequence
  Description of Artificial Sequence: Synthetic oligonucleotide
gccaauaccugugggagga

SEQ ID NO: 1614267 - RNA, 19 nt, Artificial Sequence
  Description of Artificial Sequence: Synthetic oligonucleotide
uaacgacacuuggccauac

SEQ ID NO: 1614268 - RNA, 19 nt, Artificial Sequence
  Description of Artificial Sequence: Synthetic oligonucleotide
ggaauguagcucuaucaau

SEQ ID NO: 1614269 - RNA, 19 nt, Artificial Sequence
  Description of Artificial Sequence: Synthetic oligonucleotide
cguaucuuugcagcguagg

SEQ ID NO: 1614270 - RNA, 19 nt, Artificial Sequence
  Description of Artificial Sequence: Synthetic oligonucleotide
agccaauguuaaagcauga

SEQ ID NO: 1614271 - RNA, 19 nt, Artificial Sequence
  Description of Artificial Sequence: Synthetic oligonucleotide
ccuagggagacuuccuuga

SEQ ID NO: 1614272 - RNA, 19 nt, Artificial Sequence
  Description of Artificial Sequence: Synthetic oligonucleotide
uagaccgucccuggcuccu

SEQ ID NO: 1614273 - RNA, 19 nt, Artificial Sequence
  Description of Artificial Sequence: Synthetic oligonucleotide
auaacgacacuuggccaua

SEQ ID NO: 1614274 - RNA, 19 nt, Artificial Sequence
  Description of Artificial Sequence: Synthetic oligonucleotide
aucuuaccucuuggccuac

SEQ ID NO: 1614275 - RNA, 19 nt, Artificial Sequence
  Description of Artificial Sequence: Synthetic oligonucleotide
guauucugguccaggucga

SEQ ID NO: 1614276 - RNA, 19 nt, Artificial Sequence
  Description of Artificial Sequence: Synthetic oligonucleotide
gacauggcaucugugcuau

SEQ ID NO: 1614277 - RNA, 19 nt, Artificial Sequence
  Description of Artificial Sequence: Synthetic oligonucleotide
gcagcguaggaucaaggua

SEQ ID NO: 1614278 - RNA, 19 nt, Artificial Sequence
  Description of Artificial Sequence: Synthetic oligonucleotide
ccaggucgacaaauacccg

SEQ ID NO: 1614279 - RNA, 19 nt, Artificial Sequence
  Description of Artificial Sequence: Synthetic oligonucleotide
guaucccuagaauggcagu

SEQ ID NO: 1614280 - RNA, 19 nt, Artificial Sequence
  Description of Artificial Sequence: Synthetic oligonucleotide
cguucaaaaggauagcggu

SEQ ID NO: 1614281 - RNA, 19 nt, Artificial Sequence
  Description of Artificial Sequence: Synthetic oligonucleotide
ccguggucugucuuauccc

SEQ ID NO: 1614282 - RNA, 19 nt, Artificial Sequence
  Description of Artificial Sequence: Synthetic oligonucleotide
  modified_base (8)..(8): a, c, u, g, unknown or other
gaccaccngaauccagaua

SEQ ID NO: 1614283 - RNA, 19 nt, Artificial Sequence
  Description of Artificial Sequence: Synthetic oligonucleotide
agucacucauaaagcucca

SEQ ID NO: 1614284 - RNA, 19 nt, Artificial Sequence
  Description of Artificial Sequence: Synthetic oligonucleotide
gggaugaccuuccuguccu

SEQ ID NO: 1614285 - RNA, 19 nt, Artificial Sequence
  Description of Artificial Sequence: Synthetic oligonucleotide
ucuuaccucuuggccuacu

SEQ ID NO: 1614286 - RNA, 19 nt, Artificial Sequence
  Description of Artificial Sequence: Synthetic oligonucleotide
gguagacguuucaacccug

SEQ ID NO: 1614287 - RNA, 19 nt, Artificial Sequence
  Description of Artificial Sequence: Synthetic oligonucleotide
ggauagcgguacaauuaug

SEQ ID NO: 1614288 - RNA, 19 nt, Artificial Sequence
  Description of Artificial Sequence: Synthetic oligonucleotide
cagaucuuugcuggccuca

SEQ ID NO: 1614289 - RNA, 19 nt, Artificial Sequence
  Description of Artificial Sequence: Synthetic oligonucleotide
cacucggugugcggggaag

SEQ ID NO: 1614290 - RNA, 19 nt, Artificial Sequence
  Description of Artificial Sequence: Synthetic oligonucleotide
ggaucaagguauuccugcu

SEQ ID NO: 1614291 - RNA, 19 nt, Artificial Sequence
  Description of Artificial Sequence: Synthetic oligonucleotide
gcuugacuuccuugcugcc

SEQ ID NO: 1614292 - RNA, 19 nt, Artificial Sequence
  Description of Artificial Sequence: Synthetic oligonucleotide
acgaaggaaccaaccucca

SEQ ID NO: 1614293 - RNA, 19 nt, Artificial Sequence
  Description of Artificial Sequence: Synthetic oligonucleotide
agcuacgaaccaggagugu

SEQ ID NO: 1614294 - RNA, 19 nt, Artificial Sequence
  Description of Artificial Sequence: Synthetic oligonucleotide
ccagauagagauuucugau

SEQ ID NO: 1614295 - RNA, 19 nt, Artificial Sequence
  Description of Artificial Sequence: Synthetic oligonucleotide
gaccgucccuggcuccuac

SEQ ID NO: 1614296 - RNA, 19 nt, Artificial Sequence
  Description of Artificial Sequence: Synthetic oligonucleotide
agcuuaaaaugaagaucuu

SEQ ID NO: 1614297 - RNA, 19 nt, Artificial Sequence
  Description of Artificial Sequence: Synthetic oligonucleotide
gggagacuuccuugaccag

SEQ ID NO: 1614298 - RNA, 19 nt, Artificial Sequence
  Description of Artificial Sequence: Synthetic oligonucleotide
gacccacaaagaucccacu

SEQ ID NO: 1614299 - RNA, 19 nt, Artificial Sequence
  Description of Artificial Sequence: Synthetic oligonucleotide
gccacgaaggaaccaaccu

SEQ ID NO: 1614300 - RNA, 19 nt, Artificial Sequence
  Description of Artificial Sequence: Synthetic oligonucleotide
cugagucauaacgacacuu

SEQ ID NO: 1614301 - RNA, 19 nt, Artificial Sequence
  Description of Artificial Sequence: Synthetic oligonucleotide
cgacaaauacccgguagac

SEQ ID NO: 1614302 - RNA, 19 nt, Artificial Sequence
  Description of Artificial Sequence: Synthetic oligonucleotide
ccuacccacucggugugcg

SEQ ID NO: 1614303 - RNA, 19 nt, Artificial Sequence
  Description of Artificial Sequence: Synthetic oligonucleotide
ggauagcuacgaaccagga

SEQ ID NO: 1614304 - RNA, 19 nt, Artificial Sequence
  Description of Artificial Sequence: Synthetic oligonucleotide
gucacucauaaagcuccaa

SEQ ID NO: 1614305 - RNA, 19 nt, Artificial Sequence
  Description of Artificial Sequence: Synthetic oligonucleotide
ugguugcaccaagcauggc

SEQ ID NO: 1614306 - RNA, 19 nt, Artificial Sequence
  Description of Artificial Sequence: Synthetic oligonucleotide
gugugcuguggccguaucu

SEQ ID NO: 1614307 - RNA, 19 nt, Artificial Sequence
  Description of Artificial Sequence: Synthetic oligonucleotide
gcccugugcaccugacaug

SEQ ID NO: 1614308 - RNA, 19 nt, Artificial Sequence
  Description of Artificial Sequence: Synthetic oligonucleotide
ccguaucuuugcagcguag

SEQ ID NO: 1614309 - RNA, 19 nt, Artificial Sequence
  Description of Artificial Sequence: Synthetic oligonucleotide
cuuugcagcguaggaucaa

SEQ ID NO: 1614310 - RNA, 19 nt, Artificial Sequence
  Description of Artificial Sequence: Synthetic oligonucleotide
uggcaugcuuagguuucua

SEQ ID NO: 1614311 - RNA, 19 nt, Artificial Sequence
  Description of Artificial Sequence: Synthetic oligonucleotide
ugccguggucugucuuauc

SEQ ID NO: 1614312 - RNA, 19 nt, Artificial Sequence
  Description of Artificial Sequence: Synthetic oligonucleotide
  modified_base (2)..(2): a, c, u, g, unknown or other
cngaauccagauagagauu

SEQ ID NO: 1614313 - RNA, 19 nt, Artificial Sequence
  Description of Artificial Sequence: Synthetic oligonucleotide
agcguaggaucaagguauu

SEQ ID NO: 1614314 - RNA, 19 nt, Artificial Sequence
  Description of Artificial Sequence: Synthetic oligonucleotide
gcagucccauacaaauaca

SEQ ID NO: 1614315 - RNA, 19 nt, Artificial Sequence
  Description of Artificial Sequence: Synthetic oligonucleotide
gugaacccauguucauagu

SEQ ID NO: 1614316 - RNA, 19 nt, Artificial Sequence
  Description of Artificial Sequence: Synthetic oligonucleotide
cuuacuacuuuggggccau

SEQ ID NO: 1614317 - RNA, 19 nt, Artificial Sequence
  Description of Artificial Sequence: Synthetic oligonucleotide
ccuggcuccuaccaaauau

SEQ ID NO: 1614318 - RNA, 19 nt, Artificial Sequence
  Description of Artificial Sequence: Synthetic oligonucleotide
ggggccauaaaaguccaau

SEQ ID NO: 1614319 - RNA, 19 nt, Artificial Sequence
  Description of Artificial Sequence: Synthetic oligonucleotide
gccguaucuuugcagcgua

SEQ ID NO: 1614320 - RNA, 19 nt, Artificial Sequence
  Description of Artificial Sequence: Synthetic oligonucleotide
ggaggagagccauuauguu

SEQ ID NO: 1614321 - RNA, 19 nt, Artificial Sequence
  Description of Artificial Sequence: Synthetic oligonucleotide
ggcuccuaccaaauauaaa

SEQ ID NO: 1614322 - RNA, 19 nt, Artificial Sequence
  Description of Artificial Sequence: Synthetic oligonucleotide
gcggggaagccaauguuaa

SEQ ID NO: 1614323 - RNA, 19 nt, Artificial Sequence
  Description of Artificial Sequence: Synthetic oligonucleotide
cuccagaucuggcaugcuu

SEQ ID NO: 1614324 - RNA, 19 nt, Artificial Sequence
  Description of Artificial Sequence: Synthetic oligonucleotide
ggucgacaaauacccggua

SEQ ID NO: 1614325 - RNA, 19 nt, Artificial Sequence
  Description of Artificial Sequence: Synthetic oligonucleotide
caaauacccgguagacguu

SEQ ID NO: 1614326 - RNA, 19 nt, Artificial Sequence
  Description of Artificial Sequence: Synthetic oligonucleotide
ccuuacuacuuuggggcca

SEQ ID NO: 1614327 - RNA, 19 nt, Artificial Sequence
  Description of Artificial Sequence: Synthetic oligonucleotide
  modified_base (9)..(9): a, c, u, g, unknown or other
ggaccaccngaauccagau

SEQ ID NO: 1614328 - RNA, 19 nt, Artificial Sequence
  Description of Artificial Sequence: Synthetic oligonucleotide
cagccuagggagacuuccu

SEQ ID NO: 1614329 - RNA, 19 nt, Artificial Sequence
  Description of Artificial Sequence: Synthetic oligonucleotide
ccuuagaccgucccuggcu

SEQ ID NO: 1614330 - RNA, 19 nt, Artificial Sequence
  Description of Artificial Sequence: Synthetic oligonucleotide
guggucugucuuauccccu

SEQ ID NO: 1614331 - RNA, 19 nt, Artificial Sequence
  Description of Artificial Sequence: Synthetic oligonucleotide
cucauacaagcagucccau

SEQ ID NO: 1614332 - RNA, 19 nt, Artificial Sequence
  Description of Artificial Sequence: Synthetic oligonucleotide
ccccuacccacucggugug

SEQ ID NO: 1614333 - RNA, 19 nt, Artificial Sequence
  Description of Artificial Sequence: Synthetic oligonucleotide
uuacuacuuuggggccaua

SEQ ID NO: 1614334 - RNA, 19 nt, Artificial Sequence
  Description of Artificial Sequence: Synthetic oligonucleotide
cgaaccaggagugugcugu

SEQ ID NO: 1614335 - RNA, 19 nt, Artificial Sequence
  Description of Artificial Sequence: Synthetic oligonucleotide
  modified_base (6)..(6): a, c, u, g, unknown or other
ccaccngaauccagauaga

SEQ ID NO: 1614336 - RNA, 19 nt, Artificial Sequence
  Description of Artificial Sequence: Synthetic oligonucleotide
gcugagucauaacgacacu

SEQ ID NO: 1614337 - RNA, 19 nt, Artificial Sequence
  Description of Artificial Sequence: Synthetic oligonucleotide
gcauugaguucagccaaua

SEQ ID NO: 1614338 - RNA, 19 nt, Artificial Sequence
  Description of Artificial Sequence: Synthetic oligonucleotide
ccuacuuaaggugcagccu

SEQ ID NO: 1614339 - RNA, 19 nt, Artificial Sequence
  Description of Artificial Sequence: Synthetic oligonucleotide
gcguaggaucaagguauuc

SEQ ID NO: 1614340 - RNA, 19 nt, Artificial Sequence
  Description of Artificial Sequence: Synthetic oligonucleotide
gagugugcuguggccguau

SEQ ID NO: 1614341 - RNA, 19 nt, Artificial Sequence
  Description of Artificial Sequence: Synthetic oligonucleotide
gcaauaugcuugacuuccu

SEQ ID NO: 1614342 - RNA, 19 nt, Artificial Sequence
  Description of Artificial Sequence: Synthetic oligonucleotide
ggccguaucuuugcagcgu

SEQ ID NO: 1614343 - RNA, 19 nt, Artificial Sequence
  Description of Artificial Sequence: Synthetic oligonucleotide
cccagaucuuugcuggccu

SEQ ID NO: 1614344 - RNA, 19 nt, Artificial Sequence
  Description of Artificial Sequence: Synthetic oligonucleotide
cggugugcggggaagccaa

SEQ ID NO: 1614345 - RNA, 19 nt, Artificial Sequence
  Description of Artificial Sequence: Synthetic oligonucleotide
cgguagacguuucaacccu

SEQ ID NO: 1614346 - RNA, 19 nt, Artificial Sequence
  Description of Artificial Sequence: Synthetic oligonucleotide
caucaucagcagacaucuu

SEQ ID NO: 1614347 - RNA, 19 nt, Artificial Sequence
  Description of Artificial Sequence: Synthetic oligonucleotide
gcagacaucuucagccguu

SEQ ID NO: 1614348 - RNA, 19 nt, Artificial Sequence
  Description of Artificial Sequence: Synthetic oligonucleotide
cgguacaauuaugcugcuc

SEQ ID NO: 1614349 - RNA, 19 nt, Artificial Sequence
  Description of Artificial Sequence: Synthetic oligonucleotide
caggggaauguagcucuau

SEQ ID NO: 1614350 - RNA, 19 nt, Artificial Sequence
  Description of Artificial Sequence: Synthetic oligonucleotide
ggagugugcuguggccgua

SEQ ID NO: 1614351 - RNA, 19 nt, Artificial Sequence
  Description of Artificial Sequence: Synthetic oligonucleotide
cugugggaggagagccauu

SEQ ID NO: 1614352 - RNA, 19 nt, Artificial Sequence
  Description of Artificial Sequence: Synthetic oligonucleotide
ccauuauguugguguggau

SEQ ID NO: 1614353 - RNA, 19 nt, Artificial Sequence
  Description of Artificial Sequence: Synthetic oligonucleotide
cccuggcuccuaccaaaua

SEQ ID NO: 1614354 - RNA, 19 nt, Artificial Sequence
  Description of Artificial Sequence: Synthetic oligonucleotide
cccacucggugugcgggga

SEQ ID NO: 1614355 - RNA, 19 nt, Artificial Sequence
  Description of Artificial Sequence: Synthetic oligonucleotide
ccacucggugugcggggaa

SEQ ID NO: 1614356 - RNA, 19 nt, Artificial Sequence
  Description of Artificial Sequence: Synthetic oligonucleotide
  modified_base (15)..(15): a, c, u, g, unknown or other
cccucaggaccaccngaau

SEQ ID NO: 1614357 - RNA, 19 nt, Artificial Sequence
  Description of Artificial Sequence: Synthetic oligonucleotide
  modified_base (1)..(1): a, c, u, g, unknown or other
ngaauccagauagagauuu

SEQ ID NO: 1614358 - RNA, 19 nt, Artificial Sequence
  Description of Artificial Sequence: Synthetic oligonucleotide
  modified_base (1)..(1): a, c, u, g, unknown or other
nuaauacuuuucaugacuu

SEQ ID NO: 1614359 - RNA, 19 nt, Artificial Sequence
  Description of Artificial Sequence: Synthetic oligonucleotide
ucuaauagaaaauagaacu

SEQ ID NO: 1614360 - RNA, 19 nt, Artificial Sequence
  Description of Artificial Sequence: Synthetic oligonucleotide
auaauuuccaaccagaacu

SEQ ID NO: 1614361 - RNA, 19 nt, Artificial Sequence
  Description of Artificial Sequence: Synthetic oligonucleotide
aaaguuugaggucacaucu

SEQ ID NO: 1614362 - RNA, 19 nt, Artificial Sequence
  Description of Artificial Sequence: Synthetic oligonucleotide
aauucauacguuuuggccu

SEQ ID NO: 1614363 - RNA, 19 nt, Artificial Sequence
  Description of Artificial Sequence: Synthetic oligonucleotide
uaaaguuaaggacaggacc

SEQ ID NO: 1614364 - RNA, 19 nt, Artificial Sequence
  Description of Artificial Sequence: Synthetic oligonucleotide
uucuuaauaacauauuuac

SEQ ID NO: 1614365 - RNA, 19 nt, Artificial Sequence
  Description of Artificial Sequence: Synthetic oligonucleotide
aagguuuugggcuuggguc

SEQ ID NO: 1614366 - RNA, 19 nt, Artificial Sequence
  Description of Artificial Sequence: Synthetic oligonucleotide
uguuugaucacccuggcug

SEQ ID NO: 1614367 - RNA, 19 nt, Artificial Sequence
  Description of Artificial Sequence: Synthetic oligonucleotide
aaaaguuugaggucacauc

SEQ ID NO: 1614368 - RNA, 19 nt, Artificial Sequence
  Description of Artificial Sequence: Synthetic oligonucleotide
auuuacaucuaauagaaaa

SEQ ID NO: 1614369 - RNA, 19 nt, Artificial Sequence
  Description of Artificial Sequence: Synthetic oligonucleotide
aaugaaagggacuugggaa

SEQ ID NO: 1614370 - RNA, 19 nt, Artificial Sequence
  Description of Artificial Sequence: Synthetic oligonucleotide
uccagguuagucaaggagg

SEQ ID NO: 1614371 - RNA, 19 nt, Artificial Sequence
  Description of Artificial Sequence: Synthetic oligonucleotide
uuaaagaagccuugguccg

SEQ ID NO: 1614372 - RNA, 19 nt, Artificial Sequence
  Description of Artificial Sequence: Synthetic oligonucleotide
aacauauuuacaucuaaua

SEQ ID NO: 1614373 - RNA, 19 nt, Artificial Sequence
  Description of Artificial Sequence: Synthetic oligonucleotide
gaauucauacguuuuggcc

SEQ ID NO: 1614374 - RNA, 19 nt, Artificial Sequence
  Description of Artificial Sequence: Synthetic oligonucleotide
uuugagguauucuccaagg

SEQ ID NO: 1614375 - RNA, 19 nt, Artificial Sequence
  Description of Artificial Sequence: Synthetic oligonucleotide
ugaacuaugucgaacccug

SEQ ID NO: 1614376 - RNA, 19 nt, Artificial Sequence
  Description of Artificial Sequence: Synthetic oligonucleotide
agaacucuagauaauuucc

SEQ ID NO: 1614377 - RNA, 19 nt, Artificial Sequence
  Description of Artificial Sequence: Synthetic oligonucleotide
uguaaaguuaaggacagga

SEQ ID NO: 1614378 - RNA, 19 nt, Artificial Sequence
  Description of Artificial Sequence: Synthetic oligonucleotide
agaaaauagaacucuagau

SEQ ID NO: 1614379 - RNA, 19 nt, Artificial Sequence
  Description of Artificial Sequence: Synthetic oligonucleotide
uuuacaucuaauagaaaau

SEQ ID NO: 1614380 - RNA, 19 nt, Artificial Sequence
  Description of Artificial Sequence: Synthetic oligonucleotide
auuguaccaggucugaguc

SEQ ID NO: 1614381 - RNA, 19 nt, Artificial Sequence
  Description of Artificial Sequence: Synthetic oligonucleotide
aacuaugucgaacccuggg

SEQ ID NO: 1614382 - RNA, 19 nt, Artificial Sequence
  Description of Artificial Sequence: Synthetic oligonucleotide
auacguuuuggccuuugcc

SEQ ID NO: 1614383 - RNA, 19 nt, Artificial Sequence
  Description of Artificial Sequence: Synthetic oligonucleotide
acucuagauaauuuccaac

SEQ ID NO: 1614384 - RNA, 19 nt, Artificial Sequence
  Description of Artificial Sequence: Synthetic oligonucleotide
ucuagauaauuuccaacca

SEQ ID NO: 1614385 - RNA, 19 nt, Artificial Sequence
  Description of Artificial Sequence: Synthetic oligonucleotide
aucuaauagaaaauagaac

SEQ ID NO: 1614386 - RNA, 19 nt, Artificial Sequence
  Description of Artificial Sequence: Synthetic oligonucleotide
gaaggcaacagccacccag

SEQ ID NO: 1614387 - RNA, 19 nt, Artificial Sequence
  Description of Artificial Sequence: Synthetic oligonucleotide
uguacuucugcgaccagcc

SEQ ID NO: 1614388 - RNA, 19 nt, Artificial Sequence
  Description of Artificial Sequence: Synthetic oligonucleotide
aaauccuggggugaucggc

SEQ ID NO: 1614389 - RNA, 19 nt, Artificial Sequence
  Description of Artificial Sequence: Synthetic oligonucleotide
gagaaaggaggaaugaaag

SEQ ID NO: 1614390 - RNA, 19 nt, Artificial Sequence
  Description of Artificial Sequence: Synthetic oligonucleotide
uuuucuucgggcucccacg

SEQ ID NO: 1614391 - RNA, 19 nt, Artificial Sequence
  Description of Artificial Sequence: Synthetic oligonucleotide
acuaugucgaacccugggg

SEQ ID NO: 1614392 - RNA, 19 nt, Artificial Sequence
  Description of Artificial Sequence: Synthetic oligonucleotide
agguuagucaaggaggggc

SEQ ID NO: 1614393 - RNA, 19 nt, Artificial Sequence
  Description of Artificial Sequence: Synthetic oligonucleotide
gauaauuuccaaccagaac

SEQ ID NO: 1614394 - RNA, 19 nt, Artificial Sequence
  Description of Artificial Sequence: Synthetic oligonucleotide
aaugcgccucuucaggagg

SEQ ID NO: 1614395 - RNA, 19 nt, Artificial Sequence
  Description of Artificial Sequence: Synthetic oligonucleotide
ugggccuugagaagaaagg

SEQ ID NO: 1614396 - RNA, 19 nt, Artificial Sequence
  Description of Artificial Sequence: Synthetic oligonucleotide
guagaugccaaauccuggg

SEQ ID NO: 1614397 - RNA, 19 nt, Artificial Sequence
  Description of Artificial Sequence: Synthetic oligonucleotide
cuagauaauuuccaaccag

SEQ ID NO: 1614398 - RNA, 19 nt, Artificial Sequence
  Description of Artificial Sequence: Synthetic oligonucleotide
uacguuuuggccuuugccu

SEQ ID NO: 1614399 - RNA, 19 nt, Artificial Sequence
  Description of Artificial Sequence: Synthetic oligonucleotide
ggaaguagaugccaaaucc

SEQ ID NO: 1614400 - RNA, 19 nt, Artificial Sequence
  Description of Artificial Sequence: Synthetic oligonucleotide
guguuacucuccuuaaugg

SEQ ID NO: 1614401 - RNA, 19 nt, Artificial Sequence
  Description of Artificial Sequence: Synthetic oligonucleotide
uucaggagggcuucggccg

SEQ ID NO: 1614402 - RNA, 19 nt, Artificial Sequence
  Description of Artificial Sequence: Synthetic oligonucleotide
auccaggauauuuucuucg

SEQ ID NO: 1614403 - RNA, 19 nt, Artificial Sequence
  Description of Artificial Sequence: Synthetic oligonucleotide
caggauauuuucuucgggc

SEQ ID NO: 1614404 - RNA, 19 nt, Artificial Sequence
  Description of Artificial Sequence: Synthetic oligonucleotide
aagggguguaaaguuaagg

SEQ ID NO: 1614405 - RNA, 19 nt, Artificial Sequence
  Description of Artificial Sequence: Synthetic oligonucleotide
uagaacucuagauaauuuc

SEQ ID NO: 1614406 - RNA, 19 nt, Artificial Sequence
  Description of Artificial Sequence: Synthetic oligonucleotide
uuacucuccuuaaugguga

SEQ ID NO: 1614407 - RNA, 19 nt, Artificial Sequence
  Description of Artificial Sequence: Synthetic oligonucleotide
uucacgagguauuccaugc

SEQ ID NO: 1614408 - RNA, 19 nt, Artificial Sequence
  Description of Artificial Sequence: Synthetic oligonucleotide
gagagcuccauguugacuc

SEQ ID NO: 1614409 - RNA, 19 nt, Artificial Sequence
  Description of Artificial Sequence: Synthetic oligonucleotide
cuguguuugaucacccugg

SEQ ID NO: 1614410 - RNA, 19 nt, Artificial Sequence
  Description of Artificial Sequence: Synthetic oligonucleotide
caagauucuggccacuggg

SEQ ID NO: 1614411 - RNA, 19 nt, Artificial Sequence
  Description of Artificial Sequence: Synthetic oligonucleotide
auuccaugcguccuuugcg

SEQ ID NO: 1614412 - RNA, 19 nt, Artificial Sequence
  Description of Artificial Sequence: Synthetic oligonucleotide
agggguguaaaguuaagga

SEQ ID NO: 1614413 - RNA, 19 nt, Artificial Sequence
  Description of Artificial Sequence: Synthetic oligonucleotide
uuaauggugacggucaaaa

SEQ ID NO: 1614414 - RNA, 19 nt, Artificial Sequence
  Description of Artificial Sequence: Synthetic oligonucleotide
uauuguaccaggucugagu

SEQ ID NO: 1614415 - RNA, 19 nt, Artificial Sequence
  Description of Artificial Sequence: Synthetic oligonucleotide
cacaccauauuguaccagg

SEQ ID NO: 1614416 - RNA, 19 nt, Artificial Sequence
  Description of Artificial Sequence: Synthetic oligonucleotide
uccaggauauuuucuucgg

SEQ ID NO: 1614417 - RNA, 19 nt, Artificial Sequence
  Description of Artificial Sequence: Synthetic oligonucleotide
aauccuggggugaucggcc

SEQ ID NO: 1614418 - RNA, 19 nt, Artificial Sequence
  Description of Artificial Sequence: Synthetic oligonucleotide
caggaauucaucuuuucuc

SEQ ID NO: 1614419 - RNA, 19 nt, Artificial Sequence
  Description of Artificial Sequence: Synthetic oligonucleotide
caucuuuucuccuuaaaga

SEQ ID NO: 1614420 - RNA, 19 nt, Artificial Sequence
  Description of Artificial Sequence: Synthetic oligonucleotide
auaacauauuuacaucuaa

SEQ ID NO: 1614421 - RNA, 19 nt, Artificial Sequence
  Description of Artificial Sequence: Synthetic oligonucleotide
gacuggucacaccauauug

SEQ ID NO: 1614422 - RNA, 19 nt, Artificial Sequence
  Description of Artificial Sequence: Synthetic oligonucleotide
aggaaugaaagggacuugg

SEQ ID NO: 1614423 - RNA, 19 nt, Artificial Sequence
  Description of Artificial Sequence: Synthetic oligonucleotide
uucccuuuccucaaaggcu

SEQ ID NO: 1614424 - RNA, 19 nt, Artificial Sequence
  Description of Artificial Sequence: Synthetic oligonucleotide
acuaagccacguuugagcu

SEQ ID NO: 1614425 - RNA, 19 nt, Artificial Sequence
  Description of Artificial Sequence: Synthetic oligonucleotide
cacuaagccacguuugagc

SEQ ID NO: 1614426 - RNA, 19 nt, Artificial Sequence
  Description of Artificial Sequence: Synthetic oligonucleotide
ugggcuugucaucuauucg

SEQ ID NO: 1614427 - RNA, 19 nt, Artificial Sequence
  Description of Artificial Sequence: Synthetic oligonucleotide
aaguagaugccaaauccug

SEQ ID NO: 1614428 - RNA, 19 nt, Artificial Sequence
  Description of Artificial Sequence: Synthetic oligonucleotide
uaagccacguuugagcuca

SEQ ID NO: 1614429 - RNA, 19 nt, Artificial Sequence
  Description of Artificial Sequence: Synthetic oligonucleotide
uccaagacucuuccucugg

SEQ ID NO: 1614430 - RNA, 19 nt, Artificial Sequence
  Description of Artificial Sequence: Synthetic oligonucleotide
uguuccgaaggcccucucg

SEQ ID NO: 1614431 - RNA, 19 nt, Artificial Sequence
  Description of Artificial Sequence: Synthetic oligonucleotide
acaucuaauagaaaauaga

SEQ ID NO: 1614432 - RNA, 19 nt, Artificial Sequence
  Description of Artificial Sequence: Synthetic oligonucleotide
aggauauuuucuucgggcu

SEQ ID NO: 1614433 - RNA, 19 nt, Artificial Sequence
  Description of Artificial Sequence: Synthetic oligonucleotide
uugagguauucuccaaggc

SEQ ID NO: 1614434 - RNA, 19 nt, Artificial Sequence
  Description of Artificial Sequence: Synthetic oligonucleotide
auuuagauauuuucuuaau

SEQ ID NO: 1614435 - RNA, 19 nt, Artificial Sequence
  Description of Artificial Sequence: Synthetic oligonucleotide
uuucacgagguauuccaug

SEQ ID NO: 1614436 - RNA, 19 nt, Artificial Sequence
  Description of Artificial Sequence: Synthetic oligonucleotide
gauccuggcgaugagggag

SEQ ID NO: 1614437 - RNA, 19 nt, Artificial Sequence
  Description of Artificial Sequence: Synthetic oligonucleotide
aagcaagcgagcauccagg

SEQ ID NO: 1614438 - RNA, 19 nt, Artificial Sequence
  Description of Artificial Sequence: Synthetic oligonucleotide
ucuucgggcucccacgugc

SEQ ID NO: 1614439 - RNA, 19 nt, Artificial Sequence
  Description of Artificial Sequence: Synthetic oligonucleotide
ggguaccugaacuaugucg

SEQ ID NO: 1614440 - RNA, 19 nt, Artificial Sequence
  Description of Artificial Sequence: Synthetic oligonucleotide
uauucgacuggcaccuccc

SEQ ID NO: 1614441 - RNA, 19 nt, Artificial Sequence
  Description of Artificial Sequence: Synthetic oligonucleotide
uaugucgaacccuggggcc

SEQ ID NO: 1614442 - RNA, 19 nt, Artificial Sequence
  Description of Artificial Sequence: Synthetic oligonucleotide
guuaaggacaggaccagcc

SEQ ID NO: 1614443 - RNA, 19 nt, Artificial Sequence
  Description of Artificial Sequence: Synthetic oligonucleotide
ucacgagguauuccaugcg

SEQ ID NO: 1614444 - RNA, 19 nt, Artificial Sequence
  Description of Artificial Sequence: Synthetic oligonucleotide
aauaacauauuuacaucua

SEQ ID NO: 1614445 - RNA, 19 nt, Artificial Sequence
  Description of Artificial Sequence: Synthetic oligonucleotide
guuccgaaggcccucucgg

SEQ ID NO: 1614446 - RNA, 19 nt, Artificial Sequence
  Description of Artificial Sequence: Synthetic oligonucleotide
aguagaugccaaauccugg

SEQ ID NO: 1614447 - RNA, 19 nt, Artificial Sequence
  Description of Artificial Sequence: Synthetic oligonucleotide
uguguuugaucacccuggc

SEQ ID NO: 1614448 - RNA, 19 nt, Artificial Sequence
  Description of Artificial Sequence: Synthetic oligonucleotide
cauuucacgagguauucca

SEQ ID NO: 1614449 - RNA, 19 nt, Artificial Sequence
  Description of Artificial Sequence: Synthetic oligonucleotide
ucacgcuguggccugcugg

SEQ ID NO: 1614450 - RNA, 19 nt, Artificial Sequence
  Description of Artificial Sequence: Synthetic oligonucleotide
cagacaacuugcccgaggc

SEQ ID NO: 1614451 - RNA, 19 nt, Artificial Sequence
  Description of Artificial Sequence: Synthetic oligonucleotide
uccauguugacucgccgcu

SEQ ID NO: 1614452 - RNA, 19 nt, Artificial Sequence
  Description of Artificial Sequence: Synthetic oligonucleotide
aggccuuguguuccgaagg

SEQ ID NO: 1614453 - RNA, 19 nt, Artificial Sequence
  Description of Artificial Sequence: Synthetic oligonucleotide
ugggguaccugaacuaugu

SEQ ID NO: 1614454 - RNA, 19 nt, Artificial Sequence
  Description of Artificial Sequence: Synthetic oligonucleotide
aaguuaaggacaggaccag

SEQ ID NO: 1614455 - RNA, 19 nt, Artificial Sequence
  Description of Artificial Sequence: Synthetic oligonucleotide
ucgacuggcaccucccgag

SEQ ID NO: 1614456 - RNA, 19 nt, Artificial Sequence
  Description of Artificial Sequence: Synthetic oligonucleotide
cuucaggagggcuucggcc

SEQ ID NO: 1614457 - RNA, 19 nt, Artificial Sequence
  Description of Artificial Sequence: Synthetic oligonucleotide
auccggaugccucuggcag

SEQ ID NO: 1614458 - RNA, 19 nt, Artificial Sequence
  Description of Artificial Sequence: Synthetic oligonucleotide
caagcaagcgagcauccag

SEQ ID NO: 1614459 - RNA, 19 nt, Artificial Sequence
  Description of Artificial Sequence: Synthetic oligonucleotide
aguuaaggacaggaccagc

SEQ ID NO: 1614460 - RNA, 19 nt, Artificial Sequence
  Description of Artificial Sequence: Synthetic oligonucleotide
cuucgagcaagcuggauca

SEQ ID NO: 1614461 - RNA, 19 nt, Artificial Sequence
  Description of Artificial Sequence: Synthetic oligonucleotide
uaagggauccggaugccuc

SEQ ID NO: 1614462 - RNA, 19 nt, Artificial Sequence
  Description of Artificial Sequence: Synthetic oligonucleotide
cuggcgaugagggagggcc

SEQ ID NO: 1614463 - RNA, 19 nt, Artificial Sequence
  Description of Artificial Sequence: Synthetic oligonucleotide
aguccccaugucccgauac

SEQ ID NO: 1614464 - RNA, 19 nt, Artificial Sequence
  Description of Artificial Sequence: Synthetic oligonucleotide
ugggaaagggguguaaagu

SEQ ID NO: 1614465 - RNA, 19 nt, Artificial Sequence
  Description of Artificial Sequence: Synthetic oligonucleotide
gaaugcgccucuucaggag

SEQ ID NO: 1614466 - RNA, 19 nt, Artificial Sequence
  Description of Artificial Sequence: Synthetic oligonucleotide
agcaagcuggaucacgcug

SEQ ID NO: 1614467 - RNA, 19 nt, Artificial Sequence
  Description of Artificial Sequence: Synthetic oligonucleotide
agcuuccugccuuugaggu

SEQ ID NO: 1614468 - RNA, 19 nt, Artificial Sequence
  Description of Artificial Sequence: Synthetic oligonucleotide
aucuauucgacuggcaccu

SEQ ID NO: 1614469 - RNA, 19 nt, Artificial Sequence
  Description of Artificial Sequence: Synthetic oligonucleotide
guaaaguuaaggacaggac

SEQ ID NO: 1614470 - RNA, 19 nt, Artificial Sequence
  Description of Artificial Sequence: Synthetic oligonucleotide
uuccaugcguccuuugcga

SEQ ID NO: 1614471 - RNA, 19 nt, Artificial Sequence
  Description of Artificial Sequence: Synthetic oligonucleotide
gguguaaaguuaaggacag

SEQ ID NO: 1614472 - RNA, 19 nt, Artificial Sequence
  Description of Artificial Sequence: Synthetic oligonucleotide
cuugaguccccaugucccg

SEQ ID NO: 1614473 - RNA, 19 nt, Artificial Sequence
  Description of Artificial Sequence: Synthetic oligonucleotide
uuccauuucacgagguauu

SEQ ID NO: 1614474 - RNA, 19 nt, Artificial Sequence
  Description of Artificial Sequence: Synthetic oligonucleotide
auguugacucgccgcuucc

SEQ ID NO: 1614475 - RNA, 19 nt, Artificial Sequence
  Description of Artificial Sequence: Synthetic oligonucleotide
cuauucgacuggcaccucc

SEQ ID NO: 1614476 - RNA, 19 nt, Artificial Sequence
  Description of Artificial Sequence: Synthetic oligonucleotide
uuagucaaggaggggcucc

SEQ ID NO: 1614477 - RNA, 19 nt, Artificial Sequence
  Description of Artificial Sequence: Synthetic oligonucleotide
ggucacaucugugacaacc

SEQ ID NO: 1614478 - RNA, 19 nt, Artificial Sequence
  Description of Artificial Sequence: Synthetic oligonucleotide
caugucccgauacaggcuc

SEQ ID NO: 1614479 - RNA, 19 nt, Artificial Sequence
  Description of Artificial Sequence: Synthetic oligonucleotide
aauuuccaaccagaacuga

SEQ ID NO: 1614480 - RNA, 19 nt, Artificial Sequence
  Description of Artificial Sequence: Synthetic oligonucleotide
cuccauguugacucgccgc

SEQ ID NO: 1614481 - RNA, 19 nt, Artificial Sequence
  Description of Artificial Sequence: Synthetic oligonucleotide
aggaggggcuccaagacuc

SEQ ID NO: 1614482 - RNA, 19 nt, Artificial Sequence
  Description of Artificial Sequence: Synthetic oligonucleotide
aaauagaacucuagauaau

SEQ ID NO: 1614483 - RNA, 19 nt, Artificial Sequence
  Description of Artificial Sequence: Synthetic oligonucleotide
uuggguccccgcuucuugg

SEQ ID NO: 1614484 - RNA, 19 nt, Artificial Sequence
  Description of Artificial Sequence: Synthetic oligonucleotide
auacaggcuccccacugag

SEQ ID NO: 1614485 - RNA, 19 nt, Artificial Sequence
  Description of Artificial Sequence: Synthetic oligonucleotide
agaggaggugucauccagc

SEQ ID NO: 1614486 - RNA, 19 nt, Artificial Sequence
  Description of Artificial Sequence: Synthetic oligonucleotide
gggguguaaaguuaaggac

SEQ ID NO: 1614487 - RNA, 19 nt, Artificial Sequence
  Description of Artificial Sequence: Synthetic oligonucleotide
aagggacuugggaaagggg

SEQ ID NO: 1614488 - RNA, 19 nt, Artificial Sequence
  Description of Artificial Sequence: Synthetic oligonucleotide
ugguccugggcucccaccc

SEQ ID NO: 1614489 - RNA, 19 nt, Artificial Sequence
  Description of Artificial Sequence: Synthetic oligonucleotide
ugucaucuauucgacuggc

SEQ ID NO: 1614490 - RNA, 19 nt, Artificial Sequence
  Description of Artificial Sequence: Synthetic oligonucleotide
auucauacguuuuggccuu

SEQ ID NO: 1614491 - RNA, 19 nt, Artificial Sequence
  Description of Artificial Sequence: Synthetic oligonucleotide
gauucuggccacugggauc

SEQ ID NO: 1614492 - RNA, 19 nt, Artificial Sequence
  Description of Artificial Sequence: Synthetic oligonucleotide
ucgagcaagcuggaucacg

SEQ ID NO: 1614493 - RNA, 19 nt, Artificial Sequence
  Description of Artificial Sequence: Synthetic oligonucleotide
gggcccuggaaguagaugc

SEQ ID NO: 1614494 - RNA, 19 nt, Artificial Sequence
  Description of Artificial Sequence: Synthetic oligonucleotide
uggucacaccauauuguac

SEQ ID NO: 1614495 - RNA, 19 nt, Artificial Sequence
  Description of Artificial Sequence: Synthetic oligonucleotide
agcacuaagccacguuuga

SEQ ID NO: 1614496 - RNA, 19 nt, Artificial Sequence
  Description of Artificial Sequence: Synthetic oligonucleotide
auauuuucuucgggcuccc

SEQ ID NO: 1614497 - RNA, 19 nt, Artificial Sequence
  Description of Artificial Sequence: Synthetic oligonucleotide
cacguuugagcucacucuc

SEQ ID NO: 1614498 - RNA, 19 nt, Artificial Sequence
  Description of Artificial Sequence: Synthetic oligonucleotide
ucauccagcuuccugccuu

SEQ ID NO: 1614499 - RNA, 19 nt, Artificial Sequence
  Description of Artificial Sequence: Synthetic oligonucleotide
cacgcuguggccugcuggg

SEQ ID NO: 1614500 - RNA, 19 nt, Artificial Sequence
  Description of Artificial Sequence: Synthetic oligonucleotide
ggguaagggauccggaugc

SEQ ID NO: 1614501 - RNA, 19 nt, Artificial Sequence
  Description of Artificial Sequence: Synthetic oligonucleotide
uggggauaggccuuguguu

SEQ ID NO: 1614502 - RNA, 19 nt, Artificial Sequence
  Description of Artificial Sequence: Synthetic oligonucleotide
accgccgagagcuccaugu

SEQ ID NO: 1614503 - RNA, 19 nt, Artificial Sequence
  Description of Artificial Sequence: Synthetic oligonucleotide
auucgacuggcaccucccg

SEQ ID NO: 1614504 - RNA, 19 nt, Artificial Sequence
  Description of Artificial Sequence: Synthetic oligonucleotide
agauucuggccacugggau

SEQ ID NO: 1614505 - RNA, 19 nt, Artificial Sequence
  Description of Artificial Sequence: Synthetic oligonucleotide
cauacguuuuggccuuugc

SEQ ID NO: 1614506 - RNA, 19 nt, Artificial Sequence
  Description of Artificial Sequence: Synthetic oligonucleotide
gcuaggacuggucacacca

SEQ ID NO: 1614507 - RNA, 19 nt, Artificial Sequence
  Description of Artificial Sequence: Synthetic oligonucleotide
ggguguaaaguuaaggaca

SEQ ID NO: 1614508 - RNA, 19 nt, Artificial Sequence
  Description of Artificial Sequence: Synthetic oligonucleotide
agauaauuuccaaccagaa

SEQ ID NO: 1614509 - RNA, 19 nt, Artificial Sequence
  Description of Artificial Sequence: Synthetic oligonucleotide
acuggucacaccauauugu

SEQ ID NO: 1614510 - RNA, 19 nt, Artificial Sequence
  Description of Artificial Sequence: Synthetic oligonucleotide
gguaccugaacuaugucga

SEQ ID NO: 1614511 - RNA, 19 nt, Artificial Sequence
  Description of Artificial Sequence: Synthetic oligonucleotide
cacgugcuguacuucugcg

SEQ ID NO: 1614512 - RNA, 19 nt, Artificial Sequence
  Description of Artificial Sequence: Synthetic oligonucleotide
ucccgauacaggcucccca

SEQ ID NO: 1614513 - RNA, 19 nt, Artificial Sequence
  Description of Artificial Sequence: Synthetic oligonucleotide
ggaucuguccugcaggcac

SEQ ID NO: 1614514 - RNA, 19 nt, Artificial Sequence
  Description of Artificial Sequence: Synthetic oligonucleotide
guugacucgccgcuucccc

SEQ ID NO: 1614515 - RNA, 19 nt, Artificial Sequence
  Description of Artificial Sequence: Synthetic oligonucleotide
acuugcccgaggccucugc

SEQ ID NO: 1614516 - RNA, 19 nt, Artificial Sequence
  Description of Artificial Sequence: Synthetic oligonucleotide
acguuugagcucacucucc

SEQ ID NO: 1614517 - RNA, 19 nt, Artificial Sequence
  Description of Artificial Sequence: Synthetic oligonucleotide
auagagcuccaucucccgu

SEQ ID NO: 1614518 - RNA, 19 nt, Artificial Sequence
  Description of Artificial Sequence: Synthetic oligonucleotide
uucgacuggcaccucccga

SEQ ID NO: 1614519 - RNA, 19 nt, Artificial Sequence
  Description of Artificial Sequence: Synthetic oligonucleotide
ccuugaguccccauguccc

SEQ ID NO: 1614520 - RNA, 19 nt, Artificial Sequence
  Description of Artificial Sequence: Synthetic oligonucleotide
uccccaugucccgauacag

SEQ ID NO: 1614521 - RNA, 19 nt, Artificial Sequence
  Description of Artificial Sequence: Synthetic oligonucleotide
uuuugggcuuggguccucg

SEQ ID NO: 1614522 - RNA, 19 nt, Artificial Sequence
  Description of Artificial Sequence: Synthetic oligonucleotide
caugcguccuuugcgaaug

SEQ ID NO: 1614523 - RNA, 19 nt, Artificial Sequence
  Description of Artificial Sequence: Synthetic oligonucleotide
gaaagguuuugggcuuggg

SEQ ID NO: 1614524 - RNA, 19 nt, Artificial Sequence
  Description of Artificial Sequence: Synthetic oligonucleotide
ccuuguguuccgaaggccc

SEQ ID NO: 1614525 - RNA, 19 nt, Artificial Sequence
  Description of Artificial Sequence: Synthetic oligonucleotide
guauucuccaaggccauca

SEQ ID NO: 1614526 - RNA, 19 nt, Artificial Sequence
  Description of Artificial Sequence: Synthetic oligonucleotide
gcuuccaggagcaagaaaa

SEQ ID NO: 1614527 - RNA, 19 nt, Artificial Sequence
  Description of Artificial Sequence: Synthetic oligonucleotide
ucacaccauauuguaccag

SEQ ID NO: 1614528 - RNA, 19 nt, Artificial Sequence
  Description of Artificial Sequence: Synthetic oligonucleotide
ugguccguguuacucuccu

SEQ ID NO: 1614529 - RNA, 19 nt, Artificial Sequence
  Description of Artificial Sequence: Synthetic oligonucleotide
cuugguccguguuacucuc

SEQ ID NO: 1614530 - RNA, 19 nt, Artificial Sequence
  Description of Artificial Sequence: Synthetic oligonucleotide
gaaguagaugccaaauccu

SEQ ID NO: 1614531 - RNA, 19 nt, Artificial Sequence
  Description of Artificial Sequence: Synthetic oligonucleotide
gaacuaugucgaacccugg

SEQ ID NO: 1614532 - RNA, 19 nt, Artificial Sequence
  Description of Artificial Sequence: Synthetic oligonucleotide
uccauuucacgagguauuc

SEQ ID NO: 1614533 - RNA, 19 nt, Artificial Sequence
  Description of Artificial Sequence: Synthetic oligonucleotide
acgagguauuccaugcguc

SEQ ID NO: 1614534 - RNA, 19 nt, Artificial Sequence
  Description of Artificial Sequence: Synthetic oligonucleotide
guuugagcucacucucccc

SEQ ID NO: 1614535 - RNA, 19 nt, Artificial Sequence
  Description of Artificial Sequence: Synthetic oligonucleotide
acugggauccuggcgauga

SEQ ID NO: 1614536 - RNA, 19 nt, Artificial Sequence
  Description of Artificial Sequence: Synthetic oligonucleotide
gggcuugucaucuauucga

SEQ ID NO: 1614537 - RNA, 19 nt, Artificial Sequence
  Description of Artificial Sequence: Synthetic oligonucleotide
ugaucacccuggcuggaaa

SEQ ID NO: 1614538 - RNA, 19 nt, Artificial Sequence
  Description of Artificial Sequence: Synthetic oligonucleotide
cccaugucccgauacaggc

SEQ ID NO: 1614539 - RNA, 19 nt, Artificial Sequence
  Description of Artificial Sequence: Synthetic oligonucleotide
auagaacucuagauaauuu

SEQ ID NO: 1614540 - RNA, 19 nt, Artificial Sequence
  Description of Artificial Sequence: Synthetic oligonucleotide
gucacccaagauucuggcc

SEQ ID NO: 1614541 - RNA, 19 nt, Artificial Sequence
  Description of Artificial Sequence: Synthetic oligonucleotide
caggcacuggugcugcucc

SEQ ID NO: 1614542 - RNA, 19 nt, Artificial Sequence
  Description of Artificial Sequence: Synthetic oligonucleotide
uggaucacgcuguggccug

SEQ ID NO: 1614543 - RNA, 19 nt, Artificial Sequence
  Description of Artificial Sequence: Synthetic oligonucleotide
ugggucacccaagauucug

SEQ ID NO: 1614544 - RNA, 19 nt, Artificial Sequence
  Description of Artificial Sequence: Synthetic oligonucleotide
acguuuuggccuuugccuu

SEQ ID NO: 1614545 - RNA, 19 nt, Artificial Sequence
  Description of Artificial Sequence: Synthetic oligonucleotide
ucggccgcuuccaggagca

SEQ ID NO: 1614546 - RNA, 19 nt, Artificial Sequence
  Description of Artificial Sequence: Synthetic oligonucleotide
ucccacgugcuguacuucu

SEQ ID NO: 1614547 - RNA, 19 nt, Artificial Sequence
  Description of Artificial Sequence: Synthetic oligonucleotide
gcgaaugcgccucuucagg

SEQ ID NO: 1614548 - RNA, 19 nt, Artificial Sequence
  Description of Artificial Sequence: Synthetic oligonucleotide
uccccgguggggauaggcc

SEQ ID NO: 1614549 - RNA, 19 nt, Artificial Sequence
  Description of Artificial Sequence: Synthetic oligonucleotide
gacaacuugcccgaggccu

SEQ ID NO: 1614550 - RNA, 19 nt, Artificial Sequence
  Description of Artificial Sequence: Synthetic oligonucleotide
agcaagcgagcauccagga

SEQ ID NO: 1614551 - RNA, 19 nt, Artificial Sequence
  Description of Artificial Sequence: Synthetic oligonucleotide
uccguguuacucuccuuaa

SEQ ID NO: 1614552 - RNA, 19 nt, Artificial Sequence
  Description of Artificial Sequence: Synthetic oligonucleotide
agaaagguuuugggcuugg

SEQ ID NO: 1614553 - RNA, 19 nt, Artificial Sequence
  Description of Artificial Sequence: Synthetic oligonucleotide
agggcuucggccgcgaaca

SEQ ID NO: 1614554 - RNA, 19 nt, Artificial Sequence
  Description of Artificial Sequence: Synthetic oligonucleotide
gaagccuugguccguguua

SEQ ID NO: 1614555 - RNA, 19 nt, Artificial Sequence
  Description of Artificial Sequence: Synthetic oligonucleotide
cugcaagcaagcgagcauc

SEQ ID NO: 1614556 - RNA, 19 nt, Artificial Sequence
  Description of Artificial Sequence: Synthetic oligonucleotide
uccuuugcgaaugcgccuc

SEQ ID NO: 1614557 - RNA, 19 nt, Artificial Sequence
  Description of Artificial Sequence: Synthetic oligonucleotide
augcguccuuugcgaaugc

SEQ ID NO: 1614558 - RNA, 19 nt, Artificial Sequence
  Description of Artificial Sequence: Synthetic oligonucleotide
uguugacucgccgcuuccc

SEQ ID NO: 1614559 - RNA, 19 nt, Artificial Sequence
  Description of Artificial Sequence: Synthetic oligonucleotide
acgugcuguacuucugcga

SEQ ID NO: 1614560 - RNA, 19 nt, Artificial Sequence
  Description of Artificial Sequence: Synthetic oligonucleotide
ugcguccuuugcgaaugcg

SEQ ID NO: 1614561 - RNA, 19 nt, Artificial Sequence
  Description of Artificial Sequence: Synthetic oligonucleotide
acucuccuuaauggugacg

SEQ ID NO: 1614562 - RNA, 19 nt, Artificial Sequence
  Description of Artificial Sequence: Synthetic oligonucleotide
acaacuugcccgaggccuc

SEQ ID NO: 1614563 - RNA, 19 nt, Artificial Sequence
  Description of Artificial Sequence: Synthetic oligonucleotide
uggccugcugggaauuuuc

SEQ ID NO: 1614564 - RNA, 19 nt, Artificial Sequence
  Description of Artificial Sequence: Synthetic oligonucleotide
cuaagccacguuugagcuc

SEQ ID NO: 1614565 - RNA, 19 nt, Artificial Sequence
  Description of Artificial Sequence: Synthetic oligonucleotide
uugguccguguuacucucc

SEQ ID NO: 1614566 - RNA, 19 nt, Artificial Sequence
  Description of Artificial Sequence: Synthetic oligonucleotide
uucggccgcgaacacccgc

SEQ ID NO: 1614567 - RNA, 19 nt, Artificial Sequence
  Description of Artificial Sequence: Synthetic oligonucleotide
ucugccgagcuaggacugg

SEQ ID NO: 1614568 - RNA, 19 nt, Artificial Sequence
  Description of Artificial Sequence: Synthetic oligonucleotide
cugggguaccugaacuaug

SEQ ID NO: 1614569 - RNA, 19 nt, Artificial Sequence
  Description of Artificial Sequence: Synthetic oligonucleotide
ccaggauauuuucuucggg

SEQ ID NO: 1614570 - RNA, 19 nt, Artificial Sequence
  Description of Artificial Sequence: Synthetic oligonucleotide
ucggccgcgaacacccgcu

SEQ ID NO: 1614571 - RNA, 19 nt, Artificial Sequence
  Description of Artificial Sequence: Synthetic oligonucleotide
cuugcccgaggccucugcc

SEQ ID NO: 1614572 - RNA, 19 nt, Artificial Sequence
  Description of Artificial Sequence: Synthetic oligonucleotide
ggucacccaagauucuggc

SEQ ID NO: 1614573 - RNA, 19 nt, Artificial Sequence
  Description of Artificial Sequence: Synthetic oligonucleotide
cuggcaccucccgaggugg

SEQ ID NO: 1614574 - RNA, 19 nt, Artificial Sequence
  Description of Artificial Sequence: Synthetic oligonucleotide
ucucgggcccuggaaguag

SEQ ID NO: 1614575 - RNA, 19 nt, Artificial Sequence
  Description of Artificial Sequence: Synthetic oligonucleotide
uacucuccuuaauggugac

SEQ ID NO: 1614576 - RNA, 19 nt, Artificial Sequence
  Description of Artificial Sequence: Synthetic oligonucleotide
guguaaaguuaaggacagg

SEQ ID NO: 1614577 - RNA, 19 nt, Artificial Sequence
  Description of Artificial Sequence: Synthetic oligonucleotide
uccggaugccucuggcaga

SEQ ID NO: 1614578 - RNA, 19 nt, Artificial Sequence
  Description of Artificial Sequence: Synthetic oligonucleotide
ccuucgagcaagcuggauc

SEQ ID NO: 1614579 - RNA, 19 nt, Artificial Sequence
  Description of Artificial Sequence: Synthetic oligonucleotide
ucauacguuuuggccuuug

SEQ ID NO: 1614580 - RNA, 19 nt, Artificial Sequence
  Description of Artificial Sequence: Synthetic oligonucleotide
gucacaucugugacaacca

SEQ ID NO: 1614581 - RNA, 19 nt, Artificial Sequence
  Description of Artificial Sequence: Synthetic oligonucleotide
agcauccaggauauuuucu

SEQ ID NO: 1614582 - RNA, 19 nt, Artificial Sequence
  Description of Artificial Sequence: Synthetic oligonucleotide
acucuccccuguucugguc

SEQ ID NO: 1614583 - RNA, 19 nt, Artificial Sequence
  Description of Artificial Sequence: Synthetic oligonucleotide
cacugggcucucccaaggg

SEQ ID NO: 1614584 - RNA, 19 nt, Artificial Sequence
  Description of Artificial Sequence: Synthetic oligonucleotide
uuugggcuuggguccucgc

SEQ ID NO: 1614585 - RNA, 19 nt, Artificial Sequence
  Description of Artificial Sequence: Synthetic oligonucleotide
cucugccgagcuaggacug

SEQ ID NO: 1614586 - RNA, 19 nt, Artificial Sequence
  Description of Artificial Sequence: Synthetic oligonucleotide
uccaugcguccuuugcgaa

SEQ ID NO: 1614587 - RNA, 19 nt, Artificial Sequence
  Description of Artificial Sequence: Synthetic oligonucleotide
ugccucuggcagaaucacu

SEQ ID NO: 1614588 - RNA, 19 nt, Artificial Sequence
  Description of Artificial Sequence: Synthetic oligonucleotide
gcuucggccgcgaacaccc

SEQ ID NO: 1614589 - RNA, 19 nt, Artificial Sequence
  Description of Artificial Sequence: Synthetic oligonucleotide
ucggccuggguaagggauc

SEQ ID NO: 1614590 - RNA, 19 nt, Artificial Sequence
  Description of Artificial Sequence: Synthetic oligonucleotide
gagggcuucggccgcgaac

SEQ ID NO: 1614591 - RNA, 19 nt, Artificial Sequence
  Description of Artificial Sequence: Synthetic oligonucleotide
acaccauauuguaccaggu

SEQ ID NO: 1614592 - RNA, 19 nt, Artificial Sequence
  Description of Artificial Sequence: Synthetic oligonucleotide
guauuccaugcguccuuug

SEQ ID NO: 1614593 - RNA, 19 nt, Artificial Sequence
  Description of Artificial Sequence: Synthetic oligonucleotide
guacuucugcgaccagccc

SEQ ID NO: 1614594 - RNA, 19 nt, Artificial Sequence
  Description of Artificial Sequence: Synthetic oligonucleotide
ccaagacucuuccucuggg

SEQ ID NO: 1614595 - RNA, 19 nt, Artificial Sequence
  Description of Artificial Sequence: Synthetic oligonucleotide
cguccuuugcgaaugcgcc

SEQ ID NO: 1614596 - RNA, 19 nt, Artificial Sequence
  Description of Artificial Sequence: Synthetic oligonucleotide
auaggccuuguguuccgaa

SEQ ID NO: 1614597 - RNA, 19 nt, Artificial Sequence
  Description of Artificial Sequence: Synthetic oligonucleotide
gggauaggccuuguguucc

SEQ ID NO: 1614598 - RNA, 19 nt, Artificial Sequence
  Description of Artificial Sequence: Synthetic oligonucleotide
cucccaagggccucuguga

SEQ ID NO: 1614599 - RNA, 19 nt, Artificial Sequence
  Description of Artificial Sequence: Synthetic oligonucleotide
ugucccgauacaggcuccc

SEQ ID NO: 1614600 - RNA, 19 nt, Artificial Sequence
  Description of Artificial Sequence: Synthetic oligonucleotide
ggauaggccuuguguuccg

SEQ ID NO: 1614601 - RNA, 19 nt, Artificial Sequence
  Description of Artificial Sequence: Synthetic oligonucleotide
cgagcaagcuggaucacgc

SEQ ID NO: 1614602 - RNA, 19 nt, Artificial Sequence
  Description of Artificial Sequence: Synthetic oligonucleotide
cgagguauuccaugcgucc

SEQ ID NO: 1614603 - RNA, 19 nt, Artificial Sequence
  Description of Artificial Sequence: Synthetic oligonucleotide
ccagcuuccugccuuugag

SEQ ID NO: 1614604 - RNA, 19 nt, Artificial Sequence
  Description of Artificial Sequence: Synthetic oligonucleotide
cugagaaaggaggaaugaa

SEQ ID NO: 1614605 - RNA, 19 nt, Artificial Sequence
  Description of Artificial Sequence: Synthetic oligonucleotide
uccuggggugaucggccug

SEQ ID NO: 1614606 - RNA, 19 nt, Artificial Sequence
  Description of Artificial Sequence: Synthetic oligonucleotide
augucccgauacaggcucc

SEQ ID NO: 1614607 - RNA, 19 nt, Artificial Sequence
  Description of Artificial Sequence: Synthetic oligonucleotide
ggccuuguguuccgaaggc

SEQ ID NO: 1614608 - RNA, 19 nt, Artificial Sequence
  Description of Artificial Sequence: Synthetic oligonucleotide
gggucacccaagauucugg

SEQ ID NO: 1614609 - RNA, 19 nt, Artificial Sequence
  Description of Artificial Sequence: Synthetic oligonucleotide
aggaccagccagaaggcaa

SEQ ID NO: 1614610 - RNA, 19 nt, Artificial Sequence
  Description of Artificial Sequence: Synthetic oligonucleotide
agaagccuugguccguguu

SEQ ID NO: 1614611 - RNA, 19 nt, Artificial Sequence
  Description of Artificial Sequence: Synthetic oligonucleotide
auuucacgagguauuccau

SEQ ID NO: 1614612 - RNA, 19 nt, Artificial Sequence
  Description of Artificial Sequence: Synthetic oligonucleotide
gccacguuugagcucacuc

SEQ ID NO: 1614613 - RNA, 19 nt, Artificial Sequence
  Description of Artificial Sequence: Synthetic oligonucleotide
cccagaggaggugucaucc

SEQ ID NO: 1614614 - RNA, 19 nt, Artificial Sequence
  Description of Artificial Sequence: Synthetic oligonucleotide
ucgggcucccacgugcugu

SEQ ID NO: 1614615 - RNA, 19 nt, Artificial Sequence
  Description of Artificial Sequence: Synthetic oligonucleotide
gaucggccuggguaaggga

SEQ ID NO: 1614616 - RNA, 19 nt, Artificial Sequence
  Description of Artificial Sequence: Synthetic oligonucleotide
uugaucacccuggcuggaa

SEQ ID NO: 1614617 - RNA, 19 nt, Artificial Sequence
  Description of Artificial Sequence: Synthetic oligonucleotide
gcccuuccauuucacgagg

SEQ ID NO: 1614618 - RNA, 19 nt, Artificial Sequence
  Description of Artificial Sequence: Synthetic oligonucleotide
ggggauaggccuuguguuc

SEQ ID NO: 1614619 - RNA, 19 nt, Artificial Sequence
  Description of Artificial Sequence: Synthetic oligonucleotide
gugagcugggcuugucauc

SEQ ID NO: 1614620 - RNA, 19 nt, Artificial Sequence
  Description of Artificial Sequence: Synthetic oligonucleotide
aucggccuggguaagggau

SEQ ID NO: 1614621 - RNA, 19 nt, Artificial Sequence
  Description of Artificial Sequence: Synthetic oligonucleotide
guuagucaaggaggggcuc

SEQ ID NO: 1614622 - RNA, 19 nt, Artificial Sequence
  Description of Artificial Sequence: Synthetic oligonucleotide
ugcuccccgguggggauag

SEQ ID NO: 1614623 - RNA, 19 nt, Artificial Sequence
  Description of Artificial Sequence: Synthetic oligonucleotide
uucgggcucccacgugcug

SEQ ID NO: 1614624 - RNA, 19 nt, Artificial Sequence
  Description of Artificial Sequence: Synthetic oligonucleotide
ugccgagcuaggacugguc

SEQ ID NO: 1614625 - RNA, 19 nt, Artificial Sequence
  Description of Artificial Sequence: Synthetic oligonucleotide
auccuggggugaucggccu

SEQ ID NO: 1614626 - RNA, 19 nt, Artificial Sequence
  Description of Artificial Sequence: Synthetic oligonucleotide
cuuccauuucacgagguau

SEQ ID NO: 1614627 - RNA, 19 nt, Artificial Sequence
  Description of Artificial Sequence: Synthetic oligonucleotide
ugccuucgagcaagcugga

SEQ ID NO: 1614628 - RNA, 19 nt, Artificial Sequence
  Description of Artificial Sequence: Synthetic oligonucleotide
uuguguuccgaaggcccuc

SEQ ID NO: 1614629 - RNA, 19 nt, Artificial Sequence
  Description of Artificial Sequence: Synthetic oligonucleotide
ccccaugucccgauacagg

SEQ ID NO: 1614630 - RNA, 19 nt, Artificial Sequence
  Description of Artificial Sequence: Synthetic oligonucleotide
guaccugaacuaugucgaa

SEQ ID NO: 1614631 - RNA, 19 nt, Artificial Sequence
  Description of Artificial Sequence: Synthetic oligonucleotide
cguuugagcucacucuccc

SEQ ID NO: 1614632 - RNA, 19 nt, Artificial Sequence
  Description of Artificial Sequence: Synthetic oligonucleotide
gguccccgcuucuuggagc

SEQ ID NO: 1614633 - RNA, 19 nt, Artificial Sequence
  Description of Artificial Sequence: Synthetic oligonucleotide
gcacuaagccacguuugag

SEQ ID NO: 1614634 - RNA, 19 nt, Artificial Sequence
  Description of Artificial Sequence: Synthetic oligonucleotide
cuuguguuccgaaggcccu

SEQ ID NO: 1614635 - RNA, 19 nt, Artificial Sequence
  Description of Artificial Sequence: Synthetic oligonucleotide
uccagggcaccuuggccuu

SEQ ID NO: 1614636 - RNA, 19 nt, Artificial Sequence
  Description of Artificial Sequence: Synthetic oligonucleotide
cacgagguauuccaugcgu

SEQ ID NO: 1614637 - RNA, 19 nt, Artificial Sequence
  Description of Artificial Sequence: Synthetic oligonucleotide
ggcuugucaucuauucgac

SEQ ID NO: 1614638 - RNA, 19 nt, Artificial Sequence
  Description of Artificial Sequence: Synthetic oligonucleotide
ugccaaauccuggggugau

SEQ ID NO: 1614639 - RNA, 19 nt, Artificial Sequence
  Description of Artificial Sequence: Synthetic oligonucleotide
cccgauacaggcuccccac

SEQ ID NO: 1614640 - RNA, 19 nt, Artificial Sequence
  Description of Artificial Sequence: Synthetic oligonucleotide
ggaggaaugaaagggacuu

SEQ ID NO: 1614641 - RNA, 19 nt, Artificial Sequence
  Description of Artificial Sequence: Synthetic oligonucleotide
gauaggccuuguguuccga

SEQ ID NO: 1614642 - RNA, 19 nt, Artificial Sequence
  Description of Artificial Sequence: Synthetic oligonucleotide
guccccaugucccgauaca

SEQ ID NO: 1614643 - RNA, 19 nt, Artificial Sequence
  Description of Artificial Sequence: Synthetic oligonucleotide
gcguccuuugcgaaugcgc

SEQ ID NO: 1614644 - RNA, 19 nt, Artificial Sequence
  Description of Artificial Sequence: Synthetic oligonucleotide
agaaggcaacagccaccca

SEQ ID NO: 1614645 - RNA, 19 nt, Artificial Sequence
  Description of Artificial Sequence: Synthetic oligonucleotide
caagacucuuccucugggu

SEQ ID NO: 1614646 - RNA, 19 nt, Artificial Sequence
  Description of Artificial Sequence: Synthetic oligonucleotide
cuucggccgcgaacacccg

SEQ ID NO: 1614647 - RNA, 19 nt, Artificial Sequence
  Description of Artificial Sequence: Synthetic oligonucleotide
gggugaucggccuggguaa

SEQ ID NO: 1614648 - RNA, 19 nt, Artificial Sequence
  Description of Artificial Sequence: Synthetic oligonucleotide
gggauccggaugccucugg

SEQ ID NO: 1614649 - RNA, 19 nt, Artificial Sequence
  Description of Artificial Sequence: Synthetic oligonucleotide
gccgagcuaggacugguca

SEQ ID NO: 1614650 - RNA, 19 nt, Artificial Sequence
  Description of Artificial Sequence: Synthetic oligonucleotide
cugaacuaugucgaacccu

SEQ ID NO: 1614651 - RNA, 19 nt, Artificial Sequence
  Description of Artificial Sequence: Synthetic oligonucleotide
gguaagggauccggaugcc

SEQ ID NO: 1614652 - RNA, 19 nt, Artificial Sequence
  Description of Artificial Sequence: Synthetic oligonucleotide
aacuugcccgaggccucug

SEQ ID NO: 1614653 - RNA, 19 nt, Artificial Sequence
  Description of Artificial Sequence: Synthetic oligonucleotide
gccgagagcuccauguuga

SEQ ID NO: 1614654 - RNA, 19 nt, Artificial Sequence
  Description of Artificial Sequence: Synthetic oligonucleotide
gucugaguccugccuucga

SEQ ID NO: 1614655 - RNA, 19 nt, Artificial Sequence
  Description of Artificial Sequence: Synthetic oligonucleotide
ucgggcccuggaaguagau

SEQ ID NO: 1614656 - RNA, 19 nt, Artificial Sequence
  Description of Artificial Sequence: Synthetic oligonucleotide
ccacagacaacuugcccga

SEQ ID NO: 1614657 - RNA, 19 nt, Artificial Sequence
  Description of Artificial Sequence: Synthetic oligonucleotide
ccgagcuaggacuggucac

SEQ ID NO: 1614658 - RNA, 19 nt, Artificial Sequence
  Description of Artificial Sequence: Synthetic oligonucleotide
cuggguaagggauccggau

SEQ ID NO: 1614659 - RNA, 19 nt, Artificial Sequence
  Description of Artificial Sequence: Synthetic oligonucleotide
ucuauucgacuggcaccuc

SEQ ID NO: 1614660 - RNA, 19 nt, Artificial Sequence
  Description of Artificial Sequence: Synthetic oligonucleotide
gagcaagcuggaucacgcu

SEQ ID NO: 1614661 - RNA, 19 nt, Artificial Sequence
  Description of Artificial Sequence: Synthetic oligonucleotide
ccuggggugaucggccugg

SEQ ID NO: 1614662 - RNA, 19 nt, Artificial Sequence
  Description of Artificial Sequence: Synthetic oligonucleotide
guguuugaucacccuggcu

SEQ ID NO: 1614663 - RNA, 19 nt, Artificial Sequence
  Description of Artificial Sequence: Synthetic oligonucleotide
aggaggugucauccagcuu

SEQ ID NO: 1614664 - RNA, 19 nt, Artificial Sequence
  Description of Artificial Sequence: Synthetic oligonucleotide
guccuuugcgaaugcgccu

SEQ ID NO: 1614665 - RNA, 19 nt, Artificial Sequence
  Description of Artificial Sequence: Synthetic oligonucleotide
agccuugguccguguuacu

SEQ ID NO: 1614666 - RNA, 19 nt, Artificial Sequence
  Description of Artificial Sequence: Synthetic oligonucleotide
gccuuguguuccgaaggcc

SEQ ID NO: 1614667 - RNA, 19 nt, Artificial Sequence
  Description of Artificial Sequence: Synthetic oligonucleotide
gguuagucaaggaggggcu

SEQ ID NO: 1614668 - RNA, 19 nt, Artificial Sequence
  Description of Artificial Sequence: Synthetic oligonucleotide
ggcuggaaagguguccaca

SEQ ID NO: 1614669 - RNA, 19 nt, Artificial Sequence
  Description of Artificial Sequence: Synthetic oligonucleotide
ggugaucggccuggguaag

SEQ ID NO: 1614670 - RNA, 19 nt, Artificial Sequence
  Description of Artificial Sequence: Synthetic oligonucleotide
ggugagcugggcuugucau

SEQ ID NO: 1614671 - RNA, 19 nt, Artificial Sequence
  Description of Artificial Sequence: Synthetic oligonucleotide
aagccacguuugagcucac

SEQ ID NO: 1614672 - RNA, 19 nt, Artificial Sequence
  Description of Artificial Sequence: Synthetic oligonucleotide
cucgggcccuggaaguaga

SEQ ID NO: 1614673 - RNA, 19 nt, Artificial Sequence
  Description of Artificial Sequence: Synthetic oligonucleotide
gucccgauacaggcucccc

SEQ ID NO: 1614674 - RNA, 19 nt, Artificial Sequence
  Description of Artificial Sequence: Synthetic oligonucleotide
guaagggauccggaugccu

SEQ ID NO: 1614675 - RNA, 19 nt, Artificial Sequence
  Description of Artificial Sequence: Synthetic oligonucleotide
cguuuuggccuuugccuug

SEQ ID NO: 1614676 - RNA, 19 nt, Artificial Sequence
  Description of Artificial Sequence: Synthetic oligonucleotide
gccgcuuccaggagcaaga

SEQ ID NO: 1614677 - RNA, 19 nt, Artificial Sequence
  Description of Artificial Sequence: Synthetic oligonucleotide
gggguaccugaacuauguc

SEQ ID NO: 1614678 - RNA, 19 nt, Artificial Sequence
  Description of Artificial Sequence: Synthetic oligonucleotide
ggauccuggcgaugaggga

SEQ ID NO: 1614679 - RNA, 19 nt, Artificial Sequence
  Description of Artificial Sequence: Synthetic oligonucleotide
cccaagggccucugugaag

SEQ ID NO: 1614680 - RNA, 19 nt, Artificial Sequence
  Description of Artificial Sequence: Synthetic oligonucleotide
gggccuugagaagaaaggu

SEQ ID NO: 1614681 - RNA, 19 nt, Artificial Sequence
  Description of Artificial Sequence: Synthetic oligonucleotide
ccacguuugagcucacucu

SEQ ID NO: 1614682 - RNA, 19 nt, Artificial Sequence
  Description of Artificial Sequence: Synthetic oligonucleotide
uucauacguuuuggccuuu

SEQ ID NO: 1614683 - RNA, 19 nt, Artificial Sequence
  Description of Artificial Sequence: Synthetic oligonucleotide
gguauucuccaaggccauc

SEQ ID NO: 1614684 - RNA, 19 nt, Artificial Sequence
  Description of Artificial Sequence: Synthetic oligonucleotide
ggccgcgaacacccgcucc

SEQ ID NO: 1614685 - RNA, 19 nt, Artificial Sequence
  Description of Artificial Sequence: Synthetic oligonucleotide
cuaggacuggucacaccau

SEQ ID NO: 1614686 - RNA, 19 nt, Artificial Sequence
  Description of Artificial Sequence: Synthetic oligonucleotide
gcuugucaucuauucgacu

SEQ ID NO: 1614687 - RNA, 19 nt, Artificial Sequence
  Description of Artificial Sequence: Synthetic oligonucleotide
ggcuucggccgcgaacacc

SEQ ID NO: 1614688 - RNA, 19 nt, Artificial Sequence
  Description of Artificial Sequence: Synthetic oligonucleotide
gcuguacuucugcgaccag

SEQ ID NO: 1614689 - RNA, 19 nt, Artificial Sequence
  Description of Artificial Sequence: Synthetic oligonucleotide
gcccuguguuugaucaccc

SEQ ID NO: 1614690 - RNA, 19 nt, Artificial Sequence
  Description of Artificial Sequence: Synthetic oligonucleotide
cgaaugcgccucuucagga

SEQ ID NO: 1614691 - RNA, 19 nt, Artificial Sequence
  Description of Artificial Sequence: Synthetic oligonucleotide
gggccucugugaagggucc

SEQ ID NO: 1614692 - RNA, 19 nt, Artificial Sequence
  Description of Artificial Sequence: Synthetic oligonucleotide
agccacguuugagcucacu

SEQ ID NO: 1614693 - RNA, 19 nt, Artificial Sequence
  Description of Artificial Sequence: Synthetic oligonucleotide
ccucugccgagcuaggacu

SEQ ID NO: 1614694 - RNA, 19 nt, Artificial Sequence
  Description of Artificial Sequence: Synthetic oligonucleotide
gaguccccaugucccgaua

SEQ ID NO: 1614695 - RNA, 19 nt, Artificial Sequence
  Description of Artificial Sequence: Synthetic oligonucleotide
ccgagagcuccauguugac

SEQ ID NO: 1614696 - RNA, 19 nt, Artificial Sequence
  Description of Artificial Sequence: Synthetic oligonucleotide
cuucgggcucccacgugcu

SEQ ID NO: 1614697 - RNA, 19 nt, Artificial Sequence
  Description of Artificial Sequence: Synthetic oligonucleotide
uuccugccuuugagguauu

SEQ ID NO: 1614698 - RNA, 19 nt, Artificial Sequence
  Description of Artificial Sequence: Synthetic oligonucleotide
gcgaccagcccuuccauuu

SEQ ID NO: 1614699 - RNA, 19 nt, Artificial Sequence
  Description of Artificial Sequence: Synthetic oligonucleotide
gcgagcauccaggauauuu

SEQ ID NO: 1614700 - RNA, 19 nt, Artificial Sequence
  Description of Artificial Sequence: Synthetic oligonucleotide
caccgccgagagcuccaug

SEQ ID NO: 1614701 - RNA, 19 nt, Artificial Sequence
  Description of Artificial Sequence: Synthetic oligonucleotide
gccugggguaccugaacua

SEQ ID NO: 1614702 - RNA, 19 nt, Artificial Sequence
  Description of Artificial Sequence: Synthetic oligonucleotide
cacucuccccuguucuggu

SEQ ID NO: 1614703 - RNA, 19 nt, Artificial Sequence
  Description of Artificial Sequence: Synthetic oligonucleotide
ggccuugagaagaaagguu

SEQ ID NO: 1614704 - RNA, 19 nt, Artificial Sequence
  Description of Artificial Sequence: Synthetic oligonucleotide
cugggucacccaagauucu

SEQ ID NO: 1614705 - RNA, 19 nt, Artificial Sequence
  Description of Artificial Sequence: Synthetic oligonucleotide
cgagcuaggacuggucaca

SEQ ID NO: 1614706 - RNA, 19 nt, Artificial Sequence
  Description of Artificial Sequence: Synthetic oligonucleotide
ccuuccauuucacgaggua

SEQ ID NO: 1614707 - RNA, 19 nt, Artificial Sequence
  Description of Artificial Sequence: Synthetic oligonucleotide
cuucugcgaccagcccuuc

SEQ ID NO: 1614708 - RNA, 19 nt, Artificial Sequence
  Description of Artificial Sequence: Synthetic oligonucleotide
uuccggggcuugggucccc

SEQ ID NO: 1614709 - RNA, 19 nt, Artificial Sequence
  Description of Artificial Sequence: Synthetic oligonucleotide
aggagggcuucggccgcga

SEQ ID NO: 1614710 - RNA, 19 nt, Artificial Sequence
  Description of Artificial Sequence: Synthetic oligonucleotide
gguuuugggcuuggguccu

SEQ ID NO: 1614711 - RNA, 19 nt, Artificial Sequence
  Description of Artificial Sequence: Synthetic oligonucleotide
cgaugagggagggccuucc

SEQ ID NO: 1614712 - RNA, 19 nt, Artificial Sequence
  Description of Artificial Sequence: Synthetic oligonucleotide
gagcucacucuccccuguu

SEQ ID NO: 1614713 - RNA, 19 nt, Artificial Sequence
  Description of Artificial Sequence: Synthetic oligonucleotide
gccaaauccuggggugauc

SEQ ID NO: 1614714 - RNA, 19 nt, Artificial Sequence
  Description of Artificial Sequence: Synthetic oligonucleotide
cucucgggcccuggaagua

SEQ ID NO: 1614715 - RNA, 19 nt, Artificial Sequence
  Description of Artificial Sequence: Synthetic oligonucleotide
ggcucccacgugcuguacu

SEQ ID NO: 1614716 - RNA, 19 nt, Artificial Sequence
  Description of Artificial Sequence: Synthetic oligonucleotide
gcaagcgagcauccaggau

SEQ ID NO: 1614717 - RNA, 19 nt, Artificial Sequence
  Description of Artificial Sequence: Synthetic oligonucleotide
ccacugagccugggguacc

SEQ ID NO: 1614718 - RNA, 19 nt, Artificial Sequence
  Description of Artificial Sequence: Synthetic oligonucleotide
gcucccacgugcuguacuu

SEQ ID NO: 1614719 - RNA, 19 nt, Artificial Sequence
  Description of Artificial Sequence: Synthetic oligonucleotide
ccaugucccgauacaggcu

SEQ ID NO: 1614720 - RNA, 19 nt, Artificial Sequence
  Description of Artificial Sequence: Synthetic oligonucleotide
gggcuucggccgcgaacac

SEQ ID NO: 1614721 - RNA, 19 nt, Artificial Sequence
  Description of Artificial Sequence: Synthetic oligonucleotide
ggccaucacugggcucucc

SEQ ID NO: 1614722 - RNA, 19 nt, Artificial Sequence
  Description of Artificial Sequence: Synthetic oligonucleotide
gaggggcuccaagacucuu

SEQ ID NO: 1614723 - RNA, 19 nt, Artificial Sequence
  Description of Artificial Sequence: Synthetic oligonucleotide
caucugugacaaccaccuu

SEQ ID NO: 1614724 - RNA, 19 nt, Artificial Sequence
  Description of Artificial Sequence: Synthetic oligonucleotide
cugcgaccagcccuuccau

SEQ ID NO: 1614725 - RNA, 19 nt, Artificial Sequence
  Description of Artificial Sequence: Synthetic oligonucleotide
ccucggccgcuuccaggag

SEQ ID NO: 1614726 - RNA, 19 nt, Artificial Sequence
  Description of Artificial Sequence: Synthetic oligonucleotide
ccgguggggauaggccuug

SEQ ID NO: 1614727 - RNA, 19 nt, Artificial Sequence
  Description of Artificial Sequence: Synthetic oligonucleotide
gcccucucgggcccuggaa

SEQ ID NO: 1614728 - RNA, 19 nt, Artificial Sequence
  Description of Artificial Sequence: Synthetic oligonucleotide
cacugagccugggguaccu

SEQ ID NO: 1614729 - RNA, 19 nt, Artificial Sequence
  Description of Artificial Sequence: Synthetic oligonucleotide
ccccgguggggauaggccu

SEQ ID NO: 1614730 - RNA, 19 nt, Artificial Sequence
  Description of Artificial Sequence: Synthetic oligonucleotide
ccggaugccucuggcagaa

SEQ ID NO: 1614731 - RNA, 19 nt, Artificial Sequence
  Description of Artificial Sequence: Synthetic oligonucleotide
ccugggguaccugaacuau

SEQ ID NO: 1614732 - RNA, 19 nt, Artificial Sequence
  Description of Artificial Sequence: Synthetic oligonucleotide
ggggcuuggguccccgcuu

SEQ ID NO: 1614733 - RNA, 19 nt, Artificial Sequence
  Description of Artificial Sequence: Synthetic oligonucleotide
ccccggugagcugggcuug

SEQ ID NO: 1614734 - RNA, 19 nt, Artificial Sequence
  Description of Artificial Sequence: Synthetic oligonucleotide
ggagggcuucggccgcgaa

SEQ ID NO: 1614735 - RNA, 19 nt, Artificial Sequence
  Description of Artificial Sequence: Synthetic oligonucleotide
ccaugcguccuuugcgaau

SEQ ID NO: 1614736 - RNA, 19 nt, Artificial Sequence
  Description of Artificial Sequence: Synthetic oligonucleotide
ggaggggcuccaagacucu

SEQ ID NO: 1614737 - RNA, 19 nt, Artificial Sequence
  Description of Artificial Sequence: Synthetic oligonucleotide
gcugcuccccgguggggau

SEQ ID NO: 1614738 - RNA, 19 nt, Artificial Sequence
  Description of Artificial Sequence: Synthetic oligonucleotide
gcugggcuugucaucuauu

SEQ ID NO: 1614739 - RNA, 19 nt, Artificial Sequence
  Description of Artificial Sequence: Synthetic oligonucleotide
ccgauacaggcuccccacu

SEQ ID NO: 1614740 - RNA, 19 nt, Artificial Sequence
  Description of Artificial Sequence: Synthetic oligonucleotide
cugcuccccgguggggaua

SEQ ID NO: 1614741 - RNA, 19 nt, Artificial Sequence
  Description of Artificial Sequence: Synthetic oligonucleotide
cgagagcuccauguugacu

SEQ ID NO: 1614742 - RNA, 19 nt, Artificial Sequence
  Description of Artificial Sequence: Synthetic oligonucleotide
ccggugagcugggcuuguc

SEQ ID NO: 1614743 - RNA, 19 nt, Artificial Sequence
  Description of Artificial Sequence: Synthetic oligonucleotide
ggcaccucccgagguggau

SEQ ID NO: 1614744 - RNA, 19 nt, Artificial Sequence
  Description of Artificial Sequence: Synthetic oligonucleotide
cccgguggggauaggccuu

SEQ ID NO: 1614745 - RNA, 19 nt, Artificial Sequence
  Description of Artificial Sequence: Synthetic oligonucleotide
cggccgcgaacacccgcuc

SEQ ID NO: 1614746 - RNA, 19 nt, Artificial Sequence
  Description of Artificial Sequence: Synthetic oligonucleotide
cgggcucccacgugcugua

SEQ ID NO: 1614747 - RNA, 19 nt, Artificial Sequence
  Description of Artificial Sequence: Synthetic oligonucleotide
ccauguugacucgccgcuu

SEQ ID NO: 1614748 - RNA, 19 nt, Artificial Sequence
  Description of Artificial Sequence: Synthetic oligonucleotide
cggggcuuggguccccgcu

SEQ ID NO: 1614749 - RNA, 19 nt, Artificial Sequence
  Description of Artificial Sequence: Synthetic oligonucleotide
ccgccgagagcuccauguu

SEQ ID NO: 1614750 - RNA, 19 nt, Artificial Sequence
  Description of Artificial Sequence: Synthetic oligonucleotide
cccggugagcugggcuugu

SEQ ID NO: 1614751 - RNA, 19 nt, Artificial Sequence
  Description of Artificial Sequence: Synthetic oligonucleotide
ccaccgccgagagcuccau

SEQ ID NO: 1614752 - RNA, 19 nt, Artificial Sequence
  Description of Artificial Sequence: Synthetic oligonucleotide
uacauuaaggcaaaggcug

SEQ ID NO: 1614753 - RNA, 19 nt, Artificial Sequence
  Description of Artificial Sequence: Synthetic oligonucleotide
cuuaaugagauugagcucg

SEQ ID NO: 1614754 - RNA, 19 nt, Artificial Sequence
  Description of Artificial Sequence: Synthetic oligonucleotide
uuauuagagaacaaaacaa

SEQ ID NO: 1614755 - RNA, 19 nt, Artificial Sequence
  Description of Artificial Sequence: Synthetic oligonucleotide
uccgcgaucacaaugaagc

SEQ ID NO: 1614756 - RNA, 19 nt, Artificial Sequence
  Description of Artificial Sequence: Synthetic oligonucleotide
aagcuuaaccgacaggucg

SEQ ID NO: 1614757 - RNA, 19 nt, Artificial Sequence
  Description of Artificial Sequence: Synthetic oligonucleotide
aagguguacgcccugcucc

SEQ ID NO: 1614758 - RNA, 19 nt, Artificial Sequence
  Description of Artificial Sequence: Synthetic oligonucleotide
auuaucugucaccacaggc

SEQ ID NO: 1614759 - RNA, 19 nt, Artificial Sequence
  Description of Artificial Sequence: Synthetic oligonucleotide
aauagggauccccuugugc

SEQ ID NO: 1614760 - RNA, 19 nt, Artificial Sequence
  Description of Artificial Sequence: Synthetic oligonucleotide
auagggauccccuugugcc

SEQ ID NO: 1614761 - RNA, 19 nt, Artificial Sequence
  Description of Artificial Sequence: Synthetic oligonucleotide
ugggacauaagccauuggg

SEQ ID NO: 1614762 - RNA, 19 nt, Artificial Sequence
  Description of Artificial Sequence: Synthetic oligonucleotide
ugaggguuaagccauacug

SEQ ID NO: 1614763 - RNA, 19 nt, Artificial Sequence
  Description of Artificial Sequence: Synthetic oligonucleotide
aaagucauucaacaaacaa

SEQ ID NO: 1614764 - RNA, 19 nt, Artificial Sequence
  Description of Artificial Sequence: Synthetic oligonucleotide
uauuagagaacaaaacaaa

SEQ ID NO: 1614765 - RNA, 19 nt, Artificial Sequence
  Description of Artificial Sequence: Synthetic oligonucleotide
auaagacuggauuugacca

SEQ ID NO: 1614766 - RNA, 19 nt, Artificial Sequence
  Description of Artificial Sequence: Synthetic oligonucleotide
ucaguuauuucucagcaaa

SEQ ID NO: 1614767 - RNA, 19 nt, Artificial Sequence
  Description of Artificial Sequence: Synthetic oligonucleotide
ugcaagauaagcugccugg

SEQ ID NO: 1614768 - RNA, 19 nt, Artificial Sequence
  Description of Artificial Sequence: Synthetic oligonucleotide
auucccauuaucugucacc

SEQ ID NO: 1614769 - RNA, 19 nt, Artificial Sequence
  Description of Artificial Sequence: Synthetic oligonucleotide
agaaagucauucaacaaac

SEQ ID NO: 1614770 - RNA, 19 nt, Artificial Sequence
  Description of Artificial Sequence: Synthetic oligonucleotide
cauguugaugaacaggccg

SEQ ID NO: 1614771 - RNA, 19 nt, Artificial Sequence
  Description of Artificial Sequence: Synthetic oligonucleotide
cauucgaaguucuaccucg

SEQ ID NO: 1614772 - RNA, 19 nt, Artificial Sequence
  Description of Artificial Sequence: Synthetic oligonucleotide
cauaagacuggauuugacc

SEQ ID NO: 1614773 - RNA, 19 nt, Artificial Sequence
  Description of Artificial Sequence: Synthetic oligonucleotide
uguagaaccacuuccaauu

SEQ ID NO: 1614774 - RNA, 19 nt, Artificial Sequence
  Description of Artificial Sequence: Synthetic oligonucleotide
uuaaggcaaaggcugcugg

SEQ ID NO: 1614775 - RNA, 19 nt, Artificial Sequence
  Description of Artificial Sequence: Synthetic oligonucleotide
ucucaguuauuucucagca

SEQ ID NO: 1614776 - RNA, 19 nt, Artificial Sequence
  Description of Artificial Sequence: Synthetic oligonucleotide
aagauaagcugccuggccu

SEQ ID NO: 1614777 - RNA, 19 nt, Artificial Sequence
  Description of Artificial Sequence: Synthetic oligonucleotide
aucaaguucuauuuuauaa

SEQ ID NO: 1614778 - RNA, 19 nt, Artificial Sequence
  Description of Artificial Sequence: Synthetic oligonucleotide
ucaaguucuauuuuauaaa

SEQ ID NO: 1614779 - RNA, 19 nt, Artificial Sequence
  Description of Artificial Sequence: Synthetic oligonucleotide
agccauucgaaguucuacc

SEQ ID NO: 1614780 - RNA, 19 nt, Artificial Sequence
  Description of Artificial Sequence: Synthetic oligonucleotide
caaaucuaaaccucagaag

SEQ ID NO: 1614781 - RNA, 19 nt, Artificial Sequence
  Description of Artificial Sequence: Synthetic oligonucleotide
agcacaaaagaagugacag

SEQ ID NO: 1614782 - RNA, 19 nt, Artificial Sequence
  Description of Artificial Sequence: Synthetic oligonucleotide
uggacagcuacauuaaggu

SEQ ID NO: 1614783 - RNA, 19 nt, Artificial Sequence
  Description of Artificial Sequence: Synthetic oligonucleotide
ucagcaaaucuaaaccuca

SEQ ID NO: 1614784 - RNA, 19 nt, Artificial Sequence
  Description of Artificial Sequence: Synthetic oligonucleotide
agaagcuuaaccgacaggu

SEQ ID NO: 1614785 - RNA, 19 nt, Artificial Sequence
  Description of Artificial Sequence: Synthetic oligonucleotide
ucagcuauucgcugaacag

SEQ ID NO: 1614786 - RNA, 19 nt, Artificial Sequence
  Description of Artificial Sequence: Synthetic oligonucleotide
cauagcaauacuucauaag

SEQ ID NO: 1614787 - RNA, 19 nt, Artificial Sequence
  Description of Artificial Sequence: Synthetic oligonucleotide
ucagaagcuuaaccgacag

SEQ ID NO: 1614788 - RNA, 19 nt, Artificial Sequence
  Description of Artificial Sequence: Synthetic oligonucleotide
cuuacugggacauaagcca

SEQ ID NO: 1614789 - RNA, 19 nt, Artificial Sequence
  Description of Artificial Sequence: Synthetic oligonucleotide
agaaccacuuccaauuccc

SEQ ID NO: 1614790 - RNA, 19 nt, Artificial Sequence
  Description of Artificial Sequence: Synthetic oligonucleotide
uaaccagccacaaucuucu

SEQ ID NO: 1614791 - RNA, 19 nt, Artificial Sequence
  Description of Artificial Sequence: Synthetic oligonucleotide
ugaagcgacuggcauaacc

SEQ ID NO: 1614792 - RNA, 19 nt, Artificial Sequence
  Description of Artificial Sequence: Synthetic oligonucleotide
gaaauccgcgaucacaaug

SEQ ID NO: 1614793 - RNA, 19 nt, Artificial Sequence
  Description of Artificial Sequence: Synthetic oligonucleotide
agagacaauccugaccucc

SEQ ID NO: 1614794 - RNA, 19 nt, Artificial Sequence
  Description of Artificial Sequence: Synthetic oligonucleotide
aauggcaaggucaaucucu

SEQ ID NO: 1614795 - RNA, 19 nt, Artificial Sequence
  Description of Artificial Sequence: Synthetic oligonucleotide
uucacuucacuccacuugu

SEQ ID NO: 1614796 - RNA, 19 nt, Artificial Sequence
  Description of Artificial Sequence: Synthetic oligonucleotide
ucugaugccaaaucauaca

SEQ ID NO: 1614797 - RNA, 19 nt, Artificial Sequence
  Description of Artificial Sequence: Synthetic oligonucleotide
uuaaccgacaggucgaguc

SEQ ID NO: 1614798 - RNA, 19 nt, Artificial Sequence
  Description of Artificial Sequence: Synthetic oligonucleotide
cauggacaauuguagaacc

SEQ ID NO: 1614799 - RNA, 19 nt, Artificial Sequence
  Description of Artificial Sequence: Synthetic oligonucleotide
aauggcacaauaauguuua

SEQ ID NO: 1614800 - RNA, 19 nt, Artificial Sequence
  Description of Artificial Sequence: Synthetic oligonucleotide
agcaccaucaauggcaagg

SEQ ID NO: 1614801 - RNA, 19 nt, Artificial Sequence
  Description of Artificial Sequence: Synthetic oligonucleotide
agugacagcuucugaugcc

SEQ ID NO: 1614802 - RNA, 19 nt, Artificial Sequence
  Description of Artificial Sequence: Synthetic oligonucleotide
aggagauucaagguguacg

SEQ ID NO: 1614803 - RNA, 19 nt, Artificial Sequence
  Description of Artificial Sequence: Synthetic oligonucleotide
aagucauucaacaaacaaa

SEQ ID NO: 1614804 - RNA, 19 nt, Artificial Sequence
  Description of Artificial Sequence: Synthetic oligonucleotide
aaugaagcgacuggcauaa

SEQ ID NO: 1614805 - RNA, 19 nt, Artificial Sequence
  Description of Artificial Sequence: Synthetic oligonucleotide
uggaggagauucaaggugu

SEQ ID NO: 1614806 - RNA, 19 nt, Artificial Sequence
  Description of Artificial Sequence: Synthetic oligonucleotide
uuaaugagauugagcucgg

SEQ ID NO: 1614807 - RNA, 19 nt, Artificial Sequence
  Description of Artificial Sequence: Synthetic oligonucleotide
gguuaagccauacugcaag

SEQ ID NO: 1614808 - RNA, 19 nt, Artificial Sequence
  Description of Artificial Sequence: Synthetic oligonucleotide
aaauccgcgaucacaauga

SEQ ID NO: 1614809 - RNA, 19 nt, Artificial Sequence
  Description of Artificial Sequence: Synthetic oligonucleotide
cacagcucggcuuacuggg

SEQ ID NO: 1614810 - RNA, 19 nt, Artificial Sequence
  Description of Artificial Sequence: Synthetic oligonucleotide
uguugauccaggucgcuga

SEQ ID NO: 1614811 - RNA, 19 nt, Artificial Sequence
  Description of Artificial Sequence: Synthetic oligonucleotide
aaucuaaaccucagaagcu

SEQ ID NO: 1614812 - RNA, 19 nt, Artificial Sequence
  Description of Artificial Sequence: Synthetic oligonucleotide
aagcgacuggcauaaccag

SEQ ID NO: 1614813 - RNA, 19 nt, Artificial Sequence
  Description of Artificial Sequence: Synthetic oligonucleotide
uagaaccacuuccaauucc

SEQ ID NO: 1614814 - RNA, 19 nt, Artificial Sequence
  Description of Artificial Sequence: Synthetic oligonucleotide
uacugcaagauaagcugcc

SEQ ID NO: 1614815 - RNA, 19 nt, Artificial Sequence
  Description of Artificial Sequence: Synthetic oligonucleotide
aggguuaagccauacugca

SEQ ID NO: 1614816 - RNA, 19 nt, Artificial Sequence
  Description of Artificial Sequence: Synthetic oligonucleotide
acauaagccauugggauga

SEQ ID NO: 1614817 - RNA, 19 nt, Artificial Sequence
  Description of Artificial Sequence: Synthetic oligonucleotide
acauuaaggcaaaggcugc

SEQ ID NO: 1614818 - RNA, 19 nt, Artificial Sequence
  Description of Artificial Sequence: Synthetic oligonucleotide
gaucacaaugaagcgacug

SEQ ID NO: 1614819 - RNA, 19 nt, Artificial Sequence
  Description of Artificial Sequence: Synthetic oligonucleotide
gaggguuaagccauacugc

SEQ ID NO: 1614820 - RNA, 19 nt, Artificial Sequence
  Description of Artificial Sequence: Synthetic oligonucleotide
gucgagucaaagcauucag

SEQ ID NO: 1614821 - RNA, 19 nt, Artificial Sequence
  Description of Artificial Sequence: Synthetic oligonucleotide
cuggaggagauucaaggug

SEQ ID NO: 1614822 - RNA, 19 nt, Artificial Sequence
  Description of Artificial Sequence: Synthetic oligonucleotide
ucgagucaaagcauucaga

SEQ ID NO: 1614823 - RNA, 19 nt, Artificial Sequence
  Description of Artificial Sequence: Synthetic oligonucleotide
uuccaguccaggauaaaau

SEQ ID NO: 1614824 - RNA, 19 nt, Artificial Sequence
  Description of Artificial Sequence: Synthetic oligonucleotide
cucagcaaaucuaaaccuc

SEQ ID NO: 1614825 - RNA, 19 nt, Artificial Sequence
  Description of Artificial Sequence: Synthetic oligonucleotide
ugagauugagcucggcauc

SEQ ID NO: 1614826 - RNA, 19 nt, Artificial Sequence
  Description of Artificial Sequence: Synthetic oligonucleotide
aaguagacucucucugcca

SEQ ID NO: 1614827 - RNA, 19 nt, Artificial Sequence
  Description of Artificial Sequence: Synthetic oligonucleotide
ggagauucaagguguacgc

SEQ ID NO: 1614828 - RNA, 19 nt, Artificial Sequence
  Description of Artificial Sequence: Synthetic oligonucleotide
gaagcgacuggcauaacca

SEQ ID NO: 1614829 - RNA, 19 nt, Artificial Sequence
  Description of Artificial Sequence: Synthetic oligonucleotide
uccaccgcccuuaaugaga

SEQ ID NO: 1614830 - RNA, 19 nt, Artificial Sequence
  Description of Artificial Sequence: Synthetic oligonucleotide
acuggaggagauucaaggu

SEQ ID NO: 1614831 - RNA, 19 nt, Artificial Sequence
  Description of Artificial Sequence: Synthetic oligonucleotide
accucagaagcuuaaccga

SEQ ID NO: 1614832 - RNA, 19 nt, Artificial Sequence
  Description of Artificial Sequence: Synthetic oligonucleotide
uucauaagacuggauuuga

SEQ ID NO: 1614833 - RNA, 19 nt, Artificial Sequence
  Description of Artificial Sequence: Synthetic oligonucleotide
aaauggcacaauaauguuu

SEQ ID NO: 1614834 - RNA, 19 nt, Artificial Sequence
  Description of Artificial Sequence: Synthetic oligonucleotide
caagauaagcugccuggcc

SEQ ID NO: 1614835 - RNA, 19 nt, Artificial Sequence
  Description of Artificial Sequence: Synthetic oligonucleotide
agcaaaucuaaaccucaga

SEQ ID NO: 1614836 - RNA, 19 nt, Artificial Sequence
  Description of Artificial Sequence: Synthetic oligonucleotide
uaaccgacaggucgaguca

SEQ ID NO: 1614837 - RNA, 19 nt, Artificial Sequence
  Description of Artificial Sequence: Synthetic oligonucleotide
guaagugcuucacaucuca

SEQ ID NO: 1614838 - RNA, 19 nt, Artificial Sequence
  Description of Artificial Sequence: Synthetic oligonucleotide
acauagcaauacuucauaa

SEQ ID NO: 1614839 - RNA, 19 nt, Artificial Sequence
  Description of Artificial Sequence: Synthetic oligonucleotide
ugugcacccggucaaacuu

SEQ ID NO: 1614840 - RNA, 19 nt, Artificial Sequence
  Description of Artificial Sequence: Synthetic oligonucleotide
accgcccuuaaugagauug

SEQ ID NO: 1614841 - RNA, 19 nt, Artificial Sequence
  Description of Artificial Sequence: Synthetic oligonucleotide
cacaucucaguuauuucuc

SEQ ID NO: 1614842 - RNA, 19 nt, Artificial Sequence
  Description of Artificial Sequence: Synthetic oligonucleotide
cuugguuauucuucacgug

SEQ ID NO: 1614843 - RNA, 19 nt, Artificial Sequence
  Description of Artificial Sequence: Synthetic oligonucleotide
uacgcccugcuccucacag

SEQ ID NO: 1614844 - RNA, 19 nt, Artificial Sequence
  Description of Artificial Sequence: Synthetic oligonucleotide
uuguagaaccacuuccaau

SEQ ID NO: 1614845 - RNA, 19 nt, Artificial Sequence
  Description of Artificial Sequence: Synthetic oligonucleotide
gcaaaucuaaaccucagaa

SEQ ID NO: 1614846 - RNA, 19 nt, Artificial Sequence
  Description of Artificial Sequence: Synthetic oligonucleotide
cauuaucugucaccacagg

SEQ ID NO: 1614847 - RNA, 19 nt, Artificial Sequence
  Description of Artificial Sequence: Synthetic oligonucleotide
uuccugaaauccgcgauca

SEQ ID NO: 1614848 - RNA, 19 nt, Artificial Sequence
  Description of Artificial Sequence: Synthetic oligonucleotide
uccaguccaggauaaaauu

SEQ ID NO: 1614849 - RNA, 19 nt, Artificial Sequence
  Description of Artificial Sequence: Synthetic oligonucleotide
acaucucaguuauuucuca

SEQ ID NO: 1614850 - RNA, 19 nt, Artificial Sequence
  Description of Artificial Sequence: Synthetic oligonucleotide
cacuucacuccacuugugc

SEQ ID NO: 1614851 - RNA, 19 nt, Artificial Sequence
  Description of Artificial Sequence: Synthetic oligonucleotide
uuacugggacauaagccau

SEQ ID NO: 1614852 - RNA, 19 nt, Artificial Sequence
  Description of Artificial Sequence: Synthetic oligonucleotide
cugaaauccgcgaucacaa

SEQ ID NO: 1614853 - RNA, 19 nt, Artificial Sequence
  Description of Artificial Sequence: Synthetic oligonucleotide
uccaccgccguguggcucg

SEQ ID NO: 1614854 - RNA, 19 nt, Artificial Sequence
  Description of Artificial Sequence: Synthetic oligonucleotide
aggucgcugaggguuaagc

SEQ ID NO: 1614855 - RNA, 19 nt, Artificial Sequence
  Description of Artificial Sequence: Synthetic oligonucleotide
gucgcugaggguuaagcca

SEQ ID NO: 1614856 - RNA, 19 nt, Artificial Sequence
  Description of Artificial Sequence: Synthetic oligonucleotide
cucccucacauucacugag

SEQ ID NO: 1614857 - RNA, 19 nt, Artificial Sequence
  Description of Artificial Sequence: Synthetic oligonucleotide
agcgacuggcauaaccagc

SEQ ID NO: 1614858 - RNA, 19 nt, Artificial Sequence
  Description of Artificial Sequence: Synthetic oligonucleotide
cagcuauucgcugaacagc

SEQ ID NO: 1614859 - RNA, 19 nt, Artificial Sequence
  Description of Artificial Sequence: Synthetic oligonucleotide
agcuauucgcugaacagca

SEQ ID NO: 1614860 - RNA, 19 nt, Artificial Sequence
  Description of Artificial Sequence: Synthetic oligonucleotide
gugccaccgaucuccaagg

SEQ ID NO: 1614861 - RNA, 19 nt, Artificial Sequence
  Description of Artificial Sequence: Synthetic oligonucleotide
gagauucaagguguacgcc

SEQ ID NO: 1614862 - RNA, 19 nt, Artificial Sequence
  Description of Artificial Sequence: Synthetic oligonucleotide
guuauucuucacgugguuc

SEQ ID NO: 1614863 - RNA, 19 nt, Artificial Sequence
  Description of Artificial Sequence: Synthetic oligonucleotide
uaaaccucagaagcuuaac

SEQ ID NO: 1614864 - RNA, 19 nt, Artificial Sequence
  Description of Artificial Sequence: Synthetic oligonucleotide
ucaagguguacgcccugcu

SEQ ID NO: 1614865 - RNA, 19 nt, Artificial Sequence
  Description of Artificial Sequence: Synthetic oligonucleotide
gcuuacugggacauaagcc

SEQ ID NO: 1614866 - RNA, 19 nt, Artificial Sequence
  Description of Artificial Sequence: Synthetic oligonucleotide
uagacucucucugccaugu

SEQ ID NO: 1614867 - RNA, 19 nt, Artificial Sequence
  Description of Artificial Sequence: Synthetic oligonucleotide
aguaagugcuucacaucuc

SEQ ID NO: 1614868 - RNA, 19 nt, Artificial Sequence
  Description of Artificial Sequence: Synthetic oligonucleotide
aacaggccgguguccacca

SEQ ID NO: 1614869 - RNA, 19 nt, Artificial Sequence
  Description of Artificial Sequence: Synthetic oligonucleotide
ucggcuuacugggacauaa

SEQ ID NO: 1614870 - RNA, 19 nt, Artificial Sequence
  Description of Artificial Sequence: Synthetic oligonucleotide
cacccggucaaacuuccag

SEQ ID NO: 1614871 - RNA, 19 nt, Artificial Sequence
  Description of Artificial Sequence: Synthetic oligonucleotide
agucauuuugauagcugug

SEQ ID NO: 1614872 - RNA, 19 nt, Artificial Sequence
  Description of Artificial Sequence: Synthetic oligonucleotide
uugugcacccggucaaacu

SEQ ID NO: 1614873 - RNA, 19 nt, Artificial Sequence
  Description of Artificial Sequence: Synthetic oligonucleotide
gaccucaauagggaucccc

SEQ ID NO: 1614874 - RNA, 19 nt, Artificial Sequence
  Description of Artificial Sequence: Synthetic oligonucleotide
gacuggauuugaccacccc

SEQ ID NO: 1614875 - RNA, 19 nt, Artificial Sequence
  Description of Artificial Sequence: Synthetic oligonucleotide
gaggcauguccgcugcgcc

SEQ ID NO: 1614876 - RNA, 19 nt, Artificial Sequence
  Description of Artificial Sequence: Synthetic oligonucleotide
acugugcacgccccggcag

SEQ ID NO: 1614877 - RNA, 19 nt, Artificial Sequence
  Description of Artificial Sequence: Synthetic oligonucleotide
uagggauccccuugugcca

SEQ ID NO: 1614878 - RNA, 19 nt, Artificial Sequence
  Description of Artificial Sequence: Synthetic oligonucleotide
uucaaccuucaaacagcac

SEQ ID NO: 1614879 - RNA, 19 nt, Artificial Sequence
  Description of Artificial Sequence: Synthetic oligonucleotide
uuagccuccucggccuugg

SEQ ID NO: 1614880 - RNA, 19 nt, Artificial Sequence
  Description of Artificial Sequence: Synthetic oligonucleotide
ugggucacagcucggcuua

SEQ ID NO: 1614881 - RNA, 19 nt, Artificial Sequence
  Description of Artificial Sequence: Synthetic oligonucleotide
ccauuaucugucaccacag

SEQ ID NO: 1614882 - RNA, 19 nt, Artificial Sequence
  Description of Artificial Sequence: Synthetic oligonucleotide
aucuaaaccucagaagcuu

SEQ ID NO: 1614883 - RNA, 19 nt, Artificial Sequence
  Description of Artificial Sequence: Synthetic oligonucleotide
acccggucaaacuuccagu

SEQ ID NO: 1614884 - RNA, 19 nt, Artificial Sequence
  Description of Artificial Sequence: Synthetic oligonucleotide
aauccgcgaucacaaugaa

SEQ ID NO: 1614885 - RNA, 19 nt, Artificial Sequence
  Description of Artificial Sequence: Synthetic oligonucleotide
guacauuaaggcaaaggcu

SEQ ID NO: 1614886 - RNA, 19 nt, Artificial Sequence
  Description of Artificial Sequence: Synthetic oligonucleotide
ccaccgaucuccaagguuc

SEQ ID NO: 1614887 - RNA, 19 nt, Artificial Sequence
  Description of Artificial Sequence: Synthetic oligonucleotide
cacgugguucuccaccgcc

SEQ ID NO: 1614888 - RNA, 19 nt, Artificial Sequence
  Description of Artificial Sequence: Synthetic oligonucleotide
cgaaguucuaccucgcccc

SEQ ID NO: 1614889 - RNA, 19 nt, Artificial Sequence
  Description of Artificial Sequence: Synthetic oligonucleotide
gccuccaccgcccuuaaug

SEQ ID NO: 1614890 - RNA, 19 nt, Artificial Sequence
  Description of Artificial Sequence: Synthetic oligonucleotide
ugcacgccccggcaguugc

SEQ ID NO: 1614891 - RNA, 19 nt, Artificial Sequence
  Description of Artificial Sequence: Synthetic oligonucleotide
agacaauccugaccuccug

SEQ ID NO: 1614892 - RNA, 19 nt, Artificial Sequence
  Description of Artificial Sequence: Synthetic oligonucleotide
agacuggauuugaccaccc

SEQ ID NO: 1614893 - RNA, 19 nt, Artificial Sequence
  Description of Artificial Sequence: Synthetic oligonucleotide
cauccugcaucccaaagua

SEQ ID NO: 1614894 - RNA, 19 nt, Artificial Sequence
  Description of Artificial Sequence: Synthetic oligonucleotide
cacauucacugagccaucc

SEQ ID NO: 1614895 - RNA, 19 nt, Artificial Sequence
  Description of Artificial Sequence: Synthetic oligonucleotide
uaagcugccuggccuggaa

SEQ ID NO: 1614896 - RNA, 19 nt, Artificial Sequence
  Description of Artificial Sequence: Synthetic oligonucleotide
gaagcuuaaccgacagguc

SEQ ID NO: 1614897 - RNA, 19 nt, Artificial Sequence
  Description of Artificial Sequence: Synthetic oligonucleotide
ggucgcugaggguuaagcc

SEQ ID NO: 1614898 - RNA, 19 nt, Artificial Sequence
  Description of Artificial Sequence: Synthetic oligonucleotide
cacauagcaauacuucaua

SEQ ID NO: 1614899 - RNA, 19 nt, Artificial Sequence
  Description of Artificial Sequence: Synthetic oligonucleotide
agggauccccuugugccac

SEQ ID NO: 1614900 - RNA, 19 nt, Artificial Sequence
  Description of Artificial Sequence: Synthetic oligonucleotide
auggcaaggucaaucucug

SEQ ID NO: 1614901 - RNA, 19 nt, Artificial Sequence
  Description of Artificial Sequence: Synthetic oligonucleotide
ugaaauccgcgaucacaau

SEQ ID NO: 1614902 - RNA, 19 nt, Artificial Sequence
  Description of Artificial Sequence: Synthetic oligonucleotide
auguccgcugcgccuggac

SEQ ID NO: 1614903 - RNA, 19 nt, Artificial Sequence
  Description of Artificial Sequence: Synthetic oligonucleotide
ccucacagggucagaaggg

SEQ ID NO: 1614904 - RNA, 19 nt, Artificial Sequence
  Description of Artificial Sequence: Synthetic oligonucleotide
accucaauagggauccccu

SEQ ID NO: 1614905 - RNA, 19 nt, Artificial Sequence
  Description of Artificial Sequence: Synthetic oligonucleotide
auugagcucggcauccacu

SEQ ID NO: 1614906 - RNA, 19 nt, Artificial Sequence
  Description of Artificial Sequence: Synthetic oligonucleotide
agcuuaaccgacaggucga

SEQ ID NO: 1614907 - RNA, 19 nt, Artificial Sequence
  Description of Artificial Sequence: Synthetic oligonucleotide
uaaugagauugagcucggc

SEQ ID NO: 1614908 - RNA, 19 nt, Artificial Sequence
  Description of Artificial Sequence: Synthetic oligonucleotide
cugccauguugaugaacag

SEQ ID NO: 1614909 - RNA, 19 nt, Artificial Sequence
  Description of Artificial Sequence: Synthetic oligonucleotide
ugcgccuggacuggaggag

SEQ ID NO: 1614910 - RNA, 19 nt, Artificial Sequence
  Description of Artificial Sequence: Synthetic oligonucleotide
agguguacgcccugcuccu

SEQ ID NO: 1614911 - RNA, 19 nt, Artificial Sequence
  Description of Artificial Sequence: Synthetic oligonucleotide
ucgagccucccuuguggcc

SEQ ID NO: 1614912 - RNA, 19 nt, Artificial Sequence
  Description of Artificial Sequence: Synthetic oligonucleotide
aggucgagucaaagcauuc

SEQ ID NO: 1614913 - RNA, 19 nt, Artificial Sequence
  Description of Artificial Sequence: Synthetic oligonucleotide
caagguguacgcccugcuc

SEQ ID NO: 1614914 - RNA, 19 nt, Artificial Sequence
  Description of Artificial Sequence: Synthetic oligonucleotide
gacaauccugaccuccugu

SEQ ID NO: 1614915 - RNA, 19 nt, Artificial Sequence
  Description of Artificial Sequence: Synthetic oligonucleotide
agcuacauuaagguacauu

SEQ ID NO: 1614916 - RNA, 19 nt, Artificial Sequence
  Description of Artificial Sequence: Synthetic oligonucleotide
caauagggauccccuugug

SEQ ID NO: 1614917 - RNA, 19 nt, Artificial Sequence
  Description of Artificial Sequence: Synthetic oligonucleotide
uacugggacauaagccauu

SEQ ID NO: 1614918 - RNA, 19 nt, Artificial Sequence
  Description of Artificial Sequence: Synthetic oligonucleotide
gacaauuguagaaccacuu

SEQ ID NO: 1614919 - RNA, 19 nt, Artificial Sequence
  Description of Artificial Sequence: Synthetic oligonucleotide
cagcauggacaauuguaga

SEQ ID NO: 1614920 - RNA, 19 nt, Artificial Sequence
  Description of Artificial Sequence: Synthetic oligonucleotide
auccccuugugccaccgau

SEQ ID NO: 1614921 - RNA, 19 nt, Artificial Sequence
  Description of Artificial Sequence: Synthetic oligonucleotide
cuccaccgcccuuaaugag

SEQ ID NO: 1614922 - RNA, 19 nt, Artificial Sequence
  Description of Artificial Sequence: Synthetic oligonucleotide
guguugauccaggucgcug

SEQ ID NO: 1614923 - RNA, 19 nt, Artificial Sequence
  Description of Artificial Sequence: Synthetic oligonucleotide
cccauuaucugucaccaca

SEQ ID NO: 1614924 - RNA, 19 nt, Artificial Sequence
  Description of Artificial Sequence: Synthetic oligonucleotide
uccgcugcgccuggacugg

SEQ ID NO: 1614925 - RNA, 19 nt, Artificial Sequence
  Description of Artificial Sequence: Synthetic oligonucleotide
cucaguuauuucucagcaa

SEQ ID NO: 1614926 - RNA, 19 nt, Artificial Sequence
  Description of Artificial Sequence: Synthetic oligonucleotide
uccugaaauccgcgaucac

SEQ ID NO: 1614927 - RNA, 19 nt, Artificial Sequence
  Description of Artificial Sequence: Synthetic oligonucleotide
acgugguucuccaccgccg

SEQ ID NO: 1614928 - RNA, 19 nt, Artificial Sequence
  Description of Artificial Sequence: Synthetic oligonucleotide
uguacgcccugcuccucac

SEQ ID NO: 1614929 - RNA, 19 nt, Artificial Sequence
  Description of Artificial Sequence: Synthetic oligonucleotide
aaccgacaggucgagucaa

SEQ ID NO: 1614930 - RNA, 19 nt, Artificial Sequence
  Description of Artificial Sequence: Synthetic oligonucleotide
accuggagucauuuugaua

SEQ ID NO: 1614931 - RNA, 19 nt, Artificial Sequence
  Description of Artificial Sequence: Synthetic oligonucleotide
uggcauaaccagccacaau

SEQ ID NO: 1614932 - RNA, 19 nt, Artificial Sequence
  Description of Artificial Sequence: Synthetic oligonucleotide
cuugugcacccggucaaac

SEQ ID NO: 1614933 - RNA, 19 nt, Artificial Sequence
  Description of Artificial Sequence: Synthetic oligonucleotide
aggccgguguccaccacac

SEQ ID NO: 1614934 - RNA, 19 nt, Artificial Sequence
  Description of Artificial Sequence: Synthetic oligonucleotide
ucccauuaucugucaccac

SEQ ID NO: 1614935 - RNA, 19 nt, Artificial Sequence
  Description of Artificial Sequence: Synthetic oligonucleotide
auccgcgaucacaaugaag

SEQ ID NO: 1614936 - RNA, 19 nt, Artificial Sequence
  Description of Artificial Sequence: Synthetic oligonucleotide
ugccaccgaucuccaaggu

SEQ ID NO: 1614937 - RNA, 19 nt, Artificial Sequence
  Description of Artificial Sequence: Synthetic oligonucleotide
acaggucgagucaaagcau

SEQ ID NO: 1614938 - RNA, 19 nt, Artificial Sequence
  Description of Artificial Sequence: Synthetic oligonucleotide
auggcacaauaauguuuau

SEQ ID NO: 1614939 - RNA, 19 nt, Artificial Sequence
  Description of Artificial Sequence: Synthetic oligonucleotide
cacuccacuugugcacccg

SEQ ID NO: 1614940 - RNA, 19 nt, Artificial Sequence
  Description of Artificial Sequence: Synthetic oligonucleotide
augccaaaucauacaagua

SEQ ID NO: 1614941 - RNA, 19 nt, Artificial Sequence
  Description of Artificial Sequence: Synthetic oligonucleotide
gucucagacugugcacgcc

SEQ ID NO: 1614942 - RNA, 19 nt, Artificial Sequence
  Description of Artificial Sequence: Synthetic oligonucleotide
cccggucaaacuuccaguc

SEQ ID NO: 1614943 - RNA, 19 nt, Artificial Sequence
  Description of Artificial Sequence: Synthetic oligonucleotide
ccgcgaucacaaugaagcg

SEQ ID NO: 1614944 - RNA, 19 nt, Artificial Sequence
  Description of Artificial Sequence: Synthetic oligonucleotide
cuuggacaucguggagggg

SEQ ID NO: 1614945 - RNA, 19 nt, Artificial Sequence
  Description of Artificial Sequence: Synthetic oligonucleotide
ccggucaaacuuccagucc

SEQ ID NO: 1614946 - RNA, 19 nt, Artificial Sequence
  Description of Artificial Sequence: Synthetic oligonucleotide
ccugaaauccgcgaucaca

SEQ ID NO: 1614947 - RNA, 19 nt, Artificial Sequence
  Description of Artificial Sequence: Synthetic oligonucleotide
cgacaggucgagucaaagc

SEQ ID NO: 1614948 - RNA, 19 nt, Artificial Sequence
  Description of Artificial Sequence: Synthetic oligonucleotide
cagagacaauccugaccuc

SEQ ID NO: 1614949 - RNA, 19 nt, Artificial Sequence
  Description of Artificial Sequence: Synthetic oligonucleotide
ggucgagucaaagcauuca

SEQ ID NO: 1614950 - RNA, 19 nt, Artificial Sequence
  Description of Artificial Sequence: Synthetic oligonucleotide
cuugugccaccgaucucca

SEQ ID NO: 1614951 - RNA, 19 nt, Artificial Sequence
  Description of Artificial Sequence: Synthetic oligonucleotide
cacuugugcacccggucaa

SEQ ID NO: 1614952 - RNA, 19 nt, Artificial Sequence
  Description of Artificial Sequence: Synthetic oligonucleotide
caguuauuucucagcaaau

SEQ ID NO: 1614953 - RNA, 19 nt, Artificial Sequence
  Description of Artificial Sequence: Synthetic oligonucleotide
caagguucuuugaaucuuu

SEQ ID NO: 1614954 - RNA, 19 nt, Artificial Sequence
  Description of Artificial Sequence: Synthetic oligonucleotide
ggacagcuacauuaaggua

SEQ ID NO: 1614955 - RNA, 19 nt, Artificial Sequence
  Description of Artificial Sequence: Synthetic oligonucleotide
cugcgccuggacuggagga

SEQ ID NO: 1614956 - RNA, 19 nt, Artificial Sequence
  Description of Artificial Sequence: Synthetic oligonucleotide
ggcauguccgcugcgccug

SEQ ID NO: 1614957 - RNA, 19 nt, Artificial Sequence
  Description of Artificial Sequence: Synthetic oligonucleotide
gcuuaaccgacaggucgag

SEQ ID NO: 1614958 - RNA, 19 nt, Artificial Sequence
  Description of Artificial Sequence: Synthetic oligonucleotide
augaagcgacuggcauaac

SEQ ID NO: 1614959 - RNA, 19 nt, Artificial Sequence
  Description of Artificial Sequence: Synthetic oligonucleotide
gccgguguccaccacaccu

SEQ ID NO: 1614960 - RNA, 19 nt, Artificial Sequence
  Description of Artificial Sequence: Synthetic oligonucleotide
uguggccgugggucucaga

SEQ ID NO: 1614961 - RNA, 19 nt, Artificial Sequence
  Description of Artificial Sequence: Synthetic oligonucleotide
cgagccucccuuguggccg

SEQ ID NO: 1614962 - RNA, 19 nt, Artificial Sequence
  Description of Artificial Sequence: Synthetic oligonucleotide
ggacaauuguagaaccacu

SEQ ID NO: 1614963 - RNA, 19 nt, Artificial Sequence
  Description of Artificial Sequence: Synthetic oligonucleotide
ccgguguccaccacaccug

SEQ ID NO: 1614964 - RNA, 19 nt, Artificial Sequence
  Description of Artificial Sequence: Synthetic oligonucleotide
gugcacccggucaaacuuc

SEQ ID NO: 1614965 - RNA, 19 nt, Artificial Sequence
  Description of Artificial Sequence: Synthetic oligonucleotide
cggucaaacuuccagucca

SEQ ID NO: 1614966 - RNA, 19 nt, Artificial Sequence
  Description of Artificial Sequence: Synthetic oligonucleotide
gauccccuugugccaccga

SEQ ID NO: 1614967 - RNA, 19 nt, Artificial Sequence
  Description of Artificial Sequence: Synthetic oligonucleotide
cauaagccauugggaugac

SEQ ID NO: 1614968 - RNA, 19 nt, Artificial Sequence
  Description of Artificial Sequence: Synthetic oligonucleotide
ggauccccuugugccaccg

SEQ ID NO: 1614969 - RNA, 19 nt, Artificial Sequence
  Description of Artificial Sequence: Synthetic oligonucleotide
uugugccaccgaucuccaa

SEQ ID NO: 1614970 - RNA, 19 nt, Artificial Sequence
  Description of Artificial Sequence: Synthetic oligonucleotide
ccuccaccgcccuuaauga

SEQ ID NO: 1614971 - RNA, 19 nt, Artificial Sequence
  Description of Artificial Sequence: Synthetic oligonucleotide
caggucgagucaaagcauu

SEQ ID NO: 1614972 - RNA, 19 nt, Artificial Sequence
  Description of Artificial Sequence: Synthetic oligonucleotide
acagccauucgaaguucua

SEQ ID NO: 1614973 - RNA, 19 nt, Artificial Sequence
  Description of Artificial Sequence: Synthetic oligonucleotide
ugugcacgccccggcaguu

SEQ ID NO: 1614974 - RNA, 19 nt, Artificial Sequence
  Description of Artificial Sequence: Synthetic oligonucleotide
cacgccccggcaguugcac

SEQ ID NO: 1614975 - RNA, 19 nt, Artificial Sequence
  Description of Artificial Sequence: Synthetic oligonucleotide
ccucacauucacugagcca

SEQ ID NO: 1614976 - RNA, 19 nt, Artificial Sequence
  Description of Artificial Sequence: Synthetic oligonucleotide
cacccguggccagcugucc

SEQ ID NO: 1614977 - RNA, 19 nt, Artificial Sequence
  Description of Artificial Sequence: Synthetic oligonucleotide
agacucucucugccauguu

SEQ ID NO: 1614978 - RNA, 19 nt, Artificial Sequence
  Description of Artificial Sequence: Synthetic oligonucleotide
cuuguggccgugggucuca

SEQ ID NO: 1614979 - RNA, 19 nt, Artificial Sequence
  Description of Artificial Sequence: Synthetic oligonucleotide
cugcaucccaaaguagacu

SEQ ID NO: 1614980 - RNA, 19 nt, Artificial Sequence
  Description of Artificial Sequence: Synthetic oligonucleotide
ggguuaagccauacugcaa

SEQ ID NO: 1614981 - RNA, 19 nt, Artificial Sequence
  Description of Artificial Sequence: Synthetic oligonucleotide
gcauguccgcugcgccugg

SEQ ID NO: 1614982 - RNA, 19 nt, Artificial Sequence
  Description of Artificial Sequence: Synthetic oligonucleotide
ccauccugcaucccaaagu

SEQ ID NO: 1614983 - RNA, 19 nt, Artificial Sequence
  Description of Artificial Sequence: Synthetic oligonucleotide
caccgaucuccaagguucu

SEQ ID NO: 1614984 - RNA, 19 nt, Artificial Sequence
  Description of Artificial Sequence: Synthetic oligonucleotide
caccuggagucauuuugau

SEQ ID NO: 1614985 - RNA, 19 nt, Artificial Sequence
  Description of Artificial Sequence: Synthetic oligonucleotide
cgcccuuaaugagauugag

SEQ ID NO: 1614986 - RNA, 19 nt, Artificial Sequence
  Description of Artificial Sequence: Synthetic oligonucleotide
gggauccccuugugccacc

SEQ ID NO: 1614987 - RNA, 19 nt, Artificial Sequence
  Description of Artificial Sequence: Synthetic oligonucleotide
accgacaggucgagucaaa

SEQ ID NO: 1614988 - RNA, 19 nt, Artificial Sequence
  Description of Artificial Sequence: Synthetic oligonucleotide
gugcacgccccggcaguug

SEQ ID NO: 1614989 - RNA, 19 nt, Artificial Sequence
  Description of Artificial Sequence: Synthetic oligonucleotide
ccgugggucucagacugug

SEQ ID NO: 1614990 - RNA, 19 nt, Artificial Sequence
  Description of Artificial Sequence: Synthetic oligonucleotide
cuuaaccgacaggucgagu

SEQ ID NO: 1614991 - RNA, 19 nt, Artificial Sequence
  Description of Artificial Sequence: Synthetic oligonucleotide
ccgcccuuaaugagauuga

SEQ ID NO: 1614992 - RNA, 19 nt, Artificial Sequence
  Description of Artificial Sequence: Synthetic oligonucleotide
cugugcacgccccggcagu

SEQ ID NO: 1614993 - RNA, 19 nt, Artificial Sequence
  Description of Artificial Sequence: Synthetic oligonucleotide
accgaucuccaagguucuu

SEQ ID NO: 1614994 - RNA, 19 nt, Artificial Sequence
  Description of Artificial Sequence: Synthetic oligonucleotide
acccacccguggccagcug

SEQ ID NO: 1614995 - RNA, 19 nt, Artificial Sequence
  Description of Artificial Sequence: Synthetic oligonucleotide
agccuccaccgcccuuaau

SEQ ID NO: 1614996 - RNA, 19 nt, Artificial Sequence
  Description of Artificial Sequence: Synthetic oligonucleotide
ccccuugugccaccgaucu

SEQ ID NO: 1614997 - RNA, 19 nt, Artificial Sequence
  Description of Artificial Sequence: Synthetic oligonucleotide
gccucccuuguggccgugg

SEQ ID NO: 1614998 - RNA, 19 nt, Artificial Sequence
  Description of Artificial Sequence: Synthetic oligonucleotide
cucccuuguggccgugggu

SEQ ID NO: 1614999 - RNA, 19 nt, Artificial Sequence
  Description of Artificial Sequence: Synthetic oligonucleotide
gguguugauccaggucgcu

SEQ ID NO: 1615000 - RNA, 19 nt, Artificial Sequence
  Description of Artificial Sequence: Synthetic oligonucleotide
gcgccuggacuggaggaga

SEQ ID NO: 1615001 - RNA, 19 nt, Artificial Sequence
  Description of Artificial Sequence: Synthetic oligonucleotide
gguguacgcccugcuccuc

SEQ ID NO: 1615002 - RNA, 19 nt, Artificial Sequence
  Description of Artificial Sequence: Synthetic oligonucleotide
cgcgcucgagccucccuug

SEQ ID NO: 1615003 - RNA, 19 nt, Artificial Sequence
  Description of Artificial Sequence: Synthetic oligonucleotide
cauguccgcugcgccugga

SEQ ID NO: 1615004 - RNA, 19 nt, Artificial Sequence
  Description of Artificial Sequence: Synthetic oligonucleotide
ccacccacccguggccagc

SEQ ID NO: 1615005 - RNA, 19 nt, Artificial Sequence
  Description of Artificial Sequence: Synthetic oligonucleotide
ccaccgcccuuaaugagau

SEQ ID NO: 1615006 - RNA, 19 nt, Artificial Sequence
  Description of Artificial Sequence: Synthetic oligonucleotide
gggucacagcucggcuuac

SEQ ID NO: 1615007 - RNA, 19 nt, Artificial Sequence
  Description of Artificial Sequence: Synthetic oligonucleotide
gcucggcuuacugggacau

SEQ ID NO: 1615008 - RNA, 19 nt, Artificial Sequence
  Description of Artificial Sequence: Synthetic oligonucleotide
cagggucagaagggcuucu

SEQ ID NO: 1615009 - RNA, 19 nt, Artificial Sequence
  Description of Artificial Sequence: Synthetic oligonucleotide
cucggcuuacugggacaua

SEQ ID NO: 1615010 - RNA, 19 nt, Artificial Sequence
  Description of Artificial Sequence: Synthetic oligonucleotide
agccucccuuguggccgug

SEQ ID NO: 1615011 - RNA, 19 nt, Artificial Sequence
  Description of Artificial Sequence: Synthetic oligonucleotide
ccucaauagggauccccuu

SEQ ID NO: 1615012 - RNA, 19 nt, Artificial Sequence
  Description of Artificial Sequence: Synthetic oligonucleotide
gcuauucgcugaacagcau

SEQ ID NO: 1615013 - RNA, 19 nt, Artificial Sequence
  Description of Artificial Sequence: Synthetic oligonucleotide
cgacuggcauaaccagcca

SEQ ID NO: 1615014 - RNA, 19 nt, Artificial Sequence
  Description of Artificial Sequence: Synthetic oligonucleotide
gcacccggucaaacuucca

SEQ ID NO: 1615015 - RNA, 19 nt, Artificial Sequence
  Description of Artificial Sequence: Synthetic oligonucleotide
cacccacccguggccagcu

SEQ ID NO: 1615016 - RNA, 19 nt, Artificial Sequence
  Description of Artificial Sequence: Synthetic oligonucleotide
cgugguucuccaccgccgu

SEQ ID NO: 1615017 - RNA, 19 nt, Artificial Sequence
  Description of Artificial Sequence: Synthetic oligonucleotide
cagcuacauuaagguacau

SEQ ID NO: 1615018 - RNA, 19 nt, Artificial Sequence
  Description of Artificial Sequence: Synthetic oligonucleotide
cgaucacaaugaagcgacu

SEQ ID NO: 1615019 - RNA, 19 nt, Artificial Sequence
  Description of Artificial Sequence: Synthetic oligonucleotide
gcacgccccggcaguugca

SEQ ID NO: 1615020 - RNA, 19 nt, Artificial Sequence
  Description of Artificial Sequence: Synthetic oligonucleotide
ccaccgccguguggcucgc

SEQ ID NO: 1615021 - RNA, 19 nt, Artificial Sequence
  Description of Artificial Sequence: Synthetic oligonucleotide
caccgcccuuaaugagauu

SEQ ID NO: 1615022 - RNA, 19 nt, Artificial Sequence
  Description of Artificial Sequence: Synthetic oligonucleotide
cccgcgcucgagccucccu

SEQ ID NO: 1615023 - RNA, 19 nt, Artificial Sequence
  Description of Artificial Sequence: Synthetic oligonucleotide
ccguguggcucgccagcuu

SEQ ID NO: 1615024 - RNA, 19 nt, Artificial Sequence
  Description of Artificial Sequence: Synthetic oligonucleotide
ccgcugcgccuggacugga

SEQ ID NO: 1615025 - RNA, 19 nt, Artificial Sequence
  Description of Artificial Sequence: Synthetic oligonucleotide
aacuaaaagcugcagaaac

SEQ ID NO: 1615026 - RNA, 19 nt, Artificial Sequence
  Description of Artificial Sequence: Synthetic oligonucleotide
aaagaaauuacuuccuaug

SEQ ID NO: 1615027 - RNA, 19 nt, Artificial Sequence
  Description of Artificial Sequence: Synthetic oligonucleotide
auaaccauugggcuggucc

SEQ ID NO: 1615028 - RNA, 19 nt, Artificial Sequence
  Description of Artificial Sequence: Synthetic oligonucleotide
auaaguuacuuacccaugc

SEQ ID NO: 1615029 - RNA, 19 nt, Artificial Sequence
  Description of Artificial Sequence: Synthetic oligonucleotide
aaggguuacugucacauuc

SEQ ID NO: 1615030 - RNA, 19 nt, Artificial Sequence
  Description of Artificial Sequence: Synthetic oligonucleotide
ucuaacuccggaaagccgg

SEQ ID NO: 1615031 - RNA, 19 nt, Artificial Sequence
  Description of Artificial Sequence: Synthetic oligonucleotide
ucuacugaaaacucgugag

SEQ ID NO: 1615032 - RNA, 19 nt, Artificial Sequence
  Description of Artificial Sequence: Synthetic oligonucleotide
agugcagaaaauaaguuac

SEQ ID NO: 1615033 - RNA, 19 nt, Artificial Sequence
  Description of Artificial Sequence: Synthetic oligonucleotide
uaaguaacgguuauacuga

SEQ ID NO: 1615034 - RNA, 19 nt, Artificial Sequence
  Description of Artificial Sequence: Synthetic oligonucleotide
aaacuuaguuccucgguag

SEQ ID NO: 1615035 - RNA, 19 nt, Artificial Sequence
  Description of Artificial Sequence: Synthetic oligonucleotide
ucauacacuacuuauuuuc

SEQ ID NO: 1615036 - RNA, 19 nt, Artificial Sequence
  Description of Artificial Sequence: Synthetic oligonucleotide
aaaagaaauuacuuccuau

SEQ ID NO: 1615037 - RNA, 19 nt, Artificial Sequence
  Description of Artificial Sequence: Synthetic oligonucleotide
aacucuaacuccggaaagc

SEQ ID NO: 1615038 - RNA, 19 nt, Artificial Sequence
  Description of Artificial Sequence: Synthetic oligonucleotide
acugaauuacgcaucauac

SEQ ID NO: 1615039 - RNA, 19 nt, Artificial Sequence
  Description of Artificial Sequence: Synthetic oligonucleotide
uuaaaacauagucuaggga

SEQ ID NO: 1615040 - RNA, 19 nt, Artificial Sequence
  Description of Artificial Sequence: Synthetic oligonucleotide
accuaacucugucacaacc

SEQ ID NO: 1615041 - RNA, 19 nt, Artificial Sequence
  Description of Artificial Sequence: Synthetic oligonucleotide
uauacugaauuacgcauca

SEQ ID NO: 1615042 - RNA, 19 nt, Artificial Sequence
  Description of Artificial Sequence: Synthetic oligonucleotide
uaugcaagaccuaacucug

SEQ ID NO: 1615043 - RNA, 19 nt, Artificial Sequence
  Description of Artificial Sequence: Synthetic oligonucleotide
aauuacgcaucauacacua

SEQ ID NO: 1615044 - RNA, 19 nt, Artificial Sequence
  Description of Artificial Sequence: Synthetic oligonucleotide
uuacgcaucauacacuacu

SEQ ID NO: 1615045 - RNA, 19 nt, Artificial Sequence
  Description of Artificial Sequence: Synthetic oligonucleotide
guuguaaaauuccucguag

SEQ ID NO: 1615046 - RNA, 19 nt, Artificial Sequence
  Description of Artificial Sequence: Synthetic oligonucleotide
uuguaaaauuccucguagg

SEQ ID NO: 1615047 - RNA, 19 nt, Artificial Sequence
  Description of Artificial Sequence: Synthetic oligonucleotide
caucucagacaucacaucg

SEQ ID NO: 1615048 - RNA, 19 nt, Artificial Sequence
  Description of Artificial Sequence: Synthetic oligonucleotide
acaaacucgaaagaacaac

SEQ ID NO: 1615049 - RNA, 19 nt, Artificial Sequence
  Description of Artificial Sequence: Synthetic oligonucleotide
ucgaaagaacaacauuucc

SEQ ID NO: 1615050 - RNA, 19 nt, Artificial Sequence
  Description of Artificial Sequence: Synthetic oligonucleotide
guuuuaaucagggugacca

SEQ ID NO: 1615051 - RNA, 19 nt, Artificial Sequence
  Description of Artificial Sequence: Synthetic oligonucleotide
guuacuuacccaugcacag

SEQ ID NO: 1615052 - RNA, 19 nt, Artificial Sequence
  Description of Artificial Sequence: Synthetic oligonucleotide
uagucuagggauuucacaa

SEQ ID NO: 1615053 - RNA, 19 nt, Artificial Sequence
  Description of Artificial Sequence: Synthetic oligonucleotide
uguguuuacaaggucaagu

SEQ ID NO: 1615054 - RNA, 19 nt, Artificial Sequence
  Description of Artificial Sequence: Synthetic oligonucleotide
cauacacuacuuauuuucc

SEQ ID NO: 1615055 - RNA, 19 nt, Artificial Sequence
  Description of Artificial Sequence: Synthetic oligonucleotide
auacaguucacaguguguc

SEQ ID NO: 1615056 - RNA, 19 nt, Artificial Sequence
  Description of Artificial Sequence: Synthetic oligonucleotide
uauuuuccuaacucuaacu

SEQ ID NO: 1615057 - RNA, 19 nt, Artificial Sequence
  Description of Artificial Sequence: Synthetic oligonucleotide
cuuguuagggucuacuguc

SEQ ID NO: 1615058 - RNA, 19 nt, Artificial Sequence
  Description of Artificial Sequence: Synthetic oligonucleotide
uuauacugaauuacgcauc

SEQ ID NO: 1615059 - RNA, 19 nt, Artificial Sequence
  Description of Artificial Sequence: Synthetic oligonucleotide
uucggguuaggaauaauaa

SEQ ID NO: 1615060 - RNA, 19 nt, Artificial Sequence
  Description of Artificial Sequence: Synthetic oligonucleotide
cuagggauuucacaaauuc

SEQ ID NO: 1615061 - RNA, 19 nt, Artificial Sequence
  Description of Artificial Sequence: Synthetic oligonucleotide
uccucguaggcaaugggag

SEQ ID NO: 1615062 - RNA, 19 nt, Artificial Sequence
  Description of Artificial Sequence: Synthetic oligonucleotide
uucaaggauggauacaaaa

SEQ ID NO: 1615063 - RNA, 19 nt, Artificial Sequence
  Description of Artificial Sequence: Synthetic oligonucleotide
aguguugagagcugaaggu

SEQ ID NO: 1615064 - RNA, 19 nt, Artificial Sequence
  Description of Artificial Sequence: Synthetic oligonucleotide
cucauagccauugacgagg

SEQ ID NO: 1615065 - RNA, 19 nt, Artificial Sequence
  Description of Artificial Sequence: Synthetic oligonucleotide
agugugucccuuuguauuc

SEQ ID NO: 1615066 - RNA, 19 nt, Artificial Sequence
  Description of Artificial Sequence: Synthetic oligonucleotide
uuuaaucagggugaccaag

SEQ ID NO: 1615067 - RNA, 19 nt, Artificial Sequence
  Description of Artificial Sequence: Synthetic oligonucleotide
uguugagagcugaagguac

SEQ ID NO: 1615068 - RNA, 19 nt, Artificial Sequence
  Description of Artificial Sequence: Synthetic oligonucleotide
uaacucuaacuccggaaag

SEQ ID NO: 1615069 - RNA, 19 nt, Artificial Sequence
  Description of Artificial Sequence: Synthetic oligonucleotide
uagucuacugaaaacucgu

SEQ ID NO: 1615070 - RNA, 19 nt, Artificial Sequence
  Description of Artificial Sequence: Synthetic oligonucleotide
cuacuuauuuuccuaacuc

SEQ ID NO: 1615071 - RNA, 19 nt, Artificial Sequence
  Description of Artificial Sequence: Synthetic oligonucleotide
caucguacauugcaggccg

SEQ ID NO: 1615072 - RNA, 19 nt, Artificial Sequence
  Description of Artificial Sequence: Synthetic oligonucleotide
aaggucaaguucaaggaug

SEQ ID NO: 1615073 - RNA, 19 nt, Artificial Sequence
  Description of Artificial Sequence: Synthetic oligonucleotide
ucacaucguauuaaguaac

SEQ ID NO: 1615074 - RNA, 19 nt, Artificial Sequence
  Description of Artificial Sequence: Synthetic oligonucleotide
aauuucauucggguuagga

SEQ ID NO: 1615075 - RNA, 19 nt, Artificial Sequence
  Description of Artificial Sequence: Synthetic oligonucleotide
uuacuuccuaugcaagacc

SEQ ID NO: 1615076 - RNA, 19 nt, Artificial Sequence
  Description of Artificial Sequence: Synthetic oligonucleotide
cagcauucaggcaaggagc

SEQ ID NO: 1615077 - RNA, 19 nt, Artificial Sequence
  Description of Artificial Sequence: Synthetic oligonucleotide
aauaaguuacuuacccaug

SEQ ID NO: 1615078 - RNA, 19 nt, Artificial Sequence
  Description of Artificial Sequence: Synthetic oligonucleotide
ucaguguucgccucccuag

SEQ ID NO: 1615079 - RNA, 19 nt, Artificial Sequence
  Description of Artificial Sequence: Synthetic oligonucleotide
cauguuagcacaggggucc

SEQ ID NO: 1615080 - RNA, 19 nt, Artificial Sequence
  Description of Artificial Sequence: Synthetic oligonucleotide
caguguugagagcugaagg

SEQ ID NO: 1615081 - RNA, 19 nt, Artificial Sequence
  Description of Artificial Sequence: Synthetic oligonucleotide
ugucaaaagagcccauccu

SEQ ID NO: 1615082 - RNA, 19 nt, Artificial Sequence
  Description of Artificial Sequence: Synthetic oligonucleotide
aaaccuggcaugccggaug

SEQ ID NO: 1615083 - RNA, 19 nt, Artificial Sequence
  Description of Artificial Sequence: Synthetic oligonucleotide
uauacaguucacagugugu

SEQ ID NO: 1615084 - RNA, 19 nt, Artificial Sequence
  Description of Artificial Sequence: Synthetic oligonucleotide
gacgcgauggcauugcuga

SEQ ID NO: 1615085 - RNA, 19 nt, Artificial Sequence
  Description of Artificial Sequence: Synthetic oligonucleotide
uguucgccucccuagaccc

SEQ ID NO: 1615086 - RNA, 19 nt, Artificial Sequence
  Description of Artificial Sequence: Synthetic oligonucleotide
uacugaauuacgcaucaua

SEQ ID NO: 1615087 - RNA, 19 nt, Artificial Sequence
  Description of Artificial Sequence: Synthetic oligonucleotide
cacaucguauuaaguaacg

SEQ ID NO: 1615088 - RNA, 19 nt, Artificial Sequence
  Description of Artificial Sequence: Synthetic oligonucleotide
acaucguacauugcaggcc

SEQ ID NO: 1615089 - RNA, 19 nt, Artificial Sequence
  Description of Artificial Sequence: Synthetic oligonucleotide
aacucgcugucaaugcugc

SEQ ID NO: 1615090 - RNA, 19 nt, Artificial Sequence
  Description of Artificial Sequence: Synthetic oligonucleotide
agacagcucauguuagcac

SEQ ID NO: 1615091 - RNA, 19 nt, Artificial Sequence
  Description of Artificial Sequence: Synthetic oligonucleotide
aaaacucgugagcagcuaa

SEQ ID NO: 1615092 - RNA, 19 nt, Artificial Sequence
  Description of Artificial Sequence: Synthetic oligonucleotide
gguauaaccauugggcugg

SEQ ID NO: 1615093 - RNA, 19 nt, Artificial Sequence
  Description of Artificial Sequence: Synthetic oligonucleotide
aacucgaaagaacaacauu

SEQ ID NO: 1615094 - RNA, 19 nt, Artificial Sequence
  Description of Artificial Sequence: Synthetic oligonucleotide
caccuguaaacccuggugc

SEQ ID NO: 1615095 - RNA, 19 nt, Artificial Sequence
  Description of Artificial Sequence: Synthetic oligonucleotide
guagucuacugaaaacucg

SEQ ID NO: 1615096 - RNA, 19 nt, Artificial Sequence
  Description of Artificial Sequence: Synthetic oligonucleotide
agcucauguuagcacaggg

SEQ ID NO: 1615097 - RNA, 19 nt, Artificial Sequence
  Description of Artificial Sequence: Synthetic oligonucleotide
gucaucagggcuguaaucc

SEQ ID NO: 1615098 - RNA, 19 nt, Artificial Sequence
  Description of Artificial Sequence: Synthetic oligonucleotide
ugaaaacucgugagcagcu

SEQ ID NO: 1615099 - RNA, 19 nt, Artificial Sequence
  Description of Artificial Sequence: Synthetic oligonucleotide
cugucaaaagagcccaucc

SEQ ID NO: 1615100 - RNA, 19 nt, Artificial Sequence
  Description of Artificial Sequence: Synthetic oligonucleotide
caagaccuaacucugucac

SEQ ID NO: 1615101 - RNA, 19 nt, Artificial Sequence
  Description of Artificial Sequence: Synthetic oligonucleotide
caaacucgaaagaacaaca

SEQ ID NO: 1615102 - RNA, 19 nt, Artificial Sequence
  Description of Artificial Sequence: Synthetic oligonucleotide
agaaacuuaguuccucggu

SEQ ID NO: 1615103 - RNA, 19 nt, Artificial Sequence
  Description of Artificial Sequence: Synthetic oligonucleotide
cuacugaaaacucgugagc

SEQ ID NO: 1615104 - RNA, 19 nt, Artificial Sequence
  Description of Artificial Sequence: Synthetic oligonucleotide
auagucuagggauuucaca

SEQ ID NO: 1615105 - RNA, 19 nt, Artificial Sequence
  Description of Artificial Sequence: Synthetic oligonucleotide
uuacccaugcacagaauaa

SEQ ID NO: 1615106 - RNA, 19 nt, Artificial Sequence
  Description of Artificial Sequence: Synthetic oligonucleotide
aauuccucguaggcuggcc

SEQ ID NO: 1615107 - RNA, 19 nt, Artificial Sequence
  Description of Artificial Sequence: Synthetic oligonucleotide
ucguauuaaguaacgguua

SEQ ID NO: 1615108 - RNA, 19 nt, Artificial Sequence
  Description of Artificial Sequence: Synthetic oligonucleotide
ggagucacaucguacauug

SEQ ID NO: 1615109 - RNA, 19 nt, Artificial Sequence
  Description of Artificial Sequence: Synthetic oligonucleotide
acucgaaagaacaacauuu

SEQ ID NO: 1615110 - RNA, 19 nt, Artificial Sequence
  Description of Artificial Sequence: Synthetic oligonucleotide
uaaaugaucuuaguaucuc

SEQ ID NO: 1615111 - RNA, 19 nt, Artificial Sequence
  Description of Artificial Sequence: Synthetic oligonucleotide
aguucaaggauggauacaa

SEQ ID NO: 1615112 - RNA, 19 nt, Artificial Sequence
  Description of Artificial Sequence: Synthetic oligonucleotide
aaaauuccucguaggcugg

SEQ ID NO: 1615113 - RNA, 19 nt, Artificial Sequence
  Description of Artificial Sequence: Synthetic oligonucleotide
guaaccuggaucacagagg

SEQ ID NO: 1615114 - RNA, 19 nt, Artificial Sequence
  Description of Artificial Sequence: Synthetic oligonucleotide
aaugcugcggcaguuguaa

SEQ ID NO: 1615115 - RNA, 19 nt, Artificial Sequence
  Description of Artificial Sequence: Synthetic oligonucleotide
uacacuacuuauuuuccua

SEQ ID NO: 1615116 - RNA, 19 nt, Artificial Sequence
  Description of Artificial Sequence: Synthetic oligonucleotide
acaucguauuaaguaacgg

SEQ ID NO: 1615117 - RNA, 19 nt, Artificial Sequence
  Description of Artificial Sequence: Synthetic oligonucleotide
uaaccauugggcuggucca

SEQ ID NO: 1615118 - RNA, 19 nt, Artificial Sequence
  Description of Artificial Sequence: Synthetic oligonucleotide
cacaucguacauugcaggc

SEQ ID NO: 1615119 - RNA, 19 nt, Artificial Sequence
  Description of Artificial Sequence: Synthetic oligonucleotide
cagaggcuaauuucauucg

SEQ ID NO: 1615120 - RNA, 19 nt, Artificial Sequence
  Description of Artificial Sequence: Synthetic oligonucleotide
ugcggcaguuguaaaauuc

SEQ ID NO: 1615121 - RNA, 19 nt, Artificial Sequence
  Description of Artificial Sequence: Synthetic oligonucleotide
auuccucguaggcuggccg

SEQ ID NO: 1615122 - RNA, 19 nt, Artificial Sequence
  Description of Artificial Sequence: Synthetic oligonucleotide
caucacaucguauuaagua

SEQ ID NO: 1615123 - RNA, 19 nt, Artificial Sequence
  Description of Artificial Sequence: Synthetic oligonucleotide
gaaacuuaguuccucggua

SEQ ID NO: 1615124 - RNA, 19 nt, Artificial Sequence
  Description of Artificial Sequence: Synthetic oligonucleotide
agggucuacugucaaaaga

SEQ ID NO: 1615125 - RNA, 19 nt, Artificial Sequence
  Description of Artificial Sequence: Synthetic oligonucleotide
uaauccucguaggcaaugg

SEQ ID NO: 1615126 - RNA, 19 nt, Artificial Sequence
  Description of Artificial Sequence: Synthetic oligonucleotide
auacacuacuuauuuuccu

SEQ ID NO: 1615127 - RNA, 19 nt, Artificial Sequence
  Description of Artificial Sequence: Synthetic oligonucleotide
ucggguuaggaauaauaaa

SEQ ID NO: 1615128 - RNA, 19 nt, Artificial Sequence
  Description of Artificial Sequence: Synthetic oligonucleotide
cuaugcaagaccuaacucu

SEQ ID NO: 1615129 - RNA, 19 nt, Artificial Sequence
  Description of Artificial Sequence: Synthetic oligonucleotide
gucuacugucaaaagagcc

SEQ ID NO: 1615130 - RNA, 19 nt, Artificial Sequence
  Description of Artificial Sequence: Synthetic oligonucleotide
acagaaguccaucuggguu

SEQ ID NO: 1615131 - RNA, 19 nt, Artificial Sequence
  Description of Artificial Sequence: Synthetic oligonucleotide
uacccaugcacagaauaag

SEQ ID NO: 1615132 - RNA, 19 nt, Artificial Sequence
  Description of Artificial Sequence: Synthetic oligonucleotide
aguguucgccucccuagac

SEQ ID NO: 1615133 - RNA, 19 nt, Artificial Sequence
  Description of Artificial Sequence: Synthetic oligonucleotide
ugcaagaccuaacucuguc

SEQ ID NO: 1615134 - RNA, 19 nt, Artificial Sequence
  Description of Artificial Sequence: Synthetic oligonucleotide
uguaaacccuggugcacag

SEQ ID NO: 1615135 - RNA, 19 nt, Artificial Sequence
  Description of Artificial Sequence: Synthetic oligonucleotide
uuccuaacucuaacuccgg

SEQ ID NO: 1615136 - RNA, 19 nt, Artificial Sequence
  Description of Artificial Sequence: Synthetic oligonucleotide
aaaacauagucuagggauu

SEQ ID NO: 1615137 - RNA, 19 nt, Artificial Sequence
  Description of Artificial Sequence: Synthetic oligonucleotide
acucaaugcggcugaugcg

SEQ ID NO: 1615138 - RNA, 19 nt, Artificial Sequence
  Description of Artificial Sequence: Synthetic oligonucleotide
uggaucucacaguuugccc

SEQ ID NO: 1615139 - RNA, 19 nt, Artificial Sequence
  Description of Artificial Sequence: Synthetic oligonucleotide
acucauagccauugacgag

SEQ ID NO: 1615140 - RNA, 19 nt, Artificial Sequence
  Description of Artificial Sequence: Synthetic oligonucleotide
aacauagucuagggauuuc

SEQ ID NO: 1615141 - RNA, 19 nt, Artificial Sequence
  Description of Artificial Sequence: Synthetic oligonucleotide
aagaccuaacucugucaca

SEQ ID NO: 1615142 - RNA, 19 nt, Artificial Sequence
  Description of Artificial Sequence: Synthetic oligonucleotide
ucauguuagcacagggguc

SEQ ID NO: 1615143 - RNA, 19 nt, Artificial Sequence
  Description of Artificial Sequence: Synthetic oligonucleotide
aucguauuaaguaacgguu

SEQ ID NO: 1615144 - RNA, 19 nt, Artificial Sequence
  Description of Artificial Sequence: Synthetic oligonucleotide
ucuucccaaaccuggcaug

SEQ ID NO: 1615145 - RNA, 19 nt, Artificial Sequence
  Description of Artificial Sequence: Synthetic oligonucleotide
cucuaacuccggaaagccg

SEQ ID NO: 1615146 - RNA, 19 nt, Artificial Sequence
  Description of Artificial Sequence: Synthetic oligonucleotide
acaaggguuacugucacau

SEQ ID NO: 1615147 - RNA, 19 nt, Artificial Sequence
  Description of Artificial Sequence: Synthetic oligonucleotide
aggcuaauuucauucgggu

SEQ ID NO: 1615148 - RNA, 19 nt, Artificial Sequence
  Description of Artificial Sequence: Synthetic oligonucleotide
gagcccauccuugucaaag

SEQ ID NO: 1615149 - RNA, 19 nt, Artificial Sequence
  Description of Artificial Sequence: Synthetic oligonucleotide
ucgcugucaaugcugcggc

SEQ ID NO: 1615150 - RNA, 19 nt, Artificial Sequence
  Description of Artificial Sequence: Synthetic oligonucleotide
aaugcggcugaugcggcag

SEQ ID NO: 1615151 - RNA, 19 nt, Artificial Sequence
  Description of Artificial Sequence: Synthetic oligonucleotide
guaacgguuauacugaauu

SEQ ID NO: 1615152 - RNA, 19 nt, Artificial Sequence
  Description of Artificial Sequence: Synthetic oligonucleotide
uccucgguagucuacugaa

SEQ ID NO: 1615153 - RNA, 19 nt, Artificial Sequence
  Description of Artificial Sequence: Synthetic oligonucleotide
cuaacucuaacuccggaaa

SEQ ID NO: 1615154 - RNA, 19 nt, Artificial Sequence
  Description of Artificial Sequence: Synthetic oligonucleotide
cucgcugucaaugcugcgg

SEQ ID NO: 1615155 - RNA, 19 nt, Artificial Sequence
  Description of Artificial Sequence: Synthetic oligonucleotide
aaacucgaaagaacaacau

SEQ ID NO: 1615156 - RNA, 19 nt, Artificial Sequence
  Description of Artificial Sequence: Synthetic oligonucleotide
cugaauuacgcaucauaca

SEQ ID NO: 1615157 - RNA, 19 nt, Artificial Sequence
  Description of Artificial Sequence: Synthetic oligonucleotide
uaacgguuauacugaauua

SEQ ID NO: 1615158 - RNA, 19 nt, Artificial Sequence
  Description of Artificial Sequence: Synthetic oligonucleotide
aaacauagucuagggauuu

SEQ ID NO: 1615159 - RNA, 19 nt, Artificial Sequence
  Description of Artificial Sequence: Synthetic oligonucleotide
cuggcaugccggauggacg

SEQ ID NO: 1615160 - RNA, 19 nt, Artificial Sequence
  Description of Artificial Sequence: Synthetic oligonucleotide
aacaaacucgaaagaacaa

SEQ ID NO: 1615161 - RNA, 19 nt, Artificial Sequence
  Description of Artificial Sequence: Synthetic oligonucleotide
acaguguugagagcugaag

SEQ ID NO: 1615162 - RNA, 19 nt, Artificial Sequence
  Description of Artificial Sequence: Synthetic oligonucleotide
aauaaggcagaggcuaauu

SEQ ID NO: 1615163 - RNA, 19 nt, Artificial Sequence
  Description of Artificial Sequence: Synthetic oligonucleotide
agaccuaacucugucacaa

SEQ ID NO: 1615164 - RNA, 19 nt, Artificial Sequence
  Description of Artificial Sequence: Synthetic oligonucleotide
uagggucuacugucaaaag

SEQ ID NO: 1615165 - RNA, 19 nt, Artificial Sequence
  Description of Artificial Sequence: Synthetic oligonucleotide
uuccucgguagucuacuga

SEQ ID NO: 1615166 - RNA, 19 nt, Artificial Sequence
  Description of Artificial Sequence: Synthetic oligonucleotide
uccuaacucuaacuccgga

SEQ ID NO: 1615167 - RNA, 19 nt, Artificial Sequence
  Description of Artificial Sequence: Synthetic oligonucleotide
cagaggcacuuguagcugg

SEQ ID NO: 1615168 - RNA, 19 nt, Artificial Sequence
  Description of Artificial Sequence: Synthetic oligonucleotide
cacuacuuauuuuccuaac

SEQ ID NO: 1615169 - RNA, 19 nt, Artificial Sequence
  Description of Artificial Sequence: Synthetic oligonucleotide
ucauagccauugacgaggu

SEQ ID NO: 1615170 - RNA, 19 nt, Artificial Sequence
  Description of Artificial Sequence: Synthetic oligonucleotide
agcugaucaguguucgccu

SEQ ID NO: 1615171 - RNA, 19 nt, Artificial Sequence
  Description of Artificial Sequence: Synthetic oligonucleotide
uguuuuaaucagggugacc

SEQ ID NO: 1615172 - RNA, 19 nt, Artificial Sequence
  Description of Artificial Sequence: Synthetic oligonucleotide
ucuagggauuucacaaauu

SEQ ID NO: 1615173 - RNA, 19 nt, Artificial Sequence
  Description of Artificial Sequence: Synthetic oligonucleotide
gaacucgcugucaaugcug

SEQ ID NO: 1615174 - RNA, 19 nt, Artificial Sequence
  Description of Artificial Sequence: Synthetic oligonucleotide
guggaucucacaguuugcc

SEQ ID NO: 1615175 - RNA, 19 nt, Artificial Sequence
  Description of Artificial Sequence: Synthetic oligonucleotide
caucguauuaaguaacggu

SEQ ID NO: 1615176 - RNA, 19 nt, Artificial Sequence
  Description of Artificial Sequence: Synthetic oligonucleotide
cuaacuccggaaagccggc

SEQ ID NO: 1615177 - RNA, 19 nt, Artificial Sequence
  Description of Artificial Sequence: Synthetic oligonucleotide
caggccgagauuucuuccc

SEQ ID NO: 1615178 - RNA, 19 nt, Artificial Sequence
  Description of Artificial Sequence: Synthetic oligonucleotide
agcaugaugacaaggguua

SEQ ID NO: 1615179 - RNA, 19 nt, Artificial Sequence
  Description of Artificial Sequence: Synthetic oligonucleotide
augacaaggguuacuguca

SEQ ID NO: 1615180 - RNA, 19 nt, Artificial Sequence
  Description of Artificial Sequence: Synthetic oligonucleotide
uuccuaugcaagaccuaac

SEQ ID NO: 1615181 - RNA, 19 nt, Artificial Sequence
  Description of Artificial Sequence: Synthetic oligonucleotide
cucauguuagcacaggggu

SEQ ID NO: 1615182 - RNA, 19 nt, Artificial Sequence
  Description of Artificial Sequence: Synthetic oligonucleotide
ggcacucacacgucaaaag

SEQ ID NO: 1615183 - RNA, 19 nt, Artificial Sequence
  Description of Artificial Sequence: Synthetic oligonucleotide
cuuacccaugcacagaaua

SEQ ID NO: 1615184 - RNA, 19 nt, Artificial Sequence
  Description of Artificial Sequence: Synthetic oligonucleotide
cuuccucgcaguagaggcc

SEQ ID NO: 1615185 - RNA, 19 nt, Artificial Sequence
  Description of Artificial Sequence: Synthetic oligonucleotide
uguauucugccaggcacac

SEQ ID NO: 1615186 - RNA, 19 nt, Artificial Sequence
  Description of Artificial Sequence: Synthetic oligonucleotide
cugaucaguguucgccucc

SEQ ID NO: 1615187 - RNA, 19 nt, Artificial Sequence
  Description of Artificial Sequence: Synthetic oligonucleotide
acgucaaaagaaauuacuu

SEQ ID NO: 1615188 - RNA, 19 nt, Artificial Sequence
  Description of Artificial Sequence: Synthetic oligonucleotide
uuacuuacccaugcacaga

SEQ ID NO: 1615189 - RNA, 19 nt, Artificial Sequence
  Description of Artificial Sequence: Synthetic oligonucleotide
agucuagggauuucacaaa

SEQ ID NO: 1615190 - RNA, 19 nt, Artificial Sequence
  Description of Artificial Sequence: Synthetic oligonucleotide
auggacgcgauggcauugc

SEQ ID NO: 1615191 - RNA, 19 nt, Artificial Sequence
  Description of Artificial Sequence: Synthetic oligonucleotide
cuacugucaaaagagccca

SEQ ID NO: 1615192 - RNA, 19 nt, Artificial Sequence
  Description of Artificial Sequence: Synthetic oligonucleotide
cacgucaaaagaaauuacu

SEQ ID NO: 1615193 - RNA, 19 nt, Artificial Sequence
  Description of Artificial Sequence: Synthetic oligonucleotide
ugcagaaacuuaguuccuc

SEQ ID NO: 1615194 - RNA, 19 nt, Artificial Sequence
  Description of Artificial Sequence: Synthetic oligonucleotide
ugaccaagggcuugucauc

SEQ ID NO: 1615195 - RNA, 19 nt, Artificial Sequence
  Description of Artificial Sequence: Synthetic oligonucleotide
cacugucgcagguaccgcc

SEQ ID NO: 1615196 - RNA, 19 nt, Artificial Sequence
  Description of Artificial Sequence: Synthetic oligonucleotide
cagguaccgccauucagac

SEQ ID NO: 1615197 - RNA, 19 nt, Artificial Sequence
  Description of Artificial Sequence: Synthetic oligonucleotide
gaagguggaucucacaguu

SEQ ID NO: 1615198 - RNA, 19 nt, Artificial Sequence
  Description of Artificial Sequence: Synthetic oligonucleotide
gccauucaggccuucacug

SEQ ID NO: 1615199 - RNA, 19 nt, Artificial Sequence
  Description of Artificial Sequence: Synthetic oligonucleotide
ugaucaguguucgccuccc

SEQ ID NO: 1615200 - RNA, 19 nt, Artificial Sequence
  Description of Artificial Sequence: Synthetic oligonucleotide
guguucgccucccuagacc

SEQ ID NO: 1615201 - RNA, 19 nt, Artificial Sequence
  Description of Artificial Sequence: Synthetic oligonucleotide
uuaguuccucgguagucua

SEQ ID NO: 1615202 - RNA, 19 nt, Artificial Sequence
  Description of Artificial Sequence: Synthetic oligonucleotide
auuacgcaucauacacuac

SEQ ID NO: 1615203 - RNA, 19 nt, Artificial Sequence
  Description of Artificial Sequence: Synthetic oligonucleotide
cgagauuucuucccaaacc

SEQ ID NO: 1615204 - RNA, 19 nt, Artificial Sequence
  Description of Artificial Sequence: Synthetic oligonucleotide
gcucauguuagcacagggg

SEQ ID NO: 1615205 - RNA, 19 nt, Artificial Sequence
  Description of Artificial Sequence: Synthetic oligonucleotide
ucguacauugcaggccgag

SEQ ID NO: 1615206 - RNA, 19 nt, Artificial Sequence
  Description of Artificial Sequence: Synthetic oligonucleotide
auucggguuaggaauaaua

SEQ ID NO: 1615207 - RNA, 19 nt, Artificial Sequence
  Description of Artificial Sequence: Synthetic oligonucleotide
uagcuggugcccacacugc

SEQ ID NO: 1615208 - RNA, 19 nt, Artificial Sequence
  Description of Artificial Sequence: Synthetic oligonucleotide
guaauccucguaggcaaug

SEQ ID NO: 1615209 - RNA, 19 nt, Artificial Sequence
  Description of Artificial Sequence: Synthetic oligonucleotide
aguuccucgguagucuacu

SEQ ID NO: 1615210 - RNA, 19 nt, Artificial Sequence
  Description of Artificial Sequence: Synthetic oligonucleotide
ucccuagacccuucccuug

SEQ ID NO: 1615211 - RNA, 19 nt, Artificial Sequence
  Description of Artificial Sequence: Synthetic oligonucleotide
acucacacgucaaaagaaa

SEQ ID NO: 1615212 - RNA, 19 nt, Artificial Sequence
  Description of Artificial Sequence: Synthetic oligonucleotide
aggcaaugggagucacauc

SEQ ID NO: 1615213 - RNA, 19 nt, Artificial Sequence
  Description of Artificial Sequence: Synthetic oligonucleotide
uaguuccucgguagucuac

SEQ ID NO: 1615214 - RNA, 19 nt, Artificial Sequence
  Description of Artificial Sequence: Synthetic oligonucleotide
cuuccuaugcaagaccuaa

SEQ ID NO: 1615215 - RNA, 19 nt, Artificial Sequence
  Description of Artificial Sequence: Synthetic oligonucleotide
cagacaggcacucauugua

SEQ ID NO: 1615216 - RNA, 19 nt, Artificial Sequence
  Description of Artificial Sequence: Synthetic oligonucleotide
cugguacucaaugcggcug

SEQ ID NO: 1615217 - RNA, 19 nt, Artificial Sequence
  Description of Artificial Sequence: Synthetic oligonucleotide
acagaggcacuuguagcug

SEQ ID NO: 1615218 - RNA, 19 nt, Artificial Sequence
  Description of Artificial Sequence: Synthetic oligonucleotide
acaucacaucguauuaagu

SEQ ID NO: 1615219 - RNA, 19 nt, Artificial Sequence
  Description of Artificial Sequence: Synthetic oligonucleotide
aggguuacugucacauuca

SEQ ID NO: 1615220 - RNA, 19 nt, Artificial Sequence
  Description of Artificial Sequence: Synthetic oligonucleotide
auccucguaggcaauggga

SEQ ID NO: 1615221 - RNA, 19 nt, Artificial Sequence
  Description of Artificial Sequence: Synthetic oligonucleotide
gcugaugcggcagaaggug

SEQ ID NO: 1615222 - RNA, 19 nt, Artificial Sequence
  Description of Artificial Sequence: Synthetic oligonucleotide
aucaguguucgccucccua

SEQ ID NO: 1615223 - RNA, 19 nt, Artificial Sequence
  Description of Artificial Sequence: Synthetic oligonucleotide
guacauugcaggccgagau

SEQ ID NO: 1615224 - RNA, 19 nt, Artificial Sequence
  Description of Artificial Sequence: Synthetic oligonucleotide
ugcggcacgugccgugagc

SEQ ID NO: 1615225 - RNA, 19 nt, Artificial Sequence
  Description of Artificial Sequence: Synthetic oligonucleotide
aaacccuggugcacagaug

SEQ ID NO: 1615226 - RNA, 19 nt, Artificial Sequence
  Description of Artificial Sequence: Synthetic oligonucleotide
gugaccaagggcuugucau

SEQ ID NO: 1615227 - RNA, 19 nt, Artificial Sequence
  Description of Artificial Sequence: Synthetic oligonucleotide
uggugcacagaugcaugug

SEQ ID NO: 1615228 - RNA, 19 nt, Artificial Sequence
  Description of Artificial Sequence: Synthetic oligonucleotide
gaccuaacucugucacaac

SEQ ID NO: 1615229 - RNA, 19 nt, Artificial Sequence
  Description of Artificial Sequence: Synthetic oligonucleotide
agaauaaggcagaggcuaa

SEQ ID NO: 1615230 - RNA, 19 nt, Artificial Sequence
  Description of Artificial Sequence: Synthetic oligonucleotide
uuagcacagggguccuuau

SEQ ID NO: 1615231 - RNA, 19 nt, Artificial Sequence
  Description of Artificial Sequence: Synthetic oligonucleotide
ggucuacugucaaaagagc

SEQ ID NO: 1615232 - RNA, 19 nt, Artificial Sequence
  Description of Artificial Sequence: Synthetic oligonucleotide
aggccgagauuucuuccca

SEQ ID NO: 1615233 - RNA, 19 nt, Artificial Sequence
  Description of Artificial Sequence: Synthetic oligonucleotide
ucauucggguuaggaauaa

SEQ ID NO: 1615234 - RNA, 19 nt, Artificial Sequence
  Description of Artificial Sequence: Synthetic oligonucleotide
cuaaaagcugcagaaacuu

SEQ ID NO: 1615235 - RNA, 19 nt, Artificial Sequence
  Description of Artificial Sequence: Synthetic oligonucleotide
gucaaguucaaggauggau

SEQ ID NO: 1615236 - RNA, 19 nt, Artificial Sequence
  Description of Artificial Sequence: Synthetic oligonucleotide
gcggcaguuguaaaauucc

SEQ ID NO: 1615237 - RNA, 19 nt, Artificial Sequence
  Description of Artificial Sequence: Synthetic oligonucleotide
cauugggcugguccaagca

SEQ ID NO: 1615238 - RNA, 19 nt, Artificial Sequence
  Description of Artificial Sequence: Synthetic oligonucleotide
guugagagcugaagguaca

SEQ ID NO: 1615239 - RNA, 19 nt, Artificial Sequence
  Description of Artificial Sequence: Synthetic oligonucleotide
gacgaggucccugcaggug

SEQ ID NO: 1615240 - RNA, 19 nt, Artificial Sequence
  Description of Artificial Sequence: Synthetic oligonucleotide
acgcaucauacacuacuua

SEQ ID NO: 1615241 - RNA, 19 nt, Artificial Sequence
  Description of Artificial Sequence: Synthetic oligonucleotide
uacugucaaaagagcccau

SEQ ID NO: 1615242 - RNA, 19 nt, Artificial Sequence
  Description of Artificial Sequence: Synthetic oligonucleotide
ccuaacucugucacaacca

SEQ ID NO: 1615243 - RNA, 19 nt, Artificial Sequence
  Description of Artificial Sequence: Synthetic oligonucleotide
gguccuuauacaguucaca

SEQ ID NO: 1615244 - RNA, 19 nt, Artificial Sequence
  Description of Artificial Sequence: Synthetic oligonucleotide
caaaagagcccauccuugu

SEQ ID NO: 1615245 - RNA, 19 nt, Artificial Sequence
  Description of Artificial Sequence: Synthetic oligonucleotide
cauugcaggccgagauuuc

SEQ ID NO: 1615246 - RNA, 19 nt, Artificial Sequence
  Description of Artificial Sequence: Synthetic oligonucleotide
uucccuuguuuguguuuac

SEQ ID NO: 1615247 - RNA, 19 nt, Artificial Sequence
  Description of Artificial Sequence: Synthetic oligonucleotide
cccaaaccuggcaugccgg

SEQ ID NO: 1615248 - RNA, 19 nt, Artificial Sequence
  Description of Artificial Sequence: Synthetic oligonucleotide
cuguaaacccuggugcaca

SEQ ID NO: 1615249 - RNA, 19 nt, Artificial Sequence
  Description of Artificial Sequence: Synthetic oligonucleotide
gucgcagguaccgccauuc

SEQ ID NO: 1615250 - RNA, 19 nt, Artificial Sequence
  Description of Artificial Sequence: Synthetic oligonucleotide
uugcaggccgagauuucuu

SEQ ID NO: 1615251 - RNA, 19 nt, Artificial Sequence
  Description of Artificial Sequence: Synthetic oligonucleotide
ugcugaacucgcugucaau

SEQ ID NO: 1615252 - RNA, 19 nt, Artificial Sequence
  Description of Artificial Sequence: Synthetic oligonucleotide
ucacugucgcagguaccgc

SEQ ID NO: 1615253 - RNA, 19 nt, Artificial Sequence
  Description of Artificial Sequence: Synthetic oligonucleotide
cagaaguccaucuggguuu

SEQ ID NO: 1615254 - RNA, 19 nt, Artificial Sequence
  Description of Artificial Sequence: Synthetic oligonucleotide
aguaacgguuauacugaau

SEQ ID NO: 1615255 - RNA, 19 nt, Artificial Sequence
  Description of Artificial Sequence: Synthetic oligonucleotide
caguuguaaaauuccucgu

SEQ ID NO: 1615256 - RNA, 19 nt, Artificial Sequence
  Description of Artificial Sequence: Synthetic oligonucleotide
gcaggccgagauuucuucc

SEQ ID NO: 1615257 - RNA, 19 nt, Artificial Sequence
  Description of Artificial Sequence: Synthetic oligonucleotide
acugucgcagguaccgcca

SEQ ID NO: 1615258 - RNA, 19 nt, Artificial Sequence
  Description of Artificial Sequence: Synthetic oligonucleotide
gagucacaucguacauugc

SEQ ID NO: 1615259 - RNA, 19 nt, Artificial Sequence
  Description of Artificial Sequence: Synthetic oligonucleotide
ccgagauuucuucccaaac

SEQ ID NO: 1615260 - RNA, 19 nt, Artificial Sequence
  Description of Artificial Sequence: Synthetic oligonucleotide
uaacuccggaaagccggca

SEQ ID NO: 1615261 - RNA, 19 nt, Artificial Sequence
  Description of Artificial Sequence: Synthetic oligonucleotide
uccggaaagccggcacuca

SEQ ID NO: 1615262 - RNA, 19 nt, Artificial Sequence
  Description of Artificial Sequence: Synthetic oligonucleotide
uaccgccauucagacagcu

SEQ ID NO: 1615263 - RNA, 19 nt, Artificial Sequence
  Description of Artificial Sequence: Synthetic oligonucleotide
accgccauucagacagcuc

SEQ ID NO: 1615264 - RNA, 19 nt, Artificial Sequence
  Description of Artificial Sequence: Synthetic oligonucleotide
gaucacagaggcacuugua

SEQ ID NO: 1615265 - RNA, 19 nt, Artificial Sequence
  Description of Artificial Sequence: Synthetic oligonucleotide
ccuaacucuaacuccggaa

SEQ ID NO: 1615266 - RNA, 19 nt, Artificial Sequence
  Description of Artificial Sequence: Synthetic oligonucleotide
caaggucaaguucaaggau

SEQ ID NO: 1615267 - RNA, 19 nt, Artificial Sequence
  Description of Artificial Sequence: Synthetic oligonucleotide
agggugaccaagggcuugu

SEQ ID NO: 1615268 - RNA, 19 nt, Artificial Sequence
  Description of Artificial Sequence: Synthetic oligonucleotide
gacaguguugagagcugaa

SEQ ID NO: 1615269 - RNA, 19 nt, Artificial Sequence
  Description of Artificial Sequence: Synthetic oligonucleotide
cagugugucccuuuguauu

SEQ ID NO: 1615270 - RNA, 19 nt, Artificial Sequence
  Description of Artificial Sequence: Synthetic oligonucleotide
agggguccuuauacaguuc

SEQ ID NO: 1615271 - RNA, 19 nt, Artificial Sequence
  Description of Artificial Sequence: Synthetic oligonucleotide
uucgccucccuagacccuu

SEQ ID NO: 1615272 - RNA, 19 nt, Artificial Sequence
  Description of Artificial Sequence: Synthetic oligonucleotide
cacugcggcacgugccgug

SEQ ID NO: 1615273 - RNA, 19 nt, Artificial Sequence
  Description of Artificial Sequence: Synthetic oligonucleotide
auacugaauuacgcaucau

SEQ ID NO: 1615274 - RNA, 19 nt, Artificial Sequence
  Description of Artificial Sequence: Synthetic oligonucleotide
cuccggaaagccggcacuc

SEQ ID NO: 1615275 - RNA, 19 nt, Artificial Sequence
  Description of Artificial Sequence: Synthetic oligonucleotide
cggguuaggaauaauaaau

SEQ ID NO: 1615276 - RNA, 19 nt, Artificial Sequence
  Description of Artificial Sequence: Synthetic oligonucleotide
ugucgcagguaccgccauu

SEQ ID NO: 1615277 - RNA, 19 nt, Artificial Sequence
  Description of Artificial Sequence: Synthetic oligonucleotide
augccggauggacgcgaug

SEQ ID NO: 1615278 - RNA, 19 nt, Artificial Sequence
  Description of Artificial Sequence: Synthetic oligonucleotide
caguguucgccucccuaga

SEQ ID NO: 1615279 - RNA, 19 nt, Artificial Sequence
  Description of Artificial Sequence: Synthetic oligonucleotide
acugcggcacgugccguga

SEQ ID NO: 1615280 - RNA, 19 nt, Artificial Sequence
  Description of Artificial Sequence: Synthetic oligonucleotide
guaggcaaugggagucaca

SEQ ID NO: 1615281 - RNA, 19 nt, Artificial Sequence
  Description of Artificial Sequence: Synthetic oligonucleotide
caugaugacaaggguuacu

SEQ ID NO: 1615282 - RNA, 19 nt, Artificial Sequence
  Description of Artificial Sequence: Synthetic oligonucleotide
ccuguaaacccuggugcac

SEQ ID NO: 1615283 - RNA, 19 nt, Artificial Sequence
  Description of Artificial Sequence: Synthetic oligonucleotide
acuuccuaugcaagaccua

SEQ ID NO: 1615284 - RNA, 19 nt, Artificial Sequence
  Description of Artificial Sequence: Synthetic oligonucleotide
ggacgcgauggcauugcug

SEQ ID NO: 1615285 - RNA, 19 nt, Artificial Sequence
  Description of Artificial Sequence: Synthetic oligonucleotide
gcgauggcauugcugaacu

SEQ ID NO: 1615286 - RNA, 19 nt, Artificial Sequence
  Description of Artificial Sequence: Synthetic oligonucleotide
gccauucagacagcucaug

SEQ ID NO: 1615287 - RNA, 19 nt, Artificial Sequence
  Description of Artificial Sequence: Synthetic oligonucleotide
caaugcugcggcaguugua

SEQ ID NO: 1615288 - RNA, 19 nt, Artificial Sequence
  Description of Artificial Sequence: Synthetic oligonucleotide
acgcgauggcauugcugaa

SEQ ID NO: 1615289 - RNA, 19 nt, Artificial Sequence
  Description of Artificial Sequence: Synthetic oligonucleotide
guaggcuggccgggaggag

SEQ ID NO: 1615290 - RNA, 19 nt, Artificial Sequence
  Description of Artificial Sequence: Synthetic oligonucleotide
cugucaaugcugcggcagu

SEQ ID NO: 1615291 - RNA, 19 nt, Artificial Sequence
  Description of Artificial Sequence: Synthetic oligonucleotide
acuuacccaugcacagaau

SEQ ID NO: 1615292 - RNA, 19 nt, Artificial Sequence
  Description of Artificial Sequence: Synthetic oligonucleotide
guauucugccaggcacaca

SEQ ID NO: 1615293 - RNA, 19 nt, Artificial Sequence
  Description of Artificial Sequence: Synthetic oligonucleotide
gaucaguguucgccucccu

SEQ ID NO: 1615294 - RNA, 19 nt, Artificial Sequence
  Description of Artificial Sequence: Synthetic oligonucleotide
aucguacauugcaggccga

SEQ ID NO: 1615295 - RNA, 19 nt, Artificial Sequence
  Description of Artificial Sequence: Synthetic oligonucleotide
ccauucagacagcucaugu

SEQ ID NO: 1615296 - RNA, 19 nt, Artificial Sequence
  Description of Artificial Sequence: Synthetic oligonucleotide
cugcggcacgugccgugag

SEQ ID NO: 1615297 - RNA, 19 nt, Artificial Sequence
  Description of Artificial Sequence: Synthetic oligonucleotide
cucccuagacccuucccuu

SEQ ID NO: 1615298 - RNA, 19 nt, Artificial Sequence
  Description of Artificial Sequence: Synthetic oligonucleotide
gcaucauacacuacuuauu

SEQ ID NO: 1615299 - RNA, 19 nt, Artificial Sequence
  Description of Artificial Sequence: Synthetic oligonucleotide
cgcaucauacacuacuuau

SEQ ID NO: 1615300 - RNA, 19 nt, Artificial Sequence
  Description of Artificial Sequence: Synthetic oligonucleotide
cguauuaaguaacgguuau

SEQ ID NO: 1615301 - RNA, 19 nt, Artificial Sequence
  Description of Artificial Sequence: Synthetic oligonucleotide
gcggcacgugccgugagca

SEQ ID NO: 1615302 - RNA, 19 nt, Artificial Sequence
  Description of Artificial Sequence: Synthetic oligonucleotide
ccucccuagacccuucccu

SEQ ID NO: 1615303 - RNA, 19 nt, Artificial Sequence
  Description of Artificial Sequence: Synthetic oligonucleotide
ggcagaggcuaauuucauu

SEQ ID NO: 1615304 - RNA, 19 nt, Artificial Sequence
  Description of Artificial Sequence: Synthetic oligonucleotide
ccaugguaaccuggaucac

SEQ ID NO: 1615305 - RNA, 19 nt, Artificial Sequence
  Description of Artificial Sequence: Synthetic oligonucleotide
ccugguacucaaugcggcu

SEQ ID NO: 1615306 - RNA, 19 nt, Artificial Sequence
  Description of Artificial Sequence: Synthetic oligonucleotide
ccucguaggcaaugggagu

SEQ ID NO: 1615307 - RNA, 19 nt, Artificial Sequence
  Description of Artificial Sequence: Synthetic oligonucleotide
caugugccauucaggccuu

SEQ ID NO: 1615308 - RNA, 19 nt, Artificial Sequence
  Description of Artificial Sequence: Synthetic oligonucleotide
cauucggguuaggaauaau

SEQ ID NO: 1615309 - RNA, 19 nt, Artificial Sequence
  Description of Artificial Sequence: Synthetic oligonucleotide
guauaaccauugggcuggu

SEQ ID NO: 1615310 - RNA, 19 nt, Artificial Sequence
  Description of Artificial Sequence: Synthetic oligonucleotide
cguacauugcaggccgaga

SEQ ID NO: 1615311 - RNA, 19 nt, Artificial Sequence
  Description of Artificial Sequence: Synthetic oligonucleotide
gcggcagaagguggaucuc

SEQ ID NO: 1615312 - RNA, 19 nt, Artificial Sequence
  Description of Artificial Sequence: Synthetic oligonucleotide
cggcaguuguaaaauuccu

SEQ ID NO: 1615313 - RNA, 19 nt, Artificial Sequence
  Description of Artificial Sequence: Synthetic oligonucleotide
guucgccucccuagacccu

SEQ ID NO: 1615314 - RNA, 19 nt, Artificial Sequence
  Description of Artificial Sequence: Synthetic oligonucleotide
gccuucacugucgcaggua

SEQ ID NO: 1615315 - RNA, 19 nt, Artificial Sequence
  Description of Artificial Sequence: Synthetic oligonucleotide
cugucgcagguaccgccau

SEQ ID NO: 1615316 - RNA, 19 nt, Artificial Sequence
  Description of Artificial Sequence: Synthetic oligonucleotide
cccuagacccuucccuugu

SEQ ID NO: 1615317 - RNA, 19 nt, Artificial Sequence
  Description of Artificial Sequence: Synthetic oligonucleotide
cccuggugcacagaugcau

SEQ ID NO: 1615318 - RNA, 19 nt, Artificial Sequence
  Description of Artificial Sequence: Synthetic oligonucleotide
cggcacgugccgugagcac

SEQ ID NO: 1615319 - RNA, 19 nt, Artificial Sequence
  Description of Artificial Sequence: Synthetic oligonucleotide
ccuagacccuucccuuguu

SEQ ID NO: 1615320 - RNA, 19 nt, Artificial Sequence
  Description of Artificial Sequence: Synthetic oligonucleotide
cgugagcagcuaacauuuu

SEQ ID NO: 1615321 - RNA, 19 nt, Artificial Sequence
  Description of Artificial Sequence: Synthetic oligonucleotide
aauaaaugauuucuaagac

SEQ ID NO: 1615322 - RNA, 19 nt, Artificial Sequence
  Description of Artificial Sequence: Synthetic oligonucleotide
uuaauaauggcuaaaagcu

SEQ ID NO: 1615323 - RNA, 19 nt, Artificial Sequence
  Description of Artificial Sequence: Synthetic oligonucleotide
aaauuaagguuuuaguugg

SEQ ID NO: 1615324 - RNA, 19 nt, Artificial Sequence
  Description of Artificial Sequence: Synthetic oligonucleotide
aaaacuuacacuucuaaug

SEQ ID NO: 1615325 - RNA, 19 nt, Artificial Sequence
  Description of Artificial Sequence: Synthetic oligonucleotide
uauauagucacucauguac

SEQ ID NO: 1615326 - RNA, 19 nt, Artificial Sequence
  Description of Artificial Sequence: Synthetic oligonucleotide
gaauacauguguuauauag

SEQ ID NO: 1615327 - RNA, 19 nt, Artificial Sequence
  Description of Artificial Sequence: Synthetic oligonucleotide
aguuauucuacuuagaaga

SEQ ID NO: 1615328 - RNA, 19 nt, Artificial Sequence
  Description of Artificial Sequence: Synthetic oligonucleotide
aauaauggcuaaaagcucc

SEQ ID NO: 1615329 - RNA, 19 nt, Artificial Sequence
  Description of Artificial Sequence: Synthetic oligonucleotide
aacagauuacauuacagug

SEQ ID NO: 1615330 - RNA, 19 nt, Artificial Sequence
  Description of Artificial Sequence: Synthetic oligonucleotide
aauacaaaguuccccaaag

SEQ ID NO: 1615331 - RNA, 19 nt, Artificial Sequence
  Description of Artificial Sequence: Synthetic oligonucleotide
uguauacuaaauaauaaaa

SEQ ID NO: 1615332 - RNA, 19 nt, Artificial Sequence
  Description of Artificial Sequence: Synthetic oligonucleotide
aaugauacgucuuuaaaua

SEQ ID NO: 1615333 - RNA, 19 nt, Artificial Sequence
  Description of Artificial Sequence: Synthetic oligonucleotide
aacuugggaaaacuuacac

SEQ ID NO: 1615334 - RNA, 19 nt, Artificial Sequence
  Description of Artificial Sequence: Synthetic oligonucleotide
ugacaaaacgaucugacca

SEQ ID NO: 1615335 - RNA, 19 nt, Artificial Sequence
  Description of Artificial Sequence: Synthetic oligonucleotide
acaacuguaguuuauuuag

SEQ ID NO: 1615336 - RNA, 19 nt, Artificial Sequence
  Description of Artificial Sequence: Synthetic oligonucleotide
aaacuuacacuucuaauga

SEQ ID NO: 1615337 - RNA, 19 nt, Artificial Sequence
  Description of Artificial Sequence: Synthetic oligonucleotide
uaugcucaacacuagauag

SEQ ID NO: 1615338 - RNA, 19 nt, Artificial Sequence
  Description of Artificial Sequence: Synthetic oligonucleotide
ucauuuguuaccuaagaca

SEQ ID NO: 1615339 - RNA, 19 nt, Artificial Sequence
  Description of Artificial Sequence: Synthetic oligonucleotide
aagaccaccauuaauaaug

SEQ ID NO: 1615340 - RNA, 19 nt, Artificial Sequence
  Description of Artificial Sequence: Synthetic oligonucleotide
aaaugauacgucuuuaaau

SEQ ID NO: 1615341 - RNA, 19 nt, Artificial Sequence
  Description of Artificial Sequence: Synthetic oligonucleotide
aagauauguaacuugaauu

SEQ ID NO: 1615342 - RNA, 19 nt, Artificial Sequence
  Description of Artificial Sequence: Synthetic oligonucleotide
uacgucuuuaaauaaaaug

SEQ ID NO: 1615343 - RNA, 19 nt, Artificial Sequence
  Description of Artificial Sequence: Synthetic oligonucleotide
ugaaauacaaaguucccca

SEQ ID NO: 1615344 - RNA, 19 nt, Artificial Sequence
  Description of Artificial Sequence: Synthetic oligonucleotide
uuguucuugaauuucacug

SEQ ID NO: 1615345 - RNA, 19 nt, Artificial Sequence
  Description of Artificial Sequence: Synthetic oligonucleotide
aaguaguuauucuacuuag

SEQ ID NO: 1615346 - RNA, 19 nt, Artificial Sequence
  Description of Artificial Sequence: Synthetic oligonucleotide
auaauaauauaucccgcgg

SEQ ID NO: 1615347 - RNA, 19 nt, Artificial Sequence
  Description of Artificial Sequence: Synthetic oligonucleotide
aaacuaaauguaccggcac

SEQ ID NO: 1615348 - RNA, 19 nt, Artificial Sequence
  Description of Artificial Sequence: Synthetic oligonucleotide
aaggaaguauucuacacga

SEQ ID NO: 1615349 - RNA, 19 nt, Artificial Sequence
  Description of Artificial Sequence: Synthetic oligonucleotide
uacuauaugaauacaugug

SEQ ID NO: 1615350 - RNA, 19 nt, Artificial Sequence
  Description of Artificial Sequence: Synthetic oligonucleotide
aagaaaacguuucucaaaa

SEQ ID NO: 1615351 - RNA, 19 nt, Artificial Sequence
  Description of Artificial Sequence: Synthetic oligonucleotide
acuauaugaauacaugugu

SEQ ID NO: 1615352 - RNA, 19 nt, Artificial Sequence
  Description of Artificial Sequence: Synthetic oligonucleotide
ugcuuaugcaaaauaaaug

SEQ ID NO: 1615353 - RNA, 19 nt, Artificial Sequence
  Description of Artificial Sequence: Synthetic oligonucleotide
uugcuaaauacuaauauua

SEQ ID NO: 1615354 - RNA, 19 nt, Artificial Sequence
  Description of Artificial Sequence: Synthetic oligonucleotide
uguuauauagucacucaug

SEQ ID NO: 1615355 - RNA, 19 nt, Artificial Sequence
  Description of Artificial Sequence: Synthetic oligonucleotide
uuuguuaccuaagacauga

SEQ ID NO: 1615356 - RNA, 19 nt, Artificial Sequence
  Description of Artificial Sequence: Synthetic oligonucleotide
ucuaagacaccaaaugcca

SEQ ID NO: 1615357 - RNA, 19 nt, Artificial Sequence
  Description of Artificial Sequence: Synthetic oligonucleotide
uuaaaugucuacauguuuu

SEQ ID NO: 1615358 - RNA, 19 nt, Artificial Sequence
  Description of Artificial Sequence: Synthetic oligonucleotide
augaaauacaaaguucccc

SEQ ID NO: 1615359 - RNA, 19 nt, Artificial Sequence
  Description of Artificial Sequence: Synthetic oligonucleotide
aaaagcuccucauaggaaa

SEQ ID NO: 1615360 - RNA, 19 nt, Artificial Sequence
  Description of Artificial Sequence: Synthetic oligonucleotide
acaagaaagauggucacac

SEQ ID NO: 1615361 - RNA, 19 nt, Artificial Sequence
  Description of Artificial Sequence: Synthetic oligonucleotide
aaauauuucggagaacuga

SEQ ID NO: 1615362 - RNA, 19 nt, Artificial Sequence
  Description of Artificial Sequence: Synthetic oligonucleotide
aagacaugaacacuuagua

SEQ ID NO: 1615363 - RNA, 19 nt, Artificial Sequence
  Description of Artificial Sequence: Synthetic oligonucleotide
aauguaccggcacugagga

SEQ ID NO: 1615364 - RNA, 19 nt, Artificial Sequence
  Description of Artificial Sequence: Synthetic oligonucleotide
acaaggaaguauucuacac

SEQ ID NO: 1615365 - RNA, 19 nt, Artificial Sequence
  Description of Artificial Sequence: Synthetic oligonucleotide
cuuaguaggaguuagaacu

SEQ ID NO: 1615366 - RNA, 19 nt, Artificial Sequence
  Description of Artificial Sequence: Synthetic oligonucleotide
uguugcuaaauacuaauau

SEQ ID NO: 1615367 - RNA, 19 nt, Artificial Sequence
  Description of Artificial Sequence: Synthetic oligonucleotide
uauuucggagaacugaaga

SEQ ID NO: 1615368 - RNA, 19 nt, Artificial Sequence
  Description of Artificial Sequence: Synthetic oligonucleotide
aaaaugauacgucuuuaaa

SEQ ID NO: 1615369 - RNA, 19 nt, Artificial Sequence
  Description of Artificial Sequence: Synthetic oligonucleotide
uuaccuaagacaugaacac

SEQ ID NO: 1615370 - RNA, 19 nt, Artificial Sequence
  Description of Artificial Sequence: Synthetic oligonucleotide
uaaacuaaauguaccggca

SEQ ID NO: 1615371 - RNA, 19 nt, Artificial Sequence
  Description of Artificial Sequence: Synthetic oligonucleotide
aauaauauaucccgcggua

SEQ ID NO: 1615372 - RNA, 19 nt, Artificial Sequence
  Description of Artificial Sequence: Synthetic oligonucleotide
uucuguauacuaaauaaua

SEQ ID NO: 1615373 - RNA, 19 nt, Artificial Sequence
  Description of Artificial Sequence: Synthetic oligonucleotide
ugcaugauaauucacugau

SEQ ID NO: 1615374 - RNA, 19 nt, Artificial Sequence
  Description of Artificial Sequence: Synthetic oligonucleotide
ucaacacuagauagcaucc

SEQ ID NO: 1615375 - RNA, 19 nt, Artificial Sequence
  Description of Artificial Sequence: Synthetic oligonucleotide
uguucuugaauuucacugc

SEQ ID NO: 1615376 - RNA, 19 nt, Artificial Sequence
  Description of Artificial Sequence: Synthetic oligonucleotide
aaagaaaacguuucucaaa

SEQ ID NO: 1615377 - RNA, 19 nt, Artificial Sequence
  Description of Artificial Sequence: Synthetic oligonucleotide
ucucuuauguauuucauuu

SEQ ID NO: 1615378 - RNA, 19 nt, Artificial Sequence
  Description of Artificial Sequence: Synthetic oligonucleotide
agauauguaacuugaauuu

SEQ ID NO: 1615379 - RNA, 19 nt, Artificial Sequence
  Description of Artificial Sequence: Synthetic oligonucleotide
uaacagauuacauuacagu

SEQ ID NO: 1615380 - RNA, 19 nt, Artificial Sequence
  Description of Artificial Sequence: Synthetic oligonucleotide
uaauaauauaucccgcggu

SEQ ID NO: 1615381 - RNA, 19 nt, Artificial Sequence
  Description of Artificial Sequence: Synthetic oligonucleotide
uuucauuuguuaccuaaga

SEQ ID NO: 1615382 - RNA, 19 nt, Artificial Sequence
  Description of Artificial Sequence: Synthetic oligonucleotide
acuuaguaggaguuagaac

SEQ ID NO: 1615383 - RNA, 19 nt, Artificial Sequence
  Description of Artificial Sequence: Synthetic oligonucleotide
ugugcaugauaauucacug

SEQ ID NO: 1615384 - RNA, 19 nt, Artificial Sequence
  Description of Artificial Sequence: Synthetic oligonucleotide
caaaugugcaugauaauuc

SEQ ID NO: 1615385 - RNA, 19 nt, Artificial Sequence
  Description of Artificial Sequence: Synthetic oligonucleotide
caaacuugggaaaacuuac

SEQ ID NO: 1615386 - RNA, 19 nt, Artificial Sequence
  Description of Artificial Sequence: Synthetic oligonucleotide
uuacuauuguucuugaauu

SEQ ID NO: 1615387 - RNA, 19 nt, Artificial Sequence
  Description of Artificial Sequence: Synthetic oligonucleotide
caaggaaguauucuacacg

SEQ ID NO: 1615388 - RNA, 19 nt, Artificial Sequence
  Description of Artificial Sequence: Synthetic oligonucleotide
aaauguaccggcacugagg

SEQ ID NO: 1615389 - RNA, 19 nt, Artificial Sequence
  Description of Artificial Sequence: Synthetic oligonucleotide
auuucacugauuugacaac

SEQ ID NO: 1615390 - RNA, 19 nt, Artificial Sequence
  Description of Artificial Sequence: Synthetic oligonucleotide
aacgaucugaccacucugc

SEQ ID NO: 1615391 - RNA, 19 nt, Artificial Sequence
  Description of Artificial Sequence: Synthetic oligonucleotide
aacuaaauguaccggcacu

SEQ ID NO: 1615392 - RNA, 19 nt, Artificial Sequence
  Description of Artificial Sequence: Synthetic oligonucleotide
acaaaguuccccaaagagg

SEQ ID NO: 1615393 - RNA, 19 nt, Artificial Sequence
  Description of Artificial Sequence: Synthetic oligonucleotide
aaaauguugcuaaauacua

SEQ ID NO: 1615394 - RNA, 19 nt, Artificial Sequence
  Description of Artificial Sequence: Synthetic oligonucleotide
ugaacaaggaaguauucua

SEQ ID NO: 1615395 - RNA, 19 nt, Artificial Sequence
  Description of Artificial Sequence: Synthetic oligonucleotide
ucugcuuaugcaaaauaaa

SEQ ID NO: 1615396 - RNA, 19 nt, Artificial Sequence
  Description of Artificial Sequence: Synthetic oligonucleotide
uaaauguaccggcacugag

SEQ ID NO: 1615397 - RNA, 19 nt, Artificial Sequence
  Description of Artificial Sequence: Synthetic oligonucleotide
gaacuagacauccagucca

SEQ ID NO: 1615398 - RNA, 19 nt, Artificial Sequence
  Description of Artificial Sequence: Synthetic oligonucleotide
ugcuaaauacuaauauuaa

SEQ ID NO: 1615399 - RNA, 19 nt, Artificial Sequence
  Description of Artificial Sequence: Synthetic oligonucleotide
agcugcacgugacaaaacg

SEQ ID NO: 1615400 - RNA, 19 nt, Artificial Sequence
  Description of Artificial Sequence: Synthetic oligonucleotide
aaacgaucugaccacucug

SEQ ID NO: 1615401 - RNA, 19 nt, Artificial Sequence
  Description of Artificial Sequence: Synthetic oligonucleotide
aaaugauuucuaagacacc

SEQ ID NO: 1615402 - RNA, 19 nt, Artificial Sequence
  Description of Artificial Sequence: Synthetic oligonucleotide
uguguuauauagucacuca

SEQ ID NO: 1615403 - RNA, 19 nt, Artificial Sequence
  Description of Artificial Sequence: Synthetic oligonucleotide
uaaaaugauacgucuuuaa

SEQ ID NO: 1615404 - RNA, 19 nt, Artificial Sequence
  Description of Artificial Sequence: Synthetic oligonucleotide
guuaccuaagacaugaaca

SEQ ID NO: 1615405 - RNA, 19 nt, Artificial Sequence
  Description of Artificial Sequence: Synthetic oligonucleotide
uugaauuucacugcagacu

SEQ ID NO: 1615406 - RNA, 19 nt, Artificial Sequence
  Description of Artificial Sequence: Synthetic oligonucleotide
ugggaaaacuuacacuucu

SEQ ID NO: 1615407 - RNA, 19 nt, Artificial Sequence
  Description of Artificial Sequence: Synthetic oligonucleotide
uaauaauggcuaaaagcuc

SEQ ID NO: 1615408 - RNA, 19 nt, Artificial Sequence
  Description of Artificial Sequence: Synthetic oligonucleotide
cauggaacuagacauccag

SEQ ID NO: 1615409 - RNA, 19 nt, Artificial Sequence
  Description of Artificial Sequence: Synthetic oligonucleotide
auuaccccuucuuaaacug

SEQ ID NO: 1615410 - RNA, 19 nt, Artificial Sequence
  Description of Artificial Sequence: Synthetic oligonucleotide
aacaaagaccaccauuaau

SEQ ID NO: 1615411 - RNA, 19 nt, Artificial Sequence
  Description of Artificial Sequence: Synthetic oligonucleotide
uacaugacacaaacuuggg

SEQ ID NO: 1615412 - RNA, 19 nt, Artificial Sequence
  Description of Artificial Sequence: Synthetic oligonucleotide
gacaaaacgaucugaccac

SEQ ID NO: 1615413 - RNA, 19 nt, Artificial Sequence
  Description of Artificial Sequence: Synthetic oligonucleotide
aaauacaaaguuccccaaa

SEQ ID NO: 1615414 - RNA, 19 nt, Artificial Sequence
  Description of Artificial Sequence: Synthetic oligonucleotide
uucggagaacugaagaacu

SEQ ID NO: 1615415 - RNA, 19 nt, Artificial Sequence
  Description of Artificial Sequence: Synthetic oligonucleotide
uauuggcaagaaaauuaag

SEQ ID NO: 1615416 - RNA, 19 nt, Artificial Sequence
  Description of Artificial Sequence: Synthetic oligonucleotide
acauuuacuauuguucuug

SEQ ID NO: 1615417 - RNA, 19 nt, Artificial Sequence
  Description of Artificial Sequence: Synthetic oligonucleotide
aauauuucggagaacugaa

SEQ ID NO: 1615418 - RNA, 19 nt, Artificial Sequence
  Description of Artificial Sequence: Synthetic oligonucleotide
auguguuauauagucacuc

SEQ ID NO: 1615419 - RNA, 19 nt, Artificial Sequence
  Description of Artificial Sequence: Synthetic oligonucleotide
ugauacgucuuuaaauaaa

SEQ ID NO: 1615420 - RNA, 19 nt, Artificial Sequence
  Description of Artificial Sequence: Synthetic oligonucleotide
gauggucacacacacaaaa

SEQ ID NO: 1615421 - RNA, 19 nt, Artificial Sequence
  Description of Artificial Sequence: Synthetic oligonucleotide
auuaagguuuuaguugggg

SEQ ID NO: 1615422 - RNA, 19 nt, Artificial Sequence
  Description of Artificial Sequence: Synthetic oligonucleotide
uauaucccgcgguaguagg

SEQ ID NO: 1615423 - RNA, 19 nt, Artificial Sequence
  Description of Artificial Sequence: Synthetic oligonucleotide
uggaacuagacauccaguc

SEQ ID NO: 1615424 - RNA, 19 nt, Artificial Sequence
  Description of Artificial Sequence: Synthetic oligonucleotide
aaaugcauucucuuaugua

SEQ ID NO: 1615425 - RNA, 19 nt, Artificial Sequence
  Description of Artificial Sequence: Synthetic oligonucleotide
uguuuggcaaaugugcaug

SEQ ID NO: 1615426 - RNA, 19 nt, Artificial Sequence
  Description of Artificial Sequence: Synthetic oligonucleotide
acaaagaccaccauuaaua

SEQ ID NO: 1615427 - RNA, 19 nt, Artificial Sequence
  Description of Artificial Sequence: Synthetic oligonucleotide
aacuacuauaugaauacau

SEQ ID NO: 1615428 - RNA, 19 nt, Artificial Sequence
  Description of Artificial Sequence: Synthetic oligonucleotide
acuacuauaugaauacaug

SEQ ID NO: 1615429 - RNA, 19 nt, Artificial Sequence
  Description of Artificial Sequence: Synthetic oligonucleotide
aaaauauuucggagaacug

SEQ ID NO: 1615430 - RNA, 19 nt, Artificial Sequence
  Description of Artificial Sequence: Synthetic oligonucleotide
cuaaaagcuccucauagga

SEQ ID NO: 1615431 - RNA, 19 nt, Artificial Sequence
  Description of Artificial Sequence: Synthetic oligonucleotide
augaugcuaaaaugauacg

SEQ ID NO: 1615432 - RNA, 19 nt, Artificial Sequence
  Description of Artificial Sequence: Synthetic oligonucleotide
ugauuaccccuucuuaaac

SEQ ID NO: 1615433 - RNA, 19 nt, Artificial Sequence
  Description of Artificial Sequence: Synthetic oligonucleotide
aggaguuagaacuacuaua

SEQ ID NO: 1615434 - RNA, 19 nt, Artificial Sequence
  Description of Artificial Sequence: Synthetic oligonucleotide
gaucugaccacucugcuua

SEQ ID NO: 1615435 - RNA, 19 nt, Artificial Sequence
  Description of Artificial Sequence: Synthetic oligonucleotide
guuauauagucacucaugu

SEQ ID NO: 1615436 - RNA, 19 nt, Artificial Sequence
  Description of Artificial Sequence: Synthetic oligonucleotide
uuucggagaacugaagaac

SEQ ID NO: 1615437 - RNA, 19 nt, Artificial Sequence
  Description of Artificial Sequence: Synthetic oligonucleotide
ugcucaacacuagauagca

SEQ ID NO: 1615438 - RNA, 19 nt, Artificial Sequence
  Description of Artificial Sequence: Synthetic oligonucleotide
auuucggagaacugaagaa

SEQ ID NO: 1615439 - RNA, 19 nt, Artificial Sequence
  Description of Artificial Sequence: Synthetic oligonucleotide
ugugucgggaagccguggg

SEQ ID NO: 1615440 - RNA, 19 nt, Artificial Sequence
  Description of Artificial Sequence: Synthetic oligonucleotide
auaauauaucccgcgguag

SEQ ID NO: 1615441 - RNA, 19 nt, Artificial Sequence
  Description of Artificial Sequence: Synthetic oligonucleotide
aaagaccaccauuaauaau

SEQ ID NO: 1615442 - RNA, 19 nt, Artificial Sequence
  Description of Artificial Sequence: Synthetic oligonucleotide
ucacugauuugacaacugu

SEQ ID NO: 1615443 - RNA, 19 nt, Artificial Sequence
  Description of Artificial Sequence: Synthetic oligonucleotide
gacuuggugggaauggucc

SEQ ID NO: 1615444 - RNA, 19 nt, Artificial Sequence
  Description of Artificial Sequence: Synthetic oligonucleotide
gacaccaaaugccaaucac

SEQ ID NO: 1615445 - RNA, 19 nt, Artificial Sequence
  Description of Artificial Sequence: Synthetic oligonucleotide
aauuaagguuuuaguuggg

SEQ ID NO: 1615446 - RNA, 19 nt, Artificial Sequence
  Description of Artificial Sequence: Synthetic oligonucleotide
auaugaauacauguguuau

SEQ ID NO: 1615447 - RNA, 19 nt, Artificial Sequence
  Description of Artificial Sequence: Synthetic oligonucleotide
cuaagacaugaacacuuag

SEQ ID NO: 1615448 - RNA, 19 nt, Artificial Sequence
  Description of Artificial Sequence: Synthetic oligonucleotide
uaggaguuagaacuacuau

SEQ ID NO: 1615449 - RNA, 19 nt, Artificial Sequence
  Description of Artificial Sequence: Synthetic oligonucleotide
gacgcgagggagcuggccg

SEQ ID NO: 1615450 - RNA, 19 nt, Artificial Sequence
  Description of Artificial Sequence: Synthetic oligonucleotide
aaacguuucucaaaaugaa

SEQ ID NO: 1615451 - RNA, 19 nt, Artificial Sequence
  Description of Artificial Sequence: Synthetic oligonucleotide
uuaguaggaguuagaacua

SEQ ID NO: 1615452 - RNA, 19 nt, Artificial Sequence
  Description of Artificial Sequence: Synthetic oligonucleotide
aaacaaagaccaccauuaa

SEQ ID NO: 1615453 - RNA, 19 nt, Artificial Sequence
  Description of Artificial Sequence: Synthetic oligonucleotide
gaagauauguaacuugaau

SEQ ID NO: 1615454 - RNA, 19 nt, Artificial Sequence
  Description of Artificial Sequence: Synthetic oligonucleotide
aacuuacacuucuaaugaa

SEQ ID NO: 1615455 - RNA, 19 nt, Artificial Sequence
  Description of Artificial Sequence: Synthetic oligonucleotide
auaugcucaacacuagaua

SEQ ID NO: 1615456 - RNA, 19 nt, Artificial Sequence
  Description of Artificial Sequence: Synthetic oligonucleotide
cugaccacucugcuuaugc

SEQ ID NO: 1615457 - RNA, 19 nt, Artificial Sequence
  Description of Artificial Sequence: Synthetic oligonucleotide
cucuuauguauuucauuug

SEQ ID NO: 1615458 - RNA, 19 nt, Artificial Sequence
  Description of Artificial Sequence: Synthetic oligonucleotide
cacauggaacuagacaucc

SEQ ID NO: 1615459 - RNA, 19 nt, Artificial Sequence
  Description of Artificial Sequence: Synthetic oligonucleotide
gugacaaaacgaucugacc

SEQ ID NO: 1615460 - RNA, 19 nt, Artificial Sequence
  Description of Artificial Sequence: Synthetic oligonucleotide
caacaagaaagauggucac

SEQ ID NO: 1615461 - RNA, 19 nt, Artificial Sequence
  Description of Artificial Sequence: Synthetic oligonucleotide
gcuaaaagcuccucauagg

SEQ ID NO: 1615462 - RNA, 19 nt, Artificial Sequence
  Description of Artificial Sequence: Synthetic oligonucleotide
guacauuuacuauuguucu

SEQ ID NO: 1615463 - RNA, 19 nt, Artificial Sequence
  Description of Artificial Sequence: Synthetic oligonucleotide
aaauguugcuaaauacuaa

SEQ ID NO: 1615464 - RNA, 19 nt, Artificial Sequence
  Description of Artificial Sequence: Synthetic oligonucleotide
augcucaacacuagauagc

SEQ ID NO: 1615465 - RNA, 19 nt, Artificial Sequence
  Description of Artificial Sequence: Synthetic oligonucleotide
augauacgucuuuaaauaa

SEQ ID NO: 1615466 - RNA, 19 nt, Artificial Sequence
  Description of Artificial Sequence: Synthetic oligonucleotide
gacaacuguaguuuauuua

SEQ ID NO: 1615467 - RNA, 19 nt, Artificial Sequence
  Description of Artificial Sequence: Synthetic oligonucleotide
gugggaaugguccccgccg

SEQ ID NO: 1615468 - RNA, 19 nt, Artificial Sequence
  Description of Artificial Sequence: Synthetic oligonucleotide
ugcuaaaaugauacgucuu

SEQ ID NO: 1615469 - RNA, 19 nt, Artificial Sequence
  Description of Artificial Sequence: Synthetic oligonucleotide
gaugcuuaaaguucuuuau

SEQ ID NO: 1615470 - RNA, 19 nt, Artificial Sequence
  Description of Artificial Sequence: Synthetic oligonucleotide
ggaaguauucuacacgaca

SEQ ID NO: 1615471 - RNA, 19 nt, Artificial Sequence
  Description of Artificial Sequence: Synthetic oligonucleotide
gguaguaggcuuucacccg

SEQ ID NO: 1615472 - RNA, 19 nt, Artificial Sequence
  Description of Artificial Sequence: Synthetic oligonucleotide
uuauauagucacucaugua

SEQ ID NO: 1615473 - RNA, 19 nt, Artificial Sequence
  Description of Artificial Sequence: Synthetic oligonucleotide
aagaacucugccccugaaa

SEQ ID NO: 1615474 - RNA, 19 nt, Artificial Sequence
  Description of Artificial Sequence: Synthetic oligonucleotide
cuuaaacuguuucaccaca

SEQ ID NO: 1615475 - RNA, 19 nt, Artificial Sequence
  Description of Artificial Sequence: Synthetic oligonucleotide
ggaacuagacauccagucc

SEQ ID NO: 1615476 - RNA, 19 nt, Artificial Sequence
  Description of Artificial Sequence: Synthetic oligonucleotide
ucugggucgcuccucacuc

SEQ ID NO: 1615477 - RNA, 19 nt, Artificial Sequence
  Description of Artificial Sequence: Synthetic oligonucleotide
aauauaucccgcgguagua

SEQ ID NO: 1615478 - RNA, 19 nt, Artificial Sequence
  Description of Artificial Sequence: Synthetic oligonucleotide
acguuucucaaaaugaaau

SEQ ID NO: 1615479 - RNA, 19 nt, Artificial Sequence
  Description of Artificial Sequence: Synthetic oligonucleotide
augacacaaacuugggaaa

SEQ ID NO: 1615480 - RNA, 19 nt, Artificial Sequence
  Description of Artificial Sequence: Synthetic oligonucleotide
auauagucacucauguaca

SEQ ID NO: 1615481 - RNA, 19 nt, Artificial Sequence
  Description of Artificial Sequence: Synthetic oligonucleotide
uguucaucauuuguacagu

SEQ ID NO: 1615482 - RNA, 19 nt, Artificial Sequence
  Description of Artificial Sequence: Synthetic oligonucleotide
ugcacgugacaaaacgauc

SEQ ID NO: 1615483 - RNA, 19 nt, Artificial Sequence
  Description of Artificial Sequence: Synthetic oligonucleotide
aacguuucucaaaaugaaa

SEQ ID NO: 1615484 - RNA, 19 nt, Artificial Sequence
  Description of Artificial Sequence: Synthetic oligonucleotide
auauaucccgcgguaguag

SEQ ID NO: 1615485 - RNA, 19 nt, Artificial Sequence
  Description of Artificial Sequence: Synthetic oligonucleotide
augcuuaaaguucuuuaua

SEQ ID NO: 1615486 - RNA, 19 nt, Artificial Sequence
  Description of Artificial Sequence: Synthetic oligonucleotide
uuaccccuucuuaaacugu

SEQ ID NO: 1615487 - RNA, 19 nt, Artificial Sequence
  Description of Artificial Sequence: Synthetic oligonucleotide
guagggaagauauguaacu

SEQ ID NO: 1615488 - RNA, 19 nt, Artificial Sequence
  Description of Artificial Sequence: Synthetic oligonucleotide
ugacaacuguaguuuauuu

SEQ ID NO: 1615489 - RNA, 19 nt, Artificial Sequence
  Description of Artificial Sequence: Synthetic oligonucleotide
acaaacuugggaaaacuua

SEQ ID NO: 1615490 - RNA, 19 nt, Artificial Sequence
  Description of Artificial Sequence: Synthetic oligonucleotide
uuguuuggcaaaugugcau

SEQ ID NO: 1615491 - RNA, 19 nt, Artificial Sequence
  Description of Artificial Sequence: Synthetic oligonucleotide
acuuacacuucuaaugaaa

SEQ ID NO: 1615492 - RNA, 19 nt, Artificial Sequence
  Description of Artificial Sequence: Synthetic oligonucleotide
uacauuuacuauuguucuu

SEQ ID NO: 1615493 - RNA, 19 nt, Artificial Sequence
  Description of Artificial Sequence: Synthetic oligonucleotide
caaagaccaccauuaauaa

SEQ ID NO: 1615494 - RNA, 19 nt, Artificial Sequence
  Description of Artificial Sequence: Synthetic oligonucleotide
ucggagaacugaagaacuc

SEQ ID NO: 1615495 - RNA, 19 nt, Artificial Sequence
  Description of Artificial Sequence: Synthetic oligonucleotide
auuuacuauuguucuugaa

SEQ ID NO: 1615496 - RNA, 19 nt, Artificial Sequence
  Description of Artificial Sequence: Synthetic oligonucleotide
acaccaaaugccaaucacu

SEQ ID NO: 1615497 - RNA, 19 nt, Artificial Sequence
  Description of Artificial Sequence: Synthetic oligonucleotide
agacaccaaaugccaauca

SEQ ID NO: 1615498 - RNA, 19 nt, Artificial Sequence
  Description of Artificial Sequence: Synthetic oligonucleotide
uucuaaugaaaugcagcau

SEQ ID NO: 1615499 - RNA, 19 nt, Artificial Sequence
  Description of Artificial Sequence: Synthetic oligonucleotide
ugaauacauguguuauaua

SEQ ID NO: 1615500 - RNA, 19 nt, Artificial Sequence
  Description of Artificial Sequence: Synthetic oligonucleotide
auaucccgcgguaguaggc

SEQ ID NO: 1615501 - RNA, 19 nt, Artificial Sequence
  Description of Artificial Sequence: Synthetic oligonucleotide
acacauggaacuagacauc

SEQ ID NO: 1615502 - RNA, 19 nt, Artificial Sequence
  Description of Artificial Sequence: Synthetic oligonucleotide
ugggucgcuccucacuccc

SEQ ID NO: 1615503 - RNA, 19 nt, Artificial Sequence
  Description of Artificial Sequence: Synthetic oligonucleotide
auauuucggagaacugaag

SEQ ID NO: 1615504 - RNA, 19 nt, Artificial Sequence
  Description of Artificial Sequence: Synthetic oligonucleotide
aauucacugauuaccccuu

SEQ ID NO: 1615505 - RNA, 19 nt, Artificial Sequence
  Description of Artificial Sequence: Synthetic oligonucleotide
acuagauagcaucccuaaa

SEQ ID NO: 1615506 - RNA, 19 nt, Artificial Sequence
  Description of Artificial Sequence: Synthetic oligonucleotide
ggagcuggccgccugagug

SEQ ID NO: 1615507 - RNA, 19 nt, Artificial Sequence
  Description of Artificial Sequence: Synthetic oligonucleotide
gugugggacauagugcugc

SEQ ID NO: 1615508 - RNA, 19 nt, Artificial Sequence
  Description of Artificial Sequence: Synthetic oligonucleotide
aaagauggucacacacaca

SEQ ID NO: 1615509 - RNA, 19 nt, Artificial Sequence
  Description of Artificial Sequence: Synthetic oligonucleotide
acgcgagggagcuggccgc

SEQ ID NO: 1615510 - RNA, 19 nt, Artificial Sequence
  Description of Artificial Sequence: Synthetic oligonucleotide
ggacacauggaacuagaca

SEQ ID NO: 1615511 - RNA, 19 nt, Artificial Sequence
  Description of Artificial Sequence: Synthetic oligonucleotide
aggaaguauucuacacgac

SEQ ID NO: 1615512 - RNA, 19 nt, Artificial Sequence
  Description of Artificial Sequence: Synthetic oligonucleotide
ugucccucugggucgcucc

SEQ ID NO: 1615513 - RNA, 19 nt, Artificial Sequence
  Description of Artificial Sequence: Synthetic oligonucleotide
uaguaggaguuagaacuac

SEQ ID NO: 1615514 - RNA, 19 nt, Artificial Sequence
  Description of Artificial Sequence: Synthetic oligonucleotide
aguaguuauucuacuuaga

SEQ ID NO: 1615515 - RNA, 19 nt, Artificial Sequence
  Description of Artificial Sequence: Synthetic oligonucleotide
uaccccuucuuaaacuguu

SEQ ID NO: 1615516 - RNA, 19 nt, Artificial Sequence
  Description of Artificial Sequence: Synthetic oligonucleotide
gugcaugauaauucacuga

SEQ ID NO: 1615517 - RNA, 19 nt, Artificial Sequence
  Description of Artificial Sequence: Synthetic oligonucleotide
uagcaucccuaaaauuaaa

SEQ ID NO: 1615518 - RNA, 19 nt, Artificial Sequence
  Description of Artificial Sequence: Synthetic oligonucleotide
cugcuuaugcaaaauaaau

SEQ ID NO: 1615519 - RNA, 19 nt, Artificial Sequence
  Description of Artificial Sequence: Synthetic oligonucleotide
cacgugacaaaacgaucug

SEQ ID NO: 1615520 - RNA, 19 nt, Artificial Sequence
  Description of Artificial Sequence: Synthetic oligonucleotide
aggacacauggaacuagac

SEQ ID NO: 1615521 - RNA, 19 nt, Artificial Sequence
  Description of Artificial Sequence: Synthetic oligonucleotide
cucacuccccgccucgccg

SEQ ID NO: 1615522 - RNA, 19 nt, Artificial Sequence
  Description of Artificial Sequence: Synthetic oligonucleotide
gaacuacuauaugaauaca

SEQ ID NO: 1615523 - RNA, 19 nt, Artificial Sequence
  Description of Artificial Sequence: Synthetic oligonucleotide
ccucauaggaaacuguuca

SEQ ID NO: 1615524 - RNA, 19 nt, Artificial Sequence
  Description of Artificial Sequence: Synthetic oligonucleotide
acgaucugaccacucugcu

SEQ ID NO: 1615525 - RNA, 19 nt, Artificial Sequence
  Description of Artificial Sequence: Synthetic oligonucleotide
gggaagauauguaacuuga

SEQ ID NO: 1615526 - RNA, 19 nt, Artificial Sequence
  Description of Artificial Sequence: Synthetic oligonucleotide
cacuagauagcaucccuaa

SEQ ID NO: 1615527 - RNA, 19 nt, Artificial Sequence
  Description of Artificial Sequence: Synthetic oligonucleotide
caacuguaguuuauuuaga

SEQ ID NO: 1615528 - RNA, 19 nt, Artificial Sequence
  Description of Artificial Sequence: Synthetic oligonucleotide
gauuucuaagacaccaaau

SEQ ID NO: 1615529 - RNA, 19 nt, Artificial Sequence
  Description of Artificial Sequence: Synthetic oligonucleotide
cgugacaaaacgaucugac

SEQ ID NO: 1615530 - RNA, 19 nt, Artificial Sequence
  Description of Artificial Sequence: Synthetic oligonucleotide
gcgguaguaggcuuucacc

SEQ ID NO: 1615531 - RNA, 19 nt, Artificial Sequence
  Description of Artificial Sequence: Synthetic oligonucleotide
uaucccgcgguaguaggcu

SEQ ID NO: 1615532 - RNA, 19 nt, Artificial Sequence
  Description of Artificial Sequence: Synthetic oligonucleotide
ugcggguagggaagauaug

SEQ ID NO: 1615533 - RNA, 19 nt, Artificial Sequence
  Description of Artificial Sequence: Synthetic oligonucleotide
agcaucccuaaaauuaaau

SEQ ID NO: 1615534 - RNA, 19 nt, Artificial Sequence
  Description of Artificial Sequence: Synthetic oligonucleotide
uuguuaccuaagacaugaa

SEQ ID NO: 1615535 - RNA, 19 nt, Artificial Sequence
  Description of Artificial Sequence: Synthetic oligonucleotide
ggaguuagaacuacuauau

SEQ ID NO: 1615536 - RNA, 19 nt, Artificial Sequence
  Description of Artificial Sequence: Synthetic oligonucleotide
cacuuaguaggaguuagaa

SEQ ID NO: 1615537 - RNA, 19 nt, Artificial Sequence
  Description of Artificial Sequence: Synthetic oligonucleotide
acgugacaaaacgaucuga

SEQ ID NO: 1615538 - RNA, 19 nt, Artificial Sequence
  Description of Artificial Sequence: Synthetic oligonucleotide
auggaacuagacauccagu

SEQ ID NO: 1615539 - RNA, 19 nt, Artificial Sequence
  Description of Artificial Sequence: Synthetic oligonucleotide
cuaaaaugauacgucuuua

SEQ ID NO: 1615540 - RNA, 19 nt, Artificial Sequence
  Description of Artificial Sequence: Synthetic oligonucleotide
gcuaaauacuaauauuaau

SEQ ID NO: 1615541 - RNA, 19 nt, Artificial Sequence
  Description of Artificial Sequence: Synthetic oligonucleotide
uccagcugcacgugacaaa

SEQ ID NO: 1615542 - RNA, 19 nt, Artificial Sequence
  Description of Artificial Sequence: Synthetic oligonucleotide
cuaaauguaccggcacuga

SEQ ID NO: 1615543 - RNA, 19 nt, Artificial Sequence
  Description of Artificial Sequence: Synthetic oligonucleotide
auguugcuaaauacuaaua

SEQ ID NO: 1615544 - RNA, 19 nt, Artificial Sequence
  Description of Artificial Sequence: Synthetic oligonucleotide
agugccgggcgacgcgagg

SEQ ID NO: 1615545 - RNA, 19 nt, Artificial Sequence
  Description of Artificial Sequence: Synthetic oligonucleotide
uaauggcuaaaagcuccuc

SEQ ID NO: 1615546 - RNA, 19 nt, Artificial Sequence
  Description of Artificial Sequence: Synthetic oligonucleotide
ggcgacgcgagggagcugg

SEQ ID NO: 1615547 - RNA, 19 nt, Artificial Sequence
  Description of Artificial Sequence: Synthetic oligonucleotide
gaagccgugggcgcccgcc

SEQ ID NO: 1615548 - RNA, 19 nt, Artificial Sequence
  Description of Artificial Sequence: Synthetic oligonucleotide
gcuuaaaguucuuuauaua

SEQ ID NO: 1615549 - RNA, 19 nt, Artificial Sequence
  Description of Artificial Sequence: Synthetic oligonucleotide
gacgcccgcgaccgugugg

SEQ ID NO: 1615550 - RNA, 19 nt, Artificial Sequence
  Description of Artificial Sequence: Synthetic oligonucleotide
caaaugccaaucacucaaa

SEQ ID NO: 1615551 - RNA, 19 nt, Artificial Sequence
  Description of Artificial Sequence: Synthetic oligonucleotide
auagucacucauguacauu

SEQ ID NO: 1615552 - RNA, 19 nt, Artificial Sequence
  Description of Artificial Sequence: Synthetic oligonucleotide
cagugaacaaggaaguauu

SEQ ID NO: 1615553 - RNA, 19 nt, Artificial Sequence
  Description of Artificial Sequence: Synthetic oligonucleotide
gcuaaaaugauacgucuuu

SEQ ID NO: 1615554 - RNA, 19 nt, Artificial Sequence
  Description of Artificial Sequence: Synthetic oligonucleotide
gugucgggaagccgugggc

SEQ ID NO: 1615555 - RNA, 19 nt, Artificial Sequence
  Description of Artificial Sequence: Synthetic oligonucleotide
gcagacucacccuccaaca

SEQ ID NO: 1615556 - RNA, 19 nt, Artificial Sequence
  Description of Artificial Sequence: Synthetic oligonucleotide
gugggcgcccgccucgccg

SEQ ID NO: 1615557 - RNA, 19 nt, Artificial Sequence
  Description of Artificial Sequence: Synthetic oligonucleotide
cacugauuaccccuucuua

SEQ ID NO: 1615558 - RNA, 19 nt, Artificial Sequence
  Description of Artificial Sequence: Synthetic oligonucleotide
cugggucgcuccucacucc

SEQ ID NO: 1615559 - RNA, 19 nt, Artificial Sequence
  Description of Artificial Sequence: Synthetic oligonucleotide
cauguguuauauagucacu

SEQ ID NO: 1615560 - RNA, 19 nt, Artificial Sequence
  Description of Artificial Sequence: Synthetic oligonucleotide
acacuuaguaggaguuaga

SEQ ID NO: 1615561 - RNA, 19 nt, Artificial Sequence
  Description of Artificial Sequence: Synthetic oligonucleotide
aagccgugggcgcccgccu

SEQ ID NO: 1615562 - RNA, 19 nt, Artificial Sequence
  Description of Artificial Sequence: Synthetic oligonucleotide
cugcacgugacaaaacgau

SEQ ID NO: 1615563 - RNA, 19 nt, Artificial Sequence
  Description of Artificial Sequence: Synthetic oligonucleotide
gcgaccgugugggacauag

SEQ ID NO: 1615564 - RNA, 19 nt, Artificial Sequence
  Description of Artificial Sequence: Synthetic oligonucleotide
gugccgggcgacgcgaggg

SEQ ID NO: 1615565 - RNA, 19 nt, Artificial Sequence
  Description of Artificial Sequence: Synthetic oligonucleotide
ccauuaauaauggcuaaaa

SEQ ID NO: 1615566 - RNA, 19 nt, Artificial Sequence
  Description of Artificial Sequence: Synthetic oligonucleotide
gccugagugugucgggaag

SEQ ID NO: 1615567 - RNA, 19 nt, Artificial Sequence
  Description of Artificial Sequence: Synthetic oligonucleotide
gcacgugacaaaacgaucu

SEQ ID NO: 1615568 - RNA, 19 nt, Artificial Sequence
  Description of Artificial Sequence: Synthetic oligonucleotide
uggccgccugagugugucg

SEQ ID NO: 1615569 - RNA, 19 nt, Artificial Sequence
  Description of Artificial Sequence: Synthetic oligonucleotide
cagacucacccuccaacaa

SEQ ID NO: 1615570 - RNA, 19 nt, Artificial Sequence
  Description of Artificial Sequence: Synthetic oligonucleotide
cccaaagaggaaaauacau

SEQ ID NO: 1615571 - RNA, 19 nt, Artificial Sequence
  Description of Artificial Sequence: Synthetic oligonucleotide
gcugcacgugacaaaacga

SEQ ID NO: 1615572 - RNA, 19 nt, Artificial Sequence
  Description of Artificial Sequence: Synthetic oligonucleotide
ggaagauauguaacuugaa

SEQ ID NO: 1615573 - RNA, 19 nt, Artificial Sequence
  Description of Artificial Sequence: Synthetic oligonucleotide
ucccgcgguaguaggcuuu

SEQ ID NO: 1615574 - RNA, 19 nt, Artificial Sequence
  Description of Artificial Sequence: Synthetic oligonucleotide
agcuggccgccugagugug

SEQ ID NO: 1615575 - RNA, 19 nt, Artificial Sequence
  Description of Artificial Sequence: Synthetic oligonucleotide
gucgcuccucacuccccgc

SEQ ID NO: 1615576 - RNA, 19 nt, Artificial Sequence
  Description of Artificial Sequence: Synthetic oligonucleotide
ggccgccugagugugucgg

SEQ ID NO: 1615577 - RNA, 19 nt, Artificial Sequence
  Description of Artificial Sequence: Synthetic oligonucleotide
gugcggguagggaagauau

SEQ ID NO: 1615578 - RNA, 19 nt, Artificial Sequence
  Description of Artificial Sequence: Synthetic oligonucleotide
ccggacuuggugggaaugg

SEQ ID NO: 1615579 - RNA, 19 nt, Artificial Sequence
  Description of Artificial Sequence: Synthetic oligonucleotide
gggaaugguccccgccgcc

SEQ ID NO: 1615580 - RNA, 19 nt, Artificial Sequence
  Description of Artificial Sequence: Synthetic oligonucleotide
gcggguagggaagauaugu

SEQ ID NO: 1615581 - RNA, 19 nt, Artificial Sequence
  Description of Artificial Sequence: Synthetic oligonucleotide
ucacccggacuugguggga

SEQ ID NO: 1615582 - RNA, 19 nt, Artificial Sequence
  Description of Artificial Sequence: Synthetic oligonucleotide
cgccucgccgacuugcccg

SEQ ID NO: 1615583 - RNA, 19 nt, Artificial Sequence
  Description of Artificial Sequence: Synthetic oligonucleotide
ccuaagacaugaacacuua

SEQ ID NO: 1615584 - RNA, 19 nt, Artificial Sequence
  Description of Artificial Sequence: Synthetic oligonucleotide
aucccgcgguaguaggcuu

SEQ ID NO: 1615585 - RNA, 19 nt, Artificial Sequence
  Description of Artificial Sequence: Synthetic oligonucleotide
ucgccgacuugcccgccuu

SEQ ID NO: 1615586 - RNA, 19 nt, Artificial Sequence
  Description of Artificial Sequence: Synthetic oligonucleotide
cuugcccgcggcgcugcgc

SEQ ID NO: 1615587 - RNA, 19 nt, Artificial Sequence
  Description of Artificial Sequence: Synthetic oligonucleotide
gccggggcagugccgggcg

SEQ ID NO: 1615588 - RNA, 19 nt, Artificial Sequence
  Description of Artificial Sequence: Synthetic oligonucleotide
gccgccugagugugucggg

SEQ ID NO: 1615589 - RNA, 19 nt, Artificial Sequence
  Description of Artificial Sequence: Synthetic oligonucleotide
ugcccgccuugcccgcggc

SEQ ID NO: 1615590 - RNA, 19 nt, Artificial Sequence
  Description of Artificial Sequence: Synthetic oligonucleotide
ccagcugcacgugacaaaa

SEQ ID NO: 1615591 - RNA, 19 nt, Artificial Sequence
  Description of Artificial Sequence: Synthetic oligonucleotide
ggcaaaugugcaugauaau

SEQ ID NO: 1615592 - RNA, 19 nt, Artificial Sequence
  Description of Artificial Sequence: Synthetic oligonucleotide
gccgacuugcccgccuugc

SEQ ID NO: 1615593 - RNA, 19 nt, Artificial Sequence
  Description of Artificial Sequence: Synthetic oligonucleotide
gccucgccgacuugcccgc

SEQ ID NO: 1615594 - RNA, 19 nt, Artificial Sequence
  Description of Artificial Sequence: Synthetic oligonucleotide
ccgccgacgcccgcgaccg

SEQ ID NO: 1615595 - RNA, 19 nt, Artificial Sequence
  Description of Artificial Sequence: Synthetic oligonucleotide
ccgggcgacgcgagggagc

SEQ ID NO: 1615596 - RNA, 19 nt, Artificial Sequence
  Description of Artificial Sequence: Synthetic oligonucleotide
cccgccucgccgccggagg

SEQ ID NO: 1615597 - RNA, 19 nt, Artificial Sequence
  Description of Artificial Sequence: Synthetic oligonucleotide
cccgcgaccgugugggaca

SEQ ID NO: 1615598 - RNA, 19 nt, Artificial Sequence
  Description of Artificial Sequence: Synthetic oligonucleotide
cucugccccugaaaugcau

SEQ ID NO: 1615599 - RNA, 19 nt, Artificial Sequence
  Description of Artificial Sequence: Synthetic oligonucleotide
cccggacuuggugggaaug

SEQ ID NO: 1615600 - RNA, 19 nt, Artificial Sequence
  Description of Artificial Sequence: Synthetic oligonucleotide
gggucgcuccucacucccc

SEQ ID NO: 1615601 - RNA, 19 nt, Artificial Sequence
  Description of Artificial Sequence: Synthetic oligonucleotide
gcagugccgggcgacgcga

SEQ ID NO: 1615602 - RNA, 19 nt, Artificial Sequence
  Description of Artificial Sequence: Synthetic oligonucleotide
ggaagccgugggcgcccgc

SEQ ID NO: 1615603 - RNA, 19 nt, Artificial Sequence
  Description of Artificial Sequence: Synthetic oligonucleotide
ggccggggcagugccgggc

SEQ ID NO: 1615604 - RNA, 19 nt, Artificial Sequence
  Description of Artificial Sequence: Synthetic oligonucleotide
gcccgcgaccgugugggac

SEQ ID NO: 1615605 - RNA, 19 nt, Artificial Sequence
  Description of Artificial Sequence: Synthetic oligonucleotide
cucgccgacuugcccgccu

SEQ ID NO: 1615606 - RNA, 19 nt, Artificial Sequence
  Description of Artificial Sequence: Synthetic oligonucleotide
cccgcgguaguaggcuuuc

SEQ ID NO: 1615607 - RNA, 19 nt, Artificial Sequence
  Description of Artificial Sequence: Synthetic oligonucleotide
cgacgcgagggagcuggcc

SEQ ID NO: 1615608 - RNA, 19 nt, Artificial Sequence
  Description of Artificial Sequence: Synthetic oligonucleotide
gggagcuggccgccugagu

SEQ ID NO: 1615609 - RNA, 19 nt, Artificial Sequence
  Description of Artificial Sequence: Synthetic oligonucleotide
cgcgagggagcuggccgcc

SEQ ID NO: 1615610 - RNA, 19 nt, Artificial Sequence
  Description of Artificial Sequence: Synthetic oligonucleotide
cgaucugaccacucugcuu

SEQ ID NO: 1615611 - RNA, 19 nt, Artificial Sequence
  Description of Artificial Sequence: Synthetic oligonucleotide
gcgacgcgagggagcuggc

SEQ ID NO: 1615612 - RNA, 19 nt, Artificial Sequence
  Description of Artificial Sequence: Synthetic oligonucleotide
cgccgacuugcccgccuug

SEQ ID NO: 1615613 - RNA, 19 nt, Artificial Sequence
  Description of Artificial Sequence: Synthetic oligonucleotide
ccucgccgacuugcccgcc

SEQ ID NO: 1615614 - RNA, 19 nt, Artificial Sequence
  Description of Artificial Sequence: Synthetic oligonucleotide
cgugggcgcccgccucgcc

SEQ ID NO: 1615615 - RNA, 19 nt, Artificial Sequence
  Description of Artificial Sequence: Synthetic oligonucleotide
cgacgcccgcgaccgugug

SEQ ID NO: 1615616 - RNA, 19 nt, Artificial Sequence
  Description of Artificial Sequence: Synthetic oligonucleotide
cggacuuggugggaauggu

SEQ ID NO: 1615617 - RNA, 19 nt, Artificial Sequence
  Description of Artificial Sequence: Synthetic oligonucleotide
ccgacgcccgcgaccgugu

SEQ ID NO: 1615618 - RNA, 19 nt, Artificial Sequence
  Description of Artificial Sequence: Synthetic oligonucleotide
ccgcgguaguaggcuuuca

SEQ ID NO: 1615619 - RNA, 19 nt, Artificial Sequence
  Description of Artificial Sequence: Synthetic oligonucleotide
gggugcggguagggaagau

SEQ ID NO: 1615620 - RNA, 19 nt, Artificial Sequence
  Description of Artificial Sequence: Synthetic oligonucleotide
cgggcgacgcgagggagcu

SEQ ID NO: 1615621 - RNA, 19 nt, Artificial Sequence
  Description of Artificial Sequence: Synthetic oligonucleotide
gcuggccgccugagugugu

SEQ ID NO: 1615622 - RNA, 19 nt, Artificial Sequence
  Description of Artificial Sequence: Synthetic oligonucleotide
cgaccgugugggacauagu

SEQ ID NO: 1615623 - RNA, 19 nt, Artificial Sequence
  Description of Artificial Sequence: Synthetic oligonucleotide
cgcccgccucgccgacuug

SEQ ID NO: 1615624 - RNA, 19 nt, Artificial Sequence
  Description of Artificial Sequence: Synthetic oligonucleotide
cgcccgcgaccguguggga

SEQ ID NO: 1615625 - RNA, 19 nt, Artificial Sequence
  Description of Artificial Sequence: Synthetic oligonucleotide
ccgcgaccgugugggacau

SEQ ID NO: 1615626 - RNA, 19 nt, Artificial Sequence
  Description of Artificial Sequence: Synthetic oligonucleotide
cgcgaccgugugggacaua

SEQ ID NO: 1615627 - RNA, 19 nt, Artificial Sequence
  Description of Artificial Sequence: Synthetic oligonucleotide
cgccgacgcccgcgaccgu

SEQ ID NO: 1615628 - RNA, 19 nt, Artificial Sequence
  Description of Artificial Sequence: Synthetic oligonucleotide
uacaaaguggccaugaggg

SEQ ID NO: 1615629 - RNA, 19 nt, Artificial Sequence
  Description of Artificial Sequence: Synthetic oligonucleotide
aguaaagccaggucgaagc

SEQ ID NO: 1615630 - RNA, 19 nt, Artificial Sequence
  Description of Artificial Sequence: Synthetic oligonucleotide
agguugaaaacccucagcc

SEQ ID NO: 1615631 - RNA, 19 nt, Artificial Sequence
  Description of Artificial Sequence: Synthetic oligonucleotide
uuacaguagauguagaacc

SEQ ID NO: 1615632 - RNA, 19 nt, Artificial Sequence
  Description of Artificial Sequence: Synthetic oligonucleotide
guacucagcauguagaugg

SEQ ID NO: 1615633 - RNA, 19 nt, Artificial Sequence
  Description of Artificial Sequence: Synthetic oligonucleotide
uccaugauagaccauguag

SEQ ID NO: 1615634 - RNA, 19 nt, Artificial Sequence
  Description of Artificial Sequence: Synthetic oligonucleotide
guugaaaacccucagccgg

SEQ ID NO: 1615635 - RNA, 19 nt, Artificial Sequence
  Description of Artificial Sequence: Synthetic oligonucleotide
ugccuuguaaagcacauag

SEQ ID NO: 1615636 - RNA, 19 nt, Artificial Sequence
  Description of Artificial Sequence: Synthetic oligonucleotide
ugauagaccauguaggggu

SEQ ID NO: 1615637 - RNA, 19 nt, Artificial Sequence
  Description of Artificial Sequence: Synthetic oligonucleotide
uguagaacccagaaacugc

SEQ ID NO: 1615638 - RNA, 19 nt, Artificial Sequence
  Description of Artificial Sequence: Synthetic oligonucleotide
auguagaugggucacguag

SEQ ID NO: 1615639 - RNA, 19 nt, Artificial Sequence
  Description of Artificial Sequence: Synthetic oligonucleotide
uguagaugggucacguagg

SEQ ID NO: 1615640 - RNA, 19 nt, Artificial Sequence
  Description of Artificial Sequence: Synthetic oligonucleotide
ugacggagcgcacaggugg

SEQ ID NO: 1615641 - RNA, 19 nt, Artificial Sequence
  Description of Artificial Sequence: Synthetic oligonucleotide
auacaaaguggccaugagg

SEQ ID NO: 1615642 - RNA, 19 nt, Artificial Sequence
  Description of Artificial Sequence: Synthetic oligonucleotide
caugauagaccauguaggg

SEQ ID NO: 1615643 - RNA, 19 nt, Artificial Sequence
  Description of Artificial Sequence: Synthetic oligonucleotide
aguauggccacuucccugg

SEQ ID NO: 1615644 - RNA, 19 nt, Artificial Sequence
  Description of Artificial Sequence: Synthetic oligonucleotide
auagccagugaacgaagcc

SEQ ID NO: 1615645 - RNA, 19 nt, Artificial Sequence
  Description of Artificial Sequence: Synthetic oligonucleotide
agccaggacacauagugac

SEQ ID NO: 1615646 - RNA, 19 nt, Artificial Sequence
  Description of Artificial Sequence: Synthetic oligonucleotide
aaucacauagccagugaac

SEQ ID NO: 1615647 - RNA, 19 nt, Artificial Sequence
  Description of Artificial Sequence: Synthetic oligonucleotide
aucacauagccagugaacg

SEQ ID NO: 1615648 - RNA, 19 nt, Artificial Sequence
  Description of Artificial Sequence: Synthetic oligonucleotide
cugcaguaaagccaggucg

SEQ ID NO: 1615649 - RNA, 19 nt, Artificial Sequence
  Description of Artificial Sequence: Synthetic oligonucleotide
ucucagaacaugcuggagu

SEQ ID NO: 1615650 - RNA, 19 nt, Artificial Sequence
  Description of Artificial Sequence: Synthetic oligonucleotide
cuaagacaaucacauagcc

SEQ ID NO: 1615651 - RNA, 19 nt, Artificial Sequence
  Description of Artificial Sequence: Synthetic oligonucleotide
gacacauagugacaccagg

SEQ ID NO: 1615652 - RNA, 19 nt, Artificial Sequence
  Description of Artificial Sequence: Synthetic oligonucleotide
uugagcuaugccuagcccc

SEQ ID NO: 1615653 - RNA, 19 nt, Artificial Sequence
  Description of Artificial Sequence: Synthetic oligonucleotide
uacaguagauguagaaccc

SEQ ID NO: 1615654 - RNA, 19 nt, Artificial Sequence
  Description of Artificial Sequence: Synthetic oligonucleotide
agacaugcuggauaauuuc

SEQ ID NO: 1615655 - RNA, 19 nt, Artificial Sequence
  Description of Artificial Sequence: Synthetic oligonucleotide
ucugaaguagugugcaucu

SEQ ID NO: 1615656 - RNA, 19 nt, Artificial Sequence
  Description of Artificial Sequence: Synthetic oligonucleotide
uucuuggguaccaugguac

SEQ ID NO: 1615657 - RNA, 19 nt, Artificial Sequence
  Description of Artificial Sequence: Synthetic oligonucleotide
aaauggacccagguccugc

SEQ ID NO: 1615658 - RNA, 19 nt, Artificial Sequence
  Description of Artificial Sequence: Synthetic oligonucleotide
acagcccuaagacaaucac

SEQ ID NO: 1615659 - RNA, 19 nt, Artificial Sequence
  Description of Artificial Sequence: Synthetic oligonucleotide
guagugugcaucuggguag

SEQ ID NO: 1615660 - RNA, 19 nt, Artificial Sequence
  Description of Artificial Sequence: Synthetic oligonucleotide
uaggcauugagcaccaguc

SEQ ID NO: 1615661 - RNA, 19 nt, Artificial Sequence
  Description of Artificial Sequence: Synthetic oligonucleotide
ugcaguaaagccaggucga

SEQ ID NO: 1615662 - RNA, 19 nt, Artificial Sequence
  Description of Artificial Sequence: Synthetic oligonucleotide
agcaguauggccacuuccc

SEQ ID NO: 1615663 - RNA, 19 nt, Artificial Sequence
  Description of Artificial Sequence: Synthetic oligonucleotide
gacuguacucagcauguag

SEQ ID NO: 1615664 - RNA, 19 nt, Artificial Sequence
  Description of Artificial Sequence: Synthetic oligonucleotide
cucccaagcgcuucaagcg

SEQ ID NO: 1615665 - RNA, 19 nt, Artificial Sequence
  Description of Artificial Sequence: Synthetic oligonucleotide
uuuccaaauuaagaaaguc

SEQ ID NO: 1615666 - RNA, 19 nt, Artificial Sequence
  Description of Artificial Sequence: Synthetic oligonucleotide
cuuaaaguccugagucucc

SEQ ID NO: 1615667 - RNA, 19 nt, Artificial Sequence
  Description of Artificial Sequence: Synthetic oligonucleotide
ugcuggauaauuuccugga

SEQ ID NO: 1615668 - RNA, 19 nt, Artificial Sequence
  Description of Artificial Sequence: Synthetic oligonucleotide
gauaauuuccuggauugga

SEQ ID NO: 1615669 - RNA, 19 nt, Artificial Sequence
  Description of Artificial Sequence: Synthetic oligonucleotide
aaugcggaugccaagugga

SEQ ID NO: 1615670 - RNA, 19 nt, Artificial Sequence
  Description of Artificial Sequence: Synthetic oligonucleotide
uggaguucagucugggccc

SEQ ID NO: 1615671 - RNA, 19 nt, Artificial Sequence
  Description of Artificial Sequence: Synthetic oligonucleotide
cucagguagggaauguccc

SEQ ID NO: 1615672 - RNA, 19 nt, Artificial Sequence
  Description of Artificial Sequence: Synthetic oligonucleotide
ugagcuaugccuagcccca

SEQ ID NO: 1615673 - RNA, 19 nt, Artificial Sequence
  Description of Artificial Sequence: Synthetic oligonucleotide
aguagugugcaucugggua

SEQ ID NO: 1615674 - RNA, 19 nt, Artificial Sequence
  Description of Artificial Sequence: Synthetic oligonucleotide
caugguacagccaucuuca

SEQ ID NO: 1615675 - RNA, 19 nt, Artificial Sequence
  Description of Artificial Sequence: Synthetic oligonucleotide
cacagaaccagucuccaug

SEQ ID NO: 1615676 - RNA, 19 nt, Artificial Sequence
  Description of Artificial Sequence: Synthetic oligonucleotide
caguugagguugaaaaccc

SEQ ID NO: 1615677 - RNA, 19 nt, Artificial Sequence
  Description of Artificial Sequence: Synthetic oligonucleotide
augauuccgcuucugaagu

SEQ ID NO: 1615678 - RNA, 19 nt, Artificial Sequence
  Description of Artificial Sequence: Synthetic oligonucleotide
aacugggccaguucccaag

SEQ ID NO: 1615679 - RNA, 19 nt, Artificial Sequence
  Description of Artificial Sequence: Synthetic oligonucleotide
cuucacauacaaaguggcc

SEQ ID NO: 1615680 - RNA, 19 nt, Artificial Sequence
  Description of Artificial Sequence: Synthetic oligonucleotide
ccuguagugguuuucagag

SEQ ID NO: 1615681 - RNA, 19 nt, Artificial Sequence
  Description of Artificial Sequence: Synthetic oligonucleotide
gucgacuguacucagcaug

SEQ ID NO: 1615682 - RNA, 19 nt, Artificial Sequence
  Description of Artificial Sequence: Synthetic oligonucleotide
cccuaagacaaucacauag

SEQ ID NO: 1615683 - RNA, 19 nt, Artificial Sequence
  Description of Artificial Sequence: Synthetic oligonucleotide
accagucuccaugauagac

SEQ ID NO: 1615684 - RNA, 19 nt, Artificial Sequence
  Description of Artificial Sequence: Synthetic oligonucleotide
uuagguacuggaaguccug

SEQ ID NO: 1615685 - RNA, 19 nt, Artificial Sequence
  Description of Artificial Sequence: Synthetic oligonucleotide
cacaucugcacucuuggac

SEQ ID NO: 1615686 - RNA, 19 nt, Artificial Sequence
  Description of Artificial Sequence: Synthetic oligonucleotide
uucagucugggcccgacac

SEQ ID NO: 1615687 - RNA, 19 nt, Artificial Sequence
  Description of Artificial Sequence: Synthetic oligonucleotide
guagauguccuucugucga

SEQ ID NO: 1615688 - RNA, 19 nt, Artificial Sequence
  Description of Artificial Sequence: Synthetic oligonucleotide
aguguagacaugcuggaua

SEQ ID NO: 1615689 - RNA, 19 nt, Artificial Sequence
  Description of Artificial Sequence: Synthetic oligonucleotide
agccauugagaguguagac

SEQ ID NO: 1615690 - RNA, 19 nt, Artificial Sequence
  Description of Artificial Sequence: Synthetic oligonucleotide
aagcuuggaccacacggug

SEQ ID NO: 1615691 - RNA, 19 nt, Artificial Sequence
  Description of Artificial Sequence: Synthetic oligonucleotide
auguagaacccagaaacug

SEQ ID NO: 1615692 - RNA, 19 nt, Artificial Sequence
  Description of Artificial Sequence: Synthetic oligonucleotide
uuuugccuuagguacugga

SEQ ID NO: 1615693 - RNA, 19 nt, Artificial Sequence
  Description of Artificial Sequence: Synthetic oligonucleotide
augauagaccauguagggg

SEQ ID NO: 1615694 - RNA, 19 nt, Artificial Sequence
  Description of Artificial Sequence: Synthetic oligonucleotide
cauagcaguucuuggguac

SEQ ID NO: 1615695 - RNA, 19 nt, Artificial Sequence
  Description of Artificial Sequence: Synthetic oligonucleotide
gauuccgcuucugaaguag

SEQ ID NO: 1615696 - RNA, 19 nt, Artificial Sequence
  Description of Artificial Sequence: Synthetic oligonucleotide
uugaaaacccucagccgga

SEQ ID NO: 1615697 - RNA, 19 nt, Artificial Sequence
  Description of Artificial Sequence: Synthetic oligonucleotide
cacauaggcaucccggagc

SEQ ID NO: 1615698 - RNA, 19 nt, Artificial Sequence
  Description of Artificial Sequence: Synthetic oligonucleotide
uggagaacacacagaggcc

SEQ ID NO: 1615699 - RNA, 19 nt, Artificial Sequence
  Description of Artificial Sequence: Synthetic oligonucleotide
auagcaguucuuggguacc

SEQ ID NO: 1615700 - RNA, 19 nt, Artificial Sequence
  Description of Artificial Sequence: Synthetic oligonucleotide
auugagcaccaguccauuc

SEQ ID NO: 1615701 - RNA, 19 nt, Artificial Sequence
  Description of Artificial Sequence: Synthetic oligonucleotide
ggagaacacacagaggccg

SEQ ID NO: 1615702 - RNA, 19 nt, Artificial Sequence
  Description of Artificial Sequence: Synthetic oligonucleotide
caguccauucagauggagc

SEQ ID NO: 1615703 - RNA, 19 nt, Artificial Sequence
  Description of Artificial Sequence: Synthetic oligonucleotide
caagcggucggcccuaugc

SEQ ID NO: 1615704 - RNA, 19 nt, Artificial Sequence
  Description of Artificial Sequence: Synthetic oligonucleotide
gugaacgaagcccaccagc

SEQ ID NO: 1615705 - RNA, 19 nt, Artificial Sequence
  Description of Artificial Sequence: Synthetic oligonucleotide
uacucagcauguagauggg

SEQ ID NO: 1615706 - RNA, 19 nt, Artificial Sequence
  Description of Artificial Sequence: Synthetic oligonucleotide
uuggguaccaugguacagc

SEQ ID NO: 1615707 - RNA, 19 nt, Artificial Sequence
  Description of Artificial Sequence: Synthetic oligonucleotide
ucaaugcggaugccaagug

SEQ ID NO: 1615708 - RNA, 19 nt, Artificial Sequence
  Description of Artificial Sequence: Synthetic oligonucleotide
cacguaggcauugagcacc

SEQ ID NO: 1615709 - RNA, 19 nt, Artificial Sequence
  Description of Artificial Sequence: Synthetic oligonucleotide
uagacaugcuggauaauuu

SEQ ID NO: 1615710 - RNA, 19 nt, Artificial Sequence
  Description of Artificial Sequence: Synthetic oligonucleotide
uuaaaguccugagucucca

SEQ ID NO: 1615711 - RNA, 19 nt, Artificial Sequence
  Description of Artificial Sequence: Synthetic oligonucleotide
caaugcggaugccaagugg

SEQ ID NO: 1615712 - RNA, 19 nt, Artificial Sequence
  Description of Artificial Sequence: Synthetic oligonucleotide
uuggaugucuggagaacac

SEQ ID NO: 1615713 - RNA, 19 nt, Artificial Sequence
  Description of Artificial Sequence: Synthetic oligonucleotide
ccuaagacaaucacauagc

SEQ ID NO: 1615714 - RNA, 19 nt, Artificial Sequence
  Description of Artificial Sequence: Synthetic oligonucleotide
gucuccaugauagaccaug

SEQ ID NO: 1615715 - RNA, 19 nt, Artificial Sequence
  Description of Artificial Sequence: Synthetic oligonucleotide
cauagccagugaacgaagc

SEQ ID NO: 1615716 - RNA, 19 nt, Artificial Sequence
  Description of Artificial Sequence: Synthetic oligonucleotide
ugccuuagguacuggaagu

SEQ ID NO: 1615717 - RNA, 19 nt, Artificial Sequence
  Description of Artificial Sequence: Synthetic oligonucleotide
agguagggaaugucccagc

SEQ ID NO: 1615718 - RNA, 19 nt, Artificial Sequence
  Description of Artificial Sequence: Synthetic oligonucleotide
guccugagucuccacauag

SEQ ID NO: 1615719 - RNA, 19 nt, Artificial Sequence
  Description of Artificial Sequence: Synthetic oligonucleotide
ugucuggagaacacacaga

SEQ ID NO: 1615720 - RNA, 19 nt, Artificial Sequence
  Description of Artificial Sequence: Synthetic oligonucleotide
ugguacagccaucuucaga

SEQ ID NO: 1615721 - RNA, 19 nt, Artificial Sequence
  Description of Artificial Sequence: Synthetic oligonucleotide
ccaaauuaagaaagucucc

SEQ ID NO: 1615722 - RNA, 19 nt, Artificial Sequence
  Description of Artificial Sequence: Synthetic oligonucleotide
cauacaaaguggccaugag

SEQ ID NO: 1615723 - RNA, 19 nt, Artificial Sequence
  Description of Artificial Sequence: Synthetic oligonucleotide
aauggacccagguccugcu

SEQ ID NO: 1615724 - RNA, 19 nt, Artificial Sequence
  Description of Artificial Sequence: Synthetic oligonucleotide
uguacucagcauguagaug

SEQ ID NO: 1615725 - RNA, 19 nt, Artificial Sequence
  Description of Artificial Sequence: Synthetic oligonucleotide
uggguaccaugguacagcc

SEQ ID NO: 1615726 - RNA, 19 nt, Artificial Sequence
  Description of Artificial Sequence: Synthetic oligonucleotide
aaguccugcucacuccaca

SEQ ID NO: 1615727 - RNA, 19 nt, Artificial Sequence
  Description of Artificial Sequence: Synthetic oligonucleotide
ucuuggguaccaugguaca

SEQ ID NO: 1615728 - RNA, 19 nt, Artificial Sequence
  Description of Artificial Sequence: Synthetic oligonucleotide
cuugagcuaugccuagccc

SEQ ID NO: 1615729 - RNA, 19 nt, Artificial Sequence
  Description of Artificial Sequence: Synthetic oligonucleotide
gggguagccauugagagug

SEQ ID NO: 1615730 - RNA, 19 nt, Artificial Sequence
  Description of Artificial Sequence: Synthetic oligonucleotide
acuguacucagcauguaga

SEQ ID NO: 1615731 - RNA, 19 nt, Artificial Sequence
  Description of Artificial Sequence: Synthetic oligonucleotide
agcccuaagacaaucacau

SEQ ID NO: 1615732 - RNA, 19 nt, Artificial Sequence
  Description of Artificial Sequence: Synthetic oligonucleotide
gagcccuuaaaguccugag

SEQ ID NO: 1615733 - RNA, 19 nt, Artificial Sequence
  Description of Artificial Sequence: Synthetic oligonucleotide
ucugucgacuguacucagc

SEQ ID NO: 1615734 - RNA, 19 nt, Artificial Sequence
  Description of Artificial Sequence: Synthetic oligonucleotide
cacacggugugcucgguag

SEQ ID NO: 1615735 - RNA, 19 nt, Artificial Sequence
  Description of Artificial Sequence: Synthetic oligonucleotide
ucgaagcuuuccaaauuaa

SEQ ID NO: 1615736 - RNA, 19 nt, Artificial Sequence
  Description of Artificial Sequence: Synthetic oligonucleotide
accuguagugguuuucaga

SEQ ID NO: 1615737 - RNA, 19 nt, Artificial Sequence
  Description of Artificial Sequence: Synthetic oligonucleotide
aggacaggggucuuccuga

SEQ ID NO: 1615738 - RNA, 19 nt, Artificial Sequence
  Description of Artificial Sequence: Synthetic oligonucleotide
acagaaccacaucugcacu

SEQ ID NO: 1615739 - RNA, 19 nt, Artificial Sequence
  Description of Artificial Sequence: Synthetic oligonucleotide
auagucaaugcggaugcca

SEQ ID NO: 1615740 - RNA, 19 nt, Artificial Sequence
  Description of Artificial Sequence: Synthetic oligonucleotide
agcuaugccuagccccagc

SEQ ID NO: 1615741 - RNA, 19 nt, Artificial Sequence
  Description of Artificial Sequence: Synthetic oligonucleotide
ugggcuucauggcuggggu

SEQ ID NO: 1615742 - RNA, 19 nt, Artificial Sequence
  Description of Artificial Sequence: Synthetic oligonucleotide
agucaaugcggaugccaag

SEQ ID NO: 1615743 - RNA, 19 nt, Artificial Sequence
  Description of Artificial Sequence: Synthetic oligonucleotide
aggacacauagugacacca

SEQ ID NO: 1615744 - RNA, 19 nt, Artificial Sequence
  Description of Artificial Sequence: Synthetic oligonucleotide
agaaccagucuccaugaua

SEQ ID NO: 1615745 - RNA, 19 nt, Artificial Sequence
  Description of Artificial Sequence: Synthetic oligonucleotide
cagcaguugagguugaaaa

SEQ ID NO: 1615746 - RNA, 19 nt, Artificial Sequence
  Description of Artificial Sequence: Synthetic oligonucleotide
acauacaaaguggccauga

SEQ ID NO: 1615747 - RNA, 19 nt, Artificial Sequence
  Description of Artificial Sequence: Synthetic oligonucleotide
aagcggucggcccuaugcu

SEQ ID NO: 1615748 - RNA, 19 nt, Artificial Sequence
  Description of Artificial Sequence: Synthetic oligonucleotide
accauguagggguagccau

SEQ ID NO: 1615749 - RNA, 19 nt, Artificial Sequence
  Description of Artificial Sequence: Synthetic oligonucleotide
agcgcuucaagcggucggc

SEQ ID NO: 1615750 - RNA, 19 nt, Artificial Sequence
  Description of Artificial Sequence: Synthetic oligonucleotide
agcccuuaaaguccugagu

SEQ ID NO: 1615751 - RNA, 19 nt, Artificial Sequence
  Description of Artificial Sequence: Synthetic oligonucleotide
agguggccggcccuguccc

SEQ ID NO: 1615752 - RNA, 19 nt, Artificial Sequence
  Description of Artificial Sequence: Synthetic oligonucleotide
auaauuuccuggauuggau

SEQ ID NO: 1615753 - RNA, 19 nt, Artificial Sequence
  Description of Artificial Sequence: Synthetic oligonucleotide
aacccagaaacugccuugu

SEQ ID NO: 1615754 - RNA, 19 nt, Artificial Sequence
  Description of Artificial Sequence: Synthetic oligonucleotide
uaccaugguacagccaucu

SEQ ID NO: 1615755 - RNA, 19 nt, Artificial Sequence
  Description of Artificial Sequence: Synthetic oligonucleotide
ugugcucgguagauguccu

SEQ ID NO: 1615756 - RNA, 19 nt, Artificial Sequence
  Description of Artificial Sequence: Synthetic oligonucleotide
guagccauugagaguguag

SEQ ID NO: 1615757 - RNA, 19 nt, Artificial Sequence
  Description of Artificial Sequence: Synthetic oligonucleotide
cuuugggaugcauguugag

SEQ ID NO: 1615758 - RNA, 19 nt, Artificial Sequence
  Description of Artificial Sequence: Synthetic oligonucleotide
uagugugcaucuggguagg

SEQ ID NO: 1615759 - RNA, 19 nt, Artificial Sequence
  Description of Artificial Sequence: Synthetic oligonucleotide
uuuccuggauuggaugucu

SEQ ID NO: 1615760 - RNA, 19 nt, Artificial Sequence
  Description of Artificial Sequence: Synthetic oligonucleotide
guguagacaugcuggauaa

SEQ ID NO: 1615761 - RNA, 19 nt, Artificial Sequence
  Description of Artificial Sequence: Synthetic oligonucleotide
gcccuuaaaguccugaguc

SEQ ID NO: 1615762 - RNA, 19 nt, Artificial Sequence
  Description of Artificial Sequence: Synthetic oligonucleotide
ucccgcgccgcacaguccc

SEQ ID NO: 1615763 - RNA, 19 nt, Artificial Sequence
  Description of Artificial Sequence: Synthetic oligonucleotide
gaugccaaguggaaaugga

SEQ ID NO: 1615764 - RNA, 19 nt, Artificial Sequence
  Description of Artificial Sequence: Synthetic oligonucleotide
gccucaugaucagagaggg

SEQ ID NO: 1615765 - RNA, 19 nt, Artificial Sequence
  Description of Artificial Sequence: Synthetic oligonucleotide
caggucuuugggaugcaug

SEQ ID NO: 1615766 - RNA, 19 nt, Artificial Sequence
  Description of Artificial Sequence: Synthetic oligonucleotide
guugagguugaaaacccuc

SEQ ID NO: 1615767 - RNA, 19 nt, Artificial Sequence
  Description of Artificial Sequence: Synthetic oligonucleotide
cugucgacuguacucagca

SEQ ID NO: 1615768 - RNA, 19 nt, Artificial Sequence
  Description of Artificial Sequence: Synthetic oligonucleotide
cuggguaggugagcgauag

SEQ ID NO: 1615769 - RNA, 19 nt, Artificial Sequence
  Description of Artificial Sequence: Synthetic oligonucleotide
gaccacacggugugcucgg

SEQ ID NO: 1615770 - RNA, 19 nt, Artificial Sequence
  Description of Artificial Sequence: Synthetic oligonucleotide
ucacguaggcauugagcac

SEQ ID NO: 1615771 - RNA, 19 nt, Artificial Sequence
  Description of Artificial Sequence: Synthetic oligonucleotide
acacauagugacaccagga

SEQ ID NO: 1615772 - RNA, 19 nt, Artificial Sequence
  Description of Artificial Sequence: Synthetic oligonucleotide
uagauguccuucugucgac

SEQ ID NO: 1615773 - RNA, 19 nt, Artificial Sequence
  Description of Artificial Sequence: Synthetic oligonucleotide
gucgaagcuuuccaaauua

SEQ ID NO: 1615774 - RNA, 19 nt, Artificial Sequence
  Description of Artificial Sequence: Synthetic oligonucleotide
agccggagagagaaguugg

SEQ ID NO: 1615775 - RNA, 19 nt, Artificial Sequence
  Description of Artificial Sequence: Synthetic oligonucleotide
ccugagucuccacauaggc

SEQ ID NO: 1615776 - RNA, 19 nt, Artificial Sequence
  Description of Artificial Sequence: Synthetic oligonucleotide
cauguagggguagccauug

SEQ ID NO: 1615777 - RNA, 19 nt, Artificial Sequence
  Description of Artificial Sequence: Synthetic oligonucleotide
aacagcccuaagacaauca

SEQ ID NO: 1615778 - RNA, 19 nt, Artificial Sequence
  Description of Artificial Sequence: Synthetic oligonucleotide
ugaaaacccucagccggag

SEQ ID NO: 1615779 - RNA, 19 nt, Artificial Sequence
  Description of Artificial Sequence: Synthetic oligonucleotide
uggaugucuggagaacaca

SEQ ID NO: 1615780 - RNA, 19 nt, Artificial Sequence
  Description of Artificial Sequence: Synthetic oligonucleotide
gcugacauagcaguucuug

SEQ ID NO: 1615781 - RNA, 19 nt, Artificial Sequence
  Description of Artificial Sequence: Synthetic oligonucleotide
gggccucaugaucagagag

SEQ ID NO: 1615782 - RNA, 19 nt, Artificial Sequence
  Description of Artificial Sequence: Synthetic oligonucleotide
caguauggccacuucccug

SEQ ID NO: 1615783 - RNA, 19 nt, Artificial Sequence
  Description of Artificial Sequence: Synthetic oligonucleotide
uuagcacacuggucagggc

SEQ ID NO: 1615784 - RNA, 19 nt, Artificial Sequence
  Description of Artificial Sequence: Synthetic oligonucleotide
agaaccacaucugcacucu

SEQ ID NO: 1615785 - RNA, 19 nt, Artificial Sequence
  Description of Artificial Sequence: Synthetic oligonucleotide
gagcuugagcuaugccuag

SEQ ID NO: 1615786 - RNA, 19 nt, Artificial Sequence
  Description of Artificial Sequence: Synthetic oligonucleotide
agccaggucgaagcuuucc

SEQ ID NO: 1615787 - RNA, 19 nt, Artificial Sequence
  Description of Artificial Sequence: Synthetic oligonucleotide
agcauguagaugggucacg

SEQ ID NO: 1615788 - RNA, 19 nt, Artificial Sequence
  Description of Artificial Sequence: Synthetic oligonucleotide
cacauuggguguccagagc

SEQ ID NO: 1615789 - RNA, 19 nt, Artificial Sequence
  Description of Artificial Sequence: Synthetic oligonucleotide
gugugcucgguagaugucc

SEQ ID NO: 1615790 - RNA, 19 nt, Artificial Sequence
  Description of Artificial Sequence: Synthetic oligonucleotide
cuugcucagguagggaaug

SEQ ID NO: 1615791 - RNA, 19 nt, Artificial Sequence
  Description of Artificial Sequence: Synthetic oligonucleotide
caaucacauagccagugaa

SEQ ID NO: 1615792 - RNA, 19 nt, Artificial Sequence
  Description of Artificial Sequence: Synthetic oligonucleotide
acauagcaguucuugggua

SEQ ID NO: 1615793 - RNA, 19 nt, Artificial Sequence
  Description of Artificial Sequence: Synthetic oligonucleotide
cuuggguaccaugguacag

SEQ ID NO: 1615794 - RNA, 19 nt, Artificial Sequence
  Description of Artificial Sequence: Synthetic oligonucleotide
cuucugucgacuguacuca

SEQ ID NO: 1615795 - RNA, 19 nt, Artificial Sequence
  Description of Artificial Sequence: Synthetic oligonucleotide
cagucugggcccgacacag

SEQ ID NO: 1615796 - RNA, 19 nt, Artificial Sequence
  Description of Artificial Sequence: Synthetic oligonucleotide
aaccagucuccaugauaga

SEQ ID NO: 1615797 - RNA, 19 nt, Artificial Sequence
  Description of Artificial Sequence: Synthetic oligonucleotide
ggcauugagcaccagucca

SEQ ID NO: 1615798 - RNA, 19 nt, Artificial Sequence
  Description of Artificial Sequence: Synthetic oligonucleotide
cagugaacgaagcccacca

SEQ ID NO: 1615799 - RNA, 19 nt, Artificial Sequence
  Description of Artificial Sequence: Synthetic oligonucleotide
caggacaggggucuuccug

SEQ ID NO: 1615800 - RNA, 19 nt, Artificial Sequence
  Description of Artificial Sequence: Synthetic oligonucleotide
uuggguguccagagcagua

SEQ ID NO: 1615801 - RNA, 19 nt, Artificial Sequence
  Description of Artificial Sequence: Synthetic oligonucleotide
cugagucuccacauaggca

SEQ ID NO: 1615802 - RNA, 19 nt, Artificial Sequence
  Description of Artificial Sequence: Synthetic oligonucleotide
acgugugguggaugaacug

SEQ ID NO: 1615803 - RNA, 19 nt, Artificial Sequence
  Description of Artificial Sequence: Synthetic oligonucleotide
ggaugccaaguggaaaugg

SEQ ID NO: 1615804 - RNA, 19 nt, Artificial Sequence
  Description of Artificial Sequence: Synthetic oligonucleotide
caggacacauagugacacc

SEQ ID NO: 1615805 - RNA, 19 nt, Artificial Sequence
  Description of Artificial Sequence: Synthetic oligonucleotide
acauagccagugaacgaag

SEQ ID NO: 1615806 - RNA, 19 nt, Artificial Sequence
  Description of Artificial Sequence: Synthetic oligonucleotide
cacagucccacgaacgcga

SEQ ID NO: 1615807 - RNA, 19 nt, Artificial Sequence
  Description of Artificial Sequence: Synthetic oligonucleotide
cuuagguacuggaaguccu

SEQ ID NO: 1615808 - RNA, 19 nt, Artificial Sequence
  Description of Artificial Sequence: Synthetic oligonucleotide
ugcucgguagauguccuuc

SEQ ID NO: 1615809 - RNA, 19 nt, Artificial Sequence
  Description of Artificial Sequence: Synthetic oligonucleotide
cuguccacgccucccuuag

SEQ ID NO: 1615810 - RNA, 19 nt, Artificial Sequence
  Description of Artificial Sequence: Synthetic oligonucleotide
aaacccucagccggagaga

SEQ ID NO: 1615811 - RNA, 19 nt, Artificial Sequence
  Description of Artificial Sequence: Synthetic oligonucleotide
aguucagucugggcccgac

SEQ ID NO: 1615812 - RNA, 19 nt, Artificial Sequence
  Description of Artificial Sequence: Synthetic oligonucleotide
auagaccauguagggguag

SEQ ID NO: 1615813 - RNA, 19 nt, Artificial Sequence
  Description of Artificial Sequence: Synthetic oligonucleotide
guguccagagcaguauggc

SEQ ID NO: 1615814 - RNA, 19 nt, Artificial Sequence
  Description of Artificial Sequence: Synthetic oligonucleotide
caguaaagccaggucgaag

SEQ ID NO: 1615815 - RNA, 19 nt, Artificial Sequence
  Description of Artificial Sequence: Synthetic oligonucleotide
ggaugucuggagaacacac

SEQ ID NO: 1615816 - RNA, 19 nt, Artificial Sequence
  Description of Artificial Sequence: Synthetic oligonucleotide
aggcugacggagcgcacag

SEQ ID NO: 1615817 - RNA, 19 nt, Artificial Sequence
  Description of Artificial Sequence: Synthetic oligonucleotide
cacgccucccuuagcacac

SEQ ID NO: 1615818 - RNA, 19 nt, Artificial Sequence
  Description of Artificial Sequence: Synthetic oligonucleotide
ggccucaugaucagagagg

SEQ ID NO: 1615819 - RNA, 19 nt, Artificial Sequence
  Description of Artificial Sequence: Synthetic oligonucleotide
ggucacguaggcauugagc

SEQ ID NO: 1615820 - RNA, 19 nt, Artificial Sequence
  Description of Artificial Sequence: Synthetic oligonucleotide
gaacagcccuaagacaauc

SEQ ID NO: 1615821 - RNA, 19 nt, Artificial Sequence
  Description of Artificial Sequence: Synthetic oligonucleotide
agagcccuuaaaguccuga

SEQ ID NO: 1615822 - RNA, 19 nt, Artificial Sequence
  Description of Artificial Sequence: Synthetic oligonucleotide
aucuggguaggugagcgau

SEQ ID NO: 1615823 - RNA, 19 nt, Artificial Sequence
  Description of Artificial Sequence: Synthetic oligonucleotide
gaacgaagcccaccagcga

SEQ ID NO: 1615824 - RNA, 19 nt, Artificial Sequence
  Description of Artificial Sequence: Synthetic oligonucleotide
guccacgccucccuuagca

SEQ ID NO: 1615825 - RNA, 19 nt, Artificial Sequence
  Description of Artificial Sequence: Synthetic oligonucleotide
agccagugaacgaagccca

SEQ ID NO: 1615826 - RNA, 19 nt, Artificial Sequence
  Description of Artificial Sequence: Synthetic oligonucleotide
agucuaggcccuggguuuc

SEQ ID NO: 1615827 - RNA, 19 nt, Artificial Sequence
  Description of Artificial Sequence: Synthetic oligonucleotide
cacauagccagugaacgaa

SEQ ID NO: 1615828 - RNA, 19 nt, Artificial Sequence
  Description of Artificial Sequence: Synthetic oligonucleotide
cagcccuaagacaaucaca

SEQ ID NO: 1615829 - RNA, 19 nt, Artificial Sequence
  Description of Artificial Sequence: Synthetic oligonucleotide
uucccaagcuuggaccaca

SEQ ID NO: 1615830 - RNA, 19 nt, Artificial Sequence
  Description of Artificial Sequence: Synthetic oligonucleotide
uagaugggucacguaggca

SEQ ID NO: 1615831 - RNA, 19 nt, Artificial Sequence
  Description of Artificial Sequence: Synthetic oligonucleotide
cagcaccagccccacauug

SEQ ID NO: 1615832 - RNA, 19 nt, Artificial Sequence
  Description of Artificial Sequence: Synthetic oligonucleotide
guaggugagcgauaguuuu

SEQ ID NO: 1615833 - RNA, 19 nt, Artificial Sequence
  Description of Artificial Sequence: Synthetic oligonucleotide
ucagccggagagagaaguu

SEQ ID NO: 1615834 - RNA, 19 nt, Artificial Sequence
  Description of Artificial Sequence: Synthetic oligonucleotide
ucuggguaggugagcgaua

SEQ ID NO: 1615835 - RNA, 19 nt, Artificial Sequence
  Description of Artificial Sequence: Synthetic oligonucleotide
caggggucuuccugagggg

SEQ ID NO: 1615836 - RNA, 19 nt, Artificial Sequence
  Description of Artificial Sequence: Synthetic oligonucleotide
ugcggaugccaaguggaaa

SEQ ID NO: 1615837 - RNA, 19 nt, Artificial Sequence
  Description of Artificial Sequence: Synthetic oligonucleotide
guugagguccccacacaac

SEQ ID NO: 1615838 - RNA, 19 nt, Artificial Sequence
  Description of Artificial Sequence: Synthetic oligonucleotide
ggauuggaugucuggagaa

SEQ ID NO: 1615839 - RNA, 19 nt, Artificial Sequence
  Description of Artificial Sequence: Synthetic oligonucleotide
cagccggagagagaaguug

SEQ ID NO: 1615840 - RNA, 19 nt, Artificial Sequence
  Description of Artificial Sequence: Synthetic oligonucleotide
ucccaagcuuggaccacac

SEQ ID NO: 1615841 - RNA, 19 nt, Artificial Sequence
  Description of Artificial Sequence: Synthetic oligonucleotide
ugauuccgcuucugaagua

SEQ ID NO: 1615842 - RNA, 19 nt, Artificial Sequence
  Description of Artificial Sequence: Synthetic oligonucleotide
ucuguccacgccucccuua

SEQ ID NO: 1615843 - RNA, 19 nt, Artificial Sequence
  Description of Artificial Sequence: Synthetic oligonucleotide
gaugcauguugaggucccc

SEQ ID NO: 1615844 - RNA, 19 nt, Artificial Sequence
  Description of Artificial Sequence: Synthetic oligonucleotide
ccacauuggguguccagag

SEQ ID NO: 1615845 - RNA, 19 nt, Artificial Sequence
  Description of Artificial Sequence: Synthetic oligonucleotide
gaaaacccucagccggaga

SEQ ID NO: 1615846 - RNA, 19 nt, Artificial Sequence
  Description of Artificial Sequence: Synthetic oligonucleotide
cugacggagcgcacaggug

SEQ ID NO: 1615847 - RNA, 19 nt, Artificial Sequence
  Description of Artificial Sequence: Synthetic oligonucleotide
cagguggccggcccugucc

SEQ ID NO: 1615848 - RNA, 19 nt, Artificial Sequence
  Description of Artificial Sequence: Synthetic oligonucleotide
caagcuuggaccacacggu

SEQ ID NO: 1615849 - RNA, 19 nt, Artificial Sequence
  Description of Artificial Sequence: Synthetic oligonucleotide
ggaccacacggugugcucg

SEQ ID NO: 1615850 - RNA, 19 nt, Artificial Sequence
  Description of Artificial Sequence: Synthetic oligonucleotide
gcaguucuuggguaccaug

SEQ ID NO: 1615851 - RNA, 19 nt, Artificial Sequence
  Description of Artificial Sequence: Synthetic oligonucleotide
cagcauguagaugggucac

SEQ ID NO: 1615852 - RNA, 19 nt, Artificial Sequence
  Description of Artificial Sequence: Synthetic oligonucleotide
gucucccaagcgcuucaag

SEQ ID NO: 1615853 - RNA, 19 nt, Artificial Sequence
  Description of Artificial Sequence: Synthetic oligonucleotide
agggccucaugaucagaga

SEQ ID NO: 1615854 - RNA, 19 nt, Artificial Sequence
  Description of Artificial Sequence: Synthetic oligonucleotide
gaccguucagcugguccag

SEQ ID NO: 1615855 - RNA, 19 nt, Artificial Sequence
  Description of Artificial Sequence: Synthetic oligonucleotide
aggccgcugccgaugauuc

SEQ ID NO: 1615856 - RNA, 19 nt, Artificial Sequence
  Description of Artificial Sequence: Synthetic oligonucleotide
ugucgacuguacucagcau

SEQ ID NO: 1615857 - RNA, 19 nt, Artificial Sequence
  Description of Artificial Sequence: Synthetic oligonucleotide
cuaugccuagccccagcuc

SEQ ID NO: 1615858 - RNA, 19 nt, Artificial Sequence
  Description of Artificial Sequence: Synthetic oligonucleotide
agccccacauugggugucc

SEQ ID NO: 1615859 - RNA, 19 nt, Artificial Sequence
  Description of Artificial Sequence: Synthetic oligonucleotide
caggucgaagcuuuccaaa

SEQ ID NO: 1615860 - RNA, 19 nt, Artificial Sequence
  Description of Artificial Sequence: Synthetic oligonucleotide
ccuuagguacuggaagucc

SEQ ID NO: 1615861 - RNA, 19 nt, Artificial Sequence
  Description of Artificial Sequence: Synthetic oligonucleotide
agaacacacagaggccgcu

SEQ ID NO: 1615862 - RNA, 19 nt, Artificial Sequence
  Description of Artificial Sequence: Synthetic oligonucleotide
ccgacacaggccuuuggcc

SEQ ID NO: 1615863 - RNA, 19 nt, Artificial Sequence
  Description of Artificial Sequence: Synthetic oligonucleotide
augggucacguaggcauug

SEQ ID NO: 1615864 - RNA, 19 nt, Artificial Sequence
  Description of Artificial Sequence: Synthetic oligonucleotide
accagcgagcuugagcuau

SEQ ID NO: 1615865 - RNA, 19 nt, Artificial Sequence
  Description of Artificial Sequence: Synthetic oligonucleotide
gccccguccacucuuucag

SEQ ID NO: 1615866 - RNA, 19 nt, Artificial Sequence
  Description of Artificial Sequence: Synthetic oligonucleotide
uggguguccagagcaguau

SEQ ID NO: 1615867 - RNA, 19 nt, Artificial Sequence
  Description of Artificial Sequence: Synthetic oligonucleotide
guaaagccaggucgaagcu

SEQ ID NO: 1615868 - RNA, 19 nt, Artificial Sequence
  Description of Artificial Sequence: Synthetic oligonucleotide
guagacaugcuggauaauu

SEQ ID NO: 1615869 - RNA, 19 nt, Artificial Sequence
  Description of Artificial Sequence: Synthetic oligonucleotide
ugccgaugauuccgcuucu

SEQ ID NO: 1615870 - RNA, 19 nt, Artificial Sequence
  Description of Artificial Sequence: Synthetic oligonucleotide
gacggagcgcacagguggc

SEQ ID NO: 1615871 - RNA, 19 nt, Artificial Sequence
  Description of Artificial Sequence: Synthetic oligonucleotide
ccuuaaaguccugagucuc

SEQ ID NO: 1615872 - RNA, 19 nt, Artificial Sequence
  Description of Artificial Sequence: Synthetic oligonucleotide
agccccguccacucuuuca

SEQ ID NO: 1615873 - RNA, 19 nt, Artificial Sequence
  Description of Artificial Sequence: Synthetic oligonucleotide
gcgagcuugagcuaugccu

SEQ ID NO: 1615874 - RNA, 19 nt, Artificial Sequence
  Description of Artificial Sequence: Synthetic oligonucleotide
ggacacauagugacaccag

SEQ ID NO: 1615875 - RNA, 19 nt, Artificial Sequence
  Description of Artificial Sequence: Synthetic oligonucleotide
cucagaacaugcuggaguu

SEQ ID NO: 1615876 - RNA, 19 nt, Artificial Sequence
  Description of Artificial Sequence: Synthetic oligonucleotide
acggagcgcacagguggcc

SEQ ID NO: 1615877 - RNA, 19 nt, Artificial Sequence
  Description of Artificial Sequence: Synthetic oligonucleotide
ccgcuucugaaguagugug

SEQ ID NO: 1615878 - RNA, 19 nt, Artificial Sequence
  Description of Artificial Sequence: Synthetic oligonucleotide
acacggugugcucgguaga

SEQ ID NO: 1615879 - RNA, 19 nt, Artificial Sequence
  Description of Artificial Sequence: Synthetic oligonucleotide
augcauguugaggucccca

SEQ ID NO: 1615880 - RNA, 19 nt, Artificial Sequence
  Description of Artificial Sequence: Synthetic oligonucleotide
cacauacaaaguggccaug

SEQ ID NO: 1615881 - RNA, 19 nt, Artificial Sequence
  Description of Artificial Sequence: Synthetic oligonucleotide
ucaagcggucggcccuaug

SEQ ID NO: 1615882 - RNA, 19 nt, Artificial Sequence
  Description of Artificial Sequence: Synthetic oligonucleotide
gacgugugguggaugaacu

SEQ ID NO: 1615883 - RNA, 19 nt, Artificial Sequence
  Description of Artificial Sequence: Synthetic oligonucleotide
aucccggagccccguccac

SEQ ID NO: 1615884 - RNA, 19 nt, Artificial Sequence
  Description of Artificial Sequence: Synthetic oligonucleotide
gagucuaggcccuggguuu

SEQ ID NO: 1615885 - RNA, 19 nt, Artificial Sequence
  Description of Artificial Sequence: Synthetic oligonucleotide
cccgacacaggccuuuggc

SEQ ID NO: 1615886 - RNA, 19 nt, Artificial Sequence
  Description of Artificial Sequence: Synthetic oligonucleotide
acucagcauguagaugggu

SEQ ID NO: 1615887 - RNA, 19 nt, Artificial Sequence
  Description of Artificial Sequence: Synthetic oligonucleotide
ccgcacagucccacgaacg

SEQ ID NO: 1615888 - RNA, 19 nt, Artificial Sequence
  Description of Artificial Sequence: Synthetic oligonucleotide
guccacucuuucagcaggc

SEQ ID NO: 1615889 - RNA, 19 nt, Artificial Sequence
  Description of Artificial Sequence: Synthetic oligonucleotide
gaggcugacggagcgcaca

SEQ ID NO: 1615890 - RNA, 19 nt, Artificial Sequence
  Description of Artificial Sequence: Synthetic oligonucleotide
gcacagucccacgaacgcg

SEQ ID NO: 1615891 - RNA, 19 nt, Artificial Sequence
  Description of Artificial Sequence: Synthetic oligonucleotide
gauagaccauguaggggua

SEQ ID NO: 1615892 - RNA, 19 nt, Artificial Sequence
  Description of Artificial Sequence: Synthetic oligonucleotide
ggguguccagagcaguaug

SEQ ID NO: 1615893 - RNA, 19 nt, Artificial Sequence
  Description of Artificial Sequence: Synthetic oligonucleotide
uguagacaugcuggauaau

SEQ ID NO: 1615894 - RNA, 19 nt, Artificial Sequence
  Description of Artificial Sequence: Synthetic oligonucleotide
gaaguccugcucacuccac

SEQ ID NO: 1615895 - RNA, 19 nt, Artificial Sequence
  Description of Artificial Sequence: Synthetic oligonucleotide
uggucagggcugaccguuc

SEQ ID NO: 1615896 - RNA, 19 nt, Artificial Sequence
  Description of Artificial Sequence: Synthetic oligonucleotide
auguagggguagccauuga

SEQ ID NO: 1615897 - RNA, 19 nt, Artificial Sequence
  Description of Artificial Sequence: Synthetic oligonucleotide
cuuggaccacacggugugc

SEQ ID NO: 1615898 - RNA, 19 nt, Artificial Sequence
  Description of Artificial Sequence: Synthetic oligonucleotide
uggguaggugagcgauagu

SEQ ID NO: 1615899 - RNA, 19 nt, Artificial Sequence
  Description of Artificial Sequence: Synthetic oligonucleotide
guauggccacuucccuggc

SEQ ID NO: 1615900 - RNA, 19 nt, Artificial Sequence
  Description of Artificial Sequence: Synthetic oligonucleotide
cuguacucagcauguagau

SEQ ID NO: 1615901 - RNA, 19 nt, Artificial Sequence
  Description of Artificial Sequence: Synthetic oligonucleotide
ggacgugugguggaugaac

SEQ ID NO: 1615902 - RNA, 19 nt, Artificial Sequence
  Description of Artificial Sequence: Synthetic oligonucleotide
agcgcacagguggccggcc

SEQ ID NO: 1615903 - RNA, 19 nt, Artificial Sequence
  Description of Artificial Sequence: Synthetic oligonucleotide
gaacaugcuggaguucagu

SEQ ID NO: 1615904 - RNA, 19 nt, Artificial Sequence
  Description of Artificial Sequence: Synthetic oligonucleotide
ugggucacguaggcauuga

SEQ ID NO: 1615905 - RNA, 19 nt, Artificial Sequence
  Description of Artificial Sequence: Synthetic oligonucleotide
ccuuucccuucucagaaca

SEQ ID NO: 1615906 - RNA, 19 nt, Artificial Sequence
  Description of Artificial Sequence: Synthetic oligonucleotide
gggucacguaggcauugag

SEQ ID NO: 1615907 - RNA, 19 nt, Artificial Sequence
  Description of Artificial Sequence: Synthetic oligonucleotide
ccaccagcgagcuugagcu

SEQ ID NO: 1615908 - RNA, 19 nt, Artificial Sequence
  Description of Artificial Sequence: Synthetic oligonucleotide
ggaguucagucugggcccg

SEQ ID NO: 1615909 - RNA, 19 nt, Artificial Sequence
  Description of Artificial Sequence: Synthetic oligonucleotide
agcggucggcccuaugcuu

SEQ ID NO: 1615910 - RNA, 19 nt, Artificial Sequence
  Description of Artificial Sequence: Synthetic oligonucleotide
guucagucugggcccgaca

SEQ ID NO: 1615911 - RNA, 19 nt, Artificial Sequence
  Description of Artificial Sequence: Synthetic oligonucleotide
uggccggcccugucccgcg

SEQ ID NO: 1615912 - RNA, 19 nt, Artificial Sequence
  Description of Artificial Sequence: Synthetic oligonucleotide
cgcuucugaaguagugugc

SEQ ID NO: 1615913 - RNA, 19 nt, Artificial Sequence
  Description of Artificial Sequence: Synthetic oligonucleotide
cgguagauguccuucuguc

SEQ ID NO: 1615914 - RNA, 19 nt, Artificial Sequence
  Description of Artificial Sequence: Synthetic oligonucleotide
acggugugcucgguagaug

SEQ ID NO: 1615915 - RNA, 19 nt, Artificial Sequence
  Description of Artificial Sequence: Synthetic oligonucleotide
cauguagaugggucacgua

SEQ ID NO: 1615916 - RNA, 19 nt, Artificial Sequence
  Description of Artificial Sequence: Synthetic oligonucleotide
acagucccacgaacgcgag

SEQ ID NO: 1615917 - RNA, 19 nt, Artificial Sequence
  Description of Artificial Sequence: Synthetic oligonucleotide
cucagccggagagagaagu

SEQ ID NO: 1615918 - RNA, 19 nt, Artificial Sequence
  Description of Artificial Sequence: Synthetic oligonucleotide
ccggagagagaaguugggc

SEQ ID NO: 1615919 - RNA, 19 nt, Artificial Sequence
  Description of Artificial Sequence: Synthetic oligonucleotide
cauaggcaucccggagccc

SEQ ID NO: 1615920 - RNA, 19 nt, Artificial Sequence
  Description of Artificial Sequence: Synthetic oligonucleotide
cgcacagucccacgaacgc

SEQ ID NO: 1615921 - RNA, 19 nt, Artificial Sequence
  Description of Artificial Sequence: Synthetic oligonucleotide
augccuagccccagcucug

SEQ ID NO: 1615922 - RNA, 19 nt, Artificial Sequence
  Description of Artificial Sequence: Synthetic oligonucleotide
gcugacggagcgcacaggu

SEQ ID NO: 1615923 - RNA, 19 nt, Artificial Sequence
  Description of Artificial Sequence: Synthetic oligonucleotide
cuccaugauagaccaugua

SEQ ID NO: 1615924 - RNA, 19 nt, Artificial Sequence
  Description of Artificial Sequence: Synthetic oligonucleotide
augcuugcucagguaggga

SEQ ID NO: 1615925 - RNA, 19 nt, Artificial Sequence
  Description of Artificial Sequence: Synthetic oligonucleotide
gcagcccaggucuuuggga

SEQ ID NO: 1615926 - RNA, 19 nt, Artificial Sequence
  Description of Artificial Sequence: Synthetic oligonucleotide
gagcgcacagguggccggc

SEQ ID NO: 1615927 - RNA, 19 nt, Artificial Sequence
  Description of Artificial Sequence: Synthetic oligonucleotide
gucggcccuaugcuugcuc

SEQ ID NO: 1615928 - RNA, 19 nt, Artificial Sequence
  Description of Artificial Sequence: Synthetic oligonucleotide
cccagaaacugccuuguaa

SEQ ID NO: 1615929 - RNA, 19 nt, Artificial Sequence
  Description of Artificial Sequence: Synthetic oligonucleotide
acguaggcauugagcacca

SEQ ID NO: 1615930 - RNA, 19 nt, Artificial Sequence
  Description of Artificial Sequence: Synthetic oligonucleotide
ccguccacucuuucagcag

SEQ ID NO: 1615931 - RNA, 19 nt, Artificial Sequence
  Description of Artificial Sequence: Synthetic oligonucleotide
gcggaugccaaguggaaau

SEQ ID NO: 1615932 - RNA, 19 nt, Artificial Sequence
  Description of Artificial Sequence: Synthetic oligonucleotide
gccucccuuagcacacugg

SEQ ID NO: 1615933 - RNA, 19 nt, Artificial Sequence
  Description of Artificial Sequence: Synthetic oligonucleotide
gccgcacagucccacgaac

SEQ ID NO: 1615934 - RNA, 19 nt, Artificial Sequence
  Description of Artificial Sequence: Synthetic oligonucleotide
acccagaaacugccuugua

SEQ ID NO: 1615935 - RNA, 19 nt, Artificial Sequence
  Description of Artificial Sequence: Synthetic oligonucleotide
gccuuagguacuggaaguc

SEQ ID NO: 1615936 - RNA, 19 nt, Artificial Sequence
  Description of Artificial Sequence: Synthetic oligonucleotide
gucuaggcccuggguuucc

SEQ ID NO: 1615937 - RNA, 19 nt, Artificial Sequence
  Description of Artificial Sequence: Synthetic oligonucleotide
cgagcuugagcuaugccua

SEQ ID NO: 1615938 - RNA, 19 nt, Artificial Sequence
  Description of Artificial Sequence: Synthetic oligonucleotide
cccaagcuuggaccacacg

SEQ ID NO: 1615939 - RNA, 19 nt, Artificial Sequence
  Description of Artificial Sequence: Synthetic oligonucleotide
augcggaugccaaguggaa

SEQ ID NO: 1615940 - RNA, 19 nt, Artificial Sequence
  Description of Artificial Sequence: Synthetic oligonucleotide
gcggucggcccuaugcuug

SEQ ID NO: 1615941 - RNA, 19 nt, Artificial Sequence
  Description of Artificial Sequence: Synthetic oligonucleotide
gcuaugccuagccccagcu

SEQ ID NO: 1615942 - RNA, 19 nt, Artificial Sequence
  Description of Artificial Sequence: Synthetic oligonucleotide
cagaggccgcugccgauga

SEQ ID NO: 1615943 - RNA, 19 nt, Artificial Sequence
  Description of Artificial Sequence: Synthetic oligonucleotide
ggaaauggacccagguccu

SEQ ID NO: 1615944 - RNA, 19 nt, Artificial Sequence
  Description of Artificial Sequence: Synthetic oligonucleotide
cccguccacucuuucagca

SEQ ID NO: 1615945 - RNA, 19 nt, Artificial Sequence
  Description of Artificial Sequence: Synthetic oligonucleotide
ccgaugauuccgcuucuga

SEQ ID NO: 1615946 - RNA, 19 nt, Artificial Sequence
  Description of Artificial Sequence: Synthetic oligonucleotide
gaaagucucccaagcgcuu

SEQ ID NO: 1615947 - RNA, 19 nt, Artificial Sequence
  Description of Artificial Sequence: Synthetic oligonucleotide
gcaguauggccacuucccu

SEQ ID NO: 1615948 - RNA, 19 nt, Artificial Sequence
  Description of Artificial Sequence: Synthetic oligonucleotide
gagccccguccacucuuuc

SEQ ID NO: 1615949 - RNA, 19 nt, Artificial Sequence
  Description of Artificial Sequence: Synthetic oligonucleotide
cgcuucaagcggucggccc

SEQ ID NO: 1615950 - RNA, 19 nt, Artificial Sequence
  Description of Artificial Sequence: Synthetic oligonucleotide
gucacaaccuguagugguu

SEQ ID NO: 1615951 - RNA, 19 nt, Artificial Sequence
  Description of Artificial Sequence: Synthetic oligonucleotide
gguggccggcccugucccg

SEQ ID NO: 1615952 - RNA, 19 nt, Artificial Sequence
  Description of Artificial Sequence: Synthetic oligonucleotide
ggucgaagcuuuccaaauu

SEQ ID NO: 1615953 - RNA, 19 nt, Artificial Sequence
  Description of Artificial Sequence: Synthetic oligonucleotide
ccacgccucccuuagcaca

SEQ ID NO: 1615954 - RNA, 19 nt, Artificial Sequence
  Description of Artificial Sequence: Synthetic oligonucleotide
gcauguagaugggucacgu

SEQ ID NO: 1615955 - RNA, 19 nt, Artificial Sequence
  Description of Artificial Sequence: Synthetic oligonucleotide
ccaggucgaagcuuuccaa

SEQ ID NO: 1615956 - RNA, 19 nt, Artificial Sequence
  Description of Artificial Sequence: Synthetic oligonucleotide
gcuggauaauuuccuggau

SEQ ID NO: 1615957 - RNA, 19 nt, Artificial Sequence
  Description of Artificial Sequence: Synthetic oligonucleotide
ccccacauuggguguccag

SEQ ID NO: 1615958 - RNA, 19 nt, Artificial Sequence
  Description of Artificial Sequence: Synthetic oligonucleotide
gcgaggcugacggagcgca

SEQ ID NO: 1615959 - RNA, 19 nt, Artificial Sequence
  Description of Artificial Sequence: Synthetic oligonucleotide
ccaagcgcuucaagcgguc

SEQ ID NO: 1615960 - RNA, 19 nt, Artificial Sequence
  Description of Artificial Sequence: Synthetic oligonucleotide
gcacucuuggacguguggu

SEQ ID NO: 1615961 - RNA, 19 nt, Artificial Sequence
  Description of Artificial Sequence: Synthetic oligonucleotide
ccagcgagcuugagcuaug

SEQ ID NO: 1615962 - RNA, 19 nt, Artificial Sequence
  Description of Artificial Sequence: Synthetic oligonucleotide
ggcugacggagcgcacagg

SEQ ID NO: 1615963 - RNA, 19 nt, Artificial Sequence
  Description of Artificial Sequence: Synthetic oligonucleotide
ccccguccacucuuucagc

SEQ ID NO: 1615964 - RNA, 19 nt, Artificial Sequence
  Description of Artificial Sequence: Synthetic oligonucleotide
gguaggugagcgauaguuu

SEQ ID NO: 1615965 - RNA, 19 nt, Artificial Sequence
  Description of Artificial Sequence: Synthetic oligonucleotide
gcucgguagauguccuucu

SEQ ID NO: 1615966 - RNA, 19 nt, Artificial Sequence
  Description of Artificial Sequence: Synthetic oligonucleotide
uucaagcggucggcccuau

SEQ ID NO: 1615967 - RNA, 19 nt, Artificial Sequence
  Description of Artificial Sequence: Synthetic oligonucleotide
ccucccuuagcacacuggu

SEQ ID NO: 1615968 - RNA, 19 nt, Artificial Sequence
  Description of Artificial Sequence: Synthetic oligonucleotide
gaggccgcugccgaugauu

SEQ ID NO: 1615969 - RNA, 19 nt, Artificial Sequence
  Description of Artificial Sequence: Synthetic oligonucleotide
gccgaugauuccgcuucug

SEQ ID NO: 1615970 - RNA, 19 nt, Artificial Sequence
  Description of Artificial Sequence: Synthetic oligonucleotide
agucuccaugauagaccau

SEQ ID NO: 1615971 - RNA, 19 nt, Artificial Sequence
  Description of Artificial Sequence: Synthetic oligonucleotide
ccgcugccgaugauuccgc

SEQ ID NO: 1615972 - RNA, 19 nt, Artificial Sequence
  Description of Artificial Sequence: Synthetic oligonucleotide
aguggccaugagggccuca

SEQ ID NO: 1615973 - RNA, 19 nt, Artificial Sequence
  Description of Artificial Sequence: Synthetic oligonucleotide
gguagccauugagagugua

SEQ ID NO: 1615974 - RNA, 19 nt, Artificial Sequence
  Description of Artificial Sequence: Synthetic oligonucleotide
gaguucagucugggcccga

SEQ ID NO: 1615975 - RNA, 19 nt, Artificial Sequence
  Description of Artificial Sequence: Synthetic oligonucleotide
cugccuuguaaagcacaua

SEQ ID NO: 1615976 - RNA, 19 nt, Artificial Sequence
  Description of Artificial Sequence: Synthetic oligonucleotide
cuggucagggcugaccguu

SEQ ID NO: 1615977 - RNA, 19 nt, Artificial Sequence
  Description of Artificial Sequence: Synthetic oligonucleotide
cauugagcaccaguccauu

SEQ ID NO: 1615978 - RNA, 19 nt, Artificial Sequence
  Description of Artificial Sequence: Synthetic oligonucleotide
ggcgaggcugacggagcgc

SEQ ID NO: 1615979 - RNA, 19 nt, Artificial Sequence
  Description of Artificial Sequence: Synthetic oligonucleotide
gccaguucccaagcuugga

SEQ ID NO: 1615980 - RNA, 19 nt, Artificial Sequence
  Description of Artificial Sequence: Synthetic oligonucleotide
gcgcuucaagcggucggcc

SEQ ID NO: 1615981 - RNA, 19 nt, Artificial Sequence
  Description of Artificial Sequence: Synthetic oligonucleotide
gccuuguaaagcacauagu

SEQ ID NO: 1615982 - RNA, 19 nt, Artificial Sequence
  Description of Artificial Sequence: Synthetic oligonucleotide
ccagcaguugagguugaaa

SEQ ID NO: 1615983 - RNA, 19 nt, Artificial Sequence
  Description of Artificial Sequence: Synthetic oligonucleotide
gcauugagcaccaguccau

SEQ ID NO: 1615984 - RNA, 19 nt, Artificial Sequence
  Description of Artificial Sequence: Synthetic oligonucleotide
gcggcgaggcugacggagc

SEQ ID NO: 1615985 - RNA, 19 nt, Artificial Sequence
  Description of Artificial Sequence: Synthetic oligonucleotide
caccagccccacauugggu

SEQ ID NO: 1615986 - RNA, 19 nt, Artificial Sequence
  Description of Artificial Sequence: Synthetic oligonucleotide
gcccuaagacaaucacaua

SEQ ID NO: 1615987 - RNA, 19 nt, Artificial Sequence
  Description of Artificial Sequence: Synthetic oligonucleotide
gcgccgcacagucccacga

SEQ ID NO: 1615988 - RNA, 19 nt, Artificial Sequence
  Description of Artificial Sequence: Synthetic oligonucleotide
gucccgcgccgcacagucc

SEQ ID NO: 1615989 - RNA, 19 nt, Artificial Sequence
  Description of Artificial Sequence: Synthetic oligonucleotide
cacggugugcucgguagau

SEQ ID NO: 1615990 - RNA, 19 nt, Artificial Sequence
  Description of Artificial Sequence: Synthetic oligonucleotide
cggaugccaaguggaaaug

SEQ ID NO: 1615991 - RNA, 19 nt, Artificial Sequence
  Description of Artificial Sequence: Synthetic oligonucleotide
ggguaccaugguacagcca

SEQ ID NO: 1615992 - RNA, 19 nt, Artificial Sequence
  Description of Artificial Sequence: Synthetic oligonucleotide
caccagcgagcuugagcua

SEQ ID NO: 1615993 - RNA, 19 nt, Artificial Sequence
  Description of Artificial Sequence: Synthetic oligonucleotide
cggucggcccuaugcuugc

SEQ ID NO: 1615994 - RNA, 19 nt, Artificial Sequence
  Description of Artificial Sequence: Synthetic oligonucleotide
ggaacagcccuaagacaau

SEQ ID NO: 1615995 - RNA, 19 nt, Artificial Sequence
  Description of Artificial Sequence: Synthetic oligonucleotide
gccaccgcggcgaggcuga

SEQ ID NO: 1615996 - RNA, 19 nt, Artificial Sequence
  Description of Artificial Sequence: Synthetic oligonucleotide
cccuaugcuugcucaggua

SEQ ID NO: 1615997 - RNA, 19 nt, Artificial Sequence
  Description of Artificial Sequence: Synthetic oligonucleotide
ccggcccugucccgcgccg

SEQ ID NO: 1615998 - RNA, 19 nt, Artificial Sequence
  Description of Artificial Sequence: Synthetic oligonucleotide
gggcugugcuucacauaca

SEQ ID NO: 1615999 - RNA, 19 nt, Artificial Sequence
  Description of Artificial Sequence: Synthetic oligonucleotide
gccuagccccagcucuguc

SEQ ID NO: 1616000 - RNA, 19 nt, Artificial Sequence
  Description of Artificial Sequence: Synthetic oligonucleotide
cccuggguuuccuuucccu

SEQ ID NO: 1616001 - RNA, 19 nt, Artificial Sequence
  Description of Artificial Sequence: Synthetic oligonucleotide
gugcucgguagauguccuu

SEQ ID NO: 1616002 - RNA, 19 nt, Artificial Sequence
  Description of Artificial Sequence: Synthetic oligonucleotide
cgaggcugacggagcgcac

SEQ ID NO: 1616003 - RNA, 19 nt, Artificial Sequence
  Description of Artificial Sequence: Synthetic oligonucleotide
ggccggcccugucccgcgc

SEQ ID NO: 1616004 - RNA, 19 nt, Artificial Sequence
  Description of Artificial Sequence: Synthetic oligonucleotide
ccacacggugugcucggua

SEQ ID NO: 1616005 - RNA, 19 nt, Artificial Sequence
  Description of Artificial Sequence: Synthetic oligonucleotide
cacagguggccggcccugu

SEQ ID NO: 1616006 - RNA, 19 nt, Artificial Sequence
  Description of Artificial Sequence: Synthetic oligonucleotide
ccgcgccgcacagucccac

SEQ ID NO: 1616007 - RNA, 19 nt, Artificial Sequence
  Description of Artificial Sequence: Synthetic oligonucleotide
ggcugacauagcaguucuu

SEQ ID NO: 1616008 - RNA, 19 nt, Artificial Sequence
  Description of Artificial Sequence: Synthetic oligonucleotide
ggcugaccguucagcuggu

SEQ ID NO: 1616009 - RNA, 19 nt, Artificial Sequence
  Description of Artificial Sequence: Synthetic oligonucleotide
cgccgcacagucccacgaa

SEQ ID NO: 1616010 - RNA, 19 nt, Artificial Sequence
  Description of Artificial Sequence: Synthetic oligonucleotide
ggagccccguccacucuuu

SEQ ID NO: 1616011 - RNA, 19 nt, Artificial Sequence
  Description of Artificial Sequence: Synthetic oligonucleotide
ggucggcccuaugcuugcu

SEQ ID NO: 1616012 - RNA, 19 nt, Artificial Sequence
  Description of Artificial Sequence: Synthetic oligonucleotide
ccaggucuuugggaugcau

SEQ ID NO: 1616013 - RNA, 19 nt, Artificial Sequence
  Description of Artificial Sequence: Synthetic oligonucleotide
cccgcgccgcacaguccca

SEQ ID NO: 1616014 - RNA, 19 nt, Artificial Sequence
  Description of Artificial Sequence: Synthetic oligonucleotide
cgacuguacucagcaugua

SEQ ID NO: 1616015 - RNA, 19 nt, Artificial Sequence
  Description of Artificial Sequence: Synthetic oligonucleotide
cgcugccgaugauuccgcu

SEQ ID NO: 1616016 - RNA, 19 nt, Artificial Sequence
  Description of Artificial Sequence: Synthetic oligonucleotide
uuugccaucgggaagaggg

SEQ ID NO: 1616017 - RNA, 19 nt, Artificial Sequence
  Description of Artificial Sequence: Synthetic oligonucleotide
accagcacaacacacaucc

SEQ ID NO: 1616018 - RNA, 19 nt, Artificial Sequence
  Description of Artificial Sequence: Synthetic oligonucleotide
acuacacacacacacacac

SEQ ID NO: 1616019 - RNA, 19 nt, Artificial Sequence
  Description of Artificial Sequence: Synthetic oligonucleotide
aaauuuguccaugaguggg

SEQ ID NO: 1616020 - RNA, 19 nt, Artificial Sequence
  Description of Artificial Sequence: Synthetic oligonucleotide
uuugacauggugcauccgg

SEQ ID NO: 1616021 - RNA, 19 nt, Artificial Sequence
  Description of Artificial Sequence: Synthetic oligonucleotide
agagccacauuucuaaggc

SEQ ID NO: 1616022 - RNA, 19 nt, Artificial Sequence
  Description of Artificial Sequence: Synthetic oligonucleotide
aacacuucuucauccaggg

SEQ ID NO: 1616023 - RNA, 19 nt, Artificial Sequence
  Description of Artificial Sequence: Synthetic oligonucleotide
uguuugacaauucuucccc

SEQ ID NO: 1616024 - RNA, 19 nt, Artificial Sequence
  Description of Artificial Sequence: Synthetic oligonucleotide
uagcaaacaauguaggugc

SEQ ID NO: 1616025 - RNA, 19 nt, Artificial Sequence
  Description of Artificial Sequence: Synthetic oligonucleotide
ucuguugguagcaccaugg

SEQ ID NO: 1616026 - RNA, 19 nt, Artificial Sequence
  Description of Artificial Sequence: Synthetic oligonucleotide
guauacaccacucugucag

SEQ ID NO: 1616027 - RNA, 19 nt, Artificial Sequence
  Description of Artificial Sequence: Synthetic oligonucleotide
uguuguuugacaauucuuc

SEQ ID NO: 1616028 - RNA, 19 nt, Artificial Sequence
  Description of Artificial Sequence: Synthetic oligonucleotide
uuuagguacagcaucggga

SEQ ID NO: 1616029 - RNA, 19 nt, Artificial Sequence
  Description of Artificial Sequence: Synthetic oligonucleotide
uuuaccaccaggcagcccu

SEQ ID NO: 1616030 - RNA, 19 nt, Artificial Sequence
  Description of Artificial Sequence: Synthetic oligonucleotide
uuagguacagcaucgggag

SEQ ID NO: 1616031 - RNA, 19 nt, Artificial Sequence
  Description of Artificial Sequence: Synthetic oligonucleotide
ugaaaagguccccagcagg

SEQ ID NO: 1616032 - RNA, 19 nt, Artificial Sequence
  Description of Artificial Sequence: Synthetic oligonucleotide
uccucugugagccagucag

SEQ ID NO: 1616033 - RNA, 19 nt, Artificial Sequence
  Description of Artificial Sequence: Synthetic oligonucleotide
ugcuauguugcccacacug

SEQ ID NO: 1616034 - RNA, 19 nt, Artificial Sequence
  Description of Artificial Sequence: Synthetic oligonucleotide
uaucagaaucaaaaugucc

SEQ ID NO: 1616035 - RNA, 19 nt, Artificial Sequence
  Description of Artificial Sequence: Synthetic oligonucleotide
aggcacuacacacacacac

SEQ ID NO: 1616036 - RNA, 19 nt, Artificial Sequence
  Description of Artificial Sequence: Synthetic oligonucleotide
ugagcugccgaccacuagg

SEQ ID NO: 1616037 - RNA, 19 nt, Artificial Sequence
  Description of Artificial Sequence: Synthetic oligonucleotide
aacaauguaggugccaaag

SEQ ID NO: 1616038 - RNA, 19 nt, Artificial Sequence
  Description of Artificial Sequence: Synthetic oligonucleotide
acaauguaggugccaaagc

SEQ ID NO: 1616039 - RNA, 19 nt, Artificial Sequence
  Description of Artificial Sequence: Synthetic oligonucleotide
uacacacacacacacacac

SEQ ID NO: 1616040 - RNA, 19 nt, Artificial Sequence
  Description of Artificial Sequence: Synthetic oligonucleotide
cagacauuuaccaccaggc

SEQ ID NO: 1616041 - RNA, 19 nt, Artificial Sequence
  Description of Artificial Sequence: Synthetic oligonucleotide
agguaucagaaucaaaaug

SEQ ID NO: 1616042 - RNA, 19 nt, Artificial Sequence
  Description of Artificial Sequence: Synthetic oligonucleotide
acaacacacauccuuuagg

SEQ ID NO: 1616043 - RNA, 19 nt, Artificial Sequence
  Description of Artificial Sequence: Synthetic oligonucleotide
gagaucaucaggucucagg

SEQ ID NO: 1616044 - RNA, 19 nt, Artificial Sequence
  Description of Artificial Sequence: Synthetic oligonucleotide
cacucugucagacuuagag

SEQ ID NO: 1616045 - RNA, 19 nt, Artificial Sequence
  Description of Artificial Sequence: Synthetic oligonucleotide
ucaccugcuaagcagaggu

SEQ ID NO: 1616046 - RNA, 19 nt, Artificial Sequence
  Description of Artificial Sequence: Synthetic oligonucleotide
ugcagaucaagcuuugcug

SEQ ID NO: 1616047 - RNA, 19 nt, Artificial Sequence
  Description of Artificial Sequence: Synthetic oligonucleotide
acugacacagacauuuacc

SEQ ID NO: 1616048 - RNA, 19 nt, Artificial Sequence
  Description of Artificial Sequence: Synthetic oligonucleotide
cacacacacacauacacac

SEQ ID NO: 1616049 - RNA, 19 nt, Artificial Sequence
  Description of Artificial Sequence: Synthetic oligonucleotide
uuguuugacaauucuuccc

SEQ ID NO: 1616050 - RNA, 19 nt, Artificial Sequence
  Description of Artificial Sequence: Synthetic oligonucleotide
aaguaaaccucuucaaauu

SEQ ID NO: 1616051 - RNA, 19 nt, Artificial Sequence
  Description of Artificial Sequence: Synthetic oligonucleotide
aaguagcaaacaauguagg

SEQ ID NO: 1616052 - RNA, 19 nt, Artificial Sequence
  Description of Artificial Sequence: Synthetic oligonucleotide
aacagugggucuucaaaca

SEQ ID NO: 1616053 - RNA, 19 nt, Artificial Sequence
  Description of Artificial Sequence: Synthetic oligonucleotide
uguucuguugguagcacca

SEQ ID NO: 1616054 - RNA, 19 nt, Artificial Sequence
  Description of Artificial Sequence: Synthetic oligonucleotide
ucguucucgcuacugaugc

SEQ ID NO: 1616055 - RNA, 19 nt, Artificial Sequence
  Description of Artificial Sequence: Synthetic oligonucleotide
aucgggaagagggacaggc

SEQ ID NO: 1616056 - RNA, 19 nt, Artificial Sequence
  Description of Artificial Sequence: Synthetic oligonucleotide
agcaccgagagcaucaggc

SEQ ID NO: 1616057 - RNA, 19 nt, Artificial Sequence
  Description of Artificial Sequence: Synthetic oligonucleotide
guuguuugacaauucuucc

SEQ ID NO: 1616058 - RNA, 19 nt, Artificial Sequence
  Description of Artificial Sequence: Synthetic oligonucleotide
cacacacacacacacacgc

SEQ ID NO: 1616059 - RNA, 19 nt, Artificial Sequence
  Description of Artificial Sequence: Synthetic oligonucleotide
ucaggagaucaucaggucu

SEQ ID NO: 1616060 - RNA, 19 nt, Artificial Sequence
  Description of Artificial Sequence: Synthetic oligonucleotide
cacacacacacacacauac

SEQ ID NO: 1616061 - RNA, 19 nt, Artificial Sequence
  Description of Artificial Sequence: Synthetic oligonucleotide
acagugggucuucaaacac

SEQ ID NO: 1616062 - RNA, 19 nt, Artificial Sequence
  Description of Artificial Sequence: Synthetic oligonucleotide
augaguggguaccuggagg

SEQ ID NO: 1616063 - RNA, 19 nt, Artificial Sequence
  Description of Artificial Sequence: Synthetic oligonucleotide
ucgggcaggaucauguuca

SEQ ID NO: 1616064 - RNA, 19 nt, Artificial Sequence
  Description of Artificial Sequence: Synthetic oligonucleotide
uccaugaguggguaccugg

SEQ ID NO: 1616065 - RNA, 19 nt, Artificial Sequence
  Description of Artificial Sequence: Synthetic oligonucleotide
aucgggaggcccuaggagg

SEQ ID NO: 1616066 - RNA, 19 nt, Artificial Sequence
  Description of Artificial Sequence: Synthetic oligonucleotide
ugggguauacaccacucug

SEQ ID NO: 1616067 - RNA, 19 nt, Artificial Sequence
  Description of Artificial Sequence: Synthetic oligonucleotide
caaauuuguccaugagugg

SEQ ID NO: 1616068 - RNA, 19 nt, Artificial Sequence
  Description of Artificial Sequence: Synthetic oligonucleotide
cacacacacacacauacac

SEQ ID NO: 1616069 - RNA, 19 nt, Artificial Sequence
  Description of Artificial Sequence: Synthetic oligonucleotide
uguagcccuggucugacug

SEQ ID NO: 1616070 - RNA, 19 nt, Artificial Sequence
  Description of Artificial Sequence: Synthetic oligonucleotide
ucuuugacauggugcaucc

SEQ ID NO: 1616071 - RNA, 19 nt, Artificial Sequence
  Description of Artificial Sequence: Synthetic oligonucleotide
ucugcagggccucaggaga

SEQ ID NO: 1616072 - RNA, 19 nt, Artificial Sequence
  Description of Artificial Sequence: Synthetic oligonucleotide
uauguugcccacacuggcc

SEQ ID NO: 1616073 - RNA, 19 nt, Artificial Sequence
  Description of Artificial Sequence: Synthetic oligonucleotide
gaaggcuccugcaucaggg

SEQ ID NO: 1616074 - RNA, 19 nt, Artificial Sequence
  Description of Artificial Sequence: Synthetic oligonucleotide
cuggaaccuaaccacagcc

SEQ ID NO: 1616075 - RNA, 19 nt, Artificial Sequence
  Description of Artificial Sequence: Synthetic oligonucleotide
aguagcaaacaauguaggu

SEQ ID NO: 1616076 - RNA, 19 nt, Artificial Sequence
  Description of Artificial Sequence: Synthetic oligonucleotide
cucaaaccaaucagggugc

SEQ ID NO: 1616077 - RNA, 19 nt, Artificial Sequence
  Description of Artificial Sequence: Synthetic oligonucleotide
cucucuugcauccugccag

SEQ ID NO: 1616078 - RNA, 19 nt, Artificial Sequence
  Description of Artificial Sequence: Synthetic oligonucleotide
cacacacacacacacacac

SEQ ID NO: 1616079 - RNA, 19 nt, Artificial Sequence
  Description of Artificial Sequence: Synthetic oligonucleotide
cacacacacauacacacac

SEQ ID NO: 1616080 - RNA, 19 nt, Artificial Sequence
  Description of Artificial Sequence: Synthetic oligonucleotide
cuaagcagagguucucccg

SEQ ID NO: 1616081 - RNA, 19 nt, Artificial Sequence
  Description of Artificial Sequence: Synthetic oligonucleotide
cuugaagucgggcaggauc

SEQ ID NO: 1616082 - RNA, 19 nt, Artificial Sequence
  Description of Artificial Sequence: Synthetic oligonucleotide
cuuuagguacagcaucggg

SEQ ID NO: 1616083 - RNA, 19 nt, Artificial Sequence
  Description of Artificial Sequence: Synthetic oligonucleotide
uccauuugccaucgggaag

SEQ ID NO: 1616084 - RNA, 19 nt, Artificial Sequence
  Description of Artificial Sequence: Synthetic oligonucleotide
agguucaaacaucuccagg

SEQ ID NO: 1616085 - RNA, 19 nt, Artificial Sequence
  Description of Artificial Sequence: Synthetic oligonucleotide
cuugcuauguugcccacac

SEQ ID NO: 1616086 - RNA, 19 nt, Artificial Sequence
  Description of Artificial Sequence: Synthetic oligonucleotide
ugaguggguaccuggaggu

SEQ ID NO: 1616087 - RNA, 19 nt, Artificial Sequence
  Description of Artificial Sequence: Synthetic oligonucleotide
caacagugggucuucaaac

SEQ ID NO: 1616088 - RNA, 19 nt, Artificial Sequence
  Description of Artificial Sequence: Synthetic oligonucleotide
cuggaggugauguugaaga

SEQ ID NO: 1616089 - RNA, 19 nt, Artificial Sequence
  Description of Artificial Sequence: Synthetic oligonucleotide
aguaaaccucuucaaauuu

SEQ ID NO: 1616090 - RNA, 19 nt, Artificial Sequence
  Description of Artificial Sequence: Synthetic oligonucleotide
gaucaagcuuugcugcucc

SEQ ID NO: 1616091 - RNA, 19 nt, Artificial Sequence
  Description of Artificial Sequence: Synthetic oligonucleotide
cuauguugcccacacuggc

SEQ ID NO: 1616092 - RNA, 19 nt, Artificial Sequence
  Description of Artificial Sequence: Synthetic oligonucleotide
ugccaaagcaggcuggccu

SEQ ID NO: 1616093 - RNA, 19 nt, Artificial Sequence
  Description of Artificial Sequence: Synthetic oligonucleotide
gguuuggagggucugaggc

SEQ ID NO: 1616094 - RNA, 19 nt, Artificial Sequence
  Description of Artificial Sequence: Synthetic oligonucleotide
aagagggacaggcguccac

SEQ ID NO: 1616095 - RNA, 19 nt, Artificial Sequence
  Description of Artificial Sequence: Synthetic oligonucleotide
caauguaggugccaaagca

SEQ ID NO: 1616096 - RNA, 19 nt, Artificial Sequence
  Description of Artificial Sequence: Synthetic oligonucleotide
cacacacgcacacacacac

SEQ ID NO: 1616097 - RNA, 19 nt, Artificial Sequence
  Description of Artificial Sequence: Synthetic oligonucleotide
uugaggaccaccgcgggcc

SEQ ID NO: 1616098 - RNA, 19 nt, Artificial Sequence
  Description of Artificial Sequence: Synthetic oligonucleotide
cacacacacacgcacacac

SEQ ID NO: 1616099 - RNA, 19 nt, Artificial Sequence
  Description of Artificial Sequence: Synthetic oligonucleotide
uggauccggaaguaaaccu

SEQ ID NO: 1616100 - RNA, 19 nt, Artificial Sequence
  Description of Artificial Sequence: Synthetic oligonucleotide
cacucguucucucuguggc

SEQ ID NO: 1616101 - RNA, 19 nt, Artificial Sequence
  Description of Artificial Sequence: Synthetic oligonucleotide
uuagagagccacauuucua

SEQ ID NO: 1616102 - RNA, 19 nt, Artificial Sequence
  Description of Artificial Sequence: Synthetic oligonucleotide
cacacgcacacacacacac

SEQ ID NO: 1616103 - RNA, 19 nt, Artificial Sequence
  Description of Artificial Sequence: Synthetic oligonucleotide
gaucaucaggucucaggcc

SEQ ID NO: 1616104 - RNA, 19 nt, Artificial Sequence
  Description of Artificial Sequence: Synthetic oligonucleotide
cacgcacacacacacacac

SEQ ID NO: 1616105 - RNA, 19 nt, Artificial Sequence
  Description of Artificial Sequence: Synthetic oligonucleotide
aggaucauguucauggcug

SEQ ID NO: 1616106 - RNA, 19 nt, Artificial Sequence
  Description of Artificial Sequence: Synthetic oligonucleotide
accugcuaagcagagguuc

SEQ ID NO: 1616107 - RNA, 19 nt, Artificial Sequence
  Description of Artificial Sequence: Synthetic oligonucleotide
acucugucagacuuagaga

SEQ ID NO: 1616108 - RNA, 19 nt, Artificial Sequence
  Description of Artificial Sequence: Synthetic oligonucleotide
cacacacacgcacacacac

SEQ ID NO: 1616109 - RNA, 19 nt, Artificial Sequence
  Description of Artificial Sequence: Synthetic oligonucleotide
ugacacagacauuuaccac

SEQ ID NO: 1616110 - RNA, 19 nt, Artificial Sequence
  Description of Artificial Sequence: Synthetic oligonucleotide
uggaaccuaaccacagccu

SEQ ID NO: 1616111 - RNA, 19 nt, Artificial Sequence
  Description of Artificial Sequence: Synthetic oligonucleotide
uaggcaggcuccauuugcc

SEQ ID NO: 1616112 - RNA, 19 nt, Artificial Sequence
  Description of Artificial Sequence: Synthetic oligonucleotide
cacacacacacacacgcac

SEQ ID NO: 1616113 - RNA, 19 nt, Artificial Sequence
  Description of Artificial Sequence: Synthetic oligonucleotide
uucuguugguagcaccaug

SEQ ID NO: 1616114 - RNA, 19 nt, Artificial Sequence
  Description of Artificial Sequence: Synthetic oligonucleotide
aauuuguccaugagugggu

SEQ ID NO: 1616115 - RNA, 19 nt, Artificial Sequence
  Description of Artificial Sequence: Synthetic oligonucleotide
gaugggagaucuuggucac

SEQ ID NO: 1616116 - RNA, 19 nt, Artificial Sequence
  Description of Artificial Sequence: Synthetic oligonucleotide
acuuagagagccacauuuc

SEQ ID NO: 1616117 - RNA, 19 nt, Artificial Sequence
  Description of Artificial Sequence: Synthetic oligonucleotide
uggucaccugcuaagcaga

SEQ ID NO: 1616118 - RNA, 19 nt, Artificial Sequence
  Description of Artificial Sequence: Synthetic oligonucleotide
gcagaucaagcuuugcugc

SEQ ID NO: 1616119 - RNA, 19 nt, Artificial Sequence
  Description of Artificial Sequence: Synthetic oligonucleotide
gacuuagagagccacauuu

SEQ ID NO: 1616120 - RNA, 19 nt, Artificial Sequence
  Description of Artificial Sequence: Synthetic oligonucleotide
ugccacugaaguagcaaac

SEQ ID NO: 1616121 - RNA, 19 nt, Artificial Sequence
  Description of Artificial Sequence: Synthetic oligonucleotide
cacaacacacauccuuuag

SEQ ID NO: 1616122 - RNA, 19 nt, Artificial Sequence
  Description of Artificial Sequence: Synthetic oligonucleotide
aagucgggcaggaucaugu

SEQ ID NO: 1616123 - RNA, 19 nt, Artificial Sequence
  Description of Artificial Sequence: Synthetic oligonucleotide
ucagggacgucguucucgc

SEQ ID NO: 1616124 - RNA, 19 nt, Artificial Sequence
  Description of Artificial Sequence: Synthetic oligonucleotide
acuaggguucugcagguaa

SEQ ID NO: 1616125 - RNA, 19 nt, Artificial Sequence
  Description of Artificial Sequence: Synthetic oligonucleotide
caagcugucccagccaggg

SEQ ID NO: 1616126 - RNA, 19 nt, Artificial Sequence
  Description of Artificial Sequence: Synthetic oligonucleotide
caccacgugagcugcaggc

SEQ ID NO: 1616127 - RNA, 19 nt, Artificial Sequence
  Description of Artificial Sequence: Synthetic oligonucleotide
cacacacauacacacacca

SEQ ID NO: 1616128 - RNA, 19 nt, Artificial Sequence
  Description of Artificial Sequence: Synthetic oligonucleotide
acuugggguauacaccacu

SEQ ID NO: 1616129 - RNA, 19 nt, Artificial Sequence
  Description of Artificial Sequence: Synthetic oligonucleotide
auguugaagaggucaggga

SEQ ID NO: 1616130 - RNA, 19 nt, Artificial Sequence
  Description of Artificial Sequence: Synthetic oligonucleotide
ggugagcucuuugacaugg

SEQ ID NO: 1616131 - RNA, 19 nt, Artificial Sequence
  Description of Artificial Sequence: Synthetic oligonucleotide
uguugguagcaccaugguu

SEQ ID NO: 1616132 - RNA, 19 nt, Artificial Sequence
  Description of Artificial Sequence: Synthetic oligonucleotide
cacuuguucuguugguagc

SEQ ID NO: 1616133 - RNA, 19 nt, Artificial Sequence
  Description of Artificial Sequence: Synthetic oligonucleotide
ugguuuggagggucugagg

SEQ ID NO: 1616134 - RNA, 19 nt, Artificial Sequence
  Description of Artificial Sequence: Synthetic oligonucleotide
acaggcguccaccacguga

SEQ ID NO: 1616135 - RNA, 19 nt, Artificial Sequence
  Description of Artificial Sequence: Synthetic oligonucleotide
cucugugagccagucaggg

SEQ ID NO: 1616136 - RNA, 19 nt, Artificial Sequence
  Description of Artificial Sequence: Synthetic oligonucleotide
cuugggguauacaccacuc

SEQ ID NO: 1616137 - RNA, 19 nt, Artificial Sequence
  Description of Artificial Sequence: Synthetic oligonucleotide
gaccacuaggguucugcag

SEQ ID NO: 1616138 - RNA, 19 nt, Artificial Sequence
  Description of Artificial Sequence: Synthetic oligonucleotide
guuugccacuccuggaacc

SEQ ID NO: 1616139 - RNA, 19 nt, Artificial Sequence
  Description of Artificial Sequence: Synthetic oligonucleotide
cagggaugggagaucuugg

SEQ ID NO: 1616140 - RNA, 19 nt, Artificial Sequence
  Description of Artificial Sequence: Synthetic oligonucleotide
caggcguccaccacgugag

SEQ ID NO: 1616141 - RNA, 19 nt, Artificial Sequence
  Description of Artificial Sequence: Synthetic oligonucleotide
acacacacauacacacacc

SEQ ID NO: 1616142 - RNA, 19 nt, Artificial Sequence
  Description of Artificial Sequence: Synthetic oligonucleotide
ggugcauccggccagguuc

SEQ ID NO: 1616143 - RNA, 19 nt, Artificial Sequence
  Description of Artificial Sequence: Synthetic oligonucleotide
cucguucucucuguggcgg

SEQ ID NO: 1616144 - RNA, 19 nt, Artificial Sequence
  Description of Artificial Sequence: Synthetic oligonucleotide
aaagguccccagcaggcuu

SEQ ID NO: 1616145 - RNA, 19 nt, Artificial Sequence
  Description of Artificial Sequence: Synthetic oligonucleotide
ugggagaucuuggucaccu

SEQ ID NO: 1616146 - RNA, 19 nt, Artificial Sequence
  Description of Artificial Sequence: Synthetic oligonucleotide
agaucaagcuuugcugcuc

SEQ ID NO: 1616147 - RNA, 19 nt, Artificial Sequence
  Description of Artificial Sequence: Synthetic oligonucleotide
agcaaacaauguaggugcc

SEQ ID NO: 1616148 - RNA, 19 nt, Artificial Sequence
  Description of Artificial Sequence: Synthetic oligonucleotide
gaggcacucguucucucug

SEQ ID NO: 1616149 - RNA, 19 nt, Artificial Sequence
  Description of Artificial Sequence: Synthetic oligonucleotide
cugacugcacugacugccg

SEQ ID NO: 1616150 - RNA, 19 nt, Artificial Sequence
  Description of Artificial Sequence: Synthetic oligonucleotide
cugccgaccacuaggguuc

SEQ ID NO: 1616151 - RNA, 19 nt, Artificial Sequence
  Description of Artificial Sequence: Synthetic oligonucleotide
ggaggugauguugaagagg

SEQ ID NO: 1616152 - RNA, 19 nt, Artificial Sequence
  Description of Artificial Sequence: Synthetic oligonucleotide
ugcuaagcagagguucucc

SEQ ID NO: 1616153 - RNA, 19 nt, Artificial Sequence
  Description of Artificial Sequence: Synthetic oligonucleotide
caugaguggguaccuggag

SEQ ID NO: 1616154 - RNA, 19 nt, Artificial Sequence
  Description of Artificial Sequence: Synthetic oligonucleotide
uauacaccacucugucaga

SEQ ID NO: 1616155 - RNA, 19 nt, Artificial Sequence
  Description of Artificial Sequence: Synthetic oligonucleotide
gguucucccgcucaaacca

SEQ ID NO: 1616156 - RNA, 19 nt, Artificial Sequence
  Description of Artificial Sequence: Synthetic oligonucleotide
cacacacacacacgcacac

SEQ ID NO: 1616157 - RNA, 19 nt, Artificial Sequence
  Description of Artificial Sequence: Synthetic oligonucleotide
acacaccagcacaacacac

SEQ ID NO: 1616158 - RNA, 19 nt, Artificial Sequence
  Description of Artificial Sequence: Synthetic oligonucleotide
gucagggacgucguucucg

SEQ ID NO: 1616159 - RNA, 19 nt, Artificial Sequence
  Description of Artificial Sequence: Synthetic oligonucleotide
gacauggugcauccggcca

SEQ ID NO: 1616160 - RNA, 19 nt, Artificial Sequence
  Description of Artificial Sequence: Synthetic oligonucleotide
aagcuuugcugcuccacuu

SEQ ID NO: 1616161 - RNA, 19 nt, Artificial Sequence
  Description of Artificial Sequence: Synthetic oligonucleotide
ggacuugggguauacacca

SEQ ID NO: 1616162 - RNA, 19 nt, Artificial Sequence
  Description of Artificial Sequence: Synthetic oligonucleotide
augccacugaaguagcaaa

SEQ ID NO: 1616163 - RNA, 19 nt, Artificial Sequence
  Description of Artificial Sequence: Synthetic oligonucleotide
uugguuugccacuccugga

SEQ ID NO: 1616164 - RNA, 19 nt, Artificial Sequence
  Description of Artificial Sequence: Synthetic oligonucleotide
acuuguucuguugguagca

SEQ ID NO: 1616165 - RNA, 19 nt, Artificial Sequence
  Description of Artificial Sequence: Synthetic oligonucleotide
aaggcaggcacuacacaca

SEQ ID NO: 1616166 - RNA, 19 nt, Artificial Sequence
  Description of Artificial Sequence: Synthetic oligonucleotide
agaggcucagcugccucgc

SEQ ID NO: 1616167 - RNA, 19 nt, Artificial Sequence
  Description of Artificial Sequence: Synthetic oligonucleotide
guugguagcaccaugguuu

SEQ ID NO: 1616168 - RNA, 19 nt, Artificial Sequence
  Description of Artificial Sequence: Synthetic oligonucleotide
ugggccuguccacucagac

SEQ ID NO: 1616169 - RNA, 19 nt, Artificial Sequence
  Description of Artificial Sequence: Synthetic oligonucleotide
gcacuuguucuguugguag

SEQ ID NO: 1616170 - RNA, 19 nt, Artificial Sequence
  Description of Artificial Sequence: Synthetic oligonucleotide
cucuuugacauggugcauc

SEQ ID NO: 1616171 - RNA, 19 nt, Artificial Sequence
  Description of Artificial Sequence: Synthetic oligonucleotide
gggacaggcguccaccacg

SEQ ID NO: 1616172 - RNA, 19 nt, Artificial Sequence
  Description of Artificial Sequence: Synthetic oligonucleotide
uguugcccacacuggcccg

SEQ ID NO: 1616173 - RNA, 19 nt, Artificial Sequence
  Description of Artificial Sequence: Synthetic oligonucleotide
auacacacaccagcacaac

SEQ ID NO: 1616174 - RNA, 19 nt, Artificial Sequence
  Description of Artificial Sequence: Synthetic oligonucleotide
caucgggaggcccuaggag

SEQ ID NO: 1616175 - RNA, 19 nt, Artificial Sequence
  Description of Artificial Sequence: Synthetic oligonucleotide
ucaucaggucucaggccca

SEQ ID NO: 1616176 - RNA, 19 nt, Artificial Sequence
  Description of Artificial Sequence: Synthetic oligonucleotide
aggcuggccucuugaaguc

SEQ ID NO: 1616177 - RNA, 19 nt, Artificial Sequence
  Description of Artificial Sequence: Synthetic oligonucleotide
gcacuacacacacacacac

SEQ ID NO: 1616178 - RNA, 19 nt, Artificial Sequence
  Description of Artificial Sequence: Synthetic oligonucleotide
cucgcuacugaugccacug

SEQ ID NO: 1616179 - RNA, 19 nt, Artificial Sequence
  Description of Artificial Sequence: Synthetic oligonucleotide
uacaccacucugucagacu

SEQ ID NO: 1616180 - RNA, 19 nt, Artificial Sequence
  Description of Artificial Sequence: Synthetic oligonucleotide
ugacugcacugacugccgc

SEQ ID NO: 1616181 - RNA, 19 nt, Artificial Sequence
  Description of Artificial Sequence: Synthetic oligonucleotide
ucaagcuuugcugcuccac

SEQ ID NO: 1616182 - RNA, 19 nt, Artificial Sequence
  Description of Artificial Sequence: Synthetic oligonucleotide
aggggcuguuguuugacaa

SEQ ID NO: 1616183 - RNA, 19 nt, Artificial Sequence
  Description of Artificial Sequence: Synthetic oligonucleotide
gagcugccgaccacuaggg

SEQ ID NO: 1616184 - RNA, 19 nt, Artificial Sequence
  Description of Artificial Sequence: Synthetic oligonucleotide
agcaucgggaggcccuagg

SEQ ID NO: 1616185 - RNA, 19 nt, Artificial Sequence
  Description of Artificial Sequence: Synthetic oligonucleotide
uggucucuguggcuccaag

SEQ ID NO: 1616186 - RNA, 19 nt, Artificial Sequence
  Description of Artificial Sequence: Synthetic oligonucleotide
uucucgcuacugaugccac

SEQ ID NO: 1616187 - RNA, 19 nt, Artificial Sequence
  Description of Artificial Sequence: Synthetic oligonucleotide
acuggcccgaaccccuggg

SEQ ID NO: 1616188 - RNA, 19 nt, Artificial Sequence
  Description of Artificial Sequence: Synthetic oligonucleotide
uugccaucgggaagaggga

SEQ ID NO: 1616189 - RNA, 19 nt, Artificial Sequence
  Description of Artificial Sequence: Synthetic oligonucleotide
cuuagagagccacauuucu

SEQ ID NO: 1616190 - RNA, 19 nt, Artificial Sequence
  Description of Artificial Sequence: Synthetic oligonucleotide
guucaggagaucaucaggu

SEQ ID NO: 1616191 - RNA, 19 nt, Artificial Sequence
  Description of Artificial Sequence: Synthetic oligonucleotide
cccgcucaaaccaaucagg

SEQ ID NO: 1616192 - RNA, 19 nt, Artificial Sequence
  Description of Artificial Sequence: Synthetic oligonucleotide
cuugaggaccaccgcgggc

SEQ ID NO: 1616193 - RNA, 19 nt, Artificial Sequence
  Description of Artificial Sequence: Synthetic oligonucleotide
acacacacacacacacacg

SEQ ID NO: 1616194 - RNA, 19 nt, Artificial Sequence
  Description of Artificial Sequence: Synthetic oligonucleotide
agggacaggcguccaccac

SEQ ID NO: 1616195 - RNA, 19 nt, Artificial Sequence
  Description of Artificial Sequence: Synthetic oligonucleotide
gcuauguugcccacacugg

SEQ ID NO: 1616196 - RNA, 19 nt, Artificial Sequence
  Description of Artificial Sequence: Synthetic oligonucleotide
acgucguucucgcuacuga

SEQ ID NO: 1616197 - RNA, 19 nt, Artificial Sequence
  Description of Artificial Sequence: Synthetic oligonucleotide
ggaucauguucauggcugc

SEQ ID NO: 1616198 - RNA, 19 nt, Artificial Sequence
  Description of Artificial Sequence: Synthetic oligonucleotide
gugcagggguccuugagga

SEQ ID NO: 1616199 - RNA, 19 nt, Artificial Sequence
  Description of Artificial Sequence: Synthetic oligonucleotide
cagcugcucucuugcaucc

SEQ ID NO: 1616200 - RNA, 19 nt, Artificial Sequence
  Description of Artificial Sequence: Synthetic oligonucleotide
uggcggcagcugcagauca

SEQ ID NO: 1616201 - RNA, 19 nt, Artificial Sequence
  Description of Artificial Sequence: Synthetic oligonucleotide
auuuaccaccaggcagccc

SEQ ID NO: 1616202 - RNA, 19 nt, Artificial Sequence
  Description of Artificial Sequence: Synthetic oligonucleotide
guagcccuggucugacugc

SEQ ID NO: 1616203 - RNA, 19 nt, Artificial Sequence
  Description of Artificial Sequence: Synthetic oligonucleotide
gcuaagcagagguucuccc

SEQ ID NO: 1616204 - RNA, 19 nt, Artificial Sequence
  Description of Artificial Sequence: Synthetic oligonucleotide
agggacgucguucucgcua

SEQ ID NO: 1616205 - RNA, 19 nt, Artificial Sequence
  Description of Artificial Sequence: Synthetic oligonucleotide
ugccucgcccacuucuagc

SEQ ID NO: 1616206 - RNA, 19 nt, Artificial Sequence
  Description of Artificial Sequence: Synthetic oligonucleotide
cucacugacacagacauuu

SEQ ID NO: 1616207 - RNA, 19 nt, Artificial Sequence
  Description of Artificial Sequence: Synthetic oligonucleotide
gauguagcccuggucugac

SEQ ID NO: 1616208 - RNA, 19 nt, Artificial Sequence
  Description of Artificial Sequence: Synthetic oligonucleotide
gaggucagggacgucguuc

SEQ ID NO: 1616209 - RNA, 19 nt, Artificial Sequence
  Description of Artificial Sequence: Synthetic oligonucleotide
acacacacacacauacaca

SEQ ID NO: 1616210 - RNA, 19 nt, Artificial Sequence
  Description of Artificial Sequence: Synthetic oligonucleotide
ucucccgcucaaaccaauc

SEQ ID NO: 1616211 - RNA, 19 nt, Artificial Sequence
  Description of Artificial Sequence: Synthetic oligonucleotide
accgagagcaucaggcucu

SEQ ID NO: 1616212 - RNA, 19 nt, Artificial Sequence
  Description of Artificial Sequence: Synthetic oligonucleotide
cauuuaccaccaggcagcc

SEQ ID NO: 1616213 - RNA, 19 nt, Artificial Sequence
  Description of Artificial Sequence: Synthetic oligonucleotide
ugccacuccuggaaccuaa

SEQ ID NO: 1616214 - RNA, 19 nt, Artificial Sequence
  Description of Artificial Sequence: Synthetic oligonucleotide
cauguucauggcugcugug

SEQ ID NO: 1616215 - RNA, 19 nt, Artificial Sequence
  Description of Artificial Sequence: Synthetic oligonucleotide
gcuacugaugccacugaag

SEQ ID NO: 1616216 - RNA, 19 nt, Artificial Sequence
  Description of Artificial Sequence: Synthetic oligonucleotide
caccgagagcaucaggcuc

SEQ ID NO: 1616217 - RNA, 19 nt, Artificial Sequence
  Description of Artificial Sequence: Synthetic oligonucleotide
agugggucuucaaacacuu

SEQ ID NO: 1616218 - RNA, 19 nt, Artificial Sequence
  Description of Artificial Sequence: Synthetic oligonucleotide
ucgcuacugaugccacuga

SEQ ID NO: 1616219 - RNA, 19 nt, Artificial Sequence
  Description of Artificial Sequence: Synthetic oligonucleotide
gggacuugggguauacacc

SEQ ID NO: 1616220 - RNA, 19 nt, Artificial Sequence
  Description of Artificial Sequence: Synthetic oligonucleotide
ggguauacaccacucuguc

SEQ ID NO: 1616221 - RNA, 19 nt, Artificial Sequence
  Description of Artificial Sequence: Synthetic oligonucleotide
ucacugacacagacauuua

SEQ ID NO: 1616222 - RNA, 19 nt, Artificial Sequence
  Description of Artificial Sequence: Synthetic oligonucleotide
cuacacacacacacacaca

SEQ ID NO: 1616223 - RNA, 19 nt, Artificial Sequence
  Description of Artificial Sequence: Synthetic oligonucleotide
gacgucguucucgcuacug

SEQ ID NO: 1616224 - RNA, 19 nt, Artificial Sequence
  Description of Artificial Sequence: Synthetic oligonucleotide
gauccggaaguaaaccucu

SEQ ID NO: 1616225 - RNA, 19 nt, Artificial Sequence
  Description of Artificial Sequence: Synthetic oligonucleotide
cacacacacacacacacau

SEQ ID NO: 1616226 - RNA, 19 nt, Artificial Sequence
  Description of Artificial Sequence: Synthetic oligonucleotide
ugccaucgggaagagggac

SEQ ID NO: 1616227 - RNA, 19 nt, Artificial Sequence
  Description of Artificial Sequence: Synthetic oligonucleotide
auuugccaucgggaagagg

SEQ ID NO: 1616228 - RNA, 19 nt, Artificial Sequence
  Description of Artificial Sequence: Synthetic oligonucleotide
uggguaggcaggcuccauu

SEQ ID NO: 1616229 - RNA, 19 nt, Artificial Sequence
  Description of Artificial Sequence: Synthetic oligonucleotide
ggucucuguggcuccaagc

SEQ ID NO: 1616230 - RNA, 19 nt, Artificial Sequence
  Description of Artificial Sequence: Synthetic oligonucleotide
gaagucgggcaggaucaug

SEQ ID NO: 1616231 - RNA, 19 nt, Artificial Sequence
  Description of Artificial Sequence: Synthetic oligonucleotide
gguauacaccacucuguca

SEQ ID NO: 1616232 - RNA, 19 nt, Artificial Sequence
  Description of Artificial Sequence: Synthetic oligonucleotide
aggcccaagugcugggacu

SEQ ID NO: 1616233 - RNA, 19 nt, Artificial Sequence
  Description of Artificial Sequence: Synthetic oligonucleotide
aagcugucccagccagggu

SEQ ID NO: 1616234 - RNA, 19 nt, Artificial Sequence
  Description of Artificial Sequence: Synthetic oligonucleotide
agacuuagagagccacauu

SEQ ID NO: 1616235 - RNA, 19 nt, Artificial Sequence
  Description of Artificial Sequence: Synthetic oligonucleotide
gucgggcaggaucauguuc

SEQ ID NO: 1616236 - RNA, 19 nt, Artificial Sequence
  Description of Artificial Sequence: Synthetic oligonucleotide
cugcagggccucaggagac

SEQ ID NO: 1616237 - RNA, 19 nt, Artificial Sequence
  Description of Artificial Sequence: Synthetic oligonucleotide
gguagcaccaugguuugga

SEQ ID NO: 1616238 - RNA, 19 nt, Artificial Sequence
  Description of Artificial Sequence: Synthetic oligonucleotide
ucucgcuacugaugccacu

SEQ ID NO: 1616239 - RNA, 19 nt, Artificial Sequence
  Description of Artificial Sequence: Synthetic oligonucleotide
cacuacacacacacacaca

SEQ ID NO: 1616240 - RNA, 19 nt, Artificial Sequence
  Description of Artificial Sequence: Synthetic oligonucleotide
gggucugaggcacucguuc

SEQ ID NO: 1616241 - RNA, 19 nt, Artificial Sequence
  Description of Artificial Sequence: Synthetic oligonucleotide
aggcacuuguucuguuggu

SEQ ID NO: 1616242 - RNA, 19 nt, Artificial Sequence
  Description of Artificial Sequence: Synthetic oligonucleotide
uugcuauguugcccacacu

SEQ ID NO: 1616243 - RNA, 19 nt, Artificial Sequence
  Description of Artificial Sequence: Synthetic oligonucleotide
acacacacacacacgcaca

SEQ ID NO: 1616244 - RNA, 19 nt, Artificial Sequence
  Description of Artificial Sequence: Synthetic oligonucleotide
cgcacacacacacacacac

SEQ ID NO: 1616245 - RNA, 19 nt, Artificial Sequence
  Description of Artificial Sequence: Synthetic oligonucleotide
aucaagcuuugcugcucca

SEQ ID NO: 1616246 - RNA, 19 nt, Artificial Sequence
  Description of Artificial Sequence: Synthetic oligonucleotide
gagggacaggcguccacca

SEQ ID NO: 1616247 - RNA, 19 nt, Artificial Sequence
  Description of Artificial Sequence: Synthetic oligonucleotide
cucccgcucaaaccaauca

SEQ ID NO: 1616248 - RNA, 19 nt, Artificial Sequence
  Description of Artificial Sequence: Synthetic oligonucleotide
aggugccaaagcaggcugg

SEQ ID NO: 1616249 - RNA, 19 nt, Artificial Sequence
  Description of Artificial Sequence: Synthetic oligonucleotide
aggcguccaccacgugagc

SEQ ID NO: 1616250 - RNA, 19 nt, Artificial Sequence
  Description of Artificial Sequence: Synthetic oligonucleotide
uagcccuggucugacugca

SEQ ID NO: 1616251 - RNA, 19 nt, Artificial Sequence
  Description of Artificial Sequence: Synthetic oligonucleotide
auccggccagguucaaaca

SEQ ID NO: 1616252 - RNA, 19 nt, Artificial Sequence
  Description of Artificial Sequence: Synthetic oligonucleotide
gucugaggcacucguucuc

SEQ ID NO: 1616253 - RNA, 19 nt, Artificial Sequence
  Description of Artificial Sequence: Synthetic oligonucleotide
auuuguccaugagugggua

SEQ ID NO: 1616254 - RNA, 19 nt, Artificial Sequence
  Description of Artificial Sequence: Synthetic oligonucleotide
aggcacucguucucucugu

SEQ ID NO: 1616255 - RNA, 19 nt, Artificial Sequence
  Description of Artificial Sequence: Synthetic oligonucleotide
ccggaaguaaaccucuuca

SEQ ID NO: 1616256 - RNA, 19 nt, Artificial Sequence
  Description of Artificial Sequence: Synthetic oligonucleotide
gcugaggggagcuucugga

SEQ ID NO: 1616257 - RNA, 19 nt, Artificial Sequence
  Description of Artificial Sequence: Synthetic oligonucleotide
cugcagaucaagcuuugcu

SEQ ID NO: 1616258 - RNA, 19 nt, Artificial Sequence
  Description of Artificial Sequence: Synthetic oligonucleotide
cacucagacucugcugcag

SEQ ID NO: 1616259 - RNA, 19 nt, Artificial Sequence
  Description of Artificial Sequence: Synthetic oligonucleotide
acacacacacauacacaca

SEQ ID NO: 1616260 - RNA, 19 nt, Artificial Sequence
  Description of Artificial Sequence: Synthetic oligonucleotide
ugguagcaccaugguuugg

SEQ ID NO: 1616261 - RNA, 19 nt, Artificial Sequence
  Description of Artificial Sequence: Synthetic oligonucleotide
ugaggaccaccgcgggccu

SEQ ID NO: 1616262 - RNA, 19 nt, Artificial Sequence
  Description of Artificial Sequence: Synthetic oligonucleotide
ugcauccugccagggucag

SEQ ID NO: 1616263 - RNA, 19 nt, Artificial Sequence
  Description of Artificial Sequence: Synthetic oligonucleotide
acacacacacacacauaca

SEQ ID NO: 1616264 - RNA, 19 nt, Artificial Sequence
  Description of Artificial Sequence: Synthetic oligonucleotide
gggaugggagaucuugguc

SEQ ID NO: 1616265 - RNA, 19 nt, Artificial Sequence
  Description of Artificial Sequence: Synthetic oligonucleotide
ccacauuucuaaggcaggc

SEQ ID NO: 1616266 - RNA, 19 nt, Artificial Sequence
  Description of Artificial Sequence: Synthetic oligonucleotide
gggacgucguucucgcuac

SEQ ID NO: 1616267 - RNA, 19 nt, Artificial Sequence
  Description of Artificial Sequence: Synthetic oligonucleotide
gguaggcaggcuccauuug

SEQ ID NO: 1616268 - RNA, 19 nt, Artificial Sequence
  Description of Artificial Sequence: Synthetic oligonucleotide
gaggggagcuucuggagau

SEQ ID NO: 1616269 - RNA, 19 nt, Artificial Sequence
  Description of Artificial Sequence: Synthetic oligonucleotide
acacacacacacacacaca

SEQ ID NO: 1616270 - RNA, 19 nt, Artificial Sequence
  Description of Artificial Sequence: Synthetic oligonucleotide
acacacacacacacacgca

SEQ ID NO: 1616271 - RNA, 19 nt, Artificial Sequence
  Description of Artificial Sequence: Synthetic oligonucleotide
cagcaccgagagcaucagg

SEQ ID NO: 1616272 - RNA, 19 nt, Artificial Sequence
  Description of Artificial Sequence: Synthetic oligonucleotide
ccagggaugggagaucuug

SEQ ID NO: 1616273 - RNA, 19 nt, Artificial Sequence
  Description of Artificial Sequence: Synthetic oligonucleotide
gaguggguaccuggaggug

SEQ ID NO: 1616274 - RNA, 19 nt, Artificial Sequence
  Description of Artificial Sequence: Synthetic oligonucleotide
caagcuuugcugcuccacu

SEQ ID NO: 1616275 - RNA, 19 nt, Artificial Sequence
  Description of Artificial Sequence: Synthetic oligonucleotide
gguccuugaggaccaccgc

SEQ ID NO: 1616276 - RNA, 19 nt, Artificial Sequence
  Description of Artificial Sequence: Synthetic oligonucleotide
cucgcccagcucuccuggg

SEQ ID NO: 1616277 - RNA, 19 nt, Artificial Sequence
  Description of Artificial Sequence: Synthetic oligonucleotide
cugccucgcccacuucuag

SEQ ID NO: 1616278 - RNA, 19 nt, Artificial Sequence
  Description of Artificial Sequence: Synthetic oligonucleotide
gcuggccucuugaagucgg

SEQ ID NO: 1616279 - RNA, 19 nt, Artificial Sequence
  Description of Artificial Sequence: Synthetic oligonucleotide
gcuccauuugccaucggga

SEQ ID NO: 1616280 - RNA, 19 nt, Artificial Sequence
  Description of Artificial Sequence: Synthetic oligonucleotide
cauuugccaucgggaagag

SEQ ID NO: 1616281 - RNA, 19 nt, Artificial Sequence
  Description of Artificial Sequence: Synthetic oligonucleotide
caccagcacaacacacauc

SEQ ID NO: 1616282 - RNA, 19 nt, Artificial Sequence
  Description of Artificial Sequence: Synthetic oligonucleotide
acacacacacacgcacaca

SEQ ID NO: 1616283 - RNA, 19 nt, Artificial Sequence
  Description of Artificial Sequence: Synthetic oligonucleotide
acacacacgcacacacaca

SEQ ID NO: 1616284 - RNA, 19 nt, Artificial Sequence
  Description of Artificial Sequence: Synthetic oligonucleotide
guggcuccaagcuguccca

SEQ ID NO: 1616285 - RNA, 19 nt, Artificial Sequence
  Description of Artificial Sequence: Synthetic oligonucleotide
gcccacuucuagcucuucc

SEQ ID NO: 1616286 - RNA, 19 nt, Artificial Sequence
  Description of Artificial Sequence: Synthetic oligonucleotide
ccuuuagguacagcaucgg

SEQ ID NO: 1616287 - RNA, 19 nt, Artificial Sequence
  Description of Artificial Sequence: Synthetic oligonucleotide
uggugcauccggccagguu

SEQ ID NO: 1616288 - RNA, 19 nt, Artificial Sequence
  Description of Artificial Sequence: Synthetic oligonucleotide
acacacacacgcacacaca

SEQ ID NO: 1616289 - RNA, 19 nt, Artificial Sequence
  Description of Artificial Sequence: Synthetic oligonucleotide
accaaucagggugcuuggu

SEQ ID NO: 1616290 - RNA, 19 nt, Artificial Sequence
  Description of Artificial Sequence: Synthetic oligonucleotide
ugguggcaacagugggucu

SEQ ID NO: 1616291 - RNA, 19 nt, Artificial Sequence
  Description of Artificial Sequence: Synthetic oligonucleotide
gcguccaccacgugagcug

SEQ ID NO: 1616292 - RNA, 19 nt, Artificial Sequence
  Description of Artificial Sequence: Synthetic oligonucleotide
ggcacucguucucucugug

SEQ ID NO: 1616293 - RNA, 19 nt, Artificial Sequence
  Description of Artificial Sequence: Synthetic oligonucleotide
caccaugguuuggaggguc

SEQ ID NO: 1616294 - RNA, 19 nt, Artificial Sequence
  Description of Artificial Sequence: Synthetic oligonucleotide
ugcagggccucaggagaca

SEQ ID NO: 1616295 - RNA, 19 nt, Artificial Sequence
  Description of Artificial Sequence: Synthetic oligonucleotide
cugcuaagcagagguucuc

SEQ ID NO: 1616296 - RNA, 19 nt, Artificial Sequence
  Description of Artificial Sequence: Synthetic oligonucleotide
gccacugaaguagcaaaca

SEQ ID NO: 1616297 - RNA, 19 nt, Artificial Sequence
  Description of Artificial Sequence: Synthetic oligonucleotide
ccuugaggaccaccgcggg

SEQ ID NO: 1616298 - RNA, 19 nt, Artificial Sequence
  Description of Artificial Sequence: Synthetic oligonucleotide
ggcacuacacacacacaca

SEQ ID NO: 1616299 - RNA, 19 nt, Artificial Sequence
  Description of Artificial Sequence: Synthetic oligonucleotide
ccaucgggaagagggacag

SEQ ID NO: 1616300 - RNA, 19 nt, Artificial Sequence
  Description of Artificial Sequence: Synthetic oligonucleotide
cagaucaagcuuugcugcu

SEQ ID NO: 1616301 - RNA, 19 nt, Artificial Sequence
  Description of Artificial Sequence: Synthetic oligonucleotide
gacucugcugcagcaccga

SEQ ID NO: 1616302 - RNA, 19 nt, Artificial Sequence
  Description of Artificial Sequence: Synthetic oligonucleotide
cagacuuagagagccacau

SEQ ID NO: 1616303 - RNA, 19 nt, Artificial Sequence
  Description of Artificial Sequence: Synthetic oligonucleotide
cagcacaacacacauccuu

SEQ ID NO: 1616304 - RNA, 19 nt, Artificial Sequence
  Description of Artificial Sequence: Synthetic oligonucleotide
cucgcccacuucuagcucu

SEQ ID NO: 1616305 - RNA, 19 nt, Artificial Sequence
  Description of Artificial Sequence: Synthetic oligonucleotide
gaagagggacaggcgucca

SEQ ID NO: 1616306 - RNA, 19 nt, Artificial Sequence
  Description of Artificial Sequence: Synthetic oligonucleotide
caggcuuccaguggucaca

SEQ ID NO: 1616307 - RNA, 19 nt, Artificial Sequence
  Description of Artificial Sequence: Synthetic oligonucleotide
gcaaacaauguaggugcca

SEQ ID NO: 1616308 - RNA, 19 nt, Artificial Sequence
  Description of Artificial Sequence: Synthetic oligonucleotide
ccucuugaagucgggcagg

SEQ ID NO: 1616309 - RNA, 19 nt, Artificial Sequence
  Description of Artificial Sequence: Synthetic oligonucleotide
acacgcacacacacacaca

SEQ ID NO: 1616310 - RNA, 19 nt, Artificial Sequence
  Description of Artificial Sequence: Synthetic oligonucleotide
ccacuucuagcucuuccuc

SEQ ID NO: 1616311 - RNA, 19 nt, Artificial Sequence
  Description of Artificial Sequence: Synthetic oligonucleotide
guccaugaguggguaccug

SEQ ID NO: 1616312 - RNA, 19 nt, Artificial Sequence
  Description of Artificial Sequence: Synthetic oligonucleotide
ccgaccacuaggguucugc

SEQ ID NO: 1616313 - RNA, 19 nt, Artificial Sequence
  Description of Artificial Sequence: Synthetic oligonucleotide
caucgggaagagggacagg

SEQ ID NO: 1616314 - RNA, 19 nt, Artificial Sequence
  Description of Artificial Sequence: Synthetic oligonucleotide
ugaagucgggcaggaucau

SEQ ID NO: 1616315 - RNA, 19 nt, Artificial Sequence
  Description of Artificial Sequence: Synthetic oligonucleotide
agagguucucccgcucaaa

SEQ ID NO: 1616316 - RNA, 19 nt, Artificial Sequence
  Description of Artificial Sequence: Synthetic oligonucleotide
ccacgugagcugcaggcac

SEQ ID NO: 1616317 - RNA, 19 nt, Artificial Sequence
  Description of Artificial Sequence: Synthetic oligonucleotide
caggcacuacacacacaca

SEQ ID NO: 1616318 - RNA, 19 nt, Artificial Sequence
  Description of Artificial Sequence: Synthetic oligonucleotide
uggcaacagugggucuuca

SEQ ID NO: 1616319 - RNA, 19 nt, Artificial Sequence
  Description of Artificial Sequence: Synthetic oligonucleotide
gacaggcguccaccacgug

SEQ ID NO: 1616320 - RNA, 19 nt, Artificial Sequence
  Description of Artificial Sequence: Synthetic oligonucleotide
ucgcccacuucuagcucuu

SEQ ID NO: 1616321 - RNA, 19 nt, Artificial Sequence
  Description of Artificial Sequence: Synthetic oligonucleotide
ggcccgaaccccuggguuc

SEQ ID NO: 1616322 - RNA, 19 nt, Artificial Sequence
  Description of Artificial Sequence: Synthetic oligonucleotide
acacacgcacacacacaca

SEQ ID NO: 1616323 - RNA, 19 nt, Artificial Sequence
  Description of Artificial Sequence: Synthetic oligonucleotide
ggcuggccucuugaagucg

SEQ ID NO: 1616324 - RNA, 19 nt, Artificial Sequence
  Description of Artificial Sequence: Synthetic oligonucleotide
gcucucuugcauccugcca

SEQ ID NO: 1616325 - RNA, 19 nt, Artificial Sequence
  Description of Artificial Sequence: Synthetic oligonucleotide
gggaagagggacaggcguc

SEQ ID NO: 1616326 - RNA, 19 nt, Artificial Sequence
  Description of Artificial Sequence: Synthetic oligonucleotide
gcaucgggaggcccuagga

SEQ ID NO: 1616327 - RNA, 19 nt, Artificial Sequence
  Description of Artificial Sequence: Synthetic oligonucleotide
ccagggucagcuggguagg

SEQ ID NO: 1616328 - RNA, 19 nt, Artificial Sequence
  Description of Artificial Sequence: Synthetic oligonucleotide
uccagggaugggagaucuu

SEQ ID NO: 1616329 - RNA, 19 nt, Artificial Sequence
  Description of Artificial Sequence: Synthetic oligonucleotide
acacacacacacacacaua

SEQ ID NO: 1616330 - RNA, 19 nt, Artificial Sequence
  Description of Artificial Sequence: Synthetic oligonucleotide
acgcacacacacacacaca

SEQ ID NO: 1616331 - RNA, 19 nt, Artificial Sequence
  Description of Artificial Sequence: Synthetic oligonucleotide
ccggccagguucaaacauc

SEQ ID NO: 1616332 - RNA, 19 nt, Artificial Sequence
  Description of Artificial Sequence: Synthetic oligonucleotide
ccucgcccagcucuccugg

SEQ ID NO: 1616333 - RNA, 19 nt, Artificial Sequence
  Description of Artificial Sequence: Synthetic oligonucleotide
aggggagcuucuggagaug

SEQ ID NO: 1616334 - RNA, 19 nt, Artificial Sequence
  Description of Artificial Sequence: Synthetic oligonucleotide
gcgugcagggguccuugag

SEQ ID NO: 1616335 - RNA, 19 nt, Artificial Sequence
  Description of Artificial Sequence: Synthetic oligonucleotide
ccaugaguggguaccugga

SEQ ID NO: 1616336 - RNA, 19 nt, Artificial Sequence
  Description of Artificial Sequence: Synthetic oligonucleotide
agcccuggucugacugcac

SEQ ID NO: 1616337 - RNA, 19 nt, Artificial Sequence
  Description of Artificial Sequence: Synthetic oligonucleotide
gggguauacaccacucugu

SEQ ID NO: 1616338 - RNA, 19 nt, Artificial Sequence
  Description of Artificial Sequence: Synthetic oligonucleotide
cuguugguagcaccauggu

SEQ ID NO: 1616339 - RNA, 19 nt, Artificial Sequence
  Description of Artificial Sequence: Synthetic oligonucleotide
ggcuguuguuugacaauuc

SEQ ID NO: 1616340 - RNA, 19 nt, Artificial Sequence
  Description of Artificial Sequence: Synthetic oligonucleotide
cccggugagcucuuugaca

SEQ ID NO: 1616341 - RNA, 19 nt, Artificial Sequence
  Description of Artificial Sequence: Synthetic oligonucleotide
gcugccgaccacuaggguu

SEQ ID NO: 1616342 - RNA, 19 nt, Artificial Sequence
  Description of Artificial Sequence: Synthetic oligonucleotide
uugccacuccuggaaccua

SEQ ID NO: 1616343 - RNA, 19 nt, Artificial Sequence
  Description of Artificial Sequence: Synthetic oligonucleotide
ccuaggagggagccugcuc

SEQ ID NO: 1616344 - RNA, 19 nt, Artificial Sequence
  Description of Artificial Sequence: Synthetic oligonucleotide
ggcacuuguucuguuggua

SEQ ID NO: 1616345 - RNA, 19 nt, Artificial Sequence
  Description of Artificial Sequence: Synthetic oligonucleotide
acagcaucgggaggcccua

SEQ ID NO: 1616346 - RNA, 19 nt, Artificial Sequence
  Description of Artificial Sequence: Synthetic oligonucleotide
ccaccacgugagcugcagg

SEQ ID NO: 1616347 - RNA, 19 nt, Artificial Sequence
  Description of Artificial Sequence: Synthetic oligonucleotide
guucucccgcucaaaccaa

SEQ ID NO: 1616348 - RNA, 19 nt, Artificial Sequence
  Description of Artificial Sequence: Synthetic oligonucleotide
ggcaacagugggucuucaa

SEQ ID NO: 1616349 - RNA, 19 nt, Artificial Sequence
  Description of Artificial Sequence: Synthetic oligonucleotide
acgugagcugcaggcacuu

SEQ ID NO: 1616350 - RNA, 19 nt, Artificial Sequence
  Description of Artificial Sequence: Synthetic oligonucleotide
caccacucugucagacuua

SEQ ID NO: 1616351 - RNA, 19 nt, Artificial Sequence
  Description of Artificial Sequence: Synthetic oligonucleotide
cugggccuguccacucaga

SEQ ID NO: 1616352 - RNA, 19 nt, Artificial Sequence
  Description of Artificial Sequence: Synthetic oligonucleotide
ugccgaccacuaggguucu

SEQ ID NO: 1616353 - RNA, 19 nt, Artificial Sequence
  Description of Artificial Sequence: Synthetic oligonucleotide
gccucgcccacuucuagcu

SEQ ID NO: 1616354 - RNA, 19 nt, Artificial Sequence
  Description of Artificial Sequence: Synthetic oligonucleotide
ccugcuaagcagagguucu

SEQ ID NO: 1616355 - RNA, 19 nt, Artificial Sequence
  Description of Artificial Sequence: Synthetic oligonucleotide
gcugggacuugggguauac

SEQ ID NO: 1616356 - RNA, 19 nt, Artificial Sequence
  Description of Artificial Sequence: Synthetic oligonucleotide
gcacacacacacacacaca

SEQ ID NO: 1616357 - RNA, 19 nt, Artificial Sequence
  Description of Artificial Sequence: Synthetic oligonucleotide
gccaucgggaagagggaca

SEQ ID NO: 1616358 - RNA, 19 nt, Artificial Sequence
  Description of Artificial Sequence: Synthetic oligonucleotide
gagcugccgcuggaggcuc

SEQ ID NO: 1616359 - RNA, 19 nt, Artificial Sequence
  Description of Artificial Sequence: Synthetic oligonucleotide
ccccggugagcucuuugac

SEQ ID NO: 1616360 - RNA, 19 nt, Artificial Sequence
  Description of Artificial Sequence: Synthetic oligonucleotide
gcaccgagagcaucaggcu

SEQ ID NO: 1616361 - RNA, 19 nt, Artificial Sequence
  Description of Artificial Sequence: Synthetic oligonucleotide
ggaggcccuaggagggagc

SEQ ID NO: 1616362 - RNA, 19 nt, Artificial Sequence
  Description of Artificial Sequence: Synthetic oligonucleotide
gcugucccagccaggguuc

SEQ ID NO: 1616363 - RNA, 19 nt, Artificial Sequence
  Description of Artificial Sequence: Synthetic oligonucleotide
auccggaaguaaaccucuu

SEQ ID NO: 1616364 - RNA, 19 nt, Artificial Sequence
  Description of Artificial Sequence: Synthetic oligonucleotide
ccaugguuuggagggucug

SEQ ID NO: 1616365 - RNA, 19 nt, Artificial Sequence
  Description of Artificial Sequence: Synthetic oligonucleotide
guucuguugguagcaccau

SEQ ID NO: 1616366 - RNA, 19 nt, Artificial Sequence
  Description of Artificial Sequence: Synthetic oligonucleotide
ccgcugcuccuccucagug

SEQ ID NO: 1616367 - RNA, 19 nt, Artificial Sequence
  Description of Artificial Sequence: Synthetic oligonucleotide
agggucugaggcacucguu

SEQ ID NO: 1616368 - RNA, 19 nt, Artificial Sequence
  Description of Artificial Sequence: Synthetic oligonucleotide
cagcaucgggaggcccuag

SEQ ID NO: 1616369 - RNA, 19 nt, Artificial Sequence
  Description of Artificial Sequence: Synthetic oligonucleotide
ggggcuguuguuugacaau

SEQ ID NO: 1616370 - RNA, 19 nt, Artificial Sequence
  Description of Artificial Sequence: Synthetic oligonucleotide
caucaggucucaggcccaa

SEQ ID NO: 1616371 - RNA, 19 nt, Artificial Sequence
  Description of Artificial Sequence: Synthetic oligonucleotide
cgaaccccuggguucagga

SEQ ID NO: 1616372 - RNA, 19 nt, Artificial Sequence
  Description of Artificial Sequence: Synthetic oligonucleotide
gggcgugcagggguccuug

SEQ ID NO: 1616373 - RNA, 19 nt, Artificial Sequence
  Description of Artificial Sequence: Synthetic oligonucleotide
ugcauccggccagguucaa

SEQ ID NO: 1616374 - RNA, 19 nt, Artificial Sequence
  Description of Artificial Sequence: Synthetic oligonucleotide
caccgcgggccucgcccag

SEQ ID NO: 1616375 - RNA, 19 nt, Artificial Sequence
  Description of Artificial Sequence: Synthetic oligonucleotide
gggcuguuguuugacaauu

SEQ ID NO: 1616376 - RNA, 19 nt, Artificial Sequence
  Description of Artificial Sequence: Synthetic oligonucleotide
ggggagcuucuggagaugu

SEQ ID NO: 1616377 - RNA, 19 nt, Artificial Sequence
  Description of Artificial Sequence: Synthetic oligonucleotide
cuguggcggcagcugcaga

SEQ ID NO: 1616378 - RNA, 19 nt, Artificial Sequence
  Description of Artificial Sequence: Synthetic oligonucleotide
ugggcgugcagggguccuu

SEQ ID NO: 1616379 - RNA, 19 nt, Artificial Sequence
  Description of Artificial Sequence: Synthetic oligonucleotide
gaggaccaccgcgggccuc

SEQ ID NO: 1616380 - RNA, 19 nt, Artificial Sequence
  Description of Artificial Sequence: Synthetic oligonucleotide
gguccuggauccggaagua

SEQ ID NO: 1616381 - RNA, 19 nt, Artificial Sequence
  Description of Artificial Sequence: Synthetic oligonucleotide
guggguaccuggaggugau

SEQ ID NO: 1616382 - RNA, 19 nt, Artificial Sequence
  Description of Artificial Sequence: Synthetic oligonucleotide
ggcguccaccacgugagcu

SEQ ID NO: 1616383 - RNA, 19 nt, Artificial Sequence
  Description of Artificial Sequence: Synthetic oligonucleotide
gccacuccuggaaccuaac

SEQ ID NO: 1616384 - RNA, 19 nt, Artificial Sequence
  Description of Artificial Sequence: Synthetic oligonucleotide
ggacaggcguccaccacgu

SEQ ID NO: 1616385 - RNA, 19 nt, Artificial Sequence
  Description of Artificial Sequence: Synthetic oligonucleotide
gcccgaaccccuggguuca

SEQ ID NO: 1616386 - RNA, 19 nt, Artificial Sequence
  Description of Artificial Sequence: Synthetic oligonucleotide
ccucgcccacuucuagcuc

SEQ ID NO: 1616387 - RNA, 19 nt, Artificial Sequence
  Description of Artificial Sequence: Synthetic oligonucleotide
cgaccacuaggguucugca

SEQ ID NO: 1616388 - RNA, 19 nt, Artificial Sequence
  Description of Artificial Sequence: Synthetic oligonucleotide
ggcgugcagggguccuuga

SEQ ID NO: 1616389 - RNA, 19 nt, Artificial Sequence
  Description of Artificial Sequence: Synthetic oligonucleotide
ccgaaccccuggguucagg

SEQ ID NO: 1616390 - RNA, 19 nt, Artificial Sequence
  Description of Artificial Sequence: Synthetic oligonucleotide
ggccagguucaaacaucuc

SEQ ID NO: 1616391 - RNA, 19 nt, Artificial Sequence
  Description of Artificial Sequence: Synthetic oligonucleotide
cacuaggguucugcaggua

SEQ ID NO: 1616392 - RNA, 19 nt, Artificial Sequence
  Description of Artificial Sequence: Synthetic oligonucleotide
ccucagaaggcuccugcau

SEQ ID NO: 1616393 - RNA, 19 nt, Artificial Sequence
  Description of Artificial Sequence: Synthetic oligonucleotide
ccacuaggguucugcaggu

SEQ ID NO: 1616394 - RNA, 19 nt, Artificial Sequence
  Description of Artificial Sequence: Synthetic oligonucleotide
ccuugagcugccgaccacu

SEQ ID NO: 1616395 - RNA, 19 nt, Artificial Sequence
  Description of Artificial Sequence: Synthetic oligonucleotide
cgcucaaaccaaucagggu

SEQ ID NO: 1616396 - RNA, 19 nt, Artificial Sequence
  Description of Artificial Sequence: Synthetic oligonucleotide
cgcuacugaugccacugaa

SEQ ID NO: 1616397 - RNA, 19 nt, Artificial Sequence
  Description of Artificial Sequence: Synthetic oligonucleotide
ccuggguucaggagaucau

SEQ ID NO: 1616398 - RNA, 19 nt, Artificial Sequence
  Description of Artificial Sequence: Synthetic oligonucleotide
gcugccucgcccacuucua

SEQ ID NO: 1616399 - RNA, 19 nt, Artificial Sequence
  Description of Artificial Sequence: Synthetic oligonucleotide
ggcccaagugcugggacuu

SEQ ID NO: 1616400 - RNA, 19 nt, Artificial Sequence
  Description of Artificial Sequence: Synthetic oligonucleotide
gcauccggccagguucaaa

SEQ ID NO: 1616401 - RNA, 19 nt, Artificial Sequence
  Description of Artificial Sequence: Synthetic oligonucleotide
ccgagagcaucaggcucuc

SEQ ID NO: 1616402 - RNA, 19 nt, Artificial Sequence
  Description of Artificial Sequence: Synthetic oligonucleotide
cagggacgucguucucgcu

SEQ ID NO: 1616403 - RNA, 19 nt, Artificial Sequence
  Description of Artificial Sequence: Synthetic oligonucleotide
ggcggcagcugcagaucaa

SEQ ID NO: 1616404 - RNA, 19 nt, Artificial Sequence
  Description of Artificial Sequence: Synthetic oligonucleotide
cgucguucucgcuacugau

SEQ ID NO: 1616405 - RNA, 19 nt, Artificial Sequence
  Description of Artificial Sequence: Synthetic oligonucleotide
gugcugggacuugggguau

SEQ ID NO: 1616406 - RNA, 19 nt, Artificial Sequence
  Description of Artificial Sequence: Synthetic oligonucleotide
gcucuuugacauggugcau

SEQ ID NO: 1616407 - RNA, 19 nt, Artificial Sequence
  Description of Artificial Sequence: Synthetic oligonucleotide
ccaccgcgggccucgccca

SEQ ID NO: 1616408 - RNA, 19 nt, Artificial Sequence
  Description of Artificial Sequence: Synthetic oligonucleotide
ggccucgcccagcucuccu

SEQ ID NO: 1616409 - RNA, 19 nt, Artificial Sequence
  Description of Artificial Sequence: Synthetic oligonucleotide
cagcccucagaaggcuccu

SEQ ID NO: 1616410 - RNA, 19 nt, Artificial Sequence
  Description of Artificial Sequence: Synthetic oligonucleotide
ggacgucguucucgcuacu

SEQ ID NO: 1616411 - RNA, 19 nt, Artificial Sequence
  Description of Artificial Sequence: Synthetic oligonucleotide
cgggccucgcccagcucuc

SEQ ID NO: 1616412 - RNA, 19 nt, Artificial Sequence
  Description of Artificial Sequence: Synthetic oligonucleotide
gccgaccacuaggguucug

SEQ ID NO: 1616413 - RNA, 19 nt, Artificial Sequence
  Description of Artificial Sequence: Synthetic oligonucleotide
cccgaaccccuggguucag

SEQ ID NO: 1616414 - RNA, 19 nt, Artificial Sequence
  Description of Artificial Sequence: Synthetic oligonucleotide
ccucacugacacagacauu

SEQ ID NO: 1616415 - RNA, 19 nt, Artificial Sequence
  Description of Artificial Sequence: Synthetic oligonucleotide
cccuaggagggagccugcu

SEQ ID NO: 1616416 - RNA, 19 nt, Artificial Sequence
  Description of Artificial Sequence: Synthetic oligonucleotide
acaaauaugaaccaggaag

SEQ ID NO: 1616417 - RNA, 19 nt, Artificial Sequence
  Description of Artificial Sequence: Synthetic oligonucleotide
aauaucaacagcccuuucc

SEQ ID NO: 1616418 - RNA, 19 nt, Artificial Sequence
  Description of Artificial Sequence: Synthetic oligonucleotide
aagaauuauauauggguac

SEQ ID NO: 1616419 - RNA, 19 nt, Artificial Sequence
  Description of Artificial Sequence: Synthetic oligonucleotide
uuguuuaauaucaacagcc

SEQ ID NO: 1616420 - RNA, 19 nt, Artificial Sequence
  Description of Artificial Sequence: Synthetic oligonucleotide
aaugacaacucguagaucu

SEQ ID NO: 1616421 - RNA, 19 nt, Artificial Sequence
  Description of Artificial Sequence: Synthetic oligonucleotide
uacauauauauguaaaggg

SEQ ID NO: 1616422 - RNA, 19 nt, Artificial Sequence
  Description of Artificial Sequence: Synthetic oligonucleotide
uaucuuacgaaacaaguag

SEQ ID NO: 1616423 - RNA, 19 nt, Artificial Sequence
  Description of Artificial Sequence: Synthetic oligonucleotide
uguacgacaaagcauuagg

SEQ ID NO: 1616424 - RNA, 19 nt, Artificial Sequence
  Description of Artificial Sequence: Synthetic oligonucleotide
auaucaacagcccuuuccc

SEQ ID NO: 1616425 - RNA, 19 nt, Artificial Sequence
  Description of Artificial Sequence: Synthetic oligonucleotide
uauguauggauauguaggg

SEQ ID NO: 1616426 - RNA, 19 nt, Artificial Sequence
  Description of Artificial Sequence: Synthetic oligonucleotide
uuuaucuuacgaaacaagu

SEQ ID NO: 1616427 - RNA, 19 nt, Artificial Sequence
  Description of Artificial Sequence: Synthetic oligonucleotide
accccuuugcaauagaccc

SEQ ID NO: 1616428 - RNA, 19 nt, Artificial Sequence
  Description of Artificial Sequence: Synthetic oligonucleotide
ucaugcguuuuacagaagg

SEQ ID NO: 1616429 - RNA, 19 nt, Artificial Sequence
  Description of Artificial Sequence: Synthetic oligonucleotide
uuuugcacgugcaaaacag

SEQ ID NO: 1616430 - RNA, 19 nt, Artificial Sequence
  Description of Artificial Sequence: Synthetic oligonucleotide
ugcaaaacaguuaugugug

SEQ ID NO: 1616431 - RNA, 19 nt, Artificial Sequence
  Description of Artificial Sequence: Synthetic oligonucleotide
aguauugcuuucuugguuc

SEQ ID NO: 1616432 - RNA, 19 nt, Artificial Sequence
  Description of Artificial Sequence: Synthetic oligonucleotide
  modified_base (4)..(4): a, c, u, g, unknown or other
uucngaaguaacuacaguc

SEQ ID NO: 1616433 - RNA, 19 nt, Artificial Sequence
  Description of Artificial Sequence: Synthetic oligonucleotide
ucugcuaauguugagcugg

SEQ ID NO: 1616434 - RNA, 19 nt, Artificial Sequence
  Description of Artificial Sequence: Synthetic oligonucleotide
  modified_base (3)..(3): a, c, u, g, unknown or other
ucngaaguaacuacaguca

SEQ ID NO: 1616435 - RNA, 19 nt, Artificial Sequence
  Description of Artificial Sequence: Synthetic oligonucleotide
  modified_base (6)..(6): a, c, u, g, unknown or other
uuuucngaaguaacuacag

SEQ ID NO: 1616436 - RNA, 19 nt, Artificial Sequence
  Description of Artificial Sequence: Synthetic oligonucleotide
aaauaugaaccaggaagcc

SEQ ID NO: 1616437 - RNA, 19 nt, Artificial Sequence
  Description of Artificial Sequence: Synthetic oligonucleotide
uuugccuaaacuauuugca

SEQ ID NO: 1616438 - RNA, 19 nt, Artificial Sequence
  Description of Artificial Sequence: Synthetic oligonucleotide
aucaaauuuggagaggccc

SEQ ID NO: 1616439 - RNA, 19 nt, Artificial Sequence
  Description of Artificial Sequence: Synthetic oligonucleotide
uguggaagaauuauauaug

SEQ ID NO: 1616440 - RNA, 19 nt, Artificial Sequence
  Description of Artificial Sequence: Synthetic oligonucleotide
aaucugcuaauguugagcu

SEQ ID NO: 1616441 - RNA, 19 nt, Artificial Sequence
  Description of Artificial Sequence: Synthetic oligonucleotide
aaguaguccaaggaagugc

SEQ ID NO: 1616442 - RNA, 19 nt, Artificial Sequence
  Description of Artificial Sequence: Synthetic oligonucleotide
uuacgaaacaaguagucca

SEQ ID NO: 1616443 - RNA, 19 nt, Artificial Sequence
  Description of Artificial Sequence: Synthetic oligonucleotide
uucuauguaauguggcugg

SEQ ID NO: 1616444 - RNA, 19 nt, Artificial Sequence
  Description of Artificial Sequence: Synthetic oligonucleotide
auuauauauggguacacgu

SEQ ID NO: 1616445 - RNA, 19 nt, Artificial Sequence
  Description of Artificial Sequence: Synthetic oligonucleotide
uguauggauauguagggca

SEQ ID NO: 1616446 - RNA, 19 nt, Artificial Sequence
  Description of Artificial Sequence: Synthetic oligonucleotide
aaagcauuagggcuuguca

SEQ ID NO: 1616447 - RNA, 19 nt, Artificial Sequence
  Description of Artificial Sequence: Synthetic oligonucleotide
uguuuaauaucaacagccc

SEQ ID NO: 1616448 - RNA, 19 nt, Artificial Sequence
  Description of Artificial Sequence: Synthetic oligonucleotide
uuuugccuaaacuauuugc

SEQ ID NO: 1616449 - RNA, 19 nt, Artificial Sequence
  Description of Artificial Sequence: Synthetic oligonucleotide
ugcuuugucugccaugugg

SEQ ID NO: 1616450 - RNA, 19 nt, Artificial Sequence
  Description of Artificial Sequence: Synthetic oligonucleotide
acugcaguaacaaagaaca

SEQ ID NO: 1616451 - RNA, 19 nt, Artificial Sequence
  Description of Artificial Sequence: Synthetic oligonucleotide
auuagcuaaagaucacuuc

SEQ ID NO: 1616452 - RNA, 19 nt, Artificial Sequence
  Description of Artificial Sequence: Synthetic oligonucleotide
cuaauguugagcuggcugc

SEQ ID NO: 1616453 - RNA, 19 nt, Artificial Sequence
  Description of Artificial Sequence: Synthetic oligonucleotide
uuuacaaauccauucccca

SEQ ID NO: 1616454 - RNA, 19 nt, Artificial Sequence
  Description of Artificial Sequence: Synthetic oligonucleotide
aacaaguaguccaaggaag

SEQ ID NO: 1616455 - RNA, 19 nt, Artificial Sequence
  Description of Artificial Sequence: Synthetic oligonucleotide
uuuuauguacaguauugcu

SEQ ID NO: 1616456 - RNA, 19 nt, Artificial Sequence
  Description of Artificial Sequence: Synthetic oligonucleotide
ucugaauauuucaugcgug

SEQ ID NO: 1616457 - RNA, 19 nt, Artificial Sequence
  Description of Artificial Sequence: Synthetic oligonucleotide
agaacaaauaugaaccagg

SEQ ID NO: 1616458 - RNA, 19 nt, Artificial Sequence
  Description of Artificial Sequence: Synthetic oligonucleotide
uuuccgacuauucauucca

SEQ ID NO: 1616459 - RNA, 19 nt, Artificial Sequence
  Description of Artificial Sequence: Synthetic oligonucleotide
uugcaauagacccaugcca

SEQ ID NO: 1616460 - RNA, 19 nt, Artificial Sequence
  Description of Artificial Sequence: Synthetic oligonucleotide
aauggaagucaccccgugg

SEQ ID NO: 1616461 - RNA, 19 nt, Artificial Sequence
  Description of Artificial Sequence: Synthetic oligonucleotide
uacgacaaagcauuagggc

SEQ ID NO: 1616462 - RNA, 19 nt, Artificial Sequence
  Description of Artificial Sequence: Synthetic oligonucleotide
cacaaugggagaauggaag

SEQ ID NO: 1616463 - RNA, 19 nt, Artificial Sequence
  Description of Artificial Sequence: Synthetic oligonucleotide
aagaacaaauaugaaccag

SEQ ID NO: 1616464 - RNA, 19 nt, Artificial Sequence
  Description of Artificial Sequence: Synthetic oligonucleotide
uaaacuauuugcaccagua

SEQ ID NO: 1616465 - RNA, 19 nt, Artificial Sequence
  Description of Artificial Sequence: Synthetic oligonucleotide
uauauauggguacacguuu

SEQ ID NO: 1616466 - RNA, 19 nt, Artificial Sequence
  Description of Artificial Sequence: Synthetic oligonucleotide
acgacaaagcauuagggcu

SEQ ID NO: 1616467 - RNA, 19 nt, Artificial Sequence
  Description of Artificial Sequence: Synthetic oligonucleotide
uuaucuuacgaaacaagua

SEQ ID NO: 1616468 - RNA, 19 nt, Artificial Sequence
  Description of Artificial Sequence: Synthetic oligonucleotide
uaguguacgacaaagcauu

SEQ ID NO: 1616469 - RNA, 19 nt, Artificial Sequence
  Description of Artificial Sequence: Synthetic oligonucleotide
cuuugcaauagacccaugc

SEQ ID NO: 1616470 - RNA, 19 nt, Artificial Sequence
  Description of Artificial Sequence: Synthetic oligonucleotide
uauuuccagcuccauuugg

SEQ ID NO: 1616471 - RNA, 19 nt, Artificial Sequence
  Description of Artificial Sequence: Synthetic oligonucleotide
agaucuguagugcucaaca

SEQ ID NO: 1616472 - RNA, 19 nt, Artificial Sequence
  Description of Artificial Sequence: Synthetic oligonucleotide
augcguuuuacagaagggc

SEQ ID NO: 1616473 - RNA, 19 nt, Artificial Sequence
  Description of Artificial Sequence: Synthetic oligonucleotide
ucaaauuuggagaggcccu

SEQ ID NO: 1616474 - RNA, 19 nt, Artificial Sequence
  Description of Artificial Sequence: Synthetic oligonucleotide
ugcguuuuacagaagggcu

SEQ ID NO: 1616475 - RNA, 19 nt, Artificial Sequence
  Description of Artificial Sequence: Synthetic oligonucleotide
aucuguagugcucaacauc

SEQ ID NO: 1616476 - RNA, 19 nt, Artificial Sequence
  Description of Artificial Sequence: Synthetic oligonucleotide
uuaguguacgacaaagcau

SEQ ID NO: 1616477 - RNA, 19 nt, Artificial Sequence
  Description of Artificial Sequence: Synthetic oligonucleotide
uacagaagggcuuucucug

SEQ ID NO: 1616478 - RNA, 19 nt, Artificial Sequence
  Description of Artificial Sequence: Synthetic oligonucleotide
ucuguccucgguauuuggg

SEQ ID NO: 1616479 - RNA, 19 nt, Artificial Sequence
  Description of Artificial Sequence: Synthetic oligonucleotide
uuauauauggguacacguu

SEQ ID NO: 1616480 - RNA, 19 nt, Artificial Sequence
  Description of Artificial Sequence: Synthetic oligonucleotide
ugcucuguucuacaaagcu

SEQ ID NO: 1616481 - RNA, 19 nt, Artificial Sequence
  Description of Artificial Sequence: Synthetic oligonucleotide
aauaugaaccaggaagccu

SEQ ID NO: 1616482 - RNA, 19 nt, Artificial Sequence
  Description of Artificial Sequence: Synthetic oligonucleotide
acauauauauguaaaggga

SEQ ID NO: 1616483 - RNA, 19 nt, Artificial Sequence
  Description of Artificial Sequence: Synthetic oligonucleotide
uuacagaagggcuuucucu

SEQ ID NO: 1616484 - RNA, 19 nt, Artificial Sequence
  Description of Artificial Sequence: Synthetic oligonucleotide
acuauucauuccaagauug

SEQ ID NO: 1616485 - RNA, 19 nt, Artificial Sequence
  Description of Artificial Sequence: Synthetic oligonucleotide
uguagggcaguucacugca

SEQ ID NO: 1616486 - RNA, 19 nt, Artificial Sequence
  Description of Artificial Sequence: Synthetic oligonucleotide
aauauuucaugcguguuuu

SEQ ID NO: 1616487 - RNA, 19 nt, Artificial Sequence
  Description of Artificial Sequence: Synthetic oligonucleotide
auguagggcaguucacugc

SEQ ID NO: 1616488 - RNA, 19 nt, Artificial Sequence
  Description of Artificial Sequence: Synthetic oligonucleotide
aacaguuauguguggggcu

SEQ ID NO: 1616489 - RNA, 19 nt, Artificial Sequence
  Description of Artificial Sequence: Synthetic oligonucleotide
cuuacgaaacaaguagucc

SEQ ID NO: 1616490 - RNA, 19 nt, Artificial Sequence
  Description of Artificial Sequence: Synthetic oligonucleotide
uauauguaaagggaaguau

SEQ ID NO: 1616491 - RNA, 19 nt, Artificial Sequence
  Description of Artificial Sequence: Synthetic oligonucleotide
  modified_base (5)..(5): a, c, u, g, unknown or other
uuucngaaguaacuacagu

SEQ ID NO: 1616492 - RNA, 19 nt, Artificial Sequence
  Description of Artificial Sequence: Synthetic oligonucleotide
uguagugcucaacauccca

SEQ ID NO: 1616493 - RNA, 19 nt, Artificial Sequence
  Description of Artificial Sequence: Synthetic oligonucleotide
aacaaauaugaaccaggaa

SEQ ID NO: 1616494 - RNA, 19 nt, Artificial Sequence
  Description of Artificial Sequence: Synthetic oligonucleotide
acugcgagaucuguagugc

SEQ ID NO: 1616495 - RNA, 19 nt, Artificial Sequence
  Description of Artificial Sequence: Synthetic oligonucleotide
acauuucuauguaaugugg

SEQ ID NO: 1616496 - RNA, 19 nt, Artificial Sequence
  Description of Artificial Sequence: Synthetic oligonucleotide
caagauugccaccaccggg

SEQ ID NO: 1616497 - RNA, 19 nt, Artificial Sequence
  Description of Artificial Sequence: Synthetic oligonucleotide
acagucaccgcacaguuaa

SEQ ID NO: 1616498 - RNA, 19 nt, Artificial Sequence
  Description of Artificial Sequence: Synthetic oligonucleotide
auagcaugcuugaaucugc

SEQ ID NO: 1616499 - RNA, 19 nt, Artificial Sequence
  Description of Artificial Sequence: Synthetic oligonucleotide
aacuacagucaccgcacag

SEQ ID NO: 1616500 - RNA, 19 nt, Artificial Sequence
  Description of Artificial Sequence: Synthetic oligonucleotide
ucaccgcacaguuaaauaa

SEQ ID NO: 1616501 - RNA, 19 nt, Artificial Sequence
  Description of Artificial Sequence: Synthetic oligonucleotide
uauuucaugcguguuuucu

SEQ ID NO: 1616502 - RNA, 19 nt, Artificial Sequence
  Description of Artificial Sequence: Synthetic oligonucleotide
guuuacaaauccauucccc

SEQ ID NO: 1616503 - RNA, 19 nt, Artificial Sequence
  Description of Artificial Sequence: Synthetic oligonucleotide
auguauggauauguagggc

SEQ ID NO: 1616504 - RNA, 19 nt, Artificial Sequence
  Description of Artificial Sequence: Synthetic oligonucleotide
accuacaaggaguuugcag

SEQ ID NO: 1616505 - RNA, 19 nt, Artificial Sequence
  Description of Artificial Sequence: Synthetic oligonucleotide
uauauggguacacguuucu

SEQ ID NO: 1616506 - RNA, 19 nt, Artificial Sequence
  Description of Artificial Sequence: Synthetic oligonucleotide
uguuuaucuuacgaaacaa

SEQ ID NO: 1616507 - RNA, 19 nt, Artificial Sequence
  Description of Artificial Sequence: Synthetic oligonucleotide
ugacaacucguagaucugg

SEQ ID NO: 1616508 - RNA, 19 nt, Artificial Sequence
  Description of Artificial Sequence: Synthetic oligonucleotide
agaauuauauauggguaca

SEQ ID NO: 1616509 - RNA, 19 nt, Artificial Sequence
  Description of Artificial Sequence: Synthetic oligonucleotide
aggggagcgccccauuucc

SEQ ID NO: 1616510 - RNA, 19 nt, Artificial Sequence
  Description of Artificial Sequence: Synthetic oligonucleotide
guacgacaaagcauuaggg

SEQ ID NO: 1616511 - RNA, 19 nt, Artificial Sequence
  Description of Artificial Sequence: Synthetic oligonucleotide
acaaugggagaauggaagu

SEQ ID NO: 1616512 - RNA, 19 nt, Artificial Sequence
  Description of Artificial Sequence: Synthetic oligonucleotide
uguggacacacaucugcag

SEQ ID NO: 1616513 - RNA, 19 nt, Artificial Sequence
  Description of Artificial Sequence: Synthetic oligonucleotide
gacacaagugaacucccug

SEQ ID NO: 1616514 - RNA, 19 nt, Artificial Sequence
  Description of Artificial Sequence: Synthetic oligonucleotide
uacgaaacaaguaguccaa

SEQ ID NO: 1616515 - RNA, 19 nt, Artificial Sequence
  Description of Artificial Sequence: Synthetic oligonucleotide
auuuugccuaaacuauuug

SEQ ID NO: 1616516 - RNA, 19 nt, Artificial Sequence
  Description of Artificial Sequence: Synthetic oligonucleotide
gcuagagcugcucagacug

SEQ ID NO: 1616517 - RNA, 19 nt, Artificial Sequence
  Description of Artificial Sequence: Synthetic oligonucleotide
cuguccucgguauuugggg

SEQ ID NO: 1616518 - RNA, 19 nt, Artificial Sequence
  Description of Artificial Sequence: Synthetic oligonucleotide
uauuugcaccaguauuucc

SEQ ID NO: 1616519 - RNA, 19 nt, Artificial Sequence
  Description of Artificial Sequence: Synthetic oligonucleotide
guaaagggaaguauauaug

SEQ ID NO: 1616520 - RNA, 19 nt, Artificial Sequence
  Description of Artificial Sequence: Synthetic oligonucleotide
ggaagaauuauauaugggu

SEQ ID NO: 1616521 - RNA, 19 nt, Artificial Sequence
  Description of Artificial Sequence: Synthetic oligonucleotide
auagacccaugccagguug

SEQ ID NO: 1616522 - RNA, 19 nt, Artificial Sequence
  Description of Artificial Sequence: Synthetic oligonucleotide
ugcguguuuucuauucucu

SEQ ID NO: 1616523 - RNA, 19 nt, Artificial Sequence
  Description of Artificial Sequence: Synthetic oligonucleotide
  modified_base (2)..(2): a, c, u, g, unknown or other
cngaaguaacuacagucac

SEQ ID NO: 1616524 - RNA, 19 nt, Artificial Sequence
  Description of Artificial Sequence: Synthetic oligonucleotide
aagauugccaccaccgggu

SEQ ID NO: 1616525 - RNA, 19 nt, Artificial Sequence
  Description of Artificial Sequence: Synthetic oligonucleotide
uggacuauuuccagcucca

SEQ ID NO: 1616526 - RNA, 19 nt, Artificial Sequence
  Description of Artificial Sequence: Synthetic oligonucleotide
ucaugcguguuuucuauuc

SEQ ID NO: 1616527 - RNA, 19 nt, Artificial Sequence
  Description of Artificial Sequence: Synthetic oligonucleotide
ugaaucugcuaauguugag

SEQ ID NO: 1616528 - RNA, 19 nt, Artificial Sequence
  Description of Artificial Sequence: Synthetic oligonucleotide
uuucaugcguguuuucuau

SEQ ID NO: 1616529 - RNA, 19 nt, Artificial Sequence
  Description of Artificial Sequence: Synthetic oligonucleotide
ugauucuguguaugcaaca

SEQ ID NO: 1616530 - RNA, 19 nt, Artificial Sequence
  Description of Artificial Sequence: Synthetic oligonucleotide
cacaagugaacucccuggg

SEQ ID NO: 1616531 - RNA, 19 nt, Artificial Sequence
  Description of Artificial Sequence: Synthetic oligonucleotide
agaccuacaaggaguuugc

SEQ ID NO: 1616532 - RNA, 19 nt, Artificial Sequence
  Description of Artificial Sequence: Synthetic oligonucleotide
gaacaaauaugaaccagga

SEQ ID NO: 1616533 - RNA, 19 nt, Artificial Sequence
  Description of Artificial Sequence: Synthetic oligonucleotide
gaaguauauauguauggau

SEQ ID NO: 1616534 - RNA, 19 nt, Artificial Sequence
  Description of Artificial Sequence: Synthetic oligonucleotide
ucggccaagcacaauggga

SEQ ID NO: 1616535 - RNA, 19 nt, Artificial Sequence
  Description of Artificial Sequence: Synthetic oligonucleotide
acgugcaaaacaguuaugu

SEQ ID NO: 1616536 - RNA, 19 nt, Artificial Sequence
  Description of Artificial Sequence: Synthetic oligonucleotide
ggugacacaagugaacucc

SEQ ID NO: 1616537 - RNA, 19 nt, Artificial Sequence
  Description of Artificial Sequence: Synthetic oligonucleotide
caaggaagugccagacugg

SEQ ID NO: 1616538 - RNA, 19 nt, Artificial Sequence
  Description of Artificial Sequence: Synthetic oligonucleotide
uccgacuauucauuccaag

SEQ ID NO: 1616539 - RNA, 19 nt, Artificial Sequence
  Description of Artificial Sequence: Synthetic oligonucleotide
auauauggguacacguuuc

SEQ ID NO: 1616540 - RNA, 19 nt, Artificial Sequence
  Description of Artificial Sequence: Synthetic oligonucleotide
uuugcacgugcaaaacagu

SEQ ID NO: 1616541 - RNA, 19 nt, Artificial Sequence
  Description of Artificial Sequence: Synthetic oligonucleotide
agacuuuguaggcauaauu

SEQ ID NO: 1616542 - RNA, 19 nt, Artificial Sequence
  Description of Artificial Sequence: Synthetic oligonucleotide
uuaauaucaacagcccuuu

SEQ ID NO: 1616543 - RNA, 19 nt, Artificial Sequence
  Description of Artificial Sequence: Synthetic oligonucleotide
acuauuugcaccaguauuu

SEQ ID NO: 1616544 - RNA, 19 nt, Artificial Sequence
  Description of Artificial Sequence: Synthetic oligonucleotide
aacucccuggguuagugua

SEQ ID NO: 1616545 - RNA, 19 nt, Artificial Sequence
  Description of Artificial Sequence: Synthetic oligonucleotide
guuuccgacuauucauucc

SEQ ID NO: 1616546 - RNA, 19 nt, Artificial Sequence
  Description of Artificial Sequence: Synthetic oligonucleotide
cagaccuacaaggaguuug

SEQ ID NO: 1616547 - RNA, 19 nt, Artificial Sequence
  Description of Artificial Sequence: Synthetic oligonucleotide
caccccuuugcaauagacc

SEQ ID NO: 1616548 - RNA, 19 nt, Artificial Sequence
  Description of Artificial Sequence: Synthetic oligonucleotide
ugcucagacuguccacagg

SEQ ID NO: 1616549 - RNA, 19 nt, Artificial Sequence
  Description of Artificial Sequence: Synthetic oligonucleotide
uugcacgugcaaaacaguu

SEQ ID NO: 1616550 - RNA, 19 nt, Artificial Sequence
  Description of Artificial Sequence: Synthetic oligonucleotide
aucaacagcccuuucccau

SEQ ID NO: 1616551 - RNA, 19 nt, Artificial Sequence
  Description of Artificial Sequence: Synthetic oligonucleotide
ugucacagggacugugaca

SEQ ID NO: 1616552 - RNA, 19 nt, Artificial Sequence
  Description of Artificial Sequence: Synthetic oligonucleotide
aauagacccaugccagguu

SEQ ID NO: 1616553 - RNA, 19 nt, Artificial Sequence
  Description of Artificial Sequence: Synthetic oligonucleotide
uaucaacagcccuuuccca

SEQ ID NO: 1616554 - RNA, 19 nt, Artificial Sequence
  Description of Artificial Sequence: Synthetic oligonucleotide
guacaguauugcuuucuug

SEQ ID NO: 1616555 - RNA, 19 nt, Artificial Sequence
  Description of Artificial Sequence: Synthetic oligonucleotide
cuguuuaucuuacgaaaca

SEQ ID NO: 1616556 - RNA, 19 nt, Artificial Sequence
  Description of Artificial Sequence: Synthetic oligonucleotide
gaauggaagucaccccgug

SEQ ID NO: 1616557 - RNA, 19 nt, Artificial Sequence
  Description of Artificial Sequence: Synthetic oligonucleotide
aaagggaaguauauaugua

SEQ ID NO: 1616558 - RNA, 19 nt, Artificial Sequence
  Description of Artificial Sequence: Synthetic oligonucleotide
guuuaauaucaacagcccu

SEQ ID NO: 1616559 - RNA, 19 nt, Artificial Sequence
  Description of Artificial Sequence: Synthetic oligonucleotide
auuuggcacugcgagaucu

SEQ ID NO: 1616560 - RNA, 19 nt, Artificial Sequence
  Description of Artificial Sequence: Synthetic oligonucleotide
cacugcgagaucuguagug

SEQ ID NO: 1616561 - RNA, 19 nt, Artificial Sequence
  Description of Artificial Sequence: Synthetic oligonucleotide
ggcacugcgagaucuguag

SEQ ID NO: 1616562 - RNA, 19 nt, Artificial Sequence
  Description of Artificial Sequence: Synthetic oligonucleotide
ugccugauucuguguaugc

SEQ ID NO: 1616563 - RNA, 19 nt, Artificial Sequence
  Description of Artificial Sequence: Synthetic oligonucleotide
gguuggguuauuaauauaa

SEQ ID NO: 1616564 - RNA, 19 nt, Artificial Sequence
  Description of Artificial Sequence: Synthetic oligonucleotide
acaaguaguccaaggaagu

SEQ ID NO: 1616565 - RNA, 19 nt, Artificial Sequence
  Description of Artificial Sequence: Synthetic oligonucleotide
ugggagaauggaagucacc

SEQ ID NO: 1616566 - RNA, 19 nt, Artificial Sequence
  Description of Artificial Sequence: Synthetic oligonucleotide
acaagugaacucccugggu

SEQ ID NO: 1616567 - RNA, 19 nt, Artificial Sequence
  Description of Artificial Sequence: Synthetic oligonucleotide
uggggcuuuuguuuauugu

SEQ ID NO: 1616568 - RNA, 19 nt, Artificial Sequence
  Description of Artificial Sequence: Synthetic oligonucleotide
cucagacuguccacagggg

SEQ ID NO: 1616569 - RNA, 19 nt, Artificial Sequence
  Description of Artificial Sequence: Synthetic oligonucleotide
ugguuuccgacuauucauu

SEQ ID NO: 1616570 - RNA, 19 nt, Artificial Sequence
  Description of Artificial Sequence: Synthetic oligonucleotide
augggagaauggaagucac

SEQ ID NO: 1616571 - RNA, 19 nt, Artificial Sequence
  Description of Artificial Sequence: Synthetic oligonucleotide
auugccaccaccgggugga

SEQ ID NO: 1616572 - RNA, 19 nt, Artificial Sequence
  Description of Artificial Sequence: Synthetic oligonucleotide
agccuuaggucacccaugu

SEQ ID NO: 1616573 - RNA, 19 nt, Artificial Sequence
  Description of Artificial Sequence: Synthetic oligonucleotide
aucguaggagcugcuagag

SEQ ID NO: 1616574 - RNA, 19 nt, Artificial Sequence
  Description of Artificial Sequence: Synthetic oligonucleotide
gguggagauagcaugcuug

SEQ ID NO: 1616575 - RNA, 19 nt, Artificial Sequence
  Description of Artificial Sequence: Synthetic oligonucleotide
aggcccuugaguuuacaaa

SEQ ID NO: 1616576 - RNA, 19 nt, Artificial Sequence
  Description of Artificial Sequence: Synthetic oligonucleotide
accaguauuuccaaucaaa

SEQ ID NO: 1616577 - RNA, 19 nt, Artificial Sequence
  Description of Artificial Sequence: Synthetic oligonucleotide
ucguaggagcugcuagagc

SEQ ID NO: 1616578 - RNA, 19 nt, Artificial Sequence
  Description of Artificial Sequence: Synthetic oligonucleotide
uggguacacguuucucugc

SEQ ID NO: 1616579 - RNA, 19 nt, Artificial Sequence
  Description of Artificial Sequence: Synthetic oligonucleotide
ggaaguauauauguaugga

SEQ ID NO: 1616580 - RNA, 19 nt, Artificial Sequence
  Description of Artificial Sequence: Synthetic oligonucleotide
accccguggauccucccgg

SEQ ID NO: 1616581 - RNA, 19 nt, Artificial Sequence
  Description of Artificial Sequence: Synthetic oligonucleotide
ggguuaguguacgacaaag

SEQ ID NO: 1616582 - RNA, 19 nt, Artificial Sequence
  Description of Artificial Sequence: Synthetic oligonucleotide
cucuguucuacaaagcuau

SEQ ID NO: 1616583 - RNA, 19 nt, Artificial Sequence
  Description of Artificial Sequence: Synthetic oligonucleotide
gccuaaacuauuugcacca

SEQ ID NO: 1616584 - RNA, 19 nt, Artificial Sequence
  Description of Artificial Sequence: Synthetic oligonucleotide
aguucacugcaguaacaaa

SEQ ID NO: 1616585 - RNA, 19 nt, Artificial Sequence
  Description of Artificial Sequence: Synthetic oligonucleotide
ugugccuacagggugcuuu

SEQ ID NO: 1616586 - RNA, 19 nt, Artificial Sequence
  Description of Artificial Sequence: Synthetic oligonucleotide
gguuccugcuuuucuacug

SEQ ID NO: 1616587 - RNA, 19 nt, Artificial Sequence
  Description of Artificial Sequence: Synthetic oligonucleotide
uaauaucaacagcccuuuc

SEQ ID NO: 1616588 - RNA, 19 nt, Artificial Sequence
  Description of Artificial Sequence: Synthetic oligonucleotide
caguaagugccugauucug

SEQ ID NO: 1616589 - RNA, 19 nt, Artificial Sequence
  Description of Artificial Sequence: Synthetic oligonucleotide
aucugcuaauguugagcug

SEQ ID NO: 1616590 - RNA, 19 nt, Artificial Sequence
  Description of Artificial Sequence: Synthetic oligonucleotide
cgcacaguuaaauaaaaca

SEQ ID NO: 1616591 - RNA, 19 nt, Artificial Sequence
  Description of Artificial Sequence: Synthetic oligonucleotide
acccaugccagguuggguu

SEQ ID NO: 1616592 - RNA, 19 nt, Artificial Sequence
  Description of Artificial Sequence: Synthetic oligonucleotide
cuguagugcucaacauccc

SEQ ID NO: 1616593 - RNA, 19 nt, Artificial Sequence
  Description of Artificial Sequence: Synthetic oligonucleotide
cuguccacaggggagcgcc

SEQ ID NO: 1616594 - RNA, 19 nt, Artificial Sequence
  Description of Artificial Sequence: Synthetic oligonucleotide
gguuaguguacgacaaagc

SEQ ID NO: 1616595 - RNA, 19 nt, Artificial Sequence
  Description of Artificial Sequence: Synthetic oligonucleotide
ggggaaugacaacucguag

SEQ ID NO: 1616596 - RNA, 19 nt, Artificial Sequence
  Description of Artificial Sequence: Synthetic oligonucleotide
gggucggccaagcacaaug

SEQ ID NO: 1616597 - RNA, 19 nt, Artificial Sequence
  Description of Artificial Sequence: Synthetic oligonucleotide
caaagauggugacacaagu

SEQ ID NO: 1616598 - RNA, 19 nt, Artificial Sequence
  Description of Artificial Sequence: Synthetic oligonucleotide
aggcuaauguggaagaauu

SEQ ID NO: 1616599 - RNA, 19 nt, Artificial Sequence
  Description of Artificial Sequence: Synthetic oligonucleotide
acgaaacaaguaguccaag

SEQ ID NO: 1616600 - RNA, 19 nt, Artificial Sequence
  Description of Artificial Sequence: Synthetic oligonucleotide
uggguuaguguacgacaaa

SEQ ID NO: 1616601 - RNA, 19 nt, Artificial Sequence
  Description of Artificial Sequence: Synthetic oligonucleotide
caacagcccuuucccaugc

SEQ ID NO: 1616602 - RNA, 19 nt, Artificial Sequence
  Description of Artificial Sequence: Synthetic oligonucleotide
cuggguuaguguacgacaa

SEQ ID NO: 1616603 - RNA, 19 nt, Artificial Sequence
  Description of Artificial Sequence: Synthetic oligonucleotide
guggggcuuuuguuuauug

SEQ ID NO: 1616604 - RNA, 19 nt, Artificial Sequence
  Description of Artificial Sequence: Synthetic oligonucleotide
ggaaugacaacucguagau

SEQ ID NO: 1616605 - RNA, 19 nt, Artificial Sequence
  Description of Artificial Sequence: Synthetic oligonucleotide
caucguaggagcugcuaga

SEQ ID NO: 1616606 - RNA, 19 nt, Artificial Sequence
  Description of Artificial Sequence: Synthetic oligonucleotide
caaagcauuagggcuuguc

SEQ ID NO: 1616607 - RNA, 19 nt, Artificial Sequence
  Description of Artificial Sequence: Synthetic oligonucleotide
acaacucguagaucugguu

SEQ ID NO: 1616608 - RNA, 19 nt, Artificial Sequence
  Description of Artificial Sequence: Synthetic oligonucleotide
uuccgacuauucauuccaa

SEQ ID NO: 1616609 - RNA, 19 nt, Artificial Sequence
  Description of Artificial Sequence: Synthetic oligonucleotide
agauugccaccaccgggug

SEQ ID NO: 1616610 - RNA, 19 nt, Artificial Sequence
  Description of Artificial Sequence: Synthetic oligonucleotide
uacaaggaguuugcaguaa

SEQ ID NO: 1616611 - RNA, 19 nt, Artificial Sequence
  Description of Artificial Sequence: Synthetic oligonucleotide
ugccagguuggguuauuaa

SEQ ID NO: 1616612 - RNA, 19 nt, Artificial Sequence
  Description of Artificial Sequence: Synthetic oligonucleotide
guagaucugguuuccgacu

SEQ ID NO: 1616613 - RNA, 19 nt, Artificial Sequence
  Description of Artificial Sequence: Synthetic oligonucleotide
ucuguucuacaaagcuauu

SEQ ID NO: 1616614 - RNA, 19 nt, Artificial Sequence
  Description of Artificial Sequence: Synthetic oligonucleotide
cacuggacuauuuccagcu

SEQ ID NO: 1616615 - RNA, 19 nt, Artificial Sequence
  Description of Artificial Sequence: Synthetic oligonucleotide
gaaugacaacucguagauc

SEQ ID NO: 1616616 - RNA, 19 nt, Artificial Sequence
  Description of Artificial Sequence: Synthetic oligonucleotide
ugguggucucugcggagcu

SEQ ID NO: 1616617 - RNA, 19 nt, Artificial Sequence
  Description of Artificial Sequence: Synthetic oligonucleotide
gguuuccgacuauucauuc

SEQ ID NO: 1616618 - RNA, 19 nt, Artificial Sequence
  Description of Artificial Sequence: Synthetic oligonucleotide
uucaugcguguuuucuauu

SEQ ID NO: 1616619 - RNA, 19 nt, Artificial Sequence
  Description of Artificial Sequence: Synthetic oligonucleotide
ugcaccccuuugcaauaga

SEQ ID NO: 1616620 - RNA, 19 nt, Artificial Sequence
  Description of Artificial Sequence: Synthetic oligonucleotide
ccaucguaggagcugcuag

SEQ ID NO: 1616621 - RNA, 19 nt, Artificial Sequence
  Description of Artificial Sequence: Synthetic oligonucleotide
gucaccgcacaguuaaaua

SEQ ID NO: 1616622 - RNA, 19 nt, Artificial Sequence
  Description of Artificial Sequence: Synthetic oligonucleotide
ccaagauugccaccaccgg

SEQ ID NO: 1616623 - RNA, 19 nt, Artificial Sequence
  Description of Artificial Sequence: Synthetic oligonucleotide
cacgugcaaaacaguuaug

SEQ ID NO: 1616624 - RNA, 19 nt, Artificial Sequence
  Description of Artificial Sequence: Synthetic oligonucleotide
caccgcacaguuaaauaaa

SEQ ID NO: 1616625 - RNA, 19 nt, Artificial Sequence
  Description of Artificial Sequence: Synthetic oligonucleotide
ggagauagcaugcuugaau

SEQ ID NO: 1616626 - RNA, 19 nt, Artificial Sequence
  Description of Artificial Sequence: Synthetic oligonucleotide
augacaacucguagaucug

SEQ ID NO: 1616627 - RNA, 19 nt, Artificial Sequence
  Description of Artificial Sequence: Synthetic oligonucleotide
uuggcacugcgagaucugu

SEQ ID NO: 1616628 - RNA, 19 nt, Artificial Sequence
  Description of Artificial Sequence: Synthetic oligonucleotide
gaucuguagugcucaacau

SEQ ID NO: 1616629 - RNA, 19 nt, Artificial Sequence
  Description of Artificial Sequence: Synthetic oligonucleotide
cucaugcguuuuacagaag

SEQ ID NO: 1616630 - RNA, 19 nt, Artificial Sequence
  Description of Artificial Sequence: Synthetic oligonucleotide
caccccguggauccucccg

SEQ ID NO: 1616631 - RNA, 19 nt, Artificial Sequence
  Description of Artificial Sequence: Synthetic oligonucleotide
agguuggguuauuaauaua

SEQ ID NO: 1616632 - RNA, 19 nt, Artificial Sequence
  Description of Artificial Sequence: Synthetic oligonucleotide
agggcaguucacugcagua

SEQ ID NO: 1616633 - RNA, 19 nt, Artificial Sequence
  Description of Artificial Sequence: Synthetic oligonucleotide
ccgacuauucauuccaaga

SEQ ID NO: 1616634 - RNA, 19 nt, Artificial Sequence
  Description of Artificial Sequence: Synthetic oligonucleotide
uuccugccgggguugggcu

SEQ ID NO: 1616635 - RNA, 19 nt, Artificial Sequence
  Description of Artificial Sequence: Synthetic oligonucleotide
cucaacaucccacuugcau

SEQ ID NO: 1616636 - RNA, 19 nt, Artificial Sequence
  Description of Artificial Sequence: Synthetic oligonucleotide
gugccugauucuguguaug

SEQ ID NO: 1616637 - RNA, 19 nt, Artificial Sequence
  Description of Artificial Sequence: Synthetic oligonucleotide
agcgccccauuuccugccg

SEQ ID NO: 1616638 - RNA, 19 nt, Artificial Sequence
  Description of Artificial Sequence: Synthetic oligonucleotide
ccucaugcguuuuacagaa

SEQ ID NO: 1616639 - RNA, 19 nt, Artificial Sequence
  Description of Artificial Sequence: Synthetic oligonucleotide
uccacaggggagcgcccca

SEQ ID NO: 1616640 - RNA, 19 nt, Artificial Sequence
  Description of Artificial Sequence: Synthetic oligonucleotide
uggagauagcaugcuugaa

SEQ ID NO: 1616641 - RNA, 19 nt, Artificial Sequence
  Description of Artificial Sequence: Synthetic oligonucleotide
accgcacaguuaaauaaaa

SEQ ID NO: 1616642 - RNA, 19 nt, Artificial Sequence
  Description of Artificial Sequence: Synthetic oligonucleotide
cagguuggguuauuaauau

SEQ ID NO: 1616643 - RNA, 19 nt, Artificial Sequence
  Description of Artificial Sequence: Synthetic oligonucleotide
uggcacugcgagaucugua

SEQ ID NO: 1616644 - RNA, 19 nt, Artificial Sequence
  Description of Artificial Sequence: Synthetic oligonucleotide
ccuuaggucacccaugugu

SEQ ID NO: 1616645 - RNA, 19 nt, Artificial Sequence
  Description of Artificial Sequence: Synthetic oligonucleotide
ccuggguuaguguacgaca

SEQ ID NO: 1616646 - RNA, 19 nt, Artificial Sequence
  Description of Artificial Sequence: Synthetic oligonucleotide
agucaccccguggauccuc

SEQ ID NO: 1616647 - RNA, 19 nt, Artificial Sequence
  Description of Artificial Sequence: Synthetic oligonucleotide
acaggggagcgccccauuu

SEQ ID NO: 1616648 - RNA, 19 nt, Artificial Sequence
  Description of Artificial Sequence: Synthetic oligonucleotide
ggagcgccccauuuccugc

SEQ ID NO: 1616649 - RNA, 19 nt, Artificial Sequence
  Description of Artificial Sequence: Synthetic oligonucleotide
agcaugcuugaaucugcua

SEQ ID NO: 1616650 - RNA, 19 nt, Artificial Sequence
  Description of Artificial Sequence: Synthetic oligonucleotide
gcuaauguggaagaauuau

SEQ ID NO: 1616651 - RNA, 19 nt, Artificial Sequence
  Description of Artificial Sequence: Synthetic oligonucleotide
ccagguuggguuauuaaua

SEQ ID NO: 1616652 - RNA, 19 nt, Artificial Sequence
  Description of Artificial Sequence: Synthetic oligonucleotide
ccgcacaguuaaauaaaac

SEQ ID NO: 1616653 - RNA, 19 nt, Artificial Sequence
  Description of Artificial Sequence: Synthetic oligonucleotide
augcaccccuuugcaauag

SEQ ID NO: 1616654 - RNA, 19 nt, Artificial Sequence
  Description of Artificial Sequence: Synthetic oligonucleotide
ggcccuugaguuuacaaau

SEQ ID NO: 1616655 - RNA, 19 nt, Artificial Sequence
  Description of Artificial Sequence: Synthetic oligonucleotide
cagacuggucugugccuac

SEQ ID NO: 1616656 - RNA, 19 nt, Artificial Sequence
  Description of Artificial Sequence: Synthetic oligonucleotide
gcggugguggugguggugg

SEQ ID NO: 1616657 - RNA, 19 nt, Artificial Sequence
  Description of Artificial Sequence: Synthetic oligonucleotide
gcacgugcaaaacaguuau

SEQ ID NO: 1616658 - RNA, 19 nt, Artificial Sequence
  Description of Artificial Sequence: Synthetic oligonucleotide
caggggagcgccccauuuc

SEQ ID NO: 1616659 - RNA, 19 nt, Artificial Sequence
  Description of Artificial Sequence: Synthetic oligonucleotide
gacaacucguagaucuggu

SEQ ID NO: 1616660 - RNA, 19 nt, Artificial Sequence
  Description of Artificial Sequence: Synthetic oligonucleotide
cauuuggcacugcgagauc

SEQ ID NO: 1616661 - RNA, 19 nt, Artificial Sequence
  Description of Artificial Sequence: Synthetic oligonucleotide
ggauccucccggucacugc

SEQ ID NO: 1616662 - RNA, 19 nt, Artificial Sequence
  Description of Artificial Sequence: Synthetic oligonucleotide
ucccuggguuaguguacga

SEQ ID NO: 1616663 - RNA, 19 nt, Artificial Sequence
  Description of Artificial Sequence: Synthetic oligonucleotide
ggaagucaccccguggauc

SEQ ID NO: 1616664 - RNA, 19 nt, Artificial Sequence
  Description of Artificial Sequence: Synthetic oligonucleotide
guagggcaguucacugcag

SEQ ID NO: 1616665 - RNA, 19 nt, Artificial Sequence
  Description of Artificial Sequence: Synthetic oligonucleotide
caugcaccccuuugcaaua

SEQ ID NO: 1616666 - RNA, 19 nt, Artificial Sequence
  Description of Artificial Sequence: Synthetic oligonucleotide
uugccaguacuuggugguc

SEQ ID NO: 1616667 - RNA, 19 nt, Artificial Sequence
  Description of Artificial Sequence: Synthetic oligonucleotide
cguaggagcugcuagagcu

SEQ ID NO: 1616668 - RNA, 19 nt, Artificial Sequence
  Description of Artificial Sequence: Synthetic oligonucleotide
cuuugacccaauacauuuu

SEQ ID NO: 1616669 - RNA, 19 nt, Artificial Sequence
  Description of Artificial Sequence: Synthetic oligonucleotide
gcgagaucuguagugcuca

SEQ ID NO: 1616670 - RNA, 19 nt, Artificial Sequence
  Description of Artificial Sequence: Synthetic oligonucleotide
aguguacgacaaagcauua

SEQ ID NO: 1616671 - RNA, 19 nt, Artificial Sequence
  Description of Artificial Sequence: Synthetic oligonucleotide
ccuaaacuauuugcaccag

SEQ ID NO: 1616672 - RNA, 19 nt, Artificial Sequence
  Description of Artificial Sequence: Synthetic oligonucleotide
gcuuucucuguccucggua

SEQ ID NO: 1616673 - RNA, 19 nt, Artificial Sequence
  Description of Artificial Sequence: Synthetic oligonucleotide
gugcuuugucugccaugug

SEQ ID NO: 1616674 - RNA, 19 nt, Artificial Sequence
  Description of Artificial Sequence: Synthetic oligonucleotide
ggacacauuucuauguaau

SEQ ID NO: 1616675 - RNA, 19 nt, Artificial Sequence
  Description of Artificial Sequence: Synthetic oligonucleotide
gccagguuggguuauuaau

SEQ ID NO: 1616676 - RNA, 19 nt, Artificial Sequence
  Description of Artificial Sequence: Synthetic oligonucleotide
cagggacugugacagacau

SEQ ID NO: 1616677 - RNA, 19 nt, Artificial Sequence
  Description of Artificial Sequence: Synthetic oligonucleotide
guaguccaaggaagugcca

SEQ ID NO: 1616678 - RNA, 19 nt, Artificial Sequence
  Description of Artificial Sequence: Synthetic oligonucleotide
gccuacagggugcuuuguc

SEQ ID NO: 1616679 - RNA, 19 nt, Artificial Sequence
  Description of Artificial Sequence: Synthetic oligonucleotide
ugccuacagggugcuuugu

SEQ ID NO: 1616680 - RNA, 19 nt, Artificial Sequence
  Description of Artificial Sequence: Synthetic oligonucleotide
acacacaucugcagaccua

SEQ ID NO: 1616681 - RNA, 19 nt, Artificial Sequence
  Description of Artificial Sequence: Synthetic oligonucleotide
ucccggucacugccaucgu

SEQ ID NO: 1616682 - RNA, 19 nt, Artificial Sequence
  Description of Artificial Sequence: Synthetic oligonucleotide
cugcgagaucuguagugcu

SEQ ID NO: 1616683 - RNA, 19 nt, Artificial Sequence
  Description of Artificial Sequence: Synthetic oligonucleotide
ggggagacuuuguaggcau

SEQ ID NO: 1616684 - RNA, 19 nt, Artificial Sequence
  Description of Artificial Sequence: Synthetic oligonucleotide
gccaagcacaaugggagaa

SEQ ID NO: 1616685 - RNA, 19 nt, Artificial Sequence
  Description of Artificial Sequence: Synthetic oligonucleotide
gguacacguuucucugcaa

SEQ ID NO: 1616686 - RNA, 19 nt, Artificial Sequence
  Description of Artificial Sequence: Synthetic oligonucleotide
ccuagguuucugcaggcua

SEQ ID NO: 1616687 - RNA, 19 nt, Artificial Sequence
  Description of Artificial Sequence: Synthetic oligonucleotide
ggcuaauguggaagaauua

SEQ ID NO: 1616688 - RNA, 19 nt, Artificial Sequence
  Description of Artificial Sequence: Synthetic oligonucleotide
ccccuagguuucugcaggc

SEQ ID NO: 1616689 - RNA, 19 nt, Artificial Sequence
  Description of Artificial Sequence: Synthetic oligonucleotide
gcccuugaguuuacaaauc

SEQ ID NO: 1616690 - RNA, 19 nt, Artificial Sequence
  Description of Artificial Sequence: Synthetic oligonucleotide
ccacuugcauugccaguac

SEQ ID NO: 1616691 - RNA, 19 nt, Artificial Sequence
  Description of Artificial Sequence: Synthetic oligonucleotide
gagaggcccuugaguuuac

SEQ ID NO: 1616692 - RNA, 19 nt, Artificial Sequence
  Description of Artificial Sequence: Synthetic oligonucleotide
cccuggguuaguguacgac

SEQ ID NO: 1616693 - RNA, 19 nt, Artificial Sequence
  Description of Artificial Sequence: Synthetic oligonucleotide
cacuugcauugccaguacu

SEQ ID NO: 1616694 - RNA, 19 nt, Artificial Sequence
  Description of Artificial Sequence: Synthetic oligonucleotide
gccuuaggucacccaugug

SEQ ID NO: 1616695 - RNA, 19 nt, Artificial Sequence
  Description of Artificial Sequence: Synthetic oligonucleotide
cccacuugcauugccagua

SEQ ID NO: 1616696 - RNA, 19 nt, Artificial Sequence
  Description of Artificial Sequence: Synthetic oligonucleotide
ccaugcaccccuuugcaau

SEQ ID NO: 1616697 - RNA, 19 nt, Artificial Sequence
  Description of Artificial Sequence: Synthetic oligonucleotide
gcgccccauuuccugccgg

SEQ ID NO: 1616698 - RNA, 19 nt, Artificial Sequence
  Description of Artificial Sequence: Synthetic oligonucleotide
gacccaugccagguugggu

SEQ ID NO: 1616699 - RNA, 19 nt, Artificial Sequence
  Description of Artificial Sequence: Synthetic oligonucleotide
ccuuugcaauagacccaug

SEQ ID NO: 1616700 - RNA, 19 nt, Artificial Sequence
  Description of Artificial Sequence: Synthetic oligonucleotide
gcguuuuacagaagggcuu

SEQ ID NO: 1616701 - RNA, 19 nt, Artificial Sequence
  Description of Artificial Sequence: Synthetic oligonucleotide
gcacugcgagaucuguagu

SEQ ID NO: 1616702 - RNA, 19 nt, Artificial Sequence
  Description of Artificial Sequence: Synthetic oligonucleotide
cccaugcaccccuuugcaa

SEQ ID NO: 1616703 - RNA, 19 nt, Artificial Sequence
  Description of Artificial Sequence: Synthetic oligonucleotide
cgacaaagcauuagggcuu

SEQ ID NO: 1616704 - RNA, 19 nt, Artificial Sequence
  Description of Artificial Sequence: Synthetic oligonucleotide
cuuucccaugcaccccuuu

SEQ ID NO: 1616705 - RNA, 19 nt, Artificial Sequence
  Description of Artificial Sequence: Synthetic oligonucleotide
cccguggauccucccgguc

SEQ ID NO: 1616706 - RNA, 19 nt, Artificial Sequence
  Description of Artificial Sequence: Synthetic oligonucleotide
gcggagcuccaggggacac

SEQ ID NO: 1616707 - RNA, 19 nt, Artificial Sequence
  Description of Artificial Sequence: Synthetic oligonucleotide
gguggugguggugguggcu

SEQ ID NO: 1616708 - RNA, 19 nt, Artificial Sequence
  Description of Artificial Sequence: Synthetic oligonucleotide
gggagacuuuguaggcaua

SEQ ID NO: 1616709 - RNA, 19 nt, Artificial Sequence
  Description of Artificial Sequence: Synthetic oligonucleotide
cgguggugguggugguggc

SEQ ID NO: 1616710 - RNA, 19 nt, Artificial Sequence
  Description of Artificial Sequence: Synthetic oligonucleotide
ggacuauuuccagcuccau

SEQ ID NO: 1616711 - RNA, 19 nt, Artificial Sequence
  Description of Artificial Sequence: Synthetic oligonucleotide
ccaagcacaaugggagaau

SEQ ID NO: 1616712 - RNA, 19 nt, Artificial Sequence
  Description of Artificial Sequence: Synthetic oligonucleotide
cgagaucuguagugcucaa

SEQ ID NO: 1616713 - RNA, 19 nt, Artificial Sequence
  Description of Artificial Sequence: Synthetic oligonucleotide
cccggucacugccaucgua

SEQ ID NO: 1616714 - RNA, 19 nt, Artificial Sequence
  Description of Artificial Sequence: Synthetic oligonucleotide
gcagaccuacaaggaguuu

SEQ ID NO: 1616715 - RNA, 19 nt, Artificial Sequence
  Description of Artificial Sequence: Synthetic oligonucleotide
ggggucggccaagcacaau

SEQ ID NO: 1616716 - RNA, 19 nt, Artificial Sequence
  Description of Artificial Sequence: Synthetic oligonucleotide
uuaucuaagagacauauga

SEQ ID NO: 1616717 - RNA, 19 nt, Artificial Sequence
  Description of Artificial Sequence: Synthetic oligonucleotide
aagaacucaacuucuauuc

SEQ ID NO: 1616718 - RNA, 19 nt, Artificial Sequence
  Description of Artificial Sequence: Synthetic oligonucleotide
aaugugacagcaauuauac

SEQ ID NO: 1616719 - RNA, 19 nt, Artificial Sequence
  Description of Artificial Sequence: Synthetic oligonucleotide
uacaacuuaucuaagagac

SEQ ID NO: 1616720 - RNA, 19 nt, Artificial Sequence
  Description of Artificial Sequence: Synthetic oligonucleotide
cuuagaauggucauggccc

SEQ ID NO: 1616721 - RNA, 19 nt, Artificial Sequence
  Description of Artificial Sequence: Synthetic oligonucleotide
acugacuucaguucgacgg

SEQ ID NO: 1616722 - RNA, 19 nt, Artificial Sequence
  Description of Artificial Sequence: Synthetic oligonucleotide
auuacaacuuaucuaagag

SEQ ID NO: 1616723 - RNA, 19 nt, Artificial Sequence
  Description of Artificial Sequence: Synthetic oligonucleotide
aagcuaagccgcuagauag

SEQ ID NO: 1616724 - RNA, 19 nt, Artificial Sequence
  Description of Artificial Sequence: Synthetic oligonucleotide
aaaacaucaccuguugggc

SEQ ID NO: 1616725 - RNA, 19 nt, Artificial Sequence
  Description of Artificial Sequence: Synthetic oligonucleotide
ucuuacugacuucaguucg

SEQ ID NO: 1616726 - RNA, 19 nt, Artificial Sequence
  Description of Artificial Sequence: Synthetic oligonucleotide
aauuggagaguguccaugg

SEQ ID NO: 1616727 - RNA, 19 nt, Artificial Sequence
  Description of Artificial Sequence: Synthetic oligonucleotide
uguccauggaucuagguag

SEQ ID NO: 1616728 - RNA, 19 nt, Artificial Sequence
  Description of Artificial Sequence: Synthetic oligonucleotide
ucuacuagguccuugguug

SEQ ID NO: 1616729 - RNA, 19 nt, Artificial Sequence
  Description of Artificial Sequence: Synthetic oligonucleotide
uuaucuuuuagucccagga

SEQ ID NO: 1616730 - RNA, 19 nt, Artificial Sequence
  Description of Artificial Sequence: Synthetic oligonucleotide
uucucagcuacgcagagag

SEQ ID NO: 1616731 - RNA, 19 nt, Artificial Sequence
  Description of Artificial Sequence: Synthetic oligonucleotide
uuuauuguacagaaaugug

SEQ ID NO: 1616732 - RNA, 19 nt, Artificial Sequence
  Description of Artificial Sequence: Synthetic oligonucleotide
aguaugaggagaaauaguc

SEQ ID NO: 1616733 - RNA, 19 nt, Artificial Sequence
  Description of Artificial Sequence: Synthetic oligonucleotide
uauugaaugugcaugggcu

SEQ ID NO: 1616734 - RNA, 19 nt, Artificial Sequence
  Description of Artificial Sequence: Synthetic oligonucleotide
gaugacaauaucucauuag

SEQ ID NO: 1616735 - RNA, 19 nt, Artificial Sequence
  Description of Artificial Sequence: Synthetic oligonucleotide
aaaggaggaacccgccugc

SEQ ID NO: 1616736 - RNA, 19 nt, Artificial Sequence
  Description of Artificial Sequence: Synthetic oligonucleotide
ucaaauuacaacuuaucua

SEQ ID NO: 1616737 - RNA, 19 nt, Artificial Sequence
  Description of Artificial Sequence: Synthetic oligonucleotide
aaugugcaugggcuaaccc

SEQ ID NO: 1616738 - RNA, 19 nt, Artificial Sequence
  Description of Artificial Sequence: Synthetic oligonucleotide
uuucccuuaccccagcccg

SEQ ID NO: 1616739 - RNA, 19 nt, Artificial Sequence
  Description of Artificial Sequence: Synthetic oligonucleotide
aauuauacacuaaaugagu

SEQ ID NO: 1616740 - RNA, 19 nt, Artificial Sequence
  Description of Artificial Sequence: Synthetic oligonucleotide
agacaaaacucagugaugg

SEQ ID NO: 1616741 - RNA, 19 nt, Artificial Sequence
  Description of Artificial Sequence: Synthetic oligonucleotide
cugguuucaauucaugccg

SEQ ID NO: 1616742 - RNA, 19 nt, Artificial Sequence
  Description of Artificial Sequence: Synthetic oligonucleotide
uucuauuccccuaaucgag

SEQ ID NO: 1616743 - RNA, 19 nt, Artificial Sequence
  Description of Artificial Sequence: Synthetic oligonucleotide
uuccagauagauucgaccc

SEQ ID NO: 1616744 - RNA, 19 nt, Artificial Sequence
  Description of Artificial Sequence: Synthetic oligonucleotide
ucuauuggcugucuggcag

SEQ ID NO: 1616745 - RNA, 19 nt, Artificial Sequence
  Description of Artificial Sequence: Synthetic oligonucleotide
acaauaucucauuagacaa

SEQ ID NO: 1616746 - RNA, 19 nt, Artificial Sequence
  Description of Artificial Sequence: Synthetic oligonucleotide
uuauugaaugugcaugggc

SEQ ID NO: 1616747 - RNA, 19 nt, Artificial Sequence
  Description of Artificial Sequence: Synthetic oligonucleotide
cuagcuuuaggauuuguug

SEQ ID NO: 1616748 - RNA, 19 nt, Artificial Sequence
  Description of Artificial Sequence: Synthetic oligonucleotide
ucugacuuuagcaggaccu

SEQ ID NO: 1616749 - RNA, 19 nt, Artificial Sequence
  Description of Artificial Sequence: Synthetic oligonucleotide
acauccucauuuuauggac

SEQ ID NO: 1616750 - RNA, 19 nt, Artificial Sequence
  Description of Artificial Sequence: Synthetic oligonucleotide
auaagagugagucggauau

SEQ ID NO: 1616751 - RNA, 19 nt, Artificial Sequence
  Description of Artificial Sequence: Synthetic oligonucleotide
uuacuuuugaugagcagga

SEQ ID NO: 1616752 - RNA, 19 nt, Artificial Sequence
  Description of Artificial Sequence: Synthetic oligonucleotide
uaucuuuuagucccaggag

SEQ ID NO: 1616753 - RNA, 19 nt, Artificial Sequence
  Description of Artificial Sequence: Synthetic oligonucleotide
aggauauacaaucauucca

SEQ ID NO: 1616754 - RNA, 19 nt, Artificial Sequence
  Description of Artificial Sequence: Synthetic oligonucleotide
cuaggagucgcucuuacgc

SEQ ID NO: 1616755 - RNA, 19 nt, Artificial Sequence
  Description of Artificial Sequence: Synthetic oligonucleotide
augaguucaagucaucucu

SEQ ID NO: 1616756 - RNA, 19 nt, Artificial Sequence
  Description of Artificial Sequence: Synthetic oligonucleotide
uuugcacaacuacugaucu

SEQ ID NO: 1616757 - RNA, 19 nt, Artificial Sequence
  Description of Artificial Sequence: Synthetic oligonucleotide
augacaauaucucauuaga

SEQ ID NO: 1616758 - RNA, 19 nt, Artificial Sequence
  Description of Artificial Sequence: Synthetic oligonucleotide
uuacaacuuaucuaagaga

SEQ ID NO: 1616759 - RNA, 19 nt, Artificial Sequence
  Description of Artificial Sequence: Synthetic oligonucleotide
uugguaugaguucaaguca

SEQ ID NO: 1616760 - RNA, 19 nt, Artificial Sequence
  Description of Artificial Sequence: Synthetic oligonucleotide
aguuaauguggucauucuc

SEQ ID NO: 1616761 - RNA, 19 nt, Artificial Sequence
  Description of Artificial Sequence: Synthetic oligonucleotide
caacuacugaucuuuauug

SEQ ID NO: 1616762 - RNA, 19 nt, Artificial Sequence
  Description of Artificial Sequence: Synthetic oligonucleotide
uuauacacuaaaugagugu

SEQ ID NO: 1616763 - RNA, 19 nt, Artificial Sequence
  Description of Artificial Sequence: Synthetic oligonucleotide
aaaguuagagcaauuuacu

SEQ ID NO: 1616764 - RNA, 19 nt, Artificial Sequence
  Description of Artificial Sequence: Synthetic oligonucleotide
gaggauauacaaucauucc

SEQ ID NO: 1616765 - RNA, 19 nt, Artificial Sequence
  Description of Artificial Sequence: Synthetic oligonucleotide
aacuucuauuccccuaauc

SEQ ID NO: 1616766 - RNA, 19 nt, Artificial Sequence
  Description of Artificial Sequence: Synthetic oligonucleotide
uuuugcacaacuacugauc

SEQ ID NO: 1616767 - RNA, 19 nt, Artificial Sequence
  Description of Artificial Sequence: Synthetic oligonucleotide
gagucggauauccuuagag

SEQ ID NO: 1616768 - RNA, 19 nt, Artificial Sequence
  Description of Artificial Sequence: Synthetic oligonucleotide
ugcuuauugaaugugcaug

SEQ ID NO: 1616769 - RNA, 19 nt, Artificial Sequence
  Description of Artificial Sequence: Synthetic oligonucleotide
aacuacugaucuuuauugu

SEQ ID NO: 1616770 - RNA, 19 nt, Artificial Sequence
  Description of Artificial Sequence: Synthetic oligonucleotide
acuaaaugaguguuuggca

SEQ ID NO: 1616771 - RNA, 19 nt, Artificial Sequence
  Description of Artificial Sequence: Synthetic oligonucleotide
aucucuauuggcugucugg

SEQ ID NO: 1616772 - RNA, 19 nt, Artificial Sequence
  Description of Artificial Sequence: Synthetic oligonucleotide
aggcuaaggcucuacuugc

SEQ ID NO: 1616773 - RNA, 19 nt, Artificial Sequence
  Description of Artificial Sequence: Synthetic oligonucleotide
cauggaucuagguagguuc

SEQ ID NO: 1616774 - RNA, 19 nt, Artificial Sequence
  Description of Artificial Sequence: Synthetic oligonucleotide
uacacuaaaugaguguuug

SEQ ID NO: 1616775 - RNA, 19 nt, Artificial Sequence
  Description of Artificial Sequence: Synthetic oligonucleotide
agaugcuuauugaaugugc

SEQ ID NO: 1616776 - RNA, 19 nt, Artificial Sequence
  Description of Artificial Sequence: Synthetic oligonucleotide
ucgcucuuacgcauggugg

SEQ ID NO: 1616777 - RNA, 19 nt, Artificial Sequence
  Description of Artificial Sequence: Synthetic oligonucleotide
ucggguauggaauggaagu

SEQ ID NO: 1616778 - RNA, 19 nt, Artificial Sequence
  Description of Artificial Sequence: Synthetic oligonucleotide
ugugcaugggcuaaccccu

SEQ ID NO: 1616779 - RNA, 19 nt, Artificial Sequence
  Description of Artificial Sequence: Synthetic oligonucleotide
cacuaaaugaguguuuggc

SEQ ID NO: 1616780 - RNA, 19 nt, Artificial Sequence
  Description of Artificial Sequence: Synthetic oligonucleotide
ucugacagucaccagccug

SEQ ID NO: 1616781 - RNA, 19 nt, Artificial Sequence
  Description of Artificial Sequence: Synthetic oligonucleotide
gaacauuacacagauuuga

SEQ ID NO: 1616782 - RNA, 19 nt, Artificial Sequence
  Description of Artificial Sequence: Synthetic oligonucleotide
auaaaguuagagcaauuua

SEQ ID NO: 1616783 - RNA, 19 nt, Artificial Sequence
  Description of Artificial Sequence: Synthetic oligonucleotide
ucuauuccccuaaucgagc

SEQ ID NO: 1616784 - RNA, 19 nt, Artificial Sequence
  Description of Artificial Sequence: Synthetic oligonucleotide
ucucaccugacguuguucc

SEQ ID NO: 1616785 - RNA, 19 nt, Artificial Sequence
  Description of Artificial Sequence: Synthetic oligonucleotide
uucggguauggaauggaag

SEQ ID NO: 1616786 - RNA, 19 nt, Artificial Sequence
  Description of Artificial Sequence: Synthetic oligonucleotide
uggucauucucaccugacg

SEQ ID NO: 1616787 - RNA, 19 nt, Artificial Sequence
  Description of Artificial Sequence: Synthetic oligonucleotide
uauacacuaaaugaguguu

SEQ ID NO: 1616788 - RNA, 19 nt, Artificial Sequence
  Description of Artificial Sequence: Synthetic oligonucleotide
agcaauacuucuuccauaa

SEQ ID NO: 1616789 - RNA, 19 nt, Artificial Sequence
  Description of Artificial Sequence: Synthetic oligonucleotide
gcuuauugaaugugcaugg

SEQ ID NO: 1616790 - RNA, 19 nt, Artificial Sequence
  Description of Artificial Sequence: Synthetic oligonucleotide
caaucauuccagaaagaug

SEQ ID NO: 1616791 - RNA, 19 nt, Artificial Sequence
  Description of Artificial Sequence: Synthetic oligonucleotide
acugagaguugcaagaaag

SEQ ID NO: 1616792 - RNA, 19 nt, Artificial Sequence
  Description of Artificial Sequence: Synthetic oligonucleotide
aaguuagagcaauuuacuu

SEQ ID NO: 1616793 - RNA, 19 nt, Artificial Sequence
  Description of Artificial Sequence: Synthetic oligonucleotide
ggauauacaaucauuccag

SEQ ID NO: 1616794 - RNA, 19 nt, Artificial Sequence
  Description of Artificial Sequence: Synthetic oligonucleotide
gauucgaccccgcauggcc

SEQ ID NO: 1616795 - RNA, 19 nt, Artificial Sequence
  Description of Artificial Sequence: Synthetic oligonucleotide
gguacggugaguuaaugug

SEQ ID NO: 1616796 - RNA, 19 nt, Artificial Sequence
  Description of Artificial Sequence: Synthetic oligonucleotide
aagcccagaggauauacaa

SEQ ID NO: 1616797 - RNA, 19 nt, Artificial Sequence
  Description of Artificial Sequence: Synthetic oligonucleotide
uucaguucgacggguacgg

SEQ ID NO: 1616798 - RNA, 19 nt, Artificial Sequence
  Description of Artificial Sequence: Synthetic oligonucleotide
aucuagguagguucagggg

SEQ ID NO: 1616799 - RNA, 19 nt, Artificial Sequence
  Description of Artificial Sequence: Synthetic oligonucleotide
aaucgagcgaagcuuucca

SEQ ID NO: 1616800 - RNA, 19 nt, Artificial Sequence
  Description of Artificial Sequence: Synthetic oligonucleotide
gaugaauuggagagugucc

SEQ ID NO: 1616801 - RNA, 19 nt, Artificial Sequence
  Description of Artificial Sequence: Synthetic oligonucleotide
cugcuuagaauggucaugg

SEQ ID NO: 1616802 - RNA, 19 nt, Artificial Sequence
  Description of Artificial Sequence: Synthetic oligonucleotide
aaguuaugagucugauuca

SEQ ID NO: 1616803 - RNA, 19 nt, Artificial Sequence
  Description of Artificial Sequence: Synthetic oligonucleotide
uccagauagauucgacccc

SEQ ID NO: 1616804 - RNA, 19 nt, Artificial Sequence
  Description of Artificial Sequence: Synthetic oligonucleotide
cuauuccccuaaucgagcg

SEQ ID NO: 1616805 - RNA, 19 nt, Artificial Sequence
  Description of Artificial Sequence: Synthetic oligonucleotide
aggagaaauagucugcuua

SEQ ID NO: 1616806 - RNA, 19 nt, Artificial Sequence
  Description of Artificial Sequence: Synthetic oligonucleotide
agagcaauuuacuuuugau

SEQ ID NO: 1616807 - RNA, 19 nt, Artificial Sequence
  Description of Artificial Sequence: Synthetic oligonucleotide
gucggauauccuuagaguc

SEQ ID NO: 1616808 - RNA, 19 nt, Artificial Sequence
  Description of Artificial Sequence: Synthetic oligonucleotide
ugaugaauuggagaguguc

SEQ ID NO: 1616809 - RNA, 19 nt, Artificial Sequence
  Description of Artificial Sequence: Synthetic oligonucleotide
ucaggaugccuccucgaag

SEQ ID NO: 1616810 - RNA, 19 nt, Artificial Sequence
  Description of Artificial Sequence: Synthetic oligonucleotide
uagauucgaccccgcaugg

SEQ ID NO: 1616811 - RNA, 19 nt, Artificial Sequence
  Description of Artificial Sequence: Synthetic oligonucleotide
ugguaugaguucaagucau

SEQ ID NO: 1616812 - RNA, 19 nt, Artificial Sequence
  Description of Artificial Sequence: Synthetic oligonucleotide
agauuugaagugaagacau

SEQ ID NO: 1616813 - RNA, 19 nt, Artificial Sequence
  Description of Artificial Sequence: Synthetic oligonucleotide
agucggauauccuuagagu

SEQ ID NO: 1616814 - RNA, 19 nt, Artificial Sequence
  Description of Artificial Sequence: Synthetic oligonucleotide
ucucuauuggcugucuggc

SEQ ID NO: 1616815 - RNA, 19 nt, Artificial Sequence
  Description of Artificial Sequence: Synthetic oligonucleotide
cuugguugcaaaacaucac

SEQ ID NO: 1616816 - RNA, 19 nt, Artificial Sequence
  Description of Artificial Sequence: Synthetic oligonucleotide
ucuaggagucgcucuuacg

SEQ ID NO: 1616817 - RNA, 19 nt, Artificial Sequence
  Description of Artificial Sequence: Synthetic oligonucleotide
acaaucauuccagaaagau

SEQ ID NO: 1616818 - RNA, 19 nt, Artificial Sequence
  Description of Artificial Sequence: Synthetic oligonucleotide
cuuucugucuaggagucgc

SEQ ID NO: 1616819 - RNA, 19 nt, Artificial Sequence
  Description of Artificial Sequence: Synthetic oligonucleotide
ucauucucaccugacguug

SEQ ID NO: 1616820 - RNA, 19 nt, Artificial Sequence
  Description of Artificial Sequence: Synthetic oligonucleotide
uguccuucccaaguuauga

SEQ ID NO: 1616821 - RNA, 19 nt, Artificial Sequence
  Description of Artificial Sequence: Synthetic oligonucleotide
augaauuggagagugucca

SEQ ID NO: 1616822 - RNA, 19 nt, Artificial Sequence
  Description of Artificial Sequence: Synthetic oligonucleotide
uacggugaguuaauguggu

SEQ ID NO: 1616823 - RNA, 19 nt, Artificial Sequence
  Description of Artificial Sequence: Synthetic oligonucleotide
cuaucaggaugccuccucg

SEQ ID NO: 1616824 - RNA, 19 nt, Artificial Sequence
  Description of Artificial Sequence: Synthetic oligonucleotide
aacucagugauggggucuc

SEQ ID NO: 1616825 - RNA, 19 nt, Artificial Sequence
  Description of Artificial Sequence: Synthetic oligonucleotide
agaaacaggagaugcuuau

SEQ ID NO: 1616826 - RNA, 19 nt, Artificial Sequence
  Description of Artificial Sequence: Synthetic oligonucleotide
ugauuagugucuuccucac

SEQ ID NO: 1616827 - RNA, 19 nt, Artificial Sequence
  Description of Artificial Sequence: Synthetic oligonucleotide
guacggugaguuaaugugg

SEQ ID NO: 1616828 - RNA, 19 nt, Artificial Sequence
  Description of Artificial Sequence: Synthetic oligonucleotide
uacaaucauuccagaaaga

SEQ ID NO: 1616829 - RNA, 19 nt, Artificial Sequence
  Description of Artificial Sequence: Synthetic oligonucleotide
ucuuacgcauggugggagg

SEQ ID NO: 1616830 - RNA, 19 nt, Artificial Sequence
  Description of Artificial Sequence: Synthetic oligonucleotide
ugcacaacuacugaucuuu

SEQ ID NO: 1616831 - RNA, 19 nt, Artificial Sequence
  Description of Artificial Sequence: Synthetic oligonucleotide
aaguaugaggagaaauagu

SEQ ID NO: 1616832 - RNA, 19 nt, Artificial Sequence
  Description of Artificial Sequence: Synthetic oligonucleotide
agaguguccauggaucuag

SEQ ID NO: 1616833 - RNA, 19 nt, Artificial Sequence
  Description of Artificial Sequence: Synthetic oligonucleotide
aucgagcgaagcuuuccac

SEQ ID NO: 1616834 - RNA, 19 nt, Artificial Sequence
  Description of Artificial Sequence: Synthetic oligonucleotide
gaugcuuauugaaugugca

SEQ ID NO: 1616835 - RNA, 19 nt, Artificial Sequence
  Description of Artificial Sequence: Synthetic oligonucleotide
agacaagcuaagccgcuag

SEQ ID NO: 1616836 - RNA, 19 nt, Artificial Sequence
  Description of Artificial Sequence: Synthetic oligonucleotide
cuuauugaaugugcauggg

SEQ ID NO: 1616837 - RNA, 19 nt, Artificial Sequence
  Description of Artificial Sequence: Synthetic oligonucleotide
cuuuauuguacagaaaugu

SEQ ID NO: 1616838 - RNA, 19 nt, Artificial Sequence
  Description of Artificial Sequence: Synthetic oligonucleotide
cuucuauuccccuaaucga

SEQ ID NO: 1616839 - RNA, 19 nt, Artificial Sequence
  Description of Artificial Sequence: Synthetic oligonucleotide
agauguguagcccucuuua

SEQ ID NO: 1616840 - RNA, 19 nt, Artificial Sequence
  Description of Artificial Sequence: Synthetic oligonucleotide
gauuugguaugaguucaag

SEQ ID NO: 1616841 - RNA, 19 nt, Artificial Sequence
  Description of Artificial Sequence: Synthetic oligonucleotide
aacauuacacagauuugaa

SEQ ID NO: 1616842 - RNA, 19 nt, Artificial Sequence
  Description of Artificial Sequence: Synthetic oligonucleotide
uuagagcaauuuacuuuug

SEQ ID NO: 1616843 - RNA, 19 nt, Artificial Sequence
  Description of Artificial Sequence: Synthetic oligonucleotide
uggauaaaguuagagcaau

SEQ ID NO: 1616844 - RNA, 19 nt, Artificial Sequence
  Description of Artificial Sequence: Synthetic oligonucleotide
caucucuguggcauugugc

SEQ ID NO: 1616845 - RNA, 19 nt, Artificial Sequence
  Description of Artificial Sequence: Synthetic oligonucleotide
agugauggggucucugaca

SEQ ID NO: 1616846 - RNA, 19 nt, Artificial Sequence
  Description of Artificial Sequence: Synthetic oligonucleotide
ucgagcgaagcuuuccaca

SEQ ID NO: 1616847 - RNA, 19 nt, Artificial Sequence
  Description of Artificial Sequence: Synthetic oligonucleotide
uuuagucccaggagcaaua

SEQ ID NO: 1616848 - RNA, 19 nt, Artificial Sequence
  Description of Artificial Sequence: Synthetic oligonucleotide
ucuaucaggaugccuccuc

SEQ ID NO: 1616849 - RNA, 19 nt, Artificial Sequence
  Description of Artificial Sequence: Synthetic oligonucleotide
ccugguuucaauucaugcc

SEQ ID NO: 1616850 - RNA, 19 nt, Artificial Sequence
  Description of Artificial Sequence: Synthetic oligonucleotide
cuacgcagagagcacaaac

SEQ ID NO: 1616851 - RNA, 19 nt, Artificial Sequence
  Description of Artificial Sequence: Synthetic oligonucleotide
uacugacuucaguucgacg

SEQ ID NO: 1616852 - RNA, 19 nt, Artificial Sequence
  Description of Artificial Sequence: Synthetic oligonucleotide
ucauucggguauggaaugg

SEQ ID NO: 1616853 - RNA, 19 nt, Artificial Sequence
  Description of Artificial Sequence: Synthetic oligonucleotide
guuagagcaauuuacuuuu

SEQ ID NO: 1616854 - RNA, 19 nt, Artificial Sequence
  Description of Artificial Sequence: Synthetic oligonucleotide
uaauguggucauucucacc

SEQ ID NO: 1616855 - RNA, 19 nt, Artificial Sequence
  Description of Artificial Sequence: Synthetic oligonucleotide
gagaugcuuauugaaugug

SEQ ID NO: 1616856 - RNA, 19 nt, Artificial Sequence
  Description of Artificial Sequence: Synthetic oligonucleotide
agcuuuaggauuuguugaa

SEQ ID NO: 1616857 - RNA, 19 nt, Artificial Sequence
  Description of Artificial Sequence: Synthetic oligonucleotide
gccgcuagauagcacaugg

SEQ ID NO: 1616858 - RNA, 19 nt, Artificial Sequence
  Description of Artificial Sequence: Synthetic oligonucleotide
agagacauaugaaaugaaa

SEQ ID NO: 1616859 - RNA, 19 nt, Artificial Sequence
  Description of Artificial Sequence: Synthetic oligonucleotide
uaaugaugaauuggagagu

SEQ ID NO: 1616860 - RNA, 19 nt, Artificial Sequence
  Description of Artificial Sequence: Synthetic oligonucleotide
ugggcuaaccccuuuucau

SEQ ID NO: 1616861 - RNA, 19 nt, Artificial Sequence
  Description of Artificial Sequence: Synthetic oligonucleotide
guugcaaaacaucaccugu

SEQ ID NO: 1616862 - RNA, 19 nt, Artificial Sequence
  Description of Artificial Sequence: Synthetic oligonucleotide
uccauaagagugagucgga

SEQ ID NO: 1616863 - RNA, 19 nt, Artificial Sequence
  Description of Artificial Sequence: Synthetic oligonucleotide
ugcaguucgcacucuauuu

SEQ ID NO: 1616864 - RNA, 19 nt, Artificial Sequence
  Description of Artificial Sequence: Synthetic oligonucleotide
cuauuggcugucuggcagc

SEQ ID NO: 1616865 - RNA, 19 nt, Artificial Sequence
  Description of Artificial Sequence: Synthetic oligonucleotide
ugaguucaagucaucucua

SEQ ID NO: 1616866 - RNA, 19 nt, Artificial Sequence
  Description of Artificial Sequence: Synthetic oligonucleotide
uacuugcuucucaaauuac

SEQ ID NO: 1616867 - RNA, 19 nt, Artificial Sequence
  Description of Artificial Sequence: Synthetic oligonucleotide
auugaaugugcaugggcua

SEQ ID NO: 1616868 - RNA, 19 nt, Artificial Sequence
  Description of Artificial Sequence: Synthetic oligonucleotide
gguugcaaaacaucaccug

SEQ ID NO: 1616869 - RNA, 19 nt, Artificial Sequence
  Description of Artificial Sequence: Synthetic oligonucleotide
uucccuuaccccagcccgg

SEQ ID NO: 1616870 - RNA, 19 nt, Artificial Sequence
  Description of Artificial Sequence: Synthetic oligonucleotide
cuucaguucgacggguacg

SEQ ID NO: 1616871 - RNA, 19 nt, Artificial Sequence
  Description of Artificial Sequence: Synthetic oligonucleotide
cucagcuacgcagagagca

SEQ ID NO: 1616872 - RNA, 19 nt, Artificial Sequence
  Description of Artificial Sequence: Synthetic oligonucleotide
cagauuugaagugaagaca

SEQ ID NO: 1616873 - RNA, 19 nt, Artificial Sequence
  Description of Artificial Sequence: Synthetic oligonucleotide
aggauuuguugaaggcugc

SEQ ID NO: 1616874 - RNA, 19 nt, Artificial Sequence
  Description of Artificial Sequence: Synthetic oligonucleotide
gcaauuuacuuuugaugag

SEQ ID NO: 1616875 - RNA, 19 nt, Artificial Sequence
  Description of Artificial Sequence: Synthetic oligonucleotide
gucgcucuuacgcauggug

SEQ ID NO: 1616876 - RNA, 19 nt, Artificial Sequence
  Description of Artificial Sequence: Synthetic oligonucleotide
ggaggaacccgccugcuag

SEQ ID NO: 1616877 - RNA, 19 nt, Artificial Sequence
  Description of Artificial Sequence: Synthetic oligonucleotide
agcuaagccgcuagauagc

SEQ ID NO: 1616878 - RNA, 19 nt, Artificial Sequence
  Description of Artificial Sequence: Synthetic oligonucleotide
ucagcuacgcagagagcac

SEQ ID NO: 1616879 - RNA, 19 nt, Artificial Sequence
  Description of Artificial Sequence: Synthetic oligonucleotide
uuugucccuucuacuucag

SEQ ID NO: 1616880 - RNA, 19 nt, Artificial Sequence
  Description of Artificial Sequence: Synthetic oligonucleotide
cuacuagguccuugguugc

SEQ ID NO: 1616881 - RNA, 19 nt, Artificial Sequence
  Description of Artificial Sequence: Synthetic oligonucleotide
cuucuagagagccaggcua

SEQ ID NO: 1616882 - RNA, 19 nt, Artificial Sequence
  Description of Artificial Sequence: Synthetic oligonucleotide
accuguugggcugucugac

SEQ ID NO: 1616883 - RNA, 19 nt, Artificial Sequence
  Description of Artificial Sequence: Synthetic oligonucleotide
agauagauucgaccccgca

SEQ ID NO: 1616884 - RNA, 19 nt, Artificial Sequence
  Description of Artificial Sequence: Synthetic oligonucleotide
accuuucugucuaggaguc

SEQ ID NO: 1616885 - RNA, 19 nt, Artificial Sequence
  Description of Artificial Sequence: Synthetic oligonucleotide
gcuuguuucuccccaguag

SEQ ID NO: 1616886 - RNA, 19 nt, Artificial Sequence
  Description of Artificial Sequence: Synthetic oligonucleotide
aguucgacggguacgguga

SEQ ID NO: 1616887 - RNA, 19 nt, Artificial Sequence
  Description of Artificial Sequence: Synthetic oligonucleotide
augggcuaaccccuuuuca

SEQ ID NO: 1616888 - RNA, 19 nt, Artificial Sequence
  Description of Artificial Sequence: Synthetic oligonucleotide
agucccaggagcaauacuu

SEQ ID NO: 1616889 - RNA, 19 nt, Artificial Sequence
  Description of Artificial Sequence: Synthetic oligonucleotide
cugagaguugcaagaaaga

SEQ ID NO: 1616890 - RNA, 19 nt, Artificial Sequence
  Description of Artificial Sequence: Synthetic oligonucleotide
caggagcaauacuucuucc

SEQ ID NO: 1616891 - RNA, 19 nt, Artificial Sequence
  Description of Artificial Sequence: Synthetic oligonucleotide
agucugcuuagaaugguca

SEQ ID NO: 1616892 - RNA, 19 nt, Artificial Sequence
  Description of Artificial Sequence: Synthetic oligonucleotide
ugagucggauauccuuaga

SEQ ID NO: 1616893 - RNA, 19 nt, Artificial Sequence
  Description of Artificial Sequence: Synthetic oligonucleotide
cucaccugacguuguuccg

SEQ ID NO: 1616894 - RNA, 19 nt, Artificial Sequence
  Description of Artificial Sequence: Synthetic oligonucleotide
gacuuuagcaggaccuuuc

SEQ ID NO: 1616895 - RNA, 19 nt, Artificial Sequence
  Description of Artificial Sequence: Synthetic oligonucleotide
agauucgaccccgcauggc

SEQ ID NO: 1616896 - RNA, 19 nt, Artificial Sequence
  Description of Artificial Sequence: Synthetic oligonucleotide
ugaauuggagaguguccau

SEQ ID NO: 1616897 - RNA, 19 nt, Artificial Sequence
  Description of Artificial Sequence: Synthetic oligonucleotide
cuuacugacuucaguucga

SEQ ID NO: 1616898 - RNA, 19 nt, Artificial Sequence
  Description of Artificial Sequence: Synthetic oligonucleotide
uccccuaaucgagcgaagc

SEQ ID NO: 1616899 - RNA, 19 nt, Artificial Sequence
  Description of Artificial Sequence: Synthetic oligonucleotide
uuacugacuucaguucgac

SEQ ID NO: 1616900 - RNA, 19 nt, Artificial Sequence
  Description of Artificial Sequence: Synthetic oligonucleotide
gcccagaggauauacaauc

SEQ ID NO: 1616901 - RNA, 19 nt, Artificial Sequence
  Description of Artificial Sequence: Synthetic oligonucleotide
caguucgacggguacggug

SEQ ID NO: 1616902 - RNA, 19 nt, Artificial Sequence
  Description of Artificial Sequence: Synthetic oligonucleotide
caccugacguuguuccggg

SEQ ID NO: 1616903 - RNA, 19 nt, Artificial Sequence
  Description of Artificial Sequence: Synthetic oligonucleotide
ugcuuagaauggucauggc

SEQ ID NO: 1616904 - RNA, 19 nt, Artificial Sequence
  Description of Artificial Sequence: Synthetic oligonucleotide
caacuuaucuaagagacau

SEQ ID NO: 1616905 - RNA, 19 nt, Artificial Sequence
  Description of Artificial Sequence: Synthetic oligonucleotide
acggugaguuaaugugguc

SEQ ID NO: 1616906 - RNA, 19 nt, Artificial Sequence
  Description of Artificial Sequence: Synthetic oligonucleotide
guguccauggaucuaggua

SEQ ID NO: 1616907 - RNA, 19 nt, Artificial Sequence
  Description of Artificial Sequence: Synthetic oligonucleotide
uucgaccccgcauggccag

SEQ ID NO: 1616908 - RNA, 19 nt, Artificial Sequence
  Description of Artificial Sequence: Synthetic oligonucleotide
acaagcuaagccgcuagau

SEQ ID NO: 1616909 - RNA, 19 nt, Artificial Sequence
  Description of Artificial Sequence: Synthetic oligonucleotide
auuccccuaaucgagcgaa

SEQ ID NO: 1616910 - RNA, 19 nt, Artificial Sequence
  Description of Artificial Sequence: Synthetic oligonucleotide
gguagguucaggggagugg

SEQ ID NO: 1616911 - RNA, 19 nt, Artificial Sequence
  Description of Artificial Sequence: Synthetic oligonucleotide
ugggagguuccagauagau

SEQ ID NO: 1616912 - RNA, 19 nt, Artificial Sequence
  Description of Artificial Sequence: Synthetic oligonucleotide
ggacgcaggcugcaguucg

SEQ ID NO: 1616913 - RNA, 19 nt, Artificial Sequence
  Description of Artificial Sequence: Synthetic oligonucleotide
cauccucauuuuauggaca

SEQ ID NO: 1616914 - RNA, 19 nt, Artificial Sequence
  Description of Artificial Sequence: Synthetic oligonucleotide
cuaaucgagcgaagcuuuc

SEQ ID NO: 1616915 - RNA, 19 nt, Artificial Sequence
  Description of Artificial Sequence: Synthetic oligonucleotide
agauagcacaugggcuggc

SEQ ID NO: 1616916 - RNA, 19 nt, Artificial Sequence
  Description of Artificial Sequence: Synthetic oligonucleotide
gguauggaauggaaguaug

SEQ ID NO: 1616917 - RNA, 19 nt, Artificial Sequence
  Description of Artificial Sequence: Synthetic oligonucleotide
uuccccuaaucgagcgaag

SEQ ID NO: 1616918 - RNA, 19 nt, Artificial Sequence
  Description of Artificial Sequence: Synthetic oligonucleotide
cugucugacuuuagcagga

SEQ ID NO: 1616919 - RNA, 19 nt, Artificial Sequence
  Description of Artificial Sequence: Synthetic oligonucleotide
gauuugaagugaagacauc

SEQ ID NO: 1616920 - RNA, 19 nt, Artificial Sequence
  Description of Artificial Sequence: Synthetic oligonucleotide
uggaucuagguagguucag

SEQ ID NO: 1616921 - RNA, 19 nt, Artificial Sequence
  Description of Artificial Sequence: Synthetic oligonucleotide
gacaagcuaagccgcuaga

SEQ ID NO: 1616922 - RNA, 19 nt, Artificial Sequence
  Description of Artificial Sequence: Synthetic oligonucleotide
acaacuuaucuaagagaca

SEQ ID NO: 1616923 - RNA, 19 nt, Artificial Sequence
  Description of Artificial Sequence: Synthetic oligonucleotide
caugggcuaaccccuuuuc

SEQ ID NO: 1616924 - RNA, 19 nt, Artificial Sequence
  Description of Artificial Sequence: Synthetic oligonucleotide
cgcuagauagcacaugggc

SEQ ID NO: 1616925 - RNA, 19 nt, Artificial Sequence
  Description of Artificial Sequence: Synthetic oligonucleotide
ccagauagauucgaccccg

SEQ ID NO: 1616926 - RNA, 19 nt, Artificial Sequence
  Description of Artificial Sequence: Synthetic oligonucleotide
agugagucggauauccuua

SEQ ID NO: 1616927 - RNA, 19 nt, Artificial Sequence
  Description of Artificial Sequence: Synthetic oligonucleotide
gaggaacccgccugcuagc

SEQ ID NO: 1616928 - RNA, 19 nt, Artificial Sequence
  Description of Artificial Sequence: Synthetic oligonucleotide
gaguuaauguggucauucu

SEQ ID NO: 1616929 - RNA, 19 nt, Artificial Sequence
  Description of Artificial Sequence: Synthetic oligonucleotide
ggaucuagguagguucagg

SEQ ID NO: 1616930 - RNA, 19 nt, Artificial Sequence
  Description of Artificial Sequence: Synthetic oligonucleotide
gacggguacggugaguuaa

SEQ ID NO: 1616931 - RNA, 19 nt, Artificial Sequence
  Description of Artificial Sequence: Synthetic oligonucleotide
auugugcuuugucccuucu

SEQ ID NO: 1616932 - RNA, 19 nt, Artificial Sequence
  Description of Artificial Sequence: Synthetic oligonucleotide
uacgcauggugggagguuc

SEQ ID NO: 1616933 - RNA, 19 nt, Artificial Sequence
  Description of Artificial Sequence: Synthetic oligonucleotide
caucucuauuggcugucug

SEQ ID NO: 1616934 - RNA, 19 nt, Artificial Sequence
  Description of Artificial Sequence: Synthetic oligonucleotide
cagauagauucgaccccgc

SEQ ID NO: 1616935 - RNA, 19 nt, Artificial Sequence
  Description of Artificial Sequence: Synthetic oligonucleotide
cagaaagauguguagcccu

SEQ ID NO: 1616936 - RNA, 19 nt, Artificial Sequence
  Description of Artificial Sequence: Synthetic oligonucleotide
cuaagccgcuagauagcac

SEQ ID NO: 1616937 - RNA, 19 nt, Artificial Sequence
  Description of Artificial Sequence: Synthetic oligonucleotide
acacagauuugaagugaag

SEQ ID NO: 1616938 - RNA, 19 nt, Artificial Sequence
  Description of Artificial Sequence: Synthetic oligonucleotide
guaugaguucaagucaucu

SEQ ID NO: 1616939 - RNA, 19 nt, Artificial Sequence
  Description of Artificial Sequence: Synthetic oligonucleotide
cauugugcuuugucccuuc

SEQ ID NO: 1616940 - RNA, 19 nt, Artificial Sequence
  Description of Artificial Sequence: Synthetic oligonucleotide
agaaagaacucaacuucua

SEQ ID NO: 1616941 - RNA, 19 nt, Artificial Sequence
  Description of Artificial Sequence: Synthetic oligonucleotide
aacuuaucuaagagacaua

SEQ ID NO: 1616942 - RNA, 19 nt, Artificial Sequence
  Description of Artificial Sequence: Synthetic oligonucleotide
auagcacaugggcuggcuu

SEQ ID NO: 1616943 - RNA, 19 nt, Artificial Sequence
  Description of Artificial Sequence: Synthetic oligonucleotide
caagcuaagccgcuagaua

SEQ ID NO: 1616944 - RNA, 19 nt, Artificial Sequence
  Description of Artificial Sequence: Synthetic oligonucleotide
guaugaggagaaauagucu

SEQ ID NO: 1616945 - RNA, 19 nt, Artificial Sequence
  Description of Artificial Sequence: Synthetic oligonucleotide
ugacuuuagcaggaccuuu

SEQ ID NO: 1616946 - RNA, 19 nt, Artificial Sequence
  Description of Artificial Sequence: Synthetic oligonucleotide
acaugggcuggcuuuugua

SEQ ID NO: 1616947 - RNA, 19 nt, Artificial Sequence
  Description of Artificial Sequence: Synthetic oligonucleotide
gauguguagcccucuuuau

SEQ ID NO: 1616948 - RNA, 19 nt, Artificial Sequence
  Description of Artificial Sequence: Synthetic oligonucleotide
ccugacguuguuccggggc

SEQ ID NO: 1616949 - RNA, 19 nt, Artificial Sequence
  Description of Artificial Sequence: Synthetic oligonucleotide
uucucaccugacguuguuc

SEQ ID NO: 1616950 - RNA, 19 nt, Artificial Sequence
  Description of Artificial Sequence: Synthetic oligonucleotide
uacuagguccuugguugca

SEQ ID NO: 1616951 - RNA, 19 nt, Artificial Sequence
  Description of Artificial Sequence: Synthetic oligonucleotide
gacguuguuccggggcugc

SEQ ID NO: 1616952 - RNA, 19 nt, Artificial Sequence
  Description of Artificial Sequence: Synthetic oligonucleotide
ugucugacuuuagcaggac

SEQ ID NO: 1616953 - RNA, 19 nt, Artificial Sequence
  Description of Artificial Sequence: Synthetic oligonucleotide
gggcugucugacuuuagca

SEQ ID NO: 1616954 - RNA, 19 nt, Artificial Sequence
  Description of Artificial Sequence: Synthetic oligonucleotide
guagaaacaggagaugcuu

SEQ ID NO: 1616955 - RNA, 19 nt, Artificial Sequence
  Description of Artificial Sequence: Synthetic oligonucleotide
uguugggcugucugacuuu

SEQ ID NO: 1616956 - RNA, 19 nt, Artificial Sequence
  Description of Artificial Sequence: Synthetic oligonucleotide
agaucaucucuguggcauu

SEQ ID NO: 1616957 - RNA, 19 nt, Artificial Sequence
  Description of Artificial Sequence: Synthetic oligonucleotide
auacacuaaaugaguguuu

SEQ ID NO: 1616958 - RNA, 19 nt, Artificial Sequence
  Description of Artificial Sequence: Synthetic oligonucleotide
gcaauacuucuuccauaag

SEQ ID NO: 1616959 - RNA, 19 nt, Artificial Sequence
  Description of Artificial Sequence: Synthetic oligonucleotide
uccauggaucuagguaggu

SEQ ID NO: 1616960 - RNA, 19 nt, Artificial Sequence
  Description of Artificial Sequence: Synthetic oligonucleotide
ugacguuguuccggggcug

SEQ ID NO: 1616961 - RNA, 19 nt, Artificial Sequence
  Description of Artificial Sequence: Synthetic oligonucleotide
acgcauggugggagguucc

SEQ ID NO: 1616962 - RNA, 19 nt, Artificial Sequence
  Description of Artificial Sequence: Synthetic oligonucleotide
accugacguuguuccgggg

SEQ ID NO: 1616963 - RNA, 19 nt, Artificial Sequence
  Description of Artificial Sequence: Synthetic oligonucleotide
ggauuuguugaaggcugcc

SEQ ID NO: 1616964 - RNA, 19 nt, Artificial Sequence
  Description of Artificial Sequence: Synthetic oligonucleotide
uacuuuugaugagcaggau

SEQ ID NO: 1616965 - RNA, 19 nt, Artificial Sequence
  Description of Artificial Sequence: Synthetic oligonucleotide
gauuagugucuuccucacu

SEQ ID NO: 1616966 - RNA, 19 nt, Artificial Sequence
  Description of Artificial Sequence: Synthetic oligonucleotide
cgagcgaagcuuuccacag

SEQ ID NO: 1616967 - RNA, 19 nt, Artificial Sequence
  Description of Artificial Sequence: Synthetic oligonucleotide
guucgacggguacggugag

SEQ ID NO: 1616968 - RNA, 19 nt, Artificial Sequence
  Description of Artificial Sequence: Synthetic oligonucleotide
auucucaccugacguuguu

SEQ ID NO: 1616969 - RNA, 19 nt, Artificial Sequence
  Description of Artificial Sequence: Synthetic oligonucleotide
acuagguccuugguugcaa

SEQ ID NO: 1616970 - RNA, 19 nt, Artificial Sequence
  Description of Artificial Sequence: Synthetic oligonucleotide
ccagcccgguacuaguagg

SEQ ID NO: 1616971 - RNA, 19 nt, Artificial Sequence
  Description of Artificial Sequence: Synthetic oligonucleotide
auucggguauggaauggaa

SEQ ID NO: 1616972 - RNA, 19 nt, Artificial Sequence
  Description of Artificial Sequence: Synthetic oligonucleotide
ugauggggucucugacagu

SEQ ID NO: 1616973 - RNA, 19 nt, Artificial Sequence
  Description of Artificial Sequence: Synthetic oligonucleotide
cauucggguauggaaugga

SEQ ID NO: 1616974 - RNA, 19 nt, Artificial Sequence
  Description of Artificial Sequence: Synthetic oligonucleotide
ugcaugggcuaaccccuuu

SEQ ID NO: 1616975 - RNA, 19 nt, Artificial Sequence
  Description of Artificial Sequence: Synthetic oligonucleotide
auucgaccccgcauggcca

SEQ ID NO: 1616976 - RNA, 19 nt, Artificial Sequence
  Description of Artificial Sequence: Synthetic oligonucleotide
agagugagucggauauccu

SEQ ID NO: 1616977 - RNA, 19 nt, Artificial Sequence
  Description of Artificial Sequence: Synthetic oligonucleotide
guggucauucucaccugac

SEQ ID NO: 1616978 - RNA, 19 nt, Artificial Sequence
  Description of Artificial Sequence: Synthetic oligonucleotide
aagccgcuagauagcacau

SEQ ID NO: 1616979 - RNA, 19 nt, Artificial Sequence
  Description of Artificial Sequence: Synthetic oligonucleotide
gaagacaagcuaagccgcu

SEQ ID NO: 1616980 - RNA, 19 nt, Artificial Sequence
  Description of Artificial Sequence: Synthetic oligonucleotide
uccggggcugcaguaggac

SEQ ID NO: 1616981 - RNA, 19 nt, Artificial Sequence
  Description of Artificial Sequence: Synthetic oligonucleotide
ugucuaggagucgcucuua

SEQ ID NO: 1616982 - RNA, 19 nt, Artificial Sequence
  Description of Artificial Sequence: Synthetic oligonucleotide
agcccgguacuaguaggug

SEQ ID NO: 1616983 - RNA, 19 nt, Artificial Sequence
  Description of Artificial Sequence: Synthetic oligonucleotide
ccuuaccccagcccgguac

SEQ ID NO: 1616984 - RNA, 19 nt, Artificial Sequence
  Description of Artificial Sequence: Synthetic oligonucleotide
gacgcaggcugcaguucgc

SEQ ID NO: 1616985 - RNA, 19 nt, Artificial Sequence
  Description of Artificial Sequence: Synthetic oligonucleotide
uuacgcauggugggagguu

SEQ ID NO: 1616986 - RNA, 19 nt, Artificial Sequence
  Description of Artificial Sequence: Synthetic oligonucleotide
gcuaagccgcuagauagca

SEQ ID NO: 1616987 - RNA, 19 nt, Artificial Sequence
  Description of Artificial Sequence: Synthetic oligonucleotide
ccgcuagauagcacauggg

SEQ ID NO: 1616988 - RNA, 19 nt, Artificial Sequence
  Description of Artificial Sequence: Synthetic oligonucleotide
cuagguccuugguugcaaa

SEQ ID NO: 1616989 - RNA, 19 nt, Artificial Sequence
  Description of Artificial Sequence: Synthetic oligonucleotide
agccgcuagauagcacaug

SEQ ID NO: 1616990 - RNA, 19 nt, Artificial Sequence
  Description of Artificial Sequence: Synthetic oligonucleotide
aggaacccgccugcuagcu

SEQ ID NO: 1616991 - RNA, 19 nt, Artificial Sequence
  Description of Artificial Sequence: Synthetic oligonucleotide
gcaggauuugguaugaguu

SEQ ID NO: 1616992 - RNA, 19 nt, Artificial Sequence
  Description of Artificial Sequence: Synthetic oligonucleotide
gucugcuuagaauggucau

SEQ ID NO: 1616993 - RNA, 19 nt, Artificial Sequence
  Description of Artificial Sequence: Synthetic oligonucleotide
gauagcacaugggcuggcu

SEQ ID NO: 1616994 - RNA, 19 nt, Artificial Sequence
  Description of Artificial Sequence: Synthetic oligonucleotide
ucaguucgacggguacggu

SEQ ID NO: 1616995 - RNA, 19 nt, Artificial Sequence
  Description of Artificial Sequence: Synthetic oligonucleotide
guaggacgcaggcugcagu

SEQ ID NO: 1616996 - RNA, 19 nt, Artificial Sequence
  Description of Artificial Sequence: Synthetic oligonucleotide
ccgccugcuagcuuuagga

SEQ ID NO: 1616997 - RNA, 19 nt, Artificial Sequence
  Description of Artificial Sequence: Synthetic oligonucleotide
cccaguagaaacaggagau

SEQ ID NO: 1616998 - RNA, 19 nt, Artificial Sequence
  Description of Artificial Sequence: Synthetic oligonucleotide
cugacguuguuccggggcu

SEQ ID NO: 1616999 - RNA, 19 nt, Artificial Sequence
  Description of Artificial Sequence: Synthetic oligonucleotide
agcacaugggcuggcuuuu

SEQ ID NO: 1617000 - RNA, 19 nt, Artificial Sequence
  Description of Artificial Sequence: Synthetic oligonucleotide
cucgaagcccagaggauau

SEQ ID NO: 1617001 - RNA, 19 nt, Artificial Sequence
  Description of Artificial Sequence: Synthetic oligonucleotide
guuuggcagugaacauuac

SEQ ID NO: 1617002 - RNA, 19 nt, Artificial Sequence
  Description of Artificial Sequence: Synthetic oligonucleotide
gagaguguccauggaucua

SEQ ID NO: 1617003 - RNA, 19 nt, Artificial Sequence
  Description of Artificial Sequence: Synthetic oligonucleotide
gcccgguacuaguagguga

SEQ ID NO: 1617004 - RNA, 19 nt, Artificial Sequence
  Description of Artificial Sequence: Synthetic oligonucleotide
gguaugaguucaagucauc

SEQ ID NO: 1617005 - RNA, 19 nt, Artificial Sequence
  Description of Artificial Sequence: Synthetic oligonucleotide
ccaaugggaagacaagcua

SEQ ID NO: 1617006 - RNA, 19 nt, Artificial Sequence
  Description of Artificial Sequence: Synthetic oligonucleotide
cacaacuacugaucuuuau

SEQ ID NO: 1617007 - RNA, 19 nt, Artificial Sequence
  Description of Artificial Sequence: Synthetic oligonucleotide
agcuacgcagagagcacaa

SEQ ID NO: 1617008 - RNA, 19 nt, Artificial Sequence
  Description of Artificial Sequence: Synthetic oligonucleotide
ggguacggugaguuaaugu

SEQ ID NO: 1617009 - RNA, 19 nt, Artificial Sequence
  Description of Artificial Sequence: Synthetic oligonucleotide
gaagggcaccuguuucccu

SEQ ID NO: 1617010 - RNA, 19 nt, Artificial Sequence
  Description of Artificial Sequence: Synthetic oligonucleotide
ggagucgcucuuacgcaug

SEQ ID NO: 1617011 - RNA, 19 nt, Artificial Sequence
  Description of Artificial Sequence: Synthetic oligonucleotide
cagcuacgcagagagcaca

SEQ ID NO: 1617012 - RNA, 19 nt, Artificial Sequence
  Description of Artificial Sequence: Synthetic oligonucleotide
acgcaggcugcaguucgca

SEQ ID NO: 1617013 - RNA, 19 nt, Artificial Sequence
  Description of Artificial Sequence: Synthetic oligonucleotide
ggauauccuuagagucucc

SEQ ID NO: 1617014 - RNA, 19 nt, Artificial Sequence
  Description of Artificial Sequence: Synthetic oligonucleotide
ucgaagcccagaggauaua

SEQ ID NO: 1617015 - RNA, 19 nt, Artificial Sequence
  Description of Artificial Sequence: Synthetic oligonucleotide
cuguugggcugucugacuu

SEQ ID NO: 1617016 - RNA, 19 nt, Artificial Sequence
  Description of Artificial Sequence: Synthetic oligonucleotide
agucgcucuuacgcauggu

SEQ ID NO: 1617017 - RNA, 19 nt, Artificial Sequence
  Description of Artificial Sequence: Synthetic oligonucleotide
cuuacgcauggugggaggu

SEQ ID NO: 1617018 - RNA, 19 nt, Artificial Sequence
  Description of Artificial Sequence: Synthetic oligonucleotide
ccuuucugucuaggagucg

SEQ ID NO: 1617019 - RNA, 19 nt, Artificial Sequence
  Description of Artificial Sequence: Synthetic oligonucleotide
acggguacggugaguuaau

SEQ ID NO: 1617020 - RNA, 19 nt, Artificial Sequence
  Description of Artificial Sequence: Synthetic oligonucleotide
cggauauccuuagagucuc

SEQ ID NO: 1617021 - RNA, 19 nt, Artificial Sequence
  Description of Artificial Sequence: Synthetic oligonucleotide
cccgguacuaguaggugaa

SEQ ID NO: 1617022 - RNA, 19 nt, Artificial Sequence
  Description of Artificial Sequence: Synthetic oligonucleotide
cccgccugcuagcuuuagg

SEQ ID NO: 1617023 - RNA, 19 nt, Artificial Sequence
  Description of Artificial Sequence: Synthetic oligonucleotide
gcaguucgcacucuauuuu

SEQ ID NO: 1617024 - RNA, 19 nt, Artificial Sequence
  Description of Artificial Sequence: Synthetic oligonucleotide
cagcccgguacuaguaggu

SEQ ID NO: 1617025 - RNA, 19 nt, Artificial Sequence
  Description of Artificial Sequence: Synthetic oligonucleotide
cugcaguucgcacucuauu

SEQ ID NO: 1617026 - RNA, 19 nt, Artificial Sequence
  Description of Artificial Sequence: Synthetic oligonucleotide
cugucuaggagucgcucuu

SEQ ID NO: 1617027 - RNA, 19 nt, Artificial Sequence
  Description of Artificial Sequence: Synthetic oligonucleotide
ggauuugguaugaguucaa

SEQ ID NO: 1617028 - RNA, 19 nt, Artificial Sequence
  Description of Artificial Sequence: Synthetic oligonucleotide
gcuucucaaauuacaacuu

SEQ ID NO: 1617029 - RNA, 19 nt, Artificial Sequence
  Description of Artificial Sequence: Synthetic oligonucleotide
cccuuuucauucggguaug

SEQ ID NO: 1617030 - RNA, 19 nt, Artificial Sequence
  Description of Artificial Sequence: Synthetic oligonucleotide
ccuaaucgagcgaagcuuu

SEQ ID NO: 1617031 - RNA, 19 nt, Artificial Sequence
  Description of Artificial Sequence: Synthetic oligonucleotide
gccugcuagcuuuaggauu

SEQ ID NO: 1617032 - RNA, 19 nt, Artificial Sequence
  Description of Artificial Sequence: Synthetic oligonucleotide
cacaugggcuggcuuuugu

SEQ ID NO: 1617033 - RNA, 19 nt, Artificial Sequence
  Description of Artificial Sequence: Synthetic oligonucleotide
acguuguuccggggcugca

SEQ ID NO: 1617034 - RNA, 19 nt, Artificial Sequence
  Description of Artificial Sequence: Synthetic oligonucleotide
gggcuaaccccuuuucauu

SEQ ID NO: 1617035 - RNA, 19 nt, Artificial Sequence
  Description of Artificial Sequence: Synthetic oligonucleotide
cagcccagaucaucucugu

SEQ ID NO: 1617036 - RNA, 19 nt, Artificial Sequence
  Description of Artificial Sequence: Synthetic oligonucleotide
cugacuuuagcaggaccuu

SEQ ID NO: 1617037 - RNA, 19 nt, Artificial Sequence
  Description of Artificial Sequence: Synthetic oligonucleotide
gggaguggauaaaguuaga

SEQ ID NO: 1617038 - RNA, 19 nt, Artificial Sequence
  Description of Artificial Sequence: Synthetic oligonucleotide
aacccgccugcuagcuuua

SEQ ID NO: 1617039 - RNA, 19 nt, Artificial Sequence
  Description of Artificial Sequence: Synthetic oligonucleotide
gggcaccuguuucccuuac

SEQ ID NO: 1617040 - RNA, 19 nt, Artificial Sequence
  Description of Artificial Sequence: Synthetic oligonucleotide
acccgccugcuagcuuuag

SEQ ID NO: 1617041 - RNA, 19 nt, Artificial Sequence
  Description of Artificial Sequence: Synthetic oligonucleotide
ggauaaaguuagagcaauu

SEQ ID NO: 1617042 - RNA, 19 nt, Artificial Sequence
  Description of Artificial Sequence: Synthetic oligonucleotide
caacuucuauuccccuaau

SEQ ID NO: 1617043 - RNA, 19 nt, Artificial Sequence
  Description of Artificial Sequence: Synthetic oligonucleotide
caucaccuguugggcuguc

SEQ ID NO: 1617044 - RNA, 19 nt, Artificial Sequence
  Description of Artificial Sequence: Synthetic oligonucleotide
ccucgaagcccagaggaua

SEQ ID NO: 1617045 - RNA, 19 nt, Artificial Sequence
  Description of Artificial Sequence: Synthetic oligonucleotide
gcacaugggcuggcuuuug

SEQ ID NO: 1617046 - RNA, 19 nt, Artificial Sequence
  Description of Artificial Sequence: Synthetic oligonucleotide
ccccuaaucgagcgaagcu

SEQ ID NO: 1617047 - RNA, 19 nt, Artificial Sequence
  Description of Artificial Sequence: Synthetic oligonucleotide
cugcaguaggacgcaggcu

SEQ ID NO: 1617048 - RNA, 19 nt, Artificial Sequence
  Description of Artificial Sequence: Synthetic oligonucleotide
ggcuaaggcucuacuugcu

SEQ ID NO: 1617049 - RNA, 19 nt, Artificial Sequence
  Description of Artificial Sequence: Synthetic oligonucleotide
gcuacgcagagagcacaaa

SEQ ID NO: 1617050 - RNA, 19 nt, Artificial Sequence
  Description of Artificial Sequence: Synthetic oligonucleotide
gcugucuggcagcuuguuu

SEQ ID NO: 1617051 - RNA, 19 nt, Artificial Sequence
  Description of Artificial Sequence: Synthetic oligonucleotide
ccaggcuaaggcucuacuu

SEQ ID NO: 1617052 - RNA, 19 nt, Artificial Sequence
  Description of Artificial Sequence: Synthetic oligonucleotide
gcaugggcuaaccccuuuu

SEQ ID NO: 1617053 - RNA, 19 nt, Artificial Sequence
  Description of Artificial Sequence: Synthetic oligonucleotide
cagcucuaucaggaugccu

SEQ ID NO: 1617054 - RNA, 19 nt, Artificial Sequence
  Description of Artificial Sequence: Synthetic oligonucleotide
cccuaaucgagcgaagcuu

SEQ ID NO: 1617055 - RNA, 19 nt, Artificial Sequence
  Description of Artificial Sequence: Synthetic oligonucleotide
gcgaagcuuuccacaggaa

SEQ ID NO: 1617056 - RNA, 19 nt, Artificial Sequence
  Description of Artificial Sequence: Synthetic oligonucleotide
ccuguugggcugucugacu

SEQ ID NO: 1617057 - RNA, 19 nt, Artificial Sequence
  Description of Artificial Sequence: Synthetic oligonucleotide
cggguacggugaguuaaug

SEQ ID NO: 1617058 - RNA, 19 nt, Artificial Sequence
  Description of Artificial Sequence: Synthetic oligonucleotide
gcugcaguucgcacucuau

SEQ ID NO: 1617059 - RNA, 19 nt, Artificial Sequence
  Description of Artificial Sequence: Synthetic oligonucleotide
ggaacccgccugcuagcuu

SEQ ID NO: 1617060 - RNA, 19 nt, Artificial Sequence
  Description of Artificial Sequence: Synthetic oligonucleotide
ccauggaucuagguagguu

SEQ ID NO: 1617061 - RNA, 19 nt, Artificial Sequence
  Description of Artificial Sequence: Synthetic oligonucleotide
ccccagcccgguacuagua

SEQ ID NO: 1617062 - RNA, 19 nt, Artificial Sequence
  Description of Artificial Sequence: Synthetic oligonucleotide
ccgguacuaguaggugaaa

SEQ ID NO: 1617063 - RNA, 19 nt, Artificial Sequence
  Description of Artificial Sequence: Synthetic oligonucleotide
cgccugcuagcuuuaggau

SEQ ID NO: 1617064 - RNA, 19 nt, Artificial Sequence
  Description of Artificial Sequence: Synthetic oligonucleotide
cgacggguacggugaguua

SEQ ID NO: 1617065 - RNA, 19 nt, Artificial Sequence
  Description of Artificial Sequence: Synthetic oligonucleotide
cccuuaccccagcccggua

SEQ ID NO: 1617066 - RNA, 19 nt, Artificial Sequence
  Description of Artificial Sequence: Synthetic oligonucleotide
uuuacuaaauucuugaggg

SEQ ID NO: 1617067 - RNA, 19 nt, Artificial Sequence
  Description of Artificial Sequence: Synthetic oligonucleotide
aucgaguucaaauacaucc

SEQ ID NO: 1617068 - RNA, 19 nt, Artificial Sequence
  Description of Artificial Sequence: Synthetic oligonucleotide
uauagguugguccagaagg

SEQ ID NO: 1617069 - RNA, 19 nt, Artificial Sequence
  Description of Artificial Sequence: Synthetic oligonucleotide
uucacuauaauccucacca

SEQ ID NO: 1617070 - RNA, 19 nt, Artificial Sequence
  Description of Artificial Sequence: Synthetic oligonucleotide
aagagaacacuuuuaauuc

SEQ ID NO: 1617071 - RNA, 19 nt, Artificial Sequence
  Description of Artificial Sequence: Synthetic oligonucleotide
gauaggacgucauauaugg

SEQ ID NO: 1617072 - RNA, 19 nt, Artificial Sequence
  Description of Artificial Sequence: Synthetic oligonucleotide
aauaaucucuccuaaaggu

SEQ ID NO: 1617073 - RNA, 19 nt, Artificial Sequence
  Description of Artificial Sequence: Synthetic oligonucleotide
aaaugcguuuacuaaauuc

SEQ ID NO: 1617074 - RNA, 19 nt, Artificial Sequence
  Description of Artificial Sequence: Synthetic oligonucleotide
ucauagaaaauguugaaug

SEQ ID NO: 1617075 - RNA, 19 nt, Artificial Sequence
  Description of Artificial Sequence: Synthetic oligonucleotide
auaaccgccauuuagacug

SEQ ID NO: 1617076 - RNA, 19 nt, Artificial Sequence
  Description of Artificial Sequence: Synthetic oligonucleotide
uuaucuucgguuauuauug

SEQ ID NO: 1617077 - RNA, 19 nt, Artificial Sequence
  Description of Artificial Sequence: Synthetic oligonucleotide
agggaauucacuauaaucc

SEQ ID NO: 1617078 - RNA, 19 nt, Artificial Sequence
  Description of Artificial Sequence: Synthetic oligonucleotide
uuaguguaagacuaaacag

SEQ ID NO: 1617079 - RNA, 19 nt, Artificial Sequence
  Description of Artificial Sequence: Synthetic oligonucleotide
aaauaaccgccauuuagac

SEQ ID NO: 1617080 - RNA, 19 nt, Artificial Sequence
  Description of Artificial Sequence: Synthetic oligonucleotide
ucugucaugcuuaggaucg

SEQ ID NO: 1617081 - RNA, 19 nt, Artificial Sequence
  Description of Artificial Sequence: Synthetic oligonucleotide
gaagguaacuuucaaauug

SEQ ID NO: 1617082 - RNA, 19 nt, Artificial Sequence
  Description of Artificial Sequence: Synthetic oligonucleotide
ucaucaaggaacaaggugu

SEQ ID NO: 1617083 - RNA, 19 nt, Artificial Sequence
  Description of Artificial Sequence: Synthetic oligonucleotide
ucuguaacaacccaagugu

SEQ ID NO: 1617084 - RNA, 19 nt, Artificial Sequence
  Description of Artificial Sequence: Synthetic oligonucleotide
uguaccauggaacugcucc

SEQ ID NO: 1617085 - RNA, 19 nt, Artificial Sequence
  Description of Artificial Sequence: Synthetic oligonucleotide
uguaagacuaaacaguccu

SEQ ID NO: 1617086 - RNA, 19 nt, Artificial Sequence
  Description of Artificial Sequence: Synthetic oligonucleotide
uguucugcggucaucaagg

SEQ ID NO: 1617087 - RNA, 19 nt, Artificial Sequence
  Description of Artificial Sequence: Synthetic oligonucleotide
ugaucuagugauaaacccg

SEQ ID NO: 1617088 - RNA, 19 nt, Artificial Sequence
  Description of Artificial Sequence: Synthetic oligonucleotide
auaacuuguacuauuuucc

SEQ ID NO: 1617089 - RNA, 19 nt, Artificial Sequence
  Description of Artificial Sequence: Synthetic oligonucleotide
uuauuauugauguacacau

SEQ ID NO: 1617090 - RNA, 19 nt, Artificial Sequence
  Description of Artificial Sequence: Synthetic oligonucleotide
uaguaaaugaccuucauua

SEQ ID NO: 1617091 - RNA, 19 nt, Artificial Sequence
  Description of Artificial Sequence: Synthetic oligonucleotide
uguuauuuauauuccaccc

SEQ ID NO: 1617092 - RNA, 19 nt, Artificial Sequence
  Description of Artificial Sequence: Synthetic oligonucleotide
ucauauaugguugcaaacg

SEQ ID NO: 1617093 - RNA, 19 nt, Artificial Sequence
  Description of Artificial Sequence: Synthetic oligonucleotide
uuuagacacaucuuggcag

SEQ ID NO: 1617094 - RNA, 19 nt, Artificial Sequence
  Description of Artificial Sequence: Synthetic oligonucleotide
guaacuuucaaauugaccu

SEQ ID NO: 1617095 - RNA, 19 nt, Artificial Sequence
  Description of Artificial Sequence: Synthetic oligonucleotide
ugucgugcgauuuagacac

SEQ ID NO: 1617096 - RNA, 19 nt, Artificial Sequence
  Description of Artificial Sequence: Synthetic oligonucleotide
uauccaacgaagcuuguag

SEQ ID NO: 1617097 - RNA, 19 nt, Artificial Sequence
  Description of Artificial Sequence: Synthetic oligonucleotide
ucugcggucaucaaggaac

SEQ ID NO: 1617098 - RNA, 19 nt, Artificial Sequence
  Description of Artificial Sequence: Synthetic oligonucleotide
cuaggauacccaaauaacc

SEQ ID NO: 1617099 - RNA, 19 nt, Artificial Sequence
  Description of Artificial Sequence: Synthetic oligonucleotide
auuagcuuggucuugauua

SEQ ID NO: 1617100 - RNA, 19 nt, Artificial Sequence
  Description of Artificial Sequence: Synthetic oligonucleotide
gucauaauugguuuguacc

SEQ ID NO: 1617101 - RNA, 19 nt, Artificial Sequence
  Description of Artificial Sequence: Synthetic oligonucleotide
uuguuauuuauauuccacc

SEQ ID NO: 1617102 - RNA, 19 nt, Artificial Sequence
  Description of Artificial Sequence: Synthetic oligonucleotide
aaugcguuuacuaaauucu

SEQ ID NO: 1617103 - RNA, 19 nt, Artificial Sequence
  Description of Artificial Sequence: Synthetic oligonucleotide
ugcaauucccuucauuucc

SEQ ID NO: 1617104 - RNA, 19 nt, Artificial Sequence
  Description of Artificial Sequence: Synthetic oligonucleotide
cugaguuacuacuucaugc

SEQ ID NO: 1617105 - RNA, 19 nt, Artificial Sequence
  Description of Artificial Sequence: Synthetic oligonucleotide
ugaguuacuacuucaugcc

SEQ ID NO: 1617106 - RNA, 19 nt, Artificial Sequence
  Description of Artificial Sequence: Synthetic oligonucleotide
gacugaaacguucauuuag

SEQ ID NO: 1617107 - RNA, 19 nt, Artificial Sequence
  Description of Artificial Sequence: Synthetic oligonucleotide
ucuucgguuauuauugaug

SEQ ID NO: 1617108 - RNA, 19 nt, Artificial Sequence
  Description of Artificial Sequence: Synthetic oligonucleotide
uucuaggauacccaaauaa

SEQ ID NO: 1617109 - RNA, 19 nt, Artificial Sequence
  Description of Artificial Sequence: Synthetic oligonucleotide
ucuaggauacccaaauaac

SEQ ID NO: 1617110 - RNA, 19 nt, Artificial Sequence
  Description of Artificial Sequence: Synthetic oligonucleotide
uuagacacaucuuggcagg

SEQ ID NO: 1617111 - RNA, 19 nt, Artificial Sequence
  Description of Artificial Sequence: Synthetic oligonucleotide
uuucaaauugaccuuuggu

SEQ ID NO: 1617112 - RNA, 19 nt, Artificial Sequence
  Description of Artificial Sequence: Synthetic oligonucleotide
aauuagaccaggcaacuuu

SEQ ID NO: 1617113 - RNA, 19 nt, Artificial Sequence
  Description of Artificial Sequence: Synthetic oligonucleotide
auucacuauaauccucacc

SEQ ID NO: 1617114 - RNA, 19 nt, Artificial Sequence
  Description of Artificial Sequence: Synthetic oligonucleotide
uaauccucaccauuggugc

SEQ ID NO: 1617115 - RNA, 19 nt, Artificial Sequence
  Description of Artificial Sequence: Synthetic oligonucleotide
ucuccuaaagguaucccag

SEQ ID NO: 1617116 - RNA, 19 nt, Artificial Sequence
  Description of Artificial Sequence: Synthetic oligonucleotide
aauucacuauaauccucac

SEQ ID NO: 1617117 - RNA, 19 nt, Artificial Sequence
  Description of Artificial Sequence: Synthetic oligonucleotide
aaacgagagauucuucugu

SEQ ID NO: 1617118 - RNA, 19 nt, Artificial Sequence
  Description of Artificial Sequence: Synthetic oligonucleotide
ugguuuguaccacauacca

SEQ ID NO: 1617119 - RNA, 19 nt, Artificial Sequence
  Description of Artificial Sequence: Synthetic oligonucleotide
guuuguaccacauaccauc

SEQ ID NO: 1617120 - RNA, 19 nt, Artificial Sequence
  Description of Artificial Sequence: Synthetic oligonucleotide
uuaugguguaccauggaac

SEQ ID NO: 1617121 - RNA, 19 nt, Artificial Sequence
  Description of Artificial Sequence: Synthetic oligonucleotide
aaaucaagguuuauggugu

SEQ ID NO: 1617122 - RNA, 19 nt, Artificial Sequence
  Description of Artificial Sequence: Synthetic oligonucleotide
uuuaugguguaccauggaa

SEQ ID NO: 1617123 - RNA, 19 nt, Artificial Sequence
  Description of Artificial Sequence: Synthetic oligonucleotide
aagguaucccaguaacauc

SEQ ID NO: 1617124 - RNA, 19 nt, Artificial Sequence
  Description of Artificial Sequence: Synthetic oligonucleotide
ucgguuauuauugauguac

SEQ ID NO: 1617125 - RNA, 19 nt, Artificial Sequence
  Description of Artificial Sequence: Synthetic oligonucleotide
aguguaagacuaaacaguc

SEQ ID NO: 1617126 - RNA, 19 nt, Artificial Sequence
  Description of Artificial Sequence: Synthetic oligonucleotide
uguauucuuggcuucguca

SEQ ID NO: 1617127 - RNA, 19 nt, Artificial Sequence
  Description of Artificial Sequence: Synthetic oligonucleotide
uguaacaacccaaguguug

SEQ ID NO: 1617128 - RNA, 19 nt, Artificial Sequence
  Description of Artificial Sequence: Synthetic oligonucleotide
uugaacccugucaacaugc

SEQ ID NO: 1617129 - RNA, 19 nt, Artificial Sequence
  Description of Artificial Sequence: Synthetic oligonucleotide
aaagguaucccaguaacau

SEQ ID NO: 1617130 - RNA, 19 nt, Artificial Sequence
  Description of Artificial Sequence: Synthetic oligonucleotide
auaaacccgacccauucag

SEQ ID NO: 1617131 - RNA, 19 nt, Artificial Sequence
  Description of Artificial Sequence: Synthetic oligonucleotide
uucccaaaauccauucuag

SEQ ID NO: 1617132 - RNA, 19 nt, Artificial Sequence
  Description of Artificial Sequence: Synthetic oligonucleotide
uguugugugcucaccagcc

SEQ ID NO: 1617133 - RNA, 19 nt, Artificial Sequence
  Description of Artificial Sequence: Synthetic oligonucleotide
uccagaacugaucuaguga

SEQ ID NO: 1617134 - RNA, 19 nt, Artificial Sequence
  Description of Artificial Sequence: Synthetic oligonucleotide
ugaaacguucauuuagugu

SEQ ID NO: 1617135 - RNA, 19 nt, Artificial Sequence
  Description of Artificial Sequence: Synthetic oligonucleotide
caggauaaaauaugcuggg

SEQ ID NO: 1617136 - RNA, 19 nt, Artificial Sequence
  Description of Artificial Sequence: Synthetic oligonucleotide
cuuucucucguaaucacac

SEQ ID NO: 1617137 - RNA, 19 nt, Artificial Sequence
  Description of Artificial Sequence: Synthetic oligonucleotide
auuaucuucgguuauuauu

SEQ ID NO: 1617138 - RNA, 19 nt, Artificial Sequence
  Description of Artificial Sequence: Synthetic oligonucleotide
uauugauguacacauggua

SEQ ID NO: 1617139 - RNA, 19 nt, Artificial Sequence
  Description of Artificial Sequence: Synthetic oligonucleotide
uagaccaggcaacuuuugg

SEQ ID NO: 1617140 - RNA, 19 nt, Artificial Sequence
  Description of Artificial Sequence: Synthetic oligonucleotide
ucaaucaagguugugaaua

SEQ ID NO: 1617141 - RNA, 19 nt, Artificial Sequence
  Description of Artificial Sequence: Synthetic oligonucleotide
uuuccaccggucauaauug

SEQ ID NO: 1617142 - RNA, 19 nt, Artificial Sequence
  Description of Artificial Sequence: Synthetic oligonucleotide
auccaacgaagcuuguagc

SEQ ID NO: 1617143 - RNA, 19 nt, Artificial Sequence
  Description of Artificial Sequence: Synthetic oligonucleotide
aaacccgacccauucagca

SEQ ID NO: 1617144 - RNA, 19 nt, Artificial Sequence
  Description of Artificial Sequence: Synthetic oligonucleotide
uaggaucgaguucaaauac

SEQ ID NO: 1617145 - RNA, 19 nt, Artificial Sequence
  Description of Artificial Sequence: Synthetic oligonucleotide
aauaaccgccauuuagacu

SEQ ID NO: 1617146 - RNA, 19 nt, Artificial Sequence
  Description of Artificial Sequence: Synthetic oligonucleotide
uauuuauauuccacccaag

SEQ ID NO: 1617147 - RNA, 19 nt, Artificial Sequence
  Description of Artificial Sequence: Synthetic oligonucleotide
agguuuaugguguaccaug

SEQ ID NO: 1617148 - RNA, 19 nt, Artificial Sequence
  Description of Artificial Sequence: Synthetic oligonucleotide
ggauaaaauaugcuggggc

SEQ ID NO: 1617149 - RNA, 19 nt, Artificial Sequence
  Description of Artificial Sequence: Synthetic oligonucleotide
ucugaguuacuacuucaug

SEQ ID NO: 1617150 - RNA, 19 nt, Artificial Sequence
  Description of Artificial Sequence: Synthetic oligonucleotide
ugcguuuacuaaauucuug

SEQ ID NO: 1617151 - RNA, 19 nt, Artificial Sequence
  Description of Artificial Sequence: Synthetic oligonucleotide
caagguugugaauacaguc

SEQ ID NO: 1617152 - RNA, 19 nt, Artificial Sequence
  Description of Artificial Sequence: Synthetic oligonucleotide
uccaacgaagcuuguagcc

SEQ ID NO: 1617153 - RNA, 19 nt, Artificial Sequence
  Description of Artificial Sequence: Synthetic oligonucleotide
uguagccuugaaaacaguc

SEQ ID NO: 1617154 - RNA, 19 nt, Artificial Sequence
  Description of Artificial Sequence: Synthetic oligonucleotide
aaucccgaagguaacuuuc

SEQ ID NO: 1617155 - RNA, 19 nt, Artificial Sequence
  Description of Artificial Sequence: Synthetic oligonucleotide
ugugucgugcgauuuagac

SEQ ID NO: 1617156 - RNA, 19 nt, Artificial Sequence
  Description of Artificial Sequence: Synthetic oligonucleotide
ucgaguucaaauacaucca

SEQ ID NO: 1617157 - RNA, 19 nt, Artificial Sequence
  Description of Artificial Sequence: Synthetic oligonucleotide
ugauaaacccgacccauuc

SEQ ID NO: 1617158 - RNA, 19 nt, Artificial Sequence
  Description of Artificial Sequence: Synthetic oligonucleotide
gucaucaaggaacaaggug

SEQ ID NO: 1617159 - RNA, 19 nt, Artificial Sequence
  Description of Artificial Sequence: Synthetic oligonucleotide
ucaagguuuaugguguacc

SEQ ID NO: 1617160 - RNA, 19 nt, Artificial Sequence
  Description of Artificial Sequence: Synthetic oligonucleotide
ugggcaaucccgaagguaa

SEQ ID NO: 1617161 - RNA, 19 nt, Artificial Sequence
  Description of Artificial Sequence: Synthetic oligonucleotide
uaugguugcaaacgagaga

SEQ ID NO: 1617162 - RNA, 19 nt, Artificial Sequence
  Description of Artificial Sequence: Synthetic oligonucleotide
uuagcuuggucuugauuag

SEQ ID NO: 1617163 - RNA, 19 nt, Artificial Sequence
  Description of Artificial Sequence: Synthetic oligonucleotide
caaauaaccgccauuuaga

SEQ ID NO: 1617164 - RNA, 19 nt, Artificial Sequence
  Description of Artificial Sequence: Synthetic oligonucleotide
cucucguaaucacacagcc

SEQ ID NO: 1617165 - RNA, 19 nt, Artificial Sequence
  Description of Artificial Sequence: Synthetic oligonucleotide
uccucuauagguuggucca

SEQ ID NO: 1617166 - RNA, 19 nt, Artificial Sequence
  Description of Artificial Sequence: Synthetic oligonucleotide
uaaagguaucccaguaaca

SEQ ID NO: 1617167 - RNA, 19 nt, Artificial Sequence
  Description of Artificial Sequence: Synthetic oligonucleotide
uauaauccucaccauuggu

SEQ ID NO: 1617168 - RNA, 19 nt, Artificial Sequence
  Description of Artificial Sequence: Synthetic oligonucleotide
guaaaugaccuucauuauc

SEQ ID NO: 1617169 - RNA, 19 nt, Artificial Sequence
  Description of Artificial Sequence: Synthetic oligonucleotide
cauagaaaauguugaauga

SEQ ID NO: 1617170 - RNA, 19 nt, Artificial Sequence
  Description of Artificial Sequence: Synthetic oligonucleotide
uuugaacccugucaacaug

SEQ ID NO: 1617171 - RNA, 19 nt, Artificial Sequence
  Description of Artificial Sequence: Synthetic oligonucleotide
acaucaaucaagguuguga

SEQ ID NO: 1617172 - RNA, 19 nt, Artificial Sequence
  Description of Artificial Sequence: Synthetic oligonucleotide
cauuuagacugaaacguuc

SEQ ID NO: 1617173 - RNA, 19 nt, Artificial Sequence
  Description of Artificial Sequence: Synthetic oligonucleotide
ggauaaguugauuuucugc

SEQ ID NO: 1617174 - RNA, 19 nt, Artificial Sequence
  Description of Artificial Sequence: Synthetic oligonucleotide
acacaugguaaacaauuca

SEQ ID NO: 1617175 - RNA, 19 nt, Artificial Sequence
  Description of Artificial Sequence: Synthetic oligonucleotide
ugugccugggcgcagguga

SEQ ID NO: 1617176 - RNA, 19 nt, Artificial Sequence
  Description of Artificial Sequence: Synthetic oligonucleotide
uccagaaggaggauaaguu

SEQ ID NO: 1617177 - RNA, 19 nt, Artificial Sequence
  Description of Artificial Sequence: Synthetic oligonucleotide
ucucucguaaucacacagc

SEQ ID NO: 1617178 - RNA, 19 nt, Artificial Sequence
  Description of Artificial Sequence: Synthetic oligonucleotide
gacacuugggcccagcauc

SEQ ID NO: 1617179 - RNA, 19 nt, Artificial Sequence
  Description of Artificial Sequence: Synthetic oligonucleotide
augguugcaaacgagagau

SEQ ID NO: 1617180 - RNA, 19 nt, Artificial Sequence
  Description of Artificial Sequence: Synthetic oligonucleotide
aucaagguugugaauacag

SEQ ID NO: 1617181 - RNA, 19 nt, Artificial Sequence
  Description of Artificial Sequence: Synthetic oligonucleotide
ugucaacaugcccacauau

SEQ ID NO: 1617182 - RNA, 19 nt, Artificial Sequence
  Description of Artificial Sequence: Synthetic oligonucleotide
auaauccucaccauuggug

SEQ ID NO: 1617183 - RNA, 19 nt, Artificial Sequence
  Description of Artificial Sequence: Synthetic oligonucleotide
ugaccuucauuaucuucgg

SEQ ID NO: 1617184 - RNA, 19 nt, Artificial Sequence
  Description of Artificial Sequence: Synthetic oligonucleotide
uuuuguagggugguaaauc

SEQ ID NO: 1617185 - RNA, 19 nt, Artificial Sequence
  Description of Artificial Sequence: Synthetic oligonucleotide
aagguaacuuucaaauuga

SEQ ID NO: 1617186 - RNA, 19 nt, Artificial Sequence
  Description of Artificial Sequence: Synthetic oligonucleotide
cuccucuauagguuggucc

SEQ ID NO: 1617187 - RNA, 19 nt, Artificial Sequence
  Description of Artificial Sequence: Synthetic oligonucleotide
auaauugguuuguaccaca

SEQ ID NO: 1617188 - RNA, 19 nt, Artificial Sequence
  Description of Artificial Sequence: Synthetic oligonucleotide
gaucuagugauaaacccga

SEQ ID NO: 1617189 - RNA, 19 nt, Artificial Sequence
  Description of Artificial Sequence: Synthetic oligonucleotide
uacuauuuuccagaacuga

SEQ ID NO: 1617190 - RNA, 19 nt, Artificial Sequence
  Description of Artificial Sequence: Synthetic oligonucleotide
ucaugcuuaggaucgaguu

SEQ ID NO: 1617191 - RNA, 19 nt, Artificial Sequence
  Description of Artificial Sequence: Synthetic oligonucleotide
auaugguugcaaacgagag

SEQ ID NO: 1617192 - RNA, 19 nt, Artificial Sequence
  Description of Artificial Sequence: Synthetic oligonucleotide
augcuuaggaucgaguuca

SEQ ID NO: 1617193 - RNA, 19 nt, Artificial Sequence
  Description of Artificial Sequence: Synthetic oligonucleotide
auagaaaauguugaaugaa

SEQ ID NO: 1617194 - RNA, 19 nt, Artificial Sequence
  Description of Artificial Sequence: Synthetic oligonucleotide
gcgauuuagacacaucuug

SEQ ID NO: 1617195 - RNA, 19 nt, Artificial Sequence
  Description of Artificial Sequence: Synthetic oligonucleotide
gucauauaugguugcaaac

SEQ ID NO: 1617196 - RNA, 19 nt, Artificial Sequence
  Description of Artificial Sequence: Synthetic oligonucleotide
aguaaaugaccuucauuau

SEQ ID NO: 1617197 - RNA, 19 nt, Artificial Sequence
  Description of Artificial Sequence: Synthetic oligonucleotide
auacagucagcuuguugag

SEQ ID NO: 1617198 - RNA, 19 nt, Artificial Sequence
  Description of Artificial Sequence: Synthetic oligonucleotide
aguccaaauucacuguuaa

SEQ ID NO: 1617199 - RNA, 19 nt, Artificial Sequence
  Description of Artificial Sequence: Synthetic oligonucleotide
uaccacauaccaucuguca

SEQ ID NO: 1617200 - RNA, 19 nt, Artificial Sequence
  Description of Artificial Sequence: Synthetic oligonucleotide
agaccaggcaacuuuuggu

SEQ ID NO: 1617201 - RNA, 19 nt, Artificial Sequence
  Description of Artificial Sequence: Synthetic oligonucleotide
ucugugucgugcgauuuag

SEQ ID NO: 1617202 - RNA, 19 nt, Artificial Sequence
  Description of Artificial Sequence: Synthetic oligonucleotide
uccauucuaggauacccaa

SEQ ID NO: 1617203 - RNA, 19 nt, Artificial Sequence
  Description of Artificial Sequence: Synthetic oligonucleotide
gauguacacaugguaaaca

SEQ ID NO: 1617204 - RNA, 19 nt, Artificial Sequence
  Description of Artificial Sequence: Synthetic oligonucleotide
uuaguguauucuuggcuuc

SEQ ID NO: 1617205 - RNA, 19 nt, Artificial Sequence
  Description of Artificial Sequence: Synthetic oligonucleotide
cauaauugguuuguaccac

SEQ ID NO: 1617206 - RNA, 19 nt, Artificial Sequence
  Description of Artificial Sequence: Synthetic oligonucleotide
ugugcucaccagccuaugc

SEQ ID NO: 1617207 - RNA, 19 nt, Artificial Sequence
  Description of Artificial Sequence: Synthetic oligonucleotide
auuuagacugaaacguuca

SEQ ID NO: 1617208 - RNA, 19 nt, Artificial Sequence
  Description of Artificial Sequence: Synthetic oligonucleotide
uaaacccgacccauucagc

SEQ ID NO: 1617209 - RNA, 19 nt, Artificial Sequence
  Description of Artificial Sequence: Synthetic oligonucleotide
agggugguaaaucaagguu

SEQ ID NO: 1617210 - RNA, 19 nt, Artificial Sequence
  Description of Artificial Sequence: Synthetic oligonucleotide
ggugaggacacuugggccc

SEQ ID NO: 1617211 - RNA, 19 nt, Artificial Sequence
  Description of Artificial Sequence: Synthetic oligonucleotide
gauaaacccgacccauuca

SEQ ID NO: 1617212 - RNA, 19 nt, Artificial Sequence
  Description of Artificial Sequence: Synthetic oligonucleotide
ugaacccugucaacaugcc

SEQ ID NO: 1617213 - RNA, 19 nt, Artificial Sequence
  Description of Artificial Sequence: Synthetic oligonucleotide
aacguucauuuaguguaag

SEQ ID NO: 1617214 - RNA, 19 nt, Artificial Sequence
  Description of Artificial Sequence: Synthetic oligonucleotide
uacagucagcuuguugagg

SEQ ID NO: 1617215 - RNA, 19 nt, Artificial Sequence
  Description of Artificial Sequence: Synthetic oligonucleotide
ucucguaaucacacagccu

SEQ ID NO: 1617216 - RNA, 19 nt, Artificial Sequence
  Description of Artificial Sequence: Synthetic oligonucleotide
uuccaccggucauaauugg

SEQ ID NO: 1617217 - RNA, 19 nt, Artificial Sequence
  Description of Artificial Sequence: Synthetic oligonucleotide
gacacccgcggccaagagg

SEQ ID NO: 1617218 - RNA, 19 nt, Artificial Sequence
  Description of Artificial Sequence: Synthetic oligonucleotide
aaucaagguugugaauaca

SEQ ID NO: 1617219 - RNA, 19 nt, Artificial Sequence
  Description of Artificial Sequence: Synthetic oligonucleotide
caucaaucaagguugugaa

SEQ ID NO: 1617220 - RNA, 19 nt, Artificial Sequence
  Description of Artificial Sequence: Synthetic oligonucleotide
uaucuucgguuauuauuga

SEQ ID NO: 1617221 - RNA, 19 nt, Artificial Sequence
  Description of Artificial Sequence: Synthetic oligonucleotide
uugcccgcgaagcuccagg

SEQ ID NO: 1617222 - RNA, 19 nt, Artificial Sequence
  Description of Artificial Sequence: Synthetic oligonucleotide
gaacccugucaacaugccc

SEQ ID NO: 1617223 - RNA, 19 nt, Artificial Sequence
  Description of Artificial Sequence: Synthetic oligonucleotide
aggacgucauauaugguug

SEQ ID NO: 1617224 - RNA, 19 nt, Artificial Sequence
  Description of Artificial Sequence: Synthetic oligonucleotide
acuauuuuccagaacugau

SEQ ID NO: 1617225 - RNA, 19 nt, Artificial Sequence
  Description of Artificial Sequence: Synthetic oligonucleotide
ugcgauuuagacacaucuu

SEQ ID NO: 1617226 - RNA, 19 nt, Artificial Sequence
  Description of Artificial Sequence: Synthetic oligonucleotide
gguuuaugguguaccaugg

SEQ ID NO: 1617227 - RNA, 19 nt, Artificial Sequence
  Description of Artificial Sequence: Synthetic oligonucleotide
cuucgguuauuauugaugu

SEQ ID NO: 1617228 - RNA, 19 nt, Artificial Sequence
  Description of Artificial Sequence: Synthetic oligonucleotide
guguucugcggucaucaag

SEQ ID NO: 1617229 - RNA, 19 nt, Artificial Sequence
  Description of Artificial Sequence: Synthetic oligonucleotide
gaguuacuacuucaugcca

SEQ ID NO: 1617230 - RNA, 19 nt, Artificial Sequence
  Description of Artificial Sequence: Synthetic oligonucleotide
auacuguugugugcucacc

SEQ ID NO: 1617231 - RNA, 19 nt, Artificial Sequence
  Description of Artificial Sequence: Synthetic oligonucleotide
ucuauagguugguccagaa

SEQ ID NO: 1617232 - RNA, 19 nt, Artificial Sequence
  Description of Artificial Sequence: Synthetic oligonucleotide
uuucucucguaaucacaca

SEQ ID NO: 1617233 - RNA, 19 nt, Artificial Sequence
  Description of Artificial Sequence: Synthetic oligonucleotide
uuagacugaaacguucauu

SEQ ID NO: 1617234 - RNA, 19 nt, Artificial Sequence
  Description of Artificial Sequence: Synthetic oligonucleotide
ggacaggcuuuguugauag

SEQ ID NO: 1617235 - RNA, 19 nt, Artificial Sequence
  Description of Artificial Sequence: Synthetic oligonucleotide
gugcgauuuagacacaucu

SEQ ID NO: 1617236 - RNA, 19 nt, Artificial Sequence
  Description of Artificial Sequence: Synthetic oligonucleotide
uucccaguugcccgcgaag

SEQ ID NO: 1617237 - RNA, 19 nt, Artificial Sequence
  Description of Artificial Sequence: Synthetic oligonucleotide
uaaacaguccugguuugaa

SEQ ID NO: 1617238 - RNA, 19 nt, Artificial Sequence
  Description of Artificial Sequence: Synthetic oligonucleotide
guaucccaguaacaucugc

SEQ ID NO: 1617239 - RNA, 19 nt, Artificial Sequence
  Description of Artificial Sequence: Synthetic oligonucleotide
acaacccaaguguuguuau

SEQ ID NO: 1617240 - RNA, 19 nt, Artificial Sequence
  Description of Artificial Sequence: Synthetic oligonucleotide
guacuauuuuccagaacug

SEQ ID NO: 1617241 - RNA, 19 nt, Artificial Sequence
  Description of Artificial Sequence: Synthetic oligonucleotide
acaaaugcguuuacuaaau

SEQ ID NO: 1617242 - RNA, 19 nt, Artificial Sequence
  Description of Artificial Sequence: Synthetic oligonucleotide
ggucauaauugguuuguac

SEQ ID NO: 1617243 - RNA, 19 nt, Artificial Sequence
  Description of Artificial Sequence: Synthetic oligonucleotide
uccaccggucauaauuggu

SEQ ID NO: 1617244 - RNA, 19 nt, Artificial Sequence
  Description of Artificial Sequence: Synthetic oligonucleotide
aaucaagguuuauggugua

SEQ ID NO: 1617245 - RNA, 19 nt, Artificial Sequence
  Description of Artificial Sequence: Synthetic oligonucleotide
accggucauaauugguuug

SEQ ID NO: 1617246 - RNA, 19 nt, Artificial Sequence
  Description of Artificial Sequence: Synthetic oligonucleotide
ugucaugcuuaggaucgag

SEQ ID NO: 1617247 - RNA, 19 nt, Artificial Sequence
  Description of Artificial Sequence: Synthetic oligonucleotide
ugcucaccagccuaugcaa

SEQ ID NO: 1617248 - RNA, 19 nt, Artificial Sequence
  Description of Artificial Sequence: Synthetic oligonucleotide
cugguuugaacccugucaa

SEQ ID NO: 1617249 - RNA, 19 nt, Artificial Sequence
  Description of Artificial Sequence: Synthetic oligonucleotide
gcguuuacuaaauucuuga

SEQ ID NO: 1617250 - RNA, 19 nt, Artificial Sequence
  Description of Artificial Sequence: Synthetic oligonucleotide
gguugcaaacgagagauuc

SEQ ID NO: 1617251 - RNA, 19 nt, Artificial Sequence
  Description of Artificial Sequence: Synthetic oligonucleotide
caagguuuaugguguacca

SEQ ID NO: 1617252 - RNA, 19 nt, Artificial Sequence
  Description of Artificial Sequence: Synthetic oligonucleotide
caguugcccgcgaagcucc

SEQ ID NO: 1617253 - RNA, 19 nt, Artificial Sequence
  Description of Artificial Sequence: Synthetic oligonucleotide
cugcaauucccuucauuuc

SEQ ID NO: 1617254 - RNA, 19 nt, Artificial Sequence
  Description of Artificial Sequence: Synthetic oligonucleotide
cuuguacuauuuuccagaa

SEQ ID NO: 1617255 - RNA, 19 nt, Artificial Sequence
  Description of Artificial Sequence: Synthetic oligonucleotide
acacccgcggccaagagga

SEQ ID NO: 1617256 - RNA, 19 nt, Artificial Sequence
  Description of Artificial Sequence: Synthetic oligonucleotide
aguuacuacuucaugccau

SEQ ID NO: 1617257 - RNA, 19 nt, Artificial Sequence
  Description of Artificial Sequence: Synthetic oligonucleotide
uacauccaaagacucucuu

SEQ ID NO: 1617258 - RNA, 19 nt, Artificial Sequence
  Description of Artificial Sequence: Synthetic oligonucleotide
acgagagauucuucugugu

SEQ ID NO: 1617259 - RNA, 19 nt, Artificial Sequence
  Description of Artificial Sequence: Synthetic oligonucleotide
gauacccaaauaaccgcca

SEQ ID NO: 1617260 - RNA, 19 nt, Artificial Sequence
  Description of Artificial Sequence: Synthetic oligonucleotide
ggugacaucaaucaagguu

SEQ ID NO: 1617261 - RNA, 19 nt, Artificial Sequence
  Description of Artificial Sequence: Synthetic oligonucleotide
uauucuuggcuucgucaua

SEQ ID NO: 1617262 - RNA, 19 nt, Artificial Sequence
  Description of Artificial Sequence: Synthetic oligonucleotide
gugucgugcgauuuagaca

SEQ ID NO: 1617263 - RNA, 19 nt, Artificial Sequence
  Description of Artificial Sequence: Synthetic oligonucleotide
aacccgacccauucagcau

SEQ ID NO: 1617264 - RNA, 19 nt, Artificial Sequence
  Description of Artificial Sequence: Synthetic oligonucleotide
ucacuauaauccucaccau

SEQ ID NO: 1617265 - RNA, 19 nt, Artificial Sequence
  Description of Artificial Sequence: Synthetic oligonucleotide
guguaagacuaaacagucc

SEQ ID NO: 1617266 - RNA, 19 nt, Artificial Sequence
  Description of Artificial Sequence: Synthetic oligonucleotide
ggauacccaaauaaccgcc

SEQ ID NO: 1617267 - RNA, 19 nt, Artificial Sequence
  Description of Artificial Sequence: Synthetic oligonucleotide
ucucuccuaaagguauccc

SEQ ID NO: 1617268 - RNA, 19 nt, Artificial Sequence
  Description of Artificial Sequence: Synthetic oligonucleotide
ucguaaucacacagccuuc

SEQ ID NO: 1617269 - RNA, 19 nt, Artificial Sequence
  Description of Artificial Sequence: Synthetic oligonucleotide
ucccaguugcccgcgaagc

SEQ ID NO: 1617270 - RNA, 19 nt, Artificial Sequence
  Description of Artificial Sequence: Synthetic oligonucleotide
aucuucgguuauuauugau

SEQ ID NO: 1617271 - RNA, 19 nt, Artificial Sequence
  Description of Artificial Sequence: Synthetic oligonucleotide
uucugcggucaucaaggaa

SEQ ID NO: 1617272 - RNA, 19 nt, Artificial Sequence
  Description of Artificial Sequence: Synthetic oligonucleotide
agucagcuuguugaggaca

SEQ ID NO: 1617273 - RNA, 19 nt, Artificial Sequence
  Description of Artificial Sequence: Synthetic oligonucleotide
cauucuaggauacccaaau

SEQ ID NO: 1617274 - RNA, 19 nt, Artificial Sequence
  Description of Artificial Sequence: Synthetic oligonucleotide
auagguugguccagaagga

SEQ ID NO: 1617275 - RNA, 19 nt, Artificial Sequence
  Description of Artificial Sequence: Synthetic oligonucleotide
auucuaggauacccaaaua

SEQ ID NO: 1617276 - RNA, 19 nt, Artificial Sequence
  Description of Artificial Sequence: Synthetic oligonucleotide
cacccaagaaauauuccaa

SEQ ID NO: 1617277 - RNA, 19 nt, Artificial Sequence
  Description of Artificial Sequence: Synthetic oligonucleotide
ccgccauuuagacugaaac

SEQ ID NO: 1617278 - RNA, 19 nt, Artificial Sequence
  Description of Artificial Sequence: Synthetic oligonucleotide
uuguagccuugaaaacagu

SEQ ID NO: 1617279 - RNA, 19 nt, Artificial Sequence
  Description of Artificial Sequence: Synthetic oligonucleotide
gaucgaguucaaauacauc

SEQ ID NO: 1617280 - RNA, 19 nt, Artificial Sequence
  Description of Artificial Sequence: Synthetic oligonucleotide
uucugugucgugcgauuua

SEQ ID NO: 1617281 - RNA, 19 nt, Artificial Sequence
  Description of Artificial Sequence: Synthetic oligonucleotide
cgccauuuagacugaaacg

SEQ ID NO: 1617282 - RNA, 19 nt, Artificial Sequence
  Description of Artificial Sequence: Synthetic oligonucleotide
uguccacgguggcacuugc

SEQ ID NO: 1617283 - RNA, 19 nt, Artificial Sequence
  Description of Artificial Sequence: Synthetic oligonucleotide
uucgguuauuauugaugua

SEQ ID NO: 1617284 - RNA, 19 nt, Artificial Sequence
  Description of Artificial Sequence: Synthetic oligonucleotide
aggaucgaguucaaauaca

SEQ ID NO: 1617285 - RNA, 19 nt, Artificial Sequence
  Description of Artificial Sequence: Synthetic oligonucleotide
gacgcgugaccagcgaccc

SEQ ID NO: 1617286 - RNA, 19 nt, Artificial Sequence
  Description of Artificial Sequence: Synthetic oligonucleotide
gccauuuagacugaaacgu

SEQ ID NO: 1617287 - RNA, 19 nt, Artificial Sequence
  Description of Artificial Sequence: Synthetic oligonucleotide
gcuucgucauaacuuguac

SEQ ID NO: 1617288 - RNA, 19 nt, Artificial Sequence
  Description of Artificial Sequence: Synthetic oligonucleotide
agacugaaacguucauuua

SEQ ID NO: 1617289 - RNA, 19 nt, Artificial Sequence
  Description of Artificial Sequence: Synthetic oligonucleotide
cauaccaucugucaugcuu

SEQ ID NO: 1617290 - RNA, 19 nt, Artificial Sequence
  Description of Artificial Sequence: Synthetic oligonucleotide
gaaguccaaauucacuguu

SEQ ID NO: 1617291 - RNA, 19 nt, Artificial Sequence
  Description of Artificial Sequence: Synthetic oligonucleotide
gucaacaugcccacauauc

SEQ ID NO: 1617292 - RNA, 19 nt, Artificial Sequence
  Description of Artificial Sequence: Synthetic oligonucleotide
gccaauuagaccaggcaac

SEQ ID NO: 1617293 - RNA, 19 nt, Artificial Sequence
  Description of Artificial Sequence: Synthetic oligonucleotide
cuucgucauaacuuguacu

SEQ ID NO: 1617294 - RNA, 19 nt, Artificial Sequence
  Description of Artificial Sequence: Synthetic oligonucleotide
gacaucaaucaagguugug

SEQ ID NO: 1617295 - RNA, 19 nt, Artificial Sequence
  Description of Artificial Sequence: Synthetic oligonucleotide
uccugguuugaacccuguc

SEQ ID NO: 1617296 - RNA, 19 nt, Artificial Sequence
  Description of Artificial Sequence: Synthetic oligonucleotide
guaguaaaugaccuucauu

SEQ ID NO: 1617297 - RNA, 19 nt, Artificial Sequence
  Description of Artificial Sequence: Synthetic oligonucleotide
ucggccgggagcaggccgc

SEQ ID NO: 1617298 - RNA, 19 nt, Artificial Sequence
  Description of Artificial Sequence: Synthetic oligonucleotide
uggugacaucaaucaaggu

SEQ ID NO: 1617299 - RNA, 19 nt, Artificial Sequence
  Description of Artificial Sequence: Synthetic oligonucleotide
acccgcggccaagaggacc

SEQ ID NO: 1617300 - RNA, 19 nt, Artificial Sequence
  Description of Artificial Sequence: Synthetic oligonucleotide
acgguggcacuugcugugc

SEQ ID NO: 1617301 - RNA, 19 nt, Artificial Sequence
  Description of Artificial Sequence: Synthetic oligonucleotide
ugcccgcgaagcuccaggc

SEQ ID NO: 1617302 - RNA, 19 nt, Artificial Sequence
  Description of Artificial Sequence: Synthetic oligonucleotide
uccccagacuuguugccuc

SEQ ID NO: 1617303 - RNA, 19 nt, Artificial Sequence
  Description of Artificial Sequence: Synthetic oligonucleotide
augguguaccauggaacug

SEQ ID NO: 1617304 - RNA, 19 nt, Artificial Sequence
  Description of Artificial Sequence: Synthetic oligonucleotide
gcaggugacacccgcggcc

SEQ ID NO: 1617305 - RNA, 19 nt, Artificial Sequence
  Description of Artificial Sequence: Synthetic oligonucleotide
gacgucauauaugguugca

SEQ ID NO: 1617306 - RNA, 19 nt, Artificial Sequence
  Description of Artificial Sequence: Synthetic oligonucleotide
gggaauucacuauaauccu

SEQ ID NO: 1617307 - RNA, 19 nt, Artificial Sequence
  Description of Artificial Sequence: Synthetic oligonucleotide
ugacacccgcggccaagag

SEQ ID NO: 1617308 - RNA, 19 nt, Artificial Sequence
  Description of Artificial Sequence: Synthetic oligonucleotide
aguguauucuuggcuucgu

SEQ ID NO: 1617309 - RNA, 19 nt, Artificial Sequence
  Description of Artificial Sequence: Synthetic oligonucleotide
uaaccgccauuuagacuga

SEQ ID NO: 1617310 - RNA, 19 nt, Artificial Sequence
  Description of Artificial Sequence: Synthetic oligonucleotide
guguauucuuggcuucguc

SEQ ID NO: 1617311 - RNA, 19 nt, Artificial Sequence
  Description of Artificial Sequence: Synthetic oligonucleotide
ccugguuugaacccuguca

SEQ ID NO: 1617312 - RNA, 19 nt, Artificial Sequence
  Description of Artificial Sequence: Synthetic oligonucleotide
guuugaacccugucaacau

SEQ ID NO: 1617313 - RNA, 19 nt, Artificial Sequence
  Description of Artificial Sequence: Synthetic oligonucleotide
agccuaugcaagggucugg

SEQ ID NO: 1617314 - RNA, 19 nt, Artificial Sequence
  Description of Artificial Sequence: Synthetic oligonucleotide
auauccaacgaagcuugua

SEQ ID NO: 1617315 - RNA, 19 nt, Artificial Sequence
  Description of Artificial Sequence: Synthetic oligonucleotide
acgucauauaugguugcaa

SEQ ID NO: 1617316 - RNA, 19 nt, Artificial Sequence
  Description of Artificial Sequence: Synthetic oligonucleotide
gugaauacagucagcuugu

SEQ ID NO: 1617317 - RNA, 19 nt, Artificial Sequence
  Description of Artificial Sequence: Synthetic oligonucleotide
ucgugcgauuuagacacau

SEQ ID NO: 1617318 - RNA, 19 nt, Artificial Sequence
  Description of Artificial Sequence: Synthetic oligonucleotide
cccaggugaggacacuugg

SEQ ID NO: 1617319 - RNA, 19 nt, Artificial Sequence
  Description of Artificial Sequence: Synthetic oligonucleotide
ugggcccagcaucuuccca

SEQ ID NO: 1617320 - RNA, 19 nt, Artificial Sequence
  Description of Artificial Sequence: Synthetic oligonucleotide
agcgaccccgggccacacc

SEQ ID NO: 1617321 - RNA, 19 nt, Artificial Sequence
  Description of Artificial Sequence: Synthetic oligonucleotide
cugcggucaucaaggaaca

SEQ ID NO: 1617322 - RNA, 19 nt, Artificial Sequence
  Description of Artificial Sequence: Synthetic oligonucleotide
ggcaacuuuugguccacca

SEQ ID NO: 1617323 - RNA, 19 nt, Artificial Sequence
  Description of Artificial Sequence: Synthetic oligonucleotide
ccuucugaguuacuacuuc

SEQ ID NO: 1617324 - RNA, 19 nt, Artificial Sequence
  Description of Artificial Sequence: Synthetic oligonucleotide
acgcgugaccagcgacccc

SEQ ID NO: 1617325 - RNA, 19 nt, Artificial Sequence
  Description of Artificial Sequence: Synthetic oligonucleotide
augcguuuacuaaauucuu

SEQ ID NO: 1617326 - RNA, 19 nt, Artificial Sequence
  Description of Artificial Sequence: Synthetic oligonucleotide
auuccacccaagaaauauu

SEQ ID NO: 1617327 - RNA, 19 nt, Artificial Sequence
  Description of Artificial Sequence: Synthetic oligonucleotide
ccgaagguaacuuucaaau

SEQ ID NO: 1617328 - RNA, 19 nt, Artificial Sequence
  Description of Artificial Sequence: Synthetic oligonucleotide
guugcaaacgagagauucu

SEQ ID NO: 1617329 - RNA, 19 nt, Artificial Sequence
  Description of Artificial Sequence: Synthetic oligonucleotide
guaccauggaacugcuccu

SEQ ID NO: 1617330 - RNA, 19 nt, Artificial Sequence
  Description of Artificial Sequence: Synthetic oligonucleotide
cauuggugccuucugaguu

SEQ ID NO: 1617331 - RNA, 19 nt, Artificial Sequence
  Description of Artificial Sequence: Synthetic oligonucleotide
guucugcggucaucaagga

SEQ ID NO: 1617332 - RNA, 19 nt, Artificial Sequence
  Description of Artificial Sequence: Synthetic oligonucleotide
auaggacgucauauauggu

SEQ ID NO: 1617333 - RNA, 19 nt, Artificial Sequence
  Description of Artificial Sequence: Synthetic oligonucleotide
ugguugcaaacgagagauu

SEQ ID NO: 1617334 - RNA, 19 nt, Artificial Sequence
  Description of Artificial Sequence: Synthetic oligonucleotide
accagcgaccccgggccac

SEQ ID NO: 1617335 - RNA, 19 nt, Artificial Sequence
  Description of Artificial Sequence: Synthetic oligonucleotide
aggacaggcuuuguugaua

SEQ ID NO: 1617336 - RNA, 19 nt, Artificial Sequence
  Description of Artificial Sequence: Synthetic oligonucleotide
ggugguaaaucaagguuua

SEQ ID NO: 1617337 - RNA, 19 nt, Artificial Sequence
  Description of Artificial Sequence: Synthetic oligonucleotide
gcaagggucugggcaaucc

SEQ ID NO: 1617338 - RNA, 19 nt, Artificial Sequence
  Description of Artificial Sequence: Synthetic oligonucleotide
cauggaacugcuccucuau

SEQ ID NO: 1617339 - RNA, 19 nt, Artificial Sequence
  Description of Artificial Sequence: Synthetic oligonucleotide
ccuaaagguaucccaguaa

SEQ ID NO: 1617340 - RNA, 19 nt, Artificial Sequence
  Description of Artificial Sequence: Synthetic oligonucleotide
ggugccuucugaguuacua

SEQ ID NO: 1617341 - RNA, 19 nt, Artificial Sequence
  Description of Artificial Sequence: Synthetic oligonucleotide
guugugugcucaccagccu

SEQ ID NO: 1617342 - RNA, 19 nt, Artificial Sequence
  Description of Artificial Sequence: Synthetic oligonucleotide
ccuaugcaagggucugggc

SEQ ID NO: 1617343 - RNA, 19 nt, Artificial Sequence
  Description of Artificial Sequence: Synthetic oligonucleotide
caggcaacuuuugguccac

SEQ ID NO: 1617344 - RNA, 19 nt, Artificial Sequence
  Description of Artificial Sequence: Synthetic oligonucleotide
gaggacacuugggcccagc

SEQ ID NO: 1617345 - RNA, 19 nt, Artificial Sequence
  Description of Artificial Sequence: Synthetic oligonucleotide
ggaucgaguucaaauacau

SEQ ID NO: 1617346 - RNA, 19 nt, Artificial Sequence
  Description of Artificial Sequence: Synthetic oligonucleotide
cuguaacaacccaaguguu

SEQ ID NO: 1617347 - RNA, 19 nt, Artificial Sequence
  Description of Artificial Sequence: Synthetic oligonucleotide
gaccuucauuaucuucggu

SEQ ID NO: 1617348 - RNA, 19 nt, Artificial Sequence
  Description of Artificial Sequence: Synthetic oligonucleotide
gggugguaaaucaagguuu

SEQ ID NO: 1617349 - RNA, 19 nt, Artificial Sequence
  Description of Artificial Sequence: Synthetic oligonucleotide
gcucaccagccuaugcaag

SEQ ID NO: 1617350 - RNA, 19 nt, Artificial Sequence
  Description of Artificial Sequence: Synthetic oligonucleotide
uggggccauuagcuugguc

SEQ ID NO: 1617351 - RNA, 19 nt, Artificial Sequence
  Description of Artificial Sequence: Synthetic oligonucleotide
cugugucgugcgauuuaga

SEQ ID NO: 1617352 - RNA, 19 nt, Artificial Sequence
  Description of Artificial Sequence: Synthetic oligonucleotide
gaggacaggcuuuguugau

SEQ ID NO: 1617353 - RNA, 19 nt, Artificial Sequence
  Description of Artificial Sequence: Synthetic oligonucleotide
cgguuauuauugauguaca

SEQ ID NO: 1617354 - RNA, 19 nt, Artificial Sequence
  Description of Artificial Sequence: Synthetic oligonucleotide
gcccgcgaagcuccaggcg

SEQ ID NO: 1617355 - RNA, 19 nt, Artificial Sequence
  Description of Artificial Sequence: Synthetic oligonucleotide
gccauuagcuuggucuuga

SEQ ID NO: 1617356 - RNA, 19 nt, Artificial Sequence
  Description of Artificial Sequence: Synthetic oligonucleotide
gaaggaggauaaguugauu

SEQ ID NO: 1617357 - RNA, 19 nt, Artificial Sequence
  Description of Artificial Sequence: Synthetic oligonucleotide
aaccgccauuuagacugaa

SEQ ID NO: 1617358 - RNA, 19 nt, Artificial Sequence
  Description of Artificial Sequence: Synthetic oligonucleotide
cgacgcgugaccagcgacc

SEQ ID NO: 1617359 - RNA, 19 nt, Artificial Sequence
  Description of Artificial Sequence: Synthetic oligonucleotide
uguugccucccaggauaaa

SEQ ID NO: 1617360 - RNA, 19 nt, Artificial Sequence
  Description of Artificial Sequence: Synthetic oligonucleotide
cauuagcuuggucuugauu

SEQ ID NO: 1617361 - RNA, 19 nt, Artificial Sequence
  Description of Artificial Sequence: Synthetic oligonucleotide
gccgggagcaggccgcacc

SEQ ID NO: 1617362 - RNA, 19 nt, Artificial Sequence
  Description of Artificial Sequence: Synthetic oligonucleotide
ugcggucaucaaggaacaa

SEQ ID NO: 1617363 - RNA, 19 nt, Artificial Sequence
  Description of Artificial Sequence: Synthetic oligonucleotide
caggugacacccgcggcca

SEQ ID NO: 1617364 - RNA, 19 nt, Artificial Sequence
  Description of Artificial Sequence: Synthetic oligonucleotide
cccgaagguaacuuucaaa

SEQ ID NO: 1617365 - RNA, 19 nt, Artificial Sequence
  Description of Artificial Sequence: Synthetic oligonucleotide
cuucccaguugcccgcgaa

SEQ ID NO: 1617366 - RNA, 19 nt, Artificial Sequence
  Description of Artificial Sequence: Synthetic oligonucleotide
accgccauuuagacugaaa

SEQ ID NO: 1617367 - RNA, 19 nt, Artificial Sequence
  Description of Artificial Sequence: Synthetic oligonucleotide
gugacacccgcggccaaga

SEQ ID NO: 1617368 - RNA, 19 nt, Artificial Sequence
  Description of Artificial Sequence: Synthetic oligonucleotide
caaucccgaagguaacuuu

SEQ ID NO: 1617369 - RNA, 19 nt, Artificial Sequence
  Description of Artificial Sequence: Synthetic oligonucleotide
cccgcgaagcuccaggcga

SEQ ID NO: 1617370 - RNA, 19 nt, Artificial Sequence
  Description of Artificial Sequence: Synthetic oligonucleotide
cugggcaaucccgaaggua

SEQ ID NO: 1617371 - RNA, 19 nt, Artificial Sequence
  Description of Artificial Sequence: Synthetic oligonucleotide
cauauccaacgaagcuugu

SEQ ID NO: 1617372 - RNA, 19 nt, Artificial Sequence
  Description of Artificial Sequence: Synthetic oligonucleotide
caccggucauaauugguuu

SEQ ID NO: 1617373 - RNA, 19 nt, Artificial Sequence
  Description of Artificial Sequence: Synthetic oligonucleotide
ccucuauagguugguccag

SEQ ID NO: 1617374 - RNA, 19 nt, Artificial Sequence
  Description of Artificial Sequence: Synthetic oligonucleotide
uccucaccauuggugccuu

SEQ ID NO: 1617375 - RNA, 19 nt, Artificial Sequence
  Description of Artificial Sequence: Synthetic oligonucleotide
ccgggagcaggccgcaccc

SEQ ID NO: 1617376 - RNA, 19 nt, Artificial Sequence
  Description of Artificial Sequence: Synthetic oligonucleotide
ggcuucgucauaacuugua

SEQ ID NO: 1617377 - RNA, 19 nt, Artificial Sequence
  Description of Artificial Sequence: Synthetic oligonucleotide
caucuuuuguaggguggua

SEQ ID NO: 1617378 - RNA, 19 nt, Artificial Sequence
  Description of Artificial Sequence: Synthetic oligonucleotide
gguuuguaccacauaccau

SEQ ID NO: 1617379 - RNA, 19 nt, Artificial Sequence
  Description of Artificial Sequence: Synthetic oligonucleotide
cgugcgauuuagacacauc

SEQ ID NO: 1617380 - RNA, 19 nt, Artificial Sequence
  Description of Artificial Sequence: Synthetic oligonucleotide
ccgacgcgugaccagcgac

SEQ ID NO: 1617381 - RNA, 19 nt, Artificial Sequence
  Description of Artificial Sequence: Synthetic oligonucleotide
cugucaugcuuaggaucga

SEQ ID NO: 1617382 - RNA, 19 nt, Artificial Sequence
  Description of Artificial Sequence: Synthetic oligonucleotide
gggcaaucccgaagguaac

SEQ ID NO: 1617383 - RNA, 19 nt, Artificial Sequence
  Description of Artificial Sequence: Synthetic oligonucleotide
ccaauuagaccaggcaacu

SEQ ID NO: 1617384 - RNA, 19 nt, Artificial Sequence
  Description of Artificial Sequence: Synthetic oligonucleotide
gugauaaacccgacccauu

SEQ ID NO: 1617385 - RNA, 19 nt, Artificial Sequence
  Description of Artificial Sequence: Synthetic oligonucleotide
caacccaaguguuguuauu

SEQ ID NO: 1617386 - RNA, 19 nt, Artificial Sequence
  Description of Artificial Sequence: Synthetic oligonucleotide
ccgcgaagcuccaggcgac

SEQ ID NO: 1617387 - RNA, 19 nt, Artificial Sequence
  Description of Artificial Sequence: Synthetic oligonucleotide
ccauuuagacugaaacguu

SEQ ID NO: 1617388 - RNA, 19 nt, Artificial Sequence
  Description of Artificial Sequence: Synthetic oligonucleotide
ggacacuugggcccagcau

SEQ ID NO: 1617389 - RNA, 19 nt, Artificial Sequence
  Description of Artificial Sequence: Synthetic oligonucleotide
ccaacgaagcuuguagccu

SEQ ID NO: 1617390 - RNA, 19 nt, Artificial Sequence
  Description of Artificial Sequence: Synthetic oligonucleotide
ccugggcgcaggugacacc

SEQ ID NO: 1617391 - RNA, 19 nt, Artificial Sequence
  Description of Artificial Sequence: Synthetic oligonucleotide
caauuagaccaggcaacuu

SEQ ID NO: 1617392 - RNA, 19 nt, Artificial Sequence
  Description of Artificial Sequence: Synthetic oligonucleotide
ccaccggucauaauugguu

SEQ ID NO: 1617393 - RNA, 19 nt, Artificial Sequence
  Description of Artificial Sequence: Synthetic oligonucleotide
aguugcccgcgaagcucca

SEQ ID NO: 1617394 - RNA, 19 nt, Artificial Sequence
  Description of Artificial Sequence: Synthetic oligonucleotide
gcuuaggaucgaguucaaa

SEQ ID NO: 1617395 - RNA, 19 nt, Artificial Sequence
  Description of Artificial Sequence: Synthetic oligonucleotide
cacccgcggccaagaggac

SEQ ID NO: 1617396 - RNA, 19 nt, Artificial Sequence
  Description of Artificial Sequence: Synthetic oligonucleotide
ccauuggugccuucugagu

SEQ ID NO: 1617397 - RNA, 19 nt, Artificial Sequence
  Description of Artificial Sequence: Synthetic oligonucleotide
gguguaccauggaacugcu

SEQ ID NO: 1617398 - RNA, 19 nt, Artificial Sequence
  Description of Artificial Sequence: Synthetic oligonucleotide
gucgugcgauuuagacaca

SEQ ID NO: 1617399 - RNA, 19 nt, Artificial Sequence
  Description of Artificial Sequence: Synthetic oligonucleotide
cgcaggugacacccgcggc

SEQ ID NO: 1617400 - RNA, 19 nt, Artificial Sequence
  Description of Artificial Sequence: Synthetic oligonucleotide
cccaaauaaccgccauuua

SEQ ID NO: 1617401 - RNA, 19 nt, Artificial Sequence
  Description of Artificial Sequence: Synthetic oligonucleotide
gcaaucccgaagguaacuu

SEQ ID NO: 1617402 - RNA, 19 nt, Artificial Sequence
  Description of Artificial Sequence: Synthetic oligonucleotide
gcgugaccagcgaccccgg

SEQ ID NO: 1617403 - RNA, 19 nt, Artificial Sequence
  Description of Artificial Sequence: Synthetic oligonucleotide
ccuugaaaacagucuuguu

SEQ ID NO: 1617404 - RNA, 19 nt, Artificial Sequence
  Description of Artificial Sequence: Synthetic oligonucleotide
cagcgaccccgggccacac

SEQ ID NO: 1617405 - RNA, 19 nt, Artificial Sequence
  Description of Artificial Sequence: Synthetic oligonucleotide
guccacgguggcacuugcu

SEQ ID NO: 1617406 - RNA, 19 nt, Artificial Sequence
  Description of Artificial Sequence: Synthetic oligonucleotide
cccgacgcgugaccagcga

SEQ ID NO: 1617407 - RNA, 19 nt, Artificial Sequence
  Description of Artificial Sequence: Synthetic oligonucleotide
ccauuagcuuggucuugau

SEQ ID NO: 1617408 - RNA, 19 nt, Artificial Sequence
  Description of Artificial Sequence: Synthetic oligonucleotide
ccagcgaccccgggccaca

SEQ ID NO: 1617409 - RNA, 19 nt, Artificial Sequence
  Description of Artificial Sequence: Synthetic oligonucleotide
cggcggggaccaccucggc

SEQ ID NO: 1617410 - RNA, 19 nt, Artificial Sequence
  Description of Artificial Sequence: Synthetic oligonucleotide
aucaugaauaccuuguugc

SEQ ID NO: 1617411 - RNA, 19 nt, Artificial Sequence
  Description of Artificial Sequence: Synthetic oligonucleotide
acugaacucgcuuuuaccc

SEQ ID NO: 1617412 - RNA, 19 nt, Artificial Sequence
  Description of Artificial Sequence: Synthetic oligonucleotide
aauaccuuguugcagccag

SEQ ID NO: 1617413 - RNA, 19 nt, Artificial Sequence
  Description of Artificial Sequence: Synthetic oligonucleotide
uguuucuagccuuaaauug

SEQ ID NO: 1617414 - RNA, 19 nt, Artificial Sequence
  Description of Artificial Sequence: Synthetic oligonucleotide
uccauaggaaaauaaacug

SEQ ID NO: 1617415 - RNA, 19 nt, Artificial Sequence
  Description of Artificial Sequence: Synthetic oligonucleotide
aagugaggaacauuaaugu

SEQ ID NO: 1617416 - RNA, 19 nt, Artificial Sequence
  Description of Artificial Sequence: Synthetic oligonucleotide
  modified_base (3)..(3): a, c, u, g, unknown or other
ucngaaaggucacugaacu

SEQ ID NO: 1617417 - RNA, 19 nt, Artificial Sequence
  Description of Artificial Sequence: Synthetic oligonucleotide
uguaccauggacauaugca

SEQ ID NO: 1617418 - RNA, 19 nt, Artificial Sequence
  Description of Artificial Sequence: Synthetic oligonucleotide
ucuuguuacacuagaaagu

SEQ ID NO: 1617419 - RNA, 19 nt, Artificial Sequence
  Description of Artificial Sequence: Synthetic oligonucleotide
uguccauaggaaaauaaac

SEQ ID NO: 1617420 - RNA, 19 nt, Artificial Sequence
  Description of Artificial Sequence: Synthetic oligonucleotide
aaccucacgucacaccugc

SEQ ID NO: 1617421 - RNA, 19 nt, Artificial Sequence
  Description of Artificial Sequence: Synthetic oligonucleotide
uuauuauucauaauuuguu

SEQ ID NO: 1617422 - RNA, 19 nt, Artificial Sequence
  Description of Artificial Sequence: Synthetic oligonucleotide
acagauguaauugcguacc

SEQ ID NO: 1617423 - RNA, 19 nt, Artificial Sequence
  Description of Artificial Sequence: Synthetic oligonucleotide
aauguguuucuucaugcca

SEQ ID NO: 1617424 - RNA, 19 nt, Artificial Sequence
  Description of Artificial Sequence: Synthetic oligonucleotide
auuaaugucuuuaaaccuc

SEQ ID NO: 1617425 - RNA, 19 nt, Artificial Sequence
  Description of Artificial Sequence: Synthetic oligonucleotide
aauugcguaccucugugug

SEQ ID NO: 1617426 - RNA, 19 nt, Artificial Sequence
  Description of Artificial Sequence: Synthetic oligonucleotide
uaauuuauugcaagcauua

SEQ ID NO: 1617427 - RNA, 19 nt, Artificial Sequence
  Description of Artificial Sequence: Synthetic oligonucleotide
aagcaaaccaugccagugg

SEQ ID NO: 1617428 - RNA, 19 nt, Artificial Sequence
  Description of Artificial Sequence: Synthetic oligonucleotide
uaaaccucacgucacaccu

SEQ ID NO: 1617429 - RNA, 19 nt, Artificial Sequence
  Description of Artificial Sequence: Synthetic oligonucleotide
ugaagauggaaccugcuuc

SEQ ID NO: 1617430 - RNA, 19 nt, Artificial Sequence
  Description of Artificial Sequence: Synthetic oligonucleotide
uuaaugucuuuaaaccuca

SEQ ID NO: 1617431 - RNA, 19 nt, Artificial Sequence
  Description of Artificial Sequence: Synthetic oligonucleotide
aauuuauugcaagcauuac

SEQ ID NO: 1617432 - RNA, 19 nt, Artificial Sequence
  Description of Artificial Sequence: Synthetic oligonucleotide
uuuuacccgaucauccgag

SEQ ID NO: 1617433 - RNA, 19 nt, Artificial Sequence
  Description of Artificial Sequence: Synthetic oligonucleotide
uaucggucgaucaugaaua

SEQ ID NO: 1617434 - RNA, 19 nt, Artificial Sequence
  Description of Artificial Sequence: Synthetic oligonucleotide
aaauaaacugcugguacca

SEQ ID NO: 1617435 - RNA, 19 nt, Artificial Sequence
  Description of Artificial Sequence: Synthetic oligonucleotide
gacuguacccaucucagug

SEQ ID NO: 1617436 - RNA, 19 nt, Artificial Sequence
  Description of Artificial Sequence: Synthetic oligonucleotide
uaccauggacauaugcacg

SEQ ID NO: 1617437 - RNA, 19 nt, Artificial Sequence
  Description of Artificial Sequence: Synthetic oligonucleotide
gaguauaggggccuauucc

SEQ ID NO: 1617438 - RNA, 19 nt, Artificial Sequence
  Description of Artificial Sequence: Synthetic oligonucleotide
uuaaauugcucagugucca

SEQ ID NO: 1617439 - RNA, 19 nt, Artificial Sequence
  Description of Artificial Sequence: Synthetic oligonucleotide
uucgucacagauguaauug

SEQ ID NO: 1617440 - RNA, 19 nt, Artificial Sequence
  Description of Artificial Sequence: Synthetic oligonucleotide
aguauaggggccuauucca

SEQ ID NO: 1617441 - RNA, 19 nt, Artificial Sequence
  Description of Artificial Sequence: Synthetic oligonucleotide
cagguugaaguacacaccc

SEQ ID NO: 1617442 - RNA, 19 nt, Artificial Sequence
  Description of Artificial Sequence: Synthetic oligonucleotide
uguaauugcguaccucugu

SEQ ID NO: 1617443 - RNA, 19 nt, Artificial Sequence
  Description of Artificial Sequence: Synthetic oligonucleotide
ucccgagugacgcaucugg

SEQ ID NO: 1617444 - RNA, 19 nt, Artificial Sequence
  Description of Artificial Sequence: Synthetic oligonucleotide
ugugggccuuuucaaaccg

SEQ ID NO: 1617445 - RNA, 19 nt, Artificial Sequence
  Description of Artificial Sequence: Synthetic oligonucleotide
accugaaguucucagguag

SEQ ID NO: 1617446 - RNA, 19 nt, Artificial Sequence
  Description of Artificial Sequence: Synthetic oligonucleotide
ugaaguacacacccucgcc

SEQ ID NO: 1617447 - RNA, 19 nt, Artificial Sequence
  Description of Artificial Sequence: Synthetic oligonucleotide
aauaaacugcugguaccac

SEQ ID NO: 1617448 - RNA, 19 nt, Artificial Sequence
  Description of Artificial Sequence: Synthetic oligonucleotide
guuucuagccuuaaauugc

SEQ ID NO: 1617449 - RNA, 19 nt, Artificial Sequence
  Description of Artificial Sequence: Synthetic oligonucleotide
aacuuggguuccucuggcc

SEQ ID NO: 1617450 - RNA, 19 nt, Artificial Sequence
  Description of Artificial Sequence: Synthetic oligonucleotide
guaggcucaggcuucacag

SEQ ID NO: 1617451 - RNA, 19 nt, Artificial Sequence
  Description of Artificial Sequence: Synthetic oligonucleotide
uauaggggccuauuccagg

SEQ ID NO: 1617452 - RNA, 19 nt, Artificial Sequence
  Description of Artificial Sequence: Synthetic oligonucleotide
uuaaaccucacgucacacc

SEQ ID NO: 1617453 - RNA, 19 nt, Artificial Sequence
  Description of Artificial Sequence: Synthetic oligonucleotide
cuagccuuaaauugcucag

SEQ ID NO: 1617454 - RNA, 19 nt, Artificial Sequence
  Description of Artificial Sequence: Synthetic oligonucleotide
uuucuagccuuaaauugcu

SEQ ID NO: 1617455 - RNA, 19 nt, Artificial Sequence
  Description of Artificial Sequence: Synthetic oligonucleotide
auaauuuguuucuagccuu

SEQ ID NO: 1617456 - RNA, 19 nt, Artificial Sequence
  Description of Artificial Sequence: Synthetic oligonucleotide
gauguaauugcguaccucu

SEQ ID NO: 1617457 - RNA, 19 nt, Artificial Sequence
  Description of Artificial Sequence: Synthetic oligonucleotide
uccgacacauggcugcugg

SEQ ID NO: 1617458 - RNA, 19 nt, Artificial Sequence
  Description of Artificial Sequence: Synthetic oligonucleotide
uacauggaguucuuguuac

SEQ ID NO: 1617459 - RNA, 19 nt, Artificial Sequence
  Description of Artificial Sequence: Synthetic oligonucleotide
uggucucagauccaacuug

SEQ ID NO: 1617460 - RNA, 19 nt, Artificial Sequence
  Description of Artificial Sequence: Synthetic oligonucleotide
auugcguaccucugugugg

SEQ ID NO: 1617461 - RNA, 19 nt, Artificial Sequence
  Description of Artificial Sequence: Synthetic oligonucleotide
ucaugugauacuugaggga

SEQ ID NO: 1617462 - RNA, 19 nt, Artificial Sequence
  Description of Artificial Sequence: Synthetic oligonucleotide
cugaacucgcuuuuacccg

SEQ ID NO: 1617463 - RNA, 19 nt, Artificial Sequence
  Description of Artificial Sequence: Synthetic oligonucleotide
aggggccuauuccaggucc

SEQ ID NO: 1617464 - RNA, 19 nt, Artificial Sequence
  Description of Artificial Sequence: Synthetic oligonucleotide
agcaaaccaugccaguggg

SEQ ID NO: 1617465 - RNA, 19 nt, Artificial Sequence
  Description of Artificial Sequence: Synthetic oligonucleotide
ugcagcaaugggcccaacg

SEQ ID NO: 1617466 - RNA, 19 nt, Artificial Sequence
  Description of Artificial Sequence: Synthetic oligonucleotide
uuacauggaguucuuguua

SEQ ID NO: 1617467 - RNA, 19 nt, Artificial Sequence
  Description of Artificial Sequence: Synthetic oligonucleotide
aaguacacacccucgcccu

SEQ ID NO: 1617468 - RNA, 19 nt, Artificial Sequence
  Description of Artificial Sequence: Synthetic oligonucleotide
uggaaccugcuucucaccc

SEQ ID NO: 1617469 - RNA, 19 nt, Artificial Sequence
  Description of Artificial Sequence: Synthetic oligonucleotide
cugacuguacccaucucag

SEQ ID NO: 1617470 - RNA, 19 nt, Artificial Sequence
  Description of Artificial Sequence: Synthetic oligonucleotide
uuauugcaagcauuacaug

SEQ ID NO: 1617471 - RNA, 19 nt, Artificial Sequence
  Description of Artificial Sequence: Synthetic oligonucleotide
uuguuucuagccuuaaauu

SEQ ID NO: 1617472 - RNA, 19 nt, Artificial Sequence
  Description of Artificial Sequence: Synthetic oligonucleotide
guaauugcguaccucugug

SEQ ID NO: 1617473 - RNA, 19 nt, Artificial Sequence
  Description of Artificial Sequence: Synthetic oligonucleotide
uuaccagagaccuucuuuu

SEQ ID NO: 1617474 - RNA, 19 nt, Artificial Sequence
  Description of Artificial Sequence: Synthetic oligonucleotide
uggguaaggcucaaaggac

SEQ ID NO: 1617475 - RNA, 19 nt, Artificial Sequence
  Description of Artificial Sequence: Synthetic oligonucleotide
agcaaugggcccaacgggc

SEQ ID NO: 1617476 - RNA, 19 nt, Artificial Sequence
  Description of Artificial Sequence: Synthetic oligonucleotide
  modified_base (4)..(4): a, c, u, g, unknown or other
cucngaaaggucacugaac

SEQ ID NO: 1617477 - RNA, 19 nt, Artificial Sequence
  Description of Artificial Sequence: Synthetic oligonucleotide
ugaguauaggggccuauuc

SEQ ID NO: 1617478 - RNA, 19 nt, Artificial Sequence
  Description of Artificial Sequence: Synthetic oligonucleotide
ucacagauguaauugcgua

SEQ ID NO: 1617479 - RNA, 19 nt, Artificial Sequence
  Description of Artificial Sequence: Synthetic oligonucleotide
auaaacugcugguaccaca

SEQ ID NO: 1617480 - RNA, 19 nt, Artificial Sequence
  Description of Artificial Sequence: Synthetic oligonucleotide
ucgucacagauguaauugc

SEQ ID NO: 1617481 - RNA, 19 nt, Artificial Sequence
  Description of Artificial Sequence: Synthetic oligonucleotide
ucuguucugacuguaccca

SEQ ID NO: 1617482 - RNA, 19 nt, Artificial Sequence
  Description of Artificial Sequence: Synthetic oligonucleotide
aaaccgacggccacacugg

SEQ ID NO: 1617483 - RNA, 19 nt, Artificial Sequence
  Description of Artificial Sequence: Synthetic oligonucleotide
uucgcucuucuuaccagag

SEQ ID NO: 1617484 - RNA, 19 nt, Artificial Sequence
  Description of Artificial Sequence: Synthetic oligonucleotide
cacacccucgcccugagag

SEQ ID NO: 1617485 - RNA, 19 nt, Artificial Sequence
  Description of Artificial Sequence: Synthetic oligonucleotide
ugaauaccuuguugcagcc

SEQ ID NO: 1617486 - RNA, 19 nt, Artificial Sequence
  Description of Artificial Sequence: Synthetic oligonucleotide
uguggaugagcuucacaug

SEQ ID NO: 1617487 - RNA, 19 nt, Artificial Sequence
  Description of Artificial Sequence: Synthetic oligonucleotide
acaggcgaaguccagcuca

SEQ ID NO: 1617488 - RNA, 19 nt, Artificial Sequence
  Description of Artificial Sequence: Synthetic oligonucleotide
ugaacucgcuuuuacccga

SEQ ID NO: 1617489 - RNA, 19 nt, Artificial Sequence
  Description of Artificial Sequence: Synthetic oligonucleotide
uuuacccgaucauccgagg

SEQ ID NO: 1617490 - RNA, 19 nt, Artificial Sequence
  Description of Artificial Sequence: Synthetic oligonucleotide
ugauacuugagggaugcuc

SEQ ID NO: 1617491 - RNA, 19 nt, Artificial Sequence
  Description of Artificial Sequence: Synthetic oligonucleotide
caugaauaccuuguugcag

SEQ ID NO: 1617492 - RNA, 19 nt, Artificial Sequence
  Description of Artificial Sequence: Synthetic oligonucleotide
uugauugcucuaguuagga

SEQ ID NO: 1617493 - RNA, 19 nt, Artificial Sequence
  Description of Artificial Sequence: Synthetic oligonucleotide
ugggagccaaguuuggcug

SEQ ID NO: 1617494 - RNA, 19 nt, Artificial Sequence
  Description of Artificial Sequence: Synthetic oligonucleotide
accauggacauaugcacgu

SEQ ID NO: 1617495 - RNA, 19 nt, Artificial Sequence
  Description of Artificial Sequence: Synthetic oligonucleotide
uuucgcucuucuuaccaga

SEQ ID NO: 1617496 - RNA, 19 nt, Artificial Sequence
  Description of Artificial Sequence: Synthetic oligonucleotide
uuuaaaccucacgucacac

SEQ ID NO: 1617497 - RNA, 19 nt, Artificial Sequence
  Description of Artificial Sequence: Synthetic oligonucleotide
agaggauguaccauggaca

SEQ ID NO: 1617498 - RNA, 19 nt, Artificial Sequence
  Description of Artificial Sequence: Synthetic oligonucleotide
guucuuguuacacuagaaa

SEQ ID NO: 1617499 - RNA, 19 nt, Artificial Sequence
  Description of Artificial Sequence: Synthetic oligonucleotide
cacagauguaauugcguac

SEQ ID NO: 1617500 - RNA, 19 nt, Artificial Sequence
  Description of Artificial Sequence: Synthetic oligonucleotide
ucacugaacucgcuuuuac

SEQ ID NO: 1617501 - RNA, 19 nt, Artificial Sequence
  Description of Artificial Sequence: Synthetic oligonucleotide
ucucagugcaccagcuggc

SEQ ID NO: 1617502 - RNA, 19 nt, Artificial Sequence
  Description of Artificial Sequence: Synthetic oligonucleotide
aucggucgaucaugaauac

SEQ ID NO: 1617503 - RNA, 19 nt, Artificial Sequence
  Description of Artificial Sequence: Synthetic oligonucleotide
ugagcuucacaugucgcug

SEQ ID NO: 1617504 - RNA, 19 nt, Artificial Sequence
  Description of Artificial Sequence: Synthetic oligonucleotide
auugcaagcauuacaugga

SEQ ID NO: 1617505 - RNA, 19 nt, Artificial Sequence
  Description of Artificial Sequence: Synthetic oligonucleotide
ugagcaacgcccuccugca

SEQ ID NO: 1617506 - RNA, 19 nt, Artificial Sequence
  Description of Artificial Sequence: Synthetic oligonucleotide
cacugaacucgcuuuuacc

SEQ ID NO: 1617507 - RNA, 19 nt, Artificial Sequence
  Description of Artificial Sequence: Synthetic oligonucleotide
acucgcuuuuacccgauca

SEQ ID NO: 1617508 - RNA, 19 nt, Artificial Sequence
  Description of Artificial Sequence: Synthetic oligonucleotide
caagggcaggacuuugucc

SEQ ID NO: 1617509 - RNA, 19 nt, Artificial Sequence
  Description of Artificial Sequence: Synthetic oligonucleotide
agauguaauugcguaccuc

SEQ ID NO: 1617510 - RNA, 19 nt, Artificial Sequence
  Description of Artificial Sequence: Synthetic oligonucleotide
ugguggacaagaaggugcu

SEQ ID NO: 1617511 - RNA, 19 nt, Artificial Sequence
  Description of Artificial Sequence: Synthetic oligonucleotide
uuacccgaucauccgaggu

SEQ ID NO: 1617512 - RNA, 19 nt, Artificial Sequence
  Description of Artificial Sequence: Synthetic oligonucleotide
gucgaucaugaauaccuug

SEQ ID NO: 1617513 - RNA, 19 nt, Artificial Sequence
  Description of Artificial Sequence: Synthetic oligonucleotide
uguguggaugagcuucaca

SEQ ID NO: 1617514 - RNA, 19 nt, Artificial Sequence
  Description of Artificial Sequence: Synthetic oligonucleotide
gaaaggucacugaacucgc

SEQ ID NO: 1617515 - RNA, 19 nt, Artificial Sequence
  Description of Artificial Sequence: Synthetic oligonucleotide
auugcucaguguccauagg

SEQ ID NO: 1617516 - RNA, 19 nt, Artificial Sequence
  Description of Artificial Sequence: Synthetic oligonucleotide
cuuucgcucuucuuaccag

SEQ ID NO: 1617517 - RNA, 19 nt, Artificial Sequence
  Description of Artificial Sequence: Synthetic oligonucleotide
gaguucuuguuacacuaga

SEQ ID NO: 1617518 - RNA, 19 nt, Artificial Sequence
  Description of Artificial Sequence: Synthetic oligonucleotide
agugcuccaccugaaguuc

SEQ ID NO: 1617519 - RNA, 19 nt, Artificial Sequence
  Description of Artificial Sequence: Synthetic oligonucleotide
ggacauaugcacguugagg

SEQ ID NO: 1617520 - RNA, 19 nt, Artificial Sequence
  Description of Artificial Sequence: Synthetic oligonucleotide
ugcaagcauuacauggagu

SEQ ID NO: 1617521 - RNA, 19 nt, Artificial Sequence
  Description of Artificial Sequence: Synthetic oligonucleotide
agggaugcucguugccugc

SEQ ID NO: 1617522 - RNA, 19 nt, Artificial Sequence
  Description of Artificial Sequence: Synthetic oligonucleotide
cagcaaugggcccaacggg

SEQ ID NO: 1617523 - RNA, 19 nt, Artificial Sequence
  Description of Artificial Sequence: Synthetic oligonucleotide
uaauugcguaccucugugu

SEQ ID NO: 1617524 - RNA, 19 nt, Artificial Sequence
  Description of Artificial Sequence: Synthetic oligonucleotide
  modified_base (7)..(7): a, c, u, g, unknown or other
ucccucngaaaggucacug

SEQ ID NO: 1617525 - RNA, 19 nt, Artificial Sequence
  Description of Artificial Sequence: Synthetic oligonucleotide
ugcccuccgacacauggcu

SEQ ID NO: 1617526 - RNA, 19 nt, Artificial Sequence
  Description of Artificial Sequence: Synthetic oligonucleotide
caggacuuuguccuggguc

SEQ ID NO: 1617527 - RNA, 19 nt, Artificial Sequence
  Description of Artificial Sequence: Synthetic oligonucleotide
guacccaucucagugcacc

SEQ ID NO: 1617528 - RNA, 19 nt, Artificial Sequence
  Description of Artificial Sequence: Synthetic oligonucleotide
ggcucaaaggacucauccg

SEQ ID NO: 1617529 - RNA, 19 nt, Artificial Sequence
  Description of Artificial Sequence: Synthetic oligonucleotide
aagaugcccagugcuccac

SEQ ID NO: 1617530 - RNA, 19 nt, Artificial Sequence
  Description of Artificial Sequence: Synthetic oligonucleotide
  modified_base (9)..(9): a, c, u, g, unknown or other
ucucccucngaaaggucac

SEQ ID NO: 1617531 - RNA, 19 nt, Artificial Sequence
  Description of Artificial Sequence: Synthetic oligonucleotide
ucacgucacaccugcugag

SEQ ID NO: 1617532 - RNA, 19 nt, Artificial Sequence
  Description of Artificial Sequence: Synthetic oligonucleotide
gagaggugcccuccgacac

SEQ ID NO: 1617533 - RNA, 19 nt, Artificial Sequence
  Description of Artificial Sequence: Synthetic oligonucleotide
aacucgcuuuuacccgauc

SEQ ID NO: 1617534 - RNA, 19 nt, Artificial Sequence
  Description of Artificial Sequence: Synthetic oligonucleotide
aguggcuuggcucccgagu

SEQ ID NO: 1617535 - RNA, 19 nt, Artificial Sequence
  Description of Artificial Sequence: Synthetic oligonucleotide
uugcguaccucugugugga

SEQ ID NO: 1617536 - RNA, 19 nt, Artificial Sequence
  Description of Artificial Sequence: Synthetic oligonucleotide
caugucgcugcagguaucg

SEQ ID NO: 1617537 - RNA, 19 nt, Artificial Sequence
  Description of Artificial Sequence: Synthetic oligonucleotide
auugcucuaguuaggaaaa

SEQ ID NO: 1617538 - RNA, 19 nt, Artificial Sequence
  Description of Artificial Sequence: Synthetic oligonucleotide
ucuccaugugagugcagca

SEQ ID NO: 1617539 - RNA, 19 nt, Artificial Sequence
  Description of Artificial Sequence: Synthetic oligonucleotide
caaaggacucauccgagga

SEQ ID NO: 1617540 - RNA, 19 nt, Artificial Sequence
  Description of Artificial Sequence: Synthetic oligonucleotide
uuucaaaccgacggccaca

SEQ ID NO: 1617541 - RNA, 19 nt, Artificial Sequence
  Description of Artificial Sequence: Synthetic oligonucleotide
aaauugcucaguguccaua

SEQ ID NO: 1617542 - RNA, 19 nt, Artificial Sequence
  Description of Artificial Sequence: Synthetic oligonucleotide
cucgcccugagagaggugc

SEQ ID NO: 1617543 - RNA, 19 nt, Artificial Sequence
  Description of Artificial Sequence: Synthetic oligonucleotide
ugacgcaucugguggacaa

SEQ ID NO: 1617544 - RNA, 19 nt, Artificial Sequence
  Description of Artificial Sequence: Synthetic oligonucleotide
aaaccaugccaguggggaa

SEQ ID NO: 1617545 - RNA, 19 nt, Artificial Sequence
  Description of Artificial Sequence: Synthetic oligonucleotide
agcaacgcccuccugcaga

SEQ ID NO: 1617546 - RNA, 19 nt, Artificial Sequence
  Description of Artificial Sequence: Synthetic oligonucleotide
ucauccgaggacugugggu

SEQ ID NO: 1617547 - RNA, 19 nt, Artificial Sequence
  Description of Artificial Sequence: Synthetic oligonucleotide
ugauugcucuaguuaggaa

SEQ ID NO: 1617548 - RNA, 19 nt, Artificial Sequence
  Description of Artificial Sequence: Synthetic oligonucleotide
ugcuuccaagggcaggacu

SEQ ID NO: 1617549 - RNA, 19 nt, Artificial Sequence
  Description of Artificial Sequence: Synthetic oligonucleotide
gacucauccgaggacugug

SEQ ID NO: 1617550 - RNA, 19 nt, Artificial Sequence
  Description of Artificial Sequence: Synthetic oligonucleotide
agaugagcaacgcccuccu

SEQ ID NO: 1617551 - RNA, 19 nt, Artificial Sequence
  Description of Artificial Sequence: Synthetic oligonucleotide
cuuuaaaccucacgucaca

SEQ ID NO: 1617552 - RNA, 19 nt, Artificial Sequence
  Description of Artificial Sequence: Synthetic oligonucleotide
cgagguugaagauggaacc

SEQ ID NO: 1617553 - RNA, 19 nt, Artificial Sequence
  Description of Artificial Sequence: Synthetic oligonucleotide
ucucuugauugcucuaguu

SEQ ID NO: 1617554 - RNA, 19 nt, Artificial Sequence
  Description of Artificial Sequence: Synthetic oligonucleotide
uucaaaccgacggccacac

SEQ ID NO: 1617555 - RNA, 19 nt, Artificial Sequence
  Description of Artificial Sequence: Synthetic oligonucleotide
cuuuuacccgaucauccga

SEQ ID NO: 1617556 - RNA, 19 nt, Artificial Sequence
  Description of Artificial Sequence: Synthetic oligonucleotide
uacccgaucauccgagguu

SEQ ID NO: 1617557 - RNA, 19 nt, Artificial Sequence
  Description of Artificial Sequence: Synthetic oligonucleotide
cacugcaguggcuuggcuc

SEQ ID NO: 1617558 - RNA, 19 nt, Artificial Sequence
  Description of Artificial Sequence: Synthetic oligonucleotide
guggacaagaaggugcuuc

SEQ ID NO: 1617559 - RNA, 19 nt, Artificial Sequence
  Description of Artificial Sequence: Synthetic oligonucleotide
guauaggggccuauuccag

SEQ ID NO: 1617560 - RNA, 19 nt, Artificial Sequence
  Description of Artificial Sequence: Synthetic oligonucleotide
  modified_base (2)..(2): a, c, u, g, unknown or other
cngaaaggucacugaacuc

SEQ ID NO: 1617561 - RNA, 19 nt, Artificial Sequence
  Description of Artificial Sequence: Synthetic oligonucleotide
gaggauguaccauggacau

SEQ ID NO: 1617562 - RNA, 19 nt, Artificial Sequence
  Description of Artificial Sequence: Synthetic oligonucleotide
uaugugggguggagugcag

SEQ ID NO: 1617563 - RNA, 19 nt, Artificial Sequence
  Description of Artificial Sequence: Synthetic oligonucleotide
gcaucugguggacaagaag

SEQ ID NO: 1617564 - RNA, 19 nt, Artificial Sequence
  Description of Artificial Sequence: Synthetic oligonucleotide
ugcuuucgcucuucuuacc

SEQ ID NO: 1617565 - RNA, 19 nt, Artificial Sequence
  Description of Artificial Sequence: Synthetic oligonucleotide
cacucaggaagucucccuc

SEQ ID NO: 1617566 - RNA, 19 nt, Artificial Sequence
  Description of Artificial Sequence: Synthetic oligonucleotide
aacgggcaagcaaaccaug

SEQ ID NO: 1617567 - RNA, 19 nt, Artificial Sequence
  Description of Artificial Sequence: Synthetic oligonucleotide
uucuuaccagagaccuucu

SEQ ID NO: 1617568 - RNA, 19 nt, Artificial Sequence
  Description of Artificial Sequence: Synthetic oligonucleotide
acccgaucauccgagguug

SEQ ID NO: 1617569 - RNA, 19 nt, Artificial Sequence
  Description of Artificial Sequence: Synthetic oligonucleotide
cucacgucacaccugcuga

SEQ ID NO: 1617570 - RNA, 19 nt, Artificial Sequence
  Description of Artificial Sequence: Synthetic oligonucleotide
ugacuguacccaucucagu

SEQ ID NO: 1617571 - RNA, 19 nt, Artificial Sequence
  Description of Artificial Sequence: Synthetic oligonucleotide
guaucggucgaucaugaau

SEQ ID NO: 1617572 - RNA, 19 nt, Artificial Sequence
  Description of Artificial Sequence: Synthetic oligonucleotide
cugagagaggugcccuccg

SEQ ID NO: 1617573 - RNA, 19 nt, Artificial Sequence
  Description of Artificial Sequence: Synthetic oligonucleotide
cagguaucggucgaucaug

SEQ ID NO: 1617574 - RNA, 19 nt, Artificial Sequence
  Description of Artificial Sequence: Synthetic oligonucleotide
agccaaguuuggcugagua

SEQ ID NO: 1617575 - RNA, 19 nt, Artificial Sequence
  Description of Artificial Sequence: Synthetic oligonucleotide
uucuagccuuaaauugcuc

SEQ ID NO: 1617576 - RNA, 19 nt, Artificial Sequence
  Description of Artificial Sequence: Synthetic oligonucleotide
ucgcucuucuuaccagaga

SEQ ID NO: 1617577 - RNA, 19 nt, Artificial Sequence
  Description of Artificial Sequence: Synthetic oligonucleotide
cgagugacgcaucuggugg

SEQ ID NO: 1617578 - RNA, 19 nt, Artificial Sequence
  Description of Artificial Sequence: Synthetic oligonucleotide
ucgcuuuuacccgaucauc

SEQ ID NO: 1617579 - RNA, 19 nt, Artificial Sequence
  Description of Artificial Sequence: Synthetic oligonucleotide
aaaccucacgucacaccug

SEQ ID NO: 1617580 - RNA, 19 nt, Artificial Sequence
  Description of Artificial Sequence: Synthetic oligonucleotide
aggucugcccacauucguc

SEQ ID NO: 1617581 - RNA, 19 nt, Artificial Sequence
  Description of Artificial Sequence: Synthetic oligonucleotide
ucggucgaucaugaauacc

SEQ ID NO: 1617582 - RNA, 19 nt, Artificial Sequence
  Description of Artificial Sequence: Synthetic oligonucleotide
ugucuggucucagauccaa

SEQ ID NO: 1617583 - RNA, 19 nt, Artificial Sequence
  Description of Artificial Sequence: Synthetic oligonucleotide
auguaauugcguaccucug

SEQ ID NO: 1617584 - RNA, 19 nt, Artificial Sequence
  Description of Artificial Sequence: Synthetic oligonucleotide
ucuuaccagagaccuucuu

SEQ ID NO: 1617585 - RNA, 19 nt, Artificial Sequence
  Description of Artificial Sequence: Synthetic oligonucleotide
gggcaagcaaaccaugcca

SEQ ID NO: 1617586 - RNA, 19 nt, Artificial Sequence
  Description of Artificial Sequence: Synthetic oligonucleotide
ccggaccuccucaugaugc

SEQ ID NO: 1617587 - RNA, 19 nt, Artificial Sequence
  Description of Artificial Sequence: Synthetic oligonucleotide
cucuucuuaccagagaccu

SEQ ID NO: 1617588 - RNA, 19 nt, Artificial Sequence
  Description of Artificial Sequence: Synthetic oligonucleotide
gagugacgcaucuggugga

SEQ ID NO: 1617589 - RNA, 19 nt, Artificial Sequence
  Description of Artificial Sequence: Synthetic oligonucleotide
ggauguaccauggacauau

SEQ ID NO: 1617590 - RNA, 19 nt, Artificial Sequence
  Description of Artificial Sequence: Synthetic oligonucleotide
ccagcuggcaccuuuguga

SEQ ID NO: 1617591 - RNA, 19 nt, Artificial Sequence
  Description of Artificial Sequence: Synthetic oligonucleotide
caggcgaaguccagcucag

SEQ ID NO: 1617592 - RNA, 19 nt, Artificial Sequence
  Description of Artificial Sequence: Synthetic oligonucleotide
cacccucgcccugagagag

SEQ ID NO: 1617593 - RNA, 19 nt, Artificial Sequence
  Description of Artificial Sequence: Synthetic oligonucleotide
caugugauacuugagggau

SEQ ID NO: 1617594 - RNA, 19 nt, Artificial Sequence
  Description of Artificial Sequence: Synthetic oligonucleotide
gacgcaucugguggacaag

SEQ ID NO: 1617595 - RNA, 19 nt, Artificial Sequence
  Description of Artificial Sequence: Synthetic oligonucleotide
cuguacccaucucagugca

SEQ ID NO: 1617596 - RNA, 19 nt, Artificial Sequence
  Description of Artificial Sequence: Synthetic oligonucleotide
ggcgaaguccagcucaguc

SEQ ID NO: 1617597 - RNA, 19 nt, Artificial Sequence
  Description of Artificial Sequence: Synthetic oligonucleotide
ggucugcccacauucguca

SEQ ID NO: 1617598 - RNA, 19 nt, Artificial Sequence
  Description of Artificial Sequence: Synthetic oligonucleotide
acguugagguugugggccu

SEQ ID NO: 1617599 - RNA, 19 nt, Artificial Sequence
  Description of Artificial Sequence: Synthetic oligonucleotide
cuuaccagagaccuucuuu

SEQ ID NO: 1617600 - RNA, 19 nt, Artificial Sequence
  Description of Artificial Sequence: Synthetic oligonucleotide
gaauaccuuguugcagcca

SEQ ID NO: 1617601 - RNA, 19 nt, Artificial Sequence
  Description of Artificial Sequence: Synthetic oligonucleotide
gcuuucgcucuucuuacca

SEQ ID NO: 1617602 - RNA, 19 nt, Artificial Sequence
  Description of Artificial Sequence: Synthetic oligonucleotide
acgcaucugguggacaaga

SEQ ID NO: 1617603 - RNA, 19 nt, Artificial Sequence
  Description of Artificial Sequence: Synthetic oligonucleotide
augugauacuugagggaug

SEQ ID NO: 1617604 - RNA, 19 nt, Artificial Sequence
  Description of Artificial Sequence: Synthetic oligonucleotide
ccaacgggcaagcaaacca

SEQ ID NO: 1617605 - RNA, 19 nt, Artificial Sequence
  Description of Artificial Sequence: Synthetic oligonucleotide
ggacaagaaggugcuuccg

SEQ ID NO: 1617606 - RNA, 19 nt, Artificial Sequence
  Description of Artificial Sequence: Synthetic oligonucleotide
agguaucggucgaucauga

SEQ ID NO: 1617607 - RNA, 19 nt, Artificial Sequence
  Description of Artificial Sequence: Synthetic oligonucleotide
uuggcucccgagugacgca

SEQ ID NO: 1617608 - RNA, 19 nt, Artificial Sequence
  Description of Artificial Sequence: Synthetic oligonucleotide
acacccucgcccugagaga

SEQ ID NO: 1617609 - RNA, 19 nt, Artificial Sequence
  Description of Artificial Sequence: Synthetic oligonucleotide
cuucacagcuuggcccucc

SEQ ID NO: 1617610 - RNA, 19 nt, Artificial Sequence
  Description of Artificial Sequence: Synthetic oligonucleotide
gguaggcucaggcuucaca

SEQ ID NO: 1617611 - RNA, 19 nt, Artificial Sequence
  Description of Artificial Sequence: Synthetic oligonucleotide
gaugcucguugccugcacu

SEQ ID NO: 1617612 - RNA, 19 nt, Artificial Sequence
  Description of Artificial Sequence: Synthetic oligonucleotide
gguaaggcucaaaggacuc

SEQ ID NO: 1617613 - RNA, 19 nt, Artificial Sequence
  Description of Artificial Sequence: Synthetic oligonucleotide
gagcaacgcccuccugcag

SEQ ID NO: 1617614 - RNA, 19 nt, Artificial Sequence
  Description of Artificial Sequence: Synthetic oligonucleotide
ucaaaccgacggccacacu

SEQ ID NO: 1617615 - RNA, 19 nt, Artificial Sequence
  Description of Artificial Sequence: Synthetic oligonucleotide
guguuucuucaugccauca

SEQ ID NO: 1617616 - RNA, 19 nt, Artificial Sequence
  Description of Artificial Sequence: Synthetic oligonucleotide
uggguggugucuggucuca

SEQ ID NO: 1617617 - RNA, 19 nt, Artificial Sequence
  Description of Artificial Sequence: Synthetic oligonucleotide
acaugucgcugcagguauc

SEQ ID NO: 1617618 - RNA, 19 nt, Artificial Sequence
  Description of Artificial Sequence: Synthetic oligonucleotide
ccucacgucacaccugcug

SEQ ID NO: 1617619 - RNA, 19 nt, Artificial Sequence
  Description of Artificial Sequence: Synthetic oligonucleotide
augucgcugcagguaucgg

SEQ ID NO: 1617620 - RNA, 19 nt, Artificial Sequence
  Description of Artificial Sequence: Synthetic oligonucleotide
gcucuucuuaccagagacc

SEQ ID NO: 1617621 - RNA, 19 nt, Artificial Sequence
  Description of Artificial Sequence: Synthetic oligonucleotide
ccgacggccacacugguca

SEQ ID NO: 1617622 - RNA, 19 nt, Artificial Sequence
  Description of Artificial Sequence: Synthetic oligonucleotide
uggggaagugaggaacauu

SEQ ID NO: 1617623 - RNA, 19 nt, Artificial Sequence
  Description of Artificial Sequence: Synthetic oligonucleotide
gccuauuccaggucccaca

SEQ ID NO: 1617624 - RNA, 19 nt, Artificial Sequence
  Description of Artificial Sequence: Synthetic oligonucleotide
uucaugccaucagccccgc

SEQ ID NO: 1617625 - RNA, 19 nt, Artificial Sequence
  Description of Artificial Sequence: Synthetic oligonucleotide
gcaaaccaugccagugggg

SEQ ID NO: 1617626 - RNA, 19 nt, Artificial Sequence
  Description of Artificial Sequence: Synthetic oligonucleotide
cacaggcgaaguccagcuc

SEQ ID NO: 1617627 - RNA, 19 nt, Artificial Sequence
  Description of Artificial Sequence: Synthetic oligonucleotide
caguggcuuggcucccgag

SEQ ID NO: 1617628 - RNA, 19 nt, Artificial Sequence
  Description of Artificial Sequence: Synthetic oligonucleotide
cacaugucgcugcagguau

SEQ ID NO: 1617629 - RNA, 19 nt, Artificial Sequence
  Description of Artificial Sequence: Synthetic oligonucleotide
  modified_base (5)..(5): a, c, u, g, unknown or other
ccucngaaaggucacugaa

SEQ ID NO: 1617630 - RNA, 19 nt, Artificial Sequence
  Description of Artificial Sequence: Synthetic oligonucleotide
cccugagaugagcaacgcc

SEQ ID NO: 1617631 - RNA, 19 nt, Artificial Sequence
  Description of Artificial Sequence: Synthetic oligonucleotide
accgacggccacacugguc

SEQ ID NO: 1617632 - RNA, 19 nt, Artificial Sequence
  Description of Artificial Sequence: Synthetic oligonucleotide
gggcaggacuuuguccugg

SEQ ID NO: 1617633 - RNA, 19 nt, Artificial Sequence
  Description of Artificial Sequence: Synthetic oligonucleotide
uccucuggccuggcagagc

SEQ ID NO: 1617634 - RNA, 19 nt, Artificial Sequence
  Description of Artificial Sequence: Synthetic oligonucleotide
uaugcacguugagguugug

SEQ ID NO: 1617635 - RNA, 19 nt, Artificial Sequence
  Description of Artificial Sequence: Synthetic oligonucleotide
caacgggcaagcaaaccau

SEQ ID NO: 1617636 - RNA, 19 nt, Artificial Sequence
  Description of Artificial Sequence: Synthetic oligonucleotide
cguaccucuguguggauga

SEQ ID NO: 1617637 - RNA, 19 nt, Artificial Sequence
  Description of Artificial Sequence: Synthetic oligonucleotide
gcauuacauggaguucuug

SEQ ID NO: 1617638 - RNA, 19 nt, Artificial Sequence
  Description of Artificial Sequence: Synthetic oligonucleotide
uggcucccgagugacgcau

SEQ ID NO: 1617639 - RNA, 19 nt, Artificial Sequence
  Description of Artificial Sequence: Synthetic oligonucleotide
ggcccaacgggcaagcaaa

SEQ ID NO: 1617640 - RNA, 19 nt, Artificial Sequence
  Description of Artificial Sequence: Synthetic oligonucleotide
cauccgaggacuguggguu

SEQ ID NO: 1617641 - RNA, 19 nt, Artificial Sequence
  Description of Artificial Sequence: Synthetic oligonucleotide
aucagccccgcgguauaca

SEQ ID NO: 1617642 - RNA, 19 nt, Artificial Sequence
  Description of Artificial Sequence: Synthetic oligonucleotide
cagauguaauugcguaccu

SEQ ID NO: 1617643 - RNA, 19 nt, Artificial Sequence
  Description of Artificial Sequence: Synthetic oligonucleotide
auccgaggacuguggguuu

SEQ ID NO: 1617644 - RNA, 19 nt, Artificial Sequence
  Description of Artificial Sequence: Synthetic oligonucleotide
caucagccccgcgguauac

SEQ ID NO: 1617645 - RNA, 19 nt, Artificial Sequence
  Description of Artificial Sequence: Synthetic oligonucleotide
uccgaggacuguggguuuu

SEQ ID NO: 1617646 - RNA, 19 nt, Artificial Sequence
  Description of Artificial Sequence: Synthetic oligonucleotide
uggcaccuuugugaauaau

SEQ ID NO: 1617647 - RNA, 19 nt, Artificial Sequence
  Description of Artificial Sequence: Synthetic oligonucleotide
ggaugcucguugccugcac

SEQ ID NO: 1617648 - RNA, 19 nt, Artificial Sequence
  Description of Artificial Sequence: Synthetic oligonucleotide
caaugggcccaacgggcaa

SEQ ID NO: 1617649 - RNA, 19 nt, Artificial Sequence
  Description of Artificial Sequence: Synthetic oligonucleotide
ggcuuggcucccgagugac

SEQ ID NO: 1617650 - RNA, 19 nt, Artificial Sequence
  Description of Artificial Sequence: Synthetic oligonucleotide
aguugcccuggggccucac

SEQ ID NO: 1617651 - RNA, 19 nt, Artificial Sequence
  Description of Artificial Sequence: Synthetic oligonucleotide
gcguaccucuguguggaug

SEQ ID NO: 1617652 - RNA, 19 nt, Artificial Sequence
  Description of Artificial Sequence: Synthetic oligonucleotide
aggauguaccauggacaua

SEQ ID NO: 1617653 - RNA, 19 nt, Artificial Sequence
  Description of Artificial Sequence: Synthetic oligonucleotide
cuggcaccuuugugaauaa

SEQ ID NO: 1617654 - RNA, 19 nt, Artificial Sequence
  Description of Artificial Sequence: Synthetic oligonucleotide
ugcguaccucuguguggau

SEQ ID NO: 1617655 - RNA, 19 nt, Artificial Sequence
  Description of Artificial Sequence: Synthetic oligonucleotide
gguaucggucgaucaugaa

SEQ ID NO: 1617656 - RNA, 19 nt, Artificial Sequence
  Description of Artificial Sequence: Synthetic oligonucleotide
gcaaugggcccaacgggca

SEQ ID NO: 1617657 - RNA, 19 nt, Artificial Sequence
  Description of Artificial Sequence: Synthetic oligonucleotide
ggggccuauuccagguccc

SEQ ID NO: 1617658 - RNA, 19 nt, Artificial Sequence
  Description of Artificial Sequence: Synthetic oligonucleotide
gcaagcaaaccaugccagu

SEQ ID NO: 1617659 - RNA, 19 nt, Artificial Sequence
  Description of Artificial Sequence: Synthetic oligonucleotide
cccaacgggcaagcaaacc

SEQ ID NO: 1617660 - RNA, 19 nt, Artificial Sequence
  Description of Artificial Sequence: Synthetic oligonucleotide
cuccgacacauggcugcug

SEQ ID NO: 1617661 - RNA, 19 nt, Artificial Sequence
  Description of Artificial Sequence: Synthetic oligonucleotide
cgcgguauacagcugugca

SEQ ID NO: 1617662 - RNA, 19 nt, Artificial Sequence
  Description of Artificial Sequence: Synthetic oligonucleotide
cgucacaccugcugaguuc

SEQ ID NO: 1617663 - RNA, 19 nt, Artificial Sequence
  Description of Artificial Sequence: Synthetic oligonucleotide
acccucgcccugagagagg

SEQ ID NO: 1617664 - RNA, 19 nt, Artificial Sequence
  Description of Artificial Sequence: Synthetic oligonucleotide
gugucuggucucagaucca

SEQ ID NO: 1617665 - RNA, 19 nt, Artificial Sequence
  Description of Artificial Sequence: Synthetic oligonucleotide
ggccuauuccaggucccac

SEQ ID NO: 1617666 - RNA, 19 nt, Artificial Sequence
  Description of Artificial Sequence: Synthetic oligonucleotide
aggcgaaguccagcucagu

SEQ ID NO: 1617667 - RNA, 19 nt, Artificial Sequence
  Description of Artificial Sequence: Synthetic oligonucleotide
cccgcgguauacagcugug

SEQ ID NO: 1617668 - RNA, 19 nt, Artificial Sequence
  Description of Artificial Sequence: Synthetic oligonucleotide
ccgcgguauacagcugugc

SEQ ID NO: 1617669 - RNA, 19 nt, Artificial Sequence
  Description of Artificial Sequence: Synthetic oligonucleotide
gaacucgcuuuuacccgau

SEQ ID NO: 1617670 - RNA, 19 nt, Artificial Sequence
  Description of Artificial Sequence: Synthetic oligonucleotide
cugaguauaggggccuauu

SEQ ID NO: 1617671 - RNA, 19 nt, Artificial Sequence
  Description of Artificial Sequence: Synthetic oligonucleotide
gcaguggcuuggcucccga

SEQ ID NO: 1617672 - RNA, 19 nt, Artificial Sequence
  Description of Artificial Sequence: Synthetic oligonucleotide
gggaugcucguugccugca

SEQ ID NO: 1617673 - RNA, 19 nt, Artificial Sequence
  Description of Artificial Sequence: Synthetic oligonucleotide
gugcuccaccugaaguucu

SEQ ID NO: 1617674 - RNA, 19 nt, Artificial Sequence
  Description of Artificial Sequence: Synthetic oligonucleotide
cacuggucacaggcgaagu

SEQ ID NO: 1617675 - RNA, 19 nt, Artificial Sequence
  Description of Artificial Sequence: Synthetic oligonucleotide
gagccaaguuuggcugagu

SEQ ID NO: 1617676 - RNA, 19 nt, Artificial Sequence
  Description of Artificial Sequence: Synthetic oligonucleotide
gggccuauuccagguccca

SEQ ID NO: 1617677 - RNA, 19 nt, Artificial Sequence
  Description of Artificial Sequence: Synthetic oligonucleotide
gugauacuugagggaugcu

SEQ ID NO: 1617678 - RNA, 19 nt, Artificial Sequence
  Description of Artificial Sequence: Synthetic oligonucleotide
gcccaacgggcaagcaaac

SEQ ID NO: 1617679 - RNA, 19 nt, Artificial Sequence
  Description of Artificial Sequence: Synthetic oligonucleotide
gcccuccgacacauggcug

SEQ ID NO: 1617680 - RNA, 19 nt, Artificial Sequence
  Description of Artificial Sequence: Synthetic oligonucleotide
ggucgaucaugaauaccuu

SEQ ID NO: 1617681 - RNA, 19 nt, Artificial Sequence
  Description of Artificial Sequence: Synthetic oligonucleotide
ccgaggacuguggguuuug

SEQ ID NO: 1617682 - RNA, 19 nt, Artificial Sequence
  Description of Artificial Sequence: Synthetic oligonucleotide
  modified_base (8)..(8): a, c, u, g, unknown or other
cucccucngaaaggucacu

SEQ ID NO: 1617683 - RNA, 19 nt, Artificial Sequence
  Description of Artificial Sequence: Synthetic oligonucleotide
ccaguugcccuggggccuc

SEQ ID NO: 1617684 - RNA, 19 nt, Artificial Sequence
  Description of Artificial Sequence: Synthetic oligonucleotide
cccgaucauccgagguuga

SEQ ID NO: 1617685 - RNA, 19 nt, Artificial Sequence
  Description of Artificial Sequence: Synthetic oligonucleotide
ccccgcgguauacagcugu

SEQ ID NO: 1617686 - RNA, 19 nt, Artificial Sequence
  Description of Artificial Sequence: Synthetic oligonucleotide
gcagcucaagaugcccagu

SEQ ID NO: 1617687 - RNA, 19 nt, Artificial Sequence
  Description of Artificial Sequence: Synthetic oligonucleotide
cccgagugacgcaucuggu

SEQ ID NO: 1617688 - RNA, 19 nt, Artificial Sequence
  Description of Artificial Sequence: Synthetic oligonucleotide
gcugaguauaggggccuau

SEQ ID NO: 1617689 - RNA, 19 nt, Artificial Sequence
  Description of Artificial Sequence: Synthetic oligonucleotide
ccucgcccugagagaggug

SEQ ID NO: 1617690 - RNA, 19 nt, Artificial Sequence
  Description of Artificial Sequence: Synthetic oligonucleotide
ccgaucauccgagguugaa

SEQ ID NO: 1617691 - RNA, 19 nt, Artificial Sequence
  Description of Artificial Sequence: Synthetic oligonucleotide
ccaucagccccgcgguaua

SEQ ID NO: 1617692 - RNA, 19 nt, Artificial Sequence
  Description of Artificial Sequence: Synthetic oligonucleotide
cgacacauggcugcugggu

SEQ ID NO: 1617693 - RNA, 19 nt, Artificial Sequence
  Description of Artificial Sequence: Synthetic oligonucleotide
caguugcccuggggccuca

SEQ ID NO: 1617694 - RNA, 19 nt, Artificial Sequence
  Description of Artificial Sequence: Synthetic oligonucleotide
gguggacaagaaggugcuu

SEQ ID NO: 1617695 - RNA, 19 nt, Artificial Sequence
  Description of Artificial Sequence: Synthetic oligonucleotide
cccucgcccugagagaggu

SEQ ID NO: 1617696 - RNA, 19 nt, Artificial Sequence
  Description of Artificial Sequence: Synthetic oligonucleotide
gccccgcgguauacagcug

SEQ ID NO: 1617697 - RNA, 19 nt, Artificial Sequence
  Description of Artificial Sequence: Synthetic oligonucleotide
ccauggacauaugcacguu

SEQ ID NO: 1617698 - RNA, 19 nt, Artificial Sequence
  Description of Artificial Sequence: Synthetic oligonucleotide
gugcaccagcuggcaccuu

SEQ ID NO: 1617699 - RNA, 19 nt, Artificial Sequence
  Description of Artificial Sequence: Synthetic oligonucleotide
uuauaaaccacuuagcaca

SEQ ID NO: 1617700 - RNA, 19 nt, Artificial Sequence
  Description of Artificial Sequence: Synthetic oligonucleotide
uauagcgucaucuaagucc

SEQ ID NO: 1617701 - RNA, 19 nt, Artificial Sequence
  Description of Artificial Sequence: Synthetic oligonucleotide
aaggucuugguuuugggac

SEQ ID NO: 1617702 - RNA, 19 nt, Artificial Sequence
  Description of Artificial Sequence: Synthetic oligonucleotide
uuucaguggauacagaaug

SEQ ID NO: 1617703 - RNA, 19 nt, Artificial Sequence
  Description of Artificial Sequence: Synthetic oligonucleotide
ucucuuacguuccagaaca

SEQ ID NO: 1617704 - RNA, 19 nt, Artificial Sequence
  Description of Artificial Sequence: Synthetic oligonucleotide
acaagaauaucauuccagg

SEQ ID NO: 1617705 - RNA, 19 nt, Artificial Sequence
  Description of Artificial Sequence: Synthetic oligonucleotide
agagauuugguuugugggc

SEQ ID NO: 1617706 - RNA, 19 nt, Artificial Sequence
  Description of Artificial Sequence: Synthetic oligonucleotide
aggucuguuaguuccaugc

SEQ ID NO: 1617707 - RNA, 19 nt, Artificial Sequence
  Description of Artificial Sequence: Synthetic oligonucleotide
uucauuugauauuauccgg

SEQ ID NO: 1617708 - RNA, 19 nt, Artificial Sequence
  Description of Artificial Sequence: Synthetic oligonucleotide
uuuauacggugccugaggg

SEQ ID NO: 1617709 - RNA, 19 nt, Artificial Sequence
  Description of Artificial Sequence: Synthetic oligonucleotide
aucaccaaaacauuggcug

SEQ ID NO: 1617710 - RNA, 19 nt, Artificial Sequence
  Description of Artificial Sequence: Synthetic oligonucleotide
gaauugacugaauagacuc

SEQ ID NO: 1617711 - RNA, 19 nt, Artificial Sequence
  Description of Artificial Sequence: Synthetic oligonucleotide
uuaaugaugcacucgauaa

SEQ ID NO: 1617712 - RNA, 19 nt, Artificial Sequence
  Description of Artificial Sequence: Synthetic oligonucleotide
aguuuaacuugauuucccc

SEQ ID NO: 1617713 - RNA, 19 nt, Artificial Sequence
  Description of Artificial Sequence: Synthetic oligonucleotide
aaugaauuuguccagcguu

SEQ ID NO: 1617714 - RNA, 19 nt, Artificial Sequence
  Description of Artificial Sequence: Synthetic oligonucleotide
aacucaaauuuauacggug

SEQ ID NO: 1617715 - RNA, 19 nt, Artificial Sequence
  Description of Artificial Sequence: Synthetic oligonucleotide
uucagauuccguaaguggc

SEQ ID NO: 1617716 - RNA, 19 nt, Artificial Sequence
  Description of Artificial Sequence: Synthetic oligonucleotide
uaagagauuugguuugugg

SEQ ID NO: 1617717 - RNA, 19 nt, Artificial Sequence
  Description of Artificial Sequence: Synthetic oligonucleotide
ucauuugauauuauccggc

SEQ ID NO: 1617718 - RNA, 19 nt, Artificial Sequence
  Description of Artificial Sequence: Synthetic oligonucleotide
uuccaugcaauguugaagc

SEQ ID NO: 1617719 - RNA, 19 nt, Artificial Sequence
  Description of Artificial Sequence: Synthetic oligonucleotide
uaucauuccaggaucaccu

SEQ ID NO: 1617720 - RNA, 19 nt, Artificial Sequence
  Description of Artificial Sequence: Synthetic oligonucleotide
uauuauccggcucauuucc

SEQ ID NO: 1617721 - RNA, 19 nt, Artificial Sequence
  Description of Artificial Sequence: Synthetic oligonucleotide
auuuucaggcucuuucggc

SEQ ID NO: 1617722 - RNA, 19 nt, Artificial Sequence
  Description of Artificial Sequence: Synthetic oligonucleotide
uauucaagcugucagcugu

SEQ ID NO: 1617723 - RNA, 19 nt, Artificial Sequence
  Description of Artificial Sequence: Synthetic oligonucleotide
ugacugaauagacucaaug

SEQ ID NO: 1617724 - RNA, 19 nt, Artificial Sequence
  Description of Artificial Sequence: Synthetic oligonucleotide
aacaagaauaucauuccag

SEQ ID NO: 1617725 - RNA, 19 nt, Artificial Sequence
  Description of Artificial Sequence: Synthetic oligonucleotide
cuuacguuccagaacacag

SEQ ID NO: 1617726 - RNA, 19 nt, Artificial Sequence
  Description of Artificial Sequence: Synthetic oligonucleotide
uccgcauuaggucuguuag

SEQ ID NO: 1617727 - RNA, 19 nt, Artificial Sequence
  Description of Artificial Sequence: Synthetic oligonucleotide
ucccugaacaagaauauca

SEQ ID NO: 1617728 - RNA, 19 nt, Artificial Sequence
  Description of Artificial Sequence: Synthetic oligonucleotide
uguacuuucagauuccgua

SEQ ID NO: 1617729 - RNA, 19 nt, Artificial Sequence
  Description of Artificial Sequence: Synthetic oligonucleotide
uaguauagcgucaucuaag

SEQ ID NO: 1617730 - RNA, 19 nt, Artificial Sequence
  Description of Artificial Sequence: Synthetic oligonucleotide
cuuuggauuauucaagcug

SEQ ID NO: 1617731 - RNA, 19 nt, Artificial Sequence
  Description of Artificial Sequence: Synthetic oligonucleotide
ugaugcacucgauaaagag

SEQ ID NO: 1617732 - RNA, 19 nt, Artificial Sequence
  Description of Artificial Sequence: Synthetic oligonucleotide
gaagguugguccuggaggg

SEQ ID NO: 1617733 - RNA, 19 nt, Artificial Sequence
  Description of Artificial Sequence: Synthetic oligonucleotide
auuuauacggugccugagg

SEQ ID NO: 1617734 - RNA, 19 nt, Artificial Sequence
  Description of Artificial Sequence: Synthetic oligonucleotide
aaauuggcaggucuuguca

SEQ ID NO: 1617735 - RNA, 19 nt, Artificial Sequence
  Description of Artificial Sequence: Synthetic oligonucleotide
uuuaacuugauuuccccuc

SEQ ID NO: 1617736 - RNA, 19 nt, Artificial Sequence
  Description of Artificial Sequence: Synthetic oligonucleotide
ugcauaacuucuuuaugag

SEQ ID NO: 1617737 - RNA, 19 nt, Artificial Sequence
  Description of Artificial Sequence: Synthetic oligonucleotide
ucgggagucagcaagaaau

SEQ ID NO: 1617738 - RNA, 19 nt, Artificial Sequence
  Description of Artificial Sequence: Synthetic oligonucleotide
cuugauuuccccucugugc

SEQ ID NO: 1617739 - RNA, 19 nt, Artificial Sequence
  Description of Artificial Sequence: Synthetic oligonucleotide
ugcaguguucuccacaccc

SEQ ID NO: 1617740 - RNA, 19 nt, Artificial Sequence
  Description of Artificial Sequence: Synthetic oligonucleotide
gaugcacucgauaaagagg

SEQ ID NO: 1617741 - RNA, 19 nt, Artificial Sequence
  Description of Artificial Sequence: Synthetic oligonucleotide
acauaagagauuugguuug

SEQ ID NO: 1617742 - RNA, 19 nt, Artificial Sequence
  Description of Artificial Sequence: Synthetic oligonucleotide
acugaauagacucaaugaa

SEQ ID NO: 1617743 - RNA, 19 nt, Artificial Sequence
  Description of Artificial Sequence: Synthetic oligonucleotide
ugcaucacgugcuucacag

SEQ ID NO: 1617744 - RNA, 19 nt, Artificial Sequence
  Description of Artificial Sequence: Synthetic oligonucleotide
uuuaaugaugcacucgaua

SEQ ID NO: 1617745 - RNA, 19 nt, Artificial Sequence
  Description of Artificial Sequence: Synthetic oligonucleotide
uggaauugacugaauagac

SEQ ID NO: 1617746 - RNA, 19 nt, Artificial Sequence
  Description of Artificial Sequence: Synthetic oligonucleotide
aauagccaguuucacugag

SEQ ID NO: 1617747 - RNA, 19 nt, Artificial Sequence
  Description of Artificial Sequence: Synthetic oligonucleotide
gacugaauagacucaauga

SEQ ID NO: 1617748 - RNA, 19 nt, Artificial Sequence
  Description of Artificial Sequence: Synthetic oligonucleotide
aaauuuauacggugccuga

SEQ ID NO: 1617749 - RNA, 19 nt, Artificial Sequence
  Description of Artificial Sequence: Synthetic oligonucleotide
uguuucaguggauacagaa

SEQ ID NO: 1617750 - RNA, 19 nt, Artificial Sequence
  Description of Artificial Sequence: Synthetic oligonucleotide
cucaaauuuauacggugcc

SEQ ID NO: 1617751 - RNA, 19 nt, Artificial Sequence
  Description of Artificial Sequence: Synthetic oligonucleotide
gucacuuccacauauccac

SEQ ID NO: 1617752 - RNA, 19 nt, Artificial Sequence
  Description of Artificial Sequence: Synthetic oligonucleotide
uagccaguuucacugagag

SEQ ID NO: 1617753 - RNA, 19 nt, Artificial Sequence
  Description of Artificial Sequence: Synthetic oligonucleotide
uuuaaugccucuggaauug

SEQ ID NO: 1617754 - RNA, 19 nt, Artificial Sequence
  Description of Artificial Sequence: Synthetic oligonucleotide
aauaucauuccaggaucac

SEQ ID NO: 1617755 - RNA, 19 nt, Artificial Sequence
  Description of Artificial Sequence: Synthetic oligonucleotide
uccguaaguggcuuuagug

SEQ ID NO: 1617756 - RNA, 19 nt, Artificial Sequence
  Description of Artificial Sequence: Synthetic oligonucleotide
ugguaugccuuuaaugaug

SEQ ID NO: 1617757 - RNA, 19 nt, Artificial Sequence
  Description of Artificial Sequence: Synthetic oligonucleotide
agcguugcuucccaaauag

SEQ ID NO: 1617758 - RNA, 19 nt, Artificial Sequence
  Description of Artificial Sequence: Synthetic oligonucleotide
cauugguaugccuuuaaug

SEQ ID NO: 1617759 - RNA, 19 nt, Artificial Sequence
  Description of Artificial Sequence: Synthetic oligonucleotide
ucauaaagcuccuccaggu

SEQ ID NO: 1617760 - RNA, 19 nt, Artificial Sequence
  Description of Artificial Sequence: Synthetic oligonucleotide
uucgugucucuccagaacu

SEQ ID NO: 1617761 - RNA, 19 nt, Artificial Sequence
  Description of Artificial Sequence: Synthetic oligonucleotide
ggauuauucaagcugucag

SEQ ID NO: 1617762 - RNA, 19 nt, Artificial Sequence
  Description of Artificial Sequence: Synthetic oligonucleotide
gucauaaagcuccuccagg

SEQ ID NO: 1617763 - RNA, 19 nt, Artificial Sequence
  Description of Artificial Sequence: Synthetic oligonucleotide
uuuaaugaaaagggucugc

SEQ ID NO: 1617764 - RNA, 19 nt, Artificial Sequence
  Description of Artificial Sequence: Synthetic oligonucleotide
uauacggugccugagggca

SEQ ID NO: 1617765 - RNA, 19 nt, Artificial Sequence
  Description of Artificial Sequence: Synthetic oligonucleotide
aauuuauacggugccugag

SEQ ID NO: 1617766 - RNA, 19 nt, Artificial Sequence
  Description of Artificial Sequence: Synthetic oligonucleotide
uacuuucagauuccguaag

SEQ ID NO: 1617767 - RNA, 19 nt, Artificial Sequence
  Description of Artificial Sequence: Synthetic oligonucleotide
gaccuuaacucuucgagca

SEQ ID NO: 1617768 - RNA, 19 nt, Artificial Sequence
  Description of Artificial Sequence: Synthetic oligonucleotide
aguauagcgucaucuaagu

SEQ ID NO: 1617769 - RNA, 19 nt, Artificial Sequence
  Description of Artificial Sequence: Synthetic oligonucleotide
ugaccuuaacucuucgagc

SEQ ID NO: 1617770 - RNA, 19 nt, Artificial Sequence
  Description of Artificial Sequence: Synthetic oligonucleotide
auuauucaagcugucagcu

SEQ ID NO: 1617771 - RNA, 19 nt, Artificial Sequence
  Description of Artificial Sequence: Synthetic oligonucleotide
agccgagcaagucucuugc

SEQ ID NO: 1617772 - RNA, 19 nt, Artificial Sequence
  Description of Artificial Sequence: Synthetic oligonucleotide
uucuaguauagcgucaucu

SEQ ID NO: 1617773 - RNA, 19 nt, Artificial Sequence
  Description of Artificial Sequence: Synthetic oligonucleotide
auugcuguauuuucaggcu

SEQ ID NO: 1617774 - RNA, 19 nt, Artificial Sequence
  Description of Artificial Sequence: Synthetic oligonucleotide
ugucacuuccacauaucca

SEQ ID NO: 1617775 - RNA, 19 nt, Artificial Sequence
  Description of Artificial Sequence: Synthetic oligonucleotide
ucuuucggcaugcuguacu

SEQ ID NO: 1617776 - RNA, 19 nt, Artificial Sequence
  Description of Artificial Sequence: Synthetic oligonucleotide
caaauuuauacggugccug

SEQ ID NO: 1617777 - RNA, 19 nt, Artificial Sequence
  Description of Artificial Sequence: Synthetic oligonucleotide
aguugcaaaugcugugcac

SEQ ID NO: 1617778 - RNA, 19 nt, Artificial Sequence
  Description of Artificial Sequence: Synthetic oligonucleotide
ugucagcuguuauuugagg

SEQ ID NO: 1617779 - RNA, 19 nt, Artificial Sequence
  Description of Artificial Sequence: Synthetic oligonucleotide
cugcauaacuucuuuauga

SEQ ID NO: 1617780 - RNA, 19 nt, Artificial Sequence
  Description of Artificial Sequence: Synthetic oligonucleotide
ucuuuaugagacagcuuga

SEQ ID NO: 1617781 - RNA, 19 nt, Artificial Sequence
  Description of Artificial Sequence: Synthetic oligonucleotide
gaggaucacaaucauccac

SEQ ID NO: 1617782 - RNA, 19 nt, Artificial Sequence
  Description of Artificial Sequence: Synthetic oligonucleotide
ucaugaccuuaacucuucg

SEQ ID NO: 1617783 - RNA, 19 nt, Artificial Sequence
  Description of Artificial Sequence: Synthetic oligonucleotide
ucuaguauagcgucaucua

SEQ ID NO: 1617784 - RNA, 19 nt, Artificial Sequence
  Description of Artificial Sequence: Synthetic oligonucleotide
uuuaguggaagccgagcaa

SEQ ID NO: 1617785 - RNA, 19 nt, Artificial Sequence
  Description of Artificial Sequence: Synthetic oligonucleotide
aggaucuuuggauuauuca

SEQ ID NO: 1617786 - RNA, 19 nt, Artificial Sequence
  Description of Artificial Sequence: Synthetic oligonucleotide
ucccucuauuuucauguag

SEQ ID NO: 1617787 - RNA, 19 nt, Artificial Sequence
  Description of Artificial Sequence: Synthetic oligonucleotide
uagauugucccucuauuuu

SEQ ID NO: 1617788 - RNA, 19 nt, Artificial Sequence
  Description of Artificial Sequence: Synthetic oligonucleotide
uuauccggcucauuuccag

SEQ ID NO: 1617789 - RNA, 19 nt, Artificial Sequence
  Description of Artificial Sequence: Synthetic oligonucleotide
aaauagccaguuucacuga

SEQ ID NO: 1617790 - RNA, 19 nt, Artificial Sequence
  Description of Artificial Sequence: Synthetic oligonucleotide
ggugaugaggaucacaauc

SEQ ID NO: 1617791 - RNA, 19 nt, Artificial Sequence
  Description of Artificial Sequence: Synthetic oligonucleotide
gacagcguuuaaugaaaag

SEQ ID NO: 1617792 - RNA, 19 nt, Artificial Sequence
  Description of Artificial Sequence: Synthetic oligonucleotide
auaacuucuuuaugagaca

SEQ ID NO: 1617793 - RNA, 19 nt, Artificial Sequence
  Description of Artificial Sequence: Synthetic oligonucleotide
gaacaagaauaucauucca

SEQ ID NO: 1617794 - RNA, 19 nt, Artificial Sequence
  Description of Artificial Sequence: Synthetic oligonucleotide
ucgauaaagaggccagggu

SEQ ID NO: 1617795 - RNA, 19 nt, Artificial Sequence
  Description of Artificial Sequence: Synthetic oligonucleotide
aauuggcaggucuugucau

SEQ ID NO: 1617796 - RNA, 19 nt, Artificial Sequence
  Description of Artificial Sequence: Synthetic oligonucleotide
ucgagcaaugcugagaaau

SEQ ID NO: 1617797 - RNA, 19 nt, Artificial Sequence
  Description of Artificial Sequence: Synthetic oligonucleotide
uggacagcguuuaaugaaa

SEQ ID NO: 1617798 - RNA, 19 nt, Artificial Sequence
  Description of Artificial Sequence: Synthetic oligonucleotide
auagacucaaugaauuugu

SEQ ID NO: 1617799 - RNA, 19 nt, Artificial Sequence
  Description of Artificial Sequence: Synthetic oligonucleotide
ugucccaguagaagucggg

SEQ ID NO: 1617800 - RNA, 19 nt, Artificial Sequence
  Description of Artificial Sequence: Synthetic oligonucleotide
ucguucucccaguaaacca

SEQ ID NO: 1617801 - RNA, 19 nt, Artificial Sequence
  Description of Artificial Sequence: Synthetic oligonucleotide
uuauucaagcugucagcug

SEQ ID NO: 1617802 - RNA, 19 nt, Artificial Sequence
  Description of Artificial Sequence: Synthetic oligonucleotide
uagaagucgggagucagca

SEQ ID NO: 1617803 - RNA, 19 nt, Artificial Sequence
  Description of Artificial Sequence: Synthetic oligonucleotide
ugagaaauuggcaggucuu

SEQ ID NO: 1617804 - RNA, 19 nt, Artificial Sequence
  Description of Artificial Sequence: Synthetic oligonucleotide
gucagcaagaaaucugaac

SEQ ID NO: 1617805 - RNA, 19 nt, Artificial Sequence
  Description of Artificial Sequence: Synthetic oligonucleotide
gaaauuggcaggucuuguc

SEQ ID NO: 1617806 - RNA, 19 nt, Artificial Sequence
  Description of Artificial Sequence: Synthetic oligonucleotide
ucaaauuuauacggugccu

SEQ ID NO: 1617807 - RNA, 19 nt, Artificial Sequence
  Description of Artificial Sequence: Synthetic oligonucleotide
aguggacagcguuuaauga

SEQ ID NO: 1617808 - RNA, 19 nt, Artificial Sequence
  Description of Artificial Sequence: Synthetic oligonucleotide
uauccggcucauuuccagg

SEQ ID NO: 1617809 - RNA, 19 nt, Artificial Sequence
  Description of Artificial Sequence: Synthetic oligonucleotide
uauaaaccacuuagcacau

SEQ ID NO: 1617810 - RNA, 19 nt, Artificial Sequence
  Description of Artificial Sequence: Synthetic oligonucleotide
gaucacaaucauccacucc

SEQ ID NO: 1617811 - RNA, 19 nt, Artificial Sequence
  Description of Artificial Sequence: Synthetic oligonucleotide
uuucgugucucuccagaac

SEQ ID NO: 1617812 - RNA, 19 nt, Artificial Sequence
  Description of Artificial Sequence: Synthetic oligonucleotide
ugacuuucuucccagcuuu

SEQ ID NO: 1617813 - RNA, 19 nt, Artificial Sequence
  Description of Artificial Sequence: Synthetic oligonucleotide
uacguuccagaacacagua

SEQ ID NO: 1617814 - RNA, 19 nt, Artificial Sequence
  Description of Artificial Sequence: Synthetic oligonucleotide
cucgauaaagaggccaggg

SEQ ID NO: 1617815 - RNA, 19 nt, Artificial Sequence
  Description of Artificial Sequence: Synthetic oligonucleotide
caguggacagcguuuaaug

SEQ ID NO: 1617816 - RNA, 19 nt, Artificial Sequence
  Description of Artificial Sequence: Synthetic oligonucleotide
gaucuguggaaggucuugg

SEQ ID NO: 1617817 - RNA, 19 nt, Artificial Sequence
  Description of Artificial Sequence: Synthetic oligonucleotide
guggcuuuaguggaagccg

SEQ ID NO: 1617818 - RNA, 19 nt, Artificial Sequence
  Description of Artificial Sequence: Synthetic oligonucleotide
cacucgauaaagaggccag

SEQ ID NO: 1617819 - RNA, 19 nt, Artificial Sequence
  Description of Artificial Sequence: Synthetic oligonucleotide
uucguucucccaguaaacc

SEQ ID NO: 1617820 - RNA, 19 nt, Artificial Sequence
  Description of Artificial Sequence: Synthetic oligonucleotide
ggcaugaccacaucucagg

SEQ ID NO: 1617821 - RNA, 19 nt, Artificial Sequence
  Description of Artificial Sequence: Synthetic oligonucleotide
ugcaugguuggcaggcaag

SEQ ID NO: 1617822 - RNA, 19 nt, Artificial Sequence
  Description of Artificial Sequence: Synthetic oligonucleotide
ugcuguacuuucagauucc

SEQ ID NO: 1617823 - RNA, 19 nt, Artificial Sequence
  Description of Artificial Sequence: Synthetic oligonucleotide
aagccgagcaagucucuug

SEQ ID NO: 1617824 - RNA, 19 nt, Artificial Sequence
  Description of Artificial Sequence: Synthetic oligonucleotide
uugucucuuacguuccaga

SEQ ID NO: 1617825 - RNA, 19 nt, Artificial Sequence
  Description of Artificial Sequence: Synthetic oligonucleotide
caaaggggugcaugguugg

SEQ ID NO: 1617826 - RNA, 19 nt, Artificial Sequence
  Description of Artificial Sequence: Synthetic oligonucleotide
uggcaugaccacaucucag

SEQ ID NO: 1617827 - RNA, 19 nt, Artificial Sequence
  Description of Artificial Sequence: Synthetic oligonucleotide
uggauacagaaugaugccu

SEQ ID NO: 1617828 - RNA, 19 nt, Artificial Sequence
  Description of Artificial Sequence: Synthetic oligonucleotide
uuauacggugccugagggc

SEQ ID NO: 1617829 - RNA, 19 nt, Artificial Sequence
  Description of Artificial Sequence: Synthetic oligonucleotide
ugucucuuacguuccagaa

SEQ ID NO: 1617830 - RNA, 19 nt, Artificial Sequence
  Description of Artificial Sequence: Synthetic oligonucleotide
cuuuaguggaagccgagca

SEQ ID NO: 1617831 - RNA, 19 nt, Artificial Sequence
  Description of Artificial Sequence: Synthetic oligonucleotide
uugguaugccuuuaaugau

SEQ ID NO: 1617832 - RNA, 19 nt, Artificial Sequence
  Description of Artificial Sequence: Synthetic oligonucleotide
uggauuauucaagcuguca

SEQ ID NO: 1617833 - RNA, 19 nt, Artificial Sequence
  Description of Artificial Sequence: Synthetic oligonucleotide
acuuucagauuccguaagu

SEQ ID NO: 1617834 - RNA, 19 nt, Artificial Sequence
  Description of Artificial Sequence: Synthetic oligonucleotide
gucucuugcauugguaugc

SEQ ID NO: 1617835 - RNA, 19 nt, Artificial Sequence
  Description of Artificial Sequence: Synthetic oligonucleotide
uggguuucgugucucucca

SEQ ID NO: 1617836 - RNA, 19 nt, Artificial Sequence
  Description of Artificial Sequence: Synthetic oligonucleotide
ccguaaguggcuuuagugg

SEQ ID NO: 1617837 - RNA, 19 nt, Artificial Sequence
  Description of Artificial Sequence: Synthetic oligonucleotide
ucuucgagcaaugcugaga

SEQ ID NO: 1617838 - RNA, 19 nt, Artificial Sequence
  Description of Artificial Sequence: Synthetic oligonucleotide
gagaaauuggcaggucuug

SEQ ID NO: 1617839 - RNA, 19 nt, Artificial Sequence
  Description of Artificial Sequence: Synthetic oligonucleotide
uucggcaugcuguacuuuc

SEQ ID NO: 1617840 - RNA, 19 nt, Artificial Sequence
  Description of Artificial Sequence: Synthetic oligonucleotide
gaauaucauuccaggauca

SEQ ID NO: 1617841 - RNA, 19 nt, Artificial Sequence
  Description of Artificial Sequence: Synthetic oligonucleotide
caguggauacagaaugaug

SEQ ID NO: 1617842 - RNA, 19 nt, Artificial Sequence
  Description of Artificial Sequence: Synthetic oligonucleotide
cuggaauugacugaauaga

SEQ ID NO: 1617843 - RNA, 19 nt, Artificial Sequence
  Description of Artificial Sequence: Synthetic oligonucleotide
ucuuacguuccagaacaca

SEQ ID NO: 1617844 - RNA, 19 nt, Artificial Sequence
  Description of Artificial Sequence: Synthetic oligonucleotide
uggcuuuaguggaagccga

SEQ ID NO: 1617845 - RNA, 19 nt, Artificial Sequence
  Description of Artificial Sequence: Synthetic oligonucleotide
aguagaagucgggagucag

SEQ ID NO: 1617846 - RNA, 19 nt, Artificial Sequence
  Description of Artificial Sequence: Synthetic oligonucleotide
auugacugaauagacucaa

SEQ ID NO: 1617847 - RNA, 19 nt, Artificial Sequence
  Description of Artificial Sequence: Synthetic oligonucleotide
aggugauacucaucugcag

SEQ ID NO: 1617848 - RNA, 19 nt, Artificial Sequence
  Description of Artificial Sequence: Synthetic oligonucleotide
cuguuaguuccaugcaaug

SEQ ID NO: 1617849 - RNA, 19 nt, Artificial Sequence
  Description of Artificial Sequence: Synthetic oligonucleotide
agucuaaacauugcuguau

SEQ ID NO: 1617850 - RNA, 19 nt, Artificial Sequence
  Description of Artificial Sequence: Synthetic oligonucleotide
uugucccucuauuuucaug

SEQ ID NO: 1617851 - RNA, 19 nt, Artificial Sequence
  Description of Artificial Sequence: Synthetic oligonucleotide
gagacagacuucccaggug

SEQ ID NO: 1617852 - RNA, 19 nt, Artificial Sequence
  Description of Artificial Sequence: Synthetic oligonucleotide
cuucguucucccaguaaac

SEQ ID NO: 1617853 - RNA, 19 nt, Artificial Sequence
  Description of Artificial Sequence: Synthetic oligonucleotide
ugaucuguggaaggucuug

SEQ ID NO: 1617854 - RNA, 19 nt, Artificial Sequence
  Description of Artificial Sequence: Synthetic oligonucleotide
cuucgagcaaugcugagaa

SEQ ID NO: 1617855 - RNA, 19 nt, Artificial Sequence
  Description of Artificial Sequence: Synthetic oligonucleotide
aagcugucagcuguuauuu

SEQ ID NO: 1617856 - RNA, 19 nt, Artificial Sequence
  Description of Artificial Sequence: Synthetic oligonucleotide
ugaaaagggucugcuuuca

SEQ ID NO: 1617857 - RNA, 19 nt, Artificial Sequence
  Description of Artificial Sequence: Synthetic oligonucleotide
ucacgugcuucacaguuuu

SEQ ID NO: 1617858 - RNA, 19 nt, Artificial Sequence
  Description of Artificial Sequence: Synthetic oligonucleotide
guuuugucucuuacguucc

SEQ ID NO: 1617859 - RNA, 19 nt, Artificial Sequence
  Description of Artificial Sequence: Synthetic oligonucleotide
ucaguggauacagaaugau

SEQ ID NO: 1617860 - RNA, 19 nt, Artificial Sequence
  Description of Artificial Sequence: Synthetic oligonucleotide
aggucuugucauaaagcuc

SEQ ID NO: 1617861 - RNA, 19 nt, Artificial Sequence
  Description of Artificial Sequence: Synthetic oligonucleotide
ucaagcugucagcuguuau

SEQ ID NO: 1617862 - RNA, 19 nt, Artificial Sequence
  Description of Artificial Sequence: Synthetic oligonucleotide
gaggccaggguuuggagaa

SEQ ID NO: 1617863 - RNA, 19 nt, Artificial Sequence
  Description of Artificial Sequence: Synthetic oligonucleotide
uuccguaaguggcuuuagu

SEQ ID NO: 1617864 - RNA, 19 nt, Artificial Sequence
  Description of Artificial Sequence: Synthetic oligonucleotide
ggugguuccgcauuagguc

SEQ ID NO: 1617865 - RNA, 19 nt, Artificial Sequence
  Description of Artificial Sequence: Synthetic oligonucleotide
uuggauuauucaagcuguc

SEQ ID NO: 1617866 - RNA, 19 nt, Artificial Sequence
  Description of Artificial Sequence: Synthetic oligonucleotide
cuaguauagcgucaucuaa

SEQ ID NO: 1617867 - RNA, 19 nt, Artificial Sequence
  Description of Artificial Sequence: Synthetic oligonucleotide
agcguuuaaugaaaagggu

SEQ ID NO: 1617868 - RNA, 19 nt, Artificial Sequence
  Description of Artificial Sequence: Synthetic oligonucleotide
gguaugccuuuaaugaugc

SEQ ID NO: 1617869 - RNA, 19 nt, Artificial Sequence
  Description of Artificial Sequence: Synthetic oligonucleotide
agaaauuggcaggucuugu

SEQ ID NO: 1617870 - RNA, 19 nt, Artificial Sequence
  Description of Artificial Sequence: Synthetic oligonucleotide
ucggcaugcuguacuuuca

SEQ ID NO: 1617871 - RNA, 19 nt, Artificial Sequence
  Description of Artificial Sequence: Synthetic oligonucleotide
ggacaaguguuucagugga

SEQ ID NO: 1617872 - RNA, 19 nt, Artificial Sequence
  Description of Artificial Sequence: Synthetic oligonucleotide
ugcaauguugaagcuuuuc

SEQ ID NO: 1617873 - RNA, 19 nt, Artificial Sequence
  Description of Artificial Sequence: Synthetic oligonucleotide
ugccuuuaaugaugcacuc

SEQ ID NO: 1617874 - RNA, 19 nt, Artificial Sequence
  Description of Artificial Sequence: Synthetic oligonucleotide
uccaugcaauguugaagcu

SEQ ID NO: 1617875 - RNA, 19 nt, Artificial Sequence
  Description of Artificial Sequence: Synthetic oligonucleotide
acucgauaaagaggccagg

SEQ ID NO: 1617876 - RNA, 19 nt, Artificial Sequence
  Description of Artificial Sequence: Synthetic oligonucleotide
ggagaccagcucuugagac

SEQ ID NO: 1617877 - RNA, 19 nt, Artificial Sequence
  Description of Artificial Sequence: Synthetic oligonucleotide
uugacugaauagacucaau

SEQ ID NO: 1617878 - RNA, 19 nt, Artificial Sequence
  Description of Artificial Sequence: Synthetic oligonucleotide
uuucuaguauagcgucauc

SEQ ID NO: 1617879 - RNA, 19 nt, Artificial Sequence
  Description of Artificial Sequence: Synthetic oligonucleotide
acaguagcuccuucccuga

SEQ ID NO: 1617880 - RNA, 19 nt, Artificial Sequence
  Description of Artificial Sequence: Synthetic oligonucleotide
agcacauaagagauuuggu

SEQ ID NO: 1617881 - RNA, 19 nt, Artificial Sequence
  Description of Artificial Sequence: Synthetic oligonucleotide
acacaguagcuccuucccu

SEQ ID NO: 1617882 - RNA, 19 nt, Artificial Sequence
  Description of Artificial Sequence: Synthetic oligonucleotide
uggcugcaucucuaggcag

SEQ ID NO: 1617883 - RNA, 19 nt, Artificial Sequence
  Description of Artificial Sequence: Synthetic oligonucleotide
ugguuccgcauuaggucug

SEQ ID NO: 1617884 - RNA, 19 nt, Artificial Sequence
  Description of Artificial Sequence: Synthetic oligonucleotide
agcuguuauuugaggaaag

SEQ ID NO: 1617885 - RNA, 19 nt, Artificial Sequence
  Description of Artificial Sequence: Synthetic oligonucleotide
guauagcgucaucuaaguc

SEQ ID NO: 1617886 - RNA, 19 nt, Artificial Sequence
  Description of Artificial Sequence: Synthetic oligonucleotide
gugccugagggcaaagagc

SEQ ID NO: 1617887 - RNA, 19 nt, Artificial Sequence
  Description of Artificial Sequence: Synthetic oligonucleotide
gcguuuaaugaaaaggguc

SEQ ID NO: 1617888 - RNA, 19 nt, Artificial Sequence
  Description of Artificial Sequence: Synthetic oligonucleotide
aacaguggacagcguuuaa

SEQ ID NO: 1617889 - RNA, 19 nt, Artificial Sequence
  Description of Artificial Sequence: Synthetic oligonucleotide
gagucuaaacauugcugua

SEQ ID NO: 1617890 - RNA, 19 nt, Artificial Sequence
  Description of Artificial Sequence: Synthetic oligonucleotide
cauuugauauuauccggcu

SEQ ID NO: 1617891 - RNA, 19 nt, Artificial Sequence
  Description of Artificial Sequence: Synthetic oligonucleotide
uccagcguugcuucccaaa

SEQ ID NO: 1617892 - RNA, 19 nt, Artificial Sequence
  Description of Artificial Sequence: Synthetic oligonucleotide
auucaugaccuuaacucuu

SEQ ID NO: 1617893 - RNA, 19 nt, Artificial Sequence
  Description of Artificial Sequence: Synthetic oligonucleotide
aagucgggagucagcaaga

SEQ ID NO: 1617894 - RNA, 19 nt, Artificial Sequence
  Description of Artificial Sequence: Synthetic oligonucleotide
guagaagucgggagucagc

SEQ ID NO: 1617895 - RNA, 19 nt, Artificial Sequence
  Description of Artificial Sequence: Synthetic oligonucleotide
caugaccuuaacucuucga

SEQ ID NO: 1617896 - RNA, 19 nt, Artificial Sequence
  Description of Artificial Sequence: Synthetic oligonucleotide
ccugggagucccaaagggg

SEQ ID NO: 1617897 - RNA, 19 nt, Artificial Sequence
  Description of Artificial Sequence: Synthetic oligonucleotide
ucauccacuccaggcggag

SEQ ID NO: 1617898 - RNA, 19 nt, Artificial Sequence
  Description of Artificial Sequence: Synthetic oligonucleotide
gcaggucuugucauaaagc

SEQ ID NO: 1617899 - RNA, 19 nt, Artificial Sequence
  Description of Artificial Sequence: Synthetic oligonucleotide
gaacucaaauuuauacggu

SEQ ID NO: 1617900 - RNA, 19 nt, Artificial Sequence
  Description of Artificial Sequence: Synthetic oligonucleotide
cuggcaugaccacaucuca

SEQ ID NO: 1617901 - RNA, 19 nt, Artificial Sequence
  Description of Artificial Sequence: Synthetic oligonucleotide
ggugauacucaucugcagu

SEQ ID NO: 1617902 - RNA, 19 nt, Artificial Sequence
  Description of Artificial Sequence: Synthetic oligonucleotide
gcauaacuucuuuaugaga

SEQ ID NO: 1617903 - RNA, 19 nt, Artificial Sequence
  Description of Artificial Sequence: Synthetic oligonucleotide
gccuuuaaugaugcacucg

SEQ ID NO: 1617904 - RNA, 19 nt, Artificial Sequence
  Description of Artificial Sequence: Synthetic oligonucleotide
auuccguaaguggcuuuag

SEQ ID NO: 1617905 - RNA, 19 nt, Artificial Sequence
  Description of Artificial Sequence: Synthetic oligonucleotide
uucccugaacaagaauauc

SEQ ID NO: 1617906 - RNA, 19 nt, Artificial Sequence
  Description of Artificial Sequence: Synthetic oligonucleotide
gcaugaccacaucucaggc

SEQ ID NO: 1617907 - RNA, 19 nt, Artificial Sequence
  Description of Artificial Sequence: Synthetic oligonucleotide
guuucgugucucuccagaa

SEQ ID NO: 1617908 - RNA, 19 nt, Artificial Sequence
  Description of Artificial Sequence: Synthetic oligonucleotide
auuggcaggucuugucaua

SEQ ID NO: 1617909 - RNA, 19 nt, Artificial Sequence
  Description of Artificial Sequence: Synthetic oligonucleotide
cucuucgagcaaugcugag

SEQ ID NO: 1617910 - RNA, 19 nt, Artificial Sequence
  Description of Artificial Sequence: Synthetic oligonucleotide
gauuccguaaguggcuuua

SEQ ID NO: 1617911 - RNA, 19 nt, Artificial Sequence
  Description of Artificial Sequence: Synthetic oligonucleotide
gguuucgugucucuccaga

SEQ ID NO: 1617912 - RNA, 19 nt, Artificial Sequence
  Description of Artificial Sequence: Synthetic oligonucleotide
cugggagucccaaaggggu

SEQ ID NO: 1617913 - RNA, 19 nt, Artificial Sequence
  Description of Artificial Sequence: Synthetic oligonucleotide
cucuuacguuccagaacac

SEQ ID NO: 1617914 - RNA, 19 nt, Artificial Sequence
  Description of Artificial Sequence: Synthetic oligonucleotide
gcuguacuuucagauuccg

SEQ ID NO: 1617915 - RNA, 19 nt, Artificial Sequence
  Description of Artificial Sequence: Synthetic oligonucleotide
accuuaacucuucgagcaa

SEQ ID NO: 1617916 - RNA, 19 nt, Artificial Sequence
  Description of Artificial Sequence: Synthetic oligonucleotide
guggaagccgagcaagucu

SEQ ID NO: 1617917 - RNA, 19 nt, Artificial Sequence
  Description of Artificial Sequence: Synthetic oligonucleotide
agguugguccuggagggcu

SEQ ID NO: 1617918 - RNA, 19 nt, Artificial Sequence
  Description of Artificial Sequence: Synthetic oligonucleotide
acguuccagaacacaguag

SEQ ID NO: 1617919 - RNA, 19 nt, Artificial Sequence
  Description of Artificial Sequence: Synthetic oligonucleotide
caggaucaccucuuuugca

SEQ ID NO: 1617920 - RNA, 19 nt, Artificial Sequence
  Description of Artificial Sequence: Synthetic oligonucleotide
gauacagaaugaugccuuu

SEQ ID NO: 1617921 - RNA, 19 nt, Artificial Sequence
  Description of Artificial Sequence: Synthetic oligonucleotide
auuauccggcucauuucca

SEQ ID NO: 1617922 - RNA, 19 nt, Artificial Sequence
  Description of Artificial Sequence: Synthetic oligonucleotide
gguuugugggccacuuucc

SEQ ID NO: 1617923 - RNA, 19 nt, Artificial Sequence
  Description of Artificial Sequence: Synthetic oligonucleotide
agaagucgggagucagcaa

SEQ ID NO: 1617924 - RNA, 19 nt, Artificial Sequence
  Description of Artificial Sequence: Synthetic oligonucleotide
cguuuaaugaaaagggucu

SEQ ID NO: 1617925 - RNA, 19 nt, Artificial Sequence
  Description of Artificial Sequence: Synthetic oligonucleotide
ggucuguuaguuccaugca

SEQ ID NO: 1617926 - RNA, 19 nt, Artificial Sequence
  Description of Artificial Sequence: Synthetic oligonucleotide
cccaguaaaccagagccac

SEQ ID NO: 1617927 - RNA, 19 nt, Artificial Sequence
  Description of Artificial Sequence: Synthetic oligonucleotide
gcuuuaguggaagccgagc

SEQ ID NO: 1617928 - RNA, 19 nt, Artificial Sequence
  Description of Artificial Sequence: Synthetic oligonucleotide
uggagaagccuggcuggca

SEQ ID NO: 1617929 - RNA, 19 nt, Artificial Sequence
  Description of Artificial Sequence: Synthetic oligonucleotide
guuugugggccacuuuccu

SEQ ID NO: 1617930 - RNA, 19 nt, Artificial Sequence
  Description of Artificial Sequence: Synthetic oligonucleotide
gucuaaacauugcuguauu

SEQ ID NO: 1617931 - RNA, 19 nt, Artificial Sequence
  Description of Artificial Sequence: Synthetic oligonucleotide
uucgagcaaugcugagaaa

SEQ ID NO: 1617932 - RNA, 19 nt, Artificial Sequence
  Description of Artificial Sequence: Synthetic oligonucleotide
cguaaguggcuuuagugga

SEQ ID NO: 1617933 - RNA, 19 nt, Artificial Sequence
  Description of Artificial Sequence: Synthetic oligonucleotide
caccucuuuugcaguguuc

SEQ ID NO: 1617934 - RNA, 19 nt, Artificial Sequence
  Description of Artificial Sequence: Synthetic oligonucleotide
gucccaguagaagucggga

SEQ ID NO: 1617935 - RNA, 19 nt, Artificial Sequence
  Description of Artificial Sequence: Synthetic oligonucleotide
caaugaauuuguccagcgu

SEQ ID NO: 1617936 - RNA, 19 nt, Artificial Sequence
  Description of Artificial Sequence: Synthetic oligonucleotide
agauuccguaaguggcuuu

SEQ ID NO: 1617937 - RNA, 19 nt, Artificial Sequence
  Description of Artificial Sequence: Synthetic oligonucleotide
ggaauugacugaauagacu

SEQ ID NO: 1617938 - RNA, 19 nt, Artificial Sequence
  Description of Artificial Sequence: Synthetic oligonucleotide
guaaguggcuuuaguggaa

SEQ ID NO: 1617939 - RNA, 19 nt, Artificial Sequence
  Description of Artificial Sequence: Synthetic oligonucleotide
auuugguuugugggccacu

SEQ ID NO: 1617940 - RNA, 19 nt, Artificial Sequence
  Description of Artificial Sequence: Synthetic oligonucleotide
caucacgugcuucacaguu

SEQ ID NO: 1617941 - RNA, 19 nt, Artificial Sequence
  Description of Artificial Sequence: Synthetic oligonucleotide
ugauauuauccggcucauu

SEQ ID NO: 1617942 - RNA, 19 nt, Artificial Sequence
  Description of Artificial Sequence: Synthetic oligonucleotide
gcaugguuggcaggcaagc

SEQ ID NO: 1617943 - RNA, 19 nt, Artificial Sequence
  Description of Artificial Sequence: Synthetic oligonucleotide
cuugcauugguaugccuuu

SEQ ID NO: 1617944 - RNA, 19 nt, Artificial Sequence
  Description of Artificial Sequence: Synthetic oligonucleotide
gcauuaggucuguuaguuc

SEQ ID NO: 1617945 - RNA, 19 nt, Artificial Sequence
  Description of Artificial Sequence: Synthetic oligonucleotide
caagcugucagcuguuauu

SEQ ID NO: 1617946 - RNA, 19 nt, Artificial Sequence
  Description of Artificial Sequence: Synthetic oligonucleotide
gcuugacuuucuucccagc

SEQ ID NO: 1617947 - RNA, 19 nt, Artificial Sequence
  Description of Artificial Sequence: Synthetic oligonucleotide
uugcauugguaugccuuua

SEQ ID NO: 1617948 - RNA, 19 nt, Artificial Sequence
  Description of Artificial Sequence: Synthetic oligonucleotide
cuuuaaugaugcacucgau

SEQ ID NO: 1617949 - RNA, 19 nt, Artificial Sequence
  Description of Artificial Sequence: Synthetic oligonucleotide
gaaaagggucugcuuucau

SEQ ID NO: 1617950 - RNA, 19 nt, Artificial Sequence
  Description of Artificial Sequence: Synthetic oligonucleotide
ccaguagaagucgggaguc

SEQ ID NO: 1617951 - RNA, 19 nt, Artificial Sequence
  Description of Artificial Sequence: Synthetic oligonucleotide
ggcuuuaguggaagccgag

SEQ ID NO: 1617952 - RNA, 19 nt, Artificial Sequence
  Description of Artificial Sequence: Synthetic oligonucleotide
uuucggcaugcuguacuuu

SEQ ID NO: 1617953 - RNA, 19 nt, Artificial Sequence
  Description of Artificial Sequence: Synthetic oligonucleotide
gugcaugguuggcaggcaa

SEQ ID NO: 1617954 - RNA, 19 nt, Artificial Sequence
  Description of Artificial Sequence: Synthetic oligonucleotide
gucgggagucagcaagaaa

SEQ ID NO: 1617955 - RNA, 19 nt, Artificial Sequence
  Description of Artificial Sequence: Synthetic oligonucleotide
cccaaauagccaguuucac

SEQ ID NO: 1617956 - RNA, 19 nt, Artificial Sequence
  Description of Artificial Sequence: Synthetic oligonucleotide
caguuuagauugucccucu

SEQ ID NO: 1617957 - RNA, 19 nt, Artificial Sequence
  Description of Artificial Sequence: Synthetic oligonucleotide
aucauccacuccaggcgga

SEQ ID NO: 1617958 - RNA, 19 nt, Artificial Sequence
  Description of Artificial Sequence: Synthetic oligonucleotide
caacaguggacagcguuua

SEQ ID NO: 1617959 - RNA, 19 nt, Artificial Sequence
  Description of Artificial Sequence: Synthetic oligonucleotide
cucuucguucucccaguaa

SEQ ID NO: 1617960 - RNA, 19 nt, Artificial Sequence
  Description of Artificial Sequence: Synthetic oligonucleotide
auucaagcugucagcuguu

SEQ ID NO: 1617961 - RNA, 19 nt, Artificial Sequence
  Description of Artificial Sequence: Synthetic oligonucleotide
ggguuucgugucucuccag

SEQ ID NO: 1617962 - RNA, 19 nt, Artificial Sequence
  Description of Artificial Sequence: Synthetic oligonucleotide
cucuugaucuguggaaggu

SEQ ID NO: 1617963 - RNA, 19 nt, Artificial Sequence
  Description of Artificial Sequence: Synthetic oligonucleotide
auaaaccacuuagcacaua

SEQ ID NO: 1617964 - RNA, 19 nt, Artificial Sequence
  Description of Artificial Sequence: Synthetic oligonucleotide
gguuuggagaagccuggcu

SEQ ID NO: 1617965 - RNA, 19 nt, Artificial Sequence
  Description of Artificial Sequence: Synthetic oligonucleotide
gggcccgguucucauucag

SEQ ID NO: 1617966 - RNA, 19 nt, Artificial Sequence
  Description of Artificial Sequence: Synthetic oligonucleotide
gucuugguuuugggacaag

SEQ ID NO: 1617967 - RNA, 19 nt, Artificial Sequence
  Description of Artificial Sequence: Synthetic oligonucleotide
cuuucggcaugcuguacuu

SEQ ID NO: 1617968 - RNA, 19 nt, Artificial Sequence
  Description of Artificial Sequence: Synthetic oligonucleotide
caguagaagucgggaguca

SEQ ID NO: 1617969 - RNA, 19 nt, Artificial Sequence
  Description of Artificial Sequence: Synthetic oligonucleotide
ggcuggcaugaccacaucu

SEQ ID NO: 1617970 - RNA, 19 nt, Artificial Sequence
  Description of Artificial Sequence: Synthetic oligonucleotide
cgucaucuaaguccagcuc

SEQ ID NO: 1617971 - RNA, 19 nt, Artificial Sequence
  Description of Artificial Sequence: Synthetic oligonucleotide
cucugaguuuaacuugauu

SEQ ID NO: 1617972 - RNA, 19 nt, Artificial Sequence
  Description of Artificial Sequence: Synthetic oligonucleotide
ggucugcuuucauuugaua

SEQ ID NO: 1617973 - RNA, 19 nt, Artificial Sequence
  Description of Artificial Sequence: Synthetic oligonucleotide
cagcguugcuucccaaaua

SEQ ID NO: 1617974 - RNA, 19 nt, Artificial Sequence
  Description of Artificial Sequence: Synthetic oligonucleotide
ccggcucauuuccaggauc

SEQ ID NO: 1617975 - RNA, 19 nt, Artificial Sequence
  Description of Artificial Sequence: Synthetic oligonucleotide
gcguugcuucccaaauagc

SEQ ID NO: 1617976 - RNA, 19 nt, Artificial Sequence
  Description of Artificial Sequence: Synthetic oligonucleotide
gacaaguguuucaguggau

SEQ ID NO: 1617977 - RNA, 19 nt, Artificial Sequence
  Description of Artificial Sequence: Synthetic oligonucleotide
caaaugcugugcacugcau

SEQ ID NO: 1617978 - RNA, 19 nt, Artificial Sequence
  Description of Artificial Sequence: Synthetic oligonucleotide
gguuuugggacaaguguuu

SEQ ID NO: 1617979 - RNA, 19 nt, Artificial Sequence
  Description of Artificial Sequence: Synthetic oligonucleotide
ggucuugguuuugggacaa

SEQ ID NO: 1617980 - RNA, 19 nt, Artificial Sequence
  Description of Artificial Sequence: Synthetic oligonucleotide
cucuugcauugguaugccu

SEQ ID NO: 1617981 - RNA, 19 nt, Artificial Sequence
  Description of Artificial Sequence: Synthetic oligonucleotide
auacggugccugagggcaa

SEQ ID NO: 1617982 - RNA, 19 nt, Artificial Sequence
  Description of Artificial Sequence: Synthetic oligonucleotide
caguagcuccuucccugaa

SEQ ID NO: 1617983 - RNA, 19 nt, Artificial Sequence
  Description of Artificial Sequence: Synthetic oligonucleotide
gccgagcaagucucuugca

SEQ ID NO: 1617984 - RNA, 19 nt, Artificial Sequence
  Description of Artificial Sequence: Synthetic oligonucleotide
augcaauguugaagcuuuu

SEQ ID NO: 1617985 - RNA, 19 nt, Artificial Sequence
  Description of Artificial Sequence: Synthetic oligonucleotide
gcugugcacugcaucaggu

SEQ ID NO: 1617986 - RNA, 19 nt, Artificial Sequence
  Description of Artificial Sequence: Synthetic oligonucleotide
guccagcguugcuucccaa

SEQ ID NO: 1617987 - RNA, 19 nt, Artificial Sequence
  Description of Artificial Sequence: Synthetic oligonucleotide
gcucuucguucucccagua

SEQ ID NO: 1617988 - RNA, 19 nt, Artificial Sequence
  Description of Artificial Sequence: Synthetic oligonucleotide
ccagcguugcuucccaaau

SEQ ID NO: 1617989 - RNA, 19 nt, Artificial Sequence
  Description of Artificial Sequence: Synthetic oligonucleotide
ccuuaacucuucgagcaau

SEQ ID NO: 1617990 - RNA, 19 nt, Artificial Sequence
  Description of Artificial Sequence: Synthetic oligonucleotide
ccgagcaagucucuugcau

SEQ ID NO: 1617991 - RNA, 19 nt, Artificial Sequence
  Description of Artificial Sequence: Synthetic oligonucleotide
cuguauuuucaggcucuuu

SEQ ID NO: 1617992 - RNA, 19 nt, Artificial Sequence
  Description of Artificial Sequence: Synthetic oligonucleotide
cgcauuaggucuguuaguu

SEQ ID NO: 1617993 - RNA, 19 nt, Artificial Sequence
  Description of Artificial Sequence: Synthetic oligonucleotide
ccgcauuaggucuguuagu

SEQ ID NO: 1617994 - RNA, 19 nt, Artificial Sequence
  Description of Artificial Sequence: Synthetic oligonucleotide
gguuccgcauuaggucugu

SEQ ID NO: 1617995 - RNA, 19 nt, Artificial Sequence
  Description of Artificial Sequence: Synthetic oligonucleotide
guuccgcauuaggucuguu

SEQ ID NO: 1617996 - RNA, 19 nt, Artificial Sequence
  Description of Artificial Sequence: Synthetic oligonucleotide
ccacuucauagggcugggu

SEQ ID NO: 1617997 - RNA, 19 nt, Artificial Sequence
  Description of Artificial Sequence: Synthetic oligonucleotide
aaauuaagucccuacagcc

SEQ ID NO: 1617998 - RNA, 19 nt, Artificial Sequence
  Description of Artificial Sequence: Synthetic oligonucleotide
uauuaguaagcccagagag

SEQ ID NO: 1617999 - RNA, 19 nt, Artificial Sequence
  Description of Artificial Sequence: Synthetic oligonucleotide
aauccauuggaucaggauc

SEQ ID NO: 1618000 - RNA, 19 nt, Artificial Sequence
  Description of Artificial Sequence: Synthetic oligonucleotide
uauauauacauauauauua

SEQ ID NO: 1618001 - RNA, 19 nt, Artificial Sequence
  Description of Artificial Sequence: Synthetic oligonucleotide
aauugaugagcucacacag

SEQ ID NO: 1618002 - RNA, 19 nt, Artificial Sequence
  Description of Artificial Sequence: Synthetic oligonucleotide
aauaagaagccaaaagggc

SEQ ID NO: 1618003 - RNA, 19 nt, Artificial Sequence
  Description of Artificial Sequence: Synthetic oligonucleotide
aaggaauggacugaaaagc

SEQ ID NO: 1618004 - RNA, 19 nt, Artificial Sequence
  Description of Artificial Sequence: Synthetic oligonucleotide
gaaggaauguauuaguaag

SEQ ID NO: 1618005 - RNA, 19 nt, Artificial Sequence
  Description of Artificial Sequence: Synthetic oligonucleotide
uucuuaggaaaccaguugg

SEQ ID NO: 1618006 - RNA, 19 nt, Artificial Sequence
  Description of Artificial Sequence: Synthetic oligonucleotide
uauaaauuaagucccuaca

SEQ ID NO: 1618007 - RNA, 19 nt, Artificial Sequence
  Description of Artificial Sequence: Synthetic oligonucleotide
gaaagagagagagagagag

SEQ ID NO: 1618008 - RNA, 19 nt, Artificial Sequence
  Description of Artificial Sequence: Synthetic oligonucleotide
uaaauuaagucccuacagc

SEQ ID NO: 1618009 - RNA, 19 nt, Artificial Sequence
  Description of Artificial Sequence: Synthetic oligonucleotide
uguauuaguaagcccagag

SEQ ID NO: 1618010 - RNA, 19 nt, Artificial Sequence
  Description of Artificial Sequence: Synthetic oligonucleotide
augucagugguguuaaugc

SEQ ID NO: 1618011 - RNA, 19 nt, Artificial Sequence
  Description of Artificial Sequence: Synthetic oligonucleotide
gagagaaagagagagagag

SEQ ID NO: 1618012 - RNA, 19 nt, Artificial Sequence
  Description of Artificial Sequence: Synthetic oligonucleotide
aagagagagagagagagag

SEQ ID NO: 1618013 - RNA, 19 nt, Artificial Sequence
  Description of Artificial Sequence: Synthetic oligonucleotide
auaagaagccaaaagggcc

SEQ ID NO: 1618014 - RNA, 19 nt, Artificial Sequence
  Description of Artificial Sequence: Synthetic oligonucleotide
uauagugaauugaugagcu

SEQ ID NO: 1618015 - RNA, 19 nt, Artificial Sequence
  Description of Artificial Sequence: Synthetic oligonucleotide
auuaagucccuacagccac

SEQ ID NO: 1618016 - RNA, 19 nt, Artificial Sequence
  Description of Artificial Sequence: Synthetic oligonucleotide
gagaaagagagagagagag

SEQ ID NO: 1618017 - RNA, 19 nt, Artificial Sequence
  Description of Artificial Sequence: Synthetic oligonucleotide
gagagagagagaaagagag

SEQ ID NO: 1618018 - RNA, 19 nt, Artificial Sequence
  Description of Artificial Sequence: Synthetic oligonucleotide
gagagagagagaaucaucg

SEQ ID NO: 1618019 - RNA, 19 nt, Artificial Sequence
  Description of Artificial Sequence: Synthetic oligonucleotide
aaggaauguauuaguaagc

SEQ ID NO: 1618020 - RNA, 19 nt, Artificial Sequence
  Description of Artificial Sequence: Synthetic oligonucleotide
gagagagagaaagagagag

SEQ ID NO: 1618021 - RNA, 19 nt, Artificial Sequence
  Description of Artificial Sequence: Synthetic oligonucleotide
aggaauguauuaguaagcc

SEQ ID NO: 1618022 - RNA, 19 nt, Artificial Sequence
  Description of Artificial Sequence: Synthetic oligonucleotide
gagagagaaagagagagag

SEQ ID NO: 1618023 - RNA, 19 nt, Artificial Sequence
  Description of Artificial Sequence: Synthetic oligonucleotide
aucguauugcuucucaauc

SEQ ID NO: 1618024 - RNA, 19 nt, Artificial Sequence
  Description of Artificial Sequence: Synthetic oligonucleotide
ugacaagauagcuuggacc

SEQ ID NO: 1618025 - RNA, 19 nt, Artificial Sequence
  Description of Artificial Sequence: Synthetic oligonucleotide
uauauuaaccauucaugga

SEQ ID NO: 1618026 - RNA, 19 nt, Artificial Sequence
  Description of Artificial Sequence: Synthetic oligonucleotide
gagagagagagagagaaag

SEQ ID NO: 1618027 - RNA, 19 nt, Artificial Sequence
  Description of Artificial Sequence: Synthetic oligonucleotide
acauauauauuaaccauuc

SEQ ID NO: 1618028 - RNA, 19 nt, Artificial Sequence
  Description of Artificial Sequence: Synthetic oligonucleotide
ucuuaggaaaccaguuggg

SEQ ID NO: 1618029 - RNA, 19 nt, Artificial Sequence
  Description of Artificial Sequence: Synthetic oligonucleotide
aaugucacugcuaaaacau

SEQ ID NO: 1618030 - RNA, 19 nt, Artificial Sequence
  Description of Artificial Sequence: Synthetic oligonucleotide
aguacagcccagcuguggc

SEQ ID NO: 1618031 - RNA, 19 nt, Artificial Sequence
  Description of Artificial Sequence: Synthetic oligonucleotide
cuauaaauuaagucccuac

SEQ ID NO: 1618032 - RNA, 19 nt, Artificial Sequence
  Description of Artificial Sequence: Synthetic oligonucleotide
gagagagagagagaaagag

SEQ ID NO: 1618033 - RNA, 19 nt, Artificial Sequence
  Description of Artificial Sequence: Synthetic oligonucleotide
auuaaccauucauggaggg

SEQ ID NO: 1618034 - RNA, 19 nt, Artificial Sequence
  Description of Artificial Sequence: Synthetic oligonucleotide
gaacugagagaucugcucc

SEQ ID NO: 1618035 - RNA, 19 nt, Artificial Sequence
  Description of Artificial Sequence: Synthetic oligonucleotide
ugaucagaggaucuggcgu

SEQ ID NO: 1618036 - RNA, 19 nt, Artificial Sequence
  Description of Artificial Sequence: Synthetic oligonucleotide
aguaagcccagagagagag

SEQ ID NO: 1618037 - RNA, 19 nt, Artificial Sequence
  Description of Artificial Sequence: Synthetic oligonucleotide
cauauauauacauauauau

SEQ ID NO: 1618038 - RNA, 19 nt, Artificial Sequence
  Description of Artificial Sequence: Synthetic oligonucleotide
uaaccauucauggagggca

SEQ ID NO: 1618039 - RNA, 19 nt, Artificial Sequence
  Description of Artificial Sequence: Synthetic oligonucleotide
uaagcccagagagagagag

SEQ ID NO: 1618040 - RNA, 19 nt, Artificial Sequence
  Description of Artificial Sequence: Synthetic oligonucleotide
ggagcuuagagauccaggg

SEQ ID NO: 1618041 - RNA, 19 nt, Artificial Sequence
  Description of Artificial Sequence: Synthetic oligonucleotide
uggagcgacagccacaggu

SEQ ID NO: 1618042 - RNA, 19 nt, Artificial Sequence
  Description of Artificial Sequence: Synthetic oligonucleotide
gaucuucuuaacuggggcc

SEQ ID NO: 1618043 - RNA, 19 nt, Artificial Sequence
  Description of Artificial Sequence: Synthetic oligonucleotide
gaaguucucacgcccaggc

SEQ ID NO: 1618044 - RNA, 19 nt, Artificial Sequence
  Description of Artificial Sequence: Synthetic oligonucleotide
uguuccucaagccccagac

SEQ ID NO: 1618045 - RNA, 19 nt, Artificial Sequence
  Description of Artificial Sequence: Synthetic oligonucleotide
ugcgugguaauccauugga

SEQ ID NO: 1618046 - RNA, 19 nt, Artificial Sequence
  Description of Artificial Sequence: Synthetic oligonucleotide
agugguguuaaugccauag

SEQ ID NO: 1618047 - RNA, 19 nt, Artificial Sequence
  Description of Artificial Sequence: Synthetic oligonucleotide
agagcuuaggaaaagagaa

SEQ ID NO: 1618048 - RNA, 19 nt, Artificial Sequence
  Description of Artificial Sequence: Synthetic oligonucleotide
gagagagagagagagaauc

SEQ ID NO: 1618049 - RNA, 19 nt, Artificial Sequence
  Description of Artificial Sequence: Synthetic oligonucleotide
agagagaaucaucgggcac

SEQ ID NO: 1618050 - RNA, 19 nt, Artificial Sequence
  Description of Artificial Sequence: Synthetic oligonucleotide
ucugaucagaggaucuggc

SEQ ID NO: 1618051 - RNA, 19 nt, Artificial Sequence
  Description of Artificial Sequence: Synthetic oligonucleotide
ugguugucugagaaguucc

SEQ ID NO: 1618052 - RNA, 19 nt, Artificial Sequence
  Description of Artificial Sequence: Synthetic oligonucleotide
ugacuucuagccaaggaau

SEQ ID NO: 1618053 - RNA, 19 nt, Artificial Sequence
  Description of Artificial Sequence: Synthetic oligonucleotide
agagcguccaagcuggaug

SEQ ID NO: 1618054 - RNA, 19 nt, Artificial Sequence
  Description of Artificial Sequence: Synthetic oligonucleotide
ucuguugcaccucucggcu

SEQ ID NO: 1618055 - RNA, 19 nt, Artificial Sequence
  Description of Artificial Sequence: Synthetic oligonucleotide
uguguugaaggaauguauu

SEQ ID NO: 1618056 - RNA, 19 nt, Artificial Sequence
  Description of Artificial Sequence: Synthetic oligonucleotide
ugcacacaagccauguucu

SEQ ID NO: 1618057 - RNA, 19 nt, Artificial Sequence
  Description of Artificial Sequence: Synthetic oligonucleotide
cuucuuaggaaaccaguug

SEQ ID NO: 1618058 - RNA, 19 nt, Artificial Sequence
  Description of Artificial Sequence: Synthetic oligonucleotide
aauuaagucccuacagcca

SEQ ID NO: 1618059 - RNA, 19 nt, Artificial Sequence
  Description of Artificial Sequence: Synthetic oligonucleotide
gagcguccaagcuggaugg

SEQ ID NO: 1618060 - RNA, 19 nt, Artificial Sequence
  Description of Artificial Sequence: Synthetic oligonucleotide
uuauggaaguucucacgcc

SEQ ID NO: 1618061 - RNA, 19 nt, Artificial Sequence
  Description of Artificial Sequence: Synthetic oligonucleotide
ucguauugcuucucaaucu

SEQ ID NO: 1618062 - RNA, 19 nt, Artificial Sequence
  Description of Artificial Sequence: Synthetic oligonucleotide
ugucagugguguuaaugcc

SEQ ID NO: 1618063 - RNA, 19 nt, Artificial Sequence
  Description of Artificial Sequence: Synthetic oligonucleotide
ucuagccaaggaauggacu

SEQ ID NO: 1618064 - RNA, 19 nt, Artificial Sequence
  Description of Artificial Sequence: Synthetic oligonucleotide
cagaguggagcucaagacc

SEQ ID NO: 1618065 - RNA, 19 nt, Artificial Sequence
  Description of Artificial Sequence: Synthetic oligonucleotide
aacugagagaucugcucca

SEQ ID NO: 1618066 - RNA, 19 nt, Artificial Sequence
  Description of Artificial Sequence: Synthetic oligonucleotide
uaugcagguccccgguugg

SEQ ID NO: 1618067 - RNA, 19 nt, Artificial Sequence
  Description of Artificial Sequence: Synthetic oligonucleotide
cugaucagaggaucuggcg

SEQ ID NO: 1618068 - RNA, 19 nt, Artificial Sequence
  Description of Artificial Sequence: Synthetic oligonucleotide
agugaauugaugagcucac

SEQ ID NO: 1618069 - RNA, 19 nt, Artificial Sequence
  Description of Artificial Sequence: Synthetic oligonucleotide
ggguauagugaauugauga

SEQ ID NO: 1618070 - RNA, 19 nt, Artificial Sequence
  Description of Artificial Sequence: Synthetic oligonucleotide
gagagagagagagagagaa

SEQ ID NO: 1618071 - RNA, 19 nt, Artificial Sequence
  Description of Artificial Sequence: Synthetic oligonucleotide
agcccagagagagagagag

SEQ ID NO: 1618072 - RNA, 19 nt, Artificial Sequence
  Description of Artificial Sequence: Synthetic oligonucleotide
uguugcaccucucggcuca

SEQ ID NO: 1618073 - RNA, 19 nt, Artificial Sequence
  Description of Artificial Sequence: Synthetic oligonucleotide
ugggcaagugcucacgcac

SEQ ID NO: 1618074 - RNA, 19 nt, Artificial Sequence
  Description of Artificial Sequence: Synthetic oligonucleotide
auucugacagcugugguga

SEQ ID NO: 1618075 - RNA, 19 nt, Artificial Sequence
  Description of Artificial Sequence: Synthetic oligonucleotide
acccagguucauuaguguc

SEQ ID NO: 1618076 - RNA, 19 nt, Artificial Sequence
  Description of Artificial Sequence: Synthetic oligonucleotide
auauauauacauauauauu

SEQ ID NO: 1618077 - RNA, 19 nt, Artificial Sequence
  Description of Artificial Sequence: Synthetic oligonucleotide
cuguagcccaaucacauuc

SEQ ID NO: 1618078 - RNA, 19 nt, Artificial Sequence
  Description of Artificial Sequence: Synthetic oligonucleotide
ucaggccguaugcaggucc

SEQ ID NO: 1618079 - RNA, 19 nt, Artificial Sequence
  Description of Artificial Sequence: Synthetic oligonucleotide
cgcccuauaaauuaagucc

SEQ ID NO: 1618080 - RNA, 19 nt, Artificial Sequence
  Description of Artificial Sequence: Synthetic oligonucleotide
uuaaccauucauggagggc

SEQ ID NO: 1618081 - RNA, 19 nt, Artificial Sequence
  Description of Artificial Sequence: Synthetic oligonucleotide
guauuaguaagcccagaga

SEQ ID NO: 1618082 - RNA, 19 nt, Artificial Sequence
  Description of Artificial Sequence: Synthetic oligonucleotide
guuaaugccauagcgcuca

SEQ ID NO: 1618083 - RNA, 19 nt, Artificial Sequence
  Description of Artificial Sequence: Synthetic oligonucleotide
uguagcccaaucacauucu

SEQ ID NO: 1618084 - RNA, 19 nt, Artificial Sequence
  Description of Artificial Sequence: Synthetic oligonucleotide
uggagcucaagacccgacc

SEQ ID NO: 1618085 - RNA, 19 nt, Artificial Sequence
  Description of Artificial Sequence: Synthetic oligonucleotide
acagagcuuaggaaaagag

SEQ ID NO: 1618086 - RNA, 19 nt, Artificial Sequence
  Description of Artificial Sequence: Synthetic oligonucleotide
agagagagagagaaucauc

SEQ ID NO: 1618087 - RNA, 19 nt, Artificial Sequence
  Description of Artificial Sequence: Synthetic oligonucleotide
aaguacagcccagcugugg

SEQ ID NO: 1618088 - RNA, 19 nt, Artificial Sequence
  Description of Artificial Sequence: Synthetic oligonucleotide
accccuuagccacagugag

SEQ ID NO: 1618089 - RNA, 19 nt, Artificial Sequence
  Description of Artificial Sequence: Synthetic oligonucleotide
uucuagccaaggaauggac

SEQ ID NO: 1618090 - RNA, 19 nt, Artificial Sequence
  Description of Artificial Sequence: Synthetic oligonucleotide
acaggcuugcggcacugcg

SEQ ID NO: 1618091 - RNA, 19 nt, Artificial Sequence
  Description of Artificial Sequence: Synthetic oligonucleotide
ucaagacccgaccaggcuu

SEQ ID NO: 1618092 - RNA, 19 nt, Artificial Sequence
  Description of Artificial Sequence: Synthetic oligonucleotide
gguguuaaugccauagcgc

SEQ ID NO: 1618093 - RNA, 19 nt, Artificial Sequence
  Description of Artificial Sequence: Synthetic oligonucleotide
uuaacuggggccugccccu

SEQ ID NO: 1618094 - RNA, 19 nt, Artificial Sequence
  Description of Artificial Sequence: Synthetic oligonucleotide
gacccgaccaggcuuggag

SEQ ID NO: 1618095 - RNA, 19 nt, Artificial Sequence
  Description of Artificial Sequence: Synthetic oligonucleotide
auccauuggaucaggaucu

SEQ ID NO: 1618096 - RNA, 19 nt, Artificial Sequence
  Description of Artificial Sequence: Synthetic oligonucleotide
ggaauguauuaguaagccc

SEQ ID NO: 1618097 - RNA, 19 nt, Artificial Sequence
  Description of Artificial Sequence: Synthetic oligonucleotide
ugcuaaguacagcccagcu

SEQ ID NO: 1618098 - RNA, 19 nt, Artificial Sequence
  Description of Artificial Sequence: Synthetic oligonucleotide
aaaguugguccaguuuuga

SEQ ID NO: 1618099 - RNA, 19 nt, Artificial Sequence
  Description of Artificial Sequence: Synthetic oligonucleotide
ugccugagaugcuccacgg

SEQ ID NO: 1618100 - RNA, 19 nt, Artificial Sequence
  Description of Artificial Sequence: Synthetic oligonucleotide
guaagagaggcauacuugu

SEQ ID NO: 1618101 - RNA, 19 nt, Artificial Sequence
  Description of Artificial Sequence: Synthetic oligonucleotide
gagcuuaggaaaagagaag

SEQ ID NO: 1618102 - RNA, 19 nt, Artificial Sequence
  Description of Artificial Sequence: Synthetic oligonucleotide
cauuguggaggccuggauc

SEQ ID NO: 1618103 - RNA, 19 nt, Artificial Sequence
  Description of Artificial Sequence: Synthetic oligonucleotide
acaagauagcuuggacccc

SEQ ID NO: 1618104 - RNA, 19 nt, Artificial Sequence
  Description of Artificial Sequence: Synthetic oligonucleotide
acauauauauacauauaua

SEQ ID NO: 1618105 - RNA, 19 nt, Artificial Sequence
  Description of Artificial Sequence: Synthetic oligonucleotide
guguccgcugcacacaagc

SEQ ID NO: 1618106 - RNA, 19 nt, Artificial Sequence
  Description of Artificial Sequence: Synthetic oligonucleotide
guccccaucguauugcuuc

SEQ ID NO: 1618107 - RNA, 19 nt, Artificial Sequence
  Description of Artificial Sequence: Synthetic oligonucleotide
ugguaauccauuggaucag

SEQ ID NO: 1618108 - RNA, 19 nt, Artificial Sequence
  Description of Artificial Sequence: Synthetic oligonucleotide
ucuuaacuggggccugccc

SEQ ID NO: 1618109 - RNA, 19 nt, Artificial Sequence
  Description of Artificial Sequence: Synthetic oligonucleotide
cucucagggaaugucacug

SEQ ID NO: 1618110 - RNA, 19 nt, Artificial Sequence
  Description of Artificial Sequence: Synthetic oligonucleotide
uuagccacagugagaggaa

SEQ ID NO: 1618111 - RNA, 19 nt, Artificial Sequence
  Description of Artificial Sequence: Synthetic oligonucleotide
gacuucuagccaaggaaug

SEQ ID NO: 1618112 - RNA, 19 nt, Artificial Sequence
  Description of Artificial Sequence: Synthetic oligonucleotide
gagcucaagacccgaccag

SEQ ID NO: 1618113 - RNA, 19 nt, Artificial Sequence
  Description of Artificial Sequence: Synthetic oligonucleotide
uuaagucccuacagccaca

SEQ ID NO: 1618114 - RNA, 19 nt, Artificial Sequence
  Description of Artificial Sequence: Synthetic oligonucleotide
cucaggguauagugaauug

SEQ ID NO: 1618115 - RNA, 19 nt, Artificial Sequence
  Description of Artificial Sequence: Synthetic oligonucleotide
guaugcagguccccgguug

SEQ ID NO: 1618116 - RNA, 19 nt, Artificial Sequence
  Description of Artificial Sequence: Synthetic oligonucleotide
caucccauagccagucaug

SEQ ID NO: 1618117 - RNA, 19 nt, Artificial Sequence
  Description of Artificial Sequence: Synthetic oligonucleotide
ugucugaucagaggaucug

SEQ ID NO: 1618118 - RNA, 19 nt, Artificial Sequence
  Description of Artificial Sequence: Synthetic oligonucleotide
aggaauggacugaaaagca

SEQ ID NO: 1618119 - RNA, 19 nt, Artificial Sequence
  Description of Artificial Sequence: Synthetic oligonucleotide
agagagagagagaaagaga

SEQ ID NO: 1618120 - RNA, 19 nt, Artificial Sequence
  Description of Artificial Sequence: Synthetic oligonucleotide
uguccgcugcacacaagcc

SEQ ID NO: 1618121 - RNA, 19 nt, Artificial Sequence
  Description of Artificial Sequence: Synthetic oligonucleotide
aaagagagagagagagaga

SEQ ID NO: 1618122 - RNA, 19 nt, Artificial Sequence
  Description of Artificial Sequence: Synthetic oligonucleotide
aaguucucacgcccaggcu

SEQ ID NO: 1618123 - RNA, 19 nt, Artificial Sequence
  Description of Artificial Sequence: Synthetic oligonucleotide
caucuuugagccaguuaug

SEQ ID NO: 1618124 - RNA, 19 nt, Artificial Sequence
  Description of Artificial Sequence: Synthetic oligonucleotide
ggucccaggggaaaguugg

SEQ ID NO: 1618125 - RNA, 19 nt, Artificial Sequence
  Description of Artificial Sequence: Synthetic oligonucleotide
agguucauuaguguccgcu

SEQ ID NO: 1618126 - RNA, 19 nt, Artificial Sequence
  Description of Artificial Sequence: Synthetic oligonucleotide
cagagagagagagagagaa

SEQ ID NO: 1618127 - RNA, 19 nt, Artificial Sequence
  Description of Artificial Sequence: Synthetic oligonucleotide
ugcucacgcacgucagggg

SEQ ID NO: 1618128 - RNA, 19 nt, Artificial Sequence
  Description of Artificial Sequence: Synthetic oligonucleotide
gcccuauaaauuaaguccc

SEQ ID NO: 1618129 - RNA, 19 nt, Artificial Sequence
  Description of Artificial Sequence: Synthetic oligonucleotide
gagaggcauacuuguagga

SEQ ID NO: 1618130 - RNA, 19 nt, Artificial Sequence
  Description of Artificial Sequence: Synthetic oligonucleotide
ucccgcccuauaaauuaag

SEQ ID NO: 1618131 - RNA, 19 nt, Artificial Sequence
  Description of Artificial Sequence: Synthetic oligonucleotide
caagacccgaccaggcuug

SEQ ID NO: 1618132 - RNA, 19 nt, Artificial Sequence
  Description of Artificial Sequence: Synthetic oligonucleotide
gucagugcggcacggggcc

SEQ ID NO: 1618133 - RNA, 19 nt, Artificial Sequence
  Description of Artificial Sequence: Synthetic oligonucleotide
gguucauuaguguccgcug

SEQ ID NO: 1618134 - RNA, 19 nt, Artificial Sequence
  Description of Artificial Sequence: Synthetic oligonucleotide
uuaguguccgcugcacaca

SEQ ID NO: 1618135 - RNA, 19 nt, Artificial Sequence
  Description of Artificial Sequence: Synthetic oligonucleotide
gcuaaguacagcccagcug

SEQ ID NO: 1618136 - RNA, 19 nt, Artificial Sequence
  Description of Artificial Sequence: Synthetic oligonucleotide
ucagggaaugucacugcua

SEQ ID NO: 1618137 - RNA, 19 nt, Artificial Sequence
  Description of Artificial Sequence: Synthetic oligonucleotide
uaaguacagcccagcugug

SEQ ID NO: 1618138 - RNA, 19 nt, Artificial Sequence
  Description of Artificial Sequence: Synthetic oligonucleotide
agagagagagagagaauca

SEQ ID NO: 1618139 - RNA, 19 nt, Artificial Sequence
  Description of Artificial Sequence: Synthetic oligonucleotide
aucgggcacugccagaggu

SEQ ID NO: 1618140 - RNA, 19 nt, Artificial Sequence
  Description of Artificial Sequence: Synthetic oligonucleotide
cccagagagagagagagag

SEQ ID NO: 1618141 - RNA, 19 nt, Artificial Sequence
  Description of Artificial Sequence: Synthetic oligonucleotide
uugcaacugguugucugag

SEQ ID NO: 1618142 - RNA, 19 nt, Artificial Sequence
  Description of Artificial Sequence: Synthetic oligonucleotide
aagauagcuuggaccccac

SEQ ID NO: 1618143 - RNA, 19 nt, Artificial Sequence
  Description of Artificial Sequence: Synthetic oligonucleotide
cugcgugguaauccauugg

SEQ ID NO: 1618144 - RNA, 19 nt, Artificial Sequence
  Description of Artificial Sequence: Synthetic oligonucleotide
gaaucaucgggcacugcca

SEQ ID NO: 1618145 - RNA, 19 nt, Artificial Sequence
  Description of Artificial Sequence: Synthetic oligonucleotide
uccccgguuggccauucug

SEQ ID NO: 1618146 - RNA, 19 nt, Artificial Sequence
  Description of Artificial Sequence: Synthetic oligonucleotide
uuaaugccauagcgcucag

SEQ ID NO: 1618147 - RNA, 19 nt, Artificial Sequence
  Description of Artificial Sequence: Synthetic oligonucleotide
acuucuuaggaaaccaguu

SEQ ID NO: 1618148 - RNA, 19 nt, Artificial Sequence
  Description of Artificial Sequence: Synthetic oligonucleotide
ggcguggcaucccauagcc

SEQ ID NO: 1618149 - RNA, 19 nt, Artificial Sequence
  Description of Artificial Sequence: Synthetic oligonucleotide
cacgucaggggcugcagug

SEQ ID NO: 1618150 - RNA, 19 nt, Artificial Sequence
  Description of Artificial Sequence: Synthetic oligonucleotide
agcgacagccacagguccc

SEQ ID NO: 1618151 - RNA, 19 nt, Artificial Sequence
  Description of Artificial Sequence: Synthetic oligonucleotide
uggcguggcaucccauagc

SEQ ID NO: 1618152 - RNA, 19 nt, Artificial Sequence
  Description of Artificial Sequence: Synthetic oligonucleotide
agcaccgugccaucuuuga

SEQ ID NO: 1618153 - RNA, 19 nt, Artificial Sequence
  Description of Artificial Sequence: Synthetic oligonucleotide
acgucaggggcugcagugc

SEQ ID NO: 1618154 - RNA, 19 nt, Artificial Sequence
  Description of Artificial Sequence: Synthetic oligonucleotide
uaguguccgcugcacacaa

SEQ ID NO: 1618155 - RNA, 19 nt, Artificial Sequence
  Description of Artificial Sequence: Synthetic oligonucleotide
augccauagcgcucagcag

SEQ ID NO: 1618156 - RNA, 19 nt, Artificial Sequence
  Description of Artificial Sequence: Synthetic oligonucleotide
cccuuagccacagugagag

SEQ ID NO: 1618157 - RNA, 19 nt, Artificial Sequence
  Description of Artificial Sequence: Synthetic oligonucleotide
ugcaacugguugucugaga

SEQ ID NO: 1618158 - RNA, 19 nt, Artificial Sequence
  Description of Artificial Sequence: Synthetic oligonucleotide
aggguauagugaauugaug

SEQ ID NO: 1618159 - RNA, 19 nt, Artificial Sequence
  Description of Artificial Sequence: Synthetic oligonucleotide
agagaaucaucgggcacug

SEQ ID NO: 1618160 - RNA, 19 nt, Artificial Sequence
  Description of Artificial Sequence: Synthetic oligonucleotide
agagagagagagagaaaga

SEQ ID NO: 1618161 - RNA, 19 nt, Artificial Sequence
  Description of Artificial Sequence: Synthetic oligonucleotide
cauucuugccuucuugcaa

SEQ ID NO: 1618162 - RNA, 19 nt, Artificial Sequence
  Description of Artificial Sequence: Synthetic oligonucleotide
gguaauccauuggaucagg

SEQ ID NO: 1618163 - RNA, 19 nt, Artificial Sequence
  Description of Artificial Sequence: Synthetic oligonucleotide
ugcggcacggggccacagg

SEQ ID NO: 1618164 - RNA, 19 nt, Artificial Sequence
  Description of Artificial Sequence: Synthetic oligonucleotide
cuggcguggcaucccauag

SEQ ID NO: 1618165 - RNA, 19 nt, Artificial Sequence
  Description of Artificial Sequence: Synthetic oligonucleotide
cccaggggaaaguuggucc

SEQ ID NO: 1618166 - RNA, 19 nt, Artificial Sequence
  Description of Artificial Sequence: Synthetic oligonucleotide
gccuucuugcaacugguug

SEQ ID NO: 1618167 - RNA, 19 nt, Artificial Sequence
  Description of Artificial Sequence: Synthetic oligonucleotide
agagagagaaagagagaga

SEQ ID NO: 1618168 - RNA, 19 nt, Artificial Sequence
  Description of Artificial Sequence: Synthetic oligonucleotide
uuuggucccaggggaaagu

SEQ ID NO: 1618169 - RNA, 19 nt, Artificial Sequence
  Description of Artificial Sequence: Synthetic oligonucleotide
ggaaaguugguccaguuuu

SEQ ID NO: 1618170 - RNA, 19 nt, Artificial Sequence
  Description of Artificial Sequence: Synthetic oligonucleotide
uucuuaacuggggccugcc

SEQ ID NO: 1618171 - RNA, 19 nt, Artificial Sequence
  Description of Artificial Sequence: Synthetic oligonucleotide
agaaagagagagagagaga

SEQ ID NO: 1618172 - RNA, 19 nt, Artificial Sequence
  Description of Artificial Sequence: Synthetic oligonucleotide
cuuuggucccaggggaaag

SEQ ID NO: 1618173 - RNA, 19 nt, Artificial Sequence
  Description of Artificial Sequence: Synthetic oligonucleotide
cuuaggaaaagagaagcau

SEQ ID NO: 1618174 - RNA, 19 nt, Artificial Sequence
  Description of Artificial Sequence: Synthetic oligonucleotide
gggaaugucacugcuaaaa

SEQ ID NO: 1618175 - RNA, 19 nt, Artificial Sequence
  Description of Artificial Sequence: Synthetic oligonucleotide
agagaaagagagagagaga

SEQ ID NO: 1618176 - RNA, 19 nt, Artificial Sequence
  Description of Artificial Sequence: Synthetic oligonucleotide
ccagaggugacaagauagc

SEQ ID NO: 1618177 - RNA, 19 nt, Artificial Sequence
  Description of Artificial Sequence: Synthetic oligonucleotide
guaggagggucagugcggc

SEQ ID NO: 1618178 - RNA, 19 nt, Artificial Sequence
  Description of Artificial Sequence: Synthetic oligonucleotide
agagagagagaaagagaga

SEQ ID NO: 1618179 - RNA, 19 nt, Artificial Sequence
  Description of Artificial Sequence: Synthetic oligonucleotide
ucuguagcccaaucacauu

SEQ ID NO: 1618180 - RNA, 19 nt, Artificial Sequence
  Description of Artificial Sequence: Synthetic oligonucleotide
agccaguuauggaaguucu

SEQ ID NO: 1618181 - RNA, 19 nt, Artificial Sequence
  Description of Artificial Sequence: Synthetic oligonucleotide
gaguggagcucaagacccg

SEQ ID NO: 1618182 - RNA, 19 nt, Artificial Sequence
  Description of Artificial Sequence: Synthetic oligonucleotide
agagagaaagagagagaga

SEQ ID NO: 1618183 - RNA, 19 nt, Artificial Sequence
  Description of Artificial Sequence: Synthetic oligonucleotide
acaggucccgcccuauaaa

SEQ ID NO: 1618184 - RNA, 19 nt, Artificial Sequence
  Description of Artificial Sequence: Synthetic oligonucleotide
caggccguaugcagguccc

SEQ ID NO: 1618185 - RNA, 19 nt, Artificial Sequence
  Description of Artificial Sequence: Synthetic oligonucleotide
gggagcuuagagauccagg

SEQ ID NO: 1618186 - RNA, 19 nt, Artificial Sequence
  Description of Artificial Sequence: Synthetic oligonucleotide
ugcuccacgguuggugccc

SEQ ID NO: 1618187 - RNA, 19 nt, Artificial Sequence
  Description of Artificial Sequence: Synthetic oligonucleotide
ggagcucaagacccgacca

SEQ ID NO: 1618188 - RNA, 19 nt, Artificial Sequence
  Description of Artificial Sequence: Synthetic oligonucleotide
agcccacccagguucauua

SEQ ID NO: 1618189 - RNA, 19 nt, Artificial Sequence
  Description of Artificial Sequence: Synthetic oligonucleotide
ugacggugaagagcgucca

SEQ ID NO: 1618190 - RNA, 19 nt, Artificial Sequence
  Description of Artificial Sequence: Synthetic oligonucleotide
cgugguaauccauuggauc

SEQ ID NO: 1618191 - RNA, 19 nt, Artificial Sequence
  Description of Artificial Sequence: Synthetic oligonucleotide
gcucacgcacgucaggggc

SEQ ID NO: 1618192 - RNA, 19 nt, Artificial Sequence
  Description of Artificial Sequence: Synthetic oligonucleotide
cauuaguguccgcugcaca

SEQ ID NO: 1618193 - RNA, 19 nt, Artificial Sequence
  Description of Artificial Sequence: Synthetic oligonucleotide
gaucuggcguggcauccca

SEQ ID NO: 1618194 - RNA, 19 nt, Artificial Sequence
  Description of Artificial Sequence: Synthetic oligonucleotide
cuuagagauccaggggcuc

SEQ ID NO: 1618195 - RNA, 19 nt, Artificial Sequence
  Description of Artificial Sequence: Synthetic oligonucleotide
caggguauagugaauugau

SEQ ID NO: 1618196 - RNA, 19 nt, Artificial Sequence
  Description of Artificial Sequence: Synthetic oligonucleotide
gcuggagcgacagccacag

SEQ ID NO: 1618197 - RNA, 19 nt, Artificial Sequence
  Description of Artificial Sequence: Synthetic oligonucleotide
guaauccauuggaucagga

SEQ ID NO: 1618198 - RNA, 19 nt, Artificial Sequence
  Description of Artificial Sequence: Synthetic oligonucleotide
aagacccgaccaggcuugg

SEQ ID NO: 1618199 - RNA, 19 nt, Artificial Sequence
  Description of Artificial Sequence: Synthetic oligonucleotide
ccgcccuauaaauuaaguc

SEQ ID NO: 1618200 - RNA, 19 nt, Artificial Sequence
  Description of Artificial Sequence: Synthetic oligonucleotide
cuguaagagaggcauacuu

SEQ ID NO: 1618201 - RNA, 19 nt, Artificial Sequence
  Description of Artificial Sequence: Synthetic oligonucleotide
aggugacaagauagcuugg

SEQ ID NO: 1618202 - RNA, 19 nt, Artificial Sequence
  Description of Artificial Sequence: Synthetic oligonucleotide
ucggcucaggccguaugca

SEQ ID NO: 1618203 - RNA, 19 nt, Artificial Sequence
  Description of Artificial Sequence: Synthetic oligonucleotide
agagagagagagagagaga

SEQ ID NO: 1618204 - RNA, 19 nt, Artificial Sequence
  Description of Artificial Sequence: Synthetic oligonucleotide
caccccuuagccacaguga

SEQ ID NO: 1618205 - RNA, 19 nt, Artificial Sequence
  Description of Artificial Sequence: Synthetic oligonucleotide
acagcaccgugccaucuuu

SEQ ID NO: 1618206 - RNA, 19 nt, Artificial Sequence
  Description of Artificial Sequence: Synthetic oligonucleotide
agaggggagcuuagagauc

SEQ ID NO: 1618207 - RNA, 19 nt, Artificial Sequence
  Description of Artificial Sequence: Synthetic oligonucleotide
ucacgcacgucaggggcug

SEQ ID NO: 1618208 - RNA, 19 nt, Artificial Sequence
  Description of Artificial Sequence: Synthetic oligonucleotide
gagagagagagagaaucau

SEQ ID NO: 1618209 - RNA, 19 nt, Artificial Sequence
  Description of Artificial Sequence: Synthetic oligonucleotide
ggugacaagauagcuugga

SEQ ID NO: 1618210 - RNA, 19 nt, Artificial Sequence
  Description of Artificial Sequence: Synthetic oligonucleotide
ugagccaguuauggaaguu

SEQ ID NO: 1618211 - RNA, 19 nt, Artificial Sequence
  Description of Artificial Sequence: Synthetic oligonucleotide
aucaucgggcacugccaga

SEQ ID NO: 1618212 - RNA, 19 nt, Artificial Sequence
  Description of Artificial Sequence: Synthetic oligonucleotide
caagcuggaugggcaagug

SEQ ID NO: 1618213 - RNA, 19 nt, Artificial Sequence
  Description of Artificial Sequence: Synthetic oligonucleotide
gcuuaggaaaagagaagca

SEQ ID NO: 1618214 - RNA, 19 nt, Artificial Sequence
  Description of Artificial Sequence: Synthetic oligonucleotide
cacagggcagcaucucuga

SEQ ID NO: 1618215 - RNA, 19 nt, Artificial Sequence
  Description of Artificial Sequence: Synthetic oligonucleotide
caucguauugcuucucaau

SEQ ID NO: 1618216 - RNA, 19 nt, Artificial Sequence
  Description of Artificial Sequence: Synthetic oligonucleotide
gccguaugcagguccccgg

SEQ ID NO: 1618217 - RNA, 19 nt, Artificial Sequence
  Description of Artificial Sequence: Synthetic oligonucleotide
ggcacugcgugguaaucca

SEQ ID NO: 1618218 - RNA, 19 nt, Artificial Sequence
  Description of Artificial Sequence: Synthetic oligonucleotide
caucgggcacugccagagg

SEQ ID NO: 1618219 - RNA, 19 nt, Artificial Sequence
  Description of Artificial Sequence: Synthetic oligonucleotide
aagcccagagagagagaga

SEQ ID NO: 1618220 - RNA, 19 nt, Artificial Sequence
  Description of Artificial Sequence: Synthetic oligonucleotide
agagagagagagagagaaa

SEQ ID NO: 1618221 - RNA, 19 nt, Artificial Sequence
  Description of Artificial Sequence: Synthetic oligonucleotide
acugagagaucugcuccau

SEQ ID NO: 1618222 - RNA, 19 nt, Artificial Sequence
  Description of Artificial Sequence: Synthetic oligonucleotide
agagagagagagagagaau

SEQ ID NO: 1618223 - RNA, 19 nt, Artificial Sequence
  Description of Artificial Sequence: Synthetic oligonucleotide
gggcaagugcucacgcacg

SEQ ID NO: 1618224 - RNA, 19 nt, Artificial Sequence
  Description of Artificial Sequence: Synthetic oligonucleotide
cuguugcaccucucggcuc

SEQ ID NO: 1618225 - RNA, 19 nt, Artificial Sequence
  Description of Artificial Sequence: Synthetic oligonucleotide
gugaauugaugagcucaca

SEQ ID NO: 1618226 - RNA, 19 nt, Artificial Sequence
  Description of Artificial Sequence: Synthetic oligonucleotide
cagcaccgugccaucuuug

SEQ ID NO: 1618227 - RNA, 19 nt, Artificial Sequence
  Description of Artificial Sequence: Synthetic oligonucleotide
cacggggccacagggcagc

SEQ ID NO: 1618228 - RNA, 19 nt, Artificial Sequence
  Description of Artificial Sequence: Synthetic oligonucleotide
cacaggucccgcccuauaa

SEQ ID NO: 1618229 - RNA, 19 nt, Artificial Sequence
  Description of Artificial Sequence: Synthetic oligonucleotide
cagguucauuaguguccgc

SEQ ID NO: 1618230 - RNA, 19 nt, Artificial Sequence
  Description of Artificial Sequence: Synthetic oligonucleotide
agcguccaagcuggauggg

SEQ ID NO: 1618231 - RNA, 19 nt, Artificial Sequence
  Description of Artificial Sequence: Synthetic oligonucleotide
ggggagcuuagagauccag

SEQ ID NO: 1618232 - RNA, 19 nt, Artificial Sequence
  Description of Artificial Sequence: Synthetic oligonucleotide
gcuuggaccccacccuggc

SEQ ID NO: 1618233 - RNA, 19 nt, Artificial Sequence
  Description of Artificial Sequence: Synthetic oligonucleotide
gcgacagccacaggucccg

SEQ ID NO: 1618234 - RNA, 19 nt, Artificial Sequence
  Description of Artificial Sequence: Synthetic oligonucleotide
ggagcgacagccacagguc

SEQ ID NO: 1618235 - RNA, 19 nt, Artificial Sequence
  Description of Artificial Sequence: Synthetic oligonucleotide
ggccguaugcagguccccg

SEQ ID NO: 1618236 - RNA, 19 nt, Artificial Sequence
  Description of Artificial Sequence: Synthetic oligonucleotide
gccauagcgcucagcagcc

SEQ ID NO: 1618237 - RNA, 19 nt, Artificial Sequence
  Description of Artificial Sequence: Synthetic oligonucleotide
uccacgguuggugcccauc

SEQ ID NO: 1618238 - RNA, 19 nt, Artificial Sequence
  Description of Artificial Sequence: Synthetic oligonucleotide
guccaagcuggaugggcaa

SEQ ID NO: 1618239 - RNA, 19 nt, Artificial Sequence
  Description of Artificial Sequence: Synthetic oligonucleotide
gcucaagacccgaccaggc

SEQ ID NO: 1618240 - RNA, 19 nt, Artificial Sequence
  Description of Artificial Sequence: Synthetic oligonucleotide
cacgcccaggcuggggccg

SEQ ID NO: 1618241 - RNA, 19 nt, Artificial Sequence
  Description of Artificial Sequence: Synthetic oligonucleotide
cuuggaccccacccuggca

SEQ ID NO: 1618242 - RNA, 19 nt, Artificial Sequence
  Description of Artificial Sequence: Synthetic oligonucleotide
uccaccccuuagccacagu

SEQ ID NO: 1618243 - RNA, 19 nt, Artificial Sequence
  Description of Artificial Sequence: Synthetic oligonucleotide
ggaucuggcguggcauccc

SEQ ID NO: 1618244 - RNA, 19 nt, Artificial Sequence
  Description of Artificial Sequence: Synthetic oligonucleotide
cuccaccccuuagccacag

SEQ ID NO: 1618245 - RNA, 19 nt, Artificial Sequence
  Description of Artificial Sequence: Synthetic oligonucleotide
cacccagguucauuagugu

SEQ ID NO: 1618246 - RNA, 19 nt, Artificial Sequence
  Description of Artificial Sequence: Synthetic oligonucleotide
caggucccgcccuauaaau

SEQ ID NO: 1618247 - RNA, 19 nt, Artificial Sequence
  Description of Artificial Sequence: Synthetic oligonucleotide
cagucaugccugccugaga

SEQ ID NO: 1618248 - RNA, 19 nt, Artificial Sequence
  Description of Artificial Sequence: Synthetic oligonucleotide
cucacgcacgucaggggcu

SEQ ID NO: 1618249 - RNA, 19 nt, Artificial Sequence
  Description of Artificial Sequence: Synthetic oligonucleotide
aggucccgcccuauaaauu

SEQ ID NO: 1618250 - RNA, 19 nt, Artificial Sequence
  Description of Artificial Sequence: Synthetic oligonucleotide
ccagagagagagagagaga

SEQ ID NO: 1618251 - RNA, 19 nt, Artificial Sequence
  Description of Artificial Sequence: Synthetic oligonucleotide
gggaaaguugguccaguuu

SEQ ID NO: 1618252 - RNA, 19 nt, Artificial Sequence
  Description of Artificial Sequence: Synthetic oligonucleotide
ccuauaaauuaagucccua

SEQ ID NO: 1618253 - RNA, 19 nt, Artificial Sequence
  Description of Artificial Sequence: Synthetic oligonucleotide
gcccacccagguucauuag

SEQ ID NO: 1618254 - RNA, 19 nt, Artificial Sequence
  Description of Artificial Sequence: Synthetic oligonucleotide
cacugcgugguaauccauu

SEQ ID NO: 1618255 - RNA, 19 nt, Artificial Sequence
  Description of Artificial Sequence: Synthetic oligonucleotide
gcuuagagauccaggggcu

SEQ ID NO: 1618256 - RNA, 19 nt, Artificial Sequence
  Description of Artificial Sequence: Synthetic oligonucleotide
acgcacgucaggggcugca

SEQ ID NO: 1618257 - RNA, 19 nt, Artificial Sequence
  Description of Artificial Sequence: Synthetic oligonucleotide
gucccgcccuauaaauuaa

SEQ ID NO: 1618258 - RNA, 19 nt, Artificial Sequence
  Description of Artificial Sequence: Synthetic oligonucleotide
gcaucccauagccagucau

SEQ ID NO: 1618259 - RNA, 19 nt, Artificial Sequence
  Description of Artificial Sequence: Synthetic oligonucleotide
cucaggccguaugcagguc

SEQ ID NO: 1618260 - RNA, 19 nt, Artificial Sequence
  Description of Artificial Sequence: Synthetic oligonucleotide
cggcucaggccguaugcag

SEQ ID NO: 1618261 - RNA, 19 nt, Artificial Sequence
  Description of Artificial Sequence: Synthetic oligonucleotide
agacccgaccaggcuugga

SEQ ID NO: 1618262 - RNA, 19 nt, Artificial Sequence
  Description of Artificial Sequence: Synthetic oligonucleotide
cggcacugcgugguaaucc

SEQ ID NO: 1618263 - RNA, 19 nt, Artificial Sequence
  Description of Artificial Sequence: Synthetic oligonucleotide
ggaccccacccuggcagag

SEQ ID NO: 1618264 - RNA, 19 nt, Artificial Sequence
  Description of Artificial Sequence: Synthetic oligonucleotide
ggcaucccauagccaguca

SEQ ID NO: 1618265 - RNA, 19 nt, Artificial Sequence
  Description of Artificial Sequence: Synthetic oligonucleotide
cccuauaaauuaagucccu

SEQ ID NO: 1618266 - RNA, 19 nt, Artificial Sequence
  Description of Artificial Sequence: Synthetic oligonucleotide
guggcaucccauagccagu

SEQ ID NO: 1618267 - RNA, 19 nt, Artificial Sequence
  Description of Artificial Sequence: Synthetic oligonucleotide
ggcuggagcgacagccaca

SEQ ID NO: 1618268 - RNA, 19 nt, Artificial Sequence
  Description of Artificial Sequence: Synthetic oligonucleotide
cacgcacgucaggggcugc

SEQ ID NO: 1618269 - RNA, 19 nt, Artificial Sequence
  Description of Artificial Sequence: Synthetic oligonucleotide
gcuguaagagaggcauacu

SEQ ID NO: 1618270 - RNA, 19 nt, Artificial Sequence
  Description of Artificial Sequence: Synthetic oligonucleotide
ccccuuagccacagugaga

SEQ ID NO: 1618271 - RNA, 19 nt, Artificial Sequence
  Description of Artificial Sequence: Synthetic oligonucleotide
ggggaaaguugguccaguu

SEQ ID NO: 1618272 - RNA, 19 nt, Artificial Sequence
  Description of Artificial Sequence: Synthetic oligonucleotide
cagugguguuaaugccaua

SEQ ID NO: 1618273 - RNA, 19 nt, Artificial Sequence
  Description of Artificial Sequence: Synthetic oligonucleotide
ggcuuuggucccaggggaa

SEQ ID NO: 1618274 - RNA, 19 nt, Artificial Sequence
  Description of Artificial Sequence: Synthetic oligonucleotide
cccgcccuauaaauuaagu

SEQ ID NO: 1618275 - RNA, 19 nt, Artificial Sequence
  Description of Artificial Sequence: Synthetic oligonucleotide
gcgugguaauccauuggau

SEQ ID NO: 1618276 - RNA, 19 nt, Artificial Sequence
  Description of Artificial Sequence: Synthetic oligonucleotide
gcacgucaggggcugcagu

SEQ ID NO: 1618277 - RNA, 19 nt, Artificial Sequence
  Description of Artificial Sequence: Synthetic oligonucleotide
gcccagagagagagagaga

SEQ ID NO: 1618278 - RNA, 19 nt, Artificial Sequence
  Description of Artificial Sequence: Synthetic oligonucleotide
ggcauacuuguaggagggu

SEQ ID NO: 1618279 - RNA, 19 nt, Artificial Sequence
  Description of Artificial Sequence: Synthetic oligonucleotide
gcggcacugcgugguaauc

SEQ ID NO: 1618280 - RNA, 19 nt, Artificial Sequence
  Description of Artificial Sequence: Synthetic oligonucleotide
cccacccagguucauuagu

SEQ ID NO: 1618281 - RNA, 19 nt, Artificial Sequence
  Description of Artificial Sequence: Synthetic oligonucleotide
agguccccgguuggccauu

SEQ ID NO: 1618282 - RNA, 19 nt, Artificial Sequence
  Description of Artificial Sequence: Synthetic oligonucleotide
ggggccgguccacaggcuu

SEQ ID NO: 1618283 - RNA, 19 nt, Artificial Sequence
  Description of Artificial Sequence: Synthetic oligonucleotide
cgcacgucaggggcugcag

SEQ ID NO: 1618284 - RNA, 19 nt, Artificial Sequence
  Description of Artificial Sequence: Synthetic oligonucleotide
gcuccacgguuggugccca

SEQ ID NO: 1618285 - RNA, 19 nt, Artificial Sequence
  Description of Artificial Sequence: Synthetic oligonucleotide
gguccccgguuggccauuc

SEQ ID NO: 1618286 - RNA, 19 nt, Artificial Sequence
  Description of Artificial Sequence: Synthetic oligonucleotide
ccguaugcagguccccggu

SEQ ID NO: 1618287 - RNA, 19 nt, Artificial Sequence
  Description of Artificial Sequence: Synthetic oligonucleotide
ccccaucguauugcuucuc

SEQ ID NO: 1618288 - RNA, 19 nt, Artificial Sequence
  Description of Artificial Sequence: Synthetic oligonucleotide
guccccgguuggccauucu

SEQ ID NO: 1618289 - RNA, 19 nt, Artificial Sequence
  Description of Artificial Sequence: Synthetic oligonucleotide
cccucaggguauagugaau

SEQ ID NO: 1618290 - RNA, 19 nt, Artificial Sequence
  Description of Artificial Sequence: Synthetic oligonucleotide
ccacaggucccgcccuaua

SEQ ID NO: 1618291 - RNA, 19 nt, Artificial Sequence
  Description of Artificial Sequence: Synthetic oligonucleotide
gcacugcgugguaauccau

SEQ ID NO: 1618292 - RNA, 19 nt, Artificial Sequence
  Description of Artificial Sequence: Synthetic oligonucleotide
cucucggcucaggccguau

SEQ ID NO: 1618293 - RNA, 19 nt, Artificial Sequence
  Description of Artificial Sequence: Synthetic oligonucleotide
cuccacgguuggugcccau

SEQ ID NO: 1618294 - RNA, 19 nt, Artificial Sequence
  Description of Artificial Sequence: Synthetic oligonucleotide
cguaugcagguccccgguu

SEQ ID NO: 1618295 - RNA, 19 nt, Artificial Sequence
  Description of Artificial Sequence: Synthetic oligonucleotide
ccgaccaggcuuggaguuu

SEQ ID NO: 1618296 - RNA, 19 nt, Artificial Sequence
  Description of Artificial Sequence: Synthetic oligonucleotide
aucuauaaaaucuacaucu

SEQ ID NO: 1618297 - RNA, 19 nt, Artificial Sequence
  Description of Artificial Sequence: Synthetic oligonucleotide
aaauacuauauccuggcuc

SEQ ID NO: 1618298 - RNA, 19 nt, Artificial Sequence
  Description of Artificial Sequence: Synthetic oligonucleotide
aacaccuucacauuuuccg

SEQ ID NO: 1618299 - RNA, 19 nt, Artificial Sequence
  Description of Artificial Sequence: Synthetic oligonucleotide
uuguuuacgaaucaaagca

SEQ ID NO: 1618300 - RNA, 19 nt, Artificial Sequence
  Description of Artificial Sequence: Synthetic oligonucleotide
aguuuugauauuuaagagg

SEQ ID NO: 1618301 - RNA, 19 nt, Artificial Sequence
  Description of Artificial Sequence: Synthetic oligonucleotide
uugaagaaauacuauaucc

SEQ ID NO: 1618302 - RNA, 19 nt, Artificial Sequence
  Description of Artificial Sequence: Synthetic oligonucleotide
agaaauacuauauccuggc

SEQ ID NO: 1618303 - RNA, 19 nt, Artificial Sequence
  Description of Artificial Sequence: Synthetic oligonucleotide
ucuacaucuagauaugcgg

SEQ ID NO: 1618304 - RNA, 19 nt, Artificial Sequence
  Description of Artificial Sequence: Synthetic oligonucleotide
aauacuauauccuggcuca

SEQ ID NO: 1618305 - RNA, 19 nt, Artificial Sequence
  Description of Artificial Sequence: Synthetic oligonucleotide
uuugguacaacugaaacug

SEQ ID NO: 1618306 - RNA, 19 nt, Artificial Sequence
  Description of Artificial Sequence: Synthetic oligonucleotide
aaguuuugauauuuaagag

SEQ ID NO: 1618307 - RNA, 19 nt, Artificial Sequence
  Description of Artificial Sequence: Synthetic oligonucleotide
agaacagccaaauagauaa

SEQ ID NO: 1618308 - RNA, 19 nt, Artificial Sequence
  Description of Artificial Sequence: Synthetic oligonucleotide
uuuuguaacccuuuuagga

SEQ ID NO: 1618309 - RNA, 19 nt, Artificial Sequence
  Description of Artificial Sequence: Synthetic oligonucleotide
aaaucuaucagaucucgcu

SEQ ID NO: 1618310 - RNA, 19 nt, Artificial Sequence
  Description of Artificial Sequence: Synthetic oligonucleotide
acacaaaucuaucagaucu

SEQ ID NO: 1618311 - RNA, 19 nt, Artificial Sequence
  Description of Artificial Sequence: Synthetic oligonucleotide
aauguaaguccaugcaaac

SEQ ID NO: 1618312 - RNA, 19 nt, Artificial Sequence
  Description of Artificial Sequence: Synthetic oligonucleotide
aaacuguaggaucaaguuc

SEQ ID NO: 1618313 - RNA, 19 nt, Artificial Sequence
  Description of Artificial Sequence: Synthetic oligonucleotide
uacuccaauacuauuuugg

SEQ ID NO: 1618314 - RNA, 19 nt, Artificial Sequence
  Description of Artificial Sequence: Synthetic oligonucleotide
augaagaaggauuaaauga

SEQ ID NO: 1618315 - RNA, 19 nt, Artificial Sequence
  Description of Artificial Sequence: Synthetic oligonucleotide
gaauuauuugcucagauaa

SEQ ID NO: 1618316 - RNA, 19 nt, Artificial Sequence
  Description of Artificial Sequence: Synthetic oligonucleotide
uaaugugacaauaaaggcu

SEQ ID NO: 1618317 - RNA, 19 nt, Artificial Sequence
  Description of Artificial Sequence: Synthetic oligonucleotide
uuuaugugaaaauaucucu

SEQ ID NO: 1618318 - RNA, 19 nt, Artificial Sequence
  Description of Artificial Sequence: Synthetic oligonucleotide
aaguaucucaucuauaaaa

SEQ ID NO: 1618319 - RNA, 19 nt, Artificial Sequence
  Description of Artificial Sequence: Synthetic oligonucleotide
acuguuucauuucugguac

SEQ ID NO: 1618320 - RNA, 19 nt, Artificial Sequence
  Description of Artificial Sequence: Synthetic oligonucleotide
uccaaaauaagaauaugac

SEQ ID NO: 1618321 - RNA, 19 nt, Artificial Sequence
  Description of Artificial Sequence: Synthetic oligonucleotide
auaaagacuugccaacagc

SEQ ID NO: 1618322 - RNA, 19 nt, Artificial Sequence
  Description of Artificial Sequence: Synthetic oligonucleotide
aacccuaucauacugguaa

SEQ ID NO: 1618323 - RNA, 19 nt, Artificial Sequence
  Description of Artificial Sequence: Synthetic oligonucleotide
uaguauuuaaggaacugcc

SEQ ID NO: 1618324 - RNA, 19 nt, Artificial Sequence
  Description of Artificial Sequence: Synthetic oligonucleotide
acaauaaaggcuuugacuu

SEQ ID NO: 1618325 - RNA, 19 nt, Artificial Sequence
  Description of Artificial Sequence: Synthetic oligonucleotide
uccaauacuauuuuggcaa

SEQ ID NO: 1618326 - RNA, 19 nt, Artificial Sequence
  Description of Artificial Sequence: Synthetic oligonucleotide
ucuuaugagagucucuagc

SEQ ID NO: 1618327 - RNA, 19 nt, Artificial Sequence
  Description of Artificial Sequence: Synthetic oligonucleotide
acuccaauacuauuuuggc

SEQ ID NO: 1618328 - RNA, 19 nt, Artificial Sequence
  Description of Artificial Sequence: Synthetic oligonucleotide
guggaaguaguauuuaagg

SEQ ID NO: 1618329 - RNA, 19 nt, Artificial Sequence
  Description of Artificial Sequence: Synthetic oligonucleotide
aauaaaggcuuugacuuuc

SEQ ID NO: 1618330 - RNA, 19 nt, Artificial Sequence
  Description of Artificial Sequence: Synthetic oligonucleotide
uauuugguacaacugaaac

SEQ ID NO: 1618331 - RNA, 19 nt, Artificial Sequence
  Description of Artificial Sequence: Synthetic oligonucleotide
uugauauuuaagagggucc

SEQ ID NO: 1618332 - RNA, 19 nt, Artificial Sequence
  Description of Artificial Sequence: Synthetic oligonucleotide
cuucuuuagguucucaagg

SEQ ID NO: 1618333 - RNA, 19 nt, Artificial Sequence
  Description of Artificial Sequence: Synthetic oligonucleotide
uguggaaguaguauuuaag

SEQ ID NO: 1618334 - RNA, 19 nt, Artificial Sequence
  Description of Artificial Sequence: Synthetic oligonucleotide
aaaugcacagauugguuug

SEQ ID NO: 1618335 - RNA, 19 nt, Artificial Sequence
  Description of Artificial Sequence: Synthetic oligonucleotide
uaaagacuugccaacagcu

SEQ ID NO: 1618336 - RNA, 19 nt, Artificial Sequence
  Description of Artificial Sequence: Synthetic oligonucleotide
aguaccauggcuuuacaug

SEQ ID NO: 1618337 - RNA, 19 nt, Artificial Sequence
  Description of Artificial Sequence: Synthetic oligonucleotide
uacgaaucaaagcagugug

SEQ ID NO: 1618338 - RNA, 19 nt, Artificial Sequence
  Description of Artificial Sequence: Synthetic oligonucleotide
ucuuuuauagaauuccaaa

SEQ ID NO: 1618339 - RNA, 19 nt, Artificial Sequence
  Description of Artificial Sequence: Synthetic oligonucleotide
ugaguauuagguuuaugug

SEQ ID NO: 1618340 - RNA, 19 nt, Artificial Sequence
  Description of Artificial Sequence: Synthetic oligonucleotide
uuaggcaacacaaaucuau

SEQ ID NO: 1618341 - RNA, 19 nt, Artificial Sequence
  Description of Artificial Sequence: Synthetic oligonucleotide
aacacaaaucuaucagauc

SEQ ID NO: 1618342 - RNA, 19 nt, Artificial Sequence
  Description of Artificial Sequence: Synthetic oligonucleotide
acauuuuccgguuucaaca

SEQ ID NO: 1618343 - RNA, 19 nt, Artificial Sequence
  Description of Artificial Sequence: Synthetic oligonucleotide
cuuuagguucucaaggugc

SEQ ID NO: 1618344 - RNA, 19 nt, Artificial Sequence
  Description of Artificial Sequence: Synthetic oligonucleotide
aauagauaaaggguggaga

SEQ ID NO: 1618345 - RNA, 19 nt, Artificial Sequence
  Description of Artificial Sequence: Synthetic oligonucleotide
aaucuacaucuagauaugc

SEQ ID NO: 1618346 - RNA, 19 nt, Artificial Sequence
  Description of Artificial Sequence: Synthetic oligonucleotide
uuuugcacguuuuaaggug

SEQ ID NO: 1618347 - RNA, 19 nt, Artificial Sequence
  Description of Artificial Sequence: Synthetic oligonucleotide
  modified_base (13)..(13): a, c, u, g, unknown or other
cuaaagcaggaunuaaccc

SEQ ID NO: 1618348 - RNA, 19 nt, Artificial Sequence
  Description of Artificial Sequence: Synthetic oligonucleotide
acugguaaguaucucaucu

SEQ ID NO: 1618349 - RNA, 19 nt, Artificial Sequence
  Description of Artificial Sequence: Synthetic oligonucleotide
uuaagguguacuccaauac

SEQ ID NO: 1618350 - RNA, 19 nt, Artificial Sequence
  Description of Artificial Sequence: Synthetic oligonucleotide
uaauucaaguaccauggcu

SEQ ID NO: 1618351 - RNA, 19 nt, Artificial Sequence
  Description of Artificial Sequence: Synthetic oligonucleotide
uuugauauuuaagaggguc

SEQ ID NO: 1618352 - RNA, 19 nt, Artificial Sequence
  Description of Artificial Sequence: Synthetic oligonucleotide
aggauuaaaugaaauaguc

SEQ ID NO: 1618353 - RNA, 19 nt, Artificial Sequence
  Description of Artificial Sequence: Synthetic oligonucleotide
ugugguucugaguauuagg

SEQ ID NO: 1618354 - RNA, 19 nt, Artificial Sequence
  Description of Artificial Sequence: Synthetic oligonucleotide
uugacuuucacagugguaa

SEQ ID NO: 1618355 - RNA, 19 nt, Artificial Sequence
  Description of Artificial Sequence: Synthetic oligonucleotide
gaguauuagguuuauguga

SEQ ID NO: 1618356 - RNA, 19 nt, Artificial Sequence
  Description of Artificial Sequence: Synthetic oligonucleotide
aaugugacaauaaaggcuu

SEQ ID NO: 1618357 - RNA, 19 nt, Artificial Sequence
  Description of Artificial Sequence: Synthetic oligonucleotide
aaaauaucucuccacguuu

SEQ ID NO: 1618358 - RNA, 19 nt, Artificial Sequence
  Description of Artificial Sequence: Synthetic oligonucleotide
uuaugagagucucuagcag

SEQ ID NO: 1618359 - RNA, 19 nt, Artificial Sequence
  Description of Artificial Sequence: Synthetic oligonucleotide
uuuacgaaucaaagcagug

SEQ ID NO: 1618360 - RNA, 19 nt, Artificial Sequence
  Description of Artificial Sequence: Synthetic oligonucleotide
aaauagauaaaggguggag

SEQ ID NO: 1618361 - RNA, 19 nt, Artificial Sequence
  Description of Artificial Sequence: Synthetic oligonucleotide
agugaaaagucaucaaacu

SEQ ID NO: 1618362 - RNA, 19 nt, Artificial Sequence
  Description of Artificial Sequence: Synthetic oligonucleotide
aucagaauuauuugguaca

SEQ ID NO: 1618363 - RNA, 19 nt, Artificial Sequence
  Description of Artificial Sequence: Synthetic oligonucleotide
uuuguaacccuuuuaggaa

SEQ ID NO: 1618364 - RNA, 19 nt, Artificial Sequence
  Description of Artificial Sequence: Synthetic oligonucleotide
uuaaggaacugccugugcu

SEQ ID NO: 1618365 - RNA, 19 nt, Artificial Sequence
  Description of Artificial Sequence: Synthetic oligonucleotide
uuucuggccauuagaacag

SEQ ID NO: 1618366 - RNA, 19 nt, Artificial Sequence
  Description of Artificial Sequence: Synthetic oligonucleotide
gaaguaguauuuaaggaac

SEQ ID NO: 1618367 - RNA, 19 nt, Artificial Sequence
  Description of Artificial Sequence: Synthetic oligonucleotide
uggaaguaguauuuaagga

SEQ ID NO: 1618368 - RNA, 19 nt, Artificial Sequence
  Description of Artificial Sequence: Synthetic oligonucleotide
aguuaaugugacaauaaag

SEQ ID NO: 1618369 - RNA, 19 nt, Artificial Sequence
  Description of Artificial Sequence: Synthetic oligonucleotide
uucauaaagacuugccaac

SEQ ID NO: 1618370 - RNA, 19 nt, Artificial Sequence
  Description of Artificial Sequence: Synthetic oligonucleotide
uaggacugucuuaugagag

SEQ ID NO: 1618371 - RNA, 19 nt, Artificial Sequence
  Description of Artificial Sequence: Synthetic oligonucleotide
aaaacccuaucauacuggu

SEQ ID NO: 1618372 - RNA, 19 nt, Artificial Sequence
  Description of Artificial Sequence: Synthetic oligonucleotide
uuuucagccgcuucuuuag

SEQ ID NO: 1618373 - RNA, 19 nt, Artificial Sequence
  Description of Artificial Sequence: Synthetic oligonucleotide
gaugcaucauuauuugcug

SEQ ID NO: 1618374 - RNA, 19 nt, Artificial Sequence
  Description of Artificial Sequence: Synthetic oligonucleotide
auuugguacaacugaaacu

SEQ ID NO: 1618375 - RNA, 19 nt, Artificial Sequence
  Description of Artificial Sequence: Synthetic oligonucleotide
uacuauuuuggcaaauuau

SEQ ID NO: 1618376 - RNA, 19 nt, Artificial Sequence
  Description of Artificial Sequence: Synthetic oligonucleotide
uauuuaaggaacugccugu

SEQ ID NO: 1618377 - RNA, 19 nt, Artificial Sequence
  Description of Artificial Sequence: Synthetic oligonucleotide
uaucagaucucgcugacau

SEQ ID NO: 1618378 - RNA, 19 nt, Artificial Sequence
  Description of Artificial Sequence: Synthetic oligonucleotide
ugaaacagcuuccaccugu

SEQ ID NO: 1618379 - RNA, 19 nt, Artificial Sequence
  Description of Artificial Sequence: Synthetic oligonucleotide
gaaauagucauuaggcaac

SEQ ID NO: 1618380 - RNA, 19 nt, Artificial Sequence
  Description of Artificial Sequence: Synthetic oligonucleotide
ucaccaauuaaucuuccaa

SEQ ID NO: 1618381 - RNA, 19 nt, Artificial Sequence
  Description of Artificial Sequence: Synthetic oligonucleotide
auagauaaaggguggagaa

SEQ ID NO: 1618382 - RNA, 19 nt, Artificial Sequence
  Description of Artificial Sequence: Synthetic oligonucleotide
agaauuccaaaauaagaau

SEQ ID NO: 1618383 - RNA, 19 nt, Artificial Sequence
  Description of Artificial Sequence: Synthetic oligonucleotide
uuguaacccuuuuaggaag

SEQ ID NO: 1618384 - RNA, 19 nt, Artificial Sequence
  Description of Artificial Sequence: Synthetic oligonucleotide
uguauuaucuacucccaaa

SEQ ID NO: 1618385 - RNA, 19 nt, Artificial Sequence
  Description of Artificial Sequence: Synthetic oligonucleotide
auagucauuaggcaacaca

SEQ ID NO: 1618386 - RNA, 19 nt, Artificial Sequence
  Description of Artificial Sequence: Synthetic oligonucleotide
agauaaaggguggagaaug

SEQ ID NO: 1618387 - RNA, 19 nt, Artificial Sequence
  Description of Artificial Sequence: Synthetic oligonucleotide
guaaguaucucaucuauaa

SEQ ID NO: 1618388 - RNA, 19 nt, Artificial Sequence
  Description of Artificial Sequence: Synthetic oligonucleotide
aucuuguaauucaaguacc

SEQ ID NO: 1618389 - RNA, 19 nt, Artificial Sequence
  Description of Artificial Sequence: Synthetic oligonucleotide
uaagguguacuccaauacu

SEQ ID NO: 1618390 - RNA, 19 nt, Artificial Sequence
  Description of Artificial Sequence: Synthetic oligonucleotide
augaaauagucauuaggca

SEQ ID NO: 1618391 - RNA, 19 nt, Artificial Sequence
  Description of Artificial Sequence: Synthetic oligonucleotide
uaaaggguggagaauguaa

SEQ ID NO: 1618392 - RNA, 19 nt, Artificial Sequence
  Description of Artificial Sequence: Synthetic oligonucleotide
caccaauuaaucuuccaag

SEQ ID NO: 1618393 - RNA, 19 nt, Artificial Sequence
  Description of Artificial Sequence: Synthetic oligonucleotide
ucaaauucagacugaccug

SEQ ID NO: 1618394 - RNA, 19 nt, Artificial Sequence
  Description of Artificial Sequence: Synthetic oligonucleotide
aaggauuaaaugaaauagu

SEQ ID NO: 1618395 - RNA, 19 nt, Artificial Sequence
  Description of Artificial Sequence: Synthetic oligonucleotide
aagaucaguauuauucuca

SEQ ID NO: 1618396 - RNA, 19 nt, Artificial Sequence
  Description of Artificial Sequence: Synthetic oligonucleotide
acaaaucuaucagaucucg

SEQ ID NO: 1618397 - RNA, 19 nt, Artificial Sequence
  Description of Artificial Sequence: Synthetic oligonucleotide
ucuggacauacugugauca

SEQ ID NO: 1618398 - RNA, 19 nt, Artificial Sequence
  Description of Artificial Sequence: Synthetic oligonucleotide
uucuuuuauagaauuccaa

SEQ ID NO: 1618399 - RNA, 19 nt, Artificial Sequence
  Description of Artificial Sequence: Synthetic oligonucleotide
gaaaccuuugcaguuacac

SEQ ID NO: 1618400 - RNA, 19 nt, Artificial Sequence
  Description of Artificial Sequence: Synthetic oligonucleotide
accaauuaaucuuccaagu

SEQ ID NO: 1618401 - RNA, 19 nt, Artificial Sequence
  Description of Artificial Sequence: Synthetic oligonucleotide
uauuaucuacucccaaagu

SEQ ID NO: 1618402 - RNA, 19 nt, Artificial Sequence
  Description of Artificial Sequence: Synthetic oligonucleotide
  modified_base (15)..(15): a, c, u, g, unknown or other
uccuaaagcaggaunuaac

SEQ ID NO: 1618403 - RNA, 19 nt, Artificial Sequence
  Description of Artificial Sequence: Synthetic oligonucleotide
ugacaauaaaggcuuugac

SEQ ID NO: 1618404 - RNA, 19 nt, Artificial Sequence
  Description of Artificial Sequence: Synthetic oligonucleotide
uuuaagguguacuccaaua

SEQ ID NO: 1618405 - RNA, 19 nt, Artificial Sequence
  Description of Artificial Sequence: Synthetic oligonucleotide
ucaccugaacuguugaugu

SEQ ID NO: 1618406 - RNA, 19 nt, Artificial Sequence
  Description of Artificial Sequence: Synthetic oligonucleotide
acguuuuaagguguacucc

SEQ ID NO: 1618407 - RNA, 19 nt, Artificial Sequence
  Description of Artificial Sequence: Synthetic oligonucleotide
uauuagguuuaugugaaaa

SEQ ID NO: 1618408 - RNA, 19 nt, Artificial Sequence
  Description of Artificial Sequence: Synthetic oligonucleotide
acuuaagcauuguucaccu

SEQ ID NO: 1618409 - RNA, 19 nt, Artificial Sequence
  Description of Artificial Sequence: Synthetic oligonucleotide
uuugcacguuuuaaggugu

SEQ ID NO: 1618410 - RNA, 19 nt, Artificial Sequence
  Description of Artificial Sequence: Synthetic oligonucleotide
ugcggugccaucagaaacc

SEQ ID NO: 1618411 - RNA, 19 nt, Artificial Sequence
  Description of Artificial Sequence: Synthetic oligonucleotide
agaauguaaguccaugcaa

SEQ ID NO: 1618412 - RNA, 19 nt, Artificial Sequence
  Description of Artificial Sequence: Synthetic oligonucleotide
uucuuuagguucucaaggu

SEQ ID NO: 1618413 - RNA, 19 nt, Artificial Sequence
  Description of Artificial Sequence: Synthetic oligonucleotide
augcggugccaucagaaac

SEQ ID NO: 1618414 - RNA, 19 nt, Artificial Sequence
  Description of Artificial Sequence: Synthetic oligonucleotide
auuagguuuaugugaaaau

SEQ ID NO: 1618415 - RNA, 19 nt, Artificial Sequence
  Description of Artificial Sequence: Synthetic oligonucleotide
aaugcacagauugguuugg

SEQ ID NO: 1618416 - RNA, 19 nt, Artificial Sequence
  Description of Artificial Sequence: Synthetic oligonucleotide
aguucaccaauuaaucuuc

SEQ ID NO: 1618417 - RNA, 19 nt, Artificial Sequence
  Description of Artificial Sequence: Synthetic oligonucleotide
guuuaugugaaaauaucuc

SEQ ID NO: 1618418 - RNA, 19 nt, Artificial Sequence
  Description of Artificial Sequence: Synthetic oligonucleotide
gagaauguaaguccaugca

SEQ ID NO: 1618419 - RNA, 19 nt, Artificial Sequence
  Description of Artificial Sequence: Synthetic oligonucleotide
agcauauucuucugaaaga

SEQ ID NO: 1618420 - RNA, 19 nt, Artificial Sequence
  Description of Artificial Sequence: Synthetic oligonucleotide
uuuaaggaacugccugugc

SEQ ID NO: 1618421 - RNA, 19 nt, Artificial Sequence
  Description of Artificial Sequence: Synthetic oligonucleotide
ugaauuauuugcucagaua

SEQ ID NO: 1618422 - RNA, 19 nt, Artificial Sequence
  Description of Artificial Sequence: Synthetic oligonucleotide
gagagauucccaguuaaug

SEQ ID NO: 1618423 - RNA, 19 nt, Artificial Sequence
  Description of Artificial Sequence: Synthetic oligonucleotide
uuauuugcucagauaauuu

SEQ ID NO: 1618424 - RNA, 19 nt, Artificial Sequence
  Description of Artificial Sequence: Synthetic oligonucleotide
gaaagaucaguauuauucu

SEQ ID NO: 1618425 - RNA, 19 nt, Artificial Sequence
  Description of Artificial Sequence: Synthetic oligonucleotide
cucaaggugcuccauacug

SEQ ID NO: 1618426 - RNA, 19 nt, Artificial Sequence
  Description of Artificial Sequence: Synthetic oligonucleotide
ucugguacugaaaacccua

SEQ ID NO: 1618427 - RNA, 19 nt, Artificial Sequence
  Description of Artificial Sequence: Synthetic oligonucleotide
cauacugugaucagaauua

SEQ ID NO: 1618428 - RNA, 19 nt, Artificial Sequence
  Description of Artificial Sequence: Synthetic oligonucleotide
uucaccugaacuguugaug

SEQ ID NO: 1618429 - RNA, 19 nt, Artificial Sequence
  Description of Artificial Sequence: Synthetic oligonucleotide
gguacugaaaacccuauca

SEQ ID NO: 1618430 - RNA, 19 nt, Artificial Sequence
  Description of Artificial Sequence: Synthetic oligonucleotide
cauaaagacuugccaacag

SEQ ID NO: 1618431 - RNA, 19 nt, Artificial Sequence
  Description of Artificial Sequence: Synthetic oligonucleotide
uuacgaaucaaagcagugu

SEQ ID NO: 1618432 - RNA, 19 nt, Artificial Sequence
  Description of Artificial Sequence: Synthetic oligonucleotide
aguauuauucucaaaugau

SEQ ID NO: 1618433 - RNA, 19 nt, Artificial Sequence
  Description of Artificial Sequence: Synthetic oligonucleotide
aaggguggagaauguaagu

SEQ ID NO: 1618434 - RNA, 19 nt, Artificial Sequence
  Description of Artificial Sequence: Synthetic oligonucleotide
caguauuauucucaaauga

SEQ ID NO: 1618435 - RNA, 19 nt, Artificial Sequence
  Description of Artificial Sequence: Synthetic oligonucleotide
uucucaaggugcuccauac

SEQ ID NO: 1618436 - RNA, 19 nt, Artificial Sequence
  Description of Artificial Sequence: Synthetic oligonucleotide
uccuuguuuacgaaucaaa

SEQ ID NO: 1618437 - RNA, 19 nt, Artificial Sequence
  Description of Artificial Sequence: Synthetic oligonucleotide
aguaguauuuaaggaacug

SEQ ID NO: 1618438 - RNA, 19 nt, Artificial Sequence
  Description of Artificial Sequence: Synthetic oligonucleotide
cugaguauuagguuuaugu

SEQ ID NO: 1618439 - RNA, 19 nt, Artificial Sequence
  Description of Artificial Sequence: Synthetic oligonucleotide
acucccaaagucuuacugu

SEQ ID NO: 1618440 - RNA, 19 nt, Artificial Sequence
  Description of Artificial Sequence: Synthetic oligonucleotide
  modified_base (19)..(19): a, c, u, g, unknown or other
aagguccuaaagcaggaun

SEQ ID NO: 1618441 - RNA, 19 nt, Artificial Sequence
  Description of Artificial Sequence: Synthetic oligonucleotide
agaccaucuaccucaccuc

SEQ ID NO: 1618442 - RNA, 19 nt, Artificial Sequence
  Description of Artificial Sequence: Synthetic oligonucleotide
uuauuacuuaagcauuguu

SEQ ID NO: 1618443 - RNA, 19 nt, Artificial Sequence
  Description of Artificial Sequence: Synthetic oligonucleotide
ucauaaagacuugccaaca

SEQ ID NO: 1618444 - RNA, 19 nt, Artificial Sequence
  Description of Artificial Sequence: Synthetic oligonucleotide
guaccauggcuuuacauga

SEQ ID NO: 1618445 - RNA, 19 nt, Artificial Sequence
  Description of Artificial Sequence: Synthetic oligonucleotide
caguuacaccccaacagcc

SEQ ID NO: 1618446 - RNA, 19 nt, Artificial Sequence
  Description of Artificial Sequence: Synthetic oligonucleotide
uguuucauuucugguacug

SEQ ID NO: 1618447 - RNA, 19 nt, Artificial Sequence
  Description of Artificial Sequence: Synthetic oligonucleotide
ccaaauagauaaagggugg

SEQ ID NO: 1618448 - RNA, 19 nt, Artificial Sequence
  Description of Artificial Sequence: Synthetic oligonucleotide
aguauuagguuuaugugaa

SEQ ID NO: 1618449 - RNA, 19 nt, Artificial Sequence
  Description of Artificial Sequence: Synthetic oligonucleotide
uuuuaagguguacuccaau

SEQ ID NO: 1618450 - RNA, 19 nt, Artificial Sequence
  Description of Artificial Sequence: Synthetic oligonucleotide
aucuacaucuagauaugcg

SEQ ID NO: 1618451 - RNA, 19 nt, Artificial Sequence
  Description of Artificial Sequence: Synthetic oligonucleotide
aucuaucagaucucgcuga

SEQ ID NO: 1618452 - RNA, 19 nt, Artificial Sequence
  Description of Artificial Sequence: Synthetic oligonucleotide
cacguuuuaagguguacuc

SEQ ID NO: 1618453 - RNA, 19 nt, Artificial Sequence
  Description of Artificial Sequence: Synthetic oligonucleotide
uuuugauauuuaagagggu

SEQ ID NO: 1618454 - RNA, 19 nt, Artificial Sequence
  Description of Artificial Sequence: Synthetic oligonucleotide
uguaacccuuuuaggaagu

SEQ ID NO: 1618455 - RNA, 19 nt, Artificial Sequence
  Description of Artificial Sequence: Synthetic oligonucleotide
ucuacucccaaagucuuac

SEQ ID NO: 1618456 - RNA, 19 nt, Artificial Sequence
  Description of Artificial Sequence: Synthetic oligonucleotide
aaauagucauuaggcaaca

SEQ ID NO: 1618457 - RNA, 19 nt, Artificial Sequence
  Description of Artificial Sequence: Synthetic oligonucleotide
ugaaaugcacagauugguu

SEQ ID NO: 1618458 - RNA, 19 nt, Artificial Sequence
  Description of Artificial Sequence: Synthetic oligonucleotide
ucaaguaccauggcuuuac

SEQ ID NO: 1618459 - RNA, 19 nt, Artificial Sequence
  Description of Artificial Sequence: Synthetic oligonucleotide
ggagaauguaaguccaugc

SEQ ID NO: 1618460 - RNA, 19 nt, Artificial Sequence
  Description of Artificial Sequence: Synthetic oligonucleotide
aguaucucaucuauaaaau

SEQ ID NO: 1618461 - RNA, 19 nt, Artificial Sequence
  Description of Artificial Sequence: Synthetic oligonucleotide
guggaugcaucauuauuug

SEQ ID NO: 1618462 - RNA, 19 nt, Artificial Sequence
  Description of Artificial Sequence: Synthetic oligonucleotide
aauaucucuccacguuuau

SEQ ID NO: 1618463 - RNA, 19 nt, Artificial Sequence
  Description of Artificial Sequence: Synthetic oligonucleotide
ucuaucagaucucgcugac

SEQ ID NO: 1618464 - RNA, 19 nt, Artificial Sequence
  Description of Artificial Sequence: Synthetic oligonucleotide
ucuggccauuagaacagcc

SEQ ID NO: 1618465 - RNA, 19 nt, Artificial Sequence
  Description of Artificial Sequence: Synthetic oligonucleotide
uagauaugcggugccauca

SEQ ID NO: 1618466 - RNA, 19 nt, Artificial Sequence
  Description of Artificial Sequence: Synthetic oligonucleotide
ugucuuaugagagucucua

SEQ ID NO: 1618467 - RNA, 19 nt, Artificial Sequence
  Description of Artificial Sequence: Synthetic oligonucleotide
aacccuuuuaggaaguuuu

SEQ ID NO: 1618468 - RNA, 19 nt, Artificial Sequence
  Description of Artificial Sequence: Synthetic oligonucleotide
aauuauuugcucagauaau

SEQ ID NO: 1618469 - RNA, 19 nt, Artificial Sequence
  Description of Artificial Sequence: Synthetic oligonucleotide
ucagaauuauuugguacaa

SEQ ID NO: 1618470 - RNA, 19 nt, Artificial Sequence
  Description of Artificial Sequence: Synthetic oligonucleotide
uuguauuaucuacucccaa

SEQ ID NO: 1618471 - RNA, 19 nt, Artificial Sequence
  Description of Artificial Sequence: Synthetic oligonucleotide
uggagaauguaaguccaug

SEQ ID NO: 1618472 - RNA, 19 nt, Artificial Sequence
  Description of Artificial Sequence: Synthetic oligonucleotide
aaguaguauuuaaggaacu

SEQ ID NO: 1618473 - RNA, 19 nt, Artificial Sequence
  Description of Artificial Sequence: Synthetic oligonucleotide
auuuuccgguuucaacaag

SEQ ID NO: 1618474 - RNA, 19 nt, Artificial Sequence
  Description of Artificial Sequence: Synthetic oligonucleotide
auuuaaggaacugccugug

SEQ ID NO: 1618475 - RNA, 19 nt, Artificial Sequence
  Description of Artificial Sequence: Synthetic oligonucleotide
gaaacuguaggaucaaguu

SEQ ID NO: 1618476 - RNA, 19 nt, Artificial Sequence
  Description of Artificial Sequence: Synthetic oligonucleotide
guaauucaaguaccauggc

SEQ ID NO: 1618477 - RNA, 19 nt, Artificial Sequence
  Description of Artificial Sequence: Synthetic oligonucleotide
cucccaaagucuuacuguc

SEQ ID NO: 1618478 - RNA, 19 nt, Artificial Sequence
  Description of Artificial Sequence: Synthetic oligonucleotide
aagguguacuccaauacua

SEQ ID NO: 1618479 - RNA, 19 nt, Artificial Sequence
  Description of Artificial Sequence: Synthetic oligonucleotide
caaggugcuccauacugac

SEQ ID NO: 1618480 - RNA, 19 nt, Artificial Sequence
  Description of Artificial Sequence: Synthetic oligonucleotide
agauaugcggugccaucag

SEQ ID NO: 1618481 - RNA, 19 nt, Artificial Sequence
  Description of Artificial Sequence: Synthetic oligonucleotide
guuacaccccaacagccac

SEQ ID NO: 1618482 - RNA, 19 nt, Artificial Sequence
  Description of Artificial Sequence: Synthetic oligonucleotide
ugccuugaagaaauacuau

SEQ ID NO: 1618483 - RNA, 19 nt, Artificial Sequence
  Description of Artificial Sequence: Synthetic oligonucleotide
gcuaggacugucuuaugag

SEQ ID NO: 1618484 - RNA, 19 nt, Artificial Sequence
  Description of Artificial Sequence: Synthetic oligonucleotide
ggguggagaauguaagucc

SEQ ID NO: 1618485 - RNA, 19 nt, Artificial Sequence
  Description of Artificial Sequence: Synthetic oligonucleotide
aaauaucucuccacguuua

SEQ ID NO: 1618486 - RNA, 19 nt, Artificial Sequence
  Description of Artificial Sequence: Synthetic oligonucleotide
cacuuucauaaagacuugc

SEQ ID NO: 1618487 - RNA, 19 nt, Artificial Sequence
  Description of Artificial Sequence: Synthetic oligonucleotide
ugggcuaggacugucuuau

SEQ ID NO: 1618488 - RNA, 19 nt, Artificial Sequence
  Description of Artificial Sequence: Synthetic oligonucleotide
caucuagauaugcggugcc

SEQ ID NO: 1618489 - RNA, 19 nt, Artificial Sequence
  Description of Artificial Sequence: Synthetic oligonucleotide
cuaggacugucuuaugaga

SEQ ID NO: 1618490 - RNA, 19 nt, Artificial Sequence
  Description of Artificial Sequence: Synthetic oligonucleotide
gucuuaugagagucucuag

SEQ ID NO: 1618491 - RNA, 19 nt, Artificial Sequence
  Description of Artificial Sequence: Synthetic oligonucleotide
cuccaauacuauuuuggca

SEQ ID NO: 1618492 - RNA, 19 nt, Artificial Sequence
  Description of Artificial Sequence: Synthetic oligonucleotide
auucaaguaccauggcuuu

SEQ ID NO: 1618493 - RNA, 19 nt, Artificial Sequence
  Description of Artificial Sequence: Synthetic oligonucleotide
aacugccugugcugaaaca

SEQ ID NO: 1618494 - RNA, 19 nt, Artificial Sequence
  Description of Artificial Sequence: Synthetic oligonucleotide
guacuccaauacuauuuug

SEQ ID NO: 1618495 - RNA, 19 nt, Artificial Sequence
  Description of Artificial Sequence: Synthetic oligonucleotide
cuagauaugcggugccauc

SEQ ID NO: 1618496 - RNA, 19 nt, Artificial Sequence
  Description of Artificial Sequence: Synthetic oligonucleotide
uaugcggugccaucagaaa

SEQ ID NO: 1618497 - RNA, 19 nt, Artificial Sequence
  Description of Artificial Sequence: Synthetic oligonucleotide
ucuagauaugcggugccau

SEQ ID NO: 1618498 - RNA, 19 nt, Artificial Sequence
  Description of Artificial Sequence: Synthetic oligonucleotide
augacaaauuugauuacaa

SEQ ID NO: 1618499 - RNA, 19 nt, Artificial Sequence
  Description of Artificial Sequence: Synthetic oligonucleotide
cuaccucaccuccuaacac

SEQ ID NO: 1618500 - RNA, 19 nt, Artificial Sequence
  Description of Artificial Sequence: Synthetic oligonucleotide
acccuaucauacugguaag

SEQ ID NO: 1618501 - RNA, 19 nt, Artificial Sequence
  Description of Artificial Sequence: Synthetic oligonucleotide
aucauacugguaaguaucu

SEQ ID NO: 1618502 - RNA, 19 nt, Artificial Sequence
  Description of Artificial Sequence: Synthetic oligonucleotide
cugccugugcugaaacagc

SEQ ID NO: 1618503 - RNA, 19 nt, Artificial Sequence
  Description of Artificial Sequence: Synthetic oligonucleotide
ugguacugaaaacccuauc

SEQ ID NO: 1618504 - RNA, 19 nt, Artificial Sequence
  Description of Artificial Sequence: Synthetic oligonucleotide
gugacaauaaaggcuuuga

SEQ ID NO: 1618505 - RNA, 19 nt, Artificial Sequence
  Description of Artificial Sequence: Synthetic oligonucleotide
cugagcauauucuucugaa

SEQ ID NO: 1618506 - RNA, 19 nt, Artificial Sequence
  Description of Artificial Sequence: Synthetic oligonucleotide
ucugaguauuagguuuaug

SEQ ID NO: 1618507 - RNA, 19 nt, Artificial Sequence
  Description of Artificial Sequence: Synthetic oligonucleotide
uccuuuugccuugaagaaa

SEQ ID NO: 1618508 - RNA, 19 nt, Artificial Sequence
  Description of Artificial Sequence: Synthetic oligonucleotide
agaauaugacaaauuugau

SEQ ID NO: 1618509 - RNA, 19 nt, Artificial Sequence
  Description of Artificial Sequence: Synthetic oligonucleotide
ugguaacuuccuuuggcuu

SEQ ID NO: 1618510 - RNA, 19 nt, Artificial Sequence
  Description of Artificial Sequence: Synthetic oligonucleotide
  modified_base (18)..(18): a, c, u, g, unknown or other
agguccuaaagcaggaunu

SEQ ID NO: 1618511 - RNA, 19 nt, Artificial Sequence
  Description of Artificial Sequence: Synthetic oligonucleotide
gaaauacuauauccuggcu

SEQ ID NO: 1618512 - RNA, 19 nt, Artificial Sequence
  Description of Artificial Sequence: Synthetic oligonucleotide
cagaaaccuuugcaguuac

SEQ ID NO: 1618513 - RNA, 19 nt, Artificial Sequence
  Description of Artificial Sequence: Synthetic oligonucleotide
ugguucugaguauuagguu

SEQ ID NO: 1618514 - RNA, 19 nt, Artificial Sequence
  Description of Artificial Sequence: Synthetic oligonucleotide
cauuuuccgguuucaacaa

SEQ ID NO: 1618515 - RNA, 19 nt, Artificial Sequence
  Description of Artificial Sequence: Synthetic oligonucleotide
uacugguaaguaucucauc

SEQ ID NO: 1618516 - RNA, 19 nt, Artificial Sequence
  Description of Artificial Sequence: Synthetic oligonucleotide
caacacaaaucuaucagau

SEQ ID NO: 1618517 - RNA, 19 nt, Artificial Sequence
  Description of Artificial Sequence: Synthetic oligonucleotide
gauaugcggugccaucaga

SEQ ID NO: 1618518 - RNA, 19 nt, Artificial Sequence
  Description of Artificial Sequence: Synthetic oligonucleotide
cuggccauuagaacagcca

SEQ ID NO: 1618519 - RNA, 19 nt, Artificial Sequence
  Description of Artificial Sequence: Synthetic oligonucleotide
uggcucaaauucagacuga

SEQ ID NO: 1618520 - RNA, 19 nt, Artificial Sequence
  Description of Artificial Sequence: Synthetic oligonucleotide
caaauagauaaagggugga

SEQ ID NO: 1618521 - RNA, 19 nt, Artificial Sequence
  Description of Artificial Sequence: Synthetic oligonucleotide
cuuaagcauuguucaccug

SEQ ID NO: 1618522 - RNA, 19 nt, Artificial Sequence
  Description of Artificial Sequence: Synthetic oligonucleotide
uacugugaucagaauuauu

SEQ ID NO: 1618523 - RNA, 19 nt, Artificial Sequence
  Description of Artificial Sequence: Synthetic oligonucleotide
guccaugcaaacagaaaga

SEQ ID NO: 1618524 - RNA, 19 nt, Artificial Sequence
  Description of Artificial Sequence: Synthetic oligonucleotide
guacugaaaacccuaucau

SEQ ID NO: 1618525 - RNA, 19 nt, Artificial Sequence
  Description of Artificial Sequence: Synthetic oligonucleotide
gcugaaacagcuuccaccu

SEQ ID NO: 1618526 - RNA, 19 nt, Artificial Sequence
  Description of Artificial Sequence: Synthetic oligonucleotide
guuuacgaaucaaagcagu

SEQ ID NO: 1618527 - RNA, 19 nt, Artificial Sequence
  Description of Artificial Sequence: Synthetic oligonucleotide
auaugcggugccaucagaa

SEQ ID NO: 1618528 - RNA, 19 nt, Artificial Sequence
  Description of Artificial Sequence: Synthetic oligonucleotide
ucauacugguaaguaucuc

SEQ ID NO: 1618529 - RNA, 19 nt, Artificial Sequence
  Description of Artificial Sequence: Synthetic oligonucleotide
augagagucucuagcagau

SEQ ID NO: 1618530 - RNA, 19 nt, Artificial Sequence
  Description of Artificial Sequence: Synthetic oligonucleotide
ugcacagauugguuugguu

SEQ ID NO: 1618531 - RNA, 19 nt, Artificial Sequence
  Description of Artificial Sequence: Synthetic oligonucleotide
cuaucauacugguaaguau

SEQ ID NO: 1618532 - RNA, 19 nt, Artificial Sequence
  Description of Artificial Sequence: Synthetic oligonucleotide
caaauucagacugaccugu

SEQ ID NO: 1618533 - RNA, 19 nt, Artificial Sequence
  Description of Artificial Sequence: Synthetic oligonucleotide
gguucugaguauuagguuu

SEQ ID NO: 1618534 - RNA, 19 nt, Artificial Sequence
  Description of Artificial Sequence: Synthetic oligonucleotide
  modified_base (16)..(16): a, c, u, g, unknown or other
guccuaaagcaggaunuaa

SEQ ID NO: 1618535 - RNA, 19 nt, Artificial Sequence
  Description of Artificial Sequence: Synthetic oligonucleotide
ggcuaggacugucuuauga

SEQ ID NO: 1618536 - RNA, 19 nt, Artificial Sequence
  Description of Artificial Sequence: Synthetic oligonucleotide
guaaguccaugcaaacaga

SEQ ID NO: 1618537 - RNA, 19 nt, Artificial Sequence
  Description of Artificial Sequence: Synthetic oligonucleotide
cuguggaaguaguauuuaa

SEQ ID NO: 1618538 - RNA, 19 nt, Artificial Sequence
  Description of Artificial Sequence: Synthetic oligonucleotide
ugcacguuuuaagguguac

SEQ ID NO: 1618539 - RNA, 19 nt, Artificial Sequence
  Description of Artificial Sequence: Synthetic oligonucleotide
gguggagaauguaagucca

SEQ ID NO: 1618540 - RNA, 19 nt, Artificial Sequence
  Description of Artificial Sequence: Synthetic oligonucleotide
auacugugaucagaauuau

SEQ ID NO: 1618541 - RNA, 19 nt, Artificial Sequence
  Description of Artificial Sequence: Synthetic oligonucleotide
aucuagauaugcggugcca

SEQ ID NO: 1618542 - RNA, 19 nt, Artificial Sequence
  Description of Artificial Sequence: Synthetic oligonucleotide
acccuuuuaggaaguuuug

SEQ ID NO: 1618543 - RNA, 19 nt, Artificial Sequence
  Description of Artificial Sequence: Synthetic oligonucleotide
caaagucuuacugucauuu

SEQ ID NO: 1618544 - RNA, 19 nt, Artificial Sequence
  Description of Artificial Sequence: Synthetic oligonucleotide
ggacauacugugaucagaa

SEQ ID NO: 1618545 - RNA, 19 nt, Artificial Sequence
  Description of Artificial Sequence: Synthetic oligonucleotide
uugcacguuuuaaggugua

SEQ ID NO: 1618546 - RNA, 19 nt, Artificial Sequence
  Description of Artificial Sequence: Synthetic oligonucleotide
uucaaguaccauggcuuua

SEQ ID NO: 1618547 - RNA, 19 nt, Artificial Sequence
  Description of Artificial Sequence: Synthetic oligonucleotide
cguuuuaagguguacucca

SEQ ID NO: 1618548 - RNA, 19 nt, Artificial Sequence
  Description of Artificial Sequence: Synthetic oligonucleotide
cuugagagauucccaguua

SEQ ID NO: 1618549 - RNA, 19 nt, Artificial Sequence
  Description of Artificial Sequence: Synthetic oligonucleotide
accucaccuccuaacaccu

SEQ ID NO: 1618550 - RNA, 19 nt, Artificial Sequence
  Description of Artificial Sequence: Synthetic oligonucleotide
guauuagguuuaugugaaa

SEQ ID NO: 1618551 - RNA, 19 nt, Artificial Sequence
  Description of Artificial Sequence: Synthetic oligonucleotide
accuguggaaguaguauuu

SEQ ID NO: 1618552 - RNA, 19 nt, Artificial Sequence
  Description of Artificial Sequence: Synthetic oligonucleotide
guucucaaggugcuccaua

SEQ ID NO: 1618553 - RNA, 19 nt, Artificial Sequence
  Description of Artificial Sequence: Synthetic oligonucleotide
guuuuaagguguacuccaa

SEQ ID NO: 1618554 - RNA, 19 nt, Artificial Sequence
  Description of Artificial Sequence: Synthetic oligonucleotide
aaacccuaucauacuggua

SEQ ID NO: 1618555 - RNA, 19 nt, Artificial Sequence
  Description of Artificial Sequence: Synthetic oligonucleotide
uuauuugcugcaggcucuu

SEQ ID NO: 1618556 - RNA, 19 nt, Artificial Sequence
  Description of Artificial Sequence: Synthetic oligonucleotide
auuaggcaacacaaaucua

SEQ ID NO: 1618557 - RNA, 19 nt, Artificial Sequence
  Description of Artificial Sequence: Synthetic oligonucleotide
ggcuuuacaugaagaagga

SEQ ID NO: 1618558 - RNA, 19 nt, Artificial Sequence
  Description of Artificial Sequence: Synthetic oligonucleotide
aucagaucucgcugacauu

SEQ ID NO: 1618559 - RNA, 19 nt, Artificial Sequence
  Description of Artificial Sequence: Synthetic oligonucleotide
ggugccaucagaaaccuuu

SEQ ID NO: 1618560 - RNA, 19 nt, Artificial Sequence
  Description of Artificial Sequence: Synthetic oligonucleotide
ccaauuaaucuuccaagua

SEQ ID NO: 1618561 - RNA, 19 nt, Artificial Sequence
  Description of Artificial Sequence: Synthetic oligonucleotide
gcacagauugguuugguuu

SEQ ID NO: 1618562 - RNA, 19 nt, Artificial Sequence
  Description of Artificial Sequence: Synthetic oligonucleotide
gacauacugugaucagaau

SEQ ID NO: 1618563 - RNA, 19 nt, Artificial Sequence
  Description of Artificial Sequence: Synthetic oligonucleotide
aggccucuuccagugaaaa

SEQ ID NO: 1618564 - RNA, 19 nt, Artificial Sequence
  Description of Artificial Sequence: Synthetic oligonucleotide
aaggccucuuccagugaaa

SEQ ID NO: 1618565 - RNA, 19 nt, Artificial Sequence
  Description of Artificial Sequence: Synthetic oligonucleotide
gcaauugcuguuuccuugu

SEQ ID NO: 1618566 - RNA, 19 nt, Artificial Sequence
  Description of Artificial Sequence: Synthetic oligonucleotide
cuaucagaucucgcugaca

SEQ ID NO: 1618567 - RNA, 19 nt, Artificial Sequence
  Description of Artificial Sequence: Synthetic oligonucleotide
gguaaguaucucaucuaua

SEQ ID NO: 1618568 - RNA, 19 nt, Artificial Sequence
  Description of Artificial Sequence: Synthetic oligonucleotide
gcuugagagauucccaguu

SEQ ID NO: 1618569 - RNA, 19 nt, Artificial Sequence
  Description of Artificial Sequence: Synthetic oligonucleotide
gucaugggcuaggacuguc

SEQ ID NO: 1618570 - RNA, 19 nt, Artificial Sequence
  Description of Artificial Sequence: Synthetic oligonucleotide
ccuaucauacugguaagua

SEQ ID NO: 1618571 - RNA, 19 nt, Artificial Sequence
  Description of Artificial Sequence: Synthetic oligonucleotide
gccauuagaacagccaaau

SEQ ID NO: 1618572 - RNA, 19 nt, Artificial Sequence
  Description of Artificial Sequence: Synthetic oligonucleotide
ccauacugacaucuuguaa

SEQ ID NO: 1618573 - RNA, 19 nt, Artificial Sequence
  Description of Artificial Sequence: Synthetic oligonucleotide
caucuaccucaccuccuaa

SEQ ID NO: 1618574 - RNA, 19 nt, Artificial Sequence
  Description of Artificial Sequence: Synthetic oligonucleotide
aucuacucccaaagucuua

SEQ ID NO: 1618575 - RNA, 19 nt, Artificial Sequence
  Description of Artificial Sequence: Synthetic oligonucleotide
gcacguuuuaagguguacu

SEQ ID NO: 1618576 - RNA, 19 nt, Artificial Sequence
  Description of Artificial Sequence: Synthetic oligonucleotide
ggccauuagaacagccaaa

SEQ ID NO: 1618577 - RNA, 19 nt, Artificial Sequence
  Description of Artificial Sequence: Synthetic oligonucleotide
  modified_base (17)..(17): a, c, u, g, unknown or other
gguccuaaagcaggaunua

SEQ ID NO: 1618578 - RNA, 19 nt, Artificial Sequence
  Description of Artificial Sequence: Synthetic oligonucleotide
ccauuagaacagccaaaua

SEQ ID NO: 1618579 - RNA, 19 nt, Artificial Sequence
  Description of Artificial Sequence: Synthetic oligonucleotide
ccaucuaccucaccuccua

SEQ ID NO: 1618580 - RNA, 19 nt, Artificial Sequence
  Description of Artificial Sequence: Synthetic oligonucleotide
guaacccuuuuaggaaguu

SEQ ID NO: 1618581 - RNA, 19 nt, Artificial Sequence
  Description of Artificial Sequence: Synthetic oligonucleotide
gcuuuacaugaagaaggau

SEQ ID NO: 1618582 - RNA, 19 nt, Artificial Sequence
  Description of Artificial Sequence: Synthetic oligonucleotide
cccuaucauacugguaagu

SEQ ID NO: 1618583 - RNA, 19 nt, Artificial Sequence
  Description of Artificial Sequence: Synthetic oligonucleotide
ccgcuucuuuagguucuca

SEQ ID NO: 1618584 - RNA, 19 nt, Artificial Sequence
  Description of Artificial Sequence: Synthetic oligonucleotide
ccucaccuccuaacaccuu

SEQ ID NO: 1618585 - RNA, 19 nt, Artificial Sequence
  Description of Artificial Sequence: Synthetic oligonucleotide
cggugccaucagaaaccuu

SEQ ID NO: 1618586 - RNA, 19 nt, Artificial Sequence
  Description of Artificial Sequence: Synthetic oligonucleotide
uuuacugcaaauaugaugu

SEQ ID NO: 1618587 - RNA, 19 nt, Artificial Sequence
  Description of Artificial Sequence: Synthetic oligonucleotide
aauuuaucaccucacauuc

SEQ ID NO: 1618588 - RNA, 19 nt, Artificial Sequence
  Description of Artificial Sequence: Synthetic oligonucleotide
aauaaguccuuuugcaucc

SEQ ID NO: 1618589 - RNA, 19 nt, Artificial Sequence
  Description of Artificial Sequence: Synthetic oligonucleotide
uggauuaucaucacgaaug

SEQ ID NO: 1618590 - RNA, 19 nt, Artificial Sequence
  Description of Artificial Sequence: Synthetic oligonucleotide
auuaucaucacgaauggcc

SEQ ID NO: 1618591 - RNA, 19 nt, Artificial Sequence
  Description of Artificial Sequence: Synthetic oligonucleotide
ugcauagagaaguugaagg

SEQ ID NO: 1618592 - RNA, 19 nt, Artificial Sequence
  Description of Artificial Sequence: Synthetic oligonucleotide
aaggaaauugaaugcaggg

SEQ ID NO: 1618593 - RNA, 19 nt, Artificial Sequence
  Description of Artificial Sequence: Synthetic oligonucleotide
aaaaucuuuugacugagcu

SEQ ID NO: 1618594 - RNA, 19 nt, Artificial Sequence
  Description of Artificial Sequence: Synthetic oligonucleotide
uccuauaggaaucagaaaa

SEQ ID NO: 1618595 - RNA, 19 nt, Artificial Sequence
  Description of Artificial Sequence: Synthetic oligonucleotide
uuuaauaaguccuuuugca

SEQ ID NO: 1618596 - RNA, 19 nt, Artificial Sequence
  Description of Artificial Sequence: Synthetic oligonucleotide
aguacgcaaauuuaucacc

SEQ ID NO: 1618597 - RNA, 19 nt, Artificial Sequence
  Description of Artificial Sequence: Synthetic oligonucleotide
uuaucaucacgaauggccg

SEQ ID NO: 1618598 - RNA, 19 nt, Artificial Sequence
  Description of Artificial Sequence: Synthetic oligonucleotide
ugauuugucuucaugacac

SEQ ID NO: 1618599 - RNA, 19 nt, Artificial Sequence
  Description of Artificial Sequence: Synthetic oligonucleotide
acuacagugaugugugucc

SEQ ID NO: 1618600 - RNA, 19 nt, Artificial Sequence
  Description of Artificial Sequence: Synthetic oligonucleotide
aaugcaacuccauacauua

SEQ ID NO: 1618601 - RNA, 19 nt, Artificial Sequence
  Description of Artificial Sequence: Synthetic oligonucleotide
aaauuuaucaccucacauu

SEQ ID NO: 1618602 - RNA, 19 nt, Artificial Sequence
  Description of Artificial Sequence: Synthetic oligonucleotide
auguccauuggucugauag

SEQ ID NO: 1618603 - RNA, 19 nt, Artificial Sequence
  Description of Artificial Sequence: Synthetic oligonucleotide
uugauuaauagcuucucga

SEQ ID NO: 1618604 - RNA, 19 nt, Artificial Sequence
  Description of Artificial Sequence: Synthetic oligonucleotide
augggaguaucuaugaucc

SEQ ID NO: 1618605 - RNA, 19 nt, Artificial Sequence
  Description of Artificial Sequence: Synthetic oligonucleotide
aagcccaucucugauaugg

SEQ ID NO: 1618606 - RNA, 19 nt, Artificial Sequence
  Description of Artificial Sequence: Synthetic oligonucleotide
aaauucacagauaggccgc

SEQ ID NO: 1618607 - RNA, 19 nt, Artificial Sequence
  Description of Artificial Sequence: Synthetic oligonucleotide
uauggaguugucuucuagg

SEQ ID NO: 1618608 - RNA, 19 nt, Artificial Sequence
  Description of Artificial Sequence: Synthetic oligonucleotide
ugacuuuauaacuaggaaa

SEQ ID NO: 1618609 - RNA, 19 nt, Artificial Sequence
  Description of Artificial Sequence: Synthetic oligonucleotide
ucuaugauccucuugucac

SEQ ID NO: 1618610 - RNA, 19 nt, Artificial Sequence
  Description of Artificial Sequence: Synthetic oligonucleotide
cauuaguucauucucuagc

SEQ ID NO: 1618611 - RNA, 19 nt, Artificial Sequence
  Description of Artificial Sequence: Synthetic oligonucleotide
cuuuacugcaaauaugaug

SEQ ID NO: 1618612 - RNA, 19 nt, Artificial Sequence
  Description of Artificial Sequence: Synthetic oligonucleotide
uggucaauggcuugcauag

SEQ ID NO: 1618613 - RNA, 19 nt, Artificial Sequence
  Description of Artificial Sequence: Synthetic oligonucleotide
aacgccgcuucacaagucc

SEQ ID NO: 1618614 - RNA, 19 nt, Artificial Sequence
  Description of Artificial Sequence: Synthetic oligonucleotide
uuauaacuaggaaaguuuc

SEQ ID NO: 1618615 - RNA, 19 nt, Artificial Sequence
  Description of Artificial Sequence: Synthetic oligonucleotide
ugauaugggaguaucuaug

SEQ ID NO: 1618616 - RNA, 19 nt, Artificial Sequence
  Description of Artificial Sequence: Synthetic oligonucleotide
aaaguuucucaguacacau

SEQ ID NO: 1618617 - RNA, 19 nt, Artificial Sequence
  Description of Artificial Sequence: Synthetic oligonucleotide
auaacuaggaaaguuucuc

SEQ ID NO: 1618618 - RNA, 19 nt, Artificial Sequence
  Description of Artificial Sequence: Synthetic oligonucleotide
aaggucauaaauucacaga

SEQ ID NO: 1618619 - RNA, 19 nt, Artificial Sequence
  Description of Artificial Sequence: Synthetic oligonucleotide
ucugcuaaccuuauaugca

SEQ ID NO: 1618620 - RNA, 19 nt, Artificial Sequence
  Description of Artificial Sequence: Synthetic oligonucleotide
uauaugcaccaucauacug

SEQ ID NO: 1618621 - RNA, 19 nt, Artificial Sequence
  Description of Artificial Sequence: Synthetic oligonucleotide
auaguacgcaaauuuauca

SEQ ID NO: 1618622 - RNA, 19 nt, Artificial Sequence
  Description of Artificial Sequence: Synthetic oligonucleotide
uauaaccuggucaauggcu

SEQ ID NO: 1618623 - RNA, 19 nt, Artificial Sequence
  Description of Artificial Sequence: Synthetic oligonucleotide
uuugaccugagguauggag

SEQ ID NO: 1618624 - RNA, 19 nt, Artificial Sequence
  Description of Artificial Sequence: Synthetic oligonucleotide
aauacuaugggcacaggcu

SEQ ID NO: 1618625 - RNA, 19 nt, Artificial Sequence
  Description of Artificial Sequence: Synthetic oligonucleotide
ucuucuaggaucuuugcau

SEQ ID NO: 1618626 - RNA, 19 nt, Artificial Sequence
  Description of Artificial Sequence: Synthetic oligonucleotide
ggaaauugaaugcagggcc

SEQ ID NO: 1618627 - RNA, 19 nt, Artificial Sequence
  Description of Artificial Sequence: Synthetic oligonucleotide
acauguaguaagucuuagc

SEQ ID NO: 1618628 - RNA, 19 nt, Artificial Sequence
  Description of Artificial Sequence: Synthetic oligonucleotide
agugaugugugucccuugc

SEQ ID NO: 1618629 - RNA, 19 nt, Artificial Sequence
  Description of Artificial Sequence: Synthetic oligonucleotide
cuugauuaauagcuucucg

SEQ ID NO: 1618630 - RNA, 19 nt, Artificial Sequence
  Description of Artificial Sequence: Synthetic oligonucleotide
uaauaaguccuuuugcauc

SEQ ID NO: 1618631 - RNA, 19 nt, Artificial Sequence
  Description of Artificial Sequence: Synthetic oligonucleotide
cucugcuaaccuuauaugc

SEQ ID NO: 1618632 - RNA, 19 nt, Artificial Sequence
  Description of Artificial Sequence: Synthetic oligonucleotide
caucaaggaaauugaaugc

SEQ ID NO: 1618633 - RNA, 19 nt, Artificial Sequence
  Description of Artificial Sequence: Synthetic oligonucleotide
cauacauuaguucauucuc

SEQ ID NO: 1618634 - RNA, 19 nt, Artificial Sequence
  Description of Artificial Sequence: Synthetic oligonucleotide
gaaguucaaaugcaacucc

SEQ ID NO: 1618635 - RNA, 19 nt, Artificial Sequence
  Description of Artificial Sequence: Synthetic oligonucleotide
aucagaaaaucuuuugacu

SEQ ID NO: 1618636 - RNA, 19 nt, Artificial Sequence
  Description of Artificial Sequence: Synthetic oligonucleotide
gcaucaaggaaauugaaug

SEQ ID NO: 1618637 - RNA, 19 nt, Artificial Sequence
  Description of Artificial Sequence: Synthetic oligonucleotide
auaugcaccaucauacugg

SEQ ID NO: 1618638 - RNA, 19 nt, Artificial Sequence
  Description of Artificial Sequence: Synthetic oligonucleotide
cauguaguaagucuuagca

SEQ ID NO: 1618639 - RNA, 19 nt, Artificial Sequence
  Description of Artificial Sequence: Synthetic oligonucleotide
uuuaaaccugggcagugcc

SEQ ID NO: 1618640 - RNA, 19 nt, Artificial Sequence
  Description of Artificial Sequence: Synthetic oligonucleotide
gacuugauauucaaagucc

SEQ ID NO: 1618641 - RNA, 19 nt, Artificial Sequence
  Description of Artificial Sequence: Synthetic oligonucleotide
ucuagcaucaccacuggau

SEQ ID NO: 1618642 - RNA, 19 nt, Artificial Sequence
  Description of Artificial Sequence: Synthetic oligonucleotide
ugauaguacgcaaauuuau

SEQ ID NO: 1618643 - RNA, 19 nt, Artificial Sequence
  Description of Artificial Sequence: Synthetic oligonucleotide
aaugcagggccuuccauga

SEQ ID NO: 1618644 - RNA, 19 nt, Artificial Sequence
  Description of Artificial Sequence: Synthetic oligonucleotide
aucaccucacauucaauuc

SEQ ID NO: 1618645 - RNA, 19 nt, Artificial Sequence
  Description of Artificial Sequence: Synthetic oligonucleotide
aaaacgccgcuucacaagu

SEQ ID NO: 1618646 - RNA, 19 nt, Artificial Sequence
  Description of Artificial Sequence: Synthetic oligonucleotide
uuaauaaguccuuuugcau

SEQ ID NO: 1618647 - RNA, 19 nt, Artificial Sequence
  Description of Artificial Sequence: Synthetic oligonucleotide
aggaaguucaaaugcaacu

SEQ ID NO: 1618648 - RNA, 19 nt, Artificial Sequence
  Description of Artificial Sequence: Synthetic oligonucleotide
uucucgaacugucaacugc

SEQ ID NO: 1618649 - RNA, 19 nt, Artificial Sequence
  Description of Artificial Sequence: Synthetic oligonucleotide
uucauccauaccuugauua

SEQ ID NO: 1618650 - RNA, 19 nt, Artificial Sequence
  Description of Artificial Sequence: Synthetic oligonucleotide
gaauggccgauuuaauaag

SEQ ID NO: 1618651 - RNA, 19 nt, Artificial Sequence
  Description of Artificial Sequence: Synthetic oligonucleotide
ugaagucccaauaaguauu

SEQ ID NO: 1618652 - RNA, 19 nt, Artificial Sequence
  Description of Artificial Sequence: Synthetic oligonucleotide
uucaccaagcagaaauacc

SEQ ID NO: 1618653 - RNA, 19 nt, Artificial Sequence
  Description of Artificial Sequence: Synthetic oligonucleotide
aacuacagugauguguguc

SEQ ID NO: 1618654 - RNA, 19 nt, Artificial Sequence
  Description of Artificial Sequence: Synthetic oligonucleotide
ugggcaacuacagugaugu

SEQ ID NO: 1618655 - RNA, 19 nt, Artificial Sequence
  Description of Artificial Sequence: Synthetic oligonucleotide
cuaggaucuuugcauaagg

SEQ ID NO: 1618656 - RNA, 19 nt, Artificial Sequence
  Description of Artificial Sequence: Synthetic oligonucleotide
ucacagauaggccgcaacc

SEQ ID NO: 1618657 - RNA, 19 nt, Artificial Sequence
  Description of Artificial Sequence: Synthetic oligonucleotide
uuauaaccuggucaauggc

SEQ ID NO: 1618658 - RNA, 19 nt, Artificial Sequence
  Description of Artificial Sequence: Synthetic oligonucleotide
gaaaacgccgcuucacaag

SEQ ID NO: 1618659 - RNA, 19 nt, Artificial Sequence
  Description of Artificial Sequence: Synthetic oligonucleotide
aguccagacaccugccgcc

SEQ ID NO: 1618660 - RNA, 19 nt, Artificial Sequence
  Description of Artificial Sequence: Synthetic oligonucleotide
aggaaaguuucucaguaca

SEQ ID NO: 1618661 - RNA, 19 nt, Artificial Sequence
  Description of Artificial Sequence: Synthetic oligonucleotide
agcauugugagugcugagc

SEQ ID NO: 1618662 - RNA, 19 nt, Artificial Sequence
  Description of Artificial Sequence: Synthetic oligonucleotide
cacaaguccagacaccugc

SEQ ID NO: 1618663 - RNA, 19 nt, Artificial Sequence
  Description of Artificial Sequence: Synthetic oligonucleotide
ucucgaacugucaacugca

SEQ ID NO: 1618664 - RNA, 19 nt, Artificial Sequence
  Description of Artificial Sequence: Synthetic oligonucleotide
uaggaucuuugcauaaggc

SEQ ID NO: 1618665 - RNA, 19 nt, Artificial Sequence
  Description of Artificial Sequence: Synthetic oligonucleotide
gauaugggaguaucuauga

SEQ ID NO: 1618666 - RNA, 19 nt, Artificial Sequence
  Description of Artificial Sequence: Synthetic oligonucleotide
uuuaagcuucuuaucagua

SEQ ID NO: 1618667 - RNA, 19 nt, Artificial Sequence
  Description of Artificial Sequence: Synthetic oligonucleotide
ugaaggucauaaauucaca

SEQ ID NO: 1618668 - RNA, 19 nt, Artificial Sequence
  Description of Artificial Sequence: Synthetic oligonucleotide
aagucuuagcagcugaguu

SEQ ID NO: 1618669 - RNA, 19 nt, Artificial Sequence
  Description of Artificial Sequence: Synthetic oligonucleotide
uccauaccuugauuaauag

SEQ ID NO: 1618670 - RNA, 19 nt, Artificial Sequence
  Description of Artificial Sequence: Synthetic oligonucleotide
ugaugugugucccuugccu

SEQ ID NO: 1618671 - RNA, 19 nt, Artificial Sequence
  Description of Artificial Sequence: Synthetic oligonucleotide
uaguacgcaaauuuaucac

SEQ ID NO: 1618672 - RNA, 19 nt, Artificial Sequence
  Description of Artificial Sequence: Synthetic oligonucleotide
aauguagauaauauacuuu

SEQ ID NO: 1618673 - RNA, 19 nt, Artificial Sequence
  Description of Artificial Sequence: Synthetic oligonucleotide
uggccgauuuaauaagucc

SEQ ID NO: 1618674 - RNA, 19 nt, Artificial Sequence
  Description of Artificial Sequence: Synthetic oligonucleotide
aguaagucuuagcagcuga

SEQ ID NO: 1618675 - RNA, 19 nt, Artificial Sequence
  Description of Artificial Sequence: Synthetic oligonucleotide
uaaccuuauaugcaccauc

SEQ ID NO: 1618676 - RNA, 19 nt, Artificial Sequence
  Description of Artificial Sequence: Synthetic oligonucleotide
ucuuugaccugagguaugg

SEQ ID NO: 1618677 - RNA, 19 nt, Artificial Sequence
  Description of Artificial Sequence: Synthetic oligonucleotide
ugagguauggaguugucuu

SEQ ID NO: 1618678 - RNA, 19 nt, Artificial Sequence
  Description of Artificial Sequence: Synthetic oligonucleotide
aaccuuauaugcaccauca

SEQ ID NO: 1618679 - RNA, 19 nt, Artificial Sequence
  Description of Artificial Sequence: Synthetic oligonucleotide
uacuaugggcacaggcugg

SEQ ID NO: 1618680 - RNA, 19 nt, Artificial Sequence
  Description of Artificial Sequence: Synthetic oligonucleotide
ugcaaauaugaugucuuug

SEQ ID NO: 1618681 - RNA, 19 nt, Artificial Sequence
  Description of Artificial Sequence: Synthetic oligonucleotide
acauuaguucauucucuag

SEQ ID NO: 1618682 - RNA, 19 nt, Artificial Sequence
  Description of Artificial Sequence: Synthetic oligonucleotide
agcuucuaggcaguggccc

SEQ ID NO: 1618683 - RNA, 19 nt, Artificial Sequence
  Description of Artificial Sequence: Synthetic oligonucleotide
caugauucuggcacaaauc

SEQ ID NO: 1618684 - RNA, 19 nt, Artificial Sequence
  Description of Artificial Sequence: Synthetic oligonucleotide
gauaguacgcaaauuuauc

SEQ ID NO: 1618685 - RNA, 19 nt, Artificial Sequence
  Description of Artificial Sequence: Synthetic oligonucleotide
aguaucuaugauccucuug

SEQ ID NO: 1618686 - RNA, 19 nt, Artificial Sequence
  Description of Artificial Sequence: Synthetic oligonucleotide
cauccucggaauuccaggg

SEQ ID NO: 1618687 - RNA, 19 nt, Artificial Sequence
  Description of Artificial Sequence: Synthetic oligonucleotide
uuccauaggccucugcuaa

SEQ ID NO: 1618688 - RNA, 19 nt, Artificial Sequence
  Description of Artificial Sequence: Synthetic oligonucleotide
uccucggaauuccaggggc

SEQ ID NO: 1618689 - RNA, 19 nt, Artificial Sequence
  Description of Artificial Sequence: Synthetic oligonucleotide
uccuuagacaguaccgcug

SEQ ID NO: 1618690 - RNA, 19 nt, Artificial Sequence
  Description of Artificial Sequence: Synthetic oligonucleotide
uuaaaccugggcagugccc

SEQ ID NO: 1618691 - RNA, 19 nt, Artificial Sequence
  Description of Artificial Sequence: Synthetic oligonucleotide
agugcccauaccaugcagc

SEQ ID NO: 1618692 - RNA, 19 nt, Artificial Sequence
  Description of Artificial Sequence: Synthetic oligonucleotide
ucuaggaucuuugcauaag

SEQ ID NO: 1618693 - RNA, 19 nt, Artificial Sequence
  Description of Artificial Sequence: Synthetic oligonucleotide
acgcaaauuuaucaccuca

SEQ ID NO: 1618694 - RNA, 19 nt, Artificial Sequence
  Description of Artificial Sequence: Synthetic oligonucleotide
gaugaagucccaauaagua

SEQ ID NO: 1618695 - RNA, 19 nt, Artificial Sequence
  Description of Artificial Sequence: Synthetic oligonucleotide
cugcuaaccuuauaugcac

SEQ ID NO: 1618696 - RNA, 19 nt, Artificial Sequence
  Description of Artificial Sequence: Synthetic oligonucleotide
ugcuaaccuuauaugcacc

SEQ ID NO: 1618697 - RNA, 19 nt, Artificial Sequence
  Description of Artificial Sequence: Synthetic oligonucleotide
ucugauaugggaguaucua

SEQ ID NO: 1618698 - RNA, 19 nt, Artificial Sequence
  Description of Artificial Sequence: Synthetic oligonucleotide
ugaaaacgccgcuucacaa

SEQ ID NO: 1618699 - RNA, 19 nt, Artificial Sequence
  Description of Artificial Sequence: Synthetic oligonucleotide
uacauuaguucauucucua

SEQ ID NO: 1618700 - RNA, 19 nt, Artificial Sequence
  Description of Artificial Sequence: Synthetic oligonucleotide
ucauccauaccuugauuaa

SEQ ID NO: 1618701 - RNA, 19 nt, Artificial Sequence
  Description of Artificial Sequence: Synthetic oligonucleotide
gcaaauaugaugucuuuga

SEQ ID NO: 1618702 - RNA, 19 nt, Artificial Sequence
  Description of Artificial Sequence: Synthetic oligonucleotide
cugaccacuuuuaaaccug

SEQ ID NO: 1618703 - RNA, 19 nt, Artificial Sequence
  Description of Artificial Sequence: Synthetic oligonucleotide
cauagagaaguugaagguc

SEQ ID NO: 1618704 - RNA, 19 nt, Artificial Sequence
  Description of Artificial Sequence: Synthetic oligonucleotide
agcagcuacaccugcugag

SEQ ID NO: 1618705 - RNA, 19 nt, Artificial Sequence
  Description of Artificial Sequence: Synthetic oligonucleotide
ugucccuugccuuucaauu

SEQ ID NO: 1618706 - RNA, 19 nt, Artificial Sequence
  Description of Artificial Sequence: Synthetic oligonucleotide
cuauaggaaucagaaaauc

SEQ ID NO: 1618707 - RNA, 19 nt, Artificial Sequence
  Description of Artificial Sequence: Synthetic oligonucleotide
agucccaauaaguauuuua

SEQ ID NO: 1618708 - RNA, 19 nt, Artificial Sequence
  Description of Artificial Sequence: Synthetic oligonucleotide
aaugggcaacuacagugau

SEQ ID NO: 1618709 - RNA, 19 nt, Artificial Sequence
  Description of Artificial Sequence: Synthetic oligonucleotide
uucacagauaggccgcaac

SEQ ID NO: 1618710 - RNA, 19 nt, Artificial Sequence
  Description of Artificial Sequence: Synthetic oligonucleotide
ucccuccuuagacaguacc

SEQ ID NO: 1618711 - RNA, 19 nt, Artificial Sequence
  Description of Artificial Sequence: Synthetic oligonucleotide
agcgucgccaucuugccca

SEQ ID NO: 1618712 - RNA, 19 nt, Artificial Sequence
  Description of Artificial Sequence: Synthetic oligonucleotide
acagauaggccgcaaccca

SEQ ID NO: 1618713 - RNA, 19 nt, Artificial Sequence
  Description of Artificial Sequence: Synthetic oligonucleotide
gaacugucaacugcagugc

SEQ ID NO: 1618714 - RNA, 19 nt, Artificial Sequence
  Description of Artificial Sequence: Synthetic oligonucleotide
aauggccgauuuaauaagu

SEQ ID NO: 1618715 - RNA, 19 nt, Artificial Sequence
  Description of Artificial Sequence: Synthetic oligonucleotide
uaggaaaguuucucaguac

SEQ ID NO: 1618716 - RNA, 19 nt, Artificial Sequence
  Description of Artificial Sequence: Synthetic oligonucleotide
caccucacauucaauuccc

SEQ ID NO: 1618717 - RNA, 19 nt, Artificial Sequence
  Description of Artificial Sequence: Synthetic oligonucleotide
guauggaguugucuucuag

SEQ ID NO: 1618718 - RNA, 19 nt, Artificial Sequence
  Description of Artificial Sequence: Synthetic oligonucleotide
cagaaauaccuuuucaucu

SEQ ID NO: 1618719 - RNA, 19 nt, Artificial Sequence
  Description of Artificial Sequence: Synthetic oligonucleotide
ugucuuugaccugagguau

SEQ ID NO: 1618720 - RNA, 19 nt, Artificial Sequence
  Description of Artificial Sequence: Synthetic oligonucleotide
ucuuaucaguacagagaca

SEQ ID NO: 1618721 - RNA, 19 nt, Artificial Sequence
  Description of Artificial Sequence: Synthetic oligonucleotide
uggucugauaguacgcaaa

SEQ ID NO: 1618722 - RNA, 19 nt, Artificial Sequence
  Description of Artificial Sequence: Synthetic oligonucleotide
gauuaucaucacgaauggc

SEQ ID NO: 1618723 - RNA, 19 nt, Artificial Sequence
  Description of Artificial Sequence: Synthetic oligonucleotide
uguccauuggucugauagu

SEQ ID NO: 1618724 - RNA, 19 nt, Artificial Sequence
  Description of Artificial Sequence: Synthetic oligonucleotide
caagcagaaauaccuuuuc

SEQ ID NO: 1618725 - RNA, 19 nt, Artificial Sequence
  Description of Artificial Sequence: Synthetic oligonucleotide
auacauuaguucauucucu

SEQ ID NO: 1618726 - RNA, 19 nt, Artificial Sequence
  Description of Artificial Sequence: Synthetic oligonucleotide
ucaccacuggauuaucauc

SEQ ID NO: 1618727 - RNA, 19 nt, Artificial Sequence
  Description of Artificial Sequence: Synthetic oligonucleotide
agaaguugaaggucauaaa

SEQ ID NO: 1618728 - RNA, 19 nt, Artificial Sequence
  Description of Artificial Sequence: Synthetic oligonucleotide
gaauuccaggggcugacca

SEQ ID NO: 1618729 - RNA, 19 nt, Artificial Sequence
  Description of Artificial Sequence: Synthetic oligonucleotide
uccauacauuaguucauuc

SEQ ID NO: 1618730 - RNA, 19 nt, Artificial Sequence
  Description of Artificial Sequence: Synthetic oligonucleotide
gcagaaauaccuuuucauc

SEQ ID NO: 1618731 - RNA, 19 nt, Artificial Sequence
  Description of Artificial Sequence: Synthetic oligonucleotide
auccucggaauuccagggg

SEQ ID NO: 1618732 - RNA, 19 nt, Artificial Sequence
  Description of Artificial Sequence: Synthetic oligonucleotide
uuagacauucagugucuuc

SEQ ID NO: 1618733 - RNA, 19 nt, Artificial Sequence
  Description of Artificial Sequence: Synthetic oligonucleotide
aucaccacuggauuaucau

SEQ ID NO: 1618734 - RNA, 19 nt, Artificial Sequence
  Description of Artificial Sequence: Synthetic oligonucleotide
cuucaccaagcagaaauac

SEQ ID NO: 1618735 - RNA, 19 nt, Artificial Sequence
  Description of Artificial Sequence: Synthetic oligonucleotide
ucgaacugucaacugcagu

SEQ ID NO: 1618736 - RNA, 19 nt, Artificial Sequence
  Description of Artificial Sequence: Synthetic oligonucleotide
uuuccauaggccucugcua

SEQ ID NO: 1618737 - RNA, 19 nt, Artificial Sequence
  Description of Artificial Sequence: Synthetic oligonucleotide
acgaauggccgauuuaaua

SEQ ID NO: 1618738 - RNA, 19 nt, Artificial Sequence
  Description of Artificial Sequence: Synthetic oligonucleotide
gagguauggaguugucuuc

SEQ ID NO: 1618739 - RNA, 19 nt, Artificial Sequence
  Description of Artificial Sequence: Synthetic oligonucleotide
cacagauaggccgcaaccc

SEQ ID NO: 1618740 - RNA, 19 nt, Artificial Sequence
  Description of Artificial Sequence: Synthetic oligonucleotide
aguggaguuuuccacucau

SEQ ID NO: 1618741 - RNA, 19 nt, Artificial Sequence
  Description of Artificial Sequence: Synthetic oligonucleotide
cauugugagugcugagcag

SEQ ID NO: 1618742 - RNA, 19 nt, Artificial Sequence
  Description of Artificial Sequence: Synthetic oligonucleotide
gaaugggcaacuacaguga

SEQ ID NO: 1618743 - RNA, 19 nt, Artificial Sequence
  Description of Artificial Sequence: Synthetic oligonucleotide
agauaggccgcaacccagc

SEQ ID NO: 1618744 - RNA, 19 nt, Artificial Sequence
  Description of Artificial Sequence: Synthetic oligonucleotide
gauaggccgcaacccagcc

SEQ ID NO: 1618745 - RNA, 19 nt, Artificial Sequence
  Description of Artificial Sequence: Synthetic oligonucleotide
gcaacuacagugaugugug

SEQ ID NO: 1618746 - RNA, 19 nt, Artificial Sequence
  Description of Artificial Sequence: Synthetic oligonucleotide
ugagugcugagcagcuaca

SEQ ID NO: 1618747 - RNA, 19 nt, Artificial Sequence
  Description of Artificial Sequence: Synthetic oligonucleotide
uggaguugucuucuaggau

SEQ ID NO: 1618748 - RNA, 19 nt, Artificial Sequence
  Description of Artificial Sequence: Synthetic oligonucleotide
cugaguuuauaaccugguc

SEQ ID NO: 1618749 - RNA, 19 nt, Artificial Sequence
  Description of Artificial Sequence: Synthetic oligonucleotide
gacacuggcuucuauggcu

SEQ ID NO: 1618750 - RNA, 19 nt, Artificial Sequence
  Description of Artificial Sequence: Synthetic oligonucleotide
gucccaauaaguauuuuaa

SEQ ID NO: 1618751 - RNA, 19 nt, Artificial Sequence
  Description of Artificial Sequence: Synthetic oligonucleotide
acauucaauucccuccuua

SEQ ID NO: 1618752 - RNA, 19 nt, Artificial Sequence
  Description of Artificial Sequence: Synthetic oligonucleotide
auggccgauuuaauaaguc

SEQ ID NO: 1618753 - RNA, 19 nt, Artificial Sequence
  Description of Artificial Sequence: Synthetic oligonucleotide
ugauccucuugucaccgua

SEQ ID NO: 1618754 - RNA, 19 nt, Artificial Sequence
  Description of Artificial Sequence: Synthetic oligonucleotide
ucacaaguccagacaccug

SEQ ID NO: 1618755 - RNA, 19 nt, Artificial Sequence
  Description of Artificial Sequence: Synthetic oligonucleotide
acugucaacugcagugccg

SEQ ID NO: 1618756 - RNA, 19 nt, Artificial Sequence
  Description of Artificial Sequence: Synthetic oligonucleotide
gucaacugcagugccgcgg

SEQ ID NO: 1618757 - RNA, 19 nt, Artificial Sequence
  Description of Artificial Sequence: Synthetic oligonucleotide
cuaggcaguggcccacugg

SEQ ID NO: 1618758 - RNA, 19 nt, Artificial Sequence
  Description of Artificial Sequence: Synthetic oligonucleotide
uuggucugauaguacgcaa

SEQ ID NO: 1618759 - RNA, 19 nt, Artificial Sequence
  Description of Artificial Sequence: Synthetic oligonucleotide
gugaaaacgccgcuucaca

SEQ ID NO: 1618760 - RNA, 19 nt, Artificial Sequence
  Description of Artificial Sequence: Synthetic oligonucleotide
cugauaguacgcaaauuua

SEQ ID NO: 1618761 - RNA, 19 nt, Artificial Sequence
  Description of Artificial Sequence: Synthetic oligonucleotide
uacgcaaauuuaucaccuc

SEQ ID NO: 1618762 - RNA, 19 nt, Artificial Sequence
  Description of Artificial Sequence: Synthetic oligonucleotide
cuugauauucaaaguccaa

SEQ ID NO: 1618763 - RNA, 19 nt, Artificial Sequence
  Description of Artificial Sequence: Synthetic oligonucleotide
ugaauacuaugggcacagg

SEQ ID NO: 1618764 - RNA, 19 nt, Artificial Sequence
  Description of Artificial Sequence: Synthetic oligonucleotide
cuacagugauguguguccc

SEQ ID NO: 1618765 - RNA, 19 nt, Artificial Sequence
  Description of Artificial Sequence: Synthetic oligonucleotide
cucgaacugucaacugcag

SEQ ID NO: 1618766 - RNA, 19 nt, Artificial Sequence
  Description of Artificial Sequence: Synthetic oligonucleotide
caaauuuaucaccucacau

SEQ ID NO: 1618767 - RNA, 19 nt, Artificial Sequence
  Description of Artificial Sequence: Synthetic oligonucleotide
uggucuugaaugggcaacu

SEQ ID NO: 1618768 - RNA, 19 nt, Artificial Sequence
  Description of Artificial Sequence: Synthetic oligonucleotide
ggcccacuggucuugaaug

SEQ ID NO: 1618769 - RNA, 19 nt, Artificial Sequence
  Description of Artificial Sequence: Synthetic oligonucleotide
ccuuagacaguaccgcugc

SEQ ID NO: 1618770 - RNA, 19 nt, Artificial Sequence
  Description of Artificial Sequence: Synthetic oligonucleotide
agguauggaguugucuucu

SEQ ID NO: 1618771 - RNA, 19 nt, Artificial Sequence
  Description of Artificial Sequence: Synthetic oligonucleotide
gcauagggacaucagcacc

SEQ ID NO: 1618772 - RNA, 19 nt, Artificial Sequence
  Description of Artificial Sequence: Synthetic oligonucleotide
acaaggugauuugucuuca

SEQ ID NO: 1618773 - RNA, 19 nt, Artificial Sequence
  Description of Artificial Sequence: Synthetic oligonucleotide
cacaaaucucagcucccac

SEQ ID NO: 1618774 - RNA, 19 nt, Artificial Sequence
  Description of Artificial Sequence: Synthetic oligonucleotide
agguagaaauccccuuuau

SEQ ID NO: 1618775 - RNA, 19 nt, Artificial Sequence
  Description of Artificial Sequence: Synthetic oligonucleotide
ugggcaacuucuucaccaa

SEQ ID NO: 1618776 - RNA, 19 nt, Artificial Sequence
  Description of Artificial Sequence: Synthetic oligonucleotide
cuuuuccuauaggaaucag

SEQ ID NO: 1618777 - RNA, 19 nt, Artificial Sequence
  Description of Artificial Sequence: Synthetic oligonucleotide
gcuaaccuuauaugcacca

SEQ ID NO: 1618778 - RNA, 19 nt, Artificial Sequence
  Description of Artificial Sequence: Synthetic oligonucleotide
aaacgccgcuucacaaguc

SEQ ID NO: 1618779 - RNA, 19 nt, Artificial Sequence
  Description of Artificial Sequence: Synthetic oligonucleotide
agcaucaccacuggauuau

SEQ ID NO: 1618780 - RNA, 19 nt, Artificial Sequence
  Description of Artificial Sequence: Synthetic oligonucleotide
gugaugugugucccuugcc

SEQ ID NO: 1618781 - RNA, 19 nt, Artificial Sequence
  Description of Artificial Sequence: Synthetic oligonucleotide
auuuaucaccucacauuca

SEQ ID NO: 1618782 - RNA, 19 nt, Artificial Sequence
  Description of Artificial Sequence: Synthetic oligonucleotide
cuucuaggaucuuugcaua

SEQ ID NO: 1618783 - RNA, 19 nt, Artificial Sequence
  Description of Artificial Sequence: Synthetic oligonucleotide
agugccgcgggcgccgagc

SEQ ID NO: 1618784 - RNA, 19 nt, Artificial Sequence
  Description of Artificial Sequence: Synthetic oligonucleotide
ccuuaucaaaacaacuuaa

SEQ ID NO: 1618785 - RNA, 19 nt, Artificial Sequence
  Description of Artificial Sequence: Synthetic oligonucleotide
aucaucacgaauggccgau

SEQ ID NO: 1618786 - RNA, 19 nt, Artificial Sequence
  Description of Artificial Sequence: Synthetic oligonucleotide
guacgcaaauuuaucaccu

SEQ ID NO: 1618787 - RNA, 19 nt, Artificial Sequence
  Description of Artificial Sequence: Synthetic oligonucleotide
auaggccgcaacccagcca

SEQ ID NO: 1618788 - RNA, 19 nt, Artificial Sequence
  Description of Artificial Sequence: Synthetic oligonucleotide
auaggccucugcuaaccuu

SEQ ID NO: 1618789 - RNA, 19 nt, Artificial Sequence
  Description of Artificial Sequence: Synthetic oligonucleotide
aagcauauuuaagcuucuu

SEQ ID NO: 1618790 - RNA, 19 nt, Artificial Sequence
  Description of Artificial Sequence: Synthetic oligonucleotide
cacaguuacaaggugauuu

SEQ ID NO: 1618791 - RNA, 19 nt, Artificial Sequence
  Description of Artificial Sequence: Synthetic oligonucleotide
gagcagcuacaccugcuga

SEQ ID NO: 1618792 - RNA, 19 nt, Artificial Sequence
  Description of Artificial Sequence: Synthetic oligonucleotide
gcauagagaaguugaaggu

SEQ ID NO: 1618793 - RNA, 19 nt, Artificial Sequence
  Description of Artificial Sequence: Synthetic oligonucleotide
ucggaauuccaggggcuga

SEQ ID NO: 1618794 - RNA, 19 nt, Artificial Sequence
  Description of Artificial Sequence: Synthetic oligonucleotide
ugggaguaucuaugauccu

SEQ ID NO: 1618795 - RNA, 19 nt, Artificial Sequence
  Description of Artificial Sequence: Synthetic oligonucleotide
ugugucccuugccuuucaa

SEQ ID NO: 1618796 - RNA, 19 nt, Artificial Sequence
  Description of Artificial Sequence: Synthetic oligonucleotide
ggugaaaacgccgcuucac

SEQ ID NO: 1618797 - RNA, 19 nt, Artificial Sequence
  Description of Artificial Sequence: Synthetic oligonucleotide
gugacacgaacagcaggag

SEQ ID NO: 1618798 - RNA, 19 nt, Artificial Sequence
  Description of Artificial Sequence: Synthetic oligonucleotide
gcccacuggucuugaaugg

SEQ ID NO: 1618799 - RNA, 19 nt, Artificial Sequence
  Description of Artificial Sequence: Synthetic oligonucleotide
uuccaugauucuggcacaa

SEQ ID NO: 1618800 - RNA, 19 nt, Artificial Sequence
  Description of Artificial Sequence: Synthetic oligonucleotide
gaguugucuucuaggaucu

SEQ ID NO: 1618801 - RNA, 19 nt, Artificial Sequence
  Description of Artificial Sequence: Synthetic oligonucleotide
aauguccauuggucugaua

SEQ ID NO: 1618802 - RNA, 19 nt, Artificial Sequence
  Description of Artificial Sequence: Synthetic oligonucleotide
cgcaaauuuaucaccucac

SEQ ID NO: 1618803 - RNA, 19 nt, Artificial Sequence
  Description of Artificial Sequence: Synthetic oligonucleotide
gcccauaccaugcagcaaa

SEQ ID NO: 1618804 - RNA, 19 nt, Artificial Sequence
  Description of Artificial Sequence: Synthetic oligonucleotide
cuuuugacugagcuucugu

SEQ ID NO: 1618805 - RNA, 19 nt, Artificial Sequence
  Description of Artificial Sequence: Synthetic oligonucleotide
cucggaauuccaggggcug

SEQ ID NO: 1618806 - RNA, 19 nt, Artificial Sequence
  Description of Artificial Sequence: Synthetic oligonucleotide
cugauaugggaguaucuau

SEQ ID NO: 1618807 - RNA, 19 nt, Artificial Sequence
  Description of Artificial Sequence: Synthetic oligonucleotide
cagugcccauaccaugcag

SEQ ID NO: 1618808 - RNA, 19 nt, Artificial Sequence
  Description of Artificial Sequence: Synthetic oligonucleotide
ggaucuuugcauaaggcau

SEQ ID NO: 1618809 - RNA, 19 nt, Artificial Sequence
  Description of Artificial Sequence: Synthetic oligonucleotide
agcugcaccaacagcaauu

SEQ ID NO: 1618810 - RNA, 19 nt, Artificial Sequence
  Description of Artificial Sequence: Synthetic oligonucleotide
gcgccgagcggugaaaacg

SEQ ID NO: 1618811 - RNA, 19 nt, Artificial Sequence
  Description of Artificial Sequence: Synthetic oligonucleotide
guccuuuugcauccucgga

SEQ ID NO: 1618812 - RNA, 19 nt, Artificial Sequence
  Description of Artificial Sequence: Synthetic oligonucleotide
gaugugugucccuugccuu

SEQ ID NO: 1618813 - RNA, 19 nt, Artificial Sequence
  Description of Artificial Sequence: Synthetic oligonucleotide
ccuuauaugcaccaucaua

SEQ ID NO: 1618814 - RNA, 19 nt, Artificial Sequence
  Description of Artificial Sequence: Synthetic oligonucleotide
cgaauggccgauuuaauaa

SEQ ID NO: 1618815 - RNA, 19 nt, Artificial Sequence
  Description of Artificial Sequence: Synthetic oligonucleotide
ggcaacuacagugaugugu

SEQ ID NO: 1618816 - RNA, 19 nt, Artificial Sequence
  Description of Artificial Sequence: Synthetic oligonucleotide
agacauguaguaagucuua

SEQ ID NO: 1618817 - RNA, 19 nt, Artificial Sequence
  Description of Artificial Sequence: Synthetic oligonucleotide
aggggcugaccacuuuuaa

SEQ ID NO: 1618818 - RNA, 19 nt, Artificial Sequence
  Description of Artificial Sequence: Synthetic oligonucleotide
augggcaacuacagugaug

SEQ ID NO: 1618819 - RNA, 19 nt, Artificial Sequence
  Description of Artificial Sequence: Synthetic oligonucleotide
ccgagcggugaaaacgccg

SEQ ID NO: 1618820 - RNA, 19 nt, Artificial Sequence
  Description of Artificial Sequence: Synthetic oligonucleotide
cgagcggugaaaacgccgc

SEQ ID NO: 1618821 - RNA, 19 nt, Artificial Sequence
  Description of Artificial Sequence: Synthetic oligonucleotide
ccacucauaagcauauuua

SEQ ID NO: 1618822 - RNA, 19 nt, Artificial Sequence
  Description of Artificial Sequence: Synthetic oligonucleotide
cuucuaggcaguggcccac

SEQ ID NO: 1618823 - RNA, 19 nt, Artificial Sequence
  Description of Artificial Sequence: Synthetic oligonucleotide
gaccugagguauggaguug

SEQ ID NO: 1618824 - RNA, 19 nt, Artificial Sequence
  Description of Artificial Sequence: Synthetic oligonucleotide
cuagcaucaccacuggauu

SEQ ID NO: 1618825 - RNA, 19 nt, Artificial Sequence
  Description of Artificial Sequence: Synthetic oligonucleotide
uucccuccuuagacaguac

SEQ ID NO: 1618826 - RNA, 19 nt, Artificial Sequence
  Description of Artificial Sequence: Synthetic oligonucleotide
caucagaugaagucccaau

SEQ ID NO: 1618827 - RNA, 19 nt, Artificial Sequence
  Description of Artificial Sequence: Synthetic oligonucleotide
aagucccaauaaguauuuu

SEQ ID NO: 1618828 - RNA, 19 nt, Artificial Sequence
  Description of Artificial Sequence: Synthetic oligonucleotide
ggccgauuuaauaaguccu

SEQ ID NO: 1618829 - RNA, 19 nt, Artificial Sequence
  Description of Artificial Sequence: Synthetic oligonucleotide
gaagucccaauaaguauuu

SEQ ID NO: 1618830 - RNA, 19 nt, Artificial Sequence
  Description of Artificial Sequence: Synthetic oligonucleotide
caccaucauacugggcaac

SEQ ID NO: 1618831 - RNA, 19 nt, Artificial Sequence
  Description of Artificial Sequence: Synthetic oligonucleotide
ggaguaucuaugauccucu

SEQ ID NO: 1618832 - RNA, 19 nt, Artificial Sequence
  Description of Artificial Sequence: Synthetic oligonucleotide
ggcuugcauagagaaguug

SEQ ID NO: 1618833 - RNA, 19 nt, Artificial Sequence
  Description of Artificial Sequence: Synthetic oligonucleotide
gcuuuuccuauaggaauca

SEQ ID NO: 1618834 - RNA, 19 nt, Artificial Sequence
  Description of Artificial Sequence: Synthetic oligonucleotide
gcagcugaguuuauaaccu

SEQ ID NO: 1618835 - RNA, 19 nt, Artificial Sequence
  Description of Artificial Sequence: Synthetic oligonucleotide
cuuagcagcugaguuuaua

SEQ ID NO: 1618836 - RNA, 19 nt, Artificial Sequence
  Description of Artificial Sequence: Synthetic oligonucleotide
ugugagugcugagcagcua

SEQ ID NO: 1618837 - RNA, 19 nt, Artificial Sequence
  Description of Artificial Sequence: Synthetic oligonucleotide
ucgccaucuugcccauguc

SEQ ID NO: 1618838 - RNA, 19 nt, Artificial Sequence
  Description of Artificial Sequence: Synthetic oligonucleotide
agcggugaaaacgccgcuu

SEQ ID NO: 1618839 - RNA, 19 nt, Artificial Sequence
  Description of Artificial Sequence: Synthetic oligonucleotide
cauaaggcauagggacauc

SEQ ID NO: 1618840 - RNA, 19 nt, Artificial Sequence
  Description of Artificial Sequence: Synthetic oligonucleotide
ugcccauaccaugcagcaa

SEQ ID NO: 1618841 - RNA, 19 nt, Artificial Sequence
  Description of Artificial Sequence: Synthetic oligonucleotide
ggccuuccaugauucuggc

SEQ ID NO: 1618842 - RNA, 19 nt, Artificial Sequence
  Description of Artificial Sequence: Synthetic oligonucleotide
ccuauaggaaucagaaaau

SEQ ID NO: 1618843 - RNA, 19 nt, Artificial Sequence
  Description of Artificial Sequence: Synthetic oligonucleotide
ucaucacgaauggccgauu

SEQ ID NO: 1618844 - RNA, 19 nt, Artificial Sequence
  Description of Artificial Sequence: Synthetic oligonucleotide
gucccuugccuuucaauuu

SEQ ID NO: 1618845 - RNA, 19 nt, Artificial Sequence
  Description of Artificial Sequence: Synthetic oligonucleotide
cgccgagcggugaaaacgc

SEQ ID NO: 1618846 - RNA, 19 nt, Artificial Sequence
  Description of Artificial Sequence: Synthetic oligonucleotide
gaguaucuaugauccucuu

SEQ ID NO: 1618847 - RNA, 19 nt, Artificial Sequence
  Description of Artificial Sequence: Synthetic oligonucleotide
uuccacucauaagcauauu

SEQ ID NO: 1618848 - RNA, 19 nt, Artificial Sequence
  Description of Artificial Sequence: Synthetic oligonucleotide
gcugaguuuauaaccuggu

SEQ ID NO: 1618849 - RNA, 19 nt, Artificial Sequence
  Description of Artificial Sequence: Synthetic oligonucleotide
ccugccgccaggguccccg

SEQ ID NO: 1618850 - RNA, 19 nt, Artificial Sequence
  Description of Artificial Sequence: Synthetic oligonucleotide
cuaaccuuauaugcaccau

SEQ ID NO: 1618851 - RNA, 19 nt, Artificial Sequence
  Description of Artificial Sequence: Synthetic oligonucleotide
acgccgcuucacaagucca

SEQ ID NO: 1618852 - RNA, 19 nt, Artificial Sequence
  Description of Artificial Sequence: Synthetic oligonucleotide
caguuacaaggugauuugu

SEQ ID NO: 1618853 - RNA, 19 nt, Artificial Sequence
  Description of Artificial Sequence: Synthetic oligonucleotide
caucacgaauggccgauuu

SEQ ID NO: 1618854 - RNA, 19 nt, Artificial Sequence
  Description of Artificial Sequence: Synthetic oligonucleotide
ggcgccgagcggugaaaac

SEQ ID NO: 1618855 - RNA, 19 nt, Artificial Sequence
  Description of Artificial Sequence: Synthetic oligonucleotide
gcaacuccauacauuaguu

SEQ ID NO: 1618856 - RNA, 19 nt, Artificial Sequence
  Description of Artificial Sequence: Synthetic oligonucleotide
cgccgcuucacaaguccag

SEQ ID NO: 1618857 - RNA, 19 nt, Artificial Sequence
  Description of Artificial Sequence: Synthetic oligonucleotide
gggcaacuacagugaugug

SEQ ID NO: 1618858 - RNA, 19 nt, Artificial Sequence
  Description of Artificial Sequence: Synthetic oligonucleotide
gccgcuucacaaguccaga

SEQ ID NO: 1618859 - RNA, 19 nt, Artificial Sequence
  Description of Artificial Sequence: Synthetic oligonucleotide
gccgagcggugaaaacgcc

SEQ ID NO: 1618860 - RNA, 19 nt, Artificial Sequence
  Description of Artificial Sequence: Synthetic oligonucleotide
gcaucaccacuggauuauc

SEQ ID NO: 1618861 - RNA, 19 nt, Artificial Sequence
  Description of Artificial Sequence: Synthetic oligonucleotide
gccgauuuaauaaguccuu

SEQ ID NO: 1618862 - RNA, 19 nt, Artificial Sequence
  Description of Artificial Sequence: Synthetic oligonucleotide
cagugccgcgggcgccgag

SEQ ID NO: 1618863 - RNA, 19 nt, Artificial Sequence
  Description of Artificial Sequence: Synthetic oligonucleotide
ccucggaauuccaggggcu

SEQ ID NO: 1618864 - RNA, 19 nt, Artificial Sequence
  Description of Artificial Sequence: Synthetic oligonucleotide
cagggccuuccaugauucu

SEQ ID NO: 1618865 - RNA, 19 nt, Artificial Sequence
  Description of Artificial Sequence: Synthetic oligonucleotide
gcuuuagcauugacuuuau

SEQ ID NO: 1618866 - RNA, 19 nt, Artificial Sequence
  Description of Artificial Sequence: Synthetic oligonucleotide
ccgauuuaauaaguccuuu

SEQ ID NO: 1618867 - RNA, 19 nt, Artificial Sequence
  Description of Artificial Sequence: Synthetic oligonucleotide
gggcgccgagcggugaaaa

SEQ ID NO: 1618868 - RNA, 19 nt, Artificial Sequence
  Description of Artificial Sequence: Synthetic oligonucleotide
gggcagggaguggaguuuu

SEQ ID NO: 1618869 - RNA, 19 nt, Artificial Sequence
  Description of Artificial Sequence: Synthetic oligonucleotide
ccgcgggcgccgagcggug

SEQ ID NO: 1618870 - RNA, 19 nt, Artificial Sequence
  Description of Artificial Sequence: Synthetic oligonucleotide
gcagcacgccggccagcgu

SEQ ID NO: 1618871 - RNA, 19 nt, Artificial Sequence
  Description of Artificial Sequence: Synthetic oligonucleotide
ccacaguuacaaggugauu

SEQ ID NO: 1618872 - RNA, 19 nt, Artificial Sequence
  Description of Artificial Sequence: Synthetic oligonucleotide
cgcgggcgccgagcgguga

SEQ ID NO: 1618873 - RNA, 19 nt, Artificial Sequence
  Description of Artificial Sequence: Synthetic oligonucleotide
cgccggccagcgucgccau

SEQ ID NO: 1618874 - RNA, 19 nt, Artificial Sequence
  Description of Artificial Sequence: Synthetic oligonucleotide
auugcguacaaucuuagcc

SEQ ID NO: 1618875 - RNA, 19 nt, Artificial Sequence
  Description of Artificial Sequence: Synthetic oligonucleotide
auauauuuugcccagguug

SEQ ID NO: 1618876 - RNA, 19 nt, Artificial Sequence
  Description of Artificial Sequence: Synthetic oligonucleotide
aauucguugaaugggauuc

SEQ ID NO: 1618877 - RNA, 19 nt, Artificial Sequence
  Description of Artificial Sequence: Synthetic oligonucleotide
ucucuuagcgccuugggcg

SEQ ID NO: 1618878 - RNA, 19 nt, Artificial Sequence
  Description of Artificial Sequence: Synthetic oligonucleotide
augucuggaaagcauaggc

SEQ ID NO: 1618879 - RNA, 19 nt, Artificial Sequence
  Description of Artificial Sequence: Synthetic oligonucleotide
uuuacagaguccaaagucu

SEQ ID NO: 1618880 - RNA, 19 nt, Artificial Sequence
  Description of Artificial Sequence: Synthetic oligonucleotide
aaggagagaacuugagggg

SEQ ID NO: 1618881 - RNA, 19 nt, Artificial Sequence
  Description of Artificial Sequence: Synthetic oligonucleotide
agaagcucaaagcaguggg

SEQ ID NO: 1618882 - RNA, 19 nt, Artificial Sequence
  Description of Artificial Sequence: Synthetic oligonucleotide
aaagcaguggggcccaacg

SEQ ID NO: 1618883 - RNA, 19 nt, Artificial Sequence
  Description of Artificial Sequence: Synthetic oligonucleotide
uucauugcauauauuuugc

SEQ ID NO: 1618884 - RNA, 19 nt, Artificial Sequence
  Description of Artificial Sequence: Synthetic oligonucleotide
gaagcgaguaucaaacugg

SEQ ID NO: 1618885 - RNA, 19 nt, Artificial Sequence
  Description of Artificial Sequence: Synthetic oligonucleotide
agggaugcuucacagauuc

SEQ ID NO: 1618886 - RNA, 19 nt, Artificial Sequence
  Description of Artificial Sequence: Synthetic oligonucleotide
ucuuaagacuuucauugca

SEQ ID NO: 1618887 - RNA, 19 nt, Artificial Sequence
  Description of Artificial Sequence: Synthetic oligonucleotide
gauagaagcaugcuguguc

SEQ ID NO: 1618888 - RNA, 19 nt, Artificial Sequence
  Description of Artificial Sequence: Synthetic oligonucleotide
ugugccggaagaaagggug

SEQ ID NO: 1618889 - RNA, 19 nt, Artificial Sequence
  Description of Artificial Sequence: Synthetic oligonucleotide
uuaaugcuguccaggacag

SEQ ID NO: 1618890 - RNA, 19 nt, Artificial Sequence
  Description of Artificial Sequence: Synthetic oligonucleotide
agauucuagaauguuccgc

SEQ ID NO: 1618891 - RNA, 19 nt, Artificial Sequence
  Description of Artificial Sequence: Synthetic oligonucleotide
ugaugugccggaagaaagg

SEQ ID NO: 1618892 - RNA, 19 nt, Artificial Sequence
  Description of Artificial Sequence: Synthetic oligonucleotide
uauccauaguuuucuuucg

SEQ ID NO: 1618893 - RNA, 19 nt, Artificial Sequence
  Description of Artificial Sequence: Synthetic oligonucleotide
gaguuugccacaugucugg

SEQ ID NO: 1618894 - RNA, 19 nt, Artificial Sequence
  Description of Artificial Sequence: Synthetic oligonucleotide
gaaggugccacguauguga

SEQ ID NO: 1618895 - RNA, 19 nt, Artificial Sequence
  Description of Artificial Sequence: Synthetic oligonucleotide
ucuagaauguuccgcucag

SEQ ID NO: 1618896 - RNA, 19 nt, Artificial Sequence
  Description of Artificial Sequence: Synthetic oligonucleotide
gaaagggugccucugcacc

SEQ ID NO: 1618897 - RNA, 19 nt, Artificial Sequence
  Description of Artificial Sequence: Synthetic oligonucleotide
uugcguacaaucuuagccu

SEQ ID NO: 1618898 - RNA, 19 nt, Artificial Sequence
  Description of Artificial Sequence: Synthetic oligonucleotide
guagagauggcuccauggg

SEQ ID NO: 1618899 - RNA, 19 nt, Artificial Sequence
  Description of Artificial Sequence: Synthetic oligonucleotide
uuacagaguccaaagucug

SEQ ID NO: 1618900 - RNA, 19 nt, Artificial Sequence
  Description of Artificial Sequence: Synthetic oligonucleotide
auguauucaauggugccac

SEQ ID NO: 1618901 - RNA, 19 nt, Artificial Sequence
  Description of Artificial Sequence: Synthetic oligonucleotide
cuuaaugcuguccaggaca

SEQ ID NO: 1618902 - RNA, 19 nt, Artificial Sequence
  Description of Artificial Sequence: Synthetic oligonucleotide
aagcaguggggcccaacgc

SEQ ID NO: 1618903 - RNA, 19 nt, Artificial Sequence
  Description of Artificial Sequence: Synthetic oligonucleotide
aagcgaguaucaaacuggc

SEQ ID NO: 1618904 - RNA, 19 nt, Artificial Sequence
  Description of Artificial Sequence: Synthetic oligonucleotide
uugaaugggauuccgcuuc

SEQ ID NO: 1618905 - RNA, 19 nt, Artificial Sequence
  Description of Artificial Sequence: Synthetic oligonucleotide
uauucaauggugccacaga

SEQ ID NO: 1618906 - RNA, 19 nt, Artificial Sequence
  Description of Artificial Sequence: Synthetic oligonucleotide
gagaagcccuccuuaaugc

SEQ ID NO: 1618907 - RNA, 19 nt, Artificial Sequence
  Description of Artificial Sequence: Synthetic oligonucleotide
caagaagaugccuucucgc

SEQ ID NO: 1618908 - RNA, 19 nt, Artificial Sequence
  Description of Artificial Sequence: Synthetic oligonucleotide
ggugacagcucccucaugg

SEQ ID NO: 1618909 - RNA, 19 nt, Artificial Sequence
  Description of Artificial Sequence: Synthetic oligonucleotide
uucacagauucuagaaugu

SEQ ID NO: 1618910 - RNA, 19 nt, Artificial Sequence
  Description of Artificial Sequence: Synthetic oligonucleotide
uucucuuagcgccuugggc

SEQ ID NO: 1618911 - RNA, 19 nt, Artificial Sequence
  Description of Artificial Sequence: Synthetic oligonucleotide
ugcgcacuaaaaucucugg

SEQ ID NO: 1618912 - RNA, 19 nt, Artificial Sequence
  Description of Artificial Sequence: Synthetic oligonucleotide
uucuuaagacuuucauugc

SEQ ID NO: 1618913 - RNA, 19 nt, Artificial Sequence
  Description of Artificial Sequence: Synthetic oligonucleotide
gugagcaugucguacauca

SEQ ID NO: 1618914 - RNA, 19 nt, Artificial Sequence
  Description of Artificial Sequence: Synthetic oligonucleotide
aaugggauuccgcuucaga

SEQ ID NO: 1618915 - RNA, 19 nt, Artificial Sequence
  Description of Artificial Sequence: Synthetic oligonucleotide
uugcauauauuuugcccag

SEQ ID NO: 1618916 - RNA, 19 nt, Artificial Sequence
  Description of Artificial Sequence: Synthetic oligonucleotide
gaugugccggaagaaaggg

SEQ ID NO: 1618917 - RNA, 19 nt, Artificial Sequence
  Description of Artificial Sequence: Synthetic oligonucleotide
gucuggacuaucuacuggc

SEQ ID NO: 1618918 - RNA, 19 nt, Artificial Sequence
  Description of Artificial Sequence: Synthetic oligonucleotide
ugucaguuugauguggccc

SEQ ID NO: 1618919 - RNA, 19 nt, Artificial Sequence
  Description of Artificial Sequence: Synthetic oligonucleotide
aucuuagccuuucuuaaga

SEQ ID NO: 1618920 - RNA, 19 nt, Artificial Sequence
  Description of Artificial Sequence: Synthetic oligonucleotide
agcaguggggcccaacgcg

SEQ ID NO: 1618921 - RNA, 19 nt, Artificial Sequence
  Description of Artificial Sequence: Synthetic oligonucleotide
agaaagggugccucugcac

SEQ ID NO: 1618922 - RNA, 19 nt, Artificial Sequence
  Description of Artificial Sequence: Synthetic oligonucleotide
gauucuagaauguuccgcu

SEQ ID NO: 1618923 - RNA, 19 nt, Artificial Sequence
  Description of Artificial Sequence: Synthetic oligonucleotide
uucucgcucaagaugugug

SEQ ID NO: 1618924 - RNA, 19 nt, Artificial Sequence
  Description of Artificial Sequence: Synthetic oligonucleotide
cucacugagggcugugucg

SEQ ID NO: 1618925 - RNA, 19 nt, Artificial Sequence
  Description of Artificial Sequence: Synthetic oligonucleotide
agacuuucauugcauauau

SEQ ID NO: 1618926 - RNA, 19 nt, Artificial Sequence
  Description of Artificial Sequence: Synthetic oligonucleotide
cacagauucuagaauguuc

SEQ ID NO: 1618927 - RNA, 19 nt, Artificial Sequence
  Description of Artificial Sequence: Synthetic oligonucleotide
uauucucuuagcgccuugg

SEQ ID NO: 1618928 - RNA, 19 nt, Artificial Sequence
  Description of Artificial Sequence: Synthetic oligonucleotide
acuaucuacuggcgucugc

SEQ ID NO: 1618929 - RNA, 19 nt, Artificial Sequence
  Description of Artificial Sequence: Synthetic oligonucleotide
guagaugaugccuugggaa

SEQ ID NO: 1618930 - RNA, 19 nt, Artificial Sequence
  Description of Artificial Sequence: Synthetic oligonucleotide
agcaugucguacaucaggg

SEQ ID NO: 1618931 - RNA, 19 nt, Artificial Sequence
  Description of Artificial Sequence: Synthetic oligonucleotide
auucuagaauguuccgcuc

SEQ ID NO: 1618932 - RNA, 19 nt, Artificial Sequence
  Description of Artificial Sequence: Synthetic oligonucleotide
agaagcaugcugugucuuc

SEQ ID NO: 1618933 - RNA, 19 nt, Artificial Sequence
  Description of Artificial Sequence: Synthetic oligonucleotide
cuucugauugcagacucgg

SEQ ID NO: 1618934 - RNA, 19 nt, Artificial Sequence
  Description of Artificial Sequence: Synthetic oligonucleotide
uccauaguuuucuuucggu

SEQ ID NO: 1618935 - RNA, 19 nt, Artificial Sequence
  Description of Artificial Sequence: Synthetic oligonucleotide
ugucgucuggacuaucuac

SEQ ID NO: 1618936 - RNA, 19 nt, Artificial Sequence
  Description of Artificial Sequence: Synthetic oligonucleotide
uggacuaucuacuggcguc

SEQ ID NO: 1618937 - RNA, 19 nt, Artificial Sequence
  Description of Artificial Sequence: Synthetic oligonucleotide
ugugucgucuggacuaucu

SEQ ID NO: 1618938 - RNA, 19 nt, Artificial Sequence
  Description of Artificial Sequence: Synthetic oligonucleotide
auagucgucccaccgucuc

SEQ ID NO: 1618939 - RNA, 19 nt, Artificial Sequence
  Description of Artificial Sequence: Synthetic oligonucleotide
auaggccaauuccacaaug

SEQ ID NO: 1618940 - RNA, 19 nt, Artificial Sequence
  Description of Artificial Sequence: Synthetic oligonucleotide
agaugugugaagagcuccc

SEQ ID NO: 1618941 - RNA, 19 nt, Artificial Sequence
  Description of Artificial Sequence: Synthetic oligonucleotide
caugauuuuauccauaguu

SEQ ID NO: 1618942 - RNA, 19 nt, Artificial Sequence
  Description of Artificial Sequence: Synthetic oligonucleotide
gaugccuugggaauggaga

SEQ ID NO: 1618943 - RNA, 19 nt, Artificial Sequence
  Description of Artificial Sequence: Synthetic oligonucleotide
ucucaccuggaacaccuug

SEQ ID NO: 1618944 - RNA, 19 nt, Artificial Sequence
  Description of Artificial Sequence: Synthetic oligonucleotide
ucuuagccuuucuuaagac

SEQ ID NO: 1618945 - RNA, 19 nt, Artificial Sequence
  Description of Artificial Sequence: Synthetic oligonucleotide
uaucuacuggcgucugccg

SEQ ID NO: 1618946 - RNA, 19 nt, Artificial Sequence
  Description of Artificial Sequence: Synthetic oligonucleotide
uuaagacuuucauugcaua

SEQ ID NO: 1618947 - RNA, 19 nt, Artificial Sequence
  Description of Artificial Sequence: Synthetic oligonucleotide
cacacgucgggccaagagg

SEQ ID NO: 1618948 - RNA, 19 nt, Artificial Sequence
  Description of Artificial Sequence: Synthetic oligonucleotide
acguaugugaagcccagga

SEQ ID NO: 1618949 - RNA, 19 nt, Artificial Sequence
  Description of Artificial Sequence: Synthetic oligonucleotide
gaagcucaaagcagugggg

SEQ ID NO: 1618950 - RNA, 19 nt, Artificial Sequence
  Description of Artificial Sequence: Synthetic oligonucleotide
gaaccccucaaaaggagag

SEQ ID NO: 1618951 - RNA, 19 nt, Artificial Sequence
  Description of Artificial Sequence: Synthetic oligonucleotide
ucauagucgucccaccguc

SEQ ID NO: 1618952 - RNA, 19 nt, Artificial Sequence
  Description of Artificial Sequence: Synthetic oligonucleotide
ccucuauucucuuagcgcc

SEQ ID NO: 1618953 - RNA, 19 nt, Artificial Sequence
  Description of Artificial Sequence: Synthetic oligonucleotide
cuaucuacuggcgucugcc

SEQ ID NO: 1618954 - RNA, 19 nt, Artificial Sequence
  Description of Artificial Sequence: Synthetic oligonucleotide
cucaccuggaacaccuugc

SEQ ID NO: 1618955 - RNA, 19 nt, Artificial Sequence
  Description of Artificial Sequence: Synthetic oligonucleotide
ucaugauuuuauccauagu

SEQ ID NO: 1618956 - RNA, 19 nt, Artificial Sequence
  Description of Artificial Sequence: Synthetic oligonucleotide
auucguugaaugggauucc

SEQ ID NO: 1618957 - RNA, 19 nt, Artificial Sequence
  Description of Artificial Sequence: Synthetic oligonucleotide
uucguugaaugggauuccg

SEQ ID NO: 1618958 - RNA, 19 nt, Artificial Sequence
  Description of Artificial Sequence: Synthetic oligonucleotide
gcgaguaucaaacuggcuc

SEQ ID NO: 1618959 - RNA, 19 nt, Artificial Sequence
  Description of Artificial Sequence: Synthetic oligonucleotide
ucuacuggcgucugccgug

SEQ ID NO: 1618960 - RNA, 19 nt, Artificial Sequence
  Description of Artificial Sequence: Synthetic oligonucleotide
aggguccacacgucgggcc

SEQ ID NO: 1618961 - RNA, 19 nt, Artificial Sequence
  Description of Artificial Sequence: Synthetic oligonucleotide
ucuuucgguuuucugcggu

SEQ ID NO: 1618962 - RNA, 19 nt, Artificial Sequence
  Description of Artificial Sequence: Synthetic oligonucleotide
agaucccgguagaugaugc

SEQ ID NO: 1618963 - RNA, 19 nt, Artificial Sequence
  Description of Artificial Sequence: Synthetic oligonucleotide
ugauugcagacucggccug

SEQ ID NO: 1618964 - RNA, 19 nt, Artificial Sequence
  Description of Artificial Sequence: Synthetic oligonucleotide
ucacgcuguucucugucag

SEQ ID NO: 1618965 - RNA, 19 nt, Artificial Sequence
  Description of Artificial Sequence: Synthetic oligonucleotide
guauucaauggugccacag

SEQ ID NO: 1618966 - RNA, 19 nt, Artificial Sequence
  Description of Artificial Sequence: Synthetic oligonucleotide
ugugaagagcuccccgcca

SEQ ID NO: 1618967 - RNA, 19 nt, Artificial Sequence
  Description of Artificial Sequence: Synthetic oligonucleotide
uccaagaagaugccuucuc

SEQ ID NO: 1618968 - RNA, 19 nt, Artificial Sequence
  Description of Artificial Sequence: Synthetic oligonucleotide
cacuuuucucaccuggaac

SEQ ID NO: 1618969 - RNA, 19 nt, Artificial Sequence
  Description of Artificial Sequence: Synthetic oligonucleotide
aagagaagcccuccuuaau

SEQ ID NO: 1618970 - RNA, 19 nt, Artificial Sequence
  Description of Artificial Sequence: Synthetic oligonucleotide
cauggauggacucuuuaca

SEQ ID NO: 1618971 - RNA, 19 nt, Artificial Sequence
  Description of Artificial Sequence: Synthetic oligonucleotide
uucuuucgguuuucugcgg

SEQ ID NO: 1618972 - RNA, 19 nt, Artificial Sequence
  Description of Artificial Sequence: Synthetic oligonucleotide
ucguugaaugggauuccgc

SEQ ID NO: 1618973 - RNA, 19 nt, Artificial Sequence
  Description of Artificial Sequence: Synthetic oligonucleotide
augugaagcccaggaaggc

SEQ ID NO: 1618974 - RNA, 19 nt, Artificial Sequence
  Description of Artificial Sequence: Synthetic oligonucleotide
ucucgcucaagauguguga

SEQ ID NO: 1618975 - RNA, 19 nt, Artificial Sequence
  Description of Artificial Sequence: Synthetic oligonucleotide
gugccuugcacuuuucuca

SEQ ID NO: 1618976 - RNA, 19 nt, Artificial Sequence
  Description of Artificial Sequence: Synthetic oligonucleotide
ugagcaugucguacaucag

SEQ ID NO: 1618977 - RNA, 19 nt, Artificial Sequence
  Description of Artificial Sequence: Synthetic oligonucleotide
augauuuuauccauaguuu

SEQ ID NO: 1618978 - RNA, 19 nt, Artificial Sequence
  Description of Artificial Sequence: Synthetic oligonucleotide
ucaucccaguugaugugcc

SEQ ID NO: 1618979 - RNA, 19 nt, Artificial Sequence
  Description of Artificial Sequence: Synthetic oligonucleotide
cauugcguacaaucuuagc

SEQ ID NO: 1618980 - RNA, 19 nt, Artificial Sequence
  Description of Artificial Sequence: Synthetic oligonucleotide
cagccagauagaagcaugc

SEQ ID NO: 1618981 - RNA, 19 nt, Artificial Sequence
  Description of Artificial Sequence: Synthetic oligonucleotide
agggaggguccacacgucg

SEQ ID NO: 1618982 - RNA, 19 nt, Artificial Sequence
  Description of Artificial Sequence: Synthetic oligonucleotide
agaguuugccacaugucug

SEQ ID NO: 1618983 - RNA, 19 nt, Artificial Sequence
  Description of Artificial Sequence: Synthetic oligonucleotide
ucucagccagauagaagca

SEQ ID NO: 1618984 - RNA, 19 nt, Artificial Sequence
  Description of Artificial Sequence: Synthetic oligonucleotide
ucgcucaagaugugugaag

SEQ ID NO: 1618985 - RNA, 19 nt, Artificial Sequence
  Description of Artificial Sequence: Synthetic oligonucleotide
ucgucuggacuaucuacug

SEQ ID NO: 1618986 - RNA, 19 nt, Artificial Sequence
  Description of Artificial Sequence: Synthetic oligonucleotide
gaugggaagaggggcagug

SEQ ID NO: 1618987 - RNA, 19 nt, Artificial Sequence
  Description of Artificial Sequence: Synthetic oligonucleotide
ggugccacguaugugaagc

SEQ ID NO: 1618988 - RNA, 19 nt, Artificial Sequence
  Description of Artificial Sequence: Synthetic oligonucleotide
aguaucaaacuggcucacg

SEQ ID NO: 1618989 - RNA, 19 nt, Artificial Sequence
  Description of Artificial Sequence: Synthetic oligonucleotide
aucccaguugaugugccgg

SEQ ID NO: 1618990 - RNA, 19 nt, Artificial Sequence
  Description of Artificial Sequence: Synthetic oligonucleotide
agagauggcuccaugggcu

SEQ ID NO: 1618991 - RNA, 19 nt, Artificial Sequence
  Description of Artificial Sequence: Synthetic oligonucleotide
ugaagggcggcgauccagu

SEQ ID NO: 1618992 - RNA, 19 nt, Artificial Sequence
  Description of Artificial Sequence: Synthetic oligonucleotide
ugaucucagccagauagaa

SEQ ID NO: 1618993 - RNA, 19 nt, Artificial Sequence
  Description of Artificial Sequence: Synthetic oligonucleotide
uuuuggcaaggucccgagc

SEQ ID NO: 1618994 - RNA, 19 nt, Artificial Sequence
  Description of Artificial Sequence: Synthetic oligonucleotide
ugaaugggauuccgcuuca

SEQ ID NO: 1618995 - RNA, 19 nt, Artificial Sequence
  Description of Artificial Sequence: Synthetic oligonucleotide
cgcacuaaaaucucugggg

SEQ ID NO: 1618996 - RNA, 19 nt, Artificial Sequence
  Description of Artificial Sequence: Synthetic oligonucleotide
gaagcccuccuuaaugcug

SEQ ID NO: 1618997 - RNA, 19 nt, Artificial Sequence
  Description of Artificial Sequence: Synthetic oligonucleotide
cucuuagcgccuugggcgc

SEQ ID NO: 1618998 - RNA, 19 nt, Artificial Sequence
  Description of Artificial Sequence: Synthetic oligonucleotide
ugguggaccagggaugggc

SEQ ID NO: 1618999 - RNA, 19 nt, Artificial Sequence
  Description of Artificial Sequence: Synthetic oligonucleotide
uucacgcuguucucuguca

SEQ ID NO: 1619000 - RNA, 19 nt, Artificial Sequence
  Description of Artificial Sequence: Synthetic oligonucleotide
cagauagaagcaugcugug

SEQ ID NO: 1619001 - RNA, 19 nt, Artificial Sequence
  Description of Artificial Sequence: Synthetic oligonucleotide
gcuguuaaggcgccugggg

SEQ ID NO: 1619002 - RNA, 19 nt, Artificial Sequence
  Description of Artificial Sequence: Synthetic oligonucleotide
ccaagaagaugccuucucg

SEQ ID NO: 1619003 - RNA, 19 nt, Artificial Sequence
  Description of Artificial Sequence: Synthetic oligonucleotide
cugcgcacuaaaaucucug

SEQ ID NO: 1619004 - RNA, 19 nt, Artificial Sequence
  Description of Artificial Sequence: Synthetic oligonucleotide
uuucgguuuucugcgguga

SEQ ID NO: 1619005 - RNA, 19 nt, Artificial Sequence
  Description of Artificial Sequence: Synthetic oligonucleotide
cacggaugggaagaggggc

SEQ ID NO: 1619006 - RNA, 19 nt, Artificial Sequence
  Description of Artificial Sequence: Synthetic oligonucleotide
gggauuccgcuucagaaac

SEQ ID NO: 1619007 - RNA, 19 nt, Artificial Sequence
  Description of Artificial Sequence: Synthetic oligonucleotide
ugcuguuaaggcgccuggg

SEQ ID NO: 1619008 - RNA, 19 nt, Artificial Sequence
  Description of Artificial Sequence: Synthetic oligonucleotide
gaucccgguagaugaugcc

SEQ ID NO: 1619009 - RNA, 19 nt, Artificial Sequence
  Description of Artificial Sequence: Synthetic oligonucleotide
gccagauagaagcaugcug

SEQ ID NO: 1619010 - RNA, 19 nt, Artificial Sequence
  Description of Artificial Sequence: Synthetic oligonucleotide
ggcacggaugggaagaggg

SEQ ID NO: 1619011 - RNA, 19 nt, Artificial Sequence
  Description of Artificial Sequence: Synthetic oligonucleotide
cugucaguuugauguggcc

SEQ ID NO: 1619012 - RNA, 19 nt, Artificial Sequence
  Description of Artificial Sequence: Synthetic oligonucleotide
guaucaaacuggcucacgu

SEQ ID NO: 1619013 - RNA, 19 nt, Artificial Sequence
  Description of Artificial Sequence: Synthetic oligonucleotide
ucccuuucaugauuuuauc

SEQ ID NO: 1619014 - RNA, 19 nt, Artificial Sequence
  Description of Artificial Sequence: Synthetic oligonucleotide
uggaccagggaugggccgg

SEQ ID NO: 1619015 - RNA, 19 nt, Artificial Sequence
  Description of Artificial Sequence: Synthetic oligonucleotide
aauguuccgcucagcccgg

SEQ ID NO: 1619016 - RNA, 19 nt, Artificial Sequence
  Description of Artificial Sequence: Synthetic oligonucleotide
cuuucgguuuucugcggug

SEQ ID NO: 1619017 - RNA, 19 nt, Artificial Sequence
  Description of Artificial Sequence: Synthetic oligonucleotide
agccuuucuuaagacuuuc

SEQ ID NO: 1619018 - RNA, 19 nt, Artificial Sequence
  Description of Artificial Sequence: Synthetic oligonucleotide
aagggcggcgauccaguga

SEQ ID NO: 1619019 - RNA, 19 nt, Artificial Sequence
  Description of Artificial Sequence: Synthetic oligonucleotide
aucuacuggcgucugccgu

SEQ ID NO: 1619020 - RNA, 19 nt, Artificial Sequence
  Description of Artificial Sequence: Synthetic oligonucleotide
gcgcacuaaaaucucuggg

SEQ ID NO: 1619021 - RNA, 19 nt, Artificial Sequence
  Description of Artificial Sequence: Synthetic oligonucleotide
uggcauugcguacaaucuu

SEQ ID NO: 1619022 - RNA, 19 nt, Artificial Sequence
  Description of Artificial Sequence: Synthetic oligonucleotide
uguauucaauggugccaca

SEQ ID NO: 1619023 - RNA, 19 nt, Artificial Sequence
  Description of Artificial Sequence: Synthetic oligonucleotide
uccucauagucgucccacc

SEQ ID NO: 1619024 - RNA, 19 nt, Artificial Sequence
  Description of Artificial Sequence: Synthetic oligonucleotide
ugcguacaaucuuagccuu

SEQ ID NO: 1619025 - RNA, 19 nt, Artificial Sequence
  Description of Artificial Sequence: Synthetic oligonucleotide
uuucugcggugaagggcgg

SEQ ID NO: 1619026 - RNA, 19 nt, Artificial Sequence
  Description of Artificial Sequence: Synthetic oligonucleotide
cuuuucucaccuggaacac

SEQ ID NO: 1619027 - RNA, 19 nt, Artificial Sequence
  Description of Artificial Sequence: Synthetic oligonucleotide
gguuuucugcggugaaggg

SEQ ID NO: 1619028 - RNA, 19 nt, Artificial Sequence
  Description of Artificial Sequence: Synthetic oligonucleotide
agguucacgcuguucucug

SEQ ID NO: 1619029 - RNA, 19 nt, Artificial Sequence
  Description of Artificial Sequence: Synthetic oligonucleotide
ugccacguaugugaagccc

SEQ ID NO: 1619030 - RNA, 19 nt, Artificial Sequence
  Description of Artificial Sequence: Synthetic oligonucleotide
aagcccuccuuaaugcugu

SEQ ID NO: 1619031 - RNA, 19 nt, Artificial Sequence
  Description of Artificial Sequence: Synthetic oligonucleotide
uagucgucccaccgucucc

SEQ ID NO: 1619032 - RNA, 19 nt, Artificial Sequence
  Description of Artificial Sequence: Synthetic oligonucleotide
aggcacuccaggaugaggu

SEQ ID NO: 1619033 - RNA, 19 nt, Artificial Sequence
  Description of Artificial Sequence: Synthetic oligonucleotide
caucccaguugaugugccg

SEQ ID NO: 1619034 - RNA, 19 nt, Artificial Sequence
  Description of Artificial Sequence: Synthetic oligonucleotide
ucgguuuucugcggugaag

SEQ ID NO: 1619035 - RNA, 19 nt, Artificial Sequence
  Description of Artificial Sequence: Synthetic oligonucleotide
cucagaagcucaaagcagu

SEQ ID NO: 1619036 - RNA, 19 nt, Artificial Sequence
  Description of Artificial Sequence: Synthetic oligonucleotide
aagagcuccccgccacuga

SEQ ID NO: 1619037 - RNA, 19 nt, Artificial Sequence
  Description of Artificial Sequence: Synthetic oligonucleotide
aagggugccucugcaccuc

SEQ ID NO: 1619038 - RNA, 19 nt, Artificial Sequence
  Description of Artificial Sequence: Synthetic oligonucleotide
uggugccuugcacuuuucu

SEQ ID NO: 1619039 - RNA, 19 nt, Artificial Sequence
  Description of Artificial Sequence: Synthetic oligonucleotide
uuccgcucagcccgggugu

SEQ ID NO: 1619040 - RNA, 19 nt, Artificial Sequence
  Description of Artificial Sequence: Synthetic oligonucleotide
cuuaagacuuucauugcau

SEQ ID NO: 1619041 - RNA, 19 nt, Artificial Sequence
  Description of Artificial Sequence: Synthetic oligonucleotide
aguggggcccaacgcguuc

SEQ ID NO: 1619042 - RNA, 19 nt, Artificial Sequence
  Description of Artificial Sequence: Synthetic oligonucleotide
cagugcuuguggguggugg

SEQ ID NO: 1619043 - RNA, 19 nt, Artificial Sequence
  Description of Artificial Sequence: Synthetic oligonucleotide
cugcuguuaaggcgccugg

SEQ ID NO: 1619044 - RNA, 19 nt, Artificial Sequence
  Description of Artificial Sequence: Synthetic oligonucleotide
ucccaguugaugugccgga

SEQ ID NO: 1619045 - RNA, 19 nt, Artificial Sequence
  Description of Artificial Sequence: Synthetic oligonucleotide
ucguacaucagggcuccca

SEQ ID NO: 1619046 - RNA, 19 nt, Artificial Sequence
  Description of Artificial Sequence: Synthetic oligonucleotide
gacagaaggugccacguau

SEQ ID NO: 1619047 - RNA, 19 nt, Artificial Sequence
  Description of Artificial Sequence: Synthetic oligonucleotide
acacgucgggccaagaggu

SEQ ID NO: 1619048 - RNA, 19 nt, Artificial Sequence
  Description of Artificial Sequence: Synthetic oligonucleotide
gugugaagcgaguaucaaa

SEQ ID NO: 1619049 - RNA, 19 nt, Artificial Sequence
  Description of Artificial Sequence: Synthetic oligonucleotide
cuccccgccacugaggcac

SEQ ID NO: 1619050 - RNA, 19 nt, Artificial Sequence
  Description of Artificial Sequence: Synthetic oligonucleotide
aaccccucaaaaggagaga

SEQ ID NO: 1619051 - RNA, 19 nt, Artificial Sequence
  Description of Artificial Sequence: Synthetic oligonucleotide
gacucggccugaagggagg

SEQ ID NO: 1619052 - RNA, 19 nt, Artificial Sequence
  Description of Artificial Sequence: Synthetic oligonucleotide
guggaccagggaugggccg

SEQ ID NO: 1619053 - RNA, 19 nt, Artificial Sequence
  Description of Artificial Sequence: Synthetic oligonucleotide
acagaaggugccacguaug

SEQ ID NO: 1619054 - RNA, 19 nt, Artificial Sequence
  Description of Artificial Sequence: Synthetic oligonucleotide
aggacagaaggugccacgu

SEQ ID NO: 1619055 - RNA, 19 nt, Artificial Sequence
  Description of Artificial Sequence: Synthetic oligonucleotide
ggacucuuuacagagucca

SEQ ID NO: 1619056 - RNA, 19 nt, Artificial Sequence
  Description of Artificial Sequence: Synthetic oligonucleotide
uacggggacugcuguuaag

SEQ ID NO: 1619057 - RNA, 19 nt, Artificial Sequence
  Description of Artificial Sequence: Synthetic oligonucleotide
ucccgguagaugaugccuu

SEQ ID NO: 1619058 - RNA, 19 nt, Artificial Sequence
  Description of Artificial Sequence: Synthetic oligonucleotide
uaaaaucucuggggccaug

SEQ ID NO: 1619059 - RNA, 19 nt, Artificial Sequence
  Description of Artificial Sequence: Synthetic oligonucleotide
uggcucacguccucuucug

SEQ ID NO: 1619060 - RNA, 19 nt, Artificial Sequence
  Description of Artificial Sequence: Synthetic oligonucleotide
gugaagggcggcgauccag

SEQ ID NO: 1619061 - RNA, 19 nt, Artificial Sequence
  Description of Artificial Sequence: Synthetic oligonucleotide
ccagauagaagcaugcugu

SEQ ID NO: 1619062 - RNA, 19 nt, Artificial Sequence
  Description of Artificial Sequence: Synthetic oligonucleotide
acuggcgucugccguguga

SEQ ID NO: 1619063 - RNA, 19 nt, Artificial Sequence
  Description of Artificial Sequence: Synthetic oligonucleotide
cacugcgcacuaaaaucuc

SEQ ID NO: 1619064 - RNA, 19 nt, Artificial Sequence
  Description of Artificial Sequence: Synthetic oligonucleotide
gcgucugccgugugaagcg

SEQ ID NO: 1619065 - RNA, 19 nt, Artificial Sequence
  Description of Artificial Sequence: Synthetic oligonucleotide
gaagggcggcgauccagug

SEQ ID NO: 1619066 - RNA, 19 nt, Artificial Sequence
  Description of Artificial Sequence: Synthetic oligonucleotide
agacucggccugaagggag

SEQ ID NO: 1619067 - RNA, 19 nt, Artificial Sequence
  Description of Artificial Sequence: Synthetic oligonucleotide
ucuauucucuuagcgccuu

SEQ ID NO: 1619068 - RNA, 19 nt, Artificial Sequence
  Description of Artificial Sequence: Synthetic oligonucleotide
auauuuugcccagguuggu

SEQ ID NO: 1619069 - RNA, 19 nt, Artificial Sequence
  Description of Artificial Sequence: Synthetic oligonucleotide
gcguucagggcccagguuc

SEQ ID NO: 1619070 - RNA, 19 nt, Artificial Sequence
  Description of Artificial Sequence: Synthetic oligonucleotide
aguugaugugccggaagaa

SEQ ID NO: 1619071 - RNA, 19 nt, Artificial Sequence
  Description of Artificial Sequence: Synthetic oligonucleotide
aggucccgagcauccgggg

SEQ ID NO: 1619072 - RNA, 19 nt, Artificial Sequence
  Description of Artificial Sequence: Synthetic oligonucleotide
ccccaauucguugaauggg

SEQ ID NO: 1619073 - RNA, 19 nt, Artificial Sequence
  Description of Artificial Sequence: Synthetic oligonucleotide
agguuggugccuugcacuu

SEQ ID NO: 1619074 - RNA, 19 nt, Artificial Sequence
  Description of Artificial Sequence: Synthetic oligonucleotide
agcgccuugggcgcccucg

SEQ ID NO: 1619075 - RNA, 19 nt, Artificial Sequence
  Description of Artificial Sequence: Synthetic oligonucleotide
ugggccggaaccccucaaa

SEQ ID NO: 1619076 - RNA, 19 nt, Artificial Sequence
  Description of Artificial Sequence: Synthetic oligonucleotide
ggccggaaccccucaaaag

SEQ ID NO: 1619077 - RNA, 19 nt, Artificial Sequence
  Description of Artificial Sequence: Synthetic oligonucleotide
acugcgcacuaaaaucucu

SEQ ID NO: 1619078 - RNA, 19 nt, Artificial Sequence
  Description of Artificial Sequence: Synthetic oligonucleotide
gugccucugcaccucagca

SEQ ID NO: 1619079 - RNA, 19 nt, Artificial Sequence
  Description of Artificial Sequence: Synthetic oligonucleotide
uggcacucucacugagggc

SEQ ID NO: 1619080 - RNA, 19 nt, Artificial Sequence
  Description of Artificial Sequence: Synthetic oligonucleotide
cuauucucuuagcgccuug

SEQ ID NO: 1619081 - RNA, 19 nt, Artificial Sequence
  Description of Artificial Sequence: Synthetic oligonucleotide
aggugccacguaugugaag

SEQ ID NO: 1619082 - RNA, 19 nt, Artificial Sequence
  Description of Artificial Sequence: Synthetic oligonucleotide
agccagauagaagcaugcu

SEQ ID NO: 1619083 - RNA, 19 nt, Artificial Sequence
  Description of Artificial Sequence: Synthetic oligonucleotide
uagaagcaugcugugucuu

SEQ ID NO: 1619084 - RNA, 19 nt, Artificial Sequence
  Description of Artificial Sequence: Synthetic oligonucleotide
uguuccgcucagcccgggu

SEQ ID NO: 1619085 - RNA, 19 nt, Artificial Sequence
  Description of Artificial Sequence: Synthetic oligonucleotide
cacguaugugaagcccagg

SEQ ID NO: 1619086 - RNA, 19 nt, Artificial Sequence
  Description of Artificial Sequence: Synthetic oligonucleotide
uggccacugcgcacuaaaa

SEQ ID NO: 1619087 - RNA, 19 nt, Artificial Sequence
  Description of Artificial Sequence: Synthetic oligonucleotide
acugcccgguuguggccac

SEQ ID NO: 1619088 - RNA, 19 nt, Artificial Sequence
  Description of Artificial Sequence: Synthetic oligonucleotide
acgucgggccaagagguca

SEQ ID NO: 1619089 - RNA, 19 nt, Artificial Sequence
  Description of Artificial Sequence: Synthetic oligonucleotide
aagaugccuucucgcucaa

SEQ ID NO: 1619090 - RNA, 19 nt, Artificial Sequence
  Description of Artificial Sequence: Synthetic oligonucleotide
acggaugggaagaggggca

SEQ ID NO: 1619091 - RNA, 19 nt, Artificial Sequence
  Description of Artificial Sequence: Synthetic oligonucleotide
guugaaugggauuccgcuu

SEQ ID NO: 1619092 - RNA, 19 nt, Artificial Sequence
  Description of Artificial Sequence: Synthetic oligonucleotide
uggaaagcauaggccaauu

SEQ ID NO: 1619093 - RNA, 19 nt, Artificial Sequence
  Description of Artificial Sequence: Synthetic oligonucleotide
ggcugugucgucuggacua

SEQ ID NO: 1619094 - RNA, 19 nt, Artificial Sequence
  Description of Artificial Sequence: Synthetic oligonucleotide
ggaugcuucacagauucua

SEQ ID NO: 1619095 - RNA, 19 nt, Artificial Sequence
  Description of Artificial Sequence: Synthetic oligonucleotide
ggcgucugccgugugaagc

SEQ ID NO: 1619096 - RNA, 19 nt, Artificial Sequence
  Description of Artificial Sequence: Synthetic oligonucleotide
ugcggugaagggcggcgau

SEQ ID NO: 1619097 - RNA, 19 nt, Artificial Sequence
  Description of Artificial Sequence: Synthetic oligonucleotide
cgaguaucaaacuggcuca

SEQ ID NO: 1619098 - RNA, 19 nt, Artificial Sequence
  Description of Artificial Sequence: Synthetic oligonucleotide
gcauugcguacaaucuuag

SEQ ID NO: 1619099 - RNA, 19 nt, Artificial Sequence
  Description of Artificial Sequence: Synthetic oligonucleotide
acucggccugaagggaggg

SEQ ID NO: 1619100 - RNA, 19 nt, Artificial Sequence
  Description of Artificial Sequence: Synthetic oligonucleotide
gugccggaagaaagggugc

SEQ ID NO: 1619101 - RNA, 19 nt, Artificial Sequence
  Description of Artificial Sequence: Synthetic oligonucleotide
cccaauucguugaauggga

SEQ ID NO: 1619102 - RNA, 19 nt, Artificial Sequence
  Description of Artificial Sequence: Synthetic oligonucleotide
guggccacugcgcacuaaa

SEQ ID NO: 1619103 - RNA, 19 nt, Artificial Sequence
  Description of Artificial Sequence: Synthetic oligonucleotide
cgguuuucugcggugaagg

SEQ ID NO: 1619104 - RNA, 19 nt, Artificial Sequence
  Description of Artificial Sequence: Synthetic oligonucleotide
ucuuagcgccuugggcgcc

SEQ ID NO: 1619105 - RNA, 19 nt, Artificial Sequence
  Description of Artificial Sequence: Synthetic oligonucleotide
cagguuggugccuugcacu

SEQ ID NO: 1619106 - RNA, 19 nt, Artificial Sequence
  Description of Artificial Sequence: Synthetic oligonucleotide
gauuccgcuucagaaacuu

SEQ ID NO: 1619107 - RNA, 19 nt, Artificial Sequence
  Description of Artificial Sequence: Synthetic oligonucleotide
aagggaugcuucacagauu

SEQ ID NO: 1619108 - RNA, 19 nt, Artificial Sequence
  Description of Artificial Sequence: Synthetic oligonucleotide
gcccaacgcguucagggcc

SEQ ID NO: 1619109 - RNA, 19 nt, Artificial Sequence
  Description of Artificial Sequence: Synthetic oligonucleotide
gggcuggaaagagaagccc

SEQ ID NO: 1619110 - RNA, 19 nt, Artificial Sequence
  Description of Artificial Sequence: Synthetic oligonucleotide
gugaagcgaguaucaaacu

SEQ ID NO: 1619111 - RNA, 19 nt, Artificial Sequence
  Description of Artificial Sequence: Synthetic oligonucleotide
gguggaccagggaugggcc

SEQ ID NO: 1619112 - RNA, 19 nt, Artificial Sequence
  Description of Artificial Sequence: Synthetic oligonucleotide
cccgguuguggccacugcg

SEQ ID NO: 1619113 - RNA, 19 nt, Artificial Sequence
  Description of Artificial Sequence: Synthetic oligonucleotide
cauccggggugagguaggg

SEQ ID NO: 1619114 - RNA, 19 nt, Artificial Sequence
  Description of Artificial Sequence: Synthetic oligonucleotide
gggccaagaggucauccca

SEQ ID NO: 1619115 - RNA, 19 nt, Artificial Sequence
  Description of Artificial Sequence: Synthetic oligonucleotide
uggcgucugccgugugaag

SEQ ID NO: 1619116 - RNA, 19 nt, Artificial Sequence
  Description of Artificial Sequence: Synthetic oligonucleotide
uggcaaggucccgagcauc

SEQ ID NO: 1619117 - RNA, 19 nt, Artificial Sequence
  Description of Artificial Sequence: Synthetic oligonucleotide
gggaggguccacacgucgg

SEQ ID NO: 1619118 - RNA, 19 nt, Artificial Sequence
  Description of Artificial Sequence: Synthetic oligonucleotide
ggugugugcuguguccuug

SEQ ID NO: 1619119 - RNA, 19 nt, Artificial Sequence
  Description of Artificial Sequence: Synthetic oligonucleotide
guuguggccacugcgcacu

SEQ ID NO: 1619120 - RNA, 19 nt, Artificial Sequence
  Description of Artificial Sequence: Synthetic oligonucleotide
cuuagcgccuugggcgccc

SEQ ID NO: 1619121 - RNA, 19 nt, Artificial Sequence
  Description of Artificial Sequence: Synthetic oligonucleotide
ggcccaacgcguucagggc

SEQ ID NO: 1619122 - RNA, 19 nt, Artificial Sequence
  Description of Artificial Sequence: Synthetic oligonucleotide
gacucuuuacagaguccaa

SEQ ID NO: 1619123 - RNA, 19 nt, Artificial Sequence
  Description of Artificial Sequence: Synthetic oligonucleotide
augugccggaagaaagggu

SEQ ID NO: 1619124 - RNA, 19 nt, Artificial Sequence
  Description of Artificial Sequence: Synthetic oligonucleotide
agcgaguaucaaacuggcu

SEQ ID NO: 1619125 - RNA, 19 nt, Artificial Sequence
  Description of Artificial Sequence: Synthetic oligonucleotide
ccacguaugugaagcccag

SEQ ID NO: 1619126 - RNA, 19 nt, Artificial Sequence
  Description of Artificial Sequence: Synthetic oligonucleotide
ucccgagcauccgggguga

SEQ ID NO: 1619127 - RNA, 19 nt, Artificial Sequence
  Description of Artificial Sequence: Synthetic oligonucleotide
cccaacgcguucagggccc

SEQ ID NO: 1619128 - RNA, 19 nt, Artificial Sequence
  Description of Artificial Sequence: Synthetic oligonucleotide
cucgcucaagaugugugaa

SEQ ID NO: 1619129 - RNA, 19 nt, Artificial Sequence
  Description of Artificial Sequence: Synthetic oligonucleotide
agauggcuccaugggcucu

SEQ ID NO: 1619130 - RNA, 19 nt, Artificial Sequence
  Description of Artificial Sequence: Synthetic oligonucleotide
ggaaccccucaaaaggaga

SEQ ID NO: 1619131 - RNA, 19 nt, Artificial Sequence
  Description of Artificial Sequence: Synthetic oligonucleotide
cucuauucucuuagcgccu

SEQ ID NO: 1619132 - RNA, 19 nt, Artificial Sequence
  Description of Artificial Sequence: Synthetic oligonucleotide
caauucguugaaugggauu

SEQ ID NO: 1619133 - RNA, 19 nt, Artificial Sequence
  Description of Artificial Sequence: Synthetic oligonucleotide
agcuugggcuggaaagaga

SEQ ID NO: 1619134 - RNA, 19 nt, Artificial Sequence
  Description of Artificial Sequence: Synthetic oligonucleotide
caauggugccacagaaggu

SEQ ID NO: 1619135 - RNA, 19 nt, Artificial Sequence
  Description of Artificial Sequence: Synthetic oligonucleotide
ccuugggcgcccucggccc

SEQ ID NO: 1619136 - RNA, 19 nt, Artificial Sequence
  Description of Artificial Sequence: Synthetic oligonucleotide
ccgggugugugcugugucc

SEQ ID NO: 1619137 - RNA, 19 nt, Artificial Sequence
  Description of Artificial Sequence: Synthetic oligonucleotide
guacaaucuuagccuuucu

SEQ ID NO: 1619138 - RNA, 19 nt, Artificial Sequence
  Description of Artificial Sequence: Synthetic oligonucleotide
gccgugugaagcgaguauc

SEQ ID NO: 1619139 - RNA, 19 nt, Artificial Sequence
  Description of Artificial Sequence: Synthetic oligonucleotide
gugucgucuggacuaucua

SEQ ID NO: 1619140 - RNA, 19 nt, Artificial Sequence
  Description of Artificial Sequence: Synthetic oligonucleotide
cucaaagcaguggggccca

SEQ ID NO: 1619141 - RNA, 19 nt, Artificial Sequence
  Description of Artificial Sequence: Synthetic oligonucleotide
guacggggacugcuguuaa

SEQ ID NO: 1619142 - RNA, 19 nt, Artificial Sequence
  Description of Artificial Sequence: Synthetic oligonucleotide
acgcagcuugggcuggaaa

SEQ ID NO: 1619143 - RNA, 19 nt, Artificial Sequence
  Description of Artificial Sequence: Synthetic oligonucleotide
cccucaaaaggagagaacu

SEQ ID NO: 1619144 - RNA, 19 nt, Artificial Sequence
  Description of Artificial Sequence: Synthetic oligonucleotide
cguacaaucuuagccuuuc

SEQ ID NO: 1619145 - RNA, 19 nt, Artificial Sequence
  Description of Artificial Sequence: Synthetic oligonucleotide
gccacguaugugaagccca

SEQ ID NO: 1619146 - RNA, 19 nt, Artificial Sequence
  Description of Artificial Sequence: Synthetic oligonucleotide
uccgcucagcccgggugug

SEQ ID NO: 1619147 - RNA, 19 nt, Artificial Sequence
  Description of Artificial Sequence: Synthetic oligonucleotide
cuugcccagcacacucaga

SEQ ID NO: 1619148 - RNA, 19 nt, Artificial Sequence
  Description of Artificial Sequence: Synthetic oligonucleotide
cacgucgggccaagagguc

SEQ ID NO: 1619149 - RNA, 19 nt, Artificial Sequence
  Description of Artificial Sequence: Synthetic oligonucleotide
uacuggcgucugccgugug

SEQ ID NO: 1619150 - RNA, 19 nt, Artificial Sequence
  Description of Artificial Sequence: Synthetic oligonucleotide
ggcuugagaucccgguaga

SEQ ID NO: 1619151 - RNA, 19 nt, Artificial Sequence
  Description of Artificial Sequence: Synthetic oligonucleotide
ccacugcgcacuaaaaucu

SEQ ID NO: 1619152 - RNA, 19 nt, Artificial Sequence
  Description of Artificial Sequence: Synthetic oligonucleotide
cuggcucacguccucuucu

SEQ ID NO: 1619153 - RNA, 19 nt, Artificial Sequence
  Description of Artificial Sequence: Synthetic oligonucleotide
cagugugaucucagccaga

SEQ ID NO: 1619154 - RNA, 19 nt, Artificial Sequence
  Description of Artificial Sequence: Synthetic oligonucleotide
cuggcgucugccgugugaa

SEQ ID NO: 1619155 - RNA, 19 nt, Artificial Sequence
  Description of Artificial Sequence: Synthetic oligonucleotide
augaugccuugggaaugga

SEQ ID NO: 1619156 - RNA, 19 nt, Artificial Sequence
  Description of Artificial Sequence: Synthetic oligonucleotide
cauagucgucccaccgucu

SEQ ID NO: 1619157 - RNA, 19 nt, Artificial Sequence
  Description of Artificial Sequence: Synthetic oligonucleotide
gcgcccucggcccuucuug

SEQ ID NO: 1619158 - RNA, 19 nt, Artificial Sequence
  Description of Artificial Sequence: Synthetic oligonucleotide
gguacggggacugcuguua

SEQ ID NO: 1619159 - RNA, 19 nt, Artificial Sequence
  Description of Artificial Sequence: Synthetic oligonucleotide
cguugaaugggauuccgcu

SEQ ID NO: 1619160 - RNA, 19 nt, Artificial Sequence
  Description of Artificial Sequence: Synthetic oligonucleotide
auguuccgcucagcccggg

SEQ ID NO: 1619161 - RNA, 19 nt, Artificial Sequence
  Description of Artificial Sequence: Synthetic oligonucleotide
gcauccggggugagguagg

SEQ ID NO: 1619162 - RNA, 19 nt, Artificial Sequence
  Description of Artificial Sequence: Synthetic oligonucleotide
ccgugugaagcgaguauca

SEQ ID NO: 1619163 - RNA, 19 nt, Artificial Sequence
  Description of Artificial Sequence: Synthetic oligonucleotide
uuguggccacugcgcacua

SEQ ID NO: 1619164 - RNA, 19 nt, Artificial Sequence
  Description of Artificial Sequence: Synthetic oligonucleotide
auuccgcuucagaaacuuu

SEQ ID NO: 1619165 - RNA, 19 nt, Artificial Sequence
  Description of Artificial Sequence: Synthetic oligonucleotide
uccacacgucgggccaaga

SEQ ID NO: 1619166 - RNA, 19 nt, Artificial Sequence
  Description of Artificial Sequence: Synthetic oligonucleotide
ggcggcgauccagugagca

SEQ ID NO: 1619167 - RNA, 19 nt, Artificial Sequence
  Description of Artificial Sequence: Synthetic oligonucleotide
cccgguagaugaugccuug

SEQ ID NO: 1619168 - RNA, 19 nt, Artificial Sequence
  Description of Artificial Sequence: Synthetic oligonucleotide
uguggccacugcgcacuaa

SEQ ID NO: 1619169 - RNA, 19 nt, Artificial Sequence
  Description of Artificial Sequence: Synthetic oligonucleotide
cggugaagggcggcgaucc

SEQ ID NO: 1619170 - RNA, 19 nt, Artificial Sequence
  Description of Artificial Sequence: Synthetic oligonucleotide
cuucucgcucaagaugugu

SEQ ID NO: 1619171 - RNA, 19 nt, Artificial Sequence
  Description of Artificial Sequence: Synthetic oligonucleotide
ccggaagaaagggugccuc

SEQ ID NO: 1619172 - RNA, 19 nt, Artificial Sequence
  Description of Artificial Sequence: Synthetic oligonucleotide
guggggcccaacgcguuca

SEQ ID NO: 1619173 - RNA, 19 nt, Artificial Sequence
  Description of Artificial Sequence: Synthetic oligonucleotide
guccacacgucgggccaag

SEQ ID NO: 1619174 - RNA, 19 nt, Artificial Sequence
  Description of Artificial Sequence: Synthetic oligonucleotide
ggccacugcgcacuaaaau

SEQ ID NO: 1619175 - RNA, 19 nt, Artificial Sequence
  Description of Artificial Sequence: Synthetic oligonucleotide
gggccggaaccccucaaaa

SEQ ID NO: 1619176 - RNA, 19 nt, Artificial Sequence
  Description of Artificial Sequence: Synthetic oligonucleotide
ggacuaucuacuggcgucu

SEQ ID NO: 1619177 - RNA, 19 nt, Artificial Sequence
  Description of Artificial Sequence: Synthetic oligonucleotide
cgcucaagaugugugaaga

SEQ ID NO: 1619178 - RNA, 19 nt, Artificial Sequence
  Description of Artificial Sequence: Synthetic oligonucleotide
agcccgggugugugcugug

SEQ ID NO: 1619179 - RNA, 19 nt, Artificial Sequence
  Description of Artificial Sequence: Synthetic oligonucleotide
ggacugcuguuaaggcgcc

SEQ ID NO: 1619180 - RNA, 19 nt, Artificial Sequence
  Description of Artificial Sequence: Synthetic oligonucleotide
gggcacggaugggaagagg

SEQ ID NO: 1619181 - RNA, 19 nt, Artificial Sequence
  Description of Artificial Sequence: Synthetic oligonucleotide
uuagcgccuugggcgcccu

SEQ ID NO: 1619182 - RNA, 19 nt, Artificial Sequence
  Description of Artificial Sequence: Synthetic oligonucleotide
cagguucacgcuguucucu

SEQ ID NO: 1619183 - RNA, 19 nt, Artificial Sequence
  Description of Artificial Sequence: Synthetic oligonucleotide
cuuggauuucuuggucccu

SEQ ID NO: 1619184 - RNA, 19 nt, Artificial Sequence
  Description of Artificial Sequence: Synthetic oligonucleotide
ccauaguuuucuuucgguu

SEQ ID NO: 1619185 - RNA, 19 nt, Artificial Sequence
  Description of Artificial Sequence: Synthetic oligonucleotide
cggcgauccagugagcaug

SEQ ID NO: 1619186 - RNA, 19 nt, Artificial Sequence
  Description of Artificial Sequence: Synthetic oligonucleotide
gugugaucucagccagaua

SEQ ID NO: 1619187 - RNA, 19 nt, Artificial Sequence
  Description of Artificial Sequence: Synthetic oligonucleotide
ggggcacggaugggaagag

SEQ ID NO: 1619188 - RNA, 19 nt, Artificial Sequence
  Description of Artificial Sequence: Synthetic oligonucleotide
ggcucacguccucuucuga

SEQ ID NO: 1619189 - RNA, 19 nt, Artificial Sequence
  Description of Artificial Sequence: Synthetic oligonucleotide
gacuuucauugcauauauu

SEQ ID NO: 1619190 - RNA, 19 nt, Artificial Sequence
  Description of Artificial Sequence: Synthetic oligonucleotide
gagcauccggggugaggua

SEQ ID NO: 1619191 - RNA, 19 nt, Artificial Sequence
  Description of Artificial Sequence: Synthetic oligonucleotide
gcgccuugggcgcccucgg

SEQ ID NO: 1619192 - RNA, 19 nt, Artificial Sequence
  Description of Artificial Sequence: Synthetic oligonucleotide
cuggaaagcauaggccaau

SEQ ID NO: 1619193 - RNA, 19 nt, Artificial Sequence
  Description of Artificial Sequence: Synthetic oligonucleotide
gugugggugacagcucccu

SEQ ID NO: 1619194 - RNA, 19 nt, Artificial Sequence
  Description of Artificial Sequence: Synthetic oligonucleotide
caccucagcagcgucuccu

SEQ ID NO: 1619195 - RNA, 19 nt, Artificial Sequence
  Description of Artificial Sequence: Synthetic oligonucleotide
cugugucgucuggacuauc

SEQ ID NO: 1619196 - RNA, 19 nt, Artificial Sequence
  Description of Artificial Sequence: Synthetic oligonucleotide
ggugaagggcggcgaucca

SEQ ID NO: 1619197 - RNA, 19 nt, Artificial Sequence
  Description of Artificial Sequence: Synthetic oligonucleotide
gccaagaggucaucccagu

SEQ ID NO: 1619198 - RNA, 19 nt, Artificial Sequence
  Description of Artificial Sequence: Synthetic oligonucleotide
caacgcguucagggcccag

SEQ ID NO: 1619199 - RNA, 19 nt, Artificial Sequence
  Description of Artificial Sequence: Synthetic oligonucleotide
cugccgugugaagcgagua

SEQ ID NO: 1619200 - RNA, 19 nt, Artificial Sequence
  Description of Artificial Sequence: Synthetic oligonucleotide
ccgagcauccggggugagg

SEQ ID NO: 1619201 - RNA, 19 nt, Artificial Sequence
  Description of Artificial Sequence: Synthetic oligonucleotide
gcaccucagcagcgucucc

SEQ ID NO: 1619202 - RNA, 19 nt, Artificial Sequence
  Description of Artificial Sequence: Synthetic oligonucleotide
cgcccucggcccuucuugg

SEQ ID NO: 1619203 - RNA, 19 nt, Artificial Sequence
  Description of Artificial Sequence: Synthetic oligonucleotide
gggguacggggacugcugu

SEQ ID NO: 1619204 - RNA, 19 nt, Artificial Sequence
  Description of Artificial Sequence: Synthetic oligonucleotide
cucagcccgggugugugcu

SEQ ID NO: 1619205 - RNA, 19 nt, Artificial Sequence
  Description of Artificial Sequence: Synthetic oligonucleotide
ccaauucguugaaugggau

SEQ ID NO: 1619206 - RNA, 19 nt, Artificial Sequence
  Description of Artificial Sequence: Synthetic oligonucleotide
cugcggugaagggcggcga

SEQ ID NO: 1619207 - RNA, 19 nt, Artificial Sequence
  Description of Artificial Sequence: Synthetic oligonucleotide
cccgggugugugcuguguc

SEQ ID NO: 1619208 - RNA, 19 nt, Artificial Sequence
  Description of Artificial Sequence: Synthetic oligonucleotide
ggccugaagggagggucca

SEQ ID NO: 1619209 - RNA, 19 nt, Artificial Sequence
  Description of Artificial Sequence: Synthetic oligonucleotide
gcccgguuguggccacugc

SEQ ID NO: 1619210 - RNA, 19 nt, Artificial Sequence
  Description of Artificial Sequence: Synthetic oligonucleotide
gucgggccaagaggucauc

SEQ ID NO: 1619211 - RNA, 19 nt, Artificial Sequence
  Description of Artificial Sequence: Synthetic oligonucleotide
cuacuggcgucugccgugu

SEQ ID NO: 1619212 - RNA, 19 nt, Artificial Sequence
  Description of Artificial Sequence: Synthetic oligonucleotide
gacugcuguuaaggcgccu

SEQ ID NO: 1619213 - RNA, 19 nt, Artificial Sequence
  Description of Artificial Sequence: Synthetic oligonucleotide
ggcgauccagugagcaugu

SEQ ID NO: 1619214 - RNA, 19 nt, Artificial Sequence
  Description of Artificial Sequence: Synthetic oligonucleotide
cgagcauccggggugaggu

SEQ ID NO: 1619215 - RNA, 19 nt, Artificial Sequence
  Description of Artificial Sequence: Synthetic oligonucleotide
gccugaagggaggguccac

SEQ ID NO: 1619216 - RNA, 19 nt, Artificial Sequence
  Description of Artificial Sequence: Synthetic oligonucleotide
gcccucggcccuucuugga

SEQ ID NO: 1619217 - RNA, 19 nt, Artificial Sequence
  Description of Artificial Sequence: Synthetic oligonucleotide
cuugggcgcccucggcccu

SEQ ID NO: 1619218 - RNA, 19 nt, Artificial Sequence
  Description of Artificial Sequence: Synthetic oligonucleotide
ugggcgcccucggcccuuc

SEQ ID NO: 1619219 - RNA, 19 nt, Artificial Sequence
  Description of Artificial Sequence: Synthetic oligonucleotide
cgugugaagcgaguaucaa

SEQ ID NO: 1619220 - RNA, 19 nt, Artificial Sequence
  Description of Artificial Sequence: Synthetic oligonucleotide
gcccagguucacgcuguuc

SEQ ID NO: 1619221 - RNA, 19 nt, Artificial Sequence
  Description of Artificial Sequence: Synthetic oligonucleotide
gcuccccgccacugaggca

SEQ ID NO: 1619222 - RNA, 19 nt, Artificial Sequence
  Description of Artificial Sequence: Synthetic oligonucleotide
ccaagaggucaucccaguu

SEQ ID NO: 1619223 - RNA, 19 nt, Artificial Sequence
  Description of Artificial Sequence: Synthetic oligonucleotide
cgcucagcccgggugugug

SEQ ID NO: 1619224 - RNA, 19 nt, Artificial Sequence
  Description of Artificial Sequence: Synthetic oligonucleotide
gcggcgauccagugagcau

SEQ ID NO: 1619225 - RNA, 19 nt, Artificial Sequence
  Description of Artificial Sequence: Synthetic oligonucleotide
caguggggcccaacgcguu

SEQ ID NO: 1619226 - RNA, 19 nt, Artificial Sequence
  Description of Artificial Sequence: Synthetic oligonucleotide
gggaugcuucacagauucu

SEQ ID NO: 1619227 - RNA, 19 nt, Artificial Sequence
  Description of Artificial Sequence: Synthetic oligonucleotide
gggcccagguucacgcugu

SEQ ID NO: 1619228 - RNA, 19 nt, Artificial Sequence
  Description of Artificial Sequence: Synthetic oligonucleotide
gcugugucgucuggacuau

SEQ ID NO: 1619229 - RNA, 19 nt, Artificial Sequence
  Description of Artificial Sequence: Synthetic oligonucleotide
cucggccugaagggagggu

SEQ ID NO: 1619230 - RNA, 19 nt, Artificial Sequence
  Description of Artificial Sequence: Synthetic oligonucleotide
ggguacggggacugcuguu

SEQ ID NO: 1619231 - RNA, 19 nt, Artificial Sequence
  Description of Artificial Sequence: Synthetic oligonucleotide
gcguacaaucuuagccuuu

SEQ ID NO: 1619232 - RNA, 19 nt, Artificial Sequence
  Description of Artificial Sequence: Synthetic oligonucleotide
ccucggcccuucuuggauu

SEQ ID NO: 1619233 - RNA, 19 nt, Artificial Sequence
  Description of Artificial Sequence: Synthetic oligonucleotide
cgucugccgugugaagcga

SEQ ID NO: 1619234 - RNA, 19 nt, Artificial Sequence
  Description of Artificial Sequence: Synthetic oligonucleotide
cccgagcauccggggugag

SEQ ID NO: 1619235 - RNA, 19 nt, Artificial Sequence
  Description of Artificial Sequence: Synthetic oligonucleotide
cgggugugugcuguguccu

SEQ ID NO: 1619236 - RNA, 19 nt, Artificial Sequence
  Description of Artificial Sequence: Synthetic oligonucleotide
ggcgcccucggcccuucuu

SEQ ID NO: 1619237 - RNA, 19 nt, Artificial Sequence
  Description of Artificial Sequence: Synthetic oligonucleotide
gcccgggugugugcugugu

SEQ ID NO: 1619238 - RNA, 19 nt, Artificial Sequence
  Description of Artificial Sequence: Synthetic oligonucleotide
cugcccgguuguggccacu

SEQ ID NO: 1619239 - RNA, 19 nt, Artificial Sequence
  Description of Artificial Sequence: Synthetic oligonucleotide
ccuuggcauugcguacaau

SEQ ID NO: 1619240 - RNA, 19 nt, Artificial Sequence
  Description of Artificial Sequence: Synthetic oligonucleotide
uugaaagugacauacacca

SEQ ID NO: 1619241 - RNA, 19 nt, Artificial Sequence
  Description of Artificial Sequence: Synthetic oligonucleotide
gaaagugacauacaccagg

SEQ ID NO: 1619242 - RNA, 19 nt, Artificial Sequence
  Description of Artificial Sequence: Synthetic oligonucleotide
uuugguggaugucaggucg

SEQ ID NO: 1619243 - RNA, 19 nt, Artificial Sequence
  Description of Artificial Sequence: Synthetic oligonucleotide
auaguagaacugcauaagc

SEQ ID NO: 1619244 - RNA, 19 nt, Artificial Sequence
  Description of Artificial Sequence: Synthetic oligonucleotide
uaccaguucauuuaacgcg

SEQ ID NO: 1619245 - RNA, 19 nt, Artificial Sequence
  Description of Artificial Sequence: Synthetic oligonucleotide
cuuuguuacacacaucucc

SEQ ID NO: 1619246 - RNA, 19 nt, Artificial Sequence
  Description of Artificial Sequence: Synthetic oligonucleotide
aauuaggugaguggaaacg

SEQ ID NO: 1619247 - RNA, 19 nt, Artificial Sequence
  Description of Artificial Sequence: Synthetic oligonucleotide
aacgcaagucaacauuccc

SEQ ID NO: 1619248 - RNA, 19 nt, Artificial Sequence
  Description of Artificial Sequence: Synthetic oligonucleotide
guugugaucaaugauauac

SEQ ID NO: 1619249 - RNA, 19 nt, Artificial Sequence
  Description of Artificial Sequence: Synthetic oligonucleotide
agugacauacaccaggcag

SEQ ID NO: 1619250 - RNA, 19 nt, Artificial Sequence
  Description of Artificial Sequence: Synthetic oligonucleotide
uguggauccggccagaugu

SEQ ID NO: 1619251 - RNA, 19 nt, Artificial Sequence
  Description of Artificial Sequence: Synthetic oligonucleotide
uguacagaccacaacagcu

SEQ ID NO: 1619252 - RNA, 19 nt, Artificial Sequence
  Description of Artificial Sequence: Synthetic oligonucleotide
ucccaguacacauagaucu

SEQ ID NO: 1619253 - RNA, 19 nt, Artificial Sequence
  Description of Artificial Sequence: Synthetic oligonucleotide
aaagugacauacaccaggc

SEQ ID NO: 1619254 - RNA, 19 nt, Artificial Sequence
  Description of Artificial Sequence: Synthetic oligonucleotide
uaauagacauuccccaucc

SEQ ID NO: 1619255 - RNA, 19 nt, Artificial Sequence
  Description of Artificial Sequence: Synthetic oligonucleotide
aaugucgcugaucagcaug

SEQ ID NO: 1619256 - RNA, 19 nt, Artificial Sequence
  Description of Artificial Sequence: Synthetic oligonucleotide
uaguagaacugcauaagca

SEQ ID NO: 1619257 - RNA, 19 nt, Artificial Sequence
  Description of Artificial Sequence: Synthetic oligonucleotide
acuggugucucccaccuac

SEQ ID NO: 1619258 - RNA, 19 nt, Artificial Sequence
  Description of Artificial Sequence: Synthetic oligonucleotide
uacacauagaucuucuggu

SEQ ID NO: 1619259 - RNA, 19 nt, Artificial Sequence
  Description of Artificial Sequence: Synthetic oligonucleotide
aggucgaauaagugaagcc

SEQ ID NO: 1619260 - RNA, 19 nt, Artificial Sequence
  Description of Artificial Sequence: Synthetic oligonucleotide
agguucuuuccuuuguuac

SEQ ID NO: 1619261 - RNA, 19 nt, Artificial Sequence
  Description of Artificial Sequence: Synthetic oligonucleotide
ucgaguaggauccuucagc

SEQ ID NO: 1619262 - RNA, 19 nt, Artificial Sequence
  Description of Artificial Sequence: Synthetic oligonucleotide
guauccuaccaccagcucg

SEQ ID NO: 1619263 - RNA, 19 nt, Artificial Sequence
  Description of Artificial Sequence: Synthetic oligonucleotide
aucuacaugcagcuccugc

SEQ ID NO: 1619264 - RNA, 19 nt, Artificial Sequence
  Description of Artificial Sequence: Synthetic oligonucleotide
uguguauccuaccaccagc

SEQ ID NO: 1619265 - RNA, 19 nt, Artificial Sequence
  Description of Artificial Sequence: Synthetic oligonucleotide
uggugcagcacuauguccc

SEQ ID NO: 1619266 - RNA, 19 nt, Artificial Sequence
  Description of Artificial Sequence: Synthetic oligonucleotide
gaauaagugaagccagccc

SEQ ID NO: 1619267 - RNA, 19 nt, Artificial Sequence
  Description of Artificial Sequence: Synthetic oligonucleotide
cucuguaauagacauuccc

SEQ ID NO: 1619268 - RNA, 19 nt, Artificial Sequence
  Description of Artificial Sequence: Synthetic oligonucleotide
uccaagagucucauggugc

SEQ ID NO: 1619269 - RNA, 19 nt, Artificial Sequence
  Description of Artificial Sequence: Synthetic oligonucleotide
ugugaucaaugauauacgu

SEQ ID NO: 1619270 - RNA, 19 nt, Artificial Sequence
  Description of Artificial Sequence: Synthetic oligonucleotide
auauacgucuguccauccc

SEQ ID NO: 1619271 - RNA, 19 nt, Artificial Sequence
  Description of Artificial Sequence: Synthetic oligonucleotide
cuuguugguacucaggcuc

SEQ ID NO: 1619272 - RNA, 19 nt, Artificial Sequence
  Description of Artificial Sequence: Synthetic oligonucleotide
uccucuguaauagacauuc

SEQ ID NO: 1619273 - RNA, 19 nt, Artificial Sequence
  Description of Artificial Sequence: Synthetic oligonucleotide
ucaaugucgcugaucagca

SEQ ID NO: 1619274 - RNA, 19 nt, Artificial Sequence
  Description of Artificial Sequence: Synthetic oligonucleotide
agcacaacaucccaguaca

SEQ ID NO: 1619275 - RNA, 19 nt, Artificial Sequence
  Description of Artificial Sequence: Synthetic oligonucleotide
uggugauccaccuguacag

SEQ ID NO: 1619276 - RNA, 19 nt, Artificial Sequence
  Description of Artificial Sequence: Synthetic oligonucleotide
ucucccaccuaccaguuca

SEQ ID NO: 1619277 - RNA, 19 nt, Artificial Sequence
  Description of Artificial Sequence: Synthetic oligonucleotide
uacauaguagaacugcaua

SEQ ID NO: 1619278 - RNA, 19 nt, Artificial Sequence
  Description of Artificial Sequence: Synthetic oligonucleotide
uugccaauuaggugagugg

SEQ ID NO: 1619279 - RNA, 19 nt, Artificial Sequence
  Description of Artificial Sequence: Synthetic oligonucleotide
gaucauggaucacucuggg

SEQ ID NO: 1619280 - RNA, 19 nt, Artificial Sequence
  Description of Artificial Sequence: Synthetic oligonucleotide
agagagacugucuaccuga

SEQ ID NO: 1619281 - RNA, 19 nt, Artificial Sequence
  Description of Artificial Sequence: Synthetic oligonucleotide
agacauuccccauccugcc

SEQ ID NO: 1619282 - RNA, 19 nt, Artificial Sequence
  Description of Artificial Sequence: Synthetic oligonucleotide
aacguucuuguuguggauc

SEQ ID NO: 1619283 - RNA, 19 nt, Artificial Sequence
  Description of Artificial Sequence: Synthetic oligonucleotide
acauaguagaacugcauaa

SEQ ID NO: 1619284 - RNA, 19 nt, Artificial Sequence
  Description of Artificial Sequence: Synthetic oligonucleotide
gaaacguucuuguugugga

SEQ ID NO: 1619285 - RNA, 19 nt, Artificial Sequence
  Description of Artificial Sequence: Synthetic oligonucleotide
agcacuaugucccgggcag

SEQ ID NO: 1619286 - RNA, 19 nt, Artificial Sequence
  Description of Artificial Sequence: Synthetic oligonucleotide
uauccuaccaccagcucgu

SEQ ID NO: 1619287 - RNA, 19 nt, Artificial Sequence
  Description of Artificial Sequence: Synthetic oligonucleotide
gaaugcccguaccacacgg

SEQ ID NO: 1619288 - RNA, 19 nt, Artificial Sequence
  Description of Artificial Sequence: Synthetic oligonucleotide
ugaguggaaacguucuugu

SEQ ID NO: 1619289 - RNA, 19 nt, Artificial Sequence
  Description of Artificial Sequence: Synthetic oligonucleotide
ugaaagugacauacaccag

SEQ ID NO: 1619290 - RNA, 19 nt, Artificial Sequence
  Description of Artificial Sequence: Synthetic oligonucleotide
cauaguagaacugcauaag

SEQ ID NO: 1619291 - RNA, 19 nt, Artificial Sequence
  Description of Artificial Sequence: Synthetic oligonucleotide
ugucugguccggaugguag

SEQ ID NO: 1619292 - RNA, 19 nt, Artificial Sequence
  Description of Artificial Sequence: Synthetic oligonucleotide
aagucaacauucccuggca

SEQ ID NO: 1619293 - RNA, 19 nt, Artificial Sequence
  Description of Artificial Sequence: Synthetic oligonucleotide
cucgggaucuacaugcagc

SEQ ID NO: 1619294 - RNA, 19 nt, Artificial Sequence
  Description of Artificial Sequence: Synthetic oligonucleotide
gaugguagagugucuggug

SEQ ID NO: 1619295 - RNA, 19 nt, Artificial Sequence
  Description of Artificial Sequence: Synthetic oligonucleotide
ucuguguauccuaccacca

SEQ ID NO: 1619296 - RNA, 19 nt, Artificial Sequence
  Description of Artificial Sequence: Synthetic oligonucleotide
ugacauacaccaggcaggg

SEQ ID NO: 1619297 - RNA, 19 nt, Artificial Sequence
  Description of Artificial Sequence: Synthetic oligonucleotide
ugauccaccuguacagacc

SEQ ID NO: 1619298 - RNA, 19 nt, Artificial Sequence
  Description of Artificial Sequence: Synthetic oligonucleotide
guugaaagugacauacacc

SEQ ID NO: 1619299 - RNA, 19 nt, Artificial Sequence
  Description of Artificial Sequence: Synthetic oligonucleotide
gucuguguauccuaccacc

SEQ ID NO: 1619300 - RNA, 19 nt, Artificial Sequence
  Description of Artificial Sequence: Synthetic oligonucleotide
uguaauagacauuccccau

SEQ ID NO: 1619301 - RNA, 19 nt, Artificial Sequence
  Description of Artificial Sequence: Synthetic oligonucleotide
uagaacugcauaagcacau

SEQ ID NO: 1619302 - RNA, 19 nt, Artificial Sequence
  Description of Artificial Sequence: Synthetic oligonucleotide
ucgaauaagugaagccagc

SEQ ID NO: 1619303 - RNA, 19 nt, Artificial Sequence
  Description of Artificial Sequence: Synthetic oligonucleotide
uucgaguaggauccuucag

SEQ ID NO: 1619304 - RNA, 19 nt, Artificial Sequence
  Description of Artificial Sequence: Synthetic oligonucleotide
uuauggccuugcuugaugu

SEQ ID NO: 1619305 - RNA, 19 nt, Artificial Sequence
  Description of Artificial Sequence: Synthetic oligonucleotide
guuaguggacgccaugcgc

SEQ ID NO: 1619306 - RNA, 19 nt, Artificial Sequence
  Description of Artificial Sequence: Synthetic oligonucleotide
gauccggccagaugucugg

SEQ ID NO: 1619307 - RNA, 19 nt, Artificial Sequence
  Description of Artificial Sequence: Synthetic oligonucleotide
cuguaauagacauucccca

SEQ ID NO: 1619308 - RNA, 19 nt, Artificial Sequence
  Description of Artificial Sequence: Synthetic oligonucleotide
gauauacgucuguccaucc

SEQ ID NO: 1619309 - RNA, 19 nt, Artificial Sequence
  Description of Artificial Sequence: Synthetic oligonucleotide
agagacugucuaccugacc

SEQ ID NO: 1619310 - RNA, 19 nt, Artificial Sequence
  Description of Artificial Sequence: Synthetic oligonucleotide
guaauagacauuccccauc

SEQ ID NO: 1619311 - RNA, 19 nt, Artificial Sequence
  Description of Artificial Sequence: Synthetic oligonucleotide
gucgaauaagugaagccag

SEQ ID NO: 1619312 - RNA, 19 nt, Artificial Sequence
  Description of Artificial Sequence: Synthetic oligonucleotide
ugccaauuaggugagugga

SEQ ID NO: 1619313 - RNA, 19 nt, Artificial Sequence
  Description of Artificial Sequence: Synthetic oligonucleotide
augguagagugucugguga

SEQ ID NO: 1619314 - RNA, 19 nt, Artificial Sequence
  Description of Artificial Sequence: Synthetic oligonucleotide
agagcuuugguggauguca

SEQ ID NO: 1619315 - RNA, 19 nt, Artificial Sequence
  Description of Artificial Sequence: Synthetic oligonucleotide
ucaggucgaauaagugaag

SEQ ID NO: 1619316 - RNA, 19 nt, Artificial Sequence
  Description of Artificial Sequence: Synthetic oligonucleotide
uaggugaguggaaacguuc

SEQ ID NO: 1619317 - RNA, 19 nt, Artificial Sequence
  Description of Artificial Sequence: Synthetic oligonucleotide
ucuuauacacagacaguuu

SEQ ID NO: 1619318 - RNA, 19 nt, Artificial Sequence
  Description of Artificial Sequence: Synthetic oligonucleotide
ugauauacgucuguccauc

SEQ ID NO: 1619319 - RNA, 19 nt, Artificial Sequence
  Description of Artificial Sequence: Synthetic oligonucleotide
cuaugucccgggcagcugg

SEQ ID NO: 1619320 - RNA, 19 nt, Artificial Sequence
  Description of Artificial Sequence: Synthetic oligonucleotide
cuuaucugcuuccugcauc

SEQ ID NO: 1619321 - RNA, 19 nt, Artificial Sequence
  Description of Artificial Sequence: Synthetic oligonucleotide
ucuggugaagcagggcacg

SEQ ID NO: 1619322 - RNA, 19 nt, Artificial Sequence
  Description of Artificial Sequence: Synthetic oligonucleotide
cugucagguguucaggcgc

SEQ ID NO: 1619323 - RNA, 19 nt, Artificial Sequence
  Description of Artificial Sequence: Synthetic oligonucleotide
cacagagagacugucuacc

SEQ ID NO: 1619324 - RNA, 19 nt, Artificial Sequence
  Description of Artificial Sequence: Synthetic oligonucleotide
auuaggugaguggaaacgu

SEQ ID NO: 1619325 - RNA, 19 nt, Artificial Sequence
  Description of Artificial Sequence: Synthetic oligonucleotide
aaggcucggauauuuucau

SEQ ID NO: 1619326 - RNA, 19 nt, Artificial Sequence
  Description of Artificial Sequence: Synthetic oligonucleotide
guugccaauuaggugagug

SEQ ID NO: 1619327 - RNA, 19 nt, Artificial Sequence
  Description of Artificial Sequence: Synthetic oligonucleotide
aauagacauuccccauccu

SEQ ID NO: 1619328 - RNA, 19 nt, Artificial Sequence
  Description of Artificial Sequence: Synthetic oligonucleotide
uguucaggcgccucagcca

SEQ ID NO: 1619329 - RNA, 19 nt, Artificial Sequence
  Description of Artificial Sequence: Synthetic oligonucleotide
cuguacagaccacaacagc

SEQ ID NO: 1619330 - RNA, 19 nt, Artificial Sequence
  Description of Artificial Sequence: Synthetic oligonucleotide
cuuguuguggauccggcca

SEQ ID NO: 1619331 - RNA, 19 nt, Artificial Sequence
  Description of Artificial Sequence: Synthetic oligonucleotide
aagaggcccgaguuaccag

SEQ ID NO: 1619332 - RNA, 19 nt, Artificial Sequence
  Description of Artificial Sequence: Synthetic oligonucleotide
guugcggcccucuuugcag

SEQ ID NO: 1619333 - RNA, 19 nt, Artificial Sequence
  Description of Artificial Sequence: Synthetic oligonucleotide
aagugacauacaccaggca

SEQ ID NO: 1619334 - RNA, 19 nt, Artificial Sequence
  Description of Artificial Sequence: Synthetic oligonucleotide
caucccaggcacaugcuac

SEQ ID NO: 1619335 - RNA, 19 nt, Artificial Sequence
  Description of Artificial Sequence: Synthetic oligonucleotide
acagagagacugucuaccu

SEQ ID NO: 1619336 - RNA, 19 nt, Artificial Sequence
  Description of Artificial Sequence: Synthetic oligonucleotide
augcccguaccacacgguc

SEQ ID NO: 1619337 - RNA, 19 nt, Artificial Sequence
  Description of Artificial Sequence: Synthetic oligonucleotide
ucucccuacugucuccugu

SEQ ID NO: 1619338 - RNA, 19 nt, Artificial Sequence
  Description of Artificial Sequence: Synthetic oligonucleotide
ggaaacguucuuguugugg

SEQ ID NO: 1619339 - RNA, 19 nt, Artificial Sequence
  Description of Artificial Sequence: Synthetic oligonucleotide
acggucuguguauccuacc

SEQ ID NO: 1619340 - RNA, 19 nt, Artificial Sequence
  Description of Artificial Sequence: Synthetic oligonucleotide
uguugcggcccucuuugca

SEQ ID NO: 1619341 - RNA, 19 nt, Artificial Sequence
  Description of Artificial Sequence: Synthetic oligonucleotide
caugcuaccaccuccucaa

SEQ ID NO: 1619342 - RNA, 19 nt, Artificial Sequence
  Description of Artificial Sequence: Synthetic oligonucleotide
caacgcaagucaacauucc

SEQ ID NO: 1619343 - RNA, 19 nt, Artificial Sequence
  Description of Artificial Sequence: Synthetic oligonucleotide
aaccccaacgcaagucaac

SEQ ID NO: 1619344 - RNA, 19 nt, Artificial Sequence
  Description of Artificial Sequence: Synthetic oligonucleotide
agcggaaugcccguaccac

SEQ ID NO: 1619345 - RNA, 19 nt, Artificial Sequence
  Description of Artificial Sequence: Synthetic oligonucleotide
ucccuacugucuccugugg

SEQ ID NO: 1619346 - RNA, 19 nt, Artificial Sequence
  Description of Artificial Sequence: Synthetic oligonucleotide
gacgccaugcgcuccagca

SEQ ID NO: 1619347 - RNA, 19 nt, Artificial Sequence
  Description of Artificial Sequence: Synthetic oligonucleotide
caggucgaauaagugaagc

SEQ ID NO: 1619348 - RNA, 19 nt, Artificial Sequence
  Description of Artificial Sequence: Synthetic oligonucleotide
agauccucgggaucuacau

SEQ ID NO: 1619349 - RNA, 19 nt, Artificial Sequence
  Description of Artificial Sequence: Synthetic oligonucleotide
uacagaccacaacagcuua

SEQ ID NO: 1619350 - RNA, 19 nt, Artificial Sequence
  Description of Artificial Sequence: Synthetic oligonucleotide
uuaggugaguggaaacguu

SEQ ID NO: 1619351 - RNA, 19 nt, Artificial Sequence
  Description of Artificial Sequence: Synthetic oligonucleotide
gaguaggauccuucagcag

SEQ ID NO: 1619352 - RNA, 19 nt, Artificial Sequence
  Description of Artificial Sequence: Synthetic oligonucleotide
uccaccuguacagaccaca

SEQ ID NO: 1619353 - RNA, 19 nt, Artificial Sequence
  Description of Artificial Sequence: Synthetic oligonucleotide
uggaagcgggaccacggug

SEQ ID NO: 1619354 - RNA, 19 nt, Artificial Sequence
  Description of Artificial Sequence: Synthetic oligonucleotide
gucaggucgaauaagugaa

SEQ ID NO: 1619355 - RNA, 19 nt, Artificial Sequence
  Description of Artificial Sequence: Synthetic oligonucleotide
guagaacugcauaagcaca

SEQ ID NO: 1619356 - RNA, 19 nt, Artificial Sequence
  Description of Artificial Sequence: Synthetic oligonucleotide
gauccucgggaucuacaug

SEQ ID NO: 1619357 - RNA, 19 nt, Artificial Sequence
  Description of Artificial Sequence: Synthetic oligonucleotide
ucuucccagcggaaugccc

SEQ ID NO: 1619358 - RNA, 19 nt, Artificial Sequence
  Description of Artificial Sequence: Synthetic oligonucleotide
agaggcccgaguuaccagu

SEQ ID NO: 1619359 - RNA, 19 nt, Artificial Sequence
  Description of Artificial Sequence: Synthetic oligonucleotide
agaacugcauaagcacauc

SEQ ID NO: 1619360 - RNA, 19 nt, Artificial Sequence
  Description of Artificial Sequence: Synthetic oligonucleotide
guggaaacguucuuguugu

SEQ ID NO: 1619361 - RNA, 19 nt, Artificial Sequence
  Description of Artificial Sequence: Synthetic oligonucleotide
ggucgaauaagugaagcca

SEQ ID NO: 1619362 - RNA, 19 nt, Artificial Sequence
  Description of Artificial Sequence: Synthetic oligonucleotide
ucuagggugcacagugcaa

SEQ ID NO: 1619363 - RNA, 19 nt, Artificial Sequence
  Description of Artificial Sequence: Synthetic oligonucleotide
ccuaccaccagcucguaac

SEQ ID NO: 1619364 - RNA, 19 nt, Artificial Sequence
  Description of Artificial Sequence: Synthetic oligonucleotide
aucccaguacacauagauc

SEQ ID NO: 1619365 - RNA, 19 nt, Artificial Sequence
  Description of Artificial Sequence: Synthetic oligonucleotide
gguuaguggacgccaugcg

SEQ ID NO: 1619366 - RNA, 19 nt, Artificial Sequence
  Description of Artificial Sequence: Synthetic oligonucleotide
acauuccccauccugccaa

SEQ ID NO: 1619367 - RNA, 19 nt, Artificial Sequence
  Description of Artificial Sequence: Synthetic oligonucleotide
uggugucucccaccuacca

SEQ ID NO: 1619368 - RNA, 19 nt, Artificial Sequence
  Description of Artificial Sequence: Synthetic oligonucleotide
gugaucaaugauauacguc

SEQ ID NO: 1619369 - RNA, 19 nt, Artificial Sequence
  Description of Artificial Sequence: Synthetic oligonucleotide
uacgucuguccaucccagg

SEQ ID NO: 1619370 - RNA, 19 nt, Artificial Sequence
  Description of Artificial Sequence: Synthetic oligonucleotide
gucgcugaucagcaugacc

SEQ ID NO: 1619371 - RNA, 19 nt, Artificial Sequence
  Description of Artificial Sequence: Synthetic oligonucleotide
ggcacaugcuaccaccucc

SEQ ID NO: 1619372 - RNA, 19 nt, Artificial Sequence
  Description of Artificial Sequence: Synthetic oligonucleotide
cagguacauaguagaacug

SEQ ID NO: 1619373 - RNA, 19 nt, Artificial Sequence
  Description of Artificial Sequence: Synthetic oligonucleotide
gugauccaccuguacagac

SEQ ID NO: 1619374 - RNA, 19 nt, Artificial Sequence
  Description of Artificial Sequence: Synthetic oligonucleotide
uguauccuaccaccagcuc

SEQ ID NO: 1619375 - RNA, 19 nt, Artificial Sequence
  Description of Artificial Sequence: Synthetic oligonucleotide
aggcucggauauuuucauc

SEQ ID NO: 1619376 - RNA, 19 nt, Artificial Sequence
  Description of Artificial Sequence: Synthetic oligonucleotide
uccccauccugccaagauc

SEQ ID NO: 1619377 - RNA, 19 nt, Artificial Sequence
  Description of Artificial Sequence: Synthetic oligonucleotide
cuaccaccuccucaagccc

SEQ ID NO: 1619378 - RNA, 19 nt, Artificial Sequence
  Description of Artificial Sequence: Synthetic oligonucleotide
guucgaguaggauccuuca

SEQ ID NO: 1619379 - RNA, 19 nt, Artificial Sequence
  Description of Artificial Sequence: Synthetic oligonucleotide
ccucuuugcaggcauacug

SEQ ID NO: 1619380 - RNA, 19 nt, Artificial Sequence
  Description of Artificial Sequence: Synthetic oligonucleotide
gaagccagcccucugcgcu

SEQ ID NO: 1619381 - RNA, 19 nt, Artificial Sequence
  Description of Artificial Sequence: Synthetic oligonucleotide
ugguagagugucuggugaa

SEQ ID NO: 1619382 - RNA, 19 nt, Artificial Sequence
  Description of Artificial Sequence: Synthetic oligonucleotide
cacggugcgguugugauca

SEQ ID NO: 1619383 - RNA, 19 nt, Artificial Sequence
  Description of Artificial Sequence: Synthetic oligonucleotide
acgcaagucaacauucccu

SEQ ID NO: 1619384 - RNA, 19 nt, Artificial Sequence
  Description of Artificial Sequence: Synthetic oligonucleotide
ccaacgcaagucaacauuc

SEQ ID NO: 1619385 - RNA, 19 nt, Artificial Sequence
  Description of Artificial Sequence: Synthetic oligonucleotide
uaccacacggucuguguau

SEQ ID NO: 1619386 - RNA, 19 nt, Artificial Sequence
  Description of Artificial Sequence: Synthetic oligonucleotide
gcuguugcggcccucuuug

SEQ ID NO: 1619387 - RNA, 19 nt, Artificial Sequence
  Description of Artificial Sequence: Synthetic oligonucleotide
uuggaagcgggaccacggu

SEQ ID NO: 1619388 - RNA, 19 nt, Artificial Sequence
  Description of Artificial Sequence: Synthetic oligonucleotide
cagagagacugucuaccug

SEQ ID NO: 1619389 - RNA, 19 nt, Artificial Sequence
  Description of Artificial Sequence: Synthetic oligonucleotide
aggcacaugcuaccaccuc

SEQ ID NO: 1619390 - RNA, 19 nt, Artificial Sequence
  Description of Artificial Sequence: Synthetic oligonucleotide
ugcccguaccacacggucu

SEQ ID NO: 1619391 - RNA, 19 nt, Artificial Sequence
  Description of Artificial Sequence: Synthetic oligonucleotide
agccaucucuucccagcgg

SEQ ID NO: 1619392 - RNA, 19 nt, Artificial Sequence
  Description of Artificial Sequence: Synthetic oligonucleotide
ccaagagucucauggugcc

SEQ ID NO: 1619393 - RNA, 19 nt, Artificial Sequence
  Description of Artificial Sequence: Synthetic oligonucleotide
cucccuacugucuccugug

SEQ ID NO: 1619394 - RNA, 19 nt, Artificial Sequence
  Description of Artificial Sequence: Synthetic oligonucleotide
caaagaggcccgaguuacc

SEQ ID NO: 1619395 - RNA, 19 nt, Artificial Sequence
  Description of Artificial Sequence: Synthetic oligonucleotide
uccugccaagaucauggau

SEQ ID NO: 1619396 - RNA, 19 nt, Artificial Sequence
  Description of Artificial Sequence: Synthetic oligonucleotide
cacggucuguguauccuac

SEQ ID NO: 1619397 - RNA, 19 nt, Artificial Sequence
  Description of Artificial Sequence: Synthetic oligonucleotide
aguggacgccaugcgcucc

SEQ ID NO: 1619398 - RNA, 19 nt, Artificial Sequence
  Description of Artificial Sequence: Synthetic oligonucleotide
augucaggucgaauaagug

SEQ ID NO: 1619399 - RNA, 19 nt, Artificial Sequence
  Description of Artificial Sequence: Synthetic oligonucleotide
caucccaguacacauagau

SEQ ID NO: 1619400 - RNA, 19 nt, Artificial Sequence
  Description of Artificial Sequence: Synthetic oligonucleotide
cacauccuggcugcgacac

SEQ ID NO: 1619401 - RNA, 19 nt, Artificial Sequence
  Description of Artificial Sequence: Synthetic oligonucleotide
agcccauugcccgugacau

SEQ ID NO: 1619402 - RNA, 19 nt, Artificial Sequence
  Description of Artificial Sequence: Synthetic oligonucleotide
ggugcagcacuaugucccg

SEQ ID NO: 1619403 - RNA, 19 nt, Artificial Sequence
  Description of Artificial Sequence: Synthetic oligonucleotide
gucucauggugcccagaag

SEQ ID NO: 1619404 - RNA, 19 nt, Artificial Sequence
  Description of Artificial Sequence: Synthetic oligonucleotide
cacaacaucccaguacaca

SEQ ID NO: 1619405 - RNA, 19 nt, Artificial Sequence
  Description of Artificial Sequence: Synthetic oligonucleotide
auacgucuguccaucccag

SEQ ID NO: 1619406 - RNA, 19 nt, Artificial Sequence
  Description of Artificial Sequence: Synthetic oligonucleotide
cccauugcccgugacaucc

SEQ ID NO: 1619407 - RNA, 19 nt, Artificial Sequence
  Description of Artificial Sequence: Synthetic oligonucleotide
ccaagaucauggaucacuc

SEQ ID NO: 1619408 - RNA, 19 nt, Artificial Sequence
  Description of Artificial Sequence: Synthetic oligonucleotide
accccaacgcaagucaaca

SEQ ID NO: 1619409 - RNA, 19 nt, Artificial Sequence
  Description of Artificial Sequence: Synthetic oligonucleotide
cagaccacaacagcuuauc

SEQ ID NO: 1619410 - RNA, 19 nt, Artificial Sequence
  Description of Artificial Sequence: Synthetic oligonucleotide
accacacggucuguguauc

SEQ ID NO: 1619411 - RNA, 19 nt, Artificial Sequence
  Description of Artificial Sequence: Synthetic oligonucleotide
accacggugcgguugugau

SEQ ID NO: 1619412 - RNA, 19 nt, Artificial Sequence
  Description of Artificial Sequence: Synthetic oligonucleotide
cuggugucucccaccuacc

SEQ ID NO: 1619413 - RNA, 19 nt, Artificial Sequence
  Description of Artificial Sequence: Synthetic oligonucleotide
ccgaguuaccaguuucagg

SEQ ID NO: 1619414 - RNA, 19 nt, Artificial Sequence
  Description of Artificial Sequence: Synthetic oligonucleotide
cauugcccgugacauccag

SEQ ID NO: 1619415 - RNA, 19 nt, Artificial Sequence
  Description of Artificial Sequence: Synthetic oligonucleotide
accuaccaguucauuuaac

SEQ ID NO: 1619416 - RNA, 19 nt, Artificial Sequence
  Description of Artificial Sequence: Synthetic oligonucleotide
aaugcccguaccacacggu

SEQ ID NO: 1619417 - RNA, 19 nt, Artificial Sequence
  Description of Artificial Sequence: Synthetic oligonucleotide
guccggaugguagaguguc

SEQ ID NO: 1619418 - RNA, 19 nt, Artificial Sequence
  Description of Artificial Sequence: Synthetic oligonucleotide
gguagagugucuggugaag

SEQ ID NO: 1619419 - RNA, 19 nt, Artificial Sequence
  Description of Artificial Sequence: Synthetic oligonucleotide
uuaccaguuucaggguuau

SEQ ID NO: 1619420 - RNA, 19 nt, Artificial Sequence
  Description of Artificial Sequence: Synthetic oligonucleotide
agcgggaccacggugcggu

SEQ ID NO: 1619421 - RNA, 19 nt, Artificial Sequence
  Description of Artificial Sequence: Synthetic oligonucleotide
gacauacaccaggcagggg

SEQ ID NO: 1619422 - RNA, 19 nt, Artificial Sequence
  Description of Artificial Sequence: Synthetic oligonucleotide
ggucuguguauccuaccac

SEQ ID NO: 1619423 - RNA, 19 nt, Artificial Sequence
  Description of Artificial Sequence: Synthetic oligonucleotide
cccggggucacagagagac

SEQ ID NO: 1619424 - RNA, 19 nt, Artificial Sequence
  Description of Artificial Sequence: Synthetic oligonucleotide
ggaugucaggucgaauaag

SEQ ID NO: 1619425 - RNA, 19 nt, Artificial Sequence
  Description of Artificial Sequence: Synthetic oligonucleotide
gcccgugacauccagcuuc

SEQ ID NO: 1619426 - RNA, 19 nt, Artificial Sequence
  Description of Artificial Sequence: Synthetic oligonucleotide
agacugucuaccugaccuu

SEQ ID NO: 1619427 - RNA, 19 nt, Artificial Sequence
  Description of Artificial Sequence: Synthetic oligonucleotide
cgcaagucaacauucccug

SEQ ID NO: 1619428 - RNA, 19 nt, Artificial Sequence
  Description of Artificial Sequence: Synthetic oligonucleotide
cuagggugcacagugcaaa

SEQ ID NO: 1619429 - RNA, 19 nt, Artificial Sequence
  Description of Artificial Sequence: Synthetic oligonucleotide
uaguggacgccaugcgcuc

SEQ ID NO: 1619430 - RNA, 19 nt, Artificial Sequence
  Description of Artificial Sequence: Synthetic oligonucleotide
caccagguucuuuccuuug

SEQ ID NO: 1619431 - RNA, 19 nt, Artificial Sequence
  Description of Artificial Sequence: Synthetic oligonucleotide
aggaggcuuguugguacuc

SEQ ID NO: 1619432 - RNA, 19 nt, Artificial Sequence
  Description of Artificial Sequence: Synthetic oligonucleotide
gagagacugucuaccugac

SEQ ID NO: 1619433 - RNA, 19 nt, Artificial Sequence
  Description of Artificial Sequence: Synthetic oligonucleotide
guggccaagcccagcuagg

SEQ ID NO: 1619434 - RNA, 19 nt, Artificial Sequence
  Description of Artificial Sequence: Synthetic oligonucleotide
uucccagcggaaugcccgu

SEQ ID NO: 1619435 - RNA, 19 nt, Artificial Sequence
  Description of Artificial Sequence: Synthetic oligonucleotide
guuaccaguuucaggguua

SEQ ID NO: 1619436 - RNA, 19 nt, Artificial Sequence
  Description of Artificial Sequence: Synthetic oligonucleotide
cuaccaccagcucguaaca

SEQ ID NO: 1619437 - RNA, 19 nt, Artificial Sequence
  Description of Artificial Sequence: Synthetic oligonucleotide
aggcacacccagaggcccc

SEQ ID NO: 1619438 - RNA, 19 nt, Artificial Sequence
  Description of Artificial Sequence: Synthetic oligonucleotide
acacggucuguguauccua

SEQ ID NO: 1619439 - RNA, 19 nt, Artificial Sequence
  Description of Artificial Sequence: Synthetic oligonucleotide
gucugguccggaugguaga

SEQ ID NO: 1619440 - RNA, 19 nt, Artificial Sequence
  Description of Artificial Sequence: Synthetic oligonucleotide
gguucgaguaggauccuuc

SEQ ID NO: 1619441 - RNA, 19 nt, Artificial Sequence
  Description of Artificial Sequence: Synthetic oligonucleotide
ccggccagaugucuggugc

SEQ ID NO: 1619442 - RNA, 19 nt, Artificial Sequence
  Description of Artificial Sequence: Synthetic oligonucleotide
gccccggggucacagagag

SEQ ID NO: 1619443 - RNA, 19 nt, Artificial Sequence
  Description of Artificial Sequence: Synthetic oligonucleotide
guaccacacggucugugua

SEQ ID NO: 1619444 - RNA, 19 nt, Artificial Sequence
  Description of Artificial Sequence: Synthetic oligonucleotide
aagcgggaccacggugcgg

SEQ ID NO: 1619445 - RNA, 19 nt, Artificial Sequence
  Description of Artificial Sequence: Synthetic oligonucleotide
cagacaguuuuccacuggu

SEQ ID NO: 1619446 - RNA, 19 nt, Artificial Sequence
  Description of Artificial Sequence: Synthetic oligonucleotide
gcccguaccacacggucug

SEQ ID NO: 1619447 - RNA, 19 nt, Artificial Sequence
  Description of Artificial Sequence: Synthetic oligonucleotide
gcgguugugaucaaugaua

SEQ ID NO: 1619448 - RNA, 19 nt, Artificial Sequence
  Description of Artificial Sequence: Synthetic oligonucleotide
ccaagcccagcuagguggg

SEQ ID NO: 1619449 - RNA, 19 nt, Artificial Sequence
  Description of Artificial Sequence: Synthetic oligonucleotide
cagcagguuaguggacgcc

SEQ ID NO: 1619450 - RNA, 19 nt, Artificial Sequence
  Description of Artificial Sequence: Synthetic oligonucleotide
ccuuuguuacacacaucuc

SEQ ID NO: 1619451 - RNA, 19 nt, Artificial Sequence
  Description of Artificial Sequence: Synthetic oligonucleotide
cauccuggcugcgacacaa

SEQ ID NO: 1619452 - RNA, 19 nt, Artificial Sequence
  Description of Artificial Sequence: Synthetic oligonucleotide
gcucggauauuuucaucca

SEQ ID NO: 1619453 - RNA, 19 nt, Artificial Sequence
  Description of Artificial Sequence: Synthetic oligonucleotide
guguauccuaccaccagcu

SEQ ID NO: 1619454 - RNA, 19 nt, Artificial Sequence
  Description of Artificial Sequence: Synthetic oligonucleotide
acagaccacaacagcuuau

SEQ ID NO: 1619455 - RNA, 19 nt, Artificial Sequence
  Description of Artificial Sequence: Synthetic oligonucleotide
cagcacuaugucccgggca

SEQ ID NO: 1619456 - RNA, 19 nt, Artificial Sequence
  Description of Artificial Sequence: Synthetic oligonucleotide
caguuuuccacuggugucu

SEQ ID NO: 1619457 - RNA, 19 nt, Artificial Sequence
  Description of Artificial Sequence: Synthetic oligonucleotide
cagugcaaagaggcccgag

SEQ ID NO: 1619458 - RNA, 19 nt, Artificial Sequence
  Description of Artificial Sequence: Synthetic oligonucleotide
gccaagaucauggaucacu

SEQ ID NO: 1619459 - RNA, 19 nt, Artificial Sequence
  Description of Artificial Sequence: Synthetic oligonucleotide
ugucgcugaucagcaugac

SEQ ID NO: 1619460 - RNA, 19 nt, Artificial Sequence
  Description of Artificial Sequence: Synthetic oligonucleotide
cagcggaaugcccguacca

SEQ ID NO: 1619461 - RNA, 19 nt, Artificial Sequence
  Description of Artificial Sequence: Synthetic oligonucleotide
agggccggcugucaucauu

SEQ ID NO: 1619462 - RNA, 19 nt, Artificial Sequence
  Description of Artificial Sequence: Synthetic oligonucleotide
gcagcacuaugucccgggc

SEQ ID NO: 1619463 - RNA, 19 nt, Artificial Sequence
  Description of Artificial Sequence: Synthetic oligonucleotide
auccaccuguacagaccac

SEQ ID NO: 1619464 - RNA, 19 nt, Artificial Sequence
  Description of Artificial Sequence: Synthetic oligonucleotide
cagagcuuugguggauguc

SEQ ID NO: 1619465 - RNA, 19 nt, Artificial Sequence
  Description of Artificial Sequence: Synthetic oligonucleotide
ccaauuaggugaguggaaa

SEQ ID NO: 1619466 - RNA, 19 nt, Artificial Sequence
  Description of Artificial Sequence: Synthetic oligonucleotide
ccaccuaccaguucauuua

SEQ ID NO: 1619467 - RNA, 19 nt, Artificial Sequence
  Description of Artificial Sequence: Synthetic oligonucleotide
guacagaccacaacagcuu

SEQ ID NO: 1619468 - RNA, 19 nt, Artificial Sequence
  Description of Artificial Sequence: Synthetic oligonucleotide
ggccaagcccagcuaggug

SEQ ID NO: 1619469 - RNA, 19 nt, Artificial Sequence
  Description of Artificial Sequence: Synthetic oligonucleotide
gucucccuacugucuccug

SEQ ID NO: 1619470 - RNA, 19 nt, Artificial Sequence
  Description of Artificial Sequence: Synthetic oligonucleotide
augucccgggcagcugggg

SEQ ID NO: 1619471 - RNA, 19 nt, Artificial Sequence
  Description of Artificial Sequence: Synthetic oligonucleotide
cggaugguagagugucugg

SEQ ID NO: 1619472 - RNA, 19 nt, Artificial Sequence
  Description of Artificial Sequence: Synthetic oligonucleotide
ggauccggccagaugucug

SEQ ID NO: 1619473 - RNA, 19 nt, Artificial Sequence
  Description of Artificial Sequence: Synthetic oligonucleotide
ggguuauggccuugcuuga

SEQ ID NO: 1619474 - RNA, 19 nt, Artificial Sequence
  Description of Artificial Sequence: Synthetic oligonucleotide
ccagcggaaugcccguacc

SEQ ID NO: 1619475 - RNA, 19 nt, Artificial Sequence
  Description of Artificial Sequence: Synthetic oligonucleotide
cuugcuugauguugccaau

SEQ ID NO: 1619476 - RNA, 19 nt, Artificial Sequence
  Description of Artificial Sequence: Synthetic oligonucleotide
gaccacggugcgguuguga

SEQ ID NO: 1619477 - RNA, 19 nt, Artificial Sequence
  Description of Artificial Sequence: Synthetic oligonucleotide
uucaggcgccucagccauc

SEQ ID NO: 1619478 - RNA, 19 nt, Artificial Sequence
  Description of Artificial Sequence: Synthetic oligonucleotide
guguuagcugggaugugcu

SEQ ID NO: 1619479 - RNA, 19 nt, Artificial Sequence
  Description of Artificial Sequence: Synthetic oligonucleotide
ugcccgugacauccagcuu

SEQ ID NO: 1619480 - RNA, 19 nt, Artificial Sequence
  Description of Artificial Sequence: Synthetic oligonucleotide
acagugcaaagaggcccga

SEQ ID NO: 1619481 - RNA, 19 nt, Artificial Sequence
  Description of Artificial Sequence: Synthetic oligonucleotide
cccgaguuaccaguuucag

SEQ ID NO: 1619482 - RNA, 19 nt, Artificial Sequence
  Description of Artificial Sequence: Synthetic oligonucleotide
ccggaugguagagugucug

SEQ ID NO: 1619483 - RNA, 19 nt, Artificial Sequence
  Description of Artificial Sequence: Synthetic oligonucleotide
gucucccaccuaccaguuc

SEQ ID NO: 1619484 - RNA, 19 nt, Artificial Sequence
  Description of Artificial Sequence: Synthetic oligonucleotide
ggaugguagagugucuggu

SEQ ID NO: 1619485 - RNA, 19 nt, Artificial Sequence
  Description of Artificial Sequence: Synthetic oligonucleotide
gcuuguugguacucaggcu

SEQ ID NO: 1619486 - RNA, 19 nt, Artificial Sequence
  Description of Artificial Sequence: Synthetic oligonucleotide
gguugugaucaaugauaua

SEQ ID NO: 1619487 - RNA, 19 nt, Artificial Sequence
  Description of Artificial Sequence: Synthetic oligonucleotide
gagucucauggugcccaga

SEQ ID NO: 1619488 - RNA, 19 nt, Artificial Sequence
  Description of Artificial Sequence: Synthetic oligonucleotide
guggauccggccagauguc

SEQ ID NO: 1619489 - RNA, 19 nt, Artificial Sequence
  Description of Artificial Sequence: Synthetic oligonucleotide
cugcacagaaggcucggau

SEQ ID NO: 1619490 - RNA, 19 nt, Artificial Sequence
  Description of Artificial Sequence: Synthetic oligonucleotide
ggagauccucgggaucuac

SEQ ID NO: 1619491 - RNA, 19 nt, Artificial Sequence
  Description of Artificial Sequence: Synthetic oligonucleotide
cacccgucuccaucaaugu

SEQ ID NO: 1619492 - RNA, 19 nt, Artificial Sequence
  Description of Artificial Sequence: Synthetic oligonucleotide
cacuuggaagcgggaccac

SEQ ID NO: 1619493 - RNA, 19 nt, Artificial Sequence
  Description of Artificial Sequence: Synthetic oligonucleotide
auccggccagaugucuggu

SEQ ID NO: 1619494 - RNA, 19 nt, Artificial Sequence
  Description of Artificial Sequence: Synthetic oligonucleotide
ccacuuggaagcgggacca

SEQ ID NO: 1619495 - RNA, 19 nt, Artificial Sequence
  Description of Artificial Sequence: Synthetic oligonucleotide
gccaauuaggugaguggaa

SEQ ID NO: 1619496 - RNA, 19 nt, Artificial Sequence
  Description of Artificial Sequence: Synthetic oligonucleotide
ggcugcgacacaaccagcu

SEQ ID NO: 1619497 - RNA, 19 nt, Artificial Sequence
  Description of Artificial Sequence: Synthetic oligonucleotide
ggggcgacacugugguguc

SEQ ID NO: 1619498 - RNA, 19 nt, Artificial Sequence
  Description of Artificial Sequence: Synthetic oligonucleotide
caggguuauggccuugcuu

SEQ ID NO: 1619499 - RNA, 19 nt, Artificial Sequence
  Description of Artificial Sequence: Synthetic oligonucleotide
cccagcggaaugcccguac

SEQ ID NO: 1619500 - RNA, 19 nt, Artificial Sequence
  Description of Artificial Sequence: Synthetic oligonucleotide
cacuaugucccgggcagcu

SEQ ID NO: 1619501 - RNA, 19 nt, Artificial Sequence
  Description of Artificial Sequence: Synthetic oligonucleotide
cagcaggcuagguggccaa

SEQ ID NO: 1619502 - RNA, 19 nt, Artificial Sequence
  Description of Artificial Sequence: Synthetic oligonucleotide
caggaggcuuguugguacu

SEQ ID NO: 1619503 - RNA, 19 nt, Artificial Sequence
  Description of Artificial Sequence: Synthetic oligonucleotide
gcacaacaucccaguacac

SEQ ID NO: 1619504 - RNA, 19 nt, Artificial Sequence
  Description of Artificial Sequence: Synthetic oligonucleotide
gugucugguccggauggua

SEQ ID NO: 1619505 - RNA, 19 nt, Artificial Sequence
  Description of Artificial Sequence: Synthetic oligonucleotide
gcacuaugucccgggcagc

SEQ ID NO: 1619506 - RNA, 19 nt, Artificial Sequence
  Description of Artificial Sequence: Synthetic oligonucleotide
cugcgcugacugccaccac

SEQ ID NO: 1619507 - RNA, 19 nt, Artificial Sequence
  Description of Artificial Sequence: Synthetic oligonucleotide
ccacggugcgguugugauc

SEQ ID NO: 1619508 - RNA, 19 nt, Artificial Sequence
  Description of Artificial Sequence: Synthetic oligonucleotide
caaugucgcugaucagcau

SEQ ID NO: 1619509 - RNA, 19 nt, Artificial Sequence
  Description of Artificial Sequence: Synthetic oligonucleotide
cgguugugaucaaugauau

SEQ ID NO: 1619510 - RNA, 19 nt, Artificial Sequence
  Description of Artificial Sequence: Synthetic oligonucleotide
guuguggauccggccagau

SEQ ID NO: 1619511 - RNA, 19 nt, Artificial Sequence
  Description of Artificial Sequence: Synthetic oligonucleotide
cccaacgcaagucaacauu

SEQ ID NO: 1619512 - RNA, 19 nt, Artificial Sequence
  Description of Artificial Sequence: Synthetic oligonucleotide
ccguaccacacggucugug

SEQ ID NO: 1619513 - RNA, 19 nt, Artificial Sequence
  Description of Artificial Sequence: Synthetic oligonucleotide
cuccaaccccaacgcaagu

SEQ ID NO: 1619514 - RNA, 19 nt, Artificial Sequence
  Description of Artificial Sequence: Synthetic oligonucleotide
gcccauugcccgugacauc

SEQ ID NO: 1619515 - RNA, 19 nt, Artificial Sequence
  Description of Artificial Sequence: Synthetic oligonucleotide
cacggacugcagggagauc

SEQ ID NO: 1619516 - RNA, 19 nt, Artificial Sequence
  Description of Artificial Sequence: Synthetic oligonucleotide
acggugcgguugugaucaa

SEQ ID NO: 1619517 - RNA, 19 nt, Artificial Sequence
  Description of Artificial Sequence: Synthetic oligonucleotide
gguuauggccuugcuugau

SEQ ID NO: 1619518 - RNA, 19 nt, Artificial Sequence
  Description of Artificial Sequence: Synthetic oligonucleotide
ccagagcuuugguggaugu

SEQ ID NO: 1619519 - RNA, 19 nt, Artificial Sequence
  Description of Artificial Sequence: Synthetic oligonucleotide
gcgccucagccaucucuuc

SEQ ID NO: 1619520 - RNA, 19 nt, Artificial Sequence
  Description of Artificial Sequence: Synthetic oligonucleotide
cacuggugucucccaccua

SEQ ID NO: 1619521 - RNA, 19 nt, Artificial Sequence
  Description of Artificial Sequence: Synthetic oligonucleotide
gguccggaugguagagugu

SEQ ID NO: 1619522 - RNA, 19 nt, Artificial Sequence
  Description of Artificial Sequence: Synthetic oligonucleotide
ccauugcccgugacaucca

SEQ ID NO: 1619523 - RNA, 19 nt, Artificial Sequence
  Description of Artificial Sequence: Synthetic oligonucleotide
ggcuguugcggcccucuuu

SEQ ID NO: 1619524 - RNA, 19 nt, Artificial Sequence
  Description of Artificial Sequence: Synthetic oligonucleotide
cccaguacacauagaucuu

SEQ ID NO: 1619525 - RNA, 19 nt, Artificial Sequence
  Description of Artificial Sequence: Synthetic oligonucleotide
ccugcacagaaggcucgga

SEQ ID NO: 1619526 - RNA, 19 nt, Artificial Sequence
  Description of Artificial Sequence: Synthetic oligonucleotide
cacagaaggcucggauauu

SEQ ID NO: 1619527 - RNA, 19 nt, Artificial Sequence
  Description of Artificial Sequence: Synthetic oligonucleotide
ggccccggggucacagaga

SEQ ID NO: 1619528 - RNA, 19 nt, Artificial Sequence
  Description of Artificial Sequence: Synthetic oligonucleotide
ggccggcugucaucauucu

SEQ ID NO: 1619529 - RNA, 19 nt, Artificial Sequence
  Description of Artificial Sequence: Synthetic oligonucleotide
ccguguccuuguuccaggu

SEQ ID NO: 1619530 - RNA, 19 nt, Artificial Sequence
  Description of Artificial Sequence: Synthetic oligonucleotide
ccccaacgcaagucaacau

SEQ ID NO: 1619531 - RNA, 19 nt, Artificial Sequence
  Description of Artificial Sequence: Synthetic oligonucleotide
ggguucgaguaggauccuu

SEQ ID NO: 1619532 - RNA, 19 nt, Artificial Sequence
  Description of Artificial Sequence: Synthetic oligonucleotide
gggguucgaguaggauccu

SEQ ID NO: 1619533 - RNA, 19 nt, Artificial Sequence
  Description of Artificial Sequence: Synthetic oligonucleotide
gggagcccguguccuuguu

SEQ ID NO: 1619534 - RNA, 19 nt, Artificial Sequence
  Description of Artificial Sequence: Synthetic oligonucleotide
gggcgacacuguggugucu

SEQ ID NO: 1619535 - RNA, 19 nt, Artificial Sequence
  Description of Artificial Sequence: Synthetic oligonucleotide
cccguaccacacggucugu

SEQ ID NO: 1619536 - RNA, 19 nt, Artificial Sequence
  Description of Artificial Sequence: Synthetic oligonucleotide
gcgggaccacggugcgguu

SEQ ID NO: 1619537 - RNA, 19 nt, Artificial Sequence
  Description of Artificial Sequence: Synthetic oligonucleotide
aaaugguucucacacagcg

SEQ ID NO: 1619538 - RNA, 19 nt, Artificial Sequence
  Description of Artificial Sequence: Synthetic oligonucleotide
auagguuuauugcaggagc

SEQ ID NO: 1619539 - RNA, 19 nt, Artificial Sequence
  Description of Artificial Sequence: Synthetic oligonucleotide
aagcaaacgaucuagcuca

SEQ ID NO: 1619540 - RNA, 19 nt, Artificial Sequence
  Description of Artificial Sequence: Synthetic oligonucleotide
uguaguuauccaaaauggg

SEQ ID NO: 1619541 - RNA, 19 nt, Artificial Sequence
  Description of Artificial Sequence: Synthetic oligonucleotide
uaguuauccaaaauggggc

SEQ ID NO: 1619542 - RNA, 19 nt, Artificial Sequence
  Description of Artificial Sequence: Synthetic oligonucleotide
agucuauccaacucgagag

SEQ ID NO: 1619543 - RNA, 19 nt, Artificial Sequence
  Description of Artificial Sequence: Synthetic oligonucleotide
  modified_base (2)..(2): a, c, u, g, unknown or other
anaguguugggucccuuuc

SEQ ID NO: 1619544 - RNA, 19 nt, Artificial Sequence
  Description of Artificial Sequence: Synthetic oligonucleotide
aagggcgcgagacauuccc

SEQ ID NO: 1619545 - RNA, 19 nt, Artificial Sequence
  Description of Artificial Sequence: Synthetic oligonucleotide
gaagcgacggcccagagca

SEQ ID NO: 1619546 - RNA, 19 nt, Artificial Sequence
  Description of Artificial Sequence: Synthetic oligonucleotide
aauagguuuauugcaggag

SEQ ID NO: 1619547 - RNA, 19 nt, Artificial Sequence
  Description of Artificial Sequence: Synthetic oligonucleotide
aggguuguggaacauccgc

SEQ ID NO: 1619548 - RNA, 19 nt, Artificial Sequence
  Description of Artificial Sequence: Synthetic oligonucleotide
aaccuaggguaccuuaggg

SEQ ID NO: 1619549 - RNA, 19 nt, Artificial Sequence
  Description of Artificial Sequence: Synthetic oligonucleotide
gaugccaucagucuaucca

SEQ ID NO: 1619550 - RNA, 19 nt, Artificial Sequence
  Description of Artificial Sequence: Synthetic oligonucleotide
cagccaucuuacuagaugg

SEQ ID NO: 1619551 - RNA, 19 nt, Artificial Sequence
  Description of Artificial Sequence: Synthetic oligonucleotide
ucacaaaugggucuucgga

SEQ ID NO: 1619552 - RNA, 19 nt, Artificial Sequence
  Description of Artificial Sequence: Synthetic oligonucleotide
caaacgaucuagcucacag

SEQ ID NO: 1619553 - RNA, 19 nt, Artificial Sequence
  Description of Artificial Sequence: Synthetic oligonucleotide
uuuaugucggauggguugg

SEQ ID NO: 1619554 - RNA, 19 nt, Artificial Sequence
  Description of Artificial Sequence: Synthetic oligonucleotide
uuaaguuccugaagcaaac

SEQ ID NO: 1619555 - RNA, 19 nt, Artificial Sequence
  Description of Artificial Sequence: Synthetic oligonucleotide
gacauuaucucaucuguga

SEQ ID NO: 1619556 - RNA, 19 nt, Artificial Sequence
  Description of Artificial Sequence: Synthetic oligonucleotide
uuuauugcaggagccacag

SEQ ID NO: 1619557 - RNA, 19 nt, Artificial Sequence
  Description of Artificial Sequence: Synthetic oligonucleotide
ggcauuaaguuccugaagc

SEQ ID NO: 1619558 - RNA, 19 nt, Artificial Sequence
  Description of Artificial Sequence: Synthetic oligonucleotide
agacgaagcagucugggug

SEQ ID NO: 1619559 - RNA, 19 nt, Artificial Sequence
  Description of Artificial Sequence: Synthetic oligonucleotide
uaaacuggguggcauuaag

SEQ ID NO: 1619560 - RNA, 19 nt, Artificial Sequence
  Description of Artificial Sequence: Synthetic oligonucleotide
uagguuuauugcaggagcc

SEQ ID NO: 1619561 - RNA, 19 nt, Artificial Sequence
  Description of Artificial Sequence: Synthetic oligonucleotide
uagcacucggggcaaaagg

SEQ ID NO: 1619562 - RNA, 19 nt, Artificial Sequence
  Description of Artificial Sequence: Synthetic oligonucleotide
ggugaagugauccgggugg

SEQ ID NO: 1619563 - RNA, 19 nt, Artificial Sequence
  Description of Artificial Sequence: Synthetic oligonucleotide
cacaaaugggucuucggag

SEQ ID NO: 1619564 - RNA, 19 nt, Artificial Sequence
  Description of Artificial Sequence: Synthetic oligonucleotide
accacggcgacugaggucg

SEQ ID NO: 1619565 - RNA, 19 nt, Artificial Sequence
  Description of Artificial Sequence: Synthetic oligonucleotide
ugaagcaaacgaucuagcu

SEQ ID NO: 1619566 - RNA, 19 nt, Artificial Sequence
  Description of Artificial Sequence: Synthetic oligonucleotide
cucgaaguagcacucgggg

SEQ ID NO: 1619567 - RNA, 19 nt, Artificial Sequence
  Description of Artificial Sequence: Synthetic oligonucleotide
aacuggguggcauuaaguu

SEQ ID NO: 1619568 - RNA, 19 nt, Artificial Sequence
  Description of Artificial Sequence: Synthetic oligonucleotide
agacauucccugcagacga

SEQ ID NO: 1619569 - RNA, 19 nt, Artificial Sequence
  Description of Artificial Sequence: Synthetic oligonucleotide
ugauguuaaacuggguggc

SEQ ID NO: 1619570 - RNA, 19 nt, Artificial Sequence
  Description of Artificial Sequence: Synthetic oligonucleotide
caucuuacuagaugggaac

SEQ ID NO: 1619571 - RNA, 19 nt, Artificial Sequence
  Description of Artificial Sequence: Synthetic oligonucleotide
aggaugucagccgaagagc

SEQ ID NO: 1619572 - RNA, 19 nt, Artificial Sequence
  Description of Artificial Sequence: Synthetic oligonucleotide
  modified_base (6)..(6): a, c, u, g, unknown or other
uuuuanaguguuggguccc

SEQ ID NO: 1619573 - RNA, 19 nt, Artificial Sequence
  Description of Artificial Sequence: Synthetic oligonucleotide
uagaugggaacugagacau

SEQ ID NO: 1619574 - RNA, 19 nt, Artificial Sequence
  Description of Artificial Sequence: Synthetic oligonucleotide
ucuauccaacucgagagug

SEQ ID NO: 1619575 - RNA, 19 nt, Artificial Sequence
  Description of Artificial Sequence: Synthetic oligonucleotide
uuccugaagcaaacgaucu

SEQ ID NO: 1619576 - RNA, 19 nt, Artificial Sequence
  Description of Artificial Sequence: Synthetic oligonucleotide
uuagggguaggucucucca

SEQ ID NO: 1619577 - RNA, 19 nt, Artificial Sequence
  Description of Artificial Sequence: Synthetic oligonucleotide
agugcggagauguaguuau

SEQ ID NO: 1619578 - RNA, 19 nt, Artificial Sequence
  Description of Artificial Sequence: Synthetic oligonucleotide
ucagccgaagagcuucagg

SEQ ID NO: 1619579 - RNA, 19 nt, Artificial Sequence
  Description of Artificial Sequence: Synthetic oligonucleotide
uggcaguaaggcuugccgg

SEQ ID NO: 1619580 - RNA, 19 nt, Artificial Sequence
  Description of Artificial Sequence: Synthetic oligonucleotide
aaggcaguaaccauuuuau

SEQ ID NO: 1619581 - RNA, 19 nt, Artificial Sequence
  Description of Artificial Sequence: Synthetic oligonucleotide
agaagggcaccccucuugg

SEQ ID NO: 1619582 - RNA, 19 nt, Artificial Sequence
  Description of Artificial Sequence: Synthetic oligonucleotide
ugucggauggguugguugc

SEQ ID NO: 1619583 - RNA, 19 nt, Artificial Sequence
  Description of Artificial Sequence: Synthetic oligonucleotide
aaggcuugccggcacgcuc

SEQ ID NO: 1619584 - RNA, 19 nt, Artificial Sequence
  Description of Artificial Sequence: Synthetic oligonucleotide
uggcauuaaguuccugaag

SEQ ID NO: 1619585 - RNA, 19 nt, Artificial Sequence
  Description of Artificial Sequence: Synthetic oligonucleotide
aaugguucucacacagcgg

SEQ ID NO: 1619586 - RNA, 19 nt, Artificial Sequence
  Description of Artificial Sequence: Synthetic oligonucleotide
ugccagagcgcgcugagug

SEQ ID NO: 1619587 - RNA, 19 nt, Artificial Sequence
  Description of Artificial Sequence: Synthetic oligonucleotide
cuauccaacucgagagugg

SEQ ID NO: 1619588 - RNA, 19 nt, Artificial Sequence
  Description of Artificial Sequence: Synthetic oligonucleotide
agaaggugcaggugaagug

SEQ ID NO: 1619589 - RNA, 19 nt, Artificial Sequence
  Description of Artificial Sequence: Synthetic oligonucleotide
agagccguuaccacuugcc

SEQ ID NO: 1619590 - RNA, 19 nt, Artificial Sequence
  Description of Artificial Sequence: Synthetic oligonucleotide
aagggcaccccucuugggu

SEQ ID NO: 1619591 - RNA, 19 nt, Artificial Sequence
  Description of Artificial Sequence: Synthetic oligonucleotide
ucuuacuagaugggaacug

SEQ ID NO: 1619592 - RNA, 19 nt, Artificial Sequence
  Description of Artificial Sequence: Synthetic oligonucleotide
ucuucggagacuucguuuu

SEQ ID NO: 1619593 - RNA, 19 nt, Artificial Sequence
  Description of Artificial Sequence: Synthetic oligonucleotide
aaaagggagccccauccuu

SEQ ID NO: 1619594 - RNA, 19 nt, Artificial Sequence
  Description of Artificial Sequence: Synthetic oligonucleotide
ggagacuucguuuuggaga

SEQ ID NO: 1619595 - RNA, 19 nt, Artificial Sequence
  Description of Artificial Sequence: Synthetic oligonucleotide
agaagggcgcgagacauuc

SEQ ID NO: 1619596 - RNA, 19 nt, Artificial Sequence
  Description of Artificial Sequence: Synthetic oligonucleotide
uccgcugcaaaggaagugc

SEQ ID NO: 1619597 - RNA, 19 nt, Artificial Sequence
  Description of Artificial Sequence: Synthetic oligonucleotide
gcaguaaccauuuuauguc

SEQ ID NO: 1619598 - RNA, 19 nt, Artificial Sequence
  Description of Artificial Sequence: Synthetic oligonucleotide
aguaaggcuugccggcacg

SEQ ID NO: 1619599 - RNA, 19 nt, Artificial Sequence
  Description of Artificial Sequence: Synthetic oligonucleotide
ucuuggguggagcucgcca

SEQ ID NO: 1619600 - RNA, 19 nt, Artificial Sequence
  Description of Artificial Sequence: Synthetic oligonucleotide
ggaacauccgcugcaaagg

SEQ ID NO: 1619601 - RNA, 19 nt, Artificial Sequence
  Description of Artificial Sequence: Synthetic oligonucleotide
aacugagacauuaucucau

SEQ ID NO: 1619602 - RNA, 19 nt, Artificial Sequence
  Description of Artificial Sequence: Synthetic oligonucleotide
ucaguuugguccuccuucu

SEQ ID NO: 1619603 - RNA, 19 nt, Artificial Sequence
  Description of Artificial Sequence: Synthetic oligonucleotide
ugguucuggacacgaaagu

SEQ ID NO: 1619604 - RNA, 19 nt, Artificial Sequence
  Description of Artificial Sequence: Synthetic oligonucleotide
gcaaaagggagccccaucc

SEQ ID NO: 1619605 - RNA, 19 nt, Artificial Sequence
  Description of Artificial Sequence: Synthetic oligonucleotide
ucagucuauccaacucgag

SEQ ID NO: 1619606 - RNA, 19 nt, Artificial Sequence
  Description of Artificial Sequence: Synthetic oligonucleotide
cagcaugguguccagacug

SEQ ID NO: 1619607 - RNA, 19 nt, Artificial Sequence
  Description of Artificial Sequence: Synthetic oligonucleotide
uggggagaagcgcucgaag

SEQ ID NO: 1619608 - RNA, 19 nt, Artificial Sequence
  Description of Artificial Sequence: Synthetic oligonucleotide
gaaggugcaggugaaguga

SEQ ID NO: 1619609 - RNA, 19 nt, Artificial Sequence
  Description of Artificial Sequence: Synthetic oligonucleotide
acauccgcugcaaaggaag

SEQ ID NO: 1619610 - RNA, 19 nt, Artificial Sequence
  Description of Artificial Sequence: Synthetic oligonucleotide
cuuagggguaggucucucc

SEQ ID NO: 1619611 - RNA, 19 nt, Artificial Sequence
  Description of Artificial Sequence: Synthetic oligonucleotide
cuagggaucuggaggacuc

SEQ ID NO: 1619612 - RNA, 19 nt, Artificial Sequence
  Description of Artificial Sequence: Synthetic oligonucleotide
aaugggucuucggagacuu

SEQ ID NO: 1619613 - RNA, 19 nt, Artificial Sequence
  Description of Artificial Sequence: Synthetic oligonucleotide
uggaaaugguucucacaca

SEQ ID NO: 1619614 - RNA, 19 nt, Artificial Sequence
  Description of Artificial Sequence: Synthetic oligonucleotide
aaacuggguggcauuaagu

SEQ ID NO: 1619615 - RNA, 19 nt, Artificial Sequence
  Description of Artificial Sequence: Synthetic oligonucleotide
guuguggaacauccgcugc

SEQ ID NO: 1619616 - RNA, 19 nt, Artificial Sequence
  Description of Artificial Sequence: Synthetic oligonucleotide
uaggguaccuuagggguag

SEQ ID NO: 1619617 - RNA, 19 nt, Artificial Sequence
  Description of Artificial Sequence: Synthetic oligonucleotide
gagccguuaccacuugccc

SEQ ID NO: 1619618 - RNA, 19 nt, Artificial Sequence
  Description of Artificial Sequence: Synthetic oligonucleotide
aacucgagaguggcugagg

SEQ ID NO: 1619619 - RNA, 19 nt, Artificial Sequence
  Description of Artificial Sequence: Synthetic oligonucleotide
acguggcacacagcgaacc

SEQ ID NO: 1619620 - RNA, 19 nt, Artificial Sequence
  Description of Artificial Sequence: Synthetic oligonucleotide
uggggcgaacagcugcagg

SEQ ID NO: 1619621 - RNA, 19 nt, Artificial Sequence
  Description of Artificial Sequence: Synthetic oligonucleotide
  modified_base (3)..(3): a, c, u, g, unknown or other
uanaguguugggucccuuu

SEQ ID NO: 1619622 - RNA, 19 nt, Artificial Sequence
  Description of Artificial Sequence: Synthetic oligonucleotide
cacucggggcaaaagggag

SEQ ID NO: 1619623 - RNA, 19 nt, Artificial Sequence
  Description of Artificial Sequence: Synthetic oligonucleotide
ugauccggguggaagcgac

SEQ ID NO: 1619624 - RNA, 19 nt, Artificial Sequence
  Description of Artificial Sequence: Synthetic oligonucleotide
guaaccauuuuaugucgga

SEQ ID NO: 1619625 - RNA, 19 nt, Artificial Sequence
  Description of Artificial Sequence: Synthetic oligonucleotide
uugcccagagccguuacca

SEQ ID NO: 1619626 - RNA, 19 nt, Artificial Sequence
  Description of Artificial Sequence: Synthetic oligonucleotide
ggcaguaaccauuuuaugu

SEQ ID NO: 1619627 - RNA, 19 nt, Artificial Sequence
  Description of Artificial Sequence: Synthetic oligonucleotide
acgcugggcauggaaaugg

SEQ ID NO: 1619628 - RNA, 19 nt, Artificial Sequence
  Description of Artificial Sequence: Synthetic oligonucleotide
agccguuaccacuugccca

SEQ ID NO: 1619629 - RNA, 19 nt, Artificial Sequence
  Description of Artificial Sequence: Synthetic oligonucleotide
  modified_base (5)..(5): a, c, u, g, unknown or other
uuuanaguguugggucccu

SEQ ID NO: 1619630 - RNA, 19 nt, Artificial Sequence
  Description of Artificial Sequence: Synthetic oligonucleotide
gagacuucguuuuggagau

SEQ ID NO: 1619631 - RNA, 19 nt, Artificial Sequence
  Description of Artificial Sequence: Synthetic oligonucleotide
agcaugguguccagacugc

SEQ ID NO: 1619632 - RNA, 19 nt, Artificial Sequence
  Description of Artificial Sequence: Synthetic oligonucleotide
aggcaguaaccauuuuaug

SEQ ID NO: 1619633 - RNA, 19 nt, Artificial Sequence
  Description of Artificial Sequence: Synthetic oligonucleotide
aaggugguucuggacacga

SEQ ID NO: 1619634 - RNA, 19 nt, Artificial Sequence
  Description of Artificial Sequence: Synthetic oligonucleotide
aguaggggcggcccucccg

SEQ ID NO: 1619635 - RNA, 19 nt, Artificial Sequence
  Description of Artificial Sequence: Synthetic oligonucleotide
uaccuuagggguaggucuc

SEQ ID NO: 1619636 - RNA, 19 nt, Artificial Sequence
  Description of Artificial Sequence: Synthetic oligonucleotide
cagucuauccaacucgaga

SEQ ID NO: 1619637 - RNA, 19 nt, Artificial Sequence
  Description of Artificial Sequence: Synthetic oligonucleotide
agacacacagcggccaguc

SEQ ID NO: 1619638 - RNA, 19 nt, Artificial Sequence
  Description of Artificial Sequence: Synthetic oligonucleotide
gguuguggaacauccgcug

SEQ ID NO: 1619639 - RNA, 19 nt, Artificial Sequence
  Description of Artificial Sequence: Synthetic oligonucleotide
gggaugucuggguagcucc

SEQ ID NO: 1619640 - RNA, 19 nt, Artificial Sequence
  Description of Artificial Sequence: Synthetic oligonucleotide
acucggggcaaaagggagc

SEQ ID NO: 1619641 - RNA, 19 nt, Artificial Sequence
  Description of Artificial Sequence: Synthetic oligonucleotide
gaggucggauugcagcagc

SEQ ID NO: 1619642 - RNA, 19 nt, Artificial Sequence
  Description of Artificial Sequence: Synthetic oligonucleotide
aucuuacuagaugggaacu

SEQ ID NO: 1619643 - RNA, 19 nt, Artificial Sequence
  Description of Artificial Sequence: Synthetic oligonucleotide
gacggcccagagcagacac

SEQ ID NO: 1619644 - RNA, 19 nt, Artificial Sequence
  Description of Artificial Sequence: Synthetic oligonucleotide
aagcugccuccggagaagg

SEQ ID NO: 1619645 - RNA, 19 nt, Artificial Sequence
  Description of Artificial Sequence: Synthetic oligonucleotide
cuuacuagaugggaacuga

SEQ ID NO: 1619646 - RNA, 19 nt, Artificial Sequence
  Description of Artificial Sequence: Synthetic oligonucleotide
gccacagaggccuuuggcc

SEQ ID NO: 1619647 - RNA, 19 nt, Artificial Sequence
  Description of Artificial Sequence: Synthetic oligonucleotide
agacauuaucucaucugug

SEQ ID NO: 1619648 - RNA, 19 nt, Artificial Sequence
  Description of Artificial Sequence: Synthetic oligonucleotide
agggguaggucucuccagu

SEQ ID NO: 1619649 - RNA, 19 nt, Artificial Sequence
  Description of Artificial Sequence: Synthetic oligonucleotide
cucggggcaaaagggagcc

SEQ ID NO: 1619650 - RNA, 19 nt, Artificial Sequence
  Description of Artificial Sequence: Synthetic oligonucleotide
ugguucucacacagcgggc

SEQ ID NO: 1619651 - RNA, 19 nt, Artificial Sequence
  Description of Artificial Sequence: Synthetic oligonucleotide
ggcaguaaggcuugccggc

SEQ ID NO: 1619652 - RNA, 19 nt, Artificial Sequence
  Description of Artificial Sequence: Synthetic oligonucleotide
gccguuaccacuugcccag

SEQ ID NO: 1619653 - RNA, 19 nt, Artificial Sequence
  Description of Artificial Sequence: Synthetic oligonucleotide
ugacaaaccuaggguaccu

SEQ ID NO: 1619654 - RNA, 19 nt, Artificial Sequence
  Description of Artificial Sequence: Synthetic oligonucleotide
guugggucccuuucugaac

SEQ ID NO: 1619655 - RNA, 19 nt, Artificial Sequence
  Description of Artificial Sequence: Synthetic oligonucleotide
auccggguggaagcgacgg

SEQ ID NO: 1619656 - RNA, 19 nt, Artificial Sequence
  Description of Artificial Sequence: Synthetic oligonucleotide
caggguuguggaacauccg

SEQ ID NO: 1619657 - RNA, 19 nt, Artificial Sequence
  Description of Artificial Sequence: Synthetic oligonucleotide
ugaggucggauugcagcag

SEQ ID NO: 1619658 - RNA, 19 nt, Artificial Sequence
  Description of Artificial Sequence: Synthetic oligonucleotide
gauguuaaacuggguggca

SEQ ID NO: 1619659 - RNA, 19 nt, Artificial Sequence
  Description of Artificial Sequence: Synthetic oligonucleotide
agggaugucuggguagcuc

SEQ ID NO: 1619660 - RNA, 19 nt, Artificial Sequence
  Description of Artificial Sequence: Synthetic oligonucleotide
gaaggugguucuggacacg

SEQ ID NO: 1619661 - RNA, 19 nt, Artificial Sequence
  Description of Artificial Sequence: Synthetic oligonucleotide
agucacugggaggccacac

SEQ ID NO: 1619662 - RNA, 19 nt, Artificial Sequence
  Description of Artificial Sequence: Synthetic oligonucleotide
uuaaacuggguggcauuaa

SEQ ID NO: 1619663 - RNA, 19 nt, Artificial Sequence
  Description of Artificial Sequence: Synthetic oligonucleotide
auggugaucccaccaggau

SEQ ID NO: 1619664 - RNA, 19 nt, Artificial Sequence
  Description of Artificial Sequence: Synthetic oligonucleotide
agguuuauugcaggagcca

SEQ ID NO: 1619665 - RNA, 19 nt, Artificial Sequence
  Description of Artificial Sequence: Synthetic oligonucleotide
gguggagcucgccacuggg

SEQ ID NO: 1619666 - RNA, 19 nt, Artificial Sequence
  Description of Artificial Sequence: Synthetic oligonucleotide
guaggggcggcccucccgc

SEQ ID NO: 1619667 - RNA, 19 nt, Artificial Sequence
  Description of Artificial Sequence: Synthetic oligonucleotide
agccaucuuacuagauggg

SEQ ID NO: 1619668 - RNA, 19 nt, Artificial Sequence
  Description of Artificial Sequence: Synthetic oligonucleotide
uucagccaucuuacuagau

SEQ ID NO: 1619669 - RNA, 19 nt, Artificial Sequence
  Description of Artificial Sequence: Synthetic oligonucleotide
auguuaaacuggguggcau

SEQ ID NO: 1619670 - RNA, 19 nt, Artificial Sequence
  Description of Artificial Sequence: Synthetic oligonucleotide
gguuuauugcaggagccac

SEQ ID NO: 1619671 - RNA, 19 nt, Artificial Sequence
  Description of Artificial Sequence: Synthetic oligonucleotide
acaccacggcgacugaggu

SEQ ID NO: 1619672 - RNA, 19 nt, Artificial Sequence
  Description of Artificial Sequence: Synthetic oligonucleotide
gacgcagcagaaauguucu

SEQ ID NO: 1619673 - RNA, 19 nt, Artificial Sequence
  Description of Artificial Sequence: Synthetic oligonucleotide
aggucggauugcagcagcc

SEQ ID NO: 1619674 - RNA, 19 nt, Artificial Sequence
  Description of Artificial Sequence: Synthetic oligonucleotide
ggcgacugaggucggauug

SEQ ID NO: 1619675 - RNA, 19 nt, Artificial Sequence
  Description of Artificial Sequence: Synthetic oligonucleotide
ugagugcggagauguaguu

SEQ ID NO: 1619676 - RNA, 19 nt, Artificial Sequence
  Description of Artificial Sequence: Synthetic oligonucleotide
ggagauguaguuauccaaa

SEQ ID NO: 1619677 - RNA, 19 nt, Artificial Sequence
  Description of Artificial Sequence: Synthetic oligonucleotide
cuucagccaucuuacuaga

SEQ ID NO: 1619678 - RNA, 19 nt, Artificial Sequence
  Description of Artificial Sequence: Synthetic oligonucleotide
gcugagugcggagauguag

SEQ ID NO: 1619679 - RNA, 19 nt, Artificial Sequence
  Description of Artificial Sequence: Synthetic oligonucleotide
gguucuggacacgaaaguc

SEQ ID NO: 1619680 - RNA, 19 nt, Artificial Sequence
  Description of Artificial Sequence: Synthetic oligonucleotide
agaguggcugagguggcug

SEQ ID NO: 1619681 - RNA, 19 nt, Artificial Sequence
  Description of Artificial Sequence: Synthetic oligonucleotide
ucguggaaacccucuucuc

SEQ ID NO: 1619682 - RNA, 19 nt, Artificial Sequence
  Description of Artificial Sequence: Synthetic oligonucleotide
guuaaacuggguggcauua

SEQ ID NO: 1619683 - RNA, 19 nt, Artificial Sequence
  Description of Artificial Sequence: Synthetic oligonucleotide
guagggacaagggaugucu

SEQ ID NO: 1619684 - RNA, 19 nt, Artificial Sequence
  Description of Artificial Sequence: Synthetic oligonucleotide
aacauccgcugcaaaggaa

SEQ ID NO: 1619685 - RNA, 19 nt, Artificial Sequence
  Description of Artificial Sequence: Synthetic oligonucleotide
cuucggagacuucguuuug

SEQ ID NO: 1619686 - RNA, 19 nt, Artificial Sequence
  Description of Artificial Sequence: Synthetic oligonucleotide
auuuuaugucggauggguu

SEQ ID NO: 1619687 - RNA, 19 nt, Artificial Sequence
  Description of Artificial Sequence: Synthetic oligonucleotide
gauccggguggaagcgacg

SEQ ID NO: 1619688 - RNA, 19 nt, Artificial Sequence
  Description of Artificial Sequence: Synthetic oligonucleotide
ggugguucuggacacgaaa

SEQ ID NO: 1619689 - RNA, 19 nt, Artificial Sequence
  Description of Artificial Sequence: Synthetic oligonucleotide
gcaggugaagugauccggg

SEQ ID NO: 1619690 - RNA, 19 nt, Artificial Sequence
  Description of Artificial Sequence: Synthetic oligonucleotide
guggagcucgccacugggg

SEQ ID NO: 1619691 - RNA, 19 nt, Artificial Sequence
  Description of Artificial Sequence: Synthetic oligonucleotide
gguugguugcagaagccac

SEQ ID NO: 1619692 - RNA, 19 nt, Artificial Sequence
  Description of Artificial Sequence: Synthetic oligonucleotide
agcaaacgaucuagcucac

SEQ ID NO: 1619693 - RNA, 19 nt, Artificial Sequence
  Description of Artificial Sequence: Synthetic oligonucleotide
cagagccguuaccacuugc

SEQ ID NO: 1619694 - RNA, 19 nt, Artificial Sequence
  Description of Artificial Sequence: Synthetic oligonucleotide
ccaucagucuauccaacuc

SEQ ID NO: 1619695 - RNA, 19 nt, Artificial Sequence
  Description of Artificial Sequence: Synthetic oligonucleotide
cucccgcucguggaaaccc

SEQ ID NO: 1619696 - RNA, 19 nt, Artificial Sequence
  Description of Artificial Sequence: Synthetic oligonucleotide
ggaacaguggguguguucu

SEQ ID NO: 1619697 - RNA, 19 nt, Artificial Sequence
  Description of Artificial Sequence: Synthetic oligonucleotide
acagcgggcgccccucgug

SEQ ID NO: 1619698 - RNA, 19 nt, Artificial Sequence
  Description of Artificial Sequence: Synthetic oligonucleotide
gacacgaaagucagagagu

SEQ ID NO: 1619699 - RNA, 19 nt, Artificial Sequence
  Description of Artificial Sequence: Synthetic oligonucleotide
  modified_base (4)..(4): a, c, u, g, unknown or other
uuanaguguugggucccuu

SEQ ID NO: 1619700 - RNA, 19 nt, Artificial Sequence
  Description of Artificial Sequence: Synthetic oligonucleotide
caacucgagaguggcugag

SEQ ID NO: 1619701 - RNA, 19 nt, Artificial Sequence
  Description of Artificial Sequence: Synthetic oligonucleotide
ucccuccggcaguaggggc

SEQ ID NO: 1619702 - RNA, 19 nt, Artificial Sequence
  Description of Artificial Sequence: Synthetic oligonucleotide
gguaccuuagggguagguc

SEQ ID NO: 1619703 - RNA, 19 nt, Artificial Sequence
  Description of Artificial Sequence: Synthetic oligonucleotide
cugagugcggagauguagu

SEQ ID NO: 1619704 - RNA, 19 nt, Artificial Sequence
  Description of Artificial Sequence: Synthetic oligonucleotide
cacugggaggccacacgug

SEQ ID NO: 1619705 - RNA, 19 nt, Artificial Sequence
  Description of Artificial Sequence: Synthetic oligonucleotide
ggaaugugcugggaggaac

SEQ ID NO: 1619706 - RNA, 19 nt, Artificial Sequence
  Description of Artificial Sequence: Synthetic oligonucleotide
ucccgcucguggaaacccu

SEQ ID NO: 1619707 - RNA, 19 nt, Artificial Sequence
  Description of Artificial Sequence: Synthetic oligonucleotide
gccggcacgcuccuggaag

SEQ ID NO: 1619708 - RNA, 19 nt, Artificial Sequence
  Description of Artificial Sequence: Synthetic oligonucleotide
gcucgaaguagcacucggg

SEQ ID NO: 1619709 - RNA, 19 nt, Artificial Sequence
  Description of Artificial Sequence: Synthetic oligonucleotide
agaagcgcucgaaguagca

SEQ ID NO: 1619710 - RNA, 19 nt, Artificial Sequence
  Description of Artificial Sequence: Synthetic oligonucleotide
gucccuccggcaguagggg

SEQ ID NO: 1619711 - RNA, 19 nt, Artificial Sequence
  Description of Artificial Sequence: Synthetic oligonucleotide
agacugcccuugcucgucu

SEQ ID NO: 1619712 - RNA, 19 nt, Artificial Sequence
  Description of Artificial Sequence: Synthetic oligonucleotide
ugguggagaagggcacccc

SEQ ID NO: 1619713 - RNA, 19 nt, Artificial Sequence
  Description of Artificial Sequence: Synthetic oligonucleotide
ggugaucccaccaggaugu

SEQ ID NO: 1619714 - RNA, 19 nt, Artificial Sequence
  Description of Artificial Sequence: Synthetic oligonucleotide
cuaggguaccuuaggggua

SEQ ID NO: 1619715 - RNA, 19 nt, Artificial Sequence
  Description of Artificial Sequence: Synthetic oligonucleotide
ccaucuuacuagaugggaa

SEQ ID NO: 1619716 - RNA, 19 nt, Artificial Sequence
  Description of Artificial Sequence: Synthetic oligonucleotide
cacguggcacacagcgaac

SEQ ID NO: 1619717 - RNA, 19 nt, Artificial Sequence
  Description of Artificial Sequence: Synthetic oligonucleotide
gcguggggcgaacagcugc

SEQ ID NO: 1619718 - RNA, 19 nt, Artificial Sequence
  Description of Artificial Sequence: Synthetic oligonucleotide
accacgcugggcauggaaa

SEQ ID NO: 1619719 - RNA, 19 nt, Artificial Sequence
  Description of Artificial Sequence: Synthetic oligonucleotide
ccauuuuaugucggauggg

SEQ ID NO: 1619720 - RNA, 19 nt, Artificial Sequence
  Description of Artificial Sequence: Synthetic oligonucleotide
ggcgcgagacauucccugc

SEQ ID NO: 1619721 - RNA, 19 nt, Artificial Sequence
  Description of Artificial Sequence: Synthetic oligonucleotide
agccacaacguggggagaa

SEQ ID NO: 1619722 - RNA, 19 nt, Artificial Sequence
  Description of Artificial Sequence: Synthetic oligonucleotide
gggcgcgagacauucccug

SEQ ID NO: 1619723 - RNA, 19 nt, Artificial Sequence
  Description of Artificial Sequence: Synthetic oligonucleotide
gacugcccuugcucgucug

SEQ ID NO: 1619724 - RNA, 19 nt, Artificial Sequence
  Description of Artificial Sequence: Synthetic oligonucleotide
ccuaggguaccuuaggggu

SEQ ID NO: 1619725 - RNA, 19 nt, Artificial Sequence
  Description of Artificial Sequence: Synthetic oligonucleotide
gaagggcgcgagacauucc

SEQ ID NO: 1619726 - RNA, 19 nt, Artificial Sequence
  Description of Artificial Sequence: Synthetic oligonucleotide
caacguggggagaagcgcu

SEQ ID NO: 1619727 - RNA, 19 nt, Artificial Sequence
  Description of Artificial Sequence: Synthetic oligonucleotide
cacgcugggcauggaaaug

SEQ ID NO: 1619728 - RNA, 19 nt, Artificial Sequence
  Description of Artificial Sequence: Synthetic oligonucleotide
uaugucggauggguugguu

SEQ ID NO: 1619729 - RNA, 19 nt, Artificial Sequence
  Description of Artificial Sequence: Synthetic oligonucleotide
ugcccagcaauagguuuau

SEQ ID NO: 1619730 - RNA, 19 nt, Artificial Sequence
  Description of Artificial Sequence: Synthetic oligonucleotide
cagcgggcgccccucgugc

SEQ ID NO: 1619731 - RNA, 19 nt, Artificial Sequence
  Description of Artificial Sequence: Synthetic oligonucleotide
aggugcaggugaagugauc

SEQ ID NO: 1619732 - RNA, 19 nt, Artificial Sequence
  Description of Artificial Sequence: Synthetic oligonucleotide
aguagcacucggggcaaaa

SEQ ID NO: 1619733 - RNA, 19 nt, Artificial Sequence
  Description of Artificial Sequence: Synthetic oligonucleotide
gccaucuuacuagauggga

SEQ ID NO: 1619734 - RNA, 19 nt, Artificial Sequence
  Description of Artificial Sequence: Synthetic oligonucleotide
gagcgcgcugagugcggag

SEQ ID NO: 1619735 - RNA, 19 nt, Artificial Sequence
  Description of Artificial Sequence: Synthetic oligonucleotide
ccagagcgcgcugagugcg

SEQ ID NO: 1619736 - RNA, 19 nt, Artificial Sequence
  Description of Artificial Sequence: Synthetic oligonucleotide
gcggccagucacugggagg

SEQ ID NO: 1619737 - RNA, 19 nt, Artificial Sequence
  Description of Artificial Sequence: Synthetic oligonucleotide
agcgaaccacgcugggcau

SEQ ID NO: 1619738 - RNA, 19 nt, Artificial Sequence
  Description of Artificial Sequence: Synthetic oligonucleotide
ggcaaaagggagccccauc

SEQ ID NO: 1619739 - RNA, 19 nt, Artificial Sequence
  Description of Artificial Sequence: Synthetic oligonucleotide
ggucggauugcagcagccc

SEQ ID NO: 1619740 - RNA, 19 nt, Artificial Sequence
  Description of Artificial Sequence: Synthetic oligonucleotide
gagugcggagauguaguua

SEQ ID NO: 1619741 - RNA, 19 nt, Artificial Sequence
  Description of Artificial Sequence: Synthetic oligonucleotide
cacacguggcacacagcga

SEQ ID NO: 1619742 - RNA, 19 nt, Artificial Sequence
  Description of Artificial Sequence: Synthetic oligonucleotide
ggcuccccacagcugacgc

SEQ ID NO: 1619743 - RNA, 19 nt, Artificial Sequence
  Description of Artificial Sequence: Synthetic oligonucleotide
cuucuccaaagggcucccc

SEQ ID NO: 1619744 - RNA, 19 nt, Artificial Sequence
  Description of Artificial Sequence: Synthetic oligonucleotide
guggagaagggcaccccuc

SEQ ID NO: 1619745 - RNA, 19 nt, Artificial Sequence
  Description of Artificial Sequence: Synthetic oligonucleotide
gggcaccccucuugggugg

SEQ ID NO: 1619746 - RNA, 19 nt, Artificial Sequence
  Description of Artificial Sequence: Synthetic oligonucleotide
caccacggcgacugagguc

SEQ ID NO: 1619747 - RNA, 19 nt, Artificial Sequence
  Description of Artificial Sequence: Synthetic oligonucleotide
cuccggagaagggcgcgag

SEQ ID NO: 1619748 - RNA, 19 nt, Artificial Sequence
  Description of Artificial Sequence: Synthetic oligonucleotide
gugaagugauccgggugga

SEQ ID NO: 1619749 - RNA, 19 nt, Artificial Sequence
  Description of Artificial Sequence: Synthetic oligonucleotide
accuuagggguaggucucu

SEQ ID NO: 1619750 - RNA, 19 nt, Artificial Sequence
  Description of Artificial Sequence: Synthetic oligonucleotide
cuggguagcuccagagcua

SEQ ID NO: 1619751 - RNA, 19 nt, Artificial Sequence
  Description of Artificial Sequence: Synthetic oligonucleotide
cagcugacgcagcagaaau

SEQ ID NO: 1619752 - RNA, 19 nt, Artificial Sequence
  Description of Artificial Sequence: Synthetic oligonucleotide
ccggcacgcuccuggaagg

SEQ ID NO: 1619753 - RNA, 19 nt, Artificial Sequence
  Description of Artificial Sequence: Synthetic oligonucleotide
ugccggcacgcuccuggaa

SEQ ID NO: 1619754 - RNA, 19 nt, Artificial Sequence
  Description of Artificial Sequence: Synthetic oligonucleotide
auccaacucgagaguggcu

SEQ ID NO: 1619755 - RNA, 19 nt, Artificial Sequence
  Description of Artificial Sequence: Synthetic oligonucleotide
ucggggcaaaagggagccc

SEQ ID NO: 1619756 - RNA, 19 nt, Artificial Sequence
  Description of Artificial Sequence: Synthetic oligonucleotide
gagugggcgcaggcagaag

SEQ ID NO: 1619757 - RNA, 19 nt, Artificial Sequence
  Description of Artificial Sequence: Synthetic oligonucleotide
acggcgacugaggucggau

SEQ ID NO: 1619758 - RNA, 19 nt, Artificial Sequence
  Description of Artificial Sequence: Synthetic oligonucleotide
agagcgcgcugagugcgga

SEQ ID NO: 1619759 - RNA, 19 nt, Artificial Sequence
  Description of Artificial Sequence: Synthetic oligonucleotide
gcgacugaggucggauugc

SEQ ID NO: 1619760 - RNA, 19 nt, Artificial Sequence
  Description of Artificial Sequence: Synthetic oligonucleotide
aagcgacggcccagagcag

SEQ ID NO: 1619761 - RNA, 19 nt, Artificial Sequence
  Description of Artificial Sequence: Synthetic oligonucleotide
gacauucccugcagacgaa

SEQ ID NO: 1619762 - RNA, 19 nt, Artificial Sequence
  Description of Artificial Sequence: Synthetic oligonucleotide
gguggagaagggcaccccu

SEQ ID NO: 1619763 - RNA, 19 nt, Artificial Sequence
  Description of Artificial Sequence: Synthetic oligonucleotide
aggguaccuuagggguagg

SEQ ID NO: 1619764 - RNA, 19 nt, Artificial Sequence
  Description of Artificial Sequence: Synthetic oligonucleotide
cagacgaagcagucugggu

SEQ ID NO: 1619765 - RNA, 19 nt, Artificial Sequence
  Description of Artificial Sequence: Synthetic oligonucleotide
guggggcgaacagcugcag

SEQ ID NO: 1619766 - RNA, 19 nt, Artificial Sequence
  Description of Artificial Sequence: Synthetic oligonucleotide
ggagaagggcgcgagacau

SEQ ID NO: 1619767 - RNA, 19 nt, Artificial Sequence
  Description of Artificial Sequence: Synthetic oligonucleotide
caggugaagugauccgggu

SEQ ID NO: 1619768 - RNA, 19 nt, Artificial Sequence
  Description of Artificial Sequence: Synthetic oligonucleotide
gucggauggguugguugca

SEQ ID NO: 1619769 - RNA, 19 nt, Artificial Sequence
  Description of Artificial Sequence: Synthetic oligonucleotide
gguagggacaagggauguc

SEQ ID NO: 1619770 - RNA, 19 nt, Artificial Sequence
  Description of Artificial Sequence: Synthetic oligonucleotide
gccaucagucuauccaacu

SEQ ID NO: 1619771 - RNA, 19 nt, Artificial Sequence
  Description of Artificial Sequence: Synthetic oligonucleotide
gugagugggcgcaggcaga

SEQ ID NO: 1619772 - RNA, 19 nt, Artificial Sequence
  Description of Artificial Sequence: Synthetic oligonucleotide
cggagauguaguuauccaa

SEQ ID NO: 1619773 - RNA, 19 nt, Artificial Sequence
  Description of Artificial Sequence: Synthetic oligonucleotide
gcacucggggcaaaaggga

SEQ ID NO: 1619774 - RNA, 19 nt, Artificial Sequence
  Description of Artificial Sequence: Synthetic oligonucleotide
gcgagacauucccugcaga

SEQ ID NO: 1619775 - RNA, 19 nt, Artificial Sequence
  Description of Artificial Sequence: Synthetic oligonucleotide
gcaguaaggcuugccggca

SEQ ID NO: 1619776 - RNA, 19 nt, Artificial Sequence
  Description of Artificial Sequence: Synthetic oligonucleotide
agggcgcgagacauucccu

SEQ ID NO: 1619777 - RNA, 19 nt, Artificial Sequence
  Description of Artificial Sequence: Synthetic oligonucleotide
gaugucagccgaagagcuu

SEQ ID NO: 1619778 - RNA, 19 nt, Artificial Sequence
  Description of Artificial Sequence: Synthetic oligonucleotide
ggguuguggaacauccgcu

SEQ ID NO: 1619779 - RNA, 19 nt, Artificial Sequence
  Description of Artificial Sequence: Synthetic oligonucleotide
gcgcgagacauucccugca

SEQ ID NO: 1619780 - RNA, 19 nt, Artificial Sequence
  Description of Artificial Sequence: Synthetic oligonucleotide
uggcagcguggggcgaaca

SEQ ID NO: 1619781 - RNA, 19 nt, Artificial Sequence
  Description of Artificial Sequence: Synthetic oligonucleotide
ccaacucgagaguggcuga

SEQ ID NO: 1619782 - RNA, 19 nt, Artificial Sequence
  Description of Artificial Sequence: Synthetic oligonucleotide
ccagagcuagggaucugga

SEQ ID NO: 1619783 - RNA, 19 nt, Artificial Sequence
  Description of Artificial Sequence: Synthetic oligonucleotide
ggguggaagcgacggccca

SEQ ID NO: 1619784 - RNA, 19 nt, Artificial Sequence
  Description of Artificial Sequence: Synthetic oligonucleotide
gcaaacgaucuagcucaca

SEQ ID NO: 1619785 - RNA, 19 nt, Artificial Sequence
  Description of Artificial Sequence: Synthetic oligonucleotide
cuggcagcguggggcgaac

SEQ ID NO: 1619786 - RNA, 19 nt, Artificial Sequence
  Description of Artificial Sequence: Synthetic oligonucleotide
ccucuuggguggagcucgc

SEQ ID NO: 1619787 - RNA, 19 nt, Artificial Sequence
  Description of Artificial Sequence: Synthetic oligonucleotide
gauggcccugaggcuggaa

SEQ ID NO: 1619788 - RNA, 19 nt, Artificial Sequence
  Description of Artificial Sequence: Synthetic oligonucleotide
ccagagccguuaccacuug

SEQ ID NO: 1619789 - RNA, 19 nt, Artificial Sequence
  Description of Artificial Sequence: Synthetic oligonucleotide
cccgcucguggaaacccuc

SEQ ID NO: 1619790 - RNA, 19 nt, Artificial Sequence
  Description of Artificial Sequence: Synthetic oligonucleotide
ggucuucggagacuucguu

SEQ ID NO: 1619791 - RNA, 19 nt, Artificial Sequence
  Description of Artificial Sequence: Synthetic oligonucleotide
cggauugcagcagccccag

SEQ ID NO: 1619792 - RNA, 19 nt, Artificial Sequence
  Description of Artificial Sequence: Synthetic oligonucleotide
ccucccgcucguggaaacc

SEQ ID NO: 1619793 - RNA, 19 nt, Artificial Sequence
  Description of Artificial Sequence: Synthetic oligonucleotide
gaaccacgcugggcaugga

SEQ ID NO: 1619794 - RNA, 19 nt, Artificial Sequence
  Description of Artificial Sequence: Synthetic oligonucleotide
cguggggcgaacagcugca

SEQ ID NO: 1619795 - RNA, 19 nt, Artificial Sequence
  Description of Artificial Sequence: Synthetic oligonucleotide
gcgacggcccagagcagac

SEQ ID NO: 1619796 - RNA, 19 nt, Artificial Sequence
  Description of Artificial Sequence: Synthetic oligonucleotide
gcgccccucgugcucaaaa

SEQ ID NO: 1619797 - RNA, 19 nt, Artificial Sequence
  Description of Artificial Sequence: Synthetic oligonucleotide
ccuuagggguaggucucuc

SEQ ID NO: 1619798 - RNA, 19 nt, Artificial Sequence
  Description of Artificial Sequence: Synthetic oligonucleotide
gggucuucggagacuucgu

SEQ ID NO: 1619799 - RNA, 19 nt, Artificial Sequence
  Description of Artificial Sequence: Synthetic oligonucleotide
cguuaccacuugcccagca

SEQ ID NO: 1619800 - RNA, 19 nt, Artificial Sequence
  Description of Artificial Sequence: Synthetic oligonucleotide
ccacgcugggcauggaaau

SEQ ID NO: 1619801 - RNA, 19 nt, Artificial Sequence
  Description of Artificial Sequence: Synthetic oligonucleotide
cacggcgacugaggucgga

SEQ ID NO: 1619802 - RNA, 19 nt, Artificial Sequence
  Description of Artificial Sequence: Synthetic oligonucleotide
ggguaccuuagggguaggu

SEQ ID NO: 1619803 - RNA, 19 nt, Artificial Sequence
  Description of Artificial Sequence: Synthetic oligonucleotide
gugccagagcgcgcugagu

SEQ ID NO: 1619804 - RNA, 19 nt, Artificial Sequence
  Description of Artificial Sequence: Synthetic oligonucleotide
ggcaccccucuugggugga

SEQ ID NO: 1619805 - RNA, 19 nt, Artificial Sequence
  Description of Artificial Sequence: Synthetic oligonucleotide
ccgcucguggaaacccucu

SEQ ID NO: 1619806 - RNA, 19 nt, Artificial Sequence
  Description of Artificial Sequence: Synthetic oligonucleotide
cgcgcugagugcggagaug

SEQ ID NO: 1619807 - RNA, 19 nt, Artificial Sequence
  Description of Artificial Sequence: Synthetic oligonucleotide
ccuccggagaagggcgcga

SEQ ID NO: 1619808 - RNA, 19 nt, Artificial Sequence
  Description of Artificial Sequence: Synthetic oligonucleotide
gcgcgcugagugcggagau

SEQ ID NO: 1619809 - RNA, 19 nt, Artificial Sequence
  Description of Artificial Sequence: Synthetic oligonucleotide
cgcugagugcggagaugua

SEQ ID NO: 1619810 - RNA, 19 nt, Artificial Sequence
  Description of Artificial Sequence: Synthetic oligonucleotide
cgacggcccagagcagaca

SEQ ID NO: 1619811 - RNA, 19 nt, Artificial Sequence
  Description of Artificial Sequence: Synthetic oligonucleotide
cgggcgccccucgugcuca

SEQ ID NO: 1619812 - RNA, 19 nt, Artificial Sequence
  Description of Artificial Sequence: Synthetic oligonucleotide
cggcacgcuccuggaagga

SEQ ID NO: 1619813 - RNA, 19 nt, Artificial Sequence
  Description of Artificial Sequence: Synthetic oligonucleotide
gggcgccccucgugcucaa

SEQ ID NO: 1619814 - RNA, 19 nt, Artificial Sequence
  Description of Artificial Sequence: Synthetic oligonucleotide
ggcgccccucgugcucaaa

SEQ ID NO: 1619815 - RNA, 19 nt, Artificial Sequence
  Description of Artificial Sequence: Synthetic oligonucleotide
cggcgacugaggucggauu

SEQ ID NO: 1619816 - RNA, 19 nt, Artificial Sequence
  Description of Artificial Sequence: Synthetic oligonucleotide
aagauaacaaaucagaagg

SEQ ID NO: 1619817 - RNA, 19 nt, Artificial Sequence
  Description of Artificial Sequence: Synthetic oligonucleotide
agcaaaaccucuuagagcc

SEQ ID NO: 1619818 - RNA, 19 nt, Artificial Sequence
  Description of Artificial Sequence: Synthetic oligonucleotide
agaaauaaugacaacagcc

SEQ ID NO: 1619819 - RNA, 19 nt, Artificial Sequence
  Description of Artificial Sequence: Synthetic oligonucleotide
aaugacaacagccacacgu

SEQ ID NO: 1619820 - RNA, 19 nt, Artificial Sequence
  Description of Artificial Sequence: Synthetic oligonucleotide
aaagcuauaggaaagagca

SEQ ID NO: 1619821 - RNA, 19 nt, Artificial Sequence
  Description of Artificial Sequence: Synthetic oligonucleotide
ucaauaacugagaacaucc

SEQ ID NO: 1619822 - RNA, 19 nt, Artificial Sequence
  Description of Artificial Sequence: Synthetic oligonucleotide
aaauaaugacaacagccac

SEQ ID NO: 1619823 - RNA, 19 nt, Artificial Sequence
  Description of Artificial Sequence: Synthetic oligonucleotide
uaucuaacucuacagaggg

SEQ ID NO: 1619824 - RNA, 19 nt, Artificial Sequence
  Description of Artificial Sequence: Synthetic oligonucleotide
uacaaugagacuuaggcug

SEQ ID NO: 1619825 - RNA, 19 nt, Artificial Sequence
  Description of Artificial Sequence: Synthetic oligonucleotide
ucagauaccaaccaagugu

SEQ ID NO: 1619826 - RNA, 19 nt, Artificial Sequence
  Description of Artificial Sequence: Synthetic oligonucleotide
gaagauaacaaaucagaag

SEQ ID NO: 1619827 - RNA, 19 nt, Artificial Sequence
  Description of Artificial Sequence: Synthetic oligonucleotide
uguuuuguaaagcuauagg

SEQ ID NO: 1619828 - RNA, 19 nt, Artificial Sequence
  Description of Artificial Sequence: Synthetic oligonucleotide
auaacuggcuuccugaaac

SEQ ID NO: 1619829 - RNA, 19 nt, Artificial Sequence
  Description of Artificial Sequence: Synthetic oligonucleotide
aggauuagcauucaaacug

SEQ ID NO: 1619830 - RNA, 19 nt, Artificial Sequence
  Description of Artificial Sequence: Synthetic oligonucleotide
uuaucuaacucuacagagg

SEQ ID NO: 1619831 - RNA, 19 nt, Artificial Sequence
  Description of Artificial Sequence: Synthetic oligonucleotide
aaugaugugugugaggauc

SEQ ID NO: 1619832 - RNA, 19 nt, Artificial Sequence
  Description of Artificial Sequence: Synthetic oligonucleotide
uaaggguagaaaaugauaa

SEQ ID NO: 1619833 - RNA, 19 nt, Artificial Sequence
  Description of Artificial Sequence: Synthetic oligonucleotide
cuuaucuaacucuacagag

SEQ ID NO: 1619834 - RNA, 19 nt, Artificial Sequence
  Description of Artificial Sequence: Synthetic oligonucleotide
uuaaguaauaaaagggccu

SEQ ID NO: 1619835 - RNA, 19 nt, Artificial Sequence
  Description of Artificial Sequence: Synthetic oligonucleotide
agaaauauucaguacuaag

SEQ ID NO: 1619836 - RNA, 19 nt, Artificial Sequence
  Description of Artificial Sequence: Synthetic oligonucleotide
aauaacugagaacauccca

SEQ ID NO: 1619837 - RNA, 19 nt, Artificial Sequence
  Description of Artificial Sequence: Synthetic oligonucleotide
ugagcuacagcuacaauga

SEQ ID NO: 1619838 - RNA, 19 nt, Artificial Sequence
  Description of Artificial Sequence: Synthetic oligonucleotide
aauauucaguacuaagggu

SEQ ID NO: 1619839 - RNA, 19 nt, Artificial Sequence
  Description of Artificial Sequence: Synthetic oligonucleotide
aaggguagaaaaugauaac

SEQ ID NO: 1619840 - RNA, 19 nt, Artificial Sequence
  Description of Artificial Sequence: Synthetic oligonucleotide
caaagaagcaaugaacucg

SEQ ID NO: 1619841 - RNA, 19 nt, Artificial Sequence
  Description of Artificial Sequence: Synthetic oligonucleotide
ugucaaacaccuuuagucc

SEQ ID NO: 1619842 - RNA, 19 nt, Artificial Sequence
  Description of Artificial Sequence: Synthetic oligonucleotide
auaaugacaacagccacac

SEQ ID NO: 1619843 - RNA, 19 nt, Artificial Sequence
  Description of Artificial Sequence: Synthetic oligonucleotide
uucuuaucuaacucuacag

SEQ ID NO: 1619844 - RNA, 19 nt, Artificial Sequence
  Description of Artificial Sequence: Synthetic oligonucleotide
aaaucagauaccaaccaag

SEQ ID NO: 1619845 - RNA, 19 nt, Artificial Sequence
  Description of Artificial Sequence: Synthetic oligonucleotide
ucuaacucuacagaggggc

SEQ ID NO: 1619846 - RNA, 19 nt, Artificial Sequence
  Description of Artificial Sequence: Synthetic oligonucleotide
ucuuaucuaacucuacaga

SEQ ID NO: 1619847 - RNA, 19 nt, Artificial Sequence
  Description of Artificial Sequence: Synthetic oligonucleotide
uaagauguucuucuuuaag

SEQ ID NO: 1619848 - RNA, 19 nt, Artificial Sequence
  Description of Artificial Sequence: Synthetic oligonucleotide
gcuacaaugagacuuaggc

SEQ ID NO: 1619849 - RNA, 19 nt, Artificial Sequence
  Description of Artificial Sequence: Synthetic oligonucleotide
ugccauguaauucuggugu

SEQ ID NO: 1619850 - RNA, 19 nt, Artificial Sequence
  Description of Artificial Sequence: Synthetic oligonucleotide
ucauaacuggaauuauccg

SEQ ID NO: 1619851 - RNA, 19 nt, Artificial Sequence
  Description of Artificial Sequence: Synthetic oligonucleotide
gaagcaaugaacucguaga

SEQ ID NO: 1619852 - RNA, 19 nt, Artificial Sequence
  Description of Artificial Sequence: Synthetic oligonucleotide
aauuauccgagccucggcu

SEQ ID NO: 1619853 - RNA, 19 nt, Artificial Sequence
  Description of Artificial Sequence: Synthetic oligonucleotide
uauucaguacuaaggguag

SEQ ID NO: 1619854 - RNA, 19 nt, Artificial Sequence
  Description of Artificial Sequence: Synthetic oligonucleotide
ucaaugaugugugugagga

SEQ ID NO: 1619855 - RNA, 19 nt, Artificial Sequence
  Description of Artificial Sequence: Synthetic oligonucleotide
auaacugagaacaucccac

SEQ ID NO: 1619856 - RNA, 19 nt, Artificial Sequence
  Description of Artificial Sequence: Synthetic oligonucleotide
aggaccuaauuuuauguuc

SEQ ID NO: 1619857 - RNA, 19 nt, Artificial Sequence
  Description of Artificial Sequence: Synthetic oligonucleotide
aggaagaaauauucaguac

SEQ ID NO: 1619858 - RNA, 19 nt, Artificial Sequence
  Description of Artificial Sequence: Synthetic oligonucleotide
cugagcuacagcuacaaug

SEQ ID NO: 1619859 - RNA, 19 nt, Artificial Sequence
  Description of Artificial Sequence: Synthetic oligonucleotide
aacugagaacaucccaccg

SEQ ID NO: 1619860 - RNA, 19 nt, Artificial Sequence
  Description of Artificial Sequence: Synthetic oligonucleotide
agcaaaucagauaccaacc

SEQ ID NO: 1619861 - RNA, 19 nt, Artificial Sequence
  Description of Artificial Sequence: Synthetic oligonucleotide
gaaauaaugacaacagcca

SEQ ID NO: 1619862 - RNA, 19 nt, Artificial Sequence
  Description of Artificial Sequence: Synthetic oligonucleotide
agaagcaaugaacucguag

SEQ ID NO: 1619863 - RNA, 19 nt, Artificial Sequence
  Description of Artificial Sequence: Synthetic oligonucleotide
acucauaagauguucuucu

SEQ ID NO: 1619864 - RNA, 19 nt, Artificial Sequence
  Description of Artificial Sequence: Synthetic oligonucleotide
acaguacucacacuuuagg

SEQ ID NO: 1619865 - RNA, 19 nt, Artificial Sequence
  Description of Artificial Sequence: Synthetic oligonucleotide
gaugcaggaagaaauauuc

SEQ ID NO: 1619866 - RNA, 19 nt, Artificial Sequence
  Description of Artificial Sequence: Synthetic oligonucleotide
ucggcuagaguccucuugg

SEQ ID NO: 1619867 - RNA, 19 nt, Artificial Sequence
  Description of Artificial Sequence: Synthetic oligonucleotide
uaaguaauaaaagggccug

SEQ ID NO: 1619868 - RNA, 19 nt, Artificial Sequence
  Description of Artificial Sequence: Synthetic oligonucleotide
cuucaagcggaacuggugg

SEQ ID NO: 1619869 - RNA, 19 nt, Artificial Sequence
  Description of Artificial Sequence: Synthetic oligonucleotide
acugagaacaucccaccgg

SEQ ID NO: 1619870 - RNA, 19 nt, Artificial Sequence
  Description of Artificial Sequence: Synthetic oligonucleotide
auaccaaccaagugucuac

SEQ ID NO: 1619871 - RNA, 19 nt, Artificial Sequence
  Description of Artificial Sequence: Synthetic oligonucleotide
aucuuacugacaguggccc

SEQ ID NO: 1619872 - RNA, 19 nt, Artificial Sequence
  Description of Artificial Sequence: Synthetic oligonucleotide
auguccagaucuuacugac

SEQ ID NO: 1619873 - RNA, 19 nt, Artificial Sequence
  Description of Artificial Sequence: Synthetic oligonucleotide
cuaagucacugcuuggagg

SEQ ID NO: 1619874 - RNA, 19 nt, Artificial Sequence
  Description of Artificial Sequence: Synthetic oligonucleotide
uacuaaggguagaaaauga

SEQ ID NO: 1619875 - RNA, 19 nt, Artificial Sequence
  Description of Artificial Sequence: Synthetic oligonucleotide
auaacuggaauuauccgag

SEQ ID NO: 1619876 - RNA, 19 nt, Artificial Sequence
  Description of Artificial Sequence: Synthetic oligonucleotide
cuacagcucacauuguacc

SEQ ID NO: 1619877 - RNA, 19 nt, Artificial Sequence
  Description of Artificial Sequence: Synthetic oligonucleotide
ugaccuuagccccacacac

SEQ ID NO: 1619878 - RNA, 19 nt, Artificial Sequence
  Description of Artificial Sequence: Synthetic oligonucleotide
ucuacacuccaucggcugg

SEQ ID NO: 1619879 - RNA, 19 nt, Artificial Sequence
  Description of Artificial Sequence: Synthetic oligonucleotide
aaagaagcaaugaacucgu

SEQ ID NO: 1619880 - RNA, 19 nt, Artificial Sequence
  Description of Artificial Sequence: Synthetic oligonucleotide
caaccaagugucuacacug

SEQ ID NO: 1619881 - RNA, 19 nt, Artificial Sequence
  Description of Artificial Sequence: Synthetic oligonucleotide
guaauucuggugugggugg

SEQ ID NO: 1619882 - RNA, 19 nt, Artificial Sequence
  Description of Artificial Sequence: Synthetic oligonucleotide
uccuguuuuguaaagcuau

SEQ ID NO: 1619883 - RNA, 19 nt, Artificial Sequence
  Description of Artificial Sequence: Synthetic oligonucleotide
guaauaaaagggccugucc

SEQ ID NO: 1619884 - RNA, 19 nt, Artificial Sequence
  Description of Artificial Sequence: Synthetic oligonucleotide
ucacccaucugucuggaca

SEQ ID NO: 1619885 - RNA, 19 nt, Artificial Sequence
  Description of Artificial Sequence: Synthetic oligonucleotide
cauuaggucuccuugagga

SEQ ID NO: 1619886 - RNA, 19 nt, Artificial Sequence
  Description of Artificial Sequence: Synthetic oligonucleotide
cauaacuggaauuauccga

SEQ ID NO: 1619887 - RNA, 19 nt, Artificial Sequence
  Description of Artificial Sequence: Synthetic oligonucleotide
aguaauaaaagggccuguc

SEQ ID NO: 1619888 - RNA, 19 nt, Artificial Sequence
  Description of Artificial Sequence: Synthetic oligonucleotide
agagccucgaaacugcucu

SEQ ID NO: 1619889 - RNA, 19 nt, Artificial Sequence
  Description of Artificial Sequence: Synthetic oligonucleotide
uccucuacacuccaucggc

SEQ ID NO: 1619890 - RNA, 19 nt, Artificial Sequence
  Description of Artificial Sequence: Synthetic oligonucleotide
gauaacaaaucagaaggga

SEQ ID NO: 1619891 - RNA, 19 nt, Artificial Sequence
  Description of Artificial Sequence: Synthetic oligonucleotide
aagugucuacacuggcugg

SEQ ID NO: 1619892 - RNA, 19 nt, Artificial Sequence
  Description of Artificial Sequence: Synthetic oligonucleotide
augagacuuaggcugaucu

SEQ ID NO: 1619893 - RNA, 19 nt, Artificial Sequence
  Description of Artificial Sequence: Synthetic oligonucleotide
guagaaaaugauaacagaa

SEQ ID NO: 1619894 - RNA, 19 nt, Artificial Sequence
  Description of Artificial Sequence: Synthetic oligonucleotide
caauccugaccuuagcccc

SEQ ID NO: 1619895 - RNA, 19 nt, Artificial Sequence
  Description of Artificial Sequence: Synthetic oligonucleotide
aaacugcucuucuggggcg

SEQ ID NO: 1619896 - RNA, 19 nt, Artificial Sequence
  Description of Artificial Sequence: Synthetic oligonucleotide
ucuuagagccucgaaacug

SEQ ID NO: 1619897 - RNA, 19 nt, Artificial Sequence
  Description of Artificial Sequence: Synthetic oligonucleotide
uacagcuacaaugagacuu

SEQ ID NO: 1619898 - RNA, 19 nt, Artificial Sequence
  Description of Artificial Sequence: Synthetic oligonucleotide
ugucuggacaucaaggcua

SEQ ID NO: 1619899 - RNA, 19 nt, Artificial Sequence
  Description of Artificial Sequence: Synthetic oligonucleotide
augucagaagagcugcgac

SEQ ID NO: 1619900 - RNA, 19 nt, Artificial Sequence
  Description of Artificial Sequence: Synthetic oligonucleotide
uguaaagcuauaggaaaga

SEQ ID NO: 1619901 - RNA, 19 nt, Artificial Sequence
  Description of Artificial Sequence: Synthetic oligonucleotide
auuaggucuccuugaggac

SEQ ID NO: 1619902 - RNA, 19 nt, Artificial Sequence
  Description of Artificial Sequence: Synthetic oligonucleotide
ggaggauuagcauucaaac

SEQ ID NO: 1619903 - RNA, 19 nt, Artificial Sequence
  Description of Artificial Sequence: Synthetic oligonucleotide
cauuguaccucuuugcaca

SEQ ID NO: 1619904 - RNA, 19 nt, Artificial Sequence
  Description of Artificial Sequence: Synthetic oligonucleotide
ucgaaacugcucuucuggg

SEQ ID NO: 1619905 - RNA, 19 nt, Artificial Sequence
  Description of Artificial Sequence: Synthetic oligonucleotide
cacacuuuaggagauuugc

SEQ ID NO: 1619906 - RNA, 19 nt, Artificial Sequence
  Description of Artificial Sequence: Synthetic oligonucleotide
uggaggauuagcauucaaa

SEQ ID NO: 1619907 - RNA, 19 nt, Artificial Sequence
  Description of Artificial Sequence: Synthetic oligonucleotide
agauaacaaaucagaaggg

SEQ ID NO: 1619908 - RNA, 19 nt, Artificial Sequence
  Description of Artificial Sequence: Synthetic oligonucleotide
gaucugugcagacagccac

SEQ ID NO: 1619909 - RNA, 19 nt, Artificial Sequence
  Description of Artificial Sequence: Synthetic oligonucleotide
aggguagaaaaugauaaca

SEQ ID NO: 1619910 - RNA, 19 nt, Artificial Sequence
  Description of Artificial Sequence: Synthetic oligonucleotide
accaagugucuacacuggc

SEQ ID NO: 1619911 - RNA, 19 nt, Artificial Sequence
  Description of Artificial Sequence: Synthetic oligonucleotide
uggacaucaaggcuagagu

SEQ ID NO: 1619912 - RNA, 19 nt, Artificial Sequence
  Description of Artificial Sequence: Synthetic oligonucleotide
acuaagucacugcuuggag

SEQ ID NO: 1619913 - RNA, 19 nt, Artificial Sequence
  Description of Artificial Sequence: Synthetic oligonucleotide
uuaccuuugggcucucuga

SEQ ID NO: 1619914 - RNA, 19 nt, Artificial Sequence
  Description of Artificial Sequence: Synthetic oligonucleotide
aaacaccuuuagucccugc

SEQ ID NO: 1619915 - RNA, 19 nt, Artificial Sequence
  Description of Artificial Sequence: Synthetic oligonucleotide
ugaugccauguaauucugg

SEQ ID NO: 1619916 - RNA, 19 nt, Artificial Sequence
  Description of Artificial Sequence: Synthetic oligonucleotide
cucagauuccuucaauaac

SEQ ID NO: 1619917 - RNA, 19 nt, Artificial Sequence
  Description of Artificial Sequence: Synthetic oligonucleotide
uuugagucacccaucuguc

SEQ ID NO: 1619918 - RNA, 19 nt, Artificial Sequence
  Description of Artificial Sequence: Synthetic oligonucleotide
cagauaccaaccaaguguc

SEQ ID NO: 1619919 - RNA, 19 nt, Artificial Sequence
  Description of Artificial Sequence: Synthetic oligonucleotide
agcuauaggaaagagcaga

SEQ ID NO: 1619920 - RNA, 19 nt, Artificial Sequence
  Description of Artificial Sequence: Synthetic oligonucleotide
uguuuccuaggucacguuc

SEQ ID NO: 1619921 - RNA, 19 nt, Artificial Sequence
  Description of Artificial Sequence: Synthetic oligonucleotide
uggaauuauccgagccucg

SEQ ID NO: 1619922 - RNA, 19 nt, Artificial Sequence
  Description of Artificial Sequence: Synthetic oligonucleotide
gcuacuaagucacugcuug

SEQ ID NO: 1619923 - RNA, 19 nt, Artificial Sequence
  Description of Artificial Sequence: Synthetic oligonucleotide
cauguaauucugguguggg

SEQ ID NO: 1619924 - RNA, 19 nt, Artificial Sequence
  Description of Artificial Sequence: Synthetic oligonucleotide
cagacagccacauuagguc

SEQ ID NO: 1619925 - RNA, 19 nt, Artificial Sequence
  Description of Artificial Sequence: Synthetic oligonucleotide
guacuaaggguagaaaaug

SEQ ID NO: 1619926 - RNA, 19 nt, Artificial Sequence
  Description of Artificial Sequence: Synthetic oligonucleotide
aucagauaccaaccaagug

SEQ ID NO: 1619927 - RNA, 19 nt, Artificial Sequence
  Description of Artificial Sequence: Synthetic oligonucleotide
acauuaggucuccuugagg

SEQ ID NO: 1619928 - RNA, 19 nt, Artificial Sequence
  Description of Artificial Sequence: Synthetic oligonucleotide
uucaauaacugagaacauc

SEQ ID NO: 1619929 - RNA, 19 nt, Artificial Sequence
  Description of Artificial Sequence: Synthetic oligonucleotide
aagagcugcgacgggcucc

SEQ ID NO: 1619930 - RNA, 19 nt, Artificial Sequence
  Description of Artificial Sequence: Synthetic oligonucleotide
uuauccgagccucggcuag

SEQ ID NO: 1619931 - RNA, 19 nt, Artificial Sequence
  Description of Artificial Sequence: Synthetic oligonucleotide
ccuucaauaacugagaaca

SEQ ID NO: 1619932 - RNA, 19 nt, Artificial Sequence
  Description of Artificial Sequence: Synthetic oligonucleotide
ugucauggagcaaaaccuc

SEQ ID NO: 1619933 - RNA, 19 nt, Artificial Sequence
  Description of Artificial Sequence: Synthetic oligonucleotide
auauucaguacuaagggua

SEQ ID NO: 1619934 - RNA, 19 nt, Artificial Sequence
  Description of Artificial Sequence: Synthetic oligonucleotide
auaacagaaaacugagcua

SEQ ID NO: 1619935 - RNA, 19 nt, Artificial Sequence
  Description of Artificial Sequence: Synthetic oligonucleotide
ucuguggcuucacaauggc

SEQ ID NO: 1619936 - RNA, 19 nt, Artificial Sequence
  Description of Artificial Sequence: Synthetic oligonucleotide
gguugaagauaacaaauca

SEQ ID NO: 1619937 - RNA, 19 nt, Artificial Sequence
  Description of Artificial Sequence: Synthetic oligonucleotide
ugagacuuaggcugaucug

SEQ ID NO: 1619938 - RNA, 19 nt, Artificial Sequence
  Description of Artificial Sequence: Synthetic oligonucleotide
auggagcaaaaccucuuag

SEQ ID NO: 1619939 - RNA, 19 nt, Artificial Sequence
  Description of Artificial Sequence: Synthetic oligonucleotide
aaugucagaagagcugcga

SEQ ID NO: 1619940 - RNA, 19 nt, Artificial Sequence
  Description of Artificial Sequence: Synthetic oligonucleotide
gaacaucccaccgggaaag

SEQ ID NO: 1619941 - RNA, 19 nt, Artificial Sequence
  Description of Artificial Sequence: Synthetic oligonucleotide
aaccaagugucuacacugg

SEQ ID NO: 1619942 - RNA, 19 nt, Artificial Sequence
  Description of Artificial Sequence: Synthetic oligonucleotide
guaaagcuauaggaaagag

SEQ ID NO: 1619943 - RNA, 19 nt, Artificial Sequence
  Description of Artificial Sequence: Synthetic oligonucleotide
uuggcacgagcaaugucag

SEQ ID NO: 1619944 - RNA, 19 nt, Artificial Sequence
  Description of Artificial Sequence: Synthetic oligonucleotide
uggauaacaaagccuucaa

SEQ ID NO: 1619945 - RNA, 19 nt, Artificial Sequence
  Description of Artificial Sequence: Synthetic oligonucleotide
cauaagauguucuucuuua

SEQ ID NO: 1619946 - RNA, 19 nt, Artificial Sequence
  Description of Artificial Sequence: Synthetic oligonucleotide
auaggaaagagcagaguug

SEQ ID NO: 1619947 - RNA, 19 nt, Artificial Sequence
  Description of Artificial Sequence: Synthetic oligonucleotide
ugacugacucucauucagc

SEQ ID NO: 1619948 - RNA, 19 nt, Artificial Sequence
  Description of Artificial Sequence: Synthetic oligonucleotide
gcuacagcuacaaugagac

SEQ ID NO: 1619949 - RNA, 19 nt, Artificial Sequence
  Description of Artificial Sequence: Synthetic oligonucleotide
cuagaguccucuuggcccc

SEQ ID NO: 1619950 - RNA, 19 nt, Artificial Sequence
  Description of Artificial Sequence: Synthetic oligonucleotide
uaggucacguucuccaugu

SEQ ID NO: 1619951 - RNA, 19 nt, Artificial Sequence
  Description of Artificial Sequence: Synthetic oligonucleotide
uucucagauuccuucaaua

SEQ ID NO: 1619952 - RNA, 19 nt, Artificial Sequence
  Description of Artificial Sequence: Synthetic oligonucleotide
cacacgugugucaaacacc

SEQ ID NO: 1619953 - RNA, 19 nt, Artificial Sequence
  Description of Artificial Sequence: Synthetic oligonucleotide
acgggcauaacuggcuucc

SEQ ID NO: 1619954 - RNA, 19 nt, Artificial Sequence
  Description of Artificial Sequence: Synthetic oligonucleotide
aguacuaaggguagaaaau

SEQ ID NO: 1619955 - RNA, 19 nt, Artificial Sequence
  Description of Artificial Sequence: Synthetic oligonucleotide
cuuaggcugaucugugcag

SEQ ID NO: 1619956 - RNA, 19 nt, Artificial Sequence
  Description of Artificial Sequence: Synthetic oligonucleotide
aagcggaacugguggcuac

SEQ ID NO: 1619957 - RNA, 19 nt, Artificial Sequence
  Description of Artificial Sequence: Synthetic oligonucleotide
gauuacuggacaggaacac

SEQ ID NO: 1619958 - RNA, 19 nt, Artificial Sequence
  Description of Artificial Sequence: Synthetic oligonucleotide
aaugagacuuaggcugauc

SEQ ID NO: 1619959 - RNA, 19 nt, Artificial Sequence
  Description of Artificial Sequence: Synthetic oligonucleotide
aagaaauauucaguacuaa

SEQ ID NO: 1619960 - RNA, 19 nt, Artificial Sequence
  Description of Artificial Sequence: Synthetic oligonucleotide
ucguagaccuccucuacac

SEQ ID NO: 1619961 - RNA, 19 nt, Artificial Sequence
  Description of Artificial Sequence: Synthetic oligonucleotide
gagucacccaucugucugg

SEQ ID NO: 1619962 - RNA, 19 nt, Artificial Sequence
  Description of Artificial Sequence: Synthetic oligonucleotide
cugaucugugcagacagcc

SEQ ID NO: 1619963 - RNA, 19 nt, Artificial Sequence
  Description of Artificial Sequence: Synthetic oligonucleotide
auuuuauguucauggcacu

SEQ ID NO: 1619964 - RNA, 19 nt, Artificial Sequence
  Description of Artificial Sequence: Synthetic oligonucleotide
uacuaagucacugcuugga

SEQ ID NO: 1619965 - RNA, 19 nt, Artificial Sequence
  Description of Artificial Sequence: Synthetic oligonucleotide
ugggccaccugacugacuc

SEQ ID NO: 1619966 - RNA, 19 nt, Artificial Sequence
  Description of Artificial Sequence: Synthetic oligonucleotide
uacagaggggcugucuccg

SEQ ID NO: 1619967 - RNA, 19 nt, Artificial Sequence
  Description of Artificial Sequence: Synthetic oligonucleotide
ggguagaaaaugauaacag

SEQ ID NO: 1619968 - RNA, 19 nt, Artificial Sequence
  Description of Artificial Sequence: Synthetic oligonucleotide
aaaaccucuuagagccucg

SEQ ID NO: 1619969 - RNA, 19 nt, Artificial Sequence
  Description of Artificial Sequence: Synthetic oligonucleotide
gguagaaaaugauaacaga

SEQ ID NO: 1619970 - RNA, 19 nt, Artificial Sequence
  Description of Artificial Sequence: Synthetic oligonucleotide
uccgaacacgggcauaacu

SEQ ID NO: 1619971 - RNA, 19 nt, Artificial Sequence
  Description of Artificial Sequence: Synthetic oligonucleotide
agcuuucucuccaacauug

SEQ ID NO: 1619972 - RNA, 19 nt, Artificial Sequence
  Description of Artificial Sequence: Synthetic oligonucleotide
uugaugccauguaauucug

SEQ ID NO: 1619973 - RNA, 19 nt, Artificial Sequence
  Description of Artificial Sequence: Synthetic oligonucleotide
uacagcucacauuguaccu

SEQ ID NO: 1619974 - RNA, 19 nt, Artificial Sequence
  Description of Artificial Sequence: Synthetic oligonucleotide
guagaccuccucuacacuc

SEQ ID NO: 1619975 - RNA, 19 nt, Artificial Sequence
  Description of Artificial Sequence: Synthetic oligonucleotide
accucuuagagccucgaaa

SEQ ID NO: 1619976 - RNA, 19 nt, Artificial Sequence
  Description of Artificial Sequence: Synthetic oligonucleotide
cacaguacucacacuuuag

SEQ ID NO: 1619977 - RNA, 19 nt, Artificial Sequence
  Description of Artificial Sequence: Synthetic oligonucleotide
agacagccacauuaggucu

SEQ ID NO: 1619978 - RNA, 19 nt, Artificial Sequence
  Description of Artificial Sequence: Synthetic oligonucleotide
ggauuagcauucaaacugg

SEQ ID NO: 1619979 - RNA, 19 nt, Artificial Sequence
  Description of Artificial Sequence: Synthetic oligonucleotide
cuacuaagucacugcuugg

SEQ ID NO: 1619980 - RNA, 19 nt, Artificial Sequence
  Description of Artificial Sequence: Synthetic oligonucleotide
uucaagcggaacugguggc

SEQ ID NO: 1619981 - RNA, 19 nt, Artificial Sequence
  Description of Artificial Sequence: Synthetic oligonucleotide
auucagcccugucggaagg

SEQ ID NO: 1619982 - RNA, 19 nt, Artificial Sequence
  Description of Artificial Sequence: Synthetic oligonucleotide
gaugccauguaauucuggu

SEQ ID NO: 1619983 - RNA, 19 nt, Artificial Sequence
  Description of Artificial Sequence: Synthetic oligonucleotide
aucaaggcuagaguaggag

SEQ ID NO: 1619984 - RNA, 19 nt, Artificial Sequence
  Description of Artificial Sequence: Synthetic oligonucleotide
ucagaagagcugcgacggg

SEQ ID NO: 1619985 - RNA, 19 nt, Artificial Sequence
  Description of Artificial Sequence: Synthetic oligonucleotide
acagcucacauuguaccuc

SEQ ID NO: 1619986 - RNA, 19 nt, Artificial Sequence
  Description of Artificial Sequence: Synthetic oligonucleotide
aaguaauaaaagggccugu

SEQ ID NO: 1619987 - RNA, 19 nt, Artificial Sequence
  Description of Artificial Sequence: Synthetic oligonucleotide
caguacuaaggguagaaaa

SEQ ID NO: 1619988 - RNA, 19 nt, Artificial Sequence
  Description of Artificial Sequence: Synthetic oligonucleotide
ugcuuggaggauuagcauu

SEQ ID NO: 1619989 - RNA, 19 nt, Artificial Sequence
  Description of Artificial Sequence: Synthetic oligonucleotide
ucggcugggauuacuggac

SEQ ID NO: 1619990 - RNA, 19 nt, Artificial Sequence
  Description of Artificial Sequence: Synthetic oligonucleotide
gagaacaucccaccgggaa

SEQ ID NO: 1619991 - RNA, 19 nt, Artificial Sequence
  Description of Artificial Sequence: Synthetic oligonucleotide
uaacuggaauuauccgagc

SEQ ID NO: 1619992 - RNA, 19 nt, Artificial Sequence
  Description of Artificial Sequence: Synthetic oligonucleotide
gacuuaggcugaucugugc

SEQ ID NO: 1619993 - RNA, 19 nt, Artificial Sequence
  Description of Artificial Sequence: Synthetic oligonucleotide
uggggcguacuucccacag

SEQ ID NO: 1619994 - RNA, 19 nt, Artificial Sequence
  Description of Artificial Sequence: Synthetic oligonucleotide
caaugucagaagagcugcg

SEQ ID NO: 1619995 - RNA, 19 nt, Artificial Sequence
  Description of Artificial Sequence: Synthetic oligonucleotide
uaaugacaacagccacacg

SEQ ID NO: 1619996 - RNA, 19 nt, Artificial Sequence
  Description of Artificial Sequence: Synthetic oligonucleotide
gaggauuagcauucaaacu

SEQ ID NO: 1619997 - RNA, 19 nt, Artificial Sequence
  Description of Artificial Sequence: Synthetic oligonucleotide
ugucuacacuggcugguga

SEQ ID NO: 1619998 - RNA, 19 nt, Artificial Sequence
  Description of Artificial Sequence: Synthetic oligonucleotide
aucggcugggauuacugga

SEQ ID NO: 1619999 - RNA, 19 nt, Artificial Sequence
  Description of Artificial Sequence: Synthetic oligonucleotide
cuccucuacacuccaucgg

SEQ ID NO: 1620000 - RNA, 19 nt, Artificial Sequence
  Description of Artificial Sequence: Synthetic oligonucleotide
cuacagaggggcugucucc

SEQ ID NO: 1620001 - RNA, 19 nt, Artificial Sequence
  Description of Artificial Sequence: Synthetic oligonucleotide
ugggaacgaaacucuucag

SEQ ID NO: 1620002 - RNA, 19 nt, Artificial Sequence
  Description of Artificial Sequence: Synthetic oligonucleotide
uuaggcugaucugugcaga

SEQ ID NO: 1620003 - RNA, 19 nt, Artificial Sequence
  Description of Artificial Sequence: Synthetic oligonucleotide
acagccacauuaggucucc

SEQ ID NO: 1620004 - RNA, 19 nt, Artificial Sequence
  Description of Artificial Sequence: Synthetic oligonucleotide
cuggaauuauccgagccuc

SEQ ID NO: 1620005 - RNA, 19 nt, Artificial Sequence
  Description of Artificial Sequence: Synthetic oligonucleotide
caguacucacacuuuagga

SEQ ID NO: 1620006 - RNA, 19 nt, Artificial Sequence
  Description of Artificial Sequence: Synthetic oligonucleotide
agaacaucccaccgggaaa

SEQ ID NO: 1620007 - RNA, 19 nt, Artificial Sequence
  Description of Artificial Sequence: Synthetic oligonucleotide
ucuacacuggcuggugacc

SEQ ID NO: 1620008 - RNA, 19 nt, Artificial Sequence
  Description of Artificial Sequence: Synthetic oligonucleotide
uguccagaucuuacugaca

SEQ ID NO: 1620009 - RNA, 19 nt, Artificial Sequence
  Description of Artificial Sequence: Synthetic oligonucleotide
caucggcugggauuacugg

SEQ ID NO: 1620010 - RNA, 19 nt, Artificial Sequence
  Description of Artificial Sequence: Synthetic oligonucleotide
cacgccuccgaacacgggc

SEQ ID NO: 1620011 - RNA, 19 nt, Artificial Sequence
  Description of Artificial Sequence: Synthetic oligonucleotide
acaaaucagaagggagcgg

SEQ ID NO: 1620012 - RNA, 19 nt, Artificial Sequence
  Description of Artificial Sequence: Synthetic oligonucleotide
gcagaguugggacagaaaa

SEQ ID NO: 1620013 - RNA, 19 nt, Artificial Sequence
  Description of Artificial Sequence: Synthetic oligonucleotide
ccucuuagagccucgaaac

SEQ ID NO: 1620014 - RNA, 19 nt, Artificial Sequence
  Description of Artificial Sequence: Synthetic oligonucleotide
caaaucagaagggagcgga

SEQ ID NO: 1620015 - RNA, 19 nt, Artificial Sequence
  Description of Artificial Sequence: Synthetic oligonucleotide
aacacgggcauaacuggcu

SEQ ID NO: 1620016 - RNA, 19 nt, Artificial Sequence
  Description of Artificial Sequence: Synthetic oligonucleotide
aacugagcuacagcuacaa

SEQ ID NO: 1620017 - RNA, 19 nt, Artificial Sequence
  Description of Artificial Sequence: Synthetic oligonucleotide
gaacgaaacucuucagcaa

SEQ ID NO: 1620018 - RNA, 19 nt, Artificial Sequence
  Description of Artificial Sequence: Synthetic oligonucleotide
gacaacagccacacgugug

SEQ ID NO: 1620019 - RNA, 19 nt, Artificial Sequence
  Description of Artificial Sequence: Synthetic oligonucleotide
gacccugccauggaugcag

SEQ ID NO: 1620020 - RNA, 19 nt, Artificial Sequence
  Description of Artificial Sequence: Synthetic oligonucleotide
cucuacacuccaucggcug

SEQ ID NO: 1620021 - RNA, 19 nt, Artificial Sequence
  Description of Artificial Sequence: Synthetic oligonucleotide
gauaccaaccaagugucua

SEQ ID NO: 1620022 - RNA, 19 nt, Artificial Sequence
  Description of Artificial Sequence: Synthetic oligonucleotide
augacaacagccacacgug

SEQ ID NO: 1620023 - RNA, 19 nt, Artificial Sequence
  Description of Artificial Sequence: Synthetic oligonucleotide
uugagucacccaucugucu

SEQ ID NO: 1620024 - RNA, 19 nt, Artificial Sequence
  Description of Artificial Sequence: Synthetic oligonucleotide
gccacauuaggucuccuug

SEQ ID NO: 1620025 - RNA, 19 nt, Artificial Sequence
  Description of Artificial Sequence: Synthetic oligonucleotide
accuaauuuuauguucaug

SEQ ID NO: 1620026 - RNA, 19 nt, Artificial Sequence
  Description of Artificial Sequence: Synthetic oligonucleotide
uuuccuaggucacguucuc

SEQ ID NO: 1620027 - RNA, 19 nt, Artificial Sequence
  Description of Artificial Sequence: Synthetic oligonucleotide
ggaauuauccgagccucgg

SEQ ID NO: 1620028 - RNA, 19 nt, Artificial Sequence
  Description of Artificial Sequence: Synthetic oligonucleotide
auuacuggacaggaacaca

SEQ ID NO: 1620029 - RNA, 19 nt, Artificial Sequence
  Description of Artificial Sequence: Synthetic oligonucleotide
gagagugcuucaucauaac

SEQ ID NO: 1620030 - RNA, 19 nt, Artificial Sequence
  Description of Artificial Sequence: Synthetic oligonucleotide
aggcuagaguaggaggugg

SEQ ID NO: 1620031 - RNA, 19 nt, Artificial Sequence
  Description of Artificial Sequence: Synthetic oligonucleotide
gagacuuaggcugaucugu

SEQ ID NO: 1620032 - RNA, 19 nt, Artificial Sequence
  Description of Artificial Sequence: Synthetic oligonucleotide
caaaucagauaccaaccaa

SEQ ID NO: 1620033 - RNA, 19 nt, Artificial Sequence
  Description of Artificial Sequence: Synthetic oligonucleotide
ucaguacuaaggguagaaa

SEQ ID NO: 1620034 - RNA, 19 nt, Artificial Sequence
  Description of Artificial Sequence: Synthetic oligonucleotide
cuacacuggcuggugaccc

SEQ ID NO: 1620035 - RNA, 19 nt, Artificial Sequence
  Description of Artificial Sequence: Synthetic oligonucleotide
acaugucauggagcaaaac

SEQ ID NO: 1620036 - RNA, 19 nt, Artificial Sequence
  Description of Artificial Sequence: Synthetic oligonucleotide
uggaugcaggaagaaauau

SEQ ID NO: 1620037 - RNA, 19 nt, Artificial Sequence
  Description of Artificial Sequence: Synthetic oligonucleotide
ucuggggcguacuucccac

SEQ ID NO: 1620038 - RNA, 19 nt, Artificial Sequence
  Description of Artificial Sequence: Synthetic oligonucleotide
ucauucagcccugucggaa

SEQ ID NO: 1620039 - RNA, 19 nt, Artificial Sequence
  Description of Artificial Sequence: Synthetic oligonucleotide
gcaaaucagauaccaacca

SEQ ID NO: 1620040 - RNA, 19 nt, Artificial Sequence
  Description of Artificial Sequence: Synthetic oligonucleotide
acucucauucagcccuguc

SEQ ID NO: 1620041 - RNA, 19 nt, Artificial Sequence
  Description of Artificial Sequence: Synthetic oligonucleotide
gcuauaggaaagagcagag

SEQ ID NO: 1620042 - RNA, 19 nt, Artificial Sequence
  Description of Artificial Sequence: Synthetic oligonucleotide
ggcauaacuggcuuccuga

SEQ ID NO: 1620043 - RNA, 19 nt, Artificial Sequence
  Description of Artificial Sequence: Synthetic oligonucleotide
cuggauaacaaagccuuca

SEQ ID NO: 1620044 - RNA, 19 nt, Artificial Sequence
  Description of Artificial Sequence: Synthetic oligonucleotide
cggagaugcagaaauaaug

SEQ ID NO: 1620045 - RNA, 19 nt, Artificial Sequence
  Description of Artificial Sequence: Synthetic oligonucleotide
ggagauuugcuuucuuauc

SEQ ID NO: 1620046 - RNA, 19 nt, Artificial Sequence
  Description of Artificial Sequence: Synthetic oligonucleotide
agcuacagcuacaaugaga

SEQ ID NO: 1620047 - RNA, 19 nt, Artificial Sequence
  Description of Artificial Sequence: Synthetic oligonucleotide
gucuacacuggcuggugac

SEQ ID NO: 1620048 - RNA, 19 nt, Artificial Sequence
  Description of Artificial Sequence: Synthetic oligonucleotide
aagggagcggagaugcaga

SEQ ID NO: 1620049 - RNA, 19 nt, Artificial Sequence
  Description of Artificial Sequence: Synthetic oligonucleotide
acaggauugaugccaugua

SEQ ID NO: 1620050 - RNA, 19 nt, Artificial Sequence
  Description of Artificial Sequence: Synthetic oligonucleotide
ucaagcggaacugguggcu

SEQ ID NO: 1620051 - RNA, 19 nt, Artificial Sequence
  Description of Artificial Sequence: Synthetic oligonucleotide
agcggagaugcagaaauaa

SEQ ID NO: 1620052 - RNA, 19 nt, Artificial Sequence
  Description of Artificial Sequence: Synthetic oligonucleotide
ggcaggaccuaauuuuaug

SEQ ID NO: 1620053 - RNA, 19 nt, Artificial Sequence
  Description of Artificial Sequence: Synthetic oligonucleotide
cuacaaugagacuuaggcu

SEQ ID NO: 1620054 - RNA, 19 nt, Artificial Sequence
  Description of Artificial Sequence: Synthetic oligonucleotide
acaaugagacuuaggcuga

SEQ ID NO: 1620055 - RNA, 19 nt, Artificial Sequence
  Description of Artificial Sequence: Synthetic oligonucleotide
ugggauuacuggacaggaa

SEQ ID NO: 1620056 - RNA, 19 nt, Artificial Sequence
  Description of Artificial Sequence: Synthetic oligonucleotide
auuauccgagccucggcua

SEQ ID NO: 1620057 - RNA, 19 nt, Artificial Sequence
  Description of Artificial Sequence: Synthetic oligonucleotide
agcugcgacgggcuccacg

SEQ ID NO: 1620058 - RNA, 19 nt, Artificial Sequence
  Description of Artificial Sequence: Synthetic oligonucleotide
auuguaccucuuugcacau

SEQ ID NO: 1620059 - RNA, 19 nt, Artificial Sequence
  Description of Artificial Sequence: Synthetic oligonucleotide
caggagauguuggggagag

SEQ ID NO: 1620060 - RNA, 19 nt, Artificial Sequence
  Description of Artificial Sequence: Synthetic oligonucleotide
agugucuacacuggcuggu

SEQ ID NO: 1620061 - RNA, 19 nt, Artificial Sequence
  Description of Artificial Sequence: Synthetic oligonucleotide
aaccucuuagagccucgaa

SEQ ID NO: 1620062 - RNA, 19 nt, Artificial Sequence
  Description of Artificial Sequence: Synthetic oligonucleotide
ugcgacgggcuccacgccu

SEQ ID NO: 1620063 - RNA, 19 nt, Artificial Sequence
  Description of Artificial Sequence: Synthetic oligonucleotide
agcuacaaugagacuuagg

SEQ ID NO: 1620064 - RNA, 19 nt, Artificial Sequence
  Description of Artificial Sequence: Synthetic oligonucleotide
uaccaaccaagugucuaca

SEQ ID NO: 1620065 - RNA, 19 nt, Artificial Sequence
  Description of Artificial Sequence: Synthetic oligonucleotide
caacauuguucuucuccuc

SEQ ID NO: 1620066 - RNA, 19 nt, Artificial Sequence
  Description of Artificial Sequence: Synthetic oligonucleotide
ggagcugugaugguguuuc

SEQ ID NO: 1620067 - RNA, 19 nt, Artificial Sequence
  Description of Artificial Sequence: Synthetic oligonucleotide
aaaccucuuagagccucga

SEQ ID NO: 1620068 - RNA, 19 nt, Artificial Sequence
  Description of Artificial Sequence: Synthetic oligonucleotide
aaacugagcuacagcuaca

SEQ ID NO: 1620069 - RNA, 19 nt, Artificial Sequence
  Description of Artificial Sequence: Synthetic oligonucleotide
gcugcgacgggcuccacgc

SEQ ID NO: 1620070 - RNA, 19 nt, Artificial Sequence
  Description of Artificial Sequence: Synthetic oligonucleotide
ccuccucuacacuccaucg

SEQ ID NO: 1620071 - RNA, 19 nt, Artificial Sequence
  Description of Artificial Sequence: Synthetic oligonucleotide
gugcagacagccacauuag

SEQ ID NO: 1620072 - RNA, 19 nt, Artificial Sequence
  Description of Artificial Sequence: Synthetic oligonucleotide
gaucuugagggcaggaccu

SEQ ID NO: 1620073 - RNA, 19 nt, Artificial Sequence
  Description of Artificial Sequence: Synthetic oligonucleotide
uaauucuggugugggugga

SEQ ID NO: 1620074 - RNA, 19 nt, Artificial Sequence
  Description of Artificial Sequence: Synthetic oligonucleotide
caggauugaugccauguaa

SEQ ID NO: 1620075 - RNA, 19 nt, Artificial Sequence
  Description of Artificial Sequence: Synthetic oligonucleotide
gaacugguggcuacagcuc

SEQ ID NO: 1620076 - RNA, 19 nt, Artificial Sequence
  Description of Artificial Sequence: Synthetic oligonucleotide
cugcagcaaaucagauacc

SEQ ID NO: 1620077 - RNA, 19 nt, Artificial Sequence
  Description of Artificial Sequence: Synthetic oligonucleotide
agacuuaggcugaucugug

SEQ ID NO: 1620078 - RNA, 19 nt, Artificial Sequence
  Description of Artificial Sequence: Synthetic oligonucleotide
ggguugaagauaacaaauc

SEQ ID NO: 1620079 - RNA, 19 nt, Artificial Sequence
  Description of Artificial Sequence: Synthetic oligonucleotide
aguccucuuggccccgaug

SEQ ID NO: 1620080 - RNA, 19 nt, Artificial Sequence
  Description of Artificial Sequence: Synthetic oligonucleotide
uuccuaggucacguucucc

SEQ ID NO: 1620081 - RNA, 19 nt, Artificial Sequence
  Description of Artificial Sequence: Synthetic oligonucleotide
acagcuacaaugagacuua

SEQ ID NO: 1620082 - RNA, 19 nt, Artificial Sequence
  Description of Artificial Sequence: Synthetic oligonucleotide
ggcacgagcaaugucagaa

SEQ ID NO: 1620083 - RNA, 19 nt, Artificial Sequence
  Description of Artificial Sequence: Synthetic oligonucleotide
cuccacgccuccgaacacg

SEQ ID NO: 1620084 - RNA, 19 nt, Artificial Sequence
  Description of Artificial Sequence: Synthetic oligonucleotide
cgagcaaugucagaagagc

SEQ ID NO: 1620085 - RNA, 19 nt, Artificial Sequence
  Description of Artificial Sequence: Synthetic oligonucleotide
cgaaacugcucuucugggg

SEQ ID NO: 1620086 - RNA, 19 nt, Artificial Sequence
  Description of Artificial Sequence: Synthetic oligonucleotide
uacacuggcuggugacccu

SEQ ID NO: 1620087 - RNA, 19 nt, Artificial Sequence
  Description of Artificial Sequence: Synthetic oligonucleotide
uuagucccugcagcaaauc

SEQ ID NO: 1620088 - RNA, 19 nt, Artificial Sequence
  Description of Artificial Sequence: Synthetic oligonucleotide
cucguagaccuccucuaca

SEQ ID NO: 1620089 - RNA, 19 nt, Artificial Sequence
  Description of Artificial Sequence: Synthetic oligonucleotide
gguuuugagucacccaucu

SEQ ID NO: 1620090 - RNA, 19 nt, Artificial Sequence
  Description of Artificial Sequence: Synthetic oligonucleotide
cauggagcaaaaccucuua

SEQ ID NO: 1620091 - RNA, 19 nt, Artificial Sequence
  Description of Artificial Sequence: Synthetic oligonucleotide
ugguggcuacagcucacau

SEQ ID NO: 1620092 - RNA, 19 nt, Artificial Sequence
  Description of Artificial Sequence: Synthetic oligonucleotide
gcaggaccuaauuuuaugu

SEQ ID NO: 1620093 - RNA, 19 nt, Artificial Sequence
  Description of Artificial Sequence: Synthetic oligonucleotide
cauaacuggcuuccugaaa

SEQ ID NO: 1620094 - RNA, 19 nt, Artificial Sequence
  Description of Artificial Sequence: Synthetic oligonucleotide
gcacgagcaaugucagaag

SEQ ID NO: 1620095 - RNA, 19 nt, Artificial Sequence
  Description of Artificial Sequence: Synthetic oligonucleotide
ggagagugcuucaucauaa

SEQ ID NO: 1620096 - RNA, 19 nt, Artificial Sequence
  Description of Artificial Sequence: Synthetic oligonucleotide
guuuccuaggucacguucu

SEQ ID NO: 1620097 - RNA, 19 nt, Artificial Sequence
  Description of Artificial Sequence: Synthetic oligonucleotide
ccgagccucggcuagaguc

SEQ ID NO: 1620098 - RNA, 19 nt, Artificial Sequence
  Description of Artificial Sequence: Synthetic oligonucleotide
cuuagccccacacacuccu

SEQ ID NO: 1620099 - RNA, 19 nt, Artificial Sequence
  Description of Artificial Sequence: Synthetic oligonucleotide
ugucuccgcccagugggcc

SEQ ID NO: 1620100 - RNA, 19 nt, Artificial Sequence
  Description of Artificial Sequence: Synthetic oligonucleotide
ccauguaauucuggugugg

SEQ ID NO: 1620101 - RNA, 19 nt, Artificial Sequence
  Description of Artificial Sequence: Synthetic oligonucleotide
acagaucuugagggcagga

SEQ ID NO: 1620102 - RNA, 19 nt, Artificial Sequence
  Description of Artificial Sequence: Synthetic oligonucleotide
acacgggcauaacuggcuu

SEQ ID NO: 1620103 - RNA, 19 nt, Artificial Sequence
  Description of Artificial Sequence: Synthetic oligonucleotide
cugucuccgcccagugggc

SEQ ID NO: 1620104 - RNA, 19 nt, Artificial Sequence
  Description of Artificial Sequence: Synthetic oligonucleotide
cuuggcagccuugcaaaga

SEQ ID NO: 1620105 - RNA, 19 nt, Artificial Sequence
  Description of Artificial Sequence: Synthetic oligonucleotide
gacaguggcccaggagaug

SEQ ID NO: 1620106 - RNA, 19 nt, Artificial Sequence
  Description of Artificial Sequence: Synthetic oligonucleotide
cuccuguuuuguaaagcua

SEQ ID NO: 1620107 - RNA, 19 nt, Artificial Sequence
  Description of Artificial Sequence: Synthetic oligonucleotide
gggguuuugagucacccau

SEQ ID NO: 1620108 - RNA, 19 nt, Artificial Sequence
  Description of Artificial Sequence: Synthetic oligonucleotide
uccaucggcugggauuacu

SEQ ID NO: 1620109 - RNA, 19 nt, Artificial Sequence
  Description of Artificial Sequence: Synthetic oligonucleotide
cacgggcauaacuggcuuc

SEQ ID NO: 1620110 - RNA, 19 nt, Artificial Sequence
  Description of Artificial Sequence: Synthetic oligonucleotide
uagaguccucuuggccccg

SEQ ID NO: 1620111 - RNA, 19 nt, Artificial Sequence
  Description of Artificial Sequence: Synthetic oligonucleotide
acacuggcuggugacccug

SEQ ID NO: 1620112 - RNA, 19 nt, Artificial Sequence
  Description of Artificial Sequence: Synthetic oligonucleotide
agagcugcgacgggcucca

SEQ ID NO: 1620113 - RNA, 19 nt, Artificial Sequence
  Description of Artificial Sequence: Synthetic oligonucleotide
gugucuacacuggcuggug

SEQ ID NO: 1620114 - RNA, 19 nt, Artificial Sequence
  Description of Artificial Sequence: Synthetic oligonucleotide
gcauucaaacuggccauug

SEQ ID NO: 1620115 - RNA, 19 nt, Artificial Sequence
  Description of Artificial Sequence: Synthetic oligonucleotide
gggaugccuuugcaggaag

SEQ ID NO: 1620116 - RNA, 19 nt, Artificial Sequence
  Description of Artificial Sequence: Synthetic oligonucleotide
cuaacucuacagaggggcu

SEQ ID NO: 1620117 - RNA, 19 nt, Artificial Sequence
  Description of Artificial Sequence: Synthetic oligonucleotide
ggucuccuugaggacauug

SEQ ID NO: 1620118 - RNA, 19 nt, Artificial Sequence
  Description of Artificial Sequence: Synthetic oligonucleotide
ccaucggcugggauuacug

SEQ ID NO: 1620119 - RNA, 19 nt, Artificial Sequence
  Description of Artificial Sequence: Synthetic oligonucleotide
cagcuacaaugagacuuag

SEQ ID NO: 1620120 - RNA, 19 nt, Artificial Sequence
  Description of Artificial Sequence: Synthetic oligonucleotide
uggcacgagcaaugucaga

SEQ ID NO: 1620121 - RNA, 19 nt, Artificial Sequence
  Description of Artificial Sequence: Synthetic oligonucleotide
agauaccaaccaagugucu

SEQ ID NO: 1620122 - RNA, 19 nt, Artificial Sequence
  Description of Artificial Sequence: Synthetic oligonucleotide
cacaggauugaugccaugu

SEQ ID NO: 1620123 - RNA, 19 nt, Artificial Sequence
  Description of Artificial Sequence: Synthetic oligonucleotide
uauccgagccucggcuaga

SEQ ID NO: 1620124 - RNA, 19 nt, Artificial Sequence
  Description of Artificial Sequence: Synthetic oligonucleotide
cacuggcuggugacccugc

SEQ ID NO: 1620125 - RNA, 19 nt, Artificial Sequence
  Description of Artificial Sequence: Synthetic oligonucleotide
gcaggaagaaauauucagu

SEQ ID NO: 1620126 - RNA, 19 nt, Artificial Sequence
  Description of Artificial Sequence: Synthetic oligonucleotide
gucauggagcaaaaccucu

SEQ ID NO: 1620127 - RNA, 19 nt, Artificial Sequence
  Description of Artificial Sequence: Synthetic oligonucleotide
ggcugucuccgcccagugg

SEQ ID NO: 1620128 - RNA, 19 nt, Artificial Sequence
  Description of Artificial Sequence: Synthetic oligonucleotide
ccugaccuuagccccacac

SEQ ID NO: 1620129 - RNA, 19 nt, Artificial Sequence
  Description of Artificial Sequence: Synthetic oligonucleotide
auccgagccucggcuagag

SEQ ID NO: 1620130 - RNA, 19 nt, Artificial Sequence
  Description of Artificial Sequence: Synthetic oligonucleotide
gaccuaauuuuauguucau

SEQ ID NO: 1620131 - RNA, 19 nt, Artificial Sequence
  Description of Artificial Sequence: Synthetic oligonucleotide
gcuagaguaggagguggug

SEQ ID NO: 1620132 - RNA, 19 nt, Artificial Sequence
  Description of Artificial Sequence: Synthetic oligonucleotide
cuucaauaacugagaacau

SEQ ID NO: 1620133 - RNA, 19 nt, Artificial Sequence
  Description of Artificial Sequence: Synthetic oligonucleotide
gccccgauggcgcuugccc

SEQ ID NO: 1620134 - RNA, 19 nt, Artificial Sequence
  Description of Artificial Sequence: Synthetic oligonucleotide
gggcguacuucccacagua

SEQ ID NO: 1620135 - RNA, 19 nt, Artificial Sequence
  Description of Artificial Sequence: Synthetic oligonucleotide
gggagagugcuucaucaua

SEQ ID NO: 1620136 - RNA, 19 nt, Artificial Sequence
  Description of Artificial Sequence: Synthetic oligonucleotide
acucuacagaggggcuguc

SEQ ID NO: 1620137 - RNA, 19 nt, Artificial Sequence
  Description of Artificial Sequence: Synthetic oligonucleotide
ccacauuaggucuccuuga

SEQ ID NO: 1620138 - RNA, 19 nt, Artificial Sequence
  Description of Artificial Sequence: Synthetic oligonucleotide
ggcuacagcucacauugua

SEQ ID NO: 1620139 - RNA, 19 nt, Artificial Sequence
  Description of Artificial Sequence: Synthetic oligonucleotide
gcauaacuggcuuccugaa

SEQ ID NO: 1620140 - RNA, 19 nt, Artificial Sequence
  Description of Artificial Sequence: Synthetic oligonucleotide
uccgagccucggcuagagu

SEQ ID NO: 1620141 - RNA, 19 nt, Artificial Sequence
  Description of Artificial Sequence: Synthetic oligonucleotide
agcggaacugguggcuaca

SEQ ID NO: 1620142 - RNA, 19 nt, Artificial Sequence
  Description of Artificial Sequence: Synthetic oligonucleotide
aagaagcaaugaacucgua

SEQ ID NO: 1620143 - RNA, 19 nt, Artificial Sequence
  Description of Artificial Sequence: Synthetic oligonucleotide
ugacccugccauggaugca

SEQ ID NO: 1620144 - RNA, 19 nt, Artificial Sequence
  Description of Artificial Sequence: Synthetic oligonucleotide
caggaccuaauuuuauguu

SEQ ID NO: 1620145 - RNA, 19 nt, Artificial Sequence
  Description of Artificial Sequence: Synthetic oligonucleotide
gcagacagccacauuaggu

SEQ ID NO: 1620146 - RNA, 19 nt, Artificial Sequence
  Description of Artificial Sequence: Synthetic oligonucleotide
gacgggcuccacgccuccg

SEQ ID NO: 1620147 - RNA, 19 nt, Artificial Sequence
  Description of Artificial Sequence: Synthetic oligonucleotide
gucacccaucugucuggac

SEQ ID NO: 1620148 - RNA, 19 nt, Artificial Sequence
  Description of Artificial Sequence: Synthetic oligonucleotide
ucuggacaucaaggcuaga

SEQ ID NO: 1620149 - RNA, 19 nt, Artificial Sequence
  Description of Artificial Sequence: Synthetic oligonucleotide
cacuccaucggcugggauu

SEQ ID NO: 1620150 - RNA, 19 nt, Artificial Sequence
  Description of Artificial Sequence: Synthetic oligonucleotide
cucacacuuuaggagauuu

SEQ ID NO: 1620151 - RNA, 19 nt, Artificial Sequence
  Description of Artificial Sequence: Synthetic oligonucleotide
gccuugcaaagaagcaaug

SEQ ID NO: 1620152 - RNA, 19 nt, Artificial Sequence
  Description of Artificial Sequence: Synthetic oligonucleotide
cugcgacgggcuccacgcc

SEQ ID NO: 1620153 - RNA, 19 nt, Artificial Sequence
  Description of Artificial Sequence: Synthetic oligonucleotide
gcugaucugugcagacagc

SEQ ID NO: 1620154 - RNA, 19 nt, Artificial Sequence
  Description of Artificial Sequence: Synthetic oligonucleotide
cugcuuggaggauuagcau

SEQ ID NO: 1620155 - RNA, 19 nt, Artificial Sequence
  Description of Artificial Sequence: Synthetic oligonucleotide
guaccucuuugcacauguc

SEQ ID NO: 1620156 - RNA, 19 nt, Artificial Sequence
  Description of Artificial Sequence: Synthetic oligonucleotide
guaggggccagggcuacua

SEQ ID NO: 1620157 - RNA, 19 nt, Artificial Sequence
  Description of Artificial Sequence: Synthetic oligonucleotide
acucacacuuuaggagauu

SEQ ID NO: 1620158 - RNA, 19 nt, Artificial Sequence
  Description of Artificial Sequence: Synthetic oligonucleotide
ggguuuugagucacccauc

SEQ ID NO: 1620159 - RNA, 19 nt, Artificial Sequence
  Description of Artificial Sequence: Synthetic oligonucleotide
cuugagggcaggaccuaau

SEQ ID NO: 1620160 - RNA, 19 nt, Artificial Sequence
  Description of Artificial Sequence: Synthetic oligonucleotide
gggcucucugaugcugggg

SEQ ID NO: 1620161 - RNA, 19 nt, Artificial Sequence
  Description of Artificial Sequence: Synthetic oligonucleotide
ccaagugucuacacuggcu

SEQ ID NO: 1620162 - RNA, 19 nt, Artificial Sequence
  Description of Artificial Sequence: Synthetic oligonucleotide
cugguggcuacagcucaca

SEQ ID NO: 1620163 - RNA, 19 nt, Artificial Sequence
  Description of Artificial Sequence: Synthetic oligonucleotide
cuggggcguacuucccaca

SEQ ID NO: 1620164 - RNA, 19 nt, Artificial Sequence
  Description of Artificial Sequence: Synthetic oligonucleotide
cuggccauugguucagcuu

SEQ ID NO: 1620165 - RNA, 19 nt, Artificial Sequence
  Description of Artificial Sequence: Synthetic oligonucleotide
ccuguuuuguaaagcuaua

SEQ ID NO: 1620166 - RNA, 19 nt, Artificial Sequence
  Description of Artificial Sequence: Synthetic oligonucleotide
cccacacacuccuguuuug

SEQ ID NO: 1620167 - RNA, 19 nt, Artificial Sequence
  Description of Artificial Sequence: Synthetic oligonucleotide
gcagcaaaucagauaccaa

SEQ ID NO: 1620168 - RNA, 19 nt, Artificial Sequence
  Description of Artificial Sequence: Synthetic oligonucleotide
ggccaccugacugacucuc

SEQ ID NO: 1620169 - RNA, 19 nt, Artificial Sequence
  Description of Artificial Sequence: Synthetic oligonucleotide
cuacagcuacaaugagacu

SEQ ID NO: 1620170 - RNA, 19 nt, Artificial Sequence
  Description of Artificial Sequence: Synthetic oligonucleotide
cccgauggcgcuugcccug

SEQ ID NO: 1620171 - RNA, 19 nt, Artificial Sequence
  Description of Artificial Sequence: Synthetic oligonucleotide
gucggaaggccagccugca

SEQ ID NO: 1620172 - RNA, 19 nt, Artificial Sequence
  Description of Artificial Sequence: Synthetic oligonucleotide
cuccgaacacgggcauaac

SEQ ID NO: 1620173 - RNA, 19 nt, Artificial Sequence
  Description of Artificial Sequence: Synthetic oligonucleotide
caagcggaacugguggcua

SEQ ID NO: 1620174 - RNA, 19 nt, Artificial Sequence
  Description of Artificial Sequence: Synthetic oligonucleotide
gguggcuacagcucacauu

SEQ ID NO: 1620175 - RNA, 19 nt, Artificial Sequence
  Description of Artificial Sequence: Synthetic oligonucleotide
ggcguacuucccacaguac

SEQ ID NO: 1620176 - RNA, 19 nt, Artificial Sequence
  Description of Artificial Sequence: Synthetic oligonucleotide
cgugugucaaacaccuuua

SEQ ID NO: 1620177 - RNA, 19 nt, Artificial Sequence
  Description of Artificial Sequence: Synthetic oligonucleotide
agaguccucuuggccccga

SEQ ID NO: 1620178 - RNA, 19 nt, Artificial Sequence
  Description of Artificial Sequence: Synthetic oligonucleotide
uccgcccagugggccaccu

SEQ ID NO: 1620179 - RNA, 19 nt, Artificial Sequence
  Description of Artificial Sequence: Synthetic oligonucleotide
cccugcagcaaaucagaua

SEQ ID NO: 1620180 - RNA, 19 nt, Artificial Sequence
  Description of Artificial Sequence: Synthetic oligonucleotide
gagccucggcuagaguccu

SEQ ID NO: 1620181 - RNA, 19 nt, Artificial Sequence
  Description of Artificial Sequence: Synthetic oligonucleotide
ggccauugguucagcuuuc

SEQ ID NO: 1620182 - RNA, 19 nt, Artificial Sequence
  Description of Artificial Sequence: Synthetic oligonucleotide
cggcuagaguccucuuggc

SEQ ID NO: 1620183 - RNA, 19 nt, Artificial Sequence
  Description of Artificial Sequence: Synthetic oligonucleotide
uggccccgauggcgcuugc

SEQ ID NO: 1620184 - RNA, 19 nt, Artificial Sequence
  Description of Artificial Sequence: Synthetic oligonucleotide
ccuccgaacacgggcauaa

SEQ ID NO: 1620185 - RNA, 19 nt, Artificial Sequence
  Description of Artificial Sequence: Synthetic oligonucleotide
cccugucggaaggccagcc

SEQ ID NO: 1620186 - RNA, 19 nt, Artificial Sequence
  Description of Artificial Sequence: Synthetic oligonucleotide
ccgauggcgcuugcccugg

SEQ ID NO: 1620187 - RNA, 19 nt, Artificial Sequence
  Description of Artificial Sequence: Synthetic oligonucleotide
caccugacugacucucauu

SEQ ID NO: 1620188 - RNA, 19 nt, Artificial Sequence
  Description of Artificial Sequence: Synthetic oligonucleotide
ggcuagaguaggagguggu

SEQ ID NO: 1620189 - RNA, 19 nt, Artificial Sequence
  Description of Artificial Sequence: Synthetic oligonucleotide
gcggagaugcagaaauaau

SEQ ID NO: 1620190 - RNA, 19 nt, Artificial Sequence
  Description of Artificial Sequence: Synthetic oligonucleotide
cuccaucggcugggauuac

SEQ ID NO: 1620191 - RNA, 19 nt, Artificial Sequence
  Description of Artificial Sequence: Synthetic oligonucleotide
ccucuacacuccaucggcu

SEQ ID NO: 1620192 - RNA, 19 nt, Artificial Sequence
  Description of Artificial Sequence: Synthetic oligonucleotide
gggguaggggccagggcua

SEQ ID NO: 1620193 - RNA, 19 nt, Artificial Sequence
  Description of Artificial Sequence: Synthetic oligonucleotide
ggcuacuaagucacugcuu

SEQ ID NO: 1620194 - RNA, 19 nt, Artificial Sequence
  Description of Artificial Sequence: Synthetic oligonucleotide
gcccagugggccaccugac

SEQ ID NO: 1620195 - RNA, 19 nt, Artificial Sequence
  Description of Artificial Sequence: Synthetic oligonucleotide
gcaaaaccucuuagagccu

SEQ ID NO: 1620196 - RNA, 19 nt, Artificial Sequence
  Description of Artificial Sequence: Synthetic oligonucleotide
ggggcguacuucccacagu

SEQ ID NO: 1620197 - RNA, 19 nt, Artificial Sequence
  Description of Artificial Sequence: Synthetic oligonucleotide
gcgacgggcuccacgccuc

SEQ ID NO: 1620198 - RNA, 19 nt, Artificial Sequence
  Description of Artificial Sequence: Synthetic oligonucleotide
ggccccgauggcgcuugcc

SEQ ID NO: 1620199 - RNA, 19 nt, Artificial Sequence
  Description of Artificial Sequence: Synthetic oligonucleotide
cauuaccuuugggcucucu

SEQ ID NO: 1620200 - RNA, 19 nt, Artificial Sequence
  Description of Artificial Sequence: Synthetic oligonucleotide
gcccugucggaaggccagc

SEQ ID NO: 1620201 - RNA, 19 nt, Artificial Sequence
  Description of Artificial Sequence: Synthetic oligonucleotide
gaccuccucuacacuccau

SEQ ID NO: 1620202 - RNA, 19 nt, Artificial Sequence
  Description of Artificial Sequence: Synthetic oligonucleotide
ccuaggucacguucuccau

SEQ ID NO: 1620203 - RNA, 19 nt, Artificial Sequence
  Description of Artificial Sequence: Synthetic oligonucleotide
gggcaggaccuaauuuuau

SEQ ID NO: 1620204 - RNA, 19 nt, Artificial Sequence
  Description of Artificial Sequence: Synthetic oligonucleotide
ggggcugucuccgcccagu

SEQ ID NO: 1620205 - RNA, 19 nt, Artificial Sequence
  Description of Artificial Sequence: Synthetic oligonucleotide
ccugucggaaggccagccu

SEQ ID NO: 1620206 - RNA, 19 nt, Artificial Sequence
  Description of Artificial Sequence: Synthetic oligonucleotide
cgacgggcuccacgccucc

SEQ ID NO: 1620207 - RNA, 19 nt, Artificial Sequence
  Description of Artificial Sequence: Synthetic oligonucleotide
gggccaccugacugacucu

SEQ ID NO: 1620208 - RNA, 19 nt, Artificial Sequence
  Description of Artificial Sequence: Synthetic oligonucleotide
ccccgauggcgcuugcccu

SEQ ID NO: 1620209 - RNA, 19 nt, Artificial Sequence
  Description of Artificial Sequence: Synthetic oligonucleotide
gugggccaccugacugacu

SEQ ID NO: 1620210 - RNA, 19 nt, Artificial Sequence
  Description of Artificial Sequence: Synthetic oligonucleotide
ccgcccagugggccaccug

SEQ ID NO: 1620211 - RNA, 19 nt, Artificial Sequence
  Description of Artificial Sequence: Synthetic oligonucleotide
cgggcuccacgccuccgaa

SEQ ID NO: 1620212 - RNA, 19 nt, Artificial Sequence
  Description of Artificial Sequence: Synthetic oligonucleotide
cgauggcgcuugcccugga

SEQ ID NO: 1620213 - RNA, 19 nt, Artificial Sequence
  Description of Artificial Sequence: Synthetic oligonucleotide
cgggcauaacuggcuuccu

SEQ ID NO: 1620214 - RNA, 19 nt, Artificial Sequence
  Description of Artificial Sequence: Synthetic oligonucleotide
aauaucagaagccaagaag

SEQ ID NO: 1620215 - RNA, 19 nt, Artificial Sequence
  Description of Artificial Sequence: Synthetic oligonucleotide
aagauagaaaagaugaggc

SEQ ID NO: 1620216 - RNA, 19 nt, Artificial Sequence
  Description of Artificial Sequence: Synthetic oligonucleotide
gaugacuggaacuugauag

SEQ ID NO: 1620217 - RNA, 19 nt, Artificial Sequence
  Description of Artificial Sequence: Synthetic oligonucleotide
aauaaauaucccugcagac

SEQ ID NO: 1620218 - RNA, 19 nt, Artificial Sequence
  Description of Artificial Sequence: Synthetic oligonucleotide
aauacugugguaauuucgc

SEQ ID NO: 1620219 - RNA, 19 nt, Artificial Sequence
  Description of Artificial Sequence: Synthetic oligonucleotide
auuauaaaauaaugccucc

SEQ ID NO: 1620220 - RNA, 19 nt, Artificial Sequence
  Description of Artificial Sequence: Synthetic oligonucleotide
ucuguugugaggaugaaca

SEQ ID NO: 1620221 - RNA, 19 nt, Artificial Sequence
  Description of Artificial Sequence: Synthetic oligonucleotide
auagaguucagacuuauug

SEQ ID NO: 1620222 - RNA, 19 nt, Artificial Sequence
  Description of Artificial Sequence: Synthetic oligonucleotide
aauggagguauacuugaac

SEQ ID NO: 1620223 - RNA, 19 nt, Artificial Sequence
  Description of Artificial Sequence: Synthetic oligonucleotide
ugaaaugaugaccauaccu

SEQ ID NO: 1620224 - RNA, 19 nt, Artificial Sequence
  Description of Artificial Sequence: Synthetic oligonucleotide
cacguauugagucacaacg

SEQ ID NO: 1620225 - RNA, 19 nt, Artificial Sequence
  Description of Artificial Sequence: Synthetic oligonucleotide
agacuuauugaacagaaca

SEQ ID NO: 1620226 - RNA, 19 nt, Artificial Sequence
  Description of Artificial Sequence: Synthetic oligonucleotide
cugacgguaaagaacaugg

SEQ ID NO: 1620227 - RNA, 19 nt, Artificial Sequence
  Description of Artificial Sequence: Synthetic oligonucleotide
ugagucacaacguucauga

SEQ ID NO: 1620228 - RNA, 19 nt, Artificial Sequence
  Description of Artificial Sequence: Synthetic oligonucleotide
aucugaauaucauauguag

SEQ ID NO: 1620229 - RNA, 19 nt, Artificial Sequence
  Description of Artificial Sequence: Synthetic oligonucleotide
aucacauuacugcagcagc

SEQ ID NO: 1620230 - RNA, 19 nt, Artificial Sequence
  Description of Artificial Sequence: Synthetic oligonucleotide
agugaaaugaugaccauac

SEQ ID NO: 1620231 - RNA, 19 nt, Artificial Sequence
  Description of Artificial Sequence: Synthetic oligonucleotide
uauugaacagaacaacaug

SEQ ID NO: 1620232 - RNA, 19 nt, Artificial Sequence
  Description of Artificial Sequence: Synthetic oligonucleotide
uauugagucacaacguuca

SEQ ID NO: 1620233 - RNA, 19 nt, Artificial Sequence
  Description of Artificial Sequence: Synthetic oligonucleotide
uacauuaaggucccaauga

SEQ ID NO: 1620234 - RNA, 19 nt, Artificial Sequence
  Description of Artificial Sequence: Synthetic oligonucleotide
uaucacguaacaaugcucu

SEQ ID NO: 1620235 - RNA, 19 nt, Artificial Sequence
  Description of Artificial Sequence: Synthetic oligonucleotide
uggcauaguaccuuagugg

SEQ ID NO: 1620236 - RNA, 19 nt, Artificial Sequence
  Description of Artificial Sequence: Synthetic oligonucleotide
ugugcaaaugucacgaugu

SEQ ID NO: 1620237 - RNA, 19 nt, Artificial Sequence
  Description of Artificial Sequence: Synthetic oligonucleotide
uauacuugaacauacugua

SEQ ID NO: 1620238 - RNA, 19 nt, Artificial Sequence
  Description of Artificial Sequence: Synthetic oligonucleotide
aaguacaagauagaaaaga

SEQ ID NO: 1620239 - RNA, 19 nt, Artificial Sequence
  Description of Artificial Sequence: Synthetic oligonucleotide
ucaaaaugauaauuccuag

SEQ ID NO: 1620240 - RNA, 19 nt, Artificial Sequence
  Description of Artificial Sequence: Synthetic oligonucleotide
caaaaugauaauuccuagg

SEQ ID NO: 1620241 - RNA, 19 nt, Artificial Sequence
  Description of Artificial Sequence: Synthetic oligonucleotide
uuucgcaguagccaaagug

SEQ ID NO: 1620242 - RNA, 19 nt, Artificial Sequence
  Description of Artificial Sequence: Synthetic oligonucleotide
guaaccaccgugcaaaugc

SEQ ID NO: 1620243 - RNA, 19 nt, Artificial Sequence
  Description of Artificial Sequence: Synthetic oligonucleotide
aauaugcccauccuugcug

SEQ ID NO: 1620244 - RNA, 19 nt, Artificial Sequence
  Description of Artificial Sequence: Synthetic oligonucleotide
augaugaccauaccugcgc

SEQ ID NO: 1620245 - RNA, 19 nt, Artificial Sequence
  Description of Artificial Sequence: Synthetic oligonucleotide
acuuauugaacagaacaac

SEQ ID NO: 1620246 - RNA, 19 nt, Artificial Sequence
  Description of Artificial Sequence: Synthetic oligonucleotide
uuauugaacagaacaacau

SEQ ID NO: 1620247 - RNA, 19 nt, Artificial Sequence
  Description of Artificial Sequence: Synthetic oligonucleotide
gaauccauccuucucauuc

SEQ ID NO: 1620248 - RNA, 19 nt, Artificial Sequence
  Description of Artificial Sequence: Synthetic oligonucleotide
gauagaaaagaugaggcuc

SEQ ID NO: 1620249 - RNA, 19 nt, Artificial Sequence
  Description of Artificial Sequence: Synthetic oligonucleotide
uucgcaguagccaaaguga

SEQ ID NO: 1620250 - RNA, 19 nt, Artificial Sequence
  Description of Artificial Sequence: Synthetic oligonucleotide
aaacccgggaaguggaagg

SEQ ID NO: 1620251 - RNA, 19 nt, Artificial Sequence
  Description of Artificial Sequence: Synthetic oligonucleotide
ucggagucuacaaaggcug

SEQ ID NO: 1620252 - RNA, 19 nt, Artificial Sequence
  Description of Artificial Sequence: Synthetic oligonucleotide
uauaaaauaaugccuccuu

SEQ ID NO: 1620253 - RNA, 19 nt, Artificial Sequence
  Description of Artificial Sequence: Synthetic oligonucleotide
aauaucauauguaggggca

SEQ ID NO: 1620254 - RNA, 19 nt, Artificial Sequence
  Description of Artificial Sequence: Synthetic oligonucleotide
uauagagucucuuggaaua

SEQ ID NO: 1620255 - RNA, 19 nt, Artificial Sequence
  Description of Artificial Sequence: Synthetic oligonucleotide
ucagauucagagcauaguu

SEQ ID NO: 1620256 - RNA, 19 nt, Artificial Sequence
  Description of Artificial Sequence: Synthetic oligonucleotide
aagucagcuuacgaaaagg

SEQ ID NO: 1620257 - RNA, 19 nt, Artificial Sequence
  Description of Artificial Sequence: Synthetic oligonucleotide
acucggagucuacaaaggc

SEQ ID NO: 1620258 - RNA, 19 nt, Artificial Sequence
  Description of Artificial Sequence: Synthetic oligonucleotide
gaugcacacguauugaguc

SEQ ID NO: 1620259 - RNA, 19 nt, Artificial Sequence
  Description of Artificial Sequence: Synthetic oligonucleotide
uguauagagucucuuggaa

SEQ ID NO: 1620260 - RNA, 19 nt, Artificial Sequence
  Description of Artificial Sequence: Synthetic oligonucleotide
cauauguaggggcauggcg

SEQ ID NO: 1620261 - RNA, 19 nt, Artificial Sequence
  Description of Artificial Sequence: Synthetic oligonucleotide
acuguuuguauagagucuc

SEQ ID NO: 1620262 - RNA, 19 nt, Artificial Sequence
  Description of Artificial Sequence: Synthetic oligonucleotide
ggcauaguaccuuaguggg

SEQ ID NO: 1620263 - RNA, 19 nt, Artificial Sequence
  Description of Artificial Sequence: Synthetic oligonucleotide
guugugaggaugaacacgc

SEQ ID NO: 1620264 - RNA, 19 nt, Artificial Sequence
  Description of Artificial Sequence: Synthetic oligonucleotide
ugaggaugaacacgccacg

SEQ ID NO: 1620265 - RNA, 19 nt, Artificial Sequence
  Description of Artificial Sequence: Synthetic oligonucleotide
agauagaaaagaugaggcu

SEQ ID NO: 1620266 - RNA, 19 nt, Artificial Sequence
  Description of Artificial Sequence: Synthetic oligonucleotide
cuuggaauguuucccaaac

SEQ ID NO: 1620267 - RNA, 19 nt, Artificial Sequence
  Description of Artificial Sequence: Synthetic oligonucleotide
cgugauuauaaaauaaugc

SEQ ID NO: 1620268 - RNA, 19 nt, Artificial Sequence
  Description of Artificial Sequence: Synthetic oligonucleotide
guuuguauagagucucuug

SEQ ID NO: 1620269 - RNA, 19 nt, Artificial Sequence
  Description of Artificial Sequence: Synthetic oligonucleotide
agagucucuuggaauaugc

SEQ ID NO: 1620270 - RNA, 19 nt, Artificial Sequence
  Description of Artificial Sequence: Synthetic oligonucleotide
cuacucggagucuacaaag

SEQ ID NO: 1620271 - RNA, 19 nt, Artificial Sequence
  Description of Artificial Sequence: Synthetic oligonucleotide
uuuuccacaccucugugua

SEQ ID NO: 1620272 - RNA, 19 nt, Artificial Sequence
  Description of Artificial Sequence: Synthetic oligonucleotide
aauccauccuucucauuca

SEQ ID NO: 1620273 - RNA, 19 nt, Artificial Sequence
  Description of Artificial Sequence: Synthetic oligonucleotide
cauuaaggucccaaugaag

SEQ ID NO: 1620274 - RNA, 19 nt, Artificial Sequence
  Description of Artificial Sequence: Synthetic oligonucleotide
acugugguaauuucgcagu

SEQ ID NO: 1620275 - RNA, 19 nt, Artificial Sequence
  Description of Artificial Sequence: Synthetic oligonucleotide
ugcuccaaugcccaguaac

SEQ ID NO: 1620276 - RNA, 19 nt, Artificial Sequence
  Description of Artificial Sequence: Synthetic oligonucleotide
auaaauaucccugcagaca

SEQ ID NO: 1620277 - RNA, 19 nt, Artificial Sequence
  Description of Artificial Sequence: Synthetic oligonucleotide
gcgauguucagauucagag

SEQ ID NO: 1620278 - RNA, 19 nt, Artificial Sequence
  Description of Artificial Sequence: Synthetic oligonucleotide
uagccaaucgucugccugg

SEQ ID NO: 1620279 - RNA, 19 nt, Artificial Sequence
  Description of Artificial Sequence: Synthetic oligonucleotide
aauaucccugcagacacca

SEQ ID NO: 1620280 - RNA, 19 nt, Artificial Sequence
  Description of Artificial Sequence: Synthetic oligonucleotide
ugguaauuucgcaguagcc

SEQ ID NO: 1620281 - RNA, 19 nt, Artificial Sequence
  Description of Artificial Sequence: Synthetic oligonucleotide
acaugguuaccaugauggc

SEQ ID NO: 1620282 - RNA, 19 nt, Artificial Sequence
  Description of Artificial Sequence: Synthetic oligonucleotide
guacauuaaggucccaaug

SEQ ID NO: 1620283 - RNA, 19 nt, Artificial Sequence
  Description of Artificial Sequence: Synthetic oligonucleotide
uguacauuaaggucccaau

SEQ ID NO: 1620284 - RNA, 19 nt, Artificial Sequence
  Description of Artificial Sequence: Synthetic oligonucleotide
gaagaucacauuacugcag

SEQ ID NO: 1620285 - RNA, 19 nt, Artificial Sequence
  Description of Artificial Sequence: Synthetic oligonucleotide
uuauucuaucucagggaug

SEQ ID NO: 1620286 - RNA, 19 nt, Artificial Sequence
  Description of Artificial Sequence: Synthetic oligonucleotide
uuaaggucccaaugaagac

SEQ ID NO: 1620287 - RNA, 19 nt, Artificial Sequence
  Description of Artificial Sequence: Synthetic oligonucleotide
cucuaucacguaacaaugc

SEQ ID NO: 1620288 - RNA, 19 nt, Artificial Sequence
  Description of Artificial Sequence: Synthetic oligonucleotide
cagauucagagcauaguug

SEQ ID NO: 1620289 - RNA, 19 nt, Artificial Sequence
  Description of Artificial Sequence: Synthetic oligonucleotide
gugguaauuucgcaguagc

SEQ ID NO: 1620290 - RNA, 19 nt, Artificial Sequence
  Description of Artificial Sequence: Synthetic oligonucleotide
aagggcgugauuauaaaau

SEQ ID NO: 1620291 - RNA, 19 nt, Artificial Sequence
  Description of Artificial Sequence: Synthetic oligonucleotide
acacguauugagucacaac

SEQ ID NO: 1620292 - RNA, 19 nt, Artificial Sequence
  Description of Artificial Sequence: Synthetic oligonucleotide
ugcccaguaaccaccgugc

SEQ ID NO: 1620293 - RNA, 19 nt, Artificial Sequence
  Description of Artificial Sequence: Synthetic oligonucleotide
ugacuggaacuugauagag

SEQ ID NO: 1620294 - RNA, 19 nt, Artificial Sequence
  Description of Artificial Sequence: Synthetic oligonucleotide
uaccaugauggcauaguac

SEQ ID NO: 1620295 - RNA, 19 nt, Artificial Sequence
  Description of Artificial Sequence: Synthetic oligonucleotide
aaauaucccugcagacacc

SEQ ID NO: 1620296 - RNA, 19 nt, Artificial Sequence
  Description of Artificial Sequence: Synthetic oligonucleotide
gucacaacguucaugagga

SEQ ID NO: 1620297 - RNA, 19 nt, Artificial Sequence
  Description of Artificial Sequence: Synthetic oligonucleotide
ugccugguagccuugcuug

SEQ ID NO: 1620298 - RNA, 19 nt, Artificial Sequence
  Description of Artificial Sequence: Synthetic oligonucleotide
uaccuuagugggauagcag

SEQ ID NO: 1620299 - RNA, 19 nt, Artificial Sequence
  Description of Artificial Sequence: Synthetic oligonucleotide
ugaggcucacaaacuugcg

SEQ ID NO: 1620300 - RNA, 19 nt, Artificial Sequence
  Description of Artificial Sequence: Synthetic oligonucleotide
caagaagaugaaacccggg

SEQ ID NO: 1620301 - RNA, 19 nt, Artificial Sequence
  Description of Artificial Sequence: Synthetic oligonucleotide
gaggcucacaaacuugcgc

SEQ ID NO: 1620302 - RNA, 19 nt, Artificial Sequence
  Description of Artificial Sequence: Synthetic oligonucleotide
cacaacguucaugaggagg

SEQ ID NO: 1620303 - RNA, 19 nt, Artificial Sequence
  Description of Artificial Sequence: Synthetic oligonucleotide
cacaaacuugcgcagaguc

SEQ ID NO: 1620304 - RNA, 19 nt, Artificial Sequence
  Description of Artificial Sequence: Synthetic oligonucleotide
ugaugaccauaccugcgcc

SEQ ID NO: 1620305 - RNA, 19 nt, Artificial Sequence
  Description of Artificial Sequence: Synthetic oligonucleotide
uggaagggcgugauuauaa

SEQ ID NO: 1620306 - RNA, 19 nt, Artificial Sequence
  Description of Artificial Sequence: Synthetic oligonucleotide
auaauuccuaggaucaugu

SEQ ID NO: 1620307 - RNA, 19 nt, Artificial Sequence
  Description of Artificial Sequence: Synthetic oligonucleotide
cacgcugacgguaaagaac

SEQ ID NO: 1620308 - RNA, 19 nt, Artificial Sequence
  Description of Artificial Sequence: Synthetic oligonucleotide
acauuaaggucccaaugaa

SEQ ID NO: 1620309 - RNA, 19 nt, Artificial Sequence
  Description of Artificial Sequence: Synthetic oligonucleotide
ucaauacugugguaauuuc

SEQ ID NO: 1620310 - RNA, 19 nt, Artificial Sequence
  Description of Artificial Sequence: Synthetic oligonucleotide
auaaugccuccuuggaaug

SEQ ID NO: 1620311 - RNA, 19 nt, Artificial Sequence
  Description of Artificial Sequence: Synthetic oligonucleotide
agcagcucuaggaagauca

SEQ ID NO: 1620312 - RNA, 19 nt, Artificial Sequence
  Description of Artificial Sequence: Synthetic oligonucleotide
acaacguucaugaggaggu

SEQ ID NO: 1620313 - RNA, 19 nt, Artificial Sequence
  Description of Artificial Sequence: Synthetic oligonucleotide
ugugguaauuucgcaguag

SEQ ID NO: 1620314 - RNA, 19 nt, Artificial Sequence
  Description of Artificial Sequence: Synthetic oligonucleotide
augacuggaacuugauaga

SEQ ID NO: 1620315 - RNA, 19 nt, Artificial Sequence
  Description of Artificial Sequence: Synthetic oligonucleotide
aucauauguaggggcaugg

SEQ ID NO: 1620316 - RNA, 19 nt, Artificial Sequence
  Description of Artificial Sequence: Synthetic oligonucleotide
uaguaccuuagugggauag

SEQ ID NO: 1620317 - RNA, 19 nt, Artificial Sequence
  Description of Artificial Sequence: Synthetic oligonucleotide
auauguaggggcauggcga

SEQ ID NO: 1620318 - RNA, 19 nt, Artificial Sequence
  Description of Artificial Sequence: Synthetic oligonucleotide
uuaccaugauggcauagua

SEQ ID NO: 1620319 - RNA, 19 nt, Artificial Sequence
  Description of Artificial Sequence: Synthetic oligonucleotide
cuaucacguaacaaugcuc

SEQ ID NO: 1620320 - RNA, 19 nt, Artificial Sequence
  Description of Artificial Sequence: Synthetic oligonucleotide
ucccaagucagcuuacgaa

SEQ ID NO: 1620321 - RNA, 19 nt, Artificial Sequence
  Description of Artificial Sequence: Synthetic oligonucleotide
acgauguucccacauccug

SEQ ID NO: 1620322 - RNA, 19 nt, Artificial Sequence
  Description of Artificial Sequence: Synthetic oligonucleotide
aguaccuuagugggauagc

SEQ ID NO: 1620323 - RNA, 19 nt, Artificial Sequence
  Description of Artificial Sequence: Synthetic oligonucleotide
uuggaauaugcccauccuu

SEQ ID NO: 1620324 - RNA, 19 nt, Artificial Sequence
  Description of Artificial Sequence: Synthetic oligonucleotide
cucacaaacuugcgcagag

SEQ ID NO: 1620325 - RNA, 19 nt, Artificial Sequence
  Description of Artificial Sequence: Synthetic oligonucleotide
uucccaaacuguuuguaua

SEQ ID NO: 1620326 - RNA, 19 nt, Artificial Sequence
  Description of Artificial Sequence: Synthetic oligonucleotide
ugauggcauaguaccuuag

SEQ ID NO: 1620327 - RNA, 19 nt, Artificial Sequence
  Description of Artificial Sequence: Synthetic oligonucleotide
uucaucacgcugacgguaa

SEQ ID NO: 1620328 - RNA, 19 nt, Artificial Sequence
  Description of Artificial Sequence: Synthetic oligonucleotide
ucacguaacaaugcucugu

SEQ ID NO: 1620329 - RNA, 19 nt, Artificial Sequence
  Description of Artificial Sequence: Synthetic oligonucleotide
acgguaaagaacaugguua

SEQ ID NO: 1620330 - RNA, 19 nt, Artificial Sequence
  Description of Artificial Sequence: Synthetic oligonucleotide
gaugaacacgccacggaug

SEQ ID NO: 1620331 - RNA, 19 nt, Artificial Sequence
  Description of Artificial Sequence: Synthetic oligonucleotide
agcuuacgaaaaggaagcc

SEQ ID NO: 1620332 - RNA, 19 nt, Artificial Sequence
  Description of Artificial Sequence: Synthetic oligonucleotide
uaucauauguaggggcaug

SEQ ID NO: 1620333 - RNA, 19 nt, Artificial Sequence
  Description of Artificial Sequence: Synthetic oligonucleotide
uguaggggcauggcgaugu

SEQ ID NO: 1620334 - RNA, 19 nt, Artificial Sequence
  Description of Artificial Sequence: Synthetic oligonucleotide
cacguaacaaugcucuguc

SEQ ID NO: 1620335 - RNA, 19 nt, Artificial Sequence
  Description of Artificial Sequence: Synthetic oligonucleotide
acauccugggugcuuccgg

SEQ ID NO: 1620336 - RNA, 19 nt, Artificial Sequence
  Description of Artificial Sequence: Synthetic oligonucleotide
uugcgcagagucacaacca

SEQ ID NO: 1620337 - RNA, 19 nt, Artificial Sequence
  Description of Artificial Sequence: Synthetic oligonucleotide
cacggaugcacacguauug

SEQ ID NO: 1620338 - RNA, 19 nt, Artificial Sequence
  Description of Artificial Sequence: Synthetic oligonucleotide
ugaugacuggaacuugaua

SEQ ID NO: 1620339 - RNA, 19 nt, Artificial Sequence
  Description of Artificial Sequence: Synthetic oligonucleotide
cugugcaaaugucacgaug

SEQ ID NO: 1620340 - RNA, 19 nt, Artificial Sequence
  Description of Artificial Sequence: Synthetic oligonucleotide
aacccgggaaguggaaggg

SEQ ID NO: 1620341 - RNA, 19 nt, Artificial Sequence
  Description of Artificial Sequence: Synthetic oligonucleotide
aagugaaaugaugaccaua

SEQ ID NO: 1620342 - RNA, 19 nt, Artificial Sequence
  Description of Artificial Sequence: Synthetic oligonucleotide
acaugaucauaaauaucag

SEQ ID NO: 1620343 - RNA, 19 nt, Artificial Sequence
  Description of Artificial Sequence: Synthetic oligonucleotide
ugacgguaaagaacauggu

SEQ ID NO: 1620344 - RNA, 19 nt, Artificial Sequence
  Description of Artificial Sequence: Synthetic oligonucleotide
agagagccggaucugaaua

SEQ ID NO: 1620345 - RNA, 19 nt, Artificial Sequence
  Description of Artificial Sequence: Synthetic oligonucleotide
aauguuucccaaacuguuu

SEQ ID NO: 1620346 - RNA, 19 nt, Artificial Sequence
  Description of Artificial Sequence: Synthetic oligonucleotide
gaaacccgggaaguggaag

SEQ ID NO: 1620347 - RNA, 19 nt, Artificial Sequence
  Description of Artificial Sequence: Synthetic oligonucleotide
ccaagaagaugaaacccgg

SEQ ID NO: 1620348 - RNA, 19 nt, Artificial Sequence
  Description of Artificial Sequence: Synthetic oligonucleotide
cauccugggugcuuccggg

SEQ ID NO: 1620349 - RNA, 19 nt, Artificial Sequence
  Description of Artificial Sequence: Synthetic oligonucleotide
acuugcgcagagucacaac

SEQ ID NO: 1620350 - RNA, 19 nt, Artificial Sequence
  Description of Artificial Sequence: Synthetic oligonucleotide
acgcugacgguaaagaaca

SEQ ID NO: 1620351 - RNA, 19 nt, Artificial Sequence
  Description of Artificial Sequence: Synthetic oligonucleotide
auacugugguaauuucgca

SEQ ID NO: 1620352 - RNA, 19 nt, Artificial Sequence
  Description of Artificial Sequence: Synthetic oligonucleotide
uauguaggggcauggcgau

SEQ ID NO: 1620353 - RNA, 19 nt, Artificial Sequence
  Description of Artificial Sequence: Synthetic oligonucleotide
ucgcaguagccaaagugaa

SEQ ID NO: 1620354 - RNA, 19 nt, Artificial Sequence
  Description of Artificial Sequence: Synthetic oligonucleotide
uaauuucgcaguagccaaa

SEQ ID NO: 1620355 - RNA, 19 nt, Artificial Sequence
  Description of Artificial Sequence: Synthetic oligonucleotide
gaagggcgugauuauaaaa

SEQ ID NO: 1620356 - RNA, 19 nt, Artificial Sequence
  Description of Artificial Sequence: Synthetic oligonucleotide
aggaugaacacgccacgga

SEQ ID NO: 1620357 - RNA, 19 nt, Artificial Sequence
  Description of Artificial Sequence: Synthetic oligonucleotide
ucauauguaggggcauggc

SEQ ID NO: 1620358 - RNA, 19 nt, Artificial Sequence
  Description of Artificial Sequence: Synthetic oligonucleotide
cuuagugggauagcaggug

SEQ ID NO: 1620359 - RNA, 19 nt, Artificial Sequence
  Description of Artificial Sequence: Synthetic oligonucleotide
ugucacgauguucccacau

SEQ ID NO: 1620360 - RNA, 19 nt, Artificial Sequence
  Description of Artificial Sequence: Synthetic oligonucleotide
aaucagagagccggaucug

SEQ ID NO: 1620361 - RNA, 19 nt, Artificial Sequence
  Description of Artificial Sequence: Synthetic oligonucleotide
ugcacacguauugagucac

SEQ ID NO: 1620362 - RNA, 19 nt, Artificial Sequence
  Description of Artificial Sequence: Synthetic oligonucleotide
ggacuguuggguucaauac

SEQ ID NO: 1620363 - RNA, 19 nt, Artificial Sequence
  Description of Artificial Sequence: Synthetic oligonucleotide
uguucaucacgcugacggu

SEQ ID NO: 1620364 - RNA, 19 nt, Artificial Sequence
  Description of Artificial Sequence: Synthetic oligonucleotide
agggaugccuacucggagu

SEQ ID NO: 1620365 - RNA, 19 nt, Artificial Sequence
  Description of Artificial Sequence: Synthetic oligonucleotide
gugaaaugaugaccauacc

SEQ ID NO: 1620366 - RNA, 19 nt, Artificial Sequence
  Description of Artificial Sequence: Synthetic oligonucleotide
gcgaacaccaggcccaccg

SEQ ID NO: 1620367 - RNA, 19 nt, Artificial Sequence
  Description of Artificial Sequence: Synthetic oligonucleotide
guauugagucacaacguuc

SEQ ID NO: 1620368 - RNA, 19 nt, Artificial Sequence
  Description of Artificial Sequence: Synthetic oligonucleotide
gaacacgccacggaugcac

SEQ ID NO: 1620369 - RNA, 19 nt, Artificial Sequence
  Description of Artificial Sequence: Synthetic oligonucleotide
agggcgugauuauaaaaua

SEQ ID NO: 1620370 - RNA, 19 nt, Artificial Sequence
  Description of Artificial Sequence: Synthetic oligonucleotide
gagucucuuggaauaugcc

SEQ ID NO: 1620371 - RNA, 19 nt, Artificial Sequence
  Description of Artificial Sequence: Synthetic oligonucleotide
ccucuaucacguaacaaug

SEQ ID NO: 1620372 - RNA, 19 nt, Artificial Sequence
  Description of Artificial Sequence: Synthetic oligonucleotide
aucacguaacaaugcucug

SEQ ID NO: 1620373 - RNA, 19 nt, Artificial Sequence
  Description of Artificial Sequence: Synthetic oligonucleotide
ucacgcugacgguaaagaa

SEQ ID NO: 1620374 - RNA, 19 nt, Artificial Sequence
  Description of Artificial Sequence: Synthetic oligonucleotide
guagaaccacaugaugggc

SEQ ID NO: 1620375 - RNA, 19 nt, Artificial Sequence
  Description of Artificial Sequence: Synthetic oligonucleotide
agagccggaucugaauauc

SEQ ID NO: 1620376 - RNA, 19 nt, Artificial Sequence
  Description of Artificial Sequence: Synthetic oligonucleotide
ccaaucgucugccugguag

SEQ ID NO: 1620377 - RNA, 19 nt, Artificial Sequence
  Description of Artificial Sequence: Synthetic oligonucleotide
augcacacguauugaguca

SEQ ID NO: 1620378 - RNA, 19 nt, Artificial Sequence
  Description of Artificial Sequence: Synthetic oligonucleotide
acugaugacuggaacuuga

SEQ ID NO: 1620379 - RNA, 19 nt, Artificial Sequence
  Description of Artificial Sequence: Synthetic oligonucleotide
caugguuaccaugauggca

SEQ ID NO: 1620380 - RNA, 19 nt, Artificial Sequence
  Description of Artificial Sequence: Synthetic oligonucleotide
ucuggggacuguuggguuc

SEQ ID NO: 1620381 - RNA, 19 nt, Artificial Sequence
  Description of Artificial Sequence: Synthetic oligonucleotide
auaccugcgccagaggccu

SEQ ID NO: 1620382 - RNA, 19 nt, Artificial Sequence
  Description of Artificial Sequence: Synthetic oligonucleotide
agccugcgaacaccaggcc

SEQ ID NO: 1620383 - RNA, 19 nt, Artificial Sequence
  Description of Artificial Sequence: Synthetic oligonucleotide
cuaucucagggaugccuac

SEQ ID NO: 1620384 - RNA, 19 nt, Artificial Sequence
  Description of Artificial Sequence: Synthetic oligonucleotide
aacuugcgcagagucacaa

SEQ ID NO: 1620385 - RNA, 19 nt, Artificial Sequence
  Description of Artificial Sequence: Synthetic oligonucleotide
cagaggcuagccaaucguc

SEQ ID NO: 1620386 - RNA, 19 nt, Artificial Sequence
  Description of Artificial Sequence: Synthetic oligonucleotide
aaugcccaguaaccaccgu

SEQ ID NO: 1620387 - RNA, 19 nt, Artificial Sequence
  Description of Artificial Sequence: Synthetic oligonucleotide
acguauugagucacaacgu

SEQ ID NO: 1620388 - RNA, 19 nt, Artificial Sequence
  Description of Artificial Sequence: Synthetic oligonucleotide
guaccuuagugggauagca

SEQ ID NO: 1620389 - RNA, 19 nt, Artificial Sequence
  Description of Artificial Sequence: Synthetic oligonucleotide
acaaacuugcgcagaguca

SEQ ID NO: 1620390 - RNA, 19 nt, Artificial Sequence
  Description of Artificial Sequence: Synthetic oligonucleotide
acacgccacggaugcacac

SEQ ID NO: 1620391 - RNA, 19 nt, Artificial Sequence
  Description of Artificial Sequence: Synthetic oligonucleotide
gaaggccgggcgcauggcc

SEQ ID NO: 1620392 - RNA, 19 nt, Artificial Sequence
  Description of Artificial Sequence: Synthetic oligonucleotide
ccacaugaugggcauagcc

SEQ ID NO: 1620393 - RNA, 19 nt, Artificial Sequence
  Description of Artificial Sequence: Synthetic oligonucleotide
agugcuccaaugcccagua

SEQ ID NO: 1620394 - RNA, 19 nt, Artificial Sequence
  Description of Artificial Sequence: Synthetic oligonucleotide
cuucccaagucagcuuacg

SEQ ID NO: 1620395 - RNA, 19 nt, Artificial Sequence
  Description of Artificial Sequence: Synthetic oligonucleotide
agggcaauggagguauacu

SEQ ID NO: 1620396 - RNA, 19 nt, Artificial Sequence
  Description of Artificial Sequence: Synthetic oligonucleotide
uuccuaggaucauguuggc

SEQ ID NO: 1620397 - RNA, 19 nt, Artificial Sequence
  Description of Artificial Sequence: Synthetic oligonucleotide
guauagagucucuuggaau

SEQ ID NO: 1620398 - RNA, 19 nt, Artificial Sequence
  Description of Artificial Sequence: Synthetic oligonucleotide
ucagugcuccaaugcccag

SEQ ID NO: 1620399 - RNA, 19 nt, Artificial Sequence
  Description of Artificial Sequence: Synthetic oligonucleotide
cuggaacuugauagaguuc

SEQ ID NO: 1620400 - RNA, 19 nt, Artificial Sequence
  Description of Artificial Sequence: Synthetic oligonucleotide
aguaaccaccgugcaaaug

SEQ ID NO: 1620401 - RNA, 19 nt, Artificial Sequence
  Description of Artificial Sequence: Synthetic oligonucleotide
cagggaugccuacucggag

SEQ ID NO: 1620402 - RNA, 19 nt, Artificial Sequence
  Description of Artificial Sequence: Synthetic oligonucleotide
auaucauauguaggggcau

SEQ ID NO: 1620403 - RNA, 19 nt, Artificial Sequence
  Description of Artificial Sequence: Synthetic oligonucleotide
auuucgcaguagccaaagu

SEQ ID NO: 1620404 - RNA, 19 nt, Artificial Sequence
  Description of Artificial Sequence: Synthetic oligonucleotide
auugagucacaacguucau

SEQ ID NO: 1620405 - RNA, 19 nt, Artificial Sequence
  Description of Artificial Sequence: Synthetic oligonucleotide
uaucucagggaugccuacu

SEQ ID NO: 1620406 - RNA, 19 nt, Artificial Sequence
  Description of Artificial Sequence: Synthetic oligonucleotide
ucacaacguucaugaggag

SEQ ID NO: 1620407 - RNA, 19 nt, Artificial Sequence
  Description of Artificial Sequence: Synthetic oligonucleotide
uaauuccuaggaucauguu

SEQ ID NO: 1620408 - RNA, 19 nt, Artificial Sequence
  Description of Artificial Sequence: Synthetic oligonucleotide
augaaacccgggaagugga

SEQ ID NO: 1620409 - RNA, 19 nt, Artificial Sequence
  Description of Artificial Sequence: Synthetic oligonucleotide
gugccacagagugaacggg

SEQ ID NO: 1620410 - RNA, 19 nt, Artificial Sequence
  Description of Artificial Sequence: Synthetic oligonucleotide
uagaaaagaugaggcucac

SEQ ID NO: 1620411 - RNA, 19 nt, Artificial Sequence
  Description of Artificial Sequence: Synthetic oligonucleotide
accaccgugcaaaugccug

SEQ ID NO: 1620412 - RNA, 19 nt, Artificial Sequence
  Description of Artificial Sequence: Synthetic oligonucleotide
guuguucaucacgcugacg

SEQ ID NO: 1620413 - RNA, 19 nt, Artificial Sequence
  Description of Artificial Sequence: Synthetic oligonucleotide
acguaacaaugcucugucu

SEQ ID NO: 1620414 - RNA, 19 nt, Artificial Sequence
  Description of Artificial Sequence: Synthetic oligonucleotide
auagagucucuuggaauau

SEQ ID NO: 1620415 - RNA, 19 nt, Artificial Sequence
  Description of Artificial Sequence: Synthetic oligonucleotide
cgauguucccacauccugg

SEQ ID NO: 1620416 - RNA, 19 nt, Artificial Sequence
  Description of Artificial Sequence: Synthetic oligonucleotide
cucuguugugaggaugaac

SEQ ID NO: 1620417 - RNA, 19 nt, Artificial Sequence
  Description of Artificial Sequence: Synthetic oligonucleotide
accacaugaugggcauagc

SEQ ID NO: 1620418 - RNA, 19 nt, Artificial Sequence
  Description of Artificial Sequence: Synthetic oligonucleotide
acccgggaaguggaagggc

SEQ ID NO: 1620419 - RNA, 19 nt, Artificial Sequence
  Description of Artificial Sequence: Synthetic oligonucleotide
uggcaaucagagagccgga

SEQ ID NO: 1620420 - RNA, 19 nt, Artificial Sequence
  Description of Artificial Sequence: Synthetic oligonucleotide
aucagagagccggaucuga

SEQ ID NO: 1620421 - RNA, 19 nt, Artificial Sequence
  Description of Artificial Sequence: Synthetic oligonucleotide
gguaaagaacaugguuacc

SEQ ID NO: 1620422 - RNA, 19 nt, Artificial Sequence
  Description of Artificial Sequence: Synthetic oligonucleotide
auacuugaacauacuguau

SEQ ID NO: 1620423 - RNA, 19 nt, Artificial Sequence
  Description of Artificial Sequence: Synthetic oligonucleotide
acgccacggaugcacacgu

SEQ ID NO: 1620424 - RNA, 19 nt, Artificial Sequence
  Description of Artificial Sequence: Synthetic oligonucleotide
ggcucacaaacuugcgcag

SEQ ID NO: 1620425 - RNA, 19 nt, Artificial Sequence
  Description of Artificial Sequence: Synthetic oligonucleotide
caucacgcugacgguaaag

SEQ ID NO: 1620426 - RNA, 19 nt, Artificial Sequence
  Description of Artificial Sequence: Synthetic oligonucleotide
cgguaaagaacaugguuac

SEQ ID NO: 1620427 - RNA, 19 nt, Artificial Sequence
  Description of Artificial Sequence: Synthetic oligonucleotide
cacgccacggaugcacacg

SEQ ID NO: 1620428 - RNA, 19 nt, Artificial Sequence
  Description of Artificial Sequence: Synthetic oligonucleotide
cucggagucuacaaaggcu

SEQ ID NO: 1620429 - RNA, 19 nt, Artificial Sequence
  Description of Artificial Sequence: Synthetic oligonucleotide
ggucagugcuccaaugccc

SEQ ID NO: 1620430 - RNA, 19 nt, Artificial Sequence
  Description of Artificial Sequence: Synthetic oligonucleotide
cauaguaccuuagugggau

SEQ ID NO: 1620431 - RNA, 19 nt, Artificial Sequence
  Description of Artificial Sequence: Synthetic oligonucleotide
gaugccuacucggagucua

SEQ ID NO: 1620432 - RNA, 19 nt, Artificial Sequence
  Description of Artificial Sequence: Synthetic oligonucleotide
aggccucuaucacguaaca

SEQ ID NO: 1620433 - RNA, 19 nt, Artificial Sequence
  Description of Artificial Sequence: Synthetic oligonucleotide
gucagugcuccaaugccca

SEQ ID NO: 1620434 - RNA, 19 nt, Artificial Sequence
  Description of Artificial Sequence: Synthetic oligonucleotide
acggaugcacacguauuga

SEQ ID NO: 1620435 - RNA, 19 nt, Artificial Sequence
  Description of Artificial Sequence: Synthetic oligonucleotide
caaccagcgugacggugag

SEQ ID NO: 1620436 - RNA, 19 nt, Artificial Sequence
  Description of Artificial Sequence: Synthetic oligonucleotide
aaccaccgugcaaaugccu

SEQ ID NO: 1620437 - RNA, 19 nt, Artificial Sequence
  Description of Artificial Sequence: Synthetic oligonucleotide
guuaccaugauggcauagu

SEQ ID NO: 1620438 - RNA, 19 nt, Artificial Sequence
  Description of Artificial Sequence: Synthetic oligonucleotide
aacacgccacggaugcaca

SEQ ID NO: 1620439 - RNA, 19 nt, Artificial Sequence
  Description of Artificial Sequence: Synthetic oligonucleotide
gccucuaucacguaacaau

SEQ ID NO: 1620440 - RNA, 19 nt, Artificial Sequence
  Description of Artificial Sequence: Synthetic oligonucleotide
cuugcgguguuuauucuau

SEQ ID NO: 1620441 - RNA, 19 nt, Artificial Sequence
  Description of Artificial Sequence: Synthetic oligonucleotide
acagagugaacggguucug

SEQ ID NO: 1620442 - RNA, 19 nt, Artificial Sequence
  Description of Artificial Sequence: Synthetic oligonucleotide
ucaucacgcugacgguaaa

SEQ ID NO: 1620443 - RNA, 19 nt, Artificial Sequence
  Description of Artificial Sequence: Synthetic oligonucleotide
uugcgguguuuauucuauc

SEQ ID NO: 1620444 - RNA, 19 nt, Artificial Sequence
  Description of Artificial Sequence: Synthetic oligonucleotide
gguagccuugcuugcggug

SEQ ID NO: 1620445 - RNA, 19 nt, Artificial Sequence
  Description of Artificial Sequence: Synthetic oligonucleotide
agaggugcucuggggacug

SEQ ID NO: 1620446 - RNA, 19 nt, Artificial Sequence
  Description of Artificial Sequence: Synthetic oligonucleotide
ugaacggguucuggaagua

SEQ ID NO: 1620447 - RNA, 19 nt, Artificial Sequence
  Description of Artificial Sequence: Synthetic oligonucleotide
gcugacgguaaagaacaug

SEQ ID NO: 1620448 - RNA, 19 nt, Artificial Sequence
  Description of Artificial Sequence: Synthetic oligonucleotide
gguuaccaugauggcauag

SEQ ID NO: 1620449 - RNA, 19 nt, Artificial Sequence
  Description of Artificial Sequence: Synthetic oligonucleotide
cacugaugacuggaacuug

SEQ ID NO: 1620450 - RNA, 19 nt, Artificial Sequence
  Description of Artificial Sequence: Synthetic oligonucleotide
gccugcgaacaccaggccc

SEQ ID NO: 1620451 - RNA, 19 nt, Artificial Sequence
  Description of Artificial Sequence: Synthetic oligonucleotide
ugccuacucggagucuaca

SEQ ID NO: 1620452 - RNA, 19 nt, Artificial Sequence
  Description of Artificial Sequence: Synthetic oligonucleotide
cagggcacggggugcgagc

SEQ ID NO: 1620453 - RNA, 19 nt, Artificial Sequence
  Description of Artificial Sequence: Synthetic oligonucleotide
acagaacaacaugaucaua

SEQ ID NO: 1620454 - RNA, 19 nt, Artificial Sequence
  Description of Artificial Sequence: Synthetic oligonucleotide
cccaagucagcuuacgaaa

SEQ ID NO: 1620455 - RNA, 19 nt, Artificial Sequence
  Description of Artificial Sequence: Synthetic oligonucleotide
guuucccaaacuguuugua

SEQ ID NO: 1620456 - RNA, 19 nt, Artificial Sequence
  Description of Artificial Sequence: Synthetic oligonucleotide
auaguaccuuagugggaua

SEQ ID NO: 1620457 - RNA, 19 nt, Artificial Sequence
  Description of Artificial Sequence: Synthetic oligonucleotide
uggguucaauacuguggua

SEQ ID NO: 1620458 - RNA, 19 nt, Artificial Sequence
  Description of Artificial Sequence: Synthetic oligonucleotide
augccuacucggagucuac

SEQ ID NO: 1620459 - RNA, 19 nt, Artificial Sequence
  Description of Artificial Sequence: Synthetic oligonucleotide
gggaugccuacucggaguc

SEQ ID NO: 1620460 - RNA, 19 nt, Artificial Sequence
  Description of Artificial Sequence: Synthetic oligonucleotide
acggugagggaggugcacu

SEQ ID NO: 1620461 - RNA, 19 nt, Artificial Sequence
  Description of Artificial Sequence: Synthetic oligonucleotide
uuacugcagcagccugcga

SEQ ID NO: 1620462 - RNA, 19 nt, Artificial Sequence
  Description of Artificial Sequence: Synthetic oligonucleotide
gcucugauguucuggcaca

SEQ ID NO: 1620463 - RNA, 19 nt, Artificial Sequence
  Description of Artificial Sequence: Synthetic oligonucleotide
gagagccggaucugaauau

SEQ ID NO: 1620464 - RNA, 19 nt, Artificial Sequence
  Description of Artificial Sequence: Synthetic oligonucleotide
gcaguagccaaagugaaau

SEQ ID NO: 1620465 - RNA, 19 nt, Artificial Sequence
  Description of Artificial Sequence: Synthetic oligonucleotide
ccaguaaccaccgugcaaa

SEQ ID NO: 1620466 - RNA, 19 nt, Artificial Sequence
  Description of Artificial Sequence: Synthetic oligonucleotide
ggcacggggugcgagcgcg

SEQ ID NO: 1620467 - RNA, 19 nt, Artificial Sequence
  Description of Artificial Sequence: Synthetic oligonucleotide
ccuggaauccauccuucuc

SEQ ID NO: 1620468 - RNA, 19 nt, Artificial Sequence
  Description of Artificial Sequence: Synthetic oligonucleotide
auggccggugcagggcacg

SEQ ID NO: 1620469 - RNA, 19 nt, Artificial Sequence
  Description of Artificial Sequence: Synthetic oligonucleotide
cacacguauugagucacaa

SEQ ID NO: 1620470 - RNA, 19 nt, Artificial Sequence
  Description of Artificial Sequence: Synthetic oligonucleotide
ugguuaccaugauggcaua

SEQ ID NO: 1620471 - RNA, 19 nt, Artificial Sequence
  Description of Artificial Sequence: Synthetic oligonucleotide
cacagagugaacggguucu

SEQ ID NO: 1620472 - RNA, 19 nt, Artificial Sequence
  Description of Artificial Sequence: Synthetic oligonucleotide
gagucacaaccagcgugac

SEQ ID NO: 1620473 - RNA, 19 nt, Artificial Sequence
  Description of Artificial Sequence: Synthetic oligonucleotide
guagccuugcuugcggugu

SEQ ID NO: 1620474 - RNA, 19 nt, Artificial Sequence
  Description of Artificial Sequence: Synthetic oligonucleotide
cggaugcacacguauugag

SEQ ID NO: 1620475 - RNA, 19 nt, Artificial Sequence
  Description of Artificial Sequence: Synthetic oligonucleotide
gggcgugauuauaaaauaa

SEQ ID NO: 1620476 - RNA, 19 nt, Artificial Sequence
  Description of Artificial Sequence: Synthetic oligonucleotide
accgcgaaggccgggcgca

SEQ ID NO: 1620477 - RNA, 19 nt, Artificial Sequence
  Description of Artificial Sequence: Synthetic oligonucleotide
caccgcgaaggccgggcgc

SEQ ID NO: 1620478 - RNA, 19 nt, Artificial Sequence
  Description of Artificial Sequence: Synthetic oligonucleotide
gggauagcagguggcuucc

SEQ ID NO: 1620479 - RNA, 19 nt, Artificial Sequence
  Description of Artificial Sequence: Synthetic oligonucleotide
accgugcaaaugccuggaa

SEQ ID NO: 1620480 - RNA, 19 nt, Artificial Sequence
  Description of Artificial Sequence: Synthetic oligonucleotide
gguggcuuccuucccaagu

SEQ ID NO: 1620481 - RNA, 19 nt, Artificial Sequence
  Description of Artificial Sequence: Synthetic oligonucleotide
agccggaucugaauaucau

SEQ ID NO: 1620482 - RNA, 19 nt, Artificial Sequence
  Description of Artificial Sequence: Synthetic oligonucleotide
auguucagauucagagcau

SEQ ID NO: 1620483 - RNA, 19 nt, Artificial Sequence
  Description of Artificial Sequence: Synthetic oligonucleotide
cauggccggugcagggcac

SEQ ID NO: 1620484 - RNA, 19 nt, Artificial Sequence
  Description of Artificial Sequence: Synthetic oligonucleotide
cuguuuguauagagucucu

SEQ ID NO: 1620485 - RNA, 19 nt, Artificial Sequence
  Description of Artificial Sequence: Synthetic oligonucleotide
ccucuguguacauuaaggu

SEQ ID NO: 1620486 - RNA, 19 nt, Artificial Sequence
  Description of Artificial Sequence: Synthetic oligonucleotide
cugugguaauuucgcagua

SEQ ID NO: 1620487 - RNA, 19 nt, Artificial Sequence
  Description of Artificial Sequence: Synthetic oligonucleotide
acggggugcgagcgcgcag

SEQ ID NO: 1620488 - RNA, 19 nt, Artificial Sequence
  Description of Artificial Sequence: Synthetic oligonucleotide
ccaagucagcuuacgaaaa

SEQ ID NO: 1620489 - RNA, 19 nt, Artificial Sequence
  Description of Artificial Sequence: Synthetic oligonucleotide
gcuuacgaaaaggaagccu

SEQ ID NO: 1620490 - RNA, 19 nt, Artificial Sequence
  Description of Artificial Sequence: Synthetic oligonucleotide
cacgauguucccacauccu

SEQ ID NO: 1620491 - RNA, 19 nt, Artificial Sequence
  Description of Artificial Sequence: Synthetic oligonucleotide
gcagaggcuagccaaucgu

SEQ ID NO: 1620492 - RNA, 19 nt, Artificial Sequence
  Description of Artificial Sequence: Synthetic oligonucleotide
auguaggggcauggcgaug

SEQ ID NO: 1620493 - RNA, 19 nt, Artificial Sequence
  Description of Artificial Sequence: Synthetic oligonucleotide
gccggaucugaauaucaua

SEQ ID NO: 1620494 - RNA, 19 nt, Artificial Sequence
  Description of Artificial Sequence: Synthetic oligonucleotide
gcuugcgguguuuauucua

SEQ ID NO: 1620495 - RNA, 19 nt, Artificial Sequence
  Description of Artificial Sequence: Synthetic oligonucleotide
ccacagagugaacggguuc

SEQ ID NO: 1620496 - RNA, 19 nt, Artificial Sequence
  Description of Artificial Sequence: Synthetic oligonucleotide
ggagguagaaccacaugau

SEQ ID NO: 1620497 - RNA, 19 nt, Artificial Sequence
  Description of Artificial Sequence: Synthetic oligonucleotide
gccuacucggagucuacaa

SEQ ID NO: 1620498 - RNA, 19 nt, Artificial Sequence
  Description of Artificial Sequence: Synthetic oligonucleotide
cuguuggguucaauacugu

SEQ ID NO: 1620499 - RNA, 19 nt, Artificial Sequence
  Description of Artificial Sequence: Synthetic oligonucleotide
ggcgauguucagauucaga

SEQ ID NO: 1620500 - RNA, 19 nt, Artificial Sequence
  Description of Artificial Sequence: Synthetic oligonucleotide
ggaugcacacguauugagu

SEQ ID NO: 1620501 - RNA, 19 nt, Artificial Sequence
  Description of Artificial Sequence: Synthetic oligonucleotide
ccuacucggagucuacaaa

SEQ ID NO: 1620502 - RNA, 19 nt, Artificial Sequence
  Description of Artificial Sequence: Synthetic oligonucleotide
gcauggccggugcagggca

SEQ ID NO: 1620503 - RNA, 19 nt, Artificial Sequence
  Description of Artificial Sequence: Synthetic oligonucleotide
ccuucccaagucagcuuac

SEQ ID NO: 1620504 - RNA, 19 nt, Artificial Sequence
  Description of Artificial Sequence: Synthetic oligonucleotide
gcagaugagucccauucuu

SEQ ID NO: 1620505 - RNA, 19 nt, Artificial Sequence
  Description of Artificial Sequence: Synthetic oligonucleotide
gacugggaagucaccugcu

SEQ ID NO: 1620506 - RNA, 19 nt, Artificial Sequence
  Description of Artificial Sequence: Synthetic oligonucleotide
gcucacaaacuugcgcaga

SEQ ID NO: 1620507 - RNA, 19 nt, Artificial Sequence
  Description of Artificial Sequence: Synthetic oligonucleotide
gggcgcauggccggugcag

SEQ ID NO: 1620508 - RNA, 19 nt, Artificial Sequence
  Description of Artificial Sequence: Synthetic oligonucleotide
gcccaguaaccaccgugca

SEQ ID NO: 1620509 - RNA, 19 nt, Artificial Sequence
  Description of Artificial Sequence: Synthetic oligonucleotide
ccaccgcgaaggccgggcg

SEQ ID NO: 1620510 - RNA, 19 nt, Artificial Sequence
  Description of Artificial Sequence: Synthetic oligonucleotide
cugccugguagccuugcuu

SEQ ID NO: 1620511 - RNA, 19 nt, Artificial Sequence
  Description of Artificial Sequence: Synthetic oligonucleotide
cccaguaaccaccgugcaa

SEQ ID NO: 1620512 - RNA, 19 nt, Artificial Sequence
  Description of Artificial Sequence: Synthetic oligonucleotide
caacguucaugaggaggua

SEQ ID NO: 1620513 - RNA, 19 nt, Artificial Sequence
  Description of Artificial Sequence: Synthetic oligonucleotide
gugcuccaaugcccaguaa

SEQ ID NO: 1620514 - RNA, 19 nt, Artificial Sequence
  Description of Artificial Sequence: Synthetic oligonucleotide
cccaccgcgaaggccgggc

SEQ ID NO: 1620515 - RNA, 19 nt, Artificial Sequence
  Description of Artificial Sequence: Synthetic oligonucleotide
cacggggugcgagcgcgca

SEQ ID NO: 1620516 - RNA, 19 nt, Artificial Sequence
  Description of Artificial Sequence: Synthetic oligonucleotide
gcacacguauugagucaca

SEQ ID NO: 1620517 - RNA, 19 nt, Artificial Sequence
  Description of Artificial Sequence: Synthetic oligonucleotide
cgcauggccggugcagggc

SEQ ID NO: 1620518 - RNA, 19 nt, Artificial Sequence
  Description of Artificial Sequence: Synthetic oligonucleotide
ggcccaccgcgaaggccgg

SEQ ID NO: 1620519 - RNA, 19 nt, Artificial Sequence
  Description of Artificial Sequence: Synthetic oligonucleotide
ccgugcaaaugccuggaau

SEQ ID NO: 1620520 - RNA, 19 nt, Artificial Sequence
  Description of Artificial Sequence: Synthetic oligonucleotide
guaggggcauggcgauguu

SEQ ID NO: 1620521 - RNA, 19 nt, Artificial Sequence
  Description of Artificial Sequence: Synthetic oligonucleotide
ccacggaugcacacguauu

SEQ ID NO: 1620522 - RNA, 19 nt, Artificial Sequence
  Description of Artificial Sequence: Synthetic oligonucleotide
gcacggggugcgagcgcgc

SEQ ID NO: 1620523 - RNA, 19 nt, Artificial Sequence
  Description of Artificial Sequence: Synthetic oligonucleotide
gccaaucgucugccuggua

SEQ ID NO: 1620524 - RNA, 19 nt, Artificial Sequence
  Description of Artificial Sequence: Synthetic oligonucleotide
ggauagcagguggcuuccu

SEQ ID NO: 1620525 - RNA, 19 nt, Artificial Sequence
  Description of Artificial Sequence: Synthetic oligonucleotide
cgugacggugagggaggug

SEQ ID NO: 1620526 - RNA, 19 nt, Artificial Sequence
  Description of Artificial Sequence: Synthetic oligonucleotide
gcccaccgcgaaggccggg

SEQ ID NO: 1620527 - RNA, 19 nt, Artificial Sequence
  Description of Artificial Sequence: Synthetic oligonucleotide
cggggugcgagcgcgcaga

SEQ ID NO: 1620528 - RNA, 19 nt, Artificial Sequence
  Description of Artificial Sequence: Synthetic oligonucleotide
ggggacuguuggguucaau

SEQ ID NO: 1620529 - RNA, 19 nt, Artificial Sequence
  Description of Artificial Sequence: Synthetic oligonucleotide
gcgugacggugagggaggu

SEQ ID NO: 1620530 - RNA, 19 nt, Artificial Sequence
  Description of Artificial Sequence: Synthetic oligonucleotide
cgcugacgguaaagaacau

SEQ ID NO: 1620531 - RNA, 19 nt, Artificial Sequence
  Description of Artificial Sequence: Synthetic oligonucleotide
cgccacggaugcacacgua

SEQ ID NO: 1620532 - RNA, 19 nt, Artificial Sequence
  Description of Artificial Sequence: Synthetic oligonucleotide
ccgcgaaggccgggcgcau

SEQ ID NO: 1620533 - RNA, 19 nt, Artificial Sequence
  Description of Artificial Sequence: Synthetic oligonucleotide
ugcgaaaucacacugugcc

SEQ ID NO: 1620534 - RNA, 19 nt, Artificial Sequence
  Description of Artificial Sequence: Synthetic oligonucleotide
cuugauauagccaggauuc

SEQ ID NO: 1620535 - RNA, 19 nt, Artificial Sequence
  Description of Artificial Sequence: Synthetic oligonucleotide
uguagauucagcacaaggu

SEQ ID NO: 1620536 - RNA, 19 nt, Artificial Sequence
  Description of Artificial Sequence: Synthetic oligonucleotide
uuguagauucagcacaagg

SEQ ID NO: 1620537 - RNA, 19 nt, Artificial Sequence
  Description of Artificial Sequence: Synthetic oligonucleotide
acuguaggaaaucacugcg

SEQ ID NO: 1620538 - RNA, 19 nt, Artificial Sequence
  Description of Artificial Sequence: Synthetic oligonucleotide
agugauagcuacaucgucc

SEQ ID NO: 1620539 - RNA, 19 nt, Artificial Sequence
  Description of Artificial Sequence: Synthetic oligonucleotide
aaucacugcgaaaucacac

SEQ ID NO: 1620540 - RNA, 19 nt, Artificial Sequence
  Description of Artificial Sequence: Synthetic oligonucleotide
uugagaauuucugggaugg

SEQ ID NO: 1620541 - RNA, 19 nt, Artificial Sequence
  Description of Artificial Sequence: Synthetic oligonucleotide
ugucugauccuccggaagg

SEQ ID NO: 1620542 - RNA, 19 nt, Artificial Sequence
  Description of Artificial Sequence: Synthetic oligonucleotide
aguacagaggacuccauug

SEQ ID NO: 1620543 - RNA, 19 nt, Artificial Sequence
  Description of Artificial Sequence: Synthetic oligonucleotide
uggguaaucagcugcgagg

SEQ ID NO: 1620544 - RNA, 19 nt, Artificial Sequence
  Description of Artificial Sequence: Synthetic oligonucleotide
aguuuacagaccuccgccc

SEQ ID NO: 1620545 - RNA, 19 nt, Artificial Sequence
  Description of Artificial Sequence: Synthetic oligonucleotide
agcuacaucguccaggaug

SEQ ID NO: 1620546 - RNA, 19 nt, Artificial Sequence
  Description of Artificial Sequence: Synthetic oligonucleotide
aacacggacucgcggacgc

SEQ ID NO: 1620547 - RNA, 19 nt, Artificial Sequence
  Description of Artificial Sequence: Synthetic oligonucleotide
gauagcuacaucguccagg

SEQ ID NO: 1620548 - RNA, 19 nt, Artificial Sequence
  Description of Artificial Sequence: Synthetic oligonucleotide
gaaauguucaccaucugca

SEQ ID NO: 1620549 - RNA, 19 nt, Artificial Sequence
  Description of Artificial Sequence: Synthetic oligonucleotide
ucgucuuguagauucagca

SEQ ID NO: 1620550 - RNA, 19 nt, Artificial Sequence
  Description of Artificial Sequence: Synthetic oligonucleotide
ugaugcucgggucagggug

SEQ ID NO: 1620551 - RNA, 19 nt, Artificial Sequence
  Description of Artificial Sequence: Synthetic oligonucleotide
agauagaugcgguucuggg

SEQ ID NO: 1620552 - RNA, 19 nt, Artificial Sequence
  Description of Artificial Sequence: Synthetic oligonucleotide
uguaggaaaucacugcgaa

SEQ ID NO: 1620553 - RNA, 19 nt, Artificial Sequence
  Description of Artificial Sequence: Synthetic oligonucleotide
ugggauggugguuaaaucu

SEQ ID NO: 1620554 - RNA, 19 nt, Artificial Sequence
  Description of Artificial Sequence: Synthetic oligonucleotide
uucggagcuugauauagcc

SEQ ID NO: 1620555 - RNA, 19 nt, Artificial Sequence
  Description of Artificial Sequence: Synthetic oligonucleotide
aagcucagcucagugauag

SEQ ID NO: 1620556 - RNA, 19 nt, Artificial Sequence
  Description of Artificial Sequence: Synthetic oligonucleotide
uccuuaauccaagagggca

SEQ ID NO: 1620557 - RNA, 19 nt, Artificial Sequence
  Description of Artificial Sequence: Synthetic oligonucleotide
gaucguguccugcugcacg

SEQ ID NO: 1620558 - RNA, 19 nt, Artificial Sequence
  Description of Artificial Sequence: Synthetic oligonucleotide
ggagggacaacacuguagg

SEQ ID NO: 1620559 - RNA, 19 nt, Artificial Sequence
  Description of Artificial Sequence: Synthetic oligonucleotide
ucagugauagcuacaucgu

SEQ ID NO: 1620560 - RNA, 19 nt, Artificial Sequence
  Description of Artificial Sequence: Synthetic oligonucleotide
aauggacggcagcacucgc

SEQ ID NO: 1620561 - RNA, 19 nt, Artificial Sequence
  Description of Artificial Sequence: Synthetic oligonucleotide
ucagucuccuuaauccaag

SEQ ID NO: 1620562 - RNA, 19 nt, Artificial Sequence
  Description of Artificial Sequence: Synthetic oligonucleotide
auagcuacaucguccagga

SEQ ID NO: 1620563 - RNA, 19 nt, Artificial Sequence
  Description of Artificial Sequence: Synthetic oligonucleotide
gaugagacugcuccucugc

SEQ ID NO: 1620564 - RNA, 19 nt, Artificial Sequence
  Description of Artificial Sequence: Synthetic oligonucleotide
aacgccgugcccaugcccc

SEQ ID NO: 1620565 - RNA, 19 nt, Artificial Sequence
  Description of Artificial Sequence: Synthetic oligonucleotide
acugcgaaaucacacugug

SEQ ID NO: 1620566 - RNA, 19 nt, Artificial Sequence
  Description of Artificial Sequence: Synthetic oligonucleotide
caguuuacagaccuccgcc

SEQ ID NO: 1620567 - RNA, 19 nt, Artificial Sequence
  Description of Artificial Sequence: Synthetic oligonucleotide
ggaaauguucaccaucugc

SEQ ID NO: 1620568 - RNA, 19 nt, Artificial Sequence
  Description of Artificial Sequence: Synthetic oligonucleotide
aucguguccugcugcacgc

SEQ ID NO: 1620569 - RNA, 19 nt, Artificial Sequence
  Description of Artificial Sequence: Synthetic oligonucleotide
ugugagauagaugcgguuc

SEQ ID NO: 1620570 - RNA, 19 nt, Artificial Sequence
  Description of Artificial Sequence: Synthetic oligonucleotide
ugcgaggcauugaacuugg

SEQ ID NO: 1620571 - RNA, 19 nt, Artificial Sequence
  Description of Artificial Sequence: Synthetic oligonucleotide
gaaaucacugcgaaaucac

SEQ ID NO: 1620572 - RNA, 19 nt, Artificial Sequence
  Description of Artificial Sequence: Synthetic oligonucleotide
agcugcgaggcauugaacu

SEQ ID NO: 1620573 - RNA, 19 nt, Artificial Sequence
  Description of Artificial Sequence: Synthetic oligonucleotide
gaaaucacacugugccucc

SEQ ID NO: 1620574 - RNA, 19 nt, Artificial Sequence
  Description of Artificial Sequence: Synthetic oligonucleotide
gaaccaggggauccuaaag

SEQ ID NO: 1620575 - RNA, 19 nt, Artificial Sequence
  Description of Artificial Sequence: Synthetic oligonucleotide
ucuggcccgaaugucauag

SEQ ID NO: 1620576 - RNA, 19 nt, Artificial Sequence
  Description of Artificial Sequence: Synthetic oligonucleotide
auugggucgggacagcacu

SEQ ID NO: 1620577 - RNA, 19 nt, Artificial Sequence
  Description of Artificial Sequence: Synthetic oligonucleotide
aucacugcgaaaucacacu

SEQ ID NO: 1620578 - RNA, 19 nt, Artificial Sequence
  Description of Artificial Sequence: Synthetic oligonucleotide
agucuccuuaauccaagag

SEQ ID NO: 1620579 - RNA, 19 nt, Artificial Sequence
  Description of Artificial Sequence: Synthetic oligonucleotide
ucuacagcugcuguguacu

SEQ ID NO: 1620580 - RNA, 19 nt, Artificial Sequence
  Description of Artificial Sequence: Synthetic oligonucleotide
uucgucuuguagauucagc

SEQ ID NO: 1620581 - RNA, 19 nt, Artificial Sequence
  Description of Artificial Sequence: Synthetic oligonucleotide
gauagaugcgguucuggga

SEQ ID NO: 1620582 - RNA, 19 nt, Artificial Sequence
  Description of Artificial Sequence: Synthetic oligonucleotide
accaggggauccuaaagug

SEQ ID NO: 1620583 - RNA, 19 nt, Artificial Sequence
  Description of Artificial Sequence: Synthetic oligonucleotide
uggcgaucgucuuagagau

SEQ ID NO: 1620584 - RNA, 19 nt, Artificial Sequence
  Description of Artificial Sequence: Synthetic oligonucleotide
acggugaacacggacucgc

SEQ ID NO: 1620585 - RNA, 19 nt, Artificial Sequence
  Description of Artificial Sequence: Synthetic oligonucleotide
aagcuuucgucuuguagau

SEQ ID NO: 1620586 - RNA, 19 nt, Artificial Sequence
  Description of Artificial Sequence: Synthetic oligonucleotide
aggaaaucacugcgaaauc

SEQ ID NO: 1620587 - RNA, 19 nt, Artificial Sequence
  Description of Artificial Sequence: Synthetic oligonucleotide
caacagggacaccugagcc

SEQ ID NO: 1620588 - RNA, 19 nt, Artificial Sequence
  Description of Artificial Sequence: Synthetic oligonucleotide
guacagaggacuccauugc

SEQ ID NO: 1620589 - RNA, 19 nt, Artificial Sequence
  Description of Artificial Sequence: Synthetic oligonucleotide
uuuacagaccuccgcccug

SEQ ID NO: 1620590 - RNA, 19 nt, Artificial Sequence
  Description of Artificial Sequence: Synthetic oligonucleotide
agagaugagacugcuccuc

SEQ ID NO: 1620591 - RNA, 19 nt, Artificial Sequence
  Description of Artificial Sequence: Synthetic oligonucleotide
cuaaaguggaggccuucgg

SEQ ID NO: 1620592 - RNA, 19 nt, Artificial Sequence
  Description of Artificial Sequence: Synthetic oligonucleotide
gaggccuucggccaggauc

SEQ ID NO: 1620593 - RNA, 19 nt, Artificial Sequence
  Description of Artificial Sequence: Synthetic oligonucleotide
uuucggagcuugauauagc

SEQ ID NO: 1620594 - RNA, 19 nt, Artificial Sequence
  Description of Artificial Sequence: Synthetic oligonucleotide
uacucucggcuaaagcuca

SEQ ID NO: 1620595 - RNA, 19 nt, Artificial Sequence
  Description of Artificial Sequence: Synthetic oligonucleotide
gauucuugcucagugcuuc

SEQ ID NO: 1620596 - RNA, 19 nt, Artificial Sequence
  Description of Artificial Sequence: Synthetic oligonucleotide
agcacucucagggaaaugu

SEQ ID NO: 1620597 - RNA, 19 nt, Artificial Sequence
  Description of Artificial Sequence: Synthetic oligonucleotide
uucugggacguggcgaucg

SEQ ID NO: 1620598 - RNA, 19 nt, Artificial Sequence
  Description of Artificial Sequence: Synthetic oligonucleotide
aaaucacugcgaaaucaca

SEQ ID NO: 1620599 - RNA, 19 nt, Artificial Sequence
  Description of Artificial Sequence: Synthetic oligonucleotide
ucguugacaauggacggca

SEQ ID NO: 1620600 - RNA, 19 nt, Artificial Sequence
  Description of Artificial Sequence: Synthetic oligonucleotide
gaguaaagcuuucgucuug

SEQ ID NO: 1620601 - RNA, 19 nt, Artificial Sequence
  Description of Artificial Sequence: Synthetic oligonucleotide
guugacaauggacggcagc

SEQ ID NO: 1620602 - RNA, 19 nt, Artificial Sequence
  Description of Artificial Sequence: Synthetic oligonucleotide
acucgcuccucauagucca

SEQ ID NO: 1620603 - RNA, 19 nt, Artificial Sequence
  Description of Artificial Sequence: Synthetic oligonucleotide
agaaagggcaccggaagug

SEQ ID NO: 1620604 - RNA, 19 nt, Artificial Sequence
  Description of Artificial Sequence: Synthetic oligonucleotide
agggaaauguucaccaucu

SEQ ID NO: 1620605 - RNA, 19 nt, Artificial Sequence
  Description of Artificial Sequence: Synthetic oligonucleotide
guggcgaucgucuuagaga

SEQ ID NO: 1620606 - RNA, 19 nt, Artificial Sequence
  Description of Artificial Sequence: Synthetic oligonucleotide
ugaacacggacucgcggac

SEQ ID NO: 1620607 - RNA, 19 nt, Artificial Sequence
  Description of Artificial Sequence: Synthetic oligonucleotide
caggcgucccgcuaagucc

SEQ ID NO: 1620608 - RNA, 19 nt, Artificial Sequence
  Description of Artificial Sequence: Synthetic oligonucleotide
cuuaauccaagagggcaag

SEQ ID NO: 1620609 - RNA, 19 nt, Artificial Sequence
  Description of Artificial Sequence: Synthetic oligonucleotide
gugauagcuacaucgucca

SEQ ID NO: 1620610 - RNA, 19 nt, Artificial Sequence
  Description of Artificial Sequence: Synthetic oligonucleotide
uaggcgcugguacaugcug

SEQ ID NO: 1620611 - RNA, 19 nt, Artificial Sequence
  Description of Artificial Sequence: Synthetic oligonucleotide
aggccuucggccaggaucg

SEQ ID NO: 1620612 - RNA, 19 nt, Artificial Sequence
  Description of Artificial Sequence: Synthetic oligonucleotide
ucccgcuaaguccuucaag

SEQ ID NO: 1620613 - RNA, 19 nt, Artificial Sequence
  Description of Artificial Sequence: Synthetic oligonucleotide
gacguggcgaucgucuuag

SEQ ID NO: 1620614 - RNA, 19 nt, Artificial Sequence
  Description of Artificial Sequence: Synthetic oligonucleotide
ugucacuuccccgaguaaa

SEQ ID NO: 1620615 - RNA, 19 nt, Artificial Sequence
  Description of Artificial Sequence: Synthetic oligonucleotide
ucggagcuugauauagcca

SEQ ID NO: 1620616 - RNA, 19 nt, Artificial Sequence
  Description of Artificial Sequence: Synthetic oligonucleotide
uugaagaagauggcucugu

SEQ ID NO: 1620617 - RNA, 19 nt, Artificial Sequence
  Description of Artificial Sequence: Synthetic oligonucleotide
gcccgaaugucauagauga

SEQ ID NO: 1620618 - RNA, 19 nt, Artificial Sequence
  Description of Artificial Sequence: Synthetic oligonucleotide
uucuacagcugcuguguac

SEQ ID NO: 1620619 - RNA, 19 nt, Artificial Sequence
  Description of Artificial Sequence: Synthetic oligonucleotide
acaauggacggcagcacuc

SEQ ID NO: 1620620 - RNA, 19 nt, Artificial Sequence
  Description of Artificial Sequence: Synthetic oligonucleotide
uaauccaagagggcaagua

SEQ ID NO: 1620621 - RNA, 19 nt, Artificial Sequence
  Description of Artificial Sequence: Synthetic oligonucleotide
ucccuagcuggcuggauga

SEQ ID NO: 1620622 - RNA, 19 nt, Artificial Sequence
  Description of Artificial Sequence: Synthetic oligonucleotide
aguaaagcuuucgucuugu

SEQ ID NO: 1620623 - RNA, 19 nt, Artificial Sequence
  Description of Artificial Sequence: Synthetic oligonucleotide
gaucgucuuagagauguuc

SEQ ID NO: 1620624 - RNA, 19 nt, Artificial Sequence
  Description of Artificial Sequence: Synthetic oligonucleotide
uagaugcgguucugggacg

SEQ ID NO: 1620625 - RNA, 19 nt, Artificial Sequence
  Description of Artificial Sequence: Synthetic oligonucleotide
ugauagcuacaucguccag

SEQ ID NO: 1620626 - RNA, 19 nt, Artificial Sequence
  Description of Artificial Sequence: Synthetic oligonucleotide
gucgggacagcacucucag

SEQ ID NO: 1620627 - RNA, 19 nt, Artificial Sequence
  Description of Artificial Sequence: Synthetic oligonucleotide
cuggguaaucagcugcgag

SEQ ID NO: 1620628 - RNA, 19 nt, Artificial Sequence
  Description of Artificial Sequence: Synthetic oligonucleotide
caccucguugacaauggac

SEQ ID NO: 1620629 - RNA, 19 nt, Artificial Sequence
  Description of Artificial Sequence: Synthetic oligonucleotide
caagguugucagcugugag

SEQ ID NO: 1620630 - RNA, 19 nt, Artificial Sequence
  Description of Artificial Sequence: Synthetic oligonucleotide
gugaacacggacucgcgga

SEQ ID NO: 1620631 - RNA, 19 nt, Artificial Sequence
  Description of Artificial Sequence: Synthetic oligonucleotide
ucggggucuggcccgaaug

SEQ ID NO: 1620632 - RNA, 19 nt, Artificial Sequence
  Description of Artificial Sequence: Synthetic oligonucleotide
agaccuccgcccugcacac

SEQ ID NO: 1620633 - RNA, 19 nt, Artificial Sequence
  Description of Artificial Sequence: Synthetic oligonucleotide
uuccacggugaacacggac

SEQ ID NO: 1620634 - RNA, 19 nt, Artificial Sequence
  Description of Artificial Sequence: Synthetic oligonucleotide
agcacaagguugucagcug

SEQ ID NO: 1620635 - RNA, 19 nt, Artificial Sequence
  Description of Artificial Sequence: Synthetic oligonucleotide
ugcguggccucccuagcug

SEQ ID NO: 1620636 - RNA, 19 nt, Artificial Sequence
  Description of Artificial Sequence: Synthetic oligonucleotide
ggugaacacggacucgcgg

SEQ ID NO: 1620637 - RNA, 19 nt, Artificial Sequence
  Description of Artificial Sequence: Synthetic oligonucleotide
cugugaccaccuuccacgg

SEQ ID NO: 1620638 - RNA, 19 nt, Artificial Sequence
  Description of Artificial Sequence: Synthetic oligonucleotide
caauggacggcagcacucg

SEQ ID NO: 1620639 - RNA, 19 nt, Artificial Sequence
  Description of Artificial Sequence: Synthetic oligonucleotide
gaucuuucggagcuugaua

SEQ ID NO: 1620640 - RNA, 19 nt, Artificial Sequence
  Description of Artificial Sequence: Synthetic oligonucleotide
uggcccgaaugucauagau

SEQ ID NO: 1620641 - RNA, 19 nt, Artificial Sequence
  Description of Artificial Sequence: Synthetic oligonucleotide
uggacggcagcacucgcuc

SEQ ID NO: 1620642 - RNA, 19 nt, Artificial Sequence
  Description of Artificial Sequence: Synthetic oligonucleotide
guacaugcuggggagcucc

SEQ ID NO: 1620643 - RNA, 19 nt, Artificial Sequence
  Description of Artificial Sequence: Synthetic oligonucleotide
cugcgaaaucacacugugc

SEQ ID NO: 1620644 - RNA, 19 nt, Artificial Sequence
  Description of Artificial Sequence: Synthetic oligonucleotide
guagauucagcacaagguu

SEQ ID NO: 1620645 - RNA, 19 nt, Artificial Sequence
  Description of Artificial Sequence: Synthetic oligonucleotide
aaagcccucugaaaggguu

SEQ ID NO: 1620646 - RNA, 19 nt, Artificial Sequence
  Description of Artificial Sequence: Synthetic oligonucleotide
gcucucuucggaucaacag

SEQ ID NO: 1620647 - RNA, 19 nt, Artificial Sequence
  Description of Artificial Sequence: Synthetic oligonucleotide
ugugcguggccucccuagc

SEQ ID NO: 1620648 - RNA, 19 nt, Artificial Sequence
  Description of Artificial Sequence: Synthetic oligonucleotide
uaguccagcccuaggcgcu

SEQ ID NO: 1620649 - RNA, 19 nt, Artificial Sequence
  Description of Artificial Sequence: Synthetic oligonucleotide
ugagauagaugcgguucug

SEQ ID NO: 1620650 - RNA, 19 nt, Artificial Sequence
  Description of Artificial Sequence: Synthetic oligonucleotide
agcuucaacgccgugccca

SEQ ID NO: 1620651 - RNA, 19 nt, Artificial Sequence
  Description of Artificial Sequence: Synthetic oligonucleotide
agcucagcucagugauagc

SEQ ID NO: 1620652 - RNA, 19 nt, Artificial Sequence
  Description of Artificial Sequence: Synthetic oligonucleotide
uccccgaguaaagcuuucg

SEQ ID NO: 1620653 - RNA, 19 nt, Artificial Sequence
  Description of Artificial Sequence: Synthetic oligonucleotide
cugggauggugguuaaauc

SEQ ID NO: 1620654 - RNA, 19 nt, Artificial Sequence
  Description of Artificial Sequence: Synthetic oligonucleotide
ucacuuccccgaguaaagc

SEQ ID NO: 1620655 - RNA, 19 nt, Artificial Sequence
  Description of Artificial Sequence: Synthetic oligonucleotide
aguucugggccaugucuga

SEQ ID NO: 1620656 - RNA, 19 nt, Artificial Sequence
  Description of Artificial Sequence: Synthetic oligonucleotide
ggaaaucacugcgaaauca

SEQ ID NO: 1620657 - RNA, 19 nt, Artificial Sequence
  Description of Artificial Sequence: Synthetic oligonucleotide
ugcuguguacucucggcua

SEQ ID NO: 1620658 - RNA, 19 nt, Artificial Sequence
  Description of Artificial Sequence: Synthetic oligonucleotide
cucggcuaaagcucagcuc

SEQ ID NO: 1620659 - RNA, 19 nt, Artificial Sequence
  Description of Artificial Sequence: Synthetic oligonucleotide
guacucucggcuaaagcuc

SEQ ID NO: 1620660 - RNA, 19 nt, Artificial Sequence
  Description of Artificial Sequence: Synthetic oligonucleotide
cacaagguugucagcugug

SEQ ID NO: 1620661 - RNA, 19 nt, Artificial Sequence
  Description of Artificial Sequence: Synthetic oligonucleotide
ggguaaucagcugcgaggc

SEQ ID NO: 1620662 - RNA, 19 nt, Artificial Sequence
  Description of Artificial Sequence: Synthetic oligonucleotide
gaacacggacucgcggacg

SEQ ID NO: 1620663 - RNA, 19 nt, Artificial Sequence
  Description of Artificial Sequence: Synthetic oligonucleotide
gugugcguggccucccuag

SEQ ID NO: 1620664 - RNA, 19 nt, Artificial Sequence
  Description of Artificial Sequence: Synthetic oligonucleotide
ugggccacuuguuuggcuu

SEQ ID NO: 1620665 - RNA, 19 nt, Artificial Sequence
  Description of Artificial Sequence: Synthetic oligonucleotide
uccccgcuccaguuuacag

SEQ ID NO: 1620666 - RNA, 19 nt, Artificial Sequence
  Description of Artificial Sequence: Synthetic oligonucleotide
ugaccaccuuccacgguga

SEQ ID NO: 1620667 - RNA, 19 nt, Artificial Sequence
  Description of Artificial Sequence: Synthetic oligonucleotide
cagugauagcuacaucguc

SEQ ID NO: 1620668 - RNA, 19 nt, Artificial Sequence
  Description of Artificial Sequence: Synthetic oligonucleotide
cugggcauugggucgggac

SEQ ID NO: 1620669 - RNA, 19 nt, Artificial Sequence
  Description of Artificial Sequence: Synthetic oligonucleotide
cuguaggaaaucacugcga

SEQ ID NO: 1620670 - RNA, 19 nt, Artificial Sequence
  Description of Artificial Sequence: Synthetic oligonucleotide
ccaggggauccuaaagugg

SEQ ID NO: 1620671 - RNA, 19 nt, Artificial Sequence
  Description of Artificial Sequence: Synthetic oligonucleotide
cauugggucgggacagcac

SEQ ID NO: 1620672 - RNA, 19 nt, Artificial Sequence
  Description of Artificial Sequence: Synthetic oligonucleotide
gacaauggacggcagcacu

SEQ ID NO: 1620673 - RNA, 19 nt, Artificial Sequence
  Description of Artificial Sequence: Synthetic oligonucleotide
acaagguugucagcuguga

SEQ ID NO: 1620674 - RNA, 19 nt, Artificial Sequence
  Description of Artificial Sequence: Synthetic oligonucleotide
cagaccuccgcccugcaca

SEQ ID NO: 1620675 - RNA, 19 nt, Artificial Sequence
  Description of Artificial Sequence: Synthetic oligonucleotide
ggggauccuaaaguggagg

SEQ ID NO: 1620676 - RNA, 19 nt, Artificial Sequence
  Description of Artificial Sequence: Synthetic oligonucleotide
gagcuugauauagccagga

SEQ ID NO: 1620677 - RNA, 19 nt, Artificial Sequence
  Description of Artificial Sequence: Synthetic oligonucleotide
ugguggaguucuugauggc

SEQ ID NO: 1620678 - RNA, 19 nt, Artificial Sequence
  Description of Artificial Sequence: Synthetic oligonucleotide
gagcccgcuggguaaucag

SEQ ID NO: 1620679 - RNA, 19 nt, Artificial Sequence
  Description of Artificial Sequence: Synthetic oligonucleotide
cagcccuaggcgcugguac

SEQ ID NO: 1620680 - RNA, 19 nt, Artificial Sequence
  Description of Artificial Sequence: Synthetic oligonucleotide
acgccguaggccacggccc

SEQ ID NO: 1620681 - RNA, 19 nt, Artificial Sequence
  Description of Artificial Sequence: Synthetic oligonucleotide
gcuacaucguccaggauga

SEQ ID NO: 1620682 - RNA, 19 nt, Artificial Sequence
  Description of Artificial Sequence: Synthetic oligonucleotide
ccaggauucuugcucagug

SEQ ID NO: 1620683 - RNA, 19 nt, Artificial Sequence
  Description of Artificial Sequence: Synthetic oligonucleotide
guaggaaaucacugcgaaa

SEQ ID NO: 1620684 - RNA, 19 nt, Artificial Sequence
  Description of Artificial Sequence: Synthetic oligonucleotide
gaugagagaugagacugcu

SEQ ID NO: 1620685 - RNA, 19 nt, Artificial Sequence
  Description of Artificial Sequence: Synthetic oligonucleotide
cccgcuccaguuuacagac

SEQ ID NO: 1620686 - RNA, 19 nt, Artificial Sequence
  Description of Artificial Sequence: Synthetic oligonucleotide
gucugauccuccggaaggc

SEQ ID NO: 1620687 - RNA, 19 nt, Artificial Sequence
  Description of Artificial Sequence: Synthetic oligonucleotide
accggcggucaggaggugc

SEQ ID NO: 1620688 - RNA, 19 nt, Artificial Sequence
  Description of Artificial Sequence: Synthetic oligonucleotide
ggccaugucugauccuccg

SEQ ID NO: 1620689 - RNA, 19 nt, Artificial Sequence
  Description of Artificial Sequence: Synthetic oligonucleotide
gagggacaacacuguagga

SEQ ID NO: 1620690 - RNA, 19 nt, Artificial Sequence
  Description of Artificial Sequence: Synthetic oligonucleotide
guuuacagaccuccgcccu

SEQ ID NO: 1620691 - RNA, 19 nt, Artificial Sequence
  Description of Artificial Sequence: Synthetic oligonucleotide
ggagcuugauauagccagg

SEQ ID NO: 1620692 - RNA, 19 nt, Artificial Sequence
  Description of Artificial Sequence: Synthetic oligonucleotide
agcccuaggcgcugguaca

SEQ ID NO: 1620693 - RNA, 19 nt, Artificial Sequence
  Description of Artificial Sequence: Synthetic oligonucleotide
uccggaaggcggcggcacc

SEQ ID NO: 1620694 - RNA, 19 nt, Artificial Sequence
  Description of Artificial Sequence: Synthetic oligonucleotide
cacggacucgcggacgccg

SEQ ID NO: 1620695 - RNA, 19 nt, Artificial Sequence
  Description of Artificial Sequence: Synthetic oligonucleotide
cccgaguaaagcuuucguc

SEQ ID NO: 1620696 - RNA, 19 nt, Artificial Sequence
  Description of Artificial Sequence: Synthetic oligonucleotide
ucguccccgcuccaguuua

SEQ ID NO: 1620697 - RNA, 19 nt, Artificial Sequence
  Description of Artificial Sequence: Synthetic oligonucleotide
ccagcuucguccccgcucc

SEQ ID NO: 1620698 - RNA, 19 nt, Artificial Sequence
  Description of Artificial Sequence: Synthetic oligonucleotide
gcaaguacagaggacucca

SEQ ID NO: 1620699 - RNA, 19 nt, Artificial Sequence
  Description of Artificial Sequence: Synthetic oligonucleotide
ccuaggcgcugguacaugc

SEQ ID NO: 1620700 - RNA, 19 nt, Artificial Sequence
  Description of Artificial Sequence: Synthetic oligonucleotide
caacgccgugcccaugccc

SEQ ID NO: 1620701 - RNA, 19 nt, Artificial Sequence
  Description of Artificial Sequence: Synthetic oligonucleotide
ggcaaguacagaggacucc

SEQ ID NO: 1620702 - RNA, 19 nt, Artificial Sequence
  Description of Artificial Sequence: Synthetic oligonucleotide
cuggaugagagaugagacu

SEQ ID NO: 1620703 - RNA, 19 nt, Artificial Sequence
  Description of Artificial Sequence: Synthetic oligonucleotide
ggaugagagaugagacugc

SEQ ID NO: 1620704 - RNA, 19 nt, Artificial Sequence
  Description of Artificial Sequence: Synthetic oligonucleotide
gccaugucugauccuccgg

SEQ ID NO: 1620705 - RNA, 19 nt, Artificial Sequence
  Description of Artificial Sequence: Synthetic oligonucleotide
acuuccccgaguaaagcuu

SEQ ID NO: 1620706 - RNA, 19 nt, Artificial Sequence
  Description of Artificial Sequence: Synthetic oligonucleotide
cuccgcccugcacacgagg

SEQ ID NO: 1620707 - RNA, 19 nt, Artificial Sequence
  Description of Artificial Sequence: Synthetic oligonucleotide
cacggugaacacggacucg

SEQ ID NO: 1620708 - RNA, 19 nt, Artificial Sequence
  Description of Artificial Sequence: Synthetic oligonucleotide
ccgaguaaagcuuucgucu

SEQ ID NO: 1620709 - RNA, 19 nt, Artificial Sequence
  Description of Artificial Sequence: Synthetic oligonucleotide
uucguccccgcuccaguuu

SEQ ID NO: 1620710 - RNA, 19 nt, Artificial Sequence
  Description of Artificial Sequence: Synthetic oligonucleotide
aggggauccuaaaguggag

SEQ ID NO: 1620711 - RNA, 19 nt, Artificial Sequence
  Description of Artificial Sequence: Synthetic oligonucleotide
uuccccgaguaaagcuuuc

SEQ ID NO: 1620712 - RNA, 19 nt, Artificial Sequence
  Description of Artificial Sequence: Synthetic oligonucleotide
ucacacugugccucccauu

SEQ ID NO: 1620713 - RNA, 19 nt, Artificial Sequence
  Description of Artificial Sequence: Synthetic oligonucleotide
cgucuuguagauucagcac

SEQ ID NO: 1620714 - RNA, 19 nt, Artificial Sequence
  Description of Artificial Sequence: Synthetic oligonucleotide
ccgcuggguaaucagcugc

SEQ ID NO: 1620715 - RNA, 19 nt, Artificial Sequence
  Description of Artificial Sequence: Synthetic oligonucleotide
uggggugugcguggccucc

SEQ ID NO: 1620716 - RNA, 19 nt, Artificial Sequence
  Description of Artificial Sequence: Synthetic oligonucleotide
ccaccuuccacggugaaca

SEQ ID NO: 1620717 - RNA, 19 nt, Artificial Sequence
  Description of Artificial Sequence: Synthetic oligonucleotide
ggaucaacagggacaccug

SEQ ID NO: 1620718 - RNA, 19 nt, Artificial Sequence
  Description of Artificial Sequence: Synthetic oligonucleotide
uuuucggggucuggcccga

SEQ ID NO: 1620719 - RNA, 19 nt, Artificial Sequence
  Description of Artificial Sequence: Synthetic oligonucleotide
guaggccacggccccggcc

SEQ ID NO: 1620720 - RNA, 19 nt, Artificial Sequence
  Description of Artificial Sequence: Synthetic oligonucleotide
acacggacucgcggacgcc

SEQ ID NO: 1620721 - RNA, 19 nt, Artificial Sequence
  Description of Artificial Sequence: Synthetic oligonucleotide
cagucuccuuaauccaaga

SEQ ID NO: 1620722 - RNA, 19 nt, Artificial Sequence
  Description of Artificial Sequence: Synthetic oligonucleotide
cgcuaaguccuucaaguuc

SEQ ID NO: 1620723 - RNA, 19 nt, Artificial Sequence
  Description of Artificial Sequence: Synthetic oligonucleotide
cuucggccaggaucguguc

SEQ ID NO: 1620724 - RNA, 19 nt, Artificial Sequence
  Description of Artificial Sequence: Synthetic oligonucleotide
ggaaccaggggauccuaaa

SEQ ID NO: 1620725 - RNA, 19 nt, Artificial Sequence
  Description of Artificial Sequence: Synthetic oligonucleotide
auggacggcagcacucgcu

SEQ ID NO: 1620726 - RNA, 19 nt, Artificial Sequence
  Description of Artificial Sequence: Synthetic oligonucleotide
cacuuccccgaguaaagcu

SEQ ID NO: 1620727 - RNA, 19 nt, Artificial Sequence
  Description of Artificial Sequence: Synthetic oligonucleotide
cagcugcgaggcauugaac

SEQ ID NO: 1620728 - RNA, 19 nt, Artificial Sequence
  Description of Artificial Sequence: Synthetic oligonucleotide
gcugucacuuccccgagua

SEQ ID NO: 1620729 - RNA, 19 nt, Artificial Sequence
  Description of Artificial Sequence: Synthetic oligonucleotide
gcaggcgucccgcuaaguc

SEQ ID NO: 1620730 - RNA, 19 nt, Artificial Sequence
  Description of Artificial Sequence: Synthetic oligonucleotide
uucggggucuggcccgaau

SEQ ID NO: 1620731 - RNA, 19 nt, Artificial Sequence
  Description of Artificial Sequence: Synthetic oligonucleotide
gcguggccucccuagcugg

SEQ ID NO: 1620732 - RNA, 19 nt, Artificial Sequence
  Description of Artificial Sequence: Synthetic oligonucleotide
gcgaucgucuuagagaugu

SEQ ID NO: 1620733 - RNA, 19 nt, Artificial Sequence
  Description of Artificial Sequence: Synthetic oligonucleotide
cacacugugccucccauuu

SEQ ID NO: 1620734 - RNA, 19 nt, Artificial Sequence
  Description of Artificial Sequence: Synthetic oligonucleotide
caugccccggggcccggcg

SEQ ID NO: 1620735 - RNA, 19 nt, Artificial Sequence
  Description of Artificial Sequence: Synthetic oligonucleotide
guucaccaucugcaggucu

SEQ ID NO: 1620736 - RNA, 19 nt, Artificial Sequence
  Description of Artificial Sequence: Synthetic oligonucleotide
ucguguccugcugcacgcc

SEQ ID NO: 1620737 - RNA, 19 nt, Artificial Sequence
  Description of Artificial Sequence: Synthetic oligonucleotide
caccuuccacggugaacac

SEQ ID NO: 1620738 - RNA, 19 nt, Artificial Sequence
  Description of Artificial Sequence: Synthetic oligonucleotide
cacugcgaaaucacacugu

SEQ ID NO: 1620739 - RNA, 19 nt, Artificial Sequence
  Description of Artificial Sequence: Synthetic oligonucleotide
cucccauuucccaggucaa

SEQ ID NO: 1620740 - RNA, 19 nt, Artificial Sequence
  Description of Artificial Sequence: Synthetic oligonucleotide
cccgcuaaguccuucaagu

SEQ ID NO: 1620741 - RNA, 19 nt, Artificial Sequence
  Description of Artificial Sequence: Synthetic oligonucleotide
gcccugcacacgaggaugg

SEQ ID NO: 1620742 - RNA, 19 nt, Artificial Sequence
  Description of Artificial Sequence: Synthetic oligonucleotide
ccuuggcgcgcucugucag

SEQ ID NO: 1620743 - RNA, 19 nt, Artificial Sequence
  Description of Artificial Sequence: Synthetic oligonucleotide
cagcuucaacgccgugccc

SEQ ID NO: 1620744 - RNA, 19 nt, Artificial Sequence
  Description of Artificial Sequence: Synthetic oligonucleotide
gcagcccggaucuuucgga

SEQ ID NO: 1620745 - RNA, 19 nt, Artificial Sequence
  Description of Artificial Sequence: Synthetic oligonucleotide
ucggaucaacagggacacc

SEQ ID NO: 1620746 - RNA, 19 nt, Artificial Sequence
  Description of Artificial Sequence: Synthetic oligonucleotide
cuccggaaggcggcggcac

SEQ ID NO: 1620747 - RNA, 19 nt, Artificial Sequence
  Description of Artificial Sequence: Synthetic oligonucleotide
gggucuggcccgaauguca

SEQ ID NO: 1620748 - RNA, 19 nt, Artificial Sequence
  Description of Artificial Sequence: Synthetic oligonucleotide
gccagcuucguccccgcuc

SEQ ID NO: 1620749 - RNA, 19 nt, Artificial Sequence
  Description of Artificial Sequence: Synthetic oligonucleotide
cuacaucguccaggaugag

SEQ ID NO: 1620750 - RNA, 19 nt, Artificial Sequence
  Description of Artificial Sequence: Synthetic oligonucleotide
cuuccccgaguaaagcuuu

SEQ ID NO: 1620751 - RNA, 19 nt, Artificial Sequence
  Description of Artificial Sequence: Synthetic oligonucleotide
cguguccugcugcacgccg

SEQ ID NO: 1620752 - RNA, 19 nt, Artificial Sequence
  Description of Artificial Sequence: Synthetic oligonucleotide
ggcggucaggaggugcugc

SEQ ID NO: 1620753 - RNA, 19 nt, Artificial Sequence
  Description of Artificial Sequence: Synthetic oligonucleotide
ggucgggacagcacucuca

SEQ ID NO: 1620754 - RNA, 19 nt, Artificial Sequence
  Description of Artificial Sequence: Synthetic oligonucleotide
gggcaaguacagaggacuc

SEQ ID NO: 1620755 - RNA, 19 nt, Artificial Sequence
  Description of Artificial Sequence: Synthetic oligonucleotide
gucccgcuaaguccuucaa

SEQ ID NO: 1620756 - RNA, 19 nt, Artificial Sequence
  Description of Artificial Sequence: Synthetic oligonucleotide
gaccaccuuccacggugaa

SEQ ID NO: 1620757 - RNA, 19 nt, Artificial Sequence
  Description of Artificial Sequence: Synthetic oligonucleotide
cuuccacggugaacacgga

SEQ ID NO: 1620758 - RNA, 19 nt, Artificial Sequence
  Description of Artificial Sequence: Synthetic oligonucleotide
cagcacucucagggaaaug

SEQ ID NO: 1620759 - RNA, 19 nt, Artificial Sequence
  Description of Artificial Sequence: Synthetic oligonucleotide
gcggcagaaagggcaccgg

SEQ ID NO: 1620760 - RNA, 19 nt, Artificial Sequence
  Description of Artificial Sequence: Synthetic oligonucleotide
cugucacuuccccgaguaa

SEQ ID NO: 1620761 - RNA, 19 nt, Artificial Sequence
  Description of Artificial Sequence: Synthetic oligonucleotide
gccggcggcggcagaaagg

SEQ ID NO: 1620762 - RNA, 19 nt, Artificial Sequence
  Description of Artificial Sequence: Synthetic oligonucleotide
caaguacagaggacuccau

SEQ ID NO: 1620763 - RNA, 19 nt, Artificial Sequence
  Description of Artificial Sequence: Synthetic oligonucleotide
ccccgcuccaguuuacaga

SEQ ID NO: 1620764 - RNA, 19 nt, Artificial Sequence
  Description of Artificial Sequence: Synthetic oligonucleotide
cggugaacacggacucgcg

SEQ ID NO: 1620765 - RNA, 19 nt, Artificial Sequence
  Description of Artificial Sequence: Synthetic oligonucleotide
ccuucggccaggaucgugu

SEQ ID NO: 1620766 - RNA, 19 nt, Artificial Sequence
  Description of Artificial Sequence: Synthetic oligonucleotide
gcauugggucgggacagca

SEQ ID NO: 1620767 - RNA, 19 nt, Artificial Sequence
  Description of Artificial Sequence: Synthetic oligonucleotide
ggaucguguccugcugcac

SEQ ID NO: 1620768 - RNA, 19 nt, Artificial Sequence
  Description of Artificial Sequence: Synthetic oligonucleotide
acguggcgaucgucuuaga

SEQ ID NO: 1620769 - RNA, 19 nt, Artificial Sequence
  Description of Artificial Sequence: Synthetic oligonucleotide
ggaucuuucggagcuugau

SEQ ID NO: 1620770 - RNA, 19 nt, Artificial Sequence
  Description of Artificial Sequence: Synthetic oligonucleotide
gccgccgaugcgguugaag

SEQ ID NO: 1620771 - RNA, 19 nt, Artificial Sequence
  Description of Artificial Sequence: Synthetic oligonucleotide
ccauugcaugaugcucggg

SEQ ID NO: 1620772 - RNA, 19 nt, Artificial Sequence
  Description of Artificial Sequence: Synthetic oligonucleotide
acggacucgcggacgccgu

SEQ ID NO: 1620773 - RNA, 19 nt, Artificial Sequence
  Description of Artificial Sequence: Synthetic oligonucleotide
cuggggagcuccugggcau

SEQ ID NO: 1620774 - RNA, 19 nt, Artificial Sequence
  Description of Artificial Sequence: Synthetic oligonucleotide
guccccgcuccaguuuaca

SEQ ID NO: 1620775 - RNA, 19 nt, Artificial Sequence
  Description of Artificial Sequence: Synthetic oligonucleotide
gggucgggacagcacucuc

SEQ ID NO: 1620776 - RNA, 19 nt, Artificial Sequence
  Description of Artificial Sequence: Synthetic oligonucleotide
ggacguggcgaucgucuua

SEQ ID NO: 1620777 - RNA, 19 nt, Artificial Sequence
  Description of Artificial Sequence: Synthetic oligonucleotide
gcggacgccguaggccacg

SEQ ID NO: 1620778 - RNA, 19 nt, Artificial Sequence
  Description of Artificial Sequence: Synthetic oligonucleotide
cggaucaacagggacaccu

SEQ ID NO: 1620779 - RNA, 19 nt, Artificial Sequence
  Description of Artificial Sequence: Synthetic oligonucleotide
ggcgaucgucuuagagaug

SEQ ID NO: 1620780 - RNA, 19 nt, Artificial Sequence
  Description of Artificial Sequence: Synthetic oligonucleotide
cugagcccgcuggguaauc

SEQ ID NO: 1620781 - RNA, 19 nt, Artificial Sequence
  Description of Artificial Sequence: Synthetic oligonucleotide
gcuucguccccgcuccagu

SEQ ID NO: 1620782 - RNA, 19 nt, Artificial Sequence
  Description of Artificial Sequence: Synthetic oligonucleotide
cguggccucccuagcuggc

SEQ ID NO: 1620783 - RNA, 19 nt, Artificial Sequence
  Description of Artificial Sequence: Synthetic oligonucleotide
ugcugcccgccagcuucgu

SEQ ID NO: 1620784 - RNA, 19 nt, Artificial Sequence
  Description of Artificial Sequence: Synthetic oligonucleotide
gccguaggccacggccccg

SEQ ID NO: 1620785 - RNA, 19 nt, Artificial Sequence
  Description of Artificial Sequence: Synthetic oligonucleotide
cccuagcuggcuggaugag

SEQ ID NO: 1620786 - RNA, 19 nt, Artificial Sequence
  Description of Artificial Sequence: Synthetic oligonucleotide
cgaguaaagcuuucgucuu

SEQ ID NO: 1620787 - RNA, 19 nt, Artificial Sequence
  Description of Artificial Sequence: Synthetic oligonucleotide
ggauucuugcucagugcuu

SEQ ID NO: 1620788 - RNA, 19 nt, Artificial Sequence
  Description of Artificial Sequence: Synthetic oligonucleotide
ccuccgcccugcacacgag

SEQ ID NO: 1620789 - RNA, 19 nt, Artificial Sequence
  Description of Artificial Sequence: Synthetic oligonucleotide
gcaccggcggucaggaggu

SEQ ID NO: 1620790 - RNA, 19 nt, Artificial Sequence
  Description of Artificial Sequence: Synthetic oligonucleotide
cgucccgcuaaguccuuca

SEQ ID NO: 1620791 - RNA, 19 nt, Artificial Sequence
  Description of Artificial Sequence: Synthetic oligonucleotide
cccuaggcgcugguacaug

SEQ ID NO: 1620792 - RNA, 19 nt, Artificial Sequence
  Description of Artificial Sequence: Synthetic oligonucleotide
gggacguggcgaucgucuu

SEQ ID NO: 1620793 - RNA, 19 nt, Artificial Sequence
  Description of Artificial Sequence: Synthetic oligonucleotide
gggcccggcgggcaggcgu

SEQ ID NO: 1620794 - RNA, 19 nt, Artificial Sequence
  Description of Artificial Sequence: Synthetic oligonucleotide
cccucugaaaggguuggau

SEQ ID NO: 1620795 - RNA, 19 nt, Artificial Sequence
  Description of Artificial Sequence: Synthetic oligonucleotide
ccgcuaaguccuucaaguu

SEQ ID NO: 1620796 - RNA, 19 nt, Artificial Sequence
  Description of Artificial Sequence: Synthetic oligonucleotide
cguccccgcuccaguuuac

SEQ ID NO: 1620797 - RNA, 19 nt, Artificial Sequence
  Description of Artificial Sequence: Synthetic oligonucleotide
gccucccuagcuggcugga

SEQ ID NO: 1620798 - RNA, 19 nt, Artificial Sequence
  Description of Artificial Sequence: Synthetic oligonucleotide
gcgucccgcuaaguccuuc

SEQ ID NO: 1620799 - RNA, 19 nt, Artificial Sequence
  Description of Artificial Sequence: Synthetic oligonucleotide
cggacgccguaggccacgg

SEQ ID NO: 1620800 - RNA, 19 nt, Artificial Sequence
  Description of Artificial Sequence: Synthetic oligonucleotide
gccacuuguuuggcuucua

SEQ ID NO: 1620801 - RNA, 19 nt, Artificial Sequence
  Description of Artificial Sequence: Synthetic oligonucleotide
gcgggcaggcgucccgcua

SEQ ID NO: 1620802 - RNA, 19 nt, Artificial Sequence
  Description of Artificial Sequence: Synthetic oligonucleotide
ccuccggaaggcggcggca

SEQ ID NO: 1620803 - RNA, 19 nt, Artificial Sequence
  Description of Artificial Sequence: Synthetic oligonucleotide
gcgcgcucugucagcucuc

SEQ ID NO: 1620804 - RNA, 19 nt, Artificial Sequence
  Description of Artificial Sequence: Synthetic oligonucleotide
cgcggacgccguaggccac

SEQ ID NO: 1620805 - RNA, 19 nt, Artificial Sequence
  Description of Artificial Sequence: Synthetic oligonucleotide
gcccuaggcgcugguacau

SEQ ID NO: 1620806 - RNA, 19 nt, Artificial Sequence
  Description of Artificial Sequence: Synthetic oligonucleotide
ggggcccggcgggcaggcg

SEQ ID NO: 1620807 - RNA, 19 nt, Artificial Sequence
  Description of Artificial Sequence: Synthetic oligonucleotide
cggcggcagaaagggcacc

SEQ ID NO: 1620808 - RNA, 19 nt, Artificial Sequence
  Description of Artificial Sequence: Synthetic oligonucleotide
cccggcgggcaggcguccc

SEQ ID NO: 1620809 - RNA, 19 nt, Artificial Sequence
  Description of Artificial Sequence: Synthetic oligonucleotide
ggcgggcaggcgucccgcu

SEQ ID NO: 1620810 - RNA, 19 nt, Artificial Sequence
  Description of Artificial Sequence: Synthetic oligonucleotide
ggcaggcgucccgcuaagu

SEQ ID NO: 1620811 - RNA, 19 nt, Artificial Sequence
  Description of Artificial Sequence: Synthetic oligonucleotide
cgaugcgguugaagaagau

SEQ ID NO: 1620812 - RNA, 19 nt, Artificial Sequence
  Description of Artificial Sequence: Synthetic oligonucleotide
ccgcccugcacacgaggau

SEQ ID NO: 1620813 - RNA, 19 nt, Artificial Sequence
  Description of Artificial Sequence: Synthetic oligonucleotide
gcgcucugucagcucucuu

SEQ ID NO: 1620814 - RNA, 19 nt, Artificial Sequence
  Description of Artificial Sequence: Synthetic oligonucleotide
cgaucgucuuagagauguu

SEQ ID NO: 1620815 - RNA, 19 nt, Artificial Sequence
  Description of Artificial Sequence: Synthetic oligonucleotide
cggacucgcggacgccgua

SEQ ID NO: 1620816 - RNA, 19 nt, Artificial Sequence
  Description of Artificial Sequence: Synthetic oligonucleotide
cggcggcaccggcggucag

SEQ ID NO: 1620817 - RNA, 19 nt, Artificial Sequence
  Description of Artificial Sequence: Synthetic oligonucleotide
ggcgucccgcuaaguccuu

SEQ ID NO: 1620818 - RNA, 19 nt, Artificial Sequence
  Description of Artificial Sequence: Synthetic oligonucleotide
cgccgccgaugcgguugaa

SEQ ID NO: 1620819 - RNA, 19 nt, Artificial Sequence
  Description of Artificial Sequence: Synthetic oligonucleotide
aggaaauacaacuaaagag

SEQ ID NO: 1620820 - RNA, 19 nt, Artificial Sequence
  Description of Artificial Sequence: Synthetic oligonucleotide
ugaguaguuauguuaaccg

SEQ ID NO: 1620821 - RNA, 19 nt, Artificial Sequence
  Description of Artificial Sequence: Synthetic oligonucleotide
aaaauccucgucccgaugg

SEQ ID NO: 1620822 - RNA, 19 nt, Artificial Sequence
  Description of Artificial Sequence: Synthetic oligonucleotide
auuaagauggaugagcugg

SEQ ID NO: 1620823 - RNA, 19 nt, Artificial Sequence
  Description of Artificial Sequence: Synthetic oligonucleotide
agagcuacggaugagacgc

SEQ ID NO: 1620824 - RNA, 19 nt, Artificial Sequence
  Description of Artificial Sequence: Synthetic oligonucleotide
uacaugaacaucuuggccc

SEQ ID NO: 1620825 - RNA, 19 nt, Artificial Sequence
  Description of Artificial Sequence: Synthetic oligonucleotide
ucuuuguuagggaagguag

SEQ ID NO: 1620826 - RNA, 19 nt, Artificial Sequence
  Description of Artificial Sequence: Synthetic oligonucleotide
acuacaugaacaucuuggc

SEQ ID NO: 1620827 - RNA, 19 nt, Artificial Sequence
  Description of Artificial Sequence: Synthetic oligonucleotide
gaaacugggcauuggaugg

SEQ ID NO: 1620828 - RNA, 19 nt, Artificial Sequence
  Description of Artificial Sequence: Synthetic oligonucleotide
acggauagacuccagaaac

SEQ ID NO: 1620829 - RNA, 19 nt, Artificial Sequence
  Description of Artificial Sequence: Synthetic oligonucleotide
gucauaaggacaaagcugg

SEQ ID NO: 1620830 - RNA, 19 nt, Artificial Sequence
  Description of Artificial Sequence: Synthetic oligonucleotide
cacuacaugaacaucuugg

SEQ ID NO: 1620831 - RNA, 19 nt, Artificial Sequence
  Description of Artificial Sequence: Synthetic oligonucleotide
acaaauguccaacugaagu

SEQ ID NO: 1620832 - RNA, 19 nt, Artificial Sequence
  Description of Artificial Sequence: Synthetic oligonucleotide
uuauguuaaccgcugcacg

SEQ ID NO: 1620833 - RNA, 19 nt, Artificial Sequence
  Description of Artificial Sequence: Synthetic oligonucleotide
uuaaaguccauugaucacc

SEQ ID NO: 1620834 - RNA, 19 nt, Artificial Sequence
  Description of Artificial Sequence: Synthetic oligonucleotide
auuggaugggucuugguag

SEQ ID NO: 1620835 - RNA, 19 nt, Artificial Sequence
  Description of Artificial Sequence: Synthetic oligonucleotide
gaguucaccauugucaagg

SEQ ID NO: 1620836 - RNA, 19 nt, Artificial Sequence
  Description of Artificial Sequence: Synthetic oligonucleotide
uacaacuaaagagaaaaca

SEQ ID NO: 1620837 - RNA, 19 nt, Artificial Sequence
  Description of Artificial Sequence: Synthetic oligonucleotide
cuuaaacagaucauccacc

SEQ ID NO: 1620838 - RNA, 19 nt, Artificial Sequence
  Description of Artificial Sequence: Synthetic oligonucleotide
uuuacuggucucuccaggg

SEQ ID NO: 1620839 - RNA, 19 nt, Artificial Sequence
  Description of Artificial Sequence: Synthetic oligonucleotide
uugauuaagauggaugagc

SEQ ID NO: 1620840 - RNA, 19 nt, Artificial Sequence
  Description of Artificial Sequence: Synthetic oligonucleotide
uccauauccaaguucaccu

SEQ ID NO: 1620841 - RNA, 19 nt, Artificial Sequence
  Description of Artificial Sequence: Synthetic oligonucleotide
uuaaacagaucauccacca

SEQ ID NO: 1620842 - RNA, 19 nt, Artificial Sequence
  Description of Artificial Sequence: Synthetic oligonucleotide
aaugaagagccggaugucg

SEQ ID NO: 1620843 - RNA, 19 nt, Artificial Sequence
  Description of Artificial Sequence: Synthetic oligonucleotide
uccuccauauccaaguuca

SEQ ID NO: 1620844 - RNA, 19 nt, Artificial Sequence
  Description of Artificial Sequence: Synthetic oligonucleotide
aaagcuugcuagugcaauc

SEQ ID NO: 1620845 - RNA, 19 nt, Artificial Sequence
  Description of Artificial Sequence: Synthetic oligonucleotide
ucguugauuaagauggaug

SEQ ID NO: 1620846 - RNA, 19 nt, Artificial Sequence
  Description of Artificial Sequence: Synthetic oligonucleotide
agaaacugggcauuggaug

SEQ ID NO: 1620847 - RNA, 19 nt, Artificial Sequence
  Description of Artificial Sequence: Synthetic oligonucleotide
ugaaauggucacaaugucu

SEQ ID NO: 1620848 - RNA, 19 nt, Artificial Sequence
  Description of Artificial Sequence: Synthetic oligonucleotide
auaaaagcuugcuagugca

SEQ ID NO: 1620849 - RNA, 19 nt, Artificial Sequence
  Description of Artificial Sequence: Synthetic oligonucleotide
cauaaaagcuugcuagugc

SEQ ID NO: 1620850 - RNA, 19 nt, Artificial Sequence
  Description of Artificial Sequence: Synthetic oligonucleotide
aaauguccaacugaagucu

SEQ ID NO: 1620851 - RNA, 19 nt, Artificial Sequence
  Description of Artificial Sequence: Synthetic oligonucleotide
gauguguacagggagcagg

SEQ ID NO: 1620852 - RNA, 19 nt, Artificial Sequence
  Description of Artificial Sequence: Synthetic oligonucleotide
ugccucuagacacugaacu

SEQ ID NO: 1620853 - RNA, 19 nt, Artificial Sequence
  Description of Artificial Sequence: Synthetic oligonucleotide
uauguuaaccgcugcacga

SEQ ID NO: 1620854 - RNA, 19 nt, Artificial Sequence
  Description of Artificial Sequence: Synthetic oligonucleotide
aaggacgucacccuauuau

SEQ ID NO: 1620855 - RNA, 19 nt, Artificial Sequence
  Description of Artificial Sequence: Synthetic oligonucleotide
ucaugaauaaggucucuga

SEQ ID NO: 1620856 - RNA, 19 nt, Artificial Sequence
  Description of Artificial Sequence: Synthetic oligonucleotide
acaugaacaucuuggcccg

SEQ ID NO: 1620857 - RNA, 19 nt, Artificial Sequence
  Description of Artificial Sequence: Synthetic oligonucleotide
gccucguugauuaagaugg

SEQ ID NO: 1620858 - RNA, 19 nt, Artificial Sequence
  Description of Artificial Sequence: Synthetic oligonucleotide
gaguaguuauguuaaccgc

SEQ ID NO: 1620859 - RNA, 19 nt, Artificial Sequence
  Description of Artificial Sequence: Synthetic oligonucleotide
ggaaauacaacuaaagaga

SEQ ID NO: 1620860 - RNA, 19 nt, Artificial Sequence
  Description of Artificial Sequence: Synthetic oligonucleotide
acuaaagagaaaacaaaug

SEQ ID NO: 1620861 - RNA, 19 nt, Artificial Sequence
  Description of Artificial Sequence: Synthetic oligonucleotide
caaauguccaacugaaguc

SEQ ID NO: 1620862 - RNA, 19 nt, Artificial Sequence
  Description of Artificial Sequence: Synthetic oligonucleotide
auuuggauguucgugguag

SEQ ID NO: 1620863 - RNA, 19 nt, Artificial Sequence
  Description of Artificial Sequence: Synthetic oligonucleotide
uuuaaaguccauugaucac

SEQ ID NO: 1620864 - RNA, 19 nt, Artificial Sequence
  Description of Artificial Sequence: Synthetic oligonucleotide
ugagcuaaccuccgaagcu

SEQ ID NO: 1620865 - RNA, 19 nt, Artificial Sequence
  Description of Artificial Sequence: Synthetic oligonucleotide
ucuuggucaugaauaaggu

SEQ ID NO: 1620866 - RNA, 19 nt, Artificial Sequence
  Description of Artificial Sequence: Synthetic oligonucleotide
ugaaggcuuugaaagcucc

SEQ ID NO: 1620867 - RNA, 19 nt, Artificial Sequence
  Description of Artificial Sequence: Synthetic oligonucleotide
ucacccuauuaucacuggg

SEQ ID NO: 1620868 - RNA, 19 nt, Artificial Sequence
  Description of Artificial Sequence: Synthetic oligonucleotide
gauccuguggcugugguug

SEQ ID NO: 1620869 - RNA, 19 nt, Artificial Sequence
  Description of Artificial Sequence: Synthetic oligonucleotide
ucuacggauagacuccaga

SEQ ID NO: 1620870 - RNA, 19 nt, Artificial Sequence
  Description of Artificial Sequence: Synthetic oligonucleotide
ucauaaaagcuugcuagug

SEQ ID NO: 1620871 - RNA, 19 nt, Artificial Sequence
  Description of Artificial Sequence: Synthetic oligonucleotide
agucauaaggacaaagcug

SEQ ID NO: 1620872 - RNA, 19 nt, Artificial Sequence
  Description of Artificial Sequence: Synthetic oligonucleotide
cucuagacacugaacuugg

SEQ ID NO: 1620873 - RNA, 19 nt, Artificial Sequence
  Description of Artificial Sequence: Synthetic oligonucleotide
acgaugacagcguugagaa

SEQ ID NO: 1620874 - RNA, 19 nt, Artificial Sequence
  Description of Artificial Sequence: Synthetic oligonucleotide
uaaccuccgaagcucugcg

SEQ ID NO: 1620875 - RNA, 19 nt, Artificial Sequence
  Description of Artificial Sequence: Synthetic oligonucleotide
aguucuccagagcuucagc

SEQ ID NO: 1620876 - RNA, 19 nt, Artificial Sequence
  Description of Artificial Sequence: Synthetic oligonucleotide
uaagaacccagagcuacgg

SEQ ID NO: 1620877 - RNA, 19 nt, Artificial Sequence
  Description of Artificial Sequence: Synthetic oligonucleotide
ucugccucguugauuaaga

SEQ ID NO: 1620878 - RNA, 19 nt, Artificial Sequence
  Description of Artificial Sequence: Synthetic oligonucleotide
acccuauuaucacugggag

SEQ ID NO: 1620879 - RNA, 19 nt, Artificial Sequence
  Description of Artificial Sequence: Synthetic oligonucleotide
cauauccaaguucaccugc

SEQ ID NO: 1620880 - RNA, 19 nt, Artificial Sequence
  Description of Artificial Sequence: Synthetic oligonucleotide
aguuauguuaaccgcugca

SEQ ID NO: 1620881 - RNA, 19 nt, Artificial Sequence
  Description of Artificial Sequence: Synthetic oligonucleotide
uuagggaagguagucauaa

SEQ ID NO: 1620882 - RNA, 19 nt, Artificial Sequence
  Description of Artificial Sequence: Synthetic oligonucleotide
aggacgucacccuauuauc

SEQ ID NO: 1620883 - RNA, 19 nt, Artificial Sequence
  Description of Artificial Sequence: Synthetic oligonucleotide
gaagguagucauaaggaca

SEQ ID NO: 1620884 - RNA, 19 nt, Artificial Sequence
  Description of Artificial Sequence: Synthetic oligonucleotide
gauuaagauggaugagcug

SEQ ID NO: 1620885 - RNA, 19 nt, Artificial Sequence
  Description of Artificial Sequence: Synthetic oligonucleotide
ugugccucuagacacugaa

SEQ ID NO: 1620886 - RNA, 19 nt, Artificial Sequence
  Description of Artificial Sequence: Synthetic oligonucleotide
ugaauccaguucuccagag

SEQ ID NO: 1620887 - RNA, 19 nt, Artificial Sequence
  Description of Artificial Sequence: Synthetic oligonucleotide
auaaggucucugaaggacg

SEQ ID NO: 1620888 - RNA, 19 nt, Artificial Sequence
  Description of Artificial Sequence: Synthetic oligonucleotide
aguaguuauguuaaccgcu

SEQ ID NO: 1620889 - RNA, 19 nt, Artificial Sequence
  Description of Artificial Sequence: Synthetic oligonucleotide
uuuggauguucgugguagg

SEQ ID NO: 1620890 - RNA, 19 nt, Artificial Sequence
  Description of Artificial Sequence: Synthetic oligonucleotide
ugcacgaugacagcguuga

SEQ ID NO: 1620891 - RNA, 19 nt, Artificial Sequence
  Description of Artificial Sequence: Synthetic oligonucleotide
ugcaagccggauuuggaug

SEQ ID NO: 1620892 - RNA, 19 nt, Artificial Sequence
  Description of Artificial Sequence: Synthetic oligonucleotide
cuuugaaagcucccuuggg

SEQ ID NO: 1620893 - RNA, 19 nt, Artificial Sequence
  Description of Artificial Sequence: Synthetic oligonucleotide
guugggacuucucuuccgg

SEQ ID NO: 1620894 - RNA, 19 nt, Artificial Sequence
  Description of Artificial Sequence: Synthetic oligonucleotide
agggcucuuggucacucgc

SEQ ID NO: 1620895 - RNA, 19 nt, Artificial Sequence
  Description of Artificial Sequence: Synthetic oligonucleotide
auauccaaguucaccugcc

SEQ ID NO: 1620896 - RNA, 19 nt, Artificial Sequence
  Description of Artificial Sequence: Synthetic oligonucleotide
cuaagaacccagagcuacg

SEQ ID NO: 1620897 - RNA, 19 nt, Artificial Sequence
  Description of Artificial Sequence: Synthetic oligonucleotide
ucuagacacugaacuuggg

SEQ ID NO: 1620898 - RNA, 19 nt, Artificial Sequence
  Description of Artificial Sequence: Synthetic oligonucleotide
aaaagcuugcuagugcaau

SEQ ID NO: 1620899 - RNA, 19 nt, Artificial Sequence
  Description of Artificial Sequence: Synthetic oligonucleotide
agcucuuuguuagggaagg

SEQ ID NO: 1620900 - RNA, 19 nt, Artificial Sequence
  Description of Artificial Sequence: Synthetic oligonucleotide
gacagcguugagaagguug

SEQ ID NO: 1620901 - RNA, 19 nt, Artificial Sequence
  Description of Artificial Sequence: Synthetic oligonucleotide
aguccugccgcuccuccgc

SEQ ID NO: 1620902 - RNA, 19 nt, Artificial Sequence
  Description of Artificial Sequence: Synthetic oligonucleotide
ugccucguugauuaagaug

SEQ ID NO: 1620903 - RNA, 19 nt, Artificial Sequence
  Description of Artificial Sequence: Synthetic oligonucleotide
uggccgggcauccacaaug

SEQ ID NO: 1620904 - RNA, 19 nt, Artificial Sequence
  Description of Artificial Sequence: Synthetic oligonucleotide
gagcugugccucuagacac

SEQ ID NO: 1620905 - RNA, 19 nt, Artificial Sequence
  Description of Artificial Sequence: Synthetic oligonucleotide
uuuguuagggaagguaguc

SEQ ID NO: 1620906 - RNA, 19 nt, Artificial Sequence
  Description of Artificial Sequence: Synthetic oligonucleotide
aaaguccauugaucaccac

SEQ ID NO: 1620907 - RNA, 19 nt, Artificial Sequence
  Description of Artificial Sequence: Synthetic oligonucleotide
guuauguuaaccgcugcac

SEQ ID NO: 1620908 - RNA, 19 nt, Artificial Sequence
  Description of Artificial Sequence: Synthetic oligonucleotide
uuacuggucucuccagggc

SEQ ID NO: 1620909 - RNA, 19 nt, Artificial Sequence
  Description of Artificial Sequence: Synthetic oligonucleotide
uccucauaaaagcuugcua

SEQ ID NO: 1620910 - RNA, 19 nt, Artificial Sequence
  Description of Artificial Sequence: Synthetic oligonucleotide
ucugcaagccggauuugga

SEQ ID NO: 1620911 - RNA, 19 nt, Artificial Sequence
  Description of Artificial Sequence: Synthetic oligonucleotide
ucaaggcugaauccaguuc

SEQ ID NO: 1620912 - RNA, 19 nt, Artificial Sequence
  Description of Artificial Sequence: Synthetic oligonucleotide
uaguuauguuaaccgcugc

SEQ ID NO: 1620913 - RNA, 19 nt, Artificial Sequence
  Description of Artificial Sequence: Synthetic oligonucleotide
agauggaugagcuggcuuu

SEQ ID NO: 1620914 - RNA, 19 nt, Artificial Sequence
  Description of Artificial Sequence: Synthetic oligonucleotide
gugagcuaaccuccgaagc

SEQ ID NO: 1620915 - RNA, 19 nt, Artificial Sequence
  Description of Artificial Sequence: Synthetic oligonucleotide
agaacccagagcuacggau

SEQ ID NO: 1620916 - RNA, 19 nt, Artificial Sequence
  Description of Artificial Sequence: Synthetic oligonucleotide
aagcuugcuagugcaaucu

SEQ ID NO: 1620917 - RNA, 19 nt, Artificial Sequence
  Description of Artificial Sequence: Synthetic oligonucleotide
guaguuauguuaaccgcug

SEQ ID NO: 1620918 - RNA, 19 nt, Artificial Sequence
  Description of Artificial Sequence: Synthetic oligonucleotide
uguuaaccgcugcacgaug

SEQ ID NO: 1620919 - RNA, 19 nt, Artificial Sequence
  Description of Artificial Sequence: Synthetic oligonucleotide
guugauuaagauggaugag

SEQ ID NO: 1620920 - RNA, 19 nt, Artificial Sequence
  Description of Artificial Sequence: Synthetic oligonucleotide
uugguagcuucugaguuca

SEQ ID NO: 1620921 - RNA, 19 nt, Artificial Sequence
  Description of Artificial Sequence: Synthetic oligonucleotide
cacgaacucucucagcgag

SEQ ID NO: 1620922 - RNA, 19 nt, Artificial Sequence
  Description of Artificial Sequence: Synthetic oligonucleotide
uucugaguucaccauuguc

SEQ ID NO: 1620923 - RNA, 19 nt, Artificial Sequence
  Description of Artificial Sequence: Synthetic oligonucleotide
uuggaugggucuugguagc

SEQ ID NO: 1620924 - RNA, 19 nt, Artificial Sequence
  Description of Artificial Sequence: Synthetic oligonucleotide
cugugguugaauuucugca

SEQ ID NO: 1620925 - RNA, 19 nt, Artificial Sequence
  Description of Artificial Sequence: Synthetic oligonucleotide
ugcucuuuggcacccuuaa

SEQ ID NO: 1620926 - RNA, 19 nt, Artificial Sequence
  Description of Artificial Sequence: Synthetic oligonucleotide
aaauccucgucccgauggu

SEQ ID NO: 1620927 - RNA, 19 nt, Artificial Sequence
  Description of Artificial Sequence: Synthetic oligonucleotide
cucucagcgaguccugccg

SEQ ID NO: 1620928 - RNA, 19 nt, Artificial Sequence
  Description of Artificial Sequence: Synthetic oligonucleotide
gaugggucuugguagcuuc

SEQ ID NO: 1620929 - RNA, 19 nt, Artificial Sequence
  Description of Artificial Sequence: Synthetic oligonucleotide
uaaaagcuugcuagugcaa

SEQ ID NO: 1620930 - RNA, 19 nt, Artificial Sequence
  Description of Artificial Sequence: Synthetic oligonucleotide
cuugguagcuucugaguuc

SEQ ID NO: 1620931 - RNA, 19 nt, Artificial Sequence
  Description of Artificial Sequence: Synthetic oligonucleotide
aacaaucugcuguccacuu

SEQ ID NO: 1620932 - RNA, 19 nt, Artificial Sequence
  Description of Artificial Sequence: Synthetic oligonucleotide
aaccuccgaagcucugcgg

SEQ ID NO: 1620933 - RNA, 19 nt, Artificial Sequence
  Description of Artificial Sequence: Synthetic oligonucleotide
ggcacccuuaaacagauca

SEQ ID NO: 1620934 - RNA, 19 nt, Artificial Sequence
  Description of Artificial Sequence: Synthetic oligonucleotide
uuguuagggaagguaguca

SEQ ID NO: 1620935 - RNA, 19 nt, Artificial Sequence
  Description of Artificial Sequence: Synthetic oligonucleotide
uggucaugaauaaggucuc

SEQ ID NO: 1620936 - RNA, 19 nt, Artificial Sequence
  Description of Artificial Sequence: Synthetic oligonucleotide
aucacugggagcugugccu

SEQ ID NO: 1620937 - RNA, 19 nt, Artificial Sequence
  Description of Artificial Sequence: Synthetic oligonucleotide
aggacaaagcugguagccg

SEQ ID NO: 1620938 - RNA, 19 nt, Artificial Sequence
  Description of Artificial Sequence: Synthetic oligonucleotide
uugcuagugcaaucugcag

SEQ ID NO: 1620939 - RNA, 19 nt, Artificial Sequence
  Description of Artificial Sequence: Synthetic oligonucleotide
uggaugagcuggcuuuggc

SEQ ID NO: 1620940 - RNA, 19 nt, Artificial Sequence
  Description of Artificial Sequence: Synthetic oligonucleotide
cagagcuacggaugagacg

SEQ ID NO: 1620941 - RNA, 19 nt, Artificial Sequence
  Description of Artificial Sequence: Synthetic oligonucleotide
gaacccagagcuacggaug

SEQ ID NO: 1620942 - RNA, 19 nt, Artificial Sequence
  Description of Artificial Sequence: Synthetic oligonucleotide
uuaaccgcugcacgaugac

SEQ ID NO: 1620943 - RNA, 19 nt, Artificial Sequence
  Description of Artificial Sequence: Synthetic oligonucleotide
ucguugggacuucucuucc

SEQ ID NO: 1620944 - RNA, 19 nt, Artificial Sequence
  Description of Artificial Sequence: Synthetic oligonucleotide
aagaacccagagcuacgga

SEQ ID NO: 1620945 - RNA, 19 nt, Artificial Sequence
  Description of Artificial Sequence: Synthetic oligonucleotide
accgccacgaacucucuca

SEQ ID NO: 1620946 - RNA, 19 nt, Artificial Sequence
  Description of Artificial Sequence: Synthetic oligonucleotide
gguagguucugccucguug

SEQ ID NO: 1620947 - RNA, 19 nt, Artificial Sequence
  Description of Artificial Sequence: Synthetic oligonucleotide
gaugagacgcggcacugga

SEQ ID NO: 1620948 - RNA, 19 nt, Artificial Sequence
  Description of Artificial Sequence: Synthetic oligonucleotide
ucugaaggacgucacccua

SEQ ID NO: 1620949 - RNA, 19 nt, Artificial Sequence
  Description of Artificial Sequence: Synthetic oligonucleotide
ucgucagccagcucuuugu

SEQ ID NO: 1620950 - RNA, 19 nt, Artificial Sequence
  Description of Artificial Sequence: Synthetic oligonucleotide
gggaggaccaacaaucugc

SEQ ID NO: 1620951 - RNA, 19 nt, Artificial Sequence
  Description of Artificial Sequence: Synthetic oligonucleotide
ucucagcgaguccugccgc

SEQ ID NO: 1620952 - RNA, 19 nt, Artificial Sequence
  Description of Artificial Sequence: Synthetic oligonucleotide
gucacccuauuaucacugg

SEQ ID NO: 1620953 - RNA, 19 nt, Artificial Sequence
  Description of Artificial Sequence: Synthetic oligonucleotide
uucugccucguugauuaag

SEQ ID NO: 1620954 - RNA, 19 nt, Artificial Sequence
  Description of Artificial Sequence: Synthetic oligonucleotide
aagagccggaugucgcuga

SEQ ID NO: 1620955 - RNA, 19 nt, Artificial Sequence
  Description of Artificial Sequence: Synthetic oligonucleotide
agcagcugaguaguuaugu

SEQ ID NO: 1620956 - RNA, 19 nt, Artificial Sequence
  Description of Artificial Sequence: Synthetic oligonucleotide
gucaugaauaaggucucug

SEQ ID NO: 1620957 - RNA, 19 nt, Artificial Sequence
  Description of Artificial Sequence: Synthetic oligonucleotide
accgcugcacgaugacagc

SEQ ID NO: 1620958 - RNA, 19 nt, Artificial Sequence
  Description of Artificial Sequence: Synthetic oligonucleotide
uaggcagacucuuccucug

SEQ ID NO: 1620959 - RNA, 19 nt, Artificial Sequence
  Description of Artificial Sequence: Synthetic oligonucleotide
guugccugugaaaugguca

SEQ ID NO: 1620960 - RNA, 19 nt, Artificial Sequence
  Description of Artificial Sequence: Synthetic oligonucleotide
cuacggauagacuccagaa

SEQ ID NO: 1620961 - RNA, 19 nt, Artificial Sequence
  Description of Artificial Sequence: Synthetic oligonucleotide
ggacaaagcugguagccgc

SEQ ID NO: 1620962 - RNA, 19 nt, Artificial Sequence
  Description of Artificial Sequence: Synthetic oligonucleotide
ccgaugguccuccauaucc

SEQ ID NO: 1620963 - RNA, 19 nt, Artificial Sequence
  Description of Artificial Sequence: Synthetic oligonucleotide
cacccuauuaucacuggga

SEQ ID NO: 1620964 - RNA, 19 nt, Artificial Sequence
  Description of Artificial Sequence: Synthetic oligonucleotide
agcugaguaguuauguuaa

SEQ ID NO: 1620965 - RNA, 19 nt, Artificial Sequence
  Description of Artificial Sequence: Synthetic oligonucleotide
acaaaauccucgucccgau

SEQ ID NO: 1620966 - RNA, 19 nt, Artificial Sequence
  Description of Artificial Sequence: Synthetic oligonucleotide
cggauuuggauguucgugg

SEQ ID NO: 1620967 - RNA, 19 nt, Artificial Sequence
  Description of Artificial Sequence: Synthetic oligonucleotide
gguucugccucguugauua

SEQ ID NO: 1620968 - RNA, 19 nt, Artificial Sequence
  Description of Artificial Sequence: Synthetic oligonucleotide
aagccggauuuggauguuc

SEQ ID NO: 1620969 - RNA, 19 nt, Artificial Sequence
  Description of Artificial Sequence: Synthetic oligonucleotide
gacaaagcugguagccgcc

SEQ ID NO: 1620970 - RNA, 19 nt, Artificial Sequence
  Description of Artificial Sequence: Synthetic oligonucleotide
acggaugagacgcggcacu

SEQ ID NO: 1620971 - RNA, 19 nt, Artificial Sequence
  Description of Artificial Sequence: Synthetic oligonucleotide
cauuggaugggucuuggua

SEQ ID NO: 1620972 - RNA, 19 nt, Artificial Sequence
  Description of Artificial Sequence: Synthetic oligonucleotide
ugaaagcucccuugggcuu

SEQ ID NO: 1620973 - RNA, 19 nt, Artificial Sequence
  Description of Artificial Sequence: Synthetic oligonucleotide
ugggguugccugugaaaug

SEQ ID NO: 1620974 - RNA, 19 nt, Artificial Sequence
  Description of Artificial Sequence: Synthetic oligonucleotide
uuggauguucgugguaggu

SEQ ID NO: 1620975 - RNA, 19 nt, Artificial Sequence
  Description of Artificial Sequence: Synthetic oligonucleotide
ugaaggacgucacccuauu

SEQ ID NO: 1620976 - RNA, 19 nt, Artificial Sequence
  Description of Artificial Sequence: Synthetic oligonucleotide
acgucacccuauuaucacu

SEQ ID NO: 1620977 - RNA, 19 nt, Artificial Sequence
  Description of Artificial Sequence: Synthetic oligonucleotide
uguucgugguagguucugc

SEQ ID NO: 1620978 - RNA, 19 nt, Artificial Sequence
  Description of Artificial Sequence: Synthetic oligonucleotide
cguugauuaagauggauga

SEQ ID NO: 1620979 - RNA, 19 nt, Artificial Sequence
  Description of Artificial Sequence: Synthetic oligonucleotide
cucagcgcccgucaccgcc

SEQ ID NO: 1620980 - RNA, 19 nt, Artificial Sequence
  Description of Artificial Sequence: Synthetic oligonucleotide
agcuugcuagugcaaucug

SEQ ID NO: 1620981 - RNA, 19 nt, Artificial Sequence
  Description of Artificial Sequence: Synthetic oligonucleotide
aaggucucugaaggacguc

SEQ ID NO: 1620982 - RNA, 19 nt, Artificial Sequence
  Description of Artificial Sequence: Synthetic oligonucleotide
uaagauggaugagcuggcu

SEQ ID NO: 1620983 - RNA, 19 nt, Artificial Sequence
  Description of Artificial Sequence: Synthetic oligonucleotide
ucucgguuuacuggucucu

SEQ ID NO: 1620984 - RNA, 19 nt, Artificial Sequence
  Description of Artificial Sequence: Synthetic oligonucleotide
agccggauuuggauguucg

SEQ ID NO: 1620985 - RNA, 19 nt, Artificial Sequence
  Description of Artificial Sequence: Synthetic oligonucleotide
gggaagguagucauaagga

SEQ ID NO: 1620986 - RNA, 19 nt, Artificial Sequence
  Description of Artificial Sequence: Synthetic oligonucleotide
ugguagccgccauggcugg

SEQ ID NO: 1620987 - RNA, 19 nt, Artificial Sequence
  Description of Artificial Sequence: Synthetic oligonucleotide
gagcuaaccuccgaagcuc

SEQ ID NO: 1620988 - RNA, 19 nt, Artificial Sequence
  Description of Artificial Sequence: Synthetic oligonucleotide
ucagcacuacaugaacauc

SEQ ID NO: 1620989 - RNA, 19 nt, Artificial Sequence
  Description of Artificial Sequence: Synthetic oligonucleotide
gaugguccuccauauccaa

SEQ ID NO: 1620990 - RNA, 19 nt, Artificial Sequence
  Description of Artificial Sequence: Synthetic oligonucleotide
aacuugggguugccuguga

SEQ ID NO: 1620991 - RNA, 19 nt, Artificial Sequence
  Description of Artificial Sequence: Synthetic oligonucleotide
uccggggaggaccaacaau

SEQ ID NO: 1620992 - RNA, 19 nt, Artificial Sequence
  Description of Artificial Sequence: Synthetic oligonucleotide
cacaaaauccucgucccga

SEQ ID NO: 1620993 - RNA, 19 nt, Artificial Sequence
  Description of Artificial Sequence: Synthetic oligonucleotide
agcucugcgggcaccuccc

SEQ ID NO: 1620994 - RNA, 19 nt, Artificial Sequence
  Description of Artificial Sequence: Synthetic oligonucleotide
ugcaggucccagccggcug

SEQ ID NO: 1620995 - RNA, 19 nt, Artificial Sequence
  Description of Artificial Sequence: Synthetic oligonucleotide
agcuacggaugagacgcgg

SEQ ID NO: 1620996 - RNA, 19 nt, Artificial Sequence
  Description of Artificial Sequence: Synthetic oligonucleotide
ucuuggcccgaaugucgcc

SEQ ID NO: 1620997 - RNA, 19 nt, Artificial Sequence
  Description of Artificial Sequence: Synthetic oligonucleotide
gaaugucgccuccuuucuc

SEQ ID NO: 1620998 - RNA, 19 nt, Artificial Sequence
  Description of Artificial Sequence: Synthetic oligonucleotide
cagcugaguaguuauguua

SEQ ID NO: 1620999 - RNA, 19 nt, Artificial Sequence
  Description of Artificial Sequence: Synthetic oligonucleotide
gugauccccaugggcaugg

SEQ ID NO: 1621000 - RNA, 19 nt, Artificial Sequence
  Description of Artificial Sequence: Synthetic oligonucleotide
guuaaccgcugcacgauga

SEQ ID NO: 1621001 - RNA, 19 nt, Artificial Sequence
  Description of Artificial Sequence: Synthetic oligonucleotide
aauguccaacugaagucua

SEQ ID NO: 1621002 - RNA, 19 nt, Artificial Sequence
  Description of Artificial Sequence: Synthetic oligonucleotide
gucgcugauccuguggcug

SEQ ID NO: 1621003 - RNA, 19 nt, Artificial Sequence
  Description of Artificial Sequence: Synthetic oligonucleotide
gguagcuucugaguucacc

SEQ ID NO: 1621004 - RNA, 19 nt, Artificial Sequence
  Description of Artificial Sequence: Synthetic oligonucleotide
ccggggaggaccaacaauc

SEQ ID NO: 1621005 - RNA, 19 nt, Artificial Sequence
  Description of Artificial Sequence: Synthetic oligonucleotide
ggaccaacaaucugcuguc

SEQ ID NO: 1621006 - RNA, 19 nt, Artificial Sequence
  Description of Artificial Sequence: Synthetic oligonucleotide
gggcuucacaaaauccucg

SEQ ID NO: 1621007 - RNA, 19 nt, Artificial Sequence
  Description of Artificial Sequence: Synthetic oligonucleotide
gugcugcccaguuucuggc

SEQ ID NO: 1621008 - RNA, 19 nt, Artificial Sequence
  Description of Artificial Sequence: Synthetic oligonucleotide
cuacggaugagacgcggca

SEQ ID NO: 1621009 - RNA, 19 nt, Artificial Sequence
  Description of Artificial Sequence: Synthetic oligonucleotide
cucgucagccagcucuuug

SEQ ID NO: 1621010 - RNA, 19 nt, Artificial Sequence
  Description of Artificial Sequence: Synthetic oligonucleotide
gauuuggauguucguggua

SEQ ID NO: 1621011 - RNA, 19 nt, Artificial Sequence
  Description of Artificial Sequence: Synthetic oligonucleotide
ucgcugauccuguggcugu

SEQ ID NO: 1621012 - RNA, 19 nt, Artificial Sequence
  Description of Artificial Sequence: Synthetic oligonucleotide
uggauguucgugguagguu

SEQ ID NO: 1621013 - RNA, 19 nt, Artificial Sequence
  Description of Artificial Sequence: Synthetic oligonucleotide
ucagcgcccgucaccgcca

SEQ ID NO: 1621014 - RNA, 19 nt, Artificial Sequence
  Description of Artificial Sequence: Synthetic oligonucleotide
gucaccgccacgaacucuc

SEQ ID NO: 1621015 - RNA, 19 nt, Artificial Sequence
  Description of Artificial Sequence: Synthetic oligonucleotide
gcuagugcaaucugcaggu

SEQ ID NO: 1621016 - RNA, 19 nt, Artificial Sequence
  Description of Artificial Sequence: Synthetic oligonucleotide
ccgggcauccacaaugaag

SEQ ID NO: 1621017 - RNA, 19 nt, Artificial Sequence
  Description of Artificial Sequence: Synthetic oligonucleotide
cccucuacggauagacucc

SEQ ID NO: 1621018 - RNA, 19 nt, Artificial Sequence
  Description of Artificial Sequence: Synthetic oligonucleotide
cuuuguuagggaagguagu

SEQ ID NO: 1621019 - RNA, 19 nt, Artificial Sequence
  Description of Artificial Sequence: Synthetic oligonucleotide
ugggucuugguagcuucug

SEQ ID NO: 1621020 - RNA, 19 nt, Artificial Sequence
  Description of Artificial Sequence: Synthetic oligonucleotide
guaggcagacucuuccucu

SEQ ID NO: 1621021 - RNA, 19 nt, Artificial Sequence
  Description of Artificial Sequence: Synthetic oligonucleotide
caccgugagcuaaccuccg

SEQ ID NO: 1621022 - RNA, 19 nt, Artificial Sequence
  Description of Artificial Sequence: Synthetic oligonucleotide
uccccucuacggauagacu

SEQ ID NO: 1621023 - RNA, 19 nt, Artificial Sequence
  Description of Artificial Sequence: Synthetic oligonucleotide
accuccccucuacggauag

SEQ ID NO: 1621024 - RNA, 19 nt, Artificial Sequence
  Description of Artificial Sequence: Synthetic oligonucleotide
ccuccuuucuccugccacg

SEQ ID NO: 1621025 - RNA, 19 nt, Artificial Sequence
  Description of Artificial Sequence: Synthetic oligonucleotide
ccccucuacggauagacuc

SEQ ID NO: 1621026 - RNA, 19 nt, Artificial Sequence
  Description of Artificial Sequence: Synthetic oligonucleotide
auguuaaccgcugcacgau

SEQ ID NO: 1621027 - RNA, 19 nt, Artificial Sequence
  Description of Artificial Sequence: Synthetic oligonucleotide
gcaaucugcaggucccagc

SEQ ID NO: 1621028 - RNA, 19 nt, Artificial Sequence
  Description of Artificial Sequence: Synthetic oligonucleotide
caguuucuggcccucgcca

SEQ ID NO: 1621029 - RNA, 19 nt, Artificial Sequence
  Description of Artificial Sequence: Synthetic oligonucleotide
ucacugggagcugugccuc

SEQ ID NO: 1621030 - RNA, 19 nt, Artificial Sequence
  Description of Artificial Sequence: Synthetic oligonucleotide
cccuauuaucacugggagc

SEQ ID NO: 1621031 - RNA, 19 nt, Artificial Sequence
  Description of Artificial Sequence: Synthetic oligonucleotide
gcuugcuagugcaaucugc

SEQ ID NO: 1621032 - RNA, 19 nt, Artificial Sequence
  Description of Artificial Sequence: Synthetic oligonucleotide
uccucgucccgaugguccu

SEQ ID NO: 1621033 - RNA, 19 nt, Artificial Sequence
  Description of Artificial Sequence: Synthetic oligonucleotide
cagcauaaaaccugcuccu

SEQ ID NO: 1621034 - RNA, 19 nt, Artificial Sequence
  Description of Artificial Sequence: Synthetic oligonucleotide
ugucgccuccuuucuccug

SEQ ID NO: 1621035 - RNA, 19 nt, Artificial Sequence
  Description of Artificial Sequence: Synthetic oligonucleotide
ccgaaugucgccuccuuuc

SEQ ID NO: 1621036 - RNA, 19 nt, Artificial Sequence
  Description of Artificial Sequence: Synthetic oligonucleotide
aaccugcuccucugucccu

SEQ ID NO: 1621037 - RNA, 19 nt, Artificial Sequence
  Description of Artificial Sequence: Synthetic oligonucleotide
guagccgccauggcuggcc

SEQ ID NO: 1621038 - RNA, 19 nt, Artificial Sequence
  Description of Artificial Sequence: Synthetic oligonucleotide
cuggcccucgccagugaag

SEQ ID NO: 1621039 - RNA, 19 nt, Artificial Sequence
  Description of Artificial Sequence: Synthetic oligonucleotide
aaacgggcccgguccuccu

SEQ ID NO: 1621040 - RNA, 19 nt, Artificial Sequence
  Description of Artificial Sequence: Synthetic oligonucleotide
ggaagaaacgggcccgguc

SEQ ID NO: 1621041 - RNA, 19 nt, Artificial Sequence
  Description of Artificial Sequence: Synthetic oligonucleotide
cugcacgaugacagcguug

SEQ ID NO: 1621042 - RNA, 19 nt, Artificial Sequence
  Description of Artificial Sequence: Synthetic oligonucleotide
ugauccuguggcugugguu

SEQ ID NO: 1621043 - RNA, 19 nt, Artificial Sequence
  Description of Artificial Sequence: Synthetic oligonucleotide
ggucugguucucgucagcc

SEQ ID NO: 1621044 - RNA, 19 nt, Artificial Sequence
  Description of Artificial Sequence: Synthetic oligonucleotide
cucuacggauagacuccag

SEQ ID NO: 1621045 - RNA, 19 nt, Artificial Sequence
  Description of Artificial Sequence: Synthetic oligonucleotide
caugggcauggcugcaguc

SEQ ID NO: 1621046 - RNA, 19 nt, Artificial Sequence
  Description of Artificial Sequence: Synthetic oligonucleotide
augucgccuccuuucuccu

SEQ ID NO: 1621047 - RNA, 19 nt, Artificial Sequence
  Description of Artificial Sequence: Synthetic oligonucleotide
cucuuuguuagggaaggua

SEQ ID NO: 1621048 - RNA, 19 nt, Artificial Sequence
  Description of Artificial Sequence: Synthetic oligonucleotide
cuugggguugccugugaaa

SEQ ID NO: 1621049 - RNA, 19 nt, Artificial Sequence
  Description of Artificial Sequence: Synthetic oligonucleotide
ggagggugauccccauggg

SEQ ID NO: 1621050 - RNA, 19 nt, Artificial Sequence
  Description of Artificial Sequence: Synthetic oligonucleotide
aaagcucccuugggcuuca

SEQ ID NO: 1621051 - RNA, 19 nt, Artificial Sequence
  Description of Artificial Sequence: Synthetic oligonucleotide
agacgcggcacuggaagga

SEQ ID NO: 1621052 - RNA, 19 nt, Artificial Sequence
  Description of Artificial Sequence: Synthetic oligonucleotide
gucucgguuuacuggucuc

SEQ ID NO: 1621053 - RNA, 19 nt, Artificial Sequence
  Description of Artificial Sequence: Synthetic oligonucleotide
ugccugugaaauggucaca

SEQ ID NO: 1621054 - RNA, 19 nt, Artificial Sequence
  Description of Artificial Sequence: Synthetic oligonucleotide
uggucucgguuuacugguc

SEQ ID NO: 1621055 - RNA, 19 nt, Artificial Sequence
  Description of Artificial Sequence: Synthetic oligonucleotide
uggcccgaaugucgccucc

SEQ ID NO: 1621056 - RNA, 19 nt, Artificial Sequence
  Description of Artificial Sequence: Synthetic oligonucleotide
ggcauuggaugggucuugg

SEQ ID NO: 1621057 - RNA, 19 nt, Artificial Sequence
  Description of Artificial Sequence: Synthetic oligonucleotide
cgugcugcccaguuucugg

SEQ ID NO: 1621058 - RNA, 19 nt, Artificial Sequence
  Description of Artificial Sequence: Synthetic oligonucleotide
ggggaggaccaacaaucug

SEQ ID NO: 1621059 - RNA, 19 nt, Artificial Sequence
  Description of Artificial Sequence: Synthetic oligonucleotide
gccagugaaggcuuugaaa

SEQ ID NO: 1621060 - RNA, 19 nt, Artificial Sequence
  Description of Artificial Sequence: Synthetic oligonucleotide
accgugagcuaaccuccga

SEQ ID NO: 1621061 - RNA, 19 nt, Artificial Sequence
  Description of Artificial Sequence: Synthetic oligonucleotide
cauggcuggccgggcaucc

SEQ ID NO: 1621062 - RNA, 19 nt, Artificial Sequence
  Description of Artificial Sequence: Synthetic oligonucleotide
agcuaaccuccgaagcucu

SEQ ID NO: 1621063 - RNA, 19 nt, Artificial Sequence
  Description of Artificial Sequence: Synthetic oligonucleotide
cucucucagcgaguccugc

SEQ ID NO: 1621064 - RNA, 19 nt, Artificial Sequence
  Description of Artificial Sequence: Synthetic oligonucleotide
gcugaguaguuauguuaac

SEQ ID NO: 1621065 - RNA, 19 nt, Artificial Sequence
  Description of Artificial Sequence: Synthetic oligonucleotide
auguucgugguagguucug

SEQ ID NO: 1621066 - RNA, 19 nt, Artificial Sequence
  Description of Artificial Sequence: Synthetic oligonucleotide
cgugagcuaaccuccgaag

SEQ ID NO: 1621067 - RNA, 19 nt, Artificial Sequence
  Description of Artificial Sequence: Synthetic oligonucleotide
cgugguagguucugccucg

SEQ ID NO: 1621068 - RNA, 19 nt, Artificial Sequence
  Description of Artificial Sequence: Synthetic oligonucleotide
augaacaucuuggcccgaa

SEQ ID NO: 1621069 - RNA, 19 nt, Artificial Sequence
  Description of Artificial Sequence: Synthetic oligonucleotide
gccccaugcucuuuggcac

SEQ ID NO: 1621070 - RNA, 19 nt, Artificial Sequence
  Description of Artificial Sequence: Synthetic oligonucleotide
gagcuacggaugagacgcg

SEQ ID NO: 1621071 - RNA, 19 nt, Artificial Sequence
  Description of Artificial Sequence: Synthetic oligonucleotide
ggacgucacccuauuauca

SEQ ID NO: 1621072 - RNA, 19 nt, Artificial Sequence
  Description of Artificial Sequence: Synthetic oligonucleotide
gaaggacgucacccuauua

SEQ ID NO: 1621073 - RNA, 19 nt, Artificial Sequence
  Description of Artificial Sequence: Synthetic oligonucleotide
cuccugcaaauggucucgg

SEQ ID NO: 1621074 - RNA, 19 nt, Artificial Sequence
  Description of Artificial Sequence: Synthetic oligonucleotide
uuggcccgaaugucgccuc

SEQ ID NO: 1621075 - RNA, 19 nt, Artificial Sequence
  Description of Artificial Sequence: Synthetic oligonucleotide
ggccgugcugcccaguuuc

SEQ ID NO: 1621076 - RNA, 19 nt, Artificial Sequence
  Description of Artificial Sequence: Synthetic oligonucleotide
ccggauuuggauguucgug

SEQ ID NO: 1621077 - RNA, 19 nt, Artificial Sequence
  Description of Artificial Sequence: Synthetic oligonucleotide
uucuggcccucgccaguga

SEQ ID NO: 1621078 - RNA, 19 nt, Artificial Sequence
  Description of Artificial Sequence: Synthetic oligonucleotide
cagaaacugggcauuggau

SEQ ID NO: 1621079 - RNA, 19 nt, Artificial Sequence
  Description of Artificial Sequence: Synthetic oligonucleotide
gcauaaaaccugcuccucu

SEQ ID NO: 1621080 - RNA, 19 nt, Artificial Sequence
  Description of Artificial Sequence: Synthetic oligonucleotide
agcgaguccugccgcuccu

SEQ ID NO: 1621081 - RNA, 19 nt, Artificial Sequence
  Description of Artificial Sequence: Synthetic oligonucleotide
cugcccaccgugagcuaac

SEQ ID NO: 1621082 - RNA, 19 nt, Artificial Sequence
  Description of Artificial Sequence: Synthetic oligonucleotide
cagcuacagccccaugcuc

SEQ ID NO: 1621083 - RNA, 19 nt, Artificial Sequence
  Description of Artificial Sequence: Synthetic oligonucleotide
gauguucgugguagguucu

SEQ ID NO: 1621084 - RNA, 19 nt, Artificial Sequence
  Description of Artificial Sequence: Synthetic oligonucleotide
agcugguguucaauaccug

SEQ ID NO: 1621085 - RNA, 19 nt, Artificial Sequence
  Description of Artificial Sequence: Synthetic oligonucleotide
gccuccuuucuccugccac

SEQ ID NO: 1621086 - RNA, 19 nt, Artificial Sequence
  Description of Artificial Sequence: Synthetic oligonucleotide
gcaagccggauuuggaugu

SEQ ID NO: 1621087 - RNA, 19 nt, Artificial Sequence
  Description of Artificial Sequence: Synthetic oligonucleotide
ggcuucacaaaauccucgu

SEQ ID NO: 1621088 - RNA, 19 nt, Artificial Sequence
  Description of Artificial Sequence: Synthetic oligonucleotide
gugccucuagacacugaac

SEQ ID NO: 1621089 - RNA, 19 nt, Artificial Sequence
  Description of Artificial Sequence: Synthetic oligonucleotide
gugaggcagcagcugagua

SEQ ID NO: 1621090 - RNA, 19 nt, Artificial Sequence
  Description of Artificial Sequence: Synthetic oligonucleotide
ugcccaccgugagcuaacc

SEQ ID NO: 1621091 - RNA, 19 nt, Artificial Sequence
  Description of Artificial Sequence: Synthetic oligonucleotide
cuagugcaaucugcagguc

SEQ ID NO: 1621092 - RNA, 19 nt, Artificial Sequence
  Description of Artificial Sequence: Synthetic oligonucleotide
accagcucguugggacuuc

SEQ ID NO: 1621093 - RNA, 19 nt, Artificial Sequence
  Description of Artificial Sequence: Synthetic oligonucleotide
guuagggaagguagucaua

SEQ ID NO: 1621094 - RNA, 19 nt, Artificial Sequence
  Description of Artificial Sequence: Synthetic oligonucleotide
cucgccagugaaggcuuug

SEQ ID NO: 1621095 - RNA, 19 nt, Artificial Sequence
  Description of Artificial Sequence: Synthetic oligonucleotide
gcuacggaugagacgcggc

SEQ ID NO: 1621096 - RNA, 19 nt, Artificial Sequence
  Description of Artificial Sequence: Synthetic oligonucleotide
uccugccacguaggcagac

SEQ ID NO: 1621097 - RNA, 19 nt, Artificial Sequence
  Description of Artificial Sequence: Synthetic oligonucleotide
ugguagguucugccucguu

SEQ ID NO: 1621098 - RNA, 19 nt, Artificial Sequence
  Description of Artificial Sequence: Synthetic oligonucleotide
cguugggacuucucuuccg

SEQ ID NO: 1621099 - RNA, 19 nt, Artificial Sequence
  Description of Artificial Sequence: Synthetic oligonucleotide
ggucucugaaggacgucac

SEQ ID NO: 1621100 - RNA, 19 nt, Artificial Sequence
  Description of Artificial Sequence: Synthetic oligonucleotide
cugcaagccggauuuggau

SEQ ID NO: 1621101 - RNA, 19 nt, Artificial Sequence
  Description of Artificial Sequence: Synthetic oligonucleotide
cugaaggacgucacccuau

SEQ ID NO: 1621102 - RNA, 19 nt, Artificial Sequence
  Description of Artificial Sequence: Synthetic oligonucleotide
guuucuggcccucgccagu

SEQ ID NO: 1621103 - RNA, 19 nt, Artificial Sequence
  Description of Artificial Sequence: Synthetic oligonucleotide
guucaccugcccaccguga

SEQ ID NO: 1621104 - RNA, 19 nt, Artificial Sequence
  Description of Artificial Sequence: Synthetic oligonucleotide
caucugcaagccggauuug

SEQ ID NO: 1621105 - RNA, 19 nt, Artificial Sequence
  Description of Artificial Sequence: Synthetic oligonucleotide
cuccgaagcucugcgggca

SEQ ID NO: 1621106 - RNA, 19 nt, Artificial Sequence
  Description of Artificial Sequence: Synthetic oligonucleotide
gcugcagucaugggagaca

SEQ ID NO: 1621107 - RNA, 19 nt, Artificial Sequence
  Description of Artificial Sequence: Synthetic oligonucleotide
ccgcugcacgaugacagcg

SEQ ID NO: 1621108 - RNA, 19 nt, Artificial Sequence
  Description of Artificial Sequence: Synthetic oligonucleotide
ccccaugcucuuuggcacc

SEQ ID NO: 1621109 - RNA, 19 nt, Artificial Sequence
  Description of Artificial Sequence: Synthetic oligonucleotide
cccaguuucuggcccucgc

SEQ ID NO: 1621110 - RNA, 19 nt, Artificial Sequence
  Description of Artificial Sequence: Synthetic oligonucleotide
ggugauccccaugggcaug

SEQ ID NO: 1621111 - RNA, 19 nt, Artificial Sequence
  Description of Artificial Sequence: Synthetic oligonucleotide
gucuaagaacccagagcua

SEQ ID NO: 1621112 - RNA, 19 nt, Artificial Sequence
  Description of Artificial Sequence: Synthetic oligonucleotide
gggucugguucucgucagc

SEQ ID NO: 1621113 - RNA, 19 nt, Artificial Sequence
  Description of Artificial Sequence: Synthetic oligonucleotide
ccuccauauccaaguucac

SEQ ID NO: 1621114 - RNA, 19 nt, Artificial Sequence
  Description of Artificial Sequence: Synthetic oligonucleotide
aagcucccuugggcuucac

SEQ ID NO: 1621115 - RNA, 19 nt, Artificial Sequence
  Description of Artificial Sequence: Synthetic oligonucleotide
cccgguccuccucagcgcc

SEQ ID NO: 1621116 - RNA, 19 nt, Artificial Sequence
  Description of Artificial Sequence: Synthetic oligonucleotide
gcaaauggucucgguuuac

SEQ ID NO: 1621117 - RNA, 19 nt, Artificial Sequence
  Description of Artificial Sequence: Synthetic oligonucleotide
gaagcucugcgggcaccuc

SEQ ID NO: 1621118 - RNA, 19 nt, Artificial Sequence
  Description of Artificial Sequence: Synthetic oligonucleotide
caccgccacgaacucucuc

SEQ ID NO: 1621119 - RNA, 19 nt, Artificial Sequence
  Description of Artificial Sequence: Synthetic oligonucleotide
cucguugauuaagauggau

SEQ ID NO: 1621120 - RNA, 19 nt, Artificial Sequence
  Description of Artificial Sequence: Synthetic oligonucleotide
cuuggcccgaaugucgccu

SEQ ID NO: 1621121 - RNA, 19 nt, Artificial Sequence
  Description of Artificial Sequence: Synthetic oligonucleotide
ugacagcguugagaagguu

SEQ ID NO: 1621122 - RNA, 19 nt, Artificial Sequence
  Description of Artificial Sequence: Synthetic oligonucleotide
augagacgcggcacuggaa

SEQ ID NO: 1621123 - RNA, 19 nt, Artificial Sequence
  Description of Artificial Sequence: Synthetic oligonucleotide
cccgucaccgccacgaacu

SEQ ID NO: 1621124 - RNA, 19 nt, Artificial Sequence
  Description of Artificial Sequence: Synthetic oligonucleotide
gugcaaucugcagguccca

SEQ ID NO: 1621125 - RNA, 19 nt, Artificial Sequence
  Description of Artificial Sequence: Synthetic oligonucleotide
cugugccucuagacacuga

SEQ ID NO: 1621126 - RNA, 19 nt, Artificial Sequence
  Description of Artificial Sequence: Synthetic oligonucleotide
ucgucccgaugguccucca

SEQ ID NO: 1621127 - RNA, 19 nt, Artificial Sequence
  Description of Artificial Sequence: Synthetic oligonucleotide
cugauccuguggcuguggu

SEQ ID NO: 1621128 - RNA, 19 nt, Artificial Sequence
  Description of Artificial Sequence: Synthetic oligonucleotide
cgguuuacuggucucucca

SEQ ID NO: 1621129 - RNA, 19 nt, Artificial Sequence
  Description of Artificial Sequence: Synthetic oligonucleotide
gcuaaccuccgaagcucug

SEQ ID NO: 1621130 - RNA, 19 nt, Artificial Sequence
  Description of Artificial Sequence: Synthetic oligonucleotide
cgaugguccuccauaucca

SEQ ID NO: 1621131 - RNA, 19 nt, Artificial Sequence
  Description of Artificial Sequence: Synthetic oligonucleotide
cccaugcucuuuggcaccc

SEQ ID NO: 1621132 - RNA, 19 nt, Artificial Sequence
  Description of Artificial Sequence: Synthetic oligonucleotide
cccagagcuacggaugaga

SEQ ID NO: 1621133 - RNA, 19 nt, Artificial Sequence
  Description of Artificial Sequence: Synthetic oligonucleotide
gcccgguccuccucagcgc

SEQ ID NO: 1621134 - RNA, 19 nt, Artificial Sequence
  Description of Artificial Sequence: Synthetic oligonucleotide
ugcgggcaccuccccucua

SEQ ID NO: 1621135 - RNA, 19 nt, Artificial Sequence
  Description of Artificial Sequence: Synthetic oligonucleotide
cugccucguugauuaagau

SEQ ID NO: 1621136 - RNA, 19 nt, Artificial Sequence
  Description of Artificial Sequence: Synthetic oligonucleotide
cgaguccugccgcuccucc

SEQ ID NO: 1621137 - RNA, 19 nt, Artificial Sequence
  Description of Artificial Sequence: Synthetic oligonucleotide
gcagcugaguaguuauguu

SEQ ID NO: 1621138 - RNA, 19 nt, Artificial Sequence
  Description of Artificial Sequence: Synthetic oligonucleotide
gucacucgcuccacagcua

SEQ ID NO: 1621139 - RNA, 19 nt, Artificial Sequence
  Description of Artificial Sequence: Synthetic oligonucleotide
gccucuagacacugaacuu

SEQ ID NO: 1621140 - RNA, 19 nt, Artificial Sequence
  Description of Artificial Sequence: Synthetic oligonucleotide
ccucguugauuaagaugga

SEQ ID NO: 1621141 - RNA, 19 nt, Artificial Sequence
  Description of Artificial Sequence: Synthetic oligonucleotide
gcccgucaccgccacgaac

SEQ ID NO: 1621142 - RNA, 19 nt, Artificial Sequence
  Description of Artificial Sequence: Synthetic oligonucleotide
gacgcggcacuggaaggau

SEQ ID NO: 1621143 - RNA, 19 nt, Artificial Sequence
  Description of Artificial Sequence: Synthetic oligonucleotide
ccgugagcuaaccuccgaa

SEQ ID NO: 1621144 - RNA, 19 nt, Artificial Sequence
  Description of Artificial Sequence: Synthetic oligonucleotide
gcuggccgggcauccacaa

SEQ ID NO: 1621145 - RNA, 19 nt, Artificial Sequence
  Description of Artificial Sequence: Synthetic oligonucleotide
cuccugccacguaggcaga

SEQ ID NO: 1621146 - RNA, 19 nt, Artificial Sequence
  Description of Artificial Sequence: Synthetic oligonucleotide
ggucaugaauaaggucucu

SEQ ID NO: 1621147 - RNA, 19 nt, Artificial Sequence
  Description of Artificial Sequence: Synthetic oligonucleotide
gcccaguuucuggcccucg

SEQ ID NO: 1621148 - RNA, 19 nt, Artificial Sequence
  Description of Artificial Sequence: Synthetic oligonucleotide
caccuccccucuacggaua

SEQ ID NO: 1621149 - RNA, 19 nt, Artificial Sequence
  Description of Artificial Sequence: Synthetic oligonucleotide
caggucccagccggcugac

SEQ ID NO: 1621150 - RNA, 19 nt, Artificial Sequence
  Description of Artificial Sequence: Synthetic oligonucleotide
gcgcccgucaccgccacga

SEQ ID NO: 1621151 - RNA, 19 nt, Artificial Sequence
  Description of Artificial Sequence: Synthetic oligonucleotide
ccucuacggauagacucca

SEQ ID NO: 1621152 - RNA, 19 nt, Artificial Sequence
  Description of Artificial Sequence: Synthetic oligonucleotide
ggugaggcagcagcugagu

SEQ ID NO: 1621153 - RNA, 19 nt, Artificial Sequence
  Description of Artificial Sequence: Synthetic oligonucleotide
gggugauccccaugggcau

SEQ ID NO: 1621154 - RNA, 19 nt, Artificial Sequence
  Description of Artificial Sequence: Synthetic oligonucleotide
cagcgcccgucaccgccac

SEQ ID NO: 1621155 - RNA, 19 nt, Artificial Sequence
  Description of Artificial Sequence: Synthetic oligonucleotide
gcucugcgggcaccucccc

SEQ ID NO: 1621156 - RNA, 19 nt, Artificial Sequence
  Description of Artificial Sequence: Synthetic oligonucleotide
cccgaugguccuccauauc

SEQ ID NO: 1621157 - RNA, 19 nt, Artificial Sequence
  Description of Artificial Sequence: Synthetic oligonucleotide
ccgguccuccucagcgccc

SEQ ID NO: 1621158 - RNA, 19 nt, Artificial Sequence
  Description of Artificial Sequence: Synthetic oligonucleotide
gccggauuuggauguucgu

SEQ ID NO: 1621159 - RNA, 19 nt, Artificial Sequence
  Description of Artificial Sequence: Synthetic oligonucleotide
cggauagacuccagaaacu

SEQ ID NO: 1621160 - RNA, 19 nt, Artificial Sequence
  Description of Artificial Sequence: Synthetic oligonucleotide
gcaccuccccucuacggau

SEQ ID NO: 1621161 - RNA, 19 nt, Artificial Sequence
  Description of Artificial Sequence: Synthetic oligonucleotide
cucugcgggcaccuccccu

SEQ ID NO: 1621162 - RNA, 19 nt, Artificial Sequence
  Description of Artificial Sequence: Synthetic oligonucleotide
gcauuggaugggucuuggu

SEQ ID NO: 1621163 - RNA, 19 nt, Artificial Sequence
  Description of Artificial Sequence: Synthetic oligonucleotide
gcacccuuaaacagaucau

SEQ ID NO: 1621164 - RNA, 19 nt, Artificial Sequence
  Description of Artificial Sequence: Synthetic oligonucleotide
cgggcaccuccccucuacg

SEQ ID NO: 1621165 - RNA, 19 nt, Artificial Sequence
  Description of Artificial Sequence: Synthetic oligonucleotide
ccgaagcucugcgggcacc

SEQ ID NO: 1621166 - RNA, 19 nt, Artificial Sequence
  Description of Artificial Sequence: Synthetic oligonucleotide
aggucccagccggcugacu

SEQ ID NO: 1621167 - RNA, 19 nt, Artificial Sequence
  Description of Artificial Sequence: Synthetic oligonucleotide
caccauugucaaggcugaa

SEQ ID NO: 1621168 - RNA, 19 nt, Artificial Sequence
  Description of Artificial Sequence: Synthetic oligonucleotide
cggaugagacgcggcacug

SEQ ID NO: 1621169 - RNA, 19 nt, Artificial Sequence
  Description of Artificial Sequence: Synthetic oligonucleotide
ccgucaccgccacgaacuc

SEQ ID NO: 1621170 - RNA, 19 nt, Artificial Sequence
  Description of Artificial Sequence: Synthetic oligonucleotide
gugguagguucugccucgu

SEQ ID NO: 1621171 - RNA, 19 nt, Artificial Sequence
  Description of Artificial Sequence: Synthetic oligonucleotide
cgaaugucgccuccuuucu

SEQ ID NO: 1621172 - RNA, 19 nt, Artificial Sequence
  Description of Artificial Sequence: Synthetic oligonucleotide
gccacguaggcagacucuu

SEQ ID NO: 1621173 - RNA, 19 nt, Artificial Sequence
  Description of Artificial Sequence: Synthetic oligonucleotide
ccucagcgcccgucaccgc

SEQ ID NO: 1621174 - RNA, 19 nt, Artificial Sequence
  Description of Artificial Sequence: Synthetic oligonucleotide
ccugugaaauggucacaau

SEQ ID NO: 1621175 - RNA, 19 nt, Artificial Sequence
  Description of Artificial Sequence: Synthetic oligonucleotide
gcucuuuguuagggaaggu

SEQ ID NO: 1621176 - RNA, 19 nt, Artificial Sequence
  Description of Artificial Sequence: Synthetic oligonucleotide
caccagcucguugggacuu

SEQ ID NO: 1621177 - RNA, 19 nt, Artificial Sequence
  Description of Artificial Sequence: Synthetic oligonucleotide
cuggccgggcauccacaau

SEQ ID NO: 1621178 - RNA, 19 nt, Artificial Sequence
  Description of Artificial Sequence: Synthetic oligonucleotide
cccuugggcuucacaaaau

SEQ ID NO: 1621179 - RNA, 19 nt, Artificial Sequence
  Description of Artificial Sequence: Synthetic oligonucleotide
gcccaccgugagcuaaccu

SEQ ID NO: 1621180 - RNA, 19 nt, Artificial Sequence
  Description of Artificial Sequence: Synthetic oligonucleotide
cggggaggaccaacaaucu

SEQ ID NO: 1621181 - RNA, 19 nt, Artificial Sequence
  Description of Artificial Sequence: Synthetic oligonucleotide
caagccggauuuggauguu

SEQ ID NO: 1621182 - RNA, 19 nt, Artificial Sequence
  Description of Artificial Sequence: Synthetic oligonucleotide
ggcccgaaugucgccuccu

SEQ ID NO: 1621183 - RNA, 19 nt, Artificial Sequence
  Description of Artificial Sequence: Synthetic oligonucleotide
gugcugcuccaaggcggua

SEQ ID NO: 1621184 - RNA, 19 nt, Artificial Sequence
  Description of Artificial Sequence: Synthetic oligonucleotide
cuacagccccaugcucuuu

SEQ ID NO: 1621185 - RNA, 19 nt, Artificial Sequence
  Description of Artificial Sequence: Synthetic oligonucleotide
ccccagcauaaaaccugcu

SEQ ID NO: 1621186 - RNA, 19 nt, Artificial Sequence
  Description of Artificial Sequence: Synthetic oligonucleotide
cccucgccagugaaggcuu

SEQ ID NO: 1621187 - RNA, 19 nt, Artificial Sequence
  Description of Artificial Sequence: Synthetic oligonucleotide
cccgaaugucgccuccuuu

SEQ ID NO: 1621188 - RNA, 19 nt, Artificial Sequence
  Description of Artificial Sequence: Synthetic oligonucleotide
gggccgugcugcccaguuu

SEQ ID NO: 1621189 - RNA, 19 nt, Artificial Sequence
  Description of Artificial Sequence: Synthetic oligonucleotide
ccuccccucuacggauaga

SEQ ID NO: 1621190 - RNA, 19 nt, Artificial Sequence
  Description of Artificial Sequence: Synthetic oligonucleotide
ccagcucguugggacuucu

SEQ ID NO: 1621191 - RNA, 19 nt, Artificial Sequence
  Description of Artificial Sequence: Synthetic oligonucleotide
cgucaccgccacgaacucu

SEQ ID NO: 1621192 - RNA, 19 nt, Artificial Sequence
  Description of Artificial Sequence: Synthetic oligonucleotide
ccucgccagugaaggcuuu

SEQ ID NO: 1621193 - RNA, 19 nt, Artificial Sequence
  Description of Artificial Sequence: Synthetic oligonucleotide
cgcccgucaccgccacgaa

SEQ ID NO: 1621194 - RNA, 19 nt, Artificial Sequence
  Description of Artificial Sequence: Synthetic oligonucleotide
uuauugggaacacagaugg

SEQ ID NO: 1621195 - RNA, 19 nt, Artificial Sequence
  Description of Artificial Sequence: Synthetic oligonucleotide
aauauacugaggcugacgg

SEQ ID NO: 1621196 - RNA, 19 nt, Artificial Sequence
  Description of Artificial Sequence: Synthetic oligonucleotide
aagagaaugccucaguaac

SEQ ID NO: 1621197 - RNA, 19 nt, Artificial Sequence
  Description of Artificial Sequence: Synthetic oligonucleotide
ucuuguugaccucaaaacg

SEQ ID NO: 1621198 - RNA, 19 nt, Artificial Sequence
  Description of Artificial Sequence: Synthetic oligonucleotide
aguuagguccaguauaggc

SEQ ID NO: 1621199 - RNA, 19 nt, Artificial Sequence
  Description of Artificial Sequence: Synthetic oligonucleotide
aaaugucaaguccuccucc

SEQ ID NO: 1621200 - RNA, 19 nt, Artificial Sequence
  Description of Artificial Sequence: Synthetic oligonucleotide
agacauugcaguaauagcc

SEQ ID NO: 1621201 - RNA, 19 nt, Artificial Sequence
  Description of Artificial Sequence: Synthetic oligonucleotide
aacagguucuuccaagaac

SEQ ID NO: 1621202 - RNA, 19 nt, Artificial Sequence
  Description of Artificial Sequence: Synthetic oligonucleotide
cucguauucaucuuugucc

SEQ ID NO: 1621203 - RNA, 19 nt, Artificial Sequence
  Description of Artificial Sequence: Synthetic oligonucleotide
uuucuuguaugcuuuagcc

SEQ ID NO: 1621204 - RNA, 19 nt, Artificial Sequence
  Description of Artificial Sequence: Synthetic oligonucleotide
guaucaugcacacauaccc

SEQ ID NO: 1621205 - RNA, 19 nt, Artificial Sequence
  Description of Artificial Sequence: Synthetic oligonucleotide
aacauuaggccccagggca

SEQ ID NO: 1621206 - RNA, 19 nt, Artificial Sequence
  Description of Artificial Sequence: Synthetic oligonucleotide
aaaucauaaucuuucugcu

SEQ ID NO: 1621207 - RNA, 19 nt, Artificial Sequence
  Description of Artificial Sequence: Synthetic oligonucleotide
uuuaauuuccuguuacaug

SEQ ID NO: 1621208 - RNA, 19 nt, Artificial Sequence
  Description of Artificial Sequence: Synthetic oligonucleotide
agaacauuaggccccaggg

SEQ ID NO: 1621209 - RNA, 19 nt, Artificial Sequence
  Description of Artificial Sequence: Synthetic oligonucleotide
aggauguucagacaagagg

SEQ ID NO: 1621210 - RNA, 19 nt, Artificial Sequence
  Description of Artificial Sequence: Synthetic oligonucleotide
uuuauugggaacacagaug

SEQ ID NO: 1621211 - RNA, 19 nt, Artificial Sequence
  Description of Artificial Sequence: Synthetic oligonucleotide
acagguucuuccaagaacc

SEQ ID NO: 1621212 - RNA, 19 nt, Artificial Sequence
  Description of Artificial Sequence: Synthetic oligonucleotide
uaugcuuuagccuuuuccu

SEQ ID NO: 1621213 - RNA, 19 nt, Artificial Sequence
  Description of Artificial Sequence: Synthetic oligonucleotide
cuuuaccugauccagagug

SEQ ID NO: 1621214 - RNA, 19 nt, Artificial Sequence
  Description of Artificial Sequence: Synthetic oligonucleotide
uccauuaaugugauccagg

SEQ ID NO: 1621215 - RNA, 19 nt, Artificial Sequence
  Description of Artificial Sequence: Synthetic oligonucleotide
aaaguuaggccaaagagaa

SEQ ID NO: 1621216 - RNA, 19 nt, Artificial Sequence
  Description of Artificial Sequence: Synthetic oligonucleotide
aagaacauuaggccccagg

SEQ ID NO: 1621217 - RNA, 19 nt, Artificial Sequence
  Description of Artificial Sequence: Synthetic oligonucleotide
ugacguaucaugcacacau

SEQ ID NO: 1621218 - RNA, 19 nt, Artificial Sequence
  Description of Artificial Sequence: Synthetic oligonucleotide
gagauucuagcucaggccc

SEQ ID NO: 1621219 - RNA, 19 nt, Artificial Sequence
  Description of Artificial Sequence: Synthetic oligonucleotide
acucaucccauuuaauuuc

SEQ ID NO: 1621220 - RNA, 19 nt, Artificial Sequence
  Description of Artificial Sequence: Synthetic oligonucleotide
ucuuugugacguaucaugc

SEQ ID NO: 1621221 - RNA, 19 nt, Artificial Sequence
  Description of Artificial Sequence: Synthetic oligonucleotide
cuuugucccacuuucggcg

SEQ ID NO: 1621222 - RNA, 19 nt, Artificial Sequence
  Description of Artificial Sequence: Synthetic oligonucleotide
aucccuaugccgaagaagc

SEQ ID NO: 1621223 - RNA, 19 nt, Artificial Sequence
  Description of Artificial Sequence: Synthetic oligonucleotide
aaaguuagguccaguauag

SEQ ID NO: 1621224 - RNA, 19 nt, Artificial Sequence
  Description of Artificial Sequence: Synthetic oligonucleotide
auacuggagacccagauaa

SEQ ID NO: 1621225 - RNA, 19 nt, Artificial Sequence
  Description of Artificial Sequence: Synthetic oligonucleotide
aaaagaaaugacaccccac

SEQ ID NO: 1621226 - RNA, 19 nt, Artificial Sequence
  Description of Artificial Sequence: Synthetic oligonucleotide
agaguaaagauuaaaacaa

SEQ ID NO: 1621227 - RNA, 19 nt, Artificial Sequence
  Description of Artificial Sequence: Synthetic oligonucleotide
uuuaccugauccagagugg

SEQ ID NO: 1621228 - RNA, 19 nt, Artificial Sequence
  Description of Artificial Sequence: Synthetic oligonucleotide
acccauauacuggagaccc

SEQ ID NO: 1621229 - RNA, 19 nt, Artificial Sequence
  Description of Artificial Sequence: Synthetic oligonucleotide
ucguauucaucuuuguccc

SEQ ID NO: 1621230 - RNA, 19 nt, Artificial Sequence
  Description of Artificial Sequence: Synthetic oligonucleotide
uguuacaugcaccaaggaa

SEQ ID NO: 1621231 - RNA, 19 nt, Artificial Sequence
  Description of Artificial Sequence: Synthetic oligonucleotide
uuuccuguuacaugcacca

SEQ ID NO: 1621232 - RNA, 19 nt, Artificial Sequence
  Description of Artificial Sequence: Synthetic oligonucleotide
ugagauucuagcucaggcc

SEQ ID NO: 1621233 - RNA, 19 nt, Artificial Sequence
  Description of Artificial Sequence: Synthetic oligonucleotide
acguaucaugcacacauac

SEQ ID NO: 1621234 - RNA, 19 nt, Artificial Sequence
  Description of Artificial Sequence: Synthetic oligonucleotide
aaggaaaccaagaacauua

SEQ ID NO: 1621235 - RNA, 19 nt, Artificial Sequence
  Description of Artificial Sequence: Synthetic oligonucleotide
cauacccacacacacauug

SEQ ID NO: 1621236 - RNA, 19 nt, Artificial Sequence
  Description of Artificial Sequence: Synthetic oligonucleotide
aaacccacccucuagcccu

SEQ ID NO: 1621237 - RNA, 19 nt, Artificial Sequence
  Description of Artificial Sequence: Synthetic oligonucleotide
aaugugauccaggaaguug

SEQ ID NO: 1621238 - RNA, 19 nt, Artificial Sequence
  Description of Artificial Sequence: Synthetic oligonucleotide
uccucaaaugucaaguccu

SEQ ID NO: 1621239 - RNA, 19 nt, Artificial Sequence
  Description of Artificial Sequence: Synthetic oligonucleotide
uguugcaagcugaacaaga

SEQ ID NO: 1621240 - RNA, 19 nt, Artificial Sequence
  Description of Artificial Sequence: Synthetic oligonucleotide
caguauaggccaaaguuag

SEQ ID NO: 1621241 - RNA, 19 nt, Artificial Sequence
  Description of Artificial Sequence: Synthetic oligonucleotide
gaggucuuucuuuauuggg

SEQ ID NO: 1621242 - RNA, 19 nt, Artificial Sequence
  Description of Artificial Sequence: Synthetic oligonucleotide
ucuuguaugcuuuagccuu

SEQ ID NO: 1621243 - RNA, 19 nt, Artificial Sequence
  Description of Artificial Sequence: Synthetic oligonucleotide
ucucugaguuccuucaucc

SEQ ID NO: 1621244 - RNA, 19 nt, Artificial Sequence
  Description of Artificial Sequence: Synthetic oligonucleotide
acuggagacccagauaacc

SEQ ID NO: 1621245 - RNA, 19 nt, Artificial Sequence
  Description of Artificial Sequence: Synthetic oligonucleotide
agaagcccaucacagcugc

SEQ ID NO: 1621246 - RNA, 19 nt, Artificial Sequence
  Description of Artificial Sequence: Synthetic oligonucleotide
aaaacgcuucuuuaccuga

SEQ ID NO: 1621247 - RNA, 19 nt, Artificial Sequence
  Description of Artificial Sequence: Synthetic oligonucleotide
uggaaccaaagccagagaa

SEQ ID NO: 1621248 - RNA, 19 nt, Artificial Sequence
  Description of Artificial Sequence: Synthetic oligonucleotide
aguggagcguuccacgcgc

SEQ ID NO: 1621249 - RNA, 19 nt, Artificial Sequence
  Description of Artificial Sequence: Synthetic oligonucleotide
auugcaguaauagccuccc

SEQ ID NO: 1621250 - RNA, 19 nt, Artificial Sequence
  Description of Artificial Sequence: Synthetic oligonucleotide
cagauaacccuucuguugc

SEQ ID NO: 1621251 - RNA, 19 nt, Artificial Sequence
  Description of Artificial Sequence: Synthetic oligonucleotide
agcaucaccucuucauccc

SEQ ID NO: 1621252 - RNA, 19 nt, Artificial Sequence
  Description of Artificial Sequence: Synthetic oligonucleotide
ugaagagggaaagaugcag

SEQ ID NO: 1621253 - RNA, 19 nt, Artificial Sequence
  Description of Artificial Sequence: Synthetic oligonucleotide
aaagaugcaggggaaguug

SEQ ID NO: 1621254 - RNA, 19 nt, Artificial Sequence
  Description of Artificial Sequence: Synthetic oligonucleotide
acacacucaaaguuagguc

SEQ ID NO: 1621255 - RNA, 19 nt, Artificial Sequence
  Description of Artificial Sequence: Synthetic oligonucleotide
cauccuuuccucaaaauca

SEQ ID NO: 1621256 - RNA, 19 nt, Artificial Sequence
  Description of Artificial Sequence: Synthetic oligonucleotide
auuaacacucuuaaggacu

SEQ ID NO: 1621257 - RNA, 19 nt, Artificial Sequence
  Description of Artificial Sequence: Synthetic oligonucleotide
cucuuugugacguaucaug

SEQ ID NO: 1621258 - RNA, 19 nt, Artificial Sequence
  Description of Artificial Sequence: Synthetic oligonucleotide
aucuuugucccacuuucgg

SEQ ID NO: 1621259 - RNA, 19 nt, Artificial Sequence
  Description of Artificial Sequence: Synthetic oligonucleotide
uccaaguccaccuuguaau

SEQ ID NO: 1621260 - RNA, 19 nt, Artificial Sequence
  Description of Artificial Sequence: Synthetic oligonucleotide
uugauggaguccuucacca

SEQ ID NO: 1621261 - RNA, 19 nt, Artificial Sequence
  Description of Artificial Sequence: Synthetic oligonucleotide
uuucucguauucaucuuug

SEQ ID NO: 1621262 - RNA, 19 nt, Artificial Sequence
  Description of Artificial Sequence: Synthetic oligonucleotide
uauaggccaaaguuaggcc

SEQ ID NO: 1621263 - RNA, 19 nt, Artificial Sequence
  Description of Artificial Sequence: Synthetic oligonucleotide
cuuguaaucccuaugccga

SEQ ID NO: 1621264 - RNA, 19 nt, Artificial Sequence
  Description of Artificial Sequence: Synthetic oligonucleotide
caguaacucuucuuggugg

SEQ ID NO: 1621265 - RNA, 19 nt, Artificial Sequence
  Description of Artificial Sequence: Synthetic oligonucleotide
accuuguaaucccuaugcc

SEQ ID NO: 1621266 - RNA, 19 nt, Artificial Sequence
  Description of Artificial Sequence: Synthetic oligonucleotide
uuacaugcaccaaggaaac

SEQ ID NO: 1621267 - RNA, 19 nt, Artificial Sequence
  Description of Artificial Sequence: Synthetic oligonucleotide
uaauauacugaggcugacg

SEQ ID NO: 1621268 - RNA, 19 nt, Artificial Sequence
  Description of Artificial Sequence: Synthetic oligonucleotide
ucagacaagaggcuggaua

SEQ ID NO: 1621269 - RNA, 19 nt, Artificial Sequence
  Description of Artificial Sequence: Synthetic oligonucleotide
aaacacucaucccauuuaa

SEQ ID NO: 1621270 - RNA, 19 nt, Artificial Sequence
  Description of Artificial Sequence: Synthetic oligonucleotide
caaaguuaggccaaagaga

SEQ ID NO: 1621271 - RNA, 19 nt, Artificial Sequence
  Description of Artificial Sequence: Synthetic oligonucleotide
ucaccagacacaagcaaca

SEQ ID NO: 1621272 - RNA, 19 nt, Artificial Sequence
  Description of Artificial Sequence: Synthetic oligonucleotide
auaggccaaaguuaggcca

SEQ ID NO: 1621273 - RNA, 19 nt, Artificial Sequence
  Description of Artificial Sequence: Synthetic oligonucleotide
aucccauuuaauuuccugu

SEQ ID NO: 1621274 - RNA, 19 nt, Artificial Sequence
  Description of Artificial Sequence: Synthetic oligonucleotide
ggauguucagacaagaggc

SEQ ID NO: 1621275 - RNA, 19 nt, Artificial Sequence
  Description of Artificial Sequence: Synthetic oligonucleotide
uauacugaggcugacggaa

SEQ ID NO: 1621276 - RNA, 19 nt, Artificial Sequence
  Description of Artificial Sequence: Synthetic oligonucleotide
accugauccagaguggagc

SEQ ID NO: 1621277 - RNA, 19 nt, Artificial Sequence
  Description of Artificial Sequence: Synthetic oligonucleotide
uugguggaaccaaagccag

SEQ ID NO: 1621278 - RNA, 19 nt, Artificial Sequence
  Description of Artificial Sequence: Synthetic oligonucleotide
cauuaacacucuuaaggac

SEQ ID NO: 1621279 - RNA, 19 nt, Artificial Sequence
  Description of Artificial Sequence: Synthetic oligonucleotide
guauaggccaaaguuaggc

SEQ ID NO: 1621280 - RNA, 19 nt, Artificial Sequence
  Description of Artificial Sequence: Synthetic oligonucleotide
cugagauucuagcucaggc

SEQ ID NO: 1621281 - RNA, 19 nt, Artificial Sequence
  Description of Artificial Sequence: Synthetic oligonucleotide
aaucccuaugccgaagaag

SEQ ID NO: 1621282 - RNA, 19 nt, Artificial Sequence
  Description of Artificial Sequence: Synthetic oligonucleotide
aaguugauggaguccuuca

SEQ ID NO: 1621283 - RNA, 19 nt, Artificial Sequence
  Description of Artificial Sequence: Synthetic oligonucleotide
aacgcuucuuuaccugauc

SEQ ID NO: 1621284 - RNA, 19 nt, Artificial Sequence
  Description of Artificial Sequence: Synthetic oligonucleotide
uuuucucucucuucuguga

SEQ ID NO: 1621285 - RNA, 19 nt, Artificial Sequence
  Description of Artificial Sequence: Synthetic oligonucleotide
cuuccaagaaccuguuccc

SEQ ID NO: 1621286 - RNA, 19 nt, Artificial Sequence
  Description of Artificial Sequence: Synthetic oligonucleotide
cagacauugcaguaauagc

SEQ ID NO: 1621287 - RNA, 19 nt, Artificial Sequence
  Description of Artificial Sequence: Synthetic oligonucleotide
ugcucugagauucuagcuc

SEQ ID NO: 1621288 - RNA, 19 nt, Artificial Sequence
  Description of Artificial Sequence: Synthetic oligonucleotide
ugcccauuaacacucuuaa

SEQ ID NO: 1621289 - RNA, 19 nt, Artificial Sequence
  Description of Artificial Sequence: Synthetic oligonucleotide
ucuuugucccacuuucggc

SEQ ID NO: 1621290 - RNA, 19 nt, Artificial Sequence
  Description of Artificial Sequence: Synthetic oligonucleotide
uucuuguaugcuuuagccu

SEQ ID NO: 1621291 - RNA, 19 nt, Artificial Sequence
  Description of Artificial Sequence: Synthetic oligonucleotide
aagaaccuguucccgagga

SEQ ID NO: 1621292 - RNA, 19 nt, Artificial Sequence
  Description of Artificial Sequence: Synthetic oligonucleotide
caguaauauacugaggcug

SEQ ID NO: 1621293 - RNA, 19 nt, Artificial Sequence
  Description of Artificial Sequence: Synthetic oligonucleotide
guugauggaguccuucacc

SEQ ID NO: 1621294 - RNA, 19 nt, Artificial Sequence
  Description of Artificial Sequence: Synthetic oligonucleotide
gaacauuaggccccagggc

SEQ ID NO: 1621295 - RNA, 19 nt, Artificial Sequence
  Description of Artificial Sequence: Synthetic oligonucleotide
ugcaguaauagccucccau

SEQ ID NO: 1621296 - RNA, 19 nt, Artificial Sequence
  Description of Artificial Sequence: Synthetic oligonucleotide
aaugccucaguaacucuuc

SEQ ID NO: 1621297 - RNA, 19 nt, Artificial Sequence
  Description of Artificial Sequence: Synthetic oligonucleotide
cuugguggaaccaaagcca

SEQ ID NO: 1621298 - RNA, 19 nt, Artificial Sequence
  Description of Artificial Sequence: Synthetic oligonucleotide
auagacauacccagguuuc

SEQ ID NO: 1621299 - RNA, 19 nt, Artificial Sequence
  Description of Artificial Sequence: Synthetic oligonucleotide
guaauagccucccauuuca

SEQ ID NO: 1621300 - RNA, 19 nt, Artificial Sequence
  Description of Artificial Sequence: Synthetic oligonucleotide
acccagauaacccuucugu

SEQ ID NO: 1621301 - RNA, 19 nt, Artificial Sequence
  Description of Artificial Sequence: Synthetic oligonucleotide
uaacccuucuguugcaagc

SEQ ID NO: 1621302 - RNA, 19 nt, Artificial Sequence
  Description of Artificial Sequence: Synthetic oligonucleotide
cauugcaguaauagccucc

SEQ ID NO: 1621303 - RNA, 19 nt, Artificial Sequence
  Description of Artificial Sequence: Synthetic oligonucleotide
cuagagagccgcugggugg

SEQ ID NO: 1621304 - RNA, 19 nt, Artificial Sequence
  Description of Artificial Sequence: Synthetic oligonucleotide
ugugacguaucaugcacac

SEQ ID NO: 1621305 - RNA, 19 nt, Artificial Sequence
  Description of Artificial Sequence: Synthetic oligonucleotide
cuggagacccagauaaccc

SEQ ID NO: 1621306 - RNA, 19 nt, Artificial Sequence
  Description of Artificial Sequence: Synthetic oligonucleotide
cagaaauccucagugaaac

SEQ ID NO: 1621307 - RNA, 19 nt, Artificial Sequence
  Description of Artificial Sequence: Synthetic oligonucleotide
ugguuuuccauccuucuuu

SEQ ID NO: 1621308 - RNA, 19 nt, Artificial Sequence
  Description of Artificial Sequence: Synthetic oligonucleotide
acauugcaguaauagccuc

SEQ ID NO: 1621309 - RNA, 19 nt, Artificial Sequence
  Description of Artificial Sequence: Synthetic oligonucleotide
uucgcugauguuucuuucc

SEQ ID NO: 1621310 - RNA, 19 nt, Artificial Sequence
  Description of Artificial Sequence: Synthetic oligonucleotide
gacggaaccugccacagca

SEQ ID NO: 1621311 - RNA, 19 nt, Artificial Sequence
  Description of Artificial Sequence: Synthetic oligonucleotide
uauugggaacacagauggg

SEQ ID NO: 1621312 - RNA, 19 nt, Artificial Sequence
  Description of Artificial Sequence: Synthetic oligonucleotide
uuaacacucuuaaggacuu

SEQ ID NO: 1621313 - RNA, 19 nt, Artificial Sequence
  Description of Artificial Sequence: Synthetic oligonucleotide
gcuccaguaauauacugag

SEQ ID NO: 1621314 - RNA, 19 nt, Artificial Sequence
  Description of Artificial Sequence: Synthetic oligonucleotide
auauacuggagacccagau

SEQ ID NO: 1621315 - RNA, 19 nt, Artificial Sequence
  Description of Artificial Sequence: Synthetic oligonucleotide
ucgucauccuccucaaaug

SEQ ID NO: 1621316 - RNA, 19 nt, Artificial Sequence
  Description of Artificial Sequence: Synthetic oligonucleotide
ugagucucuucuccgcgag

SEQ ID NO: 1621317 - RNA, 19 nt, Artificial Sequence
  Description of Artificial Sequence: Synthetic oligonucleotide
agacauacccagguuucgc

SEQ ID NO: 1621318 - RNA, 19 nt, Artificial Sequence
  Description of Artificial Sequence: Synthetic oligonucleotide
uauacuggagacccagaua

SEQ ID NO: 1621319 - RNA, 19 nt, Artificial Sequence
  Description of Artificial Sequence: Synthetic oligonucleotide
gaagcucccgcuugacggg

SEQ ID NO: 1621320 - RNA, 19 nt, Artificial Sequence
  Description of Artificial Sequence: Synthetic oligonucleotide
gagcguuccacgcgcauag

SEQ ID NO: 1621321 - RNA, 19 nt, Artificial Sequence
  Description of Artificial Sequence: Synthetic oligonucleotide
uugugacguaucaugcaca

SEQ ID NO: 1621322 - RNA, 19 nt, Artificial Sequence
  Description of Artificial Sequence: Synthetic oligonucleotide
uugcaagcugaacaagagu

SEQ ID NO: 1621323 - RNA, 19 nt, Artificial Sequence
  Description of Artificial Sequence: Synthetic oligonucleotide
ggaaaccaagaacauuagg

SEQ ID NO: 1621324 - RNA, 19 nt, Artificial Sequence
  Description of Artificial Sequence: Synthetic oligonucleotide
guugcaagcugaacaagag

SEQ ID NO: 1621325 - RNA, 19 nt, Artificial Sequence
  Description of Artificial Sequence: Synthetic oligonucleotide
uaauuuccuguuacaugca

SEQ ID NO: 1621326 - RNA, 19 nt, Artificial Sequence
  Description of Artificial Sequence: Synthetic oligonucleotide
cccacacacacauugaccc

SEQ ID NO: 1621327 - RNA, 19 nt, Artificial Sequence
  Description of Artificial Sequence: Synthetic oligonucleotide
ucugagauucuagcucagg

SEQ ID NO: 1621328 - RNA, 19 nt, Artificial Sequence
  Description of Artificial Sequence: Synthetic oligonucleotide
aaccugccacagcaucacc

SEQ ID NO: 1621329 - RNA, 19 nt, Artificial Sequence
  Description of Artificial Sequence: Synthetic oligonucleotide
uucuccgcgaguuucucgu

SEQ ID NO: 1621330 - RNA, 19 nt, Artificial Sequence
  Description of Artificial Sequence: Synthetic oligonucleotide
ucggcgaaaguccaaguuu

SEQ ID NO: 1621331 - RNA, 19 nt, Artificial Sequence
  Description of Artificial Sequence: Synthetic oligonucleotide
caucuuugucccacuuucg

SEQ ID NO: 1621332 - RNA, 19 nt, Artificial Sequence
  Description of Artificial Sequence: Synthetic oligonucleotide
cacaggcaugcacaggugg

SEQ ID NO: 1621333 - RNA, 19 nt, Artificial Sequence
  Description of Artificial Sequence: Synthetic oligonucleotide
gagaaugccucaguaacuc

SEQ ID NO: 1621334 - RNA, 19 nt, Artificial Sequence
  Description of Artificial Sequence: Synthetic oligonucleotide
uccaagaaccuguucccga

SEQ ID NO: 1621335 - RNA, 19 nt, Artificial Sequence
  Description of Artificial Sequence: Synthetic oligonucleotide
ucgcugauguuucuuucca

SEQ ID NO: 1621336 - RNA, 19 nt, Artificial Sequence
  Description of Artificial Sequence: Synthetic oligonucleotide
caaaguuagguccaguaua

SEQ ID NO: 1621337 - RNA, 19 nt, Artificial Sequence
  Description of Artificial Sequence: Synthetic oligonucleotide
ucuucuugguggaaccaaa

SEQ ID NO: 1621338 - RNA, 19 nt, Artificial Sequence
  Description of Artificial Sequence: Synthetic oligonucleotide
uggagacccagauaacccu

SEQ ID NO: 1621339 - RNA, 19 nt, Artificial Sequence
  Description of Artificial Sequence: Synthetic oligonucleotide
aaguuagguccaguauagg

SEQ ID NO: 1621340 - RNA, 19 nt, Artificial Sequence
  Description of Artificial Sequence: Synthetic oligonucleotide
uuccaagaaccuguucccg

SEQ ID NO: 1621341 - RNA, 19 nt, Artificial Sequence
  Description of Artificial Sequence: Synthetic oligonucleotide
gaagagcugaccaagggua

SEQ ID NO: 1621342 - RNA, 19 nt, Artificial Sequence
  Description of Artificial Sequence: Synthetic oligonucleotide
ggaggucuuucuuuauugg

SEQ ID NO: 1621343 - RNA, 19 nt, Artificial Sequence
  Description of Artificial Sequence: Synthetic oligonucleotide
uucucugaguuccuucauc

SEQ ID NO: 1621344 - RNA, 19 nt, Artificial Sequence
  Description of Artificial Sequence: Synthetic oligonucleotide
accacacagucacagacau

SEQ ID NO: 1621345 - RNA, 19 nt, Artificial Sequence
  Description of Artificial Sequence: Synthetic oligonucleotide
acaggcaugcacagguggc

SEQ ID NO: 1621346 - RNA, 19 nt, Artificial Sequence
  Description of Artificial Sequence: Synthetic oligonucleotide
gaguggagcguuccacgcg

SEQ ID NO: 1621347 - RNA, 19 nt, Artificial Sequence
  Description of Artificial Sequence: Synthetic oligonucleotide
cauuuaauuuccuguuaca

SEQ ID NO: 1621348 - RNA, 19 nt, Artificial Sequence
  Description of Artificial Sequence: Synthetic oligonucleotide
cacgcgcauagacauaccc

SEQ ID NO: 1621349 - RNA, 19 nt, Artificial Sequence
  Description of Artificial Sequence: Synthetic oligonucleotide
ucuagcccugcccauuaac

SEQ ID NO: 1621350 - RNA, 19 nt, Artificial Sequence
  Description of Artificial Sequence: Synthetic oligonucleotide
caaaugucaaguccuccuc

SEQ ID NO: 1621351 - RNA, 19 nt, Artificial Sequence
  Description of Artificial Sequence: Synthetic oligonucleotide
gucuugguaaugacaauug

SEQ ID NO: 1621352 - RNA, 19 nt, Artificial Sequence
  Description of Artificial Sequence: Synthetic oligonucleotide
auuucagacugugggguag

SEQ ID NO: 1621353 - RNA, 19 nt, Artificial Sequence
  Description of Artificial Sequence: Synthetic oligonucleotide
gguggaaccaaagccagag

SEQ ID NO: 1621354 - RNA, 19 nt, Artificial Sequence
  Description of Artificial Sequence: Synthetic oligonucleotide
cuccaguaauauacugagg

SEQ ID NO: 1621355 - RNA, 19 nt, Artificial Sequence
  Description of Artificial Sequence: Synthetic oligonucleotide
gacugugggguagucuugg

SEQ ID NO: 1621356 - RNA, 19 nt, Artificial Sequence
  Description of Artificial Sequence: Synthetic oligonucleotide
gaggauguucagacaagag

SEQ ID NO: 1621357 - RNA, 19 nt, Artificial Sequence
  Description of Artificial Sequence: Synthetic oligonucleotide
uguaaucccuaugccgaag

SEQ ID NO: 1621358 - RNA, 19 nt, Artificial Sequence
  Description of Artificial Sequence: Synthetic oligonucleotide
acacacauugacccaggca

SEQ ID NO: 1621359 - RNA, 19 nt, Artificial Sequence
  Description of Artificial Sequence: Synthetic oligonucleotide
aagagcugaccaaggguag

SEQ ID NO: 1621360 - RNA, 19 nt, Artificial Sequence
  Description of Artificial Sequence: Synthetic oligonucleotide
uccacgcgcauagacauac

SEQ ID NO: 1621361 - RNA, 19 nt, Artificial Sequence
  Description of Artificial Sequence: Synthetic oligonucleotide
cuuucggcgaaaguccaag

SEQ ID NO: 1621362 - RNA, 19 nt, Artificial Sequence
  Description of Artificial Sequence: Synthetic oligonucleotide
aacccuucuguugcaagcu

SEQ ID NO: 1621363 - RNA, 19 nt, Artificial Sequence
  Description of Artificial Sequence: Synthetic oligonucleotide
guauucaucuuugucccac

SEQ ID NO: 1621364 - RNA, 19 nt, Artificial Sequence
  Description of Artificial Sequence: Synthetic oligonucleotide
agucuugguaaugacaauu

SEQ ID NO: 1621365 - RNA, 19 nt, Artificial Sequence
  Description of Artificial Sequence: Synthetic oligonucleotide
ccauuuaauuuccuguuac

SEQ ID NO: 1621366 - RNA, 19 nt, Artificial Sequence
  Description of Artificial Sequence: Synthetic oligonucleotide
uucggcgaaaguccaaguu

SEQ ID NO: 1621367 - RNA, 19 nt, Artificial Sequence
  Description of Artificial Sequence: Synthetic oligonucleotide
uuugucccacuuucggcga

SEQ ID NO: 1621368 - RNA, 19 nt, Artificial Sequence
  Description of Artificial Sequence: Synthetic oligonucleotide
ugguaaugacaauugucuu

SEQ ID NO: 1621369 - RNA, 19 nt, Artificial Sequence
  Description of Artificial Sequence: Synthetic oligonucleotide
auauacugaggcugacgga

SEQ ID NO: 1621370 - RNA, 19 nt, Artificial Sequence
  Description of Artificial Sequence: Synthetic oligonucleotide
uaccugauccagaguggag

SEQ ID NO: 1621371 - RNA, 19 nt, Artificial Sequence
  Description of Artificial Sequence: Synthetic oligonucleotide
ucucucuucugugagucuc

SEQ ID NO: 1621372 - RNA, 19 nt, Artificial Sequence
  Description of Artificial Sequence: Synthetic oligonucleotide
ccuaugccgaagaagcucc

SEQ ID NO: 1621373 - RNA, 19 nt, Artificial Sequence
  Description of Artificial Sequence: Synthetic oligonucleotide
aaaacucaccagacacaag

SEQ ID NO: 1621374 - RNA, 19 nt, Artificial Sequence
  Description of Artificial Sequence: Synthetic oligonucleotide
auagaugaagagggaaaga

SEQ ID NO: 1621375 - RNA, 19 nt, Artificial Sequence
  Description of Artificial Sequence: Synthetic oligonucleotide
cagguuucgcugauguuuc

SEQ ID NO: 1621376 - RNA, 19 nt, Artificial Sequence
  Description of Artificial Sequence: Synthetic oligonucleotide
cuuugugacguaucaugca

SEQ ID NO: 1621377 - RNA, 19 nt, Artificial Sequence
  Description of Artificial Sequence: Synthetic oligonucleotide
aguauaggccaaaguuagg

SEQ ID NO: 1621378 - RNA, 19 nt, Artificial Sequence
  Description of Artificial Sequence: Synthetic oligonucleotide
auccagaguggagcguucc

SEQ ID NO: 1621379 - RNA, 19 nt, Artificial Sequence
  Description of Artificial Sequence: Synthetic oligonucleotide
uaaucccuaugccgaagaa

SEQ ID NO: 1621380 - RNA, 19 nt, Artificial Sequence
  Description of Artificial Sequence: Synthetic oligonucleotide
acucaccagacacaagcaa

SEQ ID NO: 1621381 - RNA, 19 nt, Artificial Sequence
  Description of Artificial Sequence: Synthetic oligonucleotide
agagggaggucuuucuuua

SEQ ID NO: 1621382 - RNA, 19 nt, Artificial Sequence
  Description of Artificial Sequence: Synthetic oligonucleotide
guaaucccuaugccgaaga

SEQ ID NO: 1621383 - RNA, 19 nt, Artificial Sequence
  Description of Artificial Sequence: Synthetic oligonucleotide
ccacuuucggcgaaagucc

SEQ ID NO: 1621384 - RNA, 19 nt, Artificial Sequence
  Description of Artificial Sequence: Synthetic oligonucleotide
ucaggccccucuuugugac

SEQ ID NO: 1621385 - RNA, 19 nt, Artificial Sequence
  Description of Artificial Sequence: Synthetic oligonucleotide
ccagauaacccuucuguug

SEQ ID NO: 1621386 - RNA, 19 nt, Artificial Sequence
  Description of Artificial Sequence: Synthetic oligonucleotide
accaaggguaggccagcac

SEQ ID NO: 1621387 - RNA, 19 nt, Artificial Sequence
  Description of Artificial Sequence: Synthetic oligonucleotide
cuagcccugcccauuaaca

SEQ ID NO: 1621388 - RNA, 19 nt, Artificial Sequence
  Description of Artificial Sequence: Synthetic oligonucleotide
agaaugccucaguaacucu

SEQ ID NO: 1621389 - RNA, 19 nt, Artificial Sequence
  Description of Artificial Sequence: Synthetic oligonucleotide
agcccugcccauuaacacu

SEQ ID NO: 1621390 - RNA, 19 nt, Artificial Sequence
  Description of Artificial Sequence: Synthetic oligonucleotide
agcugaccaaggguaggcc

SEQ ID NO: 1621391 - RNA, 19 nt, Artificial Sequence
  Description of Artificial Sequence: Synthetic oligonucleotide
agagcugaccaaggguagg

SEQ ID NO: 1621392 - RNA, 19 nt, Artificial Sequence
  Description of Artificial Sequence: Synthetic oligonucleotide
ccaaggguaggccagcacc

SEQ ID NO: 1621393 - RNA, 19 nt, Artificial Sequence
  Description of Artificial Sequence: Synthetic oligonucleotide
ggaaaaggaggauguucag

SEQ ID NO: 1621394 - RNA, 19 nt, Artificial Sequence
  Description of Artificial Sequence: Synthetic oligonucleotide
ucaucccauuuaauuuccu

SEQ ID NO: 1621395 - RNA, 19 nt, Artificial Sequence
  Description of Artificial Sequence: Synthetic oligonucleotide
uucuguggcuccaguaaua

SEQ ID NO: 1621396 - RNA, 19 nt, Artificial Sequence
  Description of Artificial Sequence: Synthetic oligonucleotide
uccaccuuguaaucccuau

SEQ ID NO: 1621397 - RNA, 19 nt, Artificial Sequence
  Description of Artificial Sequence: Synthetic oligonucleotide
caaagagaaugccucagua

SEQ ID NO: 1621398 - RNA, 19 nt, Artificial Sequence
  Description of Artificial Sequence: Synthetic oligonucleotide
guugaccucaaaacgcuuc

SEQ ID NO: 1621399 - RNA, 19 nt, Artificial Sequence
  Description of Artificial Sequence: Synthetic oligonucleotide
auugacccaggcagaaguc

SEQ ID NO: 1621400 - RNA, 19 nt, Artificial Sequence
  Description of Artificial Sequence: Synthetic oligonucleotide
ggaguccuucaccacacag

SEQ ID NO: 1621401 - RNA, 19 nt, Artificial Sequence
  Description of Artificial Sequence: Synthetic oligonucleotide
gacauugcaguaauagccu

SEQ ID NO: 1621402 - RNA, 19 nt, Artificial Sequence
  Description of Artificial Sequence: Synthetic oligonucleotide
agagaaugccucaguaacu

SEQ ID NO: 1621403 - RNA, 19 nt, Artificial Sequence
  Description of Artificial Sequence: Synthetic oligonucleotide
augcaggggaaguugggaa

SEQ ID NO: 1621404 - RNA, 19 nt, Artificial Sequence
  Description of Artificial Sequence: Synthetic oligonucleotide
gaugcaggggaaguuggga

SEQ ID NO: 1621405 - RNA, 19 nt, Artificial Sequence
  Description of Artificial Sequence: Synthetic oligonucleotide
aggaaaccaagaacauuag

SEQ ID NO: 1621406 - RNA, 19 nt, Artificial Sequence
  Description of Artificial Sequence: Synthetic oligonucleotide
ugauggaguccuucaccac

SEQ ID NO: 1621407 - RNA, 19 nt, Artificial Sequence
  Description of Artificial Sequence: Synthetic oligonucleotide
uuguaaucccuaugccgaa

SEQ ID NO: 1621408 - RNA, 19 nt, Artificial Sequence
  Description of Artificial Sequence: Synthetic oligonucleotide
uucuagcucaggccccucu

SEQ ID NO: 1621409 - RNA, 19 nt, Artificial Sequence
  Description of Artificial Sequence: Synthetic oligonucleotide
uuucggcgaaaguccaagu

SEQ ID NO: 1621410 - RNA, 19 nt, Artificial Sequence
  Description of Artificial Sequence: Synthetic oligonucleotide
ccugauccagaguggagcg

SEQ ID NO: 1621411 - RNA, 19 nt, Artificial Sequence
  Description of Artificial Sequence: Synthetic oligonucleotide
cccauuucagacugugggg

SEQ ID NO: 1621412 - RNA, 19 nt, Artificial Sequence
  Description of Artificial Sequence: Synthetic oligonucleotide
ugacgggcugcacugguuu

SEQ ID NO: 1621413 - RNA, 19 nt, Artificial Sequence
  Description of Artificial Sequence: Synthetic oligonucleotide
auacugaggcugacggaac

SEQ ID NO: 1621414 - RNA, 19 nt, Artificial Sequence
  Description of Artificial Sequence: Synthetic oligonucleotide
cagugaaacaagguuaaaa

SEQ ID NO: 1621415 - RNA, 19 nt, Artificial Sequence
  Description of Artificial Sequence: Synthetic oligonucleotide
ucccuaugccgaagaagcu

SEQ ID NO: 1621416 - RNA, 19 nt, Artificial Sequence
  Description of Artificial Sequence: Synthetic oligonucleotide
ugauccagaguggagcguu

SEQ ID NO: 1621417 - RNA, 19 nt, Artificial Sequence
  Description of Artificial Sequence: Synthetic oligonucleotide
agauaacccuucuguugca

SEQ ID NO: 1621418 - RNA, 19 nt, Artificial Sequence
  Description of Artificial Sequence: Synthetic oligonucleotide
uguugaccucaaaacgcuu

SEQ ID NO: 1621419 - RNA, 19 nt, Artificial Sequence
  Description of Artificial Sequence: Synthetic oligonucleotide
accuguucccgaggaagac

SEQ ID NO: 1621420 - RNA, 19 nt, Artificial Sequence
  Description of Artificial Sequence: Synthetic oligonucleotide
gcucugagauucuagcuca

SEQ ID NO: 1621421 - RNA, 19 nt, Artificial Sequence
  Description of Artificial Sequence: Synthetic oligonucleotide
uacuggagacccagauaac

SEQ ID NO: 1621422 - RNA, 19 nt, Artificial Sequence
  Description of Artificial Sequence: Synthetic oligonucleotide
agguucuuccaagaaccug

SEQ ID NO: 1621423 - RNA, 19 nt, Artificial Sequence
  Description of Artificial Sequence: Synthetic oligonucleotide
auccccaaggaagagggaa

SEQ ID NO: 1621424 - RNA, 19 nt, Artificial Sequence
  Description of Artificial Sequence: Synthetic oligonucleotide
cauugacccaggcagaagu

SEQ ID NO: 1621425 - RNA, 19 nt, Artificial Sequence
  Description of Artificial Sequence: Synthetic oligonucleotide
cuuggacuccaaguccacc

SEQ ID NO: 1621426 - RNA, 19 nt, Artificial Sequence
  Description of Artificial Sequence: Synthetic oligonucleotide
augacaccccaccccaccu

SEQ ID NO: 1621427 - RNA, 19 nt, Artificial Sequence
  Description of Artificial Sequence: Synthetic oligonucleotide
ugacggaaccugccacagc

SEQ ID NO: 1621428 - RNA, 19 nt, Artificial Sequence
  Description of Artificial Sequence: Synthetic oligonucleotide
cuaugccgaagaagcuccc

SEQ ID NO: 1621429 - RNA, 19 nt, Artificial Sequence
  Description of Artificial Sequence: Synthetic oligonucleotide
gguagucuugguaaugaca

SEQ ID NO: 1621430 - RNA, 19 nt, Artificial Sequence
  Description of Artificial Sequence: Synthetic oligonucleotide
gacauacccagguuucgcu

SEQ ID NO: 1621431 - RNA, 19 nt, Artificial Sequence
  Description of Artificial Sequence: Synthetic oligonucleotide
gcuagagagccgcugggug

SEQ ID NO: 1621432 - RNA, 19 nt, Artificial Sequence
  Description of Artificial Sequence: Synthetic oligonucleotide
cauuaaugugauccaggaa

SEQ ID NO: 1621433 - RNA, 19 nt, Artificial Sequence
  Description of Artificial Sequence: Synthetic oligonucleotide
guaauauacugaggcugac

SEQ ID NO: 1621434 - RNA, 19 nt, Artificial Sequence
  Description of Artificial Sequence: Synthetic oligonucleotide
ccauuaaugugauccagga

SEQ ID NO: 1621435 - RNA, 19 nt, Artificial Sequence
  Description of Artificial Sequence: Synthetic oligonucleotide
cacccauauacuggagacc

SEQ ID NO: 1621436 - RNA, 19 nt, Artificial Sequence
  Description of Artificial Sequence: Synthetic oligonucleotide
uacaugcaccaaggaaacc

SEQ ID NO: 1621437 - RNA, 19 nt, Artificial Sequence
  Description of Artificial Sequence: Synthetic oligonucleotide
aaacgcuucuuuaccugau

SEQ ID NO: 1621438 - RNA, 19 nt, Artificial Sequence
  Description of Artificial Sequence: Synthetic oligonucleotide
cccacuuucggcgaaaguc

SEQ ID NO: 1621439 - RNA, 19 nt, Artificial Sequence
  Description of Artificial Sequence: Synthetic oligonucleotide
ccucgacacacacucaaag

SEQ ID NO: 1621440 - RNA, 19 nt, Artificial Sequence
  Description of Artificial Sequence: Synthetic oligonucleotide
cguaucaugcacacauacc

SEQ ID NO: 1621441 - RNA, 19 nt, Artificial Sequence
  Description of Artificial Sequence: Synthetic oligonucleotide
caaacacucaucccauuua

SEQ ID NO: 1621442 - RNA, 19 nt, Artificial Sequence
  Description of Artificial Sequence: Synthetic oligonucleotide
gguucuguggcuccaguaa

SEQ ID NO: 1621443 - RNA, 19 nt, Artificial Sequence
  Description of Artificial Sequence: Synthetic oligonucleotide
cgcgcauagacauacccag

SEQ ID NO: 1621444 - RNA, 19 nt, Artificial Sequence
  Description of Artificial Sequence: Synthetic oligonucleotide
acaagaggcuggauagaug

SEQ ID NO: 1621445 - RNA, 19 nt, Artificial Sequence
  Description of Artificial Sequence: Synthetic oligonucleotide
uucccaagcuuggacucca

SEQ ID NO: 1621446 - RNA, 19 nt, Artificial Sequence
  Description of Artificial Sequence: Synthetic oligonucleotide
guuccacgcgcauagacau

SEQ ID NO: 1621447 - RNA, 19 nt, Artificial Sequence
  Description of Artificial Sequence: Synthetic oligonucleotide
uagucuugguaaugacaau

SEQ ID NO: 1621448 - RNA, 19 nt, Artificial Sequence
  Description of Artificial Sequence: Synthetic oligonucleotide
aggaggauguucagacaag

SEQ ID NO: 1621449 - RNA, 19 nt, Artificial Sequence
  Description of Artificial Sequence: Synthetic oligonucleotide
uuucagacugugggguagu

SEQ ID NO: 1621450 - RNA, 19 nt, Artificial Sequence
  Description of Artificial Sequence: Synthetic oligonucleotide
cuguugcaagcugaacaag

SEQ ID NO: 1621451 - RNA, 19 nt, Artificial Sequence
  Description of Artificial Sequence: Synthetic oligonucleotide
cucaguaacucuucuuggu

SEQ ID NO: 1621452 - RNA, 19 nt, Artificial Sequence
  Description of Artificial Sequence: Synthetic oligonucleotide
agagccgcuggguggggug

SEQ ID NO: 1621453 - RNA, 19 nt, Artificial Sequence
  Description of Artificial Sequence: Synthetic oligonucleotide
aggggaaguugggaaagca

SEQ ID NO: 1621454 - RNA, 19 nt, Artificial Sequence
  Description of Artificial Sequence: Synthetic oligonucleotide
uaaugugauccaggaaguu

SEQ ID NO: 1621455 - RNA, 19 nt, Artificial Sequence
  Description of Artificial Sequence: Synthetic oligonucleotide
ugaccaaggguaggccagc

SEQ ID NO: 1621456 - RNA, 19 nt, Artificial Sequence
  Description of Artificial Sequence: Synthetic oligonucleotide
ggauagaugaagagggaaa

SEQ ID NO: 1621457 - RNA, 19 nt, Artificial Sequence
  Description of Artificial Sequence: Synthetic oligonucleotide
aaggguaggccagcaccca

SEQ ID NO: 1621458 - RNA, 19 nt, Artificial Sequence
  Description of Artificial Sequence: Synthetic oligonucleotide
gaagaagcucccgcuugac

SEQ ID NO: 1621459 - RNA, 19 nt, Artificial Sequence
  Description of Artificial Sequence: Synthetic oligonucleotide
cacucaucccauuuaauuu

SEQ ID NO: 1621460 - RNA, 19 nt, Artificial Sequence
  Description of Artificial Sequence: Synthetic oligonucleotide
agaaccuguucccgaggaa

SEQ ID NO: 1621461 - RNA, 19 nt, Artificial Sequence
  Description of Artificial Sequence: Synthetic oligonucleotide
ucagugaaacaagguuaaa

SEQ ID NO: 1621462 - RNA, 19 nt, Artificial Sequence
  Description of Artificial Sequence: Synthetic oligonucleotide
cuucauccccaaggaagag

SEQ ID NO: 1621463 - RNA, 19 nt, Artificial Sequence
  Description of Artificial Sequence: Synthetic oligonucleotide
ggcagcaaugcucugagau

SEQ ID NO: 1621464 - RNA, 19 nt, Artificial Sequence
  Description of Artificial Sequence: Synthetic oligonucleotide
ucccacuuucggcgaaagu

SEQ ID NO: 1621465 - RNA, 19 nt, Artificial Sequence
  Description of Artificial Sequence: Synthetic oligonucleotide
acugaggcugacggaaccu

SEQ ID NO: 1621466 - RNA, 19 nt, Artificial Sequence
  Description of Artificial Sequence: Synthetic oligonucleotide
ggaacacagaugggcagag

SEQ ID NO: 1621467 - RNA, 19 nt, Artificial Sequence
  Description of Artificial Sequence: Synthetic oligonucleotide
auccucagugaaacaaggu

SEQ ID NO: 1621468 - RNA, 19 nt, Artificial Sequence
  Description of Artificial Sequence: Synthetic oligonucleotide
acgggcugcacugguuuuc

SEQ ID NO: 1621469 - RNA, 19 nt, Artificial Sequence
  Description of Artificial Sequence: Synthetic oligonucleotide
gaccucaaaacgcuucuuu

SEQ ID NO: 1621470 - RNA, 19 nt, Artificial Sequence
  Description of Artificial Sequence: Synthetic oligonucleotide
gccaaagagaaugccucag

SEQ ID NO: 1621471 - RNA, 19 nt, Artificial Sequence
  Description of Artificial Sequence: Synthetic oligonucleotide
cacuuucggcgaaagucca

SEQ ID NO: 1621472 - RNA, 19 nt, Artificial Sequence
  Description of Artificial Sequence: Synthetic oligonucleotide
gugagucucuucuccgcga

SEQ ID NO: 1621473 - RNA, 19 nt, Artificial Sequence
  Description of Artificial Sequence: Synthetic oligonucleotide
ggcuccaguaauauacuga

SEQ ID NO: 1621474 - RNA, 19 nt, Artificial Sequence
  Description of Artificial Sequence: Synthetic oligonucleotide
ggcaugcacagguggcuag

SEQ ID NO: 1621475 - RNA, 19 nt, Artificial Sequence
  Description of Artificial Sequence: Synthetic oligonucleotide
ggaggauguucagacaaga

SEQ ID NO: 1621476 - RNA, 19 nt, Artificial Sequence
  Description of Artificial Sequence: Synthetic oligonucleotide
cugcccauuaacacucuua

SEQ ID NO: 1621477 - RNA, 19 nt, Artificial Sequence
  Description of Artificial Sequence: Synthetic oligonucleotide
aaguuaggccaaagagaau

SEQ ID NO: 1621478 - RNA, 19 nt, Artificial Sequence
  Description of Artificial Sequence: Synthetic oligonucleotide
auacccagguuucgcugau

SEQ ID NO: 1621479 - RNA, 19 nt, Artificial Sequence
  Description of Artificial Sequence: Synthetic oligonucleotide
cuguuacaugcaccaagga

SEQ ID NO: 1621480 - RNA, 19 nt, Artificial Sequence
  Description of Artificial Sequence: Synthetic oligonucleotide
caaagagggaggucuuucu

SEQ ID NO: 1621481 - RNA, 19 nt, Artificial Sequence
  Description of Artificial Sequence: Synthetic oligonucleotide
uagguccaguauaggccaa

SEQ ID NO: 1621482 - RNA, 19 nt, Artificial Sequence
  Description of Artificial Sequence: Synthetic oligonucleotide
gcaggggaaguugggaaag

SEQ ID NO: 1621483 - RNA, 19 nt, Artificial Sequence
  Description of Artificial Sequence: Synthetic oligonucleotide
uccgcgaguuucucguauu

SEQ ID NO: 1621484 - RNA, 19 nt, Artificial Sequence
  Description of Artificial Sequence: Synthetic oligonucleotide
uugacgggcugcacugguu

SEQ ID NO: 1621485 - RNA, 19 nt, Artificial Sequence
  Description of Artificial Sequence: Synthetic oligonucleotide
uugucccacuuucggcgaa

SEQ ID NO: 1621486 - RNA, 19 nt, Artificial Sequence
  Description of Artificial Sequence: Synthetic oligonucleotide
aagcaacaccaaacacuca

SEQ ID NO: 1621487 - RNA, 19 nt, Artificial Sequence
  Description of Artificial Sequence: Synthetic oligonucleotide
caccucgacacacacucaa

SEQ ID NO: 1621488 - RNA, 19 nt, Artificial Sequence
  Description of Artificial Sequence: Synthetic oligonucleotide
uguucccgaggaagacaaa

SEQ ID NO: 1621489 - RNA, 19 nt, Artificial Sequence
  Description of Artificial Sequence: Synthetic oligonucleotide
gcugaccaaggguaggcca

SEQ ID NO: 1621490 - RNA, 19 nt, Artificial Sequence
  Description of Artificial Sequence: Synthetic oligonucleotide
gguccaguauaggccaaag

SEQ ID NO: 1621491 - RNA, 19 nt, Artificial Sequence
  Description of Artificial Sequence: Synthetic oligonucleotide
gaaugccucaguaacucuu

SEQ ID NO: 1621492 - RNA, 19 nt, Artificial Sequence
  Description of Artificial Sequence: Synthetic oligonucleotide
guuucgcugauguuucuuu

SEQ ID NO: 1621493 - RNA, 19 nt, Artificial Sequence
  Description of Artificial Sequence: Synthetic oligonucleotide
agguuucgcugauguuucu

SEQ ID NO: 1621494 - RNA, 19 nt, Artificial Sequence
  Description of Artificial Sequence: Synthetic oligonucleotide
caggggaaguugggaaagc

SEQ ID NO: 1621495 - RNA, 19 nt, Artificial Sequence
  Description of Artificial Sequence: Synthetic oligonucleotide
ggguagucuugguaaugac

SEQ ID NO: 1621496 - RNA, 19 nt, Artificial Sequence
  Description of Artificial Sequence: Synthetic oligonucleotide
uggagcguuccacgcgcau

SEQ ID NO: 1621497 - RNA, 19 nt, Artificial Sequence
  Description of Artificial Sequence: Synthetic oligonucleotide
gggguagucuugguaauga

SEQ ID NO: 1621498 - RNA, 19 nt, Artificial Sequence
  Description of Artificial Sequence: Synthetic oligonucleotide
aggguaggccagcacccau

SEQ ID NO: 1621499 - RNA, 19 nt, Artificial Sequence
  Description of Artificial Sequence: Synthetic oligonucleotide
uuccuguuacaugcaccaa

SEQ ID NO: 1621500 - RNA, 19 nt, Artificial Sequence
  Description of Artificial Sequence: Synthetic oligonucleotide
gcucaggccccucuuugug

SEQ ID NO: 1621501 - RNA, 19 nt, Artificial Sequence
  Description of Artificial Sequence: Synthetic oligonucleotide
ggccaaagagaaugccuca

SEQ ID NO: 1621502 - RNA, 19 nt, Artificial Sequence
  Description of Artificial Sequence: Synthetic oligonucleotide
uuccacgcgcauagacaua

SEQ ID NO: 1621503 - RNA, 19 nt, Artificial Sequence
  Description of Artificial Sequence: Synthetic oligonucleotide
gucccacuuucggcgaaag

SEQ ID NO: 1621504 - RNA, 19 nt, Artificial Sequence
  Description of Artificial Sequence: Synthetic oligonucleotide
gcguuccacgcgcauagac

SEQ ID NO: 1621505 - RNA, 19 nt, Artificial Sequence
  Description of Artificial Sequence: Synthetic oligonucleotide
ccaccuuguaaucccuaug

SEQ ID NO: 1621506 - RNA, 19 nt, Artificial Sequence
  Description of Artificial Sequence: Synthetic oligonucleotide
ugucccacuuucggcgaaa

SEQ ID NO: 1621507 - RNA, 19 nt, Artificial Sequence
  Description of Artificial Sequence: Synthetic oligonucleotide
gacguaucaugcacacaua

SEQ ID NO: 1621508 - RNA, 19 nt, Artificial Sequence
  Description of Artificial Sequence: Synthetic oligonucleotide
gcgcauagacauacccagg

SEQ ID NO: 1621509 - RNA, 19 nt, Artificial Sequence
  Description of Artificial Sequence: Synthetic oligonucleotide
caguaauagccucccauuu

SEQ ID NO: 1621510 - RNA, 19 nt, Artificial Sequence
  Description of Artificial Sequence: Synthetic oligonucleotide
uacccagguuucgcugaug

SEQ ID NO: 1621511 - RNA, 19 nt, Artificial Sequence
  Description of Artificial Sequence: Synthetic oligonucleotide
auuaggccccagggcagca

SEQ ID NO: 1621512 - RNA, 19 nt, Artificial Sequence
  Description of Artificial Sequence: Synthetic oligonucleotide
gggaacacagaugggcaga

SEQ ID NO: 1621513 - RNA, 19 nt, Artificial Sequence
  Description of Artificial Sequence: Synthetic oligonucleotide
ucuccgcgaguuucucgua

SEQ ID NO: 1621514 - RNA, 19 nt, Artificial Sequence
  Description of Artificial Sequence: Synthetic oligonucleotide
gcacagguggcuagagagc

SEQ ID NO: 1621515 - RNA, 19 nt, Artificial Sequence
  Description of Artificial Sequence: Synthetic oligonucleotide
caccccaccccaccucgac

SEQ ID NO: 1621516 - RNA, 19 nt, Artificial Sequence
  Description of Artificial Sequence: Synthetic oligonucleotide
aacccacccucuagcccug

SEQ ID NO: 1621517 - RNA, 19 nt, Artificial Sequence
  Description of Artificial Sequence: Synthetic oligonucleotide
ucccaagcuuggacuccaa

SEQ ID NO: 1621518 - RNA, 19 nt, Artificial Sequence
  Description of Artificial Sequence: Synthetic oligonucleotide
gcaguaauagccucccauu

SEQ ID NO: 1621519 - RNA, 19 nt, Artificial Sequence
  Description of Artificial Sequence: Synthetic oligonucleotide
gaccaaggguaggccagca

SEQ ID NO: 1621520 - RNA, 19 nt, Artificial Sequence
  Description of Artificial Sequence: Synthetic oligonucleotide
ccccaccccaccucgacac

SEQ ID NO: 1621521 - RNA, 19 nt, Artificial Sequence
  Description of Artificial Sequence: Synthetic oligonucleotide
caccaaacacucaucccau

SEQ ID NO: 1621522 - RNA, 19 nt, Artificial Sequence
  Description of Artificial Sequence: Synthetic oligonucleotide
cccuaugccgaagaagcuc

SEQ ID NO: 1621523 - RNA, 19 nt, Artificial Sequence
  Description of Artificial Sequence: Synthetic oligonucleotide
ccaguaauauacugaggcu

SEQ ID NO: 1621524 - RNA, 19 nt, Artificial Sequence
  Description of Artificial Sequence: Synthetic oligonucleotide
cuuguaugcuuuagccuuu

SEQ ID NO: 1621525 - RNA, 19 nt, Artificial Sequence
  Description of Artificial Sequence: Synthetic oligonucleotide
caagaacauuaggccccag

SEQ ID NO: 1621526 - RNA, 19 nt, Artificial Sequence
  Description of Artificial Sequence: Synthetic oligonucleotide
ggccaaaguuaggccaaag

SEQ ID NO: 1621527 - RNA, 19 nt, Artificial Sequence
  Description of Artificial Sequence: Synthetic oligonucleotide
gugacguaucaugcacaca

SEQ ID NO: 1621528 - RNA, 19 nt, Artificial Sequence
  Description of Artificial Sequence: Synthetic oligonucleotide
gcgaguuucucguauucau

SEQ ID NO: 1621529 - RNA, 19 nt, Artificial Sequence
  Description of Artificial Sequence: Synthetic oligonucleotide
acuuucggcgaaaguccaa

SEQ ID NO: 1621530 - RNA, 19 nt, Artificial Sequence
  Description of Artificial Sequence: Synthetic oligonucleotide
agguccaguauaggccaaa

SEQ ID NO: 1621531 - RNA, 19 nt, Artificial Sequence
  Description of Artificial Sequence: Synthetic oligonucleotide
accucgacacacacucaaa

SEQ ID NO: 1621532 - RNA, 19 nt, Artificial Sequence
  Description of Artificial Sequence: Synthetic oligonucleotide
cauccccaaggaagaggga

SEQ ID NO: 1621533 - RNA, 19 nt, Artificial Sequence
  Description of Artificial Sequence: Synthetic oligonucleotide
aggcaugcacagguggcua

SEQ ID NO: 1621534 - RNA, 19 nt, Artificial Sequence
  Description of Artificial Sequence: Synthetic oligonucleotide
cgcuugacgggcugcacug

SEQ ID NO: 1621535 - RNA, 19 nt, Artificial Sequence
  Description of Artificial Sequence: Synthetic oligonucleotide
gcuugacgggcugcacugg

SEQ ID NO: 1621536 - RNA, 19 nt, Artificial Sequence
  Description of Artificial Sequence: Synthetic oligonucleotide
cuugacgggcugcacuggu

SEQ ID NO: 1621537 - RNA, 19 nt, Artificial Sequence
  Description of Artificial Sequence: Synthetic oligonucleotide
cguuccacgcgcauagaca

SEQ ID NO: 1621538 - RNA, 19 nt, Artificial Sequence
  Description of Artificial Sequence: Synthetic oligonucleotide
gguaggccagcacccauau

SEQ ID NO: 1621539 - RNA, 19 nt, Artificial Sequence
  Description of Artificial Sequence: Synthetic oligonucleotide
ccauuucagacuguggggu

SEQ ID NO: 1621540 - RNA, 19 nt, Artificial Sequence
  Description of Artificial Sequence: Synthetic oligonucleotide
aggccaaaguuaggccaaa
